United States Patent Application Publication US 2007/0042381 A1 - sequence listing, part 24

SEQ ID NO: 1043400 - RNA, 22 nt, Human
ucagugucuugaccugggugug

SEQ ID NO: 1043401 - RNA, 22 nt, Human
agccccaguaagggagggccug

SEQ ID NO: 1043402 - RNA, 22 nt, Human
auaucuuuuagagcaagcuugu

SEQ ID NO: 1043403 - RNA, 22 nt, Human
agacuuugagcucuuagagaag

SEQ ID NO: 1043404 - RNA, 22 nt, Human
ugggagcugggguuggacgucu

SEQ ID NO: 1043405 - RNA, 22 nt, Human
caaagaugcugauguuggauca

SEQ ID NO: 1043406 - RNA, 22 nt, Human
gccuggagagcacugugcgcuu

SEQ ID NO: 1043407 - RNA, 22 nt, Human
aguauguauuuuauacuuacag

SEQ ID NO: 1043408 - RNA, 22 nt, Human
ccagaggcauguucaaagcaau

SEQ ID NO: 1043409 - RNA, 22 nt, Human
acuuucuaggucucaguccuuu

SEQ ID NO: 1043410 - RNA, 23 nt, Human
ccagcuccgugagccucgggcuc

SEQ ID NO: 1043411 - RNA, 22 nt, Human
uacacuuuuuacuacagauucu

SEQ ID NO: 1043412 - RNA, 22 nt, Human
uaggggugaggccaggcaucag

SEQ ID NO: 1043413 - RNA, 22 nt, Human
gagagcuggguucaaguagcug

SEQ ID NO: 1043414 - RNA, 22 nt, Human
aauuaacagagggcuuauuacu

SEQ ID NO: 1043415 - RNA, 22 nt, Human
uaacagaaauaguaggugaggg

SEQ ID NO: 1043416 - RNA, 23 nt, Human
ucugggcaccuuguugacaugau

SEQ ID NO: 1043417 - RNA, 22 nt, Human
aagaagaugguuaacuuucagu

SEQ ID NO: 1043418 - RNA, 22 nt, Human
agagaacaaauuaaaggugguu

SEQ ID NO: 1043419 - RNA, 20 nt, Human
ggucccugcccucugucauc

SEQ ID NO: 1043420 - RNA, 20 nt, Human
gccuguccugagugucaugg

SEQ ID NO: 1043421 - RNA, 22 nt, Human
gagagcugucagcguagcaccg

SEQ ID NO: 1043422 - RNA, 22 nt, Human
aacaucuuuuuguuugcugaaa

SEQ ID NO: 1043423 - RNA, 22 nt, Human
uaaaugugagugaugcggugaa

SEQ ID NO: 1043424 - RNA, 22 nt, Human
uguguauucagcaagcgaaaca

SEQ ID NO: 1043425 - RNA, 22 nt, Human
acaggugggcuuaagagucggc

SEQ ID NO: 1043426 - RNA, 22 nt, Human
guggccugggguuuguucugag

SEQ ID NO: 1043427 - RNA, 20 nt, Human
gcugcucuccacggucugca

SEQ ID NO: 1043428 - RNA, 22 nt, Human
aagagcuggaagugaagauaac

SEQ ID NO: 1043429 - RNA, 22 nt, Human
uaugcauagguaucuauacuca

SEQ ID NO: 1043430 - RNA, 22 nt, Human
gcuggccacauugugccguccu

SEQ ID NO: 1043431 - RNA, 22 nt, Human
gagacagcagggccagggccug

SEQ ID NO: 1043432 - RNA, 22 nt, Human
ucauacauaacuuguacaguga

SEQ ID NO: 1043433 - RNA, 22 nt, Human
ugucaccaugccagcuucugcc

SEQ ID NO: 1043434 - RNA, 22 nt, Human
augugugccccuuuuacucuuu

SEQ ID NO: 1043435 - RNA, 22 nt, Human
ugcccaggguggagugcagcgg

SEQ ID NO: 1043436 - RNA, 22 nt, Human
gcuggccaggugcuuugguucu

SEQ ID NO: 1043437 - RNA, 22 nt, Human
ggcuucugaaaucucugugcgu

SEQ ID NO: 1043438 - RNA, 22 nt, Human
acagccagaggagccaggcugg

SEQ ID NO: 1043439 - RNA, 22 nt, Human
gggugcaggcagcccaggcagg

SEQ ID NO: 1043440 - RNA, 22 nt, Human
ugagcuucaaaauaugugaauc

SEQ ID NO: 1043441 - RNA, 22 nt, Human
cuugucugugucggauaaaacu

SEQ ID NO: 1043442 - RNA, 22 nt, Human
ucuggagcaacagagcaggaca

SEQ ID NO: 1043443 - RNA, 22 nt, Human
ugcuggcccaugaagacgcagu

SEQ ID NO: 1043444 - RNA, 22 nt, Human
aguucuuuugugaacauaugcu

SEQ ID NO: 1043445 - RNA, 22 nt, Human
caggagcucucaucgucagggc

SEQ ID NO: 1043446 - RNA, 22 nt, Human
ggcuucugguaaagaccacacc

SEQ ID NO: 1043447 - RNA, 22 nt, Human
ggcccuguccuggcugucuccg

SEQ ID NO: 1043448 - RNA, 22 nt, Human
gugccugcugcagagucgcugu

SEQ ID NO: 1043449 - RNA, 22 nt, Human
ccccagcugcauacuugccaag

SEQ ID NO: 1043450 - RNA, 22 nt, Human
uccacagaauguaagauccaca

SEQ ID NO: 1043451 - RNA, 22 nt, Human
cagaggcugaugugggaugggc

SEQ ID NO: 1043452 - RNA, 22 nt, Human
agcucccugagaugccacagca

SEQ ID NO: 1043453 - RNA, 22 nt, Human
gagggguguggagccaucaguu

SEQ ID NO: 1043454 - RNA, 22 nt, Human
gccuuugccugcgacguggcug

SEQ ID NO: 1043455 - RNA, 22 nt, Human
cagcaguggaacuacccaggga

SEQ ID NO: 1043456 - RNA, 22 nt, Human
cagccugcagggcugccuguug

SEQ ID NO: 1043457 - RNA, 22 nt, Human
aggagagagcugagcuuugcug

SEQ ID NO: 1043458 - RNA, 22 nt, Human
cagaaaaccugacucuagaacu

SEQ ID NO: 1043459 - RNA, 22 nt, Human
gcccccucuuuggagccagcca

SEQ ID NO: 1043460 - RNA, 17 nt, Human
agguggcugcugcgccu

SEQ ID NO: 1043461 - RNA, 22 nt, Human
ucucuggaguauaaccagggau

SEQ ID NO: 1043462 - RNA, 21 nt, Human
ccacaggggcuccccugucag

SEQ ID NO: 1043463 - RNA, 22 nt, Human
ugagccugaguucaaggcugca

SEQ ID NO: 1043464 - RNA, 22 nt, Human
acacugaauauacaaugaauau

SEQ ID NO: 1043465 - RNA, 19 nt, Human
gcacugaagaguuggucac

SEQ ID NO: 1043466 - RNA, 22 nt, Human
ugaaagcucugucaucauuccu

SEQ ID NO: 1043467 - RNA, 22 nt, Human
uggagcccagggugagaaggag

SEQ ID NO: 1043468 - RNA, 22 nt, Human
ccugagccugaguggugcaggg

SEQ ID NO: 1043469 - RNA, 22 nt, Human
ggaguucacugugcaggcucug

SEQ ID NO: 1043470 - RNA, 22 nt, Human
uaaaugcaaugugcuuuaccag

SEQ ID NO: 1043471 - RNA, 19 nt, Human
cagaguccuugaccagucc

SEQ ID NO: 1043472 - RNA, 20 nt, Human
ugacucugcaaccgucucuc

SEQ ID NO: 1043473 - RNA, 22 nt, Human
gggacuggaguagaggccggug

SEQ ID NO: 1043474 - RNA, 22 nt, Human
uaucuauuccaaauaucagcgu

SEQ ID NO: 1043475 - RNA, 22 nt, Human
ugaggggagaagcagcagccug

SEQ ID NO: 1043476 - RNA, 21 nt, Human
gcagacugcccugcugucccc

SEQ ID NO: 1043477 - RNA, 22 nt, Human
gaaaugcagauucugauucugu

SEQ ID NO: 1043478 - RNA, 20 nt, Human
agagaauucccuuuggagau

SEQ ID NO: 1043479 - RNA, 22 nt, Human
agcagccaauuggaggaugaag

SEQ ID NO: 1043480 - RNA, 22 nt, Human
gcagcugaauguccauugcugc

SEQ ID NO: 1043481 - RNA, 22 nt, Human
uggacucagugcugccauuccc

SEQ ID NO: 1043482 - RNA, 22 nt, Human
ucagggcauacucuucaagguc

SEQ ID NO: 1043483 - RNA, 23 nt, Human
uccuccuuuugcuugugcuuccc

SEQ ID NO: 1043484 - RNA, 20 nt, Human
aaaauauguauaacucuucu

SEQ ID NO: 1043485 - RNA, 22 nt, Human
agaaaguucugugaguuguuca

SEQ ID NO: 1043486 - RNA, 20 nt, Human
uccugggguaagccaugguc

SEQ ID NO: 1043487 - RNA, 22 nt, Human
acaugcaugucuaugggcaggu

SEQ ID NO: 1043488 - RNA, 22 nt, Human
uccugagauaaaucucauguga

SEQ ID NO: 1043489 - RNA, 22 nt, Human
agaagcugacagaugcagcagg

SEQ ID NO: 1043490 - RNA, 22 nt, Human
cauggcagaaaccugagcugcu

SEQ ID NO: 1043491 - RNA, 22 nt, Human
caggaggccaacugugggacuu

SEQ ID NO: 1043492 - RNA, 22 nt, Human
gccugagagacccauggggcaa

SEQ ID NO: 1043493 - RNA, 22 nt, Human
cucaggauugugccuagggaga

SEQ ID NO: 1043494 - RNA, 22 nt, Human
uguggcuguguccaccugcugc

SEQ ID NO: 1043495 - RNA, 22 nt, Human
acauugaugaaaagguaucauu

SEQ ID NO: 1043496 - RNA, 19 nt, Human
aggguccagggagcggcuc

SEQ ID NO: 1043497 - RNA, 22 nt, Human
gggagggacacaaagaguuccc

SEQ ID NO: 1043498 - RNA, 22 nt, Human
gugugccaggaacuggcugcug

SEQ ID NO: 1043499 - RNA, 22 nt, Human
agcaggcuuucaagagucuucu

SEQ ID NO: 1043500 - RNA, 21 nt, Human
ucagaacaauuccaugccucc

SEQ ID NO: 1043501 - RNA, 22 nt, Human
gcugucaggaacaugccuuggu

SEQ ID NO: 1043502 - RNA, 22 nt, Human
uuugggcaguagauguaucacu

SEQ ID NO: 1043503 - RNA, 22 nt, Human
ccccagccuuccaugggaauug

SEQ ID NO: 1043504 - RNA, 22 nt, Human
ucaaggaggugcuuggcuucac

SEQ ID NO: 1043505 - RNA, 22 nt, Human
uaaaugcaguacaaauuguucu

SEQ ID NO: 1043506 - RNA, 22 nt, Human
auaauuuacuaagcucuaccuu

SEQ ID NO: 1043507 - RNA, 22 nt, Human
ucuggcucucucaucacccaau

SEQ ID NO: 1043508 - RNA, 22 nt, Human
cuggggcucacuuuggucaggc

SEQ ID NO: 1043509 - RNA, 22 nt, Human
ccacugaaggucaacauagagc

SEQ ID NO: 1043510 - RNA, 22 nt, Human
acugaaggaagcgggcaggggu

SEQ ID NO: 1043511 - RNA, 22 nt, Human
ggcucugggucuguggggagcg

SEQ ID NO: 1043512 - RNA, 22 nt, Human
agcugcuccuuuccugcaggcg

SEQ ID NO: 1043513 - RNA, 22 nt, Human
gggcucugggaugcucuuagag

SEQ ID NO: 1043514 - RNA, 22 nt, Human
ugguuugcccacucgagugauu

SEQ ID NO: 1043515 - RNA, 22 nt, Human
aaagauuugaaauuaggcauca

SEQ ID NO: 1043516 - RNA, 22 nt, Human
uuuuaaucaugcuucuaugucc

SEQ ID NO: 1043517 - RNA, 22 nt, Human
cagcugaacauguagagcaucu

SEQ ID NO: 1043518 - RNA, 22 nt, Human
gagauguacaauguguauuaau

SEQ ID NO: 1043519 - RNA, 22 nt, Human
aauggcugggaguguauuuugg

SEQ ID NO: 1043520 - RNA, 22 nt, Human
uggccagguugggcuuugcagc

SEQ ID NO: 1043521 - RNA, 22 nt, Human
aaagauuuaagaauaauuugug

SEQ ID NO: 1043522 - RNA, 22 nt, Human
aggcuucuacguggucccaggg

SEQ ID NO: 1043523 - RNA, 22 nt, Human
agccaggggauucaucagggac

SEQ ID NO: 1043524 - RNA, 23 nt, Human
gcagacagagcagacuaagacaa

SEQ ID NO: 1043525 - RNA, 22 nt, Human
ucuuuacacaagacaagaauaa

SEQ ID NO: 1043526 - RNA, 22 nt, Human
uggcugcuuguuuuagugaggc

SEQ ID NO: 1043527 - RNA, 22 nt, Human
gcagggccagguacaagaagca

SEQ ID NO: 1043528 - RNA, 22 nt, Human
ucugccuggaugauggcagggc

SEQ ID NO: 1043529 - RNA, 22 nt, Human
aaacaugagcaucucuucaagc

SEQ ID NO: 1043530 - RNA, 22 nt, Human
cugggcugcgggcgccccucca

SEQ ID NO: 1043531 - RNA, 22 nt, Human
cacuguguaagaagaugggcuu

SEQ ID NO: 1043532 - RNA, 22 nt, Human
aaauauguaagauuagcacuag

SEQ ID NO: 1043533 - RNA, 22 nt, Human
cuggagccuucaccaggggaaa

SEQ ID NO: 1043534 - RNA, 22 nt, Human
cagcccagcagggucuggcccu

SEQ ID NO: 1043535 - RNA, 22 nt, Human
agggaugguggagguugcaagu

SEQ ID NO: 1043536 - RNA, 22 nt, Human
ugaggcaguucuuacuuguauu

SEQ ID NO: 1043537 - RNA, 22 nt, Human
uccucuggggcgugguccugga

SEQ ID NO: 1043538 - RNA, 20 nt, Human
acagaaagagagaaugucag

SEQ ID NO: 1043539 - RNA, 22 nt, Human
ucaacacucuuuggcacaguua

SEQ ID NO: 1043540 - RNA, 22 nt, Human
ccaggcugugguuuagauagag

SEQ ID NO: 1043541 - RNA, 22 nt, Human
ucccagcccagauuugugugac

SEQ ID NO: 1043542 - RNA, 22 nt, Human
caggcacugugcaagggucucg

SEQ ID NO: 1043543 - RNA, 22 nt, Human
ugcaccugagaggucucugagg

SEQ ID NO: 1043544 - RNA, 22 nt, Human
ugggaugggaucucgcuguguc

SEQ ID NO: 1043545 - RNA, 22 nt, Human
uggccugacugucaggcuguau

SEQ ID NO: 1043546 - RNA, 22 nt, Human
acauuucuaguuguucaucucc

SEQ ID NO: 1043547 - RNA, 22 nt, Human
gaaugcacacgugugugcaugc

SEQ ID NO: 1043548 - RNA, 22 nt, Human
gcagcagaguuugggagauggu

SEQ ID NO: 1043549 - RNA, 22 nt, Human
uugugucccccuuugagagcca

SEQ ID NO: 1043550 - RNA, 22 nt, Human
gcagagccaggagagacccuug

SEQ ID NO: 1043551 - RNA, 22 nt, Human
gcagagcuucuguccuucagga

SEQ ID NO: 1043552 - RNA, 22 nt, Human
caauaugcaagcuauuaaguau

SEQ ID NO: 1043553 - RNA, 22 nt, Human
acuuugugcccaacagaaagaa

SEQ ID NO: 1043554 - RNA, 22 nt, Human
ucaggcugagaaaaucuggacc

SEQ ID NO: 1043555 - RNA, 22 nt, Human
cugggcuguaauguggcacuga

SEQ ID NO: 1043556 - RNA, 22 nt, Human
cagagcugauuggauccagaga

SEQ ID NO: 1043557 - RNA, 22 nt, Human
uaaaugugucuauggacccgcc

SEQ ID NO: 1043558 - RNA, 22 nt, Human
gaagcagccacggggagacaga

SEQ ID NO: 1043559 - RNA, 22 nt, Human
uauuuugacuauuaaaccaaca

SEQ ID NO: 1043560 - RNA, 22 nt, Human
agugucugaaccaccggggcau

SEQ ID NO: 1043561 - RNA, 23 nt, Human
ucagcugcuuccuccugccugcc

SEQ ID NO: 1043562 - RNA, 22 nt, Human
cccuccccacaaagcuucacac

SEQ ID NO: 1043563 - RNA, 22 nt, Human
ggagagcagggaggcugcucug

SEQ ID NO: 1043564 - RNA, 22 nt, Human
gccagcuggagugagagugggc

SEQ ID NO: 1043565 - RNA, 19 nt, Human
agccagggugagaaggagc

SEQ ID NO: 1043566 - RNA, 22 nt, Human
ggguguccugugccaagcuggg

SEQ ID NO: 1043567 - RNA, 22 nt, Human
uccagggaagagcagaggcuac

SEQ ID NO: 1043568 - RNA, 22 nt, Human
cccuggaggaccccaauguggc

SEQ ID NO: 1043569 - RNA, 22 nt, Human
uugaagcagcucaggaggcuua

SEQ ID NO: 1043570 - RNA, 22 nt, Human
uuucacaucagagguagauuag

SEQ ID NO: 1043571 - RNA, 22 nt, Human
agaaacuucagcuauucuuuug

SEQ ID NO: 1043572 - RNA, 22 nt, Human
uaaagguagugugacauauugu

SEQ ID NO: 1043573 - RNA, 22 nt, Human
ccucagggucugaggagaccgu

SEQ ID NO: 1043574 - RNA, 18 nt, Human
acccucuggcuucugagc

SEQ ID NO: 1043575 - RNA, 22 nt, Human
gcagugcuaaguagcuggccca

SEQ ID NO: 1043576 - RNA, 22 nt, Human
ccaccagcagugugcaaggauu

SEQ ID NO: 1043577 - RNA, 22 nt, Human
agcugagcacauucaaacaggu

SEQ ID NO: 1043578 - RNA, 20 nt, Human
aagggcagagggaacagacu

SEQ ID NO: 1043579 - RNA, 22 nt, Human
agcagcugagaugguaagauuc

SEQ ID NO: 1043580 - RNA, 22 nt, Human
aagacagaccacgugacagggc

SEQ ID NO: 1043581 - RNA, 22 nt, Human
ggcucaggcuggagugcagugg

SEQ ID NO: 1043582 - RNA, 22 nt, Human
gacaaaggaucagagguuggga

SEQ ID NO: 1043583 - RNA, 22 nt, Human
uauuggugggggcagagagaga

SEQ ID NO: 1043584 - RNA, 22 nt, Human
ggagccaggggaccuucacaga

SEQ ID NO: 1043585 - RNA, 18 nt, Human
agcugcagaccaggaggu

SEQ ID NO: 1043586 - RNA, 22 nt, Human
gugcuuucugcaugguuccuac

SEQ ID NO: 1043587 - RNA, 22 nt, Human
gcugccucccccauggcuggaa

SEQ ID NO: 1043588 - RNA, 21 nt, Human
agaugcugugcuccaggagca

SEQ ID NO: 1043589 - RNA, 23 nt, Human
gcagagcugcccuauugccuugg

SEQ ID NO: 1043590 - RNA, 22 nt, Human
auggggcuguucucugcccugc

SEQ ID NO: 1043591 - RNA, 22 nt, Human
uggggguguccuggugcacaca

SEQ ID NO: 1043592 - RNA, 15 nt, Human
aggcacugugggacc

SEQ ID NO: 1043593 - RNA, 22 nt, Human
agagcugaauuuggguggugga

SEQ ID NO: 1043594 - RNA, 22 nt, Human
uguacaauagcuauuaucucca

SEQ ID NO: 1043595 - RNA, 22 nt, Human
uggcucagccauucguguugcc

SEQ ID NO: 1043596 - RNA, 19 nt, Human
agugaaauggaguauucaa

SEQ ID NO: 1043597 - RNA, 22 nt, Human
ugcuggcccaguauggacugca

SEQ ID NO: 1043598 - RNA, 22 nt, Human
aaacuguaaacacagcaguaca

SEQ ID NO: 1043599 - RNA, 22 nt, Human
ugugggcucccccucacucugu

SEQ ID NO: 1043600 - RNA, 22 nt, Human
uugcauguguaauuuuucuaaa

SEQ ID NO: 1043601 - RNA, 22 nt, Human
cucaggauccaucuccugcccu

SEQ ID NO: 1043602 - RNA, 19 nt, Human
ccagcagcuuugauucucu

SEQ ID NO: 1043603 - RNA, 18 nt, Human
augggaggggccaagaga

SEQ ID NO: 1043604 - RNA, 22 nt, Human
ugggcuggcugaggcauucacu

SEQ ID NO: 1043605 - RNA, 22 nt, Human
aaaucugggucaagguggagug

SEQ ID NO: 1043606 - RNA, 22 nt, Human
uuuuugaaggcugaugugauua

SEQ ID NO: 1043607 - RNA, 22 nt, Human
gaaggaagucauuagugcagac

SEQ ID NO: 1043608 - RNA, 22 nt, Human
aggccucacucucagagcuucu

SEQ ID NO: 1043609 - RNA, 22 nt, Human
cagcaggggaacugugggccag

SEQ ID NO: 1043610 - RNA, 22 nt, Human
cccagagccucauucuguuggg

SEQ ID NO: 1043611 - RNA, 22 nt, Human
gcuucauuacugacagucugug

SEQ ID NO: 1043612 - RNA, 22 nt, Human
aaaaaguuucaacugccaacuc

SEQ ID NO: 1043613 - RNA, 22 nt, Human
ggcaccuggagguuuacuggau

SEQ ID NO: 1043614 - RNA, 22 nt, Human
gcucagggaacuuuuugcaggc

SEQ ID NO: 1043615 - RNA, 22 nt, Human
acauacuaugaauacauguguc

SEQ ID NO: 1043616 - RNA, 22 nt, Human
uucagagccacuucaagucuaa

SEQ ID NO: 1043617 - RNA, 22 nt, Human
gucccagggaugcagacaugag

SEQ ID NO: 1043618 - RNA, 22 nt, Human
gcagagccagaauggccaggac

SEQ ID NO: 1043619 - RNA, 18 nt, Human
cauuguacaaugcuuuau

SEQ ID NO: 1043620 - RNA, 22 nt, Human
aacuucuugguccugagcuguu

SEQ ID NO: 1043621 - RNA, 22 nt, Human
gcugagcuagaaaaggaccaca

SEQ ID NO: 1043622 - RNA, 22 nt, Human
guagcuuauuagggauaauagu

SEQ ID NO: 1043623 - RNA, 22 nt, Human
aaauguguuccuuugcuacaga

SEQ ID NO: 1043624 - RNA, 22 nt, Human
uagcagcuuaaguaauuagaau

SEQ ID NO: 1043625 - RNA, 22 nt, Human
gguggagcuguggacaggaagg

SEQ ID NO: 1043626 - RNA, 22 nt, Human
ucauaauacaaagaguucugca

SEQ ID NO: 1043627 - RNA, 22 nt, Human
uccacugcagcuucugauggaa

SEQ ID NO: 1043628 - RNA, 22 nt, Human
uggcagcuacagacagagguga

SEQ ID NO: 1043629 - RNA, 22 nt, Human
aaggcccuggccccagcuucuu

SEQ ID NO: 1043630 - RNA, 22 nt, Human
aaggccauuauucugauauauu

SEQ ID NO: 1043631 - RNA, 22 nt, Human
ucucuuccaguaagagucuuua

SEQ ID NO: 1043632 - RNA, 22 nt, Human
cugguccuccuugccuucagau

SEQ ID NO: 1043633 - RNA, 22 nt, Human
gccuggugaaaggcagagagcg

SEQ ID NO: 1043634 - RNA, 21 nt, Human
uugaagcaaggguggcucuga

SEQ ID NO: 1043635 - RNA, 22 nt, Human
auacaagacucagcacagacgg

SEQ ID NO: 1043636 - RNA, 22 nt, Human
caccagcuacagacuacugugu

SEQ ID NO: 1043637 - RNA, 22 nt, Human
uguccucuaauuggccucuugc

SEQ ID NO: 1043638 - RNA, 18 nt, Human
caaagcucacguuccauc

SEQ ID NO: 1043639 - RNA, 22 nt, Human
caugcacaaagguaagaugcgu

SEQ ID NO: 1043640 - RNA, 22 nt, Human
ccagucccaggcagaaauccag

SEQ ID NO: 1043641 - RNA, 22 nt, Human
ggcagcacugcagcuuguuggg

SEQ ID NO: 1043642 - RNA, 22 nt, Human
ccagggcugagcugugaccaug

SEQ ID NO: 1043643 - RNA, 22 nt, Human
gcagggcaaugaucccgagagg

SEQ ID NO: 1043644 - RNA, 22 nt, Human
gcccauggacacccaagugcca

SEQ ID NO: 1043645 - RNA, 22 nt, Human
uguguuuugaacucaucuacug

SEQ ID NO: 1043646 - RNA, 22 nt, Human
aaagcucacaguaauacaaggc

SEQ ID NO: 1043647 - RNA, 22 nt, Human
ccugggucacucaggcaggcgg

SEQ ID NO: 1043648 - RNA, 22 nt, Human
uccuugaauugugccacuuacc

SEQ ID NO: 1043649 - RNA, 22 nt, Human
caggugaccuuuguccuaaguu

SEQ ID NO: 1043650 - RNA, 22 nt, Human
ucacagaaauaagauaguuauu

SEQ ID NO: 1043651 - RNA, 22 nt, Human
aaucuggcauguaagcuuagag

SEQ ID NO: 1043652 - RNA, 22 nt, Human
ugcauccuuaaccagcaucacu

SEQ ID NO: 1043653 - RNA, 22 nt, Human
uauuucuuucagguauguguug

SEQ ID NO: 1043654 - RNA, 22 nt, Human
agucccagccuaggcugugcug

SEQ ID NO: 1043655 - RNA, 18 nt, Human
uggagccauugccaccau

SEQ ID NO: 1043656 - RNA, 22 nt, Human
ggguccaggucuucaggcagag

SEQ ID NO: 1043657 - RNA, 22 nt, Human
cuccuuccugccccagugauaa

SEQ ID NO: 1043658 - RNA, 22 nt, Human
aggcugggaaauguauuccagc

SEQ ID NO: 1043659 - RNA, 22 nt, Human
ccugccagucacuaugucaccu

SEQ ID NO: 1043660 - RNA, 22 nt, Human
uacuuacagagcuuauaaguua

SEQ ID NO: 1043661 - RNA, 22 nt, Human
uggcccugcagaacuagccugg

SEQ ID NO: 1043662 - RNA, 22 nt, Human
uuccaguuaaggaagcuauucu

SEQ ID NO: 1043663 - RNA, 22 nt, Human
aagagcugauuaagucaugagg

SEQ ID NO: 1043664 - RNA, 22 nt, Human
gcugcugguccucagagcucau

SEQ ID NO: 1043665 - RNA, 22 nt, Human
ccugugugcacacgaggccaug

SEQ ID NO: 1043666 - RNA, 22 nt, Human
ucacgagaggcacagaauagag

SEQ ID NO: 1043667 - RNA, 17 nt, Human
agcugagcuggccaggg

SEQ ID NO: 1043668 - RNA, 22 nt, Human
ggugcucaagagggcauccucu

SEQ ID NO: 1043669 - RNA, 22 nt, Human
uccuggaggcaaaugaagacuc

SEQ ID NO: 1043670 - RNA, 23 nt, Human
cagaagcaccuguugacugcugc

SEQ ID NO: 1043671 - RNA, 22 nt, Human
gagcccucucuguaggcaagua

SEQ ID NO: 1043672 - RNA, 22 nt, Human
agggaaauuaaugugagcaaug

SEQ ID NO: 1043673 - RNA, 22 nt, Human
caggggcugagaaggaacgucc

SEQ ID NO: 1043674 - RNA, 20 nt, Human
ggcugccuccuuccuuuccu

SEQ ID NO: 1043675 - RNA, 22 nt, Human
ucagagucauugcaaguagaag

SEQ ID NO: 1043676 - RNA, 22 nt, Human
gcaguaaaaaaggauaugugca

SEQ ID NO: 1043677 - RNA, 19 nt, Human
ucuggcuccgccucuuagu

SEQ ID NO: 1043678 - RNA, 22 nt, Human
uuauuauaaugagggauaaaaa

SEQ ID NO: 1043679 - RNA, 22 nt, Human
gcaguggggcgcugggaguugg

SEQ ID NO: 1043680 - RNA, 19 nt, Human
ugccuggcaccagcuccac

SEQ ID NO: 1043681 - RNA, 22 nt, Human
uggcccuguggaggucagugag

SEQ ID NO: 1043682 - RNA, 22 nt, Human
gggugggguucaggaaucuuca

SEQ ID NO: 1043683 - RNA, 22 nt, Human
cagucccaguuugagacucugg

SEQ ID NO: 1043684 - RNA, 22 nt, Human
gagaaagcuucuuucccacagg

SEQ ID NO: 1043685 - RNA, 22 nt, Human
gcagaacauuucacaguaucuu

SEQ ID NO: 1043686 - RNA, 17 nt, Human
ccaggugggaggugggg

SEQ ID NO: 1043687 - RNA, 22 nt, Human
aggugcagcugacaccaugugg

SEQ ID NO: 1043688 - RNA, 20 nt, Human
ggaagcagagaacuguuuuc

SEQ ID NO: 1043689 - RNA, 22 nt, Human
cccagcuccuuacagggccgaa

SEQ ID NO: 1043690 - RNA, 22 nt, Human
caguggcugugaccagggaccu

SEQ ID NO: 1043691 - RNA, 22 nt, Human
cagguggggagaguguggagca

SEQ ID NO: 1043692 - RNA, 22 nt, Human
cacugaagccugggaguaagac

SEQ ID NO: 1043693 - RNA, 18 nt, Human
cccagcccaccauuucuc

SEQ ID NO: 1043694 - RNA, 22 nt, Human
guggcugguuuccugcaugcaa

SEQ ID NO: 1043695 - RNA, 22 nt, Human
acagcagcgucaacuuaaaauu

SEQ ID NO: 1043696 - RNA, 22 nt, Human
aaaugcauugguuucuacuugu

SEQ ID NO: 1043697 - RNA, 22 nt, Human
aggugccaauuuucagugaaca

SEQ ID NO: 1043698 - RNA, 22 nt, Human
aguggcaggcggagauguagga

SEQ ID NO: 1043699 - RNA, 22 nt, Human
agcaggcuuguuaugucugaga

SEQ ID NO: 1043700 - RNA, 22 nt, Human
ggucagguuuuuaggagugacc

SEQ ID NO: 1043701 - RNA, 22 nt, Human
aaucagaaaauucaguggaauu

SEQ ID NO: 1043702 - RNA, 22 nt, Human
ggagccugacagugcccagcau

SEQ ID NO: 1043703 - RNA, 22 nt, Human
gcagagcugucuaagucacuuc

SEQ ID NO: 1043704 - RNA, 22 nt, Human
aauuuggcagugucuugaagua

SEQ ID NO: 1043705 - RNA, 22 nt, Human
aagggcugaaagaccuugggca

SEQ ID NO: 1043706 - RNA, 22 nt, Human
agcuguguguuuccacugagcu

SEQ ID NO: 1043707 - RNA, 22 nt, Human
uaucuguuccaggcacucagcu

SEQ ID NO: 1043708 - RNA, 22 nt, Human
uggcucaggaucuaagcagaau

SEQ ID NO: 1043709 - RNA, 22 nt, Human
uuugcauucuagaaaaauuucu

SEQ ID NO: 1043710 - RNA, 22 nt, Human
gcugucaccaaagcaggcacug

SEQ ID NO: 1043711 - RNA, 22 nt, Human
augggcugugagguccggcagg

SEQ ID NO: 1043712 - RNA, 22 nt, Human
ugcugccagggcucugcccaca

SEQ ID NO: 1043713 - RNA, 22 nt, Human
aggcugaggcagguggaucacu

SEQ ID NO: 1043714 - RNA, 22 nt, Human
ucucaccauggugcuugcuuau

SEQ ID NO: 1043715 - RNA, 22 nt, Human
uuucaauguaacauuuccaggc

SEQ ID NO: 1043716 - RNA, 21 nt, Human
agggccugugcucuccagguc

SEQ ID NO: 1043717 - RNA, 22 nt, Human
uuuuagauugggaaauguaaag

SEQ ID NO: 1043718 - RNA, 22 nt, Human
ccugcucugguuuagucagucu

SEQ ID NO: 1043719 - RNA, 22 nt, Human
gccucugcccauccaccaucag

SEQ ID NO: 1043720 - RNA, 22 nt, Human
cuccucccugcgauugcucugc

SEQ ID NO: 1043721 - RNA, 22 nt, Human
gcucccuguucucagccaugau

SEQ ID NO: 1043722 - RNA, 22 nt, Human
agugggcagcccaggaggucuu

SEQ ID NO: 1043723 - RNA, 22 nt, Human
cccucugaccuccugccacagu

SEQ ID NO: 1043724 - RNA, 22 nt, Human
caggggcucugagauugucuaa

SEQ ID NO: 1043725 - RNA, 22 nt, Human
ggagcugcuuugaucugaagaa

SEQ ID NO: 1043726 - RNA, 22 nt, Human
aggcucaggcaggaauggcgga

SEQ ID NO: 1043727 - RNA, 22 nt, Human
ggcccuguuagagcucccacaa

SEQ ID NO: 1043728 - RNA, 22 nt, Human
cagcucuguaaauuccuucauc

SEQ ID NO: 1043729 - RNA, 22 nt, Human
acagaguacauucagagacuau

SEQ ID NO: 1043730 - RNA, 22 nt, Human
ccagagccuggcaucugcauaa

SEQ ID NO: 1043731 - RNA, 22 nt, Human
aggcugucugaccccagagccc

SEQ ID NO: 1043732 - RNA, 22 nt, Human
ccugucuggccaccagggcgau

SEQ ID NO: 1043733 - RNA, 22 nt, Human
gcuggcccagggucaccuagga

SEQ ID NO: 1043734 - RNA, 22 nt, Human
gagccuggauugaagugggugg

SEQ ID NO: 1043735 - RNA, 22 nt, Human
aacaacugaaaagcuuuuucug

SEQ ID NO: 1043736 - RNA, 22 nt, Human
cauguacaguuuuucuguccug

SEQ ID NO: 1043737 - RNA, 19 nt, Human
uggaggagaggaaaaguca

SEQ ID NO: 1043738 - RNA, 22 nt, Human
cucaaguaagaaacagaauugg

SEQ ID NO: 1043739 - RNA, 22 nt, Human
uuguuacagcagugauuucaga

SEQ ID NO: 1043740 - RNA, 22 nt, Human
cuuggcagauccaaaaaugaca

SEQ ID NO: 1043741 - RNA, 22 nt, Human
aggccagguggucaugcuugcu

SEQ ID NO: 1043742 - RNA, 22 nt, Human
gcugccuugaacuuggccuggg

SEQ ID NO: 1043743 - RNA, 22 nt, Human
ccagcuggcacuguggcugccc

SEQ ID NO: 1043744 - RNA, 22 nt, Human
ucaaagcaucagucaauuuagg

SEQ ID NO: 1043745 - RNA, 22 nt, Human
ggcugccacgucgaggguccaa

SEQ ID NO: 1043746 - RNA, 22 nt, Human
agagugaaaagcuagagcagua

SEQ ID NO: 1043747 - RNA, 22 nt, Human
caagagcucaccggagagcauu

SEQ ID NO: 1043748 - RNA, 22 nt, Human
agaauguagucuuggagauuua

SEQ ID NO: 1043749 - RNA, 22 nt, Human
cuguccccgcgaguccagagcu

SEQ ID NO: 1043750 - RNA, 23 nt, Human
uucuuucaagaaguucacagugc

SEQ ID NO: 1043751 - RNA, 22 nt, Human
ugagcuggucuugaguguagcu

SEQ ID NO: 1043752 - RNA, 22 nt, Human
agcagccacagcagaucugagu

SEQ ID NO: 1043753 - RNA, 22 nt, Human
agucccagugacuuggccagaa

SEQ ID NO: 1043754 - RNA, 22 nt, Human
agaacagaggccuuauguuuca

SEQ ID NO: 1043755 - RNA, 22 nt, Human
uauugaguuacagaaaauacuu

SEQ ID NO: 1043756 - RNA, 22 nt, Human
ucucugguggcuccaucaguag

SEQ ID NO: 1043757 - RNA, 22 nt, Human
ucaggggaaaucucucagcgaa

SEQ ID NO: 1043758 - RNA, 21 nt, Human
guuugcaugaacaagucagcc

SEQ ID NO: 1043759 - RNA, 22 nt, Human
cucugagaggugagaagcagca

SEQ ID NO: 1043760 - RNA, 22 nt, Human
uuucuuccuuaccuuacuagag

SEQ ID NO: 1043761 - RNA, 22 nt, Human
cauuucuguacauguuuuggug

SEQ ID NO: 1043762 - RNA, 22 nt, Human
gcaggcagagagggguuuccag

SEQ ID NO: 1043763 - RNA, 22 nt, Human
agcugucagugcugugccugua

SEQ ID NO: 1043764 - RNA, 22 nt, Human
cuggggcccaucgagggcugag

SEQ ID NO: 1043765 - RNA, 21 nt, Human
acagccugucaucucaugguc

SEQ ID NO: 1043766 - RNA, 22 nt, Human
cccucugccugcgcccuggugu

SEQ ID NO: 1043767 - RNA, 22 nt, Human
uucaaugagcccaagaacguga

SEQ ID NO: 1043768 - RNA, 22 nt, Human
agguggggaggagugucucuuu

SEQ ID NO: 1043769 - RNA, 22 nt, Human
acuggacagaggaaauauggag

SEQ ID NO: 1043770 - RNA, 22 nt, Human
guacuuccguggacuaauuguu

SEQ ID NO: 1043771 - RNA, 21 nt, Human
gggcagaggggccuccugggu

SEQ ID NO: 1043772 - RNA, 22 nt, Human
agggcagcacagcugugcuccu

SEQ ID NO: 1043773 - RNA, 22 nt, Human
aaauugugagcuauagaucuag

SEQ ID NO: 1043774 - RNA, 22 nt, Human
caagaugaaacuacagggagga

SEQ ID NO: 1043775 - RNA, 22 nt, Human
uuccucaucugugcaccucacu

SEQ ID NO: 1043776 - RNA, 22 nt, Human
cugcugagguccuugcucagac

SEQ ID NO: 1043777 - RNA, 22 nt, Human
uaaaugugaccuucauuuuaua

SEQ ID NO: 1043778 - RNA, 22 nt, Human
gugauuccuauuaguacaugca

SEQ ID NO: 1043779 - RNA, 22 nt, Human
aaaauggucucagcuggcacca

SEQ ID NO: 1043780 - RNA, 22 nt, Human
gcacagaaguaaaauacaaguc

SEQ ID NO: 1043781 - RNA, 22 nt, Human
acuuguguaacacagaaagaac

SEQ ID NO: 1043782 - RNA, 22 nt, Human
gcucagaggagcaucauaagga

SEQ ID NO: 1043783 - RNA, 22 nt, Human
ccugccuggagcugagugugga

SEQ ID NO: 1043784 - RNA, 22 nt, Human
uugaaaggccuguuuauccagc

SEQ ID NO: 1043785 - RNA, 22 nt, Human
auuguggugucaguuauaggca

SEQ ID NO: 1043786 - RNA, 19 nt, Human
aguagcagaaagugcagug

SEQ ID NO: 1043787 - RNA, 22 nt, Human
gcugccuggcuuuaguccacuu

SEQ ID NO: 1043788 - RNA, 22 nt, Human
uguguacagcaggauuucucaa

SEQ ID NO: 1043789 - RNA, 22 nt, Human
guccucugaaguugugcaaugc

SEQ ID NO: 1043790 - RNA, 22 nt, Human
gcagccacucucauuccacgug

SEQ ID NO: 1043791 - RNA, 22 nt, Human
gagggcugauaaaugcgcaugg

SEQ ID NO: 1043792 - RNA, 22 nt, Human
ucugaggcuauguucaggcuaa

SEQ ID NO: 1043793 - RNA, 22 nt, Human
gggauggggggaagcguccaug

SEQ ID NO: 1043794 - RNA, 22 nt, Human
gcagagccuugcgucaugugcc

SEQ ID NO: 1043795 - RNA, 22 nt, Human
gcugcagcucgccuuccggccu

SEQ ID NO: 1043796 - RNA, 22 nt, Human
gcugagagugagcacuggauau

SEQ ID NO: 1043797 - RNA, 22 nt, Human
agagauaugaguaguugugaca

SEQ ID NO: 1043798 - RNA, 21 nt, Human
uccucugcagugagguggccu

SEQ ID NO: 1043799 - RNA, 22 nt, Human
aaaaccaggcguuuccuauuau

SEQ ID NO: 1043800 - RNA, 22 nt, Human
cacagggcagguacucucagag

SEQ ID NO: 1043801 - RNA, 20 nt, Human
augccucuaauuuugcaaac

SEQ ID NO: 1043802 - RNA, 23 nt, Human
gcaggugguucgaacagaaguuu

SEQ ID NO: 1043803 - RNA, 22 nt, Human
agucccagaugacccagcuacu

SEQ ID NO: 1043804 - RNA, 22 nt, Human
ugugaaaggagccauagacagu

SEQ ID NO: 1043805 - RNA, 22 nt, Human
ugcaagcacucaaugcaaacag

SEQ ID NO: 1043806 - RNA, 22 nt, Human
agggacagucuacuguucacug

SEQ ID NO: 1043807 - RNA, 22 nt, Human
uuagggcuuuucugaauaggcc

SEQ ID NO: 1043808 - RNA, 22 nt, Human
cuuuauguccuugaagaguugu

SEQ ID NO: 1043809 - RNA, 22 nt, Human
uucuugauuucaugcaguuaag

SEQ ID NO: 1043810 - RNA, 22 nt, Human
guaacugaggcagcuuuuaaga

SEQ ID NO: 1043811 - RNA, 22 nt, Human
acuuccuggcguagcugacauu

SEQ ID NO: 1043812 - RNA, 22 nt, Human
ugcccaagcagaggagugauuc

SEQ ID NO: 1043813 - RNA, 18 nt, Human
gcuggcugcacuucugcu

SEQ ID NO: 1043814 - RNA, 22 nt, Human
accccaagacaguagaagagaa

SEQ ID NO: 1043815 - RNA, 22 nt, Human
ucucuuuuauguacacccugac

SEQ ID NO: 1043816 - RNA, 19 nt, Human
uagucuuuauucuuaauuu

SEQ ID NO: 1043817 - RNA, 22 nt, Human
cagcuugcuaauuuugacuuca

SEQ ID NO: 1043818 - RNA, 22 nt, Human
ggcugccuucagacuccagcuu

SEQ ID NO: 1043819 - RNA, 22 nt, Human
uggcccuguguccugcugccag

SEQ ID NO: 1043820 - RNA, 22 nt, Human
ucagcuuggacagcuugguuga

SEQ ID NO: 1043821 - RNA, 23 nt, Human
uuuuaauuuggacauaagaagau

SEQ ID NO: 1043822 - RNA, 21 nt, Human
ucucuggaauuagaccauguu

SEQ ID NO: 1043823 - RNA, 22 nt, Human
agcagccauuuaaaaugaauug

SEQ ID NO: 1043824 - RNA, 22 nt, Human
aaauaauguuaggccuuugcuc

SEQ ID NO: 1043825 - RNA, 22 nt, Human
agagcagauggccagggggccu

SEQ ID NO: 1043826 - RNA, 22 nt, Human
uggcucagcgcggccuggucuu

SEQ ID NO: 1043827 - RNA, 22 nt, Human
ugucucugugagaucugacgau

SEQ ID NO: 1043828 - RNA, 22 nt, Human
ugccaggcgugguggugcgcac

SEQ ID NO: 1043829 - RNA, 22 nt, Human
ucccuggggauguuggccugcc

SEQ ID NO: 1043830 - RNA, 22 nt, Human
agcugcuaugacaacaccagcc

SEQ ID NO: 1043831 - RNA, 19 nt, Human
ucucaauguucagaaagcu

SEQ ID NO: 1043832 - RNA, 22 nt, Human
cugccuggaaugccagcuucuc

SEQ ID NO: 1043833 - RNA, 22 nt, Human
cucagcagugacaagagaguau

SEQ ID NO: 1043834 - RNA, 22 nt, Human
ggucccugguucccucugagcu

SEQ ID NO: 1043835 - RNA, 22 nt, Human
cuggcucccguuguccuugaag

SEQ ID NO: 1043836 - RNA, 22 nt, Human
cacugccugugagcugugugcc

SEQ ID NO: 1043837 - RNA, 22 nt, Human
cuuguggcccauggcuuccugc

SEQ ID NO: 1043838 - RNA, 22 nt, Human
uuguuacaucuuauguaagugg

SEQ ID NO: 1043839 - RNA, 22 nt, Human
gccaggcuccccggaucccugg

SEQ ID NO: 1043840 - RNA, 22 nt, Human
uacacauguuuggcaaguaugu

SEQ ID NO: 1043841 - RNA, 22 nt, Human
uggcugcugagaaggcagcugu

SEQ ID NO: 1043842 - RNA, 19 nt, Human
uacuuuuucaggacagagu

SEQ ID NO: 1043843 - RNA, 22 nt, Human
ggcugcagguugguuggcagcu

SEQ ID NO: 1043844 - RNA, 22 nt, Human
cagagcaguaaaucuggggcac

SEQ ID NO: 1043845 - RNA, 20 nt, Human
cugggcugcccagcuauggg

SEQ ID NO: 1043846 - RNA, 22 nt, Human
caagagcugcaaauagcgugac

SEQ ID NO: 1043847 - RNA, 22 nt, Human
ccucugccugcacaucauccug

SEQ ID NO: 1043848 - RNA, 21 nt, Human
cauugucgacauuuuccccuc

SEQ ID NO: 1043849 - RNA, 22 nt, Human
aaguaaaagcuuuaccaugcgc

SEQ ID NO: 1043850 - RNA, 22 nt, Human
agaaauaugcugauuagaugaa

SEQ ID NO: 1043851 - RNA, 22 nt, Human
agugaaauugcuguaagaggaa

SEQ ID NO: 1043852 - RNA, 22 nt, Human
uccucaggucaaagcaggagaa

SEQ ID NO: 1043853 - RNA, 22 nt, Human
gccuggagccucagcaaggagg

SEQ ID NO: 1043854 - RNA, 22 nt, Human
agagcaggcauaaagcuuugaa

SEQ ID NO: 1043855 - RNA, 22 nt, Human
gagcugugagggacacauugcu

SEQ ID NO: 1043856 - RNA, 22 nt, Human
uaauguguccugaaagcuucug

SEQ ID NO: 1043857 - RNA, 22 nt, Human
gcucagagcacucagacucagc

SEQ ID NO: 1043858 - RNA, 22 nt, Human
caggguggaauggaaugcuggc

SEQ ID NO: 1043859 - RNA, 20 nt, Human
agagccuugaggaagaugau

SEQ ID NO: 1043860 - RNA, 22 nt, Human
agggcccucuggcaggccaggc

SEQ ID NO: 1043861 - RNA, 22 nt, Human
cuggguggcuguccagccagcc

SEQ ID NO: 1043862 - RNA, 22 nt, Human
ugcaggcaggggaugagcagcc

SEQ ID NO: 1043863 - RNA, 22 nt, Human
cagugcagccaaggacaggcac

SEQ ID NO: 1043864 - RNA, 22 nt, Human
gacagaggcaagaccagaagcc

SEQ ID NO: 1043865 - RNA, 22 nt, Human
cuggcugggagcgagcugcuca

SEQ ID NO: 1043866 - RNA, 22 nt, Human
uggcaccugaacuuagaggugu

SEQ ID NO: 1043867 - RNA, 22 nt, Human
ggcugggcaggucugcacaggg

SEQ ID NO: 1043868 - RNA, 22 nt, Human
ggauccuucuuugaccucacag

SEQ ID NO: 1043869 - RNA, 22 nt, Human
caggagugaaaugaggcccagg

SEQ ID NO: 1043870 - RNA, 22 nt, Human
ggcagcugauuagcaucaagga

SEQ ID NO: 1043871 - RNA, 22 nt, Human
ucagggcaaaagggaaaccauu

SEQ ID NO: 1043872 - RNA, 22 nt, Human
cucuguagaaacagggcagaag

SEQ ID NO: 1043873 - RNA, 22 nt, Human
agaggcugaaugaugucaucau

SEQ ID NO: 1043874 - RNA, 22 nt, Human
ccuuucucuaucgacccaucgc

SEQ ID NO: 1043875 - RNA, 22 nt, Human
cuggccuggcaggggaccucua

SEQ ID NO: 1043876 - RNA, 22 nt, Human
agugacucacuagcucucagug

SEQ ID NO: 1043877 - RNA, 20 nt, Human
ucucccaggcucagggaaga

SEQ ID NO: 1043878 - RNA, 22 nt, Human
aggccuggccccaguugcuagg

SEQ ID NO: 1043879 - RNA, 22 nt, Human
uccagugguuugaaaggggugu

SEQ ID NO: 1043880 - RNA, 22 nt, Human
ugguggccaauucacagggcuc

SEQ ID NO: 1043881 - RNA, 22 nt, Human
gauuuccucacuaacauccauc

SEQ ID NO: 1043882 - RNA, 22 nt, Human
ccagcccuugagauggaaggga

SEQ ID NO: 1043883 - RNA, 22 nt, Human
cccuggggcugagggauggccg

SEQ ID NO: 1043884 - RNA, 22 nt, Human
gucuuuauuugagauugucauu

SEQ ID NO: 1043885 - RNA, 22 nt, Human
aguguccaacucagcuugucaa

SEQ ID NO: 1043886 - RNA, 19 nt, Human
cccagcuugaccaccugcu

SEQ ID NO: 1043887 - RNA, 22 nt, Human
cugcuuuguggaaucacacugg

SEQ ID NO: 1043888 - RNA, 22 nt, Human
gaaacuguauguaguuuuuggg

SEQ ID NO: 1043889 - RNA, 22 nt, Human
ucucuggggauggaccugggag

SEQ ID NO: 1043890 - RNA, 22 nt, Human
aagcagaaaaacugagcuccaa

SEQ ID NO: 1043891 - RNA, 22 nt, Human
ugcuucaggagaugucaccaug

SEQ ID NO: 1043892 - RNA, 21 nt, Human
agagcugggacuugccugaga

SEQ ID NO: 1043893 - RNA, 22 nt, Human
uuuccaauaaagugucauuguu

SEQ ID NO: 1043894 - RNA, 22 nt, Human
aggcagcagggccacuggcuga

SEQ ID NO: 1043895 - RNA, 22 nt, Human
uguggcucucaugcacucccag

SEQ ID NO: 1043896 - RNA, 22 nt, Human
uuucacauuuuauacuuaagcc

SEQ ID NO: 1043897 - RNA, 22 nt, Human
cagggcaggacagauacauuac

SEQ ID NO: 1043898 - RNA, 22 nt, Human
aguuggagugaacaugagauug

SEQ ID NO: 1043899 - RNA, 23 nt, Human
cccuguagcccaggacaggcuuu

SEQ ID NO: 1043900 - RNA, 19 nt, Human
ccaggccaucccaguuccc

SEQ ID NO: 1043901 - RNA, 22 nt, Human
cuccuugguguaguacugagca

SEQ ID NO: 1043902 - RNA, 22 nt, Human
agcugucugucuccugaggaga

SEQ ID NO: 1043903 - RNA, 22 nt, Human
ugggcugcggauaggccucgga

SEQ ID NO: 1043904 - RNA, 22 nt, Human
ggaugcaggaguugaagaagga

SEQ ID NO: 1043905 - RNA, 22 nt, Human
gagagcuggauucuggauaggu

SEQ ID NO: 1043906 - RNA, 22 nt, Human
accugccuaguugguucugccc

SEQ ID NO: 1043907 - RNA, 22 nt, Human
gagguacaugaggauacacagg

SEQ ID NO: 1043908 - RNA, 22 nt, Human
uagcagcucugauucugggccc

SEQ ID NO: 1043909 - RNA, 22 nt, Human
ccucugaggucauggacuuggc

SEQ ID NO: 1043910 - RNA, 17 nt, Human
ggccuugggcugcucuu

SEQ ID NO: 1043911 - RNA, 22 nt, Human
caggacagguguucuagaucag

SEQ ID NO: 1043912 - RNA, 22 nt, Human
gagggcugaagauuguggcccc

SEQ ID NO: 1043913 - RNA, 21 nt, Human
gaugaagcaaucuuucuguug

SEQ ID NO: 1043914 - RNA, 22 nt, Human
gagagggccgggggccagcucc

SEQ ID NO: 1043915 - RNA, 22 nt, Human
agcuguguagggaaucagagaa

SEQ ID NO: 1043916 - RNA, 22 nt, Human
uggagccagagcgcagccuggg

SEQ ID NO: 1043917 - RNA, 22 nt, Human
uggcuggcuuguucacugacug

SEQ ID NO: 1043918 - RNA, 18 nt, Human
gcucugcccaggcugccc

SEQ ID NO: 1043919 - RNA, 18 nt, Human
cucugcuaaugggcagcu

SEQ ID NO: 1043920 - RNA, 22 nt, Human
gggcuggaggagauccagaggc

SEQ ID NO: 1043921 - RNA, 22 nt, Human
uucaagaugucuucacaauagu

SEQ ID NO: 1043922 - RNA, 22 nt, Human
ugccugagugauguggcagcca

SEQ ID NO: 1043923 - RNA, 22 nt, Human
uggacucaaguccaaguucacg

SEQ ID NO: 1043924 - RNA, 18 nt, Human
ugcucuggucucacuugg

SEQ ID NO: 1043925 - RNA, 22 nt, Human
ugcucugguccucccucggcgc

SEQ ID NO: 1043926 - RNA, 22 nt, Human
cuggcucagugccuucagaagu

SEQ ID NO: 1043927 - RNA, 22 nt, Human
ggcugccuggaccuccucuuuc

SEQ ID NO: 1043928 - RNA, 22 nt, Human
agagcuggggccagagucaagg

SEQ ID NO: 1043929 - RNA, 22 nt, Human
uacauauacugagugauuugcu

SEQ ID NO: 1043930 - RNA, 22 nt, Human
ggcugcuggggacgugggagag

SEQ ID NO: 1043931 - RNA, 22 nt, Human
accugagccuagggagguugag

SEQ ID NO: 1043932 - RNA, 22 nt, Human
agcccuccucacaucagcgucc

SEQ ID NO: 1043933 - RNA, 22 nt, Human
caagaugaucccugaaggcagc

SEQ ID NO: 1043934 - RNA, 22 nt, Human
cagcagggaagcugugcuguuu

SEQ ID NO: 1043935 - RNA, 22 nt, Human
cugaaggauuagagagcacuua

SEQ ID NO: 1043936 - RNA, 22 nt, Human
cacugcagaucagaggcugaga

SEQ ID NO: 1043937 - RNA, 20 nt, Human
uagaaaucuuauaaaagacu

SEQ ID NO: 1043938 - RNA, 22 nt, Human
ccugccuggcuuccagaagaga

SEQ ID NO: 1043939 - RNA, 22 nt, Human
gauuucaaguaucuugggcgag

SEQ ID NO: 1043940 - RNA, 22 nt, Human
gcucugagcacugugcggcugg

SEQ ID NO: 1043941 - RNA, 22 nt, Human
ucugucaccgagggcauccaaa

SEQ ID NO: 1043942 - RNA, 22 nt, Human
aaaggugacugcagcagcuauu

SEQ ID NO: 1043943 - RNA, 22 nt, Human
gcuuuuucaaaugaaagcuggu

SEQ ID NO: 1043944 - RNA, 22 nt, Human
ucucccagaggaucccagugga

SEQ ID NO: 1043945 - RNA, 22 nt, Human
gagagcugcagccgagaggggg

SEQ ID NO: 1043946 - RNA, 22 nt, Human
uccugccuaccuugcggaggug

SEQ ID NO: 1043947 - RNA, 22 nt, Human
aggagccaggaaaccugcucug

SEQ ID NO: 1043948 - RNA, 22 nt, Human
ccuggccugugaaucugagagc

SEQ ID NO: 1043949 - RNA, 21 nt, Human
uccauuguuuucccaggguuu

SEQ ID NO: 1043950 - RNA, 22 nt, Human
gcucugugccacaugcaguguu

SEQ ID NO: 1043951 - RNA, 19 nt, Human
auaaggcaggaggaaauuu

SEQ ID NO: 1043952 - RNA, 22 nt, Human
cagggccauuggcguggcuguc

SEQ ID NO: 1043953 - RNA, 22 nt, Human
uuuuccucugcaauaaaagcag

SEQ ID NO: 1043954 - RNA, 22 nt, Human
cagagccaaaccucagggcccg

SEQ ID NO: 1043955 - RNA, 22 nt, Human
uggcuuccaaaggaaugggccu

SEQ ID NO: 1043956 - RNA, 22 nt, Human
agcuuuauuugucauucacggc

SEQ ID NO: 1043957 - RNA, 22 nt, Human
ccuuuugcucucccauccagaa

SEQ ID NO: 1043958 - RNA, 22 nt, Human
gcucugaggcugugaggugcug

SEQ ID NO: 1043959 - RNA, 22 nt, Human
aaaugugugcacaaagacagcu

SEQ ID NO: 1043960 - RNA, 22 nt, Human
uucacauuauaaucaguucugc

SEQ ID NO: 1043961 - RNA, 22 nt, Human
cucagagucccuucccucgugg

SEQ ID NO: 1043962 - RNA, 22 nt, Human
uugcuuccucgaggccagcgug

SEQ ID NO: 1043963 - RNA, 22 nt, Human
agucccaggcagccgagccggu

SEQ ID NO: 1043964 - RNA, 22 nt, Human
gagagugagauccuccugggga

SEQ ID NO: 1043965 - RNA, 22 nt, Human
uaaaugugggggccacgggcuu

SEQ ID NO: 1043966 - RNA, 22 nt, Human
uugcuauuuugagagucauagu

SEQ ID NO: 1043967 - RNA, 22 nt, Human
agggaaagguagugaggucaca

SEQ ID NO: 1043968 - RNA, 22 nt, Human
aaggcacucauucaaggagaua

SEQ ID NO: 1043969 - RNA, 22 nt, Human
ccaggcccugcuccucacacca

SEQ ID NO: 1043970 - RNA, 21 nt, Human
gucagcagauccagcacuugu

SEQ ID NO: 1043971 - RNA, 22 nt, Human
aucucagggcuggagcccugga

SEQ ID NO: 1043972 - RNA, 22 nt, Human
gcagugcugaucccauggcaga

SEQ ID NO: 1043973 - RNA, 22 nt, Human
agaagccacuggagguugagau

SEQ ID NO: 1043974 - RNA, 22 nt, Human
ugggcagauguggcucuccuug

SEQ ID NO: 1043975 - RNA, 22 nt, Human
auugaaagauauacuguucuca

SEQ ID NO: 1043976 - RNA, 22 nt, Human
ucaggcaggcagagggcaaaug

SEQ ID NO: 1043977 - RNA, 22 nt, Human
ugccugggagugaccaagacuc

SEQ ID NO: 1043978 - RNA, 22 nt, Human
aaguaugacauuuaagacaauu

SEQ ID NO: 1043979 - RNA, 22 nt, Human
ccaggcagcaaauuuucugaau

SEQ ID NO: 1043980 - RNA, 22 nt, Human
ugggcaggaugcguugauucuu

SEQ ID NO: 1043981 - RNA, 22 nt, Human
gccagacacuccccugggcagg

SEQ ID NO: 1043982 - RNA, 22 nt, Human
gcuggcucagggacuagaguuu

SEQ ID NO: 1043983 - RNA, 22 nt, Human
aggagucauugagagggguccu

SEQ ID NO: 1043984 - RNA, 22 nt, Human
uuucuucucacccaggacagag

SEQ ID NO: 1043985 - RNA, 19 nt, Human
uggccagguacugucugcu

SEQ ID NO: 1043986 - RNA, 22 nt, Human
aagauuucugcuccugagagaa

SEQ ID NO: 1043987 - RNA, 21 nt, Human
ucacaugcccauuacuggagc

SEQ ID NO: 1043988 - RNA, 22 nt, Human
gcaaaugcuaaaguguagagac

SEQ ID NO: 1043989 - RNA, 22 nt, Human
cugaaggauucaaaauggcagg

SEQ ID NO: 1043990 - RNA, 22 nt, Human
ggucagccuuggauuugguagc

SEQ ID NO: 1043991 - RNA, 22 nt, Human
ugcugccaccugguggcugaag

SEQ ID NO: 1043992 - RNA, 22 nt, Human
cagagguacaagcuaaguuggg

SEQ ID NO: 1043993 - RNA, 22 nt, Human
gguaacaguauguagaguaaga

SEQ ID NO: 1043994 - RNA, 22 nt, Human
cuggagccugcaguuuucacuu

SEQ ID NO: 1043995 - RNA, 22 nt, Human
cugggcacuugcucacagcucu

SEQ ID NO: 1043996 - RNA, 22 nt, Human
gaaaugugaccuacuuccuugu

SEQ ID NO: 1043997 - RNA, 22 nt, Human
cauacauaugcauguguguaua

SEQ ID NO: 1043998 - RNA, 22 nt, Human
gcccuggaaucucuccauggga

SEQ ID NO: 1043999 - RNA, 22 nt, Human
uuuuagaaauacugauuuagug

SEQ ID NO: 1044000 - RNA, 22 nt, Human
aggagucauaaaugugaacaaa

SEQ ID NO: 1044001 - RNA, 22 nt, Human
cauugcacaucugagaagagau

SEQ ID NO: 1044002 - RNA, 22 nt, Human
cacauccuucagcugagcccag

SEQ ID NO: 1044003 - RNA, 22 nt, Human
ggucccugcugaagccuuggug

SEQ ID NO: 1044004 - RNA, 19 nt, Human
gcugucugaugcugagguc

SEQ ID NO: 1044005 - RNA, 22 nt, Human
ggugaagggugucauggcauuu

SEQ ID NO: 1044006 - RNA, 20 nt, Human
accuuucaaaugauucagca

SEQ ID NO: 1044007 - RNA, 22 nt, Human
ggcagugaaaaaguauguuucc

SEQ ID NO: 1044008 - RNA, 22 nt, Human
acauuugagaugccuuuuaggu

SEQ ID NO: 1044009 - RNA, 17 nt, Human
ccucacagggaccagac

SEQ ID NO: 1044010 - RNA, 22 nt, Human
cacagguguucuugcagugaaa

SEQ ID NO: 1044011 - RNA, 19 nt, Human
ugaaggagggggauggcca

SEQ ID NO: 1044012 - RNA, 22 nt, Human
agacagcugcucgcagagcuau

SEQ ID NO: 1044013 - RNA, 22 nt, Human
cucagcccagcccaggaccagg

SEQ ID NO: 1044014 - RNA, 22 nt, Human
uaaggucauggugaauaauaag

SEQ ID NO: 1044015 - RNA, 22 nt, Human
uguacacaauucuuaacauaca

SEQ ID NO: 1044016 - RNA, 18 nt, Human
acauacauucugucugca

SEQ ID NO: 1044017 - RNA, 22 nt, Human
gugggcuucuguuagggaggcu

SEQ ID NO: 1044018 - RNA, 19 nt, Human
gcugugccucucuccugcu

SEQ ID NO: 1044019 - RNA, 22 nt, Human
caugcuuucuguccaaauguua

SEQ ID NO: 1044020 - RNA, 23 nt, Human
uuucauaugguguggaugaagaa

SEQ ID NO: 1044021 - RNA, 21 nt, Human
ccuauugaauauaggaagauu

SEQ ID NO: 1044022 - RNA, 19 nt, Human
uggcuuccaucucucucau

SEQ ID NO: 1044023 - RNA, 21 nt, Human
uggccucccacacuuccaugg

SEQ ID NO: 1044024 - RNA, 22 nt, Human
agagaaaacucauugagguguc

SEQ ID NO: 1044025 - RNA, 22 nt, Human
aucauuccacauguaccacuag

SEQ ID NO: 1044026 - RNA, 22 nt, Human
uggcuggggccacaguuuuccu

SEQ ID NO: 1044027 - RNA, 22 nt, Human
guugggaaggcaagaaguagaa

SEQ ID NO: 1044028 - RNA, 22 nt, Human
ucacuuagauggggaucaucac

SEQ ID NO: 1044029 - RNA, 22 nt, Human
uuucucuaaauagggaggcuua

SEQ ID NO: 1044030 - RNA, 22 nt, Human
uccugccucuugccuucuucac

SEQ ID NO: 1044031 - RNA, 22 nt, Human
uccuucaguucaauuaguccgu

SEQ ID NO: 1044032 - RNA, 22 nt, Human
ugggccuggguuccuccugggc

SEQ ID NO: 1044033 - RNA, 22 nt, Human
ccagggcagaaaaagagggaau

SEQ ID NO: 1044034 - RNA, 22 nt, Human
acuggagcccguggaggcgcag

SEQ ID NO: 1044035 - RNA, 22 nt, Human
uccuauugguagacauuucugu

SEQ ID NO: 1044036 - RNA, 22 nt, Human
gacagcauggugucuguucagg

SEQ ID NO: 1044037 - RNA, 22 nt, Human
uugcauguuauuuaaucuguau

SEQ ID NO: 1044038 - RNA, 22 nt, Human
ugcuuaauauugugauguaaua

SEQ ID NO: 1044039 - RNA, 22 nt, Human
ccagcagcuguggcuuugccuc

SEQ ID NO: 1044040 - RNA, 22 nt, Human
cucugagcagaggccguggcua

SEQ ID NO: 1044041 - RNA, 20 nt, Human
agaguaacuggcacauaggg

SEQ ID NO: 1044042 - RNA, 22 nt, Human
ccacucugcugugcuccaugau

SEQ ID NO: 1044043 - RNA, 22 nt, Human
gcaggaugaaggcagaggcuga

SEQ ID NO: 1044044 - RNA, 22 nt, Human
aggagcugcagauucugccuug

SEQ ID NO: 1044045 - RNA, 22 nt, Human
gcugucugcaagccaggaaaug

SEQ ID NO: 1044046 - RNA, 22 nt, Human
gggagagaugcugauugccaau

SEQ ID NO: 1044047 - RNA, 22 nt, Human
uacauuuauaaggcuucucugu

SEQ ID NO: 1044048 - RNA, 18 nt, Human
agccuggaggguugaagu

SEQ ID NO: 1044049 - RNA, 22 nt, Human
gcagagccgugaauggauuuca

SEQ ID NO: 1044050 - RNA, 22 nt, Human
cucugagagcggucuguggcuu

SEQ ID NO: 1044051 - RNA, 21 nt, Human
uggaaagauucaaagaccagg

SEQ ID NO: 1044052 - RNA, 22 nt, Human
agaggcugcacuugcucaugau

SEQ ID NO: 1044053 - RNA, 22 nt, Human
aggccaaguagcuagcauugaa

SEQ ID NO: 1044054 - RNA, 22 nt, Human
cagcaguguggaagcugagggg

SEQ ID NO: 1044055 - RNA, 22 nt, Human
gcuggagcuugagaggacaggg

SEQ ID NO: 1044056 - RNA, 22 nt, Human
cuuguacaggaauccaugguau

SEQ ID NO: 1044057 - RNA, 22 nt, Human
uccuggcccacuaugccagcau

SEQ ID NO: 1044058 - RNA, 22 nt, Human
aggugcugccccgagaaggaug

SEQ ID NO: 1044059 - RNA, 22 nt, Human
cagaguguggcaucuuccaacu

SEQ ID NO: 1044060 - RNA, 22 nt, Human
ggcaaaaaccauaauuacuuuu

SEQ ID NO: 1044061 - RNA, 22 nt, Human
agcagggcaaagucaggcuaac

SEQ ID NO: 1044062 - RNA, 22 nt, Human
aagcugaggcccauggcaaggu

SEQ ID NO: 1044063 - RNA, 19 nt, Human
gcucugugaugcugagggg

SEQ ID NO: 1044064 - RNA, 22 nt, Human
ccuggagcccaaggcagugaga

SEQ ID NO: 1044065 - RNA, 22 nt, Human
ucugucacucuagagauggcag

SEQ ID NO: 1044066 - RNA, 22 nt, Human
cuggaagggucuacuuagcaga

SEQ ID NO: 1044067 - RNA, 22 nt, Human
aguacuuuacuucuuacaguuu

SEQ ID NO: 1044068 - RNA, 22 nt, Human
ccagucccaucucugucgcuua

SEQ ID NO: 1044069 - RNA, 22 nt, Human
augggaggguggaaaggcucug

SEQ ID NO: 1044070 - RNA, 22 nt, Human
cacuuaagcaguuaauuuaucu

SEQ ID NO: 1044071 - RNA, 22 nt, Human
uccaggaggaggaaggcugcca

SEQ ID NO: 1044072 - RNA, 22 nt, Human
ugagaguauuuuggcauuauca

SEQ ID NO: 1044073 - RNA, 22 nt, Human
aguggcagaucucuggucugga

SEQ ID NO: 1044074 - RNA, 22 nt, Human
cuacauuuuucaccgagccucu

SEQ ID NO: 1044075 - RNA, 22 nt, Human
ugagccagaggaggcugugugg

SEQ ID NO: 1044076 - RNA, 22 nt, Human
ugaaaucuuagccauucugccu

SEQ ID NO: 1044077 - RNA, 18 nt, Human
caggagcaggaguugaac

SEQ ID NO: 1044078 - RNA, 22 nt, Human
acagggcagguggcuacugguc

SEQ ID NO: 1044079 - RNA, 19 nt, Human
gcaugcuugguggcuucug

SEQ ID NO: 1044080 - RNA, 22 nt, Human
ucauugcaagcucauuuaucug

SEQ ID NO: 1044081 - RNA, 22 nt, Human
ucaguuuugauuccugguucuc

SEQ ID NO: 1044082 - RNA, 22 nt, Human
cuggcccagucucagaguguca

SEQ ID NO: 1044083 - RNA, 22 nt, Human
ucugcugcacaaauucaucucu

SEQ ID NO: 1044084 - RNA, 22 nt, Human
ugagcuggucacuccuucugaa

SEQ ID NO: 1044085 - RNA, 20 nt, Human
aucuggcucagauccugcag

SEQ ID NO: 1044086 - RNA, 17 nt, Human
uuccaguuuaguauugu

SEQ ID NO: 1044087 - RNA, 22 nt, Human
acugccuugucucuugccuguu

SEQ ID NO: 1044088 - RNA, 22 nt, Human
ccucauggccuugagcugaggg

SEQ ID NO: 1044089 - RNA, 22 nt, Human
ugcaagggcuuagggggcugug

SEQ ID NO: 1044090 - RNA, 22 nt, Human
gcauugucaaaagugguaugac

SEQ ID NO: 1044091 - RNA, 22 nt, Human
agggcagagggugccucaccug

SEQ ID NO: 1044092 - RNA, 19 nt, Human
guggccagggcaggggcug

SEQ ID NO: 1044093 - RNA, 21 nt, Human
gcccucaggggaggauggccu

SEQ ID NO: 1044094 - RNA, 21 nt, Human
ugcagagauaucugaagcaga

SEQ ID NO: 1044095 - RNA, 18 nt, Human
cagucccaaaccuuagga

SEQ ID NO: 1044096 - RNA, 22 nt, Human
uagcugucaccagaaauggcca

SEQ ID NO: 1044097 - RNA, 22 nt, Human
cagcaggcucugaguggcugcc

SEQ ID NO: 1044098 - RNA, 22 nt, Human
guggccuggaugagcuucgaca

SEQ ID NO: 1044099 - RNA, 20 nt, Human
agggcagcuugaggagccgg

SEQ ID NO: 1044100 - RNA, 22 nt, Human
uuaacagacauauauauuugua

SEQ ID NO: 1044101 - RNA, 22 nt, Human
uguaugcaccauuguauuaccu

SEQ ID NO: 1044102 - RNA, 22 nt, Human
gccugucucuuggaacuuggua

SEQ ID NO: 1044103 - RNA, 22 nt, Human
ccaaagucagugcucagucguc

SEQ ID NO: 1044104 - RNA, 22 nt, Human
agaggccaguggcugugcuguc

SEQ ID NO: 1044105 - RNA, 23 nt, Human
agagcuuagggaauucacaugag

SEQ ID NO: 1044106 - RNA, 22 nt, Human
aucagcaagcauuuauugagug

SEQ ID NO: 1044107 - RNA, 20 nt, Human
gagggcaggcacccauuuca

SEQ ID NO: 1044108 - RNA, 22 nt, Human
cauucauuuaugaaauaucuau

SEQ ID NO: 1044109 - RNA, 22 nt, Human
ccuggccuggcacucccucugc

SEQ ID NO: 1044110 - RNA, 22 nt, Human
ggcagcagggucuagauugaug

SEQ ID NO: 1044111 - RNA, 22 nt, Human
ugggcuccucgucacucgcugu

SEQ ID NO: 1044112 - RNA, 22 nt, Human
caaggcaggaagccugucuuau

SEQ ID NO: 1044113 - RNA, 22 nt, Human
ucucaggguuuccugggggcug

SEQ ID NO: 1044114 - RNA, 22 nt, Human
ugaugauguuuaucuugguauu

SEQ ID NO: 1044115 - RNA, 19 nt, Human
ccucuccgcccaccagccc

SEQ ID NO: 1044116 - RNA, 22 nt, Human
uggcccucagucuugcuccugc

SEQ ID NO: 1044117 - RNA, 22 nt, Human
cauguaaaacacucagaacagu

SEQ ID NO: 1044118 - RNA, 22 nt, Human
uaagaacaguagaacaguaggu

SEQ ID NO: 1044119 - RNA, 22 nt, Human
aaggagaguacaggaguuggua

SEQ ID NO: 1044120 - RNA, 20 nt, Human
uggggccuguuucugugguu

SEQ ID NO: 1044121 - RNA, 22 nt, Human
ggucccaggaagugcggcggcg

SEQ ID NO: 1044122 - RNA, 22 nt, Human
gcagguguggaguggggugagc

SEQ ID NO: 1044123 - RNA, 22 nt, Human
cacagggcaggccccaggccuc

SEQ ID NO: 1044124 - RNA, 22 nt, Human
cacugcuuuaaggcugaguaac

SEQ ID NO: 1044125 - RNA, 22 nt, Human
agcauuuauuucuuagaaauug

SEQ ID NO: 1044126 - RNA, 18 nt, Human
ccugcagcccaggaggcc

SEQ ID NO: 1044127 - RNA, 22 nt, Human
aacaugaaguuuucuauaguga

SEQ ID NO: 1044128 - RNA, 22 nt, Human
ugaugcugagccugggacugac

SEQ ID NO: 1044129 - RNA, 22 nt, Human
ccugagggaaggaugcuaccca

SEQ ID NO: 1044130 - RNA, 22 nt, Human
ucaggcugccuaucagacugug

SEQ ID NO: 1044131 - RNA, 22 nt, Human
uucuuucccaguagaugugaaa

SEQ ID NO: 1044132 - RNA, 22 nt, Human
uaacagaaauagaaaugagagu

SEQ ID NO: 1044133 - RNA, 22 nt, Human
ccugucugagccagggugggca

SEQ ID NO: 1044134 - RNA, 22 nt, Human
uggcagagaacacacaugauuc

SEQ ID NO: 1044135 - RNA, 22 nt, Human
uucaagauggcaccagugagug

SEQ ID NO: 1044136 - RNA, 22 nt, Human
ggcuggcacugaggagagcucu

SEQ ID NO: 1044137 - RNA, 22 nt, Human
gagcugccuguugcauagcaac

SEQ ID NO: 1044138 - RNA, 18 nt, Human
cagcugccagcucaugga

SEQ ID NO: 1044139 - RNA, 21 nt, Human
ugcugccauagaccugaggga

SEQ ID NO: 1044140 - RNA, 22 nt, Human
uugucugugaaauggaaauagu

SEQ ID NO: 1044141 - RNA, 22 nt, Human
uccugggcccaggcugccaggg

SEQ ID NO: 1044142 - RNA, 20 nt, Human
cuguaucagguuacaaagua

SEQ ID NO: 1044143 - RNA, 22 nt, Human
gcaggggcaggagaucucaggc

SEQ ID NO: 1044144 - RNA, 22 nt, Human
uuucaagcauaacugggaagag

SEQ ID NO: 1044145 - RNA, 22 nt, Human
aggcacugacaauucuggacug

SEQ ID NO: 1044146 - RNA, 22 nt, Human
uggggcugugagacuacaggau

SEQ ID NO: 1044147 - RNA, 22 nt, Human
uccagugguaguaaagaggucu

SEQ ID NO: 1044148 - RNA, 22 nt, Human
uagaaauguugguauuaacauu

SEQ ID NO: 1044149 - RNA, 22 nt, Human
gccugucugcgucacgcuuauu

SEQ ID NO: 1044150 - RNA, 22 nt, Human
uugcuuuguggugguucuucca

SEQ ID NO: 1044151 - RNA, 22 nt, Human
gaggaaaagagacagguuauug

SEQ ID NO: 1044152 - RNA, 19 nt, Human
gcagccaccgcggcggccg

SEQ ID NO: 1044153 - RNA, 22 nt, Human
caguggggaggccaggauagaa

SEQ ID NO: 1044154 - RNA, 22 nt, Human
uauuuugagguauuuuugagcu

SEQ ID NO: 1044155 - RNA, 22 nt, Human
caggcacagaguuauucauuua

SEQ ID NO: 1044156 - RNA, 22 nt, Human
ucugccugccagucugguccuc

SEQ ID NO: 1044157 - RNA, 22 nt, Human
uugaggaguguuuagggugagg

SEQ ID NO: 1044158 - RNA, 22 nt, Human
gcucagagggaacaaggggcug

SEQ ID NO: 1044159 - RNA, 22 nt, Human
ugcacuggggucccagcgcacg

SEQ ID NO: 1044160 - RNA, 22 nt, Human
uuccauauguauauagcuguua

SEQ ID NO: 1044161 - RNA, 22 nt, Human
cuauuucugccuaaugaccugu

SEQ ID NO: 1044162 - RNA, 22 nt, Human
aagaauguggguggauaugaug

SEQ ID NO: 1044163 - RNA, 22 nt, Human
ggggagugacgcagggccauag

SEQ ID NO: 1044164 - RNA, 22 nt, Human
uggccugguuguugcugccguu

SEQ ID NO: 1044165 - RNA, 22 nt, Human
cuuggccucuucucaggguggg

SEQ ID NO: 1044166 - RNA, 22 nt, Human
gccugccuuuuggaggcacauu

SEQ ID NO: 1044167 - RNA, 22 nt, Human
cagggacaauggcagagccuga

SEQ ID NO: 1044168 - RNA, 22 nt, Human
aaggcaggaugggaaaagauuu

SEQ ID NO: 1044169 - RNA, 22 nt, Human
guauccuuugcggaaauuucua

SEQ ID NO: 1044170 - RNA, 22 nt, Human
agacagcauggagcugauaaca

SEQ ID NO: 1044171 - RNA, 22 nt, Human
guggcccucugauagggucagg

SEQ ID NO: 1044172 - RNA, 22 nt, Human
uccucugcuggaagggcaagag

SEQ ID NO: 1044173 - RNA, 22 nt, Human
aaaggcuccuucucccaugacc

SEQ ID NO: 1044174 - RNA, 22 nt, Human
aucuuucagagcuccaucaggg

SEQ ID NO: 1044175 - RNA, 22 nt, Human
ucagaaaugaucguuauucauu

SEQ ID NO: 1044176 - RNA, 22 nt, Human
gagaggucaucucccaucagca

SEQ ID NO: 1044177 - RNA, 22 nt, Human
acugagcugcuugaagugaacu

SEQ ID NO: 1044178 - RNA, 22 nt, Human
agaaaucagaacccugaaguuc

SEQ ID NO: 1044179 - RNA, 22 nt, Human
auggcccaggccuccuguggcu

SEQ ID NO: 1044180 - RNA, 22 nt, Human
ccugugccauccugagcauccc

SEQ ID NO: 1044181 - RNA, 22 nt, Human
cucugucccagacccaccucuc

SEQ ID NO: 1044182 - RNA, 22 nt, Human
ggugaggggagagugaaagaaa

SEQ ID NO: 1044183 - RNA, 22 nt, Human
uuucuguuaggcaucauuuuaa

SEQ ID NO: 1044184 - RNA, 22 nt, Human
gugaggggaguaaagccauguu

SEQ ID NO: 1044185 - RNA, 22 nt, Human
ucagccuggcaggauggccugg

SEQ ID NO: 1044186 - RNA, 22 nt, Human
agagccagcauuugggcccugc

SEQ ID NO: 1044187 - RNA, 22 nt, Human
ugcugcuccugccuggcuccca

SEQ ID NO: 1044188 - RNA, 23 nt, Human
acagagguccaaacaguauaagc

SEQ ID NO: 1044189 - RNA, 22 nt, Human
ugccaggggaccuagggauguc

SEQ ID NO: 1044190 - RNA, 22 nt, Human
ggagccuggcaaugcugcgucc

SEQ ID NO: 1044191 - RNA, 22 nt, Human
gcaguggcuaggagucuggcgu

SEQ ID NO: 1044192 - RNA, 22 nt, Human
uagaaaguaaaucaguuuuauu

SEQ ID NO: 1044193 - RNA, 22 nt, Human
ucaucuucuauuaauagggaga

SEQ ID NO: 1044194 - RNA, 22 nt, Human
uuucuaaaugguggcugcauug

SEQ ID NO: 1044195 - RNA, 21 nt, Human
acagcagacaggcuuaggacc

SEQ ID NO: 1044196 - RNA, 22 nt, Human
ugggccugggagggcagacgcu

SEQ ID NO: 1044197 - RNA, 22 nt, Human
ggcccagccggcgagucucgcg

SEQ ID NO: 1044198 - RNA, 22 nt, Human
aggguggccaugagggagagau

SEQ ID NO: 1044199 - RNA, 22 nt, Human
uuaaaguucauuaaaugagcca

SEQ ID NO: 1044200 - RNA, 19 nt, Human
ucaaugcaugaaaucagcc

SEQ ID NO: 1044201 - RNA, 22 nt, Human
auaaggcaucucucaguuagca

SEQ ID NO: 1044202 - RNA, 22 nt, Human
accucugccaagaugugcuccc

SEQ ID NO: 1044203 - RNA, 22 nt, Human
ccagcccugccucucagggccc

SEQ ID NO: 1044204 - RNA, 22 nt, Human
aggccugagccccagguuuguu

SEQ ID NO: 1044205 - RNA, 20 nt, Human
agugucugggccucaggccc

SEQ ID NO: 1044206 - RNA, 22 nt, Human
ugucauuuucuaaucuguuguc

SEQ ID NO: 1044207 - RNA, 22 nt, Human
aggcagcccacaggacacagga

SEQ ID NO: 1044208 - RNA, 22 nt, Human
aaugugguuaacccauuuaaga

SEQ ID NO: 1044209 - RNA, 22 nt, Human
uuagcucagaaaauuuaaacuu

SEQ ID NO: 1044210 - RNA, 22 nt, Human
agcagggcagguaaggaucaga

SEQ ID NO: 1044211 - RNA, 22 nt, Human
gaggcaugucuggccuguccca

SEQ ID NO: 1044212 - RNA, 22 nt, Human
uuucuggcagcgggacaggggu

SEQ ID NO: 1044213 - RNA, 22 nt, Human
cauugcacuucugcuuuuccuc

SEQ ID NO: 1044214 - RNA, 22 nt, Human
uaugcacauauaaccugcacug

SEQ ID NO: 1044215 - RNA, 22 nt, Human
ggcuccuguccccucagcugcu

SEQ ID NO: 1044216 - RNA, 22 nt, Human
uacauguaggugacauuuuaau

SEQ ID NO: 1044217 - RNA, 18 nt, Human
acauuucucucugcguga

SEQ ID NO: 1044218 - RNA, 21 nt, Human
uagggcaggcauuggaagaga

SEQ ID NO: 1044219 - RNA, 22 nt, Human
uuuucauuguaaaucaggaaac

SEQ ID NO: 1044220 - RNA, 22 nt, Human
ccugggcuucugucuagauguu

SEQ ID NO: 1044221 - RNA, 22 nt, Human
agggagaaugaccaagguauau

SEQ ID NO: 1044222 - RNA, 22 nt, Human
agggcagaccacgugcaaggau

SEQ ID NO: 1044223 - RNA, 22 nt, Human
ugcucuccggcuuccguggccu

SEQ ID NO: 1044224 - RNA, 22 nt, Human
aaggaagggaaauagugauguc

SEQ ID NO: 1044225 - RNA, 22 nt, Human
agcagagccagaauuggaccag

SEQ ID NO: 1044226 - RNA, 22 nt, Human
uuggcucaggaccccugugacu

SEQ ID NO: 1044227 - RNA, 20 nt, Human
aacagggggcugcagagggc

SEQ ID NO: 1044228 - RNA, 22 nt, Human
gcuggagauaguaggauccaua

SEQ ID NO: 1044229 - RNA, 23 nt, Human
gggagccauggguggucauggag

SEQ ID NO: 1044230 - RNA, 22 nt, Human
uggcccugcuaugauccugcaa

SEQ ID NO: 1044231 - RNA, 19 nt, Human
ccuggcccugcugcgcggg

SEQ ID NO: 1044232 - RNA, 22 nt, Human
aaaacucugcaguuaguuucua

SEQ ID NO: 1044233 - RNA, 22 nt, Human
uaaggcacgcauaagagggggc

SEQ ID NO: 1044234 - RNA, 22 nt, Human
gcugucccaugguugcaagaug

SEQ ID NO: 1044235 - RNA, 18 nt, Human
gugagcagagagcaucac

SEQ ID NO: 1044236 - RNA, 22 nt, Human
uggacucagaaguguucuuuua

SEQ ID NO: 1044237 - RNA, 22 nt, Human
cagggcuguggcuuugugcugu

SEQ ID NO: 1044238 - RNA, 22 nt, Human
ucacugcaaccucugccuuccg

SEQ ID NO: 1044239 - RNA, 22 nt, Human
cugccgagugggucaugaggca

SEQ ID NO: 1044240 - RNA, 22 nt, Human
ucaggcuggaaugcaguggggc

SEQ ID NO: 1044241 - RNA, 22 nt, Human
ccagggccaagagaccucgagg

SEQ ID NO: 1044242 - RNA, 22 nt, Human
cugcaguguucuggaaugcauu

SEQ ID NO: 1044243 - RNA, 22 nt, Human
acaugcauacaagcacauguag

SEQ ID NO: 1044244 - RNA, 22 nt, Human
guggccuggaaaggcuggucug

SEQ ID NO: 1044245 - RNA, 22 nt, Human
ucaguguaaguuauguagaugu

SEQ ID NO: 1044246 - RNA, 22 nt, Human
aauguguauaugaacauacagg

SEQ ID NO: 1044247 - RNA, 22 nt, Human
caggugcccagcuccugcugug

SEQ ID NO: 1044248 - RNA, 22 nt, Human
gcugccaccguggagaugagug

SEQ ID NO: 1044249 - RNA, 22 nt, Human
gccagccugugggggcucugug

SEQ ID NO: 1044250 - RNA, 22 nt, Human
cccaguccuaaagcagacgcca

SEQ ID NO: 1044251 - RNA, 22 nt, Human
cugggcugcaguuccugguccu

SEQ ID NO: 1044252 - RNA, 22 nt, Human
caccagggcucugagcucugaa

SEQ ID NO: 1044253 - RNA, 22 nt, Human
cucucugaggcaggccuguggg

SEQ ID NO: 1044254 - RNA, 22 nt, Human
ggcugccugaggcagugagaga

SEQ ID NO: 1044255 - RNA, 22 nt, Human
caggagaagguuuggagugcag

SEQ ID NO: 1044256 - RNA, 18 nt, Human
cucucuggucuggauccc

SEQ ID NO: 1044257 - RNA, 17 nt, Human
gauuuccugaaguucuu

SEQ ID NO: 1044258 - RNA, 22 nt, Human
cacauugaaaugacccaauaau

SEQ ID NO: 1044259 - RNA, 22 nt, Human
ugcuggcucaguuugcagacuc

SEQ ID NO: 1044260 - RNA, 22 nt, Human
agcagggcucuguggagggugg

SEQ ID NO: 1044261 - RNA, 22 nt, Human
agaaaaggcuugaagagguuuu

SEQ ID NO: 1044262 - RNA, 22 nt, Human
ugcuuccugaggccgucuucuc

SEQ ID NO: 1044263 - RNA, 22 nt, Human
ccugcccuagagaugacacaau

SEQ ID NO: 1044264 - RNA, 22 nt, Human
agcucccaauugacuugaacua

SEQ ID NO: 1044265 - RNA, 21 nt, Human
ucuuguccuugcucucccacu

SEQ ID NO: 1044266 - RNA, 22 nt, Human
agagcuguucagcagccagguu

SEQ ID NO: 1044267 - RNA, 22 nt, Human
uagcagcuuccagagagggcag

SEQ ID NO: 1044268 - RNA, 22 nt, Human
gcuguauuuauuuucuaggguu

SEQ ID NO: 1044269 - RNA, 22 nt, Human
ggagaggugaauggcugcucua

SEQ ID NO: 1044270 - RNA, 22 nt, Human
ccagggcaugggaagaacugaa

SEQ ID NO: 1044271 - RNA, 22 nt, Human
cacugcucgcugcagcauggcc

SEQ ID NO: 1044272 - RNA, 22 nt, Human
cuguauuuucaugccuacguac

SEQ ID NO: 1044273 - RNA, 22 nt, Human
ugccacagaggugaagcccacu

SEQ ID NO: 1044274 - RNA, 22 nt, Human
uaugcacacaggcuuaauucau

SEQ ID NO: 1044275 - RNA, 22 nt, Human
gcagagccccauugcuggcggg

SEQ ID NO: 1044276 - RNA, 18 nt, Human
uacaugcauaaaugaagc

SEQ ID NO: 1044277 - RNA, 20 nt, Human
aauguauauuuuaugccagg

SEQ ID NO: 1044278 - RNA, 22 nt, Human
uguaugcuuuccaaaaaugcug

SEQ ID NO: 1044279 - RNA, 22 nt, Human
gcccucagaggacagcugacuu

SEQ ID NO: 1044280 - RNA, 22 nt, Human
ugggauggagccugaguauagu

SEQ ID NO: 1044281 - RNA, 22 nt, Human
aggauccugcgcuuugggggag

SEQ ID NO: 1044282 - RNA, 22 nt, Human
gauuucaaaaguagauccauca

SEQ ID NO: 1044283 - RNA, 22 nt, Human
caggcugagcucuggccugggc

SEQ ID NO: 1044284 - RNA, 22 nt, Human
aaggcccuaauagagcacauau

SEQ ID NO: 1044285 - RNA, 22 nt, Human
auguacaguggaaacuaacaaa

SEQ ID NO: 1044286 - RNA, 22 nt, Human
cccagacucaucccugggagcu

SEQ ID NO: 1044287 - RNA, 22 nt, Human
cagcauugaucccaggcugugg

SEQ ID NO: 1044288 - RNA, 22 nt, Human
ugcagugguguccagguguacu

SEQ ID NO: 1044289 - RNA, 22 nt, Human
gcagaggccaucaacuuugcca

SEQ ID NO: 1044290 - RNA, 22 nt, Human
ugauuuccacgugcacccaggu

SEQ ID NO: 1044291 - RNA, 22 nt, Human
cccaggaggccaagguugcagu

SEQ ID NO: 1044292 - RNA, 22 nt, Human
agggccagagucuguguagaua

SEQ ID NO: 1044293 - RNA, 22 nt, Human
aaaucugggagcagcucggcca

SEQ ID NO: 1044294 - RNA, 22 nt, Human
uuucuguaauuaaaagggcagg

SEQ ID NO: 1044295 - RNA, 22 nt, Human
cauugacaguucuuuaaguugc

SEQ ID NO: 1044296 - RNA, 22 nt, Human
gagacugcauuguccaaggguu

SEQ ID NO: 1044297 - RNA, 22 nt, Human
cugccucugcgucccacagagu

SEQ ID NO: 1044298 - RNA, 19 nt, Human
ugaagcaggcagagaagau

SEQ ID NO: 1044299 - RNA, 22 nt, Human
acccuggggguggccagugcca

SEQ ID NO: 1044300 - RNA, 22 nt, Human
uguguacaggccuugcuagacu

SEQ ID NO: 1044301 - RNA, 22 nt, Human
ugagaggcagaauggugccugc

SEQ ID NO: 1044302 - RNA, 22 nt, Human
ccuggcuuccuggagcucacaa

SEQ ID NO: 1044303 - RNA, 22 nt, Human
uuccugaugcacacagucauuu

SEQ ID NO: 1044304 - RNA, 22 nt, Human
gggagccaaggagagaggccuu

SEQ ID NO: 1044305 - RNA, 22 nt, Human
caagggaguuacugagggcggg

SEQ ID NO: 1044306 - RNA, 22 nt, Human
ggaggagacccugugucaguuu

SEQ ID NO: 1044307 - RNA, 22 nt, Human
ucuggcucaggucagacaggga

SEQ ID NO: 1044308 - RNA, 17 nt, Human
ggagagugggaauggcc

SEQ ID NO: 1044309 - RNA, 22 nt, Human
caggugcugcguggcggagcug

SEQ ID NO: 1044310 - RNA, 22 nt, Human
ucuggcucggauuugucuagca

SEQ ID NO: 1044311 - RNA, 19 nt, Human
cagaccuguccagccugug

SEQ ID NO: 1044312 - RNA, 22 nt, Human
agccagggauggcagugcccag

SEQ ID NO: 1044313 - RNA, 22 nt, Human
cugccuugaggagguuguggga

SEQ ID NO: 1044314 - RNA, 17 nt, Human
aagauuucauuagcuga

SEQ ID NO: 1044315 - RNA, 22 nt, Human
agcugaguuaauucaucacuua

SEQ ID NO: 1044316 - RNA, 21 nt, Human
ugcaggaaagugcugcgaccc

SEQ ID NO: 1044317 - RNA, 22 nt, Human
gugccucagcaccgccugcagc

SEQ ID NO: 1044318 - RNA, 22 nt, Human
agauacaucuugaacuucuaga

SEQ ID NO: 1044319 - RNA, 22 nt, Human
cuggacagaaaaggccacugga

SEQ ID NO: 1044320 - RNA, 22 nt, Human
acacaguaccccaaggcugggc

SEQ ID NO: 1044321 - RNA, 22 nt, Human
gugucaugggguuuguuauaca

SEQ ID NO: 1044322 - RNA, 22 nt, Human
aaaugaacucuuccugcauccc

SEQ ID NO: 1044323 - RNA, 22 nt, Human
cagggcucaucugugugaccag

SEQ ID NO: 1044324 - RNA, 22 nt, Human
gaugcugagagguggagggaac

SEQ ID NO: 1044325 - RNA, 22 nt, Human
guaaaugugcuucuuuuaacuu

SEQ ID NO: 1044326 - RNA, 22 nt, Human
uuugcauuuugauaagaucacu

SEQ ID NO: 1044327 - RNA, 22 nt, Human
cagggugccaaagaacaaauau

SEQ ID NO: 1044328 - RNA, 22 nt, Human
cugaaggagguagagugacaua

SEQ ID NO: 1044329 - RNA, 22 nt, Human
guacauguugguuguuuccagu

SEQ ID NO: 1044330 - RNA, 22 nt, Human
gcugucacucaccaggccugca

SEQ ID NO: 1044331 - RNA, 22 nt, Human
gcucaggaaggcucaaccagga

SEQ ID NO: 1044332 - RNA, 18 nt, Human
cugccuguugcugagagg

SEQ ID NO: 1044333 - RNA, 21 nt, Human
ugccaggccugagcugggguc

SEQ ID NO: 1044334 - RNA, 22 nt, Human
ggagccuuccagacugcccaca

SEQ ID NO: 1044335 - RNA, 22 nt, Human
ucuaggagcaugaagggaaggc

SEQ ID NO: 1044336 - RNA, 22 nt, Human
ugggcucauggcccagcacugg

SEQ ID NO: 1044337 - RNA, 22 nt, Human
gcuggccugcaaagcccggcug

SEQ ID NO: 1044338 - RNA, 22 nt, Human
aagcgccacgagaagcuggacc

SEQ ID NO: 1044339 - RNA, 20 nt, Human
cugugcuuuggaaccuggaa

SEQ ID NO: 1044340 - RNA, 18 nt, Human
cccacggugcuguagggc

SEQ ID NO: 1044341 - RNA, 22 nt, Human
ccagagccccugagcuucccug

SEQ ID NO: 1044342 - RNA, 22 nt, Human
uaggagaggugaauggcacacu

SEQ ID NO: 1044343 - RNA, 22 nt, Human
uugucuuaaauggauggacaau

SEQ ID NO: 1044344 - RNA, 18 nt, Human
uggacaggguggagaaaa

SEQ ID NO: 1044345 - RNA, 22 nt, Human
cuggccugugggcugucuccgg

SEQ ID NO: 1044346 - RNA, 22 nt, Human
uugugugguagcuucauugaac

SEQ ID NO: 1044347 - RNA, 22 nt, Human
gaaaaugugccuuuggguauug

SEQ ID NO: 1044348 - RNA, 22 nt, Human
ggagcuggcuacagagaacucc

SEQ ID NO: 1044349 - RNA, 22 nt, Human
ggcagcucugaugaugcucugg

SEQ ID NO: 1044350 - RNA, 22 nt, Human
auugaaagauuuugggcucaug

SEQ ID NO: 1044351 - RNA, 22 nt, Human
aaagaacaaauuagcuguuuua

SEQ ID NO: 1044352 - RNA, 22 nt, Human
ccacucugauuuuggcuccacu

SEQ ID NO: 1044353 - RNA, 22 nt, Human
augcaguacauacaaacacuga

SEQ ID NO: 1044354 - RNA, 22 nt, Human
aaaaucaguacacuuuauuuug

SEQ ID NO: 1044355 - RNA, 22 nt, Human
cccaggaggcagagguugcagu

SEQ ID NO: 1044356 - RNA, 22 nt, Human
caggggacaguaugguggauga

SEQ ID NO: 1044357 - RNA, 19 nt, Human
cagcucaguuugauucucu

SEQ ID NO: 1044358 - RNA, 22 nt, Human
gaaggcuugcagcucuguggca

SEQ ID NO: 1044359 - RNA, 21 nt, Human
uggcucugagccucauggcug

SEQ ID NO: 1044360 - RNA, 20 nt, Human
cagucccaauccagggccag

SEQ ID NO: 1044361 - RNA, 22 nt, Human
agauggggcucaguguggaggc

SEQ ID NO: 1044362 - RNA, 22 nt, Human
cucaggaugucggugacuauug

SEQ ID NO: 1044363 - RNA, 22 nt, Human
aucuggcuuaccuagggugccu

SEQ ID NO: 1044364 - RNA, 22 nt, Human
gccagcugguaggcaccuagcc

SEQ ID NO: 1044365 - RNA, 22 nt, Human
guguuccauguuugagguaguu

SEQ ID NO: 1044366 - RNA, 22 nt, Human
ucuucuuccucauuuauacaua

SEQ ID NO: 1044367 - RNA, 22 nt, Human
cucaggauggaagccuacagga

SEQ ID NO: 1044368 - RNA, 22 nt, Human
uggcucaggguccccaaauggu

SEQ ID NO: 1044369 - RNA, 22 nt, Human
aaaaacugcaauuacuuuuguc

SEQ ID NO: 1044370 - RNA, 22 nt, Human
guguuuccaguucagaaagcaa

SEQ ID NO: 1044371 - RNA, 22 nt, Human
ggcucugcccagguggacagca

SEQ ID NO: 1044372 - RNA, 22 nt, Human
cuugcugggguaagucugugcu

SEQ ID NO: 1044373 - RNA, 22 nt, Human
gagggcagagacagugauucac

SEQ ID NO: 1044374 - RNA, 22 nt, Human
uuucauaugggcauuggcaaua

SEQ ID NO: 1044375 - RNA, 22 nt, Human
cuugaaagauuuggccucugug

SEQ ID NO: 1044376 - RNA, 22 nt, Human
gcagcguggggcugagucagcu

SEQ ID NO: 1044377 - RNA, 22 nt, Human
aucuggcucucucauuuacaaa

SEQ ID NO: 1044378 - RNA, 22 nt, Human
uagcacauaacuuagaauaguu

SEQ ID NO: 1044379 - RNA, 22 nt, Human
ccugcugugaaacuggcauaug

SEQ ID NO: 1044380 - RNA, 22 nt, Human
ugcucccagggacucuggcugg

SEQ ID NO: 1044381 - RNA, 22 nt, Human
gcuggccucuacaggccggcca

SEQ ID NO: 1044382 - RNA, 22 nt, Human
ccucagagguguggcaucucug

SEQ ID NO: 1044383 - RNA, 22 nt, Human
aagaggaaaugauugacuauau

SEQ ID NO: 1044384 - RNA, 22 nt, Human
caggugccucaggaugagacaa

SEQ ID NO: 1044385 - RNA, 22 nt, Human
uggccucucuaccaggcagccu

SEQ ID NO: 1044386 - RNA, 22 nt, Human
ugcucuggguccugggccuccu

SEQ ID NO: 1044387 - RNA, 22 nt, Human
aagaauucacugguagagucaa

SEQ ID NO: 1044388 - RNA, 22 nt, Human
ucucuuucuauugcaccaugcu

SEQ ID NO: 1044389 - RNA, 23 nt, Human
uggggcugauggagacggaccag

SEQ ID NO: 1044390 - RNA, 21 nt, Human
cuugaaagguagagucuacag

SEQ ID NO: 1044391 - RNA, 22 nt, Human
uaagaaauuuaguuauagaaug

SEQ ID NO: 1044392 - RNA, 22 nt, Human
aguggcagagguugacugcagu

SEQ ID NO: 1044393 - RNA, 22 nt, Human
cagcuggccugaucccuguggc

SEQ ID NO: 1044394 - RNA, 18 nt, Human
ccuggcuuccaucuuggu

SEQ ID NO: 1044395 - RNA, 18 nt, Human
gggcacuggggacuggag

SEQ ID NO: 1044396 - RNA, 22 nt, Human
gccuugcuuugcuucuggacag

SEQ ID NO: 1044397 - RNA, 22 nt, Human
acuccuggggauccauuccuuu

SEQ ID NO: 1044398 - RNA, 20 nt, Human
aagagcugacucacaguggu

SEQ ID NO: 1044399 - RNA, 22 nt, Human
caggaugugaggaggccauuug

SEQ ID NO: 1044400 - RNA, 22 nt, Human
gugggaugcaguggugaguggc

SEQ ID NO: 1044401 - RNA, 22 nt, Human
aaaaauagcuucucuugucccu

SEQ ID NO: 1044402 - RNA, 22 nt, Human
uggccuggcugcccugucugga

SEQ ID NO: 1044403 - RNA, 17 nt, Human
gcuuccucaugcaguuc

SEQ ID NO: 1044404 - RNA, 17 nt, Human
gagaguguauuggaugc

SEQ ID NO: 1044405 - RNA, 22 nt, Human
aaaguucagauuagacucaaga

SEQ ID NO: 1044406 - RNA, 22 nt, Human
ugucccauggacacaacuucuu

SEQ ID NO: 1044407 - RNA, 22 nt, Human
auacaucucauguaagagauaa

SEQ ID NO: 1044408 - RNA, 22 nt, Human
ccaagggcucugacuugccugc

SEQ ID NO: 1044409 - RNA, 22 nt, Human
agaaaucacaggaggcagaagg

SEQ ID NO: 1044410 - RNA, 20 nt, Human
ugcagaagaacguucugguu

SEQ ID NO: 1044411 - RNA, 22 nt, Human
ucaugcccagagcaguaaauua

SEQ ID NO: 1044412 - RNA, 21 nt, Human
ucaaagcacauauuugcacau

SEQ ID NO: 1044413 - RNA, 22 nt, Human
cccaagggagugccuggucaac

SEQ ID NO: 1044414 - RNA, 22 nt, Human
uaacagaagaaaacauauugga

SEQ ID NO: 1044415 - RNA, 22 nt, Human
gggcugcuuuuuucuuagcaga

SEQ ID NO: 1044416 - RNA, 22 nt, Human
cugucagcacucuacuacagau

SEQ ID NO: 1044417 - RNA, 22 nt, Human
uccagggcugacuugggagagg

SEQ ID NO: 1044418 - RNA, 22 nt, Human
auacuuacuuuucuucagacua

SEQ ID NO: 1044419 - RNA, 22 nt, Human
agccucuggcccuagacugcuu

SEQ ID NO: 1044420 - RNA, 19 nt, Human
cugagagaugcuucacaca

SEQ ID NO: 1044421 - RNA, 23 nt, Human
agacccagagacuggcucugcuc

SEQ ID NO: 1044422 - RNA, 22 nt, Human
gucugucaucugagauggagug

SEQ ID NO: 1044423 - RNA, 22 nt, Human
ucacauuuucuacuacuguacg

SEQ ID NO: 1044424 - RNA, 22 nt, Human
agccccucuguggcucugccuc

SEQ ID NO: 1044425 - RNA, 22 nt, Human
uuugcauuuccagaguagcaga

SEQ ID NO: 1044426 - RNA, 22 nt, Human
uguaugcagcaaaacaauuagu

SEQ ID NO: 1044427 - RNA, 22 nt, Human
uggcagcauuuuuuccagaaca

SEQ ID NO: 1044428 - RNA, 21 nt, Human
aucagcaaaugccugucuccc

SEQ ID NO: 1044429 - RNA, 22 nt, Human
gggagagagagcucauguugaa

SEQ ID NO: 1044430 - RNA, 20 nt, Human
ccagcugagccaaggggaga

SEQ ID NO: 1044431 - RNA, 22 nt, Human
cagagcugacccaaggauugaa

SEQ ID NO: 1044432 - RNA, 22 nt, Human
aagagcuggauggaaucuggga

SEQ ID NO: 1044433 - RNA, 22 nt, Human
aggcaggcucaggcccaugcuu

SEQ ID NO: 1044434 - RNA, 22 nt, Human
caggguccaucuuucaucacug

SEQ ID NO: 1044435 - RNA, 22 nt, Human
cgucccaguuccagccgcgcug

SEQ ID NO: 1044436 - RNA, 22 nt, Human
caaugugugcuuacaggccagu

SEQ ID NO: 1044437 - RNA, 22 nt, Human
ugggcacaggggaauggaugaa

SEQ ID NO: 1044438 - RNA, 22 nt, Human
acacugcucacuucuucccuug

SEQ ID NO: 1044439 - RNA, 22 nt, Human
aucuggcuccuacacuugaaga

SEQ ID NO: 1044440 - RNA, 22 nt, Human
cagggcaguuuuacuucucucu

SEQ ID NO: 1044441 - RNA, 22 nt, Human
ucucagaggugcccuggcaucu

SEQ ID NO: 1044442 - RNA, 22 nt, Human
gccagguggucuggcuccagag

SEQ ID NO: 1044443 - RNA, 22 nt, Human
cagcucugaagaaaggugucua

SEQ ID NO: 1044444 - RNA, 22 nt, Human
gccugguguccagaggcgagug

SEQ ID NO: 1044445 - RNA, 22 nt, Human
aggagcuguuuuguucagcaaa

SEQ ID NO: 1044446 - RNA, 22 nt, Human
ugugcagcuaguccuggacuug

SEQ ID NO: 1044447 - RNA, 22 nt, Human
ccaagggcugcugaggugucca

SEQ ID NO: 1044448 - RNA, 22 nt, Human
agagauguucauucagcauguu

SEQ ID NO: 1044449 - RNA, 22 nt, Human
ucuuggagacucuuguauauuu

SEQ ID NO: 1044450 - RNA, 22 nt, Human
ugaugguuuuauuaauaggacc

SEQ ID NO: 1044451 - RNA, 22 nt, Human
ccuuuuucaauauagaauugca

SEQ ID NO: 1044452 - RNA, 22 nt, Human
ucagaguggugguuuugccuuc

SEQ ID NO: 1044453 - RNA, 22 nt, Human
gagguagcaugcuggaagggac

SEQ ID NO: 1044454 - RNA, 22 nt, Human
gcuguauuccugcacuguauag

SEQ ID NO: 1044455 - RNA, 22 nt, Human
ucaggagcagcaugggugagag

SEQ ID NO: 1044456 - RNA, 19 nt, Human
ucccuuccugucgggcucc

SEQ ID NO: 1044457 - RNA, 22 nt, Human
gguggagcuggaccaggagagg

SEQ ID NO: 1044458 - RNA, 22 nt, Human
uggccuggcccugaggcccugu

SEQ ID NO: 1044459 - RNA, 22 nt, Human
uggagcauauucuggagcuugg

SEQ ID NO: 1044460 - RNA, 22 nt, Human
uccuggagaauccugccaccug

SEQ ID NO: 1044461 - RNA, 20 nt, Human
auugucagccuucagaggag

SEQ ID NO: 1044462 - RNA, 22 nt, Human
gggccuggugcuucugacuccu

SEQ ID NO: 1044463 - RNA, 22 nt, Human
uccagcagcccgaaggcccauc

SEQ ID NO: 1044464 - RNA, 22 nt, Human
gcacagggcaacaggucuguua

SEQ ID NO: 1044465 - RNA, 21 nt, Human
ucuuuccugcccaguugcccu

SEQ ID NO: 1044466 - RNA, 22 nt, Human
agccacgucccugucaggguca

SEQ ID NO: 1044467 - RNA, 22 nt, Human
gccagcaguccugcugugugcc

SEQ ID NO: 1044468 - RNA, 22 nt, Human
cagucccaggguugguucagcu

SEQ ID NO: 1044469 - RNA, 22 nt, Human
gagagcugauagaugagcuacu

SEQ ID NO: 1044470 - RNA, 21 nt, Human
acagaguaguugaaacagaga

SEQ ID NO: 1044471 - RNA, 22 nt, Human
aaggcagcccuggcucagccug

SEQ ID NO: 1044472 - RNA, 18 nt, Human
uacagcuugaguugacug

SEQ ID NO: 1044473 - RNA, 22 nt, Human
uuccuggggacuuaccgucauu

SEQ ID NO: 1044474 - RNA, 21 nt, Human
gccaucaccaagcucuucccc

SEQ ID NO: 1044475 - RNA, 22 nt, Human
cugggguccuugccauguguca

SEQ ID NO: 1044476 - RNA, 22 nt, Human
ucacagcugggguuuuggcagc

SEQ ID NO: 1044477 - RNA, 22 nt, Human
gcuccugggcccugggcuaacu

SEQ ID NO: 1044478 - RNA, 22 nt, Human
auguuugaaauuguaaguauau

SEQ ID NO: 1044479 - RNA, 22 nt, Human
gcaguccuguagcgacuuuuuu

SEQ ID NO: 1044480 - RNA, 22 nt, Human
aaaacuuucagggauacagaaa

SEQ ID NO: 1044481 - RNA, 22 nt, Human
cuucuggguauuccagauaccu

SEQ ID NO: 1044482 - RNA, 18 nt, Human
ucaguccuccauagagcu

SEQ ID NO: 1044483 - RNA, 22 nt, Human
gguggcagaggugcaucagccc

SEQ ID NO: 1044484 - RNA, 22 nt, Human
ccucuuccuucucacuguggaa

SEQ ID NO: 1044485 - RNA, 22 nt, Human
cggggccuagucuaccucggca

SEQ ID NO: 1044486 - RNA, 22 nt, Human
gggcucggcaucuguggacucu

SEQ ID NO: 1044487 - RNA, 22 nt, Human
uucuccucagcaaggcagcuuu

SEQ ID NO: 1044488 - RNA, 22 nt, Human
ucuccucuauuucuguauguau

SEQ ID NO: 1044489 - RNA, 22 nt, Human
gggcuuggcuggggccaccaga

SEQ ID NO: 1044490 - RNA, 22 nt, Human
ucaccucucuggccgucuaccu

SEQ ID NO: 1044491 - RNA, 20 nt, Human
ucucuaacaugaaugcuauc

SEQ ID NO: 1044492 - RNA, 17 nt, Human
ucuccuggcucuaucag

SEQ ID NO: 1044493 - RNA, 22 nt, Human
acaguccuguacaggccauauc

SEQ ID NO: 1044494 - RNA, 20 nt, Human
uccugggguaagccaugguc

SEQ ID NO: 1044495 - RNA, 22 nt, Human
ucaccggcagacguggccugau

SEQ ID NO: 1044496 - RNA, 22 nt, Human
cagggagcuggugccagccgac

SEQ ID NO: 1044497 - RNA, 22 nt, Human
cucccagggucuaggcugcugg

SEQ ID NO: 1044498 - RNA, 22 nt, Human
ggucuccugaccuuuagucccu

SEQ ID NO: 1044499 - RNA, 22 nt, Human
auccugggaaguggccuccucc

SEQ ID NO: 1044500 - RNA, 22 nt, Human
ucuccucuccuuucauguuguu

SEQ ID NO: 1044501 - RNA, 22 nt, Human
ggcggccugugggucggccuca

SEQ ID NO: 1044502 - RNA, 22 nt, Human
cagagcagcagagcuuccaugg

SEQ ID NO: 1044503 - RNA, 19 nt, Human
uccuggggaggggcauggc

SEQ ID NO: 1044504 - RNA, 23 nt, Human
uugguuacuggauuugaggggcc

SEQ ID NO: 1044505 - RNA, 22 nt, Human
cauuuuacgacauagggcaggc

SEQ ID NO: 1044506 - RNA, 22 nt, Human
cacagcuucuccccgcugcggc

SEQ ID NO: 1044507 - RNA, 22 nt, Human
gcagggcugauggcuucccuca

SEQ ID NO: 1044508 - RNA, 22 nt, Human
cugggagggguagccaauccua

SEQ ID NO: 1044509 - RNA, 22 nt, Human
gcaguccuuaggagaggaagua

SEQ ID NO: 1044510 - RNA, 22 nt, Human
ccuccugggccuugcucuguga

SEQ ID NO: 1044511 - RNA, 23 nt, Human
agaagcagcuucuggaguaucgg

SEQ ID NO: 1044512 - RNA, 22 nt, Human
auagucuuagaaucuugagugu

SEQ ID NO: 1044513 - RNA, 22 nt, Human
ucaguccuuaucugguguucag

SEQ ID NO: 1044514 - RNA, 22 nt, Human
ucccggcgcugggagguggguc

SEQ ID NO: 1044515 - RNA, 19 nt, Human
ugggcuuccccagggcaga

SEQ ID NO: 1044516 - RNA, 21 nt, Human
uuccuccucuggagaagaaga

SEQ ID NO: 1044517 - RNA, 22 nt, Human
cccagccuuugcuuccugguuc

SEQ ID NO: 1044518 - RNA, 22 nt, Human
gugccuccaggcucgacuaguc

SEQ ID NO: 1044519 - RNA, 22 nt, Human
auccuggguaaguuccuuuuaa

SEQ ID NO: 1044520 - RNA, 20 nt, Human
guccugggagccacagcaca

SEQ ID NO: 1044521 - RNA, 22 nt, Human
agccuuacauaaacagccuuau

SEQ ID NO: 1044522 - RNA, 22 nt, Human
cucucuccuuagcugcagacca

SEQ ID NO: 1044523 - RNA, 22 nt, Human
gucuccuuguggaucucaagga

SEQ ID NO: 1044524 - RNA, 22 nt, Human
ucacuagugguuucuggugguu

SEQ ID NO: 1044525 - RNA, 19 nt, Human
gggccucacccacaccucc

SEQ ID NO: 1044526 - RNA, 22 nt, Human
agccagucggggccaugcuggg

SEQ ID NO: 1044527 - RNA, 22 nt, Human
ucuccuggcauuugguugagua

SEQ ID NO: 1044528 - RNA, 22 nt, Human
ccucagucuauuuccagcaggu

SEQ ID NO: 1044529 - RNA, 17 nt, Human
gcaggcacugcugccug

SEQ ID NO: 1044530 - RNA, 22 nt, Human
gccuggggaacuugauccuguc

SEQ ID NO: 1044531 - RNA, 22 nt, Human
ugguuacccagucgcuggaguu

SEQ ID NO: 1044532 - RNA, 22 nt, Human
ucccagucuagagccggauugg

SEQ ID NO: 1044533 - RNA, 22 nt, Human
ccuggggaccugccucagcccu

SEQ ID NO: 1044534 - RNA, 20 nt, Human
cucuuuucacucucaguggu

SEQ ID NO: 1044535 - RNA, 20 nt, Human
agcuuugguuaagccagugg

SEQ ID NO: 1044536 - RNA, 22 nt, Human
cagggcucgcucgcucgcucgc

SEQ ID NO: 1044537 - RNA, 22 nt, Human
acuccuggguuccggagauucu

SEQ ID NO: 1044538 - RNA, 18 nt, Human
uucggcagauacgcuugg

SEQ ID NO: 1044539 - RNA, 22 nt, Human
ccuguacuuguauuaaaggucc

SEQ ID NO: 1044540 - RNA, 22 nt, Human
uccuggggaggucgaggcugag

SEQ ID NO: 1044541 - RNA, 22 nt, Human
guccuggggauuauagaguguu

SEQ ID NO: 1044542 - RNA, 21 nt, Human
ccuguggugccagaucgccag

SEQ ID NO: 1044543 - RNA, 22 nt, Human
uguuggcagugcuacagucagu

SEQ ID NO: 1044544 - RNA, 22 nt, Human
aguggcaguagaugagcugguu

SEQ ID NO: 1044545 - RNA, 19 nt, Human
uggcagcauugguaccuug

SEQ ID NO: 1044546 - RNA, 22 nt, Human
aguuuacccacuguugaaauua

SEQ ID NO: 1044547 - RNA, 21 nt, Human
uccuccuguagaggguccugg

SEQ ID NO: 1044548 - RNA, 21 nt, Human
gcuccuggugcugcguggcgc

SEQ ID NO: 1044549 - RNA, 22 nt, Murray Valley encephalitis virus
ugcucauuuuuacgcuugccac

SEQ ID NO: 1044550 - RNA, 22 nt, Murray Valley encephalitis virus
acagcuuggaugguguugcgag

SEQ ID NO: 1044551 - RNA, 22 nt, Murray Valley encephalitis virus
ggggauauucgugcucuuccaa

SEQ ID NO: 1044552 - RNA, 22 nt, Murray Valley encephalitis virus
gggaggcuuuccaaccguggag

SEQ ID NO: 1044553 - RNA, 22 nt, Murray Valley encephalitis virus
uccauuguuggcagggacuccu

SEQ ID NO: 1044554 - RNA, 22 nt, Murray Valley encephalitis virus
uccauuguuggcagggacuccu

SEQ ID NO: 1044555 - RNA, 22 nt, Murray Valley encephalitis virus
gggaggcuuuccaaccguggag

SEQ ID NO: 1044556 - RNA, 22 nt, Human
uagcaauagaaacauauaaagu

SEQ ID NO: 1044557 - RNA, 22 nt, Human
ucugugcauuguaacaacuaaa

SEQ ID NO: 1044558 - RNA, 22 nt, Human
aaguaugaaucaaagacuaucu

SEQ ID NO: 1044559 - RNA, 22 nt, Human
ucuagaauuuugccauauagcu

SEQ ID NO: 1044560 - RNA, 22 nt, Human
acauuuagaguucuuuacucca

SEQ ID NO: 1044561 - RNA, 22 nt, Human
ugucagaugcgauaaacuagug

SEQ ID NO: 1044562 - RNA, 22 nt, Human
auuuagcaaaaaaugaugaagc

SEQ ID NO: 1044563 - RNA, 22 nt, Human
aaucuucauuuugacaagauuc

SEQ ID NO: 1044564 - RNA, 22 nt, Human
gaauaguucuauggcugcaggg

SEQ ID NO: 1044565 - RNA, 22 nt, Human
agucuacaaucuuaaaugaacu

SEQ ID NO: 1044566 - RNA, 22 nt, Human
aauguauggauucaugucugug

SEQ ID NO: 1044567 - RNA, 22 nt, Human
aauuaugagguagauaucacau

SEQ ID NO: 1044568 - RNA, 22 nt, Human
aguaugaauugcuuugccugua

SEQ ID NO: 1044569 - RNA, 21 nt, Human
augugaaaccuuccacgcuga

SEQ ID NO: 1044570 - RNA, 22 nt, Human
gcauaugaucacgugugucggu

SEQ ID NO: 1044571 - RNA, 20 nt, Human
ucugugcaccugcuacaagg

SEQ ID NO: 1044572 - RNA, 22 nt, Human
aauaacuucaguucuuacauua

SEQ ID NO: 1044573 - RNA, 22 nt, Human
uaugaaaugguaguaggaaggg

SEQ ID NO: 1044574 - RNA, 22 nt, Human
uauacaaugaguacauucuggg

SEQ ID NO: 1044575 - RNA, 22 nt, Human
cagcauuuucuuaauguaggug

SEQ ID NO: 1044576 - RNA, 22 nt, Human
aagcacauuguacauuugugcu

SEQ ID NO: 1044577 - RNA, 22 nt, Human
aaacacagauuucuuuguccca

SEQ ID NO: 1044578 - RNA, 22 nt, Human
auauucuuccaaaacaucauuu

SEQ ID NO: 1044579 - RNA, 22 nt, Human
aauugcaacagguagacuuuuc

SEQ ID NO: 1044580 - RNA, 22 nt, Human
uucauacacgaaaaugcaugca

SEQ ID NO: 1044581 - RNA, 22 nt, Human
ugugaaaagcguguguucuagg

SEQ ID NO: 1044582 - RNA, 22 nt, Human
gaacacauuucucugacuguag

SEQ ID NO: 1044583 - RNA, 22 nt, Human
caaauaguaugagcaaugauuc

SEQ ID NO: 1044584 - RNA, 22 nt, Human
uucugucuguaaacuucucaau

SEQ ID NO: 1044585 - RNA, 22 nt, Human
uaacacauuuuccucauacgga

SEQ ID NO: 1044586 - RNA, 22 nt, Human
uuucugaagauacagcuuugcu

SEQ ID NO: 1044587 - RNA, 22 nt, Human
auacacauauguguguauaugu

SEQ ID NO: 1044588 - RNA, 22 nt, Human
uaacuuucacaucacacugacu

SEQ ID NO: 1044589 - RNA, 22 nt, Human
auauaauuguucugaaguguuu

SEQ ID NO: 1044590 - RNA, 22 nt, Human
auauacuuggagacuaucauug

SEQ ID NO: 1044591 - RNA, 22 nt, Human
aucacauugccagugauuaccc

SEQ ID NO: 1044592 - RNA, 22 nt, Human
aguaugaagaauacauagauga

SEQ ID NO: 1044593 - RNA, 22 nt, Human
auguuugacugaguuuggcaga

SEQ ID NO: 1044594 - RNA, 22 nt, Human
augaaacagugaauuagucaag

SEQ ID NO: 1044595 - RNA, 22 nt, Human
aauacugccugugagguaacuc

SEQ ID NO: 1044596 - RNA, 22 nt, Human
aaauauagcaauuaugccuacu

SEQ ID NO: 1044597 - RNA, 22 nt, Human
uguaugaaagaacaagggcuua

SEQ ID NO: 1044598 - RNA, 22 nt, Human
acauacuuaugcuaaaaauaua

SEQ ID NO: 1044599 - RNA, 22 nt, Human
uguaugaaaaggaauagauuga

SEQ ID NO: 1044600 - RNA, 22 nt, Human
uucugucacagugcugguauca

SEQ ID NO: 1044601 - RNA, 22 nt, Human
uaacacauuuuaagccauuuua

SEQ ID NO: 1044602 - RNA, 22 nt, Human
gaacacauguccuccuuggauu

SEQ ID NO: 1044603 - RNA, 22 nt, Human
uuucaaacauagaucugaauau

SEQ ID NO: 1044604 - RNA, 22 nt, Human
gagcauuuuugucugcauuuua

SEQ ID NO: 1044605 - RNA, 22 nt, Human
uauauguaagcuauguaagagu

SEQ ID NO: 1044606 - RNA, 22 nt, Human
caacacauugaagcuaugauga

SEQ ID NO: 1044607 - RNA, 22 nt, Human
gugauaaagacgugucauaauu

SEQ ID NO: 1044608 - RNA, 22 nt, Human
uaauaucuggcauucaaacaug

SEQ ID NO: 1044609 - RNA, 21 nt, Human
auaaaguuuuacaggaaugca

SEQ ID NO: 1044610 - RNA, 22 nt, Human
uguuuauuacaguucuuggaau

SEQ ID NO: 1044611 - RNA, 22 nt, Human
uguucauaucauuuugaaagcu

SEQ ID NO: 1044612 - RNA, 22 nt, Human
gaacacaugauuauaaaugcua

SEQ ID NO: 1044613 - RNA, 22 nt, Human
auaacuuucuucacccuugcug

SEQ ID NO: 1044614 - RNA, 22 nt, Human
uugaauuauaagugugucuacu

SEQ ID NO: 1044615 - RNA, 22 nt, Human
ugaaagauugugauucaauaug

SEQ ID NO: 1044616 - RNA, 22 nt, Human
gaauacauuggaaaucagaaua

SEQ ID NO: 1044617 - RNA, 22 nt, Human
guuuuccugaaacugauggugu

SEQ ID NO: 1044618 - RNA, 22 nt, Human
uuucugaacaaagccauuauca

SEQ ID NO: 1044619 - RNA, 22 nt, Human
cuacaaugacagaauugaguag

SEQ ID NO: 1044620 - RNA, 22 nt, Human
ucugaaauagaagugucuuucu

SEQ ID NO: 1044621 - RNA, 22 nt, Human
aguaugaauacagauuuucucu

SEQ ID NO: 1044622 - RNA, 22 nt, Human
cucauaaugugacuguauuuga

SEQ ID NO: 1044623 - RNA, 22 nt, Human
aaguuucaaauguugauuaugc

SEQ ID NO: 1044624 - RNA, 22 nt, Human
aauacuuuccuauauaaggugc

SEQ ID NO: 1044625 - RNA, 22 nt, Human
cauaauuucacugucguauggc

SEQ ID NO: 1044626 - RNA, 22 nt, Human
uguaugaagguuuaccugcugu

SEQ ID NO: 1044627 - RNA, 22 nt, Human
aauaacuuuuaaaagacccugg

SEQ ID NO: 1044628 - RNA, 22 nt, Human
agauuuauguggucacacucag

SEQ ID NO: 1044629 - RNA, 22 nt, Human
auucucaauggcuacuuucaua

SEQ ID NO: 1044630 - RNA, 22 nt, Human
aaaguuuguugcuuacaaagaa

SEQ ID NO: 1044631 - RNA, 19 nt, Human
uugaaauuguuugauaugg

SEQ ID NO: 1044632 - RNA, 21 nt, Human
augugaaauaucaucagagca

SEQ ID NO: 1044633 - RNA, 22 nt, Human
uuucauugaugggugauagaaa

SEQ ID NO: 1044634 - RNA, 22 nt, Human
uguauaaacuuaagcaggaacc

SEQ ID NO: 1044635 - RNA, 22 nt, Human
uuucauaaccucaagcuacagu

SEQ ID NO: 1044636 - RNA, 22 nt, Human
aacuacauuguccuuucugaag

SEQ ID NO: 1044637 - RNA, 22 nt, Human
gauucacucauauuuuacguuu

SEQ ID NO: 1044638 - RNA, 22 nt, Human
agaauaugaucggaauacagau

SEQ ID NO: 1044639 - RNA, 22 nt, Human
auucugucuaagcuggcuacgu

SEQ ID NO: 1044640 - RNA, 22 nt, Human
cuagguauucauguuucguggc

SEQ ID NO: 1044641 - RNA, 22 nt, Human
uucugucagaagcuagcuccug

SEQ ID NO: 1044642 - RNA, 22 nt, Human
uuucacaaucaaauggugaaau

SEQ ID NO: 1044643 - RNA, 22 nt, Human
uguaugaaguuacugagccucu

SEQ ID NO: 1044644 - RNA, 22 nt, Human
gugcuaaaggguuaugaacaag

SEQ ID NO: 1044645 - RNA, 22 nt, Human
uacauguauguguacgugcaug

SEQ ID NO: 1044646 - RNA, 22 nt, Human
uucugucagcgucagaaauucu

SEQ ID NO: 1044647 - RNA, 22 nt, Human
aucugcuugaguuugaagucag

SEQ ID NO: 1044648 - RNA, 22 nt, Human
cauuuacacuucuaaccacaag

SEQ ID NO: 1044649 - RNA, 22 nt, Human
ucugcucuguggcuucagcuaa

SEQ ID NO: 1044650 - RNA, 21 nt, Human
auucugucaucccagcuacuu

SEQ ID NO: 1044651 - RNA, 22 nt, Human
uuggaaagauuauuauuaugaa

SEQ ID NO: 1044652 - RNA, 22 nt, Human
uacauauguaaacauguauaaa

SEQ ID NO: 1044653 - RNA, 22 nt, Human
auaugagaguaaaugccgaucu

SEQ ID NO: 1044654 - RNA, 22 nt, Human
uucugucacuuaggaggucaua

SEQ ID NO: 1044655 - RNA, 22 nt, Human
uguaggaauguuuuuaaguugg

SEQ ID NO: 1044656 - RNA, 22 nt, Human
aauacauauggaauuccauguu

SEQ ID NO: 1044657 - RNA, 22 nt, Human
gagcauuugguuauaguaauuu

SEQ ID NO: 1044658 - RNA, 22 nt, Human
uagacauuucugguuauugaca

SEQ ID NO: 1044659 - RNA, 22 nt, Human
uagaaacaaugacaugcuugua

SEQ ID NO: 1044660 - RNA, 22 nt, Human
aucugcuuuugagaauuuacuu

SEQ ID NO: 1044661 - RNA, 22 nt, Human
ugcuacaauucacaucuggaua

SEQ ID NO: 1044662 - RNA, 22 nt, Human
gaacaucagucauaauuuaacg

SEQ ID NO: 1044663 - RNA, 22 nt, Human
aaugucauugguaaagauuagg

SEQ ID NO: 1044664 - RNA, 22 nt, Human
augcuacagaguuugaauaugu

SEQ ID NO: 1044665 - RNA, 22 nt, Human
uuagaacuuaagaauacugucu

SEQ ID NO: 1044666 - RNA, 22 nt, Human
cucugaaagaguuuaguauuau

SEQ ID NO: 1044667 - RNA, 22 nt, Human
uacaaaugaguuguaugaacca

SEQ ID NO: 1044668 - RNA, 21 nt, Human
ucuagaauccuguauaagacu

SEQ ID NO: 1044669 - RNA, 22 nt, Human
auacuucuuugauguucacagg

SEQ ID NO: 1044670 - RNA, 22 nt, Human
cuguaugaguugggaauagaau

SEQ ID NO: 1044671 - RNA, 22 nt, Human
uaacacauaagcugagaccaug

SEQ ID NO: 1044672 - RNA, 22 nt, Human
auucugucuuuuuauacaucua

SEQ ID NO: 1044673 - RNA, 22 nt, Human
auuuugcuggucugaauuacuu

SEQ ID NO: 1044674 - RNA, 22 nt, Human
aucugucaggagcaaggacuac

SEQ ID NO: 1044675 - RNA, 22 nt, Human
augucaaacacaacaccagugg

SEQ ID NO: 1044676 - RNA, 22 nt, Human
gauauguauugaaugaucauuu

SEQ ID NO: 1044677 - RNA, 22 nt, Human
augcuacagcaucucucaucag

SEQ ID NO: 1044678 - RNA, 22 nt, Human
uucugucauuuagcauugucau

SEQ ID NO: 1044679 - RNA, 22 nt, Human
uauacaauggcugaaucaucca

SEQ ID NO: 1044680 - RNA, 22 nt, Human
uauguacuaacuuucauucuag

SEQ ID NO: 1044681 - RNA, 22 nt, Human
aaauaguuacuucugcugucuu

SEQ ID NO: 1044682 - RNA, 22 nt, Human
auaaaguuuaaaagucaauagu

SEQ ID NO: 1044683 - RNA, 22 nt, Human
uaucaauugggccaaaugguac

SEQ ID NO: 1044684 - RNA, 20 nt, Human
uuaucugucaaucugucuca

SEQ ID NO: 1044685 - RNA, 22 nt, Human
uggaaauacuugccauaaaacu

SEQ ID NO: 1044686 - RNA, 22 nt, Human
uguaugaaccuuuaauauagug

SEQ ID NO: 1044687 - RNA, 22 nt, Human
uaugacauuggccaaguucugu

SEQ ID NO: 1044688 - RNA, 22 nt, Human
auuacucugucugccucugacc

SEQ ID NO: 1044689 - RNA, 16 nt, Human
uguaugaacgucucca

SEQ ID NO: 1044690 - RNA, 22 nt, Human
aaaaguauuuauggcuauguaa

SEQ ID NO: 1044691 - RNA, 22 nt, Human
gaaaacuauuggccuagaacaa

SEQ ID NO: 1044692 - RNA, 20 nt, Human
aauuuacucacagaaugaau

SEQ ID NO: 1044693 - RNA, 22 nt, Human
auaucauuauguuaugagcaca

SEQ ID NO: 1044694 - RNA, 22 nt, Human
uuaacacaucccugcucuaccc

SEQ ID NO: 1044695 - RNA, 22 nt, Human
cagcauuuaaugcagugcuucc

SEQ ID NO: 1044696 - RNA, 22 nt, Human
aaaaauaggucaaccguguaug

SEQ ID NO: 1044697 - RNA, 22 nt, Human
auguauuucuauguagugaaga

SEQ ID NO: 1044698 - RNA, 22 nt, Human
caauaguucgguccugaaggcc

SEQ ID NO: 1044699 - RNA, 22 nt, Human
uuucacaagacagcuacuguug

SEQ ID NO: 1044700 - RNA, 22 nt, Human
uuuucuuauggugaagcacaaa

SEQ ID NO: 1044701 - RNA, 19 nt, Human
acauuuagaauguacuugc

SEQ ID NO: 1044702 - RNA, 22 nt, Human
uuaacacauauuuaucaauugc

SEQ ID NO: 1044703 - RNA, 22 nt, Human
uacaaaguaauguauaauaucg

SEQ ID NO: 1044704 - RNA, 18 nt, Human
ugucauaauauaucaccu

SEQ ID NO: 1044705 - RNA, 22 nt, Human
agcuagaaguacagccauauga

SEQ ID NO: 1044706 - RNA, 22 nt, Human
guuguuuuuguucucuauagcu

SEQ ID NO: 1044707 - RNA, 17 nt, Human
ugaauucaaucugcacu

SEQ ID NO: 1044708 - RNA, 22 nt, Human
aauacugucuuucacagauauu

SEQ ID NO: 1044709 - RNA, 22 nt, Human
aauaucuucuaaggauagaacu

SEQ ID NO: 1044710 - RNA, 22 nt, Human
uaacuuucuucauaugugaacc

SEQ ID NO: 1044711 - RNA, 22 nt, Human
auguaaacaagguuauugucca

SEQ ID NO: 1044712 - RNA, 22 nt, Human
agauaugugcgucuuagauuga

SEQ ID NO: 1044713 - RNA, 22 nt, Human
uaucaauacauguuaucagugu

SEQ ID NO: 1044714 - RNA, 22 nt, Human
aaaguuugcaauuuauguuaau

SEQ ID NO: 1044715 - RNA, 22 nt, Human
auguaugauauuuccaguauca

SEQ ID NO: 1044716 - RNA, 22 nt, Human
aguaugaaaguuaaucaauuua

SEQ ID NO: 1044717 - RNA, 22 nt, Human
aaacacagggauauauauucca

SEQ ID NO: 1044718 - RNA, 23 nt, Human
uguaugaauaugccacaguuuaa

SEQ ID NO: 1044719 - RNA, 22 nt, Human
aauaacuucauguaacauuuaa

SEQ ID NO: 1044720 - RNA, 22 nt, Human
ugaacacauaaggcuuuccugu

SEQ ID NO: 1044721 - RNA, 22 nt, Human
acauaugauauugaggaucuca

SEQ ID NO: 1044722 - RNA, 22 nt, Human
auuucauacuaaggcucaaaaa

SEQ ID NO: 1044723 - RNA, 22 nt, Human
uaugagaaucugcaguaugcuu

SEQ ID NO: 1044724 - RNA, 22 nt, Human
uagaauucauguuacuguuagc

SEQ ID NO: 1044725 - RNA, 22 nt, Human
uagcauuuauuccagauuugga

SEQ ID NO: 1044726 - RNA, 22 nt, Human
acagauauuuggggaaagacgu

SEQ ID NO: 1044727 - RNA, 22 nt, Human
cugcucuaauaucagauagacu

SEQ ID NO: 1044728 - RNA, 22 nt, Human
augugaaauagcuggauaugaa

SEQ ID NO: 1044729 - RNA, 22 nt, Human
cacaugaagagagucuaguaau

SEQ ID NO: 1044730 - RNA, 22 nt, Human
ucauacaauucaaucucugauu

SEQ ID NO: 1044731 - RNA, 21 nt, Human
caauaaacugcacauugagac

SEQ ID NO: 1044732 - RNA, 22 nt, Human
uuuucucuuguuaauguacuga

SEQ ID NO: 1044733 - RNA, 22 nt, Human
ugugugaaggaauauauacuca

SEQ ID NO: 1044734 - RNA, 22 nt, Human
guaguuuucugaaaauuacuuu

SEQ ID NO: 1044735 - RNA, 22 nt, Human
uuuagacauggcuugcucacuu

SEQ ID NO: 1044736 - RNA, 22 nt, Human
agauauauuuaagguaauaagu

SEQ ID NO: 1044737 - RNA, 22 nt, Human
aguauaaagugguuuucagcac

SEQ ID NO: 1044738 - RNA, 22 nt, Human
aaauacauacacuguacguggc

SEQ ID NO: 1044739 - RNA, 22 nt, Human
uaugaacugugagugugauggg

SEQ ID NO: 1044740 - RNA, 22 nt, Human
augaagcugaaaaaggcauaua

SEQ ID NO: 1044741 - RNA, 22 nt, Human
acaauacuauuuucaguauccu

SEQ ID NO: 1044742 - RNA, 22 nt, Human
uaacacaugguuaguacacaau

SEQ ID NO: 1044743 - RNA, 22 nt, Human
uucaugaaacuuaacuguuggg

SEQ ID NO: 1044744 - RNA, 18 nt, Human
cucugucauaagugucau

SEQ ID NO: 1044745 - RNA, 22 nt, Human
uauaauuuggggaaaguggugu

SEQ ID NO: 1044746 - RNA, 22 nt, Human
aaauaguuguuuggaucaauaa

SEQ ID NO: 1044747 - RNA, 22 nt, Human
cauauguauuucucauaauuag

SEQ ID NO: 1044748 - RNA, 22 nt, Human
ugaaauuaugcauuguuguacc

SEQ ID NO: 1044749 - RNA, 22 nt, Human
uacauucagaagaauggacacg

SEQ ID NO: 1044750 - RNA, 23 nt, Human
ugaaacauuuaggguagaauuuc

SEQ ID NO: 1044751 - RNA, 22 nt, Human
augugaaagagguguucagugg

SEQ ID NO: 1044752 - RNA, 22 nt, Human
acaagguauccacauuaaaugu

SEQ ID NO: 1044753 - RNA, 22 nt, Human
uuagacauguuugcuaaaauga

SEQ ID NO: 1044754 - RNA, 22 nt, Human
aguuagaauauaauuauguuaa

SEQ ID NO: 1044755 - RNA, 22 nt, Human
ugucaagucucugaaugaaaug

SEQ ID NO: 1044756 - RNA, 16 nt, Human
uucugucacguacggc

SEQ ID NO: 1044757 - RNA, 22 nt, Human
agaauccucuucaguaaauucu

SEQ ID NO: 1044758 - RNA, 22 nt, Human
acagauauaaacuauaguagug

SEQ ID NO: 1044759 - RNA, 22 nt, Human
cauucacaucuuguuccaucac

SEQ ID NO: 1044760 - RNA, 19 nt, Human
cccucuugcacaaagcaaa

SEQ ID NO: 1044761 - RNA, 22 nt, Human
acuucacagaaauuuuaugagg

SEQ ID NO: 1044762 - RNA, 22 nt, Human
uuguauuucuccacuuucuguu

SEQ ID NO: 1044763 - RNA, 22 nt, Human
agaaucucuacucaaguacuug

SEQ ID NO: 1044764 - RNA, 22 nt, Human
aagauauagauaaaacuaugca

SEQ ID NO: 1044765 - RNA, 22 nt, Human
gaaagauauuuauuggcaacag

SEQ ID NO: 1044766 - RNA, 22 nt, Human
uaguauuuaaucacuuuugucu

SEQ ID NO: 1044767 - RNA, 22 nt, Human
ucauaaaugcagugucauaaau

SEQ ID NO: 1044768 - RNA, 22 nt, Human
cuuuggaauauuuuauugagaa

SEQ ID NO: 1044769 - RNA, 22 nt, Human
uaaucuguauuccuacuuugca

SEQ ID NO: 1044770 - RNA, 20 nt, Human
uucugucagauuauauggga

SEQ ID NO: 1044771 - RNA, 22 nt, Human
gaacacaucacauuuuacagug

SEQ ID NO: 1044772 - RNA, 22 nt, Human
guaugaaaauuguaaaguucuu

SEQ ID NO: 1044773 - RNA, 22 nt, Human
aaaguuugaaugauauauuagu

SEQ ID NO: 1044774 - RNA, 22 nt, Human
uucugucaaaugccaguagaga

SEQ ID NO: 1044775 - RNA, 22 nt, Human
caaaguuuuaguaaacauauau

SEQ ID NO: 1044776 - RNA, 22 nt, Human
ucacaauauuuaucuuccaauu

SEQ ID NO: 1044777 - RNA, 22 nt, Human
uaacacaugucugggaugugaa

SEQ ID NO: 1044778 - RNA, 22 nt, Human
auaaucuuucuuuuccagauag

SEQ ID NO: 1044779 - RNA, 22 nt, Human
aaguuucaugauguaauuauug

SEQ ID NO: 1044780 - RNA, 22 nt, Human
uauaaaguuucgaaagauguau

SEQ ID NO: 1044781 - RNA, 22 nt, Human
aaacacauuuuaggaaaaucua

SEQ ID NO: 1044782 - RNA, 22 nt, Human
ugagaauuuucaguuucacuuu

SEQ ID NO: 1044783 - RNA, 22 nt, Human
uuugauaagagcugcugaaacu

SEQ ID NO: 1044784 - RNA, 22 nt, Human
aaauacauaaagguuguaccag

SEQ ID NO: 1044785 - RNA, 23 nt, Human
auguaucucauccaaggaagcuc

SEQ ID NO: 1044786 - RNA, 22 nt, Human
agcauucauugcuagaauguaa

SEQ ID NO: 1044787 - RNA, 22 nt, Human
auguagaaaguucauagaugcg

SEQ ID NO: 1044788 - RNA, 22 nt, Human
uguacaaagguacuuugauguu

SEQ ID NO: 1044789 - RNA, 22 nt, Human
acauuuagcuguacaaucuaug

SEQ ID NO: 1044790 - RNA, 22 nt, Human
uagaacauaagucauucauuug

SEQ ID NO: 1044791 - RNA, 22 nt, Human
uucacaauggcaaaccauuaaa

SEQ ID NO: 1044792 - RNA, 22 nt, Human
uuucauaauauccagagauuuu

SEQ ID NO: 1044793 - RNA, 22 nt, Human
guguaugagccuccagcugggc

SEQ ID NO: 1044794 - RNA, 22 nt, Human
agucagugaaaacuagaauguu

SEQ ID NO: 1044795 - RNA, 22 nt, Human
acauauuuugaaagcuuucuaa

SEQ ID NO: 1044796 - RNA, 22 nt, Human
uuaucauugucgcagucuaauu

SEQ ID NO: 1044797 - RNA, 23 nt, Human
uagaaugucauucaaugauaugg

SEQ ID NO: 1044798 - RNA, 22 nt, Human
aucugcuuccugggcuccauga

SEQ ID NO: 1044799 - RNA, 22 nt, Human
uaugaccuuaggaagcaagaag

SEQ ID NO: 1044800 - RNA, 22 nt, Human
aaucuucagugucuaaaaagca

SEQ ID NO: 1044801 - RNA, 22 nt, Human
auucacaguuuccucauauucu

SEQ ID NO: 1044802 - RNA, 22 nt, Human
uuucucuugcgauaugcuacac

SEQ ID NO: 1044803 - RNA, 22 nt, Human
auguuagaaucucugaaugugg

SEQ ID NO: 1044804 - RNA, 20 nt, Human
uuucacaaugaacaugucuc

SEQ ID NO: 1044805 - RNA, 22 nt, Human
aguuagaaaguaaaucauuuga

SEQ ID NO: 1044806 - RNA, 22 nt, Human
aucaaauauaauaauuuucgcu

SEQ ID NO: 1044807 - RNA, 22 nt, Human
ucaguuaacaacuauuuauuga

SEQ ID NO: 1044808 - RNA, 22 nt, Human
aaauauguauggaguucaugaa

SEQ ID NO: 1044809 - RNA, 22 nt, Human
cucugucaggcugcagaugcuc

SEQ ID NO: 1044810 - RNA, 22 nt, Human
uaugaacuguaacccucaccgc

SEQ ID NO: 1044811 - RNA, 22 nt, Human
aauguaugugauuauuccucua

SEQ ID NO: 1044812 - RNA, 22 nt, Human
acaaaguuugugguauuccaag

SEQ ID NO: 1044813 - RNA, 19 nt, Human
auguaugaggucuucugcu

SEQ ID NO: 1044814 - RNA, 22 nt, Human
acaagauagcuuagaagauuca

SEQ ID NO: 1044815 - RNA, 22 nt, Human
uucugucaaacucacaggccga

SEQ ID NO: 1044816 - RNA, 22 nt, Human
uuucacacugcagcaucagaga

SEQ ID NO: 1044817 - RNA, 22 nt, Human
auugcuuaucuaucuuuaaguc

SEQ ID NO: 1044818 - RNA, 22 nt, Human
ugaaacuucuaauaugaauagu

SEQ ID NO: 1044819 - RNA, 22 nt, Human
aaaguuagacagcaucauuucu

SEQ ID NO: 1044820 - RNA, 21 nt, Human
acauucacaggauauuaucau

SEQ ID NO: 1044821 - RNA, 22 nt, Human
cauaauuuuuuuaagucagaac

SEQ ID NO: 1044822 - RNA, 22 nt, Human
ucuucuuaugugccauuaucuc

SEQ ID NO: 1044823 - RNA, 22 nt, Human
uagcauuaucugucuuaucauu

SEQ ID NO: 1044824 - RNA, 22 nt, Human
uucugucaugcucauguaauug

SEQ ID NO: 1044825 - RNA, 22 nt, Human
augcugucgaaaccaaacaucu

SEQ ID NO: 1044826 - RNA, 20 nt, Human
aguguacagacacuagaaau

SEQ ID NO: 1044827 - RNA, 22 nt, Human
cagcauuuggaggagaggcuuu

SEQ ID NO: 1044828 - RNA, 22 nt, Human
uaauaguugugacuuuguaaag

SEQ ID NO: 1044829 - RNA, 22 nt, Human
aaaguucuaaaacucuuuguga

SEQ ID NO: 1044830 - RNA, 22 nt, Human
uaacacauagauauuuuaacuu

SEQ ID NO: 1044831 - RNA, 19 nt, Human
ugcuagaaauucugugacu

SEQ ID NO: 1044832 - RNA, 22 nt, Human
cuauugaauuaacuauuaaagu

SEQ ID NO: 1044833 - RNA, 22 nt, Human
cauaauuugugguaguggggga

SEQ ID NO: 1044834 - RNA, 20 nt, Human
auaaaauaacugccacaaga

SEQ ID NO: 1044835 - RNA, 22 nt, Human
acaauauuguacccagaaguuu

SEQ ID NO: 1044836 - RNA, 22 nt, Human
uuucugaaaucucuuuugagga

SEQ ID NO: 1044837 - RNA, 22 nt, Human
cuaucauuuuacaugguuggug

SEQ ID NO: 1044838 - RNA, 22 nt, Human
uaauacuguauacugcaaauuu

SEQ ID NO: 1044839 - RNA, 22 nt, Human
auaugugaaugauaucacuuug

SEQ ID NO: 1044840 - RNA, 22 nt, Human
cucugauuuccuuauucuguca

SEQ ID NO: 1044841 - RNA, 22 nt, Human
gaaacauacgauuuaggagaaa

SEQ ID NO: 1044842 - RNA, 22 nt, Human
aaacacauuagcccuguggaaa

SEQ ID NO: 1044843 - RNA, 22 nt, Human
uauucacaguugauuuacaguu

SEQ ID NO: 1044844 - RNA, 22 nt, Human
auguagaagcugacagugcugu

SEQ ID NO: 1044845 - RNA, 22 nt, Human
gaaacauauuaauccagugaaa

SEQ ID NO: 1044846 - RNA, 23 nt, Human
aaaguuugaagcaacaguaguug

SEQ ID NO: 1044847 - RNA, 22 nt, Human
aauguaugugcaucauuuacau

SEQ ID NO: 1044848 - RNA, 19 nt, Human
auauauguauacaaugugg

SEQ ID NO: 1044849 - RNA, 22 nt, Human
ugcuagaauuagguuaaacaaa

SEQ ID NO: 1044850 - RNA, 22 nt, Human
ugugaaauauuuauauacucaa

SEQ ID NO: 1044851 - RNA, 20 nt, Human
uaguauuugcauaaggauag

SEQ ID NO: 1044852 - RNA, 22 nt, Human
ugcuauaaguagacauucaaca

SEQ ID NO: 1044853 - RNA, 22 nt, Human
gaaacaauuuuuguugucuaag

SEQ ID NO: 1044854 - RNA, 22 nt, Human
uagcauuucccaaaugcauuug

SEQ ID NO: 1044855 - RNA, 22 nt, Human
agaauccuguuuuacuucauca

SEQ ID NO: 1044856 - RNA, 22 nt, Human
auccugucaucauaguacuuga

SEQ ID NO: 1044857 - RNA, 22 nt, Human
uaaucuguguaccuucaucgga

SEQ ID NO: 1044858 - RNA, 22 nt, Human
agguaugagauaaaucaaugaa

SEQ ID NO: 1044859 - RNA, 22 nt, Human
uguaugaagacuucuucugugu

SEQ ID NO: 1044860 - RNA, 22 nt, Human
ccuacucugagcgccuccgcau

SEQ ID NO: 1044861 - RNA, 22 nt, Human
gaaacauaguugagacacugcu

SEQ ID NO: 1044862 - RNA, 22 nt, Human
uaugaacuagcugauuuaguuu

SEQ ID NO: 1044863 - RNA, 22 nt, Human
uaugaacucuggagucugagug

SEQ ID NO: 1044864 - RNA, 22 nt, Human
uagaauucaagauucaacaggc

SEQ ID NO: 1044865 - RNA, 22 nt, Human
augaaaauguacauguguauaa

SEQ ID NO: 1044866 - RNA, 22 nt, Human
gugugaaagcuuguccucugua

SEQ ID NO: 1044867 - RNA, 22 nt, Human
aaguaugugauacauguuaauu

SEQ ID NO: 1044868 - RNA, 22 nt, Human
acauuucacuguucacagcagg

SEQ ID NO: 1044869 - RNA, 22 nt, Human
auguagaagugggcauuauaga

SEQ ID NO: 1044870 - RNA, 22 nt, Human
uauggaaacuaauucauuuuuc

SEQ ID NO: 1044871 - RNA, 20 nt, Human
cuguuaaaagguaugaauuc

SEQ ID NO: 1044872 - RNA, 22 nt, Human
cagcauuuggugaucaucuuaa

SEQ ID NO: 1044873 - RNA, 22 nt, Human
cagcauuuagaauuugaagugu

SEQ ID NO: 1044874 - RNA, 22 nt, Human
augugaaaaauuucuuauuaca

SEQ ID NO: 1044875 - RNA, 22 nt, Human
uacagcauauacagaaugaaca

SEQ ID NO: 1044876 - RNA, 22 nt, Human
uaacacaugaaagcaccuucuu

SEQ ID NO: 1044877 - RNA, 22 nt, Human
gucugucacucaggggcuggag

SEQ ID NO: 1044878 - RNA, 22 nt, Human
augacacuuggugauacuuugu

SEQ ID NO: 1044879 - RNA, 22 nt, Human
uagaaacauguucuguucuguu

SEQ ID NO: 1044880 - RNA, 23 nt, Human
ucuguacaauugagaagagaaca

SEQ ID NO: 1044881 - RNA, 22 nt, Human
uguuagaaguuaaucacuaauu

SEQ ID NO: 1044882 - RNA, 22 nt, Human
uuuucauuguuacuaugagcua

SEQ ID NO: 1044883 - RNA, 23 nt, Human
ugugaaauuugaggucagugcuu

SEQ ID NO: 1044884 - RNA, 22 nt, Human
uguacuaaggcuguguagaugu

SEQ ID NO: 1044885 - RNA, 22 nt, Human
cauaauuucccaagagauugaa

SEQ ID NO: 1044886 - RNA, 22 nt, Human
auguuugaaauuguaaguauau

SEQ ID NO: 1044887 - RNA, 23 nt, Human
uuucacaaugagcauuacagaau

SEQ ID NO: 1044888 - RNA, 22 nt, Human
gugugaaaaugugcacaauaug

SEQ ID NO: 1044889 - RNA, 22 nt, Human
ugcuagaagauagcuagaagau

SEQ ID NO: 1044890 - RNA, 22 nt, Human
ugugugaaggagccacuguuca

SEQ ID NO: 1044891 - RNA, 22 nt, Human
aguaugaagauuauaauuuuuc

SEQ ID NO: 1044892 - RNA, 22 nt, Human
uguuagaaauuauuaguaauau

SEQ ID NO: 1044893 - RNA, 22 nt, Human
aauuauguagccauaugaaaca

SEQ ID NO: 1044894 - RNA, 22 nt, Human
aucaguuauuuuuaagcuauaa

SEQ ID NO: 1044895 - RNA, 22 nt, Human
guguaugaacgaaagaauggau

SEQ ID NO: 1044896 - RNA, 22 nt, Human
cagcauuuaucuuguagcagga

SEQ ID NO: 1044897 - RNA, 22 nt, Human
gguaugaaaugauuccauguua

SEQ ID NO: 1044898 - RNA, 22 nt, Human
uauguacaugauuucauuugcu

SEQ ID NO: 1044899 - RNA, 22 nt, Human
aguaugaaccuggguucuggau

SEQ ID NO: 1044900 - RNA, 20 nt, Human
auacacauucauagaaaaau

SEQ ID NO: 1044901 - RNA, 22 nt, Human
auucacagaauaguuuuaccag

SEQ ID NO: 1044902 - RNA, 22 nt, Human
aguuagaauagucagauuguag

SEQ ID NO: 1044903 - RNA, 22 nt, Human
aauucuguuacuaaugugaugu

SEQ ID NO: 1044904 - RNA, 22 nt, Human
aauuacuuaagagaaacuuuga

SEQ ID NO: 1044905 - RNA, 22 nt, Human
uacauaugaacuuuauaacuug

SEQ ID NO: 1044906 - RNA, 22 nt, Human
guguaugauuucaaauggcuag

SEQ ID NO: 1044907 - RNA, 22 nt, Human
uaugaacuuuugaugugacaug

SEQ ID NO: 1044908 - RNA, 22 nt, Human
uauuaaauuauggauuuaggag

SEQ ID NO: 1044909 - RNA, 22 nt, Human
gugaaacagaagcuccuggaau

SEQ ID NO: 1044910 - RNA, 22 nt, Human
ugugaaauucuugaaaugcaca

SEQ ID NO: 1044911 - RNA, 22 nt, Human
augaacugcaguauaaacuugg

SEQ ID NO: 1044912 - RNA, 22 nt, Human
aaaguguggucguucauuuugu

SEQ ID NO: 1044913 - RNA, 22 nt, Human
ucacaauacucacucaauggcu

SEQ ID NO: 1044914 - RNA, 22 nt, Human
cucauuaaaggaaaucaccugc

SEQ ID NO: 1044915 - RNA, 22 nt, Human
aauaauuuuagcucagaguugu

SEQ ID NO: 1044916 - RNA, 22 nt, Human
auguagaacagguuaaugacag

SEQ ID NO: 1044917 - RNA, 22 nt, Human
ugacuagaccuauaucuuuuug

SEQ ID NO: 1044918 - RNA, 22 nt, Human
aaaguuguucaguaagaaacuc

SEQ ID NO: 1044919 - RNA, 22 nt, Human
uagucaaaccucagaauacccc

SEQ ID NO: 1044920 - RNA, 21 nt, Human
gaauaguucuguggcagcagu

SEQ ID NO: 1044921 - RNA, 22 nt, Human
auguaugaagcuuuguuuggga

SEQ ID NO: 1044922 - RNA, 23 nt, Human
aaacuacauuuauaguuuuucuc

SEQ ID NO: 1044923 - RNA, 22 nt, Human
ugaccuuauuugaaaauagaga

SEQ ID NO: 1044924 - RNA, 22 nt, Human
aaguuucauuguucauguaaca

SEQ ID NO: 1044925 - RNA, 22 nt, Human
uacaaguaaauuguagauacca

SEQ ID NO: 1044926 - RNA, 22 nt, Human
ucuucauauauaaaguggaaua

SEQ ID NO: 1044927 - RNA, 18 nt, Human
cccucuugcacaaagcaa

SEQ ID NO: 1044928 - RNA, 22 nt, Human
uaugacuuauuucaucaguucu

SEQ ID NO: 1044929 - RNA, 22 nt, Human
uguauaaaccauggacagcuuu

SEQ ID NO: 1044930 - RNA, 22 nt, Human
uauguaaaaauucaucaggcug

SEQ ID NO: 1044931 - RNA, 22 nt, Human
uuagccauguugaagauuuaga

SEQ ID NO: 1044932 - RNA, 22 nt, Human
uuuuacuuaauucuuggucaug

SEQ ID NO: 1044933 - RNA, 22 nt, Human
uaauuucaauagcuugcauaau

SEQ ID NO: 1044934 - RNA, 22 nt, Human
auuacaaucgagagaaacaaau

SEQ ID NO: 1044935 - RNA, 22 nt, Human
aaaguuguaauggaagaaaugc

SEQ ID NO: 1044936 - RNA, 22 nt, Human
agguauaagaagauuauuuaua

SEQ ID NO: 1044937 - RNA, 22 nt, Human
aucucauaacucauuugaagac

SEQ ID NO: 1044938 - RNA, 23 nt, Human
auggaagucacuguuuucuuguc

SEQ ID NO: 1044939 - RNA, 22 nt, Human
aguucacauaucuguuuuauuu

SEQ ID NO: 1044940 - RNA, 22 nt, Human
acuggaaaacacuacuacaugc

SEQ ID NO: 1044941 - RNA, 22 nt, Human
auguagaauuccuucuacuuug

SEQ ID NO: 1044942 - RNA, 22 nt, Human
uuucuugacugcuuaggaaugc

SEQ ID NO: 1044943 - RNA, 22 nt, Human
auaugagaauuggaaaauauca

SEQ ID NO: 1044944 - RNA, 22 nt, Human
aucugucuugccuugcauauuu

SEQ ID NO: 1044945 - RNA, 22 nt, Human
aaaguugugaaaccgaacaugu

SEQ ID NO: 1044946 - RNA, 22 nt, Human
uacuuacagaaggaagcaauug

SEQ ID NO: 1044947 - RNA, 22 nt, Human
ucugauuagagcauucuugagu

SEQ ID NO: 1044948 - RNA, 20 nt, Human
ucuguacacucaucuucugc

SEQ ID NO: 1044949 - RNA, 22 nt, Human
ucaugaacaucucaaauaacca

SEQ ID NO: 1044950 - RNA, 22 nt, Human
aaucacaugugcucaauuuuaa

SEQ ID NO: 1044951 - RNA, 22 nt, Human
uggaaauauacaaugugucucu

SEQ ID NO: 1044952 - RNA, 22 nt, Human
ugaaaucaaugucuucugucuc

SEQ ID NO: 1044953 - RNA, 22 nt, Human
ugucuucaguaaaauacacuau

SEQ ID NO: 1044954 - RNA, 22 nt, Human
cauucacaaagcugauugaugg

SEQ ID NO: 1044955 - RNA, 22 nt, Human
uucuacaauaugaauaaugaag

SEQ ID NO: 1044956 - RNA, 22 nt, Human
uauucacaugaaaacaaauuuu

SEQ ID NO: 1044957 - RNA, 22 nt, Human
ucauauaaguuuaaaacuaucu

SEQ ID NO: 1044958 - RNA, 22 nt, Human
uacuuacacagcuguagaaggu

SEQ ID NO: 1044959 - RNA, 22 nt, Human
gaauauuuguaauuacuguuga

SEQ ID NO: 1044960 - RNA, 22 nt, Human
augcuacauuuugguuuauaaa

SEQ ID NO: 1044961 - RNA, 18 nt, Human
cauaauuuucuuucuuua

SEQ ID NO: 1044962 - RNA, 22 nt, Human
aaaaugacauuccagugauauu

SEQ ID NO: 1044963 - RNA, 20 nt, Human
uaacuuucuaugcuuucagc

SEQ ID NO: 1044964 - RNA, 22 nt, Human
uaacacauuaguucuccuagau

SEQ ID NO: 1044965 - RNA, 22 nt, Human
aaguauuucuggccugugaaag

SEQ ID NO: 1044966 - RNA, 22 nt, Human
uguauaaauuuaaauuccugcu

SEQ ID NO: 1044967 - RNA, 22 nt, Human
auuuuccucaagccucuggaag

SEQ ID NO: 1044968 - RNA, 22 nt, Human
auguagaauggugauuggcagg

SEQ ID NO: 1044969 - RNA, 22 nt, Human
auguagaaauuaggaugauagu

SEQ ID NO: 1044970 - RNA, 21 nt, Human
acagauauuucauugaacauu

SEQ ID NO: 1044971 - RNA, 20 nt, Human
uuuuccuucugaguauguug

SEQ ID NO: 1044972 - RNA, 23 nt, Human
aaauaugucugagggcaaagaau

SEQ ID NO: 1044973 - RNA, 22 nt, Human
uauggaaagcucuuuuugauug

SEQ ID NO: 1044974 - RNA, 22 nt, Human
uucugucaaagacuuuuucagg

SEQ ID NO: 1044975 - RNA, 22 nt, Human
auaucauucugauguauaucuu

SEQ ID NO: 1044976 - RNA, 22 nt, Human
ucaugaacauggaauaucuuuu

SEQ ID NO: 1044977 - RNA, 22 nt, Human
cugcucuaacugcauuaguuuu

SEQ ID NO: 1044978 - RNA, 22 nt, Human
uugugcucuguguuauuuaagg

SEQ ID NO: 1044979 - RNA, 22 nt, Human
uucugucacuuuuuuggaaucu

SEQ ID NO: 1044980 - RNA, 22 nt, Human
uuggaaaaacacgauagugguu

SEQ ID NO: 1044981 - RNA, 22 nt, Human
aaauaguuagcccugcauauau

SEQ ID NO: 1044982 - RNA, 23 nt, Human
acucacaaagcaggaucauguug

SEQ ID NO: 1044983 - RNA, 22 nt, Human
uauugaaauucuucauguccuc

SEQ ID NO: 1044984 - RNA, 22 nt, Human
uuuuccuucuagagcagauuuc

SEQ ID NO: 1044985 - RNA, 22 nt, Human
uaugacauugcuuuuuagaacu

SEQ ID NO: 1044986 - RNA, 22 nt, Human
ucacauuuucuacuacuguacg

SEQ ID NO: 1044987 - RNA, 22 nt, Human
uuagcauuucaguacacauguu

SEQ ID NO: 1044988 - RNA, 22 nt, Human
auuugcuuuuacuauguuaaaa

SEQ ID NO: 1044989 - RNA, 22 nt, Human
aguaugaacggaaggccuggga

SEQ ID NO: 1044990 - RNA, 22 nt, Human
uguuugaauuuugcuaacgugu

SEQ ID NO: 1044991 - RNA, 22 nt, Human
uaauuucaccguugcuagaaau

SEQ ID NO: 1044992 - RNA, 22 nt, Human
aguaugaagcugaaugauuuua

SEQ ID NO: 1044993 - RNA, 22 nt, Human
acaaucauuccguucacaacag

SEQ ID NO: 1044994 - RNA, 22 nt, Human
uucacacacagcuuccuauugu

SEQ ID NO: 1044995 - RNA, 23 nt, Human
aucuguucaucugacacagauuc

SEQ ID NO: 1044996 - RNA, 22 nt, Human
cuguuuaucucuaaccuguuua

SEQ ID NO: 1044997 - RNA, 22 nt, Human
uucugucucuguguuuacauua

SEQ ID NO: 1044998 - RNA, 22 nt, Human
augaacuuauuucugaacuuuu

SEQ ID NO: 1044999 - RNA, 22 nt, Human
aauguauuccucaugcaagagu

SEQ ID NO: 1045000 - RNA, 22 nt, Human
caaugaaaauuuaaguugcagc

SEQ ID NO: 1045001 - RNA, 22 nt, Human
augucaaaucaguuuuaucaga

SEQ ID NO: 1045002 - RNA, 22 nt, Human
cacagucacauaucuaugugug

SEQ ID NO: 1045003 - RNA, 22 nt, Human
caucaaauaggaauauuuggca

SEQ ID NO: 1045004 - RNA, 22 nt, Human
uucacauugugcagauuauggu

SEQ ID NO: 1045005 - RNA, 22 nt, Human
cuagaaauauuuuacagucaag

SEQ ID NO: 1045006 - RNA, 22 nt, Human
uguaugaauauguuggggaggu

SEQ ID NO: 1045007 - RNA, 22 nt, Human
aaaguucuuucucuuauuuggu

SEQ ID NO: 1045008 - RNA, 19 nt, Human
agcaacaccguuuauuucc

SEQ ID NO: 1045009 - RNA, 22 nt, Human
uuuacacaaaagauagcacacc

SEQ ID NO: 1045010 - RNA, 22 nt, Human
cauaauuucuguaucagcacca

SEQ ID NO: 1045011 - RNA, 22 nt, Human
acuuuacaagcuuauagccuag

SEQ ID NO: 1045012 - RNA, 22 nt, Human
aaaguuugagugauuugacaca

SEQ ID NO: 1045013 - RNA, 18 nt, Human
acaaaugugucacaggaa

SEQ ID NO: 1045014 - RNA, 22 nt, Human
gugaaacacccuccaaugcaca

SEQ ID NO: 1045015 - RNA, 22 nt, Human
ugucaaagccugaaucacauag

SEQ ID NO: 1045016 - RNA, 22 nt, Human
cuaauguaucauggcucucagc

SEQ ID NO: 1045017 - RNA, 22 nt, Human
aauguaugaagguuccaguuuc

SEQ ID NO: 1045018 - RNA, 22 nt, Human
uacagcauguccuuagcaaggc

SEQ ID NO: 1045019 - RNA, 22 nt, Human
cucugucagaguguugucccca

SEQ ID NO: 1045020 - RNA, 22 nt, Human
uuucuugaccacuauguugaua

SEQ ID NO: 1045021 - RNA, 22 nt, Human
cuuugaaaggaagccacacagc

SEQ ID NO: 1045022 - RNA, 22 nt, Human
aauucugugcaggcagagcuau

SEQ ID NO: 1045023 - RNA, 17 nt, Human
agguauaaaaugguagc

SEQ ID NO: 1045024 - RNA, 23 nt, Human
acaagauagggauaaaaagauaa

SEQ ID NO: 1045025 - RNA, 22 nt, Human
aacauucaaaacccaguucagu

SEQ ID NO: 1045026 - RNA, 22 nt, Human
ugucauaacuuagugacaaauc

SEQ ID NO: 1045027 - RNA, 22 nt, Human
acuauaaaaggauaaaccagaa

SEQ ID NO: 1045028 - RNA, 22 nt, Human
aaaguaguuagucaugugaaaa

SEQ ID NO: 1045029 - RNA, 22 nt, Human
uaacuacauuucacugcaauua

SEQ ID NO: 1045030 - RNA, 22 nt, Human
acugauuacacgaguucugacu

SEQ ID NO: 1045031 - RNA, 22 nt, Human
uauguacuacacuagaacauuu

SEQ ID NO: 1045032 - RNA, 22 nt, Human
uauacacaaggugugcauuugu

SEQ ID NO: 1045033 - RNA, 22 nt, Human
uguagaaccuguuuauuauaga

SEQ ID NO: 1045034 - RNA, 22 nt, Human
guuaacacaggacucucugccu

SEQ ID NO: 1045035 - RNA, 22 nt, Human
uagcauuucacugaucuucacu

SEQ ID NO: 1045036 - RNA, 22 nt, Human
agcuagaauauugaucugaaau

SEQ ID NO: 1045037 - RNA, 22 nt, Human
ucugucaauauaugugcugcag

SEQ ID NO: 1045038 - RNA, 22 nt, Human
ucuuuauugcuacugguuuguc

SEQ ID NO: 1045039 - RNA, 22 nt, Human
ucagaaagaacacaggcaguag

SEQ ID NO: 1045040 - RNA, 22 nt, Human
acaugauuuuuaaagagauaau

SEQ ID NO: 1045041 - RNA, 22 nt, Human
agguauaagucucauuucuguu

SEQ ID NO: 1045042 - RNA, 22 nt, Human
uaacacauaucuacaacaugug

SEQ ID NO: 1045043 - RNA, 22 nt, Human
uuaauacaagcauaugcacaca

SEQ ID NO: 1045044 - RNA, 22 nt, Human
cuuucauaaaggaaaugaugag

SEQ ID NO: 1045045 - RNA, 22 nt, Human
aaaguucuggggguguuucugg

SEQ ID NO: 1045046 - RNA, 22 nt, Human
uuguaauuugcaaauguauugu

SEQ ID NO: 1045047 - RNA, 22 nt, Human
aauguaugacaguucuaguggu

SEQ ID NO: 1045048 - RNA, 22 nt, Human
uuuucguuuauuugacauguaa

SEQ ID NO: 1045049 - RNA, 22 nt, Human
guuaugaaauaaauauagauca

SEQ ID NO: 1045050 - RNA, 22 nt, Human
uguaggaaaaacaaugaucugc

SEQ ID NO: 1045051 - RNA, 22 nt, Human
uguaugaagccagaaucuguuu

SEQ ID NO: 1045052 - RNA, 22 nt, Human
aaguaugacauuuaagacaauu

SEQ ID NO: 1045053 - RNA, 21 nt, Human
uuucugaaggcaacaucuauc

SEQ ID NO: 1045054 - RNA, 22 nt, Human
uuucauugucuacauaugacau

SEQ ID NO: 1045055 - RNA, 22 nt, Human
uuucaaacuuuacucuugaauc

SEQ ID NO: 1045056 - RNA, 22 nt, Human
uagauauguguuuauuaugcug

SEQ ID NO: 1045057 - RNA, 22 nt, Human
aaaguucuggcauuuucugucu

SEQ ID NO: 1045058 - RNA, 22 nt, Human
cuagaauugcauucuaugaaua

SEQ ID NO: 1045059 - RNA, 22 nt, Human
uugauacaggccuucuagauga

SEQ ID NO: 1045060 - RNA, 22 nt, Human
aauugcaauuuucuuaaggucu

SEQ ID NO: 1045061 - RNA, 22 nt, Human
ugcuagaaaucugaaacuagca

SEQ ID NO: 1045062 - RNA, 22 nt, Human
uaugaaacauucauacaaauaa

SEQ ID NO: 1045063 - RNA, 22 nt, Human
uauugacaauuugugaaacuau

SEQ ID NO: 1045064 - RNA, 23 nt, Human
uuuuccuguggagacaugacugg

SEQ ID NO: 1045065 - RNA, 22 nt, Human
auaacuuagaguaggcaaaagu

SEQ ID NO: 1045066 - RNA, 22 nt, Human
aucauuuuuaagagacucuucu

SEQ ID NO: 1045067 - RNA, 22 nt, Human
aucugucagccugggauuaggg

SEQ ID NO: 1045068 - RNA, 22 nt, Human
uguagaaacuacacaugcaaca

SEQ ID NO: 1045069 - RNA, 22 nt, Human
gucugucaucugagauggagug

SEQ ID NO: 1045070 - RNA, 22 nt, Human
uauucacaggcacgaaauauug

SEQ ID NO: 1045071 - RNA, 22 nt, Human
acugcuuacccggccugacuuc

SEQ ID NO: 1045072 - RNA, 22 nt, Human
acaauguaggauauguacuugu

SEQ ID NO: 1045073 - RNA, 22 nt, Human
uucugucaaauuugccauaugg

SEQ ID NO: 1045074 - RNA, 22 nt, Human
aaucuuucccuauuaaaugugg

SEQ ID NO: 1045075 - RNA, 22 nt, Human
gaaacuuacuuacucacauuuc

SEQ ID NO: 1045076 - RNA, 22 nt, Human
aagaauacguaucaacaauggu

SEQ ID NO: 1045077 - RNA, 22 nt, Human
uguuccaauaaggaguugaaau

SEQ ID NO: 1045078 - RNA, 22 nt, Human
uacauucagcaaaagaaugguu

SEQ ID NO: 1045079 - RNA, 22 nt, Human
aagauaauauucauuaacuaga

SEQ ID NO: 1045080 - RNA, 22 nt, Human
aaagaauagccuuuguccaaau

SEQ ID NO: 1045081 - RNA, 22 nt, Human
uucaaauacauucuuugccacu

SEQ ID NO: 1045082 - RNA, 22 nt, Human
aucuacauaaaacgaauacaua

SEQ ID NO: 1045083 - RNA, 22 nt, Human
uaugaacauguucauugacuua

SEQ ID NO: 1045084 - RNA, 22 nt, Human
caugaaauugcuccuuuggugc

SEQ ID NO: 1045085 - RNA, 22 nt, Human
ugugaaaagggcuuuguacaaa

SEQ ID NO: 1045086 - RNA, 22 nt, Human
uguaugaaugggaaaaggaaac

SEQ ID NO: 1045087 - RNA, 23 nt, Human
aauguauguuaguaucuuagaga

SEQ ID NO: 1045088 - RNA, 22 nt, Human
agauauguuuguauauauuugu

SEQ ID NO: 1045089 - RNA, 22 nt, Human
auguuauggcucaaacauuugg

SEQ ID NO: 1045090 - RNA, 22 nt, Human
uuucaugauuaacuuagugaau

SEQ ID NO: 1045091 - RNA, 22 nt, Human
guuuagaacacggaaauacuga

SEQ ID NO: 1045092 - RNA, 22 nt, Human
augacaugaccugguagagaca

SEQ ID NO: 1045093 - RNA, 22 nt, Human
uucugucagcugcuuugucuca

SEQ ID NO: 1045094 - RNA, 22 nt, Human
cauaauuugauaugcuugaugg

SEQ ID NO: 1045095 - RNA, 22 nt, Human
uuuuucuuaaauguggguuggc

SEQ ID NO: 1045096 - RNA, 22 nt, Human
guguaugaggggagaauguuuu

SEQ ID NO: 1045097 - RNA, 19 nt, Human
uuuuccuucuauauguuuc

SEQ ID NO: 1045098 - RNA, 22 nt, Human
ucugucaaaaguuuucaauaaa

SEQ ID NO: 1045099 - RNA, 22 nt, Human
uaucuguuaugggcugaauugc

SEQ ID NO: 1045100 - RNA, 22 nt, Human
aguaugaaucucuuuauucugc

SEQ ID NO: 1045101 - RNA, 22 nt, Human
uagauauggccgucuguuuuaa

SEQ ID NO: 1045102 - RNA, 22 nt, Human
ucuacuauguuucuuaaauaga

SEQ ID NO: 1045103 - RNA, 22 nt, Human
uuggaaauugcaagugauuugc

SEQ ID NO: 1045104 - RNA, 19 nt, Human
acauauguggauauacaug

SEQ ID NO: 1045105 - RNA, 20 nt, Human
auacacauauucuugcaacu

SEQ ID NO: 1045106 - RNA, 21 nt, Human
uaacacauuuugguacuuugg

SEQ ID NO: 1045107 - RNA, 22 nt, Human
uaugaacuguacuguacuaagc

SEQ ID NO: 1045108 - RNA, 22 nt, Human
ucauuuugggguuugucaucuu

SEQ ID NO: 1045109 - RNA, 22 nt, Human
aaacacaucauucaugucguca

SEQ ID NO: 1045110 - RNA, 22 nt, Human
uacauugcuuucuaauacaucu

SEQ ID NO: 1045111 - RNA, 22 nt, Human
cauaauuuuccaugguuugcua

SEQ ID NO: 1045112 - RNA, 22 nt, Human
aaauuucaguuggaaugagcuc

SEQ ID NO: 1045113 - RNA, 22 nt, Human
auuacaauaagguuuauuugua

SEQ ID NO: 1045114 - RNA, 22 nt, Human
aagcaacucccuccucauuuuu

SEQ ID NO: 1045115 - RNA, 22 nt, Human
ugaaguuguuaagguugccauu

SEQ ID NO: 1045116 - RNA, 22 nt, Human
ucugucaaaugagcaaguaacu

SEQ ID NO: 1045117 - RNA, 19 nt, Human
aaacacagauuucuuacca

SEQ ID NO: 1045118 - RNA, 22 nt, Human
uaauaguuaugguugguucuca

SEQ ID NO: 1045119 - RNA, 22 nt, Human
uauaauguuuuccauggacuga

SEQ ID NO: 1045120 - RNA, 22 nt, Human
aaucacuuuucucuaauguagc

SEQ ID NO: 1045121 - RNA, 22 nt, Human
uuauuuugguaaauguuugccu

SEQ ID NO: 1045122 - RNA, 22 nt, Human
uauauauucuuaaguaguguag

SEQ ID NO: 1045123 - RNA, 22 nt, Human
uucugucacuugcaaucaagag

SEQ ID NO: 1045124 - RNA, 22 nt, Human
ucauauaacuggauauuuucaa

SEQ ID NO: 1045125 - RNA, 22 nt, Human
uguaaaaccaaaucaaucuagu

SEQ ID NO: 1045126 - RNA, 22 nt, Human
cugcucuagagagcauuaguca

SEQ ID NO: 1045127 - RNA, 22 nt, Human
ugugaaaagcaggcuacuuucu

SEQ ID NO: 1045128 - RNA, 17 nt, Human
uauauguaugccucucc

SEQ ID NO: 1045129 - RNA, 22 nt, Human
acuagauaauuauaaaagguag

SEQ ID NO: 1045130 - RNA, 22 nt, Human
augugaaacugaagcauccaua

SEQ ID NO: 1045131 - RNA, 22 nt, Human
ugucuucaucuccaugcacaga

SEQ ID NO: 1045132 - RNA, 22 nt, Human
aaaguuugucacuuggcuagaa

SEQ ID NO: 1045133 - RNA, 21 nt, Human
aauguauguuuaucucacagu

SEQ ID NO: 1045134 - RNA, 21 nt, Human
uaugaacaugaccaauagucc

SEQ ID NO: 1045135 - RNA, 22 nt, Human
cacacucauuagucauuucucu

SEQ ID NO: 1045136 - RNA, 22 nt, Human
cucugucacuucuccagcugag

SEQ ID NO: 1045137 - RNA, 22 nt, Human
aaaguuaguuucuuauaugucu

SEQ ID NO: 1045138 - RNA, 22 nt, Human
cauuuacuuaaaucuuuacaag

SEQ ID NO: 1045139 - RNA, 22 nt, Human
aucugucaucagcaccacaggu

SEQ ID NO: 1045140 - RNA, 22 nt, Human
ugcuagaauuugcagaagcaua

SEQ ID NO: 1045141 - RNA, 22 nt, Human
uuucauaauacuguacaugaaa

SEQ ID NO: 1045142 - RNA, 22 nt, Human
aaucugucguaguaaaaagcag

SEQ ID NO: 1045143 - RNA, 22 nt, Human
ucugcucugggccagcuauuaa

SEQ ID NO: 1045144 - RNA, 22 nt, Human
ucaauaaaauuguuuuccuauc

SEQ ID NO: 1045145 - RNA, 22 nt, Human
uuagaacugaagaagauuaagg

SEQ ID NO: 1045146 - RNA, 22 nt, Human
ucacauuucugauuauaccaaa

SEQ ID NO: 1045147 - RNA, 20 nt, Human
gcaaaauaggcucuguuggu

SEQ ID NO: 1045148 - RNA, 22 nt, Human
aaaguguugauaugugacaucc

SEQ ID NO: 1045149 - RNA, 22 nt, Human
auguaugaugcuaggcucucag

SEQ ID NO: 1045150 - RNA, 22 nt, Human
uuguaugaggauagcaagaagc

SEQ ID NO: 1045151 - RNA, 22 nt, Human
uaaaguuuggcagacaauaaca

SEQ ID NO: 1045152 - RNA, 22 nt, Human
ucaauauauuccauguuuucuc

SEQ ID NO: 1045153 - RNA, 22 nt, Human
aaauauguaagauuagcacuag

SEQ ID NO: 1045154 - RNA, 22 nt, Human
aaauaguuuagcucucauuuca

SEQ ID NO: 1045155 - RNA, 22 nt, Human
acacagccgugaaucugcuucu

SEQ ID NO: 1045156 - RNA, 22 nt, Human
uuguaugaucaaaagaaaugua

SEQ ID NO: 1045157 - RNA, 22 nt, Human
uuagacauagaauauugucuag

SEQ ID NO: 1045158 - RNA, 22 nt, Human
aauguaugcugugguaucuucu

SEQ ID NO: 1045159 - RNA, 22 nt, Human
aaucuuagguuuggcuucaucu

SEQ ID NO: 1045160 - RNA, 23 nt, Human
gaauaguuuuagaaauuggagaa

SEQ ID NO: 1045161 - RNA, 22 nt, Human
ugagaaaugggucugcugaaga

SEQ ID NO: 1045162 - RNA, 22 nt, Human
ugguauaaaacuuuuuauugaa

SEQ ID NO: 1045163 - RNA, 22 nt, Human
acuaaauacacacauuuguuca

SEQ ID NO: 1045164 - RNA, 22 nt, Human
uguuugaaacuuugaucacuaa

SEQ ID NO: 1045165 - RNA, 22 nt, Human
ucugucaucucuaaaauagaaa

SEQ ID NO: 1045166 - RNA, 22 nt, Human
aaauaguucagcuuguaaaccc

SEQ ID NO: 1045167 - RNA, 22 nt, Human
ugagaauuuuuugucaugcauu

SEQ ID NO: 1045168 - RNA, 20 nt, Human
agaaauauugaguucagagg

SEQ ID NO: 1045169 - RNA, 22 nt, Human
ucuuugaugugguuaauuauga

SEQ ID NO: 1045170 - RNA, 22 nt, Human
aauacuauguugugacacauga

SEQ ID NO: 1045171 - RNA, 22 nt, Human
acuucacagauauuuauuuggu

SEQ ID NO: 1045172 - RNA, 22 nt, Human
auucugucauuucaagaaaaac

SEQ ID NO: 1045173 - RNA, 22 nt, Human
uuucaaaccuacuuguauguuu

SEQ ID NO: 1045174 - RNA, 21 nt, Human
uugaccaagggugcgugcucc

SEQ ID NO: 1045175 - RNA, 22 nt, Human
uuggaaauacagcaguuacuuu

SEQ ID NO: 1045176 - RNA, 22 nt, Human
aaacagcaggaacaucuugcca

SEQ ID NO: 1045177 - RNA, 22 nt, Human
uuaacacagggggagacaaagu

SEQ ID NO: 1045178 - RNA, 22 nt, Human
uuccuugaaugagucauggaaa

SEQ ID NO: 1045179 - RNA, 22 nt, Human
aauguauguguauaucaaauca

SEQ ID NO: 1045180 - RNA, 22 nt, Human
uguuagaauauuguaauauucg

SEQ ID NO: 1045181 - RNA, 22 nt, Human
auaugugaaguggguuauuuug

SEQ ID NO: 1045182 - RNA, 22 nt, Human
aauguaugggugagaaaguuga

SEQ ID NO: 1045183 - RNA, 22 nt, Human
uaauuucacugauaugaaguca

SEQ ID NO: 1045184 - RNA, 22 nt, Human
aauucuguaacuuuacugaauu

SEQ ID NO: 1045185 - RNA, 22 nt, Human
ugaaacuuauaagaauaugaau

SEQ ID NO: 1045186 - RNA, 22 nt, Human
acacauauauacauauuugugc

SEQ ID NO: 1045187 - RNA, 22 nt, Human
augugaaaauccaauggcagca

SEQ ID NO: 1045188 - RNA, 22 nt, Human
aucugucaagauagacucugca

SEQ ID NO: 1045189 - RNA, 18 nt, Human
acacugcagcagucugcu

SEQ ID NO: 1045190 - RNA, 22 nt, Human
aucuguuccccuaugcucucua

SEQ ID NO: 1045191 - RNA, 22 nt, Human
uauaauuuaucaugucacaguu

SEQ ID NO: 1045192 - RNA, 22 nt, Human
uacaaaguagaaauucaguaaa

SEQ ID NO: 1045193 - RNA, 22 nt, Human
uuagaacuuaaacuucagaaag

SEQ ID NO: 1045194 - RNA, 22 nt, Human
gaacacauuagucugaguuggc

SEQ ID NO: 1045195 - RNA, 22 nt, Human
ugaaacauugcacuguaugaau

SEQ ID NO: 1045196 - RNA, 22 nt, Human
cacucugaugguuucuguucaa

SEQ ID NO: 1045197 - RNA, 22 nt, Human
gucaaaaaguagucauuucugu

SEQ ID NO: 1045198 - RNA, 22 nt, Human
uuauuuacaacucuucucuucc

SEQ ID NO: 1045199 - RNA, 22 nt, Human
ucaaaguuacuugugguuuucu

SEQ ID NO: 1045200 - RNA, 23 nt, Human
acagaaaguucugcuggacagag

SEQ ID NO: 1045201 - RNA, 22 nt, Human
uaggaaaugcuccauugcauaa

SEQ ID NO: 1045202 - RNA, 22 nt, Human
uuguaugagcuccaggaacuca

SEQ ID NO: 1045203 - RNA, 22 nt, Human
aauaacuuaagaaauuucccca

SEQ ID NO: 1045204 - RNA, 22 nt, Human
uuuuccuguccaggcaauuauu

SEQ ID NO: 1045205 - RNA, 22 nt, Human
auuucauagauuguaaaucccu

SEQ ID NO: 1045206 - RNA, 22 nt, Human
uugugaaacauucauggauuug

SEQ ID NO: 1045207 - RNA, 22 nt, Human
gaaguucuuagucucauuugca

SEQ ID NO: 1045208 - RNA, 22 nt, Human
aacagcauaaguauuuauuuca

SEQ ID NO: 1045209 - RNA, 22 nt, Human
uacaaagucacauugaaaugaa

SEQ ID NO: 1045210 - RNA, 22 nt, Human
uuaugacaggaaaaucacagaa

SEQ ID NO: 1045211 - RNA, 22 nt, Human
gagaacucagacgcaggucaug

SEQ ID NO: 1045212 - RNA, 22 nt, Human
uucauacaaugggauauuauga

SEQ ID NO: 1045213 - RNA, 22 nt, Human
uaauuucuagggacuaaggugc

SEQ ID NO: 1045214 - RNA, 22 nt, Human
ucauaaaucauacuccauuugc

SEQ ID NO: 1045215 - RNA, 22 nt, Human
uaugucaaaguuaagaaauagg

SEQ ID NO: 1045216 - RNA, 17 nt, Human
uuuagaauacaauguuu

SEQ ID NO: 1045217 - RNA, 22 nt, Human
ucugauuagcaguuuagggaaa

SEQ ID NO: 1045218 - RNA, 22 nt, Human
cucaaauauaagcuaaaugugg

SEQ ID NO: 1045219 - RNA, 22 nt, Human
uaugacauuauaaaggauuauu

SEQ ID NO: 1045220 - RNA, 22 nt, Human
acauaugugcuuauauccauga

SEQ ID NO: 1045221 - RNA, 22 nt, Human
uguaugaaucucauuuguuuaa

SEQ ID NO: 1045222 - RNA, 22 nt, Human
aucuagcaguguuauaauugga

SEQ ID NO: 1045223 - RNA, 22 nt, Human
cuguaugaacccauauacuuau

SEQ ID NO: 1045224 - RNA, 22 nt, Human
acuggaaaugagaugauaucag

SEQ ID NO: 1045225 - RNA, 22 nt, Human
uagcuagaaugcuucgugauau

SEQ ID NO: 1045226 - RNA, 22 nt, Human
agaauaugaugguuggagaauu

SEQ ID NO: 1045227 - RNA, 22 nt, Human
aauugucaaacacaaauaagag

SEQ ID NO: 1045228 - RNA, 22 nt, Human
uacacacaugcauuugccuuau

SEQ ID NO: 1045229 - RNA, 22 nt, Human
uaggaaauggcucaguuacugc

SEQ ID NO: 1045230 - RNA, 22 nt, Human
uucugucauccuuucuagaugu

SEQ ID NO: 1045231 - RNA, 22 nt, Human
uaucauuguguuauuucuucca

SEQ ID NO: 1045232 - RNA, 22 nt, Human
gguauaaaugaucagaucgcug

SEQ ID NO: 1045233 - RNA, 22 nt, Human
caagauaagaucauuuacacua

SEQ ID NO: 1045234 - RNA, 22 nt, Human
ucacauuuuauaucucugguuu

SEQ ID NO: 1045235 - RNA, 22 nt, Human
ucucaaaucaaacuuugagcuu

SEQ ID NO: 1045236 - RNA, 22 nt, Human
uaacacaugguucugucaggaa

SEQ ID NO: 1045237 - RNA, 22 nt, Human
aauaaucucccuuuuuguaugu

SEQ ID NO: 1045238 - RNA, 22 nt, Human
ugaacuuagugggaauaucucu

SEQ ID NO: 1045239 - RNA, 22 nt, Human
aaauauacuagaugaugaccca

SEQ ID NO: 1045240 - RNA, 22 nt, Human
uguguaaagcuuguuccagaaa

SEQ ID NO: 1045241 - RNA, 22 nt, Human
cauacaagcguucaauagaugu

SEQ ID NO: 1045242 - RNA, 22 nt, Human
acaauacuuaccaauguuuuug

SEQ ID NO: 1045243 - RNA, 22 nt, Human
gucugucauacggcuuauguaa

SEQ ID NO: 1045244 - RNA, 20 nt, Human
augugaaagaucaguugucu

SEQ ID NO: 1045245 - RNA, 22 nt, Human
uguuugaacugaauaacauagu

SEQ ID NO: 1045246 - RNA, 22 nt, Human
auguaugagagauucuuuuauu

SEQ ID NO: 1045247 - RNA, 22 nt, Human
uguaugaauauguauuuucaua

SEQ ID NO: 1045248 - RNA, 22 nt, Human
augacucuuagcuaaagguaag

SEQ ID NO: 1045249 - RNA, 22 nt, Human
gugauaaaauucaaauagcucu

SEQ ID NO: 1045250 - RNA, 20 nt, Human
uggaaguucuguugcauugg

SEQ ID NO: 1045251 - RNA, 22 nt, Human
ucuggucaguaauaagaagugg

SEQ ID NO: 1045252 - RNA, 22 nt, Human
aauacuauguagccaaaauaau

SEQ ID NO: 1045253 - RNA, 22 nt, Human
aaguauuucguucugaaaaagu

SEQ ID NO: 1045254 - RNA, 22 nt, Human
uugaauuagacuuugcuacagg

SEQ ID NO: 1045255 - RNA, 22 nt, Human
uugugaaauguuucaaaauagu

SEQ ID NO: 1045256 - RNA, 22 nt, Human
cacaugcaucugucauguuugg

SEQ ID NO: 1045257 - RNA, 22 nt, Human
aucucuguaaaccauaaauuga

SEQ ID NO: 1045258 - RNA, 22 nt, Human
aauaguauuuauuuggaaaaag

SEQ ID NO: 1045259 - RNA, 22 nt, Human
auucugucuuuuuaaaauaaua

SEQ ID NO: 1045260 - RNA, 22 nt, Human
uucuugaaucacuuuagagaua

SEQ ID NO: 1045261 - RNA, 22 nt, Human
auguuagaaggaauguuaaaag

SEQ ID NO: 1045262 - RNA, 22 nt, Human
caugaaaucugaguauguuucc

SEQ ID NO: 1045263 - RNA, 22 nt, Human
auuuagacuucccagcacugug

SEQ ID NO: 1045264 - RNA, 22 nt, Human
guguauaaugcuguuuguacau

SEQ ID NO: 1045265 - RNA, 22 nt, Human
uuauuuucuccucagaaagugg

SEQ ID NO: 1045266 - RNA, 22 nt, Human
uauauguaaauaagucuaaugu

SEQ ID NO: 1045267 - RNA, 22 nt, Human
aaaguuuguuauaugauaagga

SEQ ID NO: 1045268 - RNA, 19 nt, Human
cauuuagaaguacauauua

SEQ ID NO: 1045269 - RNA, 22 nt, Human
gaauauuuucaguacagauggu

SEQ ID NO: 1045270 - RNA, 22 nt, Human
aaauaguucagccacggugacu

SEQ ID NO: 1045271 - RNA, 20 nt, Human
aucugcuugccuguccucgg

SEQ ID NO: 1045272 - RNA, 22 nt, Human
uuugacaaauccuucagcaaug

SEQ ID NO: 1045273 - RNA, 22 nt, Human
cauaugaaauaugaguugaaca

SEQ ID NO: 1045274 - RNA, 22 nt, Human
ugaaacaaugugaaguugcuga

SEQ ID NO: 1045275 - RNA, 22 nt, Human
uaacacauauuucaagaguagu

SEQ ID NO: 1045276 - RNA, 22 nt, Human
uuuuucuugugcuggaucuaau

SEQ ID NO: 1045277 - RNA, 22 nt, Human
aauguaugagcgugaaagcacu

SEQ ID NO: 1045278 - RNA, 22 nt, Human
agucuacaaagaaaaguuauug

SEQ ID NO: 1045279 - RNA, 22 nt, Human
uuguaugaauguauccuaauuu

SEQ ID NO: 1045280 - RNA, 22 nt, Human
uacaauauguggccuuuuguga

SEQ ID NO: 1045281 - RNA, 22 nt, Human
ugacaaaacugcaauuacuuuu

SEQ ID NO: 1045282 - RNA, 22 nt, Human
uaacacauauuugcaguaagca

SEQ ID NO: 1045283 - RNA, 22 nt, Human
aagucuguuugagugucacacu

SEQ ID NO: 1045284 - RNA, 22 nt, Human
uuggaaauggcuguaguuauga

SEQ ID NO: 1045285 - RNA, 22 nt, Human
uaauaguuucauaaugugcuuc

SEQ ID NO: 1045286 - RNA, 22 nt, Human
aggacaaaggaccagaucugga

SEQ ID NO: 1045287 - RNA, 22 nt, Human
caagggcagcagccucaagcgg

SEQ ID NO: 1045288 - RNA, 22 nt, Human
ggauugaagggaaccucagaau

SEQ ID NO: 1045289 - RNA, 22 nt, Human
auugagaaggagauuggcaucu

SEQ ID NO: 1045290 - RNA, 22 nt, Human
ggaaacugcuuacacuagaggg

SEQ ID NO: 1045291 - RNA, 22 nt, Human
agggugugcuguugggucuuuc

SEQ ID NO: 1045292 - RNA, 22 nt, Human
ccccagugguugcaacagcaga

SEQ ID NO: 1045293 - RNA, 22 nt, Human
cagcuggcgacucuccucgaug

SEQ ID NO: 1045294 - RNA, 22 nt, Human
uggggugugcucagagcagggg

SEQ ID NO: 1045295 - RNA, 22 nt, Human
gauacuugaggagaucaccaca

SEQ ID NO: 1045296 - RNA, 22 nt, Human
ugggugugagcccgggagccgc

SEQ ID NO: 1045297 - RNA, 20 nt, Human
caauaauuuacuucccuauu

SEQ ID NO: 1045298 - RNA, 22 nt, Human
acagggcaccugagguaggaag

SEQ ID NO: 1045299 - RNA, 22 nt, Human
uggccagaacucagacaugugg

SEQ ID NO: 1045300 - RNA, 22 nt, Human
guggcagcggcccaggccgucu

SEQ ID NO: 1045301 - RNA, 22 nt, Human
augaagcauuacaggaugacag

SEQ ID NO: 1045302 - RNA, 22 nt, Human
ggacauugaagcuggaaaggga

SEQ ID NO: 1045303 - RNA, 22 nt, Human
cauaaauuguacccauuccaac

SEQ ID NO: 1045304 - RNA, 22 nt, Human
agaggcucuuugagcugggaga

SEQ ID NO: 1045305 - RNA, 19 nt, Human
agcagccaucgaccaugga

SEQ ID NO: 1045306 - RNA, 22 nt, Human
aggcaguguggagggcuguugc

SEQ ID NO: 1045307 - RNA, 22 nt, Human
uacuacauacagaauuuagaga

SEQ ID NO: 1045308 - RNA, 22 nt, Human
agggggcuccuuggugugcaga

SEQ ID NO: 1045309 - RNA, 22 nt, Human
auuccaaagccugaauaaugga

SEQ ID NO: 1045310 - RNA, 22 nt, Human
aaaccuguuaauagagcgaugc

SEQ ID NO: 1045311 - RNA, 22 nt, Human
aucacuagaguuacauugccag

SEQ ID NO: 1045312 - RNA, 22 nt, Human
guuaaaugcagauucugacuca

SEQ ID NO: 1045313 - RNA, 22 nt, Human
augauuuguuaacagacuuaau

SEQ ID NO: 1045314 - RNA, 22 nt, Human
uucaaaccuaucuaagaaauag

SEQ ID NO: 1045315 - RNA, 22 nt, Human
ggccuugggauguggcugcagc

SEQ ID NO: 1045316 - RNA, 22 nt, Human
ugcugcccacuguauuucucca

SEQ ID NO: 1045317 - RNA, 21 nt, Human
ccacaauucuaguuacauaug

SEQ ID NO: 1045318 - RNA, 21 nt, Human
uacaucaguuuucuuggcuca

SEQ ID NO: 1045319 - RNA, 22 nt, Human
aggggcuuguggaguugcuggu

SEQ ID NO: 1045320 - RNA, 22 nt, Human
gccaccagccccaugcgcugug

SEQ ID NO: 1045321 - RNA, 21 nt, Human
ggccuuggcgggggccgaauu

SEQ ID NO: 1045322 - RNA, 22 nt, Human
gcagcaaucuucacagugucau

SEQ ID NO: 1045323 - RNA, 22 nt, Human
uggagcagccuuuucuaagcaa

SEQ ID NO: 1045324 - RNA, 22 nt, Human
uggcacaguuaaaguuguagaa

SEQ ID NO: 1045325 - RNA, 22 nt, Human
uggagccagcaggacucagagg

SEQ ID NO: 1045326 - RNA, 22 nt, Human
cagaaccaggaacugauggaga

SEQ ID NO: 1045327 - RNA, 23 nt, Human
auuuccuaaaagauaaucauuac

SEQ ID NO: 1045328 - RNA, 22 nt, Human
aaaguaauugugguucuugcca

SEQ ID NO: 1045329 - RNA, 22 nt, Human
aucuuuggguacaaacuugccu

SEQ ID NO: 1045330 - RNA, 22 nt, Human
aaugaacacuuagccuuucuau

SEQ ID NO: 1045331 - RNA, 22 nt, Human
ucaauuuauguggcuauucauu

SEQ ID NO: 1045332 - RNA, 22 nt, Human
augcacaagguagauuauuauu

SEQ ID NO: 1045333 - RNA, 22 nt, Human
gggaaacuuucacaauguccag

SEQ ID NO: 1045334 - RNA, 22 nt, Human
aguuggcauuuuauuuaaguau

SEQ ID NO: 1045335 - RNA, 22 nt, Human
gugacaugguuugccgucccug

SEQ ID NO: 1045336 - RNA, 22 nt, Human
acuuggucguggugcagcaugg

SEQ ID NO: 1045337 - RNA, 22 nt, Human
ugggagagauaggcuucuggac

SEQ ID NO: 1045338 - RNA, 22 nt, Human
uuggggaagcuuugaaauacuu

SEQ ID NO: 1045339 - RNA, 22 nt, Human
cugaacaucccgcagugcacga

SEQ ID NO: 1045340 - RNA, 22 nt, Human
ugaacaugcuguugauggccug

SEQ ID NO: 1045341 - RNA, 22 nt, Human
ugggugaagaggcuaugcuacu

SEQ ID NO: 1045342 - RNA, 22 nt, Human
uagaaagagcuuugcuuccuuu

SEQ ID NO: 1045343 - RNA, 22 nt, Human
ugcacagagggaggcauaaaau

SEQ ID NO: 1045344 - RNA, 20 nt, Human
ccacaguggagacuggagac

SEQ ID NO: 1045345 - RNA, 22 nt, Human
gccagcuggcugcaggucccag

SEQ ID NO: 1045346 - RNA, 22 nt, Human
agugccaaaucgagggcucuga

SEQ ID NO: 1045347 - RNA, 21 nt, Human
uaccaagaaguuugggaaagc

SEQ ID NO: 1045348 - RNA, 22 nt, Human
cugggaguugacgaggcuugua

SEQ ID NO: 1045349 - RNA, 22 nt, Human
gaggggcucuugggcaugaagg

SEQ ID NO: 1045350 - RNA, 22 nt, Human
cauuuugugcuagacacuaugg

SEQ ID NO: 1045351 - RNA, 18 nt, Human
ucuuccaacacugacacc

SEQ ID NO: 1045352 - RNA, 22 nt, Human
uaucaguagaacaauggacauu

SEQ ID NO: 1045353 - RNA, 22 nt, Human
uaaaccuuauuugaauaccaac

SEQ ID NO: 1045354 - RNA, 22 nt, Human
agcacugugagcaccagcacgc

SEQ ID NO: 1045355 - RNA, 21 nt, Human
acuguauuguuuucaaggauc

SEQ ID NO: 1045356 - RNA, 22 nt, Human
uacugcugagcuggguagaagg

SEQ ID NO: 1045357 - RNA, 22 nt, Human
agaaacaucgcuuaguccucau

SEQ ID NO: 1045358 - RNA, 20 nt, Human
gggugugugcagggccuggu

SEQ ID NO: 1045359 - RNA, 20 nt, Human
aggcccuccccacuguugcu

SEQ ID NO: 1045360 - RNA, 22 nt, Human
cauguguauuauucuuguggaa

SEQ ID NO: 1045361 - RNA, 22 nt, Human
aacacuaaaggucaguuagaag

SEQ ID NO: 1045362 - RNA, 22 nt, Human
uuuaaaccuaucuaagaaauag

SEQ ID NO: 1045363 - RNA, 22 nt, Human
ccacccagccagaugcaggaag

SEQ ID NO: 1045364 - RNA, 22 nt, Human
cagggacucgcuggacauaccg

SEQ ID NO: 1045365 - RNA, 22 nt, Human
cugccaucugagccaaaagugc

SEQ ID NO: 1045366 - RNA, 22 nt, Human
uggaaauaguugugagucaggc

SEQ ID NO: 1045367 - RNA, 22 nt, Human
gcaggguaggugacagguaguc

SEQ ID NO: 1045368 - RNA, 22 nt, Human
gaacugcauugugguauauguu

SEQ ID NO: 1045369 - RNA, 19 nt, Human
gggaaugauggaagacuuc

SEQ ID NO: 1045370 - RNA, 22 nt, Human
gagaugugucagguccuggggg

SEQ ID NO: 1045371 - RNA, 22 nt, Human
acaggauuaauaaaaaauugua

SEQ ID NO: 1045372 - RNA, 22 nt, Human
gaauaauugugaugcuugaagu

SEQ ID NO: 1045373 - RNA, 22 nt, Human
ugaauaugugacuuugauuuca

SEQ ID NO: 1045374 - RNA, 20 nt, Human
acagaugaggaugcggaggc

SEQ ID NO: 1045375 - RNA, 22 nt, Human
aggcaguuguugcugagcagcu

SEQ ID NO: 1045376 - RNA, 19 nt, Human
cauaauacaguggaucuga

SEQ ID NO: 1045377 - RNA, 22 nt, Human
uugcccacuggcuguuggucag

SEQ ID NO: 1045378 - RNA, 22 nt, Human
cggagaggugggggcagcaucu

SEQ ID NO: 1045379 - RNA, 22 nt, Human
uugaggagucaggggcacggaa

SEQ ID NO: 1045380 - RNA, 22 nt, Human
caugugaauuccaaagcuaggu

SEQ ID NO: 1045381 - RNA, 22 nt, Human
augcacacguacccuacaaggc

SEQ ID NO: 1045382 - RNA, 22 nt, Human
gagaugaagaggcccuuggagu

SEQ ID NO: 1045383 - RNA, 22 nt, Human
gcuuccaaugcuucuaucacau

SEQ ID NO: 1045384 - RNA, 22 nt, Human
cugguuuuuagugcuuaggagu

SEQ ID NO: 1045385 - RNA, 22 nt, Human
agauugucauugacgaugagca

SEQ ID NO: 1045386 - RNA, 22 nt, Human
cuggagucggcgccccaacaga

SEQ ID NO: 1045387 - RNA, 22 nt, Human
ucuugccgcgcaggcgcaguuc

SEQ ID NO: 1045388 - RNA, 22 nt, Human
uguucauaucauuuugaaagcu

SEQ ID NO: 1045389 - RNA, 22 nt, Human
ugguaugcuuauuaucuucaac

SEQ ID NO: 1045390 - RNA, 22 nt, Human
gaucucaaagcaguguggguug

SEQ ID NO: 1045391 - RNA, 22 nt, Human
uuuccaaagguggcaggaacaa

SEQ ID NO: 1045392 - RNA, 22 nt, Human
gcaguugcaggauuuguguugu

SEQ ID NO: 1045393 - RNA, 18 nt, Human
aguaaauguuaaauauug

SEQ ID NO: 1045394 - RNA, 22 nt, Human
gaaccuguccugagugaggagu

SEQ ID NO: 1045395 - RNA, 22 nt, Human
agagaauuaacauuccauggcu

SEQ ID NO: 1045396 - RNA, 22 nt, Human
ucugggaguuucugugggagcu

SEQ ID NO: 1045397 - RNA, 22 nt, Human
uaaccuguuaagggcugaccca

SEQ ID NO: 1045398 - RNA, 22 nt, Human
ccagguggacggcgaguacagg

SEQ ID NO: 1045399 - RNA, 22 nt, Human
cugggguaucugccacaacucu

SEQ ID NO: 1045400 - RNA, 22 nt, Human
gggagaguagcuggaagguucu

SEQ ID NO: 1045401 - RNA, 21 nt, Human
uccaggagcacgggacuagga

SEQ ID NO: 1045402 - RNA, 22 nt, Human
aggggcagccucacaauccucu

SEQ ID NO: 1045403 - RNA, 22 nt, Human
aaugaaacuauauuuagagagg

SEQ ID NO: 1045404 - RNA, 22 nt, Human
ggcucagaaaccucuggugucu

SEQ ID NO: 1045405 - RNA, 23 nt, Human
ugagagccuggcagccuggguuc

SEQ ID NO: 1045406 - RNA, 22 nt, Human
augccaucaaugacagaguuag

SEQ ID NO: 1045407 - RNA, 22 nt, Human
uaaaugaaaggguuuaauuuau

SEQ ID NO: 1045408 - RNA, 20 nt, Human
cucaccagguguaggcugag

SEQ ID NO: 1045409 - RNA, 22 nt, Human
cagcaguguacaaggugucaga

SEQ ID NO: 1045410 - RNA, 22 nt, Human
caggcuguguuccuggaacccc

SEQ ID NO: 1045411 - RNA, 22 nt, Human
agggaaauuaaugugagcaaug

SEQ ID NO: 1045412 - RNA, 22 nt, Human
gggaggugauuaggaccaugua

SEQ ID NO: 1045413 - RNA, 22 nt, Human
auuaaauuggacgcugggggaa

SEQ ID NO: 1045414 - RNA, 22 nt, Human
ggcacuggcaaagcaaagucug

SEQ ID NO: 1045415 - RNA, 22 nt, Human
ggagccaguuuagaccucaguu

SEQ ID NO: 1045416 - RNA, 22 nt, Human
auauaugaagaagucuugauua

SEQ ID NO: 1045417 - RNA, 22 nt, Human
gagaugggcgagaagguggacu

SEQ ID NO: 1045418 - RNA, 22 nt, Human
ugcuaauaaacuccaggcugag

SEQ ID NO: 1045419 - RNA, 22 nt, Human
gcagccuccgcacugcgagucc

SEQ ID NO: 1045420 - RNA, 22 nt, Human
aaaugcaugugcuauagaugug

SEQ ID NO: 1045421 - RNA, 22 nt, Human
aaauugaauuugggaaacauug

SEQ ID NO: 1045422 - RNA, 22 nt, Human
aauggcaaaguguuuucauacc

SEQ ID NO: 1045423 - RNA, 22 nt, Human
cagugccagcugcuuggccuac

SEQ ID NO: 1045424 - RNA, 22 nt, Human
uguccagcugaaggcagccuca

SEQ ID NO: 1045425 - RNA, 22 nt, Human
caauaauugcuuuccagaguua

SEQ ID NO: 1045426 - RNA, 22 nt, Human
aucagaagaaauggaugugacu

SEQ ID NO: 1045427 - RNA, 22 nt, Human
aggacugggugcagagggcauc

SEQ ID NO: 1045428 - RNA, 22 nt, Human
caaacuuacuguguuuaaagag

SEQ ID NO: 1045429 - RNA, 22 nt, Human
uuccagaacaauguggacguau

SEQ ID NO: 1045430 - RNA, 22 nt, Human
caacauuucaaggucuuuagga

SEQ ID NO: 1045431 - RNA, 22 nt, Human
gcuguauuuauaugaaggcaug

SEQ ID NO: 1045432 - RNA, 21 nt, Human
uccaaaggagacugagugugu

SEQ ID NO: 1045433 - RNA, 22 nt, Human
cagagccuuaguucuccuagaa

SEQ ID NO: 1045434 - RNA, 22 nt, Human
uugaugagaccauugccgcguc

SEQ ID NO: 1045435 - RNA, 22 nt, Human
gcagcagugugggcugaaccua

SEQ ID NO: 1045436 - RNA, 22 nt, Human
ugcccacaggaagacaccagcg

SEQ ID NO: 1045437 - RNA, 22 nt, Human
aagcuguuagggagugguaggu

SEQ ID NO: 1045438 - RNA, 22 nt, Human
ggcagguguggugaccagagau

SEQ ID NO: 1045439 - RNA, 22 nt, Human
caaccugaugugcaugccacgg

SEQ ID NO: 1045440 - RNA, 22 nt, Human
aagcacuaauauuuuggcaccu

SEQ ID NO: 1045441 - RNA, 22 nt, Human
caacccaagguuaguuggucuu

SEQ ID NO: 1045442 - RNA, 22 nt, Human
ugucacagagcgugcaacagaa

SEQ ID NO: 1045443 - RNA, 22 nt, Human
cuggagcagcagguggccaggg

SEQ ID NO: 1045444 - RNA, 22 nt, Human
augugauacuccuucuagugga

SEQ ID NO: 1045445 - RNA, 22 nt, Human
ccaagcuggacagcagcaagga

SEQ ID NO: 1045446 - RNA, 22 nt, Human
ugaaauguggagaugguaagua

SEQ ID NO: 1045447 - RNA, 22 nt, Human
accauccaaacugcuuucugug

SEQ ID NO: 1045448 - RNA, 22 nt, Human
ugacagugugcccggagguuag

SEQ ID NO: 1045449 - RNA, 22 nt, Human
uguggaagaacuucuugcuugg

SEQ ID NO: 1045450 - RNA, 20 nt, Human
ucauccaggacaggaguggc

SEQ ID NO: 1045451 - RNA, 22 nt, Human
aagucaauuaguaaacuuggaa

SEQ ID NO: 1045452 - RNA, 22 nt, Human
ggcagaggaagcuggaaguggg

SEQ ID NO: 1045453 - RNA, 22 nt, Norwalk virus
uggcaacaugugacaaugaaac

SEQ ID NO: 1045454 - RNA, 22 nt, Norwalk virus
aguaagguugauuacagugcca

SEQ ID NO: 1045455 - RNA, 22 nt, Human
cuccagggggcauccacacagc

SEQ ID NO: 1045456 - RNA, 22 nt, Human
acccagggccacagcccgcagu

SEQ ID NO: 1045457 - RNA, 22 nt, Human
caguccuuggcuucauccgagu

SEQ ID NO: 1045458 - RNA, 22 nt, Human
agccuccaucccaugcacaaag

SEQ ID NO: 1045459 - RNA, 21 nt, Human
agaauucuuaaguauucuaau

SEQ ID NO: 1045460 - RNA, 22 nt, Human
aauaagauccugaagauauguu

SEQ ID NO: 1045461 - RNA, 23 nt, Human
uaauacugcuucagaggcuuaga

SEQ ID NO: 1045462 - RNA, 22 nt, Human
gcccaggaguugaagggcugac

SEQ ID NO: 1045463 - RNA, 22 nt, Human
gauaauaagcacagcaggaugu

SEQ ID NO: 1045464 - RNA, 22 nt, Human
uuuccaaagcugaguugagcaa

SEQ ID NO: 1045465 - RNA, 22 nt, Human
agcccuggcagagccagguagu

SEQ ID NO: 1045466 - RNA, 22 nt, Human
auguauccuuauacacauuuau

SEQ ID NO: 1045467 - RNA, 22 nt, Human
guagaaauguaaccaggagaua

SEQ ID NO: 1045468 - RNA, 22 nt, Human
gggggagagacgagcggcucug

SEQ ID NO: 1045469 - RNA, 16 nt, Human
uuuccaaagggcagcu

SEQ ID NO: 1045470 - RNA, 22 nt, Human
ccagcuccaaguuugggcauca

SEQ ID NO: 1045471 - RNA, 22 nt, Human
agccauuuuccugaaauauaac

SEQ ID NO: 1045472 - RNA, 22 nt, Human
auuacagaaugcaguuccuuau

SEQ ID NO: 1045473 - RNA, 22 nt, Human
aaauaauguuaggccuuugcuc

SEQ ID NO: 1045474 - RNA, 22 nt, Human
augugcuuuauuaaguaaaaau

SEQ ID NO: 1045475 - RNA, 22 nt, Human
uuucauaauacuguacaugaaa

SEQ ID NO: 1045476 - RNA, 22 nt, Human
gugauuuagauguugaaaguga

SEQ ID NO: 1045477 - RNA, 22 nt, Human
agugugggccacgcagcugagc

SEQ ID NO: 1045478 - RNA, 22 nt, Human
cagaauuuuucgaauguacugu

SEQ ID NO: 1045479 - RNA, 22 nt, Human
agggcugcugcuccgggcccag

SEQ ID NO: 1045480 - RNA, 22 nt, Human
cuuuacauccuguuucccguuu

SEQ ID NO: 1045481 - RNA, 22 nt, Human
caaguccucgcuucuagcugug

SEQ ID NO: 1045482 - RNA, 22 nt, Human
auuauccucagaaaacauguga

SEQ ID NO: 1045483 - RNA, 22 nt, Human
ugaagaaucccagggaauuugg

SEQ ID NO: 1045484 - RNA, 22 nt, Human
ucccuccauaacagaggugagc

SEQ ID NO: 1045485 - RNA, 22 nt, Human
ucuggcucuauaacuccuagcu

SEQ ID NO: 1045486 - RNA, 22 nt, Human
aguacaacauuagaguaucuua

SEQ ID NO: 1045487 - RNA, 22 nt, Human
uuucaagaacaacauucauuca

SEQ ID NO: 1045488 - RNA, 18 nt, Human
aguccuuacgaggcuaua

SEQ ID NO: 1045489 - RNA, 22 nt, Human
acuuuagaccaucuuccacagu

SEQ ID NO: 1045490 - RNA, 22 nt, Human
ugggacagguuggagagaagca

SEQ ID NO: 1045491 - RNA, 22 nt, Human
ggacagcauaucagcagggcag

SEQ ID NO: 1045492 - RNA, 22 nt, Human
uaagaaacccaggaauuucuua

SEQ ID NO: 1045493 - RNA, 22 nt, Human
ucuaaacaguuucacucuuaau

SEQ ID NO: 1045494 - RNA, 22 nt, Human
gcugcccaggguggagccggcu

SEQ ID NO: 1045495 - RNA, 22 nt, Human
uuggaucacucugaagccuuac

SEQ ID NO: 1045496 - RNA, 21 nt, Human
uccagcuccugccacuccuua

SEQ ID NO: 1045497 - RNA, 22 nt, Human
aauaauaagauacuaagggagu

SEQ ID NO: 1045498 - RNA, 22 nt, Human
gaaagaggaaggagauguauua

SEQ ID NO: 1045499 - RNA, 22 nt, Human
caccagccagagugacagcucc

SEQ ID NO: 1045500 - RNA, 22 nt, Human
aaaucucaguguucuaagcauu

SEQ ID NO: 1045501 - RNA, 22 nt, Human
uggcauuuucuccuuugaguuu

SEQ ID NO: 1045502 - RNA, 22 nt, Human
gagaugggcgagaagguggacu

SEQ ID NO: 1045503 - RNA, 17 nt, Human
uaaguccuaguuauuuu

SEQ ID NO: 1045504 - RNA, 22 nt, Human
aggauuuauuauaugcccucau

SEQ ID NO: 1045505 - RNA, 22 nt, Human
auuaggcauuauggggauaagg

SEQ ID NO: 1045506 - RNA, 22 nt, Human
aaggaggguucccagguccugg

SEQ ID NO: 1045507 - RNA, 22 nt, Human
auggcauuugaccgcuuugugg

SEQ ID NO: 1045508 - RNA, 22 nt, Human
cauuuacauuuaagguuaauau

SEQ ID NO: 1045509 - RNA, 22 nt, Human
uguacaauagcuauuaucucca

SEQ ID NO: 1045510 - RNA, 22 nt, Human
acuggaucuaauugguuauagu

SEQ ID NO: 1045511 - RNA, 23 nt, Human
uacagaaggaguagucacuaaga

SEQ ID NO: 1045512 - RNA, 22 nt, Human
aaagcagcaacagcuguuagaa

SEQ ID NO: 1045513 - RNA, 22 nt, Human
aaauauaguaaaugcauaguuc

SEQ ID NO: 1045514 - RNA, 22 nt, Human
ugugaauaccuugaauucauca

SEQ ID NO: 1045515 - RNA, 20 nt, Human
aguacaauguaugauucaga

SEQ ID NO: 1045516 - RNA, 22 nt, Human
ugugggccugggaaggugacac

SEQ ID NO: 1045517 - RNA, 22 nt, Human
cagaaacauguauaaaguugua

SEQ ID NO: 1045518 - RNA, 22 nt, Human
agcugcccuuuaugaugcugaa

SEQ ID NO: 1045519 - RNA, 22 nt, Human
auucuacaacccaauaauaauu

SEQ ID NO: 1045520 - RNA, 22 nt, Human
uggauuuauggagaccgaaagu

SEQ ID NO: 1045521 - RNA, 22 nt, Human
agcccagccugauucuacaccc

SEQ ID NO: 1045522 - RNA, 22 nt, Human
aaucagucucauuuagcaggga

SEQ ID NO: 1045523 - RNA, 18 nt, Human
cuuucagauggauaugcu

SEQ ID NO: 1045524 - RNA, 22 nt, Human
cccuccagcucaaagcaaccgg

SEQ ID NO: 1045525 - RNA, 22 nt, Human
aaagaaggggucuacauccaau

SEQ ID NO: 1045526 - RNA, 22 nt, Human
caaguccuccaugugacuaggu

SEQ ID NO: 1045527 - RNA, 22 nt, Human
aagcagagccugagacagggau

SEQ ID NO: 1045528 - RNA, 22 nt, Human
accagcauuugcagaaauggag

SEQ ID NO: 1045529 - RNA, 22 nt, Human
uuauccaaacuggugaaucauu

SEQ ID NO: 1045530 - RNA, 22 nt, Human
gagggcuguggggcaugaccag

SEQ ID NO: 1045531 - RNA, 21 nt, Human
caauuucaugggaagauggga

SEQ ID NO: 1045532 - RNA, 22 nt, Human
auguacaaaauguuuugaaaug

SEQ ID NO: 1045533 - RNA, 22 nt, Human
auggcuuucagauuucuauguu

SEQ ID NO: 1045534 - RNA, 22 nt, Human
auacaugugggucuaaacauau

SEQ ID NO: 1045535 - RNA, 22 nt, Human
gcugcccauuccacuggauggu

SEQ ID NO: 1045536 - RNA, 22 nt, Human
caccacuucauaggcuuuaagg

SEQ ID NO: 1045537 - RNA, 22 nt, Human
uaauuucacugauaugaaguca

SEQ ID NO: 1045538 - RNA, 22 nt, Human
cccuccagccauggacccaggu

SEQ ID NO: 1045539 - RNA, 22 nt, Human
ugucauaaucaguuuugcaugu

SEQ ID NO: 1045540 - RNA, 22 nt, Human
ucagaaaugaucguuauucauu

SEQ ID NO: 1045541 - RNA, 22 nt, Human
ugggcugccggcaggcucugcc

SEQ ID NO: 1045542 - RNA, 22 nt, Human
ugcagugguugagagcccagac

SEQ ID NO: 1045543 - RNA, 22 nt, Human
uccuuguugcugcagucaccug

SEQ ID NO: 1045544 - RNA, 22 nt, Human
guauacagauacuuagacgugc

SEQ ID NO: 1045545 - RNA, 22 nt, Human
uggagaauuuugucaccagaca

SEQ ID NO: 1045546 - RNA, 22 nt, Human
caguccuuauuccuauauuccu

SEQ ID NO: 1045547 - RNA, 22 nt, Human
aggagacauaacuaugaugaga

SEQ ID NO: 1045548 - RNA, 22 nt, Human
ccugcccagcuucaccucaggc

SEQ ID NO: 1045549 - RNA, 22 nt, Human
uacaguaagaugaaauagcaau

SEQ ID NO: 1045550 - RNA, 22 nt, Human
agcagggaauagcggaaagaau

SEQ ID NO: 1045551 - RNA, 22 nt, Human
cuccuuagugccucugcacgag

SEQ ID NO: 1045552 - RNA, 22 nt, Human
aaucccagcuacucaggaaguu

SEQ ID NO: 1045553 - RNA, 22 nt, Human
uacaagaaauuucugcauauau

SEQ ID NO: 1045554 - RNA, 22 nt, Human
gcccagggcgauggucggggcc

SEQ ID NO: 1045555 - RNA, 22 nt, Human
cuccuuccugcagaucugagau

SEQ ID NO: 1045556 - RNA, 22 nt, Human
uuuaggcaugcaguucuauuua

SEQ ID NO: 1045557 - RNA, 22 nt, Human
auggcuuuucacagaggguucu

SEQ ID NO: 1045558 - RNA, 22 nt, Human
guuaaagaagaauaguuccuuu

SEQ ID NO: 1045559 - RNA, 22 nt, Human
ggcauuuaucuaauauaguuua

SEQ ID NO: 1045560 - RNA, 22 nt, Human
cauaaaauggcuuguucuuuaa

SEQ ID NO: 1045561 - RNA, 22 nt, Human
aggagacaucuaacuguagguu

SEQ ID NO: 1045562 - RNA, 22 nt, Human
uguccuuauauuguggaagggg

SEQ ID NO: 1045563 - RNA, 22 nt, Human
agacauggagaaggagccagug

SEQ ID NO: 1045564 - RNA, 22 nt, Human
cauuucaaugccuucaacauag

SEQ ID NO: 1045565 - RNA, 22 nt, Human
caaagccaggcuuucuaaugua

SEQ ID NO: 1045566 - RNA, 22 nt, Human
gcagggaagggaaacagagacc

SEQ ID NO: 1045567 - RNA, 22 nt, Human
aaagcagcaaauacuuuugcac

SEQ ID NO: 1045568 - RNA, 22 nt, Human
gcccuagggggaaccgaggacu

SEQ ID NO: 1045569 - RNA, 22 nt, Human
ucaaaauucuagggagaauggu

SEQ ID NO: 1045570 - RNA, 22 nt, Human
uuuagaaugugacuguauuuga

SEQ ID NO: 1045571 - RNA, 22 nt, Human
uuaaggauguugugauuuauua

SEQ ID NO: 1045572 - RNA, 22 nt, Human
auggcauuugaaucugucuuuu

SEQ ID NO: 1045573 - RNA, 22 nt, Human
ccaggguaccccaagggcaggu

SEQ ID NO: 1045574 - RNA, 22 nt, Human
ccccagggucaguguguggagg

SEQ ID NO: 1045575 - RNA, 22 nt, Human
aauguaaacagcaagagaaggg

SEQ ID NO: 1045576 - RNA, 22 nt, Human
agcgcccaggggcagggcucuc

SEQ ID NO: 1045577 - RNA, 22 nt, Human
ggcugccugugcccaggcacac

SEQ ID NO: 1045578 - RNA, 22 nt, Human
auucauaacggcaaaugucacc

SEQ ID NO: 1045579 - RNA, 22 nt, Human
cuuagaaagaguuuucuccccu

SEQ ID NO: 1045580 - RNA, 19 nt, Human
ccccaggguaggcuagggg

SEQ ID NO: 1045581 - RNA, 22 nt, Human
agaaucugguagaaccaaggau

SEQ ID NO: 1045582 - RNA, 22 nt, Human
ucaauucaauugaacaguuacu

SEQ ID NO: 1045583 - RNA, 22 nt, Human
agucaccaacaugguucccagg

SEQ ID NO: 1045584 - RNA, 22 nt, Human
caagggaguuacugagggcggg

SEQ ID NO: 1045585 - RNA, 22 nt, Human
aguccuuaugugguggagagag

SEQ ID NO: 1045586 - RNA, 22 nt, Human
gaauuucauugcucugcugugu

SEQ ID NO: 1045587 - RNA, 22 nt, Human
aauuucaaacuaauaggaacca

SEQ ID NO: 1045588 - RNA, 22 nt, Human
guuccaaagucucugagcugag

SEQ ID NO: 1045589 - RNA, 22 nt, Human
auccaaaccuggacaugagugg

SEQ ID NO: 1045590 - RNA, 22 nt, Human
gcaaaauuaaacuuagcaucau

SEQ ID NO: 1045591 - RNA, 22 nt, Human
uaaacauggauucugaucacag

SEQ ID NO: 1045592 - RNA, 22 nt, Human
ugggaggcagguaggugaugau

SEQ ID NO: 1045593 - RNA, 22 nt, Human
uaccuugggcuauuaucuuuga

SEQ ID NO: 1045594 - RNA, 22 nt, Human
gguacaaugguucauuuuaugu

SEQ ID NO: 1045595 - RNA, 22 nt, Human
ugaauaauccacagucauucau

SEQ ID NO: 1045596 - RNA, 22 nt, Human
ucaacuuuaguguagcuauuua

SEQ ID NO: 1045597 - RNA, 22 nt, Human
uauggcuuuuaacugucguaug

SEQ ID NO: 1045598 - RNA, 22 nt, Human
cuuagaaaucgaacucagguua

SEQ ID NO: 1045599 - RNA, 22 nt, Human
aauguuuuaaaagagauugaga

SEQ ID NO: 1045600 - RNA, 22 nt, Human
agggcugccauuucuggcccaa

SEQ ID NO: 1045601 - RNA, 22 nt, Human
uaucagaaaugccuuaaauugg

SEQ ID NO: 1045602 - RNA, 22 nt, Human
uaaagucaucuuuacaucuuug

SEQ ID NO: 1045603 - RNA, 22 nt, Human
acaugaaaaauguuugcaguuu

SEQ ID NO: 1045604 - RNA, 22 nt, Human
acugcccaugugcaucaaguag

SEQ ID NO: 1045605 - RNA, 22 nt, Human
aggagacacugagacuucacca

SEQ ID NO: 1045606 - RNA, 22 nt, Human
aagaaaucagaaaagcauucgu

SEQ ID NO: 1045607 - RNA, 22 nt, Human
cuaugacacaggccauuauaua

SEQ ID NO: 1045608 - RNA, 22 nt, Human
cuccaguggugauggggaagaa

SEQ ID NO: 1045609 - RNA, 22 nt, Human
cuauaauuaugcucaaaaugua

SEQ ID NO: 1045610 - RNA, 22 nt, Human
gaggggagacagggaaaucagu

SEQ ID NO: 1045611 - RNA, 22 nt, Human
acuuuaucaggaaucacacagc

SEQ ID NO: 1045612 - RNA, 22 nt, Human
ucccuggcacugcugugauuag

SEQ ID NO: 1045613 - RNA, 22 nt, Human
gauuuccaggucauuaauaaag

SEQ ID NO: 1045614 - RNA, 22 nt, Human
uggggagacuggccgagauccu

SEQ ID NO: 1045615 - RNA, 21 nt, Human
uucaaagacuugaugcugacc

SEQ ID NO: 1045616 - RNA, 19 nt, Human
ugcuuaauuccuaguaggu

SEQ ID NO: 1045617 - RNA, 22 nt, Human
caauuuuuaaacuaugaaguug

SEQ ID NO: 1045618 - RNA, 21 nt, Human
agggccugugcucuccagguc

SEQ ID NO: 1045619 - RNA, 22 nt, Human
cgggcugcucuggaccgacagc

SEQ ID NO: 1045620 - RNA, 22 nt, Human
uugaauaaaugagcagugaauu

SEQ ID NO: 1045621 - RNA, 22 nt, Human
acauucacuauguccaaacucu

SEQ ID NO: 1045622 - RNA, 22 nt, Human
uuguuaaaaauagauuuccagg

SEQ ID NO: 1045623 - RNA, 22 nt, Human
caauuucaauacaaaauacauu

SEQ ID NO: 1045624 - RNA, 22 nt, Human
uaauuucagugcaagcucacgg

SEQ ID NO: 1045625 - RNA, 22 nt, Human
cacaauuuccaagucauguuau

SEQ ID NO: 1045626 - RNA, 22 nt, Human
cucccagguuacaucugagccu

SEQ ID NO: 1045627 - RNA, 22 nt, Human
cuuaaacugaaagcuacaagau

SEQ ID NO: 1045628 - RNA, 22 nt, Human
gcacaauaacagccaagguuau

SEQ ID NO: 1045629 - RNA, 22 nt, Human
uacacaugaucauuuaguagca

SEQ ID NO: 1045630 - RNA, 22 nt, Human
cccaggcagccccagaagcuug

SEQ ID NO: 1045631 - RNA, 21 nt, Human
cauuucaaagagcuggaaauc

SEQ ID NO: 1045632 - RNA, 22 nt, Human
ccagggaaauuaaugaguuaau

SEQ ID NO: 1045633 - RNA, 22 nt, Human
uccuggauaucaaacaaacauu

SEQ ID NO: 1045634 - RNA, 22 nt, Human
ugcuuuaaaauggacuguuuug

SEQ ID NO: 1045635 - RNA, 20 nt, Human
auucuaaagcucugcucuuu

SEQ ID NO: 1045636 - RNA, 22 nt, Human
gcugcccacaaugauuacaugg

SEQ ID NO: 1045637 - RNA, 22 nt, Human
gccaaggguaguggaggccccu

SEQ ID NO: 1045638 - RNA, 22 nt, Human
aucacaaaggucucagagcaca

SEQ ID NO: 1045639 - RNA, 22 nt, Human
aagcagggcuuuaagcgguuuu

SEQ ID NO: 1045640 - RNA, 22 nt, Human
ucuccaggaaccaucaugguaa

SEQ ID NO: 1045641 - RNA, 19 nt, Human
ccagccucucuuccacccc

SEQ ID NO: 1045642 - RNA, 22 nt, Human
uguaaauaguuagcuugccucu

SEQ ID NO: 1045643 - RNA, 20 nt, Human
acuggaucuggcuggagcug

SEQ ID NO: 1045644 - RNA, 18 nt, Human
ccucuaccuaccccuaga

SEQ ID NO: 1045645 - RNA, 19 nt, Human
guuaggcaggguggggagu

SEQ ID NO: 1045646 - RNA, 22 nt, Human
agaggguaugaguggggcuaaa

SEQ ID NO: 1045647 - RNA, 22 nt, Human
cagggauggccuggcgggccac

SEQ ID NO: 1045648 - RNA, 22 nt, Human
agaggaggccaggcccacaccu

SEQ ID NO: 1045649 - RNA, 22 nt, Human
uuccuuaggcuguuugcagugc

SEQ ID NO: 1045650 - RNA, 22 nt, Human
ucagccagaggcuucuugguuu

SEQ ID NO: 1045651 - RNA, 22 nt, Human
uuucaacauauaccauaaugcc

SEQ ID NO: 1045652 - RNA, 22 nt, Human
ucucuuggacauguggcucugc

SEQ ID NO: 1045653 - RNA, 22 nt, Human
gaguccuuggcaucaucaguac

SEQ ID NO: 1045654 - RNA, 22 nt, Human
gcugcaccagcugcacccagua

SEQ ID NO: 1045655 - RNA, 22 nt, Human
uugauuaaucccaugugaguag

SEQ ID NO: 1045656 - RNA, 22 nt, Human
cuggcuuucccuggacaacagc

SEQ ID NO: 1045657 - RNA, 22 nt, Human
ugggagagugcucaaugugcaa

SEQ ID NO: 1045658 - RNA, 22 nt, Human
guggcugcaucggggugaccag

SEQ ID NO: 1045659 - RNA, 22 nt, Human
aaucagaacgcucgaucuucgg

SEQ ID NO: 1045660 - RNA, 22 nt, Human
uucauacuguguuuccaaguuu

SEQ ID NO: 1045661 - RNA, 22 nt, Human
gaggcagcugaagcuucaaaga

SEQ ID NO: 1045662 - RNA, 22 nt, Human
gguggggcccuggcacugguau

SEQ ID NO: 1045663 - RNA, 22 nt, Human
caauuucacuaaugaugugggg

SEQ ID NO: 1045664 - RNA, 22 nt, Human
gccccagcguggcuguguuagg

SEQ ID NO: 1045665 - RNA, 22 nt, Human
ugcuuaauagugcacugguuuc

SEQ ID NO: 1045666 - RNA, 22 nt, Human
gcuccaggcagagccucuuucg

SEQ ID NO: 1045667 - RNA, 22 nt, Human
acauaauagguaccugaauaau

SEQ ID NO: 1045668 - RNA, 22 nt, Human
ugcuuauugcuuucaagacugu

SEQ ID NO: 1045669 - RNA, 22 nt, Human
gagacgggguuugagacggguu

SEQ ID NO: 1045670 - RNA, 22 nt, Human
gggugagacagaaagagcaaaa

SEQ ID NO: 1045671 - RNA, 22 nt, Human
ucuccaggggcagggucuggag

SEQ ID NO: 1045672 - RNA, 22 nt, Human
acauuaccuggcauuugaucuu

SEQ ID NO: 1045673 - RNA, 22 nt, Human
gcagaauuuucuguuuucuaga

SEQ ID NO: 1045674 - RNA, 22 nt, Human
augugcuucauucuacaugaca

SEQ ID NO: 1045675 - RNA, 22 nt, Human
uuaauucuaguuuaacacuuag

SEQ ID NO: 1045676 - RNA, 22 nt, Human
gaguggggaaagccaggacaga

SEQ ID NO: 1045677 - RNA, 22 nt, Human
gaguccuuuucucuguccacug

SEQ ID NO: 1045678 - RNA, 22 nt, Human
acuggauuccauugugcaaaga

SEQ ID NO: 1045679 - RNA, 22 nt, Human
auauacugauagcugcacuucu

SEQ ID NO: 1045680 - RNA, 22 nt, Human
aauaauauuugaagcuucaaag

SEQ ID NO: 1045681 - RNA, 22 nt, Human
uauccaaacauauagucucucu

SEQ ID NO: 1045682 - RNA, 22 nt, Human
gagauggggaauaggagcaagc

SEQ ID NO: 1045683 - RNA, 22 nt, Human
gggagacaguucagauaguuuc

SEQ ID NO: 1045684 - RNA, 22 nt, Human
uccagggacacagaguccuucu

SEQ ID NO: 1045685 - RNA, 22 nt, Human
caacuuucuguuaaauguuagu

SEQ ID NO: 1045686 - RNA, 20 nt, Human
agaagucagcucagaaguga

SEQ ID NO: 1045687 - RNA, 22 nt, Human
ucugcccaaggcugucacuaga

SEQ ID NO: 1045688 - RNA, 22 nt, Human
aguagaauagauggauacuauu

SEQ ID NO: 1045689 - RNA, 22 nt, Human
aggcagcagccacaaggccuga

SEQ ID NO: 1045690 - RNA, 22 nt, Human
ucagggaaaggggagagucauu

SEQ ID NO: 1045691 - RNA, 21 nt, Human
gcugcccaacccugcaucucc

SEQ ID NO: 1045692 - RNA, 23 nt, Human
aggauuuaaaggcaaugcauuuu

SEQ ID NO: 1045693 - RNA, 22 nt, Human
uccaaaaaacguuugaauaguu

SEQ ID NO: 1045694 - RNA, 22 nt, Human
gaguccuugucauaauucagug

SEQ ID NO: 1045695 - RNA, 22 nt, Human
agggcugcuauguugauucaga

SEQ ID NO: 1045696 - RNA, 22 nt, Human
gccuaauaacuagcuguguaac

SEQ ID NO: 1045697 - RNA, 22 nt, Human
gacagccaggcauagggaguau

SEQ ID NO: 1045698 - RNA, 22 nt, Human
uugaagaaagucauauauaaug

SEQ ID NO: 1045699 - RNA, 22 nt, Human
caaagcaccacaaaccagguga

SEQ ID NO: 1045700 - RNA, 22 nt, Human
auggauuugcuuauacacaugu

SEQ ID NO: 1045701 - RNA, 22 nt, Human
aggcagcaaaugucuggaacag

SEQ ID NO: 1045702 - RNA, 22 nt, Human
gaucagaaugggacauauccug

SEQ ID NO: 1045703 - RNA, 22 nt, Human
ugucaccaaguugaugaaugca

SEQ ID NO: 1045704 - RNA, 22 nt, Human
ccaaagcaagucacaugaucaa

SEQ ID NO: 1045705 - RNA, 22 nt, Human
aaacuuuguagagaaugcuggc

SEQ ID NO: 1045706 - RNA, 22 nt, Human
aggcagcagagguugaggaaag

SEQ ID NO: 1045707 - RNA, 22 nt, Human
cuggauuuuagaaggcuuccua

SEQ ID NO: 1045708 - RNA, 22 nt, Human
aagucacaagcauauaugcauu

SEQ ID NO: 1045709 - RNA, 23 nt, Human
cagggcccugcucaauuucucca

SEQ ID NO: 1045710 - RNA, 22 nt, Human
caucagucuagauucuaguacc

SEQ ID NO: 1045711 - RNA, 22 nt, Human
ugcuucccucacuucaccuggc

SEQ ID NO: 1045712 - RNA, 22 nt, Human
uggauuaguuaagaaauguuag

SEQ ID NO: 1045713 - RNA, 22 nt, Human
ccagcugucagugugaaaauaa

SEQ ID NO: 1045714 - RNA, 22 nt, Human
uugauggcugugauuuacucag

SEQ ID NO: 1045715 - RNA, 22 nt, Human
ucuccagggacugaggcuggag

SEQ ID NO: 1045716 - RNA, 22 nt, Human
ccaugggaauugggagguccca

SEQ ID NO: 1045717 - RNA, 22 nt, Human
cuccagggaggagcacggguuc

SEQ ID NO: 1045718 - RNA, 22 nt, Human
uaggagggcccugaaaauggca

SEQ ID NO: 1045719 - RNA, 22 nt, Human
aaggacagggaugguugauugu

SEQ ID NO: 1045720 - RNA, 22 nt, Human
aggagaggcucuaacucugugu

SEQ ID NO: 1045721 - RNA, 22 nt, Human
caucagaaucugagucucugcc

SEQ ID NO: 1045722 - RNA, 22 nt, Human
uucaacucuucaagaucacauc

SEQ ID NO: 1045723 - RNA, 22 nt, Human
gcagccucugcaguucaggagg

SEQ ID NO: 1045724 - RNA, 22 nt, Human
agaauucauaggaaguuuccua

SEQ ID NO: 1045725 - RNA, 20 nt, Human
ugaggcaggagaauggcaug

SEQ ID NO: 1045726 - RNA, 22 nt, Human
auacagaagccuguauuucugg

SEQ ID NO: 1045727 - RNA, 22 nt, Human
uacagaaaaacuggcauugaag

SEQ ID NO: 1045728 - RNA, 22 nt, Human
cuggcagugcccagucacuguu

SEQ ID NO: 1045729 - RNA, 22 nt, Human
ucugcccaguuugugcucaggu

SEQ ID NO: 1045730 - RNA, 21 nt, Human
ugccagggauuuacagagccu

SEQ ID NO: 1045731 - RNA, 22 nt, Human
uaggcagaauuguugaaugaag

SEQ ID NO: 1045732 - RNA, 21 nt, Human
uuuaaagaauaggaagggagg

SEQ ID NO: 1045733 - RNA, 22 nt, Human
auuaugcugguuuacacauuuu

SEQ ID NO: 1045734 - RNA, 22 nt, Human
uuccuccacgugacaggagcca

SEQ ID NO: 1045735 - RNA, 22 nt, Human
uaucugagaaagaagcaccaga

SEQ ID NO: 1045736 - RNA, 22 nt, Human
gacaagacagcuugcagacaac

SEQ ID NO: 1045737 - RNA, 22 nt, Human
guacagaaaugugaugacgcaa

SEQ ID NO: 1045738 - RNA, 22 nt, Human
cuuaaagaguauuuaauauaau

SEQ ID NO: 1045739 - RNA, 22 nt, Human
ccaaaauuaagccucuuauguu

SEQ ID NO: 1045740 - RNA, 22 nt, Human
gaggagggagcuggaagcucuu

SEQ ID NO: 1045741 - RNA, 22 nt, Human
cagaaaauaaaguuucuacgca

SEQ ID NO: 1045742 - RNA, 22 nt, Human
cuuacagagaagaaaauguagu

SEQ ID NO: 1045743 - RNA, 22 nt, Human
cuccagggaggucugcaggacu

SEQ ID NO: 1045744 - RNA, 22 nt, Human
ggcugcccugggaggcaagggu

SEQ ID NO: 1045745 - RNA, 22 nt, Human
uacuuugaagacaauaucugga

SEQ ID NO: 1045746 - RNA, 22 nt, Human
uaugcuguggaaaauacaaaga

SEQ ID NO: 1045747 - RNA, 22 nt, Human
uauccuuguacuauaguauuua

SEQ ID NO: 1045748 - RNA, 22 nt, Human
uagcaucuguucuuucauuaaa

SEQ ID NO: 1045749 - RNA, 22 nt, Human
uuagacaagggcuccuuaaaag

SEQ ID NO: 1045750 - RNA, 22 nt, Human
gcacagccggaccgaggaaaag

SEQ ID NO: 1045751 - RNA, 22 nt, Human
ccagauuugagcgucuuaaacc

SEQ ID NO: 1045752 - RNA, 22 nt, Human
uuaaagauucugaggcugauua

SEQ ID NO: 1045753 - RNA, 22 nt, Human
aauuaaaugacaggggaagaug

SEQ ID NO: 1045754 - RNA, 22 nt, Human
uuuaggcagaacauggacuuug

SEQ ID NO: 1045755 - RNA, 22 nt, Human
agagaugaacauaaaacaagga

SEQ ID NO: 1045756 - RNA, 23 nt, Human
cagaaaucugaaaucuagaaaug

SEQ ID NO: 1045757 - RNA, 22 nt, Human
uuuaggcagaagcccugcugau

SEQ ID NO: 1045758 - RNA, 22 nt, Human
auauauaaccuggauaaggcuu

SEQ ID NO: 1045759 - RNA, 22 nt, Human
uucagccugucugcagaccccu

SEQ ID NO: 1045760 - RNA, 22 nt, Human
ucuccaggacugagcuccagcc

SEQ ID NO: 1045761 - RNA, 22 nt, Human
agggagugguuaagaaggugca

SEQ ID NO: 1045762 - RNA, 22 nt, Human
cuuaauuacuguccaauaugca

SEQ ID NO: 1045763 - RNA, 22 nt, Human
uagcaucuggagaaacaagucc

SEQ ID NO: 1045764 - RNA, 21 nt, Human
caaguccuuugccaaagugcu

SEQ ID NO: 1045765 - RNA, 22 nt, Human
uaaaauugcggugaauauuucc

SEQ ID NO: 1045766 - RNA, 22 nt, Human
acagaauuaaugaaaauuacaa

SEQ ID NO: 1045767 - RNA, 22 nt, Human
ucagccucucugaguccagacc

SEQ ID NO: 1045768 - RNA, 22 nt, Human
aauauuucugcagaaugguuuu

SEQ ID NO: 1045769 - RNA, 23 nt, Human
uuaagacuggcugaacuuaguag

SEQ ID NO: 1045770 - RNA, 22 nt, Human
aucuccucccgcgccgagcucg

SEQ ID NO: 1045771 - RNA, 22 nt, Human
ccaguuugagguuucaagaugu

SEQ ID NO: 1045772 - RNA, 22 nt, Human
uggggagaguuacaaggaaucu

SEQ ID NO: 1045773 - RNA, 22 nt, Human
cagcccugcucuuagugucucc

SEQ ID NO: 1045774 - RNA, 22 nt, Human
cagggacagccuugggguggcg

SEQ ID NO: 1045775 - RNA, 22 nt, Human
gcuccaggccacggcuucuugg

SEQ ID NO: 1045776 - RNA, 22 nt, Human
ucuccaggcacuaccuggguaa

SEQ ID NO: 1045777 - RNA, 22 nt, Human
aguaaacauagaauguucuucc

SEQ ID NO: 1045778 - RNA, 19 nt, Human
uccagccugcuguuucucu

SEQ ID NO: 1045779 - RNA, 22 nt, Human
agugggaggcggcugacgggcg

SEQ ID NO: 1045780 - RNA, 22 nt, Human
gagggggcuagcgcagugccca

SEQ ID NO: 1045781 - RNA, 22 nt, Human
caggguagggcaagggaaccug

SEQ ID NO: 1045782 - RNA, 22 nt, Human
gagccucguggcggccacugcg

SEQ ID NO: 1045783 - RNA, 21 nt, Human
uaaauaauaaguugcugagau

SEQ ID NO: 1045784 - RNA, 22 nt, Human
acaaagucacaauaauuaaccu

SEQ ID NO: 1045785 - RNA, 22 nt, Human
cagaaaucauugugaugacagg

SEQ ID NO: 1045786 - RNA, 22 nt, Human
aaaaagguugauccagauuagg

SEQ ID NO: 1045787 - RNA, 22 nt, Human
uccagggagagccgcugcucca

SEQ ID NO: 1045788 - RNA, 22 nt, Human
ugucauaacuuagugacaaauc

SEQ ID NO: 1045789 - RNA, 21 nt, Human
ugggccaguagaaaggaaggc

SEQ ID NO: 1045790 - RNA, 22 nt, Human
uuuaggcacagaguugagggac

SEQ ID NO: 1045791 - RNA, 17 nt, Human
ucuccaggacgagcuca

SEQ ID NO: 1045792 - RNA, 22 nt, Human
cauagaaaucaggugagaaucu

SEQ ID NO: 1045793 - RNA, 17 nt, Human
ugaaaucagcacccagg

SEQ ID NO: 1045794 - RNA, 22 nt, Human
aaagcagcagaaucucucaggg

SEQ ID NO: 1045795 - RNA, 22 nt, Human
auaacaugaccugugcuucaca

SEQ ID NO: 1045796 - RNA, 22 nt, Human
uguacaaugccgagacuaacuc

SEQ ID NO: 1045797 - RNA, 22 nt, Human
agcugcccaaggucacagagcu

SEQ ID NO: 1045798 - RNA, 22 nt, Human
agaugcugggaggcugagugca

SEQ ID NO: 1045799 - RNA, 21 nt, Human
aaauggauagggcaauggaag

SEQ ID NO: 1045800 - RNA, 22 nt, Human
acaaagucaaauugcagccgcc

SEQ ID NO: 1045801 - RNA, 22 nt, Human
ugggagagucuaaaaccgaggu

SEQ ID NO: 1045802 - RNA, 22 nt, Human
uuagaaauauggugcugccgcc

SEQ ID NO: 1045803 - RNA, 22 nt, Human
ucagggaaugggcccagucccu

SEQ ID NO: 1045804 - RNA, 22 nt, Human
ucacauuucgcaucaguccgau

SEQ ID NO: 1045805 - RNA, 22 nt, Human
uuugaauagcauaggauuacau

SEQ ID NO: 1045806 - RNA, 22 nt, Human
auggcuuugcucaaguuuagcc

SEQ ID NO: 1045807 - RNA, 22 nt, Human
aaaauugaggcucauguuaaau

SEQ ID NO: 1045808 - RNA, 22 nt, Human
gcugcccaggaagccugggguu

SEQ ID NO: 1045809 - RNA, 18 nt, Human
agggcccugguggccauu

SEQ ID NO: 1045810 - RNA, 22 nt, Human
uuccuuagcugucccuggaaau

SEQ ID NO: 1045811 - RNA, 22 nt, Human
auuucaggagcaguuucagugg

SEQ ID NO: 1045812 - RNA, 22 nt, Human
ucauacacaagagcauguaaca

SEQ ID NO: 1045813 - RNA, 22 nt, Human
uguguacacagauaguaauggc

SEQ ID NO: 1045814 - RNA, 22 nt, Human
uugcacaugauagaugauuucu

SEQ ID NO: 1045815 - RNA, 22 nt, Human
auagaauucuuugaaauuuaug

SEQ ID NO: 1045816 - RNA, 22 nt, Human
uuaauuaugcaaaaggccccau

SEQ ID NO: 1045817 - RNA, 22 nt, Human
uacagagauacucuagaucaaa

SEQ ID NO: 1045818 - RNA, 22 nt, Human
uaauuucaauagcuugcauaau

SEQ ID NO: 1045819 - RNA, 23 nt, Human
ccagggagugcuacuaucaagcc

SEQ ID NO: 1045820 - RNA, 22 nt, Human
uaaucuacuguuuauaugaaau

SEQ ID NO: 1045821 - RNA, 22 nt, Human
ucagggaacaucguuaaacuag

SEQ ID NO: 1045822 - RNA, 22 nt, Human
ccagucccgcaugguccagaau

SEQ ID NO: 1045823 - RNA, 22 nt, Human
uggagacaugggcgaaucuaag

SEQ ID NO: 1045824 - RNA, 22 nt, Human
cuaacuuuagcuuagauuauca

SEQ ID NO: 1045825 - RNA, 22 nt, Human
uggcaauuuuaggugguuuagu

SEQ ID NO: 1045826 - RNA, 22 nt, Human
gagucaccacacggugcugacu

SEQ ID NO: 1045827 - RNA, 22 nt, Human
aucagaauaauuagauuucaga

SEQ ID NO: 1045828 - RNA, 22 nt, Human
cuagaaaucucuguuuacauca

SEQ ID NO: 1045829 - RNA, 22 nt, Human
ucuccaggaagcccucccugac

SEQ ID NO: 1045830 - RNA, 22 nt, Human
ggcaguggugggaggcucgcuc

SEQ ID NO: 1045831 - RNA, 22 nt, Human
aguggcuucauuucugccagaa

SEQ ID NO: 1045832 - RNA, 22 nt, Human
caacuuuaugauugguuuguca

SEQ ID NO: 1045833 - RNA, 22 nt, Human
aggcaacuguuugauaauguug

SEQ ID NO: 1045834 - RNA, 22 nt, Human
ccagaucuaguguuguaaagcu

SEQ ID NO: 1045835 - RNA, 22 nt, Human
augcuuuaaacuauaaauccac

SEQ ID NO: 1045836 - RNA, 22 nt, Human
uggggagauuguuaaauuuaga

SEQ ID NO: 1045837 - RNA, 22 nt, Human
cccagggauguggcagauguua

SEQ ID NO: 1045838 - RNA, 22 nt, Human
ggcugccuucccugagccccgg

SEQ ID NO: 1045839 - RNA, 22 nt, Human
ggcccagcaucuugugaaguuu

SEQ ID NO: 1045840 - RNA, 22 nt, Human
agcagugggugacagagcugag

SEQ ID NO: 1045841 - RNA, 22 nt, Human
auagaauagcauagaaaauuga

SEQ ID NO: 1045842 - RNA, 21 nt, Human
gaaaaccauuugcaucaugag

SEQ ID NO: 1045843 - RNA, 22 nt, Human
aaguccaugaucaagauguggc

SEQ ID NO: 1045844 - RNA, 22 nt, Human
uaucagaaggaagugccuuuaa

SEQ ID NO: 1045845 - RNA, 22 nt, Human
uacaugaaguugucuaaacugg

SEQ ID NO: 1045846 - RNA, 20 nt, Human
ugugggcccuuggcuggcaa

SEQ ID NO: 1045847 - RNA, 22 nt, Human
acugcccagugauuggugguua

SEQ ID NO: 1045848 - RNA, 22 nt, Human
aacaugucuggguauucacaag

SEQ ID NO: 1045849 - RNA, 22 nt, Human
agggagagacauuuccuucuug

SEQ ID NO: 1045850 - RNA, 22 nt, Human
cagaaucagcccuugcuauuaa

SEQ ID NO: 1045851 - RNA, 22 nt, Human
gccagccugugcuuggccaggc

SEQ ID NO: 1045852 - RNA, 22 nt, Human
uaauuguagcuuuguaaucagc

SEQ ID NO: 1045853 - RNA, 22 nt, Human
auuucaacacuuuuggaauuag

SEQ ID NO: 1045854 - RNA, 20 nt, Human
cccagcccgggccgcgcucg

SEQ ID NO: 1045855 - RNA, 20 nt, Human
cuccaguguucaggggagug

SEQ ID NO: 1045856 - RNA, 19 nt, Human
agggcugcucuggccuggg

SEQ ID NO: 1045857 - RNA, 22 nt, Human
gagauuuaauuggauuaacuua

SEQ ID NO: 1045858 - RNA, 22 nt, Human
aagucacccacaggcagcagaa

SEQ ID NO: 1045859 - RNA, 22 nt, Human
cagcccugugcuaagcacccuc

SEQ ID NO: 1045860 - RNA, 19 nt, Human
acagggaauuuccacagaa

SEQ ID NO: 1045861 - RNA, 22 nt, Human
agaaaucauugaauuauuugcu

SEQ ID NO: 1045862 - RNA, 22 nt, Human
guuaggcaaauaacuguggagc

SEQ ID NO: 1045863 - RNA, 22 nt, Human
uccccacucugggccaccacaa

SEQ ID NO: 1045864 - RNA, 22 nt, Human
uucacagauuucccugcacaug

SEQ ID NO: 1045865 - RNA, 22 nt, Human
aggcagcaugggcccagagucc

SEQ ID NO: 1045866 - RNA, 22 nt, Human
augggagaggguaggaauuacu

SEQ ID NO: 1045867 - RNA, 22 nt, Human
acaacuuuguagcaauuccacg

SEQ ID NO: 1045868 - RNA, 22 nt, Human
gaugggauuuuuuauguguuca

SEQ ID NO: 1045869 - RNA, 22 nt, Human
gcagggcaaacccagguguuca

SEQ ID NO: 1045870 - RNA, 22 nt, Human
aaaugaaaugagugccuggagg

SEQ ID NO: 1045871 - RNA, 22 nt, Human
guuaggcaugaguguguauuaa

SEQ ID NO: 1045872 - RNA, 22 nt, Human
aauauuaucaaaagcuuuuuca

SEQ ID NO: 1045873 - RNA, 22 nt, Human
auauacaguuuuacaggguuuc

SEQ ID NO: 1045874 - RNA, 22 nt, Human
acccagggcagccagcggggag

SEQ ID NO: 1045875 - RNA, 22 nt, Human
cagaucuagagcuuuuccaucu

SEQ ID NO: 1045876 - RNA, 22 nt, Human
uuuauccagcagcuauucaaaa

SEQ ID NO: 1045877 - RNA, 22 nt, Human
cuuccaaagcacuuuauggacc

SEQ ID NO: 1045878 - RNA, 22 nt, Human
agggagaguuugauguuuccuc

SEQ ID NO: 1045879 - RNA, 22 nt, Human
uuuaggcaagaacucacugaga

SEQ ID NO: 1045880 - RNA, 22 nt, Human
gaugaaaaaagacgagcauaua

SEQ ID NO: 1045881 - RNA, 21 nt, Human
uaucagaagagaaagaaugau

SEQ ID NO: 1045882 - RNA, 22 nt, Human
uuauacaguuuauacuuagaau

SEQ ID NO: 1045883 - RNA, 22 nt, Human
uugauacuauuaagcacugggc

SEQ ID NO: 1045884 - RNA, 22 nt, Human
gaggagguuccggguggagaag

SEQ ID NO: 1045885 - RNA, 22 nt, Human
aaauacuguagauaauagaguu

SEQ ID NO: 1045886 - RNA, 18 nt, Human
cuggcuuucuuauccauc

SEQ ID NO: 1045887 - RNA, 22 nt, Human
cagagauuauuauaacuaauua

SEQ ID NO: 1045888 - RNA, 22 nt, Human
ccaccaggcacucacagggaag

SEQ ID NO: 1045889 - RNA, 22 nt, Human
caaguccucugguuucaaauag

SEQ ID NO: 1045890 - RNA, 22 nt, Human
auuaggcacuagaaugucaauu

SEQ ID NO: 1045891 - RNA, 22 nt, Human
auccuuaguuaagaacaggagu

SEQ ID NO: 1045892 - RNA, 23 nt, Human
cagaaauaaacugguuuguagau

SEQ ID NO: 1045893 - RNA, 22 nt, Human
uccagggagauacuggcugcca

SEQ ID NO: 1045894 - RNA, 18 nt, Human
caagaaucucuaaagaag

SEQ ID NO: 1045895 - RNA, 22 nt, Human
gcagggaaguuguaauguaaug

SEQ ID NO: 1045896 - RNA, 22 nt, Human
uaugucaaaguuaagaaauagg

SEQ ID NO: 1045897 - RNA, 22 nt, Human
aaucagaacuccuaccacagag

SEQ ID NO: 1045898 - RNA, 22 nt, Human
aagagggguggucugugaggau

SEQ ID NO: 1045899 - RNA, 22 nt, Human
acuauacaguauguacgugcac

SEQ ID NO: 1045900 - RNA, 23 nt, Human
gcugccuccuacaaaagcccagc

SEQ ID NO: 1045901 - RNA, 22 nt, Human
auacagaauuugcccuuuucau

SEQ ID NO: 1045902 - RNA, 22 nt, Human
uggcugccugaucgagcaggug

SEQ ID NO: 1045903 - RNA, 22 nt, Human
acacagauuuuacauguuaugc

SEQ ID NO: 1045904 - RNA, 22 nt, Human
uccagggagucaaaugaacuac

SEQ ID NO: 1045905 - RNA, 22 nt, Human
acuuuaauuaaugaacuguggc

SEQ ID NO: 1045906 - RNA, 22 nt, Human
aaaugcauggcuguuuuaaagc

SEQ ID NO: 1045907 - RNA, 22 nt, Human
gaggcugcccacaccugcgccg

SEQ ID NO: 1045908 - RNA, 22 nt, Human
acaaaaagggagaugagguaga

SEQ ID NO: 1045909 - RNA, 22 nt, Human
gcuagggacuagggaaggagca

SEQ ID NO: 1045910 - RNA, 22 nt, Human
aaaacauguccauacagaaacu

SEQ ID NO: 1045911 - RNA, 22 nt, Human
aaucuagucuccuuaagucuuu

SEQ ID NO: 1045912 - RNA, 22 nt, Human
ucuccagguggggucaccuuuu

SEQ ID NO: 1045913 - RNA, 22 nt, Human
agaggggaggcgaaccagaguc

SEQ ID NO: 1045914 - RNA, 22 nt, Human
auggccuuagugaugauuaaua

SEQ ID NO: 1045915 - RNA, 22 nt, Human
augcuuaauacacuguuaaagg

SEQ ID NO: 1045916 - RNA, 22 nt, Human
augaaauaucuugaagaaauuc

SEQ ID NO: 1045917 - RNA, 22 nt, Human
acauucacgcucucaaagcuga

SEQ ID NO: 1045918 - RNA, 22 nt, Human
caguaaaugcagauauagauac

SEQ ID NO: 1045919 - RNA, 22 nt, Human
aaagcagccacucucucugccu

SEQ ID NO: 1045920 - RNA, 22 nt, Human
aagagagggguugcauggaaau

SEQ ID NO: 1045921 - RNA, 22 nt, Human
ccagggagcggggcugggucuc

SEQ ID NO: 1045922 - RNA, 22 nt, Human
gugagcaggauuucauggugua

SEQ ID NO: 1045923 - RNA, 22 nt, Human
uuacagaaguauugagagaucc

SEQ ID NO: 1045924 - RNA, 17 nt, Human
agcagggagucaaggga

SEQ ID NO: 1045925 - RNA, 22 nt, Human
uggggagaaaugucuuuguucc

SEQ ID NO: 1045926 - RNA, 22 nt, Human
augaaaauguacauguguauaa

SEQ ID NO: 1045927 - RNA, 22 nt, Human
gcacaauaauucuuguuuugcu

SEQ ID NO: 1045928 - RNA, 22 nt, Human
auauacugaggagacuuuauau

SEQ ID NO: 1045929 - RNA, 22 nt, Human
aaucaagucaaccaucaugugc

SEQ ID NO: 1045930 - RNA, 22 nt, Human
gugagcagggcaggacugggga

SEQ ID NO: 1045931 - RNA, 22 nt, Human
uaguaucuauuaguaacaagag

SEQ ID NO: 1045932 - RNA, 22 nt, Human
ugaaacaagauccacagacuug

SEQ ID NO: 1045933 - RNA, 22 nt, Human
gcguggggcagcccagggcuuc

SEQ ID NO: 1045934 - RNA, 22 nt, Human
uccauacauugaaauaccauuc

SEQ ID NO: 1045935 - RNA, 22 nt, Human
gagucaccacugugauagucga

SEQ ID NO: 1045936 - RNA, 22 nt, Human
ugaucugagagcagaucaccau

SEQ ID NO: 1045937 - RNA, 20 nt, Human
uucuauacauaucacugaaa

SEQ ID NO: 1045938 - RNA, 22 nt, Human
agcagggacugagccaguggga

SEQ ID NO: 1045939 - RNA, 19 nt, Human
aggauuuauuaugugcuca

SEQ ID NO: 1045940 - RNA, 22 nt, Human
uuguuucagcuguaugcuaugu

SEQ ID NO: 1045941 - RNA, 22 nt, Human
ucuguucuauuggucuaugugu

SEQ ID NO: 1045942 - RNA, 22 nt, Human
agaggaaguaaucaggaccugc

SEQ ID NO: 1045943 - RNA, 22 nt, Human
agggcugcugaggaagccuugc

SEQ ID NO: 1045944 - RNA, 22 nt, Human
uuugaacaugcugcaugauaau

SEQ ID NO: 1045945 - RNA, 22 nt, Human
ugagauggggagggcugcagaa

SEQ ID NO: 1045946 - RNA, 22 nt, Human
acuccagguuuuuucacugaag

SEQ ID NO: 1045947 - RNA, 22 nt, Human
acuaaacugaagcaugaaaagg

SEQ ID NO: 1045948 - RNA, 22 nt, Human
guccuccauggucuugaaguaa

SEQ ID NO: 1045949 - RNA, 22 nt, Human
uuaauauguugaaauuuauuag

SEQ ID NO: 1045950 - RNA, 22 nt, Human
agccauucauugugcucucaga

SEQ ID NO: 1045951 - RNA, 22 nt, Human
ggagaaugauauauagcucagu

SEQ ID NO: 1045952 - RNA, 23 nt, Human
gaggcagcuccugcagugcccug

SEQ ID NO: 1045953 - RNA, 22 nt, Human
ucuuuaauuguggaagagcagc

SEQ ID NO: 1045954 - RNA, 22 nt, Human
cauacuuucuuuuucacgcaua

SEQ ID NO: 1045955 - RNA, 22 nt, Human
auuuagccucauuuuugacaua

SEQ ID NO: 1045956 - RNA, 22 nt, Human
ccuuuaauuuacaauguuaauu

SEQ ID NO: 1045957 - RNA, 22 nt, Human
gcauggcugguguccugaggga

SEQ ID NO: 1045958 - RNA, 22 nt, Human
auuuaucucuggaaacuaagca

SEQ ID NO: 1045959 - RNA, 22 nt, Human
uuuuaguuuggauuucuaaagc

SEQ ID NO: 1045960 - RNA, 22 nt, Human
caggcagccugagggaucuggg

SEQ ID NO: 1045961 - RNA, 22 nt, Human
ccugcccacugcccggucagcc

SEQ ID NO: 1045962 - RNA, 22 nt, Human
ucacagaagagauauugacaga

SEQ ID NO: 1045963 - RNA, 22 nt, Human
uuacagaaaggaaggacugacu

SEQ ID NO: 1045964 - RNA, 22 nt, Human
cuaaaauuaucaagauaauucc

SEQ ID NO: 1045965 - RNA, 22 nt, Human
gucacagaguuauuaauugugu

SEQ ID NO: 1045966 - RNA, 22 nt, Human
caaauuccucagaaucagaaaa

SEQ ID NO: 1045967 - RNA, 21 nt, Human
caagccagaccaauagcagcc

SEQ ID NO: 1045968 - RNA, 19 nt, Human
ucagggaaguucaaagcuc

SEQ ID NO: 1045969 - RNA, 22 nt, Human
ucuuuaauucagcaugaugcgg

SEQ ID NO: 1045970 - RNA, 20 nt, Human
uggagggauuguuggcaaau

SEQ ID NO: 1045971 - RNA, 22 nt, Human
auuccaaaaggauguuagaaug

SEQ ID NO: 1045972 - RNA, 22 nt, Human
agggaaguccaugggggcggug

SEQ ID NO: 1045973 - RNA, 22 nt, Human
agggaagaaucacugggauguu

SEQ ID NO: 1045974 - RNA, 22 nt, Human
gauagaaagguguugaaaucca

SEQ ID NO: 1045975 - RNA, 20 nt, Human
uuacagaaaugauguuauuu

SEQ ID NO: 1045976 - RNA, 22 nt, Human
caguccuuggcaaguucucagu

SEQ ID NO: 1045977 - RNA, 22 nt, Human
uaagaaucugcauuuuaacaag

SEQ ID NO: 1045978 - RNA, 18 nt, Human
ucagggaaucuuggccuu

SEQ ID NO: 1045979 - RNA, 21 nt, Human
uccagaaaagaggucauuagc

SEQ ID NO: 1045980 - RNA, 22 nt, Human
aaaucagugcucauuugaaagg

SEQ ID NO: 1045981 - RNA, 22 nt, Human
gggcugcuuuuuucuuagcaga

SEQ ID NO: 1045982 - RNA, 22 nt, Human
caauuucaagauucuguucuuu

SEQ ID NO: 1045983 - RNA, 22 nt, Human
auaucagacagaaagcauugac

SEQ ID NO: 1045984 - RNA, 22 nt, Human
aggcaggggagcuggaagggua

SEQ ID NO: 1045985 - RNA, 22 nt, Human
uuuacagagaauguacauaaag

SEQ ID NO: 1045986 - RNA, 22 nt, Human
agggcugcuuaccuggaauggc

SEQ ID NO: 1045987 - RNA, 22 nt, Human
gcuucaagcuguucagaacuau

SEQ ID NO: 1045988 - RNA, 22 nt, Human
uuuccaaaggaggaaccaguuu

SEQ ID NO: 1045989 - RNA, 22 nt, Human
uuagaaaugcacccaagaccua

SEQ ID NO: 1045990 - RNA, 22 nt, Human
aguacaaugucugacacaguag

SEQ ID NO: 1045991 - RNA, 18 nt, Human
uaaauauauuucccccuu

SEQ ID NO: 1045992 - RNA, 19 nt, Human
aucugagauuauaaacaga

SEQ ID NO: 1045993 - RNA, 23 nt, Human
augguuuaugucacacuuuugau

SEQ ID NO: 1045994 - RNA, 22 nt, Human
uaaacauguugacaucuuaccu

SEQ ID NO: 1045995 - RNA, 21 nt, Human
gggagggauggaaaugauguu

SEQ ID NO: 1045996 - RNA, 22 nt, Human
aggggagaauuucaacucaggu

SEQ ID NO: 1045997 - RNA, 22 nt, Human
guucuaauauuuuaaaagccaa

SEQ ID NO: 1045998 - RNA, 22 nt, Human
cagaucuguuugccagaucagc

SEQ ID NO: 1045999 - RNA, 20 nt, Human
uuccuuaggcauuggaagaa

SEQ ID NO: 1046000 - RNA, 18 nt, Human
cagccucugauugguugc

SEQ ID NO: 1046001 - RNA, 22 nt, Human
gcccuggccuccuggaacaggc

SEQ ID NO: 1046002 - RNA, 22 nt, Human
gaauuacaugacccugaguaga

SEQ ID NO: 1046003 - RNA, 22 nt, Human
uuccagggcuagguaaugggua

SEQ ID NO: 1046004 - RNA, 22 nt, Human
aggagggaauaagaaagaguca

SEQ ID NO: 1046005 - RNA, 22 nt, Human
aauuucaaugcacucaugguug

SEQ ID NO: 1046006 - RNA, 22 nt, Human
aaaagccaugcauaccuaagag

SEQ ID NO: 1046007 - RNA, 22 nt, Human
gaagaaucaagcaguaauuugu

SEQ ID NO: 1046008 - RNA, 19 nt, Human
agauuuaccucauauaguu

SEQ ID NO: 1046009 - RNA, 22 nt, Human
uggaauaaagugcuuugaucag

SEQ ID NO: 1046010 - RNA, 22 nt, Human
cccagggaagccauuucugacu

SEQ ID NO: 1046011 - RNA, 22 nt, Human
uggcuuuaggagcuauauaccu

SEQ ID NO: 1046012 - RNA, 18 nt, Human
caauuucaauggucugaa

SEQ ID NO: 1046013 - RNA, 22 nt, Human
gggagacacgcugcaggcauaa

SEQ ID NO: 1046014 - RNA, 22 nt, Human
ugucaccacuggcugaaacacc

SEQ ID NO: 1046015 - RNA, 22 nt, Human
acaaagaucuugcuuuccuacu

SEQ ID NO: 1046016 - RNA, 22 nt, Human
aaguccuugaagaaacaguucu

SEQ ID NO: 1046017 - RNA, 22 nt, Human
uuuaggcagcacgggcagcccu

SEQ ID NO: 1046018 - RNA, 22 nt, Human
gcugcccugugguccagcaggu

SEQ ID NO: 1046019 - RNA, 22 nt, Human
ucaguaaaguucuuucuugcug

SEQ ID NO: 1046020 - RNA, 22 nt, Human
agacagcauuucccggaaccgc

SEQ ID NO: 1046021 - RNA, 22 nt, Human
uuccuuaguguuagauucugug

SEQ ID NO: 1046022 - RNA, 22 nt, Human
agaaagcaucuccauuguaggu

SEQ ID NO: 1046023 - RNA, 22 nt, Human
uggauuuaauggaugaggggca

SEQ ID NO: 1046024 - RNA, 22 nt, Human
ugguuuaaccugucucuuauua

SEQ ID NO: 1046025 - RNA, 19 nt, Human
ucuccagcuuugggcuuuu

SEQ ID NO: 1046026 - RNA, 22 nt, Human
agaggaggcucugggaucgucc

SEQ ID NO: 1046027 - RNA, 22 nt, Human
gcagccucagggcacucagaug

SEQ ID NO: 1046028 - RNA, 22 nt, Human
acaacuuugacccuuguucuua

SEQ ID NO: 1046029 - RNA, 22 nt, Human
uuuucuuaggugcuccaaguag

SEQ ID NO: 1046030 - RNA, 23 nt, Human
agaauuccaguuucuuaugucac

SEQ ID NO: 1046031 - RNA, 18 nt, Human
agaugaaagcaaaugaca

SEQ ID NO: 1046032 - RNA, 22 nt, Human
uauuccaacugucauagucaua

SEQ ID NO: 1046033 - RNA, 22 nt, Human
auucaacggguagaagggucuu

SEQ ID NO: 1046034 - RNA, 17 nt, Human
agagggaaaaugcgguu

SEQ ID NO: 1046035 - RNA, 21 nt, Human
agagagggagaugaaacaucc

SEQ ID NO: 1046036 - RNA, 22 nt, Human
aaguccuuuccaguccugugau

SEQ ID NO: 1046037 - RNA, 22 nt, Human
ucuaaacacuaagucuugaugc

SEQ ID NO: 1046038 - RNA, 22 nt, Human
uuucuaguaaucaauauaaagu

SEQ ID NO: 1046039 - RNA, 22 nt, Human
uaauuuacuugcaaauaacaau

SEQ ID NO: 1046040 - RNA, 22 nt, Human
cauuuaguuauacuaaaacauu

SEQ ID NO: 1046041 - RNA, 21 nt, Human
ugcccaggggccaaccgcugc

SEQ ID NO: 1046042 - RNA, 22 nt, Human
caguaaauuugagggaucuaau

SEQ ID NO: 1046043 - RNA, 22 nt, Human
acaaaauuuuuagacaaggcuu

SEQ ID NO: 1046044 - RNA, 19 nt, Human
uauuucaaagugccgucua

SEQ ID NO: 1046045 - RNA, 22 nt, Human
acagggaaguucugcaacagga

SEQ ID NO: 1046046 - RNA, 23 nt, Human
ccagggaaggccaucuucaacug

SEQ ID NO: 1046047 - RNA, 22 nt, Human
ucucuuccuagugaugggcuuu

SEQ ID NO: 1046048 - RNA, 22 nt, Human
uggcugcccccucccguggaca

SEQ ID NO: 1046049 - RNA, 22 nt, Human
ucccaagcccuggaugccucag

SEQ ID NO: 1046050 - RNA, 22 nt, Human
uucuuucacucaagaaggaucu

SEQ ID NO: 1046051 - RNA, 22 nt, Human
acagggaaggacaugacuuggc

SEQ ID NO: 1046052 - RNA, 22 nt, Human
uuuauuauguacaggcacuaua

SEQ ID NO: 1046053 - RNA, 22 nt, Human
gacuugggggcuuuggauaggc

SEQ ID NO: 1046054 - RNA, 22 nt, Human
gggagagaagggcauguacacu

SEQ ID NO: 1046055 - RNA, 22 nt, Human
ccauuucacucuuccugaagga

SEQ ID NO: 1046056 - RNA, 22 nt, Human
cauagaaaguauuauggaauuu

SEQ ID NO: 1046057 - RNA, 22 nt, Human
acagaguucccacuccagaagc

SEQ ID NO: 1046058 - RNA, 22 nt, Human
auaaaugccucagaaucauccc

SEQ ID NO: 1046059 - RNA, 22 nt, Human
uaucagaaaucaacacacagug

SEQ ID NO: 1046060 - RNA, 22 nt, Human
uccaaaguguugggauuauagg

SEQ ID NO: 1046061 - RNA, 22 nt, Human
auuugugcauaucccauccacc

SEQ ID NO: 1046062 - RNA, 22 nt, Human
gcaacuuucaagcaccaugggg

SEQ ID NO: 1046063 - RNA, 22 nt, Human
gaagaauccuguccucuuuagg

SEQ ID NO: 1046064 - RNA, 22 nt, Human
aaagcagccgguucccuggucu

SEQ ID NO: 1046065 - RNA, 22 nt, Human
uuuccaaaaguuuguucugugc

SEQ ID NO: 1046066 - RNA, 22 nt, Human
ggcagugagcuggagggaagga

SEQ ID NO: 1046067 - RNA, 22 nt, Human
gcagggaaguuugaucuuuuuc

SEQ ID NO: 1046068 - RNA, 17 nt, Human
gcccgugggcuacggua

SEQ ID NO: 1046069 - RNA, 22 nt, Human
augggaagguuuugagagcggg

SEQ ID NO: 1046070 - RNA, 22 nt, Human
uaccagccucuguugggggugg

SEQ ID NO: 1046071 - RNA, 22 nt, Human
aucuucccaggcuggggagagg

SEQ ID NO: 1046072 - RNA, 22 nt, Human
uauuccaaaauaguuaagcacu

SEQ ID NO: 1046073 - RNA, 22 nt, Human
ucccagccaggcucuaccacuu

SEQ ID NO: 1046074 - RNA, 21 nt, Human
uuguucuuccagaagcaaagu

SEQ ID NO: 1046075 - RNA, 17 nt, Human
cgggcauggagggcagg

SEQ ID NO: 1046076 - RNA, 22 nt, Human
uagaugcuacaauuuuguacuc

SEQ ID NO: 1046077 - RNA, 22 nt, Human
gacaguccuugcccaguaucua

SEQ ID NO: 1046078 - RNA, 20 nt, Human
aggagggaccuggauuggcg

SEQ ID NO: 1046079 - RNA, 22 nt, Human
caccagcccccucacgcuguca

SEQ ID NO: 1046080 - RNA, 22 nt, Human
ccauggcucuuaccuuguuaua

SEQ ID NO: 1046081 - RNA, 22 nt, Human
aaauuccagaaacucaguauau

SEQ ID NO: 1046082 - RNA, 22 nt, Human
aauggcuucugaagcacacuuu

SEQ ID NO: 1046083 - RNA, 22 nt, Human
auagaaauguauuuuggacuag

SEQ ID NO: 1046084 - RNA, 22 nt, Human
caauuucagguggauagguuuu

SEQ ID NO: 1046085 - RNA, 22 nt, Human
uccuccagcuucucuuuugggg

SEQ ID NO: 1046086 - RNA, 22 nt, Human
ucccagggacuggaugaugcag

SEQ ID NO: 1046087 - RNA, 22 nt, Human
ccagagaggggaagggcuugcc

SEQ ID NO: 1046088 - RNA, 22 nt, Human
aaacauguuuucugaauauuuu

SEQ ID NO: 1046089 - RNA, 22 nt, Human
aacaggggcugguugaaagagc

SEQ ID NO: 1046090 - RNA, 22 nt, Human
augcuuaaccuugguguacaau

SEQ ID NO: 1046091 - RNA, 22 nt, Human
agcaguggcuggauggugugcu

SEQ ID NO: 1046092 - RNA, 17 nt, Human
ccugcccagagacagau

SEQ ID NO: 1046093 - RNA, 22 nt, Human
gcuuuuauugucuuuacgacga

SEQ ID NO: 1046094 - RNA, 22 nt, Human
ucccaagcuuagggcucucagu

SEQ ID NO: 1046095 - RNA, 21 nt, Human
auuuccaaauaaggucacauu

SEQ ID NO: 1046096 - RNA, 22 nt, Human
aauugcaauuuucuuaaggucu

SEQ ID NO: 1046097 - RNA, 22 nt, Human
gggagacaaaggugagguucuu

SEQ ID NO: 1046098 - RNA, 22 nt, Human
ggcaccagccaccuauuucuag

SEQ ID NO: 1046099 - RNA, 22 nt, Human
uguaacaaaauaccuuggauug

SEQ ID NO: 1046100 - RNA, 22 nt, Human
uucacagaauggcaaguuaugg

SEQ ID NO: 1046101 - RNA, 22 nt, Human
uacuuguagcagguggcauuua

SEQ ID NO: 1046102 - RNA, 22 nt, Human
aagcaagacagaaguuacugcc

SEQ ID NO: 1046103 - RNA, 22 nt, Human
gagggauggugugagaggcuca

SEQ ID NO: 1046104 - RNA, 22 nt, Human
ucagccucagguguucagauuu

SEQ ID NO: 1046105 - RNA, 20 nt, Human
gauuucaaagcagaguggcc

SEQ ID NO: 1046106 - RNA, 22 nt, Human
ggggagaccaucugaaggugau

SEQ ID NO: 1046107 - RNA, 22 nt, Human
cauuugugugggaacccaucag

SEQ ID NO: 1046108 - RNA, 22 nt, Human
uggcauuucuggccauuugugu

SEQ ID NO: 1046109 - RNA, 22 nt, Human
ucuggaucccaccgccacacac

SEQ ID NO: 1046110 - RNA, 22 nt, Human
ugaaaagacugcaagagagcau

SEQ ID NO: 1046111 - RNA, 22 nt, Human
caggcagcugcgacaagagagc

SEQ ID NO: 1046112 - RNA, 22 nt, Human
aguauaauuagauaucaaaagu

SEQ ID NO: 1046113 - RNA, 22 nt, Human
gaggaggguuggccuuagguag

SEQ ID NO: 1046114 - RNA, 22 nt, Human
ugggagacacuggugggagcuu

SEQ ID NO: 1046115 - RNA, 22 nt, Human
gagggcuggggcuuaggcuuag

SEQ ID NO: 1046116 - RNA, 22 nt, Human
cugaauaauauuccauuaugag

SEQ ID NO: 1046117 - RNA, 22 nt, Human
uccagggcagugacuacagcgg

SEQ ID NO: 1046118 - RNA, 22 nt, Human
agccaugggcucccaguccuuu

SEQ ID NO: 1046119 - RNA, 22 nt, Human
gccagucugcucccacaaguuc

SEQ ID NO: 1046120 - RNA, 22 nt, Human
auuaaagacagcagauggaugg

SEQ ID NO: 1046121 - RNA, 22 nt, Human
guaaauuauuucaagaucaucu

SEQ ID NO: 1046122 - RNA, 22 nt, Human
ucuccagggcagagaauagcaa

SEQ ID NO: 1046123 - RNA, 21 nt, Human
uguccuuaaugcaauguccuu

SEQ ID NO: 1046124 - RNA, 23 nt, Human
accaguccauuccccucaugauu

SEQ ID NO: 1046125 - RNA, 22 nt, Human
ccagggaagaauaggugugguu

SEQ ID NO: 1046126 - RNA, 22 nt, Human
caauuucagucucagagaguuc

SEQ ID NO: 1046127 - RNA, 22 nt, Human
uauaaaauucucaguuuggggu

SEQ ID NO: 1046128 - RNA, 22 nt, Human
auuaggcauucugaaugagguc

SEQ ID NO: 1046129 - RNA, 22 nt, Human
gccuccaggguagaggaggaag

SEQ ID NO: 1046130 - RNA, 22 nt, Human
cuuaggcaguuuaggaaagaga

SEQ ID NO: 1046131 - RNA, 22 nt, Human
ggcugccuacuuucccagaguu

SEQ ID NO: 1046132 - RNA, 22 nt, Human
gcagaauugauggagaacuuaa

SEQ ID NO: 1046133 - RNA, 17 nt, Human
aggggagagugggaaga

SEQ ID NO: 1046134 - RNA, 22 nt, Human
aaucagaaaauucaguggaauu

SEQ ID NO: 1046135 - RNA, 18 nt, Human
ucagggaagagaauauga

SEQ ID NO: 1046136 - RNA, 22 nt, Human
uacauauacugagugauuugcu

SEQ ID NO: 1046137 - RNA, 22 nt, Human
uagaauucauguuacuguuagc

SEQ ID NO: 1046138 - RNA, 22 nt, Human
uaauuucaaguuuagggcucua

SEQ ID NO: 1046139 - RNA, 22 nt, Human
auuccaaacuuaccccagagga

SEQ ID NO: 1046140 - RNA, 22 nt, Human
aucagaaaguucaucauguuug

SEQ ID NO: 1046141 - RNA, 22 nt, Human
uaccuugggguuuuguugcucu

SEQ ID NO: 1046142 - RNA, 22 nt, Human
gacagccaacuggggagggcau

SEQ ID NO: 1046143 - RNA, 22 nt, Human
uagcagaagaacaacaugaucu

SEQ ID NO: 1046144 - RNA, 22 nt, Human
gugcauuugacgaauacucacu

SEQ ID NO: 1046145 - RNA, 22 nt, Human
cuggaucaugggaaagggauca

SEQ ID NO: 1046146 - RNA, 22 nt, Human
ugaucccaaucuuuccugcucc

SEQ ID NO: 1046147 - RNA, 22 nt, Human
ucuuuacaucacaauuguaugg

SEQ ID NO: 1046148 - RNA, 22 nt, Human
auauaugcauguguacuuaugu

SEQ ID NO: 1046149 - RNA, 21 nt, Human
cccagggaagccgcagucacc

SEQ ID NO: 1046150 - RNA, 22 nt, Human
cacaauuuggugcuaaagaaag

SEQ ID NO: 1046151 - RNA, 22 nt, Human
uuauuuauggcccucaccugau

SEQ ID NO: 1046152 - RNA, 18 nt, Human
caauuucauccuuaagcc

SEQ ID NO: 1046153 - RNA, 22 nt, Human
uuuacagaauguugaauuuggg

SEQ ID NO: 1046154 - RNA, 22 nt, Human
ucccagggacucucugccuucc

SEQ ID NO: 1046155 - RNA, 22 nt, Human
caaaggcaggcccccugugcag

SEQ ID NO: 1046156 - RNA, 22 nt, Human
auuaggcauauaugcuuuuaau

SEQ ID NO: 1046157 - RNA, 22 nt, Human
aaggcuaugaucuuuuucauga

SEQ ID NO: 1046158 - RNA, 22 nt, Human
gcagggaagacccggagcagcg

SEQ ID NO: 1046159 - RNA, 22 nt, Human
agaagggagagaaaguugguua

SEQ ID NO: 1046160 - RNA, 19 nt, Human
uacuaaacaugcauauugg

SEQ ID NO: 1046161 - RNA, 22 nt, Human
uucacauaaugauacaaagcuu

SEQ ID NO: 1046162 - RNA, 22 nt, Human
uccuccagugguacuggccaau

SEQ ID NO: 1046163 - RNA, 22 nt, Human
uuccaaaguuaguuauuagaaa

SEQ ID NO: 1046164 - RNA, 22 nt, Human
ucuaaacagccucuuaccaacu

SEQ ID NO: 1046165 - RNA, 19 nt, Human
accaggcuuauggucagug

SEQ ID NO: 1046166 - RNA, 22 nt, Human
uuccugggacuggagcagccca

SEQ ID NO: 1046167 - RNA, 22 nt, Human
aaacuuuguucgucugaugugg

SEQ ID NO: 1046168 - RNA, 22 nt, Human
cuuagaaaugcagauucucagg

SEQ ID NO: 1046169 - RNA, 22 nt, Human
ugggcugcacccucagccucug

SEQ ID NO: 1046170 - RNA, 22 nt, Human
aucuaucccaguuuaacucauu

SEQ ID NO: 1046171 - RNA, 22 nt, Human
aucagaaaucuaggauucagaa

SEQ ID NO: 1046172 - RNA, 22 nt, Human
uuauuauugugguugcauuauc

SEQ ID NO: 1046173 - RNA, 22 nt, Human
uagaauaaguugaugauauaug

SEQ ID NO: 1046174 - RNA, 22 nt, Human
ggggaagaauggcagaaaacau

SEQ ID NO: 1046175 - RNA, 22 nt, Human
cucuccaggagcucagagucua

SEQ ID NO: 1046176 - RNA, 22 nt, Human
ucagggaaaagucacacugggu

SEQ ID NO: 1046177 - RNA, 22 nt, Human
acaagccaauuacugugccagg

SEQ ID NO: 1046178 - RNA, 22 nt, Human
ugcagggcccucauuccugucc

SEQ ID NO: 1046179 - RNA, 22 nt, Human
aauuaaauugguuuagagagga

SEQ ID NO: 1046180 - RNA, 22 nt, Human
augaaaauacugugguugauag

SEQ ID NO: 1046181 - RNA, 22 nt, Human
cucuccagccacagaagcugcu

SEQ ID NO: 1046182 - RNA, 22 nt, Human
ugcccaggcuggaaugcagugg

SEQ ID NO: 1046183 - RNA, 22 nt, Human
auggauuuggaugagauuacuu

SEQ ID NO: 1046184 - RNA, 22 nt, Human
gcuuuaaugaagucacgcaaag

SEQ ID NO: 1046185 - RNA, 22 nt, Human
uguauacaauucacacuuccca

SEQ ID NO: 1046186 - RNA, 22 nt, Human
ucuccagguagauaugucagga

SEQ ID NO: 1046187 - RNA, 22 nt, Human
caucagaaagaguccuggacuu

SEQ ID NO: 1046188 - RNA, 22 nt, Human
acaugcuucauauuauaaccaa

SEQ ID NO: 1046189 - RNA, 22 nt, Human
aaaacugaaauacgauccaaug

SEQ ID NO: 1046190 - RNA, 22 nt, Human
uaauaaacugcuacgcuuaguu

SEQ ID NO: 1046191 - RNA, 22 nt, Human
gaaaaaggauaaauacaguguu

SEQ ID NO: 1046192 - RNA, 22 nt, Human
aaugaacagauacacauaggca

SEQ ID NO: 1046193 - RNA, 22 nt, Human
guuuaauaauguugaauuacua

SEQ ID NO: 1046194 - RNA, 22 nt, Human
cagccucucuguaucucaggau

SEQ ID NO: 1046195 - RNA, 22 nt, Human
gguacaaugucuuacagaccca

SEQ ID NO: 1046196 - RNA, 22 nt, Human
ugggaagggccgauggagccuc

SEQ ID NO: 1046197 - RNA, 23 nt, Human
uuuaacuuuccaauaauucauug

SEQ ID NO: 1046198 - RNA, 22 nt, Human
uggauuuauuagguuggugaaa

SEQ ID NO: 1046199 - RNA, 22 nt, Human
auggcuuuccugggacaugggc

SEQ ID NO: 1046200 - RNA, 22 nt, Human
aauuucaauuacuuuugcacca

SEQ ID NO: 1046201 - RNA, 19 nt, Human
ugcugaaguugucagucug

SEQ ID NO: 1046202 - RNA, 22 nt, Human
gcaaggagacuguagggccaag

SEQ ID NO: 1046203 - RNA, 22 nt, Human
aucuaaaaggagcucuuuaucu

SEQ ID NO: 1046204 - RNA, 22 nt, Human
cuuucacagcugugcuuaugau

SEQ ID NO: 1046205 - RNA, 22 nt, Human
ugaauaauuccuuuuugucaag

SEQ ID NO: 1046206 - RNA, 22 nt, Human
cuggcuuuaacccuacaaaccu

SEQ ID NO: 1046207 - RNA, 22 nt, Human
uuccauaauaggcuuaagugaa

SEQ ID NO: 1046208 - RNA, 22 nt, Human
aaacaugaauagauauuaaaca

SEQ ID NO: 1046209 - RNA, 22 nt, Human
aauuuacacuucauuuggaggg

SEQ ID NO: 1046210 - RNA, 22 nt, Human
ccaggcaggcgauggugcagug

SEQ ID NO: 1046211 - RNA, 22 nt, Human
caaauucaaugaacauguuuaa

SEQ ID NO: 1046212 - RNA, 22 nt, Human
uuauuauuccccaagucauuau

SEQ ID NO: 1046213 - RNA, 22 nt, Human
uguccuuagggauauaaaauau

SEQ ID NO: 1046214 - RNA, 22 nt, Human
ccaucuccaguuuauucuuccu

SEQ ID NO: 1046215 - RNA, 22 nt, Human
cagcccugcagagggcgcuccu

SEQ ID NO: 1046216 - RNA, 17 nt, Human
ugggccaguagaaggga

SEQ ID NO: 1046217 - RNA, 22 nt, Human
uuccacggggcuccccgcucuu

SEQ ID NO: 1046218 - RNA, 22 nt, Human
aaagaaucagaagucucaaaca

SEQ ID NO: 1046219 - RNA, 22 nt, Human
gcugccucccagagcccugcag

SEQ ID NO: 1046220 - RNA, 22 nt, Human
caucagaagaaagacaaaugau

SEQ ID NO: 1046221 - RNA, 22 nt, Human
guacaauagucccuguuuggau

SEQ ID NO: 1046222 - RNA, 22 nt, Human
aggagggagaugcccauccugg

SEQ ID NO: 1046223 - RNA, 22 nt, Human
aggggagaaaaaugccuucugu

SEQ ID NO: 1046224 - RNA, 22 nt, Human
gcauaauauacaugcuugaucc

SEQ ID NO: 1046225 - RNA, 22 nt, Human
auaaacucaugccaagaaauga

SEQ ID NO: 1046226 - RNA, 22 nt, Human
uacugaaauacuaagaaguuaa

SEQ ID NO: 1046227 - RNA, 19 nt, Human
ccagucccauacaggagau

SEQ ID NO: 1046228 - RNA, 22 nt, Human
aguaaaauuucugcugaggaga

SEQ ID NO: 1046229 - RNA, 22 nt, Human
caacauuugaguaaagaaaugg

SEQ ID NO: 1046230 - RNA, 22 nt, Human
ucccugggcuucuccagacuug

SEQ ID NO: 1046231 - RNA, 22 nt, Human
uucagaaaaagaccauugcaau

SEQ ID NO: 1046232 - RNA, 22 nt, Human
ugggcugcuucucaaaugucuc

SEQ ID NO: 1046233 - RNA, 22 nt, Human
ucagggaagagagaucuccuag

SEQ ID NO: 1046234 - RNA, 23 nt, Human
auauggcuguuguguguuaacau

SEQ ID NO: 1046235 - RNA, 22 nt, Human
cauggggaugaggcugagacuu

SEQ ID NO: 1046236 - RNA, 22 nt, Human
auauccaagaaacaauuaauuc

SEQ ID NO: 1046237 - RNA, 22 nt, Human
uggcuuuacaucaaauugagua

SEQ ID NO: 1046238 - RNA, 22 nt, Human
uagauuuaagacccugaauuug

SEQ ID NO: 1046239 - RNA, 22 nt, Human
uugaauaauaugcuucguucuc

SEQ ID NO: 1046240 - RNA, 22 nt, Human
agaucugaccuaaccccaccac

SEQ ID NO: 1046241 - RNA, 22 nt, Human
gccagggagucugggccacaga

SEQ ID NO: 1046242 - RNA, 22 nt, Human
cuacagaaucuaccucaagcca

SEQ ID NO: 1046243 - RNA, 22 nt, Human
gugaauaaagggaguuuucaaa

SEQ ID NO: 1046244 - RNA, 21 nt, Human
aaagcagcccauggcacaguc

SEQ ID NO: 1046245 - RNA, 22 nt, Human
uuuaggcauacuuuugggagaa

SEQ ID NO: 1046246 - RNA, 22 nt, Human
uaaguaaauuuauaaugugauu

SEQ ID NO: 1046247 - RNA, 23 nt, Human
ggagaggggugugggcaucuuua

SEQ ID NO: 1046248 - RNA, 22 nt, Human
auggcauuauagcaaugguuug

SEQ ID NO: 1046249 - RNA, 22 nt, Human
ccauggcuuucuuucauuguaa

SEQ ID NO: 1046250 - RNA, 22 nt, Human
ucagccaguuuguuuauuccgg

SEQ ID NO: 1046251 - RNA, 22 nt, Human
ucauaaaaauagacucuaaagu

SEQ ID NO: 1046252 - RNA, 22 nt, Human
cuagaaauucugauucaguagg

SEQ ID NO: 1046253 - RNA, 22 nt, Human
ugagacaguuuuucuauuucca

SEQ ID NO: 1046254 - RNA, 22 nt, Human
gccuuaauuuuuuauaaucucu

SEQ ID NO: 1046255 - RNA, 22 nt, Human
auuuccaagaaagcuuuaggau

SEQ ID NO: 1046256 - RNA, 18 nt, Human
ucauagaagugaaucaga

SEQ ID NO: 1046257 - RNA, 22 nt, Human
gggagacaaggagaaccaaaga

SEQ ID NO: 1046258 - RNA, 19 nt, Human
gaaguccucuaguaaauuu

SEQ ID NO: 1046259 - RNA, 22 nt, Human
uuucaacguguaaucuuauuua

SEQ ID NO: 1046260 - RNA, 22 nt, Human
uucucuuagcuguaaagucaau

SEQ ID NO: 1046261 - RNA, 22 nt, Human
caucagaacgugagcuccuugu

SEQ ID NO: 1046262 - RNA, 22 nt, Human
ggcagccccaucagagacgcug

SEQ ID NO: 1046263 - RNA, 19 nt, Human
cauguuaugcuguaguauc

SEQ ID NO: 1046264 - RNA, 22 nt, Human
agggagacaaaagcagcugcca

SEQ ID NO: 1046265 - RNA, 22 nt, Human
uggcccaggaggccagagggca

SEQ ID NO: 1046266 - RNA, 22 nt, Human
uggagaggagcaccauggccau

SEQ ID NO: 1046267 - RNA, 20 nt, Human
ggggcugcaugcagagaaga

SEQ ID NO: 1046268 - RNA, 21 nt, Human
auacagaacauugauccaaga

SEQ ID NO: 1046269 - RNA, 22 nt, Human
aggcagcaugcucugcuucuac

SEQ ID NO: 1046270 - RNA, 22 nt, Human
uuuaauauucugcauucuccuu

SEQ ID NO: 1046271 - RNA, 22 nt, Human
cagcccugagagaaccaucuau

SEQ ID NO: 1046272 - RNA, 22 nt, Human
cuagaaauacaggcacgugcca

SEQ ID NO: 1046273 - RNA, 22 nt, Human
caucagaauguuauggggggcu

SEQ ID NO: 1046274 - RNA, 22 nt, Human
guccagggccccgagcaccagg

SEQ ID NO: 1046275 - RNA, 22 nt, Human
uuccuuaggggacagggggaua

SEQ ID NO: 1046276 - RNA, 22 nt, Human
auggguuucccucugaaauuau

SEQ ID NO: 1046277 - RNA, 22 nt, Human
gcccaggaguucaaggcugcag

SEQ ID NO: 1046278 - RNA, 22 nt, Human
gaauuucagggucugguaggaa

SEQ ID NO: 1046279 - RNA, 22 nt, Human
aaucagaaauugagggucuggu

SEQ ID NO: 1046280 - RNA, 22 nt, Human
cggggcuguagcacagcugagc

SEQ ID NO: 1046281 - RNA, 19 nt, Human
uggagaggaaaugcugcuc

SEQ ID NO: 1046282 - RNA, 22 nt, Human
cccgggaacauaaagcagugag

SEQ ID NO: 1046283 - RNA, 22 nt, Human
uguacaauguggccaguguuaa

SEQ ID NO: 1046284 - RNA, 22 nt, Human
caagaauccuguucuugaagau

SEQ ID NO: 1046285 - RNA, 22 nt, Human
uaguccuugcugggcacagagu

SEQ ID NO: 1046286 - RNA, 22 nt, Human
ggacauggagcauguagagaaa

SEQ ID NO: 1046287 - RNA, 22 nt, Human
uaagagaacuggauagauagga

SEQ ID NO: 1046288 - RNA, 22 nt, Human
ccugcccagggucaccacagag

SEQ ID NO: 1046289 - RNA, 22 nt, Human
uggcccagcaguucugccccag

SEQ ID NO: 1046290 - RNA, 22 nt, Human
gagggagagugauggaccauug

SEQ ID NO: 1046291 - RNA, 22 nt, Human
auacagaagaacuauagccacu

SEQ ID NO: 1046292 - RNA, 22 nt, Human
agggcuccgggccaccggccug

SEQ ID NO: 1046293 - RNA, 22 nt, Human
auccaggguguggagagagcuc

SEQ ID NO: 1046294 - RNA, 22 nt, Human
gcuccagcucguggcucccagc

SEQ ID NO: 1046295 - RNA, 22 nt, Human
ccuggaucccgauggcugugag

SEQ ID NO: 1046296 - RNA, 22 nt, Human
ugggcugcacuccauuuucugc

SEQ ID NO: 1046297 - RNA, 22 nt, Human
ucagccucauuuucugcucugu

SEQ ID NO: 1046298 - RNA, 22 nt, Human
agccaggggauucaucagggac

SEQ ID NO: 1046299 - RNA, 22 nt, Human
cauuucaaacaguuacagcugc

SEQ ID NO: 1046300 - RNA, 22 nt, Human
cucuacucuuaacacagcuagg

SEQ ID NO: 1046301 - RNA, 22 nt, Human
cuggcuuucauuucaagcacgu

SEQ ID NO: 1046302 - RNA, 22 nt, Human
agggaagaggaccagagucucu

SEQ ID NO: 1046303 - RNA, 22 nt, Human
ucagccaguuugauucuauuug

SEQ ID NO: 1046304 - RNA, 22 nt, Human
uccuccagugucuggggccuug

SEQ ID NO: 1046305 - RNA, 22 nt, Human
ccagaggacuugggggcugaau

SEQ ID NO: 1046306 - RNA, 22 nt, Human
uuccuuagaguuuccagaaagc

SEQ ID NO: 1046307 - RNA, 22 nt, Human
uguauacauuuaacuagauaga

SEQ ID NO: 1046308 - RNA, 22 nt, Human
gaguaggguuuccagguuagag

SEQ ID NO: 1046309 - RNA, 22 nt, Human
auguuaaaugguuuauuauuaa

SEQ ID NO: 1046310 - RNA, 22 nt, Human
uaacagaagaugaaacuucuuu

SEQ ID NO: 1046311 - RNA, 22 nt, Human
ugcccaggcuccucgcagccuu

SEQ ID NO: 1046312 - RNA, 22 nt, Human
uguaaauaauuccuaggcuuuu

SEQ ID NO: 1046313 - RNA, 22 nt, Human
uggcuucaggagcaccuggcuu

SEQ ID NO: 1046314 - RNA, 22 nt, Human
cuuccaaacccaggguaugggc

SEQ ID NO: 1046315 - RNA, 22 nt, Human
ccaccacugaggcacaggagcc

SEQ ID NO: 1046316 - RNA, 22 nt, Human
cuuccaaauguaaauaaguuuc

SEQ ID NO: 1046317 - RNA, 22 nt, Human
ccagccuggguguuagaagaca

SEQ ID NO: 1046318 - RNA, 22 nt, Human
uccagggauguccuguagcacu

SEQ ID NO: 1046319 - RNA, 20 nt, Human
ugugggccugugaagcggcg

SEQ ID NO: 1046320 - RNA, 22 nt, Human
ugcuuaauacguauuugcugga

SEQ ID NO: 1046321 - RNA, 22 nt, Human
gauuucaaggauguuagaggug

SEQ ID NO: 1046322 - RNA, 22 nt, Human
gcugcccaggcaacauugacuu

SEQ ID NO: 1046323 - RNA, 22 nt, Human
ccagggaaggacucucuuuccc

SEQ ID NO: 1046324 - RNA, 22 nt, Human
uuccaggguuaauuuauauggu

SEQ ID NO: 1046325 - RNA, 22 nt, Human
gagauuuagagagacuuaaaca

SEQ ID NO: 1046326 - RNA, 22 nt, Human
ggagagacccuggagaaggucc

SEQ ID NO: 1046327 - RNA, 22 nt, Human
ccaugggagaugauggggagug

SEQ ID NO: 1046328 - RNA, 22 nt, Human
acuauacagaagaggauaggaa

SEQ ID NO: 1046329 - RNA, 22 nt, Human
uucagaaacccauugggucucu

SEQ ID NO: 1046330 - RNA, 22 nt, Human
uuagaaaugucacagaucugau

SEQ ID NO: 1046331 - RNA, 22 nt, Human
aaucaguguggugacuugucug

SEQ ID NO: 1046332 - RNA, 21 nt, Human
gcuauacagaauggccagagg

SEQ ID NO: 1046333 - RNA, 22 nt, Human
uugaacauuagaauaaguaauu

SEQ ID NO: 1046334 - RNA, 22 nt, Human
cagauacuguaaaauuucagua

SEQ ID NO: 1046335 - RNA, 22 nt, Human
aaguuucauuguucauguaaca

SEQ ID NO: 1046336 - RNA, 22 nt, Human
agagaugggaaggcagacuuca

SEQ ID NO: 1046337 - RNA, 22 nt, Human
ugcccaggguggagugcagcgg

SEQ ID NO: 1046338 - RNA, 22 nt, Human
uuccagggcuaauuccugugga

SEQ ID NO: 1046339 - RNA, 22 nt, Human
gcccagagugaguccugggccc

SEQ ID NO: 1046340 - RNA, 22 nt, Human
acuucacacagcaaauuuaucu

SEQ ID NO: 1046341 - RNA, 22 nt, Human
auagacauagccguaauuuauu

SEQ ID NO: 1046342 - RNA, 22 nt, Human
aguucacauaucuguuuuauuu

SEQ ID NO: 1046343 - RNA, 22 nt, Human
uaauuucaccguugcuagaaau

SEQ ID NO: 1046344 - RNA, 22 nt, Human
cucccaggcagggcugcccacu

SEQ ID NO: 1046345 - RNA, 22 nt, Human
ugggcugcagggguugagagcu

SEQ ID NO: 1046346 - RNA, 22 nt, Human
gggcugcugcugccagcgacac

SEQ ID NO: 1046347 - RNA, 22 nt, Human
ucagggaaugaugcacacaguu

SEQ ID NO: 1046348 - RNA, 22 nt, Human
auuccaaagcacaucagaacua

SEQ ID NO: 1046349 - RNA, 22 nt, Human
ucaguguauggagugcuggauu

SEQ ID NO: 1046350 - RNA, 22 nt, Human
ccagagaggccuuggcaagaca

SEQ ID NO: 1046351 - RNA, 22 nt, Human
acagaacugggggcacagauag

SEQ ID NO: 1046352 - RNA, 22 nt, Human
cccaggcacacugaagugacau

SEQ ID NO: 1046353 - RNA, 22 nt, Human
gauuuucauuugcacucuagaa

SEQ ID NO: 1046354 - RNA, 22 nt, Human
ucccagggacaccaagcuguuu

SEQ ID NO: 1046355 - RNA, 22 nt, Human
uauggcuugucuuuauaccagg

SEQ ID NO: 1046356 - RNA, 22 nt, Human
uacuuuuagccuauuugauucu

SEQ ID NO: 1046357 - RNA, 22 nt, Human
cagccuccugggacacucaccg

SEQ ID NO: 1046358 - RNA, 22 nt, Human
ucaaguuuaauugagauguuua

SEQ ID NO: 1046359 - RNA, 22 nt, Human
caugcuuuuuucuaguauaaau

SEQ ID NO: 1046360 - RNA, 22 nt, Human
uuuaaagaaauuccucaucuuu

SEQ ID NO: 1046361 - RNA, 22 nt, Human
ugacaggcacugcuguagugcu

SEQ ID NO: 1046362 - RNA, 22 nt, Human
ggcgcacaaugugcagguuugu

SEQ ID NO: 1046363 - RNA, 22 nt, Human
uuugguccugagcaaaacuaug

SEQ ID NO: 1046364 - RNA, 22 nt, Human
gguagacaauggaauguggccu

SEQ ID NO: 1046365 - RNA, 22 nt, Human
auauacaggugguauguguaaa

SEQ ID NO: 1046366 - RNA, 22 nt, Human
aauguuaauguguuugcuuaug

SEQ ID NO: 1046367 - RNA, 22 nt, Human
gcguuaauaacauuaauaaugc

SEQ ID NO: 1046368 - RNA, 22 nt, Human
uucauacucacuccaauaacug

SEQ ID NO: 1046369 - RNA, 22 nt, Human
auauuauucuaguaacagugau

SEQ ID NO: 1046370 - RNA, 22 nt, Human
acuagaaacuaauggauuauua

SEQ ID NO: 1046371 - RNA, 22 nt, Human
ccaggcuccgcauagaccccac

SEQ ID NO: 1046372 - RNA, 22 nt, Human
caguccuucauuccuccuuuga

SEQ ID NO: 1046373 - RNA, 22 nt, Human
ucaggcugaggucaucugcauc

SEQ ID NO: 1046374 - RNA, 22 nt, Human
cucacaguguaauauugaaccc

SEQ ID NO: 1046375 - RNA, 22 nt, Human
aauaauuagugggacagagaac

SEQ ID NO: 1046376 - RNA, 22 nt, Human
ccacgcucccugaucccugcuu

SEQ ID NO: 1046377 - RNA, 20 nt, Human
cuguaucagguuacaaagua

SEQ ID NO: 1046378 - RNA, 22 nt, Human
uugaauaauguguauguuguua

SEQ ID NO: 1046379 - RNA, 22 nt, Human
cccaggcaguagaaagaagagg

SEQ ID NO: 1046380 - RNA, 22 nt, Human
uauuucaacguaugaaaagcug

SEQ ID NO: 1046381 - RNA, 22 nt, Human
gcagggaggaagagaugcuucc

SEQ ID NO: 1046382 - RNA, 22 nt, Human
cauggcuuuuuagcauauucaa

SEQ ID NO: 1046383 - RNA, 22 nt, Human
auuuacugagguaaauaaacug

SEQ ID NO: 1046384 - RNA, 22 nt, Human
gcuagaucucucauaaauucca

SEQ ID NO: 1046385 - RNA, 22 nt, Human
cuggcagucugguggaaggccu

SEQ ID NO: 1046386 - RNA, 20 nt, Human
ggccacagggugcuggugga

SEQ ID NO: 1046387 - RNA, 22 nt, Human
aucacaaaggguuuucucugag

SEQ ID NO: 1046388 - RNA, 22 nt, Human
aaagcaguauauugguaguugu

SEQ ID NO: 1046389 - RNA, 22 nt, Human
ucagggaaaccuaaggaagcca

SEQ ID NO: 1046390 - RNA, 22 nt, Human
cugcccacaccugagcugggcc

SEQ ID NO: 1046391 - RNA, 22 nt, Human
uuacagaagagaaagaauucag

SEQ ID NO: 1046392 - RNA, 22 nt, Human
uaucagaaacucuggggcaggg

SEQ ID NO: 1046393 - RNA, 20 nt, Human
caaggcagaccagagugagu

SEQ ID NO: 1046394 - RNA, 18 nt, Human
gccuccaccauggagggu

SEQ ID NO: 1046395 - RNA, 22 nt, Human
uugguccacugugaaauuggga

SEQ ID NO: 1046396 - RNA, 18 nt, Human
cugcccagagcacuugug

SEQ ID NO: 1046397 - RNA, 22 nt, Human
uuuacagagagagaacuggacu

SEQ ID NO: 1046398 - RNA, 22 nt, Human
uuagaaauacaagugagguuga

SEQ ID NO: 1046399 - RNA, 19 nt, Human
gggagacagcucugggcug

SEQ ID NO: 1046400 - RNA, 22 nt, Human
caucagaaggaaggacgauuau

SEQ ID NO: 1046401 - RNA, 22 nt, Human
uuuauccaguguuggaauuuuu

SEQ ID NO: 1046402 - RNA, 22 nt, Human
cuacagaauggagggucagaga

SEQ ID NO: 1046403 - RNA, 22 nt, Human
aagacuuucaaaccuauguuug

SEQ ID NO: 1046404 - RNA, 20 nt, Human
agaaaucagaccacacacua

SEQ ID NO: 1046405 - RNA, 22 nt, Human
ucugcccauucuuagagucuag

SEQ ID NO: 1046406 - RNA, 22 nt, Human
uuuccauauuuaaucaaaauaa

SEQ ID NO: 1046407 - RNA, 22 nt, Human
agucaccauuuucaccugccuc

SEQ ID NO: 1046408 - RNA, 22 nt, Human
acagauuuuugguaaauaauuu

SEQ ID NO: 1046409 - RNA, 22 nt, Human
auagacauuuugcauucaagca

SEQ ID NO: 1046410 - RNA, 22 nt, Human
ucccuggcugguguagagggau

SEQ ID NO: 1046411 - RNA, 22 nt, Human
ggagauggccaaaaacacaaau

SEQ ID NO: 1046412 - RNA, 22 nt, Human
caucagaauuacuuggggagcu

SEQ ID NO: 1046413 - RNA, 22 nt, Human
ucagaaaagagaaaaucuuaua

SEQ ID NO: 1046414 - RNA, 22 nt, Human
aggcuucugcugauauuucauu

SEQ ID NO: 1046415 - RNA, 22 nt, Human
ugccauuuugagauguuaauga

SEQ ID NO: 1046416 - RNA, 22 nt, Human
gaagugaagagauuagaaauca

SEQ ID NO: 1046417 - RNA, 22 nt, Human
aauacauguuuucuacuauucu

SEQ ID NO: 1046418 - RNA, 22 nt, Human
ccuggaucuuucugacugacaa

SEQ ID NO: 1046419 - RNA, 22 nt, Human
auacagaauacuaauuccugag

SEQ ID NO: 1046420 - RNA, 22 nt, Human
uuacagaaugugccauuugguc

SEQ ID NO: 1046421 - RNA, 22 nt, Human
auuaaagaaacccagcauguga

SEQ ID NO: 1046422 - RNA, 19 nt, Human
agcaguggagccaugccug

SEQ ID NO: 1046423 - RNA, 22 nt, Human
ggcauuuacauaaucuuauuua

SEQ ID NO: 1046424 - RNA, 22 nt, Human
uuacagaaggaacacuacucag

SEQ ID NO: 1046425 - RNA, 22 nt, Human
uccagccuuucuacucacugag

SEQ ID NO: 1046426 - RNA, 22 nt, Human
gaauuucaaagagguuaagagg

SEQ ID NO: 1046427 - RNA, 22 nt, Human
cugaauaauuuucuguuguaug

SEQ ID NO: 1046428 - RNA, 22 nt, Human
agacugaauaacaagcaaauaa

SEQ ID NO: 1046429 - RNA, 22 nt, Human
aaggagggaaagcagugcuucu

SEQ ID NO: 1046430 - RNA, 22 nt, Human
aaauacugggcucaaaaggguu

SEQ ID NO: 1046431 - RNA, 22 nt, Human
gaucugaagagcaaugaaauau

SEQ ID NO: 1046432 - RNA, 22 nt, Human
aaucagaaucaguugacacagc

SEQ ID NO: 1046433 - RNA, 22 nt, Human
gauuuccauuuucaacuccugc

SEQ ID NO: 1046434 - RNA, 22 nt, Human
uggcauuuuguucaguauaugg

SEQ ID NO: 1046435 - RNA, 22 nt, Human
uuacagaaguuucagcguuuua

SEQ ID NO: 1046436 - RNA, 22 nt, Human
agggagagaaguuauacaagau

SEQ ID NO: 1046437 - RNA, 22 nt, Human
auuacacuuguucaucaucacc

SEQ ID NO: 1046438 - RNA, 22 nt, Human
augcugaauugaugcgagggag

SEQ ID NO: 1046439 - RNA, 22 nt, Human
aguggagacaggacagucgaua

SEQ ID NO: 1046440 - RNA, 22 nt, Human
acuuugaaacuaaaauucauua

SEQ ID NO: 1046441 - RNA, 22 nt, Human
cuacagaaaccuuuuucauaca

SEQ ID NO: 1046442 - RNA, 22 nt, Human
uaacauguuaagaaauuagaua

SEQ ID NO: 1046443 - RNA, 22 nt, Human
gcuggaucccugugggaguggu

SEQ ID NO: 1046444 - RNA, 22 nt, Human
ucagggaagacuucuuagagga

SEQ ID NO: 1046445 - RNA, 22 nt, Human
uccugcagagacagaggccuca

SEQ ID NO: 1046446 - RNA, 22 nt, Human
gcugccucaggcaccuccuggc

SEQ ID NO: 1046447 - RNA, 22 nt, Human
cugaauaauacagacuagcuuc

SEQ ID NO: 1046448 - RNA, 22 nt, Human
uaauauauuucugcuaagcuca

SEQ ID NO: 1046449 - RNA, 22 nt, Human
acaaaauuguguuaaacuuuau

SEQ ID NO: 1046450 - RNA, 22 nt, Human
uccagcuccacagccucccugu

SEQ ID NO: 1046451 - RNA, 19 nt, Human
caguggagauuggaggagg

SEQ ID NO: 1046452 - RNA, 22 nt, Human
agugggaggaaguggugauauu

SEQ ID NO: 1046453 - RNA, 17 nt, Human
gccagggagaggaagcc

SEQ ID NO: 1046454 - RNA, 22 nt, Human
uguaagaaucagucuuuaaugu

SEQ ID NO: 1046455 - RNA, 22 nt, Human
agcauauaaauggacauauuug

SEQ ID NO: 1046456 - RNA, 19 nt, Human
guccagccuuugggucuua

SEQ ID NO: 1046457 - RNA, 21 nt, Human
gaguccuuccaauguccucag

SEQ ID NO: 1046458 - RNA, 22 nt, Human
acccgggaggcaggagucauag

SEQ ID NO: 1046459 - RNA, 22 nt, Human
uacuaaacaucuggcauuaaau

SEQ ID NO: 1046460 - RNA, 22 nt, Human
agggcaccuguuuuagcuuggu

SEQ ID NO: 1046461 - RNA, 22 nt, Human
cagcccuggcccaggugccuua

SEQ ID NO: 1046462 - RNA, 22 nt, Human
acacacucaauugcauaagcac

SEQ ID NO: 1046463 - RNA, 22 nt, Human
cuuucacaguccugacugagcg

SEQ ID NO: 1046464 - RNA, 22 nt, Human
agcaaaguagcugcuguucuua

SEQ ID NO: 1046465 - RNA, 22 nt, Human
uaucaagugacuaucacagaac

SEQ ID NO: 1046466 - RNA, 22 nt, Human
caaugaaagcaacugccuauaa

SEQ ID NO: 1046467 - RNA, 22 nt, Human
uuugaauaucacaaacuuucaa

SEQ ID NO: 1046468 - RNA, 22 nt, Human
gucauaaagcuuguugcauuua

SEQ ID NO: 1046469 - RNA, 22 nt, Human
ugaauagauuuuuaacauauaa

SEQ ID NO: 1046470 - RNA, 22 nt, Human
acugguuuuccagguuacuucu

SEQ ID NO: 1046471 - RNA, 22 nt, Human
agugaggggauucaggcaaggu

SEQ ID NO: 1046472 - RNA, 22 nt, Human
uuacagaauguucuuccaacag

SEQ ID NO: 1046473 - RNA, 22 nt, Human
uaaaacuuaacuauccagauua

SEQ ID NO: 1046474 - RNA, 20 nt, Human
caccagucaugagucaauac

SEQ ID NO: 1046475 - RNA, 22 nt, Human
acagggaaggauuuagugggaa

SEQ ID NO: 1046476 - RNA, 22 nt, Human
accuccaggaagcucuugguac

SEQ ID NO: 1046477 - RNA, 22 nt, Human
uuugaagauaaauauggagaaa

SEQ ID NO: 1046478 - RNA, 22 nt, Human
cuagaaaugcucaagagaaagu

SEQ ID NO: 1046479 - RNA, 21 nt, Human
uccagggaauuucaacuuuua

SEQ ID NO: 1046480 - RNA, 22 nt, Human
acagggaaagggacagcagcag

SEQ ID NO: 1046481 - RNA, 22 nt, Human
cagcuuggauuuuggcacgugu

SEQ ID NO: 1046482 - RNA, 22 nt, Human
cuuucacauaauugaccuugaa

SEQ ID NO: 1046483 - RNA, 22 nt, Human
gcagggcucauugccaggcauu

SEQ ID NO: 1046484 - RNA, 22 nt, Human
aaaguccuugcaguuuccucuu

SEQ ID NO: 1046485 - RNA, 22 nt, Human
uuccaaaccucaaauaauuaau

SEQ ID NO: 1046486 - RNA, 22 nt, Human
aucuaacacuguaaacugucuu

SEQ ID NO: 1046487 - RNA, 22 nt, Human
caucagaacaaaucgguuaaga

SEQ ID NO: 1046488 - RNA, 22 nt, Human
ugaaugaauccuaacaaagaca

SEQ ID NO: 1046489 - RNA, 22 nt, Human
uuuauccaaggguuuuaacugu

SEQ ID NO: 1046490 - RNA, 22 nt, Human
cggggagaacacuguguccuuc

SEQ ID NO: 1046491 - RNA, 22 nt, Human
ugcuuuaagagauuguuaguac

SEQ ID NO: 1046492 - RNA, 22 nt, Human
auaaagucauuaugaagaucua

SEQ ID NO: 1046493 - RNA, 22 nt, Human
ucuauacaaguuucacuuugac

SEQ ID NO: 1046494 - RNA, 22 nt, Human
ucuuuaauaucugccccagagc

SEQ ID NO: 1046495 - RNA, 22 nt, Human
gcuauacacauuucuugguagu

SEQ ID NO: 1046496 - RNA, 22 nt, Human
gagcccagguucugcuuccagc

SEQ ID NO: 1046497 - RNA, 22 nt, Human
acagaauucuaguauguggcuu

SEQ ID NO: 1046498 - RNA, 22 nt, Human
aggaguggugcaggaccugcca

SEQ ID NO: 1046499 - RNA, 22 nt, Human
uugaagaaauuauuuuauauag

SEQ ID NO: 1046500 - RNA, 22 nt, Human
gcauguuauguaucugcccagc

SEQ ID NO: 1046501 - RNA, 22 nt, Human
agaaacauccugcuuuccauuu

SEQ ID NO: 1046502 - RNA, 22 nt, Human
augguuuaagggagaauauuga

SEQ ID NO: 1046503 - RNA, 22 nt, Human
uccuccagaaacugaggcagaa

SEQ ID NO: 1046504 - RNA, 22 nt, Human
uuaaaauuauggcccauuugga

SEQ ID NO: 1046505 - RNA, 22 nt, Human
ucaaguuucucucagauuaugg

SEQ ID NO: 1046506 - RNA, 20 nt, Human
aaguuacauuguauuguacc

SEQ ID NO: 1046507 - RNA, 22 nt, Human
aaggcagcuucaccacagcauu

SEQ ID NO: 1046508 - RNA, 22 nt, Human
uucacagagagaacucaaacca

SEQ ID NO: 1046509 - RNA, 22 nt, Human
ucaauaaauagcuuggcucagc

SEQ ID NO: 1046510 - RNA, 22 nt, Human
ugggggagaguuuagaugauuu

SEQ ID NO: 1046511 - RNA, 22 nt, Human
acaugaaacuguugcauuagaa

SEQ ID NO: 1046512 - RNA, 22 nt, Human
acaugcuuuaacuuauuuugau

SEQ ID NO: 1046513 - RNA, 22 nt, Human
gcuccaggagagggaagcagau

SEQ ID NO: 1046514 - RNA, 22 nt, Human
aaauugcaaaaguacuuuuagg

SEQ ID NO: 1046515 - RNA, 22 nt, Human
ucuuuaauauaaaggaaugaau

SEQ ID NO: 1046516 - RNA, 22 nt, Human
uauguuaagugggauaaucaaa

SEQ ID NO: 1046517 - RNA, 22 nt, Human
augaaacaugcuuuguggauga

SEQ ID NO: 1046518 - RNA, 21 nt, Human
ucccagggccaggugccauca

SEQ ID NO: 1046519 - RNA, 22 nt, Human
ucuccaggcacuuggcugcuac

SEQ ID NO: 1046520 - RNA, 22 nt, Human
gaguccuuccagcaggcauuua

SEQ ID NO: 1046521 - RNA, 22 nt, Human
aaugaaacuguauauagacugu

SEQ ID NO: 1046522 - RNA, 22 nt, Human
auuucacaaaccauccugauuu

SEQ ID NO: 1046523 - RNA, 23 nt, Human
ccagccucugggucuucauccag

SEQ ID NO: 1046524 - RNA, 22 nt, Human
uggagacauuucucauuaaaaa

SEQ ID NO: 1046525 - RNA, 21 nt, Human
gagauuuagaaggaucaauuu

SEQ ID NO: 1046526 - RNA, 22 nt, Human
gaggcagcugggauacaaggga

SEQ ID NO: 1046527 - RNA, 22 nt, Human
ucagccaggccaggcauucaca

SEQ ID NO: 1046528 - RNA, 22 nt, Human
ucugaaaguaucuggaucuuuu

SEQ ID NO: 1046529 - RNA, 22 nt, Human
aaggcagcaccgccuccugaaa

SEQ ID NO: 1046530 - RNA, 22 nt, Human
ugcuuuaacauaagauaucuuu

SEQ ID NO: 1046531 - RNA, 22 nt, Human
auaaaacuuggguaugaucccu

SEQ ID NO: 1046532 - RNA, 22 nt, Human
aaucagaauuuauugaaucuuu

SEQ ID NO: 1046533 - RNA, 20 nt, Human
ucuaauuaaaauugucuagu

SEQ ID NO: 1046534 - RNA, 22 nt, Human
agggcugccccaguccagccgg

SEQ ID NO: 1046535 - RNA, 19 nt, Human
uuccaaaaucaggauuuga

SEQ ID NO: 1046536 - RNA, 21 nt, Human
aagggagauaggaaucaggcc

SEQ ID NO: 1046537 - RNA, 22 nt, Human
ugggcugcuguuacaggggcug

SEQ ID NO: 1046538 - RNA, 22 nt, Human
gcccaagccgccuuccagagac

SEQ ID NO: 1046539 - RNA, 22 nt, Human
ugagacaaccuaauuaaacacc

SEQ ID NO: 1046540 - RNA, 22 nt, Human
agaauaucguagcauauuaucu

SEQ ID NO: 1046541 - RNA, 22 nt, Human
ucuagacacuacuaguaaccgg

SEQ ID NO: 1046542 - RNA, 22 nt, Human
uggcuuaagauuuaugcuuuua

SEQ ID NO: 1046543 - RNA, 22 nt, Human
ugcaguggaaucuggagagcag

SEQ ID NO: 1046544 - RNA, 20 nt, Human
ugagacaaggcuggagagac

SEQ ID NO: 1046545 - RNA, 22 nt, Human
auggcuuuuuagacuuugguac

SEQ ID NO: 1046546 - RNA, 22 nt, Human
uuuaaugaauaauucaaaucug

SEQ ID NO: 1046547 - RNA, 22 nt, Human
gcagggaaggggcaugcuggag

SEQ ID NO: 1046548 - RNA, 22 nt, Human
ggcugccccaugggcugggcug

SEQ ID NO: 1046549 - RNA, 20 nt, Human
uuccaacucacaucucuaca

SEQ ID NO: 1046550 - RNA, 22 nt, Human
uuucaaguguccugauuaaugg

SEQ ID NO: 1046551 - RNA, 22 nt, Human
ugugaauagugccgcaauaaac

SEQ ID NO: 1046552 - RNA, 22 nt, Human
uccagggcaugcucagacucag

SEQ ID NO: 1046553 - RNA, 22 nt, Human
gauuuacaaagcucucuagugu

SEQ ID NO: 1046554 - RNA, 22 nt, Human
uccagccuuccuuuucacucuc

SEQ ID NO: 1046555 - RNA, 22 nt, Human
ugaaauaauaucuggaucaauc

SEQ ID NO: 1046556 - RNA, 22 nt, Human
ccuccaggaacuugagagacac

SEQ ID NO: 1046557 - RNA, 22 nt, Human
acagaauugaaaguauaaucug

SEQ ID NO: 1046558 - RNA, 22 nt, Human
caucagaaugaauguucuggag

SEQ ID NO: 1046559 - RNA, 22 nt, Human
cauggucuacaauuucauuuua

SEQ ID NO: 1046560 - RNA, 22 nt, Human
ccagggaaggcugcuggcugug

SEQ ID NO: 1046561 - RNA, 22 nt, Human
agaauaauacugaaaugcugaa

SEQ ID NO: 1046562 - RNA, 22 nt, Human
agauaucaccaguuuuacauac

SEQ ID NO: 1046563 - RNA, 22 nt, Human
cugcaccauccuucaugcucug

SEQ ID NO: 1046564 - RNA, 22 nt, Human
ccagauaaggcuuuuuaaaagc

SEQ ID NO: 1046565 - RNA, 22 nt, Human
ugcccaggguuucuaagagcag

SEQ ID NO: 1046566 - RNA, 22 nt, Human
agauauaauaauuuacaagugu

SEQ ID NO: 1046567 - RNA, 22 nt, Human
uauacagauggaaagauacaca

SEQ ID NO: 1046568 - RNA, 22 nt, Human
uaagaaucuauuaggaauaugu

SEQ ID NO: 1046569 - RNA, 22 nt, Human
aaguccuuauguggaggggcua

SEQ ID NO: 1046570 - RNA, 22 nt, Human
aaagccauuacaaaauuucaua

SEQ ID NO: 1046571 - RNA, 22 nt, Human
uaauuuuaugacaguguauuuu

SEQ ID NO: 1046572 - RNA, 22 nt, Human
uuuuaagaugcuaguauuucag

SEQ ID NO: 1046573 - RNA, 22 nt, Human
uaaguccuagaugauucacaga

SEQ ID NO: 1046574 - RNA, 23 nt, Human
gaggagggucgugcuguguuccu

SEQ ID NO: 1046575 - RNA, 22 nt, Human
cagucaccugaagacuugacca

SEQ ID NO: 1046576 - RNA, 22 nt, Human
ccuggauccaugaaaaggcuac

SEQ ID NO: 1046577 - RNA, 22 nt, Human
acccuggcagccuucuguccug

SEQ ID NO: 1046578 - RNA, 22 nt, Human
guauagaaacccagaaagauag

SEQ ID NO: 1046579 - RNA, 22 nt, Human
caagaaucuugcagcuuagacu

SEQ ID NO: 1046580 - RNA, 22 nt, Human
cagcccugugcggagggcccug

SEQ ID NO: 1046581 - RNA, 22 nt, Human
aaauggaucuguggaauacauu

SEQ ID NO: 1046582 - RNA, 22 nt, Human
uauggcuuuucauuccuaugug

SEQ ID NO: 1046583 - RNA, 22 nt, Human
uuauccaacaugacuuaugucc

SEQ ID NO: 1046584 - RNA, 22 nt, Human
ucugcccaggaggucccauggg

SEQ ID NO: 1046585 - RNA, 22 nt, Human
agaauuuccuaugagagauucc

SEQ ID NO: 1046586 - RNA, 22 nt, Human
ugggcugcccugaugguccuca

SEQ ID NO: 1046587 - RNA, 22 nt, Human
uucacacacagcuuccuauugu

SEQ ID NO: 1046588 - RNA, 22 nt, Human
ccaauacacuuuauagaagaaa

SEQ ID NO: 1046589 - RNA, 22 nt, Human
ugaagaauaagauagauggagc

SEQ ID NO: 1046590 - RNA, 22 nt, Human
uggggagaagcaauagacucua

SEQ ID NO: 1046591 - RNA, 22 nt, Human
aaagcagguugcaauuacagug

SEQ ID NO: 1046592 - RNA, 22 nt, Human
aaacggauauaacagcaaacgc

SEQ ID NO: 1046593 - RNA, 20 nt, Human
uggagacaauugcccuuuuu

SEQ ID NO: 1046594 - RNA, 22 nt, Human
cagcugacccagugaggaggca

SEQ ID NO: 1046595 - RNA, 22 nt, Human
caaucaguaaccggaucauggu

SEQ ID NO: 1046596 - RNA, 22 nt, Human
acaauuccacauggcaugcagg

SEQ ID NO: 1046597 - RNA, 22 nt, Human
uuauagaacagccuccucuaga

SEQ ID NO: 1046598 - RNA, 22 nt, Human
aauuccaggaugcaggaggugc

SEQ ID NO: 1046599 - RNA, 22 nt, Human
guuuaaucagaggaauuauaga

SEQ ID NO: 1046600 - RNA, 22 nt, Human
aucauaaagugcuaucugauug

SEQ ID NO: 1046601 - RNA, 22 nt, Human
aguccuuacucgggggcccaga

SEQ ID NO: 1046602 - RNA, 22 nt, Human
agcacauaccagaaccacaggu

SEQ ID NO: 1046603 - RNA, 22 nt, Human
agagauggcgucucagagccug

SEQ ID NO: 1046604 - RNA, 22 nt, Human
acugcccaggaaucucaaagaa

SEQ ID NO: 1046605 - RNA, 22 nt, Human
aaguccuuaggaagcagucguu

SEQ ID NO: 1046606 - RNA, 20 nt, Human
ggcugcccacuccagaguac

SEQ ID NO: 1046607 - RNA, 22 nt, Human
gauuucaaggaguuuucacagu

SEQ ID NO: 1046608 - RNA, 22 nt, Human
gagcagcacuugaggcauguca

SEQ ID NO: 1046609 - RNA, 22 nt, Human
gcaaggagccuggaggugagug

SEQ ID NO: 1046610 - RNA, 22 nt, Human
agcagggcugcggccccaccac

SEQ ID NO: 1046611 - RNA, 22 nt, Human
uuacagaaaguuucccaugccg

SEQ ID NO: 1046612 - RNA, 22 nt, Human
agcacaauagagcaguuaaaaa

SEQ ID NO: 1046613 - RNA, 22 nt, Human
aaauaucauuuauaacuuuuaa

SEQ ID NO: 1046614 - RNA, 22 nt, Human
cucuccagcagauguagucugu

SEQ ID NO: 1046615 - RNA, 22 nt, Human
ggggagaauuaccaaaagcgcu

SEQ ID NO: 1046616 - RNA, 22 nt, Human
uacagaauuagauuauuagaga

SEQ ID NO: 1046617 - RNA, 22 nt, Human
aacauguugcuuuaauaauauu

SEQ ID NO: 1046618 - RNA, 22 nt, Human
aagcaauagcaacaacuuuaca

SEQ ID NO: 1046619 - RNA, 22 nt, Human
ugcuauacggagcaucuucagg

SEQ ID NO: 1046620 - RNA, 22 nt, Human
cagaauuuagcacaauguaugg

SEQ ID NO: 1046621 - RNA, 22 nt, Human
acaggcagauuaaggguaggca

SEQ ID NO: 1046622 - RNA, 22 nt, Human
cagcccuggcgcccccagaucu

SEQ ID NO: 1046623 - RNA, 22 nt, Human
cguccuuacagagggucacagc

SEQ ID NO: 1046624 - RNA, 22 nt, Human
gauuuacagcuauacccaaugg

SEQ ID NO: 1046625 - RNA, 22 nt, Human
uacugaaaguggucaacagugg

SEQ ID NO: 1046626 - RNA, 22 nt, Human
gagagggagccagccaggaacc

SEQ ID NO: 1046627 - RNA, 22 nt, Human
aagauauagauggugguauaaa

SEQ ID NO: 1046628 - RNA, 22 nt, Human
ccugcccauacugaccucuaau

SEQ ID NO: 1046629 - RNA, 22 nt, Human
caaucaguuucuguuguauaau

SEQ ID NO: 1046630 - RNA, 22 nt, Human
uugcuuuugucucggguuugga

SEQ ID NO: 1046631 - RNA, 22 nt, Human
uuuccaaacccagcgagcuaca

SEQ ID NO: 1046632 - RNA, 22 nt, Human
ucuggaucgccggcgccugggc

SEQ ID NO: 1046633 - RNA, 22 nt, Human
agggaauggaugauggcagguu

SEQ ID NO: 1046634 - RNA, 22 nt, Human
auuccaaacucuuucccugucg

SEQ ID NO: 1046635 - RNA, 22 nt, Human
cagccucuuuccacaucaggca

SEQ ID NO: 1046636 - RNA, 22 nt, Human
ugucaccaugcgaggcuaauuu

SEQ ID NO: 1046637 - RNA, 22 nt, Human
gugcccaggugucccugagaag

SEQ ID NO: 1046638 - RNA, 22 nt, Human
aucagcuuuucucaucagaaau

SEQ ID NO: 1046639 - RNA, 22 nt, Human
cagauuucagcucauauauuau

SEQ ID NO: 1046640 - RNA, 22 nt, Human
aggcagcagacuguuaaucaga

SEQ ID NO: 1046641 - RNA, 22 nt, Human
ccagggaaaaucaacuucuacu

SEQ ID NO: 1046642 - RNA, 22 nt, Human
ugcuuuaaauaugaauuagcau

SEQ ID NO: 1046643 - RNA, 22 nt, Human
caacagucugguuuauauaaua

SEQ ID NO: 1046644 - RNA, 17 nt, Human
uaaagccagucaaguca

SEQ ID NO: 1046645 - RNA, 22 nt, Human
agaauuucuggaagauugcaag

SEQ ID NO: 1046646 - RNA, 22 nt, Human
uggagacagagauagccaauug

SEQ ID NO: 1046647 - RNA, 22 nt, Human
auuuccaggagaaaggauuuua

SEQ ID NO: 1046648 - RNA, 22 nt, Human
uaucagaaagauauuacugggg

SEQ ID NO: 1046649 - RNA, 22 nt, Human
caaagaagagauuuacagagcu

SEQ ID NO: 1046650 - RNA, 22 nt, Human
ugggcugcugcggugcucuugg

SEQ ID NO: 1046651 - RNA, 22 nt, Human
auuuccagacuuuuuccaggaa

SEQ ID NO: 1046652 - RNA, 21 nt, Human
ugggagagcguugcuguccuc

SEQ ID NO: 1046653 - RNA, 23 nt, Human
caauuucauaugauucuaccuaa

SEQ ID NO: 1046654 - RNA, 22 nt, Human
aggaggaggcuggaguacaccc

SEQ ID NO: 1046655 - RNA, 22 nt, Human
gcaaaauuuacacuccuucuuc

SEQ ID NO: 1046656 - RNA, 22 nt, Human
accagcugcugauugcuaaaug

SEQ ID NO: 1046657 - RNA, 22 nt, Human
gccaaggagacacgguguugua

SEQ ID NO: 1046658 - RNA, 22 nt, Human
cuacagaaaaucagccacaggc

SEQ ID NO: 1046659 - RNA, 22 nt, Human
cauuucaauuauuugcucuucu

SEQ ID NO: 1046660 - RNA, 22 nt, Human
aaaaucugcuuccuuuuacaga

SEQ ID NO: 1046661 - RNA, 23 nt, Human
uccagccucuugcucucacaugc

SEQ ID NO: 1046662 - RNA, 22 nt, Human
auguucaaacuuuuuacacacc

SEQ ID NO: 1046663 - RNA, 22 nt, Human
uaaagaucuuaggaagauuuuc

SEQ ID NO: 1046664 - RNA, 22 nt, Human
aacacuuugggcauggccuucc

SEQ ID NO: 1046665 - RNA, 22 nt, Human
gcuggaucaaguccuucaccca

SEQ ID NO: 1046666 - RNA, 22 nt, Human
aaaggaggccacauggcuagga

SEQ ID NO: 1046667 - RNA, 22 nt, Human
ucagggaaugugauacaggaag

SEQ ID NO: 1046668 - RNA, 22 nt, Human
caguccuuucaauggugaccuu

SEQ ID NO: 1046669 - RNA, 22 nt, Human
acaguccuuguguggaacauua

SEQ ID NO: 1046670 - RNA, 22 nt, Human
caggagggcccgagacucuucc

SEQ ID NO: 1046671 - RNA, 22 nt, Human
ugcacauucacuuagguauugu

SEQ ID NO: 1046672 - RNA, 22 nt, Human
uagaaacagauguuuuugaaga

SEQ ID NO: 1046673 - RNA, 22 nt, Human
aauuccagaggaggacaguccu

SEQ ID NO: 1046674 - RNA, 22 nt, Human
uacgacacaucugaucucaaaa

SEQ ID NO: 1046675 - RNA, 22 nt, Human
guacagaaugcuugguaaggca

SEQ ID NO: 1046676 - RNA, 22 nt, Human
ugcuuauucuuuccacaauuca

SEQ ID NO: 1046677 - RNA, 22 nt, Human
auggcuuaugguaaauauuucu

SEQ ID NO: 1046678 - RNA, 22 nt, Human
ugggagaguaaccaauuccuuc

SEQ ID NO: 1046679 - RNA, 22 nt, Human
ggcuuaaugguucuuuuucuca

SEQ ID NO: 1046680 - RNA, 22 nt, Human
auagcuuucuuaaauauauaaa

SEQ ID NO: 1046681 - RNA, 22 nt, Human
gcaacuuuagaaaaaucuauaa

SEQ ID NO: 1046682 - RNA, 22 nt, Human
ugcccagggauaagccuagaga

SEQ ID NO: 1046683 - RNA, 22 nt, Human
aaguccuuguauacagaaucaa

SEQ ID NO: 1046684 - RNA, 20 nt, Human
caggagggacauuucagcau

SEQ ID NO: 1046685 - RNA, 22 nt, Human
gacagccuggcuuaaucugucu

SEQ ID NO: 1046686 - RNA, 21 nt, Human
cuacagaaucgagcauucugg

SEQ ID NO: 1046687 - RNA, 22 nt, Human
aggagggacaccaauauauguu

SEQ ID NO: 1046688 - RNA, 22 nt, Human
uaauuccaccuuuuuccaacuu

SEQ ID NO: 1046689 - RNA, 22 nt, Human
aucagaaaaacauaauguuauu

SEQ ID NO: 1046690 - RNA, 22 nt, Human
uuaauaaacaggugcagcugaa

SEQ ID NO: 1046691 - RNA, 22 nt, Human
uaucagaagacuuacaguaucg

SEQ ID NO: 1046692 - RNA, 22 nt, Human
cucacaguuggcucauuaauga

SEQ ID NO: 1046693 - RNA, 22 nt, Human
acuuugaaagccuuggccccgg

SEQ ID NO: 1046694 - RNA, 19 nt, Human
uggcauuuggaggcaaccu

SEQ ID NO: 1046695 - RNA, 22 nt, Human
uuaauucugccuuucauguaac

SEQ ID NO: 1046696 - RNA, 22 nt, Human
gguggggcuaggaccucaggau

SEQ ID NO: 1046697 - RNA, 22 nt, Human
uaacagaaauuuuaguuagggg

SEQ ID NO: 1046698 - RNA, 22 nt, Human
ggauucuaacugaacagaauau

SEQ ID NO: 1046699 - RNA, 22 nt, Human
uacagacaguuuuucagauauu

SEQ ID NO: 1046700 - RNA, 22 nt, Human
aggagauggagcucagugggca

SEQ ID NO: 1046701 - RNA, 19 nt, Human
ugagacagagaccaguucu

SEQ ID NO: 1046702 - RNA, 22 nt, Human
aaugguuuucuagaacaugaaa

SEQ ID NO: 1046703 - RNA, 22 nt, Human
ucuccaggugaaacuugcaggg

SEQ ID NO: 1046704 - RNA, 22 nt, Human
gauuuagagcaggaaugcaugg

SEQ ID NO: 1046705 - RNA, 23 nt, Human
ucccagggaaggugagcgaggcu

SEQ ID NO: 1046706 - RNA, 22 nt, Human
aucagaaauagucauguuacuu

SEQ ID NO: 1046707 - RNA, 22 nt, Human
acaauauuguacccagaaguuu

SEQ ID NO: 1046708 - RNA, 22 nt, Human
auuaaacugagcaaauuaacau

SEQ ID NO: 1046709 - RNA, 20 nt, Human
cuccagggaacagacuggag

SEQ ID NO: 1046710 - RNA, 22 nt, Human
uguccuuagaagaagugaaaga

SEQ ID NO: 1046711 - RNA, 22 nt, Human
gccuccaccccuggggagugga

SEQ ID NO: 1046712 - RNA, 22 nt, Human
aagugaggccuaggcacugggu

SEQ ID NO: 1046713 - RNA, 22 nt, Human
ugcccaggcuucacccucagag

SEQ ID NO: 1046714 - RNA, 22 nt, Human
caagaaucagaccugucagggu

SEQ ID NO: 1046715 - RNA, 22 nt, Human
gcugcccagggcugaguguccu

SEQ ID NO: 1046716 - RNA, 17 nt, Human
uccauacaauucucucu

SEQ ID NO: 1046717 - RNA, 22 nt, Human
cuccagugcacccagaggauuu

SEQ ID NO: 1046718 - RNA, 20 nt, Human
guaaugaauguaaacaguaa

SEQ ID NO: 1046719 - RNA, 19 nt, Human
aaucagaaauaucgaggcc

SEQ ID NO: 1046720 - RNA, 22 nt, Human
ggggcagaaagcccacagagug

SEQ ID NO: 1046721 - RNA, 22 nt, Human
ugagacaauauuaaccuaucuu

SEQ ID NO: 1046722 - RNA, 19 nt, Human
acuccagggaugacagaag

SEQ ID NO: 1046723 - RNA, 22 nt, Human
ugucaccaugccagcuucugcc

SEQ ID NO: 1046724 - RNA, 22 nt, Human
guggacagcuucuaggugccag

SEQ ID NO: 1046725 - RNA, 22 nt, Human
ccugcccagcuucccgagugca

SEQ ID NO: 1046726 - RNA, 17 nt, Human
accaccucucaccagca

SEQ ID NO: 1046727 - RNA, 22 nt, Human
aagaaugagcucaaagaucuua

SEQ ID NO: 1046728 - RNA, 22 nt, Human
uuaauaaaguaugaauuggaaa

SEQ ID NO: 1046729 - RNA, 22 nt, Human
gguacaauggaccauaaaagcu

SEQ ID NO: 1046730 - RNA, 22 nt, Human
ugccugcagcgucuccagcagg

SEQ ID NO: 1046731 - RNA, 22 nt, Human
ugugaauacagcaugugcuucu

SEQ ID NO: 1046732 - RNA, 22 nt, Human
cuccagggaugagacagaguag

SEQ ID NO: 1046733 - RNA, 22 nt, Human
gugauuuaguguuaaguauguu

SEQ ID NO: 1046734 - RNA, 21 nt, Human
ccagggaagaaaugagggcag

SEQ ID NO: 1046735 - RNA, 22 nt, Human
uuuccaaaggcuaaacucaguu

SEQ ID NO: 1046736 - RNA, 22 nt, Human
ugaagaauaaaugguugagacu

SEQ ID NO: 1046737 - RNA, 22 nt, Human
uuaauuacaaaacacauagguu

SEQ ID NO: 1046738 - RNA, 22 nt, Human
ccagggaaugugggaugacucu

SEQ ID NO: 1046739 - RNA, 22 nt, Human
ccagggaaaggagguugacuug

SEQ ID NO: 1046740 - RNA, 22 nt, Human
agggaagagcuugcaagaaacc

SEQ ID NO: 1046741 - RNA, 22 nt, Human
ucagggaacuacuucucccuau

SEQ ID NO: 1046742 - RNA, 22 nt, Human
ucagggaaauuuccauguguuu

SEQ ID NO: 1046743 - RNA, 22 nt, Human
acagggaagcucaggggcucug

SEQ ID NO: 1046744 - RNA, 22 nt, Human
caucagaagauggcucuggaaa

SEQ ID NO: 1046745 - RNA, 21 nt, Human
uccagggaacuucucaggaau

SEQ ID NO: 1046746 - RNA, 22 nt, Human
uuuauccagaaucaggauuuuu

SEQ ID NO: 1046747 - RNA, 22 nt, Human
uuggaucauggaaugucugcuu

SEQ ID NO: 1046748 - RNA, 22 nt, Human
cacagccuccuucagagagcau

SEQ ID NO: 1046749 - RNA, 22 nt, Human
aguaaacacugucuuuauauau

SEQ ID NO: 1046750 - RNA, 22 nt, Human
gagauuuagcugcuuaacuccu

SEQ ID NO: 1046751 - RNA, 22 nt, Human
uuaagcaacacacauuaauuau

SEQ ID NO: 1046752 - RNA, 20 nt, Human
caucagaaauccugacccac

SEQ ID NO: 1046753 - RNA, 22 nt, Human
cuuaggcagacugcugaugcag

SEQ ID NO: 1046754 - RNA, 22 nt, Human
aaaucaguuguuauauuaaaga

SEQ ID NO: 1046755 - RNA, 18 nt, Human
uccagcucugccacuuac

SEQ ID NO: 1046756 - RNA, 22 nt, Human
uccuccagcaggacugaggccc

SEQ ID NO: 1046757 - RNA, 22 nt, Human
agucaaagcuacaggcauuuga

SEQ ID NO: 1046758 - RNA, 22 nt, Human
uuuccaaauaaggucacacuca

SEQ ID NO: 1046759 - RNA, 22 nt, Human
uacaggaaguaaguaaugaaau

SEQ ID NO: 1046760 - RNA, 22 nt, Human
acacaauacagggcucaaaaua

SEQ ID NO: 1046761 - RNA, 22 nt, Human
gcagggauugucaaugcugcuc

SEQ ID NO: 1046762 - RNA, 22 nt, Human
ugcaaacuauugguagagaugg

SEQ ID NO: 1046763 - RNA, 22 nt, Human
ugaucugaaggacaugggaccc

SEQ ID NO: 1046764 - RNA, 22 nt, Human
auaauaaaccaggaugggucug

SEQ ID NO: 1046765 - RNA, 22 nt, Human
cuuucaacuacauacaggcgau

SEQ ID NO: 1046766 - RNA, 22 nt, Human
ccaagggaaaccgagaggcugg

SEQ ID NO: 1046767 - RNA, 22 nt, Human
uuagaaaugauuucaccucuuu

SEQ ID NO: 1046768 - RNA, 22 nt, Human
caaagucagcugccagucccaa

SEQ ID NO: 1046769 - RNA, 22 nt, Human
uuccuuagcuccucauggccug

SEQ ID NO: 1046770 - RNA, 22 nt, Human
ccagaauucagaaagggcauaa

SEQ ID NO: 1046771 - RNA, 22 nt, Human
agaggagguccuuuucugaugu

SEQ ID NO: 1046772 - RNA, 22 nt, Human
uucauagaucucaauuuugagg

SEQ ID NO: 1046773 - RNA, 22 nt, Human
uaagaaguacaaaaauuuucug

SEQ ID NO: 1046774 - RNA, 22 nt, Human
aagguucuaagggaagccaugc

SEQ ID NO: 1046775 - RNA, 22 nt, Human
uuuaggcaaacucauugucaga

SEQ ID NO: 1046776 - RNA, 22 nt, Human
guaaacaucagccacucuauuu

SEQ ID NO: 1046777 - RNA, 23 nt, Human
agaucugauguuaccaagaauug

SEQ ID NO: 1046778 - RNA, 22 nt, Human
auggcuuugaaguaauguaauu

SEQ ID NO: 1046779 - RNA, 22 nt, Human
caggaggugcccucuaguggca

SEQ ID NO: 1046780 - RNA, 22 nt, Human
aauuauccuuaaugcaguaagc

SEQ ID NO: 1046781 - RNA, 22 nt, Human
ccagaucuucuuuucagugucu

SEQ ID NO: 1046782 - RNA, 22 nt, Human
gucagucuccugccuuuuggac

SEQ ID NO: 1046783 - RNA, 22 nt, Human
auuccaaaggcuggccuggagg

SEQ ID NO: 1046784 - RNA, 22 nt, Human
aagggagaggagggucuuguug

SEQ ID NO: 1046785 - RNA, 23 nt, Human
aggagacagggaagugccuggcu

SEQ ID NO: 1046786 - RNA, 22 nt, Human
agcccugggucccaguccuggc

SEQ ID NO: 1046787 - RNA, 23 nt, Human
gggcugcuccaggccaaggcugg

SEQ ID NO: 1046788 - RNA, 22 nt, Human
cuuaggcauccaggguucuucc

SEQ ID NO: 1046789 - RNA, 22 nt, Human
ggcugcccuagagcuggcaagg

SEQ ID NO: 1046790 - RNA, 22 nt, Human
uccagggcagggugcgcauggg

SEQ ID NO: 1046791 - RNA, 22 nt, Human
ccuccuagaggaaccccagggc

SEQ ID NO: 1046792 - RNA, 22 nt, Human
uucagaaaaaacuucaauaagu

SEQ ID NO: 1046793 - RNA, 22 nt, Human
cauuuacacacagaggugugcu

SEQ ID NO: 1046794 - RNA, 22 nt, Human
augaacaagagagggaagauuc

SEQ ID NO: 1046795 - RNA, 22 nt, Human
gaaagccauagcccagcuuuac

SEQ ID NO: 1046796 - RNA, 20 nt, Human
gugcccaguuggugacagac

SEQ ID NO: 1046797 - RNA, 22 nt, Human
cacagccuugagcgaggacaag

SEQ ID NO: 1046798 - RNA, 22 nt, Human
ggggcugcucccaccccugagg

SEQ ID NO: 1046799 - RNA, 22 nt, Human
aguccuuaugagaugcugccuu

SEQ ID NO: 1046800 - RNA, 22 nt, Human
aaucagaacuucucaggguggg

SEQ ID NO: 1046801 - RNA, 22 nt, Human
auaauucaugggccuuucaccu

SEQ ID NO: 1046802 - RNA, 22 nt, Human
ccuggaucuaaggaagcuggga

SEQ ID NO: 1046803 - RNA, 22 nt, Human
ugcagugggccggaggccaggg

SEQ ID NO: 1046804 - RNA, 22 nt, Human
gauggcuucagucuccuugggu

SEQ ID NO: 1046805 - RNA, 22 nt, Human
uagaaacagcauauauuagccc

SEQ ID NO: 1046806 - RNA, 19 nt, Human
ugcccaggccucccaaaag

SEQ ID NO: 1046807 - RNA, 22 nt, Human
caaguccaucagauaagcaaga

SEQ ID NO: 1046808 - RNA, 22 nt, Human
ucauaauacaaagaguucugca

SEQ ID NO: 1046809 - RNA, 22 nt, Human
caaagaggugagaggagccuuu

SEQ ID NO: 1046810 - RNA, 22 nt, Human
uaugcccagcuuaaaguacaca

SEQ ID NO: 1046811 - RNA, 22 nt, Human
cuuaggcaagcagagcccaucc

SEQ ID NO: 1046812 - RNA, 22 nt, Human
augcuuaacucuguacauaguu

SEQ ID NO: 1046813 - RNA, 22 nt, Human
ugucaccaccggaagaaacugc

SEQ ID NO: 1046814 - RNA, 22 nt, Human
aggauuuaccuccagcuaggcu

SEQ ID NO: 1046815 - RNA, 22 nt, Human
uauaauuaguaaauggcagauu

SEQ ID NO: 1046816 - RNA, 22 nt, Human
uuauagugggcccaacauggcg

SEQ ID NO: 1046817 - RNA, 22 nt, Human
cuccagggaaaggggcguccgc

SEQ ID NO: 1046818 - RNA, 21 nt, Human
ccagccucagaucagggagcu

SEQ ID NO: 1046819 - RNA, 22 nt, Human
auuucaacguuagauguaauag

SEQ ID NO: 1046820 - RNA, 22 nt, Human
cccugggauggauuggcaggaa

SEQ ID NO: 1046821 - RNA, 21 nt, Human
auacagaagguggcaaaguac

SEQ ID NO: 1046822 - RNA, 22 nt, Human
uaaagccauacugaaagccacu

SEQ ID NO: 1046823 - RNA, 22 nt, Human
ccugggaagagcugacaggagg

SEQ ID NO: 1046824 - RNA, 22 nt, Human
gcagaauucuacagaugauaaa

SEQ ID NO: 1046825 - RNA, 22 nt, Human
uaucagaacacagccacagcca

SEQ ID NO: 1046826 - RNA, 22 nt, Human
gaggagggccuggugucccuuc

SEQ ID NO: 1046827 - RNA, 22 nt, Human
gaucagaauucuuguguguuuc

SEQ ID NO: 1046828 - RNA, 22 nt, Human
guccagggcuaaaucagguucc

SEQ ID NO: 1046829 - RNA, 22 nt, Human
uccagccuugccacuuuucugu

SEQ ID NO: 1046830 - RNA, 22 nt, Human
cuuugaagauggcaaauuuaga

SEQ ID NO: 1046831 - RNA, 22 nt, Human
ucuucccucuucugccaaauac

SEQ ID NO: 1046832 - RNA, 22 nt, Human
cuggacucugcagagaaaagua

SEQ ID NO: 1046833 - RNA, 22 nt, Human
agggagccuuccuggcuguggu

SEQ ID NO: 1046834 - RNA, 22 nt, Human
gaauuucaagcagugcaauguu

SEQ ID NO: 1046835 - RNA, 22 nt, Human
gcuggauccugauucgucuuug

SEQ ID NO: 1046836 - RNA, 22 nt, Human
uacaguauguucuugaauuugg

SEQ ID NO: 1046837 - RNA, 22 nt, Human
aacagaauaguugauguacagu

SEQ ID NO: 1046838 - RNA, 22 nt, Human
cagggaugugaugagcugagcc

SEQ ID NO: 1046839 - RNA, 22 nt, Human
uaauacuuuugccuuguauuca

SEQ ID NO: 1046840 - RNA, 18 nt, Human
agggagagaccgcggguc

SEQ ID NO: 1046841 - RNA, 18 nt, Human
ccuccaaguccccagccu

SEQ ID NO: 1046842 - RNA, 21 nt, Human
uccaaaaaggagcguccuucu

SEQ ID NO: 1046843 - RNA, 22 nt, Human
ggggcccuuguggcugcaggcc

SEQ ID NO: 1046844 - RNA, 22 nt, Human
gaaauauacauugcaggaagag

SEQ ID NO: 1046845 - RNA, 21 nt, Human
agggcacccccgcugccuacc

SEQ ID NO: 1046846 - RNA, 22 nt, Human
ugggagaggcugccaucuugca

SEQ ID NO: 1046847 - RNA, 22 nt, Human
aacacuuucuauuauuaugguu

SEQ ID NO: 1046848 - RNA, 22 nt, Human
agaucccaaaucaccugcuuau

SEQ ID NO: 1046849 - RNA, 22 nt, Human
uccagcucaggguuggcucaag

SEQ ID NO: 1046850 - RNA, 22 nt, Human
ggagcaagucccaggcacuagu

SEQ ID NO: 1046851 - RNA, 22 nt, Human
agacaggcagaggcugcagagg

SEQ ID NO: 1046852 - RNA, 22 nt, Human
ucugcccagggacccacaggga

SEQ ID NO: 1046853 - RNA, 22 nt, Human
gacuaugugaagugugaauagg

SEQ ID NO: 1046854 - RNA, 22 nt, Human
acuuuuaucaaggaagugaucu

SEQ ID NO: 1046855 - RNA, 21 nt, Human
uuucagaccuaucuuugaagg

SEQ ID NO: 1046856 - RNA, 22 nt, Human
ugcuggaggauuaaacaaguca

SEQ ID NO: 1046857 - RNA, 22 nt, Human
ggaguuggugagcaccaggcuu

SEQ ID NO: 1046858 - RNA, 22 nt, Human
caugcuuuucaaucuaucuuaa

SEQ ID NO: 1046859 - RNA, 22 nt, Human
ccugcccacagagagggugcau

SEQ ID NO: 1046860 - RNA, 22 nt, Human
uagauauaagguccuuagaaca

SEQ ID NO: 1046861 - RNA, 22 nt, Human
acuuugaaucucagauaaccaa

SEQ ID NO: 1046862 - RNA, 22 nt, Human
uugcacauuuccuagaauuuca

SEQ ID NO: 1046863 - RNA, 20 nt, Human
caauuucaucauuuccugug

SEQ ID NO: 1046864 - RNA, 22 nt, Human
uuugaagacauauuguuacaua

SEQ ID NO: 1046865 - RNA, 22 nt, Human
uuauccaagcagaagcugcaca

SEQ ID NO: 1046866 - RNA, 22 nt, Human
gauaaaauucuuauuuuacccg

SEQ ID NO: 1046867 - RNA, 22 nt, Human
uuacagaacugucuugaaauuu

SEQ ID NO: 1046868 - RNA, 22 nt, Human
acagggaauggagggaucagua

SEQ ID NO: 1046869 - RNA, 22 nt, Human
cucauacauaugccauuccugc

SEQ ID NO: 1046870 - RNA, 22 nt, Human
cacagcagggaugaauggagug

SEQ ID NO: 1046871 - RNA, 22 nt, Human
cuuugaauugccguuucaucug

SEQ ID NO: 1046872 - RNA, 22 nt, Human
uacaaaaaauugauacugacga

SEQ ID NO: 1046873 - RNA, 22 nt, Human
auuucauacuaaggcucaaaaa

SEQ ID NO: 1046874 - RNA, 23 nt, Human
ucuauacauacugcagccucugg

SEQ ID NO: 1046875 - RNA, 22 nt, Human
augguuuuccucugcugcuuaa

SEQ ID NO: 1046876 - RNA, 22 nt, Human
agaugaaaagauaagcagcaau

SEQ ID NO: 1046877 - RNA, 22 nt, Human
ugagacaaaauugacagacaaa

SEQ ID NO: 1046878 - RNA, 22 nt, Human
ccauggcuuacagauggagcau

SEQ ID NO: 1046879 - RNA, 20 nt, Human
auacuuguuuucaggcuuuu

SEQ ID NO: 1046880 - RNA, 22 nt, Human
cagggccccagggaugucugcu

SEQ ID NO: 1046881 - RNA, 22 nt, Human
aauuccaaauguuuucaaucca

SEQ ID NO: 1046882 - RNA, 22 nt, Human
aagaaacaaccacugcucuccu

SEQ ID NO: 1046883 - RNA, 22 nt, Human
aaugguauuugucaagcauagu

SEQ ID NO: 1046884 - RNA, 22 nt, Human
agggcuccuaugaugcucugcc

SEQ ID NO: 1046885 - RNA, 22 nt, Human
aggauuuaggagcuggcuaacg

SEQ ID NO: 1046886 - RNA, 22 nt, Human
aggcuucugugagcucauacaa

SEQ ID NO: 1046887 - RNA, 22 nt, Human
aaguccuucuuuauaugagagu

SEQ ID NO: 1046888 - RNA, 22 nt, Human
ggaggaggcaaguaccagaugc

SEQ ID NO: 1046889 - RNA, 22 nt, Human
aggauuuauuggugggaaguua

SEQ ID NO: 1046890 - RNA, 22 nt, Human
ucugcgugggacugaggaggcu

SEQ ID NO: 1046891 - RNA, 22 nt, Human
gauuucaagcccccagagauuc

SEQ ID NO: 1046892 - RNA, 22 nt, Human
cagucaccauagaauaaaacau

SEQ ID NO: 1046893 - RNA, 22 nt, Human
gaaauauacaugaagucggcug

SEQ ID NO: 1046894 - RNA, 22 nt, Human
uugaauaauauguucaggagga

SEQ ID NO: 1046895 - RNA, 22 nt, Human
gaagagagccgcgggacaucag

SEQ ID NO: 1046896 - RNA, 22 nt, Human
gcagggauugugcagggggcua

SEQ ID NO: 1046897 - RNA, 22 nt, Human
uagucaccuuuggcaccugcaa

SEQ ID NO: 1046898 - RNA, 22 nt, Human
guuccaaaguuagaguguauug

SEQ ID NO: 1046899 - RNA, 18 nt, Human
aauuuccauaugaauugc

SEQ ID NO: 1046900 - RNA, 22 nt, Human
aaagaaucuauauaucaccacc

SEQ ID NO: 1046901 - RNA, 22 nt, Human
acagaauugauggaaaucucag

SEQ ID NO: 1046902 - RNA, 22 nt, Human
cuggcuuccugaguccauuacc

SEQ ID NO: 1046903 - RNA, 22 nt, Human
gaugaaaaauugcugugucaua

SEQ ID NO: 1046904 - RNA, 22 nt, Human
uuaaagaauagugccccuauug

SEQ ID NO: 1046905 - RNA, 22 nt, Human
gaccaccagagguccgugggua

SEQ ID NO: 1046906 - RNA, 22 nt, Human
ccuggaucagucacuguugcug

SEQ ID NO: 1046907 - RNA, 22 nt, Human
ggaggaggggugacugaaugcu

SEQ ID NO: 1046908 - RNA, 22 nt, Human
cagaucuguaguaaaagaucuc

SEQ ID NO: 1046909 - RNA, 22 nt, Human
guucuaauaggagaaaagacag

SEQ ID NO: 1046910 - RNA, 22 nt, Human
uuauuaaugaguacaaguuauu

SEQ ID NO: 1046911 - RNA, 22 nt, Human
aauacugucuuucacagauauu

SEQ ID NO: 1046912 - RNA, 22 nt, Human
uucauaaucaccaaaaacugga

SEQ ID NO: 1046913 - RNA, 22 nt, Human
uaaagccacgcuggaaaucagg

SEQ ID NO: 1046914 - RNA, 20 nt, Human
gggagacagggccagugucc

SEQ ID NO: 1046915 - RNA, 19 nt, Human
cugcuuccuucccucacug

SEQ ID NO: 1046916 - RNA, 22 nt, Human
aaagcagccacagagagagcgu

SEQ ID NO: 1046917 - RNA, 22 nt, Human
guacauaaaggaggcucuuugc

SEQ ID NO: 1046918 - RNA, 22 nt, Human
aggggcugcuggguccgccccu

SEQ ID NO: 1046919 - RNA, 22 nt, Human
acauaaguuauggauaaaaugu

SEQ ID NO: 1046920 - RNA, 22 nt, Human
ucacacauucuagguauguuga

SEQ ID NO: 1046921 - RNA, 20 nt, Human
ugcagggcugccucccagcu

SEQ ID NO: 1046922 - RNA, 22 nt, Human
aaaggaggaauggagagaugcu

SEQ ID NO: 1046923 - RNA, 22 nt, Human
aagucaccccacacucuuggga

SEQ ID NO: 1046924 - RNA, 22 nt, Human
ucagggaggugucugccagaga

SEQ ID NO: 1046925 - RNA, 22 nt, Human
aaacaaacaauuaguugugugg

SEQ ID NO: 1046926 - RNA, 22 nt, Human
uguacaauguguuuguuggcuu

SEQ ID NO: 1046927 - RNA, 22 nt, Human
gaguccuuaauacacuggugga

SEQ ID NO: 1046928 - RNA, 22 nt, Human
agucuucuagcuggguuugguu

SEQ ID NO: 1046929 - RNA, 22 nt, Human
uaggaggguuagagggaaauau

SEQ ID NO: 1046930 - RNA, 22 nt, Human
uaaguccuaauggcagaagucu

SEQ ID NO: 1046931 - RNA, 22 nt, Human
ugaauaaucuuggguauuaaua

SEQ ID NO: 1046932 - RNA, 22 nt, Human
aaugguuugauggacaaaauga

SEQ ID NO: 1046933 - RNA, 22 nt, Human
aauuauauuguggugugaaugu

SEQ ID NO: 1046934 - RNA, 23 nt, Human
ucuaauacaugaaaccuagaugu

SEQ ID NO: 1046935 - RNA, 22 nt, Human
aguaaacaguaucuuuaguguc

SEQ ID NO: 1046936 - RNA, 22 nt, Human
agacauggauuucuuacauaaa

SEQ ID NO: 1046937 - RNA, 22 nt, Human
uuggaucagaugauaucuuugu

SEQ ID NO: 1046938 - RNA, 22 nt, Human
accagccagccacaguggcucc

SEQ ID NO: 1046939 - RNA, 22 nt, Human
uaugaaaagguggccaauguag

SEQ ID NO: 1046940 - RNA, 22 nt, Human
caauuucagaccuuuccuugga

SEQ ID NO: 1046941 - RNA, 22 nt, Human
cagggaugaccagagggaugug

SEQ ID NO: 1046942 - RNA, 22 nt, Human
aauuuacaggugcacucgccau

SEQ ID NO: 1046943 - RNA, 22 nt, Human
guacagaaauggggccccaggu

SEQ ID NO: 1046944 - RNA, 22 nt, Human
cuauagaaaauuguaucacacg

SEQ ID NO: 1046945 - RNA, 22 nt, Human
ccagggcagugggagaaggugc

SEQ ID NO: 1046946 - RNA, 22 nt, Human
augguuuuucaaguauucagaa

SEQ ID NO: 1046947 - RNA, 22 nt, Human
gaaauagacacuuucuaugaau

SEQ ID NO: 1046948 - RNA, 22 nt, Human
agaauuucaaauggaaguuuua

SEQ ID NO: 1046949 - RNA, 22 nt, Human
ugagacaacauugggcaagucc

SEQ ID NO: 1046950 - RNA, 22 nt, Human
ugggcugcccaagguggccaug

SEQ ID NO: 1046951 - RNA, 20 nt, Human
aggauuuacuacuaccugcu

SEQ ID NO: 1046952 - RNA, 22 nt, Human
guaaacaacacaaaucauuuga

SEQ ID NO: 1046953 - RNA, 22 nt, Human
ugggagagcacugcagccccgg

SEQ ID NO: 1046954 - RNA, 22 nt, Human
acagaaauaacuuuuuauguuu

SEQ ID NO: 1046955 - RNA, 22 nt, Human
gagggaagaaagaauugaugcg

SEQ ID NO: 1046956 - RNA, 22 nt, Human
ucagccagcaucagcuaagugc

SEQ ID NO: 1046957 - RNA, 22 nt, Human
gaauuucaggacaacuggaagg

SEQ ID NO: 1046958 - RNA, 22 nt, Human
cugccugccuuggccuccagga

SEQ ID NO: 1046959 - RNA, 22 nt, Human
uaauuuuuccacguacacuggg

SEQ ID NO: 1046960 - RNA, 22 nt, Human
ccagccucacuggcaucaccua

SEQ ID NO: 1046961 - RNA, 22 nt, Human
uccagggaucuuuagagucuuu

SEQ ID NO: 1046962 - RNA, 22 nt, Human
aguaaacauuuucauauuuucu

SEQ ID NO: 1046963 - RNA, 22 nt, Human
ucccuggcagcuguccuuucag

SEQ ID NO: 1046964 - RNA, 21 nt, Human
agucccauccgguaagcaagc

SEQ ID NO: 1046965 - RNA, 22 nt, Human
aaguaaauaucuguuuauagca

SEQ ID NO: 1046966 - RNA, 22 nt, Human
acagaaugggauuugaauauuu

SEQ ID NO: 1046967 - RNA, 22 nt, Human
aauauaugagggagcuauuuga

SEQ ID NO: 1046968 - RNA, 22 nt, Human
cugugcagcuggcuuccuggaa

SEQ ID NO: 1046969 - RNA, 21 nt, Human
ugggagagggcucagcuaccc

SEQ ID NO: 1046970 - RNA, 22 nt, Human
cucuccagccuuuagcccacgc

SEQ ID NO: 1046971 - RNA, 22 nt, Human
gugaauaauuuuuuaguauaag

SEQ ID NO: 1046972 - RNA, 22 nt, Human
agucaaaugaguaaauauauaa

SEQ ID NO: 1046973 - RNA, 22 nt, Human
ucagaauugcagggagggcagg

SEQ ID NO: 1046974 - RNA, 22 nt, Human
ugucaccacauuugucaauauc

SEQ ID NO: 1046975 - RNA, 22 nt, Human
gagcccaggaaguggaggcuga

SEQ ID NO: 1046976 - RNA, 22 nt, Human
caaagcaaggcucaguuugaac

SEQ ID NO: 1046977 - RNA, 22 nt, Human
agggagaguagauaucaggugu

SEQ ID NO: 1046978 - RNA, 16 nt, Human
gcaacuuugggguuga

SEQ ID NO: 1046979 - RNA, 22 nt, Human
uuuauccaccuuacccuguucc

SEQ ID NO: 1046980 - RNA, 22 nt, Human
aggggagagaacauaaggaagu

SEQ ID NO: 1046981 - RNA, 22 nt, Human
gaauuucagaucagagaccauu

SEQ ID NO: 1046982 - RNA, 22 nt, Human
acaacuuucuggguuaucugau

SEQ ID NO: 1046983 - RNA, 22 nt, Human
aaguuacacauuuucauuguaa

SEQ ID NO: 1046984 - RNA, 22 nt, Human
auuucaacauucucaguuguag

SEQ ID NO: 1046985 - RNA, 22 nt, Human
auauaauacaaccugcuaagug

SEQ ID NO: 1046986 - RNA, 22 nt, Human
ucuccaggaaagacacuggacu

SEQ ID NO: 1046987 - RNA, 22 nt, Human
aucagaaauugcccagcuguuu

SEQ ID NO: 1046988 - RNA, 19 nt, Human
uacauacuuauucuaaaag

SEQ ID NO: 1046989 - RNA, 22 nt, Human
acaaaguccugguguauggcca

SEQ ID NO: 1046990 - RNA, 22 nt, Human
ugagauuuguuuuauaaaauag

SEQ ID NO: 1046991 - RNA, 22 nt, Human
ucugcccagcuaaaaaugggag

SEQ ID NO: 1046992 - RNA, 22 nt, Human
auccuuagguggugcaucaggg

SEQ ID NO: 1046993 - RNA, 22 nt, Human
aagggcccauucucucagaaaa

SEQ ID NO: 1046994 - RNA, 22 nt, Human
agcaguggccuggggcucugug

SEQ ID NO: 1046995 - RNA, 22 nt, Human
guaaacauuuucaucugugccc

SEQ ID NO: 1046996 - RNA, 22 nt, Human
auucuaacacaugcucuaagaa

SEQ ID NO: 1046997 - RNA, 23 nt, Human
uuccacaaugaaaauaaagcagg

SEQ ID NO: 1046998 - RNA, 22 nt, Human
agaggaggcagcuuaacucagu

SEQ ID NO: 1046999 - RNA, 22 nt, Human
aggcagcauuugaauccagguc

SEQ ID NO: 1047000 - RNA, 20 nt, Human
ucugcccaccccggcuccca

SEQ ID NO: 1047001 - RNA, 22 nt, Human
acaacuuuucuaucauguggaa

SEQ ID NO: 1047002 - RNA, 22 nt, Human
aaucagcuaaauaaacuaguca

SEQ ID NO: 1047003 - RNA, 22 nt, Human
ggagaggggcaaguuuaucuag

SEQ ID NO: 1047004 - RNA, 22 nt, Human
gacuuuuagaauggugaggaau

SEQ ID NO: 1047005 - RNA, 22 nt, Human
acaugcuuugcacuuacaucau

SEQ ID NO: 1047006 - RNA, 22 nt, Human
gaguccuuuucauagcaguggg

SEQ ID NO: 1047007 - RNA, 22 nt, Human
aauguuaauuuacugucuucau

SEQ ID NO: 1047008 - RNA, 22 nt, Human
aggaggguucucuggacagagg

SEQ ID NO: 1047009 - RNA, 22 nt, Human
ucucuuggaacacuugcucuua

SEQ ID NO: 1047010 - RNA, 22 nt, Human
caugguuuugagccuauuaugc

SEQ ID NO: 1047011 - RNA, 22 nt, Human
cagucaccuagacagaacuuac

SEQ ID NO: 1047012 - RNA, 19 nt, Human
cuauacagccucugaggaa

SEQ ID NO: 1047013 - RNA, 22 nt, Human
ccagccucaucauauuccugcu

SEQ ID NO: 1047014 - RNA, 20 nt, Human
uacagacaugacaauaaugg

SEQ ID NO: 1047015 - RNA, 22 nt, Human
uuucagaaccgcuaaaauaaau

SEQ ID NO: 1047016 - RNA, 21 nt, Human
ugaaagaaggugcagucugaa

SEQ ID NO: 1047017 - RNA, 20 nt, Human
uggcccagcacgacgaggac

SEQ ID NO: 1047018 - RNA, 22 nt, Human
gcagggcucagccgcucccacc

SEQ ID NO: 1047019 - RNA, 20 nt, Human
uacaauacacaugcauauga

SEQ ID NO: 1047020 - RNA, 22 nt, Human
uguccuuauaagaaaaggaaau

SEQ ID NO: 1047021 - RNA, 22 nt, Human
uacuaaacccucgauggaucuu

SEQ ID NO: 1047022 - RNA, 22 nt, Human
acaugcuuuucccacaauuaua

SEQ ID NO: 1047023 - RNA, 22 nt, Human
gaaguucaaaagacagauuuga

SEQ ID NO: 1047024 - RNA, 22 nt, Human
gacaauacagaaagggacaugc

SEQ ID NO: 1047025 - RNA, 19 nt, Human
uuccuuagaggaggcggug

SEQ ID NO: 1047026 - RNA, 22 nt, Human
uccagggacaguauagaggauc

SEQ ID NO: 1047027 - RNA, 22 nt, Human
gagaaggggugauguggguaau

SEQ ID NO: 1047028 - RNA, 22 nt, Human
ucaccagucuuucuuaccauug

SEQ ID NO: 1047029 - RNA, 22 nt, Human
cauuuacacuucuaaccacaag

SEQ ID NO: 1047030 - RNA, 21 nt, Human
ucugcccacacuggccacugc

SEQ ID NO: 1047031 - RNA, 17 nt, Human
uccagcuccucauuguu

SEQ ID NO: 1047032 - RNA, 23 nt, Human
acaggaggggacagguggccgug

SEQ ID NO: 1047033 - RNA, 19 nt, Human
uggauuuauauucuuuauc

SEQ ID NO: 1047034 - RNA, 22 nt, Human
uagaaaucagcaggcauaugua

SEQ ID NO: 1047035 - RNA, 22 nt, Human
uuaacacuaucugucauaauua

SEQ ID NO: 1047036 - RNA, 22 nt, Human
augaaauauuucagagcagagu

SEQ ID NO: 1047037 - RNA, 22 nt, Human
ccaguggaaauguggucaggau

SEQ ID NO: 1047038 - RNA, 22 nt, Human
ucauaaaaugcuccugauauug

SEQ ID NO: 1047039 - RNA, 22 nt, Human
cagggcuuuuuauuagcugccu

SEQ ID NO: 1047040 - RNA, 22 nt, Human
aggggagacuggaaucuaacau

SEQ ID NO: 1047041 - RNA, 22 nt, Human
uuacagaaucuacucgugguga

SEQ ID NO: 1047042 - RNA, 22 nt, Human
ugcccaggaucuggcgaugcuc

SEQ ID NO: 1047043 - RNA, 22 nt, Human
uccagggaguuggcuggauagu

SEQ ID NO: 1047044 - RNA, 22 nt, Human
aacaaacaaacauuuugucauc

SEQ ID NO: 1047045 - RNA, 20 nt, Human
agacaugguagugauucagg

SEQ ID NO: 1047046 - RNA, 22 nt, Human
acaugcuuugauguauuuugca

SEQ ID NO: 1047047 - RNA, 22 nt, Human
aggauuuaucaggaacucucuu

SEQ ID NO: 1047048 - RNA, 22 nt, Human
aagaaaucauaucauuucuugg

SEQ ID NO: 1047049 - RNA, 22 nt, Human
gaaguccugguccucucauuca

SEQ ID NO: 1047050 - RNA, 16 nt, Human
ccuggauccccugugg

SEQ ID NO: 1047051 - RNA, 22 nt, Human
acauaauaggugccugaauauu

SEQ ID NO: 1047052 - RNA, 22 nt, Human
uuccuuagauccuucaaucacg

SEQ ID NO: 1047053 - RNA, 22 nt, Human
uggagagguuuaaacaaaaguu

SEQ ID NO: 1047054 - RNA, 22 nt, Human
gucaacuuuaagaugaucuuuu

SEQ ID NO: 1047055 - RNA, 21 nt, Human
auggauuuaaacaggccacaa

SEQ ID NO: 1047056 - RNA, 22 nt, Human
aggugcccaugagcuccauggc

SEQ ID NO: 1047057 - RNA, 19 nt, Human
aggcagcaggccagggaug

SEQ ID NO: 1047058 - RNA, 22 nt, Human
caaugaaaauuuaaguugcagc

SEQ ID NO: 1047059 - RNA, 22 nt, Human
uuucacacaacgugaauauacu

SEQ ID NO: 1047060 - RNA, 22 nt, Human
gaugauaacagcauuucaacug

SEQ ID NO: 1047061 - RNA, 22 nt, Human
uacacauguauuuauguguaca

SEQ ID NO: 1047062 - RNA, 22 nt, Human
cagaaaaggaagagcuauguaa

SEQ ID NO: 1047063 - RNA, 22 nt, Human
cacgagggcacacgugggaggg

SEQ ID NO: 1047064 - RNA, 22 nt, Human
aacuuuguguguuuaauauggc

SEQ ID NO: 1047065 - RNA, 22 nt, Human
gccagggaggcuguaggguccu

SEQ ID NO: 1047066 - RNA, 22 nt, Human
uuucaauguaugucuuucugag

SEQ ID NO: 1047067 - RNA, 22 nt, Human
auacagaagaccccuccgucau

SEQ ID NO: 1047068 - RNA, 20 nt, Human
gcagccucaacaggcacagc

SEQ ID NO: 1047069 - RNA, 22 nt, Human
uauccaaaggaacaaucacagc

SEQ ID NO: 1047070 - RNA, 22 nt, Human
agaucaguuagauagcuugaug

SEQ ID NO: 1047071 - RNA, 22 nt, Human
acugcccauuaugguagucacu

SEQ ID NO: 1047072 - RNA, 20 nt, Human
cccagggaccugagcuccau

SEQ ID NO: 1047073 - RNA, 22 nt, Human
aagccagauuucacucuuaauu

SEQ ID NO: 1047074 - RNA, 22 nt, Human
aggagggauagaaaaauacuug

SEQ ID NO: 1047075 - RNA, 22 nt, Human
cagggaaggcugcaaauguuaa

SEQ ID NO: 1047076 - RNA, 22 nt, Human
uggggagagguaucauugagau

SEQ ID NO: 1047077 - RNA, 17 nt, Human
ggcaguggaggaagaga

SEQ ID NO: 1047078 - RNA, 22 nt, Human
auacagaauucacuacaguuuc

SEQ ID NO: 1047079 - RNA, 22 nt, Human
augcuuuaaaugucuuuugcuu

SEQ ID NO: 1047080 - RNA, 22 nt, Human
ucagaauugucuggggaauguu

SEQ ID NO: 1047081 - RNA, 22 nt, Human
caugauaauuguuaacaaagua

SEQ ID NO: 1047082 - RNA, 22 nt, Human
uaaucuaccacuauugcaauau

SEQ ID NO: 1047083 - RNA, 22 nt, Human
gaaaaccaccucccaucaagca

SEQ ID NO: 1047084 - RNA, 22 nt, Human
auuaggcagggcaugguggcuc

SEQ ID NO: 1047085 - RNA, 22 nt, Human
auucauaaguaaaugauuaccu

SEQ ID NO: 1047086 - RNA, 22 nt, Human
uuacagaaaagggcuuuaagag

SEQ ID NO: 1047087 - RNA, 22 nt, Human
cagaaagcuuaggcaaguugga

SEQ ID NO: 1047088 - RNA, 22 nt, Human
ucagggaaaacaucccgccuaa

SEQ ID NO: 1047089 - RNA, 22 nt, Human
uuacagauggaucuagcaaaau

SEQ ID NO: 1047090 - RNA, 22 nt, Human
aauuccaaguagcaucccauca

SEQ ID NO: 1047091 - RNA, 22 nt, Human
aaauagcagccuuuaguuaaca

SEQ ID NO: 1047092 - RNA, 22 nt, Human
augcacaagcaagagauaaugg

SEQ ID NO: 1047093 - RNA, 22 nt, Human
ugggagagagaauucccagugg

SEQ ID NO: 1047094 - RNA, 22 nt, Human
uaaauaugcauguauccuuauc

SEQ ID NO: 1047095 - RNA, 22 nt, Human
ccagcuccugggucuuagucag

SEQ ID NO: 1047096 - RNA, 22 nt, Human
uucaccagaccugugagcuucc

SEQ ID NO: 1047097 - RNA, 22 nt, Human
auuaggcagugccauuguacgg

SEQ ID NO: 1047098 - RNA, 22 nt, Human
agggagaggcugaacuauccua

SEQ ID NO: 1047099 - RNA, 22 nt, Human
uauacuuuccugcaacuuugau

SEQ ID NO: 1047100 - RNA, 22 nt, Human
ccugcccacacagcaauuuuaa

SEQ ID NO: 1047101 - RNA, 22 nt, Human
acccagggcucaagcguaggca

SEQ ID NO: 1047102 - RNA, 22 nt, Human
ugcccaggcuggagugcagagg

SEQ ID NO: 1047103 - RNA, 22 nt, Human
uuugaagauuaugccagaguga

SEQ ID NO: 1047104 - RNA, 22 nt, Human
ugaaauagacacagugcuauac

SEQ ID NO: 1047105 - RNA, 22 nt, Human
acugcccacagugaaugguugg

SEQ ID NO: 1047106 - RNA, 22 nt, Human
ucuccacgugauggaguccagg

SEQ ID NO: 1047107 - RNA, 22 nt, Human
auuagaaaccaagaggcaggcu

SEQ ID NO: 1047108 - RNA, 22 nt, Human
ggauuugaauuguugaaaugau

SEQ ID NO: 1047109 - RNA, 22 nt, Human
agaugcugaauuauugugcuuu

SEQ ID NO: 1047110 - RNA, 22 nt, Human
cagaggcaggauaagaacugcg

SEQ ID NO: 1047111 - RNA, 23 nt, Human
uccaggagcaugcuggcuggcga

SEQ ID NO: 1047112 - RNA, 22 nt, Human
uaauuauagccgcuauuuugcu

SEQ ID NO: 1047113 - RNA, 22 nt, Human
auagaaauggcagcuggugcua

SEQ ID NO: 1047114 - RNA, 21 nt, Human
acuuuaauauacaugaggagg

SEQ ID NO: 1047115 - RNA, 22 nt, Human
acagguuugucugauguaauga

SEQ ID NO: 1047116 - RNA, 22 nt, Human
cuccagggagcuguggagguuu

SEQ ID NO: 1047117 - RNA, 22 nt, Human
uauacagaacugcacgugcacg

SEQ ID NO: 1047118 - RNA, 22 nt, Human
agauuucagaugcucggcaguu

SEQ ID NO: 1047119 - RNA, 22 nt, Human
ccagggcuggugggagaugcug

SEQ ID NO: 1047120 - RNA, 22 nt, Human
uuugaaguguuauuucuaucac

SEQ ID NO: 1047121 - RNA, 22 nt, Human
cauuaauauuguucuucuuuag

SEQ ID NO: 1047122 - RNA, 22 nt, Human
uccaaauacauuuacuguauuu

SEQ ID NO: 1047123 - RNA, 22 nt, Human
gaucugaaucaauagaauaacu

SEQ ID NO: 1047124 - RNA, 22 nt, Human
uccagggaagagcagaggcuac

SEQ ID NO: 1047125 - RNA, 22 nt, Human
guccaaauuuuucacauguaga

SEQ ID NO: 1047126 - RNA, 21 nt, Human
gaagacaaaugggaauagcug

SEQ ID NO: 1047127 - RNA, 22 nt, Human
aggagaggcaucaagaaaaucg

SEQ ID NO: 1047128 - RNA, 22 nt, Human
uccaauauggauaaaaggggcc

SEQ ID NO: 1047129 - RNA, 22 nt, Human
uuaauuacuaagcacaaugcaa

SEQ ID NO: 1047130 - RNA, 22 nt, Human
caagaucagggugccagaaugg

SEQ ID NO: 1047131 - RNA, 22 nt, Human
gcugcaccagcuccaccagggc

SEQ ID NO: 1047132 - RNA, 15 nt, Human
aaucagaaguguggc

SEQ ID NO: 1047133 - RNA, 22 nt, Human
caguccuuagucuggauggcuu

SEQ ID NO: 1047134 - RNA, 22 nt, Human
aagccucuggggccucaucugu

SEQ ID NO: 1047135 - RNA, 22 nt, Human
caaauucaaauuucaucagugu

SEQ ID NO: 1047136 - RNA, 22 nt, Human
guucuaauuuggggcuccuuag

SEQ ID NO: 1047137 - RNA, 22 nt, Human
agggcugcuuugcuaaauaugg

SEQ ID NO: 1047138 - RNA, 22 nt, Human
ggcauuaagaauaucauuaaaa

SEQ ID NO: 1047139 - RNA, 22 nt, Human
uuccuuagggaaagggauaagg

SEQ ID NO: 1047140 - RNA, 22 nt, Human
agcugcccagcuaggaagaagg

SEQ ID NO: 1047141 - RNA, 23 nt, Human
gaggagggucugacaaguguagc

SEQ ID NO: 1047142 - RNA, 23 nt, Human
gagauuuagcagacaaagcucuu

SEQ ID NO: 1047143 - RNA, 19 nt, Human
acuguaaggcauuuuuuuc

SEQ ID NO: 1047144 - RNA, 22 nt, Human
ugggagacuccagaacugaucc

SEQ ID NO: 1047145 - RNA, 22 nt, Human
ggggcugcucgccgcgcguuuc

SEQ ID NO: 1047146 - RNA, 20 nt, Human
gaaguccuuucacucuuccc

SEQ ID NO: 1047147 - RNA, 23 nt, Human
gaaucaguggcuaacaaggaaac

SEQ ID NO: 1047148 - RNA, 22 nt, Human
cuggcuuuggucaugugaucau

SEQ ID NO: 1047149 - RNA, 22 nt, Human
acaccaccgucccagccuccug

SEQ ID NO: 1047150 - RNA, 22 nt, Human
guuaggcaguuuucuucauucu

SEQ ID NO: 1047151 - RNA, 20 nt, Human
gaguccuuaugggcugaggu

SEQ ID NO: 1047152 - RNA, 22 nt, Human
acauaauaccuaggacaguuug

SEQ ID NO: 1047153 - RNA, 22 nt, Human
aagccaagaguuaacuauuugu

SEQ ID NO: 1047154 - RNA, 22 nt, Human
auauaauuguucugaaguguuu

SEQ ID NO: 1047155 - RNA, 18 nt, Human
auauguuaauuagguagg

SEQ ID NO: 1047156 - RNA, 20 nt, Human
cuccaggggaagagccuucc

SEQ ID NO: 1047157 - RNA, 23 nt, Human
uccagggauuaaugaagucaguc

SEQ ID NO: 1047158 - RNA, 22 nt, Human
aguaaacauuucagauuuauuu

SEQ ID NO: 1047159 - RNA, 22 nt, Human
aaucaugugggauagucugcuc

SEQ ID NO: 1047160 - RNA, 22 nt, Human
aggugaaguugaggaggcagaa

SEQ ID NO: 1047161 - RNA, 22 nt, Human
cagguucuggguccuggguccu

SEQ ID NO: 1047162 - RNA, 21 nt, Human
auggcuuuuuuaaagcuugug

SEQ ID NO: 1047163 - RNA, 22 nt, Human
ugcuuuaaccaucuuguuugga

SEQ ID NO: 1047164 - RNA, 17 nt, Human
gggaaguggagaaagcu

SEQ ID NO: 1047165 - RNA, 22 nt, Human
ccagggcucugcuucugccaug

SEQ ID NO: 1047166 - RNA, 22 nt, Human
aacauuggauauuuauuaaaag

SEQ ID NO: 1047167 - RNA, 22 nt, Human
agucaccaggguuugcuggguu

SEQ ID NO: 1047168 - RNA, 22 nt, Human
aauucucagguaaaaguuaagu

SEQ ID NO: 1047169 - RNA, 21 nt, Human
gccuccagccagauggccucc

SEQ ID NO: 1047170 - RNA, 17 nt, Human
caauuucauagguuuug

SEQ ID NO: 1047171 - RNA, 22 nt, Human
uuugaagaccuuaucucuaaau

SEQ ID NO: 1047172 - RNA, 22 nt, Human
gggggaggugaaugcaauaagg

SEQ ID NO: 1047173 - RNA, 22 nt, Human
agguacaaaagaguauaugaga

SEQ ID NO: 1047174 - RNA, 22 nt, Human
ugggcugcuucuauuggugguc

SEQ ID NO: 1047175 - RNA, 22 nt, Human
auccagggauaaaaguaagguu

SEQ ID NO: 1047176 - RNA, 22 nt, Human
acuauacauugaauguuaaggu

SEQ ID NO: 1047177 - RNA, 22 nt, Human
gauuuacagguuagguccugua

SEQ ID NO: 1047178 - RNA, 22 nt, Human
ugaaaauggccugaagaagcaa

SEQ ID NO: 1047179 - RNA, 22 nt, Human
cagggacaaagugagaaaggaa

SEQ ID NO: 1047180 - RNA, 22 nt, Human
aagcagcugugugacauaaucu

SEQ ID NO: 1047181 - RNA, 22 nt, Human
uuuaggcauugaauuagaauag

SEQ ID NO: 1047182 - RNA, 22 nt, Human
agcauuuagucuuuauugcagc

SEQ ID NO: 1047183 - RNA, 22 nt, Human
gcaggcuccaaggccugggaga

SEQ ID NO: 1047184 - RNA, 22 nt, Human
gaugaaaaucuugagaugucga

SEQ ID NO: 1047185 - RNA, 22 nt, Human
aaauacugucucugagagagcc

SEQ ID NO: 1047186 - RNA, 22 nt, Human
ucugcccagggacaggacacag

SEQ ID NO: 1047187 - RNA, 22 nt, Human
gcuccaggagcucacagcucgc

SEQ ID NO: 1047188 - RNA, 22 nt, Human
uaccagccucaguugugagccc

SEQ ID NO: 1047189 - RNA, 22 nt, Human
ucagcauaucuugagcuucaug

SEQ ID NO: 1047190 - RNA, 22 nt, Human
aggcagcaugggccccagcucc

SEQ ID NO: 1047191 - RNA, 22 nt, Human
gcuuuaaugcaauuucaccuca

SEQ ID NO: 1047192 - RNA, 22 nt, Human
uaagagaauguuguggcuaggu

SEQ ID NO: 1047193 - RNA, 22 nt, Human
uccagggaaggugugaggcugg

SEQ ID NO: 1047194 - RNA, 20 nt, Human
uggccuuuaaauaguauucc

SEQ ID NO: 1047195 - RNA, 18 nt, Human
uuccuccacagagcgcug

SEQ ID NO: 1047196 - RNA, 22 nt, Human
cagggacaaacaagguugggga

SEQ ID NO: 1047197 - RNA, 21 nt, Human
auacagaaggcagacucucuc

SEQ ID NO: 1047198 - RNA, 22 nt, Human
augaaacagugaauuagucaag

SEQ ID NO: 1047199 - RNA, 22 nt, Human
uccuccagggggaucuucagcc

SEQ ID NO: 1047200 - RNA, 22 nt, Human
cuagauccgcagguuuucagug

SEQ ID NO: 1047201 - RNA, 22 nt, Human
ugggcugcagagcccggccuuc

SEQ ID NO: 1047202 - RNA, 22 nt, Human
agccagggacgcugcaggcuac

SEQ ID NO: 1047203 - RNA, 22 nt, Human
acaacuuuaauggguuucagcu

SEQ ID NO: 1047204 - RNA, 22 nt, Human
uuaguacugauagggucaauca

SEQ ID NO: 1047205 - RNA, 22 nt, Human
cauagaaacugagacaaggauu

SEQ ID NO: 1047206 - RNA, 22 nt, Human
gaggcagcgggucaggaccgug

SEQ ID NO: 1047207 - RNA, 22 nt, Human
uuucagacagauucuucucagu

SEQ ID NO: 1047208 - RNA, 22 nt, Human
uuccuuagugacuucuagcuac

SEQ ID NO: 1047209 - RNA, 22 nt, Human
uucuuuuacauuaagauuucag

SEQ ID NO: 1047210 - RNA, 22 nt, Human
uuuaacuuaaucugcuugauga

SEQ ID NO: 1047211 - RNA, 22 nt, Human
gcugcccauugcucucccacuc

SEQ ID NO: 1047212 - RNA, 23 nt, Human
ccugcccaggaauccggcggcgu

SEQ ID NO: 1047213 - RNA, 22 nt, Human
ugggcccagguccugggagaag

SEQ ID NO: 1047214 - RNA, 22 nt, Human
gaauuucauuuguuuccuacca

SEQ ID NO: 1047215 - RNA, 22 nt, Human
cugcccaccacaccugcuccug

SEQ ID NO: 1047216 - RNA, 22 nt, Human
ggagacaauggaggccaaaaga

SEQ ID NO: 1047217 - RNA, 22 nt, Human
cuggcuuucuauuuggugcuau

SEQ ID NO: 1047218 - RNA, 22 nt, Human
cuacagaagaaacuaucacuau

SEQ ID NO: 1047219 - RNA, 22 nt, Human
uggcauuucuguuagacucuca

SEQ ID NO: 1047220 - RNA, 22 nt, Human
uaaguccuagcuuugguaggaa

SEQ ID NO: 1047221 - RNA, 22 nt, Human
cuggauuugccuauggugcuuu

SEQ ID NO: 1047222 - RNA, 22 nt, Human
accagggaccgccacacugcaa

SEQ ID NO: 1047223 - RNA, 22 nt, Human
uggcuuuagguugcauguuucu

SEQ ID NO: 1047224 - RNA, 22 nt, Human
uggcuuuauaaauccacugguu

SEQ ID NO: 1047225 - RNA, 22 nt, Human
cccagggagagcgcggaggcgg

SEQ ID NO: 1047226 - RNA, 22 nt, Human
ccagagagcuacaaggcauaaa

SEQ ID NO: 1047227 - RNA, 23 nt, Human
caggagggaaugaaguuagacaa

SEQ ID NO: 1047228 - RNA, 22 nt, Human
acuuugaaggggaacauuuuaa

SEQ ID NO: 1047229 - RNA, 22 nt, Human
caccuucagaaugcuccaggca

SEQ ID NO: 1047230 - RNA, 22 nt, Human
aaaucaguaaauguucauuaac

SEQ ID NO: 1047231 - RNA, 22 nt, Human
ugcaacuuguuuggagagaaag

SEQ ID NO: 1047232 - RNA, 22 nt, Human
acuuauuagcugugugaccuug

SEQ ID NO: 1047233 - RNA, 22 nt, Human
gcagggaaggggacggaaccag

SEQ ID NO: 1047234 - RNA, 22 nt, Human
agggaggauaguagucaguuua

SEQ ID NO: 1047235 - RNA, 22 nt, Human
agacaugguugagaauaaagug

SEQ ID NO: 1047236 - RNA, 22 nt, Human
gauggcuuugugcaccaugauu

SEQ ID NO: 1047237 - RNA, 22 nt, Human
cucuccagaucugcugagccag

SEQ ID NO: 1047238 - RNA, 22 nt, Human
cccagggacucgggauucuagg

SEQ ID NO: 1047239 - RNA, 22 nt, Human
cuccagguagcuaaguccuggg

SEQ ID NO: 1047240 - RNA, 22 nt, Human
uuuacagaugaggauacugagg

SEQ ID NO: 1047241 - RNA, 22 nt, Human
auauacaaagggcaaccucgcu

SEQ ID NO: 1047242 - RNA, 23 nt, Human
ccagcccuccaccagcucuaggc

SEQ ID NO: 1047243 - RNA, 22 nt, Human
ugguuuaauuuccauuuccuug

SEQ ID NO: 1047244 - RNA, 22 nt, Human
cagccucugacaccacagucgu

SEQ ID NO: 1047245 - RNA, 22 nt, Human
accagcuccaggccccugcuga

SEQ ID NO: 1047246 - RNA, 23 nt, Human
uggggagaguuacccuggaagcg

SEQ ID NO: 1047247 - RNA, 22 nt, Human
uccuccuccucacagucaccug

SEQ ID NO: 1047248 - RNA, 22 nt, Human
aguuacagugaccauuuauuua

SEQ ID NO: 1047249 - RNA, 22 nt, Human
agaucugaggguccaagggagg

SEQ ID NO: 1047250 - RNA, 22 nt, Human
gcugcccaggagagguggggcu

SEQ ID NO: 1047251 - RNA, 22 nt, Human
ucacauaaauuauacaauuuca

SEQ ID NO: 1047252 - RNA, 23 nt, Human
uccaagggcuacaaacacagacc

SEQ ID NO: 1047253 - RNA, 22 nt, Human
cccagggauuauaaaggugaaa

SEQ ID NO: 1047254 - RNA, 22 nt, Human
cagggaagagccgaugcugcag

SEQ ID NO: 1047255 - RNA, 22 nt, Human
gcccaggaaguugaggcugccg

SEQ ID NO: 1047256 - RNA, 22 nt, Human
uagcagaaacuguuacagaagg

SEQ ID NO: 1047257 - RNA, 22 nt, Human
uacaauacuuaaccuauuuugc

SEQ ID NO: 1047258 - RNA, 22 nt, Human
cugggcccaggcggcucucgga

SEQ ID NO: 1047259 - RNA, 22 nt, Human
acugcccagaagagaugaaagu

SEQ ID NO: 1047260 - RNA, 22 nt, Human
auagaauuugcacuaaaucugc

SEQ ID NO: 1047261 - RNA, 23 nt, Human
cauaaaauauuaguaugguagca

SEQ ID NO: 1047262 - RNA, 22 nt, Human
ugcaguggaggccgugagacag

SEQ ID NO: 1047263 - RNA, 21 nt, Human
gccagggaguuaaagagucuu

SEQ ID NO: 1047264 - RNA, 20 nt, Human
uuuaggcauuacucuuuugu

SEQ ID NO: 1047265 - RNA, 22 nt, Human
gcugcccugacuccagcagccu

SEQ ID NO: 1047266 - RNA, 22 nt, Human
agggcccuccccgcucagggca

SEQ ID NO: 1047267 - RNA, 22 nt, Human
agcccuggagcaaaggugucuu

SEQ ID NO: 1047268 - RNA, 22 nt, Human
ccagaauuuggaucaugauuuu

SEQ ID NO: 1047269 - RNA, 22 nt, Human
acaggauuagcaaguaaucagg

SEQ ID NO: 1047270 - RNA, 22 nt, Human
acaugucuuuuaaagucuaaua

SEQ ID NO: 1047271 - RNA, 22 nt, Human
ugcagucuccaccuccugggug

SEQ ID NO: 1047272 - RNA, 22 nt, Human
agggcugcuaccuuaaucaguu

SEQ ID NO: 1047273 - RNA, 22 nt, Human
gggaggagggugcuggcuaaac

SEQ ID NO: 1047274 - RNA, 22 nt, Human
aggaucugugagugcugcagac

SEQ ID NO: 1047275 - RNA, 22 nt, Human
gugaauaaaacaccugccaaga

SEQ ID NO: 1047276 - RNA, 22 nt, Human
gaaugaaaaccuuggcucaaau

SEQ ID NO: 1047277 - RNA, 22 nt, Human
cuagaaauguagauucuuagug

SEQ ID NO: 1047278 - RNA, 22 nt, Human
auaaaauuugcuacuguuaaau

SEQ ID NO: 1047279 - RNA, 22 nt, Human
uccagguagauuuauuccagcc

SEQ ID NO: 1047280 - RNA, 22 nt, Human
ugcauaauacguuuccuauaac

SEQ ID NO: 1047281 - RNA, 22 nt, Human
ccacguccagcuaauuuucgua

SEQ ID NO: 1047282 - RNA, 22 nt, Human
guagaaauuccauuuacuuuga

SEQ ID NO: 1047283 - RNA, 22 nt, Human
uaagacuucauuaguaauaugg

SEQ ID NO: 1047284 - RNA, 22 nt, Human
ucauagaaugaguuaaugaacu

SEQ ID NO: 1047285 - RNA, 22 nt, Human
ccguagcacaugcuccuggggc

SEQ ID NO: 1047286 - RNA, 22 nt, Human
ugggagagaauaaucaauaggu

SEQ ID NO: 1047287 - RNA, 22 nt, Human
caggcagcgcucguggccuggc

SEQ ID NO: 1047288 - RNA, 22 nt, Human
auuaggcagacaacguagccgg

SEQ ID NO: 1047289 - RNA, 22 nt, Human
gacauaauccuccucaccuacu

SEQ ID NO: 1047290 - RNA, 22 nt, Human
gcugccuccacuggcucccagu

SEQ ID NO: 1047291 - RNA, 22 nt, Human
ugggagagauaggcuucuggac

SEQ ID NO: 1047292 - RNA, 22 nt, Human
ggggaggagccauguaacuagu

SEQ ID NO: 1047293 - RNA, 21 nt, Human
ucuauucauuacaguuauuug

SEQ ID NO: 1047294 - RNA, 22 nt, Human
auaaagucuaccguauuaaaga

SEQ ID NO: 1047295 - RNA, 22 nt, Human
cagaagucacccucagaauaac

SEQ ID NO: 1047296 - RNA, 22 nt, Human
ucagccuccgaaagugcuggga

SEQ ID NO: 1047297 - RNA, 22 nt, Human
gaggagggcaguuccucuuuua

SEQ ID NO: 1047298 - RNA, 22 nt, Human
gcuggauccacaaauaacuuug

SEQ ID NO: 1047299 - RNA, 22 nt, Human
cccagggagcuuggagaacggg

SEQ ID NO: 1047300 - RNA, 22 nt, Human
aagauauagauaaaacuaugca

SEQ ID NO: 1047301 - RNA, 18 nt, Human
ucugcccaggacuuggac

SEQ ID NO: 1047302 - RNA, 22 nt, Human
ugucaccagcugcuccucagga

SEQ ID NO: 1047303 - RNA, 22 nt, Human
cccaggaaaagcagugccagca

SEQ ID NO: 1047304 - RNA, 22 nt, Human
ucagcacugaaauucuucacau

SEQ ID NO: 1047305 - RNA, 19 nt, Human
uaccagccuccugccugau

SEQ ID NO: 1047306 - RNA, 22 nt, Human
uuacagaaaagggguuguccuu

SEQ ID NO: 1047307 - RNA, 22 nt, Human
ggcccugucugucugcccagcu

SEQ ID NO: 1047308 - RNA, 22 nt, Human
uguacaaucugaugauguaugg

SEQ ID NO: 1047309 - RNA, 22 nt, Human
aaauagauugcugaggcauuac

SEQ ID NO: 1047310 - RNA, 22 nt, Human
aaaggugacugcagcagcuauu

SEQ ID NO: 1047311 - RNA, 22 nt, Human
uaucagaacacauguuuugcag

SEQ ID NO: 1047312 - RNA, 22 nt, Human
aaaguucaugguguuauagaaa

SEQ ID NO: 1047313 - RNA, 22 nt, Human
aaguuucaaauauaaaauuaca

SEQ ID NO: 1047314 - RNA, 22 nt, Human
acagaauuuaaagcucuagacu

SEQ ID NO: 1047315 - RNA, 22 nt, Human
cucuucccagcuccacgagagg

SEQ ID NO: 1047316 - RNA, 22 nt, Human
acuagaaauuacucagaauaaa

SEQ ID NO: 1047317 - RNA, 22 nt, Human
ggcccagcugggcggggacacg

SEQ ID NO: 1047318 - RNA, 22 nt, Human
uauuuaucgagugucuacuaug

SEQ ID NO: 1047319 - RNA, 22 nt, Human
ggggagaguccuuuccaguucc

SEQ ID NO: 1047320 - RNA, 23 nt, Human
gggagccauggguggucauggag

SEQ ID NO: 1047321 - RNA, 22 nt, Human
accagcucagaagccagaaaga

SEQ ID NO: 1047322 - RNA, 22 nt, Human
aaaagcaguuaucugggaggaa

SEQ ID NO: 1047323 - RNA, 22 nt, Human
cuggauuuaggacuaguccaag

SEQ ID NO: 1047324 - RNA, 22 nt, Human
auaacaugagccagauugaaag

SEQ ID NO: 1047325 - RNA, 22 nt, Human
ugaggcaggacugagcgggaug

SEQ ID NO: 1047326 - RNA, 22 nt, Human
uuugaagacagaucaauauaag

SEQ ID NO: 1047327 - RNA, 22 nt, Human
gcagccucaaacuccccagcuc

SEQ ID NO: 1047328 - RNA, 22 nt, Human
gcaacuuuagggccagcaagua

SEQ ID NO: 1047329 - RNA, 22 nt, Human
uuuaggcaagggcaagauuauc

SEQ ID NO: 1047330 - RNA, 22 nt, Human
gcaggucuaucaggcugcaggu

SEQ ID NO: 1047331 - RNA, 22 nt, Human
ucagaaaauaacuguuaguuug

SEQ ID NO: 1047332 - RNA, 23 nt, Human
guaaaauacgcagugcaguguga

SEQ ID NO: 1047333 - RNA, 22 nt, Human
gaaguccuccuaucuugcucuu

SEQ ID NO: 1047334 - RNA, 22 nt, Human
ccuauacagccucagcugagau

SEQ ID NO: 1047335 - RNA, 22 nt, Human
ccaaacaaauccccauucuuag

SEQ ID NO: 1047336 - RNA, 22 nt, Human
cuaagacaugcccugcaugaua

SEQ ID NO: 1047337 - RNA, 22 nt, Human
gguggagagcuggaugagaggu

SEQ ID NO: 1047338 - RNA, 22 nt, Human
caguccuugcucaaagucuaca

SEQ ID NO: 1047339 - RNA, 23 nt, Human
agccucuuuucuccugcccugca

SEQ ID NO: 1047340 - RNA, 21 nt, Human
cauuuacaugacagauugguu

SEQ ID NO: 1047341 - RNA, 22 nt, Human
uuuaggcagcuacauacuaacu

SEQ ID NO: 1047342 - RNA, 23 nt, Human
aguacaauaaguauaauucuuuc

SEQ ID NO: 1047343 - RNA, 22 nt, Human
aaaagcagagacucuggagcua

SEQ ID NO: 1047344 - RNA, 22 nt, Human
cccagggaaggcagauggagga

SEQ ID NO: 1047345 - RNA, 22 nt, Human
caaagccauagaguagauaaga

SEQ ID NO: 1047346 - RNA, 22 nt, Human
cuuaggcagggcuggaagaucu

SEQ ID NO: 1047347 - RNA, 22 nt, Human
ccagcccugauuagagaauguc

SEQ ID NO: 1047348 - RNA, 22 nt, Human
aucuaaacagguguucuuuaga

SEQ ID NO: 1047349 - RNA, 20 nt, Human
acaauacagguugugucuga

SEQ ID NO: 1047350 - RNA, 22 nt, Human
ccagcccuguuuaugugucacu

SEQ ID NO: 1047351 - RNA, 22 nt, Human
aaucagaaauucuacaucacaa

SEQ ID NO: 1047352 - RNA, 22 nt, Human
gcugcucugggucugcccagcu

SEQ ID NO: 1047353 - RNA, 21 nt, Human
caaucaguuggcauuugagca

SEQ ID NO: 1047354 - RNA, 22 nt, Human
aaaguccugacugcaggggaug

SEQ ID NO: 1047355 - RNA, 22 nt, Human
gaucagaauuuacuuauaauug

SEQ ID NO: 1047356 - RNA, 22 nt, Human
agccaacuaggagauuaaggua

SEQ ID NO: 1047357 - RNA, 22 nt, Human
uaaaaccauuccugcuuucaug

SEQ ID NO: 1047358 - RNA, 22 nt, Human
cagcacagggacaauagcagau

SEQ ID NO: 1047359 - RNA, 22 nt, Human
ucagggaguguuggcaggauca

SEQ ID NO: 1047360 - RNA, 22 nt, Human
aaaguccuguuugaaggaccug

SEQ ID NO: 1047361 - RNA, 22 nt, Human
uaaagcaguguugggucggacg

SEQ ID NO: 1047362 - RNA, 22 nt, Human
guggggaggccuaagcaaguug

SEQ ID NO: 1047363 - RNA, 23 nt, Human
aauaucaaggugauguucccaga

SEQ ID NO: 1047364 - RNA, 22 nt, Human
cugcccuguaucuucucccaau

SEQ ID NO: 1047365 - RNA, 22 nt, Human
gcccaggaguuggaggcugcag

SEQ ID NO: 1047366 - RNA, 22 nt, Human
ccagggaaucucugaguguguu

SEQ ID NO: 1047367 - RNA, 22 nt, Human
aagaaaagaaaccugaggcuuu

SEQ ID NO: 1047368 - RNA, 22 nt, Human
cggagaggaccugcaacucgcu

SEQ ID NO: 1047369 - RNA, 22 nt, Human
aauucuaaauguaauuuagaau

SEQ ID NO: 1047370 - RNA, 19 nt, Human
aacuguaauuaauacccua

SEQ ID NO: 1047371 - RNA, 22 nt, Human
accagcucagagcaggcuccug

SEQ ID NO: 1047372 - RNA, 22 nt, Human
ucugcccagccagacccaaggu

SEQ ID NO: 1047373 - RNA, 22 nt, Human
agaaaagaggcuuucuaagcau

SEQ ID NO: 1047374 - RNA, 22 nt, Human
uggcuauugagugaucucuaga

SEQ ID NO: 1047375 - RNA, 22 nt, Human
gggagagguuacccgagcaacu

SEQ ID NO: 1047376 - RNA, 22 nt, Human
gcccaggaaagauagggccuca

SEQ ID NO: 1047377 - RNA, 22 nt, Human
cagggacauugguggccagguu

SEQ ID NO: 1047378 - RNA, 22 nt, Human
uaguccuuacuuacuagaauaa

SEQ ID NO: 1047379 - RNA, 22 nt, Human
aagagagggauuugguuuauug

SEQ ID NO: 1047380 - RNA, 20 nt, Human
uccaagggcagcagaaucag

SEQ ID NO: 1047381 - RNA, 22 nt, Human
aggagggagcuuaagccaggca

SEQ ID NO: 1047382 - RNA, 22 nt, Human
augcuuaacuuccuagucuaua

SEQ ID NO: 1047383 - RNA, 22 nt, Human
agauaaaaugguucaaaggcua

SEQ ID NO: 1047384 - RNA, 19 nt, Human
ggagaggcuggagggaugc

SEQ ID NO: 1047385 - RNA, 22 nt, Human
augcaaaauaaggcagaaacau

SEQ ID NO: 1047386 - RNA, 22 nt, Human
agauuuacugagaacugauuac

SEQ ID NO: 1047387 - RNA, 22 nt, Human
uuacuacugcuuuacuacuggg

SEQ ID NO: 1047388 - RNA, 22 nt, Human
gaguccuucuggcuggcaggau

SEQ ID NO: 1047389 - RNA, 18 nt, Human
caggcccugucuggccuc

SEQ ID NO: 1047390 - RNA, 22 nt, Human
uuuacagaaugucaauuucuau

SEQ ID NO: 1047391 - RNA, 22 nt, Human
cuuaauuacccaaugugguagg

SEQ ID NO: 1047392 - RNA, 22 nt, Human
cuaauuauguuguuauaaucaa

SEQ ID NO: 1047393 - RNA, 22 nt, Human
uucuauacaaagauuucucaca

SEQ ID NO: 1047394 - RNA, 21 nt, Human
uuuuauugaugaauggccacu

SEQ ID NO: 1047395 - RNA, 22 nt, Human
ggggcagauggaacagagcaca

SEQ ID NO: 1047396 - RNA, 23 nt, Human
uacuuaggguuuagaucugacug

SEQ ID NO: 1047397 - RNA, 20 nt, Human
uacuggauuagggcucaccc

SEQ ID NO: 1047398 - RNA, 22 nt, Human
auuaggcauucaugcagcuccu

SEQ ID NO: 1047399 - RNA, 22 nt, Human
ucagggaacaauguuauggcuu

SEQ ID NO: 1047400 - RNA, 22 nt, Human
ggggaggaagcuggaacacggg

SEQ ID NO: 1047401 - RNA, 22 nt, Human
caaagcagagccagagcuuguc

SEQ ID NO: 1047402 - RNA, 22 nt, Human
aauaaaauggucaguuuucuca

SEQ ID NO: 1047403 - RNA, 22 nt, Human
ggagauggcuggcagguagaug

SEQ ID NO: 1047404 - RNA, 22 nt, Human
gaaaauagcagauagaccaaug

SEQ ID NO: 1047405 - RNA, 22 nt, Human
auacagaacaagccucaccucc

SEQ ID NO: 1047406 - RNA, 22 nt, Human
cuggaucaugcauugcuugucc

SEQ ID NO: 1047407 - RNA, 22 nt, Human
ccagcuauugcuguguaacagu

SEQ ID NO: 1047408 - RNA, 23 nt, Human
ggagacaagguaccacguuaaca

SEQ ID NO: 1047409 - RNA, 22 nt, Human
uggauuuaguucuucacaggcc

SEQ ID NO: 1047410 - RNA, 22 nt, Human
cagggagaagucuggucagucc

SEQ ID NO: 1047411 - RNA, 22 nt, Human
ggagaggggaacuuguugcuug

SEQ ID NO: 1047412 - RNA, 22 nt, Human
gaggagggagaauuaggcuuaa

SEQ ID NO: 1047413 - RNA, 23 nt, Human
ggggaaguggcagugagugaggc

SEQ ID NO: 1047414 - RNA, 22 nt, Human
agaaaugcucaggucaacuuaa

SEQ ID NO: 1047415 - RNA, 17 nt, Human
gcagccucuugguagug

SEQ ID NO: 1047416 - RNA, 22 nt, Human
aaaguccuuuuugccaugcaag

SEQ ID NO: 1047417 - RNA, 22 nt, Human
ugaauaauuaugggaguccuaa

SEQ ID NO: 1047418 - RNA, 22 nt, Human
agagauucauguuuacuguagg

SEQ ID NO: 1047419 - RNA, 22 nt, Human
uccugcagccacugcaggcaga

SEQ ID NO: 1047420 - RNA, 22 nt, Human
cucuaacacuguaaugcuuucu

SEQ ID NO: 1047421 - RNA, 22 nt, Human
uuuucauuuuuguagaugcaag

SEQ ID NO: 1047422 - RNA, 22 nt, Human
cuugacauuaguuaugcagaua

SEQ ID NO: 1047423 - RNA, 22 nt, Human
aaguccauucuuccagccagcu

SEQ ID NO: 1047424 - RNA, 22 nt, Human
caauuucacuaauaauauuuac

SEQ ID NO: 1047425 - RNA, 22 nt, Human
cauuucaagcauugacuucuau

SEQ ID NO: 1047426 - RNA, 22 nt, Human
ucaauaaaucccucugacccug

SEQ ID NO: 1047427 - RNA, 22 nt, Human
aggauuuagauuuggaggaacu

SEQ ID NO: 1047428 - RNA, 22 nt, Human
uuacagaagugaaggccuuuaa

SEQ ID NO: 1047429 - RNA, 22 nt, Human
ugaggcagugcugggaagccug

SEQ ID NO: 1047430 - RNA, 21 nt, Human
aaagaaucauggguaauuuca

SEQ ID NO: 1047431 - RNA, 22 nt, Human
uacuauaccauguaagauauga

SEQ ID NO: 1047432 - RNA, 22 nt, Human
ugggagagaauucuggugacug

SEQ ID NO: 1047433 - RNA, 22 nt, Human
ucccagggucaguggugaggcc

SEQ ID NO: 1047434 - RNA, 22 nt, Human
ucuggaucggguuccucagguc

SEQ ID NO: 1047435 - RNA, 22 nt, Human
ccagagagaaaauggagggcca

SEQ ID NO: 1047436 - RNA, 22 nt, Human
gaguccuugacacauaguaggu

SEQ ID NO: 1047437 - RNA, 17 nt, Human
agaugcuggccacaugu

SEQ ID NO: 1047438 - RNA, 23 nt, Human
ucagccucuuaggacuucucacc

SEQ ID NO: 1047439 - RNA, 22 nt, Human
gcugcccacagcggguguuucg

SEQ ID NO: 1047440 - RNA, 22 nt, Human
ucuccaggcuuaaucucagcuu

SEQ ID NO: 1047441 - RNA, 22 nt, Human
cagggagaggcugguggaguaa

SEQ ID NO: 1047442 - RNA, 22 nt, Human
auggcuuaagaaugcuuuugug

SEQ ID NO: 1047443 - RNA, 22 nt, Human
ugggcccaucauugcugugggc

SEQ ID NO: 1047444 - RNA, 22 nt, Human
ccugcccaggcccuaaguuagg

SEQ ID NO: 1047445 - RNA, 22 nt, Human
gauuucaaagguucugcaugcc

SEQ ID NO: 1047446 - RNA, 22 nt, Human
augcaccugaacuccaucagcu

SEQ ID NO: 1047447 - RNA, 22 nt, Human
uuuuauguuccucuuuaugcga

SEQ ID NO: 1047448 - RNA, 22 nt, Human
ugcccuggcucuccacuaguuu

SEQ ID NO: 1047449 - RNA, 22 nt, Human
agguguggcuggggcagaggcc

SEQ ID NO: 1047450 - RNA, 22 nt, Human
agggcccagcccuugcuggucu

SEQ ID NO: 1047451 - RNA, 22 nt, Human
gcugcccucccagggcaagcuu

SEQ ID NO: 1047452 - RNA, 22 nt, Human
ucagggaaacagguuuucccuu

SEQ ID NO: 1047453 - RNA, 22 nt, Human
uccagccuccuauuuacccuaa

SEQ ID NO: 1047454 - RNA, 22 nt, Human
agacaacaucacuaaagcugag

SEQ ID NO: 1047455 - RNA, 22 nt, Human
uccagggaugguaaugagcagu

SEQ ID NO: 1047456 - RNA, 22 nt, Human
caagauuugccaguggccaacu

SEQ ID NO: 1047457 - RNA, 22 nt, Human
uuauacuuuauacuacaucauu

SEQ ID NO: 1047458 - RNA, 22 nt, Human
ggggcugcugguauuuccaguu

SEQ ID NO: 1047459 - RNA, 22 nt, Human
caugguuuauuagagcuuauuu

SEQ ID NO: 1047460 - RNA, 22 nt, Human
uucagaaagguuaaucuggauu

SEQ ID NO: 1047461 - RNA, 22 nt, Human
cagagacauucaguaaauuauc

SEQ ID NO: 1047462 - RNA, 17 nt, Human
uuuucuccugcccauuc

SEQ ID NO: 1047463 - RNA, 22 nt, Human
gggcccagcacuggcugggauc

SEQ ID NO: 1047464 - RNA, 22 nt, Human
uugguacaaugugcuagguagg

SEQ ID NO: 1047465 - RNA, 22 nt, Human
aaguccuuucucauggaggaau

SEQ ID NO: 1047466 - RNA, 22 nt, Human
cauuuacagcagacugaugaaa

SEQ ID NO: 1047467 - RNA, 22 nt, Human
cagcucugaggaacacuccuuu

SEQ ID NO: 1047468 - RNA, 22 nt, Human
cuggcaguauuaagagaaguga

SEQ ID NO: 1047469 - RNA, 22 nt, Human
auugauggcggccucuccauau

SEQ ID NO: 1047470 - RNA, 22 nt, Human
cccagggaggcccaggcucugc

SEQ ID NO: 1047471 - RNA, 22 nt, Human
cacagggaguuacagaagcacu

SEQ ID NO: 1047472 - RNA, 22 nt, Human
ugaaauagaaaaacaggcuucu

SEQ ID NO: 1047473 - RNA, 22 nt, Human
uugcacauguugguucuugaaa

SEQ ID NO: 1047474 - RNA, 22 nt, Human
aaguucuaauuuugcauucagg

SEQ ID NO: 1047475 - RNA, 22 nt, Human
gaagaauccaugcuaauuuacc

SEQ ID NO: 1047476 - RNA, 20 nt, Human
uccagggcaacuagagugug

SEQ ID NO: 1047477 - RNA, 20 nt, Human
auucuacaagaauaagcaug

SEQ ID NO: 1047478 - RNA, 22 nt, Human
ucuuuaaugugauuguaauuau

SEQ ID NO: 1047479 - RNA, 22 nt, Human
uauauacuuucuuccuggguag

SEQ ID NO: 1047480 - RNA, 22 nt, Human
uagauauaucugucauacuggu

SEQ ID NO: 1047481 - RNA, 22 nt, Human
caaugucaugauuuuccauuag

SEQ ID NO: 1047482 - RNA, 22 nt, Human
ugcaguggaagagguggagauc

SEQ ID NO: 1047483 - RNA, 22 nt, Human
ggacagagcagacgagcagcgg

SEQ ID NO: 1047484 - RNA, 22 nt, Human
agcccuggaccuuagcccccac

SEQ ID NO: 1047485 - RNA, 22 nt, Human
gcagggaaacaggugcuaagga

SEQ ID NO: 1047486 - RNA, 22 nt, Human
augccaaauucucagccucuuu

SEQ ID NO: 1047487 - RNA, 22 nt, Human
auuuaguguauucuaauaugug

SEQ ID NO: 1047488 - RNA, 22 nt, Human
gccagccugugggggcucugug

SEQ ID NO: 1047489 - RNA, 22 nt, Human
aucagaaaauacccaguguuua

SEQ ID NO: 1047490 - RNA, 22 nt, Human
ugcugcccguaccugugcacuu

SEQ ID NO: 1047491 - RNA, 22 nt, Human
gaggcugcuguuagcccugggc

SEQ ID NO: 1047492 - RNA, 22 nt, Human
cugaauaauguucucuuguaug

SEQ ID NO: 1047493 - RNA, 22 nt, Human
aaucagaauuuguccccugagu

SEQ ID NO: 1047494 - RNA, 23 nt, Human
uguaggucugccuuaucugcugc

SEQ ID NO: 1047495 - RNA, 22 nt, Human
cucuccagggguagaugccuuc

SEQ ID NO: 1047496 - RNA, 22 nt, Human
cagucaccuugaggacucagac

SEQ ID NO: 1047497 - RNA, 19 nt, Human
uuucagacucaucuccagc

SEQ ID NO: 1047498 - RNA, 17 nt, Human
aagacaagacaaaugca

SEQ ID NO: 1047499 - RNA, 22 nt, Human
gggagacaagaaguagccugcu

SEQ ID NO: 1047500 - RNA, 22 nt, Human
aggaagugggaagggucugcca

SEQ ID NO: 1047501 - RNA, 22 nt, Human
cugcccggagcuggcaaaggcu

SEQ ID NO: 1047502 - RNA, 22 nt, Human
agagucugccuuuuucuccugc

SEQ ID NO: 1047503 - RNA, 22 nt, Human
cuagaaauauuuuacagucaag

SEQ ID NO: 1047504 - RNA, 22 nt, Human
gcuucacacuaaaaauguuaaa

SEQ ID NO: 1047505 - RNA, 22 nt, Human
cucuccagguuagagcacuuau

SEQ ID NO: 1047506 - RNA, 22 nt, Human
ccagggaagucacauugucuag

SEQ ID NO: 1047507 - RNA, 22 nt, Human
uuccauaauaaccugagagaaa

SEQ ID NO: 1047508 - RNA, 20 nt, Human
ggucagccuggggcuccagg

SEQ ID NO: 1047509 - RNA, 22 nt, Human
caacuuugugugaccuagauag

SEQ ID NO: 1047510 - RNA, 20 nt, Human
ucuuauacagaaaacauuuu

SEQ ID NO: 1047511 - RNA, 22 nt, Human
cagaaauaaacuucucacaucg

SEQ ID NO: 1047512 - RNA, 22 nt, Human
aauuaauggaaaguaaggaagg

SEQ ID NO: 1047513 - RNA, 22 nt, Human
cuuuacagaauaagaauacugg

SEQ ID NO: 1047514 - RNA, 22 nt, Human
acagggaaggcauccgcgaaug

SEQ ID NO: 1047515 - RNA, 22 nt, Human
gcagccuccgcacugcgagucc

SEQ ID NO: 1047516 - RNA, 22 nt, Human
augguuuuagaaucaggaaaaa

SEQ ID NO: 1047517 - RNA, 22 nt, Human
agaagugagugugacucagcag

SEQ ID NO: 1047518 - RNA, 22 nt, Human
caguccuuaaggaaacauuugu

SEQ ID NO: 1047519 - RNA, 18 nt, Human
aagaggaggagcagguug

SEQ ID NO: 1047520 - RNA, 22 nt, Human
aaucagaaaggcuaaggaagca

SEQ ID NO: 1047521 - RNA, 22 nt, Human
ugggacaguuguccuccacucu

SEQ ID NO: 1047522 - RNA, 22 nt, Human
caucagaaccagcugggugagg

SEQ ID NO: 1047523 - RNA, 22 nt, Human
ggaggugaggccguagggugug

SEQ ID NO: 1047524 - RNA, 22 nt, Human
guuuacauguacucauuauacu

SEQ ID NO: 1047525 - RNA, 17 nt, Human
aaucagauuucugagga

SEQ ID NO: 1047526 - RNA, 22 nt, Human
cauggcuuuguucauauaauuu

SEQ ID NO: 1047527 - RNA, 22 nt, Human
ugcuuaauguacgugaguguac

SEQ ID NO: 1047528 - RNA, 22 nt, Human
caaguccuaggucugauugaac

SEQ ID NO: 1047529 - RNA, 22 nt, Human
ggcugccccagugcucauggcu

SEQ ID NO: 1047530 - RNA, 22 nt, Human
auuccaaagccugaauaaugga

SEQ ID NO: 1047531 - RNA, 22 nt, Human
guuaggcagugugguauagcag

SEQ ID NO: 1047532 - RNA, 22 nt, Human
gauaaaauauguggccuuuagu

SEQ ID NO: 1047533 - RNA, 22 nt, Human
agcauaaaggcacuagaaagag

SEQ ID NO: 1047534 - RNA, 22 nt, Human
aggauuuauuccagaaaugcaa

SEQ ID NO: 1047535 - RNA, 22 nt, Human
uaguccuugguaaaauucuaug

SEQ ID NO: 1047536 - RNA, 22 nt, Human
uuuaggcaauagauggcagugu

SEQ ID NO: 1047537 - RNA, 22 nt, Human
uuuaggcaaauuucagaugugc

SEQ ID NO: 1047538 - RNA, 21 nt, Human
aggcagcaggauccagggaca

SEQ ID NO: 1047539 - RNA, 22 nt, Human
ccagaucuaaguccaaaguacu

SEQ ID NO: 1047540 - RNA, 22 nt, Human
ucucacuuuguugcccagacuu

SEQ ID NO: 1047541 - RNA, 22 nt, Human
acuucacagaaauuuuaugagg

SEQ ID NO: 1047542 - RNA, 22 nt, Human
guagaaaugguguguuucuucu

SEQ ID NO: 1047543 - RNA, 22 nt, Human
aaauuucaguuggaaugagcuc

SEQ ID NO: 1047544 - RNA, 22 nt, Human
uaaacauggcuguuucaguuau

SEQ ID NO: 1047545 - RNA, 23 nt, Human
ggccauuucauuugguucaaacu

SEQ ID NO: 1047546 - RNA, 22 nt, Human
acaggcagagaguggcggacuc

SEQ ID NO: 1047547 - RNA, 22 nt, Human
ucugauaacucuggccccaggc

SEQ ID NO: 1047548 - RNA, 22 nt, Human
gggagggaucugcuaggcaaug

SEQ ID NO: 1047549 - RNA, 22 nt, Human
ugcacauuuguuauuuugaggu

SEQ ID NO: 1047550 - RNA, 22 nt, Human
guuaggcaauaccucuuacacc

SEQ ID NO: 1047551 - RNA, 22 nt, Human
uuuauuaugauggacaccuucg

SEQ ID NO: 1047552 - RNA, 22 nt, Human
uaguccuuuccggcugcuauaa

SEQ ID NO: 1047553 - RNA, 22 nt, Human
auuccaaagguuaaugcccauu

SEQ ID NO: 1047554 - RNA, 22 nt, Human
caauuucauggauaaaagaugu

SEQ ID NO: 1047555 - RNA, 22 nt, Human
aauacugagaucccacaaagca

SEQ ID NO: 1047556 - RNA, 22 nt, Human
uuucaacuugaagaauugauac

SEQ ID NO: 1047557 - RNA, 22 nt, Human
ccagggcuucccacgugcccug

SEQ ID NO: 1047558 - RNA, 22 nt, Human
cuuauacacccucuucccaggc

SEQ ID NO: 1047559 - RNA, 22 nt, Human
uuccucuagcuucucacuaaca

SEQ ID NO: 1047560 - RNA, 22 nt, Human
aagccaaugagagaggccucag

SEQ ID NO: 1047561 - RNA, 22 nt, Human
gugaauaagaccuaaggaugaa

SEQ ID NO: 1047562 - RNA, 22 nt, Human
cacacuuugugcuaaucuauuu

SEQ ID NO: 1047563 - RNA, 22 nt, Human
uuccacaauguaugaauaagau

SEQ ID NO: 1047564 - RNA, 22 nt, Human
cuuccaaaauuuauauguugaa

SEQ ID NO: 1047565 - RNA, 22 nt, Human
aaaucucacuguagucaaagug

SEQ ID NO: 1047566 - RNA, 22 nt, Human
aggagacauggaauagugaggc

SEQ ID NO: 1047567 - RNA, 22 nt, Human
aaagaaggaugggagaaauccu

SEQ ID NO: 1047568 - RNA, 22 nt, Human
ugaaugaaugaauuaauagagu

SEQ ID NO: 1047569 - RNA, 22 nt, Human
auggcuuaugaauaacaguagg

SEQ ID NO: 1047570 - RNA, 22 nt, Human
agcuugggcaacacagcaagac

SEQ ID NO: 1047571 - RNA, 22 nt, Human
cuuagaaauaaugguuucaguu

SEQ ID NO: 1047572 - RNA, 19 nt, Human
uccuucagucagaucuggg

SEQ ID NO: 1047573 - RNA, 22 nt, Human
ggcagcccuguggagaggccca

SEQ ID NO: 1047574 - RNA, 22 nt, Human
gagcccugcggagccccgaggc

SEQ ID NO: 1047575 - RNA, 22 nt, Human
cguauacaugaagacauugcug

SEQ ID NO: 1047576 - RNA, 22 nt, Human
agcccugggaggccagcuugua

SEQ ID NO: 1047577 - RNA, 22 nt, Human
acaggggauugauuggaagucu

SEQ ID NO: 1047578 - RNA, 22 nt, Human
cagaauaaagguacaauugagu

SEQ ID NO: 1047579 - RNA, 22 nt, Human
uacuagaaccucacaacaaucc

SEQ ID NO: 1047580 - RNA, 22 nt, Human
cagccuguggcagaggucuaau

SEQ ID NO: 1047581 - RNA, 22 nt, Human
gcuccagcuccggcuccgaagc

SEQ ID NO: 1047582 - RNA, 22 nt, Human
uggcccaggcgaggugggcaga

SEQ ID NO: 1047583 - RNA, 18 nt, Human
gcacuucacccagcuagu

SEQ ID NO: 1047584 - RNA, 22 nt, Human
uuuauacauggagaauuuuugc

SEQ ID NO: 1047585 - RNA, 21 nt, Human
ucccaagcugcuggcucagcu

SEQ ID NO: 1047586 - RNA, 22 nt, Human
uaaaaguauacuuucaaaggag

SEQ ID NO: 1047587 - RNA, 20 nt, Human
uauggcuuggcaaagcuuca

SEQ ID NO: 1047588 - RNA, 22 nt, Human
guuucacagaugguguucauau

SEQ ID NO: 1047589 - RNA, 22 nt, Human
auagucacugccuuccauuugu

SEQ ID NO: 1047590 - RNA, 22 nt, Human
ucaaaauuuuauuucucaagga

SEQ ID NO: 1047591 - RNA, 22 nt, Human
ugugggccaggaggccucagug

SEQ ID NO: 1047592 - RNA, 19 nt, Human
agcaaauacaucaaaauug

SEQ ID NO: 1047593 - RNA, 19 nt, Human
cagaaauagcgaaguguaa

SEQ ID NO: 1047594 - RNA, 22 nt, Human
auguaaaucaagcagugcuggu

SEQ ID NO: 1047595 - RNA, 22 nt, Human
uuuccaaaggaguaccacgcau

SEQ ID NO: 1047596 - RNA, 22 nt, Human
caguggggaggccaggauagaa

SEQ ID NO: 1047597 - RNA, 22 nt, Human
aggauuuauuacaagccauggu

SEQ ID NO: 1047598 - RNA, 22 nt, Human
aagaaaucugauauuuguuuca

SEQ ID NO: 1047599 - RNA, 22 nt, Human
gcuccaggugaauccucucacc

SEQ ID NO: 1047600 - RNA, 22 nt, Human
agcagagaccauauagcccaga

SEQ ID NO: 1047601 - RNA, 22 nt, Human
guagaaauauuuaucucugaga

SEQ ID NO: 1047602 - RNA, 22 nt, Human
caccagacagguguaugcauau

SEQ ID NO: 1047603 - RNA, 22 nt, Human
ggaucugagagcaagcaggacc

SEQ ID NO: 1047604 - RNA, 22 nt, Human
ucagaaauagucuuuaaaauga

SEQ ID NO: 1047605 - RNA, 22 nt, Human
ccagcuccucuugucucuagca

SEQ ID NO: 1047606 - RNA, 20 nt, Human
agaggaggauuauuuuauuc

SEQ ID NO: 1047607 - RNA, 22 nt, Human
uuccagggaagagcaaggcagu

SEQ ID NO: 1047608 - RNA, 22 nt, Human
aaugaaaauuggacccuagaac

SEQ ID NO: 1047609 - RNA, 22 nt, Human
caauauauaaugaguacuuucc

SEQ ID NO: 1047610 - RNA, 22 nt, Human
ggauuuccucuugacucuaaag

SEQ ID NO: 1047611 - RNA, 22 nt, Human
ggcaauuucaugugguuuaaac

SEQ ID NO: 1047612 - RNA, 22 nt, Human
ccuggaucagagccagagaagc

SEQ ID NO: 1047613 - RNA, 22 nt, Human
uccagggagauggcagaggcug

SEQ ID NO: 1047614 - RNA, 22 nt, Human
auucaagagcccauguuuccug

SEQ ID NO: 1047615 - RNA, 22 nt, Human
caguaaauacauaucagagaag

SEQ ID NO: 1047616 - RNA, 22 nt, Human
aguccuuagaacacuguaucug

SEQ ID NO: 1047617 - RNA, 22 nt, Human
gcuccaggaggaugaccuuccu

SEQ ID NO: 1047618 - RNA, 22 nt, Human
gaaagccaucuggcugcuggga

SEQ ID NO: 1047619 - RNA, 22 nt, Human
cccagccugugacagccguccu

SEQ ID NO: 1047620 - RNA, 22 nt, Human
uggcauuuggcuuacuuauguu

SEQ ID NO: 1047621 - RNA, 22 nt, Human
guggauggacaugggcaagagg

SEQ ID NO: 1047622 - RNA, 22 nt, Human
gagcugccugaacaagcagcag

SEQ ID NO: 1047623 - RNA, 22 nt, Human
agaucuauuagcaaacugccau

SEQ ID NO: 1047624 - RNA, 22 nt, Human
aggaggaggugggacacaguga

SEQ ID NO: 1047625 - RNA, 22 nt, Human
cucccuccaaauaagacucggg

SEQ ID NO: 1047626 - RNA, 22 nt, Human
ccuggaucgaugccgagggaaa

SEQ ID NO: 1047627 - RNA, 22 nt, Human
aaauauagcaauuaugccuacu

SEQ ID NO: 1047628 - RNA, 22 nt, Human
guaaugaaugaaagaaacuggg

SEQ ID NO: 1047629 - RNA, 22 nt, Human
aaucagaaagaggucauguugc

SEQ ID NO: 1047630 - RNA, 22 nt, Human
gaauuucacaaggugaggauaa

SEQ ID NO: 1047631 - RNA, 22 nt, Human
cagugggaaugaaguggaggcc

SEQ ID NO: 1047632 - RNA, 22 nt, Human
uaaagccaacacuuuacugcuc

SEQ ID NO: 1047633 - RNA, 22 nt, Human
gcagggaugcugaggcucagug

SEQ ID NO: 1047634 - RNA, 17 nt, Human
aggagggaaauagcuug

SEQ ID NO: 1047635 - RNA, 22 nt, Human
auaugcuugggacugauacagu

SEQ ID NO: 1047636 - RNA, 22 nt, Human
ucauagaagcaccagaagauau

SEQ ID NO: 1047637 - RNA, 22 nt, Human
acagggaacaggaauauacaaa

SEQ ID NO: 1047638 - RNA, 22 nt, Human
cuaaagaagcuagcaaucuaua

SEQ ID NO: 1047639 - RNA, 22 nt, Human
aauaauuuuagcucagaguugu

SEQ ID NO: 1047640 - RNA, 22 nt, Human
ggaugagguagaugaacaaggg

SEQ ID NO: 1047641 - RNA, 22 nt, Human
uguuuaauaauucuaugauagu

SEQ ID NO: 1047642 - RNA, 22 nt, Human
uuuuccaaaguaccaugucccu

SEQ ID NO: 1047643 - RNA, 22 nt, Human
aacauaauguggccaaagucac

SEQ ID NO: 1047644 - RNA, 22 nt, Human
auggaucacagugccgugggug

SEQ ID NO: 1047645 - RNA, 22 nt, Human
agggcccaccuuggugcugagg

SEQ ID NO: 1047646 - RNA, 22 nt, Human
aagggcugcuguagaagcagag

SEQ ID NO: 1047647 - RNA, 22 nt, Human
agaguggguuauaggcagacuu

SEQ ID NO: 1047648 - RNA, 22 nt, Human
gggaggacgguccagggcaaag

SEQ ID NO: 1047649 - RNA, 22 nt, Human
cagccucuugcacuuugaaggc

SEQ ID NO: 1047650 - RNA, 22 nt, Human
gggcugccaagccugccugccu

SEQ ID NO: 1047651 - RNA, 22 nt, Human
uggagagguugaauaacuuguc

SEQ ID NO: 1047652 - RNA, 22 nt, Human
aaagaaucguguguaguuugaa

SEQ ID NO: 1047653 - RNA, 22 nt, Human
caccagcuacuccagggccgug

SEQ ID NO: 1047654 - RNA, 22 nt, Human
ugaggaggucagagucuggcug

SEQ ID NO: 1047655 - RNA, 23 nt, Human
augaaugaauaaggcaggaaagc

SEQ ID NO: 1047656 - RNA, 22 nt, Human
uuucaacuagccccuaaguccu

SEQ ID NO: 1047657 - RNA, 22 nt, Human
uguuccaagcugcuggauaagc

SEQ ID NO: 1047658 - RNA, 22 nt, Human
agggcugcccagugugagagcu

SEQ ID NO: 1047659 - RNA, 22 nt, Human
ccagccuccauguagauagcug

SEQ ID NO: 1047660 - RNA, 22 nt, Human
uaauuucacaguucaacgcaca

SEQ ID NO: 1047661 - RNA, 22 nt, Human
agagagggcauagaaaaaggga

SEQ ID NO: 1047662 - RNA, 22 nt, Human
gauaaaauaacuauggaauacu

SEQ ID NO: 1047663 - RNA, 22 nt, Human
cuauacaguaaccacagugauu

SEQ ID NO: 1047664 - RNA, 22 nt, Human
aaauuucaguuaccuuuacguu

SEQ ID NO: 1047665 - RNA, 22 nt, Human
acaacaaagacacuugaaauga

SEQ ID NO: 1047666 - RNA, 22 nt, Human
uuauauuaguuagacuugcugu

SEQ ID NO: 1047667 - RNA, 22 nt, Human
uuucacaauuuuaaggagcaaa

SEQ ID NO: 1047668 - RNA, 22 nt, Human
uccagggaugccagccauguug

SEQ ID NO: 1047669 - RNA, 22 nt, Human
ucagccagugccuugaucuugc

SEQ ID NO: 1047670 - RNA, 22 nt, Human
guuccaaagcaaaggaggugag

SEQ ID NO: 1047671 - RNA, 20 nt, Human
gggugagauguaggagaggg

SEQ ID NO: 1047672 - RNA, 22 nt, Human
ugcuggcuacauuauugcuguc

SEQ ID NO: 1047673 - RNA, 22 nt, Human
uuacauaacgguaugaaaaaug

SEQ ID NO: 1047674 - RNA, 22 nt, Human
uaacaagucauuuuaaauuaug

SEQ ID NO: 1047675 - RNA, 22 nt, Human
cuccucccacggucucaggaag

SEQ ID NO: 1047676 - RNA, 22 nt, Human
aauuccaggcagaaaugugagu

SEQ ID NO: 1047677 - RNA, 22 nt, Human
aaaagccaagguccucuucaga

SEQ ID NO: 1047678 - RNA, 22 nt, Human
uuacagaaaauguguuuuaacu

SEQ ID NO: 1047679 - RNA, 22 nt, Human
cccaccagaccugcaccggcac

SEQ ID NO: 1047680 - RNA, 22 nt, Human
aaguccuuuaauaucacauagu

SEQ ID NO: 1047681 - RNA, 22 nt, Human
agcagcaaggaagcgaggaugg

SEQ ID NO: 1047682 - RNA, 22 nt, Human
caaguccuuagaugguucuuug

SEQ ID NO: 1047683 - RNA, 22 nt, Human
caggaggguguggaaaacuggg

SEQ ID NO: 1047684 - RNA, 19 nt, Human
cucuccagcuccaguagcu

SEQ ID NO: 1047685 - RNA, 22 nt, Human
uuuaggcagucauugaacaagu

SEQ ID NO: 1047686 - RNA, 22 nt, Human
ucuauacaugugcacacacauc

SEQ ID NO: 1047687 - RNA, 22 nt, Human
ucuccaggcuuuuugugaauug

SEQ ID NO: 1047688 - RNA, 22 nt, Human
uucagaaaggauaauuggaagg

SEQ ID NO: 1047689 - RNA, 22 nt, Human
aauuuacaguugcugaugguac

SEQ ID NO: 1047690 - RNA, 22 nt, Human
aucagaaaggugggcaagcaga

SEQ ID NO: 1047691 - RNA, 22 nt, Human
ugggagagcuucaugccuucag

SEQ ID NO: 1047692 - RNA, 18 nt, Human
cagggccccagaauuauc

SEQ ID NO: 1047693 - RNA, 22 nt, Human
aguucacagccauguucaugug

SEQ ID NO: 1047694 - RNA, 22 nt, Human
ccacuucaucagugcuccauuu

SEQ ID NO: 1047695 - RNA, 22 nt, Human
ucugcccaggacaccugccacu

SEQ ID NO: 1047696 - RNA, 22 nt, Human
ucuauacugaugggauacuauu

SEQ ID NO: 1047697 - RNA, 22 nt, Human
gccuccagcuggggcauuucag

SEQ ID NO: 1047698 - RNA, 22 nt, Human
ucuccagggugagcuaggccag

SEQ ID NO: 1047699 - RNA, 23 nt, Human
uuaaacuucagugcagaacacuc

SEQ ID NO: 1047700 - RNA, 22 nt, Human
ugaaauaggaaacagauguuuc

SEQ ID NO: 1047701 - RNA, 22 nt, Human
aggcuucuucuuccuauuuagu

SEQ ID NO: 1047702 - RNA, 22 nt, Human
ucuauacacacaaagaaugcuu

SEQ ID NO: 1047703 - RNA, 22 nt, Human
aaaugucagaggaacauauuga

SEQ ID NO: 1047704 - RNA, 22 nt, Human
ugaggcaggacuugcauaaagu

SEQ ID NO: 1047705 - RNA, 22 nt, Human
aggauuuacuagcaaggauucu

SEQ ID NO: 1047706 - RNA, 22 nt, Human
accauguuggccaagcuggucu

SEQ ID NO: 1047707 - RNA, 22 nt, Human
uucaacccaaguucuccauuuu

SEQ ID NO: 1047708 - RNA, 22 nt, Human
uggcuuuacacauccacugccu

SEQ ID NO: 1047709 - RNA, 22 nt, Human
cuuugaauuccaguacaauaac

SEQ ID NO: 1047710 - RNA, 22 nt, Human
aggagcccuccguugcuucauc

SEQ ID NO: 1047711 - RNA, 22 nt, Human
cugcucacgccaccguucauca

SEQ ID NO: 1047712 - RNA, 22 nt, Human
gaggcagcagaacauggaagag

SEQ ID NO: 1047713 - RNA, 22 nt, Human
uccaggagaggccugaccaggu

SEQ ID NO: 1047714 - RNA, 22 nt, Human
ucaguaaaugagcaaaaauuuc

SEQ ID NO: 1047715 - RNA, 22 nt, Human
auggcuuucagauggugaaaga

SEQ ID NO: 1047716 - RNA, 22 nt, Human
cagggacaauggcagagccuga

SEQ ID NO: 1047717 - RNA, 22 nt, Human
augguauugcaacaacugucau

SEQ ID NO: 1047718 - RNA, 22 nt, Human
uaauuucagugggcucugggcu

SEQ ID NO: 1047719 - RNA, 22 nt, Human
ucuuuaaucauaaccaagaugg

SEQ ID NO: 1047720 - RNA, 20 nt, Human
acauggcauucccacguggu

SEQ ID NO: 1047721 - RNA, 19 nt, Human
ccagagagcuagguacaga

SEQ ID NO: 1047722 - RNA, 22 nt, Human
cuuagaaauuguuacucauuca

SEQ ID NO: 1047723 - RNA, 22 nt, Human
acaacaaaaucacuagucuucc

SEQ ID NO: 1047724 - RNA, 22 nt, Human
gccagccuucuguggccugcaa

SEQ ID NO: 1047725 - RNA, 22 nt, Human
aagauauacuauuaaguaccau

SEQ ID NO: 1047726 - RNA, 22 nt, Human
ucugcgcccugucgccugcucc

SEQ ID NO: 1047727 - RNA, 22 nt, Human
uggggagagaccggaauguuuc

SEQ ID NO: 1047728 - RNA, 22 nt, Human
ccgggagacuuugagcaccaug

SEQ ID NO: 1047729 - RNA, 22 nt, Human
auucacuggcagacagaacuca

SEQ ID NO: 1047730 - RNA, 22 nt, Human
ccagggaagaccacuuccugga

SEQ ID NO: 1047731 - RNA, 22 nt, Human
gcuauacagcaggagaauggaa

SEQ ID NO: 1047732 - RNA, 22 nt, Human
uaauauguguuacugacuuuuu

SEQ ID NO: 1047733 - RNA, 22 nt, Human
agacagcauuucuagcaccagg

SEQ ID NO: 1047734 - RNA, 22 nt, Human
caugcuuauucauucugcuaac

SEQ ID NO: 1047735 - RNA, 22 nt, Human
cccagccucugggcucacccaa

SEQ ID NO: 1047736 - RNA, 22 nt, Human
auggaucagaaucccgggaggg

SEQ ID NO: 1047737 - RNA, 22 nt, Human
auauaggcuaacaacuauugag

SEQ ID NO: 1047738 - RNA, 22 nt, Human
ugggagagcagagaacccucuu

SEQ ID NO: 1047739 - RNA, 22 nt, Human
ucacagaacaauguuuaguucu

SEQ ID NO: 1047740 - RNA, 22 nt, Human
aguggggacaaugagagcaggu

SEQ ID NO: 1047741 - RNA, 23 nt, Human
uauggcuuacagugcuuuaggua

SEQ ID NO: 1047742 - RNA, 22 nt, Human
caguccuugcucugggaugaug

SEQ ID NO: 1047743 - RNA, 17 nt, Human
ugcuuaauuuugacugg

SEQ ID NO: 1047744 - RNA, 23 nt, Human
uggaauaauaagguacauuaaca

SEQ ID NO: 1047745 - RNA, 22 nt, Human
ccuccagggcagacggggagca

SEQ ID NO: 1047746 - RNA, 22 nt, Human
aaauuauaggugccaccuugga

SEQ ID NO: 1047747 - RNA, 22 nt, Human
gcuuuaaugcuucguggggcca

SEQ ID NO: 1047748 - RNA, 22 nt, Human
ccagggcaugggaagaacugaa

SEQ ID NO: 1047749 - RNA, 22 nt, Human
uuuuaugugcuggacuggcagu

SEQ ID NO: 1047750 - RNA, 22 nt, Human
aggagggaccuaggaauauugc

SEQ ID NO: 1047751 - RNA, 23 nt, Human
ugguucuaggccuauaauuauau

SEQ ID NO: 1047752 - RNA, 22 nt, Human
gagacaggauuuaaccaaagcu

SEQ ID NO: 1047753 - RNA, 22 nt, Human
agggcugcaccggggcuucgcg

SEQ ID NO: 1047754 - RNA, 22 nt, Human
uggauuagguacuaugaauaua

SEQ ID NO: 1047755 - RNA, 22 nt, Human
cugcccaggaaccagaggggca

SEQ ID NO: 1047756 - RNA, 20 nt, Human
uauuuacaacuuagagccuc

SEQ ID NO: 1047757 - RNA, 22 nt, Human
gggcugucacgccccugcaccu

SEQ ID NO: 1047758 - RNA, 23 nt, Human
cauuucaacgaauuuuccuucug

SEQ ID NO: 1047759 - RNA, 22 nt, Human
uuagaaaucugcugccaugcaa

SEQ ID NO: 1047760 - RNA, 22 nt, Human
gucuaacaagcauuaggaaccc

SEQ ID NO: 1047761 - RNA, 22 nt, Human
gccagggaacccaagggccuca

SEQ ID NO: 1047762 - RNA, 22 nt, Human
cucagggaagcuauggugaggg

SEQ ID NO: 1047763 - RNA, 22 nt, Human
aaugcaaagcaagcagagauuu

SEQ ID NO: 1047764 - RNA, 22 nt, Human
ugucuaguuuuagcuuuuggag

SEQ ID NO: 1047765 - RNA, 22 nt, Human
aagggagacaguugugugagga

SEQ ID NO: 1047766 - RNA, 19 nt, Human
acagaaauuaguuauuuuc

SEQ ID NO: 1047767 - RNA, 22 nt, Human
gauuucaaccuaacaguaugac

SEQ ID NO: 1047768 - RNA, 22 nt, Human
aauaaugucuuuggcuugacca

SEQ ID NO: 1047769 - RNA, 22 nt, Human
agcccuggauucugagguccaa

SEQ ID NO: 1047770 - RNA, 22 nt, Human
ccugcccaucccguccuuggcc

SEQ ID NO: 1047771 - RNA, 22 nt, Human
aucuagaacuuaaagucaguca

SEQ ID NO: 1047772 - RNA, 22 nt, Human
ugcugcucaaugagaugccauc

SEQ ID NO: 1047773 - RNA, 22 nt, Human
ugcuuaauaggaguugaacauu

SEQ ID NO: 1047774 - RNA, 22 nt, Human
uugaauaauuaauuacacucag

SEQ ID NO: 1047775 - RNA, 22 nt, Human
uagaugcuguagaaauacuuau

SEQ ID NO: 1047776 - RNA, 17 nt, Human
gggagaugaagggauau

SEQ ID NO: 1047777 - RNA, 22 nt, Human
caucagaauagcucuguggaua

SEQ ID NO: 1047778 - RNA, 22 nt, Human
aaaucaguuagugguaggauug

SEQ ID NO: 1047779 - RNA, 22 nt, Human
auacaaauuuauagaugcauuu

SEQ ID NO: 1047780 - RNA, 22 nt, Human
ccugggaagucagccaaggacg

SEQ ID NO: 1047781 - RNA, 22 nt, Human
gauggcuucacuuacauggcug

SEQ ID NO: 1047782 - RNA, 22 nt, Human
gggugagagucaggcagagauu

SEQ ID NO: 1047783 - RNA, 22 nt, Human
ccugcccacuccaggagcaacu

SEQ ID NO: 1047784 - RNA, 22 nt, Human
aauaacuggcacauaucacaua

SEQ ID NO: 1047785 - RNA, 21 nt, Human
auccuuagcacuuagaagagu

SEQ ID NO: 1047786 - RNA, 22 nt, Human
caguccuuucugaaauccuaua

SEQ ID NO: 1047787 - RNA, 22 nt, Human
cauugcaacuucaaacuccugg

SEQ ID NO: 1047788 - RNA, 22 nt, Human
augaauaaguaaacuccuuugg

SEQ ID NO: 1047789 - RNA, 22 nt, Human
uuguuucaugaguguaaaggga

SEQ ID NO: 1047790 - RNA, 22 nt, Human
augguuuuguccucuuugguuc

SEQ ID NO: 1047791 - RNA, 22 nt, Human
acuauacauaaaacauuugggu

SEQ ID NO: 1047792 - RNA, 22 nt, Human
aaagcagcugaucucagagccu

SEQ ID NO: 1047793 - RNA, 22 nt, Human
ggaguuggaggcuccagggaac

SEQ ID NO: 1047794 - RNA, 22 nt, Human
ugcaguggugguaaagaugcuc

SEQ ID NO: 1047795 - RNA, 22 nt, Human
cagcucuggccagaucuauccu

SEQ ID NO: 1047796 - RNA, 16 nt, Human
aaggagggaagagaau

SEQ ID NO: 1047797 - RNA, 22 nt, Human
gagggaaggucacccuuguagc

SEQ ID NO: 1047798 - RNA, 22 nt, Human
cauagaaacuugcagcaagcac

SEQ ID NO: 1047799 - RNA, 22 nt, Human
ccagcuccagguagaugggcag

SEQ ID NO: 1047800 - RNA, 19 nt, Human
aggucugcagcugcaguuu

SEQ ID NO: 1047801 - RNA, 22 nt, Human
cuguuaauugugaauuuuacau

SEQ ID NO: 1047802 - RNA, 22 nt, Human
cuacagaaacacuggacaugug

SEQ ID NO: 1047803 - RNA, 22 nt, Human
auacagaaguuuuccacuuauu

SEQ ID NO: 1047804 - RNA, 22 nt, Human
uaccuuggguugaguucauucu

SEQ ID NO: 1047805 - RNA, 22 nt, Human
aaucagaaccuugggucauaac

SEQ ID NO: 1047806 - RNA, 22 nt, Human
auacagaaaaugaugcagaguu

SEQ ID NO: 1047807 - RNA, 22 nt, Human
agcccuggcucccagcagcgcu

SEQ ID NO: 1047808 - RNA, 22 nt, Human
cacauacuuguguguacauaug

SEQ ID NO: 1047809 - RNA, 22 nt, Human
ucaauaauggcaggauaaauuu

SEQ ID NO: 1047810 - RNA, 22 nt, Human
aguaaaauuaauggaucagaag

SEQ ID NO: 1047811 - RNA, 20 nt, Human
caguccacuggaguuccuac

SEQ ID NO: 1047812 - RNA, 22 nt, Human
aguacaauuauauuuagauggu

SEQ ID NO: 1047813 - RNA, 22 nt, Human
uuccuuaguuauuugguccccu

SEQ ID NO: 1047814 - RNA, 22 nt, Human
ggauuuacaaguuuaacucuca

SEQ ID NO: 1047815 - RNA, 22 nt, Human
gaggaggggcacuugucuccua

SEQ ID NO: 1047816 - RNA, 22 nt, Human
agauuuacuggagucuuuggug

SEQ ID NO: 1047817 - RNA, 22 nt, Human
uccagccugaacuuuguccaga

SEQ ID NO: 1047818 - RNA, 22 nt, Human
aaugugaucgcuuuagaagcuu

SEQ ID NO: 1047819 - RNA, 22 nt, Human
cucccaggacucagaggagaag

SEQ ID NO: 1047820 - RNA, 22 nt, Human
ccauaauauuaaaugcuuuugu

SEQ ID NO: 1047821 - RNA, 22 nt, Human
gcagaauuuggggguaaccuuu

SEQ ID NO: 1047822 - RNA, 22 nt, Human
augaacaauaaaauagaucaca

SEQ ID NO: 1047823 - RNA, 22 nt, Human
auacauaauuacuuccgauguu

SEQ ID NO: 1047824 - RNA, 22 nt, Human
ucagaauuuugguuugguuggu

SEQ ID NO: 1047825 - RNA, 22 nt, Human
aaucaguguguaaaguggcugc

SEQ ID NO: 1047826 - RNA, 22 nt, Human
aagaauucacugguagagucaa

SEQ ID NO: 1047827 - RNA, 21 nt, Human
agccagucuguuuucuagugc

SEQ ID NO: 1047828 - RNA, 22 nt, Human
ggcccagcacagugcuuggggg

SEQ ID NO: 1047829 - RNA, 22 nt, Human
ugcuuauuuauagucaauagag

SEQ ID NO: 1047830 - RNA, 22 nt, Human
auagaauuauggaaagcaucuu

SEQ ID NO: 1047831 - RNA, 22 nt, Human
cggggcuggcacaggugaccac

SEQ ID NO: 1047832 - RNA, 22 nt, Human
agacaugguuuauuuuaauggu

SEQ ID NO: 1047833 - RNA, 22 nt, Human
cagagacagccugggagggaca

SEQ ID NO: 1047834 - RNA, 22 nt, Human
augcuuaaugaggguauauaug

SEQ ID NO: 1047835 - RNA, 19 nt, Human
ucagggaguuuacagcaug

SEQ ID NO: 1047836 - RNA, 22 nt, Human
uaacagaagaaaacauauugga

SEQ ID NO: 1047837 - RNA, 21 nt, Human
ucccagggucuuaugggaugu

SEQ ID NO: 1047838 - RNA, 22 nt, Human
gcugcccaauuacagggccgug

SEQ ID NO: 1047839 - RNA, 22 nt, Human
ggaucugauuaauaagguggac

SEQ ID NO: 1047840 - RNA, 22 nt, Human
ccaggggaaacagggagcacuc

SEQ ID NO: 1047841 - RNA, 22 nt, Human
ugugccuuaugaauucuuucug

SEQ ID NO: 1047842 - RNA, 22 nt, Human
guuaauauuuaccugucaagaa

SEQ ID NO: 1047843 - RNA, 22 nt, Human
ccagggaaguaguugugagagc

SEQ ID NO: 1047844 - RNA, 22 nt, Human
cuccagggagcugcgggagcca

SEQ ID NO: 1047845 - RNA, 21 nt, Human
gauuugcagaaacuagacagg

SEQ ID NO: 1047846 - RNA, 22 nt, Human
gauaucauaucagacaaccucu

SEQ ID NO: 1047847 - RNA, 20 nt, Human
uguaacaaucuggauguugc

SEQ ID NO: 1047848 - RNA, 22 nt, Human
uagucaccuguugugugaugcc

SEQ ID NO: 1047849 - RNA, 22 nt, Human
ugguuuuagaugccuuuacugc

SEQ ID NO: 1047850 - RNA, 22 nt, Human
uauuucaagaacuucuauccau

SEQ ID NO: 1047851 - RNA, 23 nt, Human
aggcagcagguuguccaggguga

SEQ ID NO: 1047852 - RNA, 22 nt, Human
agaggaggaagagcuuuaaaau

SEQ ID NO: 1047853 - RNA, 22 nt, Human
uggcccaggugcaagagacaga

SEQ ID NO: 1047854 - RNA, 17 nt, Human
uaucagaauguguuuac

SEQ ID NO: 1047855 - RNA, 22 nt, Human
gcugcccaguucugcugcugcc

SEQ ID NO: 1047856 - RNA, 22 nt, Human
ugaaguaacuguccaggaucca

SEQ ID NO: 1047857 - RNA, 22 nt, Human
uuucagacaggacuucauaugu

SEQ ID NO: 1047858 - RNA, 22 nt, Human
gcagugacauaccuggagggca

SEQ ID NO: 1047859 - RNA, 22 nt, Human
agggcugcaguccuaaggugcu

SEQ ID NO: 1047860 - RNA, 22 nt, Human
cagucaccaccagguggcagua

SEQ ID NO: 1047861 - RNA, 22 nt, Human
gaagaaucugaggacagucauu

SEQ ID NO: 1047862 - RNA, 22 nt, Human
cauucacagcaggucagcugaa

SEQ ID NO: 1047863 - RNA, 21 nt, Human
auuauuauaaagaccacaggg

SEQ ID NO: 1047864 - RNA, 22 nt, Human
aaaucaguuggaacacaagcag

SEQ ID NO: 1047865 - RNA, 22 nt, Human
uuugaagugcaaugaggauucu

SEQ ID NO: 1047866 - RNA, 22 nt, Human
uuaccuaaaauagcucaauuua

SEQ ID NO: 1047867 - RNA, 22 nt, Human
acuucccugugggcagguagug

SEQ ID NO: 1047868 - RNA, 22 nt, Human
uaucagaaugcagccaugugca

SEQ ID NO: 1047869 - RNA, 22 nt, Human
uccagaauauuugggaaagaug

SEQ ID NO: 1047870 - RNA, 22 nt, Human
uguacaauggcuauaauacccu

SEQ ID NO: 1047871 - RNA, 22 nt, Human
ucagcccugggcuuccucaugg

SEQ ID NO: 1047872 - RNA, 22 nt, Human
gcugcccagugugcucaugcag

SEQ ID NO: 1047873 - RNA, 22 nt, Human
ccuucccuaaagcgucgcuuag

SEQ ID NO: 1047874 - RNA, 22 nt, Human
ucagaauucuacaauagaucag

SEQ ID NO: 1047875 - RNA, 22 nt, Human
ccagggcagaaaaagagggaau

SEQ ID NO: 1047876 - RNA, 22 nt, Human
ucuggaucuccagcacuuauca

SEQ ID NO: 1047877 - RNA, 22 nt, Human
uccagggaccucccugagagcu

SEQ ID NO: 1047878 - RNA, 18 nt, Human
gcagggcugcacacgcau

SEQ ID NO: 1047879 - RNA, 22 nt, Human
uguaaauaaugcauguaaauca

SEQ ID NO: 1047880 - RNA, 22 nt, Human
cagauauuaggagcucaauaau

SEQ ID NO: 1047881 - RNA, 22 nt, Human
uauacagucuuuugcuauauuc

SEQ ID NO: 1047882 - RNA, 22 nt, Human
aguaaaauuguauuggaaaaca

SEQ ID NO: 1047883 - RNA, 22 nt, Human
cccagggacagcuagguggggc

SEQ ID NO: 1047884 - RNA, 22 nt, Human
aaauucaauuaacuuucaugcu

SEQ ID NO: 1047885 - RNA, 22 nt, Human
uuccuuagacagagguggucau

SEQ ID NO: 1047886 - RNA, 21 nt, Human
uuacagaauccaugggaaguc

SEQ ID NO: 1047887 - RNA, 22 nt, Human
uaagaaucgauguuuauuuaga

SEQ ID NO: 1047888 - RNA, 22 nt, Human
aggaggguuucaaugggaugag

SEQ ID NO: 1047889 - RNA, 22 nt, Human
caaagucauggggaugcagguc

SEQ ID NO: 1047890 - RNA, 22 nt, Human
aaagccuuugucucaggcucug

SEQ ID NO: 1047891 - RNA, 22 nt, Human
acagaauuuacacaucucuaaa

SEQ ID NO: 1047892 - RNA, 18 nt, Human
ucucaaucgcugcagucu

SEQ ID NO: 1047893 - RNA, 22 nt, Human
augguuuacugaucuuuuuggu

SEQ ID NO: 1047894 - RNA, 22 nt, Human
augaacaaguauuugcaugagc

SEQ ID NO: 1047895 - RNA, 22 nt, Human
augguuuauugcuuuaaugaaa

SEQ ID NO: 1047896 - RNA, 22 nt, Human
aaugaacauauaaagagaucuu

SEQ ID NO: 1047897 - RNA, 22 nt, Human
ggaggagggguuuacauuggaa

SEQ ID NO: 1047898 - RNA, 23 nt, Human
ucuguacacaucagcaucuccca

SEQ ID NO: 1047899 - RNA, 22 nt, Human
aaaagcaguuuauagucaguug

SEQ ID NO: 1047900 - RNA, 22 nt, Human
gcccagggcuucaaagagagaa

SEQ ID NO: 1047901 - RNA, 21 nt, Human
aacugguucaauucaacuaga

SEQ ID NO: 1047902 - RNA, 22 nt, Human
gggaagugaaguguagcugucu

SEQ ID NO: 1047903 - RNA, 21 nt, Human
cuacagaagcucuccuaucca

SEQ ID NO: 1047904 - RNA, 22 nt, Human
agggcagcaaaguuugaccuca

SEQ ID NO: 1047905 - RNA, 20 nt, Human
aaucagaaagugugagcucu

SEQ ID NO: 1047906 - RNA, 22 nt, Human
auacagaaaaguggauagccag

SEQ ID NO: 1047907 - RNA, 22 nt, Human
agaagggaacucagagaugauu

SEQ ID NO: 1047908 - RNA, 22 nt, Human
gagggaagauuccccauauggg

SEQ ID NO: 1047909 - RNA, 22 nt, Human
ggcauuuaauccaucugauuga

SEQ ID NO: 1047910 - RNA, 20 nt, Human
ccagucccugagcaccaggg

SEQ ID NO: 1047911 - RNA, 22 nt, Human
aggcagcagucaugaggaaaga

SEQ ID NO: 1047912 - RNA, 22 nt, Human
ggcauuuagagggcuuuucuga

SEQ ID NO: 1047913 - RNA, 22 nt, Human
agccagucggggccaugcuggg

SEQ ID NO: 1047914 - RNA, 22 nt, Human
aacaugcuuugauaaauaaaag

SEQ ID NO: 1047915 - RNA, 22 nt, Human
caguccuuccuugccccuuggg

SEQ ID NO: 1047916 - RNA, 22 nt, Human
guuaaagaguuuggcuuucuuc

SEQ ID NO: 1047917 - RNA, 22 nt, Human
ucagaauucagagggagugggg

SEQ ID NO: 1047918 - RNA, 23 nt, Human
acaacuuuacagauacauuuugu

SEQ ID NO: 1047919 - RNA, 22 nt, Human
guagaaauagugguugacagga

SEQ ID NO: 1047920 - RNA, 22 nt, Human
acaaaauuaccuaguuauuuuc

SEQ ID NO: 1047921 - RNA, 22 nt, Human
aaaauugagagucuugugcaag

SEQ ID NO: 1047922 - RNA, 22 nt, Human
agcugcccuggcggagcugcuc

SEQ ID NO: 1047923 - RNA, 19 nt, Human
gcagggcucucccagaugc

SEQ ID NO: 1047924 - RNA, 22 nt, Human
aaauggauggaaagcaauuuuu

SEQ ID NO: 1047925 - RNA, 22 nt, Human
aaugccaacuuggauauacauu

SEQ ID NO: 1047926 - RNA, 22 nt, Human
cccagccuuccacccuggacua

SEQ ID NO: 1047927 - RNA, 22 nt, Human
ucuccagguucagucgauggaa

SEQ ID NO: 1047928 - RNA, 22 nt, Human
gaggagggcuuuguugauguua

SEQ ID NO: 1047929 - RNA, 22 nt, Human
cagagagaaucuuggcagcuga

SEQ ID NO: 1047930 - RNA, 22 nt, Human
ucaguaaacagguuuaaguccu

SEQ ID NO: 1047931 - RNA, 22 nt, Human
gggcccaguacccucugccaag

SEQ ID NO: 1047932 - RNA, 22 nt, Human
uccagggccacagaggaugcua

SEQ ID NO: 1047933 - RNA, 22 nt, Human
uauuacaauuuacauugcacuu

SEQ ID NO: 1047934 - RNA, 22 nt, Human
uggcccaggugcacccagaggc

SEQ ID NO: 1047935 - RNA, 22 nt, Human
acagcauucaauaaauaauaac

SEQ ID NO: 1047936 - RNA, 22 nt, Human
cuacagaagccguggucaggaa

SEQ ID NO: 1047937 - RNA, 23 nt, Human
acagggaaaagucaucaguguga

SEQ ID NO: 1047938 - RNA, 22 nt, Human
uuuacagaugaggaaacugaga

SEQ ID NO: 1047939 - RNA, 22 nt, Human
auccuuagaagggagugaggac

SEQ ID NO: 1047940 - RNA, 22 nt, Human
ccaguacugucuccaauauucc

SEQ ID NO: 1047941 - RNA, 22 nt, Human
cagggauggcugucaggaugua

SEQ ID NO: 1047942 - RNA, 22 nt, Human
cauuucaaaagaauugccagaa

SEQ ID NO: 1047943 - RNA, 23 nt, Human
cccagggacacgaugacaccucc

SEQ ID NO: 1047944 - RNA, 22 nt, Human
aaacaaacauagguuugaaagu

SEQ ID NO: 1047945 - RNA, 22 nt, Human
augguuuaaagaguaugacuuu

SEQ ID NO: 1047946 - RNA, 19 nt, Human
ucuccaggcaggugagcga

SEQ ID NO: 1047947 - RNA, 22 nt, Human
caguccuugauccaauaguggg

SEQ ID NO: 1047948 - RNA, 22 nt, Human
agagacaaugccaaugcacacg

SEQ ID NO: 1047949 - RNA, 22 nt, Human
aucuauacucagaguuaauauc

SEQ ID NO: 1047950 - RNA, 19 nt, Human
agccagggugagaaggagc

SEQ ID NO: 1047951 - RNA, 22 nt, Human
gugaacuauuggguaucauaaa

SEQ ID NO: 1047952 - RNA, 22 nt, Human
ggacauggaaguauggagugga

SEQ ID NO: 1047953 - RNA, 22 nt, Human
gcacaauaauuuuuuuaagagg

SEQ ID NO: 1047954 - RNA, 22 nt, Human
ccaggcucaccuggagccccug

SEQ ID NO: 1047955 - RNA, 22 nt, Human
agaucccaggauacuggccuau

SEQ ID NO: 1047956 - RNA, 21 nt, Human
caaagccaggcaacucucucc

SEQ ID NO: 1047957 - RNA, 22 nt, Human
aaauugcagaugcuaaaugacu

SEQ ID NO: 1047958 - RNA, 22 nt, Human
aacuuugaggucacugaauucc

SEQ ID NO: 1047959 - RNA, 19 nt, Human
aacuggauaauggccacau

SEQ ID NO: 1047960 - RNA, 22 nt, Human
accagcccucaggucagauacu

SEQ ID NO: 1047961 - RNA, 22 nt, Human
ucagggaagaaaugggacuuua

SEQ ID NO: 1047962 - RNA, 22 nt, Human
gggcaugccugagccugccacu

SEQ ID NO: 1047963 - RNA, 22 nt, Human
uucagaaacaucaguggaugga

SEQ ID NO: 1047964 - RNA, 22 nt, Human
auugaaaauaaggccagaaaca

SEQ ID NO: 1047965 - RNA, 22 nt, Human
gccugcagccccucugcaguag

SEQ ID NO: 1047966 - RNA, 22 nt, Human
gagggagaaggacuaucaggcu

SEQ ID NO: 1047967 - RNA, 22 nt, Human
ggagauggcucugcaaggucua

SEQ ID NO: 1047968 - RNA, 22 nt, Human
uaguccuuuaucaaacauuuau

SEQ ID NO: 1047969 - RNA, 23 nt, Human
cagcccugaaaucgaggugacac

SEQ ID NO: 1047970 - RNA, 22 nt, Human
gugcauuuaggucacaugaugu

SEQ ID NO: 1047971 - RNA, 22 nt, Human
gggagacacuugcuuuagaggg

SEQ ID NO: 1047972 - RNA, 22 nt, Human
auccauuugaaagaacagucca

SEQ ID NO: 1047973 - RNA, 22 nt, Human
uauuaaagggaaguuaugcaug

SEQ ID NO: 1047974 - RNA, 22 nt, Human
aucuauacuacaaauggcuggu

SEQ ID NO: 1047975 - RNA, 22 nt, Human
gauuucaaguaucuugggcgag

SEQ ID NO: 1047976 - RNA, 22 nt, Human
guuaggcauuugccuuaauuuu

SEQ ID NO: 1047977 - RNA, 22 nt, Human
cuuaggcaaccaggucaaugcu

SEQ ID NO: 1047978 - RNA, 22 nt, Human
uuuaggcacaacuacucagcua

SEQ ID NO: 1047979 - RNA, 19 nt, Human
ucucuacacuacauuucua

SEQ ID NO: 1047980 - RNA, 22 nt, Human
augaauaaacaggugccucuuc

SEQ ID NO: 1047981 - RNA, 22 nt, Human
auaaaaguucaagagaguacag

SEQ ID NO: 1047982 - RNA, 22 nt, Human
agacaguggcucagccccaguc

SEQ ID NO: 1047983 - RNA, 22 nt, Human
ucagccaggccaccuucagcuu

SEQ ID NO: 1047984 - RNA, 22 nt, Human
cucuaacaccacagugugguuu

SEQ ID NO: 1047985 - RNA, 22 nt, Human
uauggcuuuuuauucaucuuac

SEQ ID NO: 1047986 - RNA, 22 nt, Human
acagcauugagagcuaaauuua

SEQ ID NO: 1047987 - RNA, 22 nt, Human
uaccugcacagccagccaugug

SEQ ID NO: 1047988 - RNA, 22 nt, Human
cguggggacccacgugcagcac

SEQ ID NO: 1047989 - RNA, 22 nt, Human
auuccaaacagugcugcagacu

SEQ ID NO: 1047990 - RNA, 22 nt, Human
ugaaacuaggccaaucaaauua

SEQ ID NO: 1047991 - RNA, 22 nt, Human
ugugaauaaugccgcaauaaac

SEQ ID NO: 1047992 - RNA, 22 nt, Human
agcccuggggugcagaaccaug

SEQ ID NO: 1047993 - RNA, 22 nt, Human
guccagggggcuuaagcaaacu

SEQ ID NO: 1047994 - RNA, 22 nt, Human
agggaauguagcaagaugccaa

SEQ ID NO: 1047995 - RNA, 22 nt, Human
cauuucaauacaguuuguaaau

SEQ ID NO: 1047996 - RNA, 19 nt, Human
aaaauugcguauuuugagg

SEQ ID NO: 1047997 - RNA, 22 nt, Human
uaguccuuuaauaguuaaugug

SEQ ID NO: 1047998 - RNA, 22 nt, Human
uugguacagaugagguauucuc

SEQ ID NO: 1047999 - RNA, 23 nt, Human
uagaauucaaucuguuccacauc

SEQ ID NO: 1048000 - RNA, 22 nt, Human
cuauacagagcauccuuaacuu

SEQ ID NO: 1048001 - RNA, 22 nt, Human
auagaauucguguuuguaauuc

SEQ ID NO: 1048002 - RNA, 18 nt, Human
uacagauuauagauacau

SEQ ID NO: 1048003 - RNA, 22 nt, Human
caauauauaggaacaacuuagg

SEQ ID NO: 1048004 - RNA, 22 nt, Human
gguacaauucugggguaugcuc

SEQ ID NO: 1048005 - RNA, 22 nt, Human
auaaagauuuuuaggcauuucu

SEQ ID NO: 1048006 - RNA, 22 nt, Human
ucuccaggagcaagucacccag

SEQ ID NO: 1048007 - RNA, 22 nt, Human
uguauguugggucaaaguacau

SEQ ID NO: 1048008 - RNA, 22 nt, Human
ugaagaaucagauuggccugcg

SEQ ID NO: 1048009 - RNA, 22 nt, Human
gccacaggugggcucugggaaa

SEQ ID NO: 1048010 - RNA, 18 nt, Human
gcaggcuuuuccuggguc

SEQ ID NO: 1048011 - RNA, 22 nt, Human
uucauacuaaaguguaagaugu

SEQ ID NO: 1048012 - RNA, 22 nt, Human
uuuaggaaugugguuuuugagc

SEQ ID NO: 1048013 - RNA, 22 nt, Human
gugaauaaucacccuucuggau

SEQ ID NO: 1048014 - RNA, 20 nt, Human
uacagaaugcaauaaaaugg

SEQ ID NO: 1048015 - RNA, 22 nt, Human
uggagggaacccaggcugcucu

SEQ ID NO: 1048016 - RNA, 22 nt, Human
auuaggcaauucugggcaucuc

SEQ ID NO: 1048017 - RNA, 22 nt, Human
aaauuucaagcaaaguagcuau

SEQ ID NO: 1048018 - RNA, 22 nt, Human
ucaguucaguauacacuauucu

SEQ ID NO: 1048019 - RNA, 22 nt, Human
augguuuaguuagggcuuuuca

SEQ ID NO: 1048020 - RNA, 22 nt, Human
uaggagggggaacaaggcauac

SEQ ID NO: 1048021 - RNA, 22 nt, Human
acaugcuuccaaauuauguugg

SEQ ID NO: 1048022 - RNA, 22 nt, Human
uucuuucagaacacaagugauu

SEQ ID NO: 1048023 - RNA, 22 nt, Human
cugaauaaagcccucgcgcgcu

SEQ ID NO: 1048024 - RNA, 22 nt, Human
cccagggacagaugggcagcua

SEQ ID NO: 1048025 - RNA, 22 nt, Human
gagggcaagaguuggaaacggu

SEQ ID NO: 1048026 - RNA, 22 nt, Human
uggggccagagcugcagggagc

SEQ ID NO: 1048027 - RNA, 22 nt, Human
agccaacuaauuaaacaacuuu

SEQ ID NO: 1048028 - RNA, 22 nt, Human
ucuggaucucccucauccuggg

SEQ ID NO: 1048029 - RNA, 18 nt, Human
ugggcugccuggccucug

SEQ ID NO: 1048030 - RNA, 22 nt, Human
ccaagggagacugugagaccuc

SEQ ID NO: 1048031 - RNA, 20 nt, Human
agggcagcuugaggagccgg

SEQ ID NO: 1048032 - RNA, 22 nt, Human
augguuuacaauguuuucaguu

SEQ ID NO: 1048033 - RNA, 22 nt, Human
uuacagaagaguaacuuggcaa

SEQ ID NO: 1048034 - RNA, 22 nt, Human
auggcauuccaagucuucuuuu

SEQ ID NO: 1048035 - RNA, 22 nt, Human
ucacagaagaugcuggauguug

SEQ ID NO: 1048036 - RNA, 22 nt, Human
uauccaaaguuucucagaaacu

SEQ ID NO: 1048037 - RNA, 22 nt, Human
ucagaauuagagcucuucuuga

SEQ ID NO: 1048038 - RNA, 22 nt, Human
uagucaccucuuuaaauguccu

SEQ ID NO: 1048039 - RNA, 22 nt, Human
cauaauuacugauaugcugauu

SEQ ID NO: 1048040 - RNA, 22 nt, Human
guuagaaaugcagaaacuugac

SEQ ID NO: 1048041 - RNA, 22 nt, Human
gaaaggcaguacagcugagccu

SEQ ID NO: 1048042 - RNA, 22 nt, Human
ugggcugcacugcucuuuaucg

SEQ ID NO: 1048043 - RNA, 22 nt, Human
uccugcagccaagggucaucga

SEQ ID NO: 1048044 - RNA, 22 nt, Human
uggggagaggaauuugaaugau

SEQ ID NO: 1048045 - RNA, 22 nt, Human
uacagaaguaaauaccaaaagc

SEQ ID NO: 1048046 - RNA, 22 nt, Human
agaauuccucuaggaucugccc

SEQ ID NO: 1048047 - RNA, 21 nt, Human
gauaaaaugggccuugguccu

SEQ ID NO: 1048048 - RNA, 22 nt, Human
uccccucucugcgcucccaggu

SEQ ID NO: 1048049 - RNA, 22 nt, Human
uguauacaggcauaagagauac

SEQ ID NO: 1048050 - RNA, 22 nt, Human
agggcugccugcucugcauuga

SEQ ID NO: 1048051 - RNA, 22 nt, Human
uguacaaugcugagguuugggg

SEQ ID NO: 1048052 - RNA, 22 nt, Human
ccauggcucuagagauugaaaa

SEQ ID NO: 1048053 - RNA, 22 nt, Human
auggcuuucucuaaugugguau

SEQ ID NO: 1048054 - RNA, 22 nt, Human
caaguccuuuucuuggcucagg

SEQ ID NO: 1048055 - RNA, 22 nt, Human
gaucagaaucuucauuuucagu

SEQ ID NO: 1048056 - RNA, 22 nt, Human
auguuacacauaggcauaaaug

SEQ ID NO: 1048057 - RNA, 22 nt, Human
uuuaaagagaaugugaaggagu

SEQ ID NO: 1048058 - RNA, 22 nt, Human
guuccaaauuuggaucuuuagg

SEQ ID NO: 1048059 - RNA, 23 nt, Human
uaucagugugaugaggcugcugc

SEQ ID NO: 1048060 - RNA, 22 nt, Human
uggcugccugaaugcaagacag

SEQ ID NO: 1048061 - RNA, 22 nt, Human
uuugaacaggaguaucuauagu

SEQ ID NO: 1048062 - RNA, 22 nt, Human
uucagaaaucgaguuucauguc

SEQ ID NO: 1048063 - RNA, 22 nt, Human
ggccuuuaagcaauugaaaaga

SEQ ID NO: 1048064 - RNA, 22 nt, Human
agucaccaucuguggcagccug

SEQ ID NO: 1048065 - RNA, 22 nt, Human
gcccagcaaggaccaagggccg

SEQ ID NO: 1048066 - RNA, 22 nt, Human
aauagaaaggaggggcucuugu

SEQ ID NO: 1048067 - RNA, 22 nt, Human
ccagggaggguccuguggcuuc

SEQ ID NO: 1048068 - RNA, 22 nt, Human
cuccagggagcuuggaaagacc

SEQ ID NO: 1048069 - RNA, 22 nt, Human
ucuggauccuaugcacuggacu

SEQ ID NO: 1048070 - RNA, 22 nt, Human
caauuuuuuccaugcucuuaca

SEQ ID NO: 1048071 - RNA, 22 nt, Human
ccagggagccuggugugucagc

SEQ ID NO: 1048072 - RNA, 22 nt, Human
caucagaaggccagaggguagc

SEQ ID NO: 1048073 - RNA, 22 nt, Human
gcugcccaaugguagugucuuu

SEQ ID NO: 1048074 - RNA, 22 nt, Human
cagaauguagaucaucaucaag

SEQ ID NO: 1048075 - RNA, 22 nt, Human
aacuggauuaacuggcucaaau

SEQ ID NO: 1048076 - RNA, 20 nt, Human
agggaggugcugggccugag

SEQ ID NO: 1048077 - RNA, 22 nt, Human
uagggaagcuccugauuccccu

SEQ ID NO: 1048078 - RNA, 22 nt, Human
agcagggaggcccagggcacug

SEQ ID NO: 1048079 - RNA, 22 nt, Human
cauuucaaguaacagauugcuu

SEQ ID NO: 1048080 - RNA, 22 nt, Human
aguagggagaccggaggccgcc

SEQ ID NO: 1048081 - RNA, 22 nt, Human
uaaguccuauuccaggucucuc

SEQ ID NO: 1048082 - RNA, 22 nt, Human
ugacuucaagguucagcaccuu

SEQ ID NO: 1048083 - RNA, 23 nt, Human
uguaacaauucccagccuuugcc

SEQ ID NO: 1048084 - RNA, 22 nt, Human
agggaggucuuugaggggcuua

SEQ ID NO: 1048085 - RNA, 22 nt, Human
ugggcugcggauaggccucgga

SEQ ID NO: 1048086 - RNA, 22 nt, Human
uaaucugaagaaacaggacuug

SEQ ID NO: 1048087 - RNA, 22 nt, Human
cauagaaaagaguagguaaugu

SEQ ID NO: 1048088 - RNA, 22 nt, Human
uuuauccauaucauuaaaaucu

SEQ ID NO: 1048089 - RNA, 22 nt, Human
uguacaaugccagggaacacca

SEQ ID NO: 1048090 - RNA, 22 nt, Human
uguucuugggaaucuuacaguu

SEQ ID NO: 1048091 - RNA, 22 nt, Human
ccagggaaggcucugccugcuu

SEQ ID NO: 1048092 - RNA, 22 nt, Human
agucaccagguuuuagagaccu

SEQ ID NO: 1048093 - RNA, 22 nt, Human
uuuccaaauaaggucacauucu

SEQ ID NO: 1048094 - RNA, 22 nt, Human
agaggagguggugaugcuuuaa

SEQ ID NO: 1048095 - RNA, 20 nt, Human
uccagcucaguuuuuuuguc

SEQ ID NO: 1048096 - RNA, 22 nt, Human
acuauacaagauuagggauuug

SEQ ID NO: 1048097 - RNA, 22 nt, Human
uucaccgugaaccgauuccuca

SEQ ID NO: 1048098 - RNA, 22 nt, Human
auaugaaaagaagucaccauug

SEQ ID NO: 1048099 - RNA, 22 nt, Human
uacugaaaagccacaaggacca

SEQ ID NO: 1048100 - RNA, 22 nt, Human
uuacagaaagguugugggauag

SEQ ID NO: 1048101 - RNA, 22 nt, Human
aucaguuaguuacugcuaagau

SEQ ID NO: 1048102 - RNA, 22 nt, Human
guacagaaggagcuuuggauuc

SEQ ID NO: 1048103 - RNA, 22 nt, Human
agggagaggagggucuuguuga

SEQ ID NO: 1048104 - RNA, 22 nt, Human
ucugcccacugcucugcugccc

SEQ ID NO: 1048105 - RNA, 22 nt, Human
agaucugaaucucauccgagga

SEQ ID NO: 1048106 - RNA, 22 nt, Human
gaauuucaaaagccagaacggg

SEQ ID NO: 1048107 - RNA, 22 nt, Human
ucugcccagggcagggcuugca

SEQ ID NO: 1048108 - RNA, 22 nt, Human
ggagacaacaaucaugugugaa

SEQ ID NO: 1048109 - RNA, 22 nt, Human
augaaaacggaccagagcuauu

SEQ ID NO: 1048110 - RNA, 22 nt, Human
uuaaaaucuaaagcaguugucu

SEQ ID NO: 1048111 - RNA, 21 nt, Human
ugaaacaaucagacagagucu

SEQ ID NO: 1048112 - RNA, 22 nt, Human
ucaguaaaugguugcuguuauu

SEQ ID NO: 1048113 - RNA, 22 nt, Human
gauuucaauccagcuuucuucu

SEQ ID NO: 1048114 - RNA, 22 nt, Human
uuuacagauguggaaagugagc

SEQ ID NO: 1048115 - RNA, 22 nt, Human
gccuuaauuuaugucuaacaua

SEQ ID NO: 1048116 - RNA, 22 nt, Human
gaaagccagagagaaagggcuc

SEQ ID NO: 1048117 - RNA, 23 nt, Human
aucagucuugguagcugugccca

SEQ ID NO: 1048118 - RNA, 22 nt, Human
uuccuuagggucagccagaucu

SEQ ID NO: 1048119 - RNA, 22 nt, Human
auuucaacagaguuugaaggca

SEQ ID NO: 1048120 - RNA, 22 nt, Human
aggagaggguggcauuaaguuu

SEQ ID NO: 1048121 - RNA, 22 nt, Human
cuuuaacaaaugacucuugucu

SEQ ID NO: 1048122 - RNA, 22 nt, Human
aaagccagguugugugcaggaa

SEQ ID NO: 1048123 - RNA, 22 nt, Human
aaaguguacuaugucaugaaca

SEQ ID NO: 1048124 - RNA, 22 nt, Human
uuaacagagugccuggcaugua

SEQ ID NO: 1048125 - RNA, 23 nt, Human
uauuacaauuggucuuauuaaga

SEQ ID NO: 1048126 - RNA, 22 nt, Human
agggcugcaggcaagauauggc

SEQ ID NO: 1048127 - RNA, 22 nt, Human
augugcuuguaauguuaaaugu

SEQ ID NO: 1048128 - RNA, 22 nt, Human
gcuccagguauuugcccuuuua

SEQ ID NO: 1048129 - RNA, 22 nt, Human
uuaacacuccuaacuacagucu

SEQ ID NO: 1048130 - RNA, 22 nt, Human
caugcuuaugauuugcuaagcc

SEQ ID NO: 1048131 - RNA, 22 nt, Human
aaacuuugguauguagcaaaac

SEQ ID NO: 1048132 - RNA, 21 nt, Human
acugcccaccaguuaacgcug

SEQ ID NO: 1048133 - RNA, 23 nt, Human
agggagaugccacaaagaugccc

SEQ ID NO: 1048134 - RNA, 22 nt, Human
ccagggaaacagcccaguguga

SEQ ID NO: 1048135 - RNA, 22 nt, Human
ucagccuccuaauuuccuguga

SEQ ID NO: 1048136 - RNA, 22 nt, Human
auuucaggauagccuaguuuug

SEQ ID NO: 1048137 - RNA, 22 nt, Human
gggaagugauggagccaggauu

SEQ ID NO: 1048138 - RNA, 22 nt, Human
aauauaaugcuguuuuaugcca

SEQ ID NO: 1048139 - RNA, 22 nt, Human
ucuccaggggcugcugugccac

SEQ ID NO: 1048140 - RNA, 22 nt, Human
uaauuacagguccaaaacaauc

SEQ ID NO: 1048141 - RNA, 22 nt, Human
ucagccaguugccccaguuagu

SEQ ID NO: 1048142 - RNA, 22 nt, Human
acaaaauuaugaagaggccuug

SEQ ID NO: 1048143 - RNA, 20 nt, Human
gaaguccuguuauauccuuu

SEQ ID NO: 1048144 - RNA, 22 nt, Human
uaggcaacaugucgaauacugu

SEQ ID NO: 1048145 - RNA, 22 nt, Human
auaucagaaauaguaagcagag

SEQ ID NO: 1048146 - RNA, 22 nt, Human
agggagagguugaaaccucagu

SEQ ID NO: 1048147 - RNA, 22 nt, Human
ugcccagguuugagugcccaag

SEQ ID NO: 1048148 - RNA, 22 nt, Human
uggcauuucaguauuuucauaa

SEQ ID NO: 1048149 - RNA, 20 nt, Human
aauaaacuacugagagaugu

SEQ ID NO: 1048150 - RNA, 22 nt, Human
gagggcccuggcuggcuccagc

SEQ ID NO: 1048151 - RNA, 22 nt, Human
acaggcaguugagguuugugug

SEQ ID NO: 1048152 - RNA, 21 nt, Human
agaauaaugguaucauuugcu

SEQ ID NO: 1048153 - RNA, 22 nt, Human
ccagggaaacuuuggaguggag

SEQ ID NO: 1048154 - RNA, 22 nt, Human
caaacuggcuaugggaaucuug

SEQ ID NO: 1048155 - RNA, 22 nt, Human
agggcugcaucugccuggugaa

SEQ ID NO: 1048156 - RNA, 22 nt, Human
cccagggaagggcuaccugagg

SEQ ID NO: 1048157 - RNA, 23 nt, Human
ggauuuaguggaugagcugagug

SEQ ID NO: 1048158 - RNA, 22 nt, Human
acagaaguuggaauuagauacu

SEQ ID NO: 1048159 - RNA, 22 nt, Human
uuuccaaaaugaaucuaaugca

SEQ ID NO: 1048160 - RNA, 19 nt, Human
caguccuuuccgcuuucuc

SEQ ID NO: 1048161 - RNA, 22 nt, Human
acagaauuugcuugggcaaugg

SEQ ID NO: 1048162 - RNA, 22 nt, Human
cugaccagcccugcccagggaa

SEQ ID NO: 1048163 - RNA, 22 nt, Human
gcugccucacuccagcccaaua

SEQ ID NO: 1048164 - RNA, 22 nt, Human
gcccagggcagggcaagaguga

SEQ ID NO: 1048165 - RNA, 22 nt, Human
ggaggcagaauagagugugggu

SEQ ID NO: 1048166 - RNA, 22 nt, Human
ggcccaaggcccaggucgagcu

SEQ ID NO: 1048167 - RNA, 22 nt, Human
ugcccaggauugugaggucagg

SEQ ID NO: 1048168 - RNA, 22 nt, Human
uaacagaaaggggacagaaaua

SEQ ID NO: 1048169 - RNA, 22 nt, Human
ccacagcuccucagccucuuuc

SEQ ID NO: 1048170 - RNA, 22 nt, Human
uuuuuugucuugaagaaauggu

SEQ ID NO: 1048171 - RNA, 22 nt, Human
uaaguccuggcugguuugaagc

SEQ ID NO: 1048172 - RNA, 22 nt, Human
gggccccacuggggcugccugc

SEQ ID NO: 1048173 - RNA, 22 nt, Human
aaucagaaagaucuugaugaga

SEQ ID NO: 1048174 - RNA, 22 nt, Human
uuccuuagcagaccugguaucc

SEQ ID NO: 1048175 - RNA, 22 nt, Human
uugauccaguugaaagugauga

SEQ ID NO: 1048176 - RNA, 22 nt, Human
acaggcagagucagguuggguu

SEQ ID NO: 1048177 - RNA, 22 nt, Human
uagggaaggagaccaagccaca

SEQ ID NO: 1048178 - RNA, 22 nt, Human
auguguaugcaugcacuaagau

SEQ ID NO: 1048179 - RNA, 17 nt, Human
ucagggaaugagguugu

SEQ ID NO: 1048180 - RNA, 22 nt, Human
gggaauguugacugagagcagg

SEQ ID NO: 1048181 - RNA, 22 nt, Human
guccuuaguuacuuuucauguc

SEQ ID NO: 1048182 - RNA, 22 nt, Human
auguucaaacaaguuaaugcca

SEQ ID NO: 1048183 - RNA, 22 nt, Human
aaaugcaguuuccugagaccca

SEQ ID NO: 1048184 - RNA, 22 nt, Human
ucaauaaaauuguuuuccuauc

SEQ ID NO: 1048185 - RNA, 20 nt, Human
agaaucugacccagagagac

SEQ ID NO: 1048186 - RNA, 22 nt, Human
uagucaccugugagcugcguag

SEQ ID NO: 1048187 - RNA, 22 nt, Human
uggggagagauugaggaguuuu

SEQ ID NO: 1048188 - RNA, 22 nt, Human
agaugccagcuuacacugggaa

SEQ ID NO: 1048189 - RNA, 22 nt, Human
accagccuccuagcugcuccug

SEQ ID NO: 1048190 - RNA, 22 nt, Human
ccagagaguaggaggcauuauu

SEQ ID NO: 1048191 - RNA, 22 nt, Human
cagggaugagagauggcacaga

SEQ ID NO: 1048192 - RNA, 19 nt, Human
caccacuucuuuuugcauc

SEQ ID NO: 1048193 - RNA, 22 nt, Human
cauggcuucuaagugauaacgu

SEQ ID NO: 1048194 - RNA, 22 nt, Human
agcaucuggcagaaagucagaa

SEQ ID NO: 1048195 - RNA, 22 nt, Human
ugcuuaauauugugauguaaua

SEQ ID NO: 1048196 - RNA, 22 nt, Human
ccuagggauacagcagaguaca

SEQ ID NO: 1048197 - RNA, 22 nt, Human
cugauacauaguagcaugucau

SEQ ID NO: 1048198 - RNA, 22 nt, Human
uguuucagucccuguguucaau

SEQ ID NO: 1048199 - RNA, 22 nt, Human
uggcauuugggcuggcuuuucu

SEQ ID NO: 1048200 - RNA, 22 nt, Human
agauuuccuaugguaauuauag

SEQ ID NO: 1048201 - RNA, 22 nt, Human
aaaacuuucagggauacagaaa

SEQ ID NO: 1048202 - RNA, 22 nt, Human
cuauuacauuucuggacauuca

SEQ ID NO: 1048203 - RNA, 22 nt, Human
ucaacuuugaaaccauagugaa

SEQ ID NO: 1048204 - RNA, 22 nt, Human
ccuauacaggcuucuuuacaug

SEQ ID NO: 1048205 - RNA, 22 nt, Human
aauuccagcuaggaaaagcuuc

SEQ ID NO: 1048206 - RNA, 22 nt, Human
aaaucaguuaagaugaggccau

SEQ ID NO: 1048207 - RNA, 22 nt, Human
caaguccuaaauguauuuguug

SEQ ID NO: 1048208 - RNA, 22 nt, Human
aaagcagcagcaccugcauuuc

SEQ ID NO: 1048209 - RNA, 22 nt, Human
ggcagugaaucugagagccugg

SEQ ID NO: 1048210 - RNA, 22 nt, Human
caggcgagggcccugaggagcc

SEQ ID NO: 1048211 - RNA, 22 nt, Human
gaauuucaacaguccucaaaug

SEQ ID NO: 1048212 - RNA, 22 nt, Human
agcugcccuucucuugcccuug

SEQ ID NO: 1048213 - RNA, 22 nt, Human
cagccucuaagcacagccucuc

SEQ ID NO: 1048214 - RNA, 22 nt, Human
acacagggcggaaagcaugaga

SEQ ID NO: 1048215 - RNA, 19 nt, Human
uccauaaugaagauagagg

SEQ ID NO: 1048216 - RNA, 22 nt, Human
gugaauaauauuguuuauaaaa

SEQ ID NO: 1048217 - RNA, 22 nt, Human
ggccacagagggcgggaugcug

SEQ ID NO: 1048218 - RNA, 22 nt, Human
aaucagugguucccagcccagg

SEQ ID NO: 1048219 - RNA, 22 nt, Human
ggcauuuauuugucucauucuu

SEQ ID NO: 1048220 - RNA, 22 nt, Human
caaagauuuuagaauuugcaau

SEQ ID NO: 1048221 - RNA, 22 nt, Human
caguccuuagauuuuacugcca

SEQ ID NO: 1048222 - RNA, 22 nt, Human
ugggcugccagcucuccagaug

SEQ ID NO: 1048223 - RNA, 22 nt, Human
aauaaaaugaacugguagaguu

SEQ ID NO: 1048224 - RNA, 18 nt, Human
auagaaaccuuuaaucag

SEQ ID NO: 1048225 - RNA, 22 nt, Human
gaaacaacuacuauugauuucu

SEQ ID NO: 1048226 - RNA, 22 nt, Human
auauuaaauggauuuugggagc

SEQ ID NO: 1048227 - RNA, 22 nt, Human
uacaugaaccuuuaugugugau

SEQ ID NO: 1048228 - RNA, 22 nt, Human
uguccuuaucuccaaacaauca

SEQ ID NO: 1048229 - RNA, 17 nt, Human
gagcagggaugcgguuc

SEQ ID NO: 1048230 - RNA, 22 nt, Human
caauuucaaugaggccacaggg

SEQ ID NO: 1048231 - RNA, 22 nt, Human
gaggaggaaacccuguuccucu

SEQ ID NO: 1048232 - RNA, 22 nt, Human
augaaaauugacagcggaagua

SEQ ID NO: 1048233 - RNA, 22 nt, Human
caggugaguaacaaugggugau

SEQ ID NO: 1048234 - RNA, 22 nt, Human
ccugcccaggagucucucugug

SEQ ID NO: 1048235 - RNA, 22 nt, Human
agaucauaugaaaaauuucaag

SEQ ID NO: 1048236 - RNA, 22 nt, Human
uaccagccuuuuaacaugggcc

SEQ ID NO: 1048237 - RNA, 22 nt, Human
cuccaggccccuggccuucugc

SEQ ID NO: 1048238 - RNA, 22 nt, Human
gcagccucugaugauggccgua

SEQ ID NO: 1048239 - RNA, 17 nt, Human
cccagggaccacugcuu

SEQ ID NO: 1048240 - RNA, 22 nt, Human
gaggcagcaggcugaggaggau

SEQ ID NO: 1048241 - RNA, 22 nt, Human
cagaauaaaagucccaaggcau

SEQ ID NO: 1048242 - RNA, 22 nt, Human
uauacagauuaacagauuuaaa

SEQ ID NO: 1048243 - RNA, 22 nt, Human
aggauuuaccgucauuuagucu

SEQ ID NO: 1048244 - RNA, 22 nt, Human
aguccuuacaccuggaaccuau

SEQ ID NO: 1048245 - RNA, 22 nt, Human
aaguccuuggagaauagaaagg

SEQ ID NO: 1048246 - RNA, 20 nt, Human
uguuccaagcuaaugaauga

SEQ ID NO: 1048247 - RNA, 22 nt, Human
cccugggaggcuuccaggcaga

SEQ ID NO: 1048248 - RNA, 22 nt, Human
uuuaggcacagggaguugguuu

SEQ ID NO: 1048249 - RNA, 22 nt, Human
aagcagcugauuucacagcuca

SEQ ID NO: 1048250 - RNA, 22 nt, Human
cauuuacauaacaguaacgcug

SEQ ID NO: 1048251 - RNA, 18 nt, Human
gaaagccaugcagcagug

SEQ ID NO: 1048252 - RNA, 22 nt, Human
ucuggaucaccacuucugccuc

SEQ ID NO: 1048253 - RNA, 22 nt, Human
caauuucauuaauagauauaga

SEQ ID NO: 1048254 - RNA, 22 nt, Human
uuugaauaaucacugggcauua

SEQ ID NO: 1048255 - RNA, 22 nt, Human
cauuucaauacuaucugagaau

SEQ ID NO: 1048256 - RNA, 22 nt, Human
gugaauaaccuacuccaggccu

SEQ ID NO: 1048257 - RNA, 22 nt, Human
cuccaggggccagaagccuggc

SEQ ID NO: 1048258 - RNA, 22 nt, Human
gaggaggggacaguacuugugc

SEQ ID NO: 1048259 - RNA, 22 nt, Human
gugaauaacuuucuauguuaau

SEQ ID NO: 1048260 - RNA, 22 nt, Human
caguccuucuccauuaaggcuc

SEQ ID NO: 1048261 - RNA, 22 nt, Human
ucuccagggacauguuucugga

SEQ ID NO: 1048262 - RNA, 22 nt, Human
ggcauuuagauugaauuucugu

SEQ ID NO: 1048263 - RNA, 22 nt, Human
acaugucuguaauuauuuuagg

SEQ ID NO: 1048264 - RNA, 22 nt, Human
uaaagccaauauaccuagcaua

SEQ ID NO: 1048265 - RNA, 22 nt, Human
ucagaauucugaccuuggguca

SEQ ID NO: 1048266 - RNA, 22 nt, Human
aucagcaucuuuaacaauuacc

SEQ ID NO: 1048267 - RNA, 22 nt, Human
aacuggauuuaggaacagagaa

SEQ ID NO: 1048268 - RNA, 22 nt, Human
aucugacuucacgcccaugcca

SEQ ID NO: 1048269 - RNA, 22 nt, Human
augacaaaagaagacaugaggu

SEQ ID NO: 1048270 - RNA, 22 nt, Human
ucaaaauuaaaccaacguccag

SEQ ID NO: 1048271 - RNA, 22 nt, Human
aggauuuaaauccuuaaccacu

SEQ ID NO: 1048272 - RNA, 22 nt, Human
uuucauaaggguuucuagacuu

SEQ ID NO: 1048273 - RNA, 22 nt, Human
cuucuuuccuuccuccaguggc

SEQ ID NO: 1048274 - RNA, 22 nt, Human
agaaaucaauaucuauauguug

SEQ ID NO: 1048275 - RNA, 22 nt, Human
agggcugccugacuccagagcc

SEQ ID NO: 1048276 - RNA, 22 nt, Human
aaaaauugcugagaacggaauu

SEQ ID NO: 1048277 - RNA, 22 nt, Human
caauuuuuguacuuauaguacu

SEQ ID NO: 1048278 - RNA, 22 nt, Human
ccuccugguaauuagcgaaagg

SEQ ID NO: 1048279 - RNA, 22 nt, Human
cuccuccagcucucccuggggg

SEQ ID NO: 1048280 - RNA, 22 nt, Human
ccugcccagagccccuuucacu

SEQ ID NO: 1048281 - RNA, 22 nt, Human
uggcccagcacuccaaguaggg

SEQ ID NO: 1048282 - RNA, 22 nt, Human
auagcuuuacagaagaguuuag

SEQ ID NO: 1048283 - RNA, 22 nt, Human
augcuuaagcucaguuauauau

SEQ ID NO: 1048284 - RNA, 22 nt, Human
caauuucaucuugugcuucaau

SEQ ID NO: 1048285 - RNA, 22 nt, Human
auuuccaauuucauccaugucc

SEQ ID NO: 1048286 - RNA, 17 nt, Human
aaggugagagcuguucu

SEQ ID NO: 1048287 - RNA, 22 nt, Human
aauuucaaguggcaucuuugau

SEQ ID NO: 1048288 - RNA, 22 nt, Human
uuuaggcauugggugcucaagu

SEQ ID NO: 1048289 - RNA, 20 nt, Human
cagccuccacucacucagcu

SEQ ID NO: 1048290 - RNA, 22 nt, Human
gagggcugauguugccaccuca

SEQ ID NO: 1048291 - RNA, 22 nt, Human
uccuuucaccaaaaaguguugu

SEQ ID NO: 1048292 - RNA, 22 nt, Human
uccuaggguuggagacagugac

SEQ ID NO: 1048293 - RNA, 22 nt, Human
uuccuuagugccucuuccgcug

SEQ ID NO: 1048294 - RNA, 22 nt, Human
guacagaauuaugccaugaggg

SEQ ID NO: 1048295 - RNA, 22 nt, Human
cuacagaaguuucccuugcuua

SEQ ID NO: 1048296 - RNA, 22 nt, Human
aguauuuagcauagugguuagu

SEQ ID NO: 1048297 - RNA, 22 nt, Human
ugagacaaagcagcugacagaa

SEQ ID NO: 1048298 - RNA, 22 nt, Human
gaccuccagcggcccugcagag

SEQ ID NO: 1048299 - RNA, 22 nt, Human
ccugcaccugagcagccugacu

SEQ ID NO: 1048300 - RNA, 22 nt, Human
agggcagcuaaggugcugacug

SEQ ID NO: 1048301 - RNA, 22 nt, Human
auuuagcaaaaaaugaugaagc

SEQ ID NO: 1048302 - RNA, 22 nt, Human
uccaacuuucuccuccggcuug

SEQ ID NO: 1048303 - RNA, 22 nt, Human
acagguuuuuguggauauaugu

SEQ ID NO: 1048304 - RNA, 22 nt, Human
augccaaagcccaaguucauca

SEQ ID NO: 1048305 - RNA, 22 nt, Human
gaauuucagagguaacaucauc

SEQ ID NO: 1048306 - RNA, 23 nt, Human
aagucaccaagaggaaggcggag

SEQ ID NO: 1048307 - RNA, 22 nt, Human
uuuggacaaguuacugguuucc

SEQ ID NO: 1048308 - RNA, 22 nt, Human
uaaaauguuugcaagagaccag

SEQ ID NO: 1048309 - RNA, 22 nt, Human
ugggcugcuuccucagcugaga

SEQ ID NO: 1048310 - RNA, 22 nt, Human
uucucuucaucucaguaaaugu

SEQ ID NO: 1048311 - RNA, 22 nt, Human
agagggaacggaucccagcgcg

SEQ ID NO: 1048312 - RNA, 22 nt, Human
uggcauuuagaaaacaacaugu

SEQ ID NO: 1048313 - RNA, 22 nt, Human
cauagcuuagggguuaaacuca

SEQ ID NO: 1048314 - RNA, 22 nt, Human
gggcagagacucagaaacagaa

SEQ ID NO: 1048315 - RNA, 22 nt, Human
gaguccuuuguuccuugccaca

SEQ ID NO: 1048316 - RNA, 19 nt, Human
ucugcccaguugucugccc

SEQ ID NO: 1048317 - RNA, 22 nt, Human
gcugcccagacauugaaucagg

SEQ ID NO: 1048318 - RNA, 22 nt, Human
ugauaauauuuugaaucauaag

SEQ ID NO: 1048319 - RNA, 22 nt, Human
ggcugcccucugcugacugcaa

SEQ ID NO: 1048320 - RNA, 23 nt, Human
uuacagaaaguaugcuuuuguuu

SEQ ID NO: 1048321 - RNA, 22 nt, Human
ccaaaauuauuacauuuguagg

SEQ ID NO: 1048322 - RNA, 22 nt, Human
guuccaaacaagucauaaagua

SEQ ID NO: 1048323 - RNA, 22 nt, Human
acugcccacaucucuuuccgcu

SEQ ID NO: 1048324 - RNA, 22 nt, Human
ucaaaauuagugaccaaaggca

SEQ ID NO: 1048325 - RNA, 22 nt, Human
agauaaugaaugccaugacauu

SEQ ID NO: 1048326 - RNA, 22 nt, Human
ugaggcagcauucuucaagaca

SEQ ID NO: 1048327 - RNA, 22 nt, Human
acaacuuuagucuggagggaaa

SEQ ID NO: 1048328 - RNA, 19 nt, Human
augcuuuauguuauuucuu

SEQ ID NO: 1048329 - RNA, 22 nt, Human
uggauuagugcugaaaugaugg

SEQ ID NO: 1048330 - RNA, 22 nt, Human
aucuaacagcaacaccagaaua

SEQ ID NO: 1048331 - RNA, 22 nt, Human
acuauacaccaaaauauuaagg

SEQ ID NO: 1048332 - RNA, 22 nt, Human
uagucaccagcuacaggacagc

SEQ ID NO: 1048333 - RNA, 22 nt, Human
ugaaugaacuaaaucauaguuc

SEQ ID NO: 1048334 - RNA, 22 nt, Human
cccaagggugcccagcagagga

SEQ ID NO: 1048335 - RNA, 22 nt, Human
gaaguccucaaugcauugucuu

SEQ ID NO: 1048336 - RNA, 22 nt, Human
uagaaacagaaaacuguaauag

SEQ ID NO: 1048337 - RNA, 22 nt, Human
cauggcuuuguucuguuagaug

SEQ ID NO: 1048338 - RNA, 22 nt, Human
gcugcaggcauuuuccugggca

SEQ ID NO: 1048339 - RNA, 22 nt, Human
uucagaaaugaauauugguauu

SEQ ID NO: 1048340 - RNA, 22 nt, Human
gcagggaagaucuuggagcugc

SEQ ID NO: 1048341 - RNA, 22 nt, Human
ucccagggcucuagagugcugg

SEQ ID NO: 1048342 - RNA, 22 nt, Human
caucauaaaauugagauaacug

SEQ ID NO: 1048343 - RNA, 22 nt, Human
caugaggauccaggugacaggc

SEQ ID NO: 1048344 - RNA, 22 nt, Human
acacaaacugcuagaaaauugg

SEQ ID NO: 1048345 - RNA, 22 nt, Human
gcugcccacaaccccgugucua

SEQ ID NO: 1048346 - RNA, 21 nt, Human
gcccagaguuaagcccaccca

SEQ ID NO: 1048347 - RNA, 22 nt, Human
ccagggaaucaggcagaaguca

SEQ ID NO: 1048348 - RNA, 22 nt, Human
ugaaauagucuaaaaaaccaga

SEQ ID NO: 1048349 - RNA, 22 nt, Human
cauuuacagugagaguuuuuac

SEQ ID NO: 1048350 - RNA, 22 nt, Human
gaccacagaggugugggagaga

SEQ ID NO: 1048351 - RNA, 22 nt, Human
ccagccucaucgccugccuguc

SEQ ID NO: 1048352 - RNA, 19 nt, Human
ucugcccacaagaaaggga

SEQ ID NO: 1048353 - RNA, 22 nt, Human
ucugcccaccagcgguugcaua

SEQ ID NO: 1048354 - RNA, 22 nt, Human
aguggaaggucaggggacagug

SEQ ID NO: 1048355 - RNA, 22 nt, Human
uuaaugauaccuauguuaauuu

SEQ ID NO: 1048356 - RNA, 22 nt, Human
ucagaauaugcuaaugacauuu

SEQ ID NO: 1048357 - RNA, 22 nt, Human
auacagaacucucaguuguaua

SEQ ID NO: 1048358 - RNA, 17 nt, Human
cuuuuaauuuacuuccc

SEQ ID NO: 1048359 - RNA, 22 nt, Human
uggagcaggacggggaguggua

SEQ ID NO: 1048360 - RNA, 17 nt, Human
cccugccaccaggaagc

SEQ ID NO: 1048361 - RNA, 22 nt, Human
ucuccagguggcuugggcuucu

SEQ ID NO: 1048362 - RNA, 17 nt, Human
guggagacagaugccuc

SEQ ID NO: 1048363 - RNA, 22 nt, Human
gauuuacagaucuaagggucac

SEQ ID NO: 1048364 - RNA, 22 nt, Human
ucuuuacaaucuaagcauaguu

SEQ ID NO: 1048365 - RNA, 22 nt, Human
caauuucaugccauguauugcu

SEQ ID NO: 1048366 - RNA, 22 nt, Human
aaaucucaauuugaauuguagc

SEQ ID NO: 1048367 - RNA, 22 nt, Human
caagaaucaacauuauuuagug

SEQ ID NO: 1048368 - RNA, 22 nt, Human
gggagccaaggagagaggccuu

SEQ ID NO: 1048369 - RNA, 22 nt, Human
ucuuuaauguacuuucuuucac

SEQ ID NO: 1048370 - RNA, 22 nt, Human
gaauuuuucuggaagcaauuau

SEQ ID NO: 1048371 - RNA, 22 nt, Human
gccagggaaacugcagaccagc

SEQ ID NO: 1048372 - RNA, 22 nt, Human
aagucacccuagggccuggacu

SEQ ID NO: 1048373 - RNA, 22 nt, Human
gggucugcuccaccugcagccc

SEQ ID NO: 1048374 - RNA, 22 nt, Human
aaguuucaugauguaauuauug

SEQ ID NO: 1048375 - RNA, 22 nt, Human
uguucuuucaguuagacacagu

SEQ ID NO: 1048376 - RNA, 22 nt, Human
gggagaaggaggacugugcugu

SEQ ID NO: 1048377 - RNA, 22 nt, Human
ggugagacuuuagaagagccag

SEQ ID NO: 1048378 - RNA, 21 nt, Human
gccagggaagagaguuggcug

SEQ ID NO: 1048379 - RNA, 22 nt, Human
agaauaaucacugaaguucaaa

SEQ ID NO: 1048380 - RNA, 22 nt, Human
agccuguguccucaucugcagc

SEQ ID NO: 1048381 - RNA, 19 nt, Human
uccagcccuguucccuuuu

SEQ ID NO: 1048382 - RNA, 22 nt, Human
cagggcccugcucaauuucucc

SEQ ID NO: 1048383 - RNA, 22 nt, Human
uaaaguuuguagcaauugauau

SEQ ID NO: 1048384 - RNA, 22 nt, Human
uaagaaucggucgcaacagagg

SEQ ID NO: 1048385 - RNA, 22 nt, Human
caaguccaggucaauuuaaagc

SEQ ID NO: 1048386 - RNA, 22 nt, Human
uagaacauaagucauucauuug

SEQ ID NO: 1048387 - RNA, 22 nt, Human
cuccagugucucagagcagaug

SEQ ID NO: 1048388 - RNA, 22 nt, Human
ccagggaagcuggucacgcagg

SEQ ID NO: 1048389 - RNA, 22 nt, Human
ucagaauuuuuguuacccuuga

SEQ ID NO: 1048390 - RNA, 21 nt, Human
aggauuuacuauuaacugugu

SEQ ID NO: 1048391 - RNA, 22 nt, Human
aaaucaguucucccuuucuuca

SEQ ID NO: 1048392 - RNA, 22 nt, Human
uucagaaagguaaauggauuuc

SEQ ID NO: 1048393 - RNA, 22 nt, Human
gauaaugaugacaaugacaacc

SEQ ID NO: 1048394 - RNA, 21 nt, Human
ccaagacucccaucuaguggu

SEQ ID NO: 1048395 - RNA, 22 nt, Human
gcagcccaggaggcgggagccc

SEQ ID NO: 1048396 - RNA, 22 nt, Human
uuucaacuuguuugcuuccaua

SEQ ID NO: 1048397 - RNA, 22 nt, Human
acugcccauuaaaggugcuuug

SEQ ID NO: 1048398 - RNA, 22 nt, Human
ucagggagaggugagagccugu

SEQ ID NO: 1048399 - RNA, 22 nt, Human
cagcccugcagcuggaucucac

SEQ ID NO: 1048400 - RNA, 22 nt, Human
ccagggaggagcauuucauggu

SEQ ID NO: 1048401 - RNA, 20 nt, Human
agaaaaaguguggaaauuuc

SEQ ID NO: 1048402 - RNA, 22 nt, Human
acauaauaaaaauaacagcuca

SEQ ID NO: 1048403 - RNA, 22 nt, Human
ugggcugcugagaaugagagag

SEQ ID NO: 1048404 - RNA, 22 nt, Human
uggcuuuacugucauucuuaug

SEQ ID NO: 1048405 - RNA, 22 nt, Human
uuguccaaaguaacacaucuag

SEQ ID NO: 1048406 - RNA, 22 nt, Human
uaucuaaauggaauauuccaga

SEQ ID NO: 1048407 - RNA, 19 nt, Human
ugggagaggcaacagagua

SEQ ID NO: 1048408 - RNA, 22 nt, Human
ggauucagugucuguuaauagu

SEQ ID NO: 1048409 - RNA, 22 nt, Human
aggcagcauuucugcuuaucca

SEQ ID NO: 1048410 - RNA, 22 nt, Human
gacagggaggaaagagacugcu

SEQ ID NO: 1048411 - RNA, 22 nt, Human
aaguccuucccaagcauguacc

SEQ ID NO: 1048412 - RNA, 22 nt, Human
aagggagacccaccguccugga

SEQ ID NO: 1048413 - RNA, 22 nt, Human
caaagcagccugcaguguggac

SEQ ID NO: 1048414 - RNA, 22 nt, Human
agggcccuagggaaugagacau

SEQ ID NO: 1048415 - RNA, 22 nt, Human
cggagaggugggggcagcaucu

SEQ ID NO: 1048416 - RNA, 22 nt, Human
aaaguccuguuaacuguuaaca

SEQ ID NO: 1048417 - RNA, 22 nt, Human
aaagggagcauggcugcaggga

SEQ ID NO: 1048418 - RNA, 22 nt, Human
ggggcugcuucaccuuuuuacg

SEQ ID NO: 1048419 - RNA, 22 nt, Human
ucugaagauuaccagcuaaaug

SEQ ID NO: 1048420 - RNA, 22 nt, Human
ucugcccacagccuccugucca

SEQ ID NO: 1048421 - RNA, 22 nt, Human
aaauugaaugauuaagugguga

SEQ ID NO: 1048422 - RNA, 22 nt, Human
gaguccuuuugugccacaggga

SEQ ID NO: 1048423 - RNA, 22 nt, Human
caauuucagugcuguggagagg

SEQ ID NO: 1048424 - RNA, 23 nt, Human
aggagccccuaauucugggcagc

SEQ ID NO: 1048425 - RNA, 19 nt, Human
aagggcugggcaccucacu

SEQ ID NO: 1048426 - RNA, 22 nt, Human
uaaagccacuucauucuagucu

SEQ ID NO: 1048427 - RNA, 22 nt, Human
aaaucagucccucuuggaauuu

SEQ ID NO: 1048428 - RNA, 22 nt, Human
ucugaagaacugaguaaacaug

SEQ ID NO: 1048429 - RNA, 22 nt, Human
caaguccucaaagggcucugcu

SEQ ID NO: 1048430 - RNA, 21 nt, Human
ucauucacaggguauuguaua

SEQ ID NO: 1048431 - RNA, 21 nt, Human
acaugucuggucauuuuuagc

SEQ ID NO: 1048432 - RNA, 22 nt, Human
uggcuuuaaaucuguauucaua

SEQ ID NO: 1048433 - RNA, 22 nt, Human
ccuggaucuccucuauucauau

SEQ ID NO: 1048434 - RNA, 22 nt, Human
uucccaauauucugcuuuuaug

SEQ ID NO: 1048435 - RNA, 22 nt, Human
guuaggcagcccaagaugucag

SEQ ID NO: 1048436 - RNA, 22 nt, Human
gcugcccagcaggccccagggg

SEQ ID NO: 1048437 - RNA, 22 nt, Human
cugaauaauuuuauaguugcug

SEQ ID NO: 1048438 - RNA, 22 nt, Human
uccagggagcaagucaggccgg

SEQ ID NO: 1048439 - RNA, 22 nt, Human
gucaacuugcaagaugcugggc

SEQ ID NO: 1048440 - RNA, 22 nt, Human
ucaguaaaugaaugaauauaug

SEQ ID NO: 1048441 - RNA, 22 nt, Human
gagucaccuuggccgcuguccc

SEQ ID NO: 1048442 - RNA, 23 nt, Human
ugcugcccacucuuccagcccuc

SEQ ID NO: 1048443 - RNA, 22 nt, Human
uaggauuuaggcuuuaacaucu

SEQ ID NO: 1048444 - RNA, 22 nt, Human
gcucuaauugaaaaauacugca

SEQ ID NO: 1048445 - RNA, 22 nt, Human
ccagcccuuugugguucacuga

SEQ ID NO: 1048446 - RNA, 21 nt, Human
auagaacaccaggcauauaua

SEQ ID NO: 1048447 - RNA, 22 nt, Human
caguccuugcuaugacccugag

SEQ ID NO: 1048448 - RNA, 22 nt, Human
caguaaauuaucucaucucugu

SEQ ID NO: 1048449 - RNA, 22 nt, Human
uagaauucaagauucaacaggc

SEQ ID NO: 1048450 - RNA, 22 nt, Human
aaugggauaauuguucauggga

SEQ ID NO: 1048451 - RNA, 22 nt, Human
augaauaaaacauuuuaaucag

SEQ ID NO: 1048452 - RNA, 22 nt, Human
agugggaaacuggagagacuuc

SEQ ID NO: 1048453 - RNA, 22 nt, Human
gcuucacaggcaaguuaagccu

SEQ ID NO: 1048454 - RNA, 22 nt, Human
cuuaaagaaauugaggagagga

SEQ ID NO: 1048455 - RNA, 22 nt, Human
aagagggaggugcgggugcaga

SEQ ID NO: 1048456 - RNA, 22 nt, Human
gggacacagagaaacuggagaa

SEQ ID NO: 1048457 - RNA, 22 nt, Human
auuucacaucuaucucagauuu

SEQ ID NO: 1048458 - RNA, 22 nt, Human
agggcugcaaugggagauaacu

SEQ ID NO: 1048459 - RNA, 22 nt, Human
cuugucaguguacuuucuuuug

SEQ ID NO: 1048460 - RNA, 22 nt, Human
gauuucaaaaguagauccauca

SEQ ID NO: 1048461 - RNA, 22 nt, Human
ugcuuuaagacacuaaguuuga

SEQ ID NO: 1048462 - RNA, 22 nt, Human
gaauaaucaugaaauucaguga

SEQ ID NO: 1048463 - RNA, 22 nt, Human
agcagggccuggcacuccuggg

SEQ ID NO: 1048464 - RNA, 22 nt, Human
agagugaaguuuuugaaaguga

SEQ ID NO: 1048465 - RNA, 22 nt, Human
uuagaaaucaccucugaagauc

SEQ ID NO: 1048466 - RNA, 22 nt, Human
ugucaccaguuccaggaaauaa

SEQ ID NO: 1048467 - RNA, 22 nt, Human
uucagaaacagagugagugagu

SEQ ID NO: 1048468 - RNA, 22 nt, Human
cagccucuguggcugccacacc

SEQ ID NO: 1048469 - RNA, 18 nt, Human
aagucaccccugcucccu

SEQ ID NO: 1048470 - RNA, 22 nt, Human
aggauuuacaaugauucuaggu

SEQ ID NO: 1048471 - RNA, 19 nt, Human
guuccaaaggccagaccuu

SEQ ID NO: 1048472 - RNA, 22 nt, Human
uuccaaacugccaauucagaag

SEQ ID NO: 1048473 - RNA, 22 nt, Human
acagggaaggagcauagaaaaa

SEQ ID NO: 1048474 - RNA, 23 nt, Human
aaucuauacuuaggcugguaaua

SEQ ID NO: 1048475 - RNA, 22 nt, Human
caggaggggguggaguuucgcc

SEQ ID NO: 1048476 - RNA, 22 nt, Human
augcuuuagugucaaguuuggg

SEQ ID NO: 1048477 - RNA, 22 nt, Human
uuacaaaguguuaugauaaaca

SEQ ID NO: 1048478 - RNA, 22 nt, Human
cuccuuccccuacucagcaucc

SEQ ID NO: 1048479 - RNA, 22 nt, Human
aaaucauguuggcacaauaaaa

SEQ ID NO: 1048480 - RNA, 21 nt, Human
aggagggcacaaggccaggaa

SEQ ID NO: 1048481 - RNA, 22 nt, Human
augguuuugaagggaggucaaa

SEQ ID NO: 1048482 - RNA, 22 nt, Human
uucacagaguuauuuuuaugcu

SEQ ID NO: 1048483 - RNA, 22 nt, Human
agugggagaaugaauaagggcc

SEQ ID NO: 1048484 - RNA, 22 nt, Human
aagacuuucaaguaugcaugca

SEQ ID NO: 1048485 - RNA, 22 nt, Human
aagacaugacugcacagccaaa

SEQ ID NO: 1048486 - RNA, 23 nt, Human
agacauggcaggaauacagcuuc

SEQ ID NO: 1048487 - RNA, 22 nt, Human
uuuuugcugauaagcagaauuc

SEQ ID NO: 1048488 - RNA, 22 nt, Human
gaauauauuggugaaaauaguu

SEQ ID NO: 1048489 - RNA, 22 nt, Human
ggaggagguggguuaaguugua

SEQ ID NO: 1048490 - RNA, 22 nt, Human
caauuucacugacacccuggaa

SEQ ID NO: 1048491 - RNA, 22 nt, Human
aauaauuacccaucuuuuugua

SEQ ID NO: 1048492 - RNA, 23 nt, Human
ucuccaggccuuacuccaggccu

SEQ ID NO: 1048493 - RNA, 22 nt, Human
ccauggcuuuugagucucaaga

SEQ ID NO: 1048494 - RNA, 22 nt, Human
auaggcuuauauaaaaacaucu

SEQ ID NO: 1048495 - RNA, 22 nt, Human
aaagcagucacuccagugugau

SEQ ID NO: 1048496 - RNA, 18 nt, Human
ugagacagcuaccacuug

SEQ ID NO: 1048497 - RNA, 22 nt, Human
gagagggcucuguguggguacu

SEQ ID NO: 1048498 - RNA, 22 nt, Human
agaauuccuccucugggacacu

SEQ ID NO: 1048499 - RNA, 22 nt, Human
ugcuauacauguacauauuagu

SEQ ID NO: 1048500 - RNA, 22 nt, Human
uccagaauacucugaaaucauu

SEQ ID NO: 1048501 - RNA, 22 nt, Human
cuccaggguuccccgauccacu

SEQ ID NO: 1048502 - RNA, 22 nt, Human
ugaggaggugggcacacagagu

SEQ ID NO: 1048503 - RNA, 22 nt, Human
cucaccacagagccuguccagc

SEQ ID NO: 1048504 - RNA, 22 nt, Human
uaaucauggccucaaauuuuau

SEQ ID NO: 1048505 - RNA, 22 nt, Human
uacagauauagagauuuauaga

SEQ ID NO: 1048506 - RNA, 22 nt, Human
cuacagaauucaacaaaugguu

SEQ ID NO: 1048507 - RNA, 23 nt, Human
uguaacaauuucauauacaugca

SEQ ID NO: 1048508 - RNA, 22 nt, Human
aggcagcauccagaggagaaug

SEQ ID NO: 1048509 - RNA, 22 nt, Human
gguuuaauggagauauuucaga

SEQ ID NO: 1048510 - RNA, 22 nt, Human
uuggaucaaauuucaugcuguc

SEQ ID NO: 1048511 - RNA, 22 nt, Human
ucuccaggcccacugauuuaua

SEQ ID NO: 1048512 - RNA, 22 nt, Human
ucagaauuugauuccugggaua

SEQ ID NO: 1048513 - RNA, 22 nt, Human
uugguacaaaaguaacuguggu

SEQ ID NO: 1048514 - RNA, 22 nt, Human
ucagggaaauucaagggagauu

SEQ ID NO: 1048515 - RNA, 22 nt, Human
gaguucuaaaggcagaacauaa

SEQ ID NO: 1048516 - RNA, 22 nt, Human
ucagggaaucagacucugcagc

SEQ ID NO: 1048517 - RNA, 22 nt, Human
agaugcugauugaauagauuuc

SEQ ID NO: 1048518 - RNA, 22 nt, Human
gcccuggcaccucguugcccag

SEQ ID NO: 1048519 - RNA, 22 nt, Human
ucagggaaccucuccuguuucu

SEQ ID NO: 1048520 - RNA, 20 nt, Human
guggagaggcuggcgggacu

SEQ ID NO: 1048521 - RNA, 22 nt, Human
aaugggauaggucuucaggaau

SEQ ID NO: 1048522 - RNA, 22 nt, Human
uggguuuaaacucaacucuaaa

SEQ ID NO: 1048523 - RNA, 22 nt, Human
gcaaacaagcugccugaagauu

SEQ ID NO: 1048524 - RNA, 22 nt, Human
ucagggagauuuggggacucaa

SEQ ID NO: 1048525 - RNA, 22 nt, Human
cauggcuuguaauaaauuuaua

SEQ ID NO: 1048526 - RNA, 22 nt, Human
ucaaaauuucagcacuagcccu

SEQ ID NO: 1048527 - RNA, 22 nt, Human
caguaucugucaguaaucaggu

SEQ ID NO: 1048528 - RNA, 22 nt, Human
cuacagaaggagaaauggguaa

SEQ ID NO: 1048529 - RNA, 22 nt, Human
acuuuuaugauaaucaauguuc

SEQ ID NO: 1048530 - RNA, 22 nt, Human
gggccugccauugcugccccag

SEQ ID NO: 1048531 - RNA, 22 nt, Human
uagaacuacaagcauuaaaagu

SEQ ID NO: 1048532 - RNA, 22 nt, Human
ucugcccacaguccaauaguug

SEQ ID NO: 1048533 - RNA, 22 nt, Human
uuccuuaguugacugucuuagu

SEQ ID NO: 1048534 - RNA, 22 nt, Human
acaucugaccauuacaagacau

SEQ ID NO: 1048535 - RNA, 22 nt, Human
uucaccacagucucaucuacgc

SEQ ID NO: 1048536 - RNA, 22 nt, Human
caucagaauguuagagaaggga

SEQ ID NO: 1048537 - RNA, 22 nt, Human
gcuggaucauauggugguucua

SEQ ID NO: 1048538 - RNA, 16 nt, Human
ccaccugcagcucuca

SEQ ID NO: 1048539 - RNA, 22 nt, Human
aguuauccgaaggcacugagau

SEQ ID NO: 1048540 - RNA, 22 nt, Human
ggccagggaggagaggccccug

SEQ ID NO: 1048541 - RNA, 22 nt, Human
cauggcuuuccaguccuccacu

SEQ ID NO: 1048542 - RNA, 22 nt, Human
ugucagccuugcuuuagcgguu

SEQ ID NO: 1048543 - RNA, 22 nt, Human
uuccuuagccugccuuccaggg

SEQ ID NO: 1048544 - RNA, 22 nt, Human
augagggaggcaaggagaugcu

SEQ ID NO: 1048545 - RNA, 22 nt, Human
auuccaaacgccucgcggacuu

SEQ ID NO: 1048546 - RNA, 22 nt, Human
agcccagcuuucaccccucugg

SEQ ID NO: 1048547 - RNA, 22 nt, Human
gcuccagguggcuuauuuguau

SEQ ID NO: 1048548 - RNA, 22 nt, Human
aaacuuuggauugugauugugc

SEQ ID NO: 1048549 - RNA, 22 nt, Human
gauggcaaacugggaccagagg

SEQ ID NO: 1048550 - RNA, 22 nt, Human
uuccaggggcagcagugauggu

SEQ ID NO: 1048551 - RNA, 22 nt, Human
uucaaguuuugccuccccaucc

SEQ ID NO: 1048552 - RNA, 21 nt, Human
ucagggaagugugcagaaggg

SEQ ID NO: 1048553 - RNA, 22 nt, Human
uccagcucaaagugcuccuguc

SEQ ID NO: 1048554 - RNA, 22 nt, Human
ucagggaaauagcagggcugaa

SEQ ID NO: 1048555 - RNA, 22 nt, Human
uaagaaucaguagauauagauu

SEQ ID NO: 1048556 - RNA, 21 nt, Human
uccagccuuucccucacuucc

SEQ ID NO: 1048557 - RNA, 22 nt, Human
ugggaccagauaaagggagguc

SEQ ID NO: 1048558 - RNA, 21 nt, Human
ucaguaaaccuaaagauugua

SEQ ID NO: 1048559 - RNA, 22 nt, Human
aaguccuuuauccuaaaagguc

SEQ ID NO: 1048560 - RNA, 22 nt, Human
aucagaaauugcuaccagugga

SEQ ID NO: 1048561 - RNA, 22 nt, Human
ccuccuggugacaaggcaaagc

SEQ ID NO: 1048562 - RNA, 22 nt, Human
acauggggcccaaagagagguc

SEQ ID NO: 1048563 - RNA, 21 nt, Human
ccuccaggagcagagcccuga

SEQ ID NO: 1048564 - RNA, 22 nt, Human
agaaaucaugucuuauuucuau

SEQ ID NO: 1048565 - RNA, 22 nt, Human
cauucacauucuucuuacuguu

SEQ ID NO: 1048566 - RNA, 22 nt, Human
agcugccccaugagaggcaggu

SEQ ID NO: 1048567 - RNA, 22 nt, Human
ccagggaagaaagaugaagugc

SEQ ID NO: 1048568 - RNA, 22 nt, Human
acagaugauuuuuaugaaaaca

SEQ ID NO: 1048569 - RNA, 22 nt, Human
gggauuuaguaggauaguauac

SEQ ID NO: 1048570 - RNA, 21 nt, Human
ccagagagagggaaguggguu

SEQ ID NO: 1048571 - RNA, 22 nt, Human
ccagucacucugugagagcuac

SEQ ID NO: 1048572 - RNA, 22 nt, Human
uguccuuacaaggucccuuucg

SEQ ID NO: 1048573 - RNA, 22 nt, Human
gguacaauccacuguggguuag

SEQ ID NO: 1048574 - RNA, 22 nt, Human
cuuaaagaugucaaggcuguuu

SEQ ID NO: 1048575 - RNA, 22 nt, Human
uccagggcuugacagggugccu

SEQ ID NO: 1048576 - RNA, 22 nt, Human
uuccaaagugcuggaauuacau

SEQ ID NO: 1048577 - RNA, 22 nt, Human
aaagcagcugcucuggccuuga

SEQ ID NO: 1048578 - RNA, 22 nt, Human
uuacagaacugcccuaguuggc

SEQ ID NO: 1048579 - RNA, 22 nt, Human
caucagaaccaguggggacauu

SEQ ID NO: 1048580 - RNA, 22 nt, Human
uccagccuaauguucuucccac

SEQ ID NO: 1048581 - RNA, 22 nt, Human
uggcauuugcucccuuguguuc

SEQ ID NO: 1048582 - RNA, 22 nt, Human
ggcagugagucccggagaggcc

SEQ ID NO: 1048583 - RNA, 19 nt, Human
agaggcagucuccaacagg

SEQ ID NO: 1048584 - RNA, 22 nt, Human
cagggaagaauaguuagcaaag

SEQ ID NO: 1048585 - RNA, 22 nt, Human
agaggaggauuuguaaaggucu

SEQ ID NO: 1048586 - RNA, 22 nt, Human
uuuaauauuucuuuccugaagc

SEQ ID NO: 1048587 - RNA, 22 nt, Human
aaaucaguucacguucugaggu

SEQ ID NO: 1048588 - RNA, 22 nt, Human
gagauggccagugccaggacaa

SEQ ID NO: 1048589 - RNA, 22 nt, Human
ggggagcagaagcagcaacaac

SEQ ID NO: 1048590 - RNA, 22 nt, Human
caguggaggccuugggaccuuu

SEQ ID NO: 1048591 - RNA, 22 nt, Human
uguaacaauuucuuacuauugu

SEQ ID NO: 1048592 - RNA, 22 nt, Human
aguccagugaacuguaaauagg

SEQ ID NO: 1048593 - RNA, 22 nt, Human
cagaauuuaaguggauuauucu

SEQ ID NO: 1048594 - RNA, 22 nt, Human
ccuggaucuuuguuguaaauau

SEQ ID NO: 1048595 - RNA, 22 nt, Human
aaaguccagagggcacacugaa

SEQ ID NO: 1048596 - RNA, 22 nt, Human
ugcacaaacuugugucccaggg

SEQ ID NO: 1048597 - RNA, 22 nt, Human
augaaacaguguguauagcaaa

SEQ ID NO: 1048598 - RNA, 22 nt, Human
accagcuccaggccccugcugg

SEQ ID NO: 1048599 - RNA, 22 nt, Human
acagcauugcuccaucucaaga

SEQ ID NO: 1048600 - RNA, 22 nt, Human
uccagggacagcgcuggagcua

SEQ ID NO: 1048601 - RNA, 22 nt, Human
auuauccagcaccaaugucaga

SEQ ID NO: 1048602 - RNA, 20 nt, Human
uauuccaaggguagagaaaa

SEQ ID NO: 1048603 - RNA, 22 nt, Human
guaaacauuacugugcuguaua

SEQ ID NO: 1048604 - RNA, 22 nt, Human
cauauaauguuugaagaugugg

SEQ ID NO: 1048605 - RNA, 22 nt, Human
gcagggcagaccuccagccuau

SEQ ID NO: 1048606 - RNA, 21 nt, Human
uuucugucucugccacuaguu

SEQ ID NO: 1048607 - RNA, 22 nt, Human
uauaaaauggcaucagcuccaa

SEQ ID NO: 1048608 - RNA, 22 nt, Human
auuacaagaugcauccauauuu

SEQ ID NO: 1048609 - RNA, 22 nt, Human
ggcauuuaguuuucauauucug

SEQ ID NO: 1048610 - RNA, 22 nt, Human
ccaucuccaaauaccaucacau

SEQ ID NO: 1048611 - RNA, 22 nt, Human
gcagaauuggauaguugugaua

SEQ ID NO: 1048612 - RNA, 22 nt, Human
augaaaauucuaugcaggccag

SEQ ID NO: 1048613 - RNA, 22 nt, Human
uuuaggcagcagugaggaugaa

SEQ ID NO: 1048614 - RNA, 22 nt, Human
cuggcuuucuguuauaaagaca

SEQ ID NO: 1048615 - RNA, 22 nt, Human
auuccaaagacagaagcagcug

SEQ ID NO: 1048616 - RNA, 22 nt, Human
acagggccagccugggaccugg

SEQ ID NO: 1048617 - RNA, 22 nt, Human
ugaauaaucauguccauagugu

SEQ ID NO: 1048618 - RNA, 22 nt, Human
uaucagaaggcacauggagucu

SEQ ID NO: 1048619 - RNA, 22 nt, Human
agaggaggcuggguccagauaa

SEQ ID NO: 1048620 - RNA, 22 nt, Human
aggcagaccaugaaucaugacc

SEQ ID NO: 1048621 - RNA, 22 nt, Human
ucagaaauacaaaacacuuacu

SEQ ID NO: 1048622 - RNA, 22 nt, Human
cuuuacauaaggauaaaccugg

SEQ ID NO: 1048623 - RNA, 22 nt, Human
uuauuccauucaguucaacaag

SEQ ID NO: 1048624 - RNA, 22 nt, Human
cauuuacaauguacagguugug

SEQ ID NO: 1048625 - RNA, 22 nt, Human
acuggaucagaaucugauuuuu

SEQ ID NO: 1048626 - RNA, 22 nt, Human
auccaaacauguaccacacuaa

SEQ ID NO: 1048627 - RNA, 22 nt, Human
gcccagggcugcaaguggacgc

SEQ ID NO: 1048628 - RNA, 22 nt, Human
agggcugcuccuccuucaggcc

SEQ ID NO: 1048629 - RNA, 22 nt, Human
gucagcauaguucacacacagu

SEQ ID NO: 1048630 - RNA, 22 nt, Human
auggcuuuguuccaauaaaacu

SEQ ID NO: 1048631 - RNA, 22 nt, Human
augaaacacacacgcgcauacu

SEQ ID NO: 1048632 - RNA, 22 nt, Human
aaagaaucacauccuucagcaa

SEQ ID NO: 1048633 - RNA, 22 nt, Human
uaaguccuaacagacugggggc

SEQ ID NO: 1048634 - RNA, 22 nt, Human
ugcugagaucugccaguagaug

SEQ ID NO: 1048635 - RNA, 22 nt, Human
ucccagggugcgccugcccucg

SEQ ID NO: 1048636 - RNA, 22 nt, Human
cauuuggccauuccagucacau

SEQ ID NO: 1048637 - RNA, 22 nt, Human
uacacauguuuggcaaguaugu

SEQ ID NO: 1048638 - RNA, 22 nt, Human
uggggccagcggggaggacuca

SEQ ID NO: 1048639 - RNA, 22 nt, Human
caggcagcugggucaccguccc

SEQ ID NO: 1048640 - RNA, 22 nt, Human
uaauuauaacaguuacaucuua

SEQ ID NO: 1048641 - RNA, 22 nt, Human
uucuaacaaguggcuuguuagu

SEQ ID NO: 1048642 - RNA, 22 nt, Human
aaucauaauucaaauaagcuua

SEQ ID NO: 1048643 - RNA, 22 nt, Human
uaauuucaaauuucuuagcgug

SEQ ID NO: 1048644 - RNA, 22 nt, Human
gagggcccuggcuucuugcugg

SEQ ID NO: 1048645 - RNA, 22 nt, Human
uccuccagagauuugaguuauu

SEQ ID NO: 1048646 - RNA, 22 nt, Human
uuuccaaaguugccauaagcuu

SEQ ID NO: 1048647 - RNA, 22 nt, Human
ccagggaaugauauuuuugccu

SEQ ID NO: 1048648 - RNA, 22 nt, Human
uauacagaaagaauucaagucu

SEQ ID NO: 1048649 - RNA, 22 nt, Human
acagccaggaggaacucaguga

SEQ ID NO: 1048650 - RNA, 22 nt, Human
uaugaaaauuuagcugaagcau

SEQ ID NO: 1048651 - RNA, 22 nt, Human
ggacauggaaaucggcuugcuc

SEQ ID NO: 1048652 - RNA, 22 nt, Human
uuucuagugguuaagauuuaca

SEQ ID NO: 1048653 - RNA, 22 nt, Human
cauacuuugggauaagagugga

SEQ ID NO: 1048654 - RNA, 20 nt, Human
ggucagccccaccuggcagc

SEQ ID NO: 1048655 - RNA, 22 nt, Human
ucuccaggugcuaagugugccu

SEQ ID NO: 1048656 - RNA, 22 nt, Human
gauagaaagaauauagauucca

SEQ ID NO: 1048657 - RNA, 22 nt, Human
ucaccgucgggggucgcugucu

SEQ ID NO: 1048658 - RNA, 22 nt, Human
agacaagacuaggcaguuguug

SEQ ID NO: 1048659 - RNA, 22 nt, Human
cagauaaaggcuuacuaguagu

SEQ ID NO: 1048660 - RNA, 18 nt, Human
aaguccuuccuuugcuuu

SEQ ID NO: 1048661 - RNA, 22 nt, Human
gaguggggcuuuaaaggcucag

SEQ ID NO: 1048662 - RNA, 22 nt, Human
cacaauacuauuuuuaggucuu

SEQ ID NO: 1048663 - RNA, 22 nt, Human
aauucacaaaaguuagauccau

SEQ ID NO: 1048664 - RNA, 22 nt, Human
uuugaagucaaagauugauucc

SEQ ID NO: 1048665 - RNA, 22 nt, Human
gcuauacaaguguagaauagag

SEQ ID NO: 1048666 - RNA, 22 nt, Human
aagaaugauuacaaagcaacga

SEQ ID NO: 1048667 - RNA, 22 nt, Human
ccaccaggacagcccugagggg

SEQ ID NO: 1048668 - RNA, 22 nt, Human
agcaggaggguuuuguagaguc

SEQ ID NO: 1048669 - RNA, 22 nt, Human
aauuucaaacucuugcccucag

SEQ ID NO: 1048670 - RNA, 22 nt, Human
uguccuuaaggagcuuaauguc

SEQ ID NO: 1048671 - RNA, 22 nt, Human
ugggcugcaccuuuguaaaucu

SEQ ID NO: 1048672 - RNA, 22 nt, Human
cauggauugaauauaaauuaga

SEQ ID NO: 1048673 - RNA, 22 nt, Human
uucaacuuuaugcauauguauu

SEQ ID NO: 1048674 - RNA, 22 nt, Human
uagaauaugauuaauuuucuua

SEQ ID NO: 1048675 - RNA, 22 nt, Human
acaugcuuguuuuucacaaccu

SEQ ID NO: 1048676 - RNA, 22 nt, Human
caacuuuucugugaauuuaagu

SEQ ID NO: 1048677 - RNA, 22 nt, Human
cauuucaaggaccacccuggga

SEQ ID NO: 1048678 - RNA, 22 nt, Human
cuagauccauuuucugucucug

SEQ ID NO: 1048679 - RNA, 22 nt, Human
uggcuuaauauuucauauuuaa

SEQ ID NO: 1048680 - RNA, 19 nt, Human
accagcccacucccaguuu

SEQ ID NO: 1048681 - RNA, 22 nt, Human
cccaggaaauagccaggaggug

SEQ ID NO: 1048682 - RNA, 22 nt, Human
uuguuucauggggauguuuauu

SEQ ID NO: 1048683 - RNA, 22 nt, Human
aucuauacccaucaugauuuaa

SEQ ID NO: 1048684 - RNA, 22 nt, Human
aguccuuagaacagugccuggg

SEQ ID NO: 1048685 - RNA, 22 nt, Human
caucagaaaccuugaggaaacu

SEQ ID NO: 1048686 - RNA, 22 nt, Human
aaagucaucagaaccuuccaga

SEQ ID NO: 1048687 - RNA, 22 nt, Human
gaguggggcccacugcugggug

SEQ ID NO: 1048688 - RNA, 22 nt, Human
uguacaaucuuggucccuuuau

SEQ ID NO: 1048689 - RNA, 21 nt, Human
agcugcccagaguagggaagg

SEQ ID NO: 1048690 - RNA, 22 nt, Human
gggccaugagagguucaucaac

SEQ ID NO: 1048691 - RNA, 22 nt, Human
aauuucaagucuugaagaagua

SEQ ID NO: 1048692 - RNA, 22 nt, Human
uaguacaguuuaaauauuaaua

SEQ ID NO: 1048693 - RNA, 22 nt, Human
gcugcccauugcacguuguggc

SEQ ID NO: 1048694 - RNA, 22 nt, Human
ugggagaguuuguuuagaguga

SEQ ID NO: 1048695 - RNA, 18 nt, Human
ugaaacaagaauggugca

SEQ ID NO: 1048696 - RNA, 22 nt, Human
aaucaaaaccuacagagguaau

SEQ ID NO: 1048697 - RNA, 23 nt, Human
uugcacauuggagcuggucuucu

SEQ ID NO: 1048698 - RNA, 22 nt, Human
ugaaacaaauuuggaaaaucua

SEQ ID NO: 1048699 - RNA, 22 nt, Human
auccuuggaugugucuuuuugu

SEQ ID NO: 1048700 - RNA, 22 nt, Human
caaugaaauugagauccagaga

SEQ ID NO: 1048701 - RNA, 22 nt, Human
cuccuccaguccuccaaggaca

SEQ ID NO: 1048702 - RNA, 22 nt, Human
acagaauuaucaggaaauguua

SEQ ID NO: 1048703 - RNA, 22 nt, Human
gauagaaagagugguucuuuuu

SEQ ID NO: 1048704 - RNA, 22 nt, Human
uaaguccuucaccuaauccuca

SEQ ID NO: 1048705 - RNA, 22 nt, Human
uauggcuuuaaacaacuuaggu

SEQ ID NO: 1048706 - RNA, 22 nt, Human
uuuaucuguuguacauuuaugc

SEQ ID NO: 1048707 - RNA, 22 nt, Human
uggcuuaagcgcaacucugucu

SEQ ID NO: 1048708 - RNA, 22 nt, Human
guacagaaaguacccauagaag

SEQ ID NO: 1048709 - RNA, 22 nt, Human
ccaugcacaccagcaggcagac

SEQ ID NO: 1048710 - RNA, 22 nt, Human
gaaugaauucagcacauggaau

SEQ ID NO: 1048711 - RNA, 23 nt, Human
acuuuauccuauaucuuuguucu

SEQ ID NO: 1048712 - RNA, 22 nt, Human
uggauuuaccacagggccacag

SEQ ID NO: 1048713 - RNA, 22 nt, Human
ugaaacaaugugaaguugcuga

SEQ ID NO: 1048714 - RNA, 22 nt, Human
aggagggagcacuauaugggga

SEQ ID NO: 1048715 - RNA, 22 nt, Human
agauucuacucuagauccaugg

SEQ ID NO: 1048716 - RNA, 22 nt, Human
aggauuuagcaugaaaugugaa

SEQ ID NO: 1048717 - RNA, 22 nt, Human
uccugcagcugcagaccugggg

SEQ ID NO: 1048718 - RNA, 22 nt, Human
uuaacacuugaacucuacaugu

SEQ ID NO: 1048719 - RNA, 22 nt, Human
gaagugaagguuacucuagauu

SEQ ID NO: 1048720 - RNA, 22 nt, Human
cccagggaaugacucuggccuu

SEQ ID NO: 1048721 - RNA, 17 nt, Human
cuguuaauucauuuccc

SEQ ID NO: 1048722 - RNA, 22 nt, Human
uaugcugugcuagauacaauau

SEQ ID NO: 1048723 - RNA, 22 nt, Human
uaucauaaguuaauuaaacagu

SEQ ID NO: 1048724 - RNA, 22 nt, Human
uuuccaaagguggcaggaacaa

SEQ ID NO: 1048725 - RNA, 22 nt, Human
ccagggaagauuagaagccacu

SEQ ID NO: 1048726 - RNA, 22 nt, Human
aauaauuuccagccaacuggaa

SEQ ID NO: 1048727 - RNA, 22 nt, Human
cagauuucuauuucaaauacau

SEQ ID NO: 1048728 - RNA, 22 nt, Human
agcaaagcacuuugcauacaua

SEQ ID NO: 1048729 - RNA, 22 nt, Human
aaaaggcauggagguugauagu

SEQ ID NO: 1048730 - RNA, 22 nt, Human
aguacaauuuaaugaagauagc

SEQ ID NO: 1048731 - RNA, 22 nt, Human
uucauuaauucauucagugacu

SEQ ID NO: 1048732 - RNA, 22 nt, Human
caaggcaguuccccagagggcu

SEQ ID NO: 1048733 - RNA, 22 nt, Human
cccagggagguagcaggagaaa

SEQ ID NO: 1048734 - RNA, 22 nt, Human
gagucaccuugggucagcgaua

SEQ ID NO: 1048735 - RNA, 23 nt, Human
ccaaagucgaagucuaguccaga

SEQ ID NO: 1048736 - RNA, 22 nt, Human
cagagagggcggcccuggcuuc

SEQ ID NO: 1048737 - RNA, 22 nt, Human
uuccagggcagcaagugaaugg

SEQ ID NO: 1048738 - RNA, 22 nt, Human
guacagaaggauuucuaguagu

SEQ ID NO: 1048739 - RNA, 22 nt, Human
aaaguccuagcgauccacagaa

SEQ ID NO: 1048740 - RNA, 22 nt, Human
agcugcccuuaauaggcauuca

SEQ ID NO: 1048741 - RNA, 22 nt, Human
gcaaacaaggacauacauccug

SEQ ID NO: 1048742 - RNA, 22 nt, Human
caguucacacugugcuaucugc

SEQ ID NO: 1048743 - RNA, 22 nt, Human
gcagggcuugcagcagcuagac

SEQ ID NO: 1048744 - RNA, 22 nt, Human
ugagacaauaaggcugagaagc

SEQ ID NO: 1048745 - RNA, 22 nt, Human
uauaagaaacaaggcaaauuuu

SEQ ID NO: 1048746 - RNA, 22 nt, Human
ugccagggagcccugcugacca

SEQ ID NO: 1048747 - RNA, 22 nt, Human
uuuaaugauagcuguuucacau

SEQ ID NO: 1048748 - RNA, 22 nt, Human
agagggaaauccaggagugcuu

SEQ ID NO: 1048749 - RNA, 22 nt, Human
aauuucaaagcucacuggcaua

SEQ ID NO: 1048750 - RNA, 22 nt, Human
uuugaaguggaaaaggauuuaa

SEQ ID NO: 1048751 - RNA, 22 nt, Human
uucaacuuuggagauuuaauaa

SEQ ID NO: 1048752 - RNA, 22 nt, Human
cucuaauccuuugucccugggu

SEQ ID NO: 1048753 - RNA, 22 nt, Human
ucagggaauaaguagaugagug

SEQ ID NO: 1048754 - RNA, 22 nt, Human
ugggcugcugucugcacaugcu

SEQ ID NO: 1048755 - RNA, 22 nt, Human
caaacauucaaguacaagucuu

SEQ ID NO: 1048756 - RNA, 22 nt, Human
gcagggagguuugcugaccugg

SEQ ID NO: 1048757 - RNA, 22 nt, Human
ggggugggcgugcagggacacc

SEQ ID NO: 1048758 - RNA, 22 nt, Human
caguccagcccccugcuaaaag

SEQ ID NO: 1048759 - RNA, 22 nt, Human
agggagaggagcguuucacauc

SEQ ID NO: 1048760 - RNA, 22 nt, Human
aggggagcuaacaccagagccc

SEQ ID NO: 1048761 - RNA, 22 nt, Human
acauuccaaaaacuagcagaua

SEQ ID NO: 1048762 - RNA, 22 nt, Human
uugcccagagcugccuguuaca

SEQ ID NO: 1048763 - RNA, 22 nt, Human
acauaauagcauuucuaauuug

SEQ ID NO: 1048764 - RNA, 22 nt, Human
gaaugaaagauuugcauucuau

SEQ ID NO: 1048765 - RNA, 18 nt, Human
acccuggcaugcucuucc

SEQ ID NO: 1048766 - RNA, 22 nt, Human
ucacagaaauaagauaguuauu

SEQ ID NO: 1048767 - RNA, 20 nt, Human
guaaaauauggucuuugggu

SEQ ID NO: 1048768 - RNA, 22 nt, Human
acaaugaacacacaaggaauuc

SEQ ID NO: 1048769 - RNA, 22 nt, Poliovirus
cagcccugcuugguucgaggca

SEQ ID NO: 1048770 - RNA, 22 nt, Poliovirus
caccuccugggagucaacugcu

SEQ ID NO: 1048771 - RNA, 22 nt, Poliovirus
ggcccuguaagcguggcagggu

SEQ ID NO: 1048772 - RNA, 22 nt, Poliovirus
cuuuaagagaugcuguccuuua

SEQ ID NO: 1048773 - RNA, 22 nt, Human
cccugagcucaggcccuugggg

SEQ ID NO: 1048774 - RNA, 22 nt, Human
uuccuggccccaccccuggaga

SEQ ID NO: 1048775 - RNA, 22 nt, Human
uacugacacaaagccaaucccu

SEQ ID NO: 1048776 - RNA, 22 nt, Human
gcuggcaggauaacuucuaagc

SEQ ID NO: 1048777 - RNA, 22 nt, Human
ccuggcaggccccuccuggauu

SEQ ID NO: 1048778 - RNA, 22 nt, Human
agacacagcugcaggagguggg

SEQ ID NO: 1048779 - RNA, 21 nt, Human
agagucugagugugcaagggc

SEQ ID NO: 1048780 - RNA, 22 nt, Human
uugggaagaaacauguccauca

SEQ ID NO: 1048781 - RNA, 22 nt, Human
gcuggcagggacagcugcgugu

SEQ ID NO: 1048782 - RNA, 22 nt, Human
cagcccaggucucucuuccagu

SEQ ID NO: 1048783 - RNA, 22 nt, Human
cuaugagaagaaaacaagauua

SEQ ID NO: 1048784 - RNA, 22 nt, Human
guggcagucgcugacagauaca

SEQ ID NO: 1048785 - RNA, 22 nt, Human
gccacauagaggaggauauuaa

SEQ ID NO: 1048786 - RNA, 18 nt, Human
ggcagggaaaagauaggg

SEQ ID NO: 1048787 - RNA, 22 nt, Human
gagacacacauucuggagagaa

SEQ ID NO: 1048788 - RNA, 22 nt, Human
ggcaaggggucaggcugagaca

SEQ ID NO: 1048789 - RNA, 22 nt, Human
uggcagagagagugcagucgac

SEQ ID NO: 1048790 - RNA, 22 nt, Human
cugccugccuuggccuccagga

SEQ ID NO: 1048791 - RNA, 19 nt, Human
acacauuugcacaauccac

SEQ ID NO: 1048792 - RNA, 22 nt, Human
ucacacaugaguaaauacaggg

SEQ ID NO: 1048793 - RNA, 20 nt, Human
auacacaugcagacagaugc

SEQ ID NO: 1048794 - RNA, 22 nt, Human
uuccaggcaugucagacauagg

SEQ ID NO: 1048795 - RNA, 22 nt, Human
acauacacaagcguacaugaac

SEQ ID NO: 1048796 - RNA, 22 nt, Human
cacauacauacguauguauaca

SEQ ID NO: 1048797 - RNA, 22 nt, Human
gcccacacaccagcucaggagg

SEQ ID NO: 1048798 - RNA, 22 nt, Human
aguugggaguuauagacucuau

SEQ ID NO: 1048799 - RNA, 22 nt, Human
ucuggcagugagcaacuugaca

SEQ ID NO: 1048800 - RNA, 22 nt, Human
cagggacaauggcagagccuga

SEQ ID NO: 1048801 - RNA, 22 nt, Human
gacacauagaucuaucucacuc

SEQ ID NO: 1048802 - RNA, 22 nt, Human
aacacagaucaaaauauuuccu

SEQ ID NO: 1048803 - RNA, 22 nt, Human
ggugccaggcuguagucagggu

SEQ ID NO: 1048804 - RNA, 22 nt, Human
cagccaagaaccacagacccag

SEQ ID NO: 1048805 - RNA, 22 nt, Human
cucuccagccuuuagcccacgc

SEQ ID NO: 1048806 - RNA, 22 nt, Human
acacacaugccuuuccuaagua

SEQ ID NO: 1048807 - RNA, 22 nt, Human
ggccucagagaaggcugugcgg

SEQ ID NO: 1048808 - RNA, 23 nt, Human
ggacacauuuauuucagaauuca

SEQ ID NO: 1048809 - RNA, 22 nt, Human
aggcaggggagcuggaagggua

SEQ ID NO: 1048810 - RNA, 22 nt, Human
ugguccuggaagguccugaggg

SEQ ID NO: 1048811 - RNA, 22 nt, Human
uuccuggcauagagagggcaca

SEQ ID NO: 1048812 - RNA, 22 nt, Human
gccuggcacaguagggacccaa

SEQ ID NO: 1048813 - RNA, 22 nt, Human
uccccacaucucugcaucaggc

SEQ ID NO: 1048814 - RNA, 22 nt, Human
uggccucugugggagcugagca

SEQ ID NO: 1048815 - RNA, 22 nt, Human
gguggcauaagaacacuaaaga

SEQ ID NO: 1048816 - RNA, 22 nt, Human
ccucuccuugcacccgucccgc

SEQ ID NO: 1048817 - RNA, 22 nt, Human
cacauacuuguguguacauaug

SEQ ID NO: 1048818 - RNA, 22 nt, Human
aagaggucauaccagauaaggg

SEQ ID NO: 1048819 - RNA, 21 nt, Human
uucucuccauaugcccagccc

SEQ ID NO: 1048820 - RNA, 22 nt, Human
cuuacacagucuggcacuucuu

SEQ ID NO: 1048821 - RNA, 22 nt, Human
gggccccuuguaucucuggcuc

SEQ ID NO: 1048822 - RNA, 19 nt, Human
guccuggcgccgccacacc

SEQ ID NO: 1048823 - RNA, 22 nt, Human
guccucugucccuggggcacgg

SEQ ID NO: 1048824 - RNA, 22 nt, Human
uccugagccugacaaucaccau

SEQ ID NO: 1048825 - RNA, 22 nt, Human
agggcugacaaauggcagugac

SEQ ID NO: 1048826 - RNA, 22 nt, Human
ccuggcagcuaagugcuuugag

SEQ ID NO: 1048827 - RNA, 21 nt, Human
agugccaguagguauggagga

SEQ ID NO: 1048828 - RNA, 22 nt, Human
guccuggcugguucuguggggc

SEQ ID NO: 1048829 - RNA, 22 nt, Human
aaagaaucagaagucucaaaca

SEQ ID NO: 1048830 - RNA, 22 nt, Human
ucuggcagagugauaggauaag

SEQ ID NO: 1048831 - RNA, 22 nt, Human
gcacauaaagggcaugggaggu

SEQ ID NO: 1048832 - RNA, 21 nt, Human
uccccacauuucuaaacagac

SEQ ID NO: 1048833 - RNA, 22 nt, Human
ucccagccuuucuuuucugcug

SEQ ID NO: 1048834 - RNA, 22 nt, Human
cagguuggucggcaaguacaca

SEQ ID NO: 1048835 - RNA, 18 nt, Human
uccuggcagucagagagg

SEQ ID NO: 1048836 - RNA, 22 nt, Human
ccaucacaguccccaucgugau

SEQ ID NO: 1048837 - RNA, 22 nt, Human
cacauacugagaaucacaccca

SEQ ID NO: 1048838 - RNA, 22 nt, Human
auacauucaaaggaaggauaga

SEQ ID NO: 1048839 - RNA, 22 nt, Human
cccaggccuggucugggccagu

SEQ ID NO: 1048840 - RNA, 22 nt, Human
ucuccugggaggacaaggaagg

SEQ ID NO: 1048841 - RNA, 22 nt, Human
gcuccaggcagcauaguggaug

SEQ ID NO: 1048842 - RNA, 22 nt, Human
aaaagagugacugauaaguaua

SEQ ID NO: 1048843 - RNA, 22 nt, Human
guacacacuauuuaaaguguuu

SEQ ID NO: 1048844 - RNA, 22 nt, Human
uccuggcagagggcggccucga

SEQ ID NO: 1048845 - RNA, 20 nt, Human
cugcuccacccggcucucag

SEQ ID NO: 1048846 - RNA, 22 nt, Human
ccucagcugcuucccuggagcc

SEQ ID NO: 1048847 - RNA, 22 nt, Human
agugccccaugggugccugggg

SEQ ID NO: 1048848 - RNA, 22 nt, Human
gaggacucugggcguguauggg

SEQ ID NO: 1048849 - RNA, 22 nt, Human
ucacauacugaaaguccaguga

SEQ ID NO: 1048850 - RNA, 19 nt, Human
guccucucaacaacccggg

SEQ ID NO: 1048851 - RNA, 22 nt, Human
cauacauuuauacacaucuaug

SEQ ID NO: 1048852 - RNA, 22 nt, Human
cuccuggcuuucccagaccagg

SEQ ID NO: 1048853 - RNA, 22 nt, Human
ccuggcagguuacaaccaguua

SEQ ID NO: 1048854 - RNA, 22 nt, Human
uccuggcaaagauguugguguu

SEQ ID NO: 1048855 - RNA, 22 nt, Human
cccugccuugggguccacaccg

SEQ ID NO: 1048856 - RNA, 22 nt, Human
agggccccauagucacugcccg

SEQ ID NO: 1048857 - RNA, 22 nt, Human
ccauucauacaauuuuguucua

SEQ ID NO: 1048858 - RNA, 22 nt, Human
aggacaagcuaaaggacuuccu

SEQ ID NO: 1048859 - RNA, 22 nt, Human
gcacacaguauaugcucauuaa

SEQ ID NO: 1048860 - RNA, 22 nt, Human
uacacauccauguuuugacuuu

SEQ ID NO: 1048861 - RNA, 22 nt, Human
cggcuggugucgggcacagcaa

SEQ ID NO: 1048862 - RNA, 18 nt, Human
cccacacagcaguagcuc

SEQ ID NO: 1048863 - RNA, 22 nt, Human
uacacagauuucaguaucauca

SEQ ID NO: 1048864 - RNA, 22 nt, Human
cacacacugacaccuuaucuug

SEQ ID NO: 1048865 - RNA, 22 nt, Human
gucuggaaggaggagauggagc

SEQ ID NO: 1048866 - RNA, 22 nt, Human
ccaggcugggcggggaaccugg

SEQ ID NO: 1048867 - RNA, 22 nt, Human
cuggcaguuggcauuggcaucu

SEQ ID NO: 1048868 - RNA, 22 nt, Human
gggccccuugcugcucugcugg

SEQ ID NO: 1048869 - RNA, 22 nt, Human
gcuggcaggguucucacugaaa

SEQ ID NO: 1048870 - RNA, 22 nt, Human
gcuggcagcauuagacccuggg

SEQ ID NO: 1048871 - RNA, 22 nt, Human
ccacacagucaguuuccaagaa

SEQ ID NO: 1048872 - RNA, 22 nt, Human
gccuggcaauggccucaggaag

SEQ ID NO: 1048873 - RNA, 22 nt, Human
cagguuggggacuuaggaugac

SEQ ID NO: 1048874 - RNA, 22 nt, Human
ucuggcagagucagugcacaca

SEQ ID NO: 1048875 - RNA, 22 nt, Human
gagaaagauuguccuucagggg

SEQ ID NO: 1048876 - RNA, 22 nt, Human
guccacagagggcugggcaggc

SEQ ID NO: 1048877 - RNA, 22 nt, Human
auccccacgauauagccaaagc

SEQ ID NO: 1048878 - RNA, 22 nt, Human
uauucccauuccacuuaucaag

SEQ ID NO: 1048879 - RNA, 22 nt, Human
cccugagcgugaggaggaagua

SEQ ID NO: 1048880 - RNA, 22 nt, Human
gcuggcaggagaccauacccua

SEQ ID NO: 1048881 - RNA, 22 nt, Human
aggaaagauggaaggaggauaa

SEQ ID NO: 1048882 - RNA, 22 nt, Human
ucuggcagugaagucaugaggu

SEQ ID NO: 1048883 - RNA, 22 nt, Human
uacacacaugcauuugccuuau

SEQ ID NO: 1048884 - RNA, 22 nt, Human
gcuggcaguguauuguuagcug

SEQ ID NO: 1048885 - RNA, 22 nt, Human
uggcaguggauaggggagcggu

SEQ ID NO: 1048886 - RNA, 22 nt, Human
uguuggaauuaggauacagagg

SEQ ID NO: 1048887 - RNA, 22 nt, Human
aaagagucguguuccagguuug

SEQ ID NO: 1048888 - RNA, 22 nt, Human
gucacaggcaguaacuaggacc

SEQ ID NO: 1048889 - RNA, 22 nt, Human
uggcaggaaaguaacagagcac

SEQ ID NO: 1048890 - RNA, 22 nt, Human
uccugagcacagagacaaggaa

SEQ ID NO: 1048891 - RNA, 22 nt, Human
acacacacaagcagguugugga

SEQ ID NO: 1048892 - RNA, 22 nt, Human
cuccuggcaguuccccuuguca

SEQ ID NO: 1048893 - RNA, 22 nt, Human
auggccugcagugcugccacag

SEQ ID NO: 1048894 - RNA, 22 nt, Human
cacccacauuccaucacucugc

SEQ ID NO: 1048895 - RNA, 22 nt, Human
ucccacacagcccgcucaccgg

SEQ ID NO: 1048896 - RNA, 20 nt, Human
cccacacccuucccacuugg

SEQ ID NO: 1048897 - RNA, 22 nt, Human
cccagcccccgagugucuggaa

SEQ ID NO: 1048898 - RNA, 22 nt, Human
acauacacaugaauauauuuuu

SEQ ID NO: 1048899 - RNA, 22 nt, Human
ggagucugcucccagacaugau

SEQ ID NO: 1048900 - RNA, 22 nt, Human
auacacacugcuauccuuuuuu

SEQ ID NO: 1048901 - RNA, 22 nt, Human
ucccacacuugaaacaaggcug

SEQ ID NO: 1048902 - RNA, 22 nt, Human
gcugcgccggaucccacguucc

SEQ ID NO: 1048903 - RNA, 22 nt, Human
gcccagccuccaagcuccaagg

SEQ ID NO: 1048904 - RNA, 22 nt, Human
guccucuguuuccaucugacuu

SEQ ID NO: 1048905 - RNA, 22 nt, Human
ucacacaugcuaagccagagau

SEQ ID NO: 1048906 - RNA, 22 nt, Human
acaggugguaaaauggacuguc

SEQ ID NO: 1048907 - RNA, 22 nt, Human
gccuggcaggggccugggagug

SEQ ID NO: 1048908 - RNA, 22 nt, Human
gcuggcagagacaagaagacua

SEQ ID NO: 1048909 - RNA, 22 nt, Human
uugggaagaauggaggugguua

SEQ ID NO: 1048910 - RNA, 19 nt, Human
cugagagaugcuucacaca

SEQ ID NO: 1048911 - RNA, 22 nt, Human
ccuggcagguggcgcccucggc

SEQ ID NO: 1048912 - RNA, 22 nt, Human
agaaagaggaugcagaucucau

SEQ ID NO: 1048913 - RNA, 18 nt, Human
acaggcugugggaauggu

SEQ ID NO: 1048914 - RNA, 21 nt, Human
ccuggcagaagccugauaugc

SEQ ID NO: 1048915 - RNA, 22 nt, Human
acacaucuuagacugaaauaug

SEQ ID NO: 1048916 - RNA, 22 nt, Human
gcuggcagaagagcugguucaa

SEQ ID NO: 1048917 - RNA, 22 nt, Human
agaggccugugugcuccagugg

SEQ ID NO: 1048918 - RNA, 22 nt, Human
agcccagcuuugaaccauauca

SEQ ID NO: 1048919 - RNA, 22 nt, Human
ucacacacauggauaguauuuu

SEQ ID NO: 1048920 - RNA, 22 nt, Human
ucccaccccggucaagggcuga

SEQ ID NO: 1048921 - RNA, 22 nt, Human
ugcucuguauucuauggcaguu

SEQ ID NO: 1048922 - RNA, 22 nt, Human
gagaaagacguaggcugggagg

SEQ ID NO: 1048923 - RNA, 22 nt, Human
gguguugggcucacugguccuu

SEQ ID NO: 1048924 - RNA, 21 nt, Human
agaugcugaugcugcaggucc

SEQ ID NO: 1048925 - RNA, 20 nt, Human
aaagagcccuuggagcaggc

SEQ ID NO: 1048926 - RNA, 22 nt, Human
gcacacaugcaugcacaggagu

SEQ ID NO: 1048927 - RNA, 22 nt, Human
guccuggcaccucacuggcuac

SEQ ID NO: 1048928 - RNA, 22 nt, Human
gcuggcaggagccuuucccuuu

SEQ ID NO: 1048929 - RNA, 22 nt, Human
uggcaguggcucagagugcaga

SEQ ID NO: 1048930 - RNA, 22 nt, Human
cuccuggcucgcccccagcuga

SEQ ID NO: 1048931 - RNA, 21 nt, Human
cccuugccugcacuccucggc

SEQ ID NO: 1048932 - RNA, 22 nt, Human
ucuggcaggcaaucggcucugg

SEQ ID NO: 1048933 - RNA, 22 nt, Human
guccucugagggggcugcacgc

SEQ ID NO: 1048934 - RNA, 22 nt, Human
ggaggacacuggcucugccuuc

SEQ ID NO: 1048935 - RNA, 23 nt, Human
uaaauuaccuuuccagugcaggg

SEQ ID NO: 1048936 - RNA, 22 nt, Human
ccugccuguacuagagacccag

SEQ ID NO: 1048937 - RNA, 22 nt, Human
ccuggcagacugugagggcagg

SEQ ID NO: 1048938 - RNA, 22 nt, Human
gaugccuggcacccagcaagga

SEQ ID NO: 1048939 - RNA, 22 nt, Human
acacauuugcauaauaccucau

SEQ ID NO: 1048940 - RNA, 22 nt, Human
gagaggcuggcagugccagguu

SEQ ID NO: 1048941 - RNA, 22 nt, Human
ucccuccuggccgucaccgcug

SEQ ID NO: 1048942 - RNA, 22 nt, Human
ggaggacaggggcugcagcaca

SEQ ID NO: 1048943 - RNA, 22 nt, Human
ccccacccucgcuccauuucgg

SEQ ID NO: 1048944 - RNA, 22 nt, Human
ucuggcaggccuugucaaucug

SEQ ID NO: 1048945 - RNA, 22 nt, Human
cagccaggauggagaacuguug

SEQ ID NO: 1048946 - RNA, 22 nt, Human
ggcagugagaggucuccugguc

SEQ ID NO: 1048947 - RNA, 22 nt, Human
cacacaguaggcacucauuaau

SEQ ID NO: 1048948 - RNA, 22 nt, Human
ucuggcagcuauccucuggcca

SEQ ID NO: 1048949 - RNA, 22 nt, Human
gcacacagcuagauuaccauuc

SEQ ID NO: 1048950 - RNA, 22 nt, Human
gugugggaaggcuaggaugcug

SEQ ID NO: 1048951 - RNA, 22 nt, Human
cacacacucuuccuggcaccua

SEQ ID NO: 1048952 - RNA, 22 nt, Human
ucacacauuucucaaguguagg

SEQ ID NO: 1048953 - RNA, 22 nt, Human
cugcaggagcaaagccucugcu

SEQ ID NO: 1048954 - RNA, 22 nt, Human
cugagccagggccacacaugga

SEQ ID NO: 1048955 - RNA, 22 nt, Human
ggcaagagggcagauggagugc

SEQ ID NO: 1048956 - RNA, 19 nt, Human
uccuggcacaguggaacca

SEQ ID NO: 1048957 - RNA, 22 nt, Human
uccccacacagauacagaguag

SEQ ID NO: 1048958 - RNA, 18 nt, Human
aggaaagaaaggcaggug

SEQ ID NO: 1048959 - RNA, 22 nt, Human
aggagcugcagauucugccuug

SEQ ID NO: 1048960 - RNA, 22 nt, Human
ggugccagugggucucaggaua

SEQ ID NO: 1048961 - RNA, 22 nt, Human
gacacagaauuuacucccgaua

SEQ ID NO: 1048962 - RNA, 22 nt, Human
aagagcacuaacagagcugaua

SEQ ID NO: 1048963 - RNA, 20 nt, Human
accccacagaguccauugca

SEQ ID NO: 1048964 - RNA, 22 nt, Human
ccuccuggcuuuucccauugaa

SEQ ID NO: 1048965 - RNA, 22 nt, Human
gcagccucaaacuccccagcuc

SEQ ID NO: 1048966 - RNA, 22 nt, Human
cuuggcaguuucggaaggauga

SEQ ID NO: 1048967 - RNA, 22 nt, Human
cuccucuguauugauugggacu

SEQ ID NO: 1048968 - RNA, 22 nt, Human
acaagagcauugcagguguguu

SEQ ID NO: 1048969 - RNA, 22 nt, Human
uccacccugcuuucuuaucucc

SEQ ID NO: 1048970 - RNA, 22 nt, Human
guacacacuauguauuguacac

SEQ ID NO: 1048971 - RNA, 22 nt, Human
uagacacaucuucauccacaau

SEQ ID NO: 1048972 - RNA, 22 nt, Human
acaucugaggagaccagccucu

SEQ ID NO: 1048973 - RNA, 22 nt, Human
acagguggccccgagggagugg

SEQ ID NO: 1048974 - RNA, 22 nt, Human
uggcagugggaauggacaaaca

SEQ ID NO: 1048975 - RNA, 20 nt, Human
uucaugggagcaaagaggcc

SEQ ID NO: 1048976 - RNA, 22 nt, Human
ucccagccacaguuuccaccug

SEQ ID NO: 1048977 - RNA, 22 nt, Human
cacacugucagguaaauaacac

SEQ ID NO: 1048978 - RNA, 21 nt, Human
acacagaggcaucaucacuuu

SEQ ID NO: 1048979 - RNA, 23 nt, Human
ugagggacaugguggcuucugag

SEQ ID NO: 1048980 - RNA, 21 nt, Human
uccacccucucugcucccagu

SEQ ID NO: 1048981 - RNA, 22 nt, Human
cacaucccuggaguuacccagu

SEQ ID NO: 1048982 - RNA, 23 nt, Human
uguaaacaucacccccuggaguu

SEQ ID NO: 1048983 - RNA, 22 nt, Human
cacacagaugguaagggaggga

SEQ ID NO: 1048984 - RNA, 22 nt, Human
cacaaaaguaggaggcaggcgg

SEQ ID NO: 1048985 - RNA, 22 nt, Human
cuccugaggaaaagcuugguca

SEQ ID NO: 1048986 - RNA, 22 nt, Human
acaggugguagaguggaaagag

SEQ ID NO: 1048987 - RNA, 22 nt, Human
gccgggaccaaggccacggagc

SEQ ID NO: 1048988 - RNA, 22 nt, Human
gcuggcagguaaagccccgggg

SEQ ID NO: 1048989 - RNA, 21 nt, Human
ucuggcagcaguuuguugagu

SEQ ID NO: 1048990 - RNA, 22 nt, Human
ccuggcagccucagccaauucu

SEQ ID NO: 1048991 - RNA, 22 nt, Human
acagaguccuagcugcaaagaa

SEQ ID NO: 1048992 - RNA, 23 nt, Human
uugggaaauaguuaagacaugag

SEQ ID NO: 1048993 - RNA, 22 nt, Human
agggcugaagggaggugcucau

SEQ ID NO: 1048994 - RNA, 22 nt, Human
cacccacauggaaauucacagu

SEQ ID NO: 1048995 - RNA, 22 nt, Human
gcuggcagacugggggcagaac

SEQ ID NO: 1048996 - RNA, 22 nt, Human
uggcagagcccagacuccaguc

SEQ ID NO: 1048997 - RNA, 22 nt, Human
cccuuccuugauuuuaacugga

SEQ ID NO: 1048998 - RNA, 22 nt, Human
gcuggcagccaagugaagaggg

SEQ ID NO: 1048999 - RNA, 22 nt, Human
cccagcccaucucaaaggucua

SEQ ID NO: 1049000 - RNA, 22 nt, Human
ucuggcaggacaugcugaccau

SEQ ID NO: 1049001 - RNA, 22 nt, Human
agucacaguuucccugagagag

SEQ ID NO: 1049002 - RNA, 22 nt, Human
guccucugaaagaugaaccaug

SEQ ID NO: 1049003 - RNA, 22 nt, Human
acaugacuuuucucuuccagag

SEQ ID NO: 1049004 - RNA, 22 nt, Human
cccuuccucccaggcuucugug

SEQ ID NO: 1049005 - RNA, 22 nt, Human
acuggcagaauugaauaguugu

SEQ ID NO: 1049006 - RNA, 22 nt, Human
ugguccugccccgugcacagag

SEQ ID NO: 1049007 - RNA, 20 nt, Human
uggccucugagaugccacgg

SEQ ID NO: 1049008 - RNA, 22 nt, Human
guccucugauuucuagguauau

SEQ ID NO: 1049009 - RNA, 23 nt, Human
gcccacccucagcguccucacgg

SEQ ID NO: 1049010 - RNA, 20 nt, Human
uuccacaucuuugcacaugc

SEQ ID NO: 1049011 - RNA, 22 nt, Human
agaggccuccgaaaggugggcu

SEQ ID NO: 1049012 - RNA, 22 nt, Human
ccucugccaccucccacgaggc

SEQ ID NO: 1049013 - RNA, 22 nt, Human
acugccaaugguaguuugaugg

SEQ ID NO: 1049014 - RNA, 17 nt, Human
cccaggccgccgggagc

SEQ ID NO: 1049015 - RNA, 22 nt, Human
cucugagcagaggccguggcua

SEQ ID NO: 1049016 - RNA, 22 nt, Human
ggcccagccucagacaugcccu

SEQ ID NO: 1049017 - RNA, 22 nt, Human
aggaggcuuuugcaggugccac

SEQ ID NO: 1049018 - RNA, 22 nt, Human
ucuggcagaucuucccacguuu

SEQ ID NO: 1049019 - RNA, 17 nt, Human
uugggagagaaagguau

SEQ ID NO: 1049020 - RNA, 22 nt, Human
agcagguugugauacacucaga

SEQ ID NO: 1049021 - RNA, 22 nt, Human
ccuucuucuguguggcccaaga

SEQ ID NO: 1049022 - RNA, 22 nt, Human
cagcccagccuugucucuuuau

SEQ ID NO: 1049023 - RNA, 23 nt, Human
uccaggagcaugcuggcuggcga

SEQ ID NO: 1049024 - RNA, 22 nt, Human
cagcacagugaccagacccacu

SEQ ID NO: 1049025 - RNA, 22 nt, Human
auccuggcccagguguggaggg

SEQ ID NO: 1049026 - RNA, 22 nt, Human
uccaaggcuccggcccuggcgu

SEQ ID NO: 1049027 - RNA, 22 nt, Human
uggaaagagguagaggaucugg

SEQ ID NO: 1049028 - RNA, 22 nt, Human
ccacauacaaauggggugcugu

SEQ ID NO: 1049029 - RNA, 22 nt, Human
ucccacauaugcaauccugaau

SEQ ID NO: 1049030 - RNA, 22 nt, Human
uccccacagcagaagaucugag

SEQ ID NO: 1049031 - RNA, 22 nt, Human
gguucccggaucuccgaguccc

SEQ ID NO: 1049032 - RNA, 22 nt, Human
ccacacagggggaugaguuauu

SEQ ID NO: 1049033 - RNA, 22 nt, Human
cccagccucuguuugcuccucu

SEQ ID NO: 1049034 - RNA, 22 nt, Human
uuccuggccuaagguaggugac

SEQ ID NO: 1049035 - RNA, 22 nt, Human
ucauggcacuuagcacaguccu

SEQ ID NO: 1049036 - RNA, 22 nt, Human
aggggugugcauccuggaggau

SEQ ID NO: 1049037 - RNA, 22 nt, Human
aacacauaggcagagcaugaca

SEQ ID NO: 1049038 - RNA, 22 nt, Human
gacacuucaccuuucccagccu

SEQ ID NO: 1049039 - RNA, 22 nt, Human
acaucacagagcccagauaaag

SEQ ID NO: 1049040 - RNA, 22 nt, Human
auacaugacucacacauucugc

SEQ ID NO: 1049041 - RNA, 22 nt, Human
ccuggcuccugccucugcaggg

SEQ ID NO: 1049042 - RNA, 22 nt, Human
uggcagagaacacggcugaucu

SEQ ID NO: 1049043 - RNA, 22 nt, Human
caggauggucucgaucuccuga

SEQ ID NO: 1049044 - RNA, 22 nt, Human
agggacucccugggccgacacg

SEQ ID NO: 1049045 - RNA, 22 nt, Human
uuccuggccaagcagaguggaa

SEQ ID NO: 1049046 - RNA, 22 nt, Human
gacacagagcucacagucuccu

SEQ ID NO: 1049047 - RNA, 22 nt, Human
ccuggcagcaggugggcccgug

SEQ ID NO: 1049048 - RNA, 22 nt, Human
acuggcaguggcagcagaaaga

SEQ ID NO: 1049049 - RNA, 22 nt, Human
gacacagagggcaccagauaug

SEQ ID NO: 1049050 - RNA, 22 nt, Human
uggcagagucaucacaucugga

SEQ ID NO: 1049051 - RNA, 22 nt, Human
ugccagccagggaagcucaccc

SEQ ID NO: 1049052 - RNA, 22 nt, Human
gagaccucuugguaucgcuagg

SEQ ID NO: 1049053 - RNA, 22 nt, Human
ugccugccaugcagaaagcuga

SEQ ID NO: 1049054 - RNA, 22 nt, Human
ccacacagauaaguguuuucua

SEQ ID NO: 1049055 - RNA, 17 nt, Human
gcccacccuuaggagcu

SEQ ID NO: 1049056 - RNA, 22 nt, Human
ugcagagagauccucaggguuu

SEQ ID NO: 1049057 - RNA, 22 nt, Human
uccaggccauugacugcauccu

SEQ ID NO: 1049058 - RNA, 22 nt, Human
ccauacacacaccaaauuugua

SEQ ID NO: 1049059 - RNA, 22 nt, Human
ucuggcaguuugagaaaggcua

SEQ ID NO: 1049060 - RNA, 22 nt, Human
ucuugggauagugucucauggc

SEQ ID NO: 1049061 - RNA, 22 nt, Human
uuguaaacugcugcaggagugc

SEQ ID NO: 1049062 - RNA, 22 nt, Human
cacacauuucagaugcuacaau

SEQ ID NO: 1049063 - RNA, 22 nt, Human
guuaggaacacuggagccuaaa

SEQ ID NO: 1049064 - RNA, 22 nt, Human
cccugccucugaagcugcucag

SEQ ID NO: 1049065 - RNA, 22 nt, Human
ucuggcagaagugcugucagua

SEQ ID NO: 1049066 - RNA, 22 nt, Human
uacacacagaggccaugggauu

SEQ ID NO: 1049067 - RNA, 22 nt, Human
uucccacagagauuacauugaa

SEQ ID NO: 1049068 - RNA, 22 nt, Human
ucuggcaggucaaucauucuuu

SEQ ID NO: 1049069 - RNA, 19 nt, Human
gcuggcagauguggccgug

SEQ ID NO: 1049070 - RNA, 22 nt, Human
aagagagaacucccuucgccag

SEQ ID NO: 1049071 - RNA, 22 nt, Human
gaggagcugagccacguccugg

SEQ ID NO: 1049072 - RNA, 22 nt, Human
ucccagccaggcucuaccacuu

SEQ ID NO: 1049073 - RNA, 22 nt, Human
uuccuggcgccacggagccggu

SEQ ID NO: 1049074 - RNA, 22 nt, Human
cagguugguauucaucuccaca

SEQ ID NO: 1049075 - RNA, 22 nt, Human
uccaggcuuuuucaugcugucu

SEQ ID NO: 1049076 - RNA, 22 nt, Human
auuccacacaguaauacucaau

SEQ ID NO: 1049077 - RNA, 22 nt, Human
auggcagacgaggcagcagggg

SEQ ID NO: 1049078 - RNA, 23 nt, Human
acauacauggagauaaagugaug

SEQ ID NO: 1049079 - RNA, 22 nt, Human
cagucacauagguauacacaua

SEQ ID NO: 1049080 - RNA, 22 nt, Human
uacaaaaggaagagggaucuua

SEQ ID NO: 1049081 - RNA, 22 nt, Human
uccaggcaagggaggagcaugg

SEQ ID NO: 1049082 - RNA, 23 nt, Human
ucacauaauccuucauccacagg

SEQ ID NO: 1049083 - RNA, 22 nt, Human
guccucugggcuuugagcaguc

SEQ ID NO: 1049084 - RNA, 22 nt, Human
ggagcugaggcugaggccucac

SEQ ID NO: 1049085 - RNA, 22 nt, Human
gaaagaagcuuuagauggcuau

SEQ ID NO: 1049086 - RNA, 22 nt, Human
aaaagagucuuaggcagucaua

SEQ ID NO: 1049087 - RNA, 22 nt, Human
aaauuacagaucaccaaugcau

SEQ ID NO: 1049088 - RNA, 22 nt, Human
acacacagaaggaagccccacu

SEQ ID NO: 1049089 - RNA, 22 nt, Human
uguaaacagccccauggagagc

SEQ ID NO: 1049090 - RNA, 22 nt, Human
uacacagacucuucaauucaga

SEQ ID NO: 1049091 - RNA, 22 nt, Human
gagagaaaagggggaauugauu

SEQ ID NO: 1049092 - RNA, 22 nt, Human
uggcagagagacucuccuugau

SEQ ID NO: 1049093 - RNA, 22 nt, Human
guccucuggugaaagcauuccc

SEQ ID NO: 1049094 - RNA, 22 nt, Human
ucuggcagggguucugcacuug

SEQ ID NO: 1049095 - RNA, 21 nt, Human
aggcugcuggcucaggguccu

SEQ ID NO: 1049096 - RNA, 22 nt, Human
uuccuggcagaggccccgacag

SEQ ID NO: 1049097 - RNA, 22 nt, Human
ccacaucauggauacaguuaug

SEQ ID NO: 1049098 - RNA, 22 nt, Human
ccuggcaguuuugcccaggauu

SEQ ID NO: 1049099 - RNA, 18 nt, Human
gacacauccccaggccuc

SEQ ID NO: 1049100 - RNA, 22 nt, Human
guccuggcccaggaguacacau

SEQ ID NO: 1049101 - RNA, 23 nt, Human
acacugucucauggauagacugc

SEQ ID NO: 1049102 - RNA, 22 nt, Human
ucaucacauguguagucauccc

SEQ ID NO: 1049103 - RNA, 22 nt, Human
auggcagagggauugaacagcu

SEQ ID NO: 1049104 - RNA, 22 nt, Human
aucccacaccccuacaacauau

SEQ ID NO: 1049105 - RNA, 18 nt, Human
acacacacaccuguguau

SEQ ID NO: 1049106 - RNA, 22 nt, Human
uccuggcacuuugggggcucgc

SEQ ID NO: 1049107 - RNA, 22 nt, Human
gccuggcacucaaucaucugcu

SEQ ID NO: 1049108 - RNA, 22 nt, Human
gcccacacagcagauccuuugg

SEQ ID NO: 1049109 - RNA, 22 nt, Human
ugagagucuguuccucuugcag

SEQ ID NO: 1049110 - RNA, 22 nt, Human
aggcaguggagcuggaauaggc

SEQ ID NO: 1049111 - RNA, 22 nt, Human
gcuccaggugucccagguaaaa

SEQ ID NO: 1049112 - RNA, 22 nt, Human
uauucccagccucuuucuaucu

SEQ ID NO: 1049113 - RNA, 22 nt, Human
ggcagagguagcuggaaccagg

SEQ ID NO: 1049114 - RNA, 22 nt, Human
acuccugggugcugaccagcgu

SEQ ID NO: 1049115 - RNA, 22 nt, Human
ccuucucucugaagaccccaaa

SEQ ID NO: 1049116 - RNA, 22 nt, Human
ugggagaaacugucucucccac

SEQ ID NO: 1049117 - RNA, 22 nt, Human
gacuguggggggcggacacaag

SEQ ID NO: 1049118 - RNA, 22 nt, Human
ucccacccauccugcaucucuu

SEQ ID NO: 1049119 - RNA, 21 nt, Human
ccuagccucuuacccagcuuu

SEQ ID NO: 1049120 - RNA, 18 nt, Human
uccugccugugccccagg

SEQ ID NO: 1049121 - RNA, 22 nt, Human
uccugccuguuuaccuguacuu

SEQ ID NO: 1049122 - RNA, 22 nt, Human
agacacauaggaccacacugug

SEQ ID NO: 1049123 - RNA, 22 nt, Human
guccucuguagggcugggccac

SEQ ID NO: 1049124 - RNA, 22 nt, Human
caucacagguccugaugacauu

SEQ ID NO: 1049125 - RNA, 22 nt, Human
cagguggguguaugaaugcaaa

SEQ ID NO: 1049126 - RNA, 19 nt, Human
ccagcccacagugacuuuc

SEQ ID NO: 1049127 - RNA, 23 nt, Human
cauccaggagcugagucugacug

SEQ ID NO: 1049128 - RNA, 19 nt, Human
gggagcugaggucuuuggu

SEQ ID NO: 1049129 - RNA, 22 nt, Human
cagucccaugagcccagaacau

SEQ ID NO: 1049130 - RNA, 22 nt, Human
aacacauauuuauauaugcaca

SEQ ID NO: 1049131 - RNA, 19 nt, Human
ccuuccuccccagggccau

SEQ ID NO: 1049132 - RNA, 20 nt, Human
gcuccaggucagagaggacg

SEQ ID NO: 1049133 - RNA, 22 nt, Human
ccuggcagaauauuaaagugca

SEQ ID NO: 1049134 - RNA, 22 nt, Human
cuccuggcacucaguguggaag

SEQ ID NO: 1049135 - RNA, 22 nt, Human
acacacucaauugcauaagcac

SEQ ID NO: 1049136 - RNA, 22 nt, Human
ucuggcaggguguguauuuaca

SEQ ID NO: 1049137 - RNA, 22 nt, Human
cuggccuggggggacacauccc

SEQ ID NO: 1049138 - RNA, 22 nt, Human
cuccaggccccuggccuucugc

SEQ ID NO: 1049139 - RNA, 22 nt, Human
acuggcaguuugagaaugcauu

SEQ ID NO: 1049140 - RNA, 22 nt, Human
ccuggcagguagcauugaggag

SEQ ID NO: 1049141 - RNA, 22 nt, Human
cuggccucuguguucaccauag

SEQ ID NO: 1049142 - RNA, 22 nt, Human
gccuggcaggccuguuggggcu

SEQ ID NO: 1049143 - RNA, 22 nt, Human
ucccacauuacccugacugaca

SEQ ID NO: 1049144 - RNA, 19 nt, Human
gugggacagacauuacaua

SEQ ID NO: 1049145 - RNA, 22 nt, Human
cacacaucuuaucccaguuauu

SEQ ID NO: 1049146 - RNA, 22 nt, Human
acuggcagaacuggugauuguc

SEQ ID NO: 1049147 - RNA, 22 nt, Human
ggagagaauuccauggacaugu

SEQ ID NO: 1049148 - RNA, 22 nt, Human
cucucugggcccaguuggcacc

SEQ ID NO: 1049149 - RNA, 22 nt, Human
ccuggcagcauugguagagauu

SEQ ID NO: 1049150 - RNA, 22 nt, Human
cugccugcuuaccaugcaucag

SEQ ID NO: 1049151 - RNA, 22 nt, Human
ggccucucugagagcagacguu

SEQ ID NO: 1049152 - RNA, 22 nt, Human
acacacaugguauuguucagaa

SEQ ID NO: 1049153 - RNA, 22 nt, Human
ccagguccuguuuucaccacag

SEQ ID NO: 1049154 - RNA, 22 nt, Human
uccucuccaugucucacgccac

SEQ ID NO: 1049155 - RNA, 22 nt, Human
gaggagcucaugaaagcggugu

SEQ ID NO: 1049156 - RNA, 22 nt, Human
gauggcagguaguggucucauc

SEQ ID NO: 1049157 - RNA, 22 nt, Human
uggcagagaacacacaugauuc

SEQ ID NO: 1049158 - RNA, 22 nt, Human
uggcacucacucucagagucug

SEQ ID NO: 1049159 - RNA, 22 nt, Human
ccuggcagaaagaguuacaccu

SEQ ID NO: 1049160 - RNA, 22 nt, Human
acacauaagccuaaucaucucc

SEQ ID NO: 1049161 - RNA, 22 nt, Human
gagaaagaugaagaguggcguu

SEQ ID NO: 1049162 - RNA, 22 nt, Human
cacaauguauauguauaucaaa

SEQ ID NO: 1049163 - RNA, 21 nt, Human
ucuggcaggaagacggauggg

SEQ ID NO: 1049164 - RNA, 22 nt, Human
ugcuccagugccugccccacag

SEQ ID NO: 1049165 - RNA, 22 nt, Human
ccacaaaacugugugucaaaga

SEQ ID NO: 1049166 - RNA, 22 nt, Human
acuggcagagggaaaaccauuc

SEQ ID NO: 1049167 - RNA, 22 nt, Human
aggcuggauuuauggggacuuc

SEQ ID NO: 1049168 - RNA, 22 nt, Human
agcacaggaccaaggaagcugu

SEQ ID NO: 1049169 - RNA, 22 nt, Human
uugggaaguuuaaugacagacu

SEQ ID NO: 1049170 - RNA, 22 nt, Human
aguguugggucuuuagaauuua

SEQ ID NO: 1049171 - RNA, 22 nt, Human
ugccugccucuggcagcccugc

SEQ ID NO: 1049172 - RNA, 22 nt, Human
cuggccucauagccaagcugug

SEQ ID NO: 1049173 - RNA, 22 nt, Human
uauguaaaguagauggcaggua

SEQ ID NO: 1049174 - RNA, 22 nt, Human
gagccugaugaaacaggcagac

SEQ ID NO: 1049175 - RNA, 22 nt, Human
cuucccacuaguaucacagagc

SEQ ID NO: 1049176 - RNA, 22 nt, Human
gaggcugcuuugaugacaggag

SEQ ID NO: 1049177 - RNA, 22 nt, Human
cccacccugggcuacacaucca

SEQ ID NO: 1049178 - RNA, 22 nt, Human
agagucccagggacacuccaga

SEQ ID NO: 1049179 - RNA, 22 nt, Human
auggccugaugcaccuguccca

SEQ ID NO: 1049180 - RNA, 20 nt, Human
ccuggcaggcggguuacuua

SEQ ID NO: 1049181 - RNA, 22 nt, Human
ccaggcccugcuccucacacca

SEQ ID NO: 1049182 - RNA, 22 nt, Human
ccucucccgggugccgcugggc

SEQ ID NO: 1049183 - RNA, 21 nt, Human
gggcagaggggccuccugggu

SEQ ID NO: 1049184 - RNA, 21 nt, Human
uccuguaagcuuggguggcuc

SEQ ID NO: 1049185 - RNA, 21 nt, Human
acacacucugagucuucuauu

SEQ ID NO: 1049186 - RNA, 22 nt, Human
ucuggcaggaccaugaagcgua

SEQ ID NO: 1049187 - RNA, 22 nt, Human
aagagagagugcgcucacagaa

SEQ ID NO: 1049188 - RNA, 22 nt, Human
aggguagggcccggagacagac

SEQ ID NO: 1049189 - RNA, 22 nt, Human
uggcaguagauccagucucucu

SEQ ID NO: 1049190 - RNA, 22 nt, Human
aggaagaaccuaagaaagucuc

SEQ ID NO: 1049191 - RNA, 22 nt, Human
acacacagcgccuaccaugugc

SEQ ID NO: 1049192 - RNA, 22 nt, Human
aacaaaagccgaaguagguguc

SEQ ID NO: 1049193 - RNA, 22 nt, Human
ccacagaccuuggcuuccaccu

SEQ ID NO: 1049194 - RNA, 22 nt, Human
guccucugacucagccuuggga

SEQ ID NO: 1049195 - RNA, 22 nt, Human
uagauacaggcucucugagccu

SEQ ID NO: 1049196 - RNA, 22 nt, Human
uccacacacauuucuaugugca

SEQ ID NO: 1049197 - RNA, 20 nt, Human
ugccuggccuuucucugccc

SEQ ID NO: 1049198 - RNA, 21 nt, Human
cagcccagcccauugacagug

SEQ ID NO: 1049199 - RNA, 22 nt, Human
ucuggcagagauauccauccca

SEQ ID NO: 1049200 - RNA, 22 nt, Human
cuccuggcacugucuugaccca

SEQ ID NO: 1049201 - RNA, 22 nt, Human
ccuggcagcgugccgagcugcg

SEQ ID NO: 1049202 - RNA, 22 nt, Human
ccagcccuuagauaaaccuggc

SEQ ID NO: 1049203 - RNA, 22 nt, Human
cccuuccugggugucccggagu

SEQ ID NO: 1049204 - RNA, 22 nt, Human
aagagccagcuagugaagaggc

SEQ ID NO: 1049205 - RNA, 22 nt, Human
uccaggcaaaaaccaacuacag

SEQ ID NO: 1049206 - RNA, 22 nt, Human
cuguccagcuuggcuccugggg

SEQ ID NO: 1049207 - RNA, 22 nt, Human
ccccacacucuuuacauucaua

SEQ ID NO: 1049208 - RNA, 22 nt, Human
aggccccaaagcagugcaagua

SEQ ID NO: 1049209 - RNA, 22 nt, Human
ccugccuucagcccugaagucu

SEQ ID NO: 1049210 - RNA, 19 nt, Human
ugccuggcaccagcuccac

SEQ ID NO: 1049211 - RNA, 22 nt, Human
acccacacaucucuaauucagu

SEQ ID NO: 1049212 - RNA, 22 nt, Human
guacacacaaucucuggucagu

SEQ ID NO: 1049213 - RNA, 21 nt, Human
uccugccuuaguccagagcag

SEQ ID NO: 1049214 - RNA, 20 nt, Human
gauacacagcacagagggcc

SEQ ID NO: 1049215 - RNA, 22 nt, Human
aagugccaucauagcauggcug

SEQ ID NO: 1049216 - RNA, 22 nt, Human
ccuggcagcagcacaugccuuc

SEQ ID NO: 1049217 - RNA, 22 nt, Human
guccucuggaagaugaguucuu

SEQ ID NO: 1049218 - RNA, 20 nt, Human
ccccacacuauugagcacuu

SEQ ID NO: 1049219 - RNA, 21 nt, Human
aaagagcccgcugagagguuc

SEQ ID NO: 1049220 - RNA, 22 nt, Human
cagaaagaccugggcucaagag

SEQ ID NO: 1049221 - RNA, 22 nt, Human
cucucuccuuagcugcagacca

SEQ ID NO: 1049222 - RNA, 22 nt, Human
acuggcagccacaacuggcagg

SEQ ID NO: 1049223 - RNA, 22 nt, Human
aaagaucaauagauaaagcuac

SEQ ID NO: 1049224 - RNA, 22 nt, Human
accugccuauggagccacaugg

SEQ ID NO: 1049225 - RNA, 22 nt, Human
uucauugcaguucuucagguua

SEQ ID NO: 1049226 - RNA, 22 nt, Human
acacaucagaaauaugaaugag

SEQ ID NO: 1049227 - RNA, 22 nt, Human
cacugucccuguuuccuggaaa

SEQ ID NO: 1049228 - RNA, 22 nt, Human
cgcauacauagaaacacacaga

SEQ ID NO: 1049229 - RNA, 22 nt, Human
uggcagugucuuaucaggagug

SEQ ID NO: 1049230 - RNA, 22 nt, Human
uacacacuuacuggagaugaag

SEQ ID NO: 1049231 - RNA, 21 nt, Human
acauacauaccuuaccaccuu

SEQ ID NO: 1049232 - RNA, 22 nt, Human
guccucuggccuuucccaggac

SEQ ID NO: 1049233 - RNA, 22 nt, Human
gccucaggccgcccugcugcuc

SEQ ID NO: 1049234 - RNA, 22 nt, Human
ccuggcagcccagagcgccgcu

SEQ ID NO: 1049235 - RNA, 22 nt, Human
aguguggcaggaaugacuagaa

SEQ ID NO: 1049236 - RNA, 22 nt, Human
aucacaauguacguuaaaaugu

SEQ ID NO: 1049237 - RNA, 22 nt, Human
aaagagucaaaggcaugucucu

SEQ ID NO: 1049238 - RNA, 22 nt, Human
ucuggcaguaauaggggagaga

SEQ ID NO: 1049239 - RNA, 22 nt, Human
aggacacacagaauacaaaucc

SEQ ID NO: 1049240 - RNA, 22 nt, Human
uggcaucuccgacagucuugau

SEQ ID NO: 1049241 - RNA, 22 nt, Human
acccacaccuccguauaucacu

SEQ ID NO: 1049242 - RNA, 18 nt, Human
uguagagccagguuugcc

SEQ ID NO: 1049243 - RNA, 22 nt, Human
agaggccggccgagcccauggg

SEQ ID NO: 1049244 - RNA, 22 nt, Human
ucacacacauuugcugucugau

SEQ ID NO: 1049245 - RNA, 19 nt, Human
acuggcaguuucugcaugg

SEQ ID NO: 1049246 - RNA, 17 nt, Human
ccauacugacauauuga

SEQ ID NO: 1049247 - RNA, 19 nt, Human
ccuugccugucccugcagc

SEQ ID NO: 1049248 - RNA, 22 nt, Human
gcuggcagguccaagauagagc

SEQ ID NO: 1049249 - RNA, 22 nt, Human
uggucucugcaggccaggcuca

SEQ ID NO: 1049250 - RNA, 18 nt, Human
ccuagccuccaagcucau

SEQ ID NO: 1049251 - RNA, 22 nt, Human
ccuugcucaagcuagugacggg

SEQ ID NO: 1049252 - RNA, 22 nt, Human
acacagaugcauuacacaucua

SEQ ID NO: 1049253 - RNA, 22 nt, Human
gacacagauaucucugagauua

SEQ ID NO: 1049254 - RNA, 22 nt, Human
auggcagauggcuggagcaggu

SEQ ID NO: 1049255 - RNA, 22 nt, Human
aggaggcuguggagcacuccau

SEQ ID NO: 1049256 - RNA, 22 nt, Human
acacaucaugccaaguuucacc

SEQ ID NO: 1049257 - RNA, 22 nt, Human
agccagggucucucgcucuguu

SEQ ID NO: 1049258 - RNA, 22 nt, Human
ugacaggaggcuugaggccagg

SEQ ID NO: 1049259 - RNA, 22 nt, Human
caggacaaagcccuuugagaaa

SEQ ID NO: 1049260 - RNA, 22 nt, Human
gacccggcuccaggcccagcag

SEQ ID NO: 1049261 - RNA, 22 nt, Human
ccucucagcgauuccucuugga

SEQ ID NO: 1049262 - RNA, 23 nt, Human
uuggagagggugaguagugucag

SEQ ID NO: 1049263 - RNA, 22 nt, Human
agggagacacaugaggaaguca

SEQ ID NO: 1049264 - RNA, 22 nt, Human
guugggaaggcaagaaguagaa

SEQ ID NO: 1049265 - RNA, 22 nt, Human
accugccuaucagcugccugcu

SEQ ID NO: 1049266 - RNA, 22 nt, Human
aggaggcugggcacaguggccu

SEQ ID NO: 1049267 - RNA, 22 nt, Human
gccuggcacaggaauuaggagg

SEQ ID NO: 1049268 - RNA, 22 nt, Human
ggccucucagggcagagacccu

SEQ ID NO: 1049269 - RNA, 22 nt, Human
aggccacaguacuuugcagacc

SEQ ID NO: 1049270 - RNA, 22 nt, Human
gucaggacucugacccgucccg

SEQ ID NO: 1049271 - RNA, 22 nt, Human
gauggccuuguuuucucccuuc

SEQ ID NO: 1049272 - RNA, 22 nt, Human
acacacuguugcucauccaggc

SEQ ID NO: 1049273 - RNA, 22 nt, Human
gaggagcuggcagcgucuccgc

SEQ ID NO: 1049274 - RNA, 22 nt, Human
ggugccagaguggcccaggggc

SEQ ID NO: 1049275 - RNA, 21 nt, Human
acacacugaguuuuccacugu

SEQ ID NO: 1049276 - RNA, 22 nt, Human
cacacacuguuaauguaggagu

SEQ ID NO: 1049277 - RNA, 22 nt, Human
gcuggcagcuggaaguugggcu

SEQ ID NO: 1049278 - RNA, 22 nt, Human
acaucacacgccuuccaggagg

SEQ ID NO: 1049279 - RNA, 22 nt, Human
ccaggcuguaagagugauguug

SEQ ID NO: 1049280 - RNA, 22 nt, Human
uuccaggcuucucuggggcguc

SEQ ID NO: 1049281 - RNA, 22 nt, Human
acacaucucaggggacacucuc

SEQ ID NO: 1049282 - RNA, 20 nt, Human
agggcugagaagggacuagc

SEQ ID NO: 1049283 - RNA, 22 nt, Human
aucucccagccacagcauucuu

SEQ ID NO: 1049284 - RNA, 22 nt, Human
acauaaugagcucuuuauaaau

SEQ ID NO: 1049285 - RNA, 21 nt, Human
guacacacagguggaugggcu

SEQ ID NO: 1049286 - RNA, 22 nt, Human
ccaggcccaggguacugaccaa

SEQ ID NO: 1049287 - RNA, 22 nt, Human
aucacagagauugcuuuuaaaa

SEQ ID NO: 1049288 - RNA, 18 nt, Human
gacaaaaguacagacaga

SEQ ID NO: 1049289 - RNA, 22 nt, Human
uggcagugguaccggcucucag

SEQ ID NO: 1049290 - RNA, 22 nt, Human
uccaggcuaauuuugcauuguu

SEQ ID NO: 1049291 - RNA, 22 nt, Human
cccagcaugcacgcugacacuc

SEQ ID NO: 1049292 - RNA, 22 nt, Human
ucccacaugugaauccucaggu

SEQ ID NO: 1049293 - RNA, 22 nt, Human
cugcaggacgaccgccucaucu

SEQ ID NO: 1049294 - RNA, 22 nt, Human
uccugagcccuguaggacccug

SEQ ID NO: 1049295 - RNA, 22 nt, Human
acacauaagaaacuacaaagag

SEQ ID NO: 1049296 - RNA, 20 nt, Human
ucacacaugguaagcuauga

SEQ ID NO: 1049297 - RNA, 22 nt, Human
cagcccaaagccccaggcuaga

SEQ ID NO: 1049298 - RNA, 22 nt, Human
cacauuccuggugcucagcagc

SEQ ID NO: 1049299 - RNA, 22 nt, Human
uucccacauucuuuacauucau

SEQ ID NO: 1049300 - RNA, 22 nt, Human
auaauggccgggggcugaaugc

SEQ ID NO: 1049301 - RNA, 22 nt, Human
acaucacaguaguuaagccaga

SEQ ID NO: 1049302 - RNA, 22 nt, Human
cugccugcucuauccaggccug

SEQ ID NO: 1049303 - RNA, 22 nt, Human
uggccugccacugccacgccac

SEQ ID NO: 1049304 - RNA, 22 nt, Human
guggcagugaaggucauagcau

SEQ ID NO: 1049305 - RNA, 22 nt, Human
uccaggaggaggaaggcugcca

SEQ ID NO: 1049306 - RNA, 22 nt, Human
auagggccuaaaaaguauugcu

SEQ ID NO: 1049307 - RNA, 20 nt, Human
acuggcagccugccugcugu

SEQ ID NO: 1049308 - RNA, 22 nt, Human
gcccucucuucugcagccucca

SEQ ID NO: 1049309 - RNA, 22 nt, Human
ucuggcaggauaucgaagugaa

SEQ ID NO: 1049310 - RNA, 22 nt, Human
uggcagggugccaguugcgagu

SEQ ID NO: 1049311 - RNA, 22 nt, Human
gcuggcaguuuccucaccgagg

SEQ ID NO: 1049312 - RNA, 22 nt, Human
acagguggggcacuuggagccu

SEQ ID NO: 1049313 - RNA, 22 nt, Human
ugcagagaaaacuccuggguac

SEQ ID NO: 1049314 - RNA, 22 nt, Human
ucccacacuacacgguuguugg

SEQ ID NO: 1049315 - RNA, 22 nt, Human
ugcacaggaggcuguggagaag

SEQ ID NO: 1049316 - RNA, 22 nt, Human
ucuggcagguucccauguuaug

SEQ ID NO: 1049317 - RNA, 22 nt, Human
agguagggaagaaggcaugaaa

SEQ ID NO: 1049318 - RNA, 22 nt, Human
guccucugcuucaugcccugau

SEQ ID NO: 1049319 - RNA, 22 nt, Human
acuggcagagacccugauggcc

SEQ ID NO: 1049320 - RNA, 22 nt, Human
cccagccugugacagccguccu

SEQ ID NO: 1049321 - RNA, 22 nt, Human
cauuacaaccccaaauuacaaa

SEQ ID NO: 1049322 - RNA, 22 nt, Human
cuuccucuagccuaguaaugcc

SEQ ID NO: 1049323 - RNA, 22 nt, Human
gccuccuggaagucacauguuu

SEQ ID NO: 1049324 - RNA, 22 nt, Human
uuggaaaguuuuuacugaagac

SEQ ID NO: 1049325 - RNA, 19 nt, Human
gcuggcagaauuuugaacc

SEQ ID NO: 1049326 - RNA, 22 nt, Human
gcacacacaugugaguacaugc

SEQ ID NO: 1049327 - RNA, 22 nt, Human
gcacauacccacugucaagcac

SEQ ID NO: 1049328 - RNA, 22 nt, Human
uuccaggccgggcaggaaacac

SEQ ID NO: 1049329 - RNA, 22 nt, Human
ccuggcagcuccuccccggcgg

SEQ ID NO: 1049330 - RNA, 22 nt, Human
cagcccaggccgacaguuccuc

SEQ ID NO: 1049331 - RNA, 22 nt, Human
gcuggcagagcucugggcuggg

SEQ ID NO: 1049332 - RNA, 22 nt, Human
aggcacaggaggugguaagaag

SEQ ID NO: 1049333 - RNA, 21 nt, Human
ucacacacguuuccaagggca

SEQ ID NO: 1049334 - RNA, 22 nt, Human
auuccacagcuacaucaaucua

SEQ ID NO: 1049335 - RNA, 22 nt, Human
cuccugaggacuucuauugggu

SEQ ID NO: 1049336 - RNA, 22 nt, Human
caggaguggugugagggacucc

SEQ ID NO: 1049337 - RNA, 22 nt, Human
cuguccuccagacgacaguccc

SEQ ID NO: 1049338 - RNA, 22 nt, Human
cccacacucugagaaaugcuga

SEQ ID NO: 1049339 - RNA, 23 nt, Human
guccucuggagagaaaggcagua

SEQ ID NO: 1049340 - RNA, 20 nt, Human
gcuggcagaugucuugagau

SEQ ID NO: 1049341 - RNA, 22 nt, Human
ucccugccugacagcacccacc

SEQ ID NO: 1049342 - RNA, 18 nt, Human
acucugcggaggccccag

SEQ ID NO: 1049343 - RNA, 22 nt, Human
uuccuggcucacagcagugggg

SEQ ID NO: 1049344 - RNA, 22 nt, Human
cuggcagguuuggugucuggug

SEQ ID NO: 1049345 - RNA, 22 nt, Human
gccuccggagucacagugucuu

SEQ ID NO: 1049346 - RNA, 22 nt, Human
ugcuggcacguggaccaggaga

SEQ ID NO: 1049347 - RNA, 22 nt, Human
cuggcaguauuaagagaaguga

SEQ ID NO: 1049348 - RNA, 22 nt, Human
acacacuggcccccaguacuga

SEQ ID NO: 1049349 - RNA, 22 nt, Human
gcuggcagugugaaugacaagc

SEQ ID NO: 1049350 - RNA, 22 nt, Human
accugccucagugcagcuggau

SEQ ID NO: 1049351 - RNA, 22 nt, Human
guccucugcccaggucaagguu

SEQ ID NO: 1049352 - RNA, 22 nt, Human
ucuggcagugauuucugugauc

SEQ ID NO: 1049353 - RNA, 17 nt, Human
agccugccccaugcugc

SEQ ID NO: 1049354 - RNA, 22 nt, Human
cuccaggcucguccaagaucga

SEQ ID NO: 1049355 - RNA, 22 nt, Human
gcacacauucggauucuuaacc

SEQ ID NO: 1049356 - RNA, 22 nt, Human
gacaaaaguguuuugaacaagg

SEQ ID NO: 1049357 - RNA, 22 nt, Human
gcugcuaagcguuucuguucca

SEQ ID NO: 1049358 - RNA, 22 nt, Human
acugagagucaagauagcaugg

SEQ ID NO: 1049359 - RNA, 22 nt, Human
cugccucuauaggaguccacca

SEQ ID NO: 1049360 - RNA, 22 nt, Human
aggcugcuucagcugcagggag

SEQ ID NO: 1049361 - RNA, 22 nt, Human
caucacagaaauaaacauaccu

SEQ ID NO: 1049362 - RNA, 22 nt, Human
uccugcagccacugcaggcaga

SEQ ID NO: 1049363 - RNA, 22 nt, Human
gcuccaggaggaugaccuuccu

SEQ ID NO: 1049364 - RNA, 19 nt, Human
acauucccaucagcaaugu

SEQ ID NO: 1049365 - RNA, 22 nt, Human
uuccaggcugaugggccacagg

SEQ ID NO: 1049366 - RNA, 22 nt, Human
ucacacacauaaucuaagauua

SEQ ID NO: 1049367 - RNA, 22 nt, Human
guccucugggcagcugccccac

SEQ ID NO: 1049368 - RNA, 19 nt, Human
ccagucccauacaggagau

SEQ ID NO: 1049369 - RNA, 18 nt, Human
gccugcucugcucucccc

SEQ ID NO: 1049370 - RNA, 22 nt, Human
acacacagguaaaggagccugg

SEQ ID NO: 1049371 - RNA, 22 nt, Human
ucuggcagcaagauaacaaugg

SEQ ID NO: 1049372 - RNA, 22 nt, Human
ucuggcagcucaguucaggucu

SEQ ID NO: 1049373 - RNA, 22 nt, Human
uccuucccaggugucgccgccu

SEQ ID NO: 1049374 - RNA, 22 nt, Human
gaggggcuggguagggcaaccc

SEQ ID NO: 1049375 - RNA, 16 nt, Human
ucacauacuuccuugc

SEQ ID NO: 1049376 - RNA, 22 nt, Human
acuggcagguccaucgcccuuu

SEQ ID NO: 1049377 - RNA, 22 nt, Human
acaucccacagaaacauacaua

SEQ ID NO: 1049378 - RNA, 18 nt, Human
cuccuccacagccccugc

SEQ ID NO: 1049379 - RNA, 22 nt, Human
acacacaugcaugcuugccauu

SEQ ID NO: 1049380 - RNA, 22 nt, Human
uucccacaguguugaauccucu

SEQ ID NO: 1049381 - RNA, 22 nt, Human
ucacacagcuccuuuccuuagu

SEQ ID NO: 1049382 - RNA, 22 nt, Human
agaggcuucucggauggggcag

SEQ ID NO: 1049383 - RNA, 22 nt, Human
gcacacacuguuuuccucacau

SEQ ID NO: 1049384 - RNA, 22 nt, Human
uccaggcucuaggcugcucucc

SEQ ID NO: 1049385 - RNA, 22 nt, Human
cacacacuggagcaaggagaug

SEQ ID NO: 1049386 - RNA, 22 nt, Human
uccugugccaucucuagagacu

SEQ ID NO: 1049387 - RNA, 22 nt, Human
gcuggcagggugguugagagag

SEQ ID NO: 1049388 - RNA, 22 nt, Human
uccccacacuuucacuccuggc

SEQ ID NO: 1049389 - RNA, 22 nt, Human
aaagaucacgucccaggacucg

SEQ ID NO: 1049390 - RNA, 22 nt, Human
uccugagcuacaguaguaugau

SEQ ID NO: 1049391 - RNA, 22 nt, Human
uuccaggcuauccggugaaggg

SEQ ID NO: 1049392 - RNA, 18 nt, Human
ccuggcagccaugcgcgc

SEQ ID NO: 1049393 - RNA, 22 nt, Human
gccuccuguuaugccaugugcc

SEQ ID NO: 1049394 - RNA, 22 nt, Human
aggcaguguguagcuggaagag

SEQ ID NO: 1049395 - RNA, 22 nt, Human
cccagccuuugcuuccugguuc

SEQ ID NO: 1049396 - RNA, 23 nt, Human
uccuuccuuugagaggcuccauc

SEQ ID NO: 1049397 - RNA, 22 nt, Human
ugcacaggugagacucaggaag

SEQ ID NO: 1049398 - RNA, 22 nt, Human
gacccauauaggacccuccaaa

SEQ ID NO: 1049399 - RNA, 22 nt, Human
gcuggcagucccaucagcuggg

SEQ ID NO: 1049400 - RNA, 22 nt, Human
gucacacagggccuccaaauca

SEQ ID NO: 1049401 - RNA, 22 nt, Human
gguuccuucugaggucccugua

SEQ ID NO: 1049402 - RNA, 22 nt, Human
uacacaacugacaaccauucug

SEQ ID NO: 1049403 - RNA, 22 nt, Human
gccagguugcugacgacgaucu

SEQ ID NO: 1049404 - RNA, 22 nt, Human
gcacucuccuggcugccacagu

SEQ ID NO: 1049405 - RNA, 22 nt, Human
gacacagaaggucacauguuca

SEQ ID NO: 1049406 - RNA, 22 nt, Human
gccuccggaguugcagugucuu

SEQ ID NO: 1049407 - RNA, 22 nt, Human
aucacagagcucccuuccacug

SEQ ID NO: 1049408 - RNA, 22 nt, Human
cuggccucagagggucauggug

SEQ ID NO: 1049409 - RNA, 22 nt, Human
gcacacaguagggauucaauga

SEQ ID NO: 1049410 - RNA, 22 nt, Human
cuggcaggagcauucacagagg

SEQ ID NO: 1049411 - RNA, 22 nt, Human
cuggcagucugguggaaggccu

SEQ ID NO: 1049412 - RNA, 22 nt, Human
guccucuggagguuuuuaggug

SEQ ID NO: 1049413 - RNA, 22 nt, Human
acacacuguaaggacuaucacu

SEQ ID NO: 1049414 - RNA, 22 nt, Human
uccuggcaguaauuugauguug

SEQ ID NO: 1049415 - RNA, 22 nt, Human
aagucguggcaggcuugcacga

SEQ ID NO: 1049416 - RNA, 22 nt, Human
cacauaagaaaugaauaugaga

SEQ ID NO: 1049417 - RNA, 22 nt, Human
cccacacacauuuaugauagga

SEQ ID NO: 1049418 - RNA, 22 nt, Human
acuggcagagguuggacaccau

SEQ ID NO: 1049419 - RNA, 22 nt, Human
uggcacaguccugggugccugc

SEQ ID NO: 1049420 - RNA, 22 nt, Human
gcacaggaugauggguugaggg

SEQ ID NO: 1049421 - RNA, 22 nt, Human
cccacacacuggcugcugccaa

SEQ ID NO: 1049422 - RNA, 22 nt, Human
ccuggcagcuccguggccuucc

SEQ ID NO: 1049423 - RNA, 22 nt, Human
uguaaacauaccagagccaagu

SEQ ID NO: 1049424 - RNA, 22 nt, Human
guggcaguuuugacaucacaaa

SEQ ID NO: 1049425 - RNA, 22 nt, Human
ccuggcagcuguuuggcuuggc

SEQ ID NO: 1049426 - RNA, 23 nt, Human
ccuggcagcaaacgaggagguua

SEQ ID NO: 1049427 - RNA, 22 nt, Human
uccaggcuagguuuacaggaca

SEQ ID NO: 1049428 - RNA, 22 nt, Human
ucaucacauaugucaugauuug

SEQ ID NO: 1049429 - RNA, 22 nt, Human
uacaaaaguaauuacgguuuuu

SEQ ID NO: 1049430 - RNA, 21 nt, Human
ccacucaugacuccacucacc

SEQ ID NO: 1049431 - RNA, 22 nt, Human
gcuggcaggagaaacggggugc

SEQ ID NO: 1049432 - RNA, 22 nt, Human
gccccaccuugagagcagaaac

SEQ ID NO: 1049433 - RNA, 22 nt, Human
gagggugucugcguaacuggca

SEQ ID NO: 1049434 - RNA, 20 nt, Human
aaaagagugcuucaacugcu

SEQ ID NO: 1049435 - RNA, 22 nt, Human
ggggcugagucagugggaagag

SEQ ID NO: 1049436 - RNA, 22 nt, Human
uccuggcauugugcagggugug

SEQ ID NO: 1049437 - RNA, 22 nt, Human
acacacagaguuuauacaggca

SEQ ID NO: 1049438 - RNA, 22 nt, Human
agcacaggaacauggagauggg

SEQ ID NO: 1049439 - RNA, 22 nt, Human
aaagaucaaguaggcauggccu

SEQ ID NO: 1049440 - RNA, 22 nt, Human
gcuggcagaauuucuucuugcu

SEQ ID NO: 1049441 - RNA, 17 nt, Human
ugccagccugucccagg

SEQ ID NO: 1049442 - RNA, 22 nt, Human
guccucugaaguugugcaaugc

SEQ ID NO: 1049443 - RNA, 22 nt, Human
ucaucacaauuuuaugacccuc

SEQ ID NO: 1049444 - RNA, 22 nt, Human
gccuggcaaggcccuguugacu

SEQ ID NO: 1049445 - RNA, 22 nt, Human
ucaggagcucuucccuggugug

SEQ ID NO: 1049446 - RNA, 22 nt, Human
ucccacaccugucuauuccuag

SEQ ID NO: 1049447 - RNA, 22 nt, Human
ccccacaccugccgggcagcag

SEQ ID NO: 1049448 - RNA, 22 nt, Human
ugccucucuaacccaugcccaa

SEQ ID NO: 1049449 - RNA, 18 nt, Human
ggccucuggacuggcagc

SEQ ID NO: 1049450 - RNA, 22 nt, Human
uauuacagaaucaggcauaacu

SEQ ID NO: 1049451 - RNA, 22 nt, Human
caggcuggagugcaauggcaca

SEQ ID NO: 1049452 - RNA, 22 nt, Human
uacacagaaccugguguacagu

SEQ ID NO: 1049453 - RNA, 21 nt, Human
ucuggcaggcacgggcccagc

SEQ ID NO: 1049454 - RNA, 22 nt, Human
ucuggcaguuccuuguugauau

SEQ ID NO: 1049455 - RNA, 22 nt, Human
caugagauaauuuuucuccagu

SEQ ID NO: 1049456 - RNA, 22 nt, Human
ugagagucucagaccuccuggu

SEQ ID NO: 1049457 - RNA, 22 nt, Human
cugccugccacguucagcugua

SEQ ID NO: 1049458 - RNA, 22 nt, Human
uccuggcagggucuaggucuag

SEQ ID NO: 1049459 - RNA, 22 nt, Human
gaggagcuguucccucaccucu

SEQ ID NO: 1049460 - RNA, 22 nt, Human
ccuccccaugacccggugcugg

SEQ ID NO: 1049461 - RNA, 22 nt, Human
ccuggcagguggagguugcagu

SEQ ID NO: 1049462 - RNA, 22 nt, Human
gagaaagauguaggcugggagg

SEQ ID NO: 1049463 - RNA, 22 nt, Human
cacuguccaauagauacauaau

SEQ ID NO: 1049464 - RNA, 22 nt, Human
acuggcagaggauagcacuaau

SEQ ID NO: 1049465 - RNA, 22 nt, Human
aggccuccagccacaugccagu

SEQ ID NO: 1049466 - RNA, 22 nt, Human
ucuggcagcaagucuguuucuc

SEQ ID NO: 1049467 - RNA, 19 nt, Human
acuggcagcuguagucugu

SEQ ID NO: 1049468 - RNA, 22 nt, Human
acacagaguuugacacauggga

SEQ ID NO: 1049469 - RNA, 22 nt, Human
aaagagucuggcacuguaccag

SEQ ID NO: 1049470 - RNA, 17 nt, Human
uccaggcagcaacugag

SEQ ID NO: 1049471 - RNA, 22 nt, Human
aggaggcugaacuagggucugg

SEQ ID NO: 1049472 - RNA, 17 nt, Human
gcaucacagauaacacg

SEQ ID NO: 1049473 - RNA, 22 nt, Human
gucacaggccuggaugaggggc

SEQ ID NO: 1049474 - RNA, 22 nt, Human
uacacaucccagacucccagga

SEQ ID NO: 1049475 - RNA, 22 nt, Human
ccacccuaacaauccuuacugu

SEQ ID NO: 1049476 - RNA, 22 nt, Human
uacauuccuguuagcaucuaag

SEQ ID NO: 1049477 - RNA, 22 nt, Human
ucuuuuucugcacacguguccc

SEQ ID NO: 1049478 - RNA, 22 nt, Human
uuccagcccgcgacuuguucag

SEQ ID NO: 1049479 - RNA, 22 nt, Human
cuccucuggguccugguggcca

SEQ ID NO: 1049480 - RNA, 22 nt, Human
gcuggcagagagcuggugagga

SEQ ID NO: 1049481 - RNA, 22 nt, Human
uccacccugcuuuugucuuuga

SEQ ID NO: 1049482 - RNA, 22 nt, Human
cuugggaaugcuaacagaugac

SEQ ID NO: 1049483 - RNA, 22 nt, Human
uacacaucacuguaucuuucag

SEQ ID NO: 1049484 - RNA, 22 nt, Human
uacacaucucugucaguaguga

SEQ ID NO: 1049485 - RNA, 22 nt, Human
cuggcacgcccacguaggcacu

SEQ ID NO: 1049486 - RNA, 22 nt, Human
gaggagcugcagggggagucua

SEQ ID NO: 1049487 - RNA, 22 nt, Human
cccagccuacucugccauagca

SEQ ID NO: 1049488 - RNA, 22 nt, Human
cuuggcagagggcugggcucag

SEQ ID NO: 1049489 - RNA, 17 nt, Human
gccuucucugcccucac

SEQ ID NO: 1049490 - RNA, 22 nt, Human
ggagaagaggagcuggaagccu

SEQ ID NO: 1049491 - RNA, 22 nt, Human
cccacacaaaucauggggagaa

SEQ ID NO: 1049492 - RNA, 22 nt, Human
ucuggcaguggaugagggcagc

SEQ ID NO: 1049493 - RNA, 22 nt, Human
caaauacuacgauucuugcagu

SEQ ID NO: 1049494 - RNA, 22 nt, Human
acacacuuuaaauuaaaccucu

SEQ ID NO: 1049495 - RNA, 21 nt, Human
aacacauccagaguauuugac

SEQ ID NO: 1049496 - RNA, 22 nt, Human
ggagcugaaccccaucgugcug

SEQ ID NO: 1049497 - RNA, 22 nt, Human
ggccucucaugcccagagccaa

SEQ ID NO: 1049498 - RNA, 22 nt, Human
cacacacaguuuuguauucugu

SEQ ID NO: 1049499 - RNA, 22 nt, Human
agucuagggugggguccacagg

SEQ ID NO: 1049500 - RNA, 22 nt, Human
ccagcccugccagagagagcug

SEQ ID NO: 1049501 - RNA, 22 nt, Human
ggcugaguugagaggauuacuu

SEQ ID NO: 1049502 - RNA, 22 nt, Human
guccucuguguaggcugcagac

SEQ ID NO: 1049503 - RNA, 17 nt, Human
uuaagguggaucagcac

SEQ ID NO: 1049504 - RNA, 22 nt, Human
aauggcagaggcaaagauggua

SEQ ID NO: 1049505 - RNA, 22 nt, Human
uguaaacauauguauguaugua

SEQ ID NO: 1049506 - RNA, 22 nt, Human
gccuggcauauaguaguugugc

SEQ ID NO: 1049507 - RNA, 22 nt, Human
cuuacaaauacacuuaggagag

SEQ ID NO: 1049508 - RNA, 22 nt, Human
uaaaggguagguuuuacuguaa

SEQ ID NO: 1049509 - RNA, 22 nt, Human
gcacauacugcaaagauuacua

SEQ ID NO: 1049510 - RNA, 20 nt, Human
gagucacagaagaagcugaa

SEQ ID NO: 1049511 - RNA, 22 nt, Human
gcacacaggcaguuuccagcca

SEQ ID NO: 1049512 - RNA, 23 nt, Human
aguguugguugggaagccaagca

SEQ ID NO: 1049513 - RNA, 22 nt, Human
ccagugcccagcugcccaggca

SEQ ID NO: 1049514 - RNA, 22 nt, Human
augacugcucugggcucccaug

SEQ ID NO: 1049515 - RNA, 22 nt, Human
acaguucccgucuugcacagcu

SEQ ID NO: 1049516 - RNA, 22 nt, Human
ccacacuaaacugcucaaacca

SEQ ID NO: 1049517 - RNA, 15 nt, Human
cacacagacagcuug

SEQ ID NO: 1049518 - RNA, 22 nt, Human
ugaccaggauacugcagggaug

SEQ ID NO: 1049519 - RNA, 22 nt, Human
acuggcaguagagggagcgcau

SEQ ID NO: 1049520 - RNA, 20 nt, Human
cccagccccuaccuguugcc

SEQ ID NO: 1049521 - RNA, 22 nt, Human
ccuccagcgcgauccacuccgg

SEQ ID NO: 1049522 - RNA, 22 nt, Human
cugagagaucaagccacaggau

SEQ ID NO: 1049523 - RNA, 22 nt, Human
uggcacagggcuuggucgcuca

SEQ ID NO: 1049524 - RNA, 22 nt, Human
acacucacccucccacugccug

SEQ ID NO: 1049525 - RNA, 22 nt, Human
agcccaggucuggcccagccug

SEQ ID NO: 1049526 - RNA, 22 nt, Human
ccuggcaguggugaagaagagg

SEQ ID NO: 1049527 - RNA, 22 nt, Human
acccacccuacuagcagugucc

SEQ ID NO: 1049528 - RNA, 22 nt, Human
gggacaauggaggccucucucc

SEQ ID NO: 1049529 - RNA, 22 nt, Human
ccuggcaggacuguuguaagaa

SEQ ID NO: 1049530 - RNA, 22 nt, Human
cugccugcucaccagggcucug

SEQ ID NO: 1049531 - RNA, 22 nt, Human
gaaagacuuccuuugagaguac

SEQ ID NO: 1049532 - RNA, 22 nt, Human
uggccucugggaaagcagauuc

SEQ ID NO: 1049533 - RNA, 22 nt, Human
cacacaucaaccuagacauugu

SEQ ID NO: 1049534 - RNA, 22 nt, Human
cacacagacagcucucugaaga

SEQ ID NO: 1049535 - RNA, 22 nt, Human
auccaggccccaagaccccgac

SEQ ID NO: 1049536 - RNA, 22 nt, Human
gcuggcaguaaaggguuuggca

SEQ ID NO: 1049537 - RNA, 22 nt, Human
gcccacaccauuuauucuuugu

SEQ ID NO: 1049538 - RNA, 22 nt, Human
cacuguccaugcuugcuaaccc

SEQ ID NO: 1049539 - RNA, 22 nt, Human
cauucccacguguucuuugcuu

SEQ ID NO: 1049540 - RNA, 22 nt, Human
auggccuggggauuccugagca

SEQ ID NO: 1049541 - RNA, 22 nt, Human
ucccuccccacuucugagcuuu

SEQ ID NO: 1049542 - RNA, 20 nt, Human
cacaacuguccacaugcucc

SEQ ID NO: 1049543 - RNA, 19 nt, Human
agaggccucagcagcuggc

SEQ ID NO: 1049544 - RNA, 22 nt, Human
auggcagaccuccuggccacaa

SEQ ID NO: 1049545 - RNA, 22 nt, Human
agacacagucugucuggaggag

SEQ ID NO: 1049546 - RNA, 20 nt, Human
acaaagacuggaaaagcaag

SEQ ID NO: 1049547 - RNA, 22 nt, Human
gguggcagaggugcaucagccc

SEQ ID NO: 1049548 - RNA, 22 nt, Human
ccuggcaguucaucaaauggca

SEQ ID NO: 1049549 - RNA, 22 nt, Human
caccagggccccaggcugugcc

SEQ ID NO: 1049550 - RNA, 22 nt, Human
ccagcccuugcugaaggguggc

SEQ ID NO: 1049551 - RNA, 18 nt, Human
cuccuggcugauggugag

SEQ ID NO: 1049552 - RNA, 22 nt, Human
cccacccucaagggugucuaua

SEQ ID NO: 1049553 - RNA, 23 nt, Human
uuccaggcagagcagggauuaga

SEQ ID NO: 1049554 - RNA, 22 nt, Human
gacacagacaguuagagguaau

SEQ ID NO: 1049555 - RNA, 22 nt, Human
acagguggaggcuuuaggaggu

SEQ ID NO: 1049556 - RNA, 22 nt, Human
gacugccucaguuucccugcag

SEQ ID NO: 1049557 - RNA, 22 nt, Human
ccuggcagggcugcaguaaugg

SEQ ID NO: 1049558 - RNA, 22 nt, Human
ccagccucacuggcaucaccua

SEQ ID NO: 1049559 - RNA, 22 nt, Human
ccccacccaccuaagagaaacu

SEQ ID NO: 1049560 - RNA, 22 nt, Human
gugggagaaauuagcucuaguu

SEQ ID NO: 1049561 - RNA, 19 nt, Human
uggcagguagugagcaguc

SEQ ID NO: 1049562 - RNA, 22 nt, Human
ccugaccuauuuuucucagcug

SEQ ID NO: 1049563 - RNA, 22 nt, Human
guugggaaggugaacaugaugc

SEQ ID NO: 1049564 - RNA, 17 nt, Human
ugcuggcaacauacaaa

SEQ ID NO: 1049565 - RNA, 22 nt, Human
cugccugcaggacaccucgcua

SEQ ID NO: 1049566 - RNA, 22 nt, Human
uccccaccuaagauacccaucu

SEQ ID NO: 1049567 - RNA, 22 nt, Human
ucaggcccuucucccaggacuc

SEQ ID NO: 1049568 - RNA, 22 nt, Human
gaggagcucugcuccauccuuc

SEQ ID NO: 1049569 - RNA, 22 nt, Human
ucacacagcugacagagccuuu

SEQ ID NO: 1049570 - RNA, 22 nt, Human
agggcugacagugaggagucaa

SEQ ID NO: 1049571 - RNA, 20 nt, Human
ucccucccuccagcucuggg

SEQ ID NO: 1049572 - RNA, 22 nt, Human
cacaauuuuaauacacagucaa

SEQ ID NO: 1049573 - RNA, 22 nt, Human
ugccugacugcugccaccacua

SEQ ID NO: 1049574 - RNA, 22 nt, Human
ucaggauggagggaagcacaga

SEQ ID NO: 1049575 - RNA, 22 nt, Human
agaggcuuggaggugcaagguu

SEQ ID NO: 1049576 - RNA, 22 nt, Human
acuggcagugucguuuacauga

SEQ ID NO: 1049577 - RNA, 22 nt, Human
ggagcugaguucuucagccggg

SEQ ID NO: 1049578 - RNA, 22 nt, Human
uccuggcauccgugggucugug

SEQ ID NO: 1049579 - RNA, 19 nt, Human
acuggcagggcugcggugg

SEQ ID NO: 1049580 - RNA, 22 nt, Human
ucccugccuccuggcagugcca

SEQ ID NO: 1049581 - RNA, 22 nt, Human
cugccugcugcccuccagagcc

SEQ ID NO: 1049582 - RNA, 22 nt, Human
uccugagcaacacagcuaagug

SEQ ID NO: 1049583 - RNA, 22 nt, Human
aggaagaacagauaauggacgc

SEQ ID NO: 1049584 - RNA, 22 nt, Human
ggagcugaaggggugggcucag

SEQ ID NO: 1049585 - RNA, 21 nt, Human
ucuggcaguggucuuucaaau

SEQ ID NO: 1049586 - RNA, 22 nt, Human
cacacagaaccgcucgccacuu

SEQ ID NO: 1049587 - RNA, 22 nt, Human
cuugccucccucagcucacagc

SEQ ID NO: 1049588 - RNA, 22 nt, Human
acagacuggccugucucgcacc

SEQ ID NO: 1049589 - RNA, 22 nt, Human
gcaguguuuguguucucacaug

SEQ ID NO: 1049590 - RNA, 22 nt, Human
gagacaucauaaugaaguuucc

SEQ ID NO: 1049591 - RNA, 22 nt, Human
cucaccccacuaccccuuggug

SEQ ID NO: 1049592 - RNA, 22 nt, Human
guacacacuguuugaucauuuc

SEQ ID NO: 1049593 - RNA, 22 nt, Human
ccuggcaggcaagaggaaggga

SEQ ID NO: 1049594 - RNA, 22 nt, Human
ugggacucacucuuuuggccag

SEQ ID NO: 1049595 - RNA, 20 nt, Human
ucuggcaggugaacgagcug

SEQ ID NO: 1049596 - RNA, 22 nt, Human
gcacauaacugaccacaucuaa

SEQ ID NO: 1049597 - RNA, 22 nt, Human
cccuggcagagggggcaggugc

SEQ ID NO: 1049598 - RNA, 22 nt, Human
uuggaacaugccgggguccagg

SEQ ID NO: 1049599 - RNA, 22 nt, Human
cucaucaccacauauaacaaag

SEQ ID NO: 1049600 - RNA, 22 nt, Human
guccucuguuagaaaugugcuu

SEQ ID NO: 1049601 - RNA, 22 nt, Human
ggcccagcgaggccaccuacag

SEQ ID NO: 1049602 - RNA, 22 nt, Human
cucagccccaauucuccccauu

SEQ ID NO: 1049603 - RNA, 22 nt, Human
cacauacauucauguuacucua

SEQ ID NO: 1049604 - RNA, 22 nt, Human
ucccaccccuugacucuuuaag

SEQ ID NO: 1049605 - RNA, 22 nt, Human
uucaguuccauuucaggugggu

SEQ ID NO: 1049606 - RNA, 22 nt, Human
cccacccugggaagcuaggcag

SEQ ID NO: 1049607 - RNA, 22 nt, Human
gaggcugcggggaggagccugc

SEQ ID NO: 1049608 - RNA, 22 nt, Human
acacucuguaaugucacacucc

SEQ ID NO: 1049609 - RNA, 22 nt, Human
agcacugugauuuauaacauuu

SEQ ID NO: 1049610 - RNA, 22 nt, Human
gaggagcugggacccugucauc

SEQ ID NO: 1049611 - RNA, 22 nt, Human
aaauacugcugcuauuccuuuu

SEQ ID NO: 1049612 - RNA, 22 nt, Human
cccagcccacgguccugggugg

SEQ ID NO: 1049613 - RNA, 22 nt, Human
uccaggcuugagaccaggcucu

SEQ ID NO: 1049614 - RNA, 22 nt, Human
ccucccuucaguagagcccaau

SEQ ID NO: 1049615 - RNA, 22 nt, Human
ucuggcaguugccgcuucaguc

SEQ ID NO: 1049616 - RNA, 22 nt, Human
ucuggcagggucagggcccagg

SEQ ID NO: 1049617 - RNA, 22 nt, Human
caauacugaguuuacauucauc

SEQ ID NO: 1049618 - RNA, 21 nt, Human
cacacagugaucuauccacau

SEQ ID NO: 1049619 - RNA, 22 nt, Human
guugggaagcagauggaugagc

SEQ ID NO: 1049620 - RNA, 22 nt, Human
uuccaggcucccuuggaggugu

SEQ ID NO: 1049621 - RNA, 22 nt, Human
cccagccuuccacccuggacua

SEQ ID NO: 1049622 - RNA, 22 nt, Human
uccuggcagaaauggggcugug

SEQ ID NO: 1049623 - RNA, 22 nt, Human
cugagggucaacuugauuguau

SEQ ID NO: 1049624 - RNA, 22 nt, Human
ugcagagaagaggacaguucua

SEQ ID NO: 1049625 - RNA, 22 nt, Human
aaaaagucugcaaaggagguug

SEQ ID NO: 1049626 - RNA, 21 nt, Human
gggagggauggaaaugauguu

SEQ ID NO: 1049627 - RNA, 22 nt, Human
gaggcuguuaggagggacucug

SEQ ID NO: 1049628 - RNA, 22 nt, Human
uuggagagauuuaggucucagu

SEQ ID NO: 1049629 - RNA, 22 nt, Human
ucuccacacuuucucucccagg

SEQ ID NO: 1049630 - RNA, 22 nt, Human
ucuggcagcagcaucaguggcu

SEQ ID NO: 1049631 - RNA, 22 nt, Human
acaaauccagugaacuccagug

SEQ ID NO: 1049632 - RNA, 22 nt, Human
cccacacauuuuucacuuaccg

SEQ ID NO: 1049633 - RNA, 22 nt, Human
ucccagccuggacccugccagu

SEQ ID NO: 1049634 - RNA, 23 nt, Human
acuccccagucucuucuugccaa

SEQ ID NO: 1049635 - RNA, 22 nt, Human
ucuggcagaggaaggaggccug

SEQ ID NO: 1049636 - RNA, 22 nt, Human
guccucugggagccuugagccu

SEQ ID NO: 1049637 - RNA, 22 nt, Human
gccacagguacuaugggagaga

SEQ ID NO: 1049638 - RNA, 22 nt, Human
ugcagagagaccccugggccag

SEQ ID NO: 1049639 - RNA, 22 nt, Human
cacagagacagaagcacuuaug

SEQ ID NO: 1049640 - RNA, 22 nt, Human
uucuuucaauagcuggcauaug

SEQ ID NO: 1049641 - RNA, 22 nt, Human
uuuaaauuuagaagaaacacug

SEQ ID NO: 1049642 - RNA, 22 nt, Human
ugagggacucccggcccugcca

SEQ ID NO: 1049643 - RNA, 22 nt, Human
cuggcaugaaauggcaucucau

SEQ ID NO: 1049644 - RNA, 22 nt, Human
accugccuucucaaggacauga

SEQ ID NO: 1049645 - RNA, 22 nt, Human
gaaaagaguccugugugaggag

SEQ ID NO: 1049646 - RNA, 22 nt, Human
uccccaccccagaacuacuagg

SEQ ID NO: 1049647 - RNA, 22 nt, Human
ccaggccucuggcugcuuaguc

SEQ ID NO: 1049648 - RNA, 22 nt, Human
agacaagaaacugggagucucu

SEQ ID NO: 1049649 - RNA, 22 nt, Human
ccaccccaaaugaagaccucuc

SEQ ID NO: 1049650 - RNA, 22 nt, Human
ggcacagggggcugaggacuag

SEQ ID NO: 1049651 - RNA, 22 nt, Human
cccgagugucuacucacuccca

SEQ ID NO: 1049652 - RNA, 22 nt, Human
uugggaucucaaauccagcuau

SEQ ID NO: 1049653 - RNA, 22 nt, Human
cacauacaaggcacacuggagg

SEQ ID NO: 1049654 - RNA, 22 nt, Human
gcagggacagggcagggccuuu

SEQ ID NO: 1049655 - RNA, 19 nt, Human
uccuggcauuuguaggaaa

SEQ ID NO: 1049656 - RNA, 22 nt, Human
acacauacauggggaagaugag

SEQ ID NO: 1049657 - RNA, 22 nt, Human
gccccacagccugcggucucag

SEQ ID NO: 1049658 - RNA, 22 nt, Human
cagacagagucuucccaucagu

SEQ ID NO: 1049659 - RNA, 22 nt, Human
cuggcaguuugccaggagcucg

SEQ ID NO: 1049660 - RNA, 22 nt, Human
uccuggcagugcuuguuuugga

SEQ ID NO: 1049661 - RNA, 22 nt, Human
ccuggcagcgccgaagcuggcc

SEQ ID NO: 1049662 - RNA, 19 nt, Human
cagcccucuuaccacugug

SEQ ID NO: 1049663 - RNA, 22 nt, Human
gaccugccugagcugccucugc

SEQ ID NO: 1049664 - RNA, 22 nt, Human
ucaggcccagagucacggaucc

SEQ ID NO: 1049665 - RNA, 22 nt, Human
ccuggcugguggcagcgacaag

SEQ ID NO: 1049666 - RNA, 22 nt, Human
ucccacaggaaaguagacauug

SEQ ID NO: 1049667 - RNA, 22 nt, Human
guccuggcccacuggcaggcug

SEQ ID NO: 1049668 - RNA, 22 nt, Human
uguaaagaaagacgcagaguua

SEQ ID NO: 1049669 - RNA, 22 nt, Human
uggccuccccuaacagccucuu

SEQ ID NO: 1049670 - RNA, 22 nt, Human
cucuccagaauaugccgccgug

SEQ ID NO: 1049671 - RNA, 22 nt, Human
agagcacagaagaauaggugcu

SEQ ID NO: 1049672 - RNA, 22 nt, Human
ucuggcagcucuccucggcgga

SEQ ID NO: 1049673 - RNA, 22 nt, Human
auccaggcgaaugcagaaggcc

SEQ ID NO: 1049674 - RNA, 22 nt, Human
ccagcccugucaccaacuggag

SEQ ID NO: 1049675 - RNA, 22 nt, Human
acuggcaggcugcuggccggcg

SEQ ID NO: 1049676 - RNA, 22 nt, Human
ccuggcagacagcacugaagcu

SEQ ID NO: 1049677 - RNA, 22 nt, Human
gaagagaaaggcaaggaguuuu

SEQ ID NO: 1049678 - RNA, 22 nt, Human
ucacauaaauuuaccagaugau

SEQ ID NO: 1049679 - RNA, 19 nt, Human
ccacacagugugcaauuua

SEQ ID NO: 1049680 - RNA, 22 nt, Human
acagguggcuuauuggcugauu

SEQ ID NO: 1049681 - RNA, 22 nt, Human
cgcugauaaacgucacguuccc

SEQ ID NO: 1049682 - RNA, 22 nt, Human
uaagaacaguagaacaguaggu

SEQ ID NO: 1049683 - RNA, 22 nt, Human
gacacauaugcguauaguuuag

SEQ ID NO: 1049684 - RNA, 22 nt, Human
ucccacccccuccaaggaggaa

SEQ ID NO: 1049685 - RNA, 22 nt, Human
ccuggcaggcuggggacagugc

SEQ ID NO: 1049686 - RNA, 22 nt, Human
ucuggcagcgaagcguguacuu

SEQ ID NO: 1049687 - RNA, 22 nt, Human
cuuggcaggguggaggaugcag

SEQ ID NO: 1049688 - RNA, 21 nt, Human
ucacguggucacaugagcuuu

SEQ ID NO: 1049689 - RNA, 22 nt, Human
agcacagggacaaugccaggug

SEQ ID NO: 1049690 - RNA, 21 nt, Human
ugacugaggcuucuucacaca

SEQ ID NO: 1049691 - RNA, 22 nt, Human
ccugccucccagagguccucua

SEQ ID NO: 1049692 - RNA, 22 nt, Human
cuccaggccauggcugcggagg

SEQ ID NO: 1049693 - RNA, 22 nt, Human
uacacagauaugugaucaauca

SEQ ID NO: 1049694 - RNA, 22 nt, Human
cugagcagugguucuugagcgc

SEQ ID NO: 1049695 - RNA, 22 nt, Human
guggcagugggaugcuaucagg

SEQ ID NO: 1049696 - RNA, 22 nt, Human
uggcgucucucauaaguaugug

SEQ ID NO: 1049697 - RNA, 22 nt, Human
caggucccugcgccccggccuc

SEQ ID NO: 1049698 - RNA, 22 nt, Human
ugaguagagaauucagcuaagg

SEQ ID NO: 1049699 - RNA, 22 nt, Human
ucaggcccuuugcugcugcccc

SEQ ID NO: 1049700 - RNA, 22 nt, Human
gcuggcaggauagaagucuaau

SEQ ID NO: 1049701 - RNA, 22 nt, Human
uccaggcucccucaggaugcac

SEQ ID NO: 1049702 - RNA, 22 nt, Human
cacaacuuuaggaaccacauuc

SEQ ID NO: 1049703 - RNA, 21 nt, Human
ccagcccagcugugucccagc

SEQ ID NO: 1049704 - RNA, 22 nt, Human
ggcacagagcuuugucccaguu

SEQ ID NO: 1049705 - RNA, 22 nt, Human
agagggugcuggagagacauug

SEQ ID NO: 1049706 - RNA, 22 nt, Human
gagauggccagugccaggacaa

SEQ ID NO: 1049707 - RNA, 22 nt, Human
uuccagccaugguuucccuaug

SEQ ID NO: 1049708 - RNA, 22 nt, Human
ucacauacacuaggauauuuuu

SEQ ID NO: 1049709 - RNA, 22 nt, Human
ucccagccuuccagucugguuu

SEQ ID NO: 1049710 - RNA, 22 nt, Human
auccucuguggauuacaccuag

SEQ ID NO: 1049711 - RNA, 22 nt, Human
ucuggcagaaggcagaaauuca

SEQ ID NO: 1049712 - RNA, 22 nt, Human
uccuggcacccuuggguuggag

SEQ ID NO: 1049713 - RNA, 22 nt, Human
ugguaagaacccaucagagaag

SEQ ID NO: 1049714 - RNA, 22 nt, Human
auguuggagucguaaggcaugg

SEQ ID NO: 1049715 - RNA, 22 nt, Human
uggaaagaggaagugcccagca

SEQ ID NO: 1049716 - RNA, 22 nt, Human
cccuuccuugugacuggugggg

SEQ ID NO: 1049717 - RNA, 22 nt, Human
gcuugggaagggcccuguguac

SEQ ID NO: 1049718 - RNA, 22 nt, Human
ggagacucggguucuagccuug

SEQ ID NO: 1049719 - RNA, 22 nt, Human
cccaggccagaacuugguugcu

SEQ ID NO: 1049720 - RNA, 22 nt, Human
uccugagcugccgcaucagcag

SEQ ID NO: 1049721 - RNA, 22 nt, Human
uuccacauuccuuacauucaua

SEQ ID NO: 1049722 - RNA, 22 nt, Human
cuccuggcaggcugagugaaau

SEQ ID NO: 1049723 - RNA, 22 nt, Human
acagguccucaagucagcuggg

SEQ ID NO: 1049724 - RNA, 22 nt, Human
gaggcacagucccgaggcaagg

SEQ ID NO: 1049725 - RNA, 22 nt, Human
gauggccuggguccccuuccgg

SEQ ID NO: 1049726 - RNA, 22 nt, Human
uguggggaagaguaugacuugg

SEQ ID NO: 1049727 - RNA, 22 nt, Human
aggaggcugcaacccugaggcc

SEQ ID NO: 1049728 - RNA, 22 nt, Human
cccccaaaguuugcacggauaa

SEQ ID NO: 1049729 - RNA, 22 nt, Human
uccuggcagcccgcaggugcug

SEQ ID NO: 1049730 - RNA, 22 nt, Human
agcacaggcuuuggugugaggg

SEQ ID NO: 1049731 - RNA, 22 nt, Human
ucccugcccucagugcacccgg

SEQ ID NO: 1049732 - RNA, 20 nt, Human
agaggcuuccuugggaggag

SEQ ID NO: 1049733 - RNA, 22 nt, Human
acaauucugaugguuucccagu

SEQ ID NO: 1049734 - RNA, 22 nt, Human
cagugggggggccaugcugcag

SEQ ID NO: 1049735 - RNA, 22 nt, Human
gcuccaggagagggaagcagau

SEQ ID NO: 1049736 - RNA, 22 nt, Human
uuccugccccugagagcuccca

SEQ ID NO: 1049737 - RNA, 22 nt, Human
gaggcacauauauacagagccc

SEQ ID NO: 1049738 - RNA, 16 nt, Human
gcacacacaucaauga

SEQ ID NO: 1049739 - RNA, 22 nt, Human
acuggcagcuguaggaugcaug

SEQ ID NO: 1049740 - RNA, 22 nt, Human
caggagggcccgagacucuucc

SEQ ID NO: 1049741 - RNA, 22 nt, Human
gcacacaggggaguucucagaa

SEQ ID NO: 1049742 - RNA, 22 nt, Human
ccuggcagucaggggaguccuu

SEQ ID NO: 1049743 - RNA, 19 nt, Human
ucuggcagguaauuaggga

SEQ ID NO: 1049744 - RNA, 22 nt, Human
ggagccugaaaagucugcauuu

SEQ ID NO: 1049745 - RNA, 22 nt, Human
acuggcagggggagccccgaga

SEQ ID NO: 1049746 - RNA, 22 nt, Human
uccaggcuccccugcgugcucc

SEQ ID NO: 1049747 - RNA, 22 nt, Human
gacucugggcugagccagggcc

SEQ ID NO: 1049748 - RNA, 20 nt, Human
aagagucuuuacugagcuaa

SEQ ID NO: 1049749 - RNA, 22 nt, Human
acuggcagcagcagcccuuggg

SEQ ID NO: 1049750 - RNA, 22 nt, Human
agggaagaagcugguaguaggu

SEQ ID NO: 1049751 - RNA, 22 nt, Human
acuggcagaacgugaugcgggu

SEQ ID NO: 1049752 - RNA, 22 nt, Human
ccuccuggggugaaggauggga

SEQ ID NO: 1049753 - RNA, 19 nt, Human
agcuuccauauucucuagu

SEQ ID NO: 1049754 - RNA, 22 nt, Human
uuugaaaguucuucugacacua

SEQ ID NO: 1049755 - RNA, 22 nt, Human
cuguuucaagugaagucagaca

SEQ ID NO: 1049756 - RNA, 22 nt, Human
uggccaagaaugauaugugaag

SEQ ID NO: 1049757 - RNA, 23 nt, Human
ccuccugggcacaggccugaugg

SEQ ID NO: 1049758 - RNA, 22 nt, Human
gagggagggaaaguuuaacacu

SEQ ID NO: 1049759 - RNA, 17 nt, Human
ucugaggugaggaugca

SEQ ID NO: 1049760 - RNA, 22 nt, Human
ggaagaggcugaggccaugcug

SEQ ID NO: 1049761 - RNA, 22 nt, Human
agcugagggcaggaugggguga

SEQ ID NO: 1049762 - RNA, 22 nt, Human
uagaaagacuguccagauuuca

SEQ ID NO: 1049763 - RNA, 22 nt, Human
ggcagcuauuccaagcagcacu

SEQ ID NO: 1049764 - RNA, 21 nt, Human
ccugagguuucuggccucugu

SEQ ID NO: 1049765 - RNA, 22 nt, Human
aacuggaucaguugagggaggc

SEQ ID NO: 1049766 - RNA, 22 nt, Human
uaguaaucagagguaaacuuua

SEQ ID NO: 1049767 - RNA, 22 nt, Human
agugauggugagugagaagcuc

SEQ ID NO: 1049768 - RNA, 22 nt, Human
gugguccaucaugcagagcucc

SEQ ID NO: 1049769 - RNA, 22 nt, Human
acucagaaccauuuacucugag

SEQ ID NO: 1049770 - RNA, 22 nt, Human
aggcuggagcaagggggcauau

SEQ ID NO: 1049771 - RNA, 22 nt, Human
uuauugagcacauaguaugugg

SEQ ID NO: 1049772 - RNA, 22 nt, Human
uacaugaagaaaauuaagcagu

SEQ ID NO: 1049773 - RNA, 20 nt, Human
ucacaucuggcagcugauga

SEQ ID NO: 1049774 - RNA, 22 nt, Human
ccugccucaucaacuugucgug

SEQ ID NO: 1049775 - RNA, 22 nt, Human
ggaggggaggauuaaugacaaa

SEQ ID NO: 1049776 - RNA, 22 nt, Human
agggcagccauugagggauucu

SEQ ID NO: 1049777 - RNA, 22 nt, Human
gugguaaucggauucuuaccgg

SEQ ID NO: 1049778 - RNA, 19 nt, Human
auuagcaugcuugaggaug

SEQ ID NO: 1049779 - RNA, 22 nt, Human
cccaggaacagcacagaacagc

SEQ ID NO: 1049780 - RNA, 22 nt, Human
cccaggaggaggaaaaagcucg

SEQ ID NO: 1049781 - RNA, 22 nt, Human
uggcagcugaggggaggcuuug

SEQ ID NO: 1049782 - RNA, 22 nt, Human
uaacugguauaucaguguacac

SEQ ID NO: 1049783 - RNA, 22 nt, Human
ugcuggcugcagugcugucaaa

SEQ ID NO: 1049784 - RNA, 22 nt, Human
uccaggagcucauccacgucaa

SEQ ID NO: 1049785 - RNA, 22 nt, Human
auggagggugguaagacagaga

SEQ ID NO: 1049786 - RNA, 22 nt, Human
ugugaaagcaagucuaguucuc

SEQ ID NO: 1049787 - RNA, 22 nt, Human
ucugggaaguccucugucaugc

SEQ ID NO: 1049788 - RNA, 22 nt, Human
ggggugggcgugcagggacacc

SEQ ID NO: 1049789 - RNA, 22 nt, Human
gacuuucucuccucccaggugu

SEQ ID NO: 1049790 - RNA, 22 nt, Human
uagaacuggcggcuagaccacu

SEQ ID NO: 1049791 - RNA, 22 nt, Human
cauguuuacuaccaggagaaug

SEQ ID NO: 1049792 - RNA, 22 nt, Human
uaaacagcuacugugucaaagg

SEQ ID NO: 1049793 - RNA, 22 nt, Human
ugcaggcugcuggcaguagcuu

SEQ ID NO: 1049794 - RNA, 22 nt, Human
acaaguuaccaaaaaagauuca

SEQ ID NO: 1049795 - RNA, 22 nt, Human
uuagauaaauugcaacuugauu

SEQ ID NO: 1049796 - RNA, 22 nt, Human
auggagacgcaagggaccuagg

SEQ ID NO: 1049797 - RNA, 22 nt, Human
cuuaauaaaugguagcuguuau

SEQ ID NO: 1049798 - RNA, 22 nt, Human
acuuuaaggaggcacucaucuc

SEQ ID NO: 1049799 - RNA, 22 nt, Human
uagaaagagcuuugcuuccuuu

SEQ ID NO: 1049800 - RNA, 19 nt, Human
caaggccaccauuucuccg

SEQ ID NO: 1049801 - RNA, 18 nt, Human
gcaggagauggguggggu

SEQ ID NO: 1049802 - RNA, 22 nt, Human
aguaacucauguaaaccucaca

SEQ ID NO: 1049803 - RNA, 22 nt, Human
gccucugcccuccugggacugc

SEQ ID NO: 1049804 - RNA, 22 nt, Human
aggagggacaccaauauauguu

SEQ ID NO: 1049805 - RNA, 22 nt, Human
uggcagcuggaucccaaggcag

SEQ ID NO: 1049806 - RNA, 22 nt, Human
ugcugcuguauccuuaguguca

SEQ ID NO: 1049807 - RNA, 22 nt, Human
auguuguuuuuucauaaaguau

SEQ ID NO: 1049808 - RNA, 22 nt, Human
uuuuaucuaccuaugcucauuu

SEQ ID NO: 1049809 - RNA, 22 nt, Human
agcccaggugagggguucgaaa

SEQ ID NO: 1049810 - RNA, 22 nt, Human
uaaaugagggcugacaugauug

SEQ ID NO: 1049811 - RNA, 22 nt, Human
cagaaccaggaacugauggaga

SEQ ID NO: 1049812 - RNA, 22 nt, Human
agucucugccagcuuguccucu

SEQ ID NO: 1049813 - RNA, 22 nt, Human
ugacauuauuaucaugucacca

SEQ ID NO: 1049814 - RNA, 22 nt, Human
gugagguccauguuaauggguu

SEQ ID NO: 1049815 - RNA, 22 nt, Human
aacaugaaaacuaccugugauu

SEQ ID NO: 1049816 - RNA, 21 nt, Human
ccagugcuacagcugccugac

SEQ ID NO: 1049817 - RNA, 22 nt, Human
accgaaggaaacuggaaccguu

SEQ ID NO: 1049818 - RNA, 22 nt, Human
cuugccucccucagcucacagc

SEQ ID NO: 1049819 - RNA, 22 nt, Human
auuggcaguuagugacgaggcu

SEQ ID NO: 1049820 - RNA, 22 nt, Human
cuucagaaugggacuguguuug

SEQ ID NO: 1049821 - RNA, 22 nt, Human
uccaggagugcugguuagagua

SEQ ID NO: 1049822 - RNA, 22 nt, Human
guucacagaaauuguguaccuc

SEQ ID NO: 1049823 - RNA, 22 nt, Human
cugagauggaguuuugcucuug

SEQ ID NO: 1049824 - RNA, 22 nt, Human
caggacagagcccagacugugu

SEQ ID NO: 1049825 - RNA, 22 nt, Human
ucucagucuuugcaaggaugcu

SEQ ID NO: 1049826 - RNA, 18 nt, Human
ccugaggugggaggaagg

SEQ ID NO: 1049827 - RNA, 21 nt, Human
ugcuggcugaaaggcacagag

SEQ ID NO: 1049828 - RNA, 22 nt, Human
ucugagccacagauguccuguu

SEQ ID NO: 1049829 - RNA, 22 nt, Human
ugcugagguuucgucugcuugc

SEQ ID NO: 1049830 - RNA, 22 nt, Human
agaggcggagguugcagugagc

SEQ ID NO: 1049831 - RNA, 21 nt, Human
ggcugcugucaccgcugucac

SEQ ID NO: 1049832 - RNA, 22 nt, Human
ucuccuggauggaccuucucuu

SEQ ID NO: 1049833 - RNA, 22 nt, Human
ccuggccacccagccuuggcca

SEQ ID NO: 1049834 - RNA, 20 nt, Human
agagcagcaguuggugaggu

SEQ ID NO: 1049835 - RNA, 22 nt, Human
ggcugcugaguuggccaggaga

SEQ ID NO: 1049836 - RNA, 22 nt, Human
uugaacauuggcaauuucauau

SEQ ID NO: 1049837 - RNA, 22 nt, Human
guuuuauaggcuguugcuauau

SEQ ID NO: 1049838 - RNA, 22 nt, Human
acaccuuugugaagugaugaug

SEQ ID NO: 1049839 - RNA, 22 nt, Human
auuucccaugugaaucaauugg

SEQ ID NO: 1049840 - RNA, 22 nt, Human
aucaggaugacaacugcugggu

SEQ ID NO: 1049841 - RNA, 22 nt, Human
gaacuggugaagugaagggcag

SEQ ID NO: 1049842 - RNA, 19 nt, Human
ucauuguugguuugucggg

SEQ ID NO: 1049843 - RNA, 22 nt, Human
cugccaccaaauagcugcauga

SEQ ID NO: 1049844 - RNA, 22 nt, Human
acugaggucagggguaugugau

SEQ ID NO: 1049845 - RNA, 22 nt, Human
cucagaauuuagggcucugagg

SEQ ID NO: 1049846 - RNA, 22 nt, Human
auucuucaucagagaugcacua

SEQ ID NO: 1049847 - RNA, 22 nt, Human
agcugcccagcuaggaagaagg

SEQ ID NO: 1049848 - RNA, 22 nt, Human
agcugguaaguggcagagauuc

SEQ ID NO: 1049849 - RNA, 21 nt, Human
ucuuccuccacagcgugccac

SEQ ID NO: 1049850 - RNA, 22 nt, Human
ucaaucacguguuccauguucu

SEQ ID NO: 1049851 - RNA, 22 nt, Human
caucucaugggcaugccaagcu

SEQ ID NO: 1049852 - RNA, 22 nt, Human
uaaguaaaacauucaagaaguc

SEQ ID NO: 1049853 - RNA, 20 nt, Human
uuuauucacagagaagaguu

SEQ ID NO: 1049854 - RNA, 21 nt, Human
gauuuuaaagagacugccaca

SEQ ID NO: 1049855 - RNA, 22 nt, Human
ucagggacuuacaaaccagaag

SEQ ID NO: 1049856 - RNA, 22 nt, Human
uaccacaguuuaucuauucagc

SEQ ID NO: 1049857 - RNA, 22 nt, Human
cuguccugaaagggagauuggg

SEQ ID NO: 1049858 - RNA, 22 nt, Human
uacauguaagacaugagacucu

SEQ ID NO: 1049859 - RNA, 18 nt, Human
ucaggcugggccuccuuc

SEQ ID NO: 1049860 - RNA, 21 nt, Human
cuccugggcuaagauauagug

SEQ ID NO: 1049861 - RNA, 22 nt, Human
gagagaaaggcuugcaggcugu

SEQ ID NO: 1049862 - RNA, 22 nt, Human
auacaacagaaaaugauuauuc

SEQ ID NO: 1049863 - RNA, 22 nt, Human
uuccuggccucucucugagcag

SEQ ID NO: 1049864 - RNA, 22 nt, Human
uaauuauuaugacaacaauugc

SEQ ID NO: 1049865 - RNA, 22 nt, Human
aggcagcuucugauuagcagcg

SEQ ID NO: 1049866 - RNA, 22 nt, Human
cuggcaguguccagcucgugau

SEQ ID NO: 1049867 - RNA, 22 nt, Human
uccaggagacacaagguacaua

SEQ ID NO: 1049868 - RNA, 22 nt, Human
ggcugaaggaugaaagcugcag

SEQ ID NO: 1049869 - RNA, 21 nt, Human
cuugaaagguagagucuacag

SEQ ID NO: 1049870 - RNA, 22 nt, Human
uuggaaauacgaguaguaucau

SEQ ID NO: 1049871 - RNA, 22 nt, Human
gaccauuuguugaaaagauuau

SEQ ID NO: 1049872 - RNA, 21 nt, Human
uuccagaaaucucuuucuuca

SEQ ID NO: 1049873 - RNA, 22 nt, Human
uguauuuuuagaccuuuagacc

SEQ ID NO: 1049874 - RNA, 22 nt, Human
uccaggaguuugaccugugggc

SEQ ID NO: 1049875 - RNA, 21 nt, Human
ucacuagugccuucugucauu

SEQ ID NO: 1049876 - RNA, 22 nt, Human
agcaccugucacaagcagaagg

SEQ ID NO: 1049877 - RNA, 22 nt, Human
ccuggagcacauggcaggaggc

SEQ ID NO: 1049878 - RNA, 22 nt, Human
agaagucauuuauguuagauga

SEQ ID NO: 1049879 - RNA, 19 nt, Human
ugccuggacaaaugugggg

SEQ ID NO: 1049880 - RNA, 21 nt, Human
ggcugcuggggguuggcacag

SEQ ID NO: 1049881 - RNA, 22 nt, Human
acugagguagggcacaccuagg

SEQ ID NO: 1049882 - RNA, 22 nt, Human
ucagucuucccuccagugcaac

SEQ ID NO: 1049883 - RNA, 19 nt, Human
cuggcugcaaugccagggu

SEQ ID NO: 1049884 - RNA, 22 nt, Human
cuuaacagagagaaguguugcu

SEQ ID NO: 1049885 - RNA, 22 nt, Human
gagagaggccuccauguacuga

SEQ ID NO: 1049886 - RNA, 22 nt, Human
auucauaacggcaaaugucacc

SEQ ID NO: 1049887 - RNA, 22 nt, Human
uuccuggcugaacugaacuccu

SEQ ID NO: 1049888 - RNA, 22 nt, Human
uaaggccaggcuguggucggca

SEQ ID NO: 1049889 - RNA, 22 nt, Human
auuauuauauagggaaaguccc

SEQ ID NO: 1049890 - RNA, 22 nt, Human
cugcgcagggguggcgccagaa

SEQ ID NO: 1049891 - RNA, 22 nt, Human
uuccaugacaccgagggaaguc

SEQ ID NO: 1049892 - RNA, 22 nt, Human
ggccacaacuugcuccuagccc

SEQ ID NO: 1049893 - RNA, 22 nt, Human
ugaggcagguggauuacaaggu

SEQ ID NO: 1049894 - RNA, 22 nt, Human
uuacacaacaucuguauuauua

SEQ ID NO: 1049895 - RNA, 22 nt, Human
cuguggucaccaggcuggggcc

SEQ ID NO: 1049896 - RNA, 19 nt, Human
gaggagcuaucggagacag

SEQ ID NO: 1049897 - RNA, 22 nt, Human
cuuuggcaaggguuuuaauugu

SEQ ID NO: 1049898 - RNA, 22 nt, Human
uuucuuauacuauauugucauc

SEQ ID NO: 1049899 - RNA, 22 nt, Human
ugccuguguugauuacuuuguc

SEQ ID NO: 1049900 - RNA, 22 nt, Human
gaaggccacaaaaaaugucaua

SEQ ID NO: 1049901 - RNA, 22 nt, Human
auuaggauuugguauggucaua

SEQ ID NO: 1049902 - RNA, 22 nt, Human
acuaaaguaucuccuauuucau

SEQ ID NO: 1049903 - RNA, 22 nt, Human
uccccagaggugaggcagcuuu

SEQ ID NO: 1049904 - RNA, 22 nt, Human
ugaaggcccagccacagaaugg

SEQ ID NO: 1049905 - RNA, 22 nt, Human
ucccaggacaugggcucugcuc

SEQ ID NO: 1049906 - RNA, 22 nt, Human
acuccuggggcugccaucacag

SEQ ID NO: 1049907 - RNA, 22 nt, Human
gcagacagcauguugggcuauu

SEQ ID NO: 1049908 - RNA, 22 nt, Human
aggcugagccugggcguggugg

SEQ ID NO: 1049909 - RNA, 21 nt, Human
aggcagcucaggcccagagag

SEQ ID NO: 1049910 - RNA, 22 nt, Human
uuugaaguggaaaaggauuuaa

SEQ ID NO: 1049911 - RNA, 22 nt, Human
cugcagagcaaguaacauccuc

SEQ ID NO: 1049912 - RNA, 22 nt, Human
uacaaaguaauguauaauaucg

SEQ ID NO: 1049913 - RNA, 22 nt, Human
auuaaaauuccaagguaugcca

SEQ ID NO: 1049914 - RNA, 22 nt, Human
ggagcggagggagggccacugu

SEQ ID NO: 1049915 - RNA, 17 nt, Human
uuugguaauauauuaag

SEQ ID NO: 1049916 - RNA, 22 nt, Human
ccagugcuaagguagccucugc

SEQ ID NO: 1049917 - RNA, 22 nt, Human
ucacuguugaccuggaaguggg

SEQ ID NO: 1049918 - RNA, 22 nt, Human
aaaguaacaauaagguucuauu

SEQ ID NO: 1049919 - RNA, 22 nt, Human
gauggcagguaguggucucauc

SEQ ID NO: 1049920 - RNA, 22 nt, Human
uugaagagugccuuccagacau

SEQ ID NO: 1049921 - RNA, 22 nt, Human
gagguccaggguggggccugag

SEQ ID NO: 1049922 - RNA, 22 nt, Human
gauacacuggccaaguggagga

SEQ ID NO: 1049923 - RNA, 22 nt, Human
ugcugagggcuguuaaggaagc

SEQ ID NO: 1049924 - RNA, 22 nt, Human
uccuggccgcuggccccugaga

SEQ ID NO: 1049925 - RNA, 22 nt, Human
ggagaagggacagacucagcuu

SEQ ID NO: 1049926 - RNA, 17 nt, Human
ggaaaaggaugauacag

SEQ ID NO: 1049927 - RNA, 22 nt, Human
gagcagcugagcuggaaugaga

SEQ ID NO: 1049928 - RNA, 22 nt, Human
aaugagacacgugaagcagaug

SEQ ID NO: 1049929 - RNA, 22 nt, Human
uacagagaauaauaggacaggu

SEQ ID NO: 1049930 - RNA, 22 nt, Human
uugaggucugugauaaaaguca

SEQ ID NO: 1049931 - RNA, 22 nt, Human
cagggcugcuggccgugcccuc

SEQ ID NO: 1049932 - RNA, 22 nt, Human
augaggucauucuuggauuaca

SEQ ID NO: 1049933 - RNA, 22 nt, Human
gagagaagaacaaugucauuca

SEQ ID NO: 1049934 - RNA, 22 nt, Human
augaguucaauuguuucaguca

SEQ ID NO: 1049935 - RNA, 22 nt, Human
ggaaaagacagguuaacuguga

SEQ ID NO: 1049936 - RNA, 22 nt, Human
ggacugaggacaugugaggcau

SEQ ID NO: 1049937 - RNA, 22 nt, Human
uggcugaggagagggcggaagu

SEQ ID NO: 1049938 - RNA, 21 nt, Human
ucucugguuggaguugugcca

SEQ ID NO: 1049939 - RNA, 22 nt, Human
uucaacuauuaugaauaaaauu

SEQ ID NO: 1049940 - RNA, 22 nt, Human
acaggcugagcguccaucuuca

SEQ ID NO: 1049941 - RNA, 22 nt, Human
uugcuuuguuacugcaguuucc

SEQ ID NO: 1049942 - RNA, 22 nt, Human
uugaauaguuuuggauagcaua

SEQ ID NO: 1049943 - RNA, 19 nt, Human
ugcugaggaugcaagaucc

SEQ ID NO: 1049944 - RNA, 22 nt, Human
gcugcagguuugucuagucugg

SEQ ID NO: 1049945 - RNA, 22 nt, Human
auagcuguuagauuggggucga

SEQ ID NO: 1049946 - RNA, 22 nt, Human
gccugccugcugucaucugccu

SEQ ID NO: 1049947 - RNA, 22 nt, Human
acuuuugguucuguaacuguga

SEQ ID NO: 1049948 - RNA, 22 nt, Human
ugcugcuguaucaugccuucau

SEQ ID NO: 1049949 - RNA, 17 nt, Human
ugaaggccaugaccacg

SEQ ID NO: 1049950 - RNA, 22 nt, Human
uuuguuuagaaagagauuggug

SEQ ID NO: 1049951 - RNA, 21 nt, Human
ugaggcaggggugcuuuuguc

SEQ ID NO: 1049952 - RNA, 22 nt, Human
uucauuaguucugaagaugucu

SEQ ID NO: 1049953 - RNA, 22 nt, Human
gacacuuuauuaagcuguuguu

SEQ ID NO: 1049954 - RNA, 22 nt, Human
ucucacuuuccagacuuuucaa

SEQ ID NO: 1049955 - RNA, 22 nt, Human
agguaaauucagcagugacauu

SEQ ID NO: 1049956 - RNA, 21 nt, Human
gugcuuuuccuuaauguucuu

SEQ ID NO: 1049957 - RNA, 22 nt, Human
aaaaugaauaaguuaacccagg

SEQ ID NO: 1049958 - RNA, 22 nt, Human
uacagccucacauuuacuuaca

SEQ ID NO: 1049959 - RNA, 22 nt, Human
ucugugccuccguaacacacca

SEQ ID NO: 1049960 - RNA, 22 nt, Human
auuucaaggcuauuaauauaaa

SEQ ID NO: 1049961 - RNA, 22 nt, Human
aaguuugcauagauuaagcauu

SEQ ID NO: 1049962 - RNA, 22 nt, Human
agcaagaugaaggauucaagac

SEQ ID NO: 1049963 - RNA, 22 nt, Human
ggcagcuggggcagugcccugu

SEQ ID NO: 1049964 - RNA, 22 nt, Human
gcuggccauggggagugaggag

SEQ ID NO: 1049965 - RNA, 22 nt, Human
ggcuggaggagaauggguguga

SEQ ID NO: 1049966 - RNA, 22 nt, Human
cucaggauugugccuagggaga

SEQ ID NO: 1049967 - RNA, 22 nt, Human
ucagucuuugcuuaugacaaua

SEQ ID NO: 1049968 - RNA, 22 nt, Human
uaaggccagcaugaaugcagca

SEQ ID NO: 1049969 - RNA, 22 nt, Human
ugucaccaaguugaugaaugca

SEQ ID NO: 1049970 - RNA, 22 nt, Human
uauacacuguuguugggagucu

SEQ ID NO: 1049971 - RNA, 22 nt, Human
cggcagcucgagggccacccgu

SEQ ID NO: 1049972 - RNA, 22 nt, Human
aaaauuaagugucugggaagcc

SEQ ID NO: 1049973 - RNA, 22 nt, Human
aggcaggcccucuggaaaggua

SEQ ID NO: 1049974 - RNA, 19 nt, Human
uggagggguuugaaugugg

SEQ ID NO: 1049975 - RNA, 22 nt, Human
caccaggcuggagugcagaggu

SEQ ID NO: 1049976 - RNA, 22 nt, Human
uuuaaaauuuagaccucuccac

SEQ ID NO: 1049977 - RNA, 22 nt, Human
aguuuucacacucaccaaaagg

SEQ ID NO: 1049978 - RNA, 23 nt, Human
cuucucagaagucugugccagga

SEQ ID NO: 1049979 - RNA, 22 nt, Human
aacugguagcugauuaaguaua

SEQ ID NO: 1049980 - RNA, 22 nt, Human
ggcuaggcgggcacauggugga

SEQ ID NO: 1049981 - RNA, 22 nt, Human
uuuaacagguaaaguaaaugug

SEQ ID NO: 1049982 - RNA, 22 nt, Human
gggcagcugccacuccgcuugc

SEQ ID NO: 1049983 - RNA, 22 nt, Human
cuuaaagaaauugaggagagga

SEQ ID NO: 1049984 - RNA, 22 nt, Human
uaacugguacucugguagccug

SEQ ID NO: 1049985 - RNA, 21 nt, Human
cgcagagcgaacuugcggcgc

SEQ ID NO: 1049986 - RNA, 22 nt, Human
cucaguuugagggguagguguu

SEQ ID NO: 1049987 - RNA, 22 nt, Human
gggcugagcuaagcuggguuga

SEQ ID NO: 1049988 - RNA, 22 nt, Human
aagggcagccugacucacgguc

SEQ ID NO: 1049989 - RNA, 22 nt, Human
cagcuccugaggacugcuggga

SEQ ID NO: 1049990 - RNA, 22 nt, Human
gcccaggaggucaaguagcuau

SEQ ID NO: 1049991 - RNA, 22 nt, Human
ggcagaggaaggaugaauucac

SEQ ID NO: 1049992 - RNA, 22 nt, Human
ugcauaaagugccauaguauua

SEQ ID NO: 1049993 - RNA, 22 nt, Human
gucugcugcagucguggcucua

SEQ ID NO: 1049994 - RNA, 22 nt, Human
uucuuugaguuaguacagucca

SEQ ID NO: 1049995 - RNA, 22 nt, Human
aaggcaguuugggccaccaucu

SEQ ID NO: 1049996 - RNA, 22 nt, Human
cacaauuuccuugcuucacuuu

SEQ ID NO: 1049997 - RNA, 22 nt, Human
uuucacaacugcuuauuugaga

SEQ ID NO: 1049998 - RNA, 22 nt, Human
ucaggcugcccguucagggcuc

SEQ ID NO: 1049999 - RNA, 22 nt, Human
ugcuggguuaccuaagccuaaa

SEQ ID NO: 1050000 - RNA, 18 nt, Human
gcagaugaguaguguacc

SEQ ID NO: 1050001 - RNA, 22 nt, Human
agucaguuucccuggaaagcag

SEQ ID NO: 1050002 - RNA, 22 nt, Human
uaaggccaauuacauauguuca

SEQ ID NO: 1050003 - RNA, 22 nt, Human
ggaggaugagcuacgaggagcu

SEQ ID NO: 1050004 - RNA, 22 nt, Human
cacaggcuuccaguccccagcu

SEQ ID NO: 1050005 - RNA, 22 nt, Human
uaucuguuccaggcacucagcu

SEQ ID NO: 1050006 - RNA, 22 nt, Human
guuuuaguggguggccacugau

SEQ ID NO: 1050007 - RNA, 22 nt, Human
uuaaaguauagaggacaaaaac

SEQ ID NO: 1050008 - RNA, 22 nt, Human
ccuggguggcagagguugcagu

SEQ ID NO: 1050009 - RNA, 22 nt, Human
agcagcuggaacauaugaagaa

SEQ ID NO: 1050010 - RNA, 22 nt, Human
caggauggucuucauuuggcuc

SEQ ID NO: 1050011 - RNA, 22 nt, Human
cccaugagguggagguugcagu

SEQ ID NO: 1050012 - RNA, 22 nt, Human
uuucuuuguuguuaucacauca

SEQ ID NO: 1050013 - RNA, 22 nt, Human
agugcuuucccugaaaccuucc

SEQ ID NO: 1050014 - RNA, 22 nt, Human
auuuucaucauggguuuaacau

SEQ ID NO: 1050015 - RNA, 22 nt, Human
ccagagcugauuccugggacuu

SEQ ID NO: 1050016 - RNA, 22 nt, Human
ccuggcaggcaagaggaaggga

SEQ ID NO: 1050017 - RNA, 22 nt, Human
uaggcagcagugcuaugauucu

SEQ ID NO: 1050018 - RNA, 22 nt, Human
cacaaaugguuguagacauuaa

SEQ ID NO: 1050019 - RNA, 22 nt, Human
uagcaagaucgugucucuaaaa

SEQ ID NO: 1050020 - RNA, 23 nt, Human
gauacacucccugcugggcacug

SEQ ID NO: 1050021 - RNA, 22 nt, Human
aaaggccaauaaagacaagcug

SEQ ID NO: 1050022 - RNA, 22 nt, Human
acucaggaaaaauguagugaua

SEQ ID NO: 1050023 - RNA, 22 nt, Human
ucauuguuauguuuugcugucu

SEQ ID NO: 1050024 - RNA, 22 nt, Human
uuucacagcuggguggcagagu

SEQ ID NO: 1050025 - RNA, 22 nt, Human
acacuuuuguguauauccaguu

SEQ ID NO: 1050026 - RNA, 21 nt, Human
gucaaacuugcaccagugccc

SEQ ID NO: 1050027 - RNA, 22 nt, Human
ggccagcucuuguccacggagg

SEQ ID NO: 1050028 - RNA, 22 nt, Human
ugaggggagacagaguggacuc

SEQ ID NO: 1050029 - RNA, 22 nt, Human
ugacaguuaagguauacauuca

SEQ ID NO: 1050030 - RNA, 22 nt, Human
cugcuguguuagcagguuuagu

SEQ ID NO: 1050031 - RNA, 21 nt, Human
uucuucaugaugauuaauggc

SEQ ID NO: 1050032 - RNA, 22 nt, Human
ccuccuuuccuguuuuccugag

SEQ ID NO: 1050033 - RNA, 21 nt, Human
uaaggccaagucuauuucugu

SEQ ID NO: 1050034 - RNA, 22 nt, Human
aacacuuucuauuauuaugguu

SEQ ID NO: 1050035 - RNA, 22 nt, Human
gaaaauuauugaaaauggcucu

SEQ ID NO: 1050036 - RNA, 22 nt, Human
gacuuucuaaugcucuguagau

SEQ ID NO: 1050037 - RNA, 22 nt, Human
ugguaaauauguccauucucuu

SEQ ID NO: 1050038 - RNA, 22 nt, Human
uccaggagguugagugaguucc

SEQ ID NO: 1050039 - RNA, 22 nt, Human
uaggaaaugcuccauugcauaa

SEQ ID NO: 1050040 - RNA, 22 nt, Human
uggcuucuugucuaauuuguua

SEQ ID NO: 1050041 - RNA, 22 nt, Human
auguggaggaaaugaguguaca

SEQ ID NO: 1050042 - RNA, 22 nt, Human
aggcagcuggcagcacccaggg

SEQ ID NO: 1050043 - RNA, 22 nt, Human
ucaggagagaaagaauacaauu

SEQ ID NO: 1050044 - RNA, 17 nt, Human
uagauuaaacacggcca

SEQ ID NO: 1050045 - RNA, 22 nt, Human
aagggcuggucuagaaagggag

SEQ ID NO: 1050046 - RNA, 22 nt, Human
uuagagccccagaaaacagugg

SEQ ID NO: 1050047 - RNA, 23 nt, Human
uugcauagacauccucauagauu

SEQ ID NO: 1050048 - RNA, 22 nt, Human
aaagaaauagauggcauuuaaa

SEQ ID NO: 1050049 - RNA, 22 nt, Human
cuggcuugcagcucaucauaaa

SEQ ID NO: 1050050 - RNA, 22 nt, Human
acuuucugcaguguuggaaaug

SEQ ID NO: 1050051 - RNA, 22 nt, Human
uucucuuuucaccaguugcuaa

SEQ ID NO: 1050052 - RNA, 19 nt, Human
aaggcagcaguagcaucca

SEQ ID NO: 1050053 - RNA, 22 nt, Human
ucaggaggccaccaggaccugu

SEQ ID NO: 1050054 - RNA, 22 nt, Human
uacaaaguagaaauucaguaaa

SEQ ID NO: 1050055 - RNA, 21 nt, Human
acagaacuguauagugauaaa

SEQ ID NO: 1050056 - RNA, 22 nt, Human
uggcagcucuguucaacaugag

SEQ ID NO: 1050057 - RNA, 22 nt, Human
cugaggaagacagcagcugugu

SEQ ID NO: 1050058 - RNA, 22 nt, Human
cacuggugccagagaacagaau

SEQ ID NO: 1050059 - RNA, 22 nt, Human
uucaaauacauucuuugccacu

SEQ ID NO: 1050060 - RNA, 18 nt, Human
gcucaggcccuagucagu

SEQ ID NO: 1050061 - RNA, 22 nt, Human
cuacccagauccaggauggcua

SEQ ID NO: 1050062 - RNA, 22 nt, Human
uagcaagaugucacuccaaguu

SEQ ID NO: 1050063 - RNA, 22 nt, Human
agcagagguuuguuggaaaccu

SEQ ID NO: 1050064 - RNA, 22 nt, Human
ugaggcagccugcauuaaagag

SEQ ID NO: 1050065 - RNA, 22 nt, Human
ucgcugugguuucuguacaugg

SEQ ID NO: 1050066 - RNA, 22 nt, Human
aagcaccucuaugauugcuuuu

SEQ ID NO: 1050067 - RNA, 22 nt, Human
ugcacauucacuuagguauugu

SEQ ID NO: 1050068 - RNA, 22 nt, Human
gucuuuaugguaugaaaacuga

SEQ ID NO: 1050069 - RNA, 20 nt, Human
cugcugugguccuuuauuuu

SEQ ID NO: 1050070 - RNA, 22 nt, Human
auguggcacagcacaguaagag

SEQ ID NO: 1050071 - RNA, 22 nt, Human
acuggcaguagagggagcgcau

SEQ ID NO: 1050072 - RNA, 22 nt, Human
auugcuguaaauuaucuuauua

SEQ ID NO: 1050073 - RNA, 20 nt, Human
gagcugaguguggucauggg

SEQ ID NO: 1050074 - RNA, 22 nt, Human
gaggcaguuccugagugacaag

SEQ ID NO: 1050075 - RNA, 22 nt, Human
agaaguuaauuccugaaauucu

SEQ ID NO: 1050076 - RNA, 22 nt, Human
ugcaugugcccacucuggcuua

SEQ ID NO: 1050077 - RNA, 22 nt, Human
cucaggauagcugcgcagccug

SEQ ID NO: 1050078 - RNA, 22 nt, Human
gagggcuccucacauucucuau

SEQ ID NO: 1050079 - RNA, 22 nt, Human
uuccaucuuucagcuuuguugg

SEQ ID NO: 1050080 - RNA, 22 nt, Human
uuuuagauaguuuaacugcacu

SEQ ID NO: 1050081 - RNA, 22 nt, Human
cugagccaguagucagggacaa

SEQ ID NO: 1050082 - RNA, 22 nt, Human
guauuagggccaaaggcaggaa

SEQ ID NO: 1050083 - RNA, 22 nt, Human
ucacugcugcugccaugaugga

SEQ ID NO: 1050084 - RNA, 20 nt, Human
uucacagaggacucagguca

SEQ ID NO: 1050085 - RNA, 23 nt, Human
uggccaagauaaucucaguuuuc

SEQ ID NO: 1050086 - RNA, 22 nt, Human
uuucaaacauaucuucauuacu

SEQ ID NO: 1050087 - RNA, 22 nt, Human
auugcuguggaaauauaagaug

SEQ ID NO: 1050088 - RNA, 22 nt, Human
gaggcagcaugguaccuuggag

SEQ ID NO: 1050089 - RNA, 22 nt, Human
aggccaaauagcagguuugcua

SEQ ID NO: 1050090 - RNA, 22 nt, Human
uuuaaauggcauuuucccagau

SEQ ID NO: 1050091 - RNA, 22 nt, Human
uuuuccagagcugucucuugca

SEQ ID NO: 1050092 - RNA, 19 nt, Human
uugaaagauuagcuuucua

SEQ ID NO: 1050093 - RNA, 22 nt, Human
gagcugagauuugaagcaaguu

SEQ ID NO: 1050094 - RNA, 22 nt, Human
ugccugugucacagugauguuu

SEQ ID NO: 1050095 - RNA, 22 nt, Human
cuuaagauuugagauaccuaau

SEQ ID NO: 1050096 - RNA, 22 nt, Human
gcagcauacagggagaguacuc

SEQ ID NO: 1050097 - RNA, 22 nt, Human
accuacaucaagggagugguag

SEQ ID NO: 1050098 - RNA, 22 nt, Human
cagggcuguaaauuagugcuga

SEQ ID NO: 1050099 - RNA, 22 nt, Human
acaccauacucauguugguucc

SEQ ID NO: 1050100 - RNA, 22 nt, Human
agaauaaaauagucugaagaug

SEQ ID NO: 1050101 - RNA, 22 nt, Human
acauauauuacuaguaaagaca

SEQ ID NO: 1050102 - RNA, 22 nt, Human
gcugcucugugacagccuccgg

SEQ ID NO: 1050103 - RNA, 21 nt, Human
acugccugucuccauagucua

SEQ ID NO: 1050104 - RNA, 22 nt, Human
uuuaggauauuaauguucagag

SEQ ID NO: 1050105 - RNA, 22 nt, Human
ggagaggauguuuuaguaacuu

SEQ ID NO: 1050106 - RNA, 22 nt, Human
aaaacuccugaaauuguuuccc

SEQ ID NO: 1050107 - RNA, 22 nt, Human
uaacaugauuugcuauuuagau

SEQ ID NO: 1050108 - RNA, 22 nt, Human
cauuuccugucuggaggucaaa

SEQ ID NO: 1050109 - RNA, 22 nt, Human
uggcagcugauuagauggugcc

SEQ ID NO: 1050110 - RNA, 22 nt, Human
uggcaaggccacaggugcaguu

SEQ ID NO: 1050111 - RNA, 22 nt, Human
cucugcaugccuugcucagaca

SEQ ID NO: 1050112 - RNA, 21 nt, Human
gacaaagugaagcaggcagga

SEQ ID NO: 1050113 - RNA, 22 nt, Human
acccagagcugggcuuggcaaa

SEQ ID NO: 1050114 - RNA, 22 nt, Human
uccuggcccuguggccugcagu

SEQ ID NO: 1050115 - RNA, 22 nt, Human
uucuucuuuaucucaguauccu

SEQ ID NO: 1050116 - RNA, 22 nt, Human
aaggaaccauuugugugcaugg

SEQ ID NO: 1050117 - RNA, 22 nt, Human
aucaggaucugggagccugaaa

SEQ ID NO: 1050118 - RNA, 22 nt, Human
agcuggaagcugaugagcacag

SEQ ID NO: 1050119 - RNA, 22 nt, Human
agucagauuuagauguagcaag

SEQ ID NO: 1050120 - RNA, 22 nt, Human
cccuugcaucccauguguggcc

SEQ ID NO: 1050121 - RNA, 22 nt, Human
ucuuuccaaggacucuguagca

SEQ ID NO: 1050122 - RNA, 22 nt, Human
accaggagccauagagucaggc

SEQ ID NO: 1050123 - RNA, 19 nt, Human
ccuggcugugaagccugca

SEQ ID NO: 1050124 - RNA, 22 nt, Human
ugcaggucuccauuggcagacu

SEQ ID NO: 1050125 - RNA, 22 nt, Human
ugccugggcucaccgccucuuu

SEQ ID NO: 1050126 - RNA, 22 nt, Human
uuucaaaccuacuuguauguuu

SEQ ID NO: 1050127 - RNA, 23 nt, Human
auugaugacuugauuacacuuuu

SEQ ID NO: 1050128 - RNA, 22 nt, Human
agacaggaugcauacucuuggu

SEQ ID NO: 1050129 - RNA, 22 nt, Human
ugaaggccacuuccugugagcu

SEQ ID NO: 1050130 - RNA, 22 nt, Human
aggcaagcauuuaaccacucau

SEQ ID NO: 1050131 - RNA, 22 nt, Human
gggcugagaauucagcuuuccu

SEQ ID NO: 1050132 - RNA, 22 nt, Human
agggccugucagcgguguccug

SEQ ID NO: 1050133 - RNA, 22 nt, Human
uugguuuaggaacuggcuugga

SEQ ID NO: 1050134 - RNA, 23 nt, Human
uccaggagaauuccagggcccgg

SEQ ID NO: 1050135 - RNA, 22 nt, Human
uggaggaaaaaaccaggcagag

SEQ ID NO: 1050136 - RNA, 23 nt, Human
uggcugagauccuacuguuugcu

SEQ ID NO: 1050137 - RNA, 22 nt, Human
aguucuuuugugaacauaugcu

SEQ ID NO: 1050138 - RNA, 21 nt, Human
uagaagcacauagguucaaag

SEQ ID NO: 1050139 - RNA, 23 nt, Human
cugaggucugcaauucuaguagu

SEQ ID NO: 1050140 - RNA, 22 nt, Human
uggcagcagcuaacuuaggcag

SEQ ID NO: 1050141 - RNA, 23 nt, Human
aggucagcaggcaaggaaauggc

SEQ ID NO: 1050142 - RNA, 22 nt, Human
gggcagcucggaagugggaaag

SEQ ID NO: 1050143 - RNA, 22 nt, Human
uuucuucaauugcuaacaagga

SEQ ID NO: 1050144 - RNA, 22 nt, Human
uuuauucaucaucuguucauau

SEQ ID NO: 1050145 - RNA, 22 nt, Human
uggcuucugggacuugugagca

SEQ ID NO: 1050146 - RNA, 22 nt, Human
auuuggcauaggcagaggccca

SEQ ID NO: 1050147 - RNA, 22 nt, Human
agucugggagaaggugagauua

SEQ ID NO: 1050148 - RNA, 21 nt, Human
cuggccgaccccucugugcuc

SEQ ID NO: 1050149 - RNA, 20 nt, Human
gcagcuacucugucucgcuc

SEQ ID NO: 1050150 - RNA, 22 nt, Human
cccaggaagaaauucugauuug

SEQ ID NO: 1050151 - RNA, 19 nt, Human
ggcugcagagccccggcgc

SEQ ID NO: 1050152 - RNA, 22 nt, Human
caggacagcucaacaccuccuc

SEQ ID NO: 1050153 - RNA, 22 nt, Human
ggucuaaaaugagucuuccuag

SEQ ID NO: 1050154 - RNA, 22 nt, Human
uggcagcugucuguggggucuc

SEQ ID NO: 1050155 - RNA, 22 nt, Human
uggcagcugguacagugggucu

SEQ ID NO: 1050156 - RNA, 22 nt, Human
cugcccagaagccagaugggca

SEQ ID NO: 1050157 - RNA, 22 nt, Human
ggauguugauugaauggccauu

SEQ ID NO: 1050158 - RNA, 22 nt, Human
gacccaggguggucaccugaaa

SEQ ID NO: 1050159 - RNA, 22 nt, Human
ccugggauuugcgccagaccuu

SEQ ID NO: 1050160 - RNA, 22 nt, Human
uggcagcucccagagcuuccaa

SEQ ID NO: 1050161 - RNA, 17 nt, Human
caaggccagcaucuuca

SEQ ID NO: 1050162 - RNA, 22 nt, Human
caggcugauuaggccucgucca

SEQ ID NO: 1050163 - RNA, 22 nt, Human
cuuaagauuugcgauaccuaau

SEQ ID NO: 1050164 - RNA, 22 nt, Human
cuggguccuggugcugaguucu

SEQ ID NO: 1050165 - RNA, 22 nt, Human
acuaagugauucuaagcaucuu

SEQ ID NO: 1050166 - RNA, 22 nt, Human
ccugggugacagagugagaccu

SEQ ID NO: 1050167 - RNA, 21 nt, Human
auuuggcaaaggcgaugcaca

SEQ ID NO: 1050168 - RNA, 22 nt, Human
gggugaggcccauuugaggcca

SEQ ID NO: 1050169 - RNA, 22 nt, Human
gcugcuggccccacaugcucca

SEQ ID NO: 1050170 - RNA, 22 nt, Human
guuaggaauuuguuacugugua

SEQ ID NO: 1050171 - RNA, 22 nt, Human
uggcuucuugaucuuggacuug

SEQ ID NO: 1050172 - RNA, 22 nt, Human
aaaggccauuacuugcuuuuag

SEQ ID NO: 1050173 - RNA, 22 nt, Human
cagcaggagcagucagacuccu

SEQ ID NO: 1050174 - RNA, 22 nt, Human
cccaggaggcggagguuguggu

SEQ ID NO: 1050175 - RNA, 22 nt, Human
gauggcaggcaggugaguagag

SEQ ID NO: 1050176 - RNA, 22 nt, Human
gcauguguuauuuuauguauga

SEQ ID NO: 1050177 - RNA, 20 nt, Human
ccuuuauuauuuguaugaug

SEQ ID NO: 1050178 - RNA, 22 nt, Human
aggucugaguauggccugagaa

SEQ ID NO: 1050179 - RNA, 22 nt, Human
uuaggaaauuccaccuguauuc

SEQ ID NO: 1050180 - RNA, 22 nt, Human
uuugaaaggagcuuuauccaga

SEQ ID NO: 1050181 - RNA, 22 nt, Human
uugaggucaauucuguuuccug

SEQ ID NO: 1050182 - RNA, 22 nt, Human
gcccaggagguugggcugugca

SEQ ID NO: 1050183 - RNA, 22 nt, Human
aagggcugaucucacuuucuuu

SEQ ID NO: 1050184 - RNA, 22 nt, Human
gagcuguccgccccugggccga

SEQ ID NO: 1050185 - RNA, 22 nt, Human
cuucccagaccuuagagugcag

SEQ ID NO: 1050186 - RNA, 22 nt, Human
auaagugacugcagggaauuca

SEQ ID NO: 1050187 - RNA, 22 nt, Human
aggaggggcauagaaauguaau

SEQ ID NO: 1050188 - RNA, 22 nt, Human
ucucaggaagauuagggcuaag

SEQ ID NO: 1050189 - RNA, 22 nt, Human
cugaggucucuuuccauaguga

SEQ ID NO: 1050190 - RNA, 22 nt, Human
gcugaagcugcagcaggaggaa

SEQ ID NO: 1050191 - RNA, 22 nt, Human
uaaauacuuuuacuccacugau

SEQ ID NO: 1050192 - RNA, 22 nt, Human
augcugugaaaaagaaggcuga

SEQ ID NO: 1050193 - RNA, 22 nt, Human
uagugcuuggcccuaccagaua

SEQ ID NO: 1050194 - RNA, 22 nt, Human
acccagagucauggcacuuagc

SEQ ID NO: 1050195 - RNA, 22 nt, Human
ugcaggcuccaugaggacaggc

SEQ ID NO: 1050196 - RNA, 22 nt, Human
acucucugguauuggcaaguuu

SEQ ID NO: 1050197 - RNA, 22 nt, Human
gcuguucucuguaacaugcauu

SEQ ID NO: 1050198 - RNA, 22 nt, Human
cugguggcaucuugagaugguu

SEQ ID NO: 1050199 - RNA, 22 nt, Human
uucauucuugggaucagagagu

SEQ ID NO: 1050200 - RNA, 22 nt, Human
gcaggcugaguauuacccuagu

SEQ ID NO: 1050201 - RNA, 19 nt, Human
uagaggagaagggaagugg

SEQ ID NO: 1050202 - RNA, 22 nt, Human
gggcugagucaucuggggccuc

SEQ ID NO: 1050203 - RNA, 19 nt, Human
guugaaaguaggugagggu

SEQ ID NO: 1050204 - RNA, 22 nt, Human
gcauugaguccacucugucuuu

SEQ ID NO: 1050205 - RNA, 22 nt, Human
uuauuagggugguuuauguucu

SEQ ID NO: 1050206 - RNA, 22 nt, Human
ucucugcuugguguaugugagu

SEQ ID NO: 1050207 - RNA, 22 nt, Human
ggagccuggucagguuggcucc

SEQ ID NO: 1050208 - RNA, 22 nt, Human
ccaggcugccgaggaaagaaag

SEQ ID NO: 1050209 - RNA, 22 nt, Human
auauacaugggaauauguggag

SEQ ID NO: 1050210 - RNA, 22 nt, Human
gcugccagcuuuccuuggcuga

SEQ ID NO: 1050211 - RNA, 22 nt, Human
gcuggagccuucugcucuguug

SEQ ID NO: 1050212 - RNA, 23 nt, Human
cugcuguuuucuguaccugaagc

SEQ ID NO: 1050213 - RNA, 22 nt, Human
ucaggagauguaaccuuagcug

SEQ ID NO: 1050214 - RNA, 18 nt, Human
aagaggaggagcagguug

SEQ ID NO: 1050215 - RNA, 22 nt, Human
gaagcacauggcuauagcuauu

SEQ ID NO: 1050216 - RNA, 22 nt, Human
uggcaacaccuggaagacaugg

SEQ ID NO: 1050217 - RNA, 22 nt, Human
gaaauacugcacacccuguaag

SEQ ID NO: 1050218 - RNA, 22 nt, Human
auuagggaaggauuuggccuga

SEQ ID NO: 1050219 - RNA, 20 nt, Human
agcugccccugggcacugcc

SEQ ID NO: 1050220 - RNA, 22 nt, Human
cagugcagguggcagaggacag

SEQ ID NO: 1050221 - RNA, 22 nt, Human
cugagccauccauaccagcuua

SEQ ID NO: 1050222 - RNA, 22 nt, Human
agagaagagcaaugauaaauuu

SEQ ID NO: 1050223 - RNA, 22 nt, Human
aggcaguuguugcugagcagcu

SEQ ID NO: 1050224 - RNA, 20 nt, Human
uuuuccagaaaguaucauug

SEQ ID NO: 1050225 - RNA, 22 nt, Human
ggcugaggcucaugccaucuug

SEQ ID NO: 1050226 - RNA, 22 nt, Human
cugcuguguggugaaacucagu

SEQ ID NO: 1050227 - RNA, 23 nt, Human
acugagguacugagguugugaca

SEQ ID NO: 1050228 - RNA, 22 nt, Human
caaggcugucuccagcuuccaa

SEQ ID NO: 1050229 - RNA, 22 nt, Human
ugcugcuggaucuuacucaucu

SEQ ID NO: 1050230 - RNA, 22 nt, Human
gcccugggcucccugcuccaca

SEQ ID NO: 1050231 - RNA, 22 nt, Human
gaacuauaugucuuaaagcuuu

SEQ ID NO: 1050232 - RNA, 22 nt, Human
aauuuguuaaaagugagugaca

SEQ ID NO: 1050233 - RNA, 22 nt, Human
aucauacauguaacuaaguaaa

SEQ ID NO: 1050234 - RNA, 22 nt, Human
ucacaucucccuggaggacaca

SEQ ID NO: 1050235 - RNA, 22 nt, Human
aggcuggagagugcaguggcgu

SEQ ID NO: 1050236 - RNA, 22 nt, Human
uggcuucuucauaugugaucuu

SEQ ID NO: 1050237 - RNA, 22 nt, Human
uaacaguaaaguaaguuagcuu

SEQ ID NO: 1050238 - RNA, 20 nt, Human
ucaccuuuguugguauucau

SEQ ID NO: 1050239 - RNA, 22 nt, Human
uaaucguauguguaucaaauca

SEQ ID NO: 1050240 - RNA, 22 nt, Human
gauaaugaugacaaugacaacc

SEQ ID NO: 1050241 - RNA, 22 nt, Human
uaaccuuuggugaaauauuaac

SEQ ID NO: 1050242 - RNA, 22 nt, Human
uacaucuauacugaucuacauu

SEQ ID NO: 1050243 - RNA, 19 nt, Human
ugaggggaggagaggccug

SEQ ID NO: 1050244 - RNA, 22 nt, Human
gugagguccuaauagacaucga

SEQ ID NO: 1050245 - RNA, 22 nt, Human
uggcugaggcacagcugccgcc

SEQ ID NO: 1050246 - RNA, 22 nt, Human
agaaaugaagagagucaagguu

SEQ ID NO: 1050247 - RNA, 22 nt, Human
gagggcuccauuccccgugccc

SEQ ID NO: 1050248 - RNA, 22 nt, Human
gacuuucugaaggucucgcagu

SEQ ID NO: 1050249 - RNA, 22 nt, Human
gcuggccagggcugcucgcgga

SEQ ID NO: 1050250 - RNA, 22 nt, Human
uucuucuuaauguccugggaac

SEQ ID NO: 1050251 - RNA, 21 nt, Human
uggcugcacuguggcuuucau

SEQ ID NO: 1050252 - RNA, 22 nt, Human
cuaggcaguccugacgguacua

SEQ ID NO: 1050253 - RNA, 21 nt, Human
ugcugcugaucgggguuggcu

SEQ ID NO: 1050254 - RNA, 22 nt, Human
uggaaggaagccaaggaagguu

SEQ ID NO: 1050255 - RNA, 22 nt, Human
uggcagcuggcucugcgcaggc

SEQ ID NO: 1050256 - RNA, 22 nt, Human
ugaggggagguuggggcacauc

SEQ ID NO: 1050257 - RNA, 22 nt, Human
uaguaacugguugaacaacugu

SEQ ID NO: 1050258 - RNA, 22 nt, Human
auuggaaauacaguagaaaaau

SEQ ID NO: 1050259 - RNA, 22 nt, Human
uuuuaauacugcuauuguagga

SEQ ID NO: 1050260 - RNA, 22 nt, Human
cucuggcuucuaccuugcaguu

SEQ ID NO: 1050261 - RNA, 17 nt, Human
aacugcuuuuuuuagcc

SEQ ID NO: 1050262 - RNA, 22 nt, Human
aacuggugagauaaauuauuua

SEQ ID NO: 1050263 - RNA, 22 nt, Human
gaagaaguauuuuuguccuguu

SEQ ID NO: 1050264 - RNA, 22 nt, Human
gcacugugcuagaagccagggg

SEQ ID NO: 1050265 - RNA, 22 nt, Human
uugcaggauuuuagagaugaca

SEQ ID NO: 1050266 - RNA, 22 nt, Human
ggccugagaaccauggggccaa

SEQ ID NO: 1050267 - RNA, 22 nt, Human
agauaagauaguccagcacaau

SEQ ID NO: 1050268 - RNA, 22 nt, Human
gagcaagauccuguuuuucuau

SEQ ID NO: 1050269 - RNA, 22 nt, Human
agucccuguacuuuccacugcc

SEQ ID NO: 1050270 - RNA, 22 nt, Human
agaccuggauuccaauccuacc

SEQ ID NO: 1050271 - RNA, 22 nt, Human
gugguaauuuaauccuacacug

SEQ ID NO: 1050272 - RNA, 22 nt, Human
cugggaaauggcuucgagcuca

SEQ ID NO: 1050273 - RNA, 22 nt, Human
uggcucagccauucguguugcc

SEQ ID NO: 1050274 - RNA, 20 nt, Human
cccaggaguuugcucuuacu

SEQ ID NO: 1050275 - RNA, 22 nt, Human
gccugccuuuguaugacccuga

SEQ ID NO: 1050276 - RNA, 22 nt, Human
cagccuuugugaacaucaggug

SEQ ID NO: 1050277 - RNA, 22 nt, Human
aucacuguguauguauaugcag

SEQ ID NO: 1050278 - RNA, 22 nt, Human
gcugccugcucggcuccuggga

SEQ ID NO: 1050279 - RNA, 21 nt, Human
uccaggagcacgggacuagga

SEQ ID NO: 1050280 - RNA, 22 nt, Human
cagaacuguuauaacagcuguu

SEQ ID NO: 1050281 - RNA, 22 nt, Human
acauuuuuauucaucaaagcag

SEQ ID NO: 1050282 - RNA, 22 nt, Human
gaggccacuuccuacuggagga

SEQ ID NO: 1050283 - RNA, 19 nt, Human
uucaggauugacccuacug

SEQ ID NO: 1050284 - RNA, 22 nt, Human
uggcugagaaaaaagagcuaua

SEQ ID NO: 1050285 - RNA, 22 nt, Human
gugugcaggggcuugguggagc

SEQ ID NO: 1050286 - RNA, 22 nt, Human
ugguccacagggaguccgugcu

SEQ ID NO: 1050287 - RNA, 22 nt, Human
uggcugagaccaucagggugua

SEQ ID NO: 1050288 - RNA, 22 nt, Human
ucuccuggcaugugggucaucu

SEQ ID NO: 1050289 - RNA, 22 nt, Human
aucaggaucaugcuggguggga

SEQ ID NO: 1050290 - RNA, 22 nt, Human
uaggaaauuagaacuuggaaac

SEQ ID NO: 1050291 - RNA, 22 nt, Human
agugcuuuagagaaauggugcu

SEQ ID NO: 1050292 - RNA, 22 nt, Human
caccuuguggcccagucagguu

SEQ ID NO: 1050293 - RNA, 22 nt, Human
caggcugaucagggcugggaug

SEQ ID NO: 1050294 - RNA, 22 nt, Human
aaagauuaggcggcaacugggc

SEQ ID NO: 1050295 - RNA, 22 nt, Human
auagaaaacagauguccuuaaa

SEQ ID NO: 1050296 - RNA, 19 nt, Human
uagugucaaggaggagggu

SEQ ID NO: 1050297 - RNA, 22 nt, Human
augaggcaguacacacaaagcc

SEQ ID NO: 1050298 - RNA, 17 nt, Human
agcaaaaguaucaaagc

SEQ ID NO: 1050299 - RNA, 22 nt, Human
uaaauacuuaguuuugugucua

SEQ ID NO: 1050300 - RNA, 22 nt, Human
gagggaugguaguugacacuga

SEQ ID NO: 1050301 - RNA, 22 nt, Human
ucuuagcauuucauaacaacug

SEQ ID NO: 1050302 - RNA, 22 nt, Human
cugagggcagugaugaagguga

SEQ ID NO: 1050303 - RNA, 23 nt, Human
uccugaggguuucccagccuugg

SEQ ID NO: 1050304 - RNA, 22 nt, Human
uuugcaaagaaauuauugcugu

SEQ ID NO: 1050305 - RNA, 22 nt, Human
uugcaucuagggcaacccagag

SEQ ID NO: 1050306 - RNA, 22 nt, Human
auuaguaaaacauuguauaugu

SEQ ID NO: 1050307 - RNA, 22 nt, Human
guccacugcugugugcuucacc

SEQ ID NO: 1050308 - RNA, 22 nt, Human
ucucuguacaguacaugccgug

SEQ ID NO: 1050309 - RNA, 22 nt, Human
cugccaggcagcagagggagaa

SEQ ID NO: 1050310 - RNA, 22 nt, Human
auuuugaugcuaucuaaugaau

SEQ ID NO: 1050311 - RNA, 22 nt, Human
guaacucuggguagaacucaug

SEQ ID NO: 1050312 - RNA, 20 nt, Human
accuacauguauagugaggg

SEQ ID NO: 1050313 - RNA, 22 nt, Human
cagucugaacacugggcuacuc

SEQ ID NO: 1050314 - RNA, 22 nt, Human
uagggcaggugaagaaaagcua

SEQ ID NO: 1050315 - RNA, 22 nt, Human
gacuccugccuccucuguuugc

SEQ ID NO: 1050316 - RNA, 22 nt, Human
uuauuagagugcuuugagaaag

SEQ ID NO: 1050317 - RNA, 22 nt, Human
uggagacucugcaucugugaca

SEQ ID NO: 1050318 - RNA, 22 nt, Human
gaaggccauuuuuagguagaau

SEQ ID NO: 1050319 - RNA, 22 nt, Human
cugaagucagauggcacaaggu

SEQ ID NO: 1050320 - RNA, 22 nt, Human
uucaggauaguggugaguggca

SEQ ID NO: 1050321 - RNA, 22 nt, Human
gcccaggagaggccagggcuga

SEQ ID NO: 1050322 - RNA, 22 nt, Human
ugaggcucagagcaccugcucc

SEQ ID NO: 1050323 - RNA, 22 nt, Human
uugcauuuuuagaugcuucugu

SEQ ID NO: 1050324 - RNA, 22 nt, Human
aaaugauugucaaaguucuguu

SEQ ID NO: 1050325 - RNA, 22 nt, Human
ucagggaccaccacucacccag

SEQ ID NO: 1050326 - RNA, 22 nt, Human
aaaaaugaaacggcugguuggc

SEQ ID NO: 1050327 - RNA, 22 nt, Human
uggggcucaccuaggcuggaag

SEQ ID NO: 1050328 - RNA, 22 nt, Human
uccaggagaggccugaccaggu

SEQ ID NO: 1050329 - RNA, 22 nt, Human
gaggagaaauuuggggaccuga

SEQ ID NO: 1050330 - RNA, 22 nt, Human
uccuugacugugaggaacuagc

SEQ ID NO: 1050331 - RNA, 22 nt, Human
aguggcagagguugacugcagu

SEQ ID NO: 1050332 - RNA, 22 nt, Human
uauauuaguggaaugauaugaa

SEQ ID NO: 1050333 - RNA, 22 nt, Human
caggauggucagaugcauuguc

SEQ ID NO: 1050334 - RNA, 22 nt, Human
aaugucugagucucuguauccc

SEQ ID NO: 1050335 - RNA, 22 nt, Human
cugcugucauagccaucccucc

SEQ ID NO: 1050336 - RNA, 17 nt, Human
agagggaaaaugcgguu

SEQ ID NO: 1050337 - RNA, 22 nt, Human
gggugggacugaagucugaggg

SEQ ID NO: 1050338 - RNA, 22 nt, Human
ugaggcagaaaauagcaguuca

SEQ ID NO: 1050339 - RNA, 22 nt, Human
uuucccaguucccugcucuaua

SEQ ID NO: 1050340 - RNA, 22 nt, Human
ugcccugggaacacagaugcca

SEQ ID NO: 1050341 - RNA, 22 nt, Human
aaggcagccgugugacugcaug

SEQ ID NO: 1050342 - RNA, 20 nt, Human
aggcagcuggccaggcaggu

SEQ ID NO: 1050343 - RNA, 22 nt, Human
agugcuuugaacgaaaggcuga

SEQ ID NO: 1050344 - RNA, 20 nt, Human
cccagugaagcauggaagag

SEQ ID NO: 1050345 - RNA, 20 nt, Human
ucucuucuggggagauaaaa

SEQ ID NO: 1050346 - RNA, 22 nt, Human
uuucaaagaguuguaaauuacu

SEQ ID NO: 1050347 - RNA, 22 nt, Human
caaugugguggcagaugucagu

SEQ ID NO: 1050348 - RNA, 22 nt, Human
acaaugaacgcuuuuuaacugu

SEQ ID NO: 1050349 - RNA, 22 nt, Human
uggcagcacuagguacugagcu

SEQ ID NO: 1050350 - RNA, 21 nt, Human
cagaggucauccugaggacaa

SEQ ID NO: 1050351 - RNA, 22 nt, Human
agggcugagacuaaggccagau

SEQ ID NO: 1050352 - RNA, 22 nt, Human
cagcugacuucauaggaagaca

SEQ ID NO: 1050353 - RNA, 22 nt, Human
cagcugacagugaggugggggc

SEQ ID NO: 1050354 - RNA, 21 nt, Human
aggcagcaucugauuuauaug

SEQ ID NO: 1050355 - RNA, 22 nt, Human
gcuguguuggugaagcuguagc

SEQ ID NO: 1050356 - RNA, 22 nt, Human
cuagccaugggcauuaaaggua

SEQ ID NO: 1050357 - RNA, 22 nt, Human
aaguauuucguucugaaaaagu

SEQ ID NO: 1050358 - RNA, 22 nt, Human
ccauuguaaauucuguggaagu

SEQ ID NO: 1050359 - RNA, 22 nt, Human
uuaaagggccgauuuccaggcc

SEQ ID NO: 1050360 - RNA, 22 nt, Human
agcggcugcucuuuucagaucc

SEQ ID NO: 1050361 - RNA, 22 nt, Human
aguucucaagacaauuaccugu

SEQ ID NO: 1050362 - RNA, 22 nt, Human
cccauugugguuguugaggaua

SEQ ID NO: 1050363 - RNA, 22 nt, Human
gcagaggacagggauuuagauu

SEQ ID NO: 1050364 - RNA, 22 nt, Human
uugcuuugccaccagaagucua

SEQ ID NO: 1050365 - RNA, 20 nt, Human
agcaagaguaaggacagcga

SEQ ID NO: 1050366 - RNA, 22 nt, Human
uuccaugagcucugaguucaca

SEQ ID NO: 1050367 - RNA, 20 nt, Human
cagagccaagagcagcaucu

SEQ ID NO: 1050368 - RNA, 21 nt, Human
ggacagcugcgcgcagggcuc

SEQ ID NO: 1050369 - RNA, 22 nt, Human
auacuguuucucuucuacauga

SEQ ID NO: 1050370 - RNA, 22 nt, Human
ccugaggucaugcauuuccaac

SEQ ID NO: 1050371 - RNA, 22 nt, Human
acaucuagaagaucugggagau

SEQ ID NO: 1050372 - RNA, 22 nt, Human
ucugcugugggucuauauuuua

SEQ ID NO: 1050373 - RNA, 22 nt, Human
ucucuucuaacacuagaaauuc

SEQ ID NO: 1050374 - RNA, 22 nt, Human
cuaacauuuauugagcacuuag

SEQ ID NO: 1050375 - RNA, 22 nt, Human
gucuucuguaagaugagguccc

SEQ ID NO: 1050376 - RNA, 22 nt, Human
ucaggagaacuuccuucuaccc

SEQ ID NO: 1050377 - RNA, 22 nt, Human
cugggucccacagccugcuggg

SEQ ID NO: 1050378 - RNA, 23 nt, Human
guaacuggggaauuugagcuaug

SEQ ID NO: 1050379 - RNA, 22 nt, Human
cucuucuugccugaugaggcag

SEQ ID NO: 1050380 - RNA, 22 nt, Human
auacaacuuuaucuguaaugag

SEQ ID NO: 1050381 - RNA, 20 nt, Human
uguccccaccaaaauuucau

SEQ ID NO: 1050382 - RNA, 23 nt, Human
ucucaggacacacaugucuauca

SEQ ID NO: 1050383 - RNA, 18 nt, Human
agggagagaccgcggguc

SEQ ID NO: 1050384 - RNA, 19 nt, Human
gcccugaguaagcuaggag

SEQ ID NO: 1050385 - RNA, 22 nt, Human
agacaggccacucuggucuggu

SEQ ID NO: 1050386 - RNA, 22 nt, Human
caaggccaguccauuuuggaag

SEQ ID NO: 1050387 - RNA, 22 nt, Human
ggaagaggaggagccaggcuuu

SEQ ID NO: 1050388 - RNA, 22 nt, Human
caugcugugcaucuugaugacc

SEQ ID NO: 1050389 - RNA, 22 nt, Human
ugcuuggccuacuuguccuuug

SEQ ID NO: 1050390 - RNA, 22 nt, Human
aaauagcagccuuuaguuaaca

SEQ ID NO: 1050391 - RNA, 20 nt, Human
ugccccaggccugcaccugc

SEQ ID NO: 1050392 - RNA, 22 nt, Human
gaaauaagaguccaugccaggu

SEQ ID NO: 1050393 - RNA, 22 nt, Human
gaagcagccacggggagacaga

SEQ ID NO: 1050394 - RNA, 18 nt, Human
acaggcugugggaauggu

SEQ ID NO: 1050395 - RNA, 18 nt, Human
ugaggcagucagugaugg

SEQ ID NO: 1050396 - RNA, 22 nt, Human
aguuguaagagacagauauaaa

SEQ ID NO: 1050397 - RNA, 22 nt, Human
acuaacuugcugagugaccaug

SEQ ID NO: 1050398 - RNA, 22 nt, Human
uucaggaucauuuguuuuaucu

SEQ ID NO: 1050399 - RNA, 22 nt, Human
ccuggcugcccauggacccucu

SEQ ID NO: 1050400 - RNA, 22 nt, Human
ucccagagccaagcuauggaug

SEQ ID NO: 1050401 - RNA, 22 nt, Human
gcccaggaagugacucagaugu

SEQ ID NO: 1050402 - RNA, 22 nt, Human
acacauauucauauguacuuac

SEQ ID NO: 1050403 - RNA, 22 nt, Human
uuauuagagauauuugguuagg

SEQ ID NO: 1050404 - RNA, 22 nt, Human
cuggccuagcucucugcuugaa

SEQ ID NO: 1050405 - RNA, 22 nt, Human
gauggcagcauauugacagcau

SEQ ID NO: 1050406 - RNA, 22 nt, Human
cuucuucauaggcaguccuguu

SEQ ID NO: 1050407 - RNA, 19 nt, Human
agcauuuggaauucuacac

SEQ ID NO: 1050408 - RNA, 22 nt, Human
ccaggcuggaaucaauauucug

SEQ ID NO: 1050409 - RNA, 22 nt, Human
caagauggacauaaggagagaa

SEQ ID NO: 1050410 - RNA, 22 nt, Human
gagguggugguggaggcauagc

SEQ ID NO: 1050411 - RNA, 22 nt, Human
gggaggugauggcaagcagcgg

SEQ ID NO: 1050412 - RNA, 22 nt, Human
aguggcagagccaaguagagcc

SEQ ID NO: 1050413 - RNA, 22 nt, Human
agucagugaaugguguaugcua

SEQ ID NO: 1050414 - RNA, 19 nt, Human
gcuggccacgccccaguug

SEQ ID NO: 1050415 - RNA, 22 nt, Human
gcagaggccaggccaccagcaa

SEQ ID NO: 1050416 - RNA, 22 nt, Human
uucugagacaauugagagucua

SEQ ID NO: 1050417 - RNA, 22 nt, Human
cagucagggacaccagcuagga

SEQ ID NO: 1050418 - RNA, 21 nt, Human
gcuggagagccaggcaggggc

SEQ ID NO: 1050419 - RNA, 22 nt, Human
uuauuacaaugcagaaaauaga

SEQ ID NO: 1050420 - RNA, 22 nt, Human
cucuggccugcagauccaugcu

SEQ ID NO: 1050421 - RNA, 22 nt, Human
gucuggccugccagcucuggug

SEQ ID NO: 1050422 - RNA, 17 nt, Human
ucccaggaacagggaau

SEQ ID NO: 1050423 - RNA, 22 nt, Human
gaggcagcugaagcuucaaaga

SEQ ID NO: 1050424 - RNA, 22 nt, Human
gucugaggguugugcuggagga

SEQ ID NO: 1050425 - RNA, 23 nt, Human
ggcuugagcuggaacagcuuggu

SEQ ID NO: 1050426 - RNA, 22 nt, Human
uccauuuucaucucauguauaa

SEQ ID NO: 1050427 - RNA, 22 nt, Human
caggagaggcuguacguuucuc

SEQ ID NO: 1050428 - RNA, 22 nt, Human
aaggcagcaacuaauggaucuc

SEQ ID NO: 1050429 - RNA, 22 nt, Human
uugcugugaaaccaugggaagu

SEQ ID NO: 1050430 - RNA, 22 nt, Human
uugcagcuucuaccacuguuuc

SEQ ID NO: 1050431 - RNA, 21 nt, Human
ugaaaugagaaugcugagcac

SEQ ID NO: 1050432 - RNA, 22 nt, Human
caggagagauaugaguccccac

SEQ ID NO: 1050433 - RNA, 22 nt, Human
cagggcugguuugucgaagaaa

SEQ ID NO: 1050434 - RNA, 22 nt, Human
uuuuaaaucuccaguugacccc

SEQ ID NO: 1050435 - RNA, 22 nt, Human
uuugcagugucagcuucugugu

SEQ ID NO: 1050436 - RNA, 22 nt, Human
cccaggagguggagcuugcagu

SEQ ID NO: 1050437 - RNA, 21 nt, Human
gagaacugaaccagagcagcu

SEQ ID NO: 1050438 - RNA, 22 nt, Human
uggcagcugcaggccuccugag

SEQ ID NO: 1050439 - RNA, 22 nt, Human
agccacaggccaugagauacca

SEQ ID NO: 1050440 - RNA, 22 nt, Human
cccagcaggaggagguugcagu

SEQ ID NO: 1050441 - RNA, 22 nt, Human
uccaggaggcucugguugacgu

SEQ ID NO: 1050442 - RNA, 22 nt, Human
ggcugagcaauuuugaugacau

SEQ ID NO: 1050443 - RNA, 22 nt, Human
cuugaaagcacuuaguaaauua

SEQ ID NO: 1050444 - RNA, 22 nt, Human
gcugagguggcugccuuaguaa

SEQ ID NO: 1050445 - RNA, 22 nt, Human
gucuauauauugcuugaauaau

SEQ ID NO: 1050446 - RNA, 22 nt, Human
ggaggggagucucccaaagccg

SEQ ID NO: 1050447 - RNA, 22 nt, Human
uagaaaguaaaucaguuuuauu

SEQ ID NO: 1050448 - RNA, 22 nt, Human
cugagggccuucuaugcugagc

SEQ ID NO: 1050449 - RNA, 22 nt, Human
uuagccauugucagcacauggc

SEQ ID NO: 1050450 - RNA, 22 nt, Human
agcagcugguaggaguggccac

SEQ ID NO: 1050451 - RNA, 22 nt, Human
acagcauugcuccaucucaaga

SEQ ID NO: 1050452 - RNA, 22 nt, Human
cagugauguuucugcaucagag

SEQ ID NO: 1050453 - RNA, 22 nt, Human
ucuggccaggggucccugaagg

SEQ ID NO: 1050454 - RNA, 22 nt, Human
uugagggucuggaucugcugcu

SEQ ID NO: 1050455 - RNA, 22 nt, Human
ccuccugguugcaaugaaaugg

SEQ ID NO: 1050456 - RNA, 22 nt, Human
augaggcauuccacucaaacuc

SEQ ID NO: 1050457 - RNA, 22 nt, Human
gcucugggcugaaucauuuauc

SEQ ID NO: 1050458 - RNA, 22 nt, Human
gcugccuguccugaggaguccg

SEQ ID NO: 1050459 - RNA, 22 nt, Human
aucuuucuccauauacaucuuu

SEQ ID NO: 1050460 - RNA, 22 nt, Human
guuuauuauacaacaaaagcua

SEQ ID NO: 1050461 - RNA, 20 nt, Human
ccuccuggucaggugugcag

SEQ ID NO: 1050462 - RNA, 22 nt, Human
gccaggagccagcuucuuagca

SEQ ID NO: 1050463 - RNA, 22 nt, Human
cagugccaaggagaaggacagc

SEQ ID NO: 1050464 - RNA, 22 nt, Human
gugcagcugugguggagccagg

SEQ ID NO: 1050465 - RNA, 22 nt, Human
ggcaugagagguccuggggauu

SEQ ID NO: 1050466 - RNA, 22 nt, Human
uuugaaaggaaguuaauacuuu

SEQ ID NO: 1050467 - RNA, 22 nt, Human
ucuacagacagagcagguggga

SEQ ID NO: 1050468 - RNA, 22 nt, Human
ucucucuucaacccuuaacuag

SEQ ID NO: 1050469 - RNA, 22 nt, Human
ccaggagaagcaucugagugua

SEQ ID NO: 1050470 - RNA, 22 nt, Human
uucaugugaauauauuugucuu

SEQ ID NO: 1050471 - RNA, 22 nt, Human
auguuuccagguucuuccuaug

SEQ ID NO: 1050472 - RNA, 22 nt, Human
acaggagaaaucuggucaaaag

SEQ ID NO: 1050473 - RNA, 22 nt, Human
gucaggauuuacaaacuucagu

SEQ ID NO: 1050474 - RNA, 22 nt, Human
auguucuuccaaaucuguaaca

SEQ ID NO: 1050475 - RNA, 22 nt, Human
agucucugcugguugugccuau

SEQ ID NO: 1050476 - RNA, 22 nt, Human
uaucuguuaugggcugaauugc

SEQ ID NO: 1050477 - RNA, 22 nt, Human
cucaggaugcaggucacaggac

SEQ ID NO: 1050478 - RNA, 22 nt, Human
cuccugggaauuuaguugugag

SEQ ID NO: 1050479 - RNA, 22 nt, Human
uuggaaagcaagcuggacauac

SEQ ID NO: 1050480 - RNA, 22 nt, Human
guggccaaggcagagaaagagc

SEQ ID NO: 1050481 - RNA, 22 nt, Human
uggcugcugcagacagacagga

SEQ ID NO: 1050482 - RNA, 22 nt, Human
acaguaacucuuuuacccuccu

SEQ ID NO: 1050483 - RNA, 22 nt, Human
acagagcuguacaugugccaug

SEQ ID NO: 1050484 - RNA, 22 nt, Human
cucaugucuucacccauucuaa

SEQ ID NO: 1050485 - RNA, 22 nt, Human
cauuguuaauugguaucuuaca

SEQ ID NO: 1050486 - RNA, 22 nt, Human
guauuagguuggugcaaaagua

SEQ ID NO: 1050487 - RNA, 22 nt, Human
gcaggcugccaccuucugaguu

SEQ ID NO: 1050488 - RNA, 22 nt, Human
aagcaagaggaaauguggaccu

SEQ ID NO: 1050489 - RNA, 22 nt, Human
aaggcagccauagcaccaucca

SEQ ID NO: 1050490 - RNA, 22 nt, Human
agacaaauggaguaugagcaac

SEQ ID NO: 1050491 - RNA, 22 nt, Human
uuggaugaagucuagcuuuagu

SEQ ID NO: 1050492 - RNA, 22 nt, Human
ucaggcugaccagguuuugcuc

SEQ ID NO: 1050493 - RNA, 22 nt, Human
cauuuuauccucugggaagcua

SEQ ID NO: 1050494 - RNA, 22 nt, Human
uuucucaguuacuagcuguggu

SEQ ID NO: 1050495 - RNA, 22 nt, Human
caggaugagaggcccagggaag

SEQ ID NO: 1050496 - RNA, 20 nt, Human
ggaggguggaagaaagcaag

SEQ ID NO: 1050497 - RNA, 22 nt, Human
agucucugggcaugguugugac

SEQ ID NO: 1050498 - RNA, 18 nt, Human
cauuguacaaugcuuuau

SEQ ID NO: 1050499 - RNA, 22 nt, Human
uuuccaaauaaggucacacuca

SEQ ID NO: 1050500 - RNA, 22 nt, Human
cucucuggcacuucauugcugu

SEQ ID NO: 1050501 - RNA, 21 nt, Human
aaugcauuaacauaaagcuga

SEQ ID NO: 1050502 - RNA, 22 nt, Human
cugaguccuugggcuuagagug

SEQ ID NO: 1050503 - RNA, 22 nt, Human
uuuauuauguacaggcacuaua

SEQ ID NO: 1050504 - RNA, 22 nt, Human
agcuacccgaggacaggcuaag

SEQ ID NO: 1050505 - RNA, 22 nt, Human
ccugugccagcugggcccugcc

SEQ ID NO: 1050506 - RNA, 22 nt, Human
ccacuuucugagggaacagcag

SEQ ID NO: 1050507 - RNA, 22 nt, Human
cagggcuguggcuuugugcugu

SEQ ID NO: 1050508 - RNA, 22 nt, Human
uuggcagugucugcaaaaugga

SEQ ID NO: 1050509 - RNA, 22 nt, Human
caugucuguguacacaugcaca

SEQ ID NO: 1050510 - RNA, 22 nt, Human
aaugauuuccccuacacagaag

SEQ ID NO: 1050511 - RNA, 22 nt, Human
uuugacauugccaauuugcuca

SEQ ID NO: 1050512 - RNA, 22 nt, Human
augaggcaaucaugguccaguu

SEQ ID NO: 1050513 - RNA, 22 nt, Human
acaugcauaggagaagucuuua

SEQ ID NO: 1050514 - RNA, 22 nt, Human
auggcugggucaccaucagggu

SEQ ID NO: 1050515 - RNA, 22 nt, Human
gauacacuggagcuuccugaca

SEQ ID NO: 1050516 - RNA, 17 nt, Human
aaucuguuuacagucag

SEQ ID NO: 1050517 - RNA, 22 nt, Human
cuuugcaaacgauuaccacaug

SEQ ID NO: 1050518 - RNA, 22 nt, Human
cagauggaacacagaaaggaga

SEQ ID NO: 1050519 - RNA, 22 nt, Human
ggcagacaccuuuaugucuaau

SEQ ID NO: 1050520 - RNA, 22 nt, Human
auaucacaguaguuguuuaguu

SEQ ID NO: 1050521 - RNA, 22 nt, Human
gucuucuuuucagucugcuugu

SEQ ID NO: 1050522 - RNA, 22 nt, Human
ugcuuuggccacuagaauucag

SEQ ID NO: 1050523 - RNA, 16 nt, Human
ucccaggaggcggaac

SEQ ID NO: 1050524 - RNA, 22 nt, Human
acauucuuaacaguuaaaaacu

SEQ ID NO: 1050525 - RNA, 22 nt, Human
gaggcugaacagguucucauga

SEQ ID NO: 1050526 - RNA, 22 nt, Human
cacagccuuacugagauccacu

SEQ ID NO: 1050527 - RNA, 22 nt, Human
uacuuucuuucccaagaggugg

SEQ ID NO: 1050528 - RNA, 22 nt, Human
acacuuuuagcuaugaguuaau

SEQ ID NO: 1050529 - RNA, 22 nt, Human
ggagaggguguggaaaguuauc

SEQ ID NO: 1050530 - RNA, 22 nt, Human
ccuccugggacaggcuggcaca

SEQ ID NO: 1050531 - RNA, 22 nt, Human
aucaaugacaguugaauucuac

SEQ ID NO: 1050532 - RNA, 22 nt, Human
cuguuuaucccuuuggucagca

SEQ ID NO: 1050533 - RNA, 22 nt, Human
ugaggcucuccaagcagaugag

SEQ ID NO: 1050534 - RNA, 22 nt, Human
cauacauuaccuaacuuaaugc

SEQ ID NO: 1050535 - RNA, 22 nt, Human
acccucccauuuccauguagca

SEQ ID NO: 1050536 - RNA, 18 nt, Human
ggagaagaacagaugugg

SEQ ID NO: 1050537 - RNA, 22 nt, Human
uggcagcuacagacagagguga

SEQ ID NO: 1050538 - RNA, 19 nt, Human
ccugaggugggguggaagg

SEQ ID NO: 1050539 - RNA, 22 nt, Human
uccaaauauacagaaucuccuc

SEQ ID NO: 1050540 - RNA, 22 nt, Human
uuucauggcuaggacuagagug

SEQ ID NO: 1050541 - RNA, 21 nt, Human
ccaggcugggagggcaguucc

SEQ ID NO: 1050542 - RNA, 21 nt, Human
caugcaggauuuaaccuagaa

SEQ ID NO: 1050543 - RNA, 22 nt, Human
ucuuugaacuuggcugaucucu

SEQ ID NO: 1050544 - RNA, 22 nt, Human
acaggcuguugggguccagggu

SEQ ID NO: 1050545 - RNA, 22 nt, Human
ucugucaccccuguuucuggcu

SEQ ID NO: 1050546 - RNA, 19 nt, Human
ggcagcuggacgcuguuca

SEQ ID NO: 1050547 - RNA, 23 nt, Human
ggacccuguggagggugagaguc

SEQ ID NO: 1050548 - RNA, 22 nt, Human
cuggggucagggaucagagagc

SEQ ID NO: 1050549 - RNA, 19 nt, Human
aauacaguguuauagaauu

SEQ ID NO: 1050550 - RNA, 22 nt, Human
ucucaggaagugauauugagac

SEQ ID NO: 1050551 - RNA, 19 nt, Human
cugcucuccuugacuugga

SEQ ID NO: 1050552 - RNA, 21 nt, Human
cagcaagacauguuuaucaag

SEQ ID NO: 1050553 - RNA, 22 nt, Human
aaugaaacuaguagaaucuuug

SEQ ID NO: 1050554 - RNA, 22 nt, Human
aaggcagcaagaauuccagguu

SEQ ID NO: 1050555 - RNA, 22 nt, Human
uuauuucauugauuucuaagac

SEQ ID NO: 1050556 - RNA, 16 nt, Human
cuuccucuucacuggc

SEQ ID NO: 1050557 - RNA, 22 nt, Human
ucccugcccucagugcacccgg

SEQ ID NO: 1050558 - RNA, 23 nt, Human
uacuuaggaauggggacggcaag

SEQ ID NO: 1050559 - RNA, 22 nt, Human
gcugagcugggacaguccuggg

SEQ ID NO: 1050560 - RNA, 22 nt, Human
agcugcuacugcucugccagag

SEQ ID NO: 1050561 - RNA, 22 nt, Human
cuucaugcugauauccucgaug

SEQ ID NO: 1050562 - RNA, 22 nt, Human
uccaggagggguaggcaguaug

SEQ ID NO: 1050563 - RNA, 22 nt, Human
ggcucaggcuggagugcagugg

SEQ ID NO: 1050564 - RNA, 22 nt, Human
uggucaaauuuagucucuggaa

SEQ ID NO: 1050565 - RNA, 22 nt, Human
ugcccuggggagcccagccagg

SEQ ID NO: 1050566 - RNA, 22 nt, Human
auuagagcaguaauuguggcag

SEQ ID NO: 1050567 - RNA, 23 nt, Human
cccagggacacgaugacaccucc

SEQ ID NO: 1050568 - RNA, 22 nt, Human
aaauuauucucauguguuucuu

SEQ ID NO: 1050569 - RNA, 20 nt, Human
ugcugaggccugaggccugg

SEQ ID NO: 1050570 - RNA, 22 nt, Human
gucacuguauccagguuccagc

SEQ ID NO: 1050571 - RNA, 22 nt, Human
uucaggaugacaccauguccag

SEQ ID NO: 1050572 - RNA, 22 nt, Human
augauugguggucagcaguaug

SEQ ID NO: 1050573 - RNA, 19 nt, Human
aagggcugggcaccucacu

SEQ ID NO: 1050574 - RNA, 22 nt, Human
cuggccagaguuggagggugug

SEQ ID NO: 1050575 - RNA, 22 nt, Human
guggaauguccuugaucauaag

SEQ ID NO: 1050576 - RNA, 22 nt, Human
aggggaugauccucccgcagcg

SEQ ID NO: 1050577 - RNA, 19 nt, Human
uaucuguuuccugcuuguc

SEQ ID NO: 1050578 - RNA, 22 nt, Human
gaccaaggaagaggggagccag

SEQ ID NO: 1050579 - RNA, 22 nt, Human
uuagccauuuuauacaagugua

SEQ ID NO: 1050580 - RNA, 17 nt, Human
agcugaaauugcugaag

SEQ ID NO: 1050581 - RNA, 22 nt, Human
agccuuguuggucugaguuugg

SEQ ID NO: 1050582 - RNA, 22 nt, Human
cuccugggcucauaucauucag

SEQ ID NO: 1050583 - RNA, 22 nt, Human
uuucacauuagauaugucauuu

SEQ ID NO: 1050584 - RNA, 18 nt, Human
uaggagagaauuuauuua

SEQ ID NO: 1050585 - RNA, 22 nt, Human
cccuggagugugacgaggcauu

SEQ ID NO: 1050586 - RNA, 22 nt, Human
aguggcagagugcacucaggca

SEQ ID NO: 1050587 - RNA, 22 nt, Human
cuggccaauauagggaaaucuu

SEQ ID NO: 1050588 - RNA, 21 nt, Human
aaugaaguggcuauuuugagg

SEQ ID NO: 1050589 - RNA, 19 nt, Human
agacagagcucaguggguu

SEQ ID NO: 1050590 - RNA, 22 nt, Human
agagggauaauauguauuguaa

SEQ ID NO: 1050591 - RNA, 22 nt, Human
ggaggggaugguuugacccugg

SEQ ID NO: 1050592 - RNA, 19 nt, Human
uggagacugagagugagca

SEQ ID NO: 1050593 - RNA, 22 nt, Human
agucucuuuaaucacagugucu

SEQ ID NO: 1050594 - RNA, 20 nt, Human
cacaggcuauaugagagcca

SEQ ID NO: 1050595 - RNA, 22 nt, Human
gccaggagugucccacucauuu

SEQ ID NO: 1050596 - RNA, 22 nt, Human
auucucuuuguauaacaucuug

SEQ ID NO: 1050597 - RNA, 22 nt, Human
gauuaaguaacugaacacuuug

SEQ ID NO: 1050598 - RNA, 22 nt, Human
caaaugauagagccgauuauca

SEQ ID NO: 1050599 - RNA, 20 nt, Human
uuucaguugguuaauggcau

SEQ ID NO: 1050600 - RNA, 22 nt, Human
acaggacuguggaaggaucucu

SEQ ID NO: 1050601 - RNA, 20 nt, Human
gggcaguucaaugccacucu

SEQ ID NO: 1050602 - RNA, 22 nt, Human
gugcugaggauacagcugugaa

SEQ ID NO: 1050603 - RNA, 22 nt, Human
agugcuuuccuucuugugacau

SEQ ID NO: 1050604 - RNA, 22 nt, Human
ucuggagaagcagugagaguca

SEQ ID NO: 1050605 - RNA, 22 nt, Human
uuuuguuguaauauaccuaucc

SEQ ID NO: 1050606 - RNA, 22 nt, Human
uuggccaagacucauguccuau

SEQ ID NO: 1050607 - RNA, 22 nt, Human
agaaguuauccaccuuagaugc

SEQ ID NO: 1050608 - RNA, 22 nt, Human
cccagggaagggcuaccugagg

SEQ ID NO: 1050609 - RNA, 22 nt, Human
ucauucacuuugaaauaaacga

SEQ ID NO: 1050610 - RNA, 22 nt, Human
uugcagcugcaguaaauguuca

SEQ ID NO: 1050611 - RNA, 22 nt, Human
uucucaaagaaagcugucauua

SEQ ID NO: 1050612 - RNA, 22 nt, Human
guugaaagagcauggacuugaa

SEQ ID NO: 1050613 - RNA, 22 nt, Human
uauuucagcacaugggauaggu

SEQ ID NO: 1050614 - RNA, 22 nt, Human
cccaggagacagaaacagaggu

SEQ ID NO: 1050615 - RNA, 22 nt, Human
agucaauuaucucuaggucauc

SEQ ID NO: 1050616 - RNA, 22 nt, Human
auggccaaggggccuaggcagg

SEQ ID NO: 1050617 - RNA, 22 nt, Human
ggccugagucccaccuggcugu

SEQ ID NO: 1050618 - RNA, 22 nt, Human
cccaguuucaacuuuccagugg

SEQ ID NO: 1050619 - RNA, 22 nt, Human
agagugucugguagcugcucug

SEQ ID NO: 1050620 - RNA, 22 nt, Human
ccaugagacagcaacugaaagu

SEQ ID NO: 1050621 - RNA, 22 nt, Human
augaggucuuauugcaguaguu

SEQ ID NO: 1050622 - RNA, 22 nt, Human
ucugaacuccagcccugcucuc

SEQ ID NO: 1050623 - RNA, 22 nt, Human
uaggcagcuuagguuagaagug

SEQ ID NO: 1050624 - RNA, 22 nt, Human
cucaggauagauuguccucuca

SEQ ID NO: 1050625 - RNA, 22 nt, Human
cugagacuuucaugugcuuuua

SEQ ID NO: 1050626 - RNA, 22 nt, Human
aguaaguuccaguuucauuaug

SEQ ID NO: 1050627 - RNA, 22 nt, Human
uagaaauguugguauuaacauu

SEQ ID NO: 1050628 - RNA, 22 nt, Human
gaagcagcgaaguggaagggac

SEQ ID NO: 1050629 - RNA, 22 nt, Human
cugggccacaagccugugugau

SEQ ID NO: 1050630 - RNA, 22 nt, Human
ucacaagacugagcuugcuuga

SEQ ID NO: 1050631 - RNA, 22 nt, Human
ucuucagauggccaguuguccc

SEQ ID NO: 1050632 - RNA, 22 nt, Human
ccucaggaaccacauugcugcu

SEQ ID NO: 1050633 - RNA, 22 nt, Human
cagggcugucuccaaaggcccc

SEQ ID NO: 1050634 - RNA, 22 nt, Human
uuaugauuugccacagauuggu

SEQ ID NO: 1050635 - RNA, 22 nt, Human
cuucugccccuguagccugagu

SEQ ID NO: 1050636 - RNA, 22 nt, Human
gaggccaaguuggagaccaggu

SEQ ID NO: 1050637 - RNA, 20 nt, Human
cagaggcauuuucagacucu

SEQ ID NO: 1050638 - RNA, 22 nt, Human
auucugauaucuuauucuagcu

SEQ ID NO: 1050639 - RNA, 22 nt, Human
ugcugccuccuuccugccagga

SEQ ID NO: 1050640 - RNA, 22 nt, Human
gcuagaaaucgacuucagaauu

SEQ ID NO: 1050641 - RNA, 22 nt, Human
ucagagaguuggaaagaauuaa

SEQ ID NO: 1050642 - RNA, 22 nt, Human
uaauuauucuagucacauagca

SEQ ID NO: 1050643 - RNA, 22 nt, Human
auccaugauuaguaggauaaag

SEQ ID NO: 1050644 - RNA, 22 nt, Human
cagagccaggucuaggagucuc

SEQ ID NO: 1050645 - RNA, 22 nt, Human
aggcugaggcuggcagcuccag

SEQ ID NO: 1050646 - RNA, 20 nt, Human
cagaggcaaggagacuugga

SEQ ID NO: 1050647 - RNA, 22 nt, Human
caggaaugaggucguaaguguc

SEQ ID NO: 1050648 - RNA, 22 nt, Human
augcugugccuggaaagcggcu

SEQ ID NO: 1050649 - RNA, 22 nt, Human
accagagcagacuacuggaggu

SEQ ID NO: 1050650 - RNA, 22 nt, Human
cacagacccagaagggaugaag

SEQ ID NO: 1050651 - RNA, 22 nt, Human
acucaggagggaucagcuauca

SEQ ID NO: 1050652 - RNA, 22 nt, Human
ccccaccauguagaaacugaga

SEQ ID NO: 1050653 - RNA, 22 nt, Human
aggggcucaaagugugcaggga

SEQ ID NO: 1050654 - RNA, 22 nt, Human
gcagcugcaauaggcaucaagc

SEQ ID NO: 1050655 - RNA, 22 nt, Human
gccaggagagcuccuucagguu

SEQ ID NO: 1050656 - RNA, 20 nt, Human
uuccaacucacaucucuaca

SEQ ID NO: 1050657 - RNA, 22 nt, Human
agacagugauguaagcaggagu

SEQ ID NO: 1050658 - RNA, 22 nt, Human
uugaaauggaagugaaaauucu

SEQ ID NO: 1050659 - RNA, 22 nt, Human
agcugaggaauaauaacaaggu

SEQ ID NO: 1050660 - RNA, 22 nt, Human
ucuuugcaaauguuauuaucuu

SEQ ID NO: 1050661 - RNA, 22 nt, Human
gacagcugugcaggagaagggg

SEQ ID NO: 1050662 - RNA, 22 nt, Human
aucauucuaguccuuauggucu

SEQ ID NO: 1050663 - RNA, 22 nt, Human
aggaagcuuagugaaaggacca

SEQ ID NO: 1050664 - RNA, 22 nt, Human
ucuuagcacagcuauauaaguu

SEQ ID NO: 1050665 - RNA, 22 nt, Human
uccuggcccgaucccugugaag

SEQ ID NO: 1050666 - RNA, 22 nt, Human
uuuggaaagugugauuucaagg

SEQ ID NO: 1050667 - RNA, 22 nt, Human
uacauacauguauguguguauu

SEQ ID NO: 1050668 - RNA, 20 nt, Human
gcugagguggaggaaggaga

SEQ ID NO: 1050669 - RNA, 22 nt, Human
ugcuuugggucucucuaguuuc

SEQ ID NO: 1050670 - RNA, 22 nt, Human
ugaggcccaucugagauuuuga

SEQ ID NO: 1050671 - RNA, 22 nt, Human
uucuuaacuggaaaaugucaga

SEQ ID NO: 1050672 - RNA, 22 nt, Human
cagugcugagagccuggccagg

SEQ ID NO: 1050673 - RNA, 22 nt, Human
ucccagggcuuuucucaugcuu

SEQ ID NO: 1050674 - RNA, 22 nt, Human
ucacacagauugguagagcuga

SEQ ID NO: 1050675 - RNA, 22 nt, Human
cugucauugagccugucagggc

SEQ ID NO: 1050676 - RNA, 22 nt, Human
uuaggaaagucucuuggcuggg

SEQ ID NO: 1050677 - RNA, 22 nt, Human
gagacagugguugcagaagcuc

SEQ ID NO: 1050678 - RNA, 22 nt, Human
aguccaaggagagacagcauuu

SEQ ID NO: 1050679 - RNA, 22 nt, Human
cccucccugugugccucauuug

SEQ ID NO: 1050680 - RNA, 22 nt, Human
agcugccgaugcccagcugcau

SEQ ID NO: 1050681 - RNA, 22 nt, Human
ucuuuuggaaaugaugugcagg

SEQ ID NO: 1050682 - RNA, 22 nt, Human
ucuggccaggauggcaagacca

SEQ ID NO: 1050683 - RNA, 22 nt, Human
caggcugagcucuggccugggc

SEQ ID NO: 1050684 - RNA, 22 nt, Human
cagcuuccauaagagauggaga

SEQ ID NO: 1050685 - RNA, 22 nt, Human
uggcagcuccuggggccagcac

SEQ ID NO: 1050686 - RNA, 22 nt, Human
ggcaugcugcguacagaugaac

SEQ ID NO: 1050687 - RNA, 22 nt, Human
agugcagcaugcuggggaggcu

SEQ ID NO: 1050688 - RNA, 22 nt, Human
ugugcucuggaguugccuucac

SEQ ID NO: 1050689 - RNA, 17 nt, Human
guguaacuaugagccau

SEQ ID NO: 1050690 - RNA, 22 nt, Human
uccuggccucacaguccugggu

SEQ ID NO: 1050691 - RNA, 22 nt, Human
aaggcagcucagcucauggcag

SEQ ID NO: 1050692 - RNA, 20 nt, Human
ucccucccuccagcucuggg

SEQ ID NO: 1050693 - RNA, 22 nt, Human
gcuugaaaauucauagguauuu

SEQ ID NO: 1050694 - RNA, 22 nt, Human
agucucugcaugccugcugugc

SEQ ID NO: 1050695 - RNA, 22 nt, Human
uuucuaggcacagugucuuccc

SEQ ID NO: 1050696 - RNA, 22 nt, Human
uucucagaugauucagauaaac

SEQ ID NO: 1050697 - RNA, 22 nt, Human
auaaggaaaugaaacucuaaua

SEQ ID NO: 1050698 - RNA, 22 nt, Human
gaaauauugggacucagagcuu

SEQ ID NO: 1050699 - RNA, 22 nt, Human
ggcugaguggcugggucuaguu

SEQ ID NO: 1050700 - RNA, 22 nt, Human
acaggcugauagaccauaaaua

SEQ ID NO: 1050701 - RNA, 20 nt, Human
guauuaggagguaaauguaa

SEQ ID NO: 1050702 - RNA, 22 nt, Human
cugguacaguguuacaaaaugg

SEQ ID NO: 1050703 - RNA, 22 nt, Human
uuuucaguaaugucuacauaau

SEQ ID NO: 1050704 - RNA, 22 nt, Human
uuggccaaauaaucuugcagau

SEQ ID NO: 1050705 - RNA, 22 nt, Human
uuuauauagagauuugugcaug

SEQ ID NO: 1050706 - RNA, 22 nt, Human
gcacugguaucaccugagagcu

SEQ ID NO: 1050707 - RNA, 22 nt, Human
ccuugcguuuuacagcuucuag

SEQ ID NO: 1050708 - RNA, 22 nt, Human
ugcuagaauuugcagaagcaua

SEQ ID NO: 1050709 - RNA, 22 nt, Human
cugcuguguggauucaauggcu

SEQ ID NO: 1050710 - RNA, 22 nt, Human
uacauacagagaugcuaguuaa

SEQ ID NO: 1050711 - RNA, 20 nt, Human
aacuuucucccauuggacug

SEQ ID NO: 1050712 - RNA, 22 nt, Human
auuuucaaaacaucugcugugu

SEQ ID NO: 1050713 - RNA, 23 nt, Human
cccauuuucauguuaacuccugg

SEQ ID NO: 1050714 - RNA, 22 nt, Human
aucugccuccaaguccaugugu

SEQ ID NO: 1050715 - RNA, 22 nt, Human
aucugccucuucuucauugcga

SEQ ID NO: 1050716 - RNA, 22 nt, Human
caguucuuauuuggccaguguc

SEQ ID NO: 1050717 - RNA, 22 nt, Human
agaacuguccuuggaggagagu

SEQ ID NO: 1050718 - RNA, 19 nt, Human
cuugcugggugguuucugc

SEQ ID NO: 1050719 - RNA, 22 nt, Human
accuuuuauguaaauauauguu

SEQ ID NO: 1050720 - RNA, 22 nt, Human
ucauuuguacuugugugcuugu

SEQ ID NO: 1050721 - RNA, 22 nt, Human
agaaguuaccacauacuucucu

SEQ ID NO: 1050722 - RNA, 22 nt, Human
uccaugaggcagggaggcuggc

SEQ ID NO: 1050723 - RNA, 22 nt, Human
gccaggagcaugucauuguuga

SEQ ID NO: 1050724 - RNA, 22 nt, Human
ggucagccuuggauuugguagc

SEQ ID NO: 1050725 - RNA, 22 nt, Human
ugaaaugaaacagaacauauca

SEQ ID NO: 1050726 - RNA, 22 nt, Human
uagcagaggcaaggaugugaau

SEQ ID NO: 1050727 - RNA, 22 nt, Human
aaagaguuggacuuucucaggc

SEQ ID NO: 1050728 - RNA, 22 nt, Human
aggcuaagggaugacuggagug

SEQ ID NO: 1050729 - RNA, 22 nt, Human
ggaaaugacuuggugcuucguu

SEQ ID NO: 1050730 - RNA, 22 nt, Human
uaggauaugguagaaaucauuc

SEQ ID NO: 1050731 - RNA, 22 nt, Human
uuucucugcugccugugucgau

SEQ ID NO: 1050732 - RNA, 22 nt, Human
ccaggagaugggagcaucuaaa

SEQ ID NO: 1050733 - RNA, 22 nt, Human
uguccucagauaugucuacucu

SEQ ID NO: 1050734 - RNA, 20 nt, Human
uacagaaugcaauaaaaugg

SEQ ID NO: 1050735 - RNA, 22 nt, Human
cagauccacccuuguagugaca

SEQ ID NO: 1050736 - RNA, 22 nt, Human
ggacagguucagcaguuuauaa

SEQ ID NO: 1050737 - RNA, 22 nt, Human
caacaauaugccagacucaauu

SEQ ID NO: 1050738 - RNA, 22 nt, Human
cucaguuuugcuagcuggaguu

SEQ ID NO: 1050739 - RNA, 22 nt, Human
gagcugagaagcagcgcuugau

SEQ ID NO: 1050740 - RNA, 22 nt, Human
ggcagcuuccuaggagagggca

SEQ ID NO: 1050741 - RNA, 21 nt, Human
ucuccuggguccaacccaugc

SEQ ID NO: 1050742 - RNA, 22 nt, Human
cagcuagcuaagaaggccagag

SEQ ID NO: 1050743 - RNA, 22 nt, Human
ccacaguccgggcuggcaggac

SEQ ID NO: 1050744 - RNA, 22 nt, Human
ccacaguacaggaaaucuuguu

SEQ ID NO: 1050745 - RNA, 22 nt, Human
caagauggagaagcagcaaggg

SEQ ID NO: 1050746 - RNA, 22 nt, Human
acaaauauuuacugaauccacu

SEQ ID NO: 1050747 - RNA, 22 nt, Human
ccaggagaaugggauuacccua

SEQ ID NO: 1050748 - RNA, 22 nt, Human
agaccaugggcucugaagagca

SEQ ID NO: 1050749 - RNA, 22 nt, Human
uuuggaauauuaaaaugucuca

SEQ ID NO: 1050750 - RNA, 22 nt, Human
gucccauaaguagugcaacuug

SEQ ID NO: 1050751 - RNA, 22 nt, Human
auacacuuguacauuuuuuaau

SEQ ID NO: 1050752 - RNA, 22 nt, Human
gaagcagcugccagagaugucu

SEQ ID NO: 1050753 - RNA, 22 nt, Human
gaggcaucugggcacagaagug

SEQ ID NO: 1050754 - RNA, 22 nt, Human
aacacuuucuuccuugcucagg

SEQ ID NO: 1050755 - RNA, 20 nt, Human
uucuucucuaguuaucuuca

SEQ ID NO: 1050756 - RNA, 22 nt, Human
acuuaaaaagaaucuuuucacg

SEQ ID NO: 1050757 - RNA, 20 nt, Human
ucuccuggugacaguaccca

SEQ ID NO: 1050758 - RNA, 18 nt, Human
guauuaguuuucagagag

SEQ ID NO: 1050759 - RNA, 21 nt, Human
uugaaaguaaauucagcagcu

SEQ ID NO: 1050760 - RNA, 22 nt, Human
caacuauagaucaaaugaguuu

SEQ ID NO: 1050761 - RNA, 22 nt, Human
ccagaagaccccguccaccucc

SEQ ID NO: 1050762 - RNA, 22 nt, Human
cagcugccuucugcgggaaguc

SEQ ID NO: 1050763 - RNA, 22 nt, Human
uuuaaauucugucugccgcuua

SEQ ID NO: 1050764 - RNA, 22 nt, Human
acugcuuuaucugagaaguccu

SEQ ID NO: 1050765 - RNA, 22 nt, Human
ccuucuucuguguggcccaaga

SEQ ID NO: 1050766 - RNA, 22 nt, Human
cugguacaaaaugcugauauca

SEQ ID NO: 1050767 - RNA, 20 nt, Human
agggugagacaugagccucc

SEQ ID NO: 1050768 - RNA, 22 nt, Human
acuuuacuacauccacagaugg

SEQ ID NO: 1050769 - RNA, 22 nt, Human
uagaaaugauugguugagcucu

SEQ ID NO: 1050770 - RNA, 22 nt, Human
auaauauuugcauuacugugau

SEQ ID NO: 1050771 - RNA, 22 nt, Human
cuucucaguugcaagugucaga

SEQ ID NO: 1050772 - RNA, 22 nt, Human
caauacacuaaacuucucugaa

SEQ ID NO: 1050773 - RNA, 22 nt, Human
aggcagcuuuguaguaaagcua

SEQ ID NO: 1050774 - RNA, 22 nt, Human
cuugaaagucagcagaguggau

SEQ ID NO: 1050775 - RNA, 22 nt, Human
ucuuuccauggccacacagucu

SEQ ID NO: 1050776 - RNA, 22 nt, Human
ugucucugaggugagggucagc

SEQ ID NO: 1050777 - RNA, 22 nt, Human
gcuccuggcuucacugacauca

SEQ ID NO: 1050778 - RNA, 22 nt, Human
agggauggaagacuugaagacc

SEQ ID NO: 1050779 - RNA, 22 nt, Human
accucagauuguggcuccgcug

SEQ ID NO: 1050780 - RNA, 22 nt, Human
gcucaguuauccgugugugacu

SEQ ID NO: 1050781 - RNA, 22 nt, Human
uaggauaugugaaaucauauua

SEQ ID NO: 1050782 - RNA, 22 nt, Human
uuuaacagaugcuaugucuacc

SEQ ID NO: 1050783 - RNA, 22 nt, Human
cuucuucaucuguaaaacuugg

SEQ ID NO: 1050784 - RNA, 18 nt, Human
gagaggagccagaauuuu

SEQ ID NO: 1050785 - RNA, 22 nt, Human
agaggcagccguauuucaaagg

SEQ ID NO: 1050786 - RNA, 22 nt, Human
caacauuucaaggucuuuagga

SEQ ID NO: 1050787 - RNA, 22 nt, Human
ccuggugggcaggagugagacc

SEQ ID NO: 1050788 - RNA, 22 nt, Human
agaggaggaagagcuuuaaaau

SEQ ID NO: 1050789 - RNA, 22 nt, Human
auacaucuuccuuuuaaaaugc

SEQ ID NO: 1050790 - RNA, 22 nt, Human
cuguaugaggaucagacuggac

SEQ ID NO: 1050791 - RNA, 22 nt, Human
gcuuuggaugugugccugaggu

SEQ ID NO: 1050792 - RNA, 22 nt, Human
gcccaggaaauaaaagugggcu

SEQ ID NO: 1050793 - RNA, 22 nt, Human
uagcacaucuucuuggccugca

SEQ ID NO: 1050794 - RNA, 21 nt, Human
uccuggcccacucuaucccca

SEQ ID NO: 1050795 - RNA, 22 nt, Human
acccagagaacugugccuugag

SEQ ID NO: 1050796 - RNA, 22 nt, Human
ugccuggaaggcccaugggaag

SEQ ID NO: 1050797 - RNA, 22 nt, Human
uuggccaaccagaacggagguc

SEQ ID NO: 1050798 - RNA, 22 nt, Human
cagcugaguggacccuagaggc

SEQ ID NO: 1050799 - RNA, 22 nt, Human
uggcagcagaacaugaaaccca

SEQ ID NO: 1050800 - RNA, 22 nt, Human
aaagaaguguugaauuugcaag

SEQ ID NO: 1050801 - RNA, 22 nt, Human
aggcagcuggacauaacuaacc

SEQ ID NO: 1050802 - RNA, 22 nt, Human
gggcagcuggccagguauucug

SEQ ID NO: 1050803 - RNA, 22 nt, Human
cuggcuuucucugugguguuca

SEQ ID NO: 1050804 - RNA, 22 nt, Human
agaggaugauuuuaaggacacu

SEQ ID NO: 1050805 - RNA, 22 nt, Human
ucauuucccuccuacaaagagg

SEQ ID NO: 1050806 - RNA, 20 nt, Human
ugaggcucagagagguugag

SEQ ID NO: 1050807 - RNA, 22 nt, Human
cagguugggcugcgaggaggag

SEQ ID NO: 1050808 - RNA, 19 nt, Human
uuucccagcccuugcugug

SEQ ID NO: 1050809 - RNA, 22 nt, Human
gggcagcuggcuuauagguuug

SEQ ID NO: 1050810 - RNA, 22 nt, Human
aggcagacaaggucccuggucu

SEQ ID NO: 1050811 - RNA, 22 nt, Human
aaggcagccucugccagccggg

SEQ ID NO: 1050812 - RNA, 22 nt, Human
uuacacuucugaaagccuaggu

SEQ ID NO: 1050813 - RNA, 22 nt, Human
aacauucugguucuaaaaaccu

SEQ ID NO: 1050814 - RNA, 19 nt, Human
agggaguuuauauuugcac

SEQ ID NO: 1050815 - RNA, 22 nt, Human
ugaauaguccuuggaauaacug

SEQ ID NO: 1050816 - RNA, 19 nt, Human
acacuguagauauagcuau

SEQ ID NO: 1050817 - RNA, 22 nt, Human
aacaacugaaaagcuuuuucug

SEQ ID NO: 1050818 - RNA, 22 nt, Human
gcuaugcaggagccuaaugaca

SEQ ID NO: 1050819 - RNA, 22 nt, Human
cuucagagugcagaagauuggg

SEQ ID NO: 1050820 - RNA, 22 nt, Human
ggcagcauuuagagcacagugu

SEQ ID NO: 1050821 - RNA, 22 nt, Human
ggaggggaacuaaucccgugac

SEQ ID NO: 1050822 - RNA, 22 nt, Human
aggcuccacccuacagagcucc

SEQ ID NO: 1050823 - RNA, 23 nt, Human
uggaaagcggaccuggggcagag

SEQ ID NO: 1050824 - RNA, 22 nt, Human
uuuuaugugcuggacuggcagu

SEQ ID NO: 1050825 - RNA, 22 nt, Human
guuaaauaaccucauguccguu

SEQ ID NO: 1050826 - RNA, 22 nt, Human
ugaggcaggaugcuugcacagg

SEQ ID NO: 1050827 - RNA, 18 nt, Human
gagcugagaagaggaugc

SEQ ID NO: 1050828 - RNA, 22 nt, Human
ggacaguagucacuaaacuaga

SEQ ID NO: 1050829 - RNA, 23 nt, Human
ugcuggcugaaacagccaaagga

SEQ ID NO: 1050830 - RNA, 22 nt, Human
augugucuuugagacucugcua

SEQ ID NO: 1050831 - RNA, 22 nt, Human
ucaugcuuaaaagacacuugag

SEQ ID NO: 1050832 - RNA, 21 nt, Human
agaggcaggcauuaaguacac

SEQ ID NO: 1050833 - RNA, 22 nt, Human
ccaggagacaaagaugacugcu

SEQ ID NO: 1050834 - RNA, 22 nt, Human
uuuaguagaugcagcauuauuu

SEQ ID NO: 1050835 - RNA, 22 nt, Human
aggaggggcaaugauagucugg

SEQ ID NO: 1050836 - RNA, 22 nt, Human
gcagcugagcgugaggaagagu

SEQ ID NO: 1050837 - RNA, 22 nt, Human
uggcugagaaaaugguuuuagg

SEQ ID NO: 1050838 - RNA, 22 nt, Human
agcuccugaaaauccagacugg

SEQ ID NO: 1050839 - RNA, 22 nt, Human
cugaggcugggcauggggucca

SEQ ID NO: 1050840 - RNA, 22 nt, Human
aggcagcuggcaaauucuagag

SEQ ID NO: 1050841 - RNA, 22 nt, Human
ucuccugggugcuuuaucagaa

SEQ ID NO: 1050842 - RNA, 22 nt, Human
uagaagaacaugucaaacuaua

SEQ ID NO: 1050843 - RNA, 22 nt, Human
cuaaauuaucaugagaauuaug

SEQ ID NO: 1050844 - RNA, 22 nt, Human
auauucuuccaaaacaucauuu

SEQ ID NO: 1050845 - RNA, 22 nt, Human
ggcaacauucuccagauccuuu

SEQ ID NO: 1050846 - RNA, 22 nt, Human
uuuauuagauuaucaaagaggu

SEQ ID NO: 1050847 - RNA, 21 nt, Human
agagagggagaugaaacaucc

SEQ ID NO: 1050848 - RNA, 22 nt, Human
ucauuucuauugcuacugucug

SEQ ID NO: 1050849 - RNA, 22 nt, Human
uggugguuaugcgcuuuguggg

SEQ ID NO: 1050850 - RNA, 22 nt, Human
ucugaggucauaaagcaacuuu

SEQ ID NO: 1050851 - RNA, 16 nt, Human
aggccaaaaaggggca

SEQ ID NO: 1050852 - RNA, 22 nt, Human
cacuccuguuccacuaaaugag

SEQ ID NO: 1050853 - RNA, 22 nt, Human
uaacugguagauuuuaaaucgg

SEQ ID NO: 1050854 - RNA, 22 nt, Human
ucacaguuauagucuguagaau

SEQ ID NO: 1050855 - RNA, 22 nt, Human
ggcugaggggcccagaggaaca

SEQ ID NO: 1050856 - RNA, 22 nt, Human
ugaggcaggagaaucacaugaa

SEQ ID NO: 1050857 - RNA, 18 nt, Human
aaacuggcuuggccugug

SEQ ID NO: 1050858 - RNA, 22 nt, Human
uccaggaggcaccuuuggacca

SEQ ID NO: 1050859 - RNA, 22 nt, Human
cuggccagcugacagcagggcu

SEQ ID NO: 1050860 - RNA, 22 nt, Human
gaauacauuggaaaucagaaua

SEQ ID NO: 1050861 - RNA, 22 nt, Human
uauuugcaacauaaaacucuga

SEQ ID NO: 1050862 - RNA, 22 nt, Human
cccuuccuggaguacccucugu

SEQ ID NO: 1050863 - RNA, 22 nt, Human
auggccaugccaguuuacagcc

SEQ ID NO: 1050864 - RNA, 22 nt, Human
uccuggccagaggacaaagcug

SEQ ID NO: 1050865 - RNA, 23 nt, Human
aucauucuccaaucuggagcagg

SEQ ID NO: 1050866 - RNA, 20 nt, Human
ugcugcugccuccgccucug

SEQ ID NO: 1050867 - RNA, 22 nt, Human
uucucugaaggccaugcucacu

SEQ ID NO: 1050868 - RNA, 22 nt, Human
uuguuugaggucacugauauuu

SEQ ID NO: 1050869 - RNA, 22 nt, Human
guucuucaucauuaacacucug

SEQ ID NO: 1050870 - RNA, 22 nt, Human
cuucaguguugccagggccuag

SEQ ID NO: 1050871 - RNA, 22 nt, Human
ucaguagcagaaagcaaugagu

SEQ ID NO: 1050872 - RNA, 22 nt, Human
ucuacccagagcuaugaccuga

SEQ ID NO: 1050873 - RNA, 22 nt, Human
uccuggccaaguuacucucugc

SEQ ID NO: 1050874 - RNA, 22 nt, Human
gcccugaggcaaaagaacaguc

SEQ ID NO: 1050875 - RNA, 21 nt, Human
ccaggcuggccaugguauuga

SEQ ID NO: 1050876 - RNA, 22 nt, Human
caaggccauaagagauacaaaa

SEQ ID NO: 1050877 - RNA, 22 nt, Human
cuucuucacacuggucugaagc

SEQ ID NO: 1050878 - RNA, 19 nt, Human
uucacaauuaugaaauuag

SEQ ID NO: 1050879 - RNA, 22 nt, Human
gcugagguggaggaaggagacc

SEQ ID NO: 1050880 - RNA, 22 nt, Human
gaggaaccaaaucagcuugcac

SEQ ID NO: 1050881 - RNA, 22 nt, Human
gcugagacuggcagcaggaagu

SEQ ID NO: 1050882 - RNA, 22 nt, Human
ucccagaggaaauggcagcuga

SEQ ID NO: 1050883 - RNA, 22 nt, Human
uuuccagagcaugucugcucag

SEQ ID NO: 1050884 - RNA, 22 nt, Human
gcccaggacucagggugucgcg

SEQ ID NO: 1050885 - RNA, 22 nt, Human
guuuauaaggcccaauauuucu

SEQ ID NO: 1050886 - RNA, 22 nt, Human
uugaggucuuugagcaaacgca

SEQ ID NO: 1050887 - RNA, 22 nt, Human
ugaauuagcaguagacagacug

SEQ ID NO: 1050888 - RNA, 22 nt, Human
uuccuuaguguuagauucugug

SEQ ID NO: 1050889 - RNA, 22 nt, Human
ggggcagcucccgagggcagga

SEQ ID NO: 1050890 - RNA, 22 nt, Human
agccagcugugggcucaggcgg

SEQ ID NO: 1050891 - RNA, 22 nt, Human
cugaggcucaagggcagguggg

SEQ ID NO: 1050892 - RNA, 22 nt, Human
uggcuggagucuggugcuagcc

SEQ ID NO: 1050893 - RNA, 22 nt, Human
gaucuguuucauucacagucug

SEQ ID NO: 1050894 - RNA, 20 nt, Human
gaggcugaaguguuuuugcu

SEQ ID NO: 1050895 - RNA, 21 nt, Human
uuauugagacauuuguggaaa

SEQ ID NO: 1050896 - RNA, 22 nt, Human
uucuucaacaaggacacuguua

SEQ ID NO: 1050897 - RNA, 22 nt, Human
gagaggaguuacuauuuccgag

SEQ ID NO: 1050898 - RNA, 22 nt, Human
agacagugcaagaagagcaggc

SEQ ID NO: 1050899 - RNA, 22 nt, Human
guguuuuaagaaagaagcucag

SEQ ID NO: 1050900 - RNA, 22 nt, Human
uuaaauauuauguugucugcaa

SEQ ID NO: 1050901 - RNA, 22 nt, Human
gcccaggaucugcucagaucau

SEQ ID NO: 1050902 - RNA, 22 nt, Human
gggcugaguuccugccucacuc

SEQ ID NO: 1050903 - RNA, 22 nt, Human
caccucuuugauuugaggcaag

SEQ ID NO: 1050904 - RNA, 22 nt, Human
uguccacaucacucacuuguca

SEQ ID NO: 1050905 - RNA, 22 nt, Human
acagaacugcaggaggaaaagc

SEQ ID NO: 1050906 - RNA, 22 nt, Human
uuucaguguaucuuccaaaagc

SEQ ID NO: 1050907 - RNA, 22 nt, Human
aagugcugggauuacagguguc

SEQ ID NO: 1050908 - RNA, 22 nt, Human
uaauuauuugaagacauuagag

SEQ ID NO: 1050909 - RNA, 22 nt, Human
ugaugaaauguugaggcaguga

SEQ ID NO: 1050910 - RNA, 22 nt, Human
cugcuguguaucauuuuagaug

SEQ ID NO: 1050911 - RNA, 22 nt, Human
gggcugagagcuggaaucugag

SEQ ID NO: 1050912 - RNA, 22 nt, Human
uagugcuuuaaguuuacagaga

SEQ ID NO: 1050913 - RNA, 22 nt, Human
ggagcugugcagugacuacaga

SEQ ID NO: 1050914 - RNA, 22 nt, Human
agugacagggaaaaugacacug

SEQ ID NO: 1050915 - RNA, 22 nt, Human
aggccagcaagaaagagagucu

SEQ ID NO: 1050916 - RNA, 22 nt, Human
aacugguaucucuucaguguaa

SEQ ID NO: 1050917 - RNA, 22 nt, Human
caaaugaaaauggcgucuugga

SEQ ID NO: 1050918 - RNA, 22 nt, Human
guagggagcccagagcccagug

SEQ ID NO: 1050919 - RNA, 21 nt, Human
gcugcaucaaucuacccaggg

SEQ ID NO: 1050920 - RNA, 22 nt, Human
cagcaagacaggauucccgugg

SEQ ID NO: 1050921 - RNA, 22 nt, Human
aggccaaagcacagagcuggaa

SEQ ID NO: 1050922 - RNA, 22 nt, Human
ccaggagauaagcugaguuuau

SEQ ID NO: 1050923 - RNA, 21 nt, Human
cacucaggguaugugccaggc

SEQ ID NO: 1050924 - RNA, 22 nt, Human
cuuuccaaugcauuuccaaugu

SEQ ID NO: 1050925 - RNA, 22 nt, Human
gcccaggaaaugccccguggug

SEQ ID NO: 1050926 - RNA, 22 nt, Human
ggcugagccacugcgccuggcu

SEQ ID NO: 1050927 - RNA, 22 nt, Human
uuuccaagagcuuauuucugaa

SEQ ID NO: 1050928 - RNA, 22 nt, Human
cugagcgcgggaccugaggcug

SEQ ID NO: 1050929 - RNA, 22 nt, Human
cuccuuggccguuaaugucaca

SEQ ID NO: 1050930 - RNA, 22 nt, Human
ggcugucucugugacugccacc

SEQ ID NO: 1050931 - RNA, 22 nt, Human
cagaacugggcucgcucugguu

SEQ ID NO: 1050932 - RNA, 22 nt, Human
auggccaaaucuaaacuguugg

SEQ ID NO: 1050933 - RNA, 22 nt, Human
uggcuucuagcaguguugauuu

SEQ ID NO: 1050934 - RNA, 22 nt, Human
ucagaaaauaacuguuaguuug

SEQ ID NO: 1050935 - RNA, 22 nt, Human
guuuuucuuugugugaagacaa

SEQ ID NO: 1050936 - RNA, 22 nt, Human
ugcccaggauugugaggucagg

SEQ ID NO: 1050937 - RNA, 22 nt, Human
cagagcugcagauugaaggcau

SEQ ID NO: 1050938 - RNA, 22 nt, Human
ucuccuggccgggcuguccccu

SEQ ID NO: 1050939 - RNA, 22 nt, Human
uaggaaauugccaauauaugac

SEQ ID NO: 1050940 - RNA, 22 nt, Human
uuuggaauuggcauucuauucu

SEQ ID NO: 1050941 - RNA, 22 nt, Human
aucaggaucagggcuagcagag

SEQ ID NO: 1050942 - RNA, 22 nt, Human
agucacuguucugucaugucaa

SEQ ID NO: 1050943 - RNA, 22 nt, Human
augcugugguagacagcauucc

SEQ ID NO: 1050944 - RNA, 22 nt, Human
acaggcugggcgcuuccugcgg

SEQ ID NO: 1050945 - RNA, 22 nt, Human
gccaccagggggugcaaggucc

SEQ ID NO: 1050946 - RNA, 22 nt, Human
agauggagaccuuggaugaacu

SEQ ID NO: 1050947 - RNA, 22 nt, Human
augaggucacaguguuuggcau

SEQ ID NO: 1050948 - RNA, 22 nt, Human
ucuuuuggguucuuaugauuua

SEQ ID NO: 1050949 - RNA, 22 nt, Human
aaaauauuuuagggccaggaga

SEQ ID NO: 1050950 - RNA, 22 nt, Human
caggagagcccggguccgggcu

SEQ ID NO: 1050951 - RNA, 22 nt, Human
gcugccucaggcaccuccuggc

SEQ ID NO: 1050952 - RNA, 22 nt, Human
gagcugagcagggagccucacu

SEQ ID NO: 1050953 - RNA, 21 nt, Human
gauuugcagaaacuagacagg

SEQ ID NO: 1050954 - RNA, 22 nt, Human
acaauucugaugguuucccagu

SEQ ID NO: 1050955 - RNA, 22 nt, Human
gaggaggcuuccgggaggcacg

SEQ ID NO: 1050956 - RNA, 22 nt, Human
ggucugaguggugcugacucag

SEQ ID NO: 1050957 - RNA, 22 nt, Human
ucagaaaagaccacauuauucu

SEQ ID NO: 1050958 - RNA, 22 nt, Human
uaacuguauuuuucugagauuc

SEQ ID NO: 1050959 - RNA, 21 nt, Human
acagucuccccagaucucucc

SEQ ID NO: 1050960 - RNA, 22 nt, Human
auugugcaaauauuaucuguag

SEQ ID NO: 1050961 - RNA, 22 nt, Human
uuuggaaugguaccuucaguug

SEQ ID NO: 1050962 - RNA, 22 nt, Human
ccuggcuggauggagccccugg

SEQ ID NO: 1050963 - RNA, 22 nt, Human
ucugagguugaacuuugcaaag

SEQ ID NO: 1050964 - RNA, 20 nt, Human
augugagggguugaaguggg

SEQ ID NO: 1050965 - RNA, 22 nt, Human
aaacauuugcaacucgguuugg

SEQ ID NO: 1050966 - RNA, 22 nt, Human
ccugaggucuagagucagggug

SEQ ID NO: 1050967 - RNA, 22 nt, Human
auucaaauuaaguuaauucagc

SEQ ID NO: 1050968 - RNA, 22 nt, Human
ucuggcuuucauuuguuuaaag

SEQ ID NO: 1050969 - RNA, 22 nt, Human
gcaugucaugucauguaggaau

SEQ ID NO: 1050970 - RNA, 22 nt, Human
aggguggcaccuggaagggaug

SEQ ID NO: 1050971 - RNA, 22 nt, Human
guucuucagaggggaaagaacc

SEQ ID NO: 1050972 - RNA, 22 nt, Human
aaggagaaaugguagaugugca

SEQ ID NO: 1050973 - RNA, 22 nt, Human
ucaggagagagaaauuggggcu

SEQ ID NO: 1050974 - RNA, 22 nt, Human
acuguaacacucauacugaagu

SEQ ID NO: 1050975 - RNA, 22 nt, Human
ugccugucuuggaguccuggcc

SEQ ID NO: 1050976 - RNA, 22 nt, Human
aaucuauaugcuuuucacauac

SEQ ID NO: 1050977 - RNA, 22 nt, Human
uuagagaaaggguuugauuccg

SEQ ID NO: 1050978 - RNA, 22 nt, Human
caaggccauauugccuguaugu

SEQ ID NO: 1050979 - RNA, 22 nt, Human
aagcuggagaguuaggugaaua

SEQ ID NO: 1050980 - RNA, 22 nt, Human
gaagcagcaaguauaggacagg

SEQ ID NO: 1050981 - RNA, 22 nt, Human
acccaggaggugacacagggcu

SEQ ID NO: 1050982 - RNA, 22 nt, Human
uaaggccaaguucauauacaac

SEQ ID NO: 1050983 - RNA, 20 nt, Human
aggcugagggugauuguguc

SEQ ID NO: 1050984 - RNA, 22 nt, Human
gacacuuucucagguaaagcau

SEQ ID NO: 1050985 - RNA, 22 nt, Human
auuuucagagacaucuggacuu

SEQ ID NO: 1050986 - RNA, 19 nt, Human
uggucuaaaugugugcccc

SEQ ID NO: 1050987 - RNA, 22 nt, Human
auguuauuaaaguacagauucu

SEQ ID NO: 1050988 - RNA, 17 nt, Human
uuucuccuuccaucuca

SEQ ID NO: 1050989 - RNA, 22 nt, Human
ucuucagagugaaagucuguga

SEQ ID NO: 1050990 - RNA, 22 nt, Human
auuaaauuggacgcugggggaa

SEQ ID NO: 1050991 - RNA, 22 nt, Human
uuccaagaguaaauucaaauug

SEQ ID NO: 1050992 - RNA, 22 nt, Human
acaguuaucuuugaaauagaga

SEQ ID NO: 1050993 - RNA, 22 nt, Human
agguccacaguucagcugccca

SEQ ID NO: 1050994 - RNA, 22 nt, Human
uugcauuugacaaauuauuuaa

SEQ ID NO: 1050995 - RNA, 22 nt, Human
gagagaaaugugcaguuugggc

SEQ ID NO: 1050996 - RNA, 22 nt, Human
auugaaagaguuuucugcugca

SEQ ID NO: 1050997 - RNA, 22 nt, Human
ucuuggcuauccaaguuaucca

SEQ ID NO: 1050998 - RNA, 21 nt, Human
uagggcaggcauuggaagaga

SEQ ID NO: 1050999 - RNA, 21 nt, Human
ccugcugugaucuuagugagu

SEQ ID NO: 1051000 - RNA, 22 nt, Human
caaauguaaauucuuuugaagc

SEQ ID NO: 1051001 - RNA, 22 nt, Human
cagcaggaccauugaggcauca

SEQ ID NO: 1051002 - RNA, 22 nt, Human
ucuuggcuucuguauuuccugu

SEQ ID NO: 1051003 - RNA, 22 nt, Human
aauuauacaugaaggcauuaua

SEQ ID NO: 1051004 - RNA, 22 nt, Human
cucaggaugcaauuccaucaag

SEQ ID NO: 1051005 - RNA, 22 nt, Human
uucugggagagaaagggccuug

SEQ ID NO: 1051006 - RNA, 22 nt, Human
ucacaugaguauuauuuuccaa

SEQ ID NO: 1051007 - RNA, 22 nt, Human
uuauucaggcucucuuuggcua

SEQ ID NO: 1051008 - RNA, 22 nt, Human
aauaccaccucauucuggaggc

SEQ ID NO: 1051009 - RNA, 22 nt, Human
uaaggaaaauggacaucaaaca

SEQ ID NO: 1051010 - RNA, 22 nt, Human
uagcaagaugaugaauuauuca

SEQ ID NO: 1051011 - RNA, 22 nt, Human
gagagggagccagccaggaacc

SEQ ID NO: 1051012 - RNA, 22 nt, Human
uuuccuaggagauugaucacau

SEQ ID NO: 1051013 - RNA, 22 nt, Human
gcuggccauagaagccaaagag

SEQ ID NO: 1051014 - RNA, 22 nt, Human
aggcugagugcuccccuagaug

SEQ ID NO: 1051015 - RNA, 22 nt, Human
caugcaggcccgccugaauggg

SEQ ID NO: 1051016 - RNA, 22 nt, Human
ggagagugggagcaacuguugc

SEQ ID NO: 1051017 - RNA, 20 nt, Human
uuucugugcccaggucuguu

SEQ ID NO: 1051018 - RNA, 21 nt, Human
uggcugaguggaugcaugaau

SEQ ID NO: 1051019 - RNA, 19 nt, Human
gugucaggaugugcagggg

SEQ ID NO: 1051020 - RNA, 23 nt, Human
uuggcagcgggucaggcuguggg

SEQ ID NO: 1051021 - RNA, 22 nt, Human
ccacuguuuuucaguuaacuuu

SEQ ID NO: 1051022 - RNA, 22 nt, Human
aacucuggagcacgcccuggcc

SEQ ID NO: 1051023 - RNA, 22 nt, Human
cccuggaggcuggaggcaguag

SEQ ID NO: 1051024 - RNA, 22 nt, Human
ugccugugguuccaguuuuuuc

SEQ ID NO: 1051025 - RNA, 22 nt, Human
cauuaaaauaucucaugguguu

SEQ ID NO: 1051026 - RNA, 22 nt, Human
agaccauagggaccucagguug

SEQ ID NO: 1051027 - RNA, 18 nt, Human
guaggucaguaccaagca

SEQ ID NO: 1051028 - RNA, 22 nt, Human
cggcugaggaucuccaggccug

SEQ ID NO: 1051029 - RNA, 22 nt, Human
aggcugagaaagugggaagaug

SEQ ID NO: 1051030 - RNA, 19 nt, Human
cauuaggauuagagacaag

SEQ ID NO: 1051031 - RNA, 22 nt, Human
uuugaaagggaaauaaacuccu

SEQ ID NO: 1051032 - RNA, 22 nt, Human
auaucaguaucuauguauuugu

SEQ ID NO: 1051033 - RNA, 22 nt, Human
ucugagccaaaauaaacagcau

SEQ ID NO: 1051034 - RNA, 22 nt, Human
aaaguauuugugauuuuuacca

SEQ ID NO: 1051035 - RNA, 23 nt, Human
uucuuauuuacuuuggaaucucc

SEQ ID NO: 1051036 - RNA, 22 nt, Human
uuucaguuuuugcucgauguau

SEQ ID NO: 1051037 - RNA, 22 nt, Human
uuuuuauaacucuuuugugaca

SEQ ID NO: 1051038 - RNA, 22 nt, Human
ugcugaggucaccuugcugcua

SEQ ID NO: 1051039 - RNA, 22 nt, Human
uauacacugauauaaggaguaa

SEQ ID NO: 1051040 - RNA, 22 nt, Human
ugaacaaacugcauucuucacu

SEQ ID NO: 1051041 - RNA, 22 nt, Human
gaggcagaaguugcagugagca

SEQ ID NO: 1051042 - RNA, 22 nt, Human
cagaaguuugacauguuuagcu

SEQ ID NO: 1051043 - RNA, 22 nt, Human
cagcaagauuuuuaaagcaagg

SEQ ID NO: 1051044 - RNA, 19 nt, Human
ccagaguuggcagagcagg

SEQ ID NO: 1051045 - RNA, 22 nt, Human
aaggcugagguagggccuaaaa

SEQ ID NO: 1051046 - RNA, 22 nt, Human
cuuuguagcugcuucugauuua

SEQ ID NO: 1051047 - RNA, 22 nt, Human
ggccagcagucacagggucaga

SEQ ID NO: 1051048 - RNA, 17 nt, Human
agcugaccagauggacu

SEQ ID NO: 1051049 - RNA, 22 nt, Human
gagggagggccaggucccaacc

SEQ ID NO: 1051050 - RNA, 18 nt, Human
aggcaggcuggagugacu

SEQ ID NO: 1051051 - RNA, 22 nt, Human
uauuuucuguggaggaccagau

SEQ ID NO: 1051052 - RNA, 17 nt, Human
aagacagaagccaugag

SEQ ID NO: 1051053 - RNA, 22 nt, Human
uguauuagguugaugcgaaagu

SEQ ID NO: 1051054 - RNA, 22 nt, Human
cagcugcuguuacugcuuauua

SEQ ID NO: 1051055 - RNA, 22 nt, Human
acaguaaccucuccucugaagg

SEQ ID NO: 1051056 - RNA, 23 nt, Human
ugcugaaguguuggcccugccca

SEQ ID NO: 1051057 - RNA, 22 nt, Human
aaguuacaguuggaacugugaa

SEQ ID NO: 1051058 - RNA, 21 nt, Human
agaggcccucggacugggcgu

SEQ ID NO: 1051059 - RNA, 22 nt, Human
aguggcaggcggagauguagga

SEQ ID NO: 1051060 - RNA, 22 nt, Human
augcuguguggucaaguuaauu

SEQ ID NO: 1051061 - RNA, 18 nt, Human
uugagggaggggcagagu

SEQ ID NO: 1051062 - RNA, 22 nt, Human
gggagacacgcugcaggcauaa

SEQ ID NO: 1051063 - RNA, 22 nt, Human
ccuggccaggcucucagcacug

SEQ ID NO: 1051064 - RNA, 22 nt, Human
uaaauacugaguuggaguuggc

SEQ ID NO: 1051065 - RNA, 22 nt, Human
uuuuauauugagugagaguucc

SEQ ID NO: 1051066 - RNA, 22 nt, Human
uuauuuagucuagaugaauuuu

SEQ ID NO: 1051067 - RNA, 22 nt, Human
ccagagcuaaacacacaggcug

SEQ ID NO: 1051068 - RNA, 22 nt, Human
uaaagcacauaucuuacaauaa

SEQ ID NO: 1051069 - RNA, 22 nt, Human
acacauauauacauauuugugc

SEQ ID NO: 1051070 - RNA, 22 nt, Human
uuugagauggagucuugcucug

SEQ ID NO: 1051071 - RNA, 22 nt, Human
aguaacaucuuugacauuuguu

SEQ ID NO: 1051072 - RNA, 22 nt, Human
cuggggcccgagccuugggcca

SEQ ID NO: 1051073 - RNA, 22 nt, Human
uuggaaaagcguucucuguagc

SEQ ID NO: 1051074 - RNA, 22 nt, Human
acucaggaaaugaagacugguu

SEQ ID NO: 1051075 - RNA, 22 nt, Human
uuuucagaggccuaagagguuu

SEQ ID NO: 1051076 - RNA, 22 nt, Human
gaauuaacuggcaguuagugcu

SEQ ID NO: 1051077 - RNA, 22 nt, Human
auuuggauucuuauuuagcacu

SEQ ID NO: 1051078 - RNA, 22 nt, Human
acugagguuuuuaguguuaaau

SEQ ID NO: 1051079 - RNA, 22 nt, Human
ugccugagugauguggcagcca

SEQ ID NO: 1051080 - RNA, 22 nt, Human
uggcagcaauuugugauguuga

SEQ ID NO: 1051081 - RNA, 22 nt, Human
agucauaugacccuucacaaac

SEQ ID NO: 1051082 - RNA, 22 nt, Human
caggcagcugaggacuuugcua

SEQ ID NO: 1051083 - RNA, 22 nt, Human
uuagugauaggaagccagauug

SEQ ID NO: 1051084 - RNA, 22 nt, Human
ugcucccagggacucuggcugg

SEQ ID NO: 1051085 - RNA, 22 nt, Human
uugcugaauugaauccuuuggu

SEQ ID NO: 1051086 - RNA, 22 nt, Human
auuaaauuaaguggcuaauuua

SEQ ID NO: 1051087 - RNA, 22 nt, Human
uccuggccuugcgucuugggag

SEQ ID NO: 1051088 - RNA, 22 nt, Human
ccagagcugaugggcccagggu

SEQ ID NO: 1051089 - RNA, 22 nt, Human
uauucaaaguaccuucauugcc

SEQ ID NO: 1051090 - RNA, 22 nt, Human
gagggcugcaaugagacagaga

SEQ ID NO: 1051091 - RNA, 22 nt, Human
gaauagcuuccuuuuuuccaaa

SEQ ID NO: 1051092 - RNA, 22 nt, Human
agaauuagucacaauuauagga

SEQ ID NO: 1051093 - RNA, 22 nt, Human
ugccacaguuguuugugcucua

SEQ ID NO: 1051094 - RNA, 22 nt, Human
uauuuccaaaagccuauuauga

SEQ ID NO: 1051095 - RNA, 22 nt, Human
cccaggaugucgaggcugcagu

SEQ ID NO: 1051096 - RNA, 22 nt, Human
ucuucagacccuuagcugugau

SEQ ID NO: 1051097 - RNA, 22 nt, Human
auucuucacaaauauauagaag

SEQ ID NO: 1051098 - RNA, 21 nt, Human
agcaccuuacagcuauaaugg

SEQ ID NO: 1051099 - RNA, 22 nt, Human
uggucuaaauauggcucuaaau

SEQ ID NO: 1051100 - RNA, 22 nt, Human
aacuagucagugauucucagaa

SEQ ID NO: 1051101 - RNA, 22 nt, Human
uggcugagggggcaguucagga

SEQ ID NO: 1051102 - RNA, 22 nt, Human
uuagggaaauaaaauuaucagu

SEQ ID NO: 1051103 - RNA, 22 nt, Human
ucagucucaucaacucuauucc

SEQ ID NO: 1051104 - RNA, 18 nt, Human
ggagcccagaggugaguu

SEQ ID NO: 1051105 - RNA, 22 nt, Human
agccacagagcaggagaccuuu

SEQ ID NO: 1051106 - RNA, 22 nt, Human
gcugagcuagaaaaggaccaca

SEQ ID NO: 1051107 - RNA, 22 nt, Human
gggaagcaggugcagcucgccu

SEQ ID NO: 1051108 - RNA, 22 nt, Human
ucuccugggcuugguugaaguu

SEQ ID NO: 1051109 - RNA, 22 nt, Human
gagagcaggcucucgggggcca

SEQ ID NO: 1051110 - RNA, 22 nt, Human
uugaggucuucauucuugggca

SEQ ID NO: 1051111 - RNA, 22 nt, Human
caaauacuuuauauacuucaaa

SEQ ID NO: 1051112 - RNA, 22 nt, Human
uaauuauaaacugcaguaggua

SEQ ID NO: 1051113 - RNA, 22 nt, Human
gugaggucaccggccguugcca

SEQ ID NO: 1051114 - RNA, 22 nt, Human
cggagaggugggggcagcaucu

SEQ ID NO: 1051115 - RNA, 22 nt, Human
cauuuucaugaguuucuguuca

SEQ ID NO: 1051116 - RNA, 17 nt, Human
agcugagcuggccaggg

SEQ ID NO: 1051117 - RNA, 22 nt, Human
uuucuuaguccuagagugauuu

SEQ ID NO: 1051118 - RNA, 22 nt, Human
ugcugaaacaauaacauacugg

SEQ ID NO: 1051119 - RNA, 22 nt, Human
cacugguagagagaagacaagg

SEQ ID NO: 1051120 - RNA, 22 nt, Human
uacugcauaacuggcauguggg

SEQ ID NO: 1051121 - RNA, 22 nt, Human
ucucucuugucaccccaucugc

SEQ ID NO: 1051122 - RNA, 22 nt, Human
cagagcuggagggaacccuggc

SEQ ID NO: 1051123 - RNA, 22 nt, Human
gaacuguaguuaauacuacaca

SEQ ID NO: 1051124 - RNA, 22 nt, Human
caggcugaggguuaggccuuag

SEQ ID NO: 1051125 - RNA, 22 nt, Human
ugcugaggucauuuccaaguga

SEQ ID NO: 1051126 - RNA, 22 nt, Human
uguucuucuagauugccuuuua

SEQ ID NO: 1051127 - RNA, 22 nt, Human
agacgagggccuggcacacagu

SEQ ID NO: 1051128 - RNA, 22 nt, Human
ucuucucuacaccagcagcccc

SEQ ID NO: 1051129 - RNA, 22 nt, Human
guggcagcggugugcaaggagg

SEQ ID NO: 1051130 - RNA, 22 nt, Human
caacuccuccccagcaugccaa

SEQ ID NO: 1051131 - RNA, 21 nt, Human
ugcuggaaaaagugguucuag

SEQ ID NO: 1051132 - RNA, 22 nt, Human
aggcagcuggaaaacuccaggc

SEQ ID NO: 1051133 - RNA, 22 nt, Human
auguucuguuuuguaauucaua

SEQ ID NO: 1051134 - RNA, 22 nt, Human
acagugagcccacuccaggaga

SEQ ID NO: 1051135 - RNA, 21 nt, Human
auaagcaugcugauuacauuu

SEQ ID NO: 1051136 - RNA, 22 nt, Human
agggagcucuaaguagagggac

SEQ ID NO: 1051137 - RNA, 22 nt, Human
aggauguuaucugugcaggugg

SEQ ID NO: 1051138 - RNA, 22 nt, Human
uaaggccauuauggugggcccg

SEQ ID NO: 1051139 - RNA, 22 nt, Human
gauuuuauauggcauacugugg

SEQ ID NO: 1051140 - RNA, 22 nt, Human
uuaagauagaacccaguagucu

SEQ ID NO: 1051141 - RNA, 22 nt, Human
aaaguauucuugacuguuuuuc

SEQ ID NO: 1051142 - RNA, 22 nt, Human
uggcagcuccggguaggggcug

SEQ ID NO: 1051143 - RNA, 22 nt, Human
cuccaggagggggauggcugua

SEQ ID NO: 1051144 - RNA, 22 nt, Human
cagggcuggauuucauuucuag

SEQ ID NO: 1051145 - RNA, 22 nt, Human
auacaucuagagucauaaaaac

SEQ ID NO: 1051146 - RNA, 20 nt, Human
cugcccagccacugagggau

SEQ ID NO: 1051147 - RNA, 22 nt, Human
aagauaaacucuugauuucuga

SEQ ID NO: 1051148 - RNA, 22 nt, Human
aggcugaggcagguggaucacc

SEQ ID NO: 1051149 - RNA, 22 nt, Human
auucuucacuguuucagaauga

SEQ ID NO: 1051150 - RNA, 22 nt, Human
caagaagugucagcuuuuuaaa

SEQ ID NO: 1051151 - RNA, 22 nt, Human
cccaggagacauauagaaggac

SEQ ID NO: 1051152 - RNA, 22 nt, Human
uuauuuggaaauauggcuucug

SEQ ID NO: 1051153 - RNA, 22 nt, Human
uuucuucauagaccuugucuug

SEQ ID NO: 1051154 - RNA, 22 nt, Human
aacuuucuaauuuuggcugagc

SEQ ID NO: 1051155 - RNA, 22 nt, Human
uuucucuguucucuaacuguaa

SEQ ID NO: 1051156 - RNA, 22 nt, Human
agaaaugacacacaugagacau

SEQ ID NO: 1051157 - RNA, 22 nt, Human
uagcugcugcagcacagggagg

SEQ ID NO: 1051158 - RNA, 22 nt, Human
caaaacugucuagagagagaag

SEQ ID NO: 1051159 - RNA, 22 nt, Human
aagaggaggacgguucccagaa

SEQ ID NO: 1051160 - RNA, 18 nt, Human
aauuuccauaugaauugc

SEQ ID NO: 1051161 - RNA, 17 nt, Human
gccucugcuugugucau

SEQ ID NO: 1051162 - RNA, 22 nt, Human
uuuccucauuuaucugcuggga

SEQ ID NO: 1051163 - RNA, 17 nt, Human
acucaggaucugggagu

SEQ ID NO: 1051164 - RNA, 22 nt, Human
uggagccagagcgcagccuggg

SEQ ID NO: 1051165 - RNA, 20 nt, Human
acaggggcagcacaauaaug

SEQ ID NO: 1051166 - RNA, 20 nt, Human
gggagucuggaugaaagaug

SEQ ID NO: 1051167 - RNA, 22 nt, Human
aggcaagcccccagugaggcuc

SEQ ID NO: 1051168 - RNA, 20 nt, Human
auuaggauuuuaggucauca

SEQ ID NO: 1051169 - RNA, 22 nt, Human
cuggagagagaaaaagccuuaa

SEQ ID NO: 1051170 - RNA, 22 nt, Human
acauuguuugagaauacagaug

SEQ ID NO: 1051171 - RNA, 22 nt, Human
gcccaguaguucaagguugcag

SEQ ID NO: 1051172 - RNA, 22 nt, Human
uagacagagugaagacaagugg

SEQ ID NO: 1051173 - RNA, 22 nt, Human
ccagcagaggggcggagugcag

SEQ ID NO: 1051174 - RNA, 22 nt, Human
uuuaguucucccagucuugauu

SEQ ID NO: 1051175 - RNA, 22 nt, Human
gcugcuugauuagguugacacu

SEQ ID NO: 1051176 - RNA, 19 nt, Human
augucuggguaacagcugc

SEQ ID NO: 1051177 - RNA, 22 nt, Human
aaggcagccagauccuuugggu

SEQ ID NO: 1051178 - RNA, 22 nt, Human
uuagaaaggagcuuauuucuuu

SEQ ID NO: 1051179 - RNA, 22 nt, Human
agugcuuugugcucucacugca

SEQ ID NO: 1051180 - RNA, 22 nt, Human
aauuaggaauaaaugaguacuu

SEQ ID NO: 1051181 - RNA, 22 nt, Human
ggcugcugaaguguggcaaucu

SEQ ID NO: 1051182 - RNA, 19 nt, Human
cugaagucuuuucagcugg

SEQ ID NO: 1051183 - RNA, 23 nt, Human
aggcagcagguuguccaggguga

SEQ ID NO: 1051184 - RNA, 22 nt, Human
aggcagaggagaaugaucuucc

SEQ ID NO: 1051185 - RNA, 22 nt, Human
acuauuagcauaucaugaaugg

SEQ ID NO: 1051186 - RNA, 22 nt, Human
ucugagguucuguuuucaacug

SEQ ID NO: 1051187 - RNA, 22 nt, Human
aaucauucuuauuucacagcaa

SEQ ID NO: 1051188 - RNA, 22 nt, Human
ugaugaaacugagguuccaaga

SEQ ID NO: 1051189 - RNA, 22 nt, Human
ggccagaaguuggaaaagagcc

SEQ ID NO: 1051190 - RNA, 22 nt, Human
gaaaaaugagcugaugucaggg

SEQ ID NO: 1051191 - RNA, 22 nt, Human
uagcacauuguugaccagaagg

SEQ ID NO: 1051192 - RNA, 22 nt, Human
aaauaguuuagcucucauuuca

SEQ ID NO: 1051193 - RNA, 22 nt, Human
agcaccuguugcacuucauaau

SEQ ID NO: 1051194 - RNA, 22 nt, Human
uauuuuaaagacugccagccua

SEQ ID NO: 1051195 - RNA, 22 nt, Human
aagggaggccagagguuuugca

SEQ ID NO: 1051196 - RNA, 22 nt, Human
cccaggaaccuaccagcucgag

SEQ ID NO: 1051197 - RNA, 22 nt, Human
aaggcugaggagggccugcagg

SEQ ID NO: 1051198 - RNA, 22 nt, Human
uugauguacagaauuguucaca

SEQ ID NO: 1051199 - RNA, 22 nt, Human
gcaggcuggucugaccaucccu

SEQ ID NO: 1051200 - RNA, 20 nt, Human
cucuccucacccgugucagg

SEQ ID NO: 1051201 - RNA, 22 nt, Human
gauuuuauuagcccaaacuuug

SEQ ID NO: 1051202 - RNA, 22 nt, Human
cacucuccagcacaccccauuu

SEQ ID NO: 1051203 - RNA, 22 nt, Human
aggcagugcucaagacagcagc

SEQ ID NO: 1051204 - RNA, 22 nt, Human
aaaggaagauugagcuuuucca

SEQ ID NO: 1051205 - RNA, 22 nt, Human
ucugagccguauggcuuggcua

SEQ ID NO: 1051206 - RNA, 22 nt, Human
aaaagucugcucucauuucaga

SEQ ID NO: 1051207 - RNA, 22 nt, Human
auuuccauagagcgucucacag

SEQ ID NO: 1051208 - RNA, 22 nt, Human
gagcugagcuuaacuccuugaa

SEQ ID NO: 1051209 - RNA, 22 nt, Human
guuuauuagaguuuucugucug

SEQ ID NO: 1051210 - RNA, 22 nt, Human
ucagagaguuacacaaauuguu

SEQ ID NO: 1051211 - RNA, 22 nt, Human
aauuaggaaauucagccauuuu

SEQ ID NO: 1051212 - RNA, 22 nt, Human
uagaaagacagagguuuugucu

SEQ ID NO: 1051213 - RNA, 22 nt, Human
ucauauuaggguaaugauaaga

SEQ ID NO: 1051214 - RNA, 20 nt, Human
aggaggcauagucuggaaag

SEQ ID NO: 1051215 - RNA, 22 nt, Human
uaaaacugaauacauacugagg

SEQ ID NO: 1051216 - RNA, 21 nt, Human
ggcagcguguggacaggaagg

SEQ ID NO: 1051217 - RNA, 22 nt, Human
gcuccuggagagauugagaaag

SEQ ID NO: 1051218 - RNA, 22 nt, Human
aagcugaggucaaguagcuagu

SEQ ID NO: 1051219 - RNA, 21 nt, Human
uuccagagauuguuucaccug

SEQ ID NO: 1051220 - RNA, 22 nt, Human
ucuccuggaagaauaccacacu

SEQ ID NO: 1051221 - RNA, 22 nt, Human
ucaggcugcuguacugugaaug

SEQ ID NO: 1051222 - RNA, 23 nt, Human
gugcugugagccccuuggccucc

SEQ ID NO: 1051223 - RNA, 22 nt, Human
uggcucagcgcggccuggucuu

SEQ ID NO: 1051224 - RNA, 22 nt, Human
uucugugauugacauguggcuu

SEQ ID NO: 1051225 - RNA, 18 nt, Human
uaacugguuucuucccau

SEQ ID NO: 1051226 - RNA, 22 nt, Human
ggcugagacuagagugaggcau

SEQ ID NO: 1051227 - RNA, 22 nt, Human
guaaaauagaauaacguggcua

SEQ ID NO: 1051228 - RNA, 22 nt, Human
gaggcagcaucuauggugggaa

SEQ ID NO: 1051229 - RNA, 22 nt, Human
ggaggcagaauagagugugggu

SEQ ID NO: 1051230 - RNA, 19 nt, Human
uauucaggaugauggcaca

SEQ ID NO: 1051231 - RNA, 19 nt, Human
cccaggaggcggagguugc

SEQ ID NO: 1051232 - RNA, 22 nt, Human
acucugggauuguuucugguau

SEQ ID NO: 1051233 - RNA, 22 nt, Human
uggagucugugaugcucugggu

SEQ ID NO: 1051234 - RNA, 22 nt, Human
cucccucaggccuuagcccugc

SEQ ID NO: 1051235 - RNA, 22 nt, Human
agggaggucuuugaggggcuua

SEQ ID NO: 1051236 - RNA, 22 nt, Human
uccugagcugccgcaucagcag

SEQ ID NO: 1051237 - RNA, 22 nt, Human
ggcagcuuccugagccagcagc

SEQ ID NO: 1051238 - RNA, 22 nt, Human
caauacuuccuuguuagaggca

SEQ ID NO: 1051239 - RNA, 22 nt, Human
auagucacucuguuagguguuu

SEQ ID NO: 1051240 - RNA, 22 nt, Human
uucuucucucauagauuaaggu

SEQ ID NO: 1051241 - RNA, 22 nt, Human
cuucuucaagagaaugggagac

SEQ ID NO: 1051242 - RNA, 22 nt, Human
uggagaggagcaccauggccau

SEQ ID NO: 1051243 - RNA, 22 nt, Human
ugcccuggcuggagugcagugg

SEQ ID NO: 1051244 - RNA, 22 nt, Human
gucugcuggugccuggccugcg

SEQ ID NO: 1051245 - RNA, 22 nt, Human
ccugcuguaaugugucuuuauu

SEQ ID NO: 1051246 - RNA, 22 nt, Human
uggcuucugagcauugaaacgu

SEQ ID NO: 1051247 - RNA, 22 nt, Human
aacuccagugucagcugcaaug

SEQ ID NO: 1051248 - RNA, 22 nt, Human
uuagaaagguuuugcucugaaa

SEQ ID NO: 1051249 - RNA, 20 nt, Human
aagcacauuucuacaauaau

SEQ ID NO: 1051250 - RNA, 22 nt, Human
uggacaaaugauuucuaccuuu

SEQ ID NO: 1051251 - RNA, 22 nt, Human
augcugugauuguagaaauauu

SEQ ID NO: 1051252 - RNA, 22 nt, Human
gaaggccacaagagaaguuaag

SEQ ID NO: 1051253 - RNA, 22 nt, Human
cacaaaugugcagaaaugugag

SEQ ID NO: 1051254 - RNA, 22 nt, Human
auacacuuuagaaaaacgcugc

SEQ ID NO: 1051255 - RNA, 22 nt, Human
cuguccugcccacccugcaggg

SEQ ID NO: 1051256 - RNA, 22 nt, Human
cugagccccaucugaggugccc

SEQ ID NO: 1051257 - RNA, 22 nt, Human
ucuggcugacauccuguaugag

SEQ ID NO: 1051258 - RNA, 22 nt, Human
cugggcaauaugcugggccugg

SEQ ID NO: 1051259 - RNA, 22 nt, Human
cagcuucugucugauuagcaag

SEQ ID NO: 1051260 - RNA, 22 nt, Human
ccuaauuaucucccaaagaucc

SEQ ID NO: 1051261 - RNA, 22 nt, Human
aaggaaccuggaguagagggag

SEQ ID NO: 1051262 - RNA, 22 nt, Human
uuccuggcaccaccacuucuag

SEQ ID NO: 1051263 - RNA, 22 nt, Human
ggcaggcaucauguggucauua

SEQ ID NO: 1051264 - RNA, 22 nt, Human
ucuggccauggcaagccgagug

SEQ ID NO: 1051265 - RNA, 22 nt, Human
ccucaggauccgcaggugcagu

SEQ ID NO: 1051266 - RNA, 22 nt, Human
uaccauuucauucuuuccucau

SEQ ID NO: 1051267 - RNA, 22 nt, Human
ucacuucacacccacuaucaug

SEQ ID NO: 1051268 - RNA, 22 nt, Human
uuagagaugucccaaaaugaag

SEQ ID NO: 1051269 - RNA, 22 nt, Human
gcugcugugugggagacaggcg

SEQ ID NO: 1051270 - RNA, 23 nt, Human
gguccacccgagccugcagcuuc

SEQ ID NO: 1051271 - RNA, 22 nt, Human
caccuugugauccucuugccuu

SEQ ID NO: 1051272 - RNA, 22 nt, Human
uccaggagguugagacugcagu

SEQ ID NO: 1051273 - RNA, 22 nt, Human
ucucauugguauauacaugugu

SEQ ID NO: 1051274 - RNA, 22 nt, Human
aggagaggguggcauuaaguuu

SEQ ID NO: 1051275 - RNA, 22 nt, Human
cugagcugcaguccuggcucug

SEQ ID NO: 1051276 - RNA, 19 nt, Human
gccugccuggguuucugag

SEQ ID NO: 1051277 - RNA, 22 nt, Human
uccaggaggcagggcugugccc

SEQ ID NO: 1051278 - RNA, 22 nt, Human
caguaaagcauguaugucuuca

SEQ ID NO: 1051279 - RNA, 22 nt, Human
cuguuuauuacacuggauagca

SEQ ID NO: 1051280 - RNA, 22 nt, Human
cgaggcaggcaggcggaggaua

SEQ ID NO: 1051281 - RNA, 22 nt, Human
guuaggauauggugaaauggag

SEQ ID NO: 1051282 - RNA, 18 nt, Human
ucauuagggauugcaaag

SEQ ID NO: 1051283 - RNA, 22 nt, Human
acaggcagcaaaaucagccuca

SEQ ID NO: 1051284 - RNA, 22 nt, Human
ucauguuaucuuggcucuggga

SEQ ID NO: 1051285 - RNA, 22 nt, Human
agcccagggacagggcggaugu

SEQ ID NO: 1051286 - RNA, 22 nt, Human
gacuuucuugcagaaauauucc

SEQ ID NO: 1051287 - RNA, 22 nt, Human
aguaaucaauuuuucgguggau

SEQ ID NO: 1051288 - RNA, 22 nt, Human
ugugcaggugcaggaagggggc

SEQ ID NO: 1051289 - RNA, 22 nt, Human
aagggcuggaucucucugagca

SEQ ID NO: 1051290 - RNA, 22 nt, Human
gcuguguuugacaguagcagac

SEQ ID NO: 1051291 - RNA, 17 nt, Human
uggcaugaggguguggg

SEQ ID NO: 1051292 - RNA, 22 nt, Human
auucaaguggcugcuauguuaa

SEQ ID NO: 1051293 - RNA, 22 nt, Human
ugaggggagcccgcccuggacg

SEQ ID NO: 1051294 - RNA, 22 nt, Human
caguucuuuguggggaguucuc

SEQ ID NO: 1051295 - RNA, 22 nt, Human
agugugagcccuggaguggugc

SEQ ID NO: 1051296 - RNA, 22 nt, Human
aagcagcagcaggauuaaagag

SEQ ID NO: 1051297 - RNA, 22 nt, Human
agcaguuacuaguuaaaugcau

SEQ ID NO: 1051298 - RNA, 22 nt, Human
ucuucuucccaucccucaaaug

SEQ ID NO: 1051299 - RNA, 22 nt, Human
gaggcuccagcgacaccuaggc

SEQ ID NO: 1051300 - RNA, 22 nt, Human
aaggagagguuguccguguugu

SEQ ID NO: 1051301 - RNA, 22 nt, Human
uacacacagaggccaugggauu

SEQ ID NO: 1051302 - RNA, 22 nt, Human
uucucagagugaccaagucuuu

SEQ ID NO: 1051303 - RNA, 22 nt, Human
uuaugaaguuccuguuacagug

SEQ ID NO: 1051304 - RNA, 22 nt, Human
uagcuaucuguguccagaucca

SEQ ID NO: 1051305 - RNA, 22 nt, Human
gggcugagaaguugaucccaag

SEQ ID NO: 1051306 - RNA, 21 nt, Human
gauugaaaccauggcagugag

SEQ ID NO: 1051307 - RNA, 22 nt, Human
uccugccuuagagcaaggaaaa

SEQ ID NO: 1051308 - RNA, 22 nt, Human
aauuaggaaaugagaguauuug

SEQ ID NO: 1051309 - RNA, 22 nt, Human
agcagcuguggggacaagggua

SEQ ID NO: 1051310 - RNA, 22 nt, Human
ucuccucuauuucuguauguau

SEQ ID NO: 1051311 - RNA, 22 nt, Human
uuugcagucuggccugcuuugg

SEQ ID NO: 1051312 - RNA, 22 nt, Human
ccugaggucagcgguucccaca

SEQ ID NO: 1051313 - RNA, 22 nt, Human
cugagagccuccuguuggcuag

SEQ ID NO: 1051314 - RNA, 18 nt, Human
gugcugugggcaguggcc

SEQ ID NO: 1051315 - RNA, 22 nt, Human
ugcugagggcagaugaauuaga

SEQ ID NO: 1051316 - RNA, 22 nt, Human
uauagaggccaccaacaugaaa

SEQ ID NO: 1051317 - RNA, 22 nt, Human
gagguccacugaggcaacaggg

SEQ ID NO: 1051318 - RNA, 22 nt, Human
aagggagguaaagcuauuuaaa

SEQ ID NO: 1051319 - RNA, 22 nt, Human
aggcugcucaguagauggagcu

SEQ ID NO: 1051320 - RNA, 22 nt, Human
aaaggccaccaacaugaagcau

SEQ ID NO: 1051321 - RNA, 22 nt, Human
gcaaagcauucuguggagucua

SEQ ID NO: 1051322 - RNA, 22 nt, Human
ucuuggcugcugccaauuuacu

SEQ ID NO: 1051323 - RNA, 22 nt, Human
auucaaguucuucugucuuugc

SEQ ID NO: 1051324 - RNA, 22 nt, Human
ccagguaggagagagggauccu

SEQ ID NO: 1051325 - RNA, 22 nt, Human
aaugucugccagaacugaucau

SEQ ID NO: 1051326 - RNA, 22 nt, Human
uggcagagcaaaaagauagaau

SEQ ID NO: 1051327 - RNA, 22 nt, Human
uggcaugaguauaggcuucuca

SEQ ID NO: 1051328 - RNA, 22 nt, Human
ggcugcagggcagcuggugugg

SEQ ID NO: 1051329 - RNA, 22 nt, Human
aggcugagcugguagugaguac

SEQ ID NO: 1051330 - RNA, 21 nt, Human
uggcaggcagcuggaagcuug

SEQ ID NO: 1051331 - RNA, 21 nt, Human
ucaggagagcccaucuacaaa

SEQ ID NO: 1051332 - RNA, 22 nt, Human
cuuaagaugaggucaugcuaua

SEQ ID NO: 1051333 - RNA, 22 nt, Human
guccaucuagaauuuauuucua

SEQ ID NO: 1051334 - RNA, 22 nt, Human
cugagccagggccacacaugga

SEQ ID NO: 1051335 - RNA, 22 nt, Human
uuggaaauacagcaguuacuuu

SEQ ID NO: 1051336 - RNA, 22 nt, Human
uagaacuguccaagucugagcu

SEQ ID NO: 1051337 - RNA, 22 nt, Human
ccuccugggccuugcucuguga

SEQ ID NO: 1051338 - RNA, 22 nt, Human
gucugucucccugugacugaga

SEQ ID NO: 1051339 - RNA, 22 nt, Human
ccacagagcauuagauuucaga

SEQ ID NO: 1051340 - RNA, 22 nt, Human
uaucuaaaggauuuaauuuagu

SEQ ID NO: 1051341 - RNA, 22 nt, Human
acaguaacaaauggccugagga

SEQ ID NO: 1051342 - RNA, 22 nt, Human
acauuuaaccuuugaggaacug

SEQ ID NO: 1051343 - RNA, 22 nt, Human
ccacagcugaccgcaggugagc

SEQ ID NO: 1051344 - RNA, 22 nt, Human
aagaagagaacuggcauccuaa

SEQ ID NO: 1051345 - RNA, 22 nt, Human
cugaggccucguuggcuggaac

SEQ ID NO: 1051346 - RNA, 22 nt, Human
uucaggaugaaagugugcaaca

SEQ ID NO: 1051347 - RNA, 21 nt, Human
ugcacuucaguggcuaaauuc

SEQ ID NO: 1051348 - RNA, 19 nt, Human
gaggcgaggcgugcaggag

SEQ ID NO: 1051349 - RNA, 22 nt, Human
cagagccacuuggagaugagaa

SEQ ID NO: 1051350 - RNA, 22 nt, Human
aggcacaggccucagcacccag

SEQ ID NO: 1051351 - RNA, 22 nt, Human
gaacugguuacagagggauguu

SEQ ID NO: 1051352 - RNA, 22 nt, Human
uugacuucagccuguacuugua

SEQ ID NO: 1051353 - RNA, 22 nt, Human
ucuacugcacuggugucucauc

SEQ ID NO: 1051354 - RNA, 22 nt, Human
gagugucaaggcucucuuuggc

SEQ ID NO: 1051355 - RNA, 22 nt, Human
gacccuccuacuacccuggaaa

SEQ ID NO: 1051356 - RNA, 22 nt, Human
agugucagccugggcaaggaac

SEQ ID NO: 1051357 - RNA, 22 nt, Human
gaggagaagcuaagaaacacag

SEQ ID NO: 1051358 - RNA, 22 nt, Human
aggguagguguaagauagcccu

SEQ ID NO: 1051359 - RNA, 23 nt, Human
aggcccaacucugugagggcugc

SEQ ID NO: 1051360 - RNA, 23 nt, Human
ggcugagaagucccaugauaggu

SEQ ID NO: 1051361 - RNA, 22 nt, Human
acugccugcucauaacauugcu

SEQ ID NO: 1051362 - RNA, 22 nt, Human
cuugaaagaagggucuuuuaau

SEQ ID NO: 1051363 - RNA, 22 nt, Human
ucacaguaaaagcauggaagag

SEQ ID NO: 1051364 - RNA, 22 nt, Human
gauuaggagggagaggcaagua

SEQ ID NO: 1051365 - RNA, 22 nt, Human
uuugaagugggcauuagaaccu

SEQ ID NO: 1051366 - RNA, 22 nt, Human
aaaaaucuaugacugcuucucc

SEQ ID NO: 1051367 - RNA, 22 nt, Human
ggguacagagagaugagguaac

SEQ ID NO: 1051368 - RNA, 22 nt, Human
gccaggaggucagccccucaac

SEQ ID NO: 1051369 - RNA, 22 nt, Human
cagggcuguggaaaacuggugc

SEQ ID NO: 1051370 - RNA, 21 nt, Human
uggcagacaggaggagcucac

SEQ ID NO: 1051371 - RNA, 22 nt, Human
aaggcugaaagaccuugaaccu

SEQ ID NO: 1051372 - RNA, 22 nt, Human
gggcagcucagccaccaugcag

SEQ ID NO: 1051373 - RNA, 20 nt, Human
ccagaagagaugaucaucca

SEQ ID NO: 1051374 - RNA, 22 nt, Human
aaggcugaauucaaggguaggc

SEQ ID NO: 1051375 - RNA, 22 nt, Human
aggacaggauugagcugaacug

SEQ ID NO: 1051376 - RNA, 22 nt, Human
auuaggcagggcaugguggcuc

SEQ ID NO: 1051377 - RNA, 21 nt, Human
ggcugcagggagcccuggggu

SEQ ID NO: 1051378 - RNA, 22 nt, Human
gaggcacuggaggaaaggagaa

SEQ ID NO: 1051379 - RNA, 21 nt, Human
agcugagguaaggcaagagag

SEQ ID NO: 1051380 - RNA, 22 nt, Human
cagaagaguagcugaacaaguu

SEQ ID NO: 1051381 - RNA, 22 nt, Human
gagcgauguggguauguagaag

SEQ ID NO: 1051382 - RNA, 22 nt, Human
agggagcuucuggccucagccu

SEQ ID NO: 1051383 - RNA, 22 nt, Human
uuuauuugaaucaggggagaau

SEQ ID NO: 1051384 - RNA, 22 nt, Human
cuucucagaggccagaagcuau

SEQ ID NO: 1051385 - RNA, 22 nt, Human
ucugucuucaucagcaugugau

SEQ ID NO: 1051386 - RNA, 22 nt, Human
auuguucaaagugcuuugcaug

SEQ ID NO: 1051387 - RNA, 22 nt, Human
aguuucuuuagauagaaaguuc

SEQ ID NO: 1051388 - RNA, 20 nt, Human
ucauuucuugggguuccaag

SEQ ID NO: 1051389 - RNA, 21 nt, Human
gcuguugcccgccgccucuuc

SEQ ID NO: 1051390 - RNA, 22 nt, Human
gcaggcugaaacucggggucua

SEQ ID NO: 1051391 - RNA, 22 nt, Human
gacccaggcucgugggacggcu

SEQ ID NO: 1051392 - RNA, 22 nt, Human
ugcugcugaugcauagucugcu

SEQ ID NO: 1051393 - RNA, 22 nt, Human
gugagggguggcugagcaguuu

SEQ ID NO: 1051394 - RNA, 22 nt, Human
guggccaagagauaaaauugug

SEQ ID NO: 1051395 - RNA, 21 nt, Human
uuuauuaacaacuguggacgu

SEQ ID NO: 1051396 - RNA, 22 nt, Human
uuuuaguuguaguuggugagga

SEQ ID NO: 1051397 - RNA, 18 nt, Human
cugcugugucgucugggc

SEQ ID NO: 1051398 - RNA, 22 nt, Human
acuucaugcagaagagagcugu

SEQ ID NO: 1051399 - RNA, 22 nt, Human
cugucuggauauaccuuggcca

SEQ ID NO: 1051400 - RNA, 22 nt, Human
uuugcaauuugugcugcaaaug

SEQ ID NO: 1051401 - RNA, 22 nt, Human
auacauacauguaugcacauac

SEQ ID NO: 1051402 - RNA, 22 nt, Human
uccugaggcucacuuugaaugu

SEQ ID NO: 1051403 - RNA, 22 nt, Human
uauuugaaaguguacaaaaacu

SEQ ID NO: 1051404 - RNA, 22 nt, Human
acuguaacacaaugguaucugu

SEQ ID NO: 1051405 - RNA, 18 nt, Human
ucugagguggacgaggag

SEQ ID NO: 1051406 - RNA, 22 nt, Human
aucaggauccaccuugagccug

SEQ ID NO: 1051407 - RNA, 22 nt, Human
agcaccugccugcauuggcuau

SEQ ID NO: 1051408 - RNA, 22 nt, Human
cagcugacgccagaguggaauu

SEQ ID NO: 1051409 - RNA, 22 nt, Human
aagggcagagggaaucccacau

SEQ ID NO: 1051410 - RNA, 22 nt, Human
cugccaucugagccaaaagugc

SEQ ID NO: 1051411 - RNA, 22 nt, Human
ugcccagggauaagccuagaga

SEQ ID NO: 1051412 - RNA, 22 nt, Human
uggcagagugcagaagaggcau

SEQ ID NO: 1051413 - RNA, 22 nt, Human
ugugauauuugaguauugucaa

SEQ ID NO: 1051414 - RNA, 21 nt, Human
ugcugaugucagagaagcaag

SEQ ID NO: 1051415 - RNA, 22 nt, Human
aagcagcuggaagaguaagaug

SEQ ID NO: 1051416 - RNA, 22 nt, Human
ugaggcuccuuguagagagugg

SEQ ID NO: 1051417 - RNA, 22 nt, Human
cccaggaggcagauguugcagu

SEQ ID NO: 1051418 - RNA, 22 nt, Human
uuagccauauagaaaaagagcu

SEQ ID NO: 1051419 - RNA, 22 nt, Human
uuuagaaguucacacauuuaaa

SEQ ID NO: 1051420 - RNA, 22 nt, Human
ggcagcucacgggcauggggug

SEQ ID NO: 1051421 - RNA, 22 nt, Human
uaacugguuucauaucauuucc

SEQ ID NO: 1051422 - RNA, 22 nt, Human
caugcuguguguuuuagcucca

SEQ ID NO: 1051423 - RNA, 22 nt, Human
cugaggcuuugugugcaugccu

SEQ ID NO: 1051424 - RNA, 22 nt, Human
uaacauauuguguggcacuagg

SEQ ID NO: 1051425 - RNA, 22 nt, Human
aaagcagaacugagagagcugg

SEQ ID NO: 1051426 - RNA, 23 nt, Human
accaggaguugucucaggaaaca

SEQ ID NO: 1051427 - RNA, 22 nt, Human
guggccaaaaggaagaagguua

SEQ ID NO: 1051428 - RNA, 22 nt, Human
ggcugcuguacugaugucaguu

SEQ ID NO: 1051429 - RNA, 22 nt, Human
aaguguagauuauggagugucu

SEQ ID NO: 1051430 - RNA, 22 nt, Human
cuuugaagagauuacugugcuc

SEQ ID NO: 1051431 - RNA, 22 nt, Human
aagaacugugcuccaggcucca

SEQ ID NO: 1051432 - RNA, 22 nt, Human
ucuccuggccuuuagguuaagg

SEQ ID NO: 1051433 - RNA, 22 nt, Human
ucacaaaugaggaaaucgagca

SEQ ID NO: 1051434 - RNA, 22 nt, Human
ucuucagaggaagucagucuuu

SEQ ID NO: 1051435 - RNA, 22 nt, Human
uuuuaucuucauuccuaucuac

SEQ ID NO: 1051436 - RNA, 22 nt, Human
uccaugagcuagcuuuccaaag

SEQ ID NO: 1051437 - RNA, 22 nt, Human
caaauacuuacugaaccugugc

SEQ ID NO: 1051438 - RNA, 22 nt, Human
ucugcugugauuugcuaccugu

SEQ ID NO: 1051439 - RNA, 22 nt, Human
auuaggaaguaaguaucacaag

SEQ ID NO: 1051440 - RNA, 23 nt, Human
ccacagagcugccaauuccugug

SEQ ID NO: 1051441 - RNA, 22 nt, Human
uugcucaggcuggugugcagug

SEQ ID NO: 1051442 - RNA, 22 nt, Human
aaggcagcagaggaaaggugcu

SEQ ID NO: 1051443 - RNA, 22 nt, Human
cccuggaggucagaggccuggg

SEQ ID NO: 1051444 - RNA, 22 nt, Human
ucaggcugcagcugucagcagc

SEQ ID NO: 1051445 - RNA, 22 nt, Human
ucucaggacuuugggaagcuca

SEQ ID NO: 1051446 - RNA, 22 nt, Human
cuuugaauugccguuucaucug

SEQ ID NO: 1051447 - RNA, 22 nt, Human
ccuccuggaggcucuagggaaa

SEQ ID NO: 1051448 - RNA, 22 nt, Human
augaggcaucugcagucacuag

SEQ ID NO: 1051449 - RNA, 22 nt, Human
cugagguagcugugaauguucu

SEQ ID NO: 1051450 - RNA, 22 nt, Human
cccaggagagagacuugaaucu

SEQ ID NO: 1051451 - RNA, 22 nt, Human
gcaguucuacuuauccauagac

SEQ ID NO: 1051452 - RNA, 22 nt, Human
cacagucucuguugcugggacc

SEQ ID NO: 1051453 - RNA, 22 nt, Human
acagaauugaaaguauaaucug

SEQ ID NO: 1051454 - RNA, 19 nt, Human
uguguguuuauauauguau

SEQ ID NO: 1051455 - RNA, 22 nt, Human
acccagagcagagcuuggcuuc

SEQ ID NO: 1051456 - RNA, 22 nt, Human
auggcuucugucuuggaaauuu

SEQ ID NO: 1051457 - RNA, 22 nt, Human
uacccagggcuuuucugaugca

SEQ ID NO: 1051458 - RNA, 22 nt, Human
ggagaggagcuauugggggcuc

SEQ ID NO: 1051459 - RNA, 22 nt, Human
uuugaagucaggcuuucuaccc

SEQ ID NO: 1051460 - RNA, 22 nt, Human
ccaggagaugggaaaguagcag

SEQ ID NO: 1051461 - RNA, 22 nt, Human
cuggcucaccuccgcuccagca

SEQ ID NO: 1051462 - RNA, 22 nt, Human
uccaggugagugcaggugcaga

SEQ ID NO: 1051463 - RNA, 22 nt, Human
cauuuucagcacccaucugaaa

SEQ ID NO: 1051464 - RNA, 20 nt, Human
uauuuacaacuuagagccuc

SEQ ID NO: 1051465 - RNA, 22 nt, Human
aagaugacccugagggcaauug

SEQ ID NO: 1051466 - RNA, 22 nt, Human
uucuaaauuuuggaagaugcag

SEQ ID NO: 1051467 - RNA, 22 nt, Human
ucauuuguugaacuuuagugcg

SEQ ID NO: 1051468 - RNA, 22 nt, Human
acaggccacaguggagucucug

SEQ ID NO: 1051469 - RNA, 22 nt, Human
cagcugacccgugggaggcggg

SEQ ID NO: 1051470 - RNA, 22 nt, Human
cacaauguauauguauaucaaa

SEQ ID NO: 1051471 - RNA, 22 nt, Human
aagugaguucagcauucacucg

SEQ ID NO: 1051472 - RNA, 22 nt, Human
cccaggaggcagagauagcagu

SEQ ID NO: 1051473 - RNA, 19 nt, Human
agcagcuggagguggagug

SEQ ID NO: 1051474 - RNA, 22 nt, Human
acaaugaaaaaauuuacugugg

SEQ ID NO: 1051475 - RNA, 22 nt, Human
ccucaugguacuuacuguagcu

SEQ ID NO: 1051476 - RNA, 22 nt, Human
gagcacugauuuauuuuugucu

SEQ ID NO: 1051477 - RNA, 22 nt, Human
cugacuuugcucauaggucaaa

SEQ ID NO: 1051478 - RNA, 22 nt, Human
ugaggcaggaggauugcaggau

SEQ ID NO: 1051479 - RNA, 22 nt, Human
aaguaguuggaaauaagacaga

SEQ ID NO: 1051480 - RNA, 22 nt, Human
agcaaaagauagauuaacaaga

SEQ ID NO: 1051481 - RNA, 22 nt, Human
gagcugaggcucaggcuggcgu

SEQ ID NO: 1051482 - RNA, 22 nt, Human
cuggcugaauccuagucucaua

SEQ ID NO: 1051483 - RNA, 22 nt, Human
agggagugguuaagaaggugca

SEQ ID NO: 1051484 - RNA, 22 nt, Human
caaggccaguuucuccuaguca

SEQ ID NO: 1051485 - RNA, 22 nt, Human
ggccaaaugaaggcaaugggac

SEQ ID NO: 1051486 - RNA, 22 nt, Human
cucacugugaccucagcagaca

SEQ ID NO: 1051487 - RNA, 22 nt, Human
ccuuuuauacucagugauauca

SEQ ID NO: 1051488 - RNA, 22 nt, Human
uggcagcagccauggaaggccc

SEQ ID NO: 1051489 - RNA, 18 nt, Human
ggagcccagaggacagga

SEQ ID NO: 1051490 - RNA, 22 nt, Human
gcagggaagaucuuggagcugc

SEQ ID NO: 1051491 - RNA, 22 nt, Human
aagugaagaaauacaugagaau

SEQ ID NO: 1051492 - RNA, 21 nt, Human
caucuuagguuguacauauau

SEQ ID NO: 1051493 - RNA, 19 nt, Human
gagcgcagagggcagggga

SEQ ID NO: 1051494 - RNA, 22 nt, Human
ggaugggagcagaggacgacca

SEQ ID NO: 1051495 - RNA, 22 nt, Human
gaggcagcaaaauauaucauaa

SEQ ID NO: 1051496 - RNA, 21 nt, Human
gagugcagcaagguagagucu

SEQ ID NO: 1051497 - RNA, 22 nt, Human
cagacaggcaggugcugcuuug

SEQ ID NO: 1051498 - RNA, 22 nt, Human
cccaggaacuccagagcuccuc

SEQ ID NO: 1051499 - RNA, 22 nt, Human
ucucugguuauuaacuaacucc

SEQ ID NO: 1051500 - RNA, 22 nt, Human
cccuggagcuagucugagcaga

SEQ ID NO: 1051501 - RNA, 22 nt, Human
auaaucuuucuuuuccagauag

SEQ ID NO: 1051502 - RNA, 22 nt, Human
acagcagcuugcgugucugguc

SEQ ID NO: 1051503 - RNA, 22 nt, Human
acagaaauugcuaauagcucau

SEQ ID NO: 1051504 - RNA, 22 nt, Human
gaaggccaagaggcuccaagau

SEQ ID NO: 1051505 - RNA, 22 nt, Human
aggcuuagaaauucagcugagu

SEQ ID NO: 1051506 - RNA, 22 nt, Human
uuuguuaauucuuauguuagag

SEQ ID NO: 1051507 - RNA, 22 nt, Human
ggucugagagccacugaauccc

SEQ ID NO: 1051508 - RNA, 22 nt, Human
gagggaauggugugcaagaggu

SEQ ID NO: 1051509 - RNA, 22 nt, Human
ggcagccaugcacgcugccugg

SEQ ID NO: 1051510 - RNA, 22 nt, Human
cagcagagggagccauugaaau

SEQ ID NO: 1051511 - RNA, 22 nt, Human
gcugagcagguuugaugcuuuu

SEQ ID NO: 1051512 - RNA, 22 nt, Human
uagggcagaguccaggaugggc

SEQ ID NO: 1051513 - RNA, 22 nt, Human
agcuccugcgcacggugcacac

SEQ ID NO: 1051514 - RNA, 22 nt, Human
gcaccuuuuucuaggagaaugu

SEQ ID NO: 1051515 - RNA, 22 nt, Human
uaaggccaaggggccauagucu

SEQ ID NO: 1051516 - RNA, 22 nt, Human
cauuuuaaaugauuuaagccaa

SEQ ID NO: 1051517 - RNA, 22 nt, Human
gaggccaggaagcccaagauca

SEQ ID NO: 1051518 - RNA, 22 nt, Human
ucacauucucagcaucuauaca

SEQ ID NO: 1051519 - RNA, 22 nt, Human
aaggcagcccuggcucagccug

SEQ ID NO: 1051520 - RNA, 22 nt, Human
uccugccuucauacugcuguau

SEQ ID NO: 1051521 - RNA, 22 nt, Human
caaauacucuggauguguuugu

SEQ ID NO: 1051522 - RNA, 22 nt, Human
cugcuucacccaacuuugggau

SEQ ID NO: 1051523 - RNA, 22 nt, Human
agggggugcauuugugaaugaa

SEQ ID NO: 1051524 - RNA, 22 nt, Human
auuaaggaauguaggcaagaag

SEQ ID NO: 1051525 - RNA, 22 nt, Human
aaguuacagucagagguuaaca

SEQ ID NO: 1051526 - RNA, 22 nt, Human
gcugccucccagagcccugcag

SEQ ID NO: 1051527 - RNA, 22 nt, Human
acaguaauugugaacuuaacgu

SEQ ID NO: 1051528 - RNA, 22 nt, Human
caaaugaagagggcaacuucug

SEQ ID NO: 1051529 - RNA, 19 nt, Human
ggggagaacuagagacagc

SEQ ID NO: 1051530 - RNA, 22 nt, Human
uacaccuuaaucauaugugucu

SEQ ID NO: 1051531 - RNA, 22 nt, Human
cugccuggcauggagaagagaa

SEQ ID NO: 1051532 - RNA, 22 nt, Human
agugcugacucugggcacagug

SEQ ID NO: 1051533 - RNA, 21 nt, Human
uuugaaagcuacaucuauagc

SEQ ID NO: 1051534 - RNA, 22 nt, Human
ccaggcugggcuacaaguugag

SEQ ID NO: 1051535 - RNA, 22 nt, Human
uagugucaaacagggauuagaa

SEQ ID NO: 1051536 - RNA, 22 nt, Human
acugagguuauugcaauaaaau

SEQ ID NO: 1051537 - RNA, 22 nt, Human
ugcucuucggggccacugcuug

SEQ ID NO: 1051538 - RNA, 22 nt, Human
ccugguggagaggggcggagcg

SEQ ID NO: 1051539 - RNA, 18 nt, Human
gacaaaaguacagacaga

SEQ ID NO: 1051540 - RNA, 22 nt, Human
aagggcuguuauguuuuuauac

SEQ ID NO: 1051541 - RNA, 22 nt, Human
auucuucauacagacaaguccu

SEQ ID NO: 1051542 - RNA, 21 nt, Human
cggccaaauuccuccuaggga

SEQ ID NO: 1051543 - RNA, 22 nt, Human
agucugucuacuuaaagucugu

SEQ ID NO: 1051544 - RNA, 18 nt, Human
aggcagacacuagagguc

SEQ ID NO: 1051545 - RNA, 22 nt, Human
acaguacauaauccugagucug

SEQ ID NO: 1051546 - RNA, 22 nt, Human
cugugcacuucucuuuauuugu

SEQ ID NO: 1051547 - RNA, 22 nt, Human
caggcaggucagugaagaagga

SEQ ID NO: 1051548 - RNA, 22 nt, Human
ccuggccacagggcucugcauu

SEQ ID NO: 1051549 - RNA, 22 nt, Human
ugcugaggcaguccuaacagga

SEQ ID NO: 1051550 - RNA, 22 nt, Human
aguccaugguucugacucaucu

SEQ ID NO: 1051551 - RNA, 22 nt, Human
cagauaaauagacuuggucaga

SEQ ID NO: 1051552 - RNA, 22 nt, Human
ucugagguuacugcuuuguaga

SEQ ID NO: 1051553 - RNA, 22 nt, Human
uucaggauucucucccauuuac

SEQ ID NO: 1051554 - RNA, 22 nt, Human
gaggcaccucgcgggaggaggc

SEQ ID NO: 1051555 - RNA, 22 nt, Human
gaggcugcuuugaugacaggag

SEQ ID NO: 1051556 - RNA, 22 nt, Human
cccaggagauaacguucccaag

SEQ ID NO: 1051557 - RNA, 22 nt, Human
gcagcuucaguaggugaagaca

SEQ ID NO: 1051558 - RNA, 23 nt, Human
cauggcugauuucaagcuaccac

SEQ ID NO: 1051559 - RNA, 22 nt, Human
uaaaacuuaacuauccagauua

SEQ ID NO: 1051560 - RNA, 22 nt, Human
aggcagcuuucuggugcaccau

SEQ ID NO: 1051561 - RNA, 22 nt, Human
aucugccugagucuagguuuuc

SEQ ID NO: 1051562 - RNA, 22 nt, Human
auguggcauucuuggucauuuc

SEQ ID NO: 1051563 - RNA, 22 nt, Human
ggccaaaugaaaucugagcaau

SEQ ID NO: 1051564 - RNA, 22 nt, Human
cugccucucaggucccugagau

SEQ ID NO: 1051565 - RNA, 22 nt, Human
acuccugguucccaguugagau

SEQ ID NO: 1051566 - RNA, 22 nt, Human
gaaucuuaaaucggaaucuuaa

SEQ ID NO: 1051567 - RNA, 22 nt, Human
cuggagucuucagcuugcugcc

SEQ ID NO: 1051568 - RNA, 22 nt, Human
uguccauggauagagcugcucg

SEQ ID NO: 1051569 - RNA, 22 nt, Human
cuucagugaauguugaguaagg

SEQ ID NO: 1051570 - RNA, 22 nt, Human
cagcugagaguagaaauggagg

SEQ ID NO: 1051571 - RNA, 23 nt, Human
gggcagcuuaagcuuguuuuucu

SEQ ID NO: 1051572 - RNA, 22 nt, Human
uucuuuugggaauuacguaugc

SEQ ID NO: 1051573 - RNA, 21 nt, Human
uccaggaguggcugggcaggg

SEQ ID NO: 1051574 - RNA, 22 nt, Human
uuugacauuggcuuauucuguu

SEQ ID NO: 1051575 - RNA, 22 nt, Human
gagggcugauaacaggaauaca

SEQ ID NO: 1051576 - RNA, 22 nt, Human
uagcaagaggugaagguuucau

SEQ ID NO: 1051577 - RNA, 22 nt, Human
ccugcugugaagccaggccugu

SEQ ID NO: 1051578 - RNA, 22 nt, Human
uaacaucuuuagcagcucgaac

SEQ ID NO: 1051579 - RNA, 22 nt, Human
aggauguucgggucacauagcc

SEQ ID NO: 1051580 - RNA, 22 nt, Human
cugugccaggcccagcugacuu

SEQ ID NO: 1051581 - RNA, 22 nt, Human
cacaggcucuccagggccugga

SEQ ID NO: 1051582 - RNA, 22 nt, Human
ugugccagccucuggcuguguc

SEQ ID NO: 1051583 - RNA, 22 nt, Human
cagugcuguuguaagcucauug

SEQ ID NO: 1051584 - RNA, 22 nt, Human
cagcaagacaguuuccuaagug

SEQ ID NO: 1051585 - RNA, 22 nt, Human
uucuagauugccuguaaguaaa

SEQ ID NO: 1051586 - RNA, 22 nt, Human
gcugcccauuccacuggauggu

SEQ ID NO: 1051587 - RNA, 22 nt, Human
uggcugagccacuuguucagau

SEQ ID NO: 1051588 - RNA, 22 nt, Human
acuccaggcaucugcuucugcu

SEQ ID NO: 1051589 - RNA, 22 nt, Human
guuacacagcuaagcuucuccu

SEQ ID NO: 1051590 - RNA, 22 nt, Human
aagugcugagacuacaggcaug

SEQ ID NO: 1051591 - RNA, 15 nt, Human
uggcagcuuguuaag

SEQ ID NO: 1051592 - RNA, 22 nt, Human
uuccucagcuggccugauuggg

SEQ ID NO: 1051593 - RNA, 22 nt, Human
ugacaggugcugggggcagugu

SEQ ID NO: 1051594 - RNA, 22 nt, Human
ucugccugcuaacuccugcacc

SEQ ID NO: 1051595 - RNA, 22 nt, Human
auguaacugaaggaaaugcaug

SEQ ID NO: 1051596 - RNA, 22 nt, Human
uuucaguuacugcuauaucauu

SEQ ID NO: 1051597 - RNA, 22 nt, Human
ucaggcugcaguggcaaaagac

SEQ ID NO: 1051598 - RNA, 22 nt, Human
uugaggucucuacagaagagug

SEQ ID NO: 1051599 - RNA, 22 nt, Human
ugccuugcacauaauauacauu

SEQ ID NO: 1051600 - RNA, 22 nt, Human
uacccaggagaaacagcagggc

SEQ ID NO: 1051601 - RNA, 22 nt, Human
uggcaacaugucgaagugcugu

SEQ ID NO: 1051602 - RNA, 21 nt, Human
auugaaagucaacaaucaguu

SEQ ID NO: 1051603 - RNA, 22 nt, Human
ggcugcaggaacgacggagggg

SEQ ID NO: 1051604 - RNA, 22 nt, Human
ccaggcugagcaugauuggagc

SEQ ID NO: 1051605 - RNA, 22 nt, Human
aaauguuucuacuugugagcau

SEQ ID NO: 1051606 - RNA, 22 nt, Human
uucaugugauaaaugugugacu

SEQ ID NO: 1051607 - RNA, 22 nt, Human
aguuacagcacucaaaguuuuc

SEQ ID NO: 1051608 - RNA, 22 nt, Human
ggcagcuggguuggccagaaac

SEQ ID NO: 1051609 - RNA, 22 nt, Human
gagcaccucaauuugcuauuug

SEQ ID NO: 1051610 - RNA, 22 nt, Human
ugauuuuuagcuauucugaaga

SEQ ID NO: 1051611 - RNA, 22 nt, Human
auacacauuacuuucugucuga

SEQ ID NO: 1051612 - RNA, 22 nt, Human
gaaguuuagaguguuguaauuu

SEQ ID NO: 1051613 - RNA, 22 nt, Human
gcuccugggcccugggcuaacu

SEQ ID NO: 1051614 - RNA, 22 nt, Human
uuucaucuucccagagaccuug

SEQ ID NO: 1051615 - RNA, 22 nt, Human
ucauuuuucacacagggucacc

SEQ ID NO: 1051616 - RNA, 23 nt, Human
gcugccuccuacaaaagcccagc

SEQ ID NO: 1051617 - RNA, 22 nt, Human
aucccugcccucauggagcuua

SEQ ID NO: 1051618 - RNA, 22 nt, Human
gcacagaacagagaaauagcca

SEQ ID NO: 1051619 - RNA, 20 nt, Human
aagaaguugguaagcagugc

SEQ ID NO: 1051620 - RNA, 22 nt, Human
ccuaggcccauuaauuccccuu

SEQ ID NO: 1051621 - RNA, 22 nt, Human
auuaacuguacuuucuaauuuu

SEQ ID NO: 1051622 - RNA, 22 nt, Human
ggcugagaguggaucccaggga

SEQ ID NO: 1051623 - RNA, 22 nt, Human
cugagccccucugaccucagag

SEQ ID NO: 1051624 - RNA, 20 nt, Human
aacugccugcccagaggugg

SEQ ID NO: 1051625 - RNA, 22 nt, Human
uuaggaaaaugaaauuaccugu

SEQ ID NO: 1051626 - RNA, 22 nt, Human
auucauuugcuauuguguaugg

SEQ ID NO: 1051627 - RNA, 22 nt, Human
gagugucagugccuggcuuguu

SEQ ID NO: 1051628 - RNA, 22 nt, Human
ucaauucaacacaugcacauug

SEQ ID NO: 1051629 - RNA, 23 nt, Human
uauuagggccaggacuggcaaau

SEQ ID NO: 1051630 - RNA, 22 nt, Human
gagguccagagcagguucagug

SEQ ID NO: 1051631 - RNA, 22 nt, Human
auuuccaguccuaaugaucugg

SEQ ID NO: 1051632 - RNA, 22 nt, Human
aaggccagacaggaccacaucu

SEQ ID NO: 1051633 - RNA, 22 nt, Human
cagaggaguucaguacacagcc

SEQ ID NO: 1051634 - RNA, 22 nt, Human
gcugaggucaggagcugugggg

SEQ ID NO: 1051635 - RNA, 22 nt, Human
uggcagcuguuaauguuuuguu

SEQ ID NO: 1051636 - RNA, 22 nt, Human
ucauucuuuaccaaguugucac

SEQ ID NO: 1051637 - RNA, 22 nt, Human
gaggacagagccgccuggcaag

SEQ ID NO: 1051638 - RNA, 23 nt, Human
agacaaaagccucagucuuaggc

SEQ ID NO: 1051639 - RNA, 22 nt, Human
gaauuauaaacuagugacuuca

SEQ ID NO: 1051640 - RNA, 20 nt, Human
cuucuucauuaacccuacug

SEQ ID NO: 1051641 - RNA, 22 nt, Human
uuuuaguguagucaccgugggu

SEQ ID NO: 1051642 - RNA, 22 nt, Human
uccaggagaaggccauccagcg

SEQ ID NO: 1051643 - RNA, 22 nt, Human
ucccuucacagaugcgauguuu

SEQ ID NO: 1051644 - RNA, 22 nt, Human
auggccaagaaauugccgacug

SEQ ID NO: 1051645 - RNA, 20 nt, Human
aggagggaccuggauuggcg

SEQ ID NO: 1051646 - RNA, 22 nt, Human
acaggcugacuuccugccaugu

SEQ ID NO: 1051647 - RNA, 22 nt, Human
ugucaccaugcgaggcuaauuu

SEQ ID NO: 1051648 - RNA, 22 nt, Human
ucagaaaagagaaaaucuuaua

SEQ ID NO: 1051649 - RNA, 21 nt, Human
auggagggaccagggaagcag

SEQ ID NO: 1051650 - RNA, 22 nt, Human
ggagcaggagucucuugaauuu

SEQ ID NO: 1051651 - RNA, 22 nt, Human
agagaagagucuugucaaauua

SEQ ID NO: 1051652 - RNA, 22 nt, Human
uuagaaagaacuuuagauauca

SEQ ID NO: 1051653 - RNA, 22 nt, Human
auugaaagauaggcuacugugg

SEQ ID NO: 1051654 - RNA, 22 nt, Human
cuguccuggccgcccuugugag

SEQ ID NO: 1051655 - RNA, 22 nt, Human
acucuucuugcugcucauuaau

SEQ ID NO: 1051656 - RNA, 22 nt, Human
uaugauuuguagacauuugauu

SEQ ID NO: 1051657 - RNA, 22 nt, Human
gaguguaguucauuccguccua

SEQ ID NO: 1051658 - RNA, 22 nt, Human
ucccaggauuuuaggcucucag

SEQ ID NO: 1051659 - RNA, 22 nt, Human
ugcugaggagggcacccggggg

SEQ ID NO: 1051660 - RNA, 22 nt, Human
aagauuauuuaagacaggaacc

SEQ ID NO: 1051661 - RNA, 22 nt, Human
agagacagaggcaauauagcuu

SEQ ID NO: 1051662 - RNA, 22 nt, Human
ugugaaggagaugaagggagug

SEQ ID NO: 1051663 - RNA, 22 nt, Human
uauuuuaaagugaagggucuug

SEQ ID NO: 1051664 - RNA, 22 nt, Human
aggcugaggcagguggaucacu

SEQ ID NO: 1051665 - RNA, 22 nt, Human
uuauuucauguaaaauuuaugu

SEQ ID NO: 1051666 - RNA, 22 nt, Human
ggcaagcauaaccuguacagcc

SEQ ID NO: 1051667 - RNA, 22 nt, Human
acuacauuucucaguaccugaa

SEQ ID NO: 1051668 - RNA, 22 nt, Human
gcugagguuuucugccugcuca

SEQ ID NO: 1051669 - RNA, 22 nt, Human
ucaggcugggagacaaucacug

SEQ ID NO: 1051670 - RNA, 22 nt, Human
caggggaguuuuaugcaacaga

SEQ ID NO: 1051671 - RNA, 22 nt, Human
aggagacauaacuaugaugaga

SEQ ID NO: 1051672 - RNA, 22 nt, Human
cccuuagcuccaagggguuugg

SEQ ID NO: 1051673 - RNA, 23 nt, Human
gacaccuuugccagaucaagaug

SEQ ID NO: 1051674 - RNA, 22 nt, Human
augacaguucuacacuuaaucu

SEQ ID NO: 1051675 - RNA, 22 nt, Human
aucuuguuauaagagauaaugg

SEQ ID NO: 1051676 - RNA, 21 nt, Human
uggccaaacuggagcauuuga

SEQ ID NO: 1051677 - RNA, 22 nt, Human
uggcugagcucccuguguguug

SEQ ID NO: 1051678 - RNA, 22 nt, Human
agcaggcuuucaagagucuucu

SEQ ID NO: 1051679 - RNA, 19 nt, Human
ucuaagccucaauguuuuc

SEQ ID NO: 1051680 - RNA, 22 nt, Human
uucauucuuugaaucugaggua

SEQ ID NO: 1051681 - RNA, 22 nt, Human
cauuuguuaaccaguguggauu

SEQ ID NO: 1051682 - RNA, 22 nt, Human
uggcacauagcagguacucagu

SEQ ID NO: 1051683 - RNA, 22 nt, Human
auucacaaaaugauauagauac

SEQ ID NO: 1051684 - RNA, 22 nt, Human
gagaggugaauguggaugccac

SEQ ID NO: 1051685 - RNA, 20 nt, Human
uuggcagcaguuccaaguga

SEQ ID NO: 1051686 - RNA, 22 nt, Human
ucugggaagcugguccuguucu

SEQ ID NO: 1051687 - RNA, 22 nt, Human
uucaggauuauacucucuuccc

SEQ ID NO: 1051688 - RNA, 22 nt, Human
gagcacugagcuggaauuggag

SEQ ID NO: 1051689 - RNA, 22 nt, Human
aggcagacaaggacacaguggg

SEQ ID NO: 1051690 - RNA, 22 nt, Human
ggagcccugcccuaggcagcuc

SEQ ID NO: 1051691 - RNA, 19 nt, Human
ggcagcuugggaagguagc

SEQ ID NO: 1051692 - RNA, 22 nt, Human
cccugagccgcugcuccaaccu

SEQ ID NO: 1051693 - RNA, 22 nt, Human
cuggcagucugccucuucacug

SEQ ID NO: 1051694 - RNA, 20 nt, Human
auuagagcuacauggcuaca

SEQ ID NO: 1051695 - RNA, 20 nt, Human
aggacagcagcugccacuug

SEQ ID NO: 1051696 - RNA, 22 nt, Human
aggaaaacacaguauugaugga

SEQ ID NO: 1051697 - RNA, 22 nt, Human
uaggcugaaaggagaggugaag

SEQ ID NO: 1051698 - RNA, 22 nt, Human
uauguguuugacacccugcaag

SEQ ID NO: 1051699 - RNA, 22 nt, Human
aacuguaagagaauaaaugugu

SEQ ID NO: 1051700 - RNA, 22 nt, Human
ucaggagggugacaggcccugg

SEQ ID NO: 1051701 - RNA, 19 nt, Human
caugcugaccugcuguggu

SEQ ID NO: 1051702 - RNA, 22 nt, Human
uacagagauacucuagaucaaa

SEQ ID NO: 1051703 - RNA, 22 nt, Human
uuuagagcugugcugccacaug

SEQ ID NO: 1051704 - RNA, 22 nt, Human
cccaggaagaggggucaggugu

SEQ ID NO: 1051705 - RNA, 23 nt, Human
agaugaggcuucuccauguuggu

SEQ ID NO: 1051706 - RNA, 22 nt, Human
cuuauuagugucugucugaguu

SEQ ID NO: 1051707 - RNA, 22 nt, Human
cucccaggggaacuaucaagua

SEQ ID NO: 1051708 - RNA, 22 nt, Human
gugcugccugccagcuucuggg

SEQ ID NO: 1051709 - RNA, 22 nt, Human
agugcuguuagguuaauauagu

SEQ ID NO: 1051710 - RNA, 22 nt, Human
auuaggacacauacauguacag

SEQ ID NO: 1051711 - RNA, 19 nt, Human
ucucugcuucucuuggcau

SEQ ID NO: 1051712 - RNA, 22 nt, Human
cuggugguucaggagaauggcu

SEQ ID NO: 1051713 - RNA, 22 nt, Human
gaggagaggggcucccaagagc

SEQ ID NO: 1051714 - RNA, 22 nt, Human
ucuuugaauucaaacuguucaa

SEQ ID NO: 1051715 - RNA, 22 nt, Human
ucuuugcagaauuuaacuuugc

SEQ ID NO: 1051716 - RNA, 22 nt, Human
cugccuggcuaaacucaagucg

SEQ ID NO: 1051717 - RNA, 19 nt, Human
agaggcagucuccaacagg

SEQ ID NO: 1051718 - RNA, 22 nt, Human
aguuugaauugaaaugcagaug

SEQ ID NO: 1051719 - RNA, 22 nt, Human
ugcuguggcaguuuauguauag

SEQ ID NO: 1051720 - RNA, 22 nt, Human
cuuguaauuauaauguacuguu

SEQ ID NO: 1051721 - RNA, 22 nt, Human
uucagaaaucgaguuucauguc

SEQ ID NO: 1051722 - RNA, 22 nt, Human
cgagcaugaugacggcuguggc

SEQ ID NO: 1051723 - RNA, 22 nt, Human
gaagaggaugacaggagccggu

SEQ ID NO: 1051724 - RNA, 22 nt, Human
uucacagaugccugaugugugg

SEQ ID NO: 1051725 - RNA, 22 nt, Human
cagagagagucaaaucuuugcu

SEQ ID NO: 1051726 - RNA, 22 nt, Human
ucuuuccagaggaauuuuuaga

SEQ ID NO: 1051727 - RNA, 22 nt, Human
uauuuuaucugccagaguggag

SEQ ID NO: 1051728 - RNA, 22 nt, Human
cugaacucuuuaugacagcuug

SEQ ID NO: 1051729 - RNA, 23 nt, Human
ccuggcagcaaacgaggagguua

SEQ ID NO: 1051730 - RNA, 22 nt, Human
aggccaaagcaagacccuguaa

SEQ ID NO: 1051731 - RNA, 22 nt, Human
uccaggaggguuuucugccuuc

SEQ ID NO: 1051732 - RNA, 22 nt, Human
ugcugaggcuagaccuggaagu

SEQ ID NO: 1051733 - RNA, 22 nt, Human
aggagagcuggugucuggaauc

SEQ ID NO: 1051734 - RNA, 22 nt, Human
aggguggccaugagggagagau

SEQ ID NO: 1051735 - RNA, 22 nt, Human
gcugccuggagcucagccugcc

SEQ ID NO: 1051736 - RNA, 22 nt, Human
ucaggcuggaaugcaguggggc

SEQ ID NO: 1051737 - RNA, 22 nt, Human
uccuggucuacacugcauuggg

SEQ ID NO: 1051738 - RNA, 23 nt, Human
auuugagaaaguauuuuuaagac

SEQ ID NO: 1051739 - RNA, 22 nt, Human
aucaggauuacacggggaugcu

SEQ ID NO: 1051740 - RNA, 22 nt, Human
cuucaguuaguuucaugugagc

SEQ ID NO: 1051741 - RNA, 23 nt, Human
ugaguucucaucuuggcuucuau

SEQ ID NO: 1051742 - RNA, 22 nt, Human
auggccaagagucgauuugggg

SEQ ID NO: 1051743 - RNA, 18 nt, Human
ugcuuggagcauuuacca

SEQ ID NO: 1051744 - RNA, 22 nt, Human
uggagagguuuaaacaaaaguu

SEQ ID NO: 1051745 - RNA, 22 nt, Human
agggcagcagcuccuccuagcu

SEQ ID NO: 1051746 - RNA, 22 nt, Human
gugucccaggccucuggaauua

SEQ ID NO: 1051747 - RNA, 22 nt, Human
ucugagcccucuuuugcagccc

SEQ ID NO: 1051748 - RNA, 22 nt, Human
gcagagaacccagcagauuggc

SEQ ID NO: 1051749 - RNA, 22 nt, Human
ucccagaguauuagcaauugcu

SEQ ID NO: 1051750 - RNA, 22 nt, Human
auucuagaaggcaaagcaaggg

SEQ ID NO: 1051751 - RNA, 22 nt, Human
uucuucaguuugguaaauguaa

SEQ ID NO: 1051752 - RNA, 22 nt, Human
gcaggagaacaaagcaagcugc

SEQ ID NO: 1051753 - RNA, 22 nt, Human
cacaggcuugucagcaugaggc

SEQ ID NO: 1051754 - RNA, 22 nt, Human
cagucccuaguggagcucacag

SEQ ID NO: 1051755 - RNA, 22 nt, Human
gagccaggggucagcuccgagg

SEQ ID NO: 1051756 - RNA, 22 nt, Human
augcagcugugggcaagaaaug

SEQ ID NO: 1051757 - RNA, 22 nt, Human
uuuaaauuuguguuuagagggu

SEQ ID NO: 1051758 - RNA, 22 nt, Human
gagggcugaaguguuuuaugag

SEQ ID NO: 1051759 - RNA, 22 nt, Human
ugccucagucagcuucccuggg

SEQ ID NO: 1051760 - RNA, 22 nt, Human
aguuauaaucugcuacugauau

SEQ ID NO: 1051761 - RNA, 22 nt, Human
cccaggaaugagcaggcagggg

SEQ ID NO: 1051762 - RNA, 22 nt, Human
aagcugaggcccauggcaaggu

SEQ ID NO: 1051763 - RNA, 22 nt, Human
cuguaacuuagcaugguuacua

SEQ ID NO: 1051764 - RNA, 22 nt, Human
cauucuuauauuuacucauuca

SEQ ID NO: 1051765 - RNA, 22 nt, Human
uggcugaguaaguugugauaug

SEQ ID NO: 1051766 - RNA, 22 nt, Human
cccaggagaauauuuuuggguc

SEQ ID NO: 1051767 - RNA, 22 nt, Human
auuggcaggaaccgaggagggg

SEQ ID NO: 1051768 - RNA, 22 nt, Human
acuggccagguucaaaauacag

SEQ ID NO: 1051769 - RNA, 22 nt, Human
ggaggcugagaaguccaagauc

SEQ ID NO: 1051770 - RNA, 22 nt, Human
auuuggaagcuugaagauuauu

SEQ ID NO: 1051771 - RNA, 22 nt, Human
gaggcugaauggccagaagcca

SEQ ID NO: 1051772 - RNA, 22 nt, Human
caggauagaaaggccauggagu

SEQ ID NO: 1051773 - RNA, 22 nt, Human
uuggaaaauguauuucuagaag

SEQ ID NO: 1051774 - RNA, 22 nt, Human
ucugaggucucaugacuugcau

SEQ ID NO: 1051775 - RNA, 22 nt, Human
aguuauaugugaaaacacguau

SEQ ID NO: 1051776 - RNA, 22 nt, Human
ugaaucauggauaaauagcuua

SEQ ID NO: 1051777 - RNA, 21 nt, Human
agacagaacaacugcucucca

SEQ ID NO: 1051778 - RNA, 22 nt, Human
ugcugugagguugagaaggaag

SEQ ID NO: 1051779 - RNA, 22 nt, Human
cuuauuagaguuguguucuguu

SEQ ID NO: 1051780 - RNA, 21 nt, Human
uaugguaaccagacaagaaug

SEQ ID NO: 1051781 - RNA, 22 nt, Human
uugcuagcugguguaugcauug

SEQ ID NO: 1051782 - RNA, 22 nt, Human
gggcugagugucccaggccgaa

SEQ ID NO: 1051783 - RNA, 20 nt, Human
uuucaagucagcaauucuca

SEQ ID NO: 1051784 - RNA, 22 nt, Human
ucaggcugagaaaaucuggacc

SEQ ID NO: 1051785 - RNA, 22 nt, Human
cagcugcuuuaguuuuccaucc

SEQ ID NO: 1051786 - RNA, 22 nt, Human
cucuucuugucucugguuagaa

SEQ ID NO: 1051787 - RNA, 22 nt, Human
cugccuuugaaaguucuguuga

SEQ ID NO: 1051788 - RNA, 22 nt, Human
caggaugggauguagugggccc

SEQ ID NO: 1051789 - RNA, 22 nt, Human
ggcagcuuguccuggaggaugg

SEQ ID NO: 1051790 - RNA, 22 nt, Human
gcagacaucaagcacaggccca

SEQ ID NO: 1051791 - RNA, 22 nt, Human
gaaacugugaucguguucuggg

SEQ ID NO: 1051792 - RNA, 22 nt, Human
uggcagcugagugcacccccuc

SEQ ID NO: 1051793 - RNA, 22 nt, Human
cuggucaaggagagucucugca

SEQ ID NO: 1051794 - RNA, 22 nt, Human
cacagagcugaaccugggucau

SEQ ID NO: 1051795 - RNA, 22 nt, Human
uaggcugagguugaugccaggg

SEQ ID NO: 1051796 - RNA, 22 nt, Human
uugaaauaucaaguuauuagug

SEQ ID NO: 1051797 - RNA, 22 nt, Human
aaugucugcucuacucaggagg

SEQ ID NO: 1051798 - RNA, 22 nt, Human
uuuagauaaugcucaagcaauu

SEQ ID NO: 1051799 - RNA, 22 nt, Human
acaggcuguacuucuaaucauc

SEQ ID NO: 1051800 - RNA, 22 nt, Human
aagcaccuggguuauaucuuag

SEQ ID NO: 1051801 - RNA, 22 nt, Human
uccuggccuagcucacccugga

SEQ ID NO: 1051802 - RNA, 22 nt, Human
ucuucaucucagauuaacagga

SEQ ID NO: 1051803 - RNA, 22 nt, Human
cccaggaaaugggcucuugccu

SEQ ID NO: 1051804 - RNA, 22 nt, Human
uaacauuagguagacauaagcc

SEQ ID NO: 1051805 - RNA, 22 nt, Human
ugaggcucuaugugguagauua

SEQ ID NO: 1051806 - RNA, 19 nt, Human
ucugagguggaacuggggg

SEQ ID NO: 1051807 - RNA, 22 nt, Human
aggaguggugcaggaccugcca

SEQ ID NO: 1051808 - RNA, 22 nt, Human
caaauaguaugagcaaugauuc

SEQ ID NO: 1051809 - RNA, 18 nt, Human
acugugugaauuagcucc

SEQ ID NO: 1051810 - RNA, 22 nt, Human
ucuggccagaaagacuugaugu

SEQ ID NO: 1051811 - RNA, 22 nt, Human
ccuccuggcccugggccuggaa

SEQ ID NO: 1051812 - RNA, 22 nt, Human
caggaaagggaugggcugccac

SEQ ID NO: 1051813 - RNA, 22 nt, Human
gcucaggagcucuugguggcgc

SEQ ID NO: 1051814 - RNA, 22 nt, Human
cacugguacacugaauggcguu

SEQ ID NO: 1051815 - RNA, 22 nt, Human
ucucaggaauagaguggcagca

SEQ ID NO: 1051816 - RNA, 22 nt, Human
uuggccaaggaaguagcaacgg

SEQ ID NO: 1051817 - RNA, 22 nt, Human
gaggagcugggcugagaggguc

SEQ ID NO: 1051818 - RNA, 18 nt, Human
ccagguggugacagagau

SEQ ID NO: 1051819 - RNA, 22 nt, Human
cagcaagagacuguucucuaag

SEQ ID NO: 1051820 - RNA, 22 nt, Human
uuuauuauccaguguugucaug

SEQ ID NO: 1051821 - RNA, 22 nt, Human
ugguaacacaggcauuaaaguu

SEQ ID NO: 1051822 - RNA, 22 nt, Human
ucaggcugcaucuguaagggug

SEQ ID NO: 1051823 - RNA, 22 nt, Human
caggcagcauuuacucugauga

SEQ ID NO: 1051824 - RNA, 22 nt, Human
gaggucagucagaccaggguuu

SEQ ID NO: 1051825 - RNA, 22 nt, Human
caggcugcggucggcucugguc

SEQ ID NO: 1051826 - RNA, 22 nt, Human
cccuugcacauuugucuuuaau

SEQ ID NO: 1051827 - RNA, 22 nt, Human
uggaggaaguggcuggccagaa

SEQ ID NO: 1051828 - RNA, 22 nt, Human
augaggucaucuugaaguaggg

SEQ ID NO: 1051829 - RNA, 22 nt, Human
cugcugugcaacauugcaccua

SEQ ID NO: 1051830 - RNA, 23 nt, Human
gaggcacucaggaaaugugagug

SEQ ID NO: 1051831 - RNA, 22 nt, Human
uggcuucucaaaauaacugguu

SEQ ID NO: 1051832 - RNA, 22 nt, Human
uggcugagccuuuggggcuuuc

SEQ ID NO: 1051833 - RNA, 22 nt, Human
uuuggacuuagccugcagaauu

SEQ ID NO: 1051834 - RNA, 22 nt, Human
ucacaaauagcuauauuaagga

SEQ ID NO: 1051835 - RNA, 23 nt, Human
ugucuggcucauggugggucuca

SEQ ID NO: 1051836 - RNA, 22 nt, Human
cauuuaguuuugcaguagcagg

SEQ ID NO: 1051837 - RNA, 22 nt, Human
acucuuuacuuaaacucuaagu

SEQ ID NO: 1051838 - RNA, 22 nt, Human
uucauacauuuuuacuaacagc

SEQ ID NO: 1051839 - RNA, 22 nt, Human
aaauugcauuuuaaagguagau

SEQ ID NO: 1051840 - RNA, 15 nt, Human
cuccaugauuuugca

SEQ ID NO: 1051841 - RNA, 22 nt, Human
caggagaggaggcuacuucuua

SEQ ID NO: 1051842 - RNA, 22 nt, Human
gggcugagagugacuguucugu

SEQ ID NO: 1051843 - RNA, 22 nt, Human
uuagagccaguuacaaggucaa

SEQ ID NO: 1051844 - RNA, 22 nt, Human
acaugauuuuaguaucauaaua

SEQ ID NO: 1051845 - RNA, 22 nt, Human
cauuuguaggaugcuucuuguu

SEQ ID NO: 1051846 - RNA, 22 nt, Human
cuggccaagcuucucuaagcag

SEQ ID NO: 1051847 - RNA, 22 nt, Human
ggcugcagauuguagucuguua

SEQ ID NO: 1051848 - RNA, 22 nt, Human
gcugagagcaaggacaaagcau

SEQ ID NO: 1051849 - RNA, 22 nt, Human
augccuggacuguaucccagau

SEQ ID NO: 1051850 - RNA, 22 nt, Human
cagcagagaaauuaaacuucug

SEQ ID NO: 1051851 - RNA, 22 nt, Human
ccacugcuaacuugcugcagcu

SEQ ID NO: 1051852 - RNA, 22 nt, Human
agcugcccagauaggaggaggc

SEQ ID NO: 1051853 - RNA, 22 nt, Human
ucugcuguauuagguugaacug

SEQ ID NO: 1051854 - RNA, 22 nt, Human
uuuaucuuuaggacuuugcaga

SEQ ID NO: 1051855 - RNA, 22 nt, Human
aagaacugaguacguuaauaaa

SEQ ID NO: 1051856 - RNA, 22 nt, Human
augguacaaaauguauaaaguc

SEQ ID NO: 1051857 - RNA, 22 nt, Human
ccagagagaaauggauuugagu

SEQ ID NO: 1051858 - RNA, 22 nt, Human
ucagucucuggggcuucuguuu

SEQ ID NO: 1051859 - RNA, 22 nt, Human
gaaauuaagcaggggucugugg

SEQ ID NO: 1051860 - RNA, 22 nt, Human
ucucaguuuccucauauguaaa

SEQ ID NO: 1051861 - RNA, 22 nt, Human
aguucuucauaaccuuacugug

SEQ ID NO: 1051862 - RNA, 22 nt, Human
uucuccagaccuugugacuaug

SEQ ID NO: 1051863 - RNA, 22 nt, Human
gugcauuuaggucacaugaugu

SEQ ID NO: 1051864 - RNA, 22 nt, Human
acaguaacaccuacucuguccc

SEQ ID NO: 1051865 - RNA, 22 nt, Human
ccccuuccacagugcuuccuaa

SEQ ID NO: 1051866 - RNA, 23 nt, Human
guuaauaaugaacacuuucuccc

SEQ ID NO: 1051867 - RNA, 22 nt, Human
ggcgagggagcagugcgguggg

SEQ ID NO: 1051868 - RNA, 22 nt, Human
gcugagguggugaugguucauc

SEQ ID NO: 1051869 - RNA, 19 nt, Human
uagggcuggccgggcggug

SEQ ID NO: 1051870 - RNA, 21 nt, Human
agccugaaucccaccaguuca

SEQ ID NO: 1051871 - RNA, 22 nt, Human
gugcuuuuaaaggcaauuagua

SEQ ID NO: 1051872 - RNA, 22 nt, Human
uggcugaguucuccaggaguag

SEQ ID NO: 1051873 - RNA, 22 nt, Human
aguauugugacucaaguauucu

SEQ ID NO: 1051874 - RNA, 22 nt, Human
uauuggcagcaugagcuccugg

SEQ ID NO: 1051875 - RNA, 22 nt, Human
uggccaguagagcucagauagu

SEQ ID NO: 1051876 - RNA, 22 nt, Human
caggaaaggugugucaugaugg

SEQ ID NO: 1051877 - RNA, 22 nt, Human
cauuuccagcuccugcaucaug

SEQ ID NO: 1051878 - RNA, 22 nt, Human
uauuucagguauggugugaaau

SEQ ID NO: 1051879 - RNA, 22 nt, Human
ucugccucgcuaacagcagcca

SEQ ID NO: 1051880 - RNA, 22 nt, Human
guaaucguggugguuaauucca

SEQ ID NO: 1051881 - RNA, 22 nt, Human
uucuucaaaacaacacuggccu

SEQ ID NO: 1051882 - RNA, 23 nt, Human
acauacauggagauaaagugaug

SEQ ID NO: 1051883 - RNA, 22 nt, Human
uuuaacauguucaagaaacaua

SEQ ID NO: 1051884 - RNA, 22 nt, Human
uggcagacacugucgaagccua

SEQ ID NO: 1051885 - RNA, 22 nt, Human
cccaggagaauauaauguucuu

SEQ ID NO: 1051886 - RNA, 22 nt, Human
uuugaaagaaaccagugaguga

SEQ ID NO: 1051887 - RNA, 22 nt, Human
caaaugaauuucccugcaaaug

SEQ ID NO: 1051888 - RNA, 22 nt, Human
agggucugcauuccaacuuggg

SEQ ID NO: 1051889 - RNA, 22 nt, Human
ugaaaugacaaagguuuuucuu

SEQ ID NO: 1051890 - RNA, 22 nt, Human
acccaggaggcaagguugcagu

SEQ ID NO: 1051891 - RNA, 22 nt, Human
ccaggcugggcggggaaccugg

SEQ ID NO: 1051892 - RNA, 22 nt, Human
aggcagcuagagagugaaacug

SEQ ID NO: 1051893 - RNA, 22 nt, Human
aggcagcuuucagugucucuca

SEQ ID NO: 1051894 - RNA, 22 nt, Human
agccuauuccaggaugagcuca

SEQ ID NO: 1051895 - RNA, 22 nt, Human
gacagcuguggagaggcaugug

SEQ ID NO: 1051896 - RNA, 21 nt, Human
cccacggaaugaugaggcacu

SEQ ID NO: 1051897 - RNA, 23 nt, Human
acacuuucaaauaugcacagagc

SEQ ID NO: 1051898 - RNA, 18 nt, Human
aagaaguuggccaaagag

SEQ ID NO: 1051899 - RNA, 22 nt, Human
uuacuggcugggccugagggcu

SEQ ID NO: 1051900 - RNA, 22 nt, Human
cuucuucaaccugaaaguuuca

SEQ ID NO: 1051901 - RNA, 22 nt, Human
gacagguggggaaacuaaggua

SEQ ID NO: 1051902 - RNA, 22 nt, Human
uugauuucuauucagauguaga

SEQ ID NO: 1051903 - RNA, 22 nt, Human
cauuuauuggcauguaguaggu

SEQ ID NO: 1051904 - RNA, 22 nt, Human
cuuagaaaucgaacucagguua

SEQ ID NO: 1051905 - RNA, 22 nt, Human
aaauuagucgguuuaggaauuu

SEQ ID NO: 1051906 - RNA, 22 nt, Human
uucucuuugacauuauucaggu

SEQ ID NO: 1051907 - RNA, 22 nt, Human
auuucagaugaccaaauggaaa

SEQ ID NO: 1051908 - RNA, 22 nt, Human
gcaggagagccagcaggcuucc

SEQ ID NO: 1051909 - RNA, 22 nt, Human
cuggcacaaugucacuuuugcu

SEQ ID NO: 1051910 - RNA, 22 nt, Human
uugaggucuggcaguagcguug

SEQ ID NO: 1051911 - RNA, 22 nt, Human
agcuggcagucauccuagugag

SEQ ID NO: 1051912 - RNA, 22 nt, Human
aaguaagucuuacauucacauu

SEQ ID NO: 1051913 - RNA, 22 nt, Human
uuugaauguuuuagguacuuaa

SEQ ID NO: 1051914 - RNA, 22 nt, Human
ggcacagagcccagcuuccuag

SEQ ID NO: 1051915 - RNA, 22 nt, Human
ucagauggcacacagagccugc

SEQ ID NO: 1051916 - RNA, 22 nt, Human
gcccaggaagccaccgggaagu

SEQ ID NO: 1051917 - RNA, 22 nt, Human
auccagucaaaauuaguaaggu

SEQ ID NO: 1051918 - RNA, 22 nt, Human
uggcagcuuccugcucauagga

SEQ ID NO: 1051919 - RNA, 22 nt, Human
uuacacuuuugacaaaccugag

SEQ ID NO: 1051920 - RNA, 22 nt, Human
uccaugucuucaugugucuaac

SEQ ID NO: 1051921 - RNA, 22 nt, Human
augaguucccaggugauuugug

SEQ ID NO: 1051922 - RNA, 20 nt, Human
agcugaggcaccugagguua

SEQ ID NO: 1051923 - RNA, 22 nt, Human
uggaggccuagguugaugugug

SEQ ID NO: 1051924 - RNA, 22 nt, Human
guggcaggagacuggaagaugg

SEQ ID NO: 1051925 - RNA, 22 nt, Human
uucuaauuaaaucuacgcuagg

SEQ ID NO: 1051926 - RNA, 22 nt, Human
gcuucccagcagaggaaagacu

SEQ ID NO: 1051927 - RNA, 22 nt, Human
ggcagucacaggggagacuggg

SEQ ID NO: 1051928 - RNA, 22 nt, Human
uuuugaauaauucagaaacagc

SEQ ID NO: 1051929 - RNA, 22 nt, Human
cagagggaaaaggggaguaaua

SEQ ID NO: 1051930 - RNA, 22 nt, Human
ucaggaugguguggaggaaaua

SEQ ID NO: 1051931 - RNA, 22 nt, Human
cauuuguaucauauguaucuua

SEQ ID NO: 1051932 - RNA, 22 nt, Human
acuggcagccacaacuggcagg

SEQ ID NO: 1051933 - RNA, 22 nt, Human
uggcuucucagaauacucugga

SEQ ID NO: 1051934 - RNA, 22 nt, Human
agugcuuugguauagaacuauu

SEQ ID NO: 1051935 - RNA, 22 nt, Human
cacugguauuugaaaauagaug

SEQ ID NO: 1051936 - RNA, 19 nt, Human
ugcugcuguccuugcaggg

SEQ ID NO: 1051937 - RNA, 22 nt, Human
auuaggauguguauauuguguu

SEQ ID NO: 1051938 - RNA, 22 nt, Human
acaucugauuacaugagaauau

SEQ ID NO: 1051939 - RNA, 17 nt, Human
gucauucucagaaaaug

SEQ ID NO: 1051940 - RNA, 21 nt, Human
cugcuguggcccccgacaugc

SEQ ID NO: 1051941 - RNA, 18 nt, Human
gcuccugguuggaaagaa

SEQ ID NO: 1051942 - RNA, 22 nt, Human
cccagggauguggcagauguua

SEQ ID NO: 1051943 - RNA, 17 nt, Human
uaaauacacaaggguau

SEQ ID NO: 1051944 - RNA, 22 nt, Human
uccaggagggggagccgugccg

SEQ ID NO: 1051945 - RNA, 22 nt, Human
uaacuguagcuaaccgaugaga

SEQ ID NO: 1051946 - RNA, 22 nt, Human
aggcuggagugugcaguggcgc

SEQ ID NO: 1051947 - RNA, 22 nt, Human
uuugaaauaugaggcauuauga

SEQ ID NO: 1051948 - RNA, 23 nt, Human
ucucaguuccagaggcuacaagu

SEQ ID NO: 1051949 - RNA, 22 nt, Human
uggcucaagugauccuccugcc

SEQ ID NO: 1051950 - RNA, 22 nt, Human
auuaaauuggaucugcauaguu

SEQ ID NO: 1051951 - RNA, 22 nt, Human
ggacaagccugugaguggguuu

SEQ ID NO: 1051952 - RNA, 22 nt, Human
aaagauuauggcauugaaauac

SEQ ID NO: 1051953 - RNA, 22 nt, Human
gcugccuguugaagggucugug

SEQ ID NO: 1051954 - RNA, 22 nt, Human
acagcuaacuuaaacuaaccua

SEQ ID NO: 1051955 - RNA, 23 nt, Human
acuuuauugaccccaggucaguu

SEQ ID NO: 1051956 - RNA, 22 nt, Human
agggagcucacaguccaguaga

SEQ ID NO: 1051957 - RNA, 19 nt, Human
cuucuggcccugagccacc

SEQ ID NO: 1051958 - RNA, 22 nt, Human
uucugagccucauucaugaggc

SEQ ID NO: 1051959 - RNA, 23 nt, Human
ucuccuggcugcacuguggccac

SEQ ID NO: 1051960 - RNA, 22 nt, Human
auuaagaucauuguagaagauu

SEQ ID NO: 1051961 - RNA, 22 nt, Human
augcuuuuccaggagaaauaua

SEQ ID NO: 1051962 - RNA, 22 nt, Human
uggcacaaaucuagucccuggu

SEQ ID NO: 1051963 - RNA, 22 nt, Human
acaccuuuuauucgccaggcac

SEQ ID NO: 1051964 - RNA, 22 nt, Human
ugcuggaauaauuucauguuaa

SEQ ID NO: 1051965 - RNA, 22 nt, Human
cuccaggaaaauagggaaugag

SEQ ID NO: 1051966 - RNA, 22 nt, Human
ggaggggagauguuugggcuca

SEQ ID NO: 1051967 - RNA, 22 nt, Human
gaacuggucaguuuagcccacu

SEQ ID NO: 1051968 - RNA, 22 nt, Human
ccaggagacuguacugauauuu

SEQ ID NO: 1051969 - RNA, 22 nt, Human
acauguuuggcucuaugcuaua

SEQ ID NO: 1051970 - RNA, 22 nt, Human
gggagcugaauggcaauggaga

SEQ ID NO: 1051971 - RNA, 22 nt, Human
auuauucuuaugucaucauggc

SEQ ID NO: 1051972 - RNA, 22 nt, Human
auuuguagugaagugaaaauaa

SEQ ID NO: 1051973 - RNA, 22 nt, Human
aagggaggaggauuuauuguac

SEQ ID NO: 1051974 - RNA, 22 nt, Human
uuucaguuguccuguuaauagc

SEQ ID NO: 1051975 - RNA, 22 nt, Human
auacaucuaugccuuucugaca

SEQ ID NO: 1051976 - RNA, 22 nt, Human
gaggcaguguuuacugcccugu

SEQ ID NO: 1051977 - RNA, 22 nt, Human
uuuccagguauuaauacuguau

SEQ ID NO: 1051978 - RNA, 22 nt, Human
cacaggcugcccgcagcuggga

SEQ ID NO: 1051979 - RNA, 22 nt, Human
agggagcugagcugugagcagc

SEQ ID NO: 1051980 - RNA, 22 nt, Human
ggaguaggaguagaacucauca

SEQ ID NO: 1051981 - RNA, 22 nt, Human
aaauauaauuucugccucaaua

SEQ ID NO: 1051982 - RNA, 19 nt, Human
agggccugcagcucaagcu

SEQ ID NO: 1051983 - RNA, 22 nt, Human
uuacaagcagcuacauaucaca

SEQ ID NO: 1051984 - RNA, 22 nt, Human
uuugaacuucuaccugucauau

SEQ ID NO: 1051985 - RNA, 22 nt, Human
uauuagagaaaagauggaugug

SEQ ID NO: 1051986 - RNA, 22 nt, Human
cuugaacucaaugugaggaaga

SEQ ID NO: 1051987 - RNA, 22 nt, Human
ccugcucagagcgucuugugug

SEQ ID NO: 1051988 - RNA, 22 nt, Human
agugcuuugagcguuugaaaag

SEQ ID NO: 1051989 - RNA, 22 nt, Human
gucuucuuguguugccugucuu

SEQ ID NO: 1051990 - RNA, 22 nt, Human
gaaacuguauguaguuuuuggg

SEQ ID NO: 1051991 - RNA, 22 nt, Human
agaaaacugggaggagagcuuc

SEQ ID NO: 1051992 - RNA, 22 nt, Human
uacaugaauguuucaauauugu

SEQ ID NO: 1051993 - RNA, 22 nt, Human
gauggcagucaaccaggugagg

SEQ ID NO: 1051994 - RNA, 22 nt, Human
aucaggauucaccccagagcug

SEQ ID NO: 1051995 - RNA, 22 nt, Human
uaaugucaaggugauagauuug

SEQ ID NO: 1051996 - RNA, 22 nt, Human
cccaggaggcagagguuggagc

SEQ ID NO: 1051997 - RNA, 20 nt, Human
gaugggaaucggagcuggua

SEQ ID NO: 1051998 - RNA, 22 nt, Human
gcucaggaaaacagucuaguaa

SEQ ID NO: 1051999 - RNA, 22 nt, Human
uccauucauucauugaugaaca

SEQ ID NO: 1052000 - RNA, 22 nt, Human
cccuccucucccuaagagucac

SEQ ID NO: 1052001 - RNA, 22 nt, Human
aaaauuauagaucuagugccug

SEQ ID NO: 1052002 - RNA, 22 nt, Human
cucccaggguagggagagacua

SEQ ID NO: 1052003 - RNA, 22 nt, Human
aucaggaucacagaaacuuuua

SEQ ID NO: 1052004 - RNA, 22 nt, Human
cagcuggccaaucagggcgccc

SEQ ID NO: 1052005 - RNA, 22 nt, Human
ucuccuggucaccucagaaguc

SEQ ID NO: 1052006 - RNA, 22 nt, Human
acagugugguuugagcacuggg

SEQ ID NO: 1052007 - RNA, 22 nt, Human
uguuuauuacaguucuuggaau

SEQ ID NO: 1052008 - RNA, 22 nt, Human
uggcagaguucgcugugccuuu

SEQ ID NO: 1052009 - RNA, 22 nt, Human
uuaggcauuggaaggucagcuu

SEQ ID NO: 1052010 - RNA, 22 nt, Human
gcagcugagagaagaacagggc

SEQ ID NO: 1052011 - RNA, 17 nt, Human
ggcagccucaggcguuu

SEQ ID NO: 1052012 - RNA, 22 nt, Human
ccuggccagcagccccuuccuc

SEQ ID NO: 1052013 - RNA, 17 nt, Human
cccacggaggugugaaa

SEQ ID NO: 1052014 - RNA, 22 nt, Human
aggcuguggcccuggucuagca

SEQ ID NO: 1052015 - RNA, 22 nt, Human
ucaggcuggggugcuaaggugu

SEQ ID NO: 1052016 - RNA, 22 nt, Human
gcagcugaauguccauugcugc

SEQ ID NO: 1052017 - RNA, 22 nt, Human
agccacagcauguguguaugua

SEQ ID NO: 1052018 - RNA, 19 nt, Human
uggagaggaaaugcugcuc

SEQ ID NO: 1052019 - RNA, 22 nt, Human
uuauuaggaacucaggauuuuu

SEQ ID NO: 1052020 - RNA, 22 nt, Human
uucucacuauguauguagauug

SEQ ID NO: 1052021 - RNA, 22 nt, Human
aagagagggguugcauggaaau

SEQ ID NO: 1052022 - RNA, 22 nt, Human
ggcagcucugcuccacaugagu

SEQ ID NO: 1052023 - RNA, 22 nt, Human
ggcugcuggccagccuaggagu

SEQ ID NO: 1052024 - RNA, 22 nt, Human
ugcugcaggcagccccucuacu

SEQ ID NO: 1052025 - RNA, 22 nt, Human
ccaggagauuuuuccauagcac

SEQ ID NO: 1052026 - RNA, 22 nt, Human
cccaggaggacauuccauaccc

SEQ ID NO: 1052027 - RNA, 22 nt, Human
auucuuaauugccaugcuguau

SEQ ID NO: 1052028 - RNA, 22 nt, Human
cauuucacaaauggccacauca

SEQ ID NO: 1052029 - RNA, 22 nt, Human
caaaucuauauguugauauucu

SEQ ID NO: 1052030 - RNA, 22 nt, Human
gaaaugaaauagcaccaagguu

SEQ ID NO: 1052031 - RNA, 22 nt, Human
gaggagcuggcugucgggaggc

SEQ ID NO: 1052032 - RNA, 21 nt, Human
ggcugagauggcagaaucacc

SEQ ID NO: 1052033 - RNA, 20 nt, Human
uauuuguauuugggaaaguu

SEQ ID NO: 1052034 - RNA, 22 nt, Human
cuagcaucagaugagaagcugu

SEQ ID NO: 1052035 - RNA, 22 nt, Human
cagcucccgccaucgggaggca

SEQ ID NO: 1052036 - RNA, 22 nt, Human
caggcugccaaggcuggggagg

SEQ ID NO: 1052037 - RNA, 22 nt, Human
ucauuuaauaauuuuugaguag

SEQ ID NO: 1052038 - RNA, 22 nt, Human
uaauuauaacaugcuuucuggc

SEQ ID NO: 1052039 - RNA, 17 nt, Human
uagcuguguuucagcua

SEQ ID NO: 1052040 - RNA, 22 nt, Human
ccugggcaggccggacgcuggg

SEQ ID NO: 1052041 - RNA, 22 nt, Human
gggauggggagcuggaaagggg

SEQ ID NO: 1052042 - RNA, 22 nt, Human
aggcagcuaagauggauaauga

SEQ ID NO: 1052043 - RNA, 22 nt, Human
ggcagcuaggggcagggaauuc

SEQ ID NO: 1052044 - RNA, 22 nt, Human
cugcuuugggcagcuuuguggc

SEQ ID NO: 1052045 - RNA, 22 nt, Human
acauguuuaaguuuguuauaug

SEQ ID NO: 1052046 - RNA, 20 nt, Human
cugcugugauucccuccucc

SEQ ID NO: 1052047 - RNA, 22 nt, Human
aggccagcacgacagccgcagg

SEQ ID NO: 1052048 - RNA, 22 nt, Human
ugccuguguccccuucuuggca

SEQ ID NO: 1052049 - RNA, 22 nt, Human
cugcuguggugucaagcaucuc

SEQ ID NO: 1052050 - RNA, 23 nt, Human
uggccacagggugcuccauugua

SEQ ID NO: 1052051 - RNA, 22 nt, Human
acugugugacuguuauuacugu

SEQ ID NO: 1052052 - RNA, 22 nt, Human
gcugccuggaauaacggcuggc

SEQ ID NO: 1052053 - RNA, 22 nt, Human
cccaggagguggaguucacagu

SEQ ID NO: 1052054 - RNA, 22 nt, Human
ggagaaaggcauagcagaaccu

SEQ ID NO: 1052055 - RNA, 22 nt, Human
guggccaagaggggacuggaua

SEQ ID NO: 1052056 - RNA, 22 nt, Human
uaacuggugaguaggauuuaua

SEQ ID NO: 1052057 - RNA, 23 nt, Human
uacaugcuauaauuucacccuca

SEQ ID NO: 1052058 - RNA, 22 nt, Human
cugccuuugcccuugacacugu

SEQ ID NO: 1052059 - RNA, 22 nt, Human
ugaaggcugggcucagccagcu

SEQ ID NO: 1052060 - RNA, 22 nt, Human
ucauuguuucugcuuuucauga

SEQ ID NO: 1052061 - RNA, 22 nt, Human
uagaaaagauaacauucugugc

SEQ ID NO: 1052062 - RNA, 22 nt, Human
ccacaucucgguccccucuuug

SEQ ID NO: 1052063 - RNA, 22 nt, Human
uugagguccccaguacccacug

SEQ ID NO: 1052064 - RNA, 22 nt, Human
aauggccagcaacaggagugaa

SEQ ID NO: 1052065 - RNA, 22 nt, Human
gggcugagcuguucugaguuua

SEQ ID NO: 1052066 - RNA, 22 nt, Human
aggugcuguuugucagcaguuu

SEQ ID NO: 1052067 - RNA, 21 nt, Human
uaauaauuccacuacagagua

SEQ ID NO: 1052068 - RNA, 22 nt, Human
acacaaauuguaggauaauugc

SEQ ID NO: 1052069 - RNA, 22 nt, Human
gaaauacagaaagggcugaaug

SEQ ID NO: 1052070 - RNA, 22 nt, Human
cuugcaggauuuugcugcugua

SEQ ID NO: 1052071 - RNA, 21 nt, Human
uuuauuuauauaggacacaug

SEQ ID NO: 1052072 - RNA, 22 nt, Human
uugaggucuucagcugacaccu

SEQ ID NO: 1052073 - RNA, 22 nt, Human
aaaggagacuucagaucuccuu

SEQ ID NO: 1052074 - RNA, 22 nt, Human
cagcaagauuaagggcagaaaa

SEQ ID NO: 1052075 - RNA, 22 nt, Human
auuuauuauugugguuacuucu

SEQ ID NO: 1052076 - RNA, 22 nt, Human
accaggagucuagccuagucaa

SEQ ID NO: 1052077 - RNA, 22 nt, Human
ucugagccagccaccuccuuca

SEQ ID NO: 1052078 - RNA, 22 nt, Human
cugcuaaaccucucugagagcu

SEQ ID NO: 1052079 - RNA, 22 nt, Human
uucacagacuuuccauagauug

SEQ ID NO: 1052080 - RNA, 22 nt, Human
ugaggcucagagaagugcuguu

SEQ ID NO: 1052081 - RNA, 22 nt, Human
gauguguuuccaggauuuguuu

SEQ ID NO: 1052082 - RNA, 22 nt, Human
ggaggacacuggcucugccuuc

SEQ ID NO: 1052083 - RNA, 22 nt, Human
ucaauucugguccucaggaacu

SEQ ID NO: 1052084 - RNA, 22 nt, Human
uaucuagauaccaagaagcaca

SEQ ID NO: 1052085 - RNA, 22 nt, Human
uggcagcuauuacaaggaaguc

SEQ ID NO: 1052086 - RNA, 22 nt, Human
uucuucuuucccccugugguac

SEQ ID NO: 1052087 - RNA, 22 nt, Human
gcugccuguggcccuucugggu

SEQ ID NO: 1052088 - RNA, 22 nt, Human
cuggagagaauguggaaugauu

SEQ ID NO: 1052089 - RNA, 22 nt, Human
ggaggcaggaaagacagguuca

SEQ ID NO: 1052090 - RNA, 17 nt, Human
uucucugagcuguauug

SEQ ID NO: 1052091 - RNA, 22 nt, Human
gcccagggcuucaaagagagaa

SEQ ID NO: 1052092 - RNA, 20 nt, Human
guauuagguguuccucuuuc

SEQ ID NO: 1052093 - RNA, 22 nt, Human
aaagcagauucugaugcaguag

SEQ ID NO: 1052094 - RNA, 19 nt, Human
acccagagcccuuugcagg

SEQ ID NO: 1052095 - RNA, 22 nt, Human
uggcagcacaagguggcccaug

SEQ ID NO: 1052096 - RNA, 22 nt, Human
gcugcagggagcuggaaggcuc

SEQ ID NO: 1052097 - RNA, 22 nt, Human
ugcuguguucuccugacucacc

SEQ ID NO: 1052098 - RNA, 22 nt, Human
ggcagcuguaagaugagugaau

SEQ ID NO: 1052099 - RNA, 22 nt, Human
agaagcagcuuucaaggugauu

SEQ ID NO: 1052100 - RNA, 22 nt, Human
aauacaguaauuuugaugaguu

SEQ ID NO: 1052101 - RNA, 23 nt, Human
uucuucucaauuaguugauucag

SEQ ID NO: 1052102 - RNA, 22 nt, Human
ggugguggagccagcugggagu

SEQ ID NO: 1052103 - RNA, 22 nt, Human
cagagacauccauguuaguugg

SEQ ID NO: 1052104 - RNA, 22 nt, Human
uuugcauaagucauguccagug

SEQ ID NO: 1052105 - RNA, 22 nt, Human
caauaagauguauugagcagag

SEQ ID NO: 1052106 - RNA, 21 nt, Human
aucauucuggaaaauucaagc

SEQ ID NO: 1052107 - RNA, 18 nt, Human
uuuaugagcugugggacc

SEQ ID NO: 1052108 - RNA, 18 nt, Human
ucaggcugcccugugucu

SEQ ID NO: 1052109 - RNA, 22 nt, Human
gcugaggcggaaggauugcuag

SEQ ID NO: 1052110 - RNA, 22 nt, Human
ucucacuggguauaaaugagua

SEQ ID NO: 1052111 - RNA, 22 nt, Human
gcuggcagggacagcugcgugu

SEQ ID NO: 1052112 - RNA, 22 nt, Human
cugagggcccugaagcuuggca

SEQ ID NO: 1052113 - RNA, 22 nt, Human
agguaggggguuugggaacugc

SEQ ID NO: 1052114 - RNA, 22 nt, Human
cagggcugaaaucaagguguag

SEQ ID NO: 1052115 - RNA, 22 nt, Human
ggguacuuaauauuuacggggu

SEQ ID NO: 1052116 - RNA, 19 nt, Human
gcuccugggccucacucau

SEQ ID NO: 1052117 - RNA, 22 nt, Human
aagggcugagaaguggggcugg

SEQ ID NO: 1052118 - RNA, 22 nt, Human
ccagagcugcauccagcagguu

SEQ ID NO: 1052119 - RNA, 22 nt, Human
aggcagcuuucuguaggggugu

SEQ ID NO: 1052120 - RNA, 22 nt, Human
uuugaaagccuggcuuuucucu

SEQ ID NO: 1052121 - RNA, 22 nt, Human
aguguugcaugaggcaguacca

SEQ ID NO: 1052122 - RNA, 22 nt, Human
aucugccugcaguggagguggg

SEQ ID NO: 1052123 - RNA, 22 nt, Human
cagcaagacaaggaacaaacug

SEQ ID NO: 1052124 - RNA, 22 nt, Human
gucuucaauagagccucaauuu

SEQ ID NO: 1052125 - RNA, 22 nt, Human
uuauacaguuuauacuuagaau

SEQ ID NO: 1052126 - RNA, 22 nt, Human
ugaaaugagcauuuauucuuua

SEQ ID NO: 1052127 - RNA, 22 nt, Human
cucaguuucuuacucuguauaa

SEQ ID NO: 1052128 - RNA, 22 nt, Human
uagggcugcugcagaugacagg

SEQ ID NO: 1052129 - RNA, 22 nt, Human
uauuuguugaguuguuaugucu

SEQ ID NO: 1052130 - RNA, 22 nt, Human
cccagaaggucgaggcugcagu

SEQ ID NO: 1052131 - RNA, 22 nt, Human
cccaggaggucgaagcugcagu

SEQ ID NO: 1052132 - RNA, 22 nt, Human
gggcagcugccaagugcaucgc

SEQ ID NO: 1052133 - RNA, 22 nt, Human
uuugacaaaggaaaaaugcaca

SEQ ID NO: 1052134 - RNA, 22 nt, Human
cagggcugaggacacaaguaaa

SEQ ID NO: 1052135 - RNA, 22 nt, Human
ucucagaguuuagagcugagcc

SEQ ID NO: 1052136 - RNA, 22 nt, Human
ugaaagguuauuuaggucugcu

SEQ ID NO: 1052137 - RNA, 22 nt, Human
uccaggagagguagaggguucc

SEQ ID NO: 1052138 - RNA, 22 nt, Human
gccagguggagguugcagugag

SEQ ID NO: 1052139 - RNA, 22 nt, Human
uucaauucuaaacuaauauucu

SEQ ID NO: 1052140 - RNA, 18 nt, Human
gccugccuagagcuugcc

SEQ ID NO: 1052141 - RNA, 22 nt, Human
uuuauuaauguagcauccaugg

SEQ ID NO: 1052142 - RNA, 22 nt, Human
uguucucacuggaugcuucaca

SEQ ID NO: 1052143 - RNA, 22 nt, Human
uugaaggacauccuauuucuag

SEQ ID NO: 1052144 - RNA, 20 nt, Human
gaggcccagagaggugaagc

SEQ ID NO: 1052145 - RNA, 22 nt, Human
ucucuucucuagugagcaacug

SEQ ID NO: 1052146 - RNA, 22 nt, Human
aauacauauggaauuccauguu

SEQ ID NO: 1052147 - RNA, 22 nt, Human
uguugauuaguguuuagacuua

SEQ ID NO: 1052148 - RNA, 22 nt, Human
gcacagcucgagcucaggaggg

SEQ ID NO: 1052149 - RNA, 22 nt, Human
uaggcugggagccugaggcuag

SEQ ID NO: 1052150 - RNA, 22 nt, Human
ggagaggacauggcucccacag

SEQ ID NO: 1052151 - RNA, 18 nt, Human
ggcaucugcacagcagcc

SEQ ID NO: 1052152 - RNA, 22 nt, Human
aagacugugucuauggcuacuc

SEQ ID NO: 1052153 - RNA, 22 nt, Human
guugaaaguagaugcuauuugg

SEQ ID NO: 1052154 - RNA, 22 nt, Human
ugagaugcuaaagggcugcuca

SEQ ID NO: 1052155 - RNA, 22 nt, Human
uuugaaagcaccauuugaguag

SEQ ID NO: 1052156 - RNA, 22 nt, Human
auucaaguccagcuucucuaca

SEQ ID NO: 1052157 - RNA, 22 nt, Human
uuuagagcccaugugaguguga

SEQ ID NO: 1052158 - RNA, 22 nt, Human
caguugccuacuacauggcagg

SEQ ID NO: 1052159 - RNA, 22 nt, Human
ugaaaggugacauuucuuggau

SEQ ID NO: 1052160 - RNA, 22 nt, Human
uggcagcuaucuuuaaugagau

SEQ ID NO: 1052161 - RNA, 22 nt, Human
caaaauuagggagugagcugga

SEQ ID NO: 1052162 - RNA, 22 nt, Human
acaguacaccacuguguacagu

SEQ ID NO: 1052163 - RNA, 22 nt, Human
agucucuuccuucaaggcuggu

SEQ ID NO: 1052164 - RNA, 22 nt, Human
gaagcagcuuucuggugaggag

SEQ ID NO: 1052165 - RNA, 20 nt, Human
ccuggagccuggaaggaguc

SEQ ID NO: 1052166 - RNA, 22 nt, Human
acagucuugcuguauggucagg

SEQ ID NO: 1052167 - RNA, 18 nt, Human
ggucuuuaggucaguguc

SEQ ID NO: 1052168 - RNA, 22 nt, Human
uacugccuggagcauuggugcu

SEQ ID NO: 1052169 - RNA, 22 nt, Human
aggaaaggccuuugcauuuggu

SEQ ID NO: 1052170 - RNA, 22 nt, Human
ugcaggaaucagaggggaagcg

SEQ ID NO: 1052171 - RNA, 22 nt, Human
ggauggagguucucagaugcuc

SEQ ID NO: 1052172 - RNA, 22 nt, Human
gaggagcugggucagggagaca

SEQ ID NO: 1052173 - RNA, 22 nt, Human
acugagguaauugugaggauua

SEQ ID NO: 1052174 - RNA, 22 nt, Human
ggagaggaaaugccagcacuuc

SEQ ID NO: 1052175 - RNA, 22 nt, Human
ccuggcuggacuggaccguggc

SEQ ID NO: 1052176 - RNA, 20 nt, Human
uucaggauucuagaccacac

SEQ ID NO: 1052177 - RNA, 22 nt, Human
gagaaaugcaugcaugucauca

SEQ ID NO: 1052178 - RNA, 22 nt, Human
uguugaagauaaaguucucauu

SEQ ID NO: 1052179 - RNA, 22 nt, Human
cuauuagguaugugguugcuau

SEQ ID NO: 1052180 - RNA, 22 nt, Human
ucuggcaaaggcaaccacaguu

SEQ ID NO: 1052181 - RNA, 22 nt, Human
aagaacuuccuaauauauuuuc

SEQ ID NO: 1052182 - RNA, 19 nt, Human
uggcaggcccaggauggac

SEQ ID NO: 1052183 - RNA, 22 nt, Human
cccaggagaccuagaucuguuu

SEQ ID NO: 1052184 - RNA, 21 nt, Human
cccaggaguccuauuuaaaug

SEQ ID NO: 1052185 - RNA, 22 nt, Human
ucaggagaaucagggcuguccu

SEQ ID NO: 1052186 - RNA, 22 nt, Human
auacacauauguguguauaugu

SEQ ID NO: 1052187 - RNA, 22 nt, Human
uuugaaagggacaaagucacug

SEQ ID NO: 1052188 - RNA, 22 nt, Human
gaugagcauuguuucauguguu

SEQ ID NO: 1052189 - RNA, 22 nt, Human
gagaacugauuagcauuugcca

SEQ ID NO: 1052190 - RNA, 22 nt, Human
caggcagcaggagcccugcucg

SEQ ID NO: 1052191 - RNA, 22 nt, Human
gccucaguugaucugugugagc

SEQ ID NO: 1052192 - RNA, 22 nt, Human
agugacagggaaggauaggauu

SEQ ID NO: 1052193 - RNA, 20 nt, Human
ugaggcccagcagagucggg

SEQ ID NO: 1052194 - RNA, 17 nt, Human
aagagaggcugagcugg

SEQ ID NO: 1052195 - RNA, 22 nt, Human
agcaagauuuaaacccagguca

SEQ ID NO: 1052196 - RNA, 22 nt, Human
uggcuucucuguuuuaguauuu

SEQ ID NO: 1052197 - RNA, 22 nt, Human
cccuggaguccuggcaguugau

SEQ ID NO: 1052198 - RNA, 22 nt, Human
cagaacugagucucauggccau

SEQ ID NO: 1052199 - RNA, 22 nt, Human
agaggucagauuucuccuggug

SEQ ID NO: 1052200 - RNA, 22 nt, Human
cucacuguuuaauagcuggauc

SEQ ID NO: 1052201 - RNA, 22 nt, Human
gagaaacuuggaguuauucugg

SEQ ID NO: 1052202 - RNA, 22 nt, Human
accuguuuggaggagguguuag

SEQ ID NO: 1052203 - RNA, 22 nt, Human
cuucagaagaaaagcagugugu

SEQ ID NO: 1052204 - RNA, 22 nt, Human
uauuuccagcaguaagaagaca

SEQ ID NO: 1052205 - RNA, 19 nt, Human
uccaccuuucuucauuugg

SEQ ID NO: 1052206 - RNA, 22 nt, Human
uuugaaaggguuaugagacuga

SEQ ID NO: 1052207 - RNA, 22 nt, Human
uugguuuagagagugugguuac

SEQ ID NO: 1052208 - RNA, 22 nt, Human
aacauacauauuucagugucca

SEQ ID NO: 1052209 - RNA, 22 nt, Human
uuaaauuagucaagcuucucug

SEQ ID NO: 1052210 - RNA, 22 nt, Human
gggcagcugucuugguucucaa

SEQ ID NO: 1052211 - RNA, 22 nt, Human
cuguggaauugaugcuuagugu

SEQ ID NO: 1052212 - RNA, 22 nt, Human
ccaggcagcaaauuuucugaau

SEQ ID NO: 1052213 - RNA, 22 nt, Human
ugaggcaggagaaucaccggaa

SEQ ID NO: 1052214 - RNA, 22 nt, Human
ucuucucucauguaggagggaa

SEQ ID NO: 1052215 - RNA, 22 nt, Human
auuccaguuggguucuaauaca

SEQ ID NO: 1052216 - RNA, 22 nt, Human
ugaggcaggacugagcgggaug

SEQ ID NO: 1052217 - RNA, 22 nt, Human
uuaauuuuaaccuguuuguguc

SEQ ID NO: 1052218 - RNA, 22 nt, Human
uucagcaagaccaccauguacc

SEQ ID NO: 1052219 - RNA, 20 nt, Human
gccaggagggugugaugagc

SEQ ID NO: 1052220 - RNA, 22 nt, Human
ucucgacagccuggcacagugg

SEQ ID NO: 1052221 - RNA, 22 nt, Human
uauuggucuuggaagguuuugu

SEQ ID NO: 1052222 - RNA, 23 nt, Human
cagggaggagauacuguguaucu

SEQ ID NO: 1052223 - RNA, 22 nt, Human
ugucagcucccagucagagaga

SEQ ID NO: 1052224 - RNA, 22 nt, Human
ggccagcucugcacagcagcug

SEQ ID NO: 1052225 - RNA, 22 nt, Human
ccccucccugaccugguugggc

SEQ ID NO: 1052226 - RNA, 22 nt, Human
cccaagagcuucuaggacgcug

SEQ ID NO: 1052227 - RNA, 22 nt, Human
agagggagcccagucauagcug

SEQ ID NO: 1052228 - RNA, 22 nt, Human
uguaggauguaaggcaggcauc

SEQ ID NO: 1052229 - RNA, 22 nt, Human
ucuccuggcucuaaaaggcugu

SEQ ID NO: 1052230 - RNA, 22 nt, Human
uggcgcaacucauucauggugu

SEQ ID NO: 1052231 - RNA, 22 nt, Human
cagccugagccuucuguagcaa

SEQ ID NO: 1052232 - RNA, 22 nt, Human
ggcagaagauaggacagggaau

SEQ ID NO: 1052233 - RNA, 22 nt, Human
agaaaggagaccagcucugccc

SEQ ID NO: 1052234 - RNA, 22 nt, Human
aggccagcccugggcugagaga

SEQ ID NO: 1052235 - RNA, 22 nt, Human
aauugcuaaagauuauguuuuc

SEQ ID NO: 1052236 - RNA, 22 nt, Human
ccagggccugccacuuagcaag

SEQ ID NO: 1052237 - RNA, 21 nt, Human
gcucagaguauugcacuguuu

SEQ ID NO: 1052238 - RNA, 22 nt, Human
cuuuggcagccucugcuauuga

SEQ ID NO: 1052239 - RNA, 22 nt, Human
ggcugcagaggcccccaguggg

SEQ ID NO: 1052240 - RNA, 22 nt, Human
aaucuuucccuauuaaaugugg

SEQ ID NO: 1052241 - RNA, 21 nt, Human
agcagaggcagaauguaugca

SEQ ID NO: 1052242 - RNA, 22 nt, Human
ucauuuauaaggaugcaauuaa

SEQ ID NO: 1052243 - RNA, 22 nt, Human
uucuucagucccacuagccaca

SEQ ID NO: 1052244 - RNA, 22 nt, Human
uggcugaguguuccaaggagca

SEQ ID NO: 1052245 - RNA, 22 nt, Human
ucugagguuauugucugccauu

SEQ ID NO: 1052246 - RNA, 22 nt, Human
gacuuucugauguaaacauuua

SEQ ID NO: 1052247 - RNA, 22 nt, Human
ugcccugggaguuggagcugcu

SEQ ID NO: 1052248 - RNA, 22 nt, Human
gagggcugcugccagauaugcc

SEQ ID NO: 1052249 - RNA, 21 nt, Human
ggcagccugacccccagagag

SEQ ID NO: 1052250 - RNA, 23 nt, Human
cuccccaguguccucaugcaucu

SEQ ID NO: 1052251 - RNA, 22 nt, Human
acacauuuacauguuuacguau

SEQ ID NO: 1052252 - RNA, 22 nt, Human
uccaggagauacacugcaccag

SEQ ID NO: 1052253 - RNA, 22 nt, Human
guggccaaacaccaguuuagga

SEQ ID NO: 1052254 - RNA, 22 nt, Human
cuucugugcuucacaguugcca

SEQ ID NO: 1052255 - RNA, 22 nt, Human
gaaggucaccuccccucucugg

SEQ ID NO: 1052256 - RNA, 22 nt, Human
aauuccuaguuguacuuaguga

SEQ ID NO: 1052257 - RNA, 22 nt, Human
ggccaggagaggagggcacuga

SEQ ID NO: 1052258 - RNA, 22 nt, Human
gcccaggagguggaggugcagu

SEQ ID NO: 1052259 - RNA, 22 nt, Human
gagaggaguagacacuuugguu

SEQ ID NO: 1052260 - RNA, 22 nt, Human
uugcuggcuugaagauagagga

SEQ ID NO: 1052261 - RNA, 22 nt, Human
ccuggccagcuaauugcccauc

SEQ ID NO: 1052262 - RNA, 22 nt, Human
cagagaaaaaauccugcucuca

SEQ ID NO: 1052263 - RNA, 22 nt, Human
uaacuguaauauaaauaugagu

SEQ ID NO: 1052264 - RNA, 22 nt, Human
gaggcaguguugaaaaggagag

SEQ ID NO: 1052265 - RNA, 22 nt, Human
aggaagcuagagccaccggacu

SEQ ID NO: 1052266 - RNA, 22 nt, Human
cuuccugggcaauguucugcuu

SEQ ID NO: 1052267 - RNA, 19 nt, Human
gaggucagcaagaaguauu

SEQ ID NO: 1052268 - RNA, 18 nt, Human
uggcuucuauuuuacuca

SEQ ID NO: 1052269 - RNA, 22 nt, Human
cuccugggagucuuccuggaug

SEQ ID NO: 1052270 - RNA, 22 nt, Human
uccaaaguaauuucacuucugu

SEQ ID NO: 1052271 - RNA, 22 nt, Human
uuuauuguuaucaugggugagu

SEQ ID NO: 1052272 - RNA, 22 nt, Human
cugaggucaauuaaucaacaac

SEQ ID NO: 1052273 - RNA, 22 nt, Human
uuuguuuacucauucauugaug

SEQ ID NO: 1052274 - RNA, 22 nt, Human
augcuguggaugccuugcccca

SEQ ID NO: 1052275 - RNA, 22 nt, Human
uaaaccuugguagcaucuugcu

SEQ ID NO: 1052276 - RNA, 22 nt, Human
guuuaaauaauuaggggccugu

SEQ ID NO: 1052277 - RNA, 21 nt, Human
agucuguuaggaugacucuga

SEQ ID NO: 1052278 - RNA, 22 nt, Human
gagcccugacacugagggaguu

SEQ ID NO: 1052279 - RNA, 22 nt, Human
ucugaggucagugcugcaguua

SEQ ID NO: 1052280 - RNA, 21 nt, Human
ggcagcucagcagauggggac

SEQ ID NO: 1052281 - RNA, 22 nt, Human
cccaggagguagagguugcagu

SEQ ID NO: 1052282 - RNA, 22 nt, Human
uugggcucaggaguuugagacc

SEQ ID NO: 1052283 - RNA, 22 nt, Human
uccugggcaaaaguaucuguga

SEQ ID NO: 1052284 - RNA, 22 nt, Human
uaucuuguaauagguccacuug

SEQ ID NO: 1052285 - RNA, 22 nt, Human
uaaggccagccagcaaaucugu

SEQ ID NO: 1052286 - RNA, 22 nt, Human
accaggagguguuugcucaagu

SEQ ID NO: 1052287 - RNA, 22 nt, Human
uccugccugcaaucccagcacu

SEQ ID NO: 1052288 - RNA, 22 nt, Human
ucuuuguaaaugccuagcauaa

SEQ ID NO: 1052289 - RNA, 22 nt, Human
gaguccaggcuguugcucaucu

SEQ ID NO: 1052290 - RNA, 22 nt, Human
agauauauuuccugcccaaggc

SEQ ID NO: 1052291 - RNA, 17 nt, Human
ggcagcugugugcaugc

SEQ ID NO: 1052292 - RNA, 17 nt, Human
agaggcagauacuugga

SEQ ID NO: 1052293 - RNA, 22 nt, Human
augcugagcagagcugacaugc

SEQ ID NO: 1052294 - RNA, 19 nt, Human
ccaggagagcuuggagaag

SEQ ID NO: 1052295 - RNA, 22 nt, Human
uuauacagcauugcuagugaug

SEQ ID NO: 1052296 - RNA, 23 nt, Human
uugcuuucaucaugagaugcucc

SEQ ID NO: 1052297 - RNA, 22 nt, Human
aggaagcuccuggagagccagu

SEQ ID NO: 1052298 - RNA, 22 nt, Human
caaauguauaaauguacuuucu

SEQ ID NO: 1052299 - RNA, 22 nt, Human
uggguccacaaacaucagauau

SEQ ID NO: 1052300 - RNA, 17 nt, Human
cauuuguugaucaguug

SEQ ID NO: 1052301 - RNA, 22 nt, Human
agugcuuuaccuagauaauguu

SEQ ID NO: 1052302 - RNA, 21 nt, Human
ugaaugaggaggauggcauuu

SEQ ID NO: 1052303 - RNA, 21 nt, Human
ugguacagaggaggugaagug

SEQ ID NO: 1052304 - RNA, 22 nt, Human
cuggaguuagaguagacacuga

SEQ ID NO: 1052305 - RNA, 22 nt, Human
uuugcauaaaggagcauuucuc

SEQ ID NO: 1052306 - RNA, 22 nt, Human
acagucugucccccaggugcua

SEQ ID NO: 1052307 - RNA, 22 nt, Human
uucaucuguaguuuuuccaagg

SEQ ID NO: 1052308 - RNA, 22 nt, Human
uuauuaugguauuucuuugcag

SEQ ID NO: 1052309 - RNA, 22 nt, Human
uggcaugaagucagcagcuggg

SEQ ID NO: 1052310 - RNA, 23 nt, Human
cacuccuguuucuaagccagcau

SEQ ID NO: 1052311 - RNA, 20 nt, Human
gccugccucagcuagcugag

SEQ ID NO: 1052312 - RNA, 22 nt, Human
aagacauugucauuuuauaauu

SEQ ID NO: 1052313 - RNA, 22 nt, Human
auacaucuugucagauucaugu

SEQ ID NO: 1052314 - RNA, 22 nt, Human
uauuagguaugaacuggcaacc

SEQ ID NO: 1052315 - RNA, 22 nt, Human
cagaacuggccuuucaucaguc

SEQ ID NO: 1052316 - RNA, 22 nt, Human
cagaugagcaugggcacaagca

SEQ ID NO: 1052317 - RNA, 22 nt, Human
uagggcagagcuuguacacgau

SEQ ID NO: 1052318 - RNA, 23 nt, Human
aaugauuucaugaugauagcagc

SEQ ID NO: 1052319 - RNA, 17 nt, Human
cagggcugucugccuag

SEQ ID NO: 1052320 - RNA, 22 nt, Human
accagagcuuacaugcuagaaa

SEQ ID NO: 1052321 - RNA, 22 nt, Human
agagcagcugugacauggacag

SEQ ID NO: 1052322 - RNA, 22 nt, Human
uccagaaacuuuuccagucuca

SEQ ID NO: 1052323 - RNA, 22 nt, Human
gcugaggccccagggugauggg

SEQ ID NO: 1052324 - RNA, 22 nt, Human
cccaggaaacccgaaggcgacc

SEQ ID NO: 1052325 - RNA, 22 nt, Human
ucuccugguuuguuaaauaauu

SEQ ID NO: 1052326 - RNA, 22 nt, Human
ugccccagaccuacugaauggg

SEQ ID NO: 1052327 - RNA, 22 nt, Human
aggcaagcugcagagaguccuu

SEQ ID NO: 1052328 - RNA, 23 nt, Human
auaaauuacuaucucccuagagc

SEQ ID NO: 1052329 - RNA, 22 nt, Human
gcaucuaaauaaacgugggagu

SEQ ID NO: 1052330 - RNA, 22 nt, Human
uacuuucuagcucuccccaguu

SEQ ID NO: 1052331 - RNA, 22 nt, Human
ggcugcugacaaacaugaucau

SEQ ID NO: 1052332 - RNA, 21 nt, Human
acaggagaccgccuggcaguc

SEQ ID NO: 1052333 - RNA, 22 nt, Human
acaaauguggacauggauaaug

SEQ ID NO: 1052334 - RNA, 22 nt, Human
aaacugguaaucggcaagugag

SEQ ID NO: 1052335 - RNA, 22 nt, Human
caaaugauaccuauuacuaggc

SEQ ID NO: 1052336 - RNA, 22 nt, Human
cugggccagaccuuguggucuu

SEQ ID NO: 1052337 - RNA, 22 nt, Human
cagcagcugcaaauggaaacag

SEQ ID NO: 1052338 - RNA, 22 nt, Human
uauagccauuuccaguggcauc

SEQ ID NO: 1052339 - RNA, 21 nt, Human
ucugagagcaacugcccuuua

SEQ ID NO: 1052340 - RNA, 23 nt, Human
agggccuggcguggagugugugc

SEQ ID NO: 1052341 - RNA, 22 nt, Human
gaggcagcuggguccggucggg

SEQ ID NO: 1052342 - RNA, 22 nt, Human
gcucaggacuggaggagcgggg

SEQ ID NO: 1052343 - RNA, 21 nt, Human
ucugacuugaucuauucuccc

SEQ ID NO: 1052344 - RNA, 22 nt, Human
ucauuuguggaagugauugugg

SEQ ID NO: 1052345 - RNA, 22 nt, Human
aauuuccagaucagaugacuca

SEQ ID NO: 1052346 - RNA, 22 nt, Human
aggccagaugucgggcuagaag

SEQ ID NO: 1052347 - RNA, 22 nt, Human
aucacauuguuagcauagacug

SEQ ID NO: 1052348 - RNA, 22 nt, Human
ucagagagugcaaaauauagcu

SEQ ID NO: 1052349 - RNA, 22 nt, Human
cugggccaaaagaaguguucuu

SEQ ID NO: 1052350 - RNA, 22 nt, Human
uggcagcagggccccuggagga

SEQ ID NO: 1052351 - RNA, 22 nt, Human
aagggcuggagacugggucuuc

SEQ ID NO: 1052352 - RNA, 22 nt, Human
cagggcugaacugagcuuguga

SEQ ID NO: 1052353 - RNA, 22 nt, Human
ugaggcaguucuuacuuguauu

SEQ ID NO: 1052354 - RNA, 22 nt, Human
uggcugagaaugggaugaugcc

SEQ ID NO: 1052355 - RNA, 22 nt, Human
acuacacugcccuggggaucaa

SEQ ID NO: 1052356 - RNA, 19 nt, Human
ccuggcucugagcccagcc

SEQ ID NO: 1052357 - RNA, 22 nt, Human
aaacugguauucaaauguuugg

SEQ ID NO: 1052358 - RNA, 22 nt, Human
aggcaggcacuccggaaguguc

SEQ ID NO: 1052359 - RNA, 22 nt, Human
aaguaguuaggaacauucucuc

SEQ ID NO: 1052360 - RNA, 22 nt, Human
acuggcagagacccugauggcc

SEQ ID NO: 1052361 - RNA, 22 nt, Human
agggggugucucugauuggguu

SEQ ID NO: 1052362 - RNA, 22 nt, Human
augcugugagugugccgcagag

SEQ ID NO: 1052363 - RNA, 22 nt, Human
ggcugcugggucaugaugcaga

SEQ ID NO: 1052364 - RNA, 22 nt, Human
aaguagugugcuccagcgguga

SEQ ID NO: 1052365 - RNA, 22 nt, Human
uugcugugucauuuguuuaauc

SEQ ID NO: 1052366 - RNA, 22 nt, Human
ucucugaguaagugacaguuca

SEQ ID NO: 1052367 - RNA, 22 nt, Human
auugaaagagaauguagcucuu

SEQ ID NO: 1052368 - RNA, 22 nt, Human
ucaggcugugggcacuggccau

SEQ ID NO: 1052369 - RNA, 20 nt, Human
auacacuugcccagcuugug

SEQ ID NO: 1052370 - RNA, 22 nt, Human
gaggccaggacaugaaagcuga

SEQ ID NO: 1052371 - RNA, 22 nt, Human
gaggcacugcaguacagugacu

SEQ ID NO: 1052372 - RNA, 22 nt, Human
ugaaaugauuauaugguguuug

SEQ ID NO: 1052373 - RNA, 22 nt, Human
uuugaaauuaagauauugucca

SEQ ID NO: 1052374 - RNA, 22 nt, Human
gcggagggcgagcccgcggagc

SEQ ID NO: 1052375 - RNA, 22 nt, Human
uuuauaaguacuuugucugcuu

SEQ ID NO: 1052376 - RNA, 22 nt, Human
uacagcuaggcaaaaaugacau

SEQ ID NO: 1052377 - RNA, 22 nt, Human
ucauuucaaugauacuacuaag

SEQ ID NO: 1052378 - RNA, 23 nt, Human
agugcugaauugaaagcuccagg

SEQ ID NO: 1052379 - RNA, 22 nt, Human
gcuccuggugcuguagagauuu

SEQ ID NO: 1052380 - RNA, 22 nt, Human
ucccaggaagaucccagggacc

SEQ ID NO: 1052381 - RNA, 22 nt, Human
gucaggaucaaauugaaguuau

SEQ ID NO: 1052382 - RNA, 22 nt, Human
augcuuccaaggcuaagacaag

SEQ ID NO: 1052383 - RNA, 15 nt, Human
ccaggcugggugagc

SEQ ID NO: 1052384 - RNA, 22 nt, Human
ugaacucgggaggaggcugcag

SEQ ID NO: 1052385 - RNA, 22 nt, Human
gcaccuuucuauauucaguggc

SEQ ID NO: 1052386 - RNA, 22 nt, Human
aagggcuggccacauucugggu

SEQ ID NO: 1052387 - RNA, 22 nt, Human
ucagguggcuuggagggggacg

SEQ ID NO: 1052388 - RNA, 22 nt, Human
caaggcugcugcgggucgcacc

SEQ ID NO: 1052389 - RNA, 22 nt, Human
uauuagcgcuuacugaguugcc

SEQ ID NO: 1052390 - RNA, 22 nt, Human
uccuggcccaaucugcccauga

SEQ ID NO: 1052391 - RNA, 22 nt, Human
ucccaggaugugcgugccgccg

SEQ ID NO: 1052392 - RNA, 21 nt, Human
ugauacaggaaugguucuaug

SEQ ID NO: 1052393 - RNA, 22 nt, Human
gaaggccaguuuugagauaggu

SEQ ID NO: 1052394 - RNA, 22 nt, Human
ggcggcacgcaggcugcugucg

SEQ ID NO: 1052395 - RNA, 22 nt, Human
ucaaauaccagcaauuucaugu

SEQ ID NO: 1052396 - RNA, 22 nt, Human
ucacaaaagcuuuugaauuugg

SEQ ID NO: 1052397 - RNA, 22 nt, Human
cccgggaggaggaaguugcagu

SEQ ID NO: 1052398 - RNA, 20 nt, Human
augcuuucuugugugcugcu

SEQ ID NO: 1052399 - RNA, 22 nt, Human
aagggcuguaguuuguugauca

SEQ ID NO: 1052400 - RNA, 22 nt, Human
accauguguuuuacacauggua

SEQ ID NO: 1052401 - RNA, 22 nt, Human
uugaaaggguuaaagugguaaa

SEQ ID NO: 1052402 - RNA, 22 nt, Human
gcugaggugucaccuugcuggg

SEQ ID NO: 1052403 - RNA, 22 nt, Human
uccuggccuccguucucugcau

SEQ ID NO: 1052404 - RNA, 22 nt, Human
ggcaggcaaugaggaugggaag

SEQ ID NO: 1052405 - RNA, 22 nt, Human
ucaggcugaaggaggccuaucu

SEQ ID NO: 1052406 - RNA, 22 nt, Human
gcuacugauugaccuuggagag

SEQ ID NO: 1052407 - RNA, 22 nt, Human
ggcuuggaaauugcaggacaca

SEQ ID NO: 1052408 - RNA, 22 nt, Human
agcucccagagcucgagaguaa

SEQ ID NO: 1052409 - RNA, 22 nt, Human
acucaggaaauugagauaaugg

SEQ ID NO: 1052410 - RNA, 22 nt, Human
caggcugcagcagcaguggccc

SEQ ID NO: 1052411 - RNA, 19 nt, Human
ucaucucacagggccuggc

SEQ ID NO: 1052412 - RNA, 22 nt, Human
gcugagagcggccagcugggaa

SEQ ID NO: 1052413 - RNA, 22 nt, Human
uguguuauugccacugaagacc

SEQ ID NO: 1052414 - RNA, 22 nt, Human
uuuacaaccucauauucugaug

SEQ ID NO: 1052415 - RNA, 22 nt, Human
gaggcagccagagguucucauu

SEQ ID NO: 1052416 - RNA, 22 nt, Human
uaacuguacaacugguuaguca

SEQ ID NO: 1052417 - RNA, 22 nt, Human
caagaugaaauugugauauuuu

SEQ ID NO: 1052418 - RNA, 22 nt, Human
uggcugagguaacuaugaauaa

SEQ ID NO: 1052419 - RNA, 22 nt, Human
cagggcuggcuuccaaguuguu

SEQ ID NO: 1052420 - RNA, 22 nt, Human
agauggcagggguaccuggaag

SEQ ID NO: 1052421 - RNA, 22 nt, Human
ggacagcugcuuucaggccaca

SEQ ID NO: 1052422 - RNA, 22 nt, Human
ggucagagggugggcugccugu

SEQ ID NO: 1052423 - RNA, 22 nt, Human
ucagauggguuuugaaggaugu

SEQ ID NO: 1052424 - RNA, 22 nt, Human
ccaggcugcuuuauuacucugu

SEQ ID NO: 1052425 - RNA, 22 nt, Human
cuaggcugagcugggcugagcu

SEQ ID NO: 1052426 - RNA, 22 nt, Human
agcuucuuggcucagcacuugg

SEQ ID NO: 1052427 - RNA, 22 nt, Human
ucuuccucuagaucugaggccc

SEQ ID NO: 1052428 - RNA, 22 nt, Human
cugaaaauguuacacaggaaga

SEQ ID NO: 1052429 - RNA, 22 nt, Human
aggcagugccuggaccccagcu

SEQ ID NO: 1052430 - RNA, 22 nt, Human
aagcuggcaugucaccugagaa

SEQ ID NO: 1052431 - RNA, 20 nt, Human
accaggagauggaggcaggg

SEQ ID NO: 1052432 - RNA, 22 nt, Human
auguagagcaguguuguccaau

SEQ ID NO: 1052433 - RNA, 22 nt, Human
gcugcaggcucugcaggaauug

SEQ ID NO: 1052434 - RNA, 22 nt, Human
ucucuggccgagagucccuggg

SEQ ID NO: 1052435 - RNA, 19 nt, Human
uaacugguuaaaaagcuug

SEQ ID NO: 1052436 - RNA, 22 nt, Human
ugcccuggggucuggagcagca

SEQ ID NO: 1052437 - RNA, 22 nt, Human
uugcagcuuagugauguuaucu

SEQ ID NO: 1052438 - RNA, 22 nt, Human
cuugcuucauuagugucuuagu

SEQ ID NO: 1052439 - RNA, 22 nt, Human
cccaggaaaagcagugccagca

SEQ ID NO: 1052440 - RNA, 22 nt, Human
gcuggagaugcuaugcagaggg

SEQ ID NO: 1052441 - RNA, 22 nt, Human
gacccaggagagaggguugcau

SEQ ID NO: 1052442 - RNA, 22 nt, Human
cugguccauucucucccugaag

SEQ ID NO: 1052443 - RNA, 22 nt, Human
gaggcgagaagcuggagauggu

SEQ ID NO: 1052444 - RNA, 22 nt, Human
uaggaugaaaauccagcuuaua

SEQ ID NO: 1052445 - RNA, 22 nt, Human
uucagaaaaaacuucaauaagu

SEQ ID NO: 1052446 - RNA, 22 nt, Human
uuuugugagcccauaaaugcca

SEQ ID NO: 1052447 - RNA, 22 nt, Human
uuguuauaaagacuaaauaugu

SEQ ID NO: 1052448 - RNA, 22 nt, Human
ucaggagaguguucaguggagg

SEQ ID NO: 1052449 - RNA, 22 nt, Human
cugcugugcuuguggccacccg

SEQ ID NO: 1052450 - RNA, 22 nt, Human
ucaucuugcugccauugcuuua

SEQ ID NO: 1052451 - RNA, 22 nt, Human
ugaggggaaggcaugauaaaua

SEQ ID NO: 1052452 - RNA, 22 nt, Human
agcugcugcggaaagaugccac

SEQ ID NO: 1052453 - RNA, 22 nt, Human
cccucuacagggaagcgcuuuc

SEQ ID NO: 1052454 - RNA, 22 nt, Human
uuucaaagucaauaucauuacc

SEQ ID NO: 1052455 - RNA, 22 nt, Human
uucaggauucuuucagacuggg

SEQ ID NO: 1052456 - RNA, 22 nt, Human
gaggucccccauggcugugacu

SEQ ID NO: 1052457 - RNA, 22 nt, Human
gaggagcuugugagaagauguc

SEQ ID NO: 1052458 - RNA, 22 nt, Human
cugccagucuaugcugcucggc

SEQ ID NO: 1052459 - RNA, 22 nt, Human
auggcuggaggccgggcuuccu

SEQ ID NO: 1052460 - RNA, 22 nt, Human
acaggcuggugguccuggccau

SEQ ID NO: 1052461 - RNA, 22 nt, Human
aggcagcugugaggacuggauu

SEQ ID NO: 1052462 - RNA, 22 nt, Human
uucuuacagaguuuacagagcc

SEQ ID NO: 1052463 - RNA, 19 nt, Human
gacagugcaguuguaguac

SEQ ID NO: 1052464 - RNA, 22 nt, Human
ucaggcuguagggccccuggag

SEQ ID NO: 1052465 - RNA, 22 nt, Human
aauuauacaauugucaaguucu

SEQ ID NO: 1052466 - RNA, 22 nt, Human
aggcacaguggcucacaccugu

SEQ ID NO: 1052467 - RNA, 19 nt, Human
ugaggccaaggucacagau

SEQ ID NO: 1052468 - RNA, 22 nt, Human
acucaggaaaugagaggcucuc

SEQ ID NO: 1052469 - RNA, 22 nt, Human
uucagaaacagagugagugagu

SEQ ID NO: 1052470 - RNA, 22 nt, Human
ugcugaugcuguucuguuagga

SEQ ID NO: 1052471 - RNA, 18 nt, Human
cugcccagagcacuugug

SEQ ID NO: 1052472 - RNA, 22 nt, Human
uauuuccaggccccacucuaga

SEQ ID NO: 1052473 - RNA, 22 nt, Human
gagugucacuugaugcagggca

SEQ ID NO: 1052474 - RNA, 22 nt, Human
guauuagguuggugcaaaauug

SEQ ID NO: 1052475 - RNA, 22 nt, Human
guggucagcagcagugggagug

SEQ ID NO: 1052476 - RNA, 21 nt, Human
gccucuccaaauccugccuuc

SEQ ID NO: 1052477 - RNA, 22 nt, Human
aaugaauugcaguacugacuug

SEQ ID NO: 1052478 - RNA, 22 nt, Human
uaauacagaaguguauuaaaau

SEQ ID NO: 1052479 - RNA, 22 nt, Human
aucaggauagucuguaaauugu

SEQ ID NO: 1052480 - RNA, 22 nt, Human
gcugccugcucacccggccugg

SEQ ID NO: 1052481 - RNA, 22 nt, Human
gaaccucagugaaacuggaggu

SEQ ID NO: 1052482 - RNA, 22 nt, Human
acugagguuuacuugaaggaga

SEQ ID NO: 1052483 - RNA, 22 nt, Human
guacacuugucuugaacagccu

SEQ ID NO: 1052484 - RNA, 22 nt, Human
aggcaguggcugagaccagggg

SEQ ID NO: 1052485 - RNA, 22 nt, Human
gcuguagauggacuggcaucca

SEQ ID NO: 1052486 - RNA, 21 nt, Human
gcaaauguucaggaaaaaaga

SEQ ID NO: 1052487 - RNA, 22 nt, Human
gcugcccaggagagguggggcu

SEQ ID NO: 1052488 - RNA, 22 nt, Human
auaguuacaaagacuuuuuaaa

SEQ ID NO: 1052489 - RNA, 22 nt, Human
caaauguauucucacuucaggg

SEQ ID NO: 1052490 - RNA, 22 nt, Human
uuuuaacuuaaaauacauagau

SEQ ID NO: 1052491 - RNA, 22 nt, Human
acccaggagcaggcugggcagu

SEQ ID NO: 1052492 - RNA, 22 nt, Human
cugcccaggaaggagaggaugg

SEQ ID NO: 1052493 - RNA, 22 nt, Human
guuguuuuuguucucuauagcu

SEQ ID NO: 1052494 - RNA, 22 nt, Human
auuuauuaugggauuuggcaca

SEQ ID NO: 1052495 - RNA, 22 nt, Human
gucuuucuaugaugaacuguug

SEQ ID NO: 1052496 - RNA, 22 nt, Human
gcugauguaagacuuuugguuu

SEQ ID NO: 1052497 - RNA, 22 nt, Human
uccuuagagacaagaccaguuu

SEQ ID NO: 1052498 - RNA, 23 nt, Human
uugaggucggcucucugagccug

SEQ ID NO: 1052499 - RNA, 22 nt, Human
aguuugaaauguuggcaauauu

SEQ ID NO: 1052500 - RNA, 22 nt, Human
cagaauggcuuuuauggcucag

SEQ ID NO: 1052501 - RNA, 22 nt, Human
cugggccaucuccuuugugugg

SEQ ID NO: 1052502 - RNA, 22 nt, Human
cccaggagauggugcguggucu

SEQ ID NO: 1052503 - RNA, 22 nt, Human
gcuuggcauugaccauuaucau

SEQ ID NO: 1052504 - RNA, 22 nt, Human
gagaggggcccaagccacauag

SEQ ID NO: 1052505 - RNA, 22 nt, Human
ucuguccagaacguacaucuug

SEQ ID NO: 1052506 - RNA, 22 nt, Human
auaaaugauucagcaggaaaua

SEQ ID NO: 1052507 - RNA, 22 nt, Human
cugcaucacagcaggaggcaca

SEQ ID NO: 1052508 - RNA, 22 nt, Human
uccugccucuccaugcuaacua

SEQ ID NO: 1052509 - RNA, 22 nt, Human
cauggcugcgagaagagugggu

SEQ ID NO: 1052510 - RNA, 23 nt, Human
agcacacuuguacaaugcccuag

SEQ ID NO: 1052511 - RNA, 22 nt, Human
gcuggccagugucccagggauc

SEQ ID NO: 1052512 - RNA, 23 nt, Human
gggcaguuauguuguccuuggcu

SEQ ID NO: 1052513 - RNA, 22 nt, Human
gaucuuggggggaucaccaugg

SEQ ID NO: 1052514 - RNA, 22 nt, Human
uuucaucuaacacuacauaggg

SEQ ID NO: 1052515 - RNA, 22 nt, Human
aagauacugaugauguaggcua

SEQ ID NO: 1052516 - RNA, 22 nt, Human
ucuuucaaugagcauucuuucc

SEQ ID NO: 1052517 - RNA, 22 nt, Human
cagcugagaagugauagcugca

SEQ ID NO: 1052518 - RNA, 22 nt, Human
cugcugugccucuuuucacgug

SEQ ID NO: 1052519 - RNA, 22 nt, Human
uucugucacagugcugguauca

SEQ ID NO: 1052520 - RNA, 22 nt, Human
cugagcugggaguagagacucu

SEQ ID NO: 1052521 - RNA, 22 nt, Human
uucaugcuuuuaccgcuguuaa

SEQ ID NO: 1052522 - RNA, 22 nt, Human
caggcagcagaggaguguggga

SEQ ID NO: 1052523 - RNA, 23 nt, Human
uagggcagcugggagggacaugc

SEQ ID NO: 1052524 - RNA, 22 nt, Human
ggcagcuuucucacccaugacc

SEQ ID NO: 1052525 - RNA, 22 nt, Human
cuucaggauuuaggaagaugaa

SEQ ID NO: 1052526 - RNA, 22 nt, Human
caggagaucuuaggaauucuua

SEQ ID NO: 1052527 - RNA, 22 nt, Human
agaaaugaauauguagugguua

SEQ ID NO: 1052528 - RNA, 20 nt, Human
aggauuugagaaggcgucuu

SEQ ID NO: 1052529 - RNA, 22 nt, Human
uccaacuuucuccuccggcuug

SEQ ID NO: 1052530 - RNA, 22 nt, Human
uuuauguaguuacggacuauca

SEQ ID NO: 1052531 - RNA, 22 nt, Human
ccucuccuugcacccgucccgc

SEQ ID NO: 1052532 - RNA, 22 nt, Human
cuagggaguggcagagcuggga

SEQ ID NO: 1052533 - RNA, 22 nt, Human
caacugagcaguagcgucugga

SEQ ID NO: 1052534 - RNA, 22 nt, Human
uugugaguagugccgcaauaaa

SEQ ID NO: 1052535 - RNA, 22 nt, Human
ugaggcaggaaguuauauaaug

SEQ ID NO: 1052536 - RNA, 22 nt, Human
uguccccagguccucugccguc

SEQ ID NO: 1052537 - RNA, 22 nt, Human
aacuuucuccagugccaacuau

SEQ ID NO: 1052538 - RNA, 22 nt, Human
ugcccugguuacacuggagucc

SEQ ID NO: 1052539 - RNA, 22 nt, Human
ggcuguguuccaagugucagga

SEQ ID NO: 1052540 - RNA, 22 nt, Human
cucaggcugcccugacagcccc

SEQ ID NO: 1052541 - RNA, 22 nt, Human
cagacaggguccuguccgucac

SEQ ID NO: 1052542 - RNA, 22 nt, Human
uuacagcagugggaaggaguca

SEQ ID NO: 1052543 - RNA, 22 nt, Human
aaggcugagagucacaguccua

SEQ ID NO: 1052544 - RNA, 23 nt, Human
cuuuuaacuugaucugagaccag

SEQ ID NO: 1052545 - RNA, 22 nt, Human
auuacacagcgguuacuacuag

SEQ ID NO: 1052546 - RNA, 22 nt, Human
gcagacagaugagggugcuggg

SEQ ID NO: 1052547 - RNA, 22 nt, Human
gcccaggaguugaaugcagcag

SEQ ID NO: 1052548 - RNA, 22 nt, Human
aggcugaggggcgagggacccu

SEQ ID NO: 1052549 - RNA, 22 nt, Human
gagcaguguuuguggaccugga

SEQ ID NO: 1052550 - RNA, 22 nt, Human
uguucucuaagaaaagaagcau

SEQ ID NO: 1052551 - RNA, 22 nt, Human
aaugccuuggagagccuagagg

SEQ ID NO: 1052552 - RNA, 23 nt, Human
gccaggaguggguagacuaaugc

SEQ ID NO: 1052553 - RNA, 22 nt, Human
cuaagaaaauagaagcaugcua

SEQ ID NO: 1052554 - RNA, 22 nt, Human
uucuucaaccaucuacauaaac

SEQ ID NO: 1052555 - RNA, 22 nt, Human
uagagaaaagcagggaucagga

SEQ ID NO: 1052556 - RNA, 19 nt, Human
cauggcugcugcuugggag

SEQ ID NO: 1052557 - RNA, 22 nt, Human
ugcccuggugaagugcucuccu

SEQ ID NO: 1052558 - RNA, 20 nt, Human
uuucaguuaucuugaccuuc

SEQ ID NO: 1052559 - RNA, 22 nt, Human
ccuggcugagggaccucgggua

SEQ ID NO: 1052560 - RNA, 22 nt, Human
uggcuggaauggagcugagccu

SEQ ID NO: 1052561 - RNA, 22 nt, Human
caaauacugagcacgcaaucaa

SEQ ID NO: 1052562 - RNA, 22 nt, Human
uuugacauggaauaacucauuu

SEQ ID NO: 1052563 - RNA, 22 nt, Human
agauaacucauuuuguauaucc

SEQ ID NO: 1052564 - RNA, 17 nt, Human
ugaggccugcaucagug

SEQ ID NO: 1052565 - RNA, 22 nt, Human
aaggcugagccagggccccuau

SEQ ID NO: 1052566 - RNA, 22 nt, Human
agagugcagauaagagaauguu

SEQ ID NO: 1052567 - RNA, 22 nt, Human
uugauacauuuuuaggauaaac

SEQ ID NO: 1052568 - RNA, 22 nt, Human
uugcauuugagaaaguucuccu

SEQ ID NO: 1052569 - RNA, 22 nt, Human
cugcuuccauaaauaaugugcu

SEQ ID NO: 1052570 - RNA, 22 nt, Human
uagcaagaaguagcucuggauu

SEQ ID NO: 1052571 - RNA, 22 nt, Human
aggaugagccgcgcaagcugac

SEQ ID NO: 1052572 - RNA, 19 nt, Human
acaaugaauguguucucuu

SEQ ID NO: 1052573 - RNA, 22 nt, Human
uuaggaaaggaacauugaaacg

SEQ ID NO: 1052574 - RNA, 22 nt, Human
aggcugaugcuggcugaggcug

SEQ ID NO: 1052575 - RNA, 22 nt, Human
cagcuggcaaguggagcagggu

SEQ ID NO: 1052576 - RNA, 22 nt, Human
cuggccauguugccucugagac

SEQ ID NO: 1052577 - RNA, 22 nt, Human
uccaugagggacacuggaugcu

SEQ ID NO: 1052578 - RNA, 22 nt, Human
acagaaauugggcaaauggaag

SEQ ID NO: 1052579 - RNA, 22 nt, Human
aaauacuagaauucagaguuga

SEQ ID NO: 1052580 - RNA, 22 nt, Human
ccuccccugcucagaacucugg

SEQ ID NO: 1052581 - RNA, 22 nt, Human
uacuuacagagcuuauaaguua

SEQ ID NO: 1052582 - RNA, 22 nt, Human
gaauacaccaaggaaucagaau

SEQ ID NO: 1052583 - RNA, 22 nt, Human
aggguagggcccggagacagac

SEQ ID NO: 1052584 - RNA, 22 nt, Human
ugaggcccagccgcccugagag

SEQ ID NO: 1052585 - RNA, 22 nt, Human
aucuuucagggccauuuguauu

SEQ ID NO: 1052586 - RNA, 19 nt, Human
ugcaagcuuuuucuuguua

SEQ ID NO: 1052587 - RNA, 22 nt, Human
uuuucauuguuccucgagcauu

SEQ ID NO: 1052588 - RNA, 22 nt, Human
ucugaggucauuccaaggacau

SEQ ID NO: 1052589 - RNA, 22 nt, Human
cugcauuagucaugcuuugcag

SEQ ID NO: 1052590 - RNA, 22 nt, Human
aaggcagcaggauuuggugacu

SEQ ID NO: 1052591 - RNA, 22 nt, Human
cugagggcuggagcugaggccu

SEQ ID NO: 1052592 - RNA, 21 nt, Human
ucauuugugaucugauuucca

SEQ ID NO: 1052593 - RNA, 22 nt, Human
agugcuggauuacaggcgugag

SEQ ID NO: 1052594 - RNA, 22 nt, Human
uuuaacagaugugaaauuuuca

SEQ ID NO: 1052595 - RNA, 22 nt, Human
uagggcuggguacacucuugcc

SEQ ID NO: 1052596 - RNA, 22 nt, Human
uugaaagucacaauggcauuaa

SEQ ID NO: 1052597 - RNA, 19 nt, Human
gcuuuggagggagguucua

SEQ ID NO: 1052598 - RNA, 22 nt, Human
aagcagcuuuugaagagugagg

SEQ ID NO: 1052599 - RNA, 17 nt, Human
ucaggcugggugcagug

SEQ ID NO: 1052600 - RNA, 21 nt, Human
uuaccaauggcuucucuuucc

SEQ ID NO: 1052601 - RNA, 22 nt, Human
ugaggcaguauucuccauucca

SEQ ID NO: 1052602 - RNA, 22 nt, Human
uaucuguugucuuuuacaugua

SEQ ID NO: 1052603 - RNA, 22 nt, Human
agagggagugaaauggaauaga

SEQ ID NO: 1052604 - RNA, 22 nt, Human
cagcugcaguucaaugcuugcu

SEQ ID NO: 1052605 - RNA, 22 nt, Human
ucagugugaguaccaugcucag

SEQ ID NO: 1052606 - RNA, 22 nt, Human
gguggagcuggaccaggagagg

SEQ ID NO: 1052607 - RNA, 22 nt, Human
ggccaaaccgcaauuauuuuug

SEQ ID NO: 1052608 - RNA, 22 nt, Human
gagacagcacaggccacuggga

SEQ ID NO: 1052609 - RNA, 22 nt, Human
uguagaaagaauauguuucaua

SEQ ID NO: 1052610 - RNA, 22 nt, Human
ggcugcaguugugugaaggccg

SEQ ID NO: 1052611 - RNA, 22 nt, Human
ucugggaacucugucauuuccc

SEQ ID NO: 1052612 - RNA, 22 nt, Human
cccaggagauggagguugcagu

SEQ ID NO: 1052613 - RNA, 22 nt, Human
aggcugagggcuccugagggca

SEQ ID NO: 1052614 - RNA, 22 nt, Human
ugaccaaaaaauucccugugag

SEQ ID NO: 1052615 - RNA, 22 nt, Human
cagugaaaucacaacuuuaguu

SEQ ID NO: 1052616 - RNA, 20 nt, Human
ucauuacagugcuaagaugu

SEQ ID NO: 1052617 - RNA, 19 nt, Human
ucuuggcuuugucuacugu

SEQ ID NO: 1052618 - RNA, 22 nt, Human
uuucacaucagagguagauuag

SEQ ID NO: 1052619 - RNA, 22 nt, Human
cagaggucugacacugaauggu

SEQ ID NO: 1052620 - RNA, 22 nt, Human
ugaggcagggaguuuaauuguc

SEQ ID NO: 1052621 - RNA, 22 nt, Human
aggagaggcucuaacucugugu

SEQ ID NO: 1052622 - RNA, 20 nt, Human
caggagggacauuucagcau

SEQ ID NO: 1052623 - RNA, 23 nt, Human
ugcaugugaauucauacuuguuu

SEQ ID NO: 1052624 - RNA, 22 nt, Human
ucugucucaaguucuugcacuc

SEQ ID NO: 1052625 - RNA, 22 nt, Human
uggaaagucucuuuugacugua

SEQ ID NO: 1052626 - RNA, 20 nt, Human
ugagugcuccauucugccca

SEQ ID NO: 1052627 - RNA, 22 nt, Human
agagcagaggcauggccguggg

SEQ ID NO: 1052628 - RNA, 22 nt, Human
cuccuggcucgcccccagcuga

SEQ ID NO: 1052629 - RNA, 22 nt, Human
cugcugccauuagggcacagac

SEQ ID NO: 1052630 - RNA, 22 nt, Human
gggcugagauuggugcccuguc

SEQ ID NO: 1052631 - RNA, 22 nt, Human
gacaaaaguguuuugaacaagg

SEQ ID NO: 1052632 - RNA, 22 nt, Human
cagggcugagucauauagccuu

SEQ ID NO: 1052633 - RNA, 22 nt, Human
ccaggcuggauuuugcaguuca

SEQ ID NO: 1052634 - RNA, 22 nt, Human
ugccuggcaccccagucugcac

SEQ ID NO: 1052635 - RNA, 22 nt, Human
acuccugggugcauuucugauu

SEQ ID NO: 1052636 - RNA, 22 nt, Human
cagaguggcacucugcuggaug

SEQ ID NO: 1052637 - RNA, 22 nt, Human
cugcuucuaagaaccugcagcu

SEQ ID NO: 1052638 - RNA, 22 nt, Human
uugagguccaggugugggcagg

SEQ ID NO: 1052639 - RNA, 22 nt, Human
agagacugcgugucagcgcugg

SEQ ID NO: 1052640 - RNA, 17 nt, Human
ccuguguuugcuccuuc

SEQ ID NO: 1052641 - RNA, 22 nt, Human
agaccaagugcaggugccacua

SEQ ID NO: 1052642 - RNA, 22 nt, Human
agaggcagcagucauacuacag

SEQ ID NO: 1052643 - RNA, 22 nt, Human
uggcaagccugagauccgggag

SEQ ID NO: 1052644 - RNA, 22 nt, Human
cagagcuguugcggggcuuggc

SEQ ID NO: 1052645 - RNA, 22 nt, Human
accagagcuggcucugagcacc

SEQ ID NO: 1052646 - RNA, 22 nt, Human
agacccagaaagcagcugcauu

SEQ ID NO: 1052647 - RNA, 22 nt, Human
guauuaggaggaacacaggccu

SEQ ID NO: 1052648 - RNA, 22 nt, Human
ugaggggagaagcagcagccug

SEQ ID NO: 1052649 - RNA, 22 nt, Human
uccucagaaaccccugugaggu

SEQ ID NO: 1052650 - RNA, 22 nt, Human
gcugagguggagauugcaguga

SEQ ID NO: 1052651 - RNA, 22 nt, Human
uaacugguuuggcucagggucu

SEQ ID NO: 1052652 - RNA, 22 nt, Human
auuguuaugaaaauaagauguu

SEQ ID NO: 1052653 - RNA, 22 nt, Human
aggaagcucaaagccaugaugu

SEQ ID NO: 1052654 - RNA, 20 nt, Human
gcugaggucccugugguuuu

SEQ ID NO: 1052655 - RNA, 22 nt, Human
cuuuguauucaguugggcugug

SEQ ID NO: 1052656 - RNA, 22 nt, Human
agcaccauugcaaauauggcag

SEQ ID NO: 1052657 - RNA, 22 nt, Human
gaaaggccagcucacagaugag

SEQ ID NO: 1052658 - RNA, 22 nt, Human
ugcuugcuggaggcagacagaa

SEQ ID NO: 1052659 - RNA, 19 nt, Human
ccuggccagacuucugccc

SEQ ID NO: 1052660 - RNA, 22 nt, Human
uggcagacuuuagggucuacau

SEQ ID NO: 1052661 - RNA, 22 nt, Human
gcugaguguaaugauggcagag

SEQ ID NO: 1052662 - RNA, 22 nt, Human
acucuuuuauaaagcaucuuga

SEQ ID NO: 1052663 - RNA, 16 nt, Human
gcccaggacgggaggc

SEQ ID NO: 1052664 - RNA, 22 nt, Human
aaugaacauggacaaguuaaua

SEQ ID NO: 1052665 - RNA, 19 nt, Human
uuuaggauaaagucuggac

SEQ ID NO: 1052666 - RNA, 22 nt, Human
cagcuguguaugagagcaugcu

SEQ ID NO: 1052667 - RNA, 22 nt, Human
cuguauuucccacauucucuau

SEQ ID NO: 1052668 - RNA, 22 nt, Human
ccugcugugaccggggagcagg

SEQ ID NO: 1052669 - RNA, 19 nt, Human
uucccaggaaaggggugca

SEQ ID NO: 1052670 - RNA, 22 nt, Human
uagaaagaucuguaggcaagag

SEQ ID NO: 1052671 - RNA, 22 nt, Human
auuuagaacuuuguuugccaau

SEQ ID NO: 1052672 - RNA, 22 nt, Human
aggcugcuucaauggauaagau

SEQ ID NO: 1052673 - RNA, 22 nt, Human
uuguugguggaauugaugcuag

SEQ ID NO: 1052674 - RNA, 22 nt, Human
uuauguagcagaaagauguuug

SEQ ID NO: 1052675 - RNA, 20 nt, Human
auuuggcaugaaguauugau

SEQ ID NO: 1052676 - RNA, 22 nt, Human
aacagccucagugagauuagga

SEQ ID NO: 1052677 - RNA, 22 nt, Human
aggcagauuacuugaggccagg

SEQ ID NO: 1052678 - RNA, 19 nt, Human
aggcaggugcagagguccc

SEQ ID NO: 1052679 - RNA, 22 nt, Human
aaacuggugucacugagggcug

SEQ ID NO: 1052680 - RNA, 22 nt, Human
cucaggaaaggccaugcaaggg

SEQ ID NO: 1052681 - RNA, 22 nt, Human
gcuggaggauggacuggaagaa

SEQ ID NO: 1052682 - RNA, 22 nt, Human
ucaccgccuugcccggccgggc

SEQ ID NO: 1052683 - RNA, 22 nt, Human
uggucaaaaacucucaguggac

SEQ ID NO: 1052684 - RNA, 22 nt, Human
auucuuauuuaaauagagucug

SEQ ID NO: 1052685 - RNA, 22 nt, Human
gcaggcugugguauguugggca

SEQ ID NO: 1052686 - RNA, 18 nt, Human
ccuaagcuccagccccag

SEQ ID NO: 1052687 - RNA, 22 nt, Human
gcucaggacccaggugugaccu

SEQ ID NO: 1052688 - RNA, 22 nt, Human
aucuuucuauuucuaaaaacua

SEQ ID NO: 1052689 - RNA, 22 nt, Human
ucccaggaggugcuuccuagga

SEQ ID NO: 1052690 - RNA, 22 nt, Human
aggaagcuccaugaaggcagag

SEQ ID NO: 1052691 - RNA, 22 nt, Human
agucaauucuuuucaacucaag

SEQ ID NO: 1052692 - RNA, 22 nt, Human
cugcugugugaccauggacagg

SEQ ID NO: 1052693 - RNA, 22 nt, Human
aggcuagauagagggucaucuu

SEQ ID NO: 1052694 - RNA, 22 nt, Human
aggcugaguuucucauucucgc

SEQ ID NO: 1052695 - RNA, 22 nt, Human
uuggcagugaugcagcuuguuc

SEQ ID NO: 1052696 - RNA, 22 nt, Human
uagcccagcaugagcagagcug

SEQ ID NO: 1052697 - RNA, 22 nt, Human
gcccaggauggagaauaguggu

SEQ ID NO: 1052698 - RNA, 22 nt, Human
ggcagccaugcuccaggugcag

SEQ ID NO: 1052699 - RNA, 23 nt, Human
uuuggacuugugacucuucuccu

SEQ ID NO: 1052700 - RNA, 22 nt, Human
uaaauuaugucacaugacucug

SEQ ID NO: 1052701 - RNA, 22 nt, Human
cucuucucugcagccuuugaag

SEQ ID NO: 1052702 - RNA, 22 nt, Human
acuauacaguauguacgugcac

SEQ ID NO: 1052703 - RNA, 22 nt, Human
auuuccaggagaaaggauuuua

SEQ ID NO: 1052704 - RNA, 17 nt, Human
gaggacagggaaguagg

SEQ ID NO: 1052705 - RNA, 22 nt, Human
uuuacagauguggaaagugagc

SEQ ID NO: 1052706 - RNA, 23 nt, Human
ccacuagcaccuguucaacuucu

SEQ ID NO: 1052707 - RNA, 23 nt, Human
agcagcugugguuuaccuuagua

SEQ ID NO: 1052708 - RNA, 19 nt, Human
ugaaauggcaguugcuaaa

SEQ ID NO: 1052709 - RNA, 22 nt, Human
ucuguccaggcuuacuauauau

SEQ ID NO: 1052710 - RNA, 20 nt, Human
cccagguaggugccaugagu

SEQ ID NO: 1052711 - RNA, 22 nt, Human
cugccucaugcugccugcagcc

SEQ ID NO: 1052712 - RNA, 22 nt, Human
gagccagcuauguagcaagagg

SEQ ID NO: 1052713 - RNA, 22 nt, Human
uggcaccaggcgggguggcugu

SEQ ID NO: 1052714 - RNA, 22 nt, Human
ucaggugguccuaagugccauc

SEQ ID NO: 1052715 - RNA, 22 nt, Human
agacucaagacugcagaagacg

SEQ ID NO: 1052716 - RNA, 22 nt, Human
uuuauuaaaacuguuggcucug

SEQ ID NO: 1052717 - RNA, 22 nt, Human
ucugagguccugugauuucucu

SEQ ID NO: 1052718 - RNA, 22 nt, Human
ucaucugucccaggcuuuuuuc

SEQ ID NO: 1052719 - RNA, 22 nt, Human
gggaggugauuaggaccaugua

SEQ ID NO: 1052720 - RNA, 22 nt, Human
guaacugguuuucuucccucuc

SEQ ID NO: 1052721 - RNA, 22 nt, Human
uuucuucacaggguauugggug

SEQ ID NO: 1052722 - RNA, 22 nt, Human
cugccaccaugccccagcagag

SEQ ID NO: 1052723 - RNA, 22 nt, Human
uucauugucucuguuugccuuc

SEQ ID NO: 1052724 - RNA, 22 nt, Human
gaggagagaugguagauugggu

SEQ ID NO: 1052725 - RNA, 22 nt, Human
cagugguuauacuuacuguuuc

SEQ ID NO: 1052726 - RNA, 22 nt, Human
guauuaggaaauaugaagaaag

SEQ ID NO: 1052727 - RNA, 22 nt, Human
auuagguuagugugcaagagaa

SEQ ID NO: 1052728 - RNA, 22 nt, Human
cuuccuucugaagcauagaagc

SEQ ID NO: 1052729 - RNA, 22 nt, Human
agucucuuauucccuauugcug

SEQ ID NO: 1052730 - RNA, 22 nt, Human
gugcugaggugggugggcagcc

SEQ ID NO: 1052731 - RNA, 22 nt, Human
ucccaggauguuggcggcaggu

SEQ ID NO: 1052732 - RNA, 22 nt, Human
caaauacuacgauucuugcagu

SEQ ID NO: 1052733 - RNA, 22 nt, Human
ucucuggcagggauaucuggcu

SEQ ID NO: 1052734 - RNA, 22 nt, Human
cuaaaugauauuuugguuuccu

SEQ ID NO: 1052735 - RNA, 22 nt, Human
acugagcucuugacugggaguu

SEQ ID NO: 1052736 - RNA, 21 nt, Human
uagaacugacgauuucagagu

SEQ ID NO: 1052737 - RNA, 22 nt, Human
gcagacauuuugaaucuaggcu

SEQ ID NO: 1052738 - RNA, 22 nt, Human
gagugcuguaggacugagcccu

SEQ ID NO: 1052739 - RNA, 22 nt, Human
cucuggccuggggccugcuccc

SEQ ID NO: 1052740 - RNA, 22 nt, Human
ccaggagacccagggaaggagc

SEQ ID NO: 1052741 - RNA, 22 nt, Human
aggcacaggaaugucauccagu

SEQ ID NO: 1052742 - RNA, 22 nt, Human
gcccaggaaguugaggcugccg

SEQ ID NO: 1052743 - RNA, 22 nt, Human
cuucucaaaguugugaaucagg

SEQ ID NO: 1052744 - RNA, 22 nt, Human
cauauaaauacaacauguguua

SEQ ID NO: 1052745 - RNA, 22 nt, Human
agagggcagggcgguaaguccu

SEQ ID NO: 1052746 - RNA, 22 nt, Human
acccuccccaagaggucgugcc

SEQ ID NO: 1052747 - RNA, 22 nt, Human
ucccaggaauugaagccagugu

SEQ ID NO: 1052748 - RNA, 22 nt, Human
guaguuauugcuguuuacuucu

SEQ ID NO: 1052749 - RNA, 22 nt, Human
cugccugccuuggccuccagga

SEQ ID NO: 1052750 - RNA, 22 nt, Human
auucuucaccugagucagucua

SEQ ID NO: 1052751 - RNA, 22 nt, Human
caugcugugugguuagaacugu

SEQ ID NO: 1052752 - RNA, 22 nt, Human
augcuguggaaguuccugaagc

SEQ ID NO: 1052753 - RNA, 22 nt, Human
uggcucaggggucuggcucugu

SEQ ID NO: 1052754 - RNA, 19 nt, Human
cccaggagcaguauugaug

SEQ ID NO: 1052755 - RNA, 22 nt, Human
agugcagccgagaucaggugcu

SEQ ID NO: 1052756 - RNA, 23 nt, Human
uuugaaguugacugccuuccaga

SEQ ID NO: 1052757 - RNA, 22 nt, Human
ucaggaugagcucauaacuaug

SEQ ID NO: 1052758 - RNA, 23 nt, Human
ucagagagcuguugagagcugcc

SEQ ID NO: 1052759 - RNA, 22 nt, Human
ggugaagggugucauggcauuu

SEQ ID NO: 1052760 - RNA, 22 nt, Human
uuuuauugucaaugaagacaga

SEQ ID NO: 1052761 - RNA, 22 nt, Human
caggcgagugaacagacucuca

SEQ ID NO: 1052762 - RNA, 22 nt, Human
aaauacauacacuguacguggc

SEQ ID NO: 1052763 - RNA, 22 nt, Human
ugcugaggaaagaggauaaaag

SEQ ID NO: 1052764 - RNA, 22 nt, Human
acagucuugagcaucagccaga

SEQ ID NO: 1052765 - RNA, 22 nt, Human
aacugcuggggaggccaaacuc

SEQ ID NO: 1052766 - RNA, 22 nt, Human
cagcugacccagugaggaggca

SEQ ID NO: 1052767 - RNA, 19 nt, Human
cugggccagagcuguccuc

SEQ ID NO: 1052768 - RNA, 22 nt, Human
ucuucauuuuauagcaucugug

SEQ ID NO: 1052769 - RNA, 22 nt, Human
uccaggaggccucauuuccugu

SEQ ID NO: 1052770 - RNA, 21 nt, Human
agcagcugggcaacauggagg

SEQ ID NO: 1052771 - RNA, 22 nt, Human
auggccaagaaguauuccugac

SEQ ID NO: 1052772 - RNA, 22 nt, Human
uacacuaauagccacacuaaug

SEQ ID NO: 1052773 - RNA, 22 nt, Human
auucuuugcaucucuggguggc

SEQ ID NO: 1052774 - RNA, 22 nt, Human
uauuaggguaaauuugacaugc

SEQ ID NO: 1052775 - RNA, 22 nt, Human
cugcuguguuccuccugcaucu

SEQ ID NO: 1052776 - RNA, 22 nt, Human
aauccugugugacucuggggag

SEQ ID NO: 1052777 - RNA, 21 nt, Human
uggaccaaaguaauuugccuu

SEQ ID NO: 1052778 - RNA, 23 nt, Human
agacugaggcugccagggucaga

SEQ ID NO: 1052779 - RNA, 22 nt, Human
ugcaugcugcacacaugcguag

SEQ ID NO: 1052780 - RNA, 22 nt, Human
cauuuguaauacugacuugcag

SEQ ID NO: 1052781 - RNA, 22 nt, Human
aaauauagugacacuuauaguc

SEQ ID NO: 1052782 - RNA, 23 nt, Human
agggugagcaagcuauggagacc

SEQ ID NO: 1052783 - RNA, 22 nt, Human
aguuagagacacaugcacaugc

SEQ ID NO: 1052784 - RNA, 22 nt, Human
guaggcagugguuggaagagaa

SEQ ID NO: 1052785 - RNA, 22 nt, Human
gaggagaggcuggacgcgguga

SEQ ID NO: 1052786 - RNA, 22 nt, Human
auucuucacauaagugcuguac

SEQ ID NO: 1052787 - RNA, 22 nt, Human
uccuccccucagggcaacggau

SEQ ID NO: 1052788 - RNA, 22 nt, Human
accaugucauuuauuggccaaa

SEQ ID NO: 1052789 - RNA, 22 nt, Human
ccuggcugccgagugugcagcg

SEQ ID NO: 1052790 - RNA, 18 nt, Human
uggcagcuagguaaagaa

SEQ ID NO: 1052791 - RNA, 22 nt, Human
uuuugcuugagugcacaaaaug

SEQ ID NO: 1052792 - RNA, 22 nt, Human
ccuggagcucacugggagccgg

SEQ ID NO: 1052793 - RNA, 18 nt, Human
ucaggagacacagacgca

SEQ ID NO: 1052794 - RNA, 22 nt, Human
uagggaggaggguuuucaaauc

SEQ ID NO: 1052795 - RNA, 22 nt, Human
gagggcuggggcuuaggcuuag

SEQ ID NO: 1052796 - RNA, 22 nt, Human
uuugaaugcaggacauacagaa

SEQ ID NO: 1052797 - RNA, 22 nt, Human
ccuggagcaucaggaggaaggg

SEQ ID NO: 1052798 - RNA, 22 nt, Human
gugagguccaguaacuugucca

SEQ ID NO: 1052799 - RNA, 22 nt, Human
gaggcaacacauuuggaaagca

SEQ ID NO: 1052800 - RNA, 22 nt, Human
cuuuuuaucucuuaaugauguu

SEQ ID NO: 1052801 - RNA, 22 nt, Human
uagagcugggcagugcucugag

SEQ ID NO: 1052802 - RNA, 22 nt, Human
aaaaacuguaauuacuuuugca

SEQ ID NO: 1052803 - RNA, 21 nt, Human
uucuucaguuuaauauaaaau

SEQ ID NO: 1052804 - RNA, 22 nt, Human
gaggagcuugaggcuaggagcc

SEQ ID NO: 1052805 - RNA, 22 nt, Human
aaacugguagcaauuuaagggu

SEQ ID NO: 1052806 - RNA, 22 nt, Human
uagugucaugaaaaguacacua

SEQ ID NO: 1052807 - RNA, 22 nt, Human
uuuuaugauugagcuggcuaca

SEQ ID NO: 1052808 - RNA, 22 nt, Human
cugaauuaauacacagaauggc

SEQ ID NO: 1052809 - RNA, 22 nt, Human
acauguuuaaguuuaaugaaaa

SEQ ID NO: 1052810 - RNA, 22 nt, Human
cugccugccacguucagcugua

SEQ ID NO: 1052811 - RNA, 22 nt, Human
ggcugcugagucacgacaguga

SEQ ID NO: 1052812 - RNA, 22 nt, Human
ggcucagaccucccagcuccag

SEQ ID NO: 1052813 - RNA, 22 nt, Human
auuagguaaucuuuagauacac

SEQ ID NO: 1052814 - RNA, 22 nt, Human
ucaggauaaaauguaauggcaa

SEQ ID NO: 1052815 - RNA, 22 nt, Human
cccaggaagagugaguggcauu

SEQ ID NO: 1052816 - RNA, 22 nt, Human
aagcaguuuagauaggcaaagg

SEQ ID NO: 1052817 - RNA, 22 nt, Human
auuauuauuguugauguuaggg

SEQ ID NO: 1052818 - RNA, 22 nt, Human
cucaguuuccucuucuguugaa

SEQ ID NO: 1052819 - RNA, 22 nt, Human
ucaguucugcuagaaaaacagu

SEQ ID NO: 1052820 - RNA, 23 nt, Human
uccuuccuuugagaggcuccauc

SEQ ID NO: 1052821 - RNA, 21 nt, Human
gaccccagaccagcagacaca

SEQ ID NO: 1052822 - RNA, 22 nt, Human
auggaguucuuuaaauucacag

SEQ ID NO: 1052823 - RNA, 22 nt, Human
uccaggagugauaaggccacug

SEQ ID NO: 1052824 - RNA, 22 nt, Human
aacugguauggugagaagagag

SEQ ID NO: 1052825 - RNA, 22 nt, Human
ccuccuggagcauuggugagga

SEQ ID NO: 1052826 - RNA, 22 nt, Human
uuuccaagacuccaguucuccc

SEQ ID NO: 1052827 - RNA, 22 nt, Human
uaaggccaaacuauuauaguuc

SEQ ID NO: 1052828 - RNA, 18 nt, Human
gucacuguguuucugagc

SEQ ID NO: 1052829 - RNA, 22 nt, Human
auuugaauggcuuaacacaacg

SEQ ID NO: 1052830 - RNA, 22 nt, Human
uauugaugcuuggauugggcca

SEQ ID NO: 1052831 - RNA, 22 nt, Human
aggcagcagucaugaggaaaga

SEQ ID NO: 1052832 - RNA, 22 nt, Human
uugagaagaaauaguuugcaau

SEQ ID NO: 1052833 - RNA, 20 nt, Human
guggcaggcagugaaggagc

SEQ ID NO: 1052834 - RNA, 22 nt, Human
aacacuuuccugccuuucugau

SEQ ID NO: 1052835 - RNA, 22 nt, Human
gucuucuuguuuugaaggaaau

SEQ ID NO: 1052836 - RNA, 22 nt, Human
cugagccaccggcagggacauc

SEQ ID NO: 1052837 - RNA, 22 nt, Human
uucuugcaggucacucacugag

SEQ ID NO: 1052838 - RNA, 22 nt, Human
caaaugaagggagcugaagucu

SEQ ID NO: 1052839 - RNA, 22 nt, Human
gccucugcaauuacauugugcc

SEQ ID NO: 1052840 - RNA, 22 nt, Human
uuagaaaacauaagugguaaag

SEQ ID NO: 1052841 - RNA, 22 nt, Human
aggcagcuggaggcagagacua

SEQ ID NO: 1052842 - RNA, 22 nt, Human
ccauccuaucugaccuacuugu

SEQ ID NO: 1052843 - RNA, 22 nt, Human
cuuuguaucuaaauaucuugaa

SEQ ID NO: 1052844 - RNA, 22 nt, Human
cauaauaucuccgauuacuugc

SEQ ID NO: 1052845 - RNA, 22 nt, Human
uugcaauagccuuauuuccaaa

SEQ ID NO: 1052846 - RNA, 23 nt, Human
auguuauuauuagcagucuugcc

SEQ ID NO: 1052847 - RNA, 22 nt, Human
uauuuccaccuauuauuuucug

SEQ ID NO: 1052848 - RNA, 22 nt, Human
cuggcugugcagucuuccagaa

SEQ ID NO: 1052849 - RNA, 22 nt, Human
uauuagugaaagaauuaguuug

SEQ ID NO: 1052850 - RNA, 22 nt, Human
ucccaggacuuccaguuggagg

SEQ ID NO: 1052851 - RNA, 22 nt, Human
gcaagcugaugugauagugaaa

SEQ ID NO: 1052852 - RNA, 22 nt, Human
uagcagaggcugucugacuuaa

SEQ ID NO: 1052853 - RNA, 22 nt, Human
ugcuucagaggaaaggcaaaag

SEQ ID NO: 1052854 - RNA, 22 nt, Human
uuugaauagaggccccucagaa

SEQ ID NO: 1052855 - RNA, 22 nt, Human
agugcugucaguuuuauagaua

SEQ ID NO: 1052856 - RNA, 22 nt, Human
aucuucucaagcagcauccugu

SEQ ID NO: 1052857 - RNA, 22 nt, Human
cugccaggcacgugcagcauca

SEQ ID NO: 1052858 - RNA, 22 nt, Human
gugggguagaucuuucucagga

SEQ ID NO: 1052859 - RNA, 22 nt, Human
aggucacccguuugacuaucca

SEQ ID NO: 1052860 - RNA, 22 nt, Human
ugaaaugaagggcuuguucugg

SEQ ID NO: 1052861 - RNA, 23 nt, Human
ugagacccuaauuuagcaagugu

SEQ ID NO: 1052862 - RNA, 18 nt, Human
agcugaggggacugaaga

SEQ ID NO: 1052863 - RNA, 22 nt, Human
cuauuacauuucuggacauuca

SEQ ID NO: 1052864 - RNA, 22 nt, Human
agauggaguuaguaccagaguc

SEQ ID NO: 1052865 - RNA, 22 nt, Human
agccacagagagggagcugcaa

SEQ ID NO: 1052866 - RNA, 22 nt, Human
ucaggcugaaaggacuccaguu

SEQ ID NO: 1052867 - RNA, 22 nt, Human
gaggaaccacucugagaagcca

SEQ ID NO: 1052868 - RNA, 22 nt, Human
uucauguguauggaacauuuuu

SEQ ID NO: 1052869 - RNA, 18 nt, Human
agcuucccucugagaggg

SEQ ID NO: 1052870 - RNA, 21 nt, Human
gccaccccuggcacaggugcu

SEQ ID NO: 1052871 - RNA, 22 nt, Human
cccaggagccaucugucuuggc

SEQ ID NO: 1052872 - RNA, 22 nt, Human
ugaaaugacagucuuaagcucu

SEQ ID NO: 1052873 - RNA, 22 nt, Human
agcuccugcucuuugucccuaa

SEQ ID NO: 1052874 - RNA, 22 nt, Human
cugaggccggagcacugaagag

SEQ ID NO: 1052875 - RNA, 22 nt, Human
auuaggauguuccuaugcacau

SEQ ID NO: 1052876 - RNA, 19 nt, Human
uuucuuaggccuuuggccu

SEQ ID NO: 1052877 - RNA, 22 nt, Human
accaggagcauuuuuuauuagu

SEQ ID NO: 1052878 - RNA, 22 nt, Human
gucaggaucucccaguacauau

SEQ ID NO: 1052879 - RNA, 22 nt, Human
gagccaagaucgcaccacugca

SEQ ID NO: 1052880 - RNA, 21 nt, Human
gcugcccaacccugcaucucc

SEQ ID NO: 1052881 - RNA, 22 nt, Human
uacuuuuuagcacagugugugc

SEQ ID NO: 1052882 - RNA, 22 nt, Human
auuaaauacugcaggcuaagca

SEQ ID NO: 1052883 - RNA, 22 nt, Human
cagcugcuuucagcaggaggga

SEQ ID NO: 1052884 - RNA, 19 nt, Human
agccacagaacuugcagga

SEQ ID NO: 1052885 - RNA, 22 nt, Human
cccuuccugggugucccggagu

SEQ ID NO: 1052886 - RNA, 22 nt, Human
aacuuucuuucacagaaguauc

SEQ ID NO: 1052887 - RNA, 22 nt, Human
uuucugugguggguaguucaga

SEQ ID NO: 1052888 - RNA, 22 nt, Human
uuccaugaagggcagccucuca

SEQ ID NO: 1052889 - RNA, 22 nt, Human
gcugagagaucaaggcaggauu

SEQ ID NO: 1052890 - RNA, 21 nt, Human
gaaauacugccuuaggagcug

SEQ ID NO: 1052891 - RNA, 22 nt, Human
ggaggagggguuuacauuggaa

SEQ ID NO: 1052892 - RNA, 22 nt, Human
caugugguucaaguacuccaca

SEQ ID NO: 1052893 - RNA, 22 nt, Human
ucuaagaucuacuauacaugug

SEQ ID NO: 1052894 - RNA, 22 nt, Human
gaggcagcggcucacagagaaa

SEQ ID NO: 1052895 - RNA, 22 nt, Human
gggcagcuccuguggaauccac

SEQ ID NO: 1052896 - RNA, 22 nt, Human
caggcagggagcuggaaaggau

SEQ ID NO: 1052897 - RNA, 21 nt, Human
uguaaguuucaucugaauugg

SEQ ID NO: 1052898 - RNA, 22 nt, Human
caagagagaugcagcucacuca

SEQ ID NO: 1052899 - RNA, 22 nt, Human
uuggcaggaauauugcagaggu

SEQ ID NO: 1052900 - RNA, 20 nt, Human
ucacuaguaaccaucugcuu

SEQ ID NO: 1052901 - RNA, 22 nt, Human
ggcaucuccaaaacaugaacuc

SEQ ID NO: 1052902 - RNA, 22 nt, Human
ggcugcagaggcgaucugaggu

SEQ ID NO: 1052903 - RNA, 22 nt, Human
ggcugcuguuucagagacuguu

SEQ ID NO: 1052904 - RNA, 22 nt, Human
cagaccagaaggaagccgacaa

SEQ ID NO: 1052905 - RNA, 22 nt, Human
ugccugggccuucccaccucug

SEQ ID NO: 1052906 - RNA, 22 nt, Human
agcacuguggggaacucacaga

SEQ ID NO: 1052907 - RNA, 22 nt, Human
ugaaggcuugacugaggcagga

SEQ ID NO: 1052908 - RNA, 22 nt, Human
gaaauauuucucuugagccccu

SEQ ID NO: 1052909 - RNA, 22 nt, Human
acagaaauucaaacuggaauuu

SEQ ID NO: 1052910 - RNA, 22 nt, Human
gacggcagaaacucaugagguc

SEQ ID NO: 1052911 - RNA, 21 nt, Human
cccaggagaagaaaagaugca

SEQ ID NO: 1052912 - RNA, 22 nt, Human
agugcugagugauugcaaagga

SEQ ID NO: 1052913 - RNA, 22 nt, Human
cuauuagguaugcagccuauuu

SEQ ID NO: 1052914 - RNA, 22 nt, Human
ucugggaguuagaauacauggg

SEQ ID NO: 1052915 - RNA, 22 nt, Human
guuaauaaagguauagaaucag

SEQ ID NO: 1052916 - RNA, 22 nt, Human
cugcuuuggacaacuauucuug

SEQ ID NO: 1052917 - RNA, 22 nt, Human
gugaauuaaauauagccagguc

SEQ ID NO: 1052918 - RNA, 18 nt, Human
gaugggagcaagagaaga

SEQ ID NO: 1052919 - RNA, 22 nt, Human
gcccaggaguuggaggcugcag

SEQ ID NO: 1052920 - RNA, 22 nt, Human
uucuucucagggucccacaugg

SEQ ID NO: 1052921 - RNA, 22 nt, Human
auauuucaugggguuccauacu

SEQ ID NO: 1052922 - RNA, 19 nt, Human
ggcaggcuggauagagagg

SEQ ID NO: 1052923 - RNA, 22 nt, Human
cagcucagacgcaggucgagca

SEQ ID NO: 1052924 - RNA, 22 nt, Human
acuuccugcaaucguccacucc

SEQ ID NO: 1052925 - RNA, 22 nt, Human
cuggagaggcugggaacagguu

SEQ ID NO: 1052926 - RNA, 22 nt, Human
ccagaggaggggggucuuucug

SEQ ID NO: 1052927 - RNA, 22 nt, Human
aggcugaggcgggaggaucacu

SEQ ID NO: 1052928 - RNA, 22 nt, Human
uggccauagcucagcuccuuca

SEQ ID NO: 1052929 - RNA, 20 nt, Human
guugaaaguaauaugaugcu

SEQ ID NO: 1052930 - RNA, 22 nt, Human
uuagccaugcccuagaagagga

SEQ ID NO: 1052931 - RNA, 21 nt, Human
uucucagagucuauuacaguu

SEQ ID NO: 1052932 - RNA, 22 nt, Human
gaggccacaguccugaggcauc

SEQ ID NO: 1052933 - RNA, 22 nt, Human
caucaucaaaagugacagagaa

SEQ ID NO: 1052934 - RNA, 21 nt, Human
gggugggaggacacagcaggc

SEQ ID NO: 1052935 - RNA, 20 nt, Human
ccucaguguccuggacuggg

SEQ ID NO: 1052936 - RNA, 22 nt, Human
uggaggccgcguagucugagca

SEQ ID NO: 1052937 - RNA, 22 nt, Human
caaggccaugagcagcgagugu

SEQ ID NO: 1052938 - RNA, 21 nt, Human
ucacagacuggucagugaggc

SEQ ID NO: 1052939 - RNA, 22 nt, Human
ugcauggacucaucagacaaga

SEQ ID NO: 1052940 - RNA, 22 nt, Human
ucacugucugaaagaaauggcc

SEQ ID NO: 1052941 - RNA, 22 nt, Human
uuuaggauaacuccaguuuucc

SEQ ID NO: 1052942 - RNA, 22 nt, Human
uuauuuaaaagugguaagauuc

SEQ ID NO: 1052943 - RNA, 22 nt, Human
caagaugugccuaaucagaccu

SEQ ID NO: 1052944 - RNA, 22 nt, Human
uuuacauuucccucugucaguu

SEQ ID NO: 1052945 - RNA, 22 nt, Human
cagaggcacaagaaagcaaggc

SEQ ID NO: 1052946 - RNA, 22 nt, Human
gcccaggauaaugcugucccug

SEQ ID NO: 1052947 - RNA, 22 nt, Human
gcucacugccauucucuagaug

SEQ ID NO: 1052948 - RNA, 17 nt, Human
ugaggcucggugaggag

SEQ ID NO: 1052949 - RNA, 20 nt, Human
cauacacuauucuguauagu

SEQ ID NO: 1052950 - RNA, 22 nt, Human
accaggaggccuugguucugag

SEQ ID NO: 1052951 - RNA, 22 nt, Human
uggucaaaagaaagcucagaac

SEQ ID NO: 1052952 - RNA, 22 nt, Human
ucugcuguucauucuuuuagcu

SEQ ID NO: 1052953 - RNA, 20 nt, Human
gaaauacuuacccaacuguu

SEQ ID NO: 1052954 - RNA, 22 nt, Human
guuuucugauuagcaaaucuga

SEQ ID NO: 1052955 - RNA, 22 nt, Human
uucagugucaauuuuuaaauau

SEQ ID NO: 1052956 - RNA, 22 nt, Human
augguacaauguguuuguuagg

SEQ ID NO: 1052957 - RNA, 22 nt, Human
agagguagagguugcagugagc

SEQ ID NO: 1052958 - RNA, 22 nt, Human
uagaaaugugauaauagcuuaa

SEQ ID NO: 1052959 - RNA, 22 nt, Human
gagcccugaacaacagcaggaa

SEQ ID NO: 1052960 - RNA, 22 nt, Human
uagugcuuuaggccugaguguc

SEQ ID NO: 1052961 - RNA, 22 nt, Human
uccauuuuagaagaaaauccac

SEQ ID NO: 1052962 - RNA, 22 nt, Human
auucugagacaauugccgucag

SEQ ID NO: 1052963 - RNA, 23 nt, Human
uggacgccgacuuuggaggcgcu

SEQ ID NO: 1052964 - RNA, 22 nt, Human
ccccaggagauuugggagcaca

SEQ ID NO: 1052965 - RNA, 22 nt, Human
ucaaauaaugccauucaucauc

SEQ ID NO: 1052966 - RNA, 22 nt, Human
ccugguugagggagguguggac

SEQ ID NO: 1052967 - RNA, 22 nt, Human
uuggccaagggcucuuuaggcu

SEQ ID NO: 1052968 - RNA, 22 nt, Human
cagcacaguagaguaguuguaa

SEQ ID NO: 1052969 - RNA, 22 nt, Human
gaaguacaguuuuaucuagcca

SEQ ID NO: 1052970 - RNA, 22 nt, Human
gcagaggcuguagggaagguug

SEQ ID NO: 1052971 - RNA, 23 nt, Human
ucuagaaaaugaaagaaugcagu

SEQ ID NO: 1052972 - RNA, 22 nt, Human
aggccaaagcucaccugcagcu

SEQ ID NO: 1052973 - RNA, 22 nt, Human
uacuaucucuucuaacuucaga

SEQ ID NO: 1052974 - RNA, 22 nt, Human
gauguagagggaagauuuuaaa

SEQ ID NO: 1052975 - RNA, 22 nt, Human
cuggagucacucauguagcugc

SEQ ID NO: 1052976 - RNA, 22 nt, Human
gcuggcuguaucaccuggccag

SEQ ID NO: 1052977 - RNA, 22 nt, Human
uaacucuagucccaggcaugaa

SEQ ID NO: 1052978 - RNA, 22 nt, Human
uccuggccuuauccccaaacug

SEQ ID NO: 1052979 - RNA, 22 nt, Human
uccuggcccggccgggccugcu

SEQ ID NO: 1052980 - RNA, 22 nt, Human
uggcagcugcguuguguuucug

SEQ ID NO: 1052981 - RNA, 22 nt, Human
cugaggccuaagacaugaauga

SEQ ID NO: 1052982 - RNA, 22 nt, Human
aacauaaauuugaaguggcaaa

SEQ ID NO: 1052983 - RNA, 22 nt, Human
cagaugaggcaaccucauugcu

SEQ ID NO: 1052984 - RNA, 22 nt, Human
ucacagaacaauguuuaguucu

SEQ ID NO: 1052985 - RNA, 22 nt, Human
acauacauauguuuaaaugcau

SEQ ID NO: 1052986 - RNA, 22 nt, Human
uuuaucagagauauguguggac

SEQ ID NO: 1052987 - RNA, 22 nt, Human
gauacaguauuuaaagagcaac

SEQ ID NO: 1052988 - RNA, 22 nt, Human
auguaguuagaagauucaaaca

SEQ ID NO: 1052989 - RNA, 22 nt, Human
uugugguuaaccgcacauuuuu

SEQ ID NO: 1052990 - RNA, 22 nt, Human
ccugggcaucucaugcaccugc

SEQ ID NO: 1052991 - RNA, 20 nt, Human
guaacucuggcuaaguaaau

SEQ ID NO: 1052992 - RNA, 22 nt, Human
uuagccaugugggaaaaacagc

SEQ ID NO: 1052993 - RNA, 21 nt, Human
acauuuucuguuuuaggaagu

SEQ ID NO: 1052994 - RNA, 22 nt, Human
aggcuagcuuuggcucaguaaa

SEQ ID NO: 1052995 - RNA, 22 nt, Human
ucugaaaugcaaauuugacuga

SEQ ID NO: 1052996 - RNA, 22 nt, Human
uaauuauagcauuggaguggcc

SEQ ID NO: 1052997 - RNA, 22 nt, Human
gagcuguccaagauggucguaa

SEQ ID NO: 1052998 - RNA, 22 nt, Human
uugcagcuucgagucuaucugu

SEQ ID NO: 1052999 - RNA, 22 nt, Human
cucuucuugaaagaggaauuca

SEQ ID NO: 1053000 - RNA, 22 nt, Human
caggugacccucucaccugcuu

SEQ ID NO: 1053001 - RNA, 22 nt, Human
cugagguggcauccuagcucua

SEQ ID NO: 1053002 - RNA, 22 nt, Human
cuccaggaaagccugaggcccg

SEQ ID NO: 1053003 - RNA, 22 nt, Human
augaaacacacacgcgcauacu

SEQ ID NO: 1053004 - RNA, 22 nt, Human
gacuuucuuguagugucugaug

SEQ ID NO: 1053005 - RNA, 22 nt, Human
gauauagguucauaguguuaca

SEQ ID NO: 1053006 - RNA, 22 nt, Human
ccucagcuugauuucugcagag

SEQ ID NO: 1053007 - RNA, 22 nt, Human
uucugaaccauugagcacugcc

SEQ ID NO: 1053008 - RNA, 22 nt, Human
ucauuauuuuggacuggagugu

SEQ ID NO: 1053009 - RNA, 22 nt, Human
ccugaggucagccauucuugcc

SEQ ID NO: 1053010 - RNA, 22 nt, Human
gcugcagacugggaggcaggug

SEQ ID NO: 1053011 - RNA, 22 nt, Human
cuguccugauggugccacuggu

SEQ ID NO: 1053012 - RNA, 22 nt, Human
cugccucuccccagaguggccc

SEQ ID NO: 1053013 - RNA, 20 nt, Human
agacaggagcccccauucag

SEQ ID NO: 1053014 - RNA, 18 nt, Human
ccagagcuggcuccucgc

SEQ ID NO: 1053015 - RNA, 19 nt, Human
cagcaagaaugaaggcaua

SEQ ID NO: 1053016 - RNA, 22 nt, Human
auugaaagcacaaagaacaagu

SEQ ID NO: 1053017 - RNA, 22 nt, Human
ggcuggagacaacguccugccc

SEQ ID NO: 1053018 - RNA, 22 nt, Human
gcccaggagccuggagaugugu

SEQ ID NO: 1053019 - RNA, 18 nt, Human
ucccucccugcuguggcc

SEQ ID NO: 1053020 - RNA, 20 nt, Human
acuugcugggcuuuguuacc

SEQ ID NO: 1053021 - RNA, 22 nt, Human
uuccuuaguugacugucuuagu

SEQ ID NO: 1053022 - RNA, 22 nt, Human
uccugagcuucaaaacacuuug

SEQ ID NO: 1053023 - RNA, 22 nt, Human
cagaggcauacucccagucuug

SEQ ID NO: 1053024 - RNA, 20 nt, Human
gaguuccccauuucuccugg

SEQ ID NO: 1053025 - RNA, 22 nt, Human
gcuuuauuuugugagggauuac

SEQ ID NO: 1053026 - RNA, 22 nt, Human
ggcugcugcccaccccugcaug

SEQ ID NO: 1053027 - RNA, 16 nt, Human
aaggagggaagagaau

SEQ ID NO: 1053028 - RNA, 22 nt, Human
uagggcuguggucaguccucua

SEQ ID NO: 1053029 - RNA, 22 nt, Human
uagaacugacguuagggaagaa

SEQ ID NO: 1053030 - RNA, 22 nt, Human
aaaauaacuucuacuauuugca

SEQ ID NO: 1053031 - RNA, 22 nt, Human
ucugaggugucacaaggccagg

SEQ ID NO: 1053032 - RNA, 22 nt, Human
augcccugcucucgggaaggga

SEQ ID NO: 1053033 - RNA, 22 nt, Human
ugaacucucucaagugacagaa

SEQ ID NO: 1053034 - RNA, 17 nt, Human
aggccagaugaggcaag

SEQ ID NO: 1053035 - RNA, 22 nt, Human
gguuauauaauucagugcuuuc

SEQ ID NO: 1053036 - RNA, 22 nt, Human
aagugaccucaugguuucuccu

SEQ ID NO: 1053037 - RNA, 22 nt, Human
uuucacaaaugucuuuaacuug

SEQ ID NO: 1053038 - RNA, 22 nt, Human
uaaaugaagaaauggagauugu

SEQ ID NO: 1053039 - RNA, 22 nt, Human
acuguguggaccacucugaggc

SEQ ID NO: 1053040 - RNA, 22 nt, Human
ucuggcugaagcuuuugcagcu

SEQ ID NO: 1053041 - RNA, 22 nt, Human
acccaggacaugggcacccgug

SEQ ID NO: 1053042 - RNA, 19 nt, Human
uggcagggagaguuugaag

SEQ ID NO: 1053043 - RNA, 23 nt, Human
uuuauccaacucuguaaucucuc

SEQ ID NO: 1053044 - RNA, 22 nt, Human
aggacagcccuugagagcacau

SEQ ID NO: 1053045 - RNA, 21 nt, Human
acucaggagacuaacuauguc

SEQ ID NO: 1053046 - RNA, 22 nt, Human
ugcaggaaauuccaggguggcc

SEQ ID NO: 1053047 - RNA, 22 nt, Human
augauguuaccaguacuuagag

SEQ ID NO: 1053048 - RNA, 22 nt, Human
ggauggcaggacaaggacccag

SEQ ID NO: 1053049 - RNA, 22 nt, Human
uagcaagagugggcuuuguggg

SEQ ID NO: 1053050 - RNA, 22 nt, Human
uuuauguaauuucauaggugug

SEQ ID NO: 1053051 - RNA, 22 nt, Human
uugcugaaguuaaugcuugcaa

SEQ ID NO: 1053052 - RNA, 20 nt, Human
ucucagcauaagaacccuuc

SEQ ID NO: 1053053 - RNA, 22 nt, Human
gagcaagacucacugcaucuug

SEQ ID NO: 1053054 - RNA, 22 nt, Human
uuagacaggauguaugaaagcu

SEQ ID NO: 1053055 - RNA, 22 nt, Human
ucagccucucugaguccagacc

SEQ ID NO: 1053056 - RNA, 22 nt, Human
uauacagucuuuugcuauauuc

SEQ ID NO: 1053057 - RNA, 22 nt, Human
ucuucagacuccaaauguuuua

SEQ ID NO: 1053058 - RNA, 22 nt, Human
gguuugaacagcuuuggagaag

SEQ ID NO: 1053059 - RNA, 22 nt, Human
guucuucaggccauccucccag

SEQ ID NO: 1053060 - RNA, 22 nt, Human
gagggucccugcucagggccag

SEQ ID NO: 1053061 - RNA, 22 nt, Human
gagcagcucugugccuggagac

SEQ ID NO: 1053062 - RNA, 22 nt, Human
uuaacaugucuugacuucaucu

SEQ ID NO: 1053063 - RNA, 22 nt, Human
aguaccaugcuuccugacuggu

SEQ ID NO: 1053064 - RNA, 22 nt, Human
acacuaguauuucuauaaguga

SEQ ID NO: 1053065 - RNA, 22 nt, Human
uaguacaguggagagcaaagaa

SEQ ID NO: 1053066 - RNA, 22 nt, Human
ucugcaggcuuggaguggcagc

SEQ ID NO: 1053067 - RNA, 22 nt, Human
uaucuguuguaguacagaugau

SEQ ID NO: 1053068 - RNA, 22 nt, Human
aggaaaaauaaggcagcagggc

SEQ ID NO: 1053069 - RNA, 22 nt, Human
uucucagauccaucagaagucc

SEQ ID NO: 1053070 - RNA, 22 nt, Human
ugaggcucauucugcaugccaa

SEQ ID NO: 1053071 - RNA, 22 nt, Human
aucaggauucaguaucuccagc

SEQ ID NO: 1053072 - RNA, 22 nt, Human
aggcugaggagggauguugcuu

SEQ ID NO: 1053073 - RNA, 22 nt, Human
auucuucauuuacuguuacuug

SEQ ID NO: 1053074 - RNA, 22 nt, Human
uauuagguuggugcaacaguaa

SEQ ID NO: 1053075 - RNA, 22 nt, Human
ggcugagaacaggcccagccuc

SEQ ID NO: 1053076 - RNA, 22 nt, Human
agcacagguacggagaugcuac

SEQ ID NO: 1053077 - RNA, 22 nt, Human
aggauauuugcuuaagauagcu

SEQ ID NO: 1053078 - RNA, 22 nt, Human
cuuaaauucuuaaugcccucau

SEQ ID NO: 1053079 - RNA, 22 nt, Human
acccaggagacagguugcagug

SEQ ID NO: 1053080 - RNA, 22 nt, Human
ucucaggaaauaggauuugagu

SEQ ID NO: 1053081 - RNA, 22 nt, Human
uuggcaguaaaagaaaaugcuu

SEQ ID NO: 1053082 - RNA, 22 nt, Human
gagugucagugcuuggggcuac

SEQ ID NO: 1053083 - RNA, 22 nt, Human
ggacugaggcccacuugaggga

SEQ ID NO: 1053084 - RNA, 22 nt, Human
uucucagauauuuacugagcau

SEQ ID NO: 1053085 - RNA, 20 nt, Human
uauauaggaaauauuguguu

SEQ ID NO: 1053086 - RNA, 22 nt, Human
uugaggucaaguaaccacugga

SEQ ID NO: 1053087 - RNA, 22 nt, Human
guauuagucaauuacagugggg

SEQ ID NO: 1053088 - RNA, 22 nt, Human
aagcacugagcacaguggcuga

SEQ ID NO: 1053089 - RNA, 17 nt, Human
uugaacugcugagucag

SEQ ID NO: 1053090 - RNA, 22 nt, Human
cagcugugaauugucuuaucua

SEQ ID NO: 1053091 - RNA, 22 nt, Human
acccaggacacagagaugaccc

SEQ ID NO: 1053092 - RNA, 19 nt, Human
agggccugagcagauguug

SEQ ID NO: 1053093 - RNA, 20 nt, Human
ugugaaagcaguagaaugac

SEQ ID NO: 1053094 - RNA, 22 nt, Human
uucuucuucauuucugacgaug

SEQ ID NO: 1053095 - RNA, 22 nt, Human
augcuguguuugagaaccuagg

SEQ ID NO: 1053096 - RNA, 22 nt, Human
acugguguugauuuggaagggg

SEQ ID NO: 1053097 - RNA, 22 nt, Human
cccagggacagcuagguggggc

SEQ ID NO: 1053098 - RNA, 22 nt, Human
uacucagagucauugcccuucu

SEQ ID NO: 1053099 - RNA, 22 nt, Human
cagggucuuggcgccaucaccc

SEQ ID NO: 1053100 - RNA, 22 nt, Human
agggccuggaacugugggcagg

SEQ ID NO: 1053101 - RNA, 21 nt, Human
ucaggcugaugucgauguuag

SEQ ID NO: 1053102 - RNA, 22 nt, Human
aguuaaagaaagauaauucgcc

SEQ ID NO: 1053103 - RNA, 22 nt, Human
ugcugagggagggguuuuccag

SEQ ID NO: 1053104 - RNA, 22 nt, Human
cauuuauucauuugcuagggcu

SEQ ID NO: 1053105 - RNA, 22 nt, Human
ucaggcugcuuucaugcuuaga

SEQ ID NO: 1053106 - RNA, 22 nt, Human
uuggcacagagcugcagccugg

SEQ ID NO: 1053107 - RNA, 22 nt, Human
aaggcagcagugcacgacugau

SEQ ID NO: 1053108 - RNA, 20 nt, Human
gggcagcuccccucauucug

SEQ ID NO: 1053109 - RNA, 22 nt, Human
uaggauguagcuaugucaucau

SEQ ID NO: 1053110 - RNA, 22 nt, Human
aucacauugccagugauuaccc

SEQ ID NO: 1053111 - RNA, 22 nt, Human
guucuucaggcugugcucuaga

SEQ ID NO: 1053112 - RNA, 22 nt, Human
gcugccucugcgacucugggcg

SEQ ID NO: 1053113 - RNA, 22 nt, Human
uuggcagagaguaugcugaaga

SEQ ID NO: 1053114 - RNA, 22 nt, Human
uacaguaagaugaaauagcaau

SEQ ID NO: 1053115 - RNA, 22 nt, Human
aggacagcaguuggugagguuc

SEQ ID NO: 1053116 - RNA, 22 nt, Human
uagaacugcucucauacuugcu

SEQ ID NO: 1053117 - RNA, 22 nt, Human
uucaucaauguguuuaauaaug

SEQ ID NO: 1053118 - RNA, 22 nt, Human
auugcuguacacuucuagaucu

SEQ ID NO: 1053119 - RNA, 22 nt, Human
uucugccuucaguccucugacu

SEQ ID NO: 1053120 - RNA, 22 nt, Human
gccugccuguuggcugaggugc

SEQ ID NO: 1053121 - RNA, 22 nt, Human
gagcccuguagcaagucauguc

SEQ ID NO: 1053122 - RNA, 18 nt, Human
cgaggcaggcggaucacg

SEQ ID NO: 1053123 - RNA, 22 nt, Human
cuggccaaugccuggggaauag

SEQ ID NO: 1053124 - RNA, 17 nt, Human
acagagcacaucaagau

SEQ ID NO: 1053125 - RNA, 22 nt, Human
agguaacacuacuuaguauacu

SEQ ID NO: 1053126 - RNA, 22 nt, Human
cccaggauggggcugcaguuau

SEQ ID NO: 1053127 - RNA, 22 nt, Human
acugaggucaugcauaguuucu

SEQ ID NO: 1053128 - RNA, 22 nt, Human
uggaggaaguugcuggaaguca

SEQ ID NO: 1053129 - RNA, 22 nt, Human
uaacugccagcagcgaugaaca

SEQ ID NO: 1053130 - RNA, 23 nt, Human
ucucuuucaagagcuuaaugugc

SEQ ID NO: 1053131 - RNA, 22 nt, Human
gugugcagggaugagugcaggu

SEQ ID NO: 1053132 - RNA, 22 nt, Human
auuuuacuacuccaauuaauga

SEQ ID NO: 1053133 - RNA, 22 nt, Human
uccugccuugccugggacauca

SEQ ID NO: 1053134 - RNA, 22 nt, Human
acccagaggcggagguugcagu

SEQ ID NO: 1053135 - RNA, 22 nt, Human
guagcagaaucagugcuacaga

SEQ ID NO: 1053136 - RNA, 22 nt, Human
aaggcaguaggaucuuccacag

SEQ ID NO: 1053137 - RNA, 22 nt, Human
cacuggugaguccagaagucau

SEQ ID NO: 1053138 - RNA, 22 nt, Human
ugauugaacugagcuucaagau

SEQ ID NO: 1053139 - RNA, 22 nt, Human
cucccagagaccaagcugagaa

SEQ ID NO: 1053140 - RNA, 23 nt, Human
cagggcugguagggaagagcgug

SEQ ID NO: 1053141 - RNA, 22 nt, Human
uaggcagcugcaaacuucgguc

SEQ ID NO: 1053142 - RNA, 22 nt, Human
cagggagggaggaaaauuugcu

SEQ ID NO: 1053143 - RNA, 22 nt, Human
ugcaccuucauuuuaggcagcu

SEQ ID NO: 1053144 - RNA, 22 nt, Human
cccugccuucuuggccuuuaaa

SEQ ID NO: 1053145 - RNA, 20 nt, Human
accagagcucucaguaugug

SEQ ID NO: 1053146 - RNA, 22 nt, Human
gugcugagauuacaggugugag

SEQ ID NO: 1053147 - RNA, 22 nt, Human
aaagccaugaauguuauagagg

SEQ ID NO: 1053148 - RNA, 22 nt, Human
cagaacugggcagggagcagag

SEQ ID NO: 1053149 - RNA, 22 nt, Human
ucugccugagaaguggggugcc

SEQ ID NO: 1053150 - RNA, 22 nt, Human
uguacauacauagauauacaca

SEQ ID NO: 1053151 - RNA, 22 nt, Human
ugcaggaacugggagggauagu

SEQ ID NO: 1053152 - RNA, 22 nt, Human
gugacagagcugggauuugaag

SEQ ID NO: 1053153 - RNA, 22 nt, Human
ccaccaggcacucacagggaag

SEQ ID NO: 1053154 - RNA, 22 nt, Human
gccugcuggaggagccucaggg

SEQ ID NO: 1053155 - RNA, 22 nt, Human
uuaauuaaauucaugagcauug

SEQ ID NO: 1053156 - RNA, 23 nt, Human
uagagcagggaaaucugucagag

SEQ ID NO: 1053157 - RNA, 21 nt, Human
uuugaaagugggugauucuuu

SEQ ID NO: 1053158 - RNA, 22 nt, Human
ccuguuuacaucaucaaggacu

SEQ ID NO: 1053159 - RNA, 22 nt, Human
uaauaucuacuucauagaguuu

SEQ ID NO: 1053160 - RNA, 22 nt, Human
uccaggagauucauuaggucau

SEQ ID NO: 1053161 - RNA, 22 nt, Human
acagucauuagauacaaugucu

SEQ ID NO: 1053162 - RNA, 22 nt, Human
gcauuuccugugcuuggcauau

SEQ ID NO: 1053163 - RNA, 22 nt, Human
aggcugagcaaagggccuuacc

SEQ ID NO: 1053164 - RNA, 22 nt, Human
cagcuccucacgagucuugaaa

SEQ ID NO: 1053165 - RNA, 23 nt, Human
uccaggagaaccccugucugucc

SEQ ID NO: 1053166 - RNA, 22 nt, Human
augcugagacuggagcagcugg

SEQ ID NO: 1053167 - RNA, 22 nt, Human
ccagcagagucuaggaaggagg

SEQ ID NO: 1053168 - RNA, 22 nt, Human
aggagcagcuucugaaccaugu

SEQ ID NO: 1053169 - RNA, 22 nt, Human
uuugcagucaaauuugcuaaau

SEQ ID NO: 1053170 - RNA, 22 nt, Human
gccaggagggaaaggacaauuu

SEQ ID NO: 1053171 - RNA, 22 nt, Human
ucugguaaccuuuaucccuccu

SEQ ID NO: 1053172 - RNA, 22 nt, Human
uauuuguauguguguacauaua

SEQ ID NO: 1053173 - RNA, 22 nt, Human
gaaaugaacugauuaucauugc

SEQ ID NO: 1053174 - RNA, 22 nt, Human
uggcagcugaauggcuggaugg

SEQ ID NO: 1053175 - RNA, 22 nt, Human
cuggcucauccagguguugcuc

SEQ ID NO: 1053176 - RNA, 22 nt, Human
acagagagaaacaaucagcagc

SEQ ID NO: 1053177 - RNA, 22 nt, Human
gucagcugggcaucugcagaug

SEQ ID NO: 1053178 - RNA, 22 nt, Human
uuucuucauucaccuucacccc

SEQ ID NO: 1053179 - RNA, 22 nt, Human
cuugcaggccuuucuagcucua

SEQ ID NO: 1053180 - RNA, 22 nt, Human
caguaguuauuaguugccacug

SEQ ID NO: 1053181 - RNA, 22 nt, Human
ucagggugaaccaggcaggaau

SEQ ID NO: 1053182 - RNA, 22 nt, Human
ccaggaagcugucugauaugaa

SEQ ID NO: 1053183 - RNA, 18 nt, Human
ugaacuggcaucagaauc

SEQ ID NO: 1053184 - RNA, 16 nt, Human
ccccaggacuuggcac

SEQ ID NO: 1053185 - RNA, 22 nt, Human
gaggcugacggcaccaucuucu

SEQ ID NO: 1053186 - RNA, 18 nt, Human
guccacagauucuucacu

SEQ ID NO: 1053187 - RNA, 22 nt, Human
cccacagggcugcugauggcag

SEQ ID NO: 1053188 - RNA, 22 nt, Human
acaggagaauuaucuggaacaa

SEQ ID NO: 1053189 - RNA, 22 nt, Human
cccaggaggcagaaguugcagu

SEQ ID NO: 1053190 - RNA, 16 nt, Human
auuuccagauuaugca

SEQ ID NO: 1053191 - RNA, 21 nt, Human
cccagggaagccgcagucacc

SEQ ID NO: 1053192 - RNA, 22 nt, Human
agcugcagucaagcugggccac

SEQ ID NO: 1053193 - RNA, 22 nt, Human
ucugagguuaauccugcugcau

SEQ ID NO: 1053194 - RNA, 22 nt, Human
guccaugacugugacucacaug

SEQ ID NO: 1053195 - RNA, 22 nt, Human
ggcagcuuguccuucaggagag

SEQ ID NO: 1053196 - RNA, 22 nt, Human
aggguaggaacugaguggaagg

SEQ ID NO: 1053197 - RNA, 22 nt, Human
cugccucagccuucugggugac

SEQ ID NO: 1053198 - RNA, 18 nt, Human
gaaaggagagacaguagg

SEQ ID NO: 1053199 - RNA, 22 nt, Human
cagcugccugucuggaggcaau

SEQ ID NO: 1053200 - RNA, 22 nt, Human
cucccagggucuaggcugcugg

SEQ ID NO: 1053201 - RNA, 22 nt, Human
uggccacaugcgucugugaggc

SEQ ID NO: 1053202 - RNA, 22 nt, Human
uugaaaguuaucuagauucuga

SEQ ID NO: 1053203 - RNA, 22 nt, Human
gagggcugauaaaugcgcaugg

SEQ ID NO: 1053204 - RNA, 22 nt, Human
gaggagagaagcuaacggugcu

SEQ ID NO: 1053205 - RNA, 22 nt, Human
gcccugagccuaugagccucuc

SEQ ID NO: 1053206 - RNA, 22 nt, Human
uggcagucuggguuggcaguua

SEQ ID NO: 1053207 - RNA, 22 nt, Human
cugcugugggcaggguagcugg

SEQ ID NO: 1053208 - RNA, 22 nt, Human
aggcugagcggggucccagagc

SEQ ID NO: 1053209 - RNA, 22 nt, Human
ggcuguagguuggugcuggaca

SEQ ID NO: 1053210 - RNA, 22 nt, Human
uaaauacuuuacaggaugucuc

SEQ ID NO: 1053211 - RNA, 22 nt, Human
cugacagucucauugauuugcu

SEQ ID NO: 1053212 - RNA, 22 nt, Human
ucauuuguucucauucucuacu

SEQ ID NO: 1053213 - RNA, 22 nt, Human
gccaggaggggagaguguguca

SEQ ID NO: 1053214 - RNA, 22 nt, Human
gagaggcaggcgcugcaauggu

SEQ ID NO: 1053215 - RNA, 18 nt, Human
ggcugagguugacuagaa

SEQ ID NO: 1053216 - RNA, 22 nt, Human
gugcaagguacauccuugaugu

SEQ ID NO: 1053217 - RNA, 22 nt, Human
ggaggcgauccugggaaacacc

SEQ ID NO: 1053218 - RNA, 22 nt, Human
cuuacagagaagaaaauguagu

SEQ ID NO: 1053219 - RNA, 22 nt, Human
uugcugaaaacaguggguauug

SEQ ID NO: 1053220 - RNA, 22 nt, Human
ugaggcaggaguuaaugugcuc

SEQ ID NO: 1053221 - RNA, 22 nt, Human
guuaggauguggggacuuuggg

SEQ ID NO: 1053222 - RNA, 19 nt, Human
uccugggcugcgucuugcc

SEQ ID NO: 1053223 - RNA, 22 nt, Human
cagagccauuauggagacuugc

SEQ ID NO: 1053224 - RNA, 23 nt, Human
uucuuucaagaaguucacagugc

SEQ ID NO: 1053225 - RNA, 22 nt, Human
ccucacugaagaggugacauuu

SEQ ID NO: 1053226 - RNA, 22 nt, Human
agaggaggcagcuuaacucagu

SEQ ID NO: 1053227 - RNA, 22 nt, Human
gaggcauggccugaggcuagga

SEQ ID NO: 1053228 - RNA, 22 nt, Human
ccuuuucuaaucuuaagaaugu

SEQ ID NO: 1053229 - RNA, 22 nt, Human
acuccuggguugcaguccucaa

SEQ ID NO: 1053230 - RNA, 22 nt, Human
aacuccuguucuaugacaagag

SEQ ID NO: 1053231 - RNA, 22 nt, Human
ccugucacgaugacugcacucu

SEQ ID NO: 1053232 - RNA, 22 nt, Human
cucucuguuaugcuuucaugaa

SEQ ID NO: 1053233 - RNA, 22 nt, Human
ucccagaggucucugcugguuc

SEQ ID NO: 1053234 - RNA, 22 nt, Human
aggacugacuuuugccaugaaa

SEQ ID NO: 1053235 - RNA, 22 nt, Human
caaaugauacuguuuuuagucu

SEQ ID NO: 1053236 - RNA, 22 nt, Human
gacagugcauuuccuggcaugg

SEQ ID NO: 1053237 - RNA, 22 nt, Human
gauguuucaugcuagcaugugu

SEQ ID NO: 1053238 - RNA, 22 nt, Human
ggggggugcugaucaguggagc

SEQ ID NO: 1053239 - RNA, 22 nt, Human
aagggcuggagaggaaagguug

SEQ ID NO: 1053240 - RNA, 22 nt, Human
cagcaggaggugaguagcaggu

SEQ ID NO: 1053241 - RNA, 22 nt, Human
gagguggucgaggagggguacc

SEQ ID NO: 1053242 - RNA, 22 nt, Human
agcaagauuuuccuugaauguu

SEQ ID NO: 1053243 - RNA, 22 nt, Human
ccuccuggcuuuucccauugaa

SEQ ID NO: 1053244 - RNA, 22 nt, Human
aaguaaucuggaauuugguuuu

SEQ ID NO: 1053245 - RNA, 22 nt, Human
auuaguagcuguaauaacuggg

SEQ ID NO: 1053246 - RNA, 22 nt, Human
gcugcagagggaggggcucgca

SEQ ID NO: 1053247 - RNA, 22 nt, Human
acuggccaggcacagcuguggg

SEQ ID NO: 1053248 - RNA, 22 nt, Human
ugucugccugcgggccggcaca

SEQ ID NO: 1053249 - RNA, 22 nt, Human
gcaacuguuuugagcacccagu

SEQ ID NO: 1053250 - RNA, 22 nt, Human
aaaaugaugcuguaauuuggca

SEQ ID NO: 1053251 - RNA, 22 nt, Human
ucucccaggcugcccuguggac

SEQ ID NO: 1053252 - RNA, 22 nt, Human
auuagagaaugugcugacauug

SEQ ID NO: 1053253 - RNA, 21 nt, Human
aguguaggucauuagcuguug

SEQ ID NO: 1053254 - RNA, 23 nt, Human
cagaugagguuggcagcaugguc

SEQ ID NO: 1053255 - RNA, 22 nt, Human
gcucaggaaauaguuuaguguu

SEQ ID NO: 1053256 - RNA, 22 nt, Human
agcugcaggagucgccuaggau

SEQ ID NO: 1053257 - RNA, 22 nt, Human
gaggaggcacuugagcagaugu

SEQ ID NO: 1053258 - RNA, 22 nt, Human
aagggcuguaagccaaguaaag

SEQ ID NO: 1053259 - RNA, 22 nt, Human
ucagagaguuagugucuuagcu

SEQ ID NO: 1053260 - RNA, 22 nt, Human
uguguucuggaaagcucacuga

SEQ ID NO: 1053261 - RNA, 22 nt, Human
ggaggacaggggcugcagcaca

SEQ ID NO: 1053262 - RNA, 22 nt, Human
agugcuggcccauagcugcugg

SEQ ID NO: 1053263 - RNA, 22 nt, Human
ucaaugacugguccaagguggc

SEQ ID NO: 1053264 - RNA, 22 nt, Human
uucuccaacacaagcaugaugu

SEQ ID NO: 1053265 - RNA, 22 nt, Human
aaugcauauguaggcaagcagu

SEQ ID NO: 1053266 - RNA, 22 nt, Human
aacuuucugaaaagcuugauca

SEQ ID NO: 1053267 - RNA, 22 nt, Human
aggcucagaggugagcaucugc

SEQ ID NO: 1053268 - RNA, 22 nt, Human
aggcuggaguacaguggcuauu

SEQ ID NO: 1053269 - RNA, 22 nt, Human
auuacaaaagaagggagaaggu

SEQ ID NO: 1053270 - RNA, 23 nt, Human
uuucaacuccugccauuauuucu

SEQ ID NO: 1053271 - RNA, 20 nt, Human
cccaggagcugugccccauc

SEQ ID NO: 1053272 - RNA, 22 nt, Human
gagcaagauuaaaaggcugggu

SEQ ID NO: 1053273 - RNA, 22 nt, Human
aggcaagcauugggaacagggc

SEQ ID NO: 1053274 - RNA, 22 nt, Human
aagggcuguagacaagauugcu

SEQ ID NO: 1053275 - RNA, 22 nt, Human
ucuccuggcccugucgccaucu

SEQ ID NO: 1053276 - RNA, 22 nt, Human
uuggccaaacagaguucaacag

SEQ ID NO: 1053277 - RNA, 22 nt, Human
uaguccaggaagguggggcaga

SEQ ID NO: 1053278 - RNA, 22 nt, Human
uuagagaagcuguaauuauuca

SEQ ID NO: 1053279 - RNA, 22 nt, Human
cggcugagacggccauagacac

SEQ ID NO: 1053280 - RNA, 22 nt, Human
ugcuucagugcucugagccugu

SEQ ID NO: 1053281 - RNA, 22 nt, Human
caggcagaguuagagcaacugg

SEQ ID NO: 1053282 - RNA, 23 nt, Human
acucguggaauucucugcgaucg

SEQ ID NO: 1053283 - RNA, 22 nt, Human
gcagaggagcaaguugcuacag

SEQ ID NO: 1053284 - RNA, 22 nt, Human
gcugaagcugacacauagugcu

SEQ ID NO: 1053285 - RNA, 22 nt, Human
uucucuuuugugaugugagaug

SEQ ID NO: 1053286 - RNA, 22 nt, Human
gaaauuaaccaccuuuggcuuu

SEQ ID NO: 1053287 - RNA, 22 nt, Human
uuuucagugggcaaugauguga

SEQ ID NO: 1053288 - RNA, 22 nt, Human
gccugcagaacugugaggcaau

SEQ ID NO: 1053289 - RNA, 22 nt, Human
agaggacaaaaugagaagugcu

SEQ ID NO: 1053290 - RNA, 20 nt, Human
agggcagcuugaggagccgg

SEQ ID NO: 1053291 - RNA, 22 nt, Human
ggcccacacugacagcugagcu

SEQ ID NO: 1053292 - RNA, 22 nt, Human
uccaccagcuucuucaccagcu

SEQ ID NO: 1053293 - RNA, 22 nt, Human
uugaaaggugaacaugaugcac

SEQ ID NO: 1053294 - RNA, 22 nt, Human
gaccauuugcuaguaaauugca

SEQ ID NO: 1053295 - RNA, 22 nt, Human
ccagggaguuuccaaucugaga

SEQ ID NO: 1053296 - RNA, 19 nt, Human
cugcuucaggcgccuugcc

SEQ ID NO: 1053297 - RNA, 17 nt, Human
ucaggauguagcaguag

SEQ ID NO: 1053298 - RNA, 22 nt, Human
gcugagagugggugcagugcuu

SEQ ID NO: 1053299 - RNA, 22 nt, Human
cuggccaguugccuuccugggu

SEQ ID NO: 1053300 - RNA, 17 nt, Human
agagagagcaugccacc

SEQ ID NO: 1053301 - RNA, 22 nt, Human
ggaggugggcuaaggacucucu

SEQ ID NO: 1053302 - RNA, 22 nt, Human
acuggccagaacuaagucacau

SEQ ID NO: 1053303 - RNA, 22 nt, Human
ggguccaccugagcagcagccu

SEQ ID NO: 1053304 - RNA, 22 nt, Human
ucuggguaugaccuauuuuucc

SEQ ID NO: 1053305 - RNA, 22 nt, Human
ucuuggcaauuugaucucaguu

SEQ ID NO: 1053306 - RNA, 22 nt, Human
ccaggcuggaguguagucgcau

SEQ ID NO: 1053307 - RNA, 22 nt, Human
auuuggcaaauaauuugagggu

SEQ ID NO: 1053308 - RNA, 23 nt, Human
uugaaagguagcuggcagcuaga

SEQ ID NO: 1053309 - RNA, 22 nt, Human
cagcagaaaauaccuguaacuc

SEQ ID NO: 1053310 - RNA, 22 nt, Human
gcagcucccagcuugaaagguc

SEQ ID NO: 1053311 - RNA, 22 nt, Human
cugucauuuaagacauucugga

SEQ ID NO: 1053312 - RNA, 22 nt, Human
gagaggucaucucccaucagca

SEQ ID NO: 1053313 - RNA, 22 nt, Human
auaaaugaacauucacagagcu

SEQ ID NO: 1053314 - RNA, 22 nt, Human
aggaugaggcuggcaggucuug

SEQ ID NO: 1053315 - RNA, 22 nt, Human
agccugagugcuuaggacuguu

SEQ ID NO: 1053316 - RNA, 22 nt, Human
auuugcuucugugaaaucaagu

SEQ ID NO: 1053317 - RNA, 21 nt, Human
cacugguagauggcccgcagg

SEQ ID NO: 1053318 - RNA, 22 nt, Human
gcaggagacuggcugugguagu

SEQ ID NO: 1053319 - RNA, 15 nt, Human
uucaggauaugacuc

SEQ ID NO: 1053320 - RNA, 23 nt, Human
gcugccucuguuggucuucaguu

SEQ ID NO: 1053321 - RNA, 21 nt, Human
cucaggaucuuauauauuagu

SEQ ID NO: 1053322 - RNA, 17 nt, Human
gagagcugcugcuuccg

SEQ ID NO: 1053323 - RNA, 18 nt, Human
cugccugcucuccagcuu

SEQ ID NO: 1053324 - RNA, 22 nt, Human
ccuggccagaggcgugccugug

SEQ ID NO: 1053325 - RNA, 22 nt, Human
agggaguuagaaauccaggaua

SEQ ID NO: 1053326 - RNA, 22 nt, Human
aggagacaucuaacuguagguu

SEQ ID NO: 1053327 - RNA, 22 nt, Human
uuguaaaugaccuuuucuaauu

SEQ ID NO: 1053328 - RNA, 22 nt, Human
ccagugcuuccaggaauacggu

SEQ ID NO: 1053329 - RNA, 22 nt, Human
gggcagcuguaucugagcuuau

SEQ ID NO: 1053330 - RNA, 22 nt, Human
uauuucagggagaauaaauuug

SEQ ID NO: 1053331 - RNA, 22 nt, Human
uacacacaugcauuugccuuau

SEQ ID NO: 1053332 - RNA, 22 nt, Human
ugaggcaguauuuuagugacuu

SEQ ID NO: 1053333 - RNA, 22 nt, Human
uucugucaugcucauguaauug

SEQ ID NO: 1053334 - RNA, 22 nt, Human
guagacaucuagauuuaugugu

SEQ ID NO: 1053335 - RNA, 22 nt, Human
ucuggagaagcccagggagcug

SEQ ID NO: 1053336 - RNA, 19 nt, Human
cuguggcugaccucuggcc

SEQ ID NO: 1053337 - RNA, 22 nt, Human
gcaagcugcucuuauguggagg

SEQ ID NO: 1053338 - RNA, 23 nt, Human
cuaggcaggauuguaggcgggua

SEQ ID NO: 1053339 - RNA, 22 nt, Human
agggucuguggaugcaucuggg

SEQ ID NO: 1053340 - RNA, 22 nt, Human
ucugucccugagagcucaggag

SEQ ID NO: 1053341 - RNA, 22 nt, Human
uagaagcaguaauagaaauagg

SEQ ID NO: 1053342 - RNA, 22 nt, Human
caaauuaaugugucucaaaaua

SEQ ID NO: 1053343 - RNA, 22 nt, Human
uaacuguauauuaagguggccc

SEQ ID NO: 1053344 - RNA, 22 nt, Human
ggggcagcuaccggaaguaggg

SEQ ID NO: 1053345 - RNA, 22 nt, Human
gaauacaugauacaugaacugc

SEQ ID NO: 1053346 - RNA, 22 nt, Human
acaggcugaggaugauugcauc

SEQ ID NO: 1053347 - RNA, 22 nt, Human
ucacaauuuggauacagcuaug

SEQ ID NO: 1053348 - RNA, 22 nt, Human
ucugcaggcucuagaugagguu

SEQ ID NO: 1053349 - RNA, 22 nt, Human
gaaggaaaacagaucugccuga

SEQ ID NO: 1053350 - RNA, 22 nt, Human
auacaaagacaaaucucaaucu

SEQ ID NO: 1053351 - RNA, 23 nt, Human
uuucuucagaagccuugcgaggc

SEQ ID NO: 1053352 - RNA, 22 nt, Human
cuaccuuucugacucuugggau

SEQ ID NO: 1053353 - RNA, 22 nt, Human
uuuguagaggguaauugacaga

SEQ ID NO: 1053354 - RNA, 22 nt, Human
ucugagguaccagcugguuuau

SEQ ID NO: 1053355 - RNA, 22 nt, Human
gugagguccugagaggcuugug

SEQ ID NO: 1053356 - RNA, 23 nt, Human
cugcccugaucuugaucuauugu

SEQ ID NO: 1053357 - RNA, 23 nt, Human
accaggagccaagaucucccugg

SEQ ID NO: 1053358 - RNA, 22 nt, Human
ucuccucucuuaccugguacaa

SEQ ID NO: 1053359 - RNA, 22 nt, Human
acauugcugcauucuccuuccc

SEQ ID NO: 1053360 - RNA, 22 nt, Human
gacugagggacagggcagugga

SEQ ID NO: 1053361 - RNA, 20 nt, Human
cuucuucagccuaugcuuca

SEQ ID NO: 1053362 - RNA, 22 nt, Human
acaggcagagaacucagccaga

SEQ ID NO: 1053363 - RNA, 22 nt, Human
uuauagaaggagcauucacuua

SEQ ID NO: 1053364 - RNA, 22 nt, Human
cagaggcaaaagagguggaggu

SEQ ID NO: 1053365 - RNA, 22 nt, Human
gagagcuggguucaaguagcug

SEQ ID NO: 1053366 - RNA, 22 nt, Human
caaggccagggaauuuuucugg

SEQ ID NO: 1053367 - RNA, 22 nt, Human
aggcugugaacucuaugcugaa

SEQ ID NO: 1053368 - RNA, 20 nt, Human
agcuucuucugucuaauuuu

SEQ ID NO: 1053369 - RNA, 22 nt, Human
aucauucuauuguugagcugcc

SEQ ID NO: 1053370 - RNA, 22 nt, Human
uaauuauagccgcuauuuugcu

SEQ ID NO: 1053371 - RNA, 22 nt, Human
caagaugggcaccccagcaccu

SEQ ID NO: 1053372 - RNA, 22 nt, Human
aggcagauuuaggagaaaagaa

SEQ ID NO: 1053373 - RNA, 22 nt, Human
ugaaggccagcagagugaaggc

SEQ ID NO: 1053374 - RNA, 22 nt, Human
acauaccauacauggugagaug

SEQ ID NO: 1053375 - RNA, 22 nt, Human
ucugccugcggcugcagguggc

SEQ ID NO: 1053376 - RNA, 22 nt, Human
uaggcuggaggaagcagugccu

SEQ ID NO: 1053377 - RNA, 22 nt, Human
agcaccuugcucuuggccuucc

SEQ ID NO: 1053378 - RNA, 22 nt, Human
gcuccucuauuccccacauuuu

SEQ ID NO: 1053379 - RNA, 22 nt, Human
uugaaaguuuauggagucugca

SEQ ID NO: 1053380 - RNA, 22 nt, Human
acaguggagaaggcaugaggcu

SEQ ID NO: 1053381 - RNA, 22 nt, Human
gaggcugaugcugccucacaga

SEQ ID NO: 1053382 - RNA, 22 nt, Human
gcaggcugcccucuuguguuga

SEQ ID NO: 1053383 - RNA, 22 nt, Human
ggcagggaagcuggcaucacgg

SEQ ID NO: 1053384 - RNA, 22 nt, Human
augugaggcagcacggagauua

SEQ ID NO: 1053385 - RNA, 22 nt, Human
ggccucaguuucuucaacugua

SEQ ID NO: 1053386 - RNA, 22 nt, Human
uuucuucagccacuccaaacug

SEQ ID NO: 1053387 - RNA, 22 nt, Human
cuuauuucuccauccagaguca

SEQ ID NO: 1053388 - RNA, 22 nt, Human
ucaggagagaguuggguaggcu

SEQ ID NO: 1053389 - RNA, 22 nt, Human
aaguccaugaucaagauguggc

SEQ ID NO: 1053390 - RNA, 22 nt, Human
cugaggucuagacaccccaggg

SEQ ID NO: 1053391 - RNA, 22 nt, Human
uccaugagagguaacuuuacaa

SEQ ID NO: 1053392 - RNA, 22 nt, Human
ucauuucucccggccaaaaacu

SEQ ID NO: 1053393 - RNA, 22 nt, Human
uaaaaugaucucucauguucuu

SEQ ID NO: 1053394 - RNA, 22 nt, Human
uccugggcgguuaugugaucug

SEQ ID NO: 1053395 - RNA, 22 nt, Human
gacaggcaauuaccagcgccca

SEQ ID NO: 1053396 - RNA, 22 nt, Human
ccugagguugaaguauaaauug

SEQ ID NO: 1053397 - RNA, 22 nt, Human
ucccaggacaggccacauggaa

SEQ ID NO: 1053398 - RNA, 21 nt, Human
uucaaaaugguguguuugucu

SEQ ID NO: 1053399 - RNA, 22 nt, Human
aggcaggcaaccaccugggaag

SEQ ID NO: 1053400 - RNA, 22 nt, Human
uuauacuaaaacgcauugaauu

SEQ ID NO: 1053401 - RNA, 22 nt, Human
acccaggagguggaggcugcag

SEQ ID NO: 1053402 - RNA, 22 nt, Human
auuauuaggacuacugggguug

SEQ ID NO: 1053403 - RNA, 22 nt, Human
cugaguccagggacagaggcgu

SEQ ID NO: 1053404 - RNA, 22 nt, Human
cugagguccuugacugcuugcc

SEQ ID NO: 1053405 - RNA, 22 nt, Human
uuugcauaggauggacauuuua

SEQ ID NO: 1053406 - RNA, 19 nt, Human
caggagagcaugcacuuug

SEQ ID NO: 1053407 - RNA, 22 nt, Human
aagcaauauacugauaugauua

SEQ ID NO: 1053408 - RNA, 22 nt, Human
cagcaagaguugggguuguugg

SEQ ID NO: 1053409 - RNA, 22 nt, Human
aucaggaugaagcuguagcgaa

SEQ ID NO: 1053410 - RNA, 21 nt, Human
ggccugaguauaggacaggcc

SEQ ID NO: 1053411 - RNA, 22 nt, Human
ugaggcaggacauggacaacug

SEQ ID NO: 1053412 - RNA, 22 nt, Human
acacagaagaucucuuaaugcu

SEQ ID NO: 1053413 - RNA, 22 nt, Human
cagcuuccgaccgggggcugca

SEQ ID NO: 1053414 - RNA, 22 nt, Human
aucauacagaaccugagcacuu

SEQ ID NO: 1053415 - RNA, 22 nt, Human
ucaucugucauccacaaagcug

SEQ ID NO: 1053416 - RNA, 22 nt, Human
aggcaguggaaggagaaagcaa

SEQ ID NO: 1053417 - RNA, 22 nt, Human
acuggccaggagcuggaaauac

SEQ ID NO: 1053418 - RNA, 22 nt, Human
aucuccaggcauuucaagagac

SEQ ID NO: 1053419 - RNA, 22 nt, Human
gugauuuugagaccuauauagu

SEQ ID NO: 1053420 - RNA, 22 nt, Human
aaauuauuaugccccucuauaa

SEQ ID NO: 1053421 - RNA, 22 nt, Human
ccuugagccagggagcuggcag

SEQ ID NO: 1053422 - RNA, 22 nt, Human
cuucagaagccugcagccuuug

SEQ ID NO: 1053423 - RNA, 22 nt, Human
uuggccaaagcucaccagugcu

SEQ ID NO: 1053424 - RNA, 22 nt, Human
gucaggauuuuaaaaucccagu

SEQ ID NO: 1053425 - RNA, 22 nt, Human
gagcugagggucuaggaggguu

SEQ ID NO: 1053426 - RNA, 22 nt, Human
aaaauuauggaguaucccaaag

SEQ ID NO: 1053427 - RNA, 22 nt, Human
gcugccucacuccagcccaaua

SEQ ID NO: 1053428 - RNA, 22 nt, Human
ccuggagcccaaggcagugaga

SEQ ID NO: 1053429 - RNA, 22 nt, Human
uguuuuaagagcgcacuuuaua

SEQ ID NO: 1053430 - RNA, 20 nt, Human
cacguuuuuccacuagcaaa

SEQ ID NO: 1053431 - RNA, 22 nt, Human
aacuacauuuuacagaagauga

SEQ ID NO: 1053432 - RNA, 22 nt, Human
cuggcugugcugcaggcuuugg

SEQ ID NO: 1053433 - RNA, 22 nt, Human
aggcagucuaucucuggagccu

SEQ ID NO: 1053434 - RNA, 22 nt, Human
uugcauuugaucuuggguucuc

SEQ ID NO: 1053435 - RNA, 22 nt, Human
ccugcuguucuguuuagugaac

SEQ ID NO: 1053436 - RNA, 22 nt, Human
ucugaagccaccucugcuuguc

SEQ ID NO: 1053437 - RNA, 21 nt, Human
acauuauaauucauauuccac

SEQ ID NO: 1053438 - RNA, 22 nt, Human
agacaggcugcugucugcuagg

SEQ ID NO: 1053439 - RNA, 18 nt, Human
ggcagggaaaagauaggg

SEQ ID NO: 1053440 - RNA, 22 nt, Human
aaacugccacaagagggacauc

SEQ ID NO: 1053441 - RNA, 22 nt, Human
aucauuucccuuuagaucacaa

SEQ ID NO: 1053442 - RNA, 22 nt, Human
ucugggaaccagugcggcuggg

SEQ ID NO: 1053443 - RNA, 22 nt, Human
aggagggagaugcccauccugg

SEQ ID NO: 1053444 - RNA, 22 nt, Human
cugagcccauugggugcuguua

SEQ ID NO: 1053445 - RNA, 21 nt, Human
gccuggcucucacuggccugg

SEQ ID NO: 1053446 - RNA, 22 nt, Human
gacugaggagguaagguuugaa

SEQ ID NO: 1053447 - RNA, 19 nt, Human
aucugccuuagugcugcug

SEQ ID NO: 1053448 - RNA, 22 nt, Human
uuacaagauaaccugaugcugu

SEQ ID NO: 1053449 - RNA, 22 nt, Human
guacacuugacucauaggaaau

SEQ ID NO: 1053450 - RNA, 22 nt, Human
acugccucuuggugcugagaga

SEQ ID NO: 1053451 - RNA, 22 nt, Human
gcauucuuuuuaggagguuccu

SEQ ID NO: 1053452 - RNA, 22 nt, Human
acgcuuuuacuauuuugagcuc

SEQ ID NO: 1053453 - RNA, 22 nt, Human
uguagggaggaaggguuggaaa

SEQ ID NO: 1053454 - RNA, 22 nt, Human
agcaguguggccuuagacccgg

SEQ ID NO: 1053455 - RNA, 22 nt, Human
cggccaagccggggccccgaag

SEQ ID NO: 1053456 - RNA, 22 nt, Human
ugagcagagcaguaacaggagc

SEQ ID NO: 1053457 - RNA, 22 nt, Human
uucuagaugcuuauaggcauau

SEQ ID NO: 1053458 - RNA, 22 nt, Human
uuuguuuagaugguaaaucagu

SEQ ID NO: 1053459 - RNA, 22 nt, Human
cauuuguuuagaagucuuuaua

SEQ ID NO: 1053460 - RNA, 22 nt, Human
uucuuuucuuuaggcauugugu

SEQ ID NO: 1053461 - RNA, 22 nt, Human
acugacuuuggaauauuucuag

SEQ ID NO: 1053462 - RNA, 22 nt, Human
ccucuucuaggacguccuugug

SEQ ID NO: 1053463 - RNA, 22 nt, Human
ugaaaugauguacaagaaggca

SEQ ID NO: 1053464 - RNA, 22 nt, Human
ugucugugaccucuuaggcaag

SEQ ID NO: 1053465 - RNA, 22 nt, Human
caggccugagacaucugagaua

SEQ ID NO: 1053466 - RNA, 22 nt, Human
augaggauuaacuguugucaua

SEQ ID NO: 1053467 - RNA, 22 nt, Human
gggcugagucugcugccuguca

SEQ ID NO: 1053468 - RNA, 22 nt, Human
auguuucaccagcaaauuaccu

SEQ ID NO: 1053469 - RNA, 22 nt, Human
cugaggcugggcuugccuucuu

SEQ ID NO: 1053470 - RNA, 22 nt, Human
agcggcugcuccgcaggcuggc

SEQ ID NO: 1053471 - RNA, 22 nt, Human
gcugcugucacggugcuaaggg

SEQ ID NO: 1053472 - RNA, 22 nt, Human
aaugccaacuuggauauacauu

SEQ ID NO: 1053473 - RNA, 22 nt, Human
ucucaagaucucaagauggccc

SEQ ID NO: 1053474 - RNA, 22 nt, Human
gcugagcugaggcagggcuggg

SEQ ID NO: 1053475 - RNA, 22 nt, Human
aggagggaccuaggaauauugc

SEQ ID NO: 1053476 - RNA, 22 nt, Human
gcucccaggcauggagguaauu

SEQ ID NO: 1053477 - RNA, 18 nt, Human
cugagggcaacagaggcu

SEQ ID NO: 1053478 - RNA, 22 nt, Human
uagggaggcuacuucuuguagg

SEQ ID NO: 1053479 - RNA, 22 nt, Human
ugcugcugaucauuuauagucu

SEQ ID NO: 1053480 - RNA, 22 nt, Human
gcugaggauuacuugaagucag

SEQ ID NO: 1053481 - RNA, 22 nt, Human
uccugagagcagcugcuuugga

SEQ ID NO: 1053482 - RNA, 22 nt, Human
ucuuucuugguauaaagcaggg

SEQ ID NO: 1053483 - RNA, 22 nt, Human
auuagagaaauguugccaagau

SEQ ID NO: 1053484 - RNA, 22 nt, Human
acagaagugacaauuucuuggg

SEQ ID NO: 1053485 - RNA, 22 nt, Human
aaaggccacugcaagggaaggu

SEQ ID NO: 1053486 - RNA, 22 nt, Human
ucuucauuccguagauauuuau

SEQ ID NO: 1053487 - RNA, 22 nt, Human
aacaugcugccuuucuacgagu

SEQ ID NO: 1053488 - RNA, 22 nt, Human
ggagcacuauaauagagauuuu

SEQ ID NO: 1053489 - RNA, 22 nt, Human
uccaugagcuagggauucauca

SEQ ID NO: 1053490 - RNA, 22 nt, Human
cuuugcaauagaggcacacaug

SEQ ID NO: 1053491 - RNA, 22 nt, Human
ccauggcaauggucagucuauu

SEQ ID NO: 1053492 - RNA, 22 nt, Human
uggcugaggcuggagugcagug

SEQ ID NO: 1053493 - RNA, 20 nt, Human
ggcugcugugggcagagagg

SEQ ID NO: 1053494 - RNA, 22 nt, Human
gcagcugcuggagggaggcagg

SEQ ID NO: 1053495 - RNA, 22 nt, Human
cacugguagcaguuaaguuagg

SEQ ID NO: 1053496 - RNA, 22 nt, Human
ugcuuccuauccacacaaugcc

SEQ ID NO: 1053497 - RNA, 22 nt, Human
uuaggauagucuguuagaaaag

SEQ ID NO: 1053498 - RNA, 22 nt, Human
aggccaaaccggauggaaaagg

SEQ ID NO: 1053499 - RNA, 22 nt, Human
gaggggaagacuucuggacagu

SEQ ID NO: 1053500 - RNA, 22 nt, Human
cagugcugugcuggaagcuguu

SEQ ID NO: 1053501 - RNA, 22 nt, Human
gcugaagggagugcugagucug

SEQ ID NO: 1053502 - RNA, 22 nt, Human
uuauuagguuuacauaaagguu

SEQ ID NO: 1053503 - RNA, 22 nt, Human
gcuggccacauugugccguccu

SEQ ID NO: 1053504 - RNA, 22 nt, Human
gagggagucugugcaaagaauu

SEQ ID NO: 1053505 - RNA, 23 nt, Human
ccuggcuguggauuugggccugc

SEQ ID NO: 1053506 - RNA, 22 nt, Human
gaggcagcugggcuggugguuu

SEQ ID NO: 1053507 - RNA, 22 nt, Human
ugcucaguagcagugugcugcu

SEQ ID NO: 1053508 - RNA, 22 nt, Human
gagagcuguccggcugagcagc

SEQ ID NO: 1053509 - RNA, 22 nt, Human
ugaggcaggaguucaggcugcg

SEQ ID NO: 1053510 - RNA, 22 nt, Human
auaaaaguaggaccaacuuaca

SEQ ID NO: 1053511 - RNA, 22 nt, Human
uuugaauagcauaggauuacau

SEQ ID NO: 1053512 - RNA, 22 nt, Human
aguuauuacucuuuaacauauu

SEQ ID NO: 1053513 - RNA, 22 nt, Human
ucagagaggcaauacuguuuaa

SEQ ID NO: 1053514 - RNA, 22 nt, Human
gcuggagaaacugcagcugagg

SEQ ID NO: 1053515 - RNA, 22 nt, Human
guccucuguuagaaaugugcuu

SEQ ID NO: 1053516 - RNA, 22 nt, Human
caggguggcacucagcgcaucu

SEQ ID NO: 1053517 - RNA, 22 nt, Human
uacuuuuagccuauuugauucu

SEQ ID NO: 1053518 - RNA, 21 nt, Human
uccugccuuaguccagagcag

SEQ ID NO: 1053519 - RNA, 22 nt, Human
augagguccagggaaguuaaau

SEQ ID NO: 1053520 - RNA, 22 nt, Human
aggagcagaacugauucugacu

SEQ ID NO: 1053521 - RNA, 22 nt, Human
uugaauuauaagugugucuacu

SEQ ID NO: 1053522 - RNA, 22 nt, Human
ggcuuuagggcaggcaguguua

SEQ ID NO: 1053523 - RNA, 22 nt, Human
uccaugagacagauacuguaag

SEQ ID NO: 1053524 - RNA, 22 nt, Human
uaguccaggacaaucuucauau

SEQ ID NO: 1053525 - RNA, 22 nt, Human
acaggcuggaggaggaccaaga

SEQ ID NO: 1053526 - RNA, 21 nt, Human
acuggccaccacuggcagggg

SEQ ID NO: 1053527 - RNA, 22 nt, Human
uugaggucaaagaagugagugg

SEQ ID NO: 1053528 - RNA, 22 nt, Human
uaacuguaccuagauaacgaac

SEQ ID NO: 1053529 - RNA, 22 nt, Human
aaguggacuaauacaaggacua

SEQ ID NO: 1053530 - RNA, 22 nt, Human
ugaggcaggaauggggaaaagu

SEQ ID NO: 1053531 - RNA, 22 nt, Human
uuuaaauaggacuccugggggu

SEQ ID NO: 1053532 - RNA, 18 nt, Human
ggcagcuugacuagcaac

SEQ ID NO: 1053533 - RNA, 22 nt, Human
aagaguuauaccuauuucuaac

SEQ ID NO: 1053534 - RNA, 19 nt, Human
auggaaaauuguacucaau

SEQ ID NO: 1053535 - RNA, 22 nt, Human
ugccaggagucaggccaggcag

SEQ ID NO: 1053536 - RNA, 19 nt, Human
ucccaggaaccuuuuauuu

SEQ ID NO: 1053537 - RNA, 19 nt, Human
cucugccucuggcuguggc

SEQ ID NO: 1053538 - RNA, 22 nt, Human
agcuccaggauaagacaggugc

SEQ ID NO: 1053539 - RNA, 22 nt, Human
uagcucuucaaucacugucucc

SEQ ID NO: 1053540 - RNA, 22 nt, Human
caugcugauucuuccugagcuu

SEQ ID NO: 1053541 - RNA, 22 nt, Human
uucuguuacaagugaaaaaaug

SEQ ID NO: 1053542 - RNA, 22 nt, Human
uccauguguuuuccuguccaca

SEQ ID NO: 1053543 - RNA, 22 nt, Human
ugacuuuagaauuuuauccaga

SEQ ID NO: 1053544 - RNA, 22 nt, Human
agagcugaggauccagcugagc

SEQ ID NO: 1053545 - RNA, 22 nt, Human
accaggaggcuacacuguccca

SEQ ID NO: 1053546 - RNA, 22 nt, Human
aauacuggcugucaaagaugga

SEQ ID NO: 1053547 - RNA, 22 nt, Human
cuuaaauuuucaucuacaagaa

SEQ ID NO: 1053548 - RNA, 22 nt, Human
gcuccuggucuggagcuucaag

SEQ ID NO: 1053549 - RNA, 22 nt, Human
caaauacuggguaaguuaauuu

SEQ ID NO: 1053550 - RNA, 22 nt, Human
gcagagaagaugcccaggcuuc

SEQ ID NO: 1053551 - RNA, 22 nt, Human
cccugcuuugcacccaggcugg

SEQ ID NO: 1053552 - RNA, 22 nt, Human
gccaugaggaacuguaagacaa

SEQ ID NO: 1053553 - RNA, 22 nt, Human
ugagguccugcauguugagguc

SEQ ID NO: 1053554 - RNA, 22 nt, Human
gagugcagaugaacagaagauu

SEQ ID NO: 1053555 - RNA, 22 nt, Human
cuugagguuuugacucagcuuu

SEQ ID NO: 1053556 - RNA, 22 nt, Human
gcucaggaucccaggggugugc

SEQ ID NO: 1053557 - RNA, 22 nt, Human
uaccuuuugcuuauuaugacac

SEQ ID NO: 1053558 - RNA, 22 nt, Human
caguuucuacgaaggucaaccc

SEQ ID NO: 1053559 - RNA, 22 nt, Human
uuggccaagauacgagcacaua

SEQ ID NO: 1053560 - RNA, 22 nt, Human
aacuuucuguuacguccccaga

SEQ ID NO: 1053561 - RNA, 22 nt, Human
gaggucaggcuugcagcagggu

SEQ ID NO: 1053562 - RNA, 22 nt, Human
cagaaguugauccugcguuucc

SEQ ID NO: 1053563 - RNA, 22 nt, Human
gcaggcugggguagccccacuu

SEQ ID NO: 1053564 - RNA, 19 nt, Human
uccucagugacaaccucag

SEQ ID NO: 1053565 - RNA, 22 nt, Human
uggcaaacuggaggaagcccug

SEQ ID NO: 1053566 - RNA, 22 nt, Human
cuagccugggauuugaacuuau

SEQ ID NO: 1053567 - RNA, 22 nt, Human
ggccugagcuugggcagcguau

SEQ ID NO: 1053568 - RNA, 22 nt, Human
guggcagagcaggagacaggac

SEQ ID NO: 1053569 - RNA, 22 nt, Human
uaaauuauggcuggcagagcag

SEQ ID NO: 1053570 - RNA, 22 nt, Human
guuaaauucgaugauggauaaa

SEQ ID NO: 1053571 - RNA, 22 nt, Human
agaggcggagcuugcagugagc

SEQ ID NO: 1053572 - RNA, 22 nt, Human
ugcccuggcauuggguuggaua

SEQ ID NO: 1053573 - RNA, 22 nt, Human
agcugaggcaugaugcuaucag

SEQ ID NO: 1053574 - RNA, 22 nt, Human
ugacccugagagcugaauggcu

SEQ ID NO: 1053575 - RNA, 22 nt, Human
uucucagaauugacugggagca

SEQ ID NO: 1053576 - RNA, 22 nt, Human
uuugcaguagacaucuuauuuu

SEQ ID NO: 1053577 - RNA, 22 nt, Human
gcuggcugugauuuugccaaca

SEQ ID NO: 1053578 - RNA, 22 nt, Human
ccaggaguggcuggugaccuuc

SEQ ID NO: 1053579 - RNA, 22 nt, Human
aacugguagaaagcaguaagug

SEQ ID NO: 1053580 - RNA, 22 nt, Human
cugaggcugagacaggugaaau

SEQ ID NO: 1053581 - RNA, 22 nt, Human
gaacuggugagaguucacggga

SEQ ID NO: 1053582 - RNA, 22 nt, Human
auggagggugucagagagcgaa

SEQ ID NO: 1053583 - RNA, 16 nt, Human
gcuccugggcccucga

SEQ ID NO: 1053584 - RNA, 22 nt, Human
gcuccuggauguucaagucggc

SEQ ID NO: 1053585 - RNA, 22 nt, Human
aacuauacauauuuacauagac

SEQ ID NO: 1053586 - RNA, 22 nt, Human
agcugaggguucgguguccaca

SEQ ID NO: 1053587 - RNA, 22 nt, Human
gcuggccauggccugcgccauc

SEQ ID NO: 1053588 - RNA, 22 nt, Human
agccugagccccauccagcuga

SEQ ID NO: 1053589 - RNA, 22 nt, Human
uagaaauaaaucugcagcuggg

SEQ ID NO: 1053590 - RNA, 22 nt, Human
aaaugaugcucacagauuagug

SEQ ID NO: 1053591 - RNA, 22 nt, Human
ugcugaggcccaggagcacuuu

SEQ ID NO: 1053592 - RNA, 22 nt, Human
auaaacagccugcccaaauugg

SEQ ID NO: 1053593 - RNA, 22 nt, Human
gcugccuccugagauuugggca

SEQ ID NO: 1053594 - RNA, 22 nt, Human
uuucaguuuaugucuugaauua

SEQ ID NO: 1053595 - RNA, 17 nt, Human
aggcuggcucacaggga

SEQ ID NO: 1053596 - RNA, 22 nt, Human
caaggccacguucugcaugcgg

SEQ ID NO: 1053597 - RNA, 22 nt, Human
cagaacugaccucugauucuag

SEQ ID NO: 1053598 - RNA, 22 nt, Human
uucuucuccuaaggagaguccu

SEQ ID NO: 1053599 - RNA, 22 nt, Human
cagucuucuaaccuagcagccu

SEQ ID NO: 1053600 - RNA, 22 nt, Human
aaggcugagggcuguaccuggc

SEQ ID NO: 1053601 - RNA, 22 nt, Human
auucuuauuauaguaaaacagu

SEQ ID NO: 1053602 - RNA, 22 nt, Human
cagcuggcugcaugaugccaaa

SEQ ID NO: 1053603 - RNA, 22 nt, Human
gaggcagcucuucugaaugggg

SEQ ID NO: 1053604 - RNA, 22 nt, Human
cagugcugggcagaggagagcg

SEQ ID NO: 1053605 - RNA, 22 nt, Human
uugaggucauauauauuuggca

SEQ ID NO: 1053606 - RNA, 22 nt, Human
aauaauuagugggacagagaac

SEQ ID NO: 1053607 - RNA, 22 nt, Human
cuaggcagauggagaaguggcu

SEQ ID NO: 1053608 - RNA, 22 nt, Human
ucuucucuccugcuuggcagaa

SEQ ID NO: 1053609 - RNA, 22 nt, Human
gagcugaguaucccacugaagu

SEQ ID NO: 1053610 - RNA, 22 nt, Human
cagcuggcgggcagagccgcca

SEQ ID NO: 1053611 - RNA, 22 nt, Human
caacugguggucaaccuucugu

SEQ ID NO: 1053612 - RNA, 22 nt, Human
gccuccccaaagugcugacagc

SEQ ID NO: 1053613 - RNA, 22 nt, Human
aggagcugcagauucugccuug

SEQ ID NO: 1053614 - RNA, 22 nt, Human
ucugggaacugagcuccccuag

SEQ ID NO: 1053615 - RNA, 22 nt, Human
aaagccauuacaaaauuucaua

SEQ ID NO: 1053616 - RNA, 22 nt, Human
ucuccuggcauuugguugagua

SEQ ID NO: 1053617 - RNA, 23 nt, Human
gcagacagagcagacuaagacaa

SEQ ID NO: 1053618 - RNA, 22 nt, Human
uacuggguauacaaagaugaau

SEQ ID NO: 1053619 - RNA, 20 nt, Human
gcccaagguccagaaggggg

SEQ ID NO: 1053620 - RNA, 22 nt, Human
agaggcugcacuugcucaugau

SEQ ID NO: 1053621 - RNA, 20 nt, Human
gagauggacagaugaagggg

SEQ ID NO: 1053622 - RNA, 22 nt, Human
accagcuggucaccugggcacu

SEQ ID NO: 1053623 - RNA, 22 nt, Human
uugaaagaagaagcugcgaugu

SEQ ID NO: 1053624 - RNA, 22 nt, Human
uuagauaaaaguguucaauaaa

SEQ ID NO: 1053625 - RNA, 22 nt, Human
gaggcagcauucgcauagacag

SEQ ID NO: 1053626 - RNA, 22 nt, Human
gagagucuaggaaccucauaua

SEQ ID NO: 1053627 - RNA, 22 nt, Human
cuucagaggggacucaaaguca

SEQ ID NO: 1053628 - RNA, 18 nt, Human
ugcuggguaacuguaugg

SEQ ID NO: 1053629 - RNA, 22 nt, Human
uucugaaagccaauucauugaa

SEQ ID NO: 1053630 - RNA, 22 nt, Human
uugguuuacuaggauucaaauu

SEQ ID NO: 1053631 - RNA, 22 nt, Human
gucaggaugggcagccaaacua

SEQ ID NO: 1053632 - RNA, 22 nt, Human
guugaaaguggagaaccugguu

SEQ ID NO: 1053633 - RNA, 22 nt, Human
agacagcuaauaaaugagugug

SEQ ID NO: 1053634 - RNA, 22 nt, Human
cuggagcauccaugcccagggu

SEQ ID NO: 1053635 - RNA, 22 nt, Human
ucuagaaauuuugccuuguauu

SEQ ID NO: 1053636 - RNA, 20 nt, Human
uugauucaagggcugaugga

SEQ ID NO: 1053637 - RNA, 22 nt, Human
gcuuccuaaaugcacagggcag

SEQ ID NO: 1053638 - RNA, 22 nt, Human
ucugggaagcugcgugccuguu

SEQ ID NO: 1053639 - RNA, 18 nt, Human
gcuccuggagucugacuc

SEQ ID NO: 1053640 - RNA, 22 nt, Human
uuuuaucugugacaucuggcag

SEQ ID NO: 1053641 - RNA, 22 nt, Human
uggcuucucgccugucaucccg

SEQ ID NO: 1053642 - RNA, 22 nt, Human
auucuucaaagagugucaaagu

SEQ ID NO: 1053643 - RNA, 22 nt, Human
gucuccugagacugcagucacc

SEQ ID NO: 1053644 - RNA, 22 nt, Human
ugauuuccccagucuugcugcu

SEQ ID NO: 1053645 - RNA, 22 nt, Human
cacugguacguagguuggggca

SEQ ID NO: 1053646 - RNA, 22 nt, Human
uauuuauucauucagcaagcau

SEQ ID NO: 1053647 - RNA, 22 nt, Human
guggccaacucaauguuuuuca

SEQ ID NO: 1053648 - RNA, 22 nt, Human
uuccuggcaugaaaaauaucac

SEQ ID NO: 1053649 - RNA, 22 nt, Human
gauuucuugauaauucaaaucc

SEQ ID NO: 1053650 - RNA, 22 nt, Human
agcccaggaaguugaggcuugc

SEQ ID NO: 1053651 - RNA, 22 nt, Human
uaucuguuguccaugcagaaag

SEQ ID NO: 1053652 - RNA, 22 nt, Human
uccaggaguccuggguggcccc

SEQ ID NO: 1053653 - RNA, 23 nt, Human
agcugaggcagaggggcauucuc

SEQ ID NO: 1053654 - RNA, 22 nt, Human
gagggcugauguugccaccuca

SEQ ID NO: 1053655 - RNA, 22 nt, Human
agucuucucauuucacaugcuu

SEQ ID NO: 1053656 - RNA, 22 nt, Human
ucuuggcuaguaccuuccugcc

SEQ ID NO: 1053657 - RNA, 22 nt, Human
ggguggaguagaaagaugaauu

SEQ ID NO: 1053658 - RNA, 21 nt, Human
uuucacaaaaguaugugacaa

SEQ ID NO: 1053659 - RNA, 22 nt, Human
gcccccagaagggccacagauu

SEQ ID NO: 1053660 - RNA, 22 nt, Human
uagugucauuucaguggaguuu

SEQ ID NO: 1053661 - RNA, 23 nt, Human
aagaacugcgaauggagaaagua

SEQ ID NO: 1053662 - RNA, 22 nt, Human
guuaggauuauauaucccauga

SEQ ID NO: 1053663 - RNA, 22 nt, Human
ucaggcuguaaauggugugggu

SEQ ID NO: 1053664 - RNA, 22 nt, Human
cucccuggugacucccaaagcu

SEQ ID NO: 1053665 - RNA, 22 nt, Human
ccuggccagccagggcuggggu

SEQ ID NO: 1053666 - RNA, 22 nt, Human
ccagagcugagggagccugagc

SEQ ID NO: 1053667 - RNA, 22 nt, Human
ggaccuggcaauuugcaucucu

SEQ ID NO: 1053668 - RNA, 22 nt, Human
uugaaguuguaguucagugaag

SEQ ID NO: 1053669 - RNA, 22 nt, Human
gccaggaguguguggcuauguu

SEQ ID NO: 1053670 - RNA, 17 nt, Human
ucugaagccagucugcu

SEQ ID NO: 1053671 - RNA, 22 nt, Human
acagagcuuaggaugacuccca

SEQ ID NO: 1053672 - RNA, 20 nt, Human
agaaaaaguguggaaauuuc

SEQ ID NO: 1053673 - RNA, 20 nt, Human
cauuuguuagcuuucuacug

SEQ ID NO: 1053674 - RNA, 21 nt, Human
agggagcuggccacacagccu

SEQ ID NO: 1053675 - RNA, 22 nt, Human
uccaggagguaugaguggcccc

SEQ ID NO: 1053676 - RNA, 22 nt, Human
uggucuuuaagguagcugucau

SEQ ID NO: 1053677 - RNA, 22 nt, Human
acagagcuaauguugcauaggc

SEQ ID NO: 1053678 - RNA, 21 nt, Human
ucaggcugucugcugguucca

SEQ ID NO: 1053679 - RNA, 22 nt, Human
cuguauuuguccucuauuuauu

SEQ ID NO: 1053680 - RNA, 22 nt, Human
ccuguuuagugaggugaggagu

SEQ ID NO: 1053681 - RNA, 22 nt, Human
auuuauuaagcaucugcuaugu

SEQ ID NO: 1053682 - RNA, 20 nt, Human
ucuggcaggugaacgagcug

SEQ ID NO: 1053683 - RNA, 22 nt, Human
cagggucuuauaaggccaauuu

SEQ ID NO: 1053684 - RNA, 22 nt, Human
uaggcugagcuuguagaucgua

SEQ ID NO: 1053685 - RNA, 22 nt, Human
cccaggaguuagagguuguggu

SEQ ID NO: 1053686 - RNA, 22 nt, Human
aaggcugaggcagugaggcaga

SEQ ID NO: 1053687 - RNA, 22 nt, Human
ugauggucaggaugcauggaga

SEQ ID NO: 1053688 - RNA, 22 nt, Human
gacagagaggcugagcaguaca

SEQ ID NO: 1053689 - RNA, 22 nt, Human
guggcagaaauauucuugcucu

SEQ ID NO: 1053690 - RNA, 22 nt, Human
gagagucuagugcaccuaguuu

SEQ ID NO: 1053691 - RNA, 22 nt, Human
cugcuucugggaugauggagua

SEQ ID NO: 1053692 - RNA, 23 nt, Human
cugcugugaaacaugguuuuggu

SEQ ID NO: 1053693 - RNA, 22 nt, Human
ugaggcagcuuuuucugugugu

SEQ ID NO: 1053694 - RNA, 22 nt, Human
cauuuguacagaacagcuuuau

SEQ ID NO: 1053695 - RNA, 22 nt, Human
ucugcaggaggcuggcugcagg

SEQ ID NO: 1053696 - RNA, 22 nt, Human
aggcugaggcaagaggaucacu

SEQ ID NO: 1053697 - RNA, 22 nt, Human
uggaaggagacugggaagugug

SEQ ID NO: 1053698 - RNA, 22 nt, Human
ggcuaggcaggcucagagccua

SEQ ID NO: 1053699 - RNA, 22 nt, Human
uuaggaaacgcugcuauugacu

SEQ ID NO: 1053700 - RNA, 22 nt, Human
cuucugagcagaccuccugggg

SEQ ID NO: 1053701 - RNA, 22 nt, Human
ugcuggguagaaguauuagucu

SEQ ID NO: 1053702 - RNA, 22 nt, Human
gcugagguuucaggaguggcag

SEQ ID NO: 1053703 - RNA, 22 nt, Human
acuggccaggcgaaccacacug

SEQ ID NO: 1053704 - RNA, 22 nt, Human
cagucucucugaaguauuaaga

SEQ ID NO: 1053705 - RNA, 22 nt, Human
ccuggacucaggcugugggcac

SEQ ID NO: 1053706 - RNA, 21 nt, Human
aaucauacaaaacaugucagg

SEQ ID NO: 1053707 - RNA, 22 nt, Human
guuauaaaaugcacaguuguuu

SEQ ID NO: 1053708 - RNA, 22 nt, Human
caaggccaguucaccaagggca

SEQ ID NO: 1053709 - RNA, 22 nt, Human
gcugauguuuaguugauguuac

SEQ ID NO: 1053710 - RNA, 17 nt, Human
gcugacccuggagaagu

SEQ ID NO: 1053711 - RNA, 22 nt, Human
aguuacagugaccauuuauuua

SEQ ID NO: 1053712 - RNA, 22 nt, Human
cccaggaguaagugacauuguu

SEQ ID NO: 1053713 - RNA, 22 nt, Human
uuccaagagcuuuaauuguuga

SEQ ID NO: 1053714 - RNA, 22 nt, Human
ggugagggaguggaacgaggug

SEQ ID NO: 1053715 - RNA, 21 nt, Human
ccuggccaaucugauaggguu

SEQ ID NO: 1053716 - RNA, 22 nt, Human
cuucucagaucucagcuuugag

SEQ ID NO: 1053717 - RNA, 22 nt, Human
cugaggccccucucuugagcuu

SEQ ID NO: 1053718 - RNA, 22 nt, Human
gcaggcugaguugggaaaccaa

SEQ ID NO: 1053719 - RNA, 22 nt, Human
gcagggaagacccggagcagcg

SEQ ID NO: 1053720 - RNA, 22 nt, Human
cugccucagcguuguggcccua

SEQ ID NO: 1053721 - RNA, 22 nt, Human
agcugcccuuuaugaugcugaa

SEQ ID NO: 1053722 - RNA, 22 nt, Human
uuacagaacugucuugaaauuu

SEQ ID NO: 1053723 - RNA, 22 nt, Human
agucuugcucuugcaucugcuu

SEQ ID NO: 1053724 - RNA, 22 nt, Human
ggccagagaauaugccuuacgu

SEQ ID NO: 1053725 - RNA, 22 nt, Human
acuuccugaauggggcuaauua

SEQ ID NO: 1053726 - RNA, 21 nt, Human
uggccaaaaccauauuauuaa

SEQ ID NO: 1053727 - RNA, 22 nt, Human
ccuggccacucagguguggggc

SEQ ID NO: 1053728 - RNA, 22 nt, Human
cccugccuugggguccacaccg

SEQ ID NO: 1053729 - RNA, 22 nt, Human
cagucucuugcuucauuaguug

SEQ ID NO: 1053730 - RNA, 20 nt, Human
ccaggcuggcaaaugggggc

SEQ ID NO: 1053731 - RNA, 22 nt, Human
uccccagggcugcagagggugu

SEQ ID NO: 1053732 - RNA, 22 nt, Human
cagagacauuaagugccaugau

SEQ ID NO: 1053733 - RNA, 22 nt, Human
gaucauuuugaugcccuuuuag

SEQ ID NO: 1053734 - RNA, 22 nt, Human
ucucagucagccuugauguccc

SEQ ID NO: 1053735 - RNA, 22 nt, Human
agagcagauggagcuggaagag

SEQ ID NO: 1053736 - RNA, 22 nt, Human
ugcuggcuuugcgagaugcauu

SEQ ID NO: 1053737 - RNA, 20 nt, Human
aagagaggaaguuauacuag

SEQ ID NO: 1053738 - RNA, 22 nt, Human
guauaagguauguaaacuauuu

SEQ ID NO: 1053739 - RNA, 22 nt, Human
ucccaggaugaagacaguguug

SEQ ID NO: 1053740 - RNA, 22 nt, Human
ugcugcuggguuugacagucac

SEQ ID NO: 1053741 - RNA, 22 nt, Human
aggcagacucaauggcuagaua

SEQ ID NO: 1053742 - RNA, 22 nt, Human
cugacccauauaagaguggagg

SEQ ID NO: 1053743 - RNA, 22 nt, Human
cacaggcuuuucugacauaggc

SEQ ID NO: 1053744 - RNA, 22 nt, Human
cauaaagucucauaauucacuu

SEQ ID NO: 1053745 - RNA, 22 nt, Human
cuugaaagcuuugcgucuucua

SEQ ID NO: 1053746 - RNA, 22 nt, Human
uuugaaagcaggugugggaggg

SEQ ID NO: 1053747 - RNA, 22 nt, Human
ugaggcagcccacuuuccuuag

SEQ ID NO: 1053748 - RNA, 22 nt, Human
cugccaggcgauggauuggcug

SEQ ID NO: 1053749 - RNA, 22 nt, Human
uggcugcagaucaagggcaggc

SEQ ID NO: 1053750 - RNA, 22 nt, Human
ugaaaugaucaguuugguuacu

SEQ ID NO: 1053751 - RNA, 22 nt, Human
aggcagcugaccacaguaugau

SEQ ID NO: 1053752 - RNA, 22 nt, Human
gcagagcuucuguccuucagga

SEQ ID NO: 1053753 - RNA, 22 nt, Human
ggaggaugccaagcugugcaca

SEQ ID NO: 1053754 - RNA, 22 nt, Human
ccuugcugcgugcuagcacaga

SEQ ID NO: 1053755 - RNA, 23 nt, Human
aucuaauuucuccaaaucucuac

SEQ ID NO: 1053756 - RNA, 22 nt, Human
gagcuccagggaacagcagcua

SEQ ID NO: 1053757 - RNA, 22 nt, Human
aggcaacuuuuggggaugaugg

SEQ ID NO: 1053758 - RNA, 22 nt, Human
agcaccaugaccuugccauuga

SEQ ID NO: 1053759 - RNA, 22 nt, Human
aaaacuaaauacgcuuugccuc

SEQ ID NO: 1053760 - RNA, 22 nt, Human
acaaugaagauaauguugcagu

SEQ ID NO: 1053761 - RNA, 22 nt, Human
aaggcagcacagcaacugcuca

SEQ ID NO: 1053762 - RNA, 22 nt, Human
caggauggugugagugugagga

SEQ ID NO: 1053763 - RNA, 20 nt, Human
aggcugaguucuaugcacuu

SEQ ID NO: 1053764 - RNA, 17 nt, Human
gcccaggaaggacggcc

SEQ ID NO: 1053765 - RNA, 20 nt, Human
cuguggaauuuuaccaugcg

SEQ ID NO: 1053766 - RNA, 21 nt, Human
gggucugaauaucuggugcug

SEQ ID NO: 1053767 - RNA, 22 nt, Human
ccugccucccagagguccucua

SEQ ID NO: 1053768 - RNA, 22 nt, Human
gcagcugcagagaccggguggg

SEQ ID NO: 1053769 - RNA, 22 nt, Human
ccacagugguuguggcaugugg

SEQ ID NO: 1053770 - RNA, 22 nt, Human
cuggcucaauuuguacugcugu

SEQ ID NO: 1053771 - RNA, 22 nt, Human
aaaaugaagcaaaggcauucag

SEQ ID NO: 1053772 - RNA, 22 nt, Human
gagguagcgaguggacagugca

SEQ ID NO: 1053773 - RNA, 20 nt, Human
ggggcugcaugcagagaaga

SEQ ID NO: 1053774 - RNA, 22 nt, Human
cagggaggaugggcuguuuugc

SEQ ID NO: 1053775 - RNA, 22 nt, Human
uuucacaaagcauagcacuuua

SEQ ID NO: 1053776 - RNA, 22 nt, Human
ugaggcccucugggcugguccu

SEQ ID NO: 1053777 - RNA, 22 nt, Human
gucaggauuaaugggaguaugc

SEQ ID NO: 1053778 - RNA, 20 nt, Human
gcugaggucauuaugccuca

SEQ ID NO: 1053779 - RNA, 22 nt, Human
agcuggcagcucucagggguac

SEQ ID NO: 1053780 - RNA, 21 nt, Human
ggcagccucuguggaagggga

SEQ ID NO: 1053781 - RNA, 22 nt, Human
uuauucuuuucuccagaauccc

SEQ ID NO: 1053782 - RNA, 22 nt, Human
aucaggauuauuaaaucuggau

SEQ ID NO: 1053783 - RNA, 22 nt, Human
cccaugagauucugaauuuggc

SEQ ID NO: 1053784 - RNA, 22 nt, Human
ucugugcuggacugauuucaua

SEQ ID NO: 1053785 - RNA, 22 nt, Human
uggccacaguguccagcagcag

SEQ ID NO: 1053786 - RNA, 22 nt, Human
uggagagguugaauaacuuguc

SEQ ID NO: 1053787 - RNA, 22 nt, Human
uauuauuauaguuauugggaag

SEQ ID NO: 1053788 - RNA, 22 nt, Human
aggcaccuugagagcaggagcu

SEQ ID NO: 1053789 - RNA, 20 nt, Human
cugggccauccuuuuacaau

SEQ ID NO: 1053790 - RNA, 22 nt, Human
ugcugaggacuaaaggagauga

SEQ ID NO: 1053791 - RNA, 20 nt, Human
acacacuuugaucuugagcc

SEQ ID NO: 1053792 - RNA, 22 nt, Human
uuuuaauugcaauuaugguccc

SEQ ID NO: 1053793 - RNA, 20 nt, Human
aucaggauucuugcuuuguu

SEQ ID NO: 1053794 - RNA, 23 nt, Human
uuuuccagaaucgacucuguaga

SEQ ID NO: 1053795 - RNA, 22 nt, Human
cugaggcugggcugaggguaua

SEQ ID NO: 1053796 - RNA, 22 nt, Human
aacuuacaaggaugauagcugc

SEQ ID NO: 1053797 - RNA, 22 nt, Human
cuugaaguugcaaaacauuaau

SEQ ID NO: 1053798 - RNA, 22 nt, Human
ucuuaaagagcgcaauuugagg

SEQ ID NO: 1053799 - RNA, 22 nt, Human
aaaggugacugcagcagcuauu

SEQ ID NO: 1053800 - RNA, 22 nt, Human
cugccuggcccagggaugggcc

SEQ ID NO: 1053801 - RNA, 22 nt, Human
aauauaauuuuauuccuagagu

SEQ ID NO: 1053802 - RNA, 22 nt, Human
cuaggcuggagugcauuggcgu

SEQ ID NO: 1053803 - RNA, 22 nt, Human
uuucuagucucgaucucuuaau

SEQ ID NO: 1053804 - RNA, 22 nt, Human
ugccucagcugaggccgcucca

SEQ ID NO: 1053805 - RNA, 22 nt, Human
cagggcugagaauuuagagaca

SEQ ID NO: 1053806 - RNA, 22 nt, Human
uauuagguuggugcaaaauuaa

SEQ ID NO: 1053807 - RNA, 22 nt, Human
ggcugagggucccagacccuaa

SEQ ID NO: 1053808 - RNA, 22 nt, Human
gagccaaggguugccauggaga

SEQ ID NO: 1053809 - RNA, 22 nt, Human
aggcugaggcagguggaucauu

SEQ ID NO: 1053810 - RNA, 22 nt, Human
uacacuuuucaauguagucugu

SEQ ID NO: 1053811 - RNA, 22 nt, Human
ucugagguggggcuggagcauu

SEQ ID NO: 1053812 - RNA, 22 nt, Human
uuaggaaacaguagccuuugcu

SEQ ID NO: 1053813 - RNA, 22 nt, Human
agagggcagucucagauuggga

SEQ ID NO: 1053814 - RNA, 22 nt, Human
auugucuuuccacugagaaguu

SEQ ID NO: 1053815 - RNA, 22 nt, Human
aauaguuaagcaacuuuuucca

SEQ ID NO: 1053816 - RNA, 22 nt, Human
aaagcagacugauuugcaucac

SEQ ID NO: 1053817 - RNA, 19 nt, Human
ggucagcugggcuagaggc

SEQ ID NO: 1053818 - RNA, 22 nt, Human
aguguguccagaaaucuguauu

SEQ ID NO: 1053819 - RNA, 22 nt, Human
cgaggcagaggcugaaacggcu

SEQ ID NO: 1053820 - RNA, 23 nt, Human
ucuccuccuagauacagucaugg

SEQ ID NO: 1053821 - RNA, 22 nt, Human
cuuaggauuuaauuucagacuc

SEQ ID NO: 1053822 - RNA, 22 nt, Human
cuggcacaugcucccugagugg

SEQ ID NO: 1053823 - RNA, 22 nt, Human
uuucaguuuccagcuuugucau

SEQ ID NO: 1053824 - RNA, 22 nt, Human
uuagauaaauuaagacuuuaca

SEQ ID NO: 1053825 - RNA, 22 nt, Human
ucaagugcuugugagguauuug

SEQ ID NO: 1053826 - RNA, 22 nt, Human
caggauggucucgaucuccuga

SEQ ID NO: 1053827 - RNA, 17 nt, Human
gacugagguaaggugag

SEQ ID NO: 1053828 - RNA, 22 nt, Human
agcacugugguggaagcaucaa

SEQ ID NO: 1053829 - RNA, 20 nt, Human
uuaggcauuuggauuggcuu

SEQ ID NO: 1053830 - RNA, 22 nt, Human
cccaggaguuugaguucagcau

SEQ ID NO: 1053831 - RNA, 22 nt, Human
ggcugagcuuauauaugugcug

SEQ ID NO: 1053832 - RNA, 22 nt, Human
ucagcuggaagauggugcagaa

SEQ ID NO: 1053833 - RNA, 22 nt, Human
ugugugucagagucuccauggu

SEQ ID NO: 1053834 - RNA, 21 nt, Human
uccuuccuugagguccuuucc

SEQ ID NO: 1053835 - RNA, 22 nt, Human
aaacugcuuuccacaguggcua

SEQ ID NO: 1053836 - RNA, 22 nt, Human
cuaaucaucuuucucuuaaagc

SEQ ID NO: 1053837 - RNA, 22 nt, Human
uacuuccuguuuccaugucugu

SEQ ID NO: 1053838 - RNA, 22 nt, Human
auauauuugagaauauucauga

SEQ ID NO: 1053839 - RNA, 22 nt, Human
agaggaugguugaggaagaccu

SEQ ID NO: 1053840 - RNA, 22 nt, Human
gucauauacacugcauguaauc

SEQ ID NO: 1053841 - RNA, 18 nt, Human
gaggcagcuagcaauuuu

SEQ ID NO: 1053842 - RNA, 19 nt, Human
uuagccauccacagugaaa

SEQ ID NO: 1053843 - RNA, 22 nt, Human
gggcugagccauuugaaccuug

SEQ ID NO: 1053844 - RNA, 22 nt, Human
agaccaagaaaggaugaggauc

SEQ ID NO: 1053845 - RNA, 22 nt, Human
aacaguaaagacagaauuuauc

SEQ ID NO: 1053846 - RNA, 22 nt, Human
uagggcugcuuuguauucugcu

SEQ ID NO: 1053847 - RNA, 22 nt, Human
ucuccugguauguaugcaccug

SEQ ID NO: 1053848 - RNA, 22 nt, Human
aaaaaagauugaugguggaugc

SEQ ID NO: 1053849 - RNA, 22 nt, Human
gugcagcugcaggagucagguc

SEQ ID NO: 1053850 - RNA, 22 nt, Human
gucuucaacaauaacuaccacu

SEQ ID NO: 1053851 - RNA, 22 nt, Human
guggccaagaaaauagaugcau

SEQ ID NO: 1053852 - RNA, 22 nt, Human
uggcugaggucuggggcuucug

SEQ ID NO: 1053853 - RNA, 22 nt, Human
acagaacuggaauuggaacuca

SEQ ID NO: 1053854 - RNA, 22 nt, Human
aggcuggagacccgccaagaaa

SEQ ID NO: 1053855 - RNA, 18 nt, Human
uccuggccacacuaccuu

SEQ ID NO: 1053856 - RNA, 22 nt, Human
cagagcugagucuucaagguug

SEQ ID NO: 1053857 - RNA, 22 nt, Human
ucuccuggcucaccaggcugga

SEQ ID NO: 1053858 - RNA, 22 nt, Human
auucugagaaaugcauugucag

SEQ ID NO: 1053859 - RNA, 22 nt, Human
gagguagccacagauagagacu

SEQ ID NO: 1053860 - RNA, 22 nt, Human
caggcagcugggucaccguccc

SEQ ID NO: 1053861 - RNA, 22 nt, Human
uugcauuucccauugaguaaug

SEQ ID NO: 1053862 - RNA, 22 nt, Human
aauacaguagguaauaguucau

SEQ ID NO: 1053863 - RNA, 18 nt, Human
cugcuugggagacgucag

SEQ ID NO: 1053864 - RNA, 17 nt, Human
agaacuguaguagcucc

SEQ ID NO: 1053865 - RNA, 22 nt, Human
uggcaucauagccaaggugcuu

SEQ ID NO: 1053866 - RNA, 22 nt, Human
uggaagggagugacagucagag

SEQ ID NO: 1053867 - RNA, 22 nt, Human
ggcugagggccagggcuagucu

SEQ ID NO: 1053868 - RNA, 20 nt, Human
cgugcugugaccuugagcau

SEQ ID NO: 1053869 - RNA, 22 nt, Human
uucaggauccccaccgcguuua

SEQ ID NO: 1053870 - RNA, 22 nt, Human
ucugagguggacgauggagccu

SEQ ID NO: 1053871 - RNA, 22 nt, Human
gaggccaggggccuggagauga

SEQ ID NO: 1053872 - RNA, 22 nt, Human
caccccagcuucucaggauaga

SEQ ID NO: 1053873 - RNA, 22 nt, Human
agcugaugccauguggaacagu

SEQ ID NO: 1053874 - RNA, 22 nt, Human
ugucaccaugccagcuucugcc

SEQ ID NO: 1053875 - RNA, 22 nt, Human
cauugcuuccuaugucccuucu

SEQ ID NO: 1053876 - RNA, 22 nt, Human
ccugccugcaccuucucugggg

SEQ ID NO: 1053877 - RNA, 20 nt, Human
ugcguguguauuuauuuucu

SEQ ID NO: 1053878 - RNA, 22 nt, Human
aagcagaggaccgacggaggga

SEQ ID NO: 1053879 - RNA, 22 nt, Human
aaggcugauuagacugauagcu

SEQ ID NO: 1053880 - RNA, 21 nt, Human
uucuucuuggacuguuuuggc

SEQ ID NO: 1053881 - RNA, 22 nt, Human
ugcaggcuggggaggcagacuu

SEQ ID NO: 1053882 - RNA, 22 nt, Human
ccaggaaaauaccaagcuuuaa

SEQ ID NO: 1053883 - RNA, 22 nt, Human
ugaggcagcaauuguauuguau

SEQ ID NO: 1053884 - RNA, 22 nt, Human
gagugcaguuggggugagggga

SEQ ID NO: 1053885 - RNA, 19 nt, Human
ggcugcugguuacagaggc

SEQ ID NO: 1053886 - RNA, 22 nt, Human
auauuaggugcucaauacaugc

SEQ ID NO: 1053887 - RNA, 22 nt, Human
agcccagguucuaaagccaaac

SEQ ID NO: 1053888 - RNA, 22 nt, Human
aggcuaagauguggucugagca

SEQ ID NO: 1053889 - RNA, 22 nt, Human
ccuggaccaaacacuggccugg

SEQ ID NO: 1053890 - RNA, 20 nt, Human
ccuggccaaugagauaggaa

SEQ ID NO: 1053891 - RNA, 22 nt, Human
gcuguggucugugagcuccaaa

SEQ ID NO: 1053892 - RNA, 22 nt, Human
aggagagggguaggauuaauuu

SEQ ID NO: 1053893 - RNA, 22 nt, Human
agaggcaggagguugacuugag

SEQ ID NO: 1053894 - RNA, 20 nt, Human
uugagcuuuuaguacagaca

SEQ ID NO: 1053895 - RNA, 22 nt, Human
acccaggaaaacauggugcaga

SEQ ID NO: 1053896 - RNA, 22 nt, Human
ugaggcagugcugggaagccug

SEQ ID NO: 1053897 - RNA, 22 nt, Human
uugaaaggaauacagaggccua

SEQ ID NO: 1053898 - RNA, 22 nt, Human
uagcacaucuggcgcuuauagg

SEQ ID NO: 1053899 - RNA, 18 nt, Human
caaauacuguugucuuau

SEQ ID NO: 1053900 - RNA, 22 nt, Human
uccaggaguuugagacugcagu

SEQ ID NO: 1053901 - RNA, 22 nt, Human
uugcugaaaucuaugacauccu

SEQ ID NO: 1053902 - RNA, 18 nt, Human
gcugagguggugucagag

SEQ ID NO: 1053903 - RNA, 22 nt, Human
gcuggcaggagccuuucccuuu

SEQ ID NO: 1053904 - RNA, 22 nt, Human
uaguuaggguucugcagagaca

SEQ ID NO: 1053905 - RNA, 22 nt, Human
gcaggaagcauagaagaaugcc

SEQ ID NO: 1053906 - RNA, 22 nt, Human
aggcaguuucugggacagcaua

SEQ ID NO: 1053907 - RNA, 22 nt, Human
gcaggcugauagaggauuccau

SEQ ID NO: 1053908 - RNA, 22 nt, Human
gcugcugccuguagccagggug

SEQ ID NO: 1053909 - RNA, 22 nt, Human
uuagcgcacaucacagggggaa

SEQ ID NO: 1053910 - RNA, 22 nt, Human
ccugggcaauauagugaggccc

SEQ ID NO: 1053911 - RNA, 22 nt, Human
acucugggcuuugauuuguuac

SEQ ID NO: 1053912 - RNA, 18 nt, Human
ugaauagggguuugcaga

SEQ ID NO: 1053913 - RNA, 23 nt, Human
ucagucuucccugucaguaauag

SEQ ID NO: 1053914 - RNA, 22 nt, Human
ggcugcaggcagaggcugucug

SEQ ID NO: 1053915 - RNA, 22 nt, Human
gagcugaggcugaggccucacu

SEQ ID NO: 1053916 - RNA, 22 nt, Human
aaggcagccaugugcuuugggu

SEQ ID NO: 1053917 - RNA, 22 nt, Human
aggcagauauuggggugaugug

SEQ ID NO: 1053918 - RNA, 22 nt, Human
ugaaacauuugaugaucuuugg

SEQ ID NO: 1053919 - RNA, 22 nt, Human
uagugucaggagggaaaugcaa

SEQ ID NO: 1053920 - RNA, 22 nt, Human
uuugaaagacagaauauuuuug

SEQ ID NO: 1053921 - RNA, 22 nt, Human
cuggcgcaacagaaaaucugga

SEQ ID NO: 1053922 - RNA, 22 nt, Human
agcauaaguugguacagccacu

SEQ ID NO: 1053923 - RNA, 22 nt, Human
acuccuggguuccggagauucu

SEQ ID NO: 1053924 - RNA, 22 nt, Human
uaugccugauaacugugucucu

SEQ ID NO: 1053925 - RNA, 22 nt, Human
gcccaggaguucaagucuagug

SEQ ID NO: 1053926 - RNA, 22 nt, Human
aaagccagagcaagcugucaca

SEQ ID NO: 1053927 - RNA, 22 nt, Human
ucugcugucacucauuugcuuc

SEQ ID NO: 1053928 - RNA, 22 nt, Human
ggcagcugcaaaucugcucugu

SEQ ID NO: 1053929 - RNA, 22 nt, Human
ugucaauguguacaggagcuca

SEQ ID NO: 1053930 - RNA, 22 nt, Human
agaggggaggcgaaccagaguc

SEQ ID NO: 1053931 - RNA, 22 nt, Human
aggccagcucuacccuuggacu

SEQ ID NO: 1053932 - RNA, 22 nt, Human
acuaacauuuguguaugucuug

SEQ ID NO: 1053933 - RNA, 22 nt, Human
aauuuccaaauuucugucacac

SEQ ID NO: 1053934 - RNA, 22 nt, Human
uuuauauuucccaggauuggcc

SEQ ID NO: 1053935 - RNA, 22 nt, Human
uucugaauggcaagcauuaggc

SEQ ID NO: 1053936 - RNA, 22 nt, Human
caugcaggcacccagagcccac

SEQ ID NO: 1053937 - RNA, 22 nt, Human
uggcugaguuacgaacagagca

SEQ ID NO: 1053938 - RNA, 22 nt, Human
acuuuauuuccuauugcaucca

SEQ ID NO: 1053939 - RNA, 22 nt, Human
uuagccauuaaauuacaaggug

SEQ ID NO: 1053940 - RNA, 22 nt, Human
ucaggagaaggcaauguggaaa

SEQ ID NO: 1053941 - RNA, 22 nt, Human
cagaaauguacugacaugcagu

SEQ ID NO: 1053942 - RNA, 22 nt, Human
cccagggaagccauuucugacu

SEQ ID NO: 1053943 - RNA, 22 nt, Human
guggccaaaucaugucaaaggc

SEQ ID NO: 1053944 - RNA, 22 nt, Human
uauuuucuggacagucuugcuu

SEQ ID NO: 1053945 - RNA, 22 nt, Human
ugucucugauaaguaguucagu

SEQ ID NO: 1053946 - RNA, 22 nt, Human
aggcugaggaucguacuuucca

SEQ ID NO: 1053947 - RNA, 22 nt, Human
ugaaaugagagcacagaauaaa

SEQ ID NO: 1053948 - RNA, 22 nt, Human
uuauuagguuauucucuguacu

SEQ ID NO: 1053949 - RNA, 22 nt, Human
ucuuugcaggccaaauuguuaa

SEQ ID NO: 1053950 - RNA, 22 nt, Human
acuccugguuuguguccuggcu

SEQ ID NO: 1053951 - RNA, 22 nt, Human
uucugagcugcaacacuaacau

SEQ ID NO: 1053952 - RNA, 21 nt, Human
cucaaagaccaaaaguguaga

SEQ ID NO: 1053953 - RNA, 22 nt, Human
agaaaugaaaccaaagccuaga

SEQ ID NO: 1053954 - RNA, 22 nt, Human
gggcagcugccagaggccaugg

SEQ ID NO: 1053955 - RNA, 22 nt, Human
cuguggaaaauuuguauguaau

SEQ ID NO: 1053956 - RNA, 22 nt, Human
gcugcugugaauuuuuuaaaug

SEQ ID NO: 1053957 - RNA, 22 nt, Human
aggaugagaagauuggaaucuu

SEQ ID NO: 1053958 - RNA, 22 nt, Human
uggcacaugguaagugcuuaac

SEQ ID NO: 1053959 - RNA, 15 nt, Human
cccaggaguucgaga

SEQ ID NO: 1053960 - RNA, 22 nt, Human
aucugcaggaaugugugcagag

SEQ ID NO: 1053961 - RNA, 22 nt, Human
gaaaacugugauuagaaugccu

SEQ ID NO: 1053962 - RNA, 22 nt, Human
ucucuuucuauaugugagucuu

SEQ ID NO: 1053963 - RNA, 22 nt, Human
uuugaaaguguuuacuugggaa

SEQ ID NO: 1053964 - RNA, 22 nt, Human
ucuaagccuaggaaaugaguuu

SEQ ID NO: 1053965 - RNA, 22 nt, Human
ugaggcagaguaagauacauga

SEQ ID NO: 1053966 - RNA, 22 nt, Human
uuuuagcacuaagugauaugcu

SEQ ID NO: 1053967 - RNA, 22 nt, Human
auauucuugugauuauaaagua

SEQ ID NO: 1053968 - RNA, 22 nt, Human
uguaggucucagugucugagcu

SEQ ID NO: 1053969 - RNA, 22 nt, Human
uaggcagcgcuuggcugugcuu

SEQ ID NO: 1053970 - RNA, 22 nt, Human
caggaugaagggcaaaggcaag

SEQ ID NO: 1053971 - RNA, 22 nt, Human
gcuccucugucaaaugagagug

SEQ ID NO: 1053972 - RNA, 22 nt, Human
gcugccucuguagcuuuggacc

SEQ ID NO: 1053973 - RNA, 22 nt, Human
gaggggaaagugugaggcugcg

SEQ ID NO: 1053974 - RNA, 22 nt, Human
cugcugugcaggugccuaugau

SEQ ID NO: 1053975 - RNA, 22 nt, Human
uuuacuuuugguaaggucauuu

SEQ ID NO: 1053976 - RNA, 17 nt, Human
gaggagcuccaguaggu

SEQ ID NO: 1053977 - RNA, 22 nt, Human
uuucaaagaccauuaacuauca

SEQ ID NO: 1053978 - RNA, 22 nt, Human
agaccgagaaguucuccaggcc

SEQ ID NO: 1053979 - RNA, 20 nt, Human
ugaaggccagcagcauaggg

SEQ ID NO: 1053980 - RNA, 22 nt, Human
ucucacugcaaauauuauguau

SEQ ID NO: 1053981 - RNA, 22 nt, Human
acagagcuguacuacuuacuga

SEQ ID NO: 1053982 - RNA, 22 nt, Human
aggcaccuugcgguccagugaa

SEQ ID NO: 1053983 - RNA, 22 nt, Human
cagaaggcuggcagauugagau

SEQ ID NO: 1053984 - RNA, 21 nt, Human
cucuugugucagagccagagg

SEQ ID NO: 1053985 - RNA, 22 nt, Human
gcacuuucagcaggcagacaga

SEQ ID NO: 1053986 - RNA, 22 nt, Human
ggcugagcccccucugcguagg

SEQ ID NO: 1053987 - RNA, 22 nt, Human
aaggccagccugagagcuaaca

SEQ ID NO: 1053988 - RNA, 22 nt, Human
cuggagagggagcccuggcagu

SEQ ID NO: 1053989 - RNA, 22 nt, Human
uuuuauucuaaguaugauggga

SEQ ID NO: 1053990 - RNA, 22 nt, Human
gugaggucaaagccuuggguau

SEQ ID NO: 1053991 - RNA, 22 nt, Human
uaggcagauguuaacaggaaaa

SEQ ID NO: 1053992 - RNA, 22 nt, Human
guauuaggagguggagccuuug

SEQ ID NO: 1053993 - RNA, 22 nt, Human
gcuccuggccagcacagggccc

SEQ ID NO: 1053994 - RNA, 22 nt, Human
agcugaggacgugaagggcggc

SEQ ID NO: 1053995 - RNA, 22 nt, Human
uucuagaugauaaaccagcagc

SEQ ID NO: 1053996 - RNA, 22 nt, Human
auuuggaacuuauaauaaguuu

SEQ ID NO: 1053997 - RNA, 22 nt, Human
agggcaguucaacuucauagug

SEQ ID NO: 1053998 - RNA, 23 nt, Human
ucugggccacuugucugcacuuc

SEQ ID NO: 1053999 - RNA, 22 nt, Human
ccaggcuggagugcaauggugc

SEQ ID NO: 1054000 - RNA, 22 nt, Human
uggcaguccccugugccuggaa

SEQ ID NO: 1054001 - RNA, 20 nt, Human
ugcugcugugagcgucccug

SEQ ID NO: 1054002 - RNA, 22 nt, Human
gaggagagaacauuccuccaua

SEQ ID NO: 1054003 - RNA, 22 nt, Human
ggcuuggaaaugguaaugagcu

SEQ ID NO: 1054004 - RNA, 22 nt, Human
cugagcuguuuaaucccagaua

SEQ ID NO: 1054005 - RNA, 22 nt, Human
cugcuucacuucgguugcauag

SEQ ID NO: 1054006 - RNA, 22 nt, Human
uucuucaguguagcaacuguau

SEQ ID NO: 1054007 - RNA, 22 nt, Human
aaguuauaucaucucauugacg

SEQ ID NO: 1054008 - RNA, 22 nt, Human
ggugaguugggguucacagguc

SEQ ID NO: 1054009 - RNA, 22 nt, Human
cugggccauggaagucucugcc

SEQ ID NO: 1054010 - RNA, 22 nt, Human
acugagguuguaguaggaauuc

SEQ ID NO: 1054011 - RNA, 22 nt, Human
ccaggagagcauugcacagagg

SEQ ID NO: 1054012 - RNA, 22 nt, Human
uaggaucucaccauagaaggaa

SEQ ID NO: 1054013 - RNA, 22 nt, Human
uuuuauuaucuuugaaugggac

SEQ ID NO: 1054014 - RNA, 22 nt, Human
agucugaguaucucugagccag

SEQ ID NO: 1054015 - RNA, 22 nt, Human
cuuguagcugcuucuucugaag

SEQ ID NO: 1054016 - RNA, 22 nt, Human
ccugagcugcggggcagugcuc

SEQ ID NO: 1054017 - RNA, 22 nt, Human
aaauucacuugccugcuuagcu

SEQ ID NO: 1054018 - RNA, 21 nt, Human
ccugagugagaccuggcccgu

SEQ ID NO: 1054019 - RNA, 22 nt, Human
uccagccuaggggaacagcugc

SEQ ID NO: 1054020 - RNA, 22 nt, Human
caaauaguuuuucauguauuau

SEQ ID NO: 1054021 - RNA, 22 nt, Human
ucucucagaggaagaggcagug

SEQ ID NO: 1054022 - RNA, 22 nt, Human
agggcagcccuucugggagggc

SEQ ID NO: 1054023 - RNA, 22 nt, Human
cccuggccccucacuccgaggc

SEQ ID NO: 1054024 - RNA, 22 nt, Human
augcugagauccucaggccaga

SEQ ID NO: 1054025 - RNA, 22 nt, Human
ucugagguccuacuauaagugg

SEQ ID NO: 1054026 - RNA, 22 nt, Human
uagggcugaggcaacaagggag

SEQ ID NO: 1054027 - RNA, 22 nt, Human
auauucuucuuguucagacuau

SEQ ID NO: 1054028 - RNA, 22 nt, Human
cucaguuucugacauuaaaauc

SEQ ID NO: 1054029 - RNA, 20 nt, Human
cugcugugugugccucagcc

SEQ ID NO: 1054030 - RNA, 22 nt, Human
auuugcuuucagguauaaaagg

SEQ ID NO: 1054031 - RNA, 22 nt, Human
cauuuguagcuauuuacuguau

SEQ ID NO: 1054032 - RNA, 22 nt, Human
uuggaauucaaguuguagcuua

SEQ ID NO: 1054033 - RNA, 22 nt, Human
accauuuuggguauuuucagag

SEQ ID NO: 1054034 - RNA, 19 nt, Human
uucauucuuucuacuuacc

SEQ ID NO: 1054035 - RNA, 22 nt, Human
gcccaggaugguguguaguggu

SEQ ID NO: 1054036 - RNA, 23 nt, Human
cagugugacgaggugaggcaggc

SEQ ID NO: 1054037 - RNA, 22 nt, Human
ucaggcuguggcuucaguucuu

SEQ ID NO: 1054038 - RNA, 23 nt, Human
acagacaacacugaugagagaaa

SEQ ID NO: 1054039 - RNA, 22 nt, Human
uucuucuucaagugcugcauuc

SEQ ID NO: 1054040 - RNA, 22 nt, Human
ugaggcagaaauuccuguuuuc

SEQ ID NO: 1054041 - RNA, 22 nt, Human
guucuucaguaaaauuaaaugu

SEQ ID NO: 1054042 - RNA, 22 nt, Human
auacuguuuugugacuuaucuu

SEQ ID NO: 1054043 - RNA, 22 nt, Human
ggcugaggcggcgaugcccuug

SEQ ID NO: 1054044 - RNA, 22 nt, Human
agagcagcacguuguccccaca

SEQ ID NO: 1054045 - RNA, 22 nt, Human
uucuacaugguugcucagaggg

SEQ ID NO: 1054046 - RNA, 22 nt, Human
guuagagcacauacuuugcaug

SEQ ID NO: 1054047 - RNA, 22 nt, Human
guuauuaguaagacucgcacau

SEQ ID NO: 1054048 - RNA, 22 nt, Human
cucaggauucucgacacucaca

SEQ ID NO: 1054049 - RNA, 19 nt, Human
caggaaugagguaauggcu

SEQ ID NO: 1054050 - RNA, 22 nt, Human
uuggccaacauggugaaacccc

SEQ ID NO: 1054051 - RNA, 22 nt, Human
gaccuuuuuacuguguacgcug

SEQ ID NO: 1054052 - RNA, 22 nt, Human
aggcagagcuggguuuugaaau

SEQ ID NO: 1054053 - RNA, 22 nt, Human
acuauacaccaaaauauuaagg

SEQ ID NO: 1054054 - RNA, 22 nt, Human
aauccuggaauacaagagugaa

SEQ ID NO: 1054055 - RNA, 22 nt, Human
uugaggucuucaggaucaggcu

SEQ ID NO: 1054056 - RNA, 22 nt, Human
agcccuggcagagccagguagu

SEQ ID NO: 1054057 - RNA, 22 nt, Human
gccuggcuaguuagugucaggu

SEQ ID NO: 1054058 - RNA, 22 nt, Human
aaacugcugguugcuggccagc

SEQ ID NO: 1054059 - RNA, 22 nt, Human
uccaggaggugaggggaccaaa

SEQ ID NO: 1054060 - RNA, 22 nt, Human
aaaggugacacucugccagcug

SEQ ID NO: 1054061 - RNA, 22 nt, Human
augcaucuauucccaagggcag

SEQ ID NO: 1054062 - RNA, 22 nt, Human
gcugacaguuacugcuguaaca

SEQ ID NO: 1054063 - RNA, 22 nt, Human
uagaaagugaagguuaauuaau

SEQ ID NO: 1054064 - RNA, 22 nt, Human
cuguguuggcuuuucucuugua

SEQ ID NO: 1054065 - RNA, 21 nt, Human
acagcaagccuucacaugagu

SEQ ID NO: 1054066 - RNA, 17 nt, Human
caggcagacauguaagc

SEQ ID NO: 1054067 - RNA, 17 nt, Human
agauggcaggaggcaga

SEQ ID NO: 1054068 - RNA, 22 nt, Human
gaggcuccgugcugcugcccug

SEQ ID NO: 1054069 - RNA, 22 nt, Human
uaacuguauagcuuggacuaaa

SEQ ID NO: 1054070 - RNA, 22 nt, Human
aacaugauggggaagaacaaga

SEQ ID NO: 1054071 - RNA, 22 nt, Human
gagagguccauuccccugucag

SEQ ID NO: 1054072 - RNA, 22 nt, Human
uggguccacggaagacuuaggg

SEQ ID NO: 1054073 - RNA, 22 nt, Human
aaagcagaggugauaugacuua

SEQ ID NO: 1054074 - RNA, 22 nt, Human
uaggagagcugaacuauugucu

SEQ ID NO: 1054075 - RNA, 21 nt, Human
cccaggaggagcuccggcucc

SEQ ID NO: 1054076 - RNA, 22 nt, Human
gagugcaggccugagcaccauc

SEQ ID NO: 1054077 - RNA, 22 nt, Human
uccacauccauugcuugacuuu

SEQ ID NO: 1054078 - RNA, 22 nt, Human
augcugcagcugcaggaucaga

SEQ ID NO: 1054079 - RNA, 21 nt, Human
cauuaaguaccagggcacugu

SEQ ID NO: 1054080 - RNA, 22 nt, Human
ccuggagagagaggccaacugc

SEQ ID NO: 1054081 - RNA, 22 nt, Human
uggcuucuugacuucuuggcug

SEQ ID NO: 1054082 - RNA, 22 nt, Human
ugcauguguguguauuuauaaa

SEQ ID NO: 1054083 - RNA, 22 nt, Human
ggauggcauguugggcucuguu

SEQ ID NO: 1054084 - RNA, 22 nt, Human
gacaggaggcagagcucaggug

SEQ ID NO: 1054085 - RNA, 21 nt, Human
uaggcagaggagcagguaucu

SEQ ID NO: 1054086 - RNA, 23 nt, Human
aggcuccacucccugggaugugg

SEQ ID NO: 1054087 - RNA, 22 nt, Human
ucuggccacuaauaggucucac

SEQ ID NO: 1054088 - RNA, 22 nt, Human
cuuguccccagcagguugguuu

SEQ ID NO: 1054089 - RNA, 22 nt, Human
aaguuacaguuacagaauggag

SEQ ID NO: 1054090 - RNA, 22 nt, Human
ucucuucuauuugagacuauuu

SEQ ID NO: 1054091 - RNA, 22 nt, Human
aaauuguugaucuacaguaagg

SEQ ID NO: 1054092 - RNA, 22 nt, Human
uuucuaggucuuccauacugcc

SEQ ID NO: 1054093 - RNA, 22 nt, Human
gucaggaugacaagugcuuuca

SEQ ID NO: 1054094 - RNA, 22 nt, Human
auaagcauguuagaauauuuga

SEQ ID NO: 1054095 - RNA, 22 nt, Human
ucuaaagaagaggguucugcgg

SEQ ID NO: 1054096 - RNA, 22 nt, Human
gcaggcagagguggaggagaca

SEQ ID NO: 1054097 - RNA, 22 nt, Human
acucaggaauggggcugggacu

SEQ ID NO: 1054098 - RNA, 22 nt, Human
acagugcuaaacacuucuugaa

SEQ ID NO: 1054099 - RNA, 22 nt, Human
auuaauaaaauaccacuuuguu

SEQ ID NO: 1054100 - RNA, 22 nt, Human
caauuacauuuauugagcauuc

SEQ ID NO: 1054101 - RNA, 22 nt, Human
accuuuuccagcuucuagaggc

SEQ ID NO: 1054102 - RNA, 18 nt, Human
gcuuuauuucuuggggaa

SEQ ID NO: 1054103 - RNA, 18 nt, Human
cugaggcuggcaggagcc

SEQ ID NO: 1054104 - RNA, 22 nt, Human
cccuggaggaaaaucugaggcu

SEQ ID NO: 1054105 - RNA, 22 nt, Human
aggacagggauucaaacuccca

SEQ ID NO: 1054106 - RNA, 22 nt, Human
auuaggcaauucugggcaucuc

SEQ ID NO: 1054107 - RNA, 22 nt, Human
ggugaaggucagagcaggaaaa

SEQ ID NO: 1054108 - RNA, 22 nt, Human
gaggccagggaugcaaugagag

SEQ ID NO: 1054109 - RNA, 22 nt, Human
acugagguuucauuuuaucgcu

SEQ ID NO: 1054110 - RNA, 22 nt, Human
aaacugguaauaaaauggauua

SEQ ID NO: 1054111 - RNA, 22 nt, Human
gcucaggaucagccaccucuuu

SEQ ID NO: 1054112 - RNA, 22 nt, Human
uacccaggaggaaacugaggcu

SEQ ID NO: 1054113 - RNA, 22 nt, Human
cacugucuuuugugaagacaau

SEQ ID NO: 1054114 - RNA, 22 nt, Human
gcauguguugguuuaugcaugu

SEQ ID NO: 1054115 - RNA, 22 nt, Human
aggcaguggagcuggaauaggc

SEQ ID NO: 1054116 - RNA, 22 nt, Human
ccuccucugggaagauucagag

SEQ ID NO: 1054117 - RNA, 22 nt, Human
gaggaacccagcugggguugcc

SEQ ID NO: 1054118 - RNA, 22 nt, Human
gcagcugcagacccucagugcu

SEQ ID NO: 1054119 - RNA, 22 nt, Human
aagcaggauggagguugaguua

SEQ ID NO: 1054120 - RNA, 22 nt, Human
ucugagguucccucaacuaccu

SEQ ID NO: 1054121 - RNA, 22 nt, Human
cccugggcucagagcagguagc

SEQ ID NO: 1054122 - RNA, 22 nt, Human
ccauccugcauugcuauucaga

SEQ ID NO: 1054123 - RNA, 22 nt, Human
cccaggagcuucucucugccuc

SEQ ID NO: 1054124 - RNA, 22 nt, Human
cuugcugugugguguucucaga

SEQ ID NO: 1054125 - RNA, 22 nt, Human
aagggcugaaugaaggguugaa

SEQ ID NO: 1054126 - RNA, 22 nt, Human
gcuggccauauauuuugcuguu

SEQ ID NO: 1054127 - RNA, 22 nt, Human
uaggaggguuagagggaaauau

SEQ ID NO: 1054128 - RNA, 22 nt, Human
cagaggcaggaagaugggcagu

SEQ ID NO: 1054129 - RNA, 22 nt, Human
gccaggcuaagaaaggugugau

SEQ ID NO: 1054130 - RNA, 22 nt, Human
gcugaggaaaggcuggaaggga

SEQ ID NO: 1054131 - RNA, 22 nt, Human
uguaggccuauguccagcaauu

SEQ ID NO: 1054132 - RNA, 22 nt, Human
ggcugaggguauagcuguccca

SEQ ID NO: 1054133 - RNA, 22 nt, Human
accauccugaaaccuucaugcu

SEQ ID NO: 1054134 - RNA, 22 nt, Human
gcagcuccuccugggcuggaga

SEQ ID NO: 1054135 - RNA, 22 nt, Human
gguccaccuccaagcuggggac

SEQ ID NO: 1054136 - RNA, 22 nt, Human
aggcaguguguagcuggaagag

SEQ ID NO: 1054137 - RNA, 22 nt, Human
uuugaauauacuucaaacaaag

SEQ ID NO: 1054138 - RNA, 22 nt, Human
uguuagcagagcagcugacaga

SEQ ID NO: 1054139 - RNA, 22 nt, Human
cuaggccacuugcucucaugga

SEQ ID NO: 1054140 - RNA, 22 nt, Human
ucugagcuucugcauuuccaac

SEQ ID NO: 1054141 - RNA, 22 nt, Human
auuugcuuaucuccacaguugu

SEQ ID NO: 1054142 - RNA, 22 nt, Human
ggagggcugagacuggggucug

SEQ ID NO: 1054143 - RNA, 22 nt, Human
ucauuucaaguucugacagcua

SEQ ID NO: 1054144 - RNA, 23 nt, Human
agggcugaugccauugcagcucu

SEQ ID NO: 1054145 - RNA, 22 nt, Human
agcuaagacuuagugacuuagu

SEQ ID NO: 1054146 - RNA, 20 nt, Human
cugccgaccacagccaugga

SEQ ID NO: 1054147 - RNA, 21 nt, Human
auacacauacacauaaaugug

SEQ ID NO: 1054148 - RNA, 22 nt, Human
accccagaggcggaggcugcag

SEQ ID NO: 1054149 - RNA, 19 nt, Human
ucucacaguuuccuugccu

SEQ ID NO: 1054150 - RNA, 22 nt, Human
gagggcuguggggcaugaccag

SEQ ID NO: 1054151 - RNA, 22 nt, Human
cuugauguauaaguugauaugu

SEQ ID NO: 1054152 - RNA, 22 nt, Human
uucuucaugcuguugcugcuug

SEQ ID NO: 1054153 - RNA, 22 nt, Human
ucaugcuuauugcauauuugga

SEQ ID NO: 1054154 - RNA, 22 nt, Human
cuggaaauuggagaugauguuu

SEQ ID NO: 1054155 - RNA, 18 nt, Human
ucaggcuggaaguuugcc

SEQ ID NO: 1054156 - RNA, 22 nt, Human
uucuuuuccuacacagcgauuu

SEQ ID NO: 1054157 - RNA, 22 nt, Human
caggauggccccggggcugugc

SEQ ID NO: 1054158 - RNA, 22 nt, Human
ccaagaugaucuuuacaguguu

SEQ ID NO: 1054159 - RNA, 22 nt, Human
agaggccagguccagaguuugu

SEQ ID NO: 1054160 - RNA, 22 nt, Human
aauguauuccucaugcaagagu

SEQ ID NO: 1054161 - RNA, 22 nt, Human
agugagaguauuaaugugaacu

SEQ ID NO: 1054162 - RNA, 22 nt, Human
gugcuuucugcugcauuccucu

SEQ ID NO: 1054163 - RNA, 22 nt, Human
auggaaagggaagcaaggaaca

SEQ ID NO: 1054164 - RNA, 22 nt, Human
ucccugccaguccuggucugaa

SEQ ID NO: 1054165 - RNA, 22 nt, Human
aaggcagucugguuucaaagca

SEQ ID NO: 1054166 - RNA, 22 nt, Human
cagcuggcuggucagugcacaa

SEQ ID NO: 1054167 - RNA, 22 nt, Human
gacugaggugcccagaggugac

SEQ ID NO: 1054168 - RNA, 22 nt, Human
uuaguaggagagcuuguucauu

SEQ ID NO: 1054169 - RNA, 21 nt, Human
uucucagaucgaguagugaga

SEQ ID NO: 1054170 - RNA, 22 nt, Human
cagcuuuuuagaaucuagggca

SEQ ID NO: 1054171 - RNA, 22 nt, Human
gaggcaguuugccaugccagga

SEQ ID NO: 1054172 - RNA, 22 nt, Human
uaagaaauuuaguuauagaaug

SEQ ID NO: 1054173 - RNA, 21 nt, Human
cugagggccgcagcugggcuc

SEQ ID NO: 1054174 - RNA, 22 nt, Human
cagggagggacaauugucaccu

SEQ ID NO: 1054175 - RNA, 21 nt, Human
ugcccuggggcucuucccuca

SEQ ID NO: 1054176 - RNA, 22 nt, Human
uaauauaccaaacuguaauuuu

SEQ ID NO: 1054177 - RNA, 22 nt, Human
ucuuuucaucauuuaauaggua

SEQ ID NO: 1054178 - RNA, 22 nt, Human
ucugcaucauuuuucagagccg

SEQ ID NO: 1054179 - RNA, 23 nt, Human
agaugagccaacaccuccaugcc

SEQ ID NO: 1054180 - RNA, 22 nt, Human
cccuuagcucaauuucuugccc

SEQ ID NO: 1054181 - RNA, 22 nt, Human
ugguaauuaauuugauagguuc

SEQ ID NO: 1054182 - RNA, 16 nt, Human
aggaggggaauuagga

SEQ ID NO: 1054183 - RNA, 22 nt, Human
cucccaggcacagggaggagcc

SEQ ID NO: 1054184 - RNA, 22 nt, Human
cuuagagcuuaggcuagccauu

SEQ ID NO: 1054185 - RNA, 22 nt, Human
uuuuaucugcuucauuaguuga

SEQ ID NO: 1054186 - RNA, 22 nt, Human
agagggaucacccuguuucugg

SEQ ID NO: 1054187 - RNA, 22 nt, Human
ccaccagcuucagcagccgcgg

SEQ ID NO: 1054188 - RNA, 22 nt, Human
uuucugcugugcuuucuugcgu

SEQ ID NO: 1054189 - RNA, 22 nt, Human
auuggaaaugcuacaaguuaga

SEQ ID NO: 1054190 - RNA, 22 nt, Human
cuguccccugugcuuucacuug

SEQ ID NO: 1054191 - RNA, 22 nt, Human
auuuguugcuagcagcacugau

SEQ ID NO: 1054192 - RNA, 22 nt, Human
ccacugcuagagaugcaucccc

SEQ ID NO: 1054193 - RNA, 22 nt, Human
acacuuucuggagcugcacaua

SEQ ID NO: 1054194 - RNA, 22 nt, Human
aaguuacacauuuucauuguaa

SEQ ID NO: 1054195 - RNA, 20 nt, Human
aggaagcugagauguagagg

SEQ ID NO: 1054196 - RNA, 22 nt, Human
agcugccccaugagaggcaggu

SEQ ID NO: 1054197 - RNA, 22 nt, Human
cugcuuugacuguuaagaacca

SEQ ID NO: 1054198 - RNA, 22 nt, Human
gaauacacgaauagagcauggu

SEQ ID NO: 1054199 - RNA, 19 nt, Human
ugcuagaaauucugugacu

SEQ ID NO: 1054200 - RNA, 22 nt, Human
uaacaugaaacuccaaauggua

SEQ ID NO: 1054201 - RNA, 22 nt, Human
cugccugcguugccucgugccu

SEQ ID NO: 1054202 - RNA, 22 nt, Human
guccaugauucugugacacccu

SEQ ID NO: 1054203 - RNA, 22 nt, Human
ccuucauugcaucuuuaagaga

SEQ ID NO: 1054204 - RNA, 22 nt, Human
cagggucugaaacugaucacag

SEQ ID NO: 1054205 - RNA, 22 nt, Human
ggcagacuguaauaggagaauu

SEQ ID NO: 1054206 - RNA, 22 nt, Human
agcacagggcccagccuaggcc

SEQ ID NO: 1054207 - RNA, 22 nt, Human
cugggccagcaacugcaaugga

SEQ ID NO: 1054208 - RNA, 22 nt, Human
gagagcuguuuaucuucuucaa

SEQ ID NO: 1054209 - RNA, 20 nt, Human
cugagcccccagccugcagg

SEQ ID NO: 1054210 - RNA, 22 nt, Human
acugaggauuagcccaggcuag

SEQ ID NO: 1054211 - RNA, 22 nt, Human
ucuccugguacccuuccuagca

SEQ ID NO: 1054212 - RNA, 22 nt, Human
auugaaaguccuaucuaaggga

SEQ ID NO: 1054213 - RNA, 20 nt, Human
cuucuucaguaguuuguucu

SEQ ID NO: 1054214 - RNA, 22 nt, Human
aagcgccaugguuccugcgcag

SEQ ID NO: 1054215 - RNA, 22 nt, Human
uccaggagugugugcuaauggg

SEQ ID NO: 1054216 - RNA, 22 nt, Human
aggccaaauugaucaucuuuag

SEQ ID NO: 1054217 - RNA, 19 nt, Human
aaagcagaggagcaucuga

SEQ ID NO: 1054218 - RNA, 17 nt, Human
caguuggagacaagucc

SEQ ID NO: 1054219 - RNA, 22 nt, Human
cagaagaggacuggguagcuca

SEQ ID NO: 1054220 - RNA, 22 nt, Human
acuggccaggcagcaguagcuu

SEQ ID NO: 1054221 - RNA, 22 nt, Human
gcugccuccacuggcucccagu

SEQ ID NO: 1054222 - RNA, 22 nt, Human
uaagauuauacuuaaagagaaa

SEQ ID NO: 1054223 - RNA, 21 nt, Human
agggagcuuuagguagaaguu

SEQ ID NO: 1054224 - RNA, 22 nt, Human
uuccuuaggcuguuugcagugc

SEQ ID NO: 1054225 - RNA, 22 nt, Human
uuaucacuuaugagcuuuuugc

SEQ ID NO: 1054226 - RNA, 22 nt, Human
cagcaagacuucagggcuuggu

SEQ ID NO: 1054227 - RNA, 22 nt, Human
ugaggcagugauguuuaagcac

SEQ ID NO: 1054228 - RNA, 22 nt, Human
ucccagggcucuagagugcugg

SEQ ID NO: 1054229 - RNA, 22 nt, Human
aaaugccucuggguuauucuag

SEQ ID NO: 1054230 - RNA, 22 nt, Human
cugagcugggacucaguagcaa

SEQ ID NO: 1054231 - RNA, 22 nt, Human
cugcugugucagaguccagggg

SEQ ID NO: 1054232 - RNA, 17 nt, Human
uuugaaaggaugucagu

SEQ ID NO: 1054233 - RNA, 22 nt, Human
ggcagucuuaucagcauuggac

SEQ ID NO: 1054234 - RNA, 22 nt, Human
aggcaguggaugucaggaaugg

SEQ ID NO: 1054235 - RNA, 22 nt, Human
uaggaaauauuugaacauagga

SEQ ID NO: 1054236 - RNA, 19 nt, Human
uuugaaagaguuuuauugg

SEQ ID NO: 1054237 - RNA, 22 nt, Human
uggagaggaaagugcaguuuug

SEQ ID NO: 1054238 - RNA, 22 nt, Human
ccucacugcuauguguuugcuc

SEQ ID NO: 1054239 - RNA, 22 nt, Human
ccugaggucaugguccaguguu

SEQ ID NO: 1054240 - RNA, 22 nt, Human
agaggggagagcuaagcaauuc

SEQ ID NO: 1054241 - RNA, 22 nt, Human
gcaaguuauuuccauuuaaagc

SEQ ID NO: 1054242 - RNA, 22 nt, Human
uugacacagaucaauauucaac

SEQ ID NO: 1054243 - RNA, 22 nt, Human
gggcaguuuauucuagaugguu

SEQ ID NO: 1054244 - RNA, 23 nt, Human
ggagaggggugugggcaucuuua

SEQ ID NO: 1054245 - RNA, 22 nt, Human
cuguggaaggccuguccugaaa

SEQ ID NO: 1054246 - RNA, 19 nt, Human
gugcuuuuuaagagcucag

SEQ ID NO: 1054247 - RNA, 22 nt, Human
uauuagguaaaggacuugcagg

SEQ ID NO: 1054248 - RNA, 22 nt, Human
uggcuguguuaccacuucaugu

SEQ ID NO: 1054249 - RNA, 22 nt, Human
cccaugagaccugguuuaaggc

SEQ ID NO: 1054250 - RNA, 22 nt, Human
aacugcuguggccuaguacuua

SEQ ID NO: 1054251 - RNA, 22 nt, Human
cugcuguguuucacaccucugg

SEQ ID NO: 1054252 - RNA, 22 nt, Human
aguggacucuucccagugcuug

SEQ ID NO: 1054253 - RNA, 22 nt, Human
cacagaacauccuuagcucaug

SEQ ID NO: 1054254 - RNA, 22 nt, Human
cuaaauuauuugcacauuagag

SEQ ID NO: 1054255 - RNA, 22 nt, Human
uggcaucucaaacaggcagauu

SEQ ID NO: 1054256 - RNA, 22 nt, Human
aggcuccagcccaaggcugcag

SEQ ID NO: 1054257 - RNA, 22 nt, Human
acauccugaagucagucauuug

SEQ ID NO: 1054258 - RNA, 22 nt, Human
uucaggaugcucagaguagucu

SEQ ID NO: 1054259 - RNA, 22 nt, Human
gccaggaggcugcuguguaggc

SEQ ID NO: 1054260 - RNA, 22 nt, Human
uuggcuucuugugaaaucugag

SEQ ID NO: 1054261 - RNA, 20 nt, Human
gcccaggaucucugaggcau

SEQ ID NO: 1054262 - RNA, 22 nt, Human
uaguccagccuuggguguagcc

SEQ ID NO: 1054263 - RNA, 22 nt, Human
uauaucauggagauuaacauuc

SEQ ID NO: 1054264 - RNA, 22 nt, Human
cagugcuguugggcccagagag

SEQ ID NO: 1054265 - RNA, 22 nt, Human
aagugagugguaaggagcaugg

SEQ ID NO: 1054266 - RNA, 22 nt, Human
uguucauuuggcccuuuuguau

SEQ ID NO: 1054267 - RNA, 22 nt, Human
ccagaccacccuggccaugcac

SEQ ID NO: 1054268 - RNA, 22 nt, Human
ucuacugugguccuuguaacca

SEQ ID NO: 1054269 - RNA, 18 nt, Human
uuaaggauaagcagacua

SEQ ID NO: 1054270 - RNA, 22 nt, Human
accaggaguuuugaccaggggc

SEQ ID NO: 1054271 - RNA, 22 nt, Human
ucuucagauaaagggagaguau

SEQ ID NO: 1054272 - RNA, 22 nt, Human
cccaggagaccugugaaaggac

SEQ ID NO: 1054273 - RNA, 22 nt, Human
cccaggagguggagguugcggu

SEQ ID NO: 1054274 - RNA, 22 nt, Human
cuaagccacucaaaucuugugg

SEQ ID NO: 1054275 - RNA, 22 nt, Human
gauagucaccucccuuaacuuu

SEQ ID NO: 1054276 - RNA, 22 nt, Human
uuaacauacaucaugaacaaug

SEQ ID NO: 1054277 - RNA, 22 nt, Human
uaucuauaaguacuaacauggu

SEQ ID NO: 1054278 - RNA, 22 nt, Human
gacaguaacugagagauguaau

SEQ ID NO: 1054279 - RNA, 22 nt, Human
gaggcagcugaaggagugacag

SEQ ID NO: 1054280 - RNA, 22 nt, Human
cacauauuguaguucaccagga

SEQ ID NO: 1054281 - RNA, 22 nt, Human
aaauacagaguugcuuaaaagc

SEQ ID NO: 1054282 - RNA, 22 nt, Human
cccaggaggcagagcuugcagu

SEQ ID NO: 1054283 - RNA, 22 nt, Human
ugcaggcugccuucacagagcc

SEQ ID NO: 1054284 - RNA, 22 nt, Human
cccccagucugaacagcagcug

SEQ ID NO: 1054285 - RNA, 21 nt, Human
gcaggcuggucaaaccucagu

SEQ ID NO: 1054286 - RNA, 22 nt, Human
ccuggauucaagucuuucuuuc

SEQ ID NO: 1054287 - RNA, 22 nt, Human
auuuaguuuaggaaaaguaggu

SEQ ID NO: 1054288 - RNA, 19 nt, Human
ucccaggaagcaaauguca

SEQ ID NO: 1054289 - RNA, 22 nt, Human
cccaggaggcgcagguugcggu

SEQ ID NO: 1054290 - RNA, 22 nt, Human
ccccggaggcggagguugcagu

SEQ ID NO: 1054291 - RNA, 22 nt, Human
uuaggaguccagaugucuuggg

SEQ ID NO: 1054292 - RNA, 22 nt, Human
aauaugcauuaacuguguacau

SEQ ID NO: 1054293 - RNA, 22 nt, Human
aggcugagucgggaggaucacu

SEQ ID NO: 1054294 - RNA, 22 nt, Human
uuaaauuccagccucauaauag

SEQ ID NO: 1054295 - RNA, 22 nt, Human
ucuuuauuucugaaucccccau

SEQ ID NO: 1054296 - RNA, 22 nt, Human
uucuucaaacaaaaguggcaug

SEQ ID NO: 1054297 - RNA, 22 nt, Human
gaggcuccucauucaguaugcu

SEQ ID NO: 1054298 - RNA, 22 nt, Human
aaagauuugaguucugcuuaua

SEQ ID NO: 1054299 - RNA, 22 nt, Human
uuucuauucuggaucuguggca

SEQ ID NO: 1054300 - RNA, 22 nt, Human
gaggcagcuuaggguacugacu

SEQ ID NO: 1054301 - RNA, 22 nt, Human
gaccaggaaagagugugacuaa

SEQ ID NO: 1054302 - RNA, 22 nt, Human
auuuggcaacauuaauugaauc

SEQ ID NO: 1054303 - RNA, 22 nt, Human
aacaugaaaaccuccacagcaa

SEQ ID NO: 1054304 - RNA, 22 nt, Human
gaggcugcccaacuggagugga

SEQ ID NO: 1054305 - RNA, 22 nt, Human
aguuaucaucccuuacacuuug

SEQ ID NO: 1054306 - RNA, 17 nt, Human
ucaggcugugccuggua

SEQ ID NO: 1054307 - RNA, 21 nt, Human
ucucugugucuuuaagcugga

SEQ ID NO: 1054308 - RNA, 22 nt, Human
guugaaagaugucuugguuccc

SEQ ID NO: 1054309 - RNA, 22 nt, Human
gcuccugggcucuaccuugcua

SEQ ID NO: 1054310 - RNA, 22 nt, Human
acaacauucuuaaauacacuga

SEQ ID NO: 1054311 - RNA, 22 nt, Human
uccaggagucuagccucaggcc

SEQ ID NO: 1054312 - RNA, 22 nt, Human
cugagccagcgggcucacuuuu

SEQ ID NO: 1054313 - RNA, 22 nt, Human
cugcccaggcugaaggaacauc

SEQ ID NO: 1054314 - RNA, 20 nt, Human
agaggaggauuauuuuauuc

SEQ ID NO: 1054315 - RNA, 22 nt, Human
aguugcugcuucucucuagaga

SEQ ID NO: 1054316 - RNA, 22 nt, Human
ucuucacaugaccuucaugucu

SEQ ID NO: 1054317 - RNA, 18 nt, Human
cugaggccaacuacacug

SEQ ID NO: 1054318 - RNA, 22 nt, Human
cuggccuaaaauugcuucugca

SEQ ID NO: 1054319 - RNA, 22 nt, Human
aaccauuugccauuaucuuaag

SEQ ID NO: 1054320 - RNA, 21 nt, Human
ucuuggccuaaguucacugaa

SEQ ID NO: 1054321 - RNA, 22 nt, Human
gcuggccaggugcuuugguucu

SEQ ID NO: 1054322 - RNA, 22 nt, Human
cugaggucaggaguucaagcug

SEQ ID NO: 1054323 - RNA, 22 nt, Human
gcuggagcugaguucccugggc

SEQ ID NO: 1054324 - RNA, 22 nt, Human
uagggauguccugagacuuggc

SEQ ID NO: 1054325 - RNA, 22 nt, Human
cacagcaauagcuaacugauac

SEQ ID NO: 1054326 - RNA, 22 nt, Human
gccaggggacgcggagcgacga

SEQ ID NO: 1054327 - RNA, 22 nt, Human
agaaaguuguuuuagccaaacc

SEQ ID NO: 1054328 - RNA, 20 nt, Human
uaagaugagcuauaagaagu

SEQ ID NO: 1054329 - RNA, 22 nt, Human
uggcagcucauuuggaaaugga

SEQ ID NO: 1054330 - RNA, 22 nt, Human
gggcugagacgauggggucuuc

SEQ ID NO: 1054331 - RNA, 22 nt, Human
ccuggcugcugucacugaccau

SEQ ID NO: 1054332 - RNA, 22 nt, Human
uccaggaggacugagggggcug

SEQ ID NO: 1054333 - RNA, 21 nt, Human
uccuggccagggcacuaggca

SEQ ID NO: 1054334 - RNA, 22 nt, Human
aggaagcugcuggaguagugug

SEQ ID NO: 1054335 - RNA, 22 nt, Human
uuuuuggguccaggcuguaucu

SEQ ID NO: 1054336 - RNA, 22 nt, Human
uaaaugaagcucaugggccaca

SEQ ID NO: 1054337 - RNA, 22 nt, Human
accuuauuuugaaauagauugu

SEQ ID NO: 1054338 - RNA, 22 nt, Human
ggcugcuggcauugagguaggu

SEQ ID NO: 1054339 - RNA, 22 nt, Human
guaacuuaccauuguagcauca

SEQ ID NO: 1054340 - RNA, 22 nt, Human
cauucauuagaauagauaugua

SEQ ID NO: 1054341 - RNA, 22 nt, Human
gcagaggggaagcugaggaauu

SEQ ID NO: 1054342 - RNA, 22 nt, Human
accaggaguugggggugggacc

SEQ ID NO: 1054343 - RNA, 22 nt, Human
gaggccaaucaauagggcaaua

SEQ ID NO: 1054344 - RNA, 22 nt, Human
uagggcuguuuaaaagugaggu

SEQ ID NO: 1054345 - RNA, 20 nt, Human
uuugucuguuaaguguuucu

SEQ ID NO: 1054346 - RNA, 22 nt, Human
uaaguucauaagcuuauucuua

SEQ ID NO: 1054347 - RNA, 22 nt, Human
agaguucugcucuucucaguga

SEQ ID NO: 1054348 - RNA, 22 nt, Human
aaggagaguacaggaguuggua

SEQ ID NO: 1054349 - RNA, 23 nt, Human
aacuccugaaucgugagccaucu

SEQ ID NO: 1054350 - RNA, 22 nt, Human
gggcagcuggauaguuuuaaau

SEQ ID NO: 1054351 - RNA, 22 nt, Human
ucaggaauccagacagggcaca

SEQ ID NO: 1054352 - RNA, 22 nt, Human
uggcucaguuucaguccugguu

SEQ ID NO: 1054353 - RNA, 18 nt, Human
uggcagcaggaagccauu

SEQ ID NO: 1054354 - RNA, 22 nt, Human
gcugccucccccauggcuggaa

SEQ ID NO: 1054355 - RNA, 22 nt, Human
gcccagggcugcaaguggacgc

SEQ ID NO: 1054356 - RNA, 22 nt, Human
agagccagcauuugacacuggc

SEQ ID NO: 1054357 - RNA, 20 nt, Human
gcccaggaauuugcauuucu

SEQ ID NO: 1054358 - RNA, 22 nt, Human
cggcagcugauugcagagcacc

SEQ ID NO: 1054359 - RNA, 22 nt, Human
gcaggcugugaggcucagaugg

SEQ ID NO: 1054360 - RNA, 22 nt, Human
aggccagcgcugcuagcucccg

SEQ ID NO: 1054361 - RNA, 22 nt, Human
uucuucuuuccuauaauuaauu

SEQ ID NO: 1054362 - RNA, 22 nt, Human
agaggccaggcugcagagggau

SEQ ID NO: 1054363 - RNA, 22 nt, Human
uaaccauauuuuccauuaaguu

SEQ ID NO: 1054364 - RNA, 22 nt, Human
uggaguuccuuugaaaggcucu

SEQ ID NO: 1054365 - RNA, 22 nt, Human
acuccuggguucuaaauuugaa

SEQ ID NO: 1054366 - RNA, 22 nt, Human
agcugaggccacgagugaaggg

SEQ ID NO: 1054367 - RNA, 22 nt, Human
auguuuccgugagcauccuuga

SEQ ID NO: 1054368 - RNA, 22 nt, Human
auuauauaggacuugcccuucc

SEQ ID NO: 1054369 - RNA, 22 nt, Human
aggacagcagugcuggcacuug

SEQ ID NO: 1054370 - RNA, 22 nt, Human
gcuggcugguccagcaggggcu

SEQ ID NO: 1054371 - RNA, 22 nt, Human
cacagcauaaugaaauauacuu

SEQ ID NO: 1054372 - RNA, 22 nt, Human
cuucucagcaugguuacuguga

SEQ ID NO: 1054373 - RNA, 22 nt, Human
uagcagaguaauacuuuggagc

SEQ ID NO: 1054374 - RNA, 19 nt, Human
cuggccaggccaggggccc

SEQ ID NO: 1054375 - RNA, 22 nt, Human
agaaggggagaagcuaccagga

SEQ ID NO: 1054376 - RNA, 22 nt, Human
agacucaagcagauaggaauua

SEQ ID NO: 1054377 - RNA, 22 nt, Human
ugcugaggaauuugguuuaugu

SEQ ID NO: 1054378 - RNA, 22 nt, Human
uuaauaggcuucuaacauagcu

SEQ ID NO: 1054379 - RNA, 23 nt, Human
ggccacaaauagucuccccuggc

SEQ ID NO: 1054380 - RNA, 22 nt, Human
ugagccaaacuucuccuugguc

SEQ ID NO: 1054381 - RNA, 22 nt, Human
gggagggguugcauguuugagu

SEQ ID NO: 1054382 - RNA, 22 nt, Human
ucccaggaauccguccucuaga

SEQ ID NO: 1054383 - RNA, 22 nt, Human
ucugccucuuucaggccuggca

SEQ ID NO: 1054384 - RNA, 22 nt, Human
cuauuaggcuuccauuucaugc

SEQ ID NO: 1054385 - RNA, 22 nt, Human
acacagaguauuuagaaggggu

SEQ ID NO: 1054386 - RNA, 22 nt, Human
uucacagauguauuggaacucc

SEQ ID NO: 1054387 - RNA, 22 nt, Human
agagagcauugaggaaaucuuc

SEQ ID NO: 1054388 - RNA, 22 nt, Human
uucuucaauuuuccauauacug

SEQ ID NO: 1054389 - RNA, 22 nt, Human
caggguggcacaucacagcauu

SEQ ID NO: 1054390 - RNA, 20 nt, Human
aggcucagcugagcucuugg

SEQ ID NO: 1054391 - RNA, 22 nt, Human
gaaauauuacaguggaggggau

SEQ ID NO: 1054392 - RNA, 22 nt, Human
uuauuuauaucucugcaguuua

SEQ ID NO: 1054393 - RNA, 22 nt, Human
aguguuugagacacauuucacu

SEQ ID NO: 1054394 - RNA, 22 nt, Human
cagucucucagcuuucagcugu

SEQ ID NO: 1054395 - RNA, 22 nt, Human
aacauuucagcaaauaagaaca

SEQ ID NO: 1054396 - RNA, 22 nt, Human
aucaggaucugcaucauaagaa

SEQ ID NO: 1054397 - RNA, 22 nt, Human
ccagagcugaggagaugggcuu

SEQ ID NO: 1054398 - RNA, 22 nt, Human
uuuguaugugauaagacuauuc

SEQ ID NO: 1054399 - RNA, 22 nt, Human
uugaacugguaguuggaaaucu

SEQ ID NO: 1054400 - RNA, 22 nt, Human
ggcugcagauagccagccacca

SEQ ID NO: 1054401 - RNA, 21 nt, Human
gcccagugauuucuucacagu

SEQ ID NO: 1054402 - RNA, 20 nt, Human
ugaaggccauuuguuccaga

SEQ ID NO: 1054403 - RNA, 20 nt, Human
cugagccaacucucuucuug

SEQ ID NO: 1054404 - RNA, 22 nt, Human
gagugcaguaugagaggcugcu

SEQ ID NO: 1054405 - RNA, 22 nt, Human
ggagggaaugucuagcauucuu

SEQ ID NO: 1054406 - RNA, 19 nt, Human
acaaaugauguugcacuga

SEQ ID NO: 1054407 - RNA, 22 nt, Human
aggcagcccacaggacacagga

SEQ ID NO: 1054408 - RNA, 19 nt, Human
auacacuaauauaaaccac

SEQ ID NO: 1054409 - RNA, 22 nt, Human
ugcacauuaguguuugagaugc

SEQ ID NO: 1054410 - RNA, 23 nt, Human
cagugcugguucugccugugggg

SEQ ID NO: 1054411 - RNA, 22 nt, Human
ggcaagaaggcuucagguagcu

SEQ ID NO: 1054412 - RNA, 19 nt, Human
augauacaggugaaaauug

SEQ ID NO: 1054413 - RNA, 22 nt, Human
uccaggagagguguggggacug

SEQ ID NO: 1054414 - RNA, 22 nt, Human
ucaggaugguccuuuaugagaa

SEQ ID NO: 1054415 - RNA, 17 nt, Human
uggcagcugaaagcucu

SEQ ID NO: 1054416 - RNA, 22 nt, Human
gucaggaugagggaugaggagu

SEQ ID NO: 1054417 - RNA, 22 nt, Human
cugagggugcuauucuugccuu

SEQ ID NO: 1054418 - RNA, 22 nt, Human
cugugccaguguauuccuguga

SEQ ID NO: 1054419 - RNA, 22 nt, Human
acuggcaggcugcuggccggcg

SEQ ID NO: 1054420 - RNA, 22 nt, Human
aggcagaugggagcuggaaguu

SEQ ID NO: 1054421 - RNA, 22 nt, Human
uucuuuuacauuaagauuucag

SEQ ID NO: 1054422 - RNA, 22 nt, Human
guuugcauauuugcacaggaau

SEQ ID NO: 1054423 - RNA, 22 nt, Human
guaaauaacugguaauuggggu

SEQ ID NO: 1054424 - RNA, 22 nt, Human
auugcuaggaacagguugcacc

SEQ ID NO: 1054425 - RNA, 22 nt, Human
auacacuugaccuggagugaag

SEQ ID NO: 1054426 - RNA, 21 nt, Human
aaaggccauaaucacggagca

SEQ ID NO: 1054427 - RNA, 22 nt, Human
ucucaggagccacagcgggagu

SEQ ID NO: 1054428 - RNA, 22 nt, Human
aagauggagcacgagcagaagc

SEQ ID NO: 1054429 - RNA, 22 nt, Human
ccccaggaagccucagauuugc

SEQ ID NO: 1054430 - RNA, 22 nt, Human
accaggagacaugaccaaugag

SEQ ID NO: 1054431 - RNA, 22 nt, Human
uacaaaaaauugauacugacga

SEQ ID NO: 1054432 - RNA, 22 nt, Human
cagcaagagaggcagggcaaau

SEQ ID NO: 1054433 - RNA, 22 nt, Human
gggcugagugaccucaggccaa

SEQ ID NO: 1054434 - RNA, 22 nt, Human
accaggaguagaauaucuguga

SEQ ID NO: 1054435 - RNA, 22 nt, Human
uucuuuggugggagauugaggu

SEQ ID NO: 1054436 - RNA, 22 nt, Human
uacuccugcugauccugccagc

SEQ ID NO: 1054437 - RNA, 23 nt, Human
uggagcugacagucagagggagg

SEQ ID NO: 1054438 - RNA, 22 nt, Human
uucaggaucacuaaacccucca

SEQ ID NO: 1054439 - RNA, 22 nt, Human
uuucaaaauuuugcagugguaa

SEQ ID NO: 1054440 - RNA, 22 nt, Human
cagaccucaguccucaguagga

SEQ ID NO: 1054441 - RNA, 22 nt, Human
gucuuugcugucuuugcucuca

SEQ ID NO: 1054442 - RNA, 22 nt, Human
ugaggggaacugaugcccauug

SEQ ID NO: 1054443 - RNA, 18 nt, Human
ucuuccaacacugacacc

SEQ ID NO: 1054444 - RNA, 22 nt, Human
acuccugggugcugaccagcgu

SEQ ID NO: 1054445 - RNA, 22 nt, Human
acuuucugucaucuagacaagu

SEQ ID NO: 1054446 - RNA, 22 nt, Human
guuuuauuggaacacagccaug

SEQ ID NO: 1054447 - RNA, 19 nt, Human
uagaagcacuaggcaaacu

SEQ ID NO: 1054448 - RNA, 22 nt, Human
ugaaucugauuucccuggaggc

SEQ ID NO: 1054449 - RNA, 23 nt, Human
agaggcaggaguggcuugcccgg

SEQ ID NO: 1054450 - RNA, 22 nt, Human
gcaucuaauccaguccagcauc

SEQ ID NO: 1054451 - RNA, 22 nt, Human
cccucccugaagaaguuacucu

SEQ ID NO: 1054452 - RNA, 22 nt, Human
cagaggcagccgggggagaacg

SEQ ID NO: 1054453 - RNA, 22 nt, Human
aaauacuggcaagugcuaauuc

SEQ ID NO: 1054454 - RNA, 22 nt, Human
uugacaauguccuuugaauuuc

SEQ ID NO: 1054455 - RNA, 22 nt, Human
acacaaaaucaaaguccuaggc

SEQ ID NO: 1054456 - RNA, 22 nt, Human
ugcugagguuucugacuaugga

SEQ ID NO: 1054457 - RNA, 22 nt, Human
ccaggagagcaaaggucacucu

SEQ ID NO: 1054458 - RNA, 22 nt, Human
aucugcagaggacaggcgagga

SEQ ID NO: 1054459 - RNA, 22 nt, Human
aaaaauacuucacuucugggug

SEQ ID NO: 1054460 - RNA, 22 nt, Human
gcugaggcugggagcagccugu

SEQ ID NO: 1054461 - RNA, 22 nt, Human
uuauucuuuaaacauauauguu

SEQ ID NO: 1054462 - RNA, 22 nt, Human
ucacagacacagggagaagcau

SEQ ID NO: 1054463 - RNA, 22 nt, Human
cagcaggauuugaaaggaagag

SEQ ID NO: 1054464 - RNA, 22 nt, Human
cagucucagaggugggaguggg

SEQ ID NO: 1054465 - RNA, 22 nt, Human
ugaaagcagcaccaauaccauu

SEQ ID NO: 1054466 - RNA, 22 nt, Human
gccugaccucuucugcccuggg

SEQ ID NO: 1054467 - RNA, 22 nt, Human
aaagacuuggcuuaugauuugc

SEQ ID NO: 1054468 - RNA, 22 nt, Human
gggcacagaagucuaagacauc

SEQ ID NO: 1054469 - RNA, 18 nt, Human
aggauauuaagaguacag

SEQ ID NO: 1054470 - RNA, 22 nt, Human
uuauuuacaacucuucucuucc

SEQ ID NO: 1054471 - RNA, 22 nt, Human
aggcugaggcggguagaucacc

SEQ ID NO: 1054472 - RNA, 20 nt, Human
gcugaggauuccuggccccu

SEQ ID NO: 1054473 - RNA, 22 nt, Human
uaguuaaaauaauggagauguu

SEQ ID NO: 1054474 - RNA, 22 nt, Human
ggccacagcaaugcugugaugu

SEQ ID NO: 1054475 - RNA, 22 nt, Human
aaggcugaguaaaacagagaac

SEQ ID NO: 1054476 - RNA, 22 nt, Human
ucugcagggaugugagggguga

SEQ ID NO: 1054477 - RNA, 22 nt, Human
uuuauuagugcuuguaucacug

SEQ ID NO: 1054478 - RNA, 22 nt, Human
agggacccauagagagaccagu

SEQ ID NO: 1054479 - RNA, 22 nt, Human
uguaaucauuacaguacaugga

SEQ ID NO: 1054480 - RNA, 22 nt, Human
ccucaggaaaugaauaaauggc

SEQ ID NO: 1054481 - RNA, 22 nt, Human
aagggcaggagaagacggauau

SEQ ID NO: 1054482 - RNA, 22 nt, Human
auuagagcaguguauuaugaua

SEQ ID NO: 1054483 - RNA, 22 nt, Human
uggcugaggcuuuucuuaaaga

SEQ ID NO: 1054484 - RNA, 22 nt, Human
cccuggaggcggagcuugcagu

SEQ ID NO: 1054485 - RNA, 18 nt, Human
auggucucauacugggag

SEQ ID NO: 1054486 - RNA, 22 nt, Human
agcagagguguuuauuauggga

SEQ ID NO: 1054487 - RNA, 22 nt, Human
gugcugagcaucaugaggcacu

SEQ ID NO: 1054488 - RNA, 22 nt, Human
aggcacagcacaccuggccccc

SEQ ID NO: 1054489 - RNA, 22 nt, Human
gcuucugaggaaggcucagccu

SEQ ID NO: 1054490 - RNA, 22 nt, Human
ggagaggggcaaguuuaucuag

SEQ ID NO: 1054491 - RNA, 22 nt, Human
ugcacuucauuguaaauuguac

SEQ ID NO: 1054492 - RNA, 22 nt, Human
augggaggaugcucgggugcuc

SEQ ID NO: 1054493 - RNA, 23 nt, Human
ugcuggcuguguuauugccaaca

SEQ ID NO: 1054494 - RNA, 22 nt, Human
gugcugaguagaaugaaugccu

SEQ ID NO: 1054495 - RNA, 22 nt, Human
caggcugaggcaguaggguuug

SEQ ID NO: 1054496 - RNA, 22 nt, Human
uguuugaauuuugcuaacgugu

SEQ ID NO: 1054497 - RNA, 22 nt, Human
cucaguuuuugcugucugguuc

SEQ ID NO: 1054498 - RNA, 22 nt, Human
aggcugaggugugcugugaucg

SEQ ID NO: 1054499 - RNA, 22 nt, Human
gacugaggugaccuaggacuac

SEQ ID NO: 1054500 - RNA, 22 nt, Human
gggcugagggguaucucauggg

SEQ ID NO: 1054501 - RNA, 22 nt, Human
uuuguaaauagcaguacucaug

SEQ ID NO: 1054502 - RNA, 22 nt, Human
aaccauuugcaguuacugagac

SEQ ID NO: 1054503 - RNA, 20 nt, Human
ugacuucugggauuuguggu

SEQ ID NO: 1054504 - RNA, 22 nt, Human
auucuucaguauguguggauug

SEQ ID NO: 1054505 - RNA, 22 nt, Human
ugcugcucgccacggcccaggg

SEQ ID NO: 1054506 - RNA, 22 nt, Human
aaauuaacuaucacuuuuguga

SEQ ID NO: 1054507 - RNA, 18 nt, Human
cugaauuaucucaucauu

SEQ ID NO: 1054508 - RNA, 22 nt, Human
uaauuauacaaaaaggcaugca

SEQ ID NO: 1054509 - RNA, 22 nt, Human
cagccuuuaagcuuggauaggu

SEQ ID NO: 1054510 - RNA, 21 nt, Human
uuuuauugaugaauggccacu

SEQ ID NO: 1054511 - RNA, 22 nt, Human
ugacauaauaauccaaacauac

SEQ ID NO: 1054512 - RNA, 22 nt, Human
ccaggcugugguuuagauagag

SEQ ID NO: 1054513 - RNA, 18 nt, Human
agucuucugauccauuuu

SEQ ID NO: 1054514 - RNA, 22 nt, Human
agccuaaugcuuuucccaaagu

SEQ ID NO: 1054515 - RNA, 22 nt, Human
uuagagucaaaauggcauguua

SEQ ID NO: 1054516 - RNA, 22 nt, Human
ccagagcuccagggcuacagaa

SEQ ID NO: 1054517 - RNA, 22 nt, Human
agaugcugccaggccccucagu

SEQ ID NO: 1054518 - RNA, 22 nt, Human
auaaucuuguauuuccuaaagu

SEQ ID NO: 1054519 - RNA, 22 nt, Human
ucaggagaaaauaucaggaagu

SEQ ID NO: 1054520 - RNA, 22 nt, Human
gagguagcaugcuggaagggac

SEQ ID NO: 1054521 - RNA, 18 nt, Human
uuccaugauuccuuucac

SEQ ID NO: 1054522 - RNA, 22 nt, Human
gcucccagcaauugaggcagcc

SEQ ID NO: 1054523 - RNA, 22 nt, Human
auacuuucugaccaauuaauug

SEQ ID NO: 1054524 - RNA, 22 nt, Human
auuucagguaccugugggaucc

SEQ ID NO: 1054525 - RNA, 19 nt, Human
ucccucccuguaaucucac

SEQ ID NO: 1054526 - RNA, 22 nt, Human
guuuuauaauugcuucauaaga

SEQ ID NO: 1054527 - RNA, 22 nt, Human
aagaaguuaaauaaauggacca

SEQ ID NO: 1054528 - RNA, 22 nt, Human
uagcacauacauaauagauaga

SEQ ID NO: 1054529 - RNA, 22 nt, Human
gacuucuauuaauaccucuacu

SEQ ID NO: 1054530 - RNA, 22 nt, Human
agacaggagagggaacugccgg

SEQ ID NO: 1054531 - RNA, 22 nt, Human
ucagagagccucaggcacugcc

SEQ ID NO: 1054532 - RNA, 23 nt, Human
uuaaguggucaguuuuagacaac

SEQ ID NO: 1054533 - RNA, 22 nt, Human
uuaggaaagcauuguguaaaag

SEQ ID NO: 1054534 - RNA, 22 nt, Human
gaaauacuguaaaguuauuauu

SEQ ID NO: 1054535 - RNA, 22 nt, Human
aagggcugagcacagugagcca

SEQ ID NO: 1054536 - RNA, 23 nt, Human
uggcagcuguguaagagaaagca

SEQ ID NO: 1054537 - RNA, 22 nt, Human
cuggugagacucagggaugcuu

SEQ ID NO: 1054538 - RNA, 22 nt, Human
auuauggacguuaauuuuggaa

SEQ ID NO: 1054539 - RNA, 22 nt, Human
gaaauauucuugucuuguuuuc

SEQ ID NO: 1054540 - RNA, 22 nt, Human
caaggccaaagggccacuguca

SEQ ID NO: 1054541 - RNA, 22 nt, Human
cagcuguggcugccacugcucc

SEQ ID NO: 1054542 - RNA, 22 nt, Human
auuuccagugcacugaauagaa

SEQ ID NO: 1054543 - RNA, 22 nt, Human
ugacagguucguuagucauguu

SEQ ID NO: 1054544 - RNA, 22 nt, Human
acauguaaaaauuaagguaaga

SEQ ID NO: 1054545 - RNA, 22 nt, Human
uagagcaguggguaccauggca

SEQ ID NO: 1054546 - RNA, 22 nt, Human
accuuauuaaaaugaugaugua

SEQ ID NO: 1054547 - RNA, 22 nt, Human
ucuggcaggcaaucggcucugg

SEQ ID NO: 1054548 - RNA, 22 nt, Human
uuaacaauagaguuucuucagg

SEQ ID NO: 1054549 - RNA, 22 nt, Human
cagaaguuggagcuuuccauca

SEQ ID NO: 1054550 - RNA, 22 nt, Human
aacacuuuuuauauauuguauc

SEQ ID NO: 1054551 - RNA, 22 nt, Human
aggcagccaucugcaggaagga

SEQ ID NO: 1054552 - RNA, 22 nt, Human
cccuccccacaaagcuucacac

SEQ ID NO: 1054553 - RNA, 22 nt, Human
uuuaaauuuagaagaaacacug

SEQ ID NO: 1054554 - RNA, 22 nt, Human
gugcauuugacgaauacucacu

SEQ ID NO: 1054555 - RNA, 22 nt, Human
agcugaggcauggacaggcugc

SEQ ID NO: 1054556 - RNA, 22 nt, Human
acaaauaugguacucggagaaa

SEQ ID NO: 1054557 - RNA, 22 nt, Human
cugcuguccaggagugcccugu

SEQ ID NO: 1054558 - RNA, 22 nt, Human
uccugugccuccaccugcuccg

SEQ ID NO: 1054559 - RNA, 22 nt, Human
ugaggccucugaggccuaggcu

SEQ ID NO: 1054560 - RNA, 22 nt, Human
cugcaucaguggauaugauggu

SEQ ID NO: 1054561 - RNA, 22 nt, Human
agggagcucaguuggaagcggu

SEQ ID NO: 1054562 - RNA, 19 nt, Human
agucuggaguaaaaggaau

SEQ ID NO: 1054563 - RNA, 22 nt, Human
ucaggcugauuucuuuugaggg

SEQ ID NO: 1054564 - RNA, 22 nt, Human
ugcccacauggugccauggcca

SEQ ID NO: 1054565 - RNA, 22 nt, Human
gcagagcuccccaagacaccaa

SEQ ID NO: 1054566 - RNA, 20 nt, Human
acuccugguaacuuuuguga

SEQ ID NO: 1054567 - RNA, 22 nt, Human
uuaacauuguccuuagcagauu

SEQ ID NO: 1054568 - RNA, 22 nt, Human
aucccaugagaccacguuggcu

SEQ ID NO: 1054569 - RNA, 22 nt, Human
gcugagggaggcugaacugagu

SEQ ID NO: 1054570 - RNA, 22 nt, Human
aaggcagcuuuaaaaaagaugc

SEQ ID NO: 1054571 - RNA, 22 nt, Human
uggaguucucaggugagggcuu

SEQ ID NO: 1054572 - RNA, 23 nt, Human
aaggccagaauuucaauggugcc

SEQ ID NO: 1054573 - RNA, 18 nt, Human
augggaggggccaagaga

SEQ ID NO: 1054574 - RNA, 22 nt, Human
acuggcagcagcagcccuuggg

SEQ ID NO: 1054575 - RNA, 22 nt, Human
cccaggagagggaaccaaaugu

SEQ ID NO: 1054576 - RNA, 22 nt, Human
uucucagagcucacuguaguaa

SEQ ID NO: 1054577 - RNA, 22 nt, Human
caagauggaguccgggaaugug

SEQ ID NO: 1054578 - RNA, 22 nt, Human
ucacagaaaucuguuuuuucua

SEQ ID NO: 1054579 - RNA, 22 nt, Human
gaaacugugaggaucuuaacuu

SEQ ID NO: 1054580 - RNA, 22 nt, Human
cugcuuugauuagaagaguaca

SEQ ID NO: 1054581 - RNA, 22 nt, Human
gcaucuaaacuugcaucauugu

SEQ ID NO: 1054582 - RNA, 22 nt, Human
uuacuuugcuuucucauuacag

SEQ ID NO: 1054583 - RNA, 22 nt, Human
gcaggcugaugacuggaguugg

SEQ ID NO: 1054584 - RNA, 22 nt, Human
cugagguaugugggacuagccu

SEQ ID NO: 1054585 - RNA, 22 nt, Human
ugaguuuugucuugcuagaagu

SEQ ID NO: 1054586 - RNA, 22 nt, Human
guuuucaaggggauuuaacuga

SEQ ID NO: 1054587 - RNA, 22 nt, Human
auuuauuaccucggaguuucug

SEQ ID NO: 1054588 - RNA, 22 nt, Human
ggaggugggauuaggaccuaaa

SEQ ID NO: 1054589 - RNA, 22 nt, Human
cuugaaagauuuggccucugug

SEQ ID NO: 1054590 - RNA, 23 nt, Human
uggcaaggaaugggauggagacu

SEQ ID NO: 1054591 - RNA, 22 nt, Human
uagcaagaagggagaugggguu

SEQ ID NO: 1054592 - RNA, 22 nt, Human
agaggauguucuaggcacucau

SEQ ID NO: 1054593 - RNA, 22 nt, Human
ugccacagagcaauucugcuga

SEQ ID NO: 1054594 - RNA, 22 nt, Human
uugaauaggacucagcagugau

SEQ ID NO: 1054595 - RNA, 22 nt, Human
cccaggaauuggaggcugcagu

SEQ ID NO: 1054596 - RNA, 22 nt, Human
uugcacuaggaaaaggcagcca

SEQ ID NO: 1054597 - RNA, 22 nt, Human
ucuggccaacccucaaguugua

SEQ ID NO: 1054598 - RNA, 22 nt, Human
gcugguuuccuuaucuauaaag

SEQ ID NO: 1054599 - RNA, 22 nt, Human
aacuucugggcuguccaaaacu

SEQ ID NO: 1054600 - RNA, 22 nt, Human
caggcagcucaaccuugggagc

SEQ ID NO: 1054601 - RNA, 17 nt, Human
uuucaucugggaccacc

SEQ ID NO: 1054602 - RNA, 22 nt, Human
cccaggaaaugaacuucugauu

SEQ ID NO: 1054603 - RNA, 22 nt, Human
gcuucccacagcuggacugggg

SEQ ID NO: 1054604 - RNA, 21 nt, Human
aggcaucuaaagagaguagac

SEQ ID NO: 1054605 - RNA, 22 nt, Human
cagcagagaccaagugauuuga

SEQ ID NO: 1054606 - RNA, 22 nt, Human
agggcagcagcggcccaggccu

SEQ ID NO: 1054607 - RNA, 22 nt, Human
gggcagcucucacagcagccaa

SEQ ID NO: 1054608 - RNA, 22 nt, Human
ugucagagcaaugagguucagc

SEQ ID NO: 1054609 - RNA, 22 nt, Human
agcagagccugggcuaggggug

SEQ ID NO: 1054610 - RNA, 22 nt, Human
cuggccacugguggucauaggc

SEQ ID NO: 1054611 - RNA, 22 nt, Human
ucauuuguugcuguuaccugag

SEQ ID NO: 1054612 - RNA, 20 nt, Human
gcugagguuucuuccuauau

SEQ ID NO: 1054613 - RNA, 22 nt, Human
aggcugagauagguggaucauu

SEQ ID NO: 1054614 - RNA, 22 nt, Human
ccuccuggguucaagcgauucu

SEQ ID NO: 1054615 - RNA, 22 nt, Human
gcuccuggcuccaggcagccaa

SEQ ID NO: 1054616 - RNA, 22 nt, Human
cggcagcuccgcgccguaggac

SEQ ID NO: 1054617 - RNA, 22 nt, Human
ucagugugaggucuuccacccg

SEQ ID NO: 1054618 - RNA, 22 nt, Human
auggccaagcauauacagauug

SEQ ID NO: 1054619 - RNA, 22 nt, Human
ggccaaauuuggccaugagcau

SEQ ID NO: 1054620 - RNA, 22 nt, Human
ccuggccauagggcccaggaaa

SEQ ID NO: 1054621 - RNA, 22 nt, Human
cccaucacagacacuggguuau

SEQ ID NO: 1054622 - RNA, 22 nt, Human
cucaacagcucugccauacucc

SEQ ID NO: 1054623 - RNA, 19 nt, Human
uuugcagugguuccuuugu

SEQ ID NO: 1054624 - RNA, 22 nt, Human
gacuuuauuuccuuauuuguga

SEQ ID NO: 1054625 - RNA, 22 nt, Human
uaguuacagaagauaaggguau

SEQ ID NO: 1054626 - RNA, 22 nt, Human
auguuucagauacagaucaaau

SEQ ID NO: 1054627 - RNA, 22 nt, Human
ggguggagcuuggacaccagua

SEQ ID NO: 1054628 - RNA, 19 nt, Human
aaacuaaggggaaauguuu

SEQ ID NO: 1054629 - RNA, 22 nt, Human
ccagagagauugcuucuaaaga

SEQ ID NO: 1054630 - RNA, 22 nt, Human
ggcugagccaugggcacugcag

SEQ ID NO: 1054631 - RNA, 22 nt, Human
gaaggccauugcguccugggau

SEQ ID NO: 1054632 - RNA, 22 nt, Human
auguucuuucagccagugcauc

SEQ ID NO: 1054633 - RNA, 22 nt, Human
gaggagagccugcacuuugacc

SEQ ID NO: 1054634 - RNA, 22 nt, Human
acaucugacaugaucuucagua

SEQ ID NO: 1054635 - RNA, 20 nt, Human
acuaaucauccagucacagu

SEQ ID NO: 1054636 - RNA, 22 nt, Human
acagucuggaagcagggggcaa

SEQ ID NO: 1054637 - RNA, 22 nt, Human
caaguaaacaauaugugauuca

SEQ ID NO: 1054638 - RNA, 22 nt, Human
auuagguaagauaaagcagagg

SEQ ID NO: 1054639 - RNA, 22 nt, Human
uaacuacaagggcggucucugu

SEQ ID NO: 1054640 - RNA, 22 nt, Human
aaaggaagaugccaggacucug

SEQ ID NO: 1054641 - RNA, 22 nt, Human
uaaugucagcauaguuuauuuu

SEQ ID NO: 1054642 - RNA, 22 nt, Human
ucugugccaccucuccaguguc

SEQ ID NO: 1054643 - RNA, 22 nt, Human
cuccuggaagcccgcccugcug

SEQ ID NO: 1054644 - RNA, 20 nt, Human
uaguccaguaggggggcuuu

SEQ ID NO: 1054645 - RNA, 22 nt, Human
cuccuggcuucugaaaucgugg

SEQ ID NO: 1054646 - RNA, 22 nt, Human
uuucaaaguugggaauuguaau

SEQ ID NO: 1054647 - RNA, 22 nt, Human
cccagcugauuuuugcagagau

SEQ ID NO: 1054648 - RNA, 18 nt, Human
cugaggcuuagagagguu

SEQ ID NO: 1054649 - RNA, 22 nt, Human
uaggcuggaacuuaggcagagg

SEQ ID NO: 1054650 - RNA, 22 nt, Human
uauuucagucacuucuucucug

SEQ ID NO: 1054651 - RNA, 22 nt, Human
uugaggucccaaacccacugag

SEQ ID NO: 1054652 - RNA, 22 nt, Human
agggggugcccagaugaaggau

SEQ ID NO: 1054653 - RNA, 22 nt, Human
uaggagaggugaauggcacacu

SEQ ID NO: 1054654 - RNA, 22 nt, Human
gcuccucuucucccacugaaug

SEQ ID NO: 1054655 - RNA, 22 nt, Human
agcagcugauggggaaggaguu

SEQ ID NO: 1054656 - RNA, 21 nt, Human
acagacagggccagugucccc

SEQ ID NO: 1054657 - RNA, 23 nt, Human
ugccucaguggaaugugagggug

SEQ ID NO: 1054658 - RNA, 22 nt, Human
cccagcaguaaccaguggaaau

SEQ ID NO: 1054659 - RNA, 22 nt, Human
ccucagggaaugggaggcuggg

SEQ ID NO: 1054660 - RNA, 22 nt, Human
cccugccuacaggguuuucuuu

SEQ ID NO: 1054661 - RNA, 22 nt, Human
agcauacaguugaaaguggcuu

SEQ ID NO: 1054662 - RNA, 22 nt, Human
ucuuagaaauuccccaguggcu

SEQ ID NO: 1054663 - RNA, 22 nt, Human
aggcugagcuggcccuugaaau

SEQ ID NO: 1054664 - RNA, 20 nt, Human
caguccaaucagaggccacc

SEQ ID NO: 1054665 - RNA, 22 nt, Human
uagacagauuuaaaggaaugga

SEQ ID NO: 1054666 - RNA, 22 nt, Human
aaaggccaugguuggaguguuu

SEQ ID NO: 1054667 - RNA, 22 nt, Human
ucucuucuagcuucuugugguu

SEQ ID NO: 1054668 - RNA, 22 nt, Human
auuugcuugugcuaugaaaguu

SEQ ID NO: 1054669 - RNA, 22 nt, Human
cugcugugcacccaggaaggcu

SEQ ID NO: 1054670 - RNA, 22 nt, Human
guuuuucuaggaccaugugauu

SEQ ID NO: 1054671 - RNA, 22 nt, Human
cagcgucucguugugggccucg

SEQ ID NO: 1054672 - RNA, 23 nt, Human
gagugcagaauagacaugcagug

SEQ ID NO: 1054673 - RNA, 22 nt, Human
ucgagcucuggagccaaggaug

SEQ ID NO: 1054674 - RNA, 22 nt, Human
caaauacuuuuagccuauugag

SEQ ID NO: 1054675 - RNA, 22 nt, Human
gcucucuuuuuccagugguggu

SEQ ID NO: 1054676 - RNA, 22 nt, Human
auuguauaacagcauguauuuu

SEQ ID NO: 1054677 - RNA, 22 nt, Human
uucuuauucuugaaauguggga

SEQ ID NO: 1054678 - RNA, 22 nt, Human
cacacuuuuggcauguuugguu

SEQ ID NO: 1054679 - RNA, 22 nt, Human
gacuuucugcuauacuuucugu

SEQ ID NO: 1054680 - RNA, 22 nt, Human
aaaggccaagcaugagguggac

SEQ ID NO: 1054681 - RNA, 22 nt, Human
cuauuagguuggugcaaaagua

SEQ ID NO: 1054682 - RNA, 22 nt, Human
uugagaagaggcuuuguaggaa

SEQ ID NO: 1054683 - RNA, 22 nt, Human
auuuaaauuuucugauggagag

SEQ ID NO: 1054684 - RNA, 22 nt, Human
cucaggauguacuacagaaggc

SEQ ID NO: 1054685 - RNA, 22 nt, Human
ucuuggcugucuuugaaguuag

SEQ ID NO: 1054686 - RNA, 22 nt, Human
gagggagggacuagcauucucu

SEQ ID NO: 1054687 - RNA, 22 nt, Human
aggcagugcugugcccugaacc

SEQ ID NO: 1054688 - RNA, 22 nt, Human
cauggagauaaacugaaauauu

SEQ ID NO: 1054689 - RNA, 22 nt, Human
ucaggcugggcuccucucccca

SEQ ID NO: 1054690 - RNA, 22 nt, Human
uacaacauuguguugcuucaua

SEQ ID NO: 1054691 - RNA, 22 nt, Human
uccaccagagccuucccaugcu

SEQ ID NO: 1054692 - RNA, 22 nt, Human
caguugcuggaugugcagcucu

SEQ ID NO: 1054693 - RNA, 22 nt, Human
uuuaauuaggaaaugggcaggg

SEQ ID NO: 1054694 - RNA, 22 nt, Human
cagggcuggcucaugaaaaguu

SEQ ID NO: 1054695 - RNA, 22 nt, Human
uacauguauguguuaauaucug

SEQ ID NO: 1054696 - RNA, 22 nt, Human
uaagaugagguagguaagacuu

SEQ ID NO: 1054697 - RNA, 22 nt, Human
cuguuuaucuaggaguugcagg

SEQ ID NO: 1054698 - RNA, 22 nt, Human
caguggagagacuuuuacucuu

SEQ ID NO: 1054699 - RNA, 22 nt, Human
gagggcauaguuaaauaggagg

SEQ ID NO: 1054700 - RNA, 22 nt, Human
ucagcugcucaaauuuauguca

SEQ ID NO: 1054701 - RNA, 22 nt, Human
ucugugcucauucagucauuca

SEQ ID NO: 1054702 - RNA, 22 nt, Human
agcugaaagugcuuugaggacu

SEQ ID NO: 1054703 - RNA, 22 nt, Human
gacugguaagguauuggaauuc

SEQ ID NO: 1054704 - RNA, 22 nt, Human
aucacugucgucaucugagauu

SEQ ID NO: 1054705 - RNA, 22 nt, Human
uuccuggcauagagagggcaca

SEQ ID NO: 1054706 - RNA, 22 nt, Human
gcucccagacugaccagaggug

SEQ ID NO: 1054707 - RNA, 22 nt, Human
gaccauuucuaggaaucagacu

SEQ ID NO: 1054708 - RNA, 22 nt, Human
agaaaugacaagacugaucagg

SEQ ID NO: 1054709 - RNA, 22 nt, Human
acccaggacaaaauaaccaggu

SEQ ID NO: 1054710 - RNA, 17 nt, Human
uucugagccacuuccuu

SEQ ID NO: 1054711 - RNA, 22 nt, Human
ugauugaagaggugaggaaguu

SEQ ID NO: 1054712 - RNA, 22 nt, Human
cagaaguuugcaauuguuuauu

SEQ ID NO: 1054713 - RNA, 22 nt, Human
ucccaggauguuuauggcuggu

SEQ ID NO: 1054714 - RNA, 22 nt, Human
uaugaacucuggagucugagug

SEQ ID NO: 1054715 - RNA, 22 nt, Human
uaacugguuaagggugaaaucc

SEQ ID NO: 1054716 - RNA, 18 nt, Human
uggcagagugucuguucu

SEQ ID NO: 1054717 - RNA, 22 nt, Human
uuaguuuucccaucuuuauggu

SEQ ID NO: 1054718 - RNA, 22 nt, Human
auaaagauuucuuuuucucuac

SEQ ID NO: 1054719 - RNA, 22 nt, Human
ugcugcugcuucuguacagccu

SEQ ID NO: 1054720 - RNA, 22 nt, Human
uaaagugguggugcuaauguau

SEQ ID NO: 1054721 - RNA, 22 nt, Human
uuucccagagguaugaauaagu

SEQ ID NO: 1054722 - RNA, 22 nt, Human
uaaccuuuguucaauguaagau

SEQ ID NO: 1054723 - RNA, 22 nt, Human
uuauuacacugaaagaauugcg

SEQ ID NO: 1054724 - RNA, 22 nt, Human
cuuuauuagauguagacuuucu

SEQ ID NO: 1054725 - RNA, 22 nt, Human
cauggcugaaauucuucgcuug

SEQ ID NO: 1054726 - RNA, 20 nt, Human
uugauaggcagcuugucagg

SEQ ID NO: 1054727 - RNA, 22 nt, Human
uuugaaagcuacuuucggguca

SEQ ID NO: 1054728 - RNA, 22 nt, Human
ucaggagacaaagggugcggag

SEQ ID NO: 1054729 - RNA, 22 nt, Human
cugaggcuggcguuugaggaag

SEQ ID NO: 1054730 - RNA, 22 nt, Human
gcccucccuacagccuauuucu

SEQ ID NO: 1054731 - RNA, 22 nt, Human
cacugguguauuagagcuagaa

SEQ ID NO: 1054732 - RNA, 18 nt, Human
agcagcugugccacacug

SEQ ID NO: 1054733 - RNA, 22 nt, Human
agaaauucaauucuaauuagcu

SEQ ID NO: 1054734 - RNA, 22 nt, Human
ggcuagaguggaacuggagcgg

SEQ ID NO: 1054735 - RNA, 22 nt, Human
cuucuucaauagcaagcgcaua

SEQ ID NO: 1054736 - RNA, 22 nt, Human
ggcaggcugggugucauggagu

SEQ ID NO: 1054737 - RNA, 20 nt, Human
gggugggagagucugagggu

SEQ ID NO: 1054738 - RNA, 22 nt, Human
uauuucuaagagauaucuguac

SEQ ID NO: 1054739 - RNA, 22 nt, Human
gaucauuugcaggaaacauuaa

SEQ ID NO: 1054740 - RNA, 19 nt, Human
cacaauuaugagacacuua

SEQ ID NO: 1054741 - RNA, 21 nt, Human
aucacauuggcuguuauuauu

SEQ ID NO: 1054742 - RNA, 22 nt, Human
ugaaacagcuaucaguagacug

SEQ ID NO: 1054743 - RNA, 22 nt, Human
aggcaggcugcuauggaguaga

SEQ ID NO: 1054744 - RNA, 22 nt, Human
uuuucauuguuacuaugagcua

SEQ ID NO: 1054745 - RNA, 22 nt, Human
gccaggaggcuuaacuggacag

SEQ ID NO: 1054746 - RNA, 16 nt, Human
uucuagaaaagaaggu

SEQ ID NO: 1054747 - RNA, 23 nt, Human
uauacacauguggcaguauagug

SEQ ID NO: 1054748 - RNA, 22 nt, Human
uucugagguccaugcaguacug

SEQ ID NO: 1054749 - RNA, 22 nt, Human
cuuuugauaguugcugagcagg

SEQ ID NO: 1054750 - RNA, 22 nt, Human
ggacccugggcucugggccuau

SEQ ID NO: 1054751 - RNA, 22 nt, Human
uuugacaucuaagaauucuuac

SEQ ID NO: 1054752 - RNA, 19 nt, Human
ugcccaggccagguugggc

SEQ ID NO: 1054753 - RNA, 22 nt, Human
uuggcagcauccaagucucggg

SEQ ID NO: 1054754 - RNA, 20 nt, Human
aggcaccugucacaggugag

SEQ ID NO: 1054755 - RNA, 22 nt, Human
auuuaaaugcuuaagaggguuu

SEQ ID NO: 1054756 - RNA, 22 nt, Human
aggcuagcaaugggagaugagu

SEQ ID NO: 1054757 - RNA, 22 nt, Human
aaauuuucagagcacuagagaa

SEQ ID NO: 1054758 - RNA, 22 nt, Human
guugacagaaaaauaacauagc

SEQ ID NO: 1054759 - RNA, 23 nt, Human
accaggagaaaagcuuugcggga

SEQ ID NO: 1054760 - RNA, 22 nt, Human
caaggaaaagaaguauuucaga

SEQ ID NO: 1054761 - RNA, 18 nt, Human
ugaggcccgcagaggugg

SEQ ID NO: 1054762 - RNA, 22 nt, Human
gugggagcuuuggcaucaggcu

SEQ ID NO: 1054763 - RNA, 20 nt, Human
ugaggcaggagaauggcaug

SEQ ID NO: 1054764 - RNA, 19 nt, Human
ugaguucugugguucucaa

SEQ ID NO: 1054765 - RNA, 23 nt, Human
acugucugauauguuuuccauca

SEQ ID NO: 1054766 - RNA, 22 nt, Human
uacaucuagccuuacaauuauu

SEQ ID NO: 1054767 - RNA, 22 nt, Human
agcagaggaggauuuaguuagg

SEQ ID NO: 1054768 - RNA, 22 nt, Human
ucugugccucaucugguucagg

SEQ ID NO: 1054769 - RNA, 22 nt, Human
ugaggucugcagggcugugcau

SEQ ID NO: 1054770 - RNA, 22 nt, Human
aacuguaauuuuuacauaguaa

SEQ ID NO: 1054771 - RNA, 22 nt, Human
aggcaggcucaggcccaugcuu

SEQ ID NO: 1054772 - RNA, 22 nt, Human
guuuuauuuccaugagagaccg

SEQ ID NO: 1054773 - RNA, 22 nt, Human
auuauacauuuuguguagagau

SEQ ID NO: 1054774 - RNA, 22 nt, Human
aauaucagcacuuuugugguau

SEQ ID NO: 1054775 - RNA, 22 nt, Human
uggcugagaaguucugguggga

SEQ ID NO: 1054776 - RNA, 22 nt, Human
gaaauuauugcuagagacugca

SEQ ID NO: 1054777 - RNA, 22 nt, Human
ggucugaguagagggcuggcga

SEQ ID NO: 1054778 - RNA, 19 nt, Human
aggcuggagacaccaggcc

SEQ ID NO: 1054779 - RNA, 22 nt, Human
agcagacauaucucaugucaca

SEQ ID NO: 1054780 - RNA, 22 nt, Human
gcaccugauugauuucacugcu

SEQ ID NO: 1054781 - RNA, 22 nt, Human
uuagaaagcuuuccauagucaa

SEQ ID NO: 1054782 - RNA, 20 nt, Human
gugcugagggcugggcaaug

SEQ ID NO: 1054783 - RNA, 22 nt, Human
ccuccugggacucauuagcacc

SEQ ID NO: 1054784 - RNA, 22 nt, Human
auugaaagauauacuguucuca

SEQ ID NO: 1054785 - RNA, 22 nt, Human
caguuucuuggaugccaauuuc

SEQ ID NO: 1054786 - RNA, 23 nt, Human
ucugagguccaccaguuugcaga

SEQ ID NO: 1054787 - RNA, 22 nt, Human
caaauagugucacauugugagg

SEQ ID NO: 1054788 - RNA, 22 nt, Human
aaucuucuuucuuaacaguaca

SEQ ID NO: 1054789 - RNA, 22 nt, Human
agggaagcccuggcugagaccc

SEQ ID NO: 1054790 - RNA, 22 nt, Human
uggggcuccuccuggcaggagg

SEQ ID NO: 1054791 - RNA, 22 nt, Human
gcccaggaaagauagggccuca

SEQ ID NO: 1054792 - RNA, 22 nt, Human
ugaggcagucacccccuccugc

SEQ ID NO: 1054793 - RNA, 22 nt, Human
uggcuucuugggaugggucauu

SEQ ID NO: 1054794 - RNA, 22 nt, Human
gggcagcucugcccaucagagg

SEQ ID NO: 1054795 - RNA, 22 nt, Human
ccaggagagcaggcgugcagcu

SEQ ID NO: 1054796 - RNA, 22 nt, Human
gaaucucaaggcuugugaggau

SEQ ID NO: 1054797 - RNA, 22 nt, Human
ggacuucuggggacuguagauu

SEQ ID NO: 1054798 - RNA, 22 nt, Human
ugaaucaguauaaauucucaaa

SEQ ID NO: 1054799 - RNA, 22 nt, Human
cacaauuuguuuuaucaguauu

SEQ ID NO: 1054800 - RNA, 22 nt, Human
aguaacucuccuuugacauauu

SEQ ID NO: 1054801 - RNA, 22 nt, Human
gcagacaggcccaguggaggga

SEQ ID NO: 1054802 - RNA, 22 nt, Human
aggcaagcgcagaagcggagga

SEQ ID NO: 1054803 - RNA, 22 nt, Human
uagaaacaucagcuaaccaaaa

SEQ ID NO: 1054804 - RNA, 23 nt, Human
cagaaaacccagagcucaguccc

SEQ ID NO: 1054805 - RNA, 23 nt, Human
uuccagaguccacaucugccacc

SEQ ID NO: 1054806 - RNA, 22 nt, Human
uaaucuaucaagcaacaaagug

SEQ ID NO: 1054807 - RNA, 22 nt, Human
acucuggcccuccugcugccag

SEQ ID NO: 1054808 - RNA, 22 nt, Human
caaggccaagucucugugaaga

SEQ ID NO: 1054809 - RNA, 22 nt, Human
guggcagagugcgguucugacc

SEQ ID NO: 1054810 - RNA, 22 nt, Human
uggcugaggagggucuucuggu

SEQ ID NO: 1054811 - RNA, 22 nt, Human
ugcccaaaccucuccuagcucu

SEQ ID NO: 1054812 - RNA, 22 nt, Human
cugcucugacccuuucaccuuc

SEQ ID NO: 1054813 - RNA, 23 nt, Human
aaacugcuuccaauuccugccau

SEQ ID NO: 1054814 - RNA, 22 nt, Human
uggcugagugauauuugcaaag

SEQ ID NO: 1054815 - RNA, 22 nt, Human
ucucucuuuuuaaucauguaau

SEQ ID NO: 1054816 - RNA, 22 nt, Human
agggcagcacaaggcauggacu

SEQ ID NO: 1054817 - RNA, 22 nt, Human
cuucagaauccagaaucagaau

SEQ ID NO: 1054818 - RNA, 22 nt, Human
auucuucaccauggauaauuug

SEQ ID NO: 1054819 - RNA, 17 nt, Human
ugauaguucauuuuaag

SEQ ID NO: 1054820 - RNA, 20 nt, Human
ggccgaaauaauaguggcuu

SEQ ID NO: 1054821 - RNA, 22 nt, Human
ugaggccagucucaucacaggc

SEQ ID NO: 1054822 - RNA, 22 nt, Human
gcuguagguaaggauggcaaag

SEQ ID NO: 1054823 - RNA, 22 nt, Human
ggaggaggcggcagaaguuccu

SEQ ID NO: 1054824 - RNA, 22 nt, Human
ugcugaggcagaugucugugac

SEQ ID NO: 1054825 - RNA, 22 nt, Human
ucagaaaagguagcugugacaa

SEQ ID NO: 1054826 - RNA, 22 nt, Human
ugaggcagugugagauaauaaa

SEQ ID NO: 1054827 - RNA, 22 nt, Human
auuuggaacaaauauuaguaaa

SEQ ID NO: 1054828 - RNA, 22 nt, Human
aucuucucauguguaaugaggu

SEQ ID NO: 1054829 - RNA, 22 nt, Human
cagaggaugaucuggccucucu

SEQ ID NO: 1054830 - RNA, 22 nt, Human
caggcagcguccugcuuccugu

SEQ ID NO: 1054831 - RNA, 22 nt, Human
ugaaggccucugguacaugcca

SEQ ID NO: 1054832 - RNA, 22 nt, Human
cccugguguggaugugauuggc

SEQ ID NO: 1054833 - RNA, 22 nt, Human
cuucuaauucuuauguaagcuu

SEQ ID NO: 1054834 - RNA, 21 nt, Human
agcagaggcugccuggugacu

SEQ ID NO: 1054835 - RNA, 22 nt, Human
gaauuauagguuugcaugcuaa

SEQ ID NO: 1054836 - RNA, 22 nt, Human
ccuggagaccagaggauacuuc

SEQ ID NO: 1054837 - RNA, 23 nt, Human
ggagugcaauggcgccaucucgg

SEQ ID NO: 1054838 - RNA, 22 nt, Human
gucagagagggcacgugcacac

SEQ ID NO: 1054839 - RNA, 22 nt, Human
uaacuguaguuauaaagcuauc

SEQ ID NO: 1054840 - RNA, 22 nt, Human
uuacacuuaccuguccauugaa

SEQ ID NO: 1054841 - RNA, 22 nt, Human
agacaaaugguaauuaugucua

SEQ ID NO: 1054842 - RNA, 22 nt, Human
gccauuuucugucuuguuuauu

SEQ ID NO: 1054843 - RNA, 22 nt, Human
ucuuugaauuucugacugucuu

SEQ ID NO: 1054844 - RNA, 22 nt, Human
uuuccauguuggugaaaugagg

SEQ ID NO: 1054845 - RNA, 22 nt, Human
gagggugggccagauaugaggg

SEQ ID NO: 1054846 - RNA, 22 nt, Human
ugaggcccuagggcaugggaga

SEQ ID NO: 1054847 - RNA, 22 nt, Human
caggcagcagccacucugguau

SEQ ID NO: 1054848 - RNA, 22 nt, Human
ugaggcucagagaacagugacu

SEQ ID NO: 1054849 - RNA, 20 nt, Human
agggccuguugcaagcguuu

SEQ ID NO: 1054850 - RNA, 22 nt, Human
gugcugugugauccaugcuggc

SEQ ID NO: 1054851 - RNA, 22 nt, Human
ucugggagccaugccuuggagu

SEQ ID NO: 1054852 - RNA, 22 nt, Human
ggucugaguggggccugagauu

SEQ ID NO: 1054853 - RNA, 22 nt, Human
uuuagagcaggguguggcacau

SEQ ID NO: 1054854 - RNA, 22 nt, Human
aaauaaguuaaacuagaaugau

SEQ ID NO: 1054855 - RNA, 22 nt, Human
ucccaggaaggauucggcauuu

SEQ ID NO: 1054856 - RNA, 22 nt, Human
aguaaaaauugaggugcaaaau

SEQ ID NO: 1054857 - RNA, 22 nt, Human
agaggagugggaagcagugcaa

SEQ ID NO: 1054858 - RNA, 22 nt, Human
uaucaucuuguugucaugcagc

SEQ ID NO: 1054859 - RNA, 22 nt, Human
cucucuggaccucaacuauuuu

SEQ ID NO: 1054860 - RNA, 22 nt, Human
agcccaggucucaaaguacagg

SEQ ID NO: 1054861 - RNA, 22 nt, Human
ucauuuguaccauuuuuuaaga

SEQ ID NO: 1054862 - RNA, 22 nt, Human
auuucagauucagaaauguagg

SEQ ID NO: 1054863 - RNA, 22 nt, Human
uggcagcaauuagcuagagcug

SEQ ID NO: 1054864 - RNA, 22 nt, Human
guggccaauaggagcagcuauc

SEQ ID NO: 1054865 - RNA, 22 nt, Human
auucauuuagguauucacuuac

SEQ ID NO: 1054866 - RNA, 22 nt, Human
aagcaaaggcaggagcuuguga

SEQ ID NO: 1054867 - RNA, 22 nt, Human
uucccucuccuacucaggaaag

SEQ ID NO: 1054868 - RNA, 22 nt, Human
aucaggaugacuauaaggcugc

SEQ ID NO: 1054869 - RNA, 22 nt, Human
uuucuauuuuaaaggcauaugg

SEQ ID NO: 1054870 - RNA, 22 nt, Human
gcugaggaaaccaaugcucaga

SEQ ID NO: 1054871 - RNA, 22 nt, Human
uagcaagaagcugucacaggug

SEQ ID NO: 1054872 - RNA, 22 nt, Human
aggcaggcuggucugaagagug

SEQ ID NO: 1054873 - RNA, 22 nt, Human
uuaguuaggaaacaaaguuguu

SEQ ID NO: 1054874 - RNA, 22 nt, Human
aucacauucuuucaaagcaguc

SEQ ID NO: 1054875 - RNA, 23 nt, Human
aaauuauugcucuucaauugccu

SEQ ID NO: 1054876 - RNA, 22 nt, Human
ccaggcuguaaacaccuucaaa

SEQ ID NO: 1054877 - RNA, 22 nt, Human
gaggggagacagggaaaucagu

SEQ ID NO: 1054878 - RNA, 22 nt, Human
gauggcagcagcagccagggau

SEQ ID NO: 1054879 - RNA, 22 nt, Human
aggcagguccccuggaaggcac

SEQ ID NO: 1054880 - RNA, 22 nt, Human
aggccagcuuccagaggggcag

SEQ ID NO: 1054881 - RNA, 22 nt, Human
aggagagaauguuccaggcuug

SEQ ID NO: 1054882 - RNA, 22 nt, Human
cugaagccaugugcucacuggu

SEQ ID NO: 1054883 - RNA, 22 nt, Human
uuucuagggcucuugucuucug

SEQ ID NO: 1054884 - RNA, 19 nt, Human
ucuuucauuucuagcucug

SEQ ID NO: 1054885 - RNA, 22 nt, Human
cagcugaguuacucugaggucu

SEQ ID NO: 1054886 - RNA, 22 nt, Human
cucaggaucgcuugcccuaggg

SEQ ID NO: 1054887 - RNA, 22 nt, Human
caaauacuguacugaacacugu

SEQ ID NO: 1054888 - RNA, 22 nt, Human
gagaggauccacaaaccaggaa

SEQ ID NO: 1054889 - RNA, 22 nt, Human
cagcugcuuacuagcuguguga

SEQ ID NO: 1054890 - RNA, 22 nt, Human
auccauuauugggccaauaaag

SEQ ID NO: 1054891 - RNA, 22 nt, Human
agucuccuuggccucaaugccu

SEQ ID NO: 1054892 - RNA, 19 nt, Human
ggcucagggcgcugccgcc

SEQ ID NO: 1054893 - RNA, 22 nt, Human
ugugaacuggcagguggacggg

SEQ ID NO: 1054894 - RNA, 22 nt, Human
acucagaagauauaaugacuca

SEQ ID NO: 1054895 - RNA, 22 nt, Human
agcuagccuaggcagagugcau

SEQ ID NO: 1054896 - RNA, 21 nt, Human
ggagggcagcccagacuggcu

SEQ ID NO: 1054897 - RNA, 22 nt, Human
ugaggcaggagguugagaacug

SEQ ID NO: 1054898 - RNA, 22 nt, Human
ucacagacauggugagguaaca

SEQ ID NO: 1054899 - RNA, 22 nt, Human
auuggcaaggcugcggugucug

SEQ ID NO: 1054900 - RNA, 22 nt, Human
cagacaggaauucuggcguggu

SEQ ID NO: 1054901 - RNA, 22 nt, Human
aagaagagaaaugugcugcugg

SEQ ID NO: 1054902 - RNA, 23 nt, Human
uccaugagaugugggcuucuagu

SEQ ID NO: 1054903 - RNA, 22 nt, Human
acaaaugugucuaauugugccu

SEQ ID NO: 1054904 - RNA, 22 nt, Human
agcugaggccugauuucgccgu

SEQ ID NO: 1054905 - RNA, 22 nt, Human
uggguccauggaacagaggugc

SEQ ID NO: 1054906 - RNA, 22 nt, Human
cccugagcaacaaacugaauac

SEQ ID NO: 1054907 - RNA, 22 nt, Human
uccugccuagcaggugaccuau

SEQ ID NO: 1054908 - RNA, 21 nt, Human
gaacauuuggguuguuucuac

SEQ ID NO: 1054909 - RNA, 22 nt, Human
uugaggucccugccuugccuuc

SEQ ID NO: 1054910 - RNA, 22 nt, Human
uugguaaaaucauagugguaac

SEQ ID NO: 1054911 - RNA, 22 nt, Human
ucaggcugcuggccagcaggcu

SEQ ID NO: 1054912 - RNA, 22 nt, Human
caguucuuaauaccaugugguu

SEQ ID NO: 1054913 - RNA, 22 nt, Human
caacugccauacagcuccaugg

SEQ ID NO: 1054914 - RNA, 22 nt, Human
aaaauuauucauggcuuuugga

SEQ ID NO: 1054915 - RNA, 22 nt, Human
uuuauuguuuagaagggggcug

SEQ ID NO: 1054916 - RNA, 22 nt, Human
cuggcaaguacugggccagcuc

SEQ ID NO: 1054917 - RNA, 23 nt, Human
cccaggagccugaguccucucug

SEQ ID NO: 1054918 - RNA, 22 nt, Human
ugcccaggaucuggcgaugcuc

SEQ ID NO: 1054919 - RNA, 22 nt, Human
gcugcugucagugguggcaguu

SEQ ID NO: 1054920 - RNA, 22 nt, Human
cucccagagagcaggugggccg

SEQ ID NO: 1054921 - RNA, 22 nt, Human
aucauuacuccuguaaaauugu

SEQ ID NO: 1054922 - RNA, 22 nt, Human
uaagcugugggagauuggcaua

SEQ ID NO: 1054923 - RNA, 22 nt, Human
cggcugagcagugcugauggaa

SEQ ID NO: 1054924 - RNA, 22 nt, Human
ucuucacauggaacaugaagcu

SEQ ID NO: 1054925 - RNA, 22 nt, Human
gugauuuucuccuccuagaagu

SEQ ID NO: 1054926 - RNA, 22 nt, Human
ccaggagaauaauggcagauua

SEQ ID NO: 1054927 - RNA, 22 nt, Human
aacuccugaggaaauggucuca

SEQ ID NO: 1054928 - RNA, 22 nt, Human
uugaggucaucugaaguacuag

SEQ ID NO: 1054929 - RNA, 22 nt, Human
aggccacaagaacuaccccauc

SEQ ID NO: 1054930 - RNA, 22 nt, Human
auggcuucuagcauugucacaa

SEQ ID NO: 1054931 - RNA, 22 nt, Human
uacuuucuuguuccuuucauaa

SEQ ID NO: 1054932 - RNA, 22 nt, Human
ugaggcagguaagcaaguuuug

SEQ ID NO: 1054933 - RNA, 22 nt, Human
ugcuuagacgucaaguacagcc

SEQ ID NO: 1054934 - RNA, 22 nt, Human
ccaggacagugaacauguaaga

SEQ ID NO: 1054935 - RNA, 22 nt, Human
uuuaguagugacagauucuggg

SEQ ID NO: 1054936 - RNA, 22 nt, Human
gcuggccaggaagagucucaga

SEQ ID NO: 1054937 - RNA, 22 nt, Human
aucauacacucacauaaacaga

SEQ ID NO: 1054938 - RNA, 22 nt, Human
gagcagcucgagaaggaagcag

SEQ ID NO: 1054939 - RNA, 22 nt, Human
aaaaacugcaauuacuuuuguc

SEQ ID NO: 1054940 - RNA, 22 nt, Human
uguuuuuaaauaaugauagaaa

SEQ ID NO: 1054941 - RNA, 22 nt, Human
uuggccaauggugauucccggc

SEQ ID NO: 1054942 - RNA, 22 nt, Human
uuuggaauuggaaagugcugug

SEQ ID NO: 1054943 - RNA, 18 nt, Human
gcagcugacacuggaguu

SEQ ID NO: 1054944 - RNA, 22 nt, Human
uggcacauaguaggugcucaau

SEQ ID NO: 1054945 - RNA, 22 nt, Human
caggcagccuucucgucucaca

SEQ ID NO: 1054946 - RNA, 22 nt, Human
cacccugggcugggccuguuaa

SEQ ID NO: 1054947 - RNA, 20 nt, Human
cccaggagugagcagcuuua

SEQ ID NO: 1054948 - RNA, 22 nt, Human
aacuucugccaaacagcuguua

SEQ ID NO: 1054949 - RNA, 18 nt, Human
aagaacugagguccuaga

SEQ ID NO: 1054950 - RNA, 22 nt, Human
guucuugccagcauccucaggu

SEQ ID NO: 1054951 - RNA, 22 nt, Human
cccaggagagaggccaguuggc

SEQ ID NO: 1054952 - RNA, 22 nt, Human
accuauuuaugcaauuaugaaa

SEQ ID NO: 1054953 - RNA, 22 nt, Human
cucaggauuuaaaggggcacuc

SEQ ID NO: 1054954 - RNA, 22 nt, Human
cuccuggcucugccacuuacua

SEQ ID NO: 1054955 - RNA, 22 nt, Human
uuugacaucaauacccuagaau

SEQ ID NO: 1054956 - RNA, 22 nt, Human
agggaagcuuguuacugagaag

SEQ ID NO: 1054957 - RNA, 22 nt, Human
uccaugagaacccuuggagaua

SEQ ID NO: 1054958 - RNA, 22 nt, Human
ucuagaaugacaugcaagagua

SEQ ID NO: 1054959 - RNA, 22 nt, Human
agaggcagaaguguucaaaccc

SEQ ID NO: 1054960 - RNA, 22 nt, Human
gcccuccccucuggguggugag

SEQ ID NO: 1054961 - RNA, 22 nt, Human
uagaaaugaauguuuaaaaguc

SEQ ID NO: 1054962 - RNA, 22 nt, Human
gagggagugccagagggccagc

SEQ ID NO: 1054963 - RNA, 22 nt, Human
cagagcugcaaaugccccuccg

SEQ ID NO: 1054964 - RNA, 22 nt, Human
caguuucuauggcugggcucug

SEQ ID NO: 1054965 - RNA, 22 nt, Human
auagucuuagaucagauaaagu

SEQ ID NO: 1054966 - RNA, 22 nt, Human
cuuauuagaaagaaaagacaug

SEQ ID NO: 1054967 - RNA, 22 nt, Human
gcugaggugaggcuggaaagga

SEQ ID NO: 1054968 - RNA, 22 nt, Human
cggaggggauacauuuucugaa

SEQ ID NO: 1054969 - RNA, 22 nt, Human
ccuccugguccagcaucucuuu

SEQ ID NO: 1054970 - RNA, 22 nt, Human
cuugcugucuugcauuuagagc

SEQ ID NO: 1054971 - RNA, 22 nt, Human
gagagcaggaggcagcgggacg

SEQ ID NO: 1054972 - RNA, 22 nt, Human
caaggaaaacagaugaucaaca

SEQ ID NO: 1054973 - RNA, 22 nt, Human
ugagauguaagguaugcuuacu

SEQ ID NO: 1054974 - RNA, 22 nt, Human
uuuauuuggcaucucugccaag

SEQ ID NO: 1054975 - RNA, 22 nt, Human
aggagcagaauuuaaugugcag

SEQ ID NO: 1054976 - RNA, 22 nt, Human
uggcagcuuuuuguuucaggcu

SEQ ID NO: 1054977 - RNA, 22 nt, Human
gcugcccaggguggagccggcu

SEQ ID NO: 1054978 - RNA, 22 nt, Human
agucugucugucacuucugcag

SEQ ID NO: 1054979 - RNA, 22 nt, Human
uaucuguuggcuccuaguugua

SEQ ID NO: 1054980 - RNA, 22 nt, Human
aucugacaaggccacauauucu

SEQ ID NO: 1054981 - RNA, 21 nt, Human
ucugccugagacuuugcuggu

SEQ ID NO: 1054982 - RNA, 22 nt, Human
gcugaggauauagcaggaacaa

SEQ ID NO: 1054983 - RNA, 22 nt, Human
uggcucagucuggguugacuga

SEQ ID NO: 1054984 - RNA, 22 nt, Human
gcugaggaggugugguuaggug

SEQ ID NO: 1054985 - RNA, 22 nt, Human
gucuucuuuaaccuacuaaagc

SEQ ID NO: 1054986 - RNA, 22 nt, Human
aggaaacuccccuacaucucaa

SEQ ID NO: 1054987 - RNA, 22 nt, Human
uuggaacaggauucaauuaaag

SEQ ID NO: 1054988 - RNA, 22 nt, Human
aauauuguuucaagaucacaga

SEQ ID NO: 1054989 - RNA, 22 nt, Human
ugaaggaaugaguauacuguuu

SEQ ID NO: 1054990 - RNA, 22 nt, Human
cagggcuguuagcugcugcucu

SEQ ID NO: 1054991 - RNA, 22 nt, Human
cccaggaggccaagguugcagu

SEQ ID NO: 1054992 - RNA, 22 nt, Human
agugcuguaacaacuuauuugg

SEQ ID NO: 1054993 - RNA, 22 nt, Human
agcagccuuugaucaucuggga

SEQ ID NO: 1054994 - RNA, 22 nt, Human
agaacguggaauguggcuccuu

SEQ ID NO: 1054995 - RNA, 21 nt, Human
aaggcugagacaacucaggag

SEQ ID NO: 1054996 - RNA, 20 nt, Human
agugccagggcaggugagag

SEQ ID NO: 1054997 - RNA, 21 nt, Human
agagaaagucauggcuguggc

SEQ ID NO: 1054998 - RNA, 22 nt, Human
cccauucauccucgcuuccuuc

SEQ ID NO: 1054999 - RNA, 22 nt, Human
uuuucaguuccaucucugcucu

SEQ ID NO: 1055000 - RNA, 22 nt, Human
cugacuuuuccaaauaauacuu

SEQ ID NO: 1055001 - RNA, 22 nt, Human
ugucuuuggaauauuuagcuga

SEQ ID NO: 1055002 - RNA, 22 nt, Human
guucuucagucacaucacagaa

SEQ ID NO: 1055003 - RNA, 22 nt, Human
ggagcagggcagugaauucugg

SEQ ID NO: 1055004 - RNA, 22 nt, Human
uuuaagauucaguaaggcaaac

SEQ ID NO: 1055005 - RNA, 22 nt, Human
cugcucuguucccccaucaucu

SEQ ID NO: 1055006 - RNA, 22 nt, Human
aggcaguuguagagagggcucu

SEQ ID NO: 1055007 - RNA, 22 nt, Human
ccugagguuauccaucuaccug

SEQ ID NO: 1055008 - RNA, 21 nt, Human
augucaaaugcuuuauuuuau

SEQ ID NO: 1055009 - RNA, 22 nt, Human
auacaguaaccacauucuauag

SEQ ID NO: 1055010 - RNA, 22 nt, Human
gagcaagauuuuauaaguugug

SEQ ID NO: 1055011 - RNA, 22 nt, Human
aggcagcugcccucuccuuccu

SEQ ID NO: 1055012 - RNA, 22 nt, Human
uucuuaggacuaguauagcaug

SEQ ID NO: 1055013 - RNA, 22 nt, Human
uggcuggauuauuggcuaguac

SEQ ID NO: 1055014 - RNA, 22 nt, Human
aggauuuuagauaagacagcaa

SEQ ID NO: 1055015 - RNA, 22 nt, Human
ucacugcucuccaauguggagu

SEQ ID NO: 1055016 - RNA, 17 nt, Human
gcugagaggcagcacag

SEQ ID NO: 1055017 - RNA, 22 nt, Human
cugcccucuagggaugcacugg

SEQ ID NO: 1055018 - RNA, 22 nt, Human
acuuugcagggcuugauaucca

SEQ ID NO: 1055019 - RNA, 22 nt, Human
cacagcuaggaggaaagcagag

SEQ ID NO: 1055020 - RNA, 22 nt, Human
augaggucauccuggaguaagg

SEQ ID NO: 1055021 - RNA, 22 nt, Human
uaauuauaacaguuacaucuua

SEQ ID NO: 1055022 - RNA, 22 nt, Human
aggauguugcuauuggcagucu

SEQ ID NO: 1055023 - RNA, 22 nt, Human
ccaaauuaaaucauacagacag

SEQ ID NO: 1055024 - RNA, 23 nt, Human
ucuugaaaagccuacagcaguuc

SEQ ID NO: 1055025 - RNA, 22 nt, Human
aagcagagcaagcguauuuauu

SEQ ID NO: 1055026 - RNA, 22 nt, Human
agauggagaaugacaauuaagg

SEQ ID NO: 1055027 - RNA, 22 nt, Human
aagggaggggauguaagccugg

SEQ ID NO: 1055028 - RNA, 22 nt, Human
aggaucuugcuguagaggauag

SEQ ID NO: 1055029 - RNA, 22 nt, Human
agccacagcacauuguaagaaa

SEQ ID NO: 1055030 - RNA, 22 nt, Human
aaguuacauaaauguccucuag

SEQ ID NO: 1055031 - RNA, 22 nt, Human
auuauuagauucuuaauuguaa

SEQ ID NO: 1055032 - RNA, 22 nt, Human
ugcacuucaaaaaugucacuga

SEQ ID NO: 1055033 - RNA, 22 nt, Human
uuuaaauuauaguuaaugucug

SEQ ID NO: 1055034 - RNA, 22 nt, Human
aggaagcugccugggaugggaa

SEQ ID NO: 1055035 - RNA, 22 nt, Human
uaacaaacuggaaauugacauu

SEQ ID NO: 1055036 - RNA, 22 nt, Human
aacugcuucuuacugcugggca

SEQ ID NO: 1055037 - RNA, 22 nt, Human
caggucuggguugauggccugg

SEQ ID NO: 1055038 - RNA, 22 nt, Human
caggagggcccgagacucuucc

SEQ ID NO: 1055039 - RNA, 23 nt, Human
auauuagggagauuagcccucua

SEQ ID NO: 1055040 - RNA, 17 nt, Human
cuccuggccaccccucu

SEQ ID NO: 1055041 - RNA, 22 nt, Human
cccagggacucgggauucuagg

SEQ ID NO: 1055042 - RNA, 23 nt, Human
cagagcuggcucagagcugccug

SEQ ID NO: 1055043 - RNA, 22 nt, Human
ugcugaaauuagaacauugagg

SEQ ID NO: 1055044 - RNA, 22 nt, Human
uaggacauguguuuuauauaug

SEQ ID NO: 1055045 - RNA, 22 nt, Human
agagccagcauuugggcccugc

SEQ ID NO: 1055046 - RNA, 22 nt, Human
agagagagggaaacugcuaaac

SEQ ID NO: 1055047 - RNA, 22 nt, Human
uaggcagcauggauucugaaua

SEQ ID NO: 1055048 - RNA, 22 nt, Human
ugcccuggcuccucccacgcug

SEQ ID NO: 1055049 - RNA, 22 nt, Human
ccaggagagcucuaaauggcug

SEQ ID NO: 1055050 - RNA, 22 nt, Human
gcugaggacaucauggaaggaa

SEQ ID NO: 1055051 - RNA, 23 nt, Human
gcugagguacauuuacaggaaga

SEQ ID NO: 1055052 - RNA, 19 nt, Human
gccaggcuccauagccggc

SEQ ID NO: 1055053 - RNA, 22 nt, Human
cuuuccaagaaugcagauaccu

SEQ ID NO: 1055054 - RNA, 22 nt, Human
gugcugugucuaucaggaauaa

SEQ ID NO: 1055055 - RNA, 22 nt, Human
ccaggaaauggcuugcuucuuu

SEQ ID NO: 1055056 - RNA, 23 nt, Human
uaugaacugcauugcuggugugu

SEQ ID NO: 1055057 - RNA, 22 nt, Human
ggaggggucucuagcgaggaga

SEQ ID NO: 1055058 - RNA, 22 nt, Human
caggagaaauguggcugcuacc

SEQ ID NO: 1055059 - RNA, 22 nt, Human
cugaggcuaaccucgagagaca

SEQ ID NO: 1055060 - RNA, 22 nt, Human
gcugccucugcacagcucacuc

SEQ ID NO: 1055061 - RNA, 22 nt, Human
caggagauguaagacuucuguu

SEQ ID NO: 1055062 - RNA, 22 nt, Human
augcuguggggagugaggguag

SEQ ID NO: 1055063 - RNA, 22 nt, Human
ucaggcugugucuuuaaacaau

SEQ ID NO: 1055064 - RNA, 22 nt, Human
ugcacagugaccccuggugacu

SEQ ID NO: 1055065 - RNA, 22 nt, Human
ucuggccaauguugugaucaca

SEQ ID NO: 1055066 - RNA, 22 nt, Human
uuauccuggauuauauauguga

SEQ ID NO: 1055067 - RNA, 22 nt, Human
ugaugaaaauaugauucugagg

SEQ ID NO: 1055068 - RNA, 22 nt, Human
guugacagcuggugagcugcua

SEQ ID NO: 1055069 - RNA, 22 nt, Human
gugagguccucccugcugggag

SEQ ID NO: 1055070 - RNA, 22 nt, Human
cucaggauuaaggaaucuaaau

SEQ ID NO: 1055071 - RNA, 22 nt, Human
uuucuggcagcgggacaggggu

SEQ ID NO: 1055072 - RNA, 22 nt, Human
cugagguccucagagggaaagg

SEQ ID NO: 1055073 - RNA, 19 nt, Human
uuacacuucugcuuuguga

SEQ ID NO: 1055074 - RNA, 22 nt, Human
augaaacaguguguauagcaaa

SEQ ID NO: 1055075 - RNA, 22 nt, Human
auuucauugaaguuaauucuuc

SEQ ID NO: 1055076 - RNA, 18 nt, Human
ucagcuggggcugcagcc

SEQ ID NO: 1055077 - RNA, 22 nt, Human
uuguuuuaucuuucuacagacu

SEQ ID NO: 1055078 - RNA, 23 nt, Human
agaggggagcaucugcuggcuga

SEQ ID NO: 1055079 - RNA, 22 nt, Human
ccuuuuaugaacuugagcaggu

SEQ ID NO: 1055080 - RNA, 22 nt, Human
acaggcugccacuugcauccaa

SEQ ID NO: 1055081 - RNA, 22 nt, Human
gaaggaggugucaguuggacug

SEQ ID NO: 1055082 - RNA, 22 nt, Human
agcacauucugccuugcuuugc

SEQ ID NO: 1055083 - RNA, 22 nt, Human
ccucagaugucuuaaggcacug

SEQ ID NO: 1055084 - RNA, 22 nt, Human
auuuggcacacuggguucucgu

SEQ ID NO: 1055085 - RNA, 22 nt, Human
cugcuucauauuucauagugau

SEQ ID NO: 1055086 - RNA, 22 nt, Human
ugagccuguccugugcauguga

SEQ ID NO: 1055087 - RNA, 22 nt, Human
uauacacauuuuuaccuauagu

SEQ ID NO: 1055088 - RNA, 22 nt, Human
ccuccuggaggcucuaagggag

SEQ ID NO: 1055089 - RNA, 22 nt, Human
ggccagcuuugagcugcaggaa

SEQ ID NO: 1055090 - RNA, 22 nt, Human
ccccagagagcaccaugaagcc

SEQ ID NO: 1055091 - RNA, 22 nt, Human
agggagcuuccgaacuacagcu

SEQ ID NO: 1055092 - RNA, 22 nt, Human
cagcagaggugguucacauugu

SEQ ID NO: 1055093 - RNA, 22 nt, Human
uuuagucuaauaaaaguggagu

SEQ ID NO: 1055094 - RNA, 22 nt, Human
aaaaugagauacaguuugaaag

SEQ ID NO: 1055095 - RNA, 22 nt, Human
uuucauuauaaaaaguuggcuu

SEQ ID NO: 1055096 - RNA, 22 nt, Human
ggccagggccuggggacugucc

SEQ ID NO: 1055097 - RNA, 22 nt, Human
gaucuucuauguaaugaagugu

SEQ ID NO: 1055098 - RNA, 22 nt, Human
ucccaggacccaggcauucaca

SEQ ID NO: 1055099 - RNA, 22 nt, Human
agaaucugaaggcaccucuggu

SEQ ID NO: 1055100 - RNA, 22 nt, Human
caggaugguggcaugaucagaa

SEQ ID NO: 1055101 - RNA, 22 nt, Human
cucucagacugaagggccugug

SEQ ID NO: 1055102 - RNA, 22 nt, Human
uuggcacacaguaagcccuaag

SEQ ID NO: 1055103 - RNA, 22 nt, Human
gcagaagucagaccaucugaau

SEQ ID NO: 1055104 - RNA, 22 nt, Human
ucccagaggacuguuggugcua

SEQ ID NO: 1055105 - RNA, 23 nt, Human
agcugaggcugugggugucagag

SEQ ID NO: 1055106 - RNA, 22 nt, Human
cugcugagaaaagacugaggga

SEQ ID NO: 1055107 - RNA, 22 nt, Human
guuuauuauucaacuucauguu

SEQ ID NO: 1055108 - RNA, 22 nt, Human
guuuauuaacugucaagugauu

SEQ ID NO: 1055109 - RNA, 20 nt, Human
agaggccaguuaggagucua

SEQ ID NO: 1055110 - RNA, 22 nt, Human
ggccugaggcgucccagcugug

SEQ ID NO: 1055111 - RNA, 22 nt, Human
cccuuccuccucgccugucaga

SEQ ID NO: 1055112 - RNA, 22 nt, Human
ucauggauggccgggaggugau

SEQ ID NO: 1055113 - RNA, 22 nt, Human
uccuggccuugcuccugaugcc

SEQ ID NO: 1055114 - RNA, 19 nt, Human
aggucuaaucauaagacaa

SEQ ID NO: 1055115 - RNA, 22 nt, Human
cugcuguguuucugcuagaaaa

SEQ ID NO: 1055116 - RNA, 22 nt, Human
auggcuuccucuggauuggauu

SEQ ID NO: 1055117 - RNA, 22 nt, Human
ggagcuguuggcagcuaucuug

SEQ ID NO: 1055118 - RNA, 22 nt, Human
ucccucucccuauugccuggag

SEQ ID NO: 1055119 - RNA, 22 nt, Human
aagaguaaagcaaagcacuugu

SEQ ID NO: 1055120 - RNA, 22 nt, Human
uuauuuaauuuucucacucaga

SEQ ID NO: 1055121 - RNA, 22 nt, Human
cccuggcagagggggcaggugc

SEQ ID NO: 1055122 - RNA, 22 nt, Human
cacugagcugauagaauuccag

SEQ ID NO: 1055123 - RNA, 22 nt, Human
agaggccacuuugccugugaug

SEQ ID NO: 1055124 - RNA, 22 nt, Human
ucugggaaugaauaagaccugu

SEQ ID NO: 1055125 - RNA, 22 nt, Human
ugaguaauaaacugucuugcuc

SEQ ID NO: 1055126 - RNA, 22 nt, Human
ugaguuuuuucaacauaugaag

SEQ ID NO: 1055127 - RNA, 23 nt, Human
ucucaagaggaagcagggcucau

SEQ ID NO: 1055128 - RNA, 22 nt, Human
ucuauaaagggccagauaguag

SEQ ID NO: 1055129 - RNA, 22 nt, Human
ugacagaaauaguucuuaauuu

SEQ ID NO: 1055130 - RNA, 22 nt, Human
cugcuguggguuaagacacugu

SEQ ID NO: 1055131 - RNA, 22 nt, Human
uugaacuguaagcaugucugcc

SEQ ID NO: 1055132 - RNA, 22 nt, Human
aggcugagcugaccugguuugg

SEQ ID NO: 1055133 - RNA, 22 nt, Human
auuaucuauguagaaugauuuu

SEQ ID NO: 1055134 - RNA, 22 nt, Human
agccacagucugaugccugaga

SEQ ID NO: 1055135 - RNA, 22 nt, Human
guuguuuugcaggauccuuaca

SEQ ID NO: 1055136 - RNA, 22 nt, Human
cugagccuguguuucucuggca

SEQ ID NO: 1055137 - RNA, 22 nt, Human
uugcaaaggggaauaaagcaau

SEQ ID NO: 1055138 - RNA, 22 nt, Human
aucuuucaaucaggaaaaaucu

SEQ ID NO: 1055139 - RNA, 22 nt, Human
uugauuaaacaggcauauucaa

SEQ ID NO: 1055140 - RNA, 20 nt, Human
cugcuguguuauuguagaac

SEQ ID NO: 1055141 - RNA, 22 nt, Human
aggcagcugaggucuggcgccc

SEQ ID NO: 1055142 - RNA, 22 nt, Human
cagaggucaagaucugaaguga

SEQ ID NO: 1055143 - RNA, 22 nt, Human
gcugagaggcagccagacccuc

SEQ ID NO: 1055144 - RNA, 22 nt, Human
gcuggccagcccucuuccucca

SEQ ID NO: 1055145 - RNA, 22 nt, Human
gcccaggaguugguggcugcag

SEQ ID NO: 1055146 - RNA, 22 nt, Human
ggcugcugguagggguaggaag

SEQ ID NO: 1055147 - RNA, 22 nt, Human
caagauggguguugugaugguu

SEQ ID NO: 1055148 - RNA, 22 nt, Human
gagucuuugguaaagucugcug

SEQ ID NO: 1055149 - RNA, 22 nt, Human
aucaggauggguuuggcuuagg

SEQ ID NO: 1055150 - RNA, 22 nt, Human
ucagguccagcuccugugccuc

SEQ ID NO: 1055151 - RNA, 22 nt, Human
ugcugaggaauaauuguuccug

SEQ ID NO: 1055152 - RNA, 22 nt, Human
gaaggccacuuuguguugagaa

SEQ ID NO: 1055153 - RNA, 22 nt, Human
agcggcuggaccagcguucaag

SEQ ID NO: 1055154 - RNA, 22 nt, Human
caaaugaauauuuccauggguu

SEQ ID NO: 1055155 - RNA, 22 nt, Human
cuugcacacauguacaugugua

SEQ ID NO: 1055156 - RNA, 19 nt, Human
acuggcaguuucugcaugg

SEQ ID NO: 1055157 - RNA, 22 nt, Human
acaggcugcugagccauuugcu

SEQ ID NO: 1055158 - RNA, 22 nt, Human
gaggcagccucaguggaccucg

SEQ ID NO: 1055159 - RNA, 22 nt, Human
auaaauaucacuguugucccuc

SEQ ID NO: 1055160 - RNA, 22 nt, Human
cauuuccacuucugaaaacugg

SEQ ID NO: 1055161 - RNA, 22 nt, Human
aaaggccacacugcucuuucuc

SEQ ID NO: 1055162 - RNA, 22 nt, Human
cuucugaggcagcuauucaguu

SEQ ID NO: 1055163 - RNA, 17 nt, Human
cccagggaccacugcuu

SEQ ID NO: 1055164 - RNA, 22 nt, Human
ugggucagaaucagagaguugc

SEQ ID NO: 1055165 - RNA, 22 nt, Human
aaguugagaugucauaggagac

SEQ ID NO: 1055166 - RNA, 22 nt, Human
ucuaaccuuugaaacugcuuuc

SEQ ID NO: 1055167 - RNA, 22 nt, Human
ggacagcucugccaggagcuca

SEQ ID NO: 1055168 - RNA, 22 nt, Human
ucuccuggaagugauuccccug

SEQ ID NO: 1055169 - RNA, 22 nt, Human
ugucaaauuuuuauugcaguau

SEQ ID NO: 1055170 - RNA, 22 nt, Human
aguaacaugaguuuuucuaaug

SEQ ID NO: 1055171 - RNA, 22 nt, Human
gcucuggguucugauuuaugag

SEQ ID NO: 1055172 - RNA, 22 nt, Human
aacugcuuaucuuugguagaug

SEQ ID NO: 1055173 - RNA, 22 nt, Human
uuucacuagaacguucuuguuu

SEQ ID NO: 1055174 - RNA, 22 nt, Human
guaucacuuuugagagugagaa

SEQ ID NO: 1055175 - RNA, 22 nt, Human
gcuccuggcauccugcuuuuaa

SEQ ID NO: 1055176 - RNA, 22 nt, Human
cccaggagguggagguugcagc

SEQ ID NO: 1055177 - RNA, 20 nt, Human
ucauuguguugccaauuccc

SEQ ID NO: 1055178 - RNA, 22 nt, Human
uggcaggcagugugggagcugg

SEQ ID NO: 1055179 - RNA, 22 nt, Human
ccuccuggauggauuuggugga

SEQ ID NO: 1055180 - RNA, 22 nt, Human
ccuggcugguugucugauucua

SEQ ID NO: 1055181 - RNA, 22 nt, Human
cugccugcaucccacagugggg

SEQ ID NO: 1055182 - RNA, 22 nt, Human
cccaggugcugcgugaagccuc

SEQ ID NO: 1055183 - RNA, 19 nt, Human
ucugccucuggucaggcuc

SEQ ID NO: 1055184 - RNA, 22 nt, Human
uggagacugugcuaagggaguu

SEQ ID NO: 1055185 - RNA, 22 nt, Human
cuguggaaauaaacaaugcuaa

SEQ ID NO: 1055186 - RNA, 22 nt, Human
ucucugcccauccucaguccac

SEQ ID NO: 1055187 - RNA, 22 nt, Human
aagcagaguccccuucccaugg

SEQ ID NO: 1055188 - RNA, 19 nt, Human
uccaggaggcugccauuga

SEQ ID NO: 1055189 - RNA, 22 nt, Human
uucaggauggaguaccuuuuau

SEQ ID NO: 1055190 - RNA, 22 nt, Human
gcccaggauggcuggaggugcu

SEQ ID NO: 1055191 - RNA, 17 nt, Human
auuagguuuugucauga

SEQ ID NO: 1055192 - RNA, 22 nt, Human
caagauuaucuucuucuuguua

SEQ ID NO: 1055193 - RNA, 22 nt, Human
cuucuucaguugcauguauugg

SEQ ID NO: 1055194 - RNA, 22 nt, Human
ggaagaggcugagccagguccc

SEQ ID NO: 1055195 - RNA, 22 nt, Human
ggcagucaagagggagucugaa

SEQ ID NO: 1055196 - RNA, 17 nt, Human
ccaggagagaugcuugu

SEQ ID NO: 1055197 - RNA, 22 nt, Human
aaguuacaguuaugaaacucac

SEQ ID NO: 1055198 - RNA, 22 nt, Human
ugagugcucuguaugugccaga

SEQ ID NO: 1055199 - RNA, 22 nt, Human
ccucaggggucacugugaggag

SEQ ID NO: 1055200 - RNA, 22 nt, Human
cugcugugcagacagacucucu

SEQ ID NO: 1055201 - RNA, 22 nt, Human
aagagggcagcacagguggguc

SEQ ID NO: 1055202 - RNA, 22 nt, Human
caggcagcugcuggguucagcc

SEQ ID NO: 1055203 - RNA, 22 nt, Human
uaacugccuacugugcaaauau

SEQ ID NO: 1055204 - RNA, 22 nt, Human
aagaacugguuauguuaucuug

SEQ ID NO: 1055205 - RNA, 22 nt, Human
accaggaguaacagugaguggu

SEQ ID NO: 1055206 - RNA, 22 nt, Human
uacuaaauaguuuaauuccuca

SEQ ID NO: 1055207 - RNA, 22 nt, Human
aggcagcagugauaagauagga

SEQ ID NO: 1055208 - RNA, 19 nt, Human
aguggcagaucuggaagua

SEQ ID NO: 1055209 - RNA, 22 nt, Human
agcugagguuaguauaaaugug

SEQ ID NO: 1055210 - RNA, 22 nt, Human
acuugcugguggcauuuacagu

SEQ ID NO: 1055211 - RNA, 23 nt, Human
auucuucauuaucuucuagaaaa

SEQ ID NO: 1055212 - RNA, 22 nt, Human
aguaaacagaaagcaagaugau

SEQ ID NO: 1055213 - RNA, 22 nt, Human
gcaggagagucugugccagguu

SEQ ID NO: 1055214 - RNA, 22 nt, Human
uaugaaacauucauacaaauaa

SEQ ID NO: 1055215 - RNA, 22 nt, Human
ucauuuguucaucugcucuucu

SEQ ID NO: 1055216 - RNA, 22 nt, Human
ugcugcuguuuccuacaucuca

SEQ ID NO: 1055217 - RNA, 22 nt, Human
uuuccuaguucuaagaaaugua

SEQ ID NO: 1055218 - RNA, 22 nt, Human
cagaaggcuuuguggaguagac

SEQ ID NO: 1055219 - RNA, 22 nt, Human
aagggcugccagggggugccag

SEQ ID NO: 1055220 - RNA, 19 nt, Human
caggaaggggcgaaucugg

SEQ ID NO: 1055221 - RNA, 22 nt, Human
augaggucuggcaaucagaaac

SEQ ID NO: 1055222 - RNA, 22 nt, Human
cggagggguuugaacagaggag

SEQ ID NO: 1055223 - RNA, 22 nt, Human
auuuauuaugggauuuggcuca

SEQ ID NO: 1055224 - RNA, 22 nt, Human
caaaugaaguccaaagggcuua

SEQ ID NO: 1055225 - RNA, 22 nt, Human
uuucauuuugguuaugccauaa

SEQ ID NO: 1055226 - RNA, 22 nt, Human
uucaggauucugugucugacaa

SEQ ID NO: 1055227 - RNA, 22 nt, Human
ugaguucuaguggcugcagauu

SEQ ID NO: 1055228 - RNA, 22 nt, Human
cccaaggaagacgcuugugaua

SEQ ID NO: 1055229 - RNA, 22 nt, Human
uggcugagggcacuaugaagcc

SEQ ID NO: 1055230 - RNA, 20 nt, Human
aagggcagagggaacagacu

SEQ ID NO: 1055231 - RNA, 22 nt, Human
ucugaaggugcuagagaaagcu

SEQ ID NO: 1055232 - RNA, 22 nt, Human
cuacccagagugaaucucuuaa

SEQ ID NO: 1055233 - RNA, 22 nt, Human
aagggcugaaagaccuugggca

SEQ ID NO: 1055234 - RNA, 22 nt, Human
aguguaggguggucagagcaga

SEQ ID NO: 1055235 - RNA, 22 nt, Human
uugcuuuguggugguucuucca

SEQ ID NO: 1055236 - RNA, 22 nt, Human
uuacaguuuaguccaagccaga

SEQ ID NO: 1055237 - RNA, 22 nt, Human
guggccaauuuccaucuguaag

SEQ ID NO: 1055238 - RNA, 21 nt, Human
aagaaguuuggauuuuguccu

SEQ ID NO: 1055239 - RNA, 22 nt, Human
uuucuucucgacaccuuauccc

SEQ ID NO: 1055240 - RNA, 19 nt, Human
cucucacucgccacauccu

SEQ ID NO: 1055241 - RNA, 22 nt, Human
gauuucuucauuuguggugaau

SEQ ID NO: 1055242 - RNA, 20 nt, Human
uccaggagaacugggagccg

SEQ ID NO: 1055243 - RNA, 20 nt, Human
gcucagggccugggucugga

SEQ ID NO: 1055244 - RNA, 22 nt, Human
auucuucauaccuacugagguu

SEQ ID NO: 1055245 - RNA, 22 nt, Human
ucaggcugaggucaucugcauc

SEQ ID NO: 1055246 - RNA, 22 nt, Human
ggaggccagggacccagucagc

SEQ ID NO: 1055247 - RNA, 22 nt, Human
uuugaaaggugucgagaugugu

SEQ ID NO: 1055248 - RNA, 22 nt, Human
auuccaaagguuaaugcccauu

SEQ ID NO: 1055249 - RNA, 22 nt, Human
acaacauuauacauagaaagcu

SEQ ID NO: 1055250 - RNA, 22 nt, Human
aaaauugaagugaucaggaacu

SEQ ID NO: 1055251 - RNA, 18 nt, Human
uugcuuuguaagcuugca

SEQ ID NO: 1055252 - RNA, 22 nt, Human
cucccaggacucagaggagaag

SEQ ID NO: 1055253 - RNA, 22 nt, Human
caggcagcccugcaccaagugu

SEQ ID NO: 1055254 - RNA, 22 nt, Human
cuuagaaaugcagauucucagg

SEQ ID NO: 1055255 - RNA, 20 nt, Human
aggaaaaauggaaacuggag

SEQ ID NO: 1055256 - RNA, 22 nt, Human
uggcugaguuccuggcacacgg

SEQ ID NO: 1055257 - RNA, 22 nt, Human
aucuagguuuggaagauagagu

SEQ ID NO: 1055258 - RNA, 22 nt, Human
gaggagagagggacugucugca

SEQ ID NO: 1055259 - RNA, 22 nt, Human
aggagaggcaucaagaaaaucg

SEQ ID NO: 1055260 - RNA, 22 nt, Human
uuugaauaucacaaacuuucaa

SEQ ID NO: 1055261 - RNA, 22 nt, Human
aggcagcaugggccccagcucc

SEQ ID NO: 1055262 - RNA, 21 nt, Human
aggaggggucuuucccacuga

SEQ ID NO: 1055263 - RNA, 22 nt, Human
ggcagccagagggcagcuggau

SEQ ID NO: 1055264 - RNA, 22 nt, Human
uuugaaagagcugauacaugaa

SEQ ID NO: 1055265 - RNA, 22 nt, Human
cugcuucacguugugccuuguu

SEQ ID NO: 1055266 - RNA, 22 nt, Human
acugaaguccacacauguagga

SEQ ID NO: 1055267 - RNA, 19 nt, Human
uggggcuguguuuugaccc

SEQ ID NO: 1055268 - RNA, 22 nt, Human
gccuggcucccucugcagcucc

SEQ ID NO: 1055269 - RNA, 21 nt, Human
ccauaccuaccucaccugguu

SEQ ID NO: 1055270 - RNA, 22 nt, Human
cucacuguccaacaggcuuuac

SEQ ID NO: 1055271 - RNA, 22 nt, Human
cuaauacacccuauugcuuguu

SEQ ID NO: 1055272 - RNA, 22 nt, Human
guagauaaggauugauuuuuau

SEQ ID NO: 1055273 - RNA, 19 nt, Human
ugugaaagcuaguguucuu

SEQ ID NO: 1055274 - RNA, 22 nt, Human
uccucuccaugucucacgccac

SEQ ID NO: 1055275 - RNA, 22 nt, Human
uccaccaggcuccauguucagu

SEQ ID NO: 1055276 - RNA, 22 nt, Human
gaucuucucuuuaguagaaaca

SEQ ID NO: 1055277 - RNA, 22 nt, Human
ugguccaagugagguggccucu

SEQ ID NO: 1055278 - RNA, 17 nt, Human
uccaugagacaugaaga

SEQ ID NO: 1055279 - RNA, 22 nt, Human
ggcagcauauauucagugggca

SEQ ID NO: 1055280 - RNA, 22 nt, Human
gaaugaaagauuugcauucuau

SEQ ID NO: 1055281 - RNA, 22 nt, Human
ggcuuggaccagucacaguggu

SEQ ID NO: 1055282 - RNA, 22 nt, Human
cccaggagguuggggcuacagu

SEQ ID NO: 1055283 - RNA, 22 nt, Human
uccccacacagauacagaguag

SEQ ID NO: 1055284 - RNA, 18 nt, Human
agggaguuuuagggaagg

SEQ ID NO: 1055285 - RNA, 22 nt, Human
agcagcauuaugauauaucuua

SEQ ID NO: 1055286 - RNA, 22 nt, Human
cuguguuugaugagaagccacc

SEQ ID NO: 1055287 - RNA, 22 nt, Human
aggauuuguuuauaggucuuaa

SEQ ID NO: 1055288 - RNA, 22 nt, Human
uauuauuaaauggcagaauuuu

SEQ ID NO: 1055289 - RNA, 22 nt, Human
cauuguuaccaucuuuuaccua

SEQ ID NO: 1055290 - RNA, 22 nt, Human
ugagacaguuuuucuauuucca

SEQ ID NO: 1055291 - RNA, 22 nt, Human
uuacuuuggguccugcuuauaa

SEQ ID NO: 1055292 - RNA, 22 nt, Human
uccaaauauucggucuuucuga

SEQ ID NO: 1055293 - RNA, 22 nt, Human
aagauggaguaguguaaugguu

SEQ ID NO: 1055294 - RNA, 22 nt, Human
cauuugcagagggugacacucu

SEQ ID NO: 1055295 - RNA, 21 nt, Human
gccaggaguagauuacauuua

SEQ ID NO: 1055296 - RNA, 22 nt, Human
gacacuuuggugcuuugugguu

SEQ ID NO: 1055297 - RNA, 22 nt, Human
agggagcuaggauccugaaggu

SEQ ID NO: 1055298 - RNA, 22 nt, Human
aaggcaguaaaaucuaccuugc

SEQ ID NO: 1055299 - RNA, 22 nt, Human
gcuccuggguguggcugccccu

SEQ ID NO: 1055300 - RNA, 22 nt, Human
ccugagguggcugcagcacugc

SEQ ID NO: 1055301 - RNA, 23 nt, Human
caguuggagguacagagacacug

SEQ ID NO: 1055302 - RNA, 22 nt, Human
guguguuucagaagccaggugu

SEQ ID NO: 1055303 - RNA, 23 nt, Human
ucguugaauagcaauagcacaac

SEQ ID NO: 1055304 - RNA, 22 nt, Human
ccaggcugugcuuuucauaaau

SEQ ID NO: 1055305 - RNA, 22 nt, Human
ccacagugggcacagcaggacu

SEQ ID NO: 1055306 - RNA, 21 nt, Human
aauuacagauggaauuacaga

SEQ ID NO: 1055307 - RNA, 22 nt, Human
ggcugcagagcugggugggccu

SEQ ID NO: 1055308 - RNA, 22 nt, Human
aaaaguuaccucuguaauauaa

SEQ ID NO: 1055309 - RNA, 22 nt, Human
uggcucagaaggcugccuucac

SEQ ID NO: 1055310 - RNA, 22 nt, Human
uuggccaagucacugguuaaug

SEQ ID NO: 1055311 - RNA, 23 nt, Human
uagugucaagagggaguguaauu

SEQ ID NO: 1055312 - RNA, 22 nt, Human
aggcagcaugggcccagagucc

SEQ ID NO: 1055313 - RNA, 22 nt, Human
auuaaauuuucacuaggcuccc

SEQ ID NO: 1055314 - RNA, 21 nt, Human
agucugagguggggccuagga

SEQ ID NO: 1055315 - RNA, 22 nt, Human
agcccaggcagagggaugcuug

SEQ ID NO: 1055316 - RNA, 22 nt, Human
guaguucugcagugucaccuga

SEQ ID NO: 1055317 - RNA, 22 nt, Human
ugcauaguucuccuuccuccuc

SEQ ID NO: 1055318 - RNA, 19 nt, Human
ugaggggcucacagucuca

SEQ ID NO: 1055319 - RNA, 22 nt, Human
ccauggcuuacagauggagcau

SEQ ID NO: 1055320 - RNA, 20 nt, Human
guaaaauauggucuuugggu

SEQ ID NO: 1055321 - RNA, 22 nt, Human
auuauuagacuuauaugguagu

SEQ ID NO: 1055322 - RNA, 22 nt, Human
gcaggagacaacuguaaggaga

SEQ ID NO: 1055323 - RNA, 22 nt, Human
gcccaggaguucaaggcugcag

SEQ ID NO: 1055324 - RNA, 22 nt, Human
cucaguuuccucaacugcaaaa

SEQ ID NO: 1055325 - RNA, 22 nt, Human
cagaggcagugggguugcuccu

SEQ ID NO: 1055326 - RNA, 22 nt, Human
agucucagaaaagaagcaugga

SEQ ID NO: 1055327 - RNA, 22 nt, Human
cagcuucugcuaucgaacaucu

SEQ ID NO: 1055328 - RNA, 22 nt, Human
agcaugcgcuugaucagcucca

SEQ ID NO: 1055329 - RNA, 20 nt, Human
uaggcagagcugugcagccu

SEQ ID NO: 1055330 - RNA, 22 nt, Human
ucuggccagcaugagaccuggu

SEQ ID NO: 1055331 - RNA, 22 nt, Human
cuuuggcacagucucauuugau

SEQ ID NO: 1055332 - RNA, 22 nt, Human
cacucaggguacaauggagggc

SEQ ID NO: 1055333 - RNA, 22 nt, Human
cugaaugaggaaaagagugagg

SEQ ID NO: 1055334 - RNA, 22 nt, Human
cccaggaggcagagguugcagu

SEQ ID NO: 1055335 - RNA, 20 nt, Human
gcugcucgcugcagucacuc

SEQ ID NO: 1055336 - RNA, 22 nt, Human
cugccuucaucucugagcuggg

SEQ ID NO: 1055337 - RNA, 22 nt, Human
uucuucuccgaggagggcuggu

SEQ ID NO: 1055338 - RNA, 22 nt, Human
cuggguaaguuccuaaggcuca

SEQ ID NO: 1055339 - RNA, 22 nt, Human
ugccuggauucgguuguuguca

SEQ ID NO: 1055340 - RNA, 22 nt, Human
gcugccuuaugucuauuaguau

SEQ ID NO: 1055341 - RNA, 22 nt, Human
agcugguaaaggggaaagcaga

SEQ ID NO: 1055342 - RNA, 22 nt, Human
acuguagcugccacuggaugca

SEQ ID NO: 1055343 - RNA, 22 nt, Human
uaggauuuggcuuuagucaggu

SEQ ID NO: 1055344 - RNA, 22 nt, Human
cccagggacagaugggcagcua

SEQ ID NO: 1055345 - RNA, 22 nt, Human
cuguaacuuaaugagaggcaga

SEQ ID NO: 1055346 - RNA, 22 nt, Human
cagaaguuccuauuuaccuccu

SEQ ID NO: 1055347 - RNA, 22 nt, Human
ucaggcugguggucagauggcu

SEQ ID NO: 1055348 - RNA, 22 nt, Human
aguacauauaguaauuuagcca

SEQ ID NO: 1055349 - RNA, 22 nt, Human
gaaaggcaguacagcugagccu

SEQ ID NO: 1055350 - RNA, 22 nt, Human
caaauacugaguuuauuuucaa

SEQ ID NO: 1055351 - RNA, 22 nt, Human
uuagccauggacugaauugacu

SEQ ID NO: 1055352 - RNA, 22 nt, Human
cagggaggcugucuuaugccug

SEQ ID NO: 1055353 - RNA, 22 nt, Human
cuugggaaugcuaacagaugac

SEQ ID NO: 1055354 - RNA, 22 nt, Human
cagccuuuuccauguauuguug

SEQ ID NO: 1055355 - RNA, 22 nt, Human
gaugccuccaaaugagggcaga

SEQ ID NO: 1055356 - RNA, 22 nt, Human
gagcaggcauucuaguggcuga

SEQ ID NO: 1055357 - RNA, 22 nt, Human
aauagcucacugauuucucuuu

SEQ ID NO: 1055358 - RNA, 19 nt, Human
cugaggcccauguaccaug

SEQ ID NO: 1055359 - RNA, 22 nt, Human
ucuuggcuguaccauugacuag

SEQ ID NO: 1055360 - RNA, 22 nt, Human
uauaucaccaaaaacaguucug

SEQ ID NO: 1055361 - RNA, 22 nt, Human
uuggccaagugguuaaucucca

SEQ ID NO: 1055362 - RNA, 22 nt, Human
uucauugugaacacauucugcc

SEQ ID NO: 1055363 - RNA, 22 nt, Human
agguaaacaggagaaaaugaga

SEQ ID NO: 1055364 - RNA, 22 nt, Human
ugcauggaggaagaugaaugca

SEQ ID NO: 1055365 - RNA, 22 nt, Human
ccuggcugugugaccuuggcaa

SEQ ID NO: 1055366 - RNA, 22 nt, Human
cucaggaugaaagucaugguga

SEQ ID NO: 1055367 - RNA, 22 nt, Human
uaaaacugcuugguauggucua

SEQ ID NO: 1055368 - RNA, 22 nt, Human
acugaggucuaucaugagccag

SEQ ID NO: 1055369 - RNA, 22 nt, Human
uccccucccuuccaacagagcu

SEQ ID NO: 1055370 - RNA, 22 nt, Human
uagcccagaagagggaagcaac

SEQ ID NO: 1055371 - RNA, 18 nt, Human
auaaagugcuaauaaugg

SEQ ID NO: 1055372 - RNA, 22 nt, Human
gaggcccacagggaguaccaag

SEQ ID NO: 1055373 - RNA, 22 nt, Human
cugcugugagcacuccagccug

SEQ ID NO: 1055374 - RNA, 22 nt, Human
ucuccugggaggacaaggaagg

SEQ ID NO: 1055375 - RNA, 22 nt, Human
aaggcugacguuuguguuuauu

SEQ ID NO: 1055376 - RNA, 17 nt, Human
gagacagcaggagcccc

SEQ ID NO: 1055377 - RNA, 22 nt, Human
accuacauguuccacauaguug

SEQ ID NO: 1055378 - RNA, 22 nt, Human
ucuacuguagugaugcugcagu

SEQ ID NO: 1055379 - RNA, 22 nt, Human
aguagugaacagccacaggauu

SEQ ID NO: 1055380 - RNA, 22 nt, Human
guucuucagauuccauuucagu

SEQ ID NO: 1055381 - RNA, 22 nt, Human
aagccgaggccacacagcagga

SEQ ID NO: 1055382 - RNA, 17 nt, Human
cagacaggcugucaccc

SEQ ID NO: 1055383 - RNA, 22 nt, Human
uggagcugggguuugaaucugg

SEQ ID NO: 1055384 - RNA, 23 nt, Human
aguaaagcaauuguuggcgagag

SEQ ID NO: 1055385 - RNA, 22 nt, Human
ucuuuggaucccaacuggcugg

SEQ ID NO: 1055386 - RNA, 22 nt, Human
gggcugagcacauacugacagc

SEQ ID NO: 1055387 - RNA, 22 nt, Human
uacacuuucguuuguggauuag

SEQ ID NO: 1055388 - RNA, 22 nt, Human
ggccaggagcugcacagggcuc

SEQ ID NO: 1055389 - RNA, 22 nt, Human
uagcaagacaacuuuucucagu

SEQ ID NO: 1055390 - RNA, 22 nt, Human
cuuuaaauaauacaagguccag

SEQ ID NO: 1055391 - RNA, 22 nt, Human
ggcagccaggaggguguaguuu

SEQ ID NO: 1055392 - RNA, 22 nt, Human
cagcuaauccucucuauccaag

SEQ ID NO: 1055393 - RNA, 22 nt, Human
uuaaauauuuucagcaggguca

SEQ ID NO: 1055394 - RNA, 22 nt, Human
gggcagcugcagggauggugac

SEQ ID NO: 1055395 - RNA, 22 nt, Human
cugggccagggaggugucugua

SEQ ID NO: 1055396 - RNA, 22 nt, Human
gaagccuugaacugcaaacccc

SEQ ID NO: 1055397 - RNA, 22 nt, Human
agacagagauacuauguuguca

SEQ ID NO: 1055398 - RNA, 22 nt, Human
ucccuccccacuucugagcuuu

SEQ ID NO: 1055399 - RNA, 22 nt, Human
ggcuuugccuggaauuuccuug

SEQ ID NO: 1055400 - RNA, 22 nt, Human
cccugguggggccagacuugcu

SEQ ID NO: 1055401 - RNA, 22 nt, Human
aguuagaauggauguugagagc

SEQ ID NO: 1055402 - RNA, 22 nt, Human
aggguagggccguagggccaug

SEQ ID NO: 1055403 - RNA, 22 nt, Human
auguuucaaugcacuuuagccu

SEQ ID NO: 1055404 - RNA, 22 nt, Human
uacaucauaauaauacuuagaa

SEQ ID NO: 1055405 - RNA, 22 nt, Human
caggauggagaguuguugguug

SEQ ID NO: 1055406 - RNA, 20 nt, Human
uuuacauuuugaaacaguga

SEQ ID NO: 1055407 - RNA, 22 nt, Human
gagggcugcuggaaaaaugcag

SEQ ID NO: 1055408 - RNA, 22 nt, Human
cuccuggaccagggcuauuggg

SEQ ID NO: 1055409 - RNA, 22 nt, Human
ggcaagcucaggccucaggugu

SEQ ID NO: 1055410 - RNA, 22 nt, Human
aagggcuggcccugggaagagu

SEQ ID NO: 1055411 - RNA, 22 nt, Human
gacauuuauuagaaaacuauca

SEQ ID NO: 1055412 - RNA, 22 nt, Human
aggaagcuaaccagggagugag

SEQ ID NO: 1055413 - RNA, 22 nt, Human
aagcaauagcaacaacuuuaca

SEQ ID NO: 1055414 - RNA, 22 nt, Human
cagagagggcggcccuggcuuc

SEQ ID NO: 1055415 - RNA, 22 nt, Human
caggguggggaaauagcgcccu

SEQ ID NO: 1055416 - RNA, 22 nt, Human
uauuggaugauucacuuggcag

SEQ ID NO: 1055417 - RNA, 22 nt, Human
gcuuugaagucugugucuuuug

SEQ ID NO: 1055418 - RNA, 22 nt, Human
uggcagcuguguccagguagaa

SEQ ID NO: 1055419 - RNA, 22 nt, Human
ucauuugugugagugauuugac

SEQ ID NO: 1055420 - RNA, 17 nt, Human
aggcagcucagaacauc

SEQ ID NO: 1055421 - RNA, 22 nt, Human
ugccaggauauaagagugcgau

SEQ ID NO: 1055422 - RNA, 22 nt, Human
ccaggaugacccccacuuuccu

SEQ ID NO: 1055423 - RNA, 22 nt, Human
acauuuaaauaccuauguuucu

SEQ ID NO: 1055424 - RNA, 22 nt, Human
augaacagcauugaaauccagc

SEQ ID NO: 1055425 - RNA, 22 nt, Human
ucugaaagaagggcagucuuuu

SEQ ID NO: 1055426 - RNA, 22 nt, Human
ggagggacccacucuagaggug

SEQ ID NO: 1055427 - RNA, 22 nt, Human
gaaaacuuggaucucuagaaug

SEQ ID NO: 1055428 - RNA, 22 nt, Human
gcucagagcuugaaguuccacu

SEQ ID NO: 1055429 - RNA, 22 nt, Human
cccaggaacagggcucagaccc

SEQ ID NO: 1055430 - RNA, 23 nt, Human
cccaggaguuucacugcaaaggu

SEQ ID NO: 1055431 - RNA, 20 nt, Human
ccuggcugcauucaggacgg

SEQ ID NO: 1055432 - RNA, 22 nt, Human
augcugagauaaggcuuuaguc

SEQ ID NO: 1055433 - RNA, 16 nt, Human
gucuggccuaccugcc

SEQ ID NO: 1055434 - RNA, 22 nt, Human
gcaggcugcugagauccuuagg

SEQ ID NO: 1055435 - RNA, 22 nt, Human
ccagagcuugacgugcaacgga

SEQ ID NO: 1055436 - RNA, 22 nt, Human
cagagggcacaugguuuccuca

SEQ ID NO: 1055437 - RNA, 22 nt, Human
auuuuacuuugugaauauugac

SEQ ID NO: 1055438 - RNA, 22 nt, Human
aggcagcauccagaggagaaug

SEQ ID NO: 1055439 - RNA, 22 nt, Human
uugaaaguagcagcugcauaug

SEQ ID NO: 1055440 - RNA, 22 nt, Human
agaggagguccuuuucugaugu

SEQ ID NO: 1055441 - RNA, 22 nt, Human
ccacagugaguucuguacucug

SEQ ID NO: 1055442 - RNA, 22 nt, Human
uccuucuuugacaaguggcaga

SEQ ID NO: 1055443 - RNA, 22 nt, Human
gucaggauuggggucaugaguc

SEQ ID NO: 1055444 - RNA, 22 nt, Human
gcugaaugaauguauuuuaaaa

SEQ ID NO: 1055445 - RNA, 22 nt, Human
gacccaggaagcuacuucuggu

SEQ ID NO: 1055446 - RNA, 22 nt, Human
cugacuguaauucuguucuuaa

SEQ ID NO: 1055447 - RNA, 22 nt, Human
agacaggcagaggcugcagagg

SEQ ID NO: 1055448 - RNA, 22 nt, Human
agcuagaauguuccuuuucauu

SEQ ID NO: 1055449 - RNA, 22 nt, Human
uuuggaaaguugucacuuuaga

SEQ ID NO: 1055450 - RNA, 19 nt, Human
uaaggccaaaaguaagugu

SEQ ID NO: 1055451 - RNA, 22 nt, Human
gucaggauguuuauucuccagu

SEQ ID NO: 1055452 - RNA, 22 nt, Human
cagagcuguccaaacccugaca

SEQ ID NO: 1055453 - RNA, 22 nt, Human
aggcugagguaggaggaucgcu

SEQ ID NO: 1055454 - RNA, 22 nt, Human
cccuggagguggagguugcagg

SEQ ID NO: 1055455 - RNA, 22 nt, Human
agcaagaugcauuauuucuuau

SEQ ID NO: 1055456 - RNA, 22 nt, Human
ggagagaaucugaaccugcucc

SEQ ID NO: 1055457 - RNA, 22 nt, Human
auaguuugaaggcuguucuacu

SEQ ID NO: 1055458 - RNA, 22 nt, Human
cugagauggccacugggucuca

SEQ ID NO: 1055459 - RNA, 22 nt, Human
cagcaagauggugaaugagacg

SEQ ID NO: 1055460 - RNA, 22 nt, Human
cuugcuggugguguuuucuaug

SEQ ID NO: 1055461 - RNA, 22 nt, Human
uucagaaugugaccuuauuugg

SEQ ID NO: 1055462 - RNA, 22 nt, Human
cugagccagcuggcaugugcua

SEQ ID NO: 1055463 - RNA, 22 nt, Human
ccuccugggagagcacggaggg

SEQ ID NO: 1055464 - RNA, 22 nt, Human
aaaggcaggcuuucacaucuca

SEQ ID NO: 1055465 - RNA, 22 nt, Human
uauuucuucgggauucaagcua

SEQ ID NO: 1055466 - RNA, 22 nt, Human
guaggcagauaggagugcagcc

SEQ ID NO: 1055467 - RNA, 22 nt, Human
uggucaacaggcagggaugaaa

SEQ ID NO: 1055468 - RNA, 22 nt, Human
ugaagggggagauauaugugug

SEQ ID NO: 1055469 - RNA, 22 nt, Human
caggcagcugacugucagauau

SEQ ID NO: 1055470 - RNA, 22 nt, Human
aaucuucuacuugacaguucuc

SEQ ID NO: 1055471 - RNA, 18 nt, Human
cagggcuguggggucacu

SEQ ID NO: 1055472 - RNA, 22 nt, Human
gcagacagggcuacagagguac

SEQ ID NO: 1055473 - RNA, 22 nt, Human
ucccaggaaugucugaaaguga

SEQ ID NO: 1055474 - RNA, 22 nt, Human
ggcugagacaaccugggaccca

SEQ ID NO: 1055475 - RNA, 23 nt, Human
aggcgagcucuucuccagcacgu

SEQ ID NO: 1055476 - RNA, 22 nt, Human
auggccaagaucacagacuuca

SEQ ID NO: 1055477 - RNA, 22 nt, Human
aagagaggacauggugaaccug

SEQ ID NO: 1055478 - RNA, 22 nt, Human
uggcuucucaguuucauaauga

SEQ ID NO: 1055479 - RNA, 22 nt, Human
gcauguguggaggagaugugcu

SEQ ID NO: 1055480 - RNA, 22 nt, Human
ucaacugcaaguuugcuuaguu

SEQ ID NO: 1055481 - RNA, 22 nt, Human
acaggagacccugcugguucug

SEQ ID NO: 1055482 - RNA, 22 nt, Human
uucagggagagcgggacgggug

SEQ ID NO: 1055483 - RNA, 22 nt, Human
cuggcugaggcagagccugggg

SEQ ID NO: 1055484 - RNA, 22 nt, Human
cauuuguaucugggcugcugug

SEQ ID NO: 1055485 - RNA, 22 nt, Human
uagaaaguagccacuuacagag

SEQ ID NO: 1055486 - RNA, 22 nt, Human
ucugaggucacagauuucaaga

SEQ ID NO: 1055487 - RNA, 22 nt, Human
ggaggcagaacuucccgucagu

SEQ ID NO: 1055488 - RNA, 22 nt, Human
gacccaggguauccagagcugc

SEQ ID NO: 1055489 - RNA, 22 nt, Human
ucugcuguaaagaauuucugcc

SEQ ID NO: 1055490 - RNA, 22 nt, Human
aggaugagagauacauggagca

SEQ ID NO: 1055491 - RNA, 22 nt, Human
cacauuuaauccuuuauaagua

SEQ ID NO: 1055492 - RNA, 23 nt, Human
uuugaaaguaucaacucgccuga

SEQ ID NO: 1055493 - RNA, 18 nt, Human
aacaugcauuagaacugc

SEQ ID NO: 1055494 - RNA, 18 nt, Human
agaggggagguaagucug

SEQ ID NO: 1055495 - RNA, 22 nt, Human
uuugaaguguuauuucuaucac

SEQ ID NO: 1055496 - RNA, 22 nt, Human
uggcuacaaguguguuuaguuu

SEQ ID NO: 1055497 - RNA, 22 nt, Human
aaagccaugggucuuuggcaua

SEQ ID NO: 1055498 - RNA, 22 nt, Human
ggcaugcucuuuguccacagua

SEQ ID NO: 1055499 - RNA, 21 nt, Human
auacauucuauuaagcauuua

SEQ ID NO: 1055500 - RNA, 22 nt, Human
cugaggucuauuuugaaacugc

SEQ ID NO: 1055501 - RNA, 22 nt, Human
uaucuaaauggaauauuccaga

SEQ ID NO: 1055502 - RNA, 22 nt, Human
uaaauuguuuucuagaaguugu

SEQ ID NO: 1055503 - RNA, 22 nt, Human
ucacacagguuugcaaugauuu

SEQ ID NO: 1055504 - RNA, 22 nt, Human
gugguuuucuccaacccagaac

SEQ ID NO: 1055505 - RNA, 22 nt, Human
gcuggcugcacaggggcucacu

SEQ ID NO: 1055506 - RNA, 22 nt, Human
gaucuguuauaaucucuuuuau

SEQ ID NO: 1055507 - RNA, 22 nt, Human
uuauucuucuucucuugccagg

SEQ ID NO: 1055508 - RNA, 17 nt, Human
uucaaagcuuaucaagg

SEQ ID NO: 1055509 - RNA, 22 nt, Human
ccaggagcagauauggacauaa

SEQ ID NO: 1055510 - RNA, 22 nt, Human
cccaggagagaggggauaaagc

SEQ ID NO: 1055511 - RNA, 22 nt, Human
cccuggugcccugggucagccu

SEQ ID NO: 1055512 - RNA, 22 nt, Human
uuauuccaguaaucucuguaau

SEQ ID NO: 1055513 - RNA, 22 nt, Human
uuuuauauggcacauugguugg

SEQ ID NO: 1055514 - RNA, 22 nt, Human
uggaggggcaauggagcgcgga

SEQ ID NO: 1055515 - RNA, 22 nt, Human
cagguuggucggcaaguacaca

SEQ ID NO: 1055516 - RNA, 20 nt, Human
aguuacgcuauuacucuccu

SEQ ID NO: 1055517 - RNA, 22 nt, Human
agaccauggccauccuaggaaa

SEQ ID NO: 1055518 - RNA, 22 nt, Human
caguuggaggaaugaggcugua

SEQ ID NO: 1055519 - RNA, 22 nt, Human
cccaaggacacgggcagggaca

SEQ ID NO: 1055520 - RNA, 22 nt, Human
uucauucugggcucuaaggaac

SEQ ID NO: 1055521 - RNA, 22 nt, Human
ugcucaguccuccugcagugcc

SEQ ID NO: 1055522 - RNA, 22 nt, Human
uagugcagaggaggagccucug

SEQ ID NO: 1055523 - RNA, 22 nt, Human
ucuuugcacugugcaagcagaa

SEQ ID NO: 1055524 - RNA, 22 nt, Human
gcugaguugaaagcagaggaua

SEQ ID NO: 1055525 - RNA, 22 nt, Human
guggcacaaggcuuacacagca

SEQ ID NO: 1055526 - RNA, 22 nt, Human
uugauacaggcucuauuucauc

SEQ ID NO: 1055527 - RNA, 22 nt, Human
ucauuauccuaguaucuugaau

SEQ ID NO: 1055528 - RNA, 22 nt, Human
ugcugagggagcaucaaagaaa

SEQ ID NO: 1055529 - RNA, 20 nt, Human
uucuaauuugauggaguagc

SEQ ID NO: 1055530 - RNA, 22 nt, Human
gauuucuuugcaagcuguguuc

SEQ ID NO: 1055531 - RNA, 22 nt, Human
uggaaagcgaggaguuggcauu

SEQ ID NO: 1055532 - RNA, 22 nt, Human
auaagguauaaggccuauuuuu

SEQ ID NO: 1055533 - RNA, 22 nt, Human
ggaggggauuuaguagaugcua

SEQ ID NO: 1055534 - RNA, 22 nt, Human
uccaagcuugcuuuagccacag

SEQ ID NO: 1055535 - RNA, 22 nt, Human
cucugcauuuuaacagaugauu

SEQ ID NO: 1055536 - RNA, 22 nt, Human
uaggagggcccugaaaauggca

SEQ ID NO: 1055537 - RNA, 20 nt, Human
uugaggucaaggacuaggcc

SEQ ID NO: 1055538 - RNA, 22 nt, Human
aggaaagguagcgugccagcag

SEQ ID NO: 1055539 - RNA, 22 nt, Human
cuuugcaaacugucacacuuuc

SEQ ID NO: 1055540 - RNA, 19 nt, Human
cuucuucuuggcagccaag

SEQ ID NO: 1055541 - RNA, 22 nt, Human
uggcaccagcaccuagaugggg

SEQ ID NO: 1055542 - RNA, 22 nt, Human
uuacacuuaggguuugucagag

SEQ ID NO: 1055543 - RNA, 22 nt, Human
uagggcuguuaguaauucucag

SEQ ID NO: 1055544 - RNA, 22 nt, Human
uuauguagugacugacuguuag

SEQ ID NO: 1055545 - RNA, 22 nt, Human
ggaggaggggugacugaaugcu

SEQ ID NO: 1055546 - RNA, 22 nt, Human
cugagcuguuacucuguccucg

SEQ ID NO: 1055547 - RNA, 22 nt, Human
ggccaggaagggaagaucagca

SEQ ID NO: 1055548 - RNA, 22 nt, Human
guagccauuggcaaugaagccu

SEQ ID NO: 1055549 - RNA, 22 nt, Human
agcccaggaaucugcaucuuga

SEQ ID NO: 1055550 - RNA, 22 nt, Human
ugaggcuguucuaccagggcca

SEQ ID NO: 1055551 - RNA, 22 nt, Human
uuggcaucaguguaggaccugu

SEQ ID NO: 1055552 - RNA, 22 nt, Human
acagugcuggcuacaacccugg

SEQ ID NO: 1055553 - RNA, 22 nt, Human
uggucaaaaaggccuagacaca

SEQ ID NO: 1055554 - RNA, 22 nt, Human
ugcugaggacaccuagccuucu

SEQ ID NO: 1055555 - RNA, 21 nt, Human
ucacaucuauguuaagcaaac

SEQ ID NO: 1055556 - RNA, 22 nt, Human
gagcaagacuacaggcagauga

SEQ ID NO: 1055557 - RNA, 19 nt, Human
cuuauuagagugagagcuu

SEQ ID NO: 1055558 - RNA, 22 nt, Human
uaacauuauacagagaggacag

SEQ ID NO: 1055559 - RNA, 22 nt, Human
aaauauaguaaaugcauaguuc

SEQ ID NO: 1055560 - RNA, 22 nt, Human
uucacaaaacacuauuuucugg

SEQ ID NO: 1055561 - RNA, 22 nt, Human
aggcacagagaaugcccuccau

SEQ ID NO: 1055562 - RNA, 22 nt, Human
gacaggcuucauccucagaguu

SEQ ID NO: 1055563 - RNA, 22 nt, Human
ggagugucagaaacaguguccu

SEQ ID NO: 1055564 - RNA, 22 nt, Human
auauuagguuggugcaaaagua

SEQ ID NO: 1055565 - RNA, 22 nt, Human
cugccugcacugccuggcucca

SEQ ID NO: 1055566 - RNA, 22 nt, Human
aggcugaggcuuuccuuggaga

SEQ ID NO: 1055567 - RNA, 22 nt, Human
aaacccugcccuucccaagaug

SEQ ID NO: 1055568 - RNA, 22 nt, Human
ggcugcggaucuaaggcuggga

SEQ ID NO: 1055569 - RNA, 22 nt, Human
auauauaaccuggauaaggcuu

SEQ ID NO: 1055570 - RNA, 22 nt, Human
guggccaaggugcagagcagcu

SEQ ID NO: 1055571 - RNA, 20 nt, Human
agguccacugaggcugccuc

SEQ ID NO: 1055572 - RNA, 22 nt, Human
ucaggcuguuccuguccaaaau

SEQ ID NO: 1055573 - RNA, 20 nt, Human
cacaggaaagcuacucaguu

SEQ ID NO: 1055574 - RNA, 23 nt, Human
uggaggaaacacaucagaagacc

SEQ ID NO: 1055575 - RNA, 22 nt, Human
agcugcccuuaauaggcauuca

SEQ ID NO: 1055576 - RNA, 22 nt, Human
ugcuucugggcaaaugugugug

SEQ ID NO: 1055577 - RNA, 22 nt, Human
ucaguucuuuauuucacaguga

SEQ ID NO: 1055578 - RNA, 22 nt, Human
gucuggccuuuuuagcuugugg

SEQ ID NO: 1055579 - RNA, 22 nt, Human
aauaucaacaguguccuucuaa

SEQ ID NO: 1055580 - RNA, 22 nt, Human
cuggccaacaucuggggcacau

SEQ ID NO: 1055581 - RNA, 19 nt, Human
uccaggagcaaagccaguu

SEQ ID NO: 1055582 - RNA, 22 nt, Human
acccaggagcucugggguccuc

SEQ ID NO: 1055583 - RNA, 22 nt, Human
uauguuauuuucauacaacaga

SEQ ID NO: 1055584 - RNA, 22 nt, Human
acuucuucuucagcugggggau

SEQ ID NO: 1055585 - RNA, 22 nt, Human
uucccaugccuggccccuaucc

SEQ ID NO: 1055586 - RNA, 22 nt, Human
aaacaggcaucacucagcaaag

SEQ ID NO: 1055587 - RNA, 19 nt, Human
accaggaguaucagagcug

SEQ ID NO: 1055588 - RNA, 22 nt, Human
acagugaggacagggacugugu

SEQ ID NO: 1055589 - RNA, 21 nt, Human
cuguggaagggaacuagaggg

SEQ ID NO: 1055590 - RNA, 22 nt, Human
aagauuauggcagauaacaauu

SEQ ID NO: 1055591 - RNA, 22 nt, Human
auacauauaugguacuuccugg

SEQ ID NO: 1055592 - RNA, 22 nt, Human
caccguuugguuuggauuuaca

SEQ ID NO: 1055593 - RNA, 22 nt, Human
uuaaaugaggcugauguagauu

SEQ ID NO: 1055594 - RNA, 22 nt, Human
gugaaggacuagcauggagggc

SEQ ID NO: 1055595 - RNA, 20 nt, Human
uuggcagcuucaggguacua

SEQ ID NO: 1055596 - RNA, 19 nt, Human
acuuccugcccgcuccuuu

SEQ ID NO: 1055597 - RNA, 22 nt, Human
caauuauauuuagaaugauaca

SEQ ID NO: 1055598 - RNA, 22 nt, Human
gcaggcaguuauuuaguagaau

SEQ ID NO: 1055599 - RNA, 22 nt, Human
augcuguguggccaccuccaug

SEQ ID NO: 1055600 - RNA, 22 nt, Human
ccuggccaggcauggagucaca

SEQ ID NO: 1055601 - RNA, 22 nt, Human
aaauuauuacaagcuaguuggc

SEQ ID NO: 1055602 - RNA, 22 nt, Human
guaggcagucucucaggugauc

SEQ ID NO: 1055603 - RNA, 22 nt, Human
uguuaagaagaggcaguacuua

SEQ ID NO: 1055604 - RNA, 22 nt, Human
cucuuucugauucgcugggacc

SEQ ID NO: 1055605 - RNA, 22 nt, Human
ccauuaguaccucuggaaaauu

SEQ ID NO: 1055606 - RNA, 22 nt, Human
uuuuuaguagagguggguuuca

SEQ ID NO: 1055607 - RNA, 22 nt, Human
uagacuuugauauuguacaccc

SEQ ID NO: 1055608 - RNA, 22 nt, Human
gcugccagccaacuugcugugc

SEQ ID NO: 1055609 - RNA, 22 nt, Human
uaaauuauguuccauguccuuu

SEQ ID NO: 1055610 - RNA, 22 nt, Human
auguuucaccaguuuuauaaga

SEQ ID NO: 1055611 - RNA, 22 nt, Human
auuaggaaauguguugcaagca

SEQ ID NO: 1055612 - RNA, 22 nt, Human
uugguacaugcagauauuuagu

SEQ ID NO: 1055613 - RNA, 18 nt, Human
gagagcccagcagguggu

SEQ ID NO: 1055614 - RNA, 22 nt, Human
auauuguugacuauaagaguaa

SEQ ID NO: 1055615 - RNA, 22 nt, Human
uaggcagccagcaucaguuggg

SEQ ID NO: 1055616 - RNA, 22 nt, Human
ggcagccuugagggaggccugg

SEQ ID NO: 1055617 - RNA, 22 nt, Human
ccagugcuucuuugcuagcugg

SEQ ID NO: 1055618 - RNA, 22 nt, Human
gccugcagauauauaggauggu

SEQ ID NO: 1055619 - RNA, 22 nt, Human
gagcaagacccuggguucucuc

SEQ ID NO: 1055620 - RNA, 22 nt, Human
uagggauguggugagaacugag

SEQ ID NO: 1055621 - RNA, 22 nt, Human
augcugugccuucucugugcca

SEQ ID NO: 1055622 - RNA, 22 nt, Human
augcagcuucaggauuaugaug

SEQ ID NO: 1055623 - RNA, 22 nt, Human
cucagugugaaugcucaguaaa

SEQ ID NO: 1055624 - RNA, 22 nt, Human
ccagaggaaaaauaucucccua

SEQ ID NO: 1055625 - RNA, 22 nt, Human
ccagcagagcauggggaggaag

SEQ ID NO: 1055626 - RNA, 22 nt, Human
uagggcugccauuugcuuuucu

SEQ ID NO: 1055627 - RNA, 22 nt, Human
cuucuuaucaaguggcaaaucu

SEQ ID NO: 1055628 - RNA, 22 nt, Human
gcaggggcuaaggacacagaga

SEQ ID NO: 1055629 - RNA, 22 nt, Human
cauuuuaagaugaccugguuuc

SEQ ID NO: 1055630 - RNA, 22 nt, Human
accaggagggacccugguggcc

SEQ ID NO: 1055631 - RNA, 22 nt, Human
caggcugcggccgugugagcau

SEQ ID NO: 1055632 - RNA, 22 nt, Human
cucuucuuggcccccaugaggg

SEQ ID NO: 1055633 - RNA, 22 nt, Human
auucugaguccaugggggcagg

SEQ ID NO: 1055634 - RNA, 22 nt, Human
aaagcagagguugcagugagcu

SEQ ID NO: 1055635 - RNA, 22 nt, Human
ggucugaaaauggugaccacca

SEQ ID NO: 1055636 - RNA, 22 nt, Human
uuaaaaugaauauugauuagca

SEQ ID NO: 1055637 - RNA, 22 nt, Human
agacaguguguguauauauggu

SEQ ID NO: 1055638 - RNA, 22 nt, Human
guucucucugcuuccaagaugg

SEQ ID NO: 1055639 - RNA, 23 nt, Human
acagaaaucauuuguaagguacc

SEQ ID NO: 1055640 - RNA, 21 nt, Human
agacaguaacucuucuacucc

SEQ ID NO: 1055641 - RNA, 22 nt, Human
cauaaaguaaagaugucuucca

SEQ ID NO: 1055642 - RNA, 22 nt, Human
aggcaggccccugagaauagac

SEQ ID NO: 1055643 - RNA, 22 nt, Human
gaggcagugucgguggcaggau

SEQ ID NO: 1055644 - RNA, 22 nt, Human
aguuggcauuuuauuuaaguau

SEQ ID NO: 1055645 - RNA, 22 nt, Human
ugaggccagcuucagcagugga

SEQ ID NO: 1055646 - RNA, 22 nt, Human
ugaaagguagcuggccucauag

SEQ ID NO: 1055647 - RNA, 20 nt, Human
ggcaggcuuuauauggaggg

SEQ ID NO: 1055648 - RNA, 22 nt, Human
cagcuggccccacaguagaggc

SEQ ID NO: 1055649 - RNA, 22 nt, Human
gcuguguuuuauguuagguuaa

SEQ ID NO: 1055650 - RNA, 22 nt, Human
guaagauuuaaaauagcaauug

SEQ ID NO: 1055651 - RNA, 22 nt, Human
uccucagacuucccuuugugua

SEQ ID NO: 1055652 - RNA, 22 nt, Human
guugaaagaucauguggcugcc

SEQ ID NO: 1055653 - RNA, 20 nt, Human
aucuucuuggccagcuugcu

SEQ ID NO: 1055654 - RNA, 22 nt, Human
uucacagucacccuucuccaug

SEQ ID NO: 1055655 - RNA, 22 nt, Human
uguggaaaauuggaacguuccu

SEQ ID NO: 1055656 - RNA, 22 nt, Human
auuauuaggugcucucugacaa

SEQ ID NO: 1055657 - RNA, 22 nt, Human
uucuucucggcugucagauagu

SEQ ID NO: 1055658 - RNA, 22 nt, Human
uguggaaaagaauaagggagau

SEQ ID NO: 1055659 - RNA, 22 nt, Human
gcugaaauucagauuccuaggc

SEQ ID NO: 1055660 - RNA, 22 nt, Human
aaucauaauuguauacauucau

SEQ ID NO: 1055661 - RNA, 22 nt, Human
cacagauaaggauguuaauuuu

SEQ ID NO: 1055662 - RNA, 22 nt, Human
ggugagaggcagaggacagcuu

SEQ ID NO: 1055663 - RNA, 22 nt, Human
uaacugguccugaacagcccag

SEQ ID NO: 1055664 - RNA, 19 nt, Human
uucuccagccugaccugag

SEQ ID NO: 1055665 - RNA, 22 nt, Human
guucuucaucauuuuagauagg

SEQ ID NO: 1055666 - RNA, 22 nt, Human
ucaggcuguuagccaccuccuc

SEQ ID NO: 1055667 - RNA, 22 nt, Human
acagaacuuccagggaacauac

SEQ ID NO: 1055668 - RNA, 22 nt, Human
uaagauuacagugagaaauaaa

SEQ ID NO: 1055669 - RNA, 22 nt, Human
aaaaccugauugaauucuauuu

SEQ ID NO: 1055670 - RNA, 22 nt, Human
ggcugagaaggagugggugagg

SEQ ID NO: 1055671 - RNA, 20 nt, Human
ugacuucuucaugcuguacu

SEQ ID NO: 1055672 - RNA, 22 nt, Human
cuaaaugacagguaccauagug

SEQ ID NO: 1055673 - RNA, 22 nt, Human
auguucuuguucaaaugucagu

SEQ ID NO: 1055674 - RNA, 22 nt, Human
ggagagaauuccauggacaugu

SEQ ID NO: 1055675 - RNA, 23 nt, Human
auguauuuaaauuucagugauga

SEQ ID NO: 1055676 - RNA, 22 nt, Human
gagcugagacacacuuuggcaa

SEQ ID NO: 1055677 - RNA, 22 nt, Human
augcuguguauuuuacucuuuc

SEQ ID NO: 1055678 - RNA, 22 nt, Human
ggagaggagauuguggcauuuu

SEQ ID NO: 1055679 - RNA, 22 nt, Human
caggcaugcuucugucugggca

SEQ ID NO: 1055680 - RNA, 22 nt, Human
ucugggaacacacgucacuuca

SEQ ID NO: 1055681 - RNA, 22 nt, Human
cuguaguugaugauuucugaua

SEQ ID NO: 1055682 - RNA, 22 nt, Human
ugcugagguaaccauauccugc

SEQ ID NO: 1055683 - RNA, 21 nt, Human
uuucuucacuuugccccaugu

SEQ ID NO: 1055684 - RNA, 22 nt, Human
ccacagagacaggguccuugcu

SEQ ID NO: 1055685 - RNA, 22 nt, Human
caggaugagaagggcucuuacg

SEQ ID NO: 1055686 - RNA, 22 nt, Human
agcugugaccuucaagagcuac

SEQ ID NO: 1055687 - RNA, 22 nt, Human
uagggaugagccaguggguagu

SEQ ID NO: 1055688 - RNA, 19 nt, Human
caacugcccccucaaacau

SEQ ID NO: 1055689 - RNA, 18 nt, Human
ccuggagcuccacagcaa

SEQ ID NO: 1055690 - RNA, 22 nt, Human
caucuuuuggccuauucugagg

SEQ ID NO: 1055691 - RNA, 22 nt, Human
cugcuguggaugcaggaccuca

SEQ ID NO: 1055692 - RNA, 22 nt, Human
caggcagcucuaauggaaagug

SEQ ID NO: 1055693 - RNA, 22 nt, Human
ugaugaauaaacuugagaguca

SEQ ID NO: 1055694 - RNA, 22 nt, Human
gauauuuugagaaauccuauga

SEQ ID NO: 1055695 - RNA, 22 nt, Human
cagagggcucuuggcugccugc

SEQ ID NO: 1055696 - RNA, 22 nt, Human
uacauaguauucacauuguuuu

SEQ ID NO: 1055697 - RNA, 22 nt, Human
uuccaugaaagugaaauggagc

SEQ ID NO: 1055698 - RNA, 22 nt, Human
aauuuuaaucaguggugcugag

SEQ ID NO: 1055699 - RNA, 22 nt, Human
cugccuggggaaugugaggauu

SEQ ID NO: 1055700 - RNA, 22 nt, Human
agugcuuucuugcuccaucagu

SEQ ID NO: 1055701 - RNA, 18 nt, Human
cucuuucuuuggcacaaa

SEQ ID NO: 1055702 - RNA, 22 nt, Human
uuggccaaaaaagucauuagaa

SEQ ID NO: 1055703 - RNA, 22 nt, Human
ucaggcugguccccacagugga

SEQ ID NO: 1055704 - RNA, 22 nt, Human
aauuaacuaauuugguacaaga

SEQ ID NO: 1055705 - RNA, 23 nt, Human
gugagucuugccuuugcugugga

SEQ ID NO: 1055706 - RNA, 22 nt, Human
ggagggcugccagguggagcgg

SEQ ID NO: 1055707 - RNA, 22 nt, Human
ugaacuccaaauacugcugauu

SEQ ID NO: 1055708 - RNA, 22 nt, Human
gaaauauuguacuggagauguu

SEQ ID NO: 1055709 - RNA, 22 nt, Human
ggaggccagccugaggcugagg

SEQ ID NO: 1055710 - RNA, 22 nt, Human
acgagagguccuuagaaucugu

SEQ ID NO: 1055711 - RNA, 20 nt, Human
auccaugagagucuggauuc

SEQ ID NO: 1055712 - RNA, 20 nt, Human
aggcaguuagaaggagauga

SEQ ID NO: 1055713 - RNA, 22 nt, Human
uuauuugcccauguuuagcaga

SEQ ID NO: 1055714 - RNA, 22 nt, Human
uuagauaaagugauguaggcua

SEQ ID NO: 1055715 - RNA, 22 nt, Human
uucauucuugucuuuguauagu

SEQ ID NO: 1055716 - RNA, 21 nt, Human
acauaacugucaaguaacguu

SEQ ID NO: 1055717 - RNA, 22 nt, Human
agagcugaauucaagugcuggc

SEQ ID NO: 1055718 - RNA, 22 nt, Human
ugcuucagcacuuugagagccu

SEQ ID NO: 1055719 - RNA, 22 nt, Human
uaucuguuaggaucagagcugg

SEQ ID NO: 1055720 - RNA, 22 nt, Human
uugacuucccagacuuguguuu

SEQ ID NO: 1055721 - RNA, 22 nt, Human
gggagagguuacccgagcaacu

SEQ ID NO: 1055722 - RNA, 22 nt, Human
aucauucugauggucaaugcua

SEQ ID NO: 1055723 - RNA, 22 nt, Human
uguuuauuuucaggauggauug

SEQ ID NO: 1055724 - RNA, 22 nt, Human
cuucugcaauaaguuuuggucc

SEQ ID NO: 1055725 - RNA, 22 nt, Human
cugcuguggccagccaggucaa

SEQ ID NO: 1055726 - RNA, 22 nt, Human
ugccaggauggccagggggcca

SEQ ID NO: 1055727 - RNA, 22 nt, Human
aaauuaguacauugcaaagucc

SEQ ID NO: 1055728 - RNA, 17 nt, Human
ucuccuggcucuaucag

SEQ ID NO: 1055729 - RNA, 22 nt, Human
uucuacagacuauaacugugau

SEQ ID NO: 1055730 - RNA, 22 nt, Human
aaaccgcaauuacuuuugcguc

SEQ ID NO: 1055731 - RNA, 22 nt, Human
uaaauuaaagauuggagaagga

SEQ ID NO: 1055732 - RNA, 22 nt, Human
gauuucuugaccccugucucag

SEQ ID NO: 1055733 - RNA, 22 nt, Human
acucagaaugacugaugcugug

SEQ ID NO: 1055734 - RNA, 22 nt, Human
agguccagcuguugcagccucc

SEQ ID NO: 1055735 - RNA, 22 nt, Human
ccaggcugcucacaagcugccc

SEQ ID NO: 1055736 - RNA, 22 nt, Human
cuauuucaaggcccagauauga

SEQ ID NO: 1055737 - RNA, 22 nt, Human
gaguagcagccacagaggaccc

SEQ ID NO: 1055738 - RNA, 22 nt, Human
acuccuggaaaagaacgcaggg

SEQ ID NO: 1055739 - RNA, 21 nt, Human
gguguccagaggaguccccag

SEQ ID NO: 1055740 - RNA, 22 nt, Human
caggcagcucgaugccuuguug

SEQ ID NO: 1055741 - RNA, 22 nt, Human
uucucugaucuugcuagacuga

SEQ ID NO: 1055742 - RNA, 22 nt, Human
acagacuggagcccuuuugccc

SEQ ID NO: 1055743 - RNA, 22 nt, Human
uuccuggcgccacggagccggu

SEQ ID NO: 1055744 - RNA, 23 nt, Human
aggcugagcucucccagcuucag

SEQ ID NO: 1055745 - RNA, 23 nt, Human
cuuuuaacuagaguaucagcugc

SEQ ID NO: 1055746 - RNA, 22 nt, Human
acccaggauaaucuguguaucu

SEQ ID NO: 1055747 - RNA, 19 nt, Human
caggaugaucccaugacac

SEQ ID NO: 1055748 - RNA, 22 nt, Human
caggcagagugagaagcccuug

SEQ ID NO: 1055749 - RNA, 22 nt, Human
acugagguauaauugacauaac

SEQ ID NO: 1055750 - RNA, 22 nt, Human
gggcugagggccaauuccuacu

SEQ ID NO: 1055751 - RNA, 22 nt, Human
aaaauacuguggaguguugaaa

SEQ ID NO: 1055752 - RNA, 22 nt, Human
auuaaauuagcaaacugugaaa

SEQ ID NO: 1055753 - RNA, 22 nt, Human
uaaguggaagguuauaugcuaa

SEQ ID NO: 1055754 - RNA, 22 nt, Human
ucuuccaagguugcacacuauc

SEQ ID NO: 1055755 - RNA, 23 nt, Human
uaauucacauauacauugcuuca

SEQ ID NO: 1055756 - RNA, 22 nt, Human
uguuguuuucucauggagaaua

SEQ ID NO: 1055757 - RNA, 22 nt, Human
aggcaggcucaaugcccagucu

SEQ ID NO: 1055758 - RNA, 21 nt, Human
uuugaaagcccuauguuuuca

SEQ ID NO: 1055759 - RNA, 22 nt, Human
uucaaugauuuuuagggaucau

SEQ ID NO: 1055760 - RNA, 22 nt, Human
cuguuaaucugcuugcaugaug

SEQ ID NO: 1055761 - RNA, 22 nt, Human
cugugccaucugcacucucguc

SEQ ID NO: 1055762 - RNA, 23 nt, Human
agggagcuaaaaggcuggagcag

SEQ ID NO: 1055763 - RNA, 19 nt, Human
cagagcugcuggccucguc

SEQ ID NO: 1055764 - RNA, 22 nt, Human
agggugguucuuuuaguggaag

SEQ ID NO: 1055765 - RNA, 22 nt, Human
gcugagagaaaagugagguucu

SEQ ID NO: 1055766 - RNA, 22 nt, Human
guucuucacauuucauugagga

SEQ ID NO: 1055767 - RNA, 22 nt, Human
ccaggcuguaagagugauguug

SEQ ID NO: 1055768 - RNA, 22 nt, Human
aggccagaaaugucagggagug

SEQ ID NO: 1055769 - RNA, 20 nt, Human
uucagaaauaaggaaugagg

SEQ ID NO: 1055770 - RNA, 22 nt, Human
uaaacauuuguuauucuuguuu

SEQ ID NO: 1055771 - RNA, 21 nt, Human
agcagaggggacauguuugau

SEQ ID NO: 1055772 - RNA, 22 nt, Human
uugcuguguaacuccuggccug

SEQ ID NO: 1055773 - RNA, 22 nt, Human
cucuccucugaaguggugaccc

SEQ ID NO: 1055774 - RNA, 22 nt, Human
caccuuuugugucugcguuugu

SEQ ID NO: 1055775 - RNA, 22 nt, Human
gaggcagcaggcugaggaggau

SEQ ID NO: 1055776 - RNA, 22 nt, Human
gguggcaccuugaucuuggacu

SEQ ID NO: 1055777 - RNA, 18 nt, Human
uguuaggaagggcacaca

SEQ ID NO: 1055778 - RNA, 22 nt, Human
ucaaggaaggucuguugcucca

SEQ ID NO: 1055779 - RNA, 22 nt, Human
caaguaaagaaucacauuucuu

SEQ ID NO: 1055780 - RNA, 22 nt, Human
uggcugagaccuucccaaauuc

SEQ ID NO: 1055781 - RNA, 22 nt, Human
gcaccaggcagcugagcaggcc

SEQ ID NO: 1055782 - RNA, 22 nt, Human
acuccaggguuuugcaccugga

SEQ ID NO: 1055783 - RNA, 22 nt, Human
cauuuguuggucagauuguagu

SEQ ID NO: 1055784 - RNA, 22 nt, Human
caacuccuggcuguuaggcaca

SEQ ID NO: 1055785 - RNA, 22 nt, Human
uuucaugagauuccuccacauc

SEQ ID NO: 1055786 - RNA, 22 nt, Human
aacucacuuuguggcuucugaa

SEQ ID NO: 1055787 - RNA, 23 nt, Human
cuggcucauccugguugcagugg

SEQ ID NO: 1055788 - RNA, 22 nt, Human
cagugugaggaauuagugucca

SEQ ID NO: 1055789 - RNA, 22 nt, Human
gcaaauauucaagacuuuucca

SEQ ID NO: 1055790 - RNA, 22 nt, Human
ucacaaauauuuuaacaguagg

SEQ ID NO: 1055791 - RNA, 23 nt, Human
gcugagguccugcugaguggugg

SEQ ID NO: 1055792 - RNA, 22 nt, Human
cauuuguauguuccuccuuagg

SEQ ID NO: 1055793 - RNA, 22 nt, Human
aggcuccaccagucaggugcau

SEQ ID NO: 1055794 - RNA, 22 nt, Human
uuuuaguuguacugucaacagu

SEQ ID NO: 1055795 - RNA, 20 nt, Human
ucaggaugugcugagugaag

SEQ ID NO: 1055796 - RNA, 22 nt, Human
ggcucagagaccugcgaucuga

SEQ ID NO: 1055797 - RNA, 22 nt, Human
cugagagugcucuuugauguca

SEQ ID NO: 1055798 - RNA, 22 nt, Human
ggcagaggagcuggaaacaugg

SEQ ID NO: 1055799 - RNA, 22 nt, Human
cuugcugggguaagucugugcu

SEQ ID NO: 1055800 - RNA, 22 nt, Human
uaugacuuuggaaaaauuacuu

SEQ ID NO: 1055801 - RNA, 21 nt, Human
uucuucaaagaagaaggcaca

SEQ ID NO: 1055802 - RNA, 22 nt, Human
cugggccaagaaguuguguaug

SEQ ID NO: 1055803 - RNA, 22 nt, Human
gaggaaccaaucugugauauuc

SEQ ID NO: 1055804 - RNA, 22 nt, Human
cccaggaggugugcccaacucg

SEQ ID NO: 1055805 - RNA, 22 nt, Human
gaggcccaggguacaggccgcu

SEQ ID NO: 1055806 - RNA, 22 nt, Human
gcuggagguagggagguccugu

SEQ ID NO: 1055807 - RNA, 22 nt, Human
auuaggacagagaugucaagag

SEQ ID NO: 1055808 - RNA, 20 nt, Human
acugagcugcauggagagga

SEQ ID NO: 1055809 - RNA, 17 nt, Human
acuccuggucugaaggg

SEQ ID NO: 1055810 - RNA, 22 nt, Human
gaguagcauucuagaguaugcu

SEQ ID NO: 1055811 - RNA, 22 nt, Human
agguaggcccugagugcuguug

SEQ ID NO: 1055812 - RNA, 22 nt, Human
gagcagcuccagccgcaugacu

SEQ ID NO: 1055813 - RNA, 22 nt, Human
uagggcuggcgugcucagggaa

SEQ ID NO: 1055814 - RNA, 20 nt, Human
acugagguuagauaacaggu

SEQ ID NO: 1055815 - RNA, 22 nt, Human
ggaggggagguccagcugaucu

SEQ ID NO: 1055816 - RNA, 22 nt, Human
gacugagggauagaggugcuuc

SEQ ID NO: 1055817 - RNA, 22 nt, Human
ccuggccagcgccggcugcucg

SEQ ID NO: 1055818 - RNA, 22 nt, Human
ugacccauggucugaucauagg

SEQ ID NO: 1055819 - RNA, 22 nt, Human
cugccuggguucaaguccuguu

SEQ ID NO: 1055820 - RNA, 22 nt, Human
aucuuucuuauuugaagaaaga

SEQ ID NO: 1055821 - RNA, 22 nt, Human
ccaggacaaguguggccauggc

SEQ ID NO: 1055822 - RNA, 22 nt, Human
ugcugaggucacggcggccaga

SEQ ID NO: 1055823 - RNA, 22 nt, Human
aaauguauugcauaggauauuu

SEQ ID NO: 1055824 - RNA, 18 nt, Human
ugugaacacauuuuucug

SEQ ID NO: 1055825 - RNA, 22 nt, Human
cugaggccguuggugggccuua

SEQ ID NO: 1055826 - RNA, 22 nt, Human
cuuaaauuggaugaguuaaguu

SEQ ID NO: 1055827 - RNA, 22 nt, Human
uuuaugagcaccuuggcccaga

SEQ ID NO: 1055828 - RNA, 22 nt, Human
agcccuggguuagggugggagc

SEQ ID NO: 1055829 - RNA, 22 nt, Human
agagccaguuguuaagcacuua

SEQ ID NO: 1055830 - RNA, 22 nt, Human
gauuuuaauuauaggagguccu

SEQ ID NO: 1055831 - RNA, 22 nt, Human
uuggcagcagggaguuggccgc

SEQ ID NO: 1055832 - RNA, 19 nt, Human
agauggcaaaaugcaaaga

SEQ ID NO: 1055833 - RNA, 22 nt, Human
ccccaggacacauggaccaagu

SEQ ID NO: 1055834 - RNA, 22 nt, Human
aggauaguugugaagauaggcu

SEQ ID NO: 1055835 - RNA, 22 nt, Human
acccaggauagagugcugcagu

SEQ ID NO: 1055836 - RNA, 22 nt, Human
cugccuccugccgugcagcuuc

SEQ ID NO: 1055837 - RNA, 22 nt, Human
aaacugccuccugggcaacuaa

SEQ ID NO: 1055838 - RNA, 22 nt, Human
cuggagccccaggcugugcaga

SEQ ID NO: 1055839 - RNA, 22 nt, Human
aguaaagcagaguugcaguaca

SEQ ID NO: 1055840 - RNA, 22 nt, Human
uuauuauagauuaugcaagauu

SEQ ID NO: 1055841 - RNA, 22 nt, Human
cccaggagaucuggaucucguc

SEQ ID NO: 1055842 - RNA, 22 nt, Human
cugagauggaguuucgcucuuc

SEQ ID NO: 1055843 - RNA, 22 nt, Human
uucuucuugaaacuuuagguug

SEQ ID NO: 1055844 - RNA, 22 nt, Human
auuaggaaacugaaugucagaa

SEQ ID NO: 1055845 - RNA, 22 nt, Human
ucuggcaggucaaucauucuuu

SEQ ID NO: 1055846 - RNA, 22 nt, Human
aaguauaagcuauucuucauga

SEQ ID NO: 1055847 - RNA, 22 nt, Human
uaggcagaaaggaaggcaaguu

SEQ ID NO: 1055848 - RNA, 22 nt, Human
cugcuucacccugccugagaac

SEQ ID NO: 1055849 - RNA, 22 nt, Human
uccaggaguccugggagugauu

SEQ ID NO: 1055850 - RNA, 22 nt, Human
uuucaggguacauggagcaaau

SEQ ID NO: 1055851 - RNA, 22 nt, Human
aguggcaguagaugagcugguu

SEQ ID NO: 1055852 - RNA, 22 nt, Human
gaaaaaugcuccaaaucugugg

SEQ ID NO: 1055853 - RNA, 22 nt, Human
guggaaugaauagauuugcauu

SEQ ID NO: 1055854 - RNA, 22 nt, Human
auggacauuugaguuauuucca

SEQ ID NO: 1055855 - RNA, 22 nt, Human
ccaggcugcagucaaggggcau

SEQ ID NO: 1055856 - RNA, 22 nt, Human
uggcugagguuaugcugguugu

SEQ ID NO: 1055857 - RNA, 22 nt, Human
cugccugcuuuucugggagccg

SEQ ID NO: 1055858 - RNA, 19 nt, Human
ugcauaaauuauauacuuu

SEQ ID NO: 1055859 - RNA, 20 nt, Human
agauuauuccuaagauuucu

SEQ ID NO: 1055860 - RNA, 22 nt, Human
agacagcugggaaauggagugu

SEQ ID NO: 1055861 - RNA, 22 nt, Human
uccccuccaacuccaacuaugg

SEQ ID NO: 1055862 - RNA, 22 nt, Human
cuucuucauguauugauagucu

SEQ ID NO: 1055863 - RNA, 22 nt, Human
uucuuucucaacaugaauguuu

SEQ ID NO: 1055864 - RNA, 22 nt, Human
gcugagugauucauacgcugcu

SEQ ID NO: 1055865 - RNA, 22 nt, Human
ugcugaaagucccaaaucucau

SEQ ID NO: 1055866 - RNA, 22 nt, Human
gcagcugccccgacugugaguc

SEQ ID NO: 1055867 - RNA, 23 nt, Human
cuucuggcucuauaucagaauuc

SEQ ID NO: 1055868 - RNA, 21 nt, Human
ggauggauagggaagagauuu

SEQ ID NO: 1055869 - RNA, 22 nt, Human
uaagauaaguggguugagaugg

SEQ ID NO: 1055870 - RNA, 22 nt, Human
uuucuuguaagauguuuauuaa

SEQ ID NO: 1055871 - RNA, 22 nt, Human
aggccagcagcaugacggcauc

SEQ ID NO: 1055872 - RNA, 20 nt, Human
gacaugucuuucucacacaa

SEQ ID NO: 1055873 - RNA, 22 nt, Human
cuggggcccaucgagggcugag

SEQ ID NO: 1055874 - RNA, 22 nt, Human
cuccugaguaguagcauuguca

SEQ ID NO: 1055875 - RNA, 22 nt, Human
ggccuucugccuuucagcaaug

SEQ ID NO: 1055876 - RNA, 22 nt, Human
acccaggagacggaggugcagu

SEQ ID NO: 1055877 - RNA, 22 nt, Human
ucugccuccugcuugucccgac

SEQ ID NO: 1055878 - RNA, 22 nt, Human
agaggggaguccuaaucugauu

SEQ ID NO: 1055879 - RNA, 20 nt, Human
uccugagccuccaccauguc

SEQ ID NO: 1055880 - RNA, 19 nt, Human
aucugccuguuaucacaua

SEQ ID NO: 1055881 - RNA, 22 nt, Human
ggcaggcagaggcugagacagg

SEQ ID NO: 1055882 - RNA, 22 nt, Human
cugcacaguuugauuucuugcu

SEQ ID NO: 1055883 - RNA, 22 nt, Human
cugcuguguuggcauuggauag

SEQ ID NO: 1055884 - RNA, 22 nt, Human
cuuuuauuuugaauuaagggcu

SEQ ID NO: 1055885 - RNA, 22 nt, Human
cugagggcaccgacagagugga

SEQ ID NO: 1055886 - RNA, 22 nt, Human
auacacauguuauuguggaagc

SEQ ID NO: 1055887 - RNA, 22 nt, Human
agagggauggccccguaacuca

SEQ ID NO: 1055888 - RNA, 22 nt, Human
uggcuucugguuuauccuuaua

SEQ ID NO: 1055889 - RNA, 22 nt, Human
gagggcaguagccucguacccu

SEQ ID NO: 1055890 - RNA, 22 nt, Human
auggccaagaauauuucucaac

SEQ ID NO: 1055891 - RNA, 22 nt, Human
aggcuggagggcaauggcaaga

SEQ ID NO: 1055892 - RNA, 22 nt, Human
acucauuuaaacauuuacugaa

SEQ ID NO: 1055893 - RNA, 22 nt, Human
uccaaauauucaucuacuucug

SEQ ID NO: 1055894 - RNA, 22 nt, Human
cucuucuuauggccguggcuga

SEQ ID NO: 1055895 - RNA, 22 nt, Human
gagccuggacaucucaggccca

SEQ ID NO: 1055896 - RNA, 22 nt, Human
gaggcugccccuuccucagcug

SEQ ID NO: 1055897 - RNA, 22 nt, Human
aguucucagcuuaguaugcugu

SEQ ID NO: 1055898 - RNA, 22 nt, Human
uucaaacaguguagaauauaug

SEQ ID NO: 1055899 - RNA, 22 nt, Human
uaaggccaauuaacaaccaggg

SEQ ID NO: 1055900 - RNA, 22 nt, Human
gcaagaugguuauaaaaaaugu

SEQ ID NO: 1055901 - RNA, 22 nt, Human
cuuagagccuuacucuucuugu

SEQ ID NO: 1055902 - RNA, 22 nt, Human
ucccaggagcaccuuuugagcc

SEQ ID NO: 1055903 - RNA, 22 nt, Human
uguacauagaucuugaaaauua

SEQ ID NO: 1055904 - RNA, 22 nt, Human
uuaggcauauggcacaugauag

SEQ ID NO: 1055905 - RNA, 23 nt, Human
acacauuuuucccguucugaggu

SEQ ID NO: 1055906 - RNA, 22 nt, Human
acaggcugcccgcuccccaccu

SEQ ID NO: 1055907 - RNA, 22 nt, Human
cccagggagguagcaggagaaa

SEQ ID NO: 1055908 - RNA, 22 nt, Human
ggcugcugggaauaugccagcu

SEQ ID NO: 1055909 - RNA, 22 nt, Human
uagugcuugagucucuccguac

SEQ ID NO: 1055910 - RNA, 22 nt, Human
auguuagugauaguaaauagug

SEQ ID NO: 1055911 - RNA, 22 nt, Human
aaggcagcaugaaucccuguac

SEQ ID NO: 1055912 - RNA, 16 nt, Human
aaggcugauuuucccu

SEQ ID NO: 1055913 - RNA, 23 nt, Human
gaggcagcuccugcagugcccug

SEQ ID NO: 1055914 - RNA, 22 nt, Human
aagcugagccaguggcaagugc

SEQ ID NO: 1055915 - RNA, 21 nt, Human
ucuugaaaauuguagcaguuu

SEQ ID NO: 1055916 - RNA, 22 nt, Human
ggagauggaauagauucugacu

SEQ ID NO: 1055917 - RNA, 22 nt, Human
ugcccaggcuggaaugcagugg

SEQ ID NO: 1055918 - RNA, 22 nt, Human
ugcugaggcauuuggacagagu

SEQ ID NO: 1055919 - RNA, 22 nt, Human
agacagguaaauagagaugcug

SEQ ID NO: 1055920 - RNA, 22 nt, Human
uagugucaucguugcagcugag

SEQ ID NO: 1055921 - RNA, 22 nt, Human
aaggcagcuucaccacagcauu

SEQ ID NO: 1055922 - RNA, 22 nt, Human
uggccaaauuugguguaacuug

SEQ ID NO: 1055923 - RNA, 22 nt, Human
uaggccagcccuuaguccuguc

SEQ ID NO: 1055924 - RNA, 22 nt, Human
cucaggauggaagccuacagga

SEQ ID NO: 1055925 - RNA, 22 nt, Human
cacucaggcugugucaggagga

SEQ ID NO: 1055926 - RNA, 22 nt, Human
uuugaaagaauuuauguacuuu

SEQ ID NO: 1055927 - RNA, 22 nt, Human
cugaggcuucucuaguucagcu

SEQ ID NO: 1055928 - RNA, 22 nt, Human
uauuaugagguauuuggacuuu

SEQ ID NO: 1055929 - RNA, 22 nt, Human
agaaaacuugucacagcucuca

SEQ ID NO: 1055930 - RNA, 22 nt, Human
auccaugaagguacuucucagg

SEQ ID NO: 1055931 - RNA, 22 nt, Human
uagggcugugucuccaggacca

SEQ ID NO: 1055932 - RNA, 22 nt, Human
uuucaucuuccuuggcauaggu

SEQ ID NO: 1055933 - RNA, 19 nt, Human
ccauggagagagaugcauu

SEQ ID NO: 1055934 - RNA, 19 nt, Human
uuggcagcugagauccugc

SEQ ID NO: 1055935 - RNA, 16 nt, Human
uagggcugggaaggag

SEQ ID NO: 1055936 - RNA, 22 nt, Human
auauuagggucucuaaauucua

SEQ ID NO: 1055937 - RNA, 22 nt, Human
uuuaggaucucucuuguuacau

SEQ ID NO: 1055938 - RNA, 22 nt, Human
uccugggcuuuguuucucuccu

SEQ ID NO: 1055939 - RNA, 22 nt, Human
gcccaggaggcagagguugugg

SEQ ID NO: 1055940 - RNA, 22 nt, Human
uuauuuaaugugaucugaagag

SEQ ID NO: 1055941 - RNA, 22 nt, Human
aaagccauugaacuguacuuua

SEQ ID NO: 1055942 - RNA, 22 nt, Human
gcuggccaaaguguaccuggag

SEQ ID NO: 1055943 - RNA, 22 nt, Human
gacuccugggccucugagaggc

SEQ ID NO: 1055944 - RNA, 22 nt, Human
ucuggagaggggccuagaauuu

SEQ ID NO: 1055945 - RNA, 22 nt, Human
ugcccuggcacacacacagcug

SEQ ID NO: 1055946 - RNA, 22 nt, Human
ccacaggcugcugcaggucccg

SEQ ID NO: 1055947 - RNA, 22 nt, Human
ugucuucagcaaaugccuuucu

SEQ ID NO: 1055948 - RNA, 22 nt, Human
cacaaugugguuugucaucuuu

SEQ ID NO: 1055949 - RNA, 22 nt, Human
cgaggcagacaaaaguuggaag

SEQ ID NO: 1055950 - RNA, 22 nt, Human
ucaagaaggagacuccacugug

SEQ ID NO: 1055951 - RNA, 22 nt, Human
gauggcaggugauagccgaguc

SEQ ID NO: 1055952 - RNA, 22 nt, Human
aagggcugggucugguuaaccc

SEQ ID NO: 1055953 - RNA, 22 nt, Human
uucuucaaauagcagggaguca

SEQ ID NO: 1055954 - RNA, 22 nt, Human
ugguuuugcuaaaauagaaaga

SEQ ID NO: 1055955 - RNA, 22 nt, Human
uuccaugaaggagacugagaag

SEQ ID NO: 1055956 - RNA, 22 nt, Human
gcaggcuggaggcuguucuggg

SEQ ID NO: 1055957 - RNA, 20 nt, Human
ucagaugggagugagccauc

SEQ ID NO: 1055958 - RNA, 22 nt, Human
cugaggugagaggaggccaugu

SEQ ID NO: 1055959 - RNA, 22 nt, Human
auucuucacauggauaggaucu

SEQ ID NO: 1055960 - RNA, 22 nt, Human
gaggggaaaguucugcacaagg

SEQ ID NO: 1055961 - RNA, 22 nt, Human
aucuacccacugaacacaauau

SEQ ID NO: 1055962 - RNA, 22 nt, Human
uuacacuucuaaaaaaagcagg

SEQ ID NO: 1055963 - RNA, 22 nt, Human
gacuccuggcuuucccucuuag

SEQ ID NO: 1055964 - RNA, 22 nt, Human
aagaguuagcucaauaacuuga

SEQ ID NO: 1055965 - RNA, 20 nt, Human
ccagagcugauggcugcccg

SEQ ID NO: 1055966 - RNA, 22 nt, Human
gcuaacauugauucagugccug

SEQ ID NO: 1055967 - RNA, 22 nt, Human
ccuccuggccugugcagagccc

SEQ ID NO: 1055968 - RNA, 22 nt, Human
ucccaggaaaacacucgaggac

SEQ ID NO: 1055969 - RNA, 22 nt, Human
uagugugguaaauaaauguuuu

SEQ ID NO: 1055970 - RNA, 22 nt, Human
uuugacauuauccuguuacugg

SEQ ID NO: 1055971 - RNA, 22 nt, Human
uaggaugaucuuguagagagau

SEQ ID NO: 1055972 - RNA, 22 nt, Human
gccaggagaaaaggcgaaugau

SEQ ID NO: 1055973 - RNA, 22 nt, Human
cagagagggagcaguagucucu

SEQ ID NO: 1055974 - RNA, 22 nt, Human
gaggauggaggugugagcuaug

SEQ ID NO: 1055975 - RNA, 22 nt, Human
cccaggagguguagcugcgugg

SEQ ID NO: 1055976 - RNA, 22 nt, Human
acacuaaugagaaaggaauuaa

SEQ ID NO: 1055977 - RNA, 22 nt, Human
uggcagcugucagaaugcaaau

SEQ ID NO: 1055978 - RNA, 22 nt, Human
uuauggaaaauacaauuauaag

SEQ ID NO: 1055979 - RNA, 22 nt, Human
ccaggagaugauguuggggauu

SEQ ID NO: 1055980 - RNA, 22 nt, Human
cugcuucuccaaaguaggacuu

SEQ ID NO: 1055981 - RNA, 22 nt, Human
cugccccauggucccugguggg

SEQ ID NO: 1055982 - RNA, 21 nt, Human
acagcauguuuguguguuugc

SEQ ID NO: 1055983 - RNA, 22 nt, Human
gaggccagaguuccccgaguca

SEQ ID NO: 1055984 - RNA, 22 nt, Human
gaggcagcuuggggcugugggu

SEQ ID NO: 1055985 - RNA, 22 nt, Human
uacaguaauaaaaugagcuaca

SEQ ID NO: 1055986 - RNA, 22 nt, Human
ucugagccuauuucaaauuccu

SEQ ID NO: 1055987 - RNA, 22 nt, Human
auggcuucugucuuggaaacuu

SEQ ID NO: 1055988 - RNA, 22 nt, Human
accaggaggaaguguuaaugau

SEQ ID NO: 1055989 - RNA, 22 nt, Human
uucaugugaucacagauuguaa

SEQ ID NO: 1055990 - RNA, 22 nt, Human
uaggaugagggguggccaagua

SEQ ID NO: 1055991 - RNA, 20 nt, Human
cucaggauacugcaaaguug

SEQ ID NO: 1055992 - RNA, 22 nt, Human
ucauacaucuguccuggagcuc

SEQ ID NO: 1055993 - RNA, 23 nt, Human
uggcugagcccacuaucuuggcc

SEQ ID NO: 1055994 - RNA, 22 nt, Human
ucaucucaaaacccaaggggca

SEQ ID NO: 1055995 - RNA, 22 nt, Human
acugccauuggucaaaugagug

SEQ ID NO: 1055996 - RNA, 22 nt, Human
agcugagguugaagagugaacg

SEQ ID NO: 1055997 - RNA, 22 nt, Human
gagggaggggagcuccacccuc

SEQ ID NO: 1055998 - RNA, 22 nt, Human
aaggcugagacagcacaggucc

SEQ ID NO: 1055999 - RNA, 19 nt, Human
cuuugucagaacaugcuuc

SEQ ID NO: 1056000 - RNA, 22 nt, Human
ccaaaugugccuguuucaacaa

SEQ ID NO: 1056001 - RNA, 22 nt, Human
uuggccaaaggaaagacuacug

SEQ ID NO: 1056002 - RNA, 22 nt, Human
acugcccucccaucuauugcaa

SEQ ID NO: 1056003 - RNA, 20 nt, Human
ccacaggaguccagucgacc

SEQ ID NO: 1056004 - RNA, 22 nt, Human
ggcagucacuuuugcuugugcc

SEQ ID NO: 1056005 - RNA, 22 nt, Human
gacccaggagugcagagagugg

SEQ ID NO: 1056006 - RNA, 22 nt, Human
aauggccagcugggagaguuga

SEQ ID NO: 1056007 - RNA, 22 nt, Human
uuagcagcuaaacugacagacc

SEQ ID NO: 1056008 - RNA, 21 nt, Human
ccaggaaggacugagcucccu

SEQ ID NO: 1056009 - RNA, 22 nt, Human
ugcauuuccagauuucuggagu

SEQ ID NO: 1056010 - RNA, 22 nt, Human
aggcagcucuguggccucccag

SEQ ID NO: 1056011 - RNA, 22 nt, Human
uuggccaauccuauuggguggg

SEQ ID NO: 1056012 - RNA, 22 nt, Human
cagcucugaggaacacuccuuu

SEQ ID NO: 1056013 - RNA, 22 nt, Human
ugccgcagugcggggagggccc

SEQ ID NO: 1056014 - RNA, 19 nt, Human
cucugccucccuccugggu

SEQ ID NO: 1056015 - RNA, 22 nt, Human
uccaggagggauugggcugugg

SEQ ID NO: 1056016 - RNA, 22 nt, Human
cagcugccccgcuggcugacca

SEQ ID NO: 1056017 - RNA, 22 nt, Human
auugaaagguuuugagcagaua

SEQ ID NO: 1056018 - RNA, 22 nt, Human
ggcucagacucccaggcccucu

SEQ ID NO: 1056019 - RNA, 22 nt, Human
caggcugacaacugagcauuuu

SEQ ID NO: 1056020 - RNA, 22 nt, Human
agucucuuuguggacucugccu

SEQ ID NO: 1056021 - RNA, 23 nt, Human
cuccuggaggguccggcccugcc

SEQ ID NO: 1056022 - RNA, 18 nt, Human
aggccaaacuuguaagca

SEQ ID NO: 1056023 - RNA, 22 nt, Human
uuccugagggacuuuugagauu

SEQ ID NO: 1056024 - RNA, 23 nt, Human
uacuacagggucuugcuaugaau

SEQ ID NO: 1056025 - RNA, 22 nt, Human
aacuuucuuugcaucuaaguuu

SEQ ID NO: 1056026 - RNA, 22 nt, Human
augcugugucaggaauuugaua

SEQ ID NO: 1056027 - RNA, 22 nt, Human
gaaggaggcguuagcccuagga

SEQ ID NO: 1056028 - RNA, 22 nt, Human
aacaugcauauagguaaaugga

SEQ ID NO: 1056029 - RNA, 22 nt, Human
uuuuuuauaucaacugaagucu

SEQ ID NO: 1056030 - RNA, 22 nt, Human
caacugguaaucuccacgguca

SEQ ID NO: 1056031 - RNA, 22 nt, Human
aaaaugaacagaacaaugggga

SEQ ID NO: 1056032 - RNA, 22 nt, Human
guaaaucauggucagaauaaau

SEQ ID NO: 1056033 - RNA, 22 nt, Human
augcugugucuagcaggaacac

SEQ ID NO: 1056034 - RNA, 22 nt, Human
gagggcugaugcuuacuuauuu

SEQ ID NO: 1056035 - RNA, 22 nt, Human
uggccaaaguagaaaauaauag

SEQ ID NO: 1056036 - RNA, 22 nt, Human
uucuccagagggcucugcagga

SEQ ID NO: 1056037 - RNA, 22 nt, Human
gauuucuuuaugaaguacagaa

SEQ ID NO: 1056038 - RNA, 21 nt, Human
ccuggcugcacaguugcuggu

SEQ ID NO: 1056039 - RNA, 22 nt, Human
gcugccuccgccggcuccacag

SEQ ID NO: 1056040 - RNA, 21 nt, Human
aaauacagaaacuuguuuuca

SEQ ID NO: 1056041 - RNA, 22 nt, Human
cugagaucccaggcaggguggc

SEQ ID NO: 1056042 - RNA, 22 nt, Human
uuucagaauagcaaagcaagcu

SEQ ID NO: 1056043 - RNA, 22 nt, Human
uauuuccaagcugaauccaaug

SEQ ID NO: 1056044 - RNA, 22 nt, Human
uaggauaugcauuuuuauacau

SEQ ID NO: 1056045 - RNA, 22 nt, Human
uucuguuagaauuuugaaaaua

SEQ ID NO: 1056046 - RNA, 23 nt, Human
uggcuaaaggcucuaguccugcu

SEQ ID NO: 1056047 - RNA, 22 nt, Human
uuucaacaccagagaccaugcg

SEQ ID NO: 1056048 - RNA, 22 nt, Human
cuggcccagagcucuggccuuu

SEQ ID NO: 1056049 - RNA, 22 nt, Human
uccuggcccucugcaaacgcca

SEQ ID NO: 1056050 - RNA, 22 nt, Human
ucucuucuaauuuucccgagua

SEQ ID NO: 1056051 - RNA, 21 nt, Human
uuccuggcggcagaaacguga

SEQ ID NO: 1056052 - RNA, 22 nt, Human
uuggucagcucaauggagaggg

SEQ ID NO: 1056053 - RNA, 22 nt, Human
cuaggaaagacacagagaguuu

SEQ ID NO: 1056054 - RNA, 22 nt, Human
augaaggcaguuaaacgucauc

SEQ ID NO: 1056055 - RNA, 22 nt, Human
uuucacauaugguuguugauug

SEQ ID NO: 1056056 - RNA, 22 nt, Human
cucaggauccaucuccugcccu

SEQ ID NO: 1056057 - RNA, 22 nt, Human
uuugcaaauaccaugaaacuug

SEQ ID NO: 1056058 - RNA, 22 nt, Human
ccugguccuuacgucauugcuu

SEQ ID NO: 1056059 - RNA, 22 nt, Human
cuugaucuacauagugaaaccc

SEQ ID NO: 1056060 - RNA, 22 nt, Human
gcugccugguuucucagcugca

SEQ ID NO: 1056061 - RNA, 22 nt, Human
ccaugagcuuccuauauagggu

SEQ ID NO: 1056062 - RNA, 22 nt, Human
gcugccuccugaaagcgcucug

SEQ ID NO: 1056063 - RNA, 22 nt, Human
uccuaggcaguuggugcuccau

SEQ ID NO: 1056064 - RNA, 22 nt, Human
ugcuguguggaugugaagaauc

SEQ ID NO: 1056065 - RNA, 22 nt, Human
aucuuucaguuucauaccaauu

SEQ ID NO: 1056066 - RNA, 22 nt, Human
gcugggaagugcaagaucaagg

SEQ ID NO: 1056067 - RNA, 22 nt, Human
cccaggaguucgaggcuguagu

SEQ ID NO: 1056068 - RNA, 22 nt, Human
ugaggggauacgguacacauug

SEQ ID NO: 1056069 - RNA, 22 nt, Human
ucuucuuccucauuuauacaua

SEQ ID NO: 1056070 - RNA, 22 nt, Human
aggcugcugaggccaccacgcu

SEQ ID NO: 1056071 - RNA, 22 nt, Human
uaagaugaccuuauaaagagca

SEQ ID NO: 1056072 - RNA, 22 nt, Human
ugcuucuggaaacaguggcugu

SEQ ID NO: 1056073 - RNA, 22 nt, Human
agcugaggaggaaugaugggua

SEQ ID NO: 1056074 - RNA, 22 nt, Human
ucuuggccagguguggugccuc

SEQ ID NO: 1056075 - RNA, 22 nt, Human
aggcuccauuuuccugcagcug

SEQ ID NO: 1056076 - RNA, 22 nt, Human
agaacuauugcaauaacaagaa

SEQ ID NO: 1056077 - RNA, 22 nt, Human
gaggcagagugcaccccaggag

SEQ ID NO: 1056078 - RNA, 22 nt, Human
aggacuuagaacauuauguacu

SEQ ID NO: 1056079 - RNA, 22 nt, Human
ucuggccaacaaaaacuaaguc

SEQ ID NO: 1056080 - RNA, 22 nt, Human
uauugaggauugaggaaagcac

SEQ ID NO: 1056081 - RNA, 22 nt, Human
ggagcuguucaggacugcuuca

SEQ ID NO: 1056082 - RNA, 22 nt, Human
gagguggaaggcaggaacaaau

SEQ ID NO: 1056083 - RNA, 22 nt, Human
cagaguggcgacccccucagcu

SEQ ID NO: 1056084 - RNA, 22 nt, Human
agaaaaaucuuggcgcuugucu

SEQ ID NO: 1056085 - RNA, 22 nt, Human
ugacaguauugauggcaggauu

SEQ ID NO: 1056086 - RNA, 22 nt, Human
gcuaggcucggaagcagcaggg

SEQ ID NO: 1056087 - RNA, 22 nt, Human
agauauauuuaagguaauaagu

SEQ ID NO: 1056088 - RNA, 19 nt, Human
uaacuggugccuucaguca

SEQ ID NO: 1056089 - RNA, 22 nt, Human
ggacuucuaagugccagacacu

SEQ ID NO: 1056090 - RNA, 22 nt, Human
ugguagcaacaucucaguggcu

SEQ ID NO: 1056091 - RNA, 22 nt, Human
uggguccacuucugcacugugg

SEQ ID NO: 1056092 - RNA, 22 nt, Human
uguuuuaaucucccauugcucu

SEQ ID NO: 1056093 - RNA, 22 nt, Human
cuucuucagcacaauauugaug

SEQ ID NO: 1056094 - RNA, 21 nt, Human
auuucagagcacacaaguaaa

SEQ ID NO: 1056095 - RNA, 22 nt, Human
aagacacugauacucugugauu

SEQ ID NO: 1056096 - RNA, 22 nt, Human
ugaacaguuucaagaaaacuuu

SEQ ID NO: 1056097 - RNA, 20 nt, Human
gcugaggggucuauggcaua

SEQ ID NO: 1056098 - RNA, 22 nt, Human
auguuuuugagauacaaacaga

SEQ ID NO: 1056099 - RNA, 22 nt, Human
gaggcugaguagcuuugugcuc

SEQ ID NO: 1056100 - RNA, 22 nt, Human
aggcuggcgacaucuggcgggc

SEQ ID NO: 1056101 - RNA, 22 nt, Human
cugucuaguuaggaugccagca

SEQ ID NO: 1056102 - RNA, 22 nt, Human
acacauuaucucauuaaauacu

SEQ ID NO: 1056103 - RNA, 22 nt, Human
cagccuuuuaggacuauuugug

SEQ ID NO: 1056104 - RNA, 22 nt, Human
aacauucuauuuugcuaaaaca

SEQ ID NO: 1056105 - RNA, 22 nt, Human
ccaggcuguuuucaaacuuggg

SEQ ID NO: 1056106 - RNA, 19 nt, Human
agaaguuagacauugcaau

SEQ ID NO: 1056107 - RNA, 22 nt, Human
ucuuagucacagaggugagaaa

SEQ ID NO: 1056108 - RNA, 22 nt, Human
uacccaggggcugagcagaggu

SEQ ID NO: 1056109 - RNA, 22 nt, Human
ugaaggccagcucuuuaucagc

SEQ ID NO: 1056110 - RNA, 22 nt, Human
acauguaaaaggaacaugcaug

SEQ ID NO: 1056111 - RNA, 22 nt, Human
cccaggagaugcacuccauugg

SEQ ID NO: 1056112 - RNA, 22 nt, Human
aagaaguuggaaaugauugaga

SEQ ID NO: 1056113 - RNA, 22 nt, Human
ggcugagaggacgucgggcuca

SEQ ID NO: 1056114 - RNA, 22 nt, Human
acagucucuccacacugcaggg

SEQ ID NO: 1056115 - RNA, 20 nt, Human
cuacacuuggcaccuggcau

SEQ ID NO: 1056116 - RNA, 22 nt, Human
gaggcagagaccuucaggaccu

SEQ ID NO: 1056117 - RNA, 19 nt, Human
caagugaagccugggaugg

SEQ ID NO: 1056118 - RNA, 22 nt, Human
ucugaggucuaugacuuugcuu

SEQ ID NO: 1056119 - RNA, 22 nt, Human
gccaggagaaugcuagcagagg

SEQ ID NO: 1056120 - RNA, 22 nt, Human
aggucaccauggcaugcuccac

SEQ ID NO: 1056121 - RNA, 22 nt, Human
cucaguuuccccggccugggcg

SEQ ID NO: 1056122 - RNA, 22 nt, Human
agucuuaggcuccauuaguaga

SEQ ID NO: 1056123 - RNA, 22 nt, Human
ugccugggagugaccaagacuc

SEQ ID NO: 1056124 - RNA, 22 nt, Human
aauauaaugcuguuuuaugcca

SEQ ID NO: 1056125 - RNA, 22 nt, Human
uggccucagauuauugcacagu

SEQ ID NO: 1056126 - RNA, 22 nt, Human
cuggcugaguuacuccacugag

SEQ ID NO: 1056127 - RNA, 22 nt, Human
uucuggaacauagcaagaaguu

SEQ ID NO: 1056128 - RNA, 22 nt, Human
gaggcugagacucugaauuuuu

SEQ ID NO: 1056129 - RNA, 22 nt, Human
auucuucaucacuaccuuguga

SEQ ID NO: 1056130 - RNA, 20 nt, Human
uucugccuaggguuagccug

SEQ ID NO: 1056131 - RNA, 22 nt, Human
gccuggcuggucacugccuggc

SEQ ID NO: 1056132 - RNA, 17 nt, Human
ucauuuguugugacuag

SEQ ID NO: 1056133 - RNA, 21 nt, Human
ugaggccugccagucucagaa

SEQ ID NO: 1056134 - RNA, 19 nt, Human
uucuccaggcugcagaggg

SEQ ID NO: 1056135 - RNA, 22 nt, Human
uggcagcauuaauuauucaggu

SEQ ID NO: 1056136 - RNA, 22 nt, Human
aggaagcuggugugaggaugaa

SEQ ID NO: 1056137 - RNA, 21 nt, Human
gcuggcuggcugaccggccuu

SEQ ID NO: 1056138 - RNA, 22 nt, Human
gagggcugugaaggagcggguu

SEQ ID NO: 1056139 - RNA, 22 nt, Human
uucuucuugucugcccucacau

SEQ ID NO: 1056140 - RNA, 22 nt, Human
aguaaaucagaccucauuaugu

SEQ ID NO: 1056141 - RNA, 22 nt, Human
ucuguggauuuuaguguucaug

SEQ ID NO: 1056142 - RNA, 22 nt, Human
agaaaaguuuucugagacugac

SEQ ID NO: 1056143 - RNA, 22 nt, Human
cugcccaggaaccagaggggca

SEQ ID NO: 1056144 - RNA, 22 nt, Human
ucuuggccccaccugugccagc

SEQ ID NO: 1056145 - RNA, 19 nt, Human
uauggcaggccgaggcacu

SEQ ID NO: 1056146 - RNA, 22 nt, Human
uuccagcaggcagacaggagau

SEQ ID NO: 1056147 - RNA, 22 nt, Human
cauauauucugguuuucacugg

SEQ ID NO: 1056148 - RNA, 22 nt, Human
cagggcuggcuguggcaaucuc

SEQ ID NO: 1056149 - RNA, 22 nt, Human
aauuaggagaaaacuguugucu

SEQ ID NO: 1056150 - RNA, 22 nt, Human
aggaggcacucacucucagggu

SEQ ID NO: 1056151 - RNA, 22 nt, Human
guggcagagagcaagugucuga

SEQ ID NO: 1056152 - RNA, 22 nt, Human
ugcuuggcuuucugagcuucug

SEQ ID NO: 1056153 - RNA, 22 nt, Human
uuuguaaaggccugaauuucag

SEQ ID NO: 1056154 - RNA, 22 nt, Human
uucagaaauaaaauaucccaac

SEQ ID NO: 1056155 - RNA, 22 nt, Human
aguuugaaaguauugacagaag

SEQ ID NO: 1056156 - RNA, 22 nt, Human
caggcagcaucagucugcugua

SEQ ID NO: 1056157 - RNA, 17 nt, Human
agugucagggcccuucc

SEQ ID NO: 1056158 - RNA, 22 nt, Human
guguacagugauuugaguucac

SEQ ID NO: 1056159 - RNA, 22 nt, Human
guccucugaaguugugcaaugc

SEQ ID NO: 1056160 - RNA, 22 nt, Human
ggugaaggcacaagagggcaag

SEQ ID NO: 1056161 - RNA, 22 nt, Human
uucaauucaauucuaaauauau

SEQ ID NO: 1056162 - RNA, 22 nt, Human
cuccugcgguacuacugugcuu

SEQ ID NO: 1056163 - RNA, 22 nt, Human
uguuuucagucauauagcaggu

SEQ ID NO: 1056164 - RNA, 22 nt, Human
uguuggcauuagaggguuauug

SEQ ID NO: 1056165 - RNA, 22 nt, Human
ggggcagccuccaggaaagcug

SEQ ID NO: 1056166 - RNA, 22 nt, Human
agacgagggcccccaggacagc

SEQ ID NO: 1056167 - RNA, 22 nt, Human
gaggcagcagggcugguuccuu

SEQ ID NO: 1056168 - RNA, 22 nt, Human
ugcccuggaaaugagaggugug

SEQ ID NO: 1056169 - RNA, 22 nt, Human
aggcugaggaucccuguguucu

SEQ ID NO: 1056170 - RNA, 22 nt, Human
uuaaguaacuuguccaaaugag

SEQ ID NO: 1056171 - RNA, 22 nt, Human
gaaaugaaacaggcuuuuaagg

SEQ ID NO: 1056172 - RNA, 22 nt, Human
gcucacugcaaccucugcuucc

SEQ ID NO: 1056173 - RNA, 22 nt, Human
gagggccagcagccucagcaug

SEQ ID NO: 1056174 - RNA, 22 nt, Human
gagaaaggcauuccuaugcaaa

SEQ ID NO: 1056175 - RNA, 22 nt, Human
ggcagcuucucccaggcuguuu

SEQ ID NO: 1056176 - RNA, 22 nt, Human
uuugaaaguccuaggagagucc

SEQ ID NO: 1056177 - RNA, 22 nt, Human
gaggccagaagugccucgggcu

SEQ ID NO: 1056178 - RNA, 22 nt, Human
uauuagguagauuuuacugauu

SEQ ID NO: 1056179 - RNA, 22 nt, Human
ugcauauuguccuugauauuau

SEQ ID NO: 1056180 - RNA, 22 nt, Human
auuugguagugauugaaauuau

SEQ ID NO: 1056181 - RNA, 22 nt, Human
auucuucagcaggggacacuau

SEQ ID NO: 1056182 - RNA, 22 nt, Human
cuccacagcucaggcucagagu

SEQ ID NO: 1056183 - RNA, 22 nt, Human
guauuaggugguggaauuguag

SEQ ID NO: 1056184 - RNA, 22 nt, Human
uuagguaaguaggaucaaaaaa

SEQ ID NO: 1056185 - RNA, 22 nt, Human
ccuccuggugacaaggcaaagc

SEQ ID NO: 1056186 - RNA, 22 nt, Human
cagcugaguuuccaagucugcc

SEQ ID NO: 1056187 - RNA, 22 nt, Human
cauucauuuaugaaauaucuau

SEQ ID NO: 1056188 - RNA, 22 nt, Human
uuucacauuuaggcgugaauug

SEQ ID NO: 1056189 - RNA, 22 nt, Human
gacuuucuuaggcccccuaaua

SEQ ID NO: 1056190 - RNA, 22 nt, Human
gcagcauauuguacuggccugc

SEQ ID NO: 1056191 - RNA, 22 nt, Human
cucaggaugucggugacuauug

SEQ ID NO: 1056192 - RNA, 22 nt, Human
aauauccacacugugucccugc

SEQ ID NO: 1056193 - RNA, 22 nt, Human
acuggccaugaacuugggaucu

SEQ ID NO: 1056194 - RNA, 21 nt, Human
cagcagaguaaugcauucgua

SEQ ID NO: 1056195 - RNA, 22 nt, Human
aaggcaguacuuuauguccaua

SEQ ID NO: 1056196 - RNA, 20 nt, Human
augugucuguaaacaacucu

SEQ ID NO: 1056197 - RNA, 23 nt, Human
ccagugugguagguccacaggug

SEQ ID NO: 1056198 - RNA, 18 nt, Human
gagagggaucccucagga

SEQ ID NO: 1056199 - RNA, 22 nt, Human
cccagggauuauaaaggugaaa

SEQ ID NO: 1056200 - RNA, 22 nt, Human
ucuucaaguuccaaagugcagg

SEQ ID NO: 1056201 - RNA, 22 nt, Human
aauauaugugguauugaccagc

SEQ ID NO: 1056202 - RNA, 22 nt, Human
cugccucacauuggcuguguga

SEQ ID NO: 1056203 - RNA, 22 nt, Human
gucaggaugcuauuguuauuaa

SEQ ID NO: 1056204 - RNA, 22 nt, Human
uccuuagagauacugucuugaa

SEQ ID NO: 1056205 - RNA, 19 nt, Human
cccaggagucuggcugguu

SEQ ID NO: 1056206 - RNA, 22 nt, Human
uuauguaggauaaugaauugcc

SEQ ID NO: 1056207 - RNA, 22 nt, Human
guggcagagccgugcagguagg

SEQ ID NO: 1056208 - RNA, 22 nt, Human
uucaguuucguuaucuaugaga

SEQ ID NO: 1056209 - RNA, 22 nt, Human
uccuucuuucccccuagucauu

SEQ ID NO: 1056210 - RNA, 22 nt, Human
ugcugagguuguggagugcauu

SEQ ID NO: 1056211 - RNA, 20 nt, Human
caucaucacaugagccaauu

SEQ ID NO: 1056212 - RNA, 22 nt, Human
gucugcugcagagcauggcuuu

SEQ ID NO: 1056213 - RNA, 19 nt, Human
ggcagucucaagcagcaca

SEQ ID NO: 1056214 - RNA, 22 nt, Human
ucugagguguagcugggcuuca

SEQ ID NO: 1056215 - RNA, 22 nt, Human
uggcagcagacaaaaggccauu

SEQ ID NO: 1056216 - RNA, 22 nt, Human
cccaggaaugaggggcggaggc

SEQ ID NO: 1056217 - RNA, 22 nt, Human
gcuggccaguguggugaccacc

SEQ ID NO: 1056218 - RNA, 22 nt, Human
caaguaacuugauuaagguaag

SEQ ID NO: 1056219 - RNA, 22 nt, Human
caaggccaagguuuugugaacu

SEQ ID NO: 1056220 - RNA, 22 nt, Human
aguuacaguguucuauuacucu

SEQ ID NO: 1056221 - RNA, 22 nt, Human
ccuuaaauucuccauuugaaag

SEQ ID NO: 1056222 - RNA, 22 nt, Human
uuuaggaucaaugagaaagucu

SEQ ID NO: 1056223 - RNA, 22 nt, Human
auuggcagaaacagcagggcca

SEQ ID NO: 1056224 - RNA, 22 nt, Human
gaaaggccauuucugaggguuu

SEQ ID NO: 1056225 - RNA, 22 nt, Human
ggugaagguggaacgcagagca

SEQ ID NO: 1056226 - RNA, 23 nt, Human
acagaaaguucugcuggacagag

SEQ ID NO: 1056227 - RNA, 22 nt, Human
uugcugaagugaagguauguuu

SEQ ID NO: 1056228 - RNA, 22 nt, Human
ugcugcuguugacggcugucca

SEQ ID NO: 1056229 - RNA, 22 nt, Human
gcuccuggugcaaaguuucuuc

SEQ ID NO: 1056230 - RNA, 20 nt, Human
cucaggauugucuagccccu

SEQ ID NO: 1056231 - RNA, 22 nt, Human
auuauuagugauguuguuacug

SEQ ID NO: 1056232 - RNA, 22 nt, Human
uuccaugaaauguguuaugcuu

SEQ ID NO: 1056233 - RNA, 22 nt, Human
aggcaguuuaggcagcgauuua

SEQ ID NO: 1056234 - RNA, 22 nt, Human
gcucaggaccgaggggugggaa

SEQ ID NO: 1056235 - RNA, 20 nt, Human
cugagagucugugcuuaguc

SEQ ID NO: 1056236 - RNA, 23 nt, Human
caguggagacucaugcuuccuua

SEQ ID NO: 1056237 - RNA, 23 nt, Human
ucaggauauugugugccaaggug

SEQ ID NO: 1056238 - RNA, 22 nt, Human
gaggcugaggguuagagaguca

SEQ ID NO: 1056239 - RNA, 22 nt, Human
uucuuauagaagcaaccauugu

SEQ ID NO: 1056240 - RNA, 23 nt, Human
guaaaauacgcagugcaguguga

SEQ ID NO: 1056241 - RNA, 22 nt, Human
ucacugcucagucuguacuaca

SEQ ID NO: 1056242 - RNA, 22 nt, Human
aaguaaaauguuuccuuuauua

SEQ ID NO: 1056243 - RNA, 22 nt, Human
uugagaaauguuuuuuaagcug

SEQ ID NO: 1056244 - RNA, 21 nt, Human
aggcagcaggauccagggaca

SEQ ID NO: 1056245 - RNA, 22 nt, Human
cauucucaauaguagaugagua

SEQ ID NO: 1056246 - RNA, 22 nt, Human
gugguuuugccauuacaaguaa

SEQ ID NO: 1056247 - RNA, 22 nt, Human
cagcuuucaucagugacacuca

SEQ ID NO: 1056248 - RNA, 22 nt, Human
gggcugaggcuaccacuggucu

SEQ ID NO: 1056249 - RNA, 22 nt, Human
agcugcccugguaagauugaug

SEQ ID NO: 1056250 - RNA, 22 nt, Human
cugcugugauugggagaaaccg

SEQ ID NO: 1056251 - RNA, 22 nt, Human
uucaggauggcggauguugggg

SEQ ID NO: 1056252 - RNA, 22 nt, Human
cagagcugcuucccaguuugug

SEQ ID NO: 1056253 - RNA, 22 nt, Human
aaggccagcuuguagggcuggu

SEQ ID NO: 1056254 - RNA, 22 nt, Human
uggaaugacagagagucugaau

SEQ ID NO: 1056255 - RNA, 22 nt, Human
ucaggcugauaggaggaacuga

SEQ ID NO: 1056256 - RNA, 22 nt, Human
guuaucaugcuucaucaucacu

SEQ ID NO: 1056257 - RNA, 22 nt, Human
aguuaucagguguuuucaugga

SEQ ID NO: 1056258 - RNA, 22 nt, Human
cugcgcagcaaucagagaggag

SEQ ID NO: 1056259 - RNA, 22 nt, Human
uucauucuuauuugugaucugg

SEQ ID NO: 1056260 - RNA, 19 nt, Human
acagagcucucugcuucug

SEQ ID NO: 1056261 - RNA, 22 nt, Human
gcccagggcagggcaagaguga

SEQ ID NO: 1056262 - RNA, 22 nt, Human
ucuuugcaaaauacaacaaugg

SEQ ID NO: 1056263 - RNA, 22 nt, Human
uagcucuucauuucaucugauu

SEQ ID NO: 1056264 - RNA, 22 nt, Human
ggcagcugucucugaguuagca

SEQ ID NO: 1056265 - RNA, 22 nt, Human
agugcuuuauguuguugugcaa

SEQ ID NO: 1056266 - RNA, 22 nt, Human
auguauuucuauguagugaaga

SEQ ID NO: 1056267 - RNA, 22 nt, Human
aggagggagcuuaagccaggca

SEQ ID NO: 1056268 - RNA, 23 nt, Human
cagggcugggcuugguguuaggc

SEQ ID NO: 1056269 - RNA, 22 nt, Human
ucagugaucuaaggguauggcc

SEQ ID NO: 1056270 - RNA, 22 nt, Human
gacugguaaggaaauucacuaa

SEQ ID NO: 1056271 - RNA, 22 nt, Human
ccacaguagaauucaucucccu

SEQ ID NO: 1056272 - RNA, 21 nt, Human
aguugcugcugcugcagguga

SEQ ID NO: 1056273 - RNA, 22 nt, Human
uugcaggaaacugagugugagc

SEQ ID NO: 1056274 - RNA, 22 nt, Human
uagcagcaauuacacaguccgu

SEQ ID NO: 1056275 - RNA, 22 nt, Human
aggcuccagcagccagaggaag

SEQ ID NO: 1056276 - RNA, 22 nt, Human
gacugaggcuccccuaggcuca

SEQ ID NO: 1056277 - RNA, 22 nt, Human
ucccagggauccuccgggucgc

SEQ ID NO: 1056278 - RNA, 22 nt, Human
gcugccugcacagagcugcuuu

SEQ ID NO: 1056279 - RNA, 22 nt, Human
ggcugcuggaagacugaacaag

SEQ ID NO: 1056280 - RNA, 22 nt, Human
gaagcagcuggugagauggagc

SEQ ID NO: 1056281 - RNA, 22 nt, Human
cagcaggauaugguggagagag

SEQ ID NO: 1056282 - RNA, 22 nt, Human
auugaaagauuuugggcucaug

SEQ ID NO: 1056283 - RNA, 22 nt, Human
ugcuuucaaaggcuuucuagau

SEQ ID NO: 1056284 - RNA, 22 nt, Human
agugcaggagccuggccagagc

SEQ ID NO: 1056285 - RNA, 22 nt, Human
ccuccugggcuccugucugcac

SEQ ID NO: 1056286 - RNA, 20 nt, Human
accaauguuagcuuaguacu

SEQ ID NO: 1056287 - RNA, 18 nt, Human
acauacauucugucugca

SEQ ID NO: 1056288 - RNA, 19 nt, Human
auacagauguauccaugau

SEQ ID NO: 1056289 - RNA, 22 nt, Human
aaagauuaaaucaaauugguca

SEQ ID NO: 1056290 - RNA, 22 nt, Human
uccugggcuuaagugauccucc

SEQ ID NO: 1056291 - RNA, 22 nt, Human
ggcagcuucuuaauauggagac

SEQ ID NO: 1056292 - RNA, 22 nt, Human
uacugcaugguggaguggagcu

SEQ ID NO: 1056293 - RNA, 22 nt, Human
cuguaaauaugaagaauauaug

SEQ ID NO: 1056294 - RNA, 22 nt, Human
gaugccucuuuuggcugaauua

SEQ ID NO: 1056295 - RNA, 22 nt, Human
aagggcugcaauccaaaacacu

SEQ ID NO: 1056296 - RNA, 22 nt, Human
ugagaacugaggauuugaauuc

SEQ ID NO: 1056297 - RNA, 22 nt, Human
acagugaggaagcagcugugcu

SEQ ID NO: 1056298 - RNA, 22 nt, Human
augauauuugcaaugugcuugc

SEQ ID NO: 1056299 - RNA, 22 nt, Human
uuucagggagccuagaagagcu

SEQ ID NO: 1056300 - RNA, 21 nt, Human
gcuccuggugcugcguggcgc

SEQ ID NO: 1056301 - RNA, 19 nt, Human
aggguggcaaaggagggug

SEQ ID NO: 1056302 - RNA, 20 nt, Human
agggcugagaagggacuagc

SEQ ID NO: 1056303 - RNA, 20 nt, Human
uuggccaaaucuuagucaug

SEQ ID NO: 1056304 - RNA, 22 nt, Human
uucauugugauucuuggcuagc

SEQ ID NO: 1056305 - RNA, 23 nt, Human
gcccucccucccagguggguguu

SEQ ID NO: 1056306 - RNA, 20 nt, Human
caggaugauuggacacgaug

SEQ ID NO: 1056307 - RNA, 22 nt, Human
uggcugagggggcucugcucag

SEQ ID NO: 1056308 - RNA, 22 nt, Human
uggcagcugugcuucauucuuu

SEQ ID NO: 1056309 - RNA, 22 nt, Human
aggcugagacugugcauuagug

SEQ ID NO: 1056310 - RNA, 22 nt, Human
agccagcuguucuggggcagca

SEQ ID NO: 1056311 - RNA, 17 nt, Human
gccaggagguuugagcu

SEQ ID NO: 1056312 - RNA, 22 nt, Human
auuacaguaacagcuacaaugc

SEQ ID NO: 1056313 - RNA, 22 nt, Human
gaauuuaagaggaugaaucugu

SEQ ID NO: 1056314 - RNA, 22 nt, Human
cauccugguuaccccauaguca

SEQ ID NO: 1056315 - RNA, 22 nt, Human
aggauuugaaccugcauccagu

SEQ ID NO: 1056316 - RNA, 22 nt, Human
ugaaggcccuaucuccauauac

SEQ ID NO: 1056317 - RNA, 22 nt, Human
uguugagacugagggagucagc

SEQ ID NO: 1056318 - RNA, 22 nt, Human
ugaggcagggagaguggauaug

SEQ ID NO: 1056319 - RNA, 22 nt, Human
ccugggauuuccugagcacucu

SEQ ID NO: 1056320 - RNA, 20 nt, Human
auaaaauaacugccacaaga

SEQ ID NO: 1056321 - RNA, 22 nt, Human
agaggcaguauacaauccgagc

SEQ ID NO: 1056322 - RNA, 22 nt, Human
ucuuuguaacugucuauugaga

SEQ ID NO: 1056323 - RNA, 22 nt, Human
uuggccaauuuagaacguguug

SEQ ID NO: 1056324 - RNA, 22 nt, Human
aauuuuaagcauaugacugguu

SEQ ID NO: 1056325 - RNA, 22 nt, Human
aggcugagagcaacgugucaga

SEQ ID NO: 1056326 - RNA, 22 nt, Human
gcugcuguuccuccaguggauc

SEQ ID NO: 1056327 - RNA, 22 nt, Human
uugaaagacuucuccugugaaa

SEQ ID NO: 1056328 - RNA, 22 nt, Human
gauugaaacauaggcagucgag

SEQ ID NO: 1056329 - RNA, 22 nt, Human
uugaaagaggcaaaguuugauc

SEQ ID NO: 1056330 - RNA, 22 nt, Human
ucugaagccuuuguacaggccu

SEQ ID NO: 1056331 - RNA, 22 nt, Human
ugucugugaccucuuuggagcc

SEQ ID NO: 1056332 - RNA, 19 nt, Human
cugggccagaaucagcuca

SEQ ID NO: 1056333 - RNA, 22 nt, Human
ucaggcuggagugcaguggcgc

SEQ ID NO: 1056334 - RNA, 21 nt, Human
uggcagacuagaguauagaug

SEQ ID NO: 1056335 - RNA, 22 nt, Human
uggcuucugucccugcuacauu

SEQ ID NO: 1056336 - RNA, 22 nt, Human
caugaggugauaaagcugggau

SEQ ID NO: 1056337 - RNA, 22 nt, Human
gauagauaaaacuauauuuuca

SEQ ID NO: 1056338 - RNA, 22 nt, Human
uacaguaaccuuauuugucauu

SEQ ID NO: 1056339 - RNA, 22 nt, Human
uccuggccgccgcguggggccg

SEQ ID NO: 1056340 - RNA, 22 nt, Human
uuauccaagcagaagcugcaca

SEQ ID NO: 1056341 - RNA, 19 nt, Human
uggcugagcuggacugagg

SEQ ID NO: 1056342 - RNA, 22 nt, Human
uagauaaaagggcaaagggcau

SEQ ID NO: 1056343 - RNA, 22 nt, Human
agaccaagacuauaaugagagg

SEQ ID NO: 1056344 - RNA, 22 nt, Human
ugaggcaggacuugcauaaagu

SEQ ID NO: 1056345 - RNA, 22 nt, Human
agaaaugaagcaggaguuauua

SEQ ID NO: 1056346 - RNA, 22 nt, Human
ugucucaguacacuccgauguu

SEQ ID NO: 1056347 - RNA, 22 nt, Human
caugauuuugucuuguguuaau

SEQ ID NO: 1056348 - RNA, 22 nt, Human
ccucuucugcuucaggagcacu

SEQ ID NO: 1056349 - RNA, 22 nt, Human
cacauauuugaugaagcuuugu

SEQ ID NO: 1056350 - RNA, 22 nt, Human
cuugcugucccuugguaugaac

SEQ ID NO: 1056351 - RNA, 22 nt, Human
gauuuggccuuucgcaugguau

SEQ ID NO: 1056352 - RNA, 22 nt, Human
gggucugaggaguaccauuguc

SEQ ID NO: 1056353 - RNA, 22 nt, Human
auugaaagcauggauuuggauu

SEQ ID NO: 1056354 - RNA, 21 nt, Human
agccuguugguuuacugcuca

SEQ ID NO: 1056355 - RNA, 22 nt, Human
uuaguaaauaaagucuacuuuc

SEQ ID NO: 1056356 - RNA, 22 nt, Human
aauuuccagaccccauccacag

SEQ ID NO: 1056357 - RNA, 22 nt, Human
caaaauuagaaaugcagcuguu

SEQ ID NO: 1056358 - RNA, 22 nt, Human
ucugggaauuuauuggcacuuu

SEQ ID NO: 1056359 - RNA, 22 nt, Human
aagggcuggaauaucucuuaga

SEQ ID NO: 1056360 - RNA, 22 nt, Human
ucugcccucauugcugccugga

SEQ ID NO: 1056361 - RNA, 22 nt, Human
cucaugauguagcgaaugagaa

SEQ ID NO: 1056362 - RNA, 22 nt, Human
cucacugacgaggaagcugaga

SEQ ID NO: 1056363 - RNA, 22 nt, Human
cagacaggagacuggaucaugg

SEQ ID NO: 1056364 - RNA, 22 nt, Human
uggcagcagacaucugaggucu

SEQ ID NO: 1056365 - RNA, 19 nt, Human
gcugagguggaggaaggag

SEQ ID NO: 1056366 - RNA, 22 nt, Human
caaaugaagguggugggucauu

SEQ ID NO: 1056367 - RNA, 22 nt, Human
gggacuucauagcuaggcacuu

SEQ ID NO: 1056368 - RNA, 22 nt, Human
agagggcaaguguaguccagua

SEQ ID NO: 1056369 - RNA, 22 nt, Human
gacagcuggcaguggaaaggug

SEQ ID NO: 1056370 - RNA, 20 nt, Human
aggccaaacccagcgcgccc

SEQ ID NO: 1056371 - RNA, 22 nt, Human
auuuccuuugcaaagacugugc

SEQ ID NO: 1056372 - RNA, 22 nt, Human
uuuuucaagacaaccugcaugu

SEQ ID NO: 1056373 - RNA, 22 nt, Human
uacacuauuuuacugauacaaa

SEQ ID NO: 1056374 - RNA, 22 nt, Human
ucugcagguguuggaaggguca

SEQ ID NO: 1056375 - RNA, 22 nt, Human
uuuauagggacaguucuuggag

SEQ ID NO: 1056376 - RNA, 22 nt, Human
uuagaaagggugucugaaucug

SEQ ID NO: 1056377 - RNA, 22 nt, Human
ucaggcugaaucauccuagcuu

SEQ ID NO: 1056378 - RNA, 22 nt, Human
acacaaugcauauuuuuccaga

SEQ ID NO: 1056379 - RNA, 22 nt, Human
accaggagaggcacuugcaaug

SEQ ID NO: 1056380 - RNA, 19 nt, Human
uugaaauuguuugauaugg

SEQ ID NO: 1056381 - RNA, 22 nt, Human
gcugucccgcugacuuccagcu

SEQ ID NO: 1056382 - RNA, 22 nt, Human
ucuucacaggagccugccugcc

SEQ ID NO: 1056383 - RNA, 22 nt, Human
aggcagacugugcgggaagagu

SEQ ID NO: 1056384 - RNA, 20 nt, Human
uauuaggaaggaggaaggaa

SEQ ID NO: 1056385 - RNA, 22 nt, Human
cuccuggcacugucuugaccca

SEQ ID NO: 1056386 - RNA, 22 nt, Human
cagugcuggcuguuaggacagu

SEQ ID NO: 1056387 - RNA, 20 nt, Human
uccuggccucccuggggcuc

SEQ ID NO: 1056388 - RNA, 22 nt, Human
uaucuguucaauggaagaugac

SEQ ID NO: 1056389 - RNA, 22 nt, Human
ggcagcaucacuugucuccagc

SEQ ID NO: 1056390 - RNA, 22 nt, Human
cugccucuugacagaucguggc

SEQ ID NO: 1056391 - RNA, 22 nt, Human
acuccuggggauccauuccuuu

SEQ ID NO: 1056392 - RNA, 22 nt, Human
ccucuucuagguuucagccugc

SEQ ID NO: 1056393 - RNA, 22 nt, Human
guugaaugaaucauucuaugua

SEQ ID NO: 1056394 - RNA, 22 nt, Human
uaagaacuucggacauguuauc

SEQ ID NO: 1056395 - RNA, 22 nt, Human
cuggaggcacccuuagagaggc

SEQ ID NO: 1056396 - RNA, 22 nt, Human
caucacccggaacugugucugc

SEQ ID NO: 1056397 - RNA, 22 nt, Human
gcuggcugaguucugucgucug

SEQ ID NO: 1056398 - RNA, 22 nt, Human
gcaggagaaaugaagauugggu

SEQ ID NO: 1056399 - RNA, 22 nt, Human
aagcuggaacaucuugaggaag

SEQ ID NO: 1056400 - RNA, 22 nt, Human
aggugagggugccagugcaugg

SEQ ID NO: 1056401 - RNA, 22 nt, Human
gaggcugagaguuuguucuacu

SEQ ID NO: 1056402 - RNA, 22 nt, Human
cuuaacauccugcauuuuucuu

SEQ ID NO: 1056403 - RNA, 22 nt, Human
guccacagcuggccagggccuc

SEQ ID NO: 1056404 - RNA, 22 nt, Human
ccccugccagcuaucccugaac

SEQ ID NO: 1056405 - RNA, 22 nt, Human
cucagaagaacaaaggcucuac

SEQ ID NO: 1056406 - RNA, 22 nt, Human
ccugguggcgaauggugguagg

SEQ ID NO: 1056407 - RNA, 22 nt, Human
uucucagagcacugcugacaaa

SEQ ID NO: 1056408 - RNA, 22 nt, Human
acauuucuaguuguucaucucc

SEQ ID NO: 1056409 - RNA, 22 nt, Human
cuacagacccaccuuggaagaa

SEQ ID NO: 1056410 - RNA, 22 nt, Human
cccaggaaaucaggcuuucuag

SEQ ID NO: 1056411 - RNA, 22 nt, Human
ucugcaggcuguacaggaagca

SEQ ID NO: 1056412 - RNA, 22 nt, Human
augugaggaagaaagagguaag

SEQ ID NO: 1056413 - RNA, 22 nt, Human
gugugcaggugucagugcagcu

SEQ ID NO: 1056414 - RNA, 22 nt, Human
caucaucaaaacaaauggaguc

SEQ ID NO: 1056415 - RNA, 22 nt, Human
uuccucagaaaauacuguccaa

SEQ ID NO: 1056416 - RNA, 22 nt, Human
gcagcugccuucagcuggaugg

SEQ ID NO: 1056417 - RNA, 22 nt, Human
auuagguugugcuuuguggaca

SEQ ID NO: 1056418 - RNA, 22 nt, Human
ugguaauuuacgcauuucugua

SEQ ID NO: 1056419 - RNA, 22 nt, Human
acuuucuuaggcuguauaaaug

SEQ ID NO: 1056420 - RNA, 22 nt, Human
ggcaggcaggagcgugcuuggg

SEQ ID NO: 1056421 - RNA, 22 nt, Human
auauuaggcaaggagauuauuu

SEQ ID NO: 1056422 - RNA, 22 nt, Human
uaggcugacuuguuucauaaag

SEQ ID NO: 1056423 - RNA, 22 nt, Human
ccuuuauucaauuaguccuaau

SEQ ID NO: 1056424 - RNA, 22 nt, Human
uucuccucuguuggccuucccu

SEQ ID NO: 1056425 - RNA, 22 nt, Human
guacauuucucuuguucuuauu

SEQ ID NO: 1056426 - RNA, 22 nt, Human
gcugagcacaccuaggguagag

SEQ ID NO: 1056427 - RNA, 22 nt, Human
gcauacagagaggauguggcau

SEQ ID NO: 1056428 - RNA, 22 nt, Human
uuugaaagucaaccuuccaguu

SEQ ID NO: 1056429 - RNA, 22 nt, Human
aacauagagacaggaagugcuu

SEQ ID NO: 1056430 - RNA, 23 nt, Human
cagcccuuccugcauguuuuugu

SEQ ID NO: 1056431 - RNA, 22 nt, Human
aagaggagacuucagcaacuug

SEQ ID NO: 1056432 - RNA, 22 nt, Human
ugcuuuggaucuauuugcugag

SEQ ID NO: 1056433 - RNA, 22 nt, Human
agcugaggcucugagagggaag

SEQ ID NO: 1056434 - RNA, 17 nt, Human
ccagagcuacugagacu

SEQ ID NO: 1056435 - RNA, 23 nt, Human
ggcagcucucaucugaugacuga

SEQ ID NO: 1056436 - RNA, 22 nt, Human
ucugggaaaugcuguuccuugu

SEQ ID NO: 1056437 - RNA, 22 nt, Human
uagcaagaccaauauguagaua

SEQ ID NO: 1056438 - RNA, 22 nt, Human
uaacacauauuucaagaguagu

SEQ ID NO: 1056439 - RNA, 22 nt, Human
augcuuuuaugucacaugguca

SEQ ID NO: 1056440 - RNA, 22 nt, Human
acaggcugaaaguuaaguucug

SEQ ID NO: 1056441 - RNA, 22 nt, Human
cuccuggaggauagugacuggg

SEQ ID NO: 1056442 - RNA, 22 nt, Human
cuggcucaggaaaguugcugcu

SEQ ID NO: 1056443 - RNA, 19 nt, Human
gcuccuggaugaccugugg

SEQ ID NO: 1056444 - RNA, 22 nt, Human
cuuuggcaaugucauuuucaau

SEQ ID NO: 1056445 - RNA, 22 nt, Human
cacuuucuguguugugcaaaaa

SEQ ID NO: 1056446 - RNA, 22 nt, Human
uucaggauccccuugaugggcu

SEQ ID NO: 1056447 - RNA, 22 nt, Human
caaaugaauagggagugugaug

SEQ ID NO: 1056448 - RNA, 22 nt, Human
gaacuguucccucacaggcugg

SEQ ID NO: 1056449 - RNA, 22 nt, Human
uggccacacccaccuagaggag

SEQ ID NO: 1056450 - RNA, 22 nt, Human
gucauucuuaacaacucaguag

SEQ ID NO: 1056451 - RNA, 19 nt, Human
accaggagacagugagcuu

SEQ ID NO: 1056452 - RNA, 22 nt, Human
gaggagagggcugcgggcccac

SEQ ID NO: 1056453 - RNA, 22 nt, Human
ugaaugaguuuggcugcuguuc

SEQ ID NO: 1056454 - RNA, 23 nt, Human
ggcugagacuacaggcgcuugcc

SEQ ID NO: 1056455 - RNA, 22 nt, Human
ucuggccacuugcuucacacug

SEQ ID NO: 1056456 - RNA, 20 nt, Human
uuucugugagaaacacuguu

SEQ ID NO: 1056457 - RNA, 19 nt, Human
aggcagcaggccagggaug

SEQ ID NO: 1056458 - RNA, 22 nt, Human
guggcaggagagacacagccau

SEQ ID NO: 1056459 - RNA, 22 nt, Human
ccugggcaacauagggagaccc

SEQ ID NO: 1056460 - RNA, 22 nt, Human
gagaagcaaucaguggccaccc

SEQ ID NO: 1056461 - RNA, 22 nt, Human
uggcagcuagauaguguguuua

SEQ ID NO: 1056462 - RNA, 22 nt, Human
gacuucuguuaacuuguaagag

SEQ ID NO: 1056463 - RNA, 20 nt, Human
aggcagcugggaaaugaggg

SEQ ID NO: 1056464 - RNA, 22 nt, Human
aggcucagccugggccuagagc

SEQ ID NO: 1056465 - RNA, 22 nt, Human
uggcuucugcauauuuuuagag

SEQ ID NO: 1056466 - RNA, 22 nt, Human
gggcugaggaacauauuuuguu

SEQ ID NO: 1056467 - RNA, 22 nt, Human
ccacugaggcaggcaguaucua

SEQ ID NO: 1056468 - RNA, 22 nt, Human
uaaugcuuaacagcuggcuuuu

SEQ ID NO: 1056469 - RNA, 17 nt, Human
cccaugagcccacuccc

SEQ ID NO: 1056470 - RNA, 22 nt, Human
aaguuacaguuauuauuuaaaa

SEQ ID NO: 1056471 - RNA, 22 nt, Human
cagaaguuagacuucaacuaau

SEQ ID NO: 1056472 - RNA, 22 nt, Human
gggcagcugccccucucugggc

SEQ ID NO: 1056473 - RNA, 22 nt, Human
ucuggagaggaggauguggaca

SEQ ID NO: 1056474 - RNA, 17 nt, Human
augaggucauuaagaua

SEQ ID NO: 1056475 - RNA, 22 nt, Human
gcugagucagauugcagucuug

SEQ ID NO: 1056476 - RNA, 22 nt, Human
aaggcagccuuuguuugauuga

SEQ ID NO: 1056477 - RNA, 22 nt, Human
uagaaagagcauaguauuauaa

SEQ ID NO: 1056478 - RNA, 22 nt, Human
acuccuggugcugaugaagaga

SEQ ID NO: 1056479 - RNA, 22 nt, Human
caacugugaauuuuaugauacc

SEQ ID NO: 1056480 - RNA, 22 nt, Human
gcccagugcugagggugcugcu

SEQ ID NO: 1056481 - RNA, 22 nt, Human
cccaggaaaguggaggcggcug

SEQ ID NO: 1056482 - RNA, 23 nt, Human
cccuggaguaaauucuuggaagg

SEQ ID NO: 1056483 - RNA, 22 nt, Human
gcuggcuugauaguuucugcuu

SEQ ID NO: 1056484 - RNA, 22 nt, Human
aggcugagccacggggcuggcu

SEQ ID NO: 1056485 - RNA, 22 nt, Human
auggccaacugaaaugaaagau

SEQ ID NO: 1056486 - RNA, 22 nt, Human
ggcaggcugcuugggucauguc

SEQ ID NO: 1056487 - RNA, 22 nt, Human
ggcugagaguuuccucuggggc

SEQ ID NO: 1056488 - RNA, 22 nt, Human
acucauugaaacuuaagaucua

SEQ ID NO: 1056489 - RNA, 22 nt, Human
uuuuuguagucauuagaagagg

SEQ ID NO: 1056490 - RNA, 22 nt, Human
caggcagccugagggaucuggg

SEQ ID NO: 1056491 - RNA, 22 nt, Human
cacugguaguuucagcaaccag

SEQ ID NO: 1056492 - RNA, 22 nt, Human
aucacaaaggcugcuucaugau

SEQ ID NO: 1056493 - RNA, 22 nt, Human
cuggcugggagcgagcugcuca

SEQ ID NO: 1056494 - RNA, 22 nt, Human
gugcugagcacaccuuggagca

SEQ ID NO: 1056495 - RNA, 22 nt, Human
ggccugagcagacagcaugaug

SEQ ID NO: 1056496 - RNA, 22 nt, Human
uucucagaggagucgggagcug

SEQ ID NO: 1056497 - RNA, 22 nt, Human
cugccuggccacaacccagggu

SEQ ID NO: 1056498 - RNA, 22 nt, Human
aggcuccaugcaaaggcuguuu

SEQ ID NO: 1056499 - RNA, 22 nt, Human
uaaaugaaaggguuuaauuuau

SEQ ID NO: 1056500 - RNA, 22 nt, Human
gcccaggauucuuucuuccuua

SEQ ID NO: 1056501 - RNA, 22 nt, Human
gcugagguccagcauucgccua

SEQ ID NO: 1056502 - RNA, 20 nt, Human
augauuuugcacuaacuuca

SEQ ID NO: 1056503 - RNA, 22 nt, Human
ucaggcuguggcuuugaccgca

SEQ ID NO: 1056504 - RNA, 22 nt, Human
caaggcugugcaggguccauau

SEQ ID NO: 1056505 - RNA, 22 nt, Human
acacuucucuuugaagaacaau

SEQ ID NO: 1056506 - RNA, 22 nt, Human
aaagcagagcagggcacuuaug

SEQ ID NO: 1056507 - RNA, 22 nt, Human
agaggggacagccaccugcccg

SEQ ID NO: 1056508 - RNA, 22 nt, Human
uggcugagagcaauugacucug

SEQ ID NO: 1056509 - RNA, 22 nt, Human
cccagggaaggcagauggagga

SEQ ID NO: 1056510 - RNA, 22 nt, Human
auacacauguguaugugcaugc

SEQ ID NO: 1056511 - RNA, 19 nt, Human
aguccaugaauggaggaug

SEQ ID NO: 1056512 - RNA, 22 nt, Human
gacuuucuguccagugauuucu

SEQ ID NO: 1056513 - RNA, 22 nt, Human
cuuuuccacugagccucacaaa

SEQ ID NO: 1056514 - RNA, 22 nt, Human
aagaacuguaucaagauguagu

SEQ ID NO: 1056515 - RNA, 22 nt, Human
uacuaggaagcagcugcauugg

SEQ ID NO: 1056516 - RNA, 22 nt, Human
guuauuagaagugaaggauugu

SEQ ID NO: 1056517 - RNA, 22 nt, Human
gcuccuggcucucugagggcug

SEQ ID NO: 1056518 - RNA, 22 nt, Human
uucaggaugcagagguuguagu

SEQ ID NO: 1056519 - RNA, 18 nt, Human
cugcccagagcauuucau

SEQ ID NO: 1056520 - RNA, 22 nt, Human
ccugguugugaguugaguugag

SEQ ID NO: 1056521 - RNA, 22 nt, Human
aggagaggaaucauuauuacaa

SEQ ID NO: 1056522 - RNA, 22 nt, Human
ucuugcuaaagaccaacacauu

SEQ ID NO: 1056523 - RNA, 22 nt, Human
cuuaauaauaggugaggcuaug

SEQ ID NO: 1056524 - RNA, 22 nt, Human
aaggcagccuuuugaguugauu

SEQ ID NO: 1056525 - RNA, 22 nt, Human
aacaucuacuaagugccaggca

SEQ ID NO: 1056526 - RNA, 22 nt, Human
augauguuauuuucagaaacau

SEQ ID NO: 1056527 - RNA, 22 nt, Human
ggcagcaucucuggcagcagcu

SEQ ID NO: 1056528 - RNA, 22 nt, Human
ugccuugcgggcguuucuguug

SEQ ID NO: 1056529 - RNA, 23 nt, Human
uagagcaguagaucaccauggga

SEQ ID NO: 1056530 - RNA, 22 nt, Human
ucaggagacauucuuaaaguag

SEQ ID NO: 1056531 - RNA, 22 nt, Human
aagaugacuauuuaucuguaag

SEQ ID NO: 1056532 - RNA, 17 nt, Human
agcagcugaagcagcca

SEQ ID NO: 1056533 - RNA, 18 nt, Human
ucuuggcagcaucuggca

SEQ ID NO: 1056534 - RNA, 22 nt, Human
cugaggccugggggcguggacg

SEQ ID NO: 1056535 - RNA, 22 nt, Human
gccaucacauccaggcuaccuc

SEQ ID NO: 1056536 - RNA, 22 nt, Human
ucugucuccucugaggugccag

SEQ ID NO: 1056537 - RNA, 21 nt, Human
uucugagcacucaucacuguc

SEQ ID NO: 1056538 - RNA, 22 nt, Human
ccuguccuccaagagcacaucu

SEQ ID NO: 1056539 - RNA, 22 nt, Human
cccaggagguggagguugcagu

SEQ ID NO: 1056540 - RNA, 22 nt, Human
cauuuguauagugcuuagacca

SEQ ID NO: 1056541 - RNA, 22 nt, Human
uggcaacauggacaggucugcc

SEQ ID NO: 1056542 - RNA, 22 nt, Human
acugaggucucagguggggaag

SEQ ID NO: 1056543 - RNA, 22 nt, Human
gaggcaugcagagcuggagcag

SEQ ID NO: 1056544 - RNA, 22 nt, Human
uagugcagguuaauaggacuuc

SEQ ID NO: 1056545 - RNA, 17 nt, Human
gcgcagcuccuggcgcg

SEQ ID NO: 1056546 - RNA, 22 nt, Human
ccuggccaaucuagggcuguua

SEQ ID NO: 1056547 - RNA, 22 nt, Human
ggcuggagaagggugguugaca

SEQ ID NO: 1056548 - RNA, 22 nt, Human
ugacagaaagaauaugucaauc

SEQ ID NO: 1056549 - RNA, 22 nt, Human
ucugccugccagucugguccuc

SEQ ID NO: 1056550 - RNA, 22 nt, Human
ugaggcagauauuuauuggguu

SEQ ID NO: 1056551 - RNA, 22 nt, Human
gaacuggucuuuuagguuuucu

SEQ ID NO: 1056552 - RNA, 22 nt, Human
aggcagcauuugaauccagguc

SEQ ID NO: 1056553 - RNA, 22 nt, Human
gcuggagagauaggcauggggu

SEQ ID NO: 1056554 - RNA, 22 nt, Human
cagcugccccuccagggcuggg

SEQ ID NO: 1056555 - RNA, 18 nt, Human
ucuuuggacaacuacugg

SEQ ID NO: 1056556 - RNA, 22 nt, Human
cagggcuggauccuccagacuc

SEQ ID NO: 1056557 - RNA, 21 nt, Human
gacaggacuagaccagagcuc

SEQ ID NO: 1056558 - RNA, 22 nt, Human
auggccaagcaugccuguggcc

SEQ ID NO: 1056559 - RNA, 22 nt, Human
ggcuguaguuaccugaugaaau

SEQ ID NO: 1056560 - RNA, 22 nt, Human
aggagaggucucccuuccccag

SEQ ID NO: 1056561 - RNA, 22 nt, Human
uucaacuagauuuauacaauuc

SEQ ID NO: 1056562 - RNA, 22 nt, Human
ucugcaggcuuauaggaugggu

SEQ ID NO: 1056563 - RNA, 22 nt, Human
aggagaaggaagugcaucacua

SEQ ID NO: 1056564 - RNA, 22 nt, Human
accaggagccacaggaggagcc

SEQ ID NO: 1056565 - RNA, 22 nt, Human
cugccucucagccugaccgcca

SEQ ID NO: 1056566 - RNA, 22 nt, Human
uauuuccauguuagaacuaagu

SEQ ID NO: 1056567 - RNA, 22 nt, Human
uugcugugucugauggcugaga

SEQ ID NO: 1056568 - RNA, 22 nt, Human
uggcuucuaguuugaggaaaaa

SEQ ID NO: 1056569 - RNA, 22 nt, Human
uucacagacauugcagacugaa

SEQ ID NO: 1056570 - RNA, 22 nt, Human
uuaggauaugaaacaguauaag

SEQ ID NO: 1056571 - RNA, 22 nt, Human
aagcaagaguuggagugauguu

SEQ ID NO: 1056572 - RNA, 22 nt, Human
gaggcugaaguguacaugggug

SEQ ID NO: 1056573 - RNA, 22 nt, Human
agagcugagcaccaagcauggu

SEQ ID NO: 1056574 - RNA, 22 nt, Human
uccccagauucaugucugcugu

SEQ ID NO: 1056575 - RNA, 22 nt, Human
ccccaggagaaaucuuaaacua

SEQ ID NO: 1056576 - RNA, 22 nt, Human
cagagcugcgcuuuuuccuggu

SEQ ID NO: 1056577 - RNA, 22 nt, Human
aggcugaaaacgagauggcaau

SEQ ID NO: 1056578 - RNA, 22 nt, Human
ucugccuggcucauggcaguga

SEQ ID NO: 1056579 - RNA, 22 nt, Human
auauaauacaaccugcuaagug

SEQ ID NO: 1056580 - RNA, 22 nt, Human
ugaggccccgaagcugagguuu

SEQ ID NO: 1056581 - RNA, 22 nt, Human
aaaaaugucauuauggaacuga

SEQ ID NO: 1056582 - RNA, 22 nt, Human
ccaggauggggagcagauagaa

SEQ ID NO: 1056583 - RNA, 22 nt, Human
ggcugcugguggaaugguaggc

SEQ ID NO: 1056584 - RNA, 22 nt, Human
gcucucuugguggcuguccugg

SEQ ID NO: 1056585 - RNA, 22 nt, Human
ugcugcugacauuuggggcuug

SEQ ID NO: 1056586 - RNA, 22 nt, Human
uucugugaaucuuuuuucccac

SEQ ID NO: 1056587 - RNA, 22 nt, Human
gcagaggagaugaagauacuuu

SEQ ID NO: 1056588 - RNA, 20 nt, Human
ggcaugagaugugagggagg

SEQ ID NO: 1056589 - RNA, 22 nt, Human
guucuucagcauuagaagucau

SEQ ID NO: 1056590 - RNA, 22 nt, Human
uuaggaaucaccugcagaucuu

SEQ ID NO: 1056591 - RNA, 22 nt, Human
auucuagauaagaaaagggcug

SEQ ID NO: 1056592 - RNA, 22 nt, Human
ugucucugggugauucaguccu

SEQ ID NO: 1056593 - RNA, 22 nt, Human
uuugaaguucccccauaucaga

SEQ ID NO: 1056594 - RNA, 22 nt, Human
ccaggagagcagaagcccaggc

SEQ ID NO: 1056595 - RNA, 22 nt, Human
cucuucuuuaguccagaccauc

SEQ ID NO: 1056596 - RNA, 17 nt, Human
cagcugugagagccuua

SEQ ID NO: 1056597 - RNA, 22 nt, Human
cugcugugacagcugccguguu

SEQ ID NO: 1056598 - RNA, 22 nt, Human
uucagaauauuuguuuuacaug

SEQ ID NO: 1056599 - RNA, 22 nt, Human
aaguguauauaugacuuauaaa

SEQ ID NO: 1056600 - RNA, 23 nt, Human
uucauuugucuacuucacuuguu

SEQ ID NO: 1056601 - RNA, 22 nt, Human
aucugccuggcuccaggugagc

SEQ ID NO: 1056602 - RNA, 20 nt, Human
ccucaggaugagggugagca

SEQ ID NO: 1056603 - RNA, 22 nt, Human
ccuuuuauaaaguuguauugaa

SEQ ID NO: 1056604 - RNA, 22 nt, Human
uugaacaguccuaagagacccu

SEQ ID NO: 1056605 - RNA, 22 nt, Human
cuacccaggcuggagugcagua

SEQ ID NO: 1056606 - RNA, 22 nt, Human
aguuggagugaacaugagauug

SEQ ID NO: 1056607 - RNA, 22 nt, Human
uagggcugccuauggcuagaua

SEQ ID NO: 1056608 - RNA, 22 nt, Human
ccuggccaggcuccaaguacug

SEQ ID NO: 1056609 - RNA, 22 nt, Human
ggcagcuuucaauaggguuaug

SEQ ID NO: 1056610 - RNA, 22 nt, Human
guaggcagggcuguggggagaa

SEQ ID NO: 1056611 - RNA, 22 nt, Human
uggcagcuggagggcaauggcc

SEQ ID NO: 1056612 - RNA, 22 nt, Human
guggcagcaaaugccuggacua

SEQ ID NO: 1056613 - RNA, 22 nt, Human
aacuuucuauagguugggauuu

SEQ ID NO: 1056614 - RNA, 22 nt, Human
cagaaacuagauuuagacacaa

SEQ ID NO: 1056615 - RNA, 22 nt, Human
ggcugaugagcuuagcuagaga

SEQ ID NO: 1056616 - RNA, 22 nt, Human
caaggccacuccagagacuggu

SEQ ID NO: 1056617 - RNA, 22 nt, Human
cacaaauggccguguucaaaga

SEQ ID NO: 1056618 - RNA, 22 nt, Human
uucagaaagugaaucuuguuau

SEQ ID NO: 1056619 - RNA, 22 nt, Human
aaggcugacucaacagggggcc

SEQ ID NO: 1056620 - RNA, 22 nt, Human
aggguggcuggaggaaucagaa

SEQ ID NO: 1056621 - RNA, 22 nt, Human
uaucaauacauguuaucagugu

SEQ ID NO: 1056622 - RNA, 22 nt, Human
aagauauucaaagauuuauuag

SEQ ID NO: 1056623 - RNA, 22 nt, Human
cagcugagcugccagacuacug

SEQ ID NO: 1056624 - RNA, 22 nt, Human
cugcugugagugguucuugccu

SEQ ID NO: 1056625 - RNA, 22 nt, Human
uaguuuuacuugcgaugauaau

SEQ ID NO: 1056626 - RNA, 17 nt, Human
cucacggaggaugaauc

SEQ ID NO: 1056627 - RNA, 22 nt, Human
ggccaaaucuguaaggcaagau

SEQ ID NO: 1056628 - RNA, 22 nt, Human
uucacauuggugauauguuucu

SEQ ID NO: 1056629 - RNA, 22 nt, Human
uuuuauagcugaauaguauucc

SEQ ID NO: 1056630 - RNA, 22 nt, Human
cgucuuccucuuacgaugcgcu

SEQ ID NO: 1056631 - RNA, 22 nt, Human
ccaccagagggcagacugugau

SEQ ID NO: 1056632 - RNA, 22 nt, Human
auuagagcuguuagugaagugc

SEQ ID NO: 1056633 - RNA, 22 nt, Human
auucuucacaccuguuccuguu

SEQ ID NO: 1056634 - RNA, 22 nt, Human
ucacccuugauaauguucuucu

SEQ ID NO: 1056635 - RNA, 22 nt, Human
gccugccucaaaaucccaguuc

SEQ ID NO: 1056636 - RNA, 22 nt, Human
aaugaaacucgaaauaaucaca

SEQ ID NO: 1056637 - RNA, 21 nt, Human
aggucagcccagcucuggaag

SEQ ID NO: 1056638 - RNA, 22 nt, Human
acaauacaggcuucuggacuua

SEQ ID NO: 1056639 - RNA, 22 nt, Human
caaauacuaaacauaagauuuu

SEQ ID NO: 1056640 - RNA, 22 nt, Human
uugaaauacugcauuguucagu

SEQ ID NO: 1056641 - RNA, 22 nt, Human
ccaggcuggagugcaguagugu

SEQ ID NO: 1056642 - RNA, 23 nt, Human
uguugaaguaacuguuacauaga

SEQ ID NO: 1056643 - RNA, 20 nt, Human
guacacuucauguuucaccu

SEQ ID NO: 1056644 - RNA, 23 nt, Human
aggauguaggauguauggcagag

SEQ ID NO: 1056645 - RNA, 22 nt, Human
ucaggagauggucuuuauaggc

SEQ ID NO: 1056646 - RNA, 22 nt, Human
uccauuuuguagguaugcuaca

SEQ ID NO: 1056647 - RNA, 22 nt, Human
cacaugugugcugaggacugug

SEQ ID NO: 1056648 - RNA, 22 nt, Human
cccaggaaguggagguugcagu

SEQ ID NO: 1056649 - RNA, 20 nt, Human
uccuggccuucucgggcagu

SEQ ID NO: 1056650 - RNA, 21 nt, Human
caaauacuuagaaacuuaaga

SEQ ID NO: 1056651 - RNA, 22 nt, Human
uuagccauuaauguccugugca

SEQ ID NO: 1056652 - RNA, 22 nt, Human
aacuuucuuggaugucucaaca

SEQ ID NO: 1056653 - RNA, 19 nt, Human
ugagaggcuuaaggcagcu

SEQ ID NO: 1056654 - RNA, 22 nt, Human
auacauuagaaucugguacuca

SEQ ID NO: 1056655 - RNA, 22 nt, Human
ucaggcuguauaucuugcacuc

SEQ ID NO: 1056656 - RNA, 22 nt, Human
gagugucugaauuagagcacaa

SEQ ID NO: 1056657 - RNA, 22 nt, Human
gcugaggccucagaaggcugag

SEQ ID NO: 1056658 - RNA, 20 nt, Human
gaagcagcuucauguagaca

SEQ ID NO: 1056659 - RNA, 22 nt, Human
ggagugggaacaaugacauggu

SEQ ID NO: 1056660 - RNA, 22 nt, Human
cugagaguauuggcaggcuugg

SEQ ID NO: 1056661 - RNA, 17 nt, Human
acacagggagagggagc

SEQ ID NO: 1056662 - RNA, 22 nt, Human
acaggcugccuaccaaguauca

SEQ ID NO: 1056663 - RNA, 22 nt, Human
cuuagcaugugguguccuugua

SEQ ID NO: 1056664 - RNA, 18 nt, Human
uuugcaaaggaaguaugg

SEQ ID NO: 1056665 - RNA, 22 nt, Human
ucauuucuccgaccugcugucc

SEQ ID NO: 1056666 - RNA, 22 nt, Human
ccuggccaguuuccaggcccug

SEQ ID NO: 1056667 - RNA, 22 nt, Human
aagaaaugcacacaacugcugg

SEQ ID NO: 1056668 - RNA, 23 nt, Human
cagucugcagcccacuugggcag

SEQ ID NO: 1056669 - RNA, 22 nt, Human
ugcuugugagaguuuuuucaga

SEQ ID NO: 1056670 - RNA, 22 nt, Human
gagugcagaugccagccccagu

SEQ ID NO: 1056671 - RNA, 22 nt, Human
agaggccaugcuagaggccugg

SEQ ID NO: 1056672 - RNA, 22 nt, Human
cccuggaggcaaagguugcagu

SEQ ID NO: 1056673 - RNA, 22 nt, Human
uccauuuucuugcucuagguaa

SEQ ID NO: 1056674 - RNA, 16 nt, Human
uggcugagagaggguu

SEQ ID NO: 1056675 - RNA, 22 nt, Human
augacaaauucagaccauagca

SEQ ID NO: 1056676 - RNA, 20 nt, Human
auacaguaggugcucaauau

SEQ ID NO: 1056677 - RNA, 22 nt, Human
aacauuuaugauugagguaaau

SEQ ID NO: 1056678 - RNA, 22 nt, Human
uuguaaauaguaguaagaugcc

SEQ ID NO: 1056679 - RNA, 22 nt, Human
uugaauaguguuuucaguauac

SEQ ID NO: 1056680 - RNA, 23 nt, Human
uuagagaugauuaaaaaaucuug

SEQ ID NO: 1056681 - RNA, 22 nt, Human
ucuucccuaaucaccaucuuca

SEQ ID NO: 1056682 - RNA, 22 nt, Human
uauuucagcccuacuacuuggc

SEQ ID NO: 1056683 - RNA, 22 nt, Human
cacagcaaagacacucucaacu

SEQ ID NO: 1056684 - RNA, 22 nt, Human
ccuggccagggucugggcugcu

SEQ ID NO: 1056685 - RNA, 22 nt, Human
auuaggaagaggaugucagcau

SEQ ID NO: 1056686 - RNA, 22 nt, Human
aggccaaauguguauaaaacau

SEQ ID NO: 1056687 - RNA, 22 nt, Human
cccaggagacugagcuguaacc

SEQ ID NO: 1056688 - RNA, 22 nt, Human
cccugccuuguuggagccuaug

SEQ ID NO: 1056689 - RNA, 22 nt, Human
gugaggucuuugggaggugauu

SEQ ID NO: 1056690 - RNA, 22 nt, Human
uucuuaacucaaauauauaucc

SEQ ID NO: 1056691 - RNA, 22 nt, Human
uggguccagugcagcugcgcgu

SEQ ID NO: 1056692 - RNA, 22 nt, Human
aguugcucaauguggcugugga

SEQ ID NO: 1056693 - RNA, 22 nt, Human
uagaaaguacuaaauuuaacug

SEQ ID NO: 1056694 - RNA, 22 nt, Human
ugaggcucacgaacagaagacu

SEQ ID NO: 1056695 - RNA, 22 nt, Human
uucaauucugcucugaucuuag

SEQ ID NO: 1056696 - RNA, 22 nt, Human
aacauguugaguugaaaguagc

SEQ ID NO: 1056697 - RNA, 22 nt, Human
agaaaagaggcuuucuaagcau

SEQ ID NO: 1056698 - RNA, 22 nt, Human
uguuggcagauugucuaggguu

SEQ ID NO: 1056699 - RNA, 22 nt, Human
aggguggcugaguagauggaag

SEQ ID NO: 1056700 - RNA, 21 nt, Human
uucuccccagcgaauccucgg

SEQ ID NO: 1056701 - RNA, 22 nt, Human
uuucuucagccuucacaaccug

SEQ ID NO: 1056702 - RNA, 22 nt, Human
uguccucuuccagugcuccuuc

SEQ ID NO: 1056703 - RNA, 22 nt, Human
auguuuccauuuucuuguauca

SEQ ID NO: 1056704 - RNA, 22 nt, Human
cauuuguuaauuacuauuaucu

SEQ ID NO: 1056705 - RNA, 19 nt, Human
gugaggucuuuccuuuugu

SEQ ID NO: 1056706 - RNA, 22 nt, Human
uagggcugcagaacaauggccu

SEQ ID NO: 1056707 - RNA, 22 nt, Human
cagguaaaaauaaauuugugag

SEQ ID NO: 1056708 - RNA, 22 nt, Human
uuugcagugauucuugcaguga

SEQ ID NO: 1056709 - RNA, 22 nt, Human
uucuuaaaacuuauggacaggu

SEQ ID NO: 1056710 - RNA, 22 nt, Human
uaugaacuuuugaugugacaug

SEQ ID NO: 1056711 - RNA, 22 nt, Human
aaacuacuaugggaauguacuu

SEQ ID NO: 1056712 - RNA, 22 nt, Human
caaggcugcaaaacuacauggg

SEQ ID NO: 1056713 - RNA, 23 nt, Human
uuccuggcagguacaacuuuuac

SEQ ID NO: 1056714 - RNA, 22 nt, Human
uggcuucuccagaaaucuuggu

SEQ ID NO: 1056715 - RNA, 22 nt, Human
uaaccuuucaggcauguagguu

SEQ ID NO: 1056716 - RNA, 22 nt, Human
gagcugaguguccuaggcaugg

SEQ ID NO: 1056717 - RNA, 22 nt, Human
acgguaacagauaccacagacu

SEQ ID NO: 1056718 - RNA, 22 nt, Human
ggagagaaauugagguagcaag

SEQ ID NO: 1056719 - RNA, 21 nt, Human
agccagcuaucacacagcauu

SEQ ID NO: 1056720 - RNA, 22 nt, Human
cuucucagucaccugugagucu

SEQ ID NO: 1056721 - RNA, 22 nt, Human
acucauuugacacuuuaaacug

SEQ ID NO: 1056722 - RNA, 23 nt, Human
gagcugaguguagggagacuagg

SEQ ID NO: 1056723 - RNA, 22 nt, Human
auaucaaacgaaguuauuuuaa

SEQ ID NO: 1056724 - RNA, 22 nt, Human
ggaagagggaaccacgacugua

SEQ ID NO: 1056725 - RNA, 22 nt, Human
cuggcacacaaguauuuccuuu

SEQ ID NO: 1056726 - RNA, 22 nt, Human
augaggccagggugccaugaaa

SEQ ID NO: 1056727 - RNA, 22 nt, Human
gugcugagcacagcugcccagg

SEQ ID NO: 1056728 - RNA, 20 nt, Human
gcugccuguuucuguaagua

SEQ ID NO: 1056729 - RNA, 21 nt, Human
auuuggauauugcuggcaaau

SEQ ID NO: 1056730 - RNA, 19 nt, Human
cauuuuaagcauccccagu

SEQ ID NO: 1056731 - RNA, 22 nt, Human
uuagugauuacuacauagauga

SEQ ID NO: 1056732 - RNA, 22 nt, Human
cccucgccgcagcugcuucccg

SEQ ID NO: 1056733 - RNA, 22 nt, Human
aaauguuuugcucccauguggu

SEQ ID NO: 1056734 - RNA, 22 nt, Human
ucauuuaauagcuuuugucuuu

SEQ ID NO: 1056735 - RNA, 23 nt, Human
uggcugagguccagguaguuuca

SEQ ID NO: 1056736 - RNA, 22 nt, Human
agcgagggaggucugaggacag

SEQ ID NO: 1056737 - RNA, 19 nt, Human
uucauucucuuauuguugu

SEQ ID NO: 1056738 - RNA, 22 nt, Human
gucuccugagccuugacugcaa

SEQ ID NO: 1056739 - RNA, 22 nt, Human
uagauuuuacuucugucauuac

SEQ ID NO: 1056740 - RNA, 22 nt, Human
ugaggcagcaauugauuauuca

SEQ ID NO: 1056741 - RNA, 22 nt, Human
aguccuuugggaaaaaugacua

SEQ ID NO: 1056742 - RNA, 22 nt, Human
uguuugaacugaauaacauagu

SEQ ID NO: 1056743 - RNA, 22 nt, Human
uguccccagagccuguuccugc

SEQ ID NO: 1056744 - RNA, 22 nt, Human
ccagaggagaugccuccucugu

SEQ ID NO: 1056745 - RNA, 22 nt, Human
uccuggccucgcuguccaccuu

SEQ ID NO: 1056746 - RNA, 22 nt, Human
gaggcagugcauugucuagggg

SEQ ID NO: 1056747 - RNA, 20 nt, Human
uccaggagguuaguguggcu

SEQ ID NO: 1056748 - RNA, 22 nt, Human
uucuaauugaccuuaggcugug

SEQ ID NO: 1056749 - RNA, 22 nt, Human
aacaaaugaccugauuucuucc

SEQ ID NO: 1056750 - RNA, 22 nt, Human
aggaugaauaacugaaauggug

SEQ ID NO: 1056751 - RNA, 20 nt, Human
gcucccagccugcagucccc

SEQ ID NO: 1056752 - RNA, 17 nt, Human
agacagugagugccuug

SEQ ID NO: 1056753 - RNA, 22 nt, Human
acuggccaugggauuuauauuu

SEQ ID NO: 1056754 - RNA, 22 nt, Human
uagcaaaaacugcaguuacuuu

SEQ ID NO: 1056755 - RNA, 22 nt, Human
ucugccugagggagcugaggaa

SEQ ID NO: 1056756 - RNA, 22 nt, Human
aaucuuacaccgaauuuaaacu

SEQ ID NO: 1056757 - RNA, 17 nt, Human
cuccuggcagccucagg

SEQ ID NO: 1056758 - RNA, 22 nt, Human
cauuguuauagcauuacacacc

SEQ ID NO: 1056759 - RNA, 22 nt, Human
uaaggccaccguuauagaacca

SEQ ID NO: 1056760 - RNA, 22 nt, Human
agcauccaacaggagggaaggg

SEQ ID NO: 1056761 - RNA, 22 nt, Human
augcuguggccagaguucaacu

SEQ ID NO: 1056762 - RNA, 22 nt, Human
gcaaaaaaugcuuguugcuuag

SEQ ID NO: 1056763 - RNA, 22 nt, Human
ugaggcaggagaauggcgggaa

SEQ ID NO: 1056764 - RNA, 22 nt, Human
uuugcacuagcauuuguccaug

SEQ ID NO: 1056765 - RNA, 22 nt, Human
uccugccuguuuaccuguacuu

SEQ ID NO: 1056766 - RNA, 22 nt, Human
ggaggugguggcagugacaauu

SEQ ID NO: 1056767 - RNA, 22 nt, Human
aguucagaguaaauguugaagg

SEQ ID NO: 1056768 - RNA, 22 nt, Human
acuucuggauagagucagcuuu

SEQ ID NO: 1056769 - RNA, 22 nt, Human
uccuggcccacuaugccagcau

SEQ ID NO: 1056770 - RNA, 22 nt, Human
cccaggaaagagacugcugggu

SEQ ID NO: 1056771 - RNA, 22 nt, Human
aagacaauuugauacuaguugc

SEQ ID NO: 1056772 - RNA, 22 nt, Human
uccaggaggaggaaggcugcca

SEQ ID NO: 1056773 - RNA, 22 nt, Human
agcaccugcuaugugucaggga

SEQ ID NO: 1056774 - RNA, 22 nt, Human
gugaggucauauagcgaacucc

SEQ ID NO: 1056775 - RNA, 22 nt, Human
ccuggcugcauuuugcuggaug

SEQ ID NO: 1056776 - RNA, 22 nt, Human
ggcugaugggcaugagcuguca

SEQ ID NO: 1056777 - RNA, 22 nt, Human
agggacuauuuacccaucucac

SEQ ID NO: 1056778 - RNA, 22 nt, Human
aaggcagcaccgccuccugaaa

SEQ ID NO: 1056779 - RNA, 22 nt, Human
agagcacuuucgagagccggag

SEQ ID NO: 1056780 - RNA, 22 nt, Human
ugcugcugauggcaccuaggca

SEQ ID NO: 1056781 - RNA, 22 nt, Human
uuuuucagccaugaauuacacu

SEQ ID NO: 1056782 - RNA, 22 nt, Human
ccugggccugaaaacauuucuc

SEQ ID NO: 1056783 - RNA, 22 nt, Human
acauuuaaccaaacuguuuaau

SEQ ID NO: 1056784 - RNA, 22 nt, Human
cuggcugacaccuugauagcag

SEQ ID NO: 1056785 - RNA, 22 nt, Human
cuggcugaggucaccaguagcu

SEQ ID NO: 1056786 - RNA, 22 nt, Human
gcuggagagugaggggagcaag

SEQ ID NO: 1056787 - RNA, 22 nt, Human
uuuuacuuaauucuuggucaug

SEQ ID NO: 1056788 - RNA, 22 nt, Human
guguguuuagcauuagcagggg

SEQ ID NO: 1056789 - RNA, 22 nt, Human
uuggccaagggaucgagguugg

SEQ ID NO: 1056790 - RNA, 22 nt, Human
agguaacuguggcuagguaacu

SEQ ID NO: 1056791 - RNA, 22 nt, Human
accuugaugccuuuccaagaug

SEQ ID NO: 1056792 - RNA, 22 nt, Human
cugagggucaacuugauuguau

SEQ ID NO: 1056793 - RNA, 22 nt, Human
uucaggauaugugauaucugaa

SEQ ID NO: 1056794 - RNA, 22 nt, Human
uucucagguagugcugaugcug

SEQ ID NO: 1056795 - RNA, 20 nt, Human
uuucuugucggcuguugcug

SEQ ID NO: 1056796 - RNA, 22 nt, Human
gggacgggcaguccaagggguc

SEQ ID NO: 1056797 - RNA, 22 nt, Human
cugaggucaccccacuggcugu

SEQ ID NO: 1056798 - RNA, 22 nt, Human
gagggcugaagauuguggcccc

SEQ ID NO: 1056799 - RNA, 22 nt, Human
gaggcagcgggucaggaccgug

SEQ ID NO: 1056800 - RNA, 22 nt, Human
cccucccucugcuggguguaga

SEQ ID NO: 1056801 - RNA, 20 nt, Human
ugcugagguugacaugccca

SEQ ID NO: 1056802 - RNA, 22 nt, Human
uuugcaguuucauugcugaaau

SEQ ID NO: 1056803 - RNA, 22 nt, Human
aauacacuauuuugugcucagu

SEQ ID NO: 1056804 - RNA, 22 nt, Human
uucaggauuguguuuuuccuga

SEQ ID NO: 1056805 - RNA, 22 nt, Human
ugguuacauauccuuuggagcc

SEQ ID NO: 1056806 - RNA, 22 nt, Human
cugcuuugcauagcugccagag

SEQ ID NO: 1056807 - RNA, 22 nt, Human
guauuaguuaucuacugcugug

SEQ ID NO: 1056808 - RNA, 22 nt, Human
acagcugcacacugaacuuggu

SEQ ID NO: 1056809 - RNA, 22 nt, Human
caggcugccgugggguccaggc

SEQ ID NO: 1056810 - RNA, 22 nt, Human
aggcagguuggugagaagacug

SEQ ID NO: 1056811 - RNA, 22 nt, Human
gucaggauuugaacucaggucu

SEQ ID NO: 1056812 - RNA, 22 nt, Human
acaugaaaugcagccuguaacc

SEQ ID NO: 1056813 - RNA, 22 nt, Human
cuggagucucuucuguagcuac

SEQ ID NO: 1056814 - RNA, 22 nt, Human
uaacugguccucggauguugug

SEQ ID NO: 1056815 - RNA, 22 nt, Human
ccaugagcuucaacugacacag

SEQ ID NO: 1056816 - RNA, 22 nt, Human
cagaccagcucuaugaacccaa

SEQ ID NO: 1056817 - RNA, 22 nt, Human
ucuccuggagcaggaagguggg

SEQ ID NO: 1056818 - RNA, 22 nt, Human
uggcacaugguaagacucagua

SEQ ID NO: 1056819 - RNA, 22 nt, Human
caccagcuccaccagggcaggu

SEQ ID NO: 1056820 - RNA, 22 nt, Human
agcuggcaguaugacuggugac

SEQ ID NO: 1056821 - RNA, 22 nt, Human
gggagucugggcuagacuccuu

SEQ ID NO: 1056822 - RNA, 22 nt, Human
agcuaagaacuugagcucugga

SEQ ID NO: 1056823 - RNA, 22 nt, Human
gcacaauuauuuaugcaguaug

SEQ ID NO: 1056824 - RNA, 20 nt, Human
aguuauaguaucuagccaug

SEQ ID NO: 1056825 - RNA, 22 nt, Human
uugcauuuccuguacuguuuga

SEQ ID NO: 1056826 - RNA, 21 nt, Human
uacugagaccucacagugugc

SEQ ID NO: 1056827 - RNA, 22 nt, Human
caggcagccaggggaccugucc

SEQ ID NO: 1056828 - RNA, 22 nt, Human
agaaguuguagguuugcauauu

SEQ ID NO: 1056829 - RNA, 22 nt, Human
caacagcugaucuuugaugaag

SEQ ID NO: 1056830 - RNA, 22 nt, Human
caaaugaagaaccuucucaccu

SEQ ID NO: 1056831 - RNA, 22 nt, Human
uuuaucagaaguuagagaaaga

SEQ ID NO: 1056832 - RNA, 21 nt, Human
uguuacaguccaaauguuugu

SEQ ID NO: 1056833 - RNA, 22 nt, Human
auggccaaagccacagcagagg

SEQ ID NO: 1056834 - RNA, 22 nt, Human
caaggccagagccagcgauaag

SEQ ID NO: 1056835 - RNA, 22 nt, Human
gaaggccacggaauggagcugg

SEQ ID NO: 1056836 - RNA, 22 nt, Human
uagugcuuaacacaaagugauu

SEQ ID NO: 1056837 - RNA, 22 nt, Human
agaggggaaggaugugauguga

SEQ ID NO: 1056838 - RNA, 22 nt, Human
cagucucuaaaucaaucugaau

SEQ ID NO: 1056839 - RNA, 22 nt, Human
cuugaaagucacaugcagcccu

SEQ ID NO: 1056840 - RNA, 22 nt, Human
gaggccagcuaguccaggaagu

SEQ ID NO: 1056841 - RNA, 20 nt, Human
ugagacccgcugacaaguuc

SEQ ID NO: 1056842 - RNA, 22 nt, Human
uuuggaauguaguuuaaucauc

SEQ ID NO: 1056843 - RNA, 22 nt, Human
acacaaguucuaaagauugcgc

SEQ ID NO: 1056844 - RNA, 21 nt, Human
auguaggaguuauuggaacag

SEQ ID NO: 1056845 - RNA, 20 nt, Human
acuguuaguauacuugugcc

SEQ ID NO: 1056846 - RNA, 22 nt, Human
ucuuagaaugucaacugauguu

SEQ ID NO: 1056847 - RNA, 22 nt, Human
cacaugaguccugccagguaug

SEQ ID NO: 1056848 - RNA, 18 nt, Human
aggcaggugcuggaaguc

SEQ ID NO: 1056849 - RNA, 22 nt, Human
aggcagucuaguccccaggcaa

SEQ ID NO: 1056850 - RNA, 21 nt, Human
uuucuuaggcucuaaaaugac

SEQ ID NO: 1056851 - RNA, 22 nt, Human
gccaggagacuccauucauuug

SEQ ID NO: 1056852 - RNA, 22 nt, Human
uaauuaacauacaaaacagcug

SEQ ID NO: 1056853 - RNA, 19 nt, Human
uuacuuggcaaagucaguc

SEQ ID NO: 1056854 - RNA, 22 nt, Human
acuuccaaauaccaucacauug

SEQ ID NO: 1056855 - RNA, 23 nt, Human
ucugagguggcucuugcuuugaa

SEQ ID NO: 1056856 - RNA, 22 nt, Human
uugauagguuuuauguauaguu

SEQ ID NO: 1056857 - RNA, 22 nt, Human
uaggauaggauggagacagaau

SEQ ID NO: 1056858 - RNA, 22 nt, Human
uggcagcuugaaugcagucuuu

SEQ ID NO: 1056859 - RNA, 22 nt, Human
ucaggaugaccacgagccucua

SEQ ID NO: 1056860 - RNA, 22 nt, Human
ugagggagagggcgaaaaugaa

SEQ ID NO: 1056861 - RNA, 22 nt, Human
uauguagguaaacacagacaua

SEQ ID NO: 1056862 - RNA, 22 nt, Human
agaaaguuugagaacuguagau

SEQ ID NO: 1056863 - RNA, 22 nt, Human
gcaggcuguagacaccaaacua

SEQ ID NO: 1056864 - RNA, 22 nt, Human
uuggccaacagcgacagggcca

SEQ ID NO: 1056865 - RNA, 21 nt, Human
uggcugagccaggugugugga

SEQ ID NO: 1056866 - RNA, 19 nt, Human
agucuuucccacucgucuu

SEQ ID NO: 1056867 - RNA, 23 nt, Human
uugcacauuggagcuggucuucu

SEQ ID NO: 1056868 - RNA, 22 nt, Human
uugcuucaguagcucuuuaaag

SEQ ID NO: 1056869 - RNA, 22 nt, Human
cagagcugucauuugccaguga

SEQ ID NO: 1056870 - RNA, 21 nt, Human
uuagaaagcucacuacaguua

SEQ ID NO: 1056871 - RNA, 22 nt, Human
ucucuucuaauuaggguccaug

SEQ ID NO: 1056872 - RNA, 22 nt, Human
uuuuuauaugaaggauagugcg

SEQ ID NO: 1056873 - RNA, 22 nt, Human
uuauacauguguuuugagauga

SEQ ID NO: 1056874 - RNA, 22 nt, Human
ucuggccaguagauguggguug

SEQ ID NO: 1056875 - RNA, 19 nt, Human
aaaaacuuaguccagaaag

SEQ ID NO: 1056876 - RNA, 22 nt, Human
uagccaggcugcagcugauccg

SEQ ID NO: 1056877 - RNA, 22 nt, Human
uuuaguagaaauauuugggccu

SEQ ID NO: 1056878 - RNA, 22 nt, Human
cgaggcagggaagcugcaaaag

SEQ ID NO: 1056879 - RNA, 22 nt, Human
gauuucuugauaaguaguguga

SEQ ID NO: 1056880 - RNA, 22 nt, Human
ccaggcugcuguugguguccgc

SEQ ID NO: 1056881 - RNA, 22 nt, Human
aacugccuggccaggcugcaac

SEQ ID NO: 1056882 - RNA, 22 nt, Human
gacaguaagucagagacuuggu

SEQ ID NO: 1056883 - RNA, 22 nt, Human
uguugccuggggaagcucugau

SEQ ID NO: 1056884 - RNA, 22 nt, Human
cucuccucagaacaggcccucu

SEQ ID NO: 1056885 - RNA, 22 nt, Human
auauaauaguuucauaaaggcu

SEQ ID NO: 1056886 - RNA, 22 nt, Human
ggggccccucggacacgugcgg

SEQ ID NO: 1056887 - RNA, 22 nt, Human
ccaggcuggucugaauuucuag

SEQ ID NO: 1056888 - RNA, 22 nt, Human
agccagcucccuccccugcagg

SEQ ID NO: 1056889 - RNA, 22 nt, Human
aaccuuuugcaagugccuugac

SEQ ID NO: 1056890 - RNA, 22 nt, Human
aaucuguuuaguucugcguaug

SEQ ID NO: 1056891 - RNA, 22 nt, Human
agaggacagguuuuccaugggc

SEQ ID NO: 1056892 - RNA, 21 nt, Human
aggcagcuggaaggccuggcu

SEQ ID NO: 1056893 - RNA, 22 nt, Human
aggucagcaggccaggggcgaa

SEQ ID NO: 1056894 - RNA, 22 nt, Human
cuacccagcaccuaggcugccu

SEQ ID NO: 1056895 - RNA, 22 nt, Human
caggaggggguggaguuucgcc

SEQ ID NO: 1056896 - RNA, 22 nt, Human
gcagaggccuagguggaaggcc

SEQ ID NO: 1056897 - RNA, 22 nt, Human
aacuucuggauguuucaaaugu

SEQ ID NO: 1056898 - RNA, 22 nt, Human
cucacugugccuuuucccaaac

SEQ ID NO: 1056899 - RNA, 22 nt, Human
aguggaccagaagacugaagcu

SEQ ID NO: 1056900 - RNA, 22 nt, Human
uccccaccuacacacugcuccu

SEQ ID NO: 1056901 - RNA, 22 nt, Human
ggagguggcagagggacauucu

SEQ ID NO: 1056902 - RNA, 22 nt, Human
gucaggauuauuuuauuaaaag

SEQ ID NO: 1056903 - RNA, 22 nt, Human
cugacuuuagaacccaaaaagu

SEQ ID NO: 1056904 - RNA, 22 nt, Human
guccaugauucuguguaguaga

SEQ ID NO: 1056905 - RNA, 22 nt, Human
uccauuuuucaugacuccucaa

SEQ ID NO: 1056906 - RNA, 22 nt, Human
uaauuccaaguugagacaugca

SEQ ID NO: 1056907 - RNA, 22 nt, Human
uccaugaguuugaggaaaagag

SEQ ID NO: 1056908 - RNA, 22 nt, Human
gcagaggauagcauaugaaccu

SEQ ID NO: 1056909 - RNA, 22 nt, Human
augaaauugaucuugaacuuuu

SEQ ID NO: 1056910 - RNA, 22 nt, Human
acugagguugaaauagugaugu

SEQ ID NO: 1056911 - RNA, 22 nt, Human
auuugcuuuaagguauaaaagg

SEQ ID NO: 1056912 - RNA, 22 nt, Human
uucugagagugccagaaguucu

SEQ ID NO: 1056913 - RNA, 22 nt, Human
acagugacguuuauuugagacg

SEQ ID NO: 1056914 - RNA, 22 nt, Human
aucuugcauuugcuaaaaugca

SEQ ID NO: 1056915 - RNA, 22 nt, Human
gauggacagccuggaaggaaag

SEQ ID NO: 1056916 - RNA, 23 nt, Human
uuucaaauuacucugcagaugac

SEQ ID NO: 1056917 - RNA, 22 nt, Human
cucaggauauugggcuggagca

SEQ ID NO: 1056918 - RNA, 22 nt, Human
cgcagggauuucaaggggccuu

SEQ ID NO: 1056919 - RNA, 22 nt, Human
gggucccuggaauuacuugaca

SEQ ID NO: 1056920 - RNA, 17 nt, Human
aaggccauuuccaccca

SEQ ID NO: 1056921 - RNA, 22 nt, Human
uuggcagauuugucaguaagcu

SEQ ID NO: 1056922 - RNA, 20 nt, Human
ugcugcugcuucacccccau

SEQ ID NO: 1056923 - RNA, 22 nt, Human
cuuaaaaucuggcaguuagcua

SEQ ID NO: 1056924 - RNA, 21 nt, Human
cucuuuauauaguaaagauau

SEQ ID NO: 1056925 - RNA, 22 nt, Human
guaaguuauauuaaaauuucag

SEQ ID NO: 1056926 - RNA, 22 nt, Human
uugaaaguccuucuugaguuac

SEQ ID NO: 1056927 - RNA, 22 nt, Human
cccaggaggguggccucugccc

SEQ ID NO: 1056928 - RNA, 22 nt, Human
cuucagugauauaggcuucucc

SEQ ID NO: 1056929 - RNA, 22 nt, Human
uucuaugccauguucagcuacu

SEQ ID NO: 1056930 - RNA, 18 nt, Human
aguaaagcuuauuacaug

SEQ ID NO: 1056931 - RNA, 15 nt, Human
caggagaggaagguu

SEQ ID NO: 1056932 - RNA, 22 nt, Human
cuguccccgcgaguccagagcu

SEQ ID NO: 1056933 - RNA, 22 nt, Human
gguggaaggccuggaaggaggc

SEQ ID NO: 1056934 - RNA, 22 nt, Human
acaccuuugccccaagucauag

SEQ ID NO: 1056935 - RNA, 22 nt, Human
uuggccaaauacacaccuuuug

SEQ ID NO: 1056936 - RNA, 22 nt, Human
ucuuagaaguucauguuccagc

SEQ ID NO: 1056937 - RNA, 22 nt, Human
uuucacagguacaaacacuccu

SEQ ID NO: 1056938 - RNA, 22 nt, Human
ccccaggagcuuguuuuagaga

SEQ ID NO: 1056939 - RNA, 22 nt, Human
acucaccacacccuugcacuug

SEQ ID NO: 1056940 - RNA, 22 nt, Human
agugucauuccagggacccucg

SEQ ID NO: 1056941 - RNA, 22 nt, Human
augcuguguccuagugaaagaa

SEQ ID NO: 1056942 - RNA, 22 nt, Human
gcugcugugccuggcguccugu

SEQ ID NO: 1056943 - RNA, 22 nt, Human
gaggacaggagacucacuguuu

SEQ ID NO: 1056944 - RNA, 22 nt, Human
ugaggucauggcugauauuucc

SEQ ID NO: 1056945 - RNA, 23 nt, Human
agcugaggugcagauccaaagaa

SEQ ID NO: 1056946 - RNA, 22 nt, Human
gaggcagcagaacauggaagag

SEQ ID NO: 1056947 - RNA, 22 nt, Human
aaacuccugcauacucagaagc

SEQ ID NO: 1056948 - RNA, 22 nt, Human
acaucucaugaaugauaaauca

SEQ ID NO: 1056949 - RNA, 22 nt, Human
acugagguggggucugcuugga

SEQ ID NO: 1056950 - RNA, 22 nt, Human
ugagccugguugcagugucugg

SEQ ID NO: 1056951 - RNA, 22 nt, Human
uucuacaaauauuuacuguucc

SEQ ID NO: 1056952 - RNA, 22 nt, Human
uauuucagcaagaagaaugugg

SEQ ID NO: 1056953 - RNA, 23 nt, Human
agacaguggccgagagguacuag

SEQ ID NO: 1056954 - RNA, 22 nt, Human
cuccugggcucaagugauccuc

SEQ ID NO: 1056955 - RNA, 18 nt, Human
cucaccauucugcccaau

SEQ ID NO: 1056956 - RNA, 22 nt, Human
cagcagaggcacgucugugaau

SEQ ID NO: 1056957 - RNA, 22 nt, Human
aaggcugaccaguuuacacuuu

SEQ ID NO: 1056958 - RNA, 22 nt, Human
ugacagacagcuucucauuuua

SEQ ID NO: 1056959 - RNA, 22 nt, Human
ggacagaggguugacagaguau

SEQ ID NO: 1056960 - RNA, 22 nt, Human
acccaggaggcagagguugcag

SEQ ID NO: 1056961 - RNA, 22 nt, Human
ggugaagggccuuaggagacag

SEQ ID NO: 1056962 - RNA, 22 nt, Human
gcuggagguuucaccugaguuu

SEQ ID NO: 1056963 - RNA, 22 nt, Human
aggcuccaaauuaccaagcucu

SEQ ID NO: 1056964 - RNA, 22 nt, Human
auugaggcagcauaguucaggg

SEQ ID NO: 1056965 - RNA, 22 nt, Human
cgccucagccguggucaucuuc

SEQ ID NO: 1056966 - RNA, 22 nt, Human
gcugcuggggccuucccucggg

SEQ ID NO: 1056967 - RNA, 22 nt, Human
auggccaagcuuacucuguugu

SEQ ID NO: 1056968 - RNA, 22 nt, Human
acaugcauacacguacauaccu

SEQ ID NO: 1056969 - RNA, 22 nt, Human
uagcaagaaaacacaagaauua

SEQ ID NO: 1056970 - RNA, 22 nt, Human
gaggccaggagugcuguaaguu

SEQ ID NO: 1056971 - RNA, 18 nt, Human
cuggucucccuucgcuuu

SEQ ID NO: 1056972 - RNA, 22 nt, Human
acaaaugucuccucuuuuguua

SEQ ID NO: 1056973 - RNA, 22 nt, Human
aacaugcucuguuucuuggaug

SEQ ID NO: 1056974 - RNA, 22 nt, Human
ggcugaggguuaagaucagaca

SEQ ID NO: 1056975 - RNA, 22 nt, Human
cuccuggcccugagcucccagg

SEQ ID NO: 1056976 - RNA, 22 nt, Human
accuuguuaaaaugaggauucu

SEQ ID NO: 1056977 - RNA, 22 nt, Human
uuccaaagaaguucacauuuac

SEQ ID NO: 1056978 - RNA, 22 nt, Human
cugaggccgucugggucugcag

SEQ ID NO: 1056979 - RNA, 22 nt, Human
uuuaggaugcucuauucugacu

SEQ ID NO: 1056980 - RNA, 22 nt, Human
uccaggagcauccaggugaagc

SEQ ID NO: 1056981 - RNA, 22 nt, Human
uaacaguguggacuugagaucu

SEQ ID NO: 1056982 - RNA, 22 nt, Human
ccccuccuggccacacugucag

SEQ ID NO: 1056983 - RNA, 22 nt, Human
auggcagccugagcagaggaau

SEQ ID NO: 1056984 - RNA, 22 nt, Human
agucacuguuucagaacugagu

SEQ ID NO: 1056985 - RNA, 22 nt, Human
cuauuuaugugcuauuuuguau

SEQ ID NO: 1056986 - RNA, 22 nt, Human
cugaggcucagcgugaggaaag

SEQ ID NO: 1056987 - RNA, 22 nt, Human
uuagcaucugcuguaagcuuau

SEQ ID NO: 1056988 - RNA, 22 nt, Human
ccuggagauuucuucaagcuuu

SEQ ID NO: 1056989 - RNA, 22 nt, Human
cugagggccuuggcuccugccc

SEQ ID NO: 1056990 - RNA, 22 nt, Human
ucaauuauuugauaugaaaggg

SEQ ID NO: 1056991 - RNA, 22 nt, Human
uccaggagguagugcuuaauuu

SEQ ID NO: 1056992 - RNA, 22 nt, Human
augcugugucaccuuaggauuu

SEQ ID NO: 1056993 - RNA, 22 nt, Human
ccccaggacguggcccucauag

SEQ ID NO: 1056994 - RNA, 22 nt, Human
aagcugaggcuccccugaggga

SEQ ID NO: 1056995 - RNA, 22 nt, Human
uucaguaaaacacugcaauguc

SEQ ID NO: 1056996 - RNA, 22 nt, Human
agaucaaugugucagaagagau

SEQ ID NO: 1056997 - RNA, 22 nt, Human
uaacuggugaguugguugagug

SEQ ID NO: 1056998 - RNA, 20 nt, Human
ucaggcuggugggcuuuccc

SEQ ID NO: 1056999 - RNA, 22 nt, Human
uuauuuggguuugaguguggca

SEQ ID NO: 1057000 - RNA, 22 nt, Human
uaggcugagcuaagagagcuua

SEQ ID NO: 1057001 - RNA, 22 nt, Human
uaauaggagccaggucacauag

SEQ ID NO: 1057002 - RNA, 22 nt, Human
auacaacuuuacaugcaauucc

SEQ ID NO: 1057003 - RNA, 22 nt, Human
uuuguuaaauauuuauugagug

SEQ ID NO: 1057004 - RNA, 22 nt, Human
cuuaggaugaguuuuugcguuu

SEQ ID NO: 1057005 - RNA, 22 nt, Human
aggucagcaugaguagaaggua

SEQ ID NO: 1057006 - RNA, 22 nt, Human
acauuuuuuagagucccacauu

SEQ ID NO: 1057007 - RNA, 22 nt, Human
cagugguugguagauacuugag

SEQ ID NO: 1057008 - RNA, 22 nt, Human
acuguggccaaagccucuggga

SEQ ID NO: 1057009 - RNA, 22 nt, Human
cacuuucucaugaauuuggccc

SEQ ID NO: 1057010 - RNA, 22 nt, Human
cacaggagagcugggaggugcc

SEQ ID NO: 1057011 - RNA, 22 nt, Human
aagcagaggguauggccagguu

SEQ ID NO: 1057012 - RNA, 22 nt, Human
ucuuuauuuuaugcuugugcaa

SEQ ID NO: 1057013 - RNA, 22 nt, Human
gucccaggugggcuccaccucu

SEQ ID NO: 1057014 - RNA, 22 nt, Human
ggcaugaguggcagugggcagu

SEQ ID NO: 1057015 - RNA, 22 nt, Human
acccaggagagagcuauaaaau

SEQ ID NO: 1057016 - RNA, 22 nt, Human
cugucccuucauuauucacuac

SEQ ID NO: 1057017 - RNA, 22 nt, Human
aggcuggcccuacuggcugccu

SEQ ID NO: 1057018 - RNA, 22 nt, Human
agagugcaaccgaaacaagcag

SEQ ID NO: 1057019 - RNA, 22 nt, Human
cagagcagucuggagauccagc

SEQ ID NO: 1057020 - RNA, 22 nt, Human
uucaccuugaauaugucuuaaa

SEQ ID NO: 1057021 - RNA, 22 nt, Human
aguuaacacaaguaagauucca

SEQ ID NO: 1057022 - RNA, 22 nt, Human
ggcagccuugacuagugacuua

SEQ ID NO: 1057023 - RNA, 21 nt, Human
uggaggaauaaagcacagaag

SEQ ID NO: 1057024 - RNA, 22 nt, Human
ggauggcagucugcaugagaaa

SEQ ID NO: 1057025 - RNA, 22 nt, Human
gcugagauuacgggcaugagcc

SEQ ID NO: 1057026 - RNA, 22 nt, Human
agaggacagacggaaagugcca

SEQ ID NO: 1057027 - RNA, 22 nt, Human
ucuggccagugaaaugcagaau

SEQ ID NO: 1057028 - RNA, 21 nt, Human
auucugaguugucagucuuca

SEQ ID NO: 1057029 - RNA, 22 nt, Human
agcuucccaagguuggaagguu

SEQ ID NO: 1057030 - RNA, 21 nt, Human
agcugcagucaagccagaggu

SEQ ID NO: 1057031 - RNA, 22 nt, Human
uccaggagacacccuugugugu

SEQ ID NO: 1057032 - RNA, 22 nt, Human
caggcagcucugcuuuuccuaa

SEQ ID NO: 1057033 - RNA, 22 nt, Human
uccuggccaggaugaccuaaca

SEQ ID NO: 1057034 - RNA, 22 nt, Human
cccaagagguggagguugcagu

SEQ ID NO: 1057035 - RNA, 22 nt, Human
aagagggcugcaaucuuauugc

SEQ ID NO: 1057036 - RNA, 22 nt, Human
agauaaauuccuaagauuucag

SEQ ID NO: 1057037 - RNA, 17 nt, Human
cagcucugcaucuuccu

SEQ ID NO: 1057038 - RNA, 22 nt, Human
gcugagcagguguaaggaaggc

SEQ ID NO: 1057039 - RNA, 23 nt, Human
gcagaggagcaagcuggacacca

SEQ ID NO: 1057040 - RNA, 22 nt, Human
aguaaucugauuuuauagcuau

SEQ ID NO: 1057041 - RNA, 22 nt, Human
aaggcaguagguguuucaaacu

SEQ ID NO: 1057042 - RNA, 22 nt, Human
uucuucaaugugcccuguuuuc

SEQ ID NO: 1057043 - RNA, 22 nt, Human
gugagagaucccccacucaucu

SEQ ID NO: 1057044 - RNA, 22 nt, Human
uccacaugaccauugugcuccu

SEQ ID NO: 1057045 - RNA, 22 nt, Human
gcugccugccuugccuggagga

SEQ ID NO: 1057046 - RNA, 22 nt, Human
agcagcugagccccagcuguga

SEQ ID NO: 1057047 - RNA, 22 nt, Human
uaucuguuugcucacagguguu

SEQ ID NO: 1057048 - RNA, 22 nt, Human
ggcagcuaguuuaagaaagagg

SEQ ID NO: 1057049 - RNA, 22 nt, Human
acuccagguuuuuucacugaag

SEQ ID NO: 1057050 - RNA, 22 nt, Human
gcuggugcauuagcugcaguuc

SEQ ID NO: 1057051 - RNA, 22 nt, Human
uggcuucuuuguagaaauugaa

SEQ ID NO: 1057052 - RNA, 22 nt, Human
cucagagaggcaguggaaguca

SEQ ID NO: 1057053 - RNA, 22 nt, Human
accaggaggccuggagcacaaa

SEQ ID NO: 1057054 - RNA, 22 nt, Human
gcuccuggcaggcagugugugu

SEQ ID NO: 1057055 - RNA, 23 nt, Human
uccaggagcaugcuggcuggcga

SEQ ID NO: 1057056 - RNA, 22 nt, Human
ccuccuggugggcgcuucuggc

SEQ ID NO: 1057057 - RNA, 22 nt, Human
aggcagcccugugcuggaugcu

SEQ ID NO: 1057058 - RNA, 22 nt, Human
uggcacauagaaaaggaucaau

SEQ ID NO: 1057059 - RNA, 22 nt, Human
cagacagggaccucgcuccaga

SEQ ID NO: 1057060 - RNA, 22 nt, Human
ugccuggcccugacagcccugg

SEQ ID NO: 1057061 - RNA, 20 nt, Human
auggccaaccugcuuaugac

SEQ ID NO: 1057062 - RNA, 22 nt, Human
cucugccauuuaucagaacugu

SEQ ID NO: 1057063 - RNA, 22 nt, Human
uggcugagugaacauguccauu

SEQ ID NO: 1057064 - RNA, 22 nt, Human
cuucugugauuugguuaggaua

SEQ ID NO: 1057065 - RNA, 22 nt, Human
gcagcugaaagggaucucuaca

SEQ ID NO: 1057066 - RNA, 22 nt, Human
uaaucacagaaacagacuguuu

SEQ ID NO: 1057067 - RNA, 22 nt, Human
guauaucuucagaaauuauagg

SEQ ID NO: 1057068 - RNA, 22 nt, Human
agacccugcauuuuccaggguu

SEQ ID NO: 1057069 - RNA, 22 nt, Human
auacagauguugaauguuauau

SEQ ID NO: 1057070 - RNA, 22 nt, Human
ucuucuccagugcuucugcaca

SEQ ID NO: 1057071 - RNA, 22 nt, Human
aaggcaguuaauuuggcuagaa

SEQ ID NO: 1057072 - RNA, 22 nt, Human
gcgcaggagccgcggagggccg

SEQ ID NO: 1057073 - RNA, 22 nt, Human
cacaggcugggaagccuaggcc

SEQ ID NO: 1057074 - RNA, 22 nt, Human
cagggcugaagaaauucaaaag

SEQ ID NO: 1057075 - RNA, 22 nt, Human
cuggccaauccauuaauuuguu

SEQ ID NO: 1057076 - RNA, 22 nt, Human
gaggucaggggagaggcugaug

SEQ ID NO: 1057077 - RNA, 21 nt, Human
uacaguaaguugggugguccu

SEQ ID NO: 1057078 - RNA, 22 nt, Human
cauuuguaguaucuguuuauau

SEQ ID NO: 1057079 - RNA, 22 nt, Human
aggcagaucacuugaggccagg

SEQ ID NO: 1057080 - RNA, 23 nt, Human
augaggucagccauaagacggaa

SEQ ID NO: 1057081 - RNA, 22 nt, Human
gacuuucugagucaaagaaagg

SEQ ID NO: 1057082 - RNA, 22 nt, Human
gagaggugaaggcugcccuggg

SEQ ID NO: 1057083 - RNA, 22 nt, Human
uguuuuaaagccauugccuuuc

SEQ ID NO: 1057084 - RNA, 22 nt, Human
ucucuguaguugggcagcugcu

SEQ ID NO: 1057085 - RNA, 22 nt, Human
caggaaaugggguuuaguuauu

SEQ ID NO: 1057086 - RNA, 22 nt, Human
uuaaaugagauguucagauauu

SEQ ID NO: 1057087 - RNA, 22 nt, Human
ccucaggauacaggagccacag

SEQ ID NO: 1057088 - RNA, 22 nt, Human
uuucaugaggggcaaaaucuca

SEQ ID NO: 1057089 - RNA, 22 nt, Human
augaaggcuguguagauggaug

SEQ ID NO: 1057090 - RNA, 22 nt, Human
ugcccaggguuucuaagagcag

SEQ ID NO: 1057091 - RNA, 18 nt, Human
acucaggaaaugaugaca

SEQ ID NO: 1057092 - RNA, 23 nt, Human
gcuggcuggcaguaaagguuguu

SEQ ID NO: 1057093 - RNA, 22 nt, Human
gaccuggaggauccucuucuug

SEQ ID NO: 1057094 - RNA, 22 nt, Human
cagugauggauauggagaaguc

SEQ ID NO: 1057095 - RNA, 22 nt, Human
cuucucagcauuuugucagucu

SEQ ID NO: 1057096 - RNA, 22 nt, Human
uccaggaguggggcagaggucu

SEQ ID NO: 1057097 - RNA, 22 nt, Human
cugagcucuaaugucagccuug

SEQ ID NO: 1057098 - RNA, 22 nt, Human
gcuccuggcucuggccaaggga

SEQ ID NO: 1057099 - RNA, 22 nt, Human
gcugcuguugauuuaguccaau

SEQ ID NO: 1057100 - RNA, 19 nt, Human
gcugcucugggucucaucu

SEQ ID NO: 1057101 - RNA, 22 nt, Human
auauguuacucuuucaagcaga

SEQ ID NO: 1057102 - RNA, 22 nt, Human
auauucuauaagcaguuggaag

SEQ ID NO: 1057103 - RNA, 22 nt, Human
uucaggaucaaguugccaguag

SEQ ID NO: 1057104 - RNA, 22 nt, Human
augcagcugucagggagaacau

SEQ ID NO: 1057105 - RNA, 22 nt, Human
cugaggccucucuccugggcuu

SEQ ID NO: 1057106 - RNA, 22 nt, Human
ccuuuucaacuaagauucugca

SEQ ID NO: 1057107 - RNA, 22 nt, Human
augaaggcuguguggagccccc

SEQ ID NO: 1057108 - RNA, 22 nt, Human
cagugcugcaggcgccugcggu

SEQ ID NO: 1057109 - RNA, 22 nt, Human
caggcagcugcgacaagagagc

SEQ ID NO: 1057110 - RNA, 22 nt, Human
ggagaaaggauaggaaugugcu

SEQ ID NO: 1057111 - RNA, 22 nt, Human
aaugaaauguagcuuauccaua

SEQ ID NO: 1057112 - RNA, 22 nt, Human
uugcucagcacuggagccagcu

SEQ ID NO: 1057113 - RNA, 22 nt, Human
aagugggaauagaaaugaaggu

SEQ ID NO: 1057114 - RNA, 20 nt, Human
aaacauucauguacaaguga

SEQ ID NO: 1057115 - RNA, 22 nt, Human
gugacaguggucacuuguaguu

SEQ ID NO: 1057116 - RNA, 22 nt, Human
ugaggggagcuagcaugccuug

SEQ ID NO: 1057117 - RNA, 22 nt, Human
acaauauuguacccagaaguuu

SEQ ID NO: 1057118 - RNA, 22 nt, Human
cccaggaguuggaggcuacggu

SEQ ID NO: 1057119 - RNA, 18 nt, Human
gagucuuuguuacugcug

SEQ ID NO: 1057120 - RNA, 22 nt, Human
uggccaggcagguagaacggcc

SEQ ID NO: 1057121 - RNA, 22 nt, Human
cauaauauacuacauugaugaa

SEQ ID NO: 1057122 - RNA, 22 nt, Human
ugaaaaaacaaguuggcccauu

SEQ ID NO: 1057123 - RNA, 22 nt, Human
agggcagcucucaccucuggcc

SEQ ID NO: 1057124 - RNA, 21 nt, Human
auucuagacaacacugaaauc

SEQ ID NO: 1057125 - RNA, 22 nt, Human
ggagguggcagggaacauaauu

SEQ ID NO: 1057126 - RNA, 22 nt, Human
ccuugcauauauuauaucuuug

SEQ ID NO: 1057127 - RNA, 22 nt, Human
uugacacaguuuucucauuaag

SEQ ID NO: 1057128 - RNA, 22 nt, Human
gcuuuggagccuguguucugcc

SEQ ID NO: 1057129 - RNA, 22 nt, Human
gaucuucuagcagaaguaauuu

SEQ ID NO: 1057130 - RNA, 22 nt, Human
aaauaguucagcuuguaaaccc

SEQ ID NO: 1057131 - RNA, 22 nt, Human
ccuggagcaggagcugcagagg

SEQ ID NO: 1057132 - RNA, 22 nt, Human
ucugcucagguuaccuagcuag

SEQ ID NO: 1057133 - RNA, 22 nt, Human
ggaggaggggcgcuuugucuau

SEQ ID NO: 1057134 - RNA, 22 nt, Human
aggcugagucaaguuaggguga

SEQ ID NO: 1057135 - RNA, 22 nt, Human
gaggguggguuucuugcacguc

SEQ ID NO: 1057136 - RNA, 22 nt, Human
aaagauaauguuuccuuauucu

SEQ ID NO: 1057137 - RNA, 20 nt, Human
ugcugucguguuuucugcuu

SEQ ID NO: 1057138 - RNA, 21 nt, Human
auguaggguuugccuucucua

SEQ ID NO: 1057139 - RNA, 22 nt, Human
acacagcuuucagucauuaucu

SEQ ID NO: 1057140 - RNA, 22 nt, Human
cugaacuuauugagugcuugcu

SEQ ID NO: 1057141 - RNA, 22 nt, Human
uuagagucaagcugcauguucu

SEQ ID NO: 1057142 - RNA, 22 nt, Human
ggccagcugggccaccaggugc

SEQ ID NO: 1057143 - RNA, 22 nt, Human
gccagagguucaacaacugucu

SEQ ID NO: 1057144 - RNA, 22 nt, Human
agcugcccugggcuggagaugg

SEQ ID NO: 1057145 - RNA, 22 nt, Human
acaggcugcugggcuccgugcu

SEQ ID NO: 1057146 - RNA, 22 nt, Human
caggcuugagggcaggcccagu

SEQ ID NO: 1057147 - RNA, 23 nt, Human
aaaugacauaugguuucugaagg

SEQ ID NO: 1057148 - RNA, 21 nt, Human
uaaaacuguaacuuuguccug

SEQ ID NO: 1057149 - RNA, 22 nt, Human
aggccagacagcuagaaacagg

SEQ ID NO: 1057150 - RNA, 22 nt, Human
gcaccuggcugcccagguggag

SEQ ID NO: 1057151 - RNA, 22 nt, Human
gaauuccuuaggcucuugacug

SEQ ID NO: 1057152 - RNA, 22 nt, Human
auggccaaauaacagcuugcau

SEQ ID NO: 1057153 - RNA, 22 nt, Human
uugaggucuugaguacugggga

SEQ ID NO: 1057154 - RNA, 22 nt, Human
cccaggcagugugugcaugcgu

SEQ ID NO: 1057155 - RNA, 22 nt, Human
uuucauuauucaugcuaguuau

SEQ ID NO: 1057156 - RNA, 22 nt, Human
uagcaaaagccacgauuacuuu

SEQ ID NO: 1057157 - RNA, 22 nt, Human
aaaggccacacagagcagggag

SEQ ID NO: 1057158 - RNA, 22 nt, Human
ucccaggaucugagggcagaga

SEQ ID NO: 1057159 - RNA, 22 nt, Human
auucggaucauguguauguguu

SEQ ID NO: 1057160 - RNA, 22 nt, Human
cuguuuauggagguaaggcauc

SEQ ID NO: 1057161 - RNA, 22 nt, Human
cguggccagccauuuccuggaa

SEQ ID NO: 1057162 - RNA, 22 nt, Human
acaccuuucagguccagacagu

SEQ ID NO: 1057163 - RNA, 22 nt, Human
uuaaaauagccagugccccucu

SEQ ID NO: 1057164 - RNA, 22 nt, Human
gaaaggugccccauaggcagga

SEQ ID NO: 1057165 - RNA, 23 nt, Human
aguaacaugcaaauaacagucug

SEQ ID NO: 1057166 - RNA, 22 nt, Human
cuguucucuggcgguggcuguu

SEQ ID NO: 1057167 - RNA, 20 nt, Human
ggcagcuugggcagcaguua

SEQ ID NO: 1057168 - RNA, 22 nt, Human
caggaggaagaacucugcaaca

SEQ ID NO: 1057169 - RNA, 22 nt, Human
ccugaggucacaacuugcuuau

SEQ ID NO: 1057170 - RNA, 22 nt, Human
uggcaaggcugugggggcagag

SEQ ID NO: 1057171 - RNA, 22 nt, Human
cugcccaaauccuucuuccucu

SEQ ID NO: 1057172 - RNA, 22 nt, Human
ugaaaugaaugugauucgauag

SEQ ID NO: 1057173 - RNA, 22 nt, Human
uugcauuuaaguagauguuaca

SEQ ID NO: 1057174 - RNA, 22 nt, Human
uaaaauagcaugugcagugaaa

SEQ ID NO: 1057175 - RNA, 22 nt, Human
aaacuccugggcucaagcaguu

SEQ ID NO: 1057176 - RNA, 22 nt, Human
aagaacuguuuacaauuuucac

SEQ ID NO: 1057177 - RNA, 20 nt, Human
ucuccuggucugguccgugc

SEQ ID NO: 1057178 - RNA, 22 nt, Human
ugaaagguuaaaaguaguauug

SEQ ID NO: 1057179 - RNA, 22 nt, Human
uugagaagaauguguugaguuu

SEQ ID NO: 1057180 - RNA, 22 nt, Human
aaggccagaguacuagaggcug

SEQ ID NO: 1057181 - RNA, 22 nt, Human
acccaggacuuggcaaccucau

SEQ ID NO: 1057182 - RNA, 22 nt, Human
ucucaguguguuuucucucaga

SEQ ID NO: 1057183 - RNA, 22 nt, Human
aaguuaacccaguauuucuuuu

SEQ ID NO: 1057184 - RNA, 22 nt, Human
cucaucugauaaaucacucuua

SEQ ID NO: 1057185 - RNA, 22 nt, Human
aaauuauaggugccaccuugga

SEQ ID NO: 1057186 - RNA, 20 nt, Human
aggaggggauagaaucaaag

SEQ ID NO: 1057187 - RNA, 22 nt, Human
uuucauugcagagucugugugc

SEQ ID NO: 1057188 - RNA, 22 nt, Human
cccaggaaugggaaggaggaau

SEQ ID NO: 1057189 - RNA, 22 nt, Human
cggagccugcuuguugcagcug

SEQ ID NO: 1057190 - RNA, 22 nt, Human
caugugcuguagcagagaggaa

SEQ ID NO: 1057191 - RNA, 22 nt, Human
gcccacuggcuggagugcuggu

SEQ ID NO: 1057192 - RNA, 22 nt, Human
cccuggugguacggcacuggca

SEQ ID NO: 1057193 - RNA, 22 nt, Human
auccaugaucaauuuauuacua

SEQ ID NO: 1057194 - RNA, 22 nt, Human
agaggcaggaagagcugauuuu

SEQ ID NO: 1057195 - RNA, 22 nt, Human
aguugcagacgcagagauguug

SEQ ID NO: 1057196 - RNA, 21 nt, Human
cagagcuguccaaacccugac

SEQ ID NO: 1057197 - RNA, 22 nt, Human
uugaggucugagacugugcagg

SEQ ID NO: 1057198 - RNA, 22 nt, Human
ucuccuggauagauacuaucca

SEQ ID NO: 1057199 - RNA, 22 nt, Human
gcccaggaguugaagggcugac

SEQ ID NO: 1057200 - RNA, 22 nt, Human
uuggccaaggaccuuuuuggag

SEQ ID NO: 1057201 - RNA, 22 nt, Human
ugguggcaucaauugacuucuc

SEQ ID NO: 1057202 - RNA, 17 nt, Human
gcuguaguuugauaaga

SEQ ID NO: 1057203 - RNA, 22 nt, Human
ugucccucugaggcuucccugg

SEQ ID NO: 1057204 - RNA, 21 nt, Human
gauguuggaggcuggggucug

SEQ ID NO: 1057205 - RNA, 22 nt, Human
aucaggaucacugggagucuug

SEQ ID NO: 1057206 - RNA, 18 nt, Human
ucuccuggguaggggccu

SEQ ID NO: 1057207 - RNA, 22 nt, Human
uuccuggccccaccccuggaga

SEQ ID NO: 1057208 - RNA, 22 nt, Human
aauaucaguauauuguaucagu

SEQ ID NO: 1057209 - RNA, 22 nt, Human
cucaggauuuacuaauuucaag

SEQ ID NO: 1057210 - RNA, 22 nt, Human
gacccuggagccgucugaggca

SEQ ID NO: 1057211 - RNA, 19 nt, Human
agcuccugauugugccucg

SEQ ID NO: 1057212 - RNA, 22 nt, Human
aaaauacuacugucuucuuccc

SEQ ID NO: 1057213 - RNA, 22 nt, Human
ggcugaguucucuugcugaauc

SEQ ID NO: 1057214 - RNA, 22 nt, Human
gaggcagcugggauacaaggga

SEQ ID NO: 1057215 - RNA, 22 nt, Human
uucagcaaauggacuguucagg

SEQ ID NO: 1057216 - RNA, 22 nt, Human
uuucuucagagagagcuuuccc

SEQ ID NO: 1057217 - RNA, 22 nt, Human
cugcugugaguuuggaggucua

SEQ ID NO: 1057218 - RNA, 22 nt, Human
acagaagugucuuuuucauuca

SEQ ID NO: 1057219 - RNA, 22 nt, Human
uucauucugcaguucucagcuc

SEQ ID NO: 1057220 - RNA, 22 nt, Human
caggcagccugcggucugcaca

SEQ ID NO: 1057221 - RNA, 22 nt, Human
ucacaguaucacacaaggauua

SEQ ID NO: 1057222 - RNA, 22 nt, Human
augcugagugagugaaacccag

SEQ ID NO: 1057223 - RNA, 22 nt, Human
ggcugcuggggacgugggagag

SEQ ID NO: 1057224 - RNA, 22 nt, Human
ugauuuccuaggucuggagaag

SEQ ID NO: 1057225 - RNA, 22 nt, Human
ggauuugggcuugcagcagagc

SEQ ID NO: 1057226 - RNA, 22 nt, Human
uggcugagagucauccugugug

SEQ ID NO: 1057227 - RNA, 22 nt, Human
ggcaggcucagcagccaaggag

SEQ ID NO: 1057228 - RNA, 22 nt, Human
ucaggauguccaaaauccagcc

SEQ ID NO: 1057229 - RNA, 22 nt, Human
gagggaggugauacugaacgua

SEQ ID NO: 1057230 - RNA, 22 nt, Human
aggcagcuuaagcccuggccca

SEQ ID NO: 1057231 - RNA, 22 nt, Human
guuugcauuuauuagucuucug

SEQ ID NO: 1057232 - RNA, 22 nt, Human
guaacucuuuggaaaacauuuu

SEQ ID NO: 1057233 - RNA, 22 nt, Human
uuuccucacuucaugagaguuu

SEQ ID NO: 1057234 - RNA, 22 nt, Human
gaguccaguuagugaggcuggg

SEQ ID NO: 1057235 - RNA, 22 nt, Human
uguuacagugacuaauguuuua

SEQ ID NO: 1057236 - RNA, 22 nt, Human
ugcaccuuguugcuuuuacgaa

SEQ ID NO: 1057237 - RNA, 22 nt, Human
cuuucauucuuagauauuagug

SEQ ID NO: 1057238 - RNA, 22 nt, Human
uggcagcugccauguccacgug

SEQ ID NO: 1057239 - RNA, 22 nt, Human
ugcugaaaacucaaccauugug

SEQ ID NO: 1057240 - RNA, 22 nt, Human
ccugagccucuugcacgcucag

SEQ ID NO: 1057241 - RNA, 22 nt, Human
auguuauaguuauaaaaugagg

SEQ ID NO: 1057242 - RNA, 22 nt, Human
agugcuggagggaggcagguuc

SEQ ID NO: 1057243 - RNA, 22 nt, Human
ggccacaagugguccugagucc

SEQ ID NO: 1057244 - RNA, 20 nt, Human
ugugcaggagagugaggcug

SEQ ID NO: 1057245 - RNA, 22 nt, Human
uagggaugacgaaaggacagag

SEQ ID NO: 1057246 - RNA, 21 nt, Human
uucugggaaaugagcuggggc

SEQ ID NO: 1057247 - RNA, 22 nt, Human
gcugagugagguccagagcuug

SEQ ID NO: 1057248 - RNA, 22 nt, Human
uaguccagguuaaucccugccu

SEQ ID NO: 1057249 - RNA, 22 nt, Human
ucugggaacagccuggcugugu

SEQ ID NO: 1057250 - RNA, 22 nt, Human
uuucaguucaguuuauuauauc

SEQ ID NO: 1057251 - RNA, 22 nt, Human
aaggaguuuggguagucauaca

SEQ ID NO: 1057252 - RNA, 22 nt, Human
aacuaguuuuagcucuagcaac

SEQ ID NO: 1057253 - RNA, 22 nt, Human
ugaggcccggguggaggaaugc

SEQ ID NO: 1057254 - RNA, 22 nt, Human
auacacuuccaaauauugauua

SEQ ID NO: 1057255 - RNA, 22 nt, Human
cugcugugcauauuuaucuagg

SEQ ID NO: 1057256 - RNA, 22 nt, Human
uccauuuucuaaguaucacuua

SEQ ID NO: 1057257 - RNA, 22 nt, Human
uggcagcuagcuguuuucaugc

SEQ ID NO: 1057258 - RNA, 23 nt, Human
uuauugaggguguagauuggugu

SEQ ID NO: 1057259 - RNA, 22 nt, Human
gggcaguugauggaggucugga

SEQ ID NO: 1057260 - RNA, 22 nt, Human
gaucauuuacuuguucuggacu

SEQ ID NO: 1057261 - RNA, 22 nt, Human
gagaggagguggcuaugacagc

SEQ ID NO: 1057262 - RNA, 22 nt, Human
uccaggagaaaacugacggugg

SEQ ID NO: 1057263 - RNA, 22 nt, Human
ucugagaggcaucugcacuucu

SEQ ID NO: 1057264 - RNA, 22 nt, Human
agcccaggagguggagguugca

SEQ ID NO: 1057265 - RNA, 22 nt, Human
ugcugaugaguccuucuaucgc

SEQ ID NO: 1057266 - RNA, 22 nt, Human
uucuucuucuggcugcaccugg

SEQ ID NO: 1057267 - RNA, 22 nt, Human
gucacuguuuccuauuauauuu

SEQ ID NO: 1057268 - RNA, 22 nt, Human
guucuucaaagugacaacuaaa

SEQ ID NO: 1057269 - RNA, 22 nt, Human
gugcugugcgcuuuuucuguau

SEQ ID NO: 1057270 - RNA, 22 nt, Human
ugcaccuuguccauuuuuggcc

SEQ ID NO: 1057271 - RNA, 22 nt, Human
gcaccuuuggaaugaaaaguug

SEQ ID NO: 1057272 - RNA, 22 nt, Human
agucucugucguagaucagcgu

SEQ ID NO: 1057273 - RNA, 22 nt, Human
uucucugagauagacuaagugg

SEQ ID NO: 1057274 - RNA, 22 nt, Human
gugguaauagagcuccaaacua

SEQ ID NO: 1057275 - RNA, 22 nt, Human
gcuuugaagacuuuuccagggu

SEQ ID NO: 1057276 - RNA, 21 nt, Human
uacagaaugcgcuucagucug

SEQ ID NO: 1057277 - RNA, 22 nt, Human
ucuuuauuuaagucuguuguaa

SEQ ID NO: 1057278 - RNA, 22 nt, Human
ggcagcacugcagcuuguuggg

SEQ ID NO: 1057279 - RNA, 22 nt, Human
gaaguuacucucguuaaauaug

SEQ ID NO: 1057280 - RNA, 22 nt, Human
cccugagccacacagagcaggu

SEQ ID NO: 1057281 - RNA, 22 nt, Human
ucugagccaauuucugugucca

SEQ ID NO: 1057282 - RNA, 22 nt, Human
auucuucagaauaucuggcacu

SEQ ID NO: 1057283 - RNA, 22 nt, Human
ggcugcagguugguuggcagcu

SEQ ID NO: 1057284 - RNA, 22 nt, Human
gccuuuauuguuuauucagugc

SEQ ID NO: 1057285 - RNA, 22 nt, Human
ucuuuuauccuacauuuagcuc

SEQ ID NO: 1057286 - RNA, 22 nt, Human
uuauggcauauuccucauugua

SEQ ID NO: 1057287 - RNA, 22 nt, Human
aacugcuuguaaauaauguuga

SEQ ID NO: 1057288 - RNA, 22 nt, Human
ccaggcugaauauguuccaggg

SEQ ID NO: 1057289 - RNA, 22 nt, Human
uuugcaaagugacuauuauaug

SEQ ID NO: 1057290 - RNA, 21 nt, Human
uggcuucugccaauguuaaga

SEQ ID NO: 1057291 - RNA, 22 nt, Human
cugcugugccuuaaaaugcaag

SEQ ID NO: 1057292 - RNA, 22 nt, Human
aagggcugcuguagaagcagag

SEQ ID NO: 1057293 - RNA, 20 nt, Human
acuaacauuugcaaggggcu

SEQ ID NO: 1057294 - RNA, 17 nt, Human
uuuaaacuacuacaagg

SEQ ID NO: 1057295 - RNA, 22 nt, Human
aagcaagacagaaguuacugcc

SEQ ID NO: 1057296 - RNA, 22 nt, Human
aagcaccugcaguugacaaaaa

SEQ ID NO: 1057297 - RNA, 22 nt, Human
ucuggccacccgaggccccugc

SEQ ID NO: 1057298 - RNA, 22 nt, Human
aggccaaagugcuccuuuuaga

SEQ ID NO: 1057299 - RNA, 22 nt, Human
uuaggaaaauggaguccuuuua

SEQ ID NO: 1057300 - RNA, 22 nt, Human
gaggcugcuguuagcccugggc

SEQ ID NO: 1057301 - RNA, 22 nt, Human
ucaggagacuuaugucacagug

SEQ ID NO: 1057302 - RNA, 21 nt, Human
aaaaaugaaguuguucaggaa

SEQ ID NO: 1057303 - RNA, 22 nt, Human
cagcaagaggguaagguugaag

SEQ ID NO: 1057304 - RNA, 22 nt, Human
agggcagccucucagccuaggu

SEQ ID NO: 1057305 - RNA, 22 nt, Human
cagaggcaggauaagaacugcg

SEQ ID NO: 1057306 - RNA, 22 nt, Human
uggcuuuaggagcuauauaccu

SEQ ID NO: 1057307 - RNA, 22 nt, Human
ccugccucaggacucugcauau

SEQ ID NO: 1057308 - RNA, 22 nt, Human
gccaugcuugguaugcugugag

SEQ ID NO: 1057309 - RNA, 22 nt, Human
agucuugcauuuucugaagaug

SEQ ID NO: 1057310 - RNA, 22 nt, Human
gucacaaaggugagggacauga

SEQ ID NO: 1057311 - RNA, 22 nt, Human
uagaagcacagguuaaaggcau

SEQ ID NO: 1057312 - RNA, 22 nt, Human
auuucucuuagcaagacauuac

SEQ ID NO: 1057313 - RNA, 22 nt, Human
uaagaugaucaccaaaugcugg

SEQ ID NO: 1057314 - RNA, 22 nt, Human
cccuguacagucucuguggcac

SEQ ID NO: 1057315 - RNA, 22 nt, Human
ugaggcagcauucuucaagaca

SEQ ID NO: 1057316 - RNA, 22 nt, Human
ugaaggccuaacuuccagugcu

SEQ ID NO: 1057317 - RNA, 23 nt, Human
cugagggcuggucugaagucugc

SEQ ID NO: 1057318 - RNA, 22 nt, Human
acagagcugggaucugaaccca

SEQ ID NO: 1057319 - RNA, 22 nt, Human
cagagcuguuacuauucaugaa

SEQ ID NO: 1057320 - RNA, 22 nt, Human
uacuuucuuucugauccuuaug

SEQ ID NO: 1057321 - RNA, 22 nt, Human
uaagaugacuacuuaccacuga

SEQ ID NO: 1057322 - RNA, 22 nt, Human
ucuccuccuuuuuucaacauag

SEQ ID NO: 1057323 - RNA, 22 nt, Human
gcucagggucccuuggugcugg

SEQ ID NO: 1057324 - RNA, 22 nt, Human
uuuauaagaagcaaugucugag

SEQ ID NO: 1057325 - RNA, 22 nt, Human
gcugauggcuugcuggcugaca

SEQ ID NO: 1057326 - RNA, 22 nt, Human
ugcaggugucuccagggcaggu

SEQ ID NO: 1057327 - RNA, 23 nt, Human
auuucuaggggauuuucuggugc

SEQ ID NO: 1057328 - RNA, 22 nt, Human
gaggcugauucggggaacagca

SEQ ID NO: 1057329 - RNA, 22 nt, Human
gaacccaggcuuuugaggcugu

SEQ ID NO: 1057330 - RNA, 22 nt, Human
uuugaaaucuaaucaaggaaca

SEQ ID NO: 1057331 - RNA, 22 nt, Human
ucccagagcccaaguuggagag

SEQ ID NO: 1057332 - RNA, 22 nt, Human
uuucaaauagaaucuuuccaaa

SEQ ID NO: 1057333 - RNA, 22 nt, Human
gccagagccggcuucacaggau

SEQ ID NO: 1057334 - RNA, 22 nt, Human
gaauauuuuuaaagggacuaau

SEQ ID NO: 1057335 - RNA, 22 nt, Human
ccagacaggaacacacaucucc

SEQ ID NO: 1057336 - RNA, 22 nt, Human
ucacagaaggaccuuguuucau

SEQ ID NO: 1057337 - RNA, 22 nt, Human
ugaggcaguugagcuuccugag

SEQ ID NO: 1057338 - RNA, 22 nt, Human
uagcaagauccuucccuggcgu

SEQ ID NO: 1057339 - RNA, 22 nt, Human
cagggcugugcccaucuucccc

SEQ ID NO: 1057340 - RNA, 22 nt, Human
ugaaggccagggauuugcagcc

SEQ ID NO: 1057341 - RNA, 22 nt, Human
ucuuugaauccuuuacaucuga

SEQ ID NO: 1057342 - RNA, 22 nt, Human
ugcauguggaccccuggugccu

SEQ ID NO: 1057343 - RNA, 22 nt, Human
cuggcccaggaagacguguccc

SEQ ID NO: 1057344 - RNA, 22 nt, Human
ccuggccauuugaacuucagac

SEQ ID NO: 1057345 - RNA, 22 nt, Human
gcuggaaaucaaagaaguggau

SEQ ID NO: 1057346 - RNA, 22 nt, Human
ucuuugaaagcuguucuagagu

SEQ ID NO: 1057347 - RNA, 22 nt, Human
aacacugcugcuggguucugug

SEQ ID NO: 1057348 - RNA, 22 nt, Human
ugggagcccaagggagcugccg

SEQ ID NO: 1057349 - RNA, 22 nt, Human
cugagccaugagccugcgccca

SEQ ID NO: 1057350 - RNA, 22 nt, Human
cagaguucaaagccugcuggga

SEQ ID NO: 1057351 - RNA, 22 nt, Human
gagugucagcagggcagagcac

SEQ ID NO: 1057352 - RNA, 22 nt, Human
aaaaacugguaacuauucccca

SEQ ID NO: 1057353 - RNA, 22 nt, Human
uuauuaguguugauauuaggau

SEQ ID NO: 1057354 - RNA, 22 nt, Human
ccaucccugggccauguccccu

SEQ ID NO: 1057355 - RNA, 20 nt, Human
uccaugaguuagagacuaua

SEQ ID NO: 1057356 - RNA, 22 nt, Human
cuggccaagcacuggggucaaa

SEQ ID NO: 1057357 - RNA, 22 nt, Human
gcagugcagugggacagggcgc

SEQ ID NO: 1057358 - RNA, 22 nt, Human
uccauuuuagagaugaagaaac

SEQ ID NO: 1057359 - RNA, 22 nt, Human
uccccuccucuccugauauggg

SEQ ID NO: 1057360 - RNA, 22 nt, Human
guucuucaucuuaaccaucugu

SEQ ID NO: 1057361 - RNA, 22 nt, Human
aaggccaacuaggaugagcuag

SEQ ID NO: 1057362 - RNA, 22 nt, Human
agcacagagguggaaguguaua

SEQ ID NO: 1057363 - RNA, 22 nt, Human
cagcagagcugggcuuugaauu

SEQ ID NO: 1057364 - RNA, 19 nt, Human
uggcagcauugguaccuug

SEQ ID NO: 1057365 - RNA, 22 nt, Human
ccagggcaacgcugucucagag

SEQ ID NO: 1057366 - RNA, 22 nt, Human
cagcuccugggccaucuccuag

SEQ ID NO: 1057367 - RNA, 22 nt, Human
cacuguaauagcauuauaagug

SEQ ID NO: 1057368 - RNA, 22 nt, Human
agcugccaucugaagaacugca

SEQ ID NO: 1057369 - RNA, 22 nt, Human
gcugccucuccugaguugacag

SEQ ID NO: 1057370 - RNA, 22 nt, Human
augauguugauaaauuacuuua

SEQ ID NO: 1057371 - RNA, 22 nt, Human
uuacacuuguaaauggcaugua

SEQ ID NO: 1057372 - RNA, 22 nt, Human
ugaaaugagauagauaaucagg

SEQ ID NO: 1057373 - RNA, 20 nt, Human
gucaggauuaguaaacucug

SEQ ID NO: 1057374 - RNA, 22 nt, Human
uggaguucauccaugacagcuu

SEQ ID NO: 1057375 - RNA, 22 nt, Human
ggaggagguggguuaaguugua

SEQ ID NO: 1057376 - RNA, 22 nt, Human
gaggccuggagccgccuaggcg

SEQ ID NO: 1057377 - RNA, 22 nt, Human
ccugagccuggcucaugcacuc

SEQ ID NO: 1057378 - RNA, 22 nt, Human
acaggcugguuuguaaaagaug

SEQ ID NO: 1057379 - RNA, 22 nt, Human
cagccuuugggucagaagauuc

SEQ ID NO: 1057380 - RNA, 23 nt, Human
ucccaggaaucugcauuuuuaac

SEQ ID NO: 1057381 - RNA, 22 nt, Human
cagcaagaaucagacaaccuca

SEQ ID NO: 1057382 - RNA, 22 nt, Human
cccuggaggagcuuagagcuug

SEQ ID NO: 1057383 - RNA, 22 nt, Human
acagucuacuugagcuuguaua

SEQ ID NO: 1057384 - RNA, 22 nt, Human
acagaaauuagcagugaguuua

SEQ ID NO: 1057385 - RNA, 22 nt, Human
cuacacuuugguugacuuugug

SEQ ID NO: 1057386 - RNA, 22 nt, Human
gauuucuuuagguguaauagug

SEQ ID NO: 1057387 - RNA, 22 nt, Human
uuggccaauuccagaggaucau

SEQ ID NO: 1057388 - RNA, 22 nt, Human
aaacugccaaaagaccuuggau

SEQ ID NO: 1057389 - RNA, 22 nt, Human
cauucuuacacaauauuuuaau

SEQ ID NO: 1057390 - RNA, 22 nt, Human
cagggcuggguuaaaagcaggg

SEQ ID NO: 1057391 - RNA, 22 nt, Human
aggccagaaauuuggaguaugu

SEQ ID NO: 1057392 - RNA, 22 nt, Human
ucaggauggcuucugcaucaaa

SEQ ID NO: 1057393 - RNA, 22 nt, Human
uuuuauuaguggcuagaugggg

SEQ ID NO: 1057394 - RNA, 22 nt, Human
cugcugccaagggugccacagg

SEQ ID NO: 1057395 - RNA, 19 nt, Human
acugccugaggcucacagg

SEQ ID NO: 1057396 - RNA, 22 nt, Human
uugaaagugccaaguccuagug

SEQ ID NO: 1057397 - RNA, 22 nt, Human
uaacaauaguguuugcuaguca

SEQ ID NO: 1057398 - RNA, 22 nt, Human
aaacaugaauagauauuaaaca

SEQ ID NO: 1057399 - RNA, 22 nt, Human
gcuccuucaggugguagcuguu

SEQ ID NO: 1057400 - RNA, 22 nt, Human
ggcacacauagaucugcacugg

SEQ ID NO: 1057401 - RNA, 22 nt, Human
gcagcuaccacccaggaaggac

SEQ ID NO: 1057402 - RNA, 22 nt, Human
aucaggaugcugucaguuacca

SEQ ID NO: 1057403 - RNA, 22 nt, Human
cucuucuugcuagacugagugc

SEQ ID NO: 1057404 - RNA, 22 nt, Human
agcacugugagcaccagcacgc

SEQ ID NO: 1057405 - RNA, 22 nt, Human
gacccaggcccaaggcugccag

SEQ ID NO: 1057406 - RNA, 22 nt, Human
aaucuguucuacucuauucaga

SEQ ID NO: 1057407 - RNA, 22 nt, Human
aaugcuuuuugcgaaaugugca

SEQ ID NO: 1057408 - RNA, 22 nt, Human
agagcagcuggggcagagacca

SEQ ID NO: 1057409 - RNA, 22 nt, Human
aggggagguggcagaaaugugc

SEQ ID NO: 1057410 - RNA, 22 nt, Human
gacagaggcuggagcaccuccu

SEQ ID NO: 1057411 - RNA, 22 nt, Human
uagcaagaggaaacaaggggcc

SEQ ID NO: 1057412 - RNA, 22 nt, Human
accuguuuuccuaucuagauug

SEQ ID NO: 1057413 - RNA, 22 nt, Human
cagcuacuccucccaugacuuc

SEQ ID NO: 1057414 - RNA, 22 nt, Human
agggacuuguguccuauguaug

SEQ ID NO: 1057415 - RNA, 22 nt, Human
gggcagcucuuugguauccuuc

SEQ ID NO: 1057416 - RNA, 22 nt, Human
guggccaagggacucuaaggca

SEQ ID NO: 1057417 - RNA, 22 nt, Human
aggauuuugacuuauucaggga

SEQ ID NO: 1057418 - RNA, 19 nt, Human
uuugaaaggauuguuauuu

SEQ ID NO: 1057419 - RNA, 22 nt, Human
uguccaggcuaaagugcagugg

SEQ ID NO: 1057420 - RNA, 22 nt, Human
agucuuuccugcuugacuguuc

SEQ ID NO: 1057421 - RNA, 22 nt, Human
ugacuuuaagcuaucugauucu

SEQ ID NO: 1057422 - RNA, 22 nt, Human
gucugucuguuguugagaagca

SEQ ID NO: 1057423 - RNA, 22 nt, Human
uccaccagccaggcccaggcug

SEQ ID NO: 1057424 - RNA, 22 nt, Human
uugagguccagucuccacccac

SEQ ID NO: 1057425 - RNA, 22 nt, Human
ugcaggcucucugcugccagau

SEQ ID NO: 1057426 - RNA, 22 nt, Human
cuguuuauagcagagcaagccu

SEQ ID NO: 1057427 - RNA, 22 nt, Human
uagggcaggggaggaaucugaa

SEQ ID NO: 1057428 - RNA, 22 nt, Human
uuugaagucagacacugcuuug

SEQ ID NO: 1057429 - RNA, 22 nt, Human
aauauuuguuaguguuuuaaug

SEQ ID NO: 1057430 - RNA, 22 nt, Human
gcccaggaguuugcauuuuaac

SEQ ID NO: 1057431 - RNA, 22 nt, Human
ugucagguugguuuucagagaa

SEQ ID NO: 1057432 - RNA, 22 nt, Human
gaaggggacuggcagcugcaga

SEQ ID NO: 1057433 - RNA, 22 nt, Human
cugacaaaggcaaggcaggggg

SEQ ID NO: 1057434 - RNA, 22 nt, Human
uuuuccagauuggacuuagucc

SEQ ID NO: 1057435 - RNA, 22 nt, Human
acaauguguuuuuauacauuug

SEQ ID NO: 1057436 - RNA, 22 nt, Human
gucuagagugcuuccuagucau

SEQ ID NO: 1057437 - RNA, 22 nt, Human
aggcugcugccuuggagagugu

SEQ ID NO: 1057438 - RNA, 22 nt, Human
gcugacagagugccuggccuca

SEQ ID NO: 1057439 - RNA, 22 nt, Human
agcugcuucaaaaugggcuccu

SEQ ID NO: 1057440 - RNA, 22 nt, Human
accuuuuuguucuguucucagc

SEQ ID NO: 1057441 - RNA, 22 nt, Human
uguucuuuggcuucacagcucu

SEQ ID NO: 1057442 - RNA, 22 nt, Human
agauggcuuugcuuuuagaagc

SEQ ID NO: 1057443 - RNA, 22 nt, Human
cuucugaagagguuaucauaga

SEQ ID NO: 1057444 - RNA, 22 nt, Human
aggcagugcaugcaaaggucgg

SEQ ID NO: 1057445 - RNA, 22 nt, Human
ccugguggaaggugagugaggc

SEQ ID NO: 1057446 - RNA, 22 nt, Human
uucaacuaauguuuauuuuaug

SEQ ID NO: 1057447 - RNA, 23 nt, Human
aggcagcuggguagcaucuuucu

SEQ ID NO: 1057448 - RNA, 22 nt, Human
aggcggcugguguccugcaggu

SEQ ID NO: 1057449 - RNA, 22 nt, Human
cugcugugugcuuacuuggguu

SEQ ID NO: 1057450 - RNA, 22 nt, Human
cucaagacugaucgcaguggaa

SEQ ID NO: 1057451 - RNA, 22 nt, Human
auuucacucauucauguuacuu

SEQ ID NO: 1057452 - RNA, 22 nt, Human
cacuggcccauuccugucuggc

SEQ ID NO: 1057453 - RNA, 22 nt, Human
gaggcagcaauaaaaagaauuu

SEQ ID NO: 1057454 - RNA, 22 nt, Human
cugaggcuuguccucucagcuu

SEQ ID NO: 1057455 - RNA, 22 nt, Human
ggcagaggaggggugaauuugc

SEQ ID NO: 1057456 - RNA, 22 nt, Human
uucugagcuacauaguacuggg

SEQ ID NO: 1057457 - RNA, 22 nt, Human
gccugccuagaauugcagcuuu

SEQ ID NO: 1057458 - RNA, 21 nt, Human
gcugcugugggccagggaggc

SEQ ID NO: 1057459 - RNA, 22 nt, Human
auauuaggaguuaaauguauua

SEQ ID NO: 1057460 - RNA, 22 nt, Human
caaggccacugcucagguuucc

SEQ ID NO: 1057461 - RNA, 22 nt, Human
caaggcugcuggcuucugagcu

SEQ ID NO: 1057462 - RNA, 20 nt, Human
agcauuugaaauaugacuau

SEQ ID NO: 1057463 - RNA, 18 nt, Human
gcagcuagccaggggggc

SEQ ID NO: 1057464 - RNA, 22 nt, Human
auagcacugguuuuucuugguu

SEQ ID NO: 1057465 - RNA, 19 nt, Human
aucauacauguuacacucu

SEQ ID NO: 1057466 - RNA, 21 nt, Human
gacuuucuuaccagauuuuug

SEQ ID NO: 1057467 - RNA, 22 nt, Human
gcuggccacacugcugauggag

SEQ ID NO: 1057468 - RNA, 22 nt, Human
aggccagccucaggcagggacc

SEQ ID NO: 1057469 - RNA, 22 nt, Human
cuggccaggcuugggacagaca

SEQ ID NO: 1057470 - RNA, 22 nt, Human
cugcuuuguaaaauagacauaa

SEQ ID NO: 1057471 - RNA, 22 nt, Human
acagugagauccaagggcaggc

SEQ ID NO: 1057472 - RNA, 22 nt, Human
gccaggagcccugggcaaguuc

SEQ ID NO: 1057473 - RNA, 23 nt, Human
cugcuguguuggucucgauggga

SEQ ID NO: 1057474 - RNA, 22 nt, Human
cugccaggcagggagauggcug

SEQ ID NO: 1057475 - RNA, 22 nt, Human
ugguaacuuucagcauggugac

SEQ ID NO: 1057476 - RNA, 22 nt, Human
caacugcugacaccaucacucc

SEQ ID NO: 1057477 - RNA, 22 nt, Human
agugagggaugaagaacugcgg

SEQ ID NO: 1057478 - RNA, 19 nt, Human
ggcugagcgccuuggcugc

SEQ ID NO: 1057479 - RNA, 22 nt, Human
cggccaaauugcagagagaagc

SEQ ID NO: 1057480 - RNA, 22 nt, Human
uuugacaugcaaagcacuuuag

SEQ ID NO: 1057481 - RNA, 22 nt, Human
gaagcagcagcuggggacaguu

SEQ ID NO: 1057482 - RNA, 18 nt, Human
aagaggaggaaacccagg

SEQ ID NO: 1057483 - RNA, 22 nt, Human
gcugcuguguuggagagggacu

SEQ ID NO: 1057484 - RNA, 22 nt, Human
aggagcugggcugcugcuggga

SEQ ID NO: 1057485 - RNA, 19 nt, Human
acauuuaaauucagaucuc

SEQ ID NO: 1057486 - RNA, 22 nt, Human
gcugagguaggagguugcagug

SEQ ID NO: 1057487 - RNA, 22 nt, Human
aauucacugaacuucucugaga

SEQ ID NO: 1057488 - RNA, 22 nt, Human
cagaggauucccuagugaccug

SEQ ID NO: 1057489 - RNA, 22 nt, Human
agugugucugaucacuugugag

SEQ ID NO: 1057490 - RNA, 22 nt, Human
gggcugagugggccucuuacuu

SEQ ID NO: 1057491 - RNA, 22 nt, Human
cauugcuguuaauugucucuag

SEQ ID NO: 1057492 - RNA, 22 nt, Human
ucaggcugccuaucagacugug

SEQ ID NO: 1057493 - RNA, 22 nt, Human
acccaggagccgugagagguua

SEQ ID NO: 1057494 - RNA, 22 nt, Human
aagggcagaauagagaagaugg

SEQ ID NO: 1057495 - RNA, 22 nt, Human
auugaaaggcaaaguaggaagc

SEQ ID NO: 1057496 - RNA, 22 nt, Human
caccagaguuguccaaaugauu

SEQ ID NO: 1057497 - RNA, 22 nt, Human
gagcaagaguguuggacuuuga

SEQ ID NO: 1057498 - RNA, 22 nt, Human
acccagaggugucuagcaagcu

SEQ ID NO: 1057499 - RNA, 22 nt, Human
uggccacauccuuuccuuguca

SEQ ID NO: 1057500 - RNA, 22 nt, Human
uucugggacaucuggacaguuu

SEQ ID NO: 1057501 - RNA, 22 nt, Human
ccaggagagcucucguucagug

SEQ ID NO: 1057502 - RNA, 22 nt, Human
ucucugaguauccugaacugcc

SEQ ID NO: 1057503 - RNA, 22 nt, Human
gauuaggacauggauguauguu

SEQ ID NO: 1057504 - RNA, 22 nt, Human
cugaggucagaguuuagucugg

SEQ ID NO: 1057505 - RNA, 22 nt, Human
cugugauuguuaguuccuauac

SEQ ID NO: 1057506 - RNA, 22 nt, Human
aggcagccaaucagaggcugac

SEQ ID NO: 1057507 - RNA, 22 nt, Human
uugaggucuguguaggcagcaa

SEQ ID NO: 1057508 - RNA, 22 nt, Human
ugccucagucuaaagucucuca

SEQ ID NO: 1057509 - RNA, 22 nt, Human
gccacagcucacguuccccauu

SEQ ID NO: 1057510 - RNA, 22 nt, Human
uccaggagucagacagauggug

SEQ ID NO: 1057511 - RNA, 22 nt, Human
ugucuagaggccaacaggaaag

SEQ ID NO: 1057512 - RNA, 22 nt, Human
gagagggauacugaguuuuggu

SEQ ID NO: 1057513 - RNA, 22 nt, Human
cacauuaaaauccuaacuucca

SEQ ID NO: 1057514 - RNA, 21 nt, Human
cugcucugacagugaggccag

SEQ ID NO: 1057515 - RNA, 22 nt, Human
auggcuucgaguauauacauag

SEQ ID NO: 1057516 - RNA, 22 nt, Human
acaagcaugggcuuugacauca

SEQ ID NO: 1057517 - RNA, 22 nt, Human
aggcaggcacacuuccuccagg

SEQ ID NO: 1057518 - RNA, 22 nt, Human
uuauuaggaaaaggucagaugu

SEQ ID NO: 1057519 - RNA, 22 nt, Human
gggcagcuagcccucuagccca

SEQ ID NO: 1057520 - RNA, 22 nt, Human
auuugcaaagucguaucuguga

SEQ ID NO: 1057521 - RNA, 22 nt, Human
aguuacaaacacuaucaguucu

SEQ ID NO: 1057522 - RNA, 22 nt, Human
ugaguucucacccauucuucuu

SEQ ID NO: 1057523 - RNA, 22 nt, Human
gccacaggcacuuaagggcugg

SEQ ID NO: 1057524 - RNA, 22 nt, Human
agccauuggcugccuggugcgu

SEQ ID NO: 1057525 - RNA, 22 nt, Human
uuauuugguugcugacuuggaa

SEQ ID NO: 1057526 - RNA, 22 nt, Human
acacauuucucuuuuuguaagu

SEQ ID NO: 1057527 - RNA, 18 nt, Human
gcuccuggaccaggucac

SEQ ID NO: 1057528 - RNA, 22 nt, Human
caggcagcuagauuuauaacaa

SEQ ID NO: 1057529 - RNA, 22 nt, Human
ucuucaauuagauuuaccaauu

SEQ ID NO: 1057530 - RNA, 22 nt, Human
gcugccuccaaucugugccccg

SEQ ID NO: 1057531 - RNA, 22 nt, Human
ggauuuggaagaccgggucaca

SEQ ID NO: 1057532 - RNA, 22 nt, Human
aggcuagacuuuggcgaagcac

SEQ ID NO: 1057533 - RNA, 22 nt, Human
caggcgagggcccugaggagcc

SEQ ID NO: 1057534 - RNA, 22 nt, Human
agggcugugucccuaggggagc

SEQ ID NO: 1057535 - RNA, 22 nt, Human
ggguggagaggcuaaguccagu

SEQ ID NO: 1057536 - RNA, 22 nt, Human
agagggcugcugcacagugcuc

SEQ ID NO: 1057537 - RNA, 17 nt, Human
caagagagaugacugga

SEQ ID NO: 1057538 - RNA, 22 nt, Human
gagaggcuggcagugccagguu

SEQ ID NO: 1057539 - RNA, 22 nt, Human
ccagagcuucggggcggcugua

SEQ ID NO: 1057540 - RNA, 22 nt, Human
uccaggagaccagauguaggcc

SEQ ID NO: 1057541 - RNA, 22 nt, Human
auucuucauuguugauucaugu

SEQ ID NO: 1057542 - RNA, 22 nt, Human
uucuacaauaugaauaaugaag

SEQ ID NO: 1057543 - RNA, 22 nt, Human
cuccccagguucaggagguggg

SEQ ID NO: 1057544 - RNA, 22 nt, Human
aaacugguuucugagauggaac

SEQ ID NO: 1057545 - RNA, 18 nt, Human
ccucagggagagagacgc

SEQ ID NO: 1057546 - RNA, 22 nt, Human
aggcuaaggagugugaugcuca

SEQ ID NO: 1057547 - RNA, 22 nt, Human
ucugagguuuucauguuuucug

SEQ ID NO: 1057548 - RNA, 22 nt, Human
gcugggagugggcaagaugaga

SEQ ID NO: 1057549 - RNA, 20 nt, Human
ucagugauuuugaagaggaa

SEQ ID NO: 1057550 - RNA, 23 nt, Human
cuuugccacccagagccugacag

SEQ ID NO: 1057551 - RNA, 22 nt, Human
cuggcuguauuaguuugauccu

SEQ ID NO: 1057552 - RNA, 22 nt, Human
uacuuucuguccuucuguuaaa

SEQ ID NO: 1057553 - RNA, 22 nt, Human
gcaggcugagaguccaagaagg

SEQ ID NO: 1057554 - RNA, 22 nt, Human
agcugcccuguggggaggguug

SEQ ID NO: 1057555 - RNA, 22 nt, Human
auggcugagaugggcuccaggc

SEQ ID NO: 1057556 - RNA, 22 nt, Human
aauaauuauuugagagcagacc

SEQ ID NO: 1057557 - RNA, 22 nt, Human
gugacagucaaagacaugacuu

SEQ ID NO: 1057558 - RNA, 22 nt, Human
cuuuauauccagauguuuggug

SEQ ID NO: 1057559 - RNA, 22 nt, Human
gagggaggcaucaugaauccag

SEQ ID NO: 1057560 - RNA, 23 nt, Human
ugauuaggucuacucuuggcucc

SEQ ID NO: 1057561 - RNA, 22 nt, Human
cauuuguaguuaaaaaugucuc

SEQ ID NO: 1057562 - RNA, 22 nt, Human
cugggccaguuaugucucaucu

SEQ ID NO: 1057563 - RNA, 20 nt, Human
ucugagguaugauagggucu

SEQ ID NO: 1057564 - RNA, 22 nt, Human
acuugcauuauauuuaucacaa

SEQ ID NO: 1057565 - RNA, 18 nt, Human
ucauuuguuuugcaugaa

SEQ ID NO: 1057566 - RNA, 22 nt, Human
guuauauauaguauuucucuga

SEQ ID NO: 1057567 - RNA, 22 nt, Human
guuauacauauguguuaacaaa

SEQ ID NO: 1057568 - RNA, 22 nt, Human
aggcacaguuucauccccgggc

SEQ ID NO: 1057569 - RNA, 22 nt, Human
uccaugaggaccaaauucguag

SEQ ID NO: 1057570 - RNA, 22 nt, Human
ccucugcucugguccaugugcu

SEQ ID NO: 1057571 - RNA, 22 nt, Human
ugaaguuauauauguugaaaau

SEQ ID NO: 1057572 - RNA, 22 nt, Human
gguguccaucaggcugugcuuc

SEQ ID NO: 1057573 - RNA, 22 nt, Human
uggcacaugguuaaucauaauu

SEQ ID NO: 1057574 - RNA, 22 nt, Human
caggcagcgcucguggccuggc

SEQ ID NO: 1057575 - RNA, 22 nt, Human
gugcauuugugcaugcacaugu

SEQ ID NO: 1057576 - RNA, 21 nt, Human
ugaaacagauggaaguauuug

SEQ ID NO: 1057577 - RNA, 22 nt, Human
gcgucugaguugcgggggcuca

SEQ ID NO: 1057578 - RNA, 22 nt, Human
uggcugaguuucaugcaucaug

SEQ ID NO: 1057579 - RNA, 22 nt, Human
caggugagcucuaucuagggag

SEQ ID NO: 1057580 - RNA, 22 nt, Human
cagcugcugcccuuggcugcag

SEQ ID NO: 1057581 - RNA, 22 nt, Human
guguugaugacauuuuagaaac

SEQ ID NO: 1057582 - RNA, 20 nt, Human
ucucaguuucuagagucagg

SEQ ID NO: 1057583 - RNA, 22 nt, Human
cuguaacucugccaagaaggcu

SEQ ID NO: 1057584 - RNA, 21 nt, Human
uggagacucugguucuuugug

SEQ ID NO: 1057585 - RNA, 22 nt, Human
aaaggccacuugaaggauuuuu

SEQ ID NO: 1057586 - RNA, 22 nt, Human
gggcugagccacagcuuuuguu

SEQ ID NO: 1057587 - RNA, 22 nt, Human
uacacauacaccaaugugguca

SEQ ID NO: 1057588 - RNA, 22 nt, Human
gcugcaggcuguggcaggggag

SEQ ID NO: 1057589 - RNA, 22 nt, Human
ugcuagugcaggguuuucaguu

SEQ ID NO: 1057590 - RNA, 22 nt, Human
cuccaugaauuugagcuuugug

SEQ ID NO: 1057591 - RNA, 22 nt, Human
agcugcaggcccaugcucaguc

SEQ ID NO: 1057592 - RNA, 22 nt, Human
uuuaaaaucagaugggaguugg

SEQ ID NO: 1057593 - RNA, 22 nt, Human
ucuucuaguaggccaagaagcu

SEQ ID NO: 1057594 - RNA, 22 nt, Human
ccaggcugcuuagccuuaucuu

SEQ ID NO: 1057595 - RNA, 22 nt, Human
gaggggcagagguagagaacaa

SEQ ID NO: 1057596 - RNA, 22 nt, Human
aucugcuugaaugagcaacagg

SEQ ID NO: 1057597 - RNA, 22 nt, Human
gagggcguucagucagugucuc

SEQ ID NO: 1057598 - RNA, 22 nt, Human
uagggauguaaacauaguaauu

SEQ ID NO: 1057599 - RNA, 22 nt, Human
uucagaaguagcuaagcaguca

SEQ ID NO: 1057600 - RNA, 21 nt, Human
cucaggauggcggccuggugg

SEQ ID NO: 1057601 - RNA, 22 nt, Human
cugcuguguugccagugucacc

SEQ ID NO: 1057602 - RNA, 22 nt, Human
aucauucuagcuguuguguuga

SEQ ID NO: 1057603 - RNA, 22 nt, Human
auauacuuccccauuauggggg

SEQ ID NO: 1057604 - RNA, 21 nt, Human
gagacagcccagugccagggc

SEQ ID NO: 1057605 - RNA, 22 nt, Human
ugaggcucaagaaagauuuguu

SEQ ID NO: 1057606 - RNA, 22 nt, Human
guugaaagcuuuucauuuaguu

SEQ ID NO: 1057607 - RNA, 22 nt, Human
aggcagcguagcaaggcuagua

SEQ ID NO: 1057608 - RNA, 22 nt, Human
aaaggccagguuggcugguauu

SEQ ID NO: 1057609 - RNA, 22 nt, Human
gaggagaggccaucguuguuau

SEQ ID NO: 1057610 - RNA, 22 nt, Human
cagcaagaacagccugaugugc

SEQ ID NO: 1057611 - RNA, 22 nt, Human
acacaguauugugacuauaacu

SEQ ID NO: 1057612 - RNA, 22 nt, Human
cuccuggcuuucccagaccagg

SEQ ID NO: 1057613 - RNA, 22 nt, Human
auggaaagugcauggaagucau

SEQ ID NO: 1057614 - RNA, 22 nt, Human
gguggaguaauucgcagagguu

SEQ ID NO: 1057615 - RNA, 22 nt, Human
agcugguauuucugaaggaaag

SEQ ID NO: 1057616 - RNA, 22 nt, Human
uggaaggaaagguagcagagaa

SEQ ID NO: 1057617 - RNA, 22 nt, Human
gcuggccauucucuuugagaug

SEQ ID NO: 1057618 - RNA, 22 nt, Human
gagaggggcgcgcagcucgcga

SEQ ID NO: 1057619 - RNA, 22 nt, Human
aacuggauuuugaugagcaguu

SEQ ID NO: 1057620 - RNA, 22 nt, Human
agagagggcauagaaaaaggga

SEQ ID NO: 1057621 - RNA, 22 nt, Human
aagacuguacauuuuccagucu

SEQ ID NO: 1057622 - RNA, 22 nt, Human
guuuucaauuauaagauggcuu

SEQ ID NO: 1057623 - RNA, 17 nt, Human
uccaggagaggcaaugg

SEQ ID NO: 1057624 - RNA, 22 nt, Human
uuggcagcccagcuuacuagca

SEQ ID NO: 1057625 - RNA, 22 nt, Human
gcuggagcugcagccugggccu

SEQ ID NO: 1057626 - RNA, 22 nt, Human
cccaggcagccugcagggaagg

SEQ ID NO: 1057627 - RNA, 22 nt, Human
cucacugucuguacuagcugau

SEQ ID NO: 1057628 - RNA, 22 nt, Human
aacuccagggcauugucuccug

SEQ ID NO: 1057629 - RNA, 22 nt, Human
auuucccagcuuugaucaguuu

SEQ ID NO: 1057630 - RNA, 19 nt, Human
uagaacugaggacuugcau

SEQ ID NO: 1057631 - RNA, 22 nt, Human
agcuaccuggcuuaucacuguc

SEQ ID NO: 1057632 - RNA, 22 nt, Human
uuaaauuuuagaaacagacucu

SEQ ID NO: 1057633 - RNA, 22 nt, Human
aggguccugggugcaguugcuu

SEQ ID NO: 1057634 - RNA, 22 nt, Human
augcuguguuuuaaauggaaau

SEQ ID NO: 1057635 - RNA, 22 nt, Human
gaggaggccaguggaaggaagc

SEQ ID NO: 1057636 - RNA, 22 nt, Human
cuacccaggcuuagagggcugg

SEQ ID NO: 1057637 - RNA, 22 nt, Human
uauuggauagcuugugcagaau

SEQ ID NO: 1057638 - RNA, 23 nt, Human
cuugcagggcuggaggcuuagaa

SEQ ID NO: 1057639 - RNA, 22 nt, Human
cuggccaacuugcuuguuggca

SEQ ID NO: 1057640 - RNA, 22 nt, Human
cacuaaguugguguuaauuagu

SEQ ID NO: 1057641 - RNA, 22 nt, Human
aggcagcuuuaacugguaguag

SEQ ID NO: 1057642 - RNA, 22 nt, Human
aggugcugugcuaugcacuugu

SEQ ID NO: 1057643 - RNA, 22 nt, Human
auuuggaaaaucugguuauaga

SEQ ID NO: 1057644 - RNA, 22 nt, Human
uguuggcaucucugagagaguu

SEQ ID NO: 1057645 - RNA, 22 nt, Human
gggcagcucuggcugugggaag

SEQ ID NO: 1057646 - RNA, 22 nt, Human
cucuuaguaaugccaugaagca

SEQ ID NO: 1057647 - RNA, 22 nt, Human
ggccagaggugguacauagcuu

SEQ ID NO: 1057648 - RNA, 22 nt, Human
aagacugucuuuucugagugac

SEQ ID NO: 1057649 - RNA, 21 nt, Human
aaauacugggcagugacuuga

SEQ ID NO: 1057650 - RNA, 22 nt, Human
cagugucuccagaugcuccaau

SEQ ID NO: 1057651 - RNA, 22 nt, Human
cagcaacugugccugacacaca

SEQ ID NO: 1057652 - RNA, 22 nt, Human
cuugaaagcacuccuuugacug

SEQ ID NO: 1057653 - RNA, 22 nt, Human
auuaggauuuuguccaaguagc

SEQ ID NO: 1057654 - RNA, 22 nt, Human
ggcugagguguggggaacuaua

SEQ ID NO: 1057655 - RNA, 22 nt, Human
cagagcugggaucccaugggcg

SEQ ID NO: 1057656 - RNA, 22 nt, Human
cuccugugggucaccaauaggc

SEQ ID NO: 1057657 - RNA, 22 nt, Human
aaaacaguuuaggcaucacagu

SEQ ID NO: 1057658 - RNA, 22 nt, Human
cuacuucuaaguacauggugau

SEQ ID NO: 1057659 - RNA, 22 nt, Human
uagaagcagcaggaguaaaggc

SEQ ID NO: 1057660 - RNA, 22 nt, Human
aggcaugacuuuggcugaagaa

SEQ ID NO: 1057661 - RNA, 22 nt, Human
agaggccggccgagcccauggg

SEQ ID NO: 1057662 - RNA, 22 nt, Human
cagcaagaaaauucacaugcuc

SEQ ID NO: 1057663 - RNA, 22 nt, Human
uguagauaaguaaaagcccagu

SEQ ID NO: 1057664 - RNA, 19 nt, Human
uggcaucuguaaaauggug

SEQ ID NO: 1057665 - RNA, 22 nt, Human
ugaaaugagauaauuuaagugc

SEQ ID NO: 1057666 - RNA, 22 nt, Human
cauagagugauguaagguaugu

SEQ ID NO: 1057667 - RNA, 22 nt, Human
cuagaaaaauacuuuauuguga

SEQ ID NO: 1057668 - RNA, 22 nt, Human
gcugcccacaaugauuacaugg

SEQ ID NO: 1057669 - RNA, 22 nt, Human
aucaggauagugguuaccuggg

SEQ ID NO: 1057670 - RNA, 22 nt, Human
ugaaagcacaaguucuaacagg

SEQ ID NO: 1057671 - RNA, 22 nt, Human
ccuguuuaucuaucuagagaug

SEQ ID NO: 1057672 - RNA, 22 nt, Human
uuucagcugguaaaggaguagc

SEQ ID NO: 1057673 - RNA, 22 nt, Human
acucaggaagaaagcagcuggu

SEQ ID NO: 1057674 - RNA, 22 nt, Human
agaaaguuagcagacucuuggc

SEQ ID NO: 1057675 - RNA, 22 nt, Human
cucagaagccuucagucuuggc

SEQ ID NO: 1057676 - RNA, 22 nt, Human
gaaauccaguucccuacucuua

SEQ ID NO: 1057677 - RNA, 22 nt, Human
ucugagccaccugccagugcug

SEQ ID NO: 1057678 - RNA, 21 nt, Human
uccaggaguucuaauaggugu

SEQ ID NO: 1057679 - RNA, 22 nt, Human
uugcccagaguccacagcguac

SEQ ID NO: 1057680 - RNA, 22 nt, Human
aucaggauguuuggcugucaua

SEQ ID NO: 1057681 - RNA, 22 nt, Human
aacuuucuggcuuuggggagag

SEQ ID NO: 1057682 - RNA, 17 nt, Human
aggcaggcagagcggga

SEQ ID NO: 1057683 - RNA, 22 nt, Human
agagccugugggagaugcagcu

SEQ ID NO: 1057684 - RNA, 22 nt, Human
agugcuuuagcauccaacuguc

SEQ ID NO: 1057685 - RNA, 22 nt, Human
ugagcagauggaggcuucugca

SEQ ID NO: 1057686 - RNA, 22 nt, Human
uggcagcuauggucuaagggcc

SEQ ID NO: 1057687 - RNA, 22 nt, Human
auaguuugugaaacacagcagu

SEQ ID NO: 1057688 - RNA, 22 nt, Human
uggcugagagaagacggggaag

SEQ ID NO: 1057689 - RNA, 22 nt, Human
acuuggcaaguaucuauaaagu

SEQ ID NO: 1057690 - RNA, 22 nt, Human
ugcauguguuugccacagugag

SEQ ID NO: 1057691 - RNA, 21 nt, Human
uggcugccuacaugcugcagg

SEQ ID NO: 1057692 - RNA, 22 nt, Human
ugcugaggagguggcugugcuu

SEQ ID NO: 1057693 - RNA, 22 nt, Human
ugagagggcccagagcacacca

SEQ ID NO: 1057694 - RNA, 22 nt, Human
ccuccuggaaaaauucccuggc

SEQ ID NO: 1057695 - RNA, 22 nt, Human
uugcaucuaccauaucaaagau

SEQ ID NO: 1057696 - RNA, 22 nt, Human
augguaaccagaagacuaugac

SEQ ID NO: 1057697 - RNA, 22 nt, Human
aagggcaggaaaagauggaugu

SEQ ID NO: 1057698 - RNA, 22 nt, Human
ugcugaggaaaaaugugacucu

SEQ ID NO: 1057699 - RNA, 22 nt, Human
uuugaaaggaauuaggaugaca

SEQ ID NO: 1057700 - RNA, 22 nt, Human
ugaaagggguugaguuacagcu

SEQ ID NO: 1057701 - RNA, 22 nt, Human
auacaucucuuugaagugcuuu

SEQ ID NO: 1057702 - RNA, 22 nt, Human
ccuccugguaauuagcgaaagg

SEQ ID NO: 1057703 - RNA, 22 nt, Human
accaggagagauuuuauugaga

SEQ ID NO: 1057704 - RNA, 20 nt, Human
uacuuaggcuuguuuuggcc

SEQ ID NO: 1057705 - RNA, 20 nt, Human
caaaugaagcuguuggccuc

SEQ ID NO: 1057706 - RNA, 22 nt, Human
uuuauuuggcauccagggagaa

SEQ ID NO: 1057707 - RNA, 22 nt, Human
gcugugcuugggaagaaucucu

SEQ ID NO: 1057708 - RNA, 22 nt, Human
accuguuuguguccauuaguga

SEQ ID NO: 1057709 - RNA, 22 nt, Human
acagauguacacucauauauaa

SEQ ID NO: 1057710 - RNA, 22 nt, Human
cccaggaccgcgcggcugagcg

SEQ ID NO: 1057711 - RNA, 22 nt, Human
gccaggaguucagaugcauguu

SEQ ID NO: 1057712 - RNA, 22 nt, Human
uuauuauuggugaguuaaggaa

SEQ ID NO: 1057713 - RNA, 22 nt, Human
guccucuggaagaugaguucuu

SEQ ID NO: 1057714 - RNA, 22 nt, Human
gucaggauuauaauccccaugg

SEQ ID NO: 1057715 - RNA, 23 nt, Human
cugagguaaaauauucugaagga

SEQ ID NO: 1057716 - RNA, 22 nt, Human
ucauucuugaucacuaguuagu

SEQ ID NO: 1057717 - RNA, 20 nt, Human
uaggcagcuugacccuuggu

SEQ ID NO: 1057718 - RNA, 22 nt, Human
uugaagaggacuuugcagcugu

SEQ ID NO: 1057719 - RNA, 22 nt, Human
cagagcucuauguucauggagg

SEQ ID NO: 1057720 - RNA, 22 nt, Human
agaaaagugcucuagugagagc

SEQ ID NO: 1057721 - RNA, 22 nt, Human
caggaugagguagaggcagaua

SEQ ID NO: 1057722 - RNA, 22 nt, Human
auacaguauaacuaauaaaccc

SEQ ID NO: 1057723 - RNA, 22 nt, Human
uaggcugggcugagcuggacgg

SEQ ID NO: 1057724 - RNA, 22 nt, Human
uucccucucacuuaaagcuugg

SEQ ID NO: 1057725 - RNA, 22 nt, Human
ucagugcacagagauuuuuguu

SEQ ID NO: 1057726 - RNA, 22 nt, Human
ccugguggcuucuggguggacg

SEQ ID NO: 1057727 - RNA, 22 nt, Human
aagggcugcauuugauguguca

SEQ ID NO: 1057728 - RNA, 22 nt, Human
cuuauuucagcccugggcaccc

SEQ ID NO: 1057729 - RNA, 20 nt, Human
uuaagaaaagcacauccugc

SEQ ID NO: 1057730 - RNA, 22 nt, Human
gaaggccauuagagccugugcc

SEQ ID NO: 1057731 - RNA, 22 nt, Human
ccaggaaauagugcugugaucu

SEQ ID NO: 1057732 - RNA, 22 nt, Human
acccaggacucucuuccaguag

SEQ ID NO: 1057733 - RNA, 22 nt, Human
uagcuguguaagcuugguaaga

SEQ ID NO: 1057734 - RNA, 23 nt, Human
ucaguuuguauaauccauaugca

SEQ ID NO: 1057735 - RNA, 22 nt, Human
uagaacuggaauuuugugguuu

SEQ ID NO: 1057736 - RNA, 22 nt, Human
gagggcugccacguugggcgag

SEQ ID NO: 1057737 - RNA, 22 nt, Human
uaggaugacacagcaaguauag

SEQ ID NO: 1057738 - RNA, 22 nt, Human
caggcugauaggguccaaaguu

SEQ ID NO: 1057739 - RNA, 19 nt, Human
gccaggagggcucuggcug

SEQ ID NO: 1057740 - RNA, 20 nt, Human
uguuaaaggacacuugcuuu

SEQ ID NO: 1057741 - RNA, 22 nt, Human
aaggcugaggcuggagaauuac

SEQ ID NO: 1057742 - RNA, 22 nt, Human
ucuuuauugcuacugguuuguc

SEQ ID NO: 1057743 - RNA, 22 nt, Human
gaaucucaguggaagcaggaag

SEQ ID NO: 1057744 - RNA, 22 nt, Human
aggcggcuccgggagugugggc

SEQ ID NO: 1057745 - RNA, 22 nt, Human
aacuggauuuaggaacagagaa

SEQ ID NO: 1057746 - RNA, 22 nt, Human
cugaggacauugaugaggcaau

SEQ ID NO: 1057747 - RNA, 22 nt, Human
uggaaauguauuugggcaugcc

SEQ ID NO: 1057748 - RNA, 22 nt, Human
uuuuuuaguuaggucagaaugu

SEQ ID NO: 1057749 - RNA, 22 nt, Human
uccugucuaaagaccugcaggc

SEQ ID NO: 1057750 - RNA, 22 nt, Human
uucucugaguacguuucagugu

SEQ ID NO: 1057751 - RNA, 22 nt, Human
cugccuggaugaauggcgccuu

SEQ ID NO: 1057752 - RNA, 21 nt, Human
ccugggccaaauucccuggac

SEQ ID NO: 1057753 - RNA, 23 nt, Human
agugcuggagaagcuucuggcuu

SEQ ID NO: 1057754 - RNA, 22 nt, Human
uucagcaaacacgaugcuuguu

SEQ ID NO: 1057755 - RNA, 22 nt, Human
ccaugagccaggcugaggaagc

SEQ ID NO: 1057756 - RNA, 22 nt, Human
agaaaauauucauugagaggcu

SEQ ID NO: 1057757 - RNA, 22 nt, Human
gcuggagccauuggcuuggccu

SEQ ID NO: 1057758 - RNA, 22 nt, Human
uucacagaauggcaaguuaugg

SEQ ID NO: 1057759 - RNA, 22 nt, Human
uacaaagagguaauugcauaua

SEQ ID NO: 1057760 - RNA, 22 nt, Human
uagcuuuccuuguugccugugc

SEQ ID NO: 1057761 - RNA, 22 nt, Human
ugcuugaaagggguuucccagu

SEQ ID NO: 1057762 - RNA, 22 nt, Human
gcugaagagcaaggcugggucu

SEQ ID NO: 1057763 - RNA, 22 nt, Human
ucaggagacuggcagugcccac

SEQ ID NO: 1057764 - RNA, 22 nt, Human
ccugagguuuuuggauaguugu

SEQ ID NO: 1057765 - RNA, 22 nt, Human
auacuaaaguauagaacuuagu

SEQ ID NO: 1057766 - RNA, 22 nt, Human
auuagcauauuaaauagucauu

SEQ ID NO: 1057767 - RNA, 22 nt, Human
cugaggccagcugcagagcucu

SEQ ID NO: 1057768 - RNA, 20 nt, Human
uggcaucucucaauuguagg

SEQ ID NO: 1057769 - RNA, 22 nt, Human
aaggagagagcuuugcuggaac

SEQ ID NO: 1057770 - RNA, 18 nt, Human
ugagaggcagguagagga

SEQ ID NO: 1057771 - RNA, 22 nt, Human
cuaagaaauguugugaaugcca

SEQ ID NO: 1057772 - RNA, 18 nt, Human
aagggcuggccuuuggag

SEQ ID NO: 1057773 - RNA, 22 nt, Human
acacauuucuaaauuuuuaccg

SEQ ID NO: 1057774 - RNA, 22 nt, Human
cugaguguuuucagccacggcc

SEQ ID NO: 1057775 - RNA, 22 nt, Human
ccuugcugaccaucaccuuuga

SEQ ID NO: 1057776 - RNA, 22 nt, Human
ucucaggaucuaauacauggua

SEQ ID NO: 1057777 - RNA, 23 nt, Human
uugauuucaaaugcagagaacac

SEQ ID NO: 1057778 - RNA, 22 nt, Human
ugaaaugauaucugauaacaaa

SEQ ID NO: 1057779 - RNA, 19 nt, Human
gcagcugcuugaaaagaaa

SEQ ID NO: 1057780 - RNA, 22 nt, Human
ggcugcagcccucgccuagcca

SEQ ID NO: 1057781 - RNA, 22 nt, Human
cuucuagagcuggagcaaaugu

SEQ ID NO: 1057782 - RNA, 20 nt, Human
uuggcagcagcucagccacc

SEQ ID NO: 1057783 - RNA, 18 nt, Human
caugucugcgccacaagg

SEQ ID NO: 1057784 - RNA, 21 nt, Human
cccaggaggcugagaagagca

SEQ ID NO: 1057785 - RNA, 22 nt, Human
aucagcugcuacauuggccucu

SEQ ID NO: 1057786 - RNA, 22 nt, Human
guaggcagguggaggagugaag

SEQ ID NO: 1057787 - RNA, 22 nt, Human
ccuucuuaaacaucauuuuggc

SEQ ID NO: 1057788 - RNA, 22 nt, Human
cuggagaguuggaagauggacu

SEQ ID NO: 1057789 - RNA, 22 nt, Human
cggagaggaccugcaacucgcu

SEQ ID NO: 1057790 - RNA, 22 nt, Human
aggcaguuuauccccagagccu

SEQ ID NO: 1057791 - RNA, 22 nt, Human
cagucuuuguucccauuacuga

SEQ ID NO: 1057792 - RNA, 22 nt, Human
uggcagcaccagcaguguccuu

SEQ ID NO: 1057793 - RNA, 22 nt, Human
gacagguugaaguaucaaaggu

SEQ ID NO: 1057794 - RNA, 22 nt, Human
ucuuagaaguuuauggcacgga

SEQ ID NO: 1057795 - RNA, 22 nt, Human
ucuccuggguaaaaggguugau

SEQ ID NO: 1057796 - RNA, 22 nt, Human
uaggacaugcuacauaaauagg

SEQ ID NO: 1057797 - RNA, 22 nt, Human
uggaaauggaucugaugagucu

SEQ ID NO: 1057798 - RNA, 22 nt, Human
auacaguaauuuguaacucauc

SEQ ID NO: 1057799 - RNA, 21 nt, Human
gggcagcucuguuuuauuuuc

SEQ ID NO: 1057800 - RNA, 22 nt, Human
gcugcccagacauugaaucagg

SEQ ID NO: 1057801 - RNA, 21 nt, Human
acugagguuagaugccuugcc

SEQ ID NO: 1057802 - RNA, 17 nt, Human
guccuacccauggucua

SEQ ID NO: 1057803 - RNA, 22 nt, Human
augcugugcuggcuaaccaugg

SEQ ID NO: 1057804 - RNA, 22 nt, Human
acuguugucaggcugcuuugga

SEQ ID NO: 1057805 - RNA, 22 nt, Human
cugaggccccucuugugagcau

SEQ ID NO: 1057806 - RNA, 22 nt, Human
uggcugagcugcagcguggcuu

SEQ ID NO: 1057807 - RNA, 22 nt, Human
caguuuuugccauuaagaguaa

SEQ ID NO: 1057808 - RNA, 22 nt, Human
ccaggagagcgcccucccggcc

SEQ ID NO: 1057809 - RNA, 22 nt, Human
uuggccaaggucacugggugag

SEQ ID NO: 1057810 - RNA, 22 nt, Human
caggauggagggagggcuguua

SEQ ID NO: 1057811 - RNA, 20 nt, Human
acaggagaucugaggaaagg

SEQ ID NO: 1057812 - RNA, 19 nt, Human
agccuggcuuugcucugcu

SEQ ID NO: 1057813 - RNA, 22 nt, Human
guuuuauaggugaaauauuacu

SEQ ID NO: 1057814 - RNA, 22 nt, Human
ucaggauguuaauauagcauua

SEQ ID NO: 1057815 - RNA, 22 nt, Human
ccuggcugaacaaagucccucc

SEQ ID NO: 1057816 - RNA, 22 nt, Human
uguagcagugucuaccacauua

SEQ ID NO: 1057817 - RNA, 23 nt, Human
ugaaggccuggaggacgcguugu

SEQ ID NO: 1057818 - RNA, 19 nt, Human
agcagcuguagauagacac

SEQ ID NO: 1057819 - RNA, 22 nt, Human
uggcagcacuugaacuugagcc

SEQ ID NO: 1057820 - RNA, 22 nt, Human
agcccagggaaccaggaagugg

SEQ ID NO: 1057821 - RNA, 22 nt, Human
uccaggagguuuggaggaagca

SEQ ID NO: 1057822 - RNA, 22 nt, Human
agcugcagcacuccaguagccg

SEQ ID NO: 1057823 - RNA, 22 nt, Human
gaccauuuuuacagagcauuca

SEQ ID NO: 1057824 - RNA, 22 nt, Human
gagaaggaguagcugaccuggg

SEQ ID NO: 1057825 - RNA, 22 nt, Human
uuucagaaagcugaacauauga

SEQ ID NO: 1057826 - RNA, 20 nt, Human
uuucacagucccuguuuccu

SEQ ID NO: 1057827 - RNA, 22 nt, Human
gaauuauaggcaaagcagucau

SEQ ID NO: 1057828 - RNA, 22 nt, Human
uagcacugaaucacaugcugcu

SEQ ID NO: 1057829 - RNA, 22 nt, Human
uaacaguagccuuauguggucu

SEQ ID NO: 1057830 - RNA, 22 nt, Human
uaguaacucuacacacgacacu

SEQ ID NO: 1057831 - RNA, 22 nt, Human
ucaggagaaagccaauuagagu

SEQ ID NO: 1057832 - RNA, 22 nt, Human
agaggggaaguaaugaaugaua

SEQ ID NO: 1057833 - RNA, 22 nt, Human
caaauauuccagguacaucccu

SEQ ID NO: 1057834 - RNA, 22 nt, Human
acccaggaugauaauguucaca

SEQ ID NO: 1057835 - RNA, 23 nt, Human
cuugcaggaagcagauggcacac

SEQ ID NO: 1057836 - RNA, 22 nt, Human
gagaggcagaggccugaaaccg

SEQ ID NO: 1057837 - RNA, 22 nt, Human
uagugcuuaauaaauuucagaa

SEQ ID NO: 1057838 - RNA, 22 nt, Human
aacauauaaacucuuaaguuca

SEQ ID NO: 1057839 - RNA, 23 nt, Human
acuauaaaguuguucugauuuac

SEQ ID NO: 1057840 - RNA, 22 nt, Human
gagcagcucugggugacccagu

SEQ ID NO: 1057841 - RNA, 22 nt, Human
gucugagcgcuggagcuugugu

SEQ ID NO: 1057842 - RNA, 22 nt, Human
gcuuaguccccaagagagacca

SEQ ID NO: 1057843 - RNA, 22 nt, Human
cuugugaaaugccagauaaucu

SEQ ID NO: 1057844 - RNA, 22 nt, Human
uuuucuaacaucuaguaauuug

SEQ ID NO: 1057845 - RNA, 21 nt, Human
uuuguucaggggcaaaguuaa

SEQ ID NO: 1057846 - RNA, 22 nt, Human
uuuguucaccuagcaaacuuuu

SEQ ID NO: 1057847 - RNA, 22 nt, Human
uaucuguuuuuacagugucuuu

SEQ ID NO: 1057848 - RNA, 22 nt, Human
uuguuuguaaggcucuuagaau

SEQ ID NO: 1057849 - RNA, 22 nt, Human
cugucacagcccgcgucuccuc

SEQ ID NO: 1057850 - RNA, 22 nt, Human
uguucaguuugcuaucauaauc

SEQ ID NO: 1057851 - RNA, 22 nt, Human
uauuuguuucuaguggcagcaa

SEQ ID NO: 1057852 - RNA, 22 nt, Human
cauugcugugggcauuugcugc

SEQ ID NO: 1057853 - RNA, 22 nt, Human
uaucacauacuucucauccagg

SEQ ID NO: 1057854 - RNA, 22 nt, Human
auuguauacaagcuuaauuguu

SEQ ID NO: 1057855 - RNA, 22 nt, Human
augcaucaccgaguugcccacc

SEQ ID NO: 1057856 - RNA, 22 nt, Human
ucaauuuauguggcuauucauu

SEQ ID NO: 1057857 - RNA, 23 nt, Human
uaucauuucagcucucugccugg

SEQ ID NO: 1057858 - RNA, 22 nt, Human
aaugcugugauuuauuaaguau

SEQ ID NO: 1057859 - RNA, 22 nt, Human
uuuugaauaauucagaaacagc

SEQ ID NO: 1057860 - RNA, 22 nt, Human
cuuguauuaggaagaaugcuuu

SEQ ID NO: 1057861 - RNA, 22 nt, Human
ugacauuugagagagauauaca

SEQ ID NO: 1057862 - RNA, 22 nt, Human
uaaaaguuagcuaggacaaagu

SEQ ID NO: 1057863 - RNA, 20 nt, Human
uugagcuuuuaguacagaca

SEQ ID NO: 1057864 - RNA, 22 nt, Human
ucaguaaaugagcaaaaauuuc

SEQ ID NO: 1057865 - RNA, 22 nt, Human
uuuguugguugcacuggugggu

SEQ ID NO: 1057866 - RNA, 22 nt, Human
cuuucuuucgaagacgugauua

SEQ ID NO: 1057867 - RNA, 22 nt, Human
uauuucagcucuuuggauuauc

SEQ ID NO: 1057868 - RNA, 22 nt, Human
auauuuguuuggcagaguucag

SEQ ID NO: 1057869 - RNA, 22 nt, Human
uagcaucuguacugacauaauc

SEQ ID NO: 1057870 - RNA, 22 nt, Human
cugcugucuuuauuucacugcu

SEQ ID NO: 1057871 - RNA, 22 nt, Human
augugauacuccuucuagugga

SEQ ID NO: 1057872 - RNA, 22 nt, Human
uccagaugcugcacauuccuga

SEQ ID NO: 1057873 - RNA, 21 nt, Human
uuccuccucuggagaagaaga

SEQ ID NO: 1057874 - RNA, 22 nt, Human
uucacagugguagugcauuuag

SEQ ID NO: 1057875 - RNA, 22 nt, Human
aguuagugaagcucaucacagc

SEQ ID NO: 1057876 - RNA, 22 nt, Human
ugcuccaucuagagcucugcag

SEQ ID NO: 1057877 - RNA, 22 nt, Human
auggaguugagcucuguugucc

SEQ ID NO: 1057878 - RNA, 18 nt, Human
agguguguuucuaggagc

SEQ ID NO: 1057879 - RNA, 22 nt, Human
auauaugaagaagucuugauua

SEQ ID NO: 1057880 - RNA, 22 nt, Human
aauaaguacuuggggauaacuu

SEQ ID NO: 1057881 - RNA, 22 nt, Human
uuuuuugucuugaagaaauggu

SEQ ID NO: 1057882 - RNA, 22 nt, Human
aucuaugugggaaucauaauag

SEQ ID NO: 1057883 - RNA, 22 nt, Human
uugcauauccuccaacacaugg

SEQ ID NO: 1057884 - RNA, 22 nt, Human
gucugcugacagagcauggacc

SEQ ID NO: 1057885 - RNA, 22 nt, Human
uagauuaucccugauuugucca

SEQ ID NO: 1057886 - RNA, 22 nt, Human
uaggauaugcauuuuuauacau

SEQ ID NO: 1057887 - RNA, 22 nt, Human
ugcauuugcaauggguacacaa

SEQ ID NO: 1057888 - RNA, 22 nt, Human
uggauguuugaaguugcaugug

SEQ ID NO: 1057889 - RNA, 22 nt, Human
cacagaggacuguagcggggag

SEQ ID NO: 1057890 - RNA, 22 nt, Human
uacagugcuugguaucuaguaa

SEQ ID NO: 1057891 - RNA, 22 nt, Human
auuugcuuguucaccaguacuu

SEQ ID NO: 1057892 - RNA, 22 nt, Human
acugugugccaggcgcuggucu

SEQ ID NO: 1057893 - RNA, 22 nt, Human
auucuggacaaggcaagcuccu

SEQ ID NO: 1057894 - RNA, 22 nt, Human
auuuccagcagcauauuugucu

SEQ ID NO: 1057895 - RNA, 22 nt, Human
uuucuaguggguauucccuguu

SEQ ID NO: 1057896 - RNA, 22 nt, Human
ucuuuuaucuguuguguaacaa

SEQ ID NO: 1057897 - RNA, 16 nt, Human
ucauugaagacaguac

SEQ ID NO: 1057898 - RNA, 22 nt, Human
uucuguaauucuguuaguuuca

SEQ ID NO: 1057899 - RNA, 22 nt, Human
ggauguuuauccuaucuuaguu

SEQ ID NO: 1057900 - RNA, 22 nt, Human
caugggaauaaaguuauuucaa

SEQ ID NO: 1057901 - RNA, 22 nt, Human
gggcauuucuugucaauguagg

SEQ ID NO: 1057902 - RNA, 22 nt, Human
uuauuuaaaagugguaagauuc

SEQ ID NO: 1057903 - RNA, 22 nt, Human
auuaaauuggacgcugggggaa

SEQ ID NO: 1057904 - RNA, 21 nt, Human
cuuuucuagucccagccccgc

SEQ ID NO: 1057905 - RNA, 22 nt, Human
acauuucuccuacuuguuauuu

SEQ ID NO: 1057906 - RNA, 22 nt, Human
uuuuuggguccaggcuguaucu

SEQ ID NO: 1057907 - RNA, 22 nt, Human
uugucaggaacuaugauuaugc

SEQ ID NO: 1057908 - RNA, 22 nt, Human
guucuucaggcugugcucuaga

SEQ ID NO: 1057909 - RNA, 22 nt, Human
ucugaauucuuagaauuaaagg

SEQ ID NO: 1057910 - RNA, 17 nt, Human
ggugaguguccaggugg

SEQ ID NO: 1057911 - RNA, 22 nt, Human
uaguguguggucucucccuugu

SEQ ID NO: 1057912 - RNA, 22 nt, Human
auugagaaggagauuggcaucu

SEQ ID NO: 1057913 - RNA, 22 nt, Human
aggaauuugggguuacaugaug

SEQ ID NO: 1057914 - RNA, 22 nt, Human
uuauuuuguagcucugaucuuu

SEQ ID NO: 1057915 - RNA, 21 nt, Human
ugcuuugcagguggauuuagu

SEQ ID NO: 1057916 - RNA, 22 nt, Human
gcugcaagugcauguugcaacu

SEQ ID NO: 1057917 - RNA, 20 nt, Human
ugugguuuuugccaguugaa

SEQ ID NO: 1057918 - RNA, 22 nt, Human
gagaugggcgagaagguggacu

SEQ ID NO: 1057919 - RNA, 19 nt, Human
ucuuucauuucuagcucug

SEQ ID NO: 1057920 - RNA, 22 nt, Human
ccuugcagcauauagagucccu

SEQ ID NO: 1057921 - RNA, 22 nt, Human
uuaaguauauccauuugacugg

SEQ ID NO: 1057922 - RNA, 22 nt, Human
ugugagauuuuauuugauaugc

SEQ ID NO: 1057923 - RNA, 22 nt, Human
uguaaagaaagacgcagaguua

SEQ ID NO: 1057924 - RNA, 22 nt, Human
cagguuagcaacaugguuagag

SEQ ID NO: 1057925 - RNA, 22 nt, Human
ucauuguuucugcuuuucauga

SEQ ID NO: 1057926 - RNA, 22 nt, Human
ggagguggagcuggaaguucca

SEQ ID NO: 1057927 - RNA, 22 nt, Human
acuuugccuucuuacuguguug

SEQ ID NO: 1057928 - RNA, 22 nt, Human
uucucuucacagggaucauccu

SEQ ID NO: 1057929 - RNA, 22 nt, Human
uugauuugauuguaauggcucu

SEQ ID NO: 1057930 - RNA, 22 nt, Human
acauuuuuggguugaugucuga

SEQ ID NO: 1057931 - RNA, 22 nt, Human
cugaggcucugagaaagccaaa

SEQ ID NO: 1057932 - RNA, 22 nt, Human
acaguguuucacuuaaccguuu

SEQ ID NO: 1057933 - RNA, 22 nt, Human
cuuguuuucuucugcagucuau

SEQ ID NO: 1057934 - RNA, 22 nt, Human
ucacaugcucaccuaagccaca

SEQ ID NO: 1057935 - RNA, 23 nt, Human
cguuuuuuccucagauguucugg

SEQ ID NO: 1057936 - RNA, 22 nt, Human
auugucgucaauggacacauag

SEQ ID NO: 1057937 - RNA, 21 nt, Human
agcugugguuuuacaucuuuu

SEQ ID NO: 1057938 - RNA, 22 nt, Human
cuuugcuaauguugcauuuuca

SEQ ID NO: 1057939 - RNA, 22 nt, Human
aggcuccaugguucucccucag

SEQ ID NO: 1057940 - RNA, 22 nt, Human
gauggaggagauggcagggugc

SEQ ID NO: 1057941 - RNA, 22 nt, Human
cagguguugcaguugaagacug

SEQ ID NO: 1057942 - RNA, 22 nt, Human
uuauuugcccauguuuagcaga

SEQ ID NO: 1057943 - RNA, 22 nt, Human
augcuugaaaguuauuucauuu

SEQ ID NO: 1057944 - RNA, 18 nt, Human
ggaggcucugugguuucc

SEQ ID NO: 1057945 - RNA, 21 nt, Human
uguguucuucuaggucagcua

SEQ ID NO: 1057946 - RNA, 22 nt, Human
uucaguaugcugaaugauuuuu

SEQ ID NO: 1057947 - RNA, 22 nt, Human
aucuuuggguacaaacuugccu

SEQ ID NO: 1057948 - RNA, 22 nt, Human
uuguaacaguagcugucagcuc

SEQ ID NO: 1057949 - RNA, 22 nt, Human
auauaguuggguuucauucuac

SEQ ID NO: 1057950 - RNA, 22 nt, Human
ugaauaugugacuuugauuuca

SEQ ID NO: 1057951 - RNA, 20 nt, Human
uuucacaaugaacaugucuc

SEQ ID NO: 1057952 - RNA, 22 nt, Human
gagugugucggucagcguggcg

SEQ ID NO: 1057953 - RNA, 22 nt, Human
ucaucuguuaugggaguuuuug

SEQ ID NO: 1057954 - RNA, 22 nt, Human
gggcuccagaggcucacccugg

SEQ ID NO: 1057955 - RNA, 22 nt, Human
auucugcugccuaguuuaugaa

SEQ ID NO: 1057956 - RNA, 22 nt, Human
agguuuggguucauugcuggcu

SEQ ID NO: 1057957 - RNA, 22 nt, Human
aauacagugaaagugagcaagg

SEQ ID NO: 1057958 - RNA, 22 nt, Human
uugcaaucagcaguguuuucac

SEQ ID NO: 1057959 - RNA, 22 nt, Human
cauuguguauuucuguaguacu

SEQ ID NO: 1057960 - RNA, 22 nt, Human
uugcaucagcaggcauaauugg

SEQ ID NO: 1057961 - RNA, 22 nt, Human
ucugaggcugaauggacuccgu

SEQ ID NO: 1057962 - RNA, 22 nt, Human
ugugucuuuggcgaugucugga

SEQ ID NO: 1057963 - RNA, 21 nt, Human
uuuguucacacacagggcagc

SEQ ID NO: 1057964 - RNA, 22 nt, Human
ugaguguuguaaccauaugauu

SEQ ID NO: 1057965 - RNA, 22 nt, Human
ugugguuuugguucagaaacaa

SEQ ID NO: 1057966 - RNA, 22 nt, Human
gauuuucauuauagcuaguuuc

SEQ ID NO: 1057967 - RNA, 22 nt, Human
uuggaaaugcauuuguuauuau

SEQ ID NO: 1057968 - RNA, 22 nt, Human
auguaguauuuggaaauguaaa

SEQ ID NO: 1057969 - RNA, 22 nt, Human
aaguuugucucauuugaucuuc

SEQ ID NO: 1057970 - RNA, 22 nt, Human
ugagaauacugcauuguuagga

SEQ ID NO: 1057971 - RNA, 22 nt, Human
uuuguguuguacuucugugcau

SEQ ID NO: 1057972 - RNA, 22 nt, Human
uuguauuaaaauguguuucugu

SEQ ID NO: 1057973 - RNA, 22 nt, Human
uuuuguguugccauguuaagca

SEQ ID NO: 1057974 - RNA, 22 nt, Human
augccccagugugugcuuccuu

SEQ ID NO: 1057975 - RNA, 22 nt, Human
aaggcuccagugaaugcuggca

SEQ ID NO: 1057976 - RNA, 22 nt, Human
acugugacugugucuucugggc

SEQ ID NO: 1057977 - RNA, 22 nt, Human
uaucuagagccuggaagucuug

SEQ ID NO: 1057978 - RNA, 22 nt, Human
uggcauuggaauuuguguugca

SEQ ID NO: 1057979 - RNA, 22 nt, Human
acauucaugcaccuuccuaucc

SEQ ID NO: 1057980 - RNA, 22 nt, Human
agaugguucagaauuauaaaga

SEQ ID NO: 1057981 - RNA, 22 nt, Human
ucucuuugacccuuuagcucca

SEQ ID NO: 1057982 - RNA, 22 nt, Human
ccuuuuauauggcucaucacag

SEQ ID NO: 1057983 - RNA, 22 nt, Human
augguuuuguccucuuugguuc

SEQ ID NO: 1057984 - RNA, 22 nt, Human
ugucauauagaauguucuauga

SEQ ID NO: 1057985 - RNA, 22 nt, Human
uuucucuuucaaucugcaguac

SEQ ID NO: 1057986 - RNA, 22 nt, Human
agaguguguggggcugagguca

SEQ ID NO: 1057987 - RNA, 22 nt, Human
uuuguguuggaagaaaugcuac

SEQ ID NO: 1057988 - RNA, 22 nt, Human
uuaggauuugaaaaggggcaga

SEQ ID NO: 1057989 - RNA, 22 nt, Human
guucuucaaagugacaacuaaa

SEQ ID NO: 1057990 - RNA, 22 nt, Human
acauuuaaugauccuacuguga

SEQ ID NO: 1057991 - RNA, 22 nt, Human
caguuaaacagauugaguguua

SEQ ID NO: 1057992 - RNA, 22 nt, Human
uuugcuugauuaggauauggaa

SEQ ID NO: 1057993 - RNA, 22 nt, Human
cuuugugauaguguuaagacca

SEQ ID NO: 1057994 - RNA, 22 nt, Human
uauuuggugaaucuauggucag

SEQ ID NO: 1057995 - RNA, 23 nt, Human
auuuccuaaaagauaaucauuac

SEQ ID NO: 1057996 - RNA, 22 nt, Human
auguuuguguuucccauucagg

SEQ ID NO: 1057997 - RNA, 22 nt, Human
aaagugcugggauuacaggugu

SEQ ID NO: 1057998 - RNA, 22 nt, Human
gacuguggacucucaugauaga

SEQ ID NO: 1057999 - RNA, 22 nt, Human
auccauuugccgugcuaugugc

SEQ ID NO: 1058000 - RNA, 22 nt, Human
guugaguguugugcaugcacca

SEQ ID NO: 1058001 - RNA, 22 nt, Human
aauacagauggcaugugaagau

SEQ ID NO: 1058002 - RNA, 22 nt, Human
auccauuuuuucagaaugcucu

SEQ ID NO: 1058003 - RNA, 22 nt, Human
cauuguuggcagagggacagag

SEQ ID NO: 1058004 - RNA, 22 nt, Human
guguuuugugaggccuucuuuc

SEQ ID NO: 1058005 - RNA, 21 nt, Human
gacauugagcgugucgcagug

SEQ ID NO: 1058006 - RNA, 22 nt, Human
auguuguugaacucuuugcaug

SEQ ID NO: 1058007 - RNA, 22 nt, Human
caugcauuucuaccaaggaaua

SEQ ID NO: 1058008 - RNA, 22 nt, Human
auguuugaaauuguaaguauau

SEQ ID NO: 1058009 - RNA, 22 nt, Human
augcauugaggaugacaugagu

SEQ ID NO: 1058010 - RNA, 22 nt, Human
aaauugaauuugggaaacauug

SEQ ID NO: 1058011 - RNA, 22 nt, Human
auuucagaguagaucguuauuu

SEQ ID NO: 1058012 - RNA, 22 nt, Human
agcuauggguguggguuccauu

SEQ ID NO: 1058013 - RNA, 22 nt, Human
auguaugagagauucuuuuauu

SEQ ID NO: 1058014 - RNA, 22 nt, Human
ugcuuguauucauaucacagcu

SEQ ID NO: 1058015 - RNA, 22 nt, Human
aauggcuguucucugugauugg

SEQ ID NO: 1058016 - RNA, 17 nt, Human
aguuuuuggaccugugu

SEQ ID NO: 1058017 - RNA, 23 nt, Human
cuguuauauggguguuaugugcu

SEQ ID NO: 1058018 - RNA, 22 nt, Human
ugacuuuggacuagugauuuaa

SEQ ID NO: 1058019 - RNA, 22 nt, Human
agauuucaauggauauugcaag

SEQ ID NO: 1058020 - RNA, 22 nt, Human
auggugguagaagcacuaugug

SEQ ID NO: 1058021 - RNA, 22 nt, Human
agugaauuagccuauuuguaaa

SEQ ID NO: 1058022 - RNA, 22 nt, Human
cugguuuuuagugcuuaggagu

SEQ ID NO: 1058023 - RNA, 22 nt, Human
ucuauuaaugauucaauagugu

SEQ ID NO: 1058024 - RNA, 22 nt, Human
aaacuagguucugauuuccaag

SEQ ID NO: 1058025 - RNA, 22 nt, Human
gcuuuuauuucuucacaaaagu

SEQ ID NO: 1058026 - RNA, 22 nt, Human
aguguuaaggcugguugcuaua

SEQ ID NO: 1058027 - RNA, 22 nt, Human
ucacaguucaacuaguucagau

SEQ ID NO: 1058028 - RNA, 22 nt, Human
gugauuuucuccuccuagaagu

SEQ ID NO: 1058029 - RNA, 23 nt, Human
uggcuugcuaauguuccaaauaa

SEQ ID NO: 1058030 - RNA, 22 nt, Human
uagaucuuucacuacuguguag

SEQ ID NO: 1058031 - RNA, 19 nt, Human
uaugaaguugauaaaaguu

SEQ ID NO: 1058032 - RNA, 21 nt, Human
uaagaacauuaucuucuuccu

SEQ ID NO: 1058033 - RNA, 22 nt, Human
gggcuuggcuggggccaccaga

SEQ ID NO: 1058034 - RNA, 22 nt, Human
uuuaauuauaucugggcaguua

SEQ ID NO: 1058035 - RNA, 22 nt, Human
uaggcuccaguguguggcgagu

SEQ ID NO: 1058036 - RNA, 22 nt, Human
ugcugugagaccauuuguugag

SEQ ID NO: 1058037 - RNA, 23 nt, Human
acauuacacgcaguaauugcccc

SEQ ID NO: 1058038 - RNA, 22 nt, Human
aaucuguuuuaaaguuugugcc

SEQ ID NO: 1058039 - RNA, 22 nt, Human
ugcaugguuauauacuacuagu

SEQ ID NO: 1058040 - RNA, 22 nt, Human
uuauguauggauggcugaaagu

SEQ ID NO: 1058041 - RNA, 21 nt, Human
agaugcagugacccacugggg

SEQ ID NO: 1058042 - RNA, 22 nt, Human
ucauaggaguagcagugagagg

SEQ ID NO: 1058043 - RNA, 22 nt, Human
aguaccaucucugccucugccu

SEQ ID NO: 1058044 - RNA, 22 nt, Human
uuugaacuucuaccugucauau

SEQ ID NO: 1058045 - RNA, 21 nt, Human
uaagcuaaacauucaguuaac

SEQ ID NO: 1058046 - RNA, 22 nt, Human
ugcucccaggcauucucuguug

SEQ ID NO: 1058047 - RNA, 22 nt, Human
uuugccaguauuuuauugauga

SEQ ID NO: 1058048 - RNA, 22 nt, Human
gguguuguacauucuguggauu

SEQ ID NO: 1058049 - RNA, 22 nt, Human
cucaggcuaagaaggccaagug

SEQ ID NO: 1058050 - RNA, 22 nt, Human
caauaauugcuuuccagaguua

SEQ ID NO: 1058051 - RNA, 22 nt, Human
uuucaugauuaacuuagugaau

SEQ ID NO: 1058052 - RNA, 22 nt, Human
agaauguaagaaugcaaagauu

SEQ ID NO: 1058053 - RNA, 22 nt, Human
uaauucuagauugacauuuuga

SEQ ID NO: 1058054 - RNA, 20 nt, Human
caauaauuuacuucccuauu

SEQ ID NO: 1058055 - RNA, 15 nt, Human
uggugguguugagac

SEQ ID NO: 1058056 - RNA, 22 nt, Human
gguuuguugggguccaggccca

SEQ ID NO: 1058057 - RNA, 22 nt, Human
auuguugacuugauuacucaac

SEQ ID NO: 1058058 - RNA, 22 nt, Human
uuguaagacuguagaaugcaaa

SEQ ID NO: 1058059 - RNA, 22 nt, Human
auggaguguggccaggcaguaa

SEQ ID NO: 1058060 - RNA, 22 nt, Human
ucucugagguuguuuccagcac

SEQ ID NO: 1058061 - RNA, 22 nt, Human
uugggauuacagguguaagcca

SEQ ID NO: 1058062 - RNA, 22 nt, Human
cacaucauguuaauucauuaca

SEQ ID NO: 1058063 - RNA, 23 nt, Human
acaaguguuuccaauauggcugg

SEQ ID NO: 1058064 - RNA, 22 nt, Human
uucuucauucccuuacuuccga

SEQ ID NO: 1058065 - RNA, 22 nt, Human
uugauguaauacuuugcaacca

SEQ ID NO: 1058066 - RNA, 22 nt, Human
cuaguuuuaagcuccuugaggu

SEQ ID NO: 1058067 - RNA, 22 nt, Human
ugucuuuagccacuugccucuu

SEQ ID NO: 1058068 - RNA, 17 nt, Human
uuucugcaugauuggac

SEQ ID NO: 1058069 - RNA, 22 nt, Human
guucuucagcccucagguccua

SEQ ID NO: 1058070 - RNA, 22 nt, Human
agcagugugggcugcacgcugg

SEQ ID NO: 1058071 - RNA, 21 nt, Human
aauuucagacccauuuugccu

SEQ ID NO: 1058072 - RNA, 22 nt, Human
ucaaaaugccgagugcccaggu

SEQ ID NO: 1058073 - RNA, 22 nt, Human
guuauucuauuaaugugauugu

SEQ ID NO: 1058074 - RNA, 22 nt, Human
gucacucaggcuggaguucagu

SEQ ID NO: 1058075 - RNA, 22 nt, Human
uacauuguguuaaaacagaaga

SEQ ID NO: 1058076 - RNA, 22 nt, Human
aucauugaguaaaaugaauaca

SEQ ID NO: 1058077 - RNA, 22 nt, Human
acaguaaucugggaacuuguua

SEQ ID NO: 1058078 - RNA, 22 nt, Human
agauguuuauaacucaugagug

SEQ ID NO: 1058079 - RNA, 18 nt, Human
acccauuauauuuguagc

SEQ ID NO: 1058080 - RNA, 22 nt, Human
agauguuuuuccaggucuaauu

SEQ ID NO: 1058081 - RNA, 20 nt, Human
agugauuuguuaguacauug

SEQ ID NO: 1058082 - RNA, 21 nt, Human
uugauuuagcagaucuagcug

SEQ ID NO: 1058083 - RNA, 22 nt, Human
uaucaguagaacaauggacauu

SEQ ID NO: 1058084 - RNA, 22 nt, Human
guggcuaggcccaacggcagga

SEQ ID NO: 1058085 - RNA, 22 nt, Human
ugcaugguguaauucuaaugcu

SEQ ID NO: 1058086 - RNA, 22 nt, Human
ccugugcuucacucaacaagcc

SEQ ID NO: 1058087 - RNA, 22 nt, Human
uggugaagucagcggagcccgg

SEQ ID NO: 1058088 - RNA, 22 nt, Human
uuggcugacaaauggaaucucu

SEQ ID NO: 1058089 - RNA, 22 nt, Human
augauugaaaaugacauugcca

SEQ ID NO: 1058090 - RNA, 22 nt, Human
guuguuuuugaacggugguggc

SEQ ID NO: 1058091 - RNA, 22 nt, Human
agaguguggaaauguucagagu

SEQ ID NO: 1058092 - RNA, 18 nt, Human
uuugggauccucuuuucu

SEQ ID NO: 1058093 - RNA, 22 nt, Human
uggcuccacaggccagggugug

SEQ ID NO: 1058094 - RNA, 22 nt, Human
aagcaauucacaguucacuuaa

SEQ ID NO: 1058095 - RNA, 22 nt, Human
uaucauuuuacugugacauuuu

SEQ ID NO: 1058096 - RNA, 22 nt, Human
ccauuuguaccauuucuuugua

SEQ ID NO: 1058097 - RNA, 20 nt, Human
uuugauugccccucugacuu

SEQ ID NO: 1058098 - RNA, 22 nt, Human
aucaugugacuagguuuggcca

SEQ ID NO: 1058099 - RNA, 23 nt, Human
agugggcucaguccuccaacccc

SEQ ID NO: 1058100 - RNA, 22 nt, Human
gggcuccagccaggugucccca

SEQ ID NO: 1058101 - RNA, 22 nt, Human
uaacuugagcucucagugcuau

SEQ ID NO: 1058102 - RNA, 22 nt, Human
ugaaguuguuaagguugccauu

SEQ ID NO: 1058103 - RNA, 22 nt, Human
agugcuuuauguuguugugcaa

SEQ ID NO: 1058104 - RNA, 22 nt, Human
aauggagugguucuugcccucu

SEQ ID NO: 1058105 - RNA, 22 nt, Human
gucuuuuuuacaccuuacauca

SEQ ID NO: 1058106 - RNA, 22 nt, Human
guuuuaguggguggccacugau

SEQ ID NO: 1058107 - RNA, 22 nt, Human
acauuguugagccucuuguuca

SEQ ID NO: 1058108 - RNA, 22 nt, Human
cuaguucugccauucaguguca

SEQ ID NO: 1058109 - RNA, 22 nt, Human
uuaguuuccuguggugugaagu

SEQ ID NO: 1058110 - RNA, 22 nt, Human
uaagaaacauuuuuaugacagu

SEQ ID NO: 1058111 - RNA, 22 nt, Human
aguaacuuaagcaauuguguau

SEQ ID NO: 1058112 - RNA, 22 nt, Human
uaguuacuuuugcucuucauua

SEQ ID NO: 1058113 - RNA, 22 nt, Human
cauugcuuugugcauauuuaaa

SEQ ID NO: 1058114 - RNA, 20 nt, Human
caacacugcccauuguuugc

SEQ ID NO: 1058115 - RNA, 22 nt, Human
uguauauacacacucccauguu

SEQ ID NO: 1058116 - RNA, 17 nt, Human
gcuccagaauucuaguc

SEQ ID NO: 1058117 - RNA, 22 nt, Human
ucugagugggaacucucaugac

SEQ ID NO: 1058118 - RNA, 22 nt, Human
ugguuuguauauguuugugaga

SEQ ID NO: 1058119 - RNA, 22 nt, Human
cuuauuugcccauguuucuuua

SEQ ID NO: 1058120 - RNA, 22 nt, Human
ugguuggauggcucuuguggcu

SEQ ID NO: 1058121 - RNA, 20 nt, Human
ucuuuuauuggcagauccug

SEQ ID NO: 1058122 - RNA, 22 nt, Human
aacaugaugacauuguaagcuu

SEQ ID NO: 1058123 - RNA, 22 nt, Human
uugcuauuuugagagucauagu

SEQ ID NO: 1058124 - RNA, 22 nt, Human
uauaaacuccucuugcauuccu

SEQ ID NO: 1058125 - RNA, 22 nt, Human
uuuuucaagacaaccugcaugu

SEQ ID NO: 1058126 - RNA, 22 nt, Human
uucaguuuugcuuuuaaucaug

SEQ ID NO: 1058127 - RNA, 22 nt, Human
augauuuguuaacagacuuaau

SEQ ID NO: 1058128 - RNA, 22 nt, Human
ugcauguuucuguauguuaaug

SEQ ID NO: 1058129 - RNA, 22 nt, Human
uaguggguuuauacaauuuaaa

SEQ ID NO: 1058130 - RNA, 22 nt, Human
ugauuugaaaccuuuggcaaga

SEQ ID NO: 1058131 - RNA, 22 nt, Human
aaauacaguggcagcagauaau

SEQ ID NO: 1058132 - RNA, 22 nt, Human
cugauggagagugugauuuggg

SEQ ID NO: 1058133 - RNA, 22 nt, Human
uuggauggagguucaagcacua

SEQ ID NO: 1058134 - RNA, 22 nt, Human
ggacauugaagcuggaaaggga

SEQ ID NO: 1058135 - RNA, 21 nt, Human
gucuuuuuaauugcgauuucc

SEQ ID NO: 1058136 - RNA, 22 nt, Human
ugauuuacaguagugucuaaac

SEQ ID NO: 1058137 - RNA, 18 nt, Human
gugacugccccaaaaggc

SEQ ID NO: 1058138 - RNA, 22 nt, Human
agugacauuauuuuguguacua

SEQ ID NO: 1058139 - RNA, 21 nt, Human
cugugauguugccgggguagg

SEQ ID NO: 1058140 - RNA, 22 nt, Human
caucuuuguuuuggauauaauc

SEQ ID NO: 1058141 - RNA, 22 nt, Human
cugguuuuccaauguuuugacu

SEQ ID NO: 1058142 - RNA, 22 nt, Human
augcauaucuccuaucuccuca

SEQ ID NO: 1058143 - RNA, 22 nt, Human
ugagcagacuugaugaggcagc

SEQ ID NO: 1058144 - RNA, 22 nt, Human
aauuauguuugcuuuagaugga

SEQ ID NO: 1058145 - RNA, 23 nt, Human
cauuugauccucacaauaaaugg

SEQ ID NO: 1058146 - RNA, 20 nt, Human
auuugcuuaccuuguuucua

SEQ ID NO: 1058147 - RNA, 22 nt, Human
aaguuauugguggagagcacug

SEQ ID NO: 1058148 - RNA, 22 nt, Human
uaauuucagugcaagcucacgg

SEQ ID NO: 1058149 - RNA, 22 nt, Human
ggcuauguguccagcaucuuug

SEQ ID NO: 1058150 - RNA, 22 nt, Human
auuugugggacuauaaugcagg

SEQ ID NO: 1058151 - RNA, 22 nt, Human
gcuugcuuuguaaauaucugug

SEQ ID NO: 1058152 - RNA, 22 nt, Human
uucuuugcccauguuuccuaag

SEQ ID NO: 1058153 - RNA, 22 nt, Human
ugggaugagcuauauagaaagu

SEQ ID NO: 1058154 - RNA, 22 nt, Human
guucuucagauuccauuucagu

SEQ ID NO: 1058155 - RNA, 19 nt, Human
aggugaugugacucuagaa

SEQ ID NO: 1058156 - RNA, 22 nt, Human
acagaagugacaauuucuuggg

SEQ ID NO: 1058157 - RNA, 22 nt, Human
caaauguuugguggcauuuugu

SEQ ID NO: 1058158 - RNA, 22 nt, Human
gaauuguacugcaaucagggga

SEQ ID NO: 1058159 - RNA, 22 nt, Human
augaauuguccgauguugugca

SEQ ID NO: 1058160 - RNA, 22 nt, Human
agcuaugaagccacuuuuaaca

SEQ ID NO: 1058161 - RNA, 22 nt, Human
uuuggauugcuuggaugcuucg

SEQ ID NO: 1058162 - RNA, 22 nt, Human
cugggcuuucaggcccuaaggc

SEQ ID NO: 1058163 - RNA, 22 nt, Human
agaucugaggguccaagggagg

SEQ ID NO: 1058164 - RNA, 22 nt, Human
cauuuugugcuagacacuaugg

SEQ ID NO: 1058165 - RNA, 22 nt, Human
uuagggacagcucuguagguga

SEQ ID NO: 1058166 - RNA, 22 nt, Human
cuucuucagaggccagccucug

SEQ ID NO: 1058167 - RNA, 22 nt, Human
guaauucugugugaaucuauua

SEQ ID NO: 1058168 - RNA, 22 nt, Human
acuugguggcgaacgaggguca

SEQ ID NO: 1058169 - RNA, 22 nt, Human
agugauguagguggauucuggc

SEQ ID NO: 1058170 - RNA, 21 nt, Human
guucaauagcucuuugaaugc

SEQ ID NO: 1058171 - RNA, 22 nt, Human
ccacuuugagaagcugaugaaa

SEQ ID NO: 1058172 - RNA, 19 nt, Human
ugcagcuguaugagcuuaa

SEQ ID NO: 1058173 - RNA, 22 nt, Human
aaaugcaugugcuauagaugug

SEQ ID NO: 1058174 - RNA, 22 nt, Human
gcugaaguugccuauuuuaaua

SEQ ID NO: 1058175 - RNA, 22 nt, Human
uguuaguauuggcaaauuuguu

SEQ ID NO: 1058176 - RNA, 22 nt, Human
gugauugugaaaacauuaagaa

SEQ ID NO: 1058177 - RNA, 22 nt, Human
aauaucuagccuuuagcagcuu

SEQ ID NO: 1058178 - RNA, 22 nt, Human
gauguauagcuuuaacugaccc

SEQ ID NO: 1058179 - RNA, 20 nt, Human
aucaggcuuucuguugcgau

SEQ ID NO: 1058180 - RNA, 22 nt, Human
guuuuguucaugaacauugggu

SEQ ID NO: 1058181 - RNA, 22 nt, Human
ggauguggaccuugccugguga

SEQ ID NO: 1058182 - RNA, 22 nt, Human
guacacucccccugugaaguug

SEQ ID NO: 1058183 - RNA, 22 nt, Human
auuauguagcuaaaaauugugu

SEQ ID NO: 1058184 - RNA, 19 nt, Human
aucaggcuucuauuuucuc

SEQ ID NO: 1058185 - RNA, 19 nt, Human
uuacaugacauaugaagga

SEQ ID NO: 1058186 - RNA, 22 nt, Human
agugaaauaugcccauugcugu

SEQ ID NO: 1058187 - RNA, 22 nt, Human
cagggagccccaauuccaugcc

SEQ ID NO: 1058188 - RNA, 19 nt, Human
aaauccaagcucaggccuc

SEQ ID NO: 1058189 - RNA, 22 nt, Human
cuccagauuccguuuauucagg

SEQ ID NO: 1058190 - RNA, 22 nt, Human
uugcugugucauuuguuuaauc

SEQ ID NO: 1058191 - RNA, 22 nt, Human
ccaggcuccccaggaggcccuu

SEQ ID NO: 1058192 - RNA, 22 nt, Human
aguguugucaaacggcucagca

SEQ ID NO: 1058193 - RNA, 22 nt, Human
ugugugaacucucugauguaca

SEQ ID NO: 1058194 - RNA, 22 nt, Human
ugcucuguucaguguaucuugu

SEQ ID NO: 1058195 - RNA, 22 nt, Human
auuaauaucccccgccguucug

SEQ ID NO: 1058196 - RNA, 22 nt, Human
uccuuggcaugccgucuucucc

SEQ ID NO: 1058197 - RNA, 22 nt, Human
acaaaugcuuaguucaccaaaa

SEQ ID NO: 1058198 - RNA, 22 nt, Human
uggcuccaggggacacgcagua

SEQ ID NO: 1058199 - RNA, 22 nt, Human
auuucauccauuaagaguacuc

SEQ ID NO: 1058200 - RNA, 22 nt, Human
uguucauucugugaccugguuc

SEQ ID NO: 1058201 - RNA, 22 nt, Human
guguguggaaugcucauuuauu

SEQ ID NO: 1058202 - RNA, 23 nt, Human
ugucuccaucucauuacuugggg

SEQ ID NO: 1058203 - RNA, 22 nt, Human
agugugaguuacaaagugugaa

SEQ ID NO: 1058204 - RNA, 22 nt, Human
acauuuguuucucuagaguagg

SEQ ID NO: 1058205 - RNA, 22 nt, Human
aucauuaacccuugaugcuggg

SEQ ID NO: 1058206 - RNA, 22 nt, Human
ugcaauuagcguauuaguuuau

SEQ ID NO: 1058207 - RNA, 22 nt, Human
uuaguguccagaguuuuuauua

SEQ ID NO: 1058208 - RNA, 22 nt, Human
ugaaucaaugaauugcacuuca

SEQ ID NO: 1058209 - RNA, 19 nt, Human
ucucccaugccugugucua

SEQ ID NO: 1058210 - RNA, 22 nt, Human
uaaucuuagacauguauuuuuc

SEQ ID NO: 1058211 - RNA, 22 nt, Human
ugcagcaucuccuugugccaug

SEQ ID NO: 1058212 - RNA, 22 nt, Human
aacacuaaaggucaguuagaag

SEQ ID NO: 1058213 - RNA, 22 nt, Human
cauucauaggaggagaugauua

SEQ ID NO: 1058214 - RNA, 22 nt, Human
ugcuugacuuaguuucucauuu

SEQ ID NO: 1058215 - RNA, 22 nt, Human
ucuuucagaaacuuugucugcg

SEQ ID NO: 1058216 - RNA, 22 nt, Human
uacauguuauuucacuauuggu

SEQ ID NO: 1058217 - RNA, 22 nt, Human
uaaguugauuauaaccacugga

SEQ ID NO: 1058218 - RNA, 22 nt, Human
aguucaauuguuuuguaaaagu

SEQ ID NO: 1058219 - RNA, 22 nt, Human
aguaauggguugaaauuuaguu

SEQ ID NO: 1058220 - RNA, 22 nt, Human
cuuuaguucuagaaagugaaac

SEQ ID NO: 1058221 - RNA, 22 nt, Human
cuauuuucccauaugguugaca

SEQ ID NO: 1058222 - RNA, 22 nt, Human
aaggcucccucuucucgagugu

SEQ ID NO: 1058223 - RNA, 22 nt, Human
auuuuguaucuuacggggacua

SEQ ID NO: 1058224 - RNA, 22 nt, Human
uagugucuuccaggacauggua

SEQ ID NO: 1058225 - RNA, 21 nt, Human
ucugaugguagaugagaugug

SEQ ID NO: 1058226 - RNA, 22 nt, Human
uaaaugaaaggguuuaauuuau

SEQ ID NO: 1058227 - RNA, 22 nt, Human
guguaucaaagcacagacuuca

SEQ ID NO: 1058228 - RNA, 22 nt, Human
ugaaaacacuuuaguuuagguc

SEQ ID NO: 1058229 - RNA, 22 nt, Human
caauuuuuaaacuaugaaguug

SEQ ID NO: 1058230 - RNA, 22 nt, Human
uuuguaguuguggaugcugaag

SEQ ID NO: 1058231 - RNA, 22 nt, Human
uuugagaagcauggcuguauuc

SEQ ID NO: 1058232 - RNA, 22 nt, Human
aauaucaucucucuuuucugca

SEQ ID NO: 1058233 - RNA, 22 nt, Human
uuuaauuuucugggcccagcag

SEQ ID NO: 1058234 - RNA, 22 nt, Human
gugguuguuuccagguuugaaa

SEQ ID NO: 1058235 - RNA, 22 nt, Human
aucuguaaauaaaaagggaggu

SEQ ID NO: 1058236 - RNA, 22 nt, Human
uuugaaauguaucaguauaggu

SEQ ID NO: 1058237 - RNA, 22 nt, Human
uuucauuauaaaaaguuggcuu

SEQ ID NO: 1058238 - RNA, 22 nt, Human
caagucugaccucugggugaag

SEQ ID NO: 1058239 - RNA, 22 nt, Human
cacagaggaugcccaagcgauc

SEQ ID NO: 1058240 - RNA, 22 nt, Human
caugcaugccgggcugacagag

SEQ ID NO: 1058241 - RNA, 22 nt, Human
cacugggagcagcuccaacauu

SEQ ID NO: 1058242 - RNA, 19 nt, Human
caggauuguuuaaagcuuu

SEQ ID NO: 1058243 - RNA, 22 nt, Human
gacuacaggugugugccaccau

SEQ ID NO: 1058244 - RNA, 22 nt, Human
gaggugaguggggucuccaggg

SEQ ID NO: 1058245 - RNA, 22 nt, Human
uuccccuugauaaugcaguaag

SEQ ID NO: 1058246 - RNA, 22 nt, Human
acagugucuccugguacccagu

SEQ ID NO: 1058247 - RNA, 22 nt, Human
auuuggucuacauuuuccaaau

SEQ ID NO: 1058248 - RNA, 22 nt, Human
ucacacuuuauuuauuucaugc

SEQ ID NO: 1058249 - RNA, 22 nt, Human
ugugaagcgugugcaggggaca

SEQ ID NO: 1058250 - RNA, 22 nt, Human
agaaguaucaggaagauucuca

SEQ ID NO: 1058251 - RNA, 22 nt, Human
agcauuagguguguuucagagg

SEQ ID NO: 1058252 - RNA, 22 nt, Human
aucacuagaguuacauugccag

SEQ ID NO: 1058253 - RNA, 22 nt, Human
uuugacaggaauucucucuagg

SEQ ID NO: 1058254 - RNA, 22 nt, Human
ggagugggaacaaugacauggu

SEQ ID NO: 1058255 - RNA, 22 nt, Human
aaguguguauuuuucuucagug

SEQ ID NO: 1058256 - RNA, 22 nt, Human
uugcaguugcuguauuuaagga

SEQ ID NO: 1058257 - RNA, 22 nt, Human
acaguguuacuugauaguguau

SEQ ID NO: 1058258 - RNA, 22 nt, Human
auuuccuggaggaauggaagca

SEQ ID NO: 1058259 - RNA, 22 nt, Human
ccagaaugugugaaauuugaug

SEQ ID NO: 1058260 - RNA, 22 nt, Human
acagugcuaucaauagcuagaa

SEQ ID NO: 1058261 - RNA, 22 nt, Human
auaguguguaaagugcagugau

SEQ ID NO: 1058262 - RNA, 22 nt, Human
auauacacuguuucaguugaag

SEQ ID NO: 1058263 - RNA, 22 nt, Human
cucucuguuaugcuuucaugaa

SEQ ID NO: 1058264 - RNA, 22 nt, Human
auuaguguuguggcuucauggc

SEQ ID NO: 1058265 - RNA, 22 nt, Human
gagauuuccauauuuuguaaca

SEQ ID NO: 1058266 - RNA, 19 nt, Human
uuugauagggcauaauaua

SEQ ID NO: 1058267 - RNA, 22 nt, Human
gugaccaucaucucagcuaguu

SEQ ID NO: 1058268 - RNA, 22 nt, Human
agcaauguuggccuauauaccu

SEQ ID NO: 1058269 - RNA, 22 nt, Human
auggcauuugaaucugucuuuu

SEQ ID NO: 1058270 - RNA, 22 nt, Human
uuuacuguuuacagcuaaugca

SEQ ID NO: 1058271 - RNA, 22 nt, Human
aauguuugaacuuugcauauuu

SEQ ID NO: 1058272 - RNA, 22 nt, Human
cauaacauccuugcuacuuuga

SEQ ID NO: 1058273 - RNA, 22 nt, Human
ugagucauguaauaaugcugcu

SEQ ID NO: 1058274 - RNA, 22 nt, Human
aucaacuuguccuugauguuaa

SEQ ID NO: 1058275 - RNA, 22 nt, Respiratory syncytial virus
ugccuugauuucacagggugug

SEQ ID NO: 1058276 - RNA, 22 nt, Respiratory syncytial virus
ugccuugauuucacagggugug

SEQ ID NO: 1058277 - RNA, 22 nt, Human
cacuuuuaacaggagaauuccc

SEQ ID NO: 1058278 - RNA, 22 nt, Human
guucuuaaagauucaucaagca

SEQ ID NO: 1058279 - RNA, 22 nt, Human
ucuguuauaaaucacacugcau

SEQ ID NO: 1058280 - RNA, 22 nt, Human
acauuuaaugauccuacuguga

SEQ ID NO: 1058281 - RNA, 23 nt, Human
gggugcugccuguagucaugcug

SEQ ID NO: 1058282 - RNA, 22 nt, Human
gagcuguucugugauugaucua

SEQ ID NO: 1058283 - RNA, 22 nt, Human
uuaagagaagaguaucuagaac

SEQ ID NO: 1058284 - RNA, 22 nt, Human
uuuuccuucugauacuccauuu

SEQ ID NO: 1058285 - RNA, 22 nt, Human
ucugaauucuuagaauuaaagg

SEQ ID NO: 1058286 - RNA, 22 nt, Human
gcucgcuuagauuuuccucuga

SEQ ID NO: 1058287 - RNA, 22 nt, Human
aagcauuucagguagagauauu

SEQ ID NO: 1058288 - RNA, 22 nt, Human
agaaaucugacugcugugcaca

SEQ ID NO: 1058289 - RNA, 23 nt, Human
aguguucagcauguaguaaauac

SEQ ID NO: 1058290 - RNA, 21 nt, Human
ccacaauucuaguuacauaug

SEQ ID NO: 1058291 - RNA, 22 nt, Human
gaauaauugugaugcuugaagu

SEQ ID NO: 1058292 - RNA, 22 nt, Human
uagcauuuagaacaccuugaga

SEQ ID NO: 1058293 - RNA, 22 nt, Human
guguaucaaagcacagacuuca

SEQ ID NO: 1058294 - RNA, 22 nt, Human
caagcagauauuuuagucaaga

SEQ ID NO: 1058295 - RNA, 22 nt, Human
aaguuugucucauuugaucuuc

SEQ ID NO: 1058296 - RNA, 23 nt, Human
gguucugccgcuuacugcugugc

SEQ ID NO: 1058297 - RNA, 22 nt, Human
uacugcugagcuggguagaagg

SEQ ID NO: 1058298 - RNA, 22 nt, Human
uuugaagauaaauauggagaaa

SEQ ID NO: 1058299 - RNA, 22 nt, Human
uuugacaugugcuuauaacuuu

SEQ ID NO: 1058300 - RNA, 21 nt, Human
aauuucagacccauuuugccu

SEQ ID NO: 1058301 - RNA, 22 nt, Human
acaaucagcacugaguuuaucu

SEQ ID NO: 1058302 - RNA, 22 nt, Human
uagaugaacagaaagccacugu

SEQ ID NO: 1058303 - RNA, 22 nt, Human
uguguggcaagcuguaugcuag

SEQ ID NO: 1058304 - RNA, 22 nt, Human
uuugcuugauuaggauauggaa

SEQ ID NO: 1058305 - RNA, 22 nt, Human
uuacaauuacuugaucucagcu

SEQ ID NO: 1058306 - RNA, 22 nt, Human
uaucuuaaaaaucgaagcagau

SEQ ID NO: 1058307 - RNA, 22 nt, Human
auuucauccauuaagaguacuc

SEQ ID NO: 1058308 - RNA, 22 nt, Human
ugguggggccagacuucagcuc

SEQ ID NO: 1058309 - RNA, 22 nt, Human
uccuuagagugguugugcuaug

SEQ ID NO: 1058310 - RNA, 22 nt, Human
aagcagaaaaacugagcuccaa

SEQ ID NO: 1058311 - RNA, 22 nt, Human
gcauucuugguggagugcuaaa

SEQ ID NO: 1058312 - RNA, 22 nt, Human
aucauugaguaaaaugaauaca

SEQ ID NO: 1058313 - RNA, 22 nt, Human
cauucauaggaggagaugauua

SEQ ID NO: 1058314 - RNA, 21 nt, Human
ggccuuggcgggggccgaauu

SEQ ID NO: 1058315 - RNA, 22 nt, Human
auugagaaggagauuggcaucu

SEQ ID NO: 1058316 - RNA, 22 nt, Human
aucaucaucuaaauugugucgc

SEQ ID NO: 1058317 - RNA, 22 nt, Human
uguucuuagguauuugacaguc

SEQ ID NO: 1058318 - RNA, 22 nt, Human
gaugugugugcccugggccugc

SEQ ID NO: 1058319 - RNA, 22 nt, Human
gggcccuggacguggcggcaga

SEQ ID NO: 1058320 - RNA, 17 nt, Human
uagauuaaacacggcca

SEQ ID NO: 1058321 - RNA, 22 nt, Human
aucuucaaagcacaucguuugu

SEQ ID NO: 1058322 - RNA, 22 nt, Human
uuccuggugguggugacagcac

SEQ ID NO: 1058323 - RNA, 22 nt, Human
ccugggcugcucauggggauga

SEQ ID NO: 1058324 - RNA, 22 nt, Human
gguguuguacauucuguggauu

SEQ ID NO: 1058325 - RNA, 22 nt, Human
aucauccauggcugaucauaaa

SEQ ID NO: 1058326 - RNA, 22 nt, Human
aaaugcaugugcuauagaugug

SEQ ID NO: 1058327 - RNA, 23 nt, Human
uuguucuuggaucuuccugaagc

SEQ ID NO: 1058328 - RNA, 22 nt, Human
ccaguucuuucugugugcaaca

SEQ ID NO: 1058329 - RNA, 22 nt, Human
uuccugguaacaaucucaaagu

SEQ ID NO: 1058330 - RNA, 22 nt, Human
auccuggguaaguuccuuuuaa

SEQ ID NO: 1058331 - RNA, 22 nt, Human
uggaccugagccuggcccugcc

SEQ ID NO: 1058332 - RNA, 22 nt, Human
guuaauuuaguagaguccagau

SEQ ID NO: 1058333 - RNA, 22 nt, Human
uuucacauuuaggcgugaauug

SEQ ID NO: 1058334 - RNA, 22 nt, Human
uuucagauuaucucaacuuugg

SEQ ID NO: 1058335 - RNA, 22 nt, Human
gcucacagccggcuggcagggg

SEQ ID NO: 1058336 - RNA, 22 nt, Human
acacaucuuagacugaaauaug

SEQ ID NO: 1058337 - RNA, 22 nt, Human
ugcaggcuauaucuuauuugac

SEQ ID NO: 1058338 - RNA, 22 nt, Human
uaacacaugucugggaugugaa

SEQ ID NO: 1058339 - RNA, 22 nt, Human
aauuaguaaccuaauuccaucu

SEQ ID NO: 1058340 - RNA, 22 nt, Human
auccucuguggauuacaccuag

SEQ ID NO: 1058341 - RNA, 22 nt, Human
ucccacccccuccaaggaggaa

SEQ ID NO: 1058342 - RNA, 22 nt, Human
auuaaauuuucacuaggcuccc

SEQ ID NO: 1058343 - RNA, 22 nt, Human
ugggcuucuggaguggggcaga

SEQ ID NO: 1058344 - RNA, 22 nt, Human
agaggcuucucggauggggcag

SEQ ID NO: 1058345 - RNA, 22 nt, Human
cccaggcacacugaagugacau

SEQ ID NO: 1058346 - RNA, 22 nt, Human
acugggcugccugguucuucua

SEQ ID NO: 1058347 - RNA, 22 nt, Human
uccugcagguggaugauucucu

SEQ ID NO: 1058348 - RNA, 22 nt, Human
ggcuuuauuaagcaggguaagu

SEQ ID NO: 1058349 - RNA, 22 nt, Human
uguguugugacauucuuggaug

SEQ ID NO: 1058350 - RNA, 22 nt, Human
ucacuguaaaguaauacuguca

SEQ ID NO: 1058351 - RNA, 22 nt, Human
gagaccucuugguaucgcuagg

SEQ ID NO: 1058352 - RNA, 22 nt, Human
uuuucauuuacauuagggaaga

SEQ ID NO: 1058353 - RNA, 22 nt, Human
agauuuauguggucacacucag

SEQ ID NO: 1058354 - RNA, 22 nt, Human
gguucccggaucuccgaguccc

SEQ ID NO: 1058355 - RNA, 22 nt, Human
cuguaugaguugggaauagaau

SEQ ID NO: 1058356 - RNA, 22 nt, Human
uugugcaauuuaaaaucuuccu

SEQ ID NO: 1058357 - RNA, 22 nt, Human
guuuauuauucaacuucauguu

SEQ ID NO: 1058358 - RNA, 22 nt, Human
cgaggcagggaagcugcaaaag

SEQ ID NO: 1058359 - RNA, 22 nt, Human
ccugggcuccacuccaagagca

SEQ ID NO: 1058360 - RNA, 22 nt, Human
ugucuuuagaaagaagcagaca

SEQ ID NO: 1058361 - RNA, 22 nt, Human
ugcaggcugcucaagacuuagu

SEQ ID NO: 1058362 - RNA, 22 nt, Human
cccaggcaggagugugguggcu

SEQ ID NO: 1058363 - RNA, 22 nt, Human
gcuggcagggugguugagagag

SEQ ID NO: 1058364 - RNA, 22 nt, Human
cccaggcagugugugcaugcgu

SEQ ID NO: 1058365 - RNA, 22 nt, Human
cuuucauaaaggaaaugaugag

SEQ ID NO: 1058366 - RNA, 22 nt, Human
ccucuccuugcacccgucccgc

SEQ ID NO: 1058367 - RNA, 23 nt, Human
cauccaggagcugagucugacug

SEQ ID NO: 1058368 - RNA, 22 nt, Human
uagcuuuaaaaaucaucaaagc

SEQ ID NO: 1058369 - RNA, 23 nt, Human
agcuucauugaccuccgcagggg

SEQ ID NO: 1058370 - RNA, 22 nt, Human
gcagcuuuuuggaugucaguua

SEQ ID NO: 1058371 - RNA, 22 nt, Human
acaugauuuuaguaucauaaua

SEQ ID NO: 1058372 - RNA, 19 nt, Human
ccagcccacagugacuuuc

SEQ ID NO: 1058373 - RNA, 19 nt, Human
cucagagaggggcagugcc

SEQ ID NO: 1058374 - RNA, 22 nt, Human
ugcagggauuauguagggguug

SEQ ID NO: 1058375 - RNA, 22 nt, Human
uuucacaucagagguagauuag

SEQ ID NO: 1058376 - RNA, 22 nt, Human
cagguggccaguacucaaggau

SEQ ID NO: 1058377 - RNA, 21 nt, Human
ugcaggcuguuuaagaggcaa

SEQ ID NO: 1058378 - RNA, 22 nt, Human
uucacauaaugauacaaagcuu

SEQ ID NO: 1058379 - RNA, 22 nt, Human
agaaaguuuugugcuauauaug

SEQ ID NO: 1058380 - RNA, 22 nt, Human
acccagcaugacaccugcacau

SEQ ID NO: 1058381 - RNA, 21 nt, Human
ccuuuacaauuuugcauuccu

SEQ ID NO: 1058382 - RNA, 22 nt, Human
cuugggaaugcuaacagaugac

SEQ ID NO: 1058383 - RNA, 22 nt, Human
uaugaacucuggagucugagug

SEQ ID NO: 1058384 - RNA, 22 nt, Human
aacacauaggcagagcaugaca

SEQ ID NO: 1058385 - RNA, 22 nt, Human
aaauggauggaauugacauuua

SEQ ID NO: 1058386 - RNA, 22 nt, Human
cuggaucuguuugugcuugugg

SEQ ID NO: 1058387 - RNA, 22 nt, Human
ccuggcagguggcgcccucggc

SEQ ID NO: 1058388 - RNA, 22 nt, Human
gcagccuccgcacugcgagucc

SEQ ID NO: 1058389 - RNA, 22 nt, Human
uuguuaaagaugcagauuccau

SEQ ID NO: 1058390 - RNA, 22 nt, Human
uccugccuguuuaccuguacuu

SEQ ID NO: 1058391 - RNA, 22 nt, Human
uuugucauaucacacaauuuug

SEQ ID NO: 1058392 - RNA, 22 nt, Human
uucaguuccauuucaggugggu

SEQ ID NO: 1058393 - RNA, 22 nt, Human
agcuagaaguacagccauauga

SEQ ID NO: 1058394 - RNA, 18 nt, Human
aggaaagaaaggcaggug

SEQ ID NO: 1058395 - RNA, 22 nt, Human
uuuuucauauuccccucucugg

SEQ ID NO: 1058396 - RNA, 22 nt, Human
cacaggcuuccaguccccagcu

SEQ ID NO: 1058397 - RNA, 22 nt, Human
cugccugcuuaccaugcaucag

SEQ ID NO: 1058398 - RNA, 22 nt, Human
ccugggcuugcaucugugcugg

SEQ ID NO: 1058399 - RNA, 22 nt, Human
ugggcuccagcaccugugcucu

SEQ ID NO: 1058400 - RNA, 22 nt, Human
ccaggcucugcaaaaucaggcu

SEQ ID NO: 1058401 - RNA, 22 nt, Human
ugaaccacaugcaaagugaaua

SEQ ID NO: 1058402 - RNA, 22 nt, Human
agcaggcuaaauaauaauacau

SEQ ID NO: 1058403 - RNA, 22 nt, Human
cccagccugugacagccguccu

SEQ ID NO: 1058404 - RNA, 22 nt, Human
aaggcucccucuucucgagugu

SEQ ID NO: 1058405 - RNA, 22 nt, Human
aucuagcaguguuauaauugga

SEQ ID NO: 1058406 - RNA, 22 nt, Human
ccacccuaacaauccuuacugu

SEQ ID NO: 1058407 - RNA, 22 nt, Human
ucugcagaaggaaucagcugag

SEQ ID NO: 1058408 - RNA, 22 nt, Human
aucugucaucagcaccacaggu

SEQ ID NO: 1058409 - RNA, 22 nt, Human
cagcuucuucaguccuggagcu

SEQ ID NO: 1058410 - RNA, 22 nt, Human
ugcaggcuccaugaggacaggc

SEQ ID NO: 1058411 - RNA, 22 nt, Human
gccugcaggcuguaguuuguga

SEQ ID NO: 1058412 - RNA, 22 nt, Human
ucuggcaggaccaugaagcgua

SEQ ID NO: 1058413 - RNA, 22 nt, Human
uauuuguauguguguacauaua

SEQ ID NO: 1058414 - RNA, 22 nt, Human
acuggcagccacaacuggcagg

SEQ ID NO: 1058415 - RNA, 19 nt, Human
aaaguuuuauucucauuug

SEQ ID NO: 1058416 - RNA, 22 nt, Human
uaauuucaauagcuugcauaau

SEQ ID NO: 1058417 - RNA, 22 nt, Human
cauacuuuugcccugacauucu

SEQ ID NO: 1058418 - RNA, 22 nt, Human
cagguuggggacuuaggaugac

SEQ ID NO: 1058419 - RNA, 22 nt, Human
cccaggcagcccuucugacgca

SEQ ID NO: 1058420 - RNA, 22 nt, Human
agagagcauggcacagaggggu

SEQ ID NO: 1058421 - RNA, 22 nt, Human
cagguugguauucaucuccaca

SEQ ID NO: 1058422 - RNA, 22 nt, Human
ggcccagcgaggccaccuacag

SEQ ID NO: 1058423 - RNA, 20 nt, Human
ucagauuuuucuaacuuuga

SEQ ID NO: 1058424 - RNA, 22 nt, Human
uccagaccaugugagaggcgca

SEQ ID NO: 1058425 - RNA, 22 nt, Human
uguacuaaggcuguguagaugu

SEQ ID NO: 1058426 - RNA, 22 nt, Human
acagauuuaggacuguagcgau

SEQ ID NO: 1058427 - RNA, 22 nt, Human
uaguuaggguucugcagagaca

SEQ ID NO: 1058428 - RNA, 22 nt, Human
uuuaaagugcugcuccuauccu

SEQ ID NO: 1058429 - RNA, 22 nt, Human
gagggcucugaaaggaggucac

SEQ ID NO: 1058430 - RNA, 22 nt, Human
ugucuuuagccagcagucuucu

SEQ ID NO: 1058431 - RNA, 23 nt, Human
uccaggcacgcauuucuucuagc

SEQ ID NO: 1058432 - RNA, 22 nt, Human
accugcagcuaaagauguaggg

SEQ ID NO: 1058433 - RNA, 22 nt, Human
gcuuggccagcagccgggaugc

SEQ ID NO: 1058434 - RNA, 22 nt, Human
uuucacauaucaacucuauccu

SEQ ID NO: 1058435 - RNA, 22 nt, Human
uaaaggguagguuuuacuguaa

SEQ ID NO: 1058436 - RNA, 22 nt, Human
uccugugccaucucuagagacu

SEQ ID NO: 1058437 - RNA, 22 nt, Human
auuccacacaguaauacucaau

SEQ ID NO: 1058438 - RNA, 22 nt, Human
agggaccugcucacugccuggc

SEQ ID NO: 1058439 - RNA, 22 nt, Human
gagggaccuuuacacagacauu

SEQ ID NO: 1058440 - RNA, 22 nt, Human
cacagucacauaucuaugugug

SEQ ID NO: 1058441 - RNA, 22 nt, Human
ccuggcagcaggugggcccgug

SEQ ID NO: 1058442 - RNA, 22 nt, Human
aauaauuauuugagagcagacc

SEQ ID NO: 1058443 - RNA, 22 nt, Human
ucaucaguuuagaaaaaauaug

SEQ ID NO: 1058444 - RNA, 22 nt, Human
guuuauuaacugucaagugauu

SEQ ID NO: 1058445 - RNA, 22 nt, Human
cacauacauucauguuacucua

SEQ ID NO: 1058446 - RNA, 18 nt, Human
uagggcucuagggaguga

SEQ ID NO: 1058447 - RNA, 20 nt, Human
uauuuacaacuuagagccuc

SEQ ID NO: 1058448 - RNA, 22 nt, Human
auucacaugugcuucuuaucac

SEQ ID NO: 1058449 - RNA, 22 nt, Human
uuuuucaugagacuagaaguca

SEQ ID NO: 1058450 - RNA, 22 nt, Human
guccucuguuagaaaugugcuu

SEQ ID NO: 1058451 - RNA, 22 nt, Human
ugcaggcucacccuggagcuga

SEQ ID NO: 1058452 - RNA, 17 nt, Human
uuaagguggaucagcac

SEQ ID NO: 1058453 - RNA, 22 nt, Human
cuucuggggauggagcccagaa

SEQ ID NO: 1058454 - RNA, 22 nt, Human
augaucucauucuuucaaaggg

SEQ ID NO: 1058455 - RNA, 22 nt, Human
agagggugcuggagagacauug

SEQ ID NO: 1058456 - RNA, 22 nt, Human
aaaguuguucaguaagaaacuc

SEQ ID NO: 1058457 - RNA, 22 nt, Human
uccaagcuugcuuuagccacag

SEQ ID NO: 1058458 - RNA, 19 nt, Human
agcauuuggaauucuacac

SEQ ID NO: 1058459 - RNA, 22 nt, Human
gccaaugacagucucaguucug

SEQ ID NO: 1058460 - RNA, 22 nt, Human
caaauaguaugagcaaugauuc

SEQ ID NO: 1058461 - RNA, 22 nt, Human
uuucauugaugggugauagaaa

SEQ ID NO: 1058462 - RNA, 22 nt, Human
auguagaauggugauuggcagg

SEQ ID NO: 1058463 - RNA, 22 nt, Human
ugcuuuauucgacaucugguag

SEQ ID NO: 1058464 - RNA, 22 nt, Human
cauuuguauagugcuuagacca

SEQ ID NO: 1058465 - RNA, 22 nt, Human
gucacaggcaguaacuaggacc

SEQ ID NO: 1058466 - RNA, 22 nt, Human
augggcuggggaagcucacucc

SEQ ID NO: 1058467 - RNA, 22 nt, Human
aggaggcugcaacccugaggcc

SEQ ID NO: 1058468 - RNA, 22 nt, Human
gccuggaaucaugcagggguua

SEQ ID NO: 1058469 - RNA, 22 nt, Human
ugcuuuauucaggguuuacccc

SEQ ID NO: 1058470 - RNA, 22 nt, Human
ggcccagccucagacaugcccu

SEQ ID NO: 1058471 - RNA, 22 nt, Human
caagcuuguuucuccugggggu

SEQ ID NO: 1058472 - RNA, 22 nt, Human
acaggcucaguucacuggauuu

SEQ ID NO: 1058473 - RNA, 22 nt, Human
cuccugaggaaaagcuugguca

SEQ ID NO: 1058474 - RNA, 21 nt, Human
uuuagggaccaggucauaggc

SEQ ID NO: 1058475 - RNA, 22 nt, Human
gcuggcaguguauuguuagcug

SEQ ID NO: 1058476 - RNA, 22 nt, Human
ucuggggaugagugaugucgua

SEQ ID NO: 1058477 - RNA, 22 nt, Human
uccaggcaucccccaggacaga

SEQ ID NO: 1058478 - RNA, 22 nt, Human
agaauauugaaaguucuugaca

SEQ ID NO: 1058479 - RNA, 22 nt, Human
uaucaauugggccaaaugguac

SEQ ID NO: 1058480 - RNA, 22 nt, Human
uaugcacacauguaugcaugug

SEQ ID NO: 1058481 - RNA, 22 nt, Human
gccaagcuggaugaagagguug

SEQ ID NO: 1058482 - RNA, 22 nt, Human
ccugggcuguaccugugcgcgg

SEQ ID NO: 1058483 - RNA, 22 nt, Human
gcuggcagagagcuggugagga

SEQ ID NO: 1058484 - RNA, 22 nt, Human
acaggugguagaguggaaagag

SEQ ID NO: 1058485 - RNA, 23 nt, Human
gggaccugguaggaggugauugg

SEQ ID NO: 1058486 - RNA, 22 nt, Human
cuagaaauauuuuacagucaag

SEQ ID NO: 1058487 - RNA, 22 nt, Human
cuacugaguccuucagcugcca

SEQ ID NO: 1058488 - RNA, 22 nt, Human
gaggagcuggcagcgucuccgc

SEQ ID NO: 1058489 - RNA, 22 nt, Human
acugccaaugguaguuugaugg

SEQ ID NO: 1058490 - RNA, 22 nt, Human
ugggcuuccuggagccugugcu

SEQ ID NO: 1058491 - RNA, 22 nt, Human
guugggaaggcaagaaguagaa

SEQ ID NO: 1058492 - RNA, 20 nt, Human
ugggcugaggaucaggugcc

SEQ ID NO: 1058493 - RNA, 22 nt, Human
ugggcugaaaugcuguggacua

SEQ ID NO: 1058494 - RNA, 22 nt, Human
auccaggccccaagaccccgac

SEQ ID NO: 1058495 - RNA, 22 nt, Human
cuucuggguguggagugaggac

SEQ ID NO: 1058496 - RNA, 22 nt, Human
ucccagccuggacccugccagu

SEQ ID NO: 1058497 - RNA, 22 nt, Human
caguuuauagcucuagcagcuu

SEQ ID NO: 1058498 - RNA, 22 nt, Human
acugggcucccaggcuugucau

SEQ ID NO: 1058499 - RNA, 22 nt, Human
ucagcuuuugucagaaauugua

SEQ ID NO: 1058500 - RNA, 22 nt, Human
augcagcuucaggauuaugaug

SEQ ID NO: 1058501 - RNA, 22 nt, Human
ucagaaagaacacaggcaguag

SEQ ID NO: 1058502 - RNA, 22 nt, Human
cuggccucuguguucaccauag

SEQ ID NO: 1058503 - RNA, 22 nt, Human
uuuucuuauggugaagcacaaa

SEQ ID NO: 1058504 - RNA, 22 nt, Human
gcagagaccccgcagugaggcc

SEQ ID NO: 1058505 - RNA, 22 nt, Human
ucaggauggagggaagcacaga

SEQ ID NO: 1058506 - RNA, 22 nt, Human
gggacaauggaggccucucucc

SEQ ID NO: 1058507 - RNA, 22 nt, Human
gugaaacagaagcuccuggaau

SEQ ID NO: 1058508 - RNA, 22 nt, Human
uucucuuaucuggcauuauugg

SEQ ID NO: 1058509 - RNA, 22 nt, Human
cccaggcagaauuaguguuuca

SEQ ID NO: 1058510 - RNA, 22 nt, Human
ucccaggcugggggccugaagu

SEQ ID NO: 1058511 - RNA, 22 nt, Human
auuagagguacaaaccuucacu

SEQ ID NO: 1058512 - RNA, 22 nt, Human
acugggcuuauuucuugugaac

SEQ ID NO: 1058513 - RNA, 22 nt, Human
aaagauucgagcgauguauaaa

SEQ ID NO: 1058514 - RNA, 22 nt, Human
ccuggcagcgugccgagcugcg

SEQ ID NO: 1058515 - RNA, 18 nt, Human
gccugcaggcacgggggu

SEQ ID NO: 1058516 - RNA, 22 nt, Human
cacaugaugguggaagccauag

SEQ ID NO: 1058517 - RNA, 22 nt, Human
gugugagggacagagaaagggg

SEQ ID NO: 1058518 - RNA, 22 nt, Human
ucuggcaggucaaucauucuuu

SEQ ID NO: 1058519 - RNA, 18 nt, Human
cuguccaguagacucugc

SEQ ID NO: 1058520 - RNA, 22 nt, Human
gguauaaaugaucagaucgcug

SEQ ID NO: 1058521 - RNA, 20 nt, Human
cacaacuguccacaugcucc

SEQ ID NO: 1058522 - RNA, 22 nt, Human
auauuaggcaaggagauuauuu

SEQ ID NO: 1058523 - RNA, 17 nt, Human
gcccacccuuaggagcu

SEQ ID NO: 1058524 - RNA, 22 nt, Human
uaaucuguauuccuacuuugca

SEQ ID NO: 1058525 - RNA, 22 nt, Human
uaaguuuucuggaauaacuugg

SEQ ID NO: 1058526 - RNA, 22 nt, Human
caaagagcuguucagugucgcu

SEQ ID NO: 1058527 - RNA, 22 nt, Human
cccugcagagaccacugaccuu

SEQ ID NO: 1058528 - RNA, 22 nt, Human
aggaccuguaccucagcaucua

SEQ ID NO: 1058529 - RNA, 22 nt, Human
gcuucugguagaauucaauaga

SEQ ID NO: 1058530 - RNA, 22 nt, Human
uagaacauaagucauucauuug

SEQ ID NO: 1058531 - RNA, 22 nt, Human
ugcuucugacuaagcugcauga

SEQ ID NO: 1058532 - RNA, 22 nt, Human
cuuacaaauacacuuaggagag

SEQ ID NO: 1058533 - RNA, 22 nt, Human
agaucuuuagugaagcuaaauc

SEQ ID NO: 1058534 - RNA, 22 nt, Human
acagcuuuaguguggguggugc

SEQ ID NO: 1058535 - RNA, 22 nt, Human
uuuaaaauuuagaccucuccac

SEQ ID NO: 1058536 - RNA, 22 nt, Human
ccugccucccagagguccucua

SEQ ID NO: 1058537 - RNA, 22 nt, Human
uuguacaaaggauuuggaagag

SEQ ID NO: 1058538 - RNA, 22 nt, Human
ucugucaucucuaaaauagaaa

SEQ ID NO: 1058539 - RNA, 22 nt, Human
aaaguguugauaugugacaucc

SEQ ID NO: 1058540 - RNA, 22 nt, Human
cacacugucagguaaauaacac

SEQ ID NO: 1058541 - RNA, 19 nt, Human
ggcauccacgaaugcagag

SEQ ID NO: 1058542 - RNA, 22 nt, Human
guagggacaauauguuauuaga

SEQ ID NO: 1058543 - RNA, 18 nt, Human
cucugucauaagugucau

SEQ ID NO: 1058544 - RNA, 22 nt, Human
auguccaggaucuauccccaga

SEQ ID NO: 1058545 - RNA, 22 nt, Human
acaggacauguaccaggugguc

SEQ ID NO: 1058546 - RNA, 20 nt, Human
ucacacaugguaagcuauga

SEQ ID NO: 1058547 - RNA, 22 nt, Human
uguagaaagcucuucugaaauc

SEQ ID NO: 1058548 - RNA, 22 nt, Human
aucugucuugccuugcauauuu

SEQ ID NO: 1058549 - RNA, 22 nt, Human
ugugucaauuuucauuccuacu

SEQ ID NO: 1058550 - RNA, 22 nt, Human
uagcuuuaggcacguuugaauu

SEQ ID NO: 1058551 - RNA, 22 nt, Human
cucaucaccacauauaacaaag

SEQ ID NO: 1058552 - RNA, 22 nt, Human
gagaaagauuguccuucagggg

SEQ ID NO: 1058553 - RNA, 22 nt, Human
gcacacacuguuuuccucacau

SEQ ID NO: 1058554 - RNA, 22 nt, Human
ugcagggaauccagucuagggu

SEQ ID NO: 1058555 - RNA, 16 nt, Human
uucugucacguacggc

SEQ ID NO: 1058556 - RNA, 22 nt, Human
guccucugucccuggggcacgg

SEQ ID NO: 1058557 - RNA, 22 nt, Human
uccaggcauaaugcccaguggu

SEQ ID NO: 1058558 - RNA, 22 nt, Human
agcuuuauauuuaaugaauucu

SEQ ID NO: 1058559 - RNA, 22 nt, Human
aagggcucuucuauuuauggcc

SEQ ID NO: 1058560 - RNA, 19 nt, Human
gggagcugaggucuuuggu

SEQ ID NO: 1058561 - RNA, 22 nt, Human
uuucacauucagauauagacuu

SEQ ID NO: 1058562 - RNA, 22 nt, Human
ggcucugcagugacuugagggg

SEQ ID NO: 1058563 - RNA, 22 nt, Human
cuggcaguuggcauuggcaucu

SEQ ID NO: 1058564 - RNA, 22 nt, Human
ccuggcagggcugcaguaaugg

SEQ ID NO: 1058565 - RNA, 22 nt, Human
acuggcagguccaucgcccuuu

SEQ ID NO: 1058566 - RNA, 22 nt, Human
aauauuuguuaguguuuuaaug

SEQ ID NO: 1058567 - RNA, 22 nt, Human
cauuuauucaugaucuguagcu

SEQ ID NO: 1058568 - RNA, 22 nt, Human
gcaggcucagagcagauuagca

SEQ ID NO: 1058569 - RNA, 22 nt, Human
cuccuggcuuucccagaccagg

SEQ ID NO: 1058570 - RNA, 20 nt, Human
auguccagugacuggaccau

SEQ ID NO: 1058571 - RNA, 22 nt, Human
cccacccugggaagcuaggcag

SEQ ID NO: 1058572 - RNA, 22 nt, Human
cuuaggaacgcucugccuagug

SEQ ID NO: 1058573 - RNA, 20 nt, Human
ugccaggcacggagugcaug

SEQ ID NO: 1058574 - RNA, 22 nt, Human
cuucugggugccugugaguguu

SEQ ID NO: 1058575 - RNA, 21 nt, Human
agagucugagugugcaagggc

SEQ ID NO: 1058576 - RNA, 22 nt, Human
guccucuguuuccaucugacuu

SEQ ID NO: 1058577 - RNA, 22 nt, Human
uagggcucugcucaucaguugu

SEQ ID NO: 1058578 - RNA, 17 nt, Human
ugaauucaaucugcacu

SEQ ID NO: 1058579 - RNA, 19 nt, Human
gcuggggaauggauauuga

SEQ ID NO: 1058580 - RNA, 22 nt, Human
auuugcuuuuacuauguuaaaa

SEQ ID NO: 1058581 - RNA, 22 nt, Human
uggaccugcuggaugggcaggu

SEQ ID NO: 1058582 - RNA, 22 nt, Human
ugcauaaagugccauaguauua

SEQ ID NO: 1058583 - RNA, 22 nt, Human
cugcaggcccccuuccuggagu

SEQ ID NO: 1058584 - RNA, 22 nt, Human
ugccuacauuccuugcuuaugg

SEQ ID NO: 1058585 - RNA, 22 nt, Human
ugcucugcacaucccucacaaa

SEQ ID NO: 1058586 - RNA, 22 nt, Human
cauuuguauguuccuccuuagg

SEQ ID NO: 1058587 - RNA, 22 nt, Human
ccugggcucaagugauccuccu

SEQ ID NO: 1058588 - RNA, 22 nt, Human
aucuguuccccuaugcucucua

SEQ ID NO: 1058589 - RNA, 22 nt, Human
cacauuccuggugcucagcagc

SEQ ID NO: 1058590 - RNA, 22 nt, Human
cagcuuguuuuauuuggggacc

SEQ ID NO: 1058591 - RNA, 22 nt, Human
gauucuuacuucuaagcaagcu

SEQ ID NO: 1058592 - RNA, 22 nt, Human
ccccacacucuuuacauucaua

SEQ ID NO: 1058593 - RNA, 22 nt, Human
agagucccagggacacuccaga

SEQ ID NO: 1058594 - RNA, 22 nt, Human
augaaaaguucgaucuagaagg

SEQ ID NO: 1058595 - RNA, 19 nt, Human
ccaaaagcaauuccaagua

SEQ ID NO: 1058596 - RNA, 22 nt, Human
ugugugaaggaauauauacuca

SEQ ID NO: 1058597 - RNA, 22 nt, Human
ugaccaggauacugcagggaug

SEQ ID NO: 1058598 - RNA, 22 nt, Human
uacauaauugucuuuguccuca

SEQ ID NO: 1058599 - RNA, 22 nt, Human
uggaacacugaucauugccuuu

SEQ ID NO: 1058600 - RNA, 22 nt, Human
augaagcugaaaaaggcauaua

SEQ ID NO: 1058601 - RNA, 22 nt, Human
aauucuguaacuuuacugaauu

SEQ ID NO: 1058602 - RNA, 22 nt, Human
gagcuuuaggagaaggagguca

SEQ ID NO: 1058603 - RNA, 22 nt, Human
gcugcuaagcguuucuguucca

SEQ ID NO: 1058604 - RNA, 22 nt, Human
aggccuccuggcuccaggccuu

SEQ ID NO: 1058605 - RNA, 20 nt, Human
agcuuugguuaagccagugg

SEQ ID NO: 1058606 - RNA, 16 nt, Human
ugggaccuguggccaa

SEQ ID NO: 1058607 - RNA, 22 nt, Human
agaaagaggaugcagaucucau

SEQ ID NO: 1058608 - RNA, 22 nt, Human
augcuuuauuauuuugcaggga

SEQ ID NO: 1058609 - RNA, 22 nt, Human
gucuggaaggaggagauggagc

SEQ ID NO: 1058610 - RNA, 22 nt, Human
uggacuggaaugcugauccucu

SEQ ID NO: 1058611 - RNA, 22 nt, Human
uagucaaaccucagaauacccc

SEQ ID NO: 1058612 - RNA, 22 nt, Human
aucacauugccagugauuaccc

SEQ ID NO: 1058613 - RNA, 22 nt, Human
gacucugggcugagccagggcc

SEQ ID NO: 1058614 - RNA, 22 nt, Human
aucaaguuuucuuaguugacug

SEQ ID NO: 1058615 - RNA, 20 nt, Human
gcauccagacacccagcugc

SEQ ID NO: 1058616 - RNA, 22 nt, Human
cuuccucccccacacacucacu

SEQ ID NO: 1058617 - RNA, 22 nt, Human
uacagccacaggugacucucau

SEQ ID NO: 1058618 - RNA, 22 nt, Human
ugaaguuguuaagguugccauu

SEQ ID NO: 1058619 - RNA, 22 nt, Human
aaguaugacauuuaagacaauu

SEQ ID NO: 1058620 - RNA, 22 nt, Human
cucugggcacuguauggguucu

SEQ ID NO: 1058621 - RNA, 22 nt, Human
auauaauuguucugaaguguuu

SEQ ID NO: 1058622 - RNA, 22 nt, Human
aaacacaucauucaugucguca

SEQ ID NO: 1058623 - RNA, 22 nt, Human
acagacuggccugucucgcacc

SEQ ID NO: 1058624 - RNA, 22 nt, Human
ugcuuaaacccugaucaugugu

SEQ ID NO: 1058625 - RNA, 22 nt, Human
aagggcucugcugucucucccc

SEQ ID NO: 1058626 - RNA, 22 nt, Human
uuuuucuugugcuggaucuaau

SEQ ID NO: 1058627 - RNA, 22 nt, Human
cuagggaccucagcuccuggag

SEQ ID NO: 1058628 - RNA, 22 nt, Human
acugcuuacccggccugacuuc

SEQ ID NO: 1058629 - RNA, 22 nt, Human
gccaggcacaguucuaggugcu

SEQ ID NO: 1058630 - RNA, 22 nt, Human
cuggcaguauuaagagaaguga

SEQ ID NO: 1058631 - RNA, 22 nt, Human
uguaugaagacuucuucugugu

SEQ ID NO: 1058632 - RNA, 22 nt, Human
ccugggcuuugcuggcaaggcc

SEQ ID NO: 1058633 - RNA, 22 nt, Human
caggcauggugagaacucagcc

SEQ ID NO: 1058634 - RNA, 22 nt, Human
cagagcucagagcagggcacuc

SEQ ID NO: 1058635 - RNA, 22 nt, Human
gugcaggguagcgacggcagga

SEQ ID NO: 1058636 - RNA, 22 nt, Human
uuuaauuuuccucuuccuggag

SEQ ID NO: 1058637 - RNA, 22 nt, Human
ccuggcagaaagaguuacaccu

SEQ ID NO: 1058638 - RNA, 22 nt, Human
ggcacagggggcugaggacuag

SEQ ID NO: 1058639 - RNA, 21 nt, Human
agugccaguagguauggagga

SEQ ID NO: 1058640 - RNA, 22 nt, Human
guccucuggccuuucccaggac

SEQ ID NO: 1058641 - RNA, 22 nt, Human
cagauuuaccuaacuccaaguu

SEQ ID NO: 1058642 - RNA, 22 nt, Human
ucuaggagcaugaagggaaggc

SEQ ID NO: 1058643 - RNA, 22 nt, Human
uuggaacaugccgggguccagg

SEQ ID NO: 1058644 - RNA, 22 nt, Human
uauauguaaauaagucuaaugu

SEQ ID NO: 1058645 - RNA, 22 nt, Human
uguuuauuacaguucuuggaau

SEQ ID NO: 1058646 - RNA, 22 nt, Human
ggggcugauggaacucaggccu

SEQ ID NO: 1058647 - RNA, 22 nt, Human
uaauuuuacuuccugagcaccu

SEQ ID NO: 1058648 - RNA, 18 nt, Human
cuacauucauaggaaagg

SEQ ID NO: 1058649 - RNA, 22 nt, Human
ugcaggcuggcagugcugaaau

SEQ ID NO: 1058650 - RNA, 22 nt, Human
cuucugggcauggcagagccug

SEQ ID NO: 1058651 - RNA, 22 nt, Human
caagcucugggauagcagagag

SEQ ID NO: 1058652 - RNA, 22 nt, Human
agcuuuaucagaggagucucua

SEQ ID NO: 1058653 - RNA, 22 nt, Human
uccccacacagauacagaguag

SEQ ID NO: 1058654 - RNA, 22 nt, Human
ucaauauauuccauguuuucuc

SEQ ID NO: 1058655 - RNA, 22 nt, Human
ucuggggauaagacccagguau

SEQ ID NO: 1058656 - RNA, 22 nt, Human
uaugaagcuuugaaaagcuuac

SEQ ID NO: 1058657 - RNA, 22 nt, Human
gcagggacagggcagggccuuu

SEQ ID NO: 1058658 - RNA, 22 nt, Human
cuauuagguaugcagccuauuu

SEQ ID NO: 1058659 - RNA, 22 nt, Human
cagcuugaaauauuaggagaug

SEQ ID NO: 1058660 - RNA, 22 nt, Human
ucugggcugaaaugaaggccuu

SEQ ID NO: 1058661 - RNA, 22 nt, Human
aucacaauguacguuaaaaugu

SEQ ID NO: 1058662 - RNA, 22 nt, Human
agcaggcugccuuccaaagccu

SEQ ID NO: 1058663 - RNA, 22 nt, Human
ucacauuuucuacuacuguacg

SEQ ID NO: 1058664 - RNA, 22 nt, Human
ccacauacaaauggggugcugu

SEQ ID NO: 1058665 - RNA, 22 nt, Human
ggauuucuuccuuccucagaag

SEQ ID NO: 1058666 - RNA, 22 nt, Human
accaggcagcacuuuccuugca

SEQ ID NO: 1058667 - RNA, 22 nt, Human
cauuuauucauuugcuagggcu

SEQ ID NO: 1058668 - RNA, 22 nt, Human
cacauacaaggcacacuggagg

SEQ ID NO: 1058669 - RNA, 22 nt, Human
agaagaaaugaggccguucugc

SEQ ID NO: 1058670 - RNA, 22 nt, Human
augacugcucugggcucccaug

SEQ ID NO: 1058671 - RNA, 22 nt, Human
ucuuaaaccacaaaauucagag

SEQ ID NO: 1058672 - RNA, 22 nt, Human
aguaugaaccuggguucuggau

SEQ ID NO: 1058673 - RNA, 22 nt, Human
gggaccuggcgagggucacaca

SEQ ID NO: 1058674 - RNA, 22 nt, Human
gcacccagcccagggcgugaug

SEQ ID NO: 1058675 - RNA, 22 nt, Human
acuggggagugguuuugggaag

SEQ ID NO: 1058676 - RNA, 22 nt, Human
cagcuuuauuucacguguuugu

SEQ ID NO: 1058677 - RNA, 22 nt, Human
ccuacauucucugaguuuuccu

SEQ ID NO: 1058678 - RNA, 22 nt, Human
cugggcugcuguccacuagggu

SEQ ID NO: 1058679 - RNA, 22 nt, Human
ucaggagcucuucccuggugug

SEQ ID NO: 1058680 - RNA, 22 nt, Human
ucagcuuuccuugcuuuagauu

SEQ ID NO: 1058681 - RNA, 22 nt, Human
aucugucaggagcaaggacuac

SEQ ID NO: 1058682 - RNA, 22 nt, Human
aaguaugaaucaaagacuaucu

SEQ ID NO: 1058683 - RNA, 22 nt, Human
aucagagaaauggagggcgcuu

SEQ ID NO: 1058684 - RNA, 22 nt, Human
ccuggcagacugugagggcagg

SEQ ID NO: 1058685 - RNA, 22 nt, Human
gguuucaacuucaaccucucca

SEQ ID NO: 1058686 - RNA, 22 nt, Human
gccaggcagacaggucaucagg

SEQ ID NO: 1058687 - RNA, 22 nt, Human
ucugcucuguggcuucagcuaa

SEQ ID NO: 1058688 - RNA, 22 nt, Human
auuucucaguguacauuauguu

SEQ ID NO: 1058689 - RNA, 22 nt, Human
uggaccugggguggccuccucu

SEQ ID NO: 1058690 - RNA, 22 nt, Human
aagagcaucgguggagccccca

SEQ ID NO: 1058691 - RNA, 22 nt, Human
ccaggccuuccaguacgcagaa

SEQ ID NO: 1058692 - RNA, 21 nt, Human
acacacucugagucuucuauu

SEQ ID NO: 1058693 - RNA, 22 nt, Human
gccugcagggugaugggcugcc

SEQ ID NO: 1058694 - RNA, 17 nt, Human
gcauccaguaacaugcc

SEQ ID NO: 1058695 - RNA, 22 nt, Human
cuacauaaucuggauuugucug

SEQ ID NO: 1058696 - RNA, 20 nt, Human
ugcagggcugccucccagcu

SEQ ID NO: 1058697 - RNA, 22 nt, Human
ggcaggcugcuugggucauguc

SEQ ID NO: 1058698 - RNA, 22 nt, Human
ucccacauuacccugacugaca

SEQ ID NO: 1058699 - RNA, 22 nt, Human
ucuggcagguucccauguuaug

SEQ ID NO: 1058700 - RNA, 22 nt, Human
cuuuggaauauuuuauugagaa

SEQ ID NO: 1058701 - RNA, 22 nt, Human
uccaggaggccucauuuccugu

SEQ ID NO: 1058702 - RNA, 22 nt, Human
ccaggcucugcgcuggacaugg

SEQ ID NO: 1058703 - RNA, 22 nt, Human
ugucagagcaaugagguucagc

SEQ ID NO: 1058704 - RNA, 22 nt, Human
acuaaagaagccaaaguuuucu

SEQ ID NO: 1058705 - RNA, 22 nt, Human
ucccacccauccugcaucucuu

SEQ ID NO: 1058706 - RNA, 22 nt, Human
acuuaaaaccagacagcgucau

SEQ ID NO: 1058707 - RNA, 22 nt, Human
guuaacacaggacucucugccu

SEQ ID NO: 1058708 - RNA, 22 nt, Human
uuggaaauggcuguaguuauga

SEQ ID NO: 1058709 - RNA, 22 nt, Human
auaugauuccacuauuguaugg

SEQ ID NO: 1058710 - RNA, 22 nt, Human
ugaaagauugugauucaauaug

SEQ ID NO: 1058711 - RNA, 22 nt, Human
uggccucugugggagcugagca

SEQ ID NO: 1058712 - RNA, 22 nt, Human
gccuccggagucacagugucuu

SEQ ID NO: 1058713 - RNA, 22 nt, Human
uggcacagggcuuggucgcuca

SEQ ID NO: 1058714 - RNA, 22 nt, Human
cgaggcucagagagggugacuu

SEQ ID NO: 1058715 - RNA, 22 nt, Human
auuuauuaugggauuuggcuca

SEQ ID NO: 1058716 - RNA, 22 nt, Human
guuagggagucagguggcucuu

SEQ ID NO: 1058717 - RNA, 22 nt, Human
ucagagaguccuggucauuugc

SEQ ID NO: 1058718 - RNA, 22 nt, Human
cagucccaugagcccagaacau

SEQ ID NO: 1058719 - RNA, 22 nt, Human
uucacaguggcugugccauuug

SEQ ID NO: 1058720 - RNA, 22 nt, Human
uccaugagacagauacuguaag

SEQ ID NO: 1058721 - RNA, 22 nt, Human
cacacagaaccgcucgccacuu

SEQ ID NO: 1058722 - RNA, 17 nt, Human
gagccacccugugcgag

SEQ ID NO: 1058723 - RNA, 22 nt, Human
gcuaggaguggugggucaagga

SEQ ID NO: 1058724 - RNA, 22 nt, Human
gagagaaaagggggaauugauu

SEQ ID NO: 1058725 - RNA, 22 nt, Human
aucugcuuccugggcuccauga

SEQ ID NO: 1058726 - RNA, 22 nt, Human
aaagagucuggcacuguaccag

SEQ ID NO: 1058727 - RNA, 22 nt, Human
uggcagagucaucacaucugga

SEQ ID NO: 1058728 - RNA, 22 nt, Human
gcuuggaaguaggauugggaga

SEQ ID NO: 1058729 - RNA, 22 nt, Human
augggcuggcagccugaacagc

SEQ ID NO: 1058730 - RNA, 22 nt, Human
cagagcugcuucccaguuugug

SEQ ID NO: 1058731 - RNA, 22 nt, Human
agcaggcuuucaagagucuucu

SEQ ID NO: 1058732 - RNA, 22 nt, Human
agacaggcuuugcuguauauca

SEQ ID NO: 1058733 - RNA, 19 nt, Human
acauuuagaauguacuugc

SEQ ID NO: 1058734 - RNA, 22 nt, Human
cgcaggcuuuagaaucugcuac

SEQ ID NO: 1058735 - RNA, 22 nt, Human
uuaggaaaaucaugagagauga

SEQ ID NO: 1058736 - RNA, 22 nt, Human
cauuuauuggcauguaguaggu

SEQ ID NO: 1058737 - RNA, 22 nt, Human
uacauaauaaggggcauggugu

SEQ ID NO: 1058738 - RNA, 22 nt, Human
cacauaauacauguuccacuua

SEQ ID NO: 1058739 - RNA, 22 nt, Human
gaauccaggguuguuugagcua

SEQ ID NO: 1058740 - RNA, 22 nt, Human
ugaccugcguaggugguuucug

SEQ ID NO: 1058741 - RNA, 22 nt, Human
aaacacauuuuaggaaaaucua

SEQ ID NO: 1058742 - RNA, 20 nt, Human
aggcucugccugcaggccca

SEQ ID NO: 1058743 - RNA, 22 nt, Human
gaggggucacaugggcuggcuu

SEQ ID NO: 1058744 - RNA, 22 nt, Human
ugucuucaguaaaauacacuau

SEQ ID NO: 1058745 - RNA, 20 nt, Human
ucuggggaugaggucuagga

SEQ ID NO: 1058746 - RNA, 22 nt, Human
uguaacacucaaucuguuuaac

SEQ ID NO: 1058747 - RNA, 22 nt, Human
ugagcagaacacgggauccaug

SEQ ID NO: 1058748 - RNA, 20 nt, Human
aguguuugcucacagucucc

SEQ ID NO: 1058749 - RNA, 22 nt, Human
gcccacacagcagauccuuugg

SEQ ID NO: 1058750 - RNA, 22 nt, Human
auaucauuauguuaugagcaca

SEQ ID NO: 1058751 - RNA, 22 nt, Human
ucugucacccaggcuggagugc

SEQ ID NO: 1058752 - RNA, 22 nt, Human
guaaaauugcaauuacuuuugc

SEQ ID NO: 1058753 - RNA, 22 nt, Human
cccgagugucuacucacuccca

SEQ ID NO: 1058754 - RNA, 22 nt, Human
uucaaauacauucuuugccacu

SEQ ID NO: 1058755 - RNA, 22 nt, Human
ugcaggcucaucucaagaguag

SEQ ID NO: 1058756 - RNA, 22 nt, Human
gccuccuggccuuugcuccuca

SEQ ID NO: 1058757 - RNA, 17 nt, Human
uuuagaauacaauguuu

SEQ ID NO: 1058758 - RNA, 22 nt, Human
gcccucucuucugcagccucca

SEQ ID NO: 1058759 - RNA, 22 nt, Human
aucacagagauugcuuuuaaaa

SEQ ID NO: 1058760 - RNA, 22 nt, Human
augccaaauucucagccucuuu

SEQ ID NO: 1058761 - RNA, 22 nt, Human
cucagagauauagucccugcuu

SEQ ID NO: 1058762 - RNA, 20 nt, Human
auaaaauaacugccacaaga

SEQ ID NO: 1058763 - RNA, 22 nt, Human
aaauggaucuguggaauacauu

SEQ ID NO: 1058764 - RNA, 22 nt, Human
uaacacauuaguucuccuagau

SEQ ID NO: 1058765 - RNA, 22 nt, Human
ccuggcagaauauuaaagugca

SEQ ID NO: 1058766 - RNA, 22 nt, Human
uuauuaggaacucaggauuuuu

SEQ ID NO: 1058767 - RNA, 20 nt, Human
ccccacacuauugagcacuu

SEQ ID NO: 1058768 - RNA, 22 nt, Human
uacacagauuucaguaucauca

SEQ ID NO: 1058769 - RNA, 22 nt, Human
cugaaaauguuacacaggaaga

SEQ ID NO: 1058770 - RNA, 22 nt, Human
ggcuuuauuaacucauccguaa

SEQ ID NO: 1058771 - RNA, 22 nt, Human
uaggaagcugagcagcauuccu

SEQ ID NO: 1058772 - RNA, 22 nt, Human
aguguggcugcguagggcucuc

SEQ ID NO: 1058773 - RNA, 22 nt, Human
uuucaaacauagaucugaauau

SEQ ID NO: 1058774 - RNA, 22 nt, Human
ccuagaugggauggcggccggg

SEQ ID NO: 1058775 - RNA, 22 nt, Human
ugggcugaguggcagccagagu

SEQ ID NO: 1058776 - RNA, 22 nt, Human
acuauaaaaggauaaaccagaa

SEQ ID NO: 1058777 - RNA, 22 nt, Human
auguuugacugaguuuggcaga

SEQ ID NO: 1058778 - RNA, 22 nt, Human
gguggcagagaggagguaguuu

SEQ ID NO: 1058779 - RNA, 22 nt, Human
uccccacaucucugcaucaggc

SEQ ID NO: 1058780 - RNA, 22 nt, Human
ugaagcacaggcauacacaacc

SEQ ID NO: 1058781 - RNA, 22 nt, Human
gcuggcagguaaagccccgggg

SEQ ID NO: 1058782 - RNA, 22 nt, Human
agcaggcugcuggcguugaagu

SEQ ID NO: 1058783 - RNA, 22 nt, Human
aggacagugguguucuggagug

SEQ ID NO: 1058784 - RNA, 22 nt, Human
ggcacagagcuuugucccaguu

SEQ ID NO: 1058785 - RNA, 22 nt, Human
gcugggcucugucaugccuucc

SEQ ID NO: 1058786 - RNA, 22 nt, Human
auuuauuaugggauuuggcaca

SEQ ID NO: 1058787 - RNA, 22 nt, Human
gcagggaccagggccagaucca

SEQ ID NO: 1058788 - RNA, 22 nt, Human
uagacauuucugguuauugaca

SEQ ID NO: 1058789 - RNA, 22 nt, Human
aggaccugccaggugcaaagca

SEQ ID NO: 1058790 - RNA, 18 nt, Human
ccaaggccccugcugggg

SEQ ID NO: 1058791 - RNA, 18 nt, Human
ggacaucaucaggugcuu

SEQ ID NO: 1058792 - RNA, 22 nt, Human
uuggagagcaguaaaccacacu

SEQ ID NO: 1058793 - RNA, 22 nt, Human
auuuugcuggucugaauuacuu

SEQ ID NO: 1058794 - RNA, 22 nt, Human
cugcaggacgaccgccucaucu

SEQ ID NO: 1058795 - RNA, 22 nt, Human
cagcuuuaggacucauaauaaa

SEQ ID NO: 1058796 - RNA, 22 nt, Human
caauuucucuuuauaucucaca

SEQ ID NO: 1058797 - RNA, 22 nt, Human
uagaaacauguucuguucuguu

SEQ ID NO: 1058798 - RNA, 17 nt, Human
ucugggcuucagugguc

SEQ ID NO: 1058799 - RNA, 22 nt, Human
gcugcaggcggccgugguggcg

SEQ ID NO: 1058800 - RNA, 22 nt, Human
uaauuucacugauaugaaguca

SEQ ID NO: 1058801 - RNA, 22 nt, Human
ucccaggcaaaggcagcucauu

SEQ ID NO: 1058802 - RNA, 22 nt, Human
ucugggcuuuaguuuguuaucu

SEQ ID NO: 1058803 - RNA, 22 nt, Human
acagagagaaacaaucagcagc

SEQ ID NO: 1058804 - RNA, 22 nt, Human
uugauacaggccuucuagauga

SEQ ID NO: 1058805 - RNA, 22 nt, Human
uaucauuguguuauuucuucca

SEQ ID NO: 1058806 - RNA, 22 nt, Human
uacacacuuacuggagaugaag

SEQ ID NO: 1058807 - RNA, 22 nt, Human
uucugugcccauuuuaaaaugg

SEQ ID NO: 1058808 - RNA, 22 nt, Human
ucauuuguucucauucucuacu

SEQ ID NO: 1058809 - RNA, 20 nt, Human
uauaaauucagagcuuuggu

SEQ ID NO: 1058810 - RNA, 22 nt, Human
caagauaagaucauuuacacua

SEQ ID NO: 1058811 - RNA, 17 nt, Human
cagugaggccuuuccuc

SEQ ID NO: 1058812 - RNA, 22 nt, Human
aggugaguccugggcacaggua

SEQ ID NO: 1058813 - RNA, 22 nt, Human
ucagagaggauuuuaauaagug

SEQ ID NO: 1058814 - RNA, 22 nt, Human
aaagaucacgucccaggacucg

SEQ ID NO: 1058815 - RNA, 23 nt, Human
aauguauguuaguaucuuagaga

SEQ ID NO: 1058816 - RNA, 22 nt, Human
gccuccuguuaugccaugugcc

SEQ ID NO: 1058817 - RNA, 22 nt, Human
uaucaauacauguuaucagugu

SEQ ID NO: 1058818 - RNA, 22 nt, Human
ccugggcugcucauggggauga

SEQ ID NO: 1058819 - RNA, 22 nt, Human
aaguccuuggagaauagaaagg

SEQ ID NO: 1058820 - RNA, 22 nt, Human
ggagacucggguucuagccuug

SEQ ID NO: 1058821 - RNA, 22 nt, Human
uaacuacauuucacugcaauua

SEQ ID NO: 1058822 - RNA, 22 nt, Human
cagcuuugcaggcuggucagug

SEQ ID NO: 1058823 - RNA, 22 nt, Human
aggcuuuguaccuggggucuua

SEQ ID NO: 1058824 - RNA, 19 nt, Human
gagggcucauuugaacaau

SEQ ID NO: 1058825 - RNA, 22 nt, Human
auaucauucugauguauaucuu

SEQ ID NO: 1058826 - RNA, 22 nt, Human
ugcaggcucugugugugccugg

SEQ ID NO: 1058827 - RNA, 22 nt, Human
guccucugacucagccuuggga

SEQ ID NO: 1058828 - RNA, 22 nt, Human
uuuacacaaaagauagcacacc

SEQ ID NO: 1058829 - RNA, 22 nt, Human
gggcucucgauuagacccuggg

SEQ ID NO: 1058830 - RNA, 22 nt, Human
agugauuugggugucagaaagu

SEQ ID NO: 1058831 - RNA, 22 nt, Human
accacccauucagaaacacuga

SEQ ID NO: 1058832 - RNA, 22 nt, Human
gcuuuuaauuaguugcuuccau

SEQ ID NO: 1058833 - RNA, 22 nt, Human
caggcagcugcuggguucagcc

SEQ ID NO: 1058834 - RNA, 22 nt, Human
ccagcuuuccugcgaguugauu

SEQ ID NO: 1058835 - RNA, 22 nt, Human
gacugccagaaugugaggccug

SEQ ID NO: 1058836 - RNA, 22 nt, Human
agcuuuauuugucauucacggc

SEQ ID NO: 1058837 - RNA, 22 nt, Human
ccagagagagaggucaauggca

SEQ ID NO: 1058838 - RNA, 22 nt, Human
uugauaaaaugauaucuucuuu

SEQ ID NO: 1058839 - RNA, 22 nt, Human
aaaguuuguuauaugauaagga

SEQ ID NO: 1058840 - RNA, 22 nt, Human
uacauguuauuucacuauuggu

SEQ ID NO: 1058841 - RNA, 22 nt, Human
uuucaaacuuuacucuugaauc

SEQ ID NO: 1058842 - RNA, 22 nt, Human
gcagggguagugucuuccugag

SEQ ID NO: 1058843 - RNA, 22 nt, Human
guuagggaucaggaacaagagc

SEQ ID NO: 1058844 - RNA, 22 nt, Human
aacccaggagacagguugcagu

SEQ ID NO: 1058845 - RNA, 22 nt, Human
gccugcagggcccuuguggguc

SEQ ID NO: 1058846 - RNA, 22 nt, Human
uggcaggaaaguaacagagcac

SEQ ID NO: 1058847 - RNA, 22 nt, Human
ugcuuuauucagucucugccau

SEQ ID NO: 1058848 - RNA, 21 nt, Human
agaaaauggcguuuuagauuu

SEQ ID NO: 1058849 - RNA, 22 nt, Human
aaauaguuagcccugcauauau

SEQ ID NO: 1058850 - RNA, 22 nt, Human
cugggcuguuuguucuggucuc

SEQ ID NO: 1058851 - RNA, 22 nt, Human
gagaacucagacgcaggucaug

SEQ ID NO: 1058852 - RNA, 17 nt, Human
ccaggcuccaucacugu

SEQ ID NO: 1058853 - RNA, 22 nt, Human
uauggaaagcucuuuuugauug

SEQ ID NO: 1058854 - RNA, 22 nt, Human
agagcaauggcauccagcugau

SEQ ID NO: 1058855 - RNA, 22 nt, Human
ucugcucugggccagcuauuaa

SEQ ID NO: 1058856 - RNA, 22 nt, Human
caguguuuaaucauugugaauu

SEQ ID NO: 1058857 - RNA, 22 nt, Human
ugccaaauugcccuauaaauga

SEQ ID NO: 1058858 - RNA, 22 nt, Human
cgucacuucuuagucuauuuuc

SEQ ID NO: 1058859 - RNA, 22 nt, Human
aguaugaacggaaggccuggga

SEQ ID NO: 1058860 - RNA, 22 nt, Human
agaugguuuugucuuuaugauu

SEQ ID NO: 1058861 - RNA, 22 nt, Human
uaauuucuaauucauuuucagu

SEQ ID NO: 1058862 - RNA, 20 nt, Human
aguuuauuccaggagaacug

SEQ ID NO: 1058863 - RNA, 22 nt, Human
uuauuucauguaaaauuuaugu

SEQ ID NO: 1058864 - RNA, 22 nt, Human
cacacacuggagcaaggagaug

SEQ ID NO: 1058865 - RNA, 22 nt, Human
uaacuuucacaucacacugacu

SEQ ID NO: 1058866 - RNA, 19 nt, Human
agcaacaccguuuauuucc

SEQ ID NO: 1058867 - RNA, 22 nt, Human
ucuggcaggcaaucggcucugg

SEQ ID NO: 1058868 - RNA, 22 nt, Human
cauuagggacugaggaauaagg

SEQ ID NO: 1058869 - RNA, 22 nt, Human
gcuucuaucccuccacugcacu

SEQ ID NO: 1058870 - RNA, 22 nt, Human
gaggcuguuaggagggacucug

SEQ ID NO: 1058871 - RNA, 22 nt, Human
acugggcugcuugagugccuuc

SEQ ID NO: 1058872 - RNA, 22 nt, Human
auuuaaauuuucugauggagag

SEQ ID NO: 1058873 - RNA, 22 nt, Human
uccaggcaggguuaaggguccu

SEQ ID NO: 1058874 - RNA, 22 nt, Human
uuggaaaguuuuuacugaagac

SEQ ID NO: 1058875 - RNA, 18 nt, Human
acuggcuuuagcaucaga

SEQ ID NO: 1058876 - RNA, 22 nt, Human
uaauuuuaugacaguguauuuu

SEQ ID NO: 1058877 - RNA, 22 nt, Human
uuccaaguugagcgauuuuccu

SEQ ID NO: 1058878 - RNA, 22 nt, Human
ucccagccuuccagucugguuu

SEQ ID NO: 1058879 - RNA, 22 nt, Human
auucucuguuuccaagaugaaa

SEQ ID NO: 1058880 - RNA, 22 nt, Human
uccaagcuuuccaugcccucac

SEQ ID NO: 1058881 - RNA, 22 nt, Human
ugaauaaucuuggguauuaaua

SEQ ID NO: 1058882 - RNA, 22 nt, Human
ugggaccuguuacauugaguua

SEQ ID NO: 1058883 - RNA, 22 nt, Human
agguaugagauaaaucaaugaa

SEQ ID NO: 1058884 - RNA, 19 nt, Human
uucuggggccuggccuugg

SEQ ID NO: 1058885 - RNA, 22 nt, Human
uacaaaguagaaauucaguaaa

SEQ ID NO: 1058886 - RNA, 22 nt, Human
ccaggccugcaucugcugcgca

SEQ ID NO: 1058887 - RNA, 22 nt, Human
agcucccauuaucuucugaaac

SEQ ID NO: 1058888 - RNA, 22 nt, Human
uauaaaguuucgaaagauguau

SEQ ID NO: 1058889 - RNA, 21 nt, Human
acagauuuuauaucucugcug

SEQ ID NO: 1058890 - RNA, 22 nt, Human
ugcaggcuggaggagggacuaa

SEQ ID NO: 1058891 - RNA, 22 nt, Human
ccugggcuuuggaacaguacuu

SEQ ID NO: 1058892 - RNA, 22 nt, Human
uaauuucuagggacuaaggugc

SEQ ID NO: 1058893 - RNA, 22 nt, Human
ucaggcucuggguacaccugac

SEQ ID NO: 1058894 - RNA, 22 nt, Human
aauguaugaagguuccaguuuc

SEQ ID NO: 1058895 - RNA, 23 nt, Human
acagaaaguucugcuggacagag

SEQ ID NO: 1058896 - RNA, 22 nt, Human
cauguuaauaugcauugaguac

SEQ ID NO: 1058897 - RNA, 22 nt, Human
uuucuauugaucuaauaaacau

SEQ ID NO: 1058898 - RNA, 22 nt, Human
gccaagcuuggaaggaucaugg

SEQ ID NO: 1058899 - RNA, 22 nt, Human
ugaggccagugacauauauuaa

SEQ ID NO: 1058900 - RNA, 22 nt, Human
uuucacaugguacugccuguuu

SEQ ID NO: 1058901 - RNA, 22 nt, Human
augugaaagagguguucagugg

SEQ ID NO: 1058902 - RNA, 22 nt, Human
guacacacuauguauuguacac

SEQ ID NO: 1058903 - RNA, 22 nt, Human
ucagcuuuuaaaaacaagaagu

SEQ ID NO: 1058904 - RNA, 22 nt, Human
uggccaggccucuuggugccca

SEQ ID NO: 1058905 - RNA, 22 nt, Human
guauuagguuggugcaaaagua

SEQ ID NO: 1058906 - RNA, 22 nt, Human
agggcccuaaggaaggcacaca

SEQ ID NO: 1058907 - RNA, 22 nt, Human
ucccugccuccuggcagugcca

SEQ ID NO: 1058908 - RNA, 22 nt, Human
gggaccugcgccacucacuguc

SEQ ID NO: 1058909 - RNA, 22 nt, Human
ccaggcaggcuagaauguaaau

SEQ ID NO: 1058910 - RNA, 22 nt, Human
agagcaucuaacacauaagccu

SEQ ID NO: 1058911 - RNA, 22 nt, Human
gggcaaguccggugcccagagc

SEQ ID NO: 1058912 - RNA, 22 nt, Human
gagggugucugcguaacuggca

SEQ ID NO: 1058913 - RNA, 22 nt, Human
gcauacagagaggauguggcau

SEQ ID NO: 1058914 - RNA, 19 nt, Human
agcaggcuaggcugccucu

SEQ ID NO: 1058915 - RNA, 19 nt, Human
acacauuugcacaauccac

SEQ ID NO: 1058916 - RNA, 22 nt, Human
gggguggccaaggacucugacc

SEQ ID NO: 1058917 - RNA, 22 nt, Human
aagggcuccaagagguagcugg

SEQ ID NO: 1058918 - RNA, 22 nt, Human
aauaacuuuuaaaagacccugg

SEQ ID NO: 1058919 - RNA, 22 nt, Human
cagcccucaucucagcuucuuu

SEQ ID NO: 1058920 - RNA, 22 nt, Human
gaggagcugcagggggagucua

SEQ ID NO: 1058921 - RNA, 22 nt, Human
gggaccugaggcccugcuccac

SEQ ID NO: 1058922 - RNA, 22 nt, Human
cagcccagccuugucucuuuau

SEQ ID NO: 1058923 - RNA, 22 nt, Human
guaaacaucgacccaacagggg

SEQ ID NO: 1058924 - RNA, 22 nt, Human
accugccuucucaaggacauga

SEQ ID NO: 1058925 - RNA, 22 nt, Human
gcagcuuuaaaggaggcucuga

SEQ ID NO: 1058926 - RNA, 22 nt, Human
gacacagacaguuagagguaau

SEQ ID NO: 1058927 - RNA, 22 nt, Human
uuuccuuugcccaauacauguc

SEQ ID NO: 1058928 - RNA, 22 nt, Human
cagcuuuggcccagucgggagg

SEQ ID NO: 1058929 - RNA, 22 nt, Human
acaggugguaaaauggacuguc

SEQ ID NO: 1058930 - RNA, 22 nt, Human
ucacaggcuugugaacauugca

SEQ ID NO: 1058931 - RNA, 22 nt, Human
ggaagaaagcacacaaacuuga

SEQ ID NO: 1058932 - RNA, 18 nt, Human
acacacacaccuguguau

SEQ ID NO: 1058933 - RNA, 22 nt, Human
cagacagagucuucccaucagu

SEQ ID NO: 1058934 - RNA, 22 nt, Human
uuuauuagugcuuguaucacug

SEQ ID NO: 1058935 - RNA, 22 nt, Human
cagguggcuucucccuaggcca

SEQ ID NO: 1058936 - RNA, 22 nt, Human
gcagcucuuuucuuaaagagau

SEQ ID NO: 1058937 - RNA, 22 nt, Human
augggcugugagguccggcagg

SEQ ID NO: 1058938 - RNA, 22 nt, Human
cuguuuaucucuaaccuguuua

SEQ ID NO: 1058939 - RNA, 19 nt, Human
ccagagagcuagguacaga

SEQ ID NO: 1058940 - RNA, 22 nt, Human
guccuggcaccucacuggcuac

SEQ ID NO: 1058941 - RNA, 22 nt, Human
ucuggcagaagugcugucagua

SEQ ID NO: 1058942 - RNA, 22 nt, Human
uauugacaauuugugaaacuau

SEQ ID NO: 1058943 - RNA, 22 nt, Human
aaacucuguagcuaaacauaau

SEQ ID NO: 1058944 - RNA, 22 nt, Human
cuguuauuucugccaggugagu

SEQ ID NO: 1058945 - RNA, 22 nt, Human
ucaggagcugcacugggcccac

SEQ ID NO: 1058946 - RNA, 22 nt, Human
aaauccuaaugacaaguuuagu

SEQ ID NO: 1058947 - RNA, 21 nt, Human
ucuagaauccuguauaagacu

SEQ ID NO: 1058948 - RNA, 22 nt, Human
uggcuggagcauuccuugucuu

SEQ ID NO: 1058949 - RNA, 18 nt, Human
ucauuuguuuugcaugaa

SEQ ID NO: 1058950 - RNA, 22 nt, Human
uagauauguguuuauuaugcug

SEQ ID NO: 1058951 - RNA, 22 nt, Human
aaugaagcaagcugcuguguuu

SEQ ID NO: 1058952 - RNA, 22 nt, Human
uuguaugaauguauccuaauuu

SEQ ID NO: 1058953 - RNA, 22 nt, Human
ucuuuauuuuaugcuugugcaa

SEQ ID NO: 1058954 - RNA, 19 nt, Human
ccaggccucuggggccugu

SEQ ID NO: 1058955 - RNA, 22 nt, Human
aauauguugagucuaucuuuau

SEQ ID NO: 1058956 - RNA, 20 nt, Human
uggaaguucuguugcauugg

SEQ ID NO: 1058957 - RNA, 22 nt, Human
uccuggcauugugcagggugug

SEQ ID NO: 1058958 - RNA, 23 nt, Human
uccuuuaaugcuggaauggcuag

SEQ ID NO: 1058959 - RNA, 21 nt, Human
gaauaguucuguggcagcagu

SEQ ID NO: 1058960 - RNA, 20 nt, Human
aucugcuugccuguccucgg

SEQ ID NO: 1058961 - RNA, 22 nt, Human
aauuacuuaagagaaacuuuga

SEQ ID NO: 1058962 - RNA, 22 nt, Human
ggcugcagggcagcuggugugg

SEQ ID NO: 1058963 - RNA, 22 nt, Human
uauuacagaaucaggcauaacu

SEQ ID NO: 1058964 - RNA, 22 nt, Human
caugaaauugcuccuuuggugc

SEQ ID NO: 1058965 - RNA, 22 nt, Human
cagcucaggcucuccaugcucc

SEQ ID NO: 1058966 - RNA, 22 nt, Human
ggcaggcugggugucauggagu

SEQ ID NO: 1058967 - RNA, 22 nt, Human
ucagcuuucucucgccaucagg

SEQ ID NO: 1058968 - RNA, 22 nt, Human
gccuggggaacuugauccuguc

SEQ ID NO: 1058969 - RNA, 22 nt, Human
ucuggcaguuccuuguugauau

SEQ ID NO: 1058970 - RNA, 22 nt, Human
cagcauuuggaggagaggcuuu

SEQ ID NO: 1058971 - RNA, 22 nt, Human
augcauaauguauguauugacu

SEQ ID NO: 1058972 - RNA, 22 nt, Human
gccaggcaugggcuucugggcg

SEQ ID NO: 1058973 - RNA, 22 nt, Human
gagaaagacguaggcugggagg

SEQ ID NO: 1058974 - RNA, 22 nt, Human
ucuccgaucacagguuuucaau

SEQ ID NO: 1058975 - RNA, 22 nt, Human
aaauuagucgguuuaggaauuu

SEQ ID NO: 1058976 - RNA, 22 nt, Human
ccaggcccaggguacugaccaa

SEQ ID NO: 1058977 - RNA, 22 nt, Human
gaggagggagcuggaagcucuu

SEQ ID NO: 1058978 - RNA, 22 nt, Human
uauuaggguaaauuugacaugc

SEQ ID NO: 1058979 - RNA, 22 nt, Human
uacacagaaccugguguacagu

SEQ ID NO: 1058980 - RNA, 22 nt, Human
aggaccugacuggcuccugcuu

SEQ ID NO: 1058981 - RNA, 22 nt, Human
ugggaccugcccuggccccauc

SEQ ID NO: 1058982 - RNA, 22 nt, Human
gccaggcauguccucugcagaa

SEQ ID NO: 1058983 - RNA, 22 nt, Human
uucuuugcccuuaaugaaauaa

SEQ ID NO: 1058984 - RNA, 22 nt, Human
guggcuuggaccagucacagug

SEQ ID NO: 1058985 - RNA, 22 nt, Human
uuagaauuauuguuuccuucua

SEQ ID NO: 1058986 - RNA, 22 nt, Human
auuuauuauugugguuacuucu

SEQ ID NO: 1058987 - RNA, 22 nt, Human
ugcuggcacguggaccaggaga

SEQ ID NO: 1058988 - RNA, 22 nt, Human
ccuggcagccucagccaauucu

SEQ ID NO: 1058989 - RNA, 22 nt, Human
ucuggggagggagccacagguc

SEQ ID NO: 1058990 - RNA, 22 nt, Human
guggcagggcuuugcuguucuu

SEQ ID NO: 1058991 - RNA, 22 nt, Human
gacacuucaccuuucccagccu

SEQ ID NO: 1058992 - RNA, 23 nt, Human
cuguaugauguuaaguggaaagc

SEQ ID NO: 1058993 - RNA, 22 nt, Human
agaggccuccgaaaggugggcu

SEQ ID NO: 1058994 - RNA, 22 nt, Human
accaagcucucuucccggcucu

SEQ ID NO: 1058995 - RNA, 22 nt, Human
cccaggcacagauuaucccaau

SEQ ID NO: 1058996 - RNA, 22 nt, Human
aaugaucuggcucaggauauca

SEQ ID NO: 1058997 - RNA, 22 nt, Human
cagcacaggucaguuuuuuaag

SEQ ID NO: 1058998 - RNA, 22 nt, Human
uccugcagcugcagaccugggg

SEQ ID NO: 1058999 - RNA, 22 nt, Human
uuuaauuuucugggcccagcag

SEQ ID NO: 1059000 - RNA, 20 nt, Human
gcugggcuaccacuggcccu

SEQ ID NO: 1059001 - RNA, 22 nt, Human
guuuuacacaccuaugaaagac

SEQ ID NO: 1059002 - RNA, 22 nt, Human
aacaaucaaguuucuaaaugac

SEQ ID NO: 1059003 - RNA, 22 nt, Human
gguggcauaagaacacuaaaga

SEQ ID NO: 1059004 - RNA, 22 nt, Human
aagagcauauuaauaguggaga

SEQ ID NO: 1059005 - RNA, 22 nt, Human
ggccucucugagagcagacguu

SEQ ID NO: 1059006 - RNA, 22 nt, Human
acagguggaggcuuuaggaggu

SEQ ID NO: 1059007 - RNA, 22 nt, Human
gccuggcacucaaucaucugcu

SEQ ID NO: 1059008 - RNA, 22 nt, Human
uccccacacuuucacuccuggc

SEQ ID NO: 1059009 - RNA, 22 nt, Human
auuucuacaguacacaugcauu

SEQ ID NO: 1059010 - RNA, 22 nt, Human
gcagcuuucuuuuugcaugucu

SEQ ID NO: 1059011 - RNA, 22 nt, Human
ucagggacgugagcucagaguc

SEQ ID NO: 1059012 - RNA, 22 nt, Human
ugcuucuguuucauugaucuua

SEQ ID NO: 1059013 - RNA, 22 nt, Human
ucagagagaaauaguuuuugac

SEQ ID NO: 1059014 - RNA, 22 nt, Human
ccaaggcaggggaucaaaguuu

SEQ ID NO: 1059015 - RNA, 22 nt, Human
ugcuagaaaucugaaacuagca

SEQ ID NO: 1059016 - RNA, 22 nt, Human
cagccaagaaccacagacccag

SEQ ID NO: 1059017 - RNA, 22 nt, Human
ucuggggaauguucauuucuga

SEQ ID NO: 1059018 - RNA, 22 nt, Human
uccaggcaucuguauuuuuuaa

SEQ ID NO: 1059019 - RNA, 22 nt, Human
ucaaggagcccacagucuaaug

SEQ ID NO: 1059020 - RNA, 22 nt, Human
cucugucacuucuccagcugag

SEQ ID NO: 1059021 - RNA, 22 nt, Human
ccacaaaacugugugucaaaga

SEQ ID NO: 1059022 - RNA, 22 nt, Human
ucuggggagcagcccuggugag

SEQ ID NO: 1059023 - RNA, 22 nt, Human
aggugaguugguaggaaguuug

SEQ ID NO: 1059024 - RNA, 22 nt, Human
ucuccaagcagggcugcaaggc

SEQ ID NO: 1059025 - RNA, 22 nt, Human
uccaggcaaaaggaacugcuug

SEQ ID NO: 1059026 - RNA, 22 nt, Human
cuccagugagugagcaggcgac

SEQ ID NO: 1059027 - RNA, 22 nt, Human
ucagagaggcaauacuguuuaa

SEQ ID NO: 1059028 - RNA, 22 nt, Human
aacagcauaccaauguacauau

SEQ ID NO: 1059029 - RNA, 22 nt, Human
agguauuauuagcaucucuauu

SEQ ID NO: 1059030 - RNA, 17 nt, Human
ucugcagaggcaaaccu

SEQ ID NO: 1059031 - RNA, 22 nt, Human
uggaccugcguaggugcugggc

SEQ ID NO: 1059032 - RNA, 22 nt, Human
ugcaggcucucugcugccagau

SEQ ID NO: 1059033 - RNA, 20 nt, Human
uuaucugucaaucugucuca

SEQ ID NO: 1059034 - RNA, 22 nt, Human
uuucauaaccucaagcuacagu

SEQ ID NO: 1059035 - RNA, 22 nt, Human
uacccaggggcugagcagaggu

SEQ ID NO: 1059036 - RNA, 22 nt, Human
uggaaagagguagaggaucugg

SEQ ID NO: 1059037 - RNA, 22 nt, Human
caguagacacauuaauauggaa

SEQ ID NO: 1059038 - RNA, 22 nt, Human
uccacccugcuuucuuaucucc

SEQ ID NO: 1059039 - RNA, 22 nt, Human
ugcuuuaucugugagaaccuga

SEQ ID NO: 1059040 - RNA, 22 nt, Human
cagagccucagaauccugugga

SEQ ID NO: 1059041 - RNA, 17 nt, Human
gcuucuggagcuucugu

SEQ ID NO: 1059042 - RNA, 22 nt, Human
gagaagcaaucaguggccaccc

SEQ ID NO: 1059043 - RNA, 22 nt, Human
ucagagaguuacacaaauuguu

SEQ ID NO: 1059044 - RNA, 22 nt, Human
gguaugaaaugauuccauguua

SEQ ID NO: 1059045 - RNA, 22 nt, Human
ucucuuucuauugcaccaugcu

SEQ ID NO: 1059046 - RNA, 20 nt, Human
uccaggcagacagcuauggg

SEQ ID NO: 1059047 - RNA, 22 nt, Human
gggcugacucaaccuugcaaag

SEQ ID NO: 1059048 - RNA, 22 nt, Human
augggcugcuucuccagcaccu

SEQ ID NO: 1059049 - RNA, 22 nt, Human
cauaugaaauaugaguugaaca

SEQ ID NO: 1059050 - RNA, 22 nt, Human
ggcuuuauauuguuugagcaga

SEQ ID NO: 1059051 - RNA, 22 nt, Human
auguccagccaaccacuggauu

SEQ ID NO: 1059052 - RNA, 22 nt, Human
ccuggcagcccagagcgccgcu

SEQ ID NO: 1059053 - RNA, 22 nt, Human
ugcaggcuuggaucacaucucc

SEQ ID NO: 1059054 - RNA, 22 nt, Human
ugagagcacacagaaauauuuu

SEQ ID NO: 1059055 - RNA, 18 nt, Human
acaggcugugggaauggu

SEQ ID NO: 1059056 - RNA, 22 nt, Human
gcagcuuuguaaaguaugaagc

SEQ ID NO: 1059057 - RNA, 22 nt, Human
uucuaucauacuugaauacauu

SEQ ID NO: 1059058 - RNA, 22 nt, Human
ucaucccuaaggacagcucugc

SEQ ID NO: 1059059 - RNA, 22 nt, Human
cuccaggcucguccaagaucga

SEQ ID NO: 1059060 - RNA, 16 nt, Human
gcacacacaucaauga

SEQ ID NO: 1059061 - RNA, 22 nt, Human
uggaacacuggcuuuccacugu

SEQ ID NO: 1059062 - RNA, 22 nt, Human
gcuaggagauugagcucugaag

SEQ ID NO: 1059063 - RNA, 22 nt, Human
aaauccuaaaaguuugacuuaa

SEQ ID NO: 1059064 - RNA, 21 nt, Human
aggcucucauccagggaccca

SEQ ID NO: 1059065 - RNA, 22 nt, Human
ucugggcuuuuccaugccugug

SEQ ID NO: 1059066 - RNA, 19 nt, Human
cacaucagcagggcugugg

SEQ ID NO: 1059067 - RNA, 22 nt, Human
ugaccuuauuugaaaauagaga

SEQ ID NO: 1059068 - RNA, 22 nt, Human
uuugcuuguucaagauuucugu

SEQ ID NO: 1059069 - RNA, 22 nt, Human
cugccugcucaccagggcucug

SEQ ID NO: 1059070 - RNA, 22 nt, Human
agcuugauuucucugcagugug

SEQ ID NO: 1059071 - RNA, 22 nt, Human
uccaugagggacacuggaugcu

SEQ ID NO: 1059072 - RNA, 22 nt, Human
guuuuccugaaacugauggugu

SEQ ID NO: 1059073 - RNA, 22 nt, Human
augauugaaaaugacauugcca

SEQ ID NO: 1059074 - RNA, 22 nt, Human
gccccaccuugagagcagaaac

SEQ ID NO: 1059075 - RNA, 22 nt, Human
gggaccugccauugcucacagg

SEQ ID NO: 1059076 - RNA, 22 nt, Human
ugcagagagauccucaggguuu

SEQ ID NO: 1059077 - RNA, 22 nt, Human
cuggcacgcccacguaggcacu

SEQ ID NO: 1059078 - RNA, 22 nt, Human
ccuggcagcuguuuggcuuggc

SEQ ID NO: 1059079 - RNA, 22 nt, Human
uccugcaggccagaggggugag

SEQ ID NO: 1059080 - RNA, 21 nt, Human
guagggacagagaguugguga

SEQ ID NO: 1059081 - RNA, 22 nt, Human
ccaggcucugacauagauggga

SEQ ID NO: 1059082 - RNA, 22 nt, Human
ggcuucugcucagccugcacgc

SEQ ID NO: 1059083 - RNA, 22 nt, Human
acugggcuagaguggaagcugg

SEQ ID NO: 1059084 - RNA, 22 nt, Human
uaugaagcugauaaucacugau

SEQ ID NO: 1059085 - RNA, 22 nt, Human
auugggaugccggcugauaaga

SEQ ID NO: 1059086 - RNA, 22 nt, Human
ggggaccuggccacccauccuu

SEQ ID NO: 1059087 - RNA, 22 nt, Human
ugcuuuauaaccauuucugugg

SEQ ID NO: 1059088 - RNA, 22 nt, Human
cugggcugcaggaguggggcaa

SEQ ID NO: 1059089 - RNA, 22 nt, Human
guagggacuuguuuuacuagua

SEQ ID NO: 1059090 - RNA, 19 nt, Human
uggcagguagugagcaguc

SEQ ID NO: 1059091 - RNA, 23 nt, Human
ugugaaauuugaggucagugcuu

SEQ ID NO: 1059092 - RNA, 22 nt, Human
acagugugugcuuucccuuacg

SEQ ID NO: 1059093 - RNA, 22 nt, Human
auauuagggucucuaaauucua

SEQ ID NO: 1059094 - RNA, 22 nt, Human
cacccagggcugugccugccca

SEQ ID NO: 1059095 - RNA, 22 nt, Human
cucugcagauucaucccuucac

SEQ ID NO: 1059096 - RNA, 22 nt, Human
cagcacagugaccagacccacu

SEQ ID NO: 1059097 - RNA, 22 nt, Human
gccaagcuguuuuucagagacg

SEQ ID NO: 1059098 - RNA, 22 nt, Human
gagugcaggccugagcaccauc

SEQ ID NO: 1059099 - RNA, 22 nt, Human
ggcauccaaauaccaagaugua

SEQ ID NO: 1059100 - RNA, 22 nt, Human
agaccugcagggccaggccugc

SEQ ID NO: 1059101 - RNA, 22 nt, Human
gcccagcuuuucacuuccacac

SEQ ID NO: 1059102 - RNA, 19 nt, Human
guccuggcgccgccacacc

SEQ ID NO: 1059103 - RNA, 22 nt, Human
auacaaauuuauagaugcauuu

SEQ ID NO: 1059104 - RNA, 22 nt, Human
gaggccugucgcuaggccucug

SEQ ID NO: 1059105 - RNA, 22 nt, Human
ggcuuucuaugaacucaaaggc

SEQ ID NO: 1059106 - RNA, 22 nt, Human
ggccucaguuucuucaacugua

SEQ ID NO: 1059107 - RNA, 17 nt, Human
accaggcaacacgccca

SEQ ID NO: 1059108 - RNA, 22 nt, Human
auauuagguuggugcaaaagua

SEQ ID NO: 1059109 - RNA, 21 nt, Human
uucaaaguuugccuaaagauu

SEQ ID NO: 1059110 - RNA, 23 nt, Human
uuccaggcagagcagggauuaga

SEQ ID NO: 1059111 - RNA, 21 nt, Human
uagggcucuauuuuuauuuca

SEQ ID NO: 1059112 - RNA, 22 nt, Human
cuuagggaaucuuagagcugga

SEQ ID NO: 1059113 - RNA, 22 nt, Human
ccccacccaccuaagagaaacu

SEQ ID NO: 1059114 - RNA, 22 nt, Human
ccuggggauucugacacggagu

SEQ ID NO: 1059115 - RNA, 22 nt, Human
aaaaauaggucaaccguguaug

SEQ ID NO: 1059116 - RNA, 22 nt, Human
auuacucugucugccucugacc

SEQ ID NO: 1059117 - RNA, 22 nt, Human
gcuucuggaagcauaugcaaga

SEQ ID NO: 1059118 - RNA, 22 nt, Human
uagggacacugcucaugaguuc

SEQ ID NO: 1059119 - RNA, 17 nt, Human
ggagaucuggcagaggg

SEQ ID NO: 1059120 - RNA, 22 nt, Human
uauacacaaggugugcauuugu

SEQ ID NO: 1059121 - RNA, 22 nt, Human
cccaggcacauccacucuguga

SEQ ID NO: 1059122 - RNA, 22 nt, Human
uuuaacaugugaauuuuggaag

SEQ ID NO: 1059123 - RNA, 22 nt, Human
uuuaaauuauaguuaaugucug

SEQ ID NO: 1059124 - RNA, 22 nt, Human
uggcaggcgggagccauagagg

SEQ ID NO: 1059125 - RNA, 22 nt, Human
aacagccacugauacugaauag

SEQ ID NO: 1059126 - RNA, 22 nt, Human
acaggcaggcuucggccagagc

SEQ ID NO: 1059127 - RNA, 23 nt, Human
acacugucucauggauagacugc

SEQ ID NO: 1059128 - RNA, 22 nt, Human
aagugauuucugccugcauguu

SEQ ID NO: 1059129 - RNA, 22 nt, Human
uccaguggcaccuuggcccuca

SEQ ID NO: 1059130 - RNA, 22 nt, Human
uagaauucauguuacuguuagc

SEQ ID NO: 1059131 - RNA, 18 nt, Human
uccucucuuuccccaggg

SEQ ID NO: 1059132 - RNA, 22 nt, Human
gcuucuggugaggccucaggaa

SEQ ID NO: 1059133 - RNA, 22 nt, Human
uucugucacuugcaaucaagag

SEQ ID NO: 1059134 - RNA, 22 nt, Human
gggccccuuguaucucuggcuc

SEQ ID NO: 1059135 - RNA, 22 nt, Human
ccugggcuuugagggcaggaug

SEQ ID NO: 1059136 - RNA, 22 nt, Human
uauacaaugaguacauucuggg

SEQ ID NO: 1059137 - RNA, 22 nt, Human
aauuaugagguagauaucacau

SEQ ID NO: 1059138 - RNA, 22 nt, Human
ucuaggagaaccaucagggagg

SEQ ID NO: 1059139 - RNA, 22 nt, Human
cugggcucaccuguggcuggca

SEQ ID NO: 1059140 - RNA, 22 nt, Human
uacauugacuuggauuguuaga

SEQ ID NO: 1059141 - RNA, 22 nt, Human
agucacccuccaacucuccacu

SEQ ID NO: 1059142 - RNA, 22 nt, Human
uuccagcccgcgacuuguucag

SEQ ID NO: 1059143 - RNA, 22 nt, Human
ugaaacuucuaauaugaauagu

SEQ ID NO: 1059144 - RNA, 22 nt, Human
guaaacaugcuguguacucagc

SEQ ID NO: 1059145 - RNA, 22 nt, Human
uucugggggccaggacaguggu

SEQ ID NO: 1059146 - RNA, 22 nt, Human
gcagcuuucuugcccuaaucuu

SEQ ID NO: 1059147 - RNA, 22 nt, Human
cugccugcaggacaccucgcua

SEQ ID NO: 1059148 - RNA, 22 nt, Human
ccagcuuucucagaggcuucua

SEQ ID NO: 1059149 - RNA, 22 nt, Human
ucagcuuuccugcagcuaaggg

SEQ ID NO: 1059150 - RNA, 22 nt, Human
agggcgacaauggagagcguuu

SEQ ID NO: 1059151 - RNA, 22 nt, Human
gcaguccaaaguggcucucacc

SEQ ID NO: 1059152 - RNA, 22 nt, Human
ccuucuucuguguggcccaaga

SEQ ID NO: 1059153 - RNA, 22 nt, Human
ccuggcagcagcacaugccuuc

SEQ ID NO: 1059154 - RNA, 22 nt, Human
aguccaguguguucuggcagca

SEQ ID NO: 1059155 - RNA, 18 nt, Human
ucuggaacaacuucaugu

SEQ ID NO: 1059156 - RNA, 23 nt, Human
aaacaugcagcacaugaaugcua

SEQ ID NO: 1059157 - RNA, 21 nt, Human
aacacauccagaguauuugac

SEQ ID NO: 1059158 - RNA, 19 nt, Human
cacacccaugcuugccaag

SEQ ID NO: 1059159 - RNA, 22 nt, Human
aaaaugacauuccagugauauu

SEQ ID NO: 1059160 - RNA, 22 nt, Human
aacauaauguggccaaagucac

SEQ ID NO: 1059161 - RNA, 22 nt, Human
auuuagcaaaaaaugaugaagc

SEQ ID NO: 1059162 - RNA, 22 nt, Human
ggggcugagaauucagucucgg

SEQ ID NO: 1059163 - RNA, 22 nt, Human
agcuuugggcagaagaggauuc

SEQ ID NO: 1059164 - RNA, 22 nt, Human
cagccucuuuccacaucaggca

SEQ ID NO: 1059165 - RNA, 22 nt, Human
ucuggggacggggcccagcaau

SEQ ID NO: 1059166 - RNA, 22 nt, Human
ugcaggcuggauuugcuuuugu

SEQ ID NO: 1059167 - RNA, 22 nt, Human
uuaucauugucgcagucuaauu

SEQ ID NO: 1059168 - RNA, 20 nt, Human
cagcuuuagaucuuugauua

SEQ ID NO: 1059169 - RNA, 22 nt, Human
gguuucaaauuaaagucuuaag

SEQ ID NO: 1059170 - RNA, 22 nt, Human
uauaauuuuagaagagauggaa

SEQ ID NO: 1059171 - RNA, 18 nt, Human
uccugcagcuucuaugua

SEQ ID NO: 1059172 - RNA, 22 nt, Human
ucacaauauuuaucuuccaauu

SEQ ID NO: 1059173 - RNA, 22 nt, Human
agaaaauauucauugagaggcu

SEQ ID NO: 1059174 - RNA, 22 nt, Human
ucaggcccuuugcugcugcccc

SEQ ID NO: 1059175 - RNA, 22 nt, Human
uuaaaacugcaaauccuacuga

SEQ ID NO: 1059176 - RNA, 22 nt, Human
uggcuaggacucauccuguuuc

SEQ ID NO: 1059177 - RNA, 22 nt, Human
cucccaagcugugcugaacugu

SEQ ID NO: 1059178 - RNA, 22 nt, Human
ucccacaugugaauccucaggu

SEQ ID NO: 1059179 - RNA, 22 nt, Human
gcagcuuuaaacauuggaaaua

SEQ ID NO: 1059180 - RNA, 22 nt, Human
acacauuugcauaauaccucau

SEQ ID NO: 1059181 - RNA, 22 nt, Human
auuaauuuccaggcacugugcu

SEQ ID NO: 1059182 - RNA, 22 nt, Human
ugggcugaggggccuugaugac

SEQ ID NO: 1059183 - RNA, 22 nt, Human
gauuuauuuuuaaucagcaggg

SEQ ID NO: 1059184 - RNA, 22 nt, Human
ugggcuccggcggccucaggcu

SEQ ID NO: 1059185 - RNA, 22 nt, Human
aagaggucauaccagauaaggg

SEQ ID NO: 1059186 - RNA, 22 nt, Human
aaguauuucuggccugugaaag

SEQ ID NO: 1059187 - RNA, 23 nt, Human
acagugugguggacaaggagcag

SEQ ID NO: 1059188 - RNA, 22 nt, Human
ggcuuugggcccucaagucucc

SEQ ID NO: 1059189 - RNA, 23 nt, Human
uguaaacaucacccccuggaguu

SEQ ID NO: 1059190 - RNA, 22 nt, Human
cauuuguacagaacagcuuuau

SEQ ID NO: 1059191 - RNA, 22 nt, Human
cuucugggauuuuugaagacuc

SEQ ID NO: 1059192 - RNA, 23 nt, Human
agcuuuggugaugugacagauaa

SEQ ID NO: 1059193 - RNA, 22 nt, Human
uuauucagauuggcuacaggau

SEQ ID NO: 1059194 - RNA, 22 nt, Human
uaauaguuucauaaugugcuuc

SEQ ID NO: 1059195 - RNA, 22 nt, Human
uauguacaugauuucauuugcu

SEQ ID NO: 1059196 - RNA, 22 nt, Human
guggagcaggacuagcugagaa

SEQ ID NO: 1059197 - RNA, 22 nt, Human
augugaaacugaagcauccaua

SEQ ID NO: 1059198 - RNA, 22 nt, Human
gagcacccuuugcacaucaguc

SEQ ID NO: 1059199 - RNA, 22 nt, Human
ugcuucugcuuuacuugguuca

SEQ ID NO: 1059200 - RNA, 22 nt, Human
ugggaccugcucuuggaaugag

SEQ ID NO: 1059201 - RNA, 22 nt, Human
agugcuccuauggaucaguugu

SEQ ID NO: 1059202 - RNA, 22 nt, Human
cgacccuacagacagugcugag

SEQ ID NO: 1059203 - RNA, 19 nt, Human
caggucuucuuggaggacu

SEQ ID NO: 1059204 - RNA, 22 nt, Human
gguuuauuaaugugaacuguau

SEQ ID NO: 1059205 - RNA, 22 nt, Human
cugugggaugggaccucagcug

SEQ ID NO: 1059206 - RNA, 21 nt, Human
uccugcaggaggccugagagg

SEQ ID NO: 1059207 - RNA, 22 nt, Human
uagcuuuagaaauauucucaga

SEQ ID NO: 1059208 - RNA, 22 nt, Human
acauaugauauugaggaucuca

SEQ ID NO: 1059209 - RNA, 22 nt, Human
gcccagcuggcuuccagcacau

SEQ ID NO: 1059210 - RNA, 22 nt, Human
guauuagggccaaaggcaggaa

SEQ ID NO: 1059211 - RNA, 22 nt, Human
ccagcuuuucuuaucauuauaa

SEQ ID NO: 1059212 - RNA, 22 nt, Human
gcuucuggcagugcagccacca

SEQ ID NO: 1059213 - RNA, 22 nt, Human
acaaucauuccguucacaacag

SEQ ID NO: 1059214 - RNA, 19 nt, Human
cuuuucaucaacagccaau

SEQ ID NO: 1059215 - RNA, 22 nt, Human
ucacuguaccuuccauuucauu

SEQ ID NO: 1059216 - RNA, 22 nt, Human
uuauuuugguaaauguuugccu

SEQ ID NO: 1059217 - RNA, 22 nt, Human
ugcuuuauuggaaccucauccu

SEQ ID NO: 1059218 - RNA, 22 nt, Human
agaaucucuacucaaguacuug

SEQ ID NO: 1059219 - RNA, 22 nt, Human
cacacauuucagaugcuacaau

SEQ ID NO: 1059220 - RNA, 22 nt, Human
uucagagagaccaaguggcgug

SEQ ID NO: 1059221 - RNA, 23 nt, Human
aaaguuugaagcaacaguaguug

SEQ ID NO: 1059222 - RNA, 22 nt, Human
gaaagaagcuuuagauggcuau

SEQ ID NO: 1059223 - RNA, 22 nt, Human
ucccugccugacagcacccacc

SEQ ID NO: 1059224 - RNA, 21 nt, Human
agcaggcuuuggaguggggcu

SEQ ID NO: 1059225 - RNA, 22 nt, Human
aguuagaauagucagauuguag

SEQ ID NO: 1059226 - RNA, 19 nt, Human
uugaaauuguuugauaugg

SEQ ID NO: 1059227 - RNA, 22 nt, Human
uccccaccccagaacuacuagg

SEQ ID NO: 1059228 - RNA, 22 nt, Human
acccagcaaagauaaacuuaug

SEQ ID NO: 1059229 - RNA, 22 nt, Human
caggcccugggcaggcacagag

SEQ ID NO: 1059230 - RNA, 22 nt, Human
ucauauaacuggauauuuucaa

SEQ ID NO: 1059231 - RNA, 22 nt, Human
cagugggggggccaugcugcag

SEQ ID NO: 1059232 - RNA, 22 nt, Human
ucagcuuuggucacauugaguu

SEQ ID NO: 1059233 - RNA, 22 nt, Human
agcuuuauagaaaggaucagug

SEQ ID NO: 1059234 - RNA, 22 nt, Human
guccucuggugaaagcauuccc

SEQ ID NO: 1059235 - RNA, 22 nt, Human
uuaguuuucccaucuuuauggu

SEQ ID NO: 1059236 - RNA, 22 nt, Human
aaauaguucagcuuguaaaccc

SEQ ID NO: 1059237 - RNA, 22 nt, Human
cagaggcugccagccaugugca

SEQ ID NO: 1059238 - RNA, 18 nt, Human
gccugcucugcucucccc

SEQ ID NO: 1059239 - RNA, 22 nt, Human
ccugcaguuuguugugaccccg

SEQ ID NO: 1059240 - RNA, 22 nt, Human
caggcagcugacugucagauau

SEQ ID NO: 1059241 - RNA, 22 nt, Human
caggauggucucgaucuccuga

SEQ ID NO: 1059242 - RNA, 22 nt, Human
agucccagcuucccccaugcag

SEQ ID NO: 1059243 - RNA, 22 nt, Human
aaugaaugaaccacauauaaca

SEQ ID NO: 1059244 - RNA, 22 nt, Human
cugccugccuuggccuccagga

SEQ ID NO: 1059245 - RNA, 23 nt, Human
cuggggcuuucaaaucugggcag

SEQ ID NO: 1059246 - RNA, 22 nt, Human
agggagacacaugaggaaguca

SEQ ID NO: 1059247 - RNA, 22 nt, Human
ucccugugagaaaugaagcagg

SEQ ID NO: 1059248 - RNA, 22 nt, Human
gugcaguggcagauccuagcuc

SEQ ID NO: 1059249 - RNA, 22 nt, Human
uggcuaggaauccaugacucuc

SEQ ID NO: 1059250 - RNA, 22 nt, Human
auaauauaauccuacuucccau

SEQ ID NO: 1059251 - RNA, 22 nt, Human
uggaaacaucucugccuuuauu

SEQ ID NO: 1059252 - RNA, 22 nt, Human
ucucugaaggggagcuguuuaa

SEQ ID NO: 1059253 - RNA, 22 nt, Human
ccccaggcagggccuaacagag

SEQ ID NO: 1059254 - RNA, 22 nt, Human
uggggacccggacuccuggguc

SEQ ID NO: 1059255 - RNA, 22 nt, Human
ucccacaggaaaguagacauug

SEQ ID NO: 1059256 - RNA, 22 nt, Human
ugcuuuauagacaaggaaguag

SEQ ID NO: 1059257 - RNA, 22 nt, Human
uuagaacuuaagaauacugucu

SEQ ID NO: 1059258 - RNA, 20 nt, Human
agggcugagaagggacuagc

SEQ ID NO: 1059259 - RNA, 22 nt, Human
ucuaugaaaagucuauucauuc

SEQ ID NO: 1059260 - RNA, 22 nt, Human
aaauauuugucugaggcgguug

SEQ ID NO: 1059261 - RNA, 22 nt, Human
guuauuagaagugaaggauugu

SEQ ID NO: 1059262 - RNA, 22 nt, Human
augaccagccgagauaaacaga

SEQ ID NO: 1059263 - RNA, 22 nt, Human
aauguaugcugugguaucuucu

SEQ ID NO: 1059264 - RNA, 22 nt, Human
gcaggcuccaacuggaggaguu

SEQ ID NO: 1059265 - RNA, 22 nt, Human
acacacaugcaugcuugccauu

SEQ ID NO: 1059266 - RNA, 22 nt, Human
caccugcagggggagucaagag

SEQ ID NO: 1059267 - RNA, 22 nt, Human
uguccagguggccucugcugcu

SEQ ID NO: 1059268 - RNA, 22 nt, Human
guuucuuagguaaauucuuuga

SEQ ID NO: 1059269 - RNA, 22 nt, Human
auugaaaaauucacaauucugg

SEQ ID NO: 1059270 - RNA, 22 nt, Human
caggucuguuuccaucagugcu

SEQ ID NO: 1059271 - RNA, 23 nt, Human
uuucacaaugagcauuacagaau

SEQ ID NO: 1059272 - RNA, 19 nt, Human
agacaaguuuccagaagcc

SEQ ID NO: 1059273 - RNA, 22 nt, Human
uuccaggcucccuuggaggugu

SEQ ID NO: 1059274 - RNA, 22 nt, Human
aaaguuaguuucuuauaugucu

SEQ ID NO: 1059275 - RNA, 22 nt, Human
uuagcauuucaguacacauguu

SEQ ID NO: 1059276 - RNA, 22 nt, Human
gauggccuuguuuucucccuuc

SEQ ID NO: 1059277 - RNA, 22 nt, Human
gcuggcagguccaagauagagc

SEQ ID NO: 1059278 - RNA, 22 nt, Human
uguuuauugagugccuacuaua

SEQ ID NO: 1059279 - RNA, 22 nt, Human
uucaaaauuguucuaagcucug

SEQ ID NO: 1059280 - RNA, 22 nt, Human
agaggcuuggaggugcaagguu

SEQ ID NO: 1059281 - RNA, 22 nt, Human
gcaguguuuacauauuagaaac

SEQ ID NO: 1059282 - RNA, 22 nt, Human
uuauuuacaacucuucucuucc

SEQ ID NO: 1059283 - RNA, 22 nt, Human
ugggcugaacuucaucugauga

SEQ ID NO: 1059284 - RNA, 22 nt, Human
ccccacccucgcuccauuucgg

SEQ ID NO: 1059285 - RNA, 22 nt, Human
uccuaguucucugccagucgcu

SEQ ID NO: 1059286 - RNA, 22 nt, Human
acaggcucucagccaguuggca

SEQ ID NO: 1059287 - RNA, 22 nt, Human
aggcuccugcaggugaggugcu

SEQ ID NO: 1059288 - RNA, 22 nt, Human
uguagaaccuguuuauuauaga

SEQ ID NO: 1059289 - RNA, 22 nt, Human
uggaacacaagucauugagggg

SEQ ID NO: 1059290 - RNA, 22 nt, Human
uucacacacagcuuccuauugu

SEQ ID NO: 1059291 - RNA, 22 nt, Human
agggccucugacgcccccagcc

SEQ ID NO: 1059292 - RNA, 22 nt, Human
uuguaugaccacaaucugacgu

SEQ ID NO: 1059293 - RNA, 22 nt, Human
acuucacagaaauuuuaugagg

SEQ ID NO: 1059294 - RNA, 22 nt, Human
ucuuuuucugcacacguguccc

SEQ ID NO: 1059295 - RNA, 22 nt, Human
gggaccuggcaccuuugcucug

SEQ ID NO: 1059296 - RNA, 22 nt, Human
gggggcucugacucccucagcu

SEQ ID NO: 1059297 - RNA, 22 nt, Human
ccugcagggugcugccacagau

SEQ ID NO: 1059298 - RNA, 22 nt, Human
gauucacucauauuuuacguuu

SEQ ID NO: 1059299 - RNA, 22 nt, Human
ggggcugacgggcauguggcuu

SEQ ID NO: 1059300 - RNA, 23 nt, Human
uauuagggccaggacuggcaaau

SEQ ID NO: 1059301 - RNA, 22 nt, Human
ugcacaggugagacucaggaag

SEQ ID NO: 1059302 - RNA, 22 nt, Human
cagggcucgcucgcucgcucgc

SEQ ID NO: 1059303 - RNA, 23 nt, Human
ugagcaucacaggagaaccaggc

SEQ ID NO: 1059304 - RNA, 22 nt, Human
aggggugugcauccuggaggau

SEQ ID NO: 1059305 - RNA, 20 nt, Human
gcuccaggucagagaggacg

SEQ ID NO: 1059306 - RNA, 22 nt, Human
cccugcagaccaaugccauaga

SEQ ID NO: 1059307 - RNA, 22 nt, Human
ugggccagcugaagugccgccc

SEQ ID NO: 1059308 - RNA, 22 nt, Human
cccugcagagccagcccugacc

SEQ ID NO: 1059309 - RNA, 22 nt, Human
gacacauagaucuaucucacuc

SEQ ID NO: 1059310 - RNA, 22 nt, Human
guaguuuucugaaaauuacuuu

SEQ ID NO: 1059311 - RNA, 22 nt, Human
cagaagaguagcugaacaaguu

SEQ ID NO: 1059312 - RNA, 22 nt, Human
cuggcuuucauuucaagcacgu

SEQ ID NO: 1059313 - RNA, 22 nt, Human
guuuucauuacugcugugauuu

SEQ ID NO: 1059314 - RNA, 22 nt, Human
acuggcagugucguuuacauga

SEQ ID NO: 1059315 - RNA, 22 nt, Human
uguggagacuauagccauaaca

SEQ ID NO: 1059316 - RNA, 22 nt, Human
gcagagcacccugcagugguau

SEQ ID NO: 1059317 - RNA, 22 nt, Human
uucaugaaacuuaacuguuggg

SEQ ID NO: 1059318 - RNA, 22 nt, Human
uccugcagcugauaaauacagu

SEQ ID NO: 1059319 - RNA, 22 nt, Human
augcuacagaguuugaauaugu

SEQ ID NO: 1059320 - RNA, 22 nt, Human
uuccaaguccagccaggccaaa

SEQ ID NO: 1059321 - RNA, 22 nt, Human
ccugggcuguugcaucauccuu

SEQ ID NO: 1059322 - RNA, 22 nt, Human
caguguggcugagacagaggcu

SEQ ID NO: 1059323 - RNA, 22 nt, Human
ccuggcaggcuggggacagugc

SEQ ID NO: 1059324 - RNA, 18 nt, Human
ccuggcagccaugcgcgc

SEQ ID NO: 1059325 - RNA, 20 nt, Human
auacacaugcagacagaugc

SEQ ID NO: 1059326 - RNA, 22 nt, Human
ccacuguagagauuugaaugcc

SEQ ID NO: 1059327 - RNA, 22 nt, Human
aacacagcuaauuucugucaau

SEQ ID NO: 1059328 - RNA, 22 nt, Human
ugcuucuggguaggccucagga

SEQ ID NO: 1059329 - RNA, 22 nt, Human
gccugcagccagggaguucucu

SEQ ID NO: 1059330 - RNA, 22 nt, Human
acagguccucaagucagcuggg

SEQ ID NO: 1059331 - RNA, 22 nt, Human
gggccccuugcugcucugcugg

SEQ ID NO: 1059332 - RNA, 22 nt, Human
ucauaaaugcagugucauaaau

SEQ ID NO: 1059333 - RNA, 22 nt, Human
ccagccuuacugcccuucagug

SEQ ID NO: 1059334 - RNA, 22 nt, Human
uggccugccacugccacgccac

SEQ ID NO: 1059335 - RNA, 22 nt, Human
gcugggcuucucaaugcugccu

SEQ ID NO: 1059336 - RNA, 22 nt, Human
cuccaggccccuggccuucugc

SEQ ID NO: 1059337 - RNA, 22 nt, Human
augggcugaaagaguaagcugu

SEQ ID NO: 1059338 - RNA, 22 nt, Human
cccaggcagucuggcucuaaag

SEQ ID NO: 1059339 - RNA, 22 nt, Human
gagggcucuaccaaguaacucu

SEQ ID NO: 1059340 - RNA, 22 nt, Human
ccugggcuggaguacagcagug

SEQ ID NO: 1059341 - RNA, 22 nt, Human
ugaagcuugagugucaguuccu

SEQ ID NO: 1059342 - RNA, 23 nt, Human
ugccaaaguuuaccuaacacugg

SEQ ID NO: 1059343 - RNA, 22 nt, Human
guaugaaaauuguaaaguucuu

SEQ ID NO: 1059344 - RNA, 22 nt, Human
caucacagguccugaugacauu

SEQ ID NO: 1059345 - RNA, 22 nt, Human
gucacacagggccuccaaauca

SEQ ID NO: 1059346 - RNA, 22 nt, Human
cuggggacgucgggcaguguuc

SEQ ID NO: 1059347 - RNA, 22 nt, Human
uccaggaggaggaaggcugcca

SEQ ID NO: 1059348 - RNA, 22 nt, Human
augcuacauuuugguuuauaaa

SEQ ID NO: 1059349 - RNA, 22 nt, Human
ucagggacagggugcugcugcg

SEQ ID NO: 1059350 - RNA, 22 nt, Human
cugugggaacacugaggacuuc

SEQ ID NO: 1059351 - RNA, 22 nt, Human
cuucugggccauggccuuccuc

SEQ ID NO: 1059352 - RNA, 22 nt, Human
uucugucacagugcugguauca

SEQ ID NO: 1059353 - RNA, 22 nt, Human
gcacacagcuagauuaccauuc

SEQ ID NO: 1059354 - RNA, 22 nt, Human
auaugaagaauuccaauuugga

SEQ ID NO: 1059355 - RNA, 22 nt, Human
gagacugcauagauggccacaa

SEQ ID NO: 1059356 - RNA, 22 nt, Human
ggcuuuaugcacagcagauggu

SEQ ID NO: 1059357 - RNA, 22 nt, Human
acagagagguaaaauauauagu

SEQ ID NO: 1059358 - RNA, 22 nt, Human
acacacuguugcucauccaggc

SEQ ID NO: 1059359 - RNA, 22 nt, Human
augggcugaggugggauagaag

SEQ ID NO: 1059360 - RNA, 22 nt, Human
aauugucaaacacaaauaagag

SEQ ID NO: 1059361 - RNA, 22 nt, Human
aggccuuaccauagcuguagca

SEQ ID NO: 1059362 - RNA, 22 nt, Human
cagagggcucggcggccgcucc

SEQ ID NO: 1059363 - RNA, 18 nt, Human
ggcagggaaaagauaggg

SEQ ID NO: 1059364 - RNA, 22 nt, Human
cccaggcacaccccgaacggaa

SEQ ID NO: 1059365 - RNA, 22 nt, Human
uccaggccauugacugcauccu

SEQ ID NO: 1059366 - RNA, 22 nt, Human
ccugggcugggcgucucauggg

SEQ ID NO: 1059367 - RNA, 22 nt, Human
uuugcaaauauguguuucuauu

SEQ ID NO: 1059368 - RNA, 22 nt, Human
uuauucugcacuuuuaaaauau

SEQ ID NO: 1059369 - RNA, 21 nt, Human
aauguauguuuaucucacagu

SEQ ID NO: 1059370 - RNA, 22 nt, Human
gcuccuggguguggcugccccu

SEQ ID NO: 1059371 - RNA, 22 nt, Human
ccaggcaggcgauggugcagug

SEQ ID NO: 1059372 - RNA, 21 nt, Human
ccugggcugugguuuggagac

SEQ ID NO: 1059373 - RNA, 22 nt, Human
uuucauaauacuguacaugaaa

SEQ ID NO: 1059374 - RNA, 22 nt, Human
gcuucuggaagcugcuucugcc

SEQ ID NO: 1059375 - RNA, 19 nt, Human
cgcaggcuucgggucgcuc

SEQ ID NO: 1059376 - RNA, 22 nt, Human
guuuucaugucuauugggcaua

SEQ ID NO: 1059377 - RNA, 22 nt, Human
aaauacagauuccagggucuua

SEQ ID NO: 1059378 - RNA, 22 nt, Human
augugaaauagcuggauaugaa

SEQ ID NO: 1059379 - RNA, 22 nt, Human
auaugaagucagacaaacuggg

SEQ ID NO: 1059380 - RNA, 21 nt, Human
uaaaucucuguauucuucagu

SEQ ID NO: 1059381 - RNA, 22 nt, Human
cugccugcugcccuccagagcc

SEQ ID NO: 1059382 - RNA, 22 nt, Human
ccaggcucaccuggagccccug

SEQ ID NO: 1059383 - RNA, 22 nt, Human
aaaccaucagauaauucauacu

SEQ ID NO: 1059384 - RNA, 22 nt, Human
cagggcucaucugugugaccag

SEQ ID NO: 1059385 - RNA, 22 nt, Human
acagcuuuuuacuaauagauug

SEQ ID NO: 1059386 - RNA, 22 nt, Human
ccaggcuguaagagugauguug

SEQ ID NO: 1059387 - RNA, 22 nt, Human
uacauaaugagcuaguuaaguu

SEQ ID NO: 1059388 - RNA, 22 nt, Human
acaggcucgugcgcgcacgugu

SEQ ID NO: 1059389 - RNA, 22 nt, Human
gcacauaaagggcaugggaggu

SEQ ID NO: 1059390 - RNA, 22 nt, Human
acaucacagagcccagauaaag

SEQ ID NO: 1059391 - RNA, 22 nt, Human
aauguaugagcgugaaagcacu

SEQ ID NO: 1059392 - RNA, 22 nt, Human
gaugaagccccaguguaaguaa

SEQ ID NO: 1059393 - RNA, 22 nt, Human
agcuuuguggcuuugcaagacu

SEQ ID NO: 1059394 - RNA, 22 nt, Human
auuucauagauuguaaaucccu

SEQ ID NO: 1059395 - RNA, 22 nt, Human
gcacccagccagcaucucagag

SEQ ID NO: 1059396 - RNA, 22 nt, Human
uguauacaggauuacucauagc

SEQ ID NO: 1059397 - RNA, 22 nt, Human
agaauaugaugguuggagaauu

SEQ ID NO: 1059398 - RNA, 22 nt, Human
augauuucuauauaaacuuaaa

SEQ ID NO: 1059399 - RNA, 22 nt, Human
uuuaauuugaaaugaguaaccc

SEQ ID NO: 1059400 - RNA, 22 nt, Human
cuuagggagaaugccucugcag

SEQ ID NO: 1059401 - RNA, 22 nt, Human
ggcuuuaugcagggauagaaau

SEQ ID NO: 1059402 - RNA, 22 nt, Human
ugaaaucaaugucuucugucuc

SEQ ID NO: 1059403 - RNA, 20 nt, Human
guauuagguguuccucuuuc

SEQ ID NO: 1059404 - RNA, 18 nt, Human
ucaggcucucuggcuaga

SEQ ID NO: 1059405 - RNA, 22 nt, Human
acacacagcgccuaccaugugc

SEQ ID NO: 1059406 - RNA, 22 nt, Human
guggcagucgcugacagauaca

SEQ ID NO: 1059407 - RNA, 22 nt, Human
uguuucuuuguagauauucuuu

SEQ ID NO: 1059408 - RNA, 22 nt, Human
agggcuccugaggcccuucugg

SEQ ID NO: 1059409 - RNA, 22 nt, Human
ucagcuuucucuucuaucgaua

SEQ ID NO: 1059410 - RNA, 21 nt, Human
ccacucaugacuccacucacc

SEQ ID NO: 1059411 - RNA, 22 nt, Human
ugcacagcuggcucuccuuuuc

SEQ ID NO: 1059412 - RNA, 22 nt, Human
cuucuggguauuccagauaccu

SEQ ID NO: 1059413 - RNA, 22 nt, Human
accaggcagcaccaaagccggu

SEQ ID NO: 1059414 - RNA, 22 nt, Human
gguuucaacuaaaucaagaagg

SEQ ID NO: 1059415 - RNA, 22 nt, Human
uguauaaacuuaagcaggaacc

SEQ ID NO: 1059416 - RNA, 22 nt, Human
gccaggcauuuauugauugaau

SEQ ID NO: 1059417 - RNA, 22 nt, Human
ucaggcucugccaccuagauua

SEQ ID NO: 1059418 - RNA, 22 nt, Human
uccugaggcacaauccuagaau

SEQ ID NO: 1059419 - RNA, 22 nt, Human
cagaguuuuaucauacguggau

SEQ ID NO: 1059420 - RNA, 22 nt, Human
cccagccuuccacccuggacua

SEQ ID NO: 1059421 - RNA, 22 nt, Human
uuuuccuucugauacuccauuu

SEQ ID NO: 1059422 - RNA, 22 nt, Human
cagcccaggccgacaguuccuc

SEQ ID NO: 1059423 - RNA, 22 nt, Human
aaauuauuacaagcuaguuggc

SEQ ID NO: 1059424 - RNA, 22 nt, Human
ucaguuaacaacuauuuauuga

SEQ ID NO: 1059425 - RNA, 22 nt, Human
cugggcuuaggaccuggugcgg

SEQ ID NO: 1059426 - RNA, 22 nt, Human
acagaguccuagcugcaaagaa

SEQ ID NO: 1059427 - RNA, 22 nt, Human
aauacuauguagccaaaauaau

SEQ ID NO: 1059428 - RNA, 22 nt, Human
gacagccaucagcacacgcugc

SEQ ID NO: 1059429 - RNA, 22 nt, Human
uaacacauauuucaagaguagu

SEQ ID NO: 1059430 - RNA, 22 nt, Human
uuguaugaguaugguguauagg

SEQ ID NO: 1059431 - RNA, 22 nt, Human
cuuguuaaaaugcagauuccaa

SEQ ID NO: 1059432 - RNA, 22 nt, Human
uguaggaaaaacaaugaucugc

SEQ ID NO: 1059433 - RNA, 22 nt, Human
gcacacaguauaugcucauuaa

SEQ ID NO: 1059434 - RNA, 22 nt, Human
gcacccagagggcagggucucc

SEQ ID NO: 1059435 - RNA, 22 nt, Human
agcuuuauuaacucuccaggug

SEQ ID NO: 1059436 - RNA, 22 nt, Human
aaauacauacacuguacguggc

SEQ ID NO: 1059437 - RNA, 22 nt, Human
ggggaccuuuccauuucugaga

SEQ ID NO: 1059438 - RNA, 22 nt, Human
agggacuauuuacccaucucac

SEQ ID NO: 1059439 - RNA, 18 nt, Human
auccuugaugagaggucu

SEQ ID NO: 1059440 - RNA, 22 nt, Human
gaugaagcuuugaagucuaauc

SEQ ID NO: 1059441 - RNA, 22 nt, Human
gguuuccugcauugggaaauuu

SEQ ID NO: 1059442 - RNA, 22 nt, Human
cugcaggggcuggaguuggcuu

SEQ ID NO: 1059443 - RNA, 22 nt, Human
gcaggcuccaggccggccccuu

SEQ ID NO: 1059444 - RNA, 22 nt, Human
uuuucauuguuacuaugagcua

SEQ ID NO: 1059445 - RNA, 22 nt, Human
ggggcugagucagugggaagag

SEQ ID NO: 1059446 - RNA, 22 nt, Human
guggcagggugcucaucaugca

SEQ ID NO: 1059447 - RNA, 22 nt, Human
gaauuucuggacccuuugagaa

SEQ ID NO: 1059448 - RNA, 23 nt, Human
ucugcagacgcuguucuauuguc

SEQ ID NO: 1059449 - RNA, 22 nt, Human
cagggggugcaggcccugugac

SEQ ID NO: 1059450 - RNA, 22 nt, Human
auguuucaaauauauagaguug

SEQ ID NO: 1059451 - RNA, 20 nt, Human
ccugggcuccaggagccccg

SEQ ID NO: 1059452 - RNA, 22 nt, Human
acagcucuguugccagaucugc

SEQ ID NO: 1059453 - RNA, 22 nt, Human
uccaggcaaaaaccaacuacag

SEQ ID NO: 1059454 - RNA, 22 nt, Human
uuucacauaugguuguugauug

SEQ ID NO: 1059455 - RNA, 22 nt, Human
aauaauuuuagcucagaguugu

SEQ ID NO: 1059456 - RNA, 22 nt, Human
ccagauagaaaagaaggcagga

SEQ ID NO: 1059457 - RNA, 22 nt, Human
gagcucagauucuggugucaga

SEQ ID NO: 1059458 - RNA, 22 nt, Human
cuggggacugaaggauguugcu

SEQ ID NO: 1059459 - RNA, 22 nt, Human
acaauacuuaccaauguuuuug

SEQ ID NO: 1059460 - RNA, 22 nt, Human
caaagucagccagcuaguaggu

SEQ ID NO: 1059461 - RNA, 22 nt, Human
aucacuguuaucuagaagcaca

SEQ ID NO: 1059462 - RNA, 21 nt, Human
acacacugaguuuuccacugu

SEQ ID NO: 1059463 - RNA, 21 nt, Human
uggaccuguccuucucgcugu

SEQ ID NO: 1059464 - RNA, 22 nt, Human
aggcuguguggaugagucuuac

SEQ ID NO: 1059465 - RNA, 22 nt, Human
uggguaggggacguggaagaaa

SEQ ID NO: 1059466 - RNA, 22 nt, Human
aggcugugggaguugagagucu

SEQ ID NO: 1059467 - RNA, 22 nt, Human
ugcuucugcaggagcuccugau

SEQ ID NO: 1059468 - RNA, 22 nt, Human
ggaggugggcuaaggacucucu

SEQ ID NO: 1059469 - RNA, 22 nt, Human
aaguguuuggggaucauuuuaa

SEQ ID NO: 1059470 - RNA, 22 nt, Human
uuagggacagcucuguagguga

SEQ ID NO: 1059471 - RNA, 22 nt, Human
caaauauuccagguacaucccu

SEQ ID NO: 1059472 - RNA, 20 nt, Human
uuccacaucuuugcacaugc

SEQ ID NO: 1059473 - RNA, 22 nt, Human
aaaguuuguugcuuacaaagaa

SEQ ID NO: 1059474 - RNA, 22 nt, Human
gcuggcaggagccuuucccuuu

SEQ ID NO: 1059475 - RNA, 22 nt, Human
ugcuuuauaucucucuucuuag

SEQ ID NO: 1059476 - RNA, 22 nt, Human
aacauucaaaacccaguucagu

SEQ ID NO: 1059477 - RNA, 22 nt, Human
caucacagaaauaaacauaccu

SEQ ID NO: 1059478 - RNA, 22 nt, Human
augggcugacaagacaugcaua

SEQ ID NO: 1059479 - RNA, 22 nt, Human
gcugucugccgcaggcugccac

SEQ ID NO: 1059480 - RNA, 22 nt, Human
uucugggguuaugggugauucu

SEQ ID NO: 1059481 - RNA, 22 nt, Human
gccaggcagagccccgugcagc

SEQ ID NO: 1059482 - RNA, 22 nt, Human
acaaauuuauugaagggcauau

SEQ ID NO: 1059483 - RNA, 22 nt, Human
gagcuuuaagggauaaaaugau

SEQ ID NO: 1059484 - RNA, 22 nt, Human
ccugccuucagcccugaagucu

SEQ ID NO: 1059485 - RNA, 22 nt, Human
agggcugacagugaggagucaa

SEQ ID NO: 1059486 - RNA, 22 nt, Human
cauuugcagagggugacacucu

SEQ ID NO: 1059487 - RNA, 21 nt, Human
cacacagugaucuauccacau

SEQ ID NO: 1059488 - RNA, 22 nt, Human
uuugugaauagguuggcuucca

SEQ ID NO: 1059489 - RNA, 22 nt, Human
aauacugucuuucacagauauu

SEQ ID NO: 1059490 - RNA, 22 nt, Human
aagcuuuaugacuuggagacag

SEQ ID NO: 1059491 - RNA, 22 nt, Human
agcucccaggcagucaugagga

SEQ ID NO: 1059492 - RNA, 22 nt, Human
auuauuucucacucacauaaua

SEQ ID NO: 1059493 - RNA, 22 nt, Human
cagccaggauggagaacuguug

SEQ ID NO: 1059494 - RNA, 20 nt, Human
guggcaggcagugaaggagc

SEQ ID NO: 1059495 - RNA, 22 nt, Human
ccagagaggggaagggcuugcc

SEQ ID NO: 1059496 - RNA, 22 nt, Human
uaacacaugguuaguacacaau

SEQ ID NO: 1059497 - RNA, 22 nt, Human
cugccugccacguucagcugua

SEQ ID NO: 1059498 - RNA, 22 nt, Human
gaggacucugggcguguauggg

SEQ ID NO: 1059499 - RNA, 22 nt, Human
gcuucuggagucuucagaggaa

SEQ ID NO: 1059500 - RNA, 19 nt, Human
uggaccugugcccauggcu

SEQ ID NO: 1059501 - RNA, 22 nt, Human
ugcuucuguauuuugggcuuga

SEQ ID NO: 1059502 - RNA, 22 nt, Human
cccaggcauuuucaacuuuagu

SEQ ID NO: 1059503 - RNA, 22 nt, Human
ccuggggagaagagcuuccccc

SEQ ID NO: 1059504 - RNA, 22 nt, Human
ugugaaauauuuauauacucaa

SEQ ID NO: 1059505 - RNA, 22 nt, Human
ggggcucaguucggacagccug

SEQ ID NO: 1059506 - RNA, 22 nt, Human
uuauuugcccauguuuagcaga

SEQ ID NO: 1059507 - RNA, 22 nt, Human
cccagcaugcacgcugacacuc

SEQ ID NO: 1059508 - RNA, 22 nt, Human
gcuggggaccagcugucucuga

SEQ ID NO: 1059509 - RNA, 22 nt, Human
cuuuucaugagucuguuauggg

SEQ ID NO: 1059510 - RNA, 20 nt, Human
cugaaccaaggcuuucucag

SEQ ID NO: 1059511 - RNA, 22 nt, Human
uugucaaguaaggcugacauuu

SEQ ID NO: 1059512 - RNA, 22 nt, Human
cuuucauucuuagauauuagug

SEQ ID NO: 1059513 - RNA, 22 nt, Human
accugcaggcacaggugugcgc

SEQ ID NO: 1059514 - RNA, 22 nt, Human
acagauuuuauuauucagguau

SEQ ID NO: 1059515 - RNA, 22 nt, Human
ccaggcccugcuccucacacca

SEQ ID NO: 1059516 - RNA, 22 nt, Human
acgugcaggaucugguuggcga

SEQ ID NO: 1059517 - RNA, 22 nt, Human
aggaccuguagggccugcaucc

SEQ ID NO: 1059518 - RNA, 22 nt, Human
ggcucugcaugugagugggugg

SEQ ID NO: 1059519 - RNA, 23 nt, Human
acauacauggagauaaagugaug

SEQ ID NO: 1059520 - RNA, 22 nt, Human
cuucccacuaguaucacagagc

SEQ ID NO: 1059521 - RNA, 22 nt, Human
guccucuggaagaugaguucuu

SEQ ID NO: 1059522 - RNA, 22 nt, Human
gucuucuguucugugaggcuuc

SEQ ID NO: 1059523 - RNA, 21 nt, Human
acugggcuagccugacuucug

SEQ ID NO: 1059524 - RNA, 22 nt, Human
ccuggggaauagagucaagggg

SEQ ID NO: 1059525 - RNA, 22 nt, Human
aggccacaguacuuugcagacc

SEQ ID NO: 1059526 - RNA, 22 nt, Human
ucucuuaaaagauuuuaaugac

SEQ ID NO: 1059527 - RNA, 22 nt, Human
cagaagaggacuggguagcuca

SEQ ID NO: 1059528 - RNA, 22 nt, Human
aucucccagccacagcauucuu

SEQ ID NO: 1059529 - RNA, 22 nt, Human
cugagagaucaagccacaggau

SEQ ID NO: 1059530 - RNA, 22 nt, Human
caucaaauaggaauauuuggca

SEQ ID NO: 1059531 - RNA, 22 nt, Human
ucccuccccacuucugagcuuu

SEQ ID NO: 1059532 - RNA, 20 nt, Human
aaagagcccuuggagcaggc

SEQ ID NO: 1059533 - RNA, 22 nt, Human
aagggcucgguagcaguccuga

SEQ ID NO: 1059534 - RNA, 19 nt, Human
gcuggcagauguggccgug

SEQ ID NO: 1059535 - RNA, 23 nt, Human
ggccucagcgcacagaaacugcu

SEQ ID NO: 1059536 - RNA, 22 nt, Human
ucuggcagagugauaggauaag

SEQ ID NO: 1059537 - RNA, 22 nt, Human
aaucacuuuucucuaauguagc

SEQ ID NO: 1059538 - RNA, 22 nt, Human
uucucauggugucuuuauacau

SEQ ID NO: 1059539 - RNA, 22 nt, Human
ugugaaauucuugaaaugcaca

SEQ ID NO: 1059540 - RNA, 23 nt, Human
ugcaggcuaggaagagagccuuc

SEQ ID NO: 1059541 - RNA, 22 nt, Human
cugcaggggccucgagcacagg

SEQ ID NO: 1059542 - RNA, 22 nt, Human
agcaggcuccuuccuucucugg

SEQ ID NO: 1059543 - RNA, 22 nt, Human
guuuuauaggcuguugcuauau

SEQ ID NO: 1059544 - RNA, 22 nt, Human
cacaaaaguaggaggcaggcgg

SEQ ID NO: 1059545 - RNA, 18 nt, Human
guuaauuuugaaguucau

SEQ ID NO: 1059546 - RNA, 22 nt, Human
ugcuuaaacauacuauuuauau

SEQ ID NO: 1059547 - RNA, 22 nt, Human
cucugagauaguuucuaucaau

SEQ ID NO: 1059548 - RNA, 22 nt, Human
uuugaaaauuagacacaggcua

SEQ ID NO: 1059549 - RNA, 22 nt, Human
ugcaggcuguuugguggaucuc

SEQ ID NO: 1059550 - RNA, 22 nt, Human
aaugauugcaaacauugagaac

SEQ ID NO: 1059551 - RNA, 21 nt, Human
cauuagggcagaagcaggaag

SEQ ID NO: 1059552 - RNA, 22 nt, Human
acagcuuuaucucagggaucag

SEQ ID NO: 1059553 - RNA, 22 nt, Human
cacacacugacaccuuaucuug

SEQ ID NO: 1059554 - RNA, 22 nt, Human
aucagagauuguaguaugugca

SEQ ID NO: 1059555 - RNA, 22 nt, Human
uggcagugggaauggacaaaca

SEQ ID NO: 1059556 - RNA, 22 nt, Human
ggcaggcuguucaccugcuuuu

SEQ ID NO: 1059557 - RNA, 22 nt, Human
uccaggcaagggaggagcaugg

SEQ ID NO: 1059558 - RNA, 22 nt, Human
ucgggcucgcucuccuagcgga

SEQ ID NO: 1059559 - RNA, 22 nt, Human
auugcuuaucuaucuuuaaguc

SEQ ID NO: 1059560 - RNA, 22 nt, Human
cucagagaaaaggagcaagggu

SEQ ID NO: 1059561 - RNA, 22 nt, Human
gcugggcuugguuucccugcuu

SEQ ID NO: 1059562 - RNA, 22 nt, Human
ugggcuccuugggagcaaguga

SEQ ID NO: 1059563 - RNA, 22 nt, Human
uucucuuagcuguaaagucaau

SEQ ID NO: 1059564 - RNA, 22 nt, Human
gcuucuggaggagcugggcuga

SEQ ID NO: 1059565 - RNA, 22 nt, Human
auacauucaaaggaaggauaga

SEQ ID NO: 1059566 - RNA, 22 nt, Human
ucccaggcuggcaggcagcagu

SEQ ID NO: 1059567 - RNA, 22 nt, Human
aauuagggagagguagcuaggu

SEQ ID NO: 1059568 - RNA, 22 nt, Human
cccugcagcauucucuaacugg

SEQ ID NO: 1059569 - RNA, 22 nt, Human
ccacacagucaguuuccaagaa

SEQ ID NO: 1059570 - RNA, 22 nt, Human
uuucacauuuguuuuaagaagu

SEQ ID NO: 1059571 - RNA, 22 nt, Human
uccuggcaguaauuugauguug

SEQ ID NO: 1059572 - RNA, 22 nt, Human
cugggcuuugaagccaggcugc

SEQ ID NO: 1059573 - RNA, 22 nt, Human
accaggcaaaaccacaggagca

SEQ ID NO: 1059574 - RNA, 22 nt, Human
uguaaacauauguauguaugua

SEQ ID NO: 1059575 - RNA, 22 nt, Human
uuguuucaggaugguuuguuac

SEQ ID NO: 1059576 - RNA, 22 nt, Human
ugucuuuaaaauuaaacacauc

SEQ ID NO: 1059577 - RNA, 22 nt, Human
uggcagagaacacacaugauuc

SEQ ID NO: 1059578 - RNA, 22 nt, Human
uucccaguuagucauuuuuaca

SEQ ID NO: 1059579 - RNA, 22 nt, Human
ugcuucuguauugaaauuguua

SEQ ID NO: 1059580 - RNA, 22 nt, Human
gaggagcucugcuccauccuuc

SEQ ID NO: 1059581 - RNA, 22 nt, Human
uuccaaguguugagauuagagg

SEQ ID NO: 1059582 - RNA, 22 nt, Human
ucugggcugggagcguguggac

SEQ ID NO: 1059583 - RNA, 22 nt, Human
aaaguucuuucucuuauuuggu

SEQ ID NO: 1059584 - RNA, 22 nt, Human
auguuggagucguaaggcaugg

SEQ ID NO: 1059585 - RNA, 22 nt, Human
cuccuggcaguuccccuuguca

SEQ ID NO: 1059586 - RNA, 22 nt, Human
aguugggaguuauagacucuau

SEQ ID NO: 1059587 - RNA, 19 nt, Human
ccaggccugcgggcguugg

SEQ ID NO: 1059588 - RNA, 22 nt, Human
gccugcagaggugcugcuagcu

SEQ ID NO: 1059589 - RNA, 22 nt, Human
cugggcuugaguuccugcucgu

SEQ ID NO: 1059590 - RNA, 22 nt, Human
cucauaaugugacuguauuuga

SEQ ID NO: 1059591 - RNA, 22 nt, Human
cuaggaaugguaccucuuacaa

SEQ ID NO: 1059592 - RNA, 22 nt, Human
uaugagaaucugcaguaugcuu

SEQ ID NO: 1059593 - RNA, 22 nt, Human
uccaggcauuccagccauucca

SEQ ID NO: 1059594 - RNA, 22 nt, Human
cugggcugucaguuuuguuuua

SEQ ID NO: 1059595 - RNA, 22 nt, Human
aagggacccuggaucaaaugga

SEQ ID NO: 1059596 - RNA, 22 nt, Human
uccaagcucucuaugccaugau

SEQ ID NO: 1059597 - RNA, 22 nt, Human
uguuugaacugaauaacauagu

SEQ ID NO: 1059598 - RNA, 22 nt, Human
uuuuccuuucaucaggacaaag

SEQ ID NO: 1059599 - RNA, 22 nt, Human
gggaccuggucuagcacugagc

SEQ ID NO: 1059600 - RNA, 22 nt, Human
caauguaucaaccagaaaguuc

SEQ ID NO: 1059601 - RNA, 22 nt, Human
uacaaaugaguuguaugaacca

SEQ ID NO: 1059602 - RNA, 22 nt, Human
ucacuguagugagcagaauaua

SEQ ID NO: 1059603 - RNA, 22 nt, Human
acagcuuuucugauagauccug

SEQ ID NO: 1059604 - RNA, 22 nt, Human
aaacacaccuuuggaacuguga

SEQ ID NO: 1059605 - RNA, 22 nt, Human
uaacacauuuuccucauacgga

SEQ ID NO: 1059606 - RNA, 22 nt, Human
cagagaaagaagcccauucauu

SEQ ID NO: 1059607 - RNA, 22 nt, Human
uuggagagauuuaggucucagu

SEQ ID NO: 1059608 - RNA, 22 nt, Human
ucucuuaauuguaaugguuccu

SEQ ID NO: 1059609 - RNA, 22 nt, Human
uauugaggaucuccugcuaauu

SEQ ID NO: 1059610 - RNA, 22 nt, Human
ccuggcaggacuguuguaagaa

SEQ ID NO: 1059611 - RNA, 22 nt, Human
uuucuacagcuggugcaacuuu

SEQ ID NO: 1059612 - RNA, 21 nt, Human
aauuacagauggaauuacaga

SEQ ID NO: 1059613 - RNA, 22 nt, Human
ugcuauaaguagacauucaaca

SEQ ID NO: 1059614 - RNA, 23 nt, Human
cccagagcacagccuccagaugc

SEQ ID NO: 1059615 - RNA, 22 nt, Human
guccucugggagccuugagccu

SEQ ID NO: 1059616 - RNA, 22 nt, Human
guggcagugaaggucauagcau

SEQ ID NO: 1059617 - RNA, 22 nt, Human
auuuucauggcuucugcucagu

SEQ ID NO: 1059618 - RNA, 22 nt, Human
ugucaaagccugaaucacauag

SEQ ID NO: 1059619 - RNA, 22 nt, Human
uauguacuacacuagaacauuu

SEQ ID NO: 1059620 - RNA, 22 nt, Human
aucugggggagcugcucaugga

SEQ ID NO: 1059621 - RNA, 22 nt, Human
aagugccaucauagcauggcug

SEQ ID NO: 1059622 - RNA, 22 nt, Human
cccuuccuccucgccugucaga

SEQ ID NO: 1059623 - RNA, 22 nt, Human
uaugaacuguacuguacuaagc

SEQ ID NO: 1059624 - RNA, 22 nt, Human
uuucuacauucaaaaacuacca

SEQ ID NO: 1059625 - RNA, 22 nt, Human
acacagaugcauuacacaucua

SEQ ID NO: 1059626 - RNA, 22 nt, Human
cacaauuuuaauacacagucaa

SEQ ID NO: 1059627 - RNA, 22 nt, Human
cucugagcagaggccguggcua

SEQ ID NO: 1059628 - RNA, 22 nt, Human
ucaucacauguguagucauccc

SEQ ID NO: 1059629 - RNA, 23 nt, Human
uuuauuuauuuaggcugagggau

SEQ ID NO: 1059630 - RNA, 22 nt, Human
ggcuucuguccucuggaucugu

SEQ ID NO: 1059631 - RNA, 22 nt, Human
cgugagcaaaauggacacuccc

SEQ ID NO: 1059632 - RNA, 22 nt, Human
gcaaguacaaacgcaucggcug

SEQ ID NO: 1059633 - RNA, 22 nt, Human
ucuguggaaauuuccugaggca

SEQ ID NO: 1059634 - RNA, 22 nt, Human
cacccagcuuuugcauccuccg

SEQ ID NO: 1059635 - RNA, 22 nt, Human
aggagcugcagauucugccuug

SEQ ID NO: 1059636 - RNA, 22 nt, Human
acauaugugcuuauauccauga

SEQ ID NO: 1059637 - RNA, 22 nt, Human
ucaggcucugagcugaugcuaa

SEQ ID NO: 1059638 - RNA, 21 nt, Human
uggccaaaaccauauuauuaa

SEQ ID NO: 1059639 - RNA, 22 nt, Human
cuucugggauuaauuuuuccug

SEQ ID NO: 1059640 - RNA, 22 nt, Human
aaggcuuuugggaauuuucaac

SEQ ID NO: 1059641 - RNA, 22 nt, Human
gcagcuuuagaaacaagggcug

SEQ ID NO: 1059642 - RNA, 17 nt, Human
uguuuucauucauugcu

SEQ ID NO: 1059643 - RNA, 22 nt, Human
uguaugaaccuuuaauauagug

SEQ ID NO: 1059644 - RNA, 22 nt, Human
cucugaaagaguuuaguauuau

SEQ ID NO: 1059645 - RNA, 22 nt, Human
aauaacuucaguucuuacauua

SEQ ID NO: 1059646 - RNA, 22 nt, Human
acaggcucuggggcaggauggc

SEQ ID NO: 1059647 - RNA, 17 nt, Human
uugggagagaaagguau

SEQ ID NO: 1059648 - RNA, 22 nt, Human
aaucugucguaguaaaaagcag

SEQ ID NO: 1059649 - RNA, 22 nt, Human
ugcaggcuggggaggcagacuu

SEQ ID NO: 1059650 - RNA, 22 nt, Human
ucaggcucucagaccaacagca

SEQ ID NO: 1059651 - RNA, 22 nt, Human
aacaggcaggagaauucugccu

SEQ ID NO: 1059652 - RNA, 22 nt, Human
uucuuaaaacuuauggacaggu

SEQ ID NO: 1059653 - RNA, 22 nt, Human
uaacacaugaaagcaccuucuu

SEQ ID NO: 1059654 - RNA, 22 nt, Human
ucagagagccucaggcacugcc

SEQ ID NO: 1059655 - RNA, 22 nt, Human
ggcuuuauuugcagccauuguu

SEQ ID NO: 1059656 - RNA, 22 nt, Human
uggguaggaccagaaaugcacu

SEQ ID NO: 1059657 - RNA, 22 nt, Human
uagcuagaaugcuucgugauau

SEQ ID NO: 1059658 - RNA, 22 nt, Human
cagguuggucggcaaguacaca

SEQ ID NO: 1059659 - RNA, 22 nt, Human
ucucaaaucaaacuuugagcuu

SEQ ID NO: 1059660 - RNA, 22 nt, Human
accuggagaaagccucucccug

SEQ ID NO: 1059661 - RNA, 22 nt, Human
ccacuguaguuaugaugaaguu

SEQ ID NO: 1059662 - RNA, 22 nt, Human
uaauuuuaacugugcuguuugg

SEQ ID NO: 1059663 - RNA, 22 nt, Human
uguaugaaugggaaaaggaaac

SEQ ID NO: 1059664 - RNA, 22 nt, Human
auguaaacaagguuauugucca

SEQ ID NO: 1059665 - RNA, 23 nt, Human
auguaucucauccaaggaagcuc

SEQ ID NO: 1059666 - RNA, 22 nt, Human
cuggggcuggugaggcaggcuc

SEQ ID NO: 1059667 - RNA, 22 nt, Human
caguggugaagagcaggggcuc

SEQ ID NO: 1059668 - RNA, 22 nt, Human
guuucauuaccugacccaugag

SEQ ID NO: 1059669 - RNA, 22 nt, Human
uuuguacauccuaauucugagu

SEQ ID NO: 1059670 - RNA, 22 nt, Human
ccuucaaaacacuaguuuuuga

SEQ ID NO: 1059671 - RNA, 22 nt, Human
uguaugaagguuuaccugcugu

SEQ ID NO: 1059672 - RNA, 22 nt, Human
aggcaccuugagagcaggagcu

SEQ ID NO: 1059673 - RNA, 22 nt, Human
uccuggcacccuuggguuggag

SEQ ID NO: 1059674 - RNA, 22 nt, Human
guucacaagaguuacagacaga

SEQ ID NO: 1059675 - RNA, 22 nt, Human
agcaggcugaugggcaugcuug

SEQ ID NO: 1059676 - RNA, 22 nt, Human
uaggaaaugcuccauugcauaa

SEQ ID NO: 1059677 - RNA, 22 nt, Human
ggcaggcuugguggcaccgguu

SEQ ID NO: 1059678 - RNA, 22 nt, Human
ugcauacacaugugcacauacg

SEQ ID NO: 1059679 - RNA, 22 nt, Human
ugguccugccccgugcacagag

SEQ ID NO: 1059680 - RNA, 22 nt, Human
uguuaggguccugugcaggggc

SEQ ID NO: 1059681 - RNA, 22 nt, Human
cuucuggguugcaggucuuggc

SEQ ID NO: 1059682 - RNA, 22 nt, Human
ccagcuuuccaggguugacugg

SEQ ID NO: 1059683 - RNA, 22 nt, Human
auuucccuccagggaaagcuua

SEQ ID NO: 1059684 - RNA, 23 nt, Human
uugggcuggcucucgaugccucu

SEQ ID NO: 1059685 - RNA, 22 nt, Human
gaaagauauuuauuggcaacag

SEQ ID NO: 1059686 - RNA, 22 nt, Human
cuuuucaugccagcccaucaca

SEQ ID NO: 1059687 - RNA, 22 nt, Human
uuuuccuguccaggcaauuauu

SEQ ID NO: 1059688 - RNA, 22 nt, Human
aaacacauuagcccuguggaaa

SEQ ID NO: 1059689 - RNA, 22 nt, Human
aaagagucaaaggcaugucucu

SEQ ID NO: 1059690 - RNA, 22 nt, Human
agcacagggacaaugccaggug

SEQ ID NO: 1059691 - RNA, 22 nt, Human
acuuggcaaguaucuauaaagu

SEQ ID NO: 1059692 - RNA, 22 nt, Human
augaacugcaguauaaacuugg

SEQ ID NO: 1059693 - RNA, 22 nt, Human
gugugaaaaugugcacaauaug

SEQ ID NO: 1059694 - RNA, 22 nt, Human
acaguucccgucuugcacagcu

SEQ ID NO: 1059695 - RNA, 20 nt, Human
acuccagguggcaugaggac

SEQ ID NO: 1059696 - RNA, 22 nt, Human
uuguaaauaguaguaagaugcc

SEQ ID NO: 1059697 - RNA, 22 nt, Human
gguggccugaauuagcucaggg

SEQ ID NO: 1059698 - RNA, 22 nt, Human
uauucacaugaaaacaaauuuu

SEQ ID NO: 1059699 - RNA, 23 nt, Human
uugugggcagauuccauggggag

SEQ ID NO: 1059700 - RNA, 22 nt, Human
uuugaaaagaaccaucgccuua

SEQ ID NO: 1059701 - RNA, 22 nt, Human
caauuucuggaacuaauucuga

SEQ ID NO: 1059702 - RNA, 22 nt, Human
ugguuccuucugcauuuucagc

SEQ ID NO: 1059703 - RNA, 22 nt, Human
ucuucaaauccuacagugucug

SEQ ID NO: 1059704 - RNA, 22 nt, Human
agcaggcuacuccuguguucgu

SEQ ID NO: 1059705 - RNA, 23 nt, Human
gaggcagcuccugcagugcccug

SEQ ID NO: 1059706 - RNA, 22 nt, Human
ugggcugagcagugaagcucau

SEQ ID NO: 1059707 - RNA, 22 nt, Human
uuccagccaugguuucccuaug

SEQ ID NO: 1059708 - RNA, 22 nt, Human
ccaggcugggcggggaaccugg

SEQ ID NO: 1059709 - RNA, 22 nt, Human
acaggccugagauuuugcauuu

SEQ ID NO: 1059710 - RNA, 22 nt, Human
gaaucauuuagcucugcaugga

SEQ ID NO: 1059711 - RNA, 22 nt, Human
uuucacauguggaaugccaggu

SEQ ID NO: 1059712 - RNA, 22 nt, Human
ucauauaaguuuaaaacuaucu

SEQ ID NO: 1059713 - RNA, 22 nt, Human
ugauguucuguauaucauauag

SEQ ID NO: 1059714 - RNA, 22 nt, Human
cagcauuuagaauuugaagugu

SEQ ID NO: 1059715 - RNA, 22 nt, Human
uuguacaaguauuaugugaaca

SEQ ID NO: 1059716 - RNA, 22 nt, Human
aggacaagcuaaaggacuuccu

SEQ ID NO: 1059717 - RNA, 21 nt, Human
ucuggggaagacaucuaggau

SEQ ID NO: 1059718 - RNA, 23 nt, Human
uuuuaauuuggacauaagaagau

SEQ ID NO: 1059719 - RNA, 22 nt, Human
cuuucuuauaccugucagggcc

SEQ ID NO: 1059720 - RNA, 22 nt, Human
agguauaagaagauuauuuaua

SEQ ID NO: 1059721 - RNA, 22 nt, Human
aggcaggggagcuggaagggua

SEQ ID NO: 1059722 - RNA, 22 nt, Human
cuuauuagaaagaaaagacaug

SEQ ID NO: 1059723 - RNA, 22 nt, Human
cugcagggugacguugcccacc

SEQ ID NO: 1059724 - RNA, 22 nt, Human
uuauuagguuuacauaaagguu

SEQ ID NO: 1059725 - RNA, 22 nt, Human
gagcuuuaccuuagguucuguu

SEQ ID NO: 1059726 - RNA, 22 nt, Human
ccuacucugagcgccuccgcau

SEQ ID NO: 1059727 - RNA, 21 nt, Human
ccuagccucuuacccagcuuu

SEQ ID NO: 1059728 - RNA, 21 nt, Human
agaaaaacacgauauaagccc

SEQ ID NO: 1059729 - RNA, 22 nt, Human
augucaaaucaguuuuaucaga

SEQ ID NO: 1059730 - RNA, 22 nt, Human
ccccuuccuuccucagacagcc

SEQ ID NO: 1059731 - RNA, 22 nt, Human
ucuacuauguuucuuaaauaga

SEQ ID NO: 1059732 - RNA, 22 nt, Human
auaacuuucuucacccuugcug

SEQ ID NO: 1059733 - RNA, 22 nt, Human
ccaggcucugagccucacucuu

SEQ ID NO: 1059734 - RNA, 22 nt, Human
ugcuacaauucacaucuggaua

SEQ ID NO: 1059735 - RNA, 22 nt, Human
ucuccugggaggacaaggaagg

SEQ ID NO: 1059736 - RNA, 22 nt, Human
gaacugaguuuucugccuggac

SEQ ID NO: 1059737 - RNA, 22 nt, Human
uggguacuccuauuaguucagu

SEQ ID NO: 1059738 - RNA, 22 nt, Human
uucacaauagcuggcaucaucu

SEQ ID NO: 1059739 - RNA, 22 nt, Human
cuggcaggagcauucacagagg

SEQ ID NO: 1059740 - RNA, 22 nt, Human
ucugucaaaaguuuucaauaaa

SEQ ID NO: 1059741 - RNA, 22 nt, Human
cuccaaguccgagggcucucaa

SEQ ID NO: 1059742 - RNA, 22 nt, Human
acaagagcauugcagguguguu

SEQ ID NO: 1059743 - RNA, 22 nt, Human
caguguuuguauagaauaugca

SEQ ID NO: 1059744 - RNA, 22 nt, Human
gguguugggcucacugguccuu

SEQ ID NO: 1059745 - RNA, 22 nt, Human
cagcuuuaguaacccacugcuc

SEQ ID NO: 1059746 - RNA, 22 nt, Human
ccuggcaggcaagaggaaggga

SEQ ID NO: 1059747 - RNA, 22 nt, Human
gccagaagggguggauccaggc

SEQ ID NO: 1059748 - RNA, 19 nt, Human
uuuuccuucuauauguuuc

SEQ ID NO: 1059749 - RNA, 22 nt, Human
ccuggcagguuacaaccaguua

SEQ ID NO: 1059750 - RNA, 21 nt, Human
ccaggcugggagggcaguucc

SEQ ID NO: 1059751 - RNA, 22 nt, Human
guaaaauucuagcaucugaaag

SEQ ID NO: 1059752 - RNA, 22 nt, Human
ucagggacugcagagggaagcu

SEQ ID NO: 1059753 - RNA, 22 nt, Human
augggcugaggaagcuccugag

SEQ ID NO: 1059754 - RNA, 20 nt, Human
ucauuacagugcuaagaugu

SEQ ID NO: 1059755 - RNA, 22 nt, Human
cgcaggcuggcgcggaguggca

SEQ ID NO: 1059756 - RNA, 22 nt, Human
acacucacccucccacugccug

SEQ ID NO: 1059757 - RNA, 22 nt, Human
ucugggcuugguuagggcuguu

SEQ ID NO: 1059758 - RNA, 22 nt, Human
uuccuggcauagagagggcaca

SEQ ID NO: 1059759 - RNA, 22 nt, Human
cugguggagggacaggcuuagc

SEQ ID NO: 1059760 - RNA, 22 nt, Human
uccccacagcagaagaucugag

SEQ ID NO: 1059761 - RNA, 22 nt, Human
uauaauuuggggaaaguggugu

SEQ ID NO: 1059762 - RNA, 22 nt, Human
ucuucacaugaccuucaugucu

SEQ ID NO: 1059763 - RNA, 22 nt, Human
ggccucaggguugggcccauua

SEQ ID NO: 1059764 - RNA, 22 nt, Human
acagcucugcauggcaguuauu

SEQ ID NO: 1059765 - RNA, 23 nt, Human
ucuguacaauugagaagagaaca

SEQ ID NO: 1059766 - RNA, 22 nt, Human
ugaguacucggagugcuuugga

SEQ ID NO: 1059767 - RNA, 20 nt, Human
gcucugaccauaucaagaca

SEQ ID NO: 1059768 - RNA, 22 nt, Human
ugcuuuauggagcccaucucau

SEQ ID NO: 1059769 - RNA, 22 nt, Human
ccaggcucugucuggucagaag

SEQ ID NO: 1059770 - RNA, 22 nt, Human
ucugugcauuguaacaacuaaa

SEQ ID NO: 1059771 - RNA, 22 nt, Human
cuguaugauauccaaauugaua

SEQ ID NO: 1059772 - RNA, 22 nt, Human
aauguaugacaguucuaguggu

SEQ ID NO: 1059773 - RNA, 22 nt, Human
uuuucucuuguuaauguacuga

SEQ ID NO: 1059774 - RNA, 22 nt, Human
uucugucaaauuugccauaugg

SEQ ID NO: 1059775 - RNA, 22 nt, Human
ccuggcaggccccuccuggauu

SEQ ID NO: 1059776 - RNA, 22 nt, Human
agcccggcuuccccgguugcua

SEQ ID NO: 1059777 - RNA, 22 nt, Human
caucuuuucagaagccauucug

SEQ ID NO: 1059778 - RNA, 22 nt, Human
caguauuuguucccuaucaaug

SEQ ID NO: 1059779 - RNA, 22 nt, Human
ugcuucugggucccagccuggc

SEQ ID NO: 1059780 - RNA, 22 nt, Human
ccacccagaccagggaucuggg

SEQ ID NO: 1059781 - RNA, 22 nt, Human
guccuggcccacuggcaggcug

SEQ ID NO: 1059782 - RNA, 22 nt, Human
gaauaguucuauggcugcaggg

SEQ ID NO: 1059783 - RNA, 21 nt, Human
agcaacucugacuagaugagg

SEQ ID NO: 1059784 - RNA, 22 nt, Human
uaaacauuuguuauucuuguuu

SEQ ID NO: 1059785 - RNA, 22 nt, Human
cacaacuuuaggaaccacauuc

SEQ ID NO: 1059786 - RNA, 21 nt, Human
ucauuugugaucugauuucca

SEQ ID NO: 1059787 - RNA, 22 nt, Human
gaccaccagagguccgugggua

SEQ ID NO: 1059788 - RNA, 22 nt, Human
gccugcaguucugugcuaggca

SEQ ID NO: 1059789 - RNA, 22 nt, Human
gugggagaaauuagcucuaguu

SEQ ID NO: 1059790 - RNA, 15 nt, Human
cacacagacagcuug

SEQ ID NO: 1059791 - RNA, 22 nt, Human
guuucgucaggcuuauucuauc

SEQ ID NO: 1059792 - RNA, 22 nt, Human
ucccacaccugucuauuccuag

SEQ ID NO: 1059793 - RNA, 20 nt, Human
ucccucccuccagcucuggg

SEQ ID NO: 1059794 - RNA, 22 nt, Human
cccaggcagagagcuggugagc

SEQ ID NO: 1059795 - RNA, 22 nt, Human
uccugcagccuugggcuggagc

SEQ ID NO: 1059796 - RNA, 22 nt, Human
acuggaaaacacuacuacaugc

SEQ ID NO: 1059797 - RNA, 22 nt, Human
ucagccuccgaaagugcuggga

SEQ ID NO: 1059798 - RNA, 22 nt, Human
cccaggcagcggggucuccuug

SEQ ID NO: 1059799 - RNA, 19 nt, Human
acuggcagcuguagucugu

SEQ ID NO: 1059800 - RNA, 22 nt, Human
gggaccuggacaugugugugcu

SEQ ID NO: 1059801 - RNA, 22 nt, Human
cuccuggcucgcccccagcuga

SEQ ID NO: 1059802 - RNA, 22 nt, Human
acagcuuugggcaaugcuauga

SEQ ID NO: 1059803 - RNA, 22 nt, Human
auuuguagugaagugaaaauaa

SEQ ID NO: 1059804 - RNA, 22 nt, Human
ggccucaguuucuccauggguu

SEQ ID NO: 1059805 - RNA, 22 nt, Human
uguuagaauauuguaauauucg

SEQ ID NO: 1059806 - RNA, 22 nt, Human
gcuccugggcccugggcuaacu

SEQ ID NO: 1059807 - RNA, 22 nt, Human
gucugucacucaggggcuggag

SEQ ID NO: 1059808 - RNA, 22 nt, Human
uaacacaugguucugucaggaa

SEQ ID NO: 1059809 - RNA, 22 nt, Human
guccaaguacauguguguacau

SEQ ID NO: 1059810 - RNA, 22 nt, Human
ggagcugaaggggugggcucag

SEQ ID NO: 1059811 - RNA, 17 nt, Human
uuucagauucacuuucu

SEQ ID NO: 1059812 - RNA, 22 nt, Human
uauucacaggcacgaaauauug

SEQ ID NO: 1059813 - RNA, 22 nt, Human
aguguggcaggaaugacuagaa

SEQ ID NO: 1059814 - RNA, 22 nt, Human
uuccuggccaagcagaguggaa

SEQ ID NO: 1059815 - RNA, 21 nt, Human
ucacacacguuuccaagggca

SEQ ID NO: 1059816 - RNA, 22 nt, Human
uguguuuugaacucaucuacug

SEQ ID NO: 1059817 - RNA, 22 nt, Human
aaauacugcugcuauuccuuuu

SEQ ID NO: 1059818 - RNA, 22 nt, Human
uacaacauguaaagugguuuaa

SEQ ID NO: 1059819 - RNA, 22 nt, Human
aucagagacaaaaccagcacuu

SEQ ID NO: 1059820 - RNA, 22 nt, Human
agguuuaugccuuggagcuggg

SEQ ID NO: 1059821 - RNA, 22 nt, Human
uuccaggcugaugggccacagg

SEQ ID NO: 1059822 - RNA, 22 nt, Human
ugggcucagucugcuugguccu

SEQ ID NO: 1059823 - RNA, 20 nt, Human
uuucacaaugaacaugucuc

SEQ ID NO: 1059824 - RNA, 22 nt, Human
uaacacauaucuacaacaugug

SEQ ID NO: 1059825 - RNA, 22 nt, Human
cccugcaguccuuucuuggcuc

SEQ ID NO: 1059826 - RNA, 22 nt, Human
uuucaaauagaaucuuuccaaa

SEQ ID NO: 1059827 - RNA, 22 nt, Human
cauaauuuuuuuaagucagaac

SEQ ID NO: 1059828 - RNA, 22 nt, Human
ugugaaaagggcuuuguacaaa

SEQ ID NO: 1059829 - RNA, 22 nt, Human
auucucuggcuaaaaccugaag

SEQ ID NO: 1059830 - RNA, 16 nt, Human
uguaugaacgucucca

SEQ ID NO: 1059831 - RNA, 22 nt, Human
uauaauguuuuccauggacuga

SEQ ID NO: 1059832 - RNA, 22 nt, Human
uguguaaagcuuguuccagaaa

SEQ ID NO: 1059833 - RNA, 22 nt, Human
cagcauuuucuuaauguaggug

SEQ ID NO: 1059834 - RNA, 22 nt, Human
aauucuguuacuaaugugaugu

SEQ ID NO: 1059835 - RNA, 22 nt, Human
uccugcagcugaagcucaugug

SEQ ID NO: 1059836 - RNA, 22 nt, Human
gccuccuggguucaugccauuc

SEQ ID NO: 1059837 - RNA, 22 nt, Human
ugcuucugauucaugguuauug

SEQ ID NO: 1059838 - RNA, 22 nt, Human
augaaacagugaauuagucaag

SEQ ID NO: 1059839 - RNA, 22 nt, Human
cagugaggcucugcugagcggu

SEQ ID NO: 1059840 - RNA, 22 nt, Human
aaauacauaaagguuguaccag

SEQ ID NO: 1059841 - RNA, 22 nt, Human
uagaacacuugaccacugcucc

SEQ ID NO: 1059842 - RNA, 22 nt, Human
acagauuugacugguaccuggc

SEQ ID NO: 1059843 - RNA, 22 nt, Human
uacauucagaagaauggacacg

SEQ ID NO: 1059844 - RNA, 22 nt, Human
caugaagcuugaagcaguccac

SEQ ID NO: 1059845 - RNA, 22 nt, Human
ugcuuuauggauuuguguccug

SEQ ID NO: 1059846 - RNA, 22 nt, Human
uccagacccaugacccugggga

SEQ ID NO: 1059847 - RNA, 22 nt, Human
ggcuucuggugggagcaugacu

SEQ ID NO: 1059848 - RNA, 22 nt, Human
uuuguuuucaaugugucauuca

SEQ ID NO: 1059849 - RNA, 22 nt, Human
aguaugaagauuauaauuuuuc

SEQ ID NO: 1059850 - RNA, 21 nt, Human
aaaaagcuggggcaugcaugc

SEQ ID NO: 1059851 - RNA, 22 nt, Human
ucauuuguugcuguuaccugag

SEQ ID NO: 1059852 - RNA, 22 nt, Human
cacacaguaggcacucauuaau

SEQ ID NO: 1059853 - RNA, 22 nt, Human
uuugacaaaggaaaaaugcaca

SEQ ID NO: 1059854 - RNA, 22 nt, Human
caugagauaauuuuucuccagu

SEQ ID NO: 1059855 - RNA, 22 nt, Human
cccugcagccggccagcucauu

SEQ ID NO: 1059856 - RNA, 22 nt, Human
gacacauaugcguauaguuuag

SEQ ID NO: 1059857 - RNA, 22 nt, Human
auaugcauguacgugugcacaa

SEQ ID NO: 1059858 - RNA, 22 nt, Human
uaacacauagauauuuuaacuu

SEQ ID NO: 1059859 - RNA, 22 nt, Human
cuuccucuagccuaguaaugcc

SEQ ID NO: 1059860 - RNA, 22 nt, Human
aaauauguaagauuagcacuag

SEQ ID NO: 1059861 - RNA, 22 nt, Human
ugacaggaggcuugaggccagg

SEQ ID NO: 1059862 - RNA, 22 nt, Human
ugcuucugaaguggaugggugc

SEQ ID NO: 1059863 - RNA, 22 nt, Human
aucuccagauugugaucaucag

SEQ ID NO: 1059864 - RNA, 22 nt, Human
gaauauuuucaguacagauggu

SEQ ID NO: 1059865 - RNA, 22 nt, Human
uuccuugaaugagucauggaaa

SEQ ID NO: 1059866 - RNA, 22 nt, Human
uuggaaauacagcaguuacuuu

SEQ ID NO: 1059867 - RNA, 22 nt, Human
aggacaguguggaagagggugc

SEQ ID NO: 1059868 - RNA, 22 nt, Human
caggacaaagcccuuugagaaa

SEQ ID NO: 1059869 - RNA, 22 nt, Human
uccuggcacuuugggggcucgc

SEQ ID NO: 1059870 - RNA, 22 nt, Human
uagcuuuaggaugguucucuug

SEQ ID NO: 1059871 - RNA, 22 nt, Human
aagcacauuguacauuugugcu

SEQ ID NO: 1059872 - RNA, 22 nt, Human
gcuucugggguucuggcaugcu

SEQ ID NO: 1059873 - RNA, 22 nt, Human
uuccugggugguccugguagag

SEQ ID NO: 1059874 - RNA, 19 nt, Human
uuagggacaugaauucuag

SEQ ID NO: 1059875 - RNA, 22 nt, Human
uucauauaaauggaaucagaau

SEQ ID NO: 1059876 - RNA, 23 nt, Human
uggaccugaaccagugccucugu

SEQ ID NO: 1059877 - RNA, 22 nt, Human
cagcuuguuaccgagggagggu

SEQ ID NO: 1059878 - RNA, 22 nt, Human
ugcuucugacugggucaguuga

SEQ ID NO: 1059879 - RNA, 22 nt, Human
cuggauuuaauuaacuguugcu

SEQ ID NO: 1059880 - RNA, 22 nt, Human
acuggcagaacuggugauuguc

SEQ ID NO: 1059881 - RNA, 22 nt, Human
caggcccucaggcaagggcucu

SEQ ID NO: 1059882 - RNA, 22 nt, Human
ggugccagugggucucaggaua

SEQ ID NO: 1059883 - RNA, 22 nt, Human
aggccucugcuggaaagaguug

SEQ ID NO: 1059884 - RNA, 22 nt, Human
acacauaagaaacuacaaagag

SEQ ID NO: 1059885 - RNA, 22 nt, Human
ccagagaguaaacauuuuccgg

SEQ ID NO: 1059886 - RNA, 22 nt, Human
uaaaucuccuguuuuucaucua

SEQ ID NO: 1059887 - RNA, 22 nt, Human
agggcccaggacagcaucaggg

SEQ ID NO: 1059888 - RNA, 22 nt, Human
uuuaauuuguauuucuagaggg

SEQ ID NO: 1059889 - RNA, 22 nt, Human
guggcagugggaugcuaucagg

SEQ ID NO: 1059890 - RNA, 22 nt, Human
ccuggggaaaagcaggcauuua

SEQ ID NO: 1059891 - RNA, 22 nt, Human
auguuagaaucucugaaugugg

SEQ ID NO: 1059892 - RNA, 20 nt, Human
ucugugcaccugcuacaagg

SEQ ID NO: 1059893 - RNA, 23 nt, Human
cugcagagaacugagggacagcc

SEQ ID NO: 1059894 - RNA, 22 nt, Human
acaucacaguaguuaagccaga

SEQ ID NO: 1059895 - RNA, 22 nt, Human
cucugucaggcugcagaugcuc

SEQ ID NO: 1059896 - RNA, 22 nt, Human
ucuuugaugugguuaauuauga

SEQ ID NO: 1059897 - RNA, 18 nt, Human
cuccuccacagccccugc

SEQ ID NO: 1059898 - RNA, 22 nt, Human
ucuggcagaggaaggaggccug

SEQ ID NO: 1059899 - RNA, 22 nt, Human
aggaaagauggaaggaggauaa

SEQ ID NO: 1059900 - RNA, 22 nt, Human
uggcaucuccgacagucuugau

SEQ ID NO: 1059901 - RNA, 22 nt, Human
cugcagggcagaagggcauaga

SEQ ID NO: 1059902 - RNA, 22 nt, Human
guacccaggcacgccuugcuga

SEQ ID NO: 1059903 - RNA, 22 nt, Human
ugcagagaaaacuccuggguac

SEQ ID NO: 1059904 - RNA, 22 nt, Human
aaauaguuacuucugcugucuu

SEQ ID NO: 1059905 - RNA, 20 nt, Human
cagagaccaggccagguguc

SEQ ID NO: 1059906 - RNA, 22 nt, Human
gauuuuucaguauaaaauauau

SEQ ID NO: 1059907 - RNA, 22 nt, Human
uagaauaugauuaauuuucuua

SEQ ID NO: 1059908 - RNA, 17 nt, Human
uccaggcagcaacugag

SEQ ID NO: 1059909 - RNA, 22 nt, Human
cacucuccagcacaccccauuu

SEQ ID NO: 1059910 - RNA, 22 nt, Human
uccaggcuaauuuugcauuguu

SEQ ID NO: 1059911 - RNA, 22 nt, Human
gaggcacagucccgaggcaagg

SEQ ID NO: 1059912 - RNA, 19 nt, Human
gcuggcagaauuuugaacc

SEQ ID NO: 1059913 - RNA, 22 nt, Human
gcuccaggcagcauaguggaug

SEQ ID NO: 1059914 - RNA, 22 nt, Human
ugggcugagcacugaggaagga

SEQ ID NO: 1059915 - RNA, 19 nt, Human
agaugucuauuugacuauc

SEQ ID NO: 1059916 - RNA, 22 nt, Human
acuuuauuuccuauugcaucca

SEQ ID NO: 1059917 - RNA, 22 nt, Human
ugauucuauggaaggcauaagg

SEQ ID NO: 1059918 - RNA, 22 nt, Human
cagaugagaguggccaggguuc

SEQ ID NO: 1059919 - RNA, 22 nt, Human
accauuugacucucuaaggaua

SEQ ID NO: 1059920 - RNA, 22 nt, Human
ucccaaggccaggcaucuagaa

SEQ ID NO: 1059921 - RNA, 22 nt, Human
acagagcaugcucaguguguga

SEQ ID NO: 1059922 - RNA, 22 nt, Human
ugguaagaacccaucagagaag

SEQ ID NO: 1059923 - RNA, 22 nt, Human
ccugcagagccacgugccagcg

SEQ ID NO: 1059924 - RNA, 20 nt, Human
uuccagagaucugcauuuua

SEQ ID NO: 1059925 - RNA, 22 nt, Human
ccagcuuucauaucaugaggua

SEQ ID NO: 1059926 - RNA, 22 nt, Human
uacugacacaaagccaaucccu

SEQ ID NO: 1059927 - RNA, 22 nt, Human
uaggaaauggcucaguuacugc

SEQ ID NO: 1059928 - RNA, 22 nt, Human
ucacacacauaaucuaagauua

SEQ ID NO: 1059929 - RNA, 22 nt, Human
uaguauuuaaucacuuuugucu

SEQ ID NO: 1059930 - RNA, 22 nt, Human
uuccaagugggggaagcugagu

SEQ ID NO: 1059931 - RNA, 22 nt, Human
cagggcucccugcagccucugu

SEQ ID NO: 1059932 - RNA, 22 nt, Human
cuugggcucugugggccuuagu

SEQ ID NO: 1059933 - RNA, 22 nt, Human
agauaugugcgucuuagauuga

SEQ ID NO: 1059934 - RNA, 22 nt, Human
aucuguaaaugcaaauguagcu

SEQ ID NO: 1059935 - RNA, 22 nt, Human
acuagauaauuauaaaagguag

SEQ ID NO: 1059936 - RNA, 22 nt, Human
cuccaaguauguuaaaaucuaa

SEQ ID NO: 1059937 - RNA, 22 nt, Human
uagggacaaagagcugaggccu

SEQ ID NO: 1059938 - RNA, 23 nt, Human
guccucuggagagaaaggcagua

SEQ ID NO: 1059939 - RNA, 22 nt, Human
aaaguuagacagcaucauuucu

SEQ ID NO: 1059940 - RNA, 22 nt, Human
aauuugauucccugcaccuguu

SEQ ID NO: 1059941 - RNA, 23 nt, Human
uuuuccuguggagacaugacugg

SEQ ID NO: 1059942 - RNA, 22 nt, Human
cagcucuggguaggaggaaucu

SEQ ID NO: 1059943 - RNA, 22 nt, Human
aggcuuuggaaucagaguucug

SEQ ID NO: 1059944 - RNA, 22 nt, Human
uuguaaaugaccuuuucuaauu

SEQ ID NO: 1059945 - RNA, 22 nt, Human
uguuugaauuuugcuaacgugu

SEQ ID NO: 1059946 - RNA, 23 nt, Human
cugggcugcuugagucccuggcu

SEQ ID NO: 1059947 - RNA, 22 nt, Human
uacagagaguacagcauccaca

SEQ ID NO: 1059948 - RNA, 22 nt, Human
cuauuagguuggugcaaaagua

SEQ ID NO: 1059949 - RNA, 22 nt, Human
uguuuauucauggcuaaugaaa

SEQ ID NO: 1059950 - RNA, 17 nt, Human
uccaggcauaucuccua

SEQ ID NO: 1059951 - RNA, 20 nt, Human
gcaggcuccgggcuugggag

SEQ ID NO: 1059952 - RNA, 22 nt, Human
cucauuaaaggaaaucaccugc

SEQ ID NO: 1059953 - RNA, 22 nt, Human
ccaggccugugcaaggagggag

SEQ ID NO: 1059954 - RNA, 22 nt, Human
agggccccauagucacugcccg

SEQ ID NO: 1059955 - RNA, 22 nt, Human
aguaugaauacagauuuucucu

SEQ ID NO: 1059956 - RNA, 22 nt, Human
uuguaugaucaaaagaaaugua

SEQ ID NO: 1059957 - RNA, 22 nt, Human
cagggcucccucuggcucccag

SEQ ID NO: 1059958 - RNA, 22 nt, Human
aguaugaaucuuucagaccgua

SEQ ID NO: 1059959 - RNA, 21 nt, Human
gggagggauggaaaugauguu

SEQ ID NO: 1059960 - RNA, 22 nt, Human
ugggccaggcaugugaucagca

SEQ ID NO: 1059961 - RNA, 22 nt, Human
aauuagggaaaacauuugcuuu

SEQ ID NO: 1059962 - RNA, 19 nt, Human
ccuuccuccccagggccau

SEQ ID NO: 1059963 - RNA, 21 nt, Human
ugcaggcugugcgcuccugcc

SEQ ID NO: 1059964 - RNA, 22 nt, Human
cucuuaaagcuuccaguuucaa

SEQ ID NO: 1059965 - RNA, 22 nt, Human
acuggcagagacccugauggcc

SEQ ID NO: 1059966 - RNA, 22 nt, Human
acaggcucucuauugagugcag

SEQ ID NO: 1059967 - RNA, 22 nt, Human
cauaauaucuccgauuacuugc

SEQ ID NO: 1059968 - RNA, 22 nt, Human
auccaagucagggauaguuuga

SEQ ID NO: 1059969 - RNA, 22 nt, Human
aguuuucuguucuacaauuuga

SEQ ID NO: 1059970 - RNA, 22 nt, Human
aggaccauccuaagguaggcaa

SEQ ID NO: 1059971 - RNA, 22 nt, Human
cacaucagguagaccuacagag

SEQ ID NO: 1059972 - RNA, 21 nt, Human
ccacuguagacucauucugag

SEQ ID NO: 1059973 - RNA, 19 nt, Human
agaggccucagcagcuggc

SEQ ID NO: 1059974 - RNA, 19 nt, Human
ggcauccagaacuaccagu

SEQ ID NO: 1059975 - RNA, 19 nt, Human
cccagcuugaccaccugcu

SEQ ID NO: 1059976 - RNA, 22 nt, Human
cccagcuugcgggcggcaggag

SEQ ID NO: 1059977 - RNA, 22 nt, Human
cacccacauggaaauucacagu

SEQ ID NO: 1059978 - RNA, 22 nt, Human
guauuaggagguggagccuuug

SEQ ID NO: 1059979 - RNA, 22 nt, Human
uuaauuuuaaccuguuuguguc

SEQ ID NO: 1059980 - RNA, 22 nt, Human
uacagcauguccuuagcaaggc

SEQ ID NO: 1059981 - RNA, 20 nt, Human
auacacauauucuugcaacu

SEQ ID NO: 1059982 - RNA, 22 nt, Human
ugcuuuauuuauaaaauagcaa

SEQ ID NO: 1059983 - RNA, 22 nt, Human
uucugucaaagacuuuuucagg

SEQ ID NO: 1059984 - RNA, 22 nt, Human
uuguaugagcuccaggaacuca

SEQ ID NO: 1059985 - RNA, 22 nt, Human
aauggcagaggcaaagauggua

SEQ ID NO: 1059986 - RNA, 22 nt, Human
auuuucauuuugcagggugaga

SEQ ID NO: 1059987 - RNA, 22 nt, Human
gcugggcuggaaggccaaggca

SEQ ID NO: 1059988 - RNA, 22 nt, Human
cuaauguaucauggcucucagc

SEQ ID NO: 1059989 - RNA, 23 nt, Human
cucccuggcccuugggagaccug

SEQ ID NO: 1059990 - RNA, 22 nt, Human
gcagcuuuaaucugaauaagua

SEQ ID NO: 1059991 - RNA, 22 nt, Human
gcuggcaggagaccauacccua

SEQ ID NO: 1059992 - RNA, 22 nt, Human
uccaggcucuaggcugcucucc

SEQ ID NO: 1059993 - RNA, 17 nt, Human
agguauaaaaugguagc

SEQ ID NO: 1059994 - RNA, 22 nt, Human
uagcuuuaaugaguugguaaga

SEQ ID NO: 1059995 - RNA, 22 nt, Human
uuaucacuuaugagcuuuuugc

SEQ ID NO: 1059996 - RNA, 22 nt, Human
augggcugacuaaugguaaacu

SEQ ID NO: 1059997 - RNA, 22 nt, Human
cuuaauuuaaaauaguucaggc

SEQ ID NO: 1059998 - RNA, 22 nt, Human
uguucauaucauuuugaaagcu

SEQ ID NO: 1059999 - RNA, 22 nt, Human
cuccugaggacuucuauugggu

SEQ ID NO: 1060000 - RNA, 22 nt, Human
ggaccugcauuuuaacaagauc

SEQ ID NO: 1060001 - RNA, 22 nt, Human
gagggcucuacucaccacccug

SEQ ID NO: 1060002 - RNA, 22 nt, Human
ugaguagagaauucagcuaagg

SEQ ID NO: 1060003 - RNA, 22 nt, Human
agagaguugaggaagcaacacu

SEQ ID NO: 1060004 - RNA, 22 nt, Human
uucaagauggccccagugagcc

SEQ ID NO: 1060005 - RNA, 22 nt, Human
ccuggcagcuaagugcuuugag

SEQ ID NO: 1060006 - RNA, 21 nt, Human
acaaacugaaaugaguuuccu

SEQ ID NO: 1060007 - RNA, 22 nt, Human
guacacacuauuuaaaguguuu

SEQ ID NO: 1060008 - RNA, 21 nt, Human
uucucuccauaugcccagccc

SEQ ID NO: 1060009 - RNA, 20 nt, Human
gaggccucagccucagcucc

SEQ ID NO: 1060010 - RNA, 22 nt, Human
uccuccuccucacagucaccug

SEQ ID NO: 1060011 - RNA, 22 nt, Human
gcagcuuucugggacagaaagg

SEQ ID NO: 1060012 - RNA, 22 nt, Human
gcuggaguuggcaaggcaugua

SEQ ID NO: 1060013 - RNA, 22 nt, Human
aauagauacuacuuagauguag

SEQ ID NO: 1060014 - RNA, 22 nt, Human
uuggcuucuugugaaaucugag

SEQ ID NO: 1060015 - RNA, 23 nt, Human
ccucucucccuguuuggcaaaua

SEQ ID NO: 1060016 - RNA, 22 nt, Human
uuccaagugaaaguagcuuugu

SEQ ID NO: 1060017 - RNA, 22 nt, Human
ggaggacaggggcugcagcaca

SEQ ID NO: 1060018 - RNA, 22 nt, Human
uguaugaaagaacaagggcuua

SEQ ID NO: 1060019 - RNA, 22 nt, Human
ugcccccuuuucuuguuacacu

SEQ ID NO: 1060020 - RNA, 22 nt, Human
aauucugugcaggcagagcuau

SEQ ID NO: 1060021 - RNA, 22 nt, Human
acagguggcuuauuggcugauu

SEQ ID NO: 1060022 - RNA, 22 nt, Human
cauccagggcagccauggccug

SEQ ID NO: 1060023 - RNA, 22 nt, Human
uguaugaaguuacugagccucu

SEQ ID NO: 1060024 - RNA, 22 nt, Human
ucauuugugugagugauuugac

SEQ ID NO: 1060025 - RNA, 22 nt, Human
cacacacucuuccuggcaccua

SEQ ID NO: 1060026 - RNA, 22 nt, Human
ugaagccaaucugccaggcaga

SEQ ID NO: 1060027 - RNA, 22 nt, Human
cccccaaaguuugcacggauaa

SEQ ID NO: 1060028 - RNA, 22 nt, Human
acucugaaugugcauguaaauc

SEQ ID NO: 1060029 - RNA, 22 nt, Human
gucugucaucugagauggagug

SEQ ID NO: 1060030 - RNA, 22 nt, Human
gaagcacugcauuucaagauca

SEQ ID NO: 1060031 - RNA, 22 nt, Human
cuccucuggguccugguggcca

SEQ ID NO: 1060032 - RNA, 22 nt, Human
ugagaaaugggucugcugaaga

SEQ ID NO: 1060033 - RNA, 22 nt, Human
agcaggugggaucaagcuggca

SEQ ID NO: 1060034 - RNA, 22 nt, Human
aggaccugcuaaugugccaagu

SEQ ID NO: 1060035 - RNA, 22 nt, Human
ugaaugauacagaauuauguag

SEQ ID NO: 1060036 - RNA, 22 nt, Human
ccagcuuuaucaagucugagcu

SEQ ID NO: 1060037 - RNA, 22 nt, Human
caguguggagggagagagccug

SEQ ID NO: 1060038 - RNA, 22 nt, Human
aagcuuuaaggaauuuuaugga

SEQ ID NO: 1060039 - RNA, 22 nt, Human
ugcagggaggccccgcagcccu

SEQ ID NO: 1060040 - RNA, 22 nt, Human
gaaauauuguacuggagauguu

SEQ ID NO: 1060041 - RNA, 22 nt, Human
cacugucccuguuuccuggaaa

SEQ ID NO: 1060042 - RNA, 22 nt, Human
uauucauaguaaacaaaagugg

SEQ ID NO: 1060043 - RNA, 22 nt, Human
gagauggccagugccaggacaa

SEQ ID NO: 1060044 - RNA, 22 nt, Human
agcuuuauauaaaagaguacau

SEQ ID NO: 1060045 - RNA, 22 nt, Human
cccucucucaggcugacagccu

SEQ ID NO: 1060046 - RNA, 22 nt, Human
gccugcagcaugcuaggucuug

SEQ ID NO: 1060047 - RNA, 22 nt, Human
uuuauacuccacucugcaagcg

SEQ ID NO: 1060048 - RNA, 22 nt, Human
cggcuggugucgggcacagcaa

SEQ ID NO: 1060049 - RNA, 22 nt, Human
cagugagggaagaucucagcac

SEQ ID NO: 1060050 - RNA, 22 nt, Human
uucccacaguguugaauccucu

SEQ ID NO: 1060051 - RNA, 22 nt, Human
acaauacuauuuucaguauccu

SEQ ID NO: 1060052 - RNA, 19 nt, Human
acauauguggauauacaug

SEQ ID NO: 1060053 - RNA, 22 nt, Human
acagcuuuucaauucugcugag

SEQ ID NO: 1060054 - RNA, 19 nt, Human
aggugagugugggaaaggg

SEQ ID NO: 1060055 - RNA, 22 nt, Human
uacccagcccaugccuaccuca

SEQ ID NO: 1060056 - RNA, 22 nt, Human
ugaacacauaaggcuuuccugu

SEQ ID NO: 1060057 - RNA, 22 nt, Human
ugaauaugugacuuugauuuca

SEQ ID NO: 1060058 - RNA, 20 nt, Human
cugaacacagaauaagcaca

SEQ ID NO: 1060059 - RNA, 19 nt, Human
gggguggcuggggcuccag

SEQ ID NO: 1060060 - RNA, 22 nt, Human
cuuacacagucuggcacuucuu

SEQ ID NO: 1060061 - RNA, 22 nt, Human
gagccugaugaaacaggcagac

SEQ ID NO: 1060062 - RNA, 22 nt, Human
uacccagcuccucagaagacca

SEQ ID NO: 1060063 - RNA, 22 nt, Human
uaugacaagguggaguaugagu

SEQ ID NO: 1060064 - RNA, 22 nt, Human
agcuuuaccugccuuggggcac

SEQ ID NO: 1060065 - RNA, 22 nt, Human
agcaggcuaaucuugcugaaca

SEQ ID NO: 1060066 - RNA, 19 nt, Human
guuucauuaagauaggaaa

SEQ ID NO: 1060067 - RNA, 22 nt, Human
aaaguguggucguucauuuugu

SEQ ID NO: 1060068 - RNA, 22 nt, Human
cuuaauuuuuguaguagaugga

SEQ ID NO: 1060069 - RNA, 22 nt, Human
uaauaguuaugguugguucuca

SEQ ID NO: 1060070 - RNA, 22 nt, Human
guccucugaaguugugcaaugc

SEQ ID NO: 1060071 - RNA, 22 nt, Human
auacuucuuugauguucacagg

SEQ ID NO: 1060072 - RNA, 22 nt, Human
aaggcuuuuguuccuauuuagu

SEQ ID NO: 1060073 - RNA, 22 nt, Human
cccugccuugggguccacaccg

SEQ ID NO: 1060074 - RNA, 22 nt, Human
acaggcagagaacucagccaga

SEQ ID NO: 1060075 - RNA, 22 nt, Human
ucacacaugcuaagccagagau

SEQ ID NO: 1060076 - RNA, 22 nt, Human
gcccagccuccaagcuccaagg

SEQ ID NO: 1060077 - RNA, 22 nt, Human
aaaguuguaauggaagaaaugc

SEQ ID NO: 1060078 - RNA, 22 nt, Human
ucacauaaauuauacaauuuca

SEQ ID NO: 1060079 - RNA, 22 nt, Human
uuucugaauaacucuaugauau

SEQ ID NO: 1060080 - RNA, 22 nt, Human
gcccggcagucacacacccagg

SEQ ID NO: 1060081 - RNA, 22 nt, Human
auacuguacgucccagauagga

SEQ ID NO: 1060082 - RNA, 22 nt, Human
uuaauuuuuauguauagugugu

SEQ ID NO: 1060083 - RNA, 22 nt, Human
gggcugacucugcacugagcca

SEQ ID NO: 1060084 - RNA, 22 nt, Human
augaaaauguacauguguauaa

SEQ ID NO: 1060085 - RNA, 22 nt, Human
uucugggggaauacagcuauga

SEQ ID NO: 1060086 - RNA, 22 nt, Human
guagggacaugccauuaucuca

SEQ ID NO: 1060087 - RNA, 20 nt, Human
gcuccccuucucugggccuc

SEQ ID NO: 1060088 - RNA, 22 nt, Human
uccugcagugugucuccugcac

SEQ ID NO: 1060089 - RNA, 22 nt, Human
uagcuuuaagaugagaugugga

SEQ ID NO: 1060090 - RNA, 22 nt, Human
aaacaucaauugcaucucccaa

SEQ ID NO: 1060091 - RNA, 22 nt, Human
gcccaggccggagagcagugcu

SEQ ID NO: 1060092 - RNA, 22 nt, Human
ugagggacucccggcccugcca

SEQ ID NO: 1060093 - RNA, 22 nt, Human
uacauguuuacuccaagucagg

SEQ ID NO: 1060094 - RNA, 22 nt, Human
auuguugggucucacuccuaga

SEQ ID NO: 1060095 - RNA, 22 nt, Human
caaaugcagauucaggaguucu

SEQ ID NO: 1060096 - RNA, 22 nt, Human
uggcagagagacucuccuugau

SEQ ID NO: 1060097 - RNA, 22 nt, Human
augugaaaaauuucuuauuaca

SEQ ID NO: 1060098 - RNA, 22 nt, Human
cacauaagaaaugaauaugaga

SEQ ID NO: 1060099 - RNA, 22 nt, Human
caauuucugggccucacacaag

SEQ ID NO: 1060100 - RNA, 22 nt, Human
cagugagguggauggauggccu

SEQ ID NO: 1060101 - RNA, 22 nt, Human
ccaggcucuguuccccgaggag

SEQ ID NO: 1060102 - RNA, 23 nt, Human
uccaggagcaugcuggcuggcga

SEQ ID NO: 1060103 - RNA, 22 nt, Human
ccaggcuccccaggaggcccuu

SEQ ID NO: 1060104 - RNA, 22 nt, Human
caggccucuuccaugcagcagc

SEQ ID NO: 1060105 - RNA, 22 nt, Human
ucagagaguuuucacuagggug

SEQ ID NO: 1060106 - RNA, 22 nt, Human
gggcaaaaccugggcaucauga

SEQ ID NO: 1060107 - RNA, 22 nt, Human
cagcuuuguggccuugaccucg

SEQ ID NO: 1060108 - RNA, 22 nt, Human
gcaggcucacucuguuuggcuc

SEQ ID NO: 1060109 - RNA, 22 nt, Human
uuugugcagauguauauuugug

SEQ ID NO: 1060110 - RNA, 22 nt, Human
cuccaguggcaaguccgggcgg

SEQ ID NO: 1060111 - RNA, 22 nt, Human
gccagccuucuguggccugcaa

SEQ ID NO: 1060112 - RNA, 22 nt, Human
agagggcugcugcacagugcuc

SEQ ID NO: 1060113 - RNA, 22 nt, Human
aagaugcagcuuuacaauaagg

SEQ ID NO: 1060114 - RNA, 22 nt, Human
ccagccucacuggcaucaccua

SEQ ID NO: 1060115 - RNA, 22 nt, Human
gggguggcccuacccucuggaa

SEQ ID NO: 1060116 - RNA, 22 nt, Human
agggcuccaggggaccaucagu

SEQ ID NO: 1060117 - RNA, 22 nt, Human
uuucugaacaaagccauuauca

SEQ ID NO: 1060118 - RNA, 22 nt, Human
uuauucagucugucuagggagu

SEQ ID NO: 1060119 - RNA, 22 nt, Human
ccuucucucugaagaccccaaa

SEQ ID NO: 1060120 - RNA, 17 nt, Human
cucugggcagccugggg

SEQ ID NO: 1060121 - RNA, 19 nt, Human
ggcaggcuggauagagagg

SEQ ID NO: 1060122 - RNA, 22 nt, Human
cuggcagucugguggaaggccu

SEQ ID NO: 1060123 - RNA, 22 nt, Human
gccuggcaaggcccuguugacu

SEQ ID NO: 1060124 - RNA, 22 nt, Human
ccugggcuugguuguugagaac

SEQ ID NO: 1060125 - RNA, 22 nt, Human
acccagcuaacccuacccugga

SEQ ID NO: 1060126 - RNA, 22 nt, Human
uucauaguguuuccuuccagug

SEQ ID NO: 1060127 - RNA, 22 nt, Human
cuguaugaggaucagacuggac

SEQ ID NO: 1060128 - RNA, 22 nt, Human
aggcuggauuuauggggacuuc

SEQ ID NO: 1060129 - RNA, 22 nt, Human
cagggcucacucggcuggcguc

SEQ ID NO: 1060130 - RNA, 20 nt, Human
guauuaggagguaaauguaa

SEQ ID NO: 1060131 - RNA, 22 nt, Human
cagaggcucagauggcccuggc

SEQ ID NO: 1060132 - RNA, 22 nt, Human
uucauacacgaaaaugcaugca

SEQ ID NO: 1060133 - RNA, 22 nt, Human
uucuagaggggagauacuagua

SEQ ID NO: 1060134 - RNA, 22 nt, Human
ucuucauauauaaaguggaaua

SEQ ID NO: 1060135 - RNA, 22 nt, Human
acuuaaaaacagauccagcagg

SEQ ID NO: 1060136 - RNA, 22 nt, Human
ugaaugauguauaauauugaga

SEQ ID NO: 1060137 - RNA, 22 nt, Human
aaggcuuucagcuaacuugauu

SEQ ID NO: 1060138 - RNA, 22 nt, Human
ggcuccacugcugaccacucca

SEQ ID NO: 1060139 - RNA, 22 nt, Human
uuggaaagauuauuauuaugaa

SEQ ID NO: 1060140 - RNA, 22 nt, Human
gagccucguggcggccacugcg

SEQ ID NO: 1060141 - RNA, 22 nt, Human
uucugucuguaaacuucucaau

SEQ ID NO: 1060142 - RNA, 20 nt, Human
cccagccccuaccuguugcc

SEQ ID NO: 1060143 - RNA, 22 nt, Human
auucugucauuucaagaaaaac

SEQ ID NO: 1060144 - RNA, 22 nt, Human
uggaagagaaaauccacccuua

SEQ ID NO: 1060145 - RNA, 22 nt, Human
ucauaaaucauacuccauuugc

SEQ ID NO: 1060146 - RNA, 22 nt, Human
uacccaggaggaaacugaggcu

SEQ ID NO: 1060147 - RNA, 22 nt, Human
gcuggcagugugaaugacaagc

SEQ ID NO: 1060148 - RNA, 22 nt, Human
acacuaauuaagcugcuuuacu

SEQ ID NO: 1060149 - RNA, 22 nt, Human
aguguuugucccguuagaaaug

SEQ ID NO: 1060150 - RNA, 18 nt, Human
ucagagagaauaguaauu

SEQ ID NO: 1060151 - RNA, 22 nt, Human
ucccagccuccugacaguuuug

SEQ ID NO: 1060152 - RNA, 22 nt, Human
cagggcucagggacugcagaaa

SEQ ID NO: 1060153 - RNA, 22 nt, Human
acagugugguuugagcacuggg

SEQ ID NO: 1060154 - RNA, 22 nt, Human
aaguuucauuguucauguaaca

SEQ ID NO: 1060155 - RNA, 23 nt, Human
cccugcagucagggugagauggu

SEQ ID NO: 1060156 - RNA, 17 nt, Human
gcaucacagauaacacg

SEQ ID NO: 1060157 - RNA, 22 nt, Human
cauuuacacuucuaaccacaag

SEQ ID NO: 1060158 - RNA, 22 nt, Human
cucuggggaagcagccagcugg

SEQ ID NO: 1060159 - RNA, 21 nt, Human
aaagagcccgcugagagguuc

SEQ ID NO: 1060160 - RNA, 22 nt, Human
agcaggcugagcacccaggggg

SEQ ID NO: 1060161 - RNA, 22 nt, Human
cagacccugggccacagaggag

SEQ ID NO: 1060162 - RNA, 22 nt, Human
uguauaaaccauggacagcuuu

SEQ ID NO: 1060163 - RNA, 22 nt, Human
augugcaaauccaaugugaaug

SEQ ID NO: 1060164 - RNA, 22 nt, Human
ucaggcccuucucccaggacuc

SEQ ID NO: 1060165 - RNA, 22 nt, Human
gcauccaaaccauucaucagcc

SEQ ID NO: 1060166 - RNA, 22 nt, Human
aauacugccugugagguaacuc

SEQ ID NO: 1060167 - RNA, 22 nt, Human
uucagagaagcaaaggcagauu

SEQ ID NO: 1060168 - RNA, 22 nt, Human
auguaugaagcuuuguuuggga

SEQ ID NO: 1060169 - RNA, 22 nt, Human
gaauauuuguaauuacuguuga

SEQ ID NO: 1060170 - RNA, 22 nt, Human
acuguccauucacucauauuca

SEQ ID NO: 1060171 - RNA, 22 nt, Human
guccaguguguuuaucuuggau

SEQ ID NO: 1060172 - RNA, 16 nt, Human
ccugggcucuguugga

SEQ ID NO: 1060173 - RNA, 22 nt, Human
ggcagggaagcuggcaucacgg

SEQ ID NO: 1060174 - RNA, 22 nt, Human
auguagaaauuaggaugauagu

SEQ ID NO: 1060175 - RNA, 22 nt, Human
ugcuucugggccugguguuccc

SEQ ID NO: 1060176 - RNA, 22 nt, Human
aaguccaguuucauuugagguc

SEQ ID NO: 1060177 - RNA, 22 nt, Human
uuuaugaacuacagauauaacu

SEQ ID NO: 1060178 - RNA, 22 nt, Human
ugucagaugcgauaaacuagug

SEQ ID NO: 1060179 - RNA, 22 nt, Human
guccucuggagguuuuuaggug

SEQ ID NO: 1060180 - RNA, 22 nt, Human
aacaguaaaaaucauuuaguug

SEQ ID NO: 1060181 - RNA, 20 nt, Human
auuuggcaugaaguauugau

SEQ ID NO: 1060182 - RNA, 18 nt, Human
ugcaggcuguugaaacug

SEQ ID NO: 1060183 - RNA, 22 nt, Human
ucuuuauuucugaaucccccau

SEQ ID NO: 1060184 - RNA, 22 nt, Human
ccugggcucaggcuugggcagc

SEQ ID NO: 1060185 - RNA, 22 nt, Human
ugcuuuauaacuuaguuuaugg

SEQ ID NO: 1060186 - RNA, 22 nt, Human
ccugggcucugucagaauuggg

SEQ ID NO: 1060187 - RNA, 22 nt, Human
ugaaugaugcaguauaaugaua

SEQ ID NO: 1060188 - RNA, 22 nt, Human
gccaggcagccacccucugcga

SEQ ID NO: 1060189 - RNA, 22 nt, Human
uggcgucucucauaaguaugug

SEQ ID NO: 1060190 - RNA, 22 nt, Human
gggaccuggggacuccuuguuc

SEQ ID NO: 1060191 - RNA, 22 nt, Human
uuucuuucaauucuccuaaugc

SEQ ID NO: 1060192 - RNA, 22 nt, Human
gcuggggagaauuggguuaucu

SEQ ID NO: 1060193 - RNA, 22 nt, Human
acacacagaguuuauacaggca

SEQ ID NO: 1060194 - RNA, 21 nt, Human
agccugcaauguagguaccgg

SEQ ID NO: 1060195 - RNA, 22 nt, Human
ggccucagagaaggcugugcgg

SEQ ID NO: 1060196 - RNA, 22 nt, Human
gggcucucaugaguguguggua

SEQ ID NO: 1060197 - RNA, 23 nt, Human
uaaauuaccuuuccagugcaggg

SEQ ID NO: 1060198 - RNA, 22 nt, Human
ugcuucugucucuuaugccuug

SEQ ID NO: 1060199 - RNA, 22 nt, Human
uacaaagucagaauaacaggug

SEQ ID NO: 1060200 - RNA, 20 nt, Human
ggccucaguguccuuguuug

SEQ ID NO: 1060201 - RNA, 23 nt, Human
uuaggcacuuaguagggccagag

SEQ ID NO: 1060202 - RNA, 22 nt, Human
cuuucucaaugccggaaggcac

SEQ ID NO: 1060203 - RNA, 22 nt, Human
ccagagagaaauggauuugagu

SEQ ID NO: 1060204 - RNA, 22 nt, Human
cuaaaauuaccuaccaguuuag

SEQ ID NO: 1060205 - RNA, 22 nt, Human
guccucugagggggcugcacgc

SEQ ID NO: 1060206 - RNA, 22 nt, Human
acccagcuggaugcauggaggc

SEQ ID NO: 1060207 - RNA, 22 nt, Human
ucuggcagggguucugcacuug

SEQ ID NO: 1060208 - RNA, 21 nt, Human
cagaggcaggcucugugugug

SEQ ID NO: 1060209 - RNA, 20 nt, Human
uggaccugucucuuuaggga

SEQ ID NO: 1060210 - RNA, 22 nt, Human
agacaagaaacugggagucucu

SEQ ID NO: 1060211 - RNA, 22 nt, Human
aaagcagggaugaggcuagagg

SEQ ID NO: 1060212 - RNA, 22 nt, Human
gcagcuuucuacuuccuacagc

SEQ ID NO: 1060213 - RNA, 22 nt, Human
cagccucugacaccacagucgu

SEQ ID NO: 1060214 - RNA, 22 nt, Human
agucccuucucaaagugugcgg

SEQ ID NO: 1060215 - RNA, 22 nt, Human
ucuccaggccuuucccaucuua

SEQ ID NO: 1060216 - RNA, 22 nt, Human
ggguuccuccaguuccuagagc

SEQ ID NO: 1060217 - RNA, 22 nt, Human
uucugucagaagcuagcuccug

SEQ ID NO: 1060218 - RNA, 22 nt, Human
ggcugaguugagaggauuacuu

SEQ ID NO: 1060219 - RNA, 22 nt, Human
gaacacauuagucugaguuggc

SEQ ID NO: 1060220 - RNA, 22 nt, Human
gggaccugccaaggccacccag

SEQ ID NO: 1060221 - RNA, 22 nt, Human
aaauccuaccaagaaauucccu

SEQ ID NO: 1060222 - RNA, 22 nt, Human
ucacuguauuuggaagggaugg

SEQ ID NO: 1060223 - RNA, 22 nt, Human
ugccugccaugcagaaagcuga

SEQ ID NO: 1060224 - RNA, 22 nt, Human
cacacucauuagucauuucucu

SEQ ID NO: 1060225 - RNA, 22 nt, Human
cagcuauuuucucauuaaggau

SEQ ID NO: 1060226 - RNA, 23 nt, Human
uggccaggguacuacacccaccc

SEQ ID NO: 1060227 - RNA, 22 nt, Human
acuuugcagggcuugauaucca

SEQ ID NO: 1060228 - RNA, 22 nt, Human
guuaugaaauaaauauagauca

SEQ ID NO: 1060229 - RNA, 19 nt, Human
cugcagggaugugcagagu

SEQ ID NO: 1060230 - RNA, 22 nt, Human
cagggcuccaugcagggacucc

SEQ ID NO: 1060231 - RNA, 22 nt, Human
ucaagagaaggggaaauagacu

SEQ ID NO: 1060232 - RNA, 22 nt, Human
gggaccugaggagggguuucag

SEQ ID NO: 1060233 - RNA, 22 nt, Human
cugcagggagaggggacagccu

SEQ ID NO: 1060234 - RNA, 22 nt, Human
ucuggcagaucuucccacguuu

SEQ ID NO: 1060235 - RNA, 22 nt, Human
uuauucuucuucucuugccagg

SEQ ID NO: 1060236 - RNA, 19 nt, Human
cucuuaaauugucucuugc

SEQ ID NO: 1060237 - RNA, 22 nt, Human
gccagggaaacugcagaccagc

SEQ ID NO: 1060238 - RNA, 17 nt, Human
ugccagccugucccagg

SEQ ID NO: 1060239 - RNA, 22 nt, Human
cccaggacucuucacugcagcc

SEQ ID NO: 1060240 - RNA, 22 nt, Human
auaauucagguuuucuggcaca

SEQ ID NO: 1060241 - RNA, 22 nt, Human
auaugaagaaucuaggauaggc

SEQ ID NO: 1060242 - RNA, 22 nt, Human
acuggggagagucaugccagca

SEQ ID NO: 1060243 - RNA, 22 nt, Human
gcaggcucccuugcagagcagg

SEQ ID NO: 1060244 - RNA, 22 nt, Human
gggucuccauguuaacaucacu

SEQ ID NO: 1060245 - RNA, 19 nt, Human
guccaguguuuuccaguca

SEQ ID NO: 1060246 - RNA, 22 nt, Human
acuaaauacacacauuuguuca

SEQ ID NO: 1060247 - RNA, 22 nt, Human
agcagguguauauaaggcugag

SEQ ID NO: 1060248 - RNA, 22 nt, Human
acagagagggagugauaaaucc

SEQ ID NO: 1060249 - RNA, 22 nt, Human
gccuggaagugugucgugggaa

SEQ ID NO: 1060250 - RNA, 22 nt, Human
uuucuuauacuauauugucauc

SEQ ID NO: 1060251 - RNA, 22 nt, Human
agauuugcggcuuuacuuugca

SEQ ID NO: 1060252 - RNA, 22 nt, Human
ugcuagaauuugcagaagcaua

SEQ ID NO: 1060253 - RNA, 22 nt, Human
agguauauauucugguccuuau

SEQ ID NO: 1060254 - RNA, 22 nt, Human
gaaauauugggacucagagcuu

SEQ ID NO: 1060255 - RNA, 22 nt, Human
agacuucuuugugagcauuuuc

SEQ ID NO: 1060256 - RNA, 22 nt, Human
guguaugagccuccagcugggc

SEQ ID NO: 1060257 - RNA, 22 nt, Human
auccaggcgaaugcagaaggcc

SEQ ID NO: 1060258 - RNA, 22 nt, Human
uuucuugaccacuauguugaua

SEQ ID NO: 1060259 - RNA, 22 nt, Human
aucccacaccccuacaacauau

SEQ ID NO: 1060260 - RNA, 22 nt, Human
ucugaacagaaaagaugcacaa

SEQ ID NO: 1060261 - RNA, 22 nt, Human
uucacauuugaaaggaaagaua

SEQ ID NO: 1060262 - RNA, 22 nt, Human
uugugaaauguuucaaaauagu

SEQ ID NO: 1060263 - RNA, 22 nt, Human
agccauccuacuaccucagcau

SEQ ID NO: 1060264 - RNA, 22 nt, Human
ucuggcagcaagucuguuucuc

SEQ ID NO: 1060265 - RNA, 22 nt, Human
ggaccugccagaacucaggcua

SEQ ID NO: 1060266 - RNA, 22 nt, Human
gcaggggcuaaggacacagaga

SEQ ID NO: 1060267 - RNA, 22 nt, Human
uccaagaugguugguguggugg

SEQ ID NO: 1060268 - RNA, 20 nt, Human
aauuuacucacagaaugaau

SEQ ID NO: 1060269 - RNA, 22 nt, Human
auuuucaugacuaccuuaaaua

SEQ ID NO: 1060270 - RNA, 22 nt, Human
ucauuuauaaggaugcaauuaa

SEQ ID NO: 1060271 - RNA, 21 nt, Human
uuucugaaggcaacaucuauc

SEQ ID NO: 1060272 - RNA, 22 nt, Human
cuuacaaaggagaggagauagg

SEQ ID NO: 1060273 - RNA, 22 nt, Human
agagggcaugcuugguggccug

SEQ ID NO: 1060274 - RNA, 22 nt, Human
uuucaaaccuacuuguauguuu

SEQ ID NO: 1060275 - RNA, 21 nt, Human
ucuggcaguggucuuucaaau

SEQ ID NO: 1060276 - RNA, 22 nt, Human
ugggcacuguagcuggugcugg

SEQ ID NO: 1060277 - RNA, 22 nt, Human
uugaauuauaagugugucuacu

SEQ ID NO: 1060278 - RNA, 22 nt, Human
auuuagacuucccagcacugug

SEQ ID NO: 1060279 - RNA, 22 nt, Human
auccugugcaaugacugcaucu

SEQ ID NO: 1060280 - RNA, 22 nt, Human
aagagagaacucccuucgccag

SEQ ID NO: 1060281 - RNA, 22 nt, Human
uccugcagacauuuacaccuuu

SEQ ID NO: 1060282 - RNA, 23 nt, Human
gcugacugugaaauucuggagcu

SEQ ID NO: 1060283 - RNA, 21 nt, Human
cagugagguccccagccuagg

SEQ ID NO: 1060284 - RNA, 22 nt, Human
aucugcuuuugagaauuuacuu

SEQ ID NO: 1060285 - RNA, 22 nt, Human
ccucucccgggugccgcugggc

SEQ ID NO: 1060286 - RNA, 21 nt, Human
aaaugaaugugguagugcaag

SEQ ID NO: 1060287 - RNA, 22 nt, Human
agacaucauguuacagauuaag

SEQ ID NO: 1060288 - RNA, 18 nt, Human
ugagaggcuauuuuuugc

SEQ ID NO: 1060289 - RNA, 22 nt, Human
aggcagcaauugaaaucauugu

SEQ ID NO: 1060290 - RNA, 22 nt, Human
auuguuaugaaaauaagauguu

SEQ ID NO: 1060291 - RNA, 22 nt, Human
gcuggcagaauuucuucuugcu

SEQ ID NO: 1060292 - RNA, 22 nt, Human
uuauuuucuccucagaaagugg

SEQ ID NO: 1060293 - RNA, 22 nt, Human
cuuaauuucaaacugcuaguga

SEQ ID NO: 1060294 - RNA, 22 nt, Human
uuuuccuucuagagcagauuuc

SEQ ID NO: 1060295 - RNA, 22 nt, Human
caaaguuuuaguaaacauauau

SEQ ID NO: 1060296 - RNA, 22 nt, Human
acuccugggugcugaccagcgu

SEQ ID NO: 1060297 - RNA, 22 nt, Human
gugccaaaagcuauaauuuggu

SEQ ID NO: 1060298 - RNA, 22 nt, Human
cagcucuuugaguauuccauuu

SEQ ID NO: 1060299 - RNA, 22 nt, Human
aaauaguuguuuggaucaauaa

SEQ ID NO: 1060300 - RNA, 22 nt, Human
uguagaaacuacacaugcaaca

SEQ ID NO: 1060301 - RNA, 22 nt, Human
cugggagggguagccaauccua

SEQ ID NO: 1060302 - RNA, 22 nt, Human
gcacaggaugauggguugaggg

SEQ ID NO: 1060303 - RNA, 20 nt, Human
uccugcagucgcuagcgccc

SEQ ID NO: 1060304 - RNA, 22 nt, Human
uuaaauuccagccucauaauag

SEQ ID NO: 1060305 - RNA, 22 nt, Human
cuucuuaacuguauauacuaug

SEQ ID NO: 1060306 - RNA, 22 nt, Human
ccaggcucugccaggcccuuga

SEQ ID NO: 1060307 - RNA, 22 nt, Human
uccugagccugacaaucaccau

SEQ ID NO: 1060308 - RNA, 22 nt, Human
acugugauguucucuaucuugg

SEQ ID NO: 1060309 - RNA, 22 nt, Human
acacccaggcuggcgugcagug

SEQ ID NO: 1060310 - RNA, 22 nt, Human
cccacccugggcuacacaucca

SEQ ID NO: 1060311 - RNA, 22 nt, Human
uccaggcauagaaggcacgcac

SEQ ID NO: 1060312 - RNA, 19 nt, Human
uccuggcauuuguaggaaa

SEQ ID NO: 1060313 - RNA, 22 nt, Human
auuaaauuggacgcugggggaa

SEQ ID NO: 1060314 - RNA, 22 nt, Human
ccuggcagcuccguggccuucc

SEQ ID NO: 1060315 - RNA, 22 nt, Human
ucagcauaucuugagcuucaug

SEQ ID NO: 1060316 - RNA, 22 nt, Human
auaugcaagcacauagaauacu

SEQ ID NO: 1060317 - RNA, 22 nt, Human
agggcugacaaauggcagugac

SEQ ID NO: 1060318 - RNA, 22 nt, Human
caggagggcccgagacucuucc

SEQ ID NO: 1060319 - RNA, 22 nt, Human
acaugauuaaaagauuuuaaag

SEQ ID NO: 1060320 - RNA, 19 nt, Human
acauucccaucagcaaugu

SEQ ID NO: 1060321 - RNA, 22 nt, Human
gcuccaggagagggaagcagau

SEQ ID NO: 1060322 - RNA, 22 nt, Human
uguacaaagguacuuugauguu

SEQ ID NO: 1060323 - RNA, 22 nt, Human
gcagggcucaacaggacacccc

SEQ ID NO: 1060324 - RNA, 22 nt, Human
ucuggcaggacaugcugaccau

SEQ ID NO: 1060325 - RNA, 22 nt, Human
gcuccaggugucccagguaaaa

SEQ ID NO: 1060326 - RNA, 21 nt, Human
uuuagggaggauauuuaacuu

SEQ ID NO: 1060327 - RNA, 22 nt, Human
gugggcuggauuugcuugcaga

SEQ ID NO: 1060328 - RNA, 22 nt, Human
guauuaggugguggaauuguag

SEQ ID NO: 1060329 - RNA, 22 nt, Human
cauuacaaccccaaauuacaaa

SEQ ID NO: 1060330 - RNA, 22 nt, Human
aaagaucaaguaggcauggccu

SEQ ID NO: 1060331 - RNA, 22 nt, Human
ccuggcagacagcacugaagcu

SEQ ID NO: 1060332 - RNA, 22 nt, Human
gggaccugggccagaggacagu

SEQ ID NO: 1060333 - RNA, 22 nt, Human
gcaguguuaggaauaaaaauga

SEQ ID NO: 1060334 - RNA, 21 nt, Human
acagauauuucauugaacauu

SEQ ID NO: 1060335 - RNA, 22 nt, Human
aaccugcaguuuuuauucugag

SEQ ID NO: 1060336 - RNA, 22 nt, Human
caggaguggugugagggacucc

SEQ ID NO: 1060337 - RNA, 20 nt, Human
ugccuggccuuucucugccc

SEQ ID NO: 1060338 - RNA, 22 nt, Human
cugccucuauaggaguccacca

SEQ ID NO: 1060339 - RNA, 22 nt, Human
uuacaagauaaccugaugcugu

SEQ ID NO: 1060340 - RNA, 22 nt, Human
agggcucccgugaggugacugc

SEQ ID NO: 1060341 - RNA, 22 nt, Human
uccaggcaguuuuccagguugu

SEQ ID NO: 1060342 - RNA, 22 nt, Human
acuggcagcuguaggaugcaug

SEQ ID NO: 1060343 - RNA, 22 nt, Human
uuauauaucuugauuuguucca

SEQ ID NO: 1060344 - RNA, 22 nt, Human
uaaaguuuggcagacaauaaca

SEQ ID NO: 1060345 - RNA, 21 nt, Human
ccagagagagggaaguggguu

SEQ ID NO: 1060346 - RNA, 22 nt, Human
aggaccuggaucacagagaucu

SEQ ID NO: 1060347 - RNA, 22 nt, Human
aaaaaucuaugacugcuucucc

SEQ ID NO: 1060348 - RNA, 22 nt, Human
agagacaggguuuugucguguu

SEQ ID NO: 1060349 - RNA, 22 nt, Human
auggccuggggauuccugagca

SEQ ID NO: 1060350 - RNA, 22 nt, Human
aaacacagauuucuuuguccca

SEQ ID NO: 1060351 - RNA, 22 nt, Human
acaggcacugucaagucaugaa

SEQ ID NO: 1060352 - RNA, 16 nt, Human
gcagggguggguggag

SEQ ID NO: 1060353 - RNA, 22 nt, Human
ugcuuuauaggggauugcaggc

SEQ ID NO: 1060354 - RNA, 22 nt, Human
auucacaguuuccucauauucu

SEQ ID NO: 1060355 - RNA, 22 nt, Human
uagcuuuaauaagcugcugaau

SEQ ID NO: 1060356 - RNA, 22 nt, Human
cugggcugcaguuccugguccu

SEQ ID NO: 1060357 - RNA, 22 nt, Human
gcacacauucggauucuuaacc

SEQ ID NO: 1060358 - RNA, 22 nt, Human
caugaagcccucaucagucuga

SEQ ID NO: 1060359 - RNA, 22 nt, Human
uccaaguugauguuucuuaaau

SEQ ID NO: 1060360 - RNA, 22 nt, Human
auauauuuacucuccuguugca

SEQ ID NO: 1060361 - RNA, 22 nt, Human
gaaucauuggaaccacauccaa

SEQ ID NO: 1060362 - RNA, 22 nt, Human
ggccucagaggaggugugaguc

SEQ ID NO: 1060363 - RNA, 22 nt, Human
ugacaaaacugcaauuacuuuu

SEQ ID NO: 1060364 - RNA, 22 nt, Human
ugcuucugaaaugcaggucuuc

SEQ ID NO: 1060365 - RNA, 22 nt, Human
ucacacagcuccuuuccuuagu

SEQ ID NO: 1060366 - RNA, 22 nt, Human
gugcuaggauuacaggcauggg

SEQ ID NO: 1060367 - RNA, 22 nt, Human
aggugaguuacaggaggagguc

SEQ ID NO: 1060368 - RNA, 22 nt, Human
ggagagaauuccauggacaugu

SEQ ID NO: 1060369 - RNA, 22 nt, Human
uaugcauacaaugagauauucc

SEQ ID NO: 1060370 - RNA, 22 nt, Human
ugucagagagcaggcaguagaa

SEQ ID NO: 1060371 - RNA, 22 nt, Human
cuccaagucggcugcagcugga

SEQ ID NO: 1060372 - RNA, 18 nt, Human
cauaauuuucuuucuuua

SEQ ID NO: 1060373 - RNA, 22 nt, Human
agcauucauugcuagaauguaa

SEQ ID NO: 1060374 - RNA, 22 nt, Human
ugcagggauuagaggccgggga

SEQ ID NO: 1060375 - RNA, 22 nt, Human
uccaagcuguauguuccuagag

SEQ ID NO: 1060376 - RNA, 22 nt, Human
ugaaaaaccucaguccgcuuua

SEQ ID NO: 1060377 - RNA, 22 nt, Human
acaauguaggauauguacuugu

SEQ ID NO: 1060378 - RNA, 22 nt, Human
guccucugggcagcugccccac

SEQ ID NO: 1060379 - RNA, 21 nt, Human
aggcugcuggcucaggguccu

SEQ ID NO: 1060380 - RNA, 22 nt, Human
guuagggagggugcauaugugu

SEQ ID NO: 1060381 - RNA, 22 nt, Human
accaggcagagcugggccuuaa

SEQ ID NO: 1060382 - RNA, 22 nt, Human
auauacuuggagacuaucauug

SEQ ID NO: 1060383 - RNA, 22 nt, Human
uguaugaauauguuggggaggu

SEQ ID NO: 1060384 - RNA, 22 nt, Human
ugcuuuauguggcugauacuca

SEQ ID NO: 1060385 - RNA, 22 nt, Human
aaagaauagccuuuguccaaau

SEQ ID NO: 1060386 - RNA, 17 nt, Human
gcuaggagagggaggag

SEQ ID NO: 1060387 - RNA, 22 nt, Human
cugggagaggaaccucgagggu

SEQ ID NO: 1060388 - RNA, 22 nt, Human
cagagccuuccuagcagacucu

SEQ ID NO: 1060389 - RNA, 22 nt, Human
uguaaagaaagacgcagaguua

SEQ ID NO: 1060390 - RNA, 22 nt, Human
cccaggcacucuuggucauuuu

SEQ ID NO: 1060391 - RNA, 22 nt, Human
ucccaaggugcucggcaacagg

SEQ ID NO: 1060392 - RNA, 22 nt, Human
auggcagagggauugaacagcu

SEQ ID NO: 1060393 - RNA, 22 nt, Human
agcaggcuaggaaccucacugc

SEQ ID NO: 1060394 - RNA, 20 nt, Human
agccugccagcuggcccaga

SEQ ID NO: 1060395 - RNA, 22 nt, Human
auuauuaggugcucucugacaa

SEQ ID NO: 1060396 - RNA, 22 nt, Human
aaacuucagugaaugacuuaug

SEQ ID NO: 1060397 - RNA, 22 nt, Human
ucauuuguucaucugcucuucu

SEQ ID NO: 1060398 - RNA, 22 nt, Human
ggaccugcccuggcucagaugc

SEQ ID NO: 1060399 - RNA, 22 nt, Human
uaacuuucuucauaugugaacc

SEQ ID NO: 1060400 - RNA, 22 nt, Human
aaguuucaaauguugauuaugc

SEQ ID NO: 1060401 - RNA, 22 nt, Human
cauuguuaccaucuuuuaccua

SEQ ID NO: 1060402 - RNA, 22 nt, Human
cuuucacacacauacauuugga

SEQ ID NO: 1060403 - RNA, 22 nt, Human
ccagagagaguacugggcucug

SEQ ID NO: 1060404 - RNA, 22 nt, Human
gggucaggcucagcagggcagc

SEQ ID NO: 1060405 - RNA, 22 nt, Human
gccuggcaggccuguuggggcu

SEQ ID NO: 1060406 - RNA, 20 nt, Human
cucuuuugacucuuugcaag

SEQ ID NO: 1060407 - RNA, 22 nt, Human
gcuggcagagacaagaagacua

SEQ ID NO: 1060408 - RNA, 22 nt, Human
gugagagggcugggcucaugau

SEQ ID NO: 1060409 - RNA, 22 nt, Human
auucucaguucacuaguuucuu

SEQ ID NO: 1060410 - RNA, 22 nt, Human
aaucacaugugcucaauuuuaa

SEQ ID NO: 1060411 - RNA, 22 nt, Human
ggcugcagagcugggugggccu

SEQ ID NO: 1060412 - RNA, 22 nt, Human
uacaaaguaauguauaauaucg

SEQ ID NO: 1060413 - RNA, 22 nt, Human
agggcuccuccccggccuccac

SEQ ID NO: 1060414 - RNA, 22 nt, Human
aguaugaaaguuaaucaauuua

SEQ ID NO: 1060415 - RNA, 22 nt, Human
uccaggagguagugcuuaauuu

SEQ ID NO: 1060416 - RNA, 22 nt, Human
uuguaugaggauagcaagaagc

SEQ ID NO: 1060417 - RNA, 22 nt, Human
guauuagguuggugcaaaauug

SEQ ID NO: 1060418 - RNA, 22 nt, Human
cccugcaggggaccugcagccu

SEQ ID NO: 1060419 - RNA, 22 nt, Human
agggcuccgggcaggcgaugga

SEQ ID NO: 1060420 - RNA, 22 nt, Human
ugcaggcugcaccccugcccug

SEQ ID NO: 1060421 - RNA, 22 nt, Human
ucaaucacguguuccauguucu

SEQ ID NO: 1060422 - RNA, 22 nt, Human
uagaaacagaaaacuguaauag

SEQ ID NO: 1060423 - RNA, 22 nt, Human
ccaggcuccucaugaucuuguu

SEQ ID NO: 1060424 - RNA, 22 nt, Human
gucacaggccuggaugaggggc

SEQ ID NO: 1060425 - RNA, 19 nt, Human
ccuugccugucccugcagc

SEQ ID NO: 1060426 - RNA, 22 nt, Human
aaagacuuggcuuaugauuugc

SEQ ID NO: 1060427 - RNA, 22 nt, Human
cuggccucagagggucauggug

SEQ ID NO: 1060428 - RNA, 22 nt, Human
ucuggcagugagcaacuugaca

SEQ ID NO: 1060429 - RNA, 18 nt, Human
uuuuacucauagcaggcc

SEQ ID NO: 1060430 - RNA, 22 nt, Human
ccaaguacucucaccaaagcuu

SEQ ID NO: 1060431 - RNA, 22 nt, Human
ugagaauuuuuugucaugcauu

SEQ ID NO: 1060432 - RNA, 22 nt, Human
ggggaccuaggcucugucucuu

SEQ ID NO: 1060433 - RNA, 22 nt, Human
gggcugacagcacgccuucugu

SEQ ID NO: 1060434 - RNA, 22 nt, Human
cgcaggcuccggggugcccugg

SEQ ID NO: 1060435 - RNA, 22 nt, Human
ucuggcagcucuccucggcgga

SEQ ID NO: 1060436 - RNA, 22 nt, Human
aaacaaacauagguuugaaagu

SEQ ID NO: 1060437 - RNA, 22 nt, Human
acagguggccccgagggagugg

SEQ ID NO: 1060438 - RNA, 20 nt, Human
caccacagaauuggggacag

SEQ ID NO: 1060439 - RNA, 22 nt, Human
uccugagcccuguaggacccug

SEQ ID NO: 1060440 - RNA, 22 nt, Human
gcaggcucguuggaaguccccu

SEQ ID NO: 1060441 - RNA, 22 nt, Human
ccacacagggggaugaguuauu

SEQ ID NO: 1060442 - RNA, 22 nt, Human
cuauugaauuaacuauuaaagu

SEQ ID NO: 1060443 - RNA, 17 nt, Human
aggccucccuccaggcc

SEQ ID NO: 1060444 - RNA, 22 nt, Human
aguaugaagaauacauagauga

SEQ ID NO: 1060445 - RNA, 22 nt, Human
ggagcugaguucuucagccggg

SEQ ID NO: 1060446 - RNA, 22 nt, Human
gagccaccuucaacucaggaau

SEQ ID NO: 1060447 - RNA, 22 nt, Human
cccugagcgugaggaggaagua

SEQ ID NO: 1060448 - RNA, 22 nt, Human
aggguagggcccggagacagac

SEQ ID NO: 1060449 - RNA, 21 nt, Human
aaauuucugcaagccucaacu

SEQ ID NO: 1060450 - RNA, 22 nt, Human
gcuggggagcuagaccucagca

SEQ ID NO: 1060451 - RNA, 22 nt, Human
aaaguuugaaugauauauuagu

SEQ ID NO: 1060452 - RNA, 22 nt, Human
caucacagggggcuagaagucu

SEQ ID NO: 1060453 - RNA, 22 nt, Human
gccuggcauauaguaguugugc

SEQ ID NO: 1060454 - RNA, 22 nt, Human
cccugagcucaggcccuugggg

SEQ ID NO: 1060455 - RNA, 22 nt, Human
agggcuccuaugaugcucugcc

SEQ ID NO: 1060456 - RNA, 19 nt, Human
uccugcagguggcuugcag

SEQ ID NO: 1060457 - RNA, 22 nt, Human
ucaaagagcuauucaguugugg

SEQ ID NO: 1060458 - RNA, 21 nt, Human
ugcaggcuacuucugacucua

SEQ ID NO: 1060459 - RNA, 22 nt, Human
gaggagcucaugaaagcggugu

SEQ ID NO: 1060460 - RNA, 22 nt, Human
ccuggggagagaaagcccagcc

SEQ ID NO: 1060461 - RNA, 17 nt, Human
uauauguaugccucucc

SEQ ID NO: 1060462 - RNA, 22 nt, Human
cucucuggaagggggagcugau

SEQ ID NO: 1060463 - RNA, 23 nt, Human
gagugcagaauagacaugcagug

SEQ ID NO: 1060464 - RNA, 18 nt, Human
ccuagccuccaagcucau

SEQ ID NO: 1060465 - RNA, 22 nt, Human
ggcagggaguggagacucccua

SEQ ID NO: 1060466 - RNA, 22 nt, Human
gggcugaccccaccccucacuc

SEQ ID NO: 1060467 - RNA, 22 nt, Human
gagggcuccucacauucucuau

SEQ ID NO: 1060468 - RNA, 22 nt, Human
agggcucugagcuggaccaccu

SEQ ID NO: 1060469 - RNA, 22 nt, Human
uaaguuuuaagcaaucugauaa

SEQ ID NO: 1060470 - RNA, 22 nt, Human
uuccaaguagaagcauuugcau

SEQ ID NO: 1060471 - RNA, 22 nt, Human
cagguacauucguagacccauu

SEQ ID NO: 1060472 - RNA, 22 nt, Human
gugggcuuuggccucuuucucc

SEQ ID NO: 1060473 - RNA, 22 nt, Human
uucuggggccaauugccacugc

SEQ ID NO: 1060474 - RNA, 22 nt, Human
auucagugugagguuuucaagu

SEQ ID NO: 1060475 - RNA, 22 nt, Human
ucccucuaaacuguaagauucu

SEQ ID NO: 1060476 - RNA, 22 nt, Human
auguuucagauacagaucaaau

SEQ ID NO: 1060477 - RNA, 22 nt, Human
guuaggaacacuggagccuaaa

SEQ ID NO: 1060478 - RNA, 22 nt, Human
gaauuugaaaagugaugggaau

SEQ ID NO: 1060479 - RNA, 22 nt, Human
aucaguuauuuuuaagcuauaa

SEQ ID NO: 1060480 - RNA, 22 nt, Human
aaauccuaagcagaggaauuua

SEQ ID NO: 1060481 - RNA, 22 nt, Human
uccugcagaucaaagccuuuga

SEQ ID NO: 1060482 - RNA, 22 nt, Human
guaugaaggcgagagcccacua

SEQ ID NO: 1060483 - RNA, 22 nt, Human
uucugucaugcucauguaauug

SEQ ID NO: 1060484 - RNA, 23 nt, Human
auggaagucacuguuuucuuguc

SEQ ID NO: 1060485 - RNA, 22 nt, Human
auuucucaucaagugccaacuc

SEQ ID NO: 1060486 - RNA, 22 nt, Human
uuagaacuuaaacuucagaaag

SEQ ID NO: 1060487 - RNA, 22 nt, Human
cugccugcucuauccaggccug

SEQ ID NO: 1060488 - RNA, 20 nt, Human
cugcaggguuagaggcucca

SEQ ID NO: 1060489 - RNA, 22 nt, Human
ugcuuaaaaugaugauuauuuu

SEQ ID NO: 1060490 - RNA, 22 nt, Human
uuagaacugaagaagauuaagg

SEQ ID NO: 1060491 - RNA, 22 nt, Human
acacacuuuaaauuaaaccucu

SEQ ID NO: 1060492 - RNA, 22 nt, Human
accaagcuguauauuauugguu

SEQ ID NO: 1060493 - RNA, 22 nt, Human
ugggcuuaggucggaggcggcc

SEQ ID NO: 1060494 - RNA, 22 nt, Human
ccugggcuuucaaaaccagccu

SEQ ID NO: 1060495 - RNA, 20 nt, Human
cuggggacagcaauggcugu

SEQ ID NO: 1060496 - RNA, 22 nt, Human
gagcuuuacuucugacuggugc

SEQ ID NO: 1060497 - RNA, 22 nt, Human
accaggcacuccugaggucuga

SEQ ID NO: 1060498 - RNA, 22 nt, Human
uguaggcugaagaugaagugga

SEQ ID NO: 1060499 - RNA, 21 nt, Human
acaggcucuggggaugcuggg

SEQ ID NO: 1060500 - RNA, 22 nt, Human
aaagcagguugcaauuacagug

SEQ ID NO: 1060501 - RNA, 22 nt, Human
aaaugcuagggagaaacucucc

SEQ ID NO: 1060502 - RNA, 23 nt, Human
ucacauaauccuucauccacagg

SEQ ID NO: 1060503 - RNA, 22 nt, Human
uuuaauuuuccugguaggccug

SEQ ID NO: 1060504 - RNA, 22 nt, Human
ccuggcagcauugguagagauu

SEQ ID NO: 1060505 - RNA, 22 nt, Human
cuccuggcacugucuugaccca

SEQ ID NO: 1060506 - RNA, 22 nt, Human
uccaggcauguggccaguacuc

SEQ ID NO: 1060507 - RNA, 22 nt, Human
gcauguuuugcaacaagugacc

SEQ ID NO: 1060508 - RNA, 22 nt, Human
gggcugacgaaggccaugugug

SEQ ID NO: 1060509 - RNA, 22 nt, Human
caggggccaaggguccagaccu

SEQ ID NO: 1060510 - RNA, 22 nt, Human
ugucacuuuggggagaguuuug

SEQ ID NO: 1060511 - RNA, 22 nt, Human
cauuguuauagcauuacacacc

SEQ ID NO: 1060512 - RNA, 22 nt, Human
cacaggcugcccgcagcuggga

SEQ ID NO: 1060513 - RNA, 22 nt, Human
uuuuaccugaaccacacaguau

SEQ ID NO: 1060514 - RNA, 22 nt, Human
uaaauuguuuucuagaaguugu

SEQ ID NO: 1060515 - RNA, 22 nt, Human
uuuucauuuuuguagaugcaag

SEQ ID NO: 1060516 - RNA, 22 nt, Human
cccaggccagaacuugguugcu

SEQ ID NO: 1060517 - RNA, 22 nt, Human
ggccucagugggccgcugcagg

SEQ ID NO: 1060518 - RNA, 22 nt, Human
auuuaugauuagccuauuguug

SEQ ID NO: 1060519 - RNA, 22 nt, Human
uucuuuuacauuaagauuucag

SEQ ID NO: 1060520 - RNA, 22 nt, Human
agggcccuagggaaugagacau

SEQ ID NO: 1060521 - RNA, 22 nt, Human
uuauuauagauuaugcaagauu

SEQ ID NO: 1060522 - RNA, 23 nt, Human
ugaaacauuuaggguagaauuuc

SEQ ID NO: 1060523 - RNA, 22 nt, Human
aaccugcauguuucuaaaagca

SEQ ID NO: 1060524 - RNA, 20 nt, Human
augugaaagaucaguugucu

SEQ ID NO: 1060525 - RNA, 21 nt, Human
gggcagaggggccuccugggu

SEQ ID NO: 1060526 - RNA, 22 nt, Human
gggcugacaccacccaggcgca

SEQ ID NO: 1060527 - RNA, 18 nt, Human
ugucauaauauaucaccu

SEQ ID NO: 1060528 - RNA, 22 nt, Human
cugcucuaauaucagauagacu

SEQ ID NO: 1060529 - RNA, 22 nt, Human
augggcuggccuuucccgcucu

SEQ ID NO: 1060530 - RNA, 22 nt, Human
cuuggcaguuucggaaggauga

SEQ ID NO: 1060531 - RNA, 22 nt, Human
uccugcagccauuagaggucaa

SEQ ID NO: 1060532 - RNA, 22 nt, Human
aucagagaccggucaagucaug

SEQ ID NO: 1060533 - RNA, 23 nt, Human
uagaaugucauucaaugauaugg

SEQ ID NO: 1060534 - RNA, 19 nt, Human
cagcccucuuaccacugug

SEQ ID NO: 1060535 - RNA, 22 nt, Human
cuagaauugcauucuaugaaua

SEQ ID NO: 1060536 - RNA, 22 nt, Human
gccaaaucuugcacacucuugu

SEQ ID NO: 1060537 - RNA, 20 nt, Human
gccaggcacuguucucaaua

SEQ ID NO: 1060538 - RNA, 22 nt, Human
cacccaggacaggccagaugug

SEQ ID NO: 1060539 - RNA, 20 nt, Human
agguuccuuuguggagaauu

SEQ ID NO: 1060540 - RNA, 22 nt, Human
ucugcagauuuaucagcagcug

SEQ ID NO: 1060541 - RNA, 22 nt, Human
uacauugaauuuuuuagcaugu

SEQ ID NO: 1060542 - RNA, 22 nt, Human
caguuuauuuccaagaugacaa

SEQ ID NO: 1060543 - RNA, 22 nt, Human
uugcagcuuagugauguuaucu

SEQ ID NO: 1060544 - RNA, 22 nt, Human
cagagaaagggugaauuccuuc

SEQ ID NO: 1060545 - RNA, 22 nt, Human
cucccagguuccgacgccucuu

SEQ ID NO: 1060546 - RNA, 22 nt, Human
cauuaggguaauugaacacuua

SEQ ID NO: 1060547 - RNA, 22 nt, Human
uucuggggccccaguguccucg

SEQ ID NO: 1060548 - RNA, 19 nt, Human
gcagagugggguggagggu

SEQ ID NO: 1060549 - RNA, 22 nt, Human
acuggcagagguuggacaccau

SEQ ID NO: 1060550 - RNA, 22 nt, Human
cagcucugagacugaggcuaug

SEQ ID NO: 1060551 - RNA, 22 nt, Human
ucaaauauuggcuauuucacau

SEQ ID NO: 1060552 - RNA, 22 nt, Human
auuuucaucgcuagguuggccu

SEQ ID NO: 1060553 - RNA, 22 nt, Human
auguauuucuauguagugaaga

SEQ ID NO: 1060554 - RNA, 22 nt, Human
caggacugauguuccuccagcc

SEQ ID NO: 1060555 - RNA, 22 nt, Human
uucugucaaaugccaguagaga

SEQ ID NO: 1060556 - RNA, 22 nt, Human
uaugacauuggccaaguucugu

SEQ ID NO: 1060557 - RNA, 22 nt, Human
uugcagcuucuaccacuguuuc

SEQ ID NO: 1060558 - RNA, 22 nt, Human
uuggaaauugcaagugauuugc

SEQ ID NO: 1060559 - RNA, 22 nt, Human
ucugggcuggcuuuaugcugac

SEQ ID NO: 1060560 - RNA, 22 nt, Human
ucuuccagaaugcauucucuuu

SEQ ID NO: 1060561 - RNA, 22 nt, Human
cacaauguauauguauaucaaa

SEQ ID NO: 1060562 - RNA, 22 nt, Human
ucagcucuguguacaguuagca

SEQ ID NO: 1060563 - RNA, 22 nt, Human
ccacagaccuuggcuuccaccu

SEQ ID NO: 1060564 - RNA, 22 nt, Human
aaaauccucuaauucuagaaua

SEQ ID NO: 1060565 - RNA, 18 nt, Human
gcuuuauuucuuggggaa

SEQ ID NO: 1060566 - RNA, 22 nt, Human
cucaaauauaagcuaaaugugg

SEQ ID NO: 1060567 - RNA, 22 nt, Human
uaugacauugcuuuuuagaacu

SEQ ID NO: 1060568 - RNA, 22 nt, Human
cuguaugauuccauuucuauaa

SEQ ID NO: 1060569 - RNA, 22 nt, Human
ugcuccagugccugccccacag

SEQ ID NO: 1060570 - RNA, 22 nt, Human
agccagggucucucgcucuguu

SEQ ID NO: 1060571 - RNA, 22 nt, Human
cagggcucgcugccagcuucag

SEQ ID NO: 1060572 - RNA, 22 nt, Human
guauuaggaaauaugaagaaag

SEQ ID NO: 1060573 - RNA, 22 nt, Human
ggggccuuuucugaauguggaa

SEQ ID NO: 1060574 - RNA, 22 nt, Human
acuuaaaaagaaucuuuucacg

SEQ ID NO: 1060575 - RNA, 22 nt, Human
ucuuugaaaagauauuccuccu

SEQ ID NO: 1060576 - RNA, 17 nt, Human
gugaagagucauugaau

SEQ ID NO: 1060577 - RNA, 20 nt, Human
ccuggcaggcggguuacuua

SEQ ID NO: 1060578 - RNA, 22 nt, Human
aacccagccguguagcugccgc

SEQ ID NO: 1060579 - RNA, 22 nt, Human
aaauaguuuagcucucauuuca

SEQ ID NO: 1060580 - RNA, 22 nt, Human
caccugcaaggagcuuucauuu

SEQ ID NO: 1060581 - RNA, 22 nt, Human
cuggccucauagccaagcugug

SEQ ID NO: 1060582 - RNA, 22 nt, Human
ccauacacacaccaaauuugua

SEQ ID NO: 1060583 - RNA, 22 nt, Human
uauguacacacacaugcaugua

SEQ ID NO: 1060584 - RNA, 22 nt, Human
ucuggggauggucuacuuucug

SEQ ID NO: 1060585 - RNA, 22 nt, Human
ccccacaccugccgggcagcag

SEQ ID NO: 1060586 - RNA, 19 nt, Human
uccaggcauccuucaggcu

SEQ ID NO: 1060587 - RNA, 22 nt, Human
uacagcauauacagaaugaaca

SEQ ID NO: 1060588 - RNA, 22 nt, Human
cugugaucauucuugauuuaag

SEQ ID NO: 1060589 - RNA, 22 nt, Human
agggacccauagagagaccagu

SEQ ID NO: 1060590 - RNA, 22 nt, Human
ccugccugucuuuauccccugu

SEQ ID NO: 1060591 - RNA, 22 nt, Human
cuucuuaaucccuuauauauuu

SEQ ID NO: 1060592 - RNA, 22 nt, Human
ucugugcaggaagucauuauga

SEQ ID NO: 1060593 - RNA, 22 nt, Human
agcuuuauggugccucacuuga

SEQ ID NO: 1060594 - RNA, 19 nt, Human
acuggcaguuucugcaugg

SEQ ID NO: 1060595 - RNA, 21 nt, Human
acagagcauaaugguguggca

SEQ ID NO: 1060596 - RNA, 22 nt, Human
uacaaguaaauuguagauacca

SEQ ID NO: 1060597 - RNA, 22 nt, Human
uuuauucugugcuacaugaaga

SEQ ID NO: 1060598 - RNA, 22 nt, Human
uuauuuaggagaaggaacccug

SEQ ID NO: 1060599 - RNA, 22 nt, Human
acuggcagaacgugaugcgggu

SEQ ID NO: 1060600 - RNA, 22 nt, Human
ccaaguacagauuccuccacug

SEQ ID NO: 1060601 - RNA, 20 nt, Human
cuguuaaaagguaugaauuc

SEQ ID NO: 1060602 - RNA, 22 nt, Human
ccccuuccacagugcuuccuaa

SEQ ID NO: 1060603 - RNA, 22 nt, Human
ucagcuuucucaaagaagcugg

SEQ ID NO: 1060604 - RNA, 22 nt, Human
aacccaggguggagguugcagu

SEQ ID NO: 1060605 - RNA, 22 nt, Human
gcacacaugcaugcacaggagu

SEQ ID NO: 1060606 - RNA, 22 nt, Human
acagugugaugggccugccuga

SEQ ID NO: 1060607 - RNA, 22 nt, Human
ugcuuaaaauaguucauuuuug

SEQ ID NO: 1060608 - RNA, 22 nt, Human
guccucugggcuuugagcaguc

SEQ ID NO: 1060609 - RNA, 22 nt, Human
aagugugggaaguugcuaaaau

SEQ ID NO: 1060610 - RNA, 22 nt, Human
ugagaauuuucaguuucacuuu

SEQ ID NO: 1060611 - RNA, 22 nt, Human
ccaccccaaaugaagaccucuc

SEQ ID NO: 1060612 - RNA, 22 nt, Human
cagaggcagacccuccagggcg

SEQ ID NO: 1060613 - RNA, 22 nt, Human
agucacaguuucccugagagag

SEQ ID NO: 1060614 - RNA, 22 nt, Human
uuguaaacugcugcaggagugc

SEQ ID NO: 1060615 - RNA, 22 nt, Human
uuucacaaucaaauggugaaau

SEQ ID NO: 1060616 - RNA, 22 nt, Human
aaucuuucccuauuaaaugugg

SEQ ID NO: 1060617 - RNA, 22 nt, Human
cacauaaucaccaaguccuuuc

SEQ ID NO: 1060618 - RNA, 22 nt, Human
ucauuuugggguuugucaucuu

SEQ ID NO: 1060619 - RNA, 22 nt, Human
aaugaagccacugaagacaauc

SEQ ID NO: 1060620 - RNA, 23 nt, Human
gggcuccagucucugcucaguug

SEQ ID NO: 1060621 - RNA, 22 nt, Human
acagcuuuugaaaaauuacugg

SEQ ID NO: 1060622 - RNA, 22 nt, Human
gcuggcagggacagcugcgugu

SEQ ID NO: 1060623 - RNA, 22 nt, Human
aaaauccuuagccgagugaggu

SEQ ID NO: 1060624 - RNA, 23 nt, Human
gaauaguuuuagaaauuggagaa

SEQ ID NO: 1060625 - RNA, 22 nt, Human
uuuucguuuauuugacauguaa

SEQ ID NO: 1060626 - RNA, 22 nt, Human
cuauuacauuucuggacauuca

SEQ ID NO: 1060627 - RNA, 23 nt, Human
gcccacccucagcguccucacgg

SEQ ID NO: 1060628 - RNA, 22 nt, Human
cccaaguuaauuuguagcugaa

SEQ ID NO: 1060629 - RNA, 22 nt, Human
cucuccagaauaugccgccgug

SEQ ID NO: 1060630 - RNA, 22 nt, Human
uucacuuaacaucauaucauga

SEQ ID NO: 1060631 - RNA, 22 nt, Human
ggggcugaaccuggaggugguc

SEQ ID NO: 1060632 - RNA, 22 nt, Human
cauuuguaggaugcuucuuguu

SEQ ID NO: 1060633 - RNA, 22 nt, Human
auguuauuaaaguacagauucu

SEQ ID NO: 1060634 - RNA, 22 nt, Human
accaagcuucguggaggaaguu

SEQ ID NO: 1060635 - RNA, 22 nt, Human
cagcccaggucucucuuccagu

SEQ ID NO: 1060636 - RNA, 22 nt, Human
cauaauuugugguaguggggga

SEQ ID NO: 1060637 - RNA, 22 nt, Human
aaacaucaccauuuuaccuaau

SEQ ID NO: 1060638 - RNA, 22 nt, Human
auggcagacgaggcagcagggg

SEQ ID NO: 1060639 - RNA, 22 nt, Human
aauuagggagccaucauaaggu

SEQ ID NO: 1060640 - RNA, 22 nt, Human
uccaggcauuggagagauaaug

SEQ ID NO: 1060641 - RNA, 22 nt, Human
auaugagaauuggaaaauauca

SEQ ID NO: 1060642 - RNA, 23 nt, Human
cuucacaaucaaaaucaguucug

SEQ ID NO: 1060643 - RNA, 22 nt, Human
uucaagauggcaccagugagug

SEQ ID NO: 1060644 - RNA, 23 nt, Human
cgcccagccucagugaccugggc

SEQ ID NO: 1060645 - RNA, 22 nt, Human
ucucugaagauauuuauuauua

SEQ ID NO: 1060646 - RNA, 22 nt, Human
cccacacauuuuucacuuaccg

SEQ ID NO: 1060647 - RNA, 22 nt, Human
cguaugaaauuuuugacauuug

SEQ ID NO: 1060648 - RNA, 22 nt, Human
acugauuacacgaguucugacu

SEQ ID NO: 1060649 - RNA, 18 nt, Human
ggccucagccuggccgga

SEQ ID NO: 1060650 - RNA, 22 nt, Human
uuuaaauucugucugccgcuua

SEQ ID NO: 1060651 - RNA, 22 nt, Human
gaaacauaguugagacacugcu

SEQ ID NO: 1060652 - RNA, 23 nt, Human
ugagggacaugguggcuucugag

SEQ ID NO: 1060653 - RNA, 22 nt, Human
caguguggugagauuccaggug

SEQ ID NO: 1060654 - RNA, 22 nt, Human
uucacaaaacacuauuuucugg

SEQ ID NO: 1060655 - RNA, 20 nt, Human
cagcccuccaguggaggcag

SEQ ID NO: 1060656 - RNA, 22 nt, Human
cacuuagucucaccaguucagu

SEQ ID NO: 1060657 - RNA, 21 nt, Human
uccaaaucccauucuguaguc

SEQ ID NO: 1060658 - RNA, 21 nt, Human
acacagaggcaucaucacuuu

SEQ ID NO: 1060659 - RNA, 22 nt, Human
uccuggcaaagauguugguguu

SEQ ID NO: 1060660 - RNA, 22 nt, Human
ucccuccuggccgucaccgcug

SEQ ID NO: 1060661 - RNA, 22 nt, Human
gcacacacaugugaguacaugc

SEQ ID NO: 1060662 - RNA, 22 nt, Human
aguaugaagcugaaugauuuua

SEQ ID NO: 1060663 - RNA, 22 nt, Human
gccugcagggccugggccuacc

SEQ ID NO: 1060664 - RNA, 22 nt, Human
ugcaggcucaccugccagggcc

SEQ ID NO: 1060665 - RNA, 22 nt, Human
uuuugcuuuuguaacacagugu

SEQ ID NO: 1060666 - RNA, 23 nt, Human
accaugaugggagugcaaauaag

SEQ ID NO: 1060667 - RNA, 22 nt, Human
gccugcagaacugugaggcaau

SEQ ID NO: 1060668 - RNA, 22 nt, Human
accauugccuagaaaaauuccu

SEQ ID NO: 1060669 - RNA, 21 nt, Human
auuuucauuaauucagugugg

SEQ ID NO: 1060670 - RNA, 22 nt, Human
aggccuccagccacaugccagu

SEQ ID NO: 1060671 - RNA, 22 nt, Human
uguuagaaauuauuaguaauau

SEQ ID NO: 1060672 - RNA, 22 nt, Human
augggcugacccagucguggca

SEQ ID NO: 1060673 - RNA, 22 nt, Human
uggcagagcccagacuccaguc

SEQ ID NO: 1060674 - RNA, 22 nt, Human
aagcuuuaugaucucucagcua

SEQ ID NO: 1060675 - RNA, 22 nt, Human
uuuacauugcauuagguauuau

SEQ ID NO: 1060676 - RNA, 22 nt, Human
aaauauguauggaguucaugaa

SEQ ID NO: 1060677 - RNA, 22 nt, Human
cuaucauuuuacaugguuggug

SEQ ID NO: 1060678 - RNA, 22 nt, Human
ccuggcugguggcagcgacaag

SEQ ID NO: 1060679 - RNA, 17 nt, Human
aguguuuccuuaucauu

SEQ ID NO: 1060680 - RNA, 22 nt, Human
uauacaauggcugaaucaucca

SEQ ID NO: 1060681 - RNA, 22 nt, Human
aucugucagccugggauuaggg

SEQ ID NO: 1060682 - RNA, 22 nt, Human
ugcaggcuggcagauaucucau

SEQ ID NO: 1060683 - RNA, 20 nt, Human
ggcaggcuuuauauggaggg

SEQ ID NO: 1060684 - RNA, 22 nt, Human
uccugcaggcuugaguccucag

SEQ ID NO: 1060685 - RNA, 22 nt, Human
ucucuuaaaggucuucagcuga

SEQ ID NO: 1060686 - RNA, 22 nt, Human
cauccaggcaccacaaccagcu

SEQ ID NO: 1060687 - RNA, 20 nt, Human
ucaggcuccgcauuaacuua

SEQ ID NO: 1060688 - RNA, 22 nt, Human
cugcagccacgagucacagccc

SEQ ID NO: 1060689 - RNA, 22 nt, Human
aggaagcuuggggcagggcuac

SEQ ID NO: 1060690 - RNA, 20 nt, Human
cuaggaacuauggucuggcu

SEQ ID NO: 1060691 - RNA, 22 nt, Human
uggcagggugccaguugcgagu

SEQ ID NO: 1060692 - RNA, 22 nt, Human
auuauaaaccuuugaggguggg

SEQ ID NO: 1060693 - RNA, 18 nt, Human
ugcaggcugggguuccuc

SEQ ID NO: 1060694 - RNA, 23 nt, Human
aguguugguugggaagccaagca

SEQ ID NO: 1060695 - RNA, 22 nt, Human
uauaauuuaucaugucacaguu

SEQ ID NO: 1060696 - RNA, 22 nt, Human
cagcauuuggugaucaucuuaa

SEQ ID NO: 1060697 - RNA, 22 nt, Human
caugagauuugggaggggccag

SEQ ID NO: 1060698 - RNA, 22 nt, Human
auccccacgauauagccaaagc

SEQ ID NO: 1060699 - RNA, 22 nt, Human
gacacagaaggucacauguuca

SEQ ID NO: 1060700 - RNA, 22 nt, Human
cuccaggguuccccgauccacu

SEQ ID NO: 1060701 - RNA, 22 nt, Human
cccagccucuguuugcuccucu

SEQ ID NO: 1060702 - RNA, 22 nt, Human
gaaacaugucugacaauuuacc

SEQ ID NO: 1060703 - RNA, 22 nt, Human
uaugaccuuaggaagcaagaag

SEQ ID NO: 1060704 - RNA, 22 nt, Human
uggaacacuuuguugaaaugca

SEQ ID NO: 1060705 - RNA, 22 nt, Human
uuaggaauauuuucugaguagu

SEQ ID NO: 1060706 - RNA, 22 nt, Human
acaucccacagaaacauacaua

SEQ ID NO: 1060707 - RNA, 22 nt, Human
cuacaaugacagaauugaguag

SEQ ID NO: 1060708 - RNA, 22 nt, Human
cuugccucccucagcucacagc

SEQ ID NO: 1060709 - RNA, 22 nt, Human
ugcaggcugugucauuuaguga

SEQ ID NO: 1060710 - RNA, 22 nt, Human
auucugucuuuuuauacaucua

SEQ ID NO: 1060711 - RNA, 20 nt, Human
agaggcuuccuugggaggag

SEQ ID NO: 1060712 - RNA, 22 nt, Human
aaauuucuaagcagccacuucc

SEQ ID NO: 1060713 - RNA, 21 nt, Human
gaugaagcaaucuuucuguug

SEQ ID NO: 1060714 - RNA, 22 nt, Human
auuucucagugaaaugacaggc

SEQ ID NO: 1060715 - RNA, 22 nt, Human
uugcagcugcaguaaauguuca

SEQ ID NO: 1060716 - RNA, 22 nt, Human
cagggcucugccuugagggaug

SEQ ID NO: 1060717 - RNA, 22 nt, Human
guacccagaggcaugaucccag

SEQ ID NO: 1060718 - RNA, 22 nt, Human
uuuaauauucugcauucuccuu

SEQ ID NO: 1060719 - RNA, 22 nt, Human
ccaggcagagggaauagcaagu

SEQ ID NO: 1060720 - RNA, 22 nt, Human
agagggcuuugauucucaguuc

SEQ ID NO: 1060721 - RNA, 22 nt, Human
aucugucaagauagacucugca

SEQ ID NO: 1060722 - RNA, 22 nt, Human
ggcuccaagucucagagugaag

SEQ ID NO: 1060723 - RNA, 22 nt, Human
aaugucauugguaaagauuagg

SEQ ID NO: 1060724 - RNA, 22 nt, Human
acccacccuacuagcagugucc

SEQ ID NO: 1060725 - RNA, 22 nt, Human
ucccacauaugcaauccugaau

SEQ ID NO: 1060726 - RNA, 22 nt, Human
auauuaggaguuaaauguauua

SEQ ID NO: 1060727 - RNA, 22 nt, Human
cugggcugaaaguguuccuuga

SEQ ID NO: 1060728 - RNA, 22 nt, Human
cacccagcagcacuuaagacua

SEQ ID NO: 1060729 - RNA, 22 nt, Human
aggcaauccccugaggauacuu

SEQ ID NO: 1060730 - RNA, 22 nt, Human
ugcuucuggggacaggcugccu

SEQ ID NO: 1060731 - RNA, 22 nt, Human
aagggcucucugcauugaaauu

SEQ ID NO: 1060732 - RNA, 22 nt, Human
auuacaaucgagagaaacaaau

SEQ ID NO: 1060733 - RNA, 22 nt, Human
gccuccuggaagucacauguuu

SEQ ID NO: 1060734 - RNA, 22 nt, Human
acaguuugcccugacauucucc

SEQ ID NO: 1060735 - RNA, 22 nt, Human
cucugguuucgcaggaaauaga

SEQ ID NO: 1060736 - RNA, 22 nt, Human
cccagccuacucugccauagca

SEQ ID NO: 1060737 - RNA, 19 nt, Human
guccucucaacaacccggg

SEQ ID NO: 1060738 - RNA, 22 nt, Human
uauguaaaaauucaucaggcug

SEQ ID NO: 1060739 - RNA, 22 nt, Human
uaacacauaagcugagaccaug

SEQ ID NO: 1060740 - RNA, 22 nt, Human
ggaccugaacauaaaacgaggc

SEQ ID NO: 1060741 - RNA, 22 nt, Human
ccauaaucuggcuuugagagag

SEQ ID NO: 1060742 - RNA, 22 nt, Human
uccaggcucccucaggaugcac

SEQ ID NO: 1060743 - RNA, 22 nt, Human
cagccucuguggcugccacacc

SEQ ID NO: 1060744 - RNA, 22 nt, Human
cagaagucacccucagaauaac

SEQ ID NO: 1060745 - RNA, 22 nt, Human
uacacaucccagacucccagga

SEQ ID NO: 1060746 - RNA, 22 nt, Human
ucacacacauuugcugucugau

SEQ ID NO: 1060747 - RNA, 22 nt, Human
guccucuguguaggcugcagac

SEQ ID NO: 1060748 - RNA, 22 nt, Human
ucagagagugcaaaauauagcu

SEQ ID NO: 1060749 - RNA, 22 nt, Human
cauuuucagcacccaucugaaa

SEQ ID NO: 1060750 - RNA, 22 nt, Human
aaggcuuuuaacuacuguuuua

SEQ ID NO: 1060751 - RNA, 22 nt, Human
uuucauaauauccagagauuuu

SEQ ID NO: 1060752 - RNA, 22 nt, Human
auguagaacagguuaaugacag

SEQ ID NO: 1060753 - RNA, 22 nt, Human
auaugaaguuacagguaagaaa

SEQ ID NO: 1060754 - RNA, 22 nt, Human
aauauaaugcuguuuuaugcca

SEQ ID NO: 1060755 - RNA, 22 nt, Human
augggcugcuuggcuuccaccc

SEQ ID NO: 1060756 - RNA, 22 nt, Human
uugcaacaucugaacauuuauc

SEQ ID NO: 1060757 - RNA, 22 nt, Human
gaggcagcgggucaggaccgug

SEQ ID NO: 1060758 - RNA, 22 nt, Human
acuggcagggggagccccgaga

SEQ ID NO: 1060759 - RNA, 22 nt, Human
cuuaaauuggaugaguuaaguu

SEQ ID NO: 1060760 - RNA, 22 nt, Human
agcagguggacagaggaagaaa

SEQ ID NO: 1060761 - RNA, 22 nt, Human
uguagaaauuaguaagaucaac

SEQ ID NO: 1060762 - RNA, 22 nt, Human
ugugaucugccuuggaucugca

SEQ ID NO: 1060763 - RNA, 22 nt, Human
uccuggcauccgugggucugug

SEQ ID NO: 1060764 - RNA, 22 nt, Human
ucagcuuugcaaguuagaaaau

SEQ ID NO: 1060765 - RNA, 22 nt, Human
ggcaggcuccaagcauccuaug

SEQ ID NO: 1060766 - RNA, 22 nt, Human
guggccaggccgacugccaggc

SEQ ID NO: 1060767 - RNA, 22 nt, Human
ucagcuuucuauguugcuaaac

SEQ ID NO: 1060768 - RNA, 22 nt, Human
gaacacaucacauuuuacagug

SEQ ID NO: 1060769 - RNA, 22 nt, Human
ccuuuauucaauuaguccuaau

SEQ ID NO: 1060770 - RNA, 21 nt, Human
ucagagagucacagugaacug

SEQ ID NO: 1060771 - RNA, 17 nt, Human
cagcuuuaugcuacugu

SEQ ID NO: 1060772 - RNA, 22 nt, Human
gcaaggacucccugggucauuc

SEQ ID NO: 1060773 - RNA, 22 nt, Human
uacauuccuguuagcaucuaag

SEQ ID NO: 1060774 - RNA, 22 nt, Human
uuuguaaauagcaguacucaug

SEQ ID NO: 1060775 - RNA, 22 nt, Human
uguacauacauagauauacaca

SEQ ID NO: 1060776 - RNA, 22 nt, Human
ggaaccacagcccccagcaggc

SEQ ID NO: 1060777 - RNA, 21 nt, Human
ucacguggucacaugagcuuu

SEQ ID NO: 1060778 - RNA, 20 nt, Human
gcuggcagaugucuugagau

SEQ ID NO: 1060779 - RNA, 22 nt, Human
gauggccuggguccccuuccgg

SEQ ID NO: 1060780 - RNA, 22 nt, Human
agaauaugaucggaauacagau

SEQ ID NO: 1060781 - RNA, 22 nt, Human
ucaggcucaggaauguguuuau

SEQ ID NO: 1060782 - RNA, 22 nt, Human
uugaaauacugcauuguucagu

SEQ ID NO: 1060783 - RNA, 22 nt, Human
gguggccaggccagcucuggcc

SEQ ID NO: 1060784 - RNA, 22 nt, Human
gacacagauaucucugagauua

SEQ ID NO: 1060785 - RNA, 22 nt, Human
gcauagucaguaggauucucaa

SEQ ID NO: 1060786 - RNA, 22 nt, Human
augcaacaaaugcuacgaaucg

SEQ ID NO: 1060787 - RNA, 22 nt, Human
aaugauuuggcaaaggaaucca

SEQ ID NO: 1060788 - RNA, 22 nt, Human
cagagcauaauugacaugaggu

SEQ ID NO: 1060789 - RNA, 22 nt, Human
uacauugcuuucuaauacaucu

SEQ ID NO: 1060790 - RNA, 22 nt, Human
auuauucuuaugucaucauggc

SEQ ID NO: 1060791 - RNA, 22 nt, Human
uccaggcagucauuaaucucua

SEQ ID NO: 1060792 - RNA, 22 nt, Human
uuaacacaucccugcucuaccc

SEQ ID NO: 1060793 - RNA, 22 nt, Human
agcucccaauugacuugaacua

SEQ ID NO: 1060794 - RNA, 22 nt, Human
ugcuucugaugugagcagcccc

SEQ ID NO: 1060795 - RNA, 22 nt, Human
gugggcuucuguuagggaggcu

SEQ ID NO: 1060796 - RNA, 19 nt, Human
ugccuggcaccagcuccac

SEQ ID NO: 1060797 - RNA, 22 nt, Human
acacucucagcuuuucaacuua

SEQ ID NO: 1060798 - RNA, 22 nt, Human
uccacacacauuucuaugugca

SEQ ID NO: 1060799 - RNA, 22 nt, Human
uggccagguugggcuuugcagc

SEQ ID NO: 1060800 - RNA, 22 nt, Human
ugggaccugaagcagguuggca

SEQ ID NO: 1060801 - RNA, 22 nt, Human
ggcauccaguucugaucaacaa

SEQ ID NO: 1060802 - RNA, 22 nt, Human
cugcucuaacugcauuaguuuu

SEQ ID NO: 1060803 - RNA, 22 nt, Human
augcuauacauaugacaucaca

SEQ ID NO: 1060804 - RNA, 22 nt, Human
ggaaucagaauuaggauuugaa

SEQ ID NO: 1060805 - RNA, 22 nt, Human
ugguauaaaacuuuuuauugaa

SEQ ID NO: 1060806 - RNA, 22 nt, Human
ccagcccugaacccugcugcau

SEQ ID NO: 1060807 - RNA, 22 nt, Human
cacacagacagcucucugaaga

SEQ ID NO: 1060808 - RNA, 22 nt, Human
uccaagcuacugaagguuuggg

SEQ ID NO: 1060809 - RNA, 22 nt, Human
uugugcucuguguuauuuaagg

SEQ ID NO: 1060810 - RNA, 22 nt, Human
gccaggcacugcucuaagcccu

SEQ ID NO: 1060811 - RNA, 22 nt, Human
uauuaggguuuugaagguuugu

SEQ ID NO: 1060812 - RNA, 22 nt, Human
uucucagugaaguuuagaacau

SEQ ID NO: 1060813 - RNA, 22 nt, Human
aggaccugaaauucuugcuuuu

SEQ ID NO: 1060814 - RNA, 22 nt, Human
uacauguuugguaaaugauggc

SEQ ID NO: 1060815 - RNA, 22 nt, Human
aagagcaucuauuucacagugg

SEQ ID NO: 1060816 - RNA, 21 nt, Human
uuuaauuugcauguaugacgc

SEQ ID NO: 1060817 - RNA, 22 nt, Human
ggcuuuauaggguagaggauca

SEQ ID NO: 1060818 - RNA, 22 nt, Human
uccuggcagcccgcaggugcug

SEQ ID NO: 1060819 - RNA, 22 nt, Human
uauguacuaacuuucauucuag

SEQ ID NO: 1060820 - RNA, 22 nt, Human
guuagggaagcgcuguguucuu

SEQ ID NO: 1060821 - RNA, 22 nt, Human
acaagauagcuuagaagauuca

SEQ ID NO: 1060822 - RNA, 23 nt, Human
ccaggccucucagagggugugcc

SEQ ID NO: 1060823 - RNA, 22 nt, Human
gcuggcaggguucucacugaaa

SEQ ID NO: 1060824 - RNA, 19 nt, Human
uuugugaagaaaaugaugc

SEQ ID NO: 1060825 - RNA, 22 nt, Human
agacacagcugcaggagguggg

SEQ ID NO: 1060826 - RNA, 22 nt, Human
uaggccauucuuggagcuuacu

SEQ ID NO: 1060827 - RNA, 22 nt, Human
ucaggagcuugguagugugauu

SEQ ID NO: 1060828 - RNA, 22 nt, Human
acacaucagaaauaugaaugag

SEQ ID NO: 1060829 - RNA, 22 nt, Human
ccaggaccuggagcucuaugaa

SEQ ID NO: 1060830 - RNA, 22 nt, Human
cccugcagagagugcuuuugug

SEQ ID NO: 1060831 - RNA, 22 nt, Human
ucagcuuugaucucaggcaauc

SEQ ID NO: 1060832 - RNA, 22 nt, Human
uguauaaauuuaaauuccugcu

SEQ ID NO: 1060833 - RNA, 22 nt, Human
gccaggcagcuagcaaccccug

SEQ ID NO: 1060834 - RNA, 22 nt, Human
cccagcccccgagugucuggaa

SEQ ID NO: 1060835 - RNA, 22 nt, Human
ugcagggaagcaaggguggcuc

SEQ ID NO: 1060836 - RNA, 22 nt, Human
cucagagaaccuaagcggagga

SEQ ID NO: 1060837 - RNA, 22 nt, Human
aagucucucauggcugacagca

SEQ ID NO: 1060838 - RNA, 22 nt, Human
auauuauucuagcucuugugug

SEQ ID NO: 1060839 - RNA, 22 nt, Human
agggacucccugggccgacacg

SEQ ID NO: 1060840 - RNA, 22 nt, Human
ucugucaauauaugugcugcag

SEQ ID NO: 1060841 - RNA, 22 nt, Human
cucugauuuccuuauucuguca

SEQ ID NO: 1060842 - RNA, 21 nt, Human
cagcuucuucugugaccuggu

SEQ ID NO: 1060843 - RNA, 19 nt, Human
ugcauaaauuauauacuuu

SEQ ID NO: 1060844 - RNA, 21 nt, Human
caguguggugaccagggucuc

SEQ ID NO: 1060845 - RNA, 21 nt, Human
guacacacagguggaugggcu

SEQ ID NO: 1060846 - RNA, 22 nt, Human
aguuagaaaguaaaucauuuga

SEQ ID NO: 1060847 - RNA, 22 nt, Human
aucuuuuacauuacugcccaga

SEQ ID NO: 1060848 - RNA, 22 nt, Human
auauuucaugggguuccauacu

SEQ ID NO: 1060849 - RNA, 20 nt, Human
aagagucuuuacugagcuaa

SEQ ID NO: 1060850 - RNA, 22 nt, Human
gguaugaauucacuacuuccaa

SEQ ID NO: 1060851 - RNA, 22 nt, Human
ugggcuccaauuuguccuuuca

SEQ ID NO: 1060852 - RNA, 20 nt, Human
ccagcuuucccugcagcauc

SEQ ID NO: 1060853 - RNA, 22 nt, Human
uggcagagaacacggcugaucu

SEQ ID NO: 1060854 - RNA, 22 nt, Human
ccuggcagguggagguugcagu

SEQ ID NO: 1060855 - RNA, 22 nt, Human
gccacagguacuaugggagaga

SEQ ID NO: 1060856 - RNA, 22 nt, Human
gcuggcagccaagugaagaggg

SEQ ID NO: 1060857 - RNA, 22 nt, Human
cuuaauuuaagccuagaaugca

SEQ ID NO: 1060858 - RNA, 22 nt, Human
cgcauacauagaaacacacaga

SEQ ID NO: 1060859 - RNA, 22 nt, Human
ucauuuguggaagugauugugg

SEQ ID NO: 1060860 - RNA, 23 nt, Human
aacagccaacuuuagcggguggc

SEQ ID NO: 1060861 - RNA, 22 nt, Human
ccagagagucgaugggggacac

SEQ ID NO: 1060862 - RNA, 22 nt, Human
ugugcauguauugauuuguacc

SEQ ID NO: 1060863 - RNA, 20 nt, Human
uccaugaguuagagacuaua

SEQ ID NO: 1060864 - RNA, 22 nt, Human
aguccggggucuggacaccugg

SEQ ID NO: 1060865 - RNA, 22 nt, Human
gugggcuuugcuggauccuucc

SEQ ID NO: 1060866 - RNA, 22 nt, Human
uucuuucaauagcuggcauaug

SEQ ID NO: 1060867 - RNA, 22 nt, Human
uuuaucuuuaggacuuugcaga

SEQ ID NO: 1060868 - RNA, 18 nt, Human
gccaggcaggguggggaa

SEQ ID NO: 1060869 - RNA, 22 nt, Human
agcuuuauauguuguuucucca

SEQ ID NO: 1060870 - RNA, 22 nt, Human
gacaggcuuugagucccagaac

SEQ ID NO: 1060871 - RNA, 22 nt, Human
gacaggcuuccuaagugccaga

SEQ ID NO: 1060872 - RNA, 22 nt, Human
caguuuauaugucagagcugua

SEQ ID NO: 1060873 - RNA, 22 nt, Human
auaauggccgggggcugaaugc

SEQ ID NO: 1060874 - RNA, 22 nt, Human
ucuggcaguuugagaaaggcua

SEQ ID NO: 1060875 - RNA, 20 nt, Human
gagucacagaagaagcugaa

SEQ ID NO: 1060876 - RNA, 22 nt, Human
auuaauuuuaccuuuguaaaca

SEQ ID NO: 1060877 - RNA, 22 nt, Human
uacauauguaaacauguauaaa

SEQ ID NO: 1060878 - RNA, 22 nt, Human
gcacccaggccggcgacugcag

SEQ ID NO: 1060879 - RNA, 22 nt, Human
ugcuuuauuaagagagaaauuu

SEQ ID NO: 1060880 - RNA, 20 nt, Human
ggcugcaggacucauuggcu

SEQ ID NO: 1060881 - RNA, 22 nt, Human
caaauacuacgauucuugcagu

SEQ ID NO: 1060882 - RNA, 22 nt, Human
gaaauauuucucuugagccccu

SEQ ID NO: 1060883 - RNA, 22 nt, Human
uugcagcuucgagucuaucugu

SEQ ID NO: 1060884 - RNA, 22 nt, Human
cauuuguaguaucuguuuauau

SEQ ID NO: 1060885 - RNA, 22 nt, Human
acagguggggcacuuggagccu

SEQ ID NO: 1060886 - RNA, 22 nt, Human
accugcaggggugcucucuggg

SEQ ID NO: 1060887 - RNA, 22 nt, Human
agcaaucaccaccucuauauuu

SEQ ID NO: 1060888 - RNA, 22 nt, Human
uggcacucacucucagagucug

SEQ ID NO: 1060889 - RNA, 22 nt, Human
ggugccaggcuguagucagggu

SEQ ID NO: 1060890 - RNA, 22 nt, Human
ucuggcagcagcaucaguggcu

SEQ ID NO: 1060891 - RNA, 22 nt, Human
ggcaggcucagcagccaaggag

SEQ ID NO: 1060892 - RNA, 22 nt, Human
cagggcuccccagagagccucu

SEQ ID NO: 1060893 - RNA, 22 nt, Human
aaucaagaaaaugaggauucuu

SEQ ID NO: 1060894 - RNA, 22 nt, Human
uccaaguccauuaugguggucu

SEQ ID NO: 1060895 - RNA, 22 nt, Human
ugcauaaacagauacuucaugu

SEQ ID NO: 1060896 - RNA, 22 nt, Human
ugcuucuggcacuugagggggu

SEQ ID NO: 1060897 - RNA, 22 nt, Human
gaaauauucuugucuuguuuuc

SEQ ID NO: 1060898 - RNA, 22 nt, Human
uccaaggcuccggcccuggcgu

SEQ ID NO: 1060899 - RNA, 22 nt, Human
cucagagaaaugucacaacaau

SEQ ID NO: 1060900 - RNA, 22 nt, Human
uguacauagaucuugaaaauua

SEQ ID NO: 1060901 - RNA, 22 nt, Human
cacauacugagaaucacaccca

SEQ ID NO: 1060902 - RNA, 20 nt, Human
gagggcucguggauggauaa

SEQ ID NO: 1060903 - RNA, 22 nt, Human
gggcucucaaggcagggcccca

SEQ ID NO: 1060904 - RNA, 23 nt, Human
aucuguucaucugacacagauuc

SEQ ID NO: 1060905 - RNA, 22 nt, Human
aaacuucauggauaauauaaag

SEQ ID NO: 1060906 - RNA, 22 nt, Human
aagggcucacccaacucacuuc

SEQ ID NO: 1060907 - RNA, 22 nt, Human
ucuggcagcgaagcguguacuu

SEQ ID NO: 1060908 - RNA, 17 nt, Human
agccugccccaugcugc

SEQ ID NO: 1060909 - RNA, 22 nt, Human
gcagcuuugucacggagugucg

SEQ ID NO: 1060910 - RNA, 23 nt, Human
gagggcucugagugcuugggcca

SEQ ID NO: 1060911 - RNA, 20 nt, Human
cugcagggugagugggcgau

SEQ ID NO: 1060912 - RNA, 22 nt, Human
cuggccuggggggacacauccc

SEQ ID NO: 1060913 - RNA, 22 nt, Human
acaguaaaucaacagaauaucu

SEQ ID NO: 1060914 - RNA, 22 nt, Human
uuucauugucuacauaugacau

SEQ ID NO: 1060915 - RNA, 22 nt, Human
cacuguccaauagauacauaau

SEQ ID NO: 1060916 - RNA, 22 nt, Human
acugggcucaagugauuguccu

SEQ ID NO: 1060917 - RNA, 22 nt, Human
acugggcugguuaguuuuacua

SEQ ID NO: 1060918 - RNA, 22 nt, Human
ucugaaauagaagugucuuucu

SEQ ID NO: 1060919 - RNA, 18 nt, Human
ucagcuuuugaaaaccaa

SEQ ID NO: 1060920 - RNA, 22 nt, Human
acuggcagagggaaaaccauuc

SEQ ID NO: 1060921 - RNA, 22 nt, Human
ugucaagucucugaaugaaaug

SEQ ID NO: 1060922 - RNA, 22 nt, Human
gcaguguuuguguucucacaug

SEQ ID NO: 1060923 - RNA, 21 nt, Human
ucagcuuugcaacugcacauc

SEQ ID NO: 1060924 - RNA, 22 nt, Human
uccugcagagccgcccucaggu

SEQ ID NO: 1060925 - RNA, 21 nt, Human
ccagcuuucccaagucccuuu

SEQ ID NO: 1060926 - RNA, 21 nt, Human
guuuucaugauagagucugua

SEQ ID NO: 1060927 - RNA, 22 nt, Human
uaugaacuguaacccucaccgc

SEQ ID NO: 1060928 - RNA, 22 nt, Human
accaggcagucaccguccagga

SEQ ID NO: 1060929 - RNA, 22 nt, Human
acagauuuauugaagcugcugc

SEQ ID NO: 1060930 - RNA, 21 nt, Human
uccagaccucccucuccuagc

SEQ ID NO: 1060931 - RNA, 22 nt, Human
cugggcuuagcagcuccugguc

SEQ ID NO: 1060932 - RNA, 22 nt, Human
cuguaaaacacuguaguaucug

SEQ ID NO: 1060933 - RNA, 18 nt, Human
uccuggcagucagagagg

SEQ ID NO: 1060934 - RNA, 22 nt, Human
aaagcuuuucaguauguucaug

SEQ ID NO: 1060935 - RNA, 22 nt, Human
aagagcacuaacagagcugaua

SEQ ID NO: 1060936 - RNA, 22 nt, Human
gacuguggggggcggacacaag

SEQ ID NO: 1060937 - RNA, 19 nt, Human
guagggacagugguucuga

SEQ ID NO: 1060938 - RNA, 22 nt, Human
uagauauggccgucuguuuuaa

SEQ ID NO: 1060939 - RNA, 22 nt, Human
cacauugcagcuucuuuuggcu

SEQ ID NO: 1060940 - RNA, 22 nt, Human
uucauugcaguucuucagguua

SEQ ID NO: 1060941 - RNA, 22 nt, Human
aagagccagcuagugaagaggc

SEQ ID NO: 1060942 - RNA, 22 nt, Human
aguggcugccaagagcaaugcu

SEQ ID NO: 1060943 - RNA, 22 nt, Human
accugccuauggagccacaugg

SEQ ID NO: 1060944 - RNA, 22 nt, Human
cugaaccacuaauauuuugauu

SEQ ID NO: 1060945 - RNA, 22 nt, Human
cuuuucacaggaggauaagccc

SEQ ID NO: 1060946 - RNA, 22 nt, Human
guuacucuuccccggggucugg

SEQ ID NO: 1060947 - RNA, 22 nt, Human
auaaacagaguaguugcuacug

SEQ ID NO: 1060948 - RNA, 22 nt, Human
ucacauaaauuuaccagaugau

SEQ ID NO: 1060949 - RNA, 19 nt, Human
ugcuucuggggcuucucca

SEQ ID NO: 1060950 - RNA, 22 nt, Human
cagccucugagccuuggcagau

SEQ ID NO: 1060951 - RNA, 22 nt, Human
uuuaaaaucagaugggaguugg

SEQ ID NO: 1060952 - RNA, 22 nt, Human
uagacacaucuucauccacaau

SEQ ID NO: 1060953 - RNA, 22 nt, Human
ugcagggacaggcucuggggau

SEQ ID NO: 1060954 - RNA, 22 nt, Human
acacagaguuugacacauggga

SEQ ID NO: 1060955 - RNA, 22 nt, Human
auauuugucaauucacuguuca

SEQ ID NO: 1060956 - RNA, 22 nt, Human
auucugucuuuuuaaaauaaua

SEQ ID NO: 1060957 - RNA, 22 nt, Human
auguguuuguaccuuuaaauau

SEQ ID NO: 1060958 - RNA, 22 nt, Human
uagcaauagaaacauauaaagu

SEQ ID NO: 1060959 - RNA, 22 nt, Human
uuaguuaguggggcugucaguc

SEQ ID NO: 1060960 - RNA, 22 nt, Human
aagggcucccugccugaggugg

SEQ ID NO: 1060961 - RNA, 19 nt, Human
ggcggguggacuggagccc

SEQ ID NO: 1060962 - RNA, 22 nt, Human
ucauuuaauugguuuugcucgu

SEQ ID NO: 1060963 - RNA, 22 nt, Human
gaaacugaguaggcuagagcac

SEQ ID NO: 1060964 - RNA, 22 nt, Human
uacacacagaggccaugggauu

SEQ ID NO: 1060965 - RNA, 22 nt, Human
caggcucuuuugguggcaagga

SEQ ID NO: 1060966 - RNA, 22 nt, Human
auucagcaaugagcuuggauuu

SEQ ID NO: 1060967 - RNA, 22 nt, Human
aagcuuuaagugucagucagcc

SEQ ID NO: 1060968 - RNA, 21 nt, Human
uccuguaagcuuggguggcuc

SEQ ID NO: 1060969 - RNA, 22 nt, Human
ucuagaauuuugccauauagcu

SEQ ID NO: 1060970 - RNA, 22 nt, Human
aggaaacuguccccucauccua

SEQ ID NO: 1060971 - RNA, 22 nt, Human
uauuagggaacugcaagacuaa

SEQ ID NO: 1060972 - RNA, 22 nt, Human
uccugagcaacacagcuaagug

SEQ ID NO: 1060973 - RNA, 22 nt, Human
ccucccuucaguagagcccaau

SEQ ID NO: 1060974 - RNA, 22 nt, Human
ugcuagaagauagcuagaagau

SEQ ID NO: 1060975 - RNA, 22 nt, Human
agaauccucuucaguaaauucu

SEQ ID NO: 1060976 - RNA, 22 nt, Human
aauguauuccucaugcaagagu

SEQ ID NO: 1060977 - RNA, 22 nt, Human
ucugugacugauggaggcuuuu

SEQ ID NO: 1060978 - RNA, 22 nt, Human
ccagcuuuauagcuucaaagga

SEQ ID NO: 1060979 - RNA, 22 nt, Human
uccugcagagucccacugauuu

SEQ ID NO: 1060980 - RNA, 22 nt, Human
gguuucaaugagaagugcuugu

SEQ ID NO: 1060981 - RNA, 22 nt, Human
ugggcugagaguaccuuauaaa

SEQ ID NO: 1060982 - RNA, 22 nt, Human
gagacaucauaaugaaguuucc

SEQ ID NO: 1060983 - RNA, 22 nt, Human
ucccaccccuugacucuuuaag

SEQ ID NO: 1060984 - RNA, 22 nt, Human
ugcagccccugaaaauggcagc

SEQ ID NO: 1060985 - RNA, 19 nt, Human
gccugcagaaaaggcaggg

SEQ ID NO: 1060986 - RNA, 22 nt, Human
uuugacaaauccuucagcaaug

SEQ ID NO: 1060987 - RNA, 22 nt, Human
guuauuaguaagacucgcacau

SEQ ID NO: 1060988 - RNA, 18 nt, Human
agacccucuaagggcagu

SEQ ID NO: 1060989 - RNA, 16 nt, Human
uccaggcauaucugag

SEQ ID NO: 1060990 - RNA, 23 nt, Human
aaauaugucugagggcaaagaau

SEQ ID NO: 1060991 - RNA, 22 nt, Human
ucuaggaguaaugagcuagcac

SEQ ID NO: 1060992 - RNA, 22 nt, Human
ucaucacaauuuuaugacccuc

SEQ ID NO: 1060993 - RNA, 22 nt, Human
agggcuccaggggcugggugac

SEQ ID NO: 1060994 - RNA, 22 nt, Human
uggcuagguagcuuucugcugu

SEQ ID NO: 1060995 - RNA, 22 nt, Human
uccgccaggacugagggcccau

SEQ ID NO: 1060996 - RNA, 22 nt, Human
aggcuuuaaguggccuacagcu

SEQ ID NO: 1060997 - RNA, 23 nt, Human
cagcuuucagggcuuuagggaag

SEQ ID NO: 1060998 - RNA, 22 nt, Human
auguccagagccggccugcuga

SEQ ID NO: 1060999 - RNA, 22 nt, Human
gauuuucugagccuucaaauuu

SEQ ID NO: 1061000 - RNA, 22 nt, Human
gccaggcagauaugugagcuua

SEQ ID NO: 1061001 - RNA, 22 nt, Human
guagggacccacagucuauauu

SEQ ID NO: 1061002 - RNA, 22 nt, Human
ugaguguauaucaggagagagc

SEQ ID NO: 1061003 - RNA, 22 nt, Human
ccucugugucuugguuucaaga

SEQ ID NO: 1061004 - RNA, 22 nt, Human
cagggccagagagggcuggcug

SEQ ID NO: 1061005 - RNA, 22 nt, Human
uggcacaguccugggugccugc

SEQ ID NO: 1061006 - RNA, 22 nt, Human
uuugaaauaugaggcauuauga

SEQ ID NO: 1061007 - RNA, 20 nt, Human
uauuuguauuugggaaaguu

SEQ ID NO: 1061008 - RNA, 22 nt, Human
uaguuaggaaaguccagggagc

SEQ ID NO: 1061009 - RNA, 22 nt, Human
cuagguauucauguuucguggc

SEQ ID NO: 1061010 - RNA, 22 nt, Human
ugggccagcaauugcugcucag

SEQ ID NO: 1061011 - RNA, 22 nt, Human
gcagcuuucugcaaugucaucc

SEQ ID NO: 1061012 - RNA, 22 nt, Human
aauacuuuccuauauaaggugc

SEQ ID NO: 1061013 - RNA, 19 nt, Human
aauuagggagucgguuaag

SEQ ID NO: 1061014 - RNA, 22 nt, Human
gaugggcguggcgcguuuggug

SEQ ID NO: 1061015 - RNA, 22 nt, Human
cagcuucuggcguggagccuga

SEQ ID NO: 1061016 - RNA, 22 nt, Human
ggguaccaagcugcuugggggc

SEQ ID NO: 1061017 - RNA, 22 nt, Human
cauaauauacuacauugaugaa

SEQ ID NO: 1061018 - RNA, 22 nt, Human
uucugucucuguguuuacauua

SEQ ID NO: 1061019 - RNA, 19 nt, Human
uucuaccuuacuguaggcu

SEQ ID NO: 1061020 - RNA, 22 nt, Human
cagggcucagaagacagaccuc

SEQ ID NO: 1061021 - RNA, 22 nt, Human
cagaggcugcucuggguggcau

SEQ ID NO: 1061022 - RNA, 22 nt, Human
ggcaggcuggcuuuguuccagg

SEQ ID NO: 1061023 - RNA, 23 nt, Human
uguggcugagaaauugacaacuu

SEQ ID NO: 1061024 - RNA, 22 nt, Human
gcacauaacugaccacaucuaa

SEQ ID NO: 1061025 - RNA, 21 nt, Human
ucuggcaggaagacggauggg

SEQ ID NO: 1061026 - RNA, 22 nt, Human
aaugaagccagguagaagagaa

SEQ ID NO: 1061027 - RNA, 22 nt, Human
gccuggaaugcaaugugacgaa

SEQ ID NO: 1061028 - RNA, 22 nt, Human
caggcugccgugaagcaggccu

SEQ ID NO: 1061029 - RNA, 22 nt, Human
uuacaauaccacaucaccucau

SEQ ID NO: 1061030 - RNA, 22 nt, Human
aaaguuugcaauuuauguuaau

SEQ ID NO: 1061031 - RNA, 22 nt, Human
uagcuuuacaaagugcugcacc

SEQ ID NO: 1061032 - RNA, 22 nt, Human
auguuagaaggaauguuaaaag

SEQ ID NO: 1061033 - RNA, 21 nt, Human
uccagcucuuauguucaugaa

SEQ ID NO: 1061034 - RNA, 18 nt, Human
gaugaagcugcuggggau

SEQ ID NO: 1061035 - RNA, 22 nt, Human
ugcaaaauaaugaacgauuuuu

SEQ ID NO: 1061036 - RNA, 22 nt, Human
uuuucauuguaaaucaggaaac

SEQ ID NO: 1061037 - RNA, 20 nt, Human
cccagagccauagccagaca

SEQ ID NO: 1061038 - RNA, 22 nt, Human
ucuggcaguugccgcuucaguc

SEQ ID NO: 1061039 - RNA, 22 nt, Human
cuguggcuucugcuugggccuc

SEQ ID NO: 1061040 - RNA, 22 nt, Human
gcuaggagccgcugcacuaggu

SEQ ID NO: 1061041 - RNA, 22 nt, Human
uuccuggccccaccccuggaga

SEQ ID NO: 1061042 - RNA, 22 nt, Human
agcaaacuaauugcaguucugg

SEQ ID NO: 1061043 - RNA, 22 nt, Human
ugaauccagagcuauuucgucc

SEQ ID NO: 1061044 - RNA, 22 nt, Human
aacuuucaggcaaugaauauuu

SEQ ID NO: 1061045 - RNA, 22 nt, Human
uaccugcaaaguuccuuuugcc

SEQ ID NO: 1061046 - RNA, 22 nt, Human
cagaaagaccugggcucaagag

SEQ ID NO: 1061047 - RNA, 22 nt, Human
acacucuguaaugucacacucc

SEQ ID NO: 1061048 - RNA, 22 nt, Human
ccagcuuuugcacuggacuggg

SEQ ID NO: 1061049 - RNA, 22 nt, Human
caugaagcucuugcaccucuag

SEQ ID NO: 1061050 - RNA, 22 nt, Human
ugcuucuggaguaacaggguga

SEQ ID NO: 1061051 - RNA, 22 nt, Human
ggccucucagggcagagacccu

SEQ ID NO: 1061052 - RNA, 22 nt, Human
ucuccaggagcaagucacccag

SEQ ID NO: 1061053 - RNA, 23 nt, Human
uuccaagugcuuuacuuaauccu

SEQ ID NO: 1061054 - RNA, 23 nt, Human
ugggaccuguuugcccacagaug

SEQ ID NO: 1061055 - RNA, 22 nt, Human
ucaucaguguccuuaucacuua

SEQ ID NO: 1061056 - RNA, 22 nt, Human
uccuggcagggucuaggucuag

SEQ ID NO: 1061057 - RNA, 22 nt, Human
cauuuguagcuauuuacuguau

SEQ ID NO: 1061058 - RNA, 19 nt, Human
uccuggcacaguggaacca

SEQ ID NO: 1061059 - RNA, 22 nt, Human
auguaugaugcuaggcucucag

SEQ ID NO: 1061060 - RNA, 22 nt, Human
ggcaggcuagcacugauguccu

SEQ ID NO: 1061061 - RNA, 22 nt, Human
gaaagacuuccuuugagaguac

SEQ ID NO: 1061062 - RNA, 22 nt, Human
uaaauucugaucaaguuccuuc

SEQ ID NO: 1061063 - RNA, 23 nt, Human
acaggcucuuaaucagugcuccu

SEQ ID NO: 1061064 - RNA, 22 nt, Human
aacaguaacgagauguccuaac

SEQ ID NO: 1061065 - RNA, 22 nt, Human
gcagccucaaacuccccagcuc

SEQ ID NO: 1061066 - RNA, 23 nt, Human
ugcagggcaaguuagagacccca

SEQ ID NO: 1061067 - RNA, 22 nt, Human
gcugcgccggaucccacguucc

SEQ ID NO: 1061068 - RNA, 22 nt, Human
caauacugaguuuacauucauc

SEQ ID NO: 1061069 - RNA, 22 nt, Human
cuuaaauucuuaaugcccucau

SEQ ID NO: 1061070 - RNA, 22 nt, Human
agcuuuaucccuugcccaucga

SEQ ID NO: 1061071 - RNA, 22 nt, Human
ugggcuucauaauugguccuag

SEQ ID NO: 1061072 - RNA, 22 nt, Human
agccagaguugaaugugagucu

SEQ ID NO: 1061073 - RNA, 22 nt, Human
ugcuuuaucaaagcuauaguga

SEQ ID NO: 1061074 - RNA, 22 nt, Human
ccugggcucacagccaaggcuc

SEQ ID NO: 1061075 - RNA, 22 nt, Human
aggaccugagaguuggaaaucc

SEQ ID NO: 1061076 - RNA, 22 nt, Human
ccagagcccagggucaugcagg

SEQ ID NO: 1061077 - RNA, 22 nt, Human
uauggaaacuaauucauuuuuc

SEQ ID NO: 1061078 - RNA, 22 nt, Human
aucagagaaguuucacuggcau

SEQ ID NO: 1061079 - RNA, 22 nt, Human
ggaccugcucucccaguucucu

SEQ ID NO: 1061080 - RNA, 22 nt, Human
agcaggcuuaugguugaaggga

SEQ ID NO: 1061081 - RNA, 22 nt, Human
accugccucagugcagcuggau

SEQ ID NO: 1061082 - RNA, 22 nt, Human
ugggcugaguguggaacuaguu

SEQ ID NO: 1061083 - RNA, 22 nt, Human
gcaguguuguuaaaagauuaga

SEQ ID NO: 1061084 - RNA, 22 nt, Human
aggaggcuguggagcacuccau

SEQ ID NO: 1061085 - RNA, 22 nt, Human
uagggcuccacucccagagauu

SEQ ID NO: 1061086 - RNA, 22 nt, Human
aauaucuucuaaggauagaacu

SEQ ID NO: 1061087 - RNA, 22 nt, Human
acuggcuugaaguagauucaaa

SEQ ID NO: 1061088 - RNA, 22 nt, Human
cccaggcagccugcagggaagg

SEQ ID NO: 1061089 - RNA, 22 nt, Human
guuagguagaaguuuacuuuga

SEQ ID NO: 1061090 - RNA, 22 nt, Human
ugcucuguauucuauggcaguu

SEQ ID NO: 1061091 - RNA, 22 nt, Human
gaccugccugagcugccucugc

SEQ ID NO: 1061092 - RNA, 22 nt, Human
uacuuacagaaggaagcaauug

SEQ ID NO: 1061093 - RNA, 22 nt, Human
uaugaaacauucauacaaauaa

SEQ ID NO: 1061094 - RNA, 22 nt, Human
cagcuuuagagaaaacauauuu

SEQ ID NO: 1061095 - RNA, 22 nt, Human
uggccucugggaaagcagauuc

SEQ ID NO: 1061096 - RNA, 22 nt, Human
cagggcucaccacugggauccu

SEQ ID NO: 1061097 - RNA, 22 nt, Human
agcagcuccugccaugagugcu

SEQ ID NO: 1061098 - RNA, 22 nt, Human
auguccaguuucuacacacaua

SEQ ID NO: 1061099 - RNA, 22 nt, Human
gugugggaaggcuaggaugcug

SEQ ID NO: 1061100 - RNA, 22 nt, Human
uuucacauuggcuucuauuucu

SEQ ID NO: 1061101 - RNA, 22 nt, Human
cucugggcaaguuucuucauga

SEQ ID NO: 1061102 - RNA, 22 nt, Human
cccagggaagggcuaccugagg

SEQ ID NO: 1061103 - RNA, 22 nt, Human
ugucuucaucuccaugcacaga

SEQ ID NO: 1061104 - RNA, 22 nt, Human
ggcagaccucuccagccccaca

SEQ ID NO: 1061105 - RNA, 22 nt, Human
auuugaaaucccuucuacugua

SEQ ID NO: 1061106 - RNA, 22 nt, Human
caguguuugcuuaaguuauaug

SEQ ID NO: 1061107 - RNA, 20 nt, Human
cccaggcagagcuagcggca

SEQ ID NO: 1061108 - RNA, 22 nt, Human
ccugcaggcugcaggccaguuc

SEQ ID NO: 1061109 - RNA, 22 nt, Human
aaaaguauuuauggcuauguaa

SEQ ID NO: 1061110 - RNA, 22 nt, Human
aggacaguccgggguccuccac

SEQ ID NO: 1061111 - RNA, 22 nt, Human
ugccaggcacgugagaguggcc

SEQ ID NO: 1061112 - RNA, 17 nt, Human
ucgguuugccaggcuuc

SEQ ID NO: 1061113 - RNA, 22 nt, Human
ccuccagcgcgauccacuccgg

SEQ ID NO: 1061114 - RNA, 22 nt, Human
cagagcauugagggucugccaa

SEQ ID NO: 1061115 - RNA, 21 nt, Human
gccugcaguuuugaagcccuu

SEQ ID NO: 1061116 - RNA, 22 nt, Human
augcuucagugcuaccuucaaa

SEQ ID NO: 1061117 - RNA, 22 nt, Human
ccuggcaguuuugcccaggauu

SEQ ID NO: 1061118 - RNA, 21 nt, Human
augugaaauaucaucagagca

SEQ ID NO: 1061119 - RNA, 22 nt, Human
uauugaaauucuucauguccuc

SEQ ID NO: 1061120 - RNA, 22 nt, Human
ucauacaauucaaucucugauu

SEQ ID NO: 1061121 - RNA, 23 nt, Human
ccaggcucuuucaccugcuauuc

SEQ ID NO: 1061122 - RNA, 22 nt, Human
uuucuugacugcuuaggaaugc

SEQ ID NO: 1061123 - RNA, 22 nt, Human
ggcuuuauguuuuucauguggu

SEQ ID NO: 1061124 - RNA, 22 nt, Human
uccaggcuuuuucaugcugucu

SEQ ID NO: 1061125 - RNA, 22 nt, Human
cucuccagccuuuagcccacgc

SEQ ID NO: 1061126 - RNA, 22 nt, Human
cagaagagaugaaauaguauua

SEQ ID NO: 1061127 - RNA, 22 nt, Human
cgcaggcugcagccaagaagag

SEQ ID NO: 1061128 - RNA, 22 nt, Human
gagcucagccugaggccuggcu

SEQ ID NO: 1061129 - RNA, 23 nt, Human
agggcuccuuguugauuagcauu

SEQ ID NO: 1061130 - RNA, 20 nt, Human
gcugggcuuugacugacaca

SEQ ID NO: 1061131 - RNA, 18 nt, Human
cccacacagcaguagcuc

SEQ ID NO: 1061132 - RNA, 22 nt, Human
cccugccucugaagcugcucag

SEQ ID NO: 1061133 - RNA, 22 nt, Human
cagucuggaggucagcuggcuu

SEQ ID NO: 1061134 - RNA, 22 nt, Human
uacauguauguguacgugcaug

SEQ ID NO: 1061135 - RNA, 22 nt, Human
uagcuuuaagacauggugaaug

SEQ ID NO: 1061136 - RNA, 22 nt, Human
augacucuuagcuaaagguaag

SEQ ID NO: 1061137 - RNA, 22 nt, Human
uaugaacuagcugauuuaguuu

SEQ ID NO: 1061138 - RNA, 19 nt, Human
gcugggcuuggguuuguag

SEQ ID NO: 1061139 - RNA, 22 nt, Human
ccagcuuuuagugggcuuauua

SEQ ID NO: 1061140 - RNA, 22 nt, Human
gaggagcugagccacguccugg

SEQ ID NO: 1061141 - RNA, 22 nt, Human
ugagcagagucgcuccagagug

SEQ ID NO: 1061142 - RNA, 22 nt, Human
ucccagccaggcucuaccacuu

SEQ ID NO: 1061143 - RNA, 22 nt, Human
aaguuuaacuugaauucuuucu

SEQ ID NO: 1061144 - RNA, 22 nt, Human
ccaucuccaaauaccaucacau

SEQ ID NO: 1061145 - RNA, 22 nt, Human
gcucugagaggaugcugagcag

SEQ ID NO: 1061146 - RNA, 22 nt, Human
accaggcacucuuguggcagug

SEQ ID NO: 1061147 - RNA, 22 nt, Human
ugcuucuguucuuucaccuacg

SEQ ID NO: 1061148 - RNA, 22 nt, Human
gccaggcaggugucggagcccu

SEQ ID NO: 1061149 - RNA, 20 nt, Human
acuggcagccugccugcugu

SEQ ID NO: 1061150 - RNA, 22 nt, Human
ucuggcaguggaugagggcagc

SEQ ID NO: 1061151 - RNA, 22 nt, Human
agccuauuccaggaugagcuca

SEQ ID NO: 1061152 - RNA, 22 nt, Human
cacagcuucccaaaguggaccu

SEQ ID NO: 1061153 - RNA, 22 nt, Human
ucagagagguuaaauaucuugu

SEQ ID NO: 1061154 - RNA, 22 nt, Human
aauuaggggaggacguaucaua

SEQ ID NO: 1061155 - RNA, 22 nt, Human
ucuggucaguaauaagaagugg

SEQ ID NO: 1061156 - RNA, 22 nt, Human
acagauauuuggggaaagacgu

SEQ ID NO: 1061157 - RNA, 22 nt, Human
uaauaucuggcauucaaacaug

SEQ ID NO: 1061158 - RNA, 18 nt, Human
ggccucuggacuggcagc

SEQ ID NO: 1061159 - RNA, 22 nt, Human
ccuggcaguucaucaaauggca

SEQ ID NO: 1061160 - RNA, 22 nt, Human
acauuucacuguucacagcagg

SEQ ID NO: 1061161 - RNA, 22 nt, Human
guaugaaguaagauauuguuca

SEQ ID NO: 1061162 - RNA, 22 nt, Human
gaaugaauucagcacauggaau

SEQ ID NO: 1061163 - RNA, 22 nt, Human
cagucucucuuguagugcagcu

SEQ ID NO: 1061164 - RNA, 22 nt, Human
gcuuucuugguucugcaggggc

SEQ ID NO: 1061165 - RNA, 22 nt, Human
ucagagaguuagugucuuagcu

SEQ ID NO: 1061166 - RNA, 22 nt, Human
gucaaaaaguagucauuucugu

SEQ ID NO: 1061167 - RNA, 22 nt, Human
aggaagaaccuaagaaagucuc

SEQ ID NO: 1061168 - RNA, 18 nt, Human
gacacauccccaggccuc

SEQ ID NO: 1061169 - RNA, 22 nt, Human
gcaggcucuucuuucugcccag

SEQ ID NO: 1061170 - RNA, 22 nt, Human
aaauuucuugaggcucucuagc

SEQ ID NO: 1061171 - RNA, 22 nt, Human
gcagcucugacaaugccuggaa

SEQ ID NO: 1061172 - RNA, 22 nt, Human
uggcaguggcucagagugcaga

SEQ ID NO: 1061173 - RNA, 22 nt, Human
ccagagagaaaauggagggcca

SEQ ID NO: 1061174 - RNA, 22 nt, Human
gcaaacuggcaaaccugucugu

SEQ ID NO: 1061175 - RNA, 22 nt, Human
ggguuucaugguucucacaaug

SEQ ID NO: 1061176 - RNA, 22 nt, Human
aacaaccaaaaagaugaaugua

SEQ ID NO: 1061177 - RNA, 22 nt, Human
caugaaugcuggguucauguaa

SEQ ID NO: 1061178 - RNA, 18 nt, Human
uaaauauauuucccccuu

SEQ ID NO: 1061179 - RNA, 22 nt, Human
uccugcagaccucagucagguc

SEQ ID NO: 1061180 - RNA, 22 nt, Human
ccuggcagcgccgaagcuggcc

SEQ ID NO: 1061181 - RNA, 22 nt, Human
aucaaauauaauaauuuucgcu

SEQ ID NO: 1061182 - RNA, 18 nt, Human
gcagcuuuugauucaccc

SEQ ID NO: 1061183 - RNA, 22 nt, Human
cagcccaaagccccaggcuaga

SEQ ID NO: 1061184 - RNA, 21 nt, Human
uuacaaagcaagugcuguguc

SEQ ID NO: 1061185 - RNA, 22 nt, Human
ggcuuuauuucacuguaccaua

SEQ ID NO: 1061186 - RNA, 23 nt, Human
acugggcuuaugaggaggcuugu

SEQ ID NO: 1061187 - RNA, 22 nt, Human
gaggcuccccaugaggccccag

SEQ ID NO: 1061188 - RNA, 22 nt, Human
uacacaacugacaaccauucug

SEQ ID NO: 1061189 - RNA, 21 nt, Human
aguuugaugcaauuucugaga

SEQ ID NO: 1061190 - RNA, 22 nt, Human
cacagagacagaagcacuuaug

SEQ ID NO: 1061191 - RNA, 22 nt, Human
ucugggcugguugugcuugcuu

SEQ ID NO: 1061192 - RNA, 22 nt, Human
uauuucccagggagcaacaagc

SEQ ID NO: 1061193 - RNA, 21 nt, Human
uccugcagaaugccuuccuac

SEQ ID NO: 1061194 - RNA, 22 nt, Human
agagcagauggagcuggaagag

SEQ ID NO: 1061195 - RNA, 22 nt, Human
uggcagggccuaccccaauauc

SEQ ID NO: 1061196 - RNA, 22 nt, Human
cugggcuguucugccccugggu

SEQ ID NO: 1061197 - RNA, 22 nt, Human
ugucuuuagagucacaaaacca

SEQ ID NO: 1061198 - RNA, 22 nt, Human
aauauaauuuuauuccuagagu

SEQ ID NO: 1061199 - RNA, 22 nt, Human
guaugcaucgacucaagucuga

SEQ ID NO: 1061200 - RNA, 22 nt, Human
cagaugaggggcauauaacaau

SEQ ID NO: 1061201 - RNA, 22 nt, Human
cauguuuuguguacagaauauu

SEQ ID NO: 1061202 - RNA, 22 nt, Human
agugaaccaggcugcgucccug

SEQ ID NO: 1061203 - RNA, 20 nt, Human
ugcaggcuucgcucuaggag

SEQ ID NO: 1061204 - RNA, 22 nt, Human
uuaugggagcaauuggggaggu

SEQ ID NO: 1061205 - RNA, 22 nt, Human
uggccaggcuggucuggaacgc

SEQ ID NO: 1061206 - RNA, 22 nt, Human
acugggcuguaaagagaggcaa

SEQ ID NO: 1061207 - RNA, 22 nt, Human
uuuaaauuuguguuuagagggu

SEQ ID NO: 1061208 - RNA, 22 nt, Human
cauguacaaaaggcaaaugccu

SEQ ID NO: 1061209 - RNA, 22 nt, Human
cuggaaagaccugcuugcuuuu

SEQ ID NO: 1061210 - RNA, 22 nt, Human
acuggggaguugaagcacuuuc

SEQ ID NO: 1061211 - RNA, 22 nt, Human
uuccaagucacccuuaggguca

SEQ ID NO: 1061212 - RNA, 22 nt, Human
ugcagggaaaacccaggaugcu

SEQ ID NO: 1061213 - RNA, 22 nt, Human
uucuugaaucacuuuagagaua

SEQ ID NO: 1061214 - RNA, 21 nt, Human
auaaaguuuuacaggaaugca

SEQ ID NO: 1061215 - RNA, 22 nt, Human
aacaugauuuaguauaaugcag

SEQ ID NO: 1061216 - RNA, 22 nt, Human
augcauugucugguuucauuuu

SEQ ID NO: 1061217 - RNA, 22 nt, Human
cagauuuagaguggggcuugga

SEQ ID NO: 1061218 - RNA, 23 nt, Human
ucagggacaugaugugucauauc

SEQ ID NO: 1061219 - RNA, 22 nt, Human
gcaaaucaccaccuagcuggau

SEQ ID NO: 1061220 - RNA, 22 nt, Human
acccaggcugcuucucaguggc

SEQ ID NO: 1061221 - RNA, 22 nt, Human
ccacuguauuuuggaagcagau

SEQ ID NO: 1061222 - RNA, 22 nt, Human
gucaggacucugacccgucccg

SEQ ID NO: 1061223 - RNA, 22 nt, Human
acaggcucacagucauuucauu

SEQ ID NO: 1061224 - RNA, 22 nt, Human
gcacacaguagggauucaauga

SEQ ID NO: 1061225 - RNA, 22 nt, Human
aaggaccuauauugucagagga

SEQ ID NO: 1061226 - RNA, 22 nt, Human
aauuaugauuggucuaaaccag

SEQ ID NO: 1061227 - RNA, 22 nt, Human
caggucuuuucuacugguggag

SEQ ID NO: 1061228 - RNA, 22 nt, Human
gccaggcaguucaaguacacca

SEQ ID NO: 1061229 - RNA, 22 nt, Human
cuguccagaaagggggcaacaa

SEQ ID NO: 1061230 - RNA, 22 nt, Human
uuccaaguuaggcgagcuggug

SEQ ID NO: 1061231 - RNA, 22 nt, Human
agauuucugucaccuucuaugc

SEQ ID NO: 1061232 - RNA, 22 nt, Human
auggcagauggcuggagcaggu

SEQ ID NO: 1061233 - RNA, 21 nt, Human
uugaccaagggugcgugcucc

SEQ ID NO: 1061234 - RNA, 21 nt, Human
ugcauaaagaaauacaaauac

SEQ ID NO: 1061235 - RNA, 22 nt, Human
ccaggcucagggcagacuuuca

SEQ ID NO: 1061236 - RNA, 22 nt, Human
agggcugaaguuauggcugagc

SEQ ID NO: 1061237 - RNA, 22 nt, Human
ccacaucauggauacaguuaug

SEQ ID NO: 1061238 - RNA, 22 nt, Human
guccuggcugguucuguggggc

SEQ ID NO: 1061239 - RNA, 22 nt, Human
augugagggaaaucagucagaa

SEQ ID NO: 1061240 - RNA, 22 nt, Human
auucugucuaagcuggcuacgu

SEQ ID NO: 1061241 - RNA, 23 nt, Human
auauuagggagauuagcccucua

SEQ ID NO: 1061242 - RNA, 22 nt, Human
accugcaguggccacuccuaau

SEQ ID NO: 1061243 - RNA, 22 nt, Human
aaaaagucugcaaaggagguug

SEQ ID NO: 1061244 - RNA, 22 nt, Human
ggggucccugcaccagcauguc

SEQ ID NO: 1061245 - RNA, 22 nt, Human
cagcuuugccaaguaaggucuu

SEQ ID NO: 1061246 - RNA, 22 nt, Human
guggggacgggauggcucacug

SEQ ID NO: 1061247 - RNA, 22 nt, Human
gaacacaugauuauaaaugcua

SEQ ID NO: 1061248 - RNA, 22 nt, Human
uuccagcuaacucacaucccuu

SEQ ID NO: 1061249 - RNA, 22 nt, Human
ucuggcagagucagugcacaca

SEQ ID NO: 1061250 - RNA, 22 nt, Human
gcagcuuugaagacuuauuugc

SEQ ID NO: 1061251 - RNA, 22 nt, Human
agccuccaucucccaucuguga

SEQ ID NO: 1061252 - RNA, 22 nt, Human
auguccagggcacacagcagug

SEQ ID NO: 1061253 - RNA, 22 nt, Human
cccaggcagggacgugcucugg

SEQ ID NO: 1061254 - RNA, 22 nt, Human
ugcuucugacauguucuugguu

SEQ ID NO: 1061255 - RNA, 22 nt, Human
uuaguuagucccugguaccuuu

SEQ ID NO: 1061256 - RNA, 22 nt, Human
cccagcucugcagaccugcccu

SEQ ID NO: 1061257 - RNA, 22 nt, Human
cagggagcuuucccaggacccu

SEQ ID NO: 1061258 - RNA, 22 nt, Human
cauuuacuuaaaucuuuacaag

SEQ ID NO: 1061259 - RNA, 22 nt, Human
uccugcaguuacaucccagcca

SEQ ID NO: 1061260 - RNA, 23 nt, Human
ucuuuucaaugguucuuuaugug

SEQ ID NO: 1061261 - RNA, 19 nt, Human
accugcaguaauaauuccu

SEQ ID NO: 1061262 - RNA, 22 nt, Human
caacuuuaugauugguuuguca

SEQ ID NO: 1061263 - RNA, 22 nt, Human
ccaaugauggugcccacgauga

SEQ ID NO: 1061264 - RNA, 20 nt, Human
uggccucugagaugccacgg

SEQ ID NO: 1061265 - RNA, 22 nt, Human
uagcuuuaccauagaagaguau

SEQ ID NO: 1061266 - RNA, 22 nt, Human
ccagcccuugcugaaggguggc

SEQ ID NO: 1061267 - RNA, 21 nt, Human
ugcuuuaugggaaaaauguca

SEQ ID NO: 1061268 - RNA, 22 nt, Human
ccacccagccagaugcaggaag

SEQ ID NO: 1061269 - RNA, 22 nt, Human
cagcucugcugggaggaugcag

SEQ ID NO: 1061270 - RNA, 22 nt, Human
gaaauauuacaguggaggggau

SEQ ID NO: 1061271 - RNA, 22 nt, Human
ucugauuagcaguuuagggaaa

SEQ ID NO: 1061272 - RNA, 21 nt, Human
ucuggcagcaguuuguugagu

SEQ ID NO: 1061273 - RNA, 22 nt, Human
gagauggagucuuuuucuguca

SEQ ID NO: 1061274 - RNA, 22 nt, Human
uaugaaaugguaguaggaaggg

SEQ ID NO: 1061275 - RNA, 22 nt, Human
agauuucucuuucccuggcuga

SEQ ID NO: 1061276 - RNA, 22 nt, Human
acauauuuugaaagcuuucuaa

SEQ ID NO: 1061277 - RNA, 22 nt, Human
cagcuuauucaguaagcacaua

SEQ ID NO: 1061278 - RNA, 19 nt, Human
gacuccaacuuuaagcaug

SEQ ID NO: 1061279 - RNA, 22 nt, Human
cucagagagggcaccagggcca

SEQ ID NO: 1061280 - RNA, 22 nt, Human
uuuauuuggcauccagggagaa

SEQ ID NO: 1061281 - RNA, 22 nt, Human
gaacaucagucauaauuuaacg

SEQ ID NO: 1061282 - RNA, 22 nt, Human
ccaguguucauaauuuuacacu

SEQ ID NO: 1061283 - RNA, 22 nt, Human
aggcuuuggggcauucuguguu

SEQ ID NO: 1061284 - RNA, 22 nt, Human
agggggucguccggaagaccug

SEQ ID NO: 1061285 - RNA, 22 nt, Human
uccugagcuacaguaguaugau

SEQ ID NO: 1061286 - RNA, 23 nt, Human
agcuuugugaaagcagacauggg

SEQ ID NO: 1061287 - RNA, 22 nt, Human
agccagagcagggaauuggaca

SEQ ID NO: 1061288 - RNA, 22 nt, Human
gcauaugaucacgugugucggu

SEQ ID NO: 1061289 - RNA, 22 nt, Human
gcuggggagcaagaguagugag

SEQ ID NO: 1061290 - RNA, 22 nt, Human
auguuauggcucaaacauuugg

SEQ ID NO: 1061291 - RNA, 22 nt, Human
uuccaggcuauccggugaaggg

SEQ ID NO: 1061292 - RNA, 21 nt, Human
ccuggcagaagccugauaugc

SEQ ID NO: 1061293 - RNA, 22 nt, Human
ggcuucugaaccaggcccugga

SEQ ID NO: 1061294 - RNA, 22 nt, Human
agaauaauacugaaaugcugaa

SEQ ID NO: 1061295 - RNA, 22 nt, Human
cagcuuuuuagaaucuagggca

SEQ ID NO: 1061296 - RNA, 22 nt, Human
ucuguguugauaauuuuggaga

SEQ ID NO: 1061297 - RNA, 22 nt, Human
ccagagaggccuuggcaagaca

SEQ ID NO: 1061298 - RNA, 20 nt, Human
accccacagaguccauugca

SEQ ID NO: 1061299 - RNA, 22 nt, Human
uuccaggcaugucagacauagg

SEQ ID NO: 1061300 - RNA, 22 nt, Human
cuguagaacgauccaggcauuu

SEQ ID NO: 1061301 - RNA, 22 nt, Human
gccaaaguaccuagcccucugc

SEQ ID NO: 1061302 - RNA, 22 nt, Human
uacuuacacagcuguagaaggu

SEQ ID NO: 1061303 - RNA, 20 nt, Human
uuuacauuuugaaacaguga

SEQ ID NO: 1061304 - RNA, 22 nt, Human
cccaggcaguagaaagaagagg

SEQ ID NO: 1061305 - RNA, 22 nt, Human
gcugggcuguaguuugcugacc

SEQ ID NO: 1061306 - RNA, 22 nt, Human
auugaaaaaugacuauugcuua

SEQ ID NO: 1061307 - RNA, 22 nt, Human
auguccagaguaaagcacauuc

SEQ ID NO: 1061308 - RNA, 22 nt, Human
agcucccagcagagcuggccac

SEQ ID NO: 1061309 - RNA, 19 nt, Human
ccacacagugugcaauuua

SEQ ID NO: 1061310 - RNA, 22 nt, Human
ugcugagcgcauccggcggccg

SEQ ID NO: 1061311 - RNA, 22 nt, Human
agacacauaggaccacacugug

SEQ ID NO: 1061312 - RNA, 22 nt, Human
uuuagggaagaagcccauggcc

SEQ ID NO: 1061313 - RNA, 22 nt, Human
auaaaauuugcuacuguuaaau

SEQ ID NO: 1061314 - RNA, 22 nt, Human
ccagcuuuuccucucauugcuu

SEQ ID NO: 1061315 - RNA, 22 nt, Human
uguaaacauaccagagccaagu

SEQ ID NO: 1061316 - RNA, 22 nt, Human
uucuuaaagaggcaaaacacag

SEQ ID NO: 1061317 - RNA, 22 nt, Human
cuuggcaggguggaggaugcag

SEQ ID NO: 1061318 - RNA, 22 nt, Human
uggaaauauacaaugugucucu

SEQ ID NO: 1061319 - RNA, 22 nt, Human
ucauuucuguugugcaucacug

SEQ ID NO: 1061320 - RNA, 22 nt, Human
gcugccacauuuucaggacuaa

SEQ ID NO: 1061321 - RNA, 22 nt, Human
guucuuaagaccacaauaaaaa

SEQ ID NO: 1061322 - RNA, 22 nt, Human
cacacaucaaccuagacauugu

SEQ ID NO: 1061323 - RNA, 22 nt, Human
cugaaccaucucuguucuguau

SEQ ID NO: 1061324 - RNA, 21 nt, Human
augugaaaccuuccacgcuga

SEQ ID NO: 1061325 - RNA, 21 nt, Human
uccugccuuaguccagagcag

SEQ ID NO: 1061326 - RNA, 18 nt, Human
ucucugaauauuuuaugu

SEQ ID NO: 1061327 - RNA, 22 nt, Human
aacagcauaaguauuuauuuca

SEQ ID NO: 1061328 - RNA, 22 nt, Human
cauucacaucuuguuccaucac

SEQ ID NO: 1061329 - RNA, 22 nt, Human
gccaggggugcccacccaagga

SEQ ID NO: 1061330 - RNA, 22 nt, Human
acaccauacucauguugguucc

SEQ ID NO: 1061331 - RNA, 22 nt, Human
cuguaugaacccauauacuuau

SEQ ID NO: 1061332 - RNA, 22 nt, Human
uccugcagccacugcaggcaga

SEQ ID NO: 1061333 - RNA, 22 nt, Human
ggcuccaaagggcagugugagg

SEQ ID NO: 1061334 - RNA, 22 nt, Human
uucagugucaauuuuuaaauau

SEQ ID NO: 1061335 - RNA, 22 nt, Human
uaugaacauguucauugacuua

SEQ ID NO: 1061336 - RNA, 22 nt, Human
cagggcucaggcucugggauuc

SEQ ID NO: 1061337 - RNA, 22 nt, Human
cccacccucaagggugucuaua

SEQ ID NO: 1061338 - RNA, 22 nt, Human
aaauuugauaagccauuguuac

SEQ ID NO: 1061339 - RNA, 22 nt, Human
auaugcauuuaccuggcauaua

SEQ ID NO: 1061340 - RNA, 18 nt, Human
cccucuugcacaaagcaa

SEQ ID NO: 1061341 - RNA, 18 nt, Human
gacccagcagaugggcuu

SEQ ID NO: 1061342 - RNA, 22 nt, Human
ccuggggaccugccucagcccu

SEQ ID NO: 1061343 - RNA, 22 nt, Human
ugcauaaacuucucugguguga

SEQ ID NO: 1061344 - RNA, 22 nt, Human
ucacauacugaaaguccaguga

SEQ ID NO: 1061345 - RNA, 22 nt, Human
ccaggccucaccugcccaccua

SEQ ID NO: 1061346 - RNA, 22 nt, Human
aggaccugacauuguguuuucu

SEQ ID NO: 1061347 - RNA, 22 nt, Human
aaauuacagaucaccaaugcau

SEQ ID NO: 1061348 - RNA, 22 nt, Human
auauuaggugcucaauacaugc

SEQ ID NO: 1061349 - RNA, 22 nt, Human
agcucccagaaggcccugcgcc

SEQ ID NO: 1061350 - RNA, 22 nt, Human
gccaggcaaauuaaggaaugca

SEQ ID NO: 1061351 - RNA, 22 nt, Human
gccaggcagcagcgaggauggu

SEQ ID NO: 1061352 - RNA, 22 nt, Human
uugggaaguuuaaugacagacu

SEQ ID NO: 1061353 - RNA, 22 nt, Human
uuuuucuuaaauguggguuggc

SEQ ID NO: 1061354 - RNA, 22 nt, Human
agcuuuaugggagcuuagauaa

SEQ ID NO: 1061355 - RNA, 22 nt, Human
ucaggcccagagucacggaucc

SEQ ID NO: 1061356 - RNA, 22 nt, Human
ugcaggcucugguuuauagugc

SEQ ID NO: 1061357 - RNA, 22 nt, Human
uggaacacuguggaugagaaga

SEQ ID NO: 1061358 - RNA, 22 nt, Human
auggccugcagugcugccacag

SEQ ID NO: 1061359 - RNA, 22 nt, Human
accaagcuagaacauuacaggc

SEQ ID NO: 1061360 - RNA, 22 nt, Human
augggcugagaaucaagaauau

SEQ ID NO: 1061361 - RNA, 22 nt, Human
ccagcuuuagguugccugccag

SEQ ID NO: 1061362 - RNA, 17 nt, Human
gccugcaggcccgcaga

SEQ ID NO: 1061363 - RNA, 22 nt, Human
aggcugugacagggucauggag

SEQ ID NO: 1061364 - RNA, 22 nt, Human
uacaaaaggaagagggaucuua

SEQ ID NO: 1061365 - RNA, 22 nt, Human
augugaaaauccaauggcagca

SEQ ID NO: 1061366 - RNA, 22 nt, Human
ugcaggcugaggcuggcucaac

SEQ ID NO: 1061367 - RNA, 22 nt, Human
ggcuuuauuauguggccaugug

SEQ ID NO: 1061368 - RNA, 22 nt, Human
cuguaaauaugaagaauauaug

SEQ ID NO: 1061369 - RNA, 22 nt, Human
uucuagauagagugcaaauuau

SEQ ID NO: 1061370 - RNA, 22 nt, Human
gacccagcuuaagucacauguu

SEQ ID NO: 1061371 - RNA, 22 nt, Human
auaugagaguaaaugccgaucu

SEQ ID NO: 1061372 - RNA, 22 nt, Human
cauuuguaauacugacuugcag

SEQ ID NO: 1061373 - RNA, 22 nt, Human
cucugucagaguguugucccca

SEQ ID NO: 1061374 - RNA, 22 nt, Human
gccccacagccugcggucucag

SEQ ID NO: 1061375 - RNA, 22 nt, Human
ucaugaacauggaauaucuuuu

SEQ ID NO: 1061376 - RNA, 22 nt, Human
aaaacaggugucagcaaacuau

SEQ ID NO: 1061377 - RNA, 22 nt, Human
gccuggcacaguagggacccaa

SEQ ID NO: 1061378 - RNA, 22 nt, Human
ucugggcuuuguaaugggaggu

SEQ ID NO: 1061379 - RNA, 22 nt, Human
uuuguucaugccuauauucuca

SEQ ID NO: 1061380 - RNA, 22 nt, Human
cauuagggccaccauaacaaaa

SEQ ID NO: 1061381 - RNA, 19 nt, Human
ccaggccuggcgucuccgc

SEQ ID NO: 1061382 - RNA, 22 nt, Human
gccaggcagcaggaagccagug

SEQ ID NO: 1061383 - RNA, 22 nt, Human
uuugucaucccuuuugaaacug

SEQ ID NO: 1061384 - RNA, 22 nt, Human
caccagggccccaggcugugcc

SEQ ID NO: 1061385 - RNA, 22 nt, Human
ugggcucucaaagugcggcuug

SEQ ID NO: 1061386 - RNA, 22 nt, Human
gaacuguaguuaauacuacaca

SEQ ID NO: 1061387 - RNA, 22 nt, Human
agagcacagaagaauaggugcu

SEQ ID NO: 1061388 - RNA, 22 nt, Human
aauuuagauugauaaacaugga

SEQ ID NO: 1061389 - RNA, 22 nt, Human
ccaggcucugugugggcuagag

SEQ ID NO: 1061390 - RNA, 22 nt, Human
uccugggguuuuggccgcagcu

SEQ ID NO: 1061391 - RNA, 22 nt, Human
gcuccaagguauccaccagggu

SEQ ID NO: 1061392 - RNA, 22 nt, Human
gaaacauauuaauccagugaaa

SEQ ID NO: 1061393 - RNA, 22 nt, Human
gccugcagugagugcagaaggu

SEQ ID NO: 1061394 - RNA, 22 nt, Human
cucaccccacuaccccuuggug

SEQ ID NO: 1061395 - RNA, 22 nt, Human
cuuaaaaucuggcaguuagcua

SEQ ID NO: 1061396 - RNA, 22 nt, Human
gagggaccccaggcuggcccuu

SEQ ID NO: 1061397 - RNA, 22 nt, Human
uuucucuugcgauaugcuacac

SEQ ID NO: 1061398 - RNA, 21 nt, Human
gcaaguacuaucaucauuauc

SEQ ID NO: 1061399 - RNA, 22 nt, Human
auuagggcuggaugcaaggaaa

SEQ ID NO: 1061400 - RNA, 22 nt, Human
aggcacaggaggugguaagaag

SEQ ID NO: 1061401 - RNA, 22 nt, Human
ugcaggcugcuggcaguagcuu

SEQ ID NO: 1061402 - RNA, 22 nt, Human
gaaacauacgauuuaggagaaa

SEQ ID NO: 1061403 - RNA, 22 nt, Human
uuguaugaucccauuuagugaa

SEQ ID NO: 1061404 - RNA, 22 nt, Human
acacacuguaaggacuaucacu

SEQ ID NO: 1061405 - RNA, 19 nt, Human
cauuuagaaguacauauua

SEQ ID NO: 1061406 - RNA, 22 nt, Human
cccagcuucugagggggccuug

SEQ ID NO: 1061407 - RNA, 22 nt, Human
cagggcacggagaagucacccc

SEQ ID NO: 1061408 - RNA, 22 nt, Human
ucugggcuuggauuggcucugc

SEQ ID NO: 1061409 - RNA, 23 nt, Human
acaagauagggauaaaaagauaa

SEQ ID NO: 1061410 - RNA, 22 nt, Human
aggccccaaagcagugcaagua

SEQ ID NO: 1061411 - RNA, 22 nt, Human
uuauuagggugguuuauguucu

SEQ ID NO: 1061412 - RNA, 22 nt, Human
guggccagccagggugcugaug

SEQ ID NO: 1061413 - RNA, 22 nt, Human
auucauuuagguauucacuuac

SEQ ID NO: 1061414 - RNA, 22 nt, Human
aaacagcaggaacaucuugcca

SEQ ID NO: 1061415 - RNA, 22 nt, Human
uacauucagcaaaagaaugguu

SEQ ID NO: 1061416 - RNA, 22 nt, Human
ccagcccugucaccaacuggag

SEQ ID NO: 1061417 - RNA, 22 nt, Human
gacccggcuccaggcccagcag

SEQ ID NO: 1061418 - RNA, 22 nt, Human
uccagaccauggauggcugcaa

SEQ ID NO: 1061419 - RNA, 22 nt, Human
ucacacacauggauaguauuuu

SEQ ID NO: 1061420 - RNA, 22 nt, Human
gauauguauugaaugaucauuu

SEQ ID NO: 1061421 - RNA, 22 nt, Human
gagcucagcaaaggucugugug

SEQ ID NO: 1061422 - RNA, 22 nt, Human
cagcuuuaccaauauuuggaaa

SEQ ID NO: 1061423 - RNA, 19 nt, Human
aggcugugagggaggacuc

SEQ ID NO: 1061424 - RNA, 22 nt, Human
ugcuucugggcaaaugugugug

SEQ ID NO: 1061425 - RNA, 22 nt, Human
ucuugggauagugucucauggc

SEQ ID NO: 1061426 - RNA, 22 nt, Human
agcacugugauuuauaacauuu

SEQ ID NO: 1061427 - RNA, 22 nt, Human
cauuuauugaguggccacagug

SEQ ID NO: 1061428 - RNA, 22 nt, Human
uucuacaauaugaauaaugaag

SEQ ID NO: 1061429 - RNA, 22 nt, Human
acacacucaauugcauaagcac

SEQ ID NO: 1061430 - RNA, 22 nt, Human
cagggcucuuccggagcaggga

SEQ ID NO: 1061431 - RNA, 22 nt, Human
ucugaacauccagcaaugcaca

SEQ ID NO: 1061432 - RNA, 22 nt, Human
ucuccaagaaaagaucucagcu

SEQ ID NO: 1061433 - RNA, 22 nt, Human
uacacagacucuucaauucaga

SEQ ID NO: 1061434 - RNA, 22 nt, Human
cucagcucugacaggaggcauc

SEQ ID NO: 1061435 - RNA, 22 nt, Human
ugcauguuaagaaaauauugag

SEQ ID NO: 1061436 - RNA, 22 nt, Human
uucacauuucauaccacagcuu

SEQ ID NO: 1061437 - RNA, 22 nt, Human
cagggacccuacuagcucacac

SEQ ID NO: 1061438 - RNA, 22 nt, Human
agggcuccaaggaaguguagcu

SEQ ID NO: 1061439 - RNA, 20 nt, Human
ucuggcaggugaacgagcug

SEQ ID NO: 1061440 - RNA, 22 nt, Human
uuccacauuccuuacauucaua

SEQ ID NO: 1061441 - RNA, 22 nt, Human
acuggcagcagcagcccuuggg

SEQ ID NO: 1061442 - RNA, 22 nt, Human
ucuggcaggguguguauuuaca

SEQ ID NO: 1061443 - RNA, 22 nt, Human
uuucaaauaccauaaaccuaau

SEQ ID NO: 1061444 - RNA, 22 nt, Human
agauauguuuguauauauuugu

SEQ ID NO: 1061445 - RNA, 22 nt, Human
gcagcucuccucugugaggaac

SEQ ID NO: 1061446 - RNA, 22 nt, Human
uuaauacaagcauaugcacaca

SEQ ID NO: 1061447 - RNA, 23 nt, Human
caggcucccggaccaggauccgc

SEQ ID NO: 1061448 - RNA, 22 nt, Human
agaggcucugccgccucaggua

SEQ ID NO: 1061449 - RNA, 22 nt, Human
gugggcuuguuuugaugagauc

SEQ ID NO: 1061450 - RNA, 22 nt, Human
acagauauaaacuauaguagug

SEQ ID NO: 1061451 - RNA, 22 nt, Human
gccaaaucacagggccaaaagc

SEQ ID NO: 1061452 - RNA, 22 nt, Human
uuuagggacaagggucuggggu

SEQ ID NO: 1061453 - RNA, 17 nt, Human
cucuggggacaguucua

SEQ ID NO: 1061454 - RNA, 22 nt, Human
caggccuccacuccacgcagac

SEQ ID NO: 1061455 - RNA, 22 nt, Human
auuucauacuaaggcucaaaaa

SEQ ID NO: 1061456 - RNA, 22 nt, Human
ccugaccuauuuuucucagcug

SEQ ID NO: 1061457 - RNA, 22 nt, Human
cuguggcucauucuugguggca

SEQ ID NO: 1061458 - RNA, 22 nt, Human
aauaguauuuauuuggaaaaag

SEQ ID NO: 1061459 - RNA, 22 nt, Human
uaaucuguguaccuucaucgga

SEQ ID NO: 1061460 - RNA, 22 nt, Human
uguaugaauauguauuuucaua

SEQ ID NO: 1061461 - RNA, 22 nt, Human
uauuagguaaaggacuugcagg

SEQ ID NO: 1061462 - RNA, 22 nt, Human
cugguggaggugccaggauuug

SEQ ID NO: 1061463 - RNA, 22 nt, Human
agcaggcuuguuaugucugaga

SEQ ID NO: 1061464 - RNA, 22 nt, Human
uuucuuuguuguuaucacauca

SEQ ID NO: 1061465 - RNA, 20 nt, Human
agaaauauugaguucagagg

SEQ ID NO: 1061466 - RNA, 22 nt, Human
gguuucaacucagcuaguaagg

SEQ ID NO: 1061467 - RNA, 22 nt, Human
ucacacauuucucaaguguagg

SEQ ID NO: 1061468 - RNA, 22 nt, Human
cagcuuuauugagguauaauug

SEQ ID NO: 1061469 - RNA, 22 nt, Human
ccuggggagccgccugagcccc

SEQ ID NO: 1061470 - RNA, 21 nt, Human
uagggcucucugugucaggug

SEQ ID NO: 1061471 - RNA, 22 nt, Human
gaaacaauuuuuguugucuaag

SEQ ID NO: 1061472 - RNA, 22 nt, Human
aagcuuuagagaugaguuccuu

SEQ ID NO: 1061473 - RNA, 22 nt, Human
acaucacacgccuuccaggagg

SEQ ID NO: 1061474 - RNA, 22 nt, Human
uucacuuauagggauguuauug

SEQ ID NO: 1061475 - RNA, 22 nt, Human
ugcuucuguuacauaccagaac

SEQ ID NO: 1061476 - RNA, 22 nt, Human
auucaagagcccauguuuccug

SEQ ID NO: 1061477 - RNA, 22 nt, Human
cagguuuagguggacgugcagg

SEQ ID NO: 1061478 - RNA, 22 nt, Human
ucuggcagcaagauaacaaugg

SEQ ID NO: 1061479 - RNA, 22 nt, Human
uguuugaaacuuugaucacuaa

SEQ ID NO: 1061480 - RNA, 21 nt, Human
gccugcagaccccaccaggcu

SEQ ID NO: 1061481 - RNA, 22 nt, Human
cagccucuugcacuuugaaggc

SEQ ID NO: 1061482 - RNA, 22 nt, Human
caugaagcauguuuugucauga

SEQ ID NO: 1061483 - RNA, 22 nt, Human
agcucugacauugauucucagc

SEQ ID NO: 1061484 - RNA, 22 nt, Human
uauucccagccucuuucuaucu

SEQ ID NO: 1061485 - RNA, 22 nt, Human
gcagcucucuggccugcccugg

SEQ ID NO: 1061486 - RNA, 22 nt, Human
ccuccccaugacccggugcugg

SEQ ID NO: 1061487 - RNA, 22 nt, Human
uggcagaaagaaccaugugcaa

SEQ ID NO: 1061488 - RNA, 18 nt, Human
aguuccuuaaauuggugu

SEQ ID NO: 1061489 - RNA, 22 nt, Human
ugcuucuggcuuaucucgugcc

SEQ ID NO: 1061490 - RNA, 22 nt, Human
aauugcaauuuucuuaaggucu

SEQ ID NO: 1061491 - RNA, 22 nt, Human
auuaagggccaauccuccagcc

SEQ ID NO: 1061492 - RNA, 22 nt, Human
cuagggacugggaccuuaguua

SEQ ID NO: 1061493 - RNA, 22 nt, Human
auguaauuugcccucaaguuaa

SEQ ID NO: 1061494 - RNA, 22 nt, Human
agggaccucuucuugcagcuga

SEQ ID NO: 1061495 - RNA, 17 nt, Human
agcaggcugcagaggcc

SEQ ID NO: 1061496 - RNA, 19 nt, Human
cugagagaugcuucacaca

SEQ ID NO: 1061497 - RNA, 17 nt, Human
cccaggccgccgggagc

SEQ ID NO: 1061498 - RNA, 22 nt, Human
agggaccuugauggguuuggga

SEQ ID NO: 1061499 - RNA, 22 nt, Human
aguaugaagaugaugaaaaaua

SEQ ID NO: 1061500 - RNA, 22 nt, Human
ucucacagugcaggucugucuc

SEQ ID NO: 1061501 - RNA, 22 nt, Human
gccaagcucuuuaaaggccaaa

SEQ ID NO: 1061502 - RNA, 22 nt, Human
aaaagagucuuaggcagucaua

SEQ ID NO: 1061503 - RNA, 20 nt, Human
uuaagaaaagcacauccugc

SEQ ID NO: 1061504 - RNA, 22 nt, Human
ggaggacacuggcucugccuuc

SEQ ID NO: 1061505 - RNA, 22 nt, Human
ggcuuuaucaaaugagacccug

SEQ ID NO: 1061506 - RNA, 22 nt, Human
aacagcaugcuggguaacauug

SEQ ID NO: 1061507 - RNA, 22 nt, Human
uguuagaaguuaaucacuaauu

SEQ ID NO: 1061508 - RNA, 22 nt, Human
ggcuuuggggugugcagagaug

SEQ ID NO: 1061509 - RNA, 22 nt, Human
uagcauuaucugucuuaucauu

SEQ ID NO: 1061510 - RNA, 22 nt, Human
ugucagagcaaggccaggccag

SEQ ID NO: 1061511 - RNA, 22 nt, Human
uucugucacuuuuuuggaaucu

SEQ ID NO: 1061512 - RNA, 22 nt, Human
ccaggcucagcgcgcacgucug

SEQ ID NO: 1061513 - RNA, 22 nt, Human
uuagggacaaauuugcagaacc

SEQ ID NO: 1061514 - RNA, 22 nt, Human
uuauuagguuauucucuguacu

SEQ ID NO: 1061515 - RNA, 21 nt, Human
auuuucauuuccaggggagga

SEQ ID NO: 1061516 - RNA, 18 nt, Human
acauuucuccuucugacc

SEQ ID NO: 1061517 - RNA, 22 nt, Human
uuaugaaggaucagguacuugg

SEQ ID NO: 1061518 - RNA, 22 nt, Human
auuuaaaugcuuaagaggguuu

SEQ ID NO: 1061519 - RNA, 22 nt, Human
uuuugagauggagucuugcucu

SEQ ID NO: 1061520 - RNA, 22 nt, Human
uaugagguagguauuauacuua

SEQ ID NO: 1061521 - RNA, 22 nt, Human
guugggaaggugaacaugaugc

SEQ ID NO: 1061522 - RNA, 23 nt, Human
ccuggggagcuguauccagagug

SEQ ID NO: 1061523 - RNA, 22 nt, Human
uguaggaauguuuuuaaguugg

SEQ ID NO: 1061524 - RNA, 22 nt, Human
ccaggcucagcuauuaagaaac

SEQ ID NO: 1061525 - RNA, 22 nt, Human
cacaggccugucucuuucuaac

SEQ ID NO: 1061526 - RNA, 22 nt, Human
ucauuuguaccauuuuuuaaga

SEQ ID NO: 1061527 - RNA, 22 nt, Human
ccagcuuuucagaaucugccug

SEQ ID NO: 1061528 - RNA, 22 nt, Human
ugcuuuauguuaucagaagggu

SEQ ID NO: 1061529 - RNA, 22 nt, Human
gcuaggagugggauggaagucg

SEQ ID NO: 1061530 - RNA, 22 nt, Human
cugccuggccacaacccagggu

SEQ ID NO: 1061531 - RNA, 22 nt, Human
aaggccaucuacuuacggaauu

SEQ ID NO: 1061532 - RNA, 22 nt, Human
guccucugcccaggucaagguu

SEQ ID NO: 1061533 - RNA, 22 nt, Human
auuucucagcacuuccuaucuc

SEQ ID NO: 1061534 - RNA, 22 nt, Human
augugguugaagaauuacaucu

SEQ ID NO: 1061535 - RNA, 22 nt, Human
aauugcaacagguagacuuuuc

SEQ ID NO: 1061536 - RNA, 22 nt, Human
acuggcaggcugcuggccggcg

SEQ ID NO: 1061537 - RNA, 22 nt, Human
ugggagaaacugucucucccac

SEQ ID NO: 1061538 - RNA, 22 nt, Human
ccagcucucagcgggagacuca

SEQ ID NO: 1061539 - RNA, 22 nt, Human
cuaggaauccuuuuagaguugg

SEQ ID NO: 1061540 - RNA, 22 nt, Human
gaagcacugccauaauucagac

SEQ ID NO: 1061541 - RNA, 22 nt, Human
gaggggcuggguagggcaaccc

SEQ ID NO: 1061542 - RNA, 22 nt, Human
acacacaauuaguuuuaugcuu

SEQ ID NO: 1061543 - RNA, 22 nt, Human
ugucuuuauauauuuggaaaau

SEQ ID NO: 1061544 - RNA, 22 nt, Human
uggaccugaagaauaggaagua

SEQ ID NO: 1061545 - RNA, 22 nt, Human
ucuucaaacugaaaauuuagaa

SEQ ID NO: 1061546 - RNA, 22 nt, Human
ucuaggagcuuaaaggaggcca

SEQ ID NO: 1061547 - RNA, 22 nt, Human
ucacacagcugacagagccuuu

SEQ ID NO: 1061548 - RNA, 22 nt, Human
ccacaggcugcugcaggucccg

SEQ ID NO: 1061549 - RNA, 22 nt, Human
gagggcuccacacgggcccagc

SEQ ID NO: 1061550 - RNA, 22 nt, Human
ugaacacugccauauuuaagaa

SEQ ID NO: 1061551 - RNA, 22 nt, Human
uagggcucacugagaugaauau

SEQ ID NO: 1061552 - RNA, 23 nt, Human
agagcaucaugaugcuaagucug

SEQ ID NO: 1061553 - RNA, 22 nt, Human
uugaagcagagaaauacuugaa

SEQ ID NO: 1061554 - RNA, 22 nt, Human
uccagaccuagggcaccccagu

SEQ ID NO: 1061555 - RNA, 22 nt, Human
acaaguaccaaaugcucaagua

SEQ ID NO: 1061556 - RNA, 22 nt, Human
gaggguggccuuuagagcccau

SEQ ID NO: 1061557 - RNA, 22 nt, Human
ggagcugaggcugaggccucac

SEQ ID NO: 1061558 - RNA, 22 nt, Human
cccuuccuugugacuggugggg

SEQ ID NO: 1061559 - RNA, 22 nt, Human
uuucugaagggcagcagacucu

SEQ ID NO: 1061560 - RNA, 22 nt, Human
guccagugacaaguagcuggcc

SEQ ID NO: 1061561 - RNA, 22 nt, Human
agagggaucacccuguuucugg

SEQ ID NO: 1061562 - RNA, 22 nt, Human
uccaggcaugucugaguccuuc

SEQ ID NO: 1061563 - RNA, 22 nt, Human
acuggcaguuugagaaugcauu

SEQ ID NO: 1061564 - RNA, 22 nt, Human
cagaguggcgacccccucagcu

SEQ ID NO: 1061565 - RNA, 22 nt, Human
acccacacaucucuaauucagu

SEQ ID NO: 1061566 - RNA, 22 nt, Human
agagugaaguucaucgugcagc

SEQ ID NO: 1061567 - RNA, 22 nt, Human
auaugugaaguggguuauuuug

SEQ ID NO: 1061568 - RNA, 22 nt, Human
guuuagaacacggaaauacuga

SEQ ID NO: 1061569 - RNA, 22 nt, Human
gccuccggaguugcagugucuu

SEQ ID NO: 1061570 - RNA, 22 nt, Human
cuuucauuugauaagaaugcca

SEQ ID NO: 1061571 - RNA, 22 nt, Human
ccagcccuuagauaaaccuggc

SEQ ID NO: 1061572 - RNA, 22 nt, Human
ccugcagggaaucgaggcagaa

SEQ ID NO: 1061573 - RNA, 20 nt, Human
auacacauucauagaaaaau

SEQ ID NO: 1061574 - RNA, 18 nt, Human
ugaggcagucagugaugg

SEQ ID NO: 1061575 - RNA, 23 nt, Human
cagugugacgaggugaggcaggc

SEQ ID NO: 1061576 - RNA, 22 nt, Human
ucugcagaauucgaggaagaaa

SEQ ID NO: 1061577 - RNA, 22 nt, Human
guggcagguuccguagacagca

SEQ ID NO: 1061578 - RNA, 22 nt, Human
uuccuggcagaggccccgacag

SEQ ID NO: 1061579 - RNA, 22 nt, Human
cuucaaaugugauuuuaauaac

SEQ ID NO: 1061580 - RNA, 22 nt, Human
ccagcccugccagagagagcug

SEQ ID NO: 1061581 - RNA, 22 nt, Human
agucuacaaagaaaaguuauug

SEQ ID NO: 1061582 - RNA, 22 nt, Human
ucagcuuuuuggauugcccaag

SEQ ID NO: 1061583 - RNA, 22 nt, Human
cagggcucccaaauaucucuuc

SEQ ID NO: 1061584 - RNA, 20 nt, Human
ccuuuauuauuuguaugaug

SEQ ID NO: 1061585 - RNA, 19 nt, Human
auauauguauacaaugugg

SEQ ID NO: 1061586 - RNA, 23 nt, Human
ccuggcagcaaacgaggagguua

SEQ ID NO: 1061587 - RNA, 22 nt, Human
cugggaggcagucucucuagaa

SEQ ID NO: 1061588 - RNA, 22 nt, Human
cagugagggcccccuuccaggu

SEQ ID NO: 1061589 - RNA, 22 nt, Human
aguguugggucuuuagaauuua

SEQ ID NO: 1061590 - RNA, 22 nt, Human
gcucugagacaguagagauggc

SEQ ID NO: 1061591 - RNA, 22 nt, Human
uauaauuuuaagugguaaauua

SEQ ID NO: 1061592 - RNA, 22 nt, Human
cagagcauuaaaaccagcucug

SEQ ID NO: 1061593 - RNA, 22 nt, Human
uuaugcaacaggugagcagaca

SEQ ID NO: 1061594 - RNA, 22 nt, Human
cauacauuuauacacaucuaug

SEQ ID NO: 1061595 - RNA, 22 nt, Human
cgcugauaaacgucacguuccc

SEQ ID NO: 1061596 - RNA, 22 nt, Human
ugcaggcugccuucacagagcc

SEQ ID NO: 1061597 - RNA, 22 nt, Human
gccugcagccucagagaauuuu

SEQ ID NO: 1061598 - RNA, 20 nt, Human
gauacacagcacagagggcc

SEQ ID NO: 1061599 - RNA, 22 nt, Human
gacccagaaggagugcccuaga

SEQ ID NO: 1061600 - RNA, 22 nt, Human
gugaaacacccuccaaugcaca

SEQ ID NO: 1061601 - RNA, 22 nt, Human
ccugggcugcaugauggcauuu

SEQ ID NO: 1061602 - RNA, 22 nt, Human
augacaugaccugguagagaca

SEQ ID NO: 1061603 - RNA, 22 nt, Human
ugguuuaccccuguccuauauc

SEQ ID NO: 1061604 - RNA, 22 nt, Human
ccaggccuggaccaugccaggg

SEQ ID NO: 1061605 - RNA, 22 nt, Human
cuauuagguaugugguugcuau

SEQ ID NO: 1061606 - RNA, 22 nt, Human
gacaaaaguguuuugaacaagg

SEQ ID NO: 1061607 - RNA, 22 nt, Human
uuccugccccugagagcuccca

SEQ ID NO: 1061608 - RNA, 22 nt, Human
gcuggggacuccccaccauagc

SEQ ID NO: 1061609 - RNA, 23 nt, Human
agcaggcugcuucuccacagcug

SEQ ID NO: 1061610 - RNA, 22 nt, Human
ucuggggaccauggcaucuaaa

SEQ ID NO: 1061611 - RNA, 22 nt, Human
agucuagggugggguccacagg

SEQ ID NO: 1061612 - RNA, 22 nt, Human
aggcccaaaagaaaccacuggg

SEQ ID NO: 1061613 - RNA, 22 nt, Human
ucuccaggaagcccucccugac

SEQ ID NO: 1061614 - RNA, 22 nt, Human
guguaugauuucaaauggcuag

SEQ ID NO: 1061615 - RNA, 22 nt, Human
cuuuauuagauguagacuuucu

SEQ ID NO: 1061616 - RNA, 22 nt, Human
ccuggcaguggugaagaagagg

SEQ ID NO: 1061617 - RNA, 19 nt, Human
gugggacagacauuacaua

SEQ ID NO: 1061618 - RNA, 22 nt, Human
gagcacugauuuauuuuugucu

SEQ ID NO: 1061619 - RNA, 22 nt, Human
uauauguaagcuauguaagagu

SEQ ID NO: 1061620 - RNA, 22 nt, Human
guguaugaggggagaauguuuu

SEQ ID NO: 1061621 - RNA, 22 nt, Human
gccaggcagcugggagggugcc

SEQ ID NO: 1061622 - RNA, 22 nt, Human
guggcaguuuugacaucacaaa

SEQ ID NO: 1061623 - RNA, 22 nt, Human
gugggcuuuugacagugccugg

SEQ ID NO: 1061624 - RNA, 22 nt, Human
cugagggucaacuugauuguau

SEQ ID NO: 1061625 - RNA, 22 nt, Human
gcuggcagcauuagacccuggg

SEQ ID NO: 1061626 - RNA, 22 nt, Human
ugcagggcuaagucagagccug

SEQ ID NO: 1061627 - RNA, 22 nt, Human
uauuccuauuucuaaacauaug

SEQ ID NO: 1061628 - RNA, 22 nt, Human
ugagugugcagggaaguggcgg

SEQ ID NO: 1061629 - RNA, 22 nt, Human
gacacagagggcaccagauaug

SEQ ID NO: 1061630 - RNA, 22 nt, Human
gagaggcugaaaucacaggagc

SEQ ID NO: 1061631 - RNA, 22 nt, Human
gcuugggaagggcccuguguac

SEQ ID NO: 1061632 - RNA, 22 nt, Human
cugagcagugguucuugagcgc

SEQ ID NO: 1061633 - RNA, 18 nt, Human
ugaccugcgcuucacggu

SEQ ID NO: 1061634 - RNA, 22 nt, Human
aguaaaauuucugcugaggaga

SEQ ID NO: 1061635 - RNA, 22 nt, Human
gcauuauuaauagcugcaugag

SEQ ID NO: 1061636 - RNA, 22 nt, Human
guccagagauggacgagcagau

SEQ ID NO: 1061637 - RNA, 17 nt, Human
acaggcagaucaccuga

SEQ ID NO: 1061638 - RNA, 22 nt, Human
gauuuauugucccuguccugcu

SEQ ID NO: 1061639 - RNA, 22 nt, Human
aaagaaucagaagucucaaaca

SEQ ID NO: 1061640 - RNA, 22 nt, Human
cgggcuccgggucuuugcaguc

SEQ ID NO: 1061641 - RNA, 22 nt, Human
agcacaggaccaaggaagcugu

SEQ ID NO: 1061642 - RNA, 22 nt, Human
gcccacacaccagcucaggagg

SEQ ID NO: 1061643 - RNA, 22 nt, Human
cagcauuuaucuuguagcagga

SEQ ID NO: 1061644 - RNA, 21 nt, Human
ugggaccuauuucaacuggau

SEQ ID NO: 1061645 - RNA, 22 nt, Human
aggcuccauaccaucuccggag

SEQ ID NO: 1061646 - RNA, 22 nt, Human
cuucugggcauucagcugcaca

SEQ ID NO: 1061647 - RNA, 22 nt, Human
uauucacaguugauuuacaguu

SEQ ID NO: 1061648 - RNA, 22 nt, Human
ccccuguguuguucaaggguca

SEQ ID NO: 1061649 - RNA, 22 nt, Human
agaaaauuagauuuuacugugu

SEQ ID NO: 1061650 - RNA, 22 nt, Human
cagagagcaugggaggcccgag

SEQ ID NO: 1061651 - RNA, 22 nt, Human
ucugauuagagcauucuugagu

SEQ ID NO: 1061652 - RNA, 22 nt, Human
cccagcccaucucaaaggucua

SEQ ID NO: 1061653 - RNA, 21 nt, Human
ccagcccagcugugucccagc

SEQ ID NO: 1061654 - RNA, 22 nt, Human
uucaauaucauuguuuagucuc

SEQ ID NO: 1061655 - RNA, 19 nt, Human
ucuggcagguaauuaggga

SEQ ID NO: 1061656 - RNA, 22 nt, Human
ugcagggaaugcuugcagcaug

SEQ ID NO: 1061657 - RNA, 22 nt, Human
ugcuucugcaacuugaauguac

SEQ ID NO: 1061658 - RNA, 22 nt, Human
ugccugacugcugccaccacua

SEQ ID NO: 1061659 - RNA, 22 nt, Human
ccugcagaaaggguccccagga

SEQ ID NO: 1061660 - RNA, 22 nt, Human
aaccucaggcucucuggacaau

SEQ ID NO: 1061661 - RNA, 22 nt, Human
acagauuuguucuuuugggcua

SEQ ID NO: 1061662 - RNA, 22 nt, Human
cuccugcaagccuccccaagca

SEQ ID NO: 1061663 - RNA, 22 nt, Human
caggcugccuggaagaggacug

SEQ ID NO: 1061664 - RNA, 20 nt, Human
cagggcucugggccuggccu

SEQ ID NO: 1061665 - RNA, 22 nt, Human
uggaacacaucuaaggaagcag

SEQ ID NO: 1061666 - RNA, 23 nt, Human
uccaggcaugagcucuggaugga

SEQ ID NO: 1061667 - RNA, 22 nt, Human
caguguuucugaguuccagcuc

SEQ ID NO: 1061668 - RNA, 22 nt, Human
acaauucugaugguuucccagu

SEQ ID NO: 1061669 - RNA, 22 nt, Human
ccuggggaagucacuucucuuu

SEQ ID NO: 1061670 - RNA, 22 nt, Human
uaauuucuggagggagaaagag

SEQ ID NO: 1061671 - RNA, 22 nt, Human
cacauaauugaacgugaugagu

SEQ ID NO: 1061672 - RNA, 22 nt, Human
uccuggcagugcuuguuuugga

SEQ ID NO: 1061673 - RNA, 22 nt, Human
ucaagagauugaauaauaacug

SEQ ID NO: 1061674 - RNA, 22 nt, Human
uucucuuuuagaggcuccauga

SEQ ID NO: 1061675 - RNA, 20 nt, Human
aaaagagugcuucaacugcu

SEQ ID NO: 1061676 - RNA, 22 nt, Human
cugguggagagugggcucugga

SEQ ID NO: 1061677 - RNA, 22 nt, Human
uuggaagacagugaaacagcac

SEQ ID NO: 1061678 - RNA, 22 nt, Human
uaucuguuaugggcugaauugc

SEQ ID NO: 1061679 - RNA, 22 nt, Human
uuucauaaacaguagaagacua

SEQ ID NO: 1061680 - RNA, 22 nt, Human
accaggcaacugugaaugggcu

SEQ ID NO: 1061681 - RNA, 22 nt, Human
uguaugaaaaggaauagauuga

SEQ ID NO: 1061682 - RNA, 22 nt, Human
aaauuauuaugccccucuauaa

SEQ ID NO: 1061683 - RNA, 22 nt, Human
uuucucauagucaugccucuua

SEQ ID NO: 1061684 - RNA, 22 nt, Human
aagcaacucccuccucauuuuu

SEQ ID NO: 1061685 - RNA, 22 nt, Human
ccagcuuuuggggugacaauuu

SEQ ID NO: 1061686 - RNA, 22 nt, Human
caugaaaucugaguauguuucc

SEQ ID NO: 1061687 - RNA, 22 nt, Human
aauacuauguugugacacauga

SEQ ID NO: 1061688 - RNA, 22 nt, Human
gcagagaguugggcugcgccag

SEQ ID NO: 1061689 - RNA, 21 nt, Human
ucuggcaggcacgggcccagc

SEQ ID NO: 1061690 - RNA, 22 nt, Human
auaugugaaugauaucacuuug

SEQ ID NO: 1061691 - RNA, 22 nt, Human
ucacauacacuaggauauuuuu

SEQ ID NO: 1061692 - RNA, 22 nt, Human
agggcucccgcgguguccggga

SEQ ID NO: 1061693 - RNA, 22 nt, Human
cuguggcugcguaggucuggca

SEQ ID NO: 1061694 - RNA, 22 nt, Human
ggcaggcugggagucaucagag

SEQ ID NO: 1061695 - RNA, 22 nt, Human
ucuggggaugaggaccuagaug

SEQ ID NO: 1061696 - RNA, 22 nt, Human
uccaggcaugguguaauuuugc

SEQ ID NO: 1061697 - RNA, 22 nt, Human
auaguguuacccuucuuaaagu

SEQ ID NO: 1061698 - RNA, 22 nt, Human
gccugcagcugcuuccacacac

SEQ ID NO: 1061699 - RNA, 20 nt, Human
uguucugucgucuuucuuca

SEQ ID NO: 1061700 - RNA, 22 nt, Human
acaauauuguacccagaaguuu

SEQ ID NO: 1061701 - RNA, 22 nt, Human
cauguuaaaauauacauucuga

SEQ ID NO: 1061702 - RNA, 22 nt, Human
gccugcagacguguuuuccuca

SEQ ID NO: 1061703 - RNA, 22 nt, Human
ccuaggaacccccaggcuucug

SEQ ID NO: 1061704 - RNA, 22 nt, Human
ccagugcauaaucaauacagcc

SEQ ID NO: 1061705 - RNA, 22 nt, Human
ggggaccugggcuucaaggguu

SEQ ID NO: 1061706 - RNA, 22 nt, Human
gugcagggcuggcaccggaggc

SEQ ID NO: 1061707 - RNA, 20 nt, Human
agggucugaugugguggccc

SEQ ID NO: 1061708 - RNA, 22 nt, Human
aauaacuuaagaaauuucccca

SEQ ID NO: 1061709 - RNA, 22 nt, Human
ugggcugcuucuauuggugguc

SEQ ID NO: 1061710 - RNA, 22 nt, Human
uacacauccauguuuugacuuu

SEQ ID NO: 1061711 - RNA, 22 nt, Human
uccuuucccuuuccauccuggc

SEQ ID NO: 1061712 - RNA, 22 nt, Human
ucuguuuaggcaaaauagcuac

SEQ ID NO: 1061713 - RNA, 22 nt, Human
ugcuucuggaaacaguggcugu

SEQ ID NO: 1061714 - RNA, 20 nt, Human
uucaugggagcaaagaggcc

SEQ ID NO: 1061715 - RNA, 22 nt, Human
cuuauaaaguccaucugaacaa

SEQ ID NO: 1061716 - RNA, 22 nt, Human
agagccaggugcugcuguuuga

SEQ ID NO: 1061717 - RNA, 21 nt, Human
gaaaagcaagggaguagaaca

SEQ ID NO: 1061718 - RNA, 21 nt, Human
caauaaacugcacauugagac

SEQ ID NO: 1061719 - RNA, 22 nt, Human
cccuuccuugauuuuaacugga

SEQ ID NO: 1061720 - RNA, 22 nt, Human
ccugggcucaagugaugguccc

SEQ ID NO: 1061721 - RNA, 22 nt, Human
aacaaacaaacauuuugucauc

SEQ ID NO: 1061722 - RNA, 22 nt, Human
aaaguugugaaaccgaacaugu

SEQ ID NO: 1061723 - RNA, 22 nt, Human
gaaacuuacuuacucacauuuc

SEQ ID NO: 1061724 - RNA, 19 nt, Human
cuccaaguuaagagggagg

SEQ ID NO: 1061725 - RNA, 22 nt, Human
aagcgccaugguuccugcgcag

SEQ ID NO: 1061726 - RNA, 22 nt, Human
aagauauagauaaaacuaugca

SEQ ID NO: 1061727 - RNA, 22 nt, Human
ccugggcuucugucuagauguu

SEQ ID NO: 1061728 - RNA, 22 nt, Human
uccugcagccaagggucaucga

SEQ ID NO: 1061729 - RNA, 22 nt, Human
auguggcugguaguugacaacu

SEQ ID NO: 1061730 - RNA, 22 nt, Human
aucagagauggcuccagugcuc

SEQ ID NO: 1061731 - RNA, 22 nt, Human
uucagagagaaaccagugggaa

SEQ ID NO: 1061732 - RNA, 21 nt, Human
gcccccuggacuccucaucca

SEQ ID NO: 1061733 - RNA, 20 nt, Human
uuucacaucugucccuuuaa

SEQ ID NO: 1061734 - RNA, 22 nt, Human
uauuugauagagauaaaugaua

SEQ ID NO: 1061735 - RNA, 22 nt, Human
cugggcuuugguacugugauua

SEQ ID NO: 1061736 - RNA, 22 nt, Human
uccugagcacagagacaaggaa

SEQ ID NO: 1061737 - RNA, 22 nt, Human
ucccacacuacacgguuguugg

SEQ ID NO: 1061738 - RNA, 22 nt, Human
gggcugacaguuuccccugaaa

SEQ ID NO: 1061739 - RNA, 22 nt, Human
agcucccagaagccagagucgg

SEQ ID NO: 1061740 - RNA, 22 nt, Human
acagcuuuuaugggaccagcca

SEQ ID NO: 1061741 - RNA, 22 nt, Human
ggcucccugccuguccucaguc

SEQ ID NO: 1061742 - RNA, 20 nt, Human
agcaggcugcagggugaaau

SEQ ID NO: 1061743 - RNA, 22 nt, Human
uacauuccuucguuuagagauu

SEQ ID NO: 1061744 - RNA, 22 nt, Human
aucucauaacucauuugaagac

SEQ ID NO: 1061745 - RNA, 22 nt, Human
gcuggcagacugggggcagaac

SEQ ID NO: 1061746 - RNA, 22 nt, Human
cuuucacagcacaagccugccu

SEQ ID NO: 1061747 - RNA, 22 nt, Human
aaugaagccagcugggaugcga

SEQ ID NO: 1061748 - RNA, 22 nt, Human
augcagcugugggcaagaaaug

SEQ ID NO: 1061749 - RNA, 22 nt, Human
ccagagagauugcuucuaaaga

SEQ ID NO: 1061750 - RNA, 22 nt, Human
ugcccccugguggccagagccg

SEQ ID NO: 1061751 - RNA, 22 nt, Human
aaucuucagugucuaaaaagca

SEQ ID NO: 1061752 - RNA, 22 nt, Human
uguaaagguaggugcaaaauga

SEQ ID NO: 1061753 - RNA, 22 nt, Human
acauacacaagcguacaugaac

SEQ ID NO: 1061754 - RNA, 22 nt, Human
uuuagggaaauugaggguuaag

SEQ ID NO: 1061755 - RNA, 22 nt, Human
accugcagcugagaaaaugacu

SEQ ID NO: 1061756 - RNA, 22 nt, Human
gagcucagacucgggccugggg

SEQ ID NO: 1061757 - RNA, 22 nt, Human
gagggcucacugagaaagcagu

SEQ ID NO: 1061758 - RNA, 22 nt, Human
ugcagggagggcccagcaaucu

SEQ ID NO: 1061759 - RNA, 22 nt, Human
aagggcucugggcuacgcacug

SEQ ID NO: 1061760 - RNA, 22 nt, Human
uuuaaaaaacuagucugagucu

SEQ ID NO: 1061761 - RNA, 22 nt, Human
auuuuccucaagccucuggaag

SEQ ID NO: 1061762 - RNA, 18 nt, Human
cccagcuuagcgccccuc

SEQ ID NO: 1061763 - RNA, 22 nt, Human
uuauuagcugggcuucagggug

SEQ ID NO: 1061764 - RNA, 22 nt, Human
cagggacaauggcagagccuga

SEQ ID NO: 1061765 - RNA, 22 nt, Human
acuggcaguggcagcagaaaga

SEQ ID NO: 1061766 - RNA, 22 nt, Human
ugcagggaaucuguggcuggac

SEQ ID NO: 1061767 - RNA, 22 nt, Human
uuccaagugcugaggacaguag

SEQ ID NO: 1061768 - RNA, 22 nt, Human
cuggggacucauucagagcaua

SEQ ID NO: 1061769 - RNA, 17 nt, Human
aaguccagaguugagca

SEQ ID NO: 1061770 - RNA, 22 nt, Human
agcuuuaugcuuccuacaagcu

SEQ ID NO: 1061771 - RNA, 22 nt, Human
uuagccauguugaagauuuaga

SEQ ID NO: 1061772 - RNA, 22 nt, Human
uggaaagaggaagugcccagca

SEQ ID NO: 1061773 - RNA, 22 nt, Human
gcuggcaggauaacuucuaagc

SEQ ID NO: 1061774 - RNA, 23 nt, Human
ucagagagcuguugagagcugcc

SEQ ID NO: 1061775 - RNA, 22 nt, Human
uguaaaauaauucuccauguuu

SEQ ID NO: 1061776 - RNA, 22 nt, Human
uuacauuuugggguaaggauaa

SEQ ID NO: 1061777 - RNA, 20 nt, Human
uuucuggguacucucccucu

SEQ ID NO: 1061778 - RNA, 22 nt, Human
cugccugcaugcugccauagcu

SEQ ID NO: 1061779 - RNA, 22 nt, Human
gccagguugcugacgacgaucu

SEQ ID NO: 1061780 - RNA, 22 nt, Human
aaaauccugcugacucgagaug

SEQ ID NO: 1061781 - RNA, 22 nt, Human
uuauuuuuaaaaguucacacag

SEQ ID NO: 1061782 - RNA, 19 nt, Human
ugcuucuggaaugcaaggc

SEQ ID NO: 1061783 - RNA, 18 nt, Human
acaaaugugucacaggaa

SEQ ID NO: 1061784 - RNA, 22 nt, Human
ggccucucaugcccagagccaa

SEQ ID NO: 1061785 - RNA, 22 nt, Human
ucuuccaggagggcauuucuuu

SEQ ID NO: 1061786 - RNA, 22 nt, Human
cauuagggucucucagcugaau

SEQ ID NO: 1061787 - RNA, 22 nt, Human
gccacauagaggaggauauuaa

SEQ ID NO: 1061788 - RNA, 23 nt, Human
uccugcugaaagcuccagcuggc

SEQ ID NO: 1061789 - RNA, 22 nt, Human
uggggaccagauuagaccaugg

SEQ ID NO: 1061790 - RNA, 22 nt, Human
cagggagcuggugccagccgac

SEQ ID NO: 1061791 - RNA, 22 nt, Human
gcuggcaggagaaacggggugc

SEQ ID NO: 1061792 - RNA, 22 nt, Human
aaaauuuugcccuauccuucau

SEQ ID NO: 1061793 - RNA, 19 nt, Human
aggcuuggcuagauuuacu

SEQ ID NO: 1061794 - RNA, 22 nt, Human
uucugucagcugcuuugucuca

SEQ ID NO: 1061795 - RNA, 22 nt, Human
uuguuucauggggauguuuauu

SEQ ID NO: 1061796 - RNA, 22 nt, Human
aauuauguagccauaugaaaca

SEQ ID NO: 1061797 - RNA, 22 nt, Human
auaacuuagaguaggcaaaagu

SEQ ID NO: 1061798 - RNA, 22 nt, Human
ggagcugaaccccaucgugcug

SEQ ID NO: 1061799 - RNA, 22 nt, Human
agggacuugaugucagggagau

SEQ ID NO: 1061800 - RNA, 22 nt, Human
uaauacuguauacugcaaauuu

SEQ ID NO: 1061801 - RNA, 22 nt, Human
gacccagccugguuuuuauagg

SEQ ID NO: 1061802 - RNA, 22 nt, Human
gcuccaggaggaugaccuuccu

SEQ ID NO: 1061803 - RNA, 22 nt, Human
cccuuccucccaggcuucugug

SEQ ID NO: 1061804 - RNA, 22 nt, Human
gaaguucuuagucucauuugca

SEQ ID NO: 1061805 - RNA, 22 nt, Human
aaguguuuacuuaaagucaugg

SEQ ID NO: 1061806 - RNA, 22 nt, Human
ggcaggcuuugagaaagagcau

SEQ ID NO: 1061807 - RNA, 22 nt, Human
cugagccagggccacacaugga

SEQ ID NO: 1061808 - RNA, 22 nt, Human
uuacaguuuaguccaagccaga

SEQ ID NO: 1061809 - RNA, 22 nt, Human
agggccucuaccauccaagguu

SEQ ID NO: 1061810 - RNA, 23 nt, Human
cacacccaucacuaagagcuccu

SEQ ID NO: 1061811 - RNA, 22 nt, Human
caugaagcacagcucucuuuuu

SEQ ID NO: 1061812 - RNA, 22 nt, Human
gguuucaacuuuugugaggaau

SEQ ID NO: 1061813 - RNA, 22 nt, Human
uauucccauuccacuuaucaag

SEQ ID NO: 1061814 - RNA, 22 nt, Human
ucaggguugcugugaucagucc

SEQ ID NO: 1061815 - RNA, 22 nt, Human
gagguggcuccuucagggaaua

SEQ ID NO: 1061816 - RNA, 22 nt, Human
ucccaggcuaggccucugcguu

SEQ ID NO: 1061817 - RNA, 22 nt, Human
cuuaaauuuucaucuacaagaa

SEQ ID NO: 1061818 - RNA, 22 nt, Human
uucccacauucuuuacauucau

SEQ ID NO: 1061819 - RNA, 22 nt, Human
aaguauuucguucugaaaaagu

SEQ ID NO: 1061820 - RNA, 22 nt, Human
agagcauccaucggccaggacc

SEQ ID NO: 1061821 - RNA, 22 nt, Human
uucucuuuucaccaguugcuaa

SEQ ID NO: 1061822 - RNA, 22 nt, Human
cuguccuccagacgacaguccc

SEQ ID NO: 1061823 - RNA, 22 nt, Human
accugcagccacuucucuccuu

SEQ ID NO: 1061824 - RNA, 22 nt, Human
aggaggcugaacuagggucugg

SEQ ID NO: 1061825 - RNA, 21 nt, Human
agaugcugaugcugcaggucc

SEQ ID NO: 1061826 - RNA, 22 nt, Human
cuucuacacaucccucuugcuu

SEQ ID NO: 1061827 - RNA, 22 nt, Human
ugcacaggaggcuguggagaag

SEQ ID NO: 1061828 - RNA, 22 nt, Human
uacacaucucugucaguaguga

SEQ ID NO: 1061829 - RNA, 22 nt, Human
uuccaggcuucucuggggcguc

SEQ ID NO: 1061830 - RNA, 22 nt, Human
cagagcauuuggaagccacgug

SEQ ID NO: 1061831 - RNA, 22 nt, Human
uccuggcagaaauggggcugug

SEQ ID NO: 1061832 - RNA, 22 nt, Human
ccuugcucaagcuagugacggg

SEQ ID NO: 1061833 - RNA, 22 nt, Human
auuauuagugauguuguuacug

SEQ ID NO: 1061834 - RNA, 22 nt, Human
guccucugauuucuagguauau

SEQ ID NO: 1061835 - RNA, 22 nt, Human
cagucucuuuauccaccaagcc

SEQ ID NO: 1061836 - RNA, 22 nt, Human
aagggcucccaacucaucuuuu

SEQ ID NO: 1061837 - RNA, 22 nt, Human
aaauuucaguuggaaugagcuc

SEQ ID NO: 1061838 - RNA, 22 nt, Human
uuggaaaaacacgauagugguu

SEQ ID NO: 1061839 - RNA, 23 nt, Human
acuccccagucucuucuugccaa

SEQ ID NO: 1061840 - RNA, 22 nt, Human
uucacaauggcaaaccauuaaa

SEQ ID NO: 1061841 - RNA, 22 nt, Human
ucuggcaguaauaggggagaga

SEQ ID NO: 1061842 - RNA, 22 nt, Human
cuggggacuuugguucuccaug

SEQ ID NO: 1061843 - RNA, 22 nt, Human
uggcaggcaaguucagcuccac

SEQ ID NO: 1061844 - RNA, 22 nt, Human
acacaucucaggggacacucuc

SEQ ID NO: 1061845 - RNA, 22 nt, Human
ucauggcacuuagcacaguccu

SEQ ID NO: 1061846 - RNA, 22 nt, Human
cuccuggcaggcugagugaaau

SEQ ID NO: 1061847 - RNA, 18 nt, Human
uuucacagauucaugacu

SEQ ID NO: 1061848 - RNA, 22 nt, Human
agguuuauguuuggugcaggag

SEQ ID NO: 1061849 - RNA, 22 nt, Human
acugauacgguuuuagagucca

SEQ ID NO: 1061850 - RNA, 22 nt, Human
uucauaaugagguccuagaggc

SEQ ID NO: 1061851 - RNA, 22 nt, Human
agggcuccgggccaccggccug

SEQ ID NO: 1061852 - RNA, 21 nt, Human
cuguccaguaauuccuggcac

SEQ ID NO: 1061853 - RNA, 22 nt, Human
gcagggacaucuucagaucacu

SEQ ID NO: 1061854 - RNA, 22 nt, Human
cuuuucauuguuuguacaugca

SEQ ID NO: 1061855 - RNA, 22 nt, Human
ggcaggcucuuggccuuaugag

SEQ ID NO: 1061856 - RNA, 22 nt, Human
ucagggaccccucugaguggag

SEQ ID NO: 1061857 - RNA, 22 nt, Human
uuguuucaaauauuucagaaua

SEQ ID NO: 1061858 - RNA, 22 nt, Human
acccagccacagcauugaggga

SEQ ID NO: 1061859 - RNA, 22 nt, Human
ccucugccaccucccacgaggc

SEQ ID NO: 1061860 - RNA, 23 nt, Human
ucagagaggcccccugcagagau

SEQ ID NO: 1061861 - RNA, 22 nt, Human
cuuggcagagggcugggcucag

SEQ ID NO: 1061862 - RNA, 22 nt, Human
ggugccagaguggcccaggggc

SEQ ID NO: 1061863 - RNA, 22 nt, Human
auguuaaaugguuuauuauuaa

SEQ ID NO: 1061864 - RNA, 22 nt, Human
acagcucuguguauugucaucu

SEQ ID NO: 1061865 - RNA, 22 nt, Human
aauguauggauucaugucugug

SEQ ID NO: 1061866 - RNA, 22 nt, Human
ccaucacaguccccaucgugau

SEQ ID NO: 1061867 - RNA, 22 nt, Human
ggccucagaccggagcuggcca

SEQ ID NO: 1061868 - RNA, 22 nt, Human
cagcucagucuugaagcacugg

SEQ ID NO: 1061869 - RNA, 22 nt, Human
caggacauugauccauuggcac

SEQ ID NO: 1061870 - RNA, 22 nt, Human
uucugucauccuuucuagaugu

SEQ ID NO: 1061871 - RNA, 22 nt, Human
aaauauagcaauuaugccuacu

SEQ ID NO: 1061872 - RNA, 22 nt, Human
aacaugauggggaagaacaaga

SEQ ID NO: 1061873 - RNA, 19 nt, Human
ugcuucuggaaccaugauc

SEQ ID NO: 1061874 - RNA, 20 nt, Human
guguuucaugugauacaaug

SEQ ID NO: 1061875 - RNA, 23 nt, Human
ugaaauauucuuuugcaugagcu

SEQ ID NO: 1061876 - RNA, 22 nt, Human
ugcaggcuccaggugcacauau

SEQ ID NO: 1061877 - RNA, 18 nt, Human
gaguguggcacugggccc

SEQ ID NO: 1061878 - RNA, 22 nt, Human
ccugggcugaagucaagugugg

SEQ ID NO: 1061879 - RNA, 23 nt, Human
cuuuucauugccuuagcgcagag

SEQ ID NO: 1061880 - RNA, 22 nt, Human
uugggaagaauggaggugguua

SEQ ID NO: 1061881 - RNA, 22 nt, Human
auccuggcccagguguggaggg

SEQ ID NO: 1061882 - RNA, 22 nt, Human
uccaggcaaggauaauaaacau

SEQ ID NO: 1061883 - RNA, 22 nt, Human
ggcaaggggucaggcugagaca

SEQ ID NO: 1061884 - RNA, 22 nt, Human
gcuuuauuuugugagggauuac

SEQ ID NO: 1061885 - RNA, 22 nt, Human
ucaggcucagguuaggggccaa

SEQ ID NO: 1061886 - RNA, 22 nt, Human
ucuggcagugauuucugugauc

SEQ ID NO: 1061887 - RNA, 17 nt, Human
ugcuggcaacauacaaa

SEQ ID NO: 1061888 - RNA, 22 nt, Human
ccucugcaaagaauuugucucc

SEQ ID NO: 1061889 - RNA, 22 nt, Human
gacccaggguggucaccugaaa

SEQ ID NO: 1061890 - RNA, 22 nt, Human
aguaugaaucucuuuauucugc

SEQ ID NO: 1061891 - RNA, 22 nt, Human
ccagcucucuuugaagcauaaa

SEQ ID NO: 1061892 - RNA, 22 nt, Human
cuccagggggcauccacacagc

SEQ ID NO: 1061893 - RNA, 22 nt, Human
uccugcagcucugagaagcauc

SEQ ID NO: 1061894 - RNA, 22 nt, Human
augcuacagcaucucucaucag

SEQ ID NO: 1061895 - RNA, 22 nt, Human
gacccugccaugagugacaggg

SEQ ID NO: 1061896 - RNA, 22 nt, Human
aauaaucucccuuuuuguaugu

SEQ ID NO: 1061897 - RNA, 22 nt, Human
uuaugaaguuccuguuacagug

SEQ ID NO: 1061898 - RNA, 22 nt, Human
aagauaauauucauuaacuaga

SEQ ID NO: 1061899 - RNA, 22 nt, Human
aaugaagcaguccaucugcucu

SEQ ID NO: 1061900 - RNA, 22 nt, Human
uugguuccuucugaaaguauug

SEQ ID NO: 1061901 - RNA, 22 nt, Human
aaauuucuggaagugucagagu

SEQ ID NO: 1061902 - RNA, 22 nt, Human
cugagggagcugcuggccuugg

SEQ ID NO: 1061903 - RNA, 23 nt, Human
acuuuauugaccccaggucaguu

SEQ ID NO: 1061904 - RNA, 22 nt, Human
uuccuggcgccacggagccggu

SEQ ID NO: 1061905 - RNA, 22 nt, Human
cucucugggcccaguuggcacc

SEQ ID NO: 1061906 - RNA, 22 nt, Human
uagcuuuagugaaaaauaucag

SEQ ID NO: 1061907 - RNA, 22 nt, Human
uguuggaauuaggauacagagg

SEQ ID NO: 1061908 - RNA, 22 nt, Human
ccagagagguagcuuacccucu

SEQ ID NO: 1061909 - RNA, 22 nt, Human
gcaaauacauguugagcaccua

SEQ ID NO: 1061910 - RNA, 22 nt, Human
gcuaggaaucggacccaggaag

SEQ ID NO: 1061911 - RNA, 22 nt, Human
gugugaaagcuuguccucugua

SEQ ID NO: 1061912 - RNA, 22 nt, Human
guccucuguagggcugggccac

SEQ ID NO: 1061913 - RNA, 22 nt, Human
augggcuguccuaguccagccc

SEQ ID NO: 1061914 - RNA, 22 nt, Human
guuuuauaauugcuucauaaga

SEQ ID NO: 1061915 - RNA, 22 nt, Human
ugcuucugaacucagcaugugg

SEQ ID NO: 1061916 - RNA, 22 nt, Human
uucuggggacauaacaguaagc

SEQ ID NO: 1061917 - RNA, 22 nt, Human
aaguguuuauuuauaacgaucu

SEQ ID NO: 1061918 - RNA, 22 nt, Human
cauuuguaucugggcugcugug

SEQ ID NO: 1061919 - RNA, 22 nt, Human
gaugaagccugacuucucggug

SEQ ID NO: 1061920 - RNA, 22 nt, Human
agucacaguuccuacccaguaa

SEQ ID NO: 1061921 - RNA, 22 nt, Human
agggaccugucaaugacaguua

SEQ ID NO: 1061922 - RNA, 22 nt, Human
acacauaagccuaaucaucucc

SEQ ID NO: 1061923 - RNA, 22 nt, Human
ugggccaggucugugucagcug

SEQ ID NO: 1061924 - RNA, 22 nt, Human
aaaguucuaaaacucuuuguga

SEQ ID NO: 1061925 - RNA, 22 nt, Human
uaugacuuauuucaucaguucu

SEQ ID NO: 1061926 - RNA, 22 nt, Human
uuaggaaguguguccagaagcg

SEQ ID NO: 1061927 - RNA, 21 nt, Human
ggcuaggaugcugggguuucc

SEQ ID NO: 1061928 - RNA, 22 nt, Human
guggcaggggcgggcuguuccg

SEQ ID NO: 1061929 - RNA, 22 nt, Human
acuguccaagcaugccuggcuu

SEQ ID NO: 1061930 - RNA, 22 nt, Human
ccagacccugcucuggggcucu

SEQ ID NO: 1061931 - RNA, 22 nt, Human
cugggcugcggugguagguugu

SEQ ID NO: 1061932 - RNA, 22 nt, Human
aaguuucaugauguaauuauug

SEQ ID NO: 1061933 - RNA, 22 nt, Human
guuuuauaugucucugcugaca

SEQ ID NO: 1061934 - RNA, 22 nt, Human
uccugcaggggcugaggaacca

SEQ ID NO: 1061935 - RNA, 22 nt, Human
ugucagaggcucagggucucag

SEQ ID NO: 1061936 - RNA, 17 nt, Human
ugcaggcuccugucccu

SEQ ID NO: 1061937 - RNA, 22 nt, Human
agaauccuguuuuacuucauca

SEQ ID NO: 1061938 - RNA, 22 nt, Human
gauaauauuagaagauacaaau

SEQ ID NO: 1061939 - RNA, 22 nt, Human
agacaaguucugugggucaccu

SEQ ID NO: 1061940 - RNA, 22 nt, Human
ucacauuuuuuacuggacuuaa

SEQ ID NO: 1061941 - RNA, 22 nt, Human
uccaggcacgaggcccugugca

SEQ ID NO: 1061942 - RNA, 22 nt, Human
accaggcaugauguggagcaca

SEQ ID NO: 1061943 - RNA, 22 nt, Human
auguaugagagauucuuuuauu

SEQ ID NO: 1061944 - RNA, 20 nt, Human
acaauauguagaugaauagc

SEQ ID NO: 1061945 - RNA, 22 nt, Human
ccagagaguaggaggcauuauu

SEQ ID NO: 1061946 - RNA, 20 nt, Human
uaacuuucuaugcuuucagc

SEQ ID NO: 1061947 - RNA, 22 nt, Human
uaauauuucuacccugcugccu

SEQ ID NO: 1061948 - RNA, 22 nt, Human
ccagagaguaucauggagagua

SEQ ID NO: 1061949 - RNA, 22 nt, Human
uucccacagagauuacauugaa

SEQ ID NO: 1061950 - RNA, 23 nt, Human
aaauuauugcucuucaauugccu

SEQ ID NO: 1061951 - RNA, 22 nt, Human
ucccugcccucagugcacccgg

SEQ ID NO: 1061952 - RNA, 22 nt, Human
ccaggccucuggcugcuuaguc

SEQ ID NO: 1061953 - RNA, 22 nt, Human
auugguggugaggacaugccag

SEQ ID NO: 1061954 - RNA, 22 nt, Human
acaggcaggcgggacagcccga

SEQ ID NO: 1061955 - RNA, 22 nt, Human
aaguaugugauacauguuaauu

SEQ ID NO: 1061956 - RNA, 22 nt, Human
ugccucucuaacccaugcccaa

SEQ ID NO: 1061957 - RNA, 22 nt, Human
gacacagaauuuacucccgaua

SEQ ID NO: 1061958 - RNA, 22 nt, Human
ugcagagagaccccugggccag

SEQ ID NO: 1061959 - RNA, 22 nt, Human
uccuucccaggugucgccgccu

SEQ ID NO: 1061960 - RNA, 22 nt, Human
acaugauuuuuaaagagauaau

SEQ ID NO: 1061961 - RNA, 22 nt, Human
aagagagagugcgcucacagaa

SEQ ID NO: 1061962 - RNA, 22 nt, Human
cagugagggcauucagugcugg

SEQ ID NO: 1061963 - RNA, 22 nt, Human
uucugucauuuagcauugucau

SEQ ID NO: 1061964 - RNA, 22 nt, Human
cccagcuugcaaauggguugcu

SEQ ID NO: 1061965 - RNA, 22 nt, Human
ccagagacgucggucagggcgc

SEQ ID NO: 1061966 - RNA, 22 nt, Human
cuggccagagguuccucugccc

SEQ ID NO: 1061967 - RNA, 22 nt, Human
acacagccgugaaucugcuucu

SEQ ID NO: 1061968 - RNA, 22 nt, Human
auguuucaugacugagcaaaau

SEQ ID NO: 1061969 - RNA, 22 nt, Human
ugucaacacaccuaucucaauu

SEQ ID NO: 1061970 - RNA, 22 nt, Human
ccugggcuuucggcggcuuccu

SEQ ID NO: 1061971 - RNA, 22 nt, Human
aggaggcugggcacaguggccu

SEQ ID NO: 1061972 - RNA, 22 nt, Human
gcuggggaggcagcagagaaca

SEQ ID NO: 1061973 - RNA, 22 nt, Human
ugcauacacaagcauacaugua

SEQ ID NO: 1061974 - RNA, 22 nt, Human
ccagcucucaaggcucccuggg

SEQ ID NO: 1061975 - RNA, 22 nt, Human
auuuauuaccucggaguuucug

SEQ ID NO: 1061976 - RNA, 22 nt, Human
agucacuuccagacaccugccu

SEQ ID NO: 1061977 - RNA, 22 nt, Human
ccaggcagggcucaaggaaccu

SEQ ID NO: 1061978 - RNA, 22 nt, Human
augggcugugggacccuggacc

SEQ ID NO: 1061979 - RNA, 22 nt, Human
ucucuuaauuuuggaauagugu

SEQ ID NO: 1061980 - RNA, 22 nt, Human
ggccucagaaauagaguaaaau

SEQ ID NO: 1061981 - RNA, 22 nt, Human
acaugacuuuucucuuccagag

SEQ ID NO: 1061982 - RNA, 22 nt, Human
uacagagacuuuauggcacaaa

SEQ ID NO: 1061983 - RNA, 22 nt, Human
cccugcagaucagugagaacuu

SEQ ID NO: 1061984 - RNA, 22 nt, Human
gcugggcugagcuagacuuggc

SEQ ID NO: 1061985 - RNA, 22 nt, Human
guaugaaguuggacuguauaaa

SEQ ID NO: 1061986 - RNA, 22 nt, Human
acacacuggcccccaguacuga

SEQ ID NO: 1061987 - RNA, 22 nt, Human
ccugggcucuauccugacccag

SEQ ID NO: 1061988 - RNA, 22 nt, Human
cucagccccaauucuccccauu

SEQ ID NO: 1061989 - RNA, 22 nt, Human
ucuggggaugagguccagugau

SEQ ID NO: 1061990 - RNA, 22 nt, Human
ucuggcagaaggcagaaauuca

SEQ ID NO: 1061991 - RNA, 21 nt, Human
ugucagagcuuguaggacauu

SEQ ID NO: 1061992 - RNA, 22 nt, Human
ucacauuucugauuauaccaaa

SEQ ID NO: 1061993 - RNA, 22 nt, Human
acagaccaaguuuccagcaggu

SEQ ID NO: 1061994 - RNA, 22 nt, Human
gaggugagaagggggucagaug

SEQ ID NO: 1061995 - RNA, 22 nt, Human
acagagagcugugauugaguua

SEQ ID NO: 1061996 - RNA, 21 nt, Human
auucagaaagggaauaaacuc

SEQ ID NO: 1061997 - RNA, 22 nt, Human
ucuggggagugccuaaguggaa

SEQ ID NO: 1061998 - RNA, 21 nt, Human
cccugcaggccagggcugagc

SEQ ID NO: 1061999 - RNA, 22 nt, Human
aggcaguguguagcuggaagag

SEQ ID NO: 1062000 - RNA, 22 nt, Human
gagcuuuaagggcacuggucuu

SEQ ID NO: 1062001 - RNA, 22 nt, Human
aaaauauuuuagggccaggaga

SEQ ID NO: 1062002 - RNA, 22 nt, Human
uggcaguggauaggggagcggu

SEQ ID NO: 1062003 - RNA, 21 nt, Human
ggccucagccaccuggcucug

SEQ ID NO: 1062004 - RNA, 22 nt, Human
agcaggggcuccuccacagcca

SEQ ID NO: 1062005 - RNA, 22 nt, Human
ugcagggagcucuggggugcag

SEQ ID NO: 1062006 - RNA, 22 nt, Human
gcugggcucaccaggccacuag

SEQ ID NO: 1062007 - RNA, 22 nt, Human
uuagacauguuugcuaaaauga

SEQ ID NO: 1062008 - RNA, 22 nt, Human
cuggcagggugggcuuugcuuu

SEQ ID NO: 1062009 - RNA, 23 nt, Human
caggacaugggaggaaguauggc

SEQ ID NO: 1062010 - RNA, 22 nt, Human
gcacccaguuugucucaggguu

SEQ ID NO: 1062011 - RNA, 22 nt, Human
aggacacacagaauacaaaucc

SEQ ID NO: 1062012 - RNA, 22 nt, Human
auagauauuugaguuguuucca

SEQ ID NO: 1062013 - RNA, 22 nt, Human
ucuccugucuucucagcacccc

SEQ ID NO: 1062014 - RNA, 22 nt, Human
gcuggcaguuuccucaccgagg

SEQ ID NO: 1062015 - RNA, 22 nt, Human
aaugauuggcacuagauacaca

SEQ ID NO: 1062016 - RNA, 22 nt, Human
uucuaccuacccucugcauaca

SEQ ID NO: 1062017 - RNA, 22 nt, Human
auuaaauuagcaaacugugaaa

SEQ ID NO: 1062018 - RNA, 22 nt, Human
agaggccggccgagcccauggg

SEQ ID NO: 1062019 - RNA, 22 nt, Human
aacuacauuguccuuucugaag

SEQ ID NO: 1062020 - RNA, 22 nt, Human
cuccucuguauugauugggacu

SEQ ID NO: 1062021 - RNA, 22 nt, Human
aaaagagugacugauaaguaua

SEQ ID NO: 1062022 - RNA, 22 nt, Human
cuuuauuccuacaagauuuucu

SEQ ID NO: 1062023 - RNA, 22 nt, Human
acugggcuguuuuuugagugga

SEQ ID NO: 1062024 - RNA, 22 nt, Human
cuccuggcacucaguguggaag

SEQ ID NO: 1062025 - RNA, 22 nt, Human
uccugcagcauccgucgucugu

SEQ ID NO: 1062026 - RNA, 22 nt, Human
aagucuguuugagugucacacu

SEQ ID NO: 1062027 - RNA, 22 nt, Human
uccugcagucugcacucugccu

SEQ ID NO: 1062028 - RNA, 22 nt, Human
gcuggcagaagagcugguucaa

SEQ ID NO: 1062029 - RNA, 22 nt, Human
agucucuuuaaucacagugucu

SEQ ID NO: 1062030 - RNA, 22 nt, Human
guccaggucuggacccugagcc

SEQ ID NO: 1062031 - RNA, 22 nt, Human
cuucuuaaauuggauugcuauu

SEQ ID NO: 1062032 - RNA, 22 nt, Human
cauauguauuucucauaauuag

SEQ ID NO: 1062033 - RNA, 22 nt, Human
auagggccuaaaaaguauugcu

SEQ ID NO: 1062034 - RNA, 22 nt, Human
aagaacuuccuaauauauuuuc

SEQ ID NO: 1062035 - RNA, 22 nt, Human
aaucuuuuaggggauccugagg

SEQ ID NO: 1062036 - RNA, 22 nt, Human
cccugcagugugaccucaccua

SEQ ID NO: 1062037 - RNA, 22 nt, Human
aauguaugugauuauuccucua

SEQ ID NO: 1062038 - RNA, 22 nt, Human
gggacccugggaggcuggcgca

SEQ ID NO: 1062039 - RNA, 19 nt, Human
ccaggccuccugggagguc

SEQ ID NO: 1062040 - RNA, 22 nt, Human
cuugggaggagaacaaagcucc

SEQ ID NO: 1062041 - RNA, 22 nt, Human
agggacccugaugacugaggag

SEQ ID NO: 1062042 - RNA, 22 nt, Human
cacauacauacguauguauaca

SEQ ID NO: 1062043 - RNA, 22 nt, Human
ccagcucugcauguuucccuug

SEQ ID NO: 1062044 - RNA, 22 nt, Human
ucccacacagcccgcucaccgg

SEQ ID NO: 1062045 - RNA, 22 nt, Human
cccuggcagagggggcaggugc

SEQ ID NO: 1062046 - RNA, 22 nt, Human
uuuuucauugcagccucucucc

SEQ ID NO: 1062047 - RNA, 22 nt, Human
gaaugaauagguguccagaugg

SEQ ID NO: 1062048 - RNA, 22 nt, Human
uagaaacaaugacaugcuugua

SEQ ID NO: 1062049 - RNA, 22 nt, Human
uuuccuaagguagugauaauuu

SEQ ID NO: 1062050 - RNA, 22 nt, Human
cuucugggcagaaguuuugaga

SEQ ID NO: 1062051 - RNA, 22 nt, Human
uccaggcaaagccuuguagacg

SEQ ID NO: 1062052 - RNA, 22 nt, Human
guguauaaugcuguuuguacau

SEQ ID NO: 1062053 - RNA, 22 nt, Human
ggagaagaggagcuggaagccu

SEQ ID NO: 1062054 - RNA, 22 nt, Human
cucuuaaagaauguuccagcug

SEQ ID NO: 1062055 - RNA, 22 nt, Human
gcuggcagagcucugggcuggg

SEQ ID NO: 1062056 - RNA, 20 nt, Human
acccagcucugugcccuggg

SEQ ID NO: 1062057 - RNA, 22 nt, Human
ccagccacugggccacugccag

SEQ ID NO: 1062058 - RNA, 22 nt, Human
uccugcaggccuguucccagua

SEQ ID NO: 1062059 - RNA, 22 nt, Human
ucuggcaggauaucgaagugaa

SEQ ID NO: 1062060 - RNA, 22 nt, Human
acuggaaaugagaugauaucag

SEQ ID NO: 1062061 - RNA, 22 nt, Human
gcagagaggauauuauugucca

SEQ ID NO: 1062062 - RNA, 22 nt, Human
uugauuucuuacucuuccaagg

SEQ ID NO: 1062063 - RNA, 22 nt, Human
cuuauuagaguuguguucuguu

SEQ ID NO: 1062064 - RNA, 20 nt, Human
ugcuuuaugcuauacuuugu

SEQ ID NO: 1062065 - RNA, 22 nt, Human
guuuauuagaguuuucugucug

SEQ ID NO: 1062066 - RNA, 22 nt, Human
cuugggcucagacuugaggaca

SEQ ID NO: 1062067 - RNA, 22 nt, Human
auguaugauauuuccaguauca

SEQ ID NO: 1062068 - RNA, 22 nt, Human
auacaugacucacacauucugc

SEQ ID NO: 1062069 - RNA, 22 nt, Human
acagagagaauuggguuuacag

SEQ ID NO: 1062070 - RNA, 23 nt, Human
gcugggcuuacucuuucagugag

SEQ ID NO: 1062071 - RNA, 22 nt, Human
ugcagggaaaguguuggcagca

SEQ ID NO: 1062072 - RNA, 22 nt, Human
acaucuucacugguuucuggaa

SEQ ID NO: 1062073 - RNA, 22 nt, Human
ugggcagggagcuggaaccaca

SEQ ID NO: 1062074 - RNA, 22 nt, Human
uuauuuaaaagugguaagauuc

SEQ ID NO: 1062075 - RNA, 22 nt, Human
caggcccucgcccgcagcgacc

SEQ ID NO: 1062076 - RNA, 22 nt, Human
acccacaccuccguauaucacu

SEQ ID NO: 1062077 - RNA, 18 nt, Human
cuccagggaacucaguca

SEQ ID NO: 1062078 - RNA, 22 nt, Human
ucuggggagucaaagagaccug

SEQ ID NO: 1062079 - RNA, 22 nt, Human
ccagagagcuacaaggcauaaa

SEQ ID NO: 1062080 - RNA, 22 nt, Human
ugaccugcagucaagaggggaa

SEQ ID NO: 1062081 - RNA, 22 nt, Human
uuguucaugguuguaaguuuga

SEQ ID NO: 1062082 - RNA, 22 nt, Human
ucccagggcacucacccucccu

SEQ ID NO: 1062083 - RNA, 22 nt, Human
aguaugaauggaaacuaccuau

SEQ ID NO: 1062084 - RNA, 20 nt, Human
uuuuccuucugaguauguug

SEQ ID NO: 1062085 - RNA, 22 nt, Human
uaugaagcucucacuguguguc

SEQ ID NO: 1062086 - RNA, 22 nt, Human
agcacaggcuuuggugugaggg

SEQ ID NO: 1062087 - RNA, 22 nt, Human
uucugucaaacucacaggccga

SEQ ID NO: 1062088 - RNA, 22 nt, Human
cccaggcaucccauuaaggagc

SEQ ID NO: 1062089 - RNA, 22 nt, Human
uuaugacaggaaaaucacagaa

SEQ ID NO: 1062090 - RNA, 22 nt, Human
cucugaauggacacuccagugu

SEQ ID NO: 1062091 - RNA, 22 nt, Human
ugcuuuauucccuucugaugug

SEQ ID NO: 1062092 - RNA, 22 nt, Human
ccuuuaaagacugcauaacuuc

SEQ ID NO: 1062093 - RNA, 19 nt, Human
uuuacucuccaaggugagu

SEQ ID NO: 1062094 - RNA, 22 nt, Human
gagccuccuccuggugugccga

SEQ ID NO: 1062095 - RNA, 22 nt, Human
uaccugcagcgggaauccauua

SEQ ID NO: 1062096 - RNA, 22 nt, Human
agucuucugaauaagaaucacu

SEQ ID NO: 1062097 - RNA, 22 nt, Human
cuguccagcuuggcuccugggg

SEQ ID NO: 1062098 - RNA, 22 nt, Human
auuuucaucauggguuuaacau

SEQ ID NO: 1062099 - RNA, 22 nt, Human
gccaggcaauguguuagaagcg

SEQ ID NO: 1062100 - RNA, 22 nt, Human
uuccaagucuaaguuauaaauc

SEQ ID NO: 1062101 - RNA, 22 nt, Human
uguaugaaucucauuuguuuaa

SEQ ID NO: 1062102 - RNA, 22 nt, Human
gaggccagaaugagcugaaugc

SEQ ID NO: 1062103 - RNA, 22 nt, Human
auuucacaaagaacagaugcag

SEQ ID NO: 1062104 - RNA, 22 nt, Human
accaugaucugcucugguguuu

SEQ ID NO: 1062105 - RNA, 22 nt, Human
gcagcuuuguggagaggcccau

SEQ ID NO: 1062106 - RNA, 22 nt, Human
gguuucaaaguggacaguuagu

SEQ ID NO: 1062107 - RNA, 22 nt, Human
ccugggcucaagcgaucuuguc

SEQ ID NO: 1062108 - RNA, 22 nt, Human
uacaaaaguaauuacgguuuuu

SEQ ID NO: 1062109 - RNA, 22 nt, Human
cccugcaggcucagacuggagu

SEQ ID NO: 1062110 - RNA, 22 nt, Human
cugcagggaacugaggcccaga

SEQ ID NO: 1062111 - RNA, 22 nt, Human
guuucauucggcagcucauaag

SEQ ID NO: 1062112 - RNA, 22 nt, Human
auguagaauuccuucuacuuug

SEQ ID NO: 1062113 - RNA, 22 nt, Human
ugggcuccguugccuggggcag

SEQ ID NO: 1062114 - RNA, 22 nt, Human
uguaaaaccaaaucaaucuagu

SEQ ID NO: 1062115 - RNA, 20 nt, Human
ucccaggcuccacccuagac

SEQ ID NO: 1062116 - RNA, 22 nt, Human
cuucauuaaccaaaaugcaaua

SEQ ID NO: 1062117 - RNA, 22 nt, Human
ccugggcuuacgaccucugacu

SEQ ID NO: 1062118 - RNA, 19 nt, Human
cuuauuagagugagagcuu

SEQ ID NO: 1062119 - RNA, 22 nt, Human
ugaagccacuuuccagaaucac

SEQ ID NO: 1062120 - RNA, 22 nt, Human
gcccacaccauuuauucuuugu

SEQ ID NO: 1062121 - RNA, 17 nt, Human
ugcuucuguauugcugg

SEQ ID NO: 1062122 - RNA, 22 nt, Human
gugcuaaaggguuaugaacaag

SEQ ID NO: 1062123 - RNA, 22 nt, Human
cagggcuccccgcaccgcagcc

SEQ ID NO: 1062124 - RNA, 22 nt, Human
uaugcacauucacacaaaaaug

SEQ ID NO: 1062125 - RNA, 22 nt, Human
gcuggcagcuggaaguugggcu

SEQ ID NO: 1062126 - RNA, 22 nt, Human
aauuugcaugaugagaacaaua

SEQ ID NO: 1062127 - RNA, 22 nt, Human
ucaggcucccugcugggcucug

SEQ ID NO: 1062128 - RNA, 22 nt, Human
uaugacauuauaaaggauuauu

SEQ ID NO: 1062129 - RNA, 22 nt, Human
gcuucugggcaccugaacagga

SEQ ID NO: 1062130 - RNA, 22 nt, Human
auuuauuaagcaucugcuaugu

SEQ ID NO: 1062131 - RNA, 22 nt, Human
ccuccuggcuuuucccauugaa

SEQ ID NO: 1062132 - RNA, 22 nt, Human
uaugaacugugagugugauggg

SEQ ID NO: 1062133 - RNA, 20 nt, Human
uucuuaaagaccucacuuug

SEQ ID NO: 1062134 - RNA, 22 nt, Human
gccaaaucuggauuuagcaaga

SEQ ID NO: 1062135 - RNA, 22 nt, Human
acaagguauccacauuaaaugu

SEQ ID NO: 1062136 - RNA, 22 nt, Human
gaagccucaacaucucugcguc

SEQ ID NO: 1062137 - RNA, 22 nt, Human
ccagagaccagaacauggggau

SEQ ID NO: 1062138 - RNA, 22 nt, Human
auuucauugaaguuaauucuuc

SEQ ID NO: 1062139 - RNA, 22 nt, Human
ggcuuugguagacacagauuga

SEQ ID NO: 1062140 - RNA, 20 nt, Human
uccaggcagcucagaguguc

SEQ ID NO: 1062141 - RNA, 22 nt, Human
uuccaagugcccauauuucauc

SEQ ID NO: 1062142 - RNA, 22 nt, Human
gaaaacuaacggaaaaguuagg

SEQ ID NO: 1062143 - RNA, 22 nt, Human
uuaaauuagucaagcuucucug

SEQ ID NO: 1062144 - RNA, 22 nt, Human
uagcauuucccaaaugcauuug

SEQ ID NO: 1062145 - RNA, 22 nt, Human
uucaaauuaccacauuugcuua

SEQ ID NO: 1062146 - RNA, 22 nt, Human
uaacacauauuugcaguaagca

SEQ ID NO: 1062147 - RNA, 22 nt, Human
gcacucuccuggcugccacagu

SEQ ID NO: 1062148 - RNA, 22 nt, Human
ggaccaggccagccucccugcg

SEQ ID NO: 1062149 - RNA, 22 nt, Human
gcuucuauuauuuggagcugag

SEQ ID NO: 1062150 - RNA, 22 nt, Human
caggcccugccuugagggaccu

SEQ ID NO: 1062151 - RNA, 22 nt, Human
gcacacaggggaguucucagaa

SEQ ID NO: 1062152 - RNA, 22 nt, Human
uccaggaggguuuucugccuuc

SEQ ID NO: 1062153 - RNA, 22 nt, Human
gugggcuucccuuaagccagag

SEQ ID NO: 1062154 - RNA, 16 nt, Human
ucacauacuuccuugc

SEQ ID NO: 1062155 - RNA, 22 nt, Human
gcagcuuucuaagcuuuauugc

SEQ ID NO: 1062156 - RNA, 22 nt, Human
aaagaguucuaugaucuuucca

SEQ ID NO: 1062157 - RNA, 22 nt, Human
ccaggcucaggccugcucguug

SEQ ID NO: 1062158 - RNA, 22 nt, Human
gguggcagaggugcaucagccc

SEQ ID NO: 1062159 - RNA, 22 nt, Human
acuggcagaggauagcacuaau

SEQ ID NO: 1062160 - RNA, 22 nt, Human
ucuggcagcucaguucaggucu

SEQ ID NO: 1062161 - RNA, 22 nt, Human
uuaacauuguccuuagcagauu

SEQ ID NO: 1062162 - RNA, 22 nt, Human
ugaacuuagugggaauaucucu

SEQ ID NO: 1062163 - RNA, 22 nt, Human
ucacaauacucacucaauggcu

SEQ ID NO: 1062164 - RNA, 22 nt, Human
ugugugaaggagccacuguuca

SEQ ID NO: 1062165 - RNA, 22 nt, Human
caauaguucgguccugaaggcc

SEQ ID NO: 1062166 - RNA, 22 nt, Human
ucagagagcuggugggcagagg

SEQ ID NO: 1062167 - RNA, 22 nt, Human
uaacacauuuuaagccauuuua

SEQ ID NO: 1062168 - RNA, 22 nt, Human
accaugaugcauccuuaaggaa

SEQ ID NO: 1062169 - RNA, 22 nt, Human
cuggcaugaaauggcaucucau

SEQ ID NO: 1062170 - RNA, 22 nt, Human
ugagcaucuuuuuacagguuua

SEQ ID NO: 1062171 - RNA, 22 nt, Human
ucaauaaaauuguuuuccuauc

SEQ ID NO: 1062172 - RNA, 22 nt, Human
cccaguuucaacuuuccagugg

SEQ ID NO: 1062173 - RNA, 22 nt, Human
acauuuuaauaugcuuagugug

SEQ ID NO: 1062174 - RNA, 22 nt, Human
uggaaauacuugccauaaaacu

SEQ ID NO: 1062175 - RNA, 22 nt, Human
acauuuuuauucaucaaagcag

SEQ ID NO: 1062176 - RNA, 20 nt, Human
uaguauuugcauaaggauag

SEQ ID NO: 1062177 - RNA, 22 nt, Human
ucugucaaaugagcaaguaacu

SEQ ID NO: 1062178 - RNA, 22 nt, Human
ugggcuuuaucaugggucuggu

SEQ ID NO: 1062179 - RNA, 22 nt, Human
auggcuagcaccgcguugcugg

SEQ ID NO: 1062180 - RNA, 22 nt, Human
ugcaggcuguaaucugaggcua

SEQ ID NO: 1062181 - RNA, 22 nt, Human
acaaaguuugugguauuccaag

SEQ ID NO: 1062182 - RNA, 22 nt, Human
aaacaucauaggcaugcaugau

SEQ ID NO: 1062183 - RNA, 20 nt, Human
aacacagauaccaaagguug

SEQ ID NO: 1062184 - RNA, 22 nt, Human
cucugaccauucccuugauuuu

SEQ ID NO: 1062185 - RNA, 22 nt, Human
cuccagggaugagacagaguag

SEQ ID NO: 1062186 - RNA, 22 nt, Human
acacaucaugccaaguuucacc

SEQ ID NO: 1062187 - RNA, 22 nt, Human
auguccagaguguccuggaaag

SEQ ID NO: 1062188 - RNA, 22 nt, Human
ugcuucugaguugcaggacuug

SEQ ID NO: 1062189 - RNA, 22 nt, Human
gagcauuuuugucugcauuuua

SEQ ID NO: 1062190 - RNA, 22 nt, Human
ugggcuucugauguugagugcu

SEQ ID NO: 1062191 - RNA, 22 nt, Human
cuguugcaucauggcucuuaau

SEQ ID NO: 1062192 - RNA, 22 nt, Human
guuguuuuuguucucuauagcu

SEQ ID NO: 1062193 - RNA, 22 nt, Human
uagcauuuauuccagauuugga

SEQ ID NO: 1062194 - RNA, 22 nt, Human
ucuggcagugaagucaugaggu

SEQ ID NO: 1062195 - RNA, 22 nt, Human
acauuuagaguucuuuacucca

SEQ ID NO: 1062196 - RNA, 22 nt, Human
cacacagaugguaagggaggga

SEQ ID NO: 1062197 - RNA, 22 nt, Human
aaauaguucagccacggugacu

SEQ ID NO: 1062198 - RNA, 22 nt, Human
gccaggcaggccacgcuguguu

SEQ ID NO: 1062199 - RNA, 19 nt, Human
ccagagacauuggcaucuu

SEQ ID NO: 1062200 - RNA, 22 nt, Human
ucacauuuuauaucucugguuu

SEQ ID NO: 1062201 - RNA, 22 nt, Human
ugcuccagugagcuggccaucc

SEQ ID NO: 1062202 - RNA, 22 nt, Human
ggcucccacccauagggcgagu

SEQ ID NO: 1062203 - RNA, 22 nt, Human
accaggcagcugggggugaugu

SEQ ID NO: 1062204 - RNA, 22 nt, Human
ccugggcucgcgcacuucaccc

SEQ ID NO: 1062205 - RNA, 22 nt, Human
caguguggugugcacagcuuag

SEQ ID NO: 1062206 - RNA, 22 nt, Human
uccaggcaugucccaagccgga

SEQ ID NO: 1062207 - RNA, 18 nt, Human
uccugccugugccccagg

SEQ ID NO: 1062208 - RNA, 22 nt, Human
ccuggggaaucuugcaggggaa

SEQ ID NO: 1062209 - RNA, 22 nt, Human
ugcauuuuuaacaaggcuaauu

SEQ ID NO: 1062210 - RNA, 22 nt, Human
uuggcaggaauauugcagaggu

SEQ ID NO: 1062211 - RNA, 22 nt, Human
uguaaacagccccauggagagc

SEQ ID NO: 1062212 - RNA, 22 nt, Human
cauaauuugauaugcuugaugg

SEQ ID NO: 1062213 - RNA, 22 nt, Human
aucucuguaaaccauaaauuga

SEQ ID NO: 1062214 - RNA, 22 nt, Human
acacacaugccuuuccuaagua

SEQ ID NO: 1062215 - RNA, 22 nt, Human
ccaggcuccgcauagaccccac

SEQ ID NO: 1062216 - RNA, 22 nt, Human
uuuaguagaaugauacagggca

SEQ ID NO: 1062217 - RNA, 15 nt, Human
uccaggcauucauuc

SEQ ID NO: 1062218 - RNA, 22 nt, Human
ucuggcaggccuugucaaucug

SEQ ID NO: 1062219 - RNA, 22 nt, Human
guuucauuuacaucuguaggua

SEQ ID NO: 1062220 - RNA, 22 nt, Human
ccacacuaaacugcucaaacca

SEQ ID NO: 1062221 - RNA, 19 nt, Human
uggccagguacugucugcu

SEQ ID NO: 1062222 - RNA, 22 nt, Human
cagggacccgcacagguagcau

SEQ ID NO: 1062223 - RNA, 22 nt, Human
acuggagcugagagcaugggua

SEQ ID NO: 1062224 - RNA, 22 nt, Human
cucuugcagauaccuugaagga

SEQ ID NO: 1062225 - RNA, 22 nt, Human
ggcaagagggcagauggagugc

SEQ ID NO: 1062226 - RNA, 22 nt, Human
uuuacucuugcuacacaacugu

SEQ ID NO: 1062227 - RNA, 22 nt, Human
guggcagguggagccuccugca

SEQ ID NO: 1062228 - RNA, 22 nt, Human
gccuggcaggggccugggagug

SEQ ID NO: 1062229 - RNA, 22 nt, Human
guuuuuaucuaauagcaguuau

SEQ ID NO: 1062230 - RNA, 17 nt, Human
gggcugacaguggccuc

SEQ ID NO: 1062231 - RNA, 22 nt, Human
aaagaucaauagauaaagcuac

SEQ ID NO: 1062232 - RNA, 22 nt, Human
cuggggaccgagcaagcucugg

SEQ ID NO: 1062233 - RNA, 22 nt, Human
uguugauuaguguuuagacuua

SEQ ID NO: 1062234 - RNA, 22 nt, Human
auugaaaauauaauucuaggag

SEQ ID NO: 1062235 - RNA, 22 nt, Human
cccugcagacgucuugaugccu

SEQ ID NO: 1062236 - RNA, 22 nt, Human
ucacuguaauagguuugaagau

SEQ ID NO: 1062237 - RNA, 22 nt, Human
uauguaaaguagauggcaggua

SEQ ID NO: 1062238 - RNA, 22 nt, Human
uucagagacagcaaccaggaca

SEQ ID NO: 1062239 - RNA, 22 nt, Human
uuccaagugucagaucagauuu

SEQ ID NO: 1062240 - RNA, 22 nt, Human
agcaggcuccaggcuggccauc

SEQ ID NO: 1062241 - RNA, 22 nt, Human
guuaaccaaggcaccaagugua

SEQ ID NO: 1062242 - RNA, 22 nt, Human
ugcagugguugagagcccagac

SEQ ID NO: 1062243 - RNA, 22 nt, Human
uccucuccaugucucacgccac

SEQ ID NO: 1062244 - RNA, 22 nt, Human
ucuagggaacaugggucaagcu

SEQ ID NO: 1062245 - RNA, 22 nt, Human
uccaggcuagguuuacaggaca

SEQ ID NO: 1062246 - RNA, 22 nt, Human
cuggaaaggguccucauucugu

SEQ ID NO: 1062247 - RNA, 22 nt, Human
gacugccucaguuucccugcag

SEQ ID NO: 1062248 - RNA, 22 nt, Human
uagggcucgggcacaggacagg

SEQ ID NO: 1062249 - RNA, 22 nt, Human
ggcggguguaaguaggacagcg

SEQ ID NO: 1062250 - RNA, 22 nt, Human
agcaggcuuuccacagaaggag

SEQ ID NO: 1062251 - RNA, 22 nt, Human
gaggguggggaauagacugcua

SEQ ID NO: 1062252 - RNA, 22 nt, Human
uucugcaucugaauuuaaguac

SEQ ID NO: 1062253 - RNA, 22 nt, Human
uuucugaagauacagcuuugcu

SEQ ID NO: 1062254 - RNA, 22 nt, Human
uuacuucuuacaaaagaaauau

SEQ ID NO: 1062255 - RNA, 22 nt, Human
cugcaggguuuuucaaggacaa

SEQ ID NO: 1062256 - RNA, 22 nt, Human
gacuuuggcaucuagacauugu

SEQ ID NO: 1062257 - RNA, 22 nt, Human
caauuucucgaacucuaaucca

SEQ ID NO: 1062258 - RNA, 17 nt, Human
uauacacagacagacug

SEQ ID NO: 1062259 - RNA, 22 nt, Human
ggcagugagaggucuccugguc

SEQ ID NO: 1062260 - RNA, 19 nt, Human
acuggcagggcugcggugg

SEQ ID NO: 1062261 - RNA, 22 nt, Human
aagaauacguaucaacaauggu

SEQ ID NO: 1062262 - RNA, 22 nt, Human
gggcuccaccuagggacacugg

SEQ ID NO: 1062263 - RNA, 22 nt, Human
cauuuguaucauauguaucuua

SEQ ID NO: 1062264 - RNA, 22 nt, Human
aacacaaagaagcugcaggauc

SEQ ID NO: 1062265 - RNA, 22 nt, Human
uugaauuagacuuugcuacagg

SEQ ID NO: 1062266 - RNA, 22 nt, Human
gccucaggccgcccugcugcuc

SEQ ID NO: 1062267 - RNA, 22 nt, Human
gcaggcuccaaggccugggaga

SEQ ID NO: 1062268 - RNA, 21 nt, Human
uaacacauuuugguacuuugg

SEQ ID NO: 1062269 - RNA, 22 nt, Human
aaauccuaauaaugcacuagug

SEQ ID NO: 1062270 - RNA, 22 nt, Human
auccugucaucauaguacuuga

SEQ ID NO: 1062271 - RNA, 22 nt, Human
uccaggcacuauauauacuuuu

SEQ ID NO: 1062272 - RNA, 22 nt, Human
ggcugcaggcagaggcugucug

SEQ ID NO: 1062273 - RNA, 22 nt, Human
gccaggcauuuguuaggugcug

SEQ ID NO: 1062274 - RNA, 22 nt, Human
accugcagguguuuccacacuu

SEQ ID NO: 1062275 - RNA, 22 nt, Human
ucagcucuaaguuuuaugcaaa

SEQ ID NO: 1062276 - RNA, 22 nt, Human
acacacagguaaaggagccugg

SEQ ID NO: 1062277 - RNA, 22 nt, Human
gucacuguauccagguuccagc

SEQ ID NO: 1062278 - RNA, 22 nt, Human
ugugaagauuuggcaugcagaa

SEQ ID NO: 1062279 - RNA, 22 nt, Human
ucccagccuuucuuuucugcug

SEQ ID NO: 1062280 - RNA, 22 nt, Human
cccugcagccuugcaugccuuc

SEQ ID NO: 1062281 - RNA, 22 nt, Human
cccugcagcuuuugcauaguca

SEQ ID NO: 1062282 - RNA, 22 nt, Human
accaugaugggaagcucagggc

SEQ ID NO: 1062283 - RNA, 22 nt, Human
aauuagggaggacaaagguaca

SEQ ID NO: 1062284 - RNA, 22 nt, Human
aaucuucauuuugacaagauuc

SEQ ID NO: 1062285 - RNA, 22 nt, Human
auacuuuggucacuauuauugg

SEQ ID NO: 1062286 - RNA, 22 nt, Human
uggccuccccuaacagccucuu

SEQ ID NO: 1062287 - RNA, 22 nt, Human
gggcugacaaccaucugacaag

SEQ ID NO: 1062288 - RNA, 22 nt, Human
agcacaggaacauggagauggg

SEQ ID NO: 1062289 - RNA, 22 nt, Human
ugcagggaaagggcacugggcu

SEQ ID NO: 1062290 - RNA, 22 nt, Human
uuuucauugagcaccugaguaa

SEQ ID NO: 1062291 - RNA, 22 nt, Human
ccaggcucacugacuaccacau

SEQ ID NO: 1062292 - RNA, 22 nt, Human
uaaacaucugucauguguuuau

SEQ ID NO: 1062293 - RNA, 22 nt, Human
ggagugugggauggagcucagg

SEQ ID NO: 1062294 - RNA, 22 nt, Human
ucauguuauugacucauaauau

SEQ ID NO: 1062295 - RNA, 22 nt, Human
cuacccagcaccuaggcugccu

SEQ ID NO: 1062296 - RNA, 22 nt, Human
ggcaggcaggucuucauggccc

SEQ ID NO: 1062297 - RNA, 20 nt, Human
aguguacagacacuagaaau

SEQ ID NO: 1062298 - RNA, 22 nt, Human
ucuucuuaugugccauuaucuc

SEQ ID NO: 1062299 - RNA, 22 nt, Human
ugagagucucagaccuccuggu

SEQ ID NO: 1062300 - RNA, 22 nt, Human
uccaggcagcccuuccugacuc

SEQ ID NO: 1062301 - RNA, 22 nt, Human
cucuuaaauaacaucauugcuu

SEQ ID NO: 1062302 - RNA, 21 nt, Human
ggcuuuaugcucacccagccu

SEQ ID NO: 1062303 - RNA, 22 nt, Human
gacccagcuaaccaggugggga

SEQ ID NO: 1062304 - RNA, 22 nt, Human
ugcaggcuauccuuugcugcaa

SEQ ID NO: 1062305 - RNA, 22 nt, Human
acaguguuuuagaaaagcuuga

SEQ ID NO: 1062306 - RNA, 22 nt, Human
uuuagacauggcuugcucacuu

SEQ ID NO: 1062307 - RNA, 22 nt, Human
auguagaagcugacagugcugu

SEQ ID NO: 1062308 - RNA, 22 nt, Human
augucaaacacaacaccagugg

SEQ ID NO: 1062309 - RNA, 22 nt, Human
aauguaugugcaucauuuacau

SEQ ID NO: 1062310 - RNA, 22 nt, Human
uuucagauggagguuuaggaca

SEQ ID NO: 1062311 - RNA, 22 nt, Human
guuaaauucgaugauggauaaa

SEQ ID NO: 1062312 - RNA, 22 nt, Human
cauaauuucccaagagauugaa

SEQ ID NO: 1062313 - RNA, 21 nt, Human
agaauaaugguaucauuugcu

SEQ ID NO: 1062314 - RNA, 22 nt, Human
gagaaagauguaggcugggagg

SEQ ID NO: 1062315 - RNA, 22 nt, Human
cagugaggugcccagccugccc

SEQ ID NO: 1062316 - RNA, 19 nt, Human
ucugcagaaggcauacaug

SEQ ID NO: 1062317 - RNA, 22 nt, Human
caacacauugaagcuaugauga

SEQ ID NO: 1062318 - RNA, 22 nt, Human
ccucagcugcuucccuggagcc

SEQ ID NO: 1062319 - RNA, 22 nt, Human
cacaucagggcugcuugggggu

SEQ ID NO: 1062320 - RNA, 22 nt, Human
cuggaaagugucuccauccugg

SEQ ID NO: 1062321 - RNA, 22 nt, Human
gaugccuggcacccagcaagga

SEQ ID NO: 1062322 - RNA, 22 nt, Human
cccaaggccuucaagccagcuc

SEQ ID NO: 1062323 - RNA, 20 nt, Human
uagggcucauuaugaucucc

SEQ ID NO: 1062324 - RNA, 22 nt, Human
gcagggguuuucugacuugagu

SEQ ID NO: 1062325 - RNA, 19 nt, Human
auguaugaggucuucugcu

SEQ ID NO: 1062326 - RNA, 22 nt, Human
uuuuauuaucuuugaaugggac

SEQ ID NO: 1062327 - RNA, 22 nt, Human
cacaugcaucugucauguuugg

SEQ ID NO: 1062328 - RNA, 22 nt, Human
auuagggaaggauuuggccuga

SEQ ID NO: 1062329 - RNA, 22 nt, Human
ucagagaguuggaaagaauuaa

SEQ ID NO: 1062330 - RNA, 21 nt, Human
uccugcagggcagcagagugg

SEQ ID NO: 1062331 - RNA, 22 nt, Human
gacacagagcucacagucuccu

SEQ ID NO: 1062332 - RNA, 22 nt, Human
aagagcauggaauggagaucca

SEQ ID NO: 1062333 - RNA, 22 nt, Human
guggccagcaagugcugccucu

SEQ ID NO: 1062334 - RNA, 22 nt, Human
ucuccacacuuucucucccagg

SEQ ID NO: 1062335 - RNA, 22 nt, Human
aacaaagucguugccuagaaga

SEQ ID NO: 1062336 - RNA, 22 nt, Human
gcuggggagggcgucaaggcca

SEQ ID NO: 1062337 - RNA, 22 nt, Human
ucugggcuuuugcacuggccau

SEQ ID NO: 1062338 - RNA, 22 nt, Human
gaauauuuuuaaagggacuaau

SEQ ID NO: 1062339 - RNA, 22 nt, Human
ucuggcagggucagggcccagg

SEQ ID NO: 1062340 - RNA, 22 nt, Human
aaagagucguguuccagguuug

SEQ ID NO: 1062341 - RNA, 22 nt, Human
ccagugcccagcugcccaggca

SEQ ID NO: 1062342 - RNA, 22 nt, Human
aggcugcuucagcugcagggag

SEQ ID NO: 1062343 - RNA, 19 nt, Human
ccagucccauacaggagau

SEQ ID NO: 1062344 - RNA, 22 nt, Human
uucuggggcuaauacagagguc

SEQ ID NO: 1062345 - RNA, 22 nt, Human
ugggcuccucgucacucgcugu

SEQ ID NO: 1062346 - RNA, 22 nt, Human
gaaaagaguccugugugaggag

SEQ ID NO: 1062347 - RNA, 19 nt, Human
ucuuuucacgcauuuugaa

SEQ ID NO: 1062348 - RNA, 22 nt, Human
cagcucagucuggagagaugca

SEQ ID NO: 1062349 - RNA, 22 nt, Human
uagggcucugagaguucagccu

SEQ ID NO: 1062350 - RNA, 22 nt, Human
augcugucgaaaccaaacaucu

SEQ ID NO: 1062351 - RNA, 22 nt, Human
ugcuuuauuuuaaauaugccau

SEQ ID NO: 1062352 - RNA, 22 nt, Human
agggcugaagggaggugcucau

SEQ ID NO: 1062353 - RNA, 22 nt, Human
gcucucagaugcuccagcagcc

SEQ ID NO: 1062354 - RNA, 20 nt, Human
gccugcagguuggaugggau

SEQ ID NO: 1062355 - RNA, 22 nt, Human
gacccaggcccaaggcugccag

SEQ ID NO: 1062356 - RNA, 22 nt, Human
ccagccacagcuuccagcuccu

SEQ ID NO: 1062357 - RNA, 22 nt, Human
cagaggcauacucccagucuug

SEQ ID NO: 1062358 - RNA, 19 nt, Human
agugcagggagcacccuca

SEQ ID NO: 1062359 - RNA, 22 nt, Human
aaguccagcucuaaauaucuga

SEQ ID NO: 1062360 - RNA, 22 nt, Human
uuggcagggccaggcucucucu

SEQ ID NO: 1062361 - RNA, 22 nt, Human
gcuggcagucccaucagcuggg

SEQ ID NO: 1062362 - RNA, 22 nt, Human
ccuggcuccugccucugcaggg

SEQ ID NO: 1062363 - RNA, 22 nt, Human
cacccacauuccaucacucugc

SEQ ID NO: 1062364 - RNA, 18 nt, Human
acacugcagcagucugcu

SEQ ID NO: 1062365 - RNA, 22 nt, Human
uuucagaugugugucucugaag

SEQ ID NO: 1062366 - RNA, 22 nt, Human
cagagcaucgcgcagagagccu

SEQ ID NO: 1062367 - RNA, 17 nt, Human
ccauacugacauauuga

SEQ ID NO: 1062368 - RNA, 22 nt, Human
uuuccacaauguuuuugcagga

SEQ ID NO: 1062369 - RNA, 22 nt, Human
acccaggccugagagacaggag

SEQ ID NO: 1062370 - RNA, 22 nt, Human
uuucacauaaauauuaugccua

SEQ ID NO: 1062371 - RNA, 22 nt, Human
uugugaaacauucauggauuug

SEQ ID NO: 1062372 - RNA, 22 nt, Human
agucagugaaaacuagaauguu

SEQ ID NO: 1062373 - RNA, 22 nt, Human
auuagggaaacugacuugucuc

SEQ ID NO: 1062374 - RNA, 22 nt, Human
aagggcucuguugccauuucag

SEQ ID NO: 1062375 - RNA, 22 nt, Human
agggaagaagcugguaguaggu

SEQ ID NO: 1062376 - RNA, 22 nt, Human
ucaggcucaaagggccggauga

SEQ ID NO: 1062377 - RNA, 22 nt, Human
caguauuuauggcuugaguauu

SEQ ID NO: 1062378 - RNA, 21 nt, Human
uccccacauuucuaaacagac

SEQ ID NO: 1062379 - RNA, 22 nt, Human
agcugccaaguuucucaguuua

SEQ ID NO: 1062380 - RNA, 22 nt, Human
cuucugggagagcuuuugcuuc

SEQ ID NO: 1062381 - RNA, 21 nt, Human
cuugggcuuguagauggugga

SEQ ID NO: 1062382 - RNA, 22 nt, Human
ugcuuuauugcaucaguguggg

SEQ ID NO: 1062383 - RNA, 22 nt, Human
uccuggcagagggcggccucga

SEQ ID NO: 1062384 - RNA, 22 nt, Human
ucccagccuuccuuguggugaa

SEQ ID NO: 1062385 - RNA, 22 nt, Human
ucuggggcaguuacuggggccu

SEQ ID NO: 1062386 - RNA, 22 nt, Human
uucauagagcagcucacugaau

SEQ ID NO: 1062387 - RNA, 22 nt, Human
acuggggauuagggacucagug

SEQ ID NO: 1062388 - RNA, 22 nt, Human
ugcuucugcucagcuuccuacu

SEQ ID NO: 1062389 - RNA, 22 nt, Human
ugacuagaccuauaucuuuuug

SEQ ID NO: 1062390 - RNA, 22 nt, Human
gccaagcuuugcaggaguguug

SEQ ID NO: 1062391 - RNA, 22 nt, Human
acaugauucuugauaggcauug

SEQ ID NO: 1062392 - RNA, 22 nt, Human
uacacaucacuguaucuuucag

SEQ ID NO: 1062393 - RNA, 22 nt, Human
auguuugaaauuguaaguauau

SEQ ID NO: 1062394 - RNA, 22 nt, Human
uagaauucaagauucaacaggc

SEQ ID NO: 1062395 - RNA, 22 nt, Human
cacaucccuggaguuacccagu

SEQ ID NO: 1062396 - RNA, 22 nt, Human
acugggcuccaaggaccuggag

SEQ ID NO: 1062397 - RNA, 22 nt, Human
uuuagggaauagaagaucugaa

SEQ ID NO: 1062398 - RNA, 22 nt, Human
ucuggcagcuauccucuggcca

SEQ ID NO: 1062399 - RNA, 18 nt, Human
agcagguggcgucugcag

SEQ ID NO: 1062400 - RNA, 22 nt, Human
uggcagugucuuaucaggagug

SEQ ID NO: 1062401 - RNA, 22 nt, Human
uuuauugacccaaagcgagagu

SEQ ID NO: 1062402 - RNA, 22 nt, Human
cauguuaaugaauuuuugcagu

SEQ ID NO: 1062403 - RNA, 22 nt, Human
aaacacagggauauauauucca

SEQ ID NO: 1062404 - RNA, 22 nt, Human
uuucugaaaucucuuuugagga

SEQ ID NO: 1062405 - RNA, 22 nt, Human
aaauuaguacauugcaaagucc

SEQ ID NO: 1062406 - RNA, 22 nt, Human
ugcagggccuucuagaccaugg

SEQ ID NO: 1062407 - RNA, 22 nt, Human
ccaggccuggccaggggaugcc

SEQ ID NO: 1062408 - RNA, 22 nt, Human
caggcagcccugcaccaagugu

SEQ ID NO: 1062409 - RNA, 22 nt, Human
ccagggggcuuggugaggccau

SEQ ID NO: 1062410 - RNA, 22 nt, Human
gggagcuguaagggacagguag

SEQ ID NO: 1062411 - RNA, 22 nt, Human
ggcccaaacggguccagugaaa

SEQ ID NO: 1062412 - RNA, 22 nt, Human
guauuaggaggaacacaggccu

SEQ ID NO: 1062413 - RNA, 23 nt, Human
uuggagagggugaguagugucag

SEQ ID NO: 1062414 - RNA, 22 nt, Human
auuacaguaacagcuacaaugc

SEQ ID NO: 1062415 - RNA, 22 nt, Human
agacacagucugucuggaggag

SEQ ID NO: 1062416 - RNA, 19 nt, Human
aaacacagauuucuuacca

SEQ ID NO: 1062417 - RNA, 22 nt, Human
cccugcagaucuaggguccuuc

SEQ ID NO: 1062418 - RNA, 22 nt, Human
cacccagcauuggcuaagagag

SEQ ID NO: 1062419 - RNA, 22 nt, Human
gagcuuuagcugagaccugcuu

SEQ ID NO: 1062420 - RNA, 22 nt, Human
aggcuuuaauuaucuacaggag

SEQ ID NO: 1062421 - RNA, 22 nt, Human
auuacaauaagguuuauuugua

SEQ ID NO: 1062422 - RNA, 22 nt, Human
acacauacauggggaagaugag

SEQ ID NO: 1062423 - RNA, 22 nt, Human
uccaggcagagcaacaaaauau

SEQ ID NO: 1062424 - RNA, 22 nt, Human
gccugcagccucaagggcugag

SEQ ID NO: 1062425 - RNA, 22 nt, Human
ucccagccacaguuuccaccug

SEQ ID NO: 1062426 - RNA, 22 nt, Human
ucuuugaaaagggagauagaaa

SEQ ID NO: 1062427 - RNA, 22 nt, Human
uuaugcaaaggggccucuuccu

SEQ ID NO: 1062428 - RNA, 22 nt, Human
gagggguccaggaggcacuuac

SEQ ID NO: 1062429 - RNA, 22 nt, Human
gagaggcuggcagugccagguu

SEQ ID NO: 1062430 - RNA, 22 nt, Human
uccaggcuugagaccaggcucu

SEQ ID NO: 1062431 - RNA, 23 nt, Human
ggacacauuuauuucagaauuca

SEQ ID NO: 1062432 - RNA, 22 nt, Human
uuauuaggaaaaggucagaugu

SEQ ID NO: 1062433 - RNA, 23 nt, Human
cuuucauugugguuucacagagc

SEQ ID NO: 1062434 - RNA, 22 nt, Human
ugaaugauuugggugcauucag

SEQ ID NO: 1062435 - RNA, 22 nt, Human
uuucuagagugggcaugucuua

SEQ ID NO: 1062436 - RNA, 22 nt, Human
cugcagccuccuccagcuacgu

SEQ ID NO: 1062437 - RNA, 22 nt, Human
cacacacaguuuuguauucugu

SEQ ID NO: 1062438 - RNA, 22 nt, Human
cugcaggagcaaagccucugcu

SEQ ID NO: 1062439 - RNA, 22 nt, Human
ucagcuuuuuacaugugaaaua

SEQ ID NO: 1062440 - RNA, 22 nt, Human
aaacaccagucccaguauacac

SEQ ID NO: 1062441 - RNA, 22 nt, Human
augggcugggaauacacagggg

SEQ ID NO: 1062442 - RNA, 22 nt, Human
ucuccugcucagaacagccuca

SEQ ID NO: 1062443 - RNA, 22 nt, Human
cauucccacguguucuuugcuu

SEQ ID NO: 1062444 - RNA, 21 nt, Human
uucauaaaccauucucaugca

SEQ ID NO: 1062445 - RNA, 22 nt, Human
acaguguguuggaggagacugu

SEQ ID NO: 1062446 - RNA, 19 nt, Human
ccugccugagcugucccuc

SEQ ID NO: 1062447 - RNA, 22 nt, Human
cacaugaagagagucuaguaau

SEQ ID NO: 1062448 - RNA, 22 nt, Human
uccacccugcuuuugucuuuga

SEQ ID NO: 1062449 - RNA, 22 nt, Human
gccgggaccaaggccacggagc

SEQ ID NO: 1062450 - RNA, 22 nt, Human
aucauuuuuaagagacucuucu

SEQ ID NO: 1062451 - RNA, 17 nt, Human
aggcauggucuggggug

SEQ ID NO: 1062452 - RNA, 22 nt, Human
auuauuagauucuuaauuguaa

SEQ ID NO: 1062453 - RNA, 22 nt, Human
cacccagcacagagggaggcga

SEQ ID NO: 1062454 - RNA, 22 nt, Human
uacacacaugcauuugccuuau

SEQ ID NO: 1062455 - RNA, 23 nt, Human
acucacaaagcaggaucauguug

SEQ ID NO: 1062456 - RNA, 23 nt, Human
uugggaaauaguuaagacaugag

SEQ ID NO: 1062457 - RNA, 22 nt, Human
caggaguccagagugucauuuu

SEQ ID NO: 1062458 - RNA, 22 nt, Human
aguucacauaucuguuuuauuu

SEQ ID NO: 1062459 - RNA, 22 nt, Human
uuaaacauuuauggaggcagca

SEQ ID NO: 1062460 - RNA, 22 nt, Human
aauaacuucauguaacauuuaa

SEQ ID NO: 1062461 - RNA, 22 nt, Human
gacccauauaggacccuccaaa

SEQ ID NO: 1062462 - RNA, 22 nt, Human
cuuccuccgaagaaguugcugg

SEQ ID NO: 1062463 - RNA, 22 nt, Human
aauuucuccaagaaugcuuaga

SEQ ID NO: 1062464 - RNA, 22 nt, Human
uccauucuaugcuuacauuuau

SEQ ID NO: 1062465 - RNA, 22 nt, Human
agguagggaagaaggcaugaaa

SEQ ID NO: 1062466 - RNA, 22 nt, Human
acacacaugguauuguucagaa

SEQ ID NO: 1062467 - RNA, 22 nt, Human
agcaggugggcaugaaagcuga

SEQ ID NO: 1062468 - RNA, 21 nt, Human
guccagagagccggcuccuga

SEQ ID NO: 1062469 - RNA, 23 nt, Human
aaacuacauuuauaguuuuucuc

SEQ ID NO: 1062470 - RNA, 22 nt, Human
auaaagauuucuuuuucucuac

SEQ ID NO: 1062471 - RNA, 22 nt, Human
aagggcucugugugccucccca

SEQ ID NO: 1062472 - RNA, 22 nt, Human
uuucauaauagugcaguuuguu

SEQ ID NO: 1062473 - RNA, 22 nt, Human
ggagccugaaaagucugcauuu

SEQ ID NO: 1062474 - RNA, 22 nt, Human
cuucacauguuggaguccuuug

SEQ ID NO: 1062475 - RNA, 22 nt, Human
cauaauuuuccaugguuugcua

SEQ ID NO: 1062476 - RNA, 22 nt, Human
uucuagcagagggcaucugcug

SEQ ID NO: 1062477 - RNA, 22 nt, Human
cccagcccacgguccugggugg

SEQ ID NO: 1062478 - RNA, 22 nt, Human
ucuauuuuauacucaaaucuuc

SEQ ID NO: 1062479 - RNA, 22 nt, Human
uuuguaaaggccugaauuucag

SEQ ID NO: 1062480 - RNA, 22 nt, Human
cauuuauucucagauccuuguc

SEQ ID NO: 1062481 - RNA, 22 nt, Human
ucuucaaagaauuuuaguaauu

SEQ ID NO: 1062482 - RNA, 22 nt, Human
cugggcuggauaauucuuugcu

SEQ ID NO: 1062483 - RNA, 22 nt, Human
aaauauacuagaugaugaccca

SEQ ID NO: 1062484 - RNA, 22 nt, Human
agcuuuggagacugacuccauc

SEQ ID NO: 1062485 - RNA, 22 nt, Human
gacauaauccuccucaccuacu

SEQ ID NO: 1062486 - RNA, 22 nt, Human
cagggccagcgcccaggcccag

SEQ ID NO: 1062487 - RNA, 22 nt, Human
ggcaggcuccguguuccauucc

SEQ ID NO: 1062488 - RNA, 22 nt, Human
uuuguuagagugugggaggcug

SEQ ID NO: 1062489 - RNA, 22 nt, Human
uucauacaaugggauauuauga

SEQ ID NO: 1062490 - RNA, 22 nt, Human
guucugggaagguggaccuguu

SEQ ID NO: 1062491 - RNA, 22 nt, Human
aacuuaaacccacucauguaga

SEQ ID NO: 1062492 - RNA, 22 nt, Human
augcuuuuccaggagaaauaua

SEQ ID NO: 1062493 - RNA, 23 nt, Human
uccugcagauaagcugguugaca

SEQ ID NO: 1062494 - RNA, 22 nt, Human
ccuggcagguagcauugaggag

SEQ ID NO: 1062495 - RNA, 22 nt, Human
caaugauugcuauuuacauaaa

SEQ ID NO: 1062496 - RNA, 22 nt, Human
cucccaagauaaauaaggcagu

SEQ ID NO: 1062497 - RNA, 22 nt, Human
uaauuucaccguugcuagaaau

SEQ ID NO: 1062498 - RNA, 22 nt, Human
guggccagccccauggacaguu

SEQ ID NO: 1062499 - RNA, 22 nt, Human
uccaggcuccccugcgugcucc

SEQ ID NO: 1062500 - RNA, 22 nt, Human
guguaugaacgaaagaauggau

SEQ ID NO: 1062501 - RNA, 22 nt, Human
cagcaaucgggugauaugcaau

SEQ ID NO: 1062502 - RNA, 22 nt, Human
cccugcagggaggauucugaag

SEQ ID NO: 1062503 - RNA, 22 nt, Human
auuucucaguuccuacuguuua

SEQ ID NO: 1062504 - RNA, 22 nt, Human
auuaaauuaaguggcuaauuua

SEQ ID NO: 1062505 - RNA, 22 nt, Human
ccacacagauaaguguuuucua

SEQ ID NO: 1062506 - RNA, 22 nt, Human
cuguccagucuuuagcaagcug

SEQ ID NO: 1062507 - RNA, 22 nt, Human
uccaggcaaagugcugggcugc

SEQ ID NO: 1062508 - RNA, 22 nt, Human
ugugaaaagcguguguucuagg

SEQ ID NO: 1062509 - RNA, 22 nt, Human
gccaggcauucuagaaguagug

SEQ ID NO: 1062510 - RNA, 22 nt, Human
gcacacaggcaguuuccagcca

SEQ ID NO: 1062511 - RNA, 22 nt, Human
ugaagccauaggacagaggaua

SEQ ID NO: 1062512 - RNA, 22 nt, Human
cacccaggcagguggcugagaa

SEQ ID NO: 1062513 - RNA, 22 nt, Human
uuaaauauuuucagcaggguca

SEQ ID NO: 1062514 - RNA, 22 nt, Human
cagcuugugcaaagguccuggg

SEQ ID NO: 1062515 - RNA, 22 nt, Human
uuccaggccgggcaggaaacac

SEQ ID NO: 1062516 - RNA, 22 nt, Human
agacaucaaugaucagagguag

SEQ ID NO: 1062517 - RNA, 22 nt, Human
cacuguccaugcuugcuaaccc

SEQ ID NO: 1062518 - RNA, 22 nt, Human
cuucuggguaauucuucuucau

SEQ ID NO: 1062519 - RNA, 22 nt, Human
gaauacauuggaaaucagaaua

SEQ ID NO: 1062520 - RNA, 22 nt, Human
ucuauaaauuaugcagucucag

SEQ ID NO: 1062521 - RNA, 22 nt, Human
ugcuucugcauucaauguugga

SEQ ID NO: 1062522 - RNA, 22 nt, Human
cuuccucccggcccaugcucug

SEQ ID NO: 1062523 - RNA, 22 nt, Human
cacauacuuguguguacauaug

SEQ ID NO: 1062524 - RNA, 20 nt, Human
cucuuaaauguaaaguaggc

SEQ ID NO: 1062525 - RNA, 22 nt, Human
cuggggacuugcagacacaauu

SEQ ID NO: 1062526 - RNA, 22 nt, Human
ugucauaacuuagugacaaauc

SEQ ID NO: 1062527 - RNA, 22 nt, Human
agggcacccucucugcaguacc

SEQ ID NO: 1062528 - RNA, 22 nt, Human
uccaggaggugaggggaccaaa

SEQ ID NO: 1062529 - RNA, 22 nt, Human
ggcaggcuccagagcccucucc

SEQ ID NO: 1062530 - RNA, 22 nt, Human
gagaaagaugaagaguggcguu

SEQ ID NO: 1062531 - RNA, 20 nt, Human
cugcuccacccggcucucag

SEQ ID NO: 1062532 - RNA, 22 nt, Human
ccaggcucugagaggaauguga

SEQ ID NO: 1062533 - RNA, 22 nt, Human
gcagggacaacugugcaccuga

SEQ ID NO: 1062534 - RNA, 22 nt, Human
ccagcuuucugggugguuucug

SEQ ID NO: 1062535 - RNA, 22 nt, Human
cccaggaguaagugacauuguu

SEQ ID NO: 1062536 - RNA, 22 nt, Human
aaaguucuggggguguuucugg

SEQ ID NO: 1062537 - RNA, 22 nt, Human
cuguacaaguccuucaucaggg

SEQ ID NO: 1062538 - RNA, 22 nt, Human
ugggacucacucuuuuggccag

SEQ ID NO: 1062539 - RNA, 20 nt, Human
uucugucagauuauauggga

SEQ ID NO: 1062540 - RNA, 22 nt, Human
ccucucagcgauuccucuugga

SEQ ID NO: 1062541 - RNA, 22 nt, Human
agagugaaaagcuagagcagua

SEQ ID NO: 1062542 - RNA, 22 nt, Human
auaaaguuuaaaagucaauagu

SEQ ID NO: 1062543 - RNA, 22 nt, Human
gcguccagggaaggcccagcug

SEQ ID NO: 1062544 - RNA, 22 nt, Human
acaguguucacuuaacaaugga

SEQ ID NO: 1062545 - RNA, 22 nt, Human
acagagagaggcccgaggcugc

SEQ ID NO: 1062546 - RNA, 22 nt, Human
agcaccaucacagcuguauguc

SEQ ID NO: 1062547 - RNA, 22 nt, Human
agauacaaaagauaagauuuag

SEQ ID NO: 1062548 - RNA, 22 nt, Human
gggacccagguaauccugugcu

SEQ ID NO: 1062549 - RNA, 22 nt, Human
gggcugcaaugcuucaguuguu

SEQ ID NO: 1062550 - RNA, 22 nt, Human
ggagucugcucccagacaugau

SEQ ID NO: 1062551 - RNA, 21 nt, Human
auucugucaucccagcuacuu

SEQ ID NO: 1062552 - RNA, 22 nt, Human
ugccugccucuggcagcccugc

SEQ ID NO: 1062553 - RNA, 22 nt, Human
gugggguagaucuuucucagga

SEQ ID NO: 1062554 - RNA, 22 nt, Human
aggcucccaagcacugacccca

SEQ ID NO: 1062555 - RNA, 20 nt, Human
augggcugguuaggaagugu

SEQ ID NO: 1062556 - RNA, 18 nt, Human
cucucuuuccacucuuug

SEQ ID NO: 1062557 - RNA, 22 nt, Human
aaggcucuggguuucauaggug

SEQ ID NO: 1062558 - RNA, 22 nt, Human
aguccagucucacucuuggcag

SEQ ID NO: 1062559 - RNA, 22 nt, Human
uuucacacugcagcaucagaga

SEQ ID NO: 1062560 - RNA, 22 nt, Human
ugcuucugcugauauuuuguga

SEQ ID NO: 1062561 - RNA, 22 nt, Human
agauauauuuaagguaauaagu

SEQ ID NO: 1062562 - RNA, 22 nt, Human
acaaacugaauggguuuucugu

SEQ ID NO: 1062563 - RNA, 22 nt, Human
gaggagcuguucccucaccucu

SEQ ID NO: 1062564 - RNA, 22 nt, Human
gugauaaaauucaaauagcucu

SEQ ID NO: 1062565 - RNA, 22 nt, Human
acacacagaaggaagccccacu

SEQ ID NO: 1062566 - RNA, 22 nt, Human
aagacauugucauuuuauaauu

SEQ ID NO: 1062567 - RNA, 22 nt, Human
uuguaauuugcaaauguauugu

SEQ ID NO: 1062568 - RNA, 22 nt, Human
agggcuccuaugccccauggac

SEQ ID NO: 1062569 - RNA, 22 nt, Human
acuggcaguagagggagcgcau

SEQ ID NO: 1062570 - RNA, 22 nt, Human
ggcugccacgucgaggguccaa

SEQ ID NO: 1062571 - RNA, 16 nt, Human
cuacccagugagaagg

SEQ ID NO: 1062572 - RNA, 15 nt, Human
ccaggcucugcacuc

SEQ ID NO: 1062573 - RNA, 20 nt, Human
agcauuugaaauaugacuau

SEQ ID NO: 1062574 - RNA, 22 nt, Human
acagcuuuguguuaaugggaag

SEQ ID NO: 1062575 - RNA, 22 nt, Human
auuauuaggacuacugggguug

SEQ ID NO: 1062576 - RNA, 22 nt, Human
aaugaucuacucucauuaucuc

SEQ ID NO: 1062577 - RNA, 22 nt, Human
acaggacaggcugggcuagacu

SEQ ID NO: 1062578 - RNA, 18 nt, Human
uguuuauuuuucucuuac

SEQ ID NO: 1062579 - RNA, 22 nt, Human
uuucuuagcgaugcuugauaaa

SEQ ID NO: 1062580 - RNA, 22 nt, Human
uuuuucaucugauugauaacuc

SEQ ID NO: 1062581 - RNA, 22 nt, Human
agcuuuaucacaauauuggcua

SEQ ID NO: 1062582 - RNA, 22 nt, Human
gcugggcugcgucggggaagcc

SEQ ID NO: 1062583 - RNA, 22 nt, Human
aagguuaaauagguauuuucca

SEQ ID NO: 1062584 - RNA, 22 nt, Human
auuuguuccacacauauuuacu

SEQ ID NO: 1062585 - RNA, 22 nt, Human
cagucacauagguauacacaua

SEQ ID NO: 1062586 - RNA, 22 nt, Human
cugcucuagagagcauuaguca

SEQ ID NO: 1062587 - RNA, 22 nt, Human
augacacuuggugauacuuugu

SEQ ID NO: 1062588 - RNA, 19 nt, Human
cccucuugcacaaagcaaa

SEQ ID NO: 1062589 - RNA, 22 nt, Human
cauaauuucacugucguauggc

SEQ ID NO: 1062590 - RNA, 22 nt, Human
accagugggaaguggaaaauga

SEQ ID NO: 1062591 - RNA, 18 nt, Human
cuccuggcugauggugag

SEQ ID NO: 1062592 - RNA, 22 nt, Human
auuauaaagaacaugugugugg

SEQ ID NO: 1062593 - RNA, 22 nt, Human
cccacacacauuuaugauagga

SEQ ID NO: 1062594 - RNA, 23 nt, Human
uguaugaauaugccacaguuuaa

SEQ ID NO: 1062595 - RNA, 22 nt, Human
guacacacuguuugaucauuuc

SEQ ID NO: 1062596 - RNA, 22 nt, Human
ccuggcagucaggggaguccuu

SEQ ID NO: 1062597 - RNA, 22 nt, Human
ucccaccccggucaagggcuga

SEQ ID NO: 1062598 - RNA, 22 nt, Human
uggcaguagauccagucucucu

SEQ ID NO: 1062599 - RNA, 22 nt, Human
auguuucaucaguaagguuuug

SEQ ID NO: 1062600 - RNA, 22 nt, Human
uguuuuucaaauauugcucugu

SEQ ID NO: 1062601 - RNA, 22 nt, Human
aaggccacacuugcuggccagc

SEQ ID NO: 1062602 - RNA, 22 nt, Human
cagcuuuauuaaugauugucuu

SEQ ID NO: 1062603 - RNA, 21 nt, Human
aggcucccagaaaugggcauc

SEQ ID NO: 1062604 - RNA, 22 nt, Human
cagagcaugaauaaaaguuaca

SEQ ID NO: 1062605 - RNA, 22 nt, Human
ucagagagguuggugauaagaa

SEQ ID NO: 1062606 - RNA, 17 nt, Human
gaauuucuuggucaaaa

SEQ ID NO: 1062607 - RNA, 22 nt, Human
uuggguaggagaaagaacagau

SEQ ID NO: 1062608 - RNA, 22 nt, Human
uagggacccucccugcucuaac

SEQ ID NO: 1062609 - RNA, 22 nt, Human
aauuagggaaaauuuacuugua

SEQ ID NO: 1062610 - RNA, 21 nt, Human
acagugugcuucucucccucc

SEQ ID NO: 1062611 - RNA, 22 nt, Human
gaacacauguccuccuuggauu

SEQ ID NO: 1062612 - RNA, 22 nt, Human
cugggcuucucccccuggcaga

SEQ ID NO: 1062613 - RNA, 22 nt, Human
uuuaccaguguuaaacaccagc

SEQ ID NO: 1062614 - RNA, 22 nt, Human
uaugucaaaguuaagaaauagg

SEQ ID NO: 1062615 - RNA, 22 nt, Human
gugcaggggccuccccuugcug

SEQ ID NO: 1062616 - RNA, 22 nt, Human
aaaguuugucacuuggcuagaa

SEQ ID NO: 1062617 - RNA, 22 nt, Human
auuaaaauuccaagguaugcca

SEQ ID NO: 1062618 - RNA, 22 nt, Human
ucucuuaauaaguaaauacuga

SEQ ID NO: 1062619 - RNA, 19 nt, Human
cuccaagugccaaggacag

SEQ ID NO: 1062620 - RNA, 22 nt, Human
aggaggcuuuugcaggugccac

SEQ ID NO: 1062621 - RNA, 22 nt, Human
ugcaggcugggaagagggacaa

SEQ ID NO: 1062622 - RNA, 21 nt, Human
ugggaccuagcuuugcacagg

SEQ ID NO: 1062623 - RNA, 19 nt, Human
gcaucagagcagaaggggu

SEQ ID NO: 1062624 - RNA, 22 nt, Human
cugcagagcagccaguccccca

SEQ ID NO: 1062625 - RNA, 22 nt, Human
ugaaacuuauaagaauaugaau

SEQ ID NO: 1062626 - RNA, 22 nt, Human
aagucguggcaggcuugcacga

SEQ ID NO: 1062627 - RNA, 22 nt, Human
uuagacauagaauauugucuag

SEQ ID NO: 1062628 - RNA, 22 nt, Human
ggcuccacccugcuuccagaag

SEQ ID NO: 1062629 - RNA, 22 nt, Human
aggaagaacagauaauggacgc

SEQ ID NO: 1062630 - RNA, 22 nt, Human
agagucagcuuaugacacaguc

SEQ ID NO: 1062631 - RNA, 22 nt, Human
aucuacauaaaacgaauacaua

SEQ ID NO: 1062632 - RNA, 22 nt, Human
ggcucccaggagggccuggagg

SEQ ID NO: 1062633 - RNA, 22 nt, Human
caguaaaagauggaaauagaau

SEQ ID NO: 1062634 - RNA, 22 nt, Human
uguaugaagccagaaucuguuu

SEQ ID NO: 1062635 - RNA, 22 nt, Human
cauacaagcguucaauagaugu

SEQ ID NO: 1062636 - RNA, 22 nt, Human
cugggccugucagggcuuuuug

SEQ ID NO: 1062637 - RNA, 22 nt, Human
ugcaggcuccacguuguugucc

SEQ ID NO: 1062638 - RNA, 22 nt, Human
ccaggcucaggugcgagagaca

SEQ ID NO: 1062639 - RNA, 19 nt, Human
gucuucugaauguggcugc

SEQ ID NO: 1062640 - RNA, 22 nt, Human
cauuuguaguuaaaaaugucuc

SEQ ID NO: 1062641 - RNA, 22 nt, Human
agacccucuccaugcccacugc

SEQ ID NO: 1062642 - RNA, 22 nt, Human
cccacacaaaucauggggagaa

SEQ ID NO: 1062643 - RNA, 22 nt, Human
ugguuccucaagcgcuggcggc

SEQ ID NO: 1062644 - RNA, 22 nt, Human
guacacacaaucucuggucagu

SEQ ID NO: 1062645 - RNA, 17 nt, Human
uuauuuuuugggcugag

SEQ ID NO: 1062646 - RNA, 22 nt, Human
gugcauuugugcaugcacaugu

SEQ ID NO: 1062647 - RNA, 22 nt, Human
agcuuuaugaggagaccuuagu

SEQ ID NO: 1062648 - RNA, 22 nt, Human
auuaaauuggaucugcauaguu

SEQ ID NO: 1062649 - RNA, 22 nt, Human
uagggcucuggugggcucuguu

SEQ ID NO: 1062650 - RNA, 22 nt, Human
cagcauuuaaugcagugcuucc

SEQ ID NO: 1062651 - RNA, 22 nt, Human
ggcaggguuuacaauagcaaua

SEQ ID NO: 1062652 - RNA, 22 nt, Human
uuucaaaugcaugucuuuccuc

SEQ ID NO: 1062653 - RNA, 22 nt, Human
caauuucuuguuaauucucagg

SEQ ID NO: 1062654 - RNA, 22 nt, Human
ugcagagaagaggacaguucua

SEQ ID NO: 1062655 - RNA, 22 nt, Human
uauauauucuuaaguaguguag

SEQ ID NO: 1062656 - RNA, 22 nt, Human
accugccuaucagcugccugcu

SEQ ID NO: 1062657 - RNA, 22 nt, Human
aguuauuucaguaacauaauag

SEQ ID NO: 1062658 - RNA, 22 nt, Human
ccagguccuguuuucaccacag

SEQ ID NO: 1062659 - RNA, 22 nt, Human
ggggaccuucccagagcaguug

SEQ ID NO: 1062660 - RNA, 22 nt, Human
ucaggcucuacacuugacacac

SEQ ID NO: 1062661 - RNA, 22 nt, Human
acugggcuuaugcuguggagua

SEQ ID NO: 1062662 - RNA, 22 nt, Human
aauuagggaaguauuuaguagu

SEQ ID NO: 1062663 - RNA, 22 nt, Human
ugcuucuggcagauugagugag

SEQ ID NO: 1062664 - RNA, 22 nt, Human
ccugccuguacuagagacccag

SEQ ID NO: 1062665 - RNA, 22 nt, Human
cuauuaggcuuccauuucaugc

SEQ ID NO: 1062666 - RNA, 22 nt, Human
agcccagcuuugaaccauauca

SEQ ID NO: 1062667 - RNA, 22 nt, Human
ugcuagaauuagguuaaacaaa

SEQ ID NO: 1062668 - RNA, 22 nt, Human
gcaggugaugugaugugagcau

SEQ ID NO: 1062669 - RNA, 22 nt, Human
auauucuuccaaaacaucauuu

SEQ ID NO: 1062670 - RNA, 22 nt, Human
guagggacuguucucaccugag

SEQ ID NO: 1062671 - RNA, 22 nt, Human
guuaauuugcagcuuucgagcu

SEQ ID NO: 1062672 - RNA, 21 nt, Human
acauacauaccuuaccaccuu

SEQ ID NO: 1062673 - RNA, 22 nt, Human
gccaagcucaccuucugaugga

SEQ ID NO: 1062674 - RNA, 22 nt, Human
uagggcucagagaaguggggcc

SEQ ID NO: 1062675 - RNA, 22 nt, Human
cugggcuuucaggcccuaaggc

SEQ ID NO: 1062676 - RNA, 22 nt, Human
gggcugacuccuauuggaugaa

SEQ ID NO: 1062677 - RNA, 22 nt, Human
cugcuuuagacaacugcuggga

SEQ ID NO: 1062678 - RNA, 22 nt, Human
aacacagaucaaaauauuuccu

SEQ ID NO: 1062679 - RNA, 22 nt, Human
auggcagaccuccuggccacaa

SEQ ID NO: 1062680 - RNA, 22 nt, Human
uaugaacuuuugaugugacaug

SEQ ID NO: 1062681 - RNA, 22 nt, Human
cagugaggaguccagggcagag

SEQ ID NO: 1062682 - RNA, 22 nt, Human
uucacaauaggagcaugcaaau

SEQ ID NO: 1062683 - RNA, 22 nt, Human
ccaggcucacagcaucccagga

SEQ ID NO: 1062684 - RNA, 22 nt, Human
agggcuacugccugccuucagg

SEQ ID NO: 1062685 - RNA, 22 nt, Human
uuaaagaugcagcuuuagagaa

SEQ ID NO: 1062686 - RNA, 22 nt, Human
cagguggguguaugaaugcaaa

SEQ ID NO: 1062687 - RNA, 22 nt, Human
acauuucucuugaugucucuau

SEQ ID NO: 1062688 - RNA, 22 nt, Human
gggcugacaaucucuuuacuua

SEQ ID NO: 1062689 - RNA, 22 nt, Human
aaugaagcaguuuucaucaagu

SEQ ID NO: 1062690 - RNA, 22 nt, Human
gagccagguuugaaucucaguc

SEQ ID NO: 1062691 - RNA, 22 nt, Human
uccugagcugccgcaucagcag

SEQ ID NO: 1062692 - RNA, 22 nt, Human
uucugucagcgucagaaauucu

SEQ ID NO: 1062693 - RNA, 22 nt, Human
uugggaucucaaauccagcuau

SEQ ID NO: 1062694 - RNA, 22 nt, Human
cagggcucuucaucacacagua

SEQ ID NO: 1062695 - RNA, 22 nt, Human
cugggcugagccugggcugugu

SEQ ID NO: 1062696 - RNA, 19 nt, Human
gggaccugacuaauuggca

SEQ ID NO: 1062697 - RNA, 22 nt, Human
cuuugaaaggaagccacacagc

SEQ ID NO: 1062698 - RNA, 22 nt, Human
auaaacaguaaaugugagcagu

SEQ ID NO: 1062699 - RNA, 22 nt, Human
auugacuuccauagcuaccugg

SEQ ID NO: 1062700 - RNA, 22 nt, Human
agucuacaaucuuaaaugaacu

SEQ ID NO: 1062701 - RNA, 22 nt, Human
uagggcucagaguccaguuucu

SEQ ID NO: 1062702 - RNA, 22 nt, Human
caggucccugcgccccggccuc

SEQ ID NO: 1062703 - RNA, 21 nt, Human
uauuugcugccaucuuugagg

SEQ ID NO: 1062704 - RNA, 22 nt, Human
aagggcuccauccuuauaaaug

SEQ ID NO: 1062705 - RNA, 21 nt, Human
uggccaaacuggagcauuuga

SEQ ID NO: 1062706 - RNA, 19 nt, Human
uuaugaaggcuggggggag

SEQ ID NO: 1062707 - RNA, 22 nt, Human
aggaccuguguuuuccuugaau

SEQ ID NO: 1062708 - RNA, 22 nt, Human
acuggggaauggaacugggaau

SEQ ID NO: 1062709 - RNA, 21 nt, Human
acaggcucacgauccauuucu

SEQ ID NO: 1062710 - RNA, 22 nt, Human
gaggagcugggacccugucauc

SEQ ID NO: 1062711 - RNA, 22 nt, Human
cccaggccuggucugggccagu

SEQ ID NO: 1062712 - RNA, 22 nt, Human
uaaaauagcaugugcagugaaa

SEQ ID NO: 1062713 - RNA, 22 nt, Human
gaggcugcggggaggagccugc

SEQ ID NO: 1062714 - RNA, 22 nt, Human
ccacccagcagaggaggcaaga

SEQ ID NO: 1062715 - RNA, 22 nt, Human
uaguuaggaauagcagcgacuc

SEQ ID NO: 1062716 - RNA, 22 nt, Human
ucuuugaaguugaaguaguugg

SEQ ID NO: 1062717 - RNA, 22 nt, Human
agcuagaauauugaucugaaau

SEQ ID NO: 1062718 - RNA, 22 nt, Human
gaaaacuauuggccuagaacaa

SEQ ID NO: 1062719 - RNA, 22 nt, Human
gccugcagccccucugcaguag

SEQ ID NO: 1062720 - RNA, 22 nt, Human
caggcagcugcgacaagagagc

SEQ ID NO: 1062721 - RNA, 22 nt, Human
guguuuuaucagacaaaguaua

SEQ ID NO: 1062722 - RNA, 22 nt, Human
uguuucaggaccuaucuuuuag

SEQ ID NO: 1062723 - RNA, 22 nt, Human
cuuagggaauugggaggaugcc

SEQ ID NO: 1062724 - RNA, 22 nt, Human
ccugaggggcugcaggccagcu

SEQ ID NO: 1062725 - RNA, 22 nt, Human
cacauaauaaauguuccugaug

SEQ ID NO: 1062726 - RNA, 22 nt, Human
cagaguuuugugaacaacuugg

SEQ ID NO: 1062727 - RNA, 22 nt, Human
ugagagucuguuccucuugcag

SEQ ID NO: 1062728 - RNA, 22 nt, Human
aauauuucuguagcuauguucu

SEQ ID NO: 1062729 - RNA, 22 nt, Human
agcccaggucuggcccagccug

SEQ ID NO: 1062730 - RNA, 22 nt, Human
ccacacugucuaacaaggcaua

SEQ ID NO: 1062731 - RNA, 22 nt, Human
ccuggcagcuccuccccggcgg

SEQ ID NO: 1062732 - RNA, 22 nt, Human
ucaccagggcuccagccagccu

SEQ ID NO: 1062733 - RNA, 22 nt, Human
cugcagggaugugaggcccguu

SEQ ID NO: 1062734 - RNA, 22 nt, Human
acccagcuguuucccgugucau

SEQ ID NO: 1062735 - RNA, 22 nt, Human
gagggcuccauuccccgugccc

SEQ ID NO: 1062736 - RNA, 22 nt, Human
uacauaugaacuuuauaacuug

SEQ ID NO: 1062737 - RNA, 22 nt, Human
gcagcuuuggagguggaacucu

SEQ ID NO: 1062738 - RNA, 22 nt, Human
cguguggucccggcaaggcaag

SEQ ID NO: 1062739 - RNA, 22 nt, Human
aaaguaguuagucaugugaaaa

SEQ ID NO: 1062740 - RNA, 22 nt, Human
ggccagggggcuucagacucca

SEQ ID NO: 1062741 - RNA, 22 nt, Human
gaacacauuucucugacuguag

SEQ ID NO: 1062742 - RNA, 22 nt, Human
auucacagaauaguuuuaccag

SEQ ID NO: 1062743 - RNA, 22 nt, Human
ucaugaacaucucaaauaacca

SEQ ID NO: 1062744 - RNA, 22 nt, Human
gcagggaccuugcccacccucc

SEQ ID NO: 1062745 - RNA, 22 nt, Human
uccaggcaaagggacuagcagg

SEQ ID NO: 1062746 - RNA, 20 nt, Human
agacccucuggacugggccc

SEQ ID NO: 1062747 - RNA, 22 nt, Human
aaacaugcauucaagaaaaucu

SEQ ID NO: 1062748 - RNA, 22 nt, Human
uuggcaggaggcuucaguuccu

SEQ ID NO: 1062749 - RNA, 22 nt, Human
acauacacaugaauauauuuuu

SEQ ID NO: 1062750 - RNA, 22 nt, Human
uuccagagaaaagguuuauuuc

SEQ ID NO: 1062751 - RNA, 22 nt, Human
uauuaaauuauggauuuaggag

SEQ ID NO: 1062752 - RNA, 22 nt, Human
ugcagggauuguuggcauccau

SEQ ID NO: 1062753 - RNA, 22 nt, Human
aguuagaauauaauuauguuaa

SEQ ID NO: 1062754 - RNA, 22 nt, Human
agggaccucauguaaguggauu

SEQ ID NO: 1062755 - RNA, 22 nt, Human
uuuauuagauuaucaaagaggu

SEQ ID NO: 1062756 - RNA, 23 nt, Human
ucugggcugagacuuggaagguc

SEQ ID NO: 1062757 - RNA, 22 nt, Human
cucugggcugccuuuuagcucu

SEQ ID NO: 1062758 - RNA, 22 nt, Human
cccaggcagugcugaucccuca

SEQ ID NO: 1062759 - RNA, 22 nt, Human
acauccagaucucagcauggcu

SEQ ID NO: 1062760 - RNA, 22 nt, Human
aauauguuccacuuaaagcugg

SEQ ID NO: 1062761 - RNA, 22 nt, Human
uuaaauuuuagaaacagacucu

SEQ ID NO: 1062762 - RNA, 22 nt, Human
ugugaaaagcaggcuacuuucu

SEQ ID NO: 1062763 - RNA, 23 nt, Human
auguuauuauuagcagucuugcc

SEQ ID NO: 1062764 - RNA, 22 nt, Human
agguggcucugacagcucuggu

SEQ ID NO: 1062765 - RNA, 22 nt, Human
aggacuuagaacauuauguacu

SEQ ID NO: 1062766 - RNA, 22 nt, Human
cccacacucugagaaaugcuga

SEQ ID NO: 1062767 - RNA, 22 nt, Human
gcacccagaggucagcagugcu

SEQ ID NO: 1062768 - RNA, 22 nt, Human
agcuuuaucuucaccugggaau

SEQ ID NO: 1062769 - RNA, 22 nt, Human
guccaagucuuccuucccaaac

SEQ ID NO: 1062770 - RNA, 22 nt, Human
ccugggcucaccaugccuugga

SEQ ID NO: 1062771 - RNA, 22 nt, Human
guccacagagggcugggcaggc

SEQ ID NO: 1062772 - RNA, 22 nt, Human
acucacuuuccauucaagcacc

SEQ ID NO: 1062773 - RNA, 22 nt, Human
uaauuucuucaucucugcagcu

SEQ ID NO: 1062774 - RNA, 19 nt, Human
uccugcagaccagaccugu

SEQ ID NO: 1062775 - RNA, 22 nt, Human
uccaggcagggcagccaucaag

SEQ ID NO: 1062776 - RNA, 22 nt, Human
acagcuuuguuuucccugcuga

SEQ ID NO: 1062777 - RNA, 22 nt, Human
ugauugacuuuagaauagcacu

SEQ ID NO: 1062778 - RNA, 22 nt, Human
ggcaggcuuucagcaucaaguc

SEQ ID NO: 1062779 - RNA, 22 nt, Human
acaggccuuggcaggcauguga

SEQ ID NO: 1062780 - RNA, 22 nt, Human
uuucacaagacagcuacuguug

SEQ ID NO: 1062781 - RNA, 22 nt, Human
uggcaugggcaaaccagggaaa

SEQ ID NO: 1062782 - RNA, 22 nt, Human
cagggcuagugacaccccaguc

SEQ ID NO: 1062783 - RNA, 20 nt, Human
gauuacaaaaugaaaugcau

SEQ ID NO: 1062784 - RNA, 22 nt, Human
uacccagcaaucccuagagguu

SEQ ID NO: 1062785 - RNA, 22 nt, Human
gaugaagcuauuugguuggcac

SEQ ID NO: 1062786 - RNA, 18 nt, Human
ucagagagcagcuuuauu

SEQ ID NO: 1062787 - RNA, 23 nt, Human
aguaugaauucauuguuuuaguu

SEQ ID NO: 1062788 - RNA, 22 nt, Human
augauugcagcccuacagcugu

SEQ ID NO: 1062789 - RNA, 22 nt, Human
gaggcugcuuugaugacaggag

SEQ ID NO: 1062790 - RNA, 22 nt, Human
cugcagggaccacaagcagguu

SEQ ID NO: 1062791 - RNA, 21 nt, Human
uaaauaauaaguugcugagau

SEQ ID NO: 1062792 - RNA, 22 nt, Human
agaggcuuggccucaguucugu

SEQ ID NO: 1062793 - RNA, 18 nt, Human
gggcucacacaggucauc

SEQ ID NO: 1062794 - RNA, 22 nt, Human
uugggcucaggaguuugagacc

SEQ ID NO: 1062795 - RNA, 22 nt, Human
aagggcuccacuugaaucacac

SEQ ID NO: 1062796 - RNA, 19 nt, Human
agaaucaggucaggugaca

SEQ ID NO: 1062797 - RNA, 21 nt, Human
aauuagggugccucuuauaau

SEQ ID NO: 1062798 - RNA, 22 nt, Human
auuuggcaacauuaauugaauc

SEQ ID NO: 1062799 - RNA, 22 nt, Human
uuuaaauuuagaagaaacacug

SEQ ID NO: 1062800 - RNA, 22 nt, Human
uggaacacagugauugauagcg

SEQ ID NO: 1062801 - RNA, 22 nt, Human
auucucaauggcuacuuucaua

SEQ ID NO: 1062802 - RNA, 22 nt, Human
ugcaguggaaagacucagacuu

SEQ ID NO: 1062803 - RNA, 22 nt, Human
gaagagaaaggcaaggaguuuu

SEQ ID NO: 1062804 - RNA, 22 nt, Human
cagcuuugugcaaugcagucuc

SEQ ID NO: 1062805 - RNA, 22 nt, Human
gacccaggguauccagagcugc

SEQ ID NO: 1062806 - RNA, 22 nt, Human
gccuggcacaggaauuaggagg

SEQ ID NO: 1062807 - RNA, 22 nt, Human
cacccagccuucacacaggagu

SEQ ID NO: 1062808 - RNA, 20 nt, Human
ccagagaguagguuagugau

SEQ ID NO: 1062809 - RNA, 22 nt, Human
cacucugaugguuucuguucaa

SEQ ID NO: 1062810 - RNA, 22 nt, Human
gacauaauaaucugaccuagau

SEQ ID NO: 1062811 - RNA, 22 nt, Human
gcacauacccacugucaagcac

SEQ ID NO: 1062812 - RNA, 22 nt, Human
ucagcucuguuuugaguggaac

SEQ ID NO: 1062813 - RNA, 22 nt, Human
auguagaaaguucauagaugcg

SEQ ID NO: 1062814 - RNA, 22 nt, Human
uccugcagagacagaggccuca

SEQ ID NO: 1062815 - RNA, 22 nt, Human
cauaauuucuguaucagcacca

SEQ ID NO: 1062816 - RNA, 22 nt, Human
augaacuuauuucugaacuuuu

SEQ ID NO: 1062817 - RNA, 22 nt, Human
ccagcuuuggaguguuguugcu

SEQ ID NO: 1062818 - RNA, 22 nt, Human
ucccaggccauaaaacucagag

SEQ ID NO: 1062819 - RNA, 17 nt, Human
ugcaggcuguuauagcc

SEQ ID NO: 1062820 - RNA, 18 nt, Human
uuucacaaccuccagagg

SEQ ID NO: 1062821 - RNA, 22 nt, Human
cauucacaaagcugauugaugg

SEQ ID NO: 1062822 - RNA, 22 nt, Human
cuucauuaaugucuauaaguuu

SEQ ID NO: 1062823 - RNA, 22 nt, Human
auacacauauguguguauaugu

SEQ ID NO: 1062824 - RNA, 22 nt, Human
ccaggccucccuuuuccagcca

SEQ ID NO: 1062825 - RNA, 17 nt, Human
acaggccugcuugcacu

SEQ ID NO: 1062826 - RNA, 22 nt, Human
agcaggcuaagggaccuguuua

SEQ ID NO: 1062827 - RNA, 22 nt, Human
gaggcacauauauacagagccc

SEQ ID NO: 1062828 - RNA, 22 nt, Human
gcccaggcuggagugcaguagc

SEQ ID NO: 1062829 - RNA, 22 nt, Human
cucuccaggacuuuggcccaau

SEQ ID NO: 1062830 - RNA, 22 nt, Human
gaaaacacuuugaucugaaagu

SEQ ID NO: 1062831 - RNA, 22 nt, Human
cccagcuugucugauucagccu

SEQ ID NO: 1062832 - RNA, 18 nt, Human
ggcaggcucucuggguca

SEQ ID NO: 1062833 - RNA, 22 nt, Human
guugggaagcagauggaugagc

SEQ ID NO: 1062834 - RNA, 22 nt, Human
ggcuucugagugcucugcuguu

SEQ ID NO: 1062835 - RNA, 22 nt, Human
uacacagauaugugaucaauca

SEQ ID NO: 1062836 - RNA, 22 nt, Human
auccacagucuuagccaucaaa

SEQ ID NO: 1062837 - RNA, 16 nt, Human
cagcuuuaugucagug

SEQ ID NO: 1062838 - RNA, 22 nt, Human
ugguccuggaagguccugaggg

SEQ ID NO: 1062839 - RNA, 22 nt, Human
ugggaccucucuugagagagca

SEQ ID NO: 1062840 - RNA, 21 nt, Human
uguguuuuaaugauauucugu

SEQ ID NO: 1062841 - RNA, 22 nt, Human
aauguauguguauaucaaauca

SEQ ID NO: 1062842 - RNA, 22 nt, Human
ucuuuauuuaagucuguuguaa

SEQ ID NO: 1062843 - RNA, 22 nt, Human
cuccagugagcgcggggcaugg

SEQ ID NO: 1062844 - RNA, 22 nt, Human
uuuugagauggugucucgcucc

SEQ ID NO: 1062845 - RNA, 22 nt, Human
gaggcucugugaugugccaggc

SEQ ID NO: 1062846 - RNA, 22 nt, Human
uuuucauuguuccucgagcauu

SEQ ID NO: 1062847 - RNA, 22 nt, Human
gcagggacgcagcacucuccgu

SEQ ID NO: 1062848 - RNA, 20 nt, Human
aaaggaauauaugaaguaua

SEQ ID NO: 1062849 - RNA, 21 nt, Human
uccacccucucugcucccagu

SEQ ID NO: 1062850 - RNA, 22 nt, Human
ugggaccugcuccuggaaugag

SEQ ID NO: 1062851 - RNA, 22 nt, Human
cuggcagguuuggugucuggug

SEQ ID NO: 1062852 - RNA, 22 nt, Human
uuaauuuucucaucugugaaau

SEQ ID NO: 1062853 - RNA, 22 nt, Human
augggcugggaucugaguguca

SEQ ID NO: 1062854 - RNA, 22 nt, Human
aagagcaucaaugacucgcagu

SEQ ID NO: 1062855 - RNA, 22 nt, Human
acugagagucaagauagcaugg

SEQ ID NO: 1062856 - RNA, 22 nt, Human
aauguaugggugagaaaguuga

SEQ ID NO: 1062857 - RNA, 22 nt, Human
acaugauauuaaugucuuauuu

SEQ ID NO: 1062858 - RNA, 22 nt, Human
agcaggcuugguccccagccuc

SEQ ID NO: 1062859 - RNA, 22 nt, Human
cuaggaaucaccaagauucuag

SEQ ID NO: 1062860 - RNA, 22 nt, Human
acauuuagcuguacaaucuaug

SEQ ID NO: 1062861 - RNA, 22 nt, Human
acccaggguagaaccucagagc

SEQ ID NO: 1062862 - RNA, 21 nt, Human
cccuugccugcacuccucggc

SEQ ID NO: 1062863 - RNA, 22 nt, Human
auuccacagcuacaucaaucua

SEQ ID NO: 1062864 - RNA, 22 nt, Human
acaguaaaaagccuuagaauuu

SEQ ID NO: 1062865 - RNA, 22 nt, Human
ucagcuuugggggucucaggag

SEQ ID NO: 1062866 - RNA, 23 nt, Human
acugggcugaaauuuuucauggc

SEQ ID NO: 1062867 - RNA, 22 nt, Human
ucuggcagagauauccauccca

SEQ ID NO: 1062868 - RNA, 22 nt, Human
uuccuggcucacagcagugggg

SEQ ID NO: 1062869 - RNA, 22 nt, Human
ucagccucagguguucagauuu

SEQ ID NO: 1062870 - RNA, 22 nt, Human
auuauuagacuuauaugguagu

SEQ ID NO: 1062871 - RNA, 22 nt, Human
ccugggcucugaggagggaguc

SEQ ID NO: 1062872 - RNA, 22 nt, Human
gguuccuucugaggucccugua

SEQ ID NO: 1062873 - RNA, 22 nt, Human
cagggcucccuugcaaggaggg

SEQ ID NO: 1062874 - RNA, 22 nt, Human
acaguguguucugggaccucca

SEQ ID NO: 1062875 - RNA, 22 nt, Human
gugauaaagacgugucauaauu

SEQ ID NO: 1062876 - RNA, 22 nt, Human
gagcauuugguuauaguaauuu

SEQ ID NO: 1062877 - RNA, 22 nt, Human
ugauucacagacuucacaaggc

SEQ ID NO: 1062878 - RNA, 22 nt, Human
uguccaggucagcagcagggac

SEQ ID NO: 1062879 - RNA, 22 nt, Human
guccuggcccaggaguacacau

SEQ ID NO: 1062880 - RNA, 22 nt, Human
aaauuucuguuguuuugagcca

SEQ ID NO: 1062881 - RNA, 22 nt, Human
gacuacucaaacuuucucuaua

SEQ ID NO: 1062882 - RNA, 20 nt, Human
cauauauaccuagaagugga

SEQ ID NO: 1062883 - RNA, 22 nt, Human
ucacacaugaguaaauacaggg

SEQ ID NO: 1062884 - RNA, 20 nt, Human
uccugcaguuccuaggaggg

SEQ ID NO: 1062885 - RNA, 22 nt, Human
aaacagauaaugcuauaaaugg

SEQ ID NO: 1062886 - RNA, 22 nt, Human
cucucuccuuagcugcagacca

SEQ ID NO: 1062887 - RNA, 22 nt, Human
aacacauauuuauauaugcaca

SEQ ID NO: 1062888 - RNA, 22 nt, Human
aaccccgcucaggcugggugag

SEQ ID NO: 1062889 - RNA, 22 nt, Human
cccagcuugcccaggacugagg

SEQ ID NO: 1062890 - RNA, 22 nt, Human
gagacagaguuucacucuuguu

SEQ ID NO: 1062891 - RNA, 22 nt, Human
uaccugcacagccagccaugug

SEQ ID NO: 1062892 - RNA, 22 nt, Human
agcaggcugggcaauaugggca

SEQ ID NO: 1062893 - RNA, 22 nt, Human
uggucucugcaggccaggcuca

SEQ ID NO: 1062894 - RNA, 21 nt, Human
uccaagcucaacucccuuccu

SEQ ID NO: 1062895 - RNA, 22 nt, Human
cagagcagggguuucccagguu

SEQ ID NO: 1062896 - RNA, 22 nt, Human
ggcaggcuugauauggggggac

SEQ ID NO: 1062897 - RNA, 22 nt, Human
gcaggcucaaaagcugguagga

SEQ ID NO: 1062898 - RNA, 22 nt, Human
uugggaagaaacauguccauca

SEQ ID NO: 1062899 - RNA, 22 nt, Human
cacaccagagguuaccugcaaa

SEQ ID NO: 1062900 - RNA, 22 nt, Human
ucaaaguuacuugugguuuucu

SEQ ID NO: 1062901 - RNA, 21 nt, Human
ccaggcuccugaggcugguca

SEQ ID NO: 1062902 - RNA, 22 nt, Human
uacaauauguggccuuuuguga

SEQ ID NO: 1062903 - RNA, 22 nt, Human
cuuauuagugucugucugaguu

SEQ ID NO: 1062904 - RNA, 22 nt, Human
acuuuacaagcuuauagccuag

SEQ ID NO: 1062905 - RNA, 22 nt, Human
caccuaggguuucgccuuucuu

SEQ ID NO: 1062906 - RNA, 22 nt, Human
agcucugacugaagagaugcaa

SEQ ID NO: 1062907 - RNA, 22 nt, Human
aaacauuguaauuuuagcaugg

SEQ ID NO: 1062908 - RNA, 22 nt, Human
cauuuauugguuaggccagcag

SEQ ID NO: 1062909 - RNA, 22 nt, Human
acuccaggcaucugcuucugcu

SEQ ID NO: 1062910 - RNA, 22 nt, Human
gcagggaccucacuacccccag

SEQ ID NO: 1062911 - RNA, 20 nt, Human
cccugcagccaugggagugg

SEQ ID NO: 1062912 - RNA, 22 nt, Human
uuauuacacugaaagaauugcg

SEQ ID NO: 1062913 - RNA, 22 nt, Human
uacccagggcuuuucugaugca

SEQ ID NO: 1062914 - RNA, 22 nt, Human
uguggggaagaguaugacuugg

SEQ ID NO: 1062915 - RNA, 22 nt, Human
aauacauauggaauuccauguu

SEQ ID NO: 1062916 - RNA, 23 nt, Human
uccuuccuuugagaggcuccauc

SEQ ID NO: 1062917 - RNA, 22 nt, Human
uggcagagagagugcagucgac

SEQ ID NO: 1062918 - RNA, 22 nt, Human
cuagggacagaaagaggguaga

SEQ ID NO: 1062919 - RNA, 22 nt, Human
accaggcaguauggugcugcaa

SEQ ID NO: 1062920 - RNA, 22 nt, Human
cccacacacuggcugcugccaa

SEQ ID NO: 1062921 - RNA, 22 nt, Human
aucugcuugaguuugaagucag

SEQ ID NO: 1062922 - RNA, 22 nt, Human
ucagcuuucucagaggccuaac

SEQ ID NO: 1062923 - RNA, 20 nt, Human
gcaaaauaggcucuguuggu

SEQ ID NO: 1062924 - RNA, 22 nt, Human
gccuggcaauggccucaggaag

SEQ ID NO: 1062925 - RNA, 22 nt, Human
gccaagcuuauaugaugcuuga

SEQ ID NO: 1062926 - RNA, 22 nt, Human
agcaguccaacugagguggcau

SEQ ID NO: 1062927 - RNA, 22 nt, Human
uucacauugugcagauuauggu

SEQ ID NO: 1062928 - RNA, 22 nt, Human
ccagagagggcgccaccuggag

SEQ ID NO: 1062929 - RNA, 22 nt, Human
caguauagaaaguuuuaaauug

SEQ ID NO: 1062930 - RNA, 22 nt, Human
auuucucacucacaguccaugu

SEQ ID NO: 1062931 - RNA, 22 nt, Human
cccagccuuugcuuccugguuc

SEQ ID NO: 1062932 - RNA, 18 nt, Human
uguagagccagguuugcc

SEQ ID NO: 1062933 - RNA, 22 nt, Human
ugccagccagggaagcucaccc

SEQ ID NO: 1062934 - RNA, 22 nt, Human
auauauuugagaauauucauga

SEQ ID NO: 1062935 - RNA, 22 nt, Human
ccauucauacaauuuuguucua

SEQ ID NO: 1062936 - RNA, 22 nt, Human
ccaggccuagccccugagggua

SEQ ID NO: 1062937 - RNA, 22 nt, Human
uuaacacagggggagacaaagu

SEQ ID NO: 1062938 - RNA, 22 nt, Human
ggccucagggucacucuguaga

SEQ ID NO: 1062939 - RNA, 22 nt, Human
uagggaccuuagaauuguaugu

SEQ ID NO: 1062940 - RNA, 20 nt, Human
ucagagagagggugccacuu

SEQ ID NO: 1062941 - RNA, 22 nt, Human
acauacuuaugcuaaaaauaua

SEQ ID NO: 1062942 - RNA, 22 nt, Human
ugcuucuguuuguuucugucau

SEQ ID NO: 1062943 - RNA, 22 nt, Human
ggggcuccagucuucacauuuu

SEQ ID NO: 1062944 - RNA, 22 nt, Human
gcacauacugcaaagauuacua

SEQ ID NO: 1062945 - RNA, 22 nt, Human
acccagccuacaaagcucaccu

SEQ ID NO: 1062946 - RNA, 22 nt, Human
aguccagugucaaggugccauu

SEQ ID NO: 1062947 - RNA, 22 nt, Human
cgcaggcucgguucacagagca

SEQ ID NO: 1062948 - RNA, 22 nt, Human
cacacaucuuaucccaguuauu

SEQ ID NO: 1062949 - RNA, 22 nt, Human
gcacccagggacuuggcuggcc

SEQ ID NO: 1062950 - RNA, 22 nt, Human
gagggcucugucuggaagggaa

SEQ ID NO: 1062951 - RNA, 20 nt, Human
ucacuguaauugccuacauu

SEQ ID NO: 1062952 - RNA, 22 nt, Human
agaggccugugugcuccagugg

SEQ ID NO: 1062953 - RNA, 22 nt, Human
uccaggcauguugggaagauga

SEQ ID NO: 1062954 - RNA, 22 nt, Human
ccaggccuucugaggacacucu

SEQ ID NO: 1062955 - RNA, 22 nt, Human
ucauuacaguguuuauaugucu

SEQ ID NO: 1062956 - RNA, 20 nt, Human
ccugggcucaaagcauccuc

SEQ ID NO: 1062957 - RNA, 22 nt, Human
ucagcuuugccaccagcuguaa

SEQ ID NO: 1062958 - RNA, 22 nt, Human
gaugaagcuaaaucuaagguuu

SEQ ID NO: 1062959 - RNA, 22 nt, Human
guccucugcuucaugcccugau

SEQ ID NO: 1062960 - RNA, 21 nt, Human
uaugaacaugaccaauagucc

SEQ ID NO: 1062961 - RNA, 22 nt, Human
agccaccuucuccaaggccuag

SEQ ID NO: 1062962 - RNA, 22 nt, Human
agcaggcuuacuuucugauuag

SEQ ID NO: 1062963 - RNA, 19 nt, Human
uccaggaggcugccauuga

SEQ ID NO: 1062964 - RNA, 22 nt, Human
cuguaugaaauuaaguaaacag

SEQ ID NO: 1062965 - RNA, 22 nt, Human
aauguuguuuuucugcaugucu

SEQ ID NO: 1062966 - RNA, 22 nt, Human
aaacaugagcauuucuguuuaa

SEQ ID NO: 1062967 - RNA, 20 nt, Human
ucuguacacucaucuucugc

SEQ ID NO: 1062968 - RNA, 22 nt, Human
uacccagcuucaagucaggacu

SEQ ID NO: 1062969 - RNA, 22 nt, Human
aauuugauuuucuuaaaccaua

SEQ ID NO: 1062970 - RNA, 22 nt, Human
uacauucccccaauuaccaaug

SEQ ID NO: 1062971 - RNA, 22 nt, Human
uucagagauggaaggcagaaug

SEQ ID NO: 1062972 - RNA, 22 nt, Human
auaaucuuucuuuuccagauag

SEQ ID NO: 1062973 - RNA, 20 nt, Human
ucccaaggaugccugggugu

SEQ ID NO: 1062974 - RNA, 22 nt, Human
ugaaauuaugcauuguuguacc

SEQ ID NO: 1062975 - RNA, 22 nt, Human
ccaggcucuaucccuccuucuu

SEQ ID NO: 1062976 - RNA, 22 nt, Human
cuaugagaagaaaacaagauua

SEQ ID NO: 1062977 - RNA, 22 nt, Human
uacuuuuagccuauuugauucu

SEQ ID NO: 1062978 - RNA, 22 nt, Human
ugaaauaucauuuucaucuccc

SEQ ID NO: 1062979 - RNA, 22 nt, Human
gagacacacauucuggagagaa

SEQ ID NO: 1062980 - RNA, 18 nt, Human
ucuaggagaguaccuacc

SEQ ID NO: 1062981 - RNA, 22 nt, Human
auacacacugcuauccuuuuuu

SEQ ID NO: 1062982 - RNA, 22 nt, Human
agugccccaugggugccugggg

SEQ ID NO: 1062983 - RNA, 22 nt, Human
gcacacugcggugaugugaguc

SEQ ID NO: 1062984 - RNA, 22 nt, Human
agcuuuauucaugauuucaggg

SEQ ID NO: 1062985 - RNA, 22 nt, Human
ggcuuuauuuugcaugaaugcu

SEQ ID NO: 1062986 - RNA, 22 nt, Human
ucccacacuugaaacaaggcug

SEQ ID NO: 1062987 - RNA, 22 nt, Human
ggaaacugcuuacacuagaggg

SEQ ID NO: 1062988 - RNA, 22 nt, Human
uccaggagaggccugaccaggu

SEQ ID NO: 1062989 - RNA, 22 nt, Human
cccugcagagggaugggggcag

SEQ ID NO: 1062990 - RNA, 22 nt, Human
aggcaguggagcuggaauaggc

SEQ ID NO: 1062991 - RNA, 22 nt, Human
aaucuuagguuuggcuucaucu

SEQ ID NO: 1062992 - RNA, 22 nt, Human
uuucaugauuaacuuagugaau

SEQ ID NO: 1062993 - RNA, 22 nt, Human
cagcucuguucauagauggugc

SEQ ID NO: 1062994 - RNA, 22 nt, Human
cuguaugaaauugucauuuuua

SEQ ID NO: 1062995 - RNA, 22 nt, Human
cuccaggccauggcugcggagg

SEQ ID NO: 1062996 - RNA, 22 nt, Human
uuaacacauauuuaucaauugc

SEQ ID NO: 1062997 - RNA, 22 nt, Human
caugaguucaucugcuucucuu

SEQ ID NO: 1062998 - RNA, 22 nt, Human
ccugcagguugcagaggcggaa

SEQ ID NO: 1062999 - RNA, 22 nt, Human
cuggcaguuugccaggagcucg

SEQ ID NO: 1063000 - RNA, 22 nt, Human
gggcugaccaaugccuugcuuu

SEQ ID NO: 1063001 - RNA, 23 nt, Human
uggccagguagaggagguaguga

SEQ ID NO: 1063002 - RNA, 22 nt, Human
uguuccaauaaggaguugaaau

SEQ ID NO: 1063003 - RNA, 22 nt, Human
uuuaugagcaaugcugagggga

SEQ ID NO: 1063004 - RNA, 22 nt, Human
auuucacaucuaucucagauuu

SEQ ID NO: 1063005 - RNA, 22 nt, Human
acaggcagguccugucccagcu

SEQ ID NO: 1063006 - RNA, 22 nt, Human
aaaguucuggcauuuucugucu

SEQ ID NO: 1063007 - RNA, 22 nt, Human
uagggcucagcucuagcuccug

SEQ ID NO: 1063008 - RNA, 22 nt, Human
gggcuguaggagcuggaauggg

SEQ ID NO: 1063009 - RNA, 22 nt, Human
aaaagguuuugaguacaaauau

SEQ ID NO: 1063010 - RNA, 22 nt, Human
uugaaaaaauugguagaggaug

SEQ ID NO: 1063011 - RNA, 22 nt, Human
aucacagagcucccuuccacug

SEQ ID NO: 1063012 - RNA, 22 nt, Human
uacauaauuaaucuuuaaguuc

SEQ ID NO: 1063013 - RNA, 22 nt, Human
acacauuucucuuuuuguaagu

SEQ ID NO: 1063014 - RNA, 22 nt, Human
uagauacaggcucucugagccu

SEQ ID NO: 1063015 - RNA, 22 nt, Human
cagggcucgcucuugcccuucg

SEQ ID NO: 1063016 - RNA, 22 nt, Human
agagggcugccucagucagcua

SEQ ID NO: 1063017 - RNA, 22 nt, Human
aagggcucugugcuugucccau

SEQ ID NO: 1063018 - RNA, 22 nt, Human
aacaaaagccgaaguagguguc

SEQ ID NO: 1063019 - RNA, 22 nt, Human
auuaauuuuucugacagccaca

SEQ ID NO: 1063020 - RNA, 22 nt, Human
gcccaagcuggacugcaguggc

SEQ ID NO: 1063021 - RNA, 20 nt, Human
cccacacccuucccacuugg

SEQ ID NO: 1063022 - RNA, 22 nt, Human
cccuuccugggugucccggagu

SEQ ID NO: 1063023 - RNA, 22 nt, Human
gcaaggaccuuugagcgugcca

SEQ ID NO: 1063024 - RNA, 22 nt, Human
ugcaggcuuuagccccauggcu

SEQ ID NO: 1063025 - RNA, 22 nt, Human
uuugauuuacuggauauucuca

SEQ ID NO: 1063026 - RNA, 20 nt, Human
ccaggccugggccugcucua

SEQ ID NO: 1063027 - RNA, 22 nt, Human
auguagaagugggcauuauaga

SEQ ID NO: 1063028 - RNA, 22 nt, Human
gucugucauacggcuuauguaa

SEQ ID NO: 1063029 - RNA, 22 nt, Human
cagagacuggagugcaguggcg

SEQ ID NO: 1063030 - RNA, 22 nt, Human
ccugggcuuccacgagcagagg

SEQ ID NO: 1063031 - RNA, 22 nt, Human
acacacacaagcagguugugga

SEQ ID NO: 1063032 - RNA, 22 nt, Human
aaagucuuuauuuuguaucuuu

SEQ ID NO: 1063033 - RNA, 20 nt, Human
ugcaaacacagaguguauga

SEQ ID NO: 1063034 - RNA, 19 nt, Human
cagguggcgcucuacaggg

SEQ ID NO: 1063035 - RNA, 22 nt, Human
cagcuuuccagagaccugcccc

SEQ ID NO: 1063036 - RNA, 22 nt, Human
cuuccaagaugaacagcaagcg

SEQ ID NO: 1063037 - RNA, 22 nt, Human
gagggcucaacuacuacuaggc

SEQ ID NO: 1063038 - RNA, 22 nt, Human
uuugauaagagcugcugaaacu

SEQ ID NO: 1063039 - RNA, 22 nt, Human
aagcuuccugaaugcucauuua

SEQ ID NO: 1063040 - RNA, 22 nt, Human
caggcuggagugcaauggcaca

SEQ ID NO: 1063041 - RNA, 22 nt, Human
gcagagaggaaugaagccaucc

SEQ ID NO: 1063042 - RNA, 22 nt, Human
ggacuccucuagaaguugaggc

SEQ ID NO: 1063043 - RNA, 22 nt, Human
uguuuucauuugauguaacaaa

SEQ ID NO: 1063044 - RNA, 22 nt, Human
gcaaacuguuggaguagagucu

SEQ ID NO: 1063045 - RNA, 22 nt, Human
cagagagcuuagugugcugcau

SEQ ID NO: 1063046 - RNA, 22 nt, Human
gcuggcaggauagaagucuaau

SEQ ID NO: 1063047 - RNA, 22 nt, Human
uaauaguugugacuuuguaaag

SEQ ID NO: 1063048 - RNA, 22 nt, Human
acuggcagaauugaauaguugu

SEQ ID NO: 1063049 - RNA, 18 nt, Human
ugcuuuaugcuuauauaa

SEQ ID NO: 1063050 - RNA, 22 nt, Human
uacaaagucacauugaaaugaa

SEQ ID NO: 1063051 - RNA, 22 nt, Human
uuuuggaaugaggaacauccag

SEQ ID NO: 1063052 - RNA, 22 nt, Human
ugcaggcugcagucucaggugg

SEQ ID NO: 1063053 - RNA, 22 nt, Human
ccagagaggcaaaacuccuucc

SEQ ID NO: 1063054 - RNA, 22 nt, Human
ugcuuuaucugacuuggcgcug

SEQ ID NO: 1063055 - RNA, 22 nt, Human
agguauaagucucauuucuguu

SEQ ID NO: 1063056 - RNA, 23 nt, Human
gccaggcacaugguggacacgca

SEQ ID NO: 1063057 - RNA, 22 nt, Human
cccugcagaaccacagacaaac

SEQ ID NO: 1063058 - RNA, 22 nt, Human
ccugcagaggucaggccagaaa

SEQ ID NO: 1063059 - RNA, 22 nt, Human
ucuuuauugcuacugguuuguc

SEQ ID NO: 1063060 - RNA, 21 nt, Human
acauucacaggauauuaucau

SEQ ID NO: 1063061 - RNA, 22 nt, Human
acaucugaggagaccagccucu

SEQ ID NO: 1063062 - RNA, 22 nt, Human
ucugggcugcuaugaggcagag

SEQ ID NO: 1063063 - RNA, 19 nt, Human
ugcuagaaauucugugacu

SEQ ID NO: 1063064 - RNA, 22 nt, Human
uuuagggaugucagaacaggga

SEQ ID NO: 1063065 - RNA, 22 nt, Human
aguauaaagugguuuucagcac

SEQ ID NO: 1063066 - RNA, 22 nt, Human
gcuggcaguaaaggguuuggca

SEQ ID NO: 1063067 - RNA, 22 nt, Human
uuuguacauauauaaaaucugu

SEQ ID NO: 1063068 - RNA, 22 nt, Human
uuuuauuaguggcuagaugggg

SEQ ID NO: 1063069 - RNA, 17 nt, Human
gccuucucugcccucac

SEQ ID NO: 1063070 - RNA, 22 nt, Human
acagauuuuaaaugacacuccc

SEQ ID NO: 1063071 - RNA, 18 nt, Human
cucagagaugcccuuauu

SEQ ID NO: 1063072 - RNA, 22 nt, Human
cacacacuguuaauguaggagu

SEQ ID NO: 1063073 - RNA, 21 nt, Human
cagacccucuagaggccaccu

SEQ ID NO: 1063074 - RNA, 22 nt, Human
cccaggcagccccagaagcuug

SEQ ID NO: 1063075 - RNA, 22 nt, Human
guccucugaaagaugaaccaug

SEQ ID NO: 1063076 - RNA, 21 nt, Human
caugaagccgguucccuguuu

SEQ ID NO: 1063077 - RNA, 22 nt, Human
acaaauccagugaacuccagug

SEQ ID NO: 1063078 - RNA, 22 nt, Human
aaaguuugagugauuugacaca

SEQ ID NO: 1063079 - RNA, 22 nt, Human
uccaggcacagaguuggucagu

SEQ ID NO: 1063080 - RNA, 22 nt, Human
uuccuggccuaagguaggugac

SEQ ID NO: 1063081 - RNA, 22 nt, Human
cagggcucaggaaaucagacgu

SEQ ID NO: 1063082 - RNA, 22 nt, Human
cuacauaaauauuuaugugucu

SEQ ID NO: 1063083 - RNA, 22 nt, Human
ccacuguaaguuugaaaauaac

SEQ ID NO: 1063084 - RNA, 22 nt, Human
augcuuuuaugucacaugguca

SEQ ID NO: 1063085 - RNA, 23 nt, Human
agaccugcaucugauaggcccug

SEQ ID NO: 1063086 - RNA, 20 nt, Human
ucccaggcugggcuccagcu

SEQ ID NO: 1063087 - RNA, 22 nt, Human
ugaaacaaugugaaguugcuga

SEQ ID NO: 1063088 - RNA, 22 nt, Human
guccaagagucaagaagggggc

SEQ ID NO: 1063089 - RNA, 22 nt, Human
aguaugaauugcuuugccugua

SEQ ID NO: 1063090 - RNA, 22 nt, Human
gccugcagauauauaggauggu

SEQ ID NO: 1063091 - RNA, 22 nt, Human
ugggggcugugcacaggcucac

SEQ ID NO: 1063092 - RNA, 22 nt, Human
uuucacauggaagcucucgaga

SEQ ID NO: 1063093 - RNA, 22 nt, Human
uuuucauuagaaugacugagaa

SEQ ID NO: 1063094 - RNA, 22 nt, Human
gaccucagugaauggucaugua

SEQ ID NO: 1063095 - RNA, 22 nt, Human
ucaucacauaugucaugauuug

SEQ ID NO: 1063096 - RNA, 22 nt, Human
acauaaugagcucuuuauaaau

SEQ ID NO: 1063097 - RNA, 22 nt, Human
uauuuaaaaagaggccagcugg

SEQ ID NO: 1063098 - RNA, 22 nt, Human
auggccugaugcaccuguccca

SEQ ID NO: 1063099 - RNA, 22 nt, Human
cuccagugcacccagaggauuu

SEQ ID NO: 1063100 - RNA, 22 nt, Human
agacaucagcuugugugcaggg

SEQ ID NO: 1063101 - RNA, 22 nt, Human
uuagggaaggcugcugucagcu

SEQ ID NO: 1063102 - RNA, 22 nt, Human
cagcuuuaccuuuaggaguaac

SEQ ID NO: 1063103 - RNA, 18 nt, Human
acucugcggaggccccag

SEQ ID NO: 1063104 - RNA, 20 nt, Human
gccucagccaacccaugggg

SEQ ID NO: 1063105 - RNA, 22 nt, Human
ccagagaggccaaggucguggu

SEQ ID NO: 1063106 - RNA, 23 nt, Human
ccagcccuccaccagcucuaggc

SEQ ID NO: 1063107 - RNA, 17 nt, Human
ccagagaguaguuagga

SEQ ID NO: 1063108 - RNA, 22 nt, Human
aaauccuaaggagaauaugauu

SEQ ID NO: 1063109 - RNA, 22 nt, Human
cagucucucuccuugcaggcgu

SEQ ID NO: 1063110 - RNA, 22 nt, Human
ucugggcugcugugcagugacc

SEQ ID NO: 1063111 - RNA, 22 nt, Human
uucugucacuuaggaggucaua

SEQ ID NO: 1063112 - RNA, 22 nt, Human
gcacccaggcuugggcagcaac

SEQ ID NO: 1063113 - RNA, 22 nt, Human
guuuauuauacaacaaaagcua

SEQ ID NO: 1063114 - RNA, 22 nt, Human
ucauuuguugaacuuuagugcg

SEQ ID NO: 1063115 - RNA, 22 nt, Human
cuaaaauuaucaagauaauucc

SEQ ID NO: 1063116 - RNA, 22 nt, Human
augaaugcugggacaaauauau

SEQ ID NO: 1063117 - RNA, 22 nt, Human
caggagcaaggagcagugggau

SEQ ID NO: 1063118 - RNA, 22 nt, Human
uuuuacuuaauucuuggucaug

SEQ ID NO: 1063119 - RNA, 21 nt, Human
aggucccagguuugggcagca

SEQ ID NO: 1063120 - RNA, 22 nt, Human
gcuaggaggaagaaugugaauu

SEQ ID NO: 1063121 - RNA, 22 nt, Human
ucauuguuucugcuuuucauga

SEQ ID NO: 1063122 - RNA, 22 nt, Human
acacauauauacauauuugugc

SEQ ID NO: 1063123 - RNA, 22 nt, Human
uaagaacaguagaacaguaggu

SEQ ID NO: 1063124 - RNA, 22 nt, Human
gccaggcauuauuccgaucccu

SEQ ID NO: 1063125 - RNA, 22 nt, Human
cgcuaggauuaggauuaauccu

SEQ ID NO: 1063126 - RNA, 22 nt, Human
uacauugcuagaaauguauuuu

SEQ ID NO: 1063127 - RNA, 22 nt, Human
uagcauuucacugaucuucacu

SEQ ID NO: 1063128 - RNA, 22 nt, Human
caggcuccuucccagggauggu

SEQ ID NO: 1063129 - RNA, 22 nt, Human
agcucugcuucuugggaagaug

SEQ ID NO: 1063130 - RNA, 22 nt, Human
ggcagagguagcuggaaccagg

SEQ ID NO: 1063131 - RNA, 20 nt, Human
gccugcagagaaggucagag

SEQ ID NO: 1063132 - RNA, 22 nt, Human
uggccaggaggcugcuucugac

SEQ ID NO: 1063133 - RNA, 22 nt, Human
uggcagugguaccggcucucag

SEQ ID NO: 1063134 - RNA, 22 nt, Human
aaggcuuuaugugaccaaaaga

SEQ ID NO: 1063135 - RNA, 22 nt, Human
ucagagagcagaacuuuuuuac

SEQ ID NO: 1063136 - RNA, 22 nt, Human
ugauuucuuccuugucauuaga

SEQ ID NO: 1063137 - RNA, 22 nt, Human
agccauccucccaccucagccu

SEQ ID NO: 1063138 - RNA, 22 nt, Human
acuucacagauauuuauuuggu

SEQ ID NO: 1063139 - RNA, 22 nt, Human
gagugaugucuguagugaagaa

SEQ ID NO: 1063140 - RNA, 22 nt, Human
gauggcagguaguggucucauc

SEQ ID NO: 1063141 - RNA, 22 nt, Human
uccccaccuaagauacccaucu

SEQ ID NO: 1063142 - RNA, 22 nt, Human
agcagguugugauacacucaga

SEQ ID NO: 1063143 - RNA, 22 nt, Human
cuggggaccagugucuguuugu

SEQ ID NO: 1063144 - RNA, 22 nt, Human
ugaaacauugcacuguaugaau

SEQ ID NO: 1063145 - RNA, 22 nt, Human
gggcugacauauuuggugcucu

SEQ ID NO: 1063146 - RNA, 22 nt, Human
uccaggcauaagccuugagugu

SEQ ID NO: 1063147 - RNA, 22 nt, Human
gggcuaggcuuggccagcacug

SEQ ID NO: 1063148 - RNA, 22 nt, Human
caaugaaaauuuaaguugcagc

SEQ ID NO: 1063149 - RNA, 22 nt, Human
agugugagccuacaggccaaag

SEQ ID NO: 1063150 - RNA, 22 nt, Human
cuacauggagaagaaaauucuu

SEQ ID NO: 1063151 - RNA, 22 nt, Human
cucuuaaaaacuugauauauuu

SEQ ID NO: 1063152 - RNA, 21 nt, Human
cagcccagcccauugacagug

SEQ ID NO: 1063153 - RNA, 18 nt, Human
gacaaaaguacagacaga

SEQ ID NO: 1063154 - RNA, 21 nt, Human
ugacugaggcuucuucacaca

SEQ ID NO: 1063155 - RNA, 22 nt, Human
uuguauuucuccacuuucuguu

SEQ ID NO: 1063156 - RNA, 21 nt, Human
uagcuuuaauauucccacauu

SEQ ID NO: 1063157 - RNA, 20 nt, Human
acaaagacuggaaaagcaag

SEQ ID NO: 1063158 - RNA, 21 nt, Human
acugugauaaugcuuuuucug

SEQ ID NO: 1063159 - RNA, 22 nt, Human
ucacuguauuugcugaugcaua

SEQ ID NO: 1063160 - RNA, 22 nt, Human
uucaguaugcugaaugauuuuu

SEQ ID NO: 1063161 - RNA, 22 nt, Human
uggaauuaucugaagugauuug

SEQ ID NO: 1063162 - RNA, 22 nt, Human
guaaaucagugucauuuuagaa

SEQ ID NO: 1063163 - RNA, 22 nt, Human
cuuugggcacugaaguaugggu

SEQ ID NO: 1063164 - RNA, 22 nt, Human
guccuggugcuggucauugucg

SEQ ID NO: 1063165 - RNA, 22 nt, Human
uggugcugccaccuccucugcu

SEQ ID NO: 1063166 - RNA, 22 nt, Human
gaagaaguguaagucuguuuca

SEQ ID NO: 1063167 - RNA, 22 nt, Human
auuuacucgugcuucauugaau

SEQ ID NO: 1063168 - RNA, 22 nt, Human
gacucugguugcggguucugcu

SEQ ID NO: 1063169 - RNA, 22 nt, Human
uuccuggggacuuaccgucauu

SEQ ID NO: 1063170 - RNA, 22 nt, Human
agugauguagguggauucuggc

SEQ ID NO: 1063171 - RNA, 22 nt, Human
uggcccgggaguuuugaagagu

SEQ ID NO: 1063172 - RNA, 22 nt, Human
ugugaagaucaggguccuagag

SEQ ID NO: 1063173 - RNA, 22 nt, Human
auccucagagaacgaacacaau

SEQ ID NO: 1063174 - RNA, 22 nt, Human
guaauucugugugaaucuauua

SEQ ID NO: 1063175 - RNA, 22 nt, Human
auugaagcauggagaugaggca

SEQ ID NO: 1063176 - RNA, 22 nt, Human
uuacuaguggagaaacugaggc

SEQ ID NO: 1063177 - RNA, 22 nt, Human
accuuguuguagguacaaaaga

SEQ ID NO: 1063178 - RNA, 22 nt, Human
gguuauuaguuucaccuggacu

SEQ ID NO: 1063179 - RNA, 22 nt, Human
acauucaugcaccuuccuaucc

SEQ ID NO: 1063180 - RNA, 22 nt, Human
agcaguuuauccucauaaugga

SEQ ID NO: 1063181 - RNA, 22 nt, Human
aucuaugugggaaucauaauag

SEQ ID NO: 1063182 - RNA, 22 nt, Human
acaauuucuaauauagaucuua

SEQ ID NO: 1063183 - RNA, 22 nt, Human
ucuauuaaugauucaauagugu

SEQ ID NO: 1063184 - RNA, 22 nt, Human
aaugagauggaggacucuuaau

SEQ ID NO: 1063185 - RNA, 22 nt, Human
ccugggacuuggucugggguuu

SEQ ID NO: 1063186 - RNA, 22 nt, Human
ugguccugagcaccagccugac

SEQ ID NO: 1063187 - RNA, 22 nt, Human
aaagucuuaauguaaguuuagu

SEQ ID NO: 1063188 - RNA, 23 nt, Human
uggccucuccccaccuggcagaa

SEQ ID NO: 1063189 - RNA, 22 nt, Human
guggucaucuaacuaaauuuuc

SEQ ID NO: 1063190 - RNA, 22 nt, Human
cugggucccggcuucuauccac

SEQ ID NO: 1063191 - RNA, 22 nt, Human
ucugcuugugucuguccagccu

SEQ ID NO: 1063192 - RNA, 22 nt, Human
ugguuggauggcucuuguggcu

SEQ ID NO: 1063193 - RNA, 20 nt, Human
uguauuuaaugaaggcuuuu

SEQ ID NO: 1063194 - RNA, 22 nt, Human
guccuggugccaccugcgggau

SEQ ID NO: 1063195 - RNA, 22 nt, Human
aguaaaaucaccaucucuuugu

SEQ ID NO: 1063196 - RNA, 22 nt, Human
agauugucauugacgaugagca

SEQ ID NO: 1063197 - RNA, 22 nt, Human
auugaagacuugguauccgugg

SEQ ID NO: 1063198 - RNA, 22 nt, Human
aauuagaagcuguuagcaaaau

SEQ ID NO: 1063199 - RNA, 22 nt, Human
caauguuuuuccuuccuuaaua

SEQ ID NO: 1063200 - RNA, 21 nt, Human
agcauucaaaagaugccauaa

SEQ ID NO: 1063201 - RNA, 22 nt, Human
cugggcuguuuguucuggucuc

SEQ ID NO: 1063202 - RNA, 22 nt, Human
ugcuggccucggcgcugggccu

SEQ ID NO: 1063203 - RNA, 22 nt, Human
ucuguccauucagaauggcccu

SEQ ID NO: 1063204 - RNA, 22 nt, Human
auuaguagcacacagagaucag

SEQ ID NO: 1063205 - RNA, 23 nt, Human
aguacauuugacccaaauaagcu

SEQ ID NO: 1063206 - RNA, 22 nt, Human
auguuugaaauuguaaguauau

SEQ ID NO: 1063207 - RNA, 22 nt, Human
uucugauugcugaugaggccca

SEQ ID NO: 1063208 - RNA, 22 nt, Human
uccuggguccauggcagccgaa

SEQ ID NO: 1063209 - RNA, 18 nt, Human
gguccugggccuggcuca

SEQ ID NO: 1063210 - RNA, 22 nt, Human
ccaaaauauuagugcuuaagua

SEQ ID NO: 1063211 - RNA, 22 nt, Human
uuaaguauauccauuugacugg

SEQ ID NO: 1063212 - RNA, 22 nt, Human
ugucauauagaauguucuauga

SEQ ID NO: 1063213 - RNA, 22 nt, Human
acaguuaguugaggaguguuug

SEQ ID NO: 1063214 - RNA, 22 nt, Human
gaaccuguccugagugaggagu

SEQ ID NO: 1063215 - RNA, 22 nt, Human
aucuucaaggaaaaaauacagu

SEQ ID NO: 1063216 - RNA, 22 nt, Human
aaauugcuugagauuagucucc

SEQ ID NO: 1063217 - RNA, 22 nt, Human
gggcccugcgacucgcggcgga

SEQ ID NO: 1063218 - RNA, 22 nt, Human
auucuugauauagauaguuaau

SEQ ID NO: 1063219 - RNA, 22 nt, Human
agauguuuuuccaggucuaauu

SEQ ID NO: 1063220 - RNA, 22 nt, Human
uaaccuguuaagggcugaccca

SEQ ID NO: 1063221 - RNA, 22 nt, Human
cuccuuagugccucugcacgag

SEQ ID NO: 1063222 - RNA, 22 nt, Human
uaaguauuggccuauagcuaga

SEQ ID NO: 1063223 - RNA, 22 nt, Human
auuacugaggcaaaguaguuuu

SEQ ID NO: 1063224 - RNA, 23 nt, Human
acucugacuuaguuauagcuauu

SEQ ID NO: 1063225 - RNA, 23 nt, Human
uuaagacuggcugaacuuaguag

SEQ ID NO: 1063226 - RNA, 20 nt, Human
caucaacaccuugucagccu

SEQ ID NO: 1063227 - RNA, 19 nt, Human
ccauucugucucugccaca

SEQ ID NO: 1063228 - RNA, 22 nt, Human
cugcucaauuccggcacgcugg

SEQ ID NO: 1063229 - RNA, 22 nt, Human
uccuggcucaggccccuggugc

SEQ ID NO: 1063230 - RNA, 22 nt, Human
gugggaguggagcucagcaugu

SEQ ID NO: 1063231 - RNA, 22 nt, Human
caaagaagagauuuacagagcu

SEQ ID NO: 1063232 - RNA, 22 nt, Human
guuuuguucaugaacauugggu

SEQ ID NO: 1063233 - RNA, 22 nt, Human
aaauucuguccugaaugccauu

SEQ ID NO: 1063234 - RNA, 22 nt, Human
guuauacuuaugugcaaaaaua

SEQ ID NO: 1063235 - RNA, 22 nt, Human
uuccaauaaaauguuauuugca

SEQ ID NO: 1063236 - RNA, 22 nt, Human
auccugggaaguggccuccucc

SEQ ID NO: 1063237 - RNA, 22 nt, Human
aacaguaugugagauuuacaca

SEQ ID NO: 1063238 - RNA, 22 nt, Human
uucauuacauucaaaaggcauu

SEQ ID NO: 1063239 - RNA, 22 nt, Human
guuuuaguggguggccacugau

SEQ ID NO: 1063240 - RNA, 22 nt, Human
guugggcugaagugugugcuua

SEQ ID NO: 1063241 - RNA, 22 nt, Human
cagcgguggcaaggugacugug

SEQ ID NO: 1063242 - RNA, 22 nt, Human
gcugacugguucaggucccgcu

SEQ ID NO: 1063243 - RNA, 22 nt, Human
uaauucuagauugacauuuuga

SEQ ID NO: 1063244 - RNA, 22 nt, Human
gcugggucucucccugguccug

SEQ ID NO: 1063245 - RNA, 22 nt, Human
uucuucauucccuuacuuccga

SEQ ID NO: 1063246 - RNA, 22 nt, Human
gucuguggaguugcuugcugga

SEQ ID NO: 1063247 - RNA, 17 nt, Human
uuuguucguuaguccgg

SEQ ID NO: 1063248 - RNA, 22 nt, Human
aaaucaugguggaagaaacaga

SEQ ID NO: 1063249 - RNA, 21 nt, Human
ucuuggggaggagggcugcac

SEQ ID NO: 1063250 - RNA, 22 nt, Human
acuuggucguggugcagcaugg

SEQ ID NO: 1063251 - RNA, 22 nt, Human
uccugggcccuccggaucaggu

SEQ ID NO: 1063252 - RNA, 22 nt, Human
gauuugucuauauucaaauaug

SEQ ID NO: 1063253 - RNA, 22 nt, Human
uaaaaucaugacagauugacau

SEQ ID NO: 1063254 - RNA, 22 nt, Human
ggccuugguaaauuggcauuug

SEQ ID NO: 1063255 - RNA, 22 nt, Human
aaaccuguuaauagagcgaugc

SEQ ID NO: 1063256 - RNA, 22 nt, Human
ucaauuuauguggcuauucauu

SEQ ID NO: 1063257 - RNA, 22 nt, Human
agagaauuaacauuccauggcu

SEQ ID NO: 1063258 - RNA, 22 nt, Human
cuucacugcagucauggcucug

SEQ ID NO: 1063259 - RNA, 22 nt, Human
uuguacuuaaauaugcaaauag

SEQ ID NO: 1063260 - RNA, 22 nt, Human
ugguaaaugucuaacaaucacu

SEQ ID NO: 1063261 - RNA, 20 nt, Human
ucagugggaaagugagagug

SEQ ID NO: 1063262 - RNA, 22 nt, Human
uggguccuggaaggcgacaggu

SEQ ID NO: 1063263 - RNA, 22 nt, Human
caugcauuucuaccaaggaaua

SEQ ID NO: 1063264 - RNA, 22 nt, Human
caugucaagacugaagauccag

SEQ ID NO: 1063265 - RNA, 22 nt, Human
agaaaagaggcuuucuaagcau

SEQ ID NO: 1063266 - RNA, 22 nt, Human
ggcuuccuccuuccugcuguca

SEQ ID NO: 1063267 - RNA, 22 nt, Human
cauuuacauuuaagguuaauau

SEQ ID NO: 1063268 - RNA, 20 nt, Human
cugggcagguguuugaucuc

SEQ ID NO: 1063269 - RNA, 22 nt, Human
gucuccugaggcauccauugaa

SEQ ID NO: 1063270 - RNA, 22 nt, Human
auccauuugccgugcuaugugc

SEQ ID NO: 1063271 - RNA, 22 nt, Human
ggccuugggauguggcugcagc

SEQ ID NO: 1063272 - RNA, 22 nt, Human
gcugcugcuugaaggcucggag

SEQ ID NO: 1063273 - RNA, 22 nt, Human
uuauuuaaaagugguaagauuc

SEQ ID NO: 1063274 - RNA, 22 nt, Human
uagcauuucacugaucuucacu

SEQ ID NO: 1063275 - RNA, 22 nt, Human
auguuguugaacucuuugcaug

SEQ ID NO: 1063276 - RNA, 22 nt, Human
uuaguuuccuguggugugaagu

SEQ ID NO: 1063277 - RNA, 22 nt, Human
auagcaaaggacaauagucagu

SEQ ID NO: 1063278 - RNA, 22 nt, Human
gcugguggcagagcuccgcggc

SEQ ID NO: 1063279 - RNA, 22 nt, Human
auauaguuggguuucauucuac

SEQ ID NO: 1063280 - RNA, 22 nt, Human
cucugguuucgcaggaaauaga

SEQ ID NO: 1063281 - RNA, 22 nt, Human
aauaaguacuuggggauaacuu

SEQ ID NO: 1063282 - RNA, 22 nt, Human
cccuuguuuuugaguacaauag

SEQ ID NO: 1063283 - RNA, 22 nt, Human
ugcauguuucuguauguuaaug

SEQ ID NO: 1063284 - RNA, 22 nt, Human
ggugggugagcccugggagcug

SEQ ID NO: 1063285 - RNA, 22 nt, Human
aauggcuguucucugugauugg

SEQ ID NO: 1063286 - RNA, 22 nt, Human
cuguggcugcgcccugggggag

SEQ ID NO: 1063287 - RNA, 22 nt, Human
auccauuuuuucagaaugcucu

SEQ ID NO: 1063288 - RNA, 22 nt, Human
uaaaguuggaccugauuuuauu

SEQ ID NO: 1063289 - RNA, 21 nt, Human
agggaaaaggcugagugaggg

SEQ ID NO: 1063290 - RNA, 22 nt, Human
ccugugggcgcagcuggaguca

SEQ ID NO: 1063291 - RNA, 22 nt, Human
auuguuacuggguuaauuugga

SEQ ID NO: 1063292 - RNA, 22 nt, Human
ccuggguccaauucuggcuugu

SEQ ID NO: 1063293 - RNA, 22 nt, Human
gagcuuuucccgucuuucucgu

SEQ ID NO: 1063294 - RNA, 22 nt, Human
uaauuucagugcaagcucacgg

SEQ ID NO: 1063295 - RNA, 22 nt, Human
gcugcuggcuuccugcuguuuu

SEQ ID NO: 1063296 - RNA, 22 nt, Human
cucugugaaccccuccuuucuu

SEQ ID NO: 1063297 - RNA, 22 nt, Human
gauccacagcugcgguaggaga

SEQ ID NO: 1063298 - RNA, 22 nt, Human
uuacuugauuguggagucugag

SEQ ID NO: 1063299 - RNA, 22 nt, Human
aaagucaucuguccuaggcucu

SEQ ID NO: 1063300 - RNA, 22 nt, Human
aucagaauacuaucaacaguga

SEQ ID NO: 1063301 - RNA, 22 nt, Human
gcccccagaagggccacagauu

SEQ ID NO: 1063302 - RNA, 22 nt, Human
uuacacaacagugcaucagcag

SEQ ID NO: 1063303 - RNA, 22 nt, Human
aaacugaagccuuggagugaca

SEQ ID NO: 1063304 - RNA, 17 nt, Human
auuuguaacuagcucuu

SEQ ID NO: 1063305 - RNA, 20 nt, Human
ugucaugcauuagaugaaga

SEQ ID NO: 1063306 - RNA, 22 nt, Human
acacucucagcuuuucaacuua

SEQ ID NO: 1063307 - RNA, 22 nt, Human
uggaagccaggcccgcuccuaa

SEQ ID NO: 1063308 - RNA, 21 nt, Human
ggucuuccaaauaaggagaaa

SEQ ID NO: 1063309 - RNA, 22 nt, Human
ucuugauuuacucuaauagcuu

SEQ ID NO: 1063310 - RNA, 20 nt, Human
ugcucaggauggagaggugu

SEQ ID NO: 1063311 - RNA, 22 nt, Human
uugaagcacaaugucuuuuauc

SEQ ID NO: 1063312 - RNA, 22 nt, Human
uaggaagcugagcagcauuccu

SEQ ID NO: 1063313 - RNA, 22 nt, Human
cuuaaugaaagguugcacaugg

SEQ ID NO: 1063314 - RNA, 22 nt, Human
uuucaacuagccccuaaguccu

SEQ ID NO: 1063315 - RNA, 18 nt, Human
acaaaggucugcaagacc

SEQ ID NO: 1063316 - RNA, 22 nt, Human
auuuaacaagacagagaacugg

SEQ ID NO: 1063317 - RNA, 22 nt, Human
uauuuugacgauuuuaugcaaa

SEQ ID NO: 1063318 - RNA, 22 nt, Human
uugcuauuuugagagucauagu

SEQ ID NO: 1063319 - RNA, 22 nt, Human
uaaaaucauucuggugucagua

SEQ ID NO: 1063320 - RNA, 21 nt, Human
aggcucucauccagggaccca

SEQ ID NO: 1063321 - RNA, 22 nt, Human
cagucucuggugaguugacagu

SEQ ID NO: 1063322 - RNA, 22 nt, Human
ccugccugucccucaguccaca

SEQ ID NO: 1063323 - RNA, 22 nt, Human
uucacaguggcccucucugagu

SEQ ID NO: 1063324 - RNA, 21 nt, Human
aggcagaaagagcccaggcug

SEQ ID NO: 1063325 - RNA, 22 nt, Human
uggcucagcgcggccuggucuu

SEQ ID NO: 1063326 - RNA, 22 nt, Human
gaaauauuguacuggagauguu

SEQ ID NO: 1063327 - RNA, 22 nt, Human
uugaagacuaauuuagauaaug

SEQ ID NO: 1063328 - RNA, 22 nt, Human
ucacacauuucucaaguguagg

SEQ ID NO: 1063329 - RNA, 22 nt, Human
aaguuucaaauauaaaauuaca

SEQ ID NO: 1063330 - RNA, 22 nt, Human
gacagguguguguauauuaggg

SEQ ID NO: 1063331 - RNA, 22 nt, Human
ugguaucaaacaauuaauuaga

SEQ ID NO: 1063332 - RNA, 22 nt, Human
aaauuuuagaccaggcaaaacu

SEQ ID NO: 1063333 - RNA, 22 nt, Human
uauccaaaguuucucagaaacu

SEQ ID NO: 1063334 - RNA, 22 nt, Human
aagcagcagcaggauuaaagag

SEQ ID NO: 1063335 - RNA, 22 nt, Human
ggagccaggcaaucuguacuuu

SEQ ID NO: 1063336 - RNA, 22 nt, Human
gccucugcaucuucgccgcacu

SEQ ID NO: 1063337 - RNA, 21 nt, Human
uugaaaguaaauucagcagcu

SEQ ID NO: 1063338 - RNA, 18 nt, Human
aaauuauucuuccuuuuc

SEQ ID NO: 1063339 - RNA, 22 nt, Human
ccugccagcauggcuuaucucc

SEQ ID NO: 1063340 - RNA, 22 nt, Human
ucauugcagugauguuguaugu

SEQ ID NO: 1063341 - RNA, 22 nt, Human
ugcacuccaggcugggugacag

SEQ ID NO: 1063342 - RNA, 22 nt, Human
gggaagcagcauugugcuggcu

SEQ ID NO: 1063343 - RNA, 22 nt, Human
acacacaacucauuguguaaua

SEQ ID NO: 1063344 - RNA, 22 nt, Human
gccuggccgcuccgagcuccgc

SEQ ID NO: 1063345 - RNA, 22 nt, Human
uguacaaagguacuuugauguu

SEQ ID NO: 1063346 - RNA, 22 nt, Human
cauaucccauuggccaggacau

SEQ ID NO: 1063347 - RNA, 22 nt, Human
aauagaauuuaaaugcaguggc

SEQ ID NO: 1063348 - RNA, 22 nt, Human
augauugaaaaugacauugcca

SEQ ID NO: 1063349 - RNA, 22 nt, Human
acuuucucccacccacccgucu

SEQ ID NO: 1063350 - RNA, 22 nt, Human
acuugaaaagcucagcaguagu

SEQ ID NO: 1063351 - RNA, 22 nt, Human
ucauagaaugaguuaaugaacu

SEQ ID NO: 1063352 - RNA, 22 nt, Human
aaugcaaacagcccagaaucca

SEQ ID NO: 1063353 - RNA, 22 nt, Human
cauguguaaggcucacaggcag

SEQ ID NO: 1063354 - RNA, 22 nt, Human
gcacagggcaacaggucuguua

SEQ ID NO: 1063355 - RNA, 22 nt, Human
cagcagagaccaagugauuuga

SEQ ID NO: 1063356 - RNA, 22 nt, Human
ugauuuuuaaaauucuccuugc

SEQ ID NO: 1063357 - RNA, 22 nt, Human
aaaauugaggcucauguuaaau

SEQ ID NO: 1063358 - RNA, 22 nt, Human
uaaagcauguguuagaagugca

SEQ ID NO: 1063359 - RNA, 22 nt, Human
uccuggagaauccugccaccug

SEQ ID NO: 1063360 - RNA, 22 nt, Human
gugccgcuggagcuggaauuga

SEQ ID NO: 1063361 - RNA, 21 nt, Human
gccauuguuuucuaccuggag

SEQ ID NO: 1063362 - RNA, 22 nt, Human
ggagccuggcaaugcugcgucc

SEQ ID NO: 1063363 - RNA, 22 nt, Human
cuguauuuaguuaaaaugcuaa

SEQ ID NO: 1063364 - RNA, 22 nt, Human
gaugaagcuuugaagucuaauc

SEQ ID NO: 1063365 - RNA, 22 nt, Human
cauucacaauggauugcuucaa

SEQ ID NO: 1063366 - RNA, 20 nt, Human
ggguggaguugcggucugug

SEQ ID NO: 1063367 - RNA, 22 nt, Human
agugccuagauauuguuugaac

SEQ ID NO: 1063368 - RNA, 20 nt, Human
ggccucaguguccuuguuug

SEQ ID NO: 1063369 - RNA, 22 nt, Human
gauaccagacagggagggagaa

SEQ ID NO: 1063370 - RNA, 20 nt, Human
gggcagccucgggagugggu

SEQ ID NO: 1063371 - RNA, 22 nt, Human
caggcagauauguucgcuuuaa

SEQ ID NO: 1063372 - RNA, 22 nt, Human
uugauaaaaugaugaaaucacu

SEQ ID NO: 1063373 - RNA, 20 nt, Human
uuucagugguuugugccuag

SEQ ID NO: 1063374 - RNA, 22 nt, Human
uggggcucaccuaggcuggaag

SEQ ID NO: 1063375 - RNA, 22 nt, Human
uacacauguuuggcaaguaugu

SEQ ID NO: 1063376 - RNA, 22 nt, Human
caggagaaacauaauuuucugg

SEQ ID NO: 1063377 - RNA, 22 nt, Human
ggaaccacagcccccagcaggc

SEQ ID NO: 1063378 - RNA, 23 nt, Human
cuucucagaagucugugccagga

SEQ ID NO: 1063379 - RNA, 20 nt, Human
ucucaggguucagcaaagua

SEQ ID NO: 1063380 - RNA, 21 nt, Human
agaaggcaccagcaaggacug

SEQ ID NO: 1063381 - RNA, 22 nt, Human
cagaggcagaauggagauuugg

SEQ ID NO: 1063382 - RNA, 22 nt, Human
ugcaggcugcaccccugcccug

SEQ ID NO: 1063383 - RNA, 22 nt, Human
cucugggcuuguugaccugcac

SEQ ID NO: 1063384 - RNA, 22 nt, Human
ucuguuuaugugucuaaauaaa

SEQ ID NO: 1063385 - RNA, 19 nt, Human
aaggaacccuggguugcuc

SEQ ID NO: 1063386 - RNA, 22 nt, Human
aguaacaaauagcugccuuuaa

SEQ ID NO: 1063387 - RNA, 22 nt, Human
uuugacaugugcuuauaacuuu

SEQ ID NO: 1063388 - RNA, 22 nt, Human
ucacugggcccugaggugggac

SEQ ID NO: 1063389 - RNA, 20 nt, Human
cccugcagccaugggagugg

SEQ ID NO: 1063390 - RNA, 22 nt, Human
ucacaucugaaaaaauauugag

SEQ ID NO: 1063391 - RNA, 22 nt, Human
gaaucagccugaguuugcagcu

SEQ ID NO: 1063392 - RNA, 22 nt, Human
aagcagaggguauggccagguu

SEQ ID NO: 1063393 - RNA, 22 nt, Human
gccaggcuccaggcccuccuga

SEQ ID NO: 1063394 - RNA, 21 nt, Human
acaguacuugagaucuuuuga

SEQ ID NO: 1063395 - RNA, 22 nt, Human
uugcugaaaacaguggguauug

SEQ ID NO: 1063396 - RNA, 22 nt, Human
uccugggaagagaccugagcau

SEQ ID NO: 1063397 - RNA, 22 nt, Human
ucuggggagucaaagagaccug

SEQ ID NO: 1063398 - RNA, 22 nt, Human
uucuuucugaauacaguugagu

SEQ ID NO: 1063399 - RNA, 22 nt, Human
aucaggaucugggagccugaaa

SEQ ID NO: 1063400 - RNA, 22 nt, Human
ucuccacacuuucucucccagg

SEQ ID NO: 1063401 - RNA, 22 nt, Human
gcugcccugcaucugugccuuc

SEQ ID NO: 1063402 - RNA, 18 nt, Human
uggagcugagugcugugc

SEQ ID NO: 1063403 - RNA, 22 nt, Human
ggccagguggcuguccuggcgu

SEQ ID NO: 1063404 - RNA, 22 nt, Human
gcagaugccugaaggagcuggg

SEQ ID NO: 1063405 - RNA, 20 nt, Human
cuccccucuacagagggcug

SEQ ID NO: 1063406 - RNA, 22 nt, Human
agggagacacaugaggaaguca

SEQ ID NO: 1063407 - RNA, 22 nt, Human
gacagcagggacauguaggaag

SEQ ID NO: 1063408 - RNA, 20 nt, Human
gcugucuggauuagaagccu

SEQ ID NO: 1063409 - RNA, 22 nt, Human
cugagccuugaugucccuuguc

SEQ ID NO: 1063410 - RNA, 22 nt, Human
uggaggaauaacagcaaccuua

SEQ ID NO: 1063411 - RNA, 22 nt, Human
ccagcuccgggaguugcugcug

SEQ ID NO: 1063412 - RNA, 22 nt, Human
ccagaagaggacacagugugga

SEQ ID NO: 1063413 - RNA, 22 nt, Human
ugcuucugaugugagcagcccc

SEQ ID NO: 1063414 - RNA, 22 nt, Human
cauuuuguagcaaugacuguug

SEQ ID NO: 1063415 - RNA, 22 nt, Human
aguucaaacucuauaagaacuu

SEQ ID NO: 1063416 - RNA, 22 nt, Human
ucuacuuucacucauacuuauu

SEQ ID NO: 1063417 - RNA, 22 nt, Human
ugcuccagcgcugccaccaguu

SEQ ID NO: 1063418 - RNA, 22 nt, Human
gaagaccauauucagcaggcau

SEQ ID NO: 1063419 - RNA, 22 nt, Human
uguaauuuccugauguuagaac

SEQ ID NO: 1063420 - RNA, 22 nt, Human
ggaugcuggggaccaaucucug

SEQ ID NO: 1063421 - RNA, 22 nt, Human
cugaagauagugucugaucaug

SEQ ID NO: 1063422 - RNA, 22 nt, Human
ucccagccuggacccugccagu

SEQ ID NO: 1063423 - RNA, 22 nt, Human
agcaggcugggcaauaugggca

SEQ ID NO: 1063424 - RNA, 22 nt, Human
caugaaaaauuuacuguuaaca

SEQ ID NO: 1063425 - RNA, 22 nt, Human
cucaaauagaacugaucuauaa

SEQ ID NO: 1063426 - RNA, 22 nt, Human
gcccugucggaacugcgaccuc

SEQ ID NO: 1063427 - RNA, 22 nt, Human
uaguggaggggaugcaaagcuu

SEQ ID NO: 1063428 - RNA, 22 nt, Human
cuggcuggcaaguagaacacaa

SEQ ID NO: 1063429 - RNA, 22 nt, Human
agcagccauccuuagagaaaga

SEQ ID NO: 1063430 - RNA, 23 nt, Human
ugucacauuuaguuggcauuguu

SEQ ID NO: 1063431 - RNA, 22 nt, Human
ucuccugcuucaacugauggac

SEQ ID NO: 1063432 - RNA, 22 nt, Human
ggaaaugucauagaaauauaag

SEQ ID NO: 1063433 - RNA, 22 nt, Human
ugcccugcuguggcucugccca

SEQ ID NO: 1063434 - RNA, 19 nt, Human
ggcccaaguacugagugcc

SEQ ID NO: 1063435 - RNA, 22 nt, Human
gcugaggcuccucgggaggaca

SEQ ID NO: 1063436 - RNA, 22 nt, Human
cugucuguuuuaccuucuccag

SEQ ID NO: 1063437 - RNA, 22 nt, Human
ccugccuguacuagagacccag

SEQ ID NO: 1063438 - RNA, 18 nt, Human
ugcaggcugggguuccuc

SEQ ID NO: 1063439 - RNA, 22 nt, Human
uccugccuucauacugcuguau

SEQ ID NO: 1063440 - RNA, 22 nt, Human
augggcugggaucugaguguca

SEQ ID NO: 1063441 - RNA, 22 nt, Human
aguuuuucugggaggcacugcu

SEQ ID NO: 1063442 - RNA, 22 nt, Human
aguuguaacagauucuaacaua

SEQ ID NO: 1063443 - RNA, 22 nt, Human
caucauuuuuguaagcugguag

SEQ ID NO: 1063444 - RNA, 22 nt, Human
uagaaucccagccagcuggaag

SEQ ID NO: 1063445 - RNA, 22 nt, Human
uaucuuguuuaggugcacaggu

SEQ ID NO: 1063446 - RNA, 22 nt, Human
gggcugacucaaccuugcaaag

SEQ ID NO: 1063447 - RNA, 22 nt, Human
uccucagucguuugagccaaaa

SEQ ID NO: 1063448 - RNA, 22 nt, Human
auacaucaugcuccauauauuu

SEQ ID NO: 1063449 - RNA, 22 nt, Human
uucaaagauaauuaccaaacau

SEQ ID NO: 1063450 - RNA, 19 nt, Human
gaggaggaaaacuagugua

SEQ ID NO: 1063451 - RNA, 22 nt, Human
uaaguaaauuuauaaugugauu

SEQ ID NO: 1063452 - RNA, 22 nt, Human
ccugcuggcauucuugcucccu

SEQ ID NO: 1063453 - RNA, 22 nt, Human
aucaguuuuguucacuacuaua

SEQ ID NO: 1063454 - RNA, 22 nt, Human
gucacacuagggccaaguggag

SEQ ID NO: 1063455 - RNA, 21 nt, Human
uagagaaaagaagcuguuccu

SEQ ID NO: 1063456 - RNA, 22 nt, Human
ugucauucauuuaaguauguuu

SEQ ID NO: 1063457 - RNA, 22 nt, Human
gucauuauaccauuauaauugu

SEQ ID NO: 1063458 - RNA, 22 nt, Human
acaguguugaggugcuuguuuc

SEQ ID NO: 1063459 - RNA, 22 nt, Human
ccucuucuaggacguccuugug

SEQ ID NO: 1063460 - RNA, 20 nt, Human
gcugggcuuugacugacaca

SEQ ID NO: 1063461 - RNA, 22 nt, Human
aggccagagaggggaccagccu

SEQ ID NO: 1063462 - RNA, 22 nt, Human
ccaggccuguguuguguggagg

SEQ ID NO: 1063463 - RNA, 20 nt, Human
gccagaguuaugaugagagg

SEQ ID NO: 1063464 - RNA, 22 nt, Human
uuuguaacaucccaacaaauuu

SEQ ID NO: 1063465 - RNA, 22 nt, Human
agugccagcuccacacagcagc

SEQ ID NO: 1063466 - RNA, 22 nt, Human
acaguguaauaugggagucagu

SEQ ID NO: 1063467 - RNA, 21 nt, Human
auuucauggugcuuuuaagaa

SEQ ID NO: 1063468 - RNA, 22 nt, Human
gcugcaggcauuuuccugggca

SEQ ID NO: 1063469 - RNA, 22 nt, Human
gcaccugauugauuucacugcu

SEQ ID NO: 1063470 - RNA, 22 nt, Human
uggcagaaguucacuaguagcu

SEQ ID NO: 1063471 - RNA, 22 nt, Human
cuuagaaaucgaacucagguua

SEQ ID NO: 1063472 - RNA, 22 nt, Human
auaacagagagcuacugaacug

SEQ ID NO: 1063473 - RNA, 22 nt, Human
cuuacauacugagaaaauaucc

SEQ ID NO: 1063474 - RNA, 22 nt, Human
uaagaauuguguugaauagagu

SEQ ID NO: 1063475 - RNA, 22 nt, Human
cccucucucaggcugacagccu

SEQ ID NO: 1063476 - RNA, 22 nt, Human
uucuuacauuacuuuacaugug

SEQ ID NO: 1063477 - RNA, 22 nt, Human
uaguggagaggauguggagaaa

SEQ ID NO: 1063478 - RNA, 22 nt, Human
ugguggggccagacuucagcuc

SEQ ID NO: 1063479 - RNA, 22 nt, Human
gaaauacagaaagggcugaaug

SEQ ID NO: 1063480 - RNA, 22 nt, Human
gaaguggaauuacugggucaua

SEQ ID NO: 1063481 - RNA, 22 nt, Human
cacccaggcuggagugcagggg

SEQ ID NO: 1063482 - RNA, 22 nt, Human
ugugagcagagccugacaugag

SEQ ID NO: 1063483 - RNA, 22 nt, Human
ucaaagaugauaggaaaucaua

SEQ ID NO: 1063484 - RNA, 22 nt, Human
uuaaaaccaucagcuguaagau

SEQ ID NO: 1063485 - RNA, 22 nt, Human
gcuccaagguauccaccagggu

SEQ ID NO: 1063486 - RNA, 22 nt, Human
uaucagaaaugccuuaaauugg

SEQ ID NO: 1063487 - RNA, 22 nt, Human
aaauguuagguuguacugaguc

SEQ ID NO: 1063488 - RNA, 22 nt, Human
uccucugccccagaugaaauuu

SEQ ID NO: 1063489 - RNA, 22 nt, Human
aagcuggccuguaccugcugag

SEQ ID NO: 1063490 - RNA, 22 nt, Human
aggggcaguuccaaguuuugug

SEQ ID NO: 1063491 - RNA, 18 nt, Human
agaacacuugguuagauc

SEQ ID NO: 1063492 - RNA, 22 nt, Human
ugaggggagguuggggcacauc

SEQ ID NO: 1063493 - RNA, 22 nt, Human
agcuggccuuagugagcaccug

SEQ ID NO: 1063494 - RNA, 22 nt, Human
ggcagaggaagcuggaaguggg

SEQ ID NO: 1063495 - RNA, 22 nt, Human
ggugaagccagggcaucaauau

SEQ ID NO: 1063496 - RNA, 22 nt, Human
aaucagcagaagagaggucuua

SEQ ID NO: 1063497 - RNA, 22 nt, Human
ggccuguccagccugccuggcu

SEQ ID NO: 1063498 - RNA, 22 nt, Human
ccacaggggcccacgagccgcu

SEQ ID NO: 1063499 - RNA, 22 nt, Human
aucagaaauugcccagcuguuu

SEQ ID NO: 1063500 - RNA, 22 nt, Human
ggcaggguguggaguugggaca

SEQ ID NO: 1063501 - RNA, 22 nt, Human
uucuuuuccuacacagcgauuu

SEQ ID NO: 1063502 - RNA, 22 nt, Human
cucacuggcaagacuacaggug

SEQ ID NO: 1063503 - RNA, 22 nt, Human
uuuccucuaaacgcauuugcuu

SEQ ID NO: 1063504 - RNA, 22 nt, Human
uacuuugaauuaaauauuucag

SEQ ID NO: 1063505 - RNA, 18 nt, Human
aauguuuguccucucuaa

SEQ ID NO: 1063506 - RNA, 22 nt, Human
caggcacaguuccaagcauuuu

SEQ ID NO: 1063507 - RNA, 22 nt, Human
ccagcuggaagagugcagaacu

SEQ ID NO: 1063508 - RNA, 22 nt, Human
uuuguacauauaaaucuuguau

SEQ ID NO: 1063509 - RNA, 22 nt, Human
aacaaguuacucuuaaaguaua

SEQ ID NO: 1063510 - RNA, 22 nt, Human
uaaagcagugcaaaagcguuuu

SEQ ID NO: 1063511 - RNA, 22 nt, Human
agcuuugugacuuugagcuagu

SEQ ID NO: 1063512 - RNA, 22 nt, Human
caggggacauuaaagcuccaua

SEQ ID NO: 1063513 - RNA, 22 nt, Human
aggcucagucccggcccgcgcc

SEQ ID NO: 1063514 - RNA, 22 nt, Human
caggaacccccacucucagcuc

SEQ ID NO: 1063515 - RNA, 22 nt, Human
gacccugauaggaguagaagaa

SEQ ID NO: 1063516 - RNA, 22 nt, Human
cagggacaaggaauaagauuag

SEQ ID NO: 1063517 - RNA, 22 nt, Human
cugcuuuaaguauucaacaaag

SEQ ID NO: 1063518 - RNA, 22 nt, Human
auguuuaaggaacugguuugcu

SEQ ID NO: 1063519 - RNA, 22 nt, Human
uuuccuuugggcacccgagcuc

SEQ ID NO: 1063520 - RNA, 22 nt, Human
gccugcccugaaagaggugaag

SEQ ID NO: 1063521 - RNA, 22 nt, Human
ucucuguggugggaggcugagu

SEQ ID NO: 1063522 - RNA, 22 nt, Human
agcuugaguuuuggaugaagug

SEQ ID NO: 1063523 - RNA, 22 nt, Human
acauauguguuguacaugcaug

SEQ ID NO: 1063524 - RNA, 22 nt, Human
aaacaaccuaaaguuacugauc

SEQ ID NO: 1063525 - RNA, 22 nt, Human
uggcucaguuugggggauugaa

SEQ ID NO: 1063526 - RNA, 22 nt, Human
uccugugauggcuugcgaugug

SEQ ID NO: 1063527 - RNA, 22 nt, Human
aaugaagaaauggacaucuuua

SEQ ID NO: 1063528 - RNA, 22 nt, Human
aggagcugcuuaaaugguuggu

SEQ ID NO: 1063529 - RNA, 19 nt, Human
uuucccagcccuugcugug

SEQ ID NO: 1063530 - RNA, 20 nt, Human
agguggcuccugcugggggu

SEQ ID NO: 1063531 - RNA, 22 nt, Human
uuuucuucuaccugcuguccaa

SEQ ID NO: 1063532 - RNA, 22 nt, Human
cugcuuuagugugguguuagag

SEQ ID NO: 1063533 - RNA, 22 nt, Human
cacuuguagaggcauuauucca

SEQ ID NO: 1063534 - RNA, 22 nt, Human
ugaaaguucaauaccaauuugg

SEQ ID NO: 1063535 - RNA, 22 nt, Human
gggcucuguccauuccuucaua

SEQ ID NO: 1063536 - RNA, 22 nt, Human
auuugugggacuauaaugcagg

SEQ ID NO: 1063537 - RNA, 22 nt, Human
ccaggcaauucugaaagcauuu

SEQ ID NO: 1063538 - RNA, 22 nt, Human
agaugaaaagauaagcagcaau

SEQ ID NO: 1063539 - RNA, 22 nt, Human
ucagcucuguguacaguuagca

SEQ ID NO: 1063540 - RNA, 22 nt, Human
gcuguucuagcuucaguuucgc

SEQ ID NO: 1063541 - RNA, 22 nt, Human
aaauacauaaagguuguaccag

SEQ ID NO: 1063542 - RNA, 22 nt, Human
ggccugaggcgucccagcugug

SEQ ID NO: 1063543 - RNA, 22 nt, Human
agggaccugcucacugccuggc

SEQ ID NO: 1063544 - RNA, 22 nt, Human
uuagccauuuuauacaagugua

SEQ ID NO: 1063545 - RNA, 20 nt, Human
uccuugaaagugggguauau

SEQ ID NO: 1063546 - RNA, 22 nt, Human
ucuuucuugugggugcccuuuu

SEQ ID NO: 1063547 - RNA, 22 nt, Human
acuuccagccccugucagcaaa

SEQ ID NO: 1063548 - RNA, 22 nt, Human
gggaguggagagcaauggauga

SEQ ID NO: 1063549 - RNA, 22 nt, Human
agugcagggggaaagggugucu

SEQ ID NO: 1063550 - RNA, 22 nt, Human
aacaaaguagcugcuguucuua

SEQ ID NO: 1063551 - RNA, 22 nt, Human
acacuauaagacagauacagca

SEQ ID NO: 1063552 - RNA, 22 nt, Human
gggcaggugccagcucccuguc

SEQ ID NO: 1063553 - RNA, 22 nt, Human
ugcugccuuagcagccaggcaa

SEQ ID NO: 1063554 - RNA, 19 nt, Human
gagaggccugugcuugaag

SEQ ID NO: 1063555 - RNA, 22 nt, Human
aucaguuugagugcugugucaa

SEQ ID NO: 1063556 - RNA, 22 nt, Human
augcccugggagugcuguacca

SEQ ID NO: 1063557 - RNA, 22 nt, Human
cuuuaucauggagguaaauaug

SEQ ID NO: 1063558 - RNA, 22 nt, Human
uguuacaguacuacaauucugc

SEQ ID NO: 1063559 - RNA, 21 nt, Human
gccagccuguuuaccuguggu

SEQ ID NO: 1063560 - RNA, 22 nt, Human
auauucuuccaaaacaucauuu

SEQ ID NO: 1063561 - RNA, 22 nt, Human
ugaaggcauugaugaaggaauc

SEQ ID NO: 1063562 - RNA, 23 nt, Human
gccucugcagccuaguuaguguc

SEQ ID NO: 1063563 - RNA, 22 nt, Human
gccacccugagcugggccaggg

SEQ ID NO: 1063564 - RNA, 22 nt, Human
aaguugagaugucauaggagac

SEQ ID NO: 1063565 - RNA, 22 nt, Human
gugcccuggagggguugaaggg

SEQ ID NO: 1063566 - RNA, 22 nt, Human
uaaaugucaaugugauuuauaa

SEQ ID NO: 1063567 - RNA, 22 nt, Human
ugaagcugugggcaguggagcc

SEQ ID NO: 1063568 - RNA, 22 nt, Human
agagagaacacccucggcaugg

SEQ ID NO: 1063569 - RNA, 22 nt, Human
gaguggguccacagaggugaca

SEQ ID NO: 1063570 - RNA, 22 nt, Human
agaaugcauuuuguguagcuau

SEQ ID NO: 1063571 - RNA, 19 nt, Human
gcagagugggguggagggu

SEQ ID NO: 1063572 - RNA, 22 nt, Human
aaccaggaaaaguuaugaauag

SEQ ID NO: 1063573 - RNA, 22 nt, Human
uaauauacuucccauaguuuga

SEQ ID NO: 1063574 - RNA, 22 nt, Human
acucuucagggcagugagcggg

SEQ ID NO: 1063575 - RNA, 21 nt, Human
uugcaacaaccuauauauuuu

SEQ ID NO: 1063576 - RNA, 22 nt, Human
aauccagguggcggagguugug

SEQ ID NO: 1063577 - RNA, 22 nt, Human
ucagaggauugccucagcgagc

SEQ ID NO: 1063578 - RNA, 22 nt, Human
uucacagaauggcaaguuaugg

SEQ ID NO: 1063579 - RNA, 22 nt, Human
cagugcagacguggagggggca

SEQ ID NO: 1063580 - RNA, 22 nt, Human
guguccagagaaacucacagcu

SEQ ID NO: 1063581 - RNA, 22 nt, Human
cagcacugcugcuguacacaca

SEQ ID NO: 1063582 - RNA, 22 nt, Human
aagugauucauugaugaugagg

SEQ ID NO: 1063583 - RNA, 22 nt, Human
caguggaagcuggcugugaaga

SEQ ID NO: 1063584 - RNA, 22 nt, Human
ucuaaaaugcagaucuacuggu

SEQ ID NO: 1063585 - RNA, 22 nt, Human
uucaaagauuagcauacgcaau

SEQ ID NO: 1063586 - RNA, 22 nt, Human
uuucacaaucaaauggugaaau

SEQ ID NO: 1063587 - RNA, 22 nt, Human
aggugcagaaaaaaguccuuua

SEQ ID NO: 1063588 - RNA, 20 nt, Human
ugucauuuauuuaucaaaug

SEQ ID NO: 1063589 - RNA, 22 nt, Human
ccagcuggagccaagguggacu

SEQ ID NO: 1063590 - RNA, 17 nt, Human
aauagcugcucagagag

SEQ ID NO: 1063591 - RNA, 23 nt, Human
cagggcccugcucaauuucucca

SEQ ID NO: 1063592 - RNA, 22 nt, Human
uuucccaggcccucagggcugc

SEQ ID NO: 1063593 - RNA, 21 nt, Human
uuacaaagcuacagauguugc

SEQ ID NO: 1063594 - RNA, 22 nt, Human
ggcuggcucagggcuugagaga

SEQ ID NO: 1063595 - RNA, 22 nt, Human
auuuauuauugugguuacuucu

SEQ ID NO: 1063596 - RNA, 22 nt, Human
acacaguaaauauguauugaau

SEQ ID NO: 1063597 - RNA, 22 nt, Human
agccugugacauugacuaugaa

SEQ ID NO: 1063598 - RNA, 22 nt, Human
caagcagagaggucaacuaaua

SEQ ID NO: 1063599 - RNA, 22 nt, Human
aagggcuggagacugggucuuc

SEQ ID NO: 1063600 - RNA, 22 nt, Human
ggaagaggcugagccagguccc

SEQ ID NO: 1063601 - RNA, 22 nt, Human
aguucccaggugaugcugaugu

SEQ ID NO: 1063602 - RNA, 22 nt, Human
ccugccagcccgcguucaugcc

SEQ ID NO: 1063603 - RNA, 22 nt, Human
uguguuccugccuggcucuggu

SEQ ID NO: 1063604 - RNA, 22 nt, Human
uuaucuagauguguuaucagac

SEQ ID NO: 1063605 - RNA, 22 nt, Human
cugagcaguagagggucucuuu

SEQ ID NO: 1063606 - RNA, 22 nt, Human
gaucaacauguauuuaagaguu

SEQ ID NO: 1063607 - RNA, 22 nt, Human
aagugcuaggauuacaggugug

SEQ ID NO: 1063608 - RNA, 22 nt, Human
ggugccagccuagugcaguggu

SEQ ID NO: 1063609 - RNA, 22 nt, Human
aguguauuugccuauaaaaaug

SEQ ID NO: 1063610 - RNA, 22 nt, Human
aaagaggaaccaagagcacgug

SEQ ID NO: 1063611 - RNA, 22 nt, Human
ggaggaccugcuggcccugcaa

SEQ ID NO: 1063612 - RNA, 22 nt, Human
gcagagccugugucugagcaaa

SEQ ID NO: 1063613 - RNA, 22 nt, Human
gcuccugucuuggggcacuggc

SEQ ID NO: 1063614 - RNA, 22 nt, Human
aaaguuuucugccuucauuaga

SEQ ID NO: 1063615 - RNA, 22 nt, Human
cugggcucugcggugucgcucu

SEQ ID NO: 1063616 - RNA, 22 nt, Human
agugucugcuuaucaguucuug

SEQ ID NO: 1063617 - RNA, 22 nt, Human
ugagagucuguuccucuugcag

SEQ ID NO: 1063618 - RNA, 22 nt, Human
uaaacaucaggaaugaaaaccu

SEQ ID NO: 1063619 - RNA, 22 nt, Human
cuguacucaagguaaaccagga

SEQ ID NO: 1063620 - RNA, 22 nt, Human
ucaggcaguagaauugcuugaa

SEQ ID NO: 1063621 - RNA, 22 nt, Human
uaccauuucaguaaaaacuuag

SEQ ID NO: 1063622 - RNA, 22 nt, Human
aaaggucaagcuggacucaggu

SEQ ID NO: 1063623 - RNA, 22 nt, Human
gacacagaauuccccuccaagu

SEQ ID NO: 1063624 - RNA, 22 nt, Human
ucagagugggagaaugugccaa

SEQ ID NO: 1063625 - RNA, 20 nt, Human
ccugucugcaauggagguca

SEQ ID NO: 1063626 - RNA, 22 nt, Human
ugaaggaauggaggaucagagc

SEQ ID NO: 1063627 - RNA, 22 nt, Human
ucucuggccccauggcugagcu

SEQ ID NO: 1063628 - RNA, 22 nt, Human
acacaguaccccaaggcugggc

SEQ ID NO: 1063629 - RNA, 22 nt, Human
accugcuuuguaguguuugcug

SEQ ID NO: 1063630 - RNA, 22 nt, Human
ucaaagucucugcuucuguaac

SEQ ID NO: 1063631 - RNA, 22 nt, Human
uggcugagggggcaguucagga

SEQ ID NO: 1063632 - RNA, 22 nt, Human
ggcagaagauaggacagggaau

SEQ ID NO: 1063633 - RNA, 22 nt, Human
uagcagaaacuguuacagaagg

SEQ ID NO: 1063634 - RNA, 22 nt, Human
uaggccaguggcagguugugug

SEQ ID NO: 1063635 - RNA, 22 nt, Human
uccugagaaggcacagcuugca

SEQ ID NO: 1063636 - RNA, 21 nt, Human
agggucaggaaccaggguacc

SEQ ID NO: 1063637 - RNA, 22 nt, Human
aaauguauccuacuuccugagu

SEQ ID NO: 1063638 - RNA, 22 nt, Human
ggcuagaauaauugacuucauu

SEQ ID NO: 1063639 - RNA, 22 nt, Human
uugaagagugccuuccagacau

SEQ ID NO: 1063640 - RNA, 22 nt, Human
uggucacaguguauugaucagg

SEQ ID NO: 1063641 - RNA, 22 nt, Human
agaaguaggcagggcuguauca

SEQ ID NO: 1063642 - RNA, 22 nt, Human
gcuguucugcaccagacuucag

SEQ ID NO: 1063643 - RNA, 22 nt, Human
auuauccaacacccaguuacau

SEQ ID NO: 1063644 - RNA, 22 nt, Human
uggcagcuacagacagagguga

SEQ ID NO: 1063645 - RNA, 22 nt, Human
cacauugcagcuucuuuuggcu

SEQ ID NO: 1063646 - RNA, 22 nt, Human
ggaggaaggguagcauaaugua

SEQ ID NO: 1063647 - RNA, 22 nt, Human
gccagguguccucacagugagg

SEQ ID NO: 1063648 - RNA, 20 nt, Human
cugggcugcccagcuauggg

SEQ ID NO: 1063649 - RNA, 22 nt, Human
uggaugaaaaaugagaauuuuc

SEQ ID NO: 1063650 - RNA, 22 nt, Human
gaccauuugcuaguaaauugca

SEQ ID NO: 1063651 - RNA, 22 nt, Human
aagaaacaaccacugcucuccu

SEQ ID NO: 1063652 - RNA, 22 nt, Human
gaggagagaugguagauugggu

SEQ ID NO: 1063653 - RNA, 22 nt, Human
caugcagugccucuggauucuu

SEQ ID NO: 1063654 - RNA, 22 nt, Human
aaaucaugguggaagaaacaga

SEQ ID NO: 1063655 - RNA, 22 nt, Human
uuuuaaaggauagcucugguug

SEQ ID NO: 1063656 - RNA, 22 nt, Human
agucaguguagaaagcccaggc

SEQ ID NO: 1063657 - RNA, 22 nt, Human
cuggcaggcagacuucugcaag

SEQ ID NO: 1063658 - RNA, 22 nt, Human
aggcagagcugauguucuguga

SEQ ID NO: 1063659 - RNA, 22 nt, Human
gcugccugcucggcuccuggga

SEQ ID NO: 1063660 - RNA, 22 nt, Human
agaugcauguuuaugucuuucc

SEQ ID NO: 1063661 - RNA, 22 nt, Human
ugauuuucaugggugaucuuug

SEQ ID NO: 1063662 - RNA, 22 nt, Human
gaaaagaacugcaugggauuaa

SEQ ID NO: 1063663 - RNA, 19 nt, Human
gggcucucgagcaaccaac

SEQ ID NO: 1063664 - RNA, 22 nt, Human
uauagcaagcaggacagucuca

SEQ ID NO: 1063665 - RNA, 22 nt, Human
gucaggauuggggucaugaguc

SEQ ID NO: 1063666 - RNA, 22 nt, Human
agugggggcagagccucucucg

SEQ ID NO: 1063667 - RNA, 22 nt, Human
gaaugaaagauuugcauucuau

SEQ ID NO: 1063668 - RNA, 22 nt, Human
uacaauagggcuuuuguuuaug

SEQ ID NO: 1063669 - RNA, 22 nt, Human
ugagccccggaguuucaggcug

SEQ ID NO: 1063670 - RNA, 22 nt, Human
auguaaaguaucugaaaugcug

SEQ ID NO: 1063671 - RNA, 22 nt, Human
aguggggagguccaggccaccc

SEQ ID NO: 1063672 - RNA, 22 nt, Human
accaaaggcagagcugaacacu

SEQ ID NO: 1063673 - RNA, 22 nt, Human
agucucugucguagaucagcgu

SEQ ID NO: 1063674 - RNA, 22 nt, Human
ggagagugggagcaacuguugc

SEQ ID NO: 1063675 - RNA, 22 nt, Human
aaauggauggaauugacauuua

SEQ ID NO: 1063676 - RNA, 22 nt, Human
acuaaagaugucuaaauauauu

SEQ ID NO: 1063677 - RNA, 22 nt, Human
ggggccuuggaucugugccccg

SEQ ID NO: 1063678 - RNA, 22 nt, Human
aggguagggccguagggccaug

SEQ ID NO: 1063679 - RNA, 22 nt, Human
agcagagccaggucucucugua

SEQ ID NO: 1063680 - RNA, 22 nt, Human
uuucuggaaccacaaaaguaug

SEQ ID NO: 1063681 - RNA, 22 nt, Human
agugcuuugugcucucacugca

SEQ ID NO: 1063682 - RNA, 22 nt, Human
cagagccccucagcucucuccc

SEQ ID NO: 1063683 - RNA, 22 nt, Human
gcagggccuuggucaucuuuuu

SEQ ID NO: 1063684 - RNA, 22 nt, Human
aaacauguagugcaugaggauc

SEQ ID NO: 1063685 - RNA, 22 nt, Human
aaggcacugcuuugcugcgccc

SEQ ID NO: 1063686 - RNA, 22 nt, Human
uaucuguuggcuccuaguugua

SEQ ID NO: 1063687 - RNA, 22 nt, Human
acauacacaugaauauauuuuu

SEQ ID NO: 1063688 - RNA, 22 nt, Human
aacaugcuggguguuuuugaug

SEQ ID NO: 1063689 - RNA, 22 nt, Human
gcugguuuccuuaucuauaaag

SEQ ID NO: 1063690 - RNA, 22 nt, Human
guuauuuuaacuucucaguaau

SEQ ID NO: 1063691 - RNA, 22 nt, Human
ucuggcuccacucugugcaugc

SEQ ID NO: 1063692 - RNA, 22 nt, Human
uguuuuuuuauauaccugaagu

SEQ ID NO: 1063693 - RNA, 22 nt, Human
uucaagaaagaguggcuauucc

SEQ ID NO: 1063694 - RNA, 22 nt, Human
cuauuuuaagaggccauuaggu

SEQ ID NO: 1063695 - RNA, 22 nt, Human
acaaugaguuugauguaguuug

SEQ ID NO: 1063696 - RNA, 22 nt, Human
caggcacucauucagagaggug

SEQ ID NO: 1063697 - RNA, 22 nt, Human
uccucaggcggugaggaggggc

SEQ ID NO: 1063698 - RNA, 22 nt, Human
acacauuaucucauuaaauacu

SEQ ID NO: 1063699 - RNA, 22 nt, Human
cagugcccaagaugugccaugc

SEQ ID NO: 1063700 - RNA, 22 nt, Human
acagccaggaauucuggagaag

SEQ ID NO: 1063701 - RNA, 22 nt, Human
cugggccugggaggccaggucu

SEQ ID NO: 1063702 - RNA, 22 nt, Human
ucaacacuauccaggcaaucuu

SEQ ID NO: 1063703 - RNA, 22 nt, Human
cuccccagguucaggagguggg

SEQ ID NO: 1063704 - RNA, 22 nt, Human
ucuuagcacagcuauauaaguu

SEQ ID NO: 1063705 - RNA, 22 nt, Human
ugguaauuuacgcauuucugua

SEQ ID NO: 1063706 - RNA, 22 nt, Human
ggccucucuggcauggcugccc

SEQ ID NO: 1063707 - RNA, 22 nt, Human
uacaaaguauauuucuagcugu

SEQ ID NO: 1063708 - RNA, 22 nt, Human
ugucuuaauaguauccagguuc

SEQ ID NO: 1063709 - RNA, 16 nt, Human
acuuccaggggagccc

SEQ ID NO: 1063710 - RNA, 21 nt, Human
uccaggaaugucuguucaucu

SEQ ID NO: 1063711 - RNA, 22 nt, Human
uucaauucaauucuaaauauau

SEQ ID NO: 1063712 - RNA, 22 nt, Human
cacucucacaugcccugucagu

SEQ ID NO: 1063713 - RNA, 22 nt, Human
uugauacaggcucuauuucauc

SEQ ID NO: 1063714 - RNA, 22 nt, Human
gcagccugaugaucuggguugu

SEQ ID NO: 1063715 - RNA, 22 nt, Human
caggaugggugucggccagcac

SEQ ID NO: 1063716 - RNA, 22 nt, Human
cuucucuguguagagauucaga

SEQ ID NO: 1063717 - RNA, 22 nt, Human
uuguaaacaucuguugcuuaga

SEQ ID NO: 1063718 - RNA, 22 nt, Human
acuuuucuaagcaauggucuug

SEQ ID NO: 1063719 - RNA, 22 nt, Human
ggagggcucaauugacuccuga

SEQ ID NO: 1063720 - RNA, 22 nt, Human
gcugggcaaugccagagaggag

SEQ ID NO: 1063721 - RNA, 22 nt, Human
caaauacuaaacauaagauuuu

SEQ ID NO: 1063722 - RNA, 19 nt, Human
cuuuuucaccuucuagaag

SEQ ID NO: 1063723 - RNA, 22 nt, Human
agcagcagcucauucuuccugu

SEQ ID NO: 1063724 - RNA, 22 nt, Human
uggccuguggcuuaaggucugu

SEQ ID NO: 1063725 - RNA, 22 nt, Human
acagaggcagugugagauacug

SEQ ID NO: 1063726 - RNA, 22 nt, Human
uaagacuuccaggaaaaggugg

SEQ ID NO: 1063727 - RNA, 21 nt, Human
ccuggcacuggccugcugagc

SEQ ID NO: 1063728 - RNA, 22 nt, Human
gugagaguguuuggaaauagaa

SEQ ID NO: 1063729 - RNA, 22 nt, Human
auucucugugcagauuuaagac

SEQ ID NO: 1063730 - RNA, 22 nt, Human
aaggccuggauuuagguuguga

SEQ ID NO: 1063731 - RNA, 22 nt, Human
uuauguaauuuguuugcucuuc

SEQ ID NO: 1063732 - RNA, 22 nt, Human
agcaggugggcaugaaagcuga

SEQ ID NO: 1063733 - RNA, 22 nt, Human
cuggugggaagauggaaaacau

SEQ ID NO: 1063734 - RNA, 22 nt, Human
ccuggagcuuuuccauccugga

SEQ ID NO: 1063735 - RNA, 22 nt, Human
gugccagggggcacugaacaga

SEQ ID NO: 1063736 - RNA, 22 nt, Human
guccucuguuuccaucugacuu

SEQ ID NO: 1063737 - RNA, 22 nt, Human
uuuuacuucauuccugacuuca

SEQ ID NO: 1063738 - RNA, 19 nt, Human
caggaugaucccaugacac

SEQ ID NO: 1063739 - RNA, 22 nt, Human
cugggcuugaguuccugcucgu

SEQ ID NO: 1063740 - RNA, 23 nt, Human
gccaggcuccggucuguggccac

SEQ ID NO: 1063741 - RNA, 22 nt, Human
ugcaauauguugcauuguaugg

SEQ ID NO: 1063742 - RNA, 22 nt, Human
uugaagcauuugcuauagcauu

SEQ ID NO: 1063743 - RNA, 22 nt, Human
ggccucucuccagucagugcag

SEQ ID NO: 1063744 - RNA, 22 nt, Human
uuucaagaacagcagcauucca

SEQ ID NO: 1063745 - RNA, 22 nt, Human
caccaggugcuggaggacauca

SEQ ID NO: 1063746 - RNA, 22 nt, Human
agugucaaugcucuguuaaaaa

SEQ ID NO: 1063747 - RNA, 21 nt, Human
uuuuaacaaggauuucccuag

SEQ ID NO: 1063748 - RNA, 22 nt, Human
cagugcugagagccuggccagg

SEQ ID NO: 1063749 - RNA, 22 nt, Human
ccccagccuuccaugggaauug

SEQ ID NO: 1063750 - RNA, 22 nt, Human
agggccugggccagcacccuuu

SEQ ID NO: 1063751 - RNA, 22 nt, Human
aguugcagacgcagagauguug

SEQ ID NO: 1063752 - RNA, 22 nt, Human
gcugcucuggcucugcaguguc

SEQ ID NO: 1063753 - RNA, 22 nt, Human
ucagagucuaugcaacagaauu

SEQ ID NO: 1063754 - RNA, 23 nt, Human
acagacauuccauaauguacacc

SEQ ID NO: 1063755 - RNA, 22 nt, Human
uuagauaauguagagauaugag

SEQ ID NO: 1063756 - RNA, 22 nt, Human
uucaguuuccacuuacauuuaa

SEQ ID NO: 1063757 - RNA, 22 nt, Human
uuaagcauggaagugaaauaau

SEQ ID NO: 1063758 - RNA, 18 nt, Human
ccuggcuuccaucuuggu

SEQ ID NO: 1063759 - RNA, 22 nt, Human
uuuuuaucuuguaugugucucu

SEQ ID NO: 1063760 - RNA, 22 nt, Human
uugccugugucagcagguggaa

SEQ ID NO: 1063761 - RNA, 22 nt, Human
acaaagugaaaagcaucgaauu

SEQ ID NO: 1063762 - RNA, 22 nt, Human
uaaauucugaucaaguuccuuc

SEQ ID NO: 1063763 - RNA, 22 nt, Human
guucaugcuacccuuuccuaau

SEQ ID NO: 1063764 - RNA, 22 nt, Human
ucuuaguuguuugcugucuaac

SEQ ID NO: 1063765 - RNA, 22 nt, Human
aggaaagaaguacauucucaug

SEQ ID NO: 1063766 - RNA, 22 nt, Human
cgcaggugaacuguucugcagu

SEQ ID NO: 1063767 - RNA, 22 nt, Human
uauuuggagauaagggcuuuaa

SEQ ID NO: 1063768 - RNA, 22 nt, Human
ggagcagagcugggcuuggcug

SEQ ID NO: 1063769 - RNA, 22 nt, Human
cuggggaaggcggugacugcgc

SEQ ID NO: 1063770 - RNA, 22 nt, Human
ggcucccugccuguccucaguc

SEQ ID NO: 1063771 - RNA, 22 nt, Human
uguacacaauucuuaacauaca

SEQ ID NO: 1063772 - RNA, 22 nt, Human
aaggagaauuuggcuugugaug

SEQ ID NO: 1063773 - RNA, 22 nt, Human
ugaagauuuuguagcuuucagc

SEQ ID NO: 1063774 - RNA, 22 nt, Human
ucauauauuuuggcagugauca

SEQ ID NO: 1063775 - RNA, 22 nt, Human
gcccaggauggagaauaguggu

SEQ ID NO: 1063776 - RNA, 22 nt, Human
ucuguuuuggucaccuuuauau

SEQ ID NO: 1063777 - RNA, 22 nt, Human
gcugugagggcuucugaggcau

SEQ ID NO: 1063778 - RNA, 22 nt, Human
gugggccugaugcugccaugag

SEQ ID NO: 1063779 - RNA, 22 nt, Human
cuggggggcuacugacagagga

SEQ ID NO: 1063780 - RNA, 22 nt, Human
ucaggcugugggcacuggccau

SEQ ID NO: 1063781 - RNA, 17 nt, Human
cugaggggagugcugug

SEQ ID NO: 1063782 - RNA, 22 nt, Human
aaacucuaaucaaauauagcau

SEQ ID NO: 1063783 - RNA, 18 nt, Human
guucaaggucaagagaga

SEQ ID NO: 1063784 - RNA, 23 nt, Human
auuccugaggcuccuuaugcacc

SEQ ID NO: 1063785 - RNA, 22 nt, Human
cugccuccugccgugcagcuuc

SEQ ID NO: 1063786 - RNA, 22 nt, Human
aggauuucccauauagcuccau

SEQ ID NO: 1063787 - RNA, 22 nt, Human
ccugucuguucugacuggucag

SEQ ID NO: 1063788 - RNA, 20 nt, Human
gacaucauguacacauugcc

SEQ ID NO: 1063789 - RNA, 22 nt, Human
uaaggcagugagaagaaacagg

SEQ ID NO: 1063790 - RNA, 22 nt, Human
ugggcagagaguagaggcaacg

SEQ ID NO: 1063791 - RNA, 22 nt, Human
uuagugucuuucaaaagguuua

SEQ ID NO: 1063792 - RNA, 22 nt, Human
agcagagucugugugcacuuua

SEQ ID NO: 1063793 - RNA, 22 nt, Human
cucagaaucugccaaguucagg

SEQ ID NO: 1063794 - RNA, 20 nt, Human
aaagauacuuuuuguaaugg

SEQ ID NO: 1063795 - RNA, 22 nt, Human
agagaagggccuguauguaauc

SEQ ID NO: 1063796 - RNA, 22 nt, Human
cuucagaacuauaaaaaguacu

SEQ ID NO: 1063797 - RNA, 18 nt, Human
ggccucagccuggccgga

SEQ ID NO: 1063798 - RNA, 22 nt, Human
uagaaacagaauaugagugaga

SEQ ID NO: 1063799 - RNA, 22 nt, Human
uuugaagucaggcuuucuaccc

SEQ ID NO: 1063800 - RNA, 20 nt, Human
aauguauuguuuuguuucag

SEQ ID NO: 1063801 - RNA, 22 nt, Human
ggcaggugcucugugggccugg

SEQ ID NO: 1063802 - RNA, 22 nt, Human
gaaaugcauaaucuuaguagau

SEQ ID NO: 1063803 - RNA, 22 nt, Human
ugggccagcugaagugccgccc

SEQ ID NO: 1063804 - RNA, 22 nt, Human
uccuuuguugagauaaauuggg

SEQ ID NO: 1063805 - RNA, 22 nt, Human
ugucaauaguuuugaguucucu

SEQ ID NO: 1063806 - RNA, 22 nt, Human
cuguuuucccuggaguucagca

SEQ ID NO: 1063807 - RNA, 22 nt, Human
guggcugcagagccagcaagcu

SEQ ID NO: 1063808 - RNA, 22 nt, Human
ccugacgaaaggcgugcuggag

SEQ ID NO: 1063809 - RNA, 22 nt, Human
agcugccaaguuggaguagcaa

SEQ ID NO: 1063810 - RNA, 22 nt, Human
ugucauuuccugaaugcugagu

SEQ ID NO: 1063811 - RNA, 22 nt, Human
acaagcuguggugggacaagag

SEQ ID NO: 1063812 - RNA, 22 nt, Human
auauuucuccaaauguuuucaa

SEQ ID NO: 1063813 - RNA, 22 nt, Human
uaagaauaguguuugccuuugg

SEQ ID NO: 1063814 - RNA, 22 nt, Human
aagaaagugcuuuguaaauuau

SEQ ID NO: 1063815 - RNA, 22 nt, Human
agacagcaauaugggagacgga

SEQ ID NO: 1063816 - RNA, 22 nt, Human
caacuacauccacacuuuguua

SEQ ID NO: 1063817 - RNA, 22 nt, Human
cacccacauggaaauucacagu

SEQ ID NO: 1063818 - RNA, 22 nt, Human
gaaaggaaauauucuaagcacu

SEQ ID NO: 1063819 - RNA, 22 nt, Human
ggcccaaacggguccagugaaa

SEQ ID NO: 1063820 - RNA, 22 nt, Human
gagaugcuuuguguauagacaa

SEQ ID NO: 1063821 - RNA, 22 nt, Human
acagccagaggugguccugggu

SEQ ID NO: 1063822 - RNA, 22 nt, Human
ccuuuucuggccaccaagcgcu

SEQ ID NO: 1063823 - RNA, 20 nt, Human
ccaggcacugucccaugcag

SEQ ID NO: 1063824 - RNA, 22 nt, Human
aucagaaauagucauguuacuu

SEQ ID NO: 1063825 - RNA, 22 nt, Human
acauuugugcacaugugcaugg

SEQ ID NO: 1063826 - RNA, 20 nt, Human
uuuuuccuucucuacaggca

SEQ ID NO: 1063827 - RNA, 22 nt, Human
agcaccugcuaugugucaggga

SEQ ID NO: 1063828 - RNA, 20 nt, Human
ugcacacagaaauuugcauu

SEQ ID NO: 1063829 - RNA, 22 nt, Human
ugucaacacaccuaucucaauu

SEQ ID NO: 1063830 - RNA, 21 nt, Human
ggcagccugacccccagagag

SEQ ID NO: 1063831 - RNA, 22 nt, Human
aagccaugguagaaaacucagu

SEQ ID NO: 1063832 - RNA, 22 nt, Human
cauacagaaaauauauuuugau

SEQ ID NO: 1063833 - RNA, 22 nt, Human
aggcacuguucccaguuauccu

SEQ ID NO: 1063834 - RNA, 22 nt, Human
cauccacuagaaugacagaguu

SEQ ID NO: 1063835 - RNA, 22 nt, Human
uuuacaauugguuuucucuaau

SEQ ID NO: 1063836 - RNA, 18 nt, Human
aacaguuuccagauucuc

SEQ ID NO: 1063837 - RNA, 22 nt, Human
gaggggcagagguagagaacaa

SEQ ID NO: 1063838 - RNA, 22 nt, Human
cagaaggcauagaugaaggccu

SEQ ID NO: 1063839 - RNA, 22 nt, Human
ugggggacugcacuggcgucag

SEQ ID NO: 1063840 - RNA, 22 nt, Human
cauugcacuccaucuugggcaa

SEQ ID NO: 1063841 - RNA, 22 nt, Human
agggucaguucugugagguguu

SEQ ID NO: 1063842 - RNA, 22 nt, Human
cauuccuacaugauaagaauua

SEQ ID NO: 1063843 - RNA, 22 nt, Human
uggcauuuuccaaugauauguu

SEQ ID NO: 1063844 - RNA, 22 nt, Human
aaccucaggcucucuggacaau

SEQ ID NO: 1063845 - RNA, 22 nt, Human
ucaaacauaucugauuuuccau

SEQ ID NO: 1063846 - RNA, 23 nt, Human
cuccucguaacucuguggugggu

SEQ ID NO: 1063847 - RNA, 22 nt, Human
aaugaaugaaccacauauaaca

SEQ ID NO: 1063848 - RNA, 22 nt, Human
uggcuaggcuccaagagcugga

SEQ ID NO: 1063849 - RNA, 22 nt, Human
uggcugcagacaccuauggcag

SEQ ID NO: 1063850 - RNA, 22 nt, Human
acugccugcuccuggcuccaca

SEQ ID NO: 1063851 - RNA, 22 nt, Human
cuucaagaagacagcagagcau

SEQ ID NO: 1063852 - RNA, 17 nt, Human
gaccaggagaaaccagg

SEQ ID NO: 1063853 - RNA, 22 nt, Human
gaacuuaguagucuacuucuua

SEQ ID NO: 1063854 - RNA, 22 nt, Human
caucuugccugcuauucuguug

SEQ ID NO: 1063855 - RNA, 22 nt, Human
uaacaagaaauacauugguucu

SEQ ID NO: 1063856 - RNA, 22 nt, Human
aacaaaguuucaggaagauaga

SEQ ID NO: 1063857 - RNA, 22 nt, Human
aucauacauguaacuaaguaaa

SEQ ID NO: 1063858 - RNA, 22 nt, Human
gcaggcagucaucuuucauauu

SEQ ID NO: 1063859 - RNA, 22 nt, Human
gcugagggcuggucacauuugu

SEQ ID NO: 1063860 - RNA, 23 nt, Human
uccaagggcuacaaacacagacc

SEQ ID NO: 1063861 - RNA, 23 nt, Human
acauuucaauacugagggucuga

SEQ ID NO: 1063862 - RNA, 22 nt, Human
gcugugugacugagagccuggc

SEQ ID NO: 1063863 - RNA, 22 nt, Human
ugccaggaggaggugggacaga

SEQ ID NO: 1063864 - RNA, 22 nt, Human
aaaaauuuaugguucuucucug

SEQ ID NO: 1063865 - RNA, 22 nt, Human
uacugaaagaauacauaauuuc

SEQ ID NO: 1063866 - RNA, 23 nt, Human
ugggggugcacgggccacaucuu

SEQ ID NO: 1063867 - RNA, 20 nt, Human
ggcagagggccugggagaag

SEQ ID NO: 1063868 - RNA, 22 nt, Human
uuauuauuuuguguacagcaaa

SEQ ID NO: 1063869 - RNA, 22 nt, Human
uauuuaauuagugauuguagag

SEQ ID NO: 1063870 - RNA, 22 nt, Human
agggaggucuuugaggggcuua

SEQ ID NO: 1063871 - RNA, 20 nt, Human
uacagaaacaggacuuuugg

SEQ ID NO: 1063872 - RNA, 22 nt, Human
augcugaacugagauguaacuu

SEQ ID NO: 1063873 - RNA, 21 nt, Human
acaugucuggucauuuuuagc

SEQ ID NO: 1063874 - RNA, 21 nt, Human
ccccauggaguacaguugggc

SEQ ID NO: 1063875 - RNA, 22 nt, Human
augaacacauguacacauuucu

SEQ ID NO: 1063876 - RNA, 22 nt, Human
uucuggcucuccccugcugggu

SEQ ID NO: 1063877 - RNA, 20 nt, Human
gcagcagugcaaguccucuu

SEQ ID NO: 1063878 - RNA, 22 nt, Human
cacuccaagaccuacuuucucu

SEQ ID NO: 1063879 - RNA, 22 nt, Human
agcagcaggcuguguggacuga

SEQ ID NO: 1063880 - RNA, 22 nt, Human
aaauaagcacuuaacuguauca

SEQ ID NO: 1063881 - RNA, 22 nt, Human
uuaguuagaauaauacaaguaa

SEQ ID NO: 1063882 - RNA, 22 nt, Human
agaggcugugcccaccaggcaa

SEQ ID NO: 1063883 - RNA, 22 nt, Human
cccaagaucuaggacagaaaga

SEQ ID NO: 1063884 - RNA, 22 nt, Human
uuaauaugcugcuucuugaaaa

SEQ ID NO: 1063885 - RNA, 22 nt, Human
uggcagaggaggcucagauuga

SEQ ID NO: 1063886 - RNA, 21 nt, Human
aucuuuagccauccaaucaga

SEQ ID NO: 1063887 - RNA, 22 nt, Human
cagaaauguuuaugcuuuugaa

SEQ ID NO: 1063888 - RNA, 22 nt, Human
aaagaaucagaagucucaaaca

SEQ ID NO: 1063889 - RNA, 22 nt, Human
ccaggcucaggccugcucguug

SEQ ID NO: 1063890 - RNA, 19 nt, Human
ggagaagcaucuagaaaua

SEQ ID NO: 1063891 - RNA, 22 nt, Human
auucagcuaagugcuucaugcu

SEQ ID NO: 1063892 - RNA, 22 nt, Human
auucaagaggaacaaugaagau

SEQ ID NO: 1063893 - RNA, 22 nt, Human
cgaggcaggcaggcggaggaua

SEQ ID NO: 1063894 - RNA, 22 nt, Human
uaucuucacuuauaucuuucuu

SEQ ID NO: 1063895 - RNA, 22 nt, Human
aggcagcagcuugcugguugcc

SEQ ID NO: 1063896 - RNA, 22 nt, Human
ggagcaggagucucuugaauuu

SEQ ID NO: 1063897 - RNA, 18 nt, Human
ugcuggguaacuguaugg

SEQ ID NO: 1063898 - RNA, 22 nt, Human
aaguaacacggaacuugaagca

SEQ ID NO: 1063899 - RNA, 22 nt, Human
ggaggccaaggcaggcggauca

SEQ ID NO: 1063900 - RNA, 20 nt, Human
agacaggagcccccauucag

SEQ ID NO: 1063901 - RNA, 22 nt, Human
acaccagggccuagccagggcg

SEQ ID NO: 1063902 - RNA, 23 nt, Human
ugcaugugaauucauacuuguuu

SEQ ID NO: 1063903 - RNA, 22 nt, Human
gacagagugcagggcuagaaga

SEQ ID NO: 1063904 - RNA, 22 nt, Human
cacauuuacuuuuaucccuugg

SEQ ID NO: 1063905 - RNA, 22 nt, Human
ugggggcagccaggcugucaag

SEQ ID NO: 1063906 - RNA, 22 nt, Human
ucuggccagugaaaugcagaau

SEQ ID NO: 1063907 - RNA, 22 nt, Human
agggccaggaucacagccaaga

SEQ ID NO: 1063908 - RNA, 20 nt, Human
agggccugcucugugguguc

SEQ ID NO: 1063909 - RNA, 22 nt, Human
uuggaugaagucuagcuuuagu

SEQ ID NO: 1063910 - RNA, 22 nt, Human
ccagccuggagggcaguggugg

SEQ ID NO: 1063911 - RNA, 22 nt, Human
uaacaagucauuuuaaauuaug

SEQ ID NO: 1063912 - RNA, 22 nt, Human
gauggcaggcaggugaguagag

SEQ ID NO: 1063913 - RNA, 23 nt, Human
uugugggcagauuccauggggag

SEQ ID NO: 1063914 - RNA, 22 nt, Human
gccaggcugacucccccggccu

SEQ ID NO: 1063915 - RNA, 22 nt, Human
accuggcacacacuggggagug

SEQ ID NO: 1063916 - RNA, 22 nt, Human
gcuucugggcaccugaacagga

SEQ ID NO: 1063917 - RNA, 23 nt, Human
gccucagagaaacagcugcacac

SEQ ID NO: 1063918 - RNA, 22 nt, Human
agcuguggcagcagccguggca

SEQ ID NO: 1063919 - RNA, 21 nt, Human
ccaaaggcuauguaucuucug

SEQ ID NO: 1063920 - RNA, 22 nt, Human
ugcuggguagaaguauuagucu

SEQ ID NO: 1063921 - RNA, 21 nt, Human
gagugcaggucugaugccauc

SEQ ID NO: 1063922 - RNA, 22 nt, Human
auggcagccugagcagaggaau

SEQ ID NO: 1063923 - RNA, 22 nt, Human
ccugggcugcaugauggcauuu

SEQ ID NO: 1063924 - RNA, 23 nt, Human
uauacacauguggcaguauagug

SEQ ID NO: 1063925 - RNA, 22 nt, Human
gauguguuuccaggauuuguuu

SEQ ID NO: 1063926 - RNA, 22 nt, Human
uccuguggucuggaaggaaugg

SEQ ID NO: 1063927 - RNA, 22 nt, Human
gaggaagaaagcauaggugggg

SEQ ID NO: 1063928 - RNA, 22 nt, Human
gcacuuaacuggaaaagaauuu

SEQ ID NO: 1063929 - RNA, 22 nt, Human
acugggccugauugggucggag

SEQ ID NO: 1063930 - RNA, 22 nt, Human
aguaaacauuuucauauuuucu

SEQ ID NO: 1063931 - RNA, 22 nt, Human
uuuagaggucuguuucacauca

SEQ ID NO: 1063932 - RNA, 22 nt, Human
aguguacauaguuaggaacauc

SEQ ID NO: 1063933 - RNA, 22 nt, Human
ucacaccuguaaucccaggccu

SEQ ID NO: 1063934 - RNA, 22 nt, Human
gauuuuuauauaaagugagaaa

SEQ ID NO: 1063935 - RNA, 22 nt, Human
ugggcaggugcuauuuuccaug

SEQ ID NO: 1063936 - RNA, 21 nt, Human
aaggggcaaacccaggacacc

SEQ ID NO: 1063937 - RNA, 22 nt, Human
aucaggauuacacggggaugcu

SEQ ID NO: 1063938 - RNA, 19 nt, Human
cagucccaaauucuuguca

SEQ ID NO: 1063939 - RNA, 22 nt, Human
ggcugccuccacugcuuguccc

SEQ ID NO: 1063940 - RNA, 22 nt, Human
augaaacaguguguauagcaaa

SEQ ID NO: 1063941 - RNA, 22 nt, Human
cuguaugaguugggaauagaau

SEQ ID NO: 1063942 - RNA, 22 nt, Human
aagcagacaucccauacuuuug

SEQ ID NO: 1063943 - RNA, 22 nt, Human
auaauauuugcauuacugugau

SEQ ID NO: 1063944 - RNA, 22 nt, Human
ugacaguugagcauguaagaga

SEQ ID NO: 1063945 - RNA, 22 nt, Human
ugauuauauuaacuauguuccu

SEQ ID NO: 1063946 - RNA, 22 nt, Human
ucucuggaagcgcagaucuguu

SEQ ID NO: 1063947 - RNA, 22 nt, Human
aaaucaguuagugguaggauug

SEQ ID NO: 1063948 - RNA, 22 nt, Human
aaagaccugugguagcucuaaa

SEQ ID NO: 1063949 - RNA, 22 nt, Human
auauucuugaaagauccuggua

SEQ ID NO: 1063950 - RNA, 22 nt, Human
ccugcuggaccucaacacauuu

SEQ ID NO: 1063951 - RNA, 22 nt, Human
uucauuaguucugaagaugucu

SEQ ID NO: 1063952 - RNA, 22 nt, Human
cucagacuugcuuuuuauggaa

SEQ ID NO: 1063953 - RNA, 21 nt, Human
agaagccaugugguggagaac

SEQ ID NO: 1063954 - RNA, 22 nt, Human
accagaguuggaauaauuuuga

SEQ ID NO: 1063955 - RNA, 21 nt, Human
ccugggcugugguuuggagac

SEQ ID NO: 1063956 - RNA, 22 nt, Human
ugcuguagcccugcacagugca

SEQ ID NO: 1063957 - RNA, 22 nt, Human
caaggaagacccacgcagauau

SEQ ID NO: 1063958 - RNA, 22 nt, Human
acaguggaaagaacauggauuu

SEQ ID NO: 1063959 - RNA, 22 nt, Human
aaagacuuggcuuaugauuugc

SEQ ID NO: 1063960 - RNA, 22 nt, Human
cugcugagccgcacccaggagc

SEQ ID NO: 1063961 - RNA, 22 nt, Human
ggggaccuuuccauuucugaga

SEQ ID NO: 1063962 - RNA, 22 nt, Human
ggcuccacccugcuuccagaag

SEQ ID NO: 1063963 - RNA, 22 nt, Human
agugugaguaauucagggaggg

SEQ ID NO: 1063964 - RNA, 22 nt, Human
ugguggcagucuccuggcugug

SEQ ID NO: 1063965 - RNA, 22 nt, Human
ugaaagcagcaccaauaccauu

SEQ ID NO: 1063966 - RNA, 22 nt, Human
gaugaagcuauuugguuggcac

SEQ ID NO: 1063967 - RNA, 22 nt, Human
ucuuaugggaaagauguaauua

SEQ ID NO: 1063968 - RNA, 22 nt, Human
cauaauauacuacauugaugaa

SEQ ID NO: 1063969 - RNA, 18 nt, Human
ucucuuuccucaguggag

SEQ ID NO: 1063970 - RNA, 22 nt, Human
cugugacaguuucucagacuuu

SEQ ID NO: 1063971 - RNA, 22 nt, Human
uccucuggcccagcugccucug

SEQ ID NO: 1063972 - RNA, 23 nt, Human
cugggcugcuugagucccuggcu

SEQ ID NO: 1063973 - RNA, 22 nt, Human
caaauagaacucacagacaaga

SEQ ID NO: 1063974 - RNA, 22 nt, Human
acacacaugccuuuccuaagua

SEQ ID NO: 1063975 - RNA, 20 nt, Human
augcaaaucccaaaaucagg

SEQ ID NO: 1063976 - RNA, 22 nt, Human
caggaagcugugaaggagacgg

SEQ ID NO: 1063977 - RNA, 22 nt, Human
aucugccuccaaguccaugugu

SEQ ID NO: 1063978 - RNA, 22 nt, Human
ucugcuggccuuagcaggucua

SEQ ID NO: 1063979 - RNA, 21 nt, Human
aggugcagagccagggaccag

SEQ ID NO: 1063980 - RNA, 22 nt, Human
uuugagauggagucuugcucug

SEQ ID NO: 1063981 - RNA, 22 nt, Human
agcaccuguggcucaugcucgu

SEQ ID NO: 1063982 - RNA, 22 nt, Human
aggccacaguacuuugcagacc

SEQ ID NO: 1063983 - RNA, 22 nt, Human
uggcacuguggauuucacaagu

SEQ ID NO: 1063984 - RNA, 22 nt, Human
gaggccuggaauuccagccugg

SEQ ID NO: 1063985 - RNA, 19 nt, Human
uagcagagaugacuccagc

SEQ ID NO: 1063986 - RNA, 22 nt, Human
gaccauuuuuacagagcauuca

SEQ ID NO: 1063987 - RNA, 22 nt, Human
cugggcucaguggcucauggcu

SEQ ID NO: 1063988 - RNA, 22 nt, Human
ucucagagaagugaugagcaau

SEQ ID NO: 1063989 - RNA, 21 nt, Human
agcaugcacuacuucaucuua

SEQ ID NO: 1063990 - RNA, 22 nt, Human
gcccagaaagacugccuaacag

SEQ ID NO: 1063991 - RNA, 22 nt, Human
cucuucucugcagccuuugaag

SEQ ID NO: 1063992 - RNA, 22 nt, Human
cagggccacccucugcugggug

SEQ ID NO: 1063993 - RNA, 22 nt, Human
acuagucugcauuacaaaauag

SEQ ID NO: 1063994 - RNA, 22 nt, Human
uacaaaguaauguauaauaucg

SEQ ID NO: 1063995 - RNA, 22 nt, Human
ggcuccugggagauagagguca

SEQ ID NO: 1063996 - RNA, 22 nt, Human
ucagcugccucucccuggaaga

SEQ ID NO: 1063997 - RNA, 22 nt, Human
uggcagcuguguccagguagaa

SEQ ID NO: 1063998 - RNA, 22 nt, Human
uaacaacucaguuuguuccuug

SEQ ID NO: 1063999 - RNA, 23 nt, Human
acacagaagaagacccaaggaag

SEQ ID NO: 1064000 - RNA, 22 nt, Human
uuucacaggaguuguaccauuu

SEQ ID NO: 1064001 - RNA, 22 nt, Human
aaagcaauugugguuuuugcca

SEQ ID NO: 1064002 - RNA, 22 nt, Human
uuauggcuuaaauacuacaggg

SEQ ID NO: 1064003 - RNA, 19 nt, Human
cagaggcaccagguauaga

SEQ ID NO: 1064004 - RNA, 22 nt, Human
uuucaauguaacauuuccaggc

SEQ ID NO: 1064005 - RNA, 22 nt, Human
auagacuugguuaguaaauuug

SEQ ID NO: 1064006 - RNA, 22 nt, Human
gcagggacaaggcagguguucu

SEQ ID NO: 1064007 - RNA, 22 nt, Human
ccaguguuuaggaauaaaaugu

SEQ ID NO: 1064008 - RNA, 22 nt, Human
uggaagagaaaggaguggaucu

SEQ ID NO: 1064009 - RNA, 23 nt, Human
uuauugcaagguaaaauugcuga

SEQ ID NO: 1064010 - RNA, 22 nt, Human
acauagcacgucucaauuugga

SEQ ID NO: 1064011 - RNA, 22 nt, Human
cugcucugagaggcucuuccua

SEQ ID NO: 1064012 - RNA, 22 nt, Human
uuucacagagaaauauaacagg

SEQ ID NO: 1064013 - RNA, 22 nt, Human
uguaaacaaaugcauucuugcu

SEQ ID NO: 1064014 - RNA, 19 nt, Human
gaucagagugucagcuugu

SEQ ID NO: 1064015 - RNA, 22 nt, Human
uggacuggaaugcugauccucu

SEQ ID NO: 1064016 - RNA, 22 nt, Human
guccucuccaggaggcucugau

SEQ ID NO: 1064017 - RNA, 22 nt, Human
ggaaugcacuagacugugaaac

SEQ ID NO: 1064018 - RNA, 22 nt, Human
gcugucacacauggccccagcu

SEQ ID NO: 1064019 - RNA, 22 nt, Human
ugccaggccucaggagucucca

SEQ ID NO: 1064020 - RNA, 22 nt, Human
cuggagugaagcuuauuuuuca

SEQ ID NO: 1064021 - RNA, 23 nt, Human
gggaccagcuagggcugugaccu

SEQ ID NO: 1064022 - RNA, 22 nt, Human
ccucaugcugcaucucugaggu

SEQ ID NO: 1064023 - RNA, 22 nt, Human
aagagagaguuccuaggcaaaa

SEQ ID NO: 1064024 - RNA, 22 nt, Human
acuuuguuguuccuugucuaaa

SEQ ID NO: 1064025 - RNA, 22 nt, Human
ugggccuccaauuccagcggga

SEQ ID NO: 1064026 - RNA, 20 nt, Human
gccuggaggcagagauaaag

SEQ ID NO: 1064027 - RNA, 22 nt, Human
augcccuguggcaguacauauu

SEQ ID NO: 1064028 - RNA, 22 nt, Human
uugaggcagggcaugguggccc

SEQ ID NO: 1064029 - RNA, 18 nt, Human
uggcagcaggaagccauu

SEQ ID NO: 1064030 - RNA, 21 nt, Human
agaggcaggcauuaaguacac

SEQ ID NO: 1064031 - RNA, 22 nt, Human
uccugagaugcugauuucgggg

SEQ ID NO: 1064032 - RNA, 22 nt, Human
caggaaugacugcagauggggc

SEQ ID NO: 1064033 - RNA, 22 nt, Human
aagucaggcuggggucuggcag

SEQ ID NO: 1064034 - RNA, 22 nt, Human
caaggagaguaauugaaugaga

SEQ ID NO: 1064035 - RNA, 22 nt, Human
uuugaaaccuaguuauaugacu

SEQ ID NO: 1064036 - RNA, 22 nt, Human
uguccagguggccucugcugcu

SEQ ID NO: 1064037 - RNA, 22 nt, Human
gcccccucaaagaggaagcucu

SEQ ID NO: 1064038 - RNA, 22 nt, Human
gggcucuguguucuagcucucg

SEQ ID NO: 1064039 - RNA, 22 nt, Human
agcugggcgcaguggcugguga

SEQ ID NO: 1064040 - RNA, 21 nt, Human
agaagccuggguggagguggg

SEQ ID NO: 1064041 - RNA, 22 nt, Human
uccucuucugccuauaucugcc

SEQ ID NO: 1064042 - RNA, 22 nt, Human
gccagggaaacugcagaccagc

SEQ ID NO: 1064043 - RNA, 22 nt, Human
gugugcagcagagacaggacuc

SEQ ID NO: 1064044 - RNA, 18 nt, Human
aggaagcaggaggaaggc

SEQ ID NO: 1064045 - RNA, 22 nt, Human
ccccugaagacaauggagaggu

SEQ ID NO: 1064046 - RNA, 22 nt, Human
ucagaaguaggagacauucuug

SEQ ID NO: 1064047 - RNA, 22 nt, Human
ccagggugagugucauggguua

SEQ ID NO: 1064048 - RNA, 22 nt, Human
aacacagaguauuugaagcauu

SEQ ID NO: 1064049 - RNA, 22 nt, Human
ucuaaggccuucaugucaguau

SEQ ID NO: 1064050 - RNA, 22 nt, Human
ugggagcacccugaggagcuuc

SEQ ID NO: 1064051 - RNA, 22 nt, Human
acaagauuuuaugacucuuuuu

SEQ ID NO: 1064052 - RNA, 22 nt, Human
uuugaaaguguuuacuugggaa

SEQ ID NO: 1064053 - RNA, 22 nt, Human
ugacauuucgguguaugugaug

SEQ ID NO: 1064054 - RNA, 22 nt, Human
agcaccugcuuaaugugcagug

SEQ ID NO: 1064055 - RNA, 22 nt, Human
caagcagaagccucaggggcau

SEQ ID NO: 1064056 - RNA, 22 nt, Human
uaacauuuagaaaguguccauu

SEQ ID NO: 1064057 - RNA, 22 nt, Human
uacaagguuguacuuucucucu

SEQ ID NO: 1064058 - RNA, 22 nt, Human
caggcaggagaggaggauuucu

SEQ ID NO: 1064059 - RNA, 22 nt, Human
ggcauguuucaucacaucaaga

SEQ ID NO: 1064060 - RNA, 23 nt, Human
acugggcugaaauuuuucauggc

SEQ ID NO: 1064061 - RNA, 18 nt, Human
gcccagaggucugggccc

SEQ ID NO: 1064062 - RNA, 22 nt, Human
uacagccacaggugacucucau

SEQ ID NO: 1064063 - RNA, 22 nt, Human
uuugcugacuggaugcaguugg

SEQ ID NO: 1064064 - RNA, 22 nt, Human
cagcuggggcagccacgugcgg

SEQ ID NO: 1064065 - RNA, 22 nt, Human
ugaauaaauugagagcgaaugu

SEQ ID NO: 1064066 - RNA, 22 nt, Human
gaaggagaggauugugaggcug

SEQ ID NO: 1064067 - RNA, 22 nt, Human
aaagcaaugcccguucauuauc

SEQ ID NO: 1064068 - RNA, 21 nt, Human
uuacaacauuuguguucuaug

SEQ ID NO: 1064069 - RNA, 22 nt, Human
cuggcuuucauuucaagcacgu

SEQ ID NO: 1064070 - RNA, 22 nt, Human
gggccuggcaugcagccccguu

SEQ ID NO: 1064071 - RNA, 22 nt, Human
aggaaaaaagucugugauuaua

SEQ ID NO: 1064072 - RNA, 22 nt, Human
ugcauuuucuuccaccaauauc

SEQ ID NO: 1064073 - RNA, 22 nt, Human
gccccucucccuugaggcaggc

SEQ ID NO: 1064074 - RNA, 22 nt, Human
aucuaagauguauugagcacuu

SEQ ID NO: 1064075 - RNA, 22 nt, Human
aggaagaacagauaauggacgc

SEQ ID NO: 1064076 - RNA, 22 nt, Human
aaacaguguuuuuaugauuuau

SEQ ID NO: 1064077 - RNA, 22 nt, Human
agucugucagucauucuaacaa

SEQ ID NO: 1064078 - RNA, 22 nt, Human
aaguccagaacuccugugauag

SEQ ID NO: 1064079 - RNA, 22 nt, Human
agcucucaagauaagaaagaac

SEQ ID NO: 1064080 - RNA, 23 nt, Human
ucuugaaaagccuacagcaguuc

SEQ ID NO: 1064081 - RNA, 22 nt, Human
ucuguggaaauuuccugaggca

SEQ ID NO: 1064082 - RNA, 22 nt, Human
ugaggcagugcugggaagccug

SEQ ID NO: 1064083 - RNA, 22 nt, Human
aguuucacuaaggucugugugu

SEQ ID NO: 1064084 - RNA, 22 nt, Human
caaagcaggaagcuccugacag

SEQ ID NO: 1064085 - RNA, 22 nt, Human
cagggagcuauuaggguuagug

SEQ ID NO: 1064086 - RNA, 22 nt, Human
gcccauggcagaacugugagca

SEQ ID NO: 1064087 - RNA, 22 nt, Human
agaaaacucuacaucuguaugu

SEQ ID NO: 1064088 - RNA, 22 nt, Human
acaaagguggaccauguggcuu

SEQ ID NO: 1064089 - RNA, 22 nt, Human
gggccucuccggccuuugcauc

SEQ ID NO: 1064090 - RNA, 19 nt, Human
uucuccaggcugcagaggg

SEQ ID NO: 1064091 - RNA, 21 nt, Human
aggagggcacaaggccaggaa

SEQ ID NO: 1064092 - RNA, 20 nt, Human
uacaguguauguauuuaggc

SEQ ID NO: 1064093 - RNA, 22 nt, Human
uuucugugguggguaguucaga

SEQ ID NO: 1064094 - RNA, 22 nt, Human
caagaaucuugcagcuuagacu

SEQ ID NO: 1064095 - RNA, 22 nt, Human
gagguggcagaggccuggaccu

SEQ ID NO: 1064096 - RNA, 22 nt, Human
agccuggcuaaauucucccaug

SEQ ID NO: 1064097 - RNA, 22 nt, Human
cuggagguaauguuauuuuugu

SEQ ID NO: 1064098 - RNA, 22 nt, Human
ugcugucuuccaggauggugaa

SEQ ID NO: 1064099 - RNA, 22 nt, Human
agagcagagggcucugggacaa

SEQ ID NO: 1064100 - RNA, 22 nt, Human
ccuuuguucacuggagagugga

SEQ ID NO: 1064101 - RNA, 22 nt, Human
uccagaguacggaagagucauc

SEQ ID NO: 1064102 - RNA, 22 nt, Human
gcuuugcccaagggcccuaccc

SEQ ID NO: 1064103 - RNA, 22 nt, Human
augcuugaaaguuauuucauuu

SEQ ID NO: 1064104 - RNA, 22 nt, Human
agagccagagaccuggguucac

SEQ ID NO: 1064105 - RNA, 20 nt, Human
ugcagaagaacguucugguu

SEQ ID NO: 1064106 - RNA, 22 nt, Human
acaggcucgugcgcgcacgugu

SEQ ID NO: 1064107 - RNA, 22 nt, Human
ccaggaggaugaggggcauaga

SEQ ID NO: 1064108 - RNA, 22 nt, Human
cucucuggcuuggcacggagau

SEQ ID NO: 1064109 - RNA, 22 nt, Human
gagguggcuggcucagagccag

SEQ ID NO: 1064110 - RNA, 22 nt, Human
cucccucucaccggagcccugg

SEQ ID NO: 1064111 - RNA, 22 nt, Human
gagugcaggccugagcaccauc

SEQ ID NO: 1064112 - RNA, 22 nt, Human
ucuacauuuuaacaagaugccc

SEQ ID NO: 1064113 - RNA, 22 nt, Human
aaauggcauucagcaaccuuuc

SEQ ID NO: 1064114 - RNA, 22 nt, Human
ucaggaagcucuugcugauucu

SEQ ID NO: 1064115 - RNA, 22 nt, Human
aagagucacuccauaaauccca

SEQ ID NO: 1064116 - RNA, 22 nt, Human
ucagggcagguuaacuugggug

SEQ ID NO: 1064117 - RNA, 22 nt, Human
accucuggccuucaggcaucau

SEQ ID NO: 1064118 - RNA, 19 nt, Human
gcaggcagcugggguaucc

SEQ ID NO: 1064119 - RNA, 22 nt, Human
cugcccaggggagugcugucgg

SEQ ID NO: 1064120 - RNA, 22 nt, Human
gcaggaguguggugggacaucc

SEQ ID NO: 1064121 - RNA, 22 nt, Human
uaacaucuaagggagagaaagu

SEQ ID NO: 1064122 - RNA, 22 nt, Human
ucacagacuggucagucaacuu

SEQ ID NO: 1064123 - RNA, 22 nt, Human
guggccugaugccagcccugug

SEQ ID NO: 1064124 - RNA, 22 nt, Human
caaggaaacaugaaaugcauug

SEQ ID NO: 1064125 - RNA, 22 nt, Human
agggcugcaccggggcuucgcg

SEQ ID NO: 1064126 - RNA, 22 nt, Human
guucauaauuugaaggaauagg

SEQ ID NO: 1064127 - RNA, 22 nt, Human
aaaagcagagacucuggagcua

SEQ ID NO: 1064128 - RNA, 22 nt, Human
guuuuuauuguguaaauguggg

SEQ ID NO: 1064129 - RNA, 22 nt, Human
gcugagagcaguguggccuuaa

SEQ ID NO: 1064130 - RNA, 22 nt, Human
cacucugcgcugggcgccagcg

SEQ ID NO: 1064131 - RNA, 22 nt, Human
cagugauguuucugcaucagag

SEQ ID NO: 1064132 - RNA, 22 nt, Human
acucacaggacucugcauauag

SEQ ID NO: 1064133 - RNA, 22 nt, Human
acugggcucccaggcuugucau

SEQ ID NO: 1064134 - RNA, 22 nt, Human
gcauggaauucccuuaugggcc

SEQ ID NO: 1064135 - RNA, 22 nt, Human
aggcucagacaggaaaaguaac

SEQ ID NO: 1064136 - RNA, 22 nt, Human
uucuuucuuuguaguccugaac

SEQ ID NO: 1064137 - RNA, 22 nt, Human
uauuucuucgggauucaagcua

SEQ ID NO: 1064138 - RNA, 22 nt, Human
aaucaguuucuuggcaaguuua

SEQ ID NO: 1064139 - RNA, 22 nt, Human
ugucuucgcuacaaugaaaagg

SEQ ID NO: 1064140 - RNA, 22 nt, Human
acacuuuaucucaucucagaca

SEQ ID NO: 1064141 - RNA, 22 nt, Human
ugucuucuguauucaagucuau

SEQ ID NO: 1064142 - RNA, 22 nt, Human
uagugcuuuaaguuuacagaga

SEQ ID NO: 1064143 - RNA, 22 nt, Human
aaaaaauuaucauaguuccuga

SEQ ID NO: 1064144 - RNA, 22 nt, Human
cagagagaaucuuggcagcuga

SEQ ID NO: 1064145 - RNA, 22 nt, Human
aacagaaaucauuuagggcucu

SEQ ID NO: 1064146 - RNA, 22 nt, Human
ugaagcaacuggacaaguuggc

SEQ ID NO: 1064147 - RNA, 22 nt, Human
uccuauugguagacauuucugu

SEQ ID NO: 1064148 - RNA, 22 nt, Human
agagacaggguuuugucguguu

SEQ ID NO: 1064149 - RNA, 22 nt, Human
acacacagcgccuaccaugugc

SEQ ID NO: 1064150 - RNA, 23 nt, Human
cagggcugggcuugguguuaggc

SEQ ID NO: 1064151 - RNA, 22 nt, Human
caucuuuaaaggggagacaccc

SEQ ID NO: 1064152 - RNA, 20 nt, Human
uuacaaagaggcaucgcuuu

SEQ ID NO: 1064153 - RNA, 23 nt, Human
uuguuucuuuguauugucucuau

SEQ ID NO: 1064154 - RNA, 20 nt, Human
agccagaagaaggcuggaga

SEQ ID NO: 1064155 - RNA, 22 nt, Human
gauguacuugccuuaucuaucc

SEQ ID NO: 1064156 - RNA, 22 nt, Human
caggauggucagaugcauuguc

SEQ ID NO: 1064157 - RNA, 22 nt, Human
ggcuggcuggcugguagacaag

SEQ ID NO: 1064158 - RNA, 21 nt, Human
gucuuuuaagugaagagaggc

SEQ ID NO: 1064159 - RNA, 22 nt, Human
ucagaacagaagaaggaacacg

SEQ ID NO: 1064160 - RNA, 22 nt, Human
aacuacauuguccuuucugaag

SEQ ID NO: 1064161 - RNA, 22 nt, Human
gaguccaguucuuuccagcagu

SEQ ID NO: 1064162 - RNA, 22 nt, Human
ccucugagucucacuguaaccu

SEQ ID NO: 1064163 - RNA, 22 nt, Human
ugggaagggccugcccuuccuc

SEQ ID NO: 1064164 - RNA, 22 nt, Human
acagcugugaaaauccacagga

SEQ ID NO: 1064165 - RNA, 22 nt, Human
cagcuucugagcaagccagggg

SEQ ID NO: 1064166 - RNA, 22 nt, Human
ccagguggacuugauuugaaua

SEQ ID NO: 1064167 - RNA, 22 nt, Human
ccuggcagcuccuccccggcgg

SEQ ID NO: 1064168 - RNA, 22 nt, Human
gcucccaguucccaaagugacc

SEQ ID NO: 1064169 - RNA, 16 nt, Human
gcagggguggguggag

SEQ ID NO: 1064170 - RNA, 22 nt, Human
ccauuugucaccucugcacucc

SEQ ID NO: 1064171 - RNA, 22 nt, Human
gagaugguagccucagaagagu

SEQ ID NO: 1064172 - RNA, 22 nt, Human
gacaaagagaaguaacaguacc

SEQ ID NO: 1064173 - RNA, 18 nt, Human
ggcaugugagugcugagg

SEQ ID NO: 1064174 - RNA, 22 nt, Human
uuucuaaguguauugagcuugg

SEQ ID NO: 1064175 - RNA, 22 nt, Human
gucccaggcagagucaggaggg

SEQ ID NO: 1064176 - RNA, 22 nt, Human
ugcugcagguguguucagugag

SEQ ID NO: 1064177 - RNA, 22 nt, Human
ugaagcccugugucagcuucca

SEQ ID NO: 1064178 - RNA, 22 nt, Human
aacaguuucaguuacugaugag

SEQ ID NO: 1064179 - RNA, 22 nt, Human
ucacacaugaguaaauacaggg

SEQ ID NO: 1064180 - RNA, 22 nt, Human
gcccaggagguggaggugcagu

SEQ ID NO: 1064181 - RNA, 22 nt, Human
uugguucaguaggcaugccugg

SEQ ID NO: 1064182 - RNA, 22 nt, Human
aagcagccagccaucaugcccg

SEQ ID NO: 1064183 - RNA, 22 nt, Human
cuucucucccuggcacucagac

SEQ ID NO: 1064184 - RNA, 19 nt, Human
aggucugcagcugcaguuu

SEQ ID NO: 1064185 - RNA, 22 nt, Human
ugcagggacacgaagacaaaua

SEQ ID NO: 1064186 - RNA, 22 nt, Human
uuagccauuaaauuacaaggug

SEQ ID NO: 1064187 - RNA, 22 nt, Human
uggcagagguauauugggagga

SEQ ID NO: 1064188 - RNA, 18 nt, Human
ucuaggagaguaccuacc

SEQ ID NO: 1064189 - RNA, 21 nt, Human
uggcucaguugcugggcacag

SEQ ID NO: 1064190 - RNA, 22 nt, Human
aauauagauuuacucaagagaa

SEQ ID NO: 1064191 - RNA, 22 nt, Human
cuggacagaucccuuguagcuu

SEQ ID NO: 1064192 - RNA, 22 nt, Human
cccugcuuagcacccuugcacc

SEQ ID NO: 1064193 - RNA, 22 nt, Human
ccucauucuuuccugggccccu

SEQ ID NO: 1064194 - RNA, 22 nt, Human
uuaauacuauaauuugaaguac

SEQ ID NO: 1064195 - RNA, 22 nt, Human
cagaaugagauaacccagauug

SEQ ID NO: 1064196 - RNA, 22 nt, Human
ggaaaauacugauucaugccau

SEQ ID NO: 1064197 - RNA, 22 nt, Human
uagcucuucaaucacugucucc

SEQ ID NO: 1064198 - RNA, 22 nt, Human
ugaacacauaaaagcaaagggu

SEQ ID NO: 1064199 - RNA, 22 nt, Human
auuauucauggucuuccacaau

SEQ ID NO: 1064200 - RNA, 22 nt, Human
ccuggcugcuuucacuauggag

SEQ ID NO: 1064201 - RNA, 22 nt, Human
uaaacagagaagacuuugagca

SEQ ID NO: 1064202 - RNA, 22 nt, Human
agaagaaagauugaagguuccu

SEQ ID NO: 1064203 - RNA, 22 nt, Human
uuucacauccugaagccccacu

SEQ ID NO: 1064204 - RNA, 22 nt, Human
ucuguuccauguuuuguuccau

SEQ ID NO: 1064205 - RNA, 22 nt, Human
uugcaaggcuagguucacccac

SEQ ID NO: 1064206 - RNA, 22 nt, Human
gcaaagcaagcugucagccuca

SEQ ID NO: 1064207 - RNA, 19 nt, Human
uggggcuguguuuugaccc

SEQ ID NO: 1064208 - RNA, 22 nt, Human
uuuauccauucaccaguugaac

SEQ ID NO: 1064209 - RNA, 22 nt, Human
gcauuuuauaaagaguuauuug

SEQ ID NO: 1064210 - RNA, 22 nt, Human
aaaauuuucagcuugacuugau

SEQ ID NO: 1064211 - RNA, 22 nt, Human
aaggcugaguaaaacagagaac

SEQ ID NO: 1064212 - RNA, 22 nt, Human
uaugaacuuuaagcucuguguc

SEQ ID NO: 1064213 - RNA, 22 nt, Human
ggagccuguuaguugagugcuc

SEQ ID NO: 1064214 - RNA, 22 nt, Human
accauguguuuuacacauggua

SEQ ID NO: 1064215 - RNA, 22 nt, Human
uccugccucuuuucuuauucca

SEQ ID NO: 1064216 - RNA, 22 nt, Human
gauaaaauaacuauggaauacu

SEQ ID NO: 1064217 - RNA, 22 nt, Human
ucugaaauggcgauggccguug

SEQ ID NO: 1064218 - RNA, 22 nt, Human
gcuuucuuaguguguuaauugg

SEQ ID NO: 1064219 - RNA, 22 nt, Human
caaaguaugaaccaguuucucu

SEQ ID NO: 1064220 - RNA, 22 nt, Human
cauaucuuaugguuuucuaagu

SEQ ID NO: 1064221 - RNA, 22 nt, Human
agucucuugcacauuguauuaa

SEQ ID NO: 1064222 - RNA, 22 nt, Human
auguacaguuucuagacucaaa

SEQ ID NO: 1064223 - RNA, 22 nt, Human
cagcugaauucuucagacucca

SEQ ID NO: 1064224 - RNA, 22 nt, Human
cuggugggagauaauugaauca

SEQ ID NO: 1064225 - RNA, 22 nt, Human
gccagagucuucugacccugug

SEQ ID NO: 1064226 - RNA, 22 nt, Human
gcaggccagcugugcagauggg

SEQ ID NO: 1064227 - RNA, 22 nt, Human
uccaaguucuaggaacugcugc

SEQ ID NO: 1064228 - RNA, 22 nt, Human
aauucauugccagaaucuauga

SEQ ID NO: 1064229 - RNA, 22 nt, Human
aagccaguguccagaaugggca

SEQ ID NO: 1064230 - RNA, 22 nt, Human
gcucaggagcucuugguggcgc

SEQ ID NO: 1064231 - RNA, 22 nt, Human
uaggaaaagcacaggauguucu

SEQ ID NO: 1064232 - RNA, 22 nt, Human
gcauuuuagaauauuggagcaa

SEQ ID NO: 1064233 - RNA, 22 nt, Human
uaauuuugucacagugacaugc

SEQ ID NO: 1064234 - RNA, 22 nt, Human
cuggaugcuuccucucugcuag

SEQ ID NO: 1064235 - RNA, 22 nt, Human
uauuagguuggugcaaaaguaa

SEQ ID NO: 1064236 - RNA, 22 nt, Human
agacaucucuaugcaggaucuc

SEQ ID NO: 1064237 - RNA, 22 nt, Human
ucuggcucuaacuaggcaucag

SEQ ID NO: 1064238 - RNA, 22 nt, Human
aaucuccauuuacccugcaucu

SEQ ID NO: 1064239 - RNA, 22 nt, Human
cuuauucuacuccacaagcucu

SEQ ID NO: 1064240 - RNA, 22 nt, Human
ggcugcugguagggguaggaag

SEQ ID NO: 1064241 - RNA, 22 nt, Human
gaauuuaaaggccagaccugag

SEQ ID NO: 1064242 - RNA, 22 nt, Human
ucacagugaugacgugggagca

SEQ ID NO: 1064243 - RNA, 22 nt, Human
gcuucuggagucuucagaggaa

SEQ ID NO: 1064244 - RNA, 22 nt, Human
ucacuguagugagcagaauaua

SEQ ID NO: 1064245 - RNA, 22 nt, Human
auggggugagacuaggauuaaa

SEQ ID NO: 1064246 - RNA, 22 nt, Human
cauaagaaauuuaacagaacuu

SEQ ID NO: 1064247 - RNA, 22 nt, Human
gcgagugccgagagggcagggc

SEQ ID NO: 1064248 - RNA, 22 nt, Human
gcaggugaugugaugugagcau

SEQ ID NO: 1064249 - RNA, 22 nt, Human
ugacaauagcgauuuaucuugc

SEQ ID NO: 1064250 - RNA, 22 nt, Human
ugcaggcuccacguuguugucc

SEQ ID NO: 1064251 - RNA, 22 nt, Human
ucacucucuaagcaugacagac

SEQ ID NO: 1064252 - RNA, 22 nt, Human
uggacuaaagaggaaagaugua

SEQ ID NO: 1064253 - RNA, 20 nt, Human
uccuuuggccuuagagcugu

SEQ ID NO: 1064254 - RNA, 22 nt, Human
cugggggcaagcagacagcugu

SEQ ID NO: 1064255 - RNA, 19 nt, Human
agccacagaacuugcagga

SEQ ID NO: 1064256 - RNA, 22 nt, Human
gcauuccuacaggcugcuauga

SEQ ID NO: 1064257 - RNA, 22 nt, Human
ucaguggauugacaugaaaaag

SEQ ID NO: 1064258 - RNA, 22 nt, Human
uuagcaucugcuguaagcuuau

SEQ ID NO: 1064259 - RNA, 23 nt, Human
uugcauagacauccucauagauu

SEQ ID NO: 1064260 - RNA, 22 nt, Human
uccagcagggaauuaguagucu

SEQ ID NO: 1064261 - RNA, 22 nt, Human
cugcucuguucccccaucaucu

SEQ ID NO: 1064262 - RNA, 22 nt, Human
cgugcccugcgcaagugcugcu

SEQ ID NO: 1064263 - RNA, 22 nt, Human
ccuuuccuuuuuagugugggag

SEQ ID NO: 1064264 - RNA, 22 nt, Human
guuucaaaaugaugcuguaacu

SEQ ID NO: 1064265 - RNA, 22 nt, Human
gugaauauucuuugugcaguau

SEQ ID NO: 1064266 - RNA, 22 nt, Human
ugaagauaacaguaagguauug

SEQ ID NO: 1064267 - RNA, 22 nt, Human
uggaaagacauucagccgcugg

SEQ ID NO: 1064268 - RNA, 22 nt, Human
auacauauaugguacuuccugg

SEQ ID NO: 1064269 - RNA, 22 nt, Human
gcaaggaccuuugagcgugcca

SEQ ID NO: 1064270 - RNA, 18 nt, Human
cuccuuucccuacaccuc

SEQ ID NO: 1064271 - RNA, 20 nt, Human
ucugucucugagcuagacuu

SEQ ID NO: 1064272 - RNA, 22 nt, Human
cuguaaauaugaagaauauaug

SEQ ID NO: 1064273 - RNA, 22 nt, Human
acagagagaaacaaucagcagc

SEQ ID NO: 1064274 - RNA, 22 nt, Human
ucagcaauccucccacaggugg

SEQ ID NO: 1064275 - RNA, 22 nt, Human
gcacacagccagcugagggcua

SEQ ID NO: 1064276 - RNA, 22 nt, Human
gggagagagagcucauguugaa

SEQ ID NO: 1064277 - RNA, 22 nt, Human
acacaucuuagacugaaauaug

SEQ ID NO: 1064278 - RNA, 20 nt, Human
augugagggguugaaguggg

SEQ ID NO: 1064279 - RNA, 22 nt, Human
ugugcuucugcagagacuauuu

SEQ ID NO: 1064280 - RNA, 22 nt, Human
agauggaguuaguaccagaguc

SEQ ID NO: 1064281 - RNA, 22 nt, Human
agaggugacauaggagaggcuc

SEQ ID NO: 1064282 - RNA, 22 nt, Human
cucagacuuucaggguaggcca

SEQ ID NO: 1064283 - RNA, 22 nt, Human
gacagagaggcugagcaguaca

SEQ ID NO: 1064284 - RNA, 17 nt, Human
ugcaggcuguuauagcc

SEQ ID NO: 1064285 - RNA, 22 nt, Human
aaugucugagucucuguauccc

SEQ ID NO: 1064286 - RNA, 22 nt, Human
cugagcuggucuauggacuugg

SEQ ID NO: 1064287 - RNA, 22 nt, Human
aggcucugugacaaucaagcug

SEQ ID NO: 1064288 - RNA, 22 nt, Human
cugccaggccuccgcugucccc

SEQ ID NO: 1064289 - RNA, 22 nt, Human
guuaaauaaccucauguccguu

SEQ ID NO: 1064290 - RNA, 19 nt, Human
agucuuucccacucgucuu

SEQ ID NO: 1064291 - RNA, 22 nt, Human
aacaaguguauuaauggaaaua

SEQ ID NO: 1064292 - RNA, 22 nt, Human
agcugcucucacuggacgccug

SEQ ID NO: 1064293 - RNA, 22 nt, Human
ugaagacacauacaagggaaug

SEQ ID NO: 1064294 - RNA, 22 nt, Human
ugagaacaaaguugaaaguuug

SEQ ID NO: 1064295 - RNA, 22 nt, Human
cacauuuaauccuuuauaagua

SEQ ID NO: 1064296 - RNA, 22 nt, Human
gcuggcuguguuucaucucuga

SEQ ID NO: 1064297 - RNA, 22 nt, Human
gugcuucucuucacacccaacu

SEQ ID NO: 1064298 - RNA, 22 nt, Human
gcccucagaaugggcucuaauc

SEQ ID NO: 1064299 - RNA, 22 nt, Human
uugucuaaugagcuccacuuca

SEQ ID NO: 1064300 - RNA, 22 nt, Human
auacagaauucacuacaguuuc

SEQ ID NO: 1064301 - RNA, 22 nt, Human
auacaaagacaaaucucaaucu

SEQ ID NO: 1064302 - RNA, 20 nt, Human
uggaccacccuccucuuugc

SEQ ID NO: 1064303 - RNA, 22 nt, Human
ucucuucuugauuuucacugga

SEQ ID NO: 1064304 - RNA, 22 nt, Human
gagagggccgggggccagcucc

SEQ ID NO: 1064305 - RNA, 22 nt, Human
cugcugggucccccugcugauu

SEQ ID NO: 1064306 - RNA, 22 nt, Human
cugaaaucaauuuugauuaucu

SEQ ID NO: 1064307 - RNA, 22 nt, Human
cucuucaggauggcuugugaug

SEQ ID NO: 1064308 - RNA, 17 nt, Human
uuccucucacauuuuuu

SEQ ID NO: 1064309 - RNA, 22 nt, Human
ucccugccaaugauuggagcaa

SEQ ID NO: 1064310 - RNA, 22 nt, Human
ugcuuaaaggauaguuuaaacu

SEQ ID NO: 1064311 - RNA, 22 nt, Human
aaggugugaagagaugggaaga

SEQ ID NO: 1064312 - RNA, 22 nt, Human
accuccuggugcccaaguguuu

SEQ ID NO: 1064313 - RNA, 22 nt, Human
ucacauauuuaagaaaguuaaa

SEQ ID NO: 1064314 - RNA, 22 nt, Human
cugucuuuuacuaucauuuacu

SEQ ID NO: 1064315 - RNA, 22 nt, Human
uuacagagaggugauugugaag

SEQ ID NO: 1064316 - RNA, 22 nt, Human
ugaagccagucaauguuaaguu

SEQ ID NO: 1064317 - RNA, 22 nt, Human
ggucucagaucuuuauuaaggc

SEQ ID NO: 1064318 - RNA, 22 nt, Human
ccagagcaauucucacagaacu

SEQ ID NO: 1064319 - RNA, 22 nt, Human
cucaggauagauuguccucuca

SEQ ID NO: 1064320 - RNA, 22 nt, Human
agagcuggggcauaaaugccac

SEQ ID NO: 1064321 - RNA, 20 nt, Human
uuugauuucacaaggccagu

SEQ ID NO: 1064322 - RNA, 22 nt, Human
ucacagaaggaccuuguuucau

SEQ ID NO: 1064323 - RNA, 21 nt, Human
ccagcugucuguccuuaggca

SEQ ID NO: 1064324 - RNA, 22 nt, Human
gccuggaagugugucgugggaa

SEQ ID NO: 1064325 - RNA, 22 nt, Human
gcucuguaccugcggagaugag

SEQ ID NO: 1064326 - RNA, 22 nt, Human
ucuacaagucaagucuaucaag

SEQ ID NO: 1064327 - RNA, 21 nt, Human
uggcugaguggaugcaugaau

SEQ ID NO: 1064328 - RNA, 18 nt, Human
ucuuccaacacugacacc

SEQ ID NO: 1064329 - RNA, 22 nt, Human
agucuucucauuucacaugcuu

SEQ ID NO: 1064330 - RNA, 22 nt, Human
caaagaaugagugaguacauaa

SEQ ID NO: 1064331 - RNA, 22 nt, Human
gaggagcacaugaggcugaggg

SEQ ID NO: 1064332 - RNA, 22 nt, Human
caggaggcuccuagggcucugu

SEQ ID NO: 1064333 - RNA, 22 nt, Human
aaagacauauuucuaaguuuau

SEQ ID NO: 1064334 - RNA, 22 nt, Human
cagggcaggaauuugacauugc

SEQ ID NO: 1064335 - RNA, 22 nt, Human
ggggcugggauuugaacccagg

SEQ ID NO: 1064336 - RNA, 18 nt, Human
agggaucaucacugcagc

SEQ ID NO: 1064337 - RNA, 22 nt, Human
ugagccugguugcagugucugg

SEQ ID NO: 1064338 - RNA, 22 nt, Human
gugcccugggccuucagggcca

SEQ ID NO: 1064339 - RNA, 22 nt, Human
acaugauuugcaugauuuguaa

SEQ ID NO: 1064340 - RNA, 23 nt, Human
uaguuauuuucucuguaauuugc

SEQ ID NO: 1064341 - RNA, 22 nt, Human
acagagccacuuuggugccuac

SEQ ID NO: 1064342 - RNA, 22 nt, Human
ucuacaaagccauucaggaucu

SEQ ID NO: 1064343 - RNA, 22 nt, Human
caguucuggaguuucauucuuu

SEQ ID NO: 1064344 - RNA, 22 nt, Human
aaacucuagggcuccacauucc

SEQ ID NO: 1064345 - RNA, 22 nt, Human
ugacuuuagaauuuuauccaga

SEQ ID NO: 1064346 - RNA, 22 nt, Human
ucccaagagcaagaacuugcug

SEQ ID NO: 1064347 - RNA, 22 nt, Human
agcagggcuuugucucugugaa

SEQ ID NO: 1064348 - RNA, 20 nt, Human
gugcuucagaagccauugcu

SEQ ID NO: 1064349 - RNA, 22 nt, Human
cccauggguuuuccucccugcc

SEQ ID NO: 1064350 - RNA, 22 nt, Human
auaucacaguaguuguuuaguu

SEQ ID NO: 1064351 - RNA, 22 nt, Human
aagagcuggcccaaucugagca

SEQ ID NO: 1064352 - RNA, 22 nt, Human
gcaaggcugcugccacccaucu

SEQ ID NO: 1064353 - RNA, 22 nt, Human
gggcagcauaacaaucacugaa

SEQ ID NO: 1064354 - RNA, 22 nt, Human
aacagacucacagcuagagaag

SEQ ID NO: 1064355 - RNA, 22 nt, Human
cuggagggugagccucaucucu

SEQ ID NO: 1064356 - RNA, 22 nt, Human
ggggcugagaauucagucucgg

SEQ ID NO: 1064357 - RNA, 22 nt, Human
agugccuaaccccuuguaugaa

SEQ ID NO: 1064358 - RNA, 22 nt, Human
ugucacauaggcaaaauguuuu

SEQ ID NO: 1064359 - RNA, 22 nt, Human
ccugcuguagggccccuggggc

SEQ ID NO: 1064360 - RNA, 22 nt, Human
guuuauuagaguuuucugucug

SEQ ID NO: 1064361 - RNA, 22 nt, Human
cuguucaauuuguuucaguuau

SEQ ID NO: 1064362 - RNA, 22 nt, Human
caaacuuuuccuggaaaagauu

SEQ ID NO: 1064363 - RNA, 21 nt, Human
agcugggccucagccugcagu

SEQ ID NO: 1064364 - RNA, 22 nt, Human
gaaauguaggcauaauuauuuu

SEQ ID NO: 1064365 - RNA, 22 nt, Human
aauuucuucagcucuaaaaugg

SEQ ID NO: 1064366 - RNA, 23 nt, Human
ugucugucauggaauuucaaggu

SEQ ID NO: 1064367 - RNA, 22 nt, Human
uuuaguuauugcacagaauuag

SEQ ID NO: 1064368 - RNA, 18 nt, Human
uggagcaggaagccuggc

SEQ ID NO: 1064369 - RNA, 22 nt, Human
cugcccagaagccagaugggca

SEQ ID NO: 1064370 - RNA, 22 nt, Human
ucacaauuuggauacagcuaug

SEQ ID NO: 1064371 - RNA, 22 nt, Human
ggagccugugcccaagcccaga

SEQ ID NO: 1064372 - RNA, 22 nt, Human
auucaaguggcugcuauguuaa

SEQ ID NO: 1064373 - RNA, 19 nt, Human
uaugacaaguacuaguucu

SEQ ID NO: 1064374 - RNA, 22 nt, Human
gcucccagucugauggaggaga

SEQ ID NO: 1064375 - RNA, 22 nt, Human
uagcagaggcuacugcuccuug

SEQ ID NO: 1064376 - RNA, 22 nt, Human
gcagcagagcuuuguccuggcu

SEQ ID NO: 1064377 - RNA, 22 nt, Human
gcuauaggguacauuuguguuu

SEQ ID NO: 1064378 - RNA, 20 nt, Human
cagcuuggaugagaggcuga

SEQ ID NO: 1064379 - RNA, 22 nt, Human
uaccaggagcccccuucugguc

SEQ ID NO: 1064380 - RNA, 22 nt, Human
aggaagaggguggcagauaauc

SEQ ID NO: 1064381 - RNA, 22 nt, Human
cagagccaaaugcugugguuau

SEQ ID NO: 1064382 - RNA, 17 nt, Human
gcucugccucucccacc

SEQ ID NO: 1064383 - RNA, 21 nt, Human
acagacaguccagagaaaaga

SEQ ID NO: 1064384 - RNA, 22 nt, Human
guccaaggaugcaggaugcugu

SEQ ID NO: 1064385 - RNA, 20 nt, Human
agucugucaauuuacagugg

SEQ ID NO: 1064386 - RNA, 22 nt, Human
accagagauggggcuucucugu

SEQ ID NO: 1064387 - RNA, 22 nt, Human
gcagagcucaugccugcaccuc

SEQ ID NO: 1064388 - RNA, 23 nt, Human
ccucagggucuagcagagagaag

SEQ ID NO: 1064389 - RNA, 22 nt, Human
agguggggaguauauguaauug

SEQ ID NO: 1064390 - RNA, 22 nt, Human
aauaggacuuugguccuagcuc

SEQ ID NO: 1064391 - RNA, 22 nt, Human
uuaggaaaucacuuugcucacc

SEQ ID NO: 1064392 - RNA, 22 nt, Human
gaaaucuuuuccaauuguuuag

SEQ ID NO: 1064393 - RNA, 22 nt, Human
uggaccaacauucacuggcaua

SEQ ID NO: 1064394 - RNA, 19 nt, Human
ccucugcgcuguccugcuc

SEQ ID NO: 1064395 - RNA, 22 nt, Human
caagacuuuggaggaauuugga

SEQ ID NO: 1064396 - RNA, 22 nt, Human
cuauuuaucuauuucugaauga

SEQ ID NO: 1064397 - RNA, 22 nt, Human
ugggcuggcguggagaguuuag

SEQ ID NO: 1064398 - RNA, 22 nt, Human
cugugcuggcagaccuggaguu

SEQ ID NO: 1064399 - RNA, 22 nt, Human
acacauaugguugcugcaguga

SEQ ID NO: 1064400 - RNA, 22 nt, Human
uaccuuggaaaugcuagaguaa

SEQ ID NO: 1064401 - RNA, 22 nt, Human
aauuaggaauaaaugaguacuu

SEQ ID NO: 1064402 - RNA, 22 nt, Human
uacauaauuaaucuuuaaguuc

SEQ ID NO: 1064403 - RNA, 22 nt, Human
caugauaacuucauuacacaau

SEQ ID NO: 1064404 - RNA, 22 nt, Human
cagaauaugacucgggcacuac

SEQ ID NO: 1064405 - RNA, 22 nt, Human
aagaggcagcccgcugaggcug

SEQ ID NO: 1064406 - RNA, 22 nt, Human
auauacacauguguauacauuu

SEQ ID NO: 1064407 - RNA, 22 nt, Human
aguauacugaaaguaaauauga

SEQ ID NO: 1064408 - RNA, 22 nt, Human
gucaggaaaaauugauaauuuu

SEQ ID NO: 1064409 - RNA, 22 nt, Human
ugaaagcacucacuucugcucu

SEQ ID NO: 1064410 - RNA, 22 nt, Human
ccuuuucuauccuucuagguuc

SEQ ID NO: 1064411 - RNA, 22 nt, Human
uggggccagguggcugcagguc

SEQ ID NO: 1064412 - RNA, 22 nt, Human
guauuuuucaguuaggagcuua

SEQ ID NO: 1064413 - RNA, 22 nt, Human
cagguggccaguacucaaggau

SEQ ID NO: 1064414 - RNA, 22 nt, Human
ggcucaggccagaccacgacuc

SEQ ID NO: 1064415 - RNA, 22 nt, Human
uccuugagauuaauuaaucacc

SEQ ID NO: 1064416 - RNA, 22 nt, Human
uuucacagguaagcaauacagg

SEQ ID NO: 1064417 - RNA, 22 nt, Human
auguaaauuguacugacacacg

SEQ ID NO: 1064418 - RNA, 22 nt, Human
ucugagagccucuagccuaagu

SEQ ID NO: 1064419 - RNA, 22 nt, Human
uuucauaaugucacagucaaaa

SEQ ID NO: 1064420 - RNA, 22 nt, Human
cuguuucaagugaagucagaca

SEQ ID NO: 1064421 - RNA, 22 nt, Human
ucagagucucccccaguuuggg

SEQ ID NO: 1064422 - RNA, 22 nt, Human
acagccugcagccccaggucgc

SEQ ID NO: 1064423 - RNA, 22 nt, Human
cuuuacaaagcaauuuugucuc

SEQ ID NO: 1064424 - RNA, 22 nt, Human
agaaguaugugagaaauuaucc

SEQ ID NO: 1064425 - RNA, 22 nt, Human
auauuugucaucugccuuaguu

SEQ ID NO: 1064426 - RNA, 22 nt, Human
cuuuaauuaggaaguauaauga

SEQ ID NO: 1064427 - RNA, 22 nt, Human
ugcccccagacagaauccaguu

SEQ ID NO: 1064428 - RNA, 22 nt, Human
cccugcaggggaccugcagccu

SEQ ID NO: 1064429 - RNA, 22 nt, Human
ggcaggcuuugagaaagagcau

SEQ ID NO: 1064430 - RNA, 22 nt, Human
uuugacuucuaucuaguaagaa

SEQ ID NO: 1064431 - RNA, 18 nt, Human
caauuucauccuuaagcc

SEQ ID NO: 1064432 - RNA, 17 nt, Human
uguuccauuugaccacc

SEQ ID NO: 1064433 - RNA, 22 nt, Human
uauacaguuaaguuucuucagu

SEQ ID NO: 1064434 - RNA, 22 nt, Human
ccaaggaggccccaggucagcu

SEQ ID NO: 1064435 - RNA, 22 nt, Human
acagcagagugugagauagcca

SEQ ID NO: 1064436 - RNA, 22 nt, Human
ugaggugguccaaagacuguuu

SEQ ID NO: 1064437 - RNA, 22 nt, Human
uuugcauuuguuuagaaccuga

SEQ ID NO: 1064438 - RNA, 22 nt, Human
caguggcagagaacagagaccu

SEQ ID NO: 1064439 - RNA, 22 nt, Human
ugaaaauucaucucauagcaga

SEQ ID NO: 1064440 - RNA, 22 nt, Human
uggagcugauacagcuggcuuu

SEQ ID NO: 1064441 - RNA, 22 nt, Human
gaggccuggaccagccacagag

SEQ ID NO: 1064442 - RNA, 22 nt, Human
acguagcacugagagaugcagg

SEQ ID NO: 1064443 - RNA, 22 nt, Human
aggagccauggaggugaggcgg

SEQ ID NO: 1064444 - RNA, 22 nt, Human
uucagaaggauuuuaacacaug

SEQ ID NO: 1064445 - RNA, 22 nt, Human
agccagggauggcagugcccag

SEQ ID NO: 1064446 - RNA, 22 nt, Human
uguggccugggagcugaggucu

SEQ ID NO: 1064447 - RNA, 22 nt, Human
acucacuuuccauucaagcacc

SEQ ID NO: 1064448 - RNA, 22 nt, Human
uccuuaaaugaacucugcauga

SEQ ID NO: 1064449 - RNA, 22 nt, Human
gccuggagaggaagccggugga

SEQ ID NO: 1064450 - RNA, 22 nt, Human
ggagucaccaaguaggagucuu

SEQ ID NO: 1064451 - RNA, 20 nt, Human
cacagcuugccuuuuaugac

SEQ ID NO: 1064452 - RNA, 22 nt, Human
aaucuauaugcuuuucacauac

SEQ ID NO: 1064453 - RNA, 22 nt, Human
aaauaaacugaagcacagagag

SEQ ID NO: 1064454 - RNA, 22 nt, Human
aaaugucuguaugagaaagaga

SEQ ID NO: 1064455 - RNA, 22 nt, Human
ugguccuggaagguccugaggg

SEQ ID NO: 1064456 - RNA, 22 nt, Human
ugcauacacaagcauacaugua

SEQ ID NO: 1064457 - RNA, 18 nt, Human
ugaggaaggggaaguauu

SEQ ID NO: 1064458 - RNA, 21 nt, Human
aacaaagggaugcucaucuuu

SEQ ID NO: 1064459 - RNA, 22 nt, Human
caggaaauuuaagaguguacaa

SEQ ID NO: 1064460 - RNA, 22 nt, Human
uuugggaagaggaaucucugga

SEQ ID NO: 1064461 - RNA, 22 nt, Human
cuggaagguucuuugugugccu

SEQ ID NO: 1064462 - RNA, 22 nt, Human
caagauggguguugugaugguu

SEQ ID NO: 1064463 - RNA, 22 nt, Human
aaaaguauuuuggaucucagau

SEQ ID NO: 1064464 - RNA, 21 nt, Human
caucacaggaugauuuuuuca

SEQ ID NO: 1064465 - RNA, 22 nt, Human
ucacauuucuuuauguagucuu

SEQ ID NO: 1064466 - RNA, 22 nt, Human
uacaaacuguuauuauuauugu

SEQ ID NO: 1064467 - RNA, 22 nt, Human
ccuccagcgcgauccacuccgg

SEQ ID NO: 1064468 - RNA, 22 nt, Human
ugccugucagggggagugggaa

SEQ ID NO: 1064469 - RNA, 22 nt, Human
ucugagacaacuuagcccucga

SEQ ID NO: 1064470 - RNA, 22 nt, Human
aacuuccagcuuucugucuaau

SEQ ID NO: 1064471 - RNA, 22 nt, Human
gauauugccagauguccccgga

SEQ ID NO: 1064472 - RNA, 22 nt, Human
ucugagaggcagaccuuccuaa

SEQ ID NO: 1064473 - RNA, 22 nt, Human
gaaaauaggcugcaucuccuuc

SEQ ID NO: 1064474 - RNA, 22 nt, Human
uacaacaggaauuucaacuuug

SEQ ID NO: 1064475 - RNA, 22 nt, Human
cacuuaaaacuccuggaauugu

SEQ ID NO: 1064476 - RNA, 22 nt, Human
gucuuuuucuacgauagcgccu

SEQ ID NO: 1064477 - RNA, 22 nt, Human
agagccugggaauuugcauguu

SEQ ID NO: 1064478 - RNA, 22 nt, Human
aaucuggcauuugagaguagga

SEQ ID NO: 1064479 - RNA, 22 nt, Human
agauacauagcugugagcacac

SEQ ID NO: 1064480 - RNA, 22 nt, Human
ucggagcuguagaugaaacccu

SEQ ID NO: 1064481 - RNA, 22 nt, Human
caggugcugcguggcggagcug

SEQ ID NO: 1064482 - RNA, 22 nt, Human
agcagguggauuuagacgggag

SEQ ID NO: 1064483 - RNA, 22 nt, Human
acagaugguuauugucauuucu

SEQ ID NO: 1064484 - RNA, 22 nt, Human
aagcccuccguacgugcuagcu

SEQ ID NO: 1064485 - RNA, 22 nt, Human
aaagaugucauacacauuaaga

SEQ ID NO: 1064486 - RNA, 22 nt, Human
gcacccagaauaaggacaggac

SEQ ID NO: 1064487 - RNA, 22 nt, Human
uagcugccagaccauucuuacu

SEQ ID NO: 1064488 - RNA, 22 nt, Human
acauaugcucaucugcauuccc

SEQ ID NO: 1064489 - RNA, 22 nt, Human
agccugagccccauccagcuga

SEQ ID NO: 1064490 - RNA, 22 nt, Human
acaauuucuuauaguucaauuc

SEQ ID NO: 1064491 - RNA, 22 nt, Human
auauuauagacagagucuucug

SEQ ID NO: 1064492 - RNA, 22 nt, Human
uguucauuauucuucaucugcc

SEQ ID NO: 1064493 - RNA, 22 nt, Human
ccucaggauccgcaggugcagu

SEQ ID NO: 1064494 - RNA, 22 nt, Human
uuuuaaaggauacucuugucua

SEQ ID NO: 1064495 - RNA, 22 nt, Human
auuaaucauuucugcauuaucu

SEQ ID NO: 1064496 - RNA, 22 nt, Human
auuuugcuuuauguaaauaugu

SEQ ID NO: 1064497 - RNA, 22 nt, Human
gggcagauggggcacaggcuga

SEQ ID NO: 1064498 - RNA, 22 nt, Human
gaggcucagagugguuaaauaa

SEQ ID NO: 1064499 - RNA, 19 nt, Human
agugucaucagcuacucag

SEQ ID NO: 1064500 - RNA, 22 nt, Human
ccuggagauuauuugguccaau

SEQ ID NO: 1064501 - RNA, 22 nt, Human
uuuauguacauauccacaagga

SEQ ID NO: 1064502 - RNA, 22 nt, Human
agguagcauauuccagacuugu

SEQ ID NO: 1064503 - RNA, 22 nt, Human
uggcucagugacauuccuccca

SEQ ID NO: 1064504 - RNA, 22 nt, Human
gaguccaguuagugaggcuggg

SEQ ID NO: 1064505 - RNA, 22 nt, Human
uggaagaauuuggggauaaauu

SEQ ID NO: 1064506 - RNA, 22 nt, Human
aaggcacucauucaaggagaua

SEQ ID NO: 1064507 - RNA, 22 nt, Human
accugccuauggagccacaugg

SEQ ID NO: 1064508 - RNA, 20 nt, Human
acccugccaggcaugugaau

SEQ ID NO: 1064509 - RNA, 19 nt, Human
agugguagaugagcaggag

SEQ ID NO: 1064510 - RNA, 22 nt, Human
augggcugugggacccuggacc

SEQ ID NO: 1064511 - RNA, 22 nt, Human
auuguauuagcacaauacaauu

SEQ ID NO: 1064512 - RNA, 22 nt, Human
uguucccuccuccccacugggu

SEQ ID NO: 1064513 - RNA, 22 nt, Human
ccugagugaauucccucacugu

SEQ ID NO: 1064514 - RNA, 22 nt, Human
uuaugacauaugaguacaagua

SEQ ID NO: 1064515 - RNA, 22 nt, Human
uuacugauuuuugggcccuacc

SEQ ID NO: 1064516 - RNA, 22 nt, Human
augcaaauaaagcaacuauaca

SEQ ID NO: 1064517 - RNA, 22 nt, Human
ggcuggcagaagugugcuggcu

SEQ ID NO: 1064518 - RNA, 21 nt, Human
ugggcagauggcaguguggcu

SEQ ID NO: 1064519 - RNA, 23 nt, Human
aaugauuucaugaugauagcagc

SEQ ID NO: 1064520 - RNA, 22 nt, Human
caggagcucuuaaggaugugau

SEQ ID NO: 1064521 - RNA, 22 nt, Human
uuaaaagucugaugauuuacau

SEQ ID NO: 1064522 - RNA, 22 nt, Human
agagccagguguagucucggag

SEQ ID NO: 1064523 - RNA, 22 nt, Human
ucagacagagaaguacaaugag

SEQ ID NO: 1064524 - RNA, 22 nt, Human
guuucauauauaguaacugaaa

SEQ ID NO: 1064525 - RNA, 22 nt, Human
caggcuggagugcaguugugca

SEQ ID NO: 1064526 - RNA, 22 nt, Human
aaauaaagguccacuuuagggc

SEQ ID NO: 1064527 - RNA, 22 nt, Human
uuuacagcaacagugcagaggu

SEQ ID NO: 1064528 - RNA, 22 nt, Human
agauuucagguuggggcagaag

SEQ ID NO: 1064529 - RNA, 22 nt, Human
auucuuggagcagucaaagaag

SEQ ID NO: 1064530 - RNA, 22 nt, Human
auuaguaaaacauuguauaugu

SEQ ID NO: 1064531 - RNA, 22 nt, Human
aucuucucauguguaaugaggu

SEQ ID NO: 1064532 - RNA, 22 nt, Human
ugccugugacccaaggaugcga

SEQ ID NO: 1064533 - RNA, 22 nt, Human
augcccuggacuucuaguauuc

SEQ ID NO: 1064534 - RNA, 22 nt, Human
cugccccuggcuggugaagcag

SEQ ID NO: 1064535 - RNA, 22 nt, Human
gaggaggcacuugagcagaugu

SEQ ID NO: 1064536 - RNA, 22 nt, Human
aagauuuccauuucuagcucau

SEQ ID NO: 1064537 - RNA, 19 nt, Human
cucuggccucuggaugcug

SEQ ID NO: 1064538 - RNA, 22 nt, Human
uggaggcauuuuagguugucac

SEQ ID NO: 1064539 - RNA, 20 nt, Human
ggaacaugaaugugaguggc

SEQ ID NO: 1064540 - RNA, 22 nt, Human
acauuugacauuuaguaucagc

SEQ ID NO: 1064541 - RNA, 22 nt, Human
agugcuggcccauagcugcugg

SEQ ID NO: 1064542 - RNA, 22 nt, Human
gaacccaggcuuuugaggcugu

SEQ ID NO: 1064543 - RNA, 22 nt, Human
ugagcaguaacagcucacaggg

SEQ ID NO: 1064544 - RNA, 22 nt, Human
aaggagcucccggcagaccagg

SEQ ID NO: 1064545 - RNA, 22 nt, Human
uaaacuacccaugacaguuuca

SEQ ID NO: 1064546 - RNA, 22 nt, Human
aaaacuuagcuaggcaaguuuu

SEQ ID NO: 1064547 - RNA, 22 nt, Human
guggcagagguuccucagugug

SEQ ID NO: 1064548 - RNA, 22 nt, Human
aagugacaaaaggguauccaaa

SEQ ID NO: 1064549 - RNA, 22 nt, Human
gauguuuucuggaaaaugaaug

SEQ ID NO: 1064550 - RNA, 22 nt, Human
gcugaugucccacugacagcca

SEQ ID NO: 1064551 - RNA, 22 nt, Human
gggcuggagccuggcggugguu

SEQ ID NO: 1064552 - RNA, 23 nt, Human
uuggacaaggccagagccagcac

SEQ ID NO: 1064553 - RNA, 22 nt, Human
uggcagucgaucauauucagca

SEQ ID NO: 1064554 - RNA, 22 nt, Human
ggcuggguuauuuauggccaag

SEQ ID NO: 1064555 - RNA, 21 nt, Human
uccauuguuuucccaggguuu

SEQ ID NO: 1064556 - RNA, 22 nt, Human
ucacugaagacugggcucuaaa

SEQ ID NO: 1064557 - RNA, 22 nt, Human
acugaguguaggacuuugaguu

SEQ ID NO: 1064558 - RNA, 22 nt, Human
ugaaacuucuaauaugaauagu

SEQ ID NO: 1064559 - RNA, 22 nt, Human
uugggcucaggaguuugagacc

SEQ ID NO: 1064560 - RNA, 22 nt, Human
cagagacagaaaauggaucuag

SEQ ID NO: 1064561 - RNA, 20 nt, Human
gcugggggugugcugaguga

SEQ ID NO: 1064562 - RNA, 22 nt, Human
acauuucucagguaagucauuu

SEQ ID NO: 1064563 - RNA, 22 nt, Human
gggcuuggcacaugggcucagc

SEQ ID NO: 1064564 - RNA, 22 nt, Human
guuacaaaggacugggggccac

SEQ ID NO: 1064565 - RNA, 22 nt, Human
uuugaauauacuucaaacaaag

SEQ ID NO: 1064566 - RNA, 22 nt, Human
agggaagaggaccagagucucu

SEQ ID NO: 1064567 - RNA, 22 nt, Human
uaacacauauuucaagaguagu

SEQ ID NO: 1064568 - RNA, 22 nt, Human
gauggccuggguccccuuccgg

SEQ ID NO: 1064569 - RNA, 22 nt, Human
gaaauauuacaguggaggggau

SEQ ID NO: 1064570 - RNA, 22 nt, Human
uuccaaauguuggacaacugua

SEQ ID NO: 1064571 - RNA, 22 nt, Human
guggccagccccauggacaguu

SEQ ID NO: 1064572 - RNA, 22 nt, Human
uggccucugggaaagcagauuc

SEQ ID NO: 1064573 - RNA, 22 nt, Human
ugucuagggagcugcucaggcu

SEQ ID NO: 1064574 - RNA, 22 nt, Human
cuccucacuuuccagacugggc

SEQ ID NO: 1064575 - RNA, 21 nt, Human
gcaugccugcaucuuaguguu

SEQ ID NO: 1064576 - RNA, 22 nt, Human
caaaacauucagagagcucacu

SEQ ID NO: 1064577 - RNA, 20 nt, Human
uggggccuguuucugugguu

SEQ ID NO: 1064578 - RNA, 22 nt, Human
ucuaaacaguuucacucuuaau

SEQ ID NO: 1064579 - RNA, 22 nt, Human
gugcugccggcauagcagugaa

SEQ ID NO: 1064580 - RNA, 22 nt, Human
uaccacaguuuaucuauucagc

SEQ ID NO: 1064581 - RNA, 21 nt, Human
uccaaaucccauucuguaguc

SEQ ID NO: 1064582 - RNA, 22 nt, Human
ucucaggaauagaguggcagca

SEQ ID NO: 1064583 - RNA, 22 nt, Human
acaguggaugugauguccaggu

SEQ ID NO: 1064584 - RNA, 22 nt, Human
ccacuguagagauuugaaugcc

SEQ ID NO: 1064585 - RNA, 22 nt, Human
ucccucagggugcaguugcuuu

SEQ ID NO: 1064586 - RNA, 18 nt, Human
aggcagcagcaucuucuc

SEQ ID NO: 1064587 - RNA, 22 nt, Human
uguuuacuagccaacauggaga

SEQ ID NO: 1064588 - RNA, 22 nt, Human
ccuggaaggugaugguacagca

SEQ ID NO: 1064589 - RNA, 20 nt, Human
ggaccagguggggcgguggc

SEQ ID NO: 1064590 - RNA, 22 nt, Human
aacacaaaaauucucaggggca

SEQ ID NO: 1064591 - RNA, 22 nt, Human
ggcucugcuucagaaggcucau

SEQ ID NO: 1064592 - RNA, 22 nt, Human
guccucaggaaggcuuucugac

SEQ ID NO: 1064593 - RNA, 22 nt, Human
uugaaacaguagcucauagacc

SEQ ID NO: 1064594 - RNA, 22 nt, Human
gaaaggagaggguuaaggagcu

SEQ ID NO: 1064595 - RNA, 22 nt, Human
cugagcccuugucuuccugguc

SEQ ID NO: 1064596 - RNA, 18 nt, Human
gugagcagagagcaucac

SEQ ID NO: 1064597 - RNA, 22 nt, Human
uagucagugaucaguggaguug

SEQ ID NO: 1064598 - RNA, 22 nt, Human
uaagaccaauccuguguaccuc

SEQ ID NO: 1064599 - RNA, 22 nt, Human
agagcccuuucuccaggcaccu

SEQ ID NO: 1064600 - RNA, 22 nt, Human
gcuucuggaagcugcuucugcc

SEQ ID NO: 1064601 - RNA, 22 nt, Human
cugcugaucgaaucagucaccc

SEQ ID NO: 1064602 - RNA, 22 nt, Human
uuuaaaaaacuagucugagucu

SEQ ID NO: 1064603 - RNA, 22 nt, Human
uagucccauuuugagguauuug

SEQ ID NO: 1064604 - RNA, 22 nt, Human
cagagcugcgcuuuuuccuggu

SEQ ID NO: 1064605 - RNA, 22 nt, Human
aaugucugcucuacucaggagg

SEQ ID NO: 1064606 - RNA, 22 nt, Human
aaaugcugcagcuaguguguuu

SEQ ID NO: 1064607 - RNA, 22 nt, Human
gcccugccugccgguguggguc

SEQ ID NO: 1064608 - RNA, 22 nt, Human
auugucgcuuauuuaggugcuu

SEQ ID NO: 1064609 - RNA, 19 nt, Human
ucuuuucacgcauuuugaa

SEQ ID NO: 1064610 - RNA, 22 nt, Human
uccuuuguggaaauacuugugg

SEQ ID NO: 1064611 - RNA, 22 nt, Human
uuauuuaaaagugguaagauuc

SEQ ID NO: 1064612 - RNA, 22 nt, Human
gcacugagucugucaugcugca

SEQ ID NO: 1064613 - RNA, 22 nt, Human
agcacacaucacuucugcucau

SEQ ID NO: 1064614 - RNA, 22 nt, Human
aauuucuugggagcucagagaa

SEQ ID NO: 1064615 - RNA, 18 nt, Human
uggaggaaucacaauggc

SEQ ID NO: 1064616 - RNA, 22 nt, Human
aaaaaaucagaucuuugguuaa

SEQ ID NO: 1064617 - RNA, 22 nt, Human
gaaauauacauugcaggaagag

SEQ ID NO: 1064618 - RNA, 22 nt, Human
aguggaccagaagacugaagcu

SEQ ID NO: 1064619 - RNA, 22 nt, Human
gcagugaaucuggcaagaauuu

SEQ ID NO: 1064620 - RNA, 19 nt, Human
uucuguaaggacauuaauc

SEQ ID NO: 1064621 - RNA, 22 nt, Human
gcaaaguuccuacuuuacugga

SEQ ID NO: 1064622 - RNA, 22 nt, Human
aauaucuguggccauacaauuu

SEQ ID NO: 1064623 - RNA, 22 nt, Human
cuggagccauguauagccuaug

SEQ ID NO: 1064624 - RNA, 21 nt, Human
acugccuggggugcuggccaa

SEQ ID NO: 1064625 - RNA, 22 nt, Human
ucacagugagccaugucagaga

SEQ ID NO: 1064626 - RNA, 22 nt, Human
agcuuuaaaaauccaauaucca

SEQ ID NO: 1064627 - RNA, 22 nt, Human
caggugggcugccucuccagcu

SEQ ID NO: 1064628 - RNA, 22 nt, Human
ugcagccaucuuucuuggagga

SEQ ID NO: 1064629 - RNA, 22 nt, Human
acauacuaugaauacauguguc

SEQ ID NO: 1064630 - RNA, 22 nt, Human
auacauuauuguuaaagaacau

SEQ ID NO: 1064631 - RNA, 22 nt, Human
cuacauuuugugauuaugaaau

SEQ ID NO: 1064632 - RNA, 22 nt, Human
aaugguuuguaccuguccuugg

SEQ ID NO: 1064633 - RNA, 16 nt, Human
ggcaccagugaacaca

SEQ ID NO: 1064634 - RNA, 22 nt, Human
gagaccucuugguaucgcuagg

SEQ ID NO: 1064635 - RNA, 19 nt, Human
ccugggagucagcugaagg

SEQ ID NO: 1064636 - RNA, 22 nt, Human
gaauguuugacuaaagguagcu

SEQ ID NO: 1064637 - RNA, 22 nt, Human
cuggggugagcagaaacagggg

SEQ ID NO: 1064638 - RNA, 22 nt, Human
uccuccugccuuugcuucuugu

SEQ ID NO: 1064639 - RNA, 22 nt, Human
agcuaacacauuccagcuauuu

SEQ ID NO: 1064640 - RNA, 22 nt, Human
ucugugaacaucacauugacag

SEQ ID NO: 1064641 - RNA, 22 nt, Human
augcaguauaaaucauuucugg

SEQ ID NO: 1064642 - RNA, 22 nt, Human
cuccaaguauguuaaaaucuaa

SEQ ID NO: 1064643 - RNA, 22 nt, Human
gcacugaaauuauaugcauuug

SEQ ID NO: 1064644 - RNA, 22 nt, Human
caggaaagggaugggcugccac

SEQ ID NO: 1064645 - RNA, 22 nt, Human
uuaguuuccuguggugugaagu

SEQ ID NO: 1064646 - RNA, 22 nt, Human
acaaauuuggugagaguaaaua

SEQ ID NO: 1064647 - RNA, 22 nt, Human
ucuggcuccaccuccuuuacua

SEQ ID NO: 1064648 - RNA, 22 nt, Human
ucagaggcuucuggccagucug

SEQ ID NO: 1064649 - RNA, 22 nt, Human
acacaagugaauauuuuaagga

SEQ ID NO: 1064650 - RNA, 22 nt, Human
ucaaguauuauuacagauguag

SEQ ID NO: 1064651 - RNA, 22 nt, Human
auguauuuuaagauuugccuca

SEQ ID NO: 1064652 - RNA, 22 nt, Human
ccucagaggugaacaucagugc

SEQ ID NO: 1064653 - RNA, 22 nt, Human
uucugaauccucgaaacauagc

SEQ ID NO: 1064654 - RNA, 21 nt, Human
aguuuuauauuauaagcuaaa

SEQ ID NO: 1064655 - RNA, 21 nt, Human
gccuggcagguggaagggcuc

SEQ ID NO: 1064656 - RNA, 22 nt, Human
uucugaaagucuuuuuaaguua

SEQ ID NO: 1064657 - RNA, 22 nt, Human
cuggaaaguacagugugucaca

SEQ ID NO: 1064658 - RNA, 22 nt, Human
uagcagcaauuucagaaguuug

SEQ ID NO: 1064659 - RNA, 22 nt, Human
ccagcccugaacccugcugcau

SEQ ID NO: 1064660 - RNA, 22 nt, Human
agaggcagaaguguucaaaccc

SEQ ID NO: 1064661 - RNA, 22 nt, Human
cccuuccuugugacuggugggg

SEQ ID NO: 1064662 - RNA, 21 nt, Human
cagcuuugucugucuucgggg

SEQ ID NO: 1064663 - RNA, 22 nt, Human
gacacagggggauguguggacg

SEQ ID NO: 1064664 - RNA, 22 nt, Human
agggagcaugggugaagcaggc

SEQ ID NO: 1064665 - RNA, 22 nt, Human
guggcuucacauggcauuuggc

SEQ ID NO: 1064666 - RNA, 22 nt, Human
agucccagcccaguccuguaag

SEQ ID NO: 1064667 - RNA, 22 nt, Human
ucugaagaacugaguaaacaug

SEQ ID NO: 1064668 - RNA, 22 nt, Human
gauauugcauauuggaugaguu

SEQ ID NO: 1064669 - RNA, 22 nt, Human
uauuuccugcauggugauguaa

SEQ ID NO: 1064670 - RNA, 22 nt, Human
ccagucugugugccagccugcg

SEQ ID NO: 1064671 - RNA, 22 nt, Human
uuuggaauguaguuuaaucauc

SEQ ID NO: 1064672 - RNA, 22 nt, Human
ugcucugugguccaagauggcu

SEQ ID NO: 1064673 - RNA, 22 nt, Human
ucugagggugggagaaggagcu

SEQ ID NO: 1064674 - RNA, 22 nt, Human
gagaaagauuguccuucagggg

SEQ ID NO: 1064675 - RNA, 22 nt, Human
gugaagauaaggaugcugcagu

SEQ ID NO: 1064676 - RNA, 22 nt, Human
cacaggaacaaagaagacaauu

SEQ ID NO: 1064677 - RNA, 22 nt, Human
aguaucaaucacccuuugaagu

SEQ ID NO: 1064678 - RNA, 22 nt, Human
uucuucuccuaaggagaguccu

SEQ ID NO: 1064679 - RNA, 18 nt, Human
gcauuuuaaucugaggca

SEQ ID NO: 1064680 - RNA, 20 nt, Human
cacguuuuuccacuagcaaa

SEQ ID NO: 1064681 - RNA, 22 nt, Human
agagccccugguggagugagaa

SEQ ID NO: 1064682 - RNA, 23 nt, Human
auuuuacaggucaguuccuugaa

SEQ ID NO: 1064683 - RNA, 22 nt, Human
aggacacaacaucauuucugug

SEQ ID NO: 1064684 - RNA, 22 nt, Human
uucauuagaaaaguaaaaaugc

SEQ ID NO: 1064685 - RNA, 22 nt, Human
uaaaaguuuuaguuguacauaa

SEQ ID NO: 1064686 - RNA, 22 nt, Human
cagagcugcucaugguggccag

SEQ ID NO: 1064687 - RNA, 23 nt, Human
ugagcccaggaggucaaggcugc

SEQ ID NO: 1064688 - RNA, 22 nt, Human
ccuucaugucauuggacaccuu

SEQ ID NO: 1064689 - RNA, 22 nt, Human
uggcccugaggacccagugugg

SEQ ID NO: 1064690 - RNA, 22 nt, Human
uccaaauauucaucuacuucug

SEQ ID NO: 1064691 - RNA, 22 nt, Human
ucagaugguuccaucauuuuuc

SEQ ID NO: 1064692 - RNA, 22 nt, Human
ggaaagagcccagcagugcuug

SEQ ID NO: 1064693 - RNA, 22 nt, Human
uuuccaauucaagcuuuuacgu

SEQ ID NO: 1064694 - RNA, 22 nt, Human
acauuuuuacugggcaucugca

SEQ ID NO: 1064695 - RNA, 19 nt, Human
uuaagcuaagauacuagua

SEQ ID NO: 1064696 - RNA, 22 nt, Human
ugaagcuuguauuuaaauaagu

SEQ ID NO: 1064697 - RNA, 22 nt, Human
uugcuuuuaauuaaucauugcu

SEQ ID NO: 1064698 - RNA, 22 nt, Human
uuuguaugugauaagacuauuc

SEQ ID NO: 1064699 - RNA, 22 nt, Human
ucaucacauguguagucauccc

SEQ ID NO: 1064700 - RNA, 22 nt, Human
cuuauucagcacuugcucugua

SEQ ID NO: 1064701 - RNA, 22 nt, Human
aggacagagccugugcagaccg

SEQ ID NO: 1064702 - RNA, 22 nt, Human
caagggcagcagccucaagcgg

SEQ ID NO: 1064703 - RNA, 22 nt, Human
uggcagagugcggcauccccug

SEQ ID NO: 1064704 - RNA, 22 nt, Human
aaacagcugcacugcugauguc

SEQ ID NO: 1064705 - RNA, 22 nt, Human
ucuggcucacuucaggcuucac

SEQ ID NO: 1064706 - RNA, 22 nt, Human
acagcuggcaggggggcaugaa

SEQ ID NO: 1064707 - RNA, 18 nt, Human
ugucucugaauuccagug

SEQ ID NO: 1064708 - RNA, 23 nt, Human
uggaaacauucugaauguccauc

SEQ ID NO: 1064709 - RNA, 22 nt, Human
uggcccugacagguccugggca

SEQ ID NO: 1064710 - RNA, 22 nt, Human
agggcagcuaaggugcugacug

SEQ ID NO: 1064711 - RNA, 22 nt, Human
uguaaauuggaaaucaaucaag

SEQ ID NO: 1064712 - RNA, 22 nt, Human
guggcauuugaacaaucacaua

SEQ ID NO: 1064713 - RNA, 22 nt, Human
gacccaggguuucugcacaggg

SEQ ID NO: 1064714 - RNA, 22 nt, Human
cccaggcagagagcuggugagc

SEQ ID NO: 1064715 - RNA, 22 nt, Human
uguuuacaaggaguuuauauug

SEQ ID NO: 1064716 - RNA, 22 nt, Human
ggcacugaaguggguguugggu

SEQ ID NO: 1064717 - RNA, 22 nt, Human
ucaguguucuuauuuaauuagg

SEQ ID NO: 1064718 - RNA, 22 nt, Human
gggcagcauucugugggcaggu

SEQ ID NO: 1064719 - RNA, 22 nt, Human
uggacccuggacugcccuggcc

SEQ ID NO: 1064720 - RNA, 22 nt, Human
acagaacagaggguuuuagaau

SEQ ID NO: 1064721 - RNA, 22 nt, Human
uuauguuugaguauaugacuca

SEQ ID NO: 1064722 - RNA, 22 nt, Human
gccaggaagucagccaagccca

SEQ ID NO: 1064723 - RNA, 17 nt, Human
cugggccucugcccuuu

SEQ ID NO: 1064724 - RNA, 22 nt, Human
acagggcagugucuugaaaaau

SEQ ID NO: 1064725 - RNA, 22 nt, Human
uuucacaggaugcuguuuuaua

SEQ ID NO: 1064726 - RNA, 21 nt, Human
gcugggccuguacuugcccug

SEQ ID NO: 1064727 - RNA, 22 nt, Human
cuggagccuucaccaggggaaa

SEQ ID NO: 1064728 - RNA, 22 nt, Human
ugggggagaguuuagaugauuu

SEQ ID NO: 1064729 - RNA, 22 nt, Human
ugcuucuguuucauugaucuua

SEQ ID NO: 1064730 - RNA, 22 nt, Human
gggaugcagucagagccccugu

SEQ ID NO: 1064731 - RNA, 22 nt, Human
caguuucuuuccauuguuaccu

SEQ ID NO: 1064732 - RNA, 22 nt, Human
acacagggucuagaguuaggcc

SEQ ID NO: 1064733 - RNA, 22 nt, Human
ccugcuggcggggacccaguga

SEQ ID NO: 1064734 - RNA, 22 nt, Human
gcugugcaguaguagguacagu

SEQ ID NO: 1064735 - RNA, 22 nt, Human
caaguuauuccuuuacacuaua

SEQ ID NO: 1064736 - RNA, 22 nt, Human
aagaucaccuugacaugaaaag

SEQ ID NO: 1064737 - RNA, 22 nt, Human
agauaacuaaagaaagggauua

SEQ ID NO: 1064738 - RNA, 22 nt, Human
cuggcacuuggcacccaugaaa

SEQ ID NO: 1064739 - RNA, 22 nt, Human
guccugguuuucacagaccuuu

SEQ ID NO: 1064740 - RNA, 22 nt, Human
ggguccagacacuccagaggaa

SEQ ID NO: 1064741 - RNA, 22 nt, Human
ucgcuugaacccaggaagugga

SEQ ID NO: 1064742 - RNA, 22 nt, Human
auguuucaccaguuuuauaaga

SEQ ID NO: 1064743 - RNA, 22 nt, Human
auuuguaucaaucucaauauau

SEQ ID NO: 1064744 - RNA, 22 nt, Human
gagagugagauaauuucacaua

SEQ ID NO: 1064745 - RNA, 22 nt, Human
gcagaaagcuccuugcgaucug

SEQ ID NO: 1064746 - RNA, 22 nt, Human
auagccuugguccuugcuccac

SEQ ID NO: 1064747 - RNA, 22 nt, Human
ugggccuguugggguugaguua

SEQ ID NO: 1064748 - RNA, 22 nt, Human
uuguaugaccacaaucugacgu

SEQ ID NO: 1064749 - RNA, 22 nt, Human
cacauaaauggugccauguuuu

SEQ ID NO: 1064750 - RNA, 22 nt, Human
guggaaggugcuagaacaagga

SEQ ID NO: 1064751 - RNA, 22 nt, Human
acagagcaugauggaagaucga

SEQ ID NO: 1064752 - RNA, 22 nt, Human
cugcugagcccuggcacaggug

SEQ ID NO: 1064753 - RNA, 22 nt, Human
ugucucugugacuccuuccgcc

SEQ ID NO: 1064754 - RNA, 22 nt, Human
ugcuggcuacugauggcaggcc

SEQ ID NO: 1064755 - RNA, 22 nt, Human
agagccaggaucuguuuugggg

SEQ ID NO: 1064756 - RNA, 22 nt, Human
uguguacagcaugguccagcag

SEQ ID NO: 1064757 - RNA, 22 nt, Human
uguggggcuuacaaaggcagau

SEQ ID NO: 1064758 - RNA, 22 nt, Human
ggcucuggugugaagcagccuc

SEQ ID NO: 1064759 - RNA, 22 nt, Human
cuaagaaggaggaaaagugcca

SEQ ID NO: 1064760 - RNA, 22 nt, Human
ccaggagguggagauugcagug

SEQ ID NO: 1064761 - RNA, 22 nt, Human
aaugaagcaguuuucaucaagu

SEQ ID NO: 1064762 - RNA, 22 nt, Human
ugaguggaguagugaaugcauu

SEQ ID NO: 1064763 - RNA, 22 nt, Human
gcugcugggagggaucguaaau

SEQ ID NO: 1064764 - RNA, 22 nt, Human
caguguccucagccagcagcua

SEQ ID NO: 1064765 - RNA, 22 nt, Human
uggggcuggcuauugucucccu

SEQ ID NO: 1064766 - RNA, 22 nt, Human
agggacagucuacuguucacug

SEQ ID NO: 1064767 - RNA, 22 nt, Human
aaaauacuguggaguguugaaa

SEQ ID NO: 1064768 - RNA, 22 nt, Human
ugucccagauacuggacauaga

SEQ ID NO: 1064769 - RNA, 22 nt, Human
caucuacaggagaaugucacug

SEQ ID NO: 1064770 - RNA, 22 nt, Human
auuugacauugacacaccuaug

SEQ ID NO: 1064771 - RNA, 22 nt, Human
aaauguuucuacuugugagcau

SEQ ID NO: 1064772 - RNA, 22 nt, Human
ggcacacagcuuggcaggagau

SEQ ID NO: 1064773 - RNA, 19 nt, Human
aagcuccagcagauccuuu

SEQ ID NO: 1064774 - RNA, 22 nt, Human
cacugcccagcgucuuaggcac

SEQ ID NO: 1064775 - RNA, 22 nt, Human
guaauaauuugcuaccuggugg

SEQ ID NO: 1064776 - RNA, 22 nt, Human
uuugucaucaguuauuaauaug

SEQ ID NO: 1064777 - RNA, 22 nt, Human
cuccagugcgcaggacagcccc

SEQ ID NO: 1064778 - RNA, 22 nt, Human
cucugggccaccgcugguguau

SEQ ID NO: 1064779 - RNA, 22 nt, Human
uucacaaaacacuauuuucugg

SEQ ID NO: 1064780 - RNA, 22 nt, Human
ccacugggcguuucuguccaau

SEQ ID NO: 1064781 - RNA, 22 nt, Human
agggccugucuguagaacugaa

SEQ ID NO: 1064782 - RNA, 22 nt, Human
aauuaauucaguuuuuaaggga

SEQ ID NO: 1064783 - RNA, 22 nt, Human
uggaagagaaaauccacccuua

SEQ ID NO: 1064784 - RNA, 22 nt, Human
uaccauuucauucuuuccucau

SEQ ID NO: 1064785 - RNA, 22 nt, Human
ucuuuguacaggaaggcacugu

SEQ ID NO: 1064786 - RNA, 22 nt, Human
uuggaacagaaacagacaaaua

SEQ ID NO: 1064787 - RNA, 22 nt, Human
caccaggagccaucaggagucc

SEQ ID NO: 1064788 - RNA, 22 nt, Human
aggcaacacuugcauuuuuuag

SEQ ID NO: 1064789 - RNA, 22 nt, Human
uaucacacucggaaaucuagga

SEQ ID NO: 1064790 - RNA, 22 nt, Human
guucacagaaggccagauggua

SEQ ID NO: 1064791 - RNA, 22 nt, Human
acuuuaacuguuauuacucacc

SEQ ID NO: 1064792 - RNA, 22 nt, Human
cagggcucaccacugggauccu

SEQ ID NO: 1064793 - RNA, 22 nt, Human
ccaggcuguuuucaaacuuggg

SEQ ID NO: 1064794 - RNA, 19 nt, Human
agacacacuugauaugugu

SEQ ID NO: 1064795 - RNA, 22 nt, Human
cagcagcuguuuacggaacacc

SEQ ID NO: 1064796 - RNA, 22 nt, Human
gggauggggagcuggaaagggg

SEQ ID NO: 1064797 - RNA, 22 nt, Human
agagaagggguaaagaguccug

SEQ ID NO: 1064798 - RNA, 22 nt, Human
acacuuuuaagacuuuaaugaa

SEQ ID NO: 1064799 - RNA, 22 nt, Human
acccaggaugauaauguucaca

SEQ ID NO: 1064800 - RNA, 22 nt, Human
ccuuuacaucugacuucuuuca

SEQ ID NO: 1064801 - RNA, 22 nt, Human
aacauacagugagcaguggacu

SEQ ID NO: 1064802 - RNA, 22 nt, Human
uggcucagugcauucacaguaa

SEQ ID NO: 1064803 - RNA, 22 nt, Human
uucaaguuaccuuuaaacagcu

SEQ ID NO: 1064804 - RNA, 22 nt, Human
ccuuuccuguguccuuuuaagg

SEQ ID NO: 1064805 - RNA, 22 nt, Human
ucuuucaauccauucauauguc

SEQ ID NO: 1064806 - RNA, 22 nt, Human
aaauguuuaaguguaggagcaa

SEQ ID NO: 1064807 - RNA, 22 nt, Human
ggccucagaaauagaguaaaau

SEQ ID NO: 1064808 - RNA, 22 nt, Human
uuaguucucaugaauuuuaagu

SEQ ID NO: 1064809 - RNA, 22 nt, Human
acauaauggacaauaaugcauc

SEQ ID NO: 1064810 - RNA, 23 nt, Human
ucguugaauagcaauagcacaac

SEQ ID NO: 1064811 - RNA, 22 nt, Human
uguccugugaccuggcaccaca

SEQ ID NO: 1064812 - RNA, 22 nt, Human
ucaugcacaugugucaccauca

SEQ ID NO: 1064813 - RNA, 16 nt, Human
aaagaaacaggugucc

SEQ ID NO: 1064814 - RNA, 22 nt, Human
aaagcugcugccaaucaggcuu

SEQ ID NO: 1064815 - RNA, 22 nt, Human
aagccagggguugguaugcuau

SEQ ID NO: 1064816 - RNA, 22 nt, Human
uccaggccuugacaggucaguu

SEQ ID NO: 1064817 - RNA, 22 nt, Human
ucaguuuucauuucaugagcag

SEQ ID NO: 1064818 - RNA, 22 nt, Human
augaaaagggagugauauuugu

SEQ ID NO: 1064819 - RNA, 23 nt, Human
gugugccaagcacugugccagga

SEQ ID NO: 1064820 - RNA, 22 nt, Human
aggcgugggaggaucugaggcc

SEQ ID NO: 1064821 - RNA, 22 nt, Human
cauuacaugguccaggauauau

SEQ ID NO: 1064822 - RNA, 22 nt, Human
aggcagaauguuggaaaggaag

SEQ ID NO: 1064823 - RNA, 22 nt, Human
uaacuaagugacucaagugauc

SEQ ID NO: 1064824 - RNA, 22 nt, Human
aaaaguguucaggaagaauaau

SEQ ID NO: 1064825 - RNA, 22 nt, Human
augcagcuucaggauuaugaug

SEQ ID NO: 1064826 - RNA, 22 nt, Human
cugcagggaccacaagcagguu

SEQ ID NO: 1064827 - RNA, 22 nt, Human
uggaagaauauggggguacaga

SEQ ID NO: 1064828 - RNA, 22 nt, Human
cuagagugaagggucuugaggc

SEQ ID NO: 1064829 - RNA, 22 nt, Human
ucuuuauuucugaaucccccau

SEQ ID NO: 1064830 - RNA, 18 nt, Human
auugcuuuuguaccaacc

SEQ ID NO: 1064831 - RNA, 22 nt, Human
gcuguguuggugaagcuguagc

SEQ ID NO: 1064832 - RNA, 22 nt, Human
cuucagggugacgcaggcugca

SEQ ID NO: 1064833 - RNA, 22 nt, Human
cuguugauuagaauuucacauc

SEQ ID NO: 1064834 - RNA, 22 nt, Human
uuauguacaauguuaauguaaa

SEQ ID NO: 1064835 - RNA, 22 nt, Human
cuguacagaccuauuagcccag

SEQ ID NO: 1064836 - RNA, 22 nt, Human
cuugccuucuguuccuauagaa

SEQ ID NO: 1064837 - RNA, 22 nt, Human
gcaaggcugagcacauuugcau

SEQ ID NO: 1064838 - RNA, 23 nt, Human
cauguacagaguuugauaaagug

SEQ ID NO: 1064839 - RNA, 22 nt, Human
gcagcaguacucaauauccugg

SEQ ID NO: 1064840 - RNA, 22 nt, Human
ucacauuuucuuaggaaacuua

SEQ ID NO: 1064841 - RNA, 22 nt, Human
uugcaucuaccauaucaaagau

SEQ ID NO: 1064842 - RNA, 22 nt, Human
ugcaaacaauuuccuauaaagu

SEQ ID NO: 1064843 - RNA, 22 nt, Human
ucaaguaugacaucaaguuucu

SEQ ID NO: 1064844 - RNA, 22 nt, Human
aggacucaucccugcuugucag

SEQ ID NO: 1064845 - RNA, 22 nt, Human
ggcugggcaaacaagacucuuc

SEQ ID NO: 1064846 - RNA, 22 nt, Human
acucacagggccucaguuuucc

SEQ ID NO: 1064847 - RNA, 22 nt, Human
agaaagaggaugcagaucucau

SEQ ID NO: 1064848 - RNA, 19 nt, Human
uaguggagugacaaguucu

SEQ ID NO: 1064849 - RNA, 22 nt, Human
gcacagaacacuggugaguccc

SEQ ID NO: 1064850 - RNA, 22 nt, Human
aaauacuagaauucagaguuga

SEQ ID NO: 1064851 - RNA, 22 nt, Human
acugcuggcaugcauauacaaa

SEQ ID NO: 1064852 - RNA, 22 nt, Human
ccugcagagccacgugccagcg

SEQ ID NO: 1064853 - RNA, 22 nt, Human
agggaggaaggauguuccaaag

SEQ ID NO: 1064854 - RNA, 22 nt, Human
uggccugccccgagauccuggc

SEQ ID NO: 1064855 - RNA, 22 nt, Human
agggucccgaaggagacagcaa

SEQ ID NO: 1064856 - RNA, 22 nt, Human
ugucauuuauuuugcugucugu

SEQ ID NO: 1064857 - RNA, 19 nt, Human
ucaaagcaagcauguucug

SEQ ID NO: 1064858 - RNA, 22 nt, Human
guggcaggagagacacagccau

SEQ ID NO: 1064859 - RNA, 22 nt, Human
uucuuuugggaauuacguaugc

SEQ ID NO: 1064860 - RNA, 20 nt, Human
ccuccaggcacacccaugug

SEQ ID NO: 1064861 - RNA, 22 nt, Human
aauggcugccagggcaggaggu

SEQ ID NO: 1064862 - RNA, 22 nt, Human
ugaaaacuccaaguuucaucag

SEQ ID NO: 1064863 - RNA, 22 nt, Human
uuacaauguaaggcaugguucu

SEQ ID NO: 1064864 - RNA, 22 nt, Human
agccuauuccaggaugagcuca

SEQ ID NO: 1064865 - RNA, 22 nt, Human
ucuggucuccaggagugguggu

SEQ ID NO: 1064866 - RNA, 18 nt, Human
ggcuuugcugggguuucu

SEQ ID NO: 1064867 - RNA, 22 nt, Human
aaaguuaguaaaaugggauaua

SEQ ID NO: 1064868 - RNA, 22 nt, Human
ugcugccauggucgcugguguc

SEQ ID NO: 1064869 - RNA, 22 nt, Human
agcuuuauauuuaaugaauucu

SEQ ID NO: 1064870 - RNA, 22 nt, Human
cugcuuugggcagcuuuguggc

SEQ ID NO: 1064871 - RNA, 22 nt, Human
aggccuuccucggagacaggga

SEQ ID NO: 1064872 - RNA, 22 nt, Human
uuucuuccuuaccuuacuagag

SEQ ID NO: 1064873 - RNA, 22 nt, Human
ucuucaguugucauacugccuu

SEQ ID NO: 1064874 - RNA, 23 nt, Human
cugcagccgcguggggacgugga

SEQ ID NO: 1064875 - RNA, 22 nt, Human
aguaacaaauauucauuggauu

SEQ ID NO: 1064876 - RNA, 22 nt, Human
gaugauauuuugacuggagaau

SEQ ID NO: 1064877 - RNA, 22 nt, Human
caauuucugggccucacacaag

SEQ ID NO: 1064878 - RNA, 22 nt, Human
caggcagcugaggacuuugcua

SEQ ID NO: 1064879 - RNA, 22 nt, Human
ggcucagagaccugcgaucuga

SEQ ID NO: 1064880 - RNA, 22 nt, Human
cuggagugacuuuguuccuuuu

SEQ ID NO: 1064881 - RNA, 22 nt, Human
uuacaauuacuugaucucagcu

SEQ ID NO: 1064882 - RNA, 22 nt, Human
auauuuuuccaugugggacucu

SEQ ID NO: 1064883 - RNA, 22 nt, Human
uacaguuaaaaaguucaauggu

SEQ ID NO: 1064884 - RNA, 22 nt, Human
ccucugggcagguagcagcagc

SEQ ID NO: 1064885 - RNA, 20 nt, Human
ugggaaagucuaagugccuc

SEQ ID NO: 1064886 - RNA, 22 nt, Human
caguuucuauggcugggcucug

SEQ ID NO: 1064887 - RNA, 22 nt, Human
gcugcuggcgcugggcguccgg

SEQ ID NO: 1064888 - RNA, 20 nt, Human
uucuuaguagagcauguauu

SEQ ID NO: 1064889 - RNA, 20 nt, Human
cccuggccuguuucaugccc

SEQ ID NO: 1064890 - RNA, 22 nt, Human
aaaacacaagaagcaggguaca

SEQ ID NO: 1064891 - RNA, 22 nt, Human
aaucuguuuaguucugcguaug

SEQ ID NO: 1064892 - RNA, 22 nt, Human
aaggucauugguucugaauucu

SEQ ID NO: 1064893 - RNA, 22 nt, Human
ccacaaggaggacagcaguugg

SEQ ID NO: 1064894 - RNA, 22 nt, Human
cagaauaaagguacaauugagu

SEQ ID NO: 1064895 - RNA, 22 nt, Human
ggcagguggccaagugucuaag

SEQ ID NO: 1064896 - RNA, 22 nt, Human
aaacagaguuugguaaauagcc

SEQ ID NO: 1064897 - RNA, 22 nt, Human
cuugauguauaaguugauaugu

SEQ ID NO: 1064898 - RNA, 22 nt, Human
uuguccuaauuuauggccugga

SEQ ID NO: 1064899 - RNA, 22 nt, Human
acacuuuagaaaaaagaauggu

SEQ ID NO: 1064900 - RNA, 22 nt, Human
aauaccuuuccugccauucacu

SEQ ID NO: 1064901 - RNA, 18 nt, Human
ucaaaauauuucugugga

SEQ ID NO: 1064902 - RNA, 22 nt, Human
agagccaggaaguggcgugggg

SEQ ID NO: 1064903 - RNA, 22 nt, Human
caggcuugcugcuagagcacuu

SEQ ID NO: 1064904 - RNA, 22 nt, Human
accaucagucauugucaguggg

SEQ ID NO: 1064905 - RNA, 22 nt, Human
aggggcagccucacaauccucu

SEQ ID NO: 1064906 - RNA, 22 nt, Human
auaauaaaccaggaugggucug

SEQ ID NO: 1064907 - RNA, 22 nt, Human
gagggagagugauggaccauug

SEQ ID NO: 1064908 - RNA, 22 nt, Human
ucagcaaccaggggcacagucc

SEQ ID NO: 1064909 - RNA, 22 nt, Human
ucuuugaacuuggcugaucucu

SEQ ID NO: 1064910 - RNA, 22 nt, Human
aaacagcaauuacuuuugcacc

SEQ ID NO: 1064911 - RNA, 17 nt, Human
auccccagcaucuagaa

SEQ ID NO: 1064912 - RNA, 22 nt, Human
ugcucagccgugagcagagccg

SEQ ID NO: 1064913 - RNA, 22 nt, Human
aaacaugaguuaaaaguaacug

SEQ ID NO: 1064914 - RNA, 22 nt, Human
ggcuccuguccccucagcugcu

SEQ ID NO: 1064915 - RNA, 22 nt, Human
caacauaugcuuucaugaggua

SEQ ID NO: 1064916 - RNA, 22 nt, Human
ccaaggcuggagugcaguggcg

SEQ ID NO: 1064917 - RNA, 22 nt, Human
ucagagucuaaauagaagaaua

SEQ ID NO: 1064918 - RNA, 22 nt, Human
gggaucagaaacauagcccuga

SEQ ID NO: 1064919 - RNA, 22 nt, Human
acugaauuccucuuucuuaucc

SEQ ID NO: 1064920 - RNA, 22 nt, Human
uaagaaacauuuuuaugacagu

SEQ ID NO: 1064921 - RNA, 22 nt, Human
ccucugaguccucccugguugc

SEQ ID NO: 1064922 - RNA, 22 nt, Human
auagaauagcauagaaaauuga

SEQ ID NO: 1064923 - RNA, 22 nt, Human
ggaggccaccugaccugcuguu

SEQ ID NO: 1064924 - RNA, 22 nt, Human
accugagccuagggagguugag

SEQ ID NO: 1064925 - RNA, 22 nt, Human
gucuuguuugggauguggaugg

SEQ ID NO: 1064926 - RNA, 22 nt, Human
ucaaaaucaaagauacuugaaa

SEQ ID NO: 1064927 - RNA, 22 nt, Human
cucugagaggugagaagcagca

SEQ ID NO: 1064928 - RNA, 22 nt, Human
auaaaugauucagcaggaaaua

SEQ ID NO: 1064929 - RNA, 22 nt, Human
acugcuuuucagagucugccug

SEQ ID NO: 1064930 - RNA, 22 nt, Human
aagagaauaucgauagcacucu

SEQ ID NO: 1064931 - RNA, 22 nt, Human
uuauuuguaucaaggacgguug

SEQ ID NO: 1064932 - RNA, 23 nt, Human
ucugagagaacaaugccuccuau

SEQ ID NO: 1064933 - RNA, 22 nt, Human
auacaacugccuuagaaggaaa

SEQ ID NO: 1064934 - RNA, 22 nt, Human
cuuuucuucucacggcugucag

SEQ ID NO: 1064935 - RNA, 22 nt, Human
ccaggcugcuguugguguccgc

SEQ ID NO: 1064936 - RNA, 22 nt, Human
uuccuauccuuuuauguuuaug

SEQ ID NO: 1064937 - RNA, 22 nt, Human
ggcuccugggaugggacugagc

SEQ ID NO: 1064938 - RNA, 22 nt, Human
ucuuuggaucccaacuggcugg

SEQ ID NO: 1064939 - RNA, 22 nt, Human
ugcuccagaaccugaccaugcu

SEQ ID NO: 1064940 - RNA, 22 nt, Human
caggcugggcagccuccccggc

SEQ ID NO: 1064941 - RNA, 22 nt, Human
ucaggcuaacccuaggcagaag

SEQ ID NO: 1064942 - RNA, 22 nt, Human
acuucauguugcucuuggcuau

SEQ ID NO: 1064943 - RNA, 22 nt, Human
caaacugagcaucagaaaguuu

SEQ ID NO: 1064944 - RNA, 22 nt, Human
cacccacccacugcucauuggc

SEQ ID NO: 1064945 - RNA, 19 nt, Human
cugcagggaugugcagagu

SEQ ID NO: 1064946 - RNA, 22 nt, Human
aucaaaguuucccagaaguugu

SEQ ID NO: 1064947 - RNA, 22 nt, Human
aacugcaaaauaaucaaguugu

SEQ ID NO: 1064948 - RNA, 22 nt, Human
uccuguggcguuaucaugugau

SEQ ID NO: 1064949 - RNA, 22 nt, Human
gugugcagggggccagcgcagc

SEQ ID NO: 1064950 - RNA, 22 nt, Human
ucuggcucucucaucacccaau

SEQ ID NO: 1064951 - RNA, 22 nt, Human
accaagcuguauauuauugguu

SEQ ID NO: 1064952 - RNA, 22 nt, Human
gccaggagccagcuucuuagca

SEQ ID NO: 1064953 - RNA, 22 nt, Human
uggcucuguuuuaugaguacca

SEQ ID NO: 1064954 - RNA, 22 nt, Human
auuugugccaaauuauuucuaa

SEQ ID NO: 1064955 - RNA, 22 nt, Human
gugcagcugagggccucuucua

SEQ ID NO: 1064956 - RNA, 22 nt, Human
gcaagcugcuuaagcucauugu

SEQ ID NO: 1064957 - RNA, 22 nt, Human
aagcaguguucccagcuggccc

SEQ ID NO: 1064958 - RNA, 22 nt, Human
gccaggagugucccacucauuu

SEQ ID NO: 1064959 - RNA, 22 nt, Human
agucccagcuucccccaugcag

SEQ ID NO: 1064960 - RNA, 21 nt, Human
uuacuaaacaaaacaugcagg

SEQ ID NO: 1064961 - RNA, 22 nt, Human
gcucuucauucucccaaauagg

SEQ ID NO: 1064962 - RNA, 22 nt, Human
cuauucuagauuacaguauaaa

SEQ ID NO: 1064963 - RNA, 22 nt, Human
cagcugccuucugcgggaaguc

SEQ ID NO: 1064964 - RNA, 22 nt, Human
gggcuacagacaugcucuaagc

SEQ ID NO: 1064965 - RNA, 22 nt, Human
caggauccccaggucgccgucc

SEQ ID NO: 1064966 - RNA, 22 nt, Human
aguauuuucaaccauagccugg

SEQ ID NO: 1064967 - RNA, 22 nt, Human
gaaaucaguucugaaauuuaca

SEQ ID NO: 1064968 - RNA, 22 nt, Human
agcagguggccuccugucuguc

SEQ ID NO: 1064969 - RNA, 22 nt, Human
uucacauaaauagaucacauca

SEQ ID NO: 1064970 - RNA, 22 nt, Human
gcuggccuuugaggaagcugcg

SEQ ID NO: 1064971 - RNA, 22 nt, Human
gggggcaguaaggauauggaaa

SEQ ID NO: 1064972 - RNA, 22 nt, Human
uauuagguuagugcaaaaguuu

SEQ ID NO: 1064973 - RNA, 22 nt, Human
ucacugcaaucucugccuucca

SEQ ID NO: 1064974 - RNA, 22 nt, Human
ccagagccugcugagccccauu

SEQ ID NO: 1064975 - RNA, 22 nt, Human
aagccaguguuuuugagaguug

SEQ ID NO: 1064976 - RNA, 22 nt, Human
ggugaggcuggcuugccuucuu

SEQ ID NO: 1064977 - RNA, 22 nt, Human
gcagcagagaacacaaugaugg

SEQ ID NO: 1064978 - RNA, 19 nt, Human
gugggacagacauuacaua

SEQ ID NO: 1064979 - RNA, 18 nt, Human
gagcccugagucugcaca

SEQ ID NO: 1064980 - RNA, 22 nt, Human
agccaaggagugcagguggcuu

SEQ ID NO: 1064981 - RNA, 22 nt, Human
auuaauauccugcuggcuaaau

SEQ ID NO: 1064982 - RNA, 22 nt, Human
cuccugggcuaugucugcuugg

SEQ ID NO: 1064983 - RNA, 21 nt, Human
acagaugggaugagcacacug

SEQ ID NO: 1064984 - RNA, 22 nt, Human
guuuaauaauguugaauuacua

SEQ ID NO: 1064985 - RNA, 19 nt, Human
ucuggcuccugccaggcug

SEQ ID NO: 1064986 - RNA, 22 nt, Human
guuucuuaaauguagcaggacc

SEQ ID NO: 1064987 - RNA, 22 nt, Human
acauguggucaaucuguguagg

SEQ ID NO: 1064988 - RNA, 22 nt, Human
agcaggcuaagggaccuguuua

SEQ ID NO: 1064989 - RNA, 22 nt, Human
gcccaucaucacuguggaggcu

SEQ ID NO: 1064990 - RNA, 22 nt, Human
guacaguuuucaguguucacug

SEQ ID NO: 1064991 - RNA, 22 nt, Human
aggggaugccuaguggagucuc

SEQ ID NO: 1064992 - RNA, 22 nt, Human
uacaagaaggaaaacuagcaau

SEQ ID NO: 1064993 - RNA, 22 nt, Human
ggagcugcuuugaucugaagaa

SEQ ID NO: 1064994 - RNA, 18 nt, Human
gcuuugcagaaauacaga

SEQ ID NO: 1064995 - RNA, 22 nt, Human
guucacagaaauuguguaccuc

SEQ ID NO: 1064996 - RNA, 22 nt, Human
aaaucaguaaauguucauuaac

SEQ ID NO: 1064997 - RNA, 22 nt, Human
gaggcagccucaguggaccucg

SEQ ID NO: 1064998 - RNA, 22 nt, Human
aggcugaggcgggaggaucacu

SEQ ID NO: 1064999 - RNA, 22 nt, Human
cauugcacugcagcccgggcaa

SEQ ID NO: 1065000 - RNA, 22 nt, Human
cagggagaaaucuccaggaggu

SEQ ID NO: 1065001 - RNA, 22 nt, Human
cacagggcuuugauggcugagu

SEQ ID NO: 1065002 - RNA, 22 nt, Human
ucauugcacuccagccugggca

SEQ ID NO: 1065003 - RNA, 22 nt, Human
ccugggagagucuguggucucc

SEQ ID NO: 1065004 - RNA, 22 nt, Human
uguguuccuucgucuucccuuc

SEQ ID NO: 1065005 - RNA, 22 nt, Human
cugaggcuuggaggggucuggu

SEQ ID NO: 1065006 - RNA, 22 nt, Human
uucauucccuuauauuagcauu

SEQ ID NO: 1065007 - RNA, 22 nt, Human
guuuuucuagacugggaguuug

SEQ ID NO: 1065008 - RNA, 22 nt, Human
auauucuucuuguucagacuau

SEQ ID NO: 1065009 - RNA, 22 nt, Human
uaggccaggacagagcuuccag

SEQ ID NO: 1065010 - RNA, 20 nt, Human
aggaagauccuuucuuuuaa

SEQ ID NO: 1065011 - RNA, 22 nt, Human
ggcaggugcuaagagagguaaa

SEQ ID NO: 1065012 - RNA, 22 nt, Human
uuguaacacucccacucuucuu

SEQ ID NO: 1065013 - RNA, 22 nt, Human
gaguguggugaacaggagcacc

SEQ ID NO: 1065014 - RNA, 22 nt, Human
auuugcaugaccuuugcaagug

SEQ ID NO: 1065015 - RNA, 20 nt, Human
aagaaaacgucuucagggga

SEQ ID NO: 1065016 - RNA, 22 nt, Human
uucagaaugagaauggaugggu

SEQ ID NO: 1065017 - RNA, 22 nt, Human
ugcucuucggggccacugcuug

SEQ ID NO: 1065018 - RNA, 22 nt, Human
guuucaaauagguuucagcaaa

SEQ ID NO: 1065019 - RNA, 23 nt, Human
agcagccauagggaagcaauaca

SEQ ID NO: 1065020 - RNA, 22 nt, Human
agcccugcgaucgugauuucuu

SEQ ID NO: 1065021 - RNA, 22 nt, Human
uaugagaacugacagagugcca

SEQ ID NO: 1065022 - RNA, 22 nt, Human
gccuggagacaaggacaaaggg

SEQ ID NO: 1065023 - RNA, 21 nt, Human
agccugccugaacucuguggc

SEQ ID NO: 1065024 - RNA, 22 nt, Human
ugaggcagggaguuuaauuguc

SEQ ID NO: 1065025 - RNA, 23 nt, Human
uucauuugucuacuucacuuguu

SEQ ID NO: 1065026 - RNA, 22 nt, Human
uugaacaguuuugucagguuca

SEQ ID NO: 1065027 - RNA, 22 nt, Human
cauaauuaaauucugggcaaga

SEQ ID NO: 1065028 - RNA, 18 nt, Human
ucaguauuaccucaggca

SEQ ID NO: 1065029 - RNA, 22 nt, Human
ugugggcccagauucugaggcu

SEQ ID NO: 1065030 - RNA, 22 nt, Human
gcagagcauguccucaggacag

SEQ ID NO: 1065031 - RNA, 22 nt, Human
ucaaucuagagauuaaaauagg

SEQ ID NO: 1065032 - RNA, 22 nt, Human
ugacagcugagccccaggcaag

SEQ ID NO: 1065033 - RNA, 22 nt, Human
aaaauugaagugaucaggaacu

SEQ ID NO: 1065034 - RNA, 22 nt, Human
ucuuuccuuagaauaauucuuu

SEQ ID NO: 1065035 - RNA, 22 nt, Human
uaaaaucgcacugcuguuguua

SEQ ID NO: 1065036 - RNA, 22 nt, Human
aaggcccugucuccaaauacag

SEQ ID NO: 1065037 - RNA, 22 nt, Human
aggaaugguuauggggauagua

SEQ ID NO: 1065038 - RNA, 22 nt, Human
acagcagcgucaacuuaaaauu

SEQ ID NO: 1065039 - RNA, 22 nt, Human
agggugggcuagacucuucccc

SEQ ID NO: 1065040 - RNA, 22 nt, Human
cagcuugggaguuugguuuuau

SEQ ID NO: 1065041 - RNA, 19 nt, Human
ggcagcuggacgcuguuca

SEQ ID NO: 1065042 - RNA, 22 nt, Human
ugaaaugaaacagaacauauca

SEQ ID NO: 1065043 - RNA, 22 nt, Human
cagaugcuuuugauucuggggu

SEQ ID NO: 1065044 - RNA, 22 nt, Human
uaugaagauauaucugaucucu

SEQ ID NO: 1065045 - RNA, 23 nt, Human
ggggaaguggcagugagugaggc

SEQ ID NO: 1065046 - RNA, 22 nt, Human
uucuuucucacucuuuaggaag

SEQ ID NO: 1065047 - RNA, 22 nt, Human
aagagcuggagcugcuacagga

SEQ ID NO: 1065048 - RNA, 22 nt, Human
uacauggugguggcacuugacu

SEQ ID NO: 1065049 - RNA, 22 nt, Human
ucaucugucccaggcuuuuuuc

SEQ ID NO: 1065050 - RNA, 22 nt, Human
uuuguaagugguagaucuaaga

SEQ ID NO: 1065051 - RNA, 19 nt, Human
ugagugggccccugcagac

SEQ ID NO: 1065052 - RNA, 22 nt, Human
uucuggaucagcaucaugagau

SEQ ID NO: 1065053 - RNA, 22 nt, Human
cacugaaggcuaggauuagaug

SEQ ID NO: 1065054 - RNA, 22 nt, Human
agcagguggugggccagauuug

SEQ ID NO: 1065055 - RNA, 22 nt, Human
acuggggagugguuuugggaag

SEQ ID NO: 1065056 - RNA, 22 nt, Human
aaucaacauuguuuuaagucaa

SEQ ID NO: 1065057 - RNA, 22 nt, Human
guccucuggccuuucccaggac

SEQ ID NO: 1065058 - RNA, 22 nt, Human
gagccugggacugggggucaug

SEQ ID NO: 1065059 - RNA, 22 nt, Human
caggcuggaguuaccuuuaggg

SEQ ID NO: 1065060 - RNA, 22 nt, Human
uacaguaacauguuguacaagc

SEQ ID NO: 1065061 - RNA, 22 nt, Human
cuccaaguccgagggcucucaa

SEQ ID NO: 1065062 - RNA, 22 nt, Human
uacauucauggugacuuguaug

SEQ ID NO: 1065063 - RNA, 22 nt, Human
auuugaaguaaguaaugaguau

SEQ ID NO: 1065064 - RNA, 22 nt, Human
caggccugacccugagcuucac

SEQ ID NO: 1065065 - RNA, 22 nt, Human
auuuaagauugcguauucaugu

SEQ ID NO: 1065066 - RNA, 22 nt, Human
auaucaaagcuaguggaaauuu

SEQ ID NO: 1065067 - RNA, 22 nt, Human
agggcugacagugaggagucaa

SEQ ID NO: 1065068 - RNA, 18 nt, Human
agaggggagguaagucug

SEQ ID NO: 1065069 - RNA, 18 nt, Human
ggucuuuaggucaguguc

SEQ ID NO: 1065070 - RNA, 22 nt, Human
ccagagccuggcaucugcauaa

SEQ ID NO: 1065071 - RNA, 22 nt, Human
agcagagguguuuauuauggga

SEQ ID NO: 1065072 - RNA, 22 nt, Human
uugagaagaaauaguuugcaau

SEQ ID NO: 1065073 - RNA, 22 nt, Human
ccagggugaggaggcucccacg

SEQ ID NO: 1065074 - RNA, 22 nt, Human
gacacaaaguuugucagaaauu

SEQ ID NO: 1065075 - RNA, 22 nt, Human
ucaauucaauugaacaguuacu

SEQ ID NO: 1065076 - RNA, 19 nt, Human
caggaacauggagggaggg

SEQ ID NO: 1065077 - RNA, 22 nt, Human
uaguaaagugucuuaacacaua

SEQ ID NO: 1065078 - RNA, 22 nt, Human
guuacaauguccuuacaugaaa

SEQ ID NO: 1065079 - RNA, 22 nt, Human
augauggugagguugagcacag

SEQ ID NO: 1065080 - RNA, 22 nt, Human
ggcauauguagcguguguucug

SEQ ID NO: 1065081 - RNA, 22 nt, Human
cccacgucgaacuugcuccaga

SEQ ID NO: 1065082 - RNA, 20 nt, Human
uguggcaggaugagggcgga

SEQ ID NO: 1065083 - RNA, 22 nt, Human
aggcaggcaaccaccugggaag

SEQ ID NO: 1065084 - RNA, 22 nt, Human
auuguggcuagacagucacaau

SEQ ID NO: 1065085 - RNA, 22 nt, Human
ucauuuuuagcgcgcaaaaguu

SEQ ID NO: 1065086 - RNA, 22 nt, Human
aaucaguuguucacucugaaaa

SEQ ID NO: 1065087 - RNA, 22 nt, Human
uccuugaagcuuguaucuaaua

SEQ ID NO: 1065088 - RNA, 22 nt, Human
ugaaaugagauaauuuaagugc

SEQ ID NO: 1065089 - RNA, 22 nt, Human
auucacaaaaugauauagauac

SEQ ID NO: 1065090 - RNA, 22 nt, Human
auuugcauuuagaaagaucacu

SEQ ID NO: 1065091 - RNA, 22 nt, Human
auugacaaauggauguugacau

SEQ ID NO: 1065092 - RNA, 22 nt, Human
uggcuagcccuuguggggagag

SEQ ID NO: 1065093 - RNA, 22 nt, Human
agacauggauuucuuacauaaa

SEQ ID NO: 1065094 - RNA, 22 nt, Human
ccuggguggcagagguugcagu

SEQ ID NO: 1065095 - RNA, 22 nt, Human
gaccauuuguugaaaagauuau

SEQ ID NO: 1065096 - RNA, 22 nt, Human
agugucugcuuugagucaggug

SEQ ID NO: 1065097 - RNA, 22 nt, Human
ugaguccacuuuaaaaugucag

SEQ ID NO: 1065098 - RNA, 22 nt, Human
ugaggcuugucucagauggggg

SEQ ID NO: 1065099 - RNA, 22 nt, Human
uguucaauccccagguccugaa

SEQ ID NO: 1065100 - RNA, 22 nt, Human
ccaggcaaggacaugaaacuga

SEQ ID NO: 1065101 - RNA, 20 nt, Human
ccaauguuuacagauuacuu

SEQ ID NO: 1065102 - RNA, 22 nt, Human
agcaccuugcucuuggccuucc

SEQ ID NO: 1065103 - RNA, 21 nt, Human
auuugcauuaaaauauuacgc

SEQ ID NO: 1065104 - RNA, 22 nt, Human
aucagaaaaaugagaagagcug

SEQ ID NO: 1065105 - RNA, 22 nt, Human
cuuccagcugauuacaggcuau

SEQ ID NO: 1065106 - RNA, 22 nt, Human
aauaguacaaucuacagacaua

SEQ ID NO: 1065107 - RNA, 22 nt, Human
agggccugggguagcuuacugc

SEQ ID NO: 1065108 - RNA, 22 nt, Human
gaggaaccaaucugugauauuc

SEQ ID NO: 1065109 - RNA, 22 nt, Human
ugcuccugagguuggagaucca

SEQ ID NO: 1065110 - RNA, 22 nt, Human
aacuuucuaauuuuggcugagc

SEQ ID NO: 1065111 - RNA, 21 nt, Human
cagaggcagguccugggacgg

SEQ ID NO: 1065112 - RNA, 20 nt, Human
ugugcccaauguccagguuc

SEQ ID NO: 1065113 - RNA, 23 nt, Human
uggcucagcuaguuuuccauuuc

SEQ ID NO: 1065114 - RNA, 22 nt, Human
uggagauggguuaauggagaga

SEQ ID NO: 1065115 - RNA, 22 nt, Human
ugccuuuugaagccucacaggu

SEQ ID NO: 1065116 - RNA, 22 nt, Human
gggguccuggaggccagcugga

SEQ ID NO: 1065117 - RNA, 22 nt, Human
guuauucaauggcuuauaagga

SEQ ID NO: 1065118 - RNA, 22 nt, Human
cagucccaccaggaucgcucuu

SEQ ID NO: 1065119 - RNA, 22 nt, Human
ggcacacagauggagcacuagc

SEQ ID NO: 1065120 - RNA, 22 nt, Human
cacagaaguuucauagucucga

SEQ ID NO: 1065121 - RNA, 22 nt, Human
ucuucagugcaugcccucaggc

SEQ ID NO: 1065122 - RNA, 22 nt, Human
agaauacaauuguucaguaaua

SEQ ID NO: 1065123 - RNA, 22 nt, Human
caggcacuucugcugcuugucu

SEQ ID NO: 1065124 - RNA, 22 nt, Human
gacuauuuaguuucagauuagu

SEQ ID NO: 1065125 - RNA, 22 nt, Human
ucaagagaaggggaaauagacu

SEQ ID NO: 1065126 - RNA, 22 nt, Human
cucuggaggccguuggcccuua

SEQ ID NO: 1065127 - RNA, 22 nt, Human
gguccagggaacuuugaaggau

SEQ ID NO: 1065128 - RNA, 22 nt, Human
agcugagcuaguaguuccagug

SEQ ID NO: 1065129 - RNA, 20 nt, Human
uggagguggucugcuguccu

SEQ ID NO: 1065130 - RNA, 22 nt, Human
uaugcuuuaacccucuuauauu

SEQ ID NO: 1065131 - RNA, 22 nt, Human
uucugggcauguuacauucugu

SEQ ID NO: 1065132 - RNA, 22 nt, Human
auggagugggccaauuuuagug

SEQ ID NO: 1065133 - RNA, 22 nt, Human
caggaugugaggaggccauuug

SEQ ID NO: 1065134 - RNA, 20 nt, Human
gaagauggguagaggcacag

SEQ ID NO: 1065135 - RNA, 22 nt, Human
uugcaauugcuauggagagcgu

SEQ ID NO: 1065136 - RNA, 22 nt, Human
cuccucuguauugauugggacu

SEQ ID NO: 1065137 - RNA, 22 nt, Human
ucuggcucugacacuacuguua

SEQ ID NO: 1065138 - RNA, 18 nt, Human
ccagagcuggcuccucgc

SEQ ID NO: 1065139 - RNA, 22 nt, Human
ugaaacauugcacuguaugaau

SEQ ID NO: 1065140 - RNA, 22 nt, Human
acaguggauauauuaaaugaga

SEQ ID NO: 1065141 - RNA, 19 nt, Human
gaauuuuaggacuucagca

SEQ ID NO: 1065142 - RNA, 22 nt, Human
guauuuggugaugccuccaaac

SEQ ID NO: 1065143 - RNA, 22 nt, Human
cagaaaauaaaguuucuacgca

SEQ ID NO: 1065144 - RNA, 22 nt, Human
uuuguaaaggccugaauuucag

SEQ ID NO: 1065145 - RNA, 22 nt, Human
gacacagauaucucugagauua

SEQ ID NO: 1065146 - RNA, 22 nt, Human
ugcuggaguaacaagacacuca

SEQ ID NO: 1065147 - RNA, 22 nt, Human
gcagaggacagggauuuagauu

SEQ ID NO: 1065148 - RNA, 22 nt, Human
cuuuggcaaugaaacacaagaa

SEQ ID NO: 1065149 - RNA, 22 nt, Human
acagccuugcuuauuugucucu

SEQ ID NO: 1065150 - RNA, 22 nt, Human
gggcucuucucaggagcuaucu

SEQ ID NO: 1065151 - RNA, 21 nt, Human
caguuacacaaguguuaccag

SEQ ID NO: 1065152 - RNA, 22 nt, Human
aagacuuucccucaucagaacg

SEQ ID NO: 1065153 - RNA, 22 nt, Human
gauuucaccugaucuugucauc

SEQ ID NO: 1065154 - RNA, 22 nt, Human
uuaauacagucuccagaaguaa

SEQ ID NO: 1065155 - RNA, 22 nt, Human
gggaagguauuuagcugcugaa

SEQ ID NO: 1065156 - RNA, 22 nt, Human
agcagaugaaucccagauaaag

SEQ ID NO: 1065157 - RNA, 22 nt, Human
uagcagggguagauagagugug

SEQ ID NO: 1065158 - RNA, 22 nt, Human
agaaugauuuuggacaauaugg

SEQ ID NO: 1065159 - RNA, 22 nt, Human
ugugggccucagcaggacucca

SEQ ID NO: 1065160 - RNA, 22 nt, Human
gaugggcugucugagcgcugug

SEQ ID NO: 1065161 - RNA, 22 nt, Human
uucauagaaagugcuuagauug

SEQ ID NO: 1065162 - RNA, 22 nt, Human
acacucuucucacagucaguuu

SEQ ID NO: 1065163 - RNA, 22 nt, Human
cccuggaggcggauguugcagu

SEQ ID NO: 1065164 - RNA, 22 nt, Human
uuucuucucaucccugaaauca

SEQ ID NO: 1065165 - RNA, 22 nt, Human
gaaguauaggagacaaacaaga

SEQ ID NO: 1065166 - RNA, 22 nt, Human
cacagagaauucccauauguga

SEQ ID NO: 1065167 - RNA, 22 nt, Human
gcagcuguucagcuggccagau

SEQ ID NO: 1065168 - RNA, 19 nt, Human
ccauggcaaugaucugaug

SEQ ID NO: 1065169 - RNA, 22 nt, Human
uggaagaggcccaugacugccu

SEQ ID NO: 1065170 - RNA, 22 nt, Human
cagggagcuggcuggcugugcc

SEQ ID NO: 1065171 - RNA, 22 nt, Human
ggagguggcagggaacauaauu

SEQ ID NO: 1065172 - RNA, 22 nt, Human
uguagaaaauuggagcauucau

SEQ ID NO: 1065173 - RNA, 23 nt, Human
ucuuuuuaagagaucuagugacg

SEQ ID NO: 1065174 - RNA, 22 nt, Human
ugggcucuccuggaggacaaca

SEQ ID NO: 1065175 - RNA, 22 nt, Human
aggccuguuccuuccugggcac

SEQ ID NO: 1065176 - RNA, 22 nt, Human
agggaggucuggcugcccugag

SEQ ID NO: 1065177 - RNA, 22 nt, Human
uaagguuuggcugucucuuggu

SEQ ID NO: 1065178 - RNA, 22 nt, Human
cccuggcucugccucagagccc

SEQ ID NO: 1065179 - RNA, 22 nt, Human
acaguggaagcaugaugcuauc

SEQ ID NO: 1065180 - RNA, 22 nt, Human
agacuucucuccuugacuugca

SEQ ID NO: 1065181 - RNA, 22 nt, Human
gaggcagagaccuucaggaccu

SEQ ID NO: 1065182 - RNA, 23 nt, Human
ugagcagcuaaaggugaugcggg

SEQ ID NO: 1065183 - RNA, 22 nt, Human
acuuugaaacuaaaauucauua

SEQ ID NO: 1065184 - RNA, 23 nt, Human
acugccugugccgaucucucuca

SEQ ID NO: 1065185 - RNA, 23 nt, Human
agcccugcugagacccagcuccc

SEQ ID NO: 1065186 - RNA, 22 nt, Human
aagggaggggauguaagccugg

SEQ ID NO: 1065187 - RNA, 22 nt, Human
aacauugauugcaucuguucac

SEQ ID NO: 1065188 - RNA, 22 nt, Human
aaucaaaaccuacagagguaau

SEQ ID NO: 1065189 - RNA, 22 nt, Human
uugccuuuaaccccugaaaggc

SEQ ID NO: 1065190 - RNA, 22 nt, Human
ucugagccaauuucugugucca

SEQ ID NO: 1065191 - RNA, 22 nt, Human
ucagaggaugcuguucuuuaau

SEQ ID NO: 1065192 - RNA, 22 nt, Human
agaugcuucaguguuuaauuua

SEQ ID NO: 1065193 - RNA, 22 nt, Human
ccugccagcugugggccagccu

SEQ ID NO: 1065194 - RNA, 22 nt, Human
aaucuugguugcaguauauccg

SEQ ID NO: 1065195 - RNA, 22 nt, Human
uauauuuaaauccagguugaaa

SEQ ID NO: 1065196 - RNA, 22 nt, Human
uguaugaaaaggaauagauuga

SEQ ID NO: 1065197 - RNA, 22 nt, Human
aaagguuuucugacccuuagua

SEQ ID NO: 1065198 - RNA, 22 nt, Human
gaucauuuugaugcccuuuuag

SEQ ID NO: 1065199 - RNA, 22 nt, Human
gucccuggucuaccguggcuuc

SEQ ID NO: 1065200 - RNA, 22 nt, Human
cauggcccucuucuggagcaau

SEQ ID NO: 1065201 - RNA, 22 nt, Human
caugauauaaaguaguagauaa

SEQ ID NO: 1065202 - RNA, 22 nt, Human
aauggccagcugggagaguuga

SEQ ID NO: 1065203 - RNA, 22 nt, Human
ugcucuggguccugggccuccu

SEQ ID NO: 1065204 - RNA, 22 nt, Human
agggacaguuacaucaucagac

SEQ ID NO: 1065205 - RNA, 22 nt, Human
uugguucauuauugaaugugcu

SEQ ID NO: 1065206 - RNA, 23 nt, Human
ucacuaaaguguuuagugcagau

SEQ ID NO: 1065207 - RNA, 22 nt, Human
cucugagauaguuucuaucaau

SEQ ID NO: 1065208 - RNA, 22 nt, Human
caaaguauauuucauagucuca

SEQ ID NO: 1065209 - RNA, 22 nt, Human
agauuucccaaauacuuguuau

SEQ ID NO: 1065210 - RNA, 22 nt, Human
ugaagccacacuagcuuguccu

SEQ ID NO: 1065211 - RNA, 22 nt, Human
gcuaggagugggauggaagucg

SEQ ID NO: 1065212 - RNA, 22 nt, Human
ucuaacuugaacucaugacugu

SEQ ID NO: 1065213 - RNA, 22 nt, Human
ggcacugagaacaggcugacuu

SEQ ID NO: 1065214 - RNA, 22 nt, Human
uaacuuuuacuuaccaucugag

SEQ ID NO: 1065215 - RNA, 23 nt, Human
ucuucauggccaucugguucuuc

SEQ ID NO: 1065216 - RNA, 22 nt, Human
ccuaggaaggaguauaguaaau

SEQ ID NO: 1065217 - RNA, 22 nt, Human
caucuuaccccugcuaaugacc

SEQ ID NO: 1065218 - RNA, 22 nt, Human
augcauaauguauguauugacu

SEQ ID NO: 1065219 - RNA, 22 nt, Human
ucaauauagcaguguacuugag

SEQ ID NO: 1065220 - RNA, 22 nt, Human
gaggcaggcacuguuaucagca

SEQ ID NO: 1065221 - RNA, 22 nt, Human
ccuggcacaugcaguacucaag

SEQ ID NO: 1065222 - RNA, 22 nt, Human
acucaggaaauugagauaaugg

SEQ ID NO: 1065223 - RNA, 22 nt, Human
uuagccaugugggaaaaacagc

SEQ ID NO: 1065224 - RNA, 22 nt, Human
cagggccucauccucagagauu

SEQ ID NO: 1065225 - RNA, 22 nt, Human
augggagugacagggccacugg

SEQ ID NO: 1065226 - RNA, 22 nt, Human
caggcagauuugcugcccucca

SEQ ID NO: 1065227 - RNA, 22 nt, Human
agaagccagauuguagugggac

SEQ ID NO: 1065228 - RNA, 23 nt, Human
ucugagaagguuucagccagacu

SEQ ID NO: 1065229 - RNA, 22 nt, Human
cauuuacauaacaguaacgcug

SEQ ID NO: 1065230 - RNA, 22 nt, Human
gggcugacagcacgccuucugu

SEQ ID NO: 1065231 - RNA, 22 nt, Human
cagcuuucaucagugacacuca

SEQ ID NO: 1065232 - RNA, 22 nt, Human
cugcugugauugggagaaaccg

SEQ ID NO: 1065233 - RNA, 22 nt, Human
accuugugagguuacauaaugu

SEQ ID NO: 1065234 - RNA, 22 nt, Human
aauugugcuaugauuaugaaag

SEQ ID NO: 1065235 - RNA, 22 nt, Human
cagcuguuccugguugguggga

SEQ ID NO: 1065236 - RNA, 22 nt, Human
gguuugaacagcuuuggagaag

SEQ ID NO: 1065237 - RNA, 22 nt, Human
agcugcaggcgccggggccgau

SEQ ID NO: 1065238 - RNA, 19 nt, Human
ucugcccaguugucugccc

SEQ ID NO: 1065239 - RNA, 21 nt, Human
ggcagugaugugaagugcauc

SEQ ID NO: 1065240 - RNA, 22 nt, Human
agcaaguugaaugauaauacuc

SEQ ID NO: 1065241 - RNA, 21 nt, Human
cuuauucacuguuauuuauca

SEQ ID NO: 1065242 - RNA, 22 nt, Human
ggccugagucccaccuggcugu

SEQ ID NO: 1065243 - RNA, 22 nt, Human
ccugugaggucaucugugguaa

SEQ ID NO: 1065244 - RNA, 22 nt, Human
agaucagaaauguaauggcagu

SEQ ID NO: 1065245 - RNA, 22 nt, Human
auggagacgcaagggaccuagg

SEQ ID NO: 1065246 - RNA, 20 nt, Human
ccugucuccucuuaccuggc

SEQ ID NO: 1065247 - RNA, 22 nt, Human
agcagguggccacgaggaggag

SEQ ID NO: 1065248 - RNA, 21 nt, Human
uucucuccauaugcccagccc

SEQ ID NO: 1065249 - RNA, 22 nt, Human
gggucuggacggcugcaggaag

SEQ ID NO: 1065250 - RNA, 22 nt, Human
gugggcuggauuugcuugcaga

SEQ ID NO: 1065251 - RNA, 22 nt, Human
uucugggguuaugggugauucu

SEQ ID NO: 1065252 - RNA, 22 nt, Human
aguuacaugugaauagaaagua

SEQ ID NO: 1065253 - RNA, 22 nt, Human
aaggagaaggguaaucaacaca

SEQ ID NO: 1065254 - RNA, 22 nt, Human
caggcccugggcaggaucagcc

SEQ ID NO: 1065255 - RNA, 22 nt, Human
ucacagaagaaguagauugcau

SEQ ID NO: 1065256 - RNA, 22 nt, Human
aguguuccuugcuuucccagag

SEQ ID NO: 1065257 - RNA, 22 nt, Human
gggaguguugagcgcccugcca

SEQ ID NO: 1065258 - RNA, 22 nt, Human
ucagaggaauaaugcugcauuu

SEQ ID NO: 1065259 - RNA, 22 nt, Human
caggugucuaauucucaccccc

SEQ ID NO: 1065260 - RNA, 22 nt, Human
gcagagaguugggcugcgccag

SEQ ID NO: 1065261 - RNA, 22 nt, Human
agaguccagaaaacagugugcu

SEQ ID NO: 1065262 - RNA, 22 nt, Human
agcagugaaacagcugcauaug

SEQ ID NO: 1065263 - RNA, 19 nt, Human
uuucaauggcuuagagaaa

SEQ ID NO: 1065264 - RNA, 19 nt, Human
gguuaauguuaggauacuu

SEQ ID NO: 1065265 - RNA, 22 nt, Human
aggacagcaguuggugagguuc

SEQ ID NO: 1065266 - RNA, 22 nt, Human
uuaagugccucuaaaacaagcc

SEQ ID NO: 1065267 - RNA, 22 nt, Human
gcauggcagugaggauggugcu

SEQ ID NO: 1065268 - RNA, 22 nt, Human
auacacagccauuaugaauuag

SEQ ID NO: 1065269 - RNA, 22 nt, Human
gugcugaguagaaugaaugccu

SEQ ID NO: 1065270 - RNA, 22 nt, Human
ugcaccauuaauuuaugugaga

SEQ ID NO: 1065271 - RNA, 22 nt, Human
ucagaaagcuauaugguguguc

SEQ ID NO: 1065272 - RNA, 20 nt, Human
cagauggcacgucagggcau

SEQ ID NO: 1065273 - RNA, 22 nt, Human
gaccugccugagcugccucugc

SEQ ID NO: 1065274 - RNA, 22 nt, Human
cugcacuguguaacagauaacu

SEQ ID NO: 1065275 - RNA, 22 nt, Human
aagguggucuuacugaugguau

SEQ ID NO: 1065276 - RNA, 22 nt, Human
ggcagcugggucacaccgaucu

SEQ ID NO: 1065277 - RNA, 22 nt, Human
acaaagucuuuuacaacaguca

SEQ ID NO: 1065278 - RNA, 22 nt, Human
aaugggagguaguaugggaggu

SEQ ID NO: 1065279 - RNA, 22 nt, Human
agcugguguccuccuggagcug

SEQ ID NO: 1065280 - RNA, 22 nt, Human
uguuucaacuguuaagauaugc

SEQ ID NO: 1065281 - RNA, 22 nt, Human
gccuggagcccaguguggggcu

SEQ ID NO: 1065282 - RNA, 22 nt, Human
uuugcauugcauacaaggaacu

SEQ ID NO: 1065283 - RNA, 22 nt, Human
gggcagagagcuggaacuccuu

SEQ ID NO: 1065284 - RNA, 22 nt, Human
gagguggcugggaguagggaau

SEQ ID NO: 1065285 - RNA, 18 nt, Human
ugugcaauauuaaccacc

SEQ ID NO: 1065286 - RNA, 16 nt, Human
gcacacagccagccuu

SEQ ID NO: 1065287 - RNA, 22 nt, Human
ggaaggucgagcugcaucuggc

SEQ ID NO: 1065288 - RNA, 22 nt, Human
uaauagcauuaucaucaaaacu

SEQ ID NO: 1065289 - RNA, 22 nt, Human
agaggggagagcuaagcaauuc

SEQ ID NO: 1065290 - RNA, 22 nt, Human
ucuggcccagccccugagguca

SEQ ID NO: 1065291 - RNA, 22 nt, Human
gugccugugcggacucagggaa

SEQ ID NO: 1065292 - RNA, 22 nt, Human
agugaggauaccaauguguaga

SEQ ID NO: 1065293 - RNA, 22 nt, Human
ugcugggcuagaagcugaggcc

SEQ ID NO: 1065294 - RNA, 22 nt, Human
guaauuuuggaguauaaccugg

SEQ ID NO: 1065295 - RNA, 22 nt, Human
cagggccuuauccugccauuga

SEQ ID NO: 1065296 - RNA, 22 nt, Human
agaauacaguaggagccugggc

SEQ ID NO: 1065297 - RNA, 22 nt, Human
cugaaauguuaaauacuuggcu

SEQ ID NO: 1065298 - RNA, 22 nt, Human
uguggcugucuguucuccuagg

SEQ ID NO: 1065299 - RNA, 22 nt, Human
uucuaauacacgguaugacuuu

SEQ ID NO: 1065300 - RNA, 22 nt, Human
caccuggcagcuguuggccacg

SEQ ID NO: 1065301 - RNA, 22 nt, Human
uucuggcucauaugcuaagaag

SEQ ID NO: 1065302 - RNA, 22 nt, Human
ugggcagggucucuguuaucag

SEQ ID NO: 1065303 - RNA, 22 nt, Human
acuuguaaguaacaagugagaa

SEQ ID NO: 1065304 - RNA, 22 nt, Human
gaagcccuauccucuccuggga

SEQ ID NO: 1065305 - RNA, 18 nt, Human
ccaggacaggcaaaaggu

SEQ ID NO: 1065306 - RNA, 22 nt, Human
ucaugacaacuauauuauucca

SEQ ID NO: 1065307 - RNA, 22 nt, Human
ucuccuucgaggcccagcuccc

SEQ ID NO: 1065308 - RNA, 22 nt, Human
aagacuuauagucaguaauucu

SEQ ID NO: 1065309 - RNA, 22 nt, Human
agggccagagucuguguagaua

SEQ ID NO: 1065310 - RNA, 22 nt, Human
uuuaggagucaaauguuuuagg

SEQ ID NO: 1065311 - RNA, 22 nt, Human
uucaaagugcauguuccucaga

SEQ ID NO: 1065312 - RNA, 22 nt, Human
ugugaguacugcuauuuauaua

SEQ ID NO: 1065313 - RNA, 22 nt, Human
gcucaggaucccaggggugugc

SEQ ID NO: 1065314 - RNA, 22 nt, Human
ucugcuggaaaaccagggaauu

SEQ ID NO: 1065315 - RNA, 22 nt, Human
gauucauucucaguuucuagag

SEQ ID NO: 1065316 - RNA, 22 nt, Human
aaauuauucaaaaagcuguguu

SEQ ID NO: 1065317 - RNA, 22 nt, Human
caggccucagagaguggcgggg

SEQ ID NO: 1065318 - RNA, 22 nt, Human
gcacccagggacuuggcuggcc

SEQ ID NO: 1065319 - RNA, 22 nt, Human
uucaacaaggcugucaaaaguu

SEQ ID NO: 1065320 - RNA, 22 nt, Human
guggccagugggaaugggcuca

SEQ ID NO: 1065321 - RNA, 22 nt, Human
auagauguacguauguaaauca

SEQ ID NO: 1065322 - RNA, 22 nt, Human
accugccucagugcagcuggau

SEQ ID NO: 1065323 - RNA, 21 nt, Human
gccuggcuagaagcuccuagc

SEQ ID NO: 1065324 - RNA, 22 nt, Human
agcccuucaaccugccuacucc

SEQ ID NO: 1065325 - RNA, 22 nt, Human
aggggcugcuggguccgccccu

SEQ ID NO: 1065326 - RNA, 22 nt, Human
guucacaguguuuucuuugcau

SEQ ID NO: 1065327 - RNA, 22 nt, Human
ugagaaagugggugccuagcaa

SEQ ID NO: 1065328 - RNA, 22 nt, Human
ggaggaccccagcagcucccca

SEQ ID NO: 1065329 - RNA, 23 nt, Human
agaaaaacaggauuguguuccua

SEQ ID NO: 1065330 - RNA, 22 nt, Human
agugcaaacuuuauugugaccu

SEQ ID NO: 1065331 - RNA, 17 nt, Human
ggcagcugugugcaugc

SEQ ID NO: 1065332 - RNA, 22 nt, Human
cucacaggcaucucaucaggcu

SEQ ID NO: 1065333 - RNA, 22 nt, Human
uggcucaggcuugaaaauagau

SEQ ID NO: 1065334 - RNA, 22 nt, Human
gucauaaaaggaccaccuauug

SEQ ID NO: 1065335 - RNA, 22 nt, Human
caggaacaccugcagcuagugg

SEQ ID NO: 1065336 - RNA, 22 nt, Human
cugugaauuaaguauuguuauc

SEQ ID NO: 1065337 - RNA, 22 nt, Human
ucacuguaccuuccauuucauu

SEQ ID NO: 1065338 - RNA, 20 nt, Human
acuggagccaucucagccua

SEQ ID NO: 1065339 - RNA, 22 nt, Human
caguacuuugaagauauuuuag

SEQ ID NO: 1065340 - RNA, 22 nt, Human
aggugccagugcuguggucccc

SEQ ID NO: 1065341 - RNA, 22 nt, Human
acuugauuuugaaccuuucuac

SEQ ID NO: 1065342 - RNA, 22 nt, Human
uacaaaguuugggguccucaaa

SEQ ID NO: 1065343 - RNA, 22 nt, Human
uuaaaugaacgagauaugcaac

SEQ ID NO: 1065344 - RNA, 22 nt, Human
ugguccugcccacgcccaucug

SEQ ID NO: 1065345 - RNA, 22 nt, Human
aggcccuguccauggugcugaa

SEQ ID NO: 1065346 - RNA, 22 nt, Human
cuggggcugcggacgggagccc

SEQ ID NO: 1065347 - RNA, 23 nt, Human
aagaauaaaugacauuaaaggug

SEQ ID NO: 1065348 - RNA, 22 nt, Human
auggaaauacagccagagcaga

SEQ ID NO: 1065349 - RNA, 22 nt, Human
gucccucaguagugcacagugg

SEQ ID NO: 1065350 - RNA, 21 nt, Human
aaaaagcuggggcaugcaugc

SEQ ID NO: 1065351 - RNA, 18 nt, Human
guccugagcucugcugua

SEQ ID NO: 1065352 - RNA, 22 nt, Human
cagagcugggaucccaugggcg

SEQ ID NO: 1065353 - RNA, 22 nt, Human
ggcacagcaggagcuaugugaa

SEQ ID NO: 1065354 - RNA, 22 nt, Human
gcucaggggaaugggcugccgu

SEQ ID NO: 1065355 - RNA, 18 nt, Human
cucagggcaucagucugg

SEQ ID NO: 1065356 - RNA, 19 nt, Human
cuuuucaucaacagccaau

SEQ ID NO: 1065357 - RNA, 22 nt, Human
agagauauuauuuaccaaguua

SEQ ID NO: 1065358 - RNA, 22 nt, Human
aggacugggugcagagggcauc

SEQ ID NO: 1065359 - RNA, 18 nt, Human
aggccugggaagcugagg

SEQ ID NO: 1065360 - RNA, 22 nt, Human
gugcagcugugugagagcucca

SEQ ID NO: 1065361 - RNA, 22 nt, Human
aucuucaacuugaucauuugaa

SEQ ID NO: 1065362 - RNA, 22 nt, Human
agccagccaguucacuaggaaa

SEQ ID NO: 1065363 - RNA, 22 nt, Human
augcccugugguucaugugaga

SEQ ID NO: 1065364 - RNA, 22 nt, Human
auauuaauuauuuacacaugag

SEQ ID NO: 1065365 - RNA, 22 nt, Human
ugugaaaugaagauaauucuug

SEQ ID NO: 1065366 - RNA, 22 nt, Human
uugauucuacuuaaaacauaug

SEQ ID NO: 1065367 - RNA, 22 nt, Human
ugaaauauccagcccagcagga

SEQ ID NO: 1065368 - RNA, 22 nt, Human
gccaggcucagcagucaaccug

SEQ ID NO: 1065369 - RNA, 22 nt, Human
gaaauacaguugggaggaggua

SEQ ID NO: 1065370 - RNA, 22 nt, Human
ccagcuucucucugaugcagcu

SEQ ID NO: 1065371 - RNA, 22 nt, Human
gcugccaguaguuggagcucca

SEQ ID NO: 1065372 - RNA, 22 nt, Human
acuccugggugcugaccagcgu

SEQ ID NO: 1065373 - RNA, 22 nt, Human
uggcaggaaaaagggccagagg

SEQ ID NO: 1065374 - RNA, 22 nt, Human
agggagcuguggucagcucagu

SEQ ID NO: 1065375 - RNA, 20 nt, Human
gaggccucagccucagcucc

SEQ ID NO: 1065376 - RNA, 23 nt, Human
gguggcaggaguggaugcugagc

SEQ ID NO: 1065377 - RNA, 22 nt, Human
caguacaauguugaaaaggagu

SEQ ID NO: 1065378 - RNA, 22 nt, Human
ugaguccauguggaggggaggu

SEQ ID NO: 1065379 - RNA, 22 nt, Human
ggcucaggacugcagcguagag

SEQ ID NO: 1065380 - RNA, 22 nt, Human
ucccagcauuaaugccugucag

SEQ ID NO: 1065381 - RNA, 22 nt, Human
gccagagccggcuucacaggau

SEQ ID NO: 1065382 - RNA, 22 nt, Human
aggcugaguuucucauucucgc

SEQ ID NO: 1065383 - RNA, 22 nt, Human
gcucacugccauucucuagaug

SEQ ID NO: 1065384 - RNA, 22 nt, Human
uuacaugacucaauagaagggc

SEQ ID NO: 1065385 - RNA, 22 nt, Human
ggcaggugggaacccuccccac

SEQ ID NO: 1065386 - RNA, 18 nt, Human
ucugccugcagggcaucu

SEQ ID NO: 1065387 - RNA, 22 nt, Human
guagaauaaauguacacaucug

SEQ ID NO: 1065388 - RNA, 22 nt, Human
agagccaaguugucaaggcacu

SEQ ID NO: 1065389 - RNA, 22 nt, Human
ccagaaaaugcagaacauagaa

SEQ ID NO: 1065390 - RNA, 22 nt, Human
uugcuguguaacuccuggccug

SEQ ID NO: 1065391 - RNA, 22 nt, Human
cuuaaugaaugcugcuguauuu

SEQ ID NO: 1065392 - RNA, 22 nt, Human
auuaacaugcagccagacacac

SEQ ID NO: 1065393 - RNA, 22 nt, Human
aggacagcauaugggaaccagu

SEQ ID NO: 1065394 - RNA, 21 nt, Human
uuuguucauagcucacucuuu

SEQ ID NO: 1065395 - RNA, 22 nt, Human
ugggcuccuugggagcaaguga

SEQ ID NO: 1065396 - RNA, 22 nt, Human
auucauucugaccucaagagaa

SEQ ID NO: 1065397 - RNA, 22 nt, Human
uggaagaagcuacaagcgguga

SEQ ID NO: 1065398 - RNA, 22 nt, Human
ggaagaggcugguagugcccgu

SEQ ID NO: 1065399 - RNA, 22 nt, Human
aagcugccauagaacgagaggu

SEQ ID NO: 1065400 - RNA, 22 nt, Human
aacaucuuuguaguguucuccu

SEQ ID NO: 1065401 - RNA, 22 nt, Human
gcagagaggaaugaagccaucc

SEQ ID NO: 1065402 - RNA, 22 nt, Human
uacacauauguccauuaaucag

SEQ ID NO: 1065403 - RNA, 17 nt, Human
cuggagccaagagggcc

SEQ ID NO: 1065404 - RNA, 22 nt, Human
acuuucucaaaucagacuuuaa

SEQ ID NO: 1065405 - RNA, 22 nt, Human
agcagcugaucaaagcacuuau

SEQ ID NO: 1065406 - RNA, 22 nt, Human
ugagggaguuggguguauagga

SEQ ID NO: 1065407 - RNA, 22 nt, Human
uuuaaaaggcagcuucuuuugu

SEQ ID NO: 1065408 - RNA, 22 nt, Human
ugugcccaucccucuggagugu

SEQ ID NO: 1065409 - RNA, 18 nt, Human
gcccugguggagcuggug

SEQ ID NO: 1065410 - RNA, 22 nt, Human
ggcucugcgcgguaaagugacu

SEQ ID NO: 1065411 - RNA, 22 nt, Human
gauuucaaaaguagauccauca

SEQ ID NO: 1065412 - RNA, 22 nt, Human
ggccucaguuucuccauggguu

SEQ ID NO: 1065413 - RNA, 22 nt, Human
cuauucaacuugacuguuucac

SEQ ID NO: 1065414 - RNA, 21 nt, Human
ggugcucgcugaugaggagug

SEQ ID NO: 1065415 - RNA, 23 nt, Human
aguuucacauuuuacauguggcu

SEQ ID NO: 1065416 - RNA, 22 nt, Human
agaaggaguguacaggucaugc

SEQ ID NO: 1065417 - RNA, 22 nt, Human
auauucacugagcauaaagcca

SEQ ID NO: 1065418 - RNA, 22 nt, Human
ugcuucugggucccagccuggc

SEQ ID NO: 1065419 - RNA, 22 nt, Human
gaggagagggcugcgggcccac

SEQ ID NO: 1065420 - RNA, 22 nt, Human
uauaaaacagaaagcacuaccu

SEQ ID NO: 1065421 - RNA, 20 nt, Human
acauccuggugacuagaacu

SEQ ID NO: 1065422 - RNA, 22 nt, Human
ccuggcugaggggccaaggacc

SEQ ID NO: 1065423 - RNA, 23 nt, Human
gcuuuauaguucucccaacauua

SEQ ID NO: 1065424 - RNA, 22 nt, Human
gcaggccucuguugagggccuu

SEQ ID NO: 1065425 - RNA, 22 nt, Human
uccuuaauaaguacuucauugu

SEQ ID NO: 1065426 - RNA, 22 nt, Human
gaguggcuuuggagaaguaggg

SEQ ID NO: 1065427 - RNA, 22 nt, Human
uaagaaacuaaugcaauaagag

SEQ ID NO: 1065428 - RNA, 22 nt, Human
uucuuaagaggguuaagugaag

SEQ ID NO: 1065429 - RNA, 22 nt, Human
agagugucugguagcugcucug

SEQ ID NO: 1065430 - RNA, 22 nt, Human
uuuguaaauagcaguacucaug

SEQ ID NO: 1065431 - RNA, 22 nt, Human
aucauuuugugacaaugccugu

SEQ ID NO: 1065432 - RNA, 22 nt, Human
caaggccagagccagcgauaag

SEQ ID NO: 1065433 - RNA, 21 nt, Human
uaaggccaagucuauuucugu

SEQ ID NO: 1065434 - RNA, 22 nt, Human
auacugaaaaaugauuugcugu

SEQ ID NO: 1065435 - RNA, 23 nt, Human
agaaaucaucuccaccccauguc

SEQ ID NO: 1065436 - RNA, 22 nt, Human
ucuucaugcaccucacagcuag

SEQ ID NO: 1065437 - RNA, 22 nt, Human
gcccugagggguggugucugua

SEQ ID NO: 1065438 - RNA, 23 nt, Human
ugggccuggccucccaguccagc

SEQ ID NO: 1065439 - RNA, 22 nt, Human
gcagggcagaaggugcugagga

SEQ ID NO: 1065440 - RNA, 22 nt, Human
uuuaguagcuacaguuagaagg

SEQ ID NO: 1065441 - RNA, 22 nt, Human
uuacagagguauguaugucucu

SEQ ID NO: 1065442 - RNA, 23 nt, Human
acauuucauauaaaagggaucag

SEQ ID NO: 1065443 - RNA, 22 nt, Human
aaauguacgggaguagaauuag

SEQ ID NO: 1065444 - RNA, 22 nt, Human
cugggcuuaggaccuggugcgg

SEQ ID NO: 1065445 - RNA, 22 nt, Human
aauaucagcucugucacuuacu

SEQ ID NO: 1065446 - RNA, 22 nt, Human
ugccugcucuuaccacucuccc

SEQ ID NO: 1065447 - RNA, 22 nt, Human
ugaggccugacagaccaagccu

SEQ ID NO: 1065448 - RNA, 22 nt, Human
uuaaaauccaguguugguggau

SEQ ID NO: 1065449 - RNA, 22 nt, Human
uccuuugacuucuugcagucca

SEQ ID NO: 1065450 - RNA, 22 nt, Human
caccaggaccccacgguggguu

SEQ ID NO: 1065451 - RNA, 22 nt, Human
ucacucagguucaugucuuugu

SEQ ID NO: 1065452 - RNA, 22 nt, Human
auucacagaauaguuuuaccag

SEQ ID NO: 1065453 - RNA, 22 nt, Human
gaacauuuggcaugagaauuug

SEQ ID NO: 1065454 - RNA, 22 nt, Human
aauuaugauuggucuaaaccag

SEQ ID NO: 1065455 - RNA, 22 nt, Human
cugcagcuccugagcucagaga

SEQ ID NO: 1065456 - RNA, 22 nt, Human
acuggggauuagggacucagug

SEQ ID NO: 1065457 - RNA, 22 nt, Human
uugaaaguagcagcugcauaug

SEQ ID NO: 1065458 - RNA, 22 nt, Human
gauuaaguggaaugaguauuug

SEQ ID NO: 1065459 - RNA, 22 nt, Human
uccccaccccagaacuacuagg

SEQ ID NO: 1065460 - RNA, 23 nt, Human
cccagaccuugugcugcccuugg

SEQ ID NO: 1065461 - RNA, 22 nt, Human
gauuguaaaacagaucauuauc

SEQ ID NO: 1065462 - RNA, 22 nt, Human
gggcagugacaaaggggaugaa

SEQ ID NO: 1065463 - RNA, 22 nt, Human
agcagcugguaggaguggccac

SEQ ID NO: 1065464 - RNA, 22 nt, Human
cucuggagguggagguugcagu

SEQ ID NO: 1065465 - RNA, 22 nt, Human
ucuguuuucucuguauuuugac

SEQ ID NO: 1065466 - RNA, 22 nt, Human
uuccaaaacaauauucugugaa

SEQ ID NO: 1065467 - RNA, 22 nt, Human
cucagcagagaccagggaggaa

SEQ ID NO: 1065468 - RNA, 22 nt, Human
ugugcugguacaugugaggaug

SEQ ID NO: 1065469 - RNA, 22 nt, Human
gguggcagaggugcaucagccc

SEQ ID NO: 1065470 - RNA, 22 nt, Human
uccauuaaaccuggauggaguu

SEQ ID NO: 1065471 - RNA, 21 nt, Human
aggacagauguaggaauaaag

SEQ ID NO: 1065472 - RNA, 23 nt, Human
gggcagguuuuuauaggcuucag

SEQ ID NO: 1065473 - RNA, 22 nt, Human
uuccauauuagacuaugugggg

SEQ ID NO: 1065474 - RNA, 22 nt, Human
cugacucuccucaagcauaaau

SEQ ID NO: 1065475 - RNA, 22 nt, Human
ccucaggauacaggagccacag

SEQ ID NO: 1065476 - RNA, 16 nt, Human
ugguggggaggacagc

SEQ ID NO: 1065477 - RNA, 20 nt, Human
cccugagacgacugagcucc

SEQ ID NO: 1065478 - RNA, 22 nt, Human
cccacuguugccucaaauauca

SEQ ID NO: 1065479 - RNA, 22 nt, Human
ccugcagguugcagaggcggaa

SEQ ID NO: 1065480 - RNA, 22 nt, Human
cuaagauaaaugcuuugaugaa

SEQ ID NO: 1065481 - RNA, 22 nt, Human
cagaugaggcaaccucauugcu

SEQ ID NO: 1065482 - RNA, 22 nt, Human
aauaaaauggucaguuuucuca

SEQ ID NO: 1065483 - RNA, 22 nt, Human
gcucugagaggugcagcaguaa

SEQ ID NO: 1065484 - RNA, 22 nt, Human
gucaagucaugacucaaaggaa

SEQ ID NO: 1065485 - RNA, 22 nt, Human
ucccagccacagguguagcccu

SEQ ID NO: 1065486 - RNA, 22 nt, Human
ucuagcauuucuuuccugagga

SEQ ID NO: 1065487 - RNA, 22 nt, Human
gggcucuggugccuucacagaa

SEQ ID NO: 1065488 - RNA, 22 nt, Human
caaaggagguaaugggugugag

SEQ ID NO: 1065489 - RNA, 22 nt, Human
auaauuuggcuuccuagaugua

SEQ ID NO: 1065490 - RNA, 22 nt, Human
gcugcauggagggugcccagga

SEQ ID NO: 1065491 - RNA, 18 nt, Human
uaaaggaagugggagagg

SEQ ID NO: 1065492 - RNA, 22 nt, Human
acaggcucaguucacuggauuu

SEQ ID NO: 1065493 - RNA, 22 nt, Human
uuucacaaguaaaguccuaagu

SEQ ID NO: 1065494 - RNA, 22 nt, Human
aggcccugaagucggccccuca

SEQ ID NO: 1065495 - RNA, 22 nt, Human
ccccugccauagucaaaucuaa

SEQ ID NO: 1065496 - RNA, 22 nt, Human
ccaguggaaauguggucaggau

SEQ ID NO: 1065497 - RNA, 22 nt, Human
cucugaauggacacuccagugu

SEQ ID NO: 1065498 - RNA, 22 nt, Human
ugacugaagaagccacauugga

SEQ ID NO: 1065499 - RNA, 22 nt, Human
aacagcauaccaauguacauau

SEQ ID NO: 1065500 - RNA, 22 nt, Human
uugaagcagcucaggaggcuua

SEQ ID NO: 1065501 - RNA, 22 nt, Human
ggcaccugcucaucuggacuca

SEQ ID NO: 1065502 - RNA, 22 nt, Human
ucaauuucauucuauuaguuaa

SEQ ID NO: 1065503 - RNA, 22 nt, Human
uauuugaaggcauacauuuuga

SEQ ID NO: 1065504 - RNA, 21 nt, Human
ucagaguguguuacagcaagc

SEQ ID NO: 1065505 - RNA, 22 nt, Human
agcagcucaaagccugcaagga

SEQ ID NO: 1065506 - RNA, 20 nt, Human
gagauggacagaugaagggg

SEQ ID NO: 1065507 - RNA, 22 nt, Human
aaaggaagauugagcuuuucca

SEQ ID NO: 1065508 - RNA, 22 nt, Human
ccacacugucuaacaaggcaua

SEQ ID NO: 1065509 - RNA, 22 nt, Human
gccagagaaugaaaaucagauu

SEQ ID NO: 1065510 - RNA, 22 nt, Human
uauuucagcaagaagaaugugg

SEQ ID NO: 1065511 - RNA, 22 nt, Human
gccagagagacugauacaugcu

SEQ ID NO: 1065512 - RNA, 22 nt, Human
agggaguuccgaucugugcacc

SEQ ID NO: 1065513 - RNA, 22 nt, Human
cuuucuuaauuuuuaaggacac

SEQ ID NO: 1065514 - RNA, 22 nt, Human
gagcuuccauggacgccaucug

SEQ ID NO: 1065515 - RNA, 22 nt, Human
gggaagugaaguguagcugucu

SEQ ID NO: 1065516 - RNA, 22 nt, Human
uacauaguuccauuuacaggaa

SEQ ID NO: 1065517 - RNA, 22 nt, Human
gcagggucuugagaggcagcca

SEQ ID NO: 1065518 - RNA, 22 nt, Human
gacacagaauuuacucccgaua

SEQ ID NO: 1065519 - RNA, 22 nt, Human
acauucuggaugucugaugaga

SEQ ID NO: 1065520 - RNA, 22 nt, Human
ggccgggcaggucucagccagc

SEQ ID NO: 1065521 - RNA, 22 nt, Human
aggucauuacaauuaucauuuu

SEQ ID NO: 1065522 - RNA, 22 nt, Human
aggcuuaagccugaggccccag

SEQ ID NO: 1065523 - RNA, 22 nt, Human
uucagcuacccuuggcuuaaua

SEQ ID NO: 1065524 - RNA, 22 nt, Human
uccuagccuggugagaaacugu

SEQ ID NO: 1065525 - RNA, 20 nt, Human
agucuucccccagaagaggg

SEQ ID NO: 1065526 - RNA, 22 nt, Human
cagcuacacaccagaacuauua

SEQ ID NO: 1065527 - RNA, 22 nt, Human
gaagccaagugcaaaugccuua

SEQ ID NO: 1065528 - RNA, 22 nt, Human
agcaaggugacaucaugcugag

SEQ ID NO: 1065529 - RNA, 22 nt, Human
gcauggcauuaacaagauggaa

SEQ ID NO: 1065530 - RNA, 22 nt, Human
cauggcaggaggcugcuggcag

SEQ ID NO: 1065531 - RNA, 21 nt, Human
ugcuucucuagaucaacuacu

SEQ ID NO: 1065532 - RNA, 22 nt, Human
ucaggcugcccguucagggcuc

SEQ ID NO: 1065533 - RNA, 22 nt, Human
auagcaaaaaugaacaaagcuu

SEQ ID NO: 1065534 - RNA, 22 nt, Human
gucucuuuuauggugaguugau

SEQ ID NO: 1065535 - RNA, 22 nt, Human
gcuuccaagcgguagauagcau

SEQ ID NO: 1065536 - RNA, 22 nt, Human
uagcauuagagauagaaauagu

SEQ ID NO: 1065537 - RNA, 22 nt, Human
cuugcugugugguguucucaga

SEQ ID NO: 1065538 - RNA, 22 nt, Human
aacugaacugauaacauacacg

SEQ ID NO: 1065539 - RNA, 20 nt, Human
ucaaagcaaagggagaugau

SEQ ID NO: 1065540 - RNA, 22 nt, Human
ggccucagaccggagcuggcca

SEQ ID NO: 1065541 - RNA, 23 nt, Human
ccuggcagcaaacgaggagguua

SEQ ID NO: 1065542 - RNA, 22 nt, Human
cuggggaauagagcuggagacc

SEQ ID NO: 1065543 - RNA, 22 nt, Human
uggcccuggguggaauguccca

SEQ ID NO: 1065544 - RNA, 22 nt, Human
gcagagccgugaauggauuuca

SEQ ID NO: 1065545 - RNA, 22 nt, Human
ccauggccaggaaagccaaggu

SEQ ID NO: 1065546 - RNA, 22 nt, Human
uggaggccagagguacugggac

SEQ ID NO: 1065547 - RNA, 22 nt, Human
ccugcugugaaacuggcauaug

SEQ ID NO: 1065548 - RNA, 22 nt, Human
uggcauuuccucagugcucaga

SEQ ID NO: 1065549 - RNA, 23 nt, Human
agcauaaaccucuguggcuuuag

SEQ ID NO: 1065550 - RNA, 22 nt, Human
cuggaagcgucggaggaagggc

SEQ ID NO: 1065551 - RNA, 22 nt, Human
agcacagaguugcagagagcgu

SEQ ID NO: 1065552 - RNA, 22 nt, Human
cauggacucugguuuggggagc

SEQ ID NO: 1065553 - RNA, 22 nt, Human
gcagagcuucuguccuucagga

SEQ ID NO: 1065554 - RNA, 22 nt, Human
caguuaauguccuauacaauag

SEQ ID NO: 1065555 - RNA, 22 nt, Human
caggauggagggagggcuguua

SEQ ID NO: 1065556 - RNA, 22 nt, Human
ugaguccaucgcagggaagugg

SEQ ID NO: 1065557 - RNA, 22 nt, Human
aaauaagaaauucuucuuugca

SEQ ID NO: 1065558 - RNA, 22 nt, Human
cagagggcacaugguuuccuca

SEQ ID NO: 1065559 - RNA, 22 nt, Human
gccuucaguagugucagcugua

SEQ ID NO: 1065560 - RNA, 22 nt, Human
gggcugcuuccuggggaaugcu

SEQ ID NO: 1065561 - RNA, 22 nt, Human
ucuacaaauaaauuacuaugua

SEQ ID NO: 1065562 - RNA, 22 nt, Human
cagagcuggagggaacccuggc

SEQ ID NO: 1065563 - RNA, 22 nt, Human
caaguauucuguaaaaagucaa

SEQ ID NO: 1065564 - RNA, 22 nt, Human
ccugucuggggacucccugggu

SEQ ID NO: 1065565 - RNA, 22 nt, Human
uuuaaauggcauuuucccagau

SEQ ID NO: 1065566 - RNA, 22 nt, Human
agugaggcuaauaggcaauggu

SEQ ID NO: 1065567 - RNA, 22 nt, Human
agggcagagcugucuaaauggc

SEQ ID NO: 1065568 - RNA, 22 nt, Human
cugcuuccauggucuggagacu

SEQ ID NO: 1065569 - RNA, 22 nt, Human
cuagcaucagaugagaagcugu

SEQ ID NO: 1065570 - RNA, 22 nt, Human
agcuguggcaaccuugucagac

SEQ ID NO: 1065571 - RNA, 22 nt, Human
ucaucuuuccucaaaagaucca

SEQ ID NO: 1065572 - RNA, 22 nt, Human
aucaaaucauugcauuaauguu

SEQ ID NO: 1065573 - RNA, 22 nt, Human
uggagguguggagucaaaggga

SEQ ID NO: 1065574 - RNA, 21 nt, Human
uucuucaugaugauuaauggc

SEQ ID NO: 1065575 - RNA, 22 nt, Human
uuagccauuaauguccugugca

SEQ ID NO: 1065576 - RNA, 22 nt, Human
ugucacaaggccaugaaaagaa

SEQ ID NO: 1065577 - RNA, 22 nt, Human
uauuucuuuucgugacuuauug

SEQ ID NO: 1065578 - RNA, 22 nt, Human
gcagguggauuaucagaagugc

SEQ ID NO: 1065579 - RNA, 22 nt, Human
uaugaaacauucauacaaauaa

SEQ ID NO: 1065580 - RNA, 22 nt, Human
uccagggaugguaaugagcagu

SEQ ID NO: 1065581 - RNA, 22 nt, Human
cagggcuggguuaaaagcaggg

SEQ ID NO: 1065582 - RNA, 22 nt, Human
uuugacagcuuguuacaaaguu

SEQ ID NO: 1065583 - RNA, 22 nt, Human
guuugcauguguacuuaauugg

SEQ ID NO: 1065584 - RNA, 22 nt, Human
cugggcagccucacacaauguu

SEQ ID NO: 1065585 - RNA, 22 nt, Human
gcuuacaaacaacagaaauuaa

SEQ ID NO: 1065586 - RNA, 22 nt, Human
aacuggaauagcacaggaaaag

SEQ ID NO: 1065587 - RNA, 22 nt, Human
ggccccacgggggaguccuagu

SEQ ID NO: 1065588 - RNA, 22 nt, Human
aaguccuuuccaguccugugau

SEQ ID NO: 1065589 - RNA, 22 nt, Human
auucagugugagguuuucaagu

SEQ ID NO: 1065590 - RNA, 22 nt, Human
aauuuacaguugcugaugguac

SEQ ID NO: 1065591 - RNA, 22 nt, Human
caguucuggaggauagaagucu

SEQ ID NO: 1065592 - RNA, 22 nt, Human
cugggcuuugaagccaggcugc

SEQ ID NO: 1065593 - RNA, 22 nt, Human
aggcuggcccuacuggcugccu

SEQ ID NO: 1065594 - RNA, 22 nt, Human
gcccugcuucuggcaugcagaa

SEQ ID NO: 1065595 - RNA, 22 nt, Human
uguucccauggauaucugcaua

SEQ ID NO: 1065596 - RNA, 21 nt, Human
auacuuugaauuacagccuug

SEQ ID NO: 1065597 - RNA, 22 nt, Human
ucugaagggcugaguggaggag

SEQ ID NO: 1065598 - RNA, 22 nt, Human
uaagacagggucuauucuuagu

SEQ ID NO: 1065599 - RNA, 22 nt, Human
agccacuuuacuuucauauuuu

SEQ ID NO: 1065600 - RNA, 22 nt, Human
augcacuguaggugccaucugc

SEQ ID NO: 1065601 - RNA, 17 nt, Human
cugauuuauuagcagac

SEQ ID NO: 1065602 - RNA, 22 nt, Human
acaagagacaagagguucuucu

SEQ ID NO: 1065603 - RNA, 21 nt, Human
gcaggcuggucaaaccucagu

SEQ ID NO: 1065604 - RNA, 22 nt, Human
uuuuucaagacaaccugcaugu

SEQ ID NO: 1065605 - RNA, 22 nt, Human
gcugggagcccuggucugcucc

SEQ ID NO: 1065606 - RNA, 19 nt, Human
ucaggaguuaguugugcuc

SEQ ID NO: 1065607 - RNA, 22 nt, Human
cacacaugaaucccuaguaccu

SEQ ID NO: 1065608 - RNA, 22 nt, Human
gcccagggcuucaaagagagaa

SEQ ID NO: 1065609 - RNA, 22 nt, Human
aucuacaagagguucuccucuc

SEQ ID NO: 1065610 - RNA, 23 nt, Human
gggcuccagucucugcucaguug

SEQ ID NO: 1065611 - RNA, 20 nt, Human
ccugucucacguuccgcccc

SEQ ID NO: 1065612 - RNA, 22 nt, Human
gcuguggcugaagaugcaggga

SEQ ID NO: 1065613 - RNA, 21 nt, Human
uaccaauugccuucuaguugu

SEQ ID NO: 1065614 - RNA, 22 nt, Human
cgaggcucagagagggugacuu

SEQ ID NO: 1065615 - RNA, 22 nt, Human
ccaaagagcuagaauuauaggc

SEQ ID NO: 1065616 - RNA, 22 nt, Human
aaagauuucacaucccaagccu

SEQ ID NO: 1065617 - RNA, 20 nt, Human
auguacuccccacaagcaac

SEQ ID NO: 1065618 - RNA, 22 nt, Human
gugccugguuuggggaauguuc

SEQ ID NO: 1065619 - RNA, 22 nt, Human
gaagaagcaggaguguguagca

SEQ ID NO: 1065620 - RNA, 22 nt, Human
gggucuggcaugcugagaugga

SEQ ID NO: 1065621 - RNA, 22 nt, Human
aaugucugaaaaucagacugca

SEQ ID NO: 1065622 - RNA, 22 nt, Human
uccaggcaugucugaguccuuc

SEQ ID NO: 1065623 - RNA, 20 nt, Human
aagaggugauaacaggugag

SEQ ID NO: 1065624 - RNA, 22 nt, Human
ugcagcuguaacagaggccuca

SEQ ID NO: 1065625 - RNA, 22 nt, Human
gcugucaguuuuacccacagac

SEQ ID NO: 1065626 - RNA, 22 nt, Human
gaaaugucucuggauuugcuuu

SEQ ID NO: 1065627 - RNA, 22 nt, Human
agggcugaaguuauggcugagc

SEQ ID NO: 1065628 - RNA, 23 nt, Human
cucaacccuaguaagggaguagg

SEQ ID NO: 1065629 - RNA, 22 nt, Human
ccugucaggguuugccucagaa

SEQ ID NO: 1065630 - RNA, 22 nt, Human
aucuugcauuugcuaaaaugca

SEQ ID NO: 1065631 - RNA, 22 nt, Human
agagccaaucuucagagcagag

SEQ ID NO: 1065632 - RNA, 22 nt, Human
auuaauauacacuguuagcaug

SEQ ID NO: 1065633 - RNA, 22 nt, Human
cucaacaugccuacucagucug

SEQ ID NO: 1065634 - RNA, 22 nt, Human
gagggagcuugauggauguuug

SEQ ID NO: 1065635 - RNA, 22 nt, Human
ucugcaugaugaacaaaugagc

SEQ ID NO: 1065636 - RNA, 22 nt, Human
ggagcagagcucuucaucugca

SEQ ID NO: 1065637 - RNA, 22 nt, Human
cugggaaggggaagguccucuc

SEQ ID NO: 1065638 - RNA, 22 nt, Human
cuucuccucugaguccugggag

SEQ ID NO: 1065639 - RNA, 22 nt, Human
ccagcccugucaccaacuggag

SEQ ID NO: 1065640 - RNA, 22 nt, Human
cugcccugagggccuguguguu

SEQ ID NO: 1065641 - RNA, 22 nt, Human
agagaugucgccuugcccaggg

SEQ ID NO: 1065642 - RNA, 22 nt, Human
aggcacuggucuaccccuuagu

SEQ ID NO: 1065643 - RNA, 22 nt, Human
ucugucacucccugaugaugaa

SEQ ID NO: 1065644 - RNA, 22 nt, Human
uaacacauaagcugagaccaug

SEQ ID NO: 1065645 - RNA, 22 nt, Human
ggaacacaaaugggagagcugg

SEQ ID NO: 1065646 - RNA, 22 nt, Human
ugcagccuugccuccucccagc

SEQ ID NO: 1065647 - RNA, 22 nt, Human
uauuuguauguguguacauaua

SEQ ID NO: 1065648 - RNA, 22 nt, Human
gcaaggaagcagaguugcuauc

SEQ ID NO: 1065649 - RNA, 22 nt, Human
acucucucacagcuuggcugau

SEQ ID NO: 1065650 - RNA, 22 nt, Human
agcaaaagauagauuaacaaga

SEQ ID NO: 1065651 - RNA, 22 nt, Human
acacccagagcgccagugccga

SEQ ID NO: 1065652 - RNA, 22 nt, Human
agccaucuaagaaauacaaaau

SEQ ID NO: 1065653 - RNA, 22 nt, Human
gaggcuuuucuucagguaucaa

SEQ ID NO: 1065654 - RNA, 21 nt, Human
aggcacuguuugugguuuggg

SEQ ID NO: 1065655 - RNA, 22 nt, Human
aaagaauagccuuuguccaaau

SEQ ID NO: 1065656 - RNA, 22 nt, Human
caaaauuagggagugagcugga

SEQ ID NO: 1065657 - RNA, 22 nt, Human
uggauaaacucacuguaaguug

SEQ ID NO: 1065658 - RNA, 22 nt, Human
caggcccucaggcaagggcucu

SEQ ID NO: 1065659 - RNA, 22 nt, Human
gacuucaaaggucaaacaucgc

SEQ ID NO: 1065660 - RNA, 22 nt, Human
aggaacacaagcuaugauccac

SEQ ID NO: 1065661 - RNA, 22 nt, Human
aguuccagcugugaccagaaaa

SEQ ID NO: 1065662 - RNA, 22 nt, Human
agguccuggugaccauggaguu

SEQ ID NO: 1065663 - RNA, 22 nt, Human
aucuccagaggagucauggucu

SEQ ID NO: 1065664 - RNA, 22 nt, Human
ugguagggacacuaugcagaaa

SEQ ID NO: 1065665 - RNA, 22 nt, Human
cacauacauucauguuacucua

SEQ ID NO: 1065666 - RNA, 21 nt, Human
acaugucucuaaucucaguga

SEQ ID NO: 1065667 - RNA, 21 nt, Human
uaauuuauucagcacaguguu

SEQ ID NO: 1065668 - RNA, 22 nt, Human
gaaacauugagcagaaggagaa

SEQ ID NO: 1065669 - RNA, 22 nt, Human
uggggaggacgggcgccuuccu

SEQ ID NO: 1065670 - RNA, 22 nt, Human
ugagccuggguggucgaggcug

SEQ ID NO: 1065671 - RNA, 22 nt, Human
ugaguuuugucuugcuagaagu

SEQ ID NO: 1065672 - RNA, 22 nt, Human
gcaaauaauauacuuugaucuc

SEQ ID NO: 1065673 - RNA, 22 nt, Human
uccuuccugcaggccaaguccu

SEQ ID NO: 1065674 - RNA, 22 nt, Human
ccuuuucuguuuccugucacug

SEQ ID NO: 1065675 - RNA, 22 nt, Human
acaguggaguugggguagcccu

SEQ ID NO: 1065676 - RNA, 22 nt, Human
aagagcuggauggaaucuggga

SEQ ID NO: 1065677 - RNA, 22 nt, Human
cugccuggcuaaacucaagucg

SEQ ID NO: 1065678 - RNA, 22 nt, Human
cacugucuuuugugaagacaau

SEQ ID NO: 1065679 - RNA, 22 nt, Human
aacaaacauuaccuggugcugg

SEQ ID NO: 1065680 - RNA, 22 nt, Human
ucuaagaucuacuauacaugug

SEQ ID NO: 1065681 - RNA, 22 nt, Human
auuacugagcaacggucauuuc

SEQ ID NO: 1065682 - RNA, 22 nt, Human
cagaaaauagaguuucucugag

SEQ ID NO: 1065683 - RNA, 23 nt, Human
uggugccucagaagcagugggcu

SEQ ID NO: 1065684 - RNA, 22 nt, Human
gcagcaguggucuguagaagga

SEQ ID NO: 1065685 - RNA, 22 nt, Human
agaggaggcuggguccagauaa

SEQ ID NO: 1065686 - RNA, 22 nt, Human
ccugucucccuggcauggcuca

SEQ ID NO: 1065687 - RNA, 22 nt, Human
ugaaaacagaauccuuguuuuc

SEQ ID NO: 1065688 - RNA, 22 nt, Human
cugcucuguuucuuagcugggu

SEQ ID NO: 1065689 - RNA, 22 nt, Human
cugcucuccccaggccagucug

SEQ ID NO: 1065690 - RNA, 22 nt, Human
acaacaaaaucacuagucuucc

SEQ ID NO: 1065691 - RNA, 22 nt, Human
agggcacaucugcugggaaugg

SEQ ID NO: 1065692 - RNA, 22 nt, Human
guuccuauauagccuuaaggau

SEQ ID NO: 1065693 - RNA, 22 nt, Human
uucugcaggagcccuaguguau

SEQ ID NO: 1065694 - RNA, 22 nt, Human
uuuguuuucuguaggccuuucc

SEQ ID NO: 1065695 - RNA, 22 nt, Human
aaaacauucugugaacucucaa

SEQ ID NO: 1065696 - RNA, 23 nt, Human
ugcagcugccucuggcgggccgg

SEQ ID NO: 1065697 - RNA, 23 nt, Human
aggugcagcccuggaccugcccc

SEQ ID NO: 1065698 - RNA, 22 nt, Human
ugcagguggcagcggggcacca

SEQ ID NO: 1065699 - RNA, 22 nt, Human
uggcagagcccagaacugagca

SEQ ID NO: 1065700 - RNA, 22 nt, Human
guacagcuaagaauuucaucuu

SEQ ID NO: 1065701 - RNA, 22 nt, Human
auuuuguugagguaauugucaa

SEQ ID NO: 1065702 - RNA, 20 nt, Human
uuucaaguuguaagguauca

SEQ ID NO: 1065703 - RNA, 22 nt, Human
ugggccagcacugggugcucau

SEQ ID NO: 1065704 - RNA, 22 nt, Human
uugcucugacuggagugcagug

SEQ ID NO: 1065705 - RNA, 22 nt, Human
gggcaaaggcagaaagcggugu

SEQ ID NO: 1065706 - RNA, 22 nt, Human
uucuacauucauguauuaccuc

SEQ ID NO: 1065707 - RNA, 22 nt, Human
gagcugcagacauagauaagcg

SEQ ID NO: 1065708 - RNA, 22 nt, Human
uaaguuaguccuuuuuaaaagu

SEQ ID NO: 1065709 - RNA, 22 nt, Human
ugugauuuauugaaaagagcuu

SEQ ID NO: 1065710 - RNA, 22 nt, Human
ccugggcuuacgaccucugacu

SEQ ID NO: 1065711 - RNA, 22 nt, Human
uucacauuagugguucuauaua

SEQ ID NO: 1065712 - RNA, 22 nt, Human
ucccagagugugggcaucaagg

SEQ ID NO: 1065713 - RNA, 22 nt, Human
guggcagggcuuugcuguucuu

SEQ ID NO: 1065714 - RNA, 22 nt, Human
aaaugucaggugguggauggcu

SEQ ID NO: 1065715 - RNA, 22 nt, Human
aagauacacggucaacucucaa

SEQ ID NO: 1065716 - RNA, 22 nt, Human
agcugcugugugcucaggcagg

SEQ ID NO: 1065717 - RNA, 22 nt, Human
augcuguguccuagugaaagaa

SEQ ID NO: 1065718 - RNA, 22 nt, Human
uacugaaaguggucaacagugg

SEQ ID NO: 1065719 - RNA, 22 nt, Human
uccccacaucucugcaucaggc

SEQ ID NO: 1065720 - RNA, 22 nt, Human
caggaggcaucauggagcggac

SEQ ID NO: 1065721 - RNA, 22 nt, Human
uauuuggauagacagggagaug

SEQ ID NO: 1065722 - RNA, 22 nt, Human
ucucagagggaaaggccaauuu

SEQ ID NO: 1065723 - RNA, 22 nt, Human
aggaccaacauagcagcagugg

SEQ ID NO: 1065724 - RNA, 22 nt, Human
acagagcucccagccaucuccu

SEQ ID NO: 1065725 - RNA, 22 nt, Human
cuugcuuuguccagaaauucag

SEQ ID NO: 1065726 - RNA, 23 nt, Human
uucaagauacgguuuccaggcug

SEQ ID NO: 1065727 - RNA, 22 nt, Human
cagggccuccccggcagucuuu

SEQ ID NO: 1065728 - RNA, 22 nt, Human
gacauuuaauaguauuguggga

SEQ ID NO: 1065729 - RNA, 22 nt, Human
augucaaaucaguuuuaucaga

SEQ ID NO: 1065730 - RNA, 22 nt, Human
aaagaacuaaugugcaagguuu

SEQ ID NO: 1065731 - RNA, 22 nt, Human
ugccugggccucugaggaaggc

SEQ ID NO: 1065732 - RNA, 22 nt, Human
agaggaggcagcuuaacucagu

SEQ ID NO: 1065733 - RNA, 22 nt, Human
aagcauuuuaguaaugaacuug

SEQ ID NO: 1065734 - RNA, 22 nt, Human
ugcucagcugcucuguauucuu

SEQ ID NO: 1065735 - RNA, 22 nt, Human
agucagcagccuggccaggaga

SEQ ID NO: 1065736 - RNA, 22 nt, Human
agccuucauaaucuugggcuuu

SEQ ID NO: 1065737 - RNA, 22 nt, Human
guugggcugggagcugcccuga

SEQ ID NO: 1065738 - RNA, 22 nt, Human
gaacuuaacggcaacuauuuaa

SEQ ID NO: 1065739 - RNA, 22 nt, Human
agggagguccaucccugcagag

SEQ ID NO: 1065740 - RNA, 22 nt, Human
ugcugggcagugugcccucgag

SEQ ID NO: 1065741 - RNA, 22 nt, Human
uaaugcuuaacagcuggcuuuu

SEQ ID NO: 1065742 - RNA, 22 nt, Human
uuugugcagauguauauuugug

SEQ ID NO: 1065743 - RNA, 21 nt, Human
agcugccuccacuucugaggc

SEQ ID NO: 1065744 - RNA, 22 nt, Human
uccagccaacugccuagggagc

SEQ ID NO: 1065745 - RNA, 22 nt, Human
aauuucacagcuggucuauggg

SEQ ID NO: 1065746 - RNA, 22 nt, Human
gccauuaaugagaucaagaauc

SEQ ID NO: 1065747 - RNA, 19 nt, Human
ggaacucacuuagagaaac

SEQ ID NO: 1065748 - RNA, 20 nt, Human
cugccuggaggccucuaccu

SEQ ID NO: 1065749 - RNA, 22 nt, Human
gaaaccagcuagaggcagaggg

SEQ ID NO: 1065750 - RNA, 22 nt, Human
cugaagaagcugcagccuggag

SEQ ID NO: 1065751 - RNA, 22 nt, Human
gcuuucucuucacugauguuca

SEQ ID NO: 1065752 - RNA, 22 nt, Human
cacaguaacuggcguguaguaa

SEQ ID NO: 1065753 - RNA, 22 nt, Human
accaucaagaccuuaucuaguu

SEQ ID NO: 1065754 - RNA, 21 nt, Human
aaaaugugagcgugaugcuua

SEQ ID NO: 1065755 - RNA, 22 nt, Human
augaacuagccagguugugcug

SEQ ID NO: 1065756 - RNA, 22 nt, Human
uacauuccuguuagcaucuaag

SEQ ID NO: 1065757 - RNA, 19 nt, Human
gcccugcaggagguggggc

SEQ ID NO: 1065758 - RNA, 22 nt, Human
aggccugagguuccugugcuca

SEQ ID NO: 1065759 - RNA, 22 nt, Human
uauuuccagaggaguauagaag

SEQ ID NO: 1065760 - RNA, 22 nt, Human
uggcagggucuugcuguguugc

SEQ ID NO: 1065761 - RNA, 22 nt, Human
aguaacaaagaaagccuuugga

SEQ ID NO: 1065762 - RNA, 22 nt, Human
agcuguauucucuuuguauuaa

SEQ ID NO: 1065763 - RNA, 22 nt, Human
augucacagucugacucaguga

SEQ ID NO: 1065764 - RNA, 17 nt, Human
ucauuuguugugacuag

SEQ ID NO: 1065765 - RNA, 22 nt, Human
uucaauuuagugauguuguugg

SEQ ID NO: 1065766 - RNA, 23 nt, Human
ucauuucauccagccuugagagu

SEQ ID NO: 1065767 - RNA, 22 nt, Human
auaauuuaaauuaguaugugau

SEQ ID NO: 1065768 - RNA, 19 nt, Human
agaaguuagacauugcaau

SEQ ID NO: 1065769 - RNA, 22 nt, Human
uuccuuguuuguagcucuggga

SEQ ID NO: 1065770 - RNA, 22 nt, Human
uggcauuugcucccuuguguuc

SEQ ID NO: 1065771 - RNA, 22 nt, Human
uaaaggauaacuuucaagaauu

SEQ ID NO: 1065772 - RNA, 22 nt, Human
aaagauuugaguucugcuuaua

SEQ ID NO: 1065773 - RNA, 22 nt, Human
uuaauaaacaggugcagcugaa

SEQ ID NO: 1065774 - RNA, 22 nt, Human
gaggaagggcugccugccgggc

SEQ ID NO: 1065775 - RNA, 22 nt, Human
aggagcuggaaugguccuuuug

SEQ ID NO: 1065776 - RNA, 22 nt, Human
uauacagauaaugaagaccaag

SEQ ID NO: 1065777 - RNA, 22 nt, Human
uggcuucuuagaccaguggccu

SEQ ID NO: 1065778 - RNA, 22 nt, Human
uucacagggcagcagcugagcc

SEQ ID NO: 1065779 - RNA, 22 nt, Human
uguacagacuguauuuacaagu

SEQ ID NO: 1065780 - RNA, 22 nt, Human
uggagcaggaagucuauggcug

SEQ ID NO: 1065781 - RNA, 22 nt, Human
aaauuugucaacuucauauguu

SEQ ID NO: 1065782 - RNA, 22 nt, Human
gggguaggaagagaaaauagug

SEQ ID NO: 1065783 - RNA, 22 nt, Human
uugugccaugaacuguaugaag

SEQ ID NO: 1065784 - RNA, 22 nt, Human
aagccaguccucuacugggcac

SEQ ID NO: 1065785 - RNA, 22 nt, Human
ucucagaguuccucuggagucc

SEQ ID NO: 1065786 - RNA, 22 nt, Human
aaacacugauggauauuuuucc

SEQ ID NO: 1065787 - RNA, 22 nt, Human
aggaaaaugaaacagcaacugu

SEQ ID NO: 1065788 - RNA, 22 nt, Human
uguaugaaucucauuuguuuaa

SEQ ID NO: 1065789 - RNA, 22 nt, Human
aagcagaacugggaaguagugg

SEQ ID NO: 1065790 - RNA, 22 nt, Human
ugcaaauuugagcagacuguuc

SEQ ID NO: 1065791 - RNA, 22 nt, Human
ugcuaccuuuuuuauuaaauga

SEQ ID NO: 1065792 - RNA, 19 nt, Human
ggucucagugcagcugcag

SEQ ID NO: 1065793 - RNA, 22 nt, Human
gaacauuugaugaugacauugg

SEQ ID NO: 1065794 - RNA, 22 nt, Human
cuggacaggaagaauugggagc

SEQ ID NO: 1065795 - RNA, 23 nt, Human
ggccauggagacuuagaaugggc

SEQ ID NO: 1065796 - RNA, 22 nt, Human
guaaacauuuucaucugugccc

SEQ ID NO: 1065797 - RNA, 22 nt, Human
gaaacauuguguucuacagauu

SEQ ID NO: 1065798 - RNA, 23 nt, Human
agcccagcagagaaccuaggucc

SEQ ID NO: 1065799 - RNA, 22 nt, Human
acagauggagguuauuaugaac

SEQ ID NO: 1065800 - RNA, 22 nt, Human
cuuauuauaaaauccuguuuga

SEQ ID NO: 1065801 - RNA, 22 nt, Human
ggcuuucuagaucuagcucugu

SEQ ID NO: 1065802 - RNA, 22 nt, Human
agggccagggaaacgaucagca

SEQ ID NO: 1065803 - RNA, 22 nt, Human
ccagaugguccagagucuagcc

SEQ ID NO: 1065804 - RNA, 22 nt, Human
ugagcagagcaauaggacucuc

SEQ ID NO: 1065805 - RNA, 22 nt, Human
gauuaguaagaguuuaccuauu

SEQ ID NO: 1065806 - RNA, 22 nt, Human
cuuuggcagccucugcuauuga

SEQ ID NO: 1065807 - RNA, 22 nt, Human
ucuggcucaggagcuguguuca

SEQ ID NO: 1065808 - RNA, 22 nt, Human
agggggugcuacuuccagaguu

SEQ ID NO: 1065809 - RNA, 22 nt, Human
agagaauacaaagaagauaugu

SEQ ID NO: 1065810 - RNA, 22 nt, Human
gugggaugcaguggugaguggc

SEQ ID NO: 1065811 - RNA, 22 nt, Human
caaugaaaaugaggacuccugu

SEQ ID NO: 1065812 - RNA, 22 nt, Human
uccaaauaguucuggaagacug

SEQ ID NO: 1065813 - RNA, 22 nt, Human
ucacacaggguucuggucucau

SEQ ID NO: 1065814 - RNA, 22 nt, Human
ugaaguuauauauguugaaaau

SEQ ID NO: 1065815 - RNA, 22 nt, Human
gggagcucucccugaggccugg

SEQ ID NO: 1065816 - RNA, 22 nt, Human
aggggcuggaguucgagguuac

SEQ ID NO: 1065817 - RNA, 22 nt, Human
gcaggcuccaggccggccccuu

SEQ ID NO: 1065818 - RNA, 22 nt, Human
aggcuuuggggcauucuguguu

SEQ ID NO: 1065819 - RNA, 22 nt, Human
ggcagaggaggggugaauuugc

SEQ ID NO: 1065820 - RNA, 22 nt, Human
ugcugaaucaaaacaaagguuu

SEQ ID NO: 1065821 - RNA, 23 nt, Human
cugcuguuuucuguaccugaagc

SEQ ID NO: 1065822 - RNA, 20 nt, Human
gaauguuucacuugcuccau

SEQ ID NO: 1065823 - RNA, 22 nt, Human
aaagaagggacagacugccucu

SEQ ID NO: 1065824 - RNA, 22 nt, Human
gcacagaaguaaaauacaaguc

SEQ ID NO: 1065825 - RNA, 22 nt, Human
cucuggccagagccugcgggaa

SEQ ID NO: 1065826 - RNA, 22 nt, Human
cuucuuccaguuauaagagcuu

SEQ ID NO: 1065827 - RNA, 22 nt, Human
auugucuuuccacugagaaguu

SEQ ID NO: 1065828 - RNA, 22 nt, Human
ggaggccaucuggcuggaggcu

SEQ ID NO: 1065829 - RNA, 22 nt, Human
gccaggaaggcucccuggucac

SEQ ID NO: 1065830 - RNA, 22 nt, Human
ucugcagaaguggcugggccac

SEQ ID NO: 1065831 - RNA, 22 nt, Human
agugggggcuggcucugucugu

SEQ ID NO: 1065832 - RNA, 20 nt, Human
ucacacaugguaagcuauga

SEQ ID NO: 1065833 - RNA, 22 nt, Human
ggacccugggcuugcuccuggg

SEQ ID NO: 1065834 - RNA, 22 nt, Human
ccugggcucaccaugccuugga

SEQ ID NO: 1065835 - RNA, 22 nt, Human
acugaaggaaacuuuuguguuu

SEQ ID NO: 1065836 - RNA, 22 nt, Human
ucagacaggcuggacagcuugc

SEQ ID NO: 1065837 - RNA, 22 nt, Human
cacagauaccuagugaaacaua

SEQ ID NO: 1065838 - RNA, 22 nt, Human
cagugcugggcagaggagagcg

SEQ ID NO: 1065839 - RNA, 22 nt, Human
gcagugauaacuuuacucuuuu

SEQ ID NO: 1065840 - RNA, 22 nt, Human
cuuuggaaaagcauaccaagga

SEQ ID NO: 1065841 - RNA, 22 nt, Human
gagcagaacaggccggguggga

SEQ ID NO: 1065842 - RNA, 22 nt, Human
uuacauaacgguaugaaaaaug

SEQ ID NO: 1065843 - RNA, 21 nt, Human
gccucugcugucuuauuguga

SEQ ID NO: 1065844 - RNA, 22 nt, Human
caguggaaaucagagugagagu

SEQ ID NO: 1065845 - RNA, 22 nt, Human
ccuugcguuuuacagcuucuag

SEQ ID NO: 1065846 - RNA, 22 nt, Human
ucccugugagaaaugaagcagg

SEQ ID NO: 1065847 - RNA, 22 nt, Human
aaggaaccugagggaccccaaa

SEQ ID NO: 1065848 - RNA, 22 nt, Human
cuacaaaguaccacagacuggg

SEQ ID NO: 1065849 - RNA, 22 nt, Human
ugagaaauuacuucagugaugg

SEQ ID NO: 1065850 - RNA, 22 nt, Human
uggcagccacaucucguggauu

SEQ ID NO: 1065851 - RNA, 22 nt, Human
acaaaggcagccaaucaucugc

SEQ ID NO: 1065852 - RNA, 22 nt, Human
aaguccagugcuuuagauucca

SEQ ID NO: 1065853 - RNA, 22 nt, Human
uggcucuggggacaguaagucc

SEQ ID NO: 1065854 - RNA, 22 nt, Human
ugcaggugacaccacucuuccu

SEQ ID NO: 1065855 - RNA, 22 nt, Human
gccagcugguaggcaccuagcc

SEQ ID NO: 1065856 - RNA, 22 nt, Human
agaagugagugugacucagcag

SEQ ID NO: 1065857 - RNA, 22 nt, Human
aguggugucgugggaguggaag

SEQ ID NO: 1065858 - RNA, 23 nt, Human
aguacauucgaaaaauucuguga

SEQ ID NO: 1065859 - RNA, 22 nt, Human
uuaucacuuaugagcuuuuugc

SEQ ID NO: 1065860 - RNA, 22 nt, Human
uugcuuuugggaaaacaugccu

SEQ ID NO: 1065861 - RNA, 22 nt, Human
ugcugaguacucuccuguguag

SEQ ID NO: 1065862 - RNA, 22 nt, Human
cugaagccaugugcucacuggu

SEQ ID NO: 1065863 - RNA, 23 nt, Human
uuucucaaagaguggcagcuuca

SEQ ID NO: 1065864 - RNA, 22 nt, Human
acuuucaagcaagaacacuuug

SEQ ID NO: 1065865 - RNA, 22 nt, Human
agaaacaucauuguuugguauu

SEQ ID NO: 1065866 - RNA, 22 nt, Human
ccuggaugauccaugucaugga

SEQ ID NO: 1065867 - RNA, 22 nt, Human
gcucucagguacaaagcugugu

SEQ ID NO: 1065868 - RNA, 19 nt, Human
ugaaacaaacuuaaaagga

SEQ ID NO: 1065869 - RNA, 22 nt, Human
uggcucaggguccccaaauggu

SEQ ID NO: 1065870 - RNA, 22 nt, Human
caagcugggugcgggcaguaua

SEQ ID NO: 1065871 - RNA, 18 nt, Human
caaauucagugcuggaag

SEQ ID NO: 1065872 - RNA, 22 nt, Human
aacaugaugugaagcaugaacu

SEQ ID NO: 1065873 - RNA, 22 nt, Human
acauuugaaauaaacucaagug

SEQ ID NO: 1065874 - RNA, 22 nt, Human
cugccucuauaggaguccacca

SEQ ID NO: 1065875 - RNA, 22 nt, Human
aaaauuauggaguaucccaaag

SEQ ID NO: 1065876 - RNA, 22 nt, Human
gccuccugaagugcugggauua

SEQ ID NO: 1065877 - RNA, 22 nt, Human
uuuauucacuucagugccaaag

SEQ ID NO: 1065878 - RNA, 22 nt, Human
aauauuaauagaagggguucua

SEQ ID NO: 1065879 - RNA, 19 nt, Human
acauguuuugcagaacagc

SEQ ID NO: 1065880 - RNA, 22 nt, Human
cccaggagguggagcuugcagu

SEQ ID NO: 1065881 - RNA, 22 nt, Human
uugcagggaccugcagaaagcu

SEQ ID NO: 1065882 - RNA, 22 nt, Human
cccuuuccugaagaauauuuuu

SEQ ID NO: 1065883 - RNA, 22 nt, Human
cuggcccuguggaggcaggaac

SEQ ID NO: 1065884 - RNA, 22 nt, Human
cugagcgcaugguugcugggga

SEQ ID NO: 1065885 - RNA, 22 nt, Human
uccaagaagcuuacaaucuaau

SEQ ID NO: 1065886 - RNA, 22 nt, Human
uguaggacauguacuuguaaca

SEQ ID NO: 1065887 - RNA, 22 nt, Human
ggcaggugugagcuguaaagga

SEQ ID NO: 1065888 - RNA, 22 nt, Human
ucaaagcacacuuagugguaga

SEQ ID NO: 1065889 - RNA, 22 nt, Human
caaagacugcauaacacaugaa

SEQ ID NO: 1065890 - RNA, 22 nt, Human
ugggagcacucuuugggaagca

SEQ ID NO: 1065891 - RNA, 22 nt, Human
gaggcaggcccugaaugaguca

SEQ ID NO: 1065892 - RNA, 22 nt, Human
gaggggcucuugggcaugaagg

SEQ ID NO: 1065893 - RNA, 22 nt, Human
gguggccucucaugcaagguag

SEQ ID NO: 1065894 - RNA, 22 nt, Human
caaagucuucaguugauucuga

SEQ ID NO: 1065895 - RNA, 22 nt, Human
gccugccuuuguaugacccuga

SEQ ID NO: 1065896 - RNA, 22 nt, Human
gccuggcaggccucaugagggg

SEQ ID NO: 1065897 - RNA, 22 nt, Human
caggaaccugcuccaagaggca

SEQ ID NO: 1065898 - RNA, 22 nt, Human
gccuggaggaauguagcugagg

SEQ ID NO: 1065899 - RNA, 22 nt, Human
aaguuaggcuuaguugagauuu

SEQ ID NO: 1065900 - RNA, 22 nt, Human
acauuucagauucaugaaguga

SEQ ID NO: 1065901 - RNA, 19 nt, Human
ccagagcccgccagauggg

SEQ ID NO: 1065902 - RNA, 22 nt, Human
acugagaggaaauugagacuau

SEQ ID NO: 1065903 - RNA, 22 nt, Human
uuaauaaguaguaguuauuguu

SEQ ID NO: 1065904 - RNA, 22 nt, Human
agccuggaggccaggagacagu

SEQ ID NO: 1065905 - RNA, 22 nt, Human
ccugucaguugcugucagggau

SEQ ID NO: 1065906 - RNA, 22 nt, Human
agggcagagggugccucaccug

SEQ ID NO: 1065907 - RNA, 22 nt, Human
ucuggccacccgaggccccugc

SEQ ID NO: 1065908 - RNA, 22 nt, Human
uaaaauguagcuucuaggcugg

SEQ ID NO: 1065909 - RNA, 22 nt, Human
cagucucuugcuucauuaguug

SEQ ID NO: 1065910 - RNA, 22 nt, Human
ccagcagagucuaggaaggagg

SEQ ID NO: 1065911 - RNA, 22 nt, Human
aauauaacacagauggccuguu

SEQ ID NO: 1065912 - RNA, 22 nt, Human
auuuuuaggcucuacccucaga

SEQ ID NO: 1065913 - RNA, 21 nt, Human
cacuuuaaaaauaucuuuaua

SEQ ID NO: 1065914 - RNA, 22 nt, Human
uuggaaaaacacgauagugguu

SEQ ID NO: 1065915 - RNA, 22 nt, Human
ucucccaguggugcagaaagca

SEQ ID NO: 1065916 - RNA, 22 nt, Human
cccaggucugccagccuguggg

SEQ ID NO: 1065917 - RNA, 20 nt, Human
ugucauuguuucuaggaccu

SEQ ID NO: 1065918 - RNA, 22 nt, Human
gugggagcugcggaggccuggg

SEQ ID NO: 1065919 - RNA, 22 nt, Human
uugaaugauccuaucuagcaca

SEQ ID NO: 1065920 - RNA, 22 nt, Human
agggcuggaggguacuaguuua

SEQ ID NO: 1065921 - RNA, 22 nt, Human
agucuucagagaaauuaacucu

SEQ ID NO: 1065922 - RNA, 22 nt, Human
acaguguacuccuuuaccggag

SEQ ID NO: 1065923 - RNA, 22 nt, Human
acuuguguaacacagaaagaac

SEQ ID NO: 1065924 - RNA, 22 nt, Human
agcuguggaagacugucagggu

SEQ ID NO: 1065925 - RNA, 22 nt, Human
ggcugcuuuaucggcugcugaa

SEQ ID NO: 1065926 - RNA, 22 nt, Human
uccucugcucagcauuccucac

SEQ ID NO: 1065927 - RNA, 22 nt, Human
cccuggaguccuggcaguugau

SEQ ID NO: 1065928 - RNA, 22 nt, Human
ggcucaggacacagugguuuag

SEQ ID NO: 1065929 - RNA, 22 nt, Human
gugaggacugguaaggacugca

SEQ ID NO: 1065930 - RNA, 23 nt, Human
ccuggcugaccugaagguguagu

SEQ ID NO: 1065931 - RNA, 22 nt, Human
gucagagagggcacgugcacac

SEQ ID NO: 1065932 - RNA, 22 nt, Human
aacaguuugagcuuugaauuuc

SEQ ID NO: 1065933 - RNA, 22 nt, Human
ucugaaauaggcuucuuuuggu

SEQ ID NO: 1065934 - RNA, 22 nt, Human
cacugcauggaugauggcugua

SEQ ID NO: 1065935 - RNA, 22 nt, Human
uauuuggaaucugccuuaggac

SEQ ID NO: 1065936 - RNA, 22 nt, Human
ucucugagcgcauuccuccggc

SEQ ID NO: 1065937 - RNA, 22 nt, Human
cacucuccagcacaccccauuu

SEQ ID NO: 1065938 - RNA, 22 nt, Human
guucauucaucaaauauuuacu

SEQ ID NO: 1065939 - RNA, 22 nt, Human
ucucaguggcuuccucacuuuu

SEQ ID NO: 1065940 - RNA, 22 nt, Human
gugaagcauaugcuucucugcc

SEQ ID NO: 1065941 - RNA, 22 nt, Human
uaugaaaagguggccaauguag

SEQ ID NO: 1065942 - RNA, 22 nt, Human
aguuacaugacugccggcggug

SEQ ID NO: 1065943 - RNA, 23 nt, Human
gaggaaagaauauagaugcaauc

SEQ ID NO: 1065944 - RNA, 22 nt, Human
auaaguuugucuuuguaaagau

SEQ ID NO: 1065945 - RNA, 22 nt, Human
auggggagagaagggcugagcu

SEQ ID NO: 1065946 - RNA, 22 nt, Human
aggcagggaccaguuguuuucu

SEQ ID NO: 1065947 - RNA, 22 nt, Human
uugugcauuucucugagugugu

SEQ ID NO: 1065948 - RNA, 22 nt, Human
ugcagcuuaucucuuuggcagu

SEQ ID NO: 1065949 - RNA, 22 nt, Human
uauauucaacaggcuaauguca

SEQ ID NO: 1065950 - RNA, 22 nt, Human
cagcagaagugcauuugugauu

SEQ ID NO: 1065951 - RNA, 22 nt, Human
ucaguuaagaggccacggcagu

SEQ ID NO: 1065952 - RNA, 22 nt, Human
uagcaaaagccacgauuacuuu

SEQ ID NO: 1065953 - RNA, 18 nt, Human
cagaaaguuauuuacucu

SEQ ID NO: 1065954 - RNA, 22 nt, Human
augugagggaaaucagucagaa

SEQ ID NO: 1065955 - RNA, 22 nt, Human
auagaaacagaugcacuucucu

SEQ ID NO: 1065956 - RNA, 22 nt, Human
ccuccuuuccuguuuuccugag

SEQ ID NO: 1065957 - RNA, 17 nt, Human
ugcaggcuccugucccu

SEQ ID NO: 1065958 - RNA, 22 nt, Human
ugauuacacagcaguaauuuca

SEQ ID NO: 1065959 - RNA, 22 nt, Human
uuucacaaaugucuuuaacuug

SEQ ID NO: 1065960 - RNA, 22 nt, Human
acacaggggcucggcugggugc

SEQ ID NO: 1065961 - RNA, 22 nt, Human
uccagccuaauguucuucccac

SEQ ID NO: 1065962 - RNA, 22 nt, Human
uugcagagccaugaggcuggcu

SEQ ID NO: 1065963 - RNA, 22 nt, Human
cccaggucugugccagcucuga

SEQ ID NO: 1065964 - RNA, 20 nt, Human
aagcagaagcugcucucagc

SEQ ID NO: 1065965 - RNA, 22 nt, Human
gugucuggaacgggugguacuc

SEQ ID NO: 1065966 - RNA, 22 nt, Human
gcccauggaaaaccuguccucu

SEQ ID NO: 1065967 - RNA, 22 nt, Human
agcucuccacacauaggacuag

SEQ ID NO: 1065968 - RNA, 22 nt, Human
aaugaguucugguucauuuuau

SEQ ID NO: 1065969 - RNA, 22 nt, Human
uagcagaguagugccuccagau

SEQ ID NO: 1065970 - RNA, 22 nt, Human
ugggccaggucugcggucauuu

SEQ ID NO: 1065971 - RNA, 22 nt, Human
uucauucccaagaguaaacaua

SEQ ID NO: 1065972 - RNA, 22 nt, Human
uccuccucuaucagacagugcc

SEQ ID NO: 1065973 - RNA, 22 nt, Human
cucuguccacagguuugucccu

SEQ ID NO: 1065974 - RNA, 22 nt, Human
ucgugucagaucagagguuccu

SEQ ID NO: 1065975 - RNA, 22 nt, Human
auauuugcaggaaacuaguuuu

SEQ ID NO: 1065976 - RNA, 22 nt, Human
uuuuaaagagaugcugugcaua

SEQ ID NO: 1065977 - RNA, 22 nt, Human
uuucuagaggcuccaggggagu

SEQ ID NO: 1065978 - RNA, 19 nt, Human
agucccaggcccgaaagag

SEQ ID NO: 1065979 - RNA, 22 nt, Human
aacacuuuccugccuuucugau

SEQ ID NO: 1065980 - RNA, 22 nt, Human
auucuuuaauucaauugaagga

SEQ ID NO: 1065981 - RNA, 22 nt, Human
ggcagcugagcauggcuaccuu

SEQ ID NO: 1065982 - RNA, 22 nt, Human
ucucuguacaguacaugccgug

SEQ ID NO: 1065983 - RNA, 22 nt, Human
uugaggcugcacaguacaggcu

SEQ ID NO: 1065984 - RNA, 22 nt, Human
cacaaaugguuguagacauuaa

SEQ ID NO: 1065985 - RNA, 22 nt, Human
cugggagcugucaggagcgugu

SEQ ID NO: 1065986 - RNA, 22 nt, Human
gaauguuuuuaggaauguuaug

SEQ ID NO: 1065987 - RNA, 22 nt, Human
ucuggguuauuaugauggcuac

SEQ ID NO: 1065988 - RNA, 22 nt, Human
ugaaguuuucugguugauuaag

SEQ ID NO: 1065989 - RNA, 22 nt, Human
uucccaggcugugcuaccagag

SEQ ID NO: 1065990 - RNA, 22 nt, Human
gaaucucaaggcuugugaggau

SEQ ID NO: 1065991 - RNA, 22 nt, Human
ucuuaaaugacugauaagagga

SEQ ID NO: 1065992 - RNA, 22 nt, Human
ucugugaaaggaaagaacugac

SEQ ID NO: 1065993 - RNA, 22 nt, Human
auuuccaaucucugcauauggg

SEQ ID NO: 1065994 - RNA, 22 nt, Human
uuuccucugacugcuccccugc

SEQ ID NO: 1065995 - RNA, 22 nt, Human
aggagccaguuccaccccagga

SEQ ID NO: 1065996 - RNA, 22 nt, Human
ccagcauggcaccugagaugag

SEQ ID NO: 1065997 - RNA, 22 nt, Human
gggcagcagaggaucccuuaau

SEQ ID NO: 1065998 - RNA, 22 nt, Human
acacucuguaaugucacacucc

SEQ ID NO: 1065999 - RNA, 22 nt, Human
acuuccagauggccccaucuaa

SEQ ID NO: 1066000 - RNA, 22 nt, Human
uuucugaauuuacucaagguca

SEQ ID NO: 1066001 - RNA, 22 nt, Human
ucauacauucagcagauauuug

SEQ ID NO: 1066002 - RNA, 22 nt, Human
agcuggugcucaggggcaugga

SEQ ID NO: 1066003 - RNA, 22 nt, Human
aauauaugacuccacugcauga

SEQ ID NO: 1066004 - RNA, 22 nt, Human
acucagaguuugcguuccauac

SEQ ID NO: 1066005 - RNA, 22 nt, Human
aucaacauuccaaugugguaga

SEQ ID NO: 1066006 - RNA, 22 nt, Human
caauuucauggauaaaagaugu

SEQ ID NO: 1066007 - RNA, 18 nt, Human
ggguccugugggagacag

SEQ ID NO: 1066008 - RNA, 22 nt, Human
agggacuggcucucugagcagg

SEQ ID NO: 1066009 - RNA, 22 nt, Human
agcccagcagaaaguccagccu

SEQ ID NO: 1066010 - RNA, 22 nt, Human
ucugugacuugcgggaggagaa

SEQ ID NO: 1066011 - RNA, 22 nt, Human
ugagcccuaagggucaagcagg

SEQ ID NO: 1066012 - RNA, 22 nt, Human
uccuucagggggccgccugcac

SEQ ID NO: 1066013 - RNA, 22 nt, Human
guuugcauuuauuagucuucug

SEQ ID NO: 1066014 - RNA, 22 nt, Human
cuucucagaucucagcuuugag

SEQ ID NO: 1066015 - RNA, 19 nt, Human
ccugugagaggacaggugu

SEQ ID NO: 1066016 - RNA, 21 nt, Human
ucuuguccuugcucucccacu

SEQ ID NO: 1066017 - RNA, 22 nt, Human
ggcaggcuccguguuccauucc

SEQ ID NO: 1066018 - RNA, 22 nt, Human
cuguccuguagcuccaucaguc

SEQ ID NO: 1066019 - RNA, 21 nt, Human
acagcauguuuguguguuugc

SEQ ID NO: 1066020 - RNA, 22 nt, Human
gggaagccaugcucagagguac

SEQ ID NO: 1066021 - RNA, 22 nt, Human
acugagagcguguacaaacuua

SEQ ID NO: 1066022 - RNA, 22 nt, Human
aucuggcucaccuggguaaaua

SEQ ID NO: 1066023 - RNA, 22 nt, Human
augaaauguaaguagagaguuu

SEQ ID NO: 1066024 - RNA, 22 nt, Human
gacacagagggcaccagauaug

SEQ ID NO: 1066025 - RNA, 22 nt, Human
aguggcagagguugacugcagu

SEQ ID NO: 1066026 - RNA, 22 nt, Human
agcuuugggcagaagaggauuc

SEQ ID NO: 1066027 - RNA, 22 nt, Human
acugccaaugguaguuugaugg

SEQ ID NO: 1066028 - RNA, 21 nt, Human
ucccagagugcuugggacugc

SEQ ID NO: 1066029 - RNA, 22 nt, Human
gcucugcuggaaguucucugga

SEQ ID NO: 1066030 - RNA, 22 nt, Human
acacagaagcuuuuucuauucc

SEQ ID NO: 1066031 - RNA, 22 nt, Human
gcugcagcccugcggaucacuu

SEQ ID NO: 1066032 - RNA, 22 nt, Human
ggagaaagcuguaguggaaugu

SEQ ID NO: 1066033 - RNA, 22 nt, Human
gcuggccauggggagugaggag

SEQ ID NO: 1066034 - RNA, 19 nt, Human
ugcaagcuuuuucuuguua

SEQ ID NO: 1066035 - RNA, 22 nt, Human
aaaacaguuauaaacagaguca

SEQ ID NO: 1066036 - RNA, 22 nt, Human
caauuucagucucagagaguuc

SEQ ID NO: 1066037 - RNA, 22 nt, Human
ccagggcugguggcugcagagg

SEQ ID NO: 1066038 - RNA, 22 nt, Human
ugaaguuguuaagguugccauu

SEQ ID NO: 1066039 - RNA, 22 nt, Human
cugagccauccauaccagcuua

SEQ ID NO: 1066040 - RNA, 22 nt, Human
guucaaggaagggaggaaagcc

SEQ ID NO: 1066041 - RNA, 22 nt, Human
uggagcagccuuuucuaagcaa

SEQ ID NO: 1066042 - RNA, 22 nt, Human
ccucagggaaugggaggcuggg

SEQ ID NO: 1066043 - RNA, 20 nt, Human
cagccuccacucacucagcu

SEQ ID NO: 1066044 - RNA, 22 nt, Human
aggcucagaggugagcaucugc

SEQ ID NO: 1066045 - RNA, 22 nt, Human
ugcauuguuuagaacucuuugg

SEQ ID NO: 1066046 - RNA, 22 nt, Human
gcugccugucuguuucuuuuau

SEQ ID NO: 1066047 - RNA, 22 nt, Human
ucuggcucuguguccucaccca

SEQ ID NO: 1066048 - RNA, 22 nt, Human
aguguuucucagaagggccuau

SEQ ID NO: 1066049 - RNA, 22 nt, Human
gcaggagcagucaggggcagcu

SEQ ID NO: 1066050 - RNA, 22 nt, Human
gagcagcucgagaaggaagcag

SEQ ID NO: 1066051 - RNA, 21 nt, Human
uuugaaagcccuauguuuuca

SEQ ID NO: 1066052 - RNA, 19 nt, Human
gggaugggcccucacccuc

SEQ ID NO: 1066053 - RNA, 20 nt, Human
uacagaaugcaauaaaaugg

SEQ ID NO: 1066054 - RNA, 22 nt, Human
uaggcagagguaugguaaggac

SEQ ID NO: 1066055 - RNA, 22 nt, Human
aucuggcuugacuuugcgacuu

SEQ ID NO: 1066056 - RNA, 22 nt, Human
gccagugggacccgcugugggc

SEQ ID NO: 1066057 - RNA, 19 nt, Human
ggagaggcuggagggaugc

SEQ ID NO: 1066058 - RNA, 22 nt, Human
gagauauaaccuaaaggucacu

SEQ ID NO: 1066059 - RNA, 22 nt, Human
uguuucccuaaggucuggcucu

SEQ ID NO: 1066060 - RNA, 22 nt, Human
gcugugcuauaucucugagugu

SEQ ID NO: 1066061 - RNA, 22 nt, Human
gcagcagaggcccuacucuuug

SEQ ID NO: 1066062 - RNA, 22 nt, Human
guuuuguugcugcagagcucaa

SEQ ID NO: 1066063 - RNA, 22 nt, Human
uguauuaacauuaauaaaaugg

SEQ ID NO: 1066064 - RNA, 22 nt, Human
gcuggccucuacaggccggcca

SEQ ID NO: 1066065 - RNA, 22 nt, Human
acagucaggccgagaugggccu

SEQ ID NO: 1066066 - RNA, 22 nt, Human
agccugugacucugugaaacca

SEQ ID NO: 1066067 - RNA, 20 nt, Human
cuggcaggagcgagucuacc

SEQ ID NO: 1066068 - RNA, 21 nt, Human
gggcuggaggaugggaagccc

SEQ ID NO: 1066069 - RNA, 22 nt, Human
uggaaggagcuaaggaccuggg

SEQ ID NO: 1066070 - RNA, 23 nt, Human
gugcaugugucuuuacaguagca

SEQ ID NO: 1066071 - RNA, 22 nt, Human
caacacuucuuauacuuacuga

SEQ ID NO: 1066072 - RNA, 22 nt, Human
uugaauaggacucagcagugau

SEQ ID NO: 1066073 - RNA, 22 nt, Human
cacauguacagaagcaggcugg

SEQ ID NO: 1066074 - RNA, 22 nt, Human
ucuguauauauuaaugaaauuc

SEQ ID NO: 1066075 - RNA, 22 nt, Human
uauuccaacuucacuauugucu

SEQ ID NO: 1066076 - RNA, 22 nt, Human
aguuucauuucuuaguaccagu

SEQ ID NO: 1066077 - RNA, 22 nt, Human
acaaaaauuagcugggcauggu

SEQ ID NO: 1066078 - RNA, 22 nt, Human
caggaggcaguuucagaaguca

SEQ ID NO: 1066079 - RNA, 22 nt, Human
ugaacacaucugcgugugucuc

SEQ ID NO: 1066080 - RNA, 22 nt, Human
cacugaaaauuagcuuuccuga

SEQ ID NO: 1066081 - RNA, 22 nt, Human
aagcaacagaaacauucuaaua

SEQ ID NO: 1066082 - RNA, 20 nt, Human
gggcuagaccagggcagagg

SEQ ID NO: 1066083 - RNA, 22 nt, Human
aauaagaaagagucagcuucag

SEQ ID NO: 1066084 - RNA, 22 nt, Human
gggcugagauuggugcccuguc

SEQ ID NO: 1066085 - RNA, 22 nt, Human
ucucugucccuaggagccuugc

SEQ ID NO: 1066086 - RNA, 22 nt, Human
ggagaagauuggaauuaagcac

SEQ ID NO: 1066087 - RNA, 22 nt, Human
gccaagcuggaugaagagguug

SEQ ID NO: 1066088 - RNA, 22 nt, Human
uuuuucuugugcuggaucuaau

SEQ ID NO: 1066089 - RNA, 22 nt, Human
ucagucuucccuccagugcaac

SEQ ID NO: 1066090 - RNA, 22 nt, Human
agcugcugcgccucacccuggc

SEQ ID NO: 1066091 - RNA, 22 nt, Human
auuuacauuuauuugagaaggu

SEQ ID NO: 1066092 - RNA, 22 nt, Human
uucuguuuacucagaaauacaa

SEQ ID NO: 1066093 - RNA, 22 nt, Human
ucccagaacccugccagguccu

SEQ ID NO: 1066094 - RNA, 22 nt, Human
acaaagucaaauugcagccgcc

SEQ ID NO: 1066095 - RNA, 22 nt, Human
uuuguuuucaaugugucauuca

SEQ ID NO: 1066096 - RNA, 22 nt, Human
gagggcugauaacaggaauaca

SEQ ID NO: 1066097 - RNA, 22 nt, Human
cauuuucaugaguuucuguuca

SEQ ID NO: 1066098 - RNA, 22 nt, Human
cagggagaucuuggcuccuggu

SEQ ID NO: 1066099 - RNA, 22 nt, Human
agugcaaagggaucagauuggg

SEQ ID NO: 1066100 - RNA, 22 nt, Human
acuuccagcugcccugugugcu

SEQ ID NO: 1066101 - RNA, 22 nt, Human
aagucagacagcugagcugccu

SEQ ID NO: 1066102 - RNA, 20 nt, Human
acagauggcaguuauuacau

SEQ ID NO: 1066103 - RNA, 22 nt, Human
ugaggcaggaguucaggcugcg

SEQ ID NO: 1066104 - RNA, 22 nt, Human
aaugacuguagucauauuaagg

SEQ ID NO: 1066105 - RNA, 22 nt, Human
ucaggggcugugcauuucccag

SEQ ID NO: 1066106 - RNA, 22 nt, Human
aagcccagaugugagaacugag

SEQ ID NO: 1066107 - RNA, 22 nt, Human
uuacagaaaauguguuuuaacu

SEQ ID NO: 1066108 - RNA, 22 nt, Human
aauuucaccuaucacuuaagcc

SEQ ID NO: 1066109 - RNA, 22 nt, Human
uuuagaaugugacuguauuuga

SEQ ID NO: 1066110 - RNA, 22 nt, Human
accccagaggcggaggcugcag

SEQ ID NO: 1066111 - RNA, 22 nt, Human
uggugcucccuggaguugugca

SEQ ID NO: 1066112 - RNA, 22 nt, Human
caagcugcuauagguugcuggg

SEQ ID NO: 1066113 - RNA, 22 nt, Human
gcugccugggcuggcauuccca

SEQ ID NO: 1066114 - RNA, 22 nt, Human
aggacuucaucaccuguauaaa

SEQ ID NO: 1066115 - RNA, 22 nt, Human
uuucccuugaauaaagauaucu

SEQ ID NO: 1066116 - RNA, 22 nt, Human
ggccuguguccuccuugcccug

SEQ ID NO: 1066117 - RNA, 22 nt, Human
cagcauggcuugaguguuuccu

SEQ ID NO: 1066118 - RNA, 21 nt, Human
cugugcuuuuuaagugugaug

SEQ ID NO: 1066119 - RNA, 22 nt, Human
ugggagugauacaguauggaau

SEQ ID NO: 1066120 - RNA, 22 nt, Human
accaggacuuuguauucagcuu

SEQ ID NO: 1066121 - RNA, 22 nt, Human
ucagaauuuucuggaauggagc

SEQ ID NO: 1066122 - RNA, 22 nt, Human
gcagugaacauaacacagaagg

SEQ ID NO: 1066123 - RNA, 22 nt, Human
gcugccugccugcauuuaaucc

SEQ ID NO: 1066124 - RNA, 22 nt, Human
aucuuccuucacuuucucccac

SEQ ID NO: 1066125 - RNA, 22 nt, Human
aagaacugugcuccaggcucca

SEQ ID NO: 1066126 - RNA, 20 nt, Human
ccacauuuuacuguuugcca

SEQ ID NO: 1066127 - RNA, 22 nt, Human
ccagaaaagcaucugguucuuu

SEQ ID NO: 1066128 - RNA, 22 nt, Human
agccagcaggugcagaauucca

SEQ ID NO: 1066129 - RNA, 22 nt, Human
cugcagcuuucgcuccaucagc

SEQ ID NO: 1066130 - RNA, 22 nt, Human
cugccugaagaauuguguugca

SEQ ID NO: 1066131 - RNA, 22 nt, Human
ucugacuucuucauccuugcca

SEQ ID NO: 1066132 - RNA, 23 nt, Human
acacugucucauggauagacugc

SEQ ID NO: 1066133 - RNA, 22 nt, Human
guggguggaucaccugagguca

SEQ ID NO: 1066134 - RNA, 19 nt, Human
ugaggggcucacagucuca

SEQ ID NO: 1066135 - RNA, 22 nt, Human
uuuccucuuugugacacagcug

SEQ ID NO: 1066136 - RNA, 22 nt, Human
uuagaaguaaggucagauuucu

SEQ ID NO: 1066137 - RNA, 22 nt, Human
caggaacagaguggcauugucu

SEQ ID NO: 1066138 - RNA, 17 nt, Human
uuccuccucaccauguu

SEQ ID NO: 1066139 - RNA, 22 nt, Human
gaacccaguccaggugcagccu

SEQ ID NO: 1066140 - RNA, 22 nt, Human
caggcugggcuccggagauaaa

SEQ ID NO: 1066141 - RNA, 22 nt, Human
cucugcaugccuugcucagaca

SEQ ID NO: 1066142 - RNA, 22 nt, Human
agggcugcaucugccuggugaa

SEQ ID NO: 1066143 - RNA, 22 nt, Human
auucacacacauuuagagcaga

SEQ ID NO: 1066144 - RNA, 22 nt, Human
cuggcaggaaggcauuuagaca

SEQ ID NO: 1066145 - RNA, 22 nt, Human
ccugggaacagcagaguccugg

SEQ ID NO: 1066146 - RNA, 22 nt, Human
cugaagaggacgcagcagcaag

SEQ ID NO: 1066147 - RNA, 22 nt, Human
cagagaacuuagcuaguuuucc

SEQ ID NO: 1066148 - RNA, 22 nt, Human
ugagccaggaguuugaggcugu

SEQ ID NO: 1066149 - RNA, 22 nt, Human
uugcaacucuugaaaagcauug

SEQ ID NO: 1066150 - RNA, 23 nt, Human
aaauagagauaggccagcuuugc

SEQ ID NO: 1066151 - RNA, 22 nt, Human
gcagguguggaguggggugagc

SEQ ID NO: 1066152 - RNA, 22 nt, Human
ccaggcugccgaggaaagaaag

SEQ ID NO: 1066153 - RNA, 22 nt, Human
cugagacuuucaugugcuuuua

SEQ ID NO: 1066154 - RNA, 22 nt, Human
aaggaaccuggaguagagggag

SEQ ID NO: 1066155 - RNA, 22 nt, Human
acugagagucuuagaaacacau

SEQ ID NO: 1066156 - RNA, 22 nt, Human
cauguaaagcacuucauaacag

SEQ ID NO: 1066157 - RNA, 22 nt, Human
ugaagcaguucucagaaguggg

SEQ ID NO: 1066158 - RNA, 22 nt, Human
caggccagugugcuucccaggc

SEQ ID NO: 1066159 - RNA, 22 nt, Human
cugguucaugguggaaugacau

SEQ ID NO: 1066160 - RNA, 22 nt, Human
cuguaaaaugaaccuagucauc

SEQ ID NO: 1066161 - RNA, 22 nt, Human
uuucaaguguccugauuaaugg

SEQ ID NO: 1066162 - RNA, 22 nt, Human
uuuacugaacugcuaguacagg

SEQ ID NO: 1066163 - RNA, 22 nt, Human
cuggcucauagagcagcuccaa

SEQ ID NO: 1066164 - RNA, 22 nt, Human
gcucugcugaagccccuugcau

SEQ ID NO: 1066165 - RNA, 22 nt, Human
caaagggcucuagacucagcag

SEQ ID NO: 1066166 - RNA, 22 nt, Human
augaggcaaggcuggccguguu

SEQ ID NO: 1066167 - RNA, 22 nt, Human
gugguuuucuccaacccagaac

SEQ ID NO: 1066168 - RNA, 22 nt, Human
aaguguuuggggaucauuuuaa

SEQ ID NO: 1066169 - RNA, 21 nt, Human
gucaggcccauagcagugccu

SEQ ID NO: 1066170 - RNA, 20 nt, Human
caaaagcaaugaaguuauga

SEQ ID NO: 1066171 - RNA, 22 nt, Human
ccaggcuccgcauagaccccac

SEQ ID NO: 1066172 - RNA, 22 nt, Human
gcuccucuccucggagucgggg

SEQ ID NO: 1066173 - RNA, 22 nt, Human
cagugaaguuuaaaguguagau

SEQ ID NO: 1066174 - RNA, 22 nt, Human
acagaaauaacuuuuuauguuu

SEQ ID NO: 1066175 - RNA, 21 nt, Human
ggcaggugggucucuguugcu

SEQ ID NO: 1066176 - RNA, 22 nt, Human
auacaaaauauauacuggagac

SEQ ID NO: 1066177 - RNA, 22 nt, Human
gggcccugaucugugagcgcag

SEQ ID NO: 1066178 - RNA, 22 nt, Human
auacacaucuauuuaagagaca

SEQ ID NO: 1066179 - RNA, 22 nt, Human
aacuguugcuuguaauaugugc

SEQ ID NO: 1066180 - RNA, 22 nt, Human
ugccagucagugguuuaaaagu

SEQ ID NO: 1066181 - RNA, 22 nt, Human
gcccuggccuggcgcguuguca

SEQ ID NO: 1066182 - RNA, 22 nt, Human
aaguccaugaucaagauguggc

SEQ ID NO: 1066183 - RNA, 22 nt, Human
ucccagagucuucuccuguaau

SEQ ID NO: 1066184 - RNA, 22 nt, Human
cuuccaguaguaucauucucau

SEQ ID NO: 1066185 - RNA, 22 nt, Human
ucacagaagguggccauagcug

SEQ ID NO: 1066186 - RNA, 22 nt, Human
uuccaaugacuaguggcauccu

SEQ ID NO: 1066187 - RNA, 21 nt, Human
ccacauucucauucugacugc

SEQ ID NO: 1066188 - RNA, 22 nt, Human
uacacuauuuuacugauacaaa

SEQ ID NO: 1066189 - RNA, 22 nt, Human
aaguaaaacacacaguccaccg

SEQ ID NO: 1066190 - RNA, 22 nt, Human
cagagcagaaaccugggugauu

SEQ ID NO: 1066191 - RNA, 22 nt, Human
uggagcccagggugagaaggag

SEQ ID NO: 1066192 - RNA, 22 nt, Human
cugggccuagaggaagcugaca

SEQ ID NO: 1066193 - RNA, 22 nt, Human
aggaauucaagaccagcugggc

SEQ ID NO: 1066194 - RNA, 22 nt, Human
ccagaagggcuauugcagugac

SEQ ID NO: 1066195 - RNA, 22 nt, Human
cucaggccaauaagcuccagcc

SEQ ID NO: 1066196 - RNA, 19 nt, Human
uucagaauugggaggugau

SEQ ID NO: 1066197 - RNA, 22 nt, Human
ggagggguggucaccuggcagg

SEQ ID NO: 1066198 - RNA, 22 nt, Human
cacacauuucagaugcuacaau

SEQ ID NO: 1066199 - RNA, 20 nt, Human
ccuccuggucaggugugcag

SEQ ID NO: 1066200 - RNA, 22 nt, Human
acacuucaaaugguuggaaaau

SEQ ID NO: 1066201 - RNA, 22 nt, Human
ccacagggcucuaggcgcuucc

SEQ ID NO: 1066202 - RNA, 21 nt, Human
ucuggcaggcacgggcccagc

SEQ ID NO: 1066203 - RNA, 22 nt, Human
ccagucccgcaugguccagaau

SEQ ID NO: 1066204 - RNA, 19 nt, Human
gcaggcaguggcauucgga

SEQ ID NO: 1066205 - RNA, 22 nt, Human
cugcucugcagcuuggacuccc

SEQ ID NO: 1066206 - RNA, 22 nt, Human
guggcagggugcucaucaugca

SEQ ID NO: 1066207 - RNA, 22 nt, Human
ucugaaauaggaaagcaaaugg

SEQ ID NO: 1066208 - RNA, 22 nt, Human
caguccuugcucugggaugaug

SEQ ID NO: 1066209 - RNA, 22 nt, Human
uaagaaucgauguuuauuuaga

SEQ ID NO: 1066210 - RNA, 22 nt, Human
aaauguacugauacuuauuuua

SEQ ID NO: 1066211 - RNA, 22 nt, Human
ggcaggcuugguggcaccgguu

SEQ ID NO: 1066212 - RNA, 22 nt, Human
ggcugcucugcacaggggcugg

SEQ ID NO: 1066213 - RNA, 20 nt, Human
ggggcaguggcucaugccug

SEQ ID NO: 1066214 - RNA, 22 nt, Human
ugcucagggacaauggagaggg

SEQ ID NO: 1066215 - RNA, 22 nt, Human
auuuuagagcuccaaguacagc

SEQ ID NO: 1066216 - RNA, 22 nt, Human
gcagggccuuagcagcggcugc

SEQ ID NO: 1066217 - RNA, 22 nt, Human
cuggagccacugggucuuguau

SEQ ID NO: 1066218 - RNA, 22 nt, Human
gguggccaggccagcucuggcc

SEQ ID NO: 1066219 - RNA, 19 nt, Human
cagcugccuuuucuuugca

SEQ ID NO: 1066220 - RNA, 22 nt, Human
agcugcuacugcucugccagag

SEQ ID NO: 1066221 - RNA, 22 nt, Human
guggcugcuacagagcuggagg

SEQ ID NO: 1066222 - RNA, 22 nt, Human
ucucacagggcuaggcccugcc

SEQ ID NO: 1066223 - RNA, 22 nt, Human
caugaagcuugaagcaguccac

SEQ ID NO: 1066224 - RNA, 18 nt, Human
caauguuuuagaucucua

SEQ ID NO: 1066225 - RNA, 22 nt, Human
uauuugaagauucuucugaugu

SEQ ID NO: 1066226 - RNA, 20 nt, Human
acaguggaaauugaugucug

SEQ ID NO: 1066227 - RNA, 22 nt, Human
ggagacaguauggcuuguagcu

SEQ ID NO: 1066228 - RNA, 22 nt, Human
acagauggugagccgcugaugu

SEQ ID NO: 1066229 - RNA, 22 nt, Human
ucacagaaggcaucacagaaga

SEQ ID NO: 1066230 - RNA, 22 nt, Human
cauuugaaauucuuagaacaaa

SEQ ID NO: 1066231 - RNA, 22 nt, Human
acauucuauagcaagcugaucu

SEQ ID NO: 1066232 - RNA, 22 nt, Human
agggauguaaauucuucuucuu

SEQ ID NO: 1066233 - RNA, 22 nt, Human
ccaccagcuucagcagccgcgg

SEQ ID NO: 1066234 - RNA, 22 nt, Human
agcugcaggccucuccugggga

SEQ ID NO: 1066235 - RNA, 22 nt, Human
cucugaggaagucaaguagcca

SEQ ID NO: 1066236 - RNA, 22 nt, Human
gugggcuuguuuugaugagauc

SEQ ID NO: 1066237 - RNA, 22 nt, Human
ccagcccugccagagagagcug

SEQ ID NO: 1066238 - RNA, 22 nt, Human
cugucuccagggcaggugcagg

SEQ ID NO: 1066239 - RNA, 22 nt, Human
cuacagacccaccuuggaagaa

SEQ ID NO: 1066240 - RNA, 22 nt, Human
gcagacaggggcuuaggaaagg

SEQ ID NO: 1066241 - RNA, 22 nt, Human
uucaggauggaguaccuuuuau

SEQ ID NO: 1066242 - RNA, 22 nt, Human
aaacaugcuggauuuagaauau

SEQ ID NO: 1066243 - RNA, 22 nt, Human
gaugcugagagguggagggaac

SEQ ID NO: 1066244 - RNA, 22 nt, Human
gccugcagaacugugaggcaau

SEQ ID NO: 1066245 - RNA, 22 nt, Human
ugcugucaguuggcaggaugag

SEQ ID NO: 1066246 - RNA, 22 nt, Human
cgaaaucagcaucuugaggcaa

SEQ ID NO: 1066247 - RNA, 22 nt, Human
ucagaggagaaguugggaaaau

SEQ ID NO: 1066248 - RNA, 22 nt, Human
ugacagaaauaguucuuaauuu

SEQ ID NO: 1066249 - RNA, 22 nt, Human
cgcagggccgcgagcgggacca

SEQ ID NO: 1066250 - RNA, 22 nt, Human
ugugaaauugagaaacuuucac

SEQ ID NO: 1066251 - RNA, 22 nt, Human
gccagcuggaaaucugcuugaa

SEQ ID NO: 1066252 - RNA, 22 nt, Human
caugugacaggagcagcucuaa

SEQ ID NO: 1066253 - RNA, 22 nt, Human
uuccuaaaagaauacacuggau

SEQ ID NO: 1066254 - RNA, 18 nt, Human
gcagugaagaaagagcuu

SEQ ID NO: 1066255 - RNA, 22 nt, Human
acccaggguagagugcaguggc

SEQ ID NO: 1066256 - RNA, 22 nt, Human
ugaggccucuugguauggugug

SEQ ID NO: 1066257 - RNA, 22 nt, Human
caggagacaguguuauuuuauu

SEQ ID NO: 1066258 - RNA, 22 nt, Human
gagcaggaacagaucccuugga

SEQ ID NO: 1066259 - RNA, 22 nt, Human
ucuucauguauuugacaaccau

SEQ ID NO: 1066260 - RNA, 22 nt, Human
ccugcugguuuuuacaaagaug

SEQ ID NO: 1066261 - RNA, 22 nt, Human
auguuaagaaugcagacaaaug

SEQ ID NO: 1066262 - RNA, 22 nt, Human
cgaaaauagaucuguuucccag

SEQ ID NO: 1066263 - RNA, 22 nt, Human
gcaaagucugcaucuggaucag

SEQ ID NO: 1066264 - RNA, 22 nt, Human
ugcccugcagacccugcagugu

SEQ ID NO: 1066265 - RNA, 22 nt, Human
aggcugagauagguggaucauu

SEQ ID NO: 1066266 - RNA, 17 nt, Human
ggugagaccucccacuc

SEQ ID NO: 1066267 - RNA, 22 nt, Human
cauuucaaacaguuacagcugc

SEQ ID NO: 1066268 - RNA, 22 nt, Human
cagugcaguggcugagcuggag

SEQ ID NO: 1066269 - RNA, 22 nt, Human
ggugcucaagagggcauccucu

SEQ ID NO: 1066270 - RNA, 22 nt, Human
uccugggaagcgccggccugcg

SEQ ID NO: 1066271 - RNA, 22 nt, Human
cacaaaauaucaagcacuuuua

SEQ ID NO: 1066272 - RNA, 22 nt, Human
auucuaaaucagagagcucugu

SEQ ID NO: 1066273 - RNA, 22 nt, Human
ggcaccuggauguagcagugaa

SEQ ID NO: 1066274 - RNA, 22 nt, Human
acuacuuugggccauuuguuua

SEQ ID NO: 1066275 - RNA, 22 nt, Human
ucugccuguaccucuuuuuugc

SEQ ID NO: 1066276 - RNA, 22 nt, Human
gagccagccuucuucugagguc

SEQ ID NO: 1066277 - RNA, 22 nt, Human
ccagcugucacucagaaaggcc

SEQ ID NO: 1066278 - RNA, 17 nt, Human
ucagcaaagacaaagga

SEQ ID NO: 1066279 - RNA, 22 nt, Human
gcugagagaaaagugagguucu

SEQ ID NO: 1066280 - RNA, 22 nt, Human
cagucacauggaugauggauag

SEQ ID NO: 1066281 - RNA, 22 nt, Human
acauucuugaagugaaguuuau

SEQ ID NO: 1066282 - RNA, 22 nt, Human
caaagucauaaaacuuguaagu

SEQ ID NO: 1066283 - RNA, 22 nt, Human
caggccugcuucuuacccuuca

SEQ ID NO: 1066284 - RNA, 22 nt, Human
uaacacaugguuaguacacaau

SEQ ID NO: 1066285 - RNA, 22 nt, Human
augaaaauguacauguguauaa

SEQ ID NO: 1066286 - RNA, 22 nt, Human
gaggcugugugucccucuggac

SEQ ID NO: 1066287 - RNA, 22 nt, Human
auccuucaaggggcugacagcu

SEQ ID NO: 1066288 - RNA, 22 nt, Human
ucuuuccacauucucuguuuag

SEQ ID NO: 1066289 - RNA, 22 nt, Human
uucaaagugcuguucaaaguag

SEQ ID NO: 1066290 - RNA, 18 nt, Human
uggcagagugucuguucu

SEQ ID NO: 1066291 - RNA, 22 nt, Human
cuuuacuucucaaaauaaagca

SEQ ID NO: 1066292 - RNA, 22 nt, Human
cuguauaucaugguuuugcagu

SEQ ID NO: 1066293 - RNA, 22 nt, Human
ucaggggacuuaggagagaagu

SEQ ID NO: 1066294 - RNA, 22 nt, Human
agaguuggagaaauuaaaauuu

SEQ ID NO: 1066295 - RNA, 22 nt, Human
aaauacaguguguguucuuuga

SEQ ID NO: 1066296 - RNA, 22 nt, Human
uuuguauaagaacauucuagca

SEQ ID NO: 1066297 - RNA, 19 nt, Human
uugaggggccaggggagau

SEQ ID NO: 1066298 - RNA, 22 nt, Human
cuccuggaagcccgcccugcug

SEQ ID NO: 1066299 - RNA, 22 nt, Human
accuuucacgguaucagacauc

SEQ ID NO: 1066300 - RNA, 22 nt, Human
aacaucuuguacugcacauuuu

SEQ ID NO: 1066301 - RNA, 22 nt, Human
gcaggccaggcuaggggcuguc

SEQ ID NO: 1066302 - RNA, 22 nt, Human
ccucaggggcuuuucguuguug

SEQ ID NO: 1066303 - RNA, 18 nt, Human
uaacaauccugagugucu

SEQ ID NO: 1066304 - RNA, 22 nt, Human
ugucacauaauuuaucuguagg

SEQ ID NO: 1066305 - RNA, 22 nt, Human
caguggcugugaccagggaccu

SEQ ID NO: 1066306 - RNA, 22 nt, Human
caggaggaggguacaccaucag

SEQ ID NO: 1066307 - RNA, 22 nt, Human
gccagcugaauuuccaacuguu

SEQ ID NO: 1066308 - RNA, 20 nt, Human
uguuccaagcuaaugaauga

SEQ ID NO: 1066309 - RNA, 22 nt, Human
ccugcucugguuuagucagucu

SEQ ID NO: 1066310 - RNA, 22 nt, Human
gccagcuggagacuggcagggg

SEQ ID NO: 1066311 - RNA, 22 nt, Human
caaaguaauauggucccaguga

SEQ ID NO: 1066312 - RNA, 22 nt, Human
ugacauuuaucaaagaaauggu

SEQ ID NO: 1066313 - RNA, 22 nt, Human
gcugggcuguaguuugcugacc

SEQ ID NO: 1066314 - RNA, 22 nt, Human
ggcagcugugaagugccucaca

SEQ ID NO: 1066315 - RNA, 23 nt, Human
ccacagagcugccaauuccugug

SEQ ID NO: 1066316 - RNA, 22 nt, Human
aggccugggacgggagccguga

SEQ ID NO: 1066317 - RNA, 21 nt, Human
ggcagccucuguggaagggga

SEQ ID NO: 1066318 - RNA, 22 nt, Human
agcaccugccugcauuggcuau

SEQ ID NO: 1066319 - RNA, 23 nt, Human
ugcucccaggugacgcugcuguu

SEQ ID NO: 1066320 - RNA, 22 nt, Human
auacaugugugugcauacaugu

SEQ ID NO: 1066321 - RNA, 22 nt, Human
guccuggcuuaguucgcuguaa

SEQ ID NO: 1066322 - RNA, 22 nt, Human
ugucucuugagcugccugaugc

SEQ ID NO: 1066323 - RNA, 22 nt, Human
gggaccugaggcccugcuccac

SEQ ID NO: 1066324 - RNA, 22 nt, Human
ucuaaagccuuccauauaacgc

SEQ ID NO: 1066325 - RNA, 22 nt, Human
agccuggagaggcgccauacac

SEQ ID NO: 1066326 - RNA, 22 nt, Human
aaacuguaaauacuaguaagug

SEQ ID NO: 1066327 - RNA, 22 nt, Human
cugguucauuagguauuagugg

SEQ ID NO: 1066328 - RNA, 22 nt, Human
ccagggcagaaaaagagggaau

SEQ ID NO: 1066329 - RNA, 22 nt, Human
aaauuccagcaacaccuuuuua

SEQ ID NO: 1066330 - RNA, 22 nt, Human
ccagccagccuugaucugagua

SEQ ID NO: 1066331 - RNA, 22 nt, Human
uacauucaacaugucacuaugu

SEQ ID NO: 1066332 - RNA, 22 nt, Human
ucagggcaaaagggaaaccauu

SEQ ID NO: 1066333 - RNA, 22 nt, Human
acuuuaaagcagaauggcuaug

SEQ ID NO: 1066334 - RNA, 22 nt, Human
gucagcagugucagcucugggg

SEQ ID NO: 1066335 - RNA, 19 nt, Human
uguuucuuccuccaucuga

SEQ ID NO: 1066336 - RNA, 18 nt, Human
cacaauuuacagaugaca

SEQ ID NO: 1066337 - RNA, 22 nt, Human
caggccucccggugcacacuga

SEQ ID NO: 1066338 - RNA, 22 nt, Human
uucuaagugauucuagcuggac

SEQ ID NO: 1066339 - RNA, 22 nt, Human
ggaggccaucagggagggcauu

SEQ ID NO: 1066340 - RNA, 22 nt, Human
aaauucuuuggccuacuuugaa

SEQ ID NO: 1066341 - RNA, 22 nt, Human
uuguaugaucaaaagaaaugua

SEQ ID NO: 1066342 - RNA, 22 nt, Human
agcaauaugacauugcuacauc

SEQ ID NO: 1066343 - RNA, 22 nt, Human
ugaaaucaucugccaauaaguu

SEQ ID NO: 1066344 - RNA, 22 nt, Human
gucucuggguuaagcagugcau

SEQ ID NO: 1066345 - RNA, 22 nt, Human
gccugcagggugaugggcugcc

SEQ ID NO: 1066346 - RNA, 22 nt, Human
uuccuguccgcaauggccuggg

SEQ ID NO: 1066347 - RNA, 22 nt, Human
cucagaagaacccaggguccca

SEQ ID NO: 1066348 - RNA, 22 nt, Human
ccccaggacacauggaccaagu

SEQ ID NO: 1066349 - RNA, 22 nt, Human
uuucugcucgcucucaaucagg

SEQ ID NO: 1066350 - RNA, 22 nt, Human
cugccagccaggccagguaggc

SEQ ID NO: 1066351 - RNA, 22 nt, Human
auaaaguagccacuggaaagcu

SEQ ID NO: 1066352 - RNA, 22 nt, Human
ugggcugccagcucuccagaug

SEQ ID NO: 1066353 - RNA, 22 nt, Human
agcccugcaggaggugggagag

SEQ ID NO: 1066354 - RNA, 22 nt, Human
ugaacuucagugcauaauuauc

SEQ ID NO: 1066355 - RNA, 22 nt, Human
ucuagaaacaugacauugaucu

SEQ ID NO: 1066356 - RNA, 22 nt, Human
cugugccaucuuuuugcuaccu

SEQ ID NO: 1066357 - RNA, 22 nt, Human
gcuggccacacugcugauggag

SEQ ID NO: 1066358 - RNA, 17 nt, Human
aucuggcugcuucuaga

SEQ ID NO: 1066359 - RNA, 21 nt, Human
ugggggugaggccuaggaauc

SEQ ID NO: 1066360 - RNA, 23 nt, Human
gcagagcugcccuauugccuugg

SEQ ID NO: 1066361 - RNA, 22 nt, Human
ugaccuauuagauuuccuugcc

SEQ ID NO: 1066362 - RNA, 22 nt, Human
augcuguggaaguuccugaagc

SEQ ID NO: 1066363 - RNA, 22 nt, Human
ucagaggacagcagcuaaauaa

SEQ ID NO: 1066364 - RNA, 22 nt, Human
ggggcacacuuuugguagauau

SEQ ID NO: 1066365 - RNA, 19 nt, Human
ugcaaucagcuacccaggu

SEQ ID NO: 1066366 - RNA, 20 nt, Human
cuucuucaguaguuuguucu

SEQ ID NO: 1066367 - RNA, 22 nt, Human
uguguccuucugggagucccag

SEQ ID NO: 1066368 - RNA, 22 nt, Human
ugcacacaguggacaagucuug

SEQ ID NO: 1066369 - RNA, 22 nt, Human
uggcagaggagaauuaagauua

SEQ ID NO: 1066370 - RNA, 22 nt, Human
agccacagcauguguguaugua

SEQ ID NO: 1066371 - RNA, 22 nt, Human
uucaacaucaagaaugcaugga

SEQ ID NO: 1066372 - RNA, 22 nt, Human
guauacaugugguaaaaugcac

SEQ ID NO: 1066373 - RNA, 22 nt, Human
gaagcagaacccacuccccaac

SEQ ID NO: 1066374 - RNA, 22 nt, Human
acuuggagagcauugcugggga

SEQ ID NO: 1066375 - RNA, 22 nt, Human
aaggcugaauucaaggguaggc

SEQ ID NO: 1066376 - RNA, 22 nt, Human
gggcugggaauggcuaaguaug

SEQ ID NO: 1066377 - RNA, 22 nt, Human
aagagcuggaugaagaaaucaa

SEQ ID NO: 1066378 - RNA, 22 nt, Human
ccagcuaggcuugcacucuugu

SEQ ID NO: 1066379 - RNA, 22 nt, Human
uuuuccucugagcuuugaauaa

SEQ ID NO: 1066380 - RNA, 22 nt, Human
cauaagaauauuuaguggcagc

SEQ ID NO: 1066381 - RNA, 22 nt, Human
uccagugguacauggagacacu

SEQ ID NO: 1066382 - RNA, 23 nt, Human
ugcugggcagagcuggugcugag

SEQ ID NO: 1066383 - RNA, 22 nt, Human
ugccugucuuuccucccucgua

SEQ ID NO: 1066384 - RNA, 22 nt, Human
ugcccugccaagacucaguggu

SEQ ID NO: 1066385 - RNA, 22 nt, Human
uaggaagagcuauaggucccca

SEQ ID NO: 1066386 - RNA, 19 nt, Human
agcagcuggagguggagug

SEQ ID NO: 1066387 - RNA, 22 nt, Human
uacuuugagaugaugcugaucg

SEQ ID NO: 1066388 - RNA, 22 nt, Human
ccacauacaaauggggugcugu

SEQ ID NO: 1066389 - RNA, 22 nt, Human
aaggugggguccugucaucuga

SEQ ID NO: 1066390 - RNA, 19 nt, Human
uuacaugacauaugaagga

SEQ ID NO: 1066391 - RNA, 22 nt, Human
uccagggacacagaguccuucu

SEQ ID NO: 1066392 - RNA, 22 nt, Human
aggcucaggucucaggucuggc

SEQ ID NO: 1066393 - RNA, 22 nt, Human
uggcucuggugcgggcuccugc

SEQ ID NO: 1066394 - RNA, 22 nt, Human
gcugcugggaaugaacaguguu

SEQ ID NO: 1066395 - RNA, 22 nt, Human
ucccagagauuuccucuccuuc

SEQ ID NO: 1066396 - RNA, 22 nt, Human
guccucugaaagaugaaccaug

SEQ ID NO: 1066397 - RNA, 22 nt, Human
ugcaaagaagccuuugccuucu

SEQ ID NO: 1066398 - RNA, 22 nt, Human
gcccuggugugcccagcauggg

SEQ ID NO: 1066399 - RNA, 22 nt, Human
ugcuucugauucaugguuauug

SEQ ID NO: 1066400 - RNA, 23 nt, Human
gcagacagagcagacuaagacaa

SEQ ID NO: 1066401 - RNA, 22 nt, Human
uuuuguguccuucacaucaugu

SEQ ID NO: 1066402 - RNA, 22 nt, Human
ucaguguagcagacuuguagcc

SEQ ID NO: 1066403 - RNA, 22 nt, Human
ggccucucagggcagagacccu

SEQ ID NO: 1066404 - RNA, 22 nt, Human
ugagccuguggggugacaacca

SEQ ID NO: 1066405 - RNA, 22 nt, Human
uccccacagcagaagaucugag

SEQ ID NO: 1066406 - RNA, 22 nt, Human
ggaggaagagguuguucucuca

SEQ ID NO: 1066407 - RNA, 22 nt, Human
gaggccugggagccuguccucc

SEQ ID NO: 1066408 - RNA, 22 nt, Human
ccagcucucaaggcucccuggg

SEQ ID NO: 1066409 - RNA, 21 nt, Human
aaguggagaagaaaagcugga

SEQ ID NO: 1066410 - RNA, 18 nt, Human
ucuggcucaggacugaac

SEQ ID NO: 1066411 - RNA, 22 nt, Human
uuuguuauaacaauaaaaaguc

SEQ ID NO: 1066412 - RNA, 18 nt, Human
caaagcucacguuccauc

SEQ ID NO: 1066413 - RNA, 22 nt, Human
caggcagcagccacucugguau

SEQ ID NO: 1066414 - RNA, 22 nt, Human
agaaauacuaggaauauucaua

SEQ ID NO: 1066415 - RNA, 22 nt, Human
acauuuaacccucagguuucug

SEQ ID NO: 1066416 - RNA, 22 nt, Human
aaacacaccuuuggaacuguga

SEQ ID NO: 1066417 - RNA, 22 nt, Human
ggugugguuugaagggagaugg

SEQ ID NO: 1066418 - RNA, 22 nt, Human
cagggccuggagcugggccugc

SEQ ID NO: 1066419 - RNA, 22 nt, Human
ugaaccacaugcaaagugaaua

SEQ ID NO: 1066420 - RNA, 22 nt, Human
cugcuguggugucaagcaucuc

SEQ ID NO: 1066421 - RNA, 21 nt, Human
uuaauuuauucaugauagcua

SEQ ID NO: 1066422 - RNA, 22 nt, Human
acugggcuagaguggaagcugg

SEQ ID NO: 1066423 - RNA, 22 nt, Human
uuucaagaacaacauucauuca

SEQ ID NO: 1066424 - RNA, 22 nt, Human
ugagaaugaggggguagaaggu

SEQ ID NO: 1066425 - RNA, 22 nt, Human
ccagaaagguaaacacuggauu

SEQ ID NO: 1066426 - RNA, 22 nt, Human
uggcugggggugcuauagcugc

SEQ ID NO: 1066427 - RNA, 22 nt, Human
gcagcacacgguggugcccugg

SEQ ID NO: 1066428 - RNA, 22 nt, Human
gcagggcaaacccagguguuca

SEQ ID NO: 1066429 - RNA, 19 nt, Human
uuucuuaggccuuuggccu

SEQ ID NO: 1066430 - RNA, 22 nt, Human
cccagggguucugagcagcagc

SEQ ID NO: 1066431 - RNA, 22 nt, Human
aauaugucucuggcuagacauu

SEQ ID NO: 1066432 - RNA, 22 nt, Human
caggaacauuuaaccacagggu

SEQ ID NO: 1066433 - RNA, 22 nt, Human
caggcacugugcugagcucugc

SEQ ID NO: 1066434 - RNA, 22 nt, Human
ucucaggaguagugggauccau

SEQ ID NO: 1066435 - RNA, 21 nt, Human
ccugcagcaccagaaggagau

SEQ ID NO: 1066436 - RNA, 22 nt, Human
gcagggagguuugcugaccugg

SEQ ID NO: 1066437 - RNA, 22 nt, Human
cauucugagcuaauaugcuuau

SEQ ID NO: 1066438 - RNA, 22 nt, Human
cagcugcagaucauguuuacag

SEQ ID NO: 1066439 - RNA, 22 nt, Human
cugcagaguggagccucggcug

SEQ ID NO: 1066440 - RNA, 19 nt, Human
cuuuucaagccaucaguuu

SEQ ID NO: 1066441 - RNA, 22 nt, Human
ugcauugcauuugucaugaaga

SEQ ID NO: 1066442 - RNA, 22 nt, Human
cagcucaugaccuuuguuaucu

SEQ ID NO: 1066443 - RNA, 22 nt, Human
agcugcugccucacuggucugu

SEQ ID NO: 1066444 - RNA, 21 nt, Human
gacacaaaggguaguaauggu

SEQ ID NO: 1066445 - RNA, 20 nt, Human
uggcuccucuuggcuguggc

SEQ ID NO: 1066446 - RNA, 22 nt, Human
ucuuccagagccuccaucccua

SEQ ID NO: 1066447 - RNA, 22 nt, Human
auauuauucuagcucuugugug

SEQ ID NO: 1066448 - RNA, 21 nt, Human
ugggagagggcucagcuaccc

SEQ ID NO: 1066449 - RNA, 22 nt, Human
cugccuggaaugccagcuucuc

SEQ ID NO: 1066450 - RNA, 22 nt, Human
cugggcuggcgcauccgacacg

SEQ ID NO: 1066451 - RNA, 22 nt, Human
cccugggcagucugcacuucag

SEQ ID NO: 1066452 - RNA, 22 nt, Human
acacuuaacuucugagaauaaa

SEQ ID NO: 1066453 - RNA, 22 nt, Human
caucagcucuucauucuugauu

SEQ ID NO: 1066454 - RNA, 22 nt, Human
ugccuguguccccuucuuggca

SEQ ID NO: 1066455 - RNA, 22 nt, Human
gggaagugagcuggaaucaagg

SEQ ID NO: 1066456 - RNA, 22 nt, Human
cugugcaguaggucagggcugg

SEQ ID NO: 1066457 - RNA, 17 nt, Human
cccagagaugcugccuu

SEQ ID NO: 1066458 - RNA, 22 nt, Human
cucuucagauauacaguacucu

SEQ ID NO: 1066459 - RNA, 22 nt, Human
uugauuuuuuucuacuaugcgc

SEQ ID NO: 1066460 - RNA, 22 nt, Human
caaacauagugaagcaaugaca

SEQ ID NO: 1066461 - RNA, 22 nt, Human
aacuucuggauguuucaaaugu

SEQ ID NO: 1066462 - RNA, 21 nt, Human
uaaauaauaaguugcugagau

SEQ ID NO: 1066463 - RNA, 22 nt, Human
agauguuuuggagacacuaacc

SEQ ID NO: 1066464 - RNA, 22 nt, Human
cagcucagucuugaagcacugg

SEQ ID NO: 1066465 - RNA, 22 nt, Human
aguauauuuguuaagauuauuc

SEQ ID NO: 1066466 - RNA, 22 nt, Human
ugcccacauggugccauggcca

SEQ ID NO: 1066467 - RNA, 22 nt, Human
ccacagggucagccacucugca

SEQ ID NO: 1066468 - RNA, 22 nt, Human
ucccucagagggcaagcgcaga

SEQ ID NO: 1066469 - RNA, 22 nt, Human
uaggccagcccuuaguccuguc

SEQ ID NO: 1066470 - RNA, 22 nt, Human
cuugagagccacuccuggggcc

SEQ ID NO: 1066471 - RNA, 18 nt, Human
ccuggagcuccacagcaa

SEQ ID NO: 1066472 - RNA, 22 nt, Human
ccagcucugcagggccuggggu

SEQ ID NO: 1066473 - RNA, 22 nt, Human
gagccuccuccuggugugccga

SEQ ID NO: 1066474 - RNA, 22 nt, Human
cuagggcacuaggacucaugug

SEQ ID NO: 1066475 - RNA, 22 nt, Human
gagaagggauauggcuucuuga

SEQ ID NO: 1066476 - RNA, 22 nt, Human
gccugcugccacccuggcuccg

SEQ ID NO: 1066477 - RNA, 22 nt, Human
guuccuaagcacugugcauucu

SEQ ID NO: 1066478 - RNA, 19 nt, Human
gcagccaccgcggcggccg

SEQ ID NO: 1066479 - RNA, 20 nt, Human
gcuuccagaggaggccccgu

SEQ ID NO: 1066480 - RNA, 22 nt, Human
agacaggcagaggcugcagagg

SEQ ID NO: 1066481 - RNA, 22 nt, Human
gccagguggcugagcagcugca

SEQ ID NO: 1066482 - RNA, 22 nt, Human
ugggccuggacaaggccacuag

SEQ ID NO: 1066483 - RNA, 22 nt, Human
guugggaagcagauggaugagc

SEQ ID NO: 1066484 - RNA, 22 nt, Human
cacauuuuuacugccaacuuaa

SEQ ID NO: 1066485 - RNA, 22 nt, Human
uccuggagggaggcggugcuac

SEQ ID NO: 1066486 - RNA, 23 nt, Human
uuucacauuaauguuuagcagga

SEQ ID NO: 1066487 - RNA, 22 nt, Human
uaggaagauaaacauuuguaug

SEQ ID NO: 1066488 - RNA, 22 nt, Human
gccugaggaaugcuccugacuu

SEQ ID NO: 1066489 - RNA, 22 nt, Human
cacugggcgccagcugcugagc

SEQ ID NO: 1066490 - RNA, 22 nt, Human
uauuccaaugucaguuauauca

SEQ ID NO: 1066491 - RNA, 22 nt, Human
acugcucucugcaaguagaugg

SEQ ID NO: 1066492 - RNA, 22 nt, Human
caccaggcugaaccagagggga

SEQ ID NO: 1066493 - RNA, 22 nt, Human
cuggcugcuggccugaggaugc

SEQ ID NO: 1066494 - RNA, 22 nt, Human
gcugggcucuuuaccccuguac

SEQ ID NO: 1066495 - RNA, 22 nt, Human
ugguggacaccgcagccaugaa

SEQ ID NO: 1066496 - RNA, 22 nt, Human
ugcaggcugcucaagacuuagu

SEQ ID NO: 1066497 - RNA, 22 nt, Human
uuguaacagcuguuuauauagu

SEQ ID NO: 1066498 - RNA, 22 nt, Human
gcucccacgcaauucuuuucag

SEQ ID NO: 1066499 - RNA, 22 nt, Human
ccugauggagcccugcugcaug

SEQ ID NO: 1066500 - RNA, 22 nt, Human
uccuuggcaugccgucuucucc

SEQ ID NO: 1066501 - RNA, 23 nt, Human
agguuacaguuguuaaguugcaa

SEQ ID NO: 1066502 - RNA, 22 nt, Human
uuuccuuaaaucuguuucuagu

SEQ ID NO: 1066503 - RNA, 21 nt, Human
ucugacuugaucuauucuccc

SEQ ID NO: 1066504 - RNA, 22 nt, Human
auuacagauagacuuugaagcu

SEQ ID NO: 1066505 - RNA, 22 nt, Human
ugcuucugcaacuugaauguac

SEQ ID NO: 1066506 - RNA, 22 nt, Human
gccugccugcugugugcaaguu

SEQ ID NO: 1066507 - RNA, 22 nt, Human
ugauuacauugguaauguuuau

SEQ ID NO: 1066508 - RNA, 22 nt, Human
ggcugcuggcauugagguaggu

SEQ ID NO: 1066509 - RNA, 22 nt, Human
uuggugaacacauacacauuuu

SEQ ID NO: 1066510 - RNA, 17 nt, Human
cucugcagugcauggcu

SEQ ID NO: 1066511 - RNA, 22 nt, Human
uuggaaagcaagcuggacauac

SEQ ID NO: 1066512 - RNA, 22 nt, Human
gcucaaggcaggcagacaugag

SEQ ID NO: 1066513 - RNA, 22 nt, Human
acuuucuaggucucaguccuuu

SEQ ID NO: 1066514 - RNA, 22 nt, Human
ggccucagaggaggugugaguc

SEQ ID NO: 1066515 - RNA, 22 nt, Human
caaggagauaaaauguugagcu

SEQ ID NO: 1066516 - RNA, 18 nt, Human
caaauucucauugauuuc

SEQ ID NO: 1066517 - RNA, 22 nt, Human
uggcuggagcauuccuugucuu

SEQ ID NO: 1066518 - RNA, 22 nt, Human
cugcugagcauuugcagggaca

SEQ ID NO: 1066519 - RNA, 22 nt, Human
aaaugucauauuuaaguaggaa

SEQ ID NO: 1066520 - RNA, 19 nt, Human
aaaucagaaucugcauuuu

SEQ ID NO: 1066521 - RNA, 22 nt, Human
auaggcuuuccugauucucagg

SEQ ID NO: 1066522 - RNA, 22 nt, Human
cuccucccucuuugccacacau

SEQ ID NO: 1066523 - RNA, 22 nt, Human
ucccagauuccugcucuuauau

SEQ ID NO: 1066524 - RNA, 22 nt, Human
agugcuguaacaacuuauuugg

SEQ ID NO: 1066525 - RNA, 22 nt, Human
uuugauuuucagcaauaguggc

SEQ ID NO: 1066526 - RNA, 22 nt, Human
cuuuucuuacucccgcaaggca

SEQ ID NO: 1066527 - RNA, 22 nt, Human
uccagggagauacuggcugcca

SEQ ID NO: 1066528 - RNA, 22 nt, Human
gucaggggccaugggccaagga

SEQ ID NO: 1066529 - RNA, 22 nt, Human
cuuauacacccucuucccaggc

SEQ ID NO: 1066530 - RNA, 17 nt, Human
gagaugcuaaucugauc

SEQ ID NO: 1066531 - RNA, 19 nt, Human
gagcugagaguagcacugg

SEQ ID NO: 1066532 - RNA, 20 nt, Human
cguaaggcaagugcugcauc

SEQ ID NO: 1066533 - RNA, 22 nt, Human
gacagggaggagcagagcuucu

SEQ ID NO: 1066534 - RNA, 22 nt, Human
acugccaggauggcacuagagg

SEQ ID NO: 1066535 - RNA, 22 nt, Human
agucaguuuuaccaaucucagu

SEQ ID NO: 1066536 - RNA, 22 nt, Human
caagcuggaguuccucagagug

SEQ ID NO: 1066537 - RNA, 22 nt, Human
gagugucugaauuagagcacaa

SEQ ID NO: 1066538 - RNA, 22 nt, Human
uuaauaaaguaugaauuggaaa

SEQ ID NO: 1066539 - RNA, 23 nt, Human
ucagucuucccugucaguaauag

SEQ ID NO: 1066540 - RNA, 22 nt, Human
aaggcagcaacuaauggaucuc

SEQ ID NO: 1066541 - RNA, 22 nt, Human
cagguggcaugacugccuacaa

SEQ ID NO: 1066542 - RNA, 22 nt, Human
uuugaaaggugucgagaugugu

SEQ ID NO: 1066543 - RNA, 22 nt, Human
ugggcuagauuuggugacccag

SEQ ID NO: 1066544 - RNA, 22 nt, Human
gcugccugugcgggucgcuagg

SEQ ID NO: 1066545 - RNA, 22 nt, Human
ggagaagaggagcuggaagccu

SEQ ID NO: 1066546 - RNA, 22 nt, Human
cagcccaggucucucuuccagu

SEQ ID NO: 1066547 - RNA, 22 nt, Human
ccuggcagguggagguugcagu

SEQ ID NO: 1066548 - RNA, 22 nt, Human
uggaauggaaacaaacugagga

SEQ ID NO: 1066549 - RNA, 22 nt, Human
ucauuuucacacauaaauagca

SEQ ID NO: 1066550 - RNA, 22 nt, Human
auaacuucagggcugugacaga

SEQ ID NO: 1066551 - RNA, 22 nt, Human
ucuuugauuuuguuacuaagac

SEQ ID NO: 1066552 - RNA, 22 nt, Human
aaggucauuuuuuccucuguug

SEQ ID NO: 1066553 - RNA, 22 nt, Human
uuucauuacguguuugacuugu

SEQ ID NO: 1066554 - RNA, 22 nt, Human
gugcuuaauacaugucaauaac

SEQ ID NO: 1066555 - RNA, 22 nt, Human
gaauaugaacuauuccuagccc

SEQ ID NO: 1066556 - RNA, 22 nt, Human
uuuacuuucucaaguauauagg

SEQ ID NO: 1066557 - RNA, 22 nt, Human
aacuagcuggauuaguguuuuc

SEQ ID NO: 1066558 - RNA, 22 nt, Human
agggcuagaguugagaugggga

SEQ ID NO: 1066559 - RNA, 22 nt, Human
uaagcauaacuaaaaaugauuu

SEQ ID NO: 1066560 - RNA, 22 nt, Human
ccccaugaaguagggucucuga

SEQ ID NO: 1066561 - RNA, 22 nt, Human
uacacaucacuguaucuuucag

SEQ ID NO: 1066562 - RNA, 22 nt, Human
ugaggccugaagccugaaguga

SEQ ID NO: 1066563 - RNA, 22 nt, Human
cuauucaauuuugcuauuguag

SEQ ID NO: 1066564 - RNA, 22 nt, Human
uagagcaguuggcagcuguauu

SEQ ID NO: 1066565 - RNA, 22 nt, Human
gaggccacgguuuuccuugggg

SEQ ID NO: 1066566 - RNA, 22 nt, Human
ccagagucugugugugucaucc

SEQ ID NO: 1066567 - RNA, 22 nt, Human
uuugacaaaauuaugcuaauau

SEQ ID NO: 1066568 - RNA, 22 nt, Human
uuaaagcaguuuguauacaugg

SEQ ID NO: 1066569 - RNA, 22 nt, Human
cccaggaaugagcaggcagggg

SEQ ID NO: 1066570 - RNA, 22 nt, Human
gacacagaccaccaggcccugg

SEQ ID NO: 1066571 - RNA, 22 nt, Human
ggcugccugggagcccuccucu

SEQ ID NO: 1066572 - RNA, 22 nt, Human
agcaccuucacaggcucucagg

SEQ ID NO: 1066573 - RNA, 22 nt, Human
acaguguauauuguuuaucugg

SEQ ID NO: 1066574 - RNA, 22 nt, Human
aggaggaggugggacacaguga

SEQ ID NO: 1066575 - RNA, 22 nt, Human
ucugaggcuaagagacagaggc

SEQ ID NO: 1066576 - RNA, 22 nt, Human
aaugcuuugacuauaucuauaa

SEQ ID NO: 1066577 - RNA, 22 nt, Human
cacugcuuuuuuggcuauguac

SEQ ID NO: 1066578 - RNA, 22 nt, Human
auuccugacugcuagucauuca

SEQ ID NO: 1066579 - RNA, 22 nt, Human
agguaggguuaauggagauaua

SEQ ID NO: 1066580 - RNA, 22 nt, Human
cuauuuggccagaagaggguca

SEQ ID NO: 1066581 - RNA, 22 nt, Human
acagagccaaaaggacauagua

SEQ ID NO: 1066582 - RNA, 22 nt, Human
ucagaagguggagguugcagug

SEQ ID NO: 1066583 - RNA, 22 nt, Human
cagaaacuguuuguuaauauuu

SEQ ID NO: 1066584 - RNA, 22 nt, Human
aauguuuuauagcucaagcaau

SEQ ID NO: 1066585 - RNA, 22 nt, Human
aguggcagcugucaugcccuag

SEQ ID NO: 1066586 - RNA, 22 nt, Human
aagcacaucucaaacuucaucu

SEQ ID NO: 1066587 - RNA, 22 nt, Human
ccaccccaaaugaagaccucuc

SEQ ID NO: 1066588 - RNA, 22 nt, Human
caauuuuuguacuuauaguacu

SEQ ID NO: 1066589 - RNA, 22 nt, Human
agcuuuaccugaaauuugaucc

SEQ ID NO: 1066590 - RNA, 22 nt, Human
cuggucagagcaacugcucaca

SEQ ID NO: 1066591 - RNA, 22 nt, Human
gaacucaacacaguauuuggua

SEQ ID NO: 1066592 - RNA, 22 nt, Human
uccugagauaaaucucauguga

SEQ ID NO: 1066593 - RNA, 22 nt, Human
gcuccugucaucaaacaauccu

SEQ ID NO: 1066594 - RNA, 22 nt, Human
cuguagaacgauccaggcauuu

SEQ ID NO: 1066595 - RNA, 22 nt, Human
gucucccacuuucuggccucuu

SEQ ID NO: 1066596 - RNA, 22 nt, Human
cagcagaagcaacauucaggcu

SEQ ID NO: 1066597 - RNA, 22 nt, Human
ccuuuucuaaucuuaagaaugu

SEQ ID NO: 1066598 - RNA, 22 nt, Human
agaccacagucaggcuccuggu

SEQ ID NO: 1066599 - RNA, 22 nt, Human
ugcuccaggcugcugaagaucu

SEQ ID NO: 1066600 - RNA, 22 nt, Human
guggcaguucugugucucuugu

SEQ ID NO: 1066601 - RNA, 19 nt, Human
uccccagcaccucugaguc

SEQ ID NO: 1066602 - RNA, 22 nt, Human
gugauucauccuggcauucauu

SEQ ID NO: 1066603 - RNA, 22 nt, Human
aaaaacacugggcugggaguca

SEQ ID NO: 1066604 - RNA, 22 nt, Human
aggcagccugguuugaauggaa

SEQ ID NO: 1066605 - RNA, 22 nt, Human
uaugaagaagacaaaugacacu

SEQ ID NO: 1066606 - RNA, 17 nt, Human
ugcauuguaggcuagcc

SEQ ID NO: 1066607 - RNA, 22 nt, Human
gaaggccacggaauggagcugg

SEQ ID NO: 1066608 - RNA, 22 nt, Human
aaagucugagcagaauuucuca

SEQ ID NO: 1066609 - RNA, 22 nt, Human
acaggugguaaaauggacuguc

SEQ ID NO: 1066610 - RNA, 22 nt, Human
ccugggugaaaucucuccugca

SEQ ID NO: 1066611 - RNA, 22 nt, Human
cccacaggcuagggguagggca

SEQ ID NO: 1066612 - RNA, 22 nt, Human
caauaauauccugugcuguuug

SEQ ID NO: 1066613 - RNA, 22 nt, Human
gugcuuucugcaugguuccuac

SEQ ID NO: 1066614 - RNA, 22 nt, Human
cucagggggaaucaggucacag

SEQ ID NO: 1066615 - RNA, 22 nt, Human
uccuggcuuuucuuggcucauc

SEQ ID NO: 1066616 - RNA, 22 nt, Human
ugacacauuaaaugcucacaaa

SEQ ID NO: 1066617 - RNA, 22 nt, Human
aaaugugucaguuucauucucu

SEQ ID NO: 1066618 - RNA, 22 nt, Human
agcuccugauacaugcaggaau

SEQ ID NO: 1066619 - RNA, 22 nt, Human
uguaugaaccuuuaauauagug

SEQ ID NO: 1066620 - RNA, 22 nt, Human
augauguaacauaaagaugucu

SEQ ID NO: 1066621 - RNA, 22 nt, Human
uccagaaacuuuuccagucuca

SEQ ID NO: 1066622 - RNA, 22 nt, Human
uccucuucuguggauucccuga

SEQ ID NO: 1066623 - RNA, 22 nt, Human
acaguuacucauagaagcacuu

SEQ ID NO: 1066624 - RNA, 22 nt, Human
uagaggugacacugagaccaua

SEQ ID NO: 1066625 - RNA, 22 nt, Human
gcucuguccagcgugcacagaa

SEQ ID NO: 1066626 - RNA, 22 nt, Human
agauaaaaugguucaaaggcua

SEQ ID NO: 1066627 - RNA, 22 nt, Human
gggccaguucuccgccucuuuu

SEQ ID NO: 1066628 - RNA, 22 nt, Human
gcucugagagugggugauucug

SEQ ID NO: 1066629 - RNA, 22 nt, Human
aaauacagauucugacucagag

SEQ ID NO: 1066630 - RNA, 22 nt, Human
ucucaguguuaucuaucugccu

SEQ ID NO: 1066631 - RNA, 22 nt, Human
ccaggguggcguagaugcuggg

SEQ ID NO: 1066632 - RNA, 22 nt, Human
ugaggcagcauucuucaagaca

SEQ ID NO: 1066633 - RNA, 22 nt, Human
uaugaauauaccacaauuuagg

SEQ ID NO: 1066634 - RNA, 22 nt, Human
ugggcagauuaaugcaguggcu

SEQ ID NO: 1066635 - RNA, 22 nt, Human
uggggugugagaaguagaggga

SEQ ID NO: 1066636 - RNA, 22 nt, Human
aggccucacucucagagcuucu

SEQ ID NO: 1066637 - RNA, 22 nt, Human
cagggcuggcucaugaaaaguu

SEQ ID NO: 1066638 - RNA, 22 nt, Human
cuucacagccaacaugggcaca

SEQ ID NO: 1066639 - RNA, 22 nt, Human
agggccuggugaccuggguccu

SEQ ID NO: 1066640 - RNA, 22 nt, Human
gguggccuuuuaugagcagggu

SEQ ID NO: 1066641 - RNA, 22 nt, Human
caguagacacauuuguuuuucc

SEQ ID NO: 1066642 - RNA, 22 nt, Human
acugagaguugaaaagggagga

SEQ ID NO: 1066643 - RNA, 22 nt, Human
agaaaucuaagaugcucaagga

SEQ ID NO: 1066644 - RNA, 22 nt, Human
cauugcacucuggcuggaacgg

SEQ ID NO: 1066645 - RNA, 22 nt, Human
gcccucuggcagccuuggcugg

SEQ ID NO: 1066646 - RNA, 22 nt, Human
gaggggaaaacaggaauuaaca

SEQ ID NO: 1066647 - RNA, 22 nt, Human
aagcagcauaauugcuauuuua

SEQ ID NO: 1066648 - RNA, 22 nt, Human
auuccaaagguuaaugcccauu

SEQ ID NO: 1066649 - RNA, 22 nt, Human
auaagagcuagucuuuuccuug

SEQ ID NO: 1066650 - RNA, 22 nt, Human
ggaagagaauuucucucuuuuu

SEQ ID NO: 1066651 - RNA, 22 nt, Human
cacagauuucuggucuucaccc

SEQ ID NO: 1066652 - RNA, 22 nt, Human
agugggguccucaguaugguuc

SEQ ID NO: 1066653 - RNA, 22 nt, Human
aagacagcucaggacagauuca

SEQ ID NO: 1066654 - RNA, 22 nt, Human
aguauuacccucagaacuugau

SEQ ID NO: 1066655 - RNA, 20 nt, Human
auucugcuuugaaaauaagg

SEQ ID NO: 1066656 - RNA, 23 nt, Human
cauguacacacagcuguacagug

SEQ ID NO: 1066657 - RNA, 22 nt, Human
uacagaaacagcgugguuagaa

SEQ ID NO: 1066658 - RNA, 22 nt, Human
ucccuccccacuucugagcuuu

SEQ ID NO: 1066659 - RNA, 22 nt, Human
uggcucagcaagacauugaccu

SEQ ID NO: 1066660 - RNA, 22 nt, Human
agcccuccucacaucagcgucc

SEQ ID NO: 1066661 - RNA, 18 nt, Human
uccagagcuacuguggug

SEQ ID NO: 1066662 - RNA, 22 nt, Human
uuucagugugagugucuuauuu

SEQ ID NO: 1066663 - RNA, 22 nt, Human
uguggggccaaagcccagccac

SEQ ID NO: 1066664 - RNA, 22 nt, Human
aucaguuuauacuuauaaaucu

SEQ ID NO: 1066665 - RNA, 18 nt, Human
agcugcagaccaggaggu

SEQ ID NO: 1066666 - RNA, 22 nt, Human
augcagaaucuugagaaaaauu

SEQ ID NO: 1066667 - RNA, 22 nt, Human
aaucaguauugguauagaauga

SEQ ID NO: 1066668 - RNA, 22 nt, Human
gcaggggcaggagaucucaggc

SEQ ID NO: 1066669 - RNA, 22 nt, Human
gaaaaguacacagcccaaacau

SEQ ID NO: 1066670 - RNA, 22 nt, Human
gaggaacagagacgggaucgcu

SEQ ID NO: 1066671 - RNA, 19 nt, Human
ggcugcugguuacagaggc

SEQ ID NO: 1066672 - RNA, 22 nt, Human
guccugggaaggaagccaggga

SEQ ID NO: 1066673 - RNA, 22 nt, Human
uaaaguaauccuucauaaggag

SEQ ID NO: 1066674 - RNA, 22 nt, Human
uugauacaggccuucuagauga

SEQ ID NO: 1066675 - RNA, 22 nt, Human
aucagcuagauaagucaagcaa

SEQ ID NO: 1066676 - RNA, 22 nt, Human
ugggcucugugccagguuggug

SEQ ID NO: 1066677 - RNA, 22 nt, Human
uuccauauuguacucuuuggag

SEQ ID NO: 1066678 - RNA, 19 nt, Human
cacauacagaaaagaguaa

SEQ ID NO: 1066679 - RNA, 22 nt, Human
cagucauuccuaaccaagaaca

SEQ ID NO: 1066680 - RNA, 22 nt, Human
agugggaccggugcuauuccag

SEQ ID NO: 1066681 - RNA, 22 nt, Human
aggaaauaagggcacuucagau

SEQ ID NO: 1066682 - RNA, 22 nt, Human
uguguuuuacaaauucucuuaa

SEQ ID NO: 1066683 - RNA, 22 nt, Human
aguacauuuauuaaugguaaaa

SEQ ID NO: 1066684 - RNA, 22 nt, Human
auucagcucugaaucagcagac

SEQ ID NO: 1066685 - RNA, 22 nt, Human
ucugcagcuucuugccagagag

SEQ ID NO: 1066686 - RNA, 22 nt, Human
caggaagcaguagaacuuuucc

SEQ ID NO: 1066687 - RNA, 22 nt, Human
ggagauggcucugcaaggucua

SEQ ID NO: 1066688 - RNA, 22 nt, Human
aggccagcaccagagucaagaa

SEQ ID NO: 1066689 - RNA, 22 nt, Human
cagcagagcugggaauaaaauu

SEQ ID NO: 1066690 - RNA, 22 nt, Human
auucaaguacaguuuucuucuu

SEQ ID NO: 1066691 - RNA, 22 nt, Human
uaauuuuacuuccugagcaccu

SEQ ID NO: 1066692 - RNA, 22 nt, Human
uuuuaucugugacaucuggcag

SEQ ID NO: 1066693 - RNA, 23 nt, Human
gcagcuugugguuuaguagaggg

SEQ ID NO: 1066694 - RNA, 22 nt, Human
ccuggagcucacugggagccgg

SEQ ID NO: 1066695 - RNA, 23 nt, Human
uggcccugaaucuguccuggagg

SEQ ID NO: 1066696 - RNA, 22 nt, Human
gcacaggaaucuucauuuuuua

SEQ ID NO: 1066697 - RNA, 22 nt, Human
ccagcuggcccagcugugcucc

SEQ ID NO: 1066698 - RNA, 22 nt, Human
cugagauggccacugggucuca

SEQ ID NO: 1066699 - RNA, 22 nt, Human
cucuccagaucugcugagccag

SEQ ID NO: 1066700 - RNA, 22 nt, Human
aggcccuggcacugccugggag

SEQ ID NO: 1066701 - RNA, 22 nt, Human
gggcagcauuugaaaaacagau

SEQ ID NO: 1066702 - RNA, 22 nt, Human
gcugugcagccaagugccucug

SEQ ID NO: 1066703 - RNA, 22 nt, Human
agaacaauguuaaauuauuaag

SEQ ID NO: 1066704 - RNA, 19 nt, Human
ucugaggguccagaugcau

SEQ ID NO: 1066705 - RNA, 22 nt, Human
uuuguugacaucccuguacuuu

SEQ ID NO: 1066706 - RNA, 22 nt, Human
auuuuugagcugugaacauagc

SEQ ID NO: 1066707 - RNA, 22 nt, Human
cacauuccuggugcucagcagc

SEQ ID NO: 1066708 - RNA, 22 nt, Human
cccaguggcuuuugcccagguu

SEQ ID NO: 1066709 - RNA, 22 nt, Human
gaagagcuauguccagggagca

SEQ ID NO: 1066710 - RNA, 22 nt, Human
uacagaaggaaguuuagcuaaa

SEQ ID NO: 1066711 - RNA, 22 nt, Human
auguuauuaaaguacagauucu

SEQ ID NO: 1066712 - RNA, 22 nt, Human
ugucccagucaaggcugucauc

SEQ ID NO: 1066713 - RNA, 22 nt, Human
ucauccuuuugcaugggaaggc

SEQ ID NO: 1066714 - RNA, 22 nt, Human
ggagccugggcauuaguaauuu

SEQ ID NO: 1066715 - RNA, 22 nt, Human
cuaauaauagagguggcauuug

SEQ ID NO: 1066716 - RNA, 22 nt, Human
ggcucuggcggcucuuucaaua

SEQ ID NO: 1066717 - RNA, 18 nt, Human
uggacaggguggagaaaa

SEQ ID NO: 1066718 - RNA, 20 nt, Human
cauuaugguugggcacagug

SEQ ID NO: 1066719 - RNA, 22 nt, Human
ccuggcuguggcggugcucuca

SEQ ID NO: 1066720 - RNA, 22 nt, Human
augcaaaugcuagagaauguug

SEQ ID NO: 1066721 - RNA, 22 nt, Human
ucagcacuuuuacucucuuugc

SEQ ID NO: 1066722 - RNA, 22 nt, Human
cuggccucaccucagacuuacu

SEQ ID NO: 1066723 - RNA, 22 nt, Human
uuaaaggcgauaaggcaguguu

SEQ ID NO: 1066724 - RNA, 22 nt, Human
aggaauggugcucagcagaaau

SEQ ID NO: 1066725 - RNA, 22 nt, Human
caucuucacauauuuccaauga

SEQ ID NO: 1066726 - RNA, 22 nt, Human
uguagaaauuaguaagaucaac

SEQ ID NO: 1066727 - RNA, 22 nt, Human
guuuccagcucuuagcaaaggc

SEQ ID NO: 1066728 - RNA, 22 nt, Human
cugcugagaaaagacugaggga

SEQ ID NO: 1066729 - RNA, 22 nt, Human
cccagccugugacagccguccu

SEQ ID NO: 1066730 - RNA, 23 nt, Human
gccugcuggucaccuaaucugcc

SEQ ID NO: 1066731 - RNA, 22 nt, Human
aagaauauuuccugcacuuggg

SEQ ID NO: 1066732 - RNA, 22 nt, Human
cugggccagggaggugucugua

SEQ ID NO: 1066733 - RNA, 22 nt, Human
gccugggaagacuaagugggag

SEQ ID NO: 1066734 - RNA, 22 nt, Human
ugccuuaauuucccuguuuugu

SEQ ID NO: 1066735 - RNA, 22 nt, Human
cagggacagcacuaaacucuug

SEQ ID NO: 1066736 - RNA, 22 nt, Human
caggcagcugcuggguucagcc

SEQ ID NO: 1066737 - RNA, 22 nt, Human
ugcaggccucacaccuggcacc

SEQ ID NO: 1066738 - RNA, 22 nt, Human
cacaucccuggaguuacccagu

SEQ ID NO: 1066739 - RNA, 22 nt, Human
ggaaacaugccugcuggacagu

SEQ ID NO: 1066740 - RNA, 22 nt, Human
gccugggugaauuugauccuaa

SEQ ID NO: 1066741 - RNA, 22 nt, Human
ucuggggauggucuacuuucug

SEQ ID NO: 1066742 - RNA, 21 nt, Human
ucaucuggucuggggccugcu

SEQ ID NO: 1066743 - RNA, 22 nt, Human
ucaggaagcauccugagguguc

SEQ ID NO: 1066744 - RNA, 22 nt, Human
gagcagagaauccagcuaagug

SEQ ID NO: 1066745 - RNA, 22 nt, Human
aagcugcagaugugccugugga

SEQ ID NO: 1066746 - RNA, 22 nt, Human
aguaaacacugucuuuauauau

SEQ ID NO: 1066747 - RNA, 22 nt, Human
uugggggcauauugaguagugg

SEQ ID NO: 1066748 - RNA, 22 nt, Human
uuuuccacuuuagugcaauaac

SEQ ID NO: 1066749 - RNA, 22 nt, Human
auuuaagggauuuggagaccaa

SEQ ID NO: 1066750 - RNA, 22 nt, Human
cuaacuuuagcuuagauuauca

SEQ ID NO: 1066751 - RNA, 22 nt, Human
aaguccaguuuuuccagguggu

SEQ ID NO: 1066752 - RNA, 22 nt, Human
gccuucugauaucucuuggcau

SEQ ID NO: 1066753 - RNA, 22 nt, Human
cuccaaauacagucaucuuggg

SEQ ID NO: 1066754 - RNA, 22 nt, Human
ucucccagaaguccucaguaca

SEQ ID NO: 1066755 - RNA, 22 nt, Human
ucuucauuuuauagcaucugug

SEQ ID NO: 1066756 - RNA, 22 nt, Human
gaggccugguuuccagcauccu

SEQ ID NO: 1066757 - RNA, 22 nt, Human
ucauuuacacuucacaaaugga

SEQ ID NO: 1066758 - RNA, 22 nt, Human
aaauucuuucauggcuaauaag

SEQ ID NO: 1066759 - RNA, 23 nt, Human
aggagccaggaaccagcuucccc

SEQ ID NO: 1066760 - RNA, 22 nt, Human
agaaauguuguggguuuuguua

SEQ ID NO: 1066761 - RNA, 22 nt, Human
uccuucaguuaucacaguacug

SEQ ID NO: 1066762 - RNA, 22 nt, Human
gugguggucaccaaauugaggg

SEQ ID NO: 1066763 - RNA, 22 nt, Human
acacuaaaugagucuacaguac

SEQ ID NO: 1066764 - RNA, 22 nt, Human
gccagcucccaagugagccccu

SEQ ID NO: 1066765 - RNA, 22 nt, Human
gcuggucccaauguguuuccuu

SEQ ID NO: 1066766 - RNA, 22 nt, Human
ucuggcagcaagauaacaaugg

SEQ ID NO: 1066767 - RNA, 22 nt, Human
ugggagcaggugugcuagggaa

SEQ ID NO: 1066768 - RNA, 21 nt, Human
uccuugcuauuuuccucagcu

SEQ ID NO: 1066769 - RNA, 22 nt, Human
gcagauggugccaugucuugug

SEQ ID NO: 1066770 - RNA, 22 nt, Human
gcaggcucuucuuucugcccag

SEQ ID NO: 1066771 - RNA, 22 nt, Human
accaggaggccuggagcacaaa

SEQ ID NO: 1066772 - RNA, 22 nt, Human
aguguacaagaccuuauuguug

SEQ ID NO: 1066773 - RNA, 19 nt, Human
uaacaaagucugaagucag

SEQ ID NO: 1066774 - RNA, 23 nt, Human
uggaagcagaaguuucaauaucc

SEQ ID NO: 1066775 - RNA, 22 nt, Human
agccagcaggugagugcagccu

SEQ ID NO: 1066776 - RNA, 22 nt, Human
acucuucaucccuuuaucagga

SEQ ID NO: 1066777 - RNA, 18 nt, Human
aaacagugccuaaguguc

SEQ ID NO: 1066778 - RNA, 22 nt, Human
cacacaggagagugcuggaggu

SEQ ID NO: 1066779 - RNA, 22 nt, Human
aauauaugaccaggaaguucug

SEQ ID NO: 1066780 - RNA, 22 nt, Human
auuuacuggaaaaacuaugagc

SEQ ID NO: 1066781 - RNA, 22 nt, Human
gucuucuguucugugaggcuuc

SEQ ID NO: 1066782 - RNA, 19 nt, Human
guaagggcuaauggacuau

SEQ ID NO: 1066783 - RNA, 22 nt, Human
aggaaacaguugguaaugcaua

SEQ ID NO: 1066784 - RNA, 22 nt, Human
ucaguguuggcauucagaaaug

SEQ ID NO: 1066785 - RNA, 22 nt, Human
uuggaacauccaggacagauau

SEQ ID NO: 1066786 - RNA, 22 nt, Human
ucuucaugccaaaugaguuuug

SEQ ID NO: 1066787 - RNA, 22 nt, Human
ucaugcccagagcaguaaauua

SEQ ID NO: 1066788 - RNA, 22 nt, Human
cagagcugauuggauccagaga

SEQ ID NO: 1066789 - RNA, 19 nt, Human
uguguguuuauauauguau

SEQ ID NO: 1066790 - RNA, 22 nt, Human
aguggcugagugacugugacuc

SEQ ID NO: 1066791 - RNA, 22 nt, Human
uuuucuauuaacucauuuugca

SEQ ID NO: 1066792 - RNA, 21 nt, Human
aagccagcccacagugguuug

SEQ ID NO: 1066793 - RNA, 22 nt, Human
ugagaaagacagacauuccuaa

SEQ ID NO: 1066794 - RNA, 22 nt, Human
cagggucuuauaaggccaauuu

SEQ ID NO: 1066795 - RNA, 22 nt, Human
cugccucugguuuuggucccug

SEQ ID NO: 1066796 - RNA, 22 nt, Human
auuugucuuugagugcccugcu

SEQ ID NO: 1066797 - RNA, 22 nt, Human
acaagaauuauuucuaguuaac

SEQ ID NO: 1066798 - RNA, 22 nt, Human
agacacagaaguugcuguuggg

SEQ ID NO: 1066799 - RNA, 23 nt, Human
cuuauucauucauguagcccauu

SEQ ID NO: 1066800 - RNA, 19 nt, Human
ucaggacugacuugaaguc

SEQ ID NO: 1066801 - RNA, 22 nt, Human
gaacagcagucacucauguuau

SEQ ID NO: 1066802 - RNA, 22 nt, Human
uuucuggaaagcaagauacauu

SEQ ID NO: 1066803 - RNA, 22 nt, Human
gggaagagugucgguugaagug

SEQ ID NO: 1066804 - RNA, 22 nt, Human
gauauuuuugcagacaccuggg

SEQ ID NO: 1066805 - RNA, 22 nt, Human
auacauaauuacuuccgauguu

SEQ ID NO: 1066806 - RNA, 22 nt, Human
uuggaccaauuccugauauuuu

SEQ ID NO: 1066807 - RNA, 22 nt, Human
aguccauaggcaguucauaaca

SEQ ID NO: 1066808 - RNA, 22 nt, Human
acccagagccagggucaggagc

SEQ ID NO: 1066809 - RNA, 22 nt, Human
augggaguuuucucugaugcuc

SEQ ID NO: 1066810 - RNA, 17 nt, Human
gccuggcccagccuggc

SEQ ID NO: 1066811 - RNA, 22 nt, Human
aggcaaaauuacaaaguuauua

SEQ ID NO: 1066812 - RNA, 22 nt, Human
acaugaaaaauguuugcaguuu

SEQ ID NO: 1066813 - RNA, 20 nt, Human
aguuuauuccaggagaacug

SEQ ID NO: 1066814 - RNA, 22 nt, Human
caggaaaugaacaggaaugaac

SEQ ID NO: 1066815 - RNA, 22 nt, Human
auacuaaaguauagaacuuagu

SEQ ID NO: 1066816 - RNA, 22 nt, Human
uucaugugaucacagauuguaa

SEQ ID NO: 1066817 - RNA, 22 nt, Human
aagcaauaagccagauuuggau

SEQ ID NO: 1066818 - RNA, 22 nt, Human
caacagcucagacacgggaccu

SEQ ID NO: 1066819 - RNA, 22 nt, Human
guuuacauguuuuucucuuaca

SEQ ID NO: 1066820 - RNA, 22 nt, Human
ccagguggugaaagugggcccu

SEQ ID NO: 1066821 - RNA, 22 nt, Human
uaagaacagugucugucucaca

SEQ ID NO: 1066822 - RNA, 22 nt, Human
cacugaagcuuucauucucuug

SEQ ID NO: 1066823 - RNA, 22 nt, Human
cacaugaugguggaagccauag

SEQ ID NO: 1066824 - RNA, 21 nt, Human
gcugugcacauaguagaagug

SEQ ID NO: 1066825 - RNA, 22 nt, Human
uugcuuccucgaggccagcgug

SEQ ID NO: 1066826 - RNA, 22 nt, Human
agaucauauuguaacuuuauug

SEQ ID NO: 1066827 - RNA, 22 nt, Human
uacauauuguccauaguugcuu

SEQ ID NO: 1066828 - RNA, 20 nt, Human
ugaugguucuuuccggguug

SEQ ID NO: 1066829 - RNA, 22 nt, Human
cauguguaugcauucauacaua

SEQ ID NO: 1066830 - RNA, 22 nt, Human
gggcuggaguugggaagacaaa

SEQ ID NO: 1066831 - RNA, 22 nt, Human
auaugaagaaucuaggauaggc

SEQ ID NO: 1066832 - RNA, 22 nt, Human
acuuuacaaacuccucacuguu

SEQ ID NO: 1066833 - RNA, 22 nt, Human
uuucacaucccgcgcgcccuua

SEQ ID NO: 1066834 - RNA, 22 nt, Human
gaaguggaagccaucggcaguc

SEQ ID NO: 1066835 - RNA, 22 nt, Human
ccauuucacccacugcuuuagg

SEQ ID NO: 1066836 - RNA, 22 nt, Human
gaacaucaaggucugugucuag

SEQ ID NO: 1066837 - RNA, 22 nt, Human
cuucugcaggagucaacucugg

SEQ ID NO: 1066838 - RNA, 22 nt, Human
ccuauugacaauucucuucucc

SEQ ID NO: 1066839 - RNA, 22 nt, Human
gccuggguuccaugaucuccag

SEQ ID NO: 1066840 - RNA, 22 nt, Human
uccuuggaguaguuguucuuua

SEQ ID NO: 1066841 - RNA, 22 nt, Human
agggcuguuuuuggcaccuggg

SEQ ID NO: 1066842 - RNA, 22 nt, Human
gauuucuucauuuguggugaau

SEQ ID NO: 1066843 - RNA, 22 nt, Human
ggcagggcagcgcugauuaggg

SEQ ID NO: 1066844 - RNA, 22 nt, Human
uuuuguguagagauggggucuu

SEQ ID NO: 1066845 - RNA, 19 nt, Human
ugagacagggauucaggug

SEQ ID NO: 1066846 - RNA, 22 nt, Human
acagccugagaguggagcuggc

SEQ ID NO: 1066847 - RNA, 22 nt, Human
uaagcagaugcugucugcacaa

SEQ ID NO: 1066848 - RNA, 22 nt, Human
cagcagagacgguaagcagaac

SEQ ID NO: 1066849 - RNA, 22 nt, Human
gcucuugauguucauugacuug

SEQ ID NO: 1066850 - RNA, 22 nt, Human
uuacaaacugucauauaguauu

SEQ ID NO: 1066851 - RNA, 22 nt, Human
ucauucccuccagcuguggcua

SEQ ID NO: 1066852 - RNA, 22 nt, Human
aggcugagcggggucccagagc

SEQ ID NO: 1066853 - RNA, 22 nt, Human
gcagcugcagguggucccaugc

SEQ ID NO: 1066854 - RNA, 22 nt, Human
ugcguugcgcuccugcagcagg

SEQ ID NO: 1066855 - RNA, 22 nt, Human
augggcugacuaaugguaaacu

SEQ ID NO: 1066856 - RNA, 22 nt, Human
cugugaggcccugggugcugga

SEQ ID NO: 1066857 - RNA, 22 nt, Human
agugaaauacugucguuuuuag

SEQ ID NO: 1066858 - RNA, 22 nt, Human
acuugccuguuacauuucuagu

SEQ ID NO: 1066859 - RNA, 20 nt, Human
ugggagcuggugaggucuca

SEQ ID NO: 1066860 - RNA, 22 nt, Human
guucuucucuuguaauggaauc

SEQ ID NO: 1066861 - RNA, 22 nt, Human
uuaauagauuugauuuuaaagg

SEQ ID NO: 1066862 - RNA, 22 nt, Human
gccauuaaugugaaggaaggaa

SEQ ID NO: 1066863 - RNA, 22 nt, Human
ugguccugccccgugcacagag

SEQ ID NO: 1066864 - RNA, 22 nt, Human
gcuuuucuauaagaacuuucaa

SEQ ID NO: 1066865 - RNA, 22 nt, Human
ccaggccucuggcugcuuaguc

SEQ ID NO: 1066866 - RNA, 22 nt, Human
uggccacagccucugccaguuc

SEQ ID NO: 1066867 - RNA, 22 nt, Human
uggcucugagacacaggcucuc

SEQ ID NO: 1066868 - RNA, 22 nt, Human
uugcucugaaccacaccaucac

SEQ ID NO: 1066869 - RNA, 22 nt, Human
ggcagugagcuggagggaagga

SEQ ID NO: 1066870 - RNA, 22 nt, Human
uaucuugagagacaacacagca

SEQ ID NO: 1066871 - RNA, 22 nt, Human
uucuuuucggccugugagaagg

SEQ ID NO: 1066872 - RNA, 22 nt, Human
ugaggaggucagagucuggcug

SEQ ID NO: 1066873 - RNA, 22 nt, Human
cagagcuguuacuauucaugaa

SEQ ID NO: 1066874 - RNA, 22 nt, Human
aagggcuguaagccaaguaaag

SEQ ID NO: 1066875 - RNA, 22 nt, Human
cugugacaguuucucagaauuu

SEQ ID NO: 1066876 - RNA, 22 nt, Human
cugaaggagaaggccacuguuc

SEQ ID NO: 1066877 - RNA, 22 nt, Human
ccuggagcacauggcaggaggc

SEQ ID NO: 1066878 - RNA, 22 nt, Human
ucuaggagcaugaagggaaggc

SEQ ID NO: 1066879 - RNA, 22 nt, Human
uuaaagcacuaaaugaugaggg

SEQ ID NO: 1066880 - RNA, 22 nt, Human
ugcuggcuguauaugugagagu

SEQ ID NO: 1066881 - RNA, 22 nt, Human
gccagccuucuguggccugcaa

SEQ ID NO: 1066882 - RNA, 22 nt, Human
ucacacacauaaucuaagauua

SEQ ID NO: 1066883 - RNA, 22 nt, Human
uuuacaaguuuacagaaugaug

SEQ ID NO: 1066884 - RNA, 22 nt, Human
uguaugaagacuucuucugugu

SEQ ID NO: 1066885 - RNA, 22 nt, Human
ugaacacagggccaaacuugag

SEQ ID NO: 1066886 - RNA, 22 nt, Human
auauuuggaaagaaaaucauug

SEQ ID NO: 1066887 - RNA, 22 nt, Human
gaaggcacugaacuccuucugg

SEQ ID NO: 1066888 - RNA, 22 nt, Human
uuuccaugaucguuauagaacu

SEQ ID NO: 1066889 - RNA, 23 nt, Human
augcaguauaugucaguaguuua

SEQ ID NO: 1066890 - RNA, 22 nt, Human
uucugagaggcagagcuuguga

SEQ ID NO: 1066891 - RNA, 22 nt, Human
ucacaggagggagagacaccca

SEQ ID NO: 1066892 - RNA, 22 nt, Human
cccugcagccggccagcucauu

SEQ ID NO: 1066893 - RNA, 22 nt, Human
agcccugggaggccagcuugua

SEQ ID NO: 1066894 - RNA, 22 nt, Human
uuuacagucaccaaacuuugcu

SEQ ID NO: 1066895 - RNA, 22 nt, Human
ucagagcagacuuugaaggagg

SEQ ID NO: 1066896 - RNA, 22 nt, Human
ugggagcaccuugagggcagaa

SEQ ID NO: 1066897 - RNA, 22 nt, Human
caggaccccauauucacugaac

SEQ ID NO: 1066898 - RNA, 21 nt, Human
ugaaagaaggugcagucugaa

SEQ ID NO: 1066899 - RNA, 22 nt, Human
uuucaagucaguagcuaaucau

SEQ ID NO: 1066900 - RNA, 22 nt, Human
gauuuucugagccuucaaauuu

SEQ ID NO: 1066901 - RNA, 21 nt, Human
ugggccugucccucuuggagg

SEQ ID NO: 1066902 - RNA, 22 nt, Human
aaacaucauaggcaugcaugau

SEQ ID NO: 1066903 - RNA, 18 nt, Human
ggcugccuguuccugaag

SEQ ID NO: 1066904 - RNA, 22 nt, Human
aaggccaacuaggaugagcuag

SEQ ID NO: 1066905 - RNA, 22 nt, Human
cccaggaaagaaaguauauggu

SEQ ID NO: 1066906 - RNA, 22 nt, Human
aaggcucuuggagugaaugcag

SEQ ID NO: 1066907 - RNA, 22 nt, Human
ggaggccaaggcagguggauca

SEQ ID NO: 1066908 - RNA, 22 nt, Human
acagaaggcggggacaaggcgg

SEQ ID NO: 1066909 - RNA, 22 nt, Human
uugugcucuguguuauuuaagg

SEQ ID NO: 1066910 - RNA, 22 nt, Human
agaagccaacagggcaggagag

SEQ ID NO: 1066911 - RNA, 21 nt, Human
acuguucauuugaugaacugg

SEQ ID NO: 1066912 - RNA, 22 nt, Human
guuucuaauuggaacuuugagg

SEQ ID NO: 1066913 - RNA, 22 nt, Human
ugcucagcacagaccaggccag

SEQ ID NO: 1066914 - RNA, 22 nt, Human
aguugcacuuucuagauacugu

SEQ ID NO: 1066915 - RNA, 22 nt, Human
uacagugacccuauuuccaaau

SEQ ID NO: 1066916 - RNA, 22 nt, Human
ggcccacuugaaauggagcuca

SEQ ID NO: 1066917 - RNA, 22 nt, Human
gaggggaaaguucugcacaagg

SEQ ID NO: 1066918 - RNA, 22 nt, Human
aagcccagcugaaagcauuuuu

SEQ ID NO: 1066919 - RNA, 22 nt, Human
uaauuauaacaguuacaucuua

SEQ ID NO: 1066920 - RNA, 22 nt, Human
gugugagggacagagaaagggg

SEQ ID NO: 1066921 - RNA, 22 nt, Human
uuuggaauauuaaaaugucuca

SEQ ID NO: 1066922 - RNA, 22 nt, Human
cagcuggacuuuugauagaagu

SEQ ID NO: 1066923 - RNA, 22 nt, Human
ccagaggaggggggucuuucug

SEQ ID NO: 1066924 - RNA, 22 nt, Human
agacagcaugauacaugaugcu

SEQ ID NO: 1066925 - RNA, 22 nt, Human
ugcacacacacguagagaaaag

SEQ ID NO: 1066926 - RNA, 22 nt, Human
guguucaaaauguagguagauu

SEQ ID NO: 1066927 - RNA, 22 nt, Human
aauguucugauguaggguuuag

SEQ ID NO: 1066928 - RNA, 22 nt, Human
gccacucaugggaggugugcaa

SEQ ID NO: 1066929 - RNA, 22 nt, Human
cauuuaauccucacaagccuau

SEQ ID NO: 1066930 - RNA, 22 nt, Human
gcagggcaguaagagcuagagu

SEQ ID NO: 1066931 - RNA, 22 nt, Human
guuugcaaauuguguuaaagcu

SEQ ID NO: 1066932 - RNA, 22 nt, Human
gaggucaucuguuuugguuacu

SEQ ID NO: 1066933 - RNA, 22 nt, Human
auuuucucacaaugcagaagga

SEQ ID NO: 1066934 - RNA, 22 nt, Human
uggccaggaggcugcuucugac

SEQ ID NO: 1066935 - RNA, 22 nt, Human
aaugaaugugauuaacuucaag

SEQ ID NO: 1066936 - RNA, 22 nt, Human
gaggggcuugaggcccugaugg

SEQ ID NO: 1066937 - RNA, 22 nt, Human
gaauuuaagaggaugaaucugu

SEQ ID NO: 1066938 - RNA, 22 nt, Human
aagugagauuauauguacggga

SEQ ID NO: 1066939 - RNA, 22 nt, Human
cacauuuaugggcugggaggca

SEQ ID NO: 1066940 - RNA, 22 nt, Human
agcugucuuucugccuccugau

SEQ ID NO: 1066941 - RNA, 22 nt, Human
gcucccagaaccaaggcugggg

SEQ ID NO: 1066942 - RNA, 21 nt, Human
uggcugagccaggugugugga

SEQ ID NO: 1066943 - RNA, 22 nt, Human
aagguggugaucaucuugaagg

SEQ ID NO: 1066944 - RNA, 22 nt, Human
ucucagagcaucauuuucuuag

SEQ ID NO: 1066945 - RNA, 22 nt, Human
aguccagguggaccuuggccag

SEQ ID NO: 1066946 - RNA, 22 nt, Human
cacagcagagggagccauugaa

SEQ ID NO: 1066947 - RNA, 22 nt, Human
uucucuuuucaccaguugcuaa

SEQ ID NO: 1066948 - RNA, 22 nt, Human
auacuguuucucuucuacauga

SEQ ID NO: 1066949 - RNA, 22 nt, Human
ggccaugguuggggaagacaug

SEQ ID NO: 1066950 - RNA, 22 nt, Human
uggcucagucauggaugaguaa

SEQ ID NO: 1066951 - RNA, 22 nt, Human
uguuuuaugagccauauaaccu

SEQ ID NO: 1066952 - RNA, 22 nt, Human
gggagccaaggagagaggccuu

SEQ ID NO: 1066953 - RNA, 22 nt, Human
uggcagcaauagaaauauaauc

SEQ ID NO: 1066954 - RNA, 22 nt, Human
gagauauuuauucauacuguca

SEQ ID NO: 1066955 - RNA, 22 nt, Human
acucaggagggaucagcuauca

SEQ ID NO: 1066956 - RNA, 22 nt, Human
cuccucuggguccugguggcca

SEQ ID NO: 1066957 - RNA, 22 nt, Human
ugaaaucuuagccauucugccu

SEQ ID NO: 1066958 - RNA, 22 nt, Human
uucagaaaugaauauugguauu

SEQ ID NO: 1066959 - RNA, 22 nt, Human
gaaggaagucauuagugcagac

SEQ ID NO: 1066960 - RNA, 23 nt, Human
aaaaucauuaauuuacccugaaa

SEQ ID NO: 1066961 - RNA, 22 nt, Human
aaugccuuauaggcugaaaauu

SEQ ID NO: 1066962 - RNA, 20 nt, Human
cuucaaguuaugguuggcaa

SEQ ID NO: 1066963 - RNA, 22 nt, Human
cugggccaguuaugucucaucu

SEQ ID NO: 1066964 - RNA, 22 nt, Human
caggagagauaugaguccccac

SEQ ID NO: 1066965 - RNA, 22 nt, Human
uccugagagcagcugcuuugga

SEQ ID NO: 1066966 - RNA, 22 nt, Human
caaaugaugcauggcuagugag

SEQ ID NO: 1066967 - RNA, 23 nt, Human
cagggccaggcagcagcugucac

SEQ ID NO: 1066968 - RNA, 22 nt, Human
cggggcuguagcacagcugagc

SEQ ID NO: 1066969 - RNA, 22 nt, Human
ugacauuuaucuucuacaauga

SEQ ID NO: 1066970 - RNA, 22 nt, Human
cgucccaguuccagccgcgcug

SEQ ID NO: 1066971 - RNA, 20 nt, Human
uuggucagugguucaguuug

SEQ ID NO: 1066972 - RNA, 22 nt, Human
ccucauucucgcguguguuucu

SEQ ID NO: 1066973 - RNA, 22 nt, Human
aaagaaucacauccuucagcaa

SEQ ID NO: 1066974 - RNA, 22 nt, Human
uacauucugguggagaaaguaa

SEQ ID NO: 1066975 - RNA, 19 nt, Human
gggaaauucacuugcuucc

SEQ ID NO: 1066976 - RNA, 22 nt, Human
gaugagggccugguggcugugc

SEQ ID NO: 1066977 - RNA, 23 nt, Human
ggccuccuggucuaggcuagacu

SEQ ID NO: 1066978 - RNA, 22 nt, Human
aggcuucccagcugagcucagc

SEQ ID NO: 1066979 - RNA, 22 nt, Human
uccuucagcuacucaguuucca

SEQ ID NO: 1066980 - RNA, 22 nt, Human
cugguggaggugccaggauuug

SEQ ID NO: 1066981 - RNA, 22 nt, Human
aggguaggguaaaugaugcauc

SEQ ID NO: 1066982 - RNA, 22 nt, Human
uucugccuuacgauauuuucaa

SEQ ID NO: 1066983 - RNA, 23 nt, Human
uaaauuaccuuuccagugcaggg

SEQ ID NO: 1066984 - RNA, 22 nt, Human
augucccagcugagagacaacu

SEQ ID NO: 1066985 - RNA, 22 nt, Human
cuggcucaguucuugguuuuca

SEQ ID NO: 1066986 - RNA, 22 nt, Human
ccugagcuggaagagcuugugc

SEQ ID NO: 1066987 - RNA, 22 nt, Human
aucuuuagucaggcguggguau

SEQ ID NO: 1066988 - RNA, 22 nt, Human
gagggugggcuccuaucugggu

SEQ ID NO: 1066989 - RNA, 22 nt, Human
gauuucaaggaguuuucacagu

SEQ ID NO: 1066990 - RNA, 22 nt, Human
ccaggccuggccaggggaugcc

SEQ ID NO: 1066991 - RNA, 21 nt, Human
aguuuucugaguuauaaaaua

SEQ ID NO: 1066992 - RNA, 22 nt, Human
cuggucugagggcucuugaggc

SEQ ID NO: 1066993 - RNA, 22 nt, Human
aggaaagcaauggcugagaaca

SEQ ID NO: 1066994 - RNA, 20 nt, Human
uucauucauuccacaacuuc

SEQ ID NO: 1066995 - RNA, 20 nt, Human
uguaaacaauaguguucuug

SEQ ID NO: 1066996 - RNA, 22 nt, Human
ugucaguagauuauuacaauaa

SEQ ID NO: 1066997 - RNA, 22 nt, Human
caggcuuuuucugcuguccucu

SEQ ID NO: 1066998 - RNA, 22 nt, Human
gagcuguccuaccaggaguccu

SEQ ID NO: 1066999 - RNA, 22 nt, Human
ucugccuggccuggagggcaca

SEQ ID NO: 1067000 - RNA, 22 nt, Human
ucagaaaagguagcugugacaa

SEQ ID NO: 1067001 - RNA, 22 nt, Human
cuuggccucuucucaggguggg

SEQ ID NO: 1067002 - RNA, 22 nt, Human
uguuaccauaggucagaacguu

SEQ ID NO: 1067003 - RNA, 19 nt, Human
ccuggcccugcugcgcggg

SEQ ID NO: 1067004 - RNA, 22 nt, Human
guuucaaaagucaggcuauucu

SEQ ID NO: 1067005 - RNA, 22 nt, Human
auuuacugcuugacacauuggu

SEQ ID NO: 1067006 - RNA, 22 nt, Human
ucaccaggauugggcuguaggc

SEQ ID NO: 1067007 - RNA, 22 nt, Human
uccaggcccacucgguggggcu

SEQ ID NO: 1067008 - RNA, 22 nt, Human
ggaacacagaagggcugaaaaa

SEQ ID NO: 1067009 - RNA, 17 nt, Human
aggagucucagaugagc

SEQ ID NO: 1067010 - RNA, 22 nt, Human
ugcccugugccagacuuccugg

SEQ ID NO: 1067011 - RNA, 22 nt, Human
gguggggucacgacagagggaa

SEQ ID NO: 1067012 - RNA, 22 nt, Human
ggagaccagaaggaagcuucga

SEQ ID NO: 1067013 - RNA, 22 nt, Human
gaaagacucuugaugucuuugg

SEQ ID NO: 1067014 - RNA, 19 nt, Human
aucuacaauuauucucagu

SEQ ID NO: 1067015 - RNA, 22 nt, Human
aacagcagggggaccugcuggu

SEQ ID NO: 1067016 - RNA, 20 nt, Human
aggcucagauacccagggaa

SEQ ID NO: 1067017 - RNA, 22 nt, Human
auacaguaaccacauucuauag

SEQ ID NO: 1067018 - RNA, 19 nt, Human
cuucaguguucaccuggcc

SEQ ID NO: 1067019 - RNA, 22 nt, Human
gguacacauugugacuguauua

SEQ ID NO: 1067020 - RNA, 20 nt, Human
acugccuugguucaguaggu

SEQ ID NO: 1067021 - RNA, 22 nt, Human
gggaggaaagagaaguggucca

SEQ ID NO: 1067022 - RNA, 22 nt, Human
aggauuugcacugguguuugag

SEQ ID NO: 1067023 - RNA, 22 nt, Human
cugagcaggauauucacagcag

SEQ ID NO: 1067024 - RNA, 22 nt, Human
caguugcuggaugugcagcucu

SEQ ID NO: 1067025 - RNA, 22 nt, Human
uguuuuguuuaugagagcacag

SEQ ID NO: 1067026 - RNA, 22 nt, Human
ccuggccuggcacucccucugc

SEQ ID NO: 1067027 - RNA, 20 nt, Human
ugggcugaggaucaggugcc

SEQ ID NO: 1067028 - RNA, 22 nt, Human
ugagggcugcuuccagagcuag

SEQ ID NO: 1067029 - RNA, 22 nt, Human
gaaggagagggucaaggauaau

SEQ ID NO: 1067030 - RNA, 22 nt, Human
gcccugccugucugcugggagg

SEQ ID NO: 1067031 - RNA, 22 nt, Human
ccaggacucaguggggaaaggg

SEQ ID NO: 1067032 - RNA, 22 nt, Human
uuugggaacucuaucauggaaa

SEQ ID NO: 1067033 - RNA, 22 nt, Human
uggcucucaggccugcugcguu

SEQ ID NO: 1067034 - RNA, 22 nt, Human
aggcugaugcuggcugaggcug

SEQ ID NO: 1067035 - RNA, 21 nt, Human
uuuugcuguuuuagaaugaga

SEQ ID NO: 1067036 - RNA, 22 nt, Human
uuggaagaccagaggccuuguc

SEQ ID NO: 1067037 - RNA, 22 nt, Human
gccuggugaaaggcagagagcg

SEQ ID NO: 1067038 - RNA, 22 nt, Human
uugaaauauuugggaguguuug

SEQ ID NO: 1067039 - RNA, 22 nt, Human
gcagccagccccucugaccucu

SEQ ID NO: 1067040 - RNA, 22 nt, Human
ggggaccugggcuucaaggguu

SEQ ID NO: 1067041 - RNA, 22 nt, Human
cauagagugauguaagguaugu

SEQ ID NO: 1067042 - RNA, 22 nt, Human
aaaugucaaggugauagaugca

SEQ ID NO: 1067043 - RNA, 22 nt, Human
ggcugcucuucuuggcgaccuc

SEQ ID NO: 1067044 - RNA, 22 nt, Human
uaguauuuuagaaaaccaugaa

SEQ ID NO: 1067045 - RNA, 22 nt, Human
ccagggaaggcugcuggcugug

SEQ ID NO: 1067046 - RNA, 21 nt, Human
uuuuuucuugcgugaggccug

SEQ ID NO: 1067047 - RNA, 22 nt, Human
auucuacauuuggagugauguc

SEQ ID NO: 1067048 - RNA, 22 nt, Human
gcagagcucaagguguucagcu

SEQ ID NO: 1067049 - RNA, 22 nt, Human
cuuacauugugugcaugagggg

SEQ ID NO: 1067050 - RNA, 22 nt, Human
acaaaauuguguuaaacuuuau

SEQ ID NO: 1067051 - RNA, 22 nt, Human
acauagaaauuuauuucuuaca

SEQ ID NO: 1067052 - RNA, 19 nt, Human
ccagaggacuguuaaugaa

SEQ ID NO: 1067053 - RNA, 22 nt, Human
acaggugugagaacaugccuug

SEQ ID NO: 1067054 - RNA, 22 nt, Human
uggcugagggggcucugcucag

SEQ ID NO: 1067055 - RNA, 22 nt, Human
gaauguuuuucauuggugacuc

SEQ ID NO: 1067056 - RNA, 22 nt, Human
agcuucuuguagaacucaaaag

SEQ ID NO: 1067057 - RNA, 22 nt, Human
gccagggcaggggagcaucugc

SEQ ID NO: 1067058 - RNA, 17 nt, Human
gugaagagucauugaau

SEQ ID NO: 1067059 - RNA, 21 nt, Human
uuacuuuugcaccaaccuaau

SEQ ID NO: 1067060 - RNA, 22 nt, Human
cagagacauccauguuaguugg

SEQ ID NO: 1067061 - RNA, 23 nt, Human
aagcuuccuucacgucuccuggg

SEQ ID NO: 1067062 - RNA, 22 nt, Human
cuuaagauuugcgauaccuaau

SEQ ID NO: 1067063 - RNA, 22 nt, Human
uacauaguauucacauuguuuu

SEQ ID NO: 1067064 - RNA, 22 nt, Human
agggccuggaacugugggcagg

SEQ ID NO: 1067065 - RNA, 22 nt, Human
ugacuuuaaaauaacaaguuua

SEQ ID NO: 1067066 - RNA, 22 nt, Human
uccaggggagacuagacccaca

SEQ ID NO: 1067067 - RNA, 22 nt, Human
aaagcaaacagaaccccaagcu

SEQ ID NO: 1067068 - RNA, 22 nt, Human
caaacauuuugagugguuucug

SEQ ID NO: 1067069 - RNA, 22 nt, Human
ucacagcuaagcuuggucacug

SEQ ID NO: 1067070 - RNA, 22 nt, Human
caugaaaugauauuuggguggg

SEQ ID NO: 1067071 - RNA, 22 nt, Human
uugcauuugacaaauuauuuaa

SEQ ID NO: 1067072 - RNA, 22 nt, Human
cugagaucuuuauacgaggcac

SEQ ID NO: 1067073 - RNA, 21 nt, Human
auacacauacacauaaaugug

SEQ ID NO: 1067074 - RNA, 22 nt, Human
aucaggaagccagucuaaugga

SEQ ID NO: 1067075 - RNA, 22 nt, Human
ucagaggaaaggucagauggcu

SEQ ID NO: 1067076 - RNA, 22 nt, Human
aggagccaugagugacaucaca

SEQ ID NO: 1067077 - RNA, 19 nt, Human
agaguugggcacuguuuca

SEQ ID NO: 1067078 - RNA, 22 nt, Human
cuggcagucugccucuucacug

SEQ ID NO: 1067079 - RNA, 21 nt, Human
ccauaccuaccucaccugguu

SEQ ID NO: 1067080 - RNA, 22 nt, Human
aaagaugucacaagaugugaug

SEQ ID NO: 1067081 - RNA, 23 nt, Human
agccuucaggcaaugucaguaga

SEQ ID NO: 1067082 - RNA, 22 nt, Human
agccagggcucuccuucgcgug

SEQ ID NO: 1067083 - RNA, 22 nt, Human
augaaggcuguguagauggaug

SEQ ID NO: 1067084 - RNA, 22 nt, Human
acagcugugagggucacuugua

SEQ ID NO: 1067085 - RNA, 22 nt, Human
uugagucaguaauuccauuucu

SEQ ID NO: 1067086 - RNA, 22 nt, Human
agagaggcugggcguagggcuu

SEQ ID NO: 1067087 - RNA, 22 nt, Human
ugggccuucucaaugcacugga

SEQ ID NO: 1067088 - RNA, 22 nt, Human
gaagcacauggcugugagcaac

SEQ ID NO: 1067089 - RNA, 22 nt, Human
ucuuuucugccacagccugagc

SEQ ID NO: 1067090 - RNA, 22 nt, Human
cugccuggguucaaguccuguu

SEQ ID NO: 1067091 - RNA, 22 nt, Human
aucaaagauguuucagggugua

SEQ ID NO: 1067092 - RNA, 22 nt, Human
gggaaccagccgcuuccgccuc

SEQ ID NO: 1067093 - RNA, 17 nt, Human
uucauuaauaaaagcaa

SEQ ID NO: 1067094 - RNA, 19 nt, Human
ugaaggagggggauggcca

SEQ ID NO: 1067095 - RNA, 22 nt, Human
ccugccuggggacaaaggaggg

SEQ ID NO: 1067096 - RNA, 22 nt, Human
cagccugcuagggcaaugccuu

SEQ ID NO: 1067097 - RNA, 22 nt, Human
ggcuucucucuucacauggcuu

SEQ ID NO: 1067098 - RNA, 22 nt, Human
ggugaggcuaagugacacaggg

SEQ ID NO: 1067099 - RNA, 22 nt, Human
aucuuuucuguuugcuaugucu

SEQ ID NO: 1067100 - RNA, 22 nt, Human
cacaucuauagggacagcaaca

SEQ ID NO: 1067101 - RNA, 22 nt, Human
acaacuguuggaggaacacagg

SEQ ID NO: 1067102 - RNA, 22 nt, Human
ggcuccucucuggccgcucccg

SEQ ID NO: 1067103 - RNA, 22 nt, Human
gggcuggcgggaaaggcaauuc

SEQ ID NO: 1067104 - RNA, 19 nt, Human
acccucucagugccugagg

SEQ ID NO: 1067105 - RNA, 22 nt, Human
gcaguuacuagcaauuugugaa

SEQ ID NO: 1067106 - RNA, 22 nt, Human
gggcauggugaugugcaccugu

SEQ ID NO: 1067107 - RNA, 22 nt, Human
uagaauaugugguaggaucugg

SEQ ID NO: 1067108 - RNA, 22 nt, Human
gcugucugcugggucgcucagg

SEQ ID NO: 1067109 - RNA, 22 nt, Human
caagggugguauugggagcaua

SEQ ID NO: 1067110 - RNA, 22 nt, Human
aacuacagaaaagguaagcucu

SEQ ID NO: 1067111 - RNA, 22 nt, Human
cagcugggcuaagaguagaggc

SEQ ID NO: 1067112 - RNA, 22 nt, Human
ugcuugggaauguggagucaga

SEQ ID NO: 1067113 - RNA, 22 nt, Human
aagccaacaugauuacuauaau

SEQ ID NO: 1067114 - RNA, 22 nt, Human
uuugcagucuggccugcuuugg

SEQ ID NO: 1067115 - RNA, 22 nt, Human
cuugaaagaagggucuuuuaau

SEQ ID NO: 1067116 - RNA, 22 nt, Human
ggaggcuccacugcucuuccug

SEQ ID NO: 1067117 - RNA, 22 nt, Human
cagcugaggucaaagaagcagg

SEQ ID NO: 1067118 - RNA, 22 nt, Human
gugauucaaauguaacuaauua

SEQ ID NO: 1067119 - RNA, 22 nt, Human
cugugggaauacugcgagugua

SEQ ID NO: 1067120 - RNA, 18 nt, Human
acauuuaggagagucaau

SEQ ID NO: 1067121 - RNA, 22 nt, Human
ugcccagggauaagccuagaga

SEQ ID NO: 1067122 - RNA, 22 nt, Human
aggaccagccuccaggucucuu

SEQ ID NO: 1067123 - RNA, 19 nt, Human
caguuacagcagcuaagac

SEQ ID NO: 1067124 - RNA, 22 nt, Human
ggaggccuugaggccaggagcu

SEQ ID NO: 1067125 - RNA, 22 nt, Human
acauucaagaugcauucacuua

SEQ ID NO: 1067126 - RNA, 22 nt, Human
ucccagagcucuggagguugga

SEQ ID NO: 1067127 - RNA, 23 nt, Human
gagcagagcgggcggggguccug

SEQ ID NO: 1067128 - RNA, 22 nt, Human
auuuuuucccaguuagccagga

SEQ ID NO: 1067129 - RNA, 22 nt, Human
gcugcuggccgcccagcuucuc

SEQ ID NO: 1067130 - RNA, 22 nt, Human
ggaaccaguggaaugauaugcu

SEQ ID NO: 1067131 - RNA, 22 nt, Human
cuggccccaggcagccugcugg

SEQ ID NO: 1067132 - RNA, 21 nt, Human
acagacagggccagugucccc

SEQ ID NO: 1067133 - RNA, 22 nt, Human
auuagguugagguacucagagc

SEQ ID NO: 1067134 - RNA, 22 nt, Human
aagauuucagaguuugggggaa

SEQ ID NO: 1067135 - RNA, 22 nt, Human
ccaggagccugggccaggcugg

SEQ ID NO: 1067136 - RNA, 22 nt, Human
uguagauauuaauuauuccuuu

SEQ ID NO: 1067137 - RNA, 22 nt, Human
cagggcaguaccgcccucuggc

SEQ ID NO: 1067138 - RNA, 22 nt, Human
aaaugucagagcuggaaggggc

SEQ ID NO: 1067139 - RNA, 20 nt, Human
uuauuucucauucuccuacu

SEQ ID NO: 1067140 - RNA, 22 nt, Human
cucaccacagagccuguccagc

SEQ ID NO: 1067141 - RNA, 22 nt, Human
aggaaggguucuuugugaaaga

SEQ ID NO: 1067142 - RNA, 22 nt, Human
acugggcuccaaggaccuggag

SEQ ID NO: 1067143 - RNA, 22 nt, Human
uuauuaaucuuaucuuuggaaa

SEQ ID NO: 1067144 - RNA, 22 nt, Human
ugaaaauuuccaucaguuauau

SEQ ID NO: 1067145 - RNA, 22 nt, Human
aggcaguuucugggacagcaua

SEQ ID NO: 1067146 - RNA, 22 nt, Human
ugcagagcagcaacugcgugcg

SEQ ID NO: 1067147 - RNA, 22 nt, Human
cagaggcugggaccucaggcau

SEQ ID NO: 1067148 - RNA, 20 nt, Human
uugcauuggaugugcaggug

SEQ ID NO: 1067149 - RNA, 22 nt, Human
uuccaguuugcaguugacacua

SEQ ID NO: 1067150 - RNA, 22 nt, Human
aguauuuccuggcuuaucugcu

SEQ ID NO: 1067151 - RNA, 22 nt, Human
ccuuuucuguguggguaauuua

SEQ ID NO: 1067152 - RNA, 22 nt, Human
aaagucacuuccuucugucagc

SEQ ID NO: 1067153 - RNA, 22 nt, Human
aaauacugguuuuggagaugcu

SEQ ID NO: 1067154 - RNA, 22 nt, Human
uuucccaagaaaaauaauugga

SEQ ID NO: 1067155 - RNA, 22 nt, Human
ugcccugcuaaauauagguagc

SEQ ID NO: 1067156 - RNA, 22 nt, Human
uaugcacaauaugaucuauuug

SEQ ID NO: 1067157 - RNA, 22 nt, Human
uccauuuucucuuccggaggug

SEQ ID NO: 1067158 - RNA, 22 nt, Human
aggccagaaaugucagggagug

SEQ ID NO: 1067159 - RNA, 22 nt, Human
ggcugcugugaccucaggugau

SEQ ID NO: 1067160 - RNA, 17 nt, Human
uccagagcacagagcuc

SEQ ID NO: 1067161 - RNA, 22 nt, Human
ugggugagugggaaaagcccag

SEQ ID NO: 1067162 - RNA, 22 nt, Human
ccagugcaggugagcaccaggu

SEQ ID NO: 1067163 - RNA, 22 nt, Human
agaaaauuuauucauguuaguu

SEQ ID NO: 1067164 - RNA, 22 nt, Human
agcugauuccacuuuuucccca

SEQ ID NO: 1067165 - RNA, 22 nt, Human
ggccucugguucguggugaccu

SEQ ID NO: 1067166 - RNA, 22 nt, Human
ggcagccuccagggcacuggug

SEQ ID NO: 1067167 - RNA, 22 nt, Human
ugcacuuugcaggcauggaaac

SEQ ID NO: 1067168 - RNA, 22 nt, Human
caggggcaagaaugcugucagc

SEQ ID NO: 1067169 - RNA, 22 nt, Human
auuucuuuucaagagggugcuu

SEQ ID NO: 1067170 - RNA, 22 nt, Human
aaagguuuugguaaggcuuuaa

SEQ ID NO: 1067171 - RNA, 22 nt, Human
uucaaacaggggucagggagau

SEQ ID NO: 1067172 - RNA, 22 nt, Human
ucugccugcaguguggcagggc

SEQ ID NO: 1067173 - RNA, 20 nt, Human
accauuaauguaagcuuugu

SEQ ID NO: 1067174 - RNA, 22 nt, Human
caucuacacugauuaggugaac

SEQ ID NO: 1067175 - RNA, 22 nt, Human
ucugaaaugcaggcaauuugcu

SEQ ID NO: 1067176 - RNA, 22 nt, Human
uccacagaauguaagauccaca

SEQ ID NO: 1067177 - RNA, 22 nt, Human
cugagcccucuguuuucccucu

SEQ ID NO: 1067178 - RNA, 22 nt, Human
guauuuucaagagcaguaguau

SEQ ID NO: 1067179 - RNA, 22 nt, Human
uggaggcaacugaagauguagu

SEQ ID NO: 1067180 - RNA, 22 nt, Human
acauucuucuugugaauuuacu

SEQ ID NO: 1067181 - RNA, 22 nt, Human
agcuuccuuggcgcugaggccu

SEQ ID NO: 1067182 - RNA, 22 nt, Human
aggaagcuccuggagagccagu

SEQ ID NO: 1067183 - RNA, 22 nt, Human
uauuugcaaagaacuacacuag

SEQ ID NO: 1067184 - RNA, 22 nt, Human
ggcucagguuaccagucccucc

SEQ ID NO: 1067185 - RNA, 22 nt, Human
uggcagagaaccugggcuuugu

SEQ ID NO: 1067186 - RNA, 22 nt, Human
ugccaggggaccuagggauguc

SEQ ID NO: 1067187 - RNA, 22 nt, Human
gaggcacaugacucaccaaugg

SEQ ID NO: 1067188 - RNA, 22 nt, Human
cccaggagguagagguugcagu

SEQ ID NO: 1067189 - RNA, 22 nt, Human
gguggguuuggaagagcaggcu

SEQ ID NO: 1067190 - RNA, 22 nt, Human
uggcuucugcuuucaguggagg

SEQ ID NO: 1067191 - RNA, 23 nt, Human
cugcagagaacugagggacagcc

SEQ ID NO: 1067192 - RNA, 22 nt, Human
ggggaagggaguccaaguguua

SEQ ID NO: 1067193 - RNA, 22 nt, Human
aggagcugucagagugccagag

SEQ ID NO: 1067194 - RNA, 22 nt, Human
auuuuacuacuccaauuaauga

SEQ ID NO: 1067195 - RNA, 22 nt, Human
augggcugaggaagcuccugag

SEQ ID NO: 1067196 - RNA, 22 nt, Human
aaagcauuguuucaagauuaac

SEQ ID NO: 1067197 - RNA, 22 nt, Human
ccaguguucaucaagaaaaugu

SEQ ID NO: 1067198 - RNA, 22 nt, Human
gcugcugugaauuuuuuaaaug

SEQ ID NO: 1067199 - RNA, 22 nt, Human
gauuuuauuagcccaaacuuug

SEQ ID NO: 1067200 - RNA, 22 nt, Human
auggacaaugugaaacuacaag

SEQ ID NO: 1067201 - RNA, 22 nt, Human
uugagaaaagcuguguaaggau

SEQ ID NO: 1067202 - RNA, 22 nt, Human
gccuccucuugagggucaggga

SEQ ID NO: 1067203 - RNA, 22 nt, Human
gcugucagaaggugaaggguaa

SEQ ID NO: 1067204 - RNA, 22 nt, Human
uccagcagguccgagacaaguu

SEQ ID NO: 1067205 - RNA, 21 nt, Human
uugaaggaucacuucuguacc

SEQ ID NO: 1067206 - RNA, 18 nt, Human
ucaagacaucaugaaaua

SEQ ID NO: 1067207 - RNA, 22 nt, Human
auaauaaugaaagccacugugu

SEQ ID NO: 1067208 - RNA, 22 nt, Human
uagcaggguccaaugugaggca

SEQ ID NO: 1067209 - RNA, 22 nt, Human
gggagguguucugccaacgcgg

SEQ ID NO: 1067210 - RNA, 22 nt, Human
agucucagaaaauaugcuuuuu

SEQ ID NO: 1067211 - RNA, 22 nt, Human
ugggccuggguuccuccugggc

SEQ ID NO: 1067212 - RNA, 22 nt, Human
gggagcaggagccugccugcca

SEQ ID NO: 1067213 - RNA, 22 nt, Human
agcugggcugggcugagcugag

SEQ ID NO: 1067214 - RNA, 22 nt, Human
agcaggugacagggcuguggug

SEQ ID NO: 1067215 - RNA, 22 nt, Human
ggugaggcccagugaucugugu

SEQ ID NO: 1067216 - RNA, 22 nt, Human
agagcuguucaacguagcaaug

SEQ ID NO: 1067217 - RNA, 22 nt, Human
agcccugcacaguucgggagga

SEQ ID NO: 1067218 - RNA, 22 nt, Human
uccaagaugguugguguggugg

SEQ ID NO: 1067219 - RNA, 22 nt, Human
uaucuacauucuuguaucuucu

SEQ ID NO: 1067220 - RNA, 22 nt, Human
auucacagggggagaaggguau

SEQ ID NO: 1067221 - RNA, 23 nt, Human
acagggcauugcuggccucgagg

SEQ ID NO: 1067222 - RNA, 22 nt, Human
aacuggaaccuuuuauucaguc

SEQ ID NO: 1067223 - RNA, 22 nt, Human
agaacauaucuguuuucuaacu

SEQ ID NO: 1067224 - RNA, 22 nt, Human
agaguaugcuacaaagccagcc

SEQ ID NO: 1067225 - RNA, 22 nt, Human
aggcaggugggucacuugaguc

SEQ ID NO: 1067226 - RNA, 22 nt, Human
aagaguuuuagacaaacugauu

SEQ ID NO: 1067227 - RNA, 22 nt, Human
agcaggcugcuggcguugaagu

SEQ ID NO: 1067228 - RNA, 22 nt, Human
aaauucuaaggucacaauguug

SEQ ID NO: 1067229 - RNA, 22 nt, Human
uacuguuucuacuacuuaggga

SEQ ID NO: 1067230 - RNA, 22 nt, Human
ucugagaguccaucuccaagcc

SEQ ID NO: 1067231 - RNA, 22 nt, Human
auguaauuuagaaaugaacaca

SEQ ID NO: 1067232 - RNA, 22 nt, Human
gggcuggaggagauccagaggc

SEQ ID NO: 1067233 - RNA, 22 nt, Human
ucagcugcuucauguucugaau

SEQ ID NO: 1067234 - RNA, 22 nt, Human
ugcagggccuucuagaccaugg

SEQ ID NO: 1067235 - RNA, 22 nt, Human
ucacugaauacuugucucaucc

SEQ ID NO: 1067236 - RNA, 22 nt, Human
uuaauacauuucagacuguuau

SEQ ID NO: 1067237 - RNA, 22 nt, Human
gggcaggagagaacagucaugg

SEQ ID NO: 1067238 - RNA, 22 nt, Human
agugcagcugggacuguagggu

SEQ ID NO: 1067239 - RNA, 22 nt, Human
accuggagaaagccucucccug

SEQ ID NO: 1067240 - RNA, 22 nt, Human
aucuuaccucuuccucugcauu

SEQ ID NO: 1067241 - RNA, 22 nt, Human
ucaaagucauggcaggcucaga

SEQ ID NO: 1067242 - RNA, 22 nt, Human
gaaauauucuugucuuguuuuc

SEQ ID NO: 1067243 - RNA, 22 nt, Human
gaaggaagggcuggcugucuug

SEQ ID NO: 1067244 - RNA, 22 nt, Human
aagaaaugugaauauugaauag

SEQ ID NO: 1067245 - RNA, 21 nt, Human
acacacucugagucuucuauu

SEQ ID NO: 1067246 - RNA, 22 nt, Human
gcagagcagugcuugcccagcg

SEQ ID NO: 1067247 - RNA, 22 nt, Human
guggcuugaccaucccugcuac

SEQ ID NO: 1067248 - RNA, 19 nt, Human
ugcuucuggaaugcaaggc

SEQ ID NO: 1067249 - RNA, 22 nt, Human
gcaaaauuaaacuuagcaucau

SEQ ID NO: 1067250 - RNA, 20 nt, Human
aggcucaggguguuuaggaa

SEQ ID NO: 1067251 - RNA, 22 nt, Human
uccugguggcuuucccugccuu

SEQ ID NO: 1067252 - RNA, 22 nt, Human
gccuucaggaaaucaguccuug

SEQ ID NO: 1067253 - RNA, 22 nt, Human
aagcagaugggacuccaaggca

SEQ ID NO: 1067254 - RNA, 22 nt, Human
aggguggccaugagggagagau

SEQ ID NO: 1067255 - RNA, 20 nt, Human
agggaggugcugggccugag

SEQ ID NO: 1067256 - RNA, 22 nt, Human
accaggcugugaagugagacua

SEQ ID NO: 1067257 - RNA, 22 nt, Human
uuuacaauucucuaccaguguu

SEQ ID NO: 1067258 - RNA, 22 nt, Human
uauugaaaugaaugacagugau

SEQ ID NO: 1067259 - RNA, 22 nt, Human
auguuuccgugagcauccuuga

SEQ ID NO: 1067260 - RNA, 22 nt, Human
uagaggcacccuggaggagacu

SEQ ID NO: 1067261 - RNA, 22 nt, Human
aggccucuggagguggcagugu

SEQ ID NO: 1067262 - RNA, 22 nt, Human
uuucacagcuuccacuuaagga

SEQ ID NO: 1067263 - RNA, 22 nt, Human
ucacaguagccauuucaugagu

SEQ ID NO: 1067264 - RNA, 22 nt, Human
gugcagcuuccuggucucagcc

SEQ ID NO: 1067265 - RNA, 22 nt, Human
aucacagagauugcuuuuaaaa

SEQ ID NO: 1067266 - RNA, 22 nt, Human
uuccaaguccagccaggccaaa

SEQ ID NO: 1067267 - RNA, 21 nt, Human
uucuccccagcgaauccucgg

SEQ ID NO: 1067268 - RNA, 22 nt, Human
uuuuucuagaccuuaaaggcca

SEQ ID NO: 1067269 - RNA, 21 nt, Human
guauaucagcagugaauucaa

SEQ ID NO: 1067270 - RNA, 22 nt, Human
ccucuucaccucgggcacacug

SEQ ID NO: 1067271 - RNA, 22 nt, Human
ucucuuccaguggcuuugauuu

SEQ ID NO: 1067272 - RNA, 22 nt, Human
cauuuaagagaaauauuuaguu

SEQ ID NO: 1067273 - RNA, 22 nt, Human
uauucacaggcuggagugaugu

SEQ ID NO: 1067274 - RNA, 21 nt, Human
ucugucugguuuuagaguggc

SEQ ID NO: 1067275 - RNA, 22 nt, Human
uuugagaagauguaauguuaag

SEQ ID NO: 1067276 - RNA, 22 nt, Human
ucagagagugcaaaauauagcu

SEQ ID NO: 1067277 - RNA, 22 nt, Human
ucugccuguugagccuaaggcc

SEQ ID NO: 1067278 - RNA, 22 nt, Human
ucaugcuaguuaagaacacaau

SEQ ID NO: 1067279 - RNA, 22 nt, Human
cugcugucuuuauuucacugcu

SEQ ID NO: 1067280 - RNA, 22 nt, Human
auucaaguucuucugucuuugc

SEQ ID NO: 1067281 - RNA, 22 nt, Human
cacaucagggcugcuugggggu

SEQ ID NO: 1067282 - RNA, 22 nt, Human
ugauucuuucuccaccaauuca

SEQ ID NO: 1067283 - RNA, 22 nt, Human
acucuaaaaugcuaugagaucu

SEQ ID NO: 1067284 - RNA, 22 nt, Human
auguaugauauuuccaguauca

SEQ ID NO: 1067285 - RNA, 22 nt, Human
cacaguggcagguguggguugu

SEQ ID NO: 1067286 - RNA, 22 nt, Human
caaaguacagugcuuccuggga

SEQ ID NO: 1067287 - RNA, 22 nt, Human
caguugaugggacucauguggg

SEQ ID NO: 1067288 - RNA, 22 nt, Human
cacaggagugcugcuauuguug

SEQ ID NO: 1067289 - RNA, 17 nt, Human
ucaggcugugccuggua

SEQ ID NO: 1067290 - RNA, 22 nt, Human
agaagccacaggccucgucugg

SEQ ID NO: 1067291 - RNA, 22 nt, Human
cuuauuagaguuguguucuguu

SEQ ID NO: 1067292 - RNA, 19 nt, Human
uccuccuuacuuccucuug

SEQ ID NO: 1067293 - RNA, 22 nt, Human
gagcuuggacaccuuggcaggu

SEQ ID NO: 1067294 - RNA, 22 nt, Human
acauuucagauguaaugugaug

SEQ ID NO: 1067295 - RNA, 22 nt, Human
gcugaggccucagaaggcugag

SEQ ID NO: 1067296 - RNA, 22 nt, Human
gcagauaggguauuaggaguaa

SEQ ID NO: 1067297 - RNA, 22 nt, Human
cauggccugccuccuccuggug

SEQ ID NO: 1067298 - RNA, 22 nt, Human
agccuggauucgugcauccaca

SEQ ID NO: 1067299 - RNA, 20 nt, Human
cuccugggacugcugguuau

SEQ ID NO: 1067300 - RNA, 22 nt, Human
cacaacuuagcagcuugaaaca

SEQ ID NO: 1067301 - RNA, 22 nt, Human
uauuaaagagagaaucaucauc

SEQ ID NO: 1067302 - RNA, 22 nt, Human
ugccuacauuccuugcuuaugg

SEQ ID NO: 1067303 - RNA, 22 nt, Human
augucagagcuuccacaauagu

SEQ ID NO: 1067304 - RNA, 22 nt, Human
cggagccugcuuguugcagcug

SEQ ID NO: 1067305 - RNA, 23 nt, Human
cagguggcuccacgagggguggg

SEQ ID NO: 1067306 - RNA, 22 nt, Human
cgaggcagggaagcugcaaaag

SEQ ID NO: 1067307 - RNA, 22 nt, Human
ucagacaucucauaauguauua

SEQ ID NO: 1067308 - RNA, 22 nt, Human
aagauucuguauuucuaacaau

SEQ ID NO: 1067309 - RNA, 22 nt, Human
aagauuuccuggauguaauucc

SEQ ID NO: 1067310 - RNA, 23 nt, Human
gaggccacauuccccugcuugag

SEQ ID NO: 1067311 - RNA, 22 nt, Human
auacaaguuaaugagaaugaca

SEQ ID NO: 1067312 - RNA, 22 nt, Human
caggacaguauaggcuuuagga

SEQ ID NO: 1067313 - RNA, 22 nt, Human
uucuccagagguggcuagaguu

SEQ ID NO: 1067314 - RNA, 22 nt, Human
uuacugaagguggauagugagu

SEQ ID NO: 1067315 - RNA, 22 nt, Human
uaccugaaguaacaaugaauau

SEQ ID NO: 1067316 - RNA, 22 nt, Human
cuagccaugggcauuaaaggua

SEQ ID NO: 1067317 - RNA, 22 nt, Human
uauugacaauuugugaaacuau

SEQ ID NO: 1067318 - RNA, 22 nt, Human
ucucuggaauuggcugaggcaa

SEQ ID NO: 1067319 - RNA, 22 nt, Human
cccaggucccgccccagcucua

SEQ ID NO: 1067320 - RNA, 22 nt, Human
uccagcuugccuggucuuuugg

SEQ ID NO: 1067321 - RNA, 22 nt, Human
augaaauugaucuugaacuuuu

SEQ ID NO: 1067322 - RNA, 22 nt, Human
gaggaccacagaugagccugca

SEQ ID NO: 1067323 - RNA, 22 nt, Human
aggcagagaaaaaccagauaug

SEQ ID NO: 1067324 - RNA, 21 nt, Human
aaucaaaugucauauccccag

SEQ ID NO: 1067325 - RNA, 22 nt, Human
uauuucuuucagguauguguug

SEQ ID NO: 1067326 - RNA, 22 nt, Human
ggggcugauggaacucaggccu

SEQ ID NO: 1067327 - RNA, 23 nt, Human
acucacaaagcaggaucauguug

SEQ ID NO: 1067328 - RNA, 22 nt, Human
aaaguauuugugauuuuuacca

SEQ ID NO: 1067329 - RNA, 22 nt, Human
ucuccaggccuuucccaucuua

SEQ ID NO: 1067330 - RNA, 22 nt, Human
uuuacagcuagacauaccugag

SEQ ID NO: 1067331 - RNA, 22 nt, Human
guggggacgggauggcucacug

SEQ ID NO: 1067332 - RNA, 22 nt, Human
cuucugaagagguuaucauaga

SEQ ID NO: 1067333 - RNA, 22 nt, Human
ccaguguucccucggguucaug

SEQ ID NO: 1067334 - RNA, 22 nt, Human
gcugaaaugcagaucccucacu

SEQ ID NO: 1067335 - RNA, 22 nt, Human
ucuuugcacugugcaagcagaa

SEQ ID NO: 1067336 - RNA, 20 nt, Human
gagagcuggggaugaggcug

SEQ ID NO: 1067337 - RNA, 20 nt, Human
augugaaagaucaguugucu

SEQ ID NO: 1067338 - RNA, 22 nt, Human
ucacauuuuguucaaggcuagu

SEQ ID NO: 1067339 - RNA, 22 nt, Human
gcagacaggauuggguuaauag

SEQ ID NO: 1067340 - RNA, 22 nt, Human
uuauguacucugcaauguuuga

SEQ ID NO: 1067341 - RNA, 22 nt, Human
agaagccagcuucagcugcccg

SEQ ID NO: 1067342 - RNA, 22 nt, Human
gucugcccuuggcucagccaua

SEQ ID NO: 1067343 - RNA, 22 nt, Human
ugucccaguuuugcagguuaga

SEQ ID NO: 1067344 - RNA, 20 nt, Human
ucaauuuucuacaacauuug

SEQ ID NO: 1067345 - RNA, 22 nt, Human
cucagacuggagccccaaggac

SEQ ID NO: 1067346 - RNA, 22 nt, Human
cagucucugccacuucuaagcu

SEQ ID NO: 1067347 - RNA, 22 nt, Human
cuggggaacaauuugccacacu

SEQ ID NO: 1067348 - RNA, 22 nt, Human
aggaagaugugcaaaguuggaa

SEQ ID NO: 1067349 - RNA, 20 nt, Human
cuuccuuuuccuucgucaaa

SEQ ID NO: 1067350 - RNA, 22 nt, Human
cagaguguuagcgcugguuggg

SEQ ID NO: 1067351 - RNA, 22 nt, Human
aacagacauauuuuuaauaugc

SEQ ID NO: 1067352 - RNA, 22 nt, Human
acagaccaaaaaaggauauugg

SEQ ID NO: 1067353 - RNA, 22 nt, Human
cuggcucugggccucagacacu

SEQ ID NO: 1067354 - RNA, 22 nt, Human
gacuucugagcuauccagcugu

SEQ ID NO: 1067355 - RNA, 22 nt, Human
ugguccuucguggugcaguucu

SEQ ID NO: 1067356 - RNA, 22 nt, Human
auaaauggcuuucauuccuagg

SEQ ID NO: 1067357 - RNA, 22 nt, Human
cagaccucaguccucaguagga

SEQ ID NO: 1067358 - RNA, 22 nt, Human
ccagaagaaaaagcugguauua

SEQ ID NO: 1067359 - RNA, 22 nt, Human
ugcaggagcugugcggugaggg

SEQ ID NO: 1067360 - RNA, 22 nt, Human
agugggcugagcuugcugggug

SEQ ID NO: 1067361 - RNA, 22 nt, Human
cgggcagcggcguggccauggu

SEQ ID NO: 1067362 - RNA, 22 nt, Human
gaggagggagcuggaagcucuu

SEQ ID NO: 1067363 - RNA, 22 nt, Human
cugggguccuugccauguguca

SEQ ID NO: 1067364 - RNA, 22 nt, Human
guccuuaaccacuuguguuuau

SEQ ID NO: 1067365 - RNA, 22 nt, Human
aacccaggguggagguugcagu

SEQ ID NO: 1067366 - RNA, 22 nt, Human
uuugaaaggagcuuuauccaga

SEQ ID NO: 1067367 - RNA, 22 nt, Human
agcaggaggguuuuguagaguc

SEQ ID NO: 1067368 - RNA, 22 nt, Human
aguggauggucacugauccagu

SEQ ID NO: 1067369 - RNA, 22 nt, Human
acccugggcuuggccugcucag

SEQ ID NO: 1067370 - RNA, 22 nt, Human
uguccccaagguucagcccaca

SEQ ID NO: 1067371 - RNA, 22 nt, Human
ucuggcucuguguccccaccca

SEQ ID NO: 1067372 - RNA, 22 nt, Human
gcagugcuaaguagcuggccca

SEQ ID NO: 1067373 - RNA, 21 nt, Human
ucuggagcccuaagcugagaa

SEQ ID NO: 1067374 - RNA, 22 nt, Human
gauaugaaguggcauugugaag

SEQ ID NO: 1067375 - RNA, 22 nt, Human
caggcuccuucccagggauggu

SEQ ID NO: 1067376 - RNA, 22 nt, Human
ccauuucacucuuccugaagga

SEQ ID NO: 1067377 - RNA, 22 nt, Human
gcuaucucuuuaguacuagauu

SEQ ID NO: 1067378 - RNA, 22 nt, Human
cagauggcauuuccuuucuggc

SEQ ID NO: 1067379 - RNA, 22 nt, Human
guggguggaggcgucgagggca

SEQ ID NO: 1067380 - RNA, 22 nt, Human
gccagagcaugcacugccugca

SEQ ID NO: 1067381 - RNA, 22 nt, Human
gaaggaaaacagaucugccuga

SEQ ID NO: 1067382 - RNA, 22 nt, Human
uccaaauacauuuacuguauuu

SEQ ID NO: 1067383 - RNA, 22 nt, Human
ugcacacauguuuacaagcauc

SEQ ID NO: 1067384 - RNA, 22 nt, Human
ugaggcagcccacuuuccuuag

SEQ ID NO: 1067385 - RNA, 22 nt, Human
ugcuccuuccucauccugugca

SEQ ID NO: 1067386 - RNA, 22 nt, Human
uuaauuuauacauaaucacagg

SEQ ID NO: 1067387 - RNA, 22 nt, Human
ggcucuggugggaagguuagau

SEQ ID NO: 1067388 - RNA, 20 nt, Human
cuguagggugcagcaggcuc

SEQ ID NO: 1067389 - RNA, 22 nt, Human
augggcuguccuaguccagccc

SEQ ID NO: 1067390 - RNA, 22 nt, Human
ucgcauuuguuaaagcauguug

SEQ ID NO: 1067391 - RNA, 22 nt, Human
gcaagcugaugugauagugaaa

SEQ ID NO: 1067392 - RNA, 22 nt, Human
auuuacagguagaauuuuaagu

SEQ ID NO: 1067393 - RNA, 23 nt, Human
aaucaccagcagccaaugugcag

SEQ ID NO: 1067394 - RNA, 22 nt, Human
ugugugugggcggaacggcccc

SEQ ID NO: 1067395 - RNA, 22 nt, Human
uuccugugaagccgguggucuc

SEQ ID NO: 1067396 - RNA, 22 nt, Human
uuccauuguuucugucuucacu

SEQ ID NO: 1067397 - RNA, 19 nt, Human
agaaaaacugguacugcug

SEQ ID NO: 1067398 - RNA, 22 nt, Human
auauacugaggagacuuuauau

SEQ ID NO: 1067399 - RNA, 22 nt, Human
cugaagaugucugagaugcuca

SEQ ID NO: 1067400 - RNA, 22 nt, Human
uauuaauaagugacuacuagcu

SEQ ID NO: 1067401 - RNA, 22 nt, Human
uuuauuauguacaggcacuaua

SEQ ID NO: 1067402 - RNA, 22 nt, Human
uaagucaggaggucuccugaca

SEQ ID NO: 1067403 - RNA, 22 nt, Human
ucucaagaucucaagauggccc

SEQ ID NO: 1067404 - RNA, 20 nt, Human
gcucugaccauaucaagaca

SEQ ID NO: 1067405 - RNA, 22 nt, Human
agugugugcuguuccccggagg

SEQ ID NO: 1067406 - RNA, 22 nt, Human
uucuuuggggaauauucugguu

SEQ ID NO: 1067407 - RNA, 22 nt, Human
ggcuuaagaugguagcuuugag

SEQ ID NO: 1067408 - RNA, 22 nt, Human
uucauugugaacacauucugcc

SEQ ID NO: 1067409 - RNA, 22 nt, Human
gccacaugcaauugcagcacgu

SEQ ID NO: 1067410 - RNA, 22 nt, Human
cuguacaggucaaugauaagau

SEQ ID NO: 1067411 - RNA, 22 nt, Human
cugcagagcauaaaucugaaua

SEQ ID NO: 1067412 - RNA, 22 nt, Human
aauuucaccugcacuacaucgc

SEQ ID NO: 1067413 - RNA, 22 nt, Human
gugccugggcaugagcuuguug

SEQ ID NO: 1067414 - RNA, 22 nt, Human
auguuuuauuaccaacuuguac

SEQ ID NO: 1067415 - RNA, 22 nt, Human
ugcacagagagaugagacacgu

SEQ ID NO: 1067416 - RNA, 22 nt, Human
auucaacuagugauuguguuau

SEQ ID NO: 1067417 - RNA, 22 nt, Human
accaaaaagauauguugaagcc

SEQ ID NO: 1067418 - RNA, 22 nt, Human
cugccugugugugccugcagaa

SEQ ID NO: 1067419 - RNA, 22 nt, Human
aggugcuuggcucgugcacaca

SEQ ID NO: 1067420 - RNA, 22 nt, Human
agcacagguacggagaugcuac

SEQ ID NO: 1067421 - RNA, 22 nt, Human
gcacacagggauuuuugaaugg

SEQ ID NO: 1067422 - RNA, 22 nt, Human
ucucccaggcugcccuguggac

SEQ ID NO: 1067423 - RNA, 22 nt, Human
agagccuggggauuggcaaggg

SEQ ID NO: 1067424 - RNA, 22 nt, Human
guggagcccugccuugcucaug

SEQ ID NO: 1067425 - RNA, 22 nt, Human
agaaagcuccccaugagaugau

SEQ ID NO: 1067426 - RNA, 22 nt, Human
gagaaagggauaauuugaagag

SEQ ID NO: 1067427 - RNA, 22 nt, Human
uccagcucuaacaugcugggcc

SEQ ID NO: 1067428 - RNA, 21 nt, Human
gccaccucgucucggagcagc

SEQ ID NO: 1067429 - RNA, 20 nt, Human
guggcagugguggcagcagu

SEQ ID NO: 1067430 - RNA, 22 nt, Human
gcagccucagggcacucagaug

SEQ ID NO: 1067431 - RNA, 21 nt, Human
ugcagcugacacugguaugcc

SEQ ID NO: 1067432 - RNA, 22 nt, Human
uugaaagaagaagcugcgaugu

SEQ ID NO: 1067433 - RNA, 22 nt, Human
cagacacugcagcagucuccca

SEQ ID NO: 1067434 - RNA, 22 nt, Human
cugccacuuucacccagugcuc

SEQ ID NO: 1067435 - RNA, 22 nt, Human
cccucgagguuuucugagguac

SEQ ID NO: 1067436 - RNA, 23 nt, Human
augugugggaggucagagagcca

SEQ ID NO: 1067437 - RNA, 22 nt, Human
acggaaugagucuugaaaagug

SEQ ID NO: 1067438 - RNA, 22 nt, Human
ugcugaguauuuguuugaauaa

SEQ ID NO: 1067439 - RNA, 21 nt, Human
auggaaauuggcaaaugcuac

SEQ ID NO: 1067440 - RNA, 22 nt, Human
auugaaagagaauguagcucuu

SEQ ID NO: 1067441 - RNA, 21 nt, Human
gccugcagaccccaccaggcu

SEQ ID NO: 1067442 - RNA, 22 nt, Human
cagggcccauggcucagguagg

SEQ ID NO: 1067443 - RNA, 22 nt, Human
ggagcugaaggggugggcucag

SEQ ID NO: 1067444 - RNA, 22 nt, Human
agcacaaauauaaaaaugucug

SEQ ID NO: 1067445 - RNA, 22 nt, Human
caaagcaguuuuaaucaaguag

SEQ ID NO: 1067446 - RNA, 22 nt, Human
gaauacaagccugccaccugga

SEQ ID NO: 1067447 - RNA, 20 nt, Human
gcaauuaauuuuugguuaca

SEQ ID NO: 1067448 - RNA, 22 nt, Human
ggcucugguugaccaugauggc

SEQ ID NO: 1067449 - RNA, 22 nt, Human
gugucccaaucuacuuuucccu

SEQ ID NO: 1067450 - RNA, 22 nt, Human
acaggcagcacuaaucucuggu

SEQ ID NO: 1067451 - RNA, 22 nt, Human
ccuggcuggacuggaccguggc

SEQ ID NO: 1067452 - RNA, 22 nt, Human
ccugggugacccgugagcgucc

SEQ ID NO: 1067453 - RNA, 22 nt, Human
uucuacauauauuuuucucacu

SEQ ID NO: 1067454 - RNA, 22 nt, Human
uucaggauggcggauguugggg

SEQ ID NO: 1067455 - RNA, 22 nt, Human
cucagcagcagggaagagguca

SEQ ID NO: 1067456 - RNA, 22 nt, Human
uucuuuaaaauagugagaaaga

SEQ ID NO: 1067457 - RNA, 22 nt, Human
gcugagcacaccuaggguagag

SEQ ID NO: 1067458 - RNA, 22 nt, Human
cugaagcaugcguuuguaaacu

SEQ ID NO: 1067459 - RNA, 22 nt, Human
gugcaugugucuuuauaguaga

SEQ ID NO: 1067460 - RNA, 19 nt, Human
caugaugagcauccugcag

SEQ ID NO: 1067461 - RNA, 22 nt, Human
ugaaaugauguacaagaaggca

SEQ ID NO: 1067462 - RNA, 22 nt, Human
ugaaggagaaauggaaaguggg

SEQ ID NO: 1067463 - RNA, 22 nt, Human
uuuaaaaguuaucaucugucca

SEQ ID NO: 1067464 - RNA, 19 nt, Human
ugcucaggccaaggagccc

SEQ ID NO: 1067465 - RNA, 22 nt, Human
aauaaaggcaccauaaggcaaa

SEQ ID NO: 1067466 - RNA, 22 nt, Human
gcagcugauggaaguccuauug

SEQ ID NO: 1067467 - RNA, 22 nt, Human
cuuauacauaaaauggguguag

SEQ ID NO: 1067468 - RNA, 22 nt, Human
aucagcaaaaaugccuucagaa

SEQ ID NO: 1067469 - RNA, 22 nt, Human
cugccuugaggagguuguggga

SEQ ID NO: 1067470 - RNA, 22 nt, Human
agaaaauuagauuuuacugugu

SEQ ID NO: 1067471 - RNA, 22 nt, Human
aucuucaaagcacaucguuugu

SEQ ID NO: 1067472 - RNA, 22 nt, Human
uguaggccuauguccagcaauu

SEQ ID NO: 1067473 - RNA, 22 nt, Human
guguuuuaucagacaaaguaua

SEQ ID NO: 1067474 - RNA, 22 nt, Human
gcuggccugucuagagccuuac

SEQ ID NO: 1067475 - RNA, 22 nt, Human
gaggguggccuuuagagcccau

SEQ ID NO: 1067476 - RNA, 22 nt, Human
ugugccugucccgcauucuggu

SEQ ID NO: 1067477 - RNA, 22 nt, Human
cucagggucugguccuuagauu

SEQ ID NO: 1067478 - RNA, 20 nt, Human
gcugggcuaccacuggcccu

SEQ ID NO: 1067479 - RNA, 22 nt, Human
uuuguagacuaccaguaauugu

SEQ ID NO: 1067480 - RNA, 22 nt, Human
acaaauguuggauuugucuucc

SEQ ID NO: 1067481 - RNA, 22 nt, Human
gcagcugagcgugaggaagagu

SEQ ID NO: 1067482 - RNA, 22 nt, Human
acugccuugaaagauuguugag

SEQ ID NO: 1067483 - RNA, 22 nt, Human
cucuccagccaggggcuuccug

SEQ ID NO: 1067484 - RNA, 22 nt, Human
cagcucugaggaacacuccuuu

SEQ ID NO: 1067485 - RNA, 22 nt, Human
aauuucacagugaacuuugagg

SEQ ID NO: 1067486 - RNA, 22 nt, Human
uucaaaagcgguccaggaagau

SEQ ID NO: 1067487 - RNA, 22 nt, Human
agcuggccuucggugucacugg

SEQ ID NO: 1067488 - RNA, 22 nt, Human
ugugccugauggucacguggcc

SEQ ID NO: 1067489 - RNA, 22 nt, Human
gccuucucccuaaccaaauccu

SEQ ID NO: 1067490 - RNA, 22 nt, Human
cuuugaaauucuucagcugaag

SEQ ID NO: 1067491 - RNA, 22 nt, Human
ugugccuggaucucugugacaa

SEQ ID NO: 1067492 - RNA, 22 nt, Human
aucagaggaaauuaacucucuc

SEQ ID NO: 1067493 - RNA, 22 nt, Human
uuuuaaacugcagaauuuagaa

SEQ ID NO: 1067494 - RNA, 22 nt, Human
agccuggcccugcugaacucug

SEQ ID NO: 1067495 - RNA, 22 nt, Human
acagaacauggauuuuugaagu

SEQ ID NO: 1067496 - RNA, 22 nt, Human
ucacaucuguugauacagcauc

SEQ ID NO: 1067497 - RNA, 22 nt, Human
cuuuucucuuacauuccacugg

SEQ ID NO: 1067498 - RNA, 22 nt, Human
ccaggagcagggcuggcugcac

SEQ ID NO: 1067499 - RNA, 22 nt, Human
cugggagaugacucagagcagg

SEQ ID NO: 1067500 - RNA, 22 nt, Human
uuggaccaaauuaaaaguuggc

SEQ ID NO: 1067501 - RNA, 22 nt, Human
aguucuuuucuagauucuggau

SEQ ID NO: 1067502 - RNA, 22 nt, Human
gcugccagcuuuccuuggcuga

SEQ ID NO: 1067503 - RNA, 22 nt, Human
gcucucagaugcuccagcagcc

SEQ ID NO: 1067504 - RNA, 22 nt, Human
uuugagaaaugggcucugugcu

SEQ ID NO: 1067505 - RNA, 22 nt, Human
ggcucugucaccuaugagcuga

SEQ ID NO: 1067506 - RNA, 22 nt, Human
ucgcagaggcacgagugcagaa

SEQ ID NO: 1067507 - RNA, 22 nt, Human
gccagguguaguggccacaccu

SEQ ID NO: 1067508 - RNA, 22 nt, Human
aaagagaaaaugaucuguacau

SEQ ID NO: 1067509 - RNA, 22 nt, Human
uaaaagaagcuucaaggccggc

SEQ ID NO: 1067510 - RNA, 17 nt, Human
uggcaagaauggaaaug

SEQ ID NO: 1067511 - RNA, 22 nt, Human
agcccucaggcuuugcugggcc

SEQ ID NO: 1067512 - RNA, 22 nt, Human
caggcugcagaggccuuucaug

SEQ ID NO: 1067513 - RNA, 22 nt, Human
aggacuuagaacauuauguacu

SEQ ID NO: 1067514 - RNA, 22 nt, Human
uuucuguagggauuucacaguu

SEQ ID NO: 1067515 - RNA, 22 nt, Human
cuugggagacacaagaagacau

SEQ ID NO: 1067516 - RNA, 22 nt, Human
gcagagccccauugcuggcggg

SEQ ID NO: 1067517 - RNA, 22 nt, Human
agucagucaccauuuaagaaca

SEQ ID NO: 1067518 - RNA, 18 nt, Human
ucauucauuaaacuuggc

SEQ ID NO: 1067519 - RNA, 22 nt, Human
gaggcugguucugaaguacugu

SEQ ID NO: 1067520 - RNA, 21 nt, Human
ccugagccuguuuauccagaa

SEQ ID NO: 1067521 - RNA, 22 nt, Human
cccuggaggaccccaauguggc

SEQ ID NO: 1067522 - RNA, 22 nt, Human
cagagcugugauaaauagauau

SEQ ID NO: 1067523 - RNA, 22 nt, Human
ggaaaucaucugauuggcuuuc

SEQ ID NO: 1067524 - RNA, 23 nt, Human
agcaggaaaccgagggugauguu

SEQ ID NO: 1067525 - RNA, 20 nt, Human
gcccuggagccuuguccugg

SEQ ID NO: 1067526 - RNA, 22 nt, Human
cugaaaugggcaaaaguagauu

SEQ ID NO: 1067527 - RNA, 22 nt, Human
aagcacagacacaaaaggcuuu

SEQ ID NO: 1067528 - RNA, 22 nt, Human
uggagcugguucuggggaagcu

SEQ ID NO: 1067529 - RNA, 22 nt, Human
agcagacagguaggaggauaaa

SEQ ID NO: 1067530 - RNA, 22 nt, Human
uguccuuuucuuuagugcagcu

SEQ ID NO: 1067531 - RNA, 22 nt, Human
aaaguuuuauucaagcauuagu

SEQ ID NO: 1067532 - RNA, 22 nt, Human
cugcugaugaccucaaacucuu

SEQ ID NO: 1067533 - RNA, 22 nt, Human
ccugccugacagagaagguuca

SEQ ID NO: 1067534 - RNA, 23 nt, Human
agcagggccagaauacuugcugu

SEQ ID NO: 1067535 - RNA, 22 nt, Human
augcuguauacauaugaaauua

SEQ ID NO: 1067536 - RNA, 22 nt, Human
uggcaagaauauuggaccagaa

SEQ ID NO: 1067537 - RNA, 22 nt, Human
agagccagcaagugaauaguga

SEQ ID NO: 1067538 - RNA, 22 nt, Human
cacagcugugagaagggagccu

SEQ ID NO: 1067539 - RNA, 22 nt, Human
gaggcucagagacuuuaaguuu

SEQ ID NO: 1067540 - RNA, 22 nt, Human
auucacaguauggacgaaauga

SEQ ID NO: 1067541 - RNA, 22 nt, Human
ugaagagaagaaaauuaucuuu

SEQ ID NO: 1067542 - RNA, 22 nt, Human
gcuuuuuugcuauugaaguggu

SEQ ID NO: 1067543 - RNA, 22 nt, Human
gcagagcuccccaagacaccaa

SEQ ID NO: 1067544 - RNA, 22 nt, Human
auuucuuacauaacaaauuguu

SEQ ID NO: 1067545 - RNA, 22 nt, Human
ucugcuggucaaggcugggucc

SEQ ID NO: 1067546 - RNA, 22 nt, Human
caacugcuuggaggaauacugc

SEQ ID NO: 1067547 - RNA, 22 nt, Human
guuuuucugugagcgguaaagg

SEQ ID NO: 1067548 - RNA, 22 nt, Human
cucccaagggguaagggagcug

SEQ ID NO: 1067549 - RNA, 22 nt, Human
uugaaagugccaaguccuagug

SEQ ID NO: 1067550 - RNA, 20 nt, Human
uucaggauucuagaccacac

SEQ ID NO: 1067551 - RNA, 22 nt, Human
aggcacacagaccccagcaagu

SEQ ID NO: 1067552 - RNA, 22 nt, Human
acaaauuucauaggcaaauuuu

SEQ ID NO: 1067553 - RNA, 22 nt, Human
gcccugcucauuucacguguuu

SEQ ID NO: 1067554 - RNA, 22 nt, Human
ggcucagcuuggugcgcagaaa

SEQ ID NO: 1067555 - RNA, 22 nt, Human
ccugcuggcgcuugucugggag

SEQ ID NO: 1067556 - RNA, 22 nt, Human
gggaccugggccagaggacagu

SEQ ID NO: 1067557 - RNA, 22 nt, Human
cagugcccuuccaggacugcag

SEQ ID NO: 1067558 - RNA, 22 nt, Human
acagagucauucauuguccagu

SEQ ID NO: 1067559 - RNA, 22 nt, Human
cuucucaguugcaagugucaga

SEQ ID NO: 1067560 - RNA, 22 nt, Human
guugaaagcuuuucauuuaguu

SEQ ID NO: 1067561 - RNA, 21 nt, Human
cacagaauauacauuuuaguu

SEQ ID NO: 1067562 - RNA, 22 nt, Human
gcauuucaugccguggaagucc

SEQ ID NO: 1067563 - RNA, 22 nt, Human
uucaaguagucacacaugauau

SEQ ID NO: 1067564 - RNA, 21 nt, Human
uccugggaagcacuggggugg

SEQ ID NO: 1067565 - RNA, 22 nt, Human
acucucagaggguggcagcaau

SEQ ID NO: 1067566 - RNA, 22 nt, Human
acuuuuaucaaggaagugaucu

SEQ ID NO: 1067567 - RNA, 19 nt, Human
cuguccugguuuggucccu

SEQ ID NO: 1067568 - RNA, 22 nt, Human
agacccugcaccucucgugggc

SEQ ID NO: 1067569 - RNA, 22 nt, Human
agaugugguaguugaagggaag

SEQ ID NO: 1067570 - RNA, 20 nt, Human
aggcagacaaggagucuguu

SEQ ID NO: 1067571 - RNA, 22 nt, Human
aggcugugcucagccaauggga

SEQ ID NO: 1067572 - RNA, 22 nt, Human
guggccaggccgacugccaggc

SEQ ID NO: 1067573 - RNA, 22 nt, Human
ugcuaaguucugcaaaagauaa

SEQ ID NO: 1067574 - RNA, 22 nt, Human
uccaggcuaauuuugcauuguu

SEQ ID NO: 1067575 - RNA, 22 nt, Human
uaucuacuccucuuucagaugc

SEQ ID NO: 1067576 - RNA, 22 nt, Human
uacauucuacuuuuucacuccc

SEQ ID NO: 1067577 - RNA, 22 nt, Human
gcacugggaaugugagcagcug

SEQ ID NO: 1067578 - RNA, 22 nt, Human
agcgcaggaacacgucugccuu

SEQ ID NO: 1067579 - RNA, 22 nt, Human
agaacacacgucagaguuuccu

SEQ ID NO: 1067580 - RNA, 22 nt, Human
uauauagaaaagcagauguugg

SEQ ID NO: 1067581 - RNA, 22 nt, Human
ccaggguggaggcuggauggag

SEQ ID NO: 1067582 - RNA, 22 nt, Human
gcuuuuuugggaugccugccuu

SEQ ID NO: 1067583 - RNA, 22 nt, Human
ugcaauaacccaguaucuguga

SEQ ID NO: 1067584 - RNA, 22 nt, Human
ucaaugaugcugaagguagcgu

SEQ ID NO: 1067585 - RNA, 22 nt, Human
agcccagcuuugaaccauauca

SEQ ID NO: 1067586 - RNA, 22 nt, Human
aguacagauuuagacacgauag

SEQ ID NO: 1067587 - RNA, 22 nt, Human
cccagggcuuuucucacuagac

SEQ ID NO: 1067588 - RNA, 22 nt, Human
ugaaggcacuugccuaggggca

SEQ ID NO: 1067589 - RNA, 22 nt, Human
agcagccagagucugaacauua

SEQ ID NO: 1067590 - RNA, 22 nt, Human
gaggacagugugaucugccagc

SEQ ID NO: 1067591 - RNA, 22 nt, Human
gccaggccugcaagugcuggug

SEQ ID NO: 1067592 - RNA, 22 nt, Human
agcagccacccagcugcucauu

SEQ ID NO: 1067593 - RNA, 22 nt, Human
uguggggccucgugcuagcugg

SEQ ID NO: 1067594 - RNA, 22 nt, Human
agaaggcacucacacuggcacg

SEQ ID NO: 1067595 - RNA, 21 nt, Human
auucagaaagggaauaaacuc

SEQ ID NO: 1067596 - RNA, 22 nt, Human
cagguggggagaguguggagca

SEQ ID NO: 1067597 - RNA, 22 nt, Human
ggugggcaacauuuggccugag

SEQ ID NO: 1067598 - RNA, 23 nt, Human
uuaaaaguggagagagaagcugg

SEQ ID NO: 1067599 - RNA, 22 nt, Human
uagaaaauguuccacugccauu

SEQ ID NO: 1067600 - RNA, 20 nt, Human
aggagccauugacugcagca

SEQ ID NO: 1067601 - RNA, 22 nt, Human
ugcagcuagcgugccuagugaa

SEQ ID NO: 1067602 - RNA, 17 nt, Human
gcagaaaagucaaggga

SEQ ID NO: 1067603 - RNA, 22 nt, Human
cuuggggcugucacucuggcau

SEQ ID NO: 1067604 - RNA, 22 nt, Human
cacugcaaccuccagcucucag

SEQ ID NO: 1067605 - RNA, 22 nt, Human
aaaucuuucccuuuacuaucca

SEQ ID NO: 1067606 - RNA, 22 nt, Human
acugucuccucaucaugccugg

SEQ ID NO: 1067607 - RNA, 22 nt, Human
gcagguggagcaguagucuggu

SEQ ID NO: 1067608 - RNA, 22 nt, Human
ugugaugguucacugggcauga

SEQ ID NO: 1067609 - RNA, 21 nt, Human
guuauacauucuauggauuug

SEQ ID NO: 1067610 - RNA, 22 nt, Human
uucaaagaccuuacuuggcaaa

SEQ ID NO: 1067611 - RNA, 22 nt, Human
cacucucagcauaaugaaugug

SEQ ID NO: 1067612 - RNA, 22 nt, Human
gagccaggguuugaaacuagac

SEQ ID NO: 1067613 - RNA, 22 nt, Human
aaagaauacuccuuuugccuug

SEQ ID NO: 1067614 - RNA, 22 nt, Human
ugaaaugagauagauaaucagg

SEQ ID NO: 1067615 - RNA, 22 nt, Human
aaagacauggaacuagagaugg

SEQ ID NO: 1067616 - RNA, 22 nt, Human
gcuggagccuucugcucuguug

SEQ ID NO: 1067617 - RNA, 22 nt, Human
gcugccuggauuugcaauccuc

SEQ ID NO: 1067618 - RNA, 22 nt, Human
gucacaggaagcagcaggcacu

SEQ ID NO: 1067619 - RNA, 22 nt, Human
gcaggaggccagguaugcuuua

SEQ ID NO: 1067620 - RNA, 22 nt, Human
caggcagacauuuuugacauag

SEQ ID NO: 1067621 - RNA, 22 nt, Human
gaauauuuucaguacagauggu

SEQ ID NO: 1067622 - RNA, 22 nt, Human
cuucagugauauaggcuucucc

SEQ ID NO: 1067623 - RNA, 22 nt, Human
aaacagcaggaacaucuugcca

SEQ ID NO: 1067624 - RNA, 22 nt, Human
auccugggcagugugucacucu

SEQ ID NO: 1067625 - RNA, 22 nt, Human
uuccauaacugaccgaaugcau

SEQ ID NO: 1067626 - RNA, 22 nt, Human
gagaagggcuugggagucaaca

SEQ ID NO: 1067627 - RNA, 22 nt, Human
cucccuggaggugagcuggcac

SEQ ID NO: 1067628 - RNA, 22 nt, Human
cagacuuucaaggagugaaggc

SEQ ID NO: 1067629 - RNA, 22 nt, Human
aaaaguuuaagacucauucuag

SEQ ID NO: 1067630 - RNA, 22 nt, Human
uggccucugcaauggauucacc

SEQ ID NO: 1067631 - RNA, 22 nt, Human
caagcuacucaggcaagaugug

SEQ ID NO: 1067632 - RNA, 23 nt, Human
agacccagagacuggcucugcuc

SEQ ID NO: 1067633 - RNA, 22 nt, Human
acuauacaagauuagggauuug

SEQ ID NO: 1067634 - RNA, 22 nt, Human
aguucuuugugauggaaauuua

SEQ ID NO: 1067635 - RNA, 22 nt, Human
agcaugaagacuucagagcuag

SEQ ID NO: 1067636 - RNA, 22 nt, Human
acugcuggggcucauucaucuc

SEQ ID NO: 1067637 - RNA, 22 nt, Human
guguuuuauggagucauaacgu

SEQ ID NO: 1067638 - RNA, 22 nt, Human
uugugugugagccuucaccaca

SEQ ID NO: 1067639 - RNA, 22 nt, Human
ggcugagaacaggcccagccuc

SEQ ID NO: 1067640 - RNA, 22 nt, Human
agcuuaaaguauuuaaauuuca

SEQ ID NO: 1067641 - RNA, 22 nt, Human
caggaaauuuauguucuacuua

SEQ ID NO: 1067642 - RNA, 22 nt, Human
cauuuguaguuaaaaaugucuc

SEQ ID NO: 1067643 - RNA, 22 nt, Human
uucauguguauggaacauuuuu

SEQ ID NO: 1067644 - RNA, 22 nt, Human
ggcagugagaggucuccugguc

SEQ ID NO: 1067645 - RNA, 22 nt, Human
uaacaguugguguaauuucuug

SEQ ID NO: 1067646 - RNA, 22 nt, Human
augauuuuucagcagaggaucu

SEQ ID NO: 1067647 - RNA, 22 nt, Human
aaggcugagagucacaguccua

SEQ ID NO: 1067648 - RNA, 22 nt, Human
caugaacauucagaaauacagc

SEQ ID NO: 1067649 - RNA, 22 nt, Human
ggcucagaccucccagcuccag

SEQ ID NO: 1067650 - RNA, 22 nt, Human
acuagcagggauguuauuacuu

SEQ ID NO: 1067651 - RNA, 22 nt, Human
uuucuucugagaucagggagaa

SEQ ID NO: 1067652 - RNA, 22 nt, Human
ugacuuuaagcuaucugauucu

SEQ ID NO: 1067653 - RNA, 22 nt, Human
gccugcagugagugcagaaggu

SEQ ID NO: 1067654 - RNA, 22 nt, Human
auggcagagaaagcgagccaca

SEQ ID NO: 1067655 - RNA, 22 nt, Human
aaguguuuaaugguuuugauga

SEQ ID NO: 1067656 - RNA, 22 nt, Human
cuggcagguccagcuggacuca

SEQ ID NO: 1067657 - RNA, 22 nt, Human
gaagggugugugugagggacac

SEQ ID NO: 1067658 - RNA, 22 nt, Human
aggaaucagaauucuuagaauu

SEQ ID NO: 1067659 - RNA, 22 nt, Human
ugggaagcugcauuuuaacaag

SEQ ID NO: 1067660 - RNA, 22 nt, Human
gcuggggaccagcugucucuga

SEQ ID NO: 1067661 - RNA, 22 nt, Human
gucccacugggcaacuagaaaa

SEQ ID NO: 1067662 - RNA, 22 nt, Human
ucagaauuuugguuugguuggu

SEQ ID NO: 1067663 - RNA, 22 nt, Human
auauuuguauuucgugugugua

SEQ ID NO: 1067664 - RNA, 22 nt, Human
aagcagagccugagacagggau

SEQ ID NO: 1067665 - RNA, 23 nt, Human
cagcuucuuugggauucuuuaua

SEQ ID NO: 1067666 - RNA, 22 nt, Human
ugcauuccuccaccuccugcac

SEQ ID NO: 1067667 - RNA, 23 nt, Human
cagugugacgaggugaggcaggc

SEQ ID NO: 1067668 - RNA, 22 nt, Human
gagcacagaacuaaaugcuggu

SEQ ID NO: 1067669 - RNA, 22 nt, Human
guggugcauccuugaguaagcu

SEQ ID NO: 1067670 - RNA, 22 nt, Human
aaucagaaagaucuugaugaga

SEQ ID NO: 1067671 - RNA, 22 nt, Human
ggggcccuuguggcugcaggcc

SEQ ID NO: 1067672 - RNA, 22 nt, Human
uucacaggaauguaggggucuu

SEQ ID NO: 1067673 - RNA, 22 nt, Human
uccaaagggaagcgcuuucugu

SEQ ID NO: 1067674 - RNA, 22 nt, Human
cugagauggucucuuuguuacu

SEQ ID NO: 1067675 - RNA, 22 nt, Human
gaggaacaugaggugaccuggg

SEQ ID NO: 1067676 - RNA, 22 nt, Human
cuggcucccguuguccuugaag

SEQ ID NO: 1067677 - RNA, 22 nt, Human
cuggaagaggaagccagcugga

SEQ ID NO: 1067678 - RNA, 22 nt, Human
agcagggcuccauuucacugcc

SEQ ID NO: 1067679 - RNA, 22 nt, Human
ggccugcucuguuuagaggggg

SEQ ID NO: 1067680 - RNA, 22 nt, Human
ugcaaaugggcaucuccaagug

SEQ ID NO: 1067681 - RNA, 23 nt, Human
ucugucacuuucugcuguggagu

SEQ ID NO: 1067682 - RNA, 22 nt, Human
gcccugagacugagcauggguu

SEQ ID NO: 1067683 - RNA, 22 nt, Human
agagugaucagauaucaggugu

SEQ ID NO: 1067684 - RNA, 22 nt, Human
uucugagaagggugggucuggc

SEQ ID NO: 1067685 - RNA, 22 nt, Human
agggcacaagacucugagcccc

SEQ ID NO: 1067686 - RNA, 22 nt, Human
gcaggagccaggccgagcuggu

SEQ ID NO: 1067687 - RNA, 22 nt, Human
cucccagggccaucgagucacu

SEQ ID NO: 1067688 - RNA, 22 nt, Human
ucucagagauuuauggaaaacu

SEQ ID NO: 1067689 - RNA, 22 nt, Human
uaacagaaacagauaaguguaa

SEQ ID NO: 1067690 - RNA, 22 nt, Human
aggagguggcaacugucgacag

SEQ ID NO: 1067691 - RNA, 22 nt, Human
cccaaggccucuccuuggcuug

SEQ ID NO: 1067692 - RNA, 22 nt, Human
guuugcauauuugcacaggaau

SEQ ID NO: 1067693 - RNA, 22 nt, Human
cugcccaggaaccagaggggca

SEQ ID NO: 1067694 - RNA, 22 nt, Human
gcagaugggagccccaggggag

SEQ ID NO: 1067695 - RNA, 22 nt, Human
agaaaugcucaggucaacuuaa

SEQ ID NO: 1067696 - RNA, 22 nt, Human
uucuacaucacuuaacaugcua

SEQ ID NO: 1067697 - RNA, 22 nt, Human
agugcugggauugcaggcauga

SEQ ID NO: 1067698 - RNA, 22 nt, Human
agugcugggauuacaggcauaa

SEQ ID NO: 1067699 - RNA, 22 nt, Human
ggcuuccuuucacuacccucag

SEQ ID NO: 1067700 - RNA, 22 nt, Human
guggcagcugguaugcagacag

SEQ ID NO: 1067701 - RNA, 22 nt, Human
gucugagaggaggcagccucgg

SEQ ID NO: 1067702 - RNA, 22 nt, Human
gaccuucaagcaccauauuuau

SEQ ID NO: 1067703 - RNA, 21 nt, Human
gcuuccaagauggcaccuuga

SEQ ID NO: 1067704 - RNA, 22 nt, Human
cuggagcauccaugcccagggu

SEQ ID NO: 1067705 - RNA, 21 nt, Human
gccuggcucucacuggccugg

SEQ ID NO: 1067706 - RNA, 22 nt, Human
uccuguggaagacaguguuggg

SEQ ID NO: 1067707 - RNA, 22 nt, Human
uugauauucccgauuuaaggua

SEQ ID NO: 1067708 - RNA, 22 nt, Human
aagcagccaccucaucuccacu

SEQ ID NO: 1067709 - RNA, 22 nt, Human
ugagcuuccucccugcauccau

SEQ ID NO: 1067710 - RNA, 22 nt, Human
aucaaauuaugugcuacaagaa

SEQ ID NO: 1067711 - RNA, 22 nt, Human
ucugccuggcggacucccggaa

SEQ ID NO: 1067712 - RNA, 22 nt, Human
agugauucuuuaaagugguauu

SEQ ID NO: 1067713 - RNA, 22 nt, Human
caagcagacaguaggccuagaa

SEQ ID NO: 1067714 - RNA, 22 nt, Human
cagaaugggaaggacugcaguu

SEQ ID NO: 1067715 - RNA, 22 nt, Human
augaggcaucugcagucacuag

SEQ ID NO: 1067716 - RNA, 22 nt, Human
acaaaugucuacauugagaaua

SEQ ID NO: 1067717 - RNA, 22 nt, Human
uuggucuuuucuauuaaauaua

SEQ ID NO: 1067718 - RNA, 22 nt, Human
uuuccauauucugcgucugcca

SEQ ID NO: 1067719 - RNA, 22 nt, Human
ccugagagagaagcgaccuggu

SEQ ID NO: 1067720 - RNA, 22 nt, Human
acagggcaccugagguaggaag

SEQ ID NO: 1067721 - RNA, 22 nt, Human
caugaaaucugaguauguuucc

SEQ ID NO: 1067722 - RNA, 22 nt, Human
uccuccuccucacagucaccug

SEQ ID NO: 1067723 - RNA, 22 nt, Human
aaaaucugguaauuugaaugug

SEQ ID NO: 1067724 - RNA, 22 nt, Human
auccaaagauggaaagaacuuu

SEQ ID NO: 1067725 - RNA, 23 nt, Human
acugagccagggccugggucagc

SEQ ID NO: 1067726 - RNA, 22 nt, Human
guauuacaaauaaauguuacug

SEQ ID NO: 1067727 - RNA, 22 nt, Human
cugcuggaaguuugcuguggau

SEQ ID NO: 1067728 - RNA, 22 nt, Human
cauuauggcagccaggauauug

SEQ ID NO: 1067729 - RNA, 22 nt, Human
gcaggggaguggaugauggauu

SEQ ID NO: 1067730 - RNA, 22 nt, Human
uuuaucugaccucacuucuuaa

SEQ ID NO: 1067731 - RNA, 22 nt, Human
ucaccaggcuggaaugcagugg

SEQ ID NO: 1067732 - RNA, 22 nt, Human
ccuacagacaaaccagugacua

SEQ ID NO: 1067733 - RNA, 22 nt, Human
ugcuuucuuuagcuccugaguc

SEQ ID NO: 1067734 - RNA, 22 nt, Human
uuggcaggaauauugcagaggu

SEQ ID NO: 1067735 - RNA, 22 nt, Human
ugcagcuucuccaucuccuugu

SEQ ID NO: 1067736 - RNA, 22 nt, Human
gcaauacaguugaagagauuga

SEQ ID NO: 1067737 - RNA, 22 nt, Human
ucacaauuguuuuuaggaucaa

SEQ ID NO: 1067738 - RNA, 22 nt, Human
ucugggagguaaccaugcugau

SEQ ID NO: 1067739 - RNA, 22 nt, Human
cacauuuagguuccuauagcca

SEQ ID NO: 1067740 - RNA, 17 nt, Human
aaauaugaccucaaagu

SEQ ID NO: 1067741 - RNA, 22 nt, Human
cagaagacugcagggaagggac

SEQ ID NO: 1067742 - RNA, 22 nt, Human
auuaaggaagccuauucucucc

SEQ ID NO: 1067743 - RNA, 22 nt, Human
auggcagggcagccucucagag

SEQ ID NO: 1067744 - RNA, 22 nt, Human
gggacaggccccucgcuagcuu

SEQ ID NO: 1067745 - RNA, 22 nt, Human
uuccaaguugagcgauuuuccu

SEQ ID NO: 1067746 - RNA, 22 nt, Human
aucuuuuugacauggugauggu

SEQ ID NO: 1067747 - RNA, 22 nt, Human
cccucugccucugaguaggaca

SEQ ID NO: 1067748 - RNA, 22 nt, Human
gagagcuggauucuggauaggu

SEQ ID NO: 1067749 - RNA, 22 nt, Human
cuuccagcuuguggcgcuuucc

SEQ ID NO: 1067750 - RNA, 22 nt, Human
auuagaaugacagaaaugaggc

SEQ ID NO: 1067751 - RNA, 22 nt, Human
ccagucagggcaggagccuggu

SEQ ID NO: 1067752 - RNA, 22 nt, Human
cagggugacugcccuggccacu

SEQ ID NO: 1067753 - RNA, 22 nt, Human
auucuuuuuuaaggaauagaac

SEQ ID NO: 1067754 - RNA, 22 nt, Human
uauuucuugagacucgucuucc

SEQ ID NO: 1067755 - RNA, 22 nt, Human
aggcuuccuggaggaagaggua

SEQ ID NO: 1067756 - RNA, 22 nt, Human
agggccugcaucaggagcuugg

SEQ ID NO: 1067757 - RNA, 22 nt, Human
ucagggcacugucaccugauau

SEQ ID NO: 1067758 - RNA, 22 nt, Human
aggaaccagagguugagcaacu

SEQ ID NO: 1067759 - RNA, 22 nt, Human
ucauuugugcugucagcaugca

SEQ ID NO: 1067760 - RNA, 22 nt, Human
acauguauugacauuauauucu

SEQ ID NO: 1067761 - RNA, 20 nt, Human
uccacaucuuuugagaugug

SEQ ID NO: 1067762 - RNA, 18 nt, Human
auauauugacaagaggga

SEQ ID NO: 1067763 - RNA, 22 nt, Human
ugcuggcuacauuauugcuguc

SEQ ID NO: 1067764 - RNA, 22 nt, Human
ccaguuaguuaaaggcgcagua

SEQ ID NO: 1067765 - RNA, 22 nt, Human
aauaguuugaauuuaucagaug

SEQ ID NO: 1067766 - RNA, 22 nt, Human
cucuucaguaaaugacacuguu

SEQ ID NO: 1067767 - RNA, 22 nt, Human
acaaugaauacuaagcaccagg

SEQ ID NO: 1067768 - RNA, 22 nt, Human
acacauuaaccuuugaaauucu

SEQ ID NO: 1067769 - RNA, 22 nt, Human
ucugcaggccucgacaaggcca

SEQ ID NO: 1067770 - RNA, 22 nt, Human
ccaggacagugaacauguaaga

SEQ ID NO: 1067771 - RNA, 23 nt, Human
agcacagacuagaaaggucuuuc

SEQ ID NO: 1067772 - RNA, 22 nt, Human
aacuugaaaaccucaugaauug

SEQ ID NO: 1067773 - RNA, 22 nt, Human
aaaugaguuugccucuagauag

SEQ ID NO: 1067774 - RNA, 22 nt, Human
auaaaaaggacagauguggucu

SEQ ID NO: 1067775 - RNA, 22 nt, Human
augaaguucucaauaaucaugu

SEQ ID NO: 1067776 - RNA, 22 nt, Human
ugggccuggagcccuggagagu

SEQ ID NO: 1067777 - RNA, 22 nt, Human
cauauucuguuggucacauaga

SEQ ID NO: 1067778 - RNA, 22 nt, Human
ucagauauucaauuaaguuaaa

SEQ ID NO: 1067779 - RNA, 22 nt, Human
uauuuguagaauggauuaaggg

SEQ ID NO: 1067780 - RNA, 22 nt, Human
ccaucagcuccaguaucuucug

SEQ ID NO: 1067781 - RNA, 18 nt, Human
cagauccaggcagcuauu

SEQ ID NO: 1067782 - RNA, 22 nt, Human
gccagaggaacgcugcgcgccc

SEQ ID NO: 1067783 - RNA, 22 nt, Human
gggcucugggauucagagcaag

SEQ ID NO: 1067784 - RNA, 21 nt, Human
cccaggucguggucuucccag

SEQ ID NO: 1067785 - RNA, 22 nt, Human
cagguaagagacggauuggccc

SEQ ID NO: 1067786 - RNA, 22 nt, Human
gagggcugccacguugggcgag

SEQ ID NO: 1067787 - RNA, 22 nt, Human
aagguaggcucaggguuguucu

SEQ ID NO: 1067788 - RNA, 22 nt, Human
aggugagaaaacgaggguugca

SEQ ID NO: 1067789 - RNA, 22 nt, Human
ggagggugcauuuuacccugug

SEQ ID NO: 1067790 - RNA, 22 nt, Human
caggaagaggacaggcuucccc

SEQ ID NO: 1067791 - RNA, 22 nt, Human
ugcaaaugcccauuuauuuucu

SEQ ID NO: 1067792 - RNA, 22 nt, Human
ucaggcucuggguacaccugac

SEQ ID NO: 1067793 - RNA, 22 nt, Human
cagccucuuuccacaucaggca

SEQ ID NO: 1067794 - RNA, 22 nt, Human
aacuauucuguggacucuuaua

SEQ ID NO: 1067795 - RNA, 22 nt, Human
aguauuuagagacacaagacgg

SEQ ID NO: 1067796 - RNA, 22 nt, Human
agcugaggaggaaugaugggua

SEQ ID NO: 1067797 - RNA, 22 nt, Human
ucuggcaggucaaucauucuuu

SEQ ID NO: 1067798 - RNA, 22 nt, Human
ggccugcuggcuccagcgcccg

SEQ ID NO: 1067799 - RNA, 22 nt, Human
guccucugcuucaugcccugau

SEQ ID NO: 1067800 - RNA, 22 nt, Human
aaggcagccucugccagccggg

SEQ ID NO: 1067801 - RNA, 22 nt, Human
cuccuugguguaguacugagca

SEQ ID NO: 1067802 - RNA, 22 nt, Human
ugcacacaggucuaggacaugg

SEQ ID NO: 1067803 - RNA, 22 nt, Human
gcagcacauauaaacaaagaga

SEQ ID NO: 1067804 - RNA, 22 nt, Human
ggcccugagcugaaguacugug

SEQ ID NO: 1067805 - RNA, 23 nt, Human
gcucaucaggcuuagagucaagg

SEQ ID NO: 1067806 - RNA, 22 nt, Human
ggaagcccagcugucuccuguc

SEQ ID NO: 1067807 - RNA, 22 nt, Human
accuggcuuccaaucuaggagc

SEQ ID NO: 1067808 - RNA, 22 nt, Human
acuauaaccuguuagaauagau

SEQ ID NO: 1067809 - RNA, 22 nt, Human
ucaggaggccaccaggaccugu

SEQ ID NO: 1067810 - RNA, 22 nt, Human
uacauuuucuaggggaccaaga

SEQ ID NO: 1067811 - RNA, 22 nt, Human
uggccugcagcucucagggaag

SEQ ID NO: 1067812 - RNA, 22 nt, Human
agagcagcacguuguccccaca

SEQ ID NO: 1067813 - RNA, 22 nt, Human
aggcucugcagaccccagcugu

SEQ ID NO: 1067814 - RNA, 22 nt, Human
ugggcugcuuccucagcugaga

SEQ ID NO: 1067815 - RNA, 22 nt, Human
aggacagcagccauuggcaguc

SEQ ID NO: 1067816 - RNA, 20 nt, Human
cagauaaacgggaaagaagc

SEQ ID NO: 1067817 - RNA, 22 nt, Human
accaggaauauuuugcucauuu

SEQ ID NO: 1067818 - RNA, 22 nt, Human
cauacaaucaaguucuuuauua

SEQ ID NO: 1067819 - RNA, 22 nt, Human
ggagccuguggccgucacgacu

SEQ ID NO: 1067820 - RNA, 22 nt, Human
acacucacccucccacugccug

SEQ ID NO: 1067821 - RNA, 19 nt, Human
uuuuguguagcugcugguu

SEQ ID NO: 1067822 - RNA, 22 nt, Human
gugcccugaggucuucacuuug

SEQ ID NO: 1067823 - RNA, 22 nt, Human
gucaauauagguuucaaacaug

SEQ ID NO: 1067824 - RNA, 22 nt, Human
cccugcacagccuggcucucuu

SEQ ID NO: 1067825 - RNA, 18 nt, Human
ccugugcuccagcaucug

SEQ ID NO: 1067826 - RNA, 22 nt, Human
ucuaaacugcuagcugacugag

SEQ ID NO: 1067827 - RNA, 20 nt, Human
auauuucuuaagaacuuuca

SEQ ID NO: 1067828 - RNA, 22 nt, Human
cagagcagguaucuuuggugaa

SEQ ID NO: 1067829 - RNA, 22 nt, Human
uugcaucaguccucaauaaaau

SEQ ID NO: 1067830 - RNA, 22 nt, Human
acacugaagagcacuuucaaag

SEQ ID NO: 1067831 - RNA, 20 nt, Human
agugucuggugcagggccuc

SEQ ID NO: 1067832 - RNA, 22 nt, Human
uggcucagcugacucggcuucu

SEQ ID NO: 1067833 - RNA, 22 nt, Human
uuauacauguguuuugagauga

SEQ ID NO: 1067834 - RNA, 22 nt, Human
aguguuuauggaaucuuaguua

SEQ ID NO: 1067835 - RNA, 22 nt, Human
agcuguccuggcucaggcugug

SEQ ID NO: 1067836 - RNA, 21 nt, Human
acagauauuucauugaacauu

SEQ ID NO: 1067837 - RNA, 22 nt, Human
ccuugcugaccaucaccuuuga

SEQ ID NO: 1067838 - RNA, 22 nt, Human
gccuuccuuuuaccaccagcca

SEQ ID NO: 1067839 - RNA, 19 nt, Human
gggcuuggggcugaagccu

SEQ ID NO: 1067840 - RNA, 22 nt, Human
acacagggggcauucuaggagu

SEQ ID NO: 1067841 - RNA, 22 nt, Human
gccucaggccuauagcugcugu

SEQ ID NO: 1067842 - RNA, 22 nt, Human
auucuuuuaagccccagggauu

SEQ ID NO: 1067843 - RNA, 22 nt, Human
gggcccugccuaaggaacacac

SEQ ID NO: 1067844 - RNA, 18 nt, Human
cacauuuaccuggcuccc

SEQ ID NO: 1067845 - RNA, 22 nt, Human
cuucagagcaucacuucagcug

SEQ ID NO: 1067846 - RNA, 22 nt, Human
ucucuuccaguaagagucuuua

SEQ ID NO: 1067847 - RNA, 22 nt, Human
gugcugucguggaacugggcug

SEQ ID NO: 1067848 - RNA, 22 nt, Human
uugaagcaggaaaauuucuauu

SEQ ID NO: 1067849 - RNA, 22 nt, Human
uacauugugauguuucaauaca

SEQ ID NO: 1067850 - RNA, 22 nt, Human
uucaugaagggugaauauaguc

SEQ ID NO: 1067851 - RNA, 22 nt, Human
uuugcauuuauaaguuggugga

SEQ ID NO: 1067852 - RNA, 22 nt, Human
ucaaauguaauuuauuguuuua

SEQ ID NO: 1067853 - RNA, 23 nt, Human
agggcaugaagcagaggacgugg

SEQ ID NO: 1067854 - RNA, 22 nt, Human
ggcuucugaaccaggcccugga

SEQ ID NO: 1067855 - RNA, 20 nt, Human
acacaagcacuucugguauu

SEQ ID NO: 1067856 - RNA, 22 nt, Human
cacucugacuggcccugcagga

SEQ ID NO: 1067857 - RNA, 22 nt, Human
ucugggcuugguuagggcuguu

SEQ ID NO: 1067858 - RNA, 22 nt, Human
uacagagagagggguuaccagg

SEQ ID NO: 1067859 - RNA, 20 nt, Human
ccugccuggccauuccuugg

SEQ ID NO: 1067860 - RNA, 22 nt, Human
agccagcuggugggucagcugg

SEQ ID NO: 1067861 - RNA, 22 nt, Human
gagggaagauuccccauauggg

SEQ ID NO: 1067862 - RNA, 22 nt, Human
uccucauucuuggugcaucaaa

SEQ ID NO: 1067863 - RNA, 22 nt, Human
ccugagccugaguggugcaggg

SEQ ID NO: 1067864 - RNA, 22 nt, Human
ugaagcaaacgcuucuguuccu

SEQ ID NO: 1067865 - RNA, 22 nt, Human
uguggcccagaugagugugcua

SEQ ID NO: 1067866 - RNA, 22 nt, Human
ggagucagaggaaggcuugcuc

SEQ ID NO: 1067867 - RNA, 22 nt, Human
auuucacaucuaucucagauuu

SEQ ID NO: 1067868 - RNA, 22 nt, Human
uucuucaaggguaaaggcaacg

SEQ ID NO: 1067869 - RNA, 22 nt, Human
uggugcugacaguucugagugc

SEQ ID NO: 1067870 - RNA, 22 nt, Human
uuuagaguuucuaaauggaauu

SEQ ID NO: 1067871 - RNA, 22 nt, Human
aaagcagacugauuugcaucac

SEQ ID NO: 1067872 - RNA, 19 nt, Human
aggcagaggcuuggcuagc

SEQ ID NO: 1067873 - RNA, 22 nt, Human
aagcauuuauagauaagaauuu

SEQ ID NO: 1067874 - RNA, 22 nt, Human
ccaggccuagccccugagggua

SEQ ID NO: 1067875 - RNA, 22 nt, Human
uuuagaggcugccuaucacaac

SEQ ID NO: 1067876 - RNA, 22 nt, Human
cuguauuuguccucuauuuauu

SEQ ID NO: 1067877 - RNA, 22 nt, Human
uucuuaaucccacaaaucuuca

SEQ ID NO: 1067878 - RNA, 22 nt, Human
aaagucauuguaauauaugcua

SEQ ID NO: 1067879 - RNA, 20 nt, Human
uguuaaaggacacuugcuuu

SEQ ID NO: 1067880 - RNA, 22 nt, Human
uugaaacugaguguguuugggg

SEQ ID NO: 1067881 - RNA, 22 nt, Human
aacaaauggaacacaaaucuuu

SEQ ID NO: 1067882 - RNA, 22 nt, Human
aaguaccuagaaauauuuuuga

SEQ ID NO: 1067883 - RNA, 22 nt, Human
ucacaaauagcuauauuaagga

SEQ ID NO: 1067884 - RNA, 22 nt, Human
cugagggccuuggcuccugccc

SEQ ID NO: 1067885 - RNA, 23 nt, Human
ugcagggcaaguuagagacccca

SEQ ID NO: 1067886 - RNA, 22 nt, Human
agggaggagaauggacuccuuc

SEQ ID NO: 1067887 - RNA, 22 nt, Human
uuuacacaaaauguuaguagau

SEQ ID NO: 1067888 - RNA, 22 nt, Human
cuggcugccacuucagggucuu

SEQ ID NO: 1067889 - RNA, 22 nt, Human
gggcaguguggucgugccuuug

SEQ ID NO: 1067890 - RNA, 20 nt, Human
ccuggaagagcuccccaggc

SEQ ID NO: 1067891 - RNA, 22 nt, Human
aggaagcccaagucucaucuuc

SEQ ID NO: 1067892 - RNA, 20 nt, Human
acauuuguaucucccagugg

SEQ ID NO: 1067893 - RNA, 22 nt, Human
aagggcugaaugaaggguugaa

SEQ ID NO: 1067894 - RNA, 22 nt, Human
cucaggauuuaaaggggcacuc

SEQ ID NO: 1067895 - RNA, 19 nt, Human
gcccucaugauauucagau

SEQ ID NO: 1067896 - RNA, 22 nt, Human
cuuguaaaagguacauuaugcu

SEQ ID NO: 1067897 - RNA, 22 nt, Human
cccaggaaagaauuuagagcca

SEQ ID NO: 1067898 - RNA, 22 nt, Human
agggcgaggagacggaggcaca

SEQ ID NO: 1067899 - RNA, 22 nt, Human
uaggaaaauaucucuuauuggg

SEQ ID NO: 1067900 - RNA, 22 nt, Human
cuauugaauuaacuauuaaagu

SEQ ID NO: 1067901 - RNA, 22 nt, Human
aaaugguaaugucuuucuguuu

SEQ ID NO: 1067902 - RNA, 22 nt, Human
cagaggcauuacugaaaaggug

SEQ ID NO: 1067903 - RNA, 17 nt, Human
cugucugcgcaugaggu

SEQ ID NO: 1067904 - RNA, 22 nt, Human
aucuggcucccuuggaauccgu

SEQ ID NO: 1067905 - RNA, 22 nt, Human
ugcuuccacuaaugagcugugu

SEQ ID NO: 1067906 - RNA, 19 nt, Human
aggcaggugcagagguccc

SEQ ID NO: 1067907 - RNA, 22 nt, Human
gcacagggaggcuggccuggcc

SEQ ID NO: 1067908 - RNA, 22 nt, Human
ugucaucagcauauaagacagu

SEQ ID NO: 1067909 - RNA, 22 nt, Human
guuaccauugucuaggucauug

SEQ ID NO: 1067910 - RNA, 22 nt, Human
uucuaaagccuguccuaucaga

SEQ ID NO: 1067911 - RNA, 22 nt, Human
augggcugugagguccggcagg

SEQ ID NO: 1067912 - RNA, 21 nt, Human
gcucucugcaugguggcucag

SEQ ID NO: 1067913 - RNA, 22 nt, Human
ucaguguuuccuagagcauaua

SEQ ID NO: 1067914 - RNA, 22 nt, Human
acacucuuucacuaccuuaauu

SEQ ID NO: 1067915 - RNA, 23 nt, Human
ucccagggaaggugagcgaggcu

SEQ ID NO: 1067916 - RNA, 22 nt, Human
gaugcccaggcccaaccaugga

SEQ ID NO: 1067917 - RNA, 22 nt, Human
agcagguguuggcugggccauc

SEQ ID NO: 1067918 - RNA, 22 nt, Human
augugaaaaauuucuuauuaca

SEQ ID NO: 1067919 - RNA, 22 nt, Human
acuuuguauaagacaauaaaga

SEQ ID NO: 1067920 - RNA, 22 nt, Human
cugggagauugcuagagaugca

SEQ ID NO: 1067921 - RNA, 22 nt, Human
ggccugugcugagaaccuggcu

SEQ ID NO: 1067922 - RNA, 22 nt, Human
guaaacaucgacccaacagggg

SEQ ID NO: 1067923 - RNA, 22 nt, Human
uaacagaaauauuuccagguga

SEQ ID NO: 1067924 - RNA, 22 nt, Human
ugcuggcugggcugcuggagac

SEQ ID NO: 1067925 - RNA, 22 nt, Human
agcugggcuggagcuccaagcg

SEQ ID NO: 1067926 - RNA, 22 nt, Human
cacagcagaacuuaauuucaaa

SEQ ID NO: 1067927 - RNA, 21 nt, Human
ugcaggcugugcgcuccugcc

SEQ ID NO: 1067928 - RNA, 22 nt, Human
agugaccaaucaugguuagauu

SEQ ID NO: 1067929 - RNA, 22 nt, Human
uuagaaagaacuuuagauauca

SEQ ID NO: 1067930 - RNA, 22 nt, Human
ucagagugguagccuauuuucu

SEQ ID NO: 1067931 - RNA, 22 nt, Human
uggagcuggaauuucugggccu

SEQ ID NO: 1067932 - RNA, 21 nt, Human
auauuucagauuuccguaauc

SEQ ID NO: 1067933 - RNA, 22 nt, Human
gggcuccagcccgggaccaggu

SEQ ID NO: 1067934 - RNA, 22 nt, Human
uauuucaccucacccaggagaa

SEQ ID NO: 1067935 - RNA, 22 nt, Human
agggcucugagugggaaagagg

SEQ ID NO: 1067936 - RNA, 22 nt, Human
aauguuuggacuggaagguccc

SEQ ID NO: 1067937 - RNA, 22 nt, Human
uugcaucagcaggcauaauugg

SEQ ID NO: 1067938 - RNA, 22 nt, Human
uccuugaaaaucuugguuuaga

SEQ ID NO: 1067939 - RNA, 22 nt, Human
aaacagcuuucagaaucucuca

SEQ ID NO: 1067940 - RNA, 22 nt, Human
uuucuccuugugucuccuuuga

SEQ ID NO: 1067941 - RNA, 22 nt, Human
uucuuuucugcagcugguauuu

SEQ ID NO: 1067942 - RNA, 22 nt, Human
gcuguggcugaccaccaggggg

SEQ ID NO: 1067943 - RNA, 22 nt, Human
acagggcagagaggcaggcuug

SEQ ID NO: 1067944 - RNA, 19 nt, Human
ucucaauguucagaaagcu

SEQ ID NO: 1067945 - RNA, 22 nt, Human
uuugaauguuuuagguacuuaa

SEQ ID NO: 1067946 - RNA, 23 nt, Human
caugccaguuugugcaggcagau

SEQ ID NO: 1067947 - RNA, 22 nt, Human
ucugccugugguggaggaaguu

SEQ ID NO: 1067948 - RNA, 22 nt, Human
ucugagccguauggcuuggcua

SEQ ID NO: 1067949 - RNA, 21 nt, Human
auucacagguauccucucccu

SEQ ID NO: 1067950 - RNA, 22 nt, Human
ugcugagaugaauagggcuguc

SEQ ID NO: 1067951 - RNA, 22 nt, Human
ggcacagcucaggucccagcuc

SEQ ID NO: 1067952 - RNA, 22 nt, Human
aaaaguauuggccaccauuucu

SEQ ID NO: 1067953 - RNA, 22 nt, Human
auggaagguccuacagagcgca

SEQ ID NO: 1067954 - RNA, 22 nt, Human
uugcauaaaugcuuaaaauuug

SEQ ID NO: 1067955 - RNA, 22 nt, Human
aucagaauaauuagauuucaga

SEQ ID NO: 1067956 - RNA, 22 nt, Human
cuauaauuaugcucaaaaugua

SEQ ID NO: 1067957 - RNA, 22 nt, Human
ggaggaguguggggcacucugc

SEQ ID NO: 1067958 - RNA, 22 nt, Human
agaggcaguauacaauccgagc

SEQ ID NO: 1067959 - RNA, 22 nt, Human
ucacaguuauagucuguagaau

SEQ ID NO: 1067960 - RNA, 22 nt, Human
aguaaugaagauuuguugcaca

SEQ ID NO: 1067961 - RNA, 22 nt, Human
auacaaguugcccaaaugauua

SEQ ID NO: 1067962 - RNA, 22 nt, Human
ccaucccuucaccacagcagua

SEQ ID NO: 1067963 - RNA, 22 nt, Human
ugugggcucccccucacucugu

SEQ ID NO: 1067964 - RNA, 20 nt, Human
uccagccacuuccgcugguc

SEQ ID NO: 1067965 - RNA, 22 nt, Human
gccaggagggaaaggacaauuu

SEQ ID NO: 1067966 - RNA, 22 nt, Human
uaugcuacuagaaauaaaaugg

SEQ ID NO: 1067967 - RNA, 22 nt, Human
ucugagugggaacucucaugac

SEQ ID NO: 1067968 - RNA, 22 nt, Human
gcagguggggcugcuaccagaa

SEQ ID NO: 1067969 - RNA, 22 nt, Human
gacagcagacagaacuaccugc

SEQ ID NO: 1067970 - RNA, 22 nt, Human
aggagcagaauuuaaugugcag

SEQ ID NO: 1067971 - RNA, 21 nt, Human
agagacugucacugcaguacc

SEQ ID NO: 1067972 - RNA, 22 nt, Human
caggcuggacauuagauacaua

SEQ ID NO: 1067973 - RNA, 22 nt, Human
caguaacaggcucugugguaua

SEQ ID NO: 1067974 - RNA, 22 nt, Human
gagacacagcagauauucaauc

SEQ ID NO: 1067975 - RNA, 22 nt, Human
ugccagugggugugcagagacu

SEQ ID NO: 1067976 - RNA, 22 nt, Human
ugcuuugacagggaugacauga

SEQ ID NO: 1067977 - RNA, 22 nt, Human
uuugcauuuccagaguagcaga

SEQ ID NO: 1067978 - RNA, 20 nt, Human
aggguggggacguucugacu

SEQ ID NO: 1067979 - RNA, 22 nt, Human
auauagaucaaaugaugcuaau

SEQ ID NO: 1067980 - RNA, 22 nt, Human
cccagagucucugcucuugccu

SEQ ID NO: 1067981 - RNA, 22 nt, Human
cugucuuuaguacaaaaaaugu

SEQ ID NO: 1067982 - RNA, 19 nt, Human
cucugccucccuccugggu

SEQ ID NO: 1067983 - RNA, 22 nt, Human
gggcugagugucccaggccgaa

SEQ ID NO: 1067984 - RNA, 22 nt, Human
agagaagggggaaagaucucac

SEQ ID NO: 1067985 - RNA, 22 nt, Human
gccuggucucuuucaugucagu

SEQ ID NO: 1067986 - RNA, 23 nt, Human
cccauuuucauguuaacuccugg

SEQ ID NO: 1067987 - RNA, 22 nt, Human
ggucaugcugugaaucagugcu

SEQ ID NO: 1067988 - RNA, 22 nt, Human
cccuuagcucaauuucuugccc

SEQ ID NO: 1067989 - RNA, 22 nt, Human
agcaaaucagcugcucaggaaa

SEQ ID NO: 1067990 - RNA, 22 nt, Human
uccaagaauacagauuugugaa

SEQ ID NO: 1067991 - RNA, 22 nt, Human
acaagauagguugagucuagcc

SEQ ID NO: 1067992 - RNA, 22 nt, Human
aggcagcaaaugucuggaacag

SEQ ID NO: 1067993 - RNA, 22 nt, Human
aaaggccacacugcucuuucuc

SEQ ID NO: 1067994 - RNA, 22 nt, Human
ugcagggcuacaggacuacaac

SEQ ID NO: 1067995 - RNA, 22 nt, Human
gaggaaccaccuuggguaggcu

SEQ ID NO: 1067996 - RNA, 22 nt, Human
uugcuuccaguccaagucuguu

SEQ ID NO: 1067997 - RNA, 22 nt, Human
gaguuauagauggacuauuauu

SEQ ID NO: 1067998 - RNA, 22 nt, Human
aaggggaauagaguggguugug

SEQ ID NO: 1067999 - RNA, 22 nt, Human
uagggcaggggaggaaucugaa

SEQ ID NO: 1068000 - RNA, 22 nt, Human
cuucacaguauaggucccugag

SEQ ID NO: 1068001 - RNA, 22 nt, Human
cccaggcuggauuucgguggca

SEQ ID NO: 1068002 - RNA, 22 nt, Human
caucaaauacuacauggguugg

SEQ ID NO: 1068003 - RNA, 21 nt, Human
ucauggccagcaaguggcaga

SEQ ID NO: 1068004 - RNA, 22 nt, Human
agagggcuggacgcagguugga

SEQ ID NO: 1068005 - RNA, 22 nt, Human
acuuuaaaacugaucaucagag

SEQ ID NO: 1068006 - RNA, 22 nt, Human
caucaguguuggcuucucagag

SEQ ID NO: 1068007 - RNA, 22 nt, Human
ucaggcuaagggagaggcgcuc

SEQ ID NO: 1068008 - RNA, 23 nt, Human
aaagcaaggaauuggcaacagag

SEQ ID NO: 1068009 - RNA, 22 nt, Human
agauacacagagcaucuucaga

SEQ ID NO: 1068010 - RNA, 22 nt, Human
aagacccuaccccuggagagga

SEQ ID NO: 1068011 - RNA, 23 nt, Human
acagccaguucaccucuccuugg

SEQ ID NO: 1068012 - RNA, 22 nt, Human
ggugacuggagggacccaggcc

SEQ ID NO: 1068013 - RNA, 22 nt, Human
aucuggcuuaccuagggugccu

SEQ ID NO: 1068014 - RNA, 23 nt, Human
cccagcagauuguaaagugucca

SEQ ID NO: 1068015 - RNA, 22 nt, Human
agauuuccaucuuuuucaugug

SEQ ID NO: 1068016 - RNA, 22 nt, Human
gcugcugggauccugggucuca

SEQ ID NO: 1068017 - RNA, 22 nt, Human
ggaaagcauccaggugccccca

SEQ ID NO: 1068018 - RNA, 22 nt, Human
gagaaacaggaauugagucgcu

SEQ ID NO: 1068019 - RNA, 22 nt, Human
uucuuucucaacaugaauguuu

SEQ ID NO: 1068020 - RNA, 22 nt, Human
agccacagcaacaagugcaauu

SEQ ID NO: 1068021 - RNA, 22 nt, Human
cuggccuggcagggagggcaug

SEQ ID NO: 1068022 - RNA, 22 nt, Human
acuuuuaugauaaucaauguuc

SEQ ID NO: 1068023 - RNA, 22 nt, Human
auuacagaaagcaauauugagu

SEQ ID NO: 1068024 - RNA, 22 nt, Human
guagaaaugguguguuucuucu

SEQ ID NO: 1068025 - RNA, 22 nt, Human
uccaggaagcaguguuuggagc

SEQ ID NO: 1068026 - RNA, 22 nt, Human
agccaggguuagaagauaguca

SEQ ID NO: 1068027 - RNA, 22 nt, Human
acugaaagauaaaucaguuagc

SEQ ID NO: 1068028 - RNA, 22 nt, Human
caaagauuuuagaauuugcaau

SEQ ID NO: 1068029 - RNA, 22 nt, Human
cugggcuguaauguggcacuga

SEQ ID NO: 1068030 - RNA, 22 nt, Human
uuuaccagaauugccaccagaa

SEQ ID NO: 1068031 - RNA, 17 nt, Human
uaacacaggcucagaga

SEQ ID NO: 1068032 - RNA, 22 nt, Human
ucuaaacuaggguuaaaggaaa

SEQ ID NO: 1068033 - RNA, 22 nt, Human
cauucucaauaguagaugagua

SEQ ID NO: 1068034 - RNA, 22 nt, Human
cagucccaaggaggaagcaguc

SEQ ID NO: 1068035 - RNA, 22 nt, Human
acagauggagcuacuagguaaa

SEQ ID NO: 1068036 - RNA, 22 nt, Human
ugcagggccuugggucuuucuu

SEQ ID NO: 1068037 - RNA, 22 nt, Human
gaggcucaacccacagggguug

SEQ ID NO: 1068038 - RNA, 22 nt, Human
ggcucugccugcccagcagcac

SEQ ID NO: 1068039 - RNA, 22 nt, Human
guggcagagggugagcuggacu

SEQ ID NO: 1068040 - RNA, 23 nt, Human
guccuauuuuuugaaauacugag

SEQ ID NO: 1068041 - RNA, 22 nt, Human
aggcugcagugcagguaggauu

SEQ ID NO: 1068042 - RNA, 22 nt, Human
agacagcacuuuuguauggggg

SEQ ID NO: 1068043 - RNA, 22 nt, Human
uggcagagaugaagaguuguuu

SEQ ID NO: 1068044 - RNA, 22 nt, Human
cugccuugcaccggcucucugg

SEQ ID NO: 1068045 - RNA, 19 nt, Human
ucauuguugguuugucggg

SEQ ID NO: 1068046 - RNA, 22 nt, Human
cugccucaugcugccugcagcc

SEQ ID NO: 1068047 - RNA, 21 nt, Human
ggccaguggccuugacuuucc

SEQ ID NO: 1068048 - RNA, 18 nt, Human
caguuacaccuucauuca

SEQ ID NO: 1068049 - RNA, 22 nt, Human
uguauuucgcuagguacucccu

SEQ ID NO: 1068050 - RNA, 22 nt, Human
uccagaauauuugggaaagaug

SEQ ID NO: 1068051 - RNA, 22 nt, Human
ugcucagcaaaaagcuugugag

SEQ ID NO: 1068052 - RNA, 22 nt, Human
uuuuaauccucuugguaucuua

SEQ ID NO: 1068053 - RNA, 22 nt, Human
uggaggugggagggacuguccu

SEQ ID NO: 1068054 - RNA, 22 nt, Human
aaagauuauggaacacacauga

SEQ ID NO: 1068055 - RNA, 22 nt, Human
ugucacauugaauaugauuuau

SEQ ID NO: 1068056 - RNA, 22 nt, Human
auaaggaaaugaaacucuaaua

SEQ ID NO: 1068057 - RNA, 22 nt, Human
augccaguaagucucagcuagg

SEQ ID NO: 1068058 - RNA, 21 nt, Human
aacauuucaggauccaaauug

SEQ ID NO: 1068059 - RNA, 21 nt, Human
gggcagcacgucauuccugug

SEQ ID NO: 1068060 - RNA, 22 nt, Human
uugaaaauaucacaggagcagc

SEQ ID NO: 1068061 - RNA, 22 nt, Human
uuugaacaggaguaucuauagu

SEQ ID NO: 1068062 - RNA, 18 nt, Human
uauaaacacacuuagguu

SEQ ID NO: 1068063 - RNA, 22 nt, Human
gacauuuacugaauacugauua

SEQ ID NO: 1068064 - RNA, 22 nt, Human
caacauguguuagacaauagac

SEQ ID NO: 1068065 - RNA, 23 nt, Human
ccaggcucuuucaccugcuauuc

SEQ ID NO: 1068066 - RNA, 22 nt, Human
ggcagaggaaggaugaauucac

SEQ ID NO: 1068067 - RNA, 22 nt, Human
uacaaguuucaaagagaucaug

SEQ ID NO: 1068068 - RNA, 22 nt, Human
ccagcugacgaugccuggucuc

SEQ ID NO: 1068069 - RNA, 22 nt, Human
accaaggaagagauucucaguu

SEQ ID NO: 1068070 - RNA, 22 nt, Human
gaagccaggggccugacaggca

SEQ ID NO: 1068071 - RNA, 22 nt, Human
aauguuuuagauuacugcuggg

SEQ ID NO: 1068072 - RNA, 22 nt, Human
gaaugaguuaauauuugcuugg

SEQ ID NO: 1068073 - RNA, 22 nt, Human
cagggugggcacccagccucca

SEQ ID NO: 1068074 - RNA, 22 nt, Human
acugaaaugaaaucuaucaucu

SEQ ID NO: 1068075 - RNA, 22 nt, Human
ccugcugugaccggggagcagg

SEQ ID NO: 1068076 - RNA, 17 nt, Human
uuuguacaacauuuuaa

SEQ ID NO: 1068077 - RNA, 22 nt, Human
ugcaggcucaccugccagggcc

SEQ ID NO: 1068078 - RNA, 22 nt, Human
ugggcucagccuucauguggcc

SEQ ID NO: 1068079 - RNA, 22 nt, Human
uggcuuccugcacagugucugc

SEQ ID NO: 1068080 - RNA, 22 nt, Human
aaugauauagcagacauagccu

SEQ ID NO: 1068081 - RNA, 22 nt, Human
caugucuugcccugauuaguag

SEQ ID NO: 1068082 - RNA, 22 nt, Human
aggcuucagaaagaguaauugg

SEQ ID NO: 1068083 - RNA, 22 nt, Human
auugcaaagaaauacaugcuua

SEQ ID NO: 1068084 - RNA, 19 nt, Human
ccagagucaugucuccccc

SEQ ID NO: 1068085 - RNA, 21 nt, Human
ugccagggauuuacagagccu

SEQ ID NO: 1068086 - RNA, 22 nt, Human
aggacuccauguguccuggaga

SEQ ID NO: 1068087 - RNA, 22 nt, Human
ucugaacagcauggaaucauuu

SEQ ID NO: 1068088 - RNA, 22 nt, Human
caggaaccuacaucuguuuggg

SEQ ID NO: 1068089 - RNA, 22 nt, Human
aaaagcaguuuauagucaguug

SEQ ID NO: 1068090 - RNA, 21 nt, Human
ucagggaagugugcagaaggg

SEQ ID NO: 1068091 - RNA, 22 nt, Human
ucuaacauuguuuuucacagau

SEQ ID NO: 1068092 - RNA, 22 nt, Human
ccagagaaagcucacaggcagu

SEQ ID NO: 1068093 - RNA, 22 nt, Human
caucaaaugccauauaugguug

SEQ ID NO: 1068094 - RNA, 22 nt, Human
cugcuguguuucacaccucugg

SEQ ID NO: 1068095 - RNA, 22 nt, Human
uugagagucauuuaagguguug

SEQ ID NO: 1068096 - RNA, 22 nt, Human
augcccuggggcuaccucugag

SEQ ID NO: 1068097 - RNA, 22 nt, Human
aggcagcauccagaggagaaug

SEQ ID NO: 1068098 - RNA, 22 nt, Human
uucuucaacaaggacacuguua

SEQ ID NO: 1068099 - RNA, 22 nt, Human
caaaucuaggaugcauguagug

SEQ ID NO: 1068100 - RNA, 22 nt, Human
aaaaacugcaauuacuuuuguc

SEQ ID NO: 1068101 - RNA, 22 nt, Human
gcugcucugaaaaugacuguug

SEQ ID NO: 1068102 - RNA, 22 nt, Human
aggggcugacuggaaagugcca

SEQ ID NO: 1068103 - RNA, 22 nt, Human
ucccacacuacacgguuguugg

SEQ ID NO: 1068104 - RNA, 22 nt, Human
aagugguagagagagcauaagc

SEQ ID NO: 1068105 - RNA, 22 nt, Human
uucaucaucuacaaccaggacc

SEQ ID NO: 1068106 - RNA, 22 nt, Human
gcaggggcugagcaccagcggg

SEQ ID NO: 1068107 - RNA, 22 nt, Human
uggcugaauaaaauaugguguu

SEQ ID NO: 1068108 - RNA, 22 nt, Human
aggcacuguggaagacaugguu

SEQ ID NO: 1068109 - RNA, 22 nt, Human
cuuucuuucgaagacgugauua

SEQ ID NO: 1068110 - RNA, 22 nt, Human
ucaaaauuaaaccaacguccag

SEQ ID NO: 1068111 - RNA, 22 nt, Human
uuucaaaguugggaauuguaau

SEQ ID NO: 1068112 - RNA, 22 nt, Human
gcaggaacccagacaaccaggg

SEQ ID NO: 1068113 - RNA, 22 nt, Human
cucagcucugacaggaggcauc

SEQ ID NO: 1068114 - RNA, 22 nt, Human
gcugcuggggccuucccucggg

SEQ ID NO: 1068115 - RNA, 22 nt, Human
ucuucaguagguccucagaauc

SEQ ID NO: 1068116 - RNA, 22 nt, Human
gcucagaaaagugaggcucagu

SEQ ID NO: 1068117 - RNA, 22 nt, Human
aucagcaaucaaauugcagagu

SEQ ID NO: 1068118 - RNA, 22 nt, Human
cagcaucucugccugccugcaa

SEQ ID NO: 1068119 - RNA, 17 nt, Human
ugcauuguuggaaauuu

SEQ ID NO: 1068120 - RNA, 21 nt, Human
uccuucucuaugauugucuga

SEQ ID NO: 1068121 - RNA, 22 nt, Human
acacagauauuuugaauacaua

SEQ ID NO: 1068122 - RNA, 22 nt, Human
ucccaagacgaugugcuuggcc

SEQ ID NO: 1068123 - RNA, 17 nt, Human
aagucccagcuaacaca

SEQ ID NO: 1068124 - RNA, 22 nt, Human
agacagcuccaagugucucugu

SEQ ID NO: 1068125 - RNA, 22 nt, Human
gagcucagcccaaagagcagug

SEQ ID NO: 1068126 - RNA, 22 nt, Human
aggugccagcucucaggcagga

SEQ ID NO: 1068127 - RNA, 22 nt, Human
uaggcagcugcaaacuucgguc

SEQ ID NO: 1068128 - RNA, 22 nt, Human
cuuccuuugcuguucggagguu

SEQ ID NO: 1068129 - RNA, 22 nt, Human
uaauuauugucugaagaguuau

SEQ ID NO: 1068130 - RNA, 22 nt, Human
ugcagcugcuggcccaggugcu

SEQ ID NO: 1068131 - RNA, 22 nt, Human
aaugucaaguagccaaugcuuc

SEQ ID NO: 1068132 - RNA, 22 nt, Human
ggccuuuuguguccuugcccgu

SEQ ID NO: 1068133 - RNA, 17 nt, Human
gcagcagagagacccuc

SEQ ID NO: 1068134 - RNA, 19 nt, Human
ucucagagcccuagaggcc

SEQ ID NO: 1068135 - RNA, 22 nt, Human
caaaggcuuccacugcauccuu

SEQ ID NO: 1068136 - RNA, 22 nt, Human
cuuuauuagauguagacuuucu

SEQ ID NO: 1068137 - RNA, 22 nt, Human
ugcaggugguccauuugggaac

SEQ ID NO: 1068138 - RNA, 22 nt, Human
ccaggaggucugaguguggaca

SEQ ID NO: 1068139 - RNA, 20 nt, Human
cucuccuugccgacuuggca

SEQ ID NO: 1068140 - RNA, 22 nt, Human
uccucaaauuagcagaucauag

SEQ ID NO: 1068141 - RNA, 22 nt, Human
gaggcagcaaaauauaucauaa

SEQ ID NO: 1068142 - RNA, 22 nt, Human
uaaggcacccgugagcugccag

SEQ ID NO: 1068143 - RNA, 22 nt, Human
ccugagaggcccucucacuguc

SEQ ID NO: 1068144 - RNA, 22 nt, Human
ugaaaguuacaggaaaacagau

SEQ ID NO: 1068145 - RNA, 22 nt, Human
ugccaggccaauucuauuugac

SEQ ID NO: 1068146 - RNA, 23 nt, Human
uggauaaagcugugcugcauagg

SEQ ID NO: 1068147 - RNA, 22 nt, Human
uugauucaaccacuuaauaauc

SEQ ID NO: 1068148 - RNA, 22 nt, Human
uguugaagauaaaguucucauu

SEQ ID NO: 1068149 - RNA, 22 nt, Human
gauuucuguugagaaacauggg

SEQ ID NO: 1068150 - RNA, 22 nt, Human
acauguuugauaaauauuuggg

SEQ ID NO: 1068151 - RNA, 22 nt, Human
ggccuugggaggagggucagaa

SEQ ID NO: 1068152 - RNA, 22 nt, Human
gcaggaagaugagcucagguaa

SEQ ID NO: 1068153 - RNA, 22 nt, Human
cuccaaauucagucacagucug

SEQ ID NO: 1068154 - RNA, 22 nt, Human
cccccaggcucugacacaggag

SEQ ID NO: 1068155 - RNA, 22 nt, Human
auuccauuguguaaggauaucg

SEQ ID NO: 1068156 - RNA, 18 nt, Human
uggcucuggacuugcucc

SEQ ID NO: 1068157 - RNA, 22 nt, Human
uaguggagaaguggagucugug

SEQ ID NO: 1068158 - RNA, 22 nt, Human
caggucagagucccccuguccu

SEQ ID NO: 1068159 - RNA, 22 nt, Human
uuaauuuuaaccuguuuguguc

SEQ ID NO: 1068160 - RNA, 22 nt, Human
cauugcacaucugagaagagau

SEQ ID NO: 1068161 - RNA, 19 nt, Human
accucugcagagauguuua

SEQ ID NO: 1068162 - RNA, 21 nt, Human
gccaagaacaagacagacaug

SEQ ID NO: 1068163 - RNA, 20 nt, Human
agcaggcugcagggugaaau

SEQ ID NO: 1068164 - RNA, 22 nt, Human
ggcugcagcggauuggggauug

SEQ ID NO: 1068165 - RNA, 23 nt, Human
uugaaggagaaagcuuucuuggu

SEQ ID NO: 1068166 - RNA, 19 nt, Human
acacugaauguagaauugg

SEQ ID NO: 1068167 - RNA, 19 nt, Human
agguaggcaguggcaugga

SEQ ID NO: 1068168 - RNA, 22 nt, Human
acuuccagaauuagaauuuaag

SEQ ID NO: 1068169 - RNA, 22 nt, Human
uccucaugccgggucucacgcu

SEQ ID NO: 1068170 - RNA, 22 nt, Human
caucuguaaaguaggaauauug

SEQ ID NO: 1068171 - RNA, 22 nt, Human
cauccauucagugcaaaucaca

SEQ ID NO: 1068172 - RNA, 22 nt, Human
uuucugacuccagagaggaaua

SEQ ID NO: 1068173 - RNA, 22 nt, Human
aacauaaauuugaaguggcaaa

SEQ ID NO: 1068174 - RNA, 22 nt, Human
agacaaaugaacaaauauguga

SEQ ID NO: 1068175 - RNA, 22 nt, Human
ccacagggugucaucagcuuga

SEQ ID NO: 1068176 - RNA, 22 nt, Human
aaauugucagaauucagaaagu

SEQ ID NO: 1068177 - RNA, 22 nt, Human
gagggguggcccuggcguguac

SEQ ID NO: 1068178 - RNA, 22 nt, Human
gagugaaaaaggaagggccaua

SEQ ID NO: 1068179 - RNA, 22 nt, Human
cagcagcugauggggaagugau

SEQ ID NO: 1068180 - RNA, 22 nt, Human
gugggaguggggaagcagagug

SEQ ID NO: 1068181 - RNA, 23 nt, Human
cacaucaguuuaggucagauuuu

SEQ ID NO: 1068182 - RNA, 22 nt, Human
acuuuuuuauaaggaagaagau

SEQ ID NO: 1068183 - RNA, 22 nt, Human
caggagcccagaguccucagcu

SEQ ID NO: 1068184 - RNA, 22 nt, Human
ggcagaagacaggcaaaucaug

SEQ ID NO: 1068185 - RNA, 22 nt, Human
ucagacagaggagcucgugcag

SEQ ID NO: 1068186 - RNA, 22 nt, Human
cuguuacacggaccuucaaauc

SEQ ID NO: 1068187 - RNA, 22 nt, Human
ucucauguauugcccuggugug

SEQ ID NO: 1068188 - RNA, 22 nt, Human
ccaggaaggccuggaugccccc

SEQ ID NO: 1068189 - RNA, 22 nt, Human
uacagucuuuggaaagagauag

SEQ ID NO: 1068190 - RNA, 22 nt, Human
aaauucaauuaacuuucaugcu

SEQ ID NO: 1068191 - RNA, 22 nt, Human
ucaaaucucacucugcauuucu

SEQ ID NO: 1068192 - RNA, 22 nt, Human
gagcuggcaagucuguccuugg

SEQ ID NO: 1068193 - RNA, 22 nt, Human
gaguuauucuagguccuuugua

SEQ ID NO: 1068194 - RNA, 22 nt, Human
aucaggauagucuguaaauugu

SEQ ID NO: 1068195 - RNA, 22 nt, Human
uccaaagaagucacaaacgaag

SEQ ID NO: 1068196 - RNA, 22 nt, Human
uccuucagaggacggcagccag

SEQ ID NO: 1068197 - RNA, 21 nt, Human
cucaggaucuuauauauuagu

SEQ ID NO: 1068198 - RNA, 22 nt, Human
ugauugaacugagcuucaagau

SEQ ID NO: 1068199 - RNA, 22 nt, Human
aguggcagccgagcaggagaug

SEQ ID NO: 1068200 - RNA, 22 nt, Human
ggauccuucuuugaccucacag

SEQ ID NO: 1068201 - RNA, 22 nt, Human
uccucaggugacuagguaucuu

SEQ ID NO: 1068202 - RNA, 22 nt, Human
uuaaauauuauguugucugcaa

SEQ ID NO: 1068203 - RNA, 22 nt, Human
ccagauggaaaugauguucuca

SEQ ID NO: 1068204 - RNA, 19 nt, Human
uuucuuuuccccucagcac

SEQ ID NO: 1068205 - RNA, 22 nt, Human
aagggcaggagaagacggauau

SEQ ID NO: 1068206 - RNA, 22 nt, Human
aaggaggaauuucagggugaau

SEQ ID NO: 1068207 - RNA, 22 nt, Human
aagucacaagcauauaugcauu

SEQ ID NO: 1068208 - RNA, 22 nt, Human
ugugccaggcacuugcccaggc

SEQ ID NO: 1068209 - RNA, 22 nt, Human
aucaacauagccacuccuuaga

SEQ ID NO: 1068210 - RNA, 21 nt, Human
ucaggcagugcaaauacaugg

SEQ ID NO: 1068211 - RNA, 22 nt, Human
gcagggaaguuugaucuuuuuc

SEQ ID NO: 1068212 - RNA, 22 nt, Human
uguucauuuggcccuuuuguau

SEQ ID NO: 1068213 - RNA, 22 nt, Human
aaagccagugguaugagagaaa

SEQ ID NO: 1068214 - RNA, 22 nt, Human
uggggugccgacagggagggca

SEQ ID NO: 1068215 - RNA, 22 nt, Human
uuaagucauuucugauuauaga

SEQ ID NO: 1068216 - RNA, 22 nt, Human
caggcuugggagcagagccacu

SEQ ID NO: 1068217 - RNA, 22 nt, Human
gggggcaguaaccucaaagugu

SEQ ID NO: 1068218 - RNA, 22 nt, Human
gggcugaguuccugccucacuc

SEQ ID NO: 1068219 - RNA, 22 nt, Human
ccaggaccuggagcucuaugaa

SEQ ID NO: 1068220 - RNA, 22 nt, Human
gaaaggagggaaacagagcggu

SEQ ID NO: 1068221 - RNA, 22 nt, Human
ggcagaguggagugcggccucc

SEQ ID NO: 1068222 - RNA, 22 nt, Human
cggggcuggcacaggugaccac

SEQ ID NO: 1068223 - RNA, 22 nt, Human
uccccagccgugaaggagagga

SEQ ID NO: 1068224 - RNA, 21 nt, Human
agggcagauuagcuguaagag

SEQ ID NO: 1068225 - RNA, 22 nt, Human
gcagaugguggggcaggaaaau

SEQ ID NO: 1068226 - RNA, 21 nt, Human
aaggaaaagcuuggucucuga

SEQ ID NO: 1068227 - RNA, 22 nt, Human
augaugguggguaauguguaaa

SEQ ID NO: 1068228 - RNA, 22 nt, Human
gagggauggugugagaggcuca

SEQ ID NO: 1068229 - RNA, 22 nt, Human
uauuucaggcuauauuucuugu

SEQ ID NO: 1068230 - RNA, 21 nt, Human
gagcauggcuuacaucagcag

SEQ ID NO: 1068231 - RNA, 22 nt, Human
cagagccuuccuagcagacucu

SEQ ID NO: 1068232 - RNA, 18 nt, Human
cagggccccagaauuauc

SEQ ID NO: 1068233 - RNA, 22 nt, Human
aaauauugguaggaugcuuguu

SEQ ID NO: 1068234 - RNA, 22 nt, Human
gcugccuuugugagccaagggg

SEQ ID NO: 1068235 - RNA, 22 nt, Human
ccaggagcaaagaucacuggga

SEQ ID NO: 1068236 - RNA, 22 nt, Human
ucaagaauagcugcaaacaggg

SEQ ID NO: 1068237 - RNA, 22 nt, Human
auuucacagcugucaguguuac

SEQ ID NO: 1068238 - RNA, 22 nt, Human
aaagcucuuaaauugaccugcu

SEQ ID NO: 1068239 - RNA, 19 nt, Human
gccaggagggcucuggcug

SEQ ID NO: 1068240 - RNA, 22 nt, Human
uagcuguguagacacucagagc

SEQ ID NO: 1068241 - RNA, 22 nt, Human
aauucaaauuacaauaguuguu

SEQ ID NO: 1068242 - RNA, 22 nt, Human
cugagguguugaugaccuaugc

SEQ ID NO: 1068243 - RNA, 22 nt, Human
uugaaaaugguaagcaugauau

SEQ ID NO: 1068244 - RNA, 22 nt, Human
ucugcugguuccgaauuaggcc

SEQ ID NO: 1068245 - RNA, 22 nt, Human
cugcagcugugagugcuggaug

SEQ ID NO: 1068246 - RNA, 22 nt, Human
gaugcauuacaaaagugauuau

SEQ ID NO: 1068247 - RNA, 22 nt, Human
gcagagcagagccugcauuggc

SEQ ID NO: 1068248 - RNA, 22 nt, Human
agggcccuagggaaugagacau

SEQ ID NO: 1068249 - RNA, 22 nt, Human
ggcagcuggccuccucgcccac

SEQ ID NO: 1068250 - RNA, 22 nt, Human
cagcugccugucuggaggcaau

SEQ ID NO: 1068251 - RNA, 22 nt, Human
cccacacacuggcugcugccaa

SEQ ID NO: 1068252 - RNA, 22 nt, Human
uaugagcuuccaguguugcaug

SEQ ID NO: 1068253 - RNA, 22 nt, Human
gugaaggcuacaagagaucaag

SEQ ID NO: 1068254 - RNA, 23 nt, Human
uccuccugagugagagugccagc

SEQ ID NO: 1068255 - RNA, 22 nt, Human
guauuccuaagucaugacaaau

SEQ ID NO: 1068256 - RNA, 22 nt, Human
uguaacaguaagccugugagcu

SEQ ID NO: 1068257 - RNA, 22 nt, Human
ggauggcaggacaaggacccag

SEQ ID NO: 1068258 - RNA, 22 nt, Human
cagggcagccaggccccguggg

SEQ ID NO: 1068259 - RNA, 22 nt, Human
aaacaaagcaucuugcuaugca

SEQ ID NO: 1068260 - RNA, 22 nt, Human
ucucccacgguacaggauaaac

SEQ ID NO: 1068261 - RNA, 22 nt, Human
uugcauuuccuguacuguuuga

SEQ ID NO: 1068262 - RNA, 19 nt, Human
cccucauucacuuauucuc

SEQ ID NO: 1068263 - RNA, 22 nt, Human
cagcagugaugugugaggguuc

SEQ ID NO: 1068264 - RNA, 22 nt, Human
uggugagauaacuuucggcaag

SEQ ID NO: 1068265 - RNA, 21 nt, Human
ucuggagucaucuuuaccaua

SEQ ID NO: 1068266 - RNA, 22 nt, Human
aucacaaaggucucagagcaca

SEQ ID NO: 1068267 - RNA, 22 nt, Human
ggaagagagguucagcccuaag

SEQ ID NO: 1068268 - RNA, 22 nt, Human
ucagagguaguagcagaguuga

SEQ ID NO: 1068269 - RNA, 22 nt, Human
aauuucaguugcuaauaaguuc

SEQ ID NO: 1068270 - RNA, 22 nt, Human
ugggaagauggagugacaggca

SEQ ID NO: 1068271 - RNA, 22 nt, Human
agcagggcugugcuccuuccga

SEQ ID NO: 1068272 - RNA, 22 nt, Human
aucaggauagugguuaccuggg

SEQ ID NO: 1068273 - RNA, 22 nt, Human
ugguaauuaauuugauagguuc

SEQ ID NO: 1068274 - RNA, 22 nt, Human
uacacauaggucugaauaaaaa

SEQ ID NO: 1068275 - RNA, 20 nt, Human
cugagcccagaucccagguc

SEQ ID NO: 1068276 - RNA, 21 nt, Human
ugcagagauaucugaagcaga

SEQ ID NO: 1068277 - RNA, 18 nt, Human
ugaggccucugcugggcc

SEQ ID NO: 1068278 - RNA, 22 nt, Human
gcuuuaaauggcuugcccaagu

SEQ ID NO: 1068279 - RNA, 19 nt, Human
ccuuugaaucaggacacuu

SEQ ID NO: 1068280 - RNA, 22 nt, Human
ugucuacuugggcucuacagca

SEQ ID NO: 1068281 - RNA, 22 nt, Human
guauuauuggguaguaugguaa

SEQ ID NO: 1068282 - RNA, 22 nt, Human
auuaagacugcccauguuuuua

SEQ ID NO: 1068283 - RNA, 19 nt, Human
ccauuucauauguauugug

SEQ ID NO: 1068284 - RNA, 23 nt, Human
ugccaaaguuuaccuaacacugg

SEQ ID NO: 1068285 - RNA, 22 nt, Human
aaaugucagaggaacauauuga

SEQ ID NO: 1068286 - RNA, 22 nt, Human
acaaagucacaauaauuaaccu

SEQ ID NO: 1068287 - RNA, 22 nt, Human
aagaauuuuccagcaugucagu

SEQ ID NO: 1068288 - RNA, 22 nt, Human
ggaagaaaaugggcaacaggug

SEQ ID NO: 1068289 - RNA, 20 nt, Human
ugguaucaauuacuagauug

SEQ ID NO: 1068290 - RNA, 22 nt, Human
uuagaauuauuguuuccuucua

SEQ ID NO: 1068291 - RNA, 22 nt, Human
cacagaaauuauuaggaugcuu

SEQ ID NO: 1068292 - RNA, 22 nt, Human
uugauguacagaauuguucaca

SEQ ID NO: 1068293 - RNA, 22 nt, Human
auuuucaaaacaucugcugugu

SEQ ID NO: 1068294 - RNA, 21 nt, Human
aucacauuggcuguuauuauu

SEQ ID NO: 1068295 - RNA, 22 nt, Human
gcagcagaguuugggagauggu

SEQ ID NO: 1068296 - RNA, 22 nt, Human
uuucuucagccuucacaaccug

SEQ ID NO: 1068297 - RNA, 22 nt, Human
aucuauacccaucaugauuuaa

SEQ ID NO: 1068298 - RNA, 22 nt, Human
cugggaggcccacguugggaag

SEQ ID NO: 1068299 - RNA, 21 nt, Human
gcagugcagcuuggaggguag

SEQ ID NO: 1068300 - RNA, 22 nt, Human
uaggaagccugcugugcacagc

SEQ ID NO: 1068301 - RNA, 22 nt, Human
aaguaacagaggggguguugcu

SEQ ID NO: 1068302 - RNA, 22 nt, Human
acugaugaaaacuaauaaauua

SEQ ID NO: 1068303 - RNA, 22 nt, Human
uucuuugcccuuaaugaaauaa

SEQ ID NO: 1068304 - RNA, 22 nt, Human
ucuuuacaaucuaagcauaguu

SEQ ID NO: 1068305 - RNA, 22 nt, Human
caggaaaugggguuuaguuauu

SEQ ID NO: 1068306 - RNA, 22 nt, Human
agagugaaaagcuagagcagua

SEQ ID NO: 1068307 - RNA, 22 nt, Human
cuggcaggaucuaaccagggaa

SEQ ID NO: 1068308 - RNA, 22 nt, Human
uuuguucacuauaucccucagu

SEQ ID NO: 1068309 - RNA, 22 nt, Human
uggcugagguaacuaugaauaa

SEQ ID NO: 1068310 - RNA, 22 nt, Human
uacagggguaacaguggggaau

SEQ ID NO: 1068311 - RNA, 22 nt, Human
uauuugauagagauaaaugaua

SEQ ID NO: 1068312 - RNA, 22 nt, Human
auaauaacuccuguugaagaac

SEQ ID NO: 1068313 - RNA, 22 nt, Human
cccuccagccauggacccaggu

SEQ ID NO: 1068314 - RNA, 22 nt, Human
guaggaaagggagugaagggaa

SEQ ID NO: 1068315 - RNA, 22 nt, Human
ccagagagucgaugggggacac

SEQ ID NO: 1068316 - RNA, 22 nt, Human
auauagauuccaugguuccuuu

SEQ ID NO: 1068317 - RNA, 22 nt, Human
aacuuucucuacggcauuuguu

SEQ ID NO: 1068318 - RNA, 22 nt, Human
ccaggacuucgaggcuacagug

SEQ ID NO: 1068319 - RNA, 22 nt, Human
aucaagaauguucauucuucua

SEQ ID NO: 1068320 - RNA, 22 nt, Human
cuggacuuuggcccaucugcca

SEQ ID NO: 1068321 - RNA, 22 nt, Human
ucugcagcgugcaggcuggugc

SEQ ID NO: 1068322 - RNA, 19 nt, Human
ugcauaaauuauauacuuu

SEQ ID NO: 1068323 - RNA, 22 nt, Human
uuaacuugucagaaaauacagu

SEQ ID NO: 1068324 - RNA, 22 nt, Human
guaaugaugucugagaaguaug

SEQ ID NO: 1068325 - RNA, 22 nt, Human
uaacaauaguguuugcuaguca

SEQ ID NO: 1068326 - RNA, 22 nt, Human
gaaggcaggcuucugauuaggu

SEQ ID NO: 1068327 - RNA, 22 nt, Human
aaucaguucuacaucuuaucca

SEQ ID NO: 1068328 - RNA, 22 nt, Human
cucacugugccuuuucccaaac

SEQ ID NO: 1068329 - RNA, 22 nt, Human
uaguggaguagaaaccaaagaa

SEQ ID NO: 1068330 - RNA, 22 nt, Human
ggucaggguuccagguaucuuc

SEQ ID NO: 1068331 - RNA, 22 nt, Human
uggcucuguugugcugagccag

SEQ ID NO: 1068332 - RNA, 22 nt, Human
ggaugcugcugcacauccugca

SEQ ID NO: 1068333 - RNA, 22 nt, Human
ugcuuuauucgacaucugguag

SEQ ID NO: 1068334 - RNA, 22 nt, Human
ugugugugacucauacuagaac

SEQ ID NO: 1068335 - RNA, 22 nt, Human
gagccugaaauacaggucacug

SEQ ID NO: 1068336 - RNA, 22 nt, Human
uauacagaaagaauucaagucu

SEQ ID NO: 1068337 - RNA, 22 nt, Human
aucucccagccacagcauucuu

SEQ ID NO: 1068338 - RNA, 22 nt, Human
uuuuaguuguacugucaacagu

SEQ ID NO: 1068339 - RNA, 22 nt, Human
ccacugcuagagaugcaucccc

SEQ ID NO: 1068340 - RNA, 22 nt, Human
aucuacaaaaacugucucagga

SEQ ID NO: 1068341 - RNA, 22 nt, Human
gacauuuagcuguuuugcauuu

SEQ ID NO: 1068342 - RNA, 22 nt, Human
ugugaaauuacuuaaaggaaau

SEQ ID NO: 1068343 - RNA, 17 nt, Human
cagacagauauccuggg

SEQ ID NO: 1068344 - RNA, 18 nt, Human
uuuccaagaagagagcuc

SEQ ID NO: 1068345 - RNA, 22 nt, Human
ucuuuucacagacaaauggaga

SEQ ID NO: 1068346 - RNA, 22 nt, Human
uaauuuuuccacguacacuggg

SEQ ID NO: 1068347 - RNA, 20 nt, Human
gcuuccuucccagcccccac

SEQ ID NO: 1068348 - RNA, 22 nt, Human
uaugcauacaaugagauauucc

SEQ ID NO: 1068349 - RNA, 22 nt, Human
ccuggccaggcauggagucaca

SEQ ID NO: 1068350 - RNA, 22 nt, Human
cagaguggcacucugcuggaug

SEQ ID NO: 1068351 - RNA, 20 nt, Human
ccagcauguacacaugugga

SEQ ID NO: 1068352 - RNA, 22 nt, Human
ugccacagaggugaagcccacu

SEQ ID NO: 1068353 - RNA, 22 nt, Human
acacacaauuaguuuuaugcuu

SEQ ID NO: 1068354 - RNA, 22 nt, Human
ugcacacacucugcauauacuu

SEQ ID NO: 1068355 - RNA, 22 nt, Human
cagcucccuauggugaggcgac

SEQ ID NO: 1068356 - RNA, 22 nt, Human
agguguguauaaacauacauau

SEQ ID NO: 1068357 - RNA, 19 nt, Human
caaguuaaaaugaggucau

SEQ ID NO: 1068358 - RNA, 22 nt, Human
ccucuucugcuucaggagcacu

SEQ ID NO: 1068359 - RNA, 23 nt, Human
acagcuuccuacuuugcugcugc

SEQ ID NO: 1068360 - RNA, 22 nt, Human
gucuucuuuucagucugcuugu

SEQ ID NO: 1068361 - RNA, 23 nt, Human
ugcauggggcuauacugcuguuc

SEQ ID NO: 1068362 - RNA, 22 nt, Human
auuuuuccugggugcuuuaguu

SEQ ID NO: 1068363 - RNA, 22 nt, Human
gcuuugaagucugugucuuuug

SEQ ID NO: 1068364 - RNA, 22 nt, Human
uaguuucauaugcaaaauagua

SEQ ID NO: 1068365 - RNA, 22 nt, Human
acagcagcuaaccccugggcca

SEQ ID NO: 1068366 - RNA, 22 nt, Human
agaguggagagaaacaacucug

SEQ ID NO: 1068367 - RNA, 23 nt, Human
caauuucauaugauucuaccuaa

SEQ ID NO: 1068368 - RNA, 22 nt, Human
aagccaucuuguuuauauguua

SEQ ID NO: 1068369 - RNA, 22 nt, Human
uucacauucucacaagaggaaa

SEQ ID NO: 1068370 - RNA, 22 nt, Human
aacaaaacauuugucuuguuuc

SEQ ID NO: 1068371 - RNA, 22 nt, Human
uguuucaaguuugcucaaagga

SEQ ID NO: 1068372 - RNA, 22 nt, Human
ggagacucucauugucaagcuu

SEQ ID NO: 1068373 - RNA, 19 nt, Human
ucugcauggcaggaagaga

SEQ ID NO: 1068374 - RNA, 17 nt, Human
ggcuggagcagcucccc

SEQ ID NO: 1068375 - RNA, 22 nt, Human
gaaagggcaugggcaugacaac

SEQ ID NO: 1068376 - RNA, 22 nt, Human
caaagcaggcuugucaaauugc

SEQ ID NO: 1068377 - RNA, 22 nt, Human
gccucccuguucuuccacaaua

SEQ ID NO: 1068378 - RNA, 22 nt, Human
uuuguucaacaucacuuccacc

SEQ ID NO: 1068379 - RNA, 22 nt, Human
cauggcagugauucagccuuug

SEQ ID NO: 1068380 - RNA, 22 nt, Human
uuucauguuacauuuaaaaugu

SEQ ID NO: 1068381 - RNA, 22 nt, Human
agugcuggagggaggcagguuc

SEQ ID NO: 1068382 - RNA, 22 nt, Human
cagcucugagacugaggcuaug

SEQ ID NO: 1068383 - RNA, 22 nt, Human
uguucuguuuuaugguagggaa

SEQ ID NO: 1068384 - RNA, 22 nt, Human
agaugaugauaauugaaaggca

SEQ ID NO: 1068385 - RNA, 22 nt, Human
uuauuugcccauguuuagcaga

SEQ ID NO: 1068386 - RNA, 22 nt, Human
caaaugauaccuauuacuaggc

SEQ ID NO: 1068387 - RNA, 18 nt, Human
ugagaauguaagaaaugg

SEQ ID NO: 1068388 - RNA, 21 nt, Human
ccaggcagagcugugaguucu

SEQ ID NO: 1068389 - RNA, 20 nt, Human
agaguaacuggcacauaggg

SEQ ID NO: 1068390 - RNA, 22 nt, Human
ccaucagcaugggagcaugggc

SEQ ID NO: 1068391 - RNA, 22 nt, Human
uggugaagucagcggagcccgg

SEQ ID NO: 1068392 - RNA, 22 nt, Human
aucagaagcaggaggaaugaag

SEQ ID NO: 1068393 - RNA, 22 nt, Human
agaaauguuacaguuguuauuu

SEQ ID NO: 1068394 - RNA, 22 nt, Human
ugccaggcauauggccucuuug

SEQ ID NO: 1068395 - RNA, 22 nt, Human
caaaugcauaguuuauaagaag

SEQ ID NO: 1068396 - RNA, 22 nt, Human
ucacaggguguacaucaccuau

SEQ ID NO: 1068397 - RNA, 22 nt, Human
ggccugcuccgggggcugagcu

SEQ ID NO: 1068398 - RNA, 22 nt, Human
cugagcagccccaccagccauu

SEQ ID NO: 1068399 - RNA, 22 nt, Human
uauacacaccuccaaagcagga

SEQ ID NO: 1068400 - RNA, 22 nt, Human
aaaauucucuugaucuugacag

SEQ ID NO: 1068401 - RNA, 22 nt, Human
agaagccaccagcugaggaaga

SEQ ID NO: 1068402 - RNA, 22 nt, Human
gucugaauucuguguaacucua

SEQ ID NO: 1068403 - RNA, 22 nt, Human
aggccugaggaccagauaaaug

SEQ ID NO: 1068404 - RNA, 22 nt, Human
acucagaaccauuuacucugag

SEQ ID NO: 1068405 - RNA, 22 nt, Human
agcugcucauucccagcacaug

SEQ ID NO: 1068406 - RNA, 22 nt, Human
gagaaagacguaggcugggagg

SEQ ID NO: 1068407 - RNA, 22 nt, Human
aggcccagagcaggaaaggguu

SEQ ID NO: 1068408 - RNA, 22 nt, Human
uaacaaaguaccauagacugga

SEQ ID NO: 1068409 - RNA, 22 nt, Human
augcagaagcagaacuuacaca

SEQ ID NO: 1068410 - RNA, 22 nt, Human
uggccucuggcugaggacuaac

SEQ ID NO: 1068411 - RNA, 22 nt, Human
cugggcacacucugcuccagcu

SEQ ID NO: 1068412 - RNA, 22 nt, Human
cccugccugugggcaucaacau

SEQ ID NO: 1068413 - RNA, 22 nt, Human
gguggcagucuuaagagaucuu

SEQ ID NO: 1068414 - RNA, 22 nt, Human
cuucuucagcacaauauugaug

SEQ ID NO: 1068415 - RNA, 22 nt, Human
ucaguggauauuucuguggcug

SEQ ID NO: 1068416 - RNA, 22 nt, Human
ccaggccccagggcuggcuuuc

SEQ ID NO: 1068417 - RNA, 22 nt, Human
aauguucagcuuucuuacuuaa

SEQ ID NO: 1068418 - RNA, 22 nt, Human
uggcuggacagugggcagugga

SEQ ID NO: 1068419 - RNA, 22 nt, Human
gcugaaaugccuuguaaauauu

SEQ ID NO: 1068420 - RNA, 22 nt, Human
ucucccacagccgugcuucaag

SEQ ID NO: 1068421 - RNA, 22 nt, Human
cagaaauaugugccaugccuua

SEQ ID NO: 1068422 - RNA, 20 nt, Human
agauggugggcuggaacacc

SEQ ID NO: 1068423 - RNA, 22 nt, Human
uugggcuggcagagguggucuu

SEQ ID NO: 1068424 - RNA, 20 nt, Human
ugccaggcugcacgccugcc

SEQ ID NO: 1068425 - RNA, 22 nt, Human
ugcugggcuucaacugccugag

SEQ ID NO: 1068426 - RNA, 22 nt, Human
accaaaaccugcuacuaaagga

SEQ ID NO: 1068427 - RNA, 22 nt, Human
uugcagaggcaaaaaugaacuc

SEQ ID NO: 1068428 - RNA, 22 nt, Human
gacacagagacuugcaguugua

SEQ ID NO: 1068429 - RNA, 22 nt, Human
aauaagaauuuacuugucaaga

SEQ ID NO: 1068430 - RNA, 22 nt, Human
guccucugauuucuagguauau

SEQ ID NO: 1068431 - RNA, 22 nt, Human
ucauuauaaacauaugcuaaag

SEQ ID NO: 1068432 - RNA, 22 nt, Human
uuuauuugucuugccauuuagu

SEQ ID NO: 1068433 - RNA, 22 nt, Human
uuuuaccacugggugacaugga

SEQ ID NO: 1068434 - RNA, 22 nt, Human
gucucugccuggggggaucaga

SEQ ID NO: 1068435 - RNA, 22 nt, Human
aauucacugaacuucucugaga

SEQ ID NO: 1068436 - RNA, 22 nt, Human
uccuucaggccucauucucaua

SEQ ID NO: 1068437 - RNA, 22 nt, Human
uuuccuaugauauucuaugugu

SEQ ID NO: 1068438 - RNA, 22 nt, Human
ucugucacccaggcuggagugc

SEQ ID NO: 1068439 - RNA, 21 nt, Human
aacuuuagaaagacugggaag

SEQ ID NO: 1068440 - RNA, 22 nt, Human
gaaaauuuaauucucuucugug

SEQ ID NO: 1068441 - RNA, 22 nt, Human
guguucauggaugucaauuuga

SEQ ID NO: 1068442 - RNA, 22 nt, Human
ucgcugugguuucuguacaugg

SEQ ID NO: 1068443 - RNA, 22 nt, Human
cucugagaaagcugugagcuaa

SEQ ID NO: 1068444 - RNA, 22 nt, Human
uauuucucagcauuuuacaucc

SEQ ID NO: 1068445 - RNA, 21 nt, Human
ucugagagcaacugcccuuua

SEQ ID NO: 1068446 - RNA, 22 nt, Human
cugcagagcaaguaacauccuc

SEQ ID NO: 1068447 - RNA, 20 nt, Human
ucugagagucugagugauga

SEQ ID NO: 1068448 - RNA, 22 nt, Human
gcaagaaaaaggcuucaugaac

SEQ ID NO: 1068449 - RNA, 22 nt, Human
caucuccuuuggucuacuucca

SEQ ID NO: 1068450 - RNA, 22 nt, Human
ggcaggcacugugcuaggcgcu

SEQ ID NO: 1068451 - RNA, 22 nt, Human
gagauggcucucagaucuuuga

SEQ ID NO: 1068452 - RNA, 22 nt, Human
caccugccccagucuuggagcu

SEQ ID NO: 1068453 - RNA, 22 nt, Human
ugaaggccagcucuuuaucagc

SEQ ID NO: 1068454 - RNA, 22 nt, Human
cacaggagagcugggaggugcc

SEQ ID NO: 1068455 - RNA, 22 nt, Human
ggccuagggaguggccaugccu

SEQ ID NO: 1068456 - RNA, 19 nt, Human
agccagugagccucugggu

SEQ ID NO: 1068457 - RNA, 22 nt, Human
gucugcccuuggccugggacuu

SEQ ID NO: 1068458 - RNA, 22 nt, Human
uuuaccuuuugcuaugguggaa

SEQ ID NO: 1068459 - RNA, 22 nt, Human
ugcccuggaaccaucuacaguc

SEQ ID NO: 1068460 - RNA, 22 nt, Human
aagcugccagcugagcugaggc

SEQ ID NO: 1068461 - RNA, 22 nt, Human
gcugugugaaaacugggccugg

SEQ ID NO: 1068462 - RNA, 22 nt, Human
aaccaggauuuaagauucuaga

SEQ ID NO: 1068463 - RNA, 22 nt, Human
ucugccuggguguggagcagag

SEQ ID NO: 1068464 - RNA, 22 nt, Human
ucagugcacagagauuuuuguu

SEQ ID NO: 1068465 - RNA, 22 nt, Human
ccccuguguuguucaaggguca

SEQ ID NO: 1068466 - RNA, 22 nt, Human
cccagccuggugcacugugggg

SEQ ID NO: 1068467 - RNA, 22 nt, Human
uggcugaguuucaugcaucaug

SEQ ID NO: 1068468 - RNA, 22 nt, Human
ccagcagcccucuuccaagacu

SEQ ID NO: 1068469 - RNA, 22 nt, Human
ggcuucccuuuccgagaggaga

SEQ ID NO: 1068470 - RNA, 19 nt, Human
cuucuaagucauuuggaau

SEQ ID NO: 1068471 - RNA, 20 nt, Human
ucuuggagaggguggacuua

SEQ ID NO: 1068472 - RNA, 22 nt, Human
caacauuucaaggucuuuagga

SEQ ID NO: 1068473 - RNA, 22 nt, Human
gcugcaggcggccgugguggcg

SEQ ID NO: 1068474 - RNA, 22 nt, Human
gggcucauucaucugggcuugg

SEQ ID NO: 1068475 - RNA, 22 nt, Human
acaugucaauuuaguacucuua

SEQ ID NO: 1068476 - RNA, 22 nt, Human
cacauuuagagguuagcauggu

SEQ ID NO: 1068477 - RNA, 22 nt, Human
ugggcucugcaucagugcccau

SEQ ID NO: 1068478 - RNA, 22 nt, Human
ggcuucaggggcccagucagca

SEQ ID NO: 1068479 - RNA, 22 nt, Human
agggagaaaauuggaugcacaa

SEQ ID NO: 1068480 - RNA, 22 nt, Human
gauacaaaauauaaauggagag

SEQ ID NO: 1068481 - RNA, 22 nt, Human
gagcuuccugaugccgaccagu

SEQ ID NO: 1068482 - RNA, 23 nt, Human
cuggucagaggcugcuggaaggg

SEQ ID NO: 1068483 - RNA, 22 nt, Human
guggcauucucggcaccaucug

SEQ ID NO: 1068484 - RNA, 22 nt, Human
aucagcaagauugugucuugua

SEQ ID NO: 1068485 - RNA, 22 nt, Human
cagaggaaaguauuucuggaag

SEQ ID NO: 1068486 - RNA, 22 nt, Human
ggugaagggccuuaggagacag

SEQ ID NO: 1068487 - RNA, 22 nt, Human
gacauauuugaaaccaagagaa

SEQ ID NO: 1068488 - RNA, 22 nt, Human
cuggcuggagcuguuguaggcu

SEQ ID NO: 1068489 - RNA, 22 nt, Human
agcaguggcuggauggugugcu

SEQ ID NO: 1068490 - RNA, 22 nt, Human
gccucugcgccucagccgaccu

SEQ ID NO: 1068491 - RNA, 22 nt, Human
uucuaaagugcaaucugacaga

SEQ ID NO: 1068492 - RNA, 20 nt, Human
auaauuuacccugcaccacu

SEQ ID NO: 1068493 - RNA, 22 nt, Human
uuaaaauuuccccaccauguau

SEQ ID NO: 1068494 - RNA, 22 nt, Human
cagcugccccauaaaucacagu

SEQ ID NO: 1068495 - RNA, 22 nt, Human
agguggcucugacagcucuggu

SEQ ID NO: 1068496 - RNA, 22 nt, Human
ccugucuggaacauggccuguu

SEQ ID NO: 1068497 - RNA, 22 nt, Human
aagaaucauuguaaaguucugu

SEQ ID NO: 1068498 - RNA, 22 nt, Human
cacuguaaccuccaccuccugg

SEQ ID NO: 1068499 - RNA, 17 nt, Human
gagaguguauuggaugc

SEQ ID NO: 1068500 - RNA, 22 nt, Human
cuuccucuagccuaguaaugcc

SEQ ID NO: 1068501 - RNA, 18 nt, Human
gagguccugcucuagccc

SEQ ID NO: 1068502 - RNA, 22 nt, Human
cugcuguguggauucaauggcu

SEQ ID NO: 1068503 - RNA, 22 nt, Human
agcuggggcugcagagaacagg

SEQ ID NO: 1068504 - RNA, 22 nt, Human
gacacagagcucacagucuccu

SEQ ID NO: 1068505 - RNA, 22 nt, Human
ucauuacagagauauaaucuac

SEQ ID NO: 1068506 - RNA, 22 nt, Human
cagacaugauguaagcagaggc

SEQ ID NO: 1068507 - RNA, 22 nt, Human
uacauauguaaacauguauaaa

SEQ ID NO: 1068508 - RNA, 22 nt, Human
ggggcagagcauagcuccaauu

SEQ ID NO: 1068509 - RNA, 22 nt, Human
gguggggcugcaagcaguucgg

SEQ ID NO: 1068510 - RNA, 22 nt, Human
cuggggcuggugaggcaggcuc

SEQ ID NO: 1068511 - RNA, 19 nt, Human
gggaugcacucugaccacu

SEQ ID NO: 1068512 - RNA, 22 nt, Human
ucagguggcuuggagggggacg

SEQ ID NO: 1068513 - RNA, 22 nt, Human
cuucugggccauggccuuccuc

SEQ ID NO: 1068514 - RNA, 22 nt, Human
uggcagucggacuucuaucuca

SEQ ID NO: 1068515 - RNA, 22 nt, Human
aaucagaaccuugggucauaac

SEQ ID NO: 1068516 - RNA, 22 nt, Human
cuaucuuuuguucauuuugagu

SEQ ID NO: 1068517 - RNA, 22 nt, Human
agcaggcuuuccacagaaggag

SEQ ID NO: 1068518 - RNA, 22 nt, Human
uaacacauagauauuuuaacuu

SEQ ID NO: 1068519 - RNA, 22 nt, Human
gacaggaggcagagcucaggug

SEQ ID NO: 1068520 - RNA, 22 nt, Human
uaugaacuuuugaugugacaug

SEQ ID NO: 1068521 - RNA, 21 nt, Human
aggaagaaagguuggagguug

SEQ ID NO: 1068522 - RNA, 22 nt, Human
aagcagccacuggccaguuaua

SEQ ID NO: 1068523 - RNA, 22 nt, Human
gagaagccgagucagcugagcc

SEQ ID NO: 1068524 - RNA, 22 nt, Human
uuucagugaaagcuacuguuag

SEQ ID NO: 1068525 - RNA, 22 nt, Human
uguggcaguaaaauugggcaac

SEQ ID NO: 1068526 - RNA, 22 nt, Human
ucugggcuuuguaaugggaggu

SEQ ID NO: 1068527 - RNA, 22 nt, Human
ugcacuguugcuuuauaugauu

SEQ ID NO: 1068528 - RNA, 20 nt, Human
gccugcagguuggaugggau

SEQ ID NO: 1068529 - RNA, 22 nt, Human
uacuuuuuagcacagugugugc

SEQ ID NO: 1068530 - RNA, 22 nt, Human
acacccaggcuggcgugcagug

SEQ ID NO: 1068531 - RNA, 22 nt, Human
aauuucaguaugaaguuucaca

SEQ ID NO: 1068532 - RNA, 22 nt, Human
ccuggagcgcgggucaagcugg

SEQ ID NO: 1068533 - RNA, 23 nt, Human
aacacauugcuaauuacauucaa

SEQ ID NO: 1068534 - RNA, 19 nt, Human
ucccuggcgccucucgggc

SEQ ID NO: 1068535 - RNA, 22 nt, Human
cuauuucauguuccuauggccg

SEQ ID NO: 1068536 - RNA, 22 nt, Human
uagaaauccccagucucauagu

SEQ ID NO: 1068537 - RNA, 22 nt, Human
augauucagggaguuuucagga

SEQ ID NO: 1068538 - RNA, 19 nt, Human
aggugaugugacucuagaa

SEQ ID NO: 1068539 - RNA, 17 nt, Human
agugaaauuuacauugc

SEQ ID NO: 1068540 - RNA, 17 nt, Human
cccugcacccuacucuc

SEQ ID NO: 1068541 - RNA, 22 nt, Human
uacuacauuaauaaaacauuca

SEQ ID NO: 1068542 - RNA, 22 nt, Human
aauguuugagcaucuacaugcu

SEQ ID NO: 1068543 - RNA, 22 nt, Human
acagaugaaucugugauugcug

SEQ ID NO: 1068544 - RNA, 22 nt, Human
aggcagguguuaacccucugag

SEQ ID NO: 1068545 - RNA, 23 nt, Human
uacuauaacgcugugucagcucc

SEQ ID NO: 1068546 - RNA, 22 nt, Human
ucaggggagguugaaucgucuc

SEQ ID NO: 1068547 - RNA, 22 nt, Human
gggcuggcugauuuuccucucu

SEQ ID NO: 1068548 - RNA, 22 nt, Human
cauguguagguauacaaaauuc

SEQ ID NO: 1068549 - RNA, 22 nt, Human
ugcaugcaaugugaagaaagcu

SEQ ID NO: 1068550 - RNA, 22 nt, Human
ccagcagcccacaggcgucccu

SEQ ID NO: 1068551 - RNA, 22 nt, Human
aggggagcaaggccguggugua

SEQ ID NO: 1068552 - RNA, 22 nt, Human
aaauacagaguugcuuaaaagc

SEQ ID NO: 1068553 - RNA, 22 nt, Human
uucagcuagcaucucacuuggu

SEQ ID NO: 1068554 - RNA, 22 nt, Human
uccaggcucagcacuugcuacu

SEQ ID NO: 1068555 - RNA, 22 nt, Human
ucccacugcuuugcucugcuca

SEQ ID NO: 1068556 - RNA, 22 nt, Human
gcugucugucuucacaucucgc

SEQ ID NO: 1068557 - RNA, 22 nt, Human
aaacugucauuggaugcauuug

SEQ ID NO: 1068558 - RNA, 22 nt, Human
agcaggaacucagggaguucuc

SEQ ID NO: 1068559 - RNA, 22 nt, Human
uuccagaagauggcagcaaagg

SEQ ID NO: 1068560 - RNA, 22 nt, Human
agaagaauacuugauguucaug

SEQ ID NO: 1068561 - RNA, 22 nt, Human
gcagaggcuccauuuuacagau

SEQ ID NO: 1068562 - RNA, 22 nt, Human
aaauaaguuaaacuagaaugau

SEQ ID NO: 1068563 - RNA, 22 nt, Human
aacuuucuuugcaucuaaguuu

SEQ ID NO: 1068564 - RNA, 22 nt, Human
ugaaaaacuuuaauccauaaag

SEQ ID NO: 1068565 - RNA, 22 nt, Human
auggcugugaaggucacacccu

SEQ ID NO: 1068566 - RNA, 18 nt, Human
gccugccuagagcuugcc

SEQ ID NO: 1068567 - RNA, 22 nt, Human
acuuccaaauaccaucacauug

SEQ ID NO: 1068568 - RNA, 22 nt, Human
gggggcuguccugugcauugua

SEQ ID NO: 1068569 - RNA, 22 nt, Human
uagcucuagcacuggauaaucc

SEQ ID NO: 1068570 - RNA, 22 nt, Human
gucuggagagcugagcagaguu

SEQ ID NO: 1068571 - RNA, 22 nt, Human
cagugcaggaagugagaugccu

SEQ ID NO: 1068572 - RNA, 22 nt, Human
guuugcauuccaauuuagggga

SEQ ID NO: 1068573 - RNA, 19 nt, Human
ugcaggaggacugagcaga

SEQ ID NO: 1068574 - RNA, 22 nt, Human
gaucaacaaauguccuuuguga

SEQ ID NO: 1068575 - RNA, 22 nt, Human
gcccugcugucuucagaguaua

SEQ ID NO: 1068576 - RNA, 22 nt, Human
gcagggcucaacaggacacccc

SEQ ID NO: 1068577 - RNA, 22 nt, Human
ggagcuguugcgcaugcgcucg

SEQ ID NO: 1068578 - RNA, 21 nt, Human
uucugcuaagaaaacauuauu

SEQ ID NO: 1068579 - RNA, 22 nt, Human
aaguucagccugguuuuaaugc

SEQ ID NO: 1068580 - RNA, 22 nt, Human
agcuuguaacagacauaaaaau

SEQ ID NO: 1068581 - RNA, 22 nt, Human
gcuacugauugaccuuggagag

SEQ ID NO: 1068582 - RNA, 22 nt, Human
auaugagagaggaaagauuuua

SEQ ID NO: 1068583 - RNA, 22 nt, Human
aagaaagagaucacuccuccau

SEQ ID NO: 1068584 - RNA, 22 nt, Human
gggcugagugaccucaggccaa

SEQ ID NO: 1068585 - RNA, 22 nt, Human
gggaagagaccguacccuggcc

SEQ ID NO: 1068586 - RNA, 19 nt, Human
ugucucagugucccuuccu

SEQ ID NO: 1068587 - RNA, 22 nt, Human
guauaucaccccaagcagcuga

SEQ ID NO: 1068588 - RNA, 22 nt, Human
aacauuucuucugaaacugagu

SEQ ID NO: 1068589 - RNA, 22 nt, Human
acucugugugaguagagccugu

SEQ ID NO: 1068590 - RNA, 22 nt, Human
gccugagccgccugagcggcgg

SEQ ID NO: 1068591 - RNA, 22 nt, Human
cagggagaagucuggucagucc

SEQ ID NO: 1068592 - RNA, 22 nt, Human
caugagacugccuuuucaaacc

SEQ ID NO: 1068593 - RNA, 22 nt, Human
cuggaaggcucugcugccuguc

SEQ ID NO: 1068594 - RNA, 22 nt, Human
aaaggaguuacucauaaagcuu

SEQ ID NO: 1068595 - RNA, 23 nt, Human
uggcucucucagugcugcagagg

SEQ ID NO: 1068596 - RNA, 22 nt, Human
gagaugcugccugauuuauuca

SEQ ID NO: 1068597 - RNA, 22 nt, Human
agaggcaccaucuggaacagcc

SEQ ID NO: 1068598 - RNA, 22 nt, Human
aguggcugauguaggcaguggg

SEQ ID NO: 1068599 - RNA, 22 nt, Human
uggaggaugccuggggaggccu

SEQ ID NO: 1068600 - RNA, 22 nt, Human
acagcuguggggacucuugccc

SEQ ID NO: 1068601 - RNA, 22 nt, Human
cacaggaauaagucaaacuuca

SEQ ID NO: 1068602 - RNA, 22 nt, Human
cuggcagggugggcuuugcuuu

SEQ ID NO: 1068603 - RNA, 22 nt, Human
uacuugugugucaugugcagag

SEQ ID NO: 1068604 - RNA, 22 nt, Human
cggcuggugucgggcacagcaa

SEQ ID NO: 1068605 - RNA, 22 nt, Human
caucuuuucagaagccauucug

SEQ ID NO: 1068606 - RNA, 22 nt, Human
cucuucagcaaugcuuuagucc

SEQ ID NO: 1068607 - RNA, 22 nt, Human
uagcagcaauuacacaguccgu

SEQ ID NO: 1068608 - RNA, 20 nt, Human
ucaggcuccgcauuaacuua

SEQ ID NO: 1068609 - RNA, 22 nt, Human
gcagggcuauuggaaggagaug

SEQ ID NO: 1068610 - RNA, 22 nt, Human
ugcugagguuucugacuaugga

SEQ ID NO: 1068611 - RNA, 22 nt, Human
uuuuuguucugauuauacuggu

SEQ ID NO: 1068612 - RNA, 22 nt, Human
caggcugccuggaagaggacug

SEQ ID NO: 1068613 - RNA, 22 nt, Human
cuguguccugucuccuaaggug

SEQ ID NO: 1068614 - RNA, 22 nt, Human
ucucaagagggaggcaaucaug

SEQ ID NO: 1068615 - RNA, 22 nt, Human
uuccaaguguugagauuagagg

SEQ ID NO: 1068616 - RNA, 22 nt, Human
agaaaugaagagagucaagguu

SEQ ID NO: 1068617 - RNA, 22 nt, Human
cccucccugugugccucauuug

SEQ ID NO: 1068618 - RNA, 22 nt, Human
ccagaggaugcuggucagccuc

SEQ ID NO: 1068619 - RNA, 22 nt, Human
gggcugucaugugucagugacc

SEQ ID NO: 1068620 - RNA, 20 nt, Human
cugagcugagcuccaugggu

SEQ ID NO: 1068621 - RNA, 22 nt, Human
auaauauugaagagccuuggcc

SEQ ID NO: 1068622 - RNA, 22 nt, Human
gcagggcaaugaucccgagagg

SEQ ID NO: 1068623 - RNA, 22 nt, Human
gguggggcucagcaaucugugu

SEQ ID NO: 1068624 - RNA, 20 nt, Human
gcaugaggaaucauugcagc

SEQ ID NO: 1068625 - RNA, 22 nt, Human
ugcacagcuggcucuccuuuuc

SEQ ID NO: 1068626 - RNA, 22 nt, Human
cagggccacacggaagggaaca

SEQ ID NO: 1068627 - RNA, 22 nt, Human
cccagaguucaaacccugcguc

SEQ ID NO: 1068628 - RNA, 23 nt, Human
ugaaaguucugaagagaucaugc

SEQ ID NO: 1068629 - RNA, 22 nt, Human
aucauuuaaaacaagucucuau

SEQ ID NO: 1068630 - RNA, 22 nt, Human
cccaggugcugcgugaagccuc

SEQ ID NO: 1068631 - RNA, 22 nt, Human
ugguggcaauguccuggagaag

SEQ ID NO: 1068632 - RNA, 22 nt, Human
aaguauuucguucugaaaaagu

SEQ ID NO: 1068633 - RNA, 22 nt, Human
gcugggcucugucaugccuucc

SEQ ID NO: 1068634 - RNA, 22 nt, Human
uuuggaaagacacacaguuuua

SEQ ID NO: 1068635 - RNA, 22 nt, Human
uccagggagauggcagaggcug

SEQ ID NO: 1068636 - RNA, 20 nt, Human
agggcagcuugaggagccgg

SEQ ID NO: 1068637 - RNA, 23 nt, Human
ugagcugggccugcaggggucuc

SEQ ID NO: 1068638 - RNA, 22 nt, Human
uuaagcucucauuauuauuauu

SEQ ID NO: 1068639 - RNA, 22 nt, Human
uggaaagaaaguaaaggcguau

SEQ ID NO: 1068640 - RNA, 22 nt, Human
gggcucuuuucugagcuucacu

SEQ ID NO: 1068641 - RNA, 22 nt, Human
cgaacacacuugggaguucuga

SEQ ID NO: 1068642 - RNA, 22 nt, Human
aaggcagucugguuucaaagca

SEQ ID NO: 1068643 - RNA, 22 nt, Human
uaaauuuuuguuaacagccucu

SEQ ID NO: 1068644 - RNA, 22 nt, Human
gacacagaaggucacauguuca

SEQ ID NO: 1068645 - RNA, 22 nt, Human
aagauuucucuccuggaaagca

SEQ ID NO: 1068646 - RNA, 22 nt, Human
acaguacagcugaaacuuuagu

SEQ ID NO: 1068647 - RNA, 22 nt, Human
ccagccagcugguuggacgccu

SEQ ID NO: 1068648 - RNA, 22 nt, Human
uaaagcaaaaaugaacugccau

SEQ ID NO: 1068649 - RNA, 23 nt, Human
acacucuucccagaagguucuga

SEQ ID NO: 1068650 - RNA, 22 nt, Human
cagcuguugacugguacaugaa

SEQ ID NO: 1068651 - RNA, 22 nt, Human
aggaagcaccggaaugaugacu

SEQ ID NO: 1068652 - RNA, 22 nt, Human
acugcccuggagacagcagagu

SEQ ID NO: 1068653 - RNA, 22 nt, Human
ugaauucaggggcuauuauauu

SEQ ID NO: 1068654 - RNA, 22 nt, Human
auaugaaaguaagcaugugugu

SEQ ID NO: 1068655 - RNA, 22 nt, Human
uucuugaaaauagccauguaca

SEQ ID NO: 1068656 - RNA, 21 nt, Human
gggcucuccugaggccaugaa

SEQ ID NO: 1068657 - RNA, 22 nt, Human
cagggccuucguaaguguccgg

SEQ ID NO: 1068658 - RNA, 22 nt, Human
aaaaucuaaguagcgaguaagg

SEQ ID NO: 1068659 - RNA, 22 nt, Human
gcuggagauaguaggauccaua

SEQ ID NO: 1068660 - RNA, 22 nt, Human
acagacagggcaccugccuccu

SEQ ID NO: 1068661 - RNA, 22 nt, Human
agccauugaauuuagugccuuu

SEQ ID NO: 1068662 - RNA, 22 nt, Human
cugcugugucagaguccagggg

SEQ ID NO: 1068663 - RNA, 22 nt, Human
aggcuuaaccugaucacaugag

SEQ ID NO: 1068664 - RNA, 22 nt, Human
uggggcaguuaauaaacauucu

SEQ ID NO: 1068665 - RNA, 22 nt, Human
ugggaggaaugucacugagcca

SEQ ID NO: 1068666 - RNA, 22 nt, Human
agaaaauaauuucuuggcuggu

SEQ ID NO: 1068667 - RNA, 22 nt, Human
cagcuacaaauacuuuuguaug

SEQ ID NO: 1068668 - RNA, 22 nt, Human
acagaagaaguucaaggugaag

SEQ ID NO: 1068669 - RNA, 22 nt, Human
ucugccuggacccuggugagcu

SEQ ID NO: 1068670 - RNA, 22 nt, Human
ccccugccagcuaucccugaac

SEQ ID NO: 1068671 - RNA, 22 nt, Human
acaucaguaauuaagucucaag

SEQ ID NO: 1068672 - RNA, 22 nt, Human
ggcaggugccuucugugcuagc

SEQ ID NO: 1068673 - RNA, 22 nt, Human
uugcagagaucagcagguuuga

SEQ ID NO: 1068674 - RNA, 22 nt, Human
cacauacugagaaucacaccca

SEQ ID NO: 1068675 - RNA, 22 nt, Human
ccaggagcuauguacacacuau

SEQ ID NO: 1068676 - RNA, 23 nt, Human
ccagcccuccaccagcucuaggc

SEQ ID NO: 1068677 - RNA, 22 nt, Human
ccagggccaagagaccucgagg

SEQ ID NO: 1068678 - RNA, 22 nt, Human
gggaaggaaaucuugcuuguga

SEQ ID NO: 1068679 - RNA, 22 nt, Human
acauuugaaauucugaacagau

SEQ ID NO: 1068680 - RNA, 22 nt, Human
gagauggggucagcugggacau

SEQ ID NO: 1068681 - RNA, 22 nt, Human
cagcuccccucuguggggcagu

SEQ ID NO: 1068682 - RNA, 22 nt, Human
cuuuuugcaagaguuucucauc

SEQ ID NO: 1068683 - RNA, 22 nt, Human
aggagucacucagggcuucauc

SEQ ID NO: 1068684 - RNA, 22 nt, Human
auaggcaagcacaaagucagga

SEQ ID NO: 1068685 - RNA, 22 nt, Human
acuguguguuugucuagcacag

SEQ ID NO: 1068686 - RNA, 22 nt, Human
cagaaguaaugaugucauuccu

SEQ ID NO: 1068687 - RNA, 22 nt, Human
uaagaaacugucacaguacuau

SEQ ID NO: 1068688 - RNA, 18 nt, Human
agggcucucugcuggguu

SEQ ID NO: 1068689 - RNA, 22 nt, Human
gcugggcagccuggccgcugcc

SEQ ID NO: 1068690 - RNA, 22 nt, Human
ucuaaacacgucucuuugaaua

SEQ ID NO: 1068691 - RNA, 22 nt, Human
aggauguggcugagacuucugg

SEQ ID NO: 1068692 - RNA, 22 nt, Human
uggggcugugagacuacaggau

SEQ ID NO: 1068693 - RNA, 22 nt, Human
agcugaggcauggacaggcugc

SEQ ID NO: 1068694 - RNA, 22 nt, Human
caugaaauggccaaccuucggc

SEQ ID NO: 1068695 - RNA, 22 nt, Human
uuccuuccgggcaccaggcacu

SEQ ID NO: 1068696 - RNA, 22 nt, Human
uguuacaguggcuuuuuaaaca

SEQ ID NO: 1068697 - RNA, 22 nt, Human
uuacaucauugagacauacaua

SEQ ID NO: 1068698 - RNA, 22 nt, Human
ggcagguguggaguguuauuuu

SEQ ID NO: 1068699 - RNA, 22 nt, Human
ccacacagggggaugaguuauu

SEQ ID NO: 1068700 - RNA, 22 nt, Human
agucagggccuggccugcugaa

SEQ ID NO: 1068701 - RNA, 22 nt, Human
ccucugaggugagcccagcugg

SEQ ID NO: 1068702 - RNA, 22 nt, Human
uuaauaacauuguguaucaccc

SEQ ID NO: 1068703 - RNA, 22 nt, Human
gcacacagacuaaccauauuuc

SEQ ID NO: 1068704 - RNA, 19 nt, Human
aucuuacagagcagaguac

SEQ ID NO: 1068705 - RNA, 19 nt, Human
ucucagaggaaaaauugcu

SEQ ID NO: 1068706 - RNA, 22 nt, Human
acaggcuggugguccuggccau

SEQ ID NO: 1068707 - RNA, 22 nt, Human
agugccaggagcaaggagcucc

SEQ ID NO: 1068708 - RNA, 22 nt, Human
aggaagcuuggggcagggcuac

SEQ ID NO: 1068709 - RNA, 22 nt, Human
ucccagaggcaguugguaacuu

SEQ ID NO: 1068710 - RNA, 22 nt, Human
gacacagagauaggccuguguu

SEQ ID NO: 1068711 - RNA, 22 nt, Human
cacaggaaucagcauuaauggc

SEQ ID NO: 1068712 - RNA, 22 nt, Human
gcgcaggugcugcuggagcagc

SEQ ID NO: 1068713 - RNA, 22 nt, Human
cccuuccucccaggcuucugug

SEQ ID NO: 1068714 - RNA, 22 nt, Human
cuucugggcagaaguuuugaga

SEQ ID NO: 1068715 - RNA, 22 nt, Human
gcuggagcuugagaggacaggg

SEQ ID NO: 1068716 - RNA, 22 nt, Human
augcacaauguuuugauuugag

SEQ ID NO: 1068717 - RNA, 17 nt, Human
ugacuuuauuugcuugg

SEQ ID NO: 1068718 - RNA, 22 nt, Human
cccaggaaaagcagugccagca

SEQ ID NO: 1068719 - RNA, 22 nt, Human
ucuugauuugaauugcaguugu

SEQ ID NO: 1068720 - RNA, 22 nt, Human
uaguaacagcagcuucccugug

SEQ ID NO: 1068721 - RNA, 22 nt, Human
cugcccugcuaaugaguuccaa

SEQ ID NO: 1068722 - RNA, 22 nt, Human
agggccagcagcuuggccaacc

SEQ ID NO: 1068723 - RNA, 22 nt, Human
gcaccacaucaaugaggggagc

SEQ ID NO: 1068724 - RNA, 22 nt, Human
gcaggugguccccguggagugg

SEQ ID NO: 1068725 - RNA, 18 nt, Human
gaacagcaauuucauguu

SEQ ID NO: 1068726 - RNA, 22 nt, Human
ucugagagcucuggggccccuu

SEQ ID NO: 1068727 - RNA, 22 nt, Human
aggaacccggucugucacugug

SEQ ID NO: 1068728 - RNA, 22 nt, Human
cugugggaugggaccucagcug

SEQ ID NO: 1068729 - RNA, 22 nt, Human
ggcuuugguagacacagauuga

SEQ ID NO: 1068730 - RNA, 22 nt, Human
uauuuuacagacuacuuuagau

SEQ ID NO: 1068731 - RNA, 23 nt, Human
ugcugguguuuuugggaccaggg

SEQ ID NO: 1068732 - RNA, 22 nt, Human
aagucauuccugcuuguugccc

SEQ ID NO: 1068733 - RNA, 22 nt, Human
aggcucuguuauucuagagggc

SEQ ID NO: 1068734 - RNA, 22 nt, Human
ccacuguauuuuggaagcagau

SEQ ID NO: 1068735 - RNA, 22 nt, Human
aaacugaaacaucaucauguug

SEQ ID NO: 1068736 - RNA, 22 nt, Human
ugggagagugcucaaugugcaa

SEQ ID NO: 1068737 - RNA, 22 nt, Human
uuucacaggaguccuuucuaua

SEQ ID NO: 1068738 - RNA, 22 nt, Human
uuuuugucaucuauuucuggug

SEQ ID NO: 1068739 - RNA, 22 nt, Human
acagaaaaaugagggagcugga

SEQ ID NO: 1068740 - RNA, 22 nt, Human
aagaugcaugcugaagcuggcu

SEQ ID NO: 1068741 - RNA, 20 nt, Human
aaacacagccucucuuuaca

SEQ ID NO: 1068742 - RNA, 22 nt, Human
aacugaaaguuucaccugaggu

SEQ ID NO: 1068743 - RNA, 22 nt, Human
cagcagagaaauuaaacuucug

SEQ ID NO: 1068744 - RNA, 21 nt, Human
cagggcacacagaggauggua

SEQ ID NO: 1068745 - RNA, 22 nt, Human
cuuauaaaguccaucugaacaa

SEQ ID NO: 1068746 - RNA, 22 nt, Human
gaguggggucugggcaucaguc

SEQ ID NO: 1068747 - RNA, 22 nt, Human
agcuagagcugagaagcacuug

SEQ ID NO: 1068748 - RNA, 22 nt, Human
gugcccuggaugacuuuggucu

SEQ ID NO: 1068749 - RNA, 22 nt, Human
ucaucgccucgugcaucuuggc

SEQ ID NO: 1068750 - RNA, 22 nt, Human
ucuacauuccuuuuauaauauc

SEQ ID NO: 1068751 - RNA, 22 nt, Human
uucauagaagcagaaaguaaac

SEQ ID NO: 1068752 - RNA, 22 nt, Human
uauuuggaaacaauucacaugc

SEQ ID NO: 1068753 - RNA, 22 nt, Human
ccuggccagggucugggcugcu

SEQ ID NO: 1068754 - RNA, 22 nt, Human
agaagcaggccucacagaucug

SEQ ID NO: 1068755 - RNA, 22 nt, Human
gugcaggagguaacauagcaaa

SEQ ID NO: 1068756 - RNA, 22 nt, Human
ugggagcugggguuggacgucu

SEQ ID NO: 1068757 - RNA, 22 nt, Human
cagcugccccuccagggcuggg

SEQ ID NO: 1068758 - RNA, 22 nt, Human
uugaaauuuuaggccuugcaau

SEQ ID NO: 1068759 - RNA, 22 nt, Human
uuaaacaguauaucugagcaag

SEQ ID NO: 1068760 - RNA, 22 nt, Human
acucugaggcaggucagggcag

SEQ ID NO: 1068761 - RNA, 22 nt, Human
cgcaggcucgguucacagagca

SEQ ID NO: 1068762 - RNA, 22 nt, Human
ggcccagccggcgagucucgcg

SEQ ID NO: 1068763 - RNA, 22 nt, Human
uuacucagucucccauacauug

SEQ ID NO: 1068764 - RNA, 22 nt, Human
ugccaggccacguagcuucaag

SEQ ID NO: 1068765 - RNA, 22 nt, Human
gcaauaaaauguaaugauuggg

SEQ ID NO: 1068766 - RNA, 22 nt, Human
acauuacauaagauuguaaccu

SEQ ID NO: 1068767 - RNA, 22 nt, Human
auggaagacuaacagaaacaug

SEQ ID NO: 1068768 - RNA, 22 nt, Human
ugcucugcaagcaggagcaaga

SEQ ID NO: 1068769 - RNA, 22 nt, Human
gaggggucacaugggcuggcuu

SEQ ID NO: 1068770 - RNA, 22 nt, Human
ucaauuuaagguacuacuuugg

SEQ ID NO: 1068771 - RNA, 21 nt, Human
cagcccagcuucuuccccagu

SEQ ID NO: 1068772 - RNA, 20 nt, Human
augcuuucuugugugcugcu

SEQ ID NO: 1068773 - RNA, 22 nt, Human
cuucuuucccaggcauguuuua

SEQ ID NO: 1068774 - RNA, 22 nt, Human
gugggggcuggcucguccugug

SEQ ID NO: 1068775 - RNA, 22 nt, Human
cacagaaucauauugucaguuu

SEQ ID NO: 1068776 - RNA, 21 nt, Human
uauugauucaauuucuugagu

SEQ ID NO: 1068777 - RNA, 22 nt, Human
ugcagcauugcaaagcagucuu

SEQ ID NO: 1068778 - RNA, 22 nt, Human
uagaaagaacuucauguaaaac

SEQ ID NO: 1068779 - RNA, 22 nt, Human
ugggccuggaguuuguccagag

SEQ ID NO: 1068780 - RNA, 22 nt, Human
agaaauuauuagugaauagucu

SEQ ID NO: 1068781 - RNA, 22 nt, Human
gggagggaggugcugguucacg

SEQ ID NO: 1068782 - RNA, 22 nt, Human
ccagaaaacucuacaugcuugu

SEQ ID NO: 1068783 - RNA, 22 nt, Human
gccagucugcucccacaaguuc

SEQ ID NO: 1068784 - RNA, 22 nt, Human
ggguggcaggauuggcaggagu

SEQ ID NO: 1068785 - RNA, 22 nt, Human
uguucccauuuucugcauaauc

SEQ ID NO: 1068786 - RNA, 22 nt, Human
cuacauuuuaauaagcugcuua

SEQ ID NO: 1068787 - RNA, 22 nt, Human
aggugcuagguguguaguggag

SEQ ID NO: 1068788 - RNA, 22 nt, Human
cccuagggcuaagcaggacugc

SEQ ID NO: 1068789 - RNA, 22 nt, Human
cugcaggcaucuaacugugggc

SEQ ID NO: 1068790 - RNA, 22 nt, Human
agggcucaauggugggcaugua

SEQ ID NO: 1068791 - RNA, 22 nt, Human
aaaagcaagaggcuggauuaaa

SEQ ID NO: 1068792 - RNA, 22 nt, Human
gaaagacuuccuuugagaguac

SEQ ID NO: 1068793 - RNA, 22 nt, Human
cugugugcugaaaugcagugag

SEQ ID NO: 1068794 - RNA, 22 nt, Human
gaagaaggguaaggaguguuga

SEQ ID NO: 1068795 - RNA, 22 nt, Human
cccugugagcggcuggaugccu

SEQ ID NO: 1068796 - RNA, 22 nt, Human
gagcugcagaguaaccuuugca

SEQ ID NO: 1068797 - RNA, 22 nt, Human
aacagccacugauacugaauag

SEQ ID NO: 1068798 - RNA, 22 nt, Human
ccagaagaccggggagucaggg

SEQ ID NO: 1068799 - RNA, 22 nt, Human
ggcccagcugugcuuccagccc

SEQ ID NO: 1068800 - RNA, 22 nt, Human
auuaauauugguucauuagcug

SEQ ID NO: 1068801 - RNA, 22 nt, Human
cugggaggcacuauucaggagg

SEQ ID NO: 1068802 - RNA, 22 nt, Human
uucacaguaaguaggauaguug

SEQ ID NO: 1068803 - RNA, 22 nt, Human
auauguguaaaugcauuuguuu

SEQ ID NO: 1068804 - RNA, 22 nt, Human
ggcagcacgacaggaguggaag

SEQ ID NO: 1068805 - RNA, 22 nt, Human
ucaguuuuuacggucacaggga

SEQ ID NO: 1068806 - RNA, 22 nt, Human
cucugggcuccuucagcccuuu

SEQ ID NO: 1068807 - RNA, 22 nt, Human
aucacagauugugaauaacuau

SEQ ID NO: 1068808 - RNA, 22 nt, Human
auguuuaauuaucuggguuuug

SEQ ID NO: 1068809 - RNA, 18 nt, Human
aggagccuuugcacugga

SEQ ID NO: 1068810 - RNA, 22 nt, Human
aaaugcaucagcucauaagaga

SEQ ID NO: 1068811 - RNA, 23 nt, Human
agugcuggagaagcuucuggcuu

SEQ ID NO: 1068812 - RNA, 22 nt, Human
gaggccaggagugcuguaaguu

SEQ ID NO: 1068813 - RNA, 22 nt, Human
auagacaaacacgaagaugaca

SEQ ID NO: 1068814 - RNA, 21 nt, Human
agaugcugugcuccaggagca

SEQ ID NO: 1068815 - RNA, 22 nt, Human
cugguggagagugggcucugga

SEQ ID NO: 1068816 - RNA, 22 nt, Human
gaacagcugcuagagaucugug

SEQ ID NO: 1068817 - RNA, 22 nt, Human
aucagaaaaacauaauguuauu

SEQ ID NO: 1068818 - RNA, 22 nt, Human
aaggggaaguagcaccagaggu

SEQ ID NO: 1068819 - RNA, 22 nt, Human
uuacacagaaacacuguucaga

SEQ ID NO: 1068820 - RNA, 22 nt, Human
uuuaacaugugaauuuuggaag

SEQ ID NO: 1068821 - RNA, 22 nt, Human
gagaagggauaugccacucucg

SEQ ID NO: 1068822 - RNA, 22 nt, Human
ucugaggccccugggcaggaug

SEQ ID NO: 1068823 - RNA, 22 nt, Human
ugaggcagcuuuuucugugugu

SEQ ID NO: 1068824 - RNA, 22 nt, Human
cacagcugcccuacuccaugug

SEQ ID NO: 1068825 - RNA, 22 nt, Human
ccagaaaauauggcuaagguga

SEQ ID NO: 1068826 - RNA, 22 nt, Human
cuauaucaucauuaccugcacc

SEQ ID NO: 1068827 - RNA, 22 nt, Human
ucaguuuuucuauacuuuguag

SEQ ID NO: 1068828 - RNA, 22 nt, Human
ggcaguggcuccucucuacucc

SEQ ID NO: 1068829 - RNA, 22 nt, Human
ugaagaaacgcagagagguagg

SEQ ID NO: 1068830 - RNA, 22 nt, Human
ggcagagcuuguuccuucuguu

SEQ ID NO: 1068831 - RNA, 22 nt, Human
gugcccugaguggguaggagag

SEQ ID NO: 1068832 - RNA, 22 nt, Human
uugguucaggacauauuugagu

SEQ ID NO: 1068833 - RNA, 19 nt, Human
uaucuguuuccugcuuguc

SEQ ID NO: 1068834 - RNA, 22 nt, Human
ggcugcucuccaucccaggccu

SEQ ID NO: 1068835 - RNA, 23 nt, Human
guccucuggagagaaaggcagua

SEQ ID NO: 1068836 - RNA, 22 nt, Human
ugauuuccucuacuagcaauua

SEQ ID NO: 1068837 - RNA, 22 nt, Human
ugccauccaucaguauuugugg

SEQ ID NO: 1068838 - RNA, 23 nt, Human
uggcugagauccuacuguuugcu

SEQ ID NO: 1068839 - RNA, 22 nt, Human
uauacacaggaaucugugaaaa

SEQ ID NO: 1068840 - RNA, 22 nt, Human
cagccaugagucuaagcaguuu

SEQ ID NO: 1068841 - RNA, 22 nt, Human
gcagcccaauggacugagacag

SEQ ID NO: 1068842 - RNA, 20 nt, Human
caggcacacucauuccugcu

SEQ ID NO: 1068843 - RNA, 22 nt, Human
cuggggacuugcagacacaauu

SEQ ID NO: 1068844 - RNA, 22 nt, Human
gugggccuucaacccugucugg

SEQ ID NO: 1068845 - RNA, 19 nt, Human
acacagggaucagaggguu

SEQ ID NO: 1068846 - RNA, 22 nt, Human
ccuccaggaacuugagagacac

SEQ ID NO: 1068847 - RNA, 18 nt, Human
cagaagcaggcagugcag

SEQ ID NO: 1068848 - RNA, 22 nt, Human
cuggcccuucucuugcuuccug

SEQ ID NO: 1068849 - RNA, 22 nt, Human
ggcaaagccuuccagcuguuac

SEQ ID NO: 1068850 - RNA, 22 nt, Human
auaaaauuugcuacuguuaaau

SEQ ID NO: 1068851 - RNA, 22 nt, Human
aggcucaggaggagcugccgga

SEQ ID NO: 1068852 - RNA, 22 nt, Human
uuuaagaaguuauguuauaaau

SEQ ID NO: 1068853 - RNA, 22 nt, Human
ugggcugagcacugaggaagga

SEQ ID NO: 1068854 - RNA, 16 nt, Human
ugggcagaugagaaga

SEQ ID NO: 1068855 - RNA, 22 nt, Human
ccuuagagaguacugggcugcc

SEQ ID NO: 1068856 - RNA, 22 nt, Human
cugccugcucaccagggcucug

SEQ ID NO: 1068857 - RNA, 22 nt, Human
gggagagaauuauugccagacc

SEQ ID NO: 1068858 - RNA, 22 nt, Human
uggcucaggaucuaagcagaau

SEQ ID NO: 1068859 - RNA, 22 nt, Human
accagggcuuacagcaguagcu

SEQ ID NO: 1068860 - RNA, 22 nt, Human
uuccauaauaaccugagagaaa

SEQ ID NO: 1068861 - RNA, 22 nt, Human
ccucccucuuucagucccacag

SEQ ID NO: 1068862 - RNA, 22 nt, Human
gaaagcaaguugacugcagaau

SEQ ID NO: 1068863 - RNA, 22 nt, Human
auucauaucauagaguuauuga

SEQ ID NO: 1068864 - RNA, 22 nt, Human
ggaugcaggggcagcagagccu

SEQ ID NO: 1068865 - RNA, 22 nt, Human
ucauugcaguagggagagaccc

SEQ ID NO: 1068866 - RNA, 22 nt, Human
uggugggggaggcugucuagca

SEQ ID NO: 1068867 - RNA, 22 nt, Human
ccuugcugcgugcuagcacaga

SEQ ID NO: 1068868 - RNA, 21 nt, Human
agauguuucccccuuggcuuc

SEQ ID NO: 1068869 - RNA, 22 nt, Human
cuugcaggcagggccuccugga

SEQ ID NO: 1068870 - RNA, 22 nt, Human
cugugucccuugucccagagcc

SEQ ID NO: 1068871 - RNA, 22 nt, Human
ggucucagcccucgccagcagc

SEQ ID NO: 1068872 - RNA, 22 nt, Human
gccuuggccaacaccuugcaaa

SEQ ID NO: 1068873 - RNA, 22 nt, Human
cccagcuugcccaggacugagg

SEQ ID NO: 1068874 - RNA, 22 nt, Human
uaauuucuaauucauuuucagu

SEQ ID NO: 1068875 - RNA, 22 nt, Human
acagccagggucucaggaggcg

SEQ ID NO: 1068876 - RNA, 22 nt, Human
aggcacacagcuugcauaaauc

SEQ ID NO: 1068877 - RNA, 22 nt, Human
guggagcaaucagagggucagu

SEQ ID NO: 1068878 - RNA, 23 nt, Human
ccugggcauuggcugcagcuucu

SEQ ID NO: 1068879 - RNA, 22 nt, Human
uguucuuaugaugaagcacuga

SEQ ID NO: 1068880 - RNA, 22 nt, Human
gacccucauugucaccgugagc

SEQ ID NO: 1068881 - RNA, 22 nt, Human
agugcuuuagagaaauggugcu

SEQ ID NO: 1068882 - RNA, 22 nt, Human
caggaucccuggccuccgccca

SEQ ID NO: 1068883 - RNA, 22 nt, Human
auaaagucauuucaaaaguuga

SEQ ID NO: 1068884 - RNA, 22 nt, Human
guguuuuagugcugcugagcug

SEQ ID NO: 1068885 - RNA, 22 nt, Human
gaauaacauuuuuuccuuuaca

SEQ ID NO: 1068886 - RNA, 22 nt, Human
auauucacacuguuuaguuaca

SEQ ID NO: 1068887 - RNA, 22 nt, Human
caggggccggcuguccgugccc

SEQ ID NO: 1068888 - RNA, 19 nt, Human
cagcucaguuugauucucu

SEQ ID NO: 1068889 - RNA, 22 nt, Human
ugcccuguuaucuuggaagagu

SEQ ID NO: 1068890 - RNA, 23 nt, Human
ucagaggaucaucaaacguuuuc

SEQ ID NO: 1068891 - RNA, 22 nt, Human
uggcugagccacuuguucagau

SEQ ID NO: 1068892 - RNA, 22 nt, Human
acaguuauucuuuaugcaacca

SEQ ID NO: 1068893 - RNA, 22 nt, Human
ggcaugggagugagcaaccuua

SEQ ID NO: 1068894 - RNA, 22 nt, Human
uuaaagcaggcaucauuccuca

SEQ ID NO: 1068895 - RNA, 15 nt, Human
aggcacugugggacc

SEQ ID NO: 1068896 - RNA, 22 nt, Human
cugaggucaauuaaucaacaac

SEQ ID NO: 1068897 - RNA, 22 nt, Human
acuauucauguuuccuaacuau

SEQ ID NO: 1068898 - RNA, 22 nt, Human
ucugucaccauucagcuugaau

SEQ ID NO: 1068899 - RNA, 22 nt, Human
gaauacaugauuaaaguuugau

SEQ ID NO: 1068900 - RNA, 22 nt, Human
auuuuucucucacacuuaccag

SEQ ID NO: 1068901 - RNA, 22 nt, Human
ugcugccaugcagagcaacaga

SEQ ID NO: 1068902 - RNA, 19 nt, Human
uucuggagguuacccugag

SEQ ID NO: 1068903 - RNA, 22 nt, Human
ggcugugccucaaggcuacuca

SEQ ID NO: 1068904 - RNA, 22 nt, Human
caggguggaauggaaugcuggc

SEQ ID NO: 1068905 - RNA, 22 nt, Human
aaauuaacuaucacuuuuguga

SEQ ID NO: 1068906 - RNA, 22 nt, Human
ugaugcugcugggaguggugcu

SEQ ID NO: 1068907 - RNA, 22 nt, Human
ggcaggugaguucauuaucugc

SEQ ID NO: 1068908 - RNA, 22 nt, Human
aaaauaguuaacguucagagua

SEQ ID NO: 1068909 - RNA, 22 nt, Human
gguggggcuaggaccucaggau

SEQ ID NO: 1068910 - RNA, 22 nt, Human
uuucacaugugcuguugucaau

SEQ ID NO: 1068911 - RNA, 22 nt, Human
aaauaguuguuuggaucaauaa

SEQ ID NO: 1068912 - RNA, 23 nt, Human
agggguggucaguacccgcagug

SEQ ID NO: 1068913 - RNA, 23 nt, Human
acacauauauucagauacagaug

SEQ ID NO: 1068914 - RNA, 22 nt, Human
uugcucugaacccagggcacca

SEQ ID NO: 1068915 - RNA, 22 nt, Human
ugccugugaucagcugaguuca

SEQ ID NO: 1068916 - RNA, 22 nt, Human
uucuggggccccaguguccucg

SEQ ID NO: 1068917 - RNA, 23 nt, Human
uuccaagugcuuuacuuaauccu

SEQ ID NO: 1068918 - RNA, 22 nt, Human
ugaacagauggcccagcagagg

SEQ ID NO: 1068919 - RNA, 22 nt, Human
auacaaugaaguauagaugaaa

SEQ ID NO: 1068920 - RNA, 22 nt, Human
cucacugugaccucagcagaca

SEQ ID NO: 1068921 - RNA, 22 nt, Human
cuuuauggaaucaaagacugga

SEQ ID NO: 1068922 - RNA, 20 nt, Human
ucacagaaacaaauagagaa

SEQ ID NO: 1068923 - RNA, 22 nt, Human
ccagaagauggcucaaaccaug

SEQ ID NO: 1068924 - RNA, 22 nt, Human
ugcaggcuuuagccccauggcu

SEQ ID NO: 1068925 - RNA, 22 nt, Human
guuucacagggccauggaggaa

SEQ ID NO: 1068926 - RNA, 22 nt, Human
uuggcauuuauucuaaggucaa

SEQ ID NO: 1068927 - RNA, 22 nt, Human
uucuuaacuggaaaaugucaga

SEQ ID NO: 1068928 - RNA, 22 nt, Human
ucacagaauagcacuguaagcg

SEQ ID NO: 1068929 - RNA, 22 nt, Human
uucuugauuucaugcaguuaag

SEQ ID NO: 1068930 - RNA, 18 nt, Human
cuuuagcugucaucuuug

SEQ ID NO: 1068931 - RNA, 22 nt, Human
gcagggaaggggacggaaccag

SEQ ID NO: 1068932 - RNA, 21 nt, Human
gccaaggggguagcuauuccu

SEQ ID NO: 1068933 - RNA, 22 nt, Human
uggccugggccugccggugcaa

SEQ ID NO: 1068934 - RNA, 22 nt, Human
cuguagccaguuuggccucacc

SEQ ID NO: 1068935 - RNA, 22 nt, Human
aaguacuucuagauggauaauc

SEQ ID NO: 1068936 - RNA, 22 nt, Human
gcucucugguuccagucaggaa

SEQ ID NO: 1068937 - RNA, 22 nt, Human
uagagugguuaacaguuuagaa

SEQ ID NO: 1068938 - RNA, 22 nt, Human
gccuguguggaugggccccugg

SEQ ID NO: 1068939 - RNA, 22 nt, Human
aucagcaaguccuguuaauucu

SEQ ID NO: 1068940 - RNA, 22 nt, Human
ccuggcugugugaccuuggcaa

SEQ ID NO: 1068941 - RNA, 22 nt, Human
aaaaaguauuggccaugguuga

SEQ ID NO: 1068942 - RNA, 22 nt, Human
uuucacauguauauaggcauua

SEQ ID NO: 1068943 - RNA, 22 nt, Human
gcugcagggcucucacaggggg

SEQ ID NO: 1068944 - RNA, 22 nt, Human
agcccaagcauaggagggaggc

SEQ ID NO: 1068945 - RNA, 22 nt, Human
ucaucacucauuggacaacaga

SEQ ID NO: 1068946 - RNA, 22 nt, Human
ucauuuccucaaauucaagguu

SEQ ID NO: 1068947 - RNA, 22 nt, Human
caagaaucagaccugucagggu

SEQ ID NO: 1068948 - RNA, 22 nt, Human
uacccaggagaaacagcagggc

SEQ ID NO: 1068949 - RNA, 22 nt, Human
cacagugauugauuuuuacuuu

SEQ ID NO: 1068950 - RNA, 22 nt, Human
ccuggcugucguuuugugaaau

SEQ ID NO: 1068951 - RNA, 20 nt, Human
ugcagggccuaaaaagggaa

SEQ ID NO: 1068952 - RNA, 22 nt, Human
auaauuaauuucaguaaucucc

SEQ ID NO: 1068953 - RNA, 22 nt, Human
ugccaggcuuagagcaggggcu

SEQ ID NO: 1068954 - RNA, 22 nt, Human
gauguguauuuggaagacaaaa

SEQ ID NO: 1068955 - RNA, 22 nt, Human
acauucuauucugcaggacaag

SEQ ID NO: 1068956 - RNA, 22 nt, Human
auggcagacgaggcagcagggg

SEQ ID NO: 1068957 - RNA, 22 nt, Human
gacuucucccaaccaucagagg

SEQ ID NO: 1068958 - RNA, 22 nt, Human
auggaaagggaagcaaggaaca

SEQ ID NO: 1068959 - RNA, 22 nt, Human
uucagagaugacaccugguguu

SEQ ID NO: 1068960 - RNA, 22 nt, Human
cagagccacuuggagaugagaa

SEQ ID NO: 1068961 - RNA, 22 nt, Human
gucaggaucaaauugaaguuau

SEQ ID NO: 1068962 - RNA, 17 nt, Human
caauuucauagguuuug

SEQ ID NO: 1068963 - RNA, 22 nt, Human
aggagcugaaacuucucauaug

SEQ ID NO: 1068964 - RNA, 22 nt, Human
ucuuuauuuaagucuguuguaa

SEQ ID NO: 1068965 - RNA, 22 nt, Human
gccaggaaucacugcugaguaa

SEQ ID NO: 1068966 - RNA, 22 nt, Human
acaacacagcuuuccucaaguu

SEQ ID NO: 1068967 - RNA, 22 nt, Human
ggcaggcuagcacugauguccu

SEQ ID NO: 1068968 - RNA, 22 nt, Human
aucaguuuggugcuuucaguga

SEQ ID NO: 1068969 - RNA, 22 nt, Human
ucaggaacccuggucuccugcu

SEQ ID NO: 1068970 - RNA, 22 nt, Human
cugaaaaacgggauuuggcugg

SEQ ID NO: 1068971 - RNA, 22 nt, Human
aggccugcuguguagccuguug

SEQ ID NO: 1068972 - RNA, 17 nt, Human
ucugggcuucagugguc

SEQ ID NO: 1068973 - RNA, 22 nt, Human
agguaccaaaagccuuuuucug

SEQ ID NO: 1068974 - RNA, 22 nt, Human
ggucucagcaguugcuuugacu

SEQ ID NO: 1068975 - RNA, 22 nt, Human
acacaucaugccaaguuucacc

SEQ ID NO: 1068976 - RNA, 22 nt, Human
agugcccuuuacaacuucuuga

SEQ ID NO: 1068977 - RNA, 22 nt, Human
uuuuaaaggcagauuauggcuu

SEQ ID NO: 1068978 - RNA, 22 nt, Human
gagcuggcagugguagacaugg

SEQ ID NO: 1068979 - RNA, 22 nt, Human
ugcugugauggagaauucugga

SEQ ID NO: 1068980 - RNA, 22 nt, Human
acacagugguguuuacaaaauu

SEQ ID NO: 1068981 - RNA, 22 nt, Human
cugcuuuaucugagacaaguca

SEQ ID NO: 1068982 - RNA, 22 nt, Human
cugggaguguucuaggucacau

SEQ ID NO: 1068983 - RNA, 22 nt, Human
guguguuuagcauuagcagggg

SEQ ID NO: 1068984 - RNA, 22 nt, Human
ggcagcacugcagcuuguuggg

SEQ ID NO: 1068985 - RNA, 22 nt, Human
aaacaucuuucuauugcaaguu

SEQ ID NO: 1068986 - RNA, 22 nt, Human
ucccacaggaaaguagacauug

SEQ ID NO: 1068987 - RNA, 22 nt, Human
ggcagcuuuuaucccugacaga

SEQ ID NO: 1068988 - RNA, 22 nt, Human
uggcagcagcaaauggcauauc

SEQ ID NO: 1068989 - RNA, 22 nt, Human
aguucucagcuuaguaugcugu

SEQ ID NO: 1068990 - RNA, 22 nt, Human
cuuagaaauuguuacucauuca

SEQ ID NO: 1068991 - RNA, 21 nt, Human
ugccagcauguaggcuaguug

SEQ ID NO: 1068992 - RNA, 22 nt, Human
ugagccccaggaaauugaggag

SEQ ID NO: 1068993 - RNA, 22 nt, Human
cuggccugaucucaugcugucc

SEQ ID NO: 1068994 - RNA, 22 nt, Human
cugggcaguuuauucaguucug

SEQ ID NO: 1068995 - RNA, 22 nt, Human
aguguccuccucugggagccag

SEQ ID NO: 1068996 - RNA, 22 nt, Human
ugguggcagcugagugucaggu

SEQ ID NO: 1068997 - RNA, 22 nt, Human
aaucaugugggauagucugcuc

SEQ ID NO: 1068998 - RNA, 22 nt, Human
ugcuggaaccaggaauuugaag

SEQ ID NO: 1068999 - RNA, 22 nt, Human
acagagcacauagauuggaguu

SEQ ID NO: 1069000 - RNA, 22 nt, Human
cucuucagguuucugcucugga

SEQ ID NO: 1069001 - RNA, 22 nt, Human
gcuucucucucagacugcaagc

SEQ ID NO: 1069002 - RNA, 22 nt, Human
cauauugcugucauugucccuc

SEQ ID NO: 1069003 - RNA, 23 nt, Human
uaugugcauauguguaagaauac

SEQ ID NO: 1069004 - RNA, 22 nt, Human
gucuaaaccucaaaucaguguc

SEQ ID NO: 1069005 - RNA, 22 nt, Human
aaaaggauguuuucaugaaaca

SEQ ID NO: 1069006 - RNA, 22 nt, Human
uucaaacauucaaauaaaccgg

SEQ ID NO: 1069007 - RNA, 22 nt, Human
ucuggcaggacaugcugaccau

SEQ ID NO: 1069008 - RNA, 23 nt, Human
auucuucauuaucuucuagaaaa

SEQ ID NO: 1069009 - RNA, 22 nt, Human
aggcacuugauuaaugugaauu

SEQ ID NO: 1069010 - RNA, 22 nt, Human
cucagaaaggugccauuuaugu

SEQ ID NO: 1069011 - RNA, 22 nt, Human
ucucucagucagaugcuaaaga

SEQ ID NO: 1069012 - RNA, 22 nt, Human
gcagcugcuguggcaucaagcu

SEQ ID NO: 1069013 - RNA, 19 nt, Human
cccuggcaggcaagccugg

SEQ ID NO: 1069014 - RNA, 22 nt, Human
acagugaugggggugcaggaag

SEQ ID NO: 1069015 - RNA, 22 nt, Human
uguuccaagcugcuggauaagc

SEQ ID NO: 1069016 - RNA, 22 nt, Human
aaaacugagguuuccugaagaa

SEQ ID NO: 1069017 - RNA, 20 nt, Human
agagacccuguagcuugcag

SEQ ID NO: 1069018 - RNA, 22 nt, Human
uaggcagauguuaacaggaaaa

SEQ ID NO: 1069019 - RNA, 22 nt, Human
gcugcuccgucugagcucuggu

SEQ ID NO: 1069020 - RNA, 22 nt, Human
ucuuuguuuguacuguuagaau

SEQ ID NO: 1069021 - RNA, 22 nt, Human
agcagcuuacauguggccuauc

SEQ ID NO: 1069022 - RNA, 22 nt, Human
ccugcagcuccggauuucuggg

SEQ ID NO: 1069023 - RNA, 22 nt, Human
ccugccugcaaaaugggacaag

SEQ ID NO: 1069024 - RNA, 22 nt, Human
ucacaaauauagugagaaccag

SEQ ID NO: 1069025 - RNA, 22 nt, Human
uguuuucuuccuaauugcucau

SEQ ID NO: 1069026 - RNA, 22 nt, Human
aagugaaacauguaucucuuua

SEQ ID NO: 1069027 - RNA, 22 nt, Human
aggucauugaaguuauuuucuu

SEQ ID NO: 1069028 - RNA, 19 nt, Human
agggucaggacaaggacuu

SEQ ID NO: 1069029 - RNA, 22 nt, Human
ugaugcugucaaggaggugaac

SEQ ID NO: 1069030 - RNA, 22 nt, Human
uuucagaaagcugaacauauga

SEQ ID NO: 1069031 - RNA, 22 nt, Human
acaggugaccugcucauaugaa

SEQ ID NO: 1069032 - RNA, 22 nt, Human
gccaguaagugguagagacuua

SEQ ID NO: 1069033 - RNA, 22 nt, Human
ugggccagcaauugcugcucag

SEQ ID NO: 1069034 - RNA, 22 nt, Human
ugcucuggggagcuccucugcg

SEQ ID NO: 1069035 - RNA, 22 nt, Human
ucuuugcuccacacucuagaga

SEQ ID NO: 1069036 - RNA, 22 nt, Human
gugucccaauguucaggacggc

SEQ ID NO: 1069037 - RNA, 22 nt, Human
gcaggaagcauagaagaaugcc

SEQ ID NO: 1069038 - RNA, 23 nt, Human
aggcaggcaguucagcuguuguu

SEQ ID NO: 1069039 - RNA, 22 nt, Human
ucugggcugcuaugaggcagag

SEQ ID NO: 1069040 - RNA, 22 nt, Human
gcagagucugggcuaccucuug

SEQ ID NO: 1069041 - RNA, 22 nt, Human
aggagaaggaggccccucacac

SEQ ID NO: 1069042 - RNA, 22 nt, Human
gccaggcuggccagcaccuucu

SEQ ID NO: 1069043 - RNA, 22 nt, Human
agcugggccugagcuggaagcu

SEQ ID NO: 1069044 - RNA, 22 nt, Human
uacauuaacuuacguccacaug

SEQ ID NO: 1069045 - RNA, 22 nt, Human
gucaggauuuacaaacuucagu

SEQ ID NO: 1069046 - RNA, 23 nt, Human
gccuggagaaaagcugcaguuca

SEQ ID NO: 1069047 - RNA, 22 nt, Human
aaguccagguccucauuccauc

SEQ ID NO: 1069048 - RNA, 23 nt, Human
ucacauaauccuucauccacagg

SEQ ID NO: 1069049 - RNA, 22 nt, Human
uagaaacagagcagguggccca

SEQ ID NO: 1069050 - RNA, 22 nt, Human
accucugccaagaugugcuccc

SEQ ID NO: 1069051 - RNA, 22 nt, Human
cucugaacucuugggcagcaug

SEQ ID NO: 1069052 - RNA, 22 nt, Human
cagcuacuccucccaugacuuc

SEQ ID NO: 1069053 - RNA, 22 nt, Human
cauuuccacuucugaaaacugg

SEQ ID NO: 1069054 - RNA, 22 nt, Human
aauuucagaacccaaauuagcg

SEQ ID NO: 1069055 - RNA, 23 nt, Human
ugccagaggcagucacaguggug

SEQ ID NO: 1069056 - RNA, 22 nt, Human
uguauuagguugaugcgaaagu

SEQ ID NO: 1069057 - RNA, 23 nt, Human
guuaauaaugaacacuuucuccc

SEQ ID NO: 1069058 - RNA, 22 nt, Human
uugugucugggggagugacauc

SEQ ID NO: 1069059 - RNA, 22 nt, Human
uuuagcagaucuauguauguga

SEQ ID NO: 1069060 - RNA, 22 nt, Human
ggguacaaagauuucauaagau

SEQ ID NO: 1069061 - RNA, 22 nt, Human
ggugggcaggucacucugccuc

SEQ ID NO: 1069062 - RNA, 22 nt, Human
aagugguguguuggaagaaauc

SEQ ID NO: 1069063 - RNA, 22 nt, Human
gcuggagcugaguucccugggc

SEQ ID NO: 1069064 - RNA, 22 nt, Human
aggcacugaauauccaguaaaa

SEQ ID NO: 1069065 - RNA, 22 nt, Human
gcagcuggugcaaaugucacuc

SEQ ID NO: 1069066 - RNA, 22 nt, Human
gccugucucuuggaacuuggua

SEQ ID NO: 1069067 - RNA, 22 nt, Human
aagaauuauugcaauacuagau

SEQ ID NO: 1069068 - RNA, 18 nt, Human
agcagcugucagaaugcc

SEQ ID NO: 1069069 - RNA, 22 nt, Human
uacuuucuuucccaagaggugg

SEQ ID NO: 1069070 - RNA, 22 nt, Human
guuugcauguauuaagucaaua

SEQ ID NO: 1069071 - RNA, 22 nt, Human
gauuucaagcccccagagauuc

SEQ ID NO: 1069072 - RNA, 22 nt, Human
ucagcucuguuuugaguggaac

SEQ ID NO: 1069073 - RNA, 23 nt, Human
gggagccauggguggucauggag

SEQ ID NO: 1069074 - RNA, 22 nt, Human
aacugggcccagucugaguugg

SEQ ID NO: 1069075 - RNA, 22 nt, Human
gagagugauucccucccauaga

SEQ ID NO: 1069076 - RNA, 22 nt, Human
ugugaagcuggauccuggagcu

SEQ ID NO: 1069077 - RNA, 22 nt, Human
cagaaacagagaaauauuggcu

SEQ ID NO: 1069078 - RNA, 22 nt, Human
ugaccaaagaguugcuuguauu

SEQ ID NO: 1069079 - RNA, 22 nt, Human
aaacacuguacaaucugcaggg

SEQ ID NO: 1069080 - RNA, 22 nt, Human
gaucauuugcaggaaacauuaa

SEQ ID NO: 1069081 - RNA, 22 nt, Human
uguggggugugguccaggcauc

SEQ ID NO: 1069082 - RNA, 22 nt, Human
agcagaggaggauuuaguuagg

SEQ ID NO: 1069083 - RNA, 22 nt, Human
cagucucucagcuuucagcugu

SEQ ID NO: 1069084 - RNA, 22 nt, Human
ugcuucucccaaccagggccug

SEQ ID NO: 1069085 - RNA, 22 nt, Human
gcuuuuaauuaguugcuuccau

SEQ ID NO: 1069086 - RNA, 22 nt, Human
cagcaauaagguaagcuucucc

SEQ ID NO: 1069087 - RNA, 22 nt, Human
aaggccugggaguacugggaca

SEQ ID NO: 1069088 - RNA, 22 nt, Human
uacacaaaggcacucuguuguu

SEQ ID NO: 1069089 - RNA, 18 nt, Human
ccugcagcccaggaggcc

SEQ ID NO: 1069090 - RNA, 22 nt, Human
caucagaagaaagacaaaugau

SEQ ID NO: 1069091 - RNA, 22 nt, Human
guuuuccugagcccagagaugc

SEQ ID NO: 1069092 - RNA, 22 nt, Human
aaaauucugucauuaaauugug

SEQ ID NO: 1069093 - RNA, 22 nt, Human
accuuuuuguucuguucucagc

SEQ ID NO: 1069094 - RNA, 18 nt, Human
gccugcaggcacgggggu

SEQ ID NO: 1069095 - RNA, 22 nt, Human
gauauauuuggaccagagcauu

SEQ ID NO: 1069096 - RNA, 22 nt, Human
uggcucaguaaucgagucuccu

SEQ ID NO: 1069097 - RNA, 22 nt, Human
aucaggauccaccuugagccug

SEQ ID NO: 1069098 - RNA, 22 nt, Human
aauuauacaauugucaaguucu

SEQ ID NO: 1069099 - RNA, 16 nt, Human
ucagggcagaauggca

SEQ ID NO: 1069100 - RNA, 22 nt, Human
cgcugccaggucaccaggggua

SEQ ID NO: 1069101 - RNA, 22 nt, Human
gggguugguuuaaaugcuugag

SEQ ID NO: 1069102 - RNA, 23 nt, Human
ggccuguguuuugucugaaguac

SEQ ID NO: 1069103 - RNA, 22 nt, Human
cacagggccacuuucccaguaa

SEQ ID NO: 1069104 - RNA, 22 nt, Human
ccacagcuucgcagucugcugc

SEQ ID NO: 1069105 - RNA, 22 nt, Human
ugaugggaggugcugcaggacc

SEQ ID NO: 1069106 - RNA, 22 nt, Human
cugccuuggaaaaugugguaau

SEQ ID NO: 1069107 - RNA, 22 nt, Human
gguuuuggaaguauaaagaugu

SEQ ID NO: 1069108 - RNA, 22 nt, Human
acauuguagacuuuucauaugu

SEQ ID NO: 1069109 - RNA, 22 nt, Human
ugcaagaggcaucuuuuaaaaa

SEQ ID NO: 1069110 - RNA, 22 nt, Human
gagugugcuuagagagcugcau

SEQ ID NO: 1069111 - RNA, 22 nt, Human
aacauuuauucuaauucuggga

SEQ ID NO: 1069112 - RNA, 21 nt, Human
ucuacauaucaauauguaauu

SEQ ID NO: 1069113 - RNA, 22 nt, Human
cugucuggugucccugucuaca

SEQ ID NO: 1069114 - RNA, 22 nt, Human
cagagcuggagcuugaauggag

SEQ ID NO: 1069115 - RNA, 21 nt, Human
uuucuuucuggcucucacagu

SEQ ID NO: 1069116 - RNA, 22 nt, Human
ccucccaccguaucucaguggc

SEQ ID NO: 1069117 - RNA, 22 nt, Human
agucucugcugguugugccuau

SEQ ID NO: 1069118 - RNA, 22 nt, Human
aaucaccaucucucuugucccc

SEQ ID NO: 1069119 - RNA, 22 nt, Human
uuugaacaagagcuucacauua

SEQ ID NO: 1069120 - RNA, 19 nt, Human
uuugaaaggauuguuauuu

SEQ ID NO: 1069121 - RNA, 22 nt, Human
uuauggcauauuccucauugua

SEQ ID NO: 1069122 - RNA, 22 nt, Human
auuagcugaccucuaaggagcc

SEQ ID NO: 1069123 - RNA, 21 nt, Human
ugcucugguguuuuauuuaac

SEQ ID NO: 1069124 - RNA, 22 nt, Human
aguaacaaagugggagaaugau

SEQ ID NO: 1069125 - RNA, 21 nt, Human
ucaggcaggcgcagagggaag

SEQ ID NO: 1069126 - RNA, 22 nt, Human
augggaggguggaaaggcucug

SEQ ID NO: 1069127 - RNA, 22 nt, Human
ccuuguccucugguuuccuguu

SEQ ID NO: 1069128 - RNA, 22 nt, Human
caacugggauaaagagcuaaag

SEQ ID NO: 1069129 - RNA, 22 nt, Human
guacaaggcauuuaucuguuca

SEQ ID NO: 1069130 - RNA, 22 nt, Human
ugucucagaauggcucauaaua

SEQ ID NO: 1069131 - RNA, 22 nt, Human
cugugagggucacagccaugcc

SEQ ID NO: 1069132 - RNA, 22 nt, Human
uuccugcaagaucuuuaaggag

SEQ ID NO: 1069133 - RNA, 22 nt, Human
augaaacugaaggacaaccaga

SEQ ID NO: 1069134 - RNA, 22 nt, Human
aauuucacuguggagcacauuu

SEQ ID NO: 1069135 - RNA, 22 nt, Human
agagugaagguugacacuucac

SEQ ID NO: 1069136 - RNA, 17 nt, Human
cuaaauacuugcguuuc

SEQ ID NO: 1069137 - RNA, 22 nt, Human
gaaagaggaaggagauguauua

SEQ ID NO: 1069138 - RNA, 22 nt, Human
cagcuggcccuuugguagccuu

SEQ ID NO: 1069139 - RNA, 22 nt, Human
aggagcugggcugcugcuggga

SEQ ID NO: 1069140 - RNA, 19 nt, Human
caugcugaccugcuguggu

SEQ ID NO: 1069141 - RNA, 22 nt, Human
gcuggcagaagagcugguucaa

SEQ ID NO: 1069142 - RNA, 22 nt, Human
uccucaggagagcuccuaugcc

SEQ ID NO: 1069143 - RNA, 22 nt, Human
agacagaauuugucagauaaau

SEQ ID NO: 1069144 - RNA, 22 nt, Human
ccaugggcacuggguggaggua

SEQ ID NO: 1069145 - RNA, 22 nt, Human
uccagugguaguaaagaggucu

SEQ ID NO: 1069146 - RNA, 21 nt, Human
auguuauucuguuccuccagc

SEQ ID NO: 1069147 - RNA, 22 nt, Human
ucaucuucuauuaauagggaga

SEQ ID NO: 1069148 - RNA, 22 nt, Human
auugaaaaauucacaauucugg

SEQ ID NO: 1069149 - RNA, 17 nt, Human
cucagagcaggacagaa

SEQ ID NO: 1069150 - RNA, 22 nt, Human
uugcugaaguuaaugcuugcaa

SEQ ID NO: 1069151 - RNA, 22 nt, Human
cuuguacaggaauccaugguau

SEQ ID NO: 1069152 - RNA, 22 nt, Human
uaaauagggaauagaagaggaa

SEQ ID NO: 1069153 - RNA, 22 nt, Human
aguaugaauacagauuuucucu

SEQ ID NO: 1069154 - RNA, 23 nt, Human
uccugcugaaagcuccagcuggc

SEQ ID NO: 1069155 - RNA, 22 nt, Human
gaaauuuauuaucuacaucauu

SEQ ID NO: 1069156 - RNA, 22 nt, Human
cccuggcucuucaccaccugcc

SEQ ID NO: 1069157 - RNA, 22 nt, Human
gaaggagcuaaagggagcccug

SEQ ID NO: 1069158 - RNA, 22 nt, Human
agcagcugccacuggaauagga

SEQ ID NO: 1069159 - RNA, 22 nt, Human
aaucuacauagagaucaaauga

SEQ ID NO: 1069160 - RNA, 22 nt, Human
gaacacaagcguaugucuuugu

SEQ ID NO: 1069161 - RNA, 22 nt, Human
ggucagggggaucugugaggua

SEQ ID NO: 1069162 - RNA, 22 nt, Human
agggcagugggaaagccugcuc

SEQ ID NO: 1069163 - RNA, 22 nt, Human
cacugguguauuagagcuagaa

SEQ ID NO: 1069164 - RNA, 22 nt, Human
caguccagagcccaccagagga

SEQ ID NO: 1069165 - RNA, 22 nt, Human
agcuggcucagccggguggucu

SEQ ID NO: 1069166 - RNA, 19 nt, Human
ccugugugggguagagauc

SEQ ID NO: 1069167 - RNA, 22 nt, Human
gucacaaauccccucagcaacu

SEQ ID NO: 1069168 - RNA, 22 nt, Human
ugccucugugugcaggugagca

SEQ ID NO: 1069169 - RNA, 22 nt, Human
uuuaaucaggcaaagcauaaua

SEQ ID NO: 1069170 - RNA, 22 nt, Human
ugcugcuccugccuggcuccca

SEQ ID NO: 1069171 - RNA, 22 nt, Human
gagagcuguguucauucuacca

SEQ ID NO: 1069172 - RNA, 22 nt, Human
cccaggaaagagacugcugggu

SEQ ID NO: 1069173 - RNA, 22 nt, Human
acagaguuaauggauaggcagg

SEQ ID NO: 1069174 - RNA, 22 nt, Human
aaggcaggaugggaaaagauuu

SEQ ID NO: 1069175 - RNA, 22 nt, Human
aaggggucaagcggcagcuaca

SEQ ID NO: 1069176 - RNA, 22 nt, Human
cuggggugugcucagagcaggg

SEQ ID NO: 1069177 - RNA, 22 nt, Human
cuggugcaggaaggagcuggca

SEQ ID NO: 1069178 - RNA, 22 nt, Human
aguggggccggugaggccgagg

SEQ ID NO: 1069179 - RNA, 22 nt, Human
uaucaaggcauggaaaaugcua

SEQ ID NO: 1069180 - RNA, 22 nt, Human
guaacagaaagucaugcucauu

SEQ ID NO: 1069181 - RNA, 19 nt, Human
gagugauggaucuccuugc

SEQ ID NO: 1069182 - RNA, 22 nt, Human
gaaggccaguuuugagauaggu

SEQ ID NO: 1069183 - RNA, 22 nt, Human
ucauucuccucuggaaaaggca

SEQ ID NO: 1069184 - RNA, 22 nt, Human
aagucagaauaauguuucuuuu

SEQ ID NO: 1069185 - RNA, 23 nt, Human
cugaggccugcugcguucagguu

SEQ ID NO: 1069186 - RNA, 22 nt, Human
uggggacaggagacuuacagcu

SEQ ID NO: 1069187 - RNA, 22 nt, Human
ugcagggcuuccucuuggaguu

SEQ ID NO: 1069188 - RNA, 22 nt, Human
cagcuauggugacaaggucagg

SEQ ID NO: 1069189 - RNA, 22 nt, Human
aaguuuuugguagagaaaagua

SEQ ID NO: 1069190 - RNA, 22 nt, Human
uagcacaucuggcgcuuauagg

SEQ ID NO: 1069191 - RNA, 22 nt, Human
acguuuucagccuuaauguaga

SEQ ID NO: 1069192 - RNA, 22 nt, Human
auguucugccuccauuuugagu

SEQ ID NO: 1069193 - RNA, 22 nt, Human
ccaggcuggauuuugcaguuca

SEQ ID NO: 1069194 - RNA, 22 nt, Human
accaggaagugugggccaacgu

SEQ ID NO: 1069195 - RNA, 22 nt, Human
acagagucgccuuguagcuggc

SEQ ID NO: 1069196 - RNA, 22 nt, Human
uucuggaguauuccuggcaccu

SEQ ID NO: 1069197 - RNA, 22 nt, Human
ucuuuguuauugcuuuaucuau

SEQ ID NO: 1069198 - RNA, 22 nt, Human
uugucuuaaauggauggacaau

SEQ ID NO: 1069199 - RNA, 22 nt, Human
uuucuuaugagcaagacucuau

SEQ ID NO: 1069200 - RNA, 22 nt, Human
uuccauaaucaccuuauucuuu

SEQ ID NO: 1069201 - RNA, 22 nt, Human
gcagguggcagaggugggaucu

SEQ ID NO: 1069202 - RNA, 22 nt, Human
uuuccuaagguagugauaauuu

SEQ ID NO: 1069203 - RNA, 22 nt, Human
uugaacauuaacuucagucuau

SEQ ID NO: 1069204 - RNA, 22 nt, Human
aaaucagacuugaauuuucauc

SEQ ID NO: 1069205 - RNA, 22 nt, Human
cagaggcuguguaggcagacug

SEQ ID NO: 1069206 - RNA, 22 nt, Human
aggucauuaaaguuaaaugagg

SEQ ID NO: 1069207 - RNA, 22 nt, Human
caggauagaaaggccauggagu

SEQ ID NO: 1069208 - RNA, 20 nt, Human
uaugaagauaugugaacagc

SEQ ID NO: 1069209 - RNA, 22 nt, Human
uauuuccaggccccacucuaga

SEQ ID NO: 1069210 - RNA, 22 nt, Human
acuugaaagaaguuuccuuaaa

SEQ ID NO: 1069211 - RNA, 22 nt, Human
uuucacauuuuauacuuaagcc

SEQ ID NO: 1069212 - RNA, 22 nt, Human
augaggcagaaaaaagucggag

SEQ ID NO: 1069213 - RNA, 22 nt, Human
acucaguacaucuggaguuggc

SEQ ID NO: 1069214 - RNA, 22 nt, Human
uuucacaaugcaauccuacuuc

SEQ ID NO: 1069215 - RNA, 22 nt, Human
gcacagggcccugugcguaggu

SEQ ID NO: 1069216 - RNA, 23 nt, Human
aaagacugcugagaauuuuagga

SEQ ID NO: 1069217 - RNA, 17 nt, Human
aggcauggucuggggug

SEQ ID NO: 1069218 - RNA, 22 nt, Human
aggcccugcuuuccagagcuca

SEQ ID NO: 1069219 - RNA, 22 nt, Human
cacagcagcaucauuuaucugg

SEQ ID NO: 1069220 - RNA, 22 nt, Human
ugaggcagguggauuacaaggu

SEQ ID NO: 1069221 - RNA, 21 nt, Human
gaaaagcaagggaguagaaca

SEQ ID NO: 1069222 - RNA, 22 nt, Human
agagccaggugcugcuguuuga

SEQ ID NO: 1069223 - RNA, 22 nt, Human
acaguggagaagcaaaugcagu

SEQ ID NO: 1069224 - RNA, 22 nt, Human
uccccauggguggggacacaua

SEQ ID NO: 1069225 - RNA, 20 nt, Human
ccucucugaagaggucaucu

SEQ ID NO: 1069226 - RNA, 22 nt, Human
uguguacaaauuuagccagcag

SEQ ID NO: 1069227 - RNA, 22 nt, Human
uacaaagccugguagauaucug

SEQ ID NO: 1069228 - RNA, 22 nt, Human
ucucaacaccacuugcugaaga

SEQ ID NO: 1069229 - RNA, 22 nt, Human
uggggccuggucagagcugcac

SEQ ID NO: 1069230 - RNA, 22 nt, Human
gagccaggaggcagagacugca

SEQ ID NO: 1069231 - RNA, 22 nt, Human
cuguccugcccacccugcaggg

SEQ ID NO: 1069232 - RNA, 22 nt, Human
uaagucauggagcugggauuga

SEQ ID NO: 1069233 - RNA, 22 nt, Human
uaagcuauuccugaagaagguu

SEQ ID NO: 1069234 - RNA, 22 nt, Human
guggagcaggacuagcugagaa

SEQ ID NO: 1069235 - RNA, 22 nt, Human
ugugaggaacaggacuagagca

SEQ ID NO: 1069236 - RNA, 22 nt, Human
uuguugguggaauugaugcuag

SEQ ID NO: 1069237 - RNA, 22 nt, Human
caguuacacaccauugugaaca

SEQ ID NO: 1069238 - RNA, 22 nt, Human
aggcacugugcagucccaagca

SEQ ID NO: 1069239 - RNA, 22 nt, Human
ccaggacccugcaaacccuguu

SEQ ID NO: 1069240 - RNA, 20 nt, Human
aaaaucucccagaaacuuau

SEQ ID NO: 1069241 - RNA, 22 nt, Human
auucuacaaaagaacuggaucu

SEQ ID NO: 1069242 - RNA, 22 nt, Human
gagagaaaggauaacagcucaa

SEQ ID NO: 1069243 - RNA, 19 nt, Human
ccuccugcuagauaugcaa

SEQ ID NO: 1069244 - RNA, 22 nt, Human
accugugcacagucagcccugg

SEQ ID NO: 1069245 - RNA, 22 nt, Human
uguaaagaaagacgcagaguua

SEQ ID NO: 1069246 - RNA, 19 nt, Human
caggucuucuuggaggacu

SEQ ID NO: 1069247 - RNA, 22 nt, Human
gcagaagcuguucgaaggccgc

SEQ ID NO: 1069248 - RNA, 22 nt, Human
uuguauuucuccacuuucuguu

SEQ ID NO: 1069249 - RNA, 22 nt, Human
cuuucugaaguuuaaguucuaa

SEQ ID NO: 1069250 - RNA, 22 nt, Human
ccucgaccuccccaggcucagg

SEQ ID NO: 1069251 - RNA, 22 nt, Human
acaggcucucuauugagugcag

SEQ ID NO: 1069252 - RNA, 18 nt, Human
gccauguucuaugcuuac

SEQ ID NO: 1069253 - RNA, 22 nt, Human
cugcagcugucucuacugggca

SEQ ID NO: 1069254 - RNA, 22 nt, Human
agcugccaucugaagaacugca

SEQ ID NO: 1069255 - RNA, 22 nt, Human
uauuaauucuugccaauucucc

SEQ ID NO: 1069256 - RNA, 22 nt, Human
uccagucauuuccauuguuccc

SEQ ID NO: 1069257 - RNA, 22 nt, Human
cugcagugaaaucaggaagcaa

SEQ ID NO: 1069258 - RNA, 22 nt, Human
ccuggugcuuaccagagcuuuu

SEQ ID NO: 1069259 - RNA, 22 nt, Human
uauuucuuguucccuccaaguu

SEQ ID NO: 1069260 - RNA, 22 nt, Human
uccagccaugacucggacagug

SEQ ID NO: 1069261 - RNA, 22 nt, Human
uauaguaaaauuuucauuuaug

SEQ ID NO: 1069262 - RNA, 22 nt, Human
aaagucacauagcaucacuucu

SEQ ID NO: 1069263 - RNA, 23 nt, Human
aggcugagcucucccagcuucag

SEQ ID NO: 1069264 - RNA, 22 nt, Human
ccugagagugagggccuccuua

SEQ ID NO: 1069265 - RNA, 20 nt, Human
ggggcccaagcccucuugcc

SEQ ID NO: 1069266 - RNA, 22 nt, Human
cuucuggguauuccagauaccu

SEQ ID NO: 1069267 - RNA, 22 nt, Human
gugcagaaguaacaauuaaaga

SEQ ID NO: 1069268 - RNA, 22 nt, Human
uagguuccauuuaaacaaagaa

SEQ ID NO: 1069269 - RNA, 22 nt, Human
ugaaaacacuuuaguuuagguc

SEQ ID NO: 1069270 - RNA, 22 nt, Human
gcugccugcucacccggccugg

SEQ ID NO: 1069271 - RNA, 22 nt, Human
ucuucuuugaaucauagugacc

SEQ ID NO: 1069272 - RNA, 16 nt, Human
cuuuuucuccccucuu

SEQ ID NO: 1069273 - RNA, 18 nt, Human
ucagcuggggcugcagcc

SEQ ID NO: 1069274 - RNA, 22 nt, Human
ggugugccuggggcuuagcugc

SEQ ID NO: 1069275 - RNA, 22 nt, Human
cuuaaaaguugcuucccuaacu

SEQ ID NO: 1069276 - RNA, 22 nt, Human
ucaaaaauaagauauucuggac

SEQ ID NO: 1069277 - RNA, 22 nt, Human
caaaagcagcaaguuuauaugu

SEQ ID NO: 1069278 - RNA, 22 nt, Human
uuaauuaaauucaugagcauug

SEQ ID NO: 1069279 - RNA, 22 nt, Human
gcuggcagcuggaaguugggcu

SEQ ID NO: 1069280 - RNA, 22 nt, Human
ugggaaggugauuuuccaaaag

SEQ ID NO: 1069281 - RNA, 21 nt, Human
acaggcucuggggaugcuggg

SEQ ID NO: 1069282 - RNA, 22 nt, Human
acugccugcucauaacauugcu

SEQ ID NO: 1069283 - RNA, 22 nt, Human
uggaggaaucagggcuuaggcu

SEQ ID NO: 1069284 - RNA, 22 nt, Human
acacugugacaaaggcuguucu

SEQ ID NO: 1069285 - RNA, 22 nt, Human
auucuccacacauccagaccuu

SEQ ID NO: 1069286 - RNA, 22 nt, Human
cagaggaagagauacaagcccu

SEQ ID NO: 1069287 - RNA, 22 nt, Human
agaaucugaaggcaccucuggu

SEQ ID NO: 1069288 - RNA, 22 nt, Human
gcaggaacccggccgcccuggc

SEQ ID NO: 1069289 - RNA, 20 nt, Human
acagccagaggaggcagaca

SEQ ID NO: 1069290 - RNA, 22 nt, Human
gcccagcuggcuuccagcacau

SEQ ID NO: 1069291 - RNA, 22 nt, Human
uccucugcuccaucuuuacugu

SEQ ID NO: 1069292 - RNA, 22 nt, Human
agccaccaccacugaaagguua

SEQ ID NO: 1069293 - RNA, 22 nt, Human
ugaacacagcauauuuuguuac

SEQ ID NO: 1069294 - RNA, 18 nt, Human
aagccagagaccacugcc

SEQ ID NO: 1069295 - RNA, 22 nt, Human
gagcaccucaauuugcuauuug

SEQ ID NO: 1069296 - RNA, 22 nt, Human
acugugauguucucuaucuugg

SEQ ID NO: 1069297 - RNA, 22 nt, Human
cuucacuguuugguucacagca

SEQ ID NO: 1069298 - RNA, 22 nt, Human
cauuacaaaguuauaaacaguu

SEQ ID NO: 1069299 - RNA, 21 nt, Human
aauuucagacccauuuugccu

SEQ ID NO: 1069300 - RNA, 19 nt, Human
ggcucucuuaaagcuguuu

SEQ ID NO: 1069301 - RNA, 22 nt, Human
uucagcuaaaaaugcccacuug

SEQ ID NO: 1069302 - RNA, 22 nt, Human
cacagggcagguacucucagag

SEQ ID NO: 1069303 - RNA, 22 nt, Human
cauaugaaguucaacagagaug

SEQ ID NO: 1069304 - RNA, 22 nt, Human
gggauggggggaagcguccaug

SEQ ID NO: 1069305 - RNA, 22 nt, Human
gcaggcugaugacuggaguugg

SEQ ID NO: 1069306 - RNA, 22 nt, Human
gagcagcuugcgcugucuucac

SEQ ID NO: 1069307 - RNA, 17 nt, Human
uccagcccugcccgacg

SEQ ID NO: 1069308 - RNA, 22 nt, Human
ucagagugcagcgggaggcugg

SEQ ID NO: 1069309 - RNA, 22 nt, Human
agagcccucucauuggcuuauu

SEQ ID NO: 1069310 - RNA, 22 nt, Human
caagagcuggagaggcagucua

SEQ ID NO: 1069311 - RNA, 22 nt, Human
ucagaagaagagacuccacagc

SEQ ID NO: 1069312 - RNA, 22 nt, Human
ugggcugcugagaaugagagag

SEQ ID NO: 1069313 - RNA, 20 nt, Human
ccugggcuccaggagccccg

SEQ ID NO: 1069314 - RNA, 22 nt, Human
cagcagaaacccagcaaagcca

SEQ ID NO: 1069315 - RNA, 22 nt, Human
uagaacagaguuccagugauca

SEQ ID NO: 1069316 - RNA, 22 nt, Human
uggcuggcaguaggcuaguggc

SEQ ID NO: 1069317 - RNA, 22 nt, Human
acacacagaguuuauacaggca

SEQ ID NO: 1069318 - RNA, 22 nt, Human
cacaagucuguggucuccaaca

SEQ ID NO: 1069319 - RNA, 22 nt, Human
cugggacagcugagacaggaga

SEQ ID NO: 1069320 - RNA, 22 nt, Human
aguggggucuccuccagccccc

SEQ ID NO: 1069321 - RNA, 22 nt, Human
ccaccagcuuugccacccugcu

SEQ ID NO: 1069322 - RNA, 22 nt, Human
ggcaggagcucuccaguuugcc

SEQ ID NO: 1069323 - RNA, 22 nt, Human
uggaagcagugauucuugucug

SEQ ID NO: 1069324 - RNA, 22 nt, Human
cuuccugaacaaugccaucaau

SEQ ID NO: 1069325 - RNA, 22 nt, Human
aggagagagaacacuugggucc

SEQ ID NO: 1069326 - RNA, 22 nt, Human
ccaggaagguaugggaagaaaa

SEQ ID NO: 1069327 - RNA, 22 nt, Human
aacaguaaagacagaauuuauc

SEQ ID NO: 1069328 - RNA, 22 nt, Human
cugggaggauacacaagaucag

SEQ ID NO: 1069329 - RNA, 22 nt, Human
cugagaggaugcugcaguggag

SEQ ID NO: 1069330 - RNA, 22 nt, Human
ugagcucauagcucuuauuaug

SEQ ID NO: 1069331 - RNA, 22 nt, Human
agcaaacagugugcuaagaaau

SEQ ID NO: 1069332 - RNA, 22 nt, Human
agaccaugggcucugaagagca

SEQ ID NO: 1069333 - RNA, 22 nt, Human
auccccagaaaauaggugccua

SEQ ID NO: 1069334 - RNA, 22 nt, Human
gcaggaagaggcucgaagcccc

SEQ ID NO: 1069335 - RNA, 22 nt, Human
acugccuugucucuugccuguu

SEQ ID NO: 1069336 - RNA, 21 nt, Human
uuggaccauacaaguuaugca

SEQ ID NO: 1069337 - RNA, 17 nt, Human
gcaucacagauaacacg

SEQ ID NO: 1069338 - RNA, 22 nt, Human
agaaacuaaccugguaggguuc

SEQ ID NO: 1069339 - RNA, 22 nt, Human
gcuccuggagagauugagaaag

SEQ ID NO: 1069340 - RNA, 22 nt, Human
aauguacaucucaguguaguac

SEQ ID NO: 1069341 - RNA, 22 nt, Human
aauuucagaccauuugcaauua

SEQ ID NO: 1069342 - RNA, 22 nt, Human
uuucaacuugaagaauugauac

SEQ ID NO: 1069343 - RNA, 22 nt, Human
aaguguuuaacggugauugagc

SEQ ID NO: 1069344 - RNA, 22 nt, Human
gcuggcagguaaagccccgggg

SEQ ID NO: 1069345 - RNA, 22 nt, Human
gaggccugcagcguggucccug

SEQ ID NO: 1069346 - RNA, 22 nt, Human
aacaaaugaccugauuucuucc

SEQ ID NO: 1069347 - RNA, 22 nt, Human
ccaggcagcucugauuuauguc

SEQ ID NO: 1069348 - RNA, 22 nt, Human
acagauaaggcaguuaagaguu

SEQ ID NO: 1069349 - RNA, 22 nt, Human
uggcugagccuuuggggcuuuc

SEQ ID NO: 1069350 - RNA, 22 nt, Human
gcugccucuguagcuuuggacc

SEQ ID NO: 1069351 - RNA, 22 nt, Human
uucaggaucacuaaacccucca

SEQ ID NO: 1069352 - RNA, 22 nt, Human
ugcaguggaaagacucagacuu

SEQ ID NO: 1069353 - RNA, 22 nt, Human
agggcugccugacuccagagcc

SEQ ID NO: 1069354 - RNA, 22 nt, Human
ucacugcucuccaauguggagu

SEQ ID NO: 1069355 - RNA, 22 nt, Human
cugucagcacucuacuacagau

SEQ ID NO: 1069356 - RNA, 22 nt, Human
aaaggucauugaaaaggaggaa

SEQ ID NO: 1069357 - RNA, 22 nt, Human
gccaagcucuuuaaaggccaaa

SEQ ID NO: 1069358 - RNA, 22 nt, Human
ccuggcagaauauuaaagugca

SEQ ID NO: 1069359 - RNA, 22 nt, Human
acagguggaggcuuuaggaggu

SEQ ID NO: 1069360 - RNA, 22 nt, Human
uguaugugcuugagaagguggg

SEQ ID NO: 1069361 - RNA, 19 nt, Human
agugaacacaaagagaagg

SEQ ID NO: 1069362 - RNA, 22 nt, Human
ucugaggcuucagacuguacug

SEQ ID NO: 1069363 - RNA, 22 nt, Human
ggcuucagaagacuggacaggu

SEQ ID NO: 1069364 - RNA, 22 nt, Human
aggcacugaaggaagcuugcgc

SEQ ID NO: 1069365 - RNA, 22 nt, Human
ucaagaaacugugcuacagagu

SEQ ID NO: 1069366 - RNA, 22 nt, Human
uggcucaguuaggucagaaaca

SEQ ID NO: 1069367 - RNA, 22 nt, Human
ugcaggugguacuucuuuuucu

SEQ ID NO: 1069368 - RNA, 22 nt, Human
uuccagggcuaauuccugugga

SEQ ID NO: 1069369 - RNA, 22 nt, Human
uuagccauggacugaauugacu

SEQ ID NO: 1069370 - RNA, 22 nt, Human
aaugauggauuuagacaagcug

SEQ ID NO: 1069371 - RNA, 22 nt, Human
caugggcuacagaagcaugcug

SEQ ID NO: 1069372 - RNA, 22 nt, Human
ggcgggaaguucuugcccacuu

SEQ ID NO: 1069373 - RNA, 22 nt, Human
uaaguuagagguuaggcacuua

SEQ ID NO: 1069374 - RNA, 22 nt, Human
ugggcugaggggccuugaugac

SEQ ID NO: 1069375 - RNA, 20 nt, Human
caggcaguuugugguuaggg

SEQ ID NO: 1069376 - RNA, 22 nt, Human
ugaacagaucaauagaacugac

SEQ ID NO: 1069377 - RNA, 22 nt, Human
ucuccccaaaggacucacucuc

SEQ ID NO: 1069378 - RNA, 22 nt, Human
aauaugcagcaugaugaaguaa

SEQ ID NO: 1069379 - RNA, 21 nt, Human
aagagcugucaggaaggcugc

SEQ ID NO: 1069380 - RNA, 22 nt, Human
ucagggcaaugucccucagaag

SEQ ID NO: 1069381 - RNA, 22 nt, Human
uuucauuauucaugcuaguuau

SEQ ID NO: 1069382 - RNA, 22 nt, Human
uagugcaacagggaaagagugu

SEQ ID NO: 1069383 - RNA, 22 nt, Human
cugccuggucucaggcaugggg

SEQ ID NO: 1069384 - RNA, 22 nt, Human
agaaaugggccuugggacacaa

SEQ ID NO: 1069385 - RNA, 22 nt, Human
uagcuuaucccacagugcccag

SEQ ID NO: 1069386 - RNA, 22 nt, Human
uggaacacauuaaccacaggga

SEQ ID NO: 1069387 - RNA, 22 nt, Human
cagagcucuauguucauggagg

SEQ ID NO: 1069388 - RNA, 21 nt, Human
auccuugaucagaagagugcu

SEQ ID NO: 1069389 - RNA, 22 nt, Human
aaucaagaauaaguuguaaagc

SEQ ID NO: 1069390 - RNA, 22 nt, Human
auauuugugguaaagguaagaa

SEQ ID NO: 1069391 - RNA, 22 nt, Human
cuagggaaugagagacuggauc

SEQ ID NO: 1069392 - RNA, 22 nt, Human
aagagcuggcucuugcagcagc

SEQ ID NO: 1069393 - RNA, 22 nt, Human
auuuucaucauggguuuaacau

SEQ ID NO: 1069394 - RNA, 22 nt, Human
ugccaggcaacugcccagccau

SEQ ID NO: 1069395 - RNA, 22 nt, Human
uucaggaucauuuguuuuaucu

SEQ ID NO: 1069396 - RNA, 22 nt, Human
uagccgcuuaauuauuugguga

SEQ ID NO: 1069397 - RNA, 22 nt, Human
gggcugcaaugcuucaguuguu

SEQ ID NO: 1069398 - RNA, 22 nt, Human
agcuggugaaccugaggcacag

SEQ ID NO: 1069399 - RNA, 22 nt, Human
gcaaagaaaguuuuaaugaggu

SEQ ID NO: 1069400 - RNA, 22 nt, Human
gggccagugaacaaugagggaa

SEQ ID NO: 1069401 - RNA, 22 nt, Human
gaauuuaucuacguuaaguaug

SEQ ID NO: 1069402 - RNA, 18 nt, Human
gggaucaggcugccuagg

SEQ ID NO: 1069403 - RNA, 22 nt, Human
ucuucaugaaugaaucuuugac

SEQ ID NO: 1069404 - RNA, 21 nt, Human
cgcagagcgaacuugcggcgc

SEQ ID NO: 1069405 - RNA, 22 nt, Human
uauuuuguuaauaauccagucc

SEQ ID NO: 1069406 - RNA, 22 nt, Human
gaggcaguggucugaugcaagg

SEQ ID NO: 1069407 - RNA, 22 nt, Human
aacuauacauauuuacauagac

SEQ ID NO: 1069408 - RNA, 22 nt, Human
uucacagagaguaugcagagaa

SEQ ID NO: 1069409 - RNA, 22 nt, Human
ggccucacccaucggugccuuu

SEQ ID NO: 1069410 - RNA, 22 nt, Human
agugggcuuuuuuccguuccau

SEQ ID NO: 1069411 - RNA, 22 nt, Human
uguucuaaguguuuuguucaug

SEQ ID NO: 1069412 - RNA, 22 nt, Human
uugccaggagcucaucugaggg

SEQ ID NO: 1069413 - RNA, 18 nt, Human
uaaauauauuucccccuu

SEQ ID NO: 1069414 - RNA, 22 nt, Human
gaaucucaguggaagcaggaag

SEQ ID NO: 1069415 - RNA, 22 nt, Human
gcuccagguauuugcccuuuua

SEQ ID NO: 1069416 - RNA, 22 nt, Human
uaauuucagugggcucugggcu

SEQ ID NO: 1069417 - RNA, 22 nt, Human
acccugcccucuccagcucagg

SEQ ID NO: 1069418 - RNA, 22 nt, Human
cuucaagagaaugcagggaugu

SEQ ID NO: 1069419 - RNA, 21 nt, Human
ggagucagggucuggcugggg

SEQ ID NO: 1069420 - RNA, 22 nt, Human
ucaaauacauggucaaucaacu

SEQ ID NO: 1069421 - RNA, 22 nt, Human
gcccaggaguugaaugcagcag

SEQ ID NO: 1069422 - RNA, 17 nt, Human
gagauggcauuggcagc

SEQ ID NO: 1069423 - RNA, 22 nt, Human
aauauuguuucaagaucacaga

SEQ ID NO: 1069424 - RNA, 22 nt, Human
aagcaaacaggagaagagcugu

SEQ ID NO: 1069425 - RNA, 22 nt, Human
aagcugccugccacgcuagaua

SEQ ID NO: 1069426 - RNA, 22 nt, Human
ucucacugggucacagcagagg

SEQ ID NO: 1069427 - RNA, 22 nt, Human
uccucagaugcucuuggacgcc

SEQ ID NO: 1069428 - RNA, 22 nt, Human
uuuuuccuagcgauuugucagc

SEQ ID NO: 1069429 - RNA, 22 nt, Human
aauuauauugaaguugaauguc

SEQ ID NO: 1069430 - RNA, 22 nt, Human
ucagggaaugggcccagucccu

SEQ ID NO: 1069431 - RNA, 22 nt, Human
aaguccagcagugcuuguugau

SEQ ID NO: 1069432 - RNA, 22 nt, Human
ucuggcucauaggaaggccauu

SEQ ID NO: 1069433 - RNA, 22 nt, Human
gaggcacaccagggagucuugu

SEQ ID NO: 1069434 - RNA, 20 nt, Human
agaagcugauacugauggaa

SEQ ID NO: 1069435 - RNA, 22 nt, Human
agcagcauagaagcugggagga

SEQ ID NO: 1069436 - RNA, 22 nt, Human
ucagaaagcuuagugucuugca

SEQ ID NO: 1069437 - RNA, 22 nt, Human
aggcugugagcaagaacaccua

SEQ ID NO: 1069438 - RNA, 22 nt, Human
ucaaaggcuugugguucuggga

SEQ ID NO: 1069439 - RNA, 23 nt, Human
uccuuugucuuugcauagauggu

SEQ ID NO: 1069440 - RNA, 22 nt, Human
gcuggcuguguuccuucugcca

SEQ ID NO: 1069441 - RNA, 22 nt, Human
uucaggauaugugauaucugaa

SEQ ID NO: 1069442 - RNA, 22 nt, Human
gguggggagucaggcauucuug

SEQ ID NO: 1069443 - RNA, 22 nt, Human
gccuccccugcaauuguccuug

SEQ ID NO: 1069444 - RNA, 22 nt, Human
cagaaauggaauuuuccaucac

SEQ ID NO: 1069445 - RNA, 23 nt, Human
cagcucagcacauaggagguacu

SEQ ID NO: 1069446 - RNA, 22 nt, Human
cagcacugcuucgcagccaggg

SEQ ID NO: 1069447 - RNA, 22 nt, Human
aggggagaggugagcaacuucu

SEQ ID NO: 1069448 - RNA, 22 nt, Human
cuggaaguauaggggagaugau

SEQ ID NO: 1069449 - RNA, 21 nt, Human
agaaaaguagaguuuucagag

SEQ ID NO: 1069450 - RNA, 22 nt, Human
gcaaacaaggacauacauccug

SEQ ID NO: 1069451 - RNA, 22 nt, Human
cucugagaagaguucaaguaaa

SEQ ID NO: 1069452 - RNA, 22 nt, Human
uacuuugaccaccaucugauua

SEQ ID NO: 1069453 - RNA, 22 nt, Human
ucagaacagaagcuggcuauaa

SEQ ID NO: 1069454 - RNA, 22 nt, Human
ccagggacuuugcauuguuuau

SEQ ID NO: 1069455 - RNA, 22 nt, Human
cuuguaauuauaauguacuguu

SEQ ID NO: 1069456 - RNA, 22 nt, Human
agaaggccuaacuugggggcaa

SEQ ID NO: 1069457 - RNA, 22 nt, Human
gggcagcagccacucauuuagc

SEQ ID NO: 1069458 - RNA, 22 nt, Human
gacagccaucagcacacgcugc

SEQ ID NO: 1069459 - RNA, 22 nt, Human
ggccugggcccacugucaagag

SEQ ID NO: 1069460 - RNA, 20 nt, Human
ggagcuggcauccagccucu

SEQ ID NO: 1069461 - RNA, 22 nt, Human
ccccuuccacagugcuuccuaa

SEQ ID NO: 1069462 - RNA, 22 nt, Human
ucauggcacuuagcacaguccu

SEQ ID NO: 1069463 - RNA, 22 nt, Human
uuucacauuagauaugucauuu

SEQ ID NO: 1069464 - RNA, 22 nt, Human
ucugccugagggagcugaggaa

SEQ ID NO: 1069465 - RNA, 22 nt, Human
aucaggauguuuggcugucaua

SEQ ID NO: 1069466 - RNA, 22 nt, Human
uuaagucacuuaucuaaagaca

SEQ ID NO: 1069467 - RNA, 22 nt, Human
caggcagaaggaaguaccaggc

SEQ ID NO: 1069468 - RNA, 22 nt, Human
gcucaagggaugggagugggug

SEQ ID NO: 1069469 - RNA, 22 nt, Human
uaaauaaguucuucauuguuug

SEQ ID NO: 1069470 - RNA, 22 nt, Human
aagccagauagaagaacucauu

SEQ ID NO: 1069471 - RNA, 22 nt, Human
agccaucauuucugucacuggc

SEQ ID NO: 1069472 - RNA, 23 nt, Human
ugcaggggaggcuuaaagcaggu

SEQ ID NO: 1069473 - RNA, 22 nt, Human
aacaguuuaugagauaugcuau

SEQ ID NO: 1069474 - RNA, 22 nt, Human
ccuuucaaaacagaacacuagc

SEQ ID NO: 1069475 - RNA, 22 nt, Human
uacuauuuggaauuuuaaauug

SEQ ID NO: 1069476 - RNA, 20 nt, Human
uuauuuguuuacuuuggucc

SEQ ID NO: 1069477 - RNA, 22 nt, Human
uuuucaagagaguguucuaugu

SEQ ID NO: 1069478 - RNA, 22 nt, Human
ucccuguggaagacugccagag

SEQ ID NO: 1069479 - RNA, 22 nt, Human
gggagccacaguuuauagugau

SEQ ID NO: 1069480 - RNA, 22 nt, Human
ucaggaagugccuaggcuggcc

SEQ ID NO: 1069481 - RNA, 22 nt, Human
cugagcccuccugcuugcugag

SEQ ID NO: 1069482 - RNA, 22 nt, Human
ugcagggaccccgaggcucucu

SEQ ID NO: 1069483 - RNA, 22 nt, Human
cuugaaagcacuccuuugacug

SEQ ID NO: 1069484 - RNA, 22 nt, Human
uucauuuucuuucacgcugcug

SEQ ID NO: 1069485 - RNA, 22 nt, Human
uucaccuugaauaugucuuaaa

SEQ ID NO: 1069486 - RNA, 22 nt, Human
gcagaggcucuuuaaugcuuag

SEQ ID NO: 1069487 - RNA, 22 nt, Human
agccaaggacacggagccuccu

SEQ ID NO: 1069488 - RNA, 17 nt, Human
uggacccuugggccucc

SEQ ID NO: 1069489 - RNA, 22 nt, Human
aaggcacugagccagccgucuc

SEQ ID NO: 1069490 - RNA, 22 nt, Human
cagggcugugcccaucuucccc

SEQ ID NO: 1069491 - RNA, 22 nt, Human
gucauuuugcugcauauuuaga

SEQ ID NO: 1069492 - RNA, 22 nt, Human
agggcagcagcuccuccuagcu

SEQ ID NO: 1069493 - RNA, 22 nt, Human
aucaugcuuggauuauguuugg

SEQ ID NO: 1069494 - RNA, 22 nt, Human
aggaaggggagaaguuaaagcu

SEQ ID NO: 1069495 - RNA, 22 nt, Human
gcagaaguuaaucgaaggccau

SEQ ID NO: 1069496 - RNA, 22 nt, Human
gaagccaacauuccaaguagaa

SEQ ID NO: 1069497 - RNA, 22 nt, Human
uggguagaggaauugggcuacc

SEQ ID NO: 1069498 - RNA, 22 nt, Human
gggguagggugauugugaagua

SEQ ID NO: 1069499 - RNA, 22 nt, Human
gcugcccucccagggcaagcuu

SEQ ID NO: 1069500 - RNA, 22 nt, Human
agaaaugacacacaugagacau

SEQ ID NO: 1069501 - RNA, 22 nt, Human
ccacagaaucgcuaguggagca

SEQ ID NO: 1069502 - RNA, 22 nt, Human
aaccagcugagaaugcuucugc

SEQ ID NO: 1069503 - RNA, 22 nt, Human
agcagacaccaggaguaaagaa

SEQ ID NO: 1069504 - RNA, 22 nt, Human
uguugacucaacacugugggca

SEQ ID NO: 1069505 - RNA, 22 nt, Human
cagguugggcugcgaggaggag

SEQ ID NO: 1069506 - RNA, 22 nt, Human
uaccuguggcuuguuggaugga

SEQ ID NO: 1069507 - RNA, 22 nt, Human
cagcaggguagguuguaucagu

SEQ ID NO: 1069508 - RNA, 22 nt, Human
cccugcagaccaaugccauaga

SEQ ID NO: 1069509 - RNA, 22 nt, Human
uucacaaagcugguuccuucug

SEQ ID NO: 1069510 - RNA, 22 nt, Human
ggaaaucaugggagaguuggaa

SEQ ID NO: 1069511 - RNA, 17 nt, Human
ucuguccagggagugug

SEQ ID NO: 1069512 - RNA, 22 nt, Human
ggccacugaccuacaucugggg

SEQ ID NO: 1069513 - RNA, 22 nt, Human
acagguggggcacuuggagccu

SEQ ID NO: 1069514 - RNA, 22 nt, Human
uugggggaagaggauagacagu

SEQ ID NO: 1069515 - RNA, 22 nt, Human
aaacaccagucccaguauacac

SEQ ID NO: 1069516 - RNA, 22 nt, Human
auauaucaugaguaaaacuuga

SEQ ID NO: 1069517 - RNA, 22 nt, Human
uauuuaaaaagaggccagcugg

SEQ ID NO: 1069518 - RNA, 22 nt, Human
guguaaggugaaaucaacaaau

SEQ ID NO: 1069519 - RNA, 22 nt, Human
aucaaaguccaucagaagguag

SEQ ID NO: 1069520 - RNA, 22 nt, Human
guauccuuugcggaaauuucua

SEQ ID NO: 1069521 - RNA, 22 nt, Human
auaucuuucaaagccaaaagua

SEQ ID NO: 1069522 - RNA, 22 nt, Human
auacacauguguaugugcaugc

SEQ ID NO: 1069523 - RNA, 22 nt, Human
cagaaggcuggcagauugagau

SEQ ID NO: 1069524 - RNA, 22 nt, Human
cacaggcuugucagcaugaggc

SEQ ID NO: 1069525 - RNA, 22 nt, Human
gugucccaggagaggagacaau

SEQ ID NO: 1069526 - RNA, 22 nt, Human
agcuguggcagcacuuuggagu

SEQ ID NO: 1069527 - RNA, 17 nt, Human
ugagaaguaggcaucau

SEQ ID NO: 1069528 - RNA, 22 nt, Human
gccagagugccaucagugccau

SEQ ID NO: 1069529 - RNA, 22 nt, Human
uaacacauauuugcaguaagca

SEQ ID NO: 1069530 - RNA, 22 nt, Human
auauuuugaaguuaauaaugug

SEQ ID NO: 1069531 - RNA, 22 nt, Human
ccuggggauucugacacggagu

SEQ ID NO: 1069532 - RNA, 22 nt, Human
agacaaauaacuuuuuaugucc

SEQ ID NO: 1069533 - RNA, 22 nt, Human
ugggugcaugugagcacgugca

SEQ ID NO: 1069534 - RNA, 22 nt, Human
agccucugauggcucccaagga

SEQ ID NO: 1069535 - RNA, 22 nt, Human
gaggcugcuuugaugacaggag

SEQ ID NO: 1069536 - RNA, 21 nt, Human
gcaggguccuuuccauuccua

SEQ ID NO: 1069537 - RNA, 22 nt, Human
gugggcuuuugacagugccugg

SEQ ID NO: 1069538 - RNA, 22 nt, Human
aguuacauaaucugugaauuuu

SEQ ID NO: 1069539 - RNA, 22 nt, Human
agaaauaugcugauuagaugaa

SEQ ID NO: 1069540 - RNA, 22 nt, Human
caccagcagaagacugagggug

SEQ ID NO: 1069541 - RNA, 22 nt, Human
gaggcagcaugguaccuuggag

SEQ ID NO: 1069542 - RNA, 22 nt, Human
aagugacaccucuucccuuucc

SEQ ID NO: 1069543 - RNA, 22 nt, Human
agucccagaucuacaggaggga

SEQ ID NO: 1069544 - RNA, 22 nt, Human
auucacauuuuauuucacugga

SEQ ID NO: 1069545 - RNA, 22 nt, Human
aacaguaauuugcgguuuuugc

SEQ ID NO: 1069546 - RNA, 22 nt, Human
uuaacuauuauuagcaucuuug

SEQ ID NO: 1069547 - RNA, 22 nt, Human
agcugaauguucucagaccaga

SEQ ID NO: 1069548 - RNA, 22 nt, Human
uagcagcagugguguauuuaga

SEQ ID NO: 1069549 - RNA, 22 nt, Human
ucugucauguuuccauuacaug

SEQ ID NO: 1069550 - RNA, 22 nt, Human
gcagcuuuuuggaugucaguua

SEQ ID NO: 1069551 - RNA, 22 nt, Human
aggaagcccuugucauuucugu

SEQ ID NO: 1069552 - RNA, 22 nt, Human
gccuggguccacugaucaugcu

SEQ ID NO: 1069553 - RNA, 22 nt, Human
uccaggaaaucagaagugguaa

SEQ ID NO: 1069554 - RNA, 22 nt, Human
ucugccugcuucuucauagucu

SEQ ID NO: 1069555 - RNA, 22 nt, Human
acaguuaagcaguaugaucaca

SEQ ID NO: 1069556 - RNA, 20 nt, Human
uuccacaucuuugcacaugc

SEQ ID NO: 1069557 - RNA, 23 nt, Human
ucagcugcuuccuccugccugcc

SEQ ID NO: 1069558 - RNA, 22 nt, Human
ucuuuuguugccuacuuauuaa

SEQ ID NO: 1069559 - RNA, 22 nt, Human
cugguguuguccgggugagagu

SEQ ID NO: 1069560 - RNA, 22 nt, Human
ccugacucuggccaggccagcu

SEQ ID NO: 1069561 - RNA, 22 nt, Human
ccugcccuagagaugacacaau

SEQ ID NO: 1069562 - RNA, 22 nt, Human
aaggccagcuuguagggcuggu

SEQ ID NO: 1069563 - RNA, 22 nt, Human
auauuuuccgaacuugagguag

SEQ ID NO: 1069564 - RNA, 23 nt, Human
uccucaguauauaaaggcagaug

SEQ ID NO: 1069565 - RNA, 22 nt, Human
aaacauuagacaccauaugcuc

SEQ ID NO: 1069566 - RNA, 22 nt, Human
cucagcccagcccaggaccagg

SEQ ID NO: 1069567 - RNA, 22 nt, Human
aagagaaggugaggaagccggu

SEQ ID NO: 1069568 - RNA, 22 nt, Human
ggcuuaaaguuuucuagaauaa

SEQ ID NO: 1069569 - RNA, 22 nt, Human
uuucaaacuuuacucuugaauc

SEQ ID NO: 1069570 - RNA, 22 nt, Human
uggacagcgaaagugccuggga

SEQ ID NO: 1069571 - RNA, 22 nt, Human
cccucccagaugggcuugaggu

SEQ ID NO: 1069572 - RNA, 22 nt, Human
acaguggagaaggcaugaggcu

SEQ ID NO: 1069573 - RNA, 22 nt, Human
augauacaagcaaaacuaauca

SEQ ID NO: 1069574 - RNA, 22 nt, Human
gccaggcuggugcaaggauauu

SEQ ID NO: 1069575 - RNA, 22 nt, Human
gccuguuggguaacagaguuca

SEQ ID NO: 1069576 - RNA, 23 nt, Human
ucccucaggccuuaucuccaucu

SEQ ID NO: 1069577 - RNA, 20 nt, Human
aacacagauaccaaagguug

SEQ ID NO: 1069578 - RNA, 22 nt, Human
cuucuucauguauugauagucu

SEQ ID NO: 1069579 - RNA, 22 nt, Human
cuguggcucaaaaucccaugau

SEQ ID NO: 1069580 - RNA, 22 nt, Human
caggaggcccggccacagccca

SEQ ID NO: 1069581 - RNA, 18 nt, Human
ggcugagguugacuagaa

SEQ ID NO: 1069582 - RNA, 22 nt, Human
ucuggggaugagguccagugau

SEQ ID NO: 1069583 - RNA, 22 nt, Human
uguacagagguguacauaugau

SEQ ID NO: 1069584 - RNA, 22 nt, Human
ugagcccuggcucuuucacuua

SEQ ID NO: 1069585 - RNA, 23 nt, Human
uuacaugugugcacacauucugg

SEQ ID NO: 1069586 - RNA, 22 nt, Human
gaaggcuggcuuucugagagca

SEQ ID NO: 1069587 - RNA, 22 nt, Human
uugaaacuuuucuuggagaaac

SEQ ID NO: 1069588 - RNA, 22 nt, Human
ugcaggcaggggaugagcagcc

SEQ ID NO: 1069589 - RNA, 21 nt, Human
ucaaagcacauauuugcacau

SEQ ID NO: 1069590 - RNA, 17 nt, Human
agcagggagucaaggga

SEQ ID NO: 1069591 - RNA, 22 nt, Human
acacaguauuacaauaggugcu

SEQ ID NO: 1069592 - RNA, 22 nt, Human
cuggagcccaggccuggugucu

SEQ ID NO: 1069593 - RNA, 22 nt, Human
gugcugugugauccaugcuggc

SEQ ID NO: 1069594 - RNA, 22 nt, Human
gucuccugagacugcagucacc

SEQ ID NO: 1069595 - RNA, 22 nt, Human
ucagcugcucuguugagcugaa

SEQ ID NO: 1069596 - RNA, 22 nt, Human
cagcagguccugggcguggccu

SEQ ID NO: 1069597 - RNA, 22 nt, Human
gugguuuugccauuacaaguaa

SEQ ID NO: 1069598 - RNA, 22 nt, Human
cacagcuaauggaaguggaauc

SEQ ID NO: 1069599 - RNA, 22 nt, Human
ucagagugaccuuacauggucu

SEQ ID NO: 1069600 - RNA, 22 nt, Human
gcugcuggaacaaaucacccca

SEQ ID NO: 1069601 - RNA, 20 nt, Human
uggagcuccagcguccaugu

SEQ ID NO: 1069602 - RNA, 22 nt, Human
uuuaccaguguuaaacaccagc

SEQ ID NO: 1069603 - RNA, 22 nt, Human
aaagccaguuucuggaaguacc

SEQ ID NO: 1069604 - RNA, 22 nt, Human
uguuuucaugguuaugugucua

SEQ ID NO: 1069605 - RNA, 22 nt, Human
ugacaauacagagagagcaaaa

SEQ ID NO: 1069606 - RNA, 22 nt, Human
aguuggugggugugagcuggac

SEQ ID NO: 1069607 - RNA, 23 nt, Human
ucaauuaucaauggaaagaaguu

SEQ ID NO: 1069608 - RNA, 22 nt, Human
aaggaaagacauauaaaugacu

SEQ ID NO: 1069609 - RNA, 22 nt, Human
acacaucucaggggacacucuc

SEQ ID NO: 1069610 - RNA, 19 nt, Human
ggagacucagcccaugccu

SEQ ID NO: 1069611 - RNA, 22 nt, Human
cauuuguuaauuacuauuaucu

SEQ ID NO: 1069612 - RNA, 22 nt, Human
uuccugugugcucucauuuagu

SEQ ID NO: 1069613 - RNA, 22 nt, Human
ucaggcucccugcugggcucug

SEQ ID NO: 1069614 - RNA, 22 nt, Human
ucccagccauuccuuuaggugu

SEQ ID NO: 1069615 - RNA, 22 nt, Human
gaagagcuuaguuguccuagaa

SEQ ID NO: 1069616 - RNA, 22 nt, Human
cccuccccagggucauauugaa

SEQ ID NO: 1069617 - RNA, 22 nt, Human
aacuagucagugauucucagaa

SEQ ID NO: 1069618 - RNA, 22 nt, Human
aucuucuggucaaauuuuugca

SEQ ID NO: 1069619 - RNA, 22 nt, Human
agaagagaaauagugccacugu

SEQ ID NO: 1069620 - RNA, 22 nt, Human
agaaauuaggaaaguaacacuu

SEQ ID NO: 1069621 - RNA, 21 nt, Human
caguguggugaccagggucuc

SEQ ID NO: 1069622 - RNA, 22 nt, Human
acaguguuccuuuguugugacu

SEQ ID NO: 1069623 - RNA, 22 nt, Human
uuuuccuauaugcaaagaaugc

SEQ ID NO: 1069624 - RNA, 19 nt, Human
agacagcucuauuauuuug

SEQ ID NO: 1069625 - RNA, 22 nt, Human
acaggggaauuuacugucauua

SEQ ID NO: 1069626 - RNA, 22 nt, Human
acacaucagccucagcuuuggg

SEQ ID NO: 1069627 - RNA, 22 nt, Human
acaagaauuuacauguagugga

SEQ ID NO: 1069628 - RNA, 22 nt, Human
ugggcugcuucuauuggugguc

SEQ ID NO: 1069629 - RNA, 22 nt, Human
uaagaauaccucucagcucuuu

SEQ ID NO: 1069630 - RNA, 22 nt, Human
ggcacugacugugcagcgcacc

SEQ ID NO: 1069631 - RNA, 22 nt, Human
ugggcuuccuggagccugugcu

SEQ ID NO: 1069632 - RNA, 22 nt, Human
augaaacaugagaaauggagag

SEQ ID NO: 1069633 - RNA, 22 nt, Human
gucaggaugcuauuguuauuaa

SEQ ID NO: 1069634 - RNA, 22 nt, Human
gggcacugcuuugcucugucac

SEQ ID NO: 1069635 - RNA, 22 nt, Human
uuucacauaucaacucuauccu

SEQ ID NO: 1069636 - RNA, 22 nt, Human
gaggcaguuugccaugccagga

SEQ ID NO: 1069637 - RNA, 22 nt, Human
guggccuuuaucuuagguaucc

SEQ ID NO: 1069638 - RNA, 20 nt, Human
aacaaacuacaaaauuaugu

SEQ ID NO: 1069639 - RNA, 22 nt, Human
acaguucaagucuuagacaaca

SEQ ID NO: 1069640 - RNA, 22 nt, Human
cuguaugauauccaaauugaua

SEQ ID NO: 1069641 - RNA, 22 nt, Human
ucaaagauugaaacuaaggaga

SEQ ID NO: 1069642 - RNA, 22 nt, Human
aaauuuaagaagugugugcgug

SEQ ID NO: 1069643 - RNA, 22 nt, Human
cccugucuguaccgugaugagc

SEQ ID NO: 1069644 - RNA, 22 nt, Human
aacugcauucagaaagcucacu

SEQ ID NO: 1069645 - RNA, 22 nt, Human
gucucagaccacccucuuuggc

SEQ ID NO: 1069646 - RNA, 22 nt, Human
guggcugcagcccagcggcacg

SEQ ID NO: 1069647 - RNA, 22 nt, Human
gggaugcaguauguauauuuuc

SEQ ID NO: 1069648 - RNA, 22 nt, Human
ccuccugggccuugcucuguga

SEQ ID NO: 1069649 - RNA, 22 nt, Human
gcuguucccauguggggcucag

SEQ ID NO: 1069650 - RNA, 22 nt, Human
cuaugaccccagcaugaauaag

SEQ ID NO: 1069651 - RNA, 22 nt, Human
agggcccuuacgcaggcccuuc

SEQ ID NO: 1069652 - RNA, 22 nt, Human
gagcccuccauggagccaggca

SEQ ID NO: 1069653 - RNA, 22 nt, Human
uaaguagacuguugaacuuggu

SEQ ID NO: 1069654 - RNA, 22 nt, Human
ugcuggcccaguauggacugca

SEQ ID NO: 1069655 - RNA, 22 nt, Human
cagagcuguugcggggcuuggc

SEQ ID NO: 1069656 - RNA, 22 nt, Human
ugauuuuacuuagcaugauguu

SEQ ID NO: 1069657 - RNA, 20 nt, Human
ucccaagggcugagaggauc

SEQ ID NO: 1069658 - RNA, 22 nt, Human
ggagaggcuuggcccagccugg

SEQ ID NO: 1069659 - RNA, 17 nt, Human
gguggccugcaguggcu

SEQ ID NO: 1069660 - RNA, 22 nt, Human
aagcugcccuguguuagaguuc

SEQ ID NO: 1069661 - RNA, 19 nt, Human
gcugugugaccuugggcaa

SEQ ID NO: 1069662 - RNA, 22 nt, Human
agaaggccuagaguaagacauu

SEQ ID NO: 1069663 - RNA, 19 nt, Human
ccugcagggaugagagguu

SEQ ID NO: 1069664 - RNA, 22 nt, Human
cugggccuagcaacagaggagu

SEQ ID NO: 1069665 - RNA, 22 nt, Human
ucucucagaggaagaggcagug

SEQ ID NO: 1069666 - RNA, 22 nt, Human
gagcagggagacaacucuggug

SEQ ID NO: 1069667 - RNA, 19 nt, Human
gccaggccuggaccugcag

SEQ ID NO: 1069668 - RNA, 22 nt, Human
ucccacacuugaaacaaggcug

SEQ ID NO: 1069669 - RNA, 20 nt, Human
cucaggauacugcaaaguug

SEQ ID NO: 1069670 - RNA, 22 nt, Human
ucaaaguagccggauggaauuu

SEQ ID NO: 1069671 - RNA, 22 nt, Human
cuggccaggcuugggacagaca

SEQ ID NO: 1069672 - RNA, 21 nt, Human
ggauggauagggaagagauuu

SEQ ID NO: 1069673 - RNA, 22 nt, Human
ccucuccaguuuuaacgugacc

SEQ ID NO: 1069674 - RNA, 20 nt, Human
cuucuucauuaacccuacug

SEQ ID NO: 1069675 - RNA, 22 nt, Human
ugucccagaucacaggagggga

SEQ ID NO: 1069676 - RNA, 22 nt, Human
aucaaaguucguaacugauaac

SEQ ID NO: 1069677 - RNA, 22 nt, Human
cagacagcugcuuucuugcugu

SEQ ID NO: 1069678 - RNA, 22 nt, Human
acccucccauuuccauguagca

SEQ ID NO: 1069679 - RNA, 22 nt, Human
uggaagaauagaagaugguuga

SEQ ID NO: 1069680 - RNA, 22 nt, Human
cacaggaagaucucccagaggu

SEQ ID NO: 1069681 - RNA, 22 nt, Human
aacacaaucuuccaguuugcug

SEQ ID NO: 1069682 - RNA, 22 nt, Human
gcagaagcugggcagcgaggug

SEQ ID NO: 1069683 - RNA, 22 nt, Human
gggcccuggacguggcggcaga

SEQ ID NO: 1069684 - RNA, 17 nt, Human
gauuuccugaaguucuu

SEQ ID NO: 1069685 - RNA, 22 nt, Human
cagcuggcuccaccucugggcu

SEQ ID NO: 1069686 - RNA, 22 nt, Human
gcacagcaugaagagaggaagc

SEQ ID NO: 1069687 - RNA, 22 nt, Human
ggagaugcuauguaguuugguu

SEQ ID NO: 1069688 - RNA, 22 nt, Human
auuucagcccaguaugagcccc

SEQ ID NO: 1069689 - RNA, 22 nt, Human
agcaggaguuugaugcuuuuau

SEQ ID NO: 1069690 - RNA, 22 nt, Human
aaagucacaguuuaggggauau

SEQ ID NO: 1069691 - RNA, 22 nt, Human
agaugauggccauguccucucc

SEQ ID NO: 1069692 - RNA, 22 nt, Human
aggggcucaguuacuuuggcag

SEQ ID NO: 1069693 - RNA, 22 nt, Human
uucagauguggcuuugucaggc

SEQ ID NO: 1069694 - RNA, 22 nt, Human
aaauccaguuugucauuuccca

SEQ ID NO: 1069695 - RNA, 22 nt, Human
cugcugagaugccaggagcucu

SEQ ID NO: 1069696 - RNA, 22 nt, Human
ucuccaggaagcccucccugac

SEQ ID NO: 1069697 - RNA, 22 nt, Human
uggcucagcgguggcagcagac

SEQ ID NO: 1069698 - RNA, 23 nt, Human
uggaccugaaccagugccucugu

SEQ ID NO: 1069699 - RNA, 22 nt, Human
aguucaggcauaaggcaugaac

SEQ ID NO: 1069700 - RNA, 21 nt, Human
uccaagcucaacucccuuccu

SEQ ID NO: 1069701 - RNA, 22 nt, Human
aauauuuuaggcuuuccaggcu

SEQ ID NO: 1069702 - RNA, 22 nt, Human
auuuguaaagugcuuaaaagua

SEQ ID NO: 1069703 - RNA, 20 nt, Human
aagcacauuucuacaauaau

SEQ ID NO: 1069704 - RNA, 22 nt, Human
aaugaagcaagcugcuguguuu

SEQ ID NO: 1069705 - RNA, 23 nt, Human
cauggaaaacugaaagcugaccu

SEQ ID NO: 1069706 - RNA, 22 nt, Human
agcucugguuuagaaggggaaa

SEQ ID NO: 1069707 - RNA, 21 nt, Human
agaauuaaauuggauuugugu

SEQ ID NO: 1069708 - RNA, 22 nt, Human
ugucuguuauugguguauaaga

SEQ ID NO: 1069709 - RNA, 22 nt, Human
ugggcagaaggaagagccaccu

SEQ ID NO: 1069710 - RNA, 22 nt, Human
gaggggcuggcacgauggcugc

SEQ ID NO: 1069711 - RNA, 22 nt, Human
uaccuuuugcuuauuaugacac

SEQ ID NO: 1069712 - RNA, 22 nt, Human
ggaaagaaucaagugauccugu

SEQ ID NO: 1069713 - RNA, 22 nt, Human
aucaagcuggcauauguaguuc

SEQ ID NO: 1069714 - RNA, 22 nt, Human
aggcacugcuucuaaguaggaa

SEQ ID NO: 1069715 - RNA, 22 nt, Human
aagcuccccgaaacccaccucu

SEQ ID NO: 1069716 - RNA, 22 nt, Human
cuucaguggucauuugugauaa

SEQ ID NO: 1069717 - RNA, 22 nt, Human
acauuuaaauaccuauguuucu

SEQ ID NO: 1069718 - RNA, 22 nt, Human
cugggccaggaccaggguugaa

SEQ ID NO: 1069719 - RNA, 22 nt, Human
ugucucuggcccaugagcagag

SEQ ID NO: 1069720 - RNA, 22 nt, Human
agcaccaagccuagagugaugu

SEQ ID NO: 1069721 - RNA, 22 nt, Human
ugcagggccgcuggaggucaug

SEQ ID NO: 1069722 - RNA, 22 nt, Human
accugagagcuauaagguuuua

SEQ ID NO: 1069723 - RNA, 22 nt, Human
ggcacugggagaggugagacgg

SEQ ID NO: 1069724 - RNA, 22 nt, Human
ugcauuugucuugucucaugaa

SEQ ID NO: 1069725 - RNA, 22 nt, Human
acagccuguuugaucuggugcu

SEQ ID NO: 1069726 - RNA, 22 nt, Human
acaaaugaaccugaaaucucag

SEQ ID NO: 1069727 - RNA, 22 nt, Human
ugacagaaagaauaugucaauc

SEQ ID NO: 1069728 - RNA, 19 nt, Human
cucucacucgccacauccu

SEQ ID NO: 1069729 - RNA, 22 nt, Human
ccaagaugaucuuuacaguguu

SEQ ID NO: 1069730 - RNA, 22 nt, Human
augcuuaacucuguacauaguu

SEQ ID NO: 1069731 - RNA, 18 nt, Human
gacaaaugcaauuuaaag

SEQ ID NO: 1069732 - RNA, 22 nt, Human
ucuccucuauuucuguauguau

SEQ ID NO: 1069733 - RNA, 22 nt, Human
uagguggugugcgaagagcgug

SEQ ID NO: 1069734 - RNA, 22 nt, Human
acuugaaaggaagcucuaaaac

SEQ ID NO: 1069735 - RNA, 22 nt, Human
gcucagggccauggaccagcag

SEQ ID NO: 1069736 - RNA, 22 nt, Human
ugaaaucauguaguuauugcaa

SEQ ID NO: 1069737 - RNA, 22 nt, Human
ugaacacagggaauggggguuu

SEQ ID NO: 1069738 - RNA, 22 nt, Human
gugggcuuuggccucuuucucc

SEQ ID NO: 1069739 - RNA, 22 nt, Human
uuauuauagauuaugcaagauu

SEQ ID NO: 1069740 - RNA, 22 nt, Human
ccagcuugaagaugugcugguu

SEQ ID NO: 1069741 - RNA, 22 nt, Human
ugcuucugacugggucaguuga

SEQ ID NO: 1069742 - RNA, 22 nt, Human
gaguagguugucagacuccaaa

SEQ ID NO: 1069743 - RNA, 22 nt, Human
ggcaaaaaccgcaauaacuucu

SEQ ID NO: 1069744 - RNA, 22 nt, Human
uuauaggcuuaguucugugugu

SEQ ID NO: 1069745 - RNA, 22 nt, Human
uaucuaagagagucaauauuua

SEQ ID NO: 1069746 - RNA, 22 nt, Human
agggccagcacuccuggcagga

SEQ ID NO: 1069747 - RNA, 22 nt, Human
ucugucaccgagggcauccaaa

SEQ ID NO: 1069748 - RNA, 22 nt, Human
gcagaagggaauaaggagcuuu

SEQ ID NO: 1069749 - RNA, 22 nt, Human
agcucugggccaggaacccuaa

SEQ ID NO: 1069750 - RNA, 21 nt, Human
auaucuucuucaaaccacuca

SEQ ID NO: 1069751 - RNA, 22 nt, Human
auauuuacugcuguggugaagg

SEQ ID NO: 1069752 - RNA, 22 nt, Human
cuaaauacuagccuucagauuu

SEQ ID NO: 1069753 - RNA, 22 nt, Human
gugcccugagcuuaugcauucu

SEQ ID NO: 1069754 - RNA, 22 nt, Human
uuuccuuucugguuuggucaua

SEQ ID NO: 1069755 - RNA, 22 nt, Human
acacauuuucaacacugucaag

SEQ ID NO: 1069756 - RNA, 22 nt, Human
uaauuuaugaugcaaagaaaag

SEQ ID NO: 1069757 - RNA, 22 nt, Human
agcugcagugaacuguuuuguc

SEQ ID NO: 1069758 - RNA, 17 nt, Human
uucagaagcauuuuggc

SEQ ID NO: 1069759 - RNA, 22 nt, Human
guauuacauuuaguaauuaggc

SEQ ID NO: 1069760 - RNA, 22 nt, Human
agcuggcauacuuugcuaggaa

SEQ ID NO: 1069761 - RNA, 22 nt, Human
gccuggagggauagaaugcaag

SEQ ID NO: 1069762 - RNA, 22 nt, Human
caaaguccauaguuuacaauag

SEQ ID NO: 1069763 - RNA, 22 nt, Human
gugccaggcccagggagcgggg

SEQ ID NO: 1069764 - RNA, 22 nt, Human
gcagccacucucauuccacgug

SEQ ID NO: 1069765 - RNA, 22 nt, Human
aaaguuuguugcuuacaaagaa

SEQ ID NO: 1069766 - RNA, 22 nt, Human
agaaacucuaggucaauugagg

SEQ ID NO: 1069767 - RNA, 22 nt, Human
acuggggagagucaugccagca

SEQ ID NO: 1069768 - RNA, 22 nt, Human
auuacaauaauacaugcucauu

SEQ ID NO: 1069769 - RNA, 22 nt, Human
ggcuucugccacgagagggaag

SEQ ID NO: 1069770 - RNA, 22 nt, Human
gcugaggaaaggcuggaaggga

SEQ ID NO: 1069771 - RNA, 22 nt, Human
aggagcucugggcagggccucc

SEQ ID NO: 1069772 - RNA, 22 nt, Human
uuucacauggacuuuuuguucu

SEQ ID NO: 1069773 - RNA, 19 nt, Human
ucgagucaagacacuaggc

SEQ ID NO: 1069774 - RNA, 22 nt, Human
agacaauauguauauuaagaau

SEQ ID NO: 1069775 - RNA, 16 nt, Human
agcagggcgggaagga

SEQ ID NO: 1069776 - RNA, 22 nt, Human
cuucagcugacgucaaaacacc

SEQ ID NO: 1069777 - RNA, 22 nt, Human
cugcaggggccucgagcacagg

SEQ ID NO: 1069778 - RNA, 22 nt, Human
ccaguguuauuuuagaguguga

SEQ ID NO: 1069779 - RNA, 22 nt, Human
ugggaagggucaacagcuggaa

SEQ ID NO: 1069780 - RNA, 22 nt, Human
gcaggagccacuucagggaugc

SEQ ID NO: 1069781 - RNA, 22 nt, Human
caggugucaaaauacuaagugg

SEQ ID NO: 1069782 - RNA, 22 nt, Human
ucuuugcaggccaaauuguuaa

SEQ ID NO: 1069783 - RNA, 22 nt, Human
cuggaggcugaguugggucucc

SEQ ID NO: 1069784 - RNA, 22 nt, Human
uagauacaggcucucugagccu

SEQ ID NO: 1069785 - RNA, 22 nt, Human
accucccagcucugagcuuggg

SEQ ID NO: 1069786 - RNA, 22 nt, Human
caggagccccaggcugacaaua

SEQ ID NO: 1069787 - RNA, 22 nt, Human
gagucccaugaugauagccaca

SEQ ID NO: 1069788 - RNA, 23 nt, Human
ggacacauuuauuucagaauuca

SEQ ID NO: 1069789 - RNA, 22 nt, Human
auagaaaacagauguccuuaaa

SEQ ID NO: 1069790 - RNA, 22 nt, Human
gcagugauuggaucagagaugg

SEQ ID NO: 1069791 - RNA, 22 nt, Human
uggagcccagacacuggcauug

SEQ ID NO: 1069792 - RNA, 22 nt, Human
cugaggucuagacaccccaggg

SEQ ID NO: 1069793 - RNA, 22 nt, Human
ggccacugcugcucugguggag

SEQ ID NO: 1069794 - RNA, 22 nt, Human
ucaggauaaaauguaauggcaa

SEQ ID NO: 1069795 - RNA, 20 nt, Human
uuggcucaugcaacaccuac

SEQ ID NO: 1069796 - RNA, 22 nt, Human
guggcuucuggcugggccucag

SEQ ID NO: 1069797 - RNA, 22 nt, Human
ucagagccccuccgcuguccca

SEQ ID NO: 1069798 - RNA, 22 nt, Human
agucucugcaugaugcagcaca

SEQ ID NO: 1069799 - RNA, 22 nt, Human
ggguccuggaaucugcauuuua

SEQ ID NO: 1069800 - RNA, 22 nt, Human
uaacagcacuggcaggcacugu

SEQ ID NO: 1069801 - RNA, 22 nt, Human
cacacugucagguaaauaacac

SEQ ID NO: 1069802 - RNA, 22 nt, Human
ccucuggcaacuucacagccca

SEQ ID NO: 1069803 - RNA, 22 nt, Human
ugccuggaugugcuggccucac

SEQ ID NO: 1069804 - RNA, 22 nt, Human
uagagaaauaagcuuugccuug

SEQ ID NO: 1069805 - RNA, 22 nt, Human
auauucaagugaggauggcuaa

SEQ ID NO: 1069806 - RNA, 22 nt, Human
aauguacaaaccuucuuuguag

SEQ ID NO: 1069807 - RNA, 22 nt, Human
uagauuucaggcuggcuugcgg

SEQ ID NO: 1069808 - RNA, 15 nt, Human
uggcagcuuguuaag

SEQ ID NO: 1069809 - RNA, 22 nt, Human
cagcucuuugaguauuccauuu

SEQ ID NO: 1069810 - RNA, 22 nt, Human
uggaggcaucagagugcuuggc

SEQ ID NO: 1069811 - RNA, 22 nt, Human
gccucugcaggugcgguuaucc

SEQ ID NO: 1069812 - RNA, 22 nt, Human
acaaugaacgcuuuuuaacugu

SEQ ID NO: 1069813 - RNA, 22 nt, Human
ugcaaaugaguugcagaucagg

SEQ ID NO: 1069814 - RNA, 23 nt, Human
guguguggaaagugcaugggccu

SEQ ID NO: 1069815 - RNA, 22 nt, Human
gagcugcaugcaacuguuuaaa

SEQ ID NO: 1069816 - RNA, 22 nt, Human
uggcuucugggacuugugagca

SEQ ID NO: 1069817 - RNA, 22 nt, Human
guuucacagaugguguucauau

SEQ ID NO: 1069818 - RNA, 22 nt, Human
aggcacuguggguguggccgga

SEQ ID NO: 1069819 - RNA, 22 nt, Human
cugagcagucuagccagguguu

SEQ ID NO: 1069820 - RNA, 22 nt, Human
cagagcugggcauggugaaagg

SEQ ID NO: 1069821 - RNA, 22 nt, Human
gggaaggagguggcuugaagug

SEQ ID NO: 1069822 - RNA, 22 nt, Human
uuuaucaucuuguuuuuaaagc

SEQ ID NO: 1069823 - RNA, 22 nt, Human
gccuuuugaucuauaacugugu

SEQ ID NO: 1069824 - RNA, 22 nt, Human
ggcugcuguuucagagacuguu

SEQ ID NO: 1069825 - RNA, 22 nt, Human
gggucagcugcugggggcugac

SEQ ID NO: 1069826 - RNA, 20 nt, Human
guuaaaagaguaauuugagg

SEQ ID NO: 1069827 - RNA, 22 nt, Human
gcuaggagauugagcucugaag

SEQ ID NO: 1069828 - RNA, 22 nt, Human
ggcuucugguaaagaccacacc

SEQ ID NO: 1069829 - RNA, 22 nt, Human
gcugggaaguggcagagcugga

SEQ ID NO: 1069830 - RNA, 22 nt, Human
uaggaaagaaaugaguagugau

SEQ ID NO: 1069831 - RNA, 22 nt, Human
gcgggccaccuuggagagcgcu

SEQ ID NO: 1069832 - RNA, 22 nt, Human
ccuggcugggguagaagugagg

SEQ ID NO: 1069833 - RNA, 22 nt, Human
acuggcaggcugcuggccggcg

SEQ ID NO: 1069834 - RNA, 22 nt, Human
agaguguuucagucuuccuaga

SEQ ID NO: 1069835 - RNA, 22 nt, Human
uuucugaauaacucuaugauau

SEQ ID NO: 1069836 - RNA, 22 nt, Human
auacacacauaugugaguuuug

SEQ ID NO: 1069837 - RNA, 22 nt, Human
cacaguacccagcacuacugag

SEQ ID NO: 1069838 - RNA, 22 nt, Human
aguuuuauuaaauccacagaag

SEQ ID NO: 1069839 - RNA, 16 nt, Human
uggcugagagaggguu

SEQ ID NO: 1069840 - RNA, 22 nt, Human
uaagucaguagaacugugguca

SEQ ID NO: 1069841 - RNA, 18 nt, Human
cagcugccagcucaugga

SEQ ID NO: 1069842 - RNA, 22 nt, Human
gaaacuuuuaaaccucaugagu

SEQ ID NO: 1069843 - RNA, 22 nt, Human
uggagcaggugggaugucguga

SEQ ID NO: 1069844 - RNA, 22 nt, Human
aggaagccuggcauuaaaaagc

SEQ ID NO: 1069845 - RNA, 22 nt, Human
acaaguuagguuuuaauccaaa

SEQ ID NO: 1069846 - RNA, 21 nt, Human
aaucaagaguacugguguggc

SEQ ID NO: 1069847 - RNA, 22 nt, Human
cuguaugaacccauauacuuau

SEQ ID NO: 1069848 - RNA, 22 nt, Human
agcuuuaaagcauauuucuaag

SEQ ID NO: 1069849 - RNA, 22 nt, Human
ugcacgugggcucucugcucuu

SEQ ID NO: 1069850 - RNA, 22 nt, Human
aaucuuagaguguuuuugaagc

SEQ ID NO: 1069851 - RNA, 22 nt, Human
ugcuucuggcacuugagggggu

SEQ ID NO: 1069852 - RNA, 19 nt, Human
cucuuacagaauagacaca

SEQ ID NO: 1069853 - RNA, 22 nt, Human
uuggcaguaaaagaaaaugcuu

SEQ ID NO: 1069854 - RNA, 22 nt, Human
cuuugauauaaguauacauagu

SEQ ID NO: 1069855 - RNA, 22 nt, Human
gaaaucaucugaguaauaaucu

SEQ ID NO: 1069856 - RNA, 22 nt, Human
aauuuucugaugaugaagcacg

SEQ ID NO: 1069857 - RNA, 22 nt, Human
uuuuccucuguauuugaaaugc

SEQ ID NO: 1069858 - RNA, 22 nt, Human
aucaguuuugggggacauacug

SEQ ID NO: 1069859 - RNA, 22 nt, Human
cacagggccuugugugacugca

SEQ ID NO: 1069860 - RNA, 22 nt, Human
auugguggugaggacaugccag

SEQ ID NO: 1069861 - RNA, 22 nt, Human
acaucacaguaguuaagccaga

SEQ ID NO: 1069862 - RNA, 19 nt, Human
gcucugagaggggcauggg

SEQ ID NO: 1069863 - RNA, 22 nt, Human
gcugacuuugccugucuuuagc

SEQ ID NO: 1069864 - RNA, 22 nt, Human
acaggugguagaguggaaagag

SEQ ID NO: 1069865 - RNA, 22 nt, Human
aggaccugacuggcuccugcuu

SEQ ID NO: 1069866 - RNA, 22 nt, Human
ugggcacauaguuuuaugguca

SEQ ID NO: 1069867 - RNA, 17 nt, Human
acacagacaggcagaca

SEQ ID NO: 1069868 - RNA, 22 nt, Human
ccaggagagcagaagcccaggc

SEQ ID NO: 1069869 - RNA, 22 nt, Human
ugccaaggguaugggcaagaua

SEQ ID NO: 1069870 - RNA, 22 nt, Human
uagugcuuuaggccugaguguc

SEQ ID NO: 1069871 - RNA, 22 nt, Human
cugcuuccugcugggauacuga

SEQ ID NO: 1069872 - RNA, 22 nt, Human
cagaagcagauucuaaagcaag

SEQ ID NO: 1069873 - RNA, 22 nt, Human
aagauauagauggugguauaaa

SEQ ID NO: 1069874 - RNA, 22 nt, Human
uuuugccgaagguaucugagau

SEQ ID NO: 1069875 - RNA, 22 nt, Human
uuuauccauaucauuaaaaucu

SEQ ID NO: 1069876 - RNA, 18 nt, Human
uggagccauugccaccau

SEQ ID NO: 1069877 - RNA, 22 nt, Human
cuucaggauuuaggaagaugaa

SEQ ID NO: 1069878 - RNA, 22 nt, Human
uuugucuuggccucaguuuucu

SEQ ID NO: 1069879 - RNA, 22 nt, Human
uacauacaagauguguuuaaaa

SEQ ID NO: 1069880 - RNA, 22 nt, Human
uggccugccuucgcugagcuga

SEQ ID NO: 1069881 - RNA, 22 nt, Human
uccugcagccacugcaggcaga

SEQ ID NO: 1069882 - RNA, 22 nt, Human
caggugggauuuugcugcuuga

SEQ ID NO: 1069883 - RNA, 22 nt, Human
caagagcucaccggagagcauu

SEQ ID NO: 1069884 - RNA, 22 nt, Human
cuccuucaaaagucauaguaaa

SEQ ID NO: 1069885 - RNA, 22 nt, Human
cuggguggcgucuggggccagu

SEQ ID NO: 1069886 - RNA, 22 nt, Human
cagaaacuguggauucauuaaa

SEQ ID NO: 1069887 - RNA, 22 nt, Human
cuauuugggguagaagauggau

SEQ ID NO: 1069888 - RNA, 22 nt, Human
uacugauagcacaaaugacauu

SEQ ID NO: 1069889 - RNA, 22 nt, Human
uccauucuaugcuuacauuuau

SEQ ID NO: 1069890 - RNA, 23 nt, Human
agaugagccaacaccuccaugcc

SEQ ID NO: 1069891 - RNA, 22 nt, Human
gugggcaggcccuaggcgauuu

SEQ ID NO: 1069892 - RNA, 22 nt, Human
ucugaaauggcagcgggaauga

SEQ ID NO: 1069893 - RNA, 20 nt, Human
auacacauucauagaaaaau

SEQ ID NO: 1069894 - RNA, 22 nt, Human
acaggggauugauuggaagucu

SEQ ID NO: 1069895 - RNA, 22 nt, Human
uagugcuuaacacaaagugauu

SEQ ID NO: 1069896 - RNA, 22 nt, Human
auuucauugaaguuaauucuuc

SEQ ID NO: 1069897 - RNA, 22 nt, Human
gcauuuccugugcuuggcauau

SEQ ID NO: 1069898 - RNA, 22 nt, Human
uuuuugcaccaaccuaauagaa

SEQ ID NO: 1069899 - RNA, 22 nt, Human
ucaggagacaaagggugcggag

SEQ ID NO: 1069900 - RNA, 22 nt, Human
gugcauuggugcgccacuucac

SEQ ID NO: 1069901 - RNA, 19 nt, Human
aacuguaaagaucuguagc

SEQ ID NO: 1069902 - RNA, 22 nt, Human
ccacaucucgguccccucuuug

SEQ ID NO: 1069903 - RNA, 22 nt, Human
aaagcacucguuaguauuucug

SEQ ID NO: 1069904 - RNA, 22 nt, Human
uguaaaccagggucauccuuag

SEQ ID NO: 1069905 - RNA, 19 nt, Human
auauagcauuauucaauuu

SEQ ID NO: 1069906 - RNA, 19 nt, Human
acuggcaguuucugcaugg

SEQ ID NO: 1069907 - RNA, 22 nt, Human
gauugaaacauaggcagucgag

SEQ ID NO: 1069908 - RNA, 20 nt, Human
uccugcaguuccuaggaggg

SEQ ID NO: 1069909 - RNA, 22 nt, Human
ccaggaccacacgacaggagag

SEQ ID NO: 1069910 - RNA, 19 nt, Human
aucugaaguaggugcagcu

SEQ ID NO: 1069911 - RNA, 22 nt, Human
aagagcuggauugugcugcaga

SEQ ID NO: 1069912 - RNA, 22 nt, Human
uagcugugagcacccaggcugu

SEQ ID NO: 1069913 - RNA, 22 nt, Human
gugugcagggcugccugugccg

SEQ ID NO: 1069914 - RNA, 22 nt, Human
auucucuguuuccaagaugaaa

SEQ ID NO: 1069915 - RNA, 22 nt, Human
cuucagagugcagaagauuggg

SEQ ID NO: 1069916 - RNA, 22 nt, Human
ucugaggccuucagcaugaauc

SEQ ID NO: 1069917 - RNA, 22 nt, Human
aaucaagaguuguguaauauuu

SEQ ID NO: 1069918 - RNA, 22 nt, Human
cuggcaggagcauucacagagg

SEQ ID NO: 1069919 - RNA, 22 nt, Human
ccuguggcucucuuuggagguc

SEQ ID NO: 1069920 - RNA, 22 nt, Human
ggccuggccuccagaugugggc

SEQ ID NO: 1069921 - RNA, 21 nt, Human
aguuacauguauagauaaagu

SEQ ID NO: 1069922 - RNA, 22 nt, Human
augaggcagcugcuggagaacg

SEQ ID NO: 1069923 - RNA, 22 nt, Human
ugaacaguuucaagaaaacuuu

SEQ ID NO: 1069924 - RNA, 22 nt, Human
guguccuuauaagaagagaugc

SEQ ID NO: 1069925 - RNA, 22 nt, Human
ugccugcuaggcccugcugggu

SEQ ID NO: 1069926 - RNA, 22 nt, Human
uguggcagcugcugcaggagcu

SEQ ID NO: 1069927 - RNA, 22 nt, Human
uccaggaaagugggaugugugu

SEQ ID NO: 1069928 - RNA, 22 nt, Human
ucccugggccuccugcuaugca

SEQ ID NO: 1069929 - RNA, 22 nt, Human
ucagaaggcccguugcuaagag

SEQ ID NO: 1069930 - RNA, 22 nt, Human
caucagugguaacugaaugguu

SEQ ID NO: 1069931 - RNA, 22 nt, Human
ggccucuguucugcauuccucc

SEQ ID NO: 1069932 - RNA, 22 nt, Human
cucagaaguucagccuagagua

SEQ ID NO: 1069933 - RNA, 22 nt, Human
acccuggacuggggcugaggcu

SEQ ID NO: 1069934 - RNA, 22 nt, Human
cacagaaauauugugucccuug

SEQ ID NO: 1069935 - RNA, 22 nt, Human
uggagcagcacaagaaagggga

SEQ ID NO: 1069936 - RNA, 22 nt, Human
gagguuggugaggggacacggu

SEQ ID NO: 1069937 - RNA, 22 nt, Human
cagcaggcguugggagaaagac

SEQ ID NO: 1069938 - RNA, 22 nt, Human
gaggcacagucccgaggcaagg

SEQ ID NO: 1069939 - RNA, 22 nt, Human
cagaauuuuucacucaaucuuc

SEQ ID NO: 1069940 - RNA, 22 nt, Human
ugcacagauagugauagauagc

SEQ ID NO: 1069941 - RNA, 22 nt, Human
acagggcagaaauguugcaucu

SEQ ID NO: 1069942 - RNA, 22 nt, Human
guccagggccccgagcaccagg

SEQ ID NO: 1069943 - RNA, 22 nt, Human
ccaucaguggcaaauaaacacc

SEQ ID NO: 1069944 - RNA, 22 nt, Human
uauagacuagcagcagaauuua

SEQ ID NO: 1069945 - RNA, 22 nt, Human
acucagaggaaacccuccuagg

SEQ ID NO: 1069946 - RNA, 22 nt, Human
ggugucccaggccagcugugug

SEQ ID NO: 1069947 - RNA, 19 nt, Human
cugugcaggccgggcugag

SEQ ID NO: 1069948 - RNA, 22 nt, Human
uggcagcagggaggccaguguu

SEQ ID NO: 1069949 - RNA, 20 nt, Human
acaggggcagcacaauaaug

SEQ ID NO: 1069950 - RNA, 22 nt, Human
auacacuggacaucauugcauu

SEQ ID NO: 1069951 - RNA, 22 nt, Human
cguuggagacacuugaggacuu

SEQ ID NO: 1069952 - RNA, 22 nt, Human
gaugaagcuaaaucuaagguuu

SEQ ID NO: 1069953 - RNA, 22 nt, Human
gcagaggaucaggcucuggaaa

SEQ ID NO: 1069954 - RNA, 22 nt, Human
aguggugcugcgcgcggagcuc

SEQ ID NO: 1069955 - RNA, 22 nt, Human
auauuucagcuuuacuuaggaa

SEQ ID NO: 1069956 - RNA, 22 nt, Human
ucuggagaacuugcaagaggau

SEQ ID NO: 1069957 - RNA, 22 nt, Human
caggggcucugagauugucuaa

SEQ ID NO: 1069958 - RNA, 22 nt, Human
uguuaccaggcaguauugcuua

SEQ ID NO: 1069959 - RNA, 23 nt, Human
ucuuuccucagcacacaccaaga

SEQ ID NO: 1069960 - RNA, 22 nt, Human
ggcuuaagauauuucugauucc

SEQ ID NO: 1069961 - RNA, 22 nt, Human
caaauaguaugagcaaugauuc

SEQ ID NO: 1069962 - RNA, 22 nt, Human
gagugugguaugcucugaggcu

SEQ ID NO: 1069963 - RNA, 22 nt, Human
ccaucuccacugucccugucaa

SEQ ID NO: 1069964 - RNA, 22 nt, Human
ccucaggaaaugaauaaauggc

SEQ ID NO: 1069965 - RNA, 22 nt, Human
caagaauaaaauacauguugau

SEQ ID NO: 1069966 - RNA, 22 nt, Human
aguggaguugaguugauggauu

SEQ ID NO: 1069967 - RNA, 20 nt, Human
ggggcagguuuuuauggcua

SEQ ID NO: 1069968 - RNA, 22 nt, Human
agcaccaucacagcuguauguc

SEQ ID NO: 1069969 - RNA, 22 nt, Human
gcugccuggaauaacggcuggc

SEQ ID NO: 1069970 - RNA, 22 nt, Human
cuaaauaaucccucuggucuua

SEQ ID NO: 1069971 - RNA, 20 nt, Human
ugcuccaucuaaagugauua

SEQ ID NO: 1069972 - RNA, 22 nt, Human
ucugccugcugccugggggcuc

SEQ ID NO: 1069973 - RNA, 22 nt, Human
ucacaucacccugcucuuaauu

SEQ ID NO: 1069974 - RNA, 22 nt, Human
aacagcuguucgcagauguagg

SEQ ID NO: 1069975 - RNA, 22 nt, Human
uuaugaaggaucagguacuugg

SEQ ID NO: 1069976 - RNA, 22 nt, Human
cccccagccagcagugcucagc

SEQ ID NO: 1069977 - RNA, 22 nt, Human
caaggcagcuauugucuccaua

SEQ ID NO: 1069978 - RNA, 22 nt, Human
ugaggcucugcuucuguggcuc

SEQ ID NO: 1069979 - RNA, 22 nt, Human
cuuuuuccagcuucaggguggg

SEQ ID NO: 1069980 - RNA, 22 nt, Human
caaauuagagguuuguuuugau

SEQ ID NO: 1069981 - RNA, 22 nt, Human
ccagugccuuuuguggguuugu

SEQ ID NO: 1069982 - RNA, 22 nt, Human
cagugcagaggccagggaggau

SEQ ID NO: 1069983 - RNA, 22 nt, Human
guuuuauaggugaaauauuacu

SEQ ID NO: 1069984 - RNA, 22 nt, Human
uuccaaauggagaagaugaguu

SEQ ID NO: 1069985 - RNA, 22 nt, Human
gugcuguaacaacagagugucu

SEQ ID NO: 1069986 - RNA, 22 nt, Human
uaggaauuuuuguaaugguacu

SEQ ID NO: 1069987 - RNA, 22 nt, Human
caaagcuuggagaagcagcugg

SEQ ID NO: 1069988 - RNA, 22 nt, Human
aaagccuuuucuguuuaacaca

SEQ ID NO: 1069989 - RNA, 22 nt, Human
uuccucaucugugcaccucacu

SEQ ID NO: 1069990 - RNA, 22 nt, Human
uacaugcaugucacagaaugaa

SEQ ID NO: 1069991 - RNA, 22 nt, Human
cccaucacagacacuggguuau

SEQ ID NO: 1069992 - RNA, 22 nt, Human
cuucaaagauuugauaaagcca

SEQ ID NO: 1069993 - RNA, 22 nt, Human
cugaaggaagcagguggccugu

SEQ ID NO: 1069994 - RNA, 22 nt, Human
cugccuguuuccucuugcuccc

SEQ ID NO: 1069995 - RNA, 22 nt, Human
guggccuggauagacuccaucu

SEQ ID NO: 1069996 - RNA, 22 nt, Human
ccucagccuuggccccaggcag

SEQ ID NO: 1069997 - RNA, 22 nt, Human
gcagacagacugcagugauuuu

SEQ ID NO: 1069998 - RNA, 22 nt, Human
gaagacaccuacugucauuucu

SEQ ID NO: 1069999 - RNA, 22 nt, Human
uagggcugccuauggcuagaua

SEQ ID NO: 1070000 - RNA, 22 nt, Human
guguaugaggggagaauguuuu

SEQ ID NO: 1070001 - RNA, 22 nt, Human
ugcaggugccucuugagcuugu

SEQ ID NO: 1070002 - RNA, 22 nt, Human
ccuggggaaaagcaggcauuua

SEQ ID NO: 1070003 - RNA, 22 nt, Human
ugaguuuuuucaacauaugaag

SEQ ID NO: 1070004 - RNA, 22 nt, Human
gcugagagugggugcagugcuu

SEQ ID NO: 1070005 - RNA, 22 nt, Human
uauacaauggcugaaucaucca

SEQ ID NO: 1070006 - RNA, 18 nt, Human
uggaagcuggcagauuuu

SEQ ID NO: 1070007 - RNA, 22 nt, Human
ugacauaauaauccaaacauac

SEQ ID NO: 1070008 - RNA, 22 nt, Human
aacccuggggcagcugcuaggg

SEQ ID NO: 1070009 - RNA, 22 nt, Human
ugcuucauuuccuuauauugua

SEQ ID NO: 1070010 - RNA, 22 nt, Human
uuccaacucugaaaugugaaau

SEQ ID NO: 1070011 - RNA, 22 nt, Human
aaacugcugguugcuggccagc

SEQ ID NO: 1070012 - RNA, 22 nt, Human
uuccucaguuagugccugaggc

SEQ ID NO: 1070013 - RNA, 22 nt, Human
ugagauuuggguuguuuaacau

SEQ ID NO: 1070014 - RNA, 20 nt, Human
ucucacaggggcuuuucucu

SEQ ID NO: 1070015 - RNA, 22 nt, Human
ucccugguuacguauaaagaug

SEQ ID NO: 1070016 - RNA, 22 nt, Human
acuguuuugugccuuaguuucc

SEQ ID NO: 1070017 - RNA, 22 nt, Human
uacaugcuccacuuucuccugu

SEQ ID NO: 1070018 - RNA, 22 nt, Human
agucuuuacuaaacagaccacc

SEQ ID NO: 1070019 - RNA, 22 nt, Human
gaugcacuuucuuuucaacagu

SEQ ID NO: 1070020 - RNA, 22 nt, Human
gaaagguucuugggaguucaca

SEQ ID NO: 1070021 - RNA, 22 nt, Human
uuucaaacauagaucugaauau

SEQ ID NO: 1070022 - RNA, 22 nt, Human
augagcccagaaaucucccuuu

SEQ ID NO: 1070023 - RNA, 22 nt, Human
ccaaucuuaucuuuauuuucua

SEQ ID NO: 1070024 - RNA, 22 nt, Human
uggaagcacugaagagacaacc

SEQ ID NO: 1070025 - RNA, 22 nt, Human
acacacucaauugcauaagcac

SEQ ID NO: 1070026 - RNA, 22 nt, Human
aaagguaaaguaucugcccaag

SEQ ID NO: 1070027 - RNA, 22 nt, Human
gagggcugugaaggagcggguu

SEQ ID NO: 1070028 - RNA, 19 nt, Human
agauggggaagagugugag

SEQ ID NO: 1070029 - RNA, 22 nt, Human
uaucuguugucuuuuacaugua

SEQ ID NO: 1070030 - RNA, 22 nt, Human
uaggaaaaauacagaauuauau

SEQ ID NO: 1070031 - RNA, 22 nt, Human
aagcagaggccacagagugggc

SEQ ID NO: 1070032 - RNA, 21 nt, Human
cagugcucaaucugacagugg

SEQ ID NO: 1070033 - RNA, 22 nt, Human
uggccccccagagcuggaggac

SEQ ID NO: 1070034 - RNA, 22 nt, Human
cagccagcuggugcggcagagc

SEQ ID NO: 1070035 - RNA, 22 nt, Human
aggcuuuggaaucagaguucug

SEQ ID NO: 1070036 - RNA, 22 nt, Human
ucugaggcccugcaggcagugu

SEQ ID NO: 1070037 - RNA, 22 nt, Human
uauguuaagugggauaaucaaa

SEQ ID NO: 1070038 - RNA, 22 nt, Human
cagagaaacucagauagcugau

SEQ ID NO: 1070039 - RNA, 22 nt, Human
cauauacacuuccaccucugug

SEQ ID NO: 1070040 - RNA, 22 nt, Human
cagcaagacaaggaacaaacug

SEQ ID NO: 1070041 - RNA, 21 nt, Human
gacaggcaaggagucacuuag

SEQ ID NO: 1070042 - RNA, 22 nt, Human
ccuggcagcuguuuggcuuggc

SEQ ID NO: 1070043 - RNA, 22 nt, Human
ucccugcucagcucaccuggca

SEQ ID NO: 1070044 - RNA, 22 nt, Human
ugcugucugauucagggugauu

SEQ ID NO: 1070045 - RNA, 22 nt, Human
ggagccaguuuagaccucaguu

SEQ ID NO: 1070046 - RNA, 19 nt, Human
auggaaaauuguacucaau

SEQ ID NO: 1070047 - RNA, 22 nt, Human
caugcacauguggcuauguaau

SEQ ID NO: 1070048 - RNA, 20 nt, Human
uucaaaguguaugauaugca

SEQ ID NO: 1070049 - RNA, 22 nt, Human
uggaagagguggaaguggcuuc

SEQ ID NO: 1070050 - RNA, 22 nt, Human
agucacuguucugucaugucaa

SEQ ID NO: 1070051 - RNA, 22 nt, Human
ugcugagauagcugacuaggca

SEQ ID NO: 1070052 - RNA, 22 nt, Human
ggcugggcuccgggagcaugcg

SEQ ID NO: 1070053 - RNA, 22 nt, Human
uggcaucucaaacaggcagauu

SEQ ID NO: 1070054 - RNA, 22 nt, Human
uugucugucccagcuugugcau

SEQ ID NO: 1070055 - RNA, 22 nt, Human
uagcuguguaagcuugguaaga

SEQ ID NO: 1070056 - RNA, 22 nt, Human
ggccaggcgaugaccccuccac

SEQ ID NO: 1070057 - RNA, 23 nt, Human
aggcagcagguuguccaggguga

SEQ ID NO: 1070058 - RNA, 22 nt, Human
gcugcaggagcuggagcugugg

SEQ ID NO: 1070059 - RNA, 22 nt, Human
cagagccaaaccucagggcccg

SEQ ID NO: 1070060 - RNA, 22 nt, Human
augaggcaggauuaagcuauca

SEQ ID NO: 1070061 - RNA, 17 nt, Human
agaaagaggauccacag

SEQ ID NO: 1070062 - RNA, 22 nt, Human
uggccuugggcagguggccugc

SEQ ID NO: 1070063 - RNA, 22 nt, Human
aagaauaucuguuuuauuuagg

SEQ ID NO: 1070064 - RNA, 22 nt, Human
gagggcagaaaauuaugcggug

SEQ ID NO: 1070065 - RNA, 22 nt, Human
ccuggagcacucucccuggcug

SEQ ID NO: 1070066 - RNA, 20 nt, Human
caugguggaggagcagggcc

SEQ ID NO: 1070067 - RNA, 23 nt, Human
gugcugugagccccuuggccucc

SEQ ID NO: 1070068 - RNA, 22 nt, Human
gccagcagggcccaaaugcugg

SEQ ID NO: 1070069 - RNA, 22 nt, Human
ugcugaguggcggccucacuuu

SEQ ID NO: 1070070 - RNA, 22 nt, Human
gacuucagauauuuuuuaaguu

SEQ ID NO: 1070071 - RNA, 22 nt, Human
ugaaaugagcauuuauucuuua

SEQ ID NO: 1070072 - RNA, 22 nt, Human
ucacagacgccuccccucgccu

SEQ ID NO: 1070073 - RNA, 22 nt, Human
auaaaacuuggguaugaucccu

SEQ ID NO: 1070074 - RNA, 22 nt, Human
gagcaagacuacaggcagauga

SEQ ID NO: 1070075 - RNA, 22 nt, Human
gggcagguguuuccaaggugag

SEQ ID NO: 1070076 - RNA, 22 nt, Human
caagcagagguuuauguauuag

SEQ ID NO: 1070077 - RNA, 21 nt, Human
cagaggccucaugcucugugc

SEQ ID NO: 1070078 - RNA, 22 nt, Human
cauaccuuucucaagcacaugu

SEQ ID NO: 1070079 - RNA, 22 nt, Human
aaauaacagucagggacaacau

SEQ ID NO: 1070080 - RNA, 21 nt, Human
gagcucucaggcaagaagcag

SEQ ID NO: 1070081 - RNA, 19 nt, Human
uggcagggagugauauuag

SEQ ID NO: 1070082 - RNA, 22 nt, Human
uggcauuuucuccuuugaguuu

SEQ ID NO: 1070083 - RNA, 22 nt, Human
cuucuuaacuguauauacuaug

SEQ ID NO: 1070084 - RNA, 18 nt, Human
ucagacaaguuagacagg

SEQ ID NO: 1070085 - RNA, 22 nt, Human
cugcugugggcaggguagcugg

SEQ ID NO: 1070086 - RNA, 22 nt, Human
agaugcugcuccacaggccagg

SEQ ID NO: 1070087 - RNA, 22 nt, Human
auuuguaagcuagagccaugau

SEQ ID NO: 1070088 - RNA, 22 nt, Human
aauguuugaacuuugcauauuu

SEQ ID NO: 1070089 - RNA, 23 nt, Human
uuguuuuuagagguggcaugaga

SEQ ID NO: 1070090 - RNA, 22 nt, Human
ugcagcugauuaaagggcagac

SEQ ID NO: 1070091 - RNA, 22 nt, Human
ucccagcagucagagcuaugug

SEQ ID NO: 1070092 - RNA, 22 nt, Human
gccugccugaaggcuguaccag

SEQ ID NO: 1070093 - RNA, 22 nt, Human
uggcucagcuuuccccaucugg

SEQ ID NO: 1070094 - RNA, 17 nt, Human
ucacaucacacaagcaa

SEQ ID NO: 1070095 - RNA, 22 nt, Human
gucccagaggcuuuggccacag

SEQ ID NO: 1070096 - RNA, 22 nt, Human
aaccaggagauuaaagaaaggu

SEQ ID NO: 1070097 - RNA, 22 nt, Human
aaacuuuuuuagguucauaggc

SEQ ID NO: 1070098 - RNA, 22 nt, Human
ggccagagaagucagacccuug

SEQ ID NO: 1070099 - RNA, 22 nt, Human
ccagagcugauuccugggacuu

SEQ ID NO: 1070100 - RNA, 22 nt, Human
ccucagagaaagguauggcuga

SEQ ID NO: 1070101 - RNA, 22 nt, Human
aggaagugaaagggaaggaguu

SEQ ID NO: 1070102 - RNA, 22 nt, Human
acucugccuuucagcagaugaa

SEQ ID NO: 1070103 - RNA, 19 nt, Human
ucucuucucccugguuuua

SEQ ID NO: 1070104 - RNA, 22 nt, Human
aaacaucugacuugcuuuuuca

SEQ ID NO: 1070105 - RNA, 22 nt, Human
auauuuaaacaggguaccaaua

SEQ ID NO: 1070106 - RNA, 22 nt, Human
gcugaggccccagggugauggg

SEQ ID NO: 1070107 - RNA, 22 nt, Human
agcaggaaggucugugugaguc

SEQ ID NO: 1070108 - RNA, 22 nt, Human
gaagaacaccugcugcccagug

SEQ ID NO: 1070109 - RNA, 22 nt, Human
accuuuuuucagaacucuaaag

SEQ ID NO: 1070110 - RNA, 18 nt, Human
uggcucugcagccagaug

SEQ ID NO: 1070111 - RNA, 22 nt, Human
gccagcagguugucaaggagcu

SEQ ID NO: 1070112 - RNA, 22 nt, Human
gucaggaugagggaugaggagu

SEQ ID NO: 1070113 - RNA, 22 nt, Human
caggcacagaguuauucauuua

SEQ ID NO: 1070114 - RNA, 22 nt, Human
aucagaauguuuuggugugcuc

SEQ ID NO: 1070115 - RNA, 22 nt, Human
gccugagcccaggugugcagag

SEQ ID NO: 1070116 - RNA, 22 nt, Human
ugguccugaggcuuguuuccac

SEQ ID NO: 1070117 - RNA, 22 nt, Human
cccuccugugccugaggccagc

SEQ ID NO: 1070118 - RNA, 22 nt, Human
aaggugaacugguaaugacaga

SEQ ID NO: 1070119 - RNA, 22 nt, Human
caggagacuauggcccaaggcc

SEQ ID NO: 1070120 - RNA, 22 nt, Human
guuuuccuacuguaucaucaaa

SEQ ID NO: 1070121 - RNA, 22 nt, Human
agagcaggcauaaagcuuugaa

SEQ ID NO: 1070122 - RNA, 22 nt, Human
ucuucauguugcuuauucuggg

SEQ ID NO: 1070123 - RNA, 22 nt, Human
uaucaaaguuguccugugaagu

SEQ ID NO: 1070124 - RNA, 22 nt, Human
aaguuacauuuuggucuaauug

SEQ ID NO: 1070125 - RNA, 22 nt, Human
cagcagagcuuauguuggguca

SEQ ID NO: 1070126 - RNA, 22 nt, Human
uucugggccuccuaggacaggc

SEQ ID NO: 1070127 - RNA, 22 nt, Human
aguguggguuuuauggagcccu

SEQ ID NO: 1070128 - RNA, 22 nt, Human
gcugcuuuagguugagcucagc

SEQ ID NO: 1070129 - RNA, 22 nt, Human
cucagaaaaccucuuucuugau

SEQ ID NO: 1070130 - RNA, 22 nt, Human
agucuugcauuuucugaagaug

SEQ ID NO: 1070131 - RNA, 22 nt, Human
uuuuucuagcucaaagauucua

SEQ ID NO: 1070132 - RNA, 22 nt, Human
auaaggacuugaauuagacauu

SEQ ID NO: 1070133 - RNA, 22 nt, Human
aaguggagucccuacaaccagc

SEQ ID NO: 1070134 - RNA, 22 nt, Human
aauuuggcagugucuugaagua

SEQ ID NO: 1070135 - RNA, 22 nt, Human
uacacagaggcagcugucugcu

SEQ ID NO: 1070136 - RNA, 22 nt, Human
gcuggcaguaaaggguuuggca

SEQ ID NO: 1070137 - RNA, 22 nt, Human
gagaaucuacaggaaaccgaag

SEQ ID NO: 1070138 - RNA, 22 nt, Human
gagauggcuugcucucacgugg

SEQ ID NO: 1070139 - RNA, 23 nt, Human
agguucaggagauggaggaacaa

SEQ ID NO: 1070140 - RNA, 22 nt, Human
ggaguauaucguguaucauaug

SEQ ID NO: 1070141 - RNA, 22 nt, Human
cacugcuuucacaguuuguucc

SEQ ID NO: 1070142 - RNA, 22 nt, Human
uuugaaacucaugaucaucacu

SEQ ID NO: 1070143 - RNA, 22 nt, Human
gaucaacaacuuuugaauagcu

SEQ ID NO: 1070144 - RNA, 22 nt, Human
ucuucauguauacucaugguac

SEQ ID NO: 1070145 - RNA, 22 nt, Human
acaagauuuggcugaaacucca

SEQ ID NO: 1070146 - RNA, 22 nt, Human
ugagcccagagcccuuguaggg

SEQ ID NO: 1070147 - RNA, 22 nt, Human
ccuucaaauuuagaacaaguga

SEQ ID NO: 1070148 - RNA, 22 nt, Human
gcugucugcaagccaggaaaug

SEQ ID NO: 1070149 - RNA, 22 nt, Human
gcugcugggggaacaguuaaaa

SEQ ID NO: 1070150 - RNA, 22 nt, Human
gugccugcagcaauccauggca

SEQ ID NO: 1070151 - RNA, 22 nt, Human
uucaaugagcccggggccauag

SEQ ID NO: 1070152 - RNA, 22 nt, Human
gagcaggcucugccuguguguc

SEQ ID NO: 1070153 - RNA, 22 nt, Human
aaacauuuuucuucaucauccu

SEQ ID NO: 1070154 - RNA, 22 nt, Human
aggaccuguagggccugcaucc

SEQ ID NO: 1070155 - RNA, 22 nt, Human
uggcagggugggcuucagcccc

SEQ ID NO: 1070156 - RNA, 22 nt, Human
agggagaagguccaugccuguc

SEQ ID NO: 1070157 - RNA, 22 nt, Human
ugacauuuuuauaagagucaaa

SEQ ID NO: 1070158 - RNA, 22 nt, Human
ucccugugaaucagaagcaggu

SEQ ID NO: 1070159 - RNA, 22 nt, Human
uaaauaagucacugaccauuua

SEQ ID NO: 1070160 - RNA, 20 nt, Human
uguuccaugacuauuuggau

SEQ ID NO: 1070161 - RNA, 21 nt, Human
auggagccuaagaguggaggu

SEQ ID NO: 1070162 - RNA, 22 nt, Human
uguguucauuagcauugccuug

SEQ ID NO: 1070163 - RNA, 22 nt, Human
acaggugauucaggcucuggga

SEQ ID NO: 1070164 - RNA, 22 nt, Human
uuuuagauugggaaauguaaag

SEQ ID NO: 1070165 - RNA, 22 nt, Human
ugucagaacucuauugaugucc

SEQ ID NO: 1070166 - RNA, 22 nt, Human
uccacaagaugauaaagagagg

SEQ ID NO: 1070167 - RNA, 22 nt, Human
ucacauuuguucuugaaucuaa

SEQ ID NO: 1070168 - RNA, 22 nt, Human
aauacuuuccuauauaaggugc

SEQ ID NO: 1070169 - RNA, 22 nt, Human
uuucacaggccuuuuguagccc

SEQ ID NO: 1070170 - RNA, 22 nt, Human
ugggcucaaucugcuucuguuu

SEQ ID NO: 1070171 - RNA, 23 nt, Human
ucauuucagguugcaugguacca

SEQ ID NO: 1070172 - RNA, 22 nt, Human
uguauacaggcauaagagauac

SEQ ID NO: 1070173 - RNA, 22 nt, Human
aggcugagucaaguuaggguga

SEQ ID NO: 1070174 - RNA, 22 nt, Human
agcacucuucugugauaguugu

SEQ ID NO: 1070175 - RNA, 22 nt, Human
gcugggcccugggugcccuagc

SEQ ID NO: 1070176 - RNA, 20 nt, Human
agaaauauugaguucagagg

SEQ ID NO: 1070177 - RNA, 22 nt, Human
caaaggcaugugaguauaugug

SEQ ID NO: 1070178 - RNA, 22 nt, Human
augaaggcuguguggagccccc

SEQ ID NO: 1070179 - RNA, 22 nt, Human
uacacauacaccaaugugguca

SEQ ID NO: 1070180 - RNA, 22 nt, Human
ggcucuguuuacuuucagaggc

SEQ ID NO: 1070181 - RNA, 22 nt, Human
uggggccagagauggggcgcag

SEQ ID NO: 1070182 - RNA, 22 nt, Human
ucagggaacuacuucucccuau

SEQ ID NO: 1070183 - RNA, 19 nt, Human
aagagcagggaaagaauug

SEQ ID NO: 1070184 - RNA, 22 nt, Human
guggccuggaaaggcuggucug

SEQ ID NO: 1070185 - RNA, 22 nt, Human
aggcacugacucaagggagcca

SEQ ID NO: 1070186 - RNA, 22 nt, Human
uuucaguguaagguuuccagga

SEQ ID NO: 1070187 - RNA, 20 nt, Human
gcaaauggaucccacaagcc

SEQ ID NO: 1070188 - RNA, 22 nt, Human
cagauggcacagauuuagagug

SEQ ID NO: 1070189 - RNA, 22 nt, Human
caugcuguacucugugucagaa

SEQ ID NO: 1070190 - RNA, 22 nt, Human
ccucacagggccaggccccuca

SEQ ID NO: 1070191 - RNA, 22 nt, Human
auugacaagugagcugggcugc

SEQ ID NO: 1070192 - RNA, 21 nt, Human
agccugggaggcggagguugc

SEQ ID NO: 1070193 - RNA, 22 nt, Human
cuucucagcauuuugucagucu

SEQ ID NO: 1070194 - RNA, 22 nt, Human
agcucagcccuccugugcagcu

SEQ ID NO: 1070195 - RNA, 22 nt, Human
gggcugagagugacuguucugu

SEQ ID NO: 1070196 - RNA, 22 nt, Human
cacagguguaugaauaugucca

SEQ ID NO: 1070197 - RNA, 22 nt, Human
gcaggcugauagaggauuccau

SEQ ID NO: 1070198 - RNA, 22 nt, Human
auucauuuagguauucacuuac

SEQ ID NO: 1070199 - RNA, 22 nt, Human
ugcugucuucucugaggucccu

SEQ ID NO: 1070200 - RNA, 22 nt, Human
ggcagguggauuuucuacucua

SEQ ID NO: 1070201 - RNA, 22 nt, Human
ucuugcacuucaugaauauguu

SEQ ID NO: 1070202 - RNA, 22 nt, Human
cauugacaucaggcuuggccaa

SEQ ID NO: 1070203 - RNA, 22 nt, Human
ggcaggguggcccuccagugag

SEQ ID NO: 1070204 - RNA, 22 nt, Human
agagcagguggcaacucuggga

SEQ ID NO: 1070205 - RNA, 22 nt, Human
acuugcugguggcauuuacagu

SEQ ID NO: 1070206 - RNA, 22 nt, Human
gcaggcagguggcaucuuguga

SEQ ID NO: 1070207 - RNA, 22 nt, Human
caaagucagggaagaguggcug

SEQ ID NO: 1070208 - RNA, 22 nt, Human
acaaggcuguggggagaacuga

SEQ ID NO: 1070209 - RNA, 22 nt, Human
gccugccuguuggcugaggugc

SEQ ID NO: 1070210 - RNA, 21 nt, Human
uggagacucugguucuuugug

SEQ ID NO: 1070211 - RNA, 22 nt, Human
uuuaaugauagucuuacgaaaa

SEQ ID NO: 1070212 - RNA, 22 nt, Human
aucuuuuuugucuuggucacug

SEQ ID NO: 1070213 - RNA, 22 nt, Human
gaguccuucuggcuggcaggau

SEQ ID NO: 1070214 - RNA, 22 nt, Human
cucucuggaagggggagcugau

SEQ ID NO: 1070215 - RNA, 22 nt, Human
gcuuucuucauacucaagcauc

SEQ ID NO: 1070216 - RNA, 19 nt, Human
uagaaagaugauggguggg

SEQ ID NO: 1070217 - RNA, 22 nt, Human
uggagcuggaagaauguagacg

SEQ ID NO: 1070218 - RNA, 22 nt, Human
gggcuagaaauucugcagugga

SEQ ID NO: 1070219 - RNA, 22 nt, Human
uagcagagugauuggccaugag

SEQ ID NO: 1070220 - RNA, 22 nt, Human
ccugugcucccauagcuucugu

SEQ ID NO: 1070221 - RNA, 22 nt, Human
uccguauuugacuauugcaccg

SEQ ID NO: 1070222 - RNA, 22 nt, Human
guggggugggcugaguuaggcc

SEQ ID NO: 1070223 - RNA, 22 nt, Human
ugucagugguaagguugggagu

SEQ ID NO: 1070224 - RNA, 23 nt, Human
ugaauuuuggcauauucugaaau

SEQ ID NO: 1070225 - RNA, 23 nt, Human
cugagcaaagggggaagcugcuu

SEQ ID NO: 1070226 - RNA, 22 nt, Human
cuggaaggucuguccccacugc

SEQ ID NO: 1070227 - RNA, 21 nt, Human
ccccagcaccuugccagccug

SEQ ID NO: 1070228 - RNA, 22 nt, Human
uguggccuccuguuccugggua

SEQ ID NO: 1070229 - RNA, 22 nt, Human
ucaguauuucuaaacauuggcu

SEQ ID NO: 1070230 - RNA, 21 nt, Human
ucagagucucaggagcaaggg

SEQ ID NO: 1070231 - RNA, 20 nt, Human
cagagcuguuauggaugaug

SEQ ID NO: 1070232 - RNA, 22 nt, Human
uucaacagcuuccaaagugugu

SEQ ID NO: 1070233 - RNA, 22 nt, Human
ugaggggagaagcagcagccug

SEQ ID NO: 1070234 - RNA, 22 nt, Human
ccaggaggcagaaguugcagug

SEQ ID NO: 1070235 - RNA, 22 nt, Human
gugcugcucacaucuggaggua

SEQ ID NO: 1070236 - RNA, 22 nt, Human
gcuucauuacugacagucugug

SEQ ID NO: 1070237 - RNA, 22 nt, Human
ccuuucucuggcagcaggacag

SEQ ID NO: 1070238 - RNA, 22 nt, Human
ggcccugugguuuugcaaaguc

SEQ ID NO: 1070239 - RNA, 22 nt, Human
acucaugauaugccuauaagau

SEQ ID NO: 1070240 - RNA, 22 nt, Human
caagauauauguaugauuccau

SEQ ID NO: 1070241 - RNA, 22 nt, Human
ugggccugaguuugggaacugg

SEQ ID NO: 1070242 - RNA, 22 nt, Human
acugccauuggucaaaugagug

SEQ ID NO: 1070243 - RNA, 23 nt, Human
agggcugaugccauugcagcucu

SEQ ID NO: 1070244 - RNA, 22 nt, Human
agcuaggaaauugaggcugaga

SEQ ID NO: 1070245 - RNA, 22 nt, Human
ggugagaggcagugcuguggaa

SEQ ID NO: 1070246 - RNA, 22 nt, Human
acaaucuuauuaguaguauaga

SEQ ID NO: 1070247 - RNA, 22 nt, Human
cauucacucagcgaugccagua

SEQ ID NO: 1070248 - RNA, 22 nt, Human
uuccuuaauaucccuuuuggaa

SEQ ID NO: 1070249 - RNA, 22 nt, Human
ucagaacaauugggaaccauua

SEQ ID NO: 1070250 - RNA, 22 nt, Human
uacauguucaaauuugucuuuc

SEQ ID NO: 1070251 - RNA, 22 nt, Human
agagugggugaucucuguuguc

SEQ ID NO: 1070252 - RNA, 22 nt, Human
ucccagaggucucugcugguuc

SEQ ID NO: 1070253 - RNA, 22 nt, Human
uacagaaaaacuggcauugaag

SEQ ID NO: 1070254 - RNA, 22 nt, Human
uauuuguugcgggaauugcuau

SEQ ID NO: 1070255 - RNA, 22 nt, Human
gagcugggacauggguccucuc

SEQ ID NO: 1070256 - RNA, 22 nt, Human
cauguguagugaaauaagcagu

SEQ ID NO: 1070257 - RNA, 22 nt, Human
uuacugaucccccaggugaccc

SEQ ID NO: 1070258 - RNA, 22 nt, Human
ucacaguauagaguuauuuugg

SEQ ID NO: 1070259 - RNA, 22 nt, Human
aagaaaagaaaccugaggcuuu

SEQ ID NO: 1070260 - RNA, 22 nt, Human
ugaggggcggccugcagaggcc

SEQ ID NO: 1070261 - RNA, 22 nt, Human
uggaaagggacuuaugaguucc

SEQ ID NO: 1070262 - RNA, 22 nt, Human
ggguggggcccaggaaaucuau

SEQ ID NO: 1070263 - RNA, 22 nt, Human
auguuacagaaagcaaagauga

SEQ ID NO: 1070264 - RNA, 22 nt, Human
gaggccacccuaugggucccag

SEQ ID NO: 1070265 - RNA, 22 nt, Human
uucuuagaagaaacaucuaaaa

SEQ ID NO: 1070266 - RNA, 22 nt, Human
uguucuuaacuuuuguguauau

SEQ ID NO: 1070267 - RNA, 22 nt, Human
gcauuuuaaugagguuuaugag

SEQ ID NO: 1070268 - RNA, 22 nt, Human
agcaauauuuaaagguuugcaa

SEQ ID NO: 1070269 - RNA, 22 nt, Human
cgcuggccauagccuccugugu

SEQ ID NO: 1070270 - RNA, 22 nt, Human
uugguuccuucugaaaguauug

SEQ ID NO: 1070271 - RNA, 22 nt, Human
guggccuggcgagcuggcgcgg

SEQ ID NO: 1070272 - RNA, 22 nt, Human
uuucauuuugguuaugccauaa

SEQ ID NO: 1070273 - RNA, 22 nt, Human
uuggcagugucugcaaaaugga

SEQ ID NO: 1070274 - RNA, 21 nt, Human
ggcccugguuacgccuccucu

SEQ ID NO: 1070275 - RNA, 22 nt, Human
gggcaggugcccagggccagag

SEQ ID NO: 1070276 - RNA, 22 nt, Human
uuuguacacaggucauucaggg

SEQ ID NO: 1070277 - RNA, 22 nt, Human
uccaggcuggaaaugucaaacu

SEQ ID NO: 1070278 - RNA, 22 nt, Human
uggcucugugcuucuaguaucu

SEQ ID NO: 1070279 - RNA, 22 nt, Human
augagcugugggauuccagagg

SEQ ID NO: 1070280 - RNA, 17 nt, Human
aggugcagaggcagagc

SEQ ID NO: 1070281 - RNA, 22 nt, Human
aggccucuucagggagcaugga

SEQ ID NO: 1070282 - RNA, 22 nt, Human
ugugaaauucuugaaaugcaca

SEQ ID NO: 1070283 - RNA, 21 nt, Human
gguugguguguccaguggcca

SEQ ID NO: 1070284 - RNA, 22 nt, Human
uagauuuuacuucugucauuac

SEQ ID NO: 1070285 - RNA, 22 nt, Human
uucuugcucaaugucuguuuaa

SEQ ID NO: 1070286 - RNA, 22 nt, Human
cagggccugcuuccuucuuguu

SEQ ID NO: 1070287 - RNA, 22 nt, Human
ugguaccagcuguguguucacu

SEQ ID NO: 1070288 - RNA, 22 nt, Human
gucccagaggacagggucacau

SEQ ID NO: 1070289 - RNA, 22 nt, Human
uaagcacuuuauaugcuuuauc

SEQ ID NO: 1070290 - RNA, 22 nt, Human
guucuuaagaccacaauaaaaa

SEQ ID NO: 1070291 - RNA, 22 nt, Human
cuucccuuucuggugacuucuc

SEQ ID NO: 1070292 - RNA, 21 nt, Human
ggcagcacuaccugaagcaua

SEQ ID NO: 1070293 - RNA, 22 nt, Human
agucucuuauucccuauugcug

SEQ ID NO: 1070294 - RNA, 20 nt, Human
gagggugggacuuccuaggc

SEQ ID NO: 1070295 - RNA, 22 nt, Human
ccuuuucuacaagcaaaugugc

SEQ ID NO: 1070296 - RNA, 22 nt, Human
uggcuucauuauuguuuuuccu

SEQ ID NO: 1070297 - RNA, 22 nt, Human
aacaaccaaaaagaugaaugua

SEQ ID NO: 1070298 - RNA, 22 nt, Human
uaucauaaguuaauuaaacagu

SEQ ID NO: 1070299 - RNA, 22 nt, Human
ucaggcagagggagaagccaag

SEQ ID NO: 1070300 - RNA, 20 nt, Human
uuuauucacagagaagaguu

SEQ ID NO: 1070301 - RNA, 18 nt, Human
uaggcugggggcuguagu

SEQ ID NO: 1070302 - RNA, 22 nt, Human
caaaguuuaaaguagauuucag

SEQ ID NO: 1070303 - RNA, 22 nt, Human
agcaaggaguagaacaagagug

SEQ ID NO: 1070304 - RNA, 18 nt, Human
cccucuccugcuaguggg

SEQ ID NO: 1070305 - RNA, 22 nt, Human
uguaaaaccaaaucaaucuagu

SEQ ID NO: 1070306 - RNA, 22 nt, Human
agcaaaauaagguaauuuauug

SEQ ID NO: 1070307 - RNA, 22 nt, Human
cagaaacugcuuguggucaucu

SEQ ID NO: 1070308 - RNA, 22 nt, Human
ugcugagaggaaagaaugcaca

SEQ ID NO: 1070309 - RNA, 22 nt, Human
agcagcucaacagugucucuau

SEQ ID NO: 1070310 - RNA, 22 nt, Human
agcagcucugagaggccagcac

SEQ ID NO: 1070311 - RNA, 22 nt, Human
agcaagaaaucuucaguguucu

SEQ ID NO: 1070312 - RNA, 22 nt, Human
aagcaaggccggaaggaaacuc

SEQ ID NO: 1070313 - RNA, 22 nt, Human
ccagagcagggcagcagggcuc

SEQ ID NO: 1070314 - RNA, 22 nt, Human
ucaaaacaaucauuggaugugc

SEQ ID NO: 1070315 - RNA, 22 nt, Human
gugcucugaguuugcaugucag

SEQ ID NO: 1070316 - RNA, 22 nt, Human
caguccuggggaccaggcugag

SEQ ID NO: 1070317 - RNA, 22 nt, Human
ugagcaggcucccacuucagug

SEQ ID NO: 1070318 - RNA, 22 nt, Human
uuacacagugaauuuacucaag

SEQ ID NO: 1070319 - RNA, 22 nt, Human
auccaggagucguggcgcucag

SEQ ID NO: 1070320 - RNA, 21 nt, Human
uuuauuuauauaggacacaug

SEQ ID NO: 1070321 - RNA, 22 nt, Human
ccuugcucaagcuagugacggg

SEQ ID NO: 1070322 - RNA, 22 nt, Human
agcuggguguguaucagauaaa

SEQ ID NO: 1070323 - RNA, 22 nt, Human
uacaaagugacaagcucugcug

SEQ ID NO: 1070324 - RNA, 22 nt, Human
ucucaggggcagugauccuaag

SEQ ID NO: 1070325 - RNA, 18 nt, Human
ccagauggccagucugcu

SEQ ID NO: 1070326 - RNA, 22 nt, Human
agugaaaucagguuuugacugc

SEQ ID NO: 1070327 - RNA, 22 nt, Human
auugugcaauguuuuacaauuu

SEQ ID NO: 1070328 - RNA, 20 nt, Human
aggcucagcugagcucuugg

SEQ ID NO: 1070329 - RNA, 22 nt, Human
gcuucucccuacagaugucagu

SEQ ID NO: 1070330 - RNA, 22 nt, Human
ucuacuguagugaugcugcagu

SEQ ID NO: 1070331 - RNA, 22 nt, Human
ggggugggguuacucauugugc

SEQ ID NO: 1070332 - RNA, 22 nt, Human
uccaggccaggguaagaggaga

SEQ ID NO: 1070333 - RNA, 22 nt, Human
uugauacacaauggaacaaugu

SEQ ID NO: 1070334 - RNA, 22 nt, Human
gccaauggcucaugagcaggac

SEQ ID NO: 1070335 - RNA, 22 nt, Human
uguguccucauguggcagagag

SEQ ID NO: 1070336 - RNA, 22 nt, Human
aggaggcugguucaggccauau

SEQ ID NO: 1070337 - RNA, 22 nt, Human
auugaaagcacaaagaacaagu

SEQ ID NO: 1070338 - RNA, 22 nt, Human
caguguguggauugcccuugca

SEQ ID NO: 1070339 - RNA, 22 nt, Human
ggaggccaggguggguggaucg

SEQ ID NO: 1070340 - RNA, 22 nt, Human
cacacacugacaccuuaucuug

SEQ ID NO: 1070341 - RNA, 22 nt, Human
uguuccuaaauaugaauggaga

SEQ ID NO: 1070342 - RNA, 22 nt, Human
uaggaagaugaguaucaacuug

SEQ ID NO: 1070343 - RNA, 22 nt, Human
ggccuggaagaggacagagaaa

SEQ ID NO: 1070344 - RNA, 22 nt, Human
agcagcuggggccugugacgau

SEQ ID NO: 1070345 - RNA, 23 nt, Human
cugcagucgccggccugggugcc

SEQ ID NO: 1070346 - RNA, 22 nt, Human
cuauuuucugucucuauagagu

SEQ ID NO: 1070347 - RNA, 22 nt, Human
aggcagcagagguugaggaaag

SEQ ID NO: 1070348 - RNA, 22 nt, Human
augggcugcuucuccagcaccu

SEQ ID NO: 1070349 - RNA, 22 nt, Human
cuguccuaugaguacucacuag

SEQ ID NO: 1070350 - RNA, 22 nt, Human
uggcugagggcacuaugaagcc

SEQ ID NO: 1070351 - RNA, 22 nt, Human
cugggagcccgcguccuggugg

SEQ ID NO: 1070352 - RNA, 22 nt, Human
ggcugccuacuuucccagaguu

SEQ ID NO: 1070353 - RNA, 22 nt, Human
gacauuuaaggcagucacuuaa

SEQ ID NO: 1070354 - RNA, 22 nt, Human
gaggaacagagggcaaggccag

SEQ ID NO: 1070355 - RNA, 22 nt, Human
ucaggaagaagacggggcagga

SEQ ID NO: 1070356 - RNA, 22 nt, Human
caggguggggaaauagcgcccu

SEQ ID NO: 1070357 - RNA, 23 nt, Human
agcagcugugguuuaccuuagua

SEQ ID NO: 1070358 - RNA, 22 nt, Human
ggaagaggcucucauugagggc

SEQ ID NO: 1070359 - RNA, 22 nt, Human
auugaaauugaugaaauucuug

SEQ ID NO: 1070360 - RNA, 22 nt, Human
aggcaggcugcuauggaguaga

SEQ ID NO: 1070361 - RNA, 22 nt, Human
acagcagagccugguacuuacu

SEQ ID NO: 1070362 - RNA, 22 nt, Human
gugccugccccacuccucagca

SEQ ID NO: 1070363 - RNA, 21 nt, Human
uuguaaagguuuagaagaaug

SEQ ID NO: 1070364 - RNA, 22 nt, Human
gaugcaggauagcuucacccag

SEQ ID NO: 1070365 - RNA, 23 nt, Human
aaacaugcagcacaugaaugcua

SEQ ID NO: 1070366 - RNA, 22 nt, Human
cgggcagauugggaagguucau

SEQ ID NO: 1070367 - RNA, 22 nt, Human
ggcucagguugggucacaugac

SEQ ID NO: 1070368 - RNA, 23 nt, Human
gcugacugugaaauucuggagcu

SEQ ID NO: 1070369 - RNA, 22 nt, Human
gugggcuguuguucccuguucu

SEQ ID NO: 1070370 - RNA, 22 nt, Human
auuauucagucuuguaaggagu

SEQ ID NO: 1070371 - RNA, 22 nt, Human
ccuuucucauuuuaagcauuag

SEQ ID NO: 1070372 - RNA, 22 nt, Human
ugcuucugaaguggaugggugc

SEQ ID NO: 1070373 - RNA, 22 nt, Human
uuuuucaucugauugauaacuc

SEQ ID NO: 1070374 - RNA, 22 nt, Human
ucauuucuccgaccugcugucc

SEQ ID NO: 1070375 - RNA, 21 nt, Human
acagcagagaucaagacuaag

SEQ ID NO: 1070376 - RNA, 22 nt, Human
gccaggaaauucaugccagauc

SEQ ID NO: 1070377 - RNA, 22 nt, Human
caggccucuccuuagucuggca

SEQ ID NO: 1070378 - RNA, 22 nt, Human
ucuaaacacuaagucuugaugc

SEQ ID NO: 1070379 - RNA, 22 nt, Human
aggcagagagcaguggccgucu

SEQ ID NO: 1070380 - RNA, 22 nt, Human
caggcucccacaagcucccagc

SEQ ID NO: 1070381 - RNA, 22 nt, Human
uccugccucacaguugaaguuu

SEQ ID NO: 1070382 - RNA, 22 nt, Human
agcagccaagguaaccugugcu

SEQ ID NO: 1070383 - RNA, 20 nt, Human
aauuuuaucuccauccuuug

SEQ ID NO: 1070384 - RNA, 22 nt, Human
cagaguucaaagccugcuggga

SEQ ID NO: 1070385 - RNA, 22 nt, Human
ccagggcugcugugggacucca

SEQ ID NO: 1070386 - RNA, 22 nt, Human
guuuuuccugcugacuuggguc

SEQ ID NO: 1070387 - RNA, 22 nt, Human
cucaggauguacuacagaaggc

SEQ ID NO: 1070388 - RNA, 22 nt, Human
uggggucugaguaucugcauuu

SEQ ID NO: 1070389 - RNA, 22 nt, Human
cauggccuugagugacugcacu

SEQ ID NO: 1070390 - RNA, 21 nt, Human
ggguccugggaugggauccag

SEQ ID NO: 1070391 - RNA, 21 nt, Human
gugucaugguugacuuuggca

SEQ ID NO: 1070392 - RNA, 22 nt, Human
uauuguaucuuaccacauguau

SEQ ID NO: 1070393 - RNA, 21 nt, Human
aggaggaacccguggcugggc

SEQ ID NO: 1070394 - RNA, 22 nt, Human
gcccaggaagugacucagaugu

SEQ ID NO: 1070395 - RNA, 22 nt, Human
uaauugaaaucauuucaauuca

SEQ ID NO: 1070396 - RNA, 22 nt, Human
uccaauauucauuaaaaugcag

SEQ ID NO: 1070397 - RNA, 22 nt, Human
aaucuuaagcugaauucucucc

SEQ ID NO: 1070398 - RNA, 22 nt, Human
ucagaacauugacauucuuauu

SEQ ID NO: 1070399 - RNA, 22 nt, Human
ccuuuucugaaccacuuaaaua

SEQ ID NO: 1070400 - RNA, 22 nt, Human
caggcugccgugaagcaggccu

SEQ ID NO: 1070401 - RNA, 22 nt, Human
acacagggaggaggugcugugc

SEQ ID NO: 1070402 - RNA, 22 nt, Human
cagcuuuuaggacugugagaaa

SEQ ID NO: 1070403 - RNA, 22 nt, Human
ggcccagccucagacaugcccu

SEQ ID NO: 1070404 - RNA, 21 nt, Human
cucuuuguggcaauguauuuu

SEQ ID NO: 1070405 - RNA, 20 nt, Human
cagcagagacccauggggag

SEQ ID NO: 1070406 - RNA, 20 nt, Human
aaaauauguauaacucuucu

SEQ ID NO: 1070407 - RNA, 22 nt, Human
cagggccagagagggcuggcug

SEQ ID NO: 1070408 - RNA, 22 nt, Human
agccaguguuaagugacugguu

SEQ ID NO: 1070409 - RNA, 22 nt, Human
uaacagcaguccucuucucaug

SEQ ID NO: 1070410 - RNA, 22 nt, Human
gagcuggugugugcccgagcac

SEQ ID NO: 1070411 - RNA, 22 nt, Human
ggguccagaguugaagagguua

SEQ ID NO: 1070412 - RNA, 22 nt, Human
ggaggaagcacacggcuuguau

SEQ ID NO: 1070413 - RNA, 22 nt, Human
cucccuccucaaauaucuuugu

SEQ ID NO: 1070414 - RNA, 22 nt, Human
auaugggggggcgugcagagga

SEQ ID NO: 1070415 - RNA, 22 nt, Human
ccaggagcaggagcuggacaga

SEQ ID NO: 1070416 - RNA, 18 nt, Human
caagagcugcuccuggcc

SEQ ID NO: 1070417 - RNA, 22 nt, Human
cagaacagacuuaacagggcug

SEQ ID NO: 1070418 - RNA, 22 nt, Human
ccagagcuccagggcuacagaa

SEQ ID NO: 1070419 - RNA, 22 nt, Human
cccaggaagguggucuguggcu

SEQ ID NO: 1070420 - RNA, 22 nt, Human
gcucugagucucagcuaccaca

SEQ ID NO: 1070421 - RNA, 22 nt, Human
uauucaugucggcugaaaaagc

SEQ ID NO: 1070422 - RNA, 22 nt, Human
uccugccuguuuaccuguacuu

SEQ ID NO: 1070423 - RNA, 19 nt, Human
ggcuggaguggccaucugu

SEQ ID NO: 1070424 - RNA, 22 nt, Human
ugaugaaauguugaggcaguga

SEQ ID NO: 1070425 - RNA, 22 nt, Human
ccauaagguuuggggccaugca

SEQ ID NO: 1070426 - RNA, 22 nt, Human
cugaggaggggccugagugaga

SEQ ID NO: 1070427 - RNA, 18 nt, Human
aggcaggcuggagugacu

SEQ ID NO: 1070428 - RNA, 22 nt, Human
cccagaguauuugugauguuag

SEQ ID NO: 1070429 - RNA, 22 nt, Human
ugcccagcacugugccagucac

SEQ ID NO: 1070430 - RNA, 22 nt, Human
uuuaaauguguucuuaguagcu

SEQ ID NO: 1070431 - RNA, 22 nt, Human
auuuauuaagcaucugcuaugu

SEQ ID NO: 1070432 - RNA, 22 nt, Human
ugagaaagccuuuagucccagg

SEQ ID NO: 1070433 - RNA, 22 nt, Human
aguaugaauugcuuugccugua

SEQ ID NO: 1070434 - RNA, 22 nt, Human
agucaccaucuguggcagccug

SEQ ID NO: 1070435 - RNA, 22 nt, Human
ucagagcucaugagcagagcca

SEQ ID NO: 1070436 - RNA, 22 nt, Human
acaagagauuaucuacagauga

SEQ ID NO: 1070437 - RNA, 22 nt, Human
agagggcauuaacucugucuug

SEQ ID NO: 1070438 - RNA, 22 nt, Human
acugucugcaaaacucauacuc

SEQ ID NO: 1070439 - RNA, 22 nt, Human
ucagcugcucaaauuuauguca

SEQ ID NO: 1070440 - RNA, 22 nt, Human
aagugccugaccuagccuggag

SEQ ID NO: 1070441 - RNA, 22 nt, Human
uugcaggacaaugauggucccu

SEQ ID NO: 1070442 - RNA, 22 nt, Human
acagagcaauucuuggguguuu

SEQ ID NO: 1070443 - RNA, 22 nt, Human
uaguacuuaucucugucauugu

SEQ ID NO: 1070444 - RNA, 22 nt, Human
aguacauuuaguuuaugaacau

SEQ ID NO: 1070445 - RNA, 22 nt, Human
ugaaagcacaaguucuaacagg

SEQ ID NO: 1070446 - RNA, 22 nt, Human
acagugauugggguaucugcag

SEQ ID NO: 1070447 - RNA, 17 nt, Human
ugcauguccuuuguucc

SEQ ID NO: 1070448 - RNA, 22 nt, Human
ccaggcugaauauguuccaggg

SEQ ID NO: 1070449 - RNA, 22 nt, Human
cagaguggagauguguguggaa

SEQ ID NO: 1070450 - RNA, 22 nt, Human
uguaaaaggaaaucaaagcacu

SEQ ID NO: 1070451 - RNA, 22 nt, Human
auugugaauaaugcugcaauaa

SEQ ID NO: 1070452 - RNA, 22 nt, Human
agggugcagaaggagccuagga

SEQ ID NO: 1070453 - RNA, 22 nt, Human
uagccuucucaagacaaaguug

SEQ ID NO: 1070454 - RNA, 22 nt, Human
uuggaauuugcuucagcuaaua

SEQ ID NO: 1070455 - RNA, 22 nt, Human
uucaaacagaugacucugcucu

SEQ ID NO: 1070456 - RNA, 22 nt, Human
gccugugcuguucccucugcca

SEQ ID NO: 1070457 - RNA, 21 nt, Human
aucccagcacccaggagugca

SEQ ID NO: 1070458 - RNA, 23 nt, Human
ggcacugaagcuacaauggugag

SEQ ID NO: 1070459 - RNA, 21 nt, Human
guacacacagguggaugggcu

SEQ ID NO: 1070460 - RNA, 22 nt, Human
ugcaaacuauugguagagaugg

SEQ ID NO: 1070461 - RNA, 22 nt, Human
gcuaucuuucugcaccauaauu

SEQ ID NO: 1070462 - RNA, 22 nt, Human
cacccagccuucacacaggagu

SEQ ID NO: 1070463 - RNA, 19 nt, Human
gaaggcugaaaugaagcac

SEQ ID NO: 1070464 - RNA, 22 nt, Human
cagcugccaugacauguccugc

SEQ ID NO: 1070465 - RNA, 19 nt, Human
cagaacagaggucauggcc

SEQ ID NO: 1070466 - RNA, 22 nt, Human
auaauauugagucaggaccuga

SEQ ID NO: 1070467 - RNA, 22 nt, Human
cccagaguuggucaggggaccc

SEQ ID NO: 1070468 - RNA, 20 nt, Human
gucuuuauguuuuaugaccu

SEQ ID NO: 1070469 - RNA, 22 nt, Human
uucuagaugauaaaccagcagc

SEQ ID NO: 1070470 - RNA, 22 nt, Human
cuuccaauagcaacaaagauua

SEQ ID NO: 1070471 - RNA, 22 nt, Human
ggugggaaggggccagugugcg

SEQ ID NO: 1070472 - RNA, 22 nt, Human
uucacacacagcuuccuauugu

SEQ ID NO: 1070473 - RNA, 16 nt, Human
gggcugggggauucug

SEQ ID NO: 1070474 - RNA, 22 nt, Human
cacaggggcaaacuguagggga

SEQ ID NO: 1070475 - RNA, 22 nt, Human
ggugaggggagagugaaagaaa

SEQ ID NO: 1070476 - RNA, 22 nt, Human
cugucauuuaagacauucugga

SEQ ID NO: 1070477 - RNA, 22 nt, Human
cucucugaggcaggccuguggg

SEQ ID NO: 1070478 - RNA, 22 nt, Human
auauuauucuaguaacagugau

SEQ ID NO: 1070479 - RNA, 22 nt, Human
ccagcagaagcucccgcugggu

SEQ ID NO: 1070480 - RNA, 22 nt, Human
aggggugauuugggacaggaca

SEQ ID NO: 1070481 - RNA, 22 nt, Human
ggcucaagcagucugccugccu

SEQ ID NO: 1070482 - RNA, 22 nt, Human
ugcagaaguauuccaggcccca

SEQ ID NO: 1070483 - RNA, 22 nt, Human
aauggcagaggcaaagauggua

SEQ ID NO: 1070484 - RNA, 22 nt, Human
uaacaauuugcuucauuuguuu

SEQ ID NO: 1070485 - RNA, 22 nt, Human
uauuauuaaauggcagaauuuu

SEQ ID NO: 1070486 - RNA, 22 nt, Human
uuaguuuucccaucuuuauggu

SEQ ID NO: 1070487 - RNA, 22 nt, Human
uaagaacaagauguuccuguuu

SEQ ID NO: 1070488 - RNA, 19 nt, Human
augauggucccauucaccu

SEQ ID NO: 1070489 - RNA, 22 nt, Human
ucauauuuaggccuuuaauuca

SEQ ID NO: 1070490 - RNA, 22 nt, Human
cagcccaggccgacaguuccuc

SEQ ID NO: 1070491 - RNA, 22 nt, Human
gcagaggagaugaagauacuuu

SEQ ID NO: 1070492 - RNA, 23 nt, Human
cccuggaguaaauucuuggaagg

SEQ ID NO: 1070493 - RNA, 22 nt, Human
cauggcagagccugcagguggg

SEQ ID NO: 1070494 - RNA, 22 nt, Human
cucaggaggccauucucaaggu

SEQ ID NO: 1070495 - RNA, 21 nt, Human
guggcucugccaggacugaaa

SEQ ID NO: 1070496 - RNA, 22 nt, Human
aagagccuggcugcuaggcuca

SEQ ID NO: 1070497 - RNA, 21 nt, Human
ucucuggaguuagcagagaga

SEQ ID NO: 1070498 - RNA, 22 nt, Human
cagggcucaucugugugaccag

SEQ ID NO: 1070499 - RNA, 22 nt, Human
agccccuuccaguucucagauc

SEQ ID NO: 1070500 - RNA, 16 nt, Human
gaaggagauucagaaa

SEQ ID NO: 1070501 - RNA, 21 nt, Human
agggagcuauuuauaguaagc

SEQ ID NO: 1070502 - RNA, 22 nt, Human
uuucacauaaauggaguaaaga

SEQ ID NO: 1070503 - RNA, 22 nt, Human
caaggccacuccagagacuggu

SEQ ID NO: 1070504 - RNA, 22 nt, Human
augaccagccgagauaaacaga

SEQ ID NO: 1070505 - RNA, 22 nt, Human
ugggcagacgcuguuggaaggc

SEQ ID NO: 1070506 - RNA, 22 nt, Human
gggagcuggagcuggaagacuc

SEQ ID NO: 1070507 - RNA, 22 nt, Human
caggucuuuucuacugguggag

SEQ ID NO: 1070508 - RNA, 22 nt, Human
gugcuuaaccuaguuucuagua

SEQ ID NO: 1070509 - RNA, 22 nt, Human
ggcuccuguggcaagacagcuu

SEQ ID NO: 1070510 - RNA, 22 nt, Human
augcugagacuggagcagcugg

SEQ ID NO: 1070511 - RNA, 22 nt, Human
uuagcucagaaaauuuaaacuu

SEQ ID NO: 1070512 - RNA, 22 nt, Human
aaauagaaaccaacaaggucag

SEQ ID NO: 1070513 - RNA, 22 nt, Human
acagauauaugauuguguaaau

SEQ ID NO: 1070514 - RNA, 22 nt, Human
gccccuggcuggccagcuccuc

SEQ ID NO: 1070515 - RNA, 22 nt, Human
cuucuuuaauguauacaaaaga

SEQ ID NO: 1070516 - RNA, 22 nt, Human
ucaggcucugccaccuagauua

SEQ ID NO: 1070517 - RNA, 22 nt, Human
ccugcuucagggaugauggcac

SEQ ID NO: 1070518 - RNA, 22 nt, Human
gcaggcugcugagauccuuagg

SEQ ID NO: 1070519 - RNA, 22 nt, Human
uagaaaauagggccuguggagc

SEQ ID NO: 1070520 - RNA, 22 nt, Human
aggagagaauguuccaggcuug

SEQ ID NO: 1070521 - RNA, 21 nt, Human
acucaggagacuaacuauguc

SEQ ID NO: 1070522 - RNA, 22 nt, Human
ugcucugggcaacagccucccu

SEQ ID NO: 1070523 - RNA, 22 nt, Human
uucucagagcacugcugacaaa

SEQ ID NO: 1070524 - RNA, 22 nt, Human
uuauuacuguauuaauccagag

SEQ ID NO: 1070525 - RNA, 22 nt, Human
caaacaucugcaccuugaccgg

SEQ ID NO: 1070526 - RNA, 22 nt, Human
ccaucaguuuuaucugacaaaa

SEQ ID NO: 1070527 - RNA, 22 nt, Human
uggcagcaaguucuugggaggu

SEQ ID NO: 1070528 - RNA, 22 nt, Human
auauacuuggagacuaucauug

SEQ ID NO: 1070529 - RNA, 22 nt, Human
agcacuuuagaauuuagaguug

SEQ ID NO: 1070530 - RNA, 22 nt, Human
uacacagaggcugaugucuuag

SEQ ID NO: 1070531 - RNA, 22 nt, Human
cugagccagggccacacaugga

SEQ ID NO: 1070532 - RNA, 22 nt, Human
ucccugcacagccgagccaugc

SEQ ID NO: 1070533 - RNA, 22 nt, Human
uuucaguguuaugacuuucauu

SEQ ID NO: 1070534 - RNA, 22 nt, Human
uuagaaaggaaucuucauuuca

SEQ ID NO: 1070535 - RNA, 22 nt, Human
aggcaggcacuccggaaguguc

SEQ ID NO: 1070536 - RNA, 19 nt, Human
ugcagaagacacaguggug

SEQ ID NO: 1070537 - RNA, 22 nt, Human
uuaacaugucuugacuucaucu

SEQ ID NO: 1070538 - RNA, 22 nt, Human
caagaauagcuaccucccauau

SEQ ID NO: 1070539 - RNA, 22 nt, Human
gagaggcugguaaagucugaac

SEQ ID NO: 1070540 - RNA, 22 nt, Human
uuacagauggaucuagcaaaau

SEQ ID NO: 1070541 - RNA, 21 nt, Human
aggcucagcagguguauaaag

SEQ ID NO: 1070542 - RNA, 22 nt, Human
cagcagcucccauccgcugagc

SEQ ID NO: 1070543 - RNA, 20 nt, Human
ugggccucuggugccucugg

SEQ ID NO: 1070544 - RNA, 22 nt, Human
gaagaauauauaaugauuuugu

SEQ ID NO: 1070545 - RNA, 22 nt, Human
gcagacagcauguugggcuauu

SEQ ID NO: 1070546 - RNA, 22 nt, Human
agcaggugguaggcagucagca

SEQ ID NO: 1070547 - RNA, 22 nt, Human
uaaaaguauacuuucaaaggag

SEQ ID NO: 1070548 - RNA, 22 nt, Human
ggagugaaguggcgcgaucucg

SEQ ID NO: 1070549 - RNA, 22 nt, Human
ccugucuguccucucaugagcc

SEQ ID NO: 1070550 - RNA, 22 nt, Human
uuauuuguaaggcagggccagu

SEQ ID NO: 1070551 - RNA, 22 nt, Human
ggcuucaccaggugcaugcaug

SEQ ID NO: 1070552 - RNA, 22 nt, Human
gccagccauaggccagcacugg

SEQ ID NO: 1070553 - RNA, 22 nt, Human
aagauauucaaagauuuauuag

SEQ ID NO: 1070554 - RNA, 16 nt, Human
agcagguguauagugu

SEQ ID NO: 1070555 - RNA, 22 nt, Human
cuggcucagacagcugugcagu

SEQ ID NO: 1070556 - RNA, 22 nt, Human
ucuuugcaaaauacaacaaugg

SEQ ID NO: 1070557 - RNA, 22 nt, Human
uacuguuuucuuuauaguacag

SEQ ID NO: 1070558 - RNA, 22 nt, Human
ugauucaucagaauaggaguuu

SEQ ID NO: 1070559 - RNA, 22 nt, Human
ggagcugggguuggcaucuucc

SEQ ID NO: 1070560 - RNA, 22 nt, Human
agccaggcugcaguuggcuggc

SEQ ID NO: 1070561 - RNA, 22 nt, Human
ggaccacauugagagucauuaa

SEQ ID NO: 1070562 - RNA, 22 nt, Human
auucuacuuuguguaauuaucu

SEQ ID NO: 1070563 - RNA, 22 nt, Human
agaaagggaacuggcaaagcca

SEQ ID NO: 1070564 - RNA, 22 nt, Human
cagcugguagguagcagauuug

SEQ ID NO: 1070565 - RNA, 22 nt, Human
uacagagagauaaguguaaaag

SEQ ID NO: 1070566 - RNA, 22 nt, Human
ucaggagggugacaggcccugg

SEQ ID NO: 1070567 - RNA, 22 nt, Human
uuaaagggccgauuuccaggcc

SEQ ID NO: 1070568 - RNA, 22 nt, Human
uauuuguuucuaguggcagcaa

SEQ ID NO: 1070569 - RNA, 22 nt, Human
ugaaaaugcccucuaugucuca

SEQ ID NO: 1070570 - RNA, 22 nt, Human
ugugacagaucuuuaaauaaug

SEQ ID NO: 1070571 - RNA, 22 nt, Human
caugaacagcuaacauuuuggg

SEQ ID NO: 1070572 - RNA, 22 nt, Human
aucuaaacuauaguaccuaguc

SEQ ID NO: 1070573 - RNA, 22 nt, Human
cugagcccgggugcucuacccc

SEQ ID NO: 1070574 - RNA, 22 nt, Human
acaaacagcuaacauauguuaa

SEQ ID NO: 1070575 - RNA, 22 nt, Human
cugggccuggagcccacgagcc

SEQ ID NO: 1070576 - RNA, 22 nt, Human
ugcuagugugugagauguucaa

SEQ ID NO: 1070577 - RNA, 22 nt, Human
uauugaaauccauuacguucuu

SEQ ID NO: 1070578 - RNA, 22 nt, Human
aauccuagaaauuuauuugaag

SEQ ID NO: 1070579 - RNA, 22 nt, Human
gcaaaggcuagagacacaggga

SEQ ID NO: 1070580 - RNA, 17 nt, Human
cugagccccgggcagcu

SEQ ID NO: 1070581 - RNA, 22 nt, Human
cagccaggagcucccccugcuc

SEQ ID NO: 1070582 - RNA, 22 nt, Human
agauuacagaagaauaaguaga

SEQ ID NO: 1070583 - RNA, 22 nt, Human
ugauccuauuucaguguauguu

SEQ ID NO: 1070584 - RNA, 22 nt, Human
cagagauuauuauaacuaauua

SEQ ID NO: 1070585 - RNA, 22 nt, Human
cugccuguuagucuagcaguua

SEQ ID NO: 1070586 - RNA, 22 nt, Human
gcucugucaacagcuagcugug

SEQ ID NO: 1070587 - RNA, 22 nt, Human
aucuacaacggguggaguaggg

SEQ ID NO: 1070588 - RNA, 22 nt, Human
uggaaagaugaagauguuuaag

SEQ ID NO: 1070589 - RNA, 22 nt, Human
gagcugcacaucugaggcuaau

SEQ ID NO: 1070590 - RNA, 22 nt, Human
ucgccagggaugcuguaaggaa

SEQ ID NO: 1070591 - RNA, 22 nt, Human
auggcccaggccuccuguggcu

SEQ ID NO: 1070592 - RNA, 22 nt, Human
ggccucuggcaggcaggcccuc

SEQ ID NO: 1070593 - RNA, 22 nt, Human
ugaaaucuuauacuuugguagu

SEQ ID NO: 1070594 - RNA, 22 nt, Human
cagaccugggucccuggccugu

SEQ ID NO: 1070595 - RNA, 22 nt, Human
ggagaagcaggugcuuuggguc

SEQ ID NO: 1070596 - RNA, 22 nt, Human
ccaaaauguuugaaugcaugug

SEQ ID NO: 1070597 - RNA, 22 nt, Human
agccugagugcuuaggacuguu

SEQ ID NO: 1070598 - RNA, 22 nt, Human
acaugaggaacucaggagucac

SEQ ID NO: 1070599 - RNA, 22 nt, Human
acauuucagugagcuauugaag

SEQ ID NO: 1070600 - RNA, 22 nt, Human
uugagaagaggcuuuguaggaa

SEQ ID NO: 1070601 - RNA, 22 nt, Human
gaaaucuccaaucuuuucuuua

SEQ ID NO: 1070602 - RNA, 18 nt, Human
cugccuguugcugagagg

SEQ ID NO: 1070603 - RNA, 22 nt, Human
guguuacaaaucaccugugcug

SEQ ID NO: 1070604 - RNA, 20 nt, Human
uucuacaaaacugauucuga

SEQ ID NO: 1070605 - RNA, 22 nt, Human
ucucagagauguuagggaagag

SEQ ID NO: 1070606 - RNA, 20 nt, Human
gcugcucuccacggucugca

SEQ ID NO: 1070607 - RNA, 22 nt, Human
ccugggcagggagaccaggcuc

SEQ ID NO: 1070608 - RNA, 22 nt, Human
caucugccuaaguggcccuguu

SEQ ID NO: 1070609 - RNA, 21 nt, Human
acagcagacaggcuuaggacc

SEQ ID NO: 1070610 - RNA, 22 nt, Human
aagcagcuuaaauuagagccug

SEQ ID NO: 1070611 - RNA, 22 nt, Human
acauuugauugaugaaucaaau

SEQ ID NO: 1070612 - RNA, 22 nt, Human
ugcucacagcccagaacauaau

SEQ ID NO: 1070613 - RNA, 22 nt, Human
aguuucuuuagauagaaaguuc

SEQ ID NO: 1070614 - RNA, 22 nt, Human
uuucucuguucucuaacuguaa

SEQ ID NO: 1070615 - RNA, 22 nt, Human
aggguaggaacugaguggaagg

SEQ ID NO: 1070616 - RNA, 22 nt, Human
uggauggggcagcuuaggugug

SEQ ID NO: 1070617 - RNA, 22 nt, Human
gaggcuggacgugcauuucuac

SEQ ID NO: 1070618 - RNA, 22 nt, Human
caguagccacuagacacaugua

SEQ ID NO: 1070619 - RNA, 19 nt, Human
uggaaaauggauugaauca

SEQ ID NO: 1070620 - RNA, 22 nt, Human
ucauuucaugucucaggcacug

SEQ ID NO: 1070621 - RNA, 22 nt, Human
aggugucugugaugggagcgau

SEQ ID NO: 1070622 - RNA, 22 nt, Human
uuacaauaccacaucaccucau

SEQ ID NO: 1070623 - RNA, 22 nt, Human
cgagcaugaugacggcuguggc

SEQ ID NO: 1070624 - RNA, 22 nt, Human
uggcagcaguagccaccccagc

SEQ ID NO: 1070625 - RNA, 22 nt, Human
cuuguaaaugcagauucugauu

SEQ ID NO: 1070626 - RNA, 22 nt, Human
ggcccaaggcccaggucgagcu

SEQ ID NO: 1070627 - RNA, 22 nt, Human
uucuucaaaauccagcaugauu

SEQ ID NO: 1070628 - RNA, 22 nt, Human
ucuucaguauuuggauaacauu

SEQ ID NO: 1070629 - RNA, 20 nt, Human
aauaaacuacugagagaugu

SEQ ID NO: 1070630 - RNA, 22 nt, Human
uuugcagucaaauuugcuaaau

SEQ ID NO: 1070631 - RNA, 22 nt, Human
acagugucaugucguguucccc

SEQ ID NO: 1070632 - RNA, 21 nt, Human
ggaugccacgaagcaccagga

SEQ ID NO: 1070633 - RNA, 22 nt, Human
uaaacaagcugucugauauucu

SEQ ID NO: 1070634 - RNA, 22 nt, Human
acacggaaucccuuuugugaca

SEQ ID NO: 1070635 - RNA, 22 nt, Human
gcacagagucacuagcuaagca

SEQ ID NO: 1070636 - RNA, 22 nt, Human
caagagcugugaccucauucac

SEQ ID NO: 1070637 - RNA, 22 nt, Human
uggcugccuagucccucagccu

SEQ ID NO: 1070638 - RNA, 23 nt, Human
ccaggaagaggccauccacaguc

SEQ ID NO: 1070639 - RNA, 22 nt, Human
caggcuggagugcaauggugcu

SEQ ID NO: 1070640 - RNA, 22 nt, Human
agcagggcaaagucaggcuaac

SEQ ID NO: 1070641 - RNA, 22 nt, Human
gcaggaagccuuaccaagccca

SEQ ID NO: 1070642 - RNA, 22 nt, Human
aaggaagaaaugaauaggugga

SEQ ID NO: 1070643 - RNA, 22 nt, Human
uauuucuuguuauucucguuga

SEQ ID NO: 1070644 - RNA, 22 nt, Human
ugggcugcagggguugagagcu

SEQ ID NO: 1070645 - RNA, 22 nt, Human
ucucuggaguauaaccagggau

SEQ ID NO: 1070646 - RNA, 22 nt, Human
cagccagccucucaaccaugca

SEQ ID NO: 1070647 - RNA, 21 nt, Human
uuucucauaaaauacucauua

SEQ ID NO: 1070648 - RNA, 22 nt, Human
acacugugcagauucccuguga

SEQ ID NO: 1070649 - RNA, 22 nt, Human
agucaggauaugccuugugggc

SEQ ID NO: 1070650 - RNA, 22 nt, Human
uaaugccuuaugucaaauguaa

SEQ ID NO: 1070651 - RNA, 22 nt, Human
gagcccucucuguaggcaagua

SEQ ID NO: 1070652 - RNA, 22 nt, Human
gaauucugguuuugaaaugaau

SEQ ID NO: 1070653 - RNA, 22 nt, Human
aggccucugggccugcggguuu

SEQ ID NO: 1070654 - RNA, 19 nt, Human
ugaauuaaagauuaaaguc

SEQ ID NO: 1070655 - RNA, 22 nt, Human
gacauacaagcugguaccuccu

SEQ ID NO: 1070656 - RNA, 22 nt, Human
uccaggaggguuuucugccuuc

SEQ ID NO: 1070657 - RNA, 22 nt, Human
agaacacacugggggaaacaag

SEQ ID NO: 1070658 - RNA, 22 nt, Human
ggagcugagguaacagugagug

SEQ ID NO: 1070659 - RNA, 22 nt, Human
ugcccugugugugcaagcacug

SEQ ID NO: 1070660 - RNA, 22 nt, Human
acuggcaguuugagaaugcauu

SEQ ID NO: 1070661 - RNA, 20 nt, Human
cauuccugaggaauucaugu

SEQ ID NO: 1070662 - RNA, 22 nt, Human
cccuccccacaaagcuucacac

SEQ ID NO: 1070663 - RNA, 22 nt, Human
agacaauauauaauuuuaguug

SEQ ID NO: 1070664 - RNA, 22 nt, Human
acugagcucuugacugggaguu

SEQ ID NO: 1070665 - RNA, 22 nt, Human
uacauacacaaaugcugaaugg

SEQ ID NO: 1070666 - RNA, 22 nt, Human
uccuucagugucccgcucaggu

SEQ ID NO: 1070667 - RNA, 22 nt, Human
uccaggaauuuccccuuuccug

SEQ ID NO: 1070668 - RNA, 22 nt, Human
gagaccaggaaguacagcagcc

SEQ ID NO: 1070669 - RNA, 22 nt, Human
ucaguuuauagauauugcugau

SEQ ID NO: 1070670 - RNA, 22 nt, Human
agucuucagcauagcauauggc

SEQ ID NO: 1070671 - RNA, 22 nt, Human
gaagagaugacaaaggagcaug

SEQ ID NO: 1070672 - RNA, 22 nt, Human
guuugcaaauuauguuaaaagu

SEQ ID NO: 1070673 - RNA, 22 nt, Human
ucuggagccuuggaugggaaag

SEQ ID NO: 1070674 - RNA, 19 nt, Human
ggccaggcugacugugguc

SEQ ID NO: 1070675 - RNA, 22 nt, Human
uagucuuaaguaauucauggaa

SEQ ID NO: 1070676 - RNA, 22 nt, Human
ugaggccucauuuagggagagg

SEQ ID NO: 1070677 - RNA, 23 nt, Human
agaggccaacuucuugccccucc

SEQ ID NO: 1070678 - RNA, 22 nt, Human
uaugauaugcacuuuaucagaa

SEQ ID NO: 1070679 - RNA, 22 nt, Human
caagagcuuuagaaaugcucau

SEQ ID NO: 1070680 - RNA, 22 nt, Human
ucuucucaguuucucuaggaug

SEQ ID NO: 1070681 - RNA, 22 nt, Human
caggagugaguuggggucuaca

SEQ ID NO: 1070682 - RNA, 22 nt, Human
uagcuagaagguugaaagcagg

SEQ ID NO: 1070683 - RNA, 22 nt, Human
gagcugcuucugugugccgggu

SEQ ID NO: 1070684 - RNA, 22 nt, Human
cuggagggggaaauguucauug

SEQ ID NO: 1070685 - RNA, 22 nt, Human
agggucagguuaagggagucau

SEQ ID NO: 1070686 - RNA, 23 nt, Human
ugguucaagugagaaguaauguu

SEQ ID NO: 1070687 - RNA, 22 nt, Human
caggagacaauggcuguggggc

SEQ ID NO: 1070688 - RNA, 22 nt, Human
cgcagguguguuuucaggacua

SEQ ID NO: 1070689 - RNA, 21 nt, Human
agcagaacagucgagcacugc

SEQ ID NO: 1070690 - RNA, 22 nt, Human
aauacugucuuucacagauauu

SEQ ID NO: 1070691 - RNA, 22 nt, Human
uacauauuugucuuuguacugu

SEQ ID NO: 1070692 - RNA, 22 nt, Human
ggagucagccugucagagugua

SEQ ID NO: 1070693 - RNA, 22 nt, Human
gcugucugucucugucccacca

SEQ ID NO: 1070694 - RNA, 22 nt, Human
gaguuaaugaggccaagggcag

SEQ ID NO: 1070695 - RNA, 22 nt, Human
uuacaaguuucuggcuucaucc

SEQ ID NO: 1070696 - RNA, 15 nt, Human
cagucccagggaccc

SEQ ID NO: 1070697 - RNA, 22 nt, Human
ucuuugaaaagggagauagaaa

SEQ ID NO: 1070698 - RNA, 22 nt, Human
gccuccccaggggugucaugag

SEQ ID NO: 1070699 - RNA, 22 nt, Human
ggagccuugggcgcucucccau

SEQ ID NO: 1070700 - RNA, 22 nt, Human
aaugggcuuucuuggacaggag

SEQ ID NO: 1070701 - RNA, 22 nt, Human
uggugccauuagcccugcuguu

SEQ ID NO: 1070702 - RNA, 22 nt, Human
agcugccagggacugggcaugg

SEQ ID NO: 1070703 - RNA, 22 nt, Human
augaaugaugccaguugaaaug

SEQ ID NO: 1070704 - RNA, 22 nt, Human
aagccucaccuuuuagaagcua

SEQ ID NO: 1070705 - RNA, 18 nt, Human
caaauacuguugucuuau

SEQ ID NO: 1070706 - RNA, 22 nt, Human
agugggccuuagaagguucccu

SEQ ID NO: 1070707 - RNA, 22 nt, Human
aaaugucuuucaauagagaaau

SEQ ID NO: 1070708 - RNA, 22 nt, Human
caaauacugaguuuauuuucaa

SEQ ID NO: 1070709 - RNA, 22 nt, Human
uucuaaacugaaguauuuuaaa

SEQ ID NO: 1070710 - RNA, 22 nt, Human
ugcagagaagaggacaguucua

SEQ ID NO: 1070711 - RNA, 22 nt, Human
accuggcaugaagcaugccuua

SEQ ID NO: 1070712 - RNA, 23 nt, Human
gggauauggaccuuggaggaguc

SEQ ID NO: 1070713 - RNA, 22 nt, Human
guuucuuagguaaauucuuuga

SEQ ID NO: 1070714 - RNA, 22 nt, Human
cucugagacuuagcaucuacau

SEQ ID NO: 1070715 - RNA, 22 nt, Human
aggcacaguggcucacaccugu

SEQ ID NO: 1070716 - RNA, 22 nt, Human
augcuguguauuuuacucuuuc

SEQ ID NO: 1070717 - RNA, 22 nt, Human
uuauuuaauuuucucacucaga

SEQ ID NO: 1070718 - RNA, 22 nt, Human
ugaggcuuagagaagaugggau

SEQ ID NO: 1070719 - RNA, 22 nt, Human
uuucccaauugagagguucugu

SEQ ID NO: 1070720 - RNA, 22 nt, Human
ccugagccgagcgcucuuucuc

SEQ ID NO: 1070721 - RNA, 22 nt, Human
gggcagugguccaggcuacagc

SEQ ID NO: 1070722 - RNA, 18 nt, Human
ucacagaauauugagugg

SEQ ID NO: 1070723 - RNA, 22 nt, Human
ugaagcagcaaaugaugggaga

SEQ ID NO: 1070724 - RNA, 20 nt, Human
uggugagagcaccugauggg

SEQ ID NO: 1070725 - RNA, 17 nt, Human
aggcuggccuucacagu

SEQ ID NO: 1070726 - RNA, 22 nt, Human
ccugggcucaagugaugguccc

SEQ ID NO: 1070727 - RNA, 22 nt, Human
ccugucucuguuaccacauuug

SEQ ID NO: 1070728 - RNA, 22 nt, Human
cugugcuggagaugggccagag

SEQ ID NO: 1070729 - RNA, 22 nt, Human
aaugagauggcaaugacuuaaa

SEQ ID NO: 1070730 - RNA, 22 nt, Human
uugcaccaaaugaguuaaaauu

SEQ ID NO: 1070731 - RNA, 22 nt, Human
gaggggcuggcuguggucccau

SEQ ID NO: 1070732 - RNA, 22 nt, Human
ugaaauauuuagagaguaaguu

SEQ ID NO: 1070733 - RNA, 22 nt, Human
cauuucacuauucacuaaaagg

SEQ ID NO: 1070734 - RNA, 21 nt, Human
gcucccuggcugugugaccug

SEQ ID NO: 1070735 - RNA, 22 nt, Human
uuaacagacuugggauuuucua

SEQ ID NO: 1070736 - RNA, 22 nt, Human
uuaaauuauugagggauuguca

SEQ ID NO: 1070737 - RNA, 22 nt, Human
agggacugagcuaggaucuagu

SEQ ID NO: 1070738 - RNA, 22 nt, Human
acaucuuuauacuaguccuuga

SEQ ID NO: 1070739 - RNA, 22 nt, Human
augaaaauugacagcggaagua

SEQ ID NO: 1070740 - RNA, 22 nt, Human
ucacaucaacauuauagcauga

SEQ ID NO: 1070741 - RNA, 22 nt, Human
auuuccuaggguagaugucaca

SEQ ID NO: 1070742 - RNA, 22 nt, Human
gccuggcugccggccuuggcaa

SEQ ID NO: 1070743 - RNA, 20 nt, Human
uccugguggauacugcuuaa

SEQ ID NO: 1070744 - RNA, 22 nt, Human
gcaggagcuggaaagugauguu

SEQ ID NO: 1070745 - RNA, 22 nt, Human
augaggcuaugaauggggagau

SEQ ID NO: 1070746 - RNA, 22 nt, Human
auguguaaaaagugcuuaauau

SEQ ID NO: 1070747 - RNA, 22 nt, Human
aaaggauucucuugauuucagu

SEQ ID NO: 1070748 - RNA, 22 nt, Human
agcauggggcuccgcaaugaac

SEQ ID NO: 1070749 - RNA, 22 nt, Human
gagagucacugucugcauuucc

SEQ ID NO: 1070750 - RNA, 22 nt, Human
gcuucugcagccaaagaagccg

SEQ ID NO: 1070751 - RNA, 22 nt, Human
acacaucuccagccagcaggag

SEQ ID NO: 1070752 - RNA, 22 nt, Human
agcagccagaaagggcagucga

SEQ ID NO: 1070753 - RNA, 22 nt, Human
ucauuuguucucauucucuacu

SEQ ID NO: 1070754 - RNA, 22 nt, Human
cccacacacauuuaugauagga

SEQ ID NO: 1070755 - RNA, 22 nt, Human
uccugccuagcaggugaccuau

SEQ ID NO: 1070756 - RNA, 22 nt, Human
gcacggcuaauuuuuguauuuu

SEQ ID NO: 1070757 - RNA, 22 nt, Human
cagcuguuguuaugucugcagg

SEQ ID NO: 1070758 - RNA, 22 nt, Human
cucaagucuauugauaagugca

SEQ ID NO: 1070759 - RNA, 22 nt, Human
aggucauuccagccauuccccu

SEQ ID NO: 1070760 - RNA, 22 nt, Human
cugcggcuggggacagcuguug

SEQ ID NO: 1070761 - RNA, 22 nt, Human
gccugugugugaggacuggcug

SEQ ID NO: 1070762 - RNA, 22 nt, Human
guaaauauucccucgguuccua

SEQ ID NO: 1070763 - RNA, 22 nt, Human
uaugugcaguuugcucuuaaca

SEQ ID NO: 1070764 - RNA, 22 nt, Human
ggcugcuucucacucauuugca

SEQ ID NO: 1070765 - RNA, 22 nt, Human
agaaaucucaguaucucaggga

SEQ ID NO: 1070766 - RNA, 22 nt, Human
aagcagaguuagcuugucaccu

SEQ ID NO: 1070767 - RNA, 22 nt, Human
ggccuggaaugcuuuccuacca

SEQ ID NO: 1070768 - RNA, 22 nt, Human
caaagugcuaggauuacaggcc

SEQ ID NO: 1070769 - RNA, 22 nt, Human
ggcagcuccucucagcaaaaga

SEQ ID NO: 1070770 - RNA, 20 nt, Human
cccuccagcaaccaggacuu

SEQ ID NO: 1070771 - RNA, 22 nt, Human
ucagggcaagauugguuaauaa

SEQ ID NO: 1070772 - RNA, 18 nt, Human
ucugggcaaucucaguau

SEQ ID NO: 1070773 - RNA, 19 nt, Human
aggacccuuauccuggcuu

SEQ ID NO: 1070774 - RNA, 22 nt, Human
aagggccauaacuugcaguguu

SEQ ID NO: 1070775 - RNA, 22 nt, Human
caggcccucgcccgcagcgacc

SEQ ID NO: 1070776 - RNA, 18 nt, Human
gagaggcccggcugugcc

SEQ ID NO: 1070777 - RNA, 22 nt, Human
agccaggccagcugucuugagu

SEQ ID NO: 1070778 - RNA, 22 nt, Human
aaagagaaaaagaucccggcuc

SEQ ID NO: 1070779 - RNA, 22 nt, Human
ccagagaaagugaagcaaaugu

SEQ ID NO: 1070780 - RNA, 22 nt, Human
ucagccuggcaggauggccugg

SEQ ID NO: 1070781 - RNA, 22 nt, Human
augaaggauggcuggcugcccu

SEQ ID NO: 1070782 - RNA, 22 nt, Human
uacagaaauacugggggguucu

SEQ ID NO: 1070783 - RNA, 22 nt, Human
caaugauggcuaggcagcugcu

SEQ ID NO: 1070784 - RNA, 22 nt, Human
uuguauuuauauugaauagcuu

SEQ ID NO: 1070785 - RNA, 21 nt, Human
cauaugaaagaaguaucugac

SEQ ID NO: 1070786 - RNA, 22 nt, Human
ccugaagggacuccagagagca

SEQ ID NO: 1070787 - RNA, 22 nt, Human
agcagagcugcaguggccugcu

SEQ ID NO: 1070788 - RNA, 22 nt, Human
ucuuugauacagauguaagcug

SEQ ID NO: 1070789 - RNA, 22 nt, Human
ccauaagguugaaaacuguaca

SEQ ID NO: 1070790 - RNA, 21 nt, Human
ucaguaaaccuaaagauugua

SEQ ID NO: 1070791 - RNA, 19 nt, Human
auaaggcagugacuuuuuu

SEQ ID NO: 1070792 - RNA, 22 nt, Human
gccucugcggggcccgagcccg

SEQ ID NO: 1070793 - RNA, 22 nt, Human
aaggaagauauaucaagcuuaa

SEQ ID NO: 1070794 - RNA, 22 nt, Human
gccaaggccucugcaggaugag

SEQ ID NO: 1070795 - RNA, 22 nt, Human
auuuuguuauaggagcugaaau

SEQ ID NO: 1070796 - RNA, 22 nt, Human
agcucuggaagcccugguaguu

SEQ ID NO: 1070797 - RNA, 22 nt, Human
ucuucaucucagauuaacagga

SEQ ID NO: 1070798 - RNA, 22 nt, Human
aguauuuguugauugauaugaa

SEQ ID NO: 1070799 - RNA, 22 nt, Human
ggaggggauuuaguagaugcua

SEQ ID NO: 1070800 - RNA, 22 nt, Human
cagcugagucugagguucuuug

SEQ ID NO: 1070801 - RNA, 22 nt, Human
cagggugccucccgcucgccgg

SEQ ID NO: 1070802 - RNA, 21 nt, Human
gaugaugccauccuccaucuc

SEQ ID NO: 1070803 - RNA, 22 nt, Human
ccugcuggcguggcuggcgccc

SEQ ID NO: 1070804 - RNA, 17 nt, Human
ugaagaugcauggcagc

SEQ ID NO: 1070805 - RNA, 22 nt, Human
cagacuuucuggaagcuaaaaa

SEQ ID NO: 1070806 - RNA, 22 nt, Human
caaagcagagaacugucucauu

SEQ ID NO: 1070807 - RNA, 22 nt, Human
gagaauauauugaaguaguucc

SEQ ID NO: 1070808 - RNA, 22 nt, Human
aauagcuuuggucaccaucugg

SEQ ID NO: 1070809 - RNA, 22 nt, Human
caguacuuaacuuauaggagag

SEQ ID NO: 1070810 - RNA, 22 nt, Human
aggccugggcaagaaggggcgu

SEQ ID NO: 1070811 - RNA, 21 nt, Human
gagaugcuuuuuauucaaccc

SEQ ID NO: 1070812 - RNA, 22 nt, Human
ugucucagggcagcagcagggg

SEQ ID NO: 1070813 - RNA, 22 nt, Human
uuagggcaggcaugagagaacu

SEQ ID NO: 1070814 - RNA, 22 nt, Human
ggagugaguggccuugucacug

SEQ ID NO: 1070815 - RNA, 22 nt, Human
agagcuguagcuuccuagagcc

SEQ ID NO: 1070816 - RNA, 22 nt, Human
uccucugcuccaggcuggacuu

SEQ ID NO: 1070817 - RNA, 22 nt, Human
gcuccucugucaaaugagagug

SEQ ID NO: 1070818 - RNA, 18 nt, Human
cauuguacaaugcuuuau

SEQ ID NO: 1070819 - RNA, 18 nt, Human
agcaggugcuguuucuuu

SEQ ID NO: 1070820 - RNA, 22 nt, Human
caggagugcagguggugaggca

SEQ ID NO: 1070821 - RNA, 22 nt, Human
ugagcccagagaucugagcuau

SEQ ID NO: 1070822 - RNA, 22 nt, Human
auuuacacauucauaagauuuc

SEQ ID NO: 1070823 - RNA, 22 nt, Human
cugggccaucagaggggcugga

SEQ ID NO: 1070824 - RNA, 22 nt, Human
aggucauuuccuuagaggcaga

SEQ ID NO: 1070825 - RNA, 22 nt, Human
uggguaggggacguggaagaaa

SEQ ID NO: 1070826 - RNA, 22 nt, Human
ugcagugccucggcagugcagc

SEQ ID NO: 1070827 - RNA, 22 nt, Human
cuuucacagcuugaaaaguauu

SEQ ID NO: 1070828 - RNA, 22 nt, Human
cagaaacuagauuuagacacaa

SEQ ID NO: 1070829 - RNA, 22 nt, Human
agcugccugggcuuguacaccu

SEQ ID NO: 1070830 - RNA, 22 nt, Human
uuauagguccacugcaauuugc

SEQ ID NO: 1070831 - RNA, 22 nt, Human
ccauuguaaauucuguggaagu

SEQ ID NO: 1070832 - RNA, 22 nt, Human
caagauggagaagcagcaaggg

SEQ ID NO: 1070833 - RNA, 22 nt, Human
gggcuggugaggcugcccugca

SEQ ID NO: 1070834 - RNA, 22 nt, Human
ucaggccugcaggcuuccugga

SEQ ID NO: 1070835 - RNA, 22 nt, Human
aggcucagccccugggaggaga

SEQ ID NO: 1070836 - RNA, 22 nt, Human
auggaguucugccagcgcugcu

SEQ ID NO: 1070837 - RNA, 22 nt, Human
ggaagcugcauaacuagcgugg

SEQ ID NO: 1070838 - RNA, 23 nt, Human
gcccugcuacucacaagcugugu

SEQ ID NO: 1070839 - RNA, 22 nt, Human
aggucccugcagcagacugcca

SEQ ID NO: 1070840 - RNA, 22 nt, Human
uagagaaaagcagggaucagga

SEQ ID NO: 1070841 - RNA, 22 nt, Human
agcaggugacccaagcaggcug

SEQ ID NO: 1070842 - RNA, 22 nt, Human
uugcagagugguugugaggauu

SEQ ID NO: 1070843 - RNA, 22 nt, Human
ucccagccuuucuuucuccagc

SEQ ID NO: 1070844 - RNA, 22 nt, Human
aaauacugggcucaaaaggguu

SEQ ID NO: 1070845 - RNA, 22 nt, Human
cagggcugaggacacaaguaaa

SEQ ID NO: 1070846 - RNA, 17 nt, Human
uaucagaauguguuuac

SEQ ID NO: 1070847 - RNA, 22 nt, Human
ucugaaauagaagugucuuucu

SEQ ID NO: 1070848 - RNA, 22 nt, Human
ggccucugccucaucugggcac

SEQ ID NO: 1070849 - RNA, 22 nt, Human
ugugggccugggaaggugacac

SEQ ID NO: 1070850 - RNA, 22 nt, Human
uagauggcuuucugagguauuu

SEQ ID NO: 1070851 - RNA, 22 nt, Human
ggcugcagaggcgaucugaggu

SEQ ID NO: 1070852 - RNA, 22 nt, Human
acuuucaauuugcacuaaccua

SEQ ID NO: 1070853 - RNA, 22 nt, Human
ucagguggaauuaauuaagaga

SEQ ID NO: 1070854 - RNA, 22 nt, Human
guucacagguucucuuucuaag

SEQ ID NO: 1070855 - RNA, 22 nt, Human
gaaauacuguaaaguuauuauu

SEQ ID NO: 1070856 - RNA, 22 nt, Human
agauguggauccuaggguagaa

SEQ ID NO: 1070857 - RNA, 19 nt, Human
ggcagaagguguaggggga

SEQ ID NO: 1070858 - RNA, 22 nt, Human
accugccuucucaaggacauga

SEQ ID NO: 1070859 - RNA, 22 nt, Human
uggcgugcccuccagacuuggc

SEQ ID NO: 1070860 - RNA, 22 nt, Human
aggcugagucgggaggaucacu

SEQ ID NO: 1070861 - RNA, 22 nt, Human
aagaguuuucuauaaucuuggc

SEQ ID NO: 1070862 - RNA, 22 nt, Human
acugggccaggggcuuuggagc

SEQ ID NO: 1070863 - RNA, 22 nt, Human
acaguguucuugauauuacagu

SEQ ID NO: 1070864 - RNA, 22 nt, Human
uuacaacaaaggcacgugcaug

SEQ ID NO: 1070865 - RNA, 22 nt, Human
caggguccaucuuucaucacug

SEQ ID NO: 1070866 - RNA, 22 nt, Human
gccugugcuuaacugacgugag

SEQ ID NO: 1070867 - RNA, 22 nt, Human
uuagugaugacuagacuuuugu

SEQ ID NO: 1070868 - RNA, 19 nt, Human
acaaagcugugagcagcuu

SEQ ID NO: 1070869 - RNA, 20 nt, Human
auugucagccuucagaggag

SEQ ID NO: 1070870 - RNA, 22 nt, Human
gggaaguuugugggaggaauau

SEQ ID NO: 1070871 - RNA, 22 nt, Human
cuuuuauuuugaauuaagggcu

SEQ ID NO: 1070872 - RNA, 21 nt, Human
caucaacucuugugcucacac

SEQ ID NO: 1070873 - RNA, 22 nt, Human
acucaucagccucuaggaaaga

SEQ ID NO: 1070874 - RNA, 22 nt, Human
uagaaaacuaauacaugcuuga

SEQ ID NO: 1070875 - RNA, 22 nt, Human
aaauguaagucuuuguuucuua

SEQ ID NO: 1070876 - RNA, 22 nt, Human
augaguugaagcuacaagaggc

SEQ ID NO: 1070877 - RNA, 22 nt, Human
aggaacuagugcaacaggagcg

SEQ ID NO: 1070878 - RNA, 22 nt, Human
accagagcuggcagaguaucaa

SEQ ID NO: 1070879 - RNA, 20 nt, Human
aaguuacauuguauuguacc

SEQ ID NO: 1070880 - RNA, 22 nt, Human
uggaccugcuggaugggcaggu

SEQ ID NO: 1070881 - RNA, 22 nt, Human
caugagcugcugggagccuguc

SEQ ID NO: 1070882 - RNA, 22 nt, Human
aaggcagggaaaguggauuagg

SEQ ID NO: 1070883 - RNA, 22 nt, Human
ucaguguuaaucagugguaccu

SEQ ID NO: 1070884 - RNA, 22 nt, Human
acuuccagguuccacccaagac

SEQ ID NO: 1070885 - RNA, 22 nt, Human
ucauuuaauaauuuuugaguag

SEQ ID NO: 1070886 - RNA, 22 nt, Human
cggucaggugcagcguuggcac

SEQ ID NO: 1070887 - RNA, 22 nt, Human
aggcacugggggaugagcaagg

SEQ ID NO: 1070888 - RNA, 22 nt, Human
caaagucagcugccagucccaa

SEQ ID NO: 1070889 - RNA, 19 nt, Human
cuucagggaggggccaggc

SEQ ID NO: 1070890 - RNA, 22 nt, Human
uuucacauaaauauuaugccua

SEQ ID NO: 1070891 - RNA, 22 nt, Human
uuucuuauauucugucauuguu

SEQ ID NO: 1070892 - RNA, 22 nt, Human
gcugagccacccuugcuucccu

SEQ ID NO: 1070893 - RNA, 22 nt, Human
acaggcauugggauggagguug

SEQ ID NO: 1070894 - RNA, 22 nt, Human
ugggaagggucaguuucuucau

SEQ ID NO: 1070895 - RNA, 21 nt, Human
ucucuggaauuagaccauguu

SEQ ID NO: 1070896 - RNA, 22 nt, Human
gaugaaauucagaauugagggg

SEQ ID NO: 1070897 - RNA, 22 nt, Human
cccagccaaggugcugguguug

SEQ ID NO: 1070898 - RNA, 22 nt, Human
cucugagaggcugcccugccau

SEQ ID NO: 1070899 - RNA, 22 nt, Human
guguccucuuauugcucuuggc

SEQ ID NO: 1070900 - RNA, 22 nt, Human
ccuggcugcccauggacccucu

SEQ ID NO: 1070901 - RNA, 22 nt, Human
acagugaugagccggcugaggc

SEQ ID NO: 1070902 - RNA, 22 nt, Human
caggcacagagagaauaccuuu

SEQ ID NO: 1070903 - RNA, 22 nt, Human
aauuagaagcuguuagcaaaau

SEQ ID NO: 1070904 - RNA, 22 nt, Human
ucccuguccugggcaaucccag

SEQ ID NO: 1070905 - RNA, 22 nt, Human
uucaaacaguguagaauauaug

SEQ ID NO: 1070906 - RNA, 22 nt, Human
augcacaucacucugaagaaaa

SEQ ID NO: 1070907 - RNA, 22 nt, Human
acuuccuguuaugugugccucu

SEQ ID NO: 1070908 - RNA, 22 nt, Human
gcuuccaggucauucucacccu

SEQ ID NO: 1070909 - RNA, 22 nt, Human
gggcucagacaucccuccugga

SEQ ID NO: 1070910 - RNA, 23 nt, Human
ucauuucacagugagcuuccuag

SEQ ID NO: 1070911 - RNA, 22 nt, Human
ugcacacauuaaggauacacag

SEQ ID NO: 1070912 - RNA, 22 nt, Human
acaaaugugucuaauugugccu

SEQ ID NO: 1070913 - RNA, 22 nt, Human
uguuguuuucucauggagaaua

SEQ ID NO: 1070914 - RNA, 22 nt, Human
ccucuucugagugagacucccu

SEQ ID NO: 1070915 - RNA, 22 nt, Human
ccagguggcccugcccuacucu

SEQ ID NO: 1070916 - RNA, 22 nt, Human
ugcaggcucaucucaagaguag

SEQ ID NO: 1070917 - RNA, 23 nt, Human
aaacaaugucaucaggacuuggu

SEQ ID NO: 1070918 - RNA, 21 nt, Human
agagagaaggccauauggucc

SEQ ID NO: 1070919 - RNA, 22 nt, Human
auuagcuuuauuugaaauagga

SEQ ID NO: 1070920 - RNA, 22 nt, Human
aucaacaugaauuucucugaag

SEQ ID NO: 1070921 - RNA, 22 nt, Human
gcagugaagccagaucugaaau

SEQ ID NO: 1070922 - RNA, 22 nt, Human
caggaggcuuugggauccaagu

SEQ ID NO: 1070923 - RNA, 22 nt, Human
ccacagaggacaacugccuggc

SEQ ID NO: 1070924 - RNA, 20 nt, Human
gacauucauaguuauuacca

SEQ ID NO: 1070925 - RNA, 19 nt, Human
agggccugcagcucaagcu

SEQ ID NO: 1070926 - RNA, 22 nt, Human
uguuuuuacugugauccagaaa

SEQ ID NO: 1070927 - RNA, 22 nt, Human
acccaugggccaguuggggugg

SEQ ID NO: 1070928 - RNA, 22 nt, Human
gccucagcuguugcaggggccc

SEQ ID NO: 1070929 - RNA, 22 nt, Human
aauuuuauuagaaggcaagggg

SEQ ID NO: 1070930 - RNA, 22 nt, Human
ugggcaggaugcguugauucuu

SEQ ID NO: 1070931 - RNA, 22 nt, Human
cauugcccaguaggaucaccag

SEQ ID NO: 1070932 - RNA, 23 nt, Human
cuagggcaguauuucacagacac

SEQ ID NO: 1070933 - RNA, 22 nt, Human
uuugugugcaacgcauggaguc

SEQ ID NO: 1070934 - RNA, 22 nt, Human
agugcauauaugaagaguauga

SEQ ID NO: 1070935 - RNA, 22 nt, Human
gcccacacagcagauccuuugg

SEQ ID NO: 1070936 - RNA, 23 nt, Human
uaaagcaaagucaagugcacucc

SEQ ID NO: 1070937 - RNA, 22 nt, Human
cagccacguagcccuuggccgu

SEQ ID NO: 1070938 - RNA, 22 nt, Human
acagaaguuggaauuagauacu

SEQ ID NO: 1070939 - RNA, 22 nt, Human
ucuggagcuggcagggcccugg

SEQ ID NO: 1070940 - RNA, 22 nt, Human
ugagaaaacaguuuguaauaau

SEQ ID NO: 1070941 - RNA, 18 nt, Human
ucuuggaguaaugaucaa

SEQ ID NO: 1070942 - RNA, 22 nt, Human
aauguuuucauuauccuaacug

SEQ ID NO: 1070943 - RNA, 22 nt, Human
ggucagccuuggauuugguagc

SEQ ID NO: 1070944 - RNA, 21 nt, Human
uuucuaaggaggaagaaaaga

SEQ ID NO: 1070945 - RNA, 22 nt, Human
agcugggcuuggccaggucgcu

SEQ ID NO: 1070946 - RNA, 22 nt, Human
gugaagcacaugggcguugggu

SEQ ID NO: 1070947 - RNA, 22 nt, Human
ucugucacccagagugcagugg

SEQ ID NO: 1070948 - RNA, 22 nt, Human
ccuagagucucucugcaggagu

SEQ ID NO: 1070949 - RNA, 22 nt, Human
cucugguucagggcucccuggc

SEQ ID NO: 1070950 - RNA, 22 nt, Human
ugcaugcauguuuuuacccaca

SEQ ID NO: 1070951 - RNA, 22 nt, Human
gccuugccucagccauggaaac

SEQ ID NO: 1070952 - RNA, 22 nt, Human
uugugaaaucguguuuggaagc

SEQ ID NO: 1070953 - RNA, 22 nt, Human
gaggaagaagcaaaccagcuaa

SEQ ID NO: 1070954 - RNA, 22 nt, Human
gucaguaggaaccuagggucaa

SEQ ID NO: 1070955 - RNA, 23 nt, Human
uggcagcuguguaagagaaagca

SEQ ID NO: 1070956 - RNA, 22 nt, Human
uacaguaauaaaaugagcuaca

SEQ ID NO: 1070957 - RNA, 22 nt, Human
aagcugccaaugguaagcugcu

SEQ ID NO: 1070958 - RNA, 22 nt, Human
gaaggccaagaggcuccaagau

SEQ ID NO: 1070959 - RNA, 22 nt, Human
cagucccagacauaguaaggga

SEQ ID NO: 1070960 - RNA, 22 nt, Human
cuggauuuacugaguuuuauca

SEQ ID NO: 1070961 - RNA, 21 nt, Human
ugauuuccaucuuaaaauaaa

SEQ ID NO: 1070962 - RNA, 22 nt, Human
agcaggugucacuuucacucca

SEQ ID NO: 1070963 - RNA, 22 nt, Human
uggcagcugaggggaggcuuug

SEQ ID NO: 1070964 - RNA, 22 nt, Human
auucuuaauugccaugcuguau

SEQ ID NO: 1070965 - RNA, 22 nt, Human
cugggcucccucaugugucugc

SEQ ID NO: 1070966 - RNA, 22 nt, Human
cuggcagguggagguugcagug

SEQ ID NO: 1070967 - RNA, 22 nt, Human
ucugggagagcacguggcugac

SEQ ID NO: 1070968 - RNA, 22 nt, Human
gagcugucuggggacucugggu

SEQ ID NO: 1070969 - RNA, 22 nt, Human
auucagcauaaucaguagcuug

SEQ ID NO: 1070970 - RNA, 22 nt, Human
aacugagacacgaacuaugauu

SEQ ID NO: 1070971 - RNA, 22 nt, Human
uuugaaagcaggugugggaggg

SEQ ID NO: 1070972 - RNA, 22 nt, Human
gcugucugacuccaaguuggag

SEQ ID NO: 1070973 - RNA, 22 nt, Human
ugcccaggaucuggcgaugcuc

SEQ ID NO: 1070974 - RNA, 22 nt, Human
aaggcccuggccccagcuucuu

SEQ ID NO: 1070975 - RNA, 22 nt, Human
ucugagagucuuucuucaagug

SEQ ID NO: 1070976 - RNA, 22 nt, Human
gagaggaaagaaccaaugaccc

SEQ ID NO: 1070977 - RNA, 22 nt, Human
ucgugaggcucugcaucgcaca

SEQ ID NO: 1070978 - RNA, 22 nt, Human
aaaguuagcauucucucuugcu

SEQ ID NO: 1070979 - RNA, 23 nt, Human
ucaauaacucggguuaaaauaga

SEQ ID NO: 1070980 - RNA, 19 nt, Human
agauuauugcacauucaug

SEQ ID NO: 1070981 - RNA, 22 nt, Human
ugcugaaggcaggggagguggc

SEQ ID NO: 1070982 - RNA, 22 nt, Human
guggccugccgugugguauggg

SEQ ID NO: 1070983 - RNA, 22 nt, Human
uacaguauauacuguguguaga

SEQ ID NO: 1070984 - RNA, 22 nt, Human
ugaggcuguucuaccagggcca

SEQ ID NO: 1070985 - RNA, 22 nt, Human
gaucaccaguuguagguauuuu

SEQ ID NO: 1070986 - RNA, 19 nt, Human
agguggucuaggcuggaga

SEQ ID NO: 1070987 - RNA, 22 nt, Human
ugcaggcugcagucucaggugg

SEQ ID NO: 1070988 - RNA, 22 nt, Human
gcauuacaggaauuuguuacug

SEQ ID NO: 1070989 - RNA, 22 nt, Human
ggucauuguucuuuucugugau

SEQ ID NO: 1070990 - RNA, 22 nt, Human
gcugccaugguccaggcuccag

SEQ ID NO: 1070991 - RNA, 22 nt, Human
uugcauuugagaaaguucuccu

SEQ ID NO: 1070992 - RNA, 22 nt, Human
aacacauugccagagaucagca

SEQ ID NO: 1070993 - RNA, 22 nt, Human
ugagaaauccagaugugcaguu

SEQ ID NO: 1070994 - RNA, 22 nt, Human
aagacugugucuauggcuacuc

SEQ ID NO: 1070995 - RNA, 22 nt, Human
ugaggcucagagcaccugcucc

SEQ ID NO: 1070996 - RNA, 22 nt, Human
aaucuucauguccucucuaauu

SEQ ID NO: 1070997 - RNA, 22 nt, Human
gugaggcagagaugccaaaacu

SEQ ID NO: 1070998 - RNA, 20 nt, Human
agaggcuuccuugggaggag

SEQ ID NO: 1070999 - RNA, 22 nt, Human
cggcagagugugugcgugcaug

SEQ ID NO: 1071000 - RNA, 22 nt, Human
agcugauuuuuaggagacagga

SEQ ID NO: 1071001 - RNA, 22 nt, Human
uauuuauaaucugccaaagaga

SEQ ID NO: 1071002 - RNA, 22 nt, Human
acuggaaaguugauuaugucca

SEQ ID NO: 1071003 - RNA, 22 nt, Human
aggaaagggguagguguggacg

SEQ ID NO: 1071004 - RNA, 22 nt, Human
aagucuguuugagugucacacu

SEQ ID NO: 1071005 - RNA, 22 nt, Human
aauauacuauacuacuuucugg

SEQ ID NO: 1071006 - RNA, 22 nt, Human
guaaauuauuucaagaucaucu

SEQ ID NO: 1071007 - RNA, 22 nt, Human
ccugccugucaucgccugcgcc

SEQ ID NO: 1071008 - RNA, 22 nt, Human
guucacaggguuaggaaucacu

SEQ ID NO: 1071009 - RNA, 22 nt, Human
ggcuucuccagguacugagcau

SEQ ID NO: 1071010 - RNA, 22 nt, Human
uuugaucucccagacuaaggag

SEQ ID NO: 1071011 - RNA, 22 nt, Human
ugugaggaccucagcagagucu

SEQ ID NO: 1071012 - RNA, 22 nt, Human
augcuguguggccaccuccaug

SEQ ID NO: 1071013 - RNA, 22 nt, Human
uacaaagucaccagcuucuugc

SEQ ID NO: 1071014 - RNA, 22 nt, Human
cagucucagaggugggaguggg

SEQ ID NO: 1071015 - RNA, 22 nt, Human
ucugaaauaacugaugccagau

SEQ ID NO: 1071016 - RNA, 21 nt, Human
aguguuaauggaaauuauauu

SEQ ID NO: 1071017 - RNA, 21 nt, Human
aggcccagcuuuccucuugcu

SEQ ID NO: 1071018 - RNA, 22 nt, Human
uggcagagagacucuccuugau

SEQ ID NO: 1071019 - RNA, 22 nt, Human
ugggggagccuucacaguagcu

SEQ ID NO: 1071020 - RNA, 22 nt, Human
aaaugcaauucaggaagacaag

SEQ ID NO: 1071021 - RNA, 22 nt, Human
uucuacaugguugcucagaggg

SEQ ID NO: 1071022 - RNA, 22 nt, Human
uguggugagaaacugguagauu

SEQ ID NO: 1071023 - RNA, 22 nt, Human
aaucagaauuuguccccugagu

SEQ ID NO: 1071024 - RNA, 22 nt, Human
acaucugaggagaccagccucu

SEQ ID NO: 1071025 - RNA, 22 nt, Human
ggggagugguugccugugaucc

SEQ ID NO: 1071026 - RNA, 22 nt, Human
ccacagaaugaugacacuucag

SEQ ID NO: 1071027 - RNA, 22 nt, Human
gaggccugaggcugccuggagc

SEQ ID NO: 1071028 - RNA, 22 nt, Human
cccagagucaagcuuaccauua

SEQ ID NO: 1071029 - RNA, 22 nt, Human
ggcuuccuggggccuccugcaa

SEQ ID NO: 1071030 - RNA, 22 nt, Human
gaacacuuuaacauuccuuuuc

SEQ ID NO: 1071031 - RNA, 22 nt, Human
ggggccugcgagguucaacuuc

SEQ ID NO: 1071032 - RNA, 22 nt, Human
uaaagcaauuacucaguggcuu

SEQ ID NO: 1071033 - RNA, 22 nt, Human
cuuagaaaugcagauucucagg

SEQ ID NO: 1071034 - RNA, 22 nt, Human
uacacaucucugucaguaguga

SEQ ID NO: 1071035 - RNA, 20 nt, Human
ucucuucuggggagauaaaa

SEQ ID NO: 1071036 - RNA, 19 nt, Human
gcuuuucuccuucaagcca

SEQ ID NO: 1071037 - RNA, 22 nt, Human
aaagacaguggauucaaaaucc

SEQ ID NO: 1071038 - RNA, 22 nt, Human
uggucuuuaagguagcugucau

SEQ ID NO: 1071039 - RNA, 22 nt, Human
cuccagaagacccauccucaug

SEQ ID NO: 1071040 - RNA, 22 nt, Human
ucccuuaagcaccugaguaguc

SEQ ID NO: 1071041 - RNA, 22 nt, Human
auggcagccuguggacagucaa

SEQ ID NO: 1071042 - RNA, 22 nt, Human
cagcaguggcugcaggcagcug

SEQ ID NO: 1071043 - RNA, 22 nt, Human
gaggagagagggacugucugca

SEQ ID NO: 1071044 - RNA, 22 nt, Human
ucuuugaaguugaaguaguugg

SEQ ID NO: 1071045 - RNA, 22 nt, Human
agaaacauuuagauuauauguc

SEQ ID NO: 1071046 - RNA, 22 nt, Human
uguauuuaagcuuuaccuaaaa

SEQ ID NO: 1071047 - RNA, 22 nt, Human
auauaacauacauacagaaaag

SEQ ID NO: 1071048 - RNA, 22 nt, Human
agcugacaggauggcauuauua

SEQ ID NO: 1071049 - RNA, 22 nt, Human
cagccugacaccagcuuugggc

SEQ ID NO: 1071050 - RNA, 22 nt, Human
aaugaaacucgaaauaaucaca

SEQ ID NO: 1071051 - RNA, 22 nt, Human
gauaauuuuagucugaaaauug

SEQ ID NO: 1071052 - RNA, 22 nt, Human
agagcuggcugguagcccugau

SEQ ID NO: 1071053 - RNA, 22 nt, Human
cagacuugacggcagcugcuuu

SEQ ID NO: 1071054 - RNA, 22 nt, Human
acuuuaaaaagagccuucuaac

SEQ ID NO: 1071055 - RNA, 22 nt, Human
uugggccaagugauucucugcc

SEQ ID NO: 1071056 - RNA, 22 nt, Human
ggaagaaagcacacaaacuuga

SEQ ID NO: 1071057 - RNA, 22 nt, Human
uaacacacugaaggugagaugg

SEQ ID NO: 1071058 - RNA, 22 nt, Human
gaaaguauuuacauuaacaucu

SEQ ID NO: 1071059 - RNA, 22 nt, Human
uuguccuuaccucaaucuggaa

SEQ ID NO: 1071060 - RNA, 22 nt, Human
gcagagugagauaugaacccag

SEQ ID NO: 1071061 - RNA, 19 nt, Human
aaagcagaggagcaucuga

SEQ ID NO: 1071062 - RNA, 17 nt, Human
acagagcacaucaagau

SEQ ID NO: 1071063 - RNA, 22 nt, Human
gggaagaguaacuagcccaugu

SEQ ID NO: 1071064 - RNA, 20 nt, Human
gaggcucugggcauggcgcc

SEQ ID NO: 1071065 - RNA, 22 nt, Human
uuggaaggagucaaccagcuga

SEQ ID NO: 1071066 - RNA, 22 nt, Human
gaggcucagagagguccacaua

SEQ ID NO: 1071067 - RNA, 22 nt, Human
ggagugugggauggagcucagg

SEQ ID NO: 1071068 - RNA, 19 nt, Human
aguagcagaaagugcagug

SEQ ID NO: 1071069 - RNA, 22 nt, Human
cuuggcagauccaaaaaugaca

SEQ ID NO: 1071070 - RNA, 22 nt, Human
ugugauuauuugauuaacaugu

SEQ ID NO: 1071071 - RNA, 22 nt, Human
augcagguugggcaaguguggg

SEQ ID NO: 1071072 - RNA, 22 nt, Human
uuggaccaguggauuauggugg

SEQ ID NO: 1071073 - RNA, 22 nt, Human
cagaggaagcagacacaucuug

SEQ ID NO: 1071074 - RNA, 22 nt, Human
gcccagcugcacccuggugggu

SEQ ID NO: 1071075 - RNA, 22 nt, Human
gaagcccaggcuuccuuggcuu

SEQ ID NO: 1071076 - RNA, 22 nt, Human
cugggguggauggguccaaguu

SEQ ID NO: 1071077 - RNA, 22 nt, Human
aggaagagguagcugucaaggg

SEQ ID NO: 1071078 - RNA, 22 nt, Human
cagcuagagggaugcuguguga

SEQ ID NO: 1071079 - RNA, 22 nt, Human
uuugacagcauaauccuacacc

SEQ ID NO: 1071080 - RNA, 22 nt, Human
ccuggugccacuagagaauguc

SEQ ID NO: 1071081 - RNA, 22 nt, Human
uggacaggaucugagacugaga

SEQ ID NO: 1071082 - RNA, 22 nt, Human
agugucauuccagggacccucg

SEQ ID NO: 1071083 - RNA, 22 nt, Human
cugucccucaucaccucugggu

SEQ ID NO: 1071084 - RNA, 22 nt, Human
cauggcagaaaccugagcugcu

SEQ ID NO: 1071085 - RNA, 22 nt, Human
ccucagagccuccagaaggaau

SEQ ID NO: 1071086 - RNA, 22 nt, Human
ucugacuuccuccacaucuguu

SEQ ID NO: 1071087 - RNA, 22 nt, Human
uuuauaaaauagacugggucua

SEQ ID NO: 1071088 - RNA, 22 nt, Human
uacagaauguuaugaagcauag

SEQ ID NO: 1071089 - RNA, 22 nt, Human
uuggaaaagugaaacuagaugc

SEQ ID NO: 1071090 - RNA, 22 nt, Human
ucauuguuauguuuugcugucu

SEQ ID NO: 1071091 - RNA, 22 nt, Human
cugggcuccacuacuugcuaac

SEQ ID NO: 1071092 - RNA, 22 nt, Human
cuggccuggagccucugggugg

SEQ ID NO: 1071093 - RNA, 22 nt, Human
cagcuguugugcugggcaguua

SEQ ID NO: 1071094 - RNA, 22 nt, Human
uuaauauguugaaauuuauuag

SEQ ID NO: 1071095 - RNA, 22 nt, Human
uucuuuaugcuucuguuuaggc

SEQ ID NO: 1071096 - RNA, 22 nt, Human
cugcaggcucgaagacacggau

SEQ ID NO: 1071097 - RNA, 22 nt, Human
ugaaugaaugaauuaauagagu

SEQ ID NO: 1071098 - RNA, 22 nt, Human
augaagauaagaccaggcugga

SEQ ID NO: 1071099 - RNA, 22 nt, Human
agcugucuaccugcagaguccu

SEQ ID NO: 1071100 - RNA, 22 nt, Human
agcccugcucaucuggaucccg

SEQ ID NO: 1071101 - RNA, 22 nt, Human
caggacagguguucuagaucag

SEQ ID NO: 1071102 - RNA, 22 nt, Human
gugccugggguugagcuaugaa

SEQ ID NO: 1071103 - RNA, 22 nt, Human
cugugccuuuguagcugugccu

SEQ ID NO: 1071104 - RNA, 22 nt, Human
uuucuggacagcaagaucaguu

SEQ ID NO: 1071105 - RNA, 22 nt, Human
cacacaugucucuccaugcucu

SEQ ID NO: 1071106 - RNA, 22 nt, Human
ggaggguggcagcguccugggc

SEQ ID NO: 1071107 - RNA, 22 nt, Human
ccugggcuugcaucugugcugg

SEQ ID NO: 1071108 - RNA, 22 nt, Human
uucuuacuaguauguuucagca

SEQ ID NO: 1071109 - RNA, 22 nt, Human
ugguggccuugauggcaucugc

SEQ ID NO: 1071110 - RNA, 22 nt, Human
cacauuuaucuguucuuucuag

SEQ ID NO: 1071111 - RNA, 17 nt, Human
ucagggaaugagguugu

SEQ ID NO: 1071112 - RNA, 22 nt, Human
aagaauaaauuaagauacuuag

SEQ ID NO: 1071113 - RNA, 22 nt, Human
gaacaacuuugaaacaugaaga

SEQ ID NO: 1071114 - RNA, 22 nt, Human
uuugucuucauccuucgagcug

SEQ ID NO: 1071115 - RNA, 22 nt, Human
auuacugagcuuguagcugcau

SEQ ID NO: 1071116 - RNA, 22 nt, Human
caggaacaacucccagcaucuc

SEQ ID NO: 1071117 - RNA, 22 nt, Human
cuggcagcgguuugcagccugg

SEQ ID NO: 1071118 - RNA, 22 nt, Human
cuguacaggagacgucugugca

SEQ ID NO: 1071119 - RNA, 22 nt, Human
ccucagggacuccaugcugcag

SEQ ID NO: 1071120 - RNA, 23 nt, Human
aauauauguguuuuucugcuuca

SEQ ID NO: 1071121 - RNA, 22 nt, Human
uuauaauugcuuauuagaccca

SEQ ID NO: 1071122 - RNA, 22 nt, Human
ucagcagggaggcucugugccc

SEQ ID NO: 1071123 - RNA, 22 nt, Human
ugggcugagaguaccuuauaaa

SEQ ID NO: 1071124 - RNA, 22 nt, Human
agaggcuccaccuucucugucc

SEQ ID NO: 1071125 - RNA, 22 nt, Human
uuacagauacauuucuuuuguu

SEQ ID NO: 1071126 - RNA, 22 nt, Human
uauuagguuggugcaaaaagua

SEQ ID NO: 1071127 - RNA, 22 nt, Human
ucaguggagcuaagcaugagau

SEQ ID NO: 1071128 - RNA, 22 nt, Human
aacaacaacggagaaaggguug

SEQ ID NO: 1071129 - RNA, 22 nt, Human
agggucagagucaggugcagua

SEQ ID NO: 1071130 - RNA, 22 nt, Human
acuuccagugucugcugcuagc

SEQ ID NO: 1071131 - RNA, 22 nt, Human
ggcugagacuagagugaggcau

SEQ ID NO: 1071132 - RNA, 22 nt, Human
uucuaugccauguucagcuacu

SEQ ID NO: 1071133 - RNA, 22 nt, Human
uucauacucacuccaauaacug

SEQ ID NO: 1071134 - RNA, 21 nt, Human
gccugcuguucacccugccac

SEQ ID NO: 1071135 - RNA, 22 nt, Human
ucauuuaucgcugccuuuuaaa

SEQ ID NO: 1071136 - RNA, 22 nt, Human
ugggcugcccugaugguccuca

SEQ ID NO: 1071137 - RNA, 22 nt, Human
uuuucuuauggugaagcacaaa

SEQ ID NO: 1071138 - RNA, 22 nt, Human
cccaggaguuugaguucagcau

SEQ ID NO: 1071139 - RNA, 22 nt, Human
ugccugugcccuucuuggcauu

SEQ ID NO: 1071140 - RNA, 22 nt, Human
cccaccaguacagaugguagau

SEQ ID NO: 1071141 - RNA, 17 nt, Human
ggcuuuagggacaccac

SEQ ID NO: 1071142 - RNA, 22 nt, Human
aaaagagaguugccagucugua

SEQ ID NO: 1071143 - RNA, 22 nt, Human
gcugcucuccauggccgugagu

SEQ ID NO: 1071144 - RNA, 22 nt, Human
acagguccucaagucagcuggg

SEQ ID NO: 1071145 - RNA, 22 nt, Human
ucuaaacucucuuugaauuaug

SEQ ID NO: 1071146 - RNA, 22 nt, Human
ucccucagcuugucuccaugca

SEQ ID NO: 1071147 - RNA, 22 nt, Human
caggagauguaccuguuuuuga

SEQ ID NO: 1071148 - RNA, 22 nt, Human
auucuagaaggcaaagcaaggg

SEQ ID NO: 1071149 - RNA, 22 nt, Human
ucugacuuauuuguccuuggug

SEQ ID NO: 1071150 - RNA, 22 nt, Human
ucagggaaucagacucugcagc

SEQ ID NO: 1071151 - RNA, 20 nt, Human
aguguuccggaagacuggca

SEQ ID NO: 1071152 - RNA, 22 nt, Human
uccucauugucacuggcccgca

SEQ ID NO: 1071153 - RNA, 22 nt, Human
uuuggcacagcuucccagacuu

SEQ ID NO: 1071154 - RNA, 22 nt, Human
aaggcugagacagcacaggucc

SEQ ID NO: 1071155 - RNA, 22 nt, Human
augcaaauugccauaaaguggg

SEQ ID NO: 1071156 - RNA, 22 nt, Human
gaaagcagaugaaauugcaaca

SEQ ID NO: 1071157 - RNA, 22 nt, Human
uggcagaguuauggguauuuau

SEQ ID NO: 1071158 - RNA, 22 nt, Human
acuuuguugaagaauauguuag

SEQ ID NO: 1071159 - RNA, 22 nt, Human
ugcaccauguaaguggccacgu

SEQ ID NO: 1071160 - RNA, 22 nt, Human
aguuuucacacucaccaaaagg

SEQ ID NO: 1071161 - RNA, 22 nt, Human
auuacacagcgguuacuacuag

SEQ ID NO: 1071162 - RNA, 22 nt, Human
aacaucacaauuucauuuaugc

SEQ ID NO: 1071163 - RNA, 22 nt, Human
acccagaggcggagguugcagu

SEQ ID NO: 1071164 - RNA, 22 nt, Human
uggcucagccagcccuaggaac

SEQ ID NO: 1071165 - RNA, 22 nt, Human
gagggaaagguuaauacaugau

SEQ ID NO: 1071166 - RNA, 22 nt, Human
augugcaaauuauuuugccaga

SEQ ID NO: 1071167 - RNA, 22 nt, Human
uuucuucaguaacacaaaccau

SEQ ID NO: 1071168 - RNA, 22 nt, Human
acagaacugcagacagugccaa

SEQ ID NO: 1071169 - RNA, 22 nt, Human
aaggaagaugaggugcugcuua

SEQ ID NO: 1071170 - RNA, 22 nt, Human
uuuccuaacacaaugcaugaga

SEQ ID NO: 1071171 - RNA, 21 nt, Human
agcucccuguuuccucacucu

SEQ ID NO: 1071172 - RNA, 22 nt, Human
cccuggccagggcacagggagg

SEQ ID NO: 1071173 - RNA, 22 nt, Human
uuauuuucuccucagaaagugg

SEQ ID NO: 1071174 - RNA, 22 nt, Human
guggcugggcuccgagcggcuu

SEQ ID NO: 1071175 - RNA, 22 nt, Human
aguggagaagaggauggucucc

SEQ ID NO: 1071176 - RNA, 22 nt, Human
ugaaaugucauccuuuagccau

SEQ ID NO: 1071177 - RNA, 22 nt, Human
cuuggcaggguggaggaugcag

SEQ ID NO: 1071178 - RNA, 22 nt, Human
caguuuuauugguugaaaucug

SEQ ID NO: 1071179 - RNA, 22 nt, Human
uuucugaaaugcuggcuuugga

SEQ ID NO: 1071180 - RNA, 22 nt, Human
gagcugccuacauugccaagag

SEQ ID NO: 1071181 - RNA, 22 nt, Human
caaagaugucauugguaagaca

SEQ ID NO: 1071182 - RNA, 17 nt, Human
agagagaaaagggccau

SEQ ID NO: 1071183 - RNA, 22 nt, Human
uucugaggcacuggcucuccca

SEQ ID NO: 1071184 - RNA, 22 nt, Human
uccucaggaucuaggagugcuu

SEQ ID NO: 1071185 - RNA, 20 nt, Human
uccugagccuccaccauguc

SEQ ID NO: 1071186 - RNA, 23 nt, Human
cugguucauagucaagagauuga

SEQ ID NO: 1071187 - RNA, 22 nt, Human
aucaaauaaagguaccuagcuu

SEQ ID NO: 1071188 - RNA, 22 nt, Human
auuguacaugcagugagucauc

SEQ ID NO: 1071189 - RNA, 22 nt, Human
ugggccugaaauucccauuuua

SEQ ID NO: 1071190 - RNA, 22 nt, Human
auccucaguguuucugacaucu

SEQ ID NO: 1071191 - RNA, 22 nt, Human
agagaugggaaggcagacuuca

SEQ ID NO: 1071192 - RNA, 22 nt, Human
aaggccaggagacuuggaguca

SEQ ID NO: 1071193 - RNA, 22 nt, Human
caucuuuguaacuuccacauaa

SEQ ID NO: 1071194 - RNA, 20 nt, Human
uuuccuuucauuuuaguacc

SEQ ID NO: 1071195 - RNA, 22 nt, Human
ggagccuggucagguuggcucc

SEQ ID NO: 1071196 - RNA, 22 nt, Human
gcuugcauucuggaucuauggu

SEQ ID NO: 1071197 - RNA, 22 nt, Human
gcaaagcugggugugaaugcac

SEQ ID NO: 1071198 - RNA, 21 nt, Human
ggcugggucaugcagcuggcc

SEQ ID NO: 1071199 - RNA, 22 nt, Human
uuguaacucugaauacauccua

SEQ ID NO: 1071200 - RNA, 22 nt, Human
gaauguuucauguguauguuag

SEQ ID NO: 1071201 - RNA, 21 nt, Human
ugcaggagucugugagucagg

SEQ ID NO: 1071202 - RNA, 22 nt, Human
uggccugggugcugcugacauc

SEQ ID NO: 1071203 - RNA, 22 nt, Human
acuuuucucccuccugccuuca

SEQ ID NO: 1071204 - RNA, 22 nt, Human
uucauacaaugggauauuauga

SEQ ID NO: 1071205 - RNA, 22 nt, Human
ugcugggcaucguaggagguac

SEQ ID NO: 1071206 - RNA, 20 nt, Human
acaguguuagguuuuuccuu

SEQ ID NO: 1071207 - RNA, 22 nt, Human
uccucccugcacucagugaagu

SEQ ID NO: 1071208 - RNA, 22 nt, Human
cugagccacugcuuguucagug

SEQ ID NO: 1071209 - RNA, 22 nt, Human
cccuggagggcagacagaugcc

SEQ ID NO: 1071210 - RNA, 22 nt, Human
aaaucagugcucauuugaaagg

SEQ ID NO: 1071211 - RNA, 22 nt, Human
gucagagcugugcaaggcugag

SEQ ID NO: 1071212 - RNA, 22 nt, Human
gaaagcacuaaaagagaauccu

SEQ ID NO: 1071213 - RNA, 22 nt, Human
caguagcagggauuauuuuagg

SEQ ID NO: 1071214 - RNA, 17 nt, Human
agaacuguaguagcucc

SEQ ID NO: 1071215 - RNA, 22 nt, Human
aucagaagcuuguagucucucu

SEQ ID NO: 1071216 - RNA, 21 nt, Human
acaauagacauaagcagagca

SEQ ID NO: 1071217 - RNA, 22 nt, Human
auguuuaugaccuccauaagga

SEQ ID NO: 1071218 - RNA, 22 nt, Human
caggggccuggcugucuaggaa

SEQ ID NO: 1071219 - RNA, 22 nt, Human
uggcacagggcuuggucgcuca

SEQ ID NO: 1071220 - RNA, 22 nt, Human
aaacauucucagcccugcuugc

SEQ ID NO: 1071221 - RNA, 22 nt, Human
ugaaacuaggccaaucaaauua

SEQ ID NO: 1071222 - RNA, 22 nt, Human
gcucaggaccgaggggugggaa

SEQ ID NO: 1071223 - RNA, 22 nt, Human
auuacaauaagguuuauuugua

SEQ ID NO: 1071224 - RNA, 22 nt, Human
guuucuuaauagcaggggccaa

SEQ ID NO: 1071225 - RNA, 20 nt, Human
ccuggagccuggaaggaguc

SEQ ID NO: 1071226 - RNA, 22 nt, Human
ugugaaggcagagccagugaaa

SEQ ID NO: 1071227 - RNA, 22 nt, Human
ggcccugggcagaggagugggc

SEQ ID NO: 1071228 - RNA, 22 nt, Human
uauguagacuucauuguuuacu

SEQ ID NO: 1071229 - RNA, 22 nt, Human
ugaugguugauuauaaaucagu

SEQ ID NO: 1071230 - RNA, 22 nt, Human
ccucugagucaugcgcauagga

SEQ ID NO: 1071231 - RNA, 21 nt, Human
ucuuuuccuuucugugugcaa

SEQ ID NO: 1071232 - RNA, 22 nt, Human
aaaaagagaaaugcucuagucc

SEQ ID NO: 1071233 - RNA, 22 nt, Human
caaauacuggguaaguuaauuu

SEQ ID NO: 1071234 - RNA, 22 nt, Human
ugucuccuacugccuguggauc

SEQ ID NO: 1071235 - RNA, 22 nt, Human
ggcagcucugugucugggaagc

SEQ ID NO: 1071236 - RNA, 22 nt, Human
gcaggcaguuauuuaguagaau

SEQ ID NO: 1071237 - RNA, 22 nt, Human
aacagugagaagguggacagga

SEQ ID NO: 1071238 - RNA, 22 nt, Human
gcagggcacaaggacgcacagg

SEQ ID NO: 1071239 - RNA, 19 nt, Human
aggagaaguagcagaaauu

SEQ ID NO: 1071240 - RNA, 22 nt, Human
uucaacuuuaugcauauguauu

SEQ ID NO: 1071241 - RNA, 22 nt, Human
acauuugagcauauuucuuguc

SEQ ID NO: 1071242 - RNA, 22 nt, Human
gcaaaguauuaaguauuaaguu

SEQ ID NO: 1071243 - RNA, 22 nt, Human
acugcuuuaucugagaaguccu

SEQ ID NO: 1071244 - RNA, 22 nt, Human
aggccuguuggcgugggcucua

SEQ ID NO: 1071245 - RNA, 22 nt, Human
ucaugcuuuggguuagaaaccu

SEQ ID NO: 1071246 - RNA, 22 nt, Human
ugaaaucuccucuuuauauauc

SEQ ID NO: 1071247 - RNA, 22 nt, Human
agagguagagguugcagugagc

SEQ ID NO: 1071248 - RNA, 22 nt, Human
caggggccaaggguccagaccu

SEQ ID NO: 1071249 - RNA, 22 nt, Human
acacauuucucuuuuuguaagu

SEQ ID NO: 1071250 - RNA, 22 nt, Human
ugcaggcuggggaggcagacuu

SEQ ID NO: 1071251 - RNA, 22 nt, Human
cugcccugcccaggccuugggc

SEQ ID NO: 1071252 - RNA, 21 nt, Human
guuugcaugaacaagucagcc

SEQ ID NO: 1071253 - RNA, 20 nt, Human
ggucccugcccucugucauc

SEQ ID NO: 1071254 - RNA, 22 nt, Human
cagccaggccuggugaccaaag

SEQ ID NO: 1071255 - RNA, 22 nt, Human
gaggaagaugguugaguggucc

SEQ ID NO: 1071256 - RNA, 22 nt, Human
uggcagcaauuugugauguuga

SEQ ID NO: 1071257 - RNA, 22 nt, Human
cugaagcaauugagagauguuu

SEQ ID NO: 1071258 - RNA, 22 nt, Human
cugugucuaaucaggucaguca

SEQ ID NO: 1071259 - RNA, 22 nt, Human
gccugggaacucugaucuccug

SEQ ID NO: 1071260 - RNA, 22 nt, Human
auguggaggaaaugaguguaca

SEQ ID NO: 1071261 - RNA, 22 nt, Human
uaaagcagccagggucuaagcc

SEQ ID NO: 1071262 - RNA, 22 nt, Human
uuugaaagcaccauuugaguag

SEQ ID NO: 1071263 - RNA, 22 nt, Human
aucugcuugcccucuuaggacc

SEQ ID NO: 1071264 - RNA, 22 nt, Human
ccaugccccaauacaggacacc

SEQ ID NO: 1071265 - RNA, 20 nt, Human
cugcugugguccuuuauuuu

SEQ ID NO: 1071266 - RNA, 22 nt, Human
aaauauuagggagaacagggac

SEQ ID NO: 1071267 - RNA, 22 nt, Human
agucccagcucagaaccacuag

SEQ ID NO: 1071268 - RNA, 22 nt, Human
ugaaagguagcuggccucauag

SEQ ID NO: 1071269 - RNA, 22 nt, Human
cucuggagaacgcuauggaucu

SEQ ID NO: 1071270 - RNA, 22 nt, Human
uuuacauggaauauugucuugu

SEQ ID NO: 1071271 - RNA, 22 nt, Human
cagcagcugggaaggaggcuga

SEQ ID NO: 1071272 - RNA, 22 nt, Human
uggcugcucaagggaggaggcu

SEQ ID NO: 1071273 - RNA, 22 nt, Human
caaagaagagauuuacagagcu

SEQ ID NO: 1071274 - RNA, 22 nt, Human
cugccugcacugccuggcucca

SEQ ID NO: 1071275 - RNA, 22 nt, Human
caggcccagugaucagggcucu

SEQ ID NO: 1071276 - RNA, 22 nt, Human
gcacacccucucaccagcacug

SEQ ID NO: 1071277 - RNA, 22 nt, Human
aaugaaaauuggacccuagaac

SEQ ID NO: 1071278 - RNA, 22 nt, Human
uuugaaaagaaccaucgccuua

SEQ ID NO: 1071279 - RNA, 22 nt, Human
ucaggcagaggauggggagcgu

SEQ ID NO: 1071280 - RNA, 22 nt, Human
ggaguucacugugcaggcucug

SEQ ID NO: 1071281 - RNA, 22 nt, Human
ggaagccccagacccagagucu

SEQ ID NO: 1071282 - RNA, 22 nt, Human
gaaauucaaauaagauauguag

SEQ ID NO: 1071283 - RNA, 22 nt, Human
cacagaauuaagggagaaauau

SEQ ID NO: 1071284 - RNA, 22 nt, Human
gugugcagucugcuaggcaggg

SEQ ID NO: 1071285 - RNA, 22 nt, Human
cugggccauggaagucucugcc

SEQ ID NO: 1071286 - RNA, 22 nt, Human
gcagcuuggugaaaggugaugg

SEQ ID NO: 1071287 - RNA, 22 nt, Human
gcagaugaggaagcuaaugcug

SEQ ID NO: 1071288 - RNA, 22 nt, Human
ucagauggcauagguuggaauu

SEQ ID NO: 1071289 - RNA, 22 nt, Human
ccaggagcagccggcccaccug

SEQ ID NO: 1071290 - RNA, 22 nt, Human
cauugcaccacauugcaucccu

SEQ ID NO: 1071291 - RNA, 22 nt, Human
gcuucuggaagcauaugcaaga

SEQ ID NO: 1071292 - RNA, 22 nt, Human
uucaagguaugguagcugguca

SEQ ID NO: 1071293 - RNA, 22 nt, Human
gcagagccaggagcccaggauc

SEQ ID NO: 1071294 - RNA, 22 nt, Human
ugccagggcugcuacuggcuga

SEQ ID NO: 1071295 - RNA, 22 nt, Human
agcagggcuggauuuggcaaga

SEQ ID NO: 1071296 - RNA, 22 nt, Human
ucagaagucccagaauucacau

SEQ ID NO: 1071297 - RNA, 22 nt, Human
cgcaccacugaauuccagccug

SEQ ID NO: 1071298 - RNA, 22 nt, Human
cuggccuuuuguuucuggagaa

SEQ ID NO: 1071299 - RNA, 22 nt, Human
acagcagcacuauugacauuuu

SEQ ID NO: 1071300 - RNA, 22 nt, Human
ccaggccugauugggaaucuug

SEQ ID NO: 1071301 - RNA, 22 nt, Human
ugcagagguguugcugagauaa

SEQ ID NO: 1071302 - RNA, 22 nt, Human
ucauucuuuaccaaguugucac

SEQ ID NO: 1071303 - RNA, 22 nt, Human
ucuuggaagccucaagauacuc

SEQ ID NO: 1071304 - RNA, 22 nt, Human
gcaguaaaaaaggauaugugca

SEQ ID NO: 1071305 - RNA, 22 nt, Human
gccauuaacaagaauauaguag

SEQ ID NO: 1071306 - RNA, 22 nt, Human
gccaggaauggagagguggccu

SEQ ID NO: 1071307 - RNA, 22 nt, Human
gaggagaaagcagugauuugug

SEQ ID NO: 1071308 - RNA, 22 nt, Human
gcucugaggcugugaggugcug

SEQ ID NO: 1071309 - RNA, 22 nt, Human
cagcucccagagugaccagcag

SEQ ID NO: 1071310 - RNA, 22 nt, Human
cugguucaauacuaaacuucuu

SEQ ID NO: 1071311 - RNA, 22 nt, Human
aaugcuuugauugauuaaaaca

SEQ ID NO: 1071312 - RNA, 19 nt, Human
uuucacaaagagagcguga

SEQ ID NO: 1071313 - RNA, 22 nt, Human
uggagaagauuggucaccauuc

SEQ ID NO: 1071314 - RNA, 21 nt, Human
uccaggggccagcacccaagc

SEQ ID NO: 1071315 - RNA, 22 nt, Human
uuacacacaauuagcauaguaa

SEQ ID NO: 1071316 - RNA, 22 nt, Human
uagcagagagguuucagcuaau

SEQ ID NO: 1071317 - RNA, 22 nt, Human
uggucaggcugcucugcggcgu

SEQ ID NO: 1071318 - RNA, 22 nt, Human
cugcuuuguaaaauagacauaa

SEQ ID NO: 1071319 - RNA, 22 nt, Human
ugcuuuggaucuauuugcugag

SEQ ID NO: 1071320 - RNA, 22 nt, Human
uggagggcaucuguggucaggc

SEQ ID NO: 1071321 - RNA, 22 nt, Human
caggcagcugggucaccguccc

SEQ ID NO: 1071322 - RNA, 19 nt, Human
agggaguuuauauuugcac

SEQ ID NO: 1071323 - RNA, 22 nt, Human
gggauuugugggauggccagug

SEQ ID NO: 1071324 - RNA, 21 nt, Human
ugaaacaaucagacagagucu

SEQ ID NO: 1071325 - RNA, 20 nt, Human
gcacugaaauucaauguuug

SEQ ID NO: 1071326 - RNA, 21 nt, Human
uccuucaguucugcacuuucu

SEQ ID NO: 1071327 - RNA, 22 nt, Human
uaaacuacugggcaaggacagg

SEQ ID NO: 1071328 - RNA, 22 nt, Human
ugcuuccaguuccucaccacau

SEQ ID NO: 1071329 - RNA, 22 nt, Human
acacauauauuugcauauacac

SEQ ID NO: 1071330 - RNA, 22 nt, Human
aucuggcugcugugcuuaagcu

SEQ ID NO: 1071331 - RNA, 22 nt, Human
gcccucagaguuccccacagug

SEQ ID NO: 1071332 - RNA, 22 nt, Human
aucccaugagaccacguuggcu

SEQ ID NO: 1071333 - RNA, 22 nt, Human
aguggcaguggggcagggcccu

SEQ ID NO: 1071334 - RNA, 22 nt, Human
gaggugagaagggggucagaug

SEQ ID NO: 1071335 - RNA, 22 nt, Human
aaauaucauucuggugcacaga

SEQ ID NO: 1071336 - RNA, 22 nt, Human
aaggcacucagccuugggacag

SEQ ID NO: 1071337 - RNA, 22 nt, Human
gccagguggucuggcuccagag

SEQ ID NO: 1071338 - RNA, 22 nt, Human
cucucugugguggcugucccau

SEQ ID NO: 1071339 - RNA, 22 nt, Human
agcaggaaagaaaaaucugugu

SEQ ID NO: 1071340 - RNA, 22 nt, Human
ggcaggguggcagaggcucaga

SEQ ID NO: 1071341 - RNA, 22 nt, Human
gccaggcauuuguuaggugcug

SEQ ID NO: 1071342 - RNA, 22 nt, Human
cagaaauagacaauggcagugg

SEQ ID NO: 1071343 - RNA, 22 nt, Human
uucugauugcugaugaggccca

SEQ ID NO: 1071344 - RNA, 22 nt, Human
gcucagacucuggccugaugau

SEQ ID NO: 1071345 - RNA, 22 nt, Human
gggguggauuucaggcgguguc

SEQ ID NO: 1071346 - RNA, 22 nt, Human
uuguacuugccauagaacaaca

SEQ ID NO: 1071347 - RNA, 21 nt, Human
ugacauuuccaauauaaagcc

SEQ ID NO: 1071348 - RNA, 19 nt, Human
acaggcagaauugggugug

SEQ ID NO: 1071349 - RNA, 22 nt, Human
gagcugugagggacacauugcu

SEQ ID NO: 1071350 - RNA, 22 nt, Human
ggccugcugcuaugacuuccug

SEQ ID NO: 1071351 - RNA, 22 nt, Human
ucacaggaaccaucagagaaau

SEQ ID NO: 1071352 - RNA, 22 nt, Human
uuuggaaaaagacagcuuauga

SEQ ID NO: 1071353 - RNA, 22 nt, Human
uauagaaguaagcauugugaug

SEQ ID NO: 1071354 - RNA, 22 nt, Human
aaauuucaagcaaaguagcuau

SEQ ID NO: 1071355 - RNA, 21 nt, Human
aagcaggacauaugaugcccu

SEQ ID NO: 1071356 - RNA, 22 nt, Human
ucugcaggaaaaaagugccugg

SEQ ID NO: 1071357 - RNA, 22 nt, Human
agaaaauauucauugagaggcu

SEQ ID NO: 1071358 - RNA, 22 nt, Human
gucaccagcaccaaugccacau

SEQ ID NO: 1071359 - RNA, 22 nt, Human
acagagcuuaggaugacuccca

SEQ ID NO: 1071360 - RNA, 20 nt, Human
cucaguguggccugaguguu

SEQ ID NO: 1071361 - RNA, 22 nt, Human
aaaggaagugccacucuucuuc

SEQ ID NO: 1071362 - RNA, 22 nt, Human
ucaauucaguccaacaguaauu

SEQ ID NO: 1071363 - RNA, 22 nt, Human
ugucucugugagaucugacgau

SEQ ID NO: 1071364 - RNA, 20 nt, Human
gcuuuuucuaauagcagucc

SEQ ID NO: 1071365 - RNA, 22 nt, Human
cauaacaguggcuucagcaagu

SEQ ID NO: 1071366 - RNA, 22 nt, Human
uuuccacuccuauugcaucuca

SEQ ID NO: 1071367 - RNA, 22 nt, Human
cuuuccaaugcauuuccaaugu

SEQ ID NO: 1071368 - RNA, 22 nt, Human
aaaggaaugagcuucuguuagg

SEQ ID NO: 1071369 - RNA, 22 nt, Human
ugagauaauacuucuuagcugg

SEQ ID NO: 1071370 - RNA, 22 nt, Human
aaacuaagggagaugugggcug

SEQ ID NO: 1071371 - RNA, 19 nt, Human
uagucuuuauucuuaauuu

SEQ ID NO: 1071372 - RNA, 22 nt, Human
agucccagaugacccagcuacu

SEQ ID NO: 1071373 - RNA, 22 nt, Human
uuuacagaugaggauacugagg

SEQ ID NO: 1071374 - RNA, 22 nt, Human
ugggagcagcuuugcgagggag

SEQ ID NO: 1071375 - RNA, 22 nt, Human
cagacacagcaauucuguguug

SEQ ID NO: 1071376 - RNA, 22 nt, Human
cauguacaguuuuucuguccug

SEQ ID NO: 1071377 - RNA, 22 nt, Human
caacuacuggugcucaggaaau

SEQ ID NO: 1071378 - RNA, 19 nt, Human
gacuccaacuuuaagcaug

SEQ ID NO: 1071379 - RNA, 22 nt, Human
uauaucauggagauuaacauuc

SEQ ID NO: 1071380 - RNA, 21 nt, Human
ugauccuuucccccauguugc

SEQ ID NO: 1071381 - RNA, 22 nt, Human
ucucagggaccaugaugaugac

SEQ ID NO: 1071382 - RNA, 22 nt, Human
ucauaaacacacuaguaugauu

SEQ ID NO: 1071383 - RNA, 20 nt, Human
acaggagaucugaggaaagg

SEQ ID NO: 1071384 - RNA, 22 nt, Human
aguuuuauaucuuccauugguu

SEQ ID NO: 1071385 - RNA, 21 nt, Human
cagagguggccugaccucuga

SEQ ID NO: 1071386 - RNA, 22 nt, Human
aaauauaguaaaugcauaguuc

SEQ ID NO: 1071387 - RNA, 22 nt, Human
gaaaucuacuuagugucuggau

SEQ ID NO: 1071388 - RNA, 22 nt, Human
uggaggaaguugcuggaaguca

SEQ ID NO: 1071389 - RNA, 22 nt, Human
cagcugaguuuccaagucugcc

SEQ ID NO: 1071390 - RNA, 22 nt, Human
gaaauuaaccaccuuuggcuuu

SEQ ID NO: 1071391 - RNA, 22 nt, Human
cugaacucaugauaugcuuuug

SEQ ID NO: 1071392 - RNA, 22 nt, Human
uaacacagaguaaguggucaau

SEQ ID NO: 1071393 - RNA, 18 nt, Human
caggaugagugaugggga

SEQ ID NO: 1071394 - RNA, 22 nt, Human
uugcauucuguuaaaauguauu

SEQ ID NO: 1071395 - RNA, 21 nt, Human
ugggaugggucugggaccagc

SEQ ID NO: 1071396 - RNA, 22 nt, Human
guauuuuuaguagagucggggu

SEQ ID NO: 1071397 - RNA, 17 nt, Human
ucuggccuuccugaacu

SEQ ID NO: 1071398 - RNA, 22 nt, Human
uaaaggguagguuuuacuguaa

SEQ ID NO: 1071399 - RNA, 20 nt, Human
auagaaguauuauguaaugu

SEQ ID NO: 1071400 - RNA, 17 nt, Human
acaagcaguggccaugg

SEQ ID NO: 1071401 - RNA, 22 nt, Human
ccaucacaguccccaucgugau

SEQ ID NO: 1071402 - RNA, 22 nt, Human
gggcaggaggcuaauucugcau

SEQ ID NO: 1071403 - RNA, 22 nt, Human
cagaauggcuuuuauggcucag

SEQ ID NO: 1071404 - RNA, 22 nt, Human
ccaggcucugagaggaauguga

SEQ ID NO: 1071405 - RNA, 22 nt, Human
agggaggcaggaaaguugucug

SEQ ID NO: 1071406 - RNA, 22 nt, Human
aggcaggggagcuggaagggua

SEQ ID NO: 1071407 - RNA, 22 nt, Human
ccacuguaguuaugaugaaguu

SEQ ID NO: 1071408 - RNA, 22 nt, Human
ucugagcuuuuauuaucaaccu

SEQ ID NO: 1071409 - RNA, 22 nt, Human
ccaggcucuguuccccgaggag

SEQ ID NO: 1071410 - RNA, 22 nt, Human
aguuucauauuaccaugucacc

SEQ ID NO: 1071411 - RNA, 22 nt, Human
auauuaaugggauuuagucagg

SEQ ID NO: 1071412 - RNA, 22 nt, Human
cccuccagcucaaagcaaccgg

SEQ ID NO: 1071413 - RNA, 22 nt, Human
aacauuuaugguagucauugca

SEQ ID NO: 1071414 - RNA, 22 nt, Human
agugaaauuccuggucuuuguu

SEQ ID NO: 1071415 - RNA, 22 nt, Human
agucaacauuugagaugcaaug

SEQ ID NO: 1071416 - RNA, 22 nt, Human
aaugucacauacaauggcaagu

SEQ ID NO: 1071417 - RNA, 22 nt, Human
aacuuuagaaaggaaggaagug

SEQ ID NO: 1071418 - RNA, 22 nt, Human
cauuuaguccuugacuucucuc

SEQ ID NO: 1071419 - RNA, 20 nt, Human
gcauugaguauagacagaug

SEQ ID NO: 1071420 - RNA, 22 nt, Human
uaagucauuaggcugaguucaa

SEQ ID NO: 1071421 - RNA, 22 nt, Human
gccaggcgggucucaaacuccu

SEQ ID NO: 1071422 - RNA, 22 nt, Human
uucacaaucuggcuuagcauug

SEQ ID NO: 1071423 - RNA, 22 nt, Human
gaggccucugucccaccaggga

SEQ ID NO: 1071424 - RNA, 22 nt, Human
uccuuuuuaagucguuguggua

SEQ ID NO: 1071425 - RNA, 19 nt, Human
acagacauuugcaauuagc

SEQ ID NO: 1071426 - RNA, 22 nt, Human
gugacucacacaggccugggcu

SEQ ID NO: 1071427 - RNA, 22 nt, Human
agggggcccuugcaggugagcg

SEQ ID NO: 1071428 - RNA, 22 nt, Human
auuuuuccaauuaggauaaaga

SEQ ID NO: 1071429 - RNA, 22 nt, Human
caaagugcuggaauuacaggug

SEQ ID NO: 1071430 - RNA, 22 nt, Human
agauuaucuccugauuuuaagg

SEQ ID NO: 1071431 - RNA, 18 nt, Human
aggcaggauccuggccuc

SEQ ID NO: 1071432 - RNA, 22 nt, Human
gcacaacaccaagggagguauc

SEQ ID NO: 1071433 - RNA, 22 nt, Human
gugugcagaagacacaagacau

SEQ ID NO: 1071434 - RNA, 22 nt, Human
gcaugggcaccagucucuaggu

SEQ ID NO: 1071435 - RNA, 22 nt, Human
uucacagccucugccccaggca

SEQ ID NO: 1071436 - RNA, 22 nt, Human
guacaauaacuagucuuauagu

SEQ ID NO: 1071437 - RNA, 22 nt, Human
ccaguccacgucaagaagaggu

SEQ ID NO: 1071438 - RNA, 22 nt, Human
gugaucuuguaauugggcaaug

SEQ ID NO: 1071439 - RNA, 22 nt, Human
ccucccagugccuccagagcag

SEQ ID NO: 1071440 - RNA, 22 nt, Human
agacaauggaccaagcaccuuc

SEQ ID NO: 1071441 - RNA, 22 nt, Human
ugucaugcccaggagcaaggua

SEQ ID NO: 1071442 - RNA, 22 nt, Human
aaaguucuggagaaaauaauga

SEQ ID NO: 1071443 - RNA, 22 nt, Human
auacaaguugugauaauguaaa

SEQ ID NO: 1071444 - RNA, 22 nt, Human
caguauuuaggauuaggagaga

SEQ ID NO: 1071445 - RNA, 22 nt, Human
gggcaguggguggcugcagccu

SEQ ID NO: 1071446 - RNA, 22 nt, Human
ugccagagaagacccagucacu

SEQ ID NO: 1071447 - RNA, 22 nt, Human
acccacaccuccguauaucacu

SEQ ID NO: 1071448 - RNA, 22 nt, Human
cagagaaagacuugcccuuagu

SEQ ID NO: 1071449 - RNA, 22 nt, Human
gaggaaacauuguagaagcagu

SEQ ID NO: 1071450 - RNA, 22 nt, Human
uacaucuuugucuaugaccagc

SEQ ID NO: 1071451 - RNA, 23 nt, Human
uuuuaauuuggacauaagaagau

SEQ ID NO: 1071452 - RNA, 22 nt, Human
cugugccuggggggcagagcug

SEQ ID NO: 1071453 - RNA, 22 nt, Human
ugacagauuuugauggcuaaua

SEQ ID NO: 1071454 - RNA, 22 nt, Human
acaaaggugagcagaagacaca

SEQ ID NO: 1071455 - RNA, 22 nt, Human
acccuucauagaggagaagcug

SEQ ID NO: 1071456 - RNA, 22 nt, Human
uuuucucuuguuaauguacuga

SEQ ID NO: 1071457 - RNA, 22 nt, Human
uguauacauuuggugcauauuu

SEQ ID NO: 1071458 - RNA, 22 nt, Human
ucagggaagaaaugggacuuua

SEQ ID NO: 1071459 - RNA, 22 nt, Human
ggagggcugccagguggagcgg

SEQ ID NO: 1071460 - RNA, 22 nt, Human
uccaaguugauguuucuuaaau

SEQ ID NO: 1071461 - RNA, 22 nt, Human
ccuggcagguggcgcccucggc

SEQ ID NO: 1071462 - RNA, 20 nt, Human
uccagcugucuuucagagac

SEQ ID NO: 1071463 - RNA, 22 nt, Human
ggagugggcagcacugcccugu

SEQ ID NO: 1071464 - RNA, 22 nt, Human
ugcagguggauucaauguggga

SEQ ID NO: 1071465 - RNA, 18 nt, Human
acagaacucaggggcacc

SEQ ID NO: 1071466 - RNA, 19 nt, Human
gcuggcagauguggccgug

SEQ ID NO: 1071467 - RNA, 22 nt, Human
aggcugaggaucccuguguucu

SEQ ID NO: 1071468 - RNA, 22 nt, Human
gagggguccaggaggcacuuac

SEQ ID NO: 1071469 - RNA, 22 nt, Human
agagcuggacgucugagcccua

SEQ ID NO: 1071470 - RNA, 22 nt, Human
augauucagcaauuuuauaucu

SEQ ID NO: 1071471 - RNA, 22 nt, Human
uggcucagaguucaucuuuuag

SEQ ID NO: 1071472 - RNA, 19 nt, Human
ggcucuggcggcuguagcc

SEQ ID NO: 1071473 - RNA, 19 nt, Human
aggacucuggaggcaugag

SEQ ID NO: 1071474 - RNA, 22 nt, Human
agugaguggguuacagauggga

SEQ ID NO: 1071475 - RNA, 22 nt, Human
uacaagagugagauuaucaugu

SEQ ID NO: 1071476 - RNA, 22 nt, Human
gucuucauucaacaaauauuca

SEQ ID NO: 1071477 - RNA, 22 nt, Human
cuuucagagguuacucaggaaa

SEQ ID NO: 1071478 - RNA, 22 nt, Human
uaaggccaaggggccauagucu

SEQ ID NO: 1071479 - RNA, 22 nt, Human
aguggccagugcugcucugggg

SEQ ID NO: 1071480 - RNA, 22 nt, Human
agugcaaaauucagaagcaauu

SEQ ID NO: 1071481 - RNA, 22 nt, Human
aagcagcauagcucccuuaguu

SEQ ID NO: 1071482 - RNA, 22 nt, Human
cagugcagccaaggacaggcac

SEQ ID NO: 1071483 - RNA, 22 nt, Human
auacaaaguauuaauccuggau

SEQ ID NO: 1071484 - RNA, 22 nt, Human
gcagccacccucaaggcugaau

SEQ ID NO: 1071485 - RNA, 22 nt, Human
auugugaauagugcugcaauaa

SEQ ID NO: 1071486 - RNA, 21 nt, Human
cauugucgacauuuuccccuc

SEQ ID NO: 1071487 - RNA, 22 nt, Human
auuuuuccaugauacuuaucug

SEQ ID NO: 1071488 - RNA, 19 nt, Human
acauggcaucccaggaggu

SEQ ID NO: 1071489 - RNA, 22 nt, Human
aggcaggcucaggcccaugcuu

SEQ ID NO: 1071490 - RNA, 22 nt, Human
cauaacacauucaucagcagag

SEQ ID NO: 1071491 - RNA, 22 nt, Human
agaagaaaugaggccguucugc

SEQ ID NO: 1071492 - RNA, 22 nt, Human
acagcagccugcagcccugugu

SEQ ID NO: 1071493 - RNA, 22 nt, Human
ggcccugcgauuagguggcagg

SEQ ID NO: 1071494 - RNA, 22 nt, Human
ugauggugggucugaucucaua

SEQ ID NO: 1071495 - RNA, 22 nt, Human
agaaauacuuuguaaaucucac

SEQ ID NO: 1071496 - RNA, 22 nt, Human
acagcaguuacugaaauaaagu

SEQ ID NO: 1071497 - RNA, 22 nt, Human
gaacauuuauauuagauagcua

SEQ ID NO: 1071498 - RNA, 22 nt, Human
uaaaggcucguauuguugugug

SEQ ID NO: 1071499 - RNA, 21 nt, Human
cccacggaaugaugaggcacu

SEQ ID NO: 1071500 - RNA, 22 nt, Human
aauauaguucugguauuguuaa

SEQ ID NO: 1071501 - RNA, 22 nt, Human
ucuuagaaguucauguuccagc

SEQ ID NO: 1071502 - RNA, 22 nt, Human
gcagacuggucuucagccuugg

SEQ ID NO: 1071503 - RNA, 22 nt, Human
gagugugggcacgggggccuug

SEQ ID NO: 1071504 - RNA, 21 nt, Human
ccacaggggcuccccugucag

SEQ ID NO: 1071505 - RNA, 22 nt, Human
agcauccagcauccuauagaaa

SEQ ID NO: 1071506 - RNA, 22 nt, Human
cacaggaaaauaaaagaucuaa

SEQ ID NO: 1071507 - RNA, 22 nt, Human
ucucccaggcuggagugcagug

SEQ ID NO: 1071508 - RNA, 22 nt, Human
uggcucaggagggaucuuugcu

SEQ ID NO: 1071509 - RNA, 22 nt, Human
agugcaaauaucuacgcgguga

SEQ ID NO: 1071510 - RNA, 22 nt, Human
uggacaacauagugagaccuca

SEQ ID NO: 1071511 - RNA, 16 nt, Human
uggcagagguucagcc

SEQ ID NO: 1071512 - RNA, 22 nt, Human
gccaggcugaggcucuggaaga

SEQ ID NO: 1071513 - RNA, 20 nt, Human
caccaggcgcucugagaaca

SEQ ID NO: 1071514 - RNA, 22 nt, Human
ugcaggugguuuggacacugcu

SEQ ID NO: 1071515 - RNA, 21 nt, Human
gcaggaugcaucuuggugucu

SEQ ID NO: 1071516 - RNA, 22 nt, Human
gugccagggaguggaggagcuu

SEQ ID NO: 1071517 - RNA, 22 nt, Human
cagcugcuguucaguuuuguuu

SEQ ID NO: 1071518 - RNA, 22 nt, Human
guuauacacauuccuggugagg

SEQ ID NO: 1071519 - RNA, 22 nt, Human
aaacaucuugcucugauuggua

SEQ ID NO: 1071520 - RNA, 21 nt, Human
gcagccagacgggauucaguu

SEQ ID NO: 1071521 - RNA, 22 nt, Human
gaaggaaggaaaaauauauuua

SEQ ID NO: 1071522 - RNA, 22 nt, Human
ucucugguggcuccaucaguag

SEQ ID NO: 1071523 - RNA, 22 nt, Human
gcagggcacagacagugccaag

SEQ ID NO: 1071524 - RNA, 18 nt, Human
agcuggcccuggcugccg

SEQ ID NO: 1071525 - RNA, 22 nt, Human
auuauuaaagcuuaggucuuau

SEQ ID NO: 1071526 - RNA, 22 nt, Human
cugccaugcaguuagucccuca

SEQ ID NO: 1071527 - RNA, 22 nt, Human
guagaucaugagaauguuuuug

SEQ ID NO: 1071528 - RNA, 22 nt, Human
uucaacaaauauuuauugagcu

SEQ ID NO: 1071529 - RNA, 22 nt, Human
cugcuucuaagaaccugcagcu

SEQ ID NO: 1071530 - RNA, 22 nt, Human
cccugcugugccugacugccau

SEQ ID NO: 1071531 - RNA, 22 nt, Human
aaacagcuccuuaguuuccauc

SEQ ID NO: 1071532 - RNA, 22 nt, Human
uuucagaugcaauuaauuuuca

SEQ ID NO: 1071533 - RNA, 22 nt, Human
cccacccugggcuacacaucca

SEQ ID NO: 1071534 - RNA, 22 nt, Human
uggagggaacccaggcugcucu

SEQ ID NO: 1071535 - RNA, 22 nt, Human
ucucaugugauucccgugcaug

SEQ ID NO: 1071536 - RNA, 22 nt, Human
ggugaaggcacaagagggcaag

SEQ ID NO: 1071537 - RNA, 22 nt, Human
uucucuuacauuuucucagccu

SEQ ID NO: 1071538 - RNA, 22 nt, Human
aaguuacaguuauuauuuaaaa

SEQ ID NO: 1071539 - RNA, 22 nt, Human
aagcuagaugacguuauuuuuu

SEQ ID NO: 1071540 - RNA, 22 nt, Human
uagaauuuucugcuuugauagu

SEQ ID NO: 1071541 - RNA, 22 nt, Human
ugggcucugguuuccuggcugg

SEQ ID NO: 1071542 - RNA, 22 nt, Human
uccucagggcggccuccgucuu

SEQ ID NO: 1071543 - RNA, 21 nt, Human
cuagagugggaccggagucua

SEQ ID NO: 1071544 - RNA, 22 nt, Human
agagcagauggccagggggccu

SEQ ID NO: 1071545 - RNA, 22 nt, Human
augccaggaacaaacaguggug

SEQ ID NO: 1071546 - RNA, 22 nt, Human
aauuuuguucuuggaaaucagg

SEQ ID NO: 1071547 - RNA, 22 nt, Human
ucugcugucacucauuugcuuc

SEQ ID NO: 1071548 - RNA, 22 nt, Human
gcugaaggaggcucugguacua

SEQ ID NO: 1071549 - RNA, 22 nt, Human
agcagcaggcuagggaacugcu

SEQ ID NO: 1071550 - RNA, 22 nt, Human
ucucugagcugcuucuugcaua

SEQ ID NO: 1071551 - RNA, 22 nt, Human
accaacauguccucacacagcc

SEQ ID NO: 1071552 - RNA, 22 nt, Human
uucuuucuuggggaacacacuc

SEQ ID NO: 1071553 - RNA, 22 nt, Human
agcccagccggauucccaguuc

SEQ ID NO: 1071554 - RNA, 22 nt, Human
auaacagaauaagucauuaccg

SEQ ID NO: 1071555 - RNA, 22 nt, Human
ucuaguucuagaucccugagga

SEQ ID NO: 1071556 - RNA, 22 nt, Human
auaauuuaauuuucacaguggu

SEQ ID NO: 1071557 - RNA, 22 nt, Human
uuuuauguuccugaagcuaucu

SEQ ID NO: 1071558 - RNA, 22 nt, Human
cagcacuggggggauucggagc

SEQ ID NO: 1071559 - RNA, 22 nt, Human
ucuccugucuucucagcacccc

SEQ ID NO: 1071560 - RNA, 22 nt, Human
aaaugucaaagacguguuuuug

SEQ ID NO: 1071561 - RNA, 18 nt, Human
uccuccuuuggccuuuuc

SEQ ID NO: 1071562 - RNA, 22 nt, Human
gguagaaggggaagagguccau

SEQ ID NO: 1071563 - RNA, 22 nt, Human
agccagggucucucgcucuguu

SEQ ID NO: 1071564 - RNA, 22 nt, Human
ucucccagaggaucccagugga

SEQ ID NO: 1071565 - RNA, 22 nt, Human
agucucuuccuucaaggcuggu

SEQ ID NO: 1071566 - RNA, 22 nt, Human
ugcagggccccucugcaugagu

SEQ ID NO: 1071567 - RNA, 22 nt, Human
cugcugugagcacuccagccug

SEQ ID NO: 1071568 - RNA, 22 nt, Human
aaucagaaauucuacaucacaa

SEQ ID NO: 1071569 - RNA, 22 nt, Human
gcacccagcccagggcgugaug

SEQ ID NO: 1071570 - RNA, 22 nt, Human
agcccaagcuaugaggugaccu

SEQ ID NO: 1071571 - RNA, 20 nt, Human
agcagcauuguucuagagca

SEQ ID NO: 1071572 - RNA, 22 nt, Human
agaauccugaugaaaaggagag

SEQ ID NO: 1071573 - RNA, 22 nt, Human
cugacagucucauugauuugcu

SEQ ID NO: 1071574 - RNA, 22 nt, Human
ucauauuuauauguuggcacag

SEQ ID NO: 1071575 - RNA, 22 nt, Human
ucugucacaauuugcuuacucu

SEQ ID NO: 1071576 - RNA, 22 nt, Human
auguguguaaacaaguauaauu

SEQ ID NO: 1071577 - RNA, 22 nt, Human
agggcugagacuaaggccagau

SEQ ID NO: 1071578 - RNA, 22 nt, Human
agggcagcacagcugugcuccu

SEQ ID NO: 1071579 - RNA, 22 nt, Human
acuugaaacaucuuuaaaugua

SEQ ID NO: 1071580 - RNA, 17 nt, Human
ggagaucuggcagaggg

SEQ ID NO: 1071581 - RNA, 22 nt, Human
caggcagcucuaauggaaagug

SEQ ID NO: 1071582 - RNA, 19 nt, Human
aucugccuuagugcugcug

SEQ ID NO: 1071583 - RNA, 22 nt, Human
ucccagaaaaaggaggcuauga

SEQ ID NO: 1071584 - RNA, 22 nt, Human
ggccucaguuucuucaacugua

SEQ ID NO: 1071585 - RNA, 21 nt, Human
ccugugugucugacugggcua

SEQ ID NO: 1071586 - RNA, 22 nt, Human
uccaggcuagguuuacaggaca

SEQ ID NO: 1071587 - RNA, 22 nt, Human
caccuggcuggaagugcuccgg

SEQ ID NO: 1071588 - RNA, 19 nt, Human
ugagagugaggaaggcuuc

SEQ ID NO: 1071589 - RNA, 22 nt, Human
ccuccagggcagacggggagca

SEQ ID NO: 1071590 - RNA, 22 nt, Human
uagaacaaugaauuucuggagg

SEQ ID NO: 1071591 - RNA, 21 nt, Human
acugcaaacagcagagacuga

SEQ ID NO: 1071592 - RNA, 22 nt, Human
auuuccacauaagggaaauaag

SEQ ID NO: 1071593 - RNA, 22 nt, Human
aggauccuccuuagaaaagacc

SEQ ID NO: 1071594 - RNA, 22 nt, Human
cucuggaggucagguguggugg

SEQ ID NO: 1071595 - RNA, 22 nt, Human
ggggugugucugacaaugguau

SEQ ID NO: 1071596 - RNA, 22 nt, Human
ugaagccuuguguggccucucu

SEQ ID NO: 1071597 - RNA, 22 nt, Human
ucacaauucagaaaccaaguag

SEQ ID NO: 1071598 - RNA, 17 nt, Human
ccuguguuugcuccuuc

SEQ ID NO: 1071599 - RNA, 22 nt, Human
cugucacacuaaaacaagaagu

SEQ ID NO: 1071600 - RNA, 22 nt, Human
ugcaggcuccaggugcacauau

SEQ ID NO: 1071601 - RNA, 22 nt, Human
gugcgccagcucaaggggaggc

SEQ ID NO: 1071602 - RNA, 22 nt, Human
acacauacauggggaagaugag

SEQ ID NO: 1071603 - RNA, 20 nt, Human
uccuucaggcagggccuagu

SEQ ID NO: 1071604 - RNA, 18 nt, Human
cuacauucauaggaaagg

SEQ ID NO: 1071605 - RNA, 22 nt, Human
aagccagguguugugguaagag

SEQ ID NO: 1071606 - RNA, 22 nt, Human
ucaggggaaaucucucagcgaa

SEQ ID NO: 1071607 - RNA, 22 nt, Human
aggaagaugggagagcucugga

SEQ ID NO: 1071608 - RNA, 22 nt, Human
accugccucuaagcagcaggug

SEQ ID NO: 1071609 - RNA, 22 nt, Human
ugcccugccaagacugaguggu

SEQ ID NO: 1071610 - RNA, 22 nt, Human
ccaguguuuacaguugaacaaa

SEQ ID NO: 1071611 - RNA, 22 nt, Human
uuugagguuagcuagcagauca

SEQ ID NO: 1071612 - RNA, 22 nt, Human
ccaggccuuucuucuuggucug

SEQ ID NO: 1071613 - RNA, 22 nt, Human
gcucuggacccuggaguggcug

SEQ ID NO: 1071614 - RNA, 22 nt, Human
ccagguaccagucaaaucugua

SEQ ID NO: 1071615 - RNA, 22 nt, Human
gcucccuguucucagccaugau

SEQ ID NO: 1071616 - RNA, 22 nt, Human
uuucaacauauaccauaaugcc

SEQ ID NO: 1071617 - RNA, 22 nt, Human
gggccuccgugugcuggugcuc

SEQ ID NO: 1071618 - RNA, 22 nt, Human
ucaggcugcaucuguaagggug

SEQ ID NO: 1071619 - RNA, 22 nt, Human
uggaggugagugugguacagca

SEQ ID NO: 1071620 - RNA, 22 nt, Human
aucacaggugguaggaaaagaa

SEQ ID NO: 1071621 - RNA, 20 nt, Human
uucuaaacuguuaggcuugc

SEQ ID NO: 1071622 - RNA, 22 nt, Human
agcauauacaaacucauauaca

SEQ ID NO: 1071623 - RNA, 22 nt, Human
agaagcagaaggaagcagggcc

SEQ ID NO: 1071624 - RNA, 22 nt, Human
aagugauucugauguguuucuu

SEQ ID NO: 1071625 - RNA, 22 nt, Human
ugggggagauuagagcuucuua

SEQ ID NO: 1071626 - RNA, 22 nt, Human
gaaaauuauugaaaauggcucu

SEQ ID NO: 1071627 - RNA, 20 nt, Human
gcagcugaaaguaugacacc

SEQ ID NO: 1071628 - RNA, 22 nt, Human
ggaggcacuucccgucucagcc

SEQ ID NO: 1071629 - RNA, 22 nt, Human
ccagugcacagccaggcaggug

SEQ ID NO: 1071630 - RNA, 22 nt, Human
ucugaaggugcuagagaaagcu

SEQ ID NO: 1071631 - RNA, 22 nt, Human
agugaaaugacugaaucagaua

SEQ ID NO: 1071632 - RNA, 22 nt, Human
gcccucagcauccucagggcca

SEQ ID NO: 1071633 - RNA, 20 nt, Human
uaugaagacucaaguagggc

SEQ ID NO: 1071634 - RNA, 22 nt, Human
cauacuuuugcccugacauucu

SEQ ID NO: 1071635 - RNA, 22 nt, Human
agggcagcauugccuuucucca

SEQ ID NO: 1071636 - RNA, 22 nt, Human
agggccugucagcgguguccug

SEQ ID NO: 1071637 - RNA, 22 nt, Human
auugcuguggaaauauaagaug

SEQ ID NO: 1071638 - RNA, 22 nt, Human
agggaugcaguaaaaacuguag

SEQ ID NO: 1071639 - RNA, 20 nt, Human
uggcagaguugucccaccca

SEQ ID NO: 1071640 - RNA, 19 nt, Human
ugcagcucagggcaggggc

SEQ ID NO: 1071641 - RNA, 22 nt, Human
agaagagaacugccaaacacuu

SEQ ID NO: 1071642 - RNA, 22 nt, Human
cuggggacugaaggauguugcu

SEQ ID NO: 1071643 - RNA, 22 nt, Human
aauucuuaaucccauaaaguga

SEQ ID NO: 1071644 - RNA, 22 nt, Human
aaaugucagaagcuuuacuucu

SEQ ID NO: 1071645 - RNA, 22 nt, Human
ugggggugacuaucucgggaau

SEQ ID NO: 1071646 - RNA, 22 nt, Human
ugugagacguguuagaacagug

SEQ ID NO: 1071647 - RNA, 22 nt, Human
cucuguagaaacagggcagaag

SEQ ID NO: 1071648 - RNA, 17 nt, Human
caucuuuaaaauccuga

SEQ ID NO: 1071649 - RNA, 22 nt, Human
gacacagauaauuuaguuaaaa

SEQ ID NO: 1071650 - RNA, 17 nt, Human
guccugggaggagagag

SEQ ID NO: 1071651 - RNA, 22 nt, Human
aaggccacacuugcuggccagc

SEQ ID NO: 1071652 - RNA, 22 nt, Human
cucugaggcuccaugcaggcuu

SEQ ID NO: 1071653 - RNA, 22 nt, Human
uaaggaaagugccaugauuucu

SEQ ID NO: 1071654 - RNA, 22 nt, Human
ccugagacaugaaccaggcucc

SEQ ID NO: 1071655 - RNA, 22 nt, Human
agcacagauucugaagaguccu

SEQ ID NO: 1071656 - RNA, 22 nt, Human
gccaccagggggcuccagugag

SEQ ID NO: 1071657 - RNA, 20 nt, Human
acccugcauacuggaaggcu

SEQ ID NO: 1071658 - RNA, 22 nt, Human
ggcagcucugcuccacaugagu

SEQ ID NO: 1071659 - RNA, 22 nt, Human
uccuggcuucugucuccuuauu

SEQ ID NO: 1071660 - RNA, 22 nt, Human
ccagucacuggaaaaugggaau

SEQ ID NO: 1071661 - RNA, 22 nt, Human
agcagagccugggcuaggggug

SEQ ID NO: 1071662 - RNA, 22 nt, Human
uugcauauccuccaacacaugg

SEQ ID NO: 1071663 - RNA, 22 nt, Human
cagcuguugucucucacauauu

SEQ ID NO: 1071664 - RNA, 22 nt, Human
gagaagcaaucaguggccaccc

SEQ ID NO: 1071665 - RNA, 22 nt, Human
cagcccagcagggucuggcccu

SEQ ID NO: 1071666 - RNA, 22 nt, Human
ugcaaauugcaugauguguauc

SEQ ID NO: 1071667 - RNA, 22 nt, Human
acacaucuauauugcaucugca

SEQ ID NO: 1071668 - RNA, 22 nt, Human
uuucuucucacccaggacagag

SEQ ID NO: 1071669 - RNA, 22 nt, Human
aauauuucuggugcuucucacu

SEQ ID NO: 1071670 - RNA, 22 nt, Human
gaggcagcaucuauggugggaa

SEQ ID NO: 1071671 - RNA, 22 nt, Human
auaacauuuugacaacugguga

SEQ ID NO: 1071672 - RNA, 22 nt, Human
aaaaucaguacacuuuauuuug

SEQ ID NO: 1071673 - RNA, 22 nt, Human
ggcccaucucuugcucuggguu

SEQ ID NO: 1071674 - RNA, 22 nt, Human
ggcucuggcguccaauggagcg

SEQ ID NO: 1071675 - RNA, 22 nt, Human
ugaaggagggaagaaggcucug

SEQ ID NO: 1071676 - RNA, 22 nt, Human
gcuguggaugcuauggaucauc

SEQ ID NO: 1071677 - RNA, 18 nt, Human
acaggccucaguccugca

SEQ ID NO: 1071678 - RNA, 22 nt, Human
cugcuucugggaugauggagua

SEQ ID NO: 1071679 - RNA, 22 nt, Human
ggucucaggagacuggagagca

SEQ ID NO: 1071680 - RNA, 22 nt, Human
uuacaacuuuccugugucaaau

SEQ ID NO: 1071681 - RNA, 22 nt, Human
ggagaggcgaugagucacagcc

SEQ ID NO: 1071682 - RNA, 22 nt, Human
gaaggccuagggaugcucugcg

SEQ ID NO: 1071683 - RNA, 22 nt, Human
agaccagcugccucccagggcc

SEQ ID NO: 1071684 - RNA, 22 nt, Human
cuggccuggcaggggaccucua

SEQ ID NO: 1071685 - RNA, 22 nt, Human
uuccucagcuggccugauuggg

SEQ ID NO: 1071686 - RNA, 19 nt, Human
cucugcccuacagaaagcu

SEQ ID NO: 1071687 - RNA, 22 nt, Human
agcagcagauccaaaaaaugug

SEQ ID NO: 1071688 - RNA, 22 nt, Human
acacauuugcauaauaccucau

SEQ ID NO: 1071689 - RNA, 21 nt, Human
cugugcuucuuccuaagccag

SEQ ID NO: 1071690 - RNA, 22 nt, Human
cugaggcacugucagcugaggc

SEQ ID NO: 1071691 - RNA, 22 nt, Human
ugccucugaggaagauuguguu

SEQ ID NO: 1071692 - RNA, 22 nt, Human
aagcagagaaaagcuuagguuc

SEQ ID NO: 1071693 - RNA, 22 nt, Human
agcugugaccuucaagagcuac

SEQ ID NO: 1071694 - RNA, 22 nt, Human
cugagaaauacccaagucuggu

SEQ ID NO: 1071695 - RNA, 20 nt, Human
uguugauuggugucaucuca

SEQ ID NO: 1071696 - RNA, 22 nt, Human
ucauaaguaauuuaaacauucc

SEQ ID NO: 1071697 - RNA, 22 nt, Human
gggaccuggggacuccuuguuc

SEQ ID NO: 1071698 - RNA, 22 nt, Human
acaccaaaguagaauuaaugua

SEQ ID NO: 1071699 - RNA, 22 nt, Human
uuguuucugaguuuucauguau

SEQ ID NO: 1071700 - RNA, 19 nt, Human
uucugcccucucuucuagc

SEQ ID NO: 1071701 - RNA, 22 nt, Human
uguaugaaagaacaagggcuua

SEQ ID NO: 1071702 - RNA, 22 nt, Human
gcacugaaugcuuuuacuguaa

SEQ ID NO: 1071703 - RNA, 22 nt, Human
uggcucaguuccaucaucugga

SEQ ID NO: 1071704 - RNA, 23 nt, Human
ucugagugauuagccucuggggu

SEQ ID NO: 1071705 - RNA, 22 nt, Human
auacaucuuccuuuuaaaaugc

SEQ ID NO: 1071706 - RNA, 22 nt, Human
aguuuuauggcucaaccuaaua

SEQ ID NO: 1071707 - RNA, 22 nt, Human
cugagcuuggccaggaaugaau

SEQ ID NO: 1071708 - RNA, 22 nt, Human
uccuggaguauuucuguggugu

SEQ ID NO: 1071709 - RNA, 22 nt, Human
ggugacugguuuaucuggcagu

SEQ ID NO: 1071710 - RNA, 22 nt, Human
acugcuauuuuauaacagaaga

SEQ ID NO: 1071711 - RNA, 22 nt, Human
ucaaaggcugcuugucuucugg

SEQ ID NO: 1071712 - RNA, 17 nt, Human
uuuuguucaucuucaaa

SEQ ID NO: 1071713 - RNA, 22 nt, Human
acagcuggaggucugugagcac

SEQ ID NO: 1071714 - RNA, 22 nt, Human
ugguuuuauuuauguugaguca

SEQ ID NO: 1071715 - RNA, 22 nt, Human
gggagggaucugcuaggcaaug

SEQ ID NO: 1071716 - RNA, 23 nt, Human
guggccuccccggaaugccucgc

SEQ ID NO: 1071717 - RNA, 20 nt, Human
ucuucagaugcuuuuggagu

SEQ ID NO: 1071718 - RNA, 22 nt, Human
cugccuugaaaaugaagcuuua

SEQ ID NO: 1071719 - RNA, 22 nt, Human
ggaggaugccaagcugugcaca

SEQ ID NO: 1071720 - RNA, 22 nt, Human
ucccacugugaauccaaggccu

SEQ ID NO: 1071721 - RNA, 22 nt, Human
agcaugaaagcauaggacaguc

SEQ ID NO: 1071722 - RNA, 22 nt, Human
ucugucuccugccagugccucu

SEQ ID NO: 1071723 - RNA, 22 nt, Human
uaaaggcacggaguuguuaugg

SEQ ID NO: 1071724 - RNA, 22 nt, Human
aggcugggcuccgcccaacucc

SEQ ID NO: 1071725 - RNA, 22 nt, Human
agcagggcagugcuucagcucu

SEQ ID NO: 1071726 - RNA, 22 nt, Human
ucccucagacagauguguuccu

SEQ ID NO: 1071727 - RNA, 22 nt, Human
ucuauucauucaauuuagcucu

SEQ ID NO: 1071728 - RNA, 22 nt, Human
auauuuguuagagucuaugugu

SEQ ID NO: 1071729 - RNA, 22 nt, Human
ucuuguccuaagagcuggauuc

SEQ ID NO: 1071730 - RNA, 22 nt, Human
uuuccucuuuguaccuugacua

SEQ ID NO: 1071731 - RNA, 21 nt, Human
ggagucauuagucauuuccuu

SEQ ID NO: 1071732 - RNA, 22 nt, Human
cagucuuuguucccauuacuga

SEQ ID NO: 1071733 - RNA, 22 nt, Human
acuggacagaggaaauauggag

SEQ ID NO: 1071734 - RNA, 22 nt, Human
cagcucuguaaauuccuucauc

SEQ ID NO: 1071735 - RNA, 22 nt, Human
ugagguaggugguaagagauac

SEQ ID NO: 1071736 - RNA, 22 nt, Human
cuggccugggagcugcuagcgu

SEQ ID NO: 1071737 - RNA, 22 nt, Human
gcuaguuucuugaauacucuaa

SEQ ID NO: 1071738 - RNA, 22 nt, Human
ugauacauaaaccaucauuuug

SEQ ID NO: 1071739 - RNA, 22 nt, Human
aaaugcagguaguauuuauuuu

SEQ ID NO: 1071740 - RNA, 18 nt, Human
uccaaaaucauguauuuu

SEQ ID NO: 1071741 - RNA, 22 nt, Human
uccagaguuguaaguguugaca

SEQ ID NO: 1071742 - RNA, 20 nt, Human
uuucaaaggcaccuaugaag

SEQ ID NO: 1071743 - RNA, 22 nt, Human
augggcaguguauuggaaggaa

SEQ ID NO: 1071744 - RNA, 22 nt, Human
ugucugugaccucuuuggagcc

SEQ ID NO: 1071745 - RNA, 22 nt, Human
agagcucaagacgcucacagua

SEQ ID NO: 1071746 - RNA, 22 nt, Human
gacacaggggggcgcuagaaga

SEQ ID NO: 1071747 - RNA, 22 nt, Human
aaucuuuuaggggauccugagg

SEQ ID NO: 1071748 - RNA, 22 nt, Human
gggcaggggucaguggccccaa

SEQ ID NO: 1071749 - RNA, 22 nt, Human
aggagguggcugaacuugaggg

SEQ ID NO: 1071750 - RNA, 22 nt, Human
uggcagaguggaccauacucaa

SEQ ID NO: 1071751 - RNA, 17 nt, Human
ucaggauccaggguucu

SEQ ID NO: 1071752 - RNA, 22 nt, Human
ggcacagggagccgcaguugca

SEQ ID NO: 1071753 - RNA, 22 nt, Human
agaauguagucuuggagauuua

SEQ ID NO: 1071754 - RNA, 22 nt, Human
guccucuguagggcugggccac

SEQ ID NO: 1071755 - RNA, 22 nt, Human
ugacauuugagagagauauaca

SEQ ID NO: 1071756 - RNA, 22 nt, Human
agacauuuauucacacauuuau

SEQ ID NO: 1071757 - RNA, 22 nt, Human
cugcuguguuggcauuggauag

SEQ ID NO: 1071758 - RNA, 22 nt, Human
uuccucuuccaucuucccaggg

SEQ ID NO: 1071759 - RNA, 22 nt, Human
agaaaucauugaauuauuugcu

SEQ ID NO: 1071760 - RNA, 22 nt, Human
caugaagcccucaucagucuga

SEQ ID NO: 1071761 - RNA, 22 nt, Human
gaggguggaagagcugcugaga

SEQ ID NO: 1071762 - RNA, 22 nt, Human
gccuguccacuaaacagccaag

SEQ ID NO: 1071763 - RNA, 18 nt, Human
uggguggcuagggaguuu

SEQ ID NO: 1071764 - RNA, 22 nt, Human
aggagugagcuuuggggucaga

SEQ ID NO: 1071765 - RNA, 22 nt, Human
uucauucagguguauuuauggg

SEQ ID NO: 1071766 - RNA, 22 nt, Human
aggaaacauccuuaucuauucu

SEQ ID NO: 1071767 - RNA, 22 nt, Human
gcuuaaaagccacuuagucuau

SEQ ID NO: 1071768 - RNA, 22 nt, Human
gcagauggcugagccugcagau

SEQ ID NO: 1071769 - RNA, 21 nt, Human
agcuuccugcagugggagguc

SEQ ID NO: 1071770 - RNA, 22 nt, Human
augaaacagaguacuuaauaua

SEQ ID NO: 1071771 - RNA, 22 nt, Human
aaagucaugcaguugaacuuuu

SEQ ID NO: 1071772 - RNA, 22 nt, Human
ugcaggugagugcaggggcuca

SEQ ID NO: 1071773 - RNA, 23 nt, Human
uuugaaaguaucaacucgccuga

SEQ ID NO: 1071774 - RNA, 22 nt, Human
uauguaaaguagauggcaggua

SEQ ID NO: 1071775 - RNA, 22 nt, Human
uuauaacaacaguuuacuuuaa

SEQ ID NO: 1071776 - RNA, 22 nt, Human
gccaggcagcugggagggugcc

SEQ ID NO: 1071777 - RNA, 22 nt, Human
acuucauguuucuauuagcuca

SEQ ID NO: 1071778 - RNA, 22 nt, Human
cagcagagcugggcuuugaauu

SEQ ID NO: 1071779 - RNA, 22 nt, Human
agugggggccaacgagggcagc

SEQ ID NO: 1071780 - RNA, 22 nt, Human
uacauugaauuuuuuagcaugu

SEQ ID NO: 1071781 - RNA, 22 nt, Human
aggcaggcccucuggaaaggua

SEQ ID NO: 1071782 - RNA, 22 nt, Human
uaugccugauaacugugucucu

SEQ ID NO: 1071783 - RNA, 22 nt, Human
acuguggccugcuguaugggcu

SEQ ID NO: 1071784 - RNA, 22 nt, Human
ucccagaggacuguuggugcua

SEQ ID NO: 1071785 - RNA, 22 nt, Human
cccuggggcugagggauggccg

SEQ ID NO: 1071786 - RNA, 22 nt, Human
caggaccuggaaugcuugugaa

SEQ ID NO: 1071787 - RNA, 20 nt, Human
gagcacaguaaugacugcua

SEQ ID NO: 1071788 - RNA, 22 nt, Human
auaaauucaaagcauuuaggac

SEQ ID NO: 1071789 - RNA, 22 nt, Human
ucagggcauggcugcacuuggc

SEQ ID NO: 1071790 - RNA, 22 nt, Human
ucugccuggcucauggcaguga

SEQ ID NO: 1071791 - RNA, 22 nt, Human
ucacaucaggugucuccccaag

SEQ ID NO: 1071792 - RNA, 22 nt, Human
acauucuucagcuuugucaggc

SEQ ID NO: 1071793 - RNA, 22 nt, Human
acagaaaaugccagaagggugg

SEQ ID NO: 1071794 - RNA, 22 nt, Human
acacauguacagauuaguauuu

SEQ ID NO: 1071795 - RNA, 22 nt, Human
uucuuucccagaagauauguuu

SEQ ID NO: 1071796 - RNA, 22 nt, Human
ugcugcugaaaaggugugcuua

SEQ ID NO: 1071797 - RNA, 22 nt, Human
cagggaacaagaugagaaugga

SEQ ID NO: 1071798 - RNA, 18 nt, Human
acccucuggcuucugagc

SEQ ID NO: 1071799 - RNA, 22 nt, Human
gcuccugggcccugggcuaacu

SEQ ID NO: 1071800 - RNA, 22 nt, Human
gugguucagugucauauuaacg

SEQ ID NO: 1071801 - RNA, 22 nt, Human
cagauggcugccuucuugcugu

SEQ ID NO: 1071802 - RNA, 22 nt, Human
guggccagccagggugcugaug

SEQ ID NO: 1071803 - RNA, 22 nt, Human
ucaaaagaaacaccauguuccu

SEQ ID NO: 1071804 - RNA, 22 nt, Human
ugaggaaacugaggcacagaug

SEQ ID NO: 1071805 - RNA, 17 nt, Human
ucgguuugccaggcuuc

SEQ ID NO: 1071806 - RNA, 22 nt, Human
aaauuucuugaggcucucuagc

SEQ ID NO: 1071807 - RNA, 22 nt, Human
cugagaauuacucugaugagua

SEQ ID NO: 1071808 - RNA, 22 nt, Human
aggucauuguuaagucaccaua

SEQ ID NO: 1071809 - RNA, 22 nt, Human
ggggcggggcucugagaagcau

SEQ ID NO: 1071810 - RNA, 22 nt, Human
ucaucccuaaggacagcucugc

SEQ ID NO: 1071811 - RNA, 22 nt, Human
uccaggaagagguguguuggga

SEQ ID NO: 1071812 - RNA, 22 nt, Human
uuacaaagguaguuuugucuau

SEQ ID NO: 1071813 - RNA, 22 nt, Human
aaacaaguuuagaauaaugaau

SEQ ID NO: 1071814 - RNA, 22 nt, Human
aggcacugguccauuuucugca

SEQ ID NO: 1071815 - RNA, 22 nt, Human
agacucuggagucagcuaggau

SEQ ID NO: 1071816 - RNA, 22 nt, Human
uuaaugaccuagagcaguaauu

SEQ ID NO: 1071817 - RNA, 22 nt, Human
uggcucagagagggagugugga

SEQ ID NO: 1071818 - RNA, 22 nt, Human
uucauuccugagcccauauuua

SEQ ID NO: 1071819 - RNA, 22 nt, Human
caguagcaggcaggugcuuuug

SEQ ID NO: 1071820 - RNA, 22 nt, Human
gcagcugcagagaccggguggg

SEQ ID NO: 1071821 - RNA, 22 nt, Human
augccagucaaagaagaugaca

SEQ ID NO: 1071822 - RNA, 22 nt, Human
uaucuuguaauagguccacuug

SEQ ID NO: 1071823 - RNA, 22 nt, Human
ucuucucauagcuaguucuucc

SEQ ID NO: 1071824 - RNA, 22 nt, Human
uccaggcucucaggugucagca

SEQ ID NO: 1071825 - RNA, 22 nt, Human
ugccaggcgauugcuaucagca

SEQ ID NO: 1071826 - RNA, 22 nt, Human
uugcacuauaggaaaauguguc

SEQ ID NO: 1071827 - RNA, 22 nt, Human
cugagggagcugcuggccuugg

SEQ ID NO: 1071828 - RNA, 22 nt, Human
gguuggggcgagcuggaggccc

SEQ ID NO: 1071829 - RNA, 22 nt, Human
gcagagucauuauuuaugcaau

SEQ ID NO: 1071830 - RNA, 22 nt, Human
cuuugaauuccaguacaauaac

SEQ ID NO: 1071831 - RNA, 22 nt, Human
uauuuggauacaaucauuugcu

SEQ ID NO: 1071832 - RNA, 22 nt, Human
uggggccucaggccuuuuccua

SEQ ID NO: 1071833 - RNA, 22 nt, Human
gcugagagugugagaucagauu

SEQ ID NO: 1071834 - RNA, 22 nt, Human
ccuuuuucccuggagggacagc

SEQ ID NO: 1071835 - RNA, 22 nt, Human
aaacuacuggauuaguaacuua

SEQ ID NO: 1071836 - RNA, 21 nt, Human
ucuuccaagggcugcugagac

SEQ ID NO: 1071837 - RNA, 22 nt, Human
aucuggcucgcuaggcucuggg

SEQ ID NO: 1071838 - RNA, 22 nt, Human
acugggcucaagugauuguccu

SEQ ID NO: 1071839 - RNA, 19 nt, Human
aguggcagaucuggaagua

SEQ ID NO: 1071840 - RNA, 22 nt, Human
cagaagggcagcacugggaagg

SEQ ID NO: 1071841 - RNA, 22 nt, Human
agugaaccaggcugcgucccug

SEQ ID NO: 1071842 - RNA, 22 nt, Human
uuucaauuuccaggcuagaauu

SEQ ID NO: 1071843 - RNA, 22 nt, Human
uacacagaaccugguguacagu

SEQ ID NO: 1071844 - RNA, 22 nt, Human
ggaaaacaagagaaugauguuu

SEQ ID NO: 1071845 - RNA, 22 nt, Human
ugaaggucaugguaauauuuuu

SEQ ID NO: 1071846 - RNA, 22 nt, Human
cuucagugaauguugaguaagg

SEQ ID NO: 1071847 - RNA, 22 nt, Human
aaaaaccucaauuacuuuugca

SEQ ID NO: 1071848 - RNA, 22 nt, Human
guguguccucaguaguggcaug

SEQ ID NO: 1071849 - RNA, 22 nt, Human
agccugagagccaagcugugca

SEQ ID NO: 1071850 - RNA, 22 nt, Human
cagguggaucucuaaggacuga

SEQ ID NO: 1071851 - RNA, 21 nt, Human
ccugggccaaauucccuggac

SEQ ID NO: 1071852 - RNA, 22 nt, Human
ugggaagaguuagagacagcug

SEQ ID NO: 1071853 - RNA, 22 nt, Human
ccaguggguaggccauggugag

SEQ ID NO: 1071854 - RNA, 22 nt, Human
gcacugugacccagagcaggug

SEQ ID NO: 1071855 - RNA, 22 nt, Human
ccugucugcggaggaguggaag

SEQ ID NO: 1071856 - RNA, 22 nt, Human
guggcagugugaggauccugcu

SEQ ID NO: 1071857 - RNA, 22 nt, Human
uugguucacauuagauuuccuu

SEQ ID NO: 1071858 - RNA, 22 nt, Human
guggccuggaugagcuucgaca

SEQ ID NO: 1071859 - RNA, 22 nt, Human
agcugggccugauuugcagggg

SEQ ID NO: 1071860 - RNA, 22 nt, Human
cauuuguuuagaagucuuuaua

SEQ ID NO: 1071861 - RNA, 22 nt, Human
uaacauuaaaagagauaauuga

SEQ ID NO: 1071862 - RNA, 22 nt, Human
agcugcugguuuaagggauggg

SEQ ID NO: 1071863 - RNA, 22 nt, Human
uaccuugagccguugcugauga

SEQ ID NO: 1071864 - RNA, 22 nt, Human
caggagugagaugcgaucacuu

SEQ ID NO: 1071865 - RNA, 21 nt, Human
uggcagggguaguaguacagc

SEQ ID NO: 1071866 - RNA, 22 nt, Human
aggggaggagcuuuucuugccu

SEQ ID NO: 1071867 - RNA, 22 nt, Human
agccacagagagggagcugcaa

SEQ ID NO: 1071868 - RNA, 22 nt, Human
uccuucccccucaagagaacuu

SEQ ID NO: 1071869 - RNA, 19 nt, Human
ucaaagucugagucacuuu

SEQ ID NO: 1071870 - RNA, 22 nt, Human
cacauacaaggcacacuggagg

SEQ ID NO: 1071871 - RNA, 20 nt, Human
cccacacccuucccacuugg

SEQ ID NO: 1071872 - RNA, 22 nt, Human
gagcugccuguugcauagcaac

SEQ ID NO: 1071873 - RNA, 22 nt, Human
caguaaaugcagauauagauac

SEQ ID NO: 1071874 - RNA, 22 nt, Human
guauuuuacuuacgcaugacuu

SEQ ID NO: 1071875 - RNA, 22 nt, Human
gucucaguaagaaaggcuccug

SEQ ID NO: 1071876 - RNA, 22 nt, Human
accaugggucagccaccucagc

SEQ ID NO: 1071877 - RNA, 22 nt, Human
agguggaguuaagugugaacug

SEQ ID NO: 1071878 - RNA, 22 nt, Human
uggcagaguuggagguggaaga

SEQ ID NO: 1071879 - RNA, 22 nt, Human
gaucggguggguucugccauca

SEQ ID NO: 1071880 - RNA, 22 nt, Human
aggccuggguguucaccagaag

SEQ ID NO: 1071881 - RNA, 22 nt, Human
gccugagauucccggagccgug

SEQ ID NO: 1071882 - RNA, 21 nt, Human
gggcgaggccugauguggcuc

SEQ ID NO: 1071883 - RNA, 22 nt, Human
aaguggaggccgaguucacgca

SEQ ID NO: 1071884 - RNA, 22 nt, Human
uuuacacagaggacacugggcu

SEQ ID NO: 1071885 - RNA, 20 nt, Human
cuguuaaaagguaugaauuc

SEQ ID NO: 1071886 - RNA, 22 nt, Human
ugcaggugucugggggcaacag

SEQ ID NO: 1071887 - RNA, 22 nt, Human
gggcccagcgugguuccaucug

SEQ ID NO: 1071888 - RNA, 22 nt, Human
guggggcuaaaaacugugcagu

SEQ ID NO: 1071889 - RNA, 22 nt, Human
gggcucuggaaaugggagcucc

SEQ ID NO: 1071890 - RNA, 22 nt, Human
gaggccuggucuaugagauguu

SEQ ID NO: 1071891 - RNA, 22 nt, Human
cgucuuuauugauuccuucaag

SEQ ID NO: 1071892 - RNA, 22 nt, Human
uggcucugaccagguagaggag

SEQ ID NO: 1071893 - RNA, 22 nt, Human
caguauuuccucuucuuaacuu

SEQ ID NO: 1071894 - RNA, 22 nt, Human
uccaguccuagaaacuggagag

SEQ ID NO: 1071895 - RNA, 22 nt, Human
uaaaguuuggcagacaauaaca

SEQ ID NO: 1071896 - RNA, 17 nt, Human
gacaggcucagugacga

SEQ ID NO: 1071897 - RNA, 22 nt, Human
uuuuccucuguuauuaguguga

SEQ ID NO: 1071898 - RNA, 22 nt, Human
gggcacugaacacccucuucgc

SEQ ID NO: 1071899 - RNA, 22 nt, Human
ucugccugagcagagggaggcc

SEQ ID NO: 1071900 - RNA, 18 nt, Human
gagcagaggcucaacugg

SEQ ID NO: 1071901 - RNA, 22 nt, Human
ucugggcccugagauguucuuc

SEQ ID NO: 1071902 - RNA, 22 nt, Human
uccauggguagcccugguugag

SEQ ID NO: 1071903 - RNA, 18 nt, Human
ccucagggagauccagug

SEQ ID NO: 1071904 - RNA, 22 nt, Human
gugauucugccuggaagguccu

SEQ ID NO: 1071905 - RNA, 22 nt, Human
cagucagucaauacucuuugag

SEQ ID NO: 1071906 - RNA, 22 nt, Human
gggcagguguugucaaucuaau

SEQ ID NO: 1071907 - RNA, 19 nt, Human
ccugugacuaucuuuguaa

SEQ ID NO: 1071908 - RNA, 22 nt, Human
gcagagcagaggugcagguugg

SEQ ID NO: 1071909 - RNA, 22 nt, Human
ccuggaagauucaccacuacca

SEQ ID NO: 1071910 - RNA, 20 nt, Human
agacccucuggacugggccc

SEQ ID NO: 1071911 - RNA, 22 nt, Human
uucaggaugaaagugugcaaca

SEQ ID NO: 1071912 - RNA, 22 nt, Human
guaauugacucagcucuguuca

SEQ ID NO: 1071913 - RNA, 22 nt, Human
caugcacuuaccugaaauucaa

SEQ ID NO: 1071914 - RNA, 22 nt, Human
gagaggcugacuggcuguccug

SEQ ID NO: 1071915 - RNA, 20 nt, Human
uguaaaacaaggugaauccu

SEQ ID NO: 1071916 - RNA, 22 nt, Human
gcuaggaaucggacccaggaag

SEQ ID NO: 1071917 - RNA, 22 nt, Human
uaagucaucccauaacagugcu

SEQ ID NO: 1071918 - RNA, 22 nt, Human
guggcaggucccauuggagcag

SEQ ID NO: 1071919 - RNA, 22 nt, Human
uccaauuuguuugaugauggaa

SEQ ID NO: 1071920 - RNA, 22 nt, Human
cuggcccagucucagaguguca

SEQ ID NO: 1071921 - RNA, 20 nt, Human
cuugccaguucccuggcaga

SEQ ID NO: 1071922 - RNA, 22 nt, Human
ucagggaagacuucuuagagga

SEQ ID NO: 1071923 - RNA, 22 nt, Human
uggcugagaaaaugguuuuagg

SEQ ID NO: 1071924 - RNA, 22 nt, Human
aaaugcagacagcuucacacac

SEQ ID NO: 1071925 - RNA, 22 nt, Human
uggcagcauuuuuuccagaaca

SEQ ID NO: 1071926 - RNA, 22 nt, Human
cugcugcucagugucaucaugu

SEQ ID NO: 1071927 - RNA, 21 nt, Human
uuagcuuucuagaaucuuugu

SEQ ID NO: 1071928 - RNA, 22 nt, Human
acacagccgugaaucugcuucu

SEQ ID NO: 1071929 - RNA, 22 nt, Human
cagagcaguggagaguaggucu

SEQ ID NO: 1071930 - RNA, 22 nt, Human
aacagcuuugagcaguucugua

SEQ ID NO: 1071931 - RNA, 22 nt, Human
augcaguacauacaaacacuga

SEQ ID NO: 1071932 - RNA, 22 nt, Human
ucaguuuugauuccugguucuc

SEQ ID NO: 1071933 - RNA, 22 nt, Human
agcagcagaucaaacaggcuug

SEQ ID NO: 1071934 - RNA, 22 nt, Human
gagcugcaugcggaaaccuguu

SEQ ID NO: 1071935 - RNA, 23 nt, Human
uuacaacaguguccauauuugua

SEQ ID NO: 1071936 - RNA, 19 nt, Human
agcuuuuacuaacagcaga

SEQ ID NO: 1071937 - RNA, 22 nt, Human
ccuggccacucagguguggggc

SEQ ID NO: 1071938 - RNA, 22 nt, Human
agaauauugaaaguucuugaca

SEQ ID NO: 1071939 - RNA, 22 nt, Human
agucaguggcuccgagccuggu

SEQ ID NO: 1071940 - RNA, 22 nt, Human
ccucugaguuagagaucuagau

SEQ ID NO: 1071941 - RNA, 22 nt, Human
ccuuuacaguaugguuguauca

SEQ ID NO: 1071942 - RNA, 22 nt, Human
aaugcuuuagcagugauuagug

SEQ ID NO: 1071943 - RNA, 22 nt, Human
aaaggcuaugagauagaagaua

SEQ ID NO: 1071944 - RNA, 22 nt, Human
ggcuggcaagucagugcugaug

SEQ ID NO: 1071945 - RNA, 22 nt, Human
uggaagaugaauaaagauucua

SEQ ID NO: 1071946 - RNA, 22 nt, Human
gugggggaugcugaguuggaaa

SEQ ID NO: 1071947 - RNA, 22 nt, Human
cugggccagucucggccgcucu

SEQ ID NO: 1071948 - RNA, 22 nt, Human
cuguguggacugguugaggccc

SEQ ID NO: 1071949 - RNA, 22 nt, Human
aaggaaaggaugagcaugcauu

SEQ ID NO: 1071950 - RNA, 22 nt, Human
aggugcagcugguggagucugg

SEQ ID NO: 1071951 - RNA, 22 nt, Human
uuuuaucaaucauuaagacauu

SEQ ID NO: 1071952 - RNA, 22 nt, Human
ugcaguggaggccgugagacag

SEQ ID NO: 1071953 - RNA, 22 nt, Human
gcaggagguugagccaggacug

SEQ ID NO: 1071954 - RNA, 22 nt, Human
acacuguaaagugaugcuuaaa

SEQ ID NO: 1071955 - RNA, 22 nt, Human
uaccauuuacuugaaaauaaaa

SEQ ID NO: 1071956 - RNA, 22 nt, Human
cagcagaguaauucucaccucu

SEQ ID NO: 1071957 - RNA, 22 nt, Human
agugaaaacacuaguucuugcc

SEQ ID NO: 1071958 - RNA, 19 nt, Human
gcuccugggccucacucau

SEQ ID NO: 1071959 - RNA, 22 nt, Human
cagaggccauauuucuucacuc

SEQ ID NO: 1071960 - RNA, 22 nt, Human
aggauccuuuggccacuucuua

SEQ ID NO: 1071961 - RNA, 22 nt, Human
uucugggacaucuggacaguuu

SEQ ID NO: 1071962 - RNA, 22 nt, Human
ggcugccucuggaagcuggaga

SEQ ID NO: 1071963 - RNA, 22 nt, Human
ucacagaauugacaugggaauc

SEQ ID NO: 1071964 - RNA, 22 nt, Human
gccucagagggcccuagggaca

SEQ ID NO: 1071965 - RNA, 22 nt, Human
acuucauuguaauauuauagca

SEQ ID NO: 1071966 - RNA, 22 nt, Human
cugagccaugagccugcgccca

SEQ ID NO: 1071967 - RNA, 22 nt, Human
caaaggcuucaucucagagcag

SEQ ID NO: 1071968 - RNA, 19 nt, Human
cugcucccuccuucuggca

SEQ ID NO: 1071969 - RNA, 22 nt, Human
uugugucccccuuugagagcca

SEQ ID NO: 1071970 - RNA, 22 nt, Human
acucugccccgaguucugggaa

SEQ ID NO: 1071971 - RNA, 22 nt, Human
gccaguggcuugccaggcagga

SEQ ID NO: 1071972 - RNA, 22 nt, Human
ggagugugauuguucucuguua

SEQ ID NO: 1071973 - RNA, 22 nt, Human
cccuuuaaggucugauuuucag

SEQ ID NO: 1071974 - RNA, 22 nt, Human
gccaguggaggacccauggaga

SEQ ID NO: 1071975 - RNA, 22 nt, Human
caggagcccguugcuccggcgg

SEQ ID NO: 1071976 - RNA, 22 nt, Human
aaguuuuauuggcuauagcacu

SEQ ID NO: 1071977 - RNA, 22 nt, Human
acauuuuuauucaucaaagcag

SEQ ID NO: 1071978 - RNA, 22 nt, Human
aaaauuaagugucugggaagcc

SEQ ID NO: 1071979 - RNA, 22 nt, Human
aggcugaggcagguggaucacu

SEQ ID NO: 1071980 - RNA, 22 nt, Human
cuguacaucucugaggacagua

SEQ ID NO: 1071981 - RNA, 19 nt, Human
cagaguacaccagauagga

SEQ ID NO: 1071982 - RNA, 22 nt, Human
agcugaugccauguggaacagu

SEQ ID NO: 1071983 - RNA, 17 nt, Human
agcagaagucagaggga

SEQ ID NO: 1071984 - RNA, 22 nt, Human
uuauucacucugaagccauccu

SEQ ID NO: 1071985 - RNA, 22 nt, Human
aggggagcuaacaccagagccc

SEQ ID NO: 1071986 - RNA, 22 nt, Human
gcagauggaucaccugaggucg

SEQ ID NO: 1071987 - RNA, 22 nt, Human
cucccugggccucaguuucucu

SEQ ID NO: 1071988 - RNA, 22 nt, Human
agaagugguguguggccgagcu

SEQ ID NO: 1071989 - RNA, 20 nt, Human
ugaaggccauuuguuccaga

SEQ ID NO: 1071990 - RNA, 22 nt, Human
ggaggagcacuucugagcucag

SEQ ID NO: 1071991 - RNA, 23 nt, Human
uuauugcauccaaaugcauuccu

SEQ ID NO: 1071992 - RNA, 18 nt, Human
uucaucaugacucugugg

SEQ ID NO: 1071993 - RNA, 22 nt, Human
ucuaaacauugguauggagcag

SEQ ID NO: 1071994 - RNA, 22 nt, Human
aguggcugccaagagcaaugcu

SEQ ID NO: 1071995 - RNA, 22 nt, Human
ucugcuguauuagguugaacug

SEQ ID NO: 1071996 - RNA, 22 nt, Human
uaaauaucaccuggaauuguua

SEQ ID NO: 1071997 - RNA, 22 nt, Human
uucauuuguaacucuguuaggg

SEQ ID NO: 1071998 - RNA, 22 nt, Human
caguuuuagggcaaugugaaga

SEQ ID NO: 1071999 - RNA, 20 nt, Human
aggcagagcgcacuuuuaga

SEQ ID NO: 1072000 - RNA, 23 nt, Human
ugucauugugacuacagaaccag

SEQ ID NO: 1072001 - RNA, 22 nt, Human
aaagugaugaacucugugaccu

SEQ ID NO: 1072002 - RNA, 22 nt, Human
gagaaacuguuggaauuuuaau

SEQ ID NO: 1072003 - RNA, 22 nt, Human
caguugcuacaguucaagugug

SEQ ID NO: 1072004 - RNA, 22 nt, Human
ugaaugaguuuggcugcuguuc

SEQ ID NO: 1072005 - RNA, 22 nt, Human
ucaaaguauaauugcuuuuuug

SEQ ID NO: 1072006 - RNA, 22 nt, Human
gaaacuguauguaguuuuuggg

SEQ ID NO: 1072007 - RNA, 22 nt, Human
uuuguagauucauugaacuuuu

SEQ ID NO: 1072008 - RNA, 18 nt, Human
aagcugggaaggagacag

SEQ ID NO: 1072009 - RNA, 22 nt, Human
uacaguagacaauguuaguaug

SEQ ID NO: 1072010 - RNA, 22 nt, Human
uucuuagaugauuaaugauggg

SEQ ID NO: 1072011 - RNA, 22 nt, Human
aaguguuuagguuugcagucga

SEQ ID NO: 1072012 - RNA, 22 nt, Human
ccugcccagcuucaccucaggc

SEQ ID NO: 1072013 - RNA, 22 nt, Human
gccuucaggaggguuccagaca

SEQ ID NO: 1072014 - RNA, 22 nt, Human
ccaggugcucuugccagggcug

SEQ ID NO: 1072015 - RNA, 22 nt, Human
ucugcaauguuuucccauccug

SEQ ID NO: 1072016 - RNA, 22 nt, Human
cugguucaucgcggccacuuau

SEQ ID NO: 1072017 - RNA, 22 nt, Human
gauuucuuuguacccacaaucc

SEQ ID NO: 1072018 - RNA, 22 nt, Human
cccugcuuucaaccuucuagcu

SEQ ID NO: 1072019 - RNA, 22 nt, Human
uuuaugcagccucaguaucaga

SEQ ID NO: 1072020 - RNA, 22 nt, Human
ggggaagauuuuuaauuaguaa

SEQ ID NO: 1072021 - RNA, 22 nt, Human
uuauuucuacuauuuugccuga

SEQ ID NO: 1072022 - RNA, 22 nt, Human
auuaagaugugggaaaauuuaa

SEQ ID NO: 1072023 - RNA, 22 nt, Human
ucaguguuuuccagggucuacu

SEQ ID NO: 1072024 - RNA, 22 nt, Human
cagaagaggacuggguagcuca

SEQ ID NO: 1072025 - RNA, 22 nt, Human
ggcugccuucccugagccccgg

SEQ ID NO: 1072026 - RNA, 22 nt, Human
aggcucagugauguaaaauaua

SEQ ID NO: 1072027 - RNA, 22 nt, Human
gcugucuggguugagggcccug

SEQ ID NO: 1072028 - RNA, 22 nt, Human
ccaggcagagugcuccagaaag

SEQ ID NO: 1072029 - RNA, 22 nt, Human
ucuggaguugaaguucuucccc

SEQ ID NO: 1072030 - RNA, 22 nt, Human
agcugcucugauaaaccuacuu

SEQ ID NO: 1072031 - RNA, 22 nt, Human
cagcagcuacuuggagcagcag

SEQ ID NO: 1072032 - RNA, 19 nt, Human
agcagccaucgaccaugga

SEQ ID NO: 1072033 - RNA, 22 nt, Human
ucccaggcuggcaggcagcagu

SEQ ID NO: 1072034 - RNA, 22 nt, Human
uacaaagugaaauaauucugag

SEQ ID NO: 1072035 - RNA, 22 nt, Human
aaaagguuuugaguacaaauau

SEQ ID NO: 1072036 - RNA, 22 nt, Human
aaauggaauguguuuauaauuc

SEQ ID NO: 1072037 - RNA, 22 nt, Human
aauuacuuaagagaaacuuuga

SEQ ID NO: 1072038 - RNA, 22 nt, Human
ugggccuggacaucuguauuuu

SEQ ID NO: 1072039 - RNA, 22 nt, Human
uuccuauuuccaugaaacacaa

SEQ ID NO: 1072040 - RNA, 22 nt, Human
gcacagaauaacacucugggcu

SEQ ID NO: 1072041 - RNA, 22 nt, Human
uguauuugggucacaagauggg

SEQ ID NO: 1072042 - RNA, 22 nt, Human
cagcucuggguaggaggaaucu

SEQ ID NO: 1072043 - RNA, 22 nt, Human
ugcagaggagcuggaaggcugg

SEQ ID NO: 1072044 - RNA, 22 nt, Human
ucucagagaucuuucugcaugu

SEQ ID NO: 1072045 - RNA, 22 nt, Human
cagcaucuuucucuucuggagu

SEQ ID NO: 1072046 - RNA, 17 nt, Human
aaggccauuuccaccca

SEQ ID NO: 1072047 - RNA, 22 nt, Human
uggagccagagcgcagccuggg

SEQ ID NO: 1072048 - RNA, 22 nt, Human
ucucauucauacccuacaugcu

SEQ ID NO: 1072049 - RNA, 22 nt, Human
ucuggaguguuucuaauuacug

SEQ ID NO: 1072050 - RNA, 22 nt, Human
uucaguauacauuaucuaauug

SEQ ID NO: 1072051 - RNA, 22 nt, Human
cuucugugauuugguuaggaua

SEQ ID NO: 1072052 - RNA, 22 nt, Human
aaucaacuguuuccacagggag

SEQ ID NO: 1072053 - RNA, 22 nt, Human
ucccagagcaguacuccaggag

SEQ ID NO: 1072054 - RNA, 22 nt, Human
aacacuuuuuaguaaagauuga

SEQ ID NO: 1072055 - RNA, 22 nt, Human
acaacauuauacauagaaagcu

SEQ ID NO: 1072056 - RNA, 22 nt, Human
aagggcaggcacccacccucac

SEQ ID NO: 1072057 - RNA, 22 nt, Human
aggcagccuauggggagcucag

SEQ ID NO: 1072058 - RNA, 22 nt, Human
gaggcucacuaggcauccuggg

SEQ ID NO: 1072059 - RNA, 20 nt, Human
gguagcagcugcugucaucc

SEQ ID NO: 1072060 - RNA, 22 nt, Human
uagcuuguuacacagcaauguu

SEQ ID NO: 1072061 - RNA, 22 nt, Human
gccucccuggcccacagcagcg

SEQ ID NO: 1072062 - RNA, 23 nt, Human
uccaaacucaagacauuaauaag

SEQ ID NO: 1072063 - RNA, 22 nt, Human
gagagcuguccggcugagcagc

SEQ ID NO: 1072064 - RNA, 22 nt, Human
gcacagaacccuaucuuucgga

SEQ ID NO: 1072065 - RNA, 18 nt, Human
auccaacuaucgcucauu

SEQ ID NO: 1072066 - RNA, 21 nt, Human
agcaggugcuguuggaggaaa

SEQ ID NO: 1072067 - RNA, 22 nt, Human
uggcagcacuagguacugagcu

SEQ ID NO: 1072068 - RNA, 22 nt, Human
aauacauaauaaguuuugucug

SEQ ID NO: 1072069 - RNA, 22 nt, Human
cagcuguuaccaaucuuagggc

SEQ ID NO: 1072070 - RNA, 22 nt, Human
ucaggcucugagcugaugcuaa

SEQ ID NO: 1072071 - RNA, 22 nt, Human
caugcugaugaacuucuacuug

SEQ ID NO: 1072072 - RNA, 19 nt, Human
gcugggagcagacccuccc

SEQ ID NO: 1072073 - RNA, 22 nt, Human
acagcuguguuuuauaaucagc

SEQ ID NO: 1072074 - RNA, 22 nt, Human
acacacuguugcucauccaggc

SEQ ID NO: 1072075 - RNA, 22 nt, Human
ucagucuuugcuuaugacaaua

SEQ ID NO: 1072076 - RNA, 22 nt, Human
ggaagccaggccaaugagaaca

SEQ ID NO: 1072077 - RNA, 19 nt, Human
agagacugccaccagcugu

SEQ ID NO: 1072078 - RNA, 22 nt, Human
uuugagaagcaucugguccacu

SEQ ID NO: 1072079 - RNA, 22 nt, Human
cuucuucaauagcaagcgcaua

SEQ ID NO: 1072080 - RNA, 22 nt, Human
uguaaagacgcuuauagcuugc

SEQ ID NO: 1072081 - RNA, 22 nt, Human
gaaaugcaggcuuggauucagc

SEQ ID NO: 1072082 - RNA, 22 nt, Human
ccugagggucaaggagcccuag

SEQ ID NO: 1072083 - RNA, 22 nt, Human
ucagaagcaggagugugcacaa

SEQ ID NO: 1072084 - RNA, 22 nt, Human
uccaggcuacuuggauuccugg

SEQ ID NO: 1072085 - RNA, 22 nt, Human
ggcaggcaggucuucauggccc

SEQ ID NO: 1072086 - RNA, 23 nt, Human
ucagugauguugaaccuagcagu

SEQ ID NO: 1072087 - RNA, 22 nt, Human
aucaccaggcaaaaugucagag

SEQ ID NO: 1072088 - RNA, 22 nt, Human
ugugcaaaguguacaaauuaau

SEQ ID NO: 1072089 - RNA, 22 nt, Human
cacagaaaggcucaaaucccaa

SEQ ID NO: 1072090 - RNA, 22 nt, Human
caucuucaggggcuacaucugu

SEQ ID NO: 1072091 - RNA, 22 nt, Human
uccuugaauugugccacuuacc

SEQ ID NO: 1072092 - RNA, 22 nt, Human
ucuucaugucaugguauauuga

SEQ ID NO: 1072093 - RNA, 22 nt, Human
acugucugcccugagaugccag

SEQ ID NO: 1072094 - RNA, 22 nt, Human
ugcagggcagauaugacuguag

SEQ ID NO: 1072095 - RNA, 22 nt, Human
ggcucaggcuggagugcagugg

SEQ ID NO: 1072096 - RNA, 22 nt, Human
augugacuccaggcaguuuugu

SEQ ID NO: 1072097 - RNA, 22 nt, Human
cuuauucagaccuuggauucuu

SEQ ID NO: 1072098 - RNA, 22 nt, Human
cugucauugagccugucagggc

SEQ ID NO: 1072099 - RNA, 22 nt, Human
aguccccucuaacccaacuuua

SEQ ID NO: 1072100 - RNA, 22 nt, Human
gacauuuagaagucuaauggcc

SEQ ID NO: 1072101 - RNA, 22 nt, Human
auucacaauuagaaguagauaa

SEQ ID NO: 1072102 - RNA, 22 nt, Human
cccaggaaaugggcucuugccu

SEQ ID NO: 1072103 - RNA, 22 nt, Human
auugaaagguuuugagcagaua

SEQ ID NO: 1072104 - RNA, 23 nt, Human
ccucaggggaccugugagccuga

SEQ ID NO: 1072105 - RNA, 22 nt, Human
gaggaggcacuaguuagugaca

SEQ ID NO: 1072106 - RNA, 22 nt, Human
cacaucuucuuaacuccaaagu

SEQ ID NO: 1072107 - RNA, 22 nt, Human
agccucaguuucaggccuccuc

SEQ ID NO: 1072108 - RNA, 22 nt, Human
uagcuuccagaauuuaauguca

SEQ ID NO: 1072109 - RNA, 22 nt, Human
aacagcugucugccuaucucug

SEQ ID NO: 1072110 - RNA, 22 nt, Human
ucauaacagcuaagucccuuuc

SEQ ID NO: 1072111 - RNA, 22 nt, Human
ucaucacuguaucauugauaga

SEQ ID NO: 1072112 - RNA, 22 nt, Human
ugcaggcucugugugugccugg

SEQ ID NO: 1072113 - RNA, 20 nt, Human
ucacauccucucccaacaug

SEQ ID NO: 1072114 - RNA, 22 nt, Human
guugugcagaagugccucagua

SEQ ID NO: 1072115 - RNA, 23 nt, Human
cauuucugggagauuuauaaaau

SEQ ID NO: 1072116 - RNA, 22 nt, Human
uccagggcuggguuggcucagc

SEQ ID NO: 1072117 - RNA, 22 nt, Human
cagcucccgccaucgggaggca

SEQ ID NO: 1072118 - RNA, 22 nt, Human
cugugcccauaaucugguauuu

SEQ ID NO: 1072119 - RNA, 22 nt, Human
aggcucagagaugaguaagcac

SEQ ID NO: 1072120 - RNA, 22 nt, Human
ugguuuuaaaaacaugcugcau

SEQ ID NO: 1072121 - RNA, 22 nt, Human
guggggcucccaucuccuggcu

SEQ ID NO: 1072122 - RNA, 22 nt, Human
aaacagaaggguagguaaacau

SEQ ID NO: 1072123 - RNA, 22 nt, Human
uuuccuccuagccuccagccgc

SEQ ID NO: 1072124 - RNA, 22 nt, Human
agaagccagucgcucucccgca

SEQ ID NO: 1072125 - RNA, 17 nt, Human
gcccuggagccaggcua

SEQ ID NO: 1072126 - RNA, 22 nt, Human
cauccaauaccaguuugcaggc

SEQ ID NO: 1072127 - RNA, 22 nt, Human
uacagaauuagauuauuagaga

SEQ ID NO: 1072128 - RNA, 22 nt, Human
aauguacaauaagacaaagagg

SEQ ID NO: 1072129 - RNA, 22 nt, Human
uuaucaguuguguguauacacg

SEQ ID NO: 1072130 - RNA, 23 nt, Human
ccaggccucucagagggugugcc

SEQ ID NO: 1072131 - RNA, 22 nt, Human
gccaccucggcuuucucugcuc

SEQ ID NO: 1072132 - RNA, 22 nt, Human
ucuuuacacaagacaagaauaa

SEQ ID NO: 1072133 - RNA, 22 nt, Human
aguuacaagcuauuuuacuuaa

SEQ ID NO: 1072134 - RNA, 21 nt, Human
gucagcugugugugaggaccc

SEQ ID NO: 1072135 - RNA, 22 nt, Human
auuguucauuguacaccuagua

SEQ ID NO: 1072136 - RNA, 22 nt, Human
auguuacauaguccuuauuugu

SEQ ID NO: 1072137 - RNA, 22 nt, Human
uccauccauguaggaagauggu

SEQ ID NO: 1072138 - RNA, 19 nt, Human
gcuuuggagggagguucua

SEQ ID NO: 1072139 - RNA, 22 nt, Human
uuuaccaagauagcaucugguu

SEQ ID NO: 1072140 - RNA, 22 nt, Human
ccugggcucaagcgaucuuguc

SEQ ID NO: 1072141 - RNA, 22 nt, Human
cucuccauucccuacaguuuuc

SEQ ID NO: 1072142 - RNA, 22 nt, Human
aacauuuuuaagaccaagugcu

SEQ ID NO: 1072143 - RNA, 22 nt, Human
uggagaugcacgagcaggugga

SEQ ID NO: 1072144 - RNA, 22 nt, Human
agugggguccaucccuucccuc

SEQ ID NO: 1072145 - RNA, 22 nt, Human
auggcagagaacaaagcaacaa

SEQ ID NO: 1072146 - RNA, 22 nt, Human
uuugcuaaaagugaugaagaca

SEQ ID NO: 1072147 - RNA, 22 nt, Human
guccuggggauuauagaguguu

SEQ ID NO: 1072148 - RNA, 22 nt, Human
acugucaaauuuauggaaagag

SEQ ID NO: 1072149 - RNA, 22 nt, Human
ugcuuuaucugugagaaccuga

SEQ ID NO: 1072150 - RNA, 22 nt, Human
uggaaggaaagguagcagagaa

SEQ ID NO: 1072151 - RNA, 22 nt, Human
gccucuguaggagugagagcau

SEQ ID NO: 1072152 - RNA, 22 nt, Human
auacaaaguauugauccugagu

SEQ ID NO: 1072153 - RNA, 22 nt, Human
uccagggcuuggcugggacggu

SEQ ID NO: 1072154 - RNA, 22 nt, Human
aggcuccuugcucacaggcuca

SEQ ID NO: 1072155 - RNA, 22 nt, Human
ucucagaggucuucagccucug

SEQ ID NO: 1072156 - RNA, 22 nt, Human
acuuucuucuuaugcauuaagg

SEQ ID NO: 1072157 - RNA, 22 nt, Human
aucugaagggaaguggaaggca

SEQ ID NO: 1072158 - RNA, 22 nt, Human
agggaaaguaagcauuucauua

SEQ ID NO: 1072159 - RNA, 22 nt, Human
uuaaugacuuauauuuaaagca

SEQ ID NO: 1072160 - RNA, 22 nt, Human
ccagcuccuucugucuguggag

SEQ ID NO: 1072161 - RNA, 22 nt, Human
ggcugccuccugcugggcugga

SEQ ID NO: 1072162 - RNA, 22 nt, Human
ggagcugucuguagggcacagg

SEQ ID NO: 1072163 - RNA, 22 nt, Human
gggccuggggacaccaccauga

SEQ ID NO: 1072164 - RNA, 22 nt, Human
caagcagagacuagauagcugu

SEQ ID NO: 1072165 - RNA, 22 nt, Human
gggacaucuuucuagucagggu

SEQ ID NO: 1072166 - RNA, 22 nt, Human
agggaggaccaaugugugguua

SEQ ID NO: 1072167 - RNA, 22 nt, Human
uaaugcuuuguuuugaucuaac

SEQ ID NO: 1072168 - RNA, 22 nt, Human
ccauccugcaggaccuccauau

SEQ ID NO: 1072169 - RNA, 22 nt, Human
uaacaaguucugacagcauugu

SEQ ID NO: 1072170 - RNA, 19 nt, Human
ugccuguggcgagcaucuu

SEQ ID NO: 1072171 - RNA, 19 nt, Human
aaggaauggcuuuaaguag

SEQ ID NO: 1072172 - RNA, 22 nt, Human
guccucuggagguuuuuaggug

SEQ ID NO: 1072173 - RNA, 22 nt, Human
acuggcugcguuccugugagac

SEQ ID NO: 1072174 - RNA, 22 nt, Human
ggcacugggcaccggcugaggg

SEQ ID NO: 1072175 - RNA, 21 nt, Human
aggucagcccagcucuggaag

SEQ ID NO: 1072176 - RNA, 22 nt, Human
ccagagcccagcacacggugcu

SEQ ID NO: 1072177 - RNA, 22 nt, Human
gggcccugccccguggcucuga

SEQ ID NO: 1072178 - RNA, 22 nt, Human
ugggcucaaacuggagguuguu

SEQ ID NO: 1072179 - RNA, 22 nt, Human
ucuccuuugaaaguuaggacug

SEQ ID NO: 1072180 - RNA, 22 nt, Human
ucuggggaugagugaugucgua

SEQ ID NO: 1072181 - RNA, 22 nt, Human
aaaaaagauugaugguggaugc

SEQ ID NO: 1072182 - RNA, 22 nt, Human
cuuccaagaugaacagcaagcg

SEQ ID NO: 1072183 - RNA, 22 nt, Human
ugugcaaucuugagcaauuuau

SEQ ID NO: 1072184 - RNA, 22 nt, Human
cagaacugggcagggagcagag

SEQ ID NO: 1072185 - RNA, 22 nt, Human
uuuccaaaggaguaccacgcau

SEQ ID NO: 1072186 - RNA, 22 nt, Human
cuucccaagcuuuaguuauuuu

SEQ ID NO: 1072187 - RNA, 22 nt, Human
uuggcugagagaggaaaagggc

SEQ ID NO: 1072188 - RNA, 22 nt, Human
uucauucaucucuaaaaugccu

SEQ ID NO: 1072189 - RNA, 22 nt, Human
uucuuguucugguucuguuagc

SEQ ID NO: 1072190 - RNA, 22 nt, Human
uauguacacauacacuuguaau

SEQ ID NO: 1072191 - RNA, 22 nt, Human
cugcucugaagccaggauucug

SEQ ID NO: 1072192 - RNA, 22 nt, Human
gcuuuguguagaaggaggaugg

SEQ ID NO: 1072193 - RNA, 22 nt, Human
cacagcuucugagugaggauuu

SEQ ID NO: 1072194 - RNA, 22 nt, Human
ugcaggugugguuccucagcca

SEQ ID NO: 1072195 - RNA, 22 nt, Human
auguucuucuaucuuuauuaaa

SEQ ID NO: 1072196 - RNA, 22 nt, Human
aaugacuaaaucugaagauagg

SEQ ID NO: 1072197 - RNA, 22 nt, Human
cacuuuaacucacauuucagcu

SEQ ID NO: 1072198 - RNA, 20 nt, Human
cugcugugauucccuccucc

SEQ ID NO: 1072199 - RNA, 22 nt, Human
uggcugaacuaaugugcuguuu

SEQ ID NO: 1072200 - RNA, 22 nt, Human
ugggcucugcugcguaccaguu

SEQ ID NO: 1072201 - RNA, 22 nt, Human
aacaguaauggcauugccauga

SEQ ID NO: 1072202 - RNA, 22 nt, Human
caaggagaaaacggcuucugaa

SEQ ID NO: 1072203 - RNA, 22 nt, Human
gaacacagaagaauuucuaaga

SEQ ID NO: 1072204 - RNA, 22 nt, Human
ggggacccucaggacugcgucu

SEQ ID NO: 1072205 - RNA, 22 nt, Human
ucucagagugguggucccucug

SEQ ID NO: 1072206 - RNA, 22 nt, Human
gauuuuauagucaggaaaaaga

SEQ ID NO: 1072207 - RNA, 22 nt, Human
gaggcugauucggggaacagca

SEQ ID NO: 1072208 - RNA, 18 nt, Human
acaaaugugucacaggaa

SEQ ID NO: 1072209 - RNA, 22 nt, Human
cugggcugucccaaccccaucc

SEQ ID NO: 1072210 - RNA, 22 nt, Human
ugaagcacaggcauacacaacc

SEQ ID NO: 1072211 - RNA, 22 nt, Human
cagcuccugccugggcagcugu

SEQ ID NO: 1072212 - RNA, 22 nt, Human
ggcgcucaguguugccccagag

SEQ ID NO: 1072213 - RNA, 22 nt, Human
cagggcaggaugcugugauuau

SEQ ID NO: 1072214 - RNA, 22 nt, Human
aagucagagcaacugagacauu

SEQ ID NO: 1072215 - RNA, 22 nt, Human
cagguggcuucucugcagccuu

SEQ ID NO: 1072216 - RNA, 22 nt, Human
agcacacaggccaccuccacuu

SEQ ID NO: 1072217 - RNA, 22 nt, Human
uuucacagcuagugagcuucua

SEQ ID NO: 1072218 - RNA, 22 nt, Human
caagaugaaugaugaagugugu

SEQ ID NO: 1072219 - RNA, 22 nt, Human
uuucaaaugcaugucuuuccuc

SEQ ID NO: 1072220 - RNA, 22 nt, Human
ucauuuacuucuaugacaacau

SEQ ID NO: 1072221 - RNA, 22 nt, Human
guaggcagauaggagugcagcc

SEQ ID NO: 1072222 - RNA, 22 nt, Human
aaaauugucgaacaguaguaac

SEQ ID NO: 1072223 - RNA, 18 nt, Human
ccucaggggaccuggcag

SEQ ID NO: 1072224 - RNA, 22 nt, Human
gaguucugugauuauuugggac

SEQ ID NO: 1072225 - RNA, 22 nt, Human
cagcagcuuugccaagucagcc

SEQ ID NO: 1072226 - RNA, 22 nt, Human
aaacagauaagggacaauuuca

SEQ ID NO: 1072227 - RNA, 22 nt, Human
ugcagccaccaccucugcugaa

SEQ ID NO: 1072228 - RNA, 22 nt, Human
gaucaaaagcuggguucuaaaa

SEQ ID NO: 1072229 - RNA, 22 nt, Human
cuguggcaggaagggacuagca

SEQ ID NO: 1072230 - RNA, 22 nt, Human
caguuuuucaaaauuacaugau

SEQ ID NO: 1072231 - RNA, 22 nt, Human
uggcaaagacugcaaggacuuu

SEQ ID NO: 1072232 - RNA, 22 nt, Human
uagaauaugauuaauuuucuua

SEQ ID NO: 1072233 - RNA, 22 nt, Human
ccugggcagggcuggacucuca

SEQ ID NO: 1072234 - RNA, 22 nt, Human
guugaaagaugucuugguuccc

SEQ ID NO: 1072235 - RNA, 22 nt, Human
agggcaugcuggaggagagaca

SEQ ID NO: 1072236 - RNA, 22 nt, Human
cuauuuucauucuuacauuguc

SEQ ID NO: 1072237 - RNA, 22 nt, Human
uccuucaguucaauuaguccgu

SEQ ID NO: 1072238 - RNA, 17 nt, Human
gcugccaccuuuggagc

SEQ ID NO: 1072239 - RNA, 22 nt, Human
uccuugaaaagaaugucuccau

SEQ ID NO: 1072240 - RNA, 22 nt, Human
guggccugccagcagauggcgc

SEQ ID NO: 1072241 - RNA, 22 nt, Human
auuuccaagguaauuuugagua

SEQ ID NO: 1072242 - RNA, 22 nt, Human
ugaaaucaauaauuggugauug

SEQ ID NO: 1072243 - RNA, 22 nt, Human
uggcagaguucgcugugccuuu

SEQ ID NO: 1072244 - RNA, 22 nt, Human
gcccugcuuggucauggccuuc

SEQ ID NO: 1072245 - RNA, 22 nt, Human
cugggcuguucugccccugggu

SEQ ID NO: 1072246 - RNA, 22 nt, Human
uucauguuuugagccauucuga

SEQ ID NO: 1072247 - RNA, 22 nt, Human
gucauugcaguggcaaaucaca

SEQ ID NO: 1072248 - RNA, 22 nt, Human
ugauuuuuagcuauucugaaga

SEQ ID NO: 1072249 - RNA, 22 nt, Human
gccuugcuuugcuucuggacag

SEQ ID NO: 1072250 - RNA, 22 nt, Human
gucauuccuuauguugauucag

SEQ ID NO: 1072251 - RNA, 22 nt, Human
uauuugcaacauaaaacucuga

SEQ ID NO: 1072252 - RNA, 22 nt, Human
aggcugugcgaggucucagagu

SEQ ID NO: 1072253 - RNA, 22 nt, Human
aaagagaaacuuagaagccuga

SEQ ID NO: 1072254 - RNA, 22 nt, Human
cagggccuuguucaggagugaa

SEQ ID NO: 1072255 - RNA, 22 nt, Human
gcaggaugccagggcagcagcg

SEQ ID NO: 1072256 - RNA, 14 nt, Human
caggaagacucagc

SEQ ID NO: 1072257 - RNA, 22 nt, Human
cuucugugaccaccagcagccc

SEQ ID NO: 1072258 - RNA, 22 nt, Human
caugagauuugggaggggccag

SEQ ID NO: 1072259 - RNA, 22 nt, Human
uggcaaagaugaagcauuucgu

SEQ ID NO: 1072260 - RNA, 22 nt, Human
auacauuagaaucugguacuca

SEQ ID NO: 1072261 - RNA, 22 nt, Human
uggcucagaaggcugccuucac

SEQ ID NO: 1072262 - RNA, 22 nt, Human
accagaguuuuauuaguucuaa

SEQ ID NO: 1072263 - RNA, 22 nt, Human
agccagggacgcugcaggcuac

SEQ ID NO: 1072264 - RNA, 22 nt, Human
agcagcaugaugacagagucuc

SEQ ID NO: 1072265 - RNA, 22 nt, Human
aggaggaauugacacagaagcc

SEQ ID NO: 1072266 - RNA, 22 nt, Human
uucuuacaucaguuuauuuugu

SEQ ID NO: 1072267 - RNA, 22 nt, Human
acauuuagcuguacaaucuaug

SEQ ID NO: 1072268 - RNA, 22 nt, Human
caaaugcaggucauaaccugag

SEQ ID NO: 1072269 - RNA, 22 nt, Human
auuauguauuugguauaguuug

SEQ ID NO: 1072270 - RNA, 20 nt, Human
cagagaccugucuucacaga

SEQ ID NO: 1072271 - RNA, 22 nt, Human
cccagcccagcguucgaggggu

SEQ ID NO: 1072272 - RNA, 22 nt, Human
gccugccuucggugcgcagcgg

SEQ ID NO: 1072273 - RNA, 22 nt, Human
guggccaggacauugccaggca

SEQ ID NO: 1072274 - RNA, 22 nt, Human
gggggcuggacuuucccacaca

SEQ ID NO: 1072275 - RNA, 22 nt, Human
uuacugaaaauucuucaggauu

SEQ ID NO: 1072276 - RNA, 22 nt, Human
gaggcugaauggccagaagcca

SEQ ID NO: 1072277 - RNA, 17 nt, Human
aggauguggagaaaauu

SEQ ID NO: 1072278 - RNA, 22 nt, Human
ucccuggacagccuugccuggg

SEQ ID NO: 1072279 - RNA, 22 nt, Human
ugggccuguugccugaguccau

SEQ ID NO: 1072280 - RNA, 22 nt, Human
uccauaaaccagaaaaucaaga

SEQ ID NO: 1072281 - RNA, 19 nt, Human
augucuguugaauuucaua

SEQ ID NO: 1072282 - RNA, 22 nt, Human
ugcaggcuauaucuuauuugac

SEQ ID NO: 1072283 - RNA, 22 nt, Human
aggcugccuguuccaaucuccu

SEQ ID NO: 1072284 - RNA, 23 nt, Human
agaguccacaagauuuuccagug

SEQ ID NO: 1072285 - RNA, 22 nt, Human
ucuaaauggaaagaaaauaccu

SEQ ID NO: 1072286 - RNA, 22 nt, Human
gcugggcuggaaggccaaggca

SEQ ID NO: 1072287 - RNA, 22 nt, Human
acagggucauuuuaugaucugu

SEQ ID NO: 1072288 - RNA, 22 nt, Human
uugaccauaccuccaggcaguu

SEQ ID NO: 1072289 - RNA, 18 nt, Human
cauuccaaguucuaccuc

SEQ ID NO: 1072290 - RNA, 22 nt, Human
auugaauagaugcauuauacua

SEQ ID NO: 1072291 - RNA, 22 nt, Human
ugaagcaggaucguuugcuuca

SEQ ID NO: 1072292 - RNA, 21 nt, Human
aguggggucucuguggaggcc

SEQ ID NO: 1072293 - RNA, 22 nt, Human
cccagccucuggguucugccgg

SEQ ID NO: 1072294 - RNA, 22 nt, Human
ugcaaauggagcauguauaaga

SEQ ID NO: 1072295 - RNA, 22 nt, Human
caguggugaagagcaggggcuc

SEQ ID NO: 1072296 - RNA, 22 nt, Human
aggcacaguuucauccccgggc

SEQ ID NO: 1072297 - RNA, 20 nt, Human
uucugcuugcaaauaucaag

SEQ ID NO: 1072298 - RNA, 22 nt, Human
ggaccaaaugcuuuuuaauuga

SEQ ID NO: 1072299 - RNA, 22 nt, Human
aaacagcuuguaagguguaauu

SEQ ID NO: 1072300 - RNA, 22 nt, Human
cagacaauuaaguaauugaggu

SEQ ID NO: 1072301 - RNA, 22 nt, Human
uuuucaggccagaagauagacc

SEQ ID NO: 1072302 - RNA, 22 nt, Human
cucugcccccagcuggugcuug

SEQ ID NO: 1072303 - RNA, 22 nt, Human
gaggaaccugggcuuccauccu

SEQ ID NO: 1072304 - RNA, 16 nt, Human
gagccaggugccuuga

SEQ ID NO: 1072305 - RNA, 22 nt, Human
uuucaaacauaucuucauuacu

SEQ ID NO: 1072306 - RNA, 22 nt, Human
uaaagcaagacacacccauagc

SEQ ID NO: 1072307 - RNA, 22 nt, Human
ugucagugguagacccagaggu

SEQ ID NO: 1072308 - RNA, 22 nt, Human
agcaggcuaaauaauaauacau

SEQ ID NO: 1072309 - RNA, 22 nt, Human
cugggcugucccagggcggcag

SEQ ID NO: 1072310 - RNA, 22 nt, Human
cucagagaaaaggagcaagggu

SEQ ID NO: 1072311 - RNA, 22 nt, Human
aggucauuggggacuaucuccg

SEQ ID NO: 1072312 - RNA, 22 nt, Human
acauuugugcaacguauccaca

SEQ ID NO: 1072313 - RNA, 22 nt, Human
auuuaccauauguacugaguau

SEQ ID NO: 1072314 - RNA, 23 nt, Human
acauacauaagcaccacauuuug

SEQ ID NO: 1072315 - RNA, 22 nt, Human
ggccuggcauggggacuaaggg

SEQ ID NO: 1072316 - RNA, 22 nt, Human
cagcuccccaugguuccugaag

SEQ ID NO: 1072317 - RNA, 23 nt, Human
uggcuucugccccauucucucca

SEQ ID NO: 1072318 - RNA, 22 nt, Human
uguucccugguaaacugacucc

SEQ ID NO: 1072319 - RNA, 23 nt, Human
agaagcaaugcuuuuuuuccucu

SEQ ID NO: 1072320 - RNA, 22 nt, Human
acuguacacgugucauuuacag

SEQ ID NO: 1072321 - RNA, 22 nt, Human
ccccacaccugccgggcagcag

SEQ ID NO: 1072322 - RNA, 22 nt, Human
ucagcuuauauuuuuaguguaa

SEQ ID NO: 1072323 - RNA, 22 nt, Human
cacaggaaugaacagggaaaga

SEQ ID NO: 1072324 - RNA, 22 nt, Human
ucccagaguauuagcaauugcu

SEQ ID NO: 1072325 - RNA, 22 nt, Human
acaauauuugggggcaguuugu

SEQ ID NO: 1072326 - RNA, 22 nt, Human
accaggaaacucucgucuaguu

SEQ ID NO: 1072327 - RNA, 22 nt, Human
guccucaggaaagcagauaaca

SEQ ID NO: 1072328 - RNA, 22 nt, Human
cuggcccucgucaguuucacug

SEQ ID NO: 1072329 - RNA, 22 nt, Human
gggcugaccaaugccuugcuuu

SEQ ID NO: 1072330 - RNA, 22 nt, Human
uguuaacagaggucauuuuggg

SEQ ID NO: 1072331 - RNA, 22 nt, Human
uggcugagugaacauguccauu

SEQ ID NO: 1072332 - RNA, 22 nt, Human
caggaaaugaaagcuagcuaau

SEQ ID NO: 1072333 - RNA, 22 nt, Human
aggcugagggcuccugagggca

SEQ ID NO: 1072334 - RNA, 22 nt, Human
caggagcuacucagguuggguu

SEQ ID NO: 1072335 - RNA, 22 nt, Human
acuaaaacaguggcuaguagac

SEQ ID NO: 1072336 - RNA, 22 nt, Human
uguauuuugaguccaaucuccu

SEQ ID NO: 1072337 - RNA, 22 nt, Human
gcugccaccguggagaugagug

SEQ ID NO: 1072338 - RNA, 22 nt, Human
ucucaccauggugcuugcuuau

SEQ ID NO: 1072339 - RNA, 22 nt, Human
ucucaaacuacacuguaaauug

SEQ ID NO: 1072340 - RNA, 22 nt, Human
accugcaagcauuacacuucua

SEQ ID NO: 1072341 - RNA, 22 nt, Human
gcuggcaggguucucacugaaa

SEQ ID NO: 1072342 - RNA, 22 nt, Human
ucaguggauuguagaaggcuua

SEQ ID NO: 1072343 - RNA, 22 nt, Human
gcugucccgaaccccugguaau

SEQ ID NO: 1072344 - RNA, 22 nt, Human
guucacaguucagccuguaaca

SEQ ID NO: 1072345 - RNA, 22 nt, Human
auuucuuccucugucaguaacu

SEQ ID NO: 1072346 - RNA, 21 nt, Human
gccacugcacuccagccuggg

SEQ ID NO: 1072347 - RNA, 22 nt, Human
ucuuuagagcacgggaaaaaca

SEQ ID NO: 1072348 - RNA, 23 nt, Human
aggcagugggggccacuuugcuu

SEQ ID NO: 1072349 - RNA, 22 nt, Human
uuuccacaauguuuuugcagga

SEQ ID NO: 1072350 - RNA, 22 nt, Human
agaaagggaugagguagcugcu

SEQ ID NO: 1072351 - RNA, 22 nt, Human
gaggaggaaguucucuguaggc

SEQ ID NO: 1072352 - RNA, 22 nt, Human
ccacauuuggagaagauacuuu

SEQ ID NO: 1072353 - RNA, 22 nt, Human
ugcaguggugguaaagaugcuc

SEQ ID NO: 1072354 - RNA, 22 nt, Human
acauagcuuaaaugagaagaua

SEQ ID NO: 1072355 - RNA, 22 nt, Human
ucuggccaacaaaaacuaaguc

SEQ ID NO: 1072356 - RNA, 22 nt, Human
ugggggucaggaugaggccuug

SEQ ID NO: 1072357 - RNA, 22 nt, Human
ugcagaagcagagccgguggcc

SEQ ID NO: 1072358 - RNA, 22 nt, Human
acacacuucagauguaauuugu

SEQ ID NO: 1072359 - RNA, 22 nt, Human
uuauauuaguuagacuugcugu

SEQ ID NO: 1072360 - RNA, 22 nt, Human
ucccucaggugguucuuguuuc

SEQ ID NO: 1072361 - RNA, 22 nt, Human
aaggaacacuacaaggcuggga

SEQ ID NO: 1072362 - RNA, 22 nt, Human
cugggcuuucaggcccuaaggc

SEQ ID NO: 1072363 - RNA, 22 nt, Human
caggcaggucagugaagaagga

SEQ ID NO: 1072364 - RNA, 22 nt, Human
aggguauguuuuuaucuacugu

SEQ ID NO: 1072365 - RNA, 22 nt, Human
uggcugagaccaucagggugua

SEQ ID NO: 1072366 - RNA, 22 nt, Human
uggcagagucucuccuuuccag

SEQ ID NO: 1072367 - RNA, 22 nt, Human
gggcucuggauggagccugcag

SEQ ID NO: 1072368 - RNA, 22 nt, Human
ugccagccagguucugaggcua

SEQ ID NO: 1072369 - RNA, 22 nt, Human
cagcccuggaacagcugacuca

SEQ ID NO: 1072370 - RNA, 22 nt, Human
accaggaaaaacacuguguugg

SEQ ID NO: 1072371 - RNA, 22 nt, Human
ugaagcaggcauugacugauga

SEQ ID NO: 1072372 - RNA, 22 nt, Human
ucccacuggacgucugugcugg

SEQ ID NO: 1072373 - RNA, 22 nt, Human
uucuagauaucuaguguauaac

SEQ ID NO: 1072374 - RNA, 23 nt, Human
aaucuggcugauguuuuuucucu

SEQ ID NO: 1072375 - RNA, 23 nt, Human
ugccucugccucccuagucugca

SEQ ID NO: 1072376 - RNA, 22 nt, Human
aagugauuuagucuuauaaagg

SEQ ID NO: 1072377 - RNA, 22 nt, Human
uggcaagagggaugcaagguuu

SEQ ID NO: 1072378 - RNA, 22 nt, Human
auaaauuuucuugcuguacuua

SEQ ID NO: 1072379 - RNA, 19 nt, Human
cuggaaaguuggcagugag

SEQ ID NO: 1072380 - RNA, 22 nt, Human
ugccagcaguagcaguaggcca

SEQ ID NO: 1072381 - RNA, 22 nt, Human
aaggcacuagcagaauuaguga

SEQ ID NO: 1072382 - RNA, 22 nt, Human
agucaauuaucucuaggucauc

SEQ ID NO: 1072383 - RNA, 22 nt, Human
uggcaguccccugugccuggaa

SEQ ID NO: 1072384 - RNA, 22 nt, Human
uggaaggaagccaaggaagguu

SEQ ID NO: 1072385 - RNA, 22 nt, Human
cuuacaaaggagaggagauagg

SEQ ID NO: 1072386 - RNA, 22 nt, Human
ugguaaagugcucuaacuucau

SEQ ID NO: 1072387 - RNA, 22 nt, Human
cugugaaaugcuuugcgauggu

SEQ ID NO: 1072388 - RNA, 22 nt, Human
acagacaaguaguucagacaag

SEQ ID NO: 1072389 - RNA, 22 nt, Human
uuacauuagacccacuuucaug

SEQ ID NO: 1072390 - RNA, 18 nt, Human
gcugcugguggagggagc

SEQ ID NO: 1072391 - RNA, 22 nt, Human
caguagauuugguaaacuagga

SEQ ID NO: 1072392 - RNA, 22 nt, Human
ugggaacaguagcugcugagcu

SEQ ID NO: 1072393 - RNA, 22 nt, Human
gccaggcagauaugugagcuua

SEQ ID NO: 1072394 - RNA, 22 nt, Human
ggggacugccuuccacagacac

SEQ ID NO: 1072395 - RNA, 22 nt, Human
uuguuuguaugcugagaagaau

SEQ ID NO: 1072396 - RNA, 22 nt, Human
gcuguggucugugagcuccaaa

SEQ ID NO: 1072397 - RNA, 22 nt, Human
ucugagagcaggaggagcugcu

SEQ ID NO: 1072398 - RNA, 22 nt, Human
aguguacaucagaacauaucaa

SEQ ID NO: 1072399 - RNA, 22 nt, Human
ucaaggaaugacuauaugagga

SEQ ID NO: 1072400 - RNA, 22 nt, Human
cagggcccaagacacaaugagg

SEQ ID NO: 1072401 - RNA, 22 nt, Human
auuuauugagacuuaacaaccc

SEQ ID NO: 1072402 - RNA, 22 nt, Human
aacaugcuugcuuagaaucagc

SEQ ID NO: 1072403 - RNA, 23 nt, Human
uccuucagagccucccuccaagc

SEQ ID NO: 1072404 - RNA, 22 nt, Human
aauaagaacaacuaagguuuau

SEQ ID NO: 1072405 - RNA, 22 nt, Human
aauuauuuaacuccuuuggaga

SEQ ID NO: 1072406 - RNA, 21 nt, Human
aggcucagagaucaaacagua

SEQ ID NO: 1072407 - RNA, 22 nt, Human
cccaggaagggaugccaaggaa

SEQ ID NO: 1072408 - RNA, 22 nt, Human
agaguuaagacguacaugagug

SEQ ID NO: 1072409 - RNA, 22 nt, Human
aggaggccgcugaugggcuccc

SEQ ID NO: 1072410 - RNA, 22 nt, Human
aguggaugguauugggaccagg

SEQ ID NO: 1072411 - RNA, 22 nt, Human
uguguccuuuggaggaucagcg

SEQ ID NO: 1072412 - RNA, 21 nt, Human
ugguggagugugcugagcaug

SEQ ID NO: 1072413 - RNA, 22 nt, Human
cugagccagagggagucggguc

SEQ ID NO: 1072414 - RNA, 22 nt, Human
uagaaagacuguccagauuuca

SEQ ID NO: 1072415 - RNA, 22 nt, Human
caucacuguccucagcauucca

SEQ ID NO: 1072416 - RNA, 22 nt, Human
agaaaacagaaagucauuggug

SEQ ID NO: 1072417 - RNA, 22 nt, Human
caucacaguggcuguuuauuua

SEQ ID NO: 1072418 - RNA, 22 nt, Human
ggcucacgcaauuaucccggcc

SEQ ID NO: 1072419 - RNA, 22 nt, Human
augcagcugucagggagaacau

SEQ ID NO: 1072420 - RNA, 22 nt, Human
uauacacauuuuuaccuauagu

SEQ ID NO: 1072421 - RNA, 22 nt, Human
aaauuccaccagaaucaguaau

SEQ ID NO: 1072422 - RNA, 22 nt, Human
uuuccagauuaagauaccacuu

SEQ ID NO: 1072423 - RNA, 22 nt, Human
ccauggccgccgcugcucagga

SEQ ID NO: 1072424 - RNA, 22 nt, Human
uuucaaauggagucgugaaaug

SEQ ID NO: 1072425 - RNA, 22 nt, Human
aguuuuucugcuggucucacua

SEQ ID NO: 1072426 - RNA, 22 nt, Human
uuuuucuuaaauguggguuggc

SEQ ID NO: 1072427 - RNA, 22 nt, Human
caucagucagucucuucaguau

SEQ ID NO: 1072428 - RNA, 22 nt, Human
cugaggcagagggcagaccaga

SEQ ID NO: 1072429 - RNA, 22 nt, Human
aguccaaggagagacagcauuu

SEQ ID NO: 1072430 - RNA, 23 nt, Human
cugcugugaaacaugguuuuggu

SEQ ID NO: 1072431 - RNA, 22 nt, Human
ggguagcaugugucagaguuug

SEQ ID NO: 1072432 - RNA, 22 nt, Human
cuccagggcagcauggcagugg

SEQ ID NO: 1072433 - RNA, 22 nt, Human
auaaacagaguaguugcuacug

SEQ ID NO: 1072434 - RNA, 22 nt, Human
cugggagucaccaggagcaagg

SEQ ID NO: 1072435 - RNA, 22 nt, Human
guuauucaacuugugucucuua

SEQ ID NO: 1072436 - RNA, 22 nt, Human
ggucaggggcugcucuacagag

SEQ ID NO: 1072437 - RNA, 22 nt, Human
gcccagcuuuuugaggcaggca

SEQ ID NO: 1072438 - RNA, 22 nt, Human
ucugaggcauacccaggccccc

SEQ ID NO: 1072439 - RNA, 22 nt, Human
aaggcacuagcaagcugccugg

SEQ ID NO: 1072440 - RNA, 22 nt, Human
guucuucaaagugacaacuaaa

SEQ ID NO: 1072441 - RNA, 22 nt, Human
gcuucaaacugagcuucaagug

SEQ ID NO: 1072442 - RNA, 22 nt, Human
cucuuuuucagccuuaccaaag

SEQ ID NO: 1072443 - RNA, 22 nt, Human
uugaagaaguaauuuuaagucu

SEQ ID NO: 1072444 - RNA, 22 nt, Human
ugccaggccaaugaaggcaggg

SEQ ID NO: 1072445 - RNA, 22 nt, Human
caggaugcacuaggaaccaggg

SEQ ID NO: 1072446 - RNA, 21 nt, Human
uuagaaagcucacuacaguua

SEQ ID NO: 1072447 - RNA, 22 nt, Human
cuggaaggguacauaggaaacu

SEQ ID NO: 1072448 - RNA, 19 nt, Human
gccacuccugaugcugccc

SEQ ID NO: 1072449 - RNA, 22 nt, Human
ugcacacacucguguauaugag

SEQ ID NO: 1072450 - RNA, 22 nt, Human
auucaguuucauggcacagcua

SEQ ID NO: 1072451 - RNA, 22 nt, Human
ugagcaguaggucugaauagug

SEQ ID NO: 1072452 - RNA, 22 nt, Human
acagggccauuaucuguucuag

SEQ ID NO: 1072453 - RNA, 22 nt, Human
uacaaaacagugcucugguccu

SEQ ID NO: 1072454 - RNA, 22 nt, Human
gccuggagugguccugcugccc

SEQ ID NO: 1072455 - RNA, 22 nt, Human
ggguggaggagaacaggcccca

SEQ ID NO: 1072456 - RNA, 22 nt, Human
gcugucucauacaaggcccugc

SEQ ID NO: 1072457 - RNA, 22 nt, Human
ccaaggagcucauauucuuguu

SEQ ID NO: 1072458 - RNA, 22 nt, Human
ggcagcuguaagaugagugaau

SEQ ID NO: 1072459 - RNA, 22 nt, Human
ugggacagugugccuugcuccu

SEQ ID NO: 1072460 - RNA, 22 nt, Human
cccuguccuuggcugugaggcu

SEQ ID NO: 1072461 - RNA, 22 nt, Human
aggcgcagaaggccaggggccu

SEQ ID NO: 1072462 - RNA, 22 nt, Human
ucaggaacccccgcugggugaa

SEQ ID NO: 1072463 - RNA, 22 nt, Human
ggcaagcauaaccuguacagcc

SEQ ID NO: 1072464 - RNA, 20 nt, Human
ucacaggggaccaggagcag

SEQ ID NO: 1072465 - RNA, 22 nt, Human
gcuggggcugggcugaggaaga

SEQ ID NO: 1072466 - RNA, 22 nt, Human
guauuuuacugcucaaagcucu

SEQ ID NO: 1072467 - RNA, 22 nt, Human
gccaggcuguuuuuauuacugu

SEQ ID NO: 1072468 - RNA, 22 nt, Human
acagugaucuuuuaguuggaac

SEQ ID NO: 1072469 - RNA, 22 nt, Human
ucuucucuacaccagcagcccc

SEQ ID NO: 1072470 - RNA, 22 nt, Human
gccugagaucagccaagccccu

SEQ ID NO: 1072471 - RNA, 22 nt, Human
caacauuugaguaaagaaaugg

SEQ ID NO: 1072472 - RNA, 22 nt, Human
cccagcauuucugggcugcacu

SEQ ID NO: 1072473 - RNA, 22 nt, Human
gugcaggggaucagguugcagc

SEQ ID NO: 1072474 - RNA, 22 nt, Human
aagcagcaaguuuauuucuauc

SEQ ID NO: 1072475 - RNA, 23 nt, Human
aguaugaauucauuguuuuaguu

SEQ ID NO: 1072476 - RNA, 22 nt, Human
aaagccacugcauguguaguau

SEQ ID NO: 1072477 - RNA, 22 nt, Human
aaguuacaggagaaagagauca

SEQ ID NO: 1072478 - RNA, 22 nt, Human
aauacagugaaagugagcaagg

SEQ ID NO: 1072479 - RNA, 22 nt, Human
acaggcuuuuuuagaaugacau

SEQ ID NO: 1072480 - RNA, 22 nt, Human
auggagauuuuuagaauuacag

SEQ ID NO: 1072481 - RNA, 22 nt, Human
uagggcagaguccaggaugggc

SEQ ID NO: 1072482 - RNA, 22 nt, Human
cugcccaggcugaaggaacauc

SEQ ID NO: 1072483 - RNA, 23 nt, Human
agagcuuucuaaaauguaaaucu

SEQ ID NO: 1072484 - RNA, 22 nt, Human
guuacucuuccccggggucugg

SEQ ID NO: 1072485 - RNA, 22 nt, Human
cugaaauugaugacagggaugg

SEQ ID NO: 1072486 - RNA, 22 nt, Human
ggccagggggcuucagacucca

SEQ ID NO: 1072487 - RNA, 22 nt, Human
aagagcaggacagaaucagaac

SEQ ID NO: 1072488 - RNA, 22 nt, Human
auucuaagucuuguucacauuc

SEQ ID NO: 1072489 - RNA, 21 nt, Human
cucaaagaccaaaaguguaga

SEQ ID NO: 1072490 - RNA, 22 nt, Human
cccugcagccuugcaugccuuc

SEQ ID NO: 1072491 - RNA, 22 nt, Human
ucucaggccccugaguuucucu

SEQ ID NO: 1072492 - RNA, 22 nt, Human
uauggcuucuuuugcaacuacu

SEQ ID NO: 1072493 - RNA, 22 nt, Human
cgcuggggcuuuuugcuugaga

SEQ ID NO: 1072494 - RNA, 22 nt, Human
acuuuuaaggggccuugauuua

SEQ ID NO: 1072495 - RNA, 22 nt, Human
caaggcaggcaguucacuugag

SEQ ID NO: 1072496 - RNA, 16 nt, Human
aggcucagaggcugga

SEQ ID NO: 1072497 - RNA, 22 nt, Human
cuggggcccaucgagggcugag

SEQ ID NO: 1072498 - RNA, 22 nt, Human
gugggugauguacuggaggcca

SEQ ID NO: 1072499 - RNA, 22 nt, Human
cuguccccgcgaguccagagcu

SEQ ID NO: 1072500 - RNA, 17 nt, Human
uccuccccgcaguugca

SEQ ID NO: 1072501 - RNA, 22 nt, Human
ucccagagaagagcuggaugga

SEQ ID NO: 1072502 - RNA, 22 nt, Human
uggaacacaggacuaucagcug

SEQ ID NO: 1072503 - RNA, 22 nt, Human
ucccagcagcauagcucagaau

SEQ ID NO: 1072504 - RNA, 22 nt, Human
ccaucccuccuccaccagcuag

SEQ ID NO: 1072505 - RNA, 22 nt, Human
uuuaagcacagggauaaaguua

SEQ ID NO: 1072506 - RNA, 21 nt, Human
uaagugcaaagagacagauac

SEQ ID NO: 1072507 - RNA, 22 nt, Human
ggcacugaucugauuucccucc

SEQ ID NO: 1072508 - RNA, 22 nt, Human
gcaugguggccuuaggguagcc

SEQ ID NO: 1072509 - RNA, 22 nt, Human
ucucagaguuuacggggcugaa

SEQ ID NO: 1072510 - RNA, 22 nt, Human
caauuucaauacaaaauacauu

SEQ ID NO: 1072511 - RNA, 22 nt, Human
ucagagugugagacauauugga

SEQ ID NO: 1072512 - RNA, 22 nt, Human
gcagcaggagaguuuguccugc

SEQ ID NO: 1072513 - RNA, 22 nt, Human
uuugugugaaaauauuuaaguu

SEQ ID NO: 1072514 - RNA, 22 nt, Human
caaggccaagguuuugugaacu

SEQ ID NO: 1072515 - RNA, 22 nt, Human
uuuaauugcauuuaaagaugga

SEQ ID NO: 1072516 - RNA, 22 nt, Human
auacaaaaauuagccgggagua

SEQ ID NO: 1072517 - RNA, 22 nt, Human
cucuggagcaccgggcuaucca

SEQ ID NO: 1072518 - RNA, 18 nt, Human
ccugccagucuggagcag

SEQ ID NO: 1072519 - RNA, 22 nt, Human
ugaaauuagugaaguuacaguu

SEQ ID NO: 1072520 - RNA, 22 nt, Human
ucacaaauguuugcaugugucu

SEQ ID NO: 1072521 - RNA, 20 nt, Human
caaagcaguaggauaaaaau

SEQ ID NO: 1072522 - RNA, 22 nt, Human
aagccaggccauucucugguuc

SEQ ID NO: 1072523 - RNA, 22 nt, Human
aggggcucaaagugugcaggga

SEQ ID NO: 1072524 - RNA, 22 nt, Human
ccugggcuugguuguugagaac

SEQ ID NO: 1072525 - RNA, 22 nt, Human
aaagcagagguugcagugagcu

SEQ ID NO: 1072526 - RNA, 22 nt, Human
ugcaggaauagcuacagagcug

SEQ ID NO: 1072527 - RNA, 22 nt, Human
cugcacagagcagggcagacac

SEQ ID NO: 1072528 - RNA, 22 nt, Human
auuucucauuaagaucuuccaa

SEQ ID NO: 1072529 - RNA, 22 nt, Human
cagcccugagaaggaggaucuc

SEQ ID NO: 1072530 - RNA, 22 nt, Human
aagaacaugaacacaauguuua

SEQ ID NO: 1072531 - RNA, 22 nt, Human
gaaaauuuagaacugaacuucu

SEQ ID NO: 1072532 - RNA, 22 nt, Human
caucaaauaggaauauuuggca

SEQ ID NO: 1072533 - RNA, 23 nt, Human
aaguacauauauuuagauaguga

SEQ ID NO: 1072534 - RNA, 22 nt, Human
ccugagagcgaguggccucaug

SEQ ID NO: 1072535 - RNA, 22 nt, Human
cugacucagcagcugaugaucc

SEQ ID NO: 1072536 - RNA, 22 nt, Human
gcucuggagauggagccuugag

SEQ ID NO: 1072537 - RNA, 22 nt, Human
agccuguggaucccugcacugg

SEQ ID NO: 1072538 - RNA, 20 nt, Human
cacaggcuauaugagagcca

SEQ ID NO: 1072539 - RNA, 22 nt, Human
gacagguggggaaacuaaggua

SEQ ID NO: 1072540 - RNA, 21 nt, Human
uauuucuuugacucucucccu

SEQ ID NO: 1072541 - RNA, 22 nt, Human
aggagcugcaaauauuaguaau

SEQ ID NO: 1072542 - RNA, 22 nt, Human
cuuccucuauguucagguagaa

SEQ ID NO: 1072543 - RNA, 22 nt, Human
ugccugucuccucugcagggug

SEQ ID NO: 1072544 - RNA, 22 nt, Human
augcacuugcguguuugcaaau

SEQ ID NO: 1072545 - RNA, 22 nt, Human
aacauuuauauggguucaugaa

SEQ ID NO: 1072546 - RNA, 22 nt, Human
uggccugggucacaccaggguc

SEQ ID NO: 1072547 - RNA, 22 nt, Human
aguuacauauaagaagacagac

SEQ ID NO: 1072548 - RNA, 22 nt, Human
gaggaaccuaugauuuagagca

SEQ ID NO: 1072549 - RNA, 22 nt, Human
ucugagagauacaaggaggcaa

SEQ ID NO: 1072550 - RNA, 22 nt, Human
uaggcagggauuaggguugauu

SEQ ID NO: 1072551 - RNA, 22 nt, Human
uuuguucauuuugagcucauca

SEQ ID NO: 1072552 - RNA, 22 nt, Human
caauguuugugaucuacugacu

SEQ ID NO: 1072553 - RNA, 22 nt, Human
cagcuuccaucuccacugcccu

SEQ ID NO: 1072554 - RNA, 22 nt, Human
ucaguaacuuacuuauucaccu

SEQ ID NO: 1072555 - RNA, 22 nt, Human
ccuggaguuuuuugguugacuc

SEQ ID NO: 1072556 - RNA, 22 nt, Human
ucagccuccgaaagugcuggga

SEQ ID NO: 1072557 - RNA, 22 nt, Human
acaauucuggguauuuauauag

SEQ ID NO: 1072558 - RNA, 22 nt, Human
gucagcuaggcagcugcgaugg

SEQ ID NO: 1072559 - RNA, 23 nt, Human
agaguuuucuguuuucuguaggg

SEQ ID NO: 1072560 - RNA, 22 nt, Human
cugcuggguuugccuuucacca

SEQ ID NO: 1072561 - RNA, 22 nt, Human
uucaauucuaaacuaauauucu

SEQ ID NO: 1072562 - RNA, 22 nt, Human
gcaauuauuuuugcaccaaugu

SEQ ID NO: 1072563 - RNA, 22 nt, Human
agguggggaggagugucucuuu

SEQ ID NO: 1072564 - RNA, 22 nt, Human
uuuuuccuuggaugugucucuc

SEQ ID NO: 1072565 - RNA, 22 nt, Human
agccaggaaccagcuacagucu

SEQ ID NO: 1072566 - RNA, 22 nt, Human
cucuuacaagcucccgauauaa

SEQ ID NO: 1072567 - RNA, 22 nt, Human
gcuaccugagcaagagcuucaa

SEQ ID NO: 1072568 - RNA, 22 nt, Human
cagggcagggccacacccccug

SEQ ID NO: 1072569 - RNA, 22 nt, Human
ggaggagguggguuaaguugua

SEQ ID NO: 1072570 - RNA, 22 nt, Human
gccuuccuuacaccugcucagc

SEQ ID NO: 1072571 - RNA, 19 nt, Human
cuucuagaccuuauaccac

SEQ ID NO: 1072572 - RNA, 23 nt, Human
ucccuggaggcagguccagggcc

SEQ ID NO: 1072573 - RNA, 22 nt, Human
uaugugcagcacuugccauuac

SEQ ID NO: 1072574 - RNA, 22 nt, Human
aagaaucauccugcaagagucu

SEQ ID NO: 1072575 - RNA, 22 nt, Human
acauuucuuucuauucaguagc

SEQ ID NO: 1072576 - RNA, 21 nt, Human
uuugcugaaugauuccagggc

SEQ ID NO: 1072577 - RNA, 19 nt, Human
ugccugucaguagaucuca

SEQ ID NO: 1072578 - RNA, 22 nt, Human
cugccaggggccucacaggcca

SEQ ID NO: 1072579 - RNA, 19 nt, Human
uguuuacauguuucuucag

SEQ ID NO: 1072580 - RNA, 22 nt, Human
aagggugggcccuggcagccau

SEQ ID NO: 1072581 - RNA, 22 nt, Human
uguuucuuuguagauauucuuu

SEQ ID NO: 1072582 - RNA, 22 nt, Human
uaauuuuccacucuguuuaucu

SEQ ID NO: 1072583 - RNA, 22 nt, Human
cugucccaggagcuguaagaca

SEQ ID NO: 1072584 - RNA, 22 nt, Human
gccagcucagugccaggccccu

SEQ ID NO: 1072585 - RNA, 22 nt, Human
caggcacacauccgugagagau

SEQ ID NO: 1072586 - RNA, 22 nt, Human
cccaggaauucagggcucaagg

SEQ ID NO: 1072587 - RNA, 22 nt, Human
uccuggccugucuggaguagcu

SEQ ID NO: 1072588 - RNA, 22 nt, Human
uuuaacauguucaagaaacaua

SEQ ID NO: 1072589 - RNA, 19 nt, Human
ugcacacagauaaguaucu

SEQ ID NO: 1072590 - RNA, 22 nt, Human
uagcugcccaucuuuccuuuag

SEQ ID NO: 1072591 - RNA, 22 nt, Human
cagaggaagcuggguguggagu

SEQ ID NO: 1072592 - RNA, 22 nt, Human
uguccaaugcccuuuccacaug

SEQ ID NO: 1072593 - RNA, 19 nt, Human
guggccucggagcgcgcgg

SEQ ID NO: 1072594 - RNA, 22 nt, Human
ucuggccuauuucugucagauc

SEQ ID NO: 1072595 - RNA, 22 nt, Human
caaugauucugcaacugugugc

SEQ ID NO: 1072596 - RNA, 19 nt, Human
aggcagcauucuggggcuu

SEQ ID NO: 1072597 - RNA, 21 nt, Human
aggugcaggccucaagcccca

SEQ ID NO: 1072598 - RNA, 20 nt, Human
cugugccuaaaccuccgggu

SEQ ID NO: 1072599 - RNA, 22 nt, Human
cagagccaggccugcccucuuu

SEQ ID NO: 1072600 - RNA, 22 nt, Human
gcugcuuccuuuccugcugacc

SEQ ID NO: 1072601 - RNA, 22 nt, Human
ucuugauuguuuucugaccuua

SEQ ID NO: 1072602 - RNA, 22 nt, Human
ccugagugcuuccagagucaug

SEQ ID NO: 1072603 - RNA, 22 nt, Human
ggaggugggagacauaggcggc

SEQ ID NO: 1072604 - RNA, 22 nt, Human
uccuucagcuuauuucuuagga

SEQ ID NO: 1072605 - RNA, 22 nt, Human
uguacagaaauuccuacuacau

SEQ ID NO: 1072606 - RNA, 21 nt, Human
uccuuccuugagguccuuucc

SEQ ID NO: 1072607 - RNA, 22 nt, Human
ugacuuccugcacucaggugau

SEQ ID NO: 1072608 - RNA, 22 nt, Human
auuguacaaugccuggaacauu

SEQ ID NO: 1072609 - RNA, 22 nt, Human
gcuggucacucugggagcugcu

SEQ ID NO: 1072610 - RNA, 22 nt, Human
uacaaagucuuggguucuaggc

SEQ ID NO: 1072611 - RNA, 22 nt, Human
auucuacaccucucucauuuag

SEQ ID NO: 1072612 - RNA, 22 nt, Human
cuggcagcagcuucuggaucga

SEQ ID NO: 1072613 - RNA, 22 nt, Human
augccagacauuaacgacuaug

SEQ ID NO: 1072614 - RNA, 23 nt, Human
agaggcaggaguggcuugcccgg

SEQ ID NO: 1072615 - RNA, 22 nt, Human
ucuuuccuacuuuauugugaac

SEQ ID NO: 1072616 - RNA, 22 nt, Human
gcccgcagagaucuuuaacaaa

SEQ ID NO: 1072617 - RNA, 22 nt, Human
ccaaaguccuuucuccaccugc

SEQ ID NO: 1072618 - RNA, 22 nt, Human
aacacuuucuuccuugcucagg

SEQ ID NO: 1072619 - RNA, 18 nt, Human
ggcucaggcuauccuaac

SEQ ID NO: 1072620 - RNA, 22 nt, Human
cagggccacuguagaugaggag

SEQ ID NO: 1072621 - RNA, 21 nt, Human
accauuaacacccagguuucu

SEQ ID NO: 1072622 - RNA, 20 nt, Human
uccuuuccuccuucuaaaug

SEQ ID NO: 1072623 - RNA, 22 nt, Human
aguuucacaugcauggaugugu

SEQ ID NO: 1072624 - RNA, 22 nt, Human
aucaaagaaugugacugaaaua

SEQ ID NO: 1072625 - RNA, 22 nt, Human
auuccagugugcaugguacaca

SEQ ID NO: 1072626 - RNA, 22 nt, Human
caggcagcagaggaguguggga

SEQ ID NO: 1072627 - RNA, 22 nt, Human
aaguccagacuccuuugcgugg

SEQ ID NO: 1072628 - RNA, 19 nt, Human
auaaggcaggaggaaauuu

SEQ ID NO: 1072629 - RNA, 22 nt, Human
acauaacaaucauaggacauag

SEQ ID NO: 1072630 - RNA, 22 nt, Human
ccugagagugcgugccuccuua

SEQ ID NO: 1072631 - RNA, 22 nt, Human
ucccauggauagugaccuuguu

SEQ ID NO: 1072632 - RNA, 22 nt, Human
caaaugcuaugauuuugaguuu

SEQ ID NO: 1072633 - RNA, 22 nt, Human
aacuucauguaauuuaaaacag

SEQ ID NO: 1072634 - RNA, 23 nt, Human
aaggccagaauuucaauggugcc

SEQ ID NO: 1072635 - RNA, 22 nt, Human
uccuuccucggggacccagauc

SEQ ID NO: 1072636 - RNA, 22 nt, Human
ucagaauuuuaaaccaaggaaa

SEQ ID NO: 1072637 - RNA, 22 nt, Human
ucacgagaggcacagaauagag

SEQ ID NO: 1072638 - RNA, 23 nt, Human
gccugggacucaggaggagcuca

SEQ ID NO: 1072639 - RNA, 22 nt, Human
caggcacaaauuucuagauaag

SEQ ID NO: 1072640 - RNA, 22 nt, Human
uucaagaugccagggacgcggc

SEQ ID NO: 1072641 - RNA, 22 nt, Human
caacugugaauuuuaugauacc

SEQ ID NO: 1072642 - RNA, 22 nt, Human
cuggccugaggucggcuguagg

SEQ ID NO: 1072643 - RNA, 22 nt, Human
aauauaaugcuguuuuaugcca

SEQ ID NO: 1072644 - RNA, 22 nt, Human
gggcaagcacagcgagcgugcg

SEQ ID NO: 1072645 - RNA, 22 nt, Human
uggguagagcaggcuggggcuu

SEQ ID NO: 1072646 - RNA, 21 nt, Human
ucugggcagcccaguccugag

SEQ ID NO: 1072647 - RNA, 20 nt, Human
uugauaggcagcuugucagg

SEQ ID NO: 1072648 - RNA, 22 nt, Human
gcaagauguuaacauagggaga

SEQ ID NO: 1072649 - RNA, 22 nt, Human
auacaaugauaauaguacuuua

SEQ ID NO: 1072650 - RNA, 22 nt, Human
uggcacaguccugggugccugc

SEQ ID NO: 1072651 - RNA, 22 nt, Human
uggggcagggaugggaaacuau

SEQ ID NO: 1072652 - RNA, 21 nt, Human
ucagggcagugggagguuccu

SEQ ID NO: 1072653 - RNA, 22 nt, Human
cugcugugagugguucuugccu

SEQ ID NO: 1072654 - RNA, 22 nt, Human
ugacaggcagugcugggcaugu

SEQ ID NO: 1072655 - RNA, 22 nt, Human
gagcuggugaucagcuggagga

SEQ ID NO: 1072656 - RNA, 22 nt, Human
ucaguaauauucuuuaaaauac

SEQ ID NO: 1072657 - RNA, 19 nt, Human
ugcagaggguaggaaggcc

SEQ ID NO: 1072658 - RNA, 22 nt, Human
uuuaucugaaaaaacucuugga

SEQ ID NO: 1072659 - RNA, 22 nt, Human
uagcagaggaaauccagaguaa

SEQ ID NO: 1072660 - RNA, 22 nt, Human
uuugaaaggaaguuaauacuuu

SEQ ID NO: 1072661 - RNA, 21 nt, Human
ucuggaagaaaaaaguauuau

SEQ ID NO: 1072662 - RNA, 22 nt, Human
ucccagagucagagguggggcc

SEQ ID NO: 1072663 - RNA, 22 nt, Human
uacaaacucuuuauauuucaua

SEQ ID NO: 1072664 - RNA, 22 nt, Human
ccagggcaucacauccaguguu

SEQ ID NO: 1072665 - RNA, 16 nt, Human
ccagguggggcuguga

SEQ ID NO: 1072666 - RNA, 22 nt, Human
auucuggaagcaagcuuuuaaa

SEQ ID NO: 1072667 - RNA, 22 nt, Human
auuucuguaguccacauucuuu

SEQ ID NO: 1072668 - RNA, 22 nt, Human
aguccaggaguugggugacauu

SEQ ID NO: 1072669 - RNA, 22 nt, Human
uauuuugagguauuuuugagcu

SEQ ID NO: 1072670 - RNA, 22 nt, Human
cuggggcucucuggaaugcuug

SEQ ID NO: 1072671 - RNA, 22 nt, Human
ugaaaucauaacaguuuggcuu

SEQ ID NO: 1072672 - RNA, 22 nt, Human
gcccauggucagggaggcaggg

SEQ ID NO: 1072673 - RNA, 22 nt, Human
ucugcucagugcuuaucucuaa

SEQ ID NO: 1072674 - RNA, 22 nt, Human
aaguauaagcuauucuucauga

SEQ ID NO: 1072675 - RNA, 22 nt, Human
agagacaaugccaaugcacacg

SEQ ID NO: 1072676 - RNA, 22 nt, Human
uccugccuaccuugcggaggug

SEQ ID NO: 1072677 - RNA, 22 nt, Human
gaacagacuuggaggagugauc

SEQ ID NO: 1072678 - RNA, 22 nt, Human
gggauggacuuggggacuccag

SEQ ID NO: 1072679 - RNA, 22 nt, Human
auaaggcagucacuggaauguu

SEQ ID NO: 1072680 - RNA, 22 nt, Human
aggucagcugcugauaggcagc

SEQ ID NO: 1072681 - RNA, 22 nt, Human
ucucugagcaugccauauugcu

SEQ ID NO: 1072682 - RNA, 22 nt, Human
gggcugacaaccaucugacaag

SEQ ID NO: 1072683 - RNA, 22 nt, Human
agccucucuccagcuuggcaga

SEQ ID NO: 1072684 - RNA, 22 nt, Human
uccaggagggauugggcugugg

SEQ ID NO: 1072685 - RNA, 22 nt, Human
uuuccaaaggcuaaacucaguu

SEQ ID NO: 1072686 - RNA, 22 nt, Human
aaguuuaacuugaauucuuucu

SEQ ID NO: 1072687 - RNA, 23 nt, Human
cccuuuaagauuugaauagucag

SEQ ID NO: 1072688 - RNA, 19 nt, Human
accaaacaguggacggagc

SEQ ID NO: 1072689 - RNA, 22 nt, Human
aacaguguuuuucuucagcacu

SEQ ID NO: 1072690 - RNA, 22 nt, Human
uccuggcucgauugcuaccaau

SEQ ID NO: 1072691 - RNA, 18 nt, Human
ugagagaauguucaugcu

SEQ ID NO: 1072692 - RNA, 22 nt, Human
acuuaaaaacagauccagcagg

SEQ ID NO: 1072693 - RNA, 22 nt, Human
acaggccacaguggagucucug

SEQ ID NO: 1072694 - RNA, 22 nt, Human
caauguuugaguaggagcauaa

SEQ ID NO: 1072695 - RNA, 22 nt, Human
gcagcugagagaagaacagggc

SEQ ID NO: 1072696 - RNA, 22 nt, Human
uuagaaagcuuuccauagucaa

SEQ ID NO: 1072697 - RNA, 22 nt, Human
uuucaaagacagccauauuugu

SEQ ID NO: 1072698 - RNA, 22 nt, Human
caggugaccuuuguccuaaguu

SEQ ID NO: 1072699 - RNA, 23 nt, Human
ucaucaaaggaaguacgugucac

SEQ ID NO: 1072700 - RNA, 22 nt, Human
uuuccuuccagguuccuaaggc

SEQ ID NO: 1072701 - RNA, 22 nt, Human
cagcuguguagaugcaggguca

SEQ ID NO: 1072702 - RNA, 22 nt, Human
guccucuguuagaaaugugcuu

SEQ ID NO: 1072703 - RNA, 22 nt, Human
agggggaggcugugcugcgucu

SEQ ID NO: 1072704 - RNA, 22 nt, Human
gcagagugaggaagagcuucca

SEQ ID NO: 1072705 - RNA, 22 nt, Human
ggggagcuuagggucucugaau

SEQ ID NO: 1072706 - RNA, 22 nt, Human
uuaaaugaggcugauguagauu

SEQ ID NO: 1072707 - RNA, 22 nt, Human
uuucuuuccauacauauugcua

SEQ ID NO: 1072708 - RNA, 22 nt, Human
ucauauaagagcuuuagaguca

SEQ ID NO: 1072709 - RNA, 19 nt, Human
cgcaggagccgaggugacc

SEQ ID NO: 1072710 - RNA, 22 nt, Human
guaucuagucaaugcuguucaa

SEQ ID NO: 1072711 - RNA, 22 nt, Human
ucuuugcugaguacaucuccaa

SEQ ID NO: 1072712 - RNA, 22 nt, Human
ccagugcccagcugcccaggca

SEQ ID NO: 1072713 - RNA, 22 nt, Human
cauuguauugaggauacuuaag

SEQ ID NO: 1072714 - RNA, 22 nt, Human
ugucagggcaugcgguccagcc

SEQ ID NO: 1072715 - RNA, 22 nt, Human
ucagggcauccauugccuguug

SEQ ID NO: 1072716 - RNA, 22 nt, Human
ugcuuccuucccguucuucucc

SEQ ID NO: 1072717 - RNA, 22 nt, Human
caggcugaggcaguaggguuug

SEQ ID NO: 1072718 - RNA, 22 nt, Human
uaacagaagaaaacauauugga

SEQ ID NO: 1072719 - RNA, 22 nt, Human
gcugcaggggggucuggacuug

SEQ ID NO: 1072720 - RNA, 22 nt, Human
ccagggguuggagguugcagug

SEQ ID NO: 1072721 - RNA, 22 nt, Human
ggccugcuucucagugagcuug

SEQ ID NO: 1072722 - RNA, 22 nt, Human
gggcuucaggagggucagccca

SEQ ID NO: 1072723 - RNA, 22 nt, Human
caggacgggcaaacaggauggu

SEQ ID NO: 1072724 - RNA, 22 nt, Human
acaaggcugaacagugaagccg

SEQ ID NO: 1072725 - RNA, 22 nt, Human
cugugcccuggccaggccucuc

SEQ ID NO: 1072726 - RNA, 22 nt, Human
ucaaaggcaccaaggucacugc

SEQ ID NO: 1072727 - RNA, 19 nt, Human
cccaggggacccagcccua

SEQ ID NO: 1072728 - RNA, 22 nt, Human
aagagcugugggugguaguccu

SEQ ID NO: 1072729 - RNA, 22 nt, Human
ggcaggcuccaagcauccuaug

SEQ ID NO: 1072730 - RNA, 22 nt, Human
cucugagguuuccucacaagcu

SEQ ID NO: 1072731 - RNA, 22 nt, Human
uaggcugggcugagcuggacgg

SEQ ID NO: 1072732 - RNA, 22 nt, Human
aagaaugucguugguauuuuaa

SEQ ID NO: 1072733 - RNA, 22 nt, Human
ucccaagugucuuggaccaggg

SEQ ID NO: 1072734 - RNA, 22 nt, Human
gcauggcauuugaagguagaag

SEQ ID NO: 1072735 - RNA, 22 nt, Human
acccugggucauauacagugug

SEQ ID NO: 1072736 - RNA, 22 nt, Human
ccacuugugaaauaaucaaaua

SEQ ID NO: 1072737 - RNA, 22 nt, Human
cugccaggacugacgucuucag

SEQ ID NO: 1072738 - RNA, 22 nt, Human
aucugccugagucuagguuuuc

SEQ ID NO: 1072739 - RNA, 22 nt, Human
aauguuucauuuaguugucucc

SEQ ID NO: 1072740 - RNA, 22 nt, Human
uggcaggagguuuucuccagga

SEQ ID NO: 1072741 - RNA, 22 nt, Human
ccugccagauccccugagcuga

SEQ ID NO: 1072742 - RNA, 22 nt, Human
cgaggcagacaaaaguuggaag

SEQ ID NO: 1072743 - RNA, 22 nt, Human
ucuggcuccuggcuccacugcc

SEQ ID NO: 1072744 - RNA, 22 nt, Human
uuauauuucugguagccuucag

SEQ ID NO: 1072745 - RNA, 22 nt, Human
uagauguuccacauauauaugu

SEQ ID NO: 1072746 - RNA, 22 nt, Human
aaacaguuaauugcuuucaguu

SEQ ID NO: 1072747 - RNA, 22 nt, Human
gaaaucauuagcaaagauaugu

SEQ ID NO: 1072748 - RNA, 22 nt, Human
caagaugccccugguagggauc

SEQ ID NO: 1072749 - RNA, 22 nt, Human
gcagugccuugcuucucugucu

SEQ ID NO: 1072750 - RNA, 22 nt, Human
auggacagugugucuguuucca

SEQ ID NO: 1072751 - RNA, 22 nt, Human
ccucagacgcaggccuaugggc

SEQ ID NO: 1072752 - RNA, 22 nt, Human
ucuggcucucaacaaauauuua

SEQ ID NO: 1072753 - RNA, 22 nt, Human
cugggagagguggugggaagua

SEQ ID NO: 1072754 - RNA, 20 nt, Human
cuccaugacuugaauuagua

SEQ ID NO: 1072755 - RNA, 22 nt, Human
cucugauuuauauuauaaagug

SEQ ID NO: 1072756 - RNA, 22 nt, Human
uuccaggggcagcagugauggu

SEQ ID NO: 1072757 - RNA, 22 nt, Human
uggcccugcuuaugucucucuu

SEQ ID NO: 1072758 - RNA, 22 nt, Human
cagagugagggccugcaccugc

SEQ ID NO: 1072759 - RNA, 22 nt, Human
aucaguuucugugaagaacaca

SEQ ID NO: 1072760 - RNA, 22 nt, Human
uuacauacuuacuagaucuaug

SEQ ID NO: 1072761 - RNA, 22 nt, Human
ucaggugggaccugcuaggaca

SEQ ID NO: 1072762 - RNA, 22 nt, Human
aucaguggggacgagaaguuua

SEQ ID NO: 1072763 - RNA, 22 nt, Human
uccuggcuccacugagcaggcc

SEQ ID NO: 1072764 - RNA, 22 nt, Human
gagagaagggggauaugagccu

SEQ ID NO: 1072765 - RNA, 22 nt, Human
aaagucauguaaugauaugauu

SEQ ID NO: 1072766 - RNA, 22 nt, Human
aggaaauugucuuuuuccuugu

SEQ ID NO: 1072767 - RNA, 22 nt, Human
cucagccccaauucuccccauu

SEQ ID NO: 1072768 - RNA, 22 nt, Human
cuccugggaauuuaguugugag

SEQ ID NO: 1072769 - RNA, 22 nt, Human
cagggcaggacagauacauuac

SEQ ID NO: 1072770 - RNA, 22 nt, Human
agccaggcggggcagguuuccu

SEQ ID NO: 1072771 - RNA, 22 nt, Human
cggcuggguucggcugcaggcc

SEQ ID NO: 1072772 - RNA, 18 nt, Human
ccuggcuuuucuacuugc

SEQ ID NO: 1072773 - RNA, 22 nt, Human
uauuuguagcuucccaaagcuu

SEQ ID NO: 1072774 - RNA, 22 nt, Human
cccagcauggagugaggacuca

SEQ ID NO: 1072775 - RNA, 22 nt, Human
aggucacccguuugacuaucca

SEQ ID NO: 1072776 - RNA, 22 nt, Human
uuacauuaagccaauggauucu

SEQ ID NO: 1072777 - RNA, 20 nt, Human
cagaggcaaggagacuugga

SEQ ID NO: 1072778 - RNA, 22 nt, Human
gcagagacuccacugucuugug

SEQ ID NO: 1072779 - RNA, 22 nt, Human
cagagggcucaguccugcugga

SEQ ID NO: 1072780 - RNA, 22 nt, Human
acaguuauuuacugcauaaacu

SEQ ID NO: 1072781 - RNA, 22 nt, Human
cacaacuuuaggaaccacauuc

SEQ ID NO: 1072782 - RNA, 22 nt, Human
cuggguggaaagugcugagaau

SEQ ID NO: 1072783 - RNA, 22 nt, Human
gaaugcucucauuuuccaacau

SEQ ID NO: 1072784 - RNA, 22 nt, Human
acauagcucaguaucacuuacu

SEQ ID NO: 1072785 - RNA, 19 nt, Human
uccucaggggcucacagac

SEQ ID NO: 1072786 - RNA, 22 nt, Human
cugcuuuggcucagugacauca

SEQ ID NO: 1072787 - RNA, 21 nt, Human
acugggcuagccugacuucug

SEQ ID NO: 1072788 - RNA, 20 nt, Human
uagcagcagaaagaacuuag

SEQ ID NO: 1072789 - RNA, 22 nt, Human
ggaaagaccugagauaggaaua

SEQ ID NO: 1072790 - RNA, 22 nt, Human
aauagauacuacuuagauguag

SEQ ID NO: 1072791 - RNA, 20 nt, Human
ucauuguguugccaauuccc

SEQ ID NO: 1072792 - RNA, 22 nt, Human
aacagaacuguuguucuggagg

SEQ ID NO: 1072793 - RNA, 19 nt, Human
agacagagacugaaauaga

SEQ ID NO: 1072794 - RNA, 22 nt, Human
uagaggugucacuuugggaagu

SEQ ID NO: 1072795 - RNA, 22 nt, Human
aacaugaaaagcccagagaggu

SEQ ID NO: 1072796 - RNA, 22 nt, Human
agguccaggauuuguggggucu

SEQ ID NO: 1072797 - RNA, 22 nt, Human
gcaccaugauggagccucauua

SEQ ID NO: 1072798 - RNA, 22 nt, Human
aguguuaaggcugguugcuaua

SEQ ID NO: 1072799 - RNA, 22 nt, Human
uucauacaugagacuagaugca

SEQ ID NO: 1072800 - RNA, 22 nt, Human
cugcugugugcuuacuuggguu

SEQ ID NO: 1072801 - RNA, 17 nt, Human
uuguuucuucucugugg

SEQ ID NO: 1072802 - RNA, 23 nt, Human
cucaacauccauucuugcccuuc

SEQ ID NO: 1072803 - RNA, 22 nt, Human
ucagagugcagggaguagcagc

SEQ ID NO: 1072804 - RNA, 22 nt, Human
cagcagaggugguucacauugu

SEQ ID NO: 1072805 - RNA, 22 nt, Human
cugagaaggaagccuccacucu

SEQ ID NO: 1072806 - RNA, 22 nt, Human
ucugagacccauacaggcccac

SEQ ID NO: 1072807 - RNA, 22 nt, Human
agagccagccuucucagcuuac

SEQ ID NO: 1072808 - RNA, 22 nt, Human
cuugcuuaccuaguuagcucca

SEQ ID NO: 1072809 - RNA, 22 nt, Human
uuccucuuauauagccuuggcc

SEQ ID NO: 1072810 - RNA, 22 nt, Human
caacaacaugggauucauuucu

SEQ ID NO: 1072811 - RNA, 22 nt, Human
ugcuugugagaguuuuuucaga

SEQ ID NO: 1072812 - RNA, 22 nt, Human
ucuggggauaagacccagguau

SEQ ID NO: 1072813 - RNA, 22 nt, Human
aggagaaagacuggacagccaa

SEQ ID NO: 1072814 - RNA, 22 nt, Human
cagaggccuuucuacagugaua

SEQ ID NO: 1072815 - RNA, 19 nt, Human
cccaggaagcggagguugc

SEQ ID NO: 1072816 - RNA, 22 nt, Human
uuccaaagaaguucacauuuac

SEQ ID NO: 1072817 - RNA, 22 nt, Human
cccagccuuccacccuggacua

SEQ ID NO: 1072818 - RNA, 22 nt, Human
aaaaaucacuuuuauaggcagc

SEQ ID NO: 1072819 - RNA, 22 nt, Human
aggaagggugucaugagcccuu

SEQ ID NO: 1072820 - RNA, 22 nt, Human
gagccagguuggaggcugcagu

SEQ ID NO: 1072821 - RNA, 22 nt, Human
guccucuggugaaagcauuccc

SEQ ID NO: 1072822 - RNA, 22 nt, Human
uucucagaauugacugggagca

SEQ ID NO: 1072823 - RNA, 22 nt, Human
acugagagggaggcuguccggu

SEQ ID NO: 1072824 - RNA, 22 nt, Human
ccugggcaacauagugagaccc

SEQ ID NO: 1072825 - RNA, 17 nt, Human
uuucuggaaugggcaaa

SEQ ID NO: 1072826 - RNA, 19 nt, Human
ccagguggaacugagguag

SEQ ID NO: 1072827 - RNA, 22 nt, Human
acagaugguagcauuauguugg

SEQ ID NO: 1072828 - RNA, 22 nt, Human
gggguggcccuacccucuggaa

SEQ ID NO: 1072829 - RNA, 22 nt, Human
gaguguuccagaaacuggcccu

SEQ ID NO: 1072830 - RNA, 22 nt, Human
acugccugugcacuggucuuuu

SEQ ID NO: 1072831 - RNA, 22 nt, Human
auugaaagauuuugggcucaug

SEQ ID NO: 1072832 - RNA, 22 nt, Human
accaagcucucuucccggcucu

SEQ ID NO: 1072833 - RNA, 22 nt, Human
guuuuaguggguggccacugau

SEQ ID NO: 1072834 - RNA, 22 nt, Human
ggauggcauguugggcucuguu

SEQ ID NO: 1072835 - RNA, 22 nt, Human
acgagguuggagaguuguuugg

SEQ ID NO: 1072836 - RNA, 22 nt, Human
gcugccugucccaggaugagga

SEQ ID NO: 1072837 - RNA, 22 nt, Human
cggggcugcucguccuccugug

SEQ ID NO: 1072838 - RNA, 22 nt, Human
ggggcuguuuuuggaauggcug

SEQ ID NO: 1072839 - RNA, 22 nt, Human
aauugcuaaagauuauguuuuc

SEQ ID NO: 1072840 - RNA, 22 nt, Human
gggucucucucggcuccacgcg

SEQ ID NO: 1072841 - RNA, 20 nt, Human
ugccaggcacggagugcaug

SEQ ID NO: 1072842 - RNA, 22 nt, Human
guggcauuaggccaggugcaua

SEQ ID NO: 1072843 - RNA, 22 nt, Human
agcuggagaugcccagcaccgg

SEQ ID NO: 1072844 - RNA, 18 nt, Human
ugaaauugcauccaugag

SEQ ID NO: 1072845 - RNA, 22 nt, Human
auaguuguguggggauucuggu

SEQ ID NO: 1072846 - RNA, 17 nt, Human
ugccagccugucccagg

SEQ ID NO: 1072847 - RNA, 20 nt, Human
ggcagggcaucaacagcucu

SEQ ID NO: 1072848 - RNA, 22 nt, Human
gaggcugcccaacuggagugga

SEQ ID NO: 1072849 - RNA, 22 nt, Human
gucacacagagcccugugcuca

SEQ ID NO: 1072850 - RNA, 22 nt, Human
ucccagcagggccgaccagccu

SEQ ID NO: 1072851 - RNA, 22 nt, Human
gagagucuagugcaccuaguuu

SEQ ID NO: 1072852 - RNA, 22 nt, Human
aggaaaugcugaugcuccugga

SEQ ID NO: 1072853 - RNA, 22 nt, Human
uuuagacuaauuccuaaagggc

SEQ ID NO: 1072854 - RNA, 22 nt, Human
ggaagaggaggagccaggcuuu

SEQ ID NO: 1072855 - RNA, 22 nt, Human
uugggcaaaguguuucuggagc

SEQ ID NO: 1072856 - RNA, 22 nt, Human
augaagaaacuguucugggugg

SEQ ID NO: 1072857 - RNA, 22 nt, Human
agcccagguugaggcugcagug

SEQ ID NO: 1072858 - RNA, 22 nt, Human
gcuggccucgcaggcaggaugu

SEQ ID NO: 1072859 - RNA, 22 nt, Human
agccagggcugcgagcagacag

SEQ ID NO: 1072860 - RNA, 22 nt, Human
aaaguguugggaagaaagugca

SEQ ID NO: 1072861 - RNA, 22 nt, Human
caguccugugucccuugguggg

SEQ ID NO: 1072862 - RNA, 21 nt, Human
aagaagcaauuuauuggaagg

SEQ ID NO: 1072863 - RNA, 17 nt, Human
cucugggcagccugggg

SEQ ID NO: 1072864 - RNA, 22 nt, Human
cacagaauuuucucuuuacaau

SEQ ID NO: 1072865 - RNA, 22 nt, Human
ccuggcagcgccgaagcuggcc

SEQ ID NO: 1072866 - RNA, 22 nt, Human
guucaaauggcugcaguuacca

SEQ ID NO: 1072867 - RNA, 22 nt, Human
gcuuuggaugugugccugaggu

SEQ ID NO: 1072868 - RNA, 22 nt, Human
ugggcucuggguggccugagca

SEQ ID NO: 1072869 - RNA, 18 nt, Human
uguggcaggggugggaga

SEQ ID NO: 1072870 - RNA, 18 nt, Human
gcagauggagauucaggg

SEQ ID NO: 1072871 - RNA, 22 nt, Human
accuccuggcugcucauggaac

SEQ ID NO: 1072872 - RNA, 22 nt, Human
uccagagugacaaaugacugau

SEQ ID NO: 1072873 - RNA, 22 nt, Human
uggcagagguaauucaaauccc

SEQ ID NO: 1072874 - RNA, 22 nt, Human
gggagggaagguaccuguguga

SEQ ID NO: 1072875 - RNA, 22 nt, Human
cuuggaguagagauuuagugaa

SEQ ID NO: 1072876 - RNA, 22 nt, Human
ccagggucucugcugccugaga

SEQ ID NO: 1072877 - RNA, 22 nt, Human
auuguauaagucuauuuacaau

SEQ ID NO: 1072878 - RNA, 22 nt, Human
uggaggcaugacagugucugga

SEQ ID NO: 1072879 - RNA, 22 nt, Human
auguccuuugcuucucuggucc

SEQ ID NO: 1072880 - RNA, 22 nt, Human
auuuugcuggucugaauuacuu

SEQ ID NO: 1072881 - RNA, 22 nt, Human
cuggcuuccucaggagcagugg

SEQ ID NO: 1072882 - RNA, 22 nt, Human
guugacagcuggugagcugcua

SEQ ID NO: 1072883 - RNA, 22 nt, Human
gauucagugggcuuugggacag

SEQ ID NO: 1072884 - RNA, 22 nt, Human
agucccagcuacucaagaggcu

SEQ ID NO: 1072885 - RNA, 22 nt, Human
caggcagcguccugcuuccugu

SEQ ID NO: 1072886 - RNA, 23 nt, Human
gcccucaguagaaaauguuagaa

SEQ ID NO: 1072887 - RNA, 22 nt, Human
acaggcucacagucauuucauu

SEQ ID NO: 1072888 - RNA, 22 nt, Human
aauuaguauugcgauucauuag

SEQ ID NO: 1072889 - RNA, 22 nt, Human
gugccaggugcuaagcugugcu

SEQ ID NO: 1072890 - RNA, 22 nt, Human
caaagucccagcugcuuagaga

SEQ ID NO: 1072891 - RNA, 22 nt, Human
ucucuggcugauauuccucugc

SEQ ID NO: 1072892 - RNA, 22 nt, Human
ucaggaacauaaugugagucag

SEQ ID NO: 1072893 - RNA, 22 nt, Human
caaggcugcugcgggucgcacc

SEQ ID NO: 1072894 - RNA, 22 nt, Human
cagauguauaugcauaaaaagu

SEQ ID NO: 1072895 - RNA, 22 nt, Human
caguuaaugugggccaaguucu

SEQ ID NO: 1072896 - RNA, 22 nt, Human
accauuaacaugauuuugggga

SEQ ID NO: 1072897 - RNA, 22 nt, Human
cagagacaguuucacagggucu

SEQ ID NO: 1072898 - RNA, 19 nt, Human
gggcaguggcacuagggag

SEQ ID NO: 1072899 - RNA, 22 nt, Human
uccaauuuucugauuucacuug

SEQ ID NO: 1072900 - RNA, 22 nt, Human
aaggagaaaugguagaugugca

SEQ ID NO: 1072901 - RNA, 22 nt, Human
gcagugaaaaagugcacccugu

SEQ ID NO: 1072902 - RNA, 22 nt, Human
uaaggcacacaguugcugcaug

SEQ ID NO: 1072903 - RNA, 22 nt, Human
ugcaaaagaauauagauauugu

SEQ ID NO: 1072904 - RNA, 22 nt, Human
uagaaacaaugacaugcuugua

SEQ ID NO: 1072905 - RNA, 22 nt, Human
uccugagagucaagaaugcagg

SEQ ID NO: 1072906 - RNA, 22 nt, Human
ggucacugcucuaaacaaaagu

SEQ ID NO: 1072907 - RNA, 22 nt, Human
aagucauagucgggaaagacau

SEQ ID NO: 1072908 - RNA, 22 nt, Human
aggaaacagugaacuuggcagg

SEQ ID NO: 1072909 - RNA, 22 nt, Human
cagcucuacguuucuaugaauc

SEQ ID NO: 1072910 - RNA, 22 nt, Human
ucuacuuuucccuauacaguuu

SEQ ID NO: 1072911 - RNA, 22 nt, Human
cagugcagguggcagaggacag

SEQ ID NO: 1072912 - RNA, 22 nt, Human
cacccuagcugucauuucaguu

SEQ ID NO: 1072913 - RNA, 22 nt, Human
uaaggccaaguucauauacaac

SEQ ID NO: 1072914 - RNA, 22 nt, Human
ucccaaggauaagagagucuga

SEQ ID NO: 1072915 - RNA, 22 nt, Human
auaugaaaagaagucaccauug

SEQ ID NO: 1072916 - RNA, 22 nt, Human
aagacauugcaugauaaugcug

SEQ ID NO: 1072917 - RNA, 22 nt, Human
cccucaggagaugucagcugga

SEQ ID NO: 1072918 - RNA, 17 nt, Human
uuucuccuuccaucuca

SEQ ID NO: 1072919 - RNA, 22 nt, Human
uaacaguguggacuugagaucu

SEQ ID NO: 1072920 - RNA, 22 nt, Human
gcagggacagggcagggccuuu

SEQ ID NO: 1072921 - RNA, 22 nt, Human
uacagugaaugaauggcugugc

SEQ ID NO: 1072922 - RNA, 22 nt, Human
aggcucagucuguucaugcacu

SEQ ID NO: 1072923 - RNA, 22 nt, Human
gcugugagccgcugcugagcau

SEQ ID NO: 1072924 - RNA, 22 nt, Human
cugcaucaggccaauuaagaau

SEQ ID NO: 1072925 - RNA, 22 nt, Human
ugccaggcucagccccuaucuu

SEQ ID NO: 1072926 - RNA, 22 nt, Human
cagcaggcccaggugcugguga

SEQ ID NO: 1072927 - RNA, 22 nt, Human
uaugcaauucucuuaauauucu

SEQ ID NO: 1072928 - RNA, 22 nt, Human
guaauauucagcuauugaguug

SEQ ID NO: 1072929 - RNA, 22 nt, Human
gcugagcccucaucccuaguuu

SEQ ID NO: 1072930 - RNA, 22 nt, Human
caacuauagaucaaaugaguuu

SEQ ID NO: 1072931 - RNA, 22 nt, Human
uccugggcuuaagugauccucc

SEQ ID NO: 1072932 - RNA, 22 nt, Human
gcaaagcaaucaggaguagcau

SEQ ID NO: 1072933 - RNA, 22 nt, Human
ccagugcuaagguagccucugc

SEQ ID NO: 1072934 - RNA, 23 nt, Human
acacaauagaguacuauucagcc

SEQ ID NO: 1072935 - RNA, 22 nt, Human
gcccucaggacaagguuacgcu

SEQ ID NO: 1072936 - RNA, 22 nt, Human
aaggcaguuaauuuggcuagaa

SEQ ID NO: 1072937 - RNA, 22 nt, Human
aggccagcaagaaagagagucu

SEQ ID NO: 1072938 - RNA, 22 nt, Human
uccuggccucacaguccugggu

SEQ ID NO: 1072939 - RNA, 22 nt, Human
aggcccaaaagaaaccacuggg

SEQ ID NO: 1072940 - RNA, 22 nt, Human
cugagcugcggcaggcaccugg

SEQ ID NO: 1072941 - RNA, 22 nt, Human
aggagguguagauuuccuguca

SEQ ID NO: 1072942 - RNA, 21 nt, Human
aaugcauuaacauaaagcuga

SEQ ID NO: 1072943 - RNA, 22 nt, Human
ggagauagacuuggugagccac

SEQ ID NO: 1072944 - RNA, 22 nt, Human
cugacuuugcucauaggucaaa

SEQ ID NO: 1072945 - RNA, 21 nt, Human
ucauuugugaucugauuucca

SEQ ID NO: 1072946 - RNA, 20 nt, Human
ccccacacuauugagcacuu

SEQ ID NO: 1072947 - RNA, 22 nt, Human
cugggaagaagugggcuacauu

SEQ ID NO: 1072948 - RNA, 20 nt, Human
ugcagggcucugcuucucuc

SEQ ID NO: 1072949 - RNA, 22 nt, Human
ccuggcagguuacaaccaguua

SEQ ID NO: 1072950 - RNA, 22 nt, Human
ucggagcgucacuggcuggagg

SEQ ID NO: 1072951 - RNA, 17 nt, Human
uccuucagggccucaca

SEQ ID NO: 1072952 - RNA, 22 nt, Human
ugaaucaguauaaauucucaaa

SEQ ID NO: 1072953 - RNA, 22 nt, Human
agaaaauaaauugaugguggaa

SEQ ID NO: 1072954 - RNA, 22 nt, Human
caaggccaguuucuccuaguca

SEQ ID NO: 1072955 - RNA, 22 nt, Human
caauuucagaccuuuccuugga

SEQ ID NO: 1072956 - RNA, 22 nt, Human
acagcagcuggguucccaccau

SEQ ID NO: 1072957 - RNA, 22 nt, Human
cucccaagcugugcugaacugu

SEQ ID NO: 1072958 - RNA, 21 nt, Human
guuuuaagggagaaaaccuag

SEQ ID NO: 1072959 - RNA, 22 nt, Human
ccaucuccaaauaccaucacau

SEQ ID NO: 1072960 - RNA, 22 nt, Human
acagguggccccgagggagugg

SEQ ID NO: 1072961 - RNA, 21 nt, Human
agcagccauggaugguaugua

SEQ ID NO: 1072962 - RNA, 22 nt, Human
ugcuucuguauugaaauuguua

SEQ ID NO: 1072963 - RNA, 22 nt, Human
agaaacaucauuggaacacaag

SEQ ID NO: 1072964 - RNA, 22 nt, Human
ucaucucaaaauuaugcugcac

SEQ ID NO: 1072965 - RNA, 22 nt, Human
gggcugagggguaucucauggg

SEQ ID NO: 1072966 - RNA, 22 nt, Human
aguuucacagaauaugaagguu

SEQ ID NO: 1072967 - RNA, 22 nt, Human
agacacauaggaccacacugug

SEQ ID NO: 1072968 - RNA, 22 nt, Human
agacauaagcgagcaucacagg

SEQ ID NO: 1072969 - RNA, 22 nt, Human
uaugaagacucauuuauugggu

SEQ ID NO: 1072970 - RNA, 22 nt, Human
ugaugagagaggucauugaaau

SEQ ID NO: 1072971 - RNA, 22 nt, Human
gggaacacuccagggcuuggaa

SEQ ID NO: 1072972 - RNA, 22 nt, Human
aaauuucuaagucaagaagaac

SEQ ID NO: 1072973 - RNA, 22 nt, Human
ucaaaguaaaaguauagaguuu

SEQ ID NO: 1072974 - RNA, 22 nt, Human
aaggcaguaggaucuuccacag

SEQ ID NO: 1072975 - RNA, 21 nt, Human
cacuggaauuuucugugacau

SEQ ID NO: 1072976 - RNA, 22 nt, Human
ucagccagugccuugaucuugc

SEQ ID NO: 1072977 - RNA, 22 nt, Human
gcucaggaaaacagucuaguaa

SEQ ID NO: 1072978 - RNA, 22 nt, Human
uauuuggaaaggacauguaagu

SEQ ID NO: 1072979 - RNA, 22 nt, Human
gaacaugauggcuguuauuuug

SEQ ID NO: 1072980 - RNA, 22 nt, Human
ccaccagcagugugcaaggauu

SEQ ID NO: 1072981 - RNA, 22 nt, Human
uacuuuuugucucuuugaaugu

SEQ ID NO: 1072982 - RNA, 22 nt, Human
ucuggagauaagacagacagau

SEQ ID NO: 1072983 - RNA, 22 nt, Human
aucucacacuggguuugagggu

SEQ ID NO: 1072984 - RNA, 22 nt, Human
cuucaaagauuauugaaaacaa

SEQ ID NO: 1072985 - RNA, 22 nt, Human
gcugcagcagaaguucucagag

SEQ ID NO: 1072986 - RNA, 22 nt, Human
guuccaaagcaaaggaggugag

SEQ ID NO: 1072987 - RNA, 22 nt, Human
aaaauuuccaccaucuuugugu

SEQ ID NO: 1072988 - RNA, 22 nt, Human
ucagagaguuagugucuuagcu

SEQ ID NO: 1072989 - RNA, 22 nt, Human
uucuacaauaugaauaaugaag

SEQ ID NO: 1072990 - RNA, 22 nt, Human
uggggcuagaauccugcaggaa

SEQ ID NO: 1072991 - RNA, 22 nt, Human
gggcugugagaguggggcugcu

SEQ ID NO: 1072992 - RNA, 22 nt, Human
auucacauugagcuucacugug

SEQ ID NO: 1072993 - RNA, 22 nt, Human
ccagcagaggggcggagugcag

SEQ ID NO: 1072994 - RNA, 22 nt, Human
gugagacaauuccucaguagac

SEQ ID NO: 1072995 - RNA, 22 nt, Human
gaugauauauauggaaagccua

SEQ ID NO: 1072996 - RNA, 22 nt, Human
cucagaguucuccugggaggug

SEQ ID NO: 1072997 - RNA, 22 nt, Human
agucucuggacugggagauggc

SEQ ID NO: 1072998 - RNA, 22 nt, Human
cuggugucugcucccucacagc

SEQ ID NO: 1072999 - RNA, 22 nt, Human
agaaagccucaaucuucaggcc

SEQ ID NO: 1073000 - RNA, 22 nt, Human
aggagccagaauccagacucgg

SEQ ID NO: 1073001 - RNA, 22 nt, Human
cccagggguucuagaccagcuu

SEQ ID NO: 1073002 - RNA, 22 nt, Human
gcugagagcacauagaaggggc

SEQ ID NO: 1073003 - RNA, 20 nt, Human
uucuuuguuccuuacauuug

SEQ ID NO: 1073004 - RNA, 22 nt, Human
uacauucagcaaaagaaugguu

SEQ ID NO: 1073005 - RNA, 21 nt, Human
aaacugaccuugccugagaca

SEQ ID NO: 1073006 - RNA, 19 nt, Human
ccuuggaguuccaggugga

SEQ ID NO: 1073007 - RNA, 22 nt, Human
cugagaagguguggagaugggc

SEQ ID NO: 1073008 - RNA, 22 nt, Human
auuuuguuauagaacucuguga

SEQ ID NO: 1073009 - RNA, 22 nt, Human
ccucacugcuauguguuugcuc

SEQ ID NO: 1073010 - RNA, 22 nt, Human
agcacccuccaacuucccugua

SEQ ID NO: 1073011 - RNA, 22 nt, Human
auuucuuaaaacuucagggaga

SEQ ID NO: 1073012 - RNA, 22 nt, Human
uggggacccggacuccuggguc

SEQ ID NO: 1073013 - RNA, 22 nt, Human
uuauuauggcaguuuucuaggu

SEQ ID NO: 1073014 - RNA, 22 nt, Human
uugaaauaaggaagcucgaaau

SEQ ID NO: 1073015 - RNA, 22 nt, Human
aaacaugaauagauauuaaaca

SEQ ID NO: 1073016 - RNA, 22 nt, Human
uuugaaguguuauuucuaucac

SEQ ID NO: 1073017 - RNA, 21 nt, Human
aacauuaguaauuugacuuuu

SEQ ID NO: 1073018 - RNA, 22 nt, Human
auguacaggauggugcucaucu

SEQ ID NO: 1073019 - RNA, 22 nt, Human
ccagguggugccucuguucgca

SEQ ID NO: 1073020 - RNA, 22 nt, Human
uggggaagggcacccuggagac

SEQ ID NO: 1073021 - RNA, 21 nt, Human
agugaaauugcaucagaggga

SEQ ID NO: 1073022 - RNA, 22 nt, Human
agugaaauugcuguaagaggaa

SEQ ID NO: 1073023 - RNA, 22 nt, Human
ucugaaaugaccuuuccccacu

SEQ ID NO: 1073024 - RNA, 22 nt, Human
uccucugcuguucugguucuuu

SEQ ID NO: 1073025 - RNA, 22 nt, Human
ccagaauagaaggcagcuguca

SEQ ID NO: 1073026 - RNA, 22 nt, Human
cacagggcagugcugcccacuc

SEQ ID NO: 1073027 - RNA, 22 nt, Human
cuggcucaauaaauauuagcug

SEQ ID NO: 1073028 - RNA, 20 nt, Human
aauguucaguaauuguuuua

SEQ ID NO: 1073029 - RNA, 18 nt, Human
ccucugccauagccagca

SEQ ID NO: 1073030 - RNA, 22 nt, Human
aagauucuuugaggauuuuacu

SEQ ID NO: 1073031 - RNA, 22 nt, Human
ccccucauucauguccuugcuu

SEQ ID NO: 1073032 - RNA, 22 nt, Human
gugcagauccugauugcaguuc

SEQ ID NO: 1073033 - RNA, 22 nt, Human
auaugauuguccuuagcaaauu

SEQ ID NO: 1073034 - RNA, 22 nt, Human
agggcucaguaaacgguggauu

SEQ ID NO: 1073035 - RNA, 21 nt, Human
acacacugaguuuuccacugu

SEQ ID NO: 1073036 - RNA, 22 nt, Human
gccuggagcucaugugggcauu

SEQ ID NO: 1073037 - RNA, 22 nt, Human
gguggccugcccugaucccugg

SEQ ID NO: 1073038 - RNA, 20 nt, Human
ggaagcuguggguccccagg

SEQ ID NO: 1073039 - RNA, 22 nt, Human
cguggccuuugagugagcuccc

SEQ ID NO: 1073040 - RNA, 22 nt, Human
ugcugaugcuguucuguuagga

SEQ ID NO: 1073041 - RNA, 22 nt, Human
ucagaacauuuaaaaagugguu

SEQ ID NO: 1073042 - RNA, 20 nt, Human
ucugcucagcccucaguggc

SEQ ID NO: 1073043 - RNA, 23 nt, Human
agucagagagugugagacaacug

SEQ ID NO: 1073044 - RNA, 22 nt, Human
cugaggcucaagggcagguggg

SEQ ID NO: 1073045 - RNA, 22 nt, Human
uguacagaacuugcugucccuu

SEQ ID NO: 1073046 - RNA, 22 nt, Human
gaagcuggggugcugagggcaa

SEQ ID NO: 1073047 - RNA, 22 nt, Human
aaauuauuaguuaaguugggca

SEQ ID NO: 1073048 - RNA, 22 nt, Human
uuugcuauaaaagggucacacg

SEQ ID NO: 1073049 - RNA, 22 nt, Human
gcucucugccuuucucaaugac

SEQ ID NO: 1073050 - RNA, 22 nt, Human
cuaugcaucugaacaauagaga

SEQ ID NO: 1073051 - RNA, 22 nt, Human
gagaaguuagcucuguuuaggu

SEQ ID NO: 1073052 - RNA, 22 nt, Human
uuucuaaucuuuaguuacaaaa

SEQ ID NO: 1073053 - RNA, 20 nt, Human
ccaagagcaugcaugaggaa

SEQ ID NO: 1073054 - RNA, 22 nt, Human
ggaaggggagcuggaaagggua

SEQ ID NO: 1073055 - RNA, 22 nt, Human
agucaauaaaagcuuuagauuc

SEQ ID NO: 1073056 - RNA, 22 nt, Human
gcugaugagagagacaaaugcu

SEQ ID NO: 1073057 - RNA, 22 nt, Human
uuccaaaaugccuugauaugau

SEQ ID NO: 1073058 - RNA, 22 nt, Human
guccugggccugcugaggcuga

SEQ ID NO: 1073059 - RNA, 22 nt, Human
ugcucaaugucuuaugagacug

SEQ ID NO: 1073060 - RNA, 22 nt, Human
cagaaagaccugauuggcaguu

SEQ ID NO: 1073061 - RNA, 18 nt, Human
gaggccugagaaccaggu

SEQ ID NO: 1073062 - RNA, 23 nt, Human
uggggccaagugaggaagggucu

SEQ ID NO: 1073063 - RNA, 22 nt, Human
uuugaaaggguuaugagacuga

SEQ ID NO: 1073064 - RNA, 22 nt, Human
cagaggugcauacaggucauua

SEQ ID NO: 1073065 - RNA, 22 nt, Human
uuugguuuuuaccugcugagag

SEQ ID NO: 1073066 - RNA, 22 nt, Human
aaguacagaaauagcaggugca

SEQ ID NO: 1073067 - RNA, 22 nt, Human
cagcugggugaucuugggcagg

SEQ ID NO: 1073068 - RNA, 22 nt, Human
cauugcacgggcgucugucugu

SEQ ID NO: 1073069 - RNA, 22 nt, Human
ccugggaggcugugggucugcu

SEQ ID NO: 1073070 - RNA, 22 nt, Human
agagcugagcaccaagcauggu

SEQ ID NO: 1073071 - RNA, 19 nt, Human
uggcuccugccugccuucu

SEQ ID NO: 1073072 - RNA, 22 nt, Human
cagagagagugggguguggauu

SEQ ID NO: 1073073 - RNA, 22 nt, Human
agggccuguccgcucccgcccg

SEQ ID NO: 1073074 - RNA, 22 nt, Human
ccaaggagaaaugcugugcuuu

SEQ ID NO: 1073075 - RNA, 22 nt, Human
agcagcauccccggccuccacc

SEQ ID NO: 1073076 - RNA, 22 nt, Human
cagggccaugaggcacaggguc

SEQ ID NO: 1073077 - RNA, 22 nt, Human
ucacagaaucucugauaagucu

SEQ ID NO: 1073078 - RNA, 19 nt, Human
gcagguggauguggucagc

SEQ ID NO: 1073079 - RNA, 21 nt, Human
cuucagcaaauacuuggcagg

SEQ ID NO: 1073080 - RNA, 22 nt, Human
agggcaaguugagugugcgugg

SEQ ID NO: 1073081 - RNA, 22 nt, Human
aguauuuucgccaucacaagaa

SEQ ID NO: 1073082 - RNA, 22 nt, Human
guucauucagcuggguaggagg

SEQ ID NO: 1073083 - RNA, 22 nt, Human
cacagaaguguguauaacucuu

SEQ ID NO: 1073084 - RNA, 22 nt, Human
cacugcagcaccaugcagggcu

SEQ ID NO: 1073085 - RNA, 22 nt, Human
cuggccucagagggucauggug

SEQ ID NO: 1073086 - RNA, 22 nt, Human
guuucuggcgccggggcaggcc

SEQ ID NO: 1073087 - RNA, 22 nt, Human
uuuccucuucuucccaugucau

SEQ ID NO: 1073088 - RNA, 21 nt, Human
auauuuuuguuuggacuguca

SEQ ID NO: 1073089 - RNA, 22 nt, Human
uccugccugcaaucccagcacu

SEQ ID NO: 1073090 - RNA, 21 nt, Human
gccaaggaggcuagagaacau

SEQ ID NO: 1073091 - RNA, 22 nt, Human
caggagaagguuuggagugcag

SEQ ID NO: 1073092 - RNA, 22 nt, Human
uauuacauccacuuuuauugca

SEQ ID NO: 1073093 - RNA, 22 nt, Human
aaaucagaucuuacacaauugu

SEQ ID NO: 1073094 - RNA, 22 nt, Human
gugaggugggcuggccagagac

SEQ ID NO: 1073095 - RNA, 22 nt, Human
uucaagucuguuucauugcaug

SEQ ID NO: 1073096 - RNA, 22 nt, Human
uagcagcaggggaaacagcugu

SEQ ID NO: 1073097 - RNA, 22 nt, Human
gggagccacagugaggugcaug

SEQ ID NO: 1073098 - RNA, 22 nt, Human
ucugagagagggucagaugcua

SEQ ID NO: 1073099 - RNA, 22 nt, Human
uuuuuaguagagguggguuuca

SEQ ID NO: 1073100 - RNA, 22 nt, Human
ucacagacaauuguuuuggugu

SEQ ID NO: 1073101 - RNA, 22 nt, Human
cuuauacagaucaagggaaaag

SEQ ID NO: 1073102 - RNA, 21 nt, Human
acacugugucauaaugcuuaa

SEQ ID NO: 1073103 - RNA, 20 nt, Human
ccagagcugauggcugcccg

SEQ ID NO: 1073104 - RNA, 22 nt, Human
cagcucuggcagagcccaaccc

SEQ ID NO: 1073105 - RNA, 22 nt, Human
acuggacagguucaugguuuua

SEQ ID NO: 1073106 - RNA, 22 nt, Human
gugugcagugagcaaaagaucu

SEQ ID NO: 1073107 - RNA, 22 nt, Human
ugaggccugcuuggaauugaau

SEQ ID NO: 1073108 - RNA, 22 nt, Human
uuuguauaaaugaagaugcugg

SEQ ID NO: 1073109 - RNA, 18 nt, Human
cagcagagacauucaaaa

SEQ ID NO: 1073110 - RNA, 22 nt, Human
cacaugaaggcuggggucguga

SEQ ID NO: 1073111 - RNA, 22 nt, Human
agagccugaggaugucccagcu

SEQ ID NO: 1073112 - RNA, 22 nt, Human
agacuuuauaaaucuuaauuuc

SEQ ID NO: 1073113 - RNA, 22 nt, Human
aguuugaagauuaugccagagu

SEQ ID NO: 1073114 - RNA, 21 nt, Human
aggcagcucaggcccagagag

SEQ ID NO: 1073115 - RNA, 22 nt, Human
aggcuucagguuugcuuugcag

SEQ ID NO: 1073116 - RNA, 18 nt, Human
ggcuguggacaagauuag

SEQ ID NO: 1073117 - RNA, 22 nt, Human
uauccaaagagauucauguucu

SEQ ID NO: 1073118 - RNA, 22 nt, Human
aguaaaaaguucagaaugguug

SEQ ID NO: 1073119 - RNA, 22 nt, Human
uccagagggcgauggcuggggg

SEQ ID NO: 1073120 - RNA, 22 nt, Human
ugucuccauuuucaaguagcag

SEQ ID NO: 1073121 - RNA, 22 nt, Human
cauuuaaucuggcucaugagca

SEQ ID NO: 1073122 - RNA, 22 nt, Human
aauaugauccuuaaccuucaug

SEQ ID NO: 1073123 - RNA, 22 nt, Human
gagccagccgcaagagcuguga

SEQ ID NO: 1073124 - RNA, 22 nt, Human
ugcccaggcuccucgcagccuu

SEQ ID NO: 1073125 - RNA, 23 nt, Human
cagaagacagucucaagacaagg

SEQ ID NO: 1073126 - RNA, 22 nt, Human
cugcugugacagcugccguguu

SEQ ID NO: 1073127 - RNA, 22 nt, Human
aauuuauuuccugccaguacac

SEQ ID NO: 1073128 - RNA, 20 nt, Human
auaaaacucuaaucuggccu

SEQ ID NO: 1073129 - RNA, 22 nt, Human
gcucaggcaggagugcaguggc

SEQ ID NO: 1073130 - RNA, 22 nt, Human
ucaggcagaguuaauuugcucc

SEQ ID NO: 1073131 - RNA, 22 nt, Human
agcaggugaucgcgugugcucc

SEQ ID NO: 1073132 - RNA, 22 nt, Human
acagcuaugacagauggauaau

SEQ ID NO: 1073133 - RNA, 22 nt, Human
ccacugccaugggcuaggcaug

SEQ ID NO: 1073134 - RNA, 22 nt, Human
uggccuggcccugaggcccugu

SEQ ID NO: 1073135 - RNA, 22 nt, Human
augggcuggccuuucccgcucu

SEQ ID NO: 1073136 - RNA, 22 nt, Human
cauuucaguguuauucuaauuu

SEQ ID NO: 1073137 - RNA, 21 nt, Human
ugucagaaauaagcaugugau

SEQ ID NO: 1073138 - RNA, 22 nt, Human
cugggaggauucauugagguga

SEQ ID NO: 1073139 - RNA, 22 nt, Human
gaugauuuuaugucuugucauu

SEQ ID NO: 1073140 - RNA, 22 nt, Human
uuaaugaaacauugacuaugau

SEQ ID NO: 1073141 - RNA, 22 nt, Human
ugcauuguuugauaggugaauu

SEQ ID NO: 1073142 - RNA, 22 nt, Human
cacagcagucuuucacuaaaua

SEQ ID NO: 1073143 - RNA, 22 nt, Human
agagccaguuacaacuguggag

SEQ ID NO: 1073144 - RNA, 22 nt, Human
uccugagauguggagcuccaug

SEQ ID NO: 1073145 - RNA, 22 nt, Human
uggggcagccacauagacaaca

SEQ ID NO: 1073146 - RNA, 17 nt, Human
uauacacagacagacug

SEQ ID NO: 1073147 - RNA, 22 nt, Human
ugcacacaguucucaggaaaga

SEQ ID NO: 1073148 - RNA, 22 nt, Human
gcccagcagcugguggagaagg

SEQ ID NO: 1073149 - RNA, 22 nt, Human
cuagggaguggcagagcuggga

SEQ ID NO: 1073150 - RNA, 22 nt, Human
uuccagaacucaagaaaugccc

SEQ ID NO: 1073151 - RNA, 22 nt, Human
caaggcaggucugaggagguug

SEQ ID NO: 1073152 - RNA, 22 nt, Human
ucaaaucagcaagcagcuuccc

SEQ ID NO: 1073153 - RNA, 22 nt, Human
ugcaagagcuguggcaaaagca

SEQ ID NO: 1073154 - RNA, 22 nt, Human
uuacuuuggguccugcuuauaa

SEQ ID NO: 1073155 - RNA, 22 nt, Human
aaguucaaucagaugaaaaagc

SEQ ID NO: 1073156 - RNA, 22 nt, Human
uaagacaauucuucagucacaa

SEQ ID NO: 1073157 - RNA, 22 nt, Human
gcagugacagggcugcugccuu

SEQ ID NO: 1073158 - RNA, 22 nt, Human
cuaaaaacucuacgaugcacag

SEQ ID NO: 1073159 - RNA, 22 nt, Human
aaaaaccauugucuucagucuc

SEQ ID NO: 1073160 - RNA, 22 nt, Human
ugagaguuccuccucuuuccac

SEQ ID NO: 1073161 - RNA, 22 nt, Human
acuuuuugcauaguaagugucu

SEQ ID NO: 1073162 - RNA, 22 nt, Human
gagggccaauggauuucaacug

SEQ ID NO: 1073163 - RNA, 22 nt, Human
guggugaagccccaucucugcu

SEQ ID NO: 1073164 - RNA, 22 nt, Human
ggaggcggagcuugcagugagc

SEQ ID NO: 1073165 - RNA, 21 nt, Human
gacaaagugaagcaggcagga

SEQ ID NO: 1073166 - RNA, 22 nt, Human
aagaaauguagagccuaguaaa

SEQ ID NO: 1073167 - RNA, 22 nt, Human
aaacuucuugcugcauuuucug

SEQ ID NO: 1073168 - RNA, 22 nt, Human
ucucuuuuauguacacccugac

SEQ ID NO: 1073169 - RNA, 22 nt, Human
uccacacacauuucuaugugca

SEQ ID NO: 1073170 - RNA, 22 nt, Human
gggggacuaacuggauccugga

SEQ ID NO: 1073171 - RNA, 22 nt, Human
uucucagauccaucagaagucc

SEQ ID NO: 1073172 - RNA, 22 nt, Human
gccaggacugagaaugggagca

SEQ ID NO: 1073173 - RNA, 22 nt, Human
cccagaggugcuucagaggugc

SEQ ID NO: 1073174 - RNA, 22 nt, Human
cauuucaaugccuucaacauag

SEQ ID NO: 1073175 - RNA, 22 nt, Human
agcugcuccuuuccugcaggcg

SEQ ID NO: 1073176 - RNA, 22 nt, Human
aaauuguugaucuacaguaagg

SEQ ID NO: 1073177 - RNA, 22 nt, Human
cugaaauauagaugugaacagu

SEQ ID NO: 1073178 - RNA, 22 nt, Human
cagggccauuggcguggcuguc

SEQ ID NO: 1073179 - RNA, 22 nt, Human
uggagcagccaugaugacagag

SEQ ID NO: 1073180 - RNA, 22 nt, Human
ugcaagagguuggauuuuaaga

SEQ ID NO: 1073181 - RNA, 22 nt, Human
uauguuuuucaagugcacacua

SEQ ID NO: 1073182 - RNA, 22 nt, Human
auuucuucaggucagaaauaga

SEQ ID NO: 1073183 - RNA, 21 nt, Human
uccccacauuucuaaacagac

SEQ ID NO: 1073184 - RNA, 22 nt, Human
uggcuggggagccccgacuccc

SEQ ID NO: 1073185 - RNA, 22 nt, Human
ggaggacaggggcugcagcaca

SEQ ID NO: 1073186 - RNA, 22 nt, Human
guccucugagggggcugcacgc

SEQ ID NO: 1073187 - RNA, 22 nt, Human
uugauuucuauucagauguaga

SEQ ID NO: 1073188 - RNA, 22 nt, Human
agcaccaugaccuugccauuga

SEQ ID NO: 1073189 - RNA, 22 nt, Human
gaugaaaaauugcugugucaua

SEQ ID NO: 1073190 - RNA, 22 nt, Human
ggugaggcguccccaccauggg

SEQ ID NO: 1073191 - RNA, 22 nt, Human
aucuugaaauacuuucuagaau

SEQ ID NO: 1073192 - RNA, 22 nt, Human
ucagccugcuccaagugcugcc

SEQ ID NO: 1073193 - RNA, 22 nt, Human
uaaaggcuuuuacaggagugca

SEQ ID NO: 1073194 - RNA, 22 nt, Human
acuuuuuacaggguguauacca

SEQ ID NO: 1073195 - RNA, 22 nt, Human
gccuggaguucagccaaguccc

SEQ ID NO: 1073196 - RNA, 22 nt, Human
agugcuuugagcguuugaaaag

SEQ ID NO: 1073197 - RNA, 22 nt, Human
cagagggcucuuggcugccugc

SEQ ID NO: 1073198 - RNA, 19 nt, Human
agagaggcugugugaggga

SEQ ID NO: 1073199 - RNA, 22 nt, Human
uaaggccagccagcaaaucugu

SEQ ID NO: 1073200 - RNA, 22 nt, Human
aggcauaugauuguaaccuuua

SEQ ID NO: 1073201 - RNA, 22 nt, Human
agaaaaaucuuggcgcuugucu

SEQ ID NO: 1073202 - RNA, 20 nt, Human
cuuugccuauucucugccug

SEQ ID NO: 1073203 - RNA, 22 nt, Human
uucacaucuauaacuuagauaa

SEQ ID NO: 1073204 - RNA, 22 nt, Human
ugguuuugcuaaaauagaaaga

SEQ ID NO: 1073205 - RNA, 22 nt, Human
uucaagaugucuucacaauagu

SEQ ID NO: 1073206 - RNA, 22 nt, Human
ugcaggcuuggaucacaucucc

SEQ ID NO: 1073207 - RNA, 22 nt, Human
auguacauuuagaucauuucug

SEQ ID NO: 1073208 - RNA, 22 nt, Human
ugccuuuuccaguuccuagaag

SEQ ID NO: 1073209 - RNA, 22 nt, Human
aguuucacauagcucagugcuc

SEQ ID NO: 1073210 - RNA, 19 nt, Human
agcaguggagccaugccug

SEQ ID NO: 1073211 - RNA, 22 nt, Human
cugugcaguggcagcguguggg

SEQ ID NO: 1073212 - RNA, 18 nt, Human
ggcugugcguggaggcug

SEQ ID NO: 1073213 - RNA, 22 nt, Human
ccaggagucaauaaaggaagcu

SEQ ID NO: 1073214 - RNA, 22 nt, Human
auuucaugguacaucgugacuu

SEQ ID NO: 1073215 - RNA, 22 nt, Human
agcaggaguguccccuggcugu

SEQ ID NO: 1073216 - RNA, 22 nt, Human
aucaggaugaagcuguagcgaa

SEQ ID NO: 1073217 - RNA, 18 nt, Human
uucuuuaauucaguuuga

SEQ ID NO: 1073218 - RNA, 22 nt, Human
gccaggaagcaguuagaugggu

SEQ ID NO: 1073219 - RNA, 22 nt, Human
uggcauuuguagccacuugccu

SEQ ID NO: 1073220 - RNA, 22 nt, Human
guuacaaacucaggugccaaaa

SEQ ID NO: 1073221 - RNA, 22 nt, Human
cagagucauaucagagaauaug

SEQ ID NO: 1073222 - RNA, 23 nt, Human
gugagucuugccuuugcugugga

SEQ ID NO: 1073223 - RNA, 22 nt, Human
ccagacuguggaguuccuggug

SEQ ID NO: 1073224 - RNA, 22 nt, Human
ucugcaggaggcuggcugcagg

SEQ ID NO: 1073225 - RNA, 21 nt, Human
uccuccuguagaggguccugg

SEQ ID NO: 1073226 - RNA, 22 nt, Human
gccaggcugcuggcugcugucc

SEQ ID NO: 1073227 - RNA, 22 nt, Human
cuauuuuaacuugauuaccucu

SEQ ID NO: 1073228 - RNA, 22 nt, Human
ugcaucuuucugcauauguaaa

SEQ ID NO: 1073229 - RNA, 22 nt, Human
acacagaagaucucuuaaugcu

SEQ ID NO: 1073230 - RNA, 22 nt, Human
ggcuccugaaagacuaugggaa

SEQ ID NO: 1073231 - RNA, 17 nt, Human
gagauggguggaucacc

SEQ ID NO: 1073232 - RNA, 22 nt, Human
gggcuguaggagcuggaauggg

SEQ ID NO: 1073233 - RNA, 22 nt, Human
ccagggcagcagaauuggggca

SEQ ID NO: 1073234 - RNA, 22 nt, Human
ggucauuuucacuuucaaguua

SEQ ID NO: 1073235 - RNA, 22 nt, Human
gcagggcugcagagggcacugu

SEQ ID NO: 1073236 - RNA, 22 nt, Human
acaaagauguuuaaagcauuua

SEQ ID NO: 1073237 - RNA, 22 nt, Human
ccucaggcuuacgggcaaugga

SEQ ID NO: 1073238 - RNA, 22 nt, Human
aaggaagagcaaagaauuaugu

SEQ ID NO: 1073239 - RNA, 22 nt, Human
ugcagguguagaguugggcucc

SEQ ID NO: 1073240 - RNA, 22 nt, Human
uagaacugcucucauacuugcu

SEQ ID NO: 1073241 - RNA, 22 nt, Human
uacuuugauaagguucuucuau

SEQ ID NO: 1073242 - RNA, 22 nt, Human
accuggcacuacaggcaccugu

SEQ ID NO: 1073243 - RNA, 22 nt, Human
cacaggagcuguggggcagugu

SEQ ID NO: 1073244 - RNA, 22 nt, Human
ugcugagucguauuauuuuuua

SEQ ID NO: 1073245 - RNA, 22 nt, Human
agguaguguagcugagugggau

SEQ ID NO: 1073246 - RNA, 22 nt, Human
uguaggcugaagaugaagugga

SEQ ID NO: 1073247 - RNA, 22 nt, Human
agcagguguauauaaggcugag

SEQ ID NO: 1073248 - RNA, 22 nt, Human
cagcuggcagaaccugcaucca

SEQ ID NO: 1073249 - RNA, 22 nt, Human
cugucagguuggucucagagcu

SEQ ID NO: 1073250 - RNA, 22 nt, Human
cuauuauuagauaaucuacuug

SEQ ID NO: 1073251 - RNA, 22 nt, Human
ucaaauucuauucuauacucag

SEQ ID NO: 1073252 - RNA, 21 nt, Human
gggccuggcugcgcaggacgg

SEQ ID NO: 1073253 - RNA, 22 nt, Human
ggcaaggguugaagauaaggua

SEQ ID NO: 1073254 - RNA, 22 nt, Human
uacaaagugugcccaugcugag

SEQ ID NO: 1073255 - RNA, 22 nt, Human
guugaaaguggagaaccugguu

SEQ ID NO: 1073256 - RNA, 22 nt, Human
uaagacuucauuaguaauaugg

SEQ ID NO: 1073257 - RNA, 22 nt, Human
acaugaaacuguugcauuagaa

SEQ ID NO: 1073258 - RNA, 22 nt, Human
uagccaggucacacuguguguu

SEQ ID NO: 1073259 - RNA, 22 nt, Human
auuuagcaagaguacaaaauaa

SEQ ID NO: 1073260 - RNA, 22 nt, Human
uaagaaacaugauacuuuuccu

SEQ ID NO: 1073261 - RNA, 22 nt, Human
uggcucagauaauucaaggggc

SEQ ID NO: 1073262 - RNA, 22 nt, Human
uguaacaucacagugauguuug

SEQ ID NO: 1073263 - RNA, 19 nt, Human
ugcagccacgugagagacu

SEQ ID NO: 1073264 - RNA, 22 nt, Human
gcugcuucucugauggagucca

SEQ ID NO: 1073265 - RNA, 22 nt, Human
gcacugggaagaaugagccugu

SEQ ID NO: 1073266 - RNA, 22 nt, Human
auuauacauuuuguguagagau

SEQ ID NO: 1073267 - RNA, 22 nt, Human
gaguucaguguuucuaguagug

SEQ ID NO: 1073268 - RNA, 22 nt, Human
uugcuuugccaccagaagucua

SEQ ID NO: 1073269 - RNA, 22 nt, Human
ugaagacagaccaaggagaaug

SEQ ID NO: 1073270 - RNA, 22 nt, Human
ucuuuagcuagaaauacucuaa

SEQ ID NO: 1073271 - RNA, 22 nt, Human
agauuuccugcacugccuuuga

SEQ ID NO: 1073272 - RNA, 22 nt, Human
uaaaaaacauuacucuguccug

SEQ ID NO: 1073273 - RNA, 22 nt, Human
uggcaugggccagggagagcug

SEQ ID NO: 1073274 - RNA, 22 nt, Human
gaugucaucaggcuaagacacu

SEQ ID NO: 1073275 - RNA, 22 nt, Human
uggcaggcgggagccauagagg

SEQ ID NO: 1073276 - RNA, 22 nt, Human
ccaggaagccucagaugcugag

SEQ ID NO: 1073277 - RNA, 22 nt, Human
ggaaaaaugacacauaucucaa

SEQ ID NO: 1073278 - RNA, 22 nt, Human
ggaugcugucuaagcugaggac

SEQ ID NO: 1073279 - RNA, 17 nt, Human
ugguggcuggagucagg

SEQ ID NO: 1073280 - RNA, 22 nt, Human
gagaaacuuggaguuauucugg

SEQ ID NO: 1073281 - RNA, 22 nt, Human
auacuacacauugacuauauuu

SEQ ID NO: 1073282 - RNA, 22 nt, Human
guuugcauggaagacagugagu

SEQ ID NO: 1073283 - RNA, 17 nt, Human
cuggagccuccaacucc

SEQ ID NO: 1073284 - RNA, 22 nt, Human
cugggguggaggagcuccccug

SEQ ID NO: 1073285 - RNA, 22 nt, Human
ucacuguauuugcugaugcaua

SEQ ID NO: 1073286 - RNA, 22 nt, Human
cagggcccaggccacuggguug

SEQ ID NO: 1073287 - RNA, 22 nt, Human
acaaaguuauucuuucagagga

SEQ ID NO: 1073288 - RNA, 22 nt, Human
cauaucaaagagaaggauagga

SEQ ID NO: 1073289 - RNA, 22 nt, Human
ccuggcagcuaagugcuuugag

SEQ ID NO: 1073290 - RNA, 20 nt, Human
auuaaugaauacauuuugau

SEQ ID NO: 1073291 - RNA, 22 nt, Human
ccauggagcgggugagugagug

SEQ ID NO: 1073292 - RNA, 21 nt, Human
ugggcucuuuaacccaggcac

SEQ ID NO: 1073293 - RNA, 22 nt, Human
ugccuagaacuuuauucuuuau

SEQ ID NO: 1073294 - RNA, 22 nt, Human
uuugcaaauaccaugaaacuug

SEQ ID NO: 1073295 - RNA, 22 nt, Human
gaggcugcaggcaaugcugccc

SEQ ID NO: 1073296 - RNA, 18 nt, Human
cacagugacuucugauac

SEQ ID NO: 1073297 - RNA, 17 nt, Human
uucaaugauuaaugcau

SEQ ID NO: 1073298 - RNA, 22 nt, Human
guucaugugacuacuaugaccu

SEQ ID NO: 1073299 - RNA, 22 nt, Human
ggggcccagcaccccuccucgc

SEQ ID NO: 1073300 - RNA, 22 nt, Human
ucgauguggugacaagguacgu

SEQ ID NO: 1073301 - RNA, 22 nt, Human
gccaggcagcaggaagccagug

SEQ ID NO: 1073302 - RNA, 22 nt, Human
gagggggcgugcaaggcuccgc

SEQ ID NO: 1073303 - RNA, 22 nt, Human
ggcugaguggcugggucuaguu

SEQ ID NO: 1073304 - RNA, 22 nt, Human
uggcagcaauuagcuagagcug

SEQ ID NO: 1073305 - RNA, 22 nt, Human
ggcugcaguugugugaaggccg

SEQ ID NO: 1073306 - RNA, 21 nt, Human
uacagaugaggagaccaaggc

SEQ ID NO: 1073307 - RNA, 22 nt, Human
ccuggccuccuggccuucucau

SEQ ID NO: 1073308 - RNA, 22 nt, Human
ugucacuucaggaaugcaggga

SEQ ID NO: 1073309 - RNA, 22 nt, Human
guuucuuagacagacauuaucu

SEQ ID NO: 1073310 - RNA, 22 nt, Human
agcagagcccuuccauggccuu

SEQ ID NO: 1073311 - RNA, 22 nt, Human
gcauuucauguaagucagacca

SEQ ID NO: 1073312 - RNA, 22 nt, Human
ggcuuuaacaacagaaauuuau

SEQ ID NO: 1073313 - RNA, 22 nt, Human
caguacuucuuggaaacuggau

SEQ ID NO: 1073314 - RNA, 22 nt, Human
aagcuuccugaaugcucauuua

SEQ ID NO: 1073315 - RNA, 22 nt, Human
ugcagccaucgcagagucugua

SEQ ID NO: 1073316 - RNA, 22 nt, Human
ggcaggcucuuggccuuaugag

SEQ ID NO: 1073317 - RNA, 22 nt, Human
cgcaggugggcccuucauugau

SEQ ID NO: 1073318 - RNA, 22 nt, Human
guuuuucuaaguagcgauauuu

SEQ ID NO: 1073319 - RNA, 22 nt, Human
uaauacaauggaguugggcccc

SEQ ID NO: 1073320 - RNA, 22 nt, Human
aaugguuuaacauaugcuugag

SEQ ID NO: 1073321 - RNA, 22 nt, Human
cugagcugggaguggauagugg

SEQ ID NO: 1073322 - RNA, 22 nt, Human
uguguccauucaggcacugacc

SEQ ID NO: 1073323 - RNA, 22 nt, Human
accaggaaauuuggcaacaaag

SEQ ID NO: 1073324 - RNA, 22 nt, Human
auguuauuuuggaaaauacaaa

SEQ ID NO: 1073325 - RNA, 21 nt, Human
ggcagcccgcccucuccuggc

SEQ ID NO: 1073326 - RNA, 22 nt, Human
uuuagcaucgaaguaaauuuag

SEQ ID NO: 1073327 - RNA, 22 nt, Human
guccaagagucaagaagggggc

SEQ ID NO: 1073328 - RNA, 22 nt, Human
auuucuucagguucuucuagga

SEQ ID NO: 1073329 - RNA, 22 nt, Human
cacacagguauauauauguaca

SEQ ID NO: 1073330 - RNA, 22 nt, Human
ccaggugggaggaaagcagaga

SEQ ID NO: 1073331 - RNA, 22 nt, Human
aggccuguuucuuguccagcuc

SEQ ID NO: 1073332 - RNA, 22 nt, Human
gaaggucaccuccccucucugg

SEQ ID NO: 1073333 - RNA, 22 nt, Human
aaaagcaguaaauguaugaccu

SEQ ID NO: 1073334 - RNA, 22 nt, Human
ucuuuuuauauugacaaaaggu

SEQ ID NO: 1073335 - RNA, 22 nt, Human
ggcuuaagaaaugucuaguuuu

SEQ ID NO: 1073336 - RNA, 22 nt, Human
acaguaaaucaacagaauaucu

SEQ ID NO: 1073337 - RNA, 22 nt, Human
uuccaagugcccauauuucauc

SEQ ID NO: 1073338 - RNA, 22 nt, Human
uggaacacuggcuuuccacugu

SEQ ID NO: 1073339 - RNA, 22 nt, Human
uuuuacacuucgguugugugca

SEQ ID NO: 1073340 - RNA, 22 nt, Human
augggaggaaggaggcccuuga

SEQ ID NO: 1073341 - RNA, 22 nt, Human
caggccucuauggucagcugag

SEQ ID NO: 1073342 - RNA, 20 nt, Human
ggagaugcagcccaggugcc

SEQ ID NO: 1073343 - RNA, 20 nt, Human
ugucugugccacggcacucc

SEQ ID NO: 1073344 - RNA, 22 nt, Human
ugaggcaggagaaucacaugaa

SEQ ID NO: 1073345 - RNA, 22 nt, Human
ugcauaaagugccauaguauua

SEQ ID NO: 1073346 - RNA, 22 nt, Human
cucuuuucaaaauuucacugca

SEQ ID NO: 1073347 - RNA, 22 nt, Human
uuaaauaguaggucuauuuugg

SEQ ID NO: 1073348 - RNA, 22 nt, Human
ugggcucacuggggcagggacc

SEQ ID NO: 1073349 - RNA, 22 nt, Human
acacuuuaucaauauucaaaaa

SEQ ID NO: 1073350 - RNA, 22 nt, Human
uucacagacuuuccauagauug

SEQ ID NO: 1073351 - RNA, 23 nt, Human
agcuggguggccugcgugaagcu

SEQ ID NO: 1073352 - RNA, 19 nt, Human
ugcauauaucuaugaaaga

SEQ ID NO: 1073353 - RNA, 22 nt, Human
uagauucagauauuuaggacaa

SEQ ID NO: 1073354 - RNA, 22 nt, Human
auucuaaauguaauuuagaauu

SEQ ID NO: 1073355 - RNA, 22 nt, Human
uauuagucuguaaauugaugcu

SEQ ID NO: 1073356 - RNA, 22 nt, Human
caguuuuaugaaugcuuauuag

SEQ ID NO: 1073357 - RNA, 22 nt, Human
ugaagccaucaggaagccagca

SEQ ID NO: 1073358 - RNA, 22 nt, Human
acuucacaacuguacauggcag

SEQ ID NO: 1073359 - RNA, 22 nt, Human
uggcaggggaggugcuugcuua

SEQ ID NO: 1073360 - RNA, 22 nt, Human
gcacugggaaugcugaugggcu

SEQ ID NO: 1073361 - RNA, 22 nt, Human
agcaccauugcaaauauggcag

SEQ ID NO: 1073362 - RNA, 22 nt, Human
cuggcucauuuuagcaucaggu

SEQ ID NO: 1073363 - RNA, 22 nt, Human
cuggagccagccagggcccucu

SEQ ID NO: 1073364 - RNA, 22 nt, Human
uucaaacuaugacuucagcuac

SEQ ID NO: 1073365 - RNA, 22 nt, Human
cucaggguaaugaaagacgaau

SEQ ID NO: 1073366 - RNA, 22 nt, Human
gccaggcucucagugacugccc

SEQ ID NO: 1073367 - RNA, 22 nt, Human
uacagagaacucauagaaagaa

SEQ ID NO: 1073368 - RNA, 22 nt, Human
ucacagcaaaagugugcagagc

SEQ ID NO: 1073369 - RNA, 22 nt, Human
aaaguauucaaaaauauuuggu

SEQ ID NO: 1073370 - RNA, 22 nt, Human
acuuuacacaucuuuucucauu

SEQ ID NO: 1073371 - RNA, 22 nt, Human
cucuggaguuagugaucugggc

SEQ ID NO: 1073372 - RNA, 22 nt, Human
aucuaagagagagagcaugucu

SEQ ID NO: 1073373 - RNA, 22 nt, Human
ugugcaaauuaaguagauuuuc

SEQ ID NO: 1073374 - RNA, 22 nt, Human
caccagguuccgggcagagcug

SEQ ID NO: 1073375 - RNA, 19 nt, Human
uggcagaggcaguuuguac

SEQ ID NO: 1073376 - RNA, 22 nt, Human
cauggaaggcaaaagacacaga

SEQ ID NO: 1073377 - RNA, 22 nt, Human
guccaaauuccacagauuucuc

SEQ ID NO: 1073378 - RNA, 22 nt, Human
uucuggagaugacuuuuagaaa

SEQ ID NO: 1073379 - RNA, 22 nt, Human
ugggcugagcagugaagcucau

SEQ ID NO: 1073380 - RNA, 22 nt, Human
acacacuuuaaauuaaaccucu

SEQ ID NO: 1073381 - RNA, 22 nt, Human
cagggcuggauccuccagacuc

SEQ ID NO: 1073382 - RNA, 22 nt, Human
gcagagcugucuaagucacuuc

SEQ ID NO: 1073383 - RNA, 22 nt, Human
caugaaaaugucaaguucugcu

SEQ ID NO: 1073384 - RNA, 22 nt, Human
ccagugcccagucucccugguc

SEQ ID NO: 1073385 - RNA, 21 nt, Human
uuucuuaggcucuaaaaugac

SEQ ID NO: 1073386 - RNA, 20 nt, Human
ucagccagcuaacaugggga

SEQ ID NO: 1073387 - RNA, 19 nt, Human
uccaggggcuccaccuccu

SEQ ID NO: 1073388 - RNA, 22 nt, Human
aaucaaguauuuuccaguggca

SEQ ID NO: 1073389 - RNA, 22 nt, Human
ucuggcuuucauuuguuuaaag

SEQ ID NO: 1073390 - RNA, 22 nt, Human
cugcaggaauucaaagugagcu

SEQ ID NO: 1073391 - RNA, 22 nt, Human
cuggcuggucaucagcaguacg

SEQ ID NO: 1073392 - RNA, 22 nt, Human
ggguccagcgacagcaggcuca

SEQ ID NO: 1073393 - RNA, 22 nt, Human
uuguaugaucccauuuagugaa

SEQ ID NO: 1073394 - RNA, 22 nt, Human
ugggacacccucacgccugcac

SEQ ID NO: 1073395 - RNA, 22 nt, Human
cccaggucuaugccagcucuga

SEQ ID NO: 1073396 - RNA, 22 nt, Human
aaggaaauacuucugcagagca

SEQ ID NO: 1073397 - RNA, 21 nt, Human
uaacaagucugcauacauuca

SEQ ID NO: 1073398 - RNA, 22 nt, Human
agcugaguuaauucaucacuua

SEQ ID NO: 1073399 - RNA, 22 nt, Human
uuuaccaagcuuuaauuacaua

SEQ ID NO: 1073400 - RNA, 17 nt, Human
ugagcaguagaagaugc

SEQ ID NO: 1073401 - RNA, 22 nt, Human
ccacagaauucugucuccagga

SEQ ID NO: 1073402 - RNA, 22 nt, Human
cugaggccagcugcagagcucu

SEQ ID NO: 1073403 - RNA, 22 nt, Human
agauguuccagccaaugggaau

SEQ ID NO: 1073404 - RNA, 22 nt, Human
gaauuuaaggaccaagcauuuu

SEQ ID NO: 1073405 - RNA, 19 nt, Human
agaggcagucuccaacagg

SEQ ID NO: 1073406 - RNA, 22 nt, Human
ugaaacaaauuuggaaaaucua

SEQ ID NO: 1073407 - RNA, 22 nt, Human
ccagcagcuguggcuuugccuc

SEQ ID NO: 1073408 - RNA, 22 nt, Human
gccuucaguaguauccucauga

SEQ ID NO: 1073409 - RNA, 22 nt, Human
uugcugaagaaaaaauauguua

SEQ ID NO: 1073410 - RNA, 22 nt, Human
acucaggaauggggcugggacu

SEQ ID NO: 1073411 - RNA, 22 nt, Human
aacuaacagucauuaaaagaac

SEQ ID NO: 1073412 - RNA, 22 nt, Human
cuccugcaagccuccccaagca

SEQ ID NO: 1073413 - RNA, 22 nt, Human
caggauggccccggggcugugc

SEQ ID NO: 1073414 - RNA, 22 nt, Human
uggcuagguagcuuucugcugu

SEQ ID NO: 1073415 - RNA, 22 nt, Human
agugugggggcuuuggugucac

SEQ ID NO: 1073416 - RNA, 22 nt, Human
gugguaaucggauucuuaccgg

SEQ ID NO: 1073417 - RNA, 22 nt, Human
aguuucacaaauugucaauagc

SEQ ID NO: 1073418 - RNA, 22 nt, Human
aucucagacauguuguccauga

SEQ ID NO: 1073419 - RNA, 22 nt, Human
guguugaugacauuuuagaaac

SEQ ID NO: 1073420 - RNA, 22 nt, Human
aguguuccugcucucaggaagc

SEQ ID NO: 1073421 - RNA, 22 nt, Human
ugugauuacugaauagaaaaua

SEQ ID NO: 1073422 - RNA, 22 nt, Human
uuuuuguauagaaaugaacuaa

SEQ ID NO: 1073423 - RNA, 22 nt, Human
uuuacagaauguugaauuuggg

SEQ ID NO: 1073424 - RNA, 22 nt, Human
cuuccaaguugcucugcugacc

SEQ ID NO: 1073425 - RNA, 22 nt, Human
ugccagcacuucuggcugucug

SEQ ID NO: 1073426 - RNA, 22 nt, Human
uuuuccuaguaggccuauuaga

SEQ ID NO: 1073427 - RNA, 22 nt, Human
acaggcugcugggcuccgugcu

SEQ ID NO: 1073428 - RNA, 20 nt, Human
uuaagaaaagcacauccugc

SEQ ID NO: 1073429 - RNA, 20 nt, Human
aaaaugaugggcagggcagg

SEQ ID NO: 1073430 - RNA, 22 nt, Human
ggcuuuaauagauaagguuucu

SEQ ID NO: 1073431 - RNA, 22 nt, Human
aucuaggauuugaaugcacagu

SEQ ID NO: 1073432 - RNA, 22 nt, Human
acaugcuguccugucuuuguca

SEQ ID NO: 1073433 - RNA, 22 nt, Human
uucaagucuuccaugguauucu

SEQ ID NO: 1073434 - RNA, 22 nt, Human
gaacuaaaagcuaacaucaggc

SEQ ID NO: 1073435 - RNA, 22 nt, Human
uauuccaacugucauagucaua

SEQ ID NO: 1073436 - RNA, 22 nt, Human
uauagcauauacagauaagcug

SEQ ID NO: 1073437 - RNA, 20 nt, Human
ugcuuuuauaccuauaauga

SEQ ID NO: 1073438 - RNA, 22 nt, Human
aggcucagagagcuguguccau

SEQ ID NO: 1073439 - RNA, 22 nt, Human
cuccucugucuggcccugagcc

SEQ ID NO: 1073440 - RNA, 22 nt, Human
ugccuuccuggagcugaaggcu

SEQ ID NO: 1073441 - RNA, 18 nt, Human
gcagggcugcacacgcau

SEQ ID NO: 1073442 - RNA, 22 nt, Human
uggucagacaaaggagaauguu

SEQ ID NO: 1073443 - RNA, 22 nt, Human
guccaaauaaguugcaaaauag

SEQ ID NO: 1073444 - RNA, 22 nt, Human
gguccccagcaguggcugcuuc

SEQ ID NO: 1073445 - RNA, 22 nt, Human
cucaggagacaguguccacaug

SEQ ID NO: 1073446 - RNA, 21 nt, Human
gacaggggaagaagcaaggag

SEQ ID NO: 1073447 - RNA, 22 nt, Human
aacccucagcuguuugaggaga

SEQ ID NO: 1073448 - RNA, 22 nt, Human
ggagcaguggucauucagcugg

SEQ ID NO: 1073449 - RNA, 22 nt, Human
caguuacauaaaugauaaaaug

SEQ ID NO: 1073450 - RNA, 22 nt, Human
uggcagcacaagguggcccaug

SEQ ID NO: 1073451 - RNA, 22 nt, Human
uccugagauaggaguugaaggc

SEQ ID NO: 1073452 - RNA, 22 nt, Human
ugaacccaggagguugcaguga

SEQ ID NO: 1073453 - RNA, 22 nt, Human
gaggccaaguuggagaccaggu

SEQ ID NO: 1073454 - RNA, 22 nt, Human
gggcuucucccuaaggacucug

SEQ ID NO: 1073455 - RNA, 22 nt, Human
caauauucaguggaaaagccau

SEQ ID NO: 1073456 - RNA, 22 nt, Human
ugcauguguguguauuuauaaa

SEQ ID NO: 1073457 - RNA, 22 nt, Human
agggagaagguuuagcugugag

SEQ ID NO: 1073458 - RNA, 22 nt, Human
agccacaccuguccugccagcu

SEQ ID NO: 1073459 - RNA, 22 nt, Human
cagggcuguaaauuagugcuga

SEQ ID NO: 1073460 - RNA, 22 nt, Human
guauuugucuuguuggucucca

SEQ ID NO: 1073461 - RNA, 22 nt, Human
uuagcauucucauuugcauaaa

SEQ ID NO: 1073462 - RNA, 22 nt, Human
aggcaggccccugagaauagac

SEQ ID NO: 1073463 - RNA, 22 nt, Human
uacauuaucuuguuaucuuuca

SEQ ID NO: 1073464 - RNA, 22 nt, Human
gcagaggccaucaacuuugcca

SEQ ID NO: 1073465 - RNA, 22 nt, Human
cugggaggcagucucucuagaa

SEQ ID NO: 1073466 - RNA, 22 nt, Human
uagcauuuuagcuguuuucucu

SEQ ID NO: 1073467 - RNA, 23 nt, Human
uuacuuuugcaccaaccuaauau

SEQ ID NO: 1073468 - RNA, 22 nt, Human
uaauuuugucccccugcacaua

SEQ ID NO: 1073469 - RNA, 22 nt, Human
ucaguguuuacaugcauccuug

SEQ ID NO: 1073470 - RNA, 22 nt, Human
aaaaaugaaacggcugguuggc

SEQ ID NO: 1073471 - RNA, 16 nt, Human
gcuggucaagcagcag

SEQ ID NO: 1073472 - RNA, 22 nt, Human
uggcagcuccggguaggggcug

SEQ ID NO: 1073473 - RNA, 22 nt, Human
augugaaaauccaauggcagca

SEQ ID NO: 1073474 - RNA, 22 nt, Human
uggcugaggagggucuucuggu

SEQ ID NO: 1073475 - RNA, 22 nt, Human
auugcaccuuggguuuugaaag

SEQ ID NO: 1073476 - RNA, 22 nt, Human
uccaggaaacaucuccgccuaa

SEQ ID NO: 1073477 - RNA, 21 nt, Human
gcugggcuccagucugccgcu

SEQ ID NO: 1073478 - RNA, 22 nt, Human
ggccucggcccacugcugcggu

SEQ ID NO: 1073479 - RNA, 22 nt, Human
aacaaaguguacuuccauacug

SEQ ID NO: 1073480 - RNA, 22 nt, Human
ccuggcagcccagagcgccgcu

SEQ ID NO: 1073481 - RNA, 22 nt, Human
guaucacuuuugagagugagaa

SEQ ID NO: 1073482 - RNA, 22 nt, Human
uggccacccagcugacgccuuc

SEQ ID NO: 1073483 - RNA, 22 nt, Human
cugcugaggccuucccuguccu

SEQ ID NO: 1073484 - RNA, 22 nt, Human
gcccaggccggagagcagugcu

SEQ ID NO: 1073485 - RNA, 20 nt, Human
agagcugggaagcucccuau

SEQ ID NO: 1073486 - RNA, 22 nt, Human
caaaugauacuguuuuuagucu

SEQ ID NO: 1073487 - RNA, 20 nt, Human
gugccuggagaagaggcugu

SEQ ID NO: 1073488 - RNA, 19 nt, Human
cagagcugcuggccucguc

SEQ ID NO: 1073489 - RNA, 22 nt, Human
uugcugaauugaauccuuuggu

SEQ ID NO: 1073490 - RNA, 23 nt, Human
acaaaugucuagagaggguguga

SEQ ID NO: 1073491 - RNA, 23 nt, Human
gcagaggagcaagcuggacacca

SEQ ID NO: 1073492 - RNA, 22 nt, Human
cccagccagccucuucccauau

SEQ ID NO: 1073493 - RNA, 22 nt, Human
aauucacaaaaguuagauccau

SEQ ID NO: 1073494 - RNA, 22 nt, Human
gacagccaacuggggagggcau

SEQ ID NO: 1073495 - RNA, 22 nt, Human
aggauugugccuccagucagaa

SEQ ID NO: 1073496 - RNA, 21 nt, Human
ggggcagagcuaggcccugca

SEQ ID NO: 1073497 - RNA, 22 nt, Human
uucaagauccagcacaacagug

SEQ ID NO: 1073498 - RNA, 22 nt, Human
acacuucagcaguaugcuuggg

SEQ ID NO: 1073499 - RNA, 22 nt, Human
gauuuuauauggcauacugugg

SEQ ID NO: 1073500 - RNA, 22 nt, Human
ugcccugcggcuaucuagauga

SEQ ID NO: 1073501 - RNA, 22 nt, Human
ugcaaauuuauauggugacugc

SEQ ID NO: 1073502 - RNA, 22 nt, Human
aggggugaaagagggcccucaa

SEQ ID NO: 1073503 - RNA, 23 nt, Human
gugagcagcaccaugaggcuaga

SEQ ID NO: 1073504 - RNA, 22 nt, Human
ccugcagcuguaggagaaggcg

SEQ ID NO: 1073505 - RNA, 22 nt, Human
uucaggauuguguuuuuccuga

SEQ ID NO: 1073506 - RNA, 22 nt, Human
gguggcucggccagugcaggcc

SEQ ID NO: 1073507 - RNA, 22 nt, Human
uugaaacuuagaaauugagcug

SEQ ID NO: 1073508 - RNA, 22 nt, Human
uuccucagaaaauacuguccaa

SEQ ID NO: 1073509 - RNA, 22 nt, Human
ucaaaguuuguggcaauuuauu

SEQ ID NO: 1073510 - RNA, 21 nt, Human
ucugccugagacuuugcuggu

SEQ ID NO: 1073511 - RNA, 22 nt, Human
ccagcugguguuccuuaggacc

SEQ ID NO: 1073512 - RNA, 22 nt, Human
aaugaugguuucaucacuugaa

SEQ ID NO: 1073513 - RNA, 22 nt, Human
uaugucaaaguuaagaaauagg

SEQ ID NO: 1073514 - RNA, 22 nt, Human
ugcagcccuuccuuccucuggg

SEQ ID NO: 1073515 - RNA, 22 nt, Human
aagcagagaaucugggagcgag

SEQ ID NO: 1073516 - RNA, 23 nt, Human
ggucccaguggagaggccucacc

SEQ ID NO: 1073517 - RNA, 22 nt, Human
acauuucagcgugcaugacaug

SEQ ID NO: 1073518 - RNA, 22 nt, Human
ggucagggcucuuccaguggcu

SEQ ID NO: 1073519 - RNA, 22 nt, Human
ucugaagccaccucugcuuguc

SEQ ID NO: 1073520 - RNA, 22 nt, Human
guacaaguguauuuggcuugau

SEQ ID NO: 1073521 - RNA, 18 nt, Human
gcuuuauuucuuggggaa

SEQ ID NO: 1073522 - RNA, 20 nt, Human
gaggaaaagcugccaggccu

SEQ ID NO: 1073523 - RNA, 22 nt, Human
caggaaaugcuaucauagcuga

SEQ ID NO: 1073524 - RNA, 22 nt, Human
ugugagcaagauucagagauuc

SEQ ID NO: 1073525 - RNA, 22 nt, Human
ugccuguguggggucugccgcc

SEQ ID NO: 1073526 - RNA, 22 nt, Human
gagcugggaguuauagcauguu

SEQ ID NO: 1073527 - RNA, 22 nt, Human
aaucagaaaggcuaaggaagca

SEQ ID NO: 1073528 - RNA, 22 nt, Human
uuacaguagauuuugaaugugg

SEQ ID NO: 1073529 - RNA, 18 nt, Human
gcuuuuuagugcaucuuc

SEQ ID NO: 1073530 - RNA, 22 nt, Human
agguggggaaaccagcgauccc

SEQ ID NO: 1073531 - RNA, 22 nt, Human
augcugugucuagcaggaacac

SEQ ID NO: 1073532 - RNA, 22 nt, Human
gcagugguccaguucacaccca

SEQ ID NO: 1073533 - RNA, 22 nt, Human
caggcagaguuagugauuuagg

SEQ ID NO: 1073534 - RNA, 22 nt, Human
cagcugcccauccugggaaaug

SEQ ID NO: 1073535 - RNA, 22 nt, Human
aaaaccugauugaauucuauuu

SEQ ID NO: 1073536 - RNA, 22 nt, Human
uguuuguucccucucuuuccug

SEQ ID NO: 1073537 - RNA, 22 nt, Human
caggugggccgggguuuguucu

SEQ ID NO: 1073538 - RNA, 22 nt, Human
aaauauuugucugaggcgguug

SEQ ID NO: 1073539 - RNA, 22 nt, Human
caggacaccuuagcuaaaauuc

SEQ ID NO: 1073540 - RNA, 22 nt, Human
ccagaugggccagggguuuguu

SEQ ID NO: 1073541 - RNA, 22 nt, Human
cugccugcuuuucugggagccg

SEQ ID NO: 1073542 - RNA, 23 nt, Human
augcccugugcagaaauguggaa

SEQ ID NO: 1073543 - RNA, 22 nt, Human
agcagggggccacagucacagc

SEQ ID NO: 1073544 - RNA, 22 nt, Human
aaggcauaugcuguguacaguu

SEQ ID NO: 1073545 - RNA, 22 nt, Human
cuuccucaugugcaaugcaagc

SEQ ID NO: 1073546 - RNA, 22 nt, Human
aauuacuguaauuuucuacagc

SEQ ID NO: 1073547 - RNA, 22 nt, Human
agggcagaaaccaccuugaugg

SEQ ID NO: 1073548 - RNA, 22 nt, Human
uuugcauaaaggagcauuucuc

SEQ ID NO: 1073549 - RNA, 21 nt, Human
gcugugcaggugccccugcuc

SEQ ID NO: 1073550 - RNA, 22 nt, Human
gaggagguugacggcacuguga

SEQ ID NO: 1073551 - RNA, 22 nt, Human
uucauuugucugcuauagaucc

SEQ ID NO: 1073552 - RNA, 22 nt, Human
uggcccuguucuguaccucaua

SEQ ID NO: 1073553 - RNA, 18 nt, Human
caauuuuacccagucccu

SEQ ID NO: 1073554 - RNA, 22 nt, Human
auauuagcagugaucaaaaugg

SEQ ID NO: 1073555 - RNA, 22 nt, Human
ggcagcaugagccuggugaauu

SEQ ID NO: 1073556 - RNA, 20 nt, Human
cccagggguuguggugagga

SEQ ID NO: 1073557 - RNA, 22 nt, Human
gggcugacuccuauuggaugaa

SEQ ID NO: 1073558 - RNA, 18 nt, Human
uugagaaauaagcacuaa

SEQ ID NO: 1073559 - RNA, 22 nt, Human
gcaaagcaucaguagaaauguu

SEQ ID NO: 1073560 - RNA, 22 nt, Human
uuaggaagagcuuucaaucacu

SEQ ID NO: 1073561 - RNA, 20 nt, Human
accuggcucucaggagcaac

SEQ ID NO: 1073562 - RNA, 22 nt, Human
ugggagagcagagaacccucuu

SEQ ID NO: 1073563 - RNA, 21 nt, Human
accuccuggcauccuguuccc

SEQ ID NO: 1073564 - RNA, 22 nt, Human
auugaaaaaugacuauugcuua

SEQ ID NO: 1073565 - RNA, 22 nt, Human
acugccugagcuauuggaaaag

SEQ ID NO: 1073566 - RNA, 22 nt, Human
ucucgacagccuggcacagugg

SEQ ID NO: 1073567 - RNA, 23 nt, Human
cagaaaacccagagcucaguccc

SEQ ID NO: 1073568 - RNA, 22 nt, Human
uacauuguuuuuucuugccauc

SEQ ID NO: 1073569 - RNA, 22 nt, Human
uuaaagcaaaaacuaggaugga

SEQ ID NO: 1073570 - RNA, 20 nt, Human
caugacacuguuccucugcc

SEQ ID NO: 1073571 - RNA, 22 nt, Human
cucccuggaggcccagaccugg

SEQ ID NO: 1073572 - RNA, 22 nt, Human
gaccaaggaagaggggagccag

SEQ ID NO: 1073573 - RNA, 22 nt, Human
ucugccugaaauucacauguaa

SEQ ID NO: 1073574 - RNA, 22 nt, Human
cuggccagggugcgaucguggu

SEQ ID NO: 1073575 - RNA, 22 nt, Human
ugccugugaaaacccugggguu

SEQ ID NO: 1073576 - RNA, 22 nt, Human
cucuguccuaugcuugauagaa

SEQ ID NO: 1073577 - RNA, 22 nt, Human
gugugggcugcagaggcacagc

SEQ ID NO: 1073578 - RNA, 22 nt, Human
caggaacaggcugaugggcagg

SEQ ID NO: 1073579 - RNA, 22 nt, Human
agacaggacacaagcugcauaa

SEQ ID NO: 1073580 - RNA, 22 nt, Human
ggaccagagcucgggcuucuca

SEQ ID NO: 1073581 - RNA, 22 nt, Human
uucuuaagcaguuuggcauguu

SEQ ID NO: 1073582 - RNA, 23 nt, Human
aguaacaugcaaauaacagucug

SEQ ID NO: 1073583 - RNA, 22 nt, Human
ugggcucugaagucagucugcu

SEQ ID NO: 1073584 - RNA, 22 nt, Human
ggcucaccauuuucacucucug

SEQ ID NO: 1073585 - RNA, 22 nt, Human
caguguuccaggcggcagugaa

SEQ ID NO: 1073586 - RNA, 22 nt, Human
ugcaaaaugacuucugaaaaga

SEQ ID NO: 1073587 - RNA, 22 nt, Human
cagggcugaaaucaagguguag

SEQ ID NO: 1073588 - RNA, 20 nt, Human
auuauucauacaugugugac

SEQ ID NO: 1073589 - RNA, 22 nt, Human
augcacuacuagaugcaaaagu

SEQ ID NO: 1073590 - RNA, 22 nt, Human
cucugcccgcggaugccacguc

SEQ ID NO: 1073591 - RNA, 22 nt, Human
gcuggccucuggagaagggcuu

SEQ ID NO: 1073592 - RNA, 19 nt, Human
ggaccagguccugggcagc

SEQ ID NO: 1073593 - RNA, 22 nt, Human
cugaagcaggccuacuucauug

SEQ ID NO: 1073594 - RNA, 22 nt, Human
ugaaccaggaggcagccagcac

SEQ ID NO: 1073595 - RNA, 22 nt, Human
cagaaauuggaauagagaaaua

SEQ ID NO: 1073596 - RNA, 22 nt, Human
gcacaugguaggcauuugaugu

SEQ ID NO: 1073597 - RNA, 22 nt, Human
gcugcuggcuuccugcuguuuu

SEQ ID NO: 1073598 - RNA, 22 nt, Human
caugggcugcugacaggggcuc

SEQ ID NO: 1073599 - RNA, 22 nt, Human
acuuuagauauuccucuguaca

SEQ ID NO: 1073600 - RNA, 22 nt, Human
agagccagcauuugacacuggc

SEQ ID NO: 1073601 - RNA, 19 nt, Human
gcucugugaugcugagggg

SEQ ID NO: 1073602 - RNA, 22 nt, Human
auuuguaacacgugacagguug

SEQ ID NO: 1073603 - RNA, 22 nt, Human
uggugccuugggccuacagcgc

SEQ ID NO: 1073604 - RNA, 22 nt, Human
cacugcaguaacucuaggacug

SEQ ID NO: 1073605 - RNA, 22 nt, Human
uuacugaugguggagcugguau

SEQ ID NO: 1073606 - RNA, 22 nt, Human
auaacagugaccucucagcacc

SEQ ID NO: 1073607 - RNA, 22 nt, Human
aaggcacuuaacgugggaggau

SEQ ID NO: 1073608 - RNA, 22 nt, Human
gcuuuaagucucaguuuguuag

SEQ ID NO: 1073609 - RNA, 22 nt, Human
cagugcauagauccugaggccu

SEQ ID NO: 1073610 - RNA, 22 nt, Human
uuagucuucucauaguaaaacu

SEQ ID NO: 1073611 - RNA, 22 nt, Human
caguuacuguaugucaaagacu

SEQ ID NO: 1073612 - RNA, 22 nt, Human
ugcagcucauugguguccuggu

SEQ ID NO: 1073613 - RNA, 22 nt, Human
aggggagcaacauagucacucu

SEQ ID NO: 1073614 - RNA, 22 nt, Human
uccagcuuauagguagauuuaa

SEQ ID NO: 1073615 - RNA, 20 nt, Human
gaacauuuggccauacugag

SEQ ID NO: 1073616 - RNA, 22 nt, Human
cugggagcuagcucugagcuga

SEQ ID NO: 1073617 - RNA, 19 nt, Human
gucacauuugucucccagg

SEQ ID NO: 1073618 - RNA, 20 nt, Human
gcugccagugccugaugcuu

SEQ ID NO: 1073619 - RNA, 22 nt, Human
ucccagccggugccuggguccc

SEQ ID NO: 1073620 - RNA, 22 nt, Human
cucccagagagcaggugggccg

SEQ ID NO: 1073621 - RNA, 22 nt, Human
acauaaugagcucuuuauaaau

SEQ ID NO: 1073622 - RNA, 22 nt, Human
uugcucuguccagccagcaggu

SEQ ID NO: 1073623 - RNA, 22 nt, Human
cccaggaggcagaaguugcagu

SEQ ID NO: 1073624 - RNA, 22 nt, Human
aaucauaauuuugugaauguag

SEQ ID NO: 1073625 - RNA, 22 nt, Human
gagcuucccucugcagucccug

SEQ ID NO: 1073626 - RNA, 22 nt, Human
accucugcucaagaccccuccg

SEQ ID NO: 1073627 - RNA, 22 nt, Human
uggcugagagaagacggggaag

SEQ ID NO: 1073628 - RNA, 22 nt, Human
aggcugucucaccucaggaggg

SEQ ID NO: 1073629 - RNA, 22 nt, Human
acagaguaucuaucaggaguau

SEQ ID NO: 1073630 - RNA, 22 nt, Human
uucuggagccgggccugggcag

SEQ ID NO: 1073631 - RNA, 22 nt, Human
uggccagaaccugcaguaggcc

SEQ ID NO: 1073632 - RNA, 20 nt, Human
agaagccaagugacauguuu

SEQ ID NO: 1073633 - RNA, 18 nt, Human
uuauucagacgcauauga

SEQ ID NO: 1073634 - RNA, 22 nt, Human
gccugugacucgucuugggcca

SEQ ID NO: 1073635 - RNA, 22 nt, Human
uaaugaacaauauaucaauagc

SEQ ID NO: 1073636 - RNA, 22 nt, Human
acuucuggugucauacugcauu

SEQ ID NO: 1073637 - RNA, 22 nt, Human
aagugcaagcaggacuuaguuu

SEQ ID NO: 1073638 - RNA, 22 nt, Human
ugguggcaucacucagccuccc

SEQ ID NO: 1073639 - RNA, 22 nt, Human
gaagaauauggcucucagcaau

SEQ ID NO: 1073640 - RNA, 22 nt, Human
uugcauuugaucuuggguucuc

SEQ ID NO: 1073641 - RNA, 21 nt, Human
gucuuuaaaaaaggcugauac

SEQ ID NO: 1073642 - RNA, 22 nt, Human
agagcuggaaucagaccucagg

SEQ ID NO: 1073643 - RNA, 22 nt, Human
agugacaggggaggcaggugug

SEQ ID NO: 1073644 - RNA, 22 nt, Human
gaggaaccaaaucagcuugcac

SEQ ID NO: 1073645 - RNA, 22 nt, Human
cccuggcugcuaccagguagcu

SEQ ID NO: 1073646 - RNA, 22 nt, Human
uucugaaaggcagguuguuugc

SEQ ID NO: 1073647 - RNA, 22 nt, Human
ucucagagccuaacuaaccuaa

SEQ ID NO: 1073648 - RNA, 22 nt, Human
gcuggccugggcagaggcuaug

SEQ ID NO: 1073649 - RNA, 22 nt, Human
uucuaaguccuaccugaaagca

SEQ ID NO: 1073650 - RNA, 22 nt, Human
guggucagagaugacagugggu

SEQ ID NO: 1073651 - RNA, 22 nt, Human
cugauauuucucuuaacacuag

SEQ ID NO: 1073652 - RNA, 22 nt, Human
ugcuggcuuugcgagaugcauu

SEQ ID NO: 1073653 - RNA, 18 nt, Human
gccagagggcccaagguc

SEQ ID NO: 1073654 - RNA, 22 nt, Human
agagccuggacuuuucugagcc

SEQ ID NO: 1073655 - RNA, 22 nt, Human
uuaguacauugauucauuaugu

SEQ ID NO: 1073656 - RNA, 22 nt, Human
aagagagagugcgcucacagaa

SEQ ID NO: 1073657 - RNA, 22 nt, Human
ccuggcacgaagggcugagguu

SEQ ID NO: 1073658 - RNA, 22 nt, Human
ugaggcuugauuugcccgagag

SEQ ID NO: 1073659 - RNA, 21 nt, Human
agaaaaaccagcauguuuuca

SEQ ID NO: 1073660 - RNA, 22 nt, Human
cugggaguacugggggauguca

SEQ ID NO: 1073661 - RNA, 22 nt, Human
ggcaggaggugaguggcgggug

SEQ ID NO: 1073662 - RNA, 22 nt, Human
uugcuuuguuacugcaguuucc

SEQ ID NO: 1073663 - RNA, 23 nt, Human
gcauugucuccccacuucugggc

SEQ ID NO: 1073664 - RNA, 19 nt, Human
gcugcuggcucuggcugga

SEQ ID NO: 1073665 - RNA, 22 nt, Human
aggcagaugguaacugugauau

SEQ ID NO: 1073666 - RNA, 22 nt, Human
uuuguggauggaaaauagcagg

SEQ ID NO: 1073667 - RNA, 22 nt, Human
gugcugagugcagagugcagag

SEQ ID NO: 1073668 - RNA, 22 nt, Human
ucccuggguccugcuugcucuc

SEQ ID NO: 1073669 - RNA, 22 nt, Human
cagacaggcaggugagagcucc

SEQ ID NO: 1073670 - RNA, 22 nt, Human
agauaaauuccuaagauuucag

SEQ ID NO: 1073671 - RNA, 20 nt, Human
uuguuuuaaauccuggauga

SEQ ID NO: 1073672 - RNA, 22 nt, Human
cagcagaguauggcacucaacu

SEQ ID NO: 1073673 - RNA, 20 nt, Human
uuggcucugaucaguggagc

SEQ ID NO: 1073674 - RNA, 22 nt, Human
aaagguuuauuuguugcucaca

SEQ ID NO: 1073675 - RNA, 22 nt, Human
ucucagggugaggaaagaauuu

SEQ ID NO: 1073676 - RNA, 22 nt, Human
aaugucuuuuaaauguugaggu

SEQ ID NO: 1073677 - RNA, 22 nt, Human
gugcacaucgugcagguuuguu

SEQ ID NO: 1073678 - RNA, 22 nt, Human
acaggaagugggaagaaacagg

SEQ ID NO: 1073679 - RNA, 22 nt, Human
cagcugccagcuucucuccauc

SEQ ID NO: 1073680 - RNA, 22 nt, Human
cauuuguacuguucaaugucau

SEQ ID NO: 1073681 - RNA, 19 nt, Human
cagguggcgcucuacaggg

SEQ ID NO: 1073682 - RNA, 22 nt, Human
aaacuaaggugcuguggacuga

SEQ ID NO: 1073683 - RNA, 22 nt, Human
uucuuuuaauuucugucugcag

SEQ ID NO: 1073684 - RNA, 22 nt, Human
uugcaauagccuuauuuccaaa

SEQ ID NO: 1073685 - RNA, 22 nt, Human
cccugcugugucccaccuggaa

SEQ ID NO: 1073686 - RNA, 16 nt, Human
auucugcugccugcuc

SEQ ID NO: 1073687 - RNA, 20 nt, Human
cacugaagacuucuugcuca

SEQ ID NO: 1073688 - RNA, 22 nt, Human
gggcuggggcucaauaauuugu

SEQ ID NO: 1073689 - RNA, 22 nt, Human
gccuggaguggacuuggccccu

SEQ ID NO: 1073690 - RNA, 22 nt, Human
cagcagaggcacgucugugaau

SEQ ID NO: 1073691 - RNA, 19 nt, Human
uaugagcugacaaaggccu

SEQ ID NO: 1073692 - RNA, 22 nt, Human
ugauuuccaauaaggagaaugu

SEQ ID NO: 1073693 - RNA, 22 nt, Human
acagauacuauaauguaaagug

SEQ ID NO: 1073694 - RNA, 22 nt, Human
agucugcacucagguggagguc

SEQ ID NO: 1073695 - RNA, 20 nt, Human
accugccacagagaaaggua

SEQ ID NO: 1073696 - RNA, 22 nt, Human
ugagcugcaagaaaauuucagu

SEQ ID NO: 1073697 - RNA, 23 nt, Human
ggguccagagacaggcaugggug

SEQ ID NO: 1073698 - RNA, 22 nt, Human
ccaggccauucccagaguugcu

SEQ ID NO: 1073699 - RNA, 22 nt, Human
aggcucagggacucccucccuc

SEQ ID NO: 1073700 - RNA, 22 nt, Human
ucuuuuuuuccugugcagagcu

SEQ ID NO: 1073701 - RNA, 22 nt, Human
aaaaguauuuauggcuauguaa

SEQ ID NO: 1073702 - RNA, 20 nt, Human
cagagccaagagcagcaucu

SEQ ID NO: 1073703 - RNA, 22 nt, Human
guccucagaugcugcugaaaug

SEQ ID NO: 1073704 - RNA, 22 nt, Human
uuucauaugggcauuggcaaua

SEQ ID NO: 1073705 - RNA, 20 nt, Human
gcuccccuucucugggccuc

SEQ ID NO: 1073706 - RNA, 22 nt, Human
ugagcauggugggugcagagca

SEQ ID NO: 1073707 - RNA, 22 nt, Human
uccaauggggccucucugucag

SEQ ID NO: 1073708 - RNA, 22 nt, Human
gcaaagacggacucaggagugc

SEQ ID NO: 1073709 - RNA, 22 nt, Human
caucacagauguuguguggagu

SEQ ID NO: 1073710 - RNA, 22 nt, Human
aacacagaagugccaagagcca

SEQ ID NO: 1073711 - RNA, 22 nt, Human
ugcaguggaagagguggagauc

SEQ ID NO: 1073712 - RNA, 22 nt, Human
uacaguauggaaaauguauagu

SEQ ID NO: 1073713 - RNA, 22 nt, Human
ugcuugucaggauaagcucugg

SEQ ID NO: 1073714 - RNA, 22 nt, Human
gcucccaccuuugcuaucagua

SEQ ID NO: 1073715 - RNA, 22 nt, Human
ggccugcuauuggugggcagac

SEQ ID NO: 1073716 - RNA, 22 nt, Human
ugaaagguuauuuaggucugcu

SEQ ID NO: 1073717 - RNA, 22 nt, Human
aagaucaggcguggaaaacacu

SEQ ID NO: 1073718 - RNA, 22 nt, Human
ucauacaaggaggguguucaaa

SEQ ID NO: 1073719 - RNA, 22 nt, Human
ccaggguaccccaagggcaggu

SEQ ID NO: 1073720 - RNA, 18 nt, Human
agccuggaggguugaagu

SEQ ID NO: 1073721 - RNA, 19 nt, Human
ucaguggaugaacauguuu

SEQ ID NO: 1073722 - RNA, 19 nt, Human
auacagauguauccaugau

SEQ ID NO: 1073723 - RNA, 22 nt, Human
aggcuuuguaccuggggucuua

SEQ ID NO: 1073724 - RNA, 22 nt, Human
acugcuuuucuaagauucugug

SEQ ID NO: 1073725 - RNA, 22 nt, Human
caaaggaggugauaggcccucu

SEQ ID NO: 1073726 - RNA, 22 nt, Human
accugaggcuguuagucuaggu

SEQ ID NO: 1073727 - RNA, 22 nt, Human
ggcacugauuccauucaugaag

SEQ ID NO: 1073728 - RNA, 22 nt, Human
gguguugggagagcugguuuug

SEQ ID NO: 1073729 - RNA, 22 nt, Human
ggcuccaggugcaugccaggcu

SEQ ID NO: 1073730 - RNA, 22 nt, Human
cucuuuuucaccucugucagcg

SEQ ID NO: 1073731 - RNA, 22 nt, Human
ucaguuuuuaagaguuaugcga

SEQ ID NO: 1073732 - RNA, 22 nt, Human
augcaaugguauauggucaccu

SEQ ID NO: 1073733 - RNA, 22 nt, Human
agcugccagcaaguuucaaaca

SEQ ID NO: 1073734 - RNA, 22 nt, Human
gaggaagucucucuacaagaaa

SEQ ID NO: 1073735 - RNA, 22 nt, Human
ugaaaugucucacuuagacuuu

SEQ ID NO: 1073736 - RNA, 19 nt, Human
gcacacccugcaccaccau

SEQ ID NO: 1073737 - RNA, 22 nt, Human
uccugggccuguacuccauccg

SEQ ID NO: 1073738 - RNA, 22 nt, Human
aaauuaagaguaacucuguaga

SEQ ID NO: 1073739 - RNA, 22 nt, Human
agagccugcaucaggcuugggg

SEQ ID NO: 1073740 - RNA, 22 nt, Human
cuccuucccuucaaguguuccu

SEQ ID NO: 1073741 - RNA, 22 nt, Human
uuucuuuauccuccuuugcaca

SEQ ID NO: 1073742 - RNA, 22 nt, Human
ucuuucuacauuuuauaugcuu

SEQ ID NO: 1073743 - RNA, 22 nt, Human
aaaugucagaaaacauggagug

SEQ ID NO: 1073744 - RNA, 22 nt, Human
ugcccuguggguaucugauggc

SEQ ID NO: 1073745 - RNA, 22 nt, Human
gcugcuaagcguuucuguucca

SEQ ID NO: 1073746 - RNA, 22 nt, Human
gcacacacuguuuuccucacau

SEQ ID NO: 1073747 - RNA, 22 nt, Human
cugggcaguuuuacaucauugc

SEQ ID NO: 1073748 - RNA, 22 nt, Human
ucaaagaagauuacccucccau

SEQ ID NO: 1073749 - RNA, 22 nt, Human
gaaagagaggggcugagaugca

SEQ ID NO: 1073750 - RNA, 23 nt, Human
aaauuauugcucuucaauugccu

SEQ ID NO: 1073751 - RNA, 22 nt, Human
ccugggcaaaugccagagacaa

SEQ ID NO: 1073752 - RNA, 22 nt, Human
cuacaaagcucuucuacaggca

SEQ ID NO: 1073753 - RNA, 22 nt, Human
aaugaagccacugaagacaauc

SEQ ID NO: 1073754 - RNA, 20 nt, Human
gucucaaguaucucacaguc

SEQ ID NO: 1073755 - RNA, 22 nt, Human
aucacagauuugauacuuuugu

SEQ ID NO: 1073756 - RNA, 18 nt, Human
agcugguggggagacagc

SEQ ID NO: 1073757 - RNA, 22 nt, Human
uccuggagcuuccuucauggua

SEQ ID NO: 1073758 - RNA, 22 nt, Human
gggcucugcgcucagcuccagc

SEQ ID NO: 1073759 - RNA, 22 nt, Human
ucuggcagcaagucuguuucuc

SEQ ID NO: 1073760 - RNA, 22 nt, Human
auucuucauuguugauucaugu

SEQ ID NO: 1073761 - RNA, 22 nt, Human
cuauuuggccaagcugcccaca

SEQ ID NO: 1073762 - RNA, 22 nt, Human
cugccuuugcccuugacacugu

SEQ ID NO: 1073763 - RNA, 22 nt, Human
ccaggcaggcagcguucucagg

SEQ ID NO: 1073764 - RNA, 22 nt, Human
aucuguagucacugcacagcuc

SEQ ID NO: 1073765 - RNA, 22 nt, Human
uuaacacuugaacucuacaugu

SEQ ID NO: 1073766 - RNA, 22 nt, Human
agcugcucaggagagccagguc

SEQ ID NO: 1073767 - RNA, 19 nt, Human
cugggagguguucagagaa

SEQ ID NO: 1073768 - RNA, 22 nt, Human
uauagcaauucagaauacaugu

SEQ ID NO: 1073769 - RNA, 22 nt, Human
auaucaagauuauuagggucau

SEQ ID NO: 1073770 - RNA, 22 nt, Human
ucuuucaaugagcauucuuucc

SEQ ID NO: 1073771 - RNA, 22 nt, Human
ucauuucagccauuuuuaaaug

SEQ ID NO: 1073772 - RNA, 22 nt, Human
uugggcuuggucgguuugaggc

SEQ ID NO: 1073773 - RNA, 22 nt, Human
agagcugcaggguggacccagg

SEQ ID NO: 1073774 - RNA, 22 nt, Human
aucagaauagugggggacaguc

SEQ ID NO: 1073775 - RNA, 22 nt, Human
uaagaaucaguagauauagauu

SEQ ID NO: 1073776 - RNA, 21 nt, Human
agcagaggcagaauguaugca

SEQ ID NO: 1073777 - RNA, 22 nt, Human
aauucacauguugaaguccuaa

SEQ ID NO: 1073778 - RNA, 22 nt, Human
cuugaucuacauagugaaaccc

SEQ ID NO: 1073779 - RNA, 22 nt, Human
guuucauaauucaaucaaauga

SEQ ID NO: 1073780 - RNA, 20 nt, Human
ugccugggaaggcguggagg

SEQ ID NO: 1073781 - RNA, 22 nt, Human
aaagacagagcuguaggggaaa

SEQ ID NO: 1073782 - RNA, 22 nt, Human
aggugauguccacagcuugcag

SEQ ID NO: 1073783 - RNA, 22 nt, Human
augcagaagacugaaaagcuga

SEQ ID NO: 1073784 - RNA, 23 nt, Human
ugcuguccaacagacuggccaug

SEQ ID NO: 1073785 - RNA, 22 nt, Human
uggggacauagccagucuggcu

SEQ ID NO: 1073786 - RNA, 21 nt, Human
agcuuacauuaccauuguugc

SEQ ID NO: 1073787 - RNA, 22 nt, Human
aucuuauuuaacacagcaaaac

SEQ ID NO: 1073788 - RNA, 22 nt, Human
cauggccucaaaggacugcaga

SEQ ID NO: 1073789 - RNA, 22 nt, Human
aggggagcuugaggcauggccu

SEQ ID NO: 1073790 - RNA, 22 nt, Human
uucuuuccacagaggggaugau

SEQ ID NO: 1073791 - RNA, 22 nt, Human
gaggcagcucuucugaaugggg

SEQ ID NO: 1073792 - RNA, 22 nt, Human
uguaauuugcauggcugaaugc

SEQ ID NO: 1073793 - RNA, 22 nt, Human
cccagacucaucccugggagcu

SEQ ID NO: 1073794 - RNA, 22 nt, Human
auuacaguaacagcuacaaugc

SEQ ID NO: 1073795 - RNA, 22 nt, Human
gcacacagaaucagugggcaua

SEQ ID NO: 1073796 - RNA, 22 nt, Human
caggcagcaggagcccugcucg

SEQ ID NO: 1073797 - RNA, 22 nt, Human
gccugccugcugucaucugccu

SEQ ID NO: 1073798 - RNA, 22 nt, Human
aacagcuuagaaauguugcuaa

SEQ ID NO: 1073799 - RNA, 22 nt, Human
gcagacaauuuauuagcagauu

SEQ ID NO: 1073800 - RNA, 22 nt, Human
acagaguaggugcugucgacug

SEQ ID NO: 1073801 - RNA, 18 nt, Human
uugagggaggggcagagu

SEQ ID NO: 1073802 - RNA, 22 nt, Human
caugcaguuucucuaugcguag

SEQ ID NO: 1073803 - RNA, 22 nt, Human
uuuuaaaggcuguaugaccaag

SEQ ID NO: 1073804 - RNA, 22 nt, Human
aggcugaggggcgagggacccu

SEQ ID NO: 1073805 - RNA, 22 nt, Human
ucagaauuuaaaauguguagau

SEQ ID NO: 1073806 - RNA, 22 nt, Human
ugcuccaggcaagcugagaguu

SEQ ID NO: 1073807 - RNA, 22 nt, Human
gggugggguguaucggauccua

SEQ ID NO: 1073808 - RNA, 22 nt, Human
cucagagcaaugaacaugcaaa

SEQ ID NO: 1073809 - RNA, 22 nt, Human
ugcauuaucuuuaauguucuca

SEQ ID NO: 1073810 - RNA, 22 nt, Human
ucaucucagggcgacaucaugu

SEQ ID NO: 1073811 - RNA, 22 nt, Human
uauuuaagaugugucauaaaga

SEQ ID NO: 1073812 - RNA, 22 nt, Human
ugacagcauaacacuggucuug

SEQ ID NO: 1073813 - RNA, 22 nt, Human
agagccugcagcugugaagaaa

SEQ ID NO: 1073814 - RNA, 21 nt, Human
uggcagaguugaguaguuaug

SEQ ID NO: 1073815 - RNA, 22 nt, Human
gcuggagguagggagguccugu

SEQ ID NO: 1073816 - RNA, 22 nt, Human
uugaaagggauauaucuuucug

SEQ ID NO: 1073817 - RNA, 22 nt, Human
agcagccaaaugaagauuuuac

SEQ ID NO: 1073818 - RNA, 22 nt, Human
ugcuguggcaguuuauguauag

SEQ ID NO: 1073819 - RNA, 22 nt, Human
agcaggaaguagucuguaagca

SEQ ID NO: 1073820 - RNA, 22 nt, Human
ugaacacacacaucuuaauaau

SEQ ID NO: 1073821 - RNA, 22 nt, Human
caaggccaguccauuuuggaag

SEQ ID NO: 1073822 - RNA, 22 nt, Human
guucacauguguuaucuucuuu

SEQ ID NO: 1073823 - RNA, 22 nt, Human
acuauaacccauggaauauaag

SEQ ID NO: 1073824 - RNA, 22 nt, Human
ugaggaggcccagguuggggcu

SEQ ID NO: 1073825 - RNA, 22 nt, Human
aaaagacauaugugggcauucu

SEQ ID NO: 1073826 - RNA, 22 nt, Human
aguacuuugcacuuugcucaga

SEQ ID NO: 1073827 - RNA, 22 nt, Human
uccaggccuaggccaagugauu

SEQ ID NO: 1073828 - RNA, 22 nt, Human
auccaggguguggagagagcuc

SEQ ID NO: 1073829 - RNA, 22 nt, Human
guugaguggguuaggaugcuga

SEQ ID NO: 1073830 - RNA, 22 nt, Human
uaauaccuugaucucucuuguc

SEQ ID NO: 1073831 - RNA, 22 nt, Human
auauuuguaguggguaagaagu

SEQ ID NO: 1073832 - RNA, 22 nt, Human
ugcccugcuugguuuauuuuca

SEQ ID NO: 1073833 - RNA, 22 nt, Human
uuuauauuguaaaaaugguucu

SEQ ID NO: 1073834 - RNA, 22 nt, Human
aaaugcaaggccaugugaagga

SEQ ID NO: 1073835 - RNA, 22 nt, Human
aaggcucuccaaaugauauaau

SEQ ID NO: 1073836 - RNA, 22 nt, Human
gccaggacuagagggaggugag

SEQ ID NO: 1073837 - RNA, 22 nt, Human
cuguauuugaaagaaaagauuu

SEQ ID NO: 1073838 - RNA, 22 nt, Human
uaacaguauccccauuugcaag

SEQ ID NO: 1073839 - RNA, 18 nt, Human
ucagaggagauaccuaaa

SEQ ID NO: 1073840 - RNA, 22 nt, Human
auucuggauuaucaguccacca

SEQ ID NO: 1073841 - RNA, 19 nt, Human
uagcugccuguuaccucca

SEQ ID NO: 1073842 - RNA, 23 nt, Human
uuccuuaacuguuaagauugucu

SEQ ID NO: 1073843 - RNA, 22 nt, Human
ucuggaguguccaguucuacuc

SEQ ID NO: 1073844 - RNA, 22 nt, Human
acccugagugcaacggugagga

SEQ ID NO: 1073845 - RNA, 22 nt, Human
acaaauauuuacugaauccacu

SEQ ID NO: 1073846 - RNA, 22 nt, Human
augggcugagaaucaagaauau

SEQ ID NO: 1073847 - RNA, 22 nt, Human
gcucccugccuacacggaccuu

SEQ ID NO: 1073848 - RNA, 22 nt, Human
cagggugcgccacucagaugua

SEQ ID NO: 1073849 - RNA, 22 nt, Human
ucacagacacagggagaagcau

SEQ ID NO: 1073850 - RNA, 22 nt, Human
accagccaccaccaggagaucg

SEQ ID NO: 1073851 - RNA, 22 nt, Human
aacuccagcaggaaggugagaa

SEQ ID NO: 1073852 - RNA, 22 nt, Human
cuuacaaauacacuuaggagag

SEQ ID NO: 1073853 - RNA, 22 nt, Human
uuucaaagggaaguuaugaagu

SEQ ID NO: 1073854 - RNA, 22 nt, Human
cuugcugucccuugguaugaac

SEQ ID NO: 1073855 - RNA, 22 nt, Human
uagucucuggagacucuagggg

SEQ ID NO: 1073856 - RNA, 22 nt, Human
caaggaaaacagaugaucaaca

SEQ ID NO: 1073857 - RNA, 22 nt, Human
uucaaagauaauguagcauuuu

SEQ ID NO: 1073858 - RNA, 22 nt, Human
ugcuuuauagacaaggaaguag

SEQ ID NO: 1073859 - RNA, 22 nt, Human
uugaagaccuuuagugcuaugu

SEQ ID NO: 1073860 - RNA, 22 nt, Human
ucagaauucagagggagugggg

SEQ ID NO: 1073861 - RNA, 22 nt, Human
cagaggaaaugggaaggagaua

SEQ ID NO: 1073862 - RNA, 22 nt, Human
gcaggaacagggcuucaagcuu

SEQ ID NO: 1073863 - RNA, 18 nt, Human
ucauagaagugaaucaga

SEQ ID NO: 1073864 - RNA, 22 nt, Human
ccagcugcugugcagggaggcu

SEQ ID NO: 1073865 - RNA, 22 nt, Human
ucaugcuauuucgaauguaaua

SEQ ID NO: 1073866 - RNA, 22 nt, Human
augcagagacagauguggcaug

SEQ ID NO: 1073867 - RNA, 22 nt, Human
gcucugggauuaccagccuuag

SEQ ID NO: 1073868 - RNA, 22 nt, Human
gcuggaaaugauuaaaugguga

SEQ ID NO: 1073869 - RNA, 22 nt, Human
ccacagagacagagcccagggu

SEQ ID NO: 1073870 - RNA, 17 nt, Human
ccuggcugggaaucuga

SEQ ID NO: 1073871 - RNA, 18 nt, Human
acacacacaccuguguau

SEQ ID NO: 1073872 - RNA, 22 nt, Human
gaggagguggaauuccaggaau

SEQ ID NO: 1073873 - RNA, 22 nt, Human
aucuaacugggcuauuuuauug

SEQ ID NO: 1073874 - RNA, 22 nt, Human
ucuguuuaggcaaaauagcuac

SEQ ID NO: 1073875 - RNA, 22 nt, Human
gcaguggauggccagcaggggc

SEQ ID NO: 1073876 - RNA, 22 nt, Human
uacaaaguuuucuuggauugag

SEQ ID NO: 1073877 - RNA, 22 nt, Human
acagcugauaguuaccucuguc

SEQ ID NO: 1073878 - RNA, 22 nt, Human
uuuaaacuaacaguacacguug

SEQ ID NO: 1073879 - RNA, 22 nt, Human
uauucucagugcuauaaguaga

SEQ ID NO: 1073880 - RNA, 22 nt, Human
cugggcuggagugcaauggcgc

SEQ ID NO: 1073881 - RNA, 22 nt, Human
aaggcaguacuuuauguccaua

SEQ ID NO: 1073882 - RNA, 22 nt, Human
ugaaguuuaagguuagauaagu

SEQ ID NO: 1073883 - RNA, 22 nt, Human
acuucacauuagcuaaaaggga

SEQ ID NO: 1073884 - RNA, 22 nt, Human
gaggguggguacaccagcccuc

SEQ ID NO: 1073885 - RNA, 22 nt, Human
cugggcagaauuuuaggauggc

SEQ ID NO: 1073886 - RNA, 22 nt, Human
gaacagacagaagcuuaucucc

SEQ ID NO: 1073887 - RNA, 22 nt, Human
uggcagaggaaaaagucacugg

SEQ ID NO: 1073888 - RNA, 22 nt, Human
ugucuucaguaaaauacacuau

SEQ ID NO: 1073889 - RNA, 22 nt, Human
ccugaggcuuaaucugucccaa

SEQ ID NO: 1073890 - RNA, 22 nt, Human
caguaauagauuugagaguggu

SEQ ID NO: 1073891 - RNA, 22 nt, Human
cagaguuuuaucauacguggau

SEQ ID NO: 1073892 - RNA, 22 nt, Human
gccuggcuggucacugccuggc

SEQ ID NO: 1073893 - RNA, 22 nt, Human
accucugccacuuucuaacucu

SEQ ID NO: 1073894 - RNA, 22 nt, Human
aagccaggaccaaacucauccu

SEQ ID NO: 1073895 - RNA, 22 nt, Human
agagaauuuuaaaagccuugaa

SEQ ID NO: 1073896 - RNA, 22 nt, Human
gaauacaaacuuaaggcuuuac

SEQ ID NO: 1073897 - RNA, 22 nt, Human
cauuuguuaaccaguguggauu

SEQ ID NO: 1073898 - RNA, 22 nt, Human
ucaggggcccuucccucagcag

SEQ ID NO: 1073899 - RNA, 22 nt, Human
uucaggaugacaccauguccag

SEQ ID NO: 1073900 - RNA, 22 nt, Human
agaacaauugccccaaagcuug

SEQ ID NO: 1073901 - RNA, 22 nt, Human
caaugucaugauuuuccauuag

SEQ ID NO: 1073902 - RNA, 22 nt, Human
uacugaaagacugaauauuuag

SEQ ID NO: 1073903 - RNA, 22 nt, Human
acaauagaaauaauuaagcaca

SEQ ID NO: 1073904 - RNA, 15 nt, Human
ccaggcucugcacuc

SEQ ID NO: 1073905 - RNA, 20 nt, Human
guuuuucuugggcgagcuau

SEQ ID NO: 1073906 - RNA, 22 nt, Human
ggacacaguggaagacagcuug

SEQ ID NO: 1073907 - RNA, 22 nt, Human
auggcagcaaaugucuggcugg

SEQ ID NO: 1073908 - RNA, 22 nt, Human
gugggcaggaggcccugcccug

SEQ ID NO: 1073909 - RNA, 22 nt, Human
gcaguuaccuauuuuguagaaa

SEQ ID NO: 1073910 - RNA, 22 nt, Human
uguggccaccagagcugcuauu

SEQ ID NO: 1073911 - RNA, 22 nt, Human
cauuaacacuuuggauuuagac

SEQ ID NO: 1073912 - RNA, 22 nt, Human
cccuggaggaaaaucugaggcu

SEQ ID NO: 1073913 - RNA, 22 nt, Human
aagcaaguagguauuugacaaa

SEQ ID NO: 1073914 - RNA, 22 nt, Human
ccagcuaguuggguauuauaag

SEQ ID NO: 1073915 - RNA, 22 nt, Human
ucccucaggacccaacuuguaa

SEQ ID NO: 1073916 - RNA, 22 nt, Human
aaaguguugaagaaaauguuca

SEQ ID NO: 1073917 - RNA, 22 nt, Human
auuauuagugauguuguuacug

SEQ ID NO: 1073918 - RNA, 22 nt, Human
uugaagcauuguggcuuguauu

SEQ ID NO: 1073919 - RNA, 21 nt, Human
aaguaacaccacuccuggagu

SEQ ID NO: 1073920 - RNA, 22 nt, Human
ugcacacagaugguacaugcau

SEQ ID NO: 1073921 - RNA, 22 nt, Human
uuuccuaagauagauacuucag

SEQ ID NO: 1073922 - RNA, 22 nt, Human
agggguagagauugcuggugua

SEQ ID NO: 1073923 - RNA, 22 nt, Human
gguggcagcgucuaucugacau

SEQ ID NO: 1073924 - RNA, 22 nt, Human
aggccuggcuuugguuugcuga

SEQ ID NO: 1073925 - RNA, 22 nt, Human
auuugucaaaacacagagaaca

SEQ ID NO: 1073926 - RNA, 22 nt, Human
ggcaggcucagcagccaaggag

SEQ ID NO: 1073927 - RNA, 22 nt, Human
cagagcugcagauugaaggcau

SEQ ID NO: 1073928 - RNA, 22 nt, Human
guccucagucaguuuggugggg

SEQ ID NO: 1073929 - RNA, 22 nt, Human
aggcugcuggcaggcguggacg

SEQ ID NO: 1073930 - RNA, 22 nt, Human
agacaguaugauauaugaauac

SEQ ID NO: 1073931 - RNA, 22 nt, Human
gaguucuucuauauaguaugag

SEQ ID NO: 1073932 - RNA, 22 nt, Human
ccagguggaaggucugugcucu

SEQ ID NO: 1073933 - RNA, 22 nt, Human
cagugagggcauucagugcugg

SEQ ID NO: 1073934 - RNA, 22 nt, Human
ggcagcuguggacgucgucauu

SEQ ID NO: 1073935 - RNA, 22 nt, Human
aggaagagcaucuuugggucug

SEQ ID NO: 1073936 - RNA, 22 nt, Human
aggagugcaaauaguccagaga

SEQ ID NO: 1073937 - RNA, 22 nt, Human
aggauccuuuuucugcuguuug

SEQ ID NO: 1073938 - RNA, 22 nt, Human
acagagaccaguuacagcgucc

SEQ ID NO: 1073939 - RNA, 22 nt, Human
cuucuugcaauuuucaucuuau

SEQ ID NO: 1073940 - RNA, 22 nt, Human
uguuccaucaguuuuugguuga

SEQ ID NO: 1073941 - RNA, 22 nt, Human
ccagggcacuuaggcccagccc

SEQ ID NO: 1073942 - RNA, 22 nt, Human
uggcacauaguaggugcucaau

SEQ ID NO: 1073943 - RNA, 22 nt, Human
cagggccuccuaaggcaucuaa

SEQ ID NO: 1073944 - RNA, 22 nt, Human
ugccuggcaagaggggcuggcu

SEQ ID NO: 1073945 - RNA, 20 nt, Human
uggacagaauuagacacuuu

SEQ ID NO: 1073946 - RNA, 22 nt, Human
ggugcagaucuuucucuucagg

SEQ ID NO: 1073947 - RNA, 22 nt, Human
agugauggagcuuccucugcua

SEQ ID NO: 1073948 - RNA, 22 nt, Human
auuccacagcuacaucaaucua

SEQ ID NO: 1073949 - RNA, 22 nt, Human
acaaaauuaccuaguuauuuuc

SEQ ID NO: 1073950 - RNA, 22 nt, Human
uugcauaaaagaguauaucuua

SEQ ID NO: 1073951 - RNA, 22 nt, Human
ccucagcucuucccugugcaca

SEQ ID NO: 1073952 - RNA, 22 nt, Human
guccucuuagccacuuaauuau

SEQ ID NO: 1073953 - RNA, 22 nt, Human
caacuucagggaaacaugaagc

SEQ ID NO: 1073954 - RNA, 22 nt, Human
cugcccugcuuguuuccagugg

SEQ ID NO: 1073955 - RNA, 22 nt, Human
uuccaagucacccuuaggguca

SEQ ID NO: 1073956 - RNA, 22 nt, Human
agguggcuccucccauggcugg

SEQ ID NO: 1073957 - RNA, 22 nt, Human
uucuaaacggcuucacaggaau

SEQ ID NO: 1073958 - RNA, 22 nt, Human
ccaacucugaaaauccagauau

SEQ ID NO: 1073959 - RNA, 21 nt, Human
auacagaacauugauccaaga

SEQ ID NO: 1073960 - RNA, 22 nt, Human
uaauacaaggcaggaagcagua

SEQ ID NO: 1073961 - RNA, 21 nt, Human
aaggagccuaggaggcucagg

SEQ ID NO: 1073962 - RNA, 22 nt, Human
uccuugaaaggggcugcagggc

SEQ ID NO: 1073963 - RNA, 19 nt, Human
uaaggccaaaaguaagugu

SEQ ID NO: 1073964 - RNA, 20 nt, Human
gcccacucuaauccacuguc

SEQ ID NO: 1073965 - RNA, 22 nt, Human
uuauuauuccccaagucauuau

SEQ ID NO: 1073966 - RNA, 22 nt, Human
uaacugaacaucucaaaucaag

SEQ ID NO: 1073967 - RNA, 22 nt, Human
cagcacaguacaaggcacggau

SEQ ID NO: 1073968 - RNA, 20 nt, Human
uaugauaauuacaaaauagu

SEQ ID NO: 1073969 - RNA, 22 nt, Human
aaacuagccacacagaauacac

SEQ ID NO: 1073970 - RNA, 22 nt, Human
cagcugggccuccugagcccug

SEQ ID NO: 1073971 - RNA, 22 nt, Human
aagccagguguuuaggccagcg

SEQ ID NO: 1073972 - RNA, 22 nt, Human
uuucuucuguuuguaguuacac

SEQ ID NO: 1073973 - RNA, 22 nt, Human
guuuacaaauauuuuaaauggu

SEQ ID NO: 1073974 - RNA, 22 nt, Human
ucucugagcccaauguagcaau

SEQ ID NO: 1073975 - RNA, 22 nt, Human
cagugcuccugauguacccuug

SEQ ID NO: 1073976 - RNA, 22 nt, Human
acagucauagcagccuuuguua

SEQ ID NO: 1073977 - RNA, 22 nt, Human
caggcccugcugcugagaccuu

SEQ ID NO: 1073978 - RNA, 22 nt, Human
uucaaauuugguaugcaagcca

SEQ ID NO: 1073979 - RNA, 22 nt, Human
acagacuggccugucucgcacc

SEQ ID NO: 1073980 - RNA, 22 nt, Human
auacauguugagaaaauaucug

SEQ ID NO: 1073981 - RNA, 22 nt, Human
guacacacuguuugaucauuuc

SEQ ID NO: 1073982 - RNA, 22 nt, Human
auugaaagcauggauuuggauu

SEQ ID NO: 1073983 - RNA, 22 nt, Human
accuuucaaaguggcuaucacu

SEQ ID NO: 1073984 - RNA, 22 nt, Human
aggcugaggcaagaggaucacu

SEQ ID NO: 1073985 - RNA, 22 nt, Human
cacagcuuguuuagugacucac

SEQ ID NO: 1073986 - RNA, 22 nt, Human
ugaggccuggagggaggaguuu

SEQ ID NO: 1073987 - RNA, 22 nt, Human
acuugguugcaaaugaauuauu

SEQ ID NO: 1073988 - RNA, 22 nt, Human
gcuggccuugugucugaggaag

SEQ ID NO: 1073989 - RNA, 22 nt, Human
ggcagcucacugauuagcaauu

SEQ ID NO: 1073990 - RNA, 22 nt, Human
cuuccugagcaaggaacuauag

SEQ ID NO: 1073991 - RNA, 22 nt, Human
ccuccaguacuccaguccagcg

SEQ ID NO: 1073992 - RNA, 22 nt, Human
ccgggccucgggacaccgggua

SEQ ID NO: 1073993 - RNA, 22 nt, Human
gccacagggcagaugcgcagag

SEQ ID NO: 1073994 - RNA, 22 nt, Human
acacucuugcauuaccugaaua

SEQ ID NO: 1073995 - RNA, 22 nt, Human
ugucaugccaccguuucccaga

SEQ ID NO: 1073996 - RNA, 22 nt, Human
agagccugugggagaugcagcu

SEQ ID NO: 1073997 - RNA, 22 nt, Human
ggcucuuuaacuugucuaaauu

SEQ ID NO: 1073998 - RNA, 22 nt, Human
caggcugaucagggcugggaug

SEQ ID NO: 1073999 - RNA, 22 nt, Human
cugugccuccaaguggucucug

SEQ ID NO: 1074000 - RNA, 20 nt, Human
acagcagccuugcuagaaac

SEQ ID NO: 1074001 - RNA, 22 nt, Human
acccaaaagucacucaggagca

SEQ ID NO: 1074002 - RNA, 21 nt, Human
ucuugaaaauuguagcaguuu

SEQ ID NO: 1074003 - RNA, 22 nt, Human
ugcuggaggcaguggaggugcc

SEQ ID NO: 1074004 - RNA, 22 nt, Human
cucccagagaccaagcugagaa

SEQ ID NO: 1074005 - RNA, 22 nt, Human
uuaauacagaagcaagacacug

SEQ ID NO: 1074006 - RNA, 22 nt, Human
guuuccaaccccaccaaagugc

SEQ ID NO: 1074007 - RNA, 22 nt, Human
uugaaagugauggggaagaugg

SEQ ID NO: 1074008 - RNA, 22 nt, Human
ggaauacaaaucuuuguucucu

SEQ ID NO: 1074009 - RNA, 22 nt, Human
ccugggaguggcacucacagca

SEQ ID NO: 1074010 - RNA, 22 nt, Human
acauuucucccugcaugccugc

SEQ ID NO: 1074011 - RNA, 22 nt, Human
uuugucuuaaaucuuguuacug

SEQ ID NO: 1074012 - RNA, 22 nt, Human
augcaaggacauguaaugaugu

SEQ ID NO: 1074013 - RNA, 22 nt, Human
uuaaggcacagagagguuaagu

SEQ ID NO: 1074014 - RNA, 22 nt, Human
aacaaacaaacauuuugucauc

SEQ ID NO: 1074015 - RNA, 22 nt, Human
gcuggcuguaucaccuggccag

SEQ ID NO: 1074016 - RNA, 22 nt, Human
ucaccuuagcuagaggaagaga

SEQ ID NO: 1074017 - RNA, 22 nt, Human
acagggccucagccagggcaga

SEQ ID NO: 1074018 - RNA, 22 nt, Human
uaagucauaagucaacaaagga

SEQ ID NO: 1074019 - RNA, 23 nt, Human
cauggcagcaagagcucauggcc

SEQ ID NO: 1074020 - RNA, 22 nt, Human
ggauuaagaccugucaguacac

SEQ ID NO: 1074021 - RNA, 22 nt, Human
ucucuguggcaagcaugcugcu

SEQ ID NO: 1074022 - RNA, 22 nt, Human
gugcccugucucuugucuccag

SEQ ID NO: 1074023 - RNA, 22 nt, Human
acagcuugcaauggcuuucaac

SEQ ID NO: 1074024 - RNA, 22 nt, Human
aagguuuccagugauauugugg

SEQ ID NO: 1074025 - RNA, 22 nt, Human
acuuccuggcugggugaccugg

SEQ ID NO: 1074026 - RNA, 21 nt, Human
ugcagccauucagcccuaugc

SEQ ID NO: 1074027 - RNA, 22 nt, Human
cuuuuucuucuaggugugccug

SEQ ID NO: 1074028 - RNA, 22 nt, Human
auacagaugagaucaggcauaa

SEQ ID NO: 1074029 - RNA, 22 nt, Human
aaagaaucuauauaucaccacc

SEQ ID NO: 1074030 - RNA, 22 nt, Human
cuauuuggauguuagccucagu

SEQ ID NO: 1074031 - RNA, 22 nt, Human
gaaaaccaccucccaucaagca

SEQ ID NO: 1074032 - RNA, 22 nt, Human
aaucagaaaauucaguggaauu

SEQ ID NO: 1074033 - RNA, 22 nt, Human
ugcuucugggccugguguuccc

SEQ ID NO: 1074034 - RNA, 15 nt, Human
gcagaugggggugau

SEQ ID NO: 1074035 - RNA, 22 nt, Human
ggagaguggauuccagcuguau

SEQ ID NO: 1074036 - RNA, 22 nt, Human
ucucagguuucaagacaggaaa

SEQ ID NO: 1074037 - RNA, 22 nt, Human
ucaaagaagugcaaaccucauc

SEQ ID NO: 1074038 - RNA, 22 nt, Human
uugguuuucuaauguauuaagg

SEQ ID NO: 1074039 - RNA, 19 nt, Human
cugagcaggcagguaggau

SEQ ID NO: 1074040 - RNA, 22 nt, Human
ugcacacacgcggcacaucugu

SEQ ID NO: 1074041 - RNA, 20 nt, Human
gggcagcaagacauuugaca

SEQ ID NO: 1074042 - RNA, 22 nt, Human
agucaguagauccaaacuuuug

SEQ ID NO: 1074043 - RNA, 22 nt, Human
ccucugagaccagcucugcacc

SEQ ID NO: 1074044 - RNA, 22 nt, Human
guuucaaguagcugcugauuau

SEQ ID NO: 1074045 - RNA, 22 nt, Human
aguuuucugccucuggaugcgu

SEQ ID NO: 1074046 - RNA, 22 nt, Human
ccaggccagcaggcacaccugc

SEQ ID NO: 1074047 - RNA, 23 nt, Human
agguagguuauugcugcuaccug

SEQ ID NO: 1074048 - RNA, 22 nt, Human
aauaauuacccaucuuuuugua

SEQ ID NO: 1074049 - RNA, 22 nt, Human
cucuccuggggagcacacacac

SEQ ID NO: 1074050 - RNA, 22 nt, Human
cucagaguggggcucccugagg

SEQ ID NO: 1074051 - RNA, 22 nt, Human
acacagggcugcgccugacccc

SEQ ID NO: 1074052 - RNA, 22 nt, Human
aagaagugguccuuuucuuucu

SEQ ID NO: 1074053 - RNA, 22 nt, Human
ucuggcugccaccauccucccc

SEQ ID NO: 1074054 - RNA, 22 nt, Human
aaagauuugaaauuaggcauca

SEQ ID NO: 1074055 - RNA, 22 nt, Human
agugcaaagcugcugcuguggu

SEQ ID NO: 1074056 - RNA, 22 nt, Human
uguuuuaaucucccauugcucu

SEQ ID NO: 1074057 - RNA, 22 nt, Human
uugucuguccaggcaccccaag

SEQ ID NO: 1074058 - RNA, 22 nt, Human
gagugagggccaacauccagcu

SEQ ID NO: 1074059 - RNA, 22 nt, Human
acucagaagauauaaugacuca

SEQ ID NO: 1074060 - RNA, 22 nt, Human
caaagcagugauccuuaaagga

SEQ ID NO: 1074061 - RNA, 22 nt, Human
ugacuuuuggaccucacugucc

SEQ ID NO: 1074062 - RNA, 22 nt, Human
aaugagcuagaccugcuuccuc

SEQ ID NO: 1074063 - RNA, 22 nt, Human
agugaagaggaaguggggcaca

SEQ ID NO: 1074064 - RNA, 22 nt, Human
aggaaagcucccaguagggcuc

SEQ ID NO: 1074065 - RNA, 22 nt, Human
cagacccuuuucugagaggacc

SEQ ID NO: 1074066 - RNA, 22 nt, Human
cuguagccagaagcagaaggcc

SEQ ID NO: 1074067 - RNA, 22 nt, Human
uuuccuaaggcucauuuuaaaa

SEQ ID NO: 1074068 - RNA, 22 nt, Human
acauuuaccuaguuaagucaau

SEQ ID NO: 1074069 - RNA, 22 nt, Human
ucaacacuaaagaauaaucuuu

SEQ ID NO: 1074070 - RNA, 22 nt, Human
gcuugcauuuggaauagauuaa

SEQ ID NO: 1074071 - RNA, 22 nt, Human
guuacauuaggauaauuugcug

SEQ ID NO: 1074072 - RNA, 22 nt, Human
ugaauucaccugaaagucugga

SEQ ID NO: 1074073 - RNA, 21 nt, Human
cuggacugaggagacagucgc

SEQ ID NO: 1074074 - RNA, 22 nt, Human
aagaaguuggaaaugauugaga

SEQ ID NO: 1074075 - RNA, 22 nt, Human
gcugucugcugugcacugagca

SEQ ID NO: 1074076 - RNA, 22 nt, Human
aggacagagcccuaguuucaua

SEQ ID NO: 1074077 - RNA, 22 nt, Human
uggcucagcuuacuuuugaggg

SEQ ID NO: 1074078 - RNA, 22 nt, Human
cucacagauguucuccuuuagg

SEQ ID NO: 1074079 - RNA, 22 nt, Human
agugggcagugcgcucggaugc

SEQ ID NO: 1074080 - RNA, 22 nt, Human
caggaacagcugaccugacaau

SEQ ID NO: 1074081 - RNA, 22 nt, Human
augaaauuuuaauuauaccucu

SEQ ID NO: 1074082 - RNA, 22 nt, Human
acaacuuucuggguuaucugau

SEQ ID NO: 1074083 - RNA, 22 nt, Human
ucugagugcacuaggaggggca

SEQ ID NO: 1074084 - RNA, 22 nt, Human
accagagcuuacaugcuagaaa

SEQ ID NO: 1074085 - RNA, 19 nt, Human
gcaggguguugacuguccc

SEQ ID NO: 1074086 - RNA, 22 nt, Human
gcagacagaugagggugcuggg

SEQ ID NO: 1074087 - RNA, 22 nt, Human
uugaaaggugaacaugaugcac

SEQ ID NO: 1074088 - RNA, 22 nt, Human
gaacuuuaccauuuagguaacu

SEQ ID NO: 1074089 - RNA, 22 nt, Human
ugaaggcuguuggauggggaag

SEQ ID NO: 1074090 - RNA, 22 nt, Human
guagcccaccuggggagggcga

SEQ ID NO: 1074091 - RNA, 22 nt, Human
uccaggcccagacggggugagg

SEQ ID NO: 1074092 - RNA, 21 nt, Human
uuugagaauuggucagagugc

SEQ ID NO: 1074093 - RNA, 22 nt, Human
aagaaggcuucagagcccagga

SEQ ID NO: 1074094 - RNA, 22 nt, Human
ggcucuggugaggguaggagau

SEQ ID NO: 1074095 - RNA, 22 nt, Human
gugggacucuucuuuggcagug

SEQ ID NO: 1074096 - RNA, 22 nt, Human
aaaggccacuugaaggauuuuu

SEQ ID NO: 1074097 - RNA, 22 nt, Human
cagcaucuucaugugcaucucc

SEQ ID NO: 1074098 - RNA, 22 nt, Human
gaaagcaguaaaugggucccau

SEQ ID NO: 1074099 - RNA, 22 nt, Human
aaacaaagccagggaaguuaug

SEQ ID NO: 1074100 - RNA, 22 nt, Human
uuuguucaugccuauauucuca

SEQ ID NO: 1074101 - RNA, 22 nt, Human
aaaguugugaaaccgaacaugu

SEQ ID NO: 1074102 - RNA, 22 nt, Human
ugcagaaggaggaggaaaucca

SEQ ID NO: 1074103 - RNA, 22 nt, Human
auggaaagccaguguuccauca

SEQ ID NO: 1074104 - RNA, 22 nt, Human
ccaggcucugcgcuggacaugg

SEQ ID NO: 1074105 - RNA, 22 nt, Human
aguggagguuauugaguuaagg

SEQ ID NO: 1074106 - RNA, 22 nt, Human
ucaugcaaggcugaaacauggu

SEQ ID NO: 1074107 - RNA, 22 nt, Human
gaggcugcuguuagcccugggc

SEQ ID NO: 1074108 - RNA, 22 nt, Human
gcagaaggauccgcaggugcaa

SEQ ID NO: 1074109 - RNA, 22 nt, Human
uccagcagaaaagagguaggga

SEQ ID NO: 1074110 - RNA, 22 nt, Human
aggcucaguauagcuggcaagu

SEQ ID NO: 1074111 - RNA, 22 nt, Human
gcagaaggucuggcacuucagg

SEQ ID NO: 1074112 - RNA, 22 nt, Human
cugacuguaauucuguucuuaa

SEQ ID NO: 1074113 - RNA, 22 nt, Human
ccugccucaggacucugcauau

SEQ ID NO: 1074114 - RNA, 22 nt, Human
uacuuagagcgauaauuuauac

SEQ ID NO: 1074115 - RNA, 22 nt, Human
gcagcuguguaaugagcccaca

SEQ ID NO: 1074116 - RNA, 22 nt, Human
gcaaagaaaugucagugagagg

SEQ ID NO: 1074117 - RNA, 23 nt, Human
gaagccacacaaaggucgccaag

SEQ ID NO: 1074118 - RNA, 22 nt, Human
ucuuuagaguuaacaauaauga

SEQ ID NO: 1074119 - RNA, 22 nt, Human
cuucccagacgggguggcagcc

SEQ ID NO: 1074120 - RNA, 22 nt, Human
gagaggugaauguggaugccac

SEQ ID NO: 1074121 - RNA, 22 nt, Human
cagucccaugagcccagaacau

SEQ ID NO: 1074122 - RNA, 22 nt, Human
aaacuugaggcaaugaaggugu

SEQ ID NO: 1074123 - RNA, 22 nt, Human
caaugucauuucacugggcuua

SEQ ID NO: 1074124 - RNA, 22 nt, Human
uuuauucuugagagugagaaga

SEQ ID NO: 1074125 - RNA, 22 nt, Human
aucaguuugauaauaaggcuug

SEQ ID NO: 1074126 - RNA, 22 nt, Human
uucccucccccagccuggcagg

SEQ ID NO: 1074127 - RNA, 22 nt, Human
uacauguaauuuucauaguaag

SEQ ID NO: 1074128 - RNA, 22 nt, Human
guucacaucacuucacugaacc

SEQ ID NO: 1074129 - RNA, 22 nt, Human
ggagggcaucaaucaggccugg

SEQ ID NO: 1074130 - RNA, 22 nt, Human
agccccacacucucucugagaa

SEQ ID NO: 1074131 - RNA, 22 nt, Human
agcagggcugcggccccaccac

SEQ ID NO: 1074132 - RNA, 18 nt, Human
gcuucauggaaggguugu

SEQ ID NO: 1074133 - RNA, 22 nt, Human
uuugcauuauauuuauagaaga

SEQ ID NO: 1074134 - RNA, 22 nt, Human
ggaucauuaacacauccaucac

SEQ ID NO: 1074135 - RNA, 22 nt, Human
aucuuauugcuguugccagaua

SEQ ID NO: 1074136 - RNA, 22 nt, Human
gcugcuggcacuggagugagcc

SEQ ID NO: 1074137 - RNA, 22 nt, Human
uagggcagagcuuguacacgau

SEQ ID NO: 1074138 - RNA, 22 nt, Human
agcuguggggcaggcagcgagg

SEQ ID NO: 1074139 - RNA, 22 nt, Human
cccugggacccgcugcagaggc

SEQ ID NO: 1074140 - RNA, 22 nt, Human
cacagcugcacagaggaggugc

SEQ ID NO: 1074141 - RNA, 22 nt, Human
cggcugagcagugcugauggaa

SEQ ID NO: 1074142 - RNA, 22 nt, Human
aguguuaagagaaaauucugcu

SEQ ID NO: 1074143 - RNA, 22 nt, Human
uccucucagugugguuguggga

SEQ ID NO: 1074144 - RNA, 22 nt, Human
guggcuuggaccagucacagug

SEQ ID NO: 1074145 - RNA, 22 nt, Human
uguccuuuaugaaaugguguuu

SEQ ID NO: 1074146 - RNA, 22 nt, Human
aaggcaguuugggccaccaucu

SEQ ID NO: 1074147 - RNA, 22 nt, Human
agaucaaagccaugagagauuu

SEQ ID NO: 1074148 - RNA, 22 nt, Human
cagcaacucuccugugcucaaa

SEQ ID NO: 1074149 - RNA, 22 nt, Human
cauugcuuugugcauauuuaaa

SEQ ID NO: 1074150 - RNA, 22 nt, Human
accauuuuggguauuuucagag

SEQ ID NO: 1074151 - RNA, 22 nt, Human
acauacuuuuuaaaagauugcu

SEQ ID NO: 1074152 - RNA, 22 nt, Human
ugucccucauugacgcugugcc

SEQ ID NO: 1074153 - RNA, 22 nt, Human
cugagccaaccacagcaggagc

SEQ ID NO: 1074154 - RNA, 22 nt, Human
agcugaagaaaugggaagcauu

SEQ ID NO: 1074155 - RNA, 22 nt, Human
uugcaacauuguaaguuuauau

SEQ ID NO: 1074156 - RNA, 22 nt, Human
ccagccugaaaugccucauccu

SEQ ID NO: 1074157 - RNA, 22 nt, Human
cccaggaggcagagcuugcagu

SEQ ID NO: 1074158 - RNA, 22 nt, Human
gaugaaaugugaaaguucuggg

SEQ ID NO: 1074159 - RNA, 22 nt, Human
gccaggugggagacagacagca

SEQ ID NO: 1074160 - RNA, 22 nt, Human
gaaaauaguucaucacaaugau

SEQ ID NO: 1074161 - RNA, 21 nt, Human
acugagagauguuggaucaua

SEQ ID NO: 1074162 - RNA, 22 nt, Human
ugagcaggagauaaacagguag

SEQ ID NO: 1074163 - RNA, 22 nt, Human
auugacaagcaguaugucuuag

SEQ ID NO: 1074164 - RNA, 22 nt, Human
ggcuuugccuggaauuuccuug

SEQ ID NO: 1074165 - RNA, 20 nt, Human
ggcaggugcucgcuuggucu

SEQ ID NO: 1074166 - RNA, 22 nt, Human
gccucuggggcagcugagucau

SEQ ID NO: 1074167 - RNA, 19 nt, Human
ccucccacggauuccuucc

SEQ ID NO: 1074168 - RNA, 23 nt, Human
ccaggcaguagcuauugaaguga

SEQ ID NO: 1074169 - RNA, 22 nt, Human
uggaacacaagucauugagggg

SEQ ID NO: 1074170 - RNA, 21 nt, Human
agcagaggggacauguuugau

SEQ ID NO: 1074171 - RNA, 22 nt, Human
caggauccuggcugcauggacg

SEQ ID NO: 1074172 - RNA, 22 nt, Human
ggaaagagggacccagcuuggu

SEQ ID NO: 1074173 - RNA, 22 nt, Human
acagguggagugguuagcaggc

SEQ ID NO: 1074174 - RNA, 22 nt, Human
auuucauccagaguccuauuag

SEQ ID NO: 1074175 - RNA, 22 nt, Human
ccugggcaacauagggagaccc

SEQ ID NO: 1074176 - RNA, 22 nt, Human
uuaucaagggagaaacaggagg

SEQ ID NO: 1074177 - RNA, 22 nt, Human
agggcucuguccccagaggccc

SEQ ID NO: 1074178 - RNA, 22 nt, Human
agaggagcugggaggcccucgu

SEQ ID NO: 1074179 - RNA, 19 nt, Human
aaaugugaugguacaauuc

SEQ ID NO: 1074180 - RNA, 22 nt, Human
agcuggcagucauccuagugag

SEQ ID NO: 1074181 - RNA, 22 nt, Human
caguuucuuggaugccaauuuc

SEQ ID NO: 1074182 - RNA, 22 nt, Human
cccagcagaccgcugugauggc

SEQ ID NO: 1074183 - RNA, 22 nt, Human
aaugugguuaaaauuugguugu

SEQ ID NO: 1074184 - RNA, 22 nt, Human
ucacagaagggaaagaugccaa

SEQ ID NO: 1074185 - RNA, 22 nt, Human
cugagagaucaagccacaggau

SEQ ID NO: 1074186 - RNA, 22 nt, Human
uguacagaaggcacuaagguca

SEQ ID NO: 1074187 - RNA, 22 nt, Human
cugagaguguggcuuccaggcc

SEQ ID NO: 1074188 - RNA, 22 nt, Human
aacaaaagccgaaguagguguc

SEQ ID NO: 1074189 - RNA, 22 nt, Human
gagccugagugcugccuccccu

SEQ ID NO: 1074190 - RNA, 22 nt, Human
cagcccagccuugucucuuuau

SEQ ID NO: 1074191 - RNA, 22 nt, Human
auuucacaaagaacagaugcag

SEQ ID NO: 1074192 - RNA, 22 nt, Human
gggggaagaggcaugaaguccu

SEQ ID NO: 1074193 - RNA, 22 nt, Human
augauauagagaguagauuaaa

SEQ ID NO: 1074194 - RNA, 22 nt, Human
gcagaucaauugauuguucacu

SEQ ID NO: 1074195 - RNA, 22 nt, Human
guuccaaagucucugagcugag

SEQ ID NO: 1074196 - RNA, 23 nt, Human
ccaaagucgaagucuaguccaga

SEQ ID NO: 1074197 - RNA, 22 nt, Human
ccucuuugugccugcaggcugc

SEQ ID NO: 1074198 - RNA, 22 nt, Human
ggcagguguggugaccagagau

SEQ ID NO: 1074199 - RNA, 20 nt, Human
ggcugcugugggcagagagg

SEQ ID NO: 1074200 - RNA, 22 nt, Human
agcaaagaaauggaggcucaga

SEQ ID NO: 1074201 - RNA, 22 nt, Human
gcugugcccagcuccagcucug

SEQ ID NO: 1074202 - RNA, 22 nt, Human
aaguaacaggcaugugaaugac

SEQ ID NO: 1074203 - RNA, 22 nt, Human
cugaggcucccucgggucugcu

SEQ ID NO: 1074204 - RNA, 22 nt, Human
uuggaagacagugaaacagcac

SEQ ID NO: 1074205 - RNA, 22 nt, Human
gcccagaagugacucagcacug

SEQ ID NO: 1074206 - RNA, 22 nt, Human
acaccacaaguaacucuuuucc

SEQ ID NO: 1074207 - RNA, 22 nt, Human
aggagcugacuuguaaagcauu

SEQ ID NO: 1074208 - RNA, 22 nt, Human
gggacuucauagcuaggcacuu

SEQ ID NO: 1074209 - RNA, 22 nt, Human
uauuucugucagccagauaugg

SEQ ID NO: 1074210 - RNA, 22 nt, Human
cauuucaauuauuugcucuucu

SEQ ID NO: 1074211 - RNA, 18 nt, Human
ucucagggcauacccaga

SEQ ID NO: 1074212 - RNA, 22 nt, Human
uguacaguguagucaugagguu

SEQ ID NO: 1074213 - RNA, 22 nt, Human
acacauuauagagaguauaaua

SEQ ID NO: 1074214 - RNA, 22 nt, Human
aauucuagcccaggcaaaacua

SEQ ID NO: 1074215 - RNA, 22 nt, Human
auauuuuggggugaugugcauc

SEQ ID NO: 1074216 - RNA, 22 nt, Human
gaaguuaguaccugguauacuu

SEQ ID NO: 1074217 - RNA, 22 nt, Human
agggaguguuacauaauggguu

SEQ ID NO: 1074218 - RNA, 22 nt, Human
auugauuuagcucaagacacau

SEQ ID NO: 1074219 - RNA, 22 nt, Human
ucucuucauagugacacccauc

SEQ ID NO: 1074220 - RNA, 22 nt, Human
gcugggcaccggagagacccca

SEQ ID NO: 1074221 - RNA, 22 nt, Human
gaacaguuucccuguagaaaau

SEQ ID NO: 1074222 - RNA, 22 nt, Human
gaggggcuggguagggcaaccc

SEQ ID NO: 1074223 - RNA, 22 nt, Human
augaaauggugguuuuccauuu

SEQ ID NO: 1074224 - RNA, 22 nt, Human
ggcaggagauaaaauauuaguu

SEQ ID NO: 1074225 - RNA, 22 nt, Human
uaugugcaaauuaauugcuaga

SEQ ID NO: 1074226 - RNA, 22 nt, Human
cuucuuuacuuucuagaaauaa

SEQ ID NO: 1074227 - RNA, 22 nt, Human
gaauguuuaaggaaggcguggc

SEQ ID NO: 1074228 - RNA, 22 nt, Human
gaggucaggcuugcagcagggu

SEQ ID NO: 1074229 - RNA, 22 nt, Human
agggaaagguagugaggucaca

SEQ ID NO: 1074230 - RNA, 22 nt, Human
cuccucuggcuuccuggaggca

SEQ ID NO: 1074231 - RNA, 22 nt, Human
agccuccaucccaugcacaaag

SEQ ID NO: 1074232 - RNA, 22 nt, Human
agaauuuaggaugcaugugaau

SEQ ID NO: 1074233 - RNA, 22 nt, Human
aaaucuguuguaauguuuuuua

SEQ ID NO: 1074234 - RNA, 22 nt, Human
ccuccugguccagcaucucuuu

SEQ ID NO: 1074235 - RNA, 22 nt, Human
auguaaaagauuauuuuccugu

SEQ ID NO: 1074236 - RNA, 21 nt, Human
ggcuaggaugcugggguuucc

SEQ ID NO: 1074237 - RNA, 22 nt, Human
aggcaguuguugcugagcagcu

SEQ ID NO: 1074238 - RNA, 22 nt, Human
auauuacauaaacaugagugaa

SEQ ID NO: 1074239 - RNA, 17 nt, Human
gagauuuucguccugaa

SEQ ID NO: 1074240 - RNA, 22 nt, Human
cagcaacauauaugaaacugug

SEQ ID NO: 1074241 - RNA, 22 nt, Human
ucagcugccccaguggccccag

SEQ ID NO: 1074242 - RNA, 22 nt, Human
cagaaauguacugacaugcagu

SEQ ID NO: 1074243 - RNA, 22 nt, Human
uccaggaaggacuaaugguuug

SEQ ID NO: 1074244 - RNA, 22 nt, Human
cacugaaggacaguaggaaggg

SEQ ID NO: 1074245 - RNA, 22 nt, Human
gagcaguggucugaucuucuaa

SEQ ID NO: 1074246 - RNA, 22 nt, Human
gcugggagcaaagccaugcaua

SEQ ID NO: 1074247 - RNA, 22 nt, Human
gaggcagcaauaaaaagaauuu

SEQ ID NO: 1074248 - RNA, 22 nt, Human
ucaaagucuaucuguaauuacu

SEQ ID NO: 1074249 - RNA, 22 nt, Human
gaggacagcuuagggcuuccug

SEQ ID NO: 1074250 - RNA, 21 nt, Human
uugauuuuaggaaguuuguca

SEQ ID NO: 1074251 - RNA, 22 nt, Human
cuggcucacuagcccugcccug

SEQ ID NO: 1074252 - RNA, 22 nt, Human
aaucauaauucaaauaagcuua

SEQ ID NO: 1074253 - RNA, 22 nt, Human
aauagcauccuaaaacauacuu

SEQ ID NO: 1074254 - RNA, 22 nt, Human
aagcagagaccggcuaauggag

SEQ ID NO: 1074255 - RNA, 22 nt, Human
uucaggaucaaguugccaguag

SEQ ID NO: 1074256 - RNA, 22 nt, Human
aaaguucuaaaacucuuuguga

SEQ ID NO: 1074257 - RNA, 22 nt, Human
uggaaggcaacggagugagcug

SEQ ID NO: 1074258 - RNA, 22 nt, Human
ccugguguugugaaguagccgu

SEQ ID NO: 1074259 - RNA, 22 nt, Human
gaguguucccacaccccaguug

SEQ ID NO: 1074260 - RNA, 22 nt, Human
cgcaggcuggcgcggaguggca

SEQ ID NO: 1074261 - RNA, 23 nt, Human
ucagagaaguuguaggcugggga

SEQ ID NO: 1074262 - RNA, 22 nt, Human
cuggccuguccugacccagccu

SEQ ID NO: 1074263 - RNA, 21 nt, Human
aucaccagcagaagcugcaga

SEQ ID NO: 1074264 - RNA, 22 nt, Human
cagggacauuuccaagagaauu

SEQ ID NO: 1074265 - RNA, 22 nt, Human
uucaaacuguguaauuuauaaa

SEQ ID NO: 1074266 - RNA, 22 nt, Human
cugccgaguacagccauagaaa

SEQ ID NO: 1074267 - RNA, 22 nt, Human
cuccucacacccacugcaacca

SEQ ID NO: 1074268 - RNA, 23 nt, Human
agaagcagcuucuggaguaucgg

SEQ ID NO: 1074269 - RNA, 22 nt, Human
uucuuauuucccccuucaucau

SEQ ID NO: 1074270 - RNA, 22 nt, Human
uuuauuauucucuggagaaugu

SEQ ID NO: 1074271 - RNA, 22 nt, Human
cacucaggguacaauggagggc

SEQ ID NO: 1074272 - RNA, 22 nt, Human
cagggacagccuugggguggcg

SEQ ID NO: 1074273 - RNA, 22 nt, Human
ggugggcacauucagucucugu

SEQ ID NO: 1074274 - RNA, 22 nt, Human
aaacagcugucauuguuuuaaa

SEQ ID NO: 1074275 - RNA, 22 nt, Human
aaagcuggccucucaggcuuua

SEQ ID NO: 1074276 - RNA, 22 nt, Human
cccugcacacucgugucuugac

SEQ ID NO: 1074277 - RNA, 20 nt, Human
aggccaggaaauguaguucu

SEQ ID NO: 1074278 - RNA, 22 nt, Human
acuguguggaccacucugaggc

SEQ ID NO: 1074279 - RNA, 22 nt, Human
gccaggagagcuccuucagguu

SEQ ID NO: 1074280 - RNA, 22 nt, Human
cguguggucccggcaaggcaag

SEQ ID NO: 1074281 - RNA, 22 nt, Human
aaaaccuucagguuuggaguuu

SEQ ID NO: 1074282 - RNA, 22 nt, Human
gagugcaguuggggugagggga

SEQ ID NO: 1074283 - RNA, 22 nt, Human
guucuucaucuuaaccaucugu

SEQ ID NO: 1074284 - RNA, 22 nt, Human
aggcagaaaauagucauccaaa

SEQ ID NO: 1074285 - RNA, 22 nt, Human
uuuucaucucugcuuuguaccu

SEQ ID NO: 1074286 - RNA, 22 nt, Human
acagugacguuuauuugagacg

SEQ ID NO: 1074287 - RNA, 22 nt, Human
uagcagaggcugucugacuuaa

SEQ ID NO: 1074288 - RNA, 22 nt, Human
acauguuuaaguuuguuauaug

SEQ ID NO: 1074289 - RNA, 21 nt, Human
cacaccaaacaggaacaggga

SEQ ID NO: 1074290 - RNA, 22 nt, Human
gaaaagggcaagagagagggca

SEQ ID NO: 1074291 - RNA, 22 nt, Human
cuggccuagcucucugcuugaa

SEQ ID NO: 1074292 - RNA, 22 nt, Human
uguucuuuggcuucacagcucu

SEQ ID NO: 1074293 - RNA, 22 nt, Human
ccugggacuuggucugggguuu

SEQ ID NO: 1074294 - RNA, 22 nt, Human
uuauugaaauggaagcuauaac

SEQ ID NO: 1074295 - RNA, 22 nt, Human
caggaggagcauuagcgucuca

SEQ ID NO: 1074296 - RNA, 22 nt, Human
uuaugggagcaauuggggaggu

SEQ ID NO: 1074297 - RNA, 22 nt, Human
ugaaaguugcacauaagagaau

SEQ ID NO: 1074298 - RNA, 22 nt, Human
guacucaguaauauaacauauu

SEQ ID NO: 1074299 - RNA, 22 nt, Human
caaaugaauagggagugugaug

SEQ ID NO: 1074300 - RNA, 22 nt, Human
aauuugauucagcaaauguuca

SEQ ID NO: 1074301 - RNA, 22 nt, Human
cacugggcaauucugagccuaa

SEQ ID NO: 1074302 - RNA, 22 nt, Human
ugucccagguccuagaugacca

SEQ ID NO: 1074303 - RNA, 22 nt, Human
ucaacacuggcuacaguuaugc

SEQ ID NO: 1074304 - RNA, 22 nt, Human
agccagagcugaugucauucuc

SEQ ID NO: 1074305 - RNA, 22 nt, Human
acuuggagggagcuggguggaa

SEQ ID NO: 1074306 - RNA, 22 nt, Human
cugcugggcuccucaugugacu

SEQ ID NO: 1074307 - RNA, 21 nt, Human
aggaagaucuggaggucggcg

SEQ ID NO: 1074308 - RNA, 22 nt, Human
uuaaagcaccuccuuggaugug

SEQ ID NO: 1074309 - RNA, 22 nt, Human
ucugagggcuugaggggaagua

SEQ ID NO: 1074310 - RNA, 22 nt, Human
caggagccagcugucccaacca

SEQ ID NO: 1074311 - RNA, 22 nt, Human
gcaguggcuaagcucgcaugca

SEQ ID NO: 1074312 - RNA, 18 nt, Human
auacaagcucuguuacuu

SEQ ID NO: 1074313 - RNA, 22 nt, Human
ggccucagugggccgcugcagg

SEQ ID NO: 1074314 - RNA, 22 nt, Human
uuacaaguauuuaagaugcugu

SEQ ID NO: 1074315 - RNA, 22 nt, Human
agacaucauguuacagauuaag

SEQ ID NO: 1074316 - RNA, 22 nt, Human
ccugccugggcucacuugccag

SEQ ID NO: 1074317 - RNA, 22 nt, Human
aagacaugcaguuuguuccauu

SEQ ID NO: 1074318 - RNA, 22 nt, Human
aauacuauguugugacacauga

SEQ ID NO: 1074319 - RNA, 22 nt, Human
cucccuggcagccgcacuccug

SEQ ID NO: 1074320 - RNA, 22 nt, Human
gaggaaagagucaaaucugaag

SEQ ID NO: 1074321 - RNA, 15 nt, Human
uuuaauauggaguua

SEQ ID NO: 1074322 - RNA, 17 nt, Human
aguguuuccuuaucauu

SEQ ID NO: 1074323 - RNA, 22 nt, Human
uggcacugggaugcuacuguua

SEQ ID NO: 1074324 - RNA, 22 nt, Human
ggcagcagaacuggcccuguau

SEQ ID NO: 1074325 - RNA, 22 nt, Human
agccagugaugaagacucugga

SEQ ID NO: 1074326 - RNA, 22 nt, Human
cucugcccgugccuuucccagu

SEQ ID NO: 1074327 - RNA, 22 nt, Human
caugaaauauuaguaacuguuu

SEQ ID NO: 1074328 - RNA, 22 nt, Human
agcaggggcuccuccacagcca

SEQ ID NO: 1074329 - RNA, 22 nt, Human
gauacuuuccauccaaaugcau

SEQ ID NO: 1074330 - RNA, 22 nt, Human
cugccaggccucaucccagcca

SEQ ID NO: 1074331 - RNA, 22 nt, Human
ggcuccugaugcucagauuuca

SEQ ID NO: 1074332 - RNA, 22 nt, Human
cuccacagccccuccaguggca

SEQ ID NO: 1074333 - RNA, 19 nt, Human
aaggcagaaguuggauaug

SEQ ID NO: 1074334 - RNA, 22 nt, Human
uucauucaagggguuccugauu

SEQ ID NO: 1074335 - RNA, 22 nt, Human
uagugcuuggcccuaccagaua

SEQ ID NO: 1074336 - RNA, 22 nt, Human
acagcagaccacuacuaguagg

SEQ ID NO: 1074337 - RNA, 22 nt, Human
uaaaucacccaucuccuaaucu

SEQ ID NO: 1074338 - RNA, 22 nt, Human
ucacuuaaaaauucuaguuaug

SEQ ID NO: 1074339 - RNA, 22 nt, Human
uacagguaaaauuaucagaaac

SEQ ID NO: 1074340 - RNA, 22 nt, Human
cugggagcugaggcugacgcug

SEQ ID NO: 1074341 - RNA, 22 nt, Human
gggccuggggugacguaccccu

SEQ ID NO: 1074342 - RNA, 22 nt, Human
gcagaggaggacccaggaauua

SEQ ID NO: 1074343 - RNA, 22 nt, Human
aucuggcucucucauuuacaaa

SEQ ID NO: 1074344 - RNA, 22 nt, Human
gccuggcacugggcuccuggcc

SEQ ID NO: 1074345 - RNA, 22 nt, Human
augaauugaggaaaacagucgu

SEQ ID NO: 1074346 - RNA, 22 nt, Human
cauccaauguccuauuaagacu

SEQ ID NO: 1074347 - RNA, 22 nt, Human
uuuucucuacaaaauaaccagc

SEQ ID NO: 1074348 - RNA, 22 nt, Human
acaggggcaggcaggacccuuu

SEQ ID NO: 1074349 - RNA, 22 nt, Human
cccagccucuggauucugcccu

SEQ ID NO: 1074350 - RNA, 22 nt, Human
ccaagggcucugacuugccugc

SEQ ID NO: 1074351 - RNA, 22 nt, Human
uuacuuugcuuucucauuacag

SEQ ID NO: 1074352 - RNA, 22 nt, Human
aaggugucacugggacaggaaa

SEQ ID NO: 1074353 - RNA, 22 nt, Human
ugcuuuauguuaucagaagggu

SEQ ID NO: 1074354 - RNA, 22 nt, Human
acagggaccugugagcuccaua

SEQ ID NO: 1074355 - RNA, 22 nt, Human
uucaaacucuugcucugcuagu

SEQ ID NO: 1074356 - RNA, 22 nt, Human
ugaagccaccgaaccagaagag

SEQ ID NO: 1074357 - RNA, 22 nt, Human
cuggcagcucugagucccuucu

SEQ ID NO: 1074358 - RNA, 20 nt, Human
agagugagacuccaucucag

SEQ ID NO: 1074359 - RNA, 22 nt, Human
aaaaguuugugcaaacacucag

SEQ ID NO: 1074360 - RNA, 22 nt, Human
agaaagggagcguggaucaauu

SEQ ID NO: 1074361 - RNA, 22 nt, Human
gggagcugagcuggaagagaau

SEQ ID NO: 1074362 - RNA, 22 nt, Human
gacaugcaacaauuuggcauuu

SEQ ID NO: 1074363 - RNA, 21 nt, Human
gucuuucuaccucuauguggc

SEQ ID NO: 1074364 - RNA, 22 nt, Human
aggagcagaacuguuguggagg

SEQ ID NO: 1074365 - RNA, 22 nt, Human
aauguuaaguuuagauuauaac

SEQ ID NO: 1074366 - RNA, 19 nt, Human
ucugccugcuuguaggggc

SEQ ID NO: 1074367 - RNA, 22 nt, Human
gaggucaggggagaggcugaug

SEQ ID NO: 1074368 - RNA, 22 nt, Human
aucugcuuguugcaugucuguu

SEQ ID NO: 1074369 - RNA, 22 nt, Human
gcugcugcgcuugucuacuguu

SEQ ID NO: 1074370 - RNA, 22 nt, Human
ucagcacuauacauuuugaaua

SEQ ID NO: 1074371 - RNA, 22 nt, Human
aggacagaaucuauauucaguu

SEQ ID NO: 1074372 - RNA, 22 nt, Human
auuuaauuuacauuugacagag

SEQ ID NO: 1074373 - RNA, 22 nt, Human
cccacagguccccaugaacucg

SEQ ID NO: 1074374 - RNA, 22 nt, Human
ucugaggccuugggacagaagu

SEQ ID NO: 1074375 - RNA, 22 nt, Human
auucuauagacagaaggucaau

SEQ ID NO: 1074376 - RNA, 22 nt, Human
gaaaaaggauaaauacaguguu

SEQ ID NO: 1074377 - RNA, 22 nt, Human
uggccuuggcagugagaagagu

SEQ ID NO: 1074378 - RNA, 22 nt, Human
uugcccugcguuaccaucucuu

SEQ ID NO: 1074379 - RNA, 22 nt, Human
uacagagacccacaagagacug

SEQ ID NO: 1074380 - RNA, 22 nt, Human
augcauauugauuauagauuca

SEQ ID NO: 1074381 - RNA, 22 nt, Human
uagaaacaaguuucucuuuggg

SEQ ID NO: 1074382 - RNA, 22 nt, Human
gucauuuucuagaauuauuuga

SEQ ID NO: 1074383 - RNA, 22 nt, Human
gcauuucaaaauuccaggcaag

SEQ ID NO: 1074384 - RNA, 22 nt, Human
cagaagaaaguggggagacaag

SEQ ID NO: 1074385 - RNA, 22 nt, Human
ccagcucaucucagugaaaugc

SEQ ID NO: 1074386 - RNA, 22 nt, Human
cacaauuuggugcuaaagaaag

SEQ ID NO: 1074387 - RNA, 22 nt, Human
uggccucugugggagcugagca

SEQ ID NO: 1074388 - RNA, 22 nt, Human
cauuucaaaagaauugccagaa

SEQ ID NO: 1074389 - RNA, 22 nt, Human
cugugcaaugccuaaucacaaa

SEQ ID NO: 1074390 - RNA, 22 nt, Human
ucagccugcgucauggugacac

SEQ ID NO: 1074391 - RNA, 22 nt, Human
auaaaguucugcuggcauauau

SEQ ID NO: 1074392 - RNA, 22 nt, Human
cagguaacaugauaaaacuuac

SEQ ID NO: 1074393 - RNA, 19 nt, Human
gcagagucaagagcugcug

SEQ ID NO: 1074394 - RNA, 22 nt, Human
ggaugcaggaguugaagaagga

SEQ ID NO: 1074395 - RNA, 22 nt, Human
ugaaaaggguagaucccuaagu

SEQ ID NO: 1074396 - RNA, 22 nt, Human
gaauuugaaaagugaugggaau

SEQ ID NO: 1074397 - RNA, 22 nt, Human
uacuuguuaucaucuuuuccuu

SEQ ID NO: 1074398 - RNA, 22 nt, Human
agggcugccugcucugcauuga

SEQ ID NO: 1074399 - RNA, 21 nt, Human
ggaagggguccucccaacagu

SEQ ID NO: 1074400 - RNA, 22 nt, Human
guauucuugguuaucaaaauac

SEQ ID NO: 1074401 - RNA, 22 nt, Human
uuccagcccgcgacuuguucag

SEQ ID NO: 1074402 - RNA, 22 nt, Human
gugggcuucccuuaagccagag

SEQ ID NO: 1074403 - RNA, 23 nt, Human
caagcugcaguuugguugguggg

SEQ ID NO: 1074404 - RNA, 22 nt, Human
ucuaggaaccugacaucucuca

SEQ ID NO: 1074405 - RNA, 22 nt, Human
caaaaaacacagaugucugugu

SEQ ID NO: 1074406 - RNA, 22 nt, Human
uguggcaggcaagauguacaga

SEQ ID NO: 1074407 - RNA, 22 nt, Human
aucuuacacgauaacuguuagu

SEQ ID NO: 1074408 - RNA, 22 nt, Human
ugaaugugaugcuaaacauaug

SEQ ID NO: 1074409 - RNA, 22 nt, Human
cagggccugccugguuccugga

SEQ ID NO: 1074410 - RNA, 22 nt, Human
aucuagaaaguguugaagauca

SEQ ID NO: 1074411 - RNA, 22 nt, Human
gacauaaaauucaauaauuugu

SEQ ID NO: 1074412 - RNA, 17 nt, Human
ggcuucagggagcuggg

SEQ ID NO: 1074413 - RNA, 22 nt, Human
cacaugcaucugucauguuugg

SEQ ID NO: 1074414 - RNA, 22 nt, Human
gggcagcucucacagcagccaa

SEQ ID NO: 1074415 - RNA, 22 nt, Human
agagaucaguuaaaaucuuuuu

SEQ ID NO: 1074416 - RNA, 22 nt, Human
uaugaaauuucuaguucugcuu

SEQ ID NO: 1074417 - RNA, 22 nt, Human
uugcauugaaugcacauuuuua

SEQ ID NO: 1074418 - RNA, 22 nt, Human
ggaugcuuagguuguuuuauua

SEQ ID NO: 1074419 - RNA, 22 nt, Human
ucauugcagcuucagguguuca

SEQ ID NO: 1074420 - RNA, 22 nt, Human
cuacagaagaaacuaucacuau

SEQ ID NO: 1074421 - RNA, 22 nt, Human
uuaacaauagaguuucuucagg

SEQ ID NO: 1074422 - RNA, 22 nt, Human
ugcagcugaggccagcuaugcc

SEQ ID NO: 1074423 - RNA, 22 nt, Human
aacuuucuaaagucaaauuggu

SEQ ID NO: 1074424 - RNA, 22 nt, Human
cagcuggccugaucccuguggc

SEQ ID NO: 1074425 - RNA, 22 nt, Human
gccuggcuccuaagagcacaac

SEQ ID NO: 1074426 - RNA, 22 nt, Human
ugcuaacuauuccuaaagauca

SEQ ID NO: 1074427 - RNA, 22 nt, Human
uggcagagaauaaaucuugacu

SEQ ID NO: 1074428 - RNA, 23 nt, Human
uuguauuuuuaguagagacaggg

SEQ ID NO: 1074429 - RNA, 22 nt, Human
caggugccgggaaugcagcaau

SEQ ID NO: 1074430 - RNA, 22 nt, Human
augcacaugaggcaagcaaaau

SEQ ID NO: 1074431 - RNA, 20 nt, Human
ugaaaaggucaggagacaug

SEQ ID NO: 1074432 - RNA, 22 nt, Human
ccaggaguuugaggcugcagug

SEQ ID NO: 1074433 - RNA, 23 nt, Human
ucuuuucaaugguucuuuaugug

SEQ ID NO: 1074434 - RNA, 22 nt, Human
ccauaaggagccagacauucca

SEQ ID NO: 1074435 - RNA, 22 nt, Human
gccccacagccugcggucucag

SEQ ID NO: 1074436 - RNA, 22 nt, Human
acauuuuacaguugucuggcua

SEQ ID NO: 1074437 - RNA, 16 nt, Human
ccccucaggaaguaca

SEQ ID NO: 1074438 - RNA, 22 nt, Human
uagacagagugaagacaagugg

SEQ ID NO: 1074439 - RNA, 22 nt, Human
auuauuucucacucacauaaua

SEQ ID NO: 1074440 - RNA, 22 nt, Human
ugggucagaaucagagaguugc

SEQ ID NO: 1074441 - RNA, 22 nt, Human
gauggcagguaguggucucauc

SEQ ID NO: 1074442 - RNA, 21 nt, Human
gcugcaaauucuaacaauuau

SEQ ID NO: 1074443 - RNA, 22 nt, Human
uggcugggagcuggaacugggc

SEQ ID NO: 1074444 - RNA, 22 nt, Human
uaagaauagucccuagaugugu

SEQ ID NO: 1074445 - RNA, 22 nt, Human
acaugcauacaagcacauguag

SEQ ID NO: 1074446 - RNA, 22 nt, Human
ucucugauguauaucagagaac

SEQ ID NO: 1074447 - RNA, 22 nt, Human
ugggacagagugagcuuuggcc

SEQ ID NO: 1074448 - RNA, 22 nt, Human
cagagagggcggcccuggcuuc

SEQ ID NO: 1074449 - RNA, 22 nt, Human
acaguauuugcgauacugauga

SEQ ID NO: 1074450 - RNA, 22 nt, Human
cccugccuuguuggagccuaug

SEQ ID NO: 1074451 - RNA, 22 nt, Human
uggcucagagcagggacucugg

SEQ ID NO: 1074452 - RNA, 22 nt, Human
ucugaacauccuacaacauuuu

SEQ ID NO: 1074453 - RNA, 22 nt, Human
cucaagacugaucgcaguggaa

SEQ ID NO: 1074454 - RNA, 22 nt, Human
acacauuucucccagucuccau

SEQ ID NO: 1074455 - RNA, 22 nt, Human
aaauuccaguucuuuuaccugc

SEQ ID NO: 1074456 - RNA, 19 nt, Human
gggaccugacuaauuggca

SEQ ID NO: 1074457 - RNA, 22 nt, Human
aagccagcauuuucccauuccu

SEQ ID NO: 1074458 - RNA, 22 nt, Human
uggcuuucucccccagcuucuc

SEQ ID NO: 1074459 - RNA, 22 nt, Human
acagauaauuagcauaaaugcu

SEQ ID NO: 1074460 - RNA, 22 nt, Human
gagccagguuugaaucucaguc

SEQ ID NO: 1074461 - RNA, 22 nt, Human
aucaggauucaccccagagcug

SEQ ID NO: 1074462 - RNA, 22 nt, Human
cagcugagaaggucugaucagg

SEQ ID NO: 1074463 - RNA, 22 nt, Human
aucacaaucuucaaaucgauuc

SEQ ID NO: 1074464 - RNA, 22 nt, Human
caaaugcagauucaggaguucu

SEQ ID NO: 1074465 - RNA, 22 nt, Human
aauucuucaagugcuuuggaga

SEQ ID NO: 1074466 - RNA, 21 nt, Human
ucccagggccaggugccauca

SEQ ID NO: 1074467 - RNA, 22 nt, Human
ugccugccaugcagaaagcuga

SEQ ID NO: 1074468 - RNA, 22 nt, Human
gucaacauuuacugcccuggcc

SEQ ID NO: 1074469 - RNA, 22 nt, Human
ccuauuuguaggcugggccagu

SEQ ID NO: 1074470 - RNA, 22 nt, Human
cugggcagugguggcccuuccc

SEQ ID NO: 1074471 - RNA, 22 nt, Human
uuuuuggguccaggcuguaucu

SEQ ID NO: 1074472 - RNA, 22 nt, Human
cuuuggcaugguccucacuaua

SEQ ID NO: 1074473 - RNA, 22 nt, Human
cauuuacaauguacagguugug

SEQ ID NO: 1074474 - RNA, 17 nt, Human
uuccuggaagucauucc

SEQ ID NO: 1074475 - RNA, 22 nt, Human
agagcuuauaucuuggccaucc

SEQ ID NO: 1074476 - RNA, 22 nt, Human
uuucacauaugguuguugauug

SEQ ID NO: 1074477 - RNA, 22 nt, Human
cugcugugcaggugccuaugau

SEQ ID NO: 1074478 - RNA, 22 nt, Human
aggacagcccuugagagcacau

SEQ ID NO: 1074479 - RNA, 22 nt, Human
gcagggcagggcaagaacuggg

SEQ ID NO: 1074480 - RNA, 22 nt, Human
caugucuguguacacaugcaca

SEQ ID NO: 1074481 - RNA, 22 nt, Human
aucuauuucugcuaauaacaau

SEQ ID NO: 1074482 - RNA, 22 nt, Human
aggaauuaacaauauauuuagg

SEQ ID NO: 1074483 - RNA, 22 nt, Human
uagcagcucugauucugggccc

SEQ ID NO: 1074484 - RNA, 22 nt, Human
cuggcagguggauggggacucc

SEQ ID NO: 1074485 - RNA, 22 nt, Human
gcucagggagagagggcagccg

SEQ ID NO: 1074486 - RNA, 22 nt, Human
cuucccugauaagagccucaga

SEQ ID NO: 1074487 - RNA, 22 nt, Human
ugccacugggcaugcagauguc

SEQ ID NO: 1074488 - RNA, 22 nt, Human
gggaagggagcuggguauuuag

SEQ ID NO: 1074489 - RNA, 17 nt, Human
ucugccgacugccagcu

SEQ ID NO: 1074490 - RNA, 22 nt, Human
ugaguucauauaguucaagaua

SEQ ID NO: 1074491 - RNA, 22 nt, Human
aaacagcugggagguagaggcg

SEQ ID NO: 1074492 - RNA, 22 nt, Human
uucuuguauauaaaaaucauuu

SEQ ID NO: 1074493 - RNA, 22 nt, Human
uucuccaggcuugggccagguc

SEQ ID NO: 1074494 - RNA, 22 nt, Human
aggcagugugggccaagcuucc

SEQ ID NO: 1074495 - RNA, 22 nt, Human
cucaggccauucuuccagcugc

SEQ ID NO: 1074496 - RNA, 22 nt, Human
acugaaggcuuucccaagguca

SEQ ID NO: 1074497 - RNA, 22 nt, Human
aggccucuugucuuccucacau

SEQ ID NO: 1074498 - RNA, 22 nt, Human
gacagacagggguucuccugga

SEQ ID NO: 1074499 - RNA, 22 nt, Human
uacaaagugauuuuggaauuga

SEQ ID NO: 1074500 - RNA, 22 nt, Human
accaagcuucguggaggaaguu

SEQ ID NO: 1074501 - RNA, 17 nt, Human
uguggccuucugagcuu

SEQ ID NO: 1074502 - RNA, 22 nt, Human
cagaccagaaggaagccgacaa

SEQ ID NO: 1074503 - RNA, 22 nt, Human
uggagcagaggcugagguuggg

SEQ ID NO: 1074504 - RNA, 20 nt, Human
uaacacuugcuuuuugacuu

SEQ ID NO: 1074505 - RNA, 20 nt, Human
aacagugaaugaggccagag

SEQ ID NO: 1074506 - RNA, 22 nt, Human
gggccucugugcagaggggccu

SEQ ID NO: 1074507 - RNA, 22 nt, Human
uuuuauauggcacauugguugg

SEQ ID NO: 1074508 - RNA, 22 nt, Human
ucucagugagcuuuucuauguu

SEQ ID NO: 1074509 - RNA, 22 nt, Human
uucuuaagcguaugauaaugaa

SEQ ID NO: 1074510 - RNA, 22 nt, Human
ugccagggugucaggagagcua

SEQ ID NO: 1074511 - RNA, 22 nt, Human
aaagguuuccgagcuuuaauuu

SEQ ID NO: 1074512 - RNA, 22 nt, Human
uucuuucucagugggcagauac

SEQ ID NO: 1074513 - RNA, 22 nt, Human
gcagaggauagcauaugaaccu

SEQ ID NO: 1074514 - RNA, 22 nt, Human
acaaauuaccauggaauuuggg

SEQ ID NO: 1074515 - RNA, 22 nt, Human
gagggcugaugcuuacuuauuu

SEQ ID NO: 1074516 - RNA, 23 nt, Human
cuucacaaucaaaaucaguucug

SEQ ID NO: 1074517 - RNA, 22 nt, Human
gggaaggaaaguuauuagcaga

SEQ ID NO: 1074518 - RNA, 17 nt, Human
aagcauuuaauuugcua

SEQ ID NO: 1074519 - RNA, 22 nt, Human
ucagcagugcagggugaggcag

SEQ ID NO: 1074520 - RNA, 22 nt, Human
uacauuccuucguuuagagauu

SEQ ID NO: 1074521 - RNA, 22 nt, Human
cuguucucuggcgguggcuguu

SEQ ID NO: 1074522 - RNA, 23 nt, Human
uuccagaguccacaucugccacc

SEQ ID NO: 1074523 - RNA, 22 nt, Human
aaacuucagugaaugacuuaug

SEQ ID NO: 1074524 - RNA, 22 nt, Human
cugcuuugaggggcucuguaua

SEQ ID NO: 1074525 - RNA, 20 nt, Human
uguccuaauagacaagcaga

SEQ ID NO: 1074526 - RNA, 22 nt, Human
gagcagaugugugccaggaugc

SEQ ID NO: 1074527 - RNA, 22 nt, Human
ugccagaguuacaugaggguca

SEQ ID NO: 1074528 - RNA, 22 nt, Human
uauuacugucaauaucacagaa

SEQ ID NO: 1074529 - RNA, 22 nt, Human
guauuuuucauuccaagugaga

SEQ ID NO: 1074530 - RNA, 22 nt, Human
uuguccaaggucccacaguuag

SEQ ID NO: 1074531 - RNA, 22 nt, Human
ucucuggagggcuccaggcggg

SEQ ID NO: 1074532 - RNA, 22 nt, Human
cccaggcugaugggaugggcca

SEQ ID NO: 1074533 - RNA, 23 nt, Human
acagacaacacugaugagagaaa

SEQ ID NO: 1074534 - RNA, 22 nt, Human
accuuggaaaguuuaauugagg

SEQ ID NO: 1074535 - RNA, 22 nt, Human
ugaugcccccaaaucuggcuca

SEQ ID NO: 1074536 - RNA, 22 nt, Human
ugagaagcugcuugugcuguau

SEQ ID NO: 1074537 - RNA, 22 nt, Human
gugguccuuuagaggauguaau

SEQ ID NO: 1074538 - RNA, 22 nt, Human
ucaauucaacacaugcacauug

SEQ ID NO: 1074539 - RNA, 22 nt, Human
auauacagggagaaacagcuua

SEQ ID NO: 1074540 - RNA, 22 nt, Human
gggaggaaaugugcagcgaauu

SEQ ID NO: 1074541 - RNA, 23 nt, Human
uuucacauuuacuguuagauggc

SEQ ID NO: 1074542 - RNA, 22 nt, Human
ucaagucucaauguauuauggu

SEQ ID NO: 1074543 - RNA, 22 nt, Human
ggccugugagcccuugcaugua

SEQ ID NO: 1074544 - RNA, 22 nt, Human
aaauguacaacauccauauaua

SEQ ID NO: 1074545 - RNA, 22 nt, Human
auugaaaauaaggccagaaaca

SEQ ID NO: 1074546 - RNA, 22 nt, Human
agugacucacuagcucucagug

SEQ ID NO: 1074547 - RNA, 22 nt, Human
gcugccugccuugccuggagga

SEQ ID NO: 1074548 - RNA, 23 nt, Human
ggagacaagguaccacguuaaca

SEQ ID NO: 1074549 - RNA, 22 nt, Human
gaagcagcuggugagauggagc

SEQ ID NO: 1074550 - RNA, 22 nt, Human
gauuuguuucaaguuagcaucu

SEQ ID NO: 1074551 - RNA, 22 nt, Human
augggcuggcagccugaacagc

SEQ ID NO: 1074552 - RNA, 22 nt, Human
caguucugagcuuucccagaag

SEQ ID NO: 1074553 - RNA, 22 nt, Human
agcaauauaaauguuggguaga

SEQ ID NO: 1074554 - RNA, 22 nt, Human
guggggcaugcacgcugcuccu

SEQ ID NO: 1074555 - RNA, 22 nt, Human
cccaggccagaacuugguugcu

SEQ ID NO: 1074556 - RNA, 22 nt, Human
aaacaaugagcuuuuacacacu

SEQ ID NO: 1074557 - RNA, 21 nt, Human
uuaagaccugcaucaucauua

SEQ ID NO: 1074558 - RNA, 22 nt, Human
uggagacugugcuaagggaguu

SEQ ID NO: 1074559 - RNA, 22 nt, Human
caggggcucccugggugccagu

SEQ ID NO: 1074560 - RNA, 22 nt, Human
uuugucuuauccaaucucucag

SEQ ID NO: 1074561 - RNA, 22 nt, Human
cuucugggugccugugaguguu

SEQ ID NO: 1074562 - RNA, 22 nt, Human
gcucagagcaucccagugaaug

SEQ ID NO: 1074563 - RNA, 22 nt, Human
aaggcacuuuuccugagaugau

SEQ ID NO: 1074564 - RNA, 22 nt, Human
agagccuggcucccagcuaccg

SEQ ID NO: 1074565 - RNA, 22 nt, Human
ugcuggcccaugaagacgcagu

SEQ ID NO: 1074566 - RNA, 22 nt, Human
acacauaagccuaaucaucucc

SEQ ID NO: 1074567 - RNA, 22 nt, Human
auugacaauguauuuguaucug

SEQ ID NO: 1074568 - RNA, 17 nt, Human
agccgggcauggaccag

SEQ ID NO: 1074569 - RNA, 22 nt, Human
uugcucagcacuggagccagcu

SEQ ID NO: 1074570 - RNA, 22 nt, Human
uauuugcaggacauagauaugg

SEQ ID NO: 1074571 - RNA, 22 nt, Human
ugcuagugcaggguuuucaguu

SEQ ID NO: 1074572 - RNA, 22 nt, Human
cauguuuaauugcgauguuuga

SEQ ID NO: 1074573 - RNA, 22 nt, Human
ggagccaggggaccuucacaga

SEQ ID NO: 1074574 - RNA, 22 nt, Human
ggaggcugaggccccucacagg

SEQ ID NO: 1074575 - RNA, 22 nt, Human
aggcaggugcuuaugacuugcu

SEQ ID NO: 1074576 - RNA, 22 nt, Human
uccugcuccaccgugggcugga

SEQ ID NO: 1074577 - RNA, 22 nt, Human
uagaaaauccaguguggggaga

SEQ ID NO: 1074578 - RNA, 22 nt, Human
ugcaggcuggcagugcugaaau

SEQ ID NO: 1074579 - RNA, 22 nt, Human
uguaucuuagugugaaaauauu

SEQ ID NO: 1074580 - RNA, 22 nt, Human
augcagaaagagaauguaaugu

SEQ ID NO: 1074581 - RNA, 22 nt, Human
acagaggaaggcugagcugccc

SEQ ID NO: 1074582 - RNA, 22 nt, Human
accagggcacaggagucugaag

SEQ ID NO: 1074583 - RNA, 22 nt, Human
caggagcaguuagaagcccacu

SEQ ID NO: 1074584 - RNA, 22 nt, Human
cccaaccagaaauugacagaca

SEQ ID NO: 1074585 - RNA, 22 nt, Human
gcagggcaugggcccugucugc

SEQ ID NO: 1074586 - RNA, 22 nt, Human
uggagcugagaaguggagcucu

SEQ ID NO: 1074587 - RNA, 22 nt, Human
ccaagggaaaccgagaggcugg

SEQ ID NO: 1074588 - RNA, 22 nt, Human
cuaggcuguucaugcucagacc

SEQ ID NO: 1074589 - RNA, 22 nt, Human
ugcuugucacauacaggagcau

SEQ ID NO: 1074590 - RNA, 22 nt, Human
acaacaucagcugagaccuuca

SEQ ID NO: 1074591 - RNA, 22 nt, Human
gggccucucccuucucacgcau

SEQ ID NO: 1074592 - RNA, 17 nt, Human
acacaguacuuuuuugc

SEQ ID NO: 1074593 - RNA, 22 nt, Human
auuuuuucagauugaguguuaa

SEQ ID NO: 1074594 - RNA, 22 nt, Human
uuugaaguucccccauaucaga

SEQ ID NO: 1074595 - RNA, 22 nt, Human
cagcucauuccucaaucuagga

SEQ ID NO: 1074596 - RNA, 22 nt, Human
gcugcugggguggagaaacgcu

SEQ ID NO: 1074597 - RNA, 17 nt, Human
uggcacagaggugcuau

SEQ ID NO: 1074598 - RNA, 22 nt, Human
uucacagcuaagagcuaaguaa

SEQ ID NO: 1074599 - RNA, 22 nt, Human
cucuggagagguucccauggga

SEQ ID NO: 1074600 - RNA, 21 nt, Human
cagugggcugcugcgcuccag

SEQ ID NO: 1074601 - RNA, 22 nt, Human
cuaggcaaaguauuaaugagug

SEQ ID NO: 1074602 - RNA, 22 nt, Human
gcucugugggugaguagaaucu

SEQ ID NO: 1074603 - RNA, 22 nt, Human
accaggaacucacccgcagagg

SEQ ID NO: 1074604 - RNA, 22 nt, Human
gagacauggcaaaagcacuggu

SEQ ID NO: 1074605 - RNA, 20 nt, Human
gggcucuuagguagcagggg

SEQ ID NO: 1074606 - RNA, 22 nt, Human
uugaaaugagacuaauugauug

SEQ ID NO: 1074607 - RNA, 22 nt, Human
aguuucuucauccaaaaaaugg

SEQ ID NO: 1074608 - RNA, 20 nt, Human
gggaguggugguagccugug

SEQ ID NO: 1074609 - RNA, 22 nt, Human
ucagaggacgcacuaggguugu

SEQ ID NO: 1074610 - RNA, 18 nt, Human
uuuguccuguggcagcug

SEQ ID NO: 1074611 - RNA, 22 nt, Human
augcauaagugcagcagauuug

SEQ ID NO: 1074612 - RNA, 21 nt, Human
gcacagggacagaucaucaca

SEQ ID NO: 1074613 - RNA, 23 nt, Human
ugcauaucagaaauuucauaugg

SEQ ID NO: 1074614 - RNA, 22 nt, Human
uucuuuugcaagacuauugauu

SEQ ID NO: 1074615 - RNA, 22 nt, Human
gcaguggggcgcugggaguugg

SEQ ID NO: 1074616 - RNA, 22 nt, Human
gggcugcugccaaucacagccu

SEQ ID NO: 1074617 - RNA, 22 nt, Human
agaccauggccauccuaggaaa

SEQ ID NO: 1074618 - RNA, 22 nt, Human
gagccugaauuugaccugcuua

SEQ ID NO: 1074619 - RNA, 22 nt, Human
gaacugaguuuucugccuggac

SEQ ID NO: 1074620 - RNA, 22 nt, Human
ugagugccugaacauagaguag

SEQ ID NO: 1074621 - RNA, 22 nt, Human
gaaaguauuagccuagaaguca

SEQ ID NO: 1074622 - RNA, 22 nt, Human
caaggccaaagggccacuguca

SEQ ID NO: 1074623 - RNA, 22 nt, Human
gccuggcacucacugaagaggc

SEQ ID NO: 1074624 - RNA, 22 nt, Human
ucagagugugacuuggucauga

SEQ ID NO: 1074625 - RNA, 22 nt, Human
agugcagagagcaauacucuac

SEQ ID NO: 1074626 - RNA, 22 nt, Human
ccccucauucucugagcuaguu

SEQ ID NO: 1074627 - RNA, 22 nt, Human
agguaauaggguucagaauuau

SEQ ID NO: 1074628 - RNA, 22 nt, Human
caagagcuacccugugccauau

SEQ ID NO: 1074629 - RNA, 22 nt, Human
ugcagaggagucagccugggca

SEQ ID NO: 1074630 - RNA, 22 nt, Human
aaauaauuauagcgagucuauc

SEQ ID NO: 1074631 - RNA, 22 nt, Human
ugcugaggagguggcugugcuu

SEQ ID NO: 1074632 - RNA, 22 nt, Human
gggccugugcacaguucuguua

SEQ ID NO: 1074633 - RNA, 22 nt, Human
aaggccagccugagagcuaaca

SEQ ID NO: 1074634 - RNA, 16 nt, Human
uguuagcugugcauua

SEQ ID NO: 1074635 - RNA, 22 nt, Human
ggcaggcugggagucaucagag

SEQ ID NO: 1074636 - RNA, 20 nt, Human
ccugugcuuaucacuugcug

SEQ ID NO: 1074637 - RNA, 22 nt, Human
acacacagguaaaggagccugg

SEQ ID NO: 1074638 - RNA, 22 nt, Human
uuccucucaacaugccugccgg

SEQ ID NO: 1074639 - RNA, 22 nt, Human
aggaagauguguuuagcagguu

SEQ ID NO: 1074640 - RNA, 22 nt, Human
cuccacucaccagaugccagga

SEQ ID NO: 1074641 - RNA, 22 nt, Human
aguggcaggcggagauguagga

SEQ ID NO: 1074642 - RNA, 22 nt, Human
acaaaguagucaaaguagauga

SEQ ID NO: 1074643 - RNA, 22 nt, Human
acagggccagccugggaccugg

SEQ ID NO: 1074644 - RNA, 21 nt, Human
cugcaucucauagaacauguc

SEQ ID NO: 1074645 - RNA, 22 nt, Human
uucagaauguacugauagaaca

SEQ ID NO: 1074646 - RNA, 22 nt, Human
aggugaaguugaggaggcagaa

SEQ ID NO: 1074647 - RNA, 22 nt, Human
cagguagguauggugcagucuu

SEQ ID NO: 1074648 - RNA, 21 nt, Human
ugcugccaucaugcagagaug

SEQ ID NO: 1074649 - RNA, 22 nt, Human
acaguggaauggugggccugca

SEQ ID NO: 1074650 - RNA, 22 nt, Human
ggaggccaaggugggcggauca

SEQ ID NO: 1074651 - RNA, 22 nt, Human
aagauuuuuuuccacagacuca

SEQ ID NO: 1074652 - RNA, 22 nt, Human
auuaggcauucaugcagcuccu

SEQ ID NO: 1074653 - RNA, 22 nt, Human
cagcagccuacaaugcacagaa

SEQ ID NO: 1074654 - RNA, 22 nt, Human
uuucuucauugaugucaggugg

SEQ ID NO: 1074655 - RNA, 22 nt, Human
gaggaagagagcucugccuugu

SEQ ID NO: 1074656 - RNA, 22 nt, Human
gccacagcagggcccucucagg

SEQ ID NO: 1074657 - RNA, 20 nt, Human
uccuggccucccuggggcuc

SEQ ID NO: 1074658 - RNA, 22 nt, Human
guuuuauuggaacacagccaug

SEQ ID NO: 1074659 - RNA, 22 nt, Human
cugcuguggguuaagacacugu

SEQ ID NO: 1074660 - RNA, 22 nt, Human
cagcugugagagugcauugaag

SEQ ID NO: 1074661 - RNA, 22 nt, Human
gcccaggaguugaagggcugac

SEQ ID NO: 1074662 - RNA, 22 nt, Human
gucagaggggacaagacacaga

SEQ ID NO: 1074663 - RNA, 22 nt, Human
ccuggagguggagguugcagug

SEQ ID NO: 1074664 - RNA, 22 nt, Human
guaagggauuugaacauagguu

SEQ ID NO: 1074665 - RNA, 23 nt, Human
uggcaccaggcauucuaggggua

SEQ ID NO: 1074666 - RNA, 22 nt, Human
gaagccagccuugucugccucu

SEQ ID NO: 1074667 - RNA, 22 nt, Human
cgcaggugccggcagauggggu

SEQ ID NO: 1074668 - RNA, 22 nt, Human
ggaagagggaaccacgacugua

SEQ ID NO: 1074669 - RNA, 22 nt, Human
cugggccagauccagccucaca

SEQ ID NO: 1074670 - RNA, 22 nt, Human
gaauguuuaaaaggugcaguuu

SEQ ID NO: 1074671 - RNA, 22 nt, Human
auggaacaugaauuaauauggu

SEQ ID NO: 1074672 - RNA, 22 nt, Human
aaaccagugauagacuagacac

SEQ ID NO: 1074673 - RNA, 22 nt, Human
gccuggugcuaugagggccagc

SEQ ID NO: 1074674 - RNA, 22 nt, Human
aggcuggguaccugucauaugc

SEQ ID NO: 1074675 - RNA, 22 nt, Human
caguuaaucuugccauuauauc

SEQ ID NO: 1074676 - RNA, 22 nt, Human
uagguucaggagauauugcaca

SEQ ID NO: 1074677 - RNA, 22 nt, Human
cuggcuggccggaggcaucccu

SEQ ID NO: 1074678 - RNA, 22 nt, Human
ccugcuguucuguuuagugaac

SEQ ID NO: 1074679 - RNA, 22 nt, Human
ccugugugcacacgaggccaug

SEQ ID NO: 1074680 - RNA, 22 nt, Human
gagcugagccuggguggaccgc

SEQ ID NO: 1074681 - RNA, 22 nt, Human
aaggugucggcagagccgcuuc

SEQ ID NO: 1074682 - RNA, 22 nt, Human
caggagcaaggagcagugggau

SEQ ID NO: 1074683 - RNA, 22 nt, Human
uuaacauuugugaagcauuuag

SEQ ID NO: 1074684 - RNA, 22 nt, Human
caaauacuguacugaacacugu

SEQ ID NO: 1074685 - RNA, 22 nt, Human
cacauucaauuacacagauagg

SEQ ID NO: 1074686 - RNA, 22 nt, Human
aaggcgacacaggcagcaggcc

SEQ ID NO: 1074687 - RNA, 22 nt, Human
gcuggcucagggacuagaguuu

SEQ ID NO: 1074688 - RNA, 22 nt, Human
ucuccugcucccaacugcugca

SEQ ID NO: 1074689 - RNA, 19 nt, Human
uugcauuguaguuggacug

SEQ ID NO: 1074690 - RNA, 22 nt, Human
gaguucugugagccauccuagc

SEQ ID NO: 1074691 - RNA, 22 nt, Human
ccagcagccaccuucucgaaau

SEQ ID NO: 1074692 - RNA, 22 nt, Human
uucugucucuguguuuacauua

SEQ ID NO: 1074693 - RNA, 18 nt, Human
agcagaauucuaggguuc

SEQ ID NO: 1074694 - RNA, 22 nt, Human
gagccaaggguugccauggaga

SEQ ID NO: 1074695 - RNA, 22 nt, Human
uuugaaguccaucuggcccagu

SEQ ID NO: 1074696 - RNA, 20 nt, Human
caucagugccugacaggucc

SEQ ID NO: 1074697 - RNA, 22 nt, Human
ugcauacacacaucaaauguuu

SEQ ID NO: 1074698 - RNA, 22 nt, Human
aaagcagccgguucccuggucu

SEQ ID NO: 1074699 - RNA, 22 nt, Human
cugccugcugccuguggagggu

SEQ ID NO: 1074700 - RNA, 22 nt, Human
gggccuggugcuucugacuccu

SEQ ID NO: 1074701 - RNA, 22 nt, Human
auuagcuuuggauucagaagau

SEQ ID NO: 1074702 - RNA, 23 nt, Human
aguuuccacccaggguagaaggg

SEQ ID NO: 1074703 - RNA, 22 nt, Human
guggccagaaucuugaggccuu

SEQ ID NO: 1074704 - RNA, 22 nt, Human
agagcagcguuuguggaacacu

SEQ ID NO: 1074705 - RNA, 22 nt, Human
gcuucccacagcuggacugggg

SEQ ID NO: 1074706 - RNA, 22 nt, Human
acaaaguauuuuuagguuugua

SEQ ID NO: 1074707 - RNA, 22 nt, Human
cugcagcuuuggaaaccuguuu

SEQ ID NO: 1074708 - RNA, 21 nt, Human
ugagccaggcugacggcugug

SEQ ID NO: 1074709 - RNA, 22 nt, Human
acugucaggauggcagcuuguu

SEQ ID NO: 1074710 - RNA, 22 nt, Human
uugcaagacacuuggaagcaca

SEQ ID NO: 1074711 - RNA, 22 nt, Human
gccagagguucaacaacugucu

SEQ ID NO: 1074712 - RNA, 22 nt, Human
cugaggcaugaaugugggcuuu

SEQ ID NO: 1074713 - RNA, 22 nt, Human
acagccuguguaccagcuggga

SEQ ID NO: 1074714 - RNA, 22 nt, Human
ggaaagaggauaguggguaggu

SEQ ID NO: 1074715 - RNA, 22 nt, Human
aacaucuugaagauugggaaag

SEQ ID NO: 1074716 - RNA, 22 nt, Human
ucuuccaagguugcacacuauc

SEQ ID NO: 1074717 - RNA, 23 nt, Human
uuucuaagguuuuuaucugcuac

SEQ ID NO: 1074718 - RNA, 22 nt, Human
uuucucuaaauagggaggcuua

SEQ ID NO: 1074719 - RNA, 22 nt, Human
ugugagacguaggccaucgagg

SEQ ID NO: 1074720 - RNA, 22 nt, Human
ccagaagagaucacaguucuug

SEQ ID NO: 1074721 - RNA, 23 nt, Human
auaauaauuauggcagcaaagug

SEQ ID NO: 1074722 - RNA, 22 nt, Human
uguuaauauacuaaaauccacu

SEQ ID NO: 1074723 - RNA, 22 nt, Human
uuuccuuccaaaugcccgggag

SEQ ID NO: 1074724 - RNA, 18 nt, Human
aggugcagccucugaggc

SEQ ID NO: 1074725 - RNA, 22 nt, Human
aacauuuauugagcaccuacug

SEQ ID NO: 1074726 - RNA, 22 nt, Human
aaacaauguugucuccaagagg

SEQ ID NO: 1074727 - RNA, 22 nt, Human
agcacuuuauucaggaacucca

SEQ ID NO: 1074728 - RNA, 23 nt, Human
ugagcugguauuguccaucucca

SEQ ID NO: 1074729 - RNA, 22 nt, Human
gccacuggacccagaaagggaa

SEQ ID NO: 1074730 - RNA, 22 nt, Human
uaguuuuacuugcgaugauaau

SEQ ID NO: 1074731 - RNA, 17 nt, Human
agcagcugaagcagcca

SEQ ID NO: 1074732 - RNA, 22 nt, Human
acauuugagaugccuuuuaggu

SEQ ID NO: 1074733 - RNA, 22 nt, Human
gaagggggaaaaugacaacaga

SEQ ID NO: 1074734 - RNA, 22 nt, Human
agccaggcgcaguggcuuaugc

SEQ ID NO: 1074735 - RNA, 22 nt, Human
cuggagcaggcuugucccagcu

SEQ ID NO: 1074736 - RNA, 22 nt, Human
agcuggaggggccagcaggugu

SEQ ID NO: 1074737 - RNA, 22 nt, Human
gcugcucuugaggggcucacug

SEQ ID NO: 1074738 - RNA, 22 nt, Human
aggugccaauuuucagugaaca

SEQ ID NO: 1074739 - RNA, 22 nt, Human
aacacagacauagugauuacag

SEQ ID NO: 1074740 - RNA, 22 nt, Human
gauguuucccguuaagagaaaa

SEQ ID NO: 1074741 - RNA, 17 nt, Human
cagucgaggaggaccug

SEQ ID NO: 1074742 - RNA, 22 nt, Human
ucuucuuccuccacagggccca

SEQ ID NO: 1074743 - RNA, 22 nt, Human
gaggccaggguaccaucaacau

SEQ ID NO: 1074744 - RNA, 22 nt, Human
auagacacauguuauuauacuu

SEQ ID NO: 1074745 - RNA, 22 nt, Human
cagcagaguaggugcuacuucu

SEQ ID NO: 1074746 - RNA, 22 nt, Human
uuuuccucaggaaugcuaagcu

SEQ ID NO: 1074747 - RNA, 22 nt, Human
cuucacaaagcucucuuuaugu

SEQ ID NO: 1074748 - RNA, 22 nt, Human
auggauauuggccaaacucauu

SEQ ID NO: 1074749 - RNA, 22 nt, Human
ccagcccuugcugaaggguggc

SEQ ID NO: 1074750 - RNA, 22 nt, Human
acauucauggguuuuacauuau

SEQ ID NO: 1074751 - RNA, 22 nt, Human
uaacagcaggguuacaggcauu

SEQ ID NO: 1074752 - RNA, 22 nt, Human
agcaggugcauggcgagcgcgg

SEQ ID NO: 1074753 - RNA, 22 nt, Human
ccagcugcagguguuccagaug

SEQ ID NO: 1074754 - RNA, 22 nt, Human
guuacaauguucuucaguucug

SEQ ID NO: 1074755 - RNA, 22 nt, Human
ucuccugggaggacaaggaagg

SEQ ID NO: 1074756 - RNA, 22 nt, Human
accaggacauuuuagucaucuu

SEQ ID NO: 1074757 - RNA, 22 nt, Human
ucaaacuucuauucucuguuuu

SEQ ID NO: 1074758 - RNA, 22 nt, Human
cccaggaacagggcucagaccc

SEQ ID NO: 1074759 - RNA, 22 nt, Human
aggcucuucuuuuauuaacuga

SEQ ID NO: 1074760 - RNA, 18 nt, Human
gccagagggaagcaggug

SEQ ID NO: 1074761 - RNA, 22 nt, Human
cucugagaauauaagacuauuu

SEQ ID NO: 1074762 - RNA, 22 nt, Human
cugggcugcucagcccccucgc

SEQ ID NO: 1074763 - RNA, 22 nt, Human
auguuugucaggauuguaauua

SEQ ID NO: 1074764 - RNA, 22 nt, Human
ugcccucagcagcagcuccugc

SEQ ID NO: 1074765 - RNA, 22 nt, Human
gugaaauauuuuguuuauguca

SEQ ID NO: 1074766 - RNA, 22 nt, Human
ugcaaucucggcacuuugggag

SEQ ID NO: 1074767 - RNA, 22 nt, Human
ccaugggcuggcugccuuauca

SEQ ID NO: 1074768 - RNA, 22 nt, Human
auuuuccagccuuucuagaacu

SEQ ID NO: 1074769 - RNA, 22 nt, Human
ggcagauguuauaugaucugag

SEQ ID NO: 1074770 - RNA, 22 nt, Human
cccucauugccuccugcgugca

SEQ ID NO: 1074771 - RNA, 22 nt, Human
ccuggcaguucaucaaauggca

SEQ ID NO: 1074772 - RNA, 22 nt, Human
uaccaggcagcugcacagaggc

SEQ ID NO: 1074773 - RNA, 22 nt, Human
caggaggcagagguugcaguga

SEQ ID NO: 1074774 - RNA, 17 nt, Human
aggcaggagauuggaga

SEQ ID NO: 1074775 - RNA, 22 nt, Human
auuaauuuuucugacagccaca

SEQ ID NO: 1074776 - RNA, 22 nt, Human
agcauguugggaugagaaggaa

SEQ ID NO: 1074777 - RNA, 22 nt, Human
caggcuggagugcaauggcaca

SEQ ID NO: 1074778 - RNA, 22 nt, Human
uauaagaagugaagaagaguua

SEQ ID NO: 1074779 - RNA, 23 nt, Human
ugaagugaaauuucacaagggac

SEQ ID NO: 1074780 - RNA, 18 nt, Human
ccuguggcucagcccaca

SEQ ID NO: 1074781 - RNA, 22 nt, Human
aaagacuagcauuuauauguac

SEQ ID NO: 1074782 - RNA, 22 nt, Human
ccaggagcauuaagagaacaua

SEQ ID NO: 1074783 - RNA, 22 nt, Human
gagaggcugaaaucacaggagc

SEQ ID NO: 1074784 - RNA, 22 nt, Human
caguacuugggggguucuaagu

SEQ ID NO: 1074785 - RNA, 22 nt, Human
ugucuuuggaauauuuagcuga

SEQ ID NO: 1074786 - RNA, 22 nt, Human
ugcccugguuacacuggagucc

SEQ ID NO: 1074787 - RNA, 22 nt, Human
uggcuggcccugggagugcaga

SEQ ID NO: 1074788 - RNA, 22 nt, Human
aggccugagcagaggaguggac

SEQ ID NO: 1074789 - RNA, 22 nt, Human
uaaauuauguuccauguccuuu

SEQ ID NO: 1074790 - RNA, 22 nt, Human
gaacacagcagggauaaccacu

SEQ ID NO: 1074791 - RNA, 22 nt, Human
agcuggcagagcauuuguggcc

SEQ ID NO: 1074792 - RNA, 22 nt, Human
ggaacugaaugucucgguauaa

SEQ ID NO: 1074793 - RNA, 22 nt, Human
ccagaagaacuuaauucaaaac

SEQ ID NO: 1074794 - RNA, 22 nt, Human
uuuuuacacuuagcauugagcg

SEQ ID NO: 1074795 - RNA, 23 nt, Human
gccaggaguggguagacuaaugc

SEQ ID NO: 1074796 - RNA, 22 nt, Human
uugccauuaucauuuaugauac

SEQ ID NO: 1074797 - RNA, 22 nt, Human
agggugccuggaagccacucac

SEQ ID NO: 1074798 - RNA, 22 nt, Human
acuacauuuccugaccccugug

SEQ ID NO: 1074799 - RNA, 22 nt, Human
ugccagcacaaguuaagagauc

SEQ ID NO: 1074800 - RNA, 22 nt, Human
caucugcuguuccuuggacuca

SEQ ID NO: 1074801 - RNA, 22 nt, Human
cacagguguucuugcagugaaa

SEQ ID NO: 1074802 - RNA, 22 nt, Human
auuuccauuuucagccauuacu

SEQ ID NO: 1074803 - RNA, 22 nt, Human
cuuugcuaauguugcauuuuca

SEQ ID NO: 1074804 - RNA, 22 nt, Human
ggaacauaccgaaaauacuuaa

SEQ ID NO: 1074805 - RNA, 22 nt, Human
uaaacaagaaacauuuucuguu

SEQ ID NO: 1074806 - RNA, 22 nt, Human
uccaggcaagggaggagcaugg

SEQ ID NO: 1074807 - RNA, 22 nt, Human
aaauaagaggacagauguuugg

SEQ ID NO: 1074808 - RNA, 22 nt, Human
ucaucacauaugucaugauuug

SEQ ID NO: 1074809 - RNA, 22 nt, Human
caaagauaaucacagaauaccc

SEQ ID NO: 1074810 - RNA, 22 nt, Human
aggacccugagcgggcaugccg

SEQ ID NO: 1074811 - RNA, 22 nt, Human
ccaggcugugguuuagauagag

SEQ ID NO: 1074812 - RNA, 22 nt, Human
gcgaaaaauguguaaauauguu

SEQ ID NO: 1074813 - RNA, 22 nt, Human
gaaaacuuggaucucuagaaug

SEQ ID NO: 1074814 - RNA, 22 nt, Human
agagccagcaacucuagcccug

SEQ ID NO: 1074815 - RNA, 22 nt, Human
ucagagaacacagaggugaugu

SEQ ID NO: 1074816 - RNA, 22 nt, Human
aagcaagccaaucuguuuuguu

SEQ ID NO: 1074817 - RNA, 22 nt, Human
uagauguugaagucauauuugg

SEQ ID NO: 1074818 - RNA, 22 nt, Human
uuacuuuccagcucuagcuuca

SEQ ID NO: 1074819 - RNA, 22 nt, Human
gaaaucugcggugaggccugag

SEQ ID NO: 1074820 - RNA, 22 nt, Human
aaagucaucauuucuuuucaaa

SEQ ID NO: 1074821 - RNA, 22 nt, Human
ggccagggccuggggacugucc

SEQ ID NO: 1074822 - RNA, 22 nt, Human
aaguaacuuauuugcaaacagg

SEQ ID NO: 1074823 - RNA, 22 nt, Human
uuuccucacuucaugagaguuu

SEQ ID NO: 1074824 - RNA, 22 nt, Human
cugccuguuuucugauagauuu

SEQ ID NO: 1074825 - RNA, 22 nt, Human
accugucuauaaaagugaauac

SEQ ID NO: 1074826 - RNA, 22 nt, Human
uccaagcucucuaugccaugau

SEQ ID NO: 1074827 - RNA, 22 nt, Human
ggggccagcuucgcgugcucuu

SEQ ID NO: 1074828 - RNA, 22 nt, Human
uuaaauuucuacgugauccagg

SEQ ID NO: 1074829 - RNA, 22 nt, Human
acaggcagagaacucagccaga

SEQ ID NO: 1074830 - RNA, 22 nt, Human
gacauguauuagucaugcacag

SEQ ID NO: 1074831 - RNA, 22 nt, Human
ggcaugugccugaggucacaca

SEQ ID NO: 1074832 - RNA, 22 nt, Human
aaagcauggcaugaagaacaug

SEQ ID NO: 1074833 - RNA, 22 nt, Human
aagcugccagauucagucugcu

SEQ ID NO: 1074834 - RNA, 22 nt, Human
gccuguguggaugcgccggugc

SEQ ID NO: 1074835 - RNA, 17 nt, Human
uaaguuauagcagaaga

SEQ ID NO: 1074836 - RNA, 22 nt, Human
aagcuagauaacuuuuauauuu

SEQ ID NO: 1074837 - RNA, 22 nt, Human
uggcuucagacuucugcuacgu

SEQ ID NO: 1074838 - RNA, 22 nt, Human
gaggcaugucuggccuguccca

SEQ ID NO: 1074839 - RNA, 22 nt, Human
ugcuucuggggacaggcugccu

SEQ ID NO: 1074840 - RNA, 22 nt, Human
gcugaaggucucuggagagguc

SEQ ID NO: 1074841 - RNA, 22 nt, Human
aggugaggauagguggccaagg

SEQ ID NO: 1074842 - RNA, 22 nt, Human
uccucaggaugugggguagaau

SEQ ID NO: 1074843 - RNA, 22 nt, Human
agcauaaaauaaauaguuugca

SEQ ID NO: 1074844 - RNA, 19 nt, Human
aagggcugggcaccucacu

SEQ ID NO: 1074845 - RNA, 19 nt, Human
uccaggcauccuucaggcu

SEQ ID NO: 1074846 - RNA, 22 nt, Human
caguuuuagcuagagcaaacca

SEQ ID NO: 1074847 - RNA, 21 nt, Human
auaagcaugcugauuacauuu

SEQ ID NO: 1074848 - RNA, 22 nt, Human
ggccucucucccuggcuugcag

SEQ ID NO: 1074849 - RNA, 20 nt, Human
gggcuggcgcauggggaaag

SEQ ID NO: 1074850 - RNA, 22 nt, Human
uuuuuauacuuugcucaagauu

SEQ ID NO: 1074851 - RNA, 22 nt, Human
agguggcuguggcuucccuugu

SEQ ID NO: 1074852 - RNA, 22 nt, Human
aaguggugguaugaaccgaggg

SEQ ID NO: 1074853 - RNA, 22 nt, Human
augcugaucuguaauaagauuu

SEQ ID NO: 1074854 - RNA, 22 nt, Human
accuggcuuuggggauaggcuu

SEQ ID NO: 1074855 - RNA, 22 nt, Human
gcagccaccucccauggcgggg

SEQ ID NO: 1074856 - RNA, 22 nt, Human
ucugucacuuauuaagauggau

SEQ ID NO: 1074857 - RNA, 22 nt, Human
uguaggauuuucaccagaccuu

SEQ ID NO: 1074858 - RNA, 22 nt, Human
agugcugacucugggcacagug

SEQ ID NO: 1074859 - RNA, 22 nt, Human
gggcuucagcuggggauggagc

SEQ ID NO: 1074860 - RNA, 22 nt, Human
auuucuuucuggccacgguuuu

SEQ ID NO: 1074861 - RNA, 22 nt, Human
uuugaagugggcauuagaaccu

SEQ ID NO: 1074862 - RNA, 22 nt, Human
caaauguaauaaggaguuuccc

SEQ ID NO: 1074863 - RNA, 22 nt, Human
cugggagauaugaggaucugga

SEQ ID NO: 1074864 - RNA, 22 nt, Human
uuccaagugggggaagcugagu

SEQ ID NO: 1074865 - RNA, 22 nt, Human
ucuuagaaauuccccaguggcu

SEQ ID NO: 1074866 - RNA, 22 nt, Human
ucucugagacaguagccucugc

SEQ ID NO: 1074867 - RNA, 21 nt, Human
aaggcagaagcauggaaugag

SEQ ID NO: 1074868 - RNA, 22 nt, Human
agaaaagaggcuuucuaagcau

SEQ ID NO: 1074869 - RNA, 22 nt, Human
aucuggcuauuucuggucgggg

SEQ ID NO: 1074870 - RNA, 15 nt, Human
gcagguggaucacuu

SEQ ID NO: 1074871 - RNA, 22 nt, Human
agaaauguauagugaauuuuuc

SEQ ID NO: 1074872 - RNA, 22 nt, Human
gacagacauuuccugauccaau

SEQ ID NO: 1074873 - RNA, 22 nt, Human
caguggagagacuuuuacucuu

SEQ ID NO: 1074874 - RNA, 22 nt, Human
aaagcaagucucuacaaaguac

SEQ ID NO: 1074875 - RNA, 22 nt, Human
gauaaacacaaggugauuucau

SEQ ID NO: 1074876 - RNA, 22 nt, Human
ggcaggcaggagcgugcuuggg

SEQ ID NO: 1074877 - RNA, 22 nt, Human
gcugcagccaaauucauuguca

SEQ ID NO: 1074878 - RNA, 22 nt, Human
cuucuucucuacauccuuugau

SEQ ID NO: 1074879 - RNA, 22 nt, Human
cuccagggaaaggggcguccgc

SEQ ID NO: 1074880 - RNA, 20 nt, Human
cucuuauugcauuaguuucu

SEQ ID NO: 1074881 - RNA, 22 nt, Human
agcuggcagucggccuugaugc

SEQ ID NO: 1074882 - RNA, 22 nt, Human
gccuggugugcgccgcgcagcu

SEQ ID NO: 1074883 - RNA, 22 nt, Human
uuccaagucuaaguuauaaauc

SEQ ID NO: 1074884 - RNA, 22 nt, Human
gcuggaguccagugguaugauc

SEQ ID NO: 1074885 - RNA, 22 nt, Human
gggcugacgaaggccaugugug

SEQ ID NO: 1074886 - RNA, 22 nt, Human
cagagcagcagagcuuccaugg

SEQ ID NO: 1074887 - RNA, 19 nt, Human
agcugggcugucacaguga

SEQ ID NO: 1074888 - RNA, 22 nt, Human
ggggacaguuaaagaccaagac

SEQ ID NO: 1074889 - RNA, 22 nt, Human
gugggggacccaggugcugucc

SEQ ID NO: 1074890 - RNA, 22 nt, Human
gucagaggaauggaugagugau

SEQ ID NO: 1074891 - RNA, 22 nt, Human
uagcccagagucccaauuccag

SEQ ID NO: 1074892 - RNA, 22 nt, Human
ugaaauguuaaacaaguggcuc

SEQ ID NO: 1074893 - RNA, 22 nt, Human
ccauuucacuggguaguugugg

SEQ ID NO: 1074894 - RNA, 22 nt, Human
gacuuucugcuauacuuucugu

SEQ ID NO: 1074895 - RNA, 23 nt, Human
uugucugugcuuuuccaguugcu

SEQ ID NO: 1074896 - RNA, 22 nt, Human
auucauacaggcuuugcucuua

SEQ ID NO: 1074897 - RNA, 22 nt, Human
ggucaggguauaaucaagugag

SEQ ID NO: 1074898 - RNA, 22 nt, Human
ugucuauuuuuacuggaccaug

SEQ ID NO: 1074899 - RNA, 22 nt, Human
ccagcucucuuugaagcauaaa

SEQ ID NO: 1074900 - RNA, 22 nt, Human
aaaagcaaggcagucugucuga

SEQ ID NO: 1074901 - RNA, 22 nt, Human
auguacuaaagaaauuugcagg

SEQ ID NO: 1074902 - RNA, 22 nt, Human
cuggcugggagcgagcugcuca

SEQ ID NO: 1074903 - RNA, 22 nt, Human
aggaaaggccucagcagaaacc

SEQ ID NO: 1074904 - RNA, 22 nt, Human
aaaaagcuuaaaugagcaguuc

SEQ ID NO: 1074905 - RNA, 22 nt, Human
gcuuggcauuugcugggagcug

SEQ ID NO: 1074906 - RNA, 22 nt, Human
gaggcugcggggaggagccugc

SEQ ID NO: 1074907 - RNA, 22 nt, Human
cuucaguguccucucuaguaga

SEQ ID NO: 1074908 - RNA, 22 nt, Human
uucaaaucucuccuaauccacu

SEQ ID NO: 1074909 - RNA, 22 nt, Human
ggcagugaugucaaacagugaa

SEQ ID NO: 1074910 - RNA, 22 nt, Human
aagauacacguuguauugaaua

SEQ ID NO: 1074911 - RNA, 22 nt, Human
auucugauucauuaggucuagg

SEQ ID NO: 1074912 - RNA, 22 nt, Human
aauuucuguaugaauagagaaa

SEQ ID NO: 1074913 - RNA, 20 nt, Human
aucagcaacugccacucagu

SEQ ID NO: 1074914 - RNA, 22 nt, Human
gugaagcaguugcguggguucc

SEQ ID NO: 1074915 - RNA, 19 nt, Human
ucugcuggcagaauucccu

SEQ ID NO: 1074916 - RNA, 22 nt, Human
uagcagcacaaauggacuauga

SEQ ID NO: 1074917 - RNA, 22 nt, Human
aggcugaggugugcugugaucg

SEQ ID NO: 1074918 - RNA, 19 nt, Human
ugaggccaaggucacagau

SEQ ID NO: 1074919 - RNA, 22 nt, Human
ccccucauuacaggcggggagc

SEQ ID NO: 1074920 - RNA, 22 nt, Human
cugcucugaguauuaacggagg

SEQ ID NO: 1074921 - RNA, 22 nt, Human
cuggagccaugucuugacugcu

SEQ ID NO: 1074922 - RNA, 20 nt, Human
agucccagaucaaauuucug

SEQ ID NO: 1074923 - RNA, 22 nt, Human
ccaggaggggucucugucuccc

SEQ ID NO: 1074924 - RNA, 22 nt, Human
gagugcaguaucuucugugucc

SEQ ID NO: 1074925 - RNA, 22 nt, Human
gaguuaauguguacacaaaggg

SEQ ID NO: 1074926 - RNA, 23 nt, Human
cucugagacccagguggacacgg

SEQ ID NO: 1074927 - RNA, 22 nt, Human
ugggccagggcacccaguccag

SEQ ID NO: 1074928 - RNA, 19 nt, Human
cucugccucuggcuguggc

SEQ ID NO: 1074929 - RNA, 22 nt, Human
aaauuauaggugccaccuugga

SEQ ID NO: 1074930 - RNA, 22 nt, Human
cuuguugcuaacauaugcuucu

SEQ ID NO: 1074931 - RNA, 22 nt, Human
uuauuuaggaggaaacugaggu

SEQ ID NO: 1074932 - RNA, 22 nt, Human
uggugcaggaguuggcagggac

SEQ ID NO: 1074933 - RNA, 22 nt, Human
aaguuuguuuuagucuaaugau

SEQ ID NO: 1074934 - RNA, 22 nt, Human
ucuucagugcauguuaccuaua

SEQ ID NO: 1074935 - RNA, 22 nt, Human
ucuucccucuucugccaaauac

SEQ ID NO: 1074936 - RNA, 22 nt, Human
aauguguacaugacagauagaa

SEQ ID NO: 1074937 - RNA, 20 nt, Human
uugaaaaugcauugugcagu

SEQ ID NO: 1074938 - RNA, 22 nt, Human
ugaggccugcccuggggaaguu

SEQ ID NO: 1074939 - RNA, 22 nt, Human
gguugccggggcaggacuggaa

SEQ ID NO: 1074940 - RNA, 19 nt, Human
ugaggggaggagaggccug

SEQ ID NO: 1074941 - RNA, 19 nt, Human
agggccaggauucuggaac

SEQ ID NO: 1074942 - RNA, 22 nt, Human
uuucacagauccuacagcuugu

SEQ ID NO: 1074943 - RNA, 22 nt, Human
aagggugggcaccgccagguca

SEQ ID NO: 1074944 - RNA, 22 nt, Human
agagaacauuagcaaaaacagc

SEQ ID NO: 1074945 - RNA, 22 nt, Human
gggcugacaguuuccccugaaa

SEQ ID NO: 1074946 - RNA, 22 nt, Human
uuucuauucuggaucuguggca

SEQ ID NO: 1074947 - RNA, 22 nt, Human
acaacaguccaguauagacugu

SEQ ID NO: 1074948 - RNA, 22 nt, Human
ugucaugccauuuaaaauguuu

SEQ ID NO: 1074949 - RNA, 22 nt, Human
ugcagaagacacaagguaacgu

SEQ ID NO: 1074950 - RNA, 22 nt, Human
uagaauaaguugaugauauaug

SEQ ID NO: 1074951 - RNA, 22 nt, Human
acccucagacauauuccaucau

SEQ ID NO: 1074952 - RNA, 22 nt, Human
uuuacagcuucuauacuaugug

SEQ ID NO: 1074953 - RNA, 22 nt, Human
acaaagugcacaagaugagaac

SEQ ID NO: 1074954 - RNA, 22 nt, Human
agguagaggccuccaggcagca

SEQ ID NO: 1074955 - RNA, 20 nt, Human
ccagcuuucccugcagcauc

SEQ ID NO: 1074956 - RNA, 22 nt, Human
ugggccaggucugugucagcug

SEQ ID NO: 1074957 - RNA, 22 nt, Human
ggucagguuuuuaggagugacc

SEQ ID NO: 1074958 - RNA, 22 nt, Human
cucacuguccaacaggcuuuac

SEQ ID NO: 1074959 - RNA, 22 nt, Human
acuuccugcaaucguccacucc

SEQ ID NO: 1074960 - RNA, 22 nt, Human
uggaauuaucugaagugauuug

SEQ ID NO: 1074961 - RNA, 22 nt, Human
ugcuggaggaguuuacuguggc

SEQ ID NO: 1074962 - RNA, 22 nt, Human
auuauucaauguuauuucagug

SEQ ID NO: 1074963 - RNA, 22 nt, Human
gccaggugcauggcugagucuc

SEQ ID NO: 1074964 - RNA, 22 nt, Human
aagauggagcacgagcagaagc

SEQ ID NO: 1074965 - RNA, 22 nt, Human
uccuggcuaguuuugcugaaau

SEQ ID NO: 1074966 - RNA, 22 nt, Human
uuuauucugugcuacaugaaga

SEQ ID NO: 1074967 - RNA, 22 nt, Human
uacagcuuuucauauuuguguu

SEQ ID NO: 1074968 - RNA, 22 nt, Human
acagcagagacacucaggaggc

SEQ ID NO: 1074969 - RNA, 22 nt, Human
acauguaaacauuuacaguauu

SEQ ID NO: 1074970 - RNA, 17 nt, Human
ccagguggaaucgugga

SEQ ID NO: 1074971 - RNA, 22 nt, Human
uccuggcuaacacggugacacc

SEQ ID NO: 1074972 - RNA, 22 nt, Human
caugauuuacuaaaauuuguuu

SEQ ID NO: 1074973 - RNA, 23 nt, Human
ucucaggguggcugggcccaucc

SEQ ID NO: 1074974 - RNA, 21 nt, Human
ucacagacuggucagugaggc

SEQ ID NO: 1074975 - RNA, 22 nt, Human
agccccaggcccggacgccucu

SEQ ID NO: 1074976 - RNA, 22 nt, Human
ggggaugguagaccggugacgu

SEQ ID NO: 1074977 - RNA, 22 nt, Human
agucugggagggaugccagugu

SEQ ID NO: 1074978 - RNA, 22 nt, Human
gccuggagcuacuggacacuga

SEQ ID NO: 1074979 - RNA, 22 nt, Human
auuuuacuuugugaauauugac

SEQ ID NO: 1074980 - RNA, 22 nt, Human
gcuuccuggagggagagagcug

SEQ ID NO: 1074981 - RNA, 22 nt, Human
auguccaauuucugaggcugcu

SEQ ID NO: 1074982 - RNA, 22 nt, Human
uguacagcugccuuuuuuacuu

SEQ ID NO: 1074983 - RNA, 22 nt, Human
cugccgagugggucaugaggca

SEQ ID NO: 1074984 - RNA, 22 nt, Human
gugcucaggggcaauccuggga

SEQ ID NO: 1074985 - RNA, 22 nt, Human
caagagcucuccacuagguugg

SEQ ID NO: 1074986 - RNA, 22 nt, Human
gcagccccaggagacgcccagg

SEQ ID NO: 1074987 - RNA, 22 nt, Human
uccugucugcucacagagcugg

SEQ ID NO: 1074988 - RNA, 22 nt, Human
uuacuuuagaaauagucaucaa

SEQ ID NO: 1074989 - RNA, 20 nt, Human
aagggcagagggaacagacu

SEQ ID NO: 1074990 - RNA, 22 nt, Human
ucuucucuccugcuuggcagaa

SEQ ID NO: 1074991 - RNA, 22 nt, Human
acugagcugugacaaugcuuaa

SEQ ID NO: 1074992 - RNA, 22 nt, Human
agggaagggcagggucuaugca

SEQ ID NO: 1074993 - RNA, 22 nt, Human
auuaaauguuccuuaaauuaua

SEQ ID NO: 1074994 - RNA, 20 nt, Human
ccucugccuuucuagucuga

SEQ ID NO: 1074995 - RNA, 22 nt, Human
ccuggccucgugcucacggcuc

SEQ ID NO: 1074996 - RNA, 22 nt, Human
gacaauuucucaauauagaaac

SEQ ID NO: 1074997 - RNA, 22 nt, Human
aaauuucaguuaccuuuacguu

SEQ ID NO: 1074998 - RNA, 21 nt, Human
acugccugucuccauagucua

SEQ ID NO: 1074999 - RNA, 22 nt, Human
cagaagggacaggguuuguaga

SEQ ID NO: 1075000 - RNA, 22 nt, Human
cccaggcugaguuagagguguc

SEQ ID NO: 1075001 - RNA, 22 nt, Human
ugaacacauuugggaaaaucuu

SEQ ID NO: 1075002 - RNA, 22 nt, Human
uuugauaauacacaagagaaag

SEQ ID NO: 1075003 - RNA, 22 nt, Human
acacagaaccucauagccucuc

SEQ ID NO: 1075004 - RNA, 19 nt, Human
uuuauuugagacaugccuu

SEQ ID NO: 1075005 - RNA, 22 nt, Human
aguuacaaacacuaucaguucu

SEQ ID NO: 1075006 - RNA, 18 nt, Human
uuccauaauguauguaac

SEQ ID NO: 1075007 - RNA, 22 nt, Human
uggggugugcucagagcagggg

SEQ ID NO: 1075008 - RNA, 21 nt, Human
auacuacauuucucugacuuu

SEQ ID NO: 1075009 - RNA, 20 nt, Human
ccagaagagaugaucaucca

SEQ ID NO: 1075010 - RNA, 19 nt, Human
gcuguuaaggacccucgga

SEQ ID NO: 1075011 - RNA, 22 nt, Human
aucauuccacauguaccacuag

SEQ ID NO: 1075012 - RNA, 22 nt, Human
ccagguggaggugugagguccu

SEQ ID NO: 1075013 - RNA, 22 nt, Human
aaacaguauuaucaauauauuu

SEQ ID NO: 1075014 - RNA, 22 nt, Human
ccagguaacuugagaacaugag

SEQ ID NO: 1075015 - RNA, 20 nt, Human
gagcagugagccagggaaag

SEQ ID NO: 1075016 - RNA, 22 nt, Human
ugcucccaggcauucucuguug

SEQ ID NO: 1075017 - RNA, 22 nt, Human
accaaaaauuguggggcugaau

SEQ ID NO: 1075018 - RNA, 22 nt, Human
cagugguggaaugaggaauugu

SEQ ID NO: 1075019 - RNA, 22 nt, Human
ugccugaugcaggaguaucaga

SEQ ID NO: 1075020 - RNA, 22 nt, Human
uagaaaagaauuuuauuugaua

SEQ ID NO: 1075021 - RNA, 22 nt, Human
gccugcagaggugcugcuagcu

SEQ ID NO: 1075022 - RNA, 21 nt, Human
ccccugggagcccugucagua

SEQ ID NO: 1075023 - RNA, 22 nt, Human
uaaaggcuuuuagugaugguaa

SEQ ID NO: 1075024 - RNA, 22 nt, Human
ugcaggagaaaguacggagcgu

SEQ ID NO: 1075025 - RNA, 22 nt, Human
uuacaaagcaggucagcugaaa

SEQ ID NO: 1075026 - RNA, 22 nt, Human
aagugauucuagucaugauucu

SEQ ID NO: 1075027 - RNA, 22 nt, Human
acugaaaaugaauuagaaacag

SEQ ID NO: 1075028 - RNA, 22 nt, Human
gcucugcucuugacuuaccagg

SEQ ID NO: 1075029 - RNA, 22 nt, Human
ucuucagcuguagucauuguuc

SEQ ID NO: 1075030 - RNA, 22 nt, Human
uuugaaauaugugaugagagag

SEQ ID NO: 1075031 - RNA, 23 nt, Human
ggagccagccuguggggagcggg

SEQ ID NO: 1075032 - RNA, 22 nt, Human
gcagccacagaggagggaugca

SEQ ID NO: 1075033 - RNA, 22 nt, Human
cacauuuaggagguggggaagc

SEQ ID NO: 1075034 - RNA, 22 nt, Human
aagcauuuuagauaaagcauca

SEQ ID NO: 1075035 - RNA, 22 nt, Human
cagcagaaauggauuuugagau

SEQ ID NO: 1075036 - RNA, 22 nt, Human
aggcugagaaagugggaagaug

SEQ ID NO: 1075037 - RNA, 22 nt, Human
uuugugcuaaugcuagauuacu

SEQ ID NO: 1075038 - RNA, 18 nt, Human
agcagcuuugugcuugau

SEQ ID NO: 1075039 - RNA, 22 nt, Human
ucauuucuauugcuacugucug

SEQ ID NO: 1075040 - RNA, 18 nt, Human
uacagauuauagauacau

SEQ ID NO: 1075041 - RNA, 22 nt, Human
accugaggccuccccagcagac

SEQ ID NO: 1075042 - RNA, 22 nt, Human
cugagagcagggacuugagcca

SEQ ID NO: 1075043 - RNA, 22 nt, Human
aggagugggggcgagaaguuaa

SEQ ID NO: 1075044 - RNA, 22 nt, Human
cugagcugcucccgcugcagcg

SEQ ID NO: 1075045 - RNA, 22 nt, Human
ucaagcagagucaaaaguacca

SEQ ID NO: 1075046 - RNA, 22 nt, Human
acugccuguuuggcauggcccc

SEQ ID NO: 1075047 - RNA, 22 nt, Human
caggguggaagcuguagagugg

SEQ ID NO: 1075048 - RNA, 20 nt, Human
aaaaacaguaaugcugaaga

SEQ ID NO: 1075049 - RNA, 22 nt, Human
cuggcagcuucaggacacucgg

SEQ ID NO: 1075050 - RNA, 22 nt, Human
aauaagaugugcuugaguuugg

SEQ ID NO: 1075051 - RNA, 22 nt, Human
gauggcagucaaccaggugagg

SEQ ID NO: 1075052 - RNA, 22 nt, Human
cugccucuauucacugaggcag

SEQ ID NO: 1075053 - RNA, 22 nt, Human
cccagcucuuuuagcggcaucu

SEQ ID NO: 1075054 - RNA, 22 nt, Human
gaacagcagcuuccugggaauu

SEQ ID NO: 1075055 - RNA, 22 nt, Human
accugagaccuaaucugacugu

SEQ ID NO: 1075056 - RNA, 22 nt, Human
gaacagcuauaaucaucugucc

SEQ ID NO: 1075057 - RNA, 22 nt, Human
ccagauggguuacuucaagcaa

SEQ ID NO: 1075058 - RNA, 22 nt, Human
cucuggccugcuuccucaggua

SEQ ID NO: 1075059 - RNA, 22 nt, Human
gcacacagagaggugguauguc

SEQ ID NO: 1075060 - RNA, 22 nt, Human
aagggcagaauagagaagaugg

SEQ ID NO: 1075061 - RNA, 22 nt, Human
cacaguuuuaucuuauacugau

SEQ ID NO: 1075062 - RNA, 22 nt, Human
ucaaaauuuuauuucucaagga

SEQ ID NO: 1075063 - RNA, 22 nt, Human
aacagaauuguacaccagggag

SEQ ID NO: 1075064 - RNA, 22 nt, Human
ggcuggagacaacguccugccc

SEQ ID NO: 1075065 - RNA, 22 nt, Human
aaagcaauggaugagaaucugu

SEQ ID NO: 1075066 - RNA, 22 nt, Human
cagagaagagucuggccucucu

SEQ ID NO: 1075067 - RNA, 22 nt, Human
ggccugucucacccccgggugc

SEQ ID NO: 1075068 - RNA, 22 nt, Human
cucuggacacuggcaugggguc

SEQ ID NO: 1075069 - RNA, 22 nt, Human
ccagagucuaugaguccucauu

SEQ ID NO: 1075070 - RNA, 21 nt, Human
caguauuuuaagcagugaguu

SEQ ID NO: 1075071 - RNA, 22 nt, Human
uggccugggcaugaagcaucgu

SEQ ID NO: 1075072 - RNA, 22 nt, Human
agcaaagcuuccauaaagcagc

SEQ ID NO: 1075073 - RNA, 22 nt, Human
uuguaagauggauaggaacagc

SEQ ID NO: 1075074 - RNA, 22 nt, Human
cagcagaaguccgacuccaguc

SEQ ID NO: 1075075 - RNA, 22 nt, Human
cacccucaagcaguggcacgug

SEQ ID NO: 1075076 - RNA, 22 nt, Human
agcacaggacguagagcuugga

SEQ ID NO: 1075077 - RNA, 22 nt, Human
ggaggaagugcaguucuacuac

SEQ ID NO: 1075078 - RNA, 22 nt, Human
ccugggaaucggugcguugagg

SEQ ID NO: 1075079 - RNA, 22 nt, Human
cgggcagaucacacagggcuug

SEQ ID NO: 1075080 - RNA, 22 nt, Human
uggagaaggccggccaggagug

SEQ ID NO: 1075081 - RNA, 22 nt, Human
cagaggcagaggucaucucugg

SEQ ID NO: 1075082 - RNA, 21 nt, Human
uuucuaaguaacuggcagcau

SEQ ID NO: 1075083 - RNA, 22 nt, Human
gcaggaacuggagcuggauguu

SEQ ID NO: 1075084 - RNA, 22 nt, Human
gagcagugguugaacagaggca

SEQ ID NO: 1075085 - RNA, 22 nt, Human
gcuucauuuugcccucuggugg

SEQ ID NO: 1075086 - RNA, 22 nt, Human
uuuaccaaauagauuaugucag

SEQ ID NO: 1075087 - RNA, 22 nt, Human
cuggggcugcagcgaucuucau

SEQ ID NO: 1075088 - RNA, 22 nt, Human
uuguguguacugguuaugggca

SEQ ID NO: 1075089 - RNA, 22 nt, Human
uaggaacaguccuagaaaucug

SEQ ID NO: 1075090 - RNA, 22 nt, Human
gauguuuggcucaaacgagugu

SEQ ID NO: 1075091 - RNA, 22 nt, Human
auguuacacuguuucacguucc

SEQ ID NO: 1075092 - RNA, 22 nt, Human
guacuucuuuagucaauaugua

SEQ ID NO: 1075093 - RNA, 22 nt, Human
ggcugcagaaguacuuccggau

SEQ ID NO: 1075094 - RNA, 22 nt, Human
gcuuuuuuagguaagacccagg

SEQ ID NO: 1075095 - RNA, 22 nt, Human
agugcuuucccugaaaccuucc

SEQ ID NO: 1075096 - RNA, 22 nt, Human
cccagcugcaccucuauggccu

SEQ ID NO: 1075097 - RNA, 22 nt, Human
cugccuuggcccuaguucaugg

SEQ ID NO: 1075098 - RNA, 22 nt, Human
uccauucauucauugaugaaca

SEQ ID NO: 1075099 - RNA, 22 nt, Human
cagguugguauucaucuccaca

SEQ ID NO: 1075100 - RNA, 22 nt, Human
uuacuugacauaaaugaguuua

SEQ ID NO: 1075101 - RNA, 19 nt, Human
ccuuccuccccagggccau

SEQ ID NO: 1075102 - RNA, 22 nt, Human
ucugagagcaaggcauuagcag

SEQ ID NO: 1075103 - RNA, 22 nt, Human
uucaaacuuaaggagcagcaga

SEQ ID NO: 1075104 - RNA, 22 nt, Human
agauauuuguaucuugcuauug

SEQ ID NO: 1075105 - RNA, 23 nt, Human
aacaauagguuuuggcagaauag

SEQ ID NO: 1075106 - RNA, 22 nt, Human
gugggccuugcagggugcaggg

SEQ ID NO: 1075107 - RNA, 22 nt, Human
ggcugccuggaccuccucuuuc

SEQ ID NO: 1075108 - RNA, 22 nt, Human
cuggcagcgcagcaugaagucg

SEQ ID NO: 1075109 - RNA, 20 nt, Human
ggcuuucugugauccucagu

SEQ ID NO: 1075110 - RNA, 22 nt, Human
ucagaggccugaaagaauuugg

SEQ ID NO: 1075111 - RNA, 23 nt, Human
agaggcacuaauuauucagagau

SEQ ID NO: 1075112 - RNA, 22 nt, Human
gagggccacguucagggcucuc

SEQ ID NO: 1075113 - RNA, 22 nt, Human
uuuucuuaggugcuccaaguag

SEQ ID NO: 1075114 - RNA, 22 nt, Human
uugcagagcaguaggaauauag

SEQ ID NO: 1075115 - RNA, 22 nt, Human
ugcuuccuugagcucuccaauc

SEQ ID NO: 1075116 - RNA, 22 nt, Human
gaaaugucucuugauuuuugga

SEQ ID NO: 1075117 - RNA, 22 nt, Human
uuugcauugcauuaaguauucu

SEQ ID NO: 1075118 - RNA, 22 nt, Human
aauuccaaaucaacuagucuag

SEQ ID NO: 1075119 - RNA, 22 nt, Human
gacccugccaugagugacaggg

SEQ ID NO: 1075120 - RNA, 22 nt, Human
agugacugggcagggcagggcc

SEQ ID NO: 1075121 - RNA, 22 nt, Human
aucuaagauuuugcuaagauca

SEQ ID NO: 1075122 - RNA, 22 nt, Human
gcugugcagucuuuggugugcc

SEQ ID NO: 1075123 - RNA, 22 nt, Human
gcugucaagguagaaaacagag

SEQ ID NO: 1075124 - RNA, 22 nt, Human
uuuguaagcaaguuaacauuuu

SEQ ID NO: 1075125 - RNA, 22 nt, Human
cagccaucccagccugugguuc

SEQ ID NO: 1075126 - RNA, 22 nt, Human
ucacagaauuuuugcuuccagu

SEQ ID NO: 1075127 - RNA, 18 nt, Human
cccugagaugaugcugug

SEQ ID NO: 1075128 - RNA, 22 nt, Human
uuucuaaacaaagggaguuugg

SEQ ID NO: 1075129 - RNA, 22 nt, Human
ccuggccuuaagggcagggagc

SEQ ID NO: 1075130 - RNA, 22 nt, Human
cuacauuaaauuggcuuacuua

SEQ ID NO: 1075131 - RNA, 22 nt, Human
aaaauauuuuagggccaggaga

SEQ ID NO: 1075132 - RNA, 22 nt, Human
ugcuucuggcuuaucucgugcc

SEQ ID NO: 1075133 - RNA, 22 nt, Human
acauauguuguaaacauuccaa

SEQ ID NO: 1075134 - RNA, 22 nt, Human
ugagaauaagagauaguuuauu

SEQ ID NO: 1075135 - RNA, 22 nt, Human
agcagcugggcucagagcuggg

SEQ ID NO: 1075136 - RNA, 22 nt, Human
agaaagggucacugaaagagga

SEQ ID NO: 1075137 - RNA, 22 nt, Human
uuuugucuaagaacuuugcaaa

SEQ ID NO: 1075138 - RNA, 22 nt, Human
gguuuccugcauugggaaauuu

SEQ ID NO: 1075139 - RNA, 22 nt, Human
ggccuuggugcucuguguugca

SEQ ID NO: 1075140 - RNA, 22 nt, Human
agcuggcuucacaggcagugug

SEQ ID NO: 1075141 - RNA, 22 nt, Human
gggcucucaugaguguguggua

SEQ ID NO: 1075142 - RNA, 22 nt, Human
caggcuugauuauucagacaau

SEQ ID NO: 1075143 - RNA, 22 nt, Human
acuggauugggaaaguacuuca

SEQ ID NO: 1075144 - RNA, 23 nt, Human
ucugcucugaaguucggcugagc

SEQ ID NO: 1075145 - RNA, 22 nt, Human
gcugggagaggcccugaaguga

SEQ ID NO: 1075146 - RNA, 22 nt, Human
ugcaagaggguguucaguuugu

SEQ ID NO: 1075147 - RNA, 22 nt, Human
gugguccuuacaggaggcuuac

SEQ ID NO: 1075148 - RNA, 22 nt, Human
ccaaggcuccucagcuggucuu

SEQ ID NO: 1075149 - RNA, 22 nt, Human
aggcugagcugguagugaguac

SEQ ID NO: 1075150 - RNA, 22 nt, Human
cccagcagccagaaugaggagc

SEQ ID NO: 1075151 - RNA, 22 nt, Human
aauucacauauacauuauuccu

SEQ ID NO: 1075152 - RNA, 18 nt, Human
ucacagugcucuugccua

SEQ ID NO: 1075153 - RNA, 22 nt, Human
agcagggcagguaaggaucaga

SEQ ID NO: 1075154 - RNA, 22 nt, Human
aagggcagcuuaaauugguagc

SEQ ID NO: 1075155 - RNA, 22 nt, Human
agaaaucacuuagaggaaguga

SEQ ID NO: 1075156 - RNA, 22 nt, Human
ugcugccacugguagucucauu

SEQ ID NO: 1075157 - RNA, 21 nt, Human
ucugcccuccaggagcucaua

SEQ ID NO: 1075158 - RNA, 22 nt, Human
ggcucaggaccugggauugcca

SEQ ID NO: 1075159 - RNA, 22 nt, Human
agaaaguuuugugcuauauaug

SEQ ID NO: 1075160 - RNA, 22 nt, Human
ucccagggauuaggacauggau

SEQ ID NO: 1075161 - RNA, 22 nt, Human
cagcaguguacaaggugucaga

SEQ ID NO: 1075162 - RNA, 22 nt, Human
ugggagcagccaacauggccuu

SEQ ID NO: 1075163 - RNA, 22 nt, Human
aggcugaggaucguacuuucca

SEQ ID NO: 1075164 - RNA, 22 nt, Human
caaauuuaaguuagaaagcaau

SEQ ID NO: 1075165 - RNA, 22 nt, Human
ucccaggcuaggccucugcguu

SEQ ID NO: 1075166 - RNA, 22 nt, Human
ggcccugcaagguacccaggcc

SEQ ID NO: 1075167 - RNA, 22 nt, Human
cagcuguggcugccacugcucc

SEQ ID NO: 1075168 - RNA, 22 nt, Human
gcauagcuuugaugcugccuua

SEQ ID NO: 1075169 - RNA, 22 nt, Human
gaggggcagaaugugaucaggg

SEQ ID NO: 1075170 - RNA, 22 nt, Human
ccuccagguguuacauaugacu

SEQ ID NO: 1075171 - RNA, 22 nt, Human
auggggaagagccagugagcug

SEQ ID NO: 1075172 - RNA, 22 nt, Human
gcagagugggagcccagggcug

SEQ ID NO: 1075173 - RNA, 22 nt, Human
ccugggagggcaagugcugaug

SEQ ID NO: 1075174 - RNA, 22 nt, Human
uaggaacaugcccuuaccuucc

SEQ ID NO: 1075175 - RNA, 22 nt, Human
uaaguuagcccuauuaaauuaa

SEQ ID NO: 1075176 - RNA, 22 nt, Human
acaguggagcucagaugaaaau

SEQ ID NO: 1075177 - RNA, 22 nt, Human
cccuuccuccucgccugucaga

SEQ ID NO: 1075178 - RNA, 22 nt, Human
ggcugcuguacugaugucaguu

SEQ ID NO: 1075179 - RNA, 22 nt, Human
cugucccuucauuauucacuac

SEQ ID NO: 1075180 - RNA, 22 nt, Human
ucuaguuuuagcuugaguugca

SEQ ID NO: 1075181 - RNA, 22 nt, Human
agucagcacuccugaggaucac

SEQ ID NO: 1075182 - RNA, 22 nt, Human
agccagacauggcuccugcucc

SEQ ID NO: 1075183 - RNA, 22 nt, Human
ucuggcucugaauucacuucug

SEQ ID NO: 1075184 - RNA, 22 nt, Human
aauaucuuggcccaacuccaga

SEQ ID NO: 1075185 - RNA, 22 nt, Human
cgagcagaagccugguggucug

SEQ ID NO: 1075186 - RNA, 22 nt, Human
cucaggauuuacuaauuucaag

SEQ ID NO: 1075187 - RNA, 22 nt, Human
cucuuuucaaaccuguuuaugg

SEQ ID NO: 1075188 - RNA, 22 nt, Human
uucugucacuuaggaggucaua

SEQ ID NO: 1075189 - RNA, 22 nt, Human
ggaguaggaguagaacucauca

SEQ ID NO: 1075190 - RNA, 19 nt, Human
augagcuggcauuucaggu

SEQ ID NO: 1075191 - RNA, 22 nt, Human
cacacaaauauucuggaggcaa

SEQ ID NO: 1075192 - RNA, 21 nt, Human
acuggcugccaugauccaggg

SEQ ID NO: 1075193 - RNA, 22 nt, Human
gcaggagagccagcaggcuucc

SEQ ID NO: 1075194 - RNA, 22 nt, Human
uccuccagaaacugaggcagaa

SEQ ID NO: 1075195 - RNA, 22 nt, Human
agaagagaguccuaccccauac

SEQ ID NO: 1075196 - RNA, 22 nt, Human
cauucauuuacuuucaacagcu

SEQ ID NO: 1075197 - RNA, 22 nt, Human
aucauucagccuaagcaaguac

SEQ ID NO: 1075198 - RNA, 22 nt, Human
cuggccgguauuugccucuggg

SEQ ID NO: 1075199 - RNA, 22 nt, Human
gaguguuuuacucaaagaaaga

SEQ ID NO: 1075200 - RNA, 21 nt, Human
ggcagcugaccgcgcggugca

SEQ ID NO: 1075201 - RNA, 22 nt, Human
ugaagauaaauuguacugaaga

SEQ ID NO: 1075202 - RNA, 22 nt, Human
gcagcagcccagggcucucaga

SEQ ID NO: 1075203 - RNA, 23 nt, Human
uuucacaaugagcauuacagaau

SEQ ID NO: 1075204 - RNA, 22 nt, Human
uaauacuuaccuugcagagucu

SEQ ID NO: 1075205 - RNA, 22 nt, Human
ccucagggaggccucuguggcu

SEQ ID NO: 1075206 - RNA, 22 nt, Human
ggcaccuggagguuuacuggau

SEQ ID NO: 1075207 - RNA, 22 nt, Human
agacagggagggagcgcggcug

SEQ ID NO: 1075208 - RNA, 22 nt, Human
aauucuacauugguucacauuu

SEQ ID NO: 1075209 - RNA, 22 nt, Human
caaauuaaugugucucaaaaua

SEQ ID NO: 1075210 - RNA, 22 nt, Human
gaggcucagggaaacagcgcag

SEQ ID NO: 1075211 - RNA, 20 nt, Human
aguaccuuuuguauguuacc

SEQ ID NO: 1075212 - RNA, 22 nt, Human
gucacuggggccacaugcagaa

SEQ ID NO: 1075213 - RNA, 21 nt, Human
guucaaauccugacacuacac

SEQ ID NO: 1075214 - RNA, 22 nt, Human
uguauuuuuagaccuuuagacc

SEQ ID NO: 1075215 - RNA, 22 nt, Human
uuugauaacagugaauaucaug

SEQ ID NO: 1075216 - RNA, 22 nt, Human
ccugugugcugaugacgacaga

SEQ ID NO: 1075217 - RNA, 22 nt, Human
ugaagcaggaaccagcagcauu

SEQ ID NO: 1075218 - RNA, 23 nt, Human
acagaucaucucgaaacaacuau

SEQ ID NO: 1075219 - RNA, 22 nt, Human
cagcagaguuuggcuucuaaug

SEQ ID NO: 1075220 - RNA, 22 nt, Human
agcaaugacuuugaaaucauga

SEQ ID NO: 1075221 - RNA, 22 nt, Human
ucaguggagagcuuccaggauu

SEQ ID NO: 1075222 - RNA, 22 nt, Human
uuugauuuacuggauauucuca

SEQ ID NO: 1075223 - RNA, 22 nt, Human
ucagauggauuuauacuauuuc

SEQ ID NO: 1075224 - RNA, 23 nt, Human
uccucccugacuucuacagcaca

SEQ ID NO: 1075225 - RNA, 22 nt, Human
agagacuggagaugggcagugu

SEQ ID NO: 1075226 - RNA, 22 nt, Human
gagugagggcagcaggggcugc

SEQ ID NO: 1075227 - RNA, 22 nt, Human
cauugucacccaaagcucauag

SEQ ID NO: 1075228 - RNA, 22 nt, Human
aaucacauuagugaaacacuga

SEQ ID NO: 1075229 - RNA, 22 nt, Human
uuagucuucuuccuuauauguu

SEQ ID NO: 1075230 - RNA, 18 nt, Human
aguggucuguuauaucau

SEQ ID NO: 1075231 - RNA, 22 nt, Human
cuguuucaauuugaggaucagc

SEQ ID NO: 1075232 - RNA, 22 nt, Human
cccuuucccuucuggcucaggg

SEQ ID NO: 1075233 - RNA, 22 nt, Human
agcagggcuccugaaagccgcg

SEQ ID NO: 1075234 - RNA, 19 nt, Human
guaacaguggacauuuuag

SEQ ID NO: 1075235 - RNA, 22 nt, Human
ccugcugucccucugggcucca

SEQ ID NO: 1075236 - RNA, 22 nt, Human
cugggcacuugcucacagcucu

SEQ ID NO: 1075237 - RNA, 22 nt, Human
caggaacauguuggaaagaaau

SEQ ID NO: 1075238 - RNA, 22 nt, Human
uucuucuuuccuauaauuaauu

SEQ ID NO: 1075239 - RNA, 22 nt, Human
auugucuucuggucuuaucuuu

SEQ ID NO: 1075240 - RNA, 22 nt, Human
ugcugugagguugagaaggaag

SEQ ID NO: 1075241 - RNA, 22 nt, Human
uggagccaggcuggcccugcca

SEQ ID NO: 1075242 - RNA, 22 nt, Human
gcagauggcucagacacugggg

SEQ ID NO: 1075243 - RNA, 22 nt, Human
auacagauugcuauacuuacaa

SEQ ID NO: 1075244 - RNA, 22 nt, Human
aucuuuagagucaucugagugu

SEQ ID NO: 1075245 - RNA, 22 nt, Human
ucaaggugcugugcugugcuag

SEQ ID NO: 1075246 - RNA, 22 nt, Human
uuacagaaaagggcuuuaagag

SEQ ID NO: 1075247 - RNA, 22 nt, Human
aggcagggugaugauaaugauu

SEQ ID NO: 1075248 - RNA, 22 nt, Human
augauucagcccaauuuuucua

SEQ ID NO: 1075249 - RNA, 22 nt, Human
gaggggcugcccuggugucagg

SEQ ID NO: 1075250 - RNA, 22 nt, Human
uacuugcuguuaguauuuuaca

SEQ ID NO: 1075251 - RNA, 20 nt, Human
caguagcaauaauuagaagc

SEQ ID NO: 1075252 - RNA, 22 nt, Human
gagaaggagcucaaauauggcu

SEQ ID NO: 1075253 - RNA, 21 nt, Human
ucagguggcagaguguuuaug

SEQ ID NO: 1075254 - RNA, 22 nt, Human
ccugggcuguugcaucauccuu

SEQ ID NO: 1075255 - RNA, 22 nt, Human
cuggagcugucuucacaggccu

SEQ ID NO: 1075256 - RNA, 22 nt, Human
agcugguaugaacaggauagga

SEQ ID NO: 1075257 - RNA, 22 nt, Human
gaggugaguggaucacgagguc

SEQ ID NO: 1075258 - RNA, 22 nt, Human
ggcaggcuguucaccugcuuuu

SEQ ID NO: 1075259 - RNA, 22 nt, Human
uuuguuuugaacuagcucagaa

SEQ ID NO: 1075260 - RNA, 22 nt, Human
uuucuaagacauuugucaucuu

SEQ ID NO: 1075261 - RNA, 22 nt, Human
ucagacagggagucagaaaaua

SEQ ID NO: 1075262 - RNA, 22 nt, Human
cagaaacacuguauuuagggaa

SEQ ID NO: 1075263 - RNA, 22 nt, Human
ccagguguaggacaccaaggga

SEQ ID NO: 1075264 - RNA, 22 nt, Human
ugcuuggccuacuuguccuuug

SEQ ID NO: 1075265 - RNA, 22 nt, Human
caggcugggaacgccacccgcu

SEQ ID NO: 1075266 - RNA, 22 nt, Human
augcccgauaccuaguuaacuc

SEQ ID NO: 1075267 - RNA, 22 nt, Human
gcugaaguguggagugacaguu

SEQ ID NO: 1075268 - RNA, 22 nt, Human
uauaacuaauacuggccaugag

SEQ ID NO: 1075269 - RNA, 22 nt, Human
gucuuucuaugaugaacuguug

SEQ ID NO: 1075270 - RNA, 22 nt, Human
ggcagacacaaaaacauaaggu

SEQ ID NO: 1075271 - RNA, 22 nt, Human
aggccagaugucgggcuagaag

SEQ ID NO: 1075272 - RNA, 22 nt, Human
ugagguggcacacacuuccugc

SEQ ID NO: 1075273 - RNA, 22 nt, Human
agucucagaaaagaagcaugga

SEQ ID NO: 1075274 - RNA, 22 nt, Human
uggcccugaaggccuugagcau

SEQ ID NO: 1075275 - RNA, 22 nt, Human
cauugcacuccacccuaggcaa

SEQ ID NO: 1075276 - RNA, 22 nt, Human
gcuaaggagggucuugcaaauu

SEQ ID NO: 1075277 - RNA, 22 nt, Human
cuggaaaggguccucauucugu

SEQ ID NO: 1075278 - RNA, 22 nt, Human
auuucauguuaacugaacagaa

SEQ ID NO: 1075279 - RNA, 22 nt, Human
gcugggagaggcagcuuucgga

SEQ ID NO: 1075280 - RNA, 22 nt, Human
ucauuucaguccucugugugag

SEQ ID NO: 1075281 - RNA, 23 nt, Human
uucaacauuuauugagcguccgu

SEQ ID NO: 1075282 - RNA, 22 nt, Human
cucuggggaagcagccagcugg

SEQ ID NO: 1075283 - RNA, 22 nt, Human
aggcccuggguuagggcccacu

SEQ ID NO: 1075284 - RNA, 22 nt, Human
ugcuuccaauucaaaucugugg

SEQ ID NO: 1075285 - RNA, 22 nt, Human
aaagaauacccugggucauaaa

SEQ ID NO: 1075286 - RNA, 22 nt, Human
gaugauuuuguuggugauucaa

SEQ ID NO: 1075287 - RNA, 19 nt, Human
gcugcucugggucucaucu

SEQ ID NO: 1075288 - RNA, 22 nt, Human
gcugggcucagaccuagugaac

SEQ ID NO: 1075289 - RNA, 22 nt, Human
cccuccuggaggcggaugccca

SEQ ID NO: 1075290 - RNA, 22 nt, Human
gagauaaauuuuugauaaauau

SEQ ID NO: 1075291 - RNA, 23 nt, Human
gccucuggagccccagugcucag

SEQ ID NO: 1075292 - RNA, 22 nt, Human
uggccuggcucacagugagauu

SEQ ID NO: 1075293 - RNA, 22 nt, Human
ugggcucucgucccugcagaag

SEQ ID NO: 1075294 - RNA, 22 nt, Human
agagcagugcugaagaguaggg

SEQ ID NO: 1075295 - RNA, 22 nt, Human
gcaguggcuaggagucuggcgu

SEQ ID NO: 1075296 - RNA, 22 nt, Human
ucucccaaggcacagaaagagu

SEQ ID NO: 1075297 - RNA, 22 nt, Human
uauacagauggaaagauacaca

SEQ ID NO: 1075298 - RNA, 22 nt, Human
ggacaugauauuucaggaagac

SEQ ID NO: 1075299 - RNA, 22 nt, Human
ccagaggcuggguucaccucag

SEQ ID NO: 1075300 - RNA, 22 nt, Human
cuguacaggugaggagggggcu

SEQ ID NO: 1075301 - RNA, 22 nt, Human
uacacacuuacuggagaugaag

SEQ ID NO: 1075302 - RNA, 22 nt, Human
cugcagaggucuugcugauggu

SEQ ID NO: 1075303 - RNA, 22 nt, Human
ccuucucuacuccugaugcaug

SEQ ID NO: 1075304 - RNA, 22 nt, Human
ugcacacauaugagcaugugug

SEQ ID NO: 1075305 - RNA, 22 nt, Human
aacaagaagagagggacguaau

SEQ ID NO: 1075306 - RNA, 22 nt, Human
ccauguggugggaaggagaaug

SEQ ID NO: 1075307 - RNA, 22 nt, Human
cuggaacaguguuggagcuuga

SEQ ID NO: 1075308 - RNA, 22 nt, Human
uaggccauuccuucucuugauc

SEQ ID NO: 1075309 - RNA, 22 nt, Human
cuggcucaggaaaguugcugcu

SEQ ID NO: 1075310 - RNA, 22 nt, Human
cugaggcaggagaauugcugga

SEQ ID NO: 1075311 - RNA, 22 nt, Human
gcugaguggagcagucagcgcu

SEQ ID NO: 1075312 - RNA, 22 nt, Human
uaugaagcucucacuguguguc

SEQ ID NO: 1075313 - RNA, 22 nt, Human
uaagcaaauagcuagaucagag

SEQ ID NO: 1075314 - RNA, 22 nt, Human
uuugcauugcagugguuuacag

SEQ ID NO: 1075315 - RNA, 22 nt, Human
accugagcaugccaggagagug

SEQ ID NO: 1075316 - RNA, 22 nt, Human
uuucuucucugauuaaggcuca

SEQ ID NO: 1075317 - RNA, 22 nt, Human
uccuugaaugaagagaggugac

SEQ ID NO: 1075318 - RNA, 22 nt, Human
ggcuugcuucuuguccaggaau

SEQ ID NO: 1075319 - RNA, 18 nt, Human
uccgaggcaccauaaaaa

SEQ ID NO: 1075320 - RNA, 22 nt, Human
ggaugcugcuaucaggcuucga

SEQ ID NO: 1075321 - RNA, 22 nt, Human
aagcauuugugaaauucagaug

SEQ ID NO: 1075322 - RNA, 22 nt, Human
acagauacaaauauacaaauac

SEQ ID NO: 1075323 - RNA, 22 nt, Human
ucucccacugcaagcccaggcu

SEQ ID NO: 1075324 - RNA, 22 nt, Human
ugguccuggggugcaggcugac

SEQ ID NO: 1075325 - RNA, 22 nt, Human
agucagcugcugcacacagcag

SEQ ID NO: 1075326 - RNA, 22 nt, Human
ucagcaaugugauacugugcaa

SEQ ID NO: 1075327 - RNA, 22 nt, Human
aagcauuuuucacagcaacagc

SEQ ID NO: 1075328 - RNA, 22 nt, Human
cucccucugucuuguccagaaa

SEQ ID NO: 1075329 - RNA, 22 nt, Human
ugggccugugaugcugggcuau

SEQ ID NO: 1075330 - RNA, 22 nt, Human
augcaagagcaauaugguaugc

SEQ ID NO: 1075331 - RNA, 22 nt, Human
gucccagagagcacuaguccau

SEQ ID NO: 1075332 - RNA, 22 nt, Human
ucucagugcuauccauauucca

SEQ ID NO: 1075333 - RNA, 22 nt, Human
gugcuuuccauccucccugcug

SEQ ID NO: 1075334 - RNA, 22 nt, Human
acugacuuuggaauauuucuag

SEQ ID NO: 1075335 - RNA, 21 nt, Human
uccaggaguggcugggcaggg

SEQ ID NO: 1075336 - RNA, 22 nt, Human
gguggcucagugucaggcccug

SEQ ID NO: 1075337 - RNA, 22 nt, Human
cuucaauugccaccagcuagca

SEQ ID NO: 1075338 - RNA, 22 nt, Human
caugcaaaauguauuuuauuag

SEQ ID NO: 1075339 - RNA, 22 nt, Human
gaaaggagggcucacaaaagug

SEQ ID NO: 1075340 - RNA, 22 nt, Human
uuacaguggucauuugggaaaa

SEQ ID NO: 1075341 - RNA, 22 nt, Human
uagaaacagcauauauuagccc

SEQ ID NO: 1075342 - RNA, 22 nt, Human
caaagcaggaagaauauugaaa

SEQ ID NO: 1075343 - RNA, 22 nt, Human
uugcauuguugcaaugaaguau

SEQ ID NO: 1075344 - RNA, 22 nt, Human
aaacuccagugaauacuagaau

SEQ ID NO: 1075345 - RNA, 22 nt, Human
cugagcagaccauggcagaggu

SEQ ID NO: 1075346 - RNA, 22 nt, Human
cacugaaauauuaauaucuuau

SEQ ID NO: 1075347 - RNA, 22 nt, Human
gcagcagagaccccaggaagga

SEQ ID NO: 1075348 - RNA, 22 nt, Human
ugaauuuaucaaagauucuuaa

SEQ ID NO: 1075349 - RNA, 22 nt, Human
guguuuaauagguagcugaauc

SEQ ID NO: 1075350 - RNA, 22 nt, Human
uagccaggcgaggucagugucg

SEQ ID NO: 1075351 - RNA, 21 nt, Human
aguuggaggcaguuuggcaau

SEQ ID NO: 1075352 - RNA, 22 nt, Human
aucauaagacccagccaguauu

SEQ ID NO: 1075353 - RNA, 22 nt, Human
gguggcagaauaauugaagguc

SEQ ID NO: 1075354 - RNA, 22 nt, Human
aggccagaaauuuggaguaugu

SEQ ID NO: 1075355 - RNA, 22 nt, Human
uaacacauuuuccucauacgga

SEQ ID NO: 1075356 - RNA, 22 nt, Human
aaugaugacaggauaaagaaca

SEQ ID NO: 1075357 - RNA, 16 nt, Human
uggaaggggucuccgg

SEQ ID NO: 1075358 - RNA, 21 nt, Human
ccuggcuucagggugcacugg

SEQ ID NO: 1075359 - RNA, 23 nt, Human
gccugggacugguagugugaccu

SEQ ID NO: 1075360 - RNA, 22 nt, Human
aacuggaagagugaauauaacu

SEQ ID NO: 1075361 - RNA, 22 nt, Human
auuucucugccucagcuucugc

SEQ ID NO: 1075362 - RNA, 22 nt, Human
uacaaaugccugacacacagau

SEQ ID NO: 1075363 - RNA, 22 nt, Human
caggcacugugcaagggucucg

SEQ ID NO: 1075364 - RNA, 22 nt, Human
caccugccugguccuuagggcu

SEQ ID NO: 1075365 - RNA, 22 nt, Human
ggcaaaaacagcaaugacuuuu

SEQ ID NO: 1075366 - RNA, 22 nt, Human
agagcugcaccuaugcagaccu

SEQ ID NO: 1075367 - RNA, 22 nt, Human
guuacaaaugccaaagcugaga

SEQ ID NO: 1075368 - RNA, 22 nt, Human
ucugucugcucauuuaccucag

SEQ ID NO: 1075369 - RNA, 22 nt, Human
guccagggcuaaaucagguucc

SEQ ID NO: 1075370 - RNA, 22 nt, Human
agggaugguggagguugcaagu

SEQ ID NO: 1075371 - RNA, 16 nt, Human
cagaggcaccuggcuc

SEQ ID NO: 1075372 - RNA, 22 nt, Human
augagcuucccagacaggaugg

SEQ ID NO: 1075373 - RNA, 22 nt, Human
cuggccagaguuggagggugug

SEQ ID NO: 1075374 - RNA, 22 nt, Human
auugcuaggaacagguugcacc

SEQ ID NO: 1075375 - RNA, 22 nt, Human
acugccugccuuccagguacug

SEQ ID NO: 1075376 - RNA, 22 nt, Human
ccagauggugccugucagaagg

SEQ ID NO: 1075377 - RNA, 22 nt, Human
agacaaaggauuaaugaugaug

SEQ ID NO: 1075378 - RNA, 21 nt, Human
cucuugugucagagccagagg

SEQ ID NO: 1075379 - RNA, 22 nt, Human
cuuaacauccugcauuuuucuu

SEQ ID NO: 1075380 - RNA, 22 nt, Human
uaaggccaccguuauagaacca

SEQ ID NO: 1075381 - RNA, 22 nt, Human
agcagauggugucaugggaugg

SEQ ID NO: 1075382 - RNA, 22 nt, Human
acaaauucuuucugccuauugg

SEQ ID NO: 1075383 - RNA, 22 nt, Human
auuuuacuaaguggauaucugu

SEQ ID NO: 1075384 - RNA, 21 nt, Human
ucugucuuccucagccuaagg

SEQ ID NO: 1075385 - RNA, 22 nt, Human
aguuacuugagacguuuaugaa

SEQ ID NO: 1075386 - RNA, 22 nt, Human
ccucugugugugcaugcaugcg

SEQ ID NO: 1075387 - RNA, 22 nt, Human
uacugaaauggcagauauauaa

SEQ ID NO: 1075388 - RNA, 22 nt, Human
aaaucagucccucuuggaauuu

SEQ ID NO: 1075389 - RNA, 22 nt, Human
uaauaaaugaaagugcuggcau

SEQ ID NO: 1075390 - RNA, 18 nt, Human
ugcucuguuuaaugauuu

SEQ ID NO: 1075391 - RNA, 22 nt, Human
cugcagccacgagucacagccc

SEQ ID NO: 1075392 - RNA, 22 nt, Human
agcaggguuccaggaguugcag

SEQ ID NO: 1075393 - RNA, 22 nt, Human
ggcucuggagcacagacgucug

SEQ ID NO: 1075394 - RNA, 22 nt, Human
uuuaauuuguauuucuagaggg

SEQ ID NO: 1075395 - RNA, 20 nt, Human
uccugggguaagccaugguc

SEQ ID NO: 1075396 - RNA, 22 nt, Human
aucacuguuaucuagaagcaca

SEQ ID NO: 1075397 - RNA, 22 nt, Human
agaaaucacuuaaugaacguag

SEQ ID NO: 1075398 - RNA, 22 nt, Human
acacucuuuuugugguugucua

SEQ ID NO: 1075399 - RNA, 22 nt, Human
uuuaaauaggacuccugggggu

SEQ ID NO: 1075400 - RNA, 22 nt, Human
uuaugcauauagcagauacgag

SEQ ID NO: 1075401 - RNA, 22 nt, Human
ggcagcuccucaaaaaauuaaa

SEQ ID NO: 1075402 - RNA, 22 nt, Human
ugaggcaguucuuacuuguauu

SEQ ID NO: 1075403 - RNA, 22 nt, Human
agcaggcugaugggcaugcuug

SEQ ID NO: 1075404 - RNA, 22 nt, Human
gcuggcucccauugguccuucc

SEQ ID NO: 1075405 - RNA, 17 nt, Human
agcugccagggagugug

SEQ ID NO: 1075406 - RNA, 22 nt, Human
auaacaauagugguagugcugg

SEQ ID NO: 1075407 - RNA, 22 nt, Human
uucuucaggauacgucauccag

SEQ ID NO: 1075408 - RNA, 22 nt, Human
cacaugcaggagccaauguaca

SEQ ID NO: 1075409 - RNA, 22 nt, Human
cagguuggagaucugucuaugg

SEQ ID NO: 1075410 - RNA, 19 nt, Human
caugagcugcucacuuccc

SEQ ID NO: 1075411 - RNA, 22 nt, Human
cuccaagucggcugcagcugga

SEQ ID NO: 1075412 - RNA, 22 nt, Human
uaaacaaggguuacugagcaug

SEQ ID NO: 1075413 - RNA, 22 nt, Human
ccacagccauuccagggaggcu

SEQ ID NO: 1075414 - RNA, 22 nt, Human
guguuuuauuggugcagucaga

SEQ ID NO: 1075415 - RNA, 20 nt, Human
gcagggcaucuuggccccca

SEQ ID NO: 1075416 - RNA, 19 nt, Human
uuccaaaaucaggauuuga

SEQ ID NO: 1075417 - RNA, 22 nt, Human
uuccagccaugguuucccuaug

SEQ ID NO: 1075418 - RNA, 22 nt, Human
aagaagaugguuaacuuucagu

SEQ ID NO: 1075419 - RNA, 20 nt, Human
ccugcugagccagugugagg

SEQ ID NO: 1075420 - RNA, 22 nt, Human
gaauaauagcagaaauuagcag

SEQ ID NO: 1075421 - RNA, 22 nt, Human
guuucacaagcaacggguaagg

SEQ ID NO: 1075422 - RNA, 19 nt, Human
ugaagcagcaaacucucag

SEQ ID NO: 1075423 - RNA, 22 nt, Human
cccuuuaacacacagaggcugc

SEQ ID NO: 1075424 - RNA, 22 nt, Human
gcaugugucuccccaguggagg

SEQ ID NO: 1075425 - RNA, 22 nt, Human
uuucacagcagaauuucugagg

SEQ ID NO: 1075426 - RNA, 22 nt, Human
gagcugccugaacaagcagcag

SEQ ID NO: 1075427 - RNA, 22 nt, Human
ggcuuccuaauacucccuacac

SEQ ID NO: 1075428 - RNA, 22 nt, Human
agggguggagaguguugccagu

SEQ ID NO: 1075429 - RNA, 22 nt, Human
aaggccagacaggaccacaucu

SEQ ID NO: 1075430 - RNA, 22 nt, Human
ugugauuagcugaauacacugg

SEQ ID NO: 1075431 - RNA, 22 nt, Human
ucagaagacuacuaggacacau

SEQ ID NO: 1075432 - RNA, 22 nt, Human
ccagggaaucaggcagaaguca

SEQ ID NO: 1075433 - RNA, 22 nt, Human
acccacgaagaugagcggcaug

SEQ ID NO: 1075434 - RNA, 22 nt, Human
uccauauuaacuaaaacuagaa

SEQ ID NO: 1075435 - RNA, 22 nt, Human
auuccugagacuuaucuguuuc

SEQ ID NO: 1075436 - RNA, 22 nt, Human
ccagggagccuggugugucagc

SEQ ID NO: 1075437 - RNA, 22 nt, Human
gcaggugagggugucugaauag

SEQ ID NO: 1075438 - RNA, 18 nt, Human
aguguuaaguaaguagca

SEQ ID NO: 1075439 - RNA, 21 nt, Human
agugugugauaggcaggaaga

SEQ ID NO: 1075440 - RNA, 22 nt, Human
agaggugggagccuggucacau

SEQ ID NO: 1075441 - RNA, 22 nt, Human
aagauggcaggaaucauaagcu

SEQ ID NO: 1075442 - RNA, 22 nt, Human
aagagagagcauucuucuguua

SEQ ID NO: 1075443 - RNA, 23 nt, Human
uggcauuuuaguuagcuucagug

SEQ ID NO: 1075444 - RNA, 22 nt, Human
ugaacacaaauauuuugggguu

SEQ ID NO: 1075445 - RNA, 22 nt, Human
auucaaaguaauaaccagaacu

SEQ ID NO: 1075446 - RNA, 22 nt, Human
auguggaaugaacaaaggaggc

SEQ ID NO: 1075447 - RNA, 22 nt, Human
ugaaacaauuagaauguaauga

SEQ ID NO: 1075448 - RNA, 22 nt, Human
agcaggaaggcuuuggggguuc

SEQ ID NO: 1075449 - RNA, 22 nt, Human
accagagaaaacacagcaggcu

SEQ ID NO: 1075450 - RNA, 22 nt, Human
ccucuucuagguuucagccugc

SEQ ID NO: 1075451 - RNA, 22 nt, Human
gcacagggagcaggucucuggu

SEQ ID NO: 1075452 - RNA, 22 nt, Human
uccucuggggcgugguccugga

SEQ ID NO: 1075453 - RNA, 19 nt, Human
ccucuccgcccaccagccc

SEQ ID NO: 1075454 - RNA, 22 nt, Human
uagccgggugugguggaacucc

SEQ ID NO: 1075455 - RNA, 22 nt, Human
ccagggaaugugggaugacucu

SEQ ID NO: 1075456 - RNA, 21 nt, Human
uagcagagaucauuuucuccu

SEQ ID NO: 1075457 - RNA, 23 nt, Human
uagagcagggaaaucugucagag

SEQ ID NO: 1075458 - RNA, 22 nt, Human
agaggccacuuugccugugaug

SEQ ID NO: 1075459 - RNA, 22 nt, Human
gaaacagguggcaggcuagauu

SEQ ID NO: 1075460 - RNA, 19 nt, Human
ccuuuuuuaacuucagcaa

SEQ ID NO: 1075461 - RNA, 22 nt, Human
caugucuuuguuaugcucacca

SEQ ID NO: 1075462 - RNA, 22 nt, Human
gggguggccaaggacucugacc

SEQ ID NO: 1075463 - RNA, 22 nt, Human
ggaccacaauauuugugagguu

SEQ ID NO: 1075464 - RNA, 22 nt, Human
gaaagccaucuggcugcuggga

SEQ ID NO: 1075465 - RNA, 22 nt, Human
ucaggagauggucuuuauaggc

SEQ ID NO: 1075466 - RNA, 22 nt, Human
cuggagugaggucugggagccu

SEQ ID NO: 1075467 - RNA, 20 nt, Human
auuuuguuuauguuccucuc

SEQ ID NO: 1075468 - RNA, 22 nt, Human
uuuugccugagagugaaaauaa

SEQ ID NO: 1075469 - RNA, 22 nt, Human
caggaagagguaucaccgagca

SEQ ID NO: 1075470 - RNA, 22 nt, Human
caggggacaguaugguggauga

SEQ ID NO: 1075471 - RNA, 22 nt, Human
ucagagaguuggaaagaauuaa

SEQ ID NO: 1075472 - RNA, 22 nt, Human
agcagaugcgucugagugggag

SEQ ID NO: 1075473 - RNA, 22 nt, Human
gaagcaaagagcuagugccgcu

SEQ ID NO: 1075474 - RNA, 22 nt, Human
aguuuguaaguucauuaugagu

SEQ ID NO: 1075475 - RNA, 22 nt, Human
ccucacaguuuggcuaacugug

SEQ ID NO: 1075476 - RNA, 22 nt, Human
aaaguguuuucugauguguucu

SEQ ID NO: 1075477 - RNA, 18 nt, Human
ugggaaaguuuauagaau

SEQ ID NO: 1075478 - RNA, 22 nt, Human
ugaaggaagaauaggcaguguu

SEQ ID NO: 1075479 - RNA, 22 nt, Human
ucagccuuguggcccugcucca

SEQ ID NO: 1075480 - RNA, 22 nt, Human
ugggcucaggaccccagaggcc

SEQ ID NO: 1075481 - RNA, 22 nt, Human
gggcagguggcaaagccagagg

SEQ ID NO: 1075482 - RNA, 22 nt, Human
agccaggaaugcaugcucugcu

SEQ ID NO: 1075483 - RNA, 22 nt, Human
acacugaauaauugagaguuga

SEQ ID NO: 1075484 - RNA, 22 nt, Human
ucacagaagagauauugacaga

SEQ ID NO: 1075485 - RNA, 22 nt, Human
aaagcucacaguaauacaaggc

SEQ ID NO: 1075486 - RNA, 22 nt, Human
ggcugagcccccucugcguagg

SEQ ID NO: 1075487 - RNA, 22 nt, Human
uuucaaagucaagaaggauacu

SEQ ID NO: 1075488 - RNA, 22 nt, Human
uuuccuuucucaagagccggca

SEQ ID NO: 1075489 - RNA, 21 nt, Human
ucucugugucuuuaagcugga

SEQ ID NO: 1075490 - RNA, 18 nt, Human
uccauuguucuacuguga

SEQ ID NO: 1075491 - RNA, 22 nt, Human
agacauuuuacauucuuccauu

SEQ ID NO: 1075492 - RNA, 22 nt, Human
ugagcagggacuuugaguguag

SEQ ID NO: 1075493 - RNA, 22 nt, Human
uuuuacaagcugagucguuaaa

SEQ ID NO: 1075494 - RNA, 22 nt, Human
ucaaaguagggguaagccaggc

SEQ ID NO: 1075495 - RNA, 22 nt, Human
uguuccauaaguggugcuuugu

SEQ ID NO: 1075496 - RNA, 22 nt, Human
cccucugcucaggugcauaggc

SEQ ID NO: 1075497 - RNA, 22 nt, Human
cccuggaggcggagcuugcagu

SEQ ID NO: 1075498 - RNA, 22 nt, Human
ugcuucugcugauauuuuguga

SEQ ID NO: 1075499 - RNA, 22 nt, Human
aagguaauccauaauaguuacu

SEQ ID NO: 1075500 - RNA, 22 nt, Human
cagcugccacaccucuuucucu

SEQ ID NO: 1075501 - RNA, 22 nt, Human
agcugugaauuuuaugcuagug

SEQ ID NO: 1075502 - RNA, 21 nt, Human
uuugaaagugggugauucuuu

SEQ ID NO: 1075503 - RNA, 23 nt, Human
cagaggguuccauggagcauggu

SEQ ID NO: 1075504 - RNA, 22 nt, Human
ugcauguuuauaacagaugagg

SEQ ID NO: 1075505 - RNA, 22 nt, Human
cagggagcuuucccaggacccu

SEQ ID NO: 1075506 - RNA, 20 nt, Human
aauuucuccuggguaacaga

SEQ ID NO: 1075507 - RNA, 22 nt, Human
ugggccaggcaugugaucagca

SEQ ID NO: 1075508 - RNA, 22 nt, Human
uauuucuugaguggucaguuuc

SEQ ID NO: 1075509 - RNA, 22 nt, Human
ugaugugugggcaugcagacag

SEQ ID NO: 1075510 - RNA, 22 nt, Human
uucagcagucguccaggaaaag

SEQ ID NO: 1075511 - RNA, 22 nt, Human
ccaaaggcggaacugagucucu

SEQ ID NO: 1075512 - RNA, 22 nt, Human
caucaguucccaggcccagaca

SEQ ID NO: 1075513 - RNA, 22 nt, Human
cugggcuguuuguucuggucuc

SEQ ID NO: 1075514 - RNA, 20 nt, Human
accccagccccucuaucuga

SEQ ID NO: 1075515 - RNA, 22 nt, Human
aggauccuguauggagaagcug

SEQ ID NO: 1075516 - RNA, 22 nt, Human
uuugaaaggaauuaggaugaca

SEQ ID NO: 1075517 - RNA, 19 nt, Human
acuugaaagcagagaguuu

SEQ ID NO: 1075518 - RNA, 22 nt, Human
guaaaucauaaaauuugagcuc

SEQ ID NO: 1075519 - RNA, 22 nt, Human
ucagccacuacccaccuuaaca

SEQ ID NO: 1075520 - RNA, 22 nt, Human
gcagagaaaguuuuguccucag

SEQ ID NO: 1075521 - RNA, 22 nt, Human
ugauuucccuguagccucugaa

SEQ ID NO: 1075522 - RNA, 22 nt, Human
ugccaggcagugucagauugag

SEQ ID NO: 1075523 - RNA, 22 nt, Human
gaugcagaaaguagacaccauc

SEQ ID NO: 1075524 - RNA, 22 nt, Human
aucacugucgucaucugagauu

SEQ ID NO: 1075525 - RNA, 22 nt, Human
ccagggcaacgcugucucagag

SEQ ID NO: 1075526 - RNA, 22 nt, Human
ggcaagaaggcuucagguagcu

SEQ ID NO: 1075527 - RNA, 22 nt, Human
gccaggcagcagcgaggauggu

SEQ ID NO: 1075528 - RNA, 22 nt, Human
aagauuauggcagauaacaauu

SEQ ID NO: 1075529 - RNA, 22 nt, Human
gauagaaagaauauagauucca

SEQ ID NO: 1075530 - RNA, 22 nt, Human
uaaguuagaucuuaauuaaagu

SEQ ID NO: 1075531 - RNA, 22 nt, Human
agggugccugcugcagguucag

SEQ ID NO: 1075532 - RNA, 22 nt, Human
ucaggaagugcugaggcugcuu

SEQ ID NO: 1075533 - RNA, 22 nt, Human
cuggccugcugggugagguccu

SEQ ID NO: 1075534 - RNA, 22 nt, Human
cauuuacagugagaguuuuuac

SEQ ID NO: 1075535 - RNA, 19 nt, Human
aguuaaugagcuuuugauc

SEQ ID NO: 1075536 - RNA, 22 nt, Human
cuauuugucacaacugguguuu

SEQ ID NO: 1075537 - RNA, 22 nt, Human
gcguggggcagcccagggcuuc

SEQ ID NO: 1075538 - RNA, 22 nt, Human
agcagggccugagugaccuaac

SEQ ID NO: 1075539 - RNA, 22 nt, Human
cacagggccuggggcagcugcu

SEQ ID NO: 1075540 - RNA, 21 nt, Human
ccaggcugggagggcaguucc

SEQ ID NO: 1075541 - RNA, 22 nt, Human
agcagccaggaaucugcagagc

SEQ ID NO: 1075542 - RNA, 22 nt, Human
ugugaggagaggcccagcuccc

SEQ ID NO: 1075543 - RNA, 22 nt, Human
aaggucauggcaaauuacuuuu

SEQ ID NO: 1075544 - RNA, 22 nt, Human
uucagcuaugcgcuuugggcaa

SEQ ID NO: 1075545 - RNA, 22 nt, Human
caucaguuuggucaaugauggg

SEQ ID NO: 1075546 - RNA, 22 nt, Human
uuuaagaugguauuuuauaaag

SEQ ID NO: 1075547 - RNA, 22 nt, Human
gcugccugaagugucuacacug

SEQ ID NO: 1075548 - RNA, 21 nt, Human
gugguucuagagaaacagaau

SEQ ID NO: 1075549 - RNA, 22 nt, Human
ugccucagucuaaagucucuca

SEQ ID NO: 1075550 - RNA, 22 nt, Human
gucuccagggcugcuggcgccu

SEQ ID NO: 1075551 - RNA, 23 nt, Human
cuguaugauguuaaguggaaagc

SEQ ID NO: 1075552 - RNA, 22 nt, Human
agcagauguuucagagcaggcu

SEQ ID NO: 1075553 - RNA, 20 nt, Human
uauuuacaacuuagagccuc

SEQ ID NO: 1075554 - RNA, 22 nt, Human
ugugacuaucauucuaaacauc

SEQ ID NO: 1075555 - RNA, 22 nt, Human
agcagcugagccccagcuguga

SEQ ID NO: 1075556 - RNA, 22 nt, Human
gccugcuguugagggaagagcu

SEQ ID NO: 1075557 - RNA, 20 nt, Human
agaaacauuucuugagaacu

SEQ ID NO: 1075558 - RNA, 22 nt, Human
aguaaauuauuuagcuuccaga

SEQ ID NO: 1075559 - RNA, 22 nt, Human
ugcacacauucuauggggcuga

SEQ ID NO: 1075560 - RNA, 22 nt, Human
ugucaccaugccagcuucugcc

SEQ ID NO: 1075561 - RNA, 22 nt, Human
cacugggcguguccugggugag

SEQ ID NO: 1075562 - RNA, 22 nt, Human
uucugggggccaggacaguggu

SEQ ID NO: 1075563 - RNA, 22 nt, Human
ucuggcagugaagucaugaggu

SEQ ID NO: 1075564 - RNA, 22 nt, Human
uguggccuggaaggggcugcuc

SEQ ID NO: 1075565 - RNA, 22 nt, Human
acucagagaauaucuagaagga

SEQ ID NO: 1075566 - RNA, 22 nt, Human
caggcucagccacaggggaagg

SEQ ID NO: 1075567 - RNA, 22 nt, Human
uucuuaaagaggcaaaacacag

SEQ ID NO: 1075568 - RNA, 22 nt, Human
auuguuaaacugaagcauuacu

SEQ ID NO: 1075569 - RNA, 22 nt, Human
cacugcuuauaaauucuaggca

SEQ ID NO: 1075570 - RNA, 22 nt, Human
caggugggaccaugauagggca

SEQ ID NO: 1075571 - RNA, 22 nt, Human
agggcaguguggugggacugac

SEQ ID NO: 1075572 - RNA, 22 nt, Human
aacuuuaaagaggaggcuuggg

SEQ ID NO: 1075573 - RNA, 22 nt, Human
agacacaggauucugcauuucu

SEQ ID NO: 1075574 - RNA, 23 nt, Human
auaaggcauaaagguacauugga

SEQ ID NO: 1075575 - RNA, 22 nt, Human
ugcuucuguauuuugggcuuga

SEQ ID NO: 1075576 - RNA, 22 nt, Human
ucagcagcagcucagcauguuu

SEQ ID NO: 1075577 - RNA, 22 nt, Human
gcuuugaagacuuuuccagggu

SEQ ID NO: 1075578 - RNA, 18 nt, Human
gugacagcugcuagcuca

SEQ ID NO: 1075579 - RNA, 22 nt, Human
ucacugcaaccucugccuuccg

SEQ ID NO: 1075580 - RNA, 21 nt, Human
gaaguacaccaggaaggccac

SEQ ID NO: 1075581 - RNA, 22 nt, Human
ggugggugagcccugggagcug

SEQ ID NO: 1075582 - RNA, 22 nt, Human
guuguuuugcaggauccuuaca

SEQ ID NO: 1075583 - RNA, 22 nt, Human
gguaggggcagggccaagcugu

SEQ ID NO: 1075584 - RNA, 22 nt, Human
cagucacauagguauacacaua

SEQ ID NO: 1075585 - RNA, 20 nt, Human
gccuguccugagugucaugg

SEQ ID NO: 1075586 - RNA, 22 nt, Human
gaggaacccaagcucaccguca

SEQ ID NO: 1075587 - RNA, 22 nt, Human
ucacagaaguugaauuugcaug

SEQ ID NO: 1075588 - RNA, 22 nt, Human
uggaccacauagugaggccccc

SEQ ID NO: 1075589 - RNA, 22 nt, Human
aggagccugagucacagugccu

SEQ ID NO: 1075590 - RNA, 22 nt, Human
guccucagcaccagaacuaggg

SEQ ID NO: 1075591 - RNA, 22 nt, Human
aucaacauuugcauccuuccac

SEQ ID NO: 1075592 - RNA, 22 nt, Human
ugggagaagcagcagccaagug

SEQ ID NO: 1075593 - RNA, 22 nt, Human
ccuggcagucaggggaguccuu

SEQ ID NO: 1075594 - RNA, 22 nt, Human
cgugacacauucuggacauggu

SEQ ID NO: 1075595 - RNA, 22 nt, Human
guauguguaaguaugccaccuu

SEQ ID NO: 1075596 - RNA, 22 nt, Human
aagggagacaguugugugagga

SEQ ID NO: 1075597 - RNA, 22 nt, Human
gcagggguuuucugacuugagu

SEQ ID NO: 1075598 - RNA, 22 nt, Human
uugcauugcuuggucuucaaga

SEQ ID NO: 1075599 - RNA, 22 nt, Human
aaguacaacgcauacagagaaa

SEQ ID NO: 1075600 - RNA, 18 nt, Human
aggcuucccaggcaggcc

SEQ ID NO: 1075601 - RNA, 20 nt, Human
auaugcugagugaaggcaga

SEQ ID NO: 1075602 - RNA, 23 nt, Human
acagagaucuugacuuguaugga

SEQ ID NO: 1075603 - RNA, 22 nt, Human
caauguuuuuccuuccuuaaua

SEQ ID NO: 1075604 - RNA, 22 nt, Human
agagcugaauuuggguggugga

SEQ ID NO: 1075605 - RNA, 22 nt, Human
cagcccugagagaaccaucuau

SEQ ID NO: 1075606 - RNA, 22 nt, Human
uaauuucaaauuucuuagcgug

SEQ ID NO: 1075607 - RNA, 22 nt, Human
gcaggcaguugcaguuuucuag

SEQ ID NO: 1075608 - RNA, 22 nt, Human
cagagguguuggugaauggaga

SEQ ID NO: 1075609 - RNA, 21 nt, Human
ugggggagaauugguugcuuu

SEQ ID NO: 1075610 - RNA, 22 nt, Human
cugucaaauucauaacacuuau

SEQ ID NO: 1075611 - RNA, 22 nt, Human
gggcagagacucagaaacagaa

SEQ ID NO: 1075612 - RNA, 22 nt, Human
aggaggcaggaagucuauggga

SEQ ID NO: 1075613 - RNA, 21 nt, Human
cacaggugggucagugaggcc

SEQ ID NO: 1075614 - RNA, 22 nt, Human
auucacaaagaagggaaguaca

SEQ ID NO: 1075615 - RNA, 22 nt, Human
uuugugcacuucuguagcugcc

SEQ ID NO: 1075616 - RNA, 22 nt, Human
ucugccuugagguccucagcuc

SEQ ID NO: 1075617 - RNA, 20 nt, Human
acauugauuauguuuguaga

SEQ ID NO: 1075618 - RNA, 22 nt, Human
aagcaaguucucaucauuuaua

SEQ ID NO: 1075619 - RNA, 22 nt, Human
caagccucagaaucuucuccau

SEQ ID NO: 1075620 - RNA, 22 nt, Human
acaaaggcauagugaauguuuu

SEQ ID NO: 1075621 - RNA, 22 nt, Human
ugggcacuggaagccugcugug

SEQ ID NO: 1075622 - RNA, 22 nt, Human
aacaucuuuacaacagaccuag

SEQ ID NO: 1075623 - RNA, 22 nt, Human
ugcaugugugacaaggacaguu

SEQ ID NO: 1075624 - RNA, 22 nt, Human
ugauuacaguauuugagaucca

SEQ ID NO: 1075625 - RNA, 22 nt, Human
ucaccagucuuucuuaccauug

SEQ ID NO: 1075626 - RNA, 22 nt, Human
auuuaauuaaucauggugaauu

SEQ ID NO: 1075627 - RNA, 22 nt, Human
cuguccuugcuggccagguaug

SEQ ID NO: 1075628 - RNA, 22 nt, Human
gcaggaaccccgggaggcuggc

SEQ ID NO: 1075629 - RNA, 21 nt, Human
uugaagcaaggguggcucuga

SEQ ID NO: 1075630 - RNA, 22 nt, Human
cggcugagacggccauagacac

SEQ ID NO: 1075631 - RNA, 22 nt, Human
ucauuucuguugugcaucacug

SEQ ID NO: 1075632 - RNA, 22 nt, Human
agaggcaacauggggaacagau

SEQ ID NO: 1075633 - RNA, 22 nt, Human
uuugcaguagacaucuuauuuu

SEQ ID NO: 1075634 - RNA, 22 nt, Human
cuggucccuggaccucccugga

SEQ ID NO: 1075635 - RNA, 23 nt, Human
ggcaccaggccauggagcgggag

SEQ ID NO: 1075636 - RNA, 22 nt, Human
gcucccagcauugcuucccagg

SEQ ID NO: 1075637 - RNA, 22 nt, Human
gggcagugucgaggucuggucc

SEQ ID NO: 1075638 - RNA, 22 nt, Human
uucaaagucagccaucuggcua

SEQ ID NO: 1075639 - RNA, 22 nt, Human
acaguacuguguuaacugaacc

SEQ ID NO: 1075640 - RNA, 19 nt, Human
gaacaaacuuaaacuuuuc

SEQ ID NO: 1075641 - RNA, 22 nt, Human
gcaaagaaugcagauuugccuc

SEQ ID NO: 1075642 - RNA, 22 nt, Human
auuuuuuauauaccaagguggg

SEQ ID NO: 1075643 - RNA, 22 nt, Human
ucagugucuugaccugggugug

SEQ ID NO: 1075644 - RNA, 22 nt, Human
ccucagaccccugcugagcuuc

SEQ ID NO: 1075645 - RNA, 22 nt, Human
aacauuuaggaaggaccuccuc

SEQ ID NO: 1075646 - RNA, 22 nt, Human
aaguguuuccgggagacuuggu

SEQ ID NO: 1075647 - RNA, 22 nt, Human
caguuacauuaauaaugcacau

SEQ ID NO: 1075648 - RNA, 22 nt, Human
ggaaggggucaccuccugauga

SEQ ID NO: 1075649 - RNA, 18 nt, Human
aaugaaauguacaccuuu

SEQ ID NO: 1075650 - RNA, 22 nt, Human
aagaugcuuauugcuccugcag

SEQ ID NO: 1075651 - RNA, 21 nt, Human
cucagaccacagcucacaccc

SEQ ID NO: 1075652 - RNA, 23 nt, Human
acucagagaccccgggaagugac

SEQ ID NO: 1075653 - RNA, 22 nt, Human
aucagaaacucuuagagcaggg

SEQ ID NO: 1075654 - RNA, 21 nt, Human
aucugcuuagguuuguucaga

SEQ ID NO: 1075655 - RNA, 22 nt, Human
uacaguagaauuuuuaguaacu

SEQ ID NO: 1075656 - RNA, 22 nt, Human
gcugccuucccggaaugucauc

SEQ ID NO: 1075657 - RNA, 22 nt, Human
uguuuuaguucugucuugcaug

SEQ ID NO: 1075658 - RNA, 22 nt, Human
gccaggcuggugucacaacucu

SEQ ID NO: 1075659 - RNA, 22 nt, Human
ucacauuugcaauugcauuguu

SEQ ID NO: 1075660 - RNA, 22 nt, Human
auucuuuauugcugaugguuau

SEQ ID NO: 1075661 - RNA, 22 nt, Human
uaaauucuacaacuucaaagau

SEQ ID NO: 1075662 - RNA, 22 nt, Human
cagccccucacagagcuguccu

SEQ ID NO: 1075663 - RNA, 22 nt, Human
cuuuucaugagucuguuauggg

SEQ ID NO: 1075664 - RNA, 22 nt, Human
ugcagaagcagagaguugccaa

SEQ ID NO: 1075665 - RNA, 18 nt, Human
agucuucugauccauuuu

SEQ ID NO: 1075666 - RNA, 22 nt, Human
uuuauuuggcauccagggagaa

SEQ ID NO: 1075667 - RNA, 22 nt, Human
gccuggaaucaugcagggguua

SEQ ID NO: 1075668 - RNA, 22 nt, Human
gcaggaaagguugagacuuugc

SEQ ID NO: 1075669 - RNA, 19 nt, Human
uggcuucuguuuucauguu

SEQ ID NO: 1075670 - RNA, 22 nt, Human
agggccaggaacaccugaaggg

SEQ ID NO: 1075671 - RNA, 22 nt, Human
gcccaggcuagcguagagugca

SEQ ID NO: 1075672 - RNA, 22 nt, Human
uucagaaaugucagccaucaga

SEQ ID NO: 1075673 - RNA, 22 nt, Human
gucugggcucccagggucggcg

SEQ ID NO: 1075674 - RNA, 22 nt, Human
ccugccuggcacauaguacucu

SEQ ID NO: 1075675 - RNA, 22 nt, Human
cugguguuuaucugacugccua

SEQ ID NO: 1075676 - RNA, 22 nt, Human
agcagaacugaugagacuugag

SEQ ID NO: 1075677 - RNA, 22 nt, Human
uacuuuucauaaugaagcagca

SEQ ID NO: 1075678 - RNA, 22 nt, Human
cccucugccugggaccaagucc

SEQ ID NO: 1075679 - RNA, 23 nt, Human
cagcugguugugggaguggcugc

SEQ ID NO: 1075680 - RNA, 22 nt, Human
ccaggugugcucugcaguggau

SEQ ID NO: 1075681 - RNA, 22 nt, Human
uuccagcaggcagacaggagau

SEQ ID NO: 1075682 - RNA, 22 nt, Human
cuggcuggucaugucaugagcc

SEQ ID NO: 1075683 - RNA, 22 nt, Human
cagcuagaaagucuguuaggga

SEQ ID NO: 1075684 - RNA, 22 nt, Human
acuuuguaaauuguugugacuc

SEQ ID NO: 1075685 - RNA, 22 nt, Human
guggcagggcaaugcucccucu

SEQ ID NO: 1075686 - RNA, 22 nt, Human
cagguggguguaugaaugcaaa

SEQ ID NO: 1075687 - RNA, 22 nt, Human
aaauuauucucauguguuucuu

SEQ ID NO: 1075688 - RNA, 22 nt, Human
caggcagagaggagcauuuaau

SEQ ID NO: 1075689 - RNA, 22 nt, Human
ugcaggcuggauuugcuuuugu

SEQ ID NO: 1075690 - RNA, 22 nt, Human
gagcuagagggagaagggcacu

SEQ ID NO: 1075691 - RNA, 22 nt, Human
uaggacaggugaggggcugugg

SEQ ID NO: 1075692 - RNA, 22 nt, Human
uaaugaaugagaauauaacaga

SEQ ID NO: 1075693 - RNA, 22 nt, Human
uccaagaagucaucuaaacugu

SEQ ID NO: 1075694 - RNA, 22 nt, Human
acauucugaaugccugacagua

SEQ ID NO: 1075695 - RNA, 22 nt, Human
gaaugcagauggcugguguaug

SEQ ID NO: 1075696 - RNA, 22 nt, Human
gagaggagucccuaucacaguu

SEQ ID NO: 1075697 - RNA, 22 nt, Human
caccaggagcaucuaggaggcg

SEQ ID NO: 1075698 - RNA, 22 nt, Human
auauuauuuucccuggaguugu

SEQ ID NO: 1075699 - RNA, 22 nt, Human
ucacagcauugucacaaggcug

SEQ ID NO: 1075700 - RNA, 18 nt, Human
ggcagggaaaagauaggg

SEQ ID NO: 1075701 - RNA, 22 nt, Human
gcuuccugucccucagccauga

SEQ ID NO: 1075702 - RNA, 18 nt, Human
uauguauaacauaguuca

SEQ ID NO: 1075703 - RNA, 22 nt, Human
uggcucagaagaaaagguaaac

SEQ ID NO: 1075704 - RNA, 22 nt, Human
uguuugcauuaauuagaaggua

SEQ ID NO: 1075705 - RNA, 22 nt, Human
aaauaguuuagcucucauuuca

SEQ ID NO: 1075706 - RNA, 22 nt, Human
aaauagauuuaacauccauccc

SEQ ID NO: 1075707 - RNA, 22 nt, Human
cuaucuuucgauucuagcuuaa

SEQ ID NO: 1075708 - RNA, 22 nt, Human
uauuucugauugcucaugaggc

SEQ ID NO: 1075709 - RNA, 22 nt, Human
ucuuaacauauuauuuuagcac

SEQ ID NO: 1075710 - RNA, 22 nt, Human
caaaucugagucuacaauuuua

SEQ ID NO: 1075711 - RNA, 22 nt, Human
gacuccagggauuggaagaugu

SEQ ID NO: 1075712 - RNA, 22 nt, Human
gugacaggcauggggucaugca

SEQ ID NO: 1075713 - RNA, 22 nt, Human
cugccucuugacagaucguggc

SEQ ID NO: 1075714 - RNA, 20 nt, Human
cagaaagaagguagauuuuu

SEQ ID NO: 1075715 - RNA, 22 nt, Human
gaggcugccccuuccucagcug

SEQ ID NO: 1075716 - RNA, 22 nt, Human
aagauuuaccacuuuauucaag

SEQ ID NO: 1075717 - RNA, 21 nt, Human
ccuuuagauuucuaugcaguu

SEQ ID NO: 1075718 - RNA, 22 nt, Human
ugcaggcuguaaucugaggcua

SEQ ID NO: 1075719 - RNA, 22 nt, Human
aaaauacacauacuaggggaaa

SEQ ID NO: 1075720 - RNA, 22 nt, Human
agugaucagcuugaaguaguuu

SEQ ID NO: 1075721 - RNA, 22 nt, Human
ggggcagccuccaggaaagcug

SEQ ID NO: 1075722 - RNA, 22 nt, Human
uccaagcuacugaagguuuggg

SEQ ID NO: 1075723 - RNA, 22 nt, Human
gacagggaggaaagagacugcu

SEQ ID NO: 1075724 - RNA, 22 nt, Human
gaauucugggagagaucugaca

SEQ ID NO: 1075725 - RNA, 22 nt, Human
ugaaaaacugaauaguugagua

SEQ ID NO: 1075726 - RNA, 22 nt, Human
acuuccuguguuggucuugcug

SEQ ID NO: 1075727 - RNA, 22 nt, Human
caggggcucuaaugcaugauca

SEQ ID NO: 1075728 - RNA, 21 nt, Human
ccucugcucgggcaugcguuu

SEQ ID NO: 1075729 - RNA, 22 nt, Human
uuugagaaaggggauuuaauuc

SEQ ID NO: 1075730 - RNA, 22 nt, Human
gggcugcuguagagaacauguu

SEQ ID NO: 1075731 - RNA, 22 nt, Human
ugaaggcagcaugcacacuagu

SEQ ID NO: 1075732 - RNA, 22 nt, Human
uguggccagcagguggcugugu

SEQ ID NO: 1075733 - RNA, 22 nt, Human
acuuuguuuccauauuuguagc

SEQ ID NO: 1075734 - RNA, 22 nt, Human
ggucuuccgagaggccugugcu

SEQ ID NO: 1075735 - RNA, 22 nt, Human
gucccaggcuccauggcagcca

SEQ ID NO: 1075736 - RNA, 22 nt, Human
ucccagagacaucauuucuccg

SEQ ID NO: 1075737 - RNA, 22 nt, Human
agacagcugcucgcagagcuau

SEQ ID NO: 1075738 - RNA, 22 nt, Human
acacaggggaaaguggagcuga

SEQ ID NO: 1075739 - RNA, 22 nt, Human
acaaggcuguuggucacaaacc

SEQ ID NO: 1075740 - RNA, 22 nt, Human
uacuguucaugccuucauaaag

SEQ ID NO: 1075741 - RNA, 20 nt, Human
ucugcuggccaaaacuucac

SEQ ID NO: 1075742 - RNA, 22 nt, Human
cugagagugcucuuugauguca

SEQ ID NO: 1075743 - RNA, 22 nt, Human
cauuccuuaacguggggagucu

SEQ ID NO: 1075744 - RNA, 22 nt, Human
gcugccuggagaggcagggaug

SEQ ID NO: 1075745 - RNA, 22 nt, Human
cagagcggccacuagagggcgc

SEQ ID NO: 1075746 - RNA, 23 nt, Human
gggaagugaggagccccucagcc

SEQ ID NO: 1075747 - RNA, 22 nt, Human
gagugaugucuguagugaagaa

SEQ ID NO: 1075748 - RNA, 22 nt, Human
ucaucucagagagguauguuag

SEQ ID NO: 1075749 - RNA, 19 nt, Human
ggccugugcagagcccguc

SEQ ID NO: 1075750 - RNA, 20 nt, Human
ucaccuaaaccagcaguuuc

SEQ ID NO: 1075751 - RNA, 22 nt, Human
uucuuaagucaguaagaugcaa

SEQ ID NO: 1075752 - RNA, 22 nt, Human
uggugcugauaauggcaggauu

SEQ ID NO: 1075753 - RNA, 22 nt, Human
ccuucaaaguacacaucuuuau

SEQ ID NO: 1075754 - RNA, 22 nt, Human
uuacugaaaguauacauuucug

SEQ ID NO: 1075755 - RNA, 22 nt, Human
uaaugcaguagguauuaaagaa

SEQ ID NO: 1075756 - RNA, 22 nt, Human
ugaagcagauggucuggucauu

SEQ ID NO: 1075757 - RNA, 22 nt, Human
gccaagcuuugcaggaguguug

SEQ ID NO: 1075758 - RNA, 22 nt, Human
aacauuucagcaccugauuccu

SEQ ID NO: 1075759 - RNA, 22 nt, Human
uuauucacuucuuggucccuca

SEQ ID NO: 1075760 - RNA, 22 nt, Human
gggggcucugacucccucagcu

SEQ ID NO: 1075761 - RNA, 18 nt, Human
gccaggaagcauggggac

SEQ ID NO: 1075762 - RNA, 22 nt, Human
aggucuggaggcggagucagga

SEQ ID NO: 1075763 - RNA, 22 nt, Human
uggggagugaugccucggauaa

SEQ ID NO: 1075764 - RNA, 22 nt, Human
cugagaggugacagcgugcugg

SEQ ID NO: 1075765 - RNA, 22 nt, Human
aaaagcaguuaucugggaggaa

SEQ ID NO: 1075766 - RNA, 22 nt, Human
ucugccagaaguucugagagua

SEQ ID NO: 1075767 - RNA, 22 nt, Human
ugcuugaaagggguuucccagu

SEQ ID NO: 1075768 - RNA, 21 nt, Human
ugcuggccucaagggugacuu

SEQ ID NO: 1075769 - RNA, 22 nt, Human
cuucugugaaugaaguguggga

SEQ ID NO: 1075770 - RNA, 22 nt, Human
gcugagaguccaggaaaacauc

SEQ ID NO: 1075771 - RNA, 22 nt, Human
ucaggcugcuguacugugaaug

SEQ ID NO: 1075772 - RNA, 22 nt, Human
cugauuuucaaaauguguuaaa

SEQ ID NO: 1075773 - RNA, 22 nt, Human
cagcugugggccugacguggca

SEQ ID NO: 1075774 - RNA, 22 nt, Human
ugacacagaaauuaagcuguca

SEQ ID NO: 1075775 - RNA, 22 nt, Human
ugcagugguugagagcccagac

SEQ ID NO: 1075776 - RNA, 22 nt, Human
aggaacccugcgccauacuuug

SEQ ID NO: 1075777 - RNA, 22 nt, Human
cuguguccaauggccuuagcag

SEQ ID NO: 1075778 - RNA, 22 nt, Human
acaaggcuaugaaguauuaguu

SEQ ID NO: 1075779 - RNA, 22 nt, Human
gugagagccugucuggaugucg

SEQ ID NO: 1075780 - RNA, 22 nt, Human
uagagcuauuuagagcauuuua

SEQ ID NO: 1075781 - RNA, 22 nt, Human
gcucccaccuccagccugaguu

SEQ ID NO: 1075782 - RNA, 22 nt, Human
ggagccaggcauaucggggcac

SEQ ID NO: 1075783 - RNA, 22 nt, Human
uucaacaaugcacuugaguaua

SEQ ID NO: 1075784 - RNA, 22 nt, Human
gaacuugagauaugaguaggua

SEQ ID NO: 1075785 - RNA, 22 nt, Human
aggcuucacgaugggugaggug

SEQ ID NO: 1075786 - RNA, 22 nt, Human
uaaagucaucuuuacaucuuug

SEQ ID NO: 1075787 - RNA, 22 nt, Human
caaggccaguucaccaagggca

SEQ ID NO: 1075788 - RNA, 22 nt, Human
uuuuaaguuaauauaauugagg

SEQ ID NO: 1075789 - RNA, 22 nt, Human
gccuucagcccugacuggccag

SEQ ID NO: 1075790 - RNA, 17 nt, Human
acucaggaucugggagu

SEQ ID NO: 1075791 - RNA, 22 nt, Human
cagcuguugcagcacugagaga

SEQ ID NO: 1075792 - RNA, 22 nt, Human
uuucucaguuacuagcuguggu

SEQ ID NO: 1075793 - RNA, 22 nt, Human
gcaggaguguauuugcauguaa

SEQ ID NO: 1075794 - RNA, 22 nt, Human
ggccaggcacugugugagauau

SEQ ID NO: 1075795 - RNA, 22 nt, Human
uguacagauaucaggagugagg

SEQ ID NO: 1075796 - RNA, 22 nt, Human
aauauauuugaaucaggaacaa

SEQ ID NO: 1075797 - RNA, 23 nt, Human
acugccugcuacuaugcccacgg

SEQ ID NO: 1075798 - RNA, 22 nt, Human
guucagcccacagagggggccg

SEQ ID NO: 1075799 - RNA, 22 nt, Human
ccuggccugcucggcucuuaag

SEQ ID NO: 1075800 - RNA, 22 nt, Human
auauacacuccacugauacagg

SEQ ID NO: 1075801 - RNA, 22 nt, Human
gagcugcagcggcugacgcaac

SEQ ID NO: 1075802 - RNA, 22 nt, Human
ucaaaguacuacucaguucagc

SEQ ID NO: 1075803 - RNA, 22 nt, Human
cuucuuaaauuggauugcuauu

SEQ ID NO: 1075804 - RNA, 19 nt, Human
acucaagucuaaugaaauc

SEQ ID NO: 1075805 - RNA, 22 nt, Human
agugugggugagggaggcccuc

SEQ ID NO: 1075806 - RNA, 22 nt, Human
cagcucaggcucuccaugcucc

SEQ ID NO: 1075807 - RNA, 20 nt, Human
cccaggugucugaagcucug

SEQ ID NO: 1075808 - RNA, 22 nt, Human
agccuggccacucagggccuga

SEQ ID NO: 1075809 - RNA, 22 nt, Human
acacacacaagcagguugugga

SEQ ID NO: 1075810 - RNA, 22 nt, Human
uggugcagauagugguguagua

SEQ ID NO: 1075811 - RNA, 22 nt, Human
auuucacauuaauuugaugcuc

SEQ ID NO: 1075812 - RNA, 22 nt, Human
uucagugugugauaccugcugu

SEQ ID NO: 1075813 - RNA, 21 nt, Human
uucuucuuggacuguuuuggc

SEQ ID NO: 1075814 - RNA, 22 nt, Human
uaaggccaaacuauuauaguuc

SEQ ID NO: 1075815 - RNA, 22 nt, Human
cuggggccacaacggcgcacgc

SEQ ID NO: 1075816 - RNA, 20 nt, Human
agaaucugacccagagagac

SEQ ID NO: 1075817 - RNA, 22 nt, Human
agugggcaugaucuggugucug

SEQ ID NO: 1075818 - RNA, 22 nt, Human
agcucccagaguccucugccca

SEQ ID NO: 1075819 - RNA, 19 nt, Human
aagauuuggucauugauaa

SEQ ID NO: 1075820 - RNA, 22 nt, Human
agagagaggggcgagcaaacac

SEQ ID NO: 1075821 - RNA, 22 nt, Human
aggcgcaggguuuggacccagg

SEQ ID NO: 1075822 - RNA, 22 nt, Human
ggcucuggcuacuccacccugu

SEQ ID NO: 1075823 - RNA, 22 nt, Human
acucugaggagugacuagaggu

SEQ ID NO: 1075824 - RNA, 22 nt, Human
gcagagcagcaaauggaaagga

SEQ ID NO: 1075825 - RNA, 22 nt, Human
cagauaauccaaguaguuuuca

SEQ ID NO: 1075826 - RNA, 22 nt, Human
aguagcaauguuugagaagcac

SEQ ID NO: 1075827 - RNA, 22 nt, Human
guuuauaauccaacucugcucc

SEQ ID NO: 1075828 - RNA, 22 nt, Human
uucuucaauuauuggaaagaaa

SEQ ID NO: 1075829 - RNA, 22 nt, Human
uguucuuacggaacuuaucuuu

SEQ ID NO: 1075830 - RNA, 22 nt, Human
cuggcuucugggccagggcaga

SEQ ID NO: 1075831 - RNA, 22 nt, Human
cuggccagcauuuuugcuuuag

SEQ ID NO: 1075832 - RNA, 22 nt, Human
uccaauauuucucacauaugga

SEQ ID NO: 1075833 - RNA, 22 nt, Human
augaggcaucuaacauugcaaa

SEQ ID NO: 1075834 - RNA, 19 nt, Human
gcugucugaugcugagguc

SEQ ID NO: 1075835 - RNA, 22 nt, Human
ucaggaguaaagacagaguucc

SEQ ID NO: 1075836 - RNA, 22 nt, Human
aagacaaugcauuacuaagaag

SEQ ID NO: 1075837 - RNA, 23 nt, Human
aagcugccagucugaagccuggg

SEQ ID NO: 1075838 - RNA, 22 nt, Human
uguaacagcucuccaugugggg

SEQ ID NO: 1075839 - RNA, 22 nt, Human
caaaugcuaacuucuuuccaaa

SEQ ID NO: 1075840 - RNA, 22 nt, Human
caguggagaggcaugcuuggca

SEQ ID NO: 1075841 - RNA, 22 nt, Human
cugggcugaaaguguuccuuga

SEQ ID NO: 1075842 - RNA, 22 nt, Human
gguaggggaagacaagugaaaa

SEQ ID NO: 1075843 - RNA, 22 nt, Human
aagcaccuggguuauaucuuag

SEQ ID NO: 1075844 - RNA, 22 nt, Human
cccagcaugcacgcugacacuc

SEQ ID NO: 1075845 - RNA, 22 nt, Human
aaggaaccauuugugugcaugg

SEQ ID NO: 1075846 - RNA, 22 nt, Human
agaagccaaaugccagugaccu

SEQ ID NO: 1075847 - RNA, 22 nt, Human
uaaauguuguaaguacaucuaa

SEQ ID NO: 1075848 - RNA, 22 nt, Human
aagaguggagaauaaaauagga

SEQ ID NO: 1075849 - RNA, 22 nt, Human
aggugcagcugacaccaugugg

SEQ ID NO: 1075850 - RNA, 22 nt, Human
ugucccagggaaggcccagcac

SEQ ID NO: 1075851 - RNA, 22 nt, Human
guaacagaggguuugcagauau

SEQ ID NO: 1075852 - RNA, 19 nt, Human
agacagagcucaguggguu

SEQ ID NO: 1075853 - RNA, 20 nt, Human
uacauuguagaaauauucaa

SEQ ID NO: 1075854 - RNA, 22 nt, Human
ggagcuguuggcagcuaucuug

SEQ ID NO: 1075855 - RNA, 18 nt, Human
ggcggguguuuuauucac

SEQ ID NO: 1075856 - RNA, 22 nt, Human
augugaggaagaaagagguaag

SEQ ID NO: 1075857 - RNA, 22 nt, Human
cuuaagaugaggucaugcuaua

SEQ ID NO: 1075858 - RNA, 22 nt, Human
uguccucaggaccuggcacagu

SEQ ID NO: 1075859 - RNA, 20 nt, Human
uucaaagacccucaggucca

SEQ ID NO: 1075860 - RNA, 22 nt, Human
ucugagagguuaagcaauuuga

SEQ ID NO: 1075861 - RNA, 22 nt, Human
cacaggagaacccacagauucu

SEQ ID NO: 1075862 - RNA, 22 nt, Human
ucuggggcaguuacuggggccu

SEQ ID NO: 1075863 - RNA, 22 nt, Human
aaauaugagggugaugcccaga

SEQ ID NO: 1075864 - RNA, 21 nt, Human
aacacauccagaguauuugac

SEQ ID NO: 1075865 - RNA, 22 nt, Human
cuguguggccucaagccagccu

SEQ ID NO: 1075866 - RNA, 22 nt, Human
cagggugcuuagaaauggaccu

SEQ ID NO: 1075867 - RNA, 22 nt, Human
uaacauuucggugacaguggga

SEQ ID NO: 1075868 - RNA, 22 nt, Human
uaugacaugugaucucaagagg

SEQ ID NO: 1075869 - RNA, 22 nt, Human
ugucugagugugccugggcauu

SEQ ID NO: 1075870 - RNA, 22 nt, Human
ggcugccucugaugugcagacg

SEQ ID NO: 1075871 - RNA, 22 nt, Human
cccucccaagcacucugacaua

SEQ ID NO: 1075872 - RNA, 22 nt, Human
uuugaacagacacuuucuacag

SEQ ID NO: 1075873 - RNA, 22 nt, Human
ucagagcugcccaugcaagggg

SEQ ID NO: 1075874 - RNA, 22 nt, Human
guucaauuuagaaagcacaguu

SEQ ID NO: 1075875 - RNA, 22 nt, Human
gaauaauauugacuuugcaggc

SEQ ID NO: 1075876 - RNA, 21 nt, Human
agcuccaggcuccugggguuc

SEQ ID NO: 1075877 - RNA, 22 nt, Human
aaaaaccuuucccauacuaaga

SEQ ID NO: 1075878 - RNA, 22 nt, Human
ucucaggggccuggaguccugg

SEQ ID NO: 1075879 - RNA, 22 nt, Human
agcagcucacaggauuccugaa

SEQ ID NO: 1075880 - RNA, 22 nt, Human
guauuuuauggccuggggccua

SEQ ID NO: 1075881 - RNA, 22 nt, Human
uggaacaaucccgguuuagcuc

SEQ ID NO: 1075882 - RNA, 22 nt, Human
ucacauuuuaucuauuuuaagu

SEQ ID NO: 1075883 - RNA, 23 nt, Human
ucuccagugucucuucauugagu

SEQ ID NO: 1075884 - RNA, 22 nt, Human
ucagcccugaggacagaggcag

SEQ ID NO: 1075885 - RNA, 22 nt, Human
aagucauugguagcuugauagg

SEQ ID NO: 1075886 - RNA, 22 nt, Human
guauuccugcaaauagcaguga

SEQ ID NO: 1075887 - RNA, 20 nt, Human
gcagcugcccccagucccug

SEQ ID NO: 1075888 - RNA, 22 nt, Human
gauuaauagacacaaccaagcu

SEQ ID NO: 1075889 - RNA, 22 nt, Human
uaaagucacagagcaggugcaa

SEQ ID NO: 1075890 - RNA, 22 nt, Human
gccccagccaaggugacacgaa

SEQ ID NO: 1075891 - RNA, 22 nt, Human
agaggagguccuuuucugaugu

SEQ ID NO: 1075892 - RNA, 22 nt, Human
uuaaauucauuccaacuuuuga

SEQ ID NO: 1075893 - RNA, 22 nt, Human
gaggggaagacuucuggacagu

SEQ ID NO: 1075894 - RNA, 22 nt, Human
gcuguccugggaacaggcacua

SEQ ID NO: 1075895 - RNA, 22 nt, Human
gucccagggaagaaggcagcac

SEQ ID NO: 1075896 - RNA, 22 nt, Human
cacuggugacuucugagcugga

SEQ ID NO: 1075897 - RNA, 22 nt, Human
ucaagaaagggcuucaccagga

SEQ ID NO: 1075898 - RNA, 22 nt, Human
cuucagaagccugcagccuuug

SEQ ID NO: 1075899 - RNA, 22 nt, Human
uguucucacuggaugcuucaca

SEQ ID NO: 1075900 - RNA, 22 nt, Human
gccugggagagggauagugcag

SEQ ID NO: 1075901 - RNA, 22 nt, Human
ccacugucagaggggcugugcc

SEQ ID NO: 1075902 - RNA, 22 nt, Human
ugaguccaccuuaguauauggg

SEQ ID NO: 1075903 - RNA, 22 nt, Human
ggggcaggagguguucucuuuu

SEQ ID NO: 1075904 - RNA, 19 nt, Human
cagagcagugguuccugaa

SEQ ID NO: 1075905 - RNA, 22 nt, Human
gacagugauuaguuacuauaaa

SEQ ID NO: 1075906 - RNA, 22 nt, Human
caucuucagguguuuuccauca

SEQ ID NO: 1075907 - RNA, 22 nt, Human
uucugagagagccucucauguu

SEQ ID NO: 1075908 - RNA, 17 nt, Human
ggccuguguggcugcag

SEQ ID NO: 1075909 - RNA, 22 nt, Human
uggcuuccugcauggauccucu

SEQ ID NO: 1075910 - RNA, 22 nt, Human
uuuaaauuuagaagaaacacug

SEQ ID NO: 1075911 - RNA, 22 nt, Human
uggacagguuugggugccuguu

SEQ ID NO: 1075912 - RNA, 22 nt, Human
gcccuuccaacccagagggcaa

SEQ ID NO: 1075913 - RNA, 22 nt, Human
uugggcuugacaagcugucaag

SEQ ID NO: 1075914 - RNA, 22 nt, Human
gccagggaggcuguaggguccu

SEQ ID NO: 1075915 - RNA, 22 nt, Human
aucuggcuuacgaagcacuggu

SEQ ID NO: 1075916 - RNA, 22 nt, Human
gccucugcccuccugggacugc

SEQ ID NO: 1075917 - RNA, 22 nt, Human
uguuuuucaaauauugcucugu

SEQ ID NO: 1075918 - RNA, 22 nt, Human
auuucuguuauaccuuucucag

SEQ ID NO: 1075919 - RNA, 22 nt, Human
ggacacagguaaauaccacuga

SEQ ID NO: 1075920 - RNA, 22 nt, Human
aagcagcauguggguuaucggg

SEQ ID NO: 1075921 - RNA, 22 nt, Human
uccuggagauaauugcagugaa

SEQ ID NO: 1075922 - RNA, 22 nt, Human
uuucauugcagagucugugugc

SEQ ID NO: 1075923 - RNA, 22 nt, Human
auaugugaaugauaucacuuug

SEQ ID NO: 1075924 - RNA, 22 nt, Human
agggccuggaacuggagaccac

SEQ ID NO: 1075925 - RNA, 22 nt, Human
uucuuucuuagcaaucuauggu

SEQ ID NO: 1075926 - RNA, 22 nt, Human
ggaaagauuugucacaugaaug

SEQ ID NO: 1075927 - RNA, 22 nt, Human
acagguggggaggcugagguuc

SEQ ID NO: 1075928 - RNA, 22 nt, Human
gggcacuggaaggcucucaggc

SEQ ID NO: 1075929 - RNA, 22 nt, Human
aagcagccuggcaugaugcuuu

SEQ ID NO: 1075930 - RNA, 22 nt, Human
ccugcugggacgugugguugcc

SEQ ID NO: 1075931 - RNA, 22 nt, Human
ugaaucaaagcugaaguuuuca

SEQ ID NO: 1075932 - RNA, 22 nt, Human
auucaaagcccaguaaacauug

SEQ ID NO: 1075933 - RNA, 22 nt, Human
uagagagcuguuugaaagcagg

SEQ ID NO: 1075934 - RNA, 22 nt, Human
auauacaugggaauauguggag

SEQ ID NO: 1075935 - RNA, 22 nt, Human
agcaggcuuacuuucugauuag

SEQ ID NO: 1075936 - RNA, 22 nt, Human
auggggcugggauucuccucgg

SEQ ID NO: 1075937 - RNA, 22 nt, Human
ucuguuuuugaggcuaucuucu

SEQ ID NO: 1075938 - RNA, 22 nt, Human
gccuggagaccugcuccucuac

SEQ ID NO: 1075939 - RNA, 22 nt, Human
uggcaguguauagguggcuccu

SEQ ID NO: 1075940 - RNA, 22 nt, Human
ugcccaggcuggagugcagagg

SEQ ID NO: 1075941 - RNA, 22 nt, Human
cugcuuuggacaacuauucuug

SEQ ID NO: 1075942 - RNA, 22 nt, Human
agaaagcacucugucuuuuacc

SEQ ID NO: 1075943 - RNA, 22 nt, Human
ugcagaagaccuuccagggcug

SEQ ID NO: 1075944 - RNA, 22 nt, Human
uacagauauauagugugugccu

SEQ ID NO: 1075945 - RNA, 22 nt, Human
uuacauauugucuauuguucaa

SEQ ID NO: 1075946 - RNA, 22 nt, Human
ccuggcuuccuggagcucacaa

SEQ ID NO: 1075947 - RNA, 22 nt, Human
aauuuuguuuaagugaucugcu

SEQ ID NO: 1075948 - RNA, 22 nt, Human
acaaacuuccaucaugaauuuu

SEQ ID NO: 1075949 - RNA, 22 nt, Human
gccucagggauaggaugagcau

SEQ ID NO: 1075950 - RNA, 20 nt, Human
cucaggauugucuagccccu

SEQ ID NO: 1075951 - RNA, 22 nt, Human
cucagggccaaggaugcuguug

SEQ ID NO: 1075952 - RNA, 22 nt, Human
ccagguggacaaggcuuucaca

SEQ ID NO: 1075953 - RNA, 22 nt, Human
ugggcagaguagcucagaagaa

SEQ ID NO: 1075954 - RNA, 22 nt, Human
uggaugugucgcccuggcucuc

SEQ ID NO: 1075955 - RNA, 22 nt, Human
gcagauggauguggacggcgcc

SEQ ID NO: 1075956 - RNA, 22 nt, Human
ucuguguaagaccagugcuggg

SEQ ID NO: 1075957 - RNA, 22 nt, Human
ugguccuggccuugaccccagg

SEQ ID NO: 1075958 - RNA, 22 nt, Human
ccacagggauaggaauggggcu

SEQ ID NO: 1075959 - RNA, 22 nt, Human
gcugccuguguggccacucacu

SEQ ID NO: 1075960 - RNA, 22 nt, Human
acagaacugggggcacagauag

SEQ ID NO: 1075961 - RNA, 22 nt, Human
cacaagagagugcgcguugcaa

SEQ ID NO: 1075962 - RNA, 22 nt, Human
ugcaauaucagauucaacacau

SEQ ID NO: 1075963 - RNA, 22 nt, Human
uucuuuauugagacuucauugu

SEQ ID NO: 1075964 - RNA, 22 nt, Human
ggaaaguggugguggaaagagg

SEQ ID NO: 1075965 - RNA, 22 nt, Human
uggaagaaugcuccacagggaa

SEQ ID NO: 1075966 - RNA, 22 nt, Human
aggcacugagaggcuguguugc

SEQ ID NO: 1075967 - RNA, 22 nt, Human
gggcacugaaugccaagcuagg

SEQ ID NO: 1075968 - RNA, 22 nt, Human
cugaaccacuaauauuuugauu

SEQ ID NO: 1075969 - RNA, 20 nt, Human
aaagcaguaugcaaguagag

SEQ ID NO: 1075970 - RNA, 22 nt, Human
gaggaagaaucaggguggugag

SEQ ID NO: 1075971 - RNA, 22 nt, Human
aaggaggcccucuccuucugga

SEQ ID NO: 1075972 - RNA, 22 nt, Human
uccauuuuucaugacuccucaa

SEQ ID NO: 1075973 - RNA, 22 nt, Human
auucucugaagucaauggaaau

SEQ ID NO: 1075974 - RNA, 22 nt, Human
aaggaaccucuaagccucuguu

SEQ ID NO: 1075975 - RNA, 22 nt, Human
uauucacauguacauaugcuca

SEQ ID NO: 1075976 - RNA, 22 nt, Human
ccagaugguauaguagggagag

SEQ ID NO: 1075977 - RNA, 22 nt, Human
cuggagcuggcuuccuuccacu

SEQ ID NO: 1075978 - RNA, 18 nt, Human
augugcaauuuuguauuu

SEQ ID NO: 1075979 - RNA, 22 nt, Human
gcucagagaaucagcagacacc

SEQ ID NO: 1075980 - RNA, 22 nt, Human
agggucagggagugaguauuua

SEQ ID NO: 1075981 - RNA, 22 nt, Human
uggcacugaccccaggccugug

SEQ ID NO: 1075982 - RNA, 22 nt, Human
ucaguagcagaaagcaaugagu

SEQ ID NO: 1075983 - RNA, 22 nt, Human
aacauugcagcuuaauugcagg

SEQ ID NO: 1075984 - RNA, 22 nt, Human
aguaacagguguacagacuauc

SEQ ID NO: 1075985 - RNA, 22 nt, Human
ucccagagguugagucacuuau

SEQ ID NO: 1075986 - RNA, 22 nt, Human
ugugccugucacccucagagag

SEQ ID NO: 1075987 - RNA, 22 nt, Human
aaggcacuugcccagagcugca

SEQ ID NO: 1075988 - RNA, 22 nt, Human
agggcagccaugagccuucagg

SEQ ID NO: 1075989 - RNA, 22 nt, Human
aaaagcucuuucugcuguagau

SEQ ID NO: 1075990 - RNA, 22 nt, Human
guguaugaacgaaagaauggau

SEQ ID NO: 1075991 - RNA, 22 nt, Human
uugagaaaccuggcaguagaga

SEQ ID NO: 1075992 - RNA, 22 nt, Human
gcugccucaggcaccuccuggc

SEQ ID NO: 1075993 - RNA, 22 nt, Human
gcaggguggauggcagggccag

SEQ ID NO: 1075994 - RNA, 23 nt, Human
cuggaacauaguagauggucaga

SEQ ID NO: 1075995 - RNA, 22 nt, Human
cauuugcauaugaagaaguaag

SEQ ID NO: 1075996 - RNA, 22 nt, Human
aaggcuuuccuguaggaagaca

SEQ ID NO: 1075997 - RNA, 22 nt, Human
uugacaauugggagauauaaag

SEQ ID NO: 1075998 - RNA, 22 nt, Human
ccuuuuaagggagacuagagau

SEQ ID NO: 1075999 - RNA, 23 nt, Human
acauagaacagaauauauuugug

SEQ ID NO: 1076000 - RNA, 21 nt, Human
gaggcugucugcugcuggccu

SEQ ID NO: 1076001 - RNA, 22 nt, Human
guucacaugcucucaugcuuuu

SEQ ID NO: 1076002 - RNA, 22 nt, Human
gaucuuuaaggcuuacccugga

SEQ ID NO: 1076003 - RNA, 22 nt, Human
uuggguaggagaaagaacagau

SEQ ID NO: 1076004 - RNA, 22 nt, Human
auuuuagauuuaagaauaaggu

SEQ ID NO: 1076005 - RNA, 22 nt, Human
uugcaaaugugaguuuagacug

SEQ ID NO: 1076006 - RNA, 22 nt, Human
gcaggugaaugauggacuagga

SEQ ID NO: 1076007 - RNA, 22 nt, Human
ucccaaagcuacucuucugacu

SEQ ID NO: 1076008 - RNA, 22 nt, Human
agaaaguuguuggaggaaauga

SEQ ID NO: 1076009 - RNA, 22 nt, Human
cagugauuuucucagaacuuga

SEQ ID NO: 1076010 - RNA, 22 nt, Human
ggcacuguuuuuguauucaguu

SEQ ID NO: 1076011 - RNA, 22 nt, Human
agcuguguggugucugacagcu

SEQ ID NO: 1076012 - RNA, 22 nt, Human
gcaucuaaauaaacgugggagu

SEQ ID NO: 1076013 - RNA, 22 nt, Human
agaaaauuuaaagagacacaca

SEQ ID NO: 1076014 - RNA, 19 nt, Human
ccagucccauacaggagau

SEQ ID NO: 1076015 - RNA, 22 nt, Human
aauauuucuccuucguuauagc

SEQ ID NO: 1076016 - RNA, 22 nt, Human
acauuucuuccuaauuaucccu

SEQ ID NO: 1076017 - RNA, 22 nt, Human
uuuuuaagagucuggaaauagu

SEQ ID NO: 1076018 - RNA, 22 nt, Human
caauuaaagaagaccugccuca

SEQ ID NO: 1076019 - RNA, 22 nt, Human
gcugucuucacuuccugguuuc

SEQ ID NO: 1076020 - RNA, 22 nt, Human
cugucaguucuuccagauagag

SEQ ID NO: 1076021 - RNA, 22 nt, Human
uggagaaggggcagggucucca

SEQ ID NO: 1076022 - RNA, 22 nt, Human
ucagaauucugaagggcacaaa

SEQ ID NO: 1076023 - RNA, 22 nt, Human
cuucacagcaugagcuuuggag

SEQ ID NO: 1076024 - RNA, 22 nt, Human
aaagguuuuauguuuuccacuu

SEQ ID NO: 1076025 - RNA, 22 nt, Human
agggccugagaccguggcuuga

SEQ ID NO: 1076026 - RNA, 22 nt, Human
agauacauuaguaguuacuugu

SEQ ID NO: 1076027 - RNA, 22 nt, Human
gugacaguggucacuuguaguu

SEQ ID NO: 1076028 - RNA, 22 nt, Human
agugucaaugccaacaguauau

SEQ ID NO: 1076029 - RNA, 22 nt, Human
ucugccagugguuuggcccuga

SEQ ID NO: 1076030 - RNA, 22 nt, Human
accaggaagagauuccaauuua

SEQ ID NO: 1076031 - RNA, 22 nt, Human
caguacuuuucuggcuuucuac

SEQ ID NO: 1076032 - RNA, 16 nt, Human
caguuuuaaggcccaa

SEQ ID NO: 1076033 - RNA, 22 nt, Human
agggccagccaggcccuacaaa

SEQ ID NO: 1076034 - RNA, 22 nt, Human
ucuuuguaacugucuauugaga

SEQ ID NO: 1076035 - RNA, 22 nt, Human
agcaggcaggaggcuacuaagg

SEQ ID NO: 1076036 - RNA, 22 nt, Human
gcagcugaaagggaucucuaca

SEQ ID NO: 1076037 - RNA, 22 nt, Human
agauaauuugaguaaauuaauu

SEQ ID NO: 1076038 - RNA, 22 nt, Human
augaaauuaaucaacacauaca

SEQ ID NO: 1076039 - RNA, 22 nt, Human
agucacuuucuacuugguuucu

SEQ ID NO: 1076040 - RNA, 22 nt, Human
augaggcaguacacacaaagcc

SEQ ID NO: 1076041 - RNA, 22 nt, Human
uuugcauuccugccugcauuca

SEQ ID NO: 1076042 - RNA, 22 nt, Human
ucuuccucuagaucugaggccc

SEQ ID NO: 1076043 - RNA, 22 nt, Human
uggaaugacagagagucugaau

SEQ ID NO: 1076044 - RNA, 22 nt, Human
ggcagggcaggaaagucaggaa

SEQ ID NO: 1076045 - RNA, 22 nt, Human
gggcugcaucagcaggacccgg

SEQ ID NO: 1076046 - RNA, 22 nt, Human
cagaagaauggugucugagcuc

SEQ ID NO: 1076047 - RNA, 22 nt, Human
uaggaagaucaaguuuaucuca

SEQ ID NO: 1076048 - RNA, 22 nt, Human
ugcauguuuguagguucuucua

SEQ ID NO: 1076049 - RNA, 22 nt, Human
caguacuugggaaugcugggga

SEQ ID NO: 1076050 - RNA, 22 nt, Human
gccuggcuccuaaggacuggcu

SEQ ID NO: 1076051 - RNA, 22 nt, Human
gccaccagggggugcaaggucc

SEQ ID NO: 1076052 - RNA, 22 nt, Human
ugggaggaucgcuugagcccag

SEQ ID NO: 1076053 - RNA, 22 nt, Human
ggaaucagaugaggggcagagc

SEQ ID NO: 1076054 - RNA, 23 nt, Human
ucugaguuauguccuuacauuug

SEQ ID NO: 1076055 - RNA, 22 nt, Human
aucagaaaauacccaguguuua

SEQ ID NO: 1076056 - RNA, 22 nt, Human
gacuuuaaaaugcuagaacagg

SEQ ID NO: 1076057 - RNA, 22 nt, Human
ucagcacugucuuuuauuugaa

SEQ ID NO: 1076058 - RNA, 22 nt, Human
agccaggcucaaggccugcucc

SEQ ID NO: 1076059 - RNA, 22 nt, Human
ugaggcagugauguuuaagcac

SEQ ID NO: 1076060 - RNA, 22 nt, Human
gccugcagggccugggccuacc

SEQ ID NO: 1076061 - RNA, 22 nt, Human
uacauacaguggaugcuuuagg

SEQ ID NO: 1076062 - RNA, 22 nt, Human
agucuugcucuugcaucugcuu

SEQ ID NO: 1076063 - RNA, 20 nt, Human
agcccuguuuccuggagaga

SEQ ID NO: 1076064 - RNA, 19 nt, Human
uggggccuccugucccugg

SEQ ID NO: 1076065 - RNA, 22 nt, Human
ugccugucucugacugccauua

SEQ ID NO: 1076066 - RNA, 22 nt, Human
gagccuggauugucaccgacuu

SEQ ID NO: 1076067 - RNA, 20 nt, Human
ggccuuggccucuuugcagc

SEQ ID NO: 1076068 - RNA, 22 nt, Human
uucaguauguuggacguuaugu

SEQ ID NO: 1076069 - RNA, 22 nt, Human
aaggaaccugggaaccuaucau

SEQ ID NO: 1076070 - RNA, 22 nt, Human
gaacacagugugaucguauguc

SEQ ID NO: 1076071 - RNA, 22 nt, Human
caucacaguuugucagaaauca

SEQ ID NO: 1076072 - RNA, 22 nt, Human
auucucaguucacuaguuucuu

SEQ ID NO: 1076073 - RNA, 22 nt, Human
auggcuuugcucaaguuuagcc

SEQ ID NO: 1076074 - RNA, 22 nt, Human
ucaggugggucuacaauuaguu

SEQ ID NO: 1076075 - RNA, 22 nt, Human
cucacagaugaugucuaugugg

SEQ ID NO: 1076076 - RNA, 22 nt, Human
guggcugcuaagucuccuuccu

SEQ ID NO: 1076077 - RNA, 22 nt, Human
ucuggagccacaaaccucagcu

SEQ ID NO: 1076078 - RNA, 22 nt, Human
ggcccugggaugcucagcagug

SEQ ID NO: 1076079 - RNA, 20 nt, Human
gaauuuuaugaacacuacca

SEQ ID NO: 1076080 - RNA, 22 nt, Human
gaugccucuuuuggcugaauua

SEQ ID NO: 1076081 - RNA, 22 nt, Human
ccuaggcccuaggcuuccauca

SEQ ID NO: 1076082 - RNA, 22 nt, Human
uguggggacugaguggaggcuu

SEQ ID NO: 1076083 - RNA, 22 nt, Human
uguuagaaauuauuaguaauau

SEQ ID NO: 1076084 - RNA, 21 nt, Human
ugaaugaggaggauggcauuu

SEQ ID NO: 1076085 - RNA, 22 nt, Human
uggaagcacuuggguuuuguug

SEQ ID NO: 1076086 - RNA, 22 nt, Human
gaauucuaaccauuaagccaag

SEQ ID NO: 1076087 - RNA, 22 nt, Human
ucaauucuagagccuuacauug

SEQ ID NO: 1076088 - RNA, 22 nt, Human
acaggaacagcuugauggcauc

SEQ ID NO: 1076089 - RNA, 22 nt, Human
aaugggagagaacacaaagucc

SEQ ID NO: 1076090 - RNA, 22 nt, Human
ggagccugacagugcccagcau

SEQ ID NO: 1076091 - RNA, 22 nt, Human
agucugcaggcugugauuuuuu

SEQ ID NO: 1076092 - RNA, 22 nt, Human
agggccagcuagagcccucgcc

SEQ ID NO: 1076093 - RNA, 22 nt, Human
caggcagaagaaguggaaggac

SEQ ID NO: 1076094 - RNA, 22 nt, Human
ggcugagcguggcugccguggg

SEQ ID NO: 1076095 - RNA, 22 nt, Human
caugaauauuuaguauuuacuu

SEQ ID NO: 1076096 - RNA, 22 nt, Human
gaguuauuggguggaaagguag

SEQ ID NO: 1076097 - RNA, 22 nt, Human
aaguccaccagucagacuagga

SEQ ID NO: 1076098 - RNA, 22 nt, Human
gaucaauacuauuaagaucaua

SEQ ID NO: 1076099 - RNA, 22 nt, Human
uaagucguggaugauucuucgg

SEQ ID NO: 1076100 - RNA, 22 nt, Human
caggaaccaugaagacauauac

SEQ ID NO: 1076101 - RNA, 22 nt, Human
uaaauacuuaguuuugugucua

SEQ ID NO: 1076102 - RNA, 22 nt, Human
ggagucccagcaaagccuuccc

SEQ ID NO: 1076103 - RNA, 22 nt, Human
uuuuccucugcaauaaaagcag

SEQ ID NO: 1076104 - RNA, 22 nt, Human
uguggggcucccuggcagccug

SEQ ID NO: 1076105 - RNA, 18 nt, Human
uucagcagcagacacacu

SEQ ID NO: 1076106 - RNA, 22 nt, Human
cagccaggcccccgagucguug

SEQ ID NO: 1076107 - RNA, 21 nt, Human
ugagagccuccaaccggcuac

SEQ ID NO: 1076108 - RNA, 22 nt, Human
auuaauaugagaaaguggcaga

SEQ ID NO: 1076109 - RNA, 22 nt, Human
agucucugggcaugguugugac

SEQ ID NO: 1076110 - RNA, 22 nt, Human
gcuuccuaaaugcacagggcag

SEQ ID NO: 1076111 - RNA, 23 nt, Human
ugcaagaguuccaaacuguucaa

SEQ ID NO: 1076112 - RNA, 22 nt, Human
agcagcuagacuucagaaucug

SEQ ID NO: 1076113 - RNA, 22 nt, Human
auuuccugaucuguaaaauagc

SEQ ID NO: 1076114 - RNA, 20 nt, Human
uauuucugggcaaccauuua

SEQ ID NO: 1076115 - RNA, 17 nt, Human
gcaagggaugggagauu

SEQ ID NO: 1076116 - RNA, 22 nt, Human
cggggccuagucuaccucggca

SEQ ID NO: 1076117 - RNA, 22 nt, Human
caaacauucaaguacaagucuu

SEQ ID NO: 1076118 - RNA, 22 nt, Human
aggcagacucaauggcuagaua

SEQ ID NO: 1076119 - RNA, 22 nt, Human
gcugccuccugaaagcgcucug

SEQ ID NO: 1076120 - RNA, 22 nt, Human
ucucugcugagaagggcuggca

SEQ ID NO: 1076121 - RNA, 20 nt, Human
ugccuuuuauaccuuuaaac

SEQ ID NO: 1076122 - RNA, 22 nt, Human
uccugggcuucacagacucugu

SEQ ID NO: 1076123 - RNA, 22 nt, Human
aggcugcuuucauggccgcccc

SEQ ID NO: 1076124 - RNA, 22 nt, Human
ucccagggacaccaagcuguuu

SEQ ID NO: 1076125 - RNA, 22 nt, Human
ugaugguuuuauuaauaggacc

SEQ ID NO: 1076126 - RNA, 22 nt, Human
uuaaggcuguggggauuacugc

SEQ ID NO: 1076127 - RNA, 22 nt, Human
guggccucaugucuauaaagag

SEQ ID NO: 1076128 - RNA, 22 nt, Human
cuugcuuuaucugguuucucau

SEQ ID NO: 1076129 - RNA, 22 nt, Human
cagcaauauacacagucuaugg

SEQ ID NO: 1076130 - RNA, 22 nt, Human
cauacaaauguguccaggcucu

SEQ ID NO: 1076131 - RNA, 22 nt, Human
uauuugucacugcacuugaaau

SEQ ID NO: 1076132 - RNA, 15 nt, Human
aacaucacuauuuug

SEQ ID NO: 1076133 - RNA, 22 nt, Human
caggucagagguagaugagaug

SEQ ID NO: 1076134 - RNA, 22 nt, Human
gccuggcuugccagcccuggcg

SEQ ID NO: 1076135 - RNA, 22 nt, Human
cuuaauaaaugguagcuguuau

SEQ ID NO: 1076136 - RNA, 22 nt, Human
aggcucagcccaagguggagag

SEQ ID NO: 1076137 - RNA, 19 nt, Human
ugcuucuggggcuucucca

SEQ ID NO: 1076138 - RNA, 22 nt, Human
uucucuggaacugaaacaagau

SEQ ID NO: 1076139 - RNA, 18 nt, Human
cacaggcaggugauaggu

SEQ ID NO: 1076140 - RNA, 22 nt, Human
uuuuacagucagucaaacucag

SEQ ID NO: 1076141 - RNA, 22 nt, Human
aacauaauguggccaaagucac

SEQ ID NO: 1076142 - RNA, 22 nt, Human
uccuuuggagcuugacugguag

SEQ ID NO: 1076143 - RNA, 22 nt, Human
cuggagcucuccagagccccgu

SEQ ID NO: 1076144 - RNA, 22 nt, Human
guuauucuacagucauugaagu

SEQ ID NO: 1076145 - RNA, 22 nt, Human
augcuuaaugaggguauauaug

SEQ ID NO: 1076146 - RNA, 22 nt, Human
agucucaggcagaggaaggcua

SEQ ID NO: 1076147 - RNA, 22 nt, Human
gagcugggagcugggauuugga

SEQ ID NO: 1076148 - RNA, 20 nt, Human
cuucuucagccuaugcuuca

SEQ ID NO: 1076149 - RNA, 22 nt, Human
aaauuauuacaagcuaguuggc

SEQ ID NO: 1076150 - RNA, 22 nt, Human
uuuguaagagcauauguaaagg

SEQ ID NO: 1076151 - RNA, 22 nt, Human
cugagccuuauucaccagcccu

SEQ ID NO: 1076152 - RNA, 22 nt, Human
gggaugucacugugccuggcac

SEQ ID NO: 1076153 - RNA, 22 nt, Human
uacaaacuuguuuuaaguaagu

SEQ ID NO: 1076154 - RNA, 22 nt, Human
uggccaccccuuucucugcacu

SEQ ID NO: 1076155 - RNA, 22 nt, Human
ucucagagaccugaacucccug

SEQ ID NO: 1076156 - RNA, 22 nt, Human
cucuucagccuauuugagugca

SEQ ID NO: 1076157 - RNA, 22 nt, Human
agaccaagugcaggugccacua

SEQ ID NO: 1076158 - RNA, 21 nt, Human
gaguuaauuugaccccugccu

SEQ ID NO: 1076159 - RNA, 22 nt, Human
gcugggaggaucucucccuguc

SEQ ID NO: 1076160 - RNA, 22 nt, Human
ugggcagccaucccagccucuc

SEQ ID NO: 1076161 - RNA, 22 nt, Human
cauuacauuucaaaauguuucc

SEQ ID NO: 1076162 - RNA, 22 nt, Human
caguggcaaugggacagagcac

SEQ ID NO: 1076163 - RNA, 22 nt, Human
gagggcagagucuaaugaugca

SEQ ID NO: 1076164 - RNA, 22 nt, Human
ggagcagggaauuacagcgcag

SEQ ID NO: 1076165 - RNA, 22 nt, Human
ggaaaugacuuggugcuucguu

SEQ ID NO: 1076166 - RNA, 20 nt, Human
ucagauuuuucuaacuuuga

SEQ ID NO: 1076167 - RNA, 22 nt, Human
ugucccauggacacaacuucuu

SEQ ID NO: 1076168 - RNA, 23 nt, Human
ugcucaauagaccauaauaucca

SEQ ID NO: 1076169 - RNA, 19 nt, Human
gcaggcacagcccugggug

SEQ ID NO: 1076170 - RNA, 22 nt, Human
uuccuuaguugacugucuuagu

SEQ ID NO: 1076171 - RNA, 19 nt, Human
acagggcagcaauaggaua

SEQ ID NO: 1076172 - RNA, 22 nt, Human
cuggcaggcggagguugcagug

SEQ ID NO: 1076173 - RNA, 22 nt, Human
cuggaauugcauaauauguccu

SEQ ID NO: 1076174 - RNA, 22 nt, Human
ucugagaagcuagaggacaaag

SEQ ID NO: 1076175 - RNA, 22 nt, Human
auuuuugcccugcaguacauaa

SEQ ID NO: 1076176 - RNA, 22 nt, Human
ucagugauugguggacugccua

SEQ ID NO: 1076177 - RNA, 22 nt, Human
gggcuguguacuaugaggaggg

SEQ ID NO: 1076178 - RNA, 22 nt, Human
gagagcugggcuuugggugaag

SEQ ID NO: 1076179 - RNA, 22 nt, Human
cagcucuucccucuucuuguag

SEQ ID NO: 1076180 - RNA, 22 nt, Human
gccugugcuuucuucccuccug

SEQ ID NO: 1076181 - RNA, 22 nt, Human
uauauucugauuccaucugugu

SEQ ID NO: 1076182 - RNA, 16 nt, Human
uuuguucacuccaugg

SEQ ID NO: 1076183 - RNA, 22 nt, Human
ugcacagagggaggcauaaaau

SEQ ID NO: 1076184 - RNA, 22 nt, Human
uaauacaucauucaucuaagga

SEQ ID NO: 1076185 - RNA, 22 nt, Human
acacaagauuguguauugaauu

SEQ ID NO: 1076186 - RNA, 18 nt, Human
ugggccugcauccuaguc

SEQ ID NO: 1076187 - RNA, 19 nt, Human
ggccaccucucuucccagg

SEQ ID NO: 1076188 - RNA, 22 nt, Human
gccagccccuuagggcucuccc

SEQ ID NO: 1076189 - RNA, 22 nt, Human
cccaggaggucgaagcugcagu

SEQ ID NO: 1076190 - RNA, 22 nt, Human
cccagaaggucgaggcugcagu

SEQ ID NO: 1076191 - RNA, 22 nt, Human
ggcaguggugggaggcucgcuc

SEQ ID NO: 1076192 - RNA, 22 nt, Human
uuuacagucugucuagcaaugu

SEQ ID NO: 1076193 - RNA, 19 nt, Human
aggaaaggaucaaaauagc

SEQ ID NO: 1076194 - RNA, 23 nt, Human
acucaaaauuuggcauuugagga

SEQ ID NO: 1076195 - RNA, 22 nt, Human
augcucugaugcuguuaaaugu

SEQ ID NO: 1076196 - RNA, 22 nt, Human
uacuaaacccucgauggaucuu

SEQ ID NO: 1076197 - RNA, 22 nt, Human
cugggaggcggagguuguagug

SEQ ID NO: 1076198 - RNA, 22 nt, Human
ggcaaaaaccacaauuacuuuu

SEQ ID NO: 1076199 - RNA, 22 nt, Human
gcccagaguucaaggcugcagu

SEQ ID NO: 1076200 - RNA, 22 nt, Human
caugggaggccugcugcuggug

SEQ ID NO: 1076201 - RNA, 22 nt, Human
accaggcuugaugauuugcuua

SEQ ID NO: 1076202 - RNA, 22 nt, Human
agagcccugaagcagagcuaaa

SEQ ID NO: 1076203 - RNA, 22 nt, Human
caggaaaucacucugauuuugg

SEQ ID NO: 1076204 - RNA, 21 nt, Human
gggaaauuaggauugcucauc

SEQ ID NO: 1076205 - RNA, 22 nt, Human
ggccacagcaaugcugugaugu

SEQ ID NO: 1076206 - RNA, 22 nt, Human
ugaaacaagauccacagacuug

SEQ ID NO: 1076207 - RNA, 22 nt, Human
aucaguuuguauaugaaacacu

SEQ ID NO: 1076208 - RNA, 22 nt, Human
ccugaggggcugcaggccagcu

SEQ ID NO: 1076209 - RNA, 19 nt, Human
aaacacagauuucuuacca

SEQ ID NO: 1076210 - RNA, 22 nt, Human
caugauuuugucuuguguuaau

SEQ ID NO: 1076211 - RNA, 22 nt, Human
aguguuguaugggaugacugcu

SEQ ID NO: 1076212 - RNA, 22 nt, Human
guuggaagaagacuguaaauua

SEQ ID NO: 1076213 - RNA, 22 nt, Human
cucaggcccacagcagacccac

SEQ ID NO: 1076214 - RNA, 22 nt, Human
ccugccaggacauugcuugaag

SEQ ID NO: 1076215 - RNA, 22 nt, Human
gccucugcaucaucacuccagc

SEQ ID NO: 1076216 - RNA, 19 nt, Human
ggcuucaguuuagcaggcu

SEQ ID NO: 1076217 - RNA, 22 nt, Human
aggaagagcccgggugacauaa

SEQ ID NO: 1076218 - RNA, 22 nt, Human
augaaugauuuuauguaaauga

SEQ ID NO: 1076219 - RNA, 19 nt, Human
aaauaucagagagaugaua

SEQ ID NO: 1076220 - RNA, 22 nt, Human
caacagagagaccagaaacagg

SEQ ID NO: 1076221 - RNA, 22 nt, Human
agcacugauuuuguugcacuua

SEQ ID NO: 1076222 - RNA, 22 nt, Human
ucaggcucagguuaggggccaa

SEQ ID NO: 1076223 - RNA, 20 nt, Human
guauuacaggcuuagaacca

SEQ ID NO: 1076224 - RNA, 22 nt, Human
cugggaugucuauagaacacuu

SEQ ID NO: 1076225 - RNA, 20 nt, Human
gcuuuaagacacagcuaaaa

SEQ ID NO: 1076226 - RNA, 22 nt, Human
ggggcagaguagcuggggugug

SEQ ID NO: 1076227 - RNA, 22 nt, Human
ggaggccaaggcagguggaucg

SEQ ID NO: 1076228 - RNA, 22 nt, Human
uaguuugucaaccacugucaca

SEQ ID NO: 1076229 - RNA, 22 nt, Human
uuuguccagaugcacagauaau

SEQ ID NO: 1076230 - RNA, 21 nt, Human
uccuggcuuuaugcuaccucu

SEQ ID NO: 1076231 - RNA, 22 nt, Human
ggcuggcacucuguccaguguc

SEQ ID NO: 1076232 - RNA, 22 nt, Human
gaugaaaaucuugagaugucga

SEQ ID NO: 1076233 - RNA, 22 nt, Human
accaggggaugguuggcacugu

SEQ ID NO: 1076234 - RNA, 22 nt, Human
cugugcccuguggcuggcaccu

SEQ ID NO: 1076235 - RNA, 22 nt, Human
guuugucuuaauuaggcaucga

SEQ ID NO: 1076236 - RNA, 22 nt, Human
cagccugggcuccagagucccu

SEQ ID NO: 1076237 - RNA, 22 nt, Human
auccaaaucuucacacauaaca

SEQ ID NO: 1076238 - RNA, 22 nt, Human
gcuggggagaauuggguuaucu

SEQ ID NO: 1076239 - RNA, 22 nt, Human
gcugcccugugguccagcaggu

SEQ ID NO: 1076240 - RNA, 22 nt, Human
gcagaugguggaggcaagaggc

SEQ ID NO: 1076241 - RNA, 22 nt, Human
guucuccauucagcuuccugug

SEQ ID NO: 1076242 - RNA, 22 nt, Human
aggcaguuuauccccagagccu

SEQ ID NO: 1076243 - RNA, 22 nt, Human
ggcagcaaauauugucagcugu

SEQ ID NO: 1076244 - RNA, 23 nt, Human
ucaucaaacagcugcucaagaaa

SEQ ID NO: 1076245 - RNA, 22 nt, Human
uuuccuuugugcaggccuuggg

SEQ ID NO: 1076246 - RNA, 22 nt, Human
ccuuucaaauuacaugacugcu

SEQ ID NO: 1076247 - RNA, 22 nt, Human
uuucaucuuccuuggcauaggu

SEQ ID NO: 1076248 - RNA, 22 nt, Human
uaacuguaauauaaauaugagu

SEQ ID NO: 1076249 - RNA, 21 nt, Human
ugcaggcuacuucugacucua

SEQ ID NO: 1076250 - RNA, 22 nt, Human
ucagagaaguaagguggggugc

SEQ ID NO: 1076251 - RNA, 22 nt, Human
cugugcaguccagcccuggaca

SEQ ID NO: 1076252 - RNA, 22 nt, Human
ggggcagggagguuaucgccga

SEQ ID NO: 1076253 - RNA, 22 nt, Human
ccaggggcuggugcugagcugg

SEQ ID NO: 1076254 - RNA, 22 nt, Human
gccucugcacuguggcacacca

SEQ ID NO: 1076255 - RNA, 22 nt, Human
acuaaauaguuuugacagaaca

SEQ ID NO: 1076256 - RNA, 22 nt, Human
cgcagaagagguugucuagucc

SEQ ID NO: 1076257 - RNA, 22 nt, Human
augaagcugaccuugucuugcu

SEQ ID NO: 1076258 - RNA, 22 nt, Human
uuuaguauccuaucucauuuaa

SEQ ID NO: 1076259 - RNA, 18 nt, Human
agugugugcccuuucagg

SEQ ID NO: 1076260 - RNA, 22 nt, Human
uacauaugaacuuuauaacuug

SEQ ID NO: 1076261 - RNA, 22 nt, Human
gagccuggggacccuccugagu

SEQ ID NO: 1076262 - RNA, 19 nt, Human
aggcagucauuggaauaua

SEQ ID NO: 1076263 - RNA, 22 nt, Human
uccucaggauguggaguagaau

SEQ ID NO: 1076264 - RNA, 22 nt, Human
acagcagcuugucuguucuuua

SEQ ID NO: 1076265 - RNA, 22 nt, Human
gccuggagccucagcaaggagg

SEQ ID NO: 1076266 - RNA, 22 nt, Human
ccaggcucagcuauuaagaaac

SEQ ID NO: 1076267 - RNA, 22 nt, Human
guuuuuucaugaguaguuaucu

SEQ ID NO: 1076268 - RNA, 22 nt, Human
uugcauugauguuccuucuugc

SEQ ID NO: 1076269 - RNA, 22 nt, Human
gcagguguggauuugcauccag

SEQ ID NO: 1076270 - RNA, 19 nt, Human
cuucugugauacaucaguc

SEQ ID NO: 1076271 - RNA, 22 nt, Human
augggccuguuccuaugcuggu

SEQ ID NO: 1076272 - RNA, 22 nt, Human
aaacaauguacacaugaauguu

SEQ ID NO: 1076273 - RNA, 22 nt, Human
agggcugcuccuccuucaggcc

SEQ ID NO: 1076274 - RNA, 22 nt, Human
gugguccuguccugacggcuuc

SEQ ID NO: 1076275 - RNA, 22 nt, Human
aaacauguaauucugcuuaaga

SEQ ID NO: 1076276 - RNA, 22 nt, Human
acugcagggcauccuggccaag

SEQ ID NO: 1076277 - RNA, 22 nt, Human
guaacaaaguuucuaggugcug

SEQ ID NO: 1076278 - RNA, 22 nt, Human
guggacugcgcuugagggggcc

SEQ ID NO: 1076279 - RNA, 22 nt, Human
cagaggguugaugugaggcuua

SEQ ID NO: 1076280 - RNA, 22 nt, Human
aacacuaucugccuuacaggga

SEQ ID NO: 1076281 - RNA, 22 nt, Human
gugucacaagagcccaggaaac

SEQ ID NO: 1076282 - RNA, 22 nt, Human
aagacaaagggguccuuggaug

SEQ ID NO: 1076283 - RNA, 22 nt, Human
cugggcagugguggcaucuuug

SEQ ID NO: 1076284 - RNA, 22 nt, Human
aagaauucacugguagagucaa

SEQ ID NO: 1076285 - RNA, 22 nt, Human
caucuugucuuuuugggccuga

SEQ ID NO: 1076286 - RNA, 22 nt, Human
aacagaauaucaaaagauuaug

SEQ ID NO: 1076287 - RNA, 22 nt, Human
acagaaagaagguguauuugag

SEQ ID NO: 1076288 - RNA, 22 nt, Human
caggcagccuucucgucucaca

SEQ ID NO: 1076289 - RNA, 22 nt, Human
ugcccugcccaucuacccuguc

SEQ ID NO: 1076290 - RNA, 22 nt, Human
gugcagugaaaaaagaaugucc

SEQ ID NO: 1076291 - RNA, 22 nt, Human
gaagcccauuuguacagcacau

SEQ ID NO: 1076292 - RNA, 22 nt, Human
ccuuuuuucuaugccaacucug

SEQ ID NO: 1076293 - RNA, 23 nt, Human
aagaaucaguaaguaaggagacc

SEQ ID NO: 1076294 - RNA, 22 nt, Human
ugccugggguuggcaaacugcu

SEQ ID NO: 1076295 - RNA, 22 nt, Human
acacauuuagcaccagguuuau

SEQ ID NO: 1076296 - RNA, 22 nt, Human
gugcaagaaggggagacugggu

SEQ ID NO: 1076297 - RNA, 22 nt, Human
ucuucaaauacagucauauuga

SEQ ID NO: 1076298 - RNA, 22 nt, Human
acugccugugucccuucagugc

SEQ ID NO: 1076299 - RNA, 22 nt, Human
acagcaggcaugaagaaauguu

SEQ ID NO: 1076300 - RNA, 22 nt, Human
agcagaaccacagcacuguuga

SEQ ID NO: 1076301 - RNA, 22 nt, Human
uacaggcauguagcauggugau

SEQ ID NO: 1076302 - RNA, 22 nt, Human
cugcagccuccugggguacaug

SEQ ID NO: 1076303 - RNA, 22 nt, Human
gggacugggagauccuccuggc

SEQ ID NO: 1076304 - RNA, 22 nt, Human
uccucagaaaccccugugaggu

SEQ ID NO: 1076305 - RNA, 22 nt, Human
ugccuggcaacuguggugggcu

SEQ ID NO: 1076306 - RNA, 22 nt, Human
ggaagagauucuuuacauucau

SEQ ID NO: 1076307 - RNA, 22 nt, Human
ugaagccacagagcaucugccu

SEQ ID NO: 1076308 - RNA, 22 nt, Human
aguaugaagauuauaauuuuuc

SEQ ID NO: 1076309 - RNA, 22 nt, Human
cuaaacaagggauuauaauuga

SEQ ID NO: 1076310 - RNA, 22 nt, Human
ugaaggcccagccacagaaugg

SEQ ID NO: 1076311 - RNA, 22 nt, Human
aggugucuggauggguguccuu

SEQ ID NO: 1076312 - RNA, 22 nt, Human
aaagguuuugcccuggguauuc

SEQ ID NO: 1076313 - RNA, 22 nt, Human
ucugucaggagauuggcagcug

SEQ ID NO: 1076314 - RNA, 21 nt, Human
uuuaaggccagcaggagguga

SEQ ID NO: 1076315 - RNA, 22 nt, Human
uaggcaggugugcacugcccac

SEQ ID NO: 1076316 - RNA, 22 nt, Human
aaagccagagcaagcugucaca

SEQ ID NO: 1076317 - RNA, 22 nt, Human
gagggcugcuggaaaaaugcag

SEQ ID NO: 1076318 - RNA, 22 nt, Human
agggccuggacuaauuggaucc

SEQ ID NO: 1076319 - RNA, 22 nt, Human
ucucccaaccucuggugggugc

SEQ ID NO: 1076320 - RNA, 22 nt, Human
ggugaccucaccuggucccacc

SEQ ID NO: 1076321 - RNA, 22 nt, Human
uucuccagaccuugugacuaug

SEQ ID NO: 1076322 - RNA, 20 nt, Human
cuaauauucuacucuaagga

SEQ ID NO: 1076323 - RNA, 22 nt, Human
agccugugugcuuuggacaggg

SEQ ID NO: 1076324 - RNA, 22 nt, Human
cagagccagcaguggggacagg

SEQ ID NO: 1076325 - RNA, 21 nt, Human
aaaugaaugugguagugcaag

SEQ ID NO: 1076326 - RNA, 21 nt, Human
aggcagccagucaugcucccu

SEQ ID NO: 1076327 - RNA, 22 nt, Human
agccucugguccucccucagcu

SEQ ID NO: 1076328 - RNA, 22 nt, Human
uggccugauuuugcuaagagaa

SEQ ID NO: 1076329 - RNA, 22 nt, Human
aggagcuggaguccaggcaagu

SEQ ID NO: 1076330 - RNA, 22 nt, Human
aauaagacucugcuagaaauuc

SEQ ID NO: 1076331 - RNA, 22 nt, Human
gccuccugaaaggaagagcucc

SEQ ID NO: 1076332 - RNA, 22 nt, Human
ugagccuggagucguggagggg

SEQ ID NO: 1076333 - RNA, 22 nt, Human
uccaggaaaaggcuugcagggg

SEQ ID NO: 1076334 - RNA, 22 nt, Human
aagggcugagcacagugagcca

SEQ ID NO: 1076335 - RNA, 22 nt, Human
gagcacagggaauagacagaua

SEQ ID NO: 1076336 - RNA, 22 nt, Human
gggaguggauuauguggaccca

SEQ ID NO: 1076337 - RNA, 22 nt, Human
uuucaacagcucucaaaugauc

SEQ ID NO: 1076338 - RNA, 22 nt, Human
gacccggcuccaggcccagcag

SEQ ID NO: 1076339 - RNA, 22 nt, Human
acagaagacagaguguucaucu

SEQ ID NO: 1076340 - RNA, 22 nt, Human
gcucugcuugcaucaugacugc

SEQ ID NO: 1076341 - RNA, 22 nt, Human
ugcccaagcagaggagugauuc

SEQ ID NO: 1076342 - RNA, 22 nt, Human
uuauuacaaugcagaaaauaga

SEQ ID NO: 1076343 - RNA, 22 nt, Human
gaggguggaaaggguguaccug

SEQ ID NO: 1076344 - RNA, 22 nt, Human
aacauuagauuuguuuuucuag

SEQ ID NO: 1076345 - RNA, 22 nt, Human
agcuagaggugaaacaugccaa

SEQ ID NO: 1076346 - RNA, 22 nt, Human
agcucccaggcagucaugagga

SEQ ID NO: 1076347 - RNA, 22 nt, Human
acagaaagaccuuguaacacuu

SEQ ID NO: 1076348 - RNA, 22 nt, Human
cacugcaaccuccgccuaccgg

SEQ ID NO: 1076349 - RNA, 21 nt, Human
caaaacuuaggugacuuagga

SEQ ID NO: 1076350 - RNA, 22 nt, Human
ucagaggaggcauuuaaacaga

SEQ ID NO: 1076351 - RNA, 22 nt, Human
uccaggccacugcagaggcucu

SEQ ID NO: 1076352 - RNA, 22 nt, Human
aggagccaaauuuuagacucug

SEQ ID NO: 1076353 - RNA, 22 nt, Human
auagugggaauuacgauauacu

SEQ ID NO: 1076354 - RNA, 22 nt, Human
ucaaaagacacaggaggcuagu

SEQ ID NO: 1076355 - RNA, 22 nt, Human
gugaagcacgcugccgcacugg

SEQ ID NO: 1076356 - RNA, 22 nt, Human
ucuuuucuggacucugcaugga

SEQ ID NO: 1076357 - RNA, 22 nt, Human
uuuccuucaucaucugagagcu

SEQ ID NO: 1076358 - RNA, 22 nt, Human
uuguauuuggguaguauagaga

SEQ ID NO: 1076359 - RNA, 22 nt, Human
aaugccaguguguugauuccag

SEQ ID NO: 1076360 - RNA, 22 nt, Human
aucuggcugacuuugugggaca

SEQ ID NO: 1076361 - RNA, 22 nt, Human
aggccaggguagggcccauugu

SEQ ID NO: 1076362 - RNA, 22 nt, Human
cucuggaguucccuugaucuga

SEQ ID NO: 1076363 - RNA, 22 nt, Human
aaaacacacuggaccaauuuaa

SEQ ID NO: 1076364 - RNA, 22 nt, Human
uauuuguugaguuguuaugucu

SEQ ID NO: 1076365 - RNA, 22 nt, Human
ucaggcucaaagggccggauga

SEQ ID NO: 1076366 - RNA, 22 nt, Human
uccaucaccauuucugcgagcu

SEQ ID NO: 1076367 - RNA, 22 nt, Human
aggagucagauuguuugaaugu

SEQ ID NO: 1076368 - RNA, 22 nt, Human
uggcauuucuggccauuugugu

SEQ ID NO: 1076369 - RNA, 19 nt, Human
agcaggcuaggcugccucu

SEQ ID NO: 1076370 - RNA, 22 nt, Human
guagccauuggcaaugaagccu

SEQ ID NO: 1076371 - RNA, 22 nt, Human
cccaggaagagugaguggcauu

SEQ ID NO: 1076372 - RNA, 22 nt, Human
gggcaaagugguggaggcaguu

SEQ ID NO: 1076373 - RNA, 22 nt, Human
gauuuccucacuaacauccauc

SEQ ID NO: 1076374 - RNA, 22 nt, Human
uuuucucaggugcuuaucuaag

SEQ ID NO: 1076375 - RNA, 22 nt, Human
ggccugccucacagucagcacc

SEQ ID NO: 1076376 - RNA, 22 nt, Human
acauugaucagccucccaugca

SEQ ID NO: 1076377 - RNA, 22 nt, Human
aaaggcaggacugcagcauagg

SEQ ID NO: 1076378 - RNA, 22 nt, Human
ggagcugcucagagccaguccc

SEQ ID NO: 1076379 - RNA, 22 nt, Human
ggucccugaagaggccuggggu

SEQ ID NO: 1076380 - RNA, 20 nt, Human
uccaggccuuguucucagau

SEQ ID NO: 1076381 - RNA, 19 nt, Human
cacaaaugaugaggaccug

SEQ ID NO: 1076382 - RNA, 22 nt, Human
ugggccacacacagaagaauca

SEQ ID NO: 1076383 - RNA, 22 nt, Human
aguaaugaauacgguauuugaa

SEQ ID NO: 1076384 - RNA, 19 nt, Human
uccauaagcuuguguucau

SEQ ID NO: 1076385 - RNA, 22 nt, Human
auccuugacacacuccaguacu

SEQ ID NO: 1076386 - RNA, 22 nt, Human
ccuguccuccaagagcacaucu

SEQ ID NO: 1076387 - RNA, 22 nt, Human
acuggcugcgggguggaagaag

SEQ ID NO: 1076388 - RNA, 22 nt, Human
ccaggcucacagcaucccagga

SEQ ID NO: 1076389 - RNA, 22 nt, Human
caggaacacaaguucagggaug

SEQ ID NO: 1076390 - RNA, 22 nt, Human
ucuucuucccaucccucaaaug

SEQ ID NO: 1076391 - RNA, 22 nt, Human
gcuguguccucacacagccuuu

SEQ ID NO: 1076392 - RNA, 18 nt, Human
agaagcagguaaaauucu

SEQ ID NO: 1076393 - RNA, 19 nt, Human
ugcccugcccgcagccuug

SEQ ID NO: 1076394 - RNA, 22 nt, Human
acagguggcacugcuguuacuc

SEQ ID NO: 1076395 - RNA, 22 nt, Human
ucauucccccauaaugguauuu

SEQ ID NO: 1076396 - RNA, 22 nt, Human
gggcuccugccuccuggcaccu

SEQ ID NO: 1076397 - RNA, 22 nt, Human
ucaccgccuugcccggccgggc

SEQ ID NO: 1076398 - RNA, 22 nt, Human
uccuuacaacuuguuauuuuuc

SEQ ID NO: 1076399 - RNA, 22 nt, Human
auguuuguagguaagugacacu

SEQ ID NO: 1076400 - RNA, 22 nt, Human
ucagggcagccuaaggcaccuc

SEQ ID NO: 1076401 - RNA, 22 nt, Human
uuuaagguggacaucuaaguca

SEQ ID NO: 1076402 - RNA, 22 nt, Human
gagacagaguuucacucuuguu

SEQ ID NO: 1076403 - RNA, 22 nt, Human
uugagaaauaagcaugucuaga

SEQ ID NO: 1076404 - RNA, 22 nt, Human
cuuguggcccauggcuuccugc

SEQ ID NO: 1076405 - RNA, 23 nt, Human
ugcaggugugcagagggcucuug

SEQ ID NO: 1076406 - RNA, 22 nt, Human
aguggcagagcugugucuugaa

SEQ ID NO: 1076407 - RNA, 20 nt, Human
uggagccacagucagguucc

SEQ ID NO: 1076408 - RNA, 22 nt, Human
uucuuucugucaugguguacug

SEQ ID NO: 1076409 - RNA, 22 nt, Human
agagagguuaaggagcucuugu

SEQ ID NO: 1076410 - RNA, 22 nt, Human
aucauguugcucaaaauuaaac

SEQ ID NO: 1076411 - RNA, 22 nt, Human
ggcaaggccuugcccagcauuc

SEQ ID NO: 1076412 - RNA, 22 nt, Human
cagaaucagugacacauguaua

SEQ ID NO: 1076413 - RNA, 22 nt, Human
agaaaaggauugauggaucaga

SEQ ID NO: 1076414 - RNA, 22 nt, Human
aguauuugaucagaugauagua

SEQ ID NO: 1076415 - RNA, 22 nt, Human
caauuucaucuugugcuucaau

SEQ ID NO: 1076416 - RNA, 22 nt, Human
ggcaggcaacggaccacuaguc

SEQ ID NO: 1076417 - RNA, 22 nt, Human
ugcuuuauaaccauuucugugg

SEQ ID NO: 1076418 - RNA, 22 nt, Human
ucuguggccuguguccaagugc

SEQ ID NO: 1076419 - RNA, 22 nt, Human
ucugggcugggagcguguggac

SEQ ID NO: 1076420 - RNA, 22 nt, Human
aguggcagaagccaagucugca

SEQ ID NO: 1076421 - RNA, 22 nt, Human
uuaauacaagcauaugcacaca

SEQ ID NO: 1076422 - RNA, 22 nt, Human
guuuguaaccagaacagagagu

SEQ ID NO: 1076423 - RNA, 22 nt, Human
ucaauucagacugagaaaugau

SEQ ID NO: 1076424 - RNA, 22 nt, Human
gagggcagugaauuuugaagcu

SEQ ID NO: 1076425 - RNA, 22 nt, Human
uggaaggcaugggaacuguucu

SEQ ID NO: 1076426 - RNA, 22 nt, Human
uuucuuguaagauguuuauuaa

SEQ ID NO: 1076427 - RNA, 20 nt, Human
acaauuuccucacuauaugc

SEQ ID NO: 1076428 - RNA, 22 nt, Human
auagcaaaggacaauagucagu

SEQ ID NO: 1076429 - RNA, 22 nt, Human
gaagagcugcucagaacaugau

SEQ ID NO: 1076430 - RNA, 22 nt, Human
aggucauuuuugccuucuauuu

SEQ ID NO: 1076431 - RNA, 22 nt, Human
auuuaaugucgagcuauuguag

SEQ ID NO: 1076432 - RNA, 22 nt, Human
agcagggcaugaauaaggguuu

SEQ ID NO: 1076433 - RNA, 22 nt, Human
aggaaaaaccuguuaaugguag

SEQ ID NO: 1076434 - RNA, 22 nt, Human
ucaauauucuucuuuaguagga

SEQ ID NO: 1076435 - RNA, 22 nt, Human
uaggccagaggagcagcuuugg

SEQ ID NO: 1076436 - RNA, 22 nt, Human
cuggccuuggaagggagcccgu

SEQ ID NO: 1076437 - RNA, 22 nt, Human
agggaggugguuccccagugga

SEQ ID NO: 1076438 - RNA, 22 nt, Human
acacaaugugcaggacaccugu

SEQ ID NO: 1076439 - RNA, 21 nt, Human
uaauacugaaagugacaucug

SEQ ID NO: 1076440 - RNA, 22 nt, Human
uagcagagcagggaucagagcc

SEQ ID NO: 1076441 - RNA, 22 nt, Human
uggaggaaguggcuggccagaa

SEQ ID NO: 1076442 - RNA, 22 nt, Human
acuggcuugaaguagauucaaa

SEQ ID NO: 1076443 - RNA, 22 nt, Human
agauacaacuguuuaaacauua

SEQ ID NO: 1076444 - RNA, 22 nt, Human
aucaauaucagaucagacagga

SEQ ID NO: 1076445 - RNA, 23 nt, Human
gaauacaaagcagaugguccagc

SEQ ID NO: 1076446 - RNA, 22 nt, Human
aagacaggaaaagcuccaggcc

SEQ ID NO: 1076447 - RNA, 22 nt, Human
gagcaggccagcaauggaaggg

SEQ ID NO: 1076448 - RNA, 16 nt, Human
ucuuaguuguguggua

SEQ ID NO: 1076449 - RNA, 22 nt, Human
cagaggacaauagaauggaaag

SEQ ID NO: 1076450 - RNA, 22 nt, Human
uaugcauaauuggauaaguaga

SEQ ID NO: 1076451 - RNA, 22 nt, Human
aagagcagauuccuaguggagc

SEQ ID NO: 1076452 - RNA, 22 nt, Human
aaaggccacugcaagggaaggu

SEQ ID NO: 1076453 - RNA, 22 nt, Human
ccugugcuucagcuggaggagg

SEQ ID NO: 1076454 - RNA, 22 nt, Human
ucacaaaagcuuuugaauuugg

SEQ ID NO: 1076455 - RNA, 22 nt, Human
guuccaaacaagucauaaagua

SEQ ID NO: 1076456 - RNA, 20 nt, Human
uuggaugugcauggccgugc

SEQ ID NO: 1076457 - RNA, 22 nt, Human
ugcauuuuuaacaaggcuaauu

SEQ ID NO: 1076458 - RNA, 22 nt, Human
ccugcagacacuuguccagcaa

SEQ ID NO: 1076459 - RNA, 22 nt, Human
caaauuuagguaacagucugua

SEQ ID NO: 1076460 - RNA, 22 nt, Human
uccugcaggccuguucccagua

SEQ ID NO: 1076461 - RNA, 22 nt, Human
aaugaagccagcugggaugcga

SEQ ID NO: 1076462 - RNA, 22 nt, Human
acacuuuacagaauguuuugau

SEQ ID NO: 1076463 - RNA, 22 nt, Human
cccaagcagggugcagaggcau

SEQ ID NO: 1076464 - RNA, 23 nt, Human
cacaccaggagccgucugggcca

SEQ ID NO: 1076465 - RNA, 22 nt, Human
aaagccaguucuuagagaaagc

SEQ ID NO: 1076466 - RNA, 22 nt, Human
cuggccugagcacagcggcugc

SEQ ID NO: 1076467 - RNA, 19 nt, Human
ccagcccacagugacuuuc

SEQ ID NO: 1076468 - RNA, 22 nt, Human
ccuucaaauucucuuagcugaa

SEQ ID NO: 1076469 - RNA, 19 nt, Human
ccuguucaugacucugucc

SEQ ID NO: 1076470 - RNA, 22 nt, Human
uuccaauugcagaucagauaca

SEQ ID NO: 1076471 - RNA, 22 nt, Human
ggaagggcaaaagagaugaacu

SEQ ID NO: 1076472 - RNA, 22 nt, Human
uaacaguuuugaguuuugcuuc

SEQ ID NO: 1076473 - RNA, 22 nt, Human
gagggucccgagcccugucaga

SEQ ID NO: 1076474 - RNA, 22 nt, Human
ucuggccaggauggcaagacca

SEQ ID NO: 1076475 - RNA, 22 nt, Human
gagccagcgccuugccucuggg

SEQ ID NO: 1076476 - RNA, 22 nt, Human
ucagcauuguggcagagaaugg

SEQ ID NO: 1076477 - RNA, 22 nt, Human
caggagugucuccacacagcaa

SEQ ID NO: 1076478 - RNA, 22 nt, Human
uccugggcuguggccccgggca

SEQ ID NO: 1076479 - RNA, 22 nt, Human
aaacuuuaaauuuguaccucug

SEQ ID NO: 1076480 - RNA, 22 nt, Human
gaagccagcaguggagaaagga

SEQ ID NO: 1076481 - RNA, 20 nt, Human
uaaaugcaucuguucaacug

SEQ ID NO: 1076482 - RNA, 22 nt, Human
ugaagagauuaaguugguuuug

SEQ ID NO: 1076483 - RNA, 22 nt, Human
gggcuccuccucugacuguggc

SEQ ID NO: 1076484 - RNA, 22 nt, Human
ugaggaagaacaagaauuuaga

SEQ ID NO: 1076485 - RNA, 22 nt, Human
gaucuugagcaaguuguguaac

SEQ ID NO: 1076486 - RNA, 22 nt, Human
accuuaaaacugacacauggag

SEQ ID NO: 1076487 - RNA, 22 nt, Human
uucucagagugaccaagucuuu

SEQ ID NO: 1076488 - RNA, 22 nt, Human
cucaaauauaagcuaaaugugg

SEQ ID NO: 1076489 - RNA, 22 nt, Human
cuucacagagucccugauuguu

SEQ ID NO: 1076490 - RNA, 18 nt, Human
uccagagguguuggagcc

SEQ ID NO: 1076491 - RNA, 22 nt, Human
aggagccagcguuccucaggau

SEQ ID NO: 1076492 - RNA, 22 nt, Human
uaacagaaauaguaggugaggg

SEQ ID NO: 1076493 - RNA, 22 nt, Human
ucagauggaggcaauguuaccu

SEQ ID NO: 1076494 - RNA, 22 nt, Human
uccugggaggcugugccuggcu

SEQ ID NO: 1076495 - RNA, 22 nt, Human
uaagacacaugcguacaagaua

SEQ ID NO: 1076496 - RNA, 19 nt, Human
gucucugcuccagggucuc

SEQ ID NO: 1076497 - RNA, 21 nt, Human
gccagagcaguacaaugaggu

SEQ ID NO: 1076498 - RNA, 22 nt, Human
cccugaccccacggcuggagaa

SEQ ID NO: 1076499 - RNA, 23 nt, Human
cccuguagcccaggacaggcuuu

SEQ ID NO: 1076500 - RNA, 22 nt, Human
aguggcaguuugggagcuacag

SEQ ID NO: 1076501 - RNA, 22 nt, Human
ucaggcucuacacuugacacac

SEQ ID NO: 1076502 - RNA, 22 nt, Human
acaggcacucucauuaaaauag

SEQ ID NO: 1076503 - RNA, 22 nt, Human
ggaggccauaguuugggaguca

SEQ ID NO: 1076504 - RNA, 22 nt, Human
uucacauaauccuccaguggca

SEQ ID NO: 1076505 - RNA, 22 nt, Human
aaucuagagacaauuugaauau

SEQ ID NO: 1076506 - RNA, 22 nt, Human
gggcugaaaggccgccucagau

SEQ ID NO: 1076507 - RNA, 22 nt, Human
ucaguggaguauggaugaaguc

SEQ ID NO: 1076508 - RNA, 22 nt, Human
aguguuuuauuucagcacuuug

SEQ ID NO: 1076509 - RNA, 22 nt, Human
agaugaagacucaggagcaggu

SEQ ID NO: 1076510 - RNA, 22 nt, Human
cucuucaguucaccccuaagca

SEQ ID NO: 1076511 - RNA, 22 nt, Human
uggaaaacauugagauaccaag

SEQ ID NO: 1076512 - RNA, 22 nt, Human
uuuacuuugugucaagucaaga

SEQ ID NO: 1076513 - RNA, 20 nt, Human
ggaaaaaugcaugcucaaga

SEQ ID NO: 1076514 - RNA, 22 nt, Human
gcaguaggagaagaggaugcuu

SEQ ID NO: 1076515 - RNA, 19 nt, Human
acagaagcauagaaaagga

SEQ ID NO: 1076516 - RNA, 18 nt, Human
aguuuuuaggaagaaaug

SEQ ID NO: 1076517 - RNA, 19 nt, Human
ucuaaacuagucccauaac

SEQ ID NO: 1076518 - RNA, 22 nt, Human
acagggcaaccucugggagacu

SEQ ID NO: 1076519 - RNA, 22 nt, Human
ggcccugcucaggcugcgauga

SEQ ID NO: 1076520 - RNA, 22 nt, Human
uauagagguggaaacugagguu

SEQ ID NO: 1076521 - RNA, 18 nt, Human
cauaauuuucuuucuuua

SEQ ID NO: 1076522 - RNA, 22 nt, Human
uaguggaggguguagcugcugg

SEQ ID NO: 1076523 - RNA, 22 nt, Human
cuuugcauacaauuuuuagaaa

SEQ ID NO: 1076524 - RNA, 22 nt, Human
aauaucuucuaaggauagaacu

SEQ ID NO: 1076525 - RNA, 22 nt, Human
gggcauggaggucugucugcag

SEQ ID NO: 1076526 - RNA, 22 nt, Human
acagugauuggcacugauucag

SEQ ID NO: 1076527 - RNA, 17 nt, Human
agguggguggaucaccu

SEQ ID NO: 1076528 - RNA, 22 nt, Human
caaugugguggcagaugucagu

SEQ ID NO: 1076529 - RNA, 22 nt, Human
uuacacaugcuuuguguguaug

SEQ ID NO: 1076530 - RNA, 22 nt, Human
cucugagcugaaacaugagcau

SEQ ID NO: 1076531 - RNA, 22 nt, Human
gaaggaaguuuauuuuagaaga

SEQ ID NO: 1076532 - RNA, 22 nt, Human
aagacagaccacgugacagggc

SEQ ID NO: 1076533 - RNA, 22 nt, Human
cgcauacauagaaacacacaga

SEQ ID NO: 1076534 - RNA, 22 nt, Human
cuacauuucccagcugccuucc

SEQ ID NO: 1076535 - RNA, 22 nt, Human
uccagccaagggagguuacuag

SEQ ID NO: 1076536 - RNA, 22 nt, Human
agggaucaaaaaauguacaugc

SEQ ID NO: 1076537 - RNA, 22 nt, Human
gaaaagcuaggccaguucagcu

SEQ ID NO: 1076538 - RNA, 22 nt, Human
cugugcuugcggguguggagcc

SEQ ID NO: 1076539 - RNA, 22 nt, Human
ucagaaaggccacauggugcag

SEQ ID NO: 1076540 - RNA, 22 nt, Human
ccugggcaacauagugagaccu

SEQ ID NO: 1076541 - RNA, 22 nt, Human
aacaugugucuugcauuucuug

SEQ ID NO: 1076542 - RNA, 22 nt, Human
ugaagcuugagugucaguuccu

SEQ ID NO: 1076543 - RNA, 23 nt, Human
uaaauuucuugauucuuauguga

SEQ ID NO: 1076544 - RNA, 23 nt, Human
auggaaauagcaugugucauuua

SEQ ID NO: 1076545 - RNA, 22 nt, Human
gguggcucaaagagagcacaga

SEQ ID NO: 1076546 - RNA, 22 nt, Human
ugcugcuccccagcacacagca

SEQ ID NO: 1076547 - RNA, 22 nt, Human
ugggcucaugcuggagaugaga

SEQ ID NO: 1076548 - RNA, 20 nt, Human
caggaugauuggacacgaug

SEQ ID NO: 1076549 - RNA, 22 nt, Human
gcuggggagcaagaguagugag

SEQ ID NO: 1076550 - RNA, 22 nt, Human
gccagcucagaugcaggaagga

SEQ ID NO: 1076551 - RNA, 22 nt, Human
acauuuauuuuggcacggcaca

SEQ ID NO: 1076552 - RNA, 22 nt, Human
uggcagaguaggauggcccugu

SEQ ID NO: 1076553 - RNA, 18 nt, Human
uucacaggaaaugucuuu

SEQ ID NO: 1076554 - RNA, 22 nt, Human
gaauuagguaauagaacuagua

SEQ ID NO: 1076555 - RNA, 22 nt, Human
guuucacacauccugcacauag

SEQ ID NO: 1076556 - RNA, 22 nt, Human
uucaguaucugcaaaaugggga

SEQ ID NO: 1076557 - RNA, 22 nt, Human
aggcagcaaugaaugaaaugga

SEQ ID NO: 1076558 - RNA, 22 nt, Human
cucaggauauugggcuggagca

SEQ ID NO: 1076559 - RNA, 22 nt, Human
acuuuucugcagaugaucucuu

SEQ ID NO: 1076560 - RNA, 22 nt, Human
cugccuggaaggagcaagggga

SEQ ID NO: 1076561 - RNA, 22 nt, Human
uccaaacgggagccaaaugagc

SEQ ID NO: 1076562 - RNA, 22 nt, Human
cagcuccugcagcuggcuccca

SEQ ID NO: 1076563 - RNA, 22 nt, Human
ccugucugcaagggguggaucc

SEQ ID NO: 1076564 - RNA, 22 nt, Human
ccuggagcacagcccaguccca

SEQ ID NO: 1076565 - RNA, 22 nt, Human
caggaaacauucccauaacaca

SEQ ID NO: 1076566 - RNA, 21 nt, Human
ugggcacugagggugcugcuc

SEQ ID NO: 1076567 - RNA, 22 nt, Human
acugccuguagcucuucaucuc

SEQ ID NO: 1076568 - RNA, 22 nt, Human
uguccucagauaugucuacucu

SEQ ID NO: 1076569 - RNA, 22 nt, Human
ccuccaggauaagucagggccu

SEQ ID NO: 1076570 - RNA, 22 nt, Human
caaagcagccugcaguguggac

SEQ ID NO: 1076571 - RNA, 22 nt, Human
caucacagguccugaugacauu

SEQ ID NO: 1076572 - RNA, 22 nt, Human
ugccugggaaccaauccuggcu

SEQ ID NO: 1076573 - RNA, 22 nt, Human
aucuggcucauucagggaacgg

SEQ ID NO: 1076574 - RNA, 22 nt, Human
uagaaaagauaacauucugugc

SEQ ID NO: 1076575 - RNA, 22 nt, Human
ccuggccagccagggcuggggu

SEQ ID NO: 1076576 - RNA, 22 nt, Human
uggccaggcuggucuggaacgc

SEQ ID NO: 1076577 - RNA, 22 nt, Human
uggaaaaugugacuauucuaaa

SEQ ID NO: 1076578 - RNA, 22 nt, Human
aguggcugcuggaguggagaug

SEQ ID NO: 1076579 - RNA, 22 nt, Human
cugcccugggugcuggggaucc

SEQ ID NO: 1076580 - RNA, 22 nt, Human
acaauauuguacccagaaguuu

SEQ ID NO: 1076581 - RNA, 22 nt, Human
gcacagaagagcuuuggaauga

SEQ ID NO: 1076582 - RNA, 22 nt, Human
uccugaggaaaguucaugaaug

SEQ ID NO: 1076583 - RNA, 20 nt, Human
cugcccugcccuggguccug

SEQ ID NO: 1076584 - RNA, 22 nt, Human
ggcucuugggagcucagaguug

SEQ ID NO: 1076585 - RNA, 23 nt, Human
acaggcucuuaaucagugcuccu

SEQ ID NO: 1076586 - RNA, 22 nt, Human
ugggacagguuggagagaagca

SEQ ID NO: 1076587 - RNA, 22 nt, Human
agcugccuccauggucaaagau

SEQ ID NO: 1076588 - RNA, 22 nt, Human
ucacacagugguaaaacccuga

SEQ ID NO: 1076589 - RNA, 22 nt, Human
agggcugcugaggaagccuugc

SEQ ID NO: 1076590 - RNA, 22 nt, Human
gccaagcuguuuuucagagacg

SEQ ID NO: 1076591 - RNA, 22 nt, Human
uaaguuagcaaggccaagguaa

SEQ ID NO: 1076592 - RNA, 22 nt, Human
ugaggcucacaaaucugcauuu

SEQ ID NO: 1076593 - RNA, 19 nt, Human
acacauuugcacaauccac

SEQ ID NO: 1076594 - RNA, 22 nt, Human
ggcugagcucaggggcagcagg

SEQ ID NO: 1076595 - RNA, 22 nt, Human
caagaaauuucuuaagaacuaa

SEQ ID NO: 1076596 - RNA, 19 nt, Human
uuagccauccacagugaaa

SEQ ID NO: 1076597 - RNA, 22 nt, Human
cuccauugaacauccucucaga

SEQ ID NO: 1076598 - RNA, 22 nt, Human
guuucuuuugugaucaccaacc

SEQ ID NO: 1076599 - RNA, 18 nt, Human
ccugagcccugcuuacuu

SEQ ID NO: 1076600 - RNA, 22 nt, Human
gaucauuuacuuguucuggacu

SEQ ID NO: 1076601 - RNA, 22 nt, Human
cugugggcugaaagugcucccg

SEQ ID NO: 1076602 - RNA, 22 nt, Human
aaauuauugggucccaccccag

SEQ ID NO: 1076603 - RNA, 20 nt, Human
aguuauaguaucuagccaug

SEQ ID NO: 1076604 - RNA, 22 nt, Human
ugguccugucucaaggagccuu

SEQ ID NO: 1076605 - RNA, 22 nt, Human
ccaggugugccagcagggacug

SEQ ID NO: 1076606 - RNA, 22 nt, Human
uugcuaaauguguuauaucugu

SEQ ID NO: 1076607 - RNA, 22 nt, Human
aggagucauaaaugugaacaaa

SEQ ID NO: 1076608 - RNA, 22 nt, Human
uccaggaaugugugugggcuag

SEQ ID NO: 1076609 - RNA, 22 nt, Human
agcagggccaacaguaaacacc

SEQ ID NO: 1076610 - RNA, 22 nt, Human
ccacagggaacaugacagccuu

SEQ ID NO: 1076611 - RNA, 17 nt, Human
gcagccagugcagcagg

SEQ ID NO: 1076612 - RNA, 22 nt, Human
acacugaauauacaaugaauau

SEQ ID NO: 1076613 - RNA, 22 nt, Human
gcuagaggcaacaacuuuauag

SEQ ID NO: 1076614 - RNA, 22 nt, Human
uuugcauaagucauguccagug

SEQ ID NO: 1076615 - RNA, 22 nt, Human
aucagcaagauguaauuucuau

SEQ ID NO: 1076616 - RNA, 22 nt, Human
aggagccaagauggggcaagua

SEQ ID NO: 1076617 - RNA, 22 nt, Human
ggcugcagcagagggacucacg

SEQ ID NO: 1076618 - RNA, 22 nt, Human
aggagccccucuucaguccugg

SEQ ID NO: 1076619 - RNA, 22 nt, Human
gugggcuggacccuccugcucc

SEQ ID NO: 1076620 - RNA, 22 nt, Human
acagauuuuugguaaauaauuu

SEQ ID NO: 1076621 - RNA, 22 nt, Human
gcuaggaggaagaaugugaauu

SEQ ID NO: 1076622 - RNA, 22 nt, Human
caggcccaggccagugguuccc

SEQ ID NO: 1076623 - RNA, 22 nt, Human
ugugggcacuaaugacaugcag

SEQ ID NO: 1076624 - RNA, 22 nt, Human
gcaggcagaucaccugucagga

SEQ ID NO: 1076625 - RNA, 22 nt, Human
aauauguucaaaauagaucacu

SEQ ID NO: 1076626 - RNA, 18 nt, Human
uggagcagguaggcauga

SEQ ID NO: 1076627 - RNA, 22 nt, Human
ucucuucuaauuaggguccaug

SEQ ID NO: 1076628 - RNA, 22 nt, Human
cuguggcauugugaggacugca

SEQ ID NO: 1076629 - RNA, 22 nt, Human
uuucuaaggcuaggucuuaagg

SEQ ID NO: 1076630 - RNA, 22 nt, Human
agcagguguaucggucaccuac

SEQ ID NO: 1076631 - RNA, 22 nt, Human
gcuuccugagaaacaaucugau

SEQ ID NO: 1076632 - RNA, 22 nt, Human
aaagcagaggugauaugacuua

SEQ ID NO: 1076633 - RNA, 22 nt, Human
uaaaggaagaauucucugugau

SEQ ID NO: 1076634 - RNA, 22 nt, Human
agcccaggagguggagguugca

SEQ ID NO: 1076635 - RNA, 22 nt, Human
augggcugaaagaguaagcugu

SEQ ID NO: 1076636 - RNA, 22 nt, Human
aaguggacuaauacaaggacua

SEQ ID NO: 1076637 - RNA, 20 nt, Human
aguaggggaaugcaagagca

SEQ ID NO: 1076638 - RNA, 22 nt, Human
ucccagaguuuccuguguccca

SEQ ID NO: 1076639 - RNA, 22 nt, Human
uccugccuugccugggacauca

SEQ ID NO: 1076640 - RNA, 22 nt, Human
uaagcugugggagauuggcaua

SEQ ID NO: 1076641 - RNA, 22 nt, Human
ugucaccucuuuggcugcagcu

SEQ ID NO: 1076642 - RNA, 22 nt, Human
uaaaggcaugcaggugaaugua

SEQ ID NO: 1076643 - RNA, 22 nt, Human
aggaacacuuaauucgauacua

SEQ ID NO: 1076644 - RNA, 22 nt, Human
uaguuuuauaauguuaacaucu

SEQ ID NO: 1076645 - RNA, 22 nt, Human
uacaugaaguugucuaaacugg

SEQ ID NO: 1076646 - RNA, 22 nt, Human
aggagcagcuucugaaccaugu

SEQ ID NO: 1076647 - RNA, 22 nt, Human
caaggccauauugccuguaugu

SEQ ID NO: 1076648 - RNA, 22 nt, Human
uaugagaaaggagaaugacuuu

SEQ ID NO: 1076649 - RNA, 22 nt, Human
agcccagaaaugaaaggaugau

SEQ ID NO: 1076650 - RNA, 22 nt, Human
ucugggcccuaaaccagcucua

SEQ ID NO: 1076651 - RNA, 22 nt, Human
uucacauuaagccuccuccuac

SEQ ID NO: 1076652 - RNA, 22 nt, Human
aggcaguuuaggcagcgauuua

SEQ ID NO: 1076653 - RNA, 22 nt, Human
ugcccugcugugccuggagcca

SEQ ID NO: 1076654 - RNA, 22 nt, Human
augacagaggagugcaggugau

SEQ ID NO: 1076655 - RNA, 22 nt, Human
ggagagagagauuguguuuauu

SEQ ID NO: 1076656 - RNA, 22 nt, Human
guggggggacguuggucacuuu

SEQ ID NO: 1076657 - RNA, 22 nt, Human
cacacaucaaccuagacauugu

SEQ ID NO: 1076658 - RNA, 19 nt, Human
ccacagagcaugcugaggc

SEQ ID NO: 1076659 - RNA, 22 nt, Human
auaaagcaaauaggacuauugc

SEQ ID NO: 1076660 - RNA, 22 nt, Human
caagcuggcugggagaggcacg

SEQ ID NO: 1076661 - RNA, 22 nt, Human
aaggcacuacgcugcuggggcg

SEQ ID NO: 1076662 - RNA, 22 nt, Human
uaaguucaguuggucgaaguag

SEQ ID NO: 1076663 - RNA, 22 nt, Human
ggggaggcugaugugggcaaag

SEQ ID NO: 1076664 - RNA, 22 nt, Human
gaggcagcagaacauggaagag

SEQ ID NO: 1076665 - RNA, 22 nt, Human
aucuucaaagaauuucuugucc

SEQ ID NO: 1076666 - RNA, 22 nt, Human
gcccucccuacagccuauuucu

SEQ ID NO: 1076667 - RNA, 22 nt, Human
uccuggcucugcugccuccuag

SEQ ID NO: 1076668 - RNA, 22 nt, Human
aaaugcuuauuagugucacaaa

SEQ ID NO: 1076669 - RNA, 22 nt, Human
cccucaguuuuccagugugggc

SEQ ID NO: 1076670 - RNA, 22 nt, Human
gaugugagugguagcugggauu

SEQ ID NO: 1076671 - RNA, 22 nt, Human
cacccaggcagguggcugagaa

SEQ ID NO: 1076672 - RNA, 22 nt, Human
aaaagagcaaacauguaauagu

SEQ ID NO: 1076673 - RNA, 22 nt, Human
ugccuuggugcuucuucaugug

SEQ ID NO: 1076674 - RNA, 22 nt, Human
acagguggcagaagcauuuacu

SEQ ID NO: 1076675 - RNA, 22 nt, Human
cagggccucucaucccacgggc

SEQ ID NO: 1076676 - RNA, 22 nt, Human
agcccugcaggaugagggaggu

SEQ ID NO: 1076677 - RNA, 22 nt, Human
ggugggaaauaauuaggauuau

SEQ ID NO: 1076678 - RNA, 22 nt, Human
gccuggcucugagggagcuccu

SEQ ID NO: 1076679 - RNA, 22 nt, Human
uaggugggugacuuccaugggg

SEQ ID NO: 1076680 - RNA, 22 nt, Human
auuucaucccaggcucuggaag

SEQ ID NO: 1076681 - RNA, 22 nt, Human
acaaaguccugguguauggcca

SEQ ID NO: 1076682 - RNA, 22 nt, Human
gccagagcugagugagguucuu

SEQ ID NO: 1076683 - RNA, 22 nt, Human
caggcagccaggggaccugucc

SEQ ID NO: 1076684 - RNA, 22 nt, Human
gucauucuccaagaacccgcug

SEQ ID NO: 1076685 - RNA, 22 nt, Human
gucuugaucuccugaccuugug

SEQ ID NO: 1076686 - RNA, 22 nt, Human
uagaaucugaauauucuuauuu

SEQ ID NO: 1076687 - RNA, 22 nt, Human
aauguuacgaucaacaacacau

SEQ ID NO: 1076688 - RNA, 22 nt, Human
ucuuugaauuucugacugucuu

SEQ ID NO: 1076689 - RNA, 22 nt, Human
ggcagggucuggacugaaagcu

SEQ ID NO: 1076690 - RNA, 22 nt, Human
gaggccuggguuggaggugcau

SEQ ID NO: 1076691 - RNA, 22 nt, Human
uacagauacagaucuagauaca

SEQ ID NO: 1076692 - RNA, 22 nt, Human
gcacccaggccggcgacugcag

SEQ ID NO: 1076693 - RNA, 22 nt, Human
acacacuguaaggacuaucacu

SEQ ID NO: 1076694 - RNA, 22 nt, Human
gcugucuguucgagcguguguu

SEQ ID NO: 1076695 - RNA, 22 nt, Human
aggcucagggacggggccccuu

SEQ ID NO: 1076696 - RNA, 22 nt, Human
gacaggggucccucugggcugu

SEQ ID NO: 1076697 - RNA, 22 nt, Human
cuccuuccccuacucagcaucc

SEQ ID NO: 1076698 - RNA, 22 nt, Human
gacuguguccaugugcuggauu

SEQ ID NO: 1076699 - RNA, 22 nt, Human
agcugggagcagagccacagcc

SEQ ID NO: 1076700 - RNA, 22 nt, Human
gcacccagaggucagcagugcu

SEQ ID NO: 1076701 - RNA, 22 nt, Human
uauacucugagaaacgugucac

SEQ ID NO: 1076702 - RNA, 22 nt, Human
guauaucaggcagaauguucuc

SEQ ID NO: 1076703 - RNA, 22 nt, Human
uugaauaguguuuucaguauac

SEQ ID NO: 1076704 - RNA, 21 nt, Human
uuucccagcugaaaauaaaug

SEQ ID NO: 1076705 - RNA, 22 nt, Human
aaucuaacuucauagcugauuu

SEQ ID NO: 1076706 - RNA, 23 nt, Human
agucuuaauacagcucuuuucua

SEQ ID NO: 1076707 - RNA, 22 nt, Human
uugaaacugggaagcagggggu

SEQ ID NO: 1076708 - RNA, 22 nt, Human
uguucauucgcuauugucuaug

SEQ ID NO: 1076709 - RNA, 22 nt, Human
uagauuucgcugcaucucaauc

SEQ ID NO: 1076710 - RNA, 21 nt, Human
uggcucuggguaggagagugc

SEQ ID NO: 1076711 - RNA, 22 nt, Human
gcagggcuaauggggcaaguag

SEQ ID NO: 1076712 - RNA, 22 nt, Human
ggcucugggucuguggggagcg

SEQ ID NO: 1076713 - RNA, 22 nt, Human
ggccagggccaaggcuuuccca

SEQ ID NO: 1076714 - RNA, 22 nt, Human
acugggccaggugugggugagu

SEQ ID NO: 1076715 - RNA, 22 nt, Human
ucagacccaggugccaagcugu

SEQ ID NO: 1076716 - RNA, 22 nt, Human
ccaggcccuugcaagucccacc

SEQ ID NO: 1076717 - RNA, 22 nt, Human
cccaggagagaggccaguuggc

SEQ ID NO: 1076718 - RNA, 22 nt, Human
aucagaaugcagccagcaguua

SEQ ID NO: 1076719 - RNA, 22 nt, Human
aagaguuucuuuauuaaccuuu

SEQ ID NO: 1076720 - RNA, 22 nt, Human
uucuguauuuaguuugaggaca

SEQ ID NO: 1076721 - RNA, 22 nt, Human
ugccugaggagucagggcaggu

SEQ ID NO: 1076722 - RNA, 22 nt, Human
cuuuucuuguauuggaugcccc

SEQ ID NO: 1076723 - RNA, 22 nt, Human
ucacagaagaugcuggauguug

SEQ ID NO: 1076724 - RNA, 19 nt, Human
uccaggccauucccagagc

SEQ ID NO: 1076725 - RNA, 19 nt, Human
uucauuuguaucugcucac

SEQ ID NO: 1076726 - RNA, 22 nt, Human
aaagaacuuauccuagaauuug

SEQ ID NO: 1076727 - RNA, 22 nt, Human
uguuuaagcugaugagguaucg

SEQ ID NO: 1076728 - RNA, 22 nt, Human
caaauacaaauacgggcagcuu

SEQ ID NO: 1076729 - RNA, 22 nt, Human
cuuuggaauauuuuauugagaa

SEQ ID NO: 1076730 - RNA, 22 nt, Human
ugccugugucacagugauguuu

SEQ ID NO: 1076731 - RNA, 22 nt, Human
caguucuuuguggggaguucuc

SEQ ID NO: 1076732 - RNA, 22 nt, Human
uggaaguggcagaaaaugaaca

SEQ ID NO: 1076733 - RNA, 22 nt, Human
cucucuucccgugaguguugca

SEQ ID NO: 1076734 - RNA, 22 nt, Human
augaaacuaaacuacauaaguu

SEQ ID NO: 1076735 - RNA, 22 nt, Human
ccucagggccaucucugucccu

SEQ ID NO: 1076736 - RNA, 22 nt, Human
uggcugcagaucaagggcaggc

SEQ ID NO: 1076737 - RNA, 22 nt, Human
gcuucugguagaauucaauaga

SEQ ID NO: 1076738 - RNA, 22 nt, Human
gggaggcuggcucuggccacag

SEQ ID NO: 1076739 - RNA, 22 nt, Human
gcccagcuccucugcagacccu

SEQ ID NO: 1076740 - RNA, 23 nt, Human
cccagcgcugagcccugcaggca

SEQ ID NO: 1076741 - RNA, 22 nt, Human
gcagagcugggucuguauccaa

SEQ ID NO: 1076742 - RNA, 22 nt, Human
gaguucuguagggugaaauagu

SEQ ID NO: 1076743 - RNA, 22 nt, Human
agcagccacagucugggacagg

SEQ ID NO: 1076744 - RNA, 22 nt, Human
caugaaaauaacauuguuguga

SEQ ID NO: 1076745 - RNA, 22 nt, Human
cugagacccagacaccugagga

SEQ ID NO: 1076746 - RNA, 22 nt, Human
ucauucauaucucucaagcuua

SEQ ID NO: 1076747 - RNA, 22 nt, Human
agaaaguucugugaguuguuca

SEQ ID NO: 1076748 - RNA, 22 nt, Human
gggcagcaugucacuagcaugg

SEQ ID NO: 1076749 - RNA, 22 nt, Human
uauauuaaaugaccaguuuuaa

SEQ ID NO: 1076750 - RNA, 22 nt, Human
uuagagucaagcugcauguucu

SEQ ID NO: 1076751 - RNA, 22 nt, Human
aaugagaaccuugaaaggaacu

SEQ ID NO: 1076752 - RNA, 21 nt, Human
gcccccuggacuccucaucca

SEQ ID NO: 1076753 - RNA, 22 nt, Human
gaguccagacaccauaccugau

SEQ ID NO: 1076754 - RNA, 22 nt, Human
aauggccagcaacaggagugaa

SEQ ID NO: 1076755 - RNA, 22 nt, Human
uacugugaauacaaaauaaauu

SEQ ID NO: 1076756 - RNA, 22 nt, Human
cuauuauuuccucaucuauaaa

SEQ ID NO: 1076757 - RNA, 22 nt, Human
aacauauaaacucuuaaguuca

SEQ ID NO: 1076758 - RNA, 22 nt, Human
agaugcugucacacacacuguu

SEQ ID NO: 1076759 - RNA, 22 nt, Human
ucacacagcugacagagccuuu

SEQ ID NO: 1076760 - RNA, 19 nt, Human
ucugaaguccagggcauac

SEQ ID NO: 1076761 - RNA, 22 nt, Human
gggcccuggauuuaagcaugga

SEQ ID NO: 1076762 - RNA, 22 nt, Human
agguggcugagcugugccccug

SEQ ID NO: 1076763 - RNA, 22 nt, Human
ucaauucugguccucaggaacu

SEQ ID NO: 1076764 - RNA, 23 nt, Human
uggcagugaucaaaagcuuacau

SEQ ID NO: 1076765 - RNA, 22 nt, Human
aauuaacuaaaauucacuuuau

SEQ ID NO: 1076766 - RNA, 22 nt, Human
aggccaaagcacagagcuggaa

SEQ ID NO: 1076767 - RNA, 22 nt, Human
uggcagcugauuagauggugcc

SEQ ID NO: 1076768 - RNA, 19 nt, Human
cauauuuuugggcuggcau

SEQ ID NO: 1076769 - RNA, 22 nt, Human
cagcagugucuccagcaucaca

SEQ ID NO: 1076770 - RNA, 22 nt, Human
uugcccugcggguccugcgcaa

SEQ ID NO: 1076771 - RNA, 22 nt, Human
ucuggcucccuggagcuccaca

SEQ ID NO: 1076772 - RNA, 22 nt, Human
agaauucuccuucagggcagga

SEQ ID NO: 1076773 - RNA, 22 nt, Human
acaauagaaggaaacugacaua

SEQ ID NO: 1076774 - RNA, 19 nt, Human
agccaggguccagacaugu

SEQ ID NO: 1076775 - RNA, 17 nt, Human
ucauuucaguaaaucca

SEQ ID NO: 1076776 - RNA, 22 nt, Human
gagcagugaagacagaaguaca

SEQ ID NO: 1076777 - RNA, 22 nt, Human
ggggugggcgugcagggacacc

SEQ ID NO: 1076778 - RNA, 22 nt, Human
agaugaaagauuuuuauagaga

SEQ ID NO: 1076779 - RNA, 22 nt, Human
ccagagugacgugaagugugaa

SEQ ID NO: 1076780 - RNA, 22 nt, Human
gugccuggcaugcgccggugcu

SEQ ID NO: 1076781 - RNA, 22 nt, Human
caggaguccagagugucauuuu

SEQ ID NO: 1076782 - RNA, 22 nt, Human
ugggauggcauccugggccuug

SEQ ID NO: 1076783 - RNA, 22 nt, Human
cuggagagggagcccuggcagu

SEQ ID NO: 1076784 - RNA, 23 nt, Human
ccuggcuguggauuugggccugc

SEQ ID NO: 1076785 - RNA, 22 nt, Human
cagaggaggccaccgcauaggc

SEQ ID NO: 1076786 - RNA, 22 nt, Human
aguaaaucagaccucauuaugu

SEQ ID NO: 1076787 - RNA, 20 nt, Human
caucagaaauccugacccac

SEQ ID NO: 1076788 - RNA, 23 nt, Human
cuuuccuuucuuugacacccagc

SEQ ID NO: 1076789 - RNA, 20 nt, Human
aagagcauaguacaggaaga

SEQ ID NO: 1076790 - RNA, 22 nt, Human
ucagagaugcagugccaccuac

SEQ ID NO: 1076791 - RNA, 22 nt, Human
gaaaaucugcuuauauuauuuu

SEQ ID NO: 1076792 - RNA, 22 nt, Human
aaguuuuauuggaacauagcca

SEQ ID NO: 1076793 - RNA, 22 nt, Human
agggcccuccccgcucagggca

SEQ ID NO: 1076794 - RNA, 22 nt, Human
gcacagagggcagugagccucu

SEQ ID NO: 1076795 - RNA, 22 nt, Human
uggcucaguuucugcccagcug

SEQ ID NO: 1076796 - RNA, 22 nt, Human
ggagcugcauuuagggagccuu

SEQ ID NO: 1076797 - RNA, 22 nt, Human
cauaucauaggucuuggauaau

SEQ ID NO: 1076798 - RNA, 23 nt, Human
uauugcacacauagaaacauaga

SEQ ID NO: 1076799 - RNA, 22 nt, Human
aagcugaaucugaaauagaauu

SEQ ID NO: 1076800 - RNA, 22 nt, Human
ucacaucucccuggaggacaca

SEQ ID NO: 1076801 - RNA, 22 nt, Human
agccagcagggcuuagaggaca

SEQ ID NO: 1076802 - RNA, 22 nt, Human
cugucucagcaggaagucauca

SEQ ID NO: 1076803 - RNA, 22 nt, Human
uauuuggagccuauccauagau

SEQ ID NO: 1076804 - RNA, 21 nt, Human
accucaagcaacaaccaaggu

SEQ ID NO: 1076805 - RNA, 22 nt, Human
ucauuuauuuauaccauugccu

SEQ ID NO: 1076806 - RNA, 22 nt, Human
ggcugagcuuuucaugaugguu

SEQ ID NO: 1076807 - RNA, 22 nt, Human
agcacuagagccaaaauuuggg

SEQ ID NO: 1076808 - RNA, 22 nt, Human
uuaaguaagaccuuaugucuug

SEQ ID NO: 1076809 - RNA, 22 nt, Human
ccuaagaucugguaugugacag

SEQ ID NO: 1076810 - RNA, 22 nt, Human
gcuuuacauaaacauuuauuau

SEQ ID NO: 1076811 - RNA, 22 nt, Human
aucuacagcugucugcacagua

SEQ ID NO: 1076812 - RNA, 22 nt, Human
acaggcucuggggcaggauggc

SEQ ID NO: 1076813 - RNA, 17 nt, Human
gccucugcuugugucau

SEQ ID NO: 1076814 - RNA, 22 nt, Human
aggccugggucucgugccuacc

SEQ ID NO: 1076815 - RNA, 22 nt, Human
cauaaaauggcuuguucuuuaa

SEQ ID NO: 1076816 - RNA, 23 nt, Human
agggcccaagccuggacagcagg

SEQ ID NO: 1076817 - RNA, 19 nt, Human
aggucauugauagugcagg

SEQ ID NO: 1076818 - RNA, 22 nt, Human
cugagucucccggcaguggagg

SEQ ID NO: 1076819 - RNA, 22 nt, Human
gcuuuggagccuguguucugcc

SEQ ID NO: 1076820 - RNA, 22 nt, Human
agcacuuaugugauuaggacag

SEQ ID NO: 1076821 - RNA, 22 nt, Human
cugaaaauguuacacaggaaga

SEQ ID NO: 1076822 - RNA, 20 nt, Human
agucucuguagugccugaga

SEQ ID NO: 1076823 - RNA, 22 nt, Human
ggagcagagcauuucacagccu

SEQ ID NO: 1076824 - RNA, 22 nt, Human
ucuuuccucugagcuccuguag

SEQ ID NO: 1076825 - RNA, 19 nt, Human
uugaauaugcaaacugaag

SEQ ID NO: 1076826 - RNA, 22 nt, Human
aacaagaacaccuacaguucua

SEQ ID NO: 1076827 - RNA, 22 nt, Human
gugccucagcaccgccugcagc

SEQ ID NO: 1076828 - RNA, 22 nt, Human
ucauuuucaaguuugaacagga

SEQ ID NO: 1076829 - RNA, 22 nt, Human
agaugagggguagaaaggacuu

SEQ ID NO: 1076830 - RNA, 22 nt, Human
ugccaaggagcuggaucagggc

SEQ ID NO: 1076831 - RNA, 22 nt, Human
gucccagaaacauauugcuggu

SEQ ID NO: 1076832 - RNA, 22 nt, Human
ugccugucuuaauaucuggaaa

SEQ ID NO: 1076833 - RNA, 20 nt, Human
agggcagagggauuacaggc

SEQ ID NO: 1076834 - RNA, 22 nt, Human
uggcugagaaaaaagagcuaua

SEQ ID NO: 1076835 - RNA, 18 nt, Human
gcuuccugaaagcugccc

SEQ ID NO: 1076836 - RNA, 22 nt, Human
gucccaggugggcuccaccucu

SEQ ID NO: 1076837 - RNA, 22 nt, Human
gagaaaugcaugcaugucauca

SEQ ID NO: 1076838 - RNA, 22 nt, Human
ucacaaagggagggauagcugg

SEQ ID NO: 1076839 - RNA, 22 nt, Human
agcagggcaguuaaaggguccu

SEQ ID NO: 1076840 - RNA, 22 nt, Human
uggugcaagucucugaggaggg

SEQ ID NO: 1076841 - RNA, 21 nt, Human
acagagccgggcacaaagcug

SEQ ID NO: 1076842 - RNA, 22 nt, Human
uuggcaguagucucggcuaccc

SEQ ID NO: 1076843 - RNA, 22 nt, Human
uguguucagcaggcaccuucuu

SEQ ID NO: 1076844 - RNA, 22 nt, Human
aaaagagaauccuguacagaga

SEQ ID NO: 1076845 - RNA, 22 nt, Human
gcugcccugucugcagcaggac

SEQ ID NO: 1076846 - RNA, 22 nt, Human
aggcuuccucgugccuuagaua

SEQ ID NO: 1076847 - RNA, 22 nt, Human
uggccugcagaggcuguggggc

SEQ ID NO: 1076848 - RNA, 19 nt, Human
uugagaaaugggaaaagca

SEQ ID NO: 1076849 - RNA, 22 nt, Human
gaugcugcucgggugccuggga

SEQ ID NO: 1076850 - RNA, 22 nt, Human
caagcucugggauagcagagag

SEQ ID NO: 1076851 - RNA, 22 nt, Human
ccaaagugcugagauuacaggu

SEQ ID NO: 1076852 - RNA, 22 nt, Human
gaggaggguuggccuuagguag

SEQ ID NO: 1076853 - RNA, 22 nt, Human
uacuugcuggguguaauuuucu

SEQ ID NO: 1076854 - RNA, 22 nt, Human
ccugcuggacguggaggagggg

SEQ ID NO: 1076855 - RNA, 21 nt, Human
ucugucucuccacugcccugc

SEQ ID NO: 1076856 - RNA, 22 nt, Human
agauggggcucaguguggaggc

SEQ ID NO: 1076857 - RNA, 20 nt, Human
ccagcugagccaaggggaga

SEQ ID NO: 1076858 - RNA, 22 nt, Human
caugaaauguguuaaucucuug

SEQ ID NO: 1076859 - RNA, 22 nt, Human
cugccuggaugaauggcgccuu

SEQ ID NO: 1076860 - RNA, 22 nt, Human
uacaacauaacgggcauucagu

SEQ ID NO: 1076861 - RNA, 22 nt, Human
cugcuuccaugcaauggcaguc

SEQ ID NO: 1076862 - RNA, 22 nt, Human
gaacagguaaucaguaaaaugu

SEQ ID NO: 1076863 - RNA, 22 nt, Human
gaaggaaaaauacucuguaagg

SEQ ID NO: 1076864 - RNA, 22 nt, Human
caugggcugugaacccaggcug

SEQ ID NO: 1076865 - RNA, 18 nt, Human
cguuuuuccgggauugca

SEQ ID NO: 1076866 - RNA, 22 nt, Human
acaggcagcgucauugcugcuc

SEQ ID NO: 1076867 - RNA, 22 nt, Human
agacacagugaguuucuuuccc

SEQ ID NO: 1076868 - RNA, 22 nt, Human
uacauugacuuggauuguuaga

SEQ ID NO: 1076869 - RNA, 22 nt, Human
cucaaauauguggucagaaagc

SEQ ID NO: 1076870 - RNA, 17 nt, Human
cugagcauccgugcucu

SEQ ID NO: 1076871 - RNA, 22 nt, Human
caauagaaaacucaauacuuaa

SEQ ID NO: 1076872 - RNA, 22 nt, Human
gaucuuuacuacugccuucucu

SEQ ID NO: 1076873 - RNA, 22 nt, Human
uuauuaugugcuagagaaugua

SEQ ID NO: 1076874 - RNA, 18 nt, Human
gucauugcaacauacugu

SEQ ID NO: 1076875 - RNA, 22 nt, Human
caggcugcagugcaguggcuau

SEQ ID NO: 1076876 - RNA, 22 nt, Human
auuucacagcgugguugacugc

SEQ ID NO: 1076877 - RNA, 22 nt, Human
gaacaaauucucaucaacuugu

SEQ ID NO: 1076878 - RNA, 22 nt, Human
aaggcagcucagcucauggcag

SEQ ID NO: 1076879 - RNA, 17 nt, Human
acaacagaaauguauuc

SEQ ID NO: 1076880 - RNA, 22 nt, Human
ccugggaagcccauagcagcuu

SEQ ID NO: 1076881 - RNA, 22 nt, Human
uggcccagugcuuaugcucuga

SEQ ID NO: 1076882 - RNA, 22 nt, Human
aguuuccaaaaggagacaggga

SEQ ID NO: 1076883 - RNA, 22 nt, Human
uuucugaagauacagcuuugcu

SEQ ID NO: 1076884 - RNA, 18 nt, Human
caggugggucuccugccc

SEQ ID NO: 1076885 - RNA, 22 nt, Human
auucugauaucuuauucuagcu

SEQ ID NO: 1076886 - RNA, 22 nt, Human
aggugaguuacaggaggagguc

SEQ ID NO: 1076887 - RNA, 22 nt, Human
gcuguccucugaucucuggagg

SEQ ID NO: 1076888 - RNA, 22 nt, Human
aauguugauguuuucagugagc

SEQ ID NO: 1076889 - RNA, 21 nt, Human
ccagagagagggaaguggguu

SEQ ID NO: 1076890 - RNA, 22 nt, Human
uccuuacaugcuuccuuauaca

SEQ ID NO: 1076891 - RNA, 19 nt, Human
gggguggcuggggcuccag

SEQ ID NO: 1076892 - RNA, 22 nt, Human
ggggaccuggccacccauccuu

SEQ ID NO: 1076893 - RNA, 20 nt, Human
gcucccugguagaaauguuu

SEQ ID NO: 1076894 - RNA, 22 nt, Human
ucagaaagcugauucuugauac

SEQ ID NO: 1076895 - RNA, 22 nt, Human
uauacacauccuccaaagauag

SEQ ID NO: 1076896 - RNA, 22 nt, Human
ugcuucugaaaugcaggucuuc

SEQ ID NO: 1076897 - RNA, 22 nt, Human
uuugcuuugggagguugucugg

SEQ ID NO: 1076898 - RNA, 21 nt, Human
cucaggauggcggccuggugg

SEQ ID NO: 1076899 - RNA, 22 nt, Human
uggagagcaagucgcagacaug

SEQ ID NO: 1076900 - RNA, 22 nt, Human
caacagcugaucuuugaugaag

SEQ ID NO: 1076901 - RNA, 22 nt, Human
agggacacugaugagaaauucu

SEQ ID NO: 1076902 - RNA, 22 nt, Human
cuuuuuauaccgugccaguuga

SEQ ID NO: 1076903 - RNA, 22 nt, Human
ucccagagcagaugugcuaaag

SEQ ID NO: 1076904 - RNA, 22 nt, Human
accauuaaagagauccugggga

SEQ ID NO: 1076905 - RNA, 17 nt, Human
agcagcuggcacaggag

SEQ ID NO: 1076906 - RNA, 22 nt, Human
ccauccuaucugaccuacuugu

SEQ ID NO: 1076907 - RNA, 22 nt, Human
agcccucauggaacagcuccua

SEQ ID NO: 1076908 - RNA, 22 nt, Human
ggcaaggccugcagcucagugu

SEQ ID NO: 1076909 - RNA, 22 nt, Human
cuggcugggagcucgccugcgg

SEQ ID NO: 1076910 - RNA, 22 nt, Human
ucaggaaguuuugaaucaacug

SEQ ID NO: 1076911 - RNA, 21 nt, Human
gggcucugcccuccuggagcu

SEQ ID NO: 1076912 - RNA, 22 nt, Human
ucugagagcaucacugggguac

SEQ ID NO: 1076913 - RNA, 22 nt, Human
cagacagagucuucccaucagu

SEQ ID NO: 1076914 - RNA, 22 nt, Human
cuuagaugaagucacagaaccc

SEQ ID NO: 1076915 - RNA, 22 nt, Human
ggcagguggaaggucuccauuc

SEQ ID NO: 1076916 - RNA, 19 nt, Human
acauauguggauauacaug

SEQ ID NO: 1076917 - RNA, 22 nt, Human
guucccauacaguaucagugcu

SEQ ID NO: 1076918 - RNA, 21 nt, Human
agaugaggauacugaggccua

SEQ ID NO: 1076919 - RNA, 22 nt, Human
aaugucauugagcuccaauccu

SEQ ID NO: 1076920 - RNA, 22 nt, Human
cagucccaucucccagguggcu

SEQ ID NO: 1076921 - RNA, 22 nt, Human
uaguuaaaauaauggagauguu

SEQ ID NO: 1076922 - RNA, 22 nt, Human
cugggcaguaugaauauucaaa

SEQ ID NO: 1076923 - RNA, 22 nt, Human
caguucaggccggcugacucag

SEQ ID NO: 1076924 - RNA, 22 nt, Human
ugggccugggcuccuguccucu

SEQ ID NO: 1076925 - RNA, 22 nt, Human
uccuuuuugguccaaggugacc

SEQ ID NO: 1076926 - RNA, 22 nt, Human
ccuuucagaugggcauggaccg

SEQ ID NO: 1076927 - RNA, 22 nt, Human
aguauggggcugugugugcaca

SEQ ID NO: 1076928 - RNA, 21 nt, Human
ccuccaggagcagagcccuga

SEQ ID NO: 1076929 - RNA, 20 nt, Human
ggaagccagggugcagggga

SEQ ID NO: 1076930 - RNA, 22 nt, Human
uuugcaaagaaauuauugcugu

SEQ ID NO: 1076931 - RNA, 22 nt, Human
gcucccagcauugcugcugaau

SEQ ID NO: 1076932 - RNA, 22 nt, Human
uuauuuuuaaaaguucacacag

SEQ ID NO: 1076933 - RNA, 22 nt, Human
ggcucaguguuuguggaacaua

SEQ ID NO: 1076934 - RNA, 22 nt, Human
ucugcaggacugaggccuguuu

SEQ ID NO: 1076935 - RNA, 22 nt, Human
auugucuguacuuuaaaaaugu

SEQ ID NO: 1076936 - RNA, 22 nt, Human
cugaggccuggugaggugguga

SEQ ID NO: 1076937 - RNA, 22 nt, Human
aggcaugugacccuggacucag

SEQ ID NO: 1076938 - RNA, 22 nt, Human
uggucucuucuuccaagauggc

SEQ ID NO: 1076939 - RNA, 22 nt, Human
acagagucauaagcggagcucg

SEQ ID NO: 1076940 - RNA, 22 nt, Human
gaaggaagccguuucucuccag

SEQ ID NO: 1076941 - RNA, 22 nt, Human
gggguggauuccuacaggucca

SEQ ID NO: 1076942 - RNA, 22 nt, Human
aaggcccuaauagagcacauau

SEQ ID NO: 1076943 - RNA, 19 nt, Human
ugacaggcuguugccuuga

SEQ ID NO: 1076944 - RNA, 19 nt, Human
gugauuucuuuccacaagc

SEQ ID NO: 1076945 - RNA, 21 nt, Human
caaaugcuggcuggaugagga

SEQ ID NO: 1076946 - RNA, 22 nt, Human
ugugcagcuaguccuggacuug

SEQ ID NO: 1076947 - RNA, 22 nt, Human
cuggacaggcuggggacugcaa

SEQ ID NO: 1076948 - RNA, 22 nt, Human
uuuccuuugaggguccuacacu

SEQ ID NO: 1076949 - RNA, 22 nt, Human
uaaggccaggcuguggucggca

SEQ ID NO: 1076950 - RNA, 23 nt, Human
aggagaagagauuuccacaugca

SEQ ID NO: 1076951 - RNA, 22 nt, Human
gauuucucaauccuaguacuau

SEQ ID NO: 1076952 - RNA, 22 nt, Human
agcaaacacaagagguaauuuc

SEQ ID NO: 1076953 - RNA, 22 nt, Human
cuggcuccuccaaggccuggag

SEQ ID NO: 1076954 - RNA, 22 nt, Human
ugcccugcagugagugcgucug

SEQ ID NO: 1076955 - RNA, 22 nt, Human
ugcagaagaauguaggcauaag

SEQ ID NO: 1076956 - RNA, 22 nt, Human
augcaagaucacaccaaacacg

SEQ ID NO: 1076957 - RNA, 20 nt, Human
cucuggcuccgcgugaccgc

SEQ ID NO: 1076958 - RNA, 22 nt, Human
caggcagcgcucguggccuggc

SEQ ID NO: 1076959 - RNA, 22 nt, Human
gcccagcacauugcugaggacc

SEQ ID NO: 1076960 - RNA, 22 nt, Human
uggcugaauaauauucuguugu

SEQ ID NO: 1076961 - RNA, 22 nt, Human
agagcuggauggucaagauggc

SEQ ID NO: 1076962 - RNA, 22 nt, Human
ugcuuuauaggggauugcaggc

SEQ ID NO: 1076963 - RNA, 22 nt, Human
ccuggcugugcauugccggccc

SEQ ID NO: 1076964 - RNA, 22 nt, Human
aagaaucuuaauccagaaaccu

SEQ ID NO: 1076965 - RNA, 22 nt, Human
ugcuccagggccuccagugggg

SEQ ID NO: 1076966 - RNA, 22 nt, Human
caggggcagucugugugcgugg

SEQ ID NO: 1076967 - RNA, 22 nt, Human
uguuuuuaaauaaugauagaaa

SEQ ID NO: 1076968 - RNA, 22 nt, Human
aauauaaauuccugggcccagc

SEQ ID NO: 1076969 - RNA, 22 nt, Human
gggaagaagacauggugaaggc

SEQ ID NO: 1076970 - RNA, 22 nt, Human
cucucccagucaggcucaggau

SEQ ID NO: 1076971 - RNA, 22 nt, Human
cuguggcuucugcuugggccuc

SEQ ID NO: 1076972 - RNA, 22 nt, Human
uuuacagagagagaacuggacu

SEQ ID NO: 1076973 - RNA, 22 nt, Human
gaauguuugugcagagucaucu

SEQ ID NO: 1076974 - RNA, 22 nt, Human
aaagcuauagggucaagcauuu

SEQ ID NO: 1076975 - RNA, 23 nt, Human
cuggcucuguagguggcauccuu

SEQ ID NO: 1076976 - RNA, 22 nt, Human
cauacauuuugcauauuuacca

SEQ ID NO: 1076977 - RNA, 22 nt, Human
aauggccuggagggaauacaga

SEQ ID NO: 1076978 - RNA, 22 nt, Human
gggcagugucggggcccaggga

SEQ ID NO: 1076979 - RNA, 22 nt, Human
ugugaaaugcuauugugacaaa

SEQ ID NO: 1076980 - RNA, 18 nt, Human
agcaggugugcagaaugu

SEQ ID NO: 1076981 - RNA, 22 nt, Human
agagacugucacauaacagagg

SEQ ID NO: 1076982 - RNA, 22 nt, Human
aacacagaucaaaauauuuccu

SEQ ID NO: 1076983 - RNA, 22 nt, Human
cugcugggcagaggcugcauga

SEQ ID NO: 1076984 - RNA, 22 nt, Human
guacauuucauuuaaaugaugu

SEQ ID NO: 1076985 - RNA, 22 nt, Human
gugcuccuggccacaugaagcu

SEQ ID NO: 1076986 - RNA, 22 nt, Human
acuuccagaccugugcuugcuc

SEQ ID NO: 1076987 - RNA, 22 nt, Human
cuuucucuucgaaaaccugccc

SEQ ID NO: 1076988 - RNA, 22 nt, Human
agcugacauaagcacuuucuaa

SEQ ID NO: 1076989 - RNA, 22 nt, Human
uacaaagucagaauaacaggug

SEQ ID NO: 1076990 - RNA, 22 nt, Human
ucacagaaguguagugaggaaa

SEQ ID NO: 1076991 - RNA, 22 nt, Human
gggcucagucggcaagccccuu

SEQ ID NO: 1076992 - RNA, 22 nt, Human
aguuuguaaccuaagauucagg

SEQ ID NO: 1076993 - RNA, 23 nt, Human
uuggaccacuacuguuuucucuu

SEQ ID NO: 1076994 - RNA, 22 nt, Human
gaaagagaaccugggccuagau

SEQ ID NO: 1076995 - RNA, 22 nt, Human
aggggcuggcuuaucugagagu

SEQ ID NO: 1076996 - RNA, 22 nt, Human
gugagagcucagcugcccuggg

SEQ ID NO: 1076997 - RNA, 22 nt, Human
cuuacacuucaucucauccagg

SEQ ID NO: 1076998 - RNA, 22 nt, Human
gcucagagauggggaaugaaaa

SEQ ID NO: 1076999 - RNA, 22 nt, Human
uauccaaaggaacaaucacagc

SEQ ID NO: 1077000 - RNA, 22 nt, Human
cugcagagcuaggcugagugaa

SEQ ID NO: 1077001 - RNA, 23 nt, Human
ggcagcucucaucugaugacuga

SEQ ID NO: 1077002 - RNA, 22 nt, Human
cugcugugcacccaggaaggcu

SEQ ID NO: 1077003 - RNA, 22 nt, Human
auuauuaaagcuacaucaagga

SEQ ID NO: 1077004 - RNA, 22 nt, Human
agccugccuugggcugcuugag

SEQ ID NO: 1077005 - RNA, 22 nt, Human
aggugcaguggcucaugccugu

SEQ ID NO: 1077006 - RNA, 22 nt, Human
aucaugcugacacaguuuaucu

SEQ ID NO: 1077007 - RNA, 22 nt, Human
aguugcuggcaccugugaguau

SEQ ID NO: 1077008 - RNA, 23 nt, Human
gcugucaguuguuuuugucucua

SEQ ID NO: 1077009 - RNA, 22 nt, Human
uuaaagucccugccuuaauucc

SEQ ID NO: 1077010 - RNA, 22 nt, Human
cuuuaugguaaguauagaugac

SEQ ID NO: 1077011 - RNA, 22 nt, Human
uacugaaagagugguggacucu

SEQ ID NO: 1077012 - RNA, 22 nt, Human
uguggcugcucaggugcagacc

SEQ ID NO: 1077013 - RNA, 22 nt, Human
uucagaaguuuucaaaacuaag

SEQ ID NO: 1077014 - RNA, 22 nt, Human
cucuucagauaaaagggauauu

SEQ ID NO: 1077015 - RNA, 23 nt, Human
acagucguagguauccuuuuccu

SEQ ID NO: 1077016 - RNA, 22 nt, Human
uguaggaguccaaucaggagac

SEQ ID NO: 1077017 - RNA, 22 nt, Human
ucaggcugcagcugucagcagc

SEQ ID NO: 1077018 - RNA, 20 nt, Human
uugaaauuggaugguagcua

SEQ ID NO: 1077019 - RNA, 22 nt, Human
cauguaaaacacucagaacagu

SEQ ID NO: 1077020 - RNA, 22 nt, Human
auauuguugacuauaagaguaa

SEQ ID NO: 1077021 - RNA, 22 nt, Human
ugcagggcccuugggguugaac

SEQ ID NO: 1077022 - RNA, 22 nt, Human
gaugaggcucaugcacccugcg

SEQ ID NO: 1077023 - RNA, 22 nt, Human
aggaaauguaguccucaucucc

SEQ ID NO: 1077024 - RNA, 22 nt, Human
ugaggugaccgcagaugggaag

SEQ ID NO: 1077025 - RNA, 22 nt, Human
gauuuacagcuauacccaaugg

SEQ ID NO: 1077026 - RNA, 22 nt, Human
ugcagagaaaccaguggaggac

SEQ ID NO: 1077027 - RNA, 22 nt, Human
ucauggaagagguauuuuuugu

SEQ ID NO: 1077028 - RNA, 23 nt, Human
ccugccuguucuaacuccauuuc

SEQ ID NO: 1077029 - RNA, 17 nt, Human
aggccucccuccaggcc

SEQ ID NO: 1077030 - RNA, 22 nt, Human
gcugccacgaucucugcuguag

SEQ ID NO: 1077031 - RNA, 22 nt, Human
guggcaggagacuggaagaugg

SEQ ID NO: 1077032 - RNA, 22 nt, Human
ugucucaguucccuucucugga

SEQ ID NO: 1077033 - RNA, 22 nt, Human
aggacacagacuuagauuuaaa

SEQ ID NO: 1077034 - RNA, 20 nt, Human
gugugaagcccucaggagga

SEQ ID NO: 1077035 - RNA, 22 nt, Human
caggcaccccaggugagcacug

SEQ ID NO: 1077036 - RNA, 22 nt, Human
uuuuuuauaucaacugaagucu

SEQ ID NO: 1077037 - RNA, 22 nt, Human
caaaggcuuugcuaugaugcau

SEQ ID NO: 1077038 - RNA, 22 nt, Human
cugccucuguugggcauggucu

SEQ ID NO: 1077039 - RNA, 22 nt, Human
ugcaggcugcuggcaguagcuu

SEQ ID NO: 1077040 - RNA, 22 nt, Human
uccuuuaaagaacugugcuuuu

SEQ ID NO: 1077041 - RNA, 15 nt, Human
ucccucagcuaaaga

SEQ ID NO: 1077042 - RNA, 22 nt, Human
ucagggcaagucucagaagguu

SEQ ID NO: 1077043 - RNA, 22 nt, Human
gugaggugguacaauauuaacu

SEQ ID NO: 1077044 - RNA, 20 nt, Human
ccuuuauuauuuguaugaug

SEQ ID NO: 1077045 - RNA, 19 nt, Human
gaaggagagcugaguuagg

SEQ ID NO: 1077046 - RNA, 22 nt, Human
gagggcaggggucuugcacggu

SEQ ID NO: 1077047 - RNA, 22 nt, Human
ugcuggggucauggggcgcccg

SEQ ID NO: 1077048 - RNA, 17 nt, Human
aggcaggcagagcggga

SEQ ID NO: 1077049 - RNA, 21 nt, Human
uuuuacagaugaggggaaggg

SEQ ID NO: 1077050 - RNA, 22 nt, Human
acugaaauacugcucuuggauu

SEQ ID NO: 1077051 - RNA, 22 nt, Human
uuuccucuccggggccuccagg

SEQ ID NO: 1077052 - RNA, 22 nt, Human
gucugucaucugagauggagug

SEQ ID NO: 1077053 - RNA, 19 nt, Human
gacaggaaggcuaccagua

SEQ ID NO: 1077054 - RNA, 21 nt, Human
agcagcugcaguuucuaucug

SEQ ID NO: 1077055 - RNA, 22 nt, Human
uuuucagagagcuuuuaugucc

SEQ ID NO: 1077056 - RNA, 21 nt, Human
aaauacugggcagugacuuga

SEQ ID NO: 1077057 - RNA, 23 nt, Human
aggaggaaaaguuaucugcugag

SEQ ID NO: 1077058 - RNA, 22 nt, Human
aaggcagagggcuggaucagag

SEQ ID NO: 1077059 - RNA, 22 nt, Human
ugaaagaaggguggaaaaugua

SEQ ID NO: 1077060 - RNA, 22 nt, Human
gcucuggcuacuguggcuaccg

SEQ ID NO: 1077061 - RNA, 22 nt, Human
gcugggcugagcuagacuuggc

SEQ ID NO: 1077062 - RNA, 20 nt, Human
cauuuguuagcuuucuacug

SEQ ID NO: 1077063 - RNA, 22 nt, Human
cugggcagcuguaucagggagu

SEQ ID NO: 1077064 - RNA, 22 nt, Human
ucaagauaccaccauuauaugu

SEQ ID NO: 1077065 - RNA, 22 nt, Human
guacaaaugagaguucuguuuu

SEQ ID NO: 1077066 - RNA, 22 nt, Human
uaauauaccaaacuguaauuuu

SEQ ID NO: 1077067 - RNA, 22 nt, Human
ucacaacucuuuccauuuaaua

SEQ ID NO: 1077068 - RNA, 22 nt, Human
uaucuuuagaggaagagaaucu

SEQ ID NO: 1077069 - RNA, 22 nt, Human
ucauugaacgaagagcuccauu

SEQ ID NO: 1077070 - RNA, 22 nt, Human
caugaagcucuugcaccucuag

SEQ ID NO: 1077071 - RNA, 22 nt, Human
gcuaggaguggugggucaagga

SEQ ID NO: 1077072 - RNA, 22 nt, Human
gcauugucaaaagugguaugac

SEQ ID NO: 1077073 - RNA, 22 nt, Human
gcauggcaagaucaggagacca

SEQ ID NO: 1077074 - RNA, 22 nt, Human
aaauugagacuuuuuuccucca

SEQ ID NO: 1077075 - RNA, 22 nt, Human
uccuugaagcaacgugcagaca

SEQ ID NO: 1077076 - RNA, 22 nt, Human
ugaaccagagucuccagugguu

SEQ ID NO: 1077077 - RNA, 22 nt, Human
auguuacacauaggcauaaaug

SEQ ID NO: 1077078 - RNA, 22 nt, Human
gcaggaugggagcuucacuuug

SEQ ID NO: 1077079 - RNA, 22 nt, Human
ggggagaguccuuuccaguucc

SEQ ID NO: 1077080 - RNA, 22 nt, Human
gcuggcccagggucaccuagga

SEQ ID NO: 1077081 - RNA, 22 nt, Human
ggcagagguagcuggaaccagg

SEQ ID NO: 1077082 - RNA, 22 nt, Human
agucaacaguuuuugauguaaa

SEQ ID NO: 1077083 - RNA, 22 nt, Human
augggcugaggugggauagaag

SEQ ID NO: 1077084 - RNA, 22 nt, Human
gagcagugagugaauguugccu

SEQ ID NO: 1077085 - RNA, 22 nt, Human
uuuucuuccuggauuuuggcau

SEQ ID NO: 1077086 - RNA, 22 nt, Human
ccuguguguaggccaggggagu

SEQ ID NO: 1077087 - RNA, 20 nt, Human
ggccugagcauggcuggcag

SEQ ID NO: 1077088 - RNA, 21 nt, Human
agggccugugcucuccagguc

SEQ ID NO: 1077089 - RNA, 20 nt, Human
aggaagccaaaggcugucuu

SEQ ID NO: 1077090 - RNA, 22 nt, Human
cuucugggcauucagcugcaca

SEQ ID NO: 1077091 - RNA, 22 nt, Human
caaaguauauuggauugaaugg

SEQ ID NO: 1077092 - RNA, 22 nt, Human
ugauuaaguucaaaauauagaa

SEQ ID NO: 1077093 - RNA, 18 nt, Human
ugaacuggcaucagaauc

SEQ ID NO: 1077094 - RNA, 22 nt, Human
uaggcucagggcugggugacgg

SEQ ID NO: 1077095 - RNA, 22 nt, Human
uguggggaucuucuagcuuuuc

SEQ ID NO: 1077096 - RNA, 22 nt, Human
ucaggaaggagcuggccugcca

SEQ ID NO: 1077097 - RNA, 22 nt, Human
gaguaacagcauaaauuuguga

SEQ ID NO: 1077098 - RNA, 22 nt, Human
gccugucugcagggcugucauu

SEQ ID NO: 1077099 - RNA, 22 nt, Human
cuggagggcugcagcgaggcug

SEQ ID NO: 1077100 - RNA, 23 nt, Human
agcuguuucauuauuacaacacc

SEQ ID NO: 1077101 - RNA, 22 nt, Human
acagagcugggugcccccugga

SEQ ID NO: 1077102 - RNA, 22 nt, Human
ugcugcucucagccaccaggaa

SEQ ID NO: 1077103 - RNA, 22 nt, Human
aagccgggccugagaaaugaca

SEQ ID NO: 1077104 - RNA, 22 nt, Human
gaaggaggcguuagcccuagga

SEQ ID NO: 1077105 - RNA, 22 nt, Human
agaaaugcaguuucaagacaaa

SEQ ID NO: 1077106 - RNA, 22 nt, Human
cagggugcagugucgcugcuag

SEQ ID NO: 1077107 - RNA, 23 nt, Human
agggaaaguaguaauggccuuug

SEQ ID NO: 1077108 - RNA, 22 nt, Human
gcuggaaggcuaggcucaguug

SEQ ID NO: 1077109 - RNA, 22 nt, Human
cccaagaucuuucgugcacuaa

SEQ ID NO: 1077110 - RNA, 18 nt, Human
ucugucucuguccuugcu

SEQ ID NO: 1077111 - RNA, 22 nt, Human
aagggcagcuauuaucgucauc

SEQ ID NO: 1077112 - RNA, 22 nt, Human
gccuguguccuucccagugggg

SEQ ID NO: 1077113 - RNA, 22 nt, Human
uuccugagggacuuuugagauu

SEQ ID NO: 1077114 - RNA, 23 nt, Human
ggcuggcccggggcugcuccuga

SEQ ID NO: 1077115 - RNA, 22 nt, Human
gauccucuuuuccuaggaaggu

SEQ ID NO: 1077116 - RNA, 22 nt, Human
uaacugauauugaaaaacauca

SEQ ID NO: 1077117 - RNA, 22 nt, Human
cagcugccaagaaucuuuucua

SEQ ID NO: 1077118 - RNA, 22 nt, Human
gggggcagaauguacucuuguc

SEQ ID NO: 1077119 - RNA, 22 nt, Human
accaggagccauagagucaggc

SEQ ID NO: 1077120 - RNA, 23 nt, Human
acagcaagaggaccagaugugag

SEQ ID NO: 1077121 - RNA, 22 nt, Human
aagccaggaagagagccuucac

SEQ ID NO: 1077122 - RNA, 20 nt, Human
caucaucacaugagccaauu

SEQ ID NO: 1077123 - RNA, 22 nt, Human
ucacauuuauuucaaaguuacu

SEQ ID NO: 1077124 - RNA, 22 nt, Human
gcagggcuguggacacuuuggu

SEQ ID NO: 1077125 - RNA, 22 nt, Human
aaaguucuauguaauguuuuuu

SEQ ID NO: 1077126 - RNA, 22 nt, Human
gggaugcagacuacagggcuua

SEQ ID NO: 1077127 - RNA, 22 nt, Human
aggccagguggucaugcuugcu

SEQ ID NO: 1077128 - RNA, 22 nt, Human
ucucaggguuuccugggggcug

SEQ ID NO: 1077129 - RNA, 22 nt, Human
ggcaguggguuccccaaggcac

SEQ ID NO: 1077130 - RNA, 22 nt, Human
aaacuucagggaauaaaagagu

SEQ ID NO: 1077131 - RNA, 22 nt, Human
agagauaugaguaguugugaca

SEQ ID NO: 1077132 - RNA, 22 nt, Human
ccugggcuuucggcggcuuccu

SEQ ID NO: 1077133 - RNA, 22 nt, Human
uuuuuaagcuccuuugauguca

SEQ ID NO: 1077134 - RNA, 22 nt, Human
ccagucagagcagcgcucgcau

SEQ ID NO: 1077135 - RNA, 22 nt, Human
caggcagagugagguggucuaa

SEQ ID NO: 1077136 - RNA, 22 nt, Human
uuaacaaggugacugcauuaaa

SEQ ID NO: 1077137 - RNA, 22 nt, Human
cagggccaaguuggugccuuuu

SEQ ID NO: 1077138 - RNA, 22 nt, Human
aagggcugcaauccaaaacacu

SEQ ID NO: 1077139 - RNA, 22 nt, Human
aacuuaguuaagauuaagucuc

SEQ ID NO: 1077140 - RNA, 22 nt, Human
ggggccagcacugugccuuugu

SEQ ID NO: 1077141 - RNA, 22 nt, Human
uuuuuagaguguuaccaguaua

SEQ ID NO: 1077142 - RNA, 22 nt, Human
gggcagguggagggcccagcca

SEQ ID NO: 1077143 - RNA, 22 nt, Human
aacuguaagagaauaaaugugu

SEQ ID NO: 1077144 - RNA, 22 nt, Human
uucaggauucuuucagacuggg

SEQ ID NO: 1077145 - RNA, 22 nt, Human
ucccacauuacccugacugaca

SEQ ID NO: 1077146 - RNA, 22 nt, Human
aaagguuuuuauuuauccugga

SEQ ID NO: 1077147 - RNA, 22 nt, Human
acugcagcaaagcccgugucuu

SEQ ID NO: 1077148 - RNA, 22 nt, Human
agcagugggggaguguuaguuu

SEQ ID NO: 1077149 - RNA, 22 nt, Human
cucagcaacagcgacuuaaggg

SEQ ID NO: 1077150 - RNA, 22 nt, Human
aagcagugcgcucaucuaaggg

SEQ ID NO: 1077151 - RNA, 22 nt, Human
caggaugggauguagugggccc

SEQ ID NO: 1077152 - RNA, 22 nt, Human
gugaagcagaguguggaagcaa

SEQ ID NO: 1077153 - RNA, 22 nt, Human
aucugacaucuacuagaacaga

SEQ ID NO: 1077154 - RNA, 22 nt, Human
agacuucuugagcuggcacuuc

SEQ ID NO: 1077155 - RNA, 22 nt, Human
aacagcaauagcacuauucauu

SEQ ID NO: 1077156 - RNA, 22 nt, Human
ucacauuuucauauucucugag

SEQ ID NO: 1077157 - RNA, 22 nt, Human
uacacagauaugugaucaauca

SEQ ID NO: 1077158 - RNA, 22 nt, Human
uagcuugucagugaauagcugu

SEQ ID NO: 1077159 - RNA, 22 nt, Human
gaauuuuaucuuauuacuugca

SEQ ID NO: 1077160 - RNA, 22 nt, Human
auacuucaugcuucaugucugu

SEQ ID NO: 1077161 - RNA, 22 nt, Human
ucacagaacaauguuuaguucu

SEQ ID NO: 1077162 - RNA, 22 nt, Human
ugaagagauagaaguacaugcu

SEQ ID NO: 1077163 - RNA, 23 nt, Human
aacacaaagcugauuccaguggc

SEQ ID NO: 1077164 - RNA, 22 nt, Human
caauuucacuaauaauauuuac

SEQ ID NO: 1077165 - RNA, 22 nt, Human
acugaaaaaguaugauucacug

SEQ ID NO: 1077166 - RNA, 22 nt, Human
agaggccaguggcugugcuguc

SEQ ID NO: 1077167 - RNA, 22 nt, Human
gcaggcaggagcccaacugccu

SEQ ID NO: 1077168 - RNA, 22 nt, Human
agaacuguccuuggaggagagu

SEQ ID NO: 1077169 - RNA, 22 nt, Human
uuacaguugcuacaaaggauaa

SEQ ID NO: 1077170 - RNA, 22 nt, Human
agugaggucaggaucucaggga

SEQ ID NO: 1077171 - RNA, 22 nt, Human
uuaauuaauuaguuaagcaugu

SEQ ID NO: 1077172 - RNA, 23 nt, Human
uuucacagaaggauuguagggcc

SEQ ID NO: 1077173 - RNA, 22 nt, Human
ucagcuaggcacuucucacuga

SEQ ID NO: 1077174 - RNA, 23 nt, Human
uggcauuucuauacuggcaagug

SEQ ID NO: 1077175 - RNA, 19 nt, Human
cuuauuagagugagagcuu

SEQ ID NO: 1077176 - RNA, 22 nt, Human
aggcucaggcaggaauggcgga

SEQ ID NO: 1077177 - RNA, 22 nt, Human
gcuggcagggacagcugcgugu

SEQ ID NO: 1077178 - RNA, 22 nt, Human
augcuuuguuuaaagauuuuca

SEQ ID NO: 1077179 - RNA, 19 nt, Human
ugguggcaaugucagcuaa

SEQ ID NO: 1077180 - RNA, 22 nt, Human
ugucacaguuuguacuuuauag

SEQ ID NO: 1077181 - RNA, 22 nt, Human
cugccuggcauggagaagagaa

SEQ ID NO: 1077182 - RNA, 22 nt, Human
aaaggcuuagacacagaacugu

SEQ ID NO: 1077183 - RNA, 22 nt, Human
uugcugaaaagcuggccuuugu

SEQ ID NO: 1077184 - RNA, 22 nt, Human
uugugaauagugcugcaauaaa

SEQ ID NO: 1077185 - RNA, 22 nt, Human
ccugccuguaagauggguacaa

SEQ ID NO: 1077186 - RNA, 17 nt, Human
cccagcuggcagugccg

SEQ ID NO: 1077187 - RNA, 22 nt, Human
cacaagacuuauuuguguagaa

SEQ ID NO: 1077188 - RNA, 22 nt, Human
ucacauacacuaggauauuuuu

SEQ ID NO: 1077189 - RNA, 22 nt, Human
agaguccaugaagacagcugag

SEQ ID NO: 1077190 - RNA, 22 nt, Human
aaauacaauuucaggcuguaau

SEQ ID NO: 1077191 - RNA, 22 nt, Human
agaaagacaaaaugcaguggcu

SEQ ID NO: 1077192 - RNA, 22 nt, Human
gggcuggcaggaccugggcuga

SEQ ID NO: 1077193 - RNA, 22 nt, Human
aagaauuaucugaaagcugugu

SEQ ID NO: 1077194 - RNA, 23 nt, Human
acuucauggcacugucuuagagg

SEQ ID NO: 1077195 - RNA, 22 nt, Human
gcagcccaaaaaagagguagau

SEQ ID NO: 1077196 - RNA, 22 nt, Human
gagaaggggugauguggguaau

SEQ ID NO: 1077197 - RNA, 22 nt, Human
aaagcaccuagcauagugcuua

SEQ ID NO: 1077198 - RNA, 22 nt, Human
cauguuaaugaauuuuugcagu

SEQ ID NO: 1077199 - RNA, 22 nt, Human
gccuggcaggggccugggagug

SEQ ID NO: 1077200 - RNA, 22 nt, Human
aaaagacaucuauuucaggcag

SEQ ID NO: 1077201 - RNA, 22 nt, Human
agugcacuggcaccaucucagc

SEQ ID NO: 1077202 - RNA, 22 nt, Human
gcagggugauagugaggcucag

SEQ ID NO: 1077203 - RNA, 23 nt, Human
cugugcccggggcuccaccugau

SEQ ID NO: 1077204 - RNA, 22 nt, Human
augaaugcuuauuaaauugaaa

SEQ ID NO: 1077205 - RNA, 22 nt, Human
ggcugccaggagggaggccagu

SEQ ID NO: 1077206 - RNA, 22 nt, Human
uucuuaagaaaccaucacauuc

SEQ ID NO: 1077207 - RNA, 22 nt, Human
cuucccuuggugaacagagcau

SEQ ID NO: 1077208 - RNA, 22 nt, Human
agaguaaaguacuuggaauacc

SEQ ID NO: 1077209 - RNA, 22 nt, Human
uccucacagucaacacuuugag

SEQ ID NO: 1077210 - RNA, 22 nt, Human
uaggaaaagucuagauugauga

SEQ ID NO: 1077211 - RNA, 22 nt, Human
cagcuagaaaugggauugguau

SEQ ID NO: 1077212 - RNA, 22 nt, Human
auguucuuugaaauauuuuaga

SEQ ID NO: 1077213 - RNA, 22 nt, Human
gaacaucagucauaauuuaacg

SEQ ID NO: 1077214 - RNA, 22 nt, Human
uacuuucaugucuauacauauu

SEQ ID NO: 1077215 - RNA, 21 nt, Human
ucuccaguauccuucucugag

SEQ ID NO: 1077216 - RNA, 22 nt, Human
gcaugggcaagaggacuggggg

SEQ ID NO: 1077217 - RNA, 22 nt, Human
ccagugacuggcuuucuggugu

SEQ ID NO: 1077218 - RNA, 22 nt, Human
uacagaaagggaugauugaucu

SEQ ID NO: 1077219 - RNA, 22 nt, Human
caguagcacucugucagugaag

SEQ ID NO: 1077220 - RNA, 23 nt, Human
cccagcuuucccacugccgagag

SEQ ID NO: 1077221 - RNA, 22 nt, Human
agguuacagugauuauagguuu

SEQ ID NO: 1077222 - RNA, 23 nt, Human
uggaggaaacacaucagaagacc

SEQ ID NO: 1077223 - RNA, 22 nt, Human
agaacaaugcguauuuuacucc

SEQ ID NO: 1077224 - RNA, 22 nt, Human
gagcugucucuauaugaaugcu

SEQ ID NO: 1077225 - RNA, 18 nt, Human
uacaaacuccuugaaggc

SEQ ID NO: 1077226 - RNA, 22 nt, Human
ccugagggaggguauaggcugu

SEQ ID NO: 1077227 - RNA, 22 nt, Human
cugaaggagcauagucaguuuu

SEQ ID NO: 1077228 - RNA, 22 nt, Human
cugaugcuauaagccacagugg

SEQ ID NO: 1077229 - RNA, 22 nt, Human
ugaaaucaucaaaagagccauu

SEQ ID NO: 1077230 - RNA, 22 nt, Human
gccugguggugugcucaagugg

SEQ ID NO: 1077231 - RNA, 22 nt, Human
cccagacugcagagcgggcaga

SEQ ID NO: 1077232 - RNA, 22 nt, Human
acaguuuaggaugagagaacac

SEQ ID NO: 1077233 - RNA, 22 nt, Human
aucaggaucagggcuagcagag

SEQ ID NO: 1077234 - RNA, 22 nt, Human
uuuccuuccuugcuagccugag

SEQ ID NO: 1077235 - RNA, 19 nt, Human
gugaggauacugcucagag

SEQ ID NO: 1077236 - RNA, 22 nt, Human
uaaggcagaaauaugagcaggg

SEQ ID NO: 1077237 - RNA, 22 nt, Human
cuauuuggccauagugcaguua

SEQ ID NO: 1077238 - RNA, 22 nt, Human
uguuugcucugacuaucuugcg

SEQ ID NO: 1077239 - RNA, 22 nt, Human
cuggugggaggcaagguggaag

SEQ ID NO: 1077240 - RNA, 22 nt, Human
cuggaguguaaagagcauagaa

SEQ ID NO: 1077241 - RNA, 21 nt, Human
ugaagccugaggcauagcccc

SEQ ID NO: 1077242 - RNA, 21 nt, Human
agcagcagaucuggugagggc

SEQ ID NO: 1077243 - RNA, 22 nt, Human
gcauuucagagaaaaucugcuu

SEQ ID NO: 1077244 - RNA, 22 nt, Human
uccaggaggaggaaggcugcca

SEQ ID NO: 1077245 - RNA, 22 nt, Human
ucuguggauuuuaguguucaug

SEQ ID NO: 1077246 - RNA, 19 nt, Human
ccucugccagcccgccucu

SEQ ID NO: 1077247 - RNA, 22 nt, Human
ccugggcuggaguacagcagug

SEQ ID NO: 1077248 - RNA, 22 nt, Human
ggcagugagucccggagaggcc

SEQ ID NO: 1077249 - RNA, 22 nt, Human
uuucccuuguuccuuccucuga

SEQ ID NO: 1077250 - RNA, 22 nt, Human
acuggaagccaguugacaauca

SEQ ID NO: 1077251 - RNA, 22 nt, Human
aguuuacagaugcuacaggagc

SEQ ID NO: 1077252 - RNA, 20 nt, Human
uauuggaucuaagaaauggg

SEQ ID NO: 1077253 - RNA, 22 nt, Human
uggagugaaguaaagaggacaa

SEQ ID NO: 1077254 - RNA, 22 nt, Human
aguggcagaagucacuggguag

SEQ ID NO: 1077255 - RNA, 22 nt, Human
caggaugaagggcaaaggcaag

SEQ ID NO: 1077256 - RNA, 22 nt, Human
agcaagaagggcaaggaaguuu

SEQ ID NO: 1077257 - RNA, 22 nt, Human
uucagcuauuauacccacuuuu

SEQ ID NO: 1077258 - RNA, 22 nt, Human
agcuggccuccgggugccuggg

SEQ ID NO: 1077259 - RNA, 22 nt, Human
ggagaugguggaagcuggugca

SEQ ID NO: 1077260 - RNA, 22 nt, Human
uaauagaaagguauuuuuugca

SEQ ID NO: 1077261 - RNA, 22 nt, Human
acaguuuaugguguuuuauaua

SEQ ID NO: 1077262 - RNA, 20 nt, Human
gucugaggagcagugggaaa

SEQ ID NO: 1077263 - RNA, 22 nt, Human
ugaaggccucugguacaugcca

SEQ ID NO: 1077264 - RNA, 22 nt, Human
uaggcaggcugaauguagauuu

SEQ ID NO: 1077265 - RNA, 22 nt, Human
aucuguuguuuucucauauguu

SEQ ID NO: 1077266 - RNA, 22 nt, Human
ugggcagaggacagggaagauc

SEQ ID NO: 1077267 - RNA, 22 nt, Human
agucccagaucuccauucgguc

SEQ ID NO: 1077268 - RNA, 22 nt, Human
ugacacaguaucaaacaugauu

SEQ ID NO: 1077269 - RNA, 22 nt, Human
ugacauuucuuguugauauaaa

SEQ ID NO: 1077270 - RNA, 22 nt, Human
ggcuagaguggaacuggagcgg

SEQ ID NO: 1077271 - RNA, 22 nt, Human
gccagcagcccagaaggacuuu

SEQ ID NO: 1077272 - RNA, 18 nt, Human
ugggagugggaguggaua

SEQ ID NO: 1077273 - RNA, 22 nt, Human
gcaggaagggaaagguugacuc

SEQ ID NO: 1077274 - RNA, 22 nt, Human
agcacagauggauguauucauu

SEQ ID NO: 1077275 - RNA, 22 nt, Human
aagcagagugauauaaacaugg

SEQ ID NO: 1077276 - RNA, 22 nt, Human
aucauaauugcuccagugauau

SEQ ID NO: 1077277 - RNA, 22 nt, Human
caggaagagaacauggaggcug

SEQ ID NO: 1077278 - RNA, 22 nt, Human
aucucagucagguugaauuugg

SEQ ID NO: 1077279 - RNA, 22 nt, Human
cagaaucugagucgugauugua

SEQ ID NO: 1077280 - RNA, 17 nt, Human
ggagagugggaauggcc

SEQ ID NO: 1077281 - RNA, 22 nt, Human
uuacaauaguuccuucuuuugu

SEQ ID NO: 1077282 - RNA, 22 nt, Human
gagauuggauuuaauggccaaa

SEQ ID NO: 1077283 - RNA, 22 nt, Human
ucuggcucaggucagacaggga

SEQ ID NO: 1077284 - RNA, 22 nt, Human
aaaacauugaauugcacacuau

SEQ ID NO: 1077285 - RNA, 22 nt, Human
ggcaaaaaccauaauuacuuuu

SEQ ID NO: 1077286 - RNA, 22 nt, Human
cuuauucagaaggagaaaugga

SEQ ID NO: 1077287 - RNA, 22 nt, Human
ggcgcaggccuuggauccuggu

SEQ ID NO: 1077288 - RNA, 22 nt, Human
aagacauugucauuuuauaauu

SEQ ID NO: 1077289 - RNA, 22 nt, Human
ucagauggcacacagagccugc

SEQ ID NO: 1077290 - RNA, 22 nt, Human
uucuguaucucuguguuucuug

SEQ ID NO: 1077291 - RNA, 22 nt, Human
caggguccggcugccuggcugu

SEQ ID NO: 1077292 - RNA, 22 nt, Human
aaauuuuaguaaggaaguugag

SEQ ID NO: 1077293 - RNA, 22 nt, Human
cucaggaugcaauuccaucaag

SEQ ID NO: 1077294 - RNA, 22 nt, Human
gcaggagcucguuuccaggcug

SEQ ID NO: 1077295 - RNA, 22 nt, Human
aaacucaaauuaaacuagcuua

SEQ ID NO: 1077296 - RNA, 22 nt, Human
ugcaggcucugguuuauagugc

SEQ ID NO: 1077297 - RNA, 22 nt, Human
agggccuggcuucacuuucuca

SEQ ID NO: 1077298 - RNA, 22 nt, Human
caggaacaaggccuaugggacu

SEQ ID NO: 1077299 - RNA, 22 nt, Human
cagggccucuccuccaggaacu

SEQ ID NO: 1077300 - RNA, 22 nt, Human
uacaguguauguauuuguaggu

SEQ ID NO: 1077301 - RNA, 22 nt, Human
ugggugcaggucuugugccagg

SEQ ID NO: 1077302 - RNA, 22 nt, Human
aaggcagcagugcacgacugau

SEQ ID NO: 1077303 - RNA, 22 nt, Human
aaucacagaaggcagucuucua

SEQ ID NO: 1077304 - RNA, 22 nt, Human
uccugucagugaggcagaugaa

SEQ ID NO: 1077305 - RNA, 22 nt, Human
cuucaaagggucacuauuuauc

SEQ ID NO: 1077306 - RNA, 22 nt, Human
ugucauuuugucucacugcuau

SEQ ID NO: 1077307 - RNA, 22 nt, Human
cuuggagugaaugggggcaggu

SEQ ID NO: 1077308 - RNA, 22 nt, Human
agggccagaggcaccuugcagc

SEQ ID NO: 1077309 - RNA, 22 nt, Human
ugggccccagcacgucugggga

SEQ ID NO: 1077310 - RNA, 22 nt, Human
ugcagaaacagucauuaaugua

SEQ ID NO: 1077311 - RNA, 22 nt, Human
ugggggcugugcacaggcucac

SEQ ID NO: 1077312 - RNA, 22 nt, Human
agcagggcugcagugugucuuu

SEQ ID NO: 1077313 - RNA, 22 nt, Human
uaguauaucuuuaguacauagu

SEQ ID NO: 1077314 - RNA, 22 nt, Human
acugggaauggagccugggccu

SEQ ID NO: 1077315 - RNA, 22 nt, Human
cucugcccucgcacaucugcca

SEQ ID NO: 1077316 - RNA, 22 nt, Human
ugccuuuuccaguuucuagggg

SEQ ID NO: 1077317 - RNA, 22 nt, Human
gagauaaugaugcuaacccagu

SEQ ID NO: 1077318 - RNA, 22 nt, Human
cuggaagggucuacuuagcaga

SEQ ID NO: 1077319 - RNA, 22 nt, Human
ccugccuggcccaccuugccac

SEQ ID NO: 1077320 - RNA, 22 nt, Human
agcugccugugcugggagccca

SEQ ID NO: 1077321 - RNA, 22 nt, Human
accaguccgcggagcuccgggg

SEQ ID NO: 1077322 - RNA, 22 nt, Human
cugggcacaaguggcccuggau

SEQ ID NO: 1077323 - RNA, 22 nt, Human
uucuggggccaauugccacugc

SEQ ID NO: 1077324 - RNA, 22 nt, Human
uaacaguauauuuaccaaaccu

SEQ ID NO: 1077325 - RNA, 22 nt, Human
uccagagucuccuguuguuguu

SEQ ID NO: 1077326 - RNA, 22 nt, Human
gggcugcuuuuaagggucucag

SEQ ID NO: 1077327 - RNA, 22 nt, Human
agaauaaaucaaauguccugag

SEQ ID NO: 1077328 - RNA, 22 nt, Human
uugcauccgaaacaauuucucu

SEQ ID NO: 1077329 - RNA, 22 nt, Human
uccaauuugaaaugguauaugu

SEQ ID NO: 1077330 - RNA, 22 nt, Human
cuguguagccucaugugggcuu

SEQ ID NO: 1077331 - RNA, 22 nt, Human
auugcuuuugagcuagaauuuu

SEQ ID NO: 1077332 - RNA, 22 nt, Human
agggcagagauuaauuaagaca

SEQ ID NO: 1077333 - RNA, 19 nt, Human
ucauggaagaaaugugaua

SEQ ID NO: 1077334 - RNA, 22 nt, Human
gagacacaggcacagaagaggc

SEQ ID NO: 1077335 - RNA, 22 nt, Human
cucaggcugugccaccugugug

SEQ ID NO: 1077336 - RNA, 22 nt, Human
gugcagggcuggcaccggaggc

SEQ ID NO: 1077337 - RNA, 22 nt, Human
uauuuuguaauuggucauagcu

SEQ ID NO: 1077338 - RNA, 21 nt, Human
ccagcccagcugugucccagc

SEQ ID NO: 1077339 - RNA, 22 nt, Human
uagcacauuguugaccagaagg

SEQ ID NO: 1077340 - RNA, 22 nt, Human
aaauuucaguuggaaugagcuc

SEQ ID NO: 1077341 - RNA, 23 nt, Human
aggagacagggaagugccuggcu

SEQ ID NO: 1077342 - RNA, 22 nt, Human
ucugcugcacaaauucaucucu

SEQ ID NO: 1077343 - RNA, 22 nt, Human
aaagcagagaucauggcuugua

SEQ ID NO: 1077344 - RNA, 22 nt, Human
aggcuggcugagcugcagccug

SEQ ID NO: 1077345 - RNA, 22 nt, Human
auauucaucguguagaaauacu

SEQ ID NO: 1077346 - RNA, 22 nt, Human
caccaggauaaaaccucuagau

SEQ ID NO: 1077347 - RNA, 22 nt, Human
gcagcuguggguuccaagucua

SEQ ID NO: 1077348 - RNA, 22 nt, Human
cgguggucauaaguggcuggcg

SEQ ID NO: 1077349 - RNA, 22 nt, Human
uccagcuugacaaaugauuuua

SEQ ID NO: 1077350 - RNA, 22 nt, Human
gagauuggccuggcuugccaac

SEQ ID NO: 1077351 - RNA, 22 nt, Human
aggcugagcugaccugguuugg

SEQ ID NO: 1077352 - RNA, 22 nt, Human
ucaagagaagugcuccacagua

SEQ ID NO: 1077353 - RNA, 22 nt, Human
ggggucccugcaccagcauguc

SEQ ID NO: 1077354 - RNA, 22 nt, Human
aggcugggaagguaaaguugua

SEQ ID NO: 1077355 - RNA, 17 nt, Human
ccagagcuacugagacu

SEQ ID NO: 1077356 - RNA, 22 nt, Human
gauucuuuacaucucugcugac

SEQ ID NO: 1077357 - RNA, 22 nt, Human
uuaaucacagauauuaaacaug

SEQ ID NO: 1077358 - RNA, 21 nt, Human
gacuuucuuaccagauuuuug

SEQ ID NO: 1077359 - RNA, 22 nt, Human
ucagguggcuucggggaguggc

SEQ ID NO: 1077360 - RNA, 22 nt, Human
aggccagcucacccuggcuccu

SEQ ID NO: 1077361 - RNA, 22 nt, Human
augaaucagaaucugcauuuua

SEQ ID NO: 1077362 - RNA, 22 nt, Human
cuucuaggcuucucagggggca

SEQ ID NO: 1077363 - RNA, 22 nt, Human
auggacagugugaagcagauag

SEQ ID NO: 1077364 - RNA, 22 nt, Human
uugcucugauuagguggaaaca

SEQ ID NO: 1077365 - RNA, 22 nt, Human
aauguuuaauguuagugguaau

SEQ ID NO: 1077366 - RNA, 22 nt, Human
cagcgucucguugugggccucg

SEQ ID NO: 1077367 - RNA, 22 nt, Human
uucauauuugaaacagaaguua

SEQ ID NO: 1077368 - RNA, 22 nt, Human
agggugcauguuugcaagagug

SEQ ID NO: 1077369 - RNA, 22 nt, Human
cagacagcaaaucugcuugcau

SEQ ID NO: 1077370 - RNA, 22 nt, Human
aucuuucagagcuccaucaggg

SEQ ID NO: 1077371 - RNA, 22 nt, Human
agcagcugagaugguaagauuc

SEQ ID NO: 1077372 - RNA, 21 nt, Human
gaguggaacgcucuucacacc

SEQ ID NO: 1077373 - RNA, 22 nt, Human
ugcagugauuaaaguguuaaau

SEQ ID NO: 1077374 - RNA, 21 nt, Human
aggcugcuggcucaggguccu

SEQ ID NO: 1077375 - RNA, 22 nt, Human
uagaaacagaaaacuguaauag

SEQ ID NO: 1077376 - RNA, 18 nt, Human
cagggcuguggggucacu

SEQ ID NO: 1077377 - RNA, 22 nt, Human
agcagggcuuuggcuggcuuuc

SEQ ID NO: 1077378 - RNA, 22 nt, Human
uccucuucuaagcucauucagg

SEQ ID NO: 1077379 - RNA, 22 nt, Human
gugagcuguuggaguggcagag

SEQ ID NO: 1077380 - RNA, 22 nt, Human
agagugguggccguggugucac

SEQ ID NO: 1077381 - RNA, 22 nt, Human
uccuucagcucucuauuuagau

SEQ ID NO: 1077382 - RNA, 22 nt, Human
uuauccaacaugacuuaugucc

SEQ ID NO: 1077383 - RNA, 22 nt, Human
uccauuggucucugugcccagg

SEQ ID NO: 1077384 - RNA, 22 nt, Human
gcugagcucccagcaguaucug

SEQ ID NO: 1077385 - RNA, 22 nt, Human
uaacugcucagugaguauuuuu

SEQ ID NO: 1077386 - RNA, 22 nt, Human
uuguuuuuagagaagcccugaa

SEQ ID NO: 1077387 - RNA, 22 nt, Human
auggaauauagucuuauaucuc

SEQ ID NO: 1077388 - RNA, 19 nt, Human
cacauuuugagucugagau

SEQ ID NO: 1077389 - RNA, 22 nt, Human
aaugauaugcaaauuaucauca

SEQ ID NO: 1077390 - RNA, 22 nt, Human
uuuguguggcguuggccggcgg

SEQ ID NO: 1077391 - RNA, 22 nt, Human
uacuacuuucccccacauauuu

SEQ ID NO: 1077392 - RNA, 22 nt, Human
auccaagucagggauaguuuga

SEQ ID NO: 1077393 - RNA, 20 nt, Human
uuuuauauguaggguauaug

SEQ ID NO: 1077394 - RNA, 22 nt, Human
uaccugggaagugggaccugag

SEQ ID NO: 1077395 - RNA, 22 nt, Human
uggaacacaucucgcugcaggg

SEQ ID NO: 1077396 - RNA, 22 nt, Human
gcugccuggagcucagccugcc

SEQ ID NO: 1077397 - RNA, 22 nt, Human
ccaggcucaggugcgagagaca

SEQ ID NO: 1077398 - RNA, 22 nt, Human
agaauuagucacaauuauagga

SEQ ID NO: 1077399 - RNA, 22 nt, Human
cagagccuaaaacgacuccacu

SEQ ID NO: 1077400 - RNA, 22 nt, Human
ucaguuuuaagguuugagaauu

SEQ ID NO: 1077401 - RNA, 22 nt, Human
aaauacuguugaaugaaguaag

SEQ ID NO: 1077402 - RNA, 22 nt, Human
ucaauuaagaggcuaaguuacu

SEQ ID NO: 1077403 - RNA, 22 nt, Human
cagcugcccaggccaccuggag

SEQ ID NO: 1077404 - RNA, 22 nt, Human
cucucagacugaagggccugug

SEQ ID NO: 1077405 - RNA, 22 nt, Human
ccaggccucccuuuuccagcca

SEQ ID NO: 1077406 - RNA, 22 nt, Human
ucuuccaaaugcagcuaaagcu

SEQ ID NO: 1077407 - RNA, 22 nt, Human
aaaggccaagcaugagguggac

SEQ ID NO: 1077408 - RNA, 22 nt, Human
gccaggaaagcaaaaucaccca

SEQ ID NO: 1077409 - RNA, 22 nt, Human
uuaacagagugccuggcaugua

SEQ ID NO: 1077410 - RNA, 22 nt, Human
uaagguuucuaguuucuaaacu

SEQ ID NO: 1077411 - RNA, 21 nt, Human
uggcaggcagcuggaagcuug

SEQ ID NO: 1077412 - RNA, 22 nt, Human
aauuucagaugucauaaauaua

SEQ ID NO: 1077413 - RNA, 23 nt, Human
gugauuucagggaacagaaucag

SEQ ID NO: 1077414 - RNA, 22 nt, Human
gacagugcauuuccuggcaugg

SEQ ID NO: 1077415 - RNA, 22 nt, Human
uguacagauugaucauggagag

SEQ ID NO: 1077416 - RNA, 22 nt, Human
uggacucagaaguguucuuuua

SEQ ID NO: 1077417 - RNA, 22 nt, Human
cagauggcaacagcucugugac

SEQ ID NO: 1077418 - RNA, 22 nt, Human
agucucugcacaguaagaagca

SEQ ID NO: 1077419 - RNA, 22 nt, Human
cagggcagcuuccuuuguuagg

SEQ ID NO: 1077420 - RNA, 22 nt, Human
ucaggaugagcucauaacuaug

SEQ ID NO: 1077421 - RNA, 22 nt, Human
aacauucuuuggaggauuauuc

SEQ ID NO: 1077422 - RNA, 21 nt, Human
ggccugagcaccuguccaccu

SEQ ID NO: 1077423 - RNA, 22 nt, Human
ggaaggggagcuaaaucuacug

SEQ ID NO: 1077424 - RNA, 22 nt, Human
uagagcuggaaaacugcaggua

SEQ ID NO: 1077425 - RNA, 22 nt, Human
gcagucaguaaggcagccagaa

SEQ ID NO: 1077426 - RNA, 17 nt, Human
cagagucugucugcauc

SEQ ID NO: 1077427 - RNA, 16 nt, Human
ccuuucucugccuucc

SEQ ID NO: 1077428 - RNA, 22 nt, Human
gcccagaaguugaggcugcagu

SEQ ID NO: 1077429 - RNA, 22 nt, Human
agccuccaucucccaucuguga

SEQ ID NO: 1077430 - RNA, 20 nt, Human
agguccugguucucugggau

SEQ ID NO: 1077431 - RNA, 22 nt, Human
ugugggaagagcaguggcagca

SEQ ID NO: 1077432 - RNA, 22 nt, Human
acagaaugcguagugcauguug

SEQ ID NO: 1077433 - RNA, 22 nt, Human
uucacaaaaugguuuguugaug

SEQ ID NO: 1077434 - RNA, 22 nt, Human
uggguagggagcuggaauccua

SEQ ID NO: 1077435 - RNA, 22 nt, Human
ggaaggaggggcaaagcaguuc

SEQ ID NO: 1077436 - RNA, 22 nt, Human
cccaaggcauggcaugguggca

SEQ ID NO: 1077437 - RNA, 20 nt, Human
aauauaauucucugaauuua

SEQ ID NO: 1077438 - RNA, 22 nt, Human
cugcccugggauggucugugcg

SEQ ID NO: 1077439 - RNA, 22 nt, Human
gccugguggacacugggcauca

SEQ ID NO: 1077440 - RNA, 22 nt, Human
accaggaaacugugcccacgac

SEQ ID NO: 1077441 - RNA, 22 nt, Human
cccugccuacaggguuuucuuu

SEQ ID NO: 1077442 - RNA, 22 nt, Human
ugcauuguugaccaguugugca

SEQ ID NO: 1077443 - RNA, 21 nt, Human
cuucaauucaacacugccaug

SEQ ID NO: 1077444 - RNA, 22 nt, Human
caacauaugauuuuguauauaa

SEQ ID NO: 1077445 - RNA, 22 nt, Human
ccagggcugagcugugaccaug

SEQ ID NO: 1077446 - RNA, 22 nt, Human
ccuggcugcauuuugcuggaug

SEQ ID NO: 1077447 - RNA, 22 nt, Human
ucugggcuuuugcacuggccau

SEQ ID NO: 1077448 - RNA, 22 nt, Human
uccaggcuccccugcgugcucc

SEQ ID NO: 1077449 - RNA, 22 nt, Human
uucacagacauugcagacugaa

SEQ ID NO: 1077450 - RNA, 22 nt, Human
acauaauagguaccugaauaau

SEQ ID NO: 1077451 - RNA, 22 nt, Human
uuaaaguucauuaaaugagcca

SEQ ID NO: 1077452 - RNA, 22 nt, Human
uuacaguuuaguccaagccaga

SEQ ID NO: 1077453 - RNA, 23 nt, Human
uuuaugcagcauguagaacaugg

SEQ ID NO: 1077454 - RNA, 22 nt, Human
aaggagcugggagggacacaug

SEQ ID NO: 1077455 - RNA, 22 nt, Human
auggauaagucaaagaguaucc

SEQ ID NO: 1077456 - RNA, 22 nt, Human
accucugcaacccuggaauggg

SEQ ID NO: 1077457 - RNA, 22 nt, Human
uagauuuccucuuccucauucc

SEQ ID NO: 1077458 - RNA, 22 nt, Human
uauuucacagcagcucauuuaa

SEQ ID NO: 1077459 - RNA, 22 nt, Human
ugguaaauauguccauucucuu

SEQ ID NO: 1077460 - RNA, 22 nt, Human
uggaaacaucucugccuuuauu

SEQ ID NO: 1077461 - RNA, 22 nt, Human
ucuuggucuuucauccuucaac

SEQ ID NO: 1077462 - RNA, 22 nt, Human
cccaguggcccagcauguggug

SEQ ID NO: 1077463 - RNA, 20 nt, Human
gauacacagcacagagggcc

SEQ ID NO: 1077464 - RNA, 22 nt, Human
aggagggugauccgggcugguc

SEQ ID NO: 1077465 - RNA, 22 nt, Human
cugagggaguuccugagcccac

SEQ ID NO: 1077466 - RNA, 22 nt, Human
aggugcuguuugucagcaguuu

SEQ ID NO: 1077467 - RNA, 22 nt, Human
uuauuggaaaagggcuguaauu

SEQ ID NO: 1077468 - RNA, 17 nt, Human
ggcaggugacagacacc

SEQ ID NO: 1077469 - RNA, 22 nt, Human
uaacagaaauagaaaugagagu

SEQ ID NO: 1077470 - RNA, 22 nt, Human
gagucgagcagaaagccgucgg

SEQ ID NO: 1077471 - RNA, 22 nt, Human
ucuuugcagaauuuaacuuugc

SEQ ID NO: 1077472 - RNA, 22 nt, Human
aaaacauaaacugacagcccau

SEQ ID NO: 1077473 - RNA, 22 nt, Human
caaaaguagugaaguuguacau

SEQ ID NO: 1077474 - RNA, 22 nt, Human
aaacacagcauguccuugggga

SEQ ID NO: 1077475 - RNA, 22 nt, Human
augggaggaucacuugaggcca

SEQ ID NO: 1077476 - RNA, 22 nt, Human
uuucacaaacugaggagacaau

SEQ ID NO: 1077477 - RNA, 22 nt, Human
ucagaauuguggagaaagggga

SEQ ID NO: 1077478 - RNA, 22 nt, Human
gaaaucaaggcuacauucaggu

SEQ ID NO: 1077479 - RNA, 22 nt, Human
uaugauauucuaaauugacacc

SEQ ID NO: 1077480 - RNA, 22 nt, Human
ucuggagcaacagagcaggaca

SEQ ID NO: 1077481 - RNA, 22 nt, Human
ugauuucaaguagugacaugcu

SEQ ID NO: 1077482 - RNA, 22 nt, Human
cccaggaaaucaggcuuucuag

SEQ ID NO: 1077483 - RNA, 22 nt, Human
augcaguacugauacaugccac

SEQ ID NO: 1077484 - RNA, 22 nt, Human
aaagcaggguccaaggagaugu

SEQ ID NO: 1077485 - RNA, 22 nt, Human
aguaaacauaauuuaccuguag

SEQ ID NO: 1077486 - RNA, 22 nt, Human
agcaggcuugguccccagccuc

SEQ ID NO: 1077487 - RNA, 19 nt, Human
gaggaggcuucagcuuucu

SEQ ID NO: 1077488 - RNA, 22 nt, Human
agggcugggcugcuuguuguca

SEQ ID NO: 1077489 - RNA, 22 nt, Human
cugagcauggccgguccauggu

SEQ ID NO: 1077490 - RNA, 22 nt, Human
cugcugugccuuaaaaugcaag

SEQ ID NO: 1077491 - RNA, 22 nt, Human
ugcuucuggcagauugagugag

SEQ ID NO: 1077492 - RNA, 21 nt, Human
ucucuguguucaaggugccag

SEQ ID NO: 1077493 - RNA, 22 nt, Human
agcagagccagaauuggaccag

SEQ ID NO: 1077494 - RNA, 19 nt, Human
gggcaaagugaucguccug

SEQ ID NO: 1077495 - RNA, 22 nt, Human
acauguuagggacagaguaugu

SEQ ID NO: 1077496 - RNA, 22 nt, Human
cugggcucagcccaugcugucc

SEQ ID NO: 1077497 - RNA, 22 nt, Human
gccuaggaucaaccacaugaaa

SEQ ID NO: 1077498 - RNA, 20 nt, Human
uaacacagaaagcuuccuuc

SEQ ID NO: 1077499 - RNA, 19 nt, Human
ugagcaugcgagcugagaa

SEQ ID NO: 1077500 - RNA, 22 nt, Human
gucacacucagaaugacuagag

SEQ ID NO: 1077501 - RNA, 22 nt, Human
gccucugccaagggggcugcgg

SEQ ID NO: 1077502 - RNA, 20 nt, Human
cagagacccaggcuucagcu

SEQ ID NO: 1077503 - RNA, 22 nt, Human
acugaaauauuuagaagugaag

SEQ ID NO: 1077504 - RNA, 22 nt, Human
cuccugguucagagagcugaga

SEQ ID NO: 1077505 - RNA, 21 nt, Human
aaggccugcuuacugcuaguu

SEQ ID NO: 1077506 - RNA, 22 nt, Human
ugaaacaaaauuaagauucucg

SEQ ID NO: 1077507 - RNA, 22 nt, Human
auguaugaagcuuuguuuggga

SEQ ID NO: 1077508 - RNA, 21 nt, Human
cagaggcugagagggcaaucu

SEQ ID NO: 1077509 - RNA, 22 nt, Human
cagagccauccaggugccuguu

SEQ ID NO: 1077510 - RNA, 22 nt, Human
uuucucaaggugucauguauuu

SEQ ID NO: 1077511 - RNA, 22 nt, Human
aaaggagacuucagaucuccuu

SEQ ID NO: 1077512 - RNA, 22 nt, Human
agcuuuggagacugacuccauc

SEQ ID NO: 1077513 - RNA, 22 nt, Human
guccugggcccaggggcugccu

SEQ ID NO: 1077514 - RNA, 22 nt, Human
ucaggcugagaaaaucuggacc

SEQ ID NO: 1077515 - RNA, 22 nt, Human
uaagcaguuuuucuuguauuaa

SEQ ID NO: 1077516 - RNA, 22 nt, Human
agaaaguuuguuuuuauccaua

SEQ ID NO: 1077517 - RNA, 22 nt, Human
uaaaagagaauggauaacagag

SEQ ID NO: 1077518 - RNA, 23 nt, Human
uguaaauuuuguagucacauuuu

SEQ ID NO: 1077519 - RNA, 19 nt, Human
ggcuggcaagugacagugu

SEQ ID NO: 1077520 - RNA, 22 nt, Human
ucuggcagggucagggcccagg

SEQ ID NO: 1077521 - RNA, 22 nt, Human
gcaacacagaucuucuuuguug

SEQ ID NO: 1077522 - RNA, 22 nt, Human
uuacagugagggugacauuuac

SEQ ID NO: 1077523 - RNA, 18 nt, Human
uagauuaaaauugaauuc

SEQ ID NO: 1077524 - RNA, 23 nt, Human
auuugacagagcauagcauuucu

SEQ ID NO: 1077525 - RNA, 22 nt, Human
ucccagauucuucugugugggc

SEQ ID NO: 1077526 - RNA, 22 nt, Human
ggcccucccugagccagguggg

SEQ ID NO: 1077527 - RNA, 22 nt, Human
cacaggaagagguauacaauuc

SEQ ID NO: 1077528 - RNA, 22 nt, Human
aaguuacagucagagguuaaca

SEQ ID NO: 1077529 - RNA, 22 nt, Human
agagcugggacuuggacucaau

SEQ ID NO: 1077530 - RNA, 22 nt, Human
ucacuccucauugcugcccauu

SEQ ID NO: 1077531 - RNA, 22 nt, Human
agauaaaaugauuuucuggauc

SEQ ID NO: 1077532 - RNA, 22 nt, Human
guuaauguuaucugaagacagu

SEQ ID NO: 1077533 - RNA, 19 nt, Human
gcaggugugaauccguaga

SEQ ID NO: 1077534 - RNA, 23 nt, Human
augugcaaagugcuacaguauag

SEQ ID NO: 1077535 - RNA, 23 nt, Human
gcugggcuuacucuuucagugag

SEQ ID NO: 1077536 - RNA, 21 nt, Human
ccugcugugaucuuagugagu

SEQ ID NO: 1077537 - RNA, 22 nt, Human
gccugggugucgaucacuagug

SEQ ID NO: 1077538 - RNA, 22 nt, Human
aggagcugcagauucugccuug

SEQ ID NO: 1077539 - RNA, 22 nt, Human
ucaauucugccucuaaauauuu

SEQ ID NO: 1077540 - RNA, 22 nt, Human
uuaaagcugagcccucagaagc

SEQ ID NO: 1077541 - RNA, 22 nt, Human
ugcagcagggcccaggcacaga

SEQ ID NO: 1077542 - RNA, 22 nt, Human
uucaacuagaggugauuuugcc

SEQ ID NO: 1077543 - RNA, 23 nt, Human
uccuccuuuugcuugugcuuccc

SEQ ID NO: 1077544 - RNA, 22 nt, Human
aaacaguaaguucuaguauuau

SEQ ID NO: 1077545 - RNA, 22 nt, Human
cagucuucuaaccuagcagccu

SEQ ID NO: 1077546 - RNA, 22 nt, Human
cacaggaaucugcauuuugacc

SEQ ID NO: 1077547 - RNA, 22 nt, Human
cugggagucuggccucuggucc

SEQ ID NO: 1077548 - RNA, 22 nt, Human
ucaaaacaacacucagguguaa

SEQ ID NO: 1077549 - RNA, 22 nt, Human
aauguucugcaacuguuuucau

SEQ ID NO: 1077550 - RNA, 22 nt, Human
ucucuggaauuuugagagugac

SEQ ID NO: 1077551 - RNA, 22 nt, Human
uggggcugucccgguuuggcga

SEQ ID NO: 1077552 - RNA, 22 nt, Human
ucacuguauuuggaagggaugg

SEQ ID NO: 1077553 - RNA, 22 nt, Human
uaauguuuccagucuaugaugg

SEQ ID NO: 1077554 - RNA, 22 nt, Human
gguaugaauucacuacuuccaa

SEQ ID NO: 1077555 - RNA, 20 nt, Human
uggggucuaguuggccuggg

SEQ ID NO: 1077556 - RNA, 22 nt, Human
agagacaccgcgcaucauggcu

SEQ ID NO: 1077557 - RNA, 22 nt, Human
aaggugguuugauuaucccacu

SEQ ID NO: 1077558 - RNA, 21 nt, Human
gagcugggcgaggcuccgggg

SEQ ID NO: 1077559 - RNA, 18 nt, Human
gggaagaggaucuggccc

SEQ ID NO: 1077560 - RNA, 22 nt, Human
gcagaggagugauuaugccgug

SEQ ID NO: 1077561 - RNA, 22 nt, Human
aacuagaaaucacuacagguau

SEQ ID NO: 1077562 - RNA, 22 nt, Human
ucagggcaccaaaaaagaugcc

SEQ ID NO: 1077563 - RNA, 22 nt, Human
auaaugaaucagcauaggguga

SEQ ID NO: 1077564 - RNA, 22 nt, Human
caggugggcuugggagaacacu

SEQ ID NO: 1077565 - RNA, 22 nt, Human
gccaaugacagucucaguucug

SEQ ID NO: 1077566 - RNA, 22 nt, Human
cuggauucucaucagagccaga

SEQ ID NO: 1077567 - RNA, 22 nt, Human
uaacagaauagcagaaacagaa

SEQ ID NO: 1077568 - RNA, 22 nt, Human
ccagcugcaggggagcagugga

SEQ ID NO: 1077569 - RNA, 22 nt, Human
aaugagauguugaauuauuguu

SEQ ID NO: 1077570 - RNA, 22 nt, Human
uuugcaauuugugcugcaaaug

SEQ ID NO: 1077571 - RNA, 22 nt, Human
uaaguuuaaauguacaugaagc

SEQ ID NO: 1077572 - RNA, 22 nt, Human
ggaaggaagugaccaggauauc

SEQ ID NO: 1077573 - RNA, 22 nt, Human
aaagauacuuaauaguugucug

SEQ ID NO: 1077574 - RNA, 22 nt, Human
agccacagagguugaugugguu

SEQ ID NO: 1077575 - RNA, 22 nt, Human
uaggaaaaagaggcuggcaagg

SEQ ID NO: 1077576 - RNA, 22 nt, Human
gagacaauuucuaagaugcuuc

SEQ ID NO: 1077577 - RNA, 22 nt, Human
ugguggcuguugcagaacugag

SEQ ID NO: 1077578 - RNA, 22 nt, Human
uugucugugaaauggaaauagu

SEQ ID NO: 1077579 - RNA, 22 nt, Human
ugcuccuggaugagguacucca

SEQ ID NO: 1077580 - RNA, 22 nt, Human
acugucaauagugcugagcuug

SEQ ID NO: 1077581 - RNA, 22 nt, Human
cagcauggagacaaagugggca

SEQ ID NO: 1077582 - RNA, 22 nt, Human
acagcugacauuggcagcuauu

SEQ ID NO: 1077583 - RNA, 22 nt, Human
gaagcaaaaugucugcacauau

SEQ ID NO: 1077584 - RNA, 19 nt, Human
cugggccugcaugguuguu

SEQ ID NO: 1077585 - RNA, 22 nt, Human
ccugggcuuucaaaaccagccu

SEQ ID NO: 1077586 - RNA, 22 nt, Human
ugauuuccaaaaggcuucuaag

SEQ ID NO: 1077587 - RNA, 22 nt, Human
agccugguguggggcugcagag

SEQ ID NO: 1077588 - RNA, 22 nt, Human
gcuuccagccuuuucuccucug

SEQ ID NO: 1077589 - RNA, 22 nt, Human
uuacuuuguuugcacuucaccu

SEQ ID NO: 1077590 - RNA, 22 nt, Human
uuuccucugagugagcugggag

SEQ ID NO: 1077591 - RNA, 22 nt, Human
acuuugcugcagguuuaaagag

SEQ ID NO: 1077592 - RNA, 22 nt, Human
auuccaaaggcuggccuggagg

SEQ ID NO: 1077593 - RNA, 22 nt, Human
gcagcagaaguagaaguacagg

SEQ ID NO: 1077594 - RNA, 22 nt, Human
ugccuggguguaaagggccaac

SEQ ID NO: 1077595 - RNA, 21 nt, Human
uucccagcaccuagcacaggu

SEQ ID NO: 1077596 - RNA, 22 nt, Human
agccagggugggugaaugcuau

SEQ ID NO: 1077597 - RNA, 22 nt, Human
uugcaaauucgucacuguuaaa

SEQ ID NO: 1077598 - RNA, 22 nt, Human
cagaguguugaccauaagccca

SEQ ID NO: 1077599 - RNA, 23 nt, Human
agucucagcuggaaacauguguc

SEQ ID NO: 1077600 - RNA, 22 nt, Human
gggcuucuagaccagcagugag

SEQ ID NO: 1077601 - RNA, 22 nt, Human
agggcugcuauguugauucaga

SEQ ID NO: 1077602 - RNA, 22 nt, Human
ccaaagcaagucacaugaucaa

SEQ ID NO: 1077603 - RNA, 22 nt, Human
uugcaggauuuuagagaugaca

SEQ ID NO: 1077604 - RNA, 22 nt, Human
ugaacacacaccuauguacaaa

SEQ ID NO: 1077605 - RNA, 22 nt, Human
ugggaagaugauaauucacagu

SEQ ID NO: 1077606 - RNA, 22 nt, Human
ucagcagggagaggagaaugca

SEQ ID NO: 1077607 - RNA, 22 nt, Human
aucuucucaagcagcauccugu

SEQ ID NO: 1077608 - RNA, 22 nt, Human
uaacuacaagggcggucucugu

SEQ ID NO: 1077609 - RNA, 22 nt, Human
cauagauuuuagguuagaucga

SEQ ID NO: 1077610 - RNA, 22 nt, Human
uuauuuagucuagaugaauuuu

SEQ ID NO: 1077611 - RNA, 22 nt, Human
ccugaccuaccugaagucuaca

SEQ ID NO: 1077612 - RNA, 22 nt, Human
uucaagaagguacauuuacauc

SEQ ID NO: 1077613 - RNA, 22 nt, Human
cagggacauaagaggaacaugg

SEQ ID NO: 1077614 - RNA, 22 nt, Human
gcugcagugagccaagaucgug

SEQ ID NO: 1077615 - RNA, 22 nt, Human
aacagaauaguugauguacagu

SEQ ID NO: 1077616 - RNA, 22 nt, Human
ccagagccucgcccggagccuc

SEQ ID NO: 1077617 - RNA, 22 nt, Human
cugucuuuuuagagaguaggau

SEQ ID NO: 1077618 - RNA, 22 nt, Human
ugucucugcuuuccuugcaggg

SEQ ID NO: 1077619 - RNA, 22 nt, Human
ugcugggggugucucaccaggc

SEQ ID NO: 1077620 - RNA, 22 nt, Human
acuccagaauccuagggucagc

SEQ ID NO: 1077621 - RNA, 20 nt, Human
uuuacauuuugaaacaguga

SEQ ID NO: 1077622 - RNA, 18 nt, Human
aaggcuucaaagaguaga

SEQ ID NO: 1077623 - RNA, 22 nt, Human
uggccugguaccacauagauuu

SEQ ID NO: 1077624 - RNA, 22 nt, Human
ggacaccccggguaccaggucu

SEQ ID NO: 1077625 - RNA, 22 nt, Human
ccaggagcuggagggugcagug

SEQ ID NO: 1077626 - RNA, 23 nt, Human
cagaaauaaacugguuuguagau

SEQ ID NO: 1077627 - RNA, 22 nt, Human
ccagagggcaaaaugaagcuua

SEQ ID NO: 1077628 - RNA, 23 nt, Human
ucucccucaugccuaggccuggg

SEQ ID NO: 1077629 - RNA, 22 nt, Human
guuauuuucauuggcucagacu

SEQ ID NO: 1077630 - RNA, 21 nt, Human
cugagaccugcauuagagagg

SEQ ID NO: 1077631 - RNA, 22 nt, Human
ucugccugucuccuugaauugu

SEQ ID NO: 1077632 - RNA, 22 nt, Human
gcuggagucuggaggugugcca

SEQ ID NO: 1077633 - RNA, 22 nt, Human
ugcuuucacugauguaucauuu

SEQ ID NO: 1077634 - RNA, 22 nt, Human
cuggggcucacuuuggucaggc

SEQ ID NO: 1077635 - RNA, 22 nt, Human
agccuggaguucccaggagaag

SEQ ID NO: 1077636 - RNA, 22 nt, Human
caaggccugacugcuugucuaa

SEQ ID NO: 1077637 - RNA, 19 nt, Human
ggcaggugugcuuaugcuu

SEQ ID NO: 1077638 - RNA, 22 nt, Human
guguccuuuuaugugacugguu

SEQ ID NO: 1077639 - RNA, 22 nt, Human
gaaauacugcacacccuguaag

SEQ ID NO: 1077640 - RNA, 22 nt, Human
agcacagcuucaccgagcccau

SEQ ID NO: 1077641 - RNA, 22 nt, Human
aggcucugaucagguggcugug

SEQ ID NO: 1077642 - RNA, 22 nt, Human
uccuccugcuguuagucuugaa

SEQ ID NO: 1077643 - RNA, 22 nt, Human
gcugcucucucccuaaguuggg

SEQ ID NO: 1077644 - RNA, 22 nt, Human
aggagcagaccguaguccugca

SEQ ID NO: 1077645 - RNA, 22 nt, Human
uucuggagguuauuaggagucu

SEQ ID NO: 1077646 - RNA, 22 nt, Human
gaagauuuaagcacaauagucu

SEQ ID NO: 1077647 - RNA, 22 nt, Human
gagcagcuuaugucaagccaga

SEQ ID NO: 1077648 - RNA, 20 nt, Human
gucuccacuggggguuaacc

SEQ ID NO: 1077649 - RNA, 22 nt, Human
aguuguaagagacagauauaaa

SEQ ID NO: 1077650 - RNA, 20 nt, Human
guucucacugaucugcaggg

SEQ ID NO: 1077651 - RNA, 22 nt, Human
cuggcagcgugagcagcaucca

SEQ ID NO: 1077652 - RNA, 22 nt, Human
ucuauuagauuauucucaagga

SEQ ID NO: 1077653 - RNA, 20 nt, Human
aucaaaauccuauugagguu

SEQ ID NO: 1077654 - RNA, 22 nt, Human
ccuggcagcauugguagagauu

SEQ ID NO: 1077655 - RNA, 22 nt, Human
uucuuccucagcagggcugccu

SEQ ID NO: 1077656 - RNA, 22 nt, Human
acauugaagcugugaaaucaaa

SEQ ID NO: 1077657 - RNA, 22 nt, Human
caggcagccugcggucugcaca

SEQ ID NO: 1077658 - RNA, 22 nt, Human
uaucuguuugcucacagguguu

SEQ ID NO: 1077659 - RNA, 22 nt, Human
uauucccagccucuuucuaucu

SEQ ID NO: 1077660 - RNA, 22 nt, Human
aggacaaaggaccagaucugga

SEQ ID NO: 1077661 - RNA, 22 nt, Human
augcaacagagaaaauauugag

SEQ ID NO: 1077662 - RNA, 22 nt, Human
uuggugucuuuuuuauacaugu

SEQ ID NO: 1077663 - RNA, 22 nt, Human
gcccugugcgacucuagagguu

SEQ ID NO: 1077664 - RNA, 22 nt, Human
uaacagcauuugaaugaguaac

SEQ ID NO: 1077665 - RNA, 22 nt, Human
uggccugccucccggcuucuuu

SEQ ID NO: 1077666 - RNA, 22 nt, Human
augugagaauaacucaaaacaa

SEQ ID NO: 1077667 - RNA, 22 nt, Human
agaggcaccgucugcagcgugc

SEQ ID NO: 1077668 - RNA, 22 nt, Human
acuaaaguguuggagaaugagg

SEQ ID NO: 1077669 - RNA, 21 nt, Human
uucucaugggauaaguacaug

SEQ ID NO: 1077670 - RNA, 22 nt, Human
cugggaagaagggacaacagcg

SEQ ID NO: 1077671 - RNA, 22 nt, Human
ccuggcaccuucacagacuacu

SEQ ID NO: 1077672 - RNA, 22 nt, Human
agcuuccucaccucagaggucu

SEQ ID NO: 1077673 - RNA, 22 nt, Human
aaagcacaugaguaguguagua

SEQ ID NO: 1077674 - RNA, 20 nt, Human
augguucaggccagcugucu

SEQ ID NO: 1077675 - RNA, 22 nt, Human
aagauauuuuagaacauucacu

SEQ ID NO: 1077676 - RNA, 22 nt, Human
aucagcaagcauuuauugagug

SEQ ID NO: 1077677 - RNA, 22 nt, Human
ucaggugggcaguggguugagc

SEQ ID NO: 1077678 - RNA, 20 nt, Human
ugcacacacccuguccucca

SEQ ID NO: 1077679 - RNA, 22 nt, Human
gccagcagguggagagaucaag

SEQ ID NO: 1077680 - RNA, 22 nt, Human
gugagcaggauuucauggugua

SEQ ID NO: 1077681 - RNA, 22 nt, Human
uagaaaggauauugagaugaau

SEQ ID NO: 1077682 - RNA, 22 nt, Human
cuggcagcugugugaagaacug

SEQ ID NO: 1077683 - RNA, 22 nt, Human
ucuccugcucagaacagccuca

SEQ ID NO: 1077684 - RNA, 22 nt, Human
uugcuaaaaggugaaaagugua

SEQ ID NO: 1077685 - RNA, 22 nt, Human
uggccuggcagagcaaggccug

SEQ ID NO: 1077686 - RNA, 20 nt, Human
agugcaagaaagcacagcug

SEQ ID NO: 1077687 - RNA, 22 nt, Human
cugugggagggugagagaacca

SEQ ID NO: 1077688 - RNA, 22 nt, Human
auugcuuuuagugaaauuauau

SEQ ID NO: 1077689 - RNA, 22 nt, Human
gugaauggggcaggaaggaugg

SEQ ID NO: 1077690 - RNA, 22 nt, Human
aacauuuaugauugagguaaau

SEQ ID NO: 1077691 - RNA, 22 nt, Human
ugggacaguuguccuccacucu

SEQ ID NO: 1077692 - RNA, 22 nt, Human
ggaaacuuggcauaauuuuaag

SEQ ID NO: 1077693 - RNA, 22 nt, Human
acaggcagguugagaaacauuu

SEQ ID NO: 1077694 - RNA, 22 nt, Human
aggcccugcccagagcuccucg

SEQ ID NO: 1077695 - RNA, 19 nt, Human
ggaaacaggggccagagga

SEQ ID NO: 1077696 - RNA, 22 nt, Human
ugaaauuagaaauauguauggg

SEQ ID NO: 1077697 - RNA, 22 nt, Human
cagaggcauacucccagucuug

SEQ ID NO: 1077698 - RNA, 22 nt, Human
ugagugaggaagcgguggagga

SEQ ID NO: 1077699 - RNA, 22 nt, Human
agugcuuugaacgaaaggcuga

SEQ ID NO: 1077700 - RNA, 21 nt, Human
aggccucuucauggccaugau

SEQ ID NO: 1077701 - RNA, 22 nt, Human
uuugaaucugauauggcagcau

SEQ ID NO: 1077702 - RNA, 22 nt, Human
ugcugccaagcccgugcuccug

SEQ ID NO: 1077703 - RNA, 22 nt, Human
cugagauggaguuucgcucuuc

SEQ ID NO: 1077704 - RNA, 22 nt, Human
auucauuugcuauuguguaugg

SEQ ID NO: 1077705 - RNA, 22 nt, Human
cagccagguaugggcgugcggg

SEQ ID NO: 1077706 - RNA, 22 nt, Human
acagggcauuuccucuaugugu

SEQ ID NO: 1077707 - RNA, 22 nt, Human
aacauguauuuuccuuggcaac

SEQ ID NO: 1077708 - RNA, 17 nt, Human
guuugcaugguguuaac

SEQ ID NO: 1077709 - RNA, 22 nt, Human
uugaagcaaauucugugcagua

SEQ ID NO: 1077710 - RNA, 22 nt, Human
ggagagagaugccgccuugcuc

SEQ ID NO: 1077711 - RNA, 20 nt, Human
ugcucuggggguggagagac

SEQ ID NO: 1077712 - RNA, 22 nt, Human
ugguccugagcaccagccugac

SEQ ID NO: 1077713 - RNA, 22 nt, Human
caggccugggcuucggggcuga

SEQ ID NO: 1077714 - RNA, 22 nt, Human
ugguggggauucccucccuggc

SEQ ID NO: 1077715 - RNA, 20 nt, Human
ugcagguguuggagaaggua

SEQ ID NO: 1077716 - RNA, 22 nt, Human
cugcuuuaauguaagauauacc

SEQ ID NO: 1077717 - RNA, 22 nt, Human
uggcaacaugucgaagugcugu

SEQ ID NO: 1077718 - RNA, 22 nt, Human
guucauuuuuacuuugaucuac

SEQ ID NO: 1077719 - RNA, 22 nt, Human
uccaggccacauggauggcgau

SEQ ID NO: 1077720 - RNA, 22 nt, Human
ucaauguucaaguaugacaaug

SEQ ID NO: 1077721 - RNA, 18 nt, Human
cgcccugcuauaaaugac

SEQ ID NO: 1077722 - RNA, 22 nt, Human
cagcagggggcagcgcagauca

SEQ ID NO: 1077723 - RNA, 21 nt, Human
gcccagcaaggugagaaggcc

SEQ ID NO: 1077724 - RNA, 22 nt, Human
uaauugaacuaacaugcaaaca

SEQ ID NO: 1077725 - RNA, 21 nt, Human
ucccucagaagguagccaagc

SEQ ID NO: 1077726 - RNA, 22 nt, Human
ugugcccauuacacagaggcau

SEQ ID NO: 1077727 - RNA, 22 nt, Human
aaagauuuaugaaguucaauua

SEQ ID NO: 1077728 - RNA, 22 nt, Human
gaggccuggugugucucccgcu

SEQ ID NO: 1077729 - RNA, 22 nt, Human
guucaaauucuaugaaauaugu

SEQ ID NO: 1077730 - RNA, 22 nt, Human
auaaagaggauguauuuacagc

SEQ ID NO: 1077731 - RNA, 22 nt, Human
agcagugggugacagagcugag

SEQ ID NO: 1077732 - RNA, 22 nt, Human
acagagcuucccagccugagca

SEQ ID NO: 1077733 - RNA, 22 nt, Human
ggcagccauggacacuggcuag

SEQ ID NO: 1077734 - RNA, 22 nt, Human
gauggcagcagcagccagggau

SEQ ID NO: 1077735 - RNA, 22 nt, Human
aagcaggcauuccagagacaau

SEQ ID NO: 1077736 - RNA, 18 nt, Human
gagucuuuguuacugcug

SEQ ID NO: 1077737 - RNA, 22 nt, Human
uggacaguauugugaagcaggc

SEQ ID NO: 1077738 - RNA, 21 nt, Human
gcuggcugucccagggaagca

SEQ ID NO: 1077739 - RNA, 22 nt, Human
auucuuuucccaacugcuuuaa

SEQ ID NO: 1077740 - RNA, 22 nt, Human
aaggaagagaauccuucucaga

SEQ ID NO: 1077741 - RNA, 22 nt, Human
uccuggagagugggcgagcaca

SEQ ID NO: 1077742 - RNA, 22 nt, Human
cuucuggaggcuccagggaggu

SEQ ID NO: 1077743 - RNA, 22 nt, Human
ucugggagagcugcugucagag

SEQ ID NO: 1077744 - RNA, 22 nt, Human
gccagagcacaggcugguagua

SEQ ID NO: 1077745 - RNA, 22 nt, Human
ggcagugaacagaaaugcagaa

SEQ ID NO: 1077746 - RNA, 22 nt, Human
ugggcuccggcggccucaggcu

SEQ ID NO: 1077747 - RNA, 22 nt, Human
cugaaguggacaaauggagugg

SEQ ID NO: 1077748 - RNA, 22 nt, Human
ccucuguccuggggaguggagc

SEQ ID NO: 1077749 - RNA, 22 nt, Human
caagaucaaggugucagcaggu

SEQ ID NO: 1077750 - RNA, 22 nt, Human
caagaucaagguaucagcagau

SEQ ID NO: 1077751 - RNA, 20 nt, Human
uuucacaucugucccuuuaa

SEQ ID NO: 1077752 - RNA, 22 nt, Human
gcaggccuuggcaaugagccug

SEQ ID NO: 1077753 - RNA, 21 nt, Human
agcagcugggcaacauggagg

SEQ ID NO: 1077754 - RNA, 22 nt, Human
uucauugucucuguuugccuuc

SEQ ID NO: 1077755 - RNA, 22 nt, Human
aguggcagggcuggcugcugca

SEQ ID NO: 1077756 - RNA, 22 nt, Human
agccacccuaccagcccugaaa

SEQ ID NO: 1077757 - RNA, 22 nt, Human
cucucugggcccaguuggcacc

SEQ ID NO: 1077758 - RNA, 22 nt, Human
auauguccaccuguaugcuaaa

SEQ ID NO: 1077759 - RNA, 23 nt, Human
uguaaacaucacccccuggaguu

SEQ ID NO: 1077760 - RNA, 22 nt, Human
cuggagccggcgagccccagcc

SEQ ID NO: 1077761 - RNA, 22 nt, Human
ucaggccucagcagcccacagg

SEQ ID NO: 1077762 - RNA, 22 nt, Human
uaaugccuagauuauucuguuu

SEQ ID NO: 1077763 - RNA, 20 nt, Human
ucagugauuaucucugagug

SEQ ID NO: 1077764 - RNA, 22 nt, Human
acugggccuugccauggcagcc

SEQ ID NO: 1077765 - RNA, 22 nt, Human
aucugaaacucugacauugucu

SEQ ID NO: 1077766 - RNA, 22 nt, Human
uauuuacccuggcagcuguagc

SEQ ID NO: 1077767 - RNA, 18 nt, Human
gcuguucuucgcacuggc

SEQ ID NO: 1077768 - RNA, 22 nt, Human
acauuuaaugauccuacuguga

SEQ ID NO: 1077769 - RNA, 22 nt, Human
uuaauugagccagaaaguaucu

SEQ ID NO: 1077770 - RNA, 22 nt, Human
ccaggacaggaguuggcuucgc

SEQ ID NO: 1077771 - RNA, 20 nt, Human
uuggaacaguggaucagcag

SEQ ID NO: 1077772 - RNA, 22 nt, Human
uuccagaggcucuaggggagaa

SEQ ID NO: 1077773 - RNA, 20 nt, Human
uccaagcccuccuuccauuc

SEQ ID NO: 1077774 - RNA, 22 nt, Human
auguaauuuauguuauccauaa

SEQ ID NO: 1077775 - RNA, 22 nt, Human
aaacaccaagagcuagcuauua

SEQ ID NO: 1077776 - RNA, 22 nt, Human
uuccagccuuuauccauccaga

SEQ ID NO: 1077777 - RNA, 22 nt, Human
ugcagggcuccuggcuccaauc

SEQ ID NO: 1077778 - RNA, 22 nt, Human
uucucagaugauucagauaaac

SEQ ID NO: 1077779 - RNA, 22 nt, Human
uggcucagaacuacuucuaguu

SEQ ID NO: 1077780 - RNA, 22 nt, Human
ugagcagaaaagaaugcugagc

SEQ ID NO: 1077781 - RNA, 22 nt, Human
ggccccuggcaccaggcugauu

SEQ ID NO: 1077782 - RNA, 19 nt, Human
cuucauucuucagcuuuug

SEQ ID NO: 1077783 - RNA, 22 nt, Human
ugccuucaaucaggauggucuc

SEQ ID NO: 1077784 - RNA, 22 nt, Human
uucugcauugacuuuuauuucc

SEQ ID NO: 1077785 - RNA, 22 nt, Human
agcauccaacaggagggaaggg

SEQ ID NO: 1077786 - RNA, 17 nt, Human
agcaggcugcagaggcc

SEQ ID NO: 1077787 - RNA, 22 nt, Human
ccaaaauuauuacauuuguagg

SEQ ID NO: 1077788 - RNA, 22 nt, Human
aauguuucuggauauugugggu

SEQ ID NO: 1077789 - RNA, 22 nt, Human
aaagcuuuguaaauaaacaggu

SEQ ID NO: 1077790 - RNA, 22 nt, Human
aaagaacaauguggaaucuccu

SEQ ID NO: 1077791 - RNA, 20 nt, Human
agauggugaaggccagggag

SEQ ID NO: 1077792 - RNA, 22 nt, Human
acagaauauuguaagugccacu

SEQ ID NO: 1077793 - RNA, 18 nt, Human
ccauuucaugauuauuac

SEQ ID NO: 1077794 - RNA, 21 nt, Human
ccuauugaauauaggaagauu

SEQ ID NO: 1077795 - RNA, 22 nt, Human
augccacugacauggacaauuu

SEQ ID NO: 1077796 - RNA, 22 nt, Human
augaaaacuuuagccucauuag

SEQ ID NO: 1077797 - RNA, 22 nt, Human
aucacgucaugguuugaucugg

SEQ ID NO: 1077798 - RNA, 22 nt, Human
cagagagaggccacugcuauua

SEQ ID NO: 1077799 - RNA, 22 nt, Human
uucucagguagugcugaugcug

SEQ ID NO: 1077800 - RNA, 22 nt, Human
gucaauauagaucaaugcacag

SEQ ID NO: 1077801 - RNA, 22 nt, Human
ggcuguggcauuaggugaggcc

SEQ ID NO: 1077802 - RNA, 22 nt, Human
aaugaacacagcccucuacuuu

SEQ ID NO: 1077803 - RNA, 22 nt, Human
caaauauuccagguacaucccu

SEQ ID NO: 1077804 - RNA, 23 nt, Human
aggagcacuuucaguuuguaaag

SEQ ID NO: 1077805 - RNA, 22 nt, Human
ucaggcagguuggcugcagguc

SEQ ID NO: 1077806 - RNA, 22 nt, Human
agagugagggggcacugagacg

SEQ ID NO: 1077807 - RNA, 22 nt, Human
uauacacauaucuucuaggccu

SEQ ID NO: 1077808 - RNA, 22 nt, Human
uagggcaguuauaacauuagug

SEQ ID NO: 1077809 - RNA, 22 nt, Human
ucuucagauugcacugagcaag

SEQ ID NO: 1077810 - RNA, 22 nt, Human
ugagagggcccagagcacacca

SEQ ID NO: 1077811 - RNA, 22 nt, Human
ugaacacauuucuggccaauuu

SEQ ID NO: 1077812 - RNA, 22 nt, Human
ucaggcucaggaauguguuuau

SEQ ID NO: 1077813 - RNA, 22 nt, Human
ugugagacaggaccuguugacu

SEQ ID NO: 1077814 - RNA, 22 nt, Human
cacauauuugaugaagcuuugu

SEQ ID NO: 1077815 - RNA, 22 nt, Human
uuuuuaaugcagucugagacau

SEQ ID NO: 1077816 - RNA, 22 nt, Human
augcaagagauggacuuguguu

SEQ ID NO: 1077817 - RNA, 22 nt, Human
cagcuggaugggagaccauguu

SEQ ID NO: 1077818 - RNA, 22 nt, Human
agucccaggcagccgagccggu

SEQ ID NO: 1077819 - RNA, 23 nt, Human
gaaaucuagucauuuuuagucug

SEQ ID NO: 1077820 - RNA, 22 nt, Human
ugcccccugguggccagagccg

SEQ ID NO: 1077821 - RNA, 22 nt, Human
aacuucuaaucuguacaguuuu

SEQ ID NO: 1077822 - RNA, 22 nt, Human
cucaagucagaaauaaaagcau

SEQ ID NO: 1077823 - RNA, 22 nt, Human
uaaagcaggccacauaugugau

SEQ ID NO: 1077824 - RNA, 22 nt, Human
ugcacacauacaugggaagugc

SEQ ID NO: 1077825 - RNA, 22 nt, Human
gcagggcagagggagaaucucu

SEQ ID NO: 1077826 - RNA, 22 nt, Human
cuggccuuuagccccagugucu

SEQ ID NO: 1077827 - RNA, 21 nt, Human
aguguguguggaaugagaaua

SEQ ID NO: 1077828 - RNA, 22 nt, Human
gcacaggcacagagggccacug

SEQ ID NO: 1077829 - RNA, 22 nt, Human
gaaggcuaaaggggcagagguu

SEQ ID NO: 1077830 - RNA, 22 nt, Human
acagaauauuuuauuuagauca

SEQ ID NO: 1077831 - RNA, 22 nt, Human
aggcagcaagauuauuuaaucc

SEQ ID NO: 1077832 - RNA, 22 nt, Human
cacaggaaagucagccagaaga

SEQ ID NO: 1077833 - RNA, 22 nt, Human
uuuauuugaaucaggggagaau

SEQ ID NO: 1077834 - RNA, 22 nt, Human
agggccucgaaggcagagggau

SEQ ID NO: 1077835 - RNA, 22 nt, Human
cucccaggcacagggaggagcc

SEQ ID NO: 1077836 - RNA, 22 nt, Human
cagcaggaccauugaggcauca

SEQ ID NO: 1077837 - RNA, 19 nt, Human
uuggaaggagccagagugg

SEQ ID NO: 1077838 - RNA, 22 nt, Human
uuuuuguucccagagaauuugu

SEQ ID NO: 1077839 - RNA, 22 nt, Human
gaagcccagcaaacugugauca

SEQ ID NO: 1077840 - RNA, 22 nt, Human
caggacacauuucuuguucagg

SEQ ID NO: 1077841 - RNA, 22 nt, Human
ugggagcucagaaagggagguc

SEQ ID NO: 1077842 - RNA, 19 nt, Human
auuuuucuuccucugugca

SEQ ID NO: 1077843 - RNA, 22 nt, Human
agaaaugucaaguguucuuguu

SEQ ID NO: 1077844 - RNA, 22 nt, Human
cuauuuguaaagugccuggugu

SEQ ID NO: 1077845 - RNA, 22 nt, Human
gaugagugaggacaggguggca

SEQ ID NO: 1077846 - RNA, 20 nt, Human
uuguuucugcuauuuucuaa

SEQ ID NO: 1077847 - RNA, 17 nt, Human
ucucaggggcuagcccu

SEQ ID NO: 1077848 - RNA, 22 nt, Human
ucucugggauaaacugggccag

SEQ ID NO: 1077849 - RNA, 22 nt, Human
uccacaauggcagagaaauguc

SEQ ID NO: 1077850 - RNA, 22 nt, Human
agggccagaaucccucagucua

SEQ ID NO: 1077851 - RNA, 22 nt, Human
ccucacugaagaggugacauuu

SEQ ID NO: 1077852 - RNA, 22 nt, Human
ucauuaagaaaugaggaguccc

SEQ ID NO: 1077853 - RNA, 22 nt, Human
ucagacaaguaaaauaauguaa

SEQ ID NO: 1077854 - RNA, 22 nt, Human
agggagugguuaagaaggugca

SEQ ID NO: 1077855 - RNA, 22 nt, Human
guuuguguaacaugaugaugau

SEQ ID NO: 1077856 - RNA, 22 nt, Human
ucaaagaauguuaugaggguag

SEQ ID NO: 1077857 - RNA, 22 nt, Human
uguaacaguaguuacuauucuu

SEQ ID NO: 1077858 - RNA, 20 nt, Human
uuuauucagccuacccucuu

SEQ ID NO: 1077859 - RNA, 22 nt, Human
agcuagagaaugacagagucug

SEQ ID NO: 1077860 - RNA, 22 nt, Human
gcugagagcaaggacaaagcau

SEQ ID NO: 1077861 - RNA, 23 nt, Human
uggccuggagagaaaagaugagu

SEQ ID NO: 1077862 - RNA, 22 nt, Human
augcuucagugcuaccuucaaa

SEQ ID NO: 1077863 - RNA, 22 nt, Human
aggcuggaguacaguggcuauu

SEQ ID NO: 1077864 - RNA, 22 nt, Human
gaaugaauagguguccagaugg

SEQ ID NO: 1077865 - RNA, 20 nt, Human
gcagugauuugucuauguuu

SEQ ID NO: 1077866 - RNA, 22 nt, Human
agcagcuucuuucacuccugga

SEQ ID NO: 1077867 - RNA, 22 nt, Human
cguaugaaauuuuugacauuug

SEQ ID NO: 1077868 - RNA, 22 nt, Human
ugaagggcaaccccaggcccag

SEQ ID NO: 1077869 - RNA, 22 nt, Human
aggugccaacaguauuucugcc

SEQ ID NO: 1077870 - RNA, 22 nt, Human
uucaaugaggauagaacuggau

SEQ ID NO: 1077871 - RNA, 22 nt, Human
agcagguggucuguugcugcug

SEQ ID NO: 1077872 - RNA, 18 nt, Human
ugcccagaaaagcaggga

SEQ ID NO: 1077873 - RNA, 21 nt, Human
gagagggcauuauaggaagug

SEQ ID NO: 1077874 - RNA, 22 nt, Human
uuucaaagaccauuaacuauca

SEQ ID NO: 1077875 - RNA, 22 nt, Human
ucuccugguuuguuaaauaauu

SEQ ID NO: 1077876 - RNA, 22 nt, Human
ucagggaccccucugaguggag

SEQ ID NO: 1077877 - RNA, 22 nt, Human
cuccuuccugguuagcaccuua

SEQ ID NO: 1077878 - RNA, 22 nt, Human
ggguuggggcccagcagucugc

SEQ ID NO: 1077879 - RNA, 22 nt, Human
ugggccuucuaaucuggucccu

SEQ ID NO: 1077880 - RNA, 22 nt, Human
ggaugcccacuaucugcuggcu

SEQ ID NO: 1077881 - RNA, 22 nt, Human
gggaccugccaaggccacccag

SEQ ID NO: 1077882 - RNA, 22 nt, Human
caacauauuuuccaagagugaa

SEQ ID NO: 1077883 - RNA, 22 nt, Human
cagagccaacgccaccugccca

SEQ ID NO: 1077884 - RNA, 22 nt, Human
gaugaagccugacuucucggug

SEQ ID NO: 1077885 - RNA, 22 nt, Human
uucccagauuggagggcagggg

SEQ ID NO: 1077886 - RNA, 23 nt, Human
ugauuacaggaaguucaaguguu

SEQ ID NO: 1077887 - RNA, 23 nt, Human
uagauguuuggggaacuuugccc

SEQ ID NO: 1077888 - RNA, 22 nt, Human
aaaacuacauuugacauuuugu

SEQ ID NO: 1077889 - RNA, 22 nt, Human
cugcuuauggagaugaguaaga

SEQ ID NO: 1077890 - RNA, 22 nt, Human
guccucugggagccuugagccu

SEQ ID NO: 1077891 - RNA, 20 nt, Human
cuuggccuacuuagcuuugu

SEQ ID NO: 1077892 - RNA, 22 nt, Human
cugcaggcccccuuccuggagu

SEQ ID NO: 1077893 - RNA, 22 nt, Human
uaagcagaaaaagugggaguua

SEQ ID NO: 1077894 - RNA, 22 nt, Human
cugccacuuacuaggcauggug

SEQ ID NO: 1077895 - RNA, 22 nt, Human
gauuucuguggcuuguacauau

SEQ ID NO: 1077896 - RNA, 22 nt, Human
aagaaucugacauaauuuccug

SEQ ID NO: 1077897 - RNA, 21 nt, Human
uccucugcagugagguggccu

SEQ ID NO: 1077898 - RNA, 22 nt, Human
cauuuagagaagauuacaagga

SEQ ID NO: 1077899 - RNA, 22 nt, Human
acaaaguuaacaguuggauagu

SEQ ID NO: 1077900 - RNA, 22 nt, Human
aucuggcuuuuaccccacggcc

SEQ ID NO: 1077901 - RNA, 22 nt, Human
uuuguuuagaaagagauuggug

SEQ ID NO: 1077902 - RNA, 18 nt, Human
ugggcugccuggccucug

SEQ ID NO: 1077903 - RNA, 22 nt, Human
gaggguggguuucuugcacguc

SEQ ID NO: 1077904 - RNA, 22 nt, Human
uuucuaaggugagguagaaaau

SEQ ID NO: 1077905 - RNA, 22 nt, Human
uaggugugggcucaggaaugug

SEQ ID NO: 1077906 - RNA, 19 nt, Human
cugaaaaacauucucagga

SEQ ID NO: 1077907 - RNA, 22 nt, Human
acuguucauuuggauuucucug

SEQ ID NO: 1077908 - RNA, 22 nt, Human
acacacugggcaugguuuaugc

SEQ ID NO: 1077909 - RNA, 22 nt, Human
gccugccccuuccugggcaggg

SEQ ID NO: 1077910 - RNA, 22 nt, Human
agcagguguuagggauccaaug

SEQ ID NO: 1077911 - RNA, 22 nt, Human
acauuaaaaaauguugcaugaa

SEQ ID NO: 1077912 - RNA, 22 nt, Human
ucagaaagguugagucaugugc

SEQ ID NO: 1077913 - RNA, 22 nt, Human
auaugcuuacagcuuaaaaucc

SEQ ID NO: 1077914 - RNA, 21 nt, Human
gucagcagauccagcacuugu

SEQ ID NO: 1077915 - RNA, 22 nt, Human
uccagcagcccgaaggcccauc

SEQ ID NO: 1077916 - RNA, 22 nt, Human
ucuggcucauacaagccugcaa

SEQ ID NO: 1077917 - RNA, 22 nt, Human
ggcuucugagugcucugcuguu

SEQ ID NO: 1077918 - RNA, 22 nt, Human
acagacauggaccaagcacugu

SEQ ID NO: 1077919 - RNA, 22 nt, Human
gugcucaggaagcuguuccugc

SEQ ID NO: 1077920 - RNA, 22 nt, Human
ccacauuuuugauacucucacu

SEQ ID NO: 1077921 - RNA, 22 nt, Human
agagugauucuaguuagggaau

SEQ ID NO: 1077922 - RNA, 22 nt, Human
uaucuguucaauggaagaugac

SEQ ID NO: 1077923 - RNA, 22 nt, Human
uacauuguacuuacaaauagug

SEQ ID NO: 1077924 - RNA, 22 nt, Human
ucugaaauuguuaguaaaaaug

SEQ ID NO: 1077925 - RNA, 22 nt, Human
gccacauagaggaggauauuaa

SEQ ID NO: 1077926 - RNA, 20 nt, Human
caugccugcugguaucuggc

SEQ ID NO: 1077927 - RNA, 22 nt, Human
caaugguggugucagaagagau

SEQ ID NO: 1077928 - RNA, 22 nt, Human
aucuagaaaaggugacuaaaau

SEQ ID NO: 1077929 - RNA, 22 nt, Human
gccuggcacucaaucaucugcu

SEQ ID NO: 1077930 - RNA, 21 nt, Human
uuugaaagcuacaucuauagc

SEQ ID NO: 1077931 - RNA, 18 nt, Human
cagagugggccaagagac

SEQ ID NO: 1077932 - RNA, 22 nt, Human
ggaaaucaaggggacaaauugu

SEQ ID NO: 1077933 - RNA, 22 nt, Human
aacauugaaauauuugcaauag

SEQ ID NO: 1077934 - RNA, 22 nt, Human
ccaggagcccugccacaauggu

SEQ ID NO: 1077935 - RNA, 22 nt, Human
cuggcugcaggaaggagugggc

SEQ ID NO: 1077936 - RNA, 22 nt, Human
gauuuccuugcauauugguaau

SEQ ID NO: 1077937 - RNA, 23 nt, Human
uauuacaauuggucuuauuaaga

SEQ ID NO: 1077938 - RNA, 22 nt, Human
gggacagacccaugggccaggu

SEQ ID NO: 1077939 - RNA, 22 nt, Human
gaacuucagaaucagcauaucu

SEQ ID NO: 1077940 - RNA, 22 nt, Human
ccuuucaaaguuuugccaugcu

SEQ ID NO: 1077941 - RNA, 22 nt, Human
cugcuguguugccagugucacc

SEQ ID NO: 1077942 - RNA, 22 nt, Human
ucacauuuuuuacuggacuuaa

SEQ ID NO: 1077943 - RNA, 22 nt, Human
agcagcaauggaaagcaacaca

SEQ ID NO: 1077944 - RNA, 22 nt, Human
aucaacauggcaaugcccaucu

SEQ ID NO: 1077945 - RNA, 22 nt, Human
ggcaggcaagucugcucuguga

SEQ ID NO: 1077946 - RNA, 22 nt, Human
ucucaguguguuuucucucaga

SEQ ID NO: 1077947 - RNA, 22 nt, Human
ccaaacaaauccccauucuuag

SEQ ID NO: 1077948 - RNA, 22 nt, Human
aguagaaagaaggcacugggcc

SEQ ID NO: 1077949 - RNA, 22 nt, Human
caggaaccugugcguagggaug

SEQ ID NO: 1077950 - RNA, 22 nt, Human
caagagcuagacuuugucagga

SEQ ID NO: 1077951 - RNA, 22 nt, Human
uacuuuuuaugauaagaacuga

SEQ ID NO: 1077952 - RNA, 22 nt, Human
augggcugacaagacaugcaua

SEQ ID NO: 1077953 - RNA, 22 nt, Human
agcuggggguuggauaagggua

SEQ ID NO: 1077954 - RNA, 22 nt, Human
auuccacuuuaugucuguauga

SEQ ID NO: 1077955 - RNA, 23 nt, Human
gccugccugaccugugcaaaguc

SEQ ID NO: 1077956 - RNA, 22 nt, Human
gcaagcuggcuguuagaggaug

SEQ ID NO: 1077957 - RNA, 22 nt, Human
aagcuggacucugccauuuacu

SEQ ID NO: 1077958 - RNA, 22 nt, Human
cucacagaugcugugggucagg

SEQ ID NO: 1077959 - RNA, 22 nt, Human
aggugggcaaugaggccugagu

SEQ ID NO: 1077960 - RNA, 21 nt, Human
ugcugaugucagagaagcaag

SEQ ID NO: 1077961 - RNA, 22 nt, Human
caggauggucuucauuuggcuc

SEQ ID NO: 1077962 - RNA, 22 nt, Human
uuuuuaccuggaggauaaaugu

SEQ ID NO: 1077963 - RNA, 22 nt, Human
gaggcacaguguuuggucagug

SEQ ID NO: 1077964 - RNA, 22 nt, Human
cucaggauuaaggaaucuaaau

SEQ ID NO: 1077965 - RNA, 22 nt, Human
acacagaugcuauuuagucucu

SEQ ID NO: 1077966 - RNA, 22 nt, Human
uuuguacauccuaauucugagu

SEQ ID NO: 1077967 - RNA, 23 nt, Human
uggccucuccccaccuggcagaa

SEQ ID NO: 1077968 - RNA, 22 nt, Human
gcugugcuggaaggggaccugc

SEQ ID NO: 1077969 - RNA, 22 nt, Human
uaagaacauuuucggaaagaua

SEQ ID NO: 1077970 - RNA, 22 nt, Human
ucagggcauacucuucaagguc

SEQ ID NO: 1077971 - RNA, 22 nt, Human
aauuaauuuuguucauucaguc

SEQ ID NO: 1077972 - RNA, 23 nt, Human
uugaaagguagcuggcagcuaga

SEQ ID NO: 1077973 - RNA, 22 nt, Human
uucuggcaaggcaagccuggcu

SEQ ID NO: 1077974 - RNA, 22 nt, Human
cugcccugaccugccucagagu

SEQ ID NO: 1077975 - RNA, 22 nt, Human
auauugcaauagaugcaucauu

SEQ ID NO: 1077976 - RNA, 22 nt, Human
aguuacaacuguuugaauguca

SEQ ID NO: 1077977 - RNA, 20 nt, Human
cagggcacacugcagccucg

SEQ ID NO: 1077978 - RNA, 22 nt, Human
gaaaguacagauuccuggccag

SEQ ID NO: 1077979 - RNA, 22 nt, Human
uacacacagaggccaugggauu

SEQ ID NO: 1077980 - RNA, 22 nt, Human
gaagccacuauagauauucuaa

SEQ ID NO: 1077981 - RNA, 22 nt, Human
aaugauguauguauaaggcagg

SEQ ID NO: 1077982 - RNA, 22 nt, Human
uaguaacacacugguauuugga

SEQ ID NO: 1077983 - RNA, 22 nt, Human
cacccacauuccaucacucugc

SEQ ID NO: 1077984 - RNA, 22 nt, Human
ugcccugucuaagcugucagua

SEQ ID NO: 1077985 - RNA, 22 nt, Human
ggcagcuccaaaaggaaacacu

SEQ ID NO: 1077986 - RNA, 22 nt, Human
gagauuucuuuugaugccuguc

SEQ ID NO: 1077987 - RNA, 22 nt, Human
gagugguaggcaguguuaggaa

SEQ ID NO: 1077988 - RNA, 22 nt, Human
gggcaagcucuucagaagcucu

SEQ ID NO: 1077989 - RNA, 22 nt, Human
ucuggagcuuccucauuuacag

SEQ ID NO: 1077990 - RNA, 22 nt, Human
cccuggcuuaaaaaccucauau

SEQ ID NO: 1077991 - RNA, 22 nt, Human
uucucagaggagucgggagcug

SEQ ID NO: 1077992 - RNA, 22 nt, Human
gcugcucugcuguguaagcagg

SEQ ID NO: 1077993 - RNA, 22 nt, Human
agggcaugaagcaguggacagc

SEQ ID NO: 1077994 - RNA, 22 nt, Human
ucuagaaaguuuguacugauuu

SEQ ID NO: 1077995 - RNA, 22 nt, Human
aacaagugauauauaauggaag

SEQ ID NO: 1077996 - RNA, 22 nt, Human
aguggcagaucucuggucugga

SEQ ID NO: 1077997 - RNA, 22 nt, Human
agcagaaccugcagaccugucu

SEQ ID NO: 1077998 - RNA, 22 nt, Human
guaaaauagaauaacguggcua

SEQ ID NO: 1077999 - RNA, 22 nt, Human
cuguggcucucagaggcugcug

SEQ ID NO: 1078000 - RNA, 22 nt, Human
aaacuugauuuagaacuaaggc

SEQ ID NO: 1078001 - RNA, 22 nt, Human
cugggaggugaacagaaaaacu

SEQ ID NO: 1078002 - RNA, 22 nt, Human
aacagugucaggauuacagaua

SEQ ID NO: 1078003 - RNA, 22 nt, Human
uugggaaggcguggaagcagaa

SEQ ID NO: 1078004 - RNA, 21 nt, Human
agcaccuuacagcuauaaugg

SEQ ID NO: 1078005 - RNA, 22 nt, Human
cuauuuguacagcauucgaguu

SEQ ID NO: 1078006 - RNA, 22 nt, Human
ggcaggguuuacaauagcaaua

SEQ ID NO: 1078007 - RNA, 22 nt, Human
auggcucauuuaucuugcagcc

SEQ ID NO: 1078008 - RNA, 22 nt, Human
agaguccauaugugggaggagu

SEQ ID NO: 1078009 - RNA, 22 nt, Human
agcagcuguggggacaagggua

SEQ ID NO: 1078010 - RNA, 22 nt, Human
gcuucaugaaaaucacugguca

SEQ ID NO: 1078011 - RNA, 22 nt, Human
auuguaacaacaauaguuuagg

SEQ ID NO: 1078012 - RNA, 22 nt, Human
agggaagaaucacugggauguu

SEQ ID NO: 1078013 - RNA, 22 nt, Human
gcagcuggaagugacacucugu

SEQ ID NO: 1078014 - RNA, 22 nt, Human
uacacagauuuaaaagcaggga

SEQ ID NO: 1078015 - RNA, 22 nt, Human
gucaugccuggcuucuuagaca

SEQ ID NO: 1078016 - RNA, 22 nt, Human
cccaggagguggagguugcagu

SEQ ID NO: 1078017 - RNA, 22 nt, Human
ucacuguaucauguugcacuua

SEQ ID NO: 1078018 - RNA, 22 nt, Human
cugugccuccagucucgcuucu

SEQ ID NO: 1078019 - RNA, 22 nt, Human
uuuuaaucaugcuucuaugucc

SEQ ID NO: 1078020 - RNA, 22 nt, Human
ucaaaggcauugccaauaagua

SEQ ID NO: 1078021 - RNA, 22 nt, Human
cucaggauggaagccuacagga

SEQ ID NO: 1078022 - RNA, 22 nt, Human
gcacugcagguggguggagagg

SEQ ID NO: 1078023 - RNA, 22 nt, Human
aagucauagucuaacccagcca

SEQ ID NO: 1078024 - RNA, 20 nt, Human
gucagaggacccuagagcga

SEQ ID NO: 1078025 - RNA, 18 nt, Human
uaugugcauaugugugua

SEQ ID NO: 1078026 - RNA, 22 nt, Human
aucuccaggcauuucaagagac

SEQ ID NO: 1078027 - RNA, 22 nt, Human
ugcccugcaugcagggagcugu

SEQ ID NO: 1078028 - RNA, 21 nt, Human
ucuucaguacacuugcacgcc

SEQ ID NO: 1078029 - RNA, 22 nt, Human
ggcucaggaugagccuucucau

SEQ ID NO: 1078030 - RNA, 22 nt, Human
uaguuuuagucccauuuuacag

SEQ ID NO: 1078031 - RNA, 22 nt, Human
ugcugccucagcuuccugggcu

SEQ ID NO: 1078032 - RNA, 22 nt, Human
acagaagagcacauuuaguaug

SEQ ID NO: 1078033 - RNA, 22 nt, Human
aaggaagacacagaugaaguga

SEQ ID NO: 1078034 - RNA, 22 nt, Human
gaaacaaucaucaugugauuug

SEQ ID NO: 1078035 - RNA, 22 nt, Human
acacuucagcuccacaaacauu

SEQ ID NO: 1078036 - RNA, 22 nt, Human
uuuugcuugagugcacaaaaug

SEQ ID NO: 1078037 - RNA, 22 nt, Human
cccaggaaagugaaucuaauug

SEQ ID NO: 1078038 - RNA, 22 nt, Human
cacugaaucucaaggggagggu

SEQ ID NO: 1078039 - RNA, 23 nt, Human
agcugggccagguggucagaccu

SEQ ID NO: 1078040 - RNA, 22 nt, Human
agagaacagccuccuagagaaa

SEQ ID NO: 1078041 - RNA, 22 nt, Human
uuucacagagaauauugccuug

SEQ ID NO: 1078042 - RNA, 22 nt, Human
cagaagaaaucauuaucuggac

SEQ ID NO: 1078043 - RNA, 22 nt, Human
augcaaauuaacauauaguaga

SEQ ID NO: 1078044 - RNA, 22 nt, Human
ggaucacacaugcacuguuuga

SEQ ID NO: 1078045 - RNA, 22 nt, Human
cugggcaugaaaaggaugccag

SEQ ID NO: 1078046 - RNA, 22 nt, Human
acugucuguccugcucuccgug

SEQ ID NO: 1078047 - RNA, 21 nt, Human
gagauggcccaguagcgggcc

SEQ ID NO: 1078048 - RNA, 22 nt, Human
uaacacuugaagccauuuuugc

SEQ ID NO: 1078049 - RNA, 22 nt, Human
uuauuucauugauuucuaagac

SEQ ID NO: 1078050 - RNA, 22 nt, Human
augggcugggaauacacagggg

SEQ ID NO: 1078051 - RNA, 19 nt, Human
aauucuguuucagcagauc

SEQ ID NO: 1078052 - RNA, 22 nt, Human
uggccuggaaaaaugcagaugg

SEQ ID NO: 1078053 - RNA, 22 nt, Human
cugcuuugcauagcugccagag

SEQ ID NO: 1078054 - RNA, 22 nt, Human
acaggcuguugggguccagggu

SEQ ID NO: 1078055 - RNA, 22 nt, Human
ugcagccauuuucugccaaugc

SEQ ID NO: 1078056 - RNA, 20 nt, Human
ucugcccaccccggcuccca

SEQ ID NO: 1078057 - RNA, 22 nt, Human
cugccaucugagccaaaagugc

SEQ ID NO: 1078058 - RNA, 22 nt, Human
gaguccaggcucagaaacccgu

SEQ ID NO: 1078059 - RNA, 22 nt, Human
gccugagaguugaaguucagug

SEQ ID NO: 1078060 - RNA, 22 nt, Human
uauuuccaagcugaauccaaug

SEQ ID NO: 1078061 - RNA, 22 nt, Human
gcuggcagagagcuggugagga

SEQ ID NO: 1078062 - RNA, 22 nt, Human
agagacaagggaccucuggaga

SEQ ID NO: 1078063 - RNA, 22 nt, Human
agucuucccugugccagagugu

SEQ ID NO: 1078064 - RNA, 22 nt, Human
cuguauuuucaugccuacguac

SEQ ID NO: 1078065 - RNA, 22 nt, Human
gcaggcucacucuguuuggcuc

SEQ ID NO: 1078066 - RNA, 19 nt, Human
uuuggcacucugaaguguu

SEQ ID NO: 1078067 - RNA, 18 nt, Human
agcaaagcaagagaucac

SEQ ID NO: 1078068 - RNA, 22 nt, Human
uacugccuggagcauuggugcu

SEQ ID NO: 1078069 - RNA, 22 nt, Human
uccucagacuucccuuugugua

SEQ ID NO: 1078070 - RNA, 22 nt, Human
cugaggcaggauggccuggcug

SEQ ID NO: 1078071 - RNA, 22 nt, Human
uuuguguuuucccauacuauug

SEQ ID NO: 1078072 - RNA, 20 nt, Human
cuuuuucuccagcucugagc

SEQ ID NO: 1078073 - RNA, 22 nt, Human
ccaagcuacuuaggagucugag

SEQ ID NO: 1078074 - RNA, 22 nt, Human
cagugaggaguccagggcagag

SEQ ID NO: 1078075 - RNA, 20 nt, Human
ccagacagcaccugccuggu

SEQ ID NO: 1078076 - RNA, 22 nt, Human
gaaauacaaaugccuagauccu

SEQ ID NO: 1078077 - RNA, 22 nt, Human
agagcugguuuacucaggaauu

SEQ ID NO: 1078078 - RNA, 22 nt, Human
acucuugauugauuuagucuuu

SEQ ID NO: 1078079 - RNA, 22 nt, Human
caggcccaaaugcaaccuucuu

SEQ ID NO: 1078080 - RNA, 22 nt, Human
ggaaccaggaguuacacgaguu

SEQ ID NO: 1078081 - RNA, 22 nt, Human
aggcugcaggucugggucaugu

SEQ ID NO: 1078082 - RNA, 22 nt, Human
acaugcuaugagagauuacuuc

SEQ ID NO: 1078083 - RNA, 19 nt, Human
acagagcucucugcuucug

SEQ ID NO: 1078084 - RNA, 22 nt, Human
uccuccugucuaccaguuccug

SEQ ID NO: 1078085 - RNA, 22 nt, Human
gauuucaaagguucugcaugcc

SEQ ID NO: 1078086 - RNA, 22 nt, Human
uuccuauggcucaguugcauuu

SEQ ID NO: 1078087 - RNA, 22 nt, Human
uucucuagguuuuagaugaaga

SEQ ID NO: 1078088 - RNA, 22 nt, Human
ccaaaauauuagugcuuaagua

SEQ ID NO: 1078089 - RNA, 22 nt, Human
gugauuucagguuuuucauacu

SEQ ID NO: 1078090 - RNA, 22 nt, Human
uacagcagagugggaugcaucu

SEQ ID NO: 1078091 - RNA, 22 nt, Human
aaucaguuguccaaaguucaca

SEQ ID NO: 1078092 - RNA, 22 nt, Human
auucacagagugguuaguggua

SEQ ID NO: 1078093 - RNA, 22 nt, Human
ccuggggagaagagcuuccccc

SEQ ID NO: 1078094 - RNA, 22 nt, Human
auugcuguacacuucuagaucu

SEQ ID NO: 1078095 - RNA, 22 nt, Human
cuggcuuucucugugguguuca

SEQ ID NO: 1078096 - RNA, 22 nt, Human
gaaauauacaugaagucggcug

SEQ ID NO: 1078097 - RNA, 22 nt, Human
aaucuucacucauucagaguug

SEQ ID NO: 1078098 - RNA, 22 nt, Human
ggcagcucaccucugguccagg

SEQ ID NO: 1078099 - RNA, 22 nt, Human
acugccuggccuggccucacug

SEQ ID NO: 1078100 - RNA, 22 nt, Human
agaaugauacucuaugccaaau

SEQ ID NO: 1078101 - RNA, 22 nt, Human
cugggcugugguguggcccaaa

SEQ ID NO: 1078102 - RNA, 22 nt, Human
uacuguuuuaaaagguacuugu

SEQ ID NO: 1078103 - RNA, 22 nt, Human
ccagggcaggagaaagacucac

SEQ ID NO: 1078104 - RNA, 22 nt, Human
auuuguugcuagcagcacugau

SEQ ID NO: 1078105 - RNA, 22 nt, Human
ugcccauguuucucuguauccc

SEQ ID NO: 1078106 - RNA, 22 nt, Human
uucuuucccuuccagcagcucc

SEQ ID NO: 1078107 - RNA, 20 nt, Human
aaauuacugccacacauuuc

SEQ ID NO: 1078108 - RNA, 22 nt, Human
ugcaucaaccuaauaucagcuc

SEQ ID NO: 1078109 - RNA, 22 nt, Human
gccagaaacauacacaucacuu

SEQ ID NO: 1078110 - RNA, 22 nt, Human
aggaagugcuaagagaacauca

SEQ ID NO: 1078111 - RNA, 22 nt, Human
guuacacaggaaaacauuagca

SEQ ID NO: 1078112 - RNA, 22 nt, Human
ugccucagagugggcuugcuau

SEQ ID NO: 1078113 - RNA, 22 nt, Human
ucacagaaaagcugagcaucag

SEQ ID NO: 1078114 - RNA, 22 nt, Human
uguuuuuaucucuguguacaac

SEQ ID NO: 1078115 - RNA, 22 nt, Human
gcugcagccuucuugccauuaa

SEQ ID NO: 1078116 - RNA, 22 nt, Human
gccugagauucugcauuucuaa

SEQ ID NO: 1078117 - RNA, 22 nt, Human
aggagaauuaggaacucaagau

SEQ ID NO: 1078118 - RNA, 22 nt, Human
ugccuuuuccagcuuccaggag

SEQ ID NO: 1078119 - RNA, 22 nt, Human
acaaauccagugaacuccagug

SEQ ID NO: 1078120 - RNA, 22 nt, Human
acauugaagggaaugcaaagau

SEQ ID NO: 1078121 - RNA, 22 nt, Human
gucccaggaguugcugggccuu

SEQ ID NO: 1078122 - RNA, 22 nt, Human
gaagaauauucuugaucuuaga

SEQ ID NO: 1078123 - RNA, 22 nt, Human
ucacauuucucagcacugauga

SEQ ID NO: 1078124 - RNA, 22 nt, Human
agaggccuaaccaagauguccu

SEQ ID NO: 1078125 - RNA, 19 nt, Human
ugggcuuccccagggcaga

SEQ ID NO: 1078126 - RNA, 22 nt, Human
ccagcugauucgguggugguug

SEQ ID NO: 1078127 - RNA, 22 nt, Human
gaaggaagugcucauacuaguu

SEQ ID NO: 1078128 - RNA, 18 nt, Human
uuucucaaggcugacauu

SEQ ID NO: 1078129 - RNA, 22 nt, Human
cagaagcaaguagugauucuuu

SEQ ID NO: 1078130 - RNA, 22 nt, Human
agaggcuccuagccacuggcuu

SEQ ID NO: 1078131 - RNA, 17 nt, Human
aagacaagacaaaugca

SEQ ID NO: 1078132 - RNA, 19 nt, Human
acagcacagaaauauuuca

SEQ ID NO: 1078133 - RNA, 22 nt, Human
ugcacuggggucccagcgcacg

SEQ ID NO: 1078134 - RNA, 22 nt, Human
gcagggcauagaggcacggagg

SEQ ID NO: 1078135 - RNA, 22 nt, Human
agcuuguuuuguugaauacuua

SEQ ID NO: 1078136 - RNA, 22 nt, Human
uuucuggaggcccaagggcaga

SEQ ID NO: 1078137 - RNA, 22 nt, Human
gacugcagugaaggcacauggg

SEQ ID NO: 1078138 - RNA, 22 nt, Human
cauauuuuaguugcugaacagc

SEQ ID NO: 1078139 - RNA, 22 nt, Human
aagcacagcagagccuugcuug

SEQ ID NO: 1078140 - RNA, 22 nt, Human
cuuuggcaaugucauuuucaau

SEQ ID NO: 1078141 - RNA, 22 nt, Human
ggcucagacucccaggcccucu

SEQ ID NO: 1078142 - RNA, 22 nt, Human
ccacagcaugcaggccugacac

SEQ ID NO: 1078143 - RNA, 22 nt, Human
cuaccuaauaauuugauauuca

SEQ ID NO: 1078144 - RNA, 22 nt, Human
ccugcagguccccggaugcgca

SEQ ID NO: 1078145 - RNA, 21 nt, Human
aucuggaagaacugguaagug

SEQ ID NO: 1078146 - RNA, 22 nt, Human
aggggcuguggaaaccaacucu

SEQ ID NO: 1078147 - RNA, 22 nt, Human
aaugaagccagguagaagagaa

SEQ ID NO: 1078148 - RNA, 22 nt, Human
gagggguguggagccaucaguu

SEQ ID NO: 1078149 - RNA, 22 nt, Human
uucuagaaacacaugcaaacag

SEQ ID NO: 1078150 - RNA, 22 nt, Human
gcagcugaagcugcaguuccag

SEQ ID NO: 1078151 - RNA, 22 nt, Human
uggcaaauucaucuuuaguucu

SEQ ID NO: 1078152 - RNA, 22 nt, Human
uaucucuuuauugacaauaaaa

SEQ ID NO: 1078153 - RNA, 22 nt, Human
gcagcugucacuuucacaaugc

SEQ ID NO: 1078154 - RNA, 22 nt, Human
auacaugacucacacauucugc

SEQ ID NO: 1078155 - RNA, 22 nt, Human
auacuuugcuaguaucagugug

SEQ ID NO: 1078156 - RNA, 22 nt, Human
gaggcagcggcucacagagaaa

SEQ ID NO: 1078157 - RNA, 22 nt, Human
uccugccugagcguggaggagg

SEQ ID NO: 1078158 - RNA, 22 nt, Human
ugcccaaguccuccaccgaggu

SEQ ID NO: 1078159 - RNA, 22 nt, Human
uccuccagcaggacugaggccc

SEQ ID NO: 1078160 - RNA, 22 nt, Human
uccagugguuugaaaggggugu

SEQ ID NO: 1078161 - RNA, 22 nt, Human
cagacagaaggaaggccaacau

SEQ ID NO: 1078162 - RNA, 22 nt, Human
agguccuguuucuucccugggg

SEQ ID NO: 1078163 - RNA, 22 nt, Human
guuucuuaaaagaggaguuaga

SEQ ID NO: 1078164 - RNA, 22 nt, Human
aguaugaagaugaugaaaaaua

SEQ ID NO: 1078165 - RNA, 21 nt, Human
ugaaaugagaaugcugagcac

SEQ ID NO: 1078166 - RNA, 22 nt, Human
auacacacugcuauccuuuuuu

SEQ ID NO: 1078167 - RNA, 22 nt, Human
agcugugcacacugugaaguag

SEQ ID NO: 1078168 - RNA, 22 nt, Human
agggcugcaggcaagauauggc

SEQ ID NO: 1078169 - RNA, 22 nt, Human
uugaaggacaucuuguuucuag

SEQ ID NO: 1078170 - RNA, 22 nt, Human
ccugucagaugaaguaauugug

SEQ ID NO: 1078171 - RNA, 22 nt, Human
acauguaggagagucacaaugc

SEQ ID NO: 1078172 - RNA, 22 nt, Human
uggagcaggugcucaggguaau

SEQ ID NO: 1078173 - RNA, 22 nt, Human
cucucugguuucagcgaagggg

SEQ ID NO: 1078174 - RNA, 23 nt, Human
gugcucuucaguuuuagggucau

SEQ ID NO: 1078175 - RNA, 22 nt, Human
auuuuucaacuuuggaaauggc

SEQ ID NO: 1078176 - RNA, 22 nt, Human
aguugaaauuagaguccuggcu

SEQ ID NO: 1078177 - RNA, 22 nt, Human
uugaggagcaggaugggaggcu

SEQ ID NO: 1078178 - RNA, 22 nt, Human
ucagaucacaaaaguuucuauu

SEQ ID NO: 1078179 - RNA, 22 nt, Human
cuccagauuccguuuauucagg

SEQ ID NO: 1078180 - RNA, 22 nt, Human
aauaguccuuaguaagcuguga

SEQ ID NO: 1078181 - RNA, 22 nt, Human
gggcugaccccaccccucacuc

SEQ ID NO: 1078182 - RNA, 22 nt, Human
ccugucagcugauggcuaugua

SEQ ID NO: 1078183 - RNA, 22 nt, Human
uguuucuugauaaagcagaaaa

SEQ ID NO: 1078184 - RNA, 22 nt, Human
aaguguuucaauaauuuggacc

SEQ ID NO: 1078185 - RNA, 22 nt, Human
guccucugcccaggucaagguu

SEQ ID NO: 1078186 - RNA, 22 nt, Human
ccaggugguucaggucaccaua

SEQ ID NO: 1078187 - RNA, 22 nt, Human
ugccugugggugaugauuugau

SEQ ID NO: 1078188 - RNA, 22 nt, Human
ugugugugacaaccuaguucag

SEQ ID NO: 1078189 - RNA, 22 nt, Human
uagcagggucucaggagucagg

SEQ ID NO: 1078190 - RNA, 17 nt, Human
uucaagauauugaaaug

SEQ ID NO: 1078191 - RNA, 19 nt, Human
ugcagggcugcgccugggg

SEQ ID NO: 1078192 - RNA, 22 nt, Human
uuucuaaggugauccuuucuua

SEQ ID NO: 1078193 - RNA, 22 nt, Human
caaggcaguuccccagagggcu

SEQ ID NO: 1078194 - RNA, 22 nt, Human
cagagcagugggguuggucaga

SEQ ID NO: 1078195 - RNA, 22 nt, Human
aucugccucuucuucauugcga

SEQ ID NO: 1078196 - RNA, 19 nt, Human
gcacacaguagggcuggca

SEQ ID NO: 1078197 - RNA, 22 nt, Human
uagaaacagauguuuuugaaga

SEQ ID NO: 1078198 - RNA, 22 nt, Human
acuggaaaaccacugaaaugag

SEQ ID NO: 1078199 - RNA, 19 nt, Human
gcuggggccugaccagaca

SEQ ID NO: 1078200 - RNA, 22 nt, Human
caggugggagcggagacugauu

SEQ ID NO: 1078201 - RNA, 22 nt, Human
agggucagagaucggccaugug

SEQ ID NO: 1078202 - RNA, 22 nt, Human
uucuucaaccaucuacauaaac

SEQ ID NO: 1078203 - RNA, 22 nt, Human
acuugguuggucucacccuguu

SEQ ID NO: 1078204 - RNA, 22 nt, Human
aucaaagugaaaagugcugaug

SEQ ID NO: 1078205 - RNA, 22 nt, Human
ccuguggcugccacuuggguga

SEQ ID NO: 1078206 - RNA, 22 nt, Human
cuacaucacuuaauucuuagaa

SEQ ID NO: 1078207 - RNA, 22 nt, Human
uuuaauuagcaagccagagagc

SEQ ID NO: 1078208 - RNA, 22 nt, Human
gaauucuucugucuuuaacuga

SEQ ID NO: 1078209 - RNA, 22 nt, Human
acuggcagagguuggacaccau

SEQ ID NO: 1078210 - RNA, 22 nt, Human
uaacaucuuaacuggauacuuc

SEQ ID NO: 1078211 - RNA, 22 nt, Human
ucuguauuuuaagaugcuguuu

SEQ ID NO: 1078212 - RNA, 22 nt, Human
gccaagcuuggaaggaucaugg

SEQ ID NO: 1078213 - RNA, 22 nt, Human
aggccaggaccauuagcccaga

SEQ ID NO: 1078214 - RNA, 22 nt, Human
agcagcuccugccaugagugcu

SEQ ID NO: 1078215 - RNA, 20 nt, Human
ucaaaggcaaaggugggugu

SEQ ID NO: 1078216 - RNA, 22 nt, Human
ugugggguagcaguuuccgugu

SEQ ID NO: 1078217 - RNA, 22 nt, Human
cgguccuguacuugaugagaua

SEQ ID NO: 1078218 - RNA, 22 nt, Human
ggagaaggaauauuggaguagg

SEQ ID NO: 1078219 - RNA, 22 nt, Human
ugaaauguugguaauuuuauau

SEQ ID NO: 1078220 - RNA, 21 nt, Human
auuucacacccuccuuuuucu

SEQ ID NO: 1078221 - RNA, 22 nt, Human
cacagaauggaccaguuuuaga

SEQ ID NO: 1078222 - RNA, 19 nt, Human
ccugccugagcugucccuc

SEQ ID NO: 1078223 - RNA, 22 nt, Human
ccauggaguuccucuggucuau

SEQ ID NO: 1078224 - RNA, 22 nt, Human
uauuuccauguuagaacuaagu

SEQ ID NO: 1078225 - RNA, 22 nt, Human
agccuggauccauguggcuacc

SEQ ID NO: 1078226 - RNA, 22 nt, Human
uuacaaagagugccagagugug

SEQ ID NO: 1078227 - RNA, 22 nt, Human
gggaucagcaagccacugcacc

SEQ ID NO: 1078228 - RNA, 22 nt, Human
gcucucuggcuaguccaucggg

SEQ ID NO: 1078229 - RNA, 22 nt, Human
gcaggcugggguagccccacuu

SEQ ID NO: 1078230 - RNA, 22 nt, Human
ugguaccagggguuauuucugc

SEQ ID NO: 1078231 - RNA, 22 nt, Human
cuggggcugcgguggaggagcc

SEQ ID NO: 1078232 - RNA, 22 nt, Human
uacuuuuagccuauuugauucu

SEQ ID NO: 1078233 - RNA, 22 nt, Human
uuuugcuuuuguaacacagugu

SEQ ID NO: 1078234 - RNA, 22 nt, Human
auggauaagaacaaauaucuga

SEQ ID NO: 1078235 - RNA, 22 nt, Human
cauuguaagaggcuuugcagca

SEQ ID NO: 1078236 - RNA, 22 nt, Human
agcagcugcagagggcuccccc

SEQ ID NO: 1078237 - RNA, 22 nt, Human
gcucccagggaccgcagggcag

SEQ ID NO: 1078238 - RNA, 22 nt, Human
cuccaguaucuguaggaaaagg

SEQ ID NO: 1078239 - RNA, 22 nt, Human
uguucucucuggcugccaguac

SEQ ID NO: 1078240 - RNA, 22 nt, Human
gcagagccaggagagacccuug

SEQ ID NO: 1078241 - RNA, 22 nt, Human
caguaaauuugagggaucuaau

SEQ ID NO: 1078242 - RNA, 22 nt, Human
caggaggaacaagagguucugg

SEQ ID NO: 1078243 - RNA, 22 nt, Human
ucugcagcuuuuugguggggug

SEQ ID NO: 1078244 - RNA, 22 nt, Human
cgaggcagaggcugaaacggcu

SEQ ID NO: 1078245 - RNA, 22 nt, Human
cccagcccugaccuauuggaaa

SEQ ID NO: 1078246 - RNA, 18 nt, Human
ggcagcaagaagggaggg

SEQ ID NO: 1078247 - RNA, 23 nt, Human
uucuggauguucuagucugagag

SEQ ID NO: 1078248 - RNA, 22 nt, Human
ccuggaagucauuccucguucc

SEQ ID NO: 1078249 - RNA, 21 nt, Human
aggugccaaggagaagcaggc

SEQ ID NO: 1078250 - RNA, 22 nt, Human
aagccagggauuccugagggag

SEQ ID NO: 1078251 - RNA, 22 nt, Human
aguuucuuauucuuaguuaugu

SEQ ID NO: 1078252 - RNA, 22 nt, Human
uggccugguuauauugcuauca

SEQ ID NO: 1078253 - RNA, 22 nt, Human
ugcugcucuguaaagugaugag

SEQ ID NO: 1078254 - RNA, 22 nt, Human
uucauugugauucuuggcuagc

SEQ ID NO: 1078255 - RNA, 22 nt, Human
cagggacagacagauauauuug

SEQ ID NO: 1078256 - RNA, 22 nt, Human
auuuuuuagccaagacucugca

SEQ ID NO: 1078257 - RNA, 22 nt, Human
ucacuuuggauuauguaauuuc

SEQ ID NO: 1078258 - RNA, 22 nt, Human
uggcauuuagaaaacaacaugu

SEQ ID NO: 1078259 - RNA, 22 nt, Human
ggcuggcagaggggagucugug

SEQ ID NO: 1078260 - RNA, 22 nt, Human
cacacaucuuaucccaguuauu

SEQ ID NO: 1078261 - RNA, 22 nt, Human
gggcuggaccgcucgccucccu

SEQ ID NO: 1078262 - RNA, 18 nt, Human
ucuuuggacaacuacugg

SEQ ID NO: 1078263 - RNA, 22 nt, Human
agcucuguguucacagcacuaa

SEQ ID NO: 1078264 - RNA, 21 nt, Human
ugcagugucccuaacaguggu

SEQ ID NO: 1078265 - RNA, 22 nt, Human
caggaagccacaggacagguag

SEQ ID NO: 1078266 - RNA, 22 nt, Human
aaggaagguucauagucaaaga

SEQ ID NO: 1078267 - RNA, 22 nt, Human
gugagcagaauaaggguugaga

SEQ ID NO: 1078268 - RNA, 22 nt, Human
ucucccaggugggugccuggag

SEQ ID NO: 1078269 - RNA, 22 nt, Human
gggggaagacugggcuagugau

SEQ ID NO: 1078270 - RNA, 22 nt, Human
gggcaugacuuuuggaguggga

SEQ ID NO: 1078271 - RNA, 22 nt, Human
ugcagaagaaaacagcugugug

SEQ ID NO: 1078272 - RNA, 22 nt, Human
acagcacaaucugagucccaga

SEQ ID NO: 1078273 - RNA, 22 nt, Human
aauucagcacagaggaaccagu

SEQ ID NO: 1078274 - RNA, 21 nt, Human
aggagcuguguuagcuggucg

SEQ ID NO: 1078275 - RNA, 22 nt, Human
uuuccucugcugccauugcccc

SEQ ID NO: 1078276 - RNA, 22 nt, Human
acauuuacuuaucaaaagucag

SEQ ID NO: 1078277 - RNA, 22 nt, Human
ggccucugggguccugagccca

SEQ ID NO: 1078278 - RNA, 22 nt, Human
aaaggcuccuucucccaugacc

SEQ ID NO: 1078279 - RNA, 22 nt, Human
agacagcauggagcugauaaca

SEQ ID NO: 1078280 - RNA, 22 nt, Human
uccagggaccucccugagagcu

SEQ ID NO: 1078281 - RNA, 22 nt, Human
ggcaggugccaguuggcuuggg

SEQ ID NO: 1078282 - RNA, 22 nt, Human
uagauggcugguguucugagcu

SEQ ID NO: 1078283 - RNA, 22 nt, Human
augggaagguuuugagagcggg

SEQ ID NO: 1078284 - RNA, 20 nt, Human
gggcaguggcgcuaucucag

SEQ ID NO: 1078285 - RNA, 22 nt, Human
ucauugcaggcauuccccugcc

SEQ ID NO: 1078286 - RNA, 22 nt, Human
acacuguguggucucucucgga

SEQ ID NO: 1078287 - RNA, 22 nt, Human
ccagggcaauuauuuggagggu

SEQ ID NO: 1078288 - RNA, 22 nt, Human
uagcugcugcagcacagggagg

SEQ ID NO: 1078289 - RNA, 16 nt, Human
gccuggaguggcaggg

SEQ ID NO: 1078290 - RNA, 22 nt, Human
ugggcacaaacaucugccuguu

SEQ ID NO: 1078291 - RNA, 22 nt, Human
uaucagaaggcacauggagucu

SEQ ID NO: 1078292 - RNA, 21 nt, Human
auggagucaggggaaugggcc

SEQ ID NO: 1078293 - RNA, 22 nt, Human
augggugugaaaauggucaucu

SEQ ID NO: 1078294 - RNA, 22 nt, Human
ggccucagggucacucuguaga

SEQ ID NO: 1078295 - RNA, 19 nt, Human
ugugaaagcuaguguucuu

SEQ ID NO: 1078296 - RNA, 22 nt, Human
uuuaacagaugugaaauuuuca

SEQ ID NO: 1078297 - RNA, 22 nt, Human
aaguucuuguauuugccuuucu

SEQ ID NO: 1078298 - RNA, 22 nt, Human
cagagcauaauugacaugaggu

SEQ ID NO: 1078299 - RNA, 22 nt, Human
ucaacauauaggcaaccuguaa

SEQ ID NO: 1078300 - RNA, 22 nt, Human
uacagauugagguuuuuaauau

SEQ ID NO: 1078301 - RNA, 22 nt, Human
cucugagaugcuugaagaggau

SEQ ID NO: 1078302 - RNA, 22 nt, Human
aaauauagcaauuaugccuacu

SEQ ID NO: 1078303 - RNA, 22 nt, Human
uaugaaauuuaaacacagauca

SEQ ID NO: 1078304 - RNA, 22 nt, Human
aaugggaagucacuacuguuac

SEQ ID NO: 1078305 - RNA, 22 nt, Human
ugcucugcacaucccucacaaa

SEQ ID NO: 1078306 - RNA, 18 nt, Human
agaguguucucagugaaa

SEQ ID NO: 1078307 - RNA, 22 nt, Human
uucucacuauguauguagauug

SEQ ID NO: 1078308 - RNA, 22 nt, Human
gcugucaggccaugugggccuu

SEQ ID NO: 1078309 - RNA, 18 nt, Human
cagcugugcccuguuugg

SEQ ID NO: 1078310 - RNA, 22 nt, Human
uaagcucuccaggugaucauga

SEQ ID NO: 1078311 - RNA, 22 nt, Human
aagggcagccugacucacgguc

SEQ ID NO: 1078312 - RNA, 22 nt, Human
acuuucuccagaaaaccaagga

SEQ ID NO: 1078313 - RNA, 22 nt, Human
uuuguguguauauguauauaga

SEQ ID NO: 1078314 - RNA, 22 nt, Human
agcagccauuuaaaaugaauug

SEQ ID NO: 1078315 - RNA, 22 nt, Human
acuguacuuacgcauauacagg

SEQ ID NO: 1078316 - RNA, 23 nt, Human
ccucagagaggcagagccacaug

SEQ ID NO: 1078317 - RNA, 22 nt, Human
gcacagggcugccaggcggcuu

SEQ ID NO: 1078318 - RNA, 22 nt, Human
uggaacacacuucaaggagaaa

SEQ ID NO: 1078319 - RNA, 22 nt, Human
acugucagggaucaugaaagcu

SEQ ID NO: 1078320 - RNA, 22 nt, Human
gcugagcugggacaguccuggg

SEQ ID NO: 1078321 - RNA, 22 nt, Human
uaaauuuacccaaggaacaugu

SEQ ID NO: 1078322 - RNA, 22 nt, Human
uuauuucuugucuauguagcca

SEQ ID NO: 1078323 - RNA, 23 nt, Human
ggaguuggauuguacuugcugcu

SEQ ID NO: 1078324 - RNA, 22 nt, Human
ucagaagagcuggugcugccug

SEQ ID NO: 1078325 - RNA, 22 nt, Human
cuacaaagaauuucucuagcuc

SEQ ID NO: 1078326 - RNA, 20 nt, Human
gccaaggaggagaaacaggc

SEQ ID NO: 1078327 - RNA, 22 nt, Human
ggcuguccuuggccaaggcacu

SEQ ID NO: 1078328 - RNA, 22 nt, Human
cucugagcagaggccguggcua

SEQ ID NO: 1078329 - RNA, 22 nt, Human
aggucaggguauucacgucugu

SEQ ID NO: 1078330 - RNA, 22 nt, Human
ucugggccucaguuucuucauc

SEQ ID NO: 1078331 - RNA, 22 nt, Human
cccucaggaugcaguggaagug

SEQ ID NO: 1078332 - RNA, 22 nt, Human
augauugaccaucugcugggcu

SEQ ID NO: 1078333 - RNA, 22 nt, Human
gagugggcaccgugggcacacu

SEQ ID NO: 1078334 - RNA, 22 nt, Human
gaagaagcauucugcuguuuug

SEQ ID NO: 1078335 - RNA, 22 nt, Human
aacuguaauuuuuacauaguaa

SEQ ID NO: 1078336 - RNA, 22 nt, Human
gcagggcucugcuguaguccua

SEQ ID NO: 1078337 - RNA, 22 nt, Human
cugggugguuuugaugugaauu

SEQ ID NO: 1078338 - RNA, 22 nt, Human
agggccugagcucuccuccagu

SEQ ID NO: 1078339 - RNA, 18 nt, Human
aucucccauuggccaagg

SEQ ID NO: 1078340 - RNA, 22 nt, Human
gaaaagagaacaucugaggauc

SEQ ID NO: 1078341 - RNA, 22 nt, Human
aagagccagugggaaagucuug

SEQ ID NO: 1078342 - RNA, 22 nt, Human
cagcaauaguguguuuguuuca

SEQ ID NO: 1078343 - RNA, 22 nt, Human
uaugugugcuuuuuccaugcau

SEQ ID NO: 1078344 - RNA, 22 nt, Human
acagaaauucugggacagaaaa

SEQ ID NO: 1078345 - RNA, 22 nt, Human
uccucagugcuagccaacugcc

SEQ ID NO: 1078346 - RNA, 22 nt, Human
gccagcugcuggaacagcgcga

SEQ ID NO: 1078347 - RNA, 22 nt, Human
agcuggcaauguaagucccugg

SEQ ID NO: 1078348 - RNA, 22 nt, Human
uccaggaagccacacugggccu

SEQ ID NO: 1078349 - RNA, 22 nt, Human
gcagcuggucuggccuagagua

SEQ ID NO: 1078350 - RNA, 22 nt, Human
aagugugggaaguugcuaaaau

SEQ ID NO: 1078351 - RNA, 22 nt, Human
acauugaacaguacaaaugauc

SEQ ID NO: 1078352 - RNA, 22 nt, Human
cuuguccuuuacuugagacuca

SEQ ID NO: 1078353 - RNA, 22 nt, Human
uaguguuuaguacauaugcaua

SEQ ID NO: 1078354 - RNA, 22 nt, Human
gacugaaagcuuggaauguucc

SEQ ID NO: 1078355 - RNA, 22 nt, Human
aggagccauugcaggauggcag

SEQ ID NO: 1078356 - RNA, 22 nt, Human
ucuggagucugagaucugagga

SEQ ID NO: 1078357 - RNA, 22 nt, Human
uauuaguagcuugaaauuggug

SEQ ID NO: 1078358 - RNA, 22 nt, Human
gugcugagcugcagaugcgcuc

SEQ ID NO: 1078359 - RNA, 19 nt, Human
ucagaggauuuggcuauga

SEQ ID NO: 1078360 - RNA, 22 nt, Human
uuggggaagaguugacuuugga

SEQ ID NO: 1078361 - RNA, 22 nt, Human
uuggaauuucauguaagugacu

SEQ ID NO: 1078362 - RNA, 22 nt, Human
gaccagguccaaagcuacuguc

SEQ ID NO: 1078363 - RNA, 22 nt, Human
ccaugcccuugucaucuccagg

SEQ ID NO: 1078364 - RNA, 22 nt, Human
ugcacauuaguguuugagaugc

SEQ ID NO: 1078365 - RNA, 22 nt, Human
cugcccucuagaggaggacuga

SEQ ID NO: 1078366 - RNA, 22 nt, Human
aacuacauuuuacagaagauga

SEQ ID NO: 1078367 - RNA, 22 nt, Human
uauuucuguuuauuuguacauc

SEQ ID NO: 1078368 - RNA, 22 nt, Human
uugaaagcuccauauuguagag

SEQ ID NO: 1078369 - RNA, 22 nt, Human
cacugucccuguuuccuggaaa

SEQ ID NO: 1078370 - RNA, 22 nt, Human
caacuauuaccauguuauuguc

SEQ ID NO: 1078371 - RNA, 20 nt, Human
ugcuuccuggccacugcggg

SEQ ID NO: 1078372 - RNA, 22 nt, Human
cugcagggcccaaggucaacgg

SEQ ID NO: 1078373 - RNA, 22 nt, Human
acauucuaugguugaugaguug

SEQ ID NO: 1078374 - RNA, 22 nt, Human
cccagacauaacagcagagagg

SEQ ID NO: 1078375 - RNA, 22 nt, Human
caaaugcuggcccugcuacuua

SEQ ID NO: 1078376 - RNA, 22 nt, Human
gaagucuggcugacgagaguua

SEQ ID NO: 1078377 - RNA, 22 nt, Human
uucaagaugcacaguggcauuc

SEQ ID NO: 1078378 - RNA, 22 nt, Human
cagcuggcaaguggagcagggu

SEQ ID NO: 1078379 - RNA, 22 nt, Human
ccucacucugcacccugcagca

SEQ ID NO: 1078380 - RNA, 22 nt, Human
gcugccucugcgacucugggcg

SEQ ID NO: 1078381 - RNA, 22 nt, Human
ccugccagugaagcugacgggc

SEQ ID NO: 1078382 - RNA, 22 nt, Human
agagacugauggaucaccaaau

SEQ ID NO: 1078383 - RNA, 22 nt, Human
cugugcuucgcaacuccaaggu

SEQ ID NO: 1078384 - RNA, 22 nt, Human
ucugucucaaguucuugcacuc

SEQ ID NO: 1078385 - RNA, 21 nt, Human
cugcucugacagugaggccag

SEQ ID NO: 1078386 - RNA, 22 nt, Human
accccaagacaguagaagagaa

SEQ ID NO: 1078387 - RNA, 22 nt, Human
acuuccaguuuuaauuaaauug

SEQ ID NO: 1078388 - RNA, 22 nt, Human
aguauuucugaauauuaucaua

SEQ ID NO: 1078389 - RNA, 22 nt, Human
uggcuucuugggaugggucauu

SEQ ID NO: 1078390 - RNA, 22 nt, Human
agaggagguggugaugcuuuaa

SEQ ID NO: 1078391 - RNA, 22 nt, Human
uuagauaauguuauuguaauuu

SEQ ID NO: 1078392 - RNA, 22 nt, Human
agagggcccauguugggcugcu

SEQ ID NO: 1078393 - RNA, 19 nt, Human
uacaagcuuuuuuggcagg

SEQ ID NO: 1078394 - RNA, 22 nt, Human
ucaauuuuaugaaacaaaguga

SEQ ID NO: 1078395 - RNA, 22 nt, Human
uggccugacugucaggcuguau

SEQ ID NO: 1078396 - RNA, 22 nt, Human
ugcuucugcuuuacuugguuca

SEQ ID NO: 1078397 - RNA, 22 nt, Human
ugugaggaacccggaauguggg

SEQ ID NO: 1078398 - RNA, 22 nt, Human
agagugggcaggagccucgacu

SEQ ID NO: 1078399 - RNA, 22 nt, Human
aggcaucugaguuugcaagcuu

SEQ ID NO: 1078400 - RNA, 22 nt, Human
aaguacuaaggcuauuaugaug

SEQ ID NO: 1078401 - RNA, 18 nt, Human
cagagcagagguggagcg

SEQ ID NO: 1078402 - RNA, 22 nt, Human
uuuagcauuacuaaaaugaaaa

SEQ ID NO: 1078403 - RNA, 22 nt, Human
cuguuuaucauguacauuucca

SEQ ID NO: 1078404 - RNA, 22 nt, Human
uacuuaaaaauuaucaaagugg

SEQ ID NO: 1078405 - RNA, 22 nt, Human
cucugucaggcugcagaugcuc

SEQ ID NO: 1078406 - RNA, 22 nt, Human
gcccaggauucuuucuuccuua

SEQ ID NO: 1078407 - RNA, 22 nt, Human
cagccagggucaggcagcuucu

SEQ ID NO: 1078408 - RNA, 19 nt, Human
gcagcugugggaagagcca

SEQ ID NO: 1078409 - RNA, 22 nt, Human
ugggaauggaugcuaagugcua

SEQ ID NO: 1078410 - RNA, 22 nt, Human
ccaggcuccucaugaucuuguu

SEQ ID NO: 1078411 - RNA, 18 nt, Human
gggcucugauccuucacc

SEQ ID NO: 1078412 - RNA, 20 nt, Human
aaacgagccaucauucuggu

SEQ ID NO: 1078413 - RNA, 22 nt, Human
ugcaggcucucugcugccagau

SEQ ID NO: 1078414 - RNA, 22 nt, Human
agccagcugccuuucacaucug

SEQ ID NO: 1078415 - RNA, 22 nt, Human
ucucagaguaauucuuuaaggu

SEQ ID NO: 1078416 - RNA, 22 nt, Human
gcaccugggcaaggauucagag

SEQ ID NO: 1078417 - RNA, 22 nt, Human
aaaugcauuuuuaauuagaccc

SEQ ID NO: 1078418 - RNA, 22 nt, Human
cagcucucuaaggucuugcuuu

SEQ ID NO: 1078419 - RNA, 22 nt, Human
augcugugucaggaauuugaua

SEQ ID NO: 1078420 - RNA, 19 nt, Human
aaggugguuugucucugua

SEQ ID NO: 1078421 - RNA, 21 nt, Human
uaucaagauguuaugguugaa

SEQ ID NO: 1078422 - RNA, 22 nt, Human
ccuuuggguucaaucucggucu

SEQ ID NO: 1078423 - RNA, 22 nt, Human
agugcagagaccuggucaggca

SEQ ID NO: 1078424 - RNA, 22 nt, Human
uuguuuucuccacugcaucuua

SEQ ID NO: 1078425 - RNA, 22 nt, Human
uugguggguuaaugagugacug

SEQ ID NO: 1078426 - RNA, 22 nt, Human
aaagaccugaaauauaaucuag

SEQ ID NO: 1078427 - RNA, 22 nt, Human
ugagcaggugagucuagggcag

SEQ ID NO: 1078428 - RNA, 22 nt, Human
gacagggcauggugcagaguuc

SEQ ID NO: 1078429 - RNA, 22 nt, Human
caugaacagauucuucauuucu

SEQ ID NO: 1078430 - RNA, 22 nt, Human
uuacugaugucauuagaaacag

SEQ ID NO: 1078431 - RNA, 22 nt, Human
acaggcagggaccuuggcuaag

SEQ ID NO: 1078432 - RNA, 17 nt, Human
ccaggcuccaucacugu

SEQ ID NO: 1078433 - RNA, 22 nt, Human
caucaguuuggagaggcgguuu

SEQ ID NO: 1078434 - RNA, 22 nt, Human
uuucagugcuucuguuuaccgg

SEQ ID NO: 1078435 - RNA, 22 nt, Human
agccacagagcaggagaccuuu

SEQ ID NO: 1078436 - RNA, 17 nt, Human
agaguuuuaagaaauuu

SEQ ID NO: 1078437 - RNA, 19 nt, Human
uagcagcugccaaaggaga

SEQ ID NO: 1078438 - RNA, 22 nt, Human
uggccugcccagagcagcucug

SEQ ID NO: 1078439 - RNA, 22 nt, Human
uaggaaccagagcacucugggc

SEQ ID NO: 1078440 - RNA, 22 nt, Human
uggaggagggcuggugucugua

SEQ ID NO: 1078441 - RNA, 22 nt, Human
uuguuuuggagaugagcuaaaa

SEQ ID NO: 1078442 - RNA, 22 nt, Human
aaauagcagccuuuaguuaaca

SEQ ID NO: 1078443 - RNA, 19 nt, Human
cagcaagaaugaaggcaua

SEQ ID NO: 1078444 - RNA, 22 nt, Human
aguggcagagccaaguagagcc

SEQ ID NO: 1078445 - RNA, 22 nt, Human
agauuuguccugcuuucuaccu

SEQ ID NO: 1078446 - RNA, 22 nt, Human
cauugcacuuuggguccaggac

SEQ ID NO: 1078447 - RNA, 22 nt, Human
acauuugucuucuuucagauua

SEQ ID NO: 1078448 - RNA, 22 nt, Human
auuuuucucuccacuccauuaa

SEQ ID NO: 1078449 - RNA, 22 nt, Human
cagugcaggcugggggcccugc

SEQ ID NO: 1078450 - RNA, 22 nt, Human
ggcagcaguaggagcuaaucuu

SEQ ID NO: 1078451 - RNA, 22 nt, Human
aaaucagacacagugaaaguua

SEQ ID NO: 1078452 - RNA, 22 nt, Human
agaagaaaugugaaggccacug

SEQ ID NO: 1078453 - RNA, 22 nt, Human
aggcaguguauugcuagcggcu

SEQ ID NO: 1078454 - RNA, 22 nt, Human
uggcgucucucauaaguaugug

SEQ ID NO: 1078455 - RNA, 22 nt, Human
caggugcucccagagaagugcu

SEQ ID NO: 1078456 - RNA, 22 nt, Human
uuucauuaaagucaaaucuggu

SEQ ID NO: 1078457 - RNA, 22 nt, Human
caugagauaauuuuucuccagu

SEQ ID NO: 1078458 - RNA, 22 nt, Human
aauacaagauuuauaguuguuu

SEQ ID NO: 1078459 - RNA, 22 nt, Human
uccucagacacccugcuggcuu

SEQ ID NO: 1078460 - RNA, 22 nt, Human
ggagcugaugacgucaccaugg

SEQ ID NO: 1078461 - RNA, 22 nt, Human
uucuuuauguuaaugaaucuau

SEQ ID NO: 1078462 - RNA, 22 nt, Human
ugugaaaagggcuuuguacaaa

SEQ ID NO: 1078463 - RNA, 22 nt, Human
cuguggcuguauuuggccagag

SEQ ID NO: 1078464 - RNA, 22 nt, Human
uucuacaugagaaaauguauuu

SEQ ID NO: 1078465 - RNA, 22 nt, Human
cuggcagcugcccgagaugccc

SEQ ID NO: 1078466 - RNA, 23 nt, Human
uccuggcucugcacuugcuaaug

SEQ ID NO: 1078467 - RNA, 22 nt, Human
ugcccauggaccaagcaagggg

SEQ ID NO: 1078468 - RNA, 22 nt, Human
uaugaagcuuugaaaagcuuac

SEQ ID NO: 1078469 - RNA, 22 nt, Human
gugucaugggagucagaaguga

SEQ ID NO: 1078470 - RNA, 22 nt, Human
cuuaaggaguaguggugauggc

SEQ ID NO: 1078471 - RNA, 22 nt, Human
guuuuucuuugugugaagacaa

SEQ ID NO: 1078472 - RNA, 22 nt, Human
accagguggccccagcgugguu

SEQ ID NO: 1078473 - RNA, 21 nt, Human
uggcucugaaagagugcugca

SEQ ID NO: 1078474 - RNA, 22 nt, Human
ugcugcagaaauucugugagga

SEQ ID NO: 1078475 - RNA, 19 nt, Human
ucaggcaguuauucacaaa

SEQ ID NO: 1078476 - RNA, 22 nt, Human
cuccuguauguugggcuucaca

SEQ ID NO: 1078477 - RNA, 22 nt, Human
ucagaggaacuggacuaaagcc

SEQ ID NO: 1078478 - RNA, 22 nt, Human
uccaaagagguuaagaacgaga

SEQ ID NO: 1078479 - RNA, 22 nt, Human
gucagcacuuuuccgaggcaga

SEQ ID NO: 1078480 - RNA, 22 nt, Human
ucaguuuuuguuugccagauag

SEQ ID NO: 1078481 - RNA, 22 nt, Human
gcugagaguguaggauguuuac

SEQ ID NO: 1078482 - RNA, 22 nt, Human
auaaggaaugauguaucaguuu

SEQ ID NO: 1078483 - RNA, 21 nt, Human
agagacagagaaaguaacauu

SEQ ID NO: 1078484 - RNA, 22 nt, Human
uacagauauguaugcacuuuuu

SEQ ID NO: 1078485 - RNA, 22 nt, Human
cccccuggcaggcuggccucuc

SEQ ID NO: 1078486 - RNA, 18 nt, Human
cccacacagcaguagcuc

SEQ ID NO: 1078487 - RNA, 22 nt, Human
gggcccuggccgaaucccucug

SEQ ID NO: 1078488 - RNA, 22 nt, Human
guggagacuucuacuagagacc

SEQ ID NO: 1078489 - RNA, 22 nt, Human
acaguggaaaugugggagggga

SEQ ID NO: 1078490 - RNA, 21 nt, Human
gcagacugcccugcugucccc

SEQ ID NO: 1078491 - RNA, 23 nt, Human
uccuuuaaugcuggaauggcuag

SEQ ID NO: 1078492 - RNA, 22 nt, Human
uauucaugacauugcauaugca

SEQ ID NO: 1078493 - RNA, 22 nt, Human
ggucccaggaaucuguguucua

SEQ ID NO: 1078494 - RNA, 19 nt, Human
agccuggcuuugcucugcu

SEQ ID NO: 1078495 - RNA, 22 nt, Human
uggccgggccgggcgccuccac

SEQ ID NO: 1078496 - RNA, 22 nt, Human
uuugacauuauccuguuacugg

SEQ ID NO: 1078497 - RNA, 22 nt, Human
gguuugcaugugauguugggca

SEQ ID NO: 1078498 - RNA, 22 nt, Human
auucuccaucaccacuggcacu

SEQ ID NO: 1078499 - RNA, 22 nt, Human
cugaggucucuuuccauaguga

SEQ ID NO: 1078500 - RNA, 22 nt, Human
auacuuucugaccaauuaauug

SEQ ID NO: 1078501 - RNA, 22 nt, Human
cuccucccugcgauugcucugc

SEQ ID NO: 1078502 - RNA, 20 nt, Human
guuugaaaugauugguuggu

SEQ ID NO: 1078503 - RNA, 22 nt, Human
aauauaguucuagaaauauuuu

SEQ ID NO: 1078504 - RNA, 22 nt, Human
auuuagaacuuuguuugccaau

SEQ ID NO: 1078505 - RNA, 22 nt, Human
agcuccugggccaagcccaugc

SEQ ID NO: 1078506 - RNA, 22 nt, Human
aggcugucugaccccagagccc

SEQ ID NO: 1078507 - RNA, 22 nt, Human
auuuuagagaaacaaacguagg

SEQ ID NO: 1078508 - RNA, 22 nt, Human
aucuacagugcacaggacagcc

SEQ ID NO: 1078509 - RNA, 17 nt, Human
ugaguagggaagaggag

SEQ ID NO: 1078510 - RNA, 22 nt, Human
ccacagaaaauaaagcacgauu

SEQ ID NO: 1078511 - RNA, 22 nt, Human
ccuggcugcuauagcagcaugu

SEQ ID NO: 1078512 - RNA, 22 nt, Human
uguuucauuaguacugacaaua

SEQ ID NO: 1078513 - RNA, 23 nt, Human
agggaagaaacaugaagggcugu

SEQ ID NO: 1078514 - RNA, 22 nt, Human
uuguuacagcagugauuucaga

SEQ ID NO: 1078515 - RNA, 22 nt, Human
aaaagcaaguugccuagguuga

SEQ ID NO: 1078516 - RNA, 22 nt, Human
gagcacaggcuuugguggacac

SEQ ID NO: 1078517 - RNA, 22 nt, Human
gcaggcagagguggaggagaca

SEQ ID NO: 1078518 - RNA, 22 nt, Human
gagcagaacuacucacauaucg

SEQ ID NO: 1078519 - RNA, 22 nt, Human
aauuaauauuuguggaauuaau

SEQ ID NO: 1078520 - RNA, 22 nt, Human
gccagcuggagugagagugggc

SEQ ID NO: 1078521 - RNA, 22 nt, Human
auuugucaacaggcauuuaggu

SEQ ID NO: 1078522 - RNA, 22 nt, Human
gguggcagagaggagguaguuu

SEQ ID NO: 1078523 - RNA, 22 nt, Human
agaggcucugccgccucaggua

SEQ ID NO: 1078524 - RNA, 22 nt, Human
ggcugccugcucaggugcggcg

SEQ ID NO: 1078525 - RNA, 22 nt, Human
cucucagguagagcccaagaau

SEQ ID NO: 1078526 - RNA, 22 nt, Human
uggcuguguuaccacuucaugu

SEQ ID NO: 1078527 - RNA, 22 nt, Human
uccaaauugacaguagugauua

SEQ ID NO: 1078528 - RNA, 22 nt, Human
uaagaauauugggaauggaugg

SEQ ID NO: 1078529 - RNA, 22 nt, Human
uuguguguagacucagccauug

SEQ ID NO: 1078530 - RNA, 21 nt, Human
uaagccaccaugugaaaccag

SEQ ID NO: 1078531 - RNA, 22 nt, Human
acaguggaaagaaacgaauuag

SEQ ID NO: 1078532 - RNA, 19 nt, Human
cccagcuugaccaccugcu

SEQ ID NO: 1078533 - RNA, 22 nt, Human
ucauuuugcagagcugaggaac

SEQ ID NO: 1078534 - RNA, 22 nt, Human
cccucugcugccuggcuggguc

SEQ ID NO: 1078535 - RNA, 22 nt, Human
agugucauaugccacugcaucc

SEQ ID NO: 1078536 - RNA, 22 nt, Human
augccuuauuccaacaaucuag

SEQ ID NO: 1078537 - RNA, 22 nt, Human
ggggagcagaagcagcaacaac

SEQ ID NO: 1078538 - RNA, 22 nt, Human
ggagacucggguucuagccuug

SEQ ID NO: 1078539 - RNA, 22 nt, Human
cuccaggccauggcugcggagg

SEQ ID NO: 1078540 - RNA, 22 nt, Human
ucaaagucauggcuaguaauga

SEQ ID NO: 1078541 - RNA, 22 nt, Human
agagaguugaggaagcaacacu

SEQ ID NO: 1078542 - RNA, 21 nt, Human
ucucuacacuuucacuaggcu

SEQ ID NO: 1078543 - RNA, 22 nt, Human
aacauuucauaacuugacuuuu

SEQ ID NO: 1078544 - RNA, 22 nt, Human
augcaguaaauguuaagaaaaa

SEQ ID NO: 1078545 - RNA, 20 nt, Human
ugcagguguguccaagcacu

SEQ ID NO: 1078546 - RNA, 22 nt, Human
aacuaaaagugugucucuugua

SEQ ID NO: 1078547 - RNA, 22 nt, Human
uggaaauacaagaaguauguca

SEQ ID NO: 1078548 - RNA, 22 nt, Human
agagcuggggccagagucaagg

SEQ ID NO: 1078549 - RNA, 22 nt, Human
gccaggaggcuuaacuggacag

SEQ ID NO: 1078550 - RNA, 22 nt, Human
uuucuuuugaauaguguguggu

SEQ ID NO: 1078551 - RNA, 22 nt, Human
guuccaaauuuggaucuuuagg

SEQ ID NO: 1078552 - RNA, 22 nt, Human
cagcuguguaugagagcaugcu

SEQ ID NO: 1078553 - RNA, 22 nt, Human
uuucuaagaauauugcucuuaa

SEQ ID NO: 1078554 - RNA, 22 nt, Human
ggccagcagucacagggucaga

SEQ ID NO: 1078555 - RNA, 22 nt, Human
uauucacaaaaugagguccuca

SEQ ID NO: 1078556 - RNA, 22 nt, Human
gcaaaacagucgaugccuccca

SEQ ID NO: 1078557 - RNA, 23 nt, Human
ggacacugcuauaaaggaucugc

SEQ ID NO: 1078558 - RNA, 22 nt, Human
agaggccaggcugcagagggau

SEQ ID NO: 1078559 - RNA, 22 nt, Human
aguuggagugaacaugagauug

SEQ ID NO: 1078560 - RNA, 22 nt, Human
ucaccuguauuaauacagaacu

SEQ ID NO: 1078561 - RNA, 22 nt, Human
uaguuuuuucaacaaauggugc

SEQ ID NO: 1078562 - RNA, 22 nt, Human
acaggucagauaaaggcuggug

SEQ ID NO: 1078563 - RNA, 22 nt, Human
auaauggccgggggcugaaugc

SEQ ID NO: 1078564 - RNA, 22 nt, Human
gaagcucucaaacucuccccuu

SEQ ID NO: 1078565 - RNA, 20 nt, Human
uuauaucauaaugugccaau

SEQ ID NO: 1078566 - RNA, 22 nt, Human
gcucaggacccaggugugaccu

SEQ ID NO: 1078567 - RNA, 22 nt, Human
gcagagcaguacucucuugacu

SEQ ID NO: 1078568 - RNA, 22 nt, Human
gcugucaggaacaugccuuggu

SEQ ID NO: 1078569 - RNA, 22 nt, Human
uccaaaacagaacucugugaau

SEQ ID NO: 1078570 - RNA, 22 nt, Human
agggauggaagcucgucugcaa

SEQ ID NO: 1078571 - RNA, 18 nt, Human
ugcuuacaggaguuccug

SEQ ID NO: 1078572 - RNA, 17 nt, Human
agauggcaggaggcaga

SEQ ID NO: 1078573 - RNA, 22 nt, Human
ucugagaguagagcugccucuu

SEQ ID NO: 1078574 - RNA, 22 nt, Human
ucuuucuuaaauagguggauug

SEQ ID NO: 1078575 - RNA, 22 nt, Human
aaauuuuagacuccugggucua

SEQ ID NO: 1078576 - RNA, 23 nt, Human
uagggcagcugggagggacaugc

SEQ ID NO: 1078577 - RNA, 20 nt, Human
uccaagggcagcagaaucag

SEQ ID NO: 1078578 - RNA, 22 nt, Human
ccaagauaaucugugaaaaauc

SEQ ID NO: 1078579 - RNA, 22 nt, Human
aaguaccaaguuuguuugacgc

SEQ ID NO: 1078580 - RNA, 22 nt, Human
cuggugagacucagggaugcuu

SEQ ID NO: 1078581 - RNA, 22 nt, Human
agugugagcccuggaguggugc

SEQ ID NO: 1078582 - RNA, 22 nt, Human
ucagggcaggacaguguaggcc

SEQ ID NO: 1078583 - RNA, 22 nt, Human
acucuucaugcuaugcucaacu

SEQ ID NO: 1078584 - RNA, 22 nt, Human
ucuggcucaucucuccagguaa

SEQ ID NO: 1078585 - RNA, 22 nt, Human
uauuuugucuucugcucaucac

SEQ ID NO: 1078586 - RNA, 22 nt, Human
aagagggaggugcgggugcaga

SEQ ID NO: 1078587 - RNA, 18 nt, Human
ccucagggagagagacgc

SEQ ID NO: 1078588 - RNA, 22 nt, Human
agcugcccuuaauaggcauuca

SEQ ID NO: 1078589 - RNA, 22 nt, Human
uugguucagaugggaucugcga

SEQ ID NO: 1078590 - RNA, 22 nt, Human
gcaagaaaagagccuucagugg

SEQ ID NO: 1078591 - RNA, 22 nt, Human
uugauagguuuuauguauaguu

SEQ ID NO: 1078592 - RNA, 22 nt, Human
ucccaggauguuggcggcaggu

SEQ ID NO: 1078593 - RNA, 22 nt, Human
acauauaugcugggacugugac

SEQ ID NO: 1078594 - RNA, 22 nt, Human
aagaacuaucucuggcuguagg

SEQ ID NO: 1078595 - RNA, 22 nt, Human
gaggagguuccggguggagaag

SEQ ID NO: 1078596 - RNA, 22 nt, Human
cagauacagguuuuuguuagau

SEQ ID NO: 1078597 - RNA, 22 nt, Human
gaaccucagugaaacuggaggu

SEQ ID NO: 1078598 - RNA, 22 nt, Human
ccugugccauccugagcauccc

SEQ ID NO: 1078599 - RNA, 22 nt, Human
uacuucauuccuuuguaaaaug

SEQ ID NO: 1078600 - RNA, 22 nt, Human
gccuggaggggccaggguggua

SEQ ID NO: 1078601 - RNA, 22 nt, Human
cagggccaagccccuuuggcug

SEQ ID NO: 1078602 - RNA, 22 nt, Human
uguggccuuucaaggauggaau

SEQ ID NO: 1078603 - RNA, 22 nt, Human
uacaauauguggccuuuuguga

SEQ ID NO: 1078604 - RNA, 18 nt, Human
uggagccagcucuaggau

SEQ ID NO: 1078605 - RNA, 18 nt, Human
cccagccucuccuuucua

SEQ ID NO: 1078606 - RNA, 22 nt, Human
caauuucucuuuauaucucaca

SEQ ID NO: 1078607 - RNA, 22 nt, Human
gucagagauggcaugaaagauu

SEQ ID NO: 1078608 - RNA, 22 nt, Human
acugagccugugcccucaucag

SEQ ID NO: 1078609 - RNA, 22 nt, Human
ugcagucuuuccucgaguuugu

SEQ ID NO: 1078610 - RNA, 22 nt, Human
ugcuucugucucuuaugccuug

SEQ ID NO: 1078611 - RNA, 22 nt, Human
ugagcccaggaguuggaggcug

SEQ ID NO: 1078612 - RNA, 22 nt, Human
aagaggaagucuccauggagag

SEQ ID NO: 1078613 - RNA, 22 nt, Human
gcaccuggcugcccagguggag

SEQ ID NO: 1078614 - RNA, 23 nt, Human
gagauggcugguuguccucugaa

SEQ ID NO: 1078615 - RNA, 22 nt, Human
auugcaaucuggugaaaacagu

SEQ ID NO: 1078616 - RNA, 22 nt, Human
agaagccauaguaucucagggu

SEQ ID NO: 1078617 - RNA, 22 nt, Human
ugucauuuucuaaucuguuguc

SEQ ID NO: 1078618 - RNA, 18 nt, Human
gucuuuucucccuuccuc

SEQ ID NO: 1078619 - RNA, 22 nt, Human
gccaagaaaugccccucacaga

SEQ ID NO: 1078620 - RNA, 22 nt, Human
uuacaaagaguguucuuuucca

SEQ ID NO: 1078621 - RNA, 22 nt, Human
uaugagaagaacaggugacuuu

SEQ ID NO: 1078622 - RNA, 22 nt, Human
uguuauugagguuacuuauaag

SEQ ID NO: 1078623 - RNA, 22 nt, Human
aauccugugugacucuggggag

SEQ ID NO: 1078624 - RNA, 22 nt, Human
acugggcugcuugagugccuuc

SEQ ID NO: 1078625 - RNA, 22 nt, Human
caaauacuuuuagccuauugag

SEQ ID NO: 1078626 - RNA, 22 nt, Human
ucugcccucauugcugccugga

SEQ ID NO: 1078627 - RNA, 22 nt, Human
ccugugcucccuauguaucugg

SEQ ID NO: 1078628 - RNA, 22 nt, Human
aaauuuuaaggcuggaacuuaa

SEQ ID NO: 1078629 - RNA, 22 nt, Human
agaggcggagguugcagugagc

SEQ ID NO: 1078630 - RNA, 22 nt, Human
uagaagacaggaaauacaaacc

SEQ ID NO: 1078631 - RNA, 22 nt, Human
ucagcaacuauuuaucaaauuc

SEQ ID NO: 1078632 - RNA, 22 nt, Human
agagccaggaugucuucugggg

SEQ ID NO: 1078633 - RNA, 22 nt, Human
uuuuauugucaaugaagacaga

SEQ ID NO: 1078634 - RNA, 22 nt, Human
uucucucuuacugccaugcugu

SEQ ID NO: 1078635 - RNA, 23 nt, Human
aucuagaaaccugaugacucugu

SEQ ID NO: 1078636 - RNA, 22 nt, Human
aaagccuucaaguagauguaag

SEQ ID NO: 1078637 - RNA, 22 nt, Human
ucaagaaaugugcuuggauaua

SEQ ID NO: 1078638 - RNA, 22 nt, Human
guggcugcuguccucucugguu

SEQ ID NO: 1078639 - RNA, 22 nt, Human
ucuccucugcgcggcagugccc

SEQ ID NO: 1078640 - RNA, 22 nt, Human
aaaaucuugacuguuuuuagaa

SEQ ID NO: 1078641 - RNA, 22 nt, Human
aaagaagacagacauuucuuuc

SEQ ID NO: 1078642 - RNA, 22 nt, Human
ccaggacucaauuaaccucacu

SEQ ID NO: 1078643 - RNA, 22 nt, Human
cugcugcucgaccagucccagg

SEQ ID NO: 1078644 - RNA, 22 nt, Human
auuccaguccaaauguuuuccu

SEQ ID NO: 1078645 - RNA, 22 nt, Human
gcaggcucguuggaaguccccu

SEQ ID NO: 1078646 - RNA, 22 nt, Human
ucaguguaaguuauguagaugu

SEQ ID NO: 1078647 - RNA, 22 nt, Human
aagcagaguccccuucccaugg

SEQ ID NO: 1078648 - RNA, 23 nt, Human
cugugugugccgaggguggccac

SEQ ID NO: 1078649 - RNA, 22 nt, Human
ucuggcugauucccugggacug

SEQ ID NO: 1078650 - RNA, 22 nt, Human
uccugagggcgauucagcaggu

SEQ ID NO: 1078651 - RNA, 21 nt, Human
cugcuuccucucuucauggca

SEQ ID NO: 1078652 - RNA, 22 nt, Human
augccuuuaagagauacugagg

SEQ ID NO: 1078653 - RNA, 20 nt, Human
aagcccauuaccaugcuugg

SEQ ID NO: 1078654 - RNA, 22 nt, Human
ugagccugaguucaaggcugca

SEQ ID NO: 1078655 - RNA, 22 nt, Human
gacaggcuuccuaagugccaga

SEQ ID NO: 1078656 - RNA, 19 nt, Human
acagaaauuaguuauuuuc

SEQ ID NO: 1078657 - RNA, 19 nt, Human
cuggccaggccaggggccc

SEQ ID NO: 1078658 - RNA, 23 nt, Human
agggcugaaugcagagaagcaga

SEQ ID NO: 1078659 - RNA, 22 nt, Human
acagcuguauucaaguugcaag

SEQ ID NO: 1078660 - RNA, 22 nt, Human
ccucccuuggccauagccagcc

SEQ ID NO: 1078661 - RNA, 20 nt, Human
agugucugggccucaggccc

SEQ ID NO: 1078662 - RNA, 22 nt, Human
gcuggaguacaucuuuggcggc

SEQ ID NO: 1078663 - RNA, 22 nt, Human
ugagagugaaaugucacauguc

SEQ ID NO: 1078664 - RNA, 22 nt, Human
agugaaauuuguuuagauaggu

SEQ ID NO: 1078665 - RNA, 22 nt, Human
caaauacuacgauucuugcagu

SEQ ID NO: 1078666 - RNA, 22 nt, Human
ucagcaauaugauaggcuuugu

SEQ ID NO: 1078667 - RNA, 22 nt, Human
uaguaugggaagaacuuuguag

SEQ ID NO: 1078668 - RNA, 22 nt, Human
cucuggccgcagcucagcucug

SEQ ID NO: 1078669 - RNA, 22 nt, Human
agagaacaugacguaauagugg

SEQ ID NO: 1078670 - RNA, 22 nt, Human
uuuuucagccaugaauuacacu

SEQ ID NO: 1078671 - RNA, 22 nt, Human
uuucccaaguguaaacauggca

SEQ ID NO: 1078672 - RNA, 22 nt, Human
uuaaagcauguugcuuaacagg

SEQ ID NO: 1078673 - RNA, 22 nt, Human
auacaguaauuuguaacucauc

SEQ ID NO: 1078674 - RNA, 22 nt, Human
agugcuguuagguuaauauagu

SEQ ID NO: 1078675 - RNA, 22 nt, Human
cuacauuuuucaccgagccucu

SEQ ID NO: 1078676 - RNA, 22 nt, Human
uuugucaaguuugcaaauacgu

SEQ ID NO: 1078677 - RNA, 17 nt, Human
ugguucuuuucauuccc

SEQ ID NO: 1078678 - RNA, 22 nt, Human
gccaggggugcccacccaagga

SEQ ID NO: 1078679 - RNA, 22 nt, Human
ugaaggugaaugucuaugggga

SEQ ID NO: 1078680 - RNA, 22 nt, Human
agugaguggacccugcaaggaa

SEQ ID NO: 1078681 - RNA, 22 nt, Human
guuugauucaagaacaaagagu

SEQ ID NO: 1078682 - RNA, 22 nt, Human
ucuugauuuuguuaaaauuaga

SEQ ID NO: 1078683 - RNA, 22 nt, Human
aggcucugguuggcaaguaaag

SEQ ID NO: 1078684 - RNA, 22 nt, Human
ucuucuuaugugccauuaucuc

SEQ ID NO: 1078685 - RNA, 22 nt, Human
agccacagucugaugccugaga

SEQ ID NO: 1078686 - RNA, 22 nt, Human
ggugcagugguguggcaaaggg

SEQ ID NO: 1078687 - RNA, 22 nt, Human
cagcaacuuggacagcagucuu

SEQ ID NO: 1078688 - RNA, 22 nt, Human
auucuucacauaagugcuguac

SEQ ID NO: 1078689 - RNA, 22 nt, Human
gccaggcauuauuccgaucccu

SEQ ID NO: 1078690 - RNA, 22 nt, Human
cgcugccaggauccccugccgg

SEQ ID NO: 1078691 - RNA, 22 nt, Human
auuaacaugaguuggagauagg

SEQ ID NO: 1078692 - RNA, 22 nt, Human
cagccagugugaccgaggagga

SEQ ID NO: 1078693 - RNA, 22 nt, Human
cuuuaaggugaugagagaugcu

SEQ ID NO: 1078694 - RNA, 22 nt, Human
aaggaggacacccaggacuggg

SEQ ID NO: 1078695 - RNA, 22 nt, Human
agggcagaaguacagacacuua

SEQ ID NO: 1078696 - RNA, 22 nt, Human
agaggcaggaagagcugauuuu

SEQ ID NO: 1078697 - RNA, 22 nt, Human
aacccagccguguagcugccgc

SEQ ID NO: 1078698 - RNA, 22 nt, Human
cugcucuggggaagccagaugu

SEQ ID NO: 1078699 - RNA, 22 nt, Human
uugcagggcaggaccauggaca

SEQ ID NO: 1078700 - RNA, 22 nt, Human
agcuucuggaagccuggcagca

SEQ ID NO: 1078701 - RNA, 20 nt, Human
cagcaggaaaagugccucag

SEQ ID NO: 1078702 - RNA, 22 nt, Human
gaggcacugcaguacagugacu

SEQ ID NO: 1078703 - RNA, 22 nt, Human
guaacaaaggauaacuugguuu

SEQ ID NO: 1078704 - RNA, 20 nt, Human
ggggaagaaaaggaugugau

SEQ ID NO: 1078705 - RNA, 22 nt, Human
auucuguauuucuaauaagauc

SEQ ID NO: 1078706 - RNA, 20 nt, Human
ccagagcagccacugaaguu

SEQ ID NO: 1078707 - RNA, 22 nt, Human
aaugucaaaauaauugauuugu

SEQ ID NO: 1078708 - RNA, 22 nt, Human
agucaacaaaaauguggagccu

SEQ ID NO: 1078709 - RNA, 22 nt, Human
uccugaaaaauuacauguucag

SEQ ID NO: 1078710 - RNA, 22 nt, Human
auuauacaaggcuggugccuaa

SEQ ID NO: 1078711 - RNA, 22 nt, Human
uggcugcaguucacaggagcaa

SEQ ID NO: 1078712 - RNA, 20 nt, Human
ccucaggaugagggugagca

SEQ ID NO: 1078713 - RNA, 22 nt, Human
aaauaaguuagcagauuccagu

SEQ ID NO: 1078714 - RNA, 22 nt, Human
uccaggacuagcauuucugaua

SEQ ID NO: 1078715 - RNA, 22 nt, Human
agaggcuuggccucaguucugu

SEQ ID NO: 1078716 - RNA, 22 nt, Human
ugagccuggcggaagcagcgug

SEQ ID NO: 1078717 - RNA, 22 nt, Human
ucacaguaaaagcauggaagag

SEQ ID NO: 1078718 - RNA, 22 nt, Human
gggcucugguacuuccuggcuc

SEQ ID NO: 1078719 - RNA, 22 nt, Human
uccagccuuucuacucacugag

SEQ ID NO: 1078720 - RNA, 22 nt, Human
gcugcuggggucacaugguaag

SEQ ID NO: 1078721 - RNA, 22 nt, Human
cucaggcucuguacucccuuug

SEQ ID NO: 1078722 - RNA, 23 nt, Human
ggcugagacuacaggcgcuugcc

SEQ ID NO: 1078723 - RNA, 22 nt, Human
agugcagcuuauaaagcaucaa

SEQ ID NO: 1078724 - RNA, 22 nt, Human
auccucuguggauuacaccuag

SEQ ID NO: 1078725 - RNA, 19 nt, Human
uaaaggaagaagggaggau

SEQ ID NO: 1078726 - RNA, 22 nt, Human
gucuggagccacccuaagcauu

SEQ ID NO: 1078727 - RNA, 19 nt, Human
acauuuagaauguacuugc

SEQ ID NO: 1078728 - RNA, 22 nt, Human
gaagccacagagauuguggggg

SEQ ID NO: 1078729 - RNA, 22 nt, Human
guugggcuuauguaauuuuaag

SEQ ID NO: 1078730 - RNA, 22 nt, Human
aguucugggaggugcacgucca

SEQ ID NO: 1078731 - RNA, 22 nt, Human
gcugggcugcccaaccucugac

SEQ ID NO: 1078732 - RNA, 22 nt, Human
caggaaggcgcggcugugccug

SEQ ID NO: 1078733 - RNA, 23 nt, Human
aaggggauacuuccacuuucuuu

SEQ ID NO: 1078734 - RNA, 22 nt, Human
cagcugaggaauacuagaugua

SEQ ID NO: 1078735 - RNA, 22 nt, Human
ugucacagggauaccauggggc

SEQ ID NO: 1078736 - RNA, 22 nt, Human
uguaugaagccagaaucuguuu

SEQ ID NO: 1078737 - RNA, 22 nt, Human
acuguguccuauuuccuugaca

SEQ ID NO: 1078738 - RNA, 22 nt, Human
cugggcacagacccccugggcc

SEQ ID NO: 1078739 - RNA, 22 nt, Human
cuguguuugaugagaagccacc

SEQ ID NO: 1078740 - RNA, 20 nt, Human
agggucugaugugguggccc

SEQ ID NO: 1078741 - RNA, 22 nt, Human
caggaaaaggagacuuuagcac

SEQ ID NO: 1078742 - RNA, 22 nt, Human
cucugggcaccaaagagcagcu

SEQ ID NO: 1078743 - RNA, 22 nt, Human
aaggugucggguuagcucagcc

SEQ ID NO: 1078744 - RNA, 22 nt, Human
cugugggaacacugaggacuuc

SEQ ID NO: 1078745 - RNA, 22 nt, Human
gcuguauuuauuuucuaggguu

SEQ ID NO: 1078746 - RNA, 22 nt, Human
gagaauauuagaguuaguuuau

SEQ ID NO: 1078747 - RNA, 22 nt, Human
uagcagcacuauuuguuguagu

SEQ ID NO: 1078748 - RNA, 22 nt, Human
cagagcagacguugagauuaag

SEQ ID NO: 1078749 - RNA, 22 nt, Human
auaaaaguucaagagaguacag

SEQ ID NO: 1078750 - RNA, 22 nt, Human
aagagcuggucacagguccauu

SEQ ID NO: 1078751 - RNA, 22 nt, Human
uugagggucuggaucugcugcu

SEQ ID NO: 1078752 - RNA, 22 nt, Human
uggccugguuguugcugccguu

SEQ ID NO: 1078753 - RNA, 22 nt, Human
ugaagcaguuacuggguguuaa

SEQ ID NO: 1078754 - RNA, 22 nt, Human
guggagcccugguagggacccc

SEQ ID NO: 1078755 - RNA, 22 nt, Human
agcagaaacagccagucuggac

SEQ ID NO: 1078756 - RNA, 22 nt, Human
uauaaaugcacuuuugaaauau

SEQ ID NO: 1078757 - RNA, 22 nt, Human
agggaagugaaugacagauauc

SEQ ID NO: 1078758 - RNA, 22 nt, Human
ucuaaagugagucauuucgacu

SEQ ID NO: 1078759 - RNA, 22 nt, Human
gaauauauuucucuuaccuuua

SEQ ID NO: 1078760 - RNA, 22 nt, Human
gcagcuggcucagagagguggg

SEQ ID NO: 1078761 - RNA, 23 nt, Human
caguacuuaguguagcguuaauu

SEQ ID NO: 1078762 - RNA, 22 nt, Human
uuuauauuaccuggaauagcuu

SEQ ID NO: 1078763 - RNA, 22 nt, Human
caugaaauucagcaggugagua

SEQ ID NO: 1078764 - RNA, 22 nt, Human
uguguuuuccagaaugguguuu

SEQ ID NO: 1078765 - RNA, 22 nt, Human
uggcugaguguuccaaggagca

SEQ ID NO: 1078766 - RNA, 17 nt, Human
ugaggccugcaucagug

SEQ ID NO: 1078767 - RNA, 22 nt, Human
uaauuauucuagucacauagca

SEQ ID NO: 1078768 - RNA, 22 nt, Human
aaugaugguauugaugagcuaa

SEQ ID NO: 1078769 - RNA, 19 nt, Human
ucucccagcugagaagggc

SEQ ID NO: 1078770 - RNA, 22 nt, Human
uggcacauagaaaaggaucaau

SEQ ID NO: 1078771 - RNA, 22 nt, Human
ggcaggagcucagguugguucc

SEQ ID NO: 1078772 - RNA, 22 nt, Human
cugagaguauuggcaggcuugg

SEQ ID NO: 1078773 - RNA, 22 nt, Human
aaauguuuugcucccauguggu

SEQ ID NO: 1078774 - RNA, 22 nt, Human
acaggcuucucacagaaaaggg

SEQ ID NO: 1078775 - RNA, 23 nt, Human
ccugaagggucaggguccucagc

SEQ ID NO: 1078776 - RNA, 22 nt, Human
accaggggugucaacagcauuu

SEQ ID NO: 1078777 - RNA, 22 nt, Human
acuuuugaagaauuaugcaaaa

SEQ ID NO: 1078778 - RNA, 22 nt, Human
ugaggccacuuccccacagccc

SEQ ID NO: 1078779 - RNA, 22 nt, Human
ccagggcaaaugagaucauagc

SEQ ID NO: 1078780 - RNA, 22 nt, Human
cugcaggcugagcgccugccgg

SEQ ID NO: 1078781 - RNA, 22 nt, Human
agggccugguucuguguaggga

SEQ ID NO: 1078782 - RNA, 22 nt, Human
gccaccucuuugucucugccgc

SEQ ID NO: 1078783 - RNA, 22 nt, Human
ugggaaaguaauugucauccuu

SEQ ID NO: 1078784 - RNA, 19 nt, Human
acagaguccagaggaaagg

SEQ ID NO: 1078785 - RNA, 22 nt, Human
caggccagguggcaggcaaaac

SEQ ID NO: 1078786 - RNA, 22 nt, Human
aguaugaaucuuucagaccgua

SEQ ID NO: 1078787 - RNA, 17 nt, Human
ggccuuggggccucagu

SEQ ID NO: 1078788 - RNA, 22 nt, Human
ugggaaaguguagccugcaggc

SEQ ID NO: 1078789 - RNA, 22 nt, Human
aggucccaggcauagcuggucu

SEQ ID NO: 1078790 - RNA, 21 nt, Human
uucaacaaagggaauaaguuu

SEQ ID NO: 1078791 - RNA, 22 nt, Human
gcccagcacuccucucugacau

SEQ ID NO: 1078792 - RNA, 22 nt, Human
aacacauauuuauauaugcaca

SEQ ID NO: 1078793 - RNA, 22 nt, Human
auugcacaaacacagucagacu

SEQ ID NO: 1078794 - RNA, 22 nt, Human
guucacagcaaaccuaugaacu

SEQ ID NO: 1078795 - RNA, 21 nt, Human
gcagaggaaugguauacauaa

SEQ ID NO: 1078796 - RNA, 19 nt, Human
cugugcuuuaaacuccuau

SEQ ID NO: 1078797 - RNA, 22 nt, Human
acacaaaaucaaaguccuaggc

SEQ ID NO: 1078798 - RNA, 22 nt, Human
accagagucaauuauuuugcca

SEQ ID NO: 1078799 - RNA, 22 nt, Human
uagaaacaugagagaaacucuu

SEQ ID NO: 1078800 - RNA, 22 nt, Human
ucuggcucaaaauacguacucu

SEQ ID NO: 1078801 - RNA, 19 nt, Human
cuccaagugccaaggacag

SEQ ID NO: 1078802 - RNA, 22 nt, Human
aaauaugaaugauaagaguuau

SEQ ID NO: 1078803 - RNA, 22 nt, Human
aggcaacaggaaaccacaugau

SEQ ID NO: 1078804 - RNA, 22 nt, Human
cucagagcccaggguacacccg

SEQ ID NO: 1078805 - RNA, 22 nt, Human
gggaaacugcaacucagagagg

SEQ ID NO: 1078806 - RNA, 22 nt, Human
ugucccagcacuuugggagucu

SEQ ID NO: 1078807 - RNA, 22 nt, Human
gucaggcugccagucuuuauug

SEQ ID NO: 1078808 - RNA, 22 nt, Human
uagaaauguugguauuaacauu

SEQ ID NO: 1078809 - RNA, 22 nt, Human
ucugccuuuucacugccacuaa

SEQ ID NO: 1078810 - RNA, 22 nt, Human
agccacagcgaaccucucuucc

SEQ ID NO: 1078811 - RNA, 22 nt, Human
caugaacauuuguuuacaucug

SEQ ID NO: 1078812 - RNA, 22 nt, Human
agaauuacagcuuuuagaauag

SEQ ID NO: 1078813 - RNA, 22 nt, Human
cacaauaaauguuugcugauga

SEQ ID NO: 1078814 - RNA, 22 nt, Human
ucagggcaucaucaugaauaua

SEQ ID NO: 1078815 - RNA, 22 nt, Human
agcagugagugggaggaccaug

SEQ ID NO: 1078816 - RNA, 22 nt, Human
augcccaaugucacaauuuuug

SEQ ID NO: 1078817 - RNA, 22 nt, Human
ugucucugggugauucaguccu

SEQ ID NO: 1078818 - RNA, 22 nt, Human
gaugaaauuugaaaauaguguu

SEQ ID NO: 1078819 - RNA, 22 nt, Human
gguggcaggcccugagcauccc

SEQ ID NO: 1078820 - RNA, 22 nt, Human
agcugcucuuugaaggacacuu

SEQ ID NO: 1078821 - RNA, 22 nt, Human
ugagacaugugaauauuuguac

SEQ ID NO: 1078822 - RNA, 22 nt, Human
ccuuugggugaauuccucucuu

SEQ ID NO: 1078823 - RNA, 22 nt, Human
gcauguuauguaucugcccagc

SEQ ID NO: 1078824 - RNA, 22 nt, Human
auuugucaauaagaugaacaua

SEQ ID NO: 1078825 - RNA, 22 nt, Human
agaaaccuggggguuguacaua

SEQ ID NO: 1078826 - RNA, 22 nt, Human
uggagcucaaaggccuguggga

SEQ ID NO: 1078827 - RNA, 22 nt, Human
ccagcucugccaagcgucagcu

SEQ ID NO: 1078828 - RNA, 22 nt, Human
uagcugucaccagaaauggcca

SEQ ID NO: 1078829 - RNA, 22 nt, Human
uuguaaaggcuguuauugacuu

SEQ ID NO: 1078830 - RNA, 22 nt, Human
uguagcucuccagccagcaagg

SEQ ID NO: 1078831 - RNA, 21 nt, Human
agugaaaugaaguguaugcuc

SEQ ID NO: 1078832 - RNA, 22 nt, Human
uagcagaaccagcagucaauuu

SEQ ID NO: 1078833 - RNA, 22 nt, Human
ucugaagugaucaucauuucuc

SEQ ID NO: 1078834 - RNA, 21 nt, Human
aggcagcaggauccagggaca

SEQ ID NO: 1078835 - RNA, 22 nt, Human
aucaaaaccuugacuuuuaaug

SEQ ID NO: 1078836 - RNA, 22 nt, Human
gcugccacuuggucaugucaug

SEQ ID NO: 1078837 - RNA, 22 nt, Human
uuccucaggcuucccuuugucc

SEQ ID NO: 1078838 - RNA, 22 nt, Human
uuugaaagucaaccuuccaguu

SEQ ID NO: 1078839 - RNA, 22 nt, Human
uccuuuucucuaguaagcuuua

SEQ ID NO: 1078840 - RNA, 22 nt, Human
aaccauuugcaguuacugagac

SEQ ID NO: 1078841 - RNA, 22 nt, Human
cuuguauuccccuaucucuaaa

SEQ ID NO: 1078842 - RNA, 22 nt, Human
cagcauggggaucacuguaggc

SEQ ID NO: 1078843 - RNA, 22 nt, Human
cuuuguuuauauuucuccucga

SEQ ID NO: 1078844 - RNA, 22 nt, Human
caugaagcacagcucucuuuuu

SEQ ID NO: 1078845 - RNA, 22 nt, Human
ucucaguguggugcuuaggaua

SEQ ID NO: 1078846 - RNA, 20 nt, Human
gugggcagcaggcauacugg

SEQ ID NO: 1078847 - RNA, 23 nt, Human
cauauucaaaacuggaccacucu

SEQ ID NO: 1078848 - RNA, 22 nt, Human
cagcuccuagaucggcgaagug

SEQ ID NO: 1078849 - RNA, 23 nt, Human
agcaggcugcuucuccacagcug

SEQ ID NO: 1078850 - RNA, 20 nt, Human
ugccaugguaacagagugug

SEQ ID NO: 1078851 - RNA, 22 nt, Human
uuccaaucaggauaauaauuag

SEQ ID NO: 1078852 - RNA, 22 nt, Human
gagaugaauguaaacaaaggca

SEQ ID NO: 1078853 - RNA, 22 nt, Human
aucaggaucugcaucauaagaa

SEQ ID NO: 1078854 - RNA, 22 nt, Human
uggcuucaucugcagcacugcc

SEQ ID NO: 1078855 - RNA, 22 nt, Human
ccugagcaucagcgccuccuua

SEQ ID NO: 1078856 - RNA, 22 nt, Human
gguggcugguuuuauaagaggu

SEQ ID NO: 1078857 - RNA, 22 nt, Human
aauagaauguaaucuaauacau

SEQ ID NO: 1078858 - RNA, 22 nt, Human
gagagcacaugaacauggagga

SEQ ID NO: 1078859 - RNA, 22 nt, Human
aaacucuuccuuucuuuaaagu

SEQ ID NO: 1078860 - RNA, 22 nt, Human
aaacucuguagcuaaacauaau

SEQ ID NO: 1078861 - RNA, 22 nt, Human
aucccuggacggcgccucccca

SEQ ID NO: 1078862 - RNA, 22 nt, Human
gccucugcaacuccgccuuggu

SEQ ID NO: 1078863 - RNA, 22 nt, Human
aggagugaguguccucagcaga

SEQ ID NO: 1078864 - RNA, 22 nt, Human
cucccuccaaauaagacucggg

SEQ ID NO: 1078865 - RNA, 22 nt, Human
cuggaaugccucccugucagag

SEQ ID NO: 1078866 - RNA, 23 nt, Human
agagcuuagggaauucacaugag

SEQ ID NO: 1078867 - RNA, 22 nt, Human
ucuuucagccacuuaccugucu

SEQ ID NO: 1078868 - RNA, 22 nt, Human
uggucaguugcaucagagaagu

SEQ ID NO: 1078869 - RNA, 22 nt, Human
uuuccaaauaaggucacacuca

SEQ ID NO: 1078870 - RNA, 22 nt, Human
ugccuggguucccaccccaaag

SEQ ID NO: 1078871 - RNA, 22 nt, Human
aaagccagaguguguuagagac

SEQ ID NO: 1078872 - RNA, 22 nt, Human
cccagcuccaagggacagcgaa

SEQ ID NO: 1078873 - RNA, 22 nt, Human
cauuucauaguugucacaauaa

SEQ ID NO: 1078874 - RNA, 22 nt, Human
caguguaagaauucaaagccua

SEQ ID NO: 1078875 - RNA, 22 nt, Human
cagcagcugaggcgcuggcgug

SEQ ID NO: 1078876 - RNA, 22 nt, Human
gagggagugccagagggccagc

SEQ ID NO: 1078877 - RNA, 22 nt, Human
ugcuucuguucuuucaccuacg

SEQ ID NO: 1078878 - RNA, 22 nt, Human
augaugaaauuuucuaucaugu

SEQ ID NO: 1078879 - RNA, 22 nt, Human
uggcauuucuguuagacucuca

SEQ ID NO: 1078880 - RNA, 22 nt, Human
cggcagagcuuccugcucagcg

SEQ ID NO: 1078881 - RNA, 17 nt, Human
uaugcuuuucuucucca

SEQ ID NO: 1078882 - RNA, 22 nt, Human
ugaaauuaugcauuguuguacc

SEQ ID NO: 1078883 - RNA, 22 nt, Human
acaaaaccagaaaaucucuacc

SEQ ID NO: 1078884 - RNA, 22 nt, Human
gcagccucaaacuccccagcuc

SEQ ID NO: 1078885 - RNA, 23 nt, Human
ucaugcccaggcuccagauguca

SEQ ID NO: 1078886 - RNA, 22 nt, Human
cuggccaguuacugcuauuggc

SEQ ID NO: 1078887 - RNA, 22 nt, Human
aucacagagcucccuuccacug

SEQ ID NO: 1078888 - RNA, 22 nt, Human
gcagugggcaacaagagcugga

SEQ ID NO: 1078889 - RNA, 22 nt, Human
uuacugauacacauaagaauuu

SEQ ID NO: 1078890 - RNA, 22 nt, Human
auuuuuucuguaaacuggccuu

SEQ ID NO: 1078891 - RNA, 22 nt, Human
uuugucaauaacuaccaacagg

SEQ ID NO: 1078892 - RNA, 22 nt, Human
ugaaagguuaaaaguaguauug

SEQ ID NO: 1078893 - RNA, 22 nt, Human
gagaaaauagcauguguaguau

SEQ ID NO: 1078894 - RNA, 19 nt, Human
ucucaauucuccccacugc

SEQ ID NO: 1078895 - RNA, 22 nt, Human
ugcuccuggcuccuucccuaac

SEQ ID NO: 1078896 - RNA, 22 nt, Human
cgggcagugcccagcggggcag

SEQ ID NO: 1078897 - RNA, 22 nt, Human
cauuugaagaagaaacguacua

SEQ ID NO: 1078898 - RNA, 22 nt, Human
cuggcauguguuuggcuccugu

SEQ ID NO: 1078899 - RNA, 22 nt, Human
uggcucugugucucccagcagc

SEQ ID NO: 1078900 - RNA, 22 nt, Human
agcaggggcaggguuuugugcu

SEQ ID NO: 1078901 - RNA, 22 nt, Human
cugggcagagcuaacaccugag

SEQ ID NO: 1078902 - RNA, 22 nt, Human
aggcuccugcaggugaggugcu

SEQ ID NO: 1078903 - RNA, 22 nt, Human
gccugcagccucaagggcugag

SEQ ID NO: 1078904 - RNA, 22 nt, Human
auggcauuugucaagauaagua

SEQ ID NO: 1078905 - RNA, 22 nt, Human
uuguaugaguaugguguauagg

SEQ ID NO: 1078906 - RNA, 22 nt, Human
acagaaaaguuuacuuuugcuc

SEQ ID NO: 1078907 - RNA, 22 nt, Human
ggcuucagugacuggugcccuc

SEQ ID NO: 1078908 - RNA, 22 nt, Human
ggaggccuccugggggagguuc

SEQ ID NO: 1078909 - RNA, 22 nt, Human
aagccucuggggccucaucugu

SEQ ID NO: 1078910 - RNA, 22 nt, Human
uaaucacaucaggguaaauggg

SEQ ID NO: 1078911 - RNA, 22 nt, Human
cagggccucauggccggggugc

SEQ ID NO: 1078912 - RNA, 19 nt, Human
caguuacaggcacuguggg

SEQ ID NO: 1078913 - RNA, 22 nt, Human
uacagaaauacagucaggccua

SEQ ID NO: 1078914 - RNA, 22 nt, Human
aaagaagagcuggaaggagucu

SEQ ID NO: 1078915 - RNA, 22 nt, Human
cccugccucugaagcugcucag

SEQ ID NO: 1078916 - RNA, 22 nt, Human
cuggcccuaugagccuccugau

SEQ ID NO: 1078917 - RNA, 22 nt, Human
ugggccugccccaggcuucagc

SEQ ID NO: 1078918 - RNA, 22 nt, Human
ggcccagcacagugcuuggggg

SEQ ID NO: 1078919 - RNA, 22 nt, Human
uaauuucacugauaugaaguca

SEQ ID NO: 1078920 - RNA, 19 nt, Human
ucucugcuucucuuggcau

SEQ ID NO: 1078921 - RNA, 22 nt, Human
cacagcuuccauuagaaugaga

SEQ ID NO: 1078922 - RNA, 21 nt, Human
gcaaagugugggcauaaacag

SEQ ID NO: 1078923 - RNA, 19 nt, Human
acauagcuggcuacacugu

SEQ ID NO: 1078924 - RNA, 22 nt, Human
aaaugcagaucccugaaucuca

SEQ ID NO: 1078925 - RNA, 22 nt, Human
aauacuauguagccaaaauaau

SEQ ID NO: 1078926 - RNA, 22 nt, Human
uauuauguaaagguuauugcag

SEQ ID NO: 1078927 - RNA, 22 nt, Human
auucucaauggcuacuuucaua

SEQ ID NO: 1078928 - RNA, 22 nt, Human
agaagccauguuuaguaggaug

SEQ ID NO: 1078929 - RNA, 22 nt, Human
uggaaguugaaucucagucaug

SEQ ID NO: 1078930 - RNA, 22 nt, Human
aaucauguuuacgugacauguc

SEQ ID NO: 1078931 - RNA, 22 nt, Human
guucacauggcauuuucacauc

SEQ ID NO: 1078932 - RNA, 22 nt, Human
gacccaggcucgugggacggcu

SEQ ID NO: 1078933 - RNA, 22 nt, Human
auaaaaucuuuaugugcucugc

SEQ ID NO: 1078934 - RNA, 22 nt, Human
agcuuuuauuggcugucauuug

SEQ ID NO: 1078935 - RNA, 22 nt, Human
augcuguggggagugaggguag

SEQ ID NO: 1078936 - RNA, 20 nt, Human
aaucacaguuaacucuuucu

SEQ ID NO: 1078937 - RNA, 22 nt, Human
gcugagugagguccagagcuug

SEQ ID NO: 1078938 - RNA, 22 nt, Human
agcugccuguccuaggccauca

SEQ ID NO: 1078939 - RNA, 22 nt, Human
auuauugccagcuauuacaaca

SEQ ID NO: 1078940 - RNA, 22 nt, Human
uuuacaucucaccagauucaua

SEQ ID NO: 1078941 - RNA, 22 nt, Human
ggugaagggugucauggcauuu

SEQ ID NO: 1078942 - RNA, 22 nt, Human
gugaggcagcaggagccucugu

SEQ ID NO: 1078943 - RNA, 22 nt, Human
gccuggaaauugaggcacaguu

SEQ ID NO: 1078944 - RNA, 22 nt, Human
uuaggaauauuuucugaguagu

SEQ ID NO: 1078945 - RNA, 20 nt, Human
ucugagacuuguagugugga

SEQ ID NO: 1078946 - RNA, 22 nt, Human
cagacaggagacuggaucaugg

SEQ ID NO: 1078947 - RNA, 22 nt, Human
agccagaggccagccugccuca

SEQ ID NO: 1078948 - RNA, 22 nt, Human
cccucuacagggaagcgcuuuc

SEQ ID NO: 1078949 - RNA, 22 nt, Human
ggagcugugcugggugaucagg

SEQ ID NO: 1078950 - RNA, 22 nt, Human
ugcugucaagaaaacaagcaau

SEQ ID NO: 1078951 - RNA, 22 nt, Human
agguaagaauagaggauugggg

SEQ ID NO: 1078952 - RNA, 22 nt, Human
uagaaaguaaaucaguuuuauu

SEQ ID NO: 1078953 - RNA, 22 nt, Human
ugcuucugacauguucuugguu

SEQ ID NO: 1078954 - RNA, 22 nt, Human
aguggcagagcaggugcuggaa

SEQ ID NO: 1078955 - RNA, 22 nt, Human
ugcugccacauuuaaagagggg

SEQ ID NO: 1078956 - RNA, 22 nt, Human
cagaguguggcaucuuccaacu

SEQ ID NO: 1078957 - RNA, 22 nt, Human
uggccugguccuugucaaggca

SEQ ID NO: 1078958 - RNA, 22 nt, Human
ucuuucaaaugcuugaauugga

SEQ ID NO: 1078959 - RNA, 22 nt, Human
gagcuuggugaugccuccuggu

SEQ ID NO: 1078960 - RNA, 18 nt, Human
aggcacuggaauuaaggg

SEQ ID NO: 1078961 - RNA, 22 nt, Human
uuuugaaagggugauuuggcuu

SEQ ID NO: 1078962 - RNA, 22 nt, Human
uuggaccaaggucugcucuuuc

SEQ ID NO: 1078963 - RNA, 22 nt, Human
gugcaagacuuccuaagcaaua

SEQ ID NO: 1078964 - RNA, 22 nt, Human
cucccaggggaacuaucaagua

SEQ ID NO: 1078965 - RNA, 22 nt, Human
cgggcuggcugcagcugcugga

SEQ ID NO: 1078966 - RNA, 22 nt, Human
acuaaaugaacuauuaauacuu

SEQ ID NO: 1078967 - RNA, 22 nt, Human
ucucaugguuugugauucaaau

SEQ ID NO: 1078968 - RNA, 22 nt, Human
augugcucacccuauuuaugga

SEQ ID NO: 1078969 - RNA, 22 nt, Human
guuucacagucugcagaauuuu

SEQ ID NO: 1078970 - RNA, 22 nt, Human
gcucuguguugucagaggcacc

SEQ ID NO: 1078971 - RNA, 22 nt, Human
cugaaggagguagagugacaua

SEQ ID NO: 1078972 - RNA, 22 nt, Human
caccauuuaagaaagccaaauu

SEQ ID NO: 1078973 - RNA, 20 nt, Human
cugggcucgguggcccuggc

SEQ ID NO: 1078974 - RNA, 22 nt, Human
caggcagagucagauuagacuu

SEQ ID NO: 1078975 - RNA, 22 nt, Human
auaaauuuauaauuguuuccug

SEQ ID NO: 1078976 - RNA, 23 nt, Human
gaauucuuaaggucacuaaaguc

SEQ ID NO: 1078977 - RNA, 22 nt, Human
cagcaggggaacugugggccag

SEQ ID NO: 1078978 - RNA, 22 nt, Human
ucaggcagcauuaaacuucagc

SEQ ID NO: 1078979 - RNA, 22 nt, Human
agauuucaauggauauugcaag

SEQ ID NO: 1078980 - RNA, 22 nt, Human
aaauaguucagcuuguaaaccc

SEQ ID NO: 1078981 - RNA, 22 nt, Human
ugcuuuaucaaagcuauaguga

SEQ ID NO: 1078982 - RNA, 22 nt, Human
auuuucagaacauucauucacu

SEQ ID NO: 1078983 - RNA, 22 nt, Human
cugggcagcugugcaaacaaua

SEQ ID NO: 1078984 - RNA, 20 nt, Human
ccugccugccucggcucauu

SEQ ID NO: 1078985 - RNA, 22 nt, Human
agcugcagauucuaucuagaag

SEQ ID NO: 1078986 - RNA, 21 nt, Human
ucaggggcuguguuuuccauc

SEQ ID NO: 1078987 - RNA, 22 nt, Human
auguagagcaguguuguccaau

SEQ ID NO: 1078988 - RNA, 22 nt, Human
ggccucugcaacuggcuguggc

SEQ ID NO: 1078989 - RNA, 22 nt, Human
aagacuuucugggguguaaagg

SEQ ID NO: 1078990 - RNA, 22 nt, Human
uccuguaguugcuaaguuuguu

SEQ ID NO: 1078991 - RNA, 22 nt, Human
ucacagggauggaauagaaaua

SEQ ID NO: 1078992 - RNA, 22 nt, Human
uguucauuuugaaguacuucaa

SEQ ID NO: 1078993 - RNA, 23 nt, Human
ugggucagcugccuccaggacaa

SEQ ID NO: 1078994 - RNA, 22 nt, Human
uucacauuggugauauguuucu

SEQ ID NO: 1078995 - RNA, 22 nt, Human
gacuuugaacaguguaucagua

SEQ ID NO: 1078996 - RNA, 22 nt, Human
ccugaagcaaggguaggcaggu

SEQ ID NO: 1078997 - RNA, 22 nt, Human
agauuuaaauuugcuacaauuc

SEQ ID NO: 1078998 - RNA, 22 nt, Human
acaauucugaugguuucccagu

SEQ ID NO: 1078999 - RNA, 22 nt, Human
gguccuggaaauugacggaaag

SEQ ID NO: 1079000 - RNA, 22 nt, Human
aguggagaauaugcagaaagcc

SEQ ID NO: 1079001 - RNA, 22 nt, Human
ucacagaaugucagaguugggg

SEQ ID NO: 1079002 - RNA, 22 nt, Human
acuucucuucauagguggcaau

SEQ ID NO: 1079003 - RNA, 22 nt, Human
ccagccuucugagcugccugga

SEQ ID NO: 1079004 - RNA, 22 nt, Human
cccuuagcuccaagggguuugg

SEQ ID NO: 1079005 - RNA, 22 nt, Human
ucaaaucucaucuugaauugua

SEQ ID NO: 1079006 - RNA, 22 nt, Human
cagugguauuugagagaaugga

SEQ ID NO: 1079007 - RNA, 22 nt, Human
uugcuuuguuuaaaagugguau

SEQ ID NO: 1079008 - RNA, 22 nt, Human
ggcagaaggccucccagcuccu

SEQ ID NO: 1079009 - RNA, 22 nt, Human
uggcagagacaaggccgggccu

SEQ ID NO: 1079010 - RNA, 22 nt, Human
caaagugcugagauuacaggua

SEQ ID NO: 1079011 - RNA, 22 nt, Human
aaauuguggcgucuguaagagu

SEQ ID NO: 1079012 - RNA, 23 nt, Human
uacugccuuguucauguguauuu

SEQ ID NO: 1079013 - RNA, 22 nt, Human
uaggggaaagcagaauccugga

SEQ ID NO: 1079014 - RNA, 22 nt, Human
ggcucagcgcgcugggagggag

SEQ ID NO: 1079015 - RNA, 22 nt, Human
cagaacagaaguaaaauuuacc

SEQ ID NO: 1079016 - RNA, 21 nt, Human
gcccagaagacuggcucugcc

SEQ ID NO: 1079017 - RNA, 22 nt, Human
gcccucagcaggaaagaucaac

SEQ ID NO: 1079018 - RNA, 22 nt, Human
ugauuucauaguauauacauga

SEQ ID NO: 1079019 - RNA, 22 nt, Human
ggcuuuaaacacugaaauugca

SEQ ID NO: 1079020 - RNA, 22 nt, Human
acauuguauaaugauuaucaca

SEQ ID NO: 1079021 - RNA, 22 nt, Human
cagaaaauaaacauuuguggaa

SEQ ID NO: 1079022 - RNA, 22 nt, Human
auuuugugaacccucaagcaau

SEQ ID NO: 1079023 - RNA, 22 nt, Human
cugaguccagggacagaggcgu

SEQ ID NO: 1079024 - RNA, 22 nt, Human
ugagacaguucugcagcugggu

SEQ ID NO: 1079025 - RNA, 22 nt, Human
caguauuuguucccuaucaaug

SEQ ID NO: 1079026 - RNA, 22 nt, Human
gaaguuaguuggggcccaagaa

SEQ ID NO: 1079027 - RNA, 22 nt, Human
gugcaaauguaauugcaguuuu

SEQ ID NO: 1079028 - RNA, 22 nt, Human
uauuucaucuggaacaagguaa

SEQ ID NO: 1079029 - RNA, 22 nt, Human
aaagccuugcccgucacuggga

SEQ ID NO: 1079030 - RNA, 22 nt, Human
gaggaaccuccugaaaaguaua

SEQ ID NO: 1079031 - RNA, 21 nt, Human
gcagaaaggaaucuuaggucc

SEQ ID NO: 1079032 - RNA, 22 nt, Human
caugccucugcagcuguuuauu

SEQ ID NO: 1079033 - RNA, 22 nt, Human
auccugcuuguuacuuauagag

SEQ ID NO: 1079034 - RNA, 22 nt, Human
agcagaagugccuuagcaauca

SEQ ID NO: 1079035 - RNA, 22 nt, Human
acaaaauuaugaagaggccuug

SEQ ID NO: 1079036 - RNA, 22 nt, Human
ucagggcaucucuuaaguggug

SEQ ID NO: 1079037 - RNA, 22 nt, Human
gcuguguuugacaguagcagac

SEQ ID NO: 1079038 - RNA, 22 nt, Human
uggaagagggagcuggguggcc

SEQ ID NO: 1079039 - RNA, 20 nt, Human
ucauugcacauaauggaagc

SEQ ID NO: 1079040 - RNA, 22 nt, Human
ccucugcaccauagccuucagc

SEQ ID NO: 1079041 - RNA, 22 nt, Human
ucucaggaagugauauugagac

SEQ ID NO: 1079042 - RNA, 22 nt, Human
agugaggucauacuggagaggg

SEQ ID NO: 1079043 - RNA, 22 nt, Human
acuguaaaaugagauauguaua

SEQ ID NO: 1079044 - RNA, 22 nt, Human
cucagagaagucuuugcuaaac

SEQ ID NO: 1079045 - RNA, 22 nt, Human
gcagggacgccagggacagcaa

SEQ ID NO: 1079046 - RNA, 22 nt, Human
cuggcucagugccuucagaagu

SEQ ID NO: 1079047 - RNA, 22 nt, Human
acagcucuguugccagaucugc

SEQ ID NO: 1079048 - RNA, 22 nt, Human
gacaaauguaccccuagagucu

SEQ ID NO: 1079049 - RNA, 21 nt, Human
ugggccucaggcagcugugac

SEQ ID NO: 1079050 - RNA, 22 nt, Human
cuucagaagaaaagcagugugu

SEQ ID NO: 1079051 - RNA, 22 nt, Human
guucuggaagcuuuugagcaac

SEQ ID NO: 1079052 - RNA, 22 nt, Human
caguaggagguucugagguucu

SEQ ID NO: 1079053 - RNA, 22 nt, Human
agcaggugagcacagccaggcu

SEQ ID NO: 1079054 - RNA, 22 nt, Human
acugggaguucuccaugucccu

SEQ ID NO: 1079055 - RNA, 22 nt, Human
agcaggcuaggaaccucacugc

SEQ ID NO: 1079056 - RNA, 22 nt, Human
caguggguggcuaaguggcuga

SEQ ID NO: 1079057 - RNA, 22 nt, Human
cagcugcaugucuguggugguc

SEQ ID NO: 1079058 - RNA, 22 nt, Human
uaguuaaagagauccacauucc

SEQ ID NO: 1079059 - RNA, 22 nt, Human
gggaccuggcaccuuugcucug

SEQ ID NO: 1079060 - RNA, 22 nt, Human
uggcucaggggucuggcucugu

SEQ ID NO: 1079061 - RNA, 22 nt, Human
agugaaauaaagcugccuaugg

SEQ ID NO: 1079062 - RNA, 22 nt, Human
aguggagacaggacagucgaua

SEQ ID NO: 1079063 - RNA, 22 nt, Human
agggaaauuaaugugagcaaug

SEQ ID NO: 1079064 - RNA, 16 nt, Human
gcaggcagaucacaug

SEQ ID NO: 1079065 - RNA, 17 nt, Human
cucacggaggaugaauc

SEQ ID NO: 1079066 - RNA, 22 nt, Human
guuguacagcauccagugcaga

SEQ ID NO: 1079067 - RNA, 22 nt, Human
cacugaguucccugacauuuca

SEQ ID NO: 1079068 - RNA, 22 nt, Human
cauggaacuucaagaagaaagc

SEQ ID NO: 1079069 - RNA, 23 nt, Human
aggugccaacugagagcugagag

SEQ ID NO: 1079070 - RNA, 22 nt, Human
gagugcaguaugagaggcugcu

SEQ ID NO: 1079071 - RNA, 20 nt, Human
ucuggcucuuugcuccuccc

SEQ ID NO: 1079072 - RNA, 22 nt, Human
uaaguucaaugaacucaguucu

SEQ ID NO: 1079073 - RNA, 22 nt, Human
caggcaggagccagggauucca

SEQ ID NO: 1079074 - RNA, 22 nt, Human
uggccugggccggcagauauac

SEQ ID NO: 1079075 - RNA, 22 nt, Human
gaagggugugauuugccugaga

SEQ ID NO: 1079076 - RNA, 22 nt, Human
uuuuuuaucuaugguaguacca

SEQ ID NO: 1079077 - RNA, 22 nt, Human
aaaucaguuguuauauuaaaga

SEQ ID NO: 1079078 - RNA, 22 nt, Human
gcauggugacaucaugugaaug

SEQ ID NO: 1079079 - RNA, 22 nt, Human
cuggugcuguagccugauugag

SEQ ID NO: 1079080 - RNA, 19 nt, Human
ucuggcuccgccucuuagu

SEQ ID NO: 1079081 - RNA, 22 nt, Human
agugcuguccaguuucacaggu

SEQ ID NO: 1079082 - RNA, 22 nt, Human
ccugcuggcugguagaguuccg

SEQ ID NO: 1079083 - RNA, 22 nt, Human
uuucacauuggcuucuauuucu

SEQ ID NO: 1079084 - RNA, 19 nt, Human
auauccuugagaaagggaa

SEQ ID NO: 1079085 - RNA, 22 nt, Human
ggcaggcuugauauggggggac

SEQ ID NO: 1079086 - RNA, 22 nt, Human
gccaggggacgcggagcgacga

SEQ ID NO: 1079087 - RNA, 18 nt, Human
uaggaacauugauuggag

SEQ ID NO: 1079088 - RNA, 22 nt, Human
aguuuccaggcaggagcuaauu

SEQ ID NO: 1079089 - RNA, 21 nt, Human
agcagccauuucacagagacu

SEQ ID NO: 1079090 - RNA, 22 nt, Human
agcagagaggagguggcccugu

SEQ ID NO: 1079091 - RNA, 22 nt, Human
acacauauauacauauuugugc

SEQ ID NO: 1079092 - RNA, 22 nt, Human
gcuggguggaucggaggcucug

SEQ ID NO: 1079093 - RNA, 19 nt, Human
cauuuuaagcauccccagu

SEQ ID NO: 1079094 - RNA, 22 nt, Human
uugcagagagguuaggaacuca

SEQ ID NO: 1079095 - RNA, 22 nt, Human
aagaagagaacuggcauccuaa

SEQ ID NO: 1079096 - RNA, 22 nt, Human
uggagguguccaacucgugggu

SEQ ID NO: 1079097 - RNA, 22 nt, Human
uacacuuuucugguuacucuug

SEQ ID NO: 1079098 - RNA, 19 nt, Human
ucccucagucugccaggcc

SEQ ID NO: 1079099 - RNA, 22 nt, Human
ccaggugugauuuggcaguguc

SEQ ID NO: 1079100 - RNA, 22 nt, Human
aggagagagcugagcuuugcug

SEQ ID NO: 1079101 - RNA, 22 nt, Human
aggggccauuguucugcccgcu

SEQ ID NO: 1079102 - RNA, 22 nt, Human
aucagaauuagccagugaggcu

SEQ ID NO: 1079103 - RNA, 22 nt, Human
agcugagcauuugauccaccuc

SEQ ID NO: 1079104 - RNA, 22 nt, Human
uccaagaacccaagcgaaugcc

SEQ ID NO: 1079105 - RNA, 22 nt, Human
acauagaacuucgaugucuuuu

SEQ ID NO: 1079106 - RNA, 22 nt, Human
ccccagcugcauacuugccaag

SEQ ID NO: 1079107 - RNA, 20 nt, Human
uggcaggaauagggccagag

SEQ ID NO: 1079108 - RNA, 22 nt, Human
aauguacaaggguuccaguuuu

SEQ ID NO: 1079109 - RNA, 22 nt, Human
ucauucucagacucuuggccuc

SEQ ID NO: 1079110 - RNA, 22 nt, Human
gaggagaagcuaagaaacacag

SEQ ID NO: 1079111 - RNA, 22 nt, Human
gccaccagguuagauccagccu

SEQ ID NO: 1079112 - RNA, 22 nt, Human
ggcaguggaggacccugugucu

SEQ ID NO: 1079113 - RNA, 22 nt, Human
agauguaaacucucaugucauu

SEQ ID NO: 1079114 - RNA, 22 nt, Human
ucagcugagcuccagcucauag

SEQ ID NO: 1079115 - RNA, 22 nt, Human
cagggaggcugucuuaugccug

SEQ ID NO: 1079116 - RNA, 22 nt, Human
agccagggaagaggccuaccuc

SEQ ID NO: 1079117 - RNA, 17 nt, Human
agugaggagauuggaag

SEQ ID NO: 1079118 - RNA, 22 nt, Human
ggcuggucacaccacugcaggg

SEQ ID NO: 1079119 - RNA, 18 nt, Human
uguuccaaggaaggaauc

SEQ ID NO: 1079120 - RNA, 22 nt, Human
cacacuuuuggcauguuugguu

SEQ ID NO: 1079121 - RNA, 17 nt, Human
gcuaggagagggaggag

SEQ ID NO: 1079122 - RNA, 22 nt, Human
agggccucgggcucaguggguc

SEQ ID NO: 1079123 - RNA, 22 nt, Human
ugaggcaggaugcuugcacagg

SEQ ID NO: 1079124 - RNA, 22 nt, Human
ggagaaggugcuggucacugug

SEQ ID NO: 1079125 - RNA, 22 nt, Human
gaaauaacagcucuggaagagu

SEQ ID NO: 1079126 - RNA, 22 nt, Human
cauuuucagcacccaucugaaa

SEQ ID NO: 1079127 - RNA, 22 nt, Human
ccucucccacguggcagaggcu

SEQ ID NO: 1079128 - RNA, 22 nt, Human
gugcccaguugaggccaggacu

SEQ ID NO: 1079129 - RNA, 22 nt, Human
cuuucugaaagacauuuuaacu

SEQ ID NO: 1079130 - RNA, 22 nt, Human
ugaugcugagccugggacugac

SEQ ID NO: 1079131 - RNA, 22 nt, Human
cuguggcuaugguguacauacu

SEQ ID NO: 1079132 - RNA, 22 nt, Human
uuuacacauaccucuuuaaagu

SEQ ID NO: 1079133 - RNA, 22 nt, Human
ucacaggguuuggaagccuccu

SEQ ID NO: 1079134 - RNA, 22 nt, Human
caggaacagcaccaggagcuag

SEQ ID NO: 1079135 - RNA, 22 nt, Human
uucaaucauuagaaucucaggc

SEQ ID NO: 1079136 - RNA, 22 nt, Human
uuggacuuaacaaagggugaug

SEQ ID NO: 1079137 - RNA, 22 nt, Human
uagguggugggauaugagcauc

SEQ ID NO: 1079138 - RNA, 22 nt, Human
ucuuccaguguagacaucugcc

SEQ ID NO: 1079139 - RNA, 22 nt, Human
agcaggugcguuacuucacucu

SEQ ID NO: 1079140 - RNA, 22 nt, Human
agcaaauacauuuuuagcauaa

SEQ ID NO: 1079141 - RNA, 22 nt, Human
ccugucugcaugagugagcaua

SEQ ID NO: 1079142 - RNA, 22 nt, Human
cugcucuggcuguguacuucag

SEQ ID NO: 1079143 - RNA, 22 nt, Human
cagaggaaguuccuugaugaga

SEQ ID NO: 1079144 - RNA, 22 nt, Human
agauguggccggcuagggagag

SEQ ID NO: 1079145 - RNA, 23 nt, Human
ccugcucaggcgugugcccugcu

SEQ ID NO: 1079146 - RNA, 22 nt, Human
guacagauuaauaauauacuga

SEQ ID NO: 1079147 - RNA, 22 nt, Human
uuucaaaggaggcugagaggau

SEQ ID NO: 1079148 - RNA, 22 nt, Human
ugagucagccagagcugccaug

SEQ ID NO: 1079149 - RNA, 22 nt, Human
gcuguccaugucuggccucagu

SEQ ID NO: 1079150 - RNA, 20 nt, Human
caggccucugggggcccugg

SEQ ID NO: 1079151 - RNA, 22 nt, Human
acuggcugaguuuauguucaca

SEQ ID NO: 1079152 - RNA, 22 nt, Human
guccucugucccuggggcacgg

SEQ ID NO: 1079153 - RNA, 22 nt, Human
ugccacccagccaggaguggga

SEQ ID NO: 1079154 - RNA, 22 nt, Human
ggcuucuuccugugaacauguu

SEQ ID NO: 1079155 - RNA, 22 nt, Human
guuucacaugaaacuuggggaa

SEQ ID NO: 1079156 - RNA, 22 nt, Human
uugcucaggcuggugugcagug

SEQ ID NO: 1079157 - RNA, 22 nt, Human
ugcagcagacugaguaugagaa

SEQ ID NO: 1079158 - RNA, 22 nt, Human
aacugcuuuuugaucucaggag

SEQ ID NO: 1079159 - RNA, 22 nt, Human
ugggaguggggcauagaaggua

SEQ ID NO: 1079160 - RNA, 22 nt, Human
augaaauuugaccaauuauuua

SEQ ID NO: 1079161 - RNA, 19 nt, Human
ucaucucacagggccuggc

SEQ ID NO: 1079162 - RNA, 22 nt, Human
aagagcuguaugccauaugauu

SEQ ID NO: 1079163 - RNA, 22 nt, Human
uaacagcaaccacagugcuggu

SEQ ID NO: 1079164 - RNA, 22 nt, Human
uggagaugaauauguguaccug

SEQ ID NO: 1079165 - RNA, 22 nt, Human
acaugaacauuauaucagcaag

SEQ ID NO: 1079166 - RNA, 20 nt, Human
aagcuggguaggagaggagc

SEQ ID NO: 1079167 - RNA, 22 nt, Human
acuuccuggcguagcugacauu

SEQ ID NO: 1079168 - RNA, 22 nt, Human
ccaggcaggcgauggugcagug

SEQ ID NO: 1079169 - RNA, 22 nt, Human
ccuggcagacagcacugaagcu

SEQ ID NO: 1079170 - RNA, 22 nt, Human
auucuuuccagacacugauugc

SEQ ID NO: 1079171 - RNA, 22 nt, Human
uaugucaugucuuagagaauga

SEQ ID NO: 1079172 - RNA, 22 nt, Human
gcacacauucggauucuuaacc

SEQ ID NO: 1079173 - RNA, 22 nt, Human
cauucacaaagcugauugaugg

SEQ ID NO: 1079174 - RNA, 22 nt, Human
agauuuguaugucuaaauguaa

SEQ ID NO: 1079175 - RNA, 22 nt, Human
uuaacaaagcucuguuccuuuu

SEQ ID NO: 1079176 - RNA, 20 nt, Human
gggguuggcuggcacaggga

SEQ ID NO: 1079177 - RNA, 22 nt, Human
uccagucaagcuugagaauuuc

SEQ ID NO: 1079178 - RNA, 22 nt, Human
ccccaccugugcgucugccgca

SEQ ID NO: 1079179 - RNA, 22 nt, Human
cuacuugguaccugaagaucgg

SEQ ID NO: 1079180 - RNA, 22 nt, Human
ucuccaggagcaagucacccag

SEQ ID NO: 1079181 - RNA, 19 nt, Human
ucccaggcaaaggcuucuc

SEQ ID NO: 1079182 - RNA, 22 nt, Human
agcuucuccaucugcccagaga

SEQ ID NO: 1079183 - RNA, 20 nt, Human
agcuaggagaaagcauggag

SEQ ID NO: 1079184 - RNA, 22 nt, Human
ggagcugugcagugacuacaga

SEQ ID NO: 1079185 - RNA, 22 nt, Human
ugagaacugaggauuugaauuc

SEQ ID NO: 1079186 - RNA, 22 nt, Human
aagagcuguugucugcuuacug

SEQ ID NO: 1079187 - RNA, 22 nt, Human
gaggcccaguccugcaagcacg

SEQ ID NO: 1079188 - RNA, 21 nt, Human
aaaaggaggcaggugaacagc

SEQ ID NO: 1079189 - RNA, 22 nt, Human
cagaguguauucugcaguugca

SEQ ID NO: 1079190 - RNA, 22 nt, Human
cccaggccccagggcuugucag

SEQ ID NO: 1079191 - RNA, 22 nt, Human
cccagcaggucggugcugccug

SEQ ID NO: 1079192 - RNA, 22 nt, Human
gacucugcuacaggccgagguu

SEQ ID NO: 1079193 - RNA, 22 nt, Human
aaaacucugcaguuaguuucua

SEQ ID NO: 1079194 - RNA, 22 nt, Human
aggaacaauugauaaacucaca

SEQ ID NO: 1079195 - RNA, 22 nt, Human
cccacacucugagaaaugcuga

SEQ ID NO: 1079196 - RNA, 22 nt, Human
aagauaaacucuugauuucuga

SEQ ID NO: 1079197 - RNA, 22 nt, Human
acaaucacacaugcaauuauac

SEQ ID NO: 1079198 - RNA, 22 nt, Human
ugcugccaccugguggcugaag

SEQ ID NO: 1079199 - RNA, 23 nt, Human
agcaauaagaagggauacaugug

SEQ ID NO: 1079200 - RNA, 22 nt, Human
gcucacugcaaccucugcuucc

SEQ ID NO: 1079201 - RNA, 22 nt, Human
ucccagccugacagugcaucaa

SEQ ID NO: 1079202 - RNA, 22 nt, Human
acacagggcggaaagcaugaga

SEQ ID NO: 1079203 - RNA, 22 nt, Human
agaugggcgcccuggacugagg

SEQ ID NO: 1079204 - RNA, 22 nt, Human
aggcuccuaucgcuuucagcaa

SEQ ID NO: 1079205 - RNA, 21 nt, Human
uuagaagcuaaugcagcuggu

SEQ ID NO: 1079206 - RNA, 22 nt, Human
acagagcugggaucugaaccca

SEQ ID NO: 1079207 - RNA, 22 nt, Human
uaacagaauuugcuaaacuccg

SEQ ID NO: 1079208 - RNA, 22 nt, Human
guggcagguuccguagacagca

SEQ ID NO: 1079209 - RNA, 22 nt, Human
gggugggccacugagcagcgug

SEQ ID NO: 1079210 - RNA, 21 nt, Human
acacaacaggcagucauuuuc

SEQ ID NO: 1079211 - RNA, 22 nt, Human
ucucagagagaugaaacuucca

SEQ ID NO: 1079212 - RNA, 22 nt, Human
cagauggccagaggcagcugca

SEQ ID NO: 1079213 - RNA, 22 nt, Human
uuucaacaccagagaccaugcg

SEQ ID NO: 1079214 - RNA, 22 nt, Human
uccaucagauucccuccugaga

SEQ ID NO: 1079215 - RNA, 22 nt, Human
ccccagcucagugcagggacau

SEQ ID NO: 1079216 - RNA, 21 nt, Human
uucaaagacuugaugcugacc

SEQ ID NO: 1079217 - RNA, 22 nt, Human
auuauuagacuuauaugguagu

SEQ ID NO: 1079218 - RNA, 22 nt, Human
gcagccacacuguuacagaaug

SEQ ID NO: 1079219 - RNA, 22 nt, Human
gaaagcaguauuuaguucuguu

SEQ ID NO: 1079220 - RNA, 22 nt, Human
acaaaaagcuccauuacugucc

SEQ ID NO: 1079221 - RNA, 22 nt, Human
auugcauaugcagcacaucagg

SEQ ID NO: 1079222 - RNA, 22 nt, Human
agguggguccuggcucugccau

SEQ ID NO: 1079223 - RNA, 22 nt, Human
caauguaucaagaagcaucagu

SEQ ID NO: 1079224 - RNA, 22 nt, Human
aaaaguuaacuguguucaugca

SEQ ID NO: 1079225 - RNA, 22 nt, Human
aaccaggaagggcgcaaauuau

SEQ ID NO: 1079226 - RNA, 22 nt, Human
gguggcuggaggagcugaugga

SEQ ID NO: 1079227 - RNA, 22 nt, Human
ccucuggucccagcucugcugc

SEQ ID NO: 1079228 - RNA, 22 nt, Human
agcugccagaugacagugcuau

SEQ ID NO: 1079229 - RNA, 22 nt, Human
aguuauucauuuauucuguaca

SEQ ID NO: 1079230 - RNA, 22 nt, Human
gcuugcuggugccugcaggcuc

SEQ ID NO: 1079231 - RNA, 22 nt, Human
uaccucaugcuguacagcacgu

SEQ ID NO: 1079232 - RNA, 22 nt, Human
aaaugugugcacaaagacagcu

SEQ ID NO: 1079233 - RNA, 22 nt, Human
aagcugccuuccaugugaggaa

SEQ ID NO: 1079234 - RNA, 22 nt, Human
guugugcagucagacugccugg

SEQ ID NO: 1079235 - RNA, 22 nt, Human
cagugccucuuaagugucaccc

SEQ ID NO: 1079236 - RNA, 21 nt, Human
uucucagaucgaguagugaga

SEQ ID NO: 1079237 - RNA, 22 nt, Human
cacauggggcgcugcauuggcc

SEQ ID NO: 1079238 - RNA, 21 nt, Human
uuccucuugcuuccgccuugc

SEQ ID NO: 1079239 - RNA, 22 nt, Human
uuggcucaggaccccugugacu

SEQ ID NO: 1079240 - RNA, 22 nt, Human
uuuaucagaaguuagagaaaga

SEQ ID NO: 1079241 - RNA, 22 nt, Human
ugggcagauguggcucuccuug

SEQ ID NO: 1079242 - RNA, 22 nt, Human
uggugguuaugcgcuuuguggg

SEQ ID NO: 1079243 - RNA, 22 nt, Human
gggcugagaaguugaucccaag

SEQ ID NO: 1079244 - RNA, 22 nt, Human
agagaaaacucauugagguguc

SEQ ID NO: 1079245 - RNA, 22 nt, Human
cuggagugauacucagaaugug

SEQ ID NO: 1079246 - RNA, 20 nt, Human
augucugaaguaauccauuu

SEQ ID NO: 1079247 - RNA, 22 nt, Human
ugcugcaguguuugcugaaguu

SEQ ID NO: 1079248 - RNA, 23 nt, Human
gggcucagauuucauucugugcc

SEQ ID NO: 1079249 - RNA, 22 nt, Human
auuucuuaugaauauugacugu

SEQ ID NO: 1079250 - RNA, 22 nt, Human
gaaaucaauuucuugguugaua

SEQ ID NO: 1079251 - RNA, 22 nt, Human
aguuuccagcacagggcaagcu

SEQ ID NO: 1079252 - RNA, 22 nt, Human
uuguaugcugaucaaaagcuuc

SEQ ID NO: 1079253 - RNA, 22 nt, Human
gagcacagaaucuucccaugca

SEQ ID NO: 1079254 - RNA, 22 nt, Human
gcagcucugacaaugccuggaa

SEQ ID NO: 1079255 - RNA, 17 nt, Human
caggaaaauaugaguga

SEQ ID NO: 1079256 - RNA, 22 nt, Human
cacuaaaacuacauuggaaaca

SEQ ID NO: 1079257 - RNA, 19 nt, Human
ccacacagugugcaauuua

SEQ ID NO: 1079258 - RNA, 22 nt, Human
gaacacuuggcuuuggauuuaa

SEQ ID NO: 1079259 - RNA, 22 nt, Human
ggcagugaaucugagagccugg

SEQ ID NO: 1079260 - RNA, 22 nt, Human
ccuggcucgcugaccucagggg

SEQ ID NO: 1079261 - RNA, 22 nt, Human
ucccagggccgcaaacgaguuu

SEQ ID NO: 1079262 - RNA, 22 nt, Human
uggaggcaguaacugagcaaca

SEQ ID NO: 1079263 - RNA, 22 nt, Human
aaggcugcuuuuaacaugcaua

SEQ ID NO: 1079264 - RNA, 22 nt, Human
guucuuuugguagagugugcau

SEQ ID NO: 1079265 - RNA, 22 nt, Human
ugaagccauaggacagaggaua

SEQ ID NO: 1079266 - RNA, 17 nt, Human
ucaggcugggugcagug

SEQ ID NO: 1079267 - RNA, 22 nt, Human
cagcuuagauggauacaaaggu

SEQ ID NO: 1079268 - RNA, 22 nt, Human
cuagggaaauaaacugaguggu

SEQ ID NO: 1079269 - RNA, 22 nt, Human
gcucagggcuaaggcugagggg

SEQ ID NO: 1079270 - RNA, 22 nt, Human
aagcaauaggguaaucuacuca

SEQ ID NO: 1079271 - RNA, 22 nt, Human
ucaaggcuaaacuuucagagua

SEQ ID NO: 1079272 - RNA, 22 nt, Human
caugaaauaugcuaccugucuu

SEQ ID NO: 1079273 - RNA, 22 nt, Human
gggaccaggugggugcauuccg

SEQ ID NO: 1079274 - RNA, 22 nt, Human
ucucuggguuuuuguccuguac

SEQ ID NO: 1079275 - RNA, 22 nt, Human
acagcugaucauuuugaagaau

SEQ ID NO: 1079276 - RNA, 22 nt, Human
aagaggcauaaaauuuauaugg

SEQ ID NO: 1079277 - RNA, 22 nt, Human
agccacagggggugagggacaa

SEQ ID NO: 1079278 - RNA, 22 nt, Human
gaggccugcuuuggcacucugg

SEQ ID NO: 1079279 - RNA, 22 nt, Human
cagcagcuucuguugaucagaa

SEQ ID NO: 1079280 - RNA, 22 nt, Human
aggcugugaguuuugucucaga

SEQ ID NO: 1079281 - RNA, 22 nt, Human
aauguuugccugacuagagugg

SEQ ID NO: 1079282 - RNA, 22 nt, Human
uugaucauuuuucugguaaaau

SEQ ID NO: 1079283 - RNA, 22 nt, Human
ggucauugaaaucagaaggguu

SEQ ID NO: 1079284 - RNA, 23 nt, Human
ucuuuagaagaacaucagaaaug

SEQ ID NO: 1079285 - RNA, 22 nt, Human
ucuggggaauguucauuucuga

SEQ ID NO: 1079286 - RNA, 22 nt, Human
aaacaagucacuuuaucuugaa

SEQ ID NO: 1079287 - RNA, 22 nt, Human
ggcagcugcaaaucugcucugu

SEQ ID NO: 1079288 - RNA, 22 nt, Human
ugcacacacggagauaggcuuu

SEQ ID NO: 1079289 - RNA, 22 nt, Human
gaauguuuuucaaaccuguggc

SEQ ID NO: 1079290 - RNA, 22 nt, Human
uugaaaguccuucuugaguuac

SEQ ID NO: 1079291 - RNA, 22 nt, Human
uucaaaguccugucagguagcc

SEQ ID NO: 1079292 - RNA, 22 nt, Human
cugagccagcgggcucacuuuu

SEQ ID NO: 1079293 - RNA, 22 nt, Human
agcacuuuccuggcaaaugugg

SEQ ID NO: 1079294 - RNA, 22 nt, Human
uaaauucagugaguaauuucug

SEQ ID NO: 1079295 - RNA, 22 nt, Human
auacuguacgucccagauagga

SEQ ID NO: 1079296 - RNA, 22 nt, Human
aggcuaggcaugugcuaccaca

SEQ ID NO: 1079297 - RNA, 22 nt, Human
cagggcuguuagcugcugcucu

SEQ ID NO: 1079298 - RNA, 20 nt, Human
gcagagccucacugcaaggg

SEQ ID NO: 1079299 - RNA, 22 nt, Human
gagagcugucagcguagcaccg

SEQ ID NO: 1079300 - RNA, 22 nt, Human
auugcuuuagaaagaaaaauau

SEQ ID NO: 1079301 - RNA, 22 nt, Human
uugcaagggcaugugugcgugu

SEQ ID NO: 1079302 - RNA, 22 nt, Human
uaggcugggccugccuuccagg

SEQ ID NO: 1079303 - RNA, 22 nt, Human
acaaggcuuauaguugcuuuuu

SEQ ID NO: 1079304 - RNA, 22 nt, Human
gcacagaggaagcacagacucu

SEQ ID NO: 1079305 - RNA, 19 nt, Human
ucuaaacacagggacaagc

SEQ ID NO: 1079306 - RNA, 22 nt, Human
augagaauaugauuuacuauug

SEQ ID NO: 1079307 - RNA, 22 nt, Human
uaguucuucaugaauucagcuu

SEQ ID NO: 1079308 - RNA, 22 nt, Human
ucugaaauccuuuaucuuggcu

SEQ ID NO: 1079309 - RNA, 22 nt, Human
auggggcuguucucugcccugc

SEQ ID NO: 1079310 - RNA, 22 nt, Human
ggagccugcgggagcucccauu

SEQ ID NO: 1079311 - RNA, 22 nt, Human
agaaaguucacugguauauuuu

SEQ ID NO: 1079312 - RNA, 22 nt, Human
uggccaggggaguuccccucca

SEQ ID NO: 1079313 - RNA, 22 nt, Human
aaaucaguucucccuuucuuca

SEQ ID NO: 1079314 - RNA, 22 nt, Human
ccagacagcaguuaaaggacau

SEQ ID NO: 1079315 - RNA, 22 nt, Human
uacauugagcacguacuaugug

SEQ ID NO: 1079316 - RNA, 22 nt, Human
agcucugacugaagagaugcaa

SEQ ID NO: 1079317 - RNA, 22 nt, Human
ggaccaggccagccucccugcg

SEQ ID NO: 1079318 - RNA, 22 nt, Human
ggcucaggccuguaauccuagc

SEQ ID NO: 1079319 - RNA, 22 nt, Human
ugaucuccugaccuuguaaucc

SEQ ID NO: 1079320 - RNA, 21 nt, Human
ugcauucuuguguaagguagu

SEQ ID NO: 1079321 - RNA, 22 nt, Human
ggcccugcugaguggaguggag

SEQ ID NO: 1079322 - RNA, 22 nt, Human
caauuucuggaacuaauucuga

SEQ ID NO: 1079323 - RNA, 22 nt, Human
ucacaguacuccccaaaguuuc

SEQ ID NO: 1079324 - RNA, 21 nt, Human
ucacaucuauguuaagcaaac

SEQ ID NO: 1079325 - RNA, 22 nt, Human
agggggucguccggaagaccug

SEQ ID NO: 1079326 - RNA, 22 nt, Human
aucaaaguaguagguuuuggac

SEQ ID NO: 1079327 - RNA, 22 nt, Human
acuccuggguugcaguccucaa

SEQ ID NO: 1079328 - RNA, 22 nt, Human
gcugauguuuaguugauguuac

SEQ ID NO: 1079329 - RNA, 22 nt, Human
aacacuuuguugccuaugaacg

SEQ ID NO: 1079330 - RNA, 22 nt, Human
ccucaugguacuuacuguagcu

SEQ ID NO: 1079331 - RNA, 22 nt, Human
acagaacuuggaacuuuucaca

SEQ ID NO: 1079332 - RNA, 22 nt, Human
cggagcugccugccaagccugc

SEQ ID NO: 1079333 - RNA, 22 nt, Human
uuuuugaaggcugaugugauua

SEQ ID NO: 1079334 - RNA, 22 nt, Human
gcuucugaguucuugcuuaaua

SEQ ID NO: 1079335 - RNA, 22 nt, Human
ugacaguuuaguguaauaguua

SEQ ID NO: 1079336 - RNA, 22 nt, Human
acaauacucaugcucuuuuucu

SEQ ID NO: 1079337 - RNA, 22 nt, Human
uacacauuacauaauacuaucu

SEQ ID NO: 1079338 - RNA, 22 nt, Human
uguagaagcuagccuggagcca

SEQ ID NO: 1079339 - RNA, 22 nt, Human
aaggcauugagcaguuacagua

SEQ ID NO: 1079340 - RNA, 22 nt, Human
ccagcugcugugaggaccacag

SEQ ID NO: 1079341 - RNA, 22 nt, Human
ugaaaucuacccuauucagggu

SEQ ID NO: 1079342 - RNA, 22 nt, Human
gucagcaccucuuuggggagcu

SEQ ID NO: 1079343 - RNA, 22 nt, Human
gcuggcagggugguugagagag

SEQ ID NO: 1079344 - RNA, 19 nt, Human
agcuccugggcucugggcc

SEQ ID NO: 1079345 - RNA, 22 nt, Human
auauacuguaggccacuauaag

SEQ ID NO: 1079346 - RNA, 22 nt, Human
cccaggaaacccgaaggcgacc

SEQ ID NO: 1079347 - RNA, 22 nt, Human
uuacagauggcaguuucuugag

SEQ ID NO: 1079348 - RNA, 22 nt, Human
guauugcauuguuucaagcugu

SEQ ID NO: 1079349 - RNA, 22 nt, Human
cugccucucaggucccugagau

SEQ ID NO: 1079350 - RNA, 21 nt, Human
gcugucucuggcuccugggaa

SEQ ID NO: 1079351 - RNA, 22 nt, Human
ggcuggcuggcuuagcagagga

SEQ ID NO: 1079352 - RNA, 22 nt, Human
ugggaaggauaccuuggaacau

SEQ ID NO: 1079353 - RNA, 22 nt, Human
ucuguaaagacuccaaaagcca

SEQ ID NO: 1079354 - RNA, 22 nt, Human
uagcugccauugcuccaggaag

SEQ ID NO: 1079355 - RNA, 22 nt, Human
uugaaacuuuaguaaacuaagg

SEQ ID NO: 1079356 - RNA, 22 nt, Human
ggaagaggcugaggccaugcug

SEQ ID NO: 1079357 - RNA, 22 nt, Human
aaacaaauagugcaugggaauu

SEQ ID NO: 1079358 - RNA, 22 nt, Human
uccugucugucuuuggucccuu

SEQ ID NO: 1079359 - RNA, 22 nt, Human
gcugccuggcugaugaaaauuc

SEQ ID NO: 1079360 - RNA, 22 nt, Human
aaacacugguaugauguauagu

SEQ ID NO: 1079361 - RNA, 22 nt, Human
ucaccaggauuccuaucaguag

SEQ ID NO: 1079362 - RNA, 22 nt, Human
aggugagugugacugcaagaga

SEQ ID NO: 1079363 - RNA, 22 nt, Human
ggcugccucaaagcucaagcuc

SEQ ID NO: 1079364 - RNA, 22 nt, Human
ggcugugaacccuggcagugug

SEQ ID NO: 1079365 - RNA, 22 nt, Human
uuacaagcagcuacauaucaca

SEQ ID NO: 1079366 - RNA, 22 nt, Human
uggggacacagagccaaacuau

SEQ ID NO: 1079367 - RNA, 22 nt, Human
uccauggggcccaggaugagag

SEQ ID NO: 1079368 - RNA, 22 nt, Human
ugagcaggauucgccucuugca

SEQ ID NO: 1079369 - RNA, 22 nt, Human
uugccugugaggauucugguug

SEQ ID NO: 1079370 - RNA, 22 nt, Human
ugugcaugacagcauacaaacg

SEQ ID NO: 1079371 - RNA, 22 nt, Human
gagcugggauucaucuaugucu

SEQ ID NO: 1079372 - RNA, 22 nt, Human
agugaacaaguuaagaacacua

SEQ ID NO: 1079373 - RNA, 22 nt, Human
ugagugugcuaggugucucggu

SEQ ID NO: 1079374 - RNA, 22 nt, Human
uuucuaaacuggauucagccug

SEQ ID NO: 1079375 - RNA, 22 nt, Human
aguaaucaaauuaagcuaauug

SEQ ID NO: 1079376 - RNA, 22 nt, Human
ucugggcuuuacacugugcuua

SEQ ID NO: 1079377 - RNA, 21 nt, Human
uguggcagauguugggaggca

SEQ ID NO: 1079378 - RNA, 22 nt, Human
auucuggauauuacuuaucuau

SEQ ID NO: 1079379 - RNA, 20 nt, Human
aagagcugacucacaguggu

SEQ ID NO: 1079380 - RNA, 22 nt, Human
augucuuuauaaauguauaaug

SEQ ID NO: 1079381 - RNA, 22 nt, Human
ccugucuguauugguuugcuau

SEQ ID NO: 1079382 - RNA, 23 nt, Human
cagcagagagcagaccuuugugu

SEQ ID NO: 1079383 - RNA, 22 nt, Human
ucccucagaugagcuccuagca

SEQ ID NO: 1079384 - RNA, 22 nt, Human
ccagacaguuccuugagguuca

SEQ ID NO: 1079385 - RNA, 22 nt, Human
cucuggcuuugcucaugcaucc

SEQ ID NO: 1079386 - RNA, 22 nt, Human
aaggcagcaagaauuccagguu

SEQ ID NO: 1079387 - RNA, 19 nt, Human
ccagcagacacagcugccc

SEQ ID NO: 1079388 - RNA, 22 nt, Human
uagaggcauaagagggaagcag

SEQ ID NO: 1079389 - RNA, 22 nt, Human
agagcuuagaauuucagaugau

SEQ ID NO: 1079390 - RNA, 22 nt, Human
ucaaaguuggaaaagcuggccc

SEQ ID NO: 1079391 - RNA, 22 nt, Human
ucccaaagguccgagcgggaau

SEQ ID NO: 1079392 - RNA, 22 nt, Human
cacacaauuaugugugcacaau

SEQ ID NO: 1079393 - RNA, 22 nt, Human
gggggacuggaccguccugggu

SEQ ID NO: 1079394 - RNA, 21 nt, Human
ucuuugauuaagcuugacuag

SEQ ID NO: 1079395 - RNA, 22 nt, Human
uuggcuucuggcagucuggacg

SEQ ID NO: 1079396 - RNA, 22 nt, Human
uugauacccaaguguuaugggu

SEQ ID NO: 1079397 - RNA, 22 nt, Human
acaaguggguccuacauaaagc

SEQ ID NO: 1079398 - RNA, 22 nt, Human
ugggccacggggguggagagcu

SEQ ID NO: 1079399 - RNA, 22 nt, Human
ggcugggccgcggcuacccaga

SEQ ID NO: 1079400 - RNA, 22 nt, Human
gguagcagggcugugagucaga

SEQ ID NO: 1079401 - RNA, 22 nt, Human
agcaggaaggggccuagccugg

SEQ ID NO: 1079402 - RNA, 23 nt, Human
gccauggcugccccacaggccuc

SEQ ID NO: 1079403 - RNA, 22 nt, Human
uugucugaaagaucauuacauu

SEQ ID NO: 1079404 - RNA, 22 nt, Human
uggcccugcugggucagagcug

SEQ ID NO: 1079405 - RNA, 19 nt, Human
auguaugaggucuucugcu

SEQ ID NO: 1079406 - RNA, 22 nt, Human
ucucagagcuucaguuauuuuc

SEQ ID NO: 1079407 - RNA, 22 nt, Human
auucuacaacccaauaauaauu

SEQ ID NO: 1079408 - RNA, 22 nt, Human
caugaaauguuagaauuagaca

SEQ ID NO: 1079409 - RNA, 22 nt, Human
guuucgucaggcuuauucuauc

SEQ ID NO: 1079410 - RNA, 22 nt, Human
ugaaguaggcagcaugcugaga

SEQ ID NO: 1079411 - RNA, 22 nt, Human
ugcucuguauucuauggcaguu

SEQ ID NO: 1079412 - RNA, 18 nt, Human
auuuuucccagauggaua

SEQ ID NO: 1079413 - RNA, 22 nt, Human
uggcugcugagaaggcagcugu

SEQ ID NO: 1079414 - RNA, 22 nt, Human
uggcugcugcuuggucuucuuc

SEQ ID NO: 1079415 - RNA, 23 nt, Human
gggggcugguugacucucugcag

SEQ ID NO: 1079416 - RNA, 22 nt, Human
uuagaacaauauucucccuaca

SEQ ID NO: 1079417 - RNA, 22 nt, Human
uucacaggauauaugugcaggg

SEQ ID NO: 1079418 - RNA, 22 nt, Human
aaggaagaggcagguuuugcug

SEQ ID NO: 1079419 - RNA, 22 nt, Human
ucaacaauuuugagaugagaca

SEQ ID NO: 1079420 - RNA, 20 nt, Human
acaauagauuugagcaaagu

SEQ ID NO: 1079421 - RNA, 22 nt, Human
aacaguguguuuuguuauuaag

SEQ ID NO: 1079422 - RNA, 22 nt, Human
cugggccuuuaccuacggaguu

SEQ ID NO: 1079423 - RNA, 22 nt, Human
cauuuguaucauauguaucuua

SEQ ID NO: 1079424 - RNA, 22 nt, Human
cacaugaauucacauguauuuu

SEQ ID NO: 1079425 - RNA, 22 nt, Human
ugaaauguggagaugguaagua

SEQ ID NO: 1079426 - RNA, 22 nt, Human
gcagcucuuuucuuaaagagau

SEQ ID NO: 1079427 - RNA, 22 nt, Human
uacuuuaaaaacugauaauuca

SEQ ID NO: 1079428 - RNA, 22 nt, Human
aucauaaagugcuaucugauug

SEQ ID NO: 1079429 - RNA, 22 nt, Human
ucuuugaauccuuuacaucuga

SEQ ID NO: 1079430 - RNA, 22 nt, Human
cccagguggcagaagcugcagu

SEQ ID NO: 1079431 - RNA, 22 nt, Human
cacacagaugguaagggaggga

SEQ ID NO: 1079432 - RNA, 22 nt, Human
cacacaugagucuccccauugg

SEQ ID NO: 1079433 - RNA, 22 nt, Human
gcugugcaucuucauucuggac

SEQ ID NO: 1079434 - RNA, 22 nt, Human
gccugcagccccucugcaguag

SEQ ID NO: 1079435 - RNA, 22 nt, Human
acacagcaaggucugacuuugg

SEQ ID NO: 1079436 - RNA, 22 nt, Human
ucuuuauugcuacugguuuguc

SEQ ID NO: 1079437 - RNA, 22 nt, Human
guguggcugccagccaagaggc

SEQ ID NO: 1079438 - RNA, 22 nt, Human
caugucuuauauccugucuuca

SEQ ID NO: 1079439 - RNA, 22 nt, Human
ggaggagacggagugauuagug

SEQ ID NO: 1079440 - RNA, 22 nt, Human
ucaggcagagcuguggagcucu

SEQ ID NO: 1079441 - RNA, 22 nt, Human
aagauuuucagugccuaaaaca

SEQ ID NO: 1079442 - RNA, 22 nt, Human
uggggcuggggaucuugagccu

SEQ ID NO: 1079443 - RNA, 22 nt, Human
ugcagguggacacgggagacgg

SEQ ID NO: 1079444 - RNA, 22 nt, Human
ggcagagcugcaugagcacuca

SEQ ID NO: 1079445 - RNA, 22 nt, Human
acuccugguucccaguugagau

SEQ ID NO: 1079446 - RNA, 22 nt, Human
uugaaaaguuuugaaacacucu

SEQ ID NO: 1079447 - RNA, 22 nt, Human
ucagaaaccccaacaauggaga

SEQ ID NO: 1079448 - RNA, 22 nt, Human
ucagaaaauaacuguuaguuug

SEQ ID NO: 1079449 - RNA, 22 nt, Human
uucuccagacccuccugcagac

SEQ ID NO: 1079450 - RNA, 22 nt, Human
gcccagcaccucucucaggguu

SEQ ID NO: 1079451 - RNA, 22 nt, Human
gcagagucagccuccgagacag

SEQ ID NO: 1079452 - RNA, 22 nt, Human
cuggggucucaauucuagcggg

SEQ ID NO: 1079453 - RNA, 22 nt, Human
uggcuuccaaaggaaugggccu

SEQ ID NO: 1079454 - RNA, 22 nt, Human
ucccuggggauguuggccugcc

SEQ ID NO: 1079455 - RNA, 22 nt, Human
agcuggcuuuugugaagguuuu

SEQ ID NO: 1079456 - RNA, 22 nt, Human
aaacacauuuuaggaaaaucua

SEQ ID NO: 1079457 - RNA, 22 nt, Human
acaaaguaggaagauuagcuga

SEQ ID NO: 1079458 - RNA, 22 nt, Human
acuugcaugucaggaaauuaac

SEQ ID NO: 1079459 - RNA, 22 nt, Human
cagcacaggccugucuuugucu

SEQ ID NO: 1079460 - RNA, 22 nt, Human
aaucgguugaacccaggaagug

SEQ ID NO: 1079461 - RNA, 22 nt, Human
uaucaguagaacaauggacauu

SEQ ID NO: 1079462 - RNA, 22 nt, Human
uucaacaucuuggagcuggaac

SEQ ID NO: 1079463 - RNA, 22 nt, Human
agcaugcuauauugauuguagu

SEQ ID NO: 1079464 - RNA, 22 nt, Human
aagacaugcaauuagcaaggaa

SEQ ID NO: 1079465 - RNA, 22 nt, Human
acuuucauuuguaauaaacuuc

SEQ ID NO: 1079466 - RNA, 22 nt, Human
ugucucagaguaucccugaacu

SEQ ID NO: 1079467 - RNA, 22 nt, Human
uucuucaauuuuccauauacug

SEQ ID NO: 1079468 - RNA, 19 nt, Human
uggaggagaggaaaaguca

SEQ ID NO: 1079469 - RNA, 22 nt, Human
gucucagggacugcuucugggg

SEQ ID NO: 1079470 - RNA, 22 nt, Human
uuuacagaaugucaauuucuau

SEQ ID NO: 1079471 - RNA, 22 nt, Human
auacuucuagaaauacuaugca

SEQ ID NO: 1079472 - RNA, 22 nt, Human
agcacacaguauuagccauugu

SEQ ID NO: 1079473 - RNA, 22 nt, Human
ucuucaaauccuacagugucug

SEQ ID NO: 1079474 - RNA, 20 nt, Human
ugcugggcaugcaguggaaa

SEQ ID NO: 1079475 - RNA, 22 nt, Human
gaggcagcuuggggcugugggu

SEQ ID NO: 1079476 - RNA, 22 nt, Human
ggaggccaggaaggcucggaga

SEQ ID NO: 1079477 - RNA, 22 nt, Human
gaggcagaggaagguggucucu

SEQ ID NO: 1079478 - RNA, 22 nt, Human
uccugagaauagaguugcaugu

SEQ ID NO: 1079479 - RNA, 22 nt, Human
ggguccaggucuucaggcagag

SEQ ID NO: 1079480 - RNA, 22 nt, Human
uuauuuuaccuuccucugagcu

SEQ ID NO: 1079481 - RNA, 22 nt, Human
ugcaaacaggagaguaaguaua

SEQ ID NO: 1079482 - RNA, 22 nt, Human
uuggaccaucagcuccuccugg

SEQ ID NO: 1079483 - RNA, 22 nt, Human
gcuguggaguacagagcugguu

SEQ ID NO: 1079484 - RNA, 22 nt, Human
cuuggcugucuauaggaaagag

SEQ ID NO: 1079485 - RNA, 19 nt, Human
ucacaggcaucuccccaga

SEQ ID NO: 1079486 - RNA, 22 nt, Human
agcugccugcuuaugagcucca

SEQ ID NO: 1079487 - RNA, 22 nt, Human
cagcagaacaggcagggaagcu

SEQ ID NO: 1079488 - RNA, 22 nt, Human
uuccacauagaucacagguguu

SEQ ID NO: 1079489 - RNA, 22 nt, Human
uugccucccagcaugggcagcu

SEQ ID NO: 1079490 - RNA, 22 nt, Human
uuaaggcauucuccuacuaaua

SEQ ID NO: 1079491 - RNA, 22 nt, Human
ucuugaaagcauuuucuucauc

SEQ ID NO: 1079492 - RNA, 22 nt, Human
ugaaugagaacacugaaagagg

SEQ ID NO: 1079493 - RNA, 22 nt, Human
uaugagaaucugcaguaugcuu

SEQ ID NO: 1079494 - RNA, 23 nt, Human
cuucacagguucaggggauuaag

SEQ ID NO: 1079495 - RNA, 22 nt, Human
uuccgcuggggccgccuggcgg

SEQ ID NO: 1079496 - RNA, 22 nt, Human
guuaaugugauauaaaguauuu

SEQ ID NO: 1079497 - RNA, 22 nt, Human
ccaaaauuaagccucuuauguu

SEQ ID NO: 1079498 - RNA, 22 nt, Human
acuguggcucaucaggcuggug

SEQ ID NO: 1079499 - RNA, 22 nt, Human
agagauucauguuuacuguagg

SEQ ID NO: 1079500 - RNA, 19 nt, Human
ucccgcccacugagcgugc

SEQ ID NO: 1079501 - RNA, 22 nt, Human
aaggcucuggguuucauaggug

SEQ ID NO: 1079502 - RNA, 20 nt, Human
cugagagucugugcuuaguc

SEQ ID NO: 1079503 - RNA, 22 nt, Human
uccugagauucugcauuucuaa

SEQ ID NO: 1079504 - RNA, 22 nt, Human
gccugagagucugcauuucuaa

SEQ ID NO: 1079505 - RNA, 22 nt, Human
uugagaguuaccagcagaggaa

SEQ ID NO: 1079506 - RNA, 22 nt, Human
aacacaugccuuaagaauaagu

SEQ ID NO: 1079507 - RNA, 18 nt, Human
aggaagaccaucagauau

SEQ ID NO: 1079508 - RNA, 22 nt, Human
uagucucugcuuugcccuuggc

SEQ ID NO: 1079509 - RNA, 22 nt, Human
agagucagaaagcagacagggg

SEQ ID NO: 1079510 - RNA, 22 nt, Human
gacucuuucccugugacagagu

SEQ ID NO: 1079511 - RNA, 22 nt, Human
gcuggcuguuggagguaccugc

SEQ ID NO: 1079512 - RNA, 22 nt, Human
ccccucagguacccgugcagca

SEQ ID NO: 1079513 - RNA, 22 nt, Human
caaggccacugcucagguuucc

SEQ ID NO: 1079514 - RNA, 22 nt, Human
gaggaaggauuuaguuugaggg

SEQ ID NO: 1079515 - RNA, 22 nt, Human
ugaauaguucuacuacuugaca

SEQ ID NO: 1079516 - RNA, 22 nt, Human
augaggcagucuggccugaggg

SEQ ID NO: 1079517 - RNA, 22 nt, Human
gaaaaguauguuuauuuugacu

SEQ ID NO: 1079518 - RNA, 17 nt, Human
agaggcagauacuugga

SEQ ID NO: 1079519 - RNA, 22 nt, Human
acaauuucuaauauagaucuua

SEQ ID NO: 1079520 - RNA, 22 nt, Human
uauuacuaccaucugcuacuau

SEQ ID NO: 1079521 - RNA, 22 nt, Human
ugucccauggauaccaggcuau

SEQ ID NO: 1079522 - RNA, 21 nt, Human
ucuggcaggaagacggauggg

SEQ ID NO: 1079523 - RNA, 22 nt, Human
ggccugugcaagacagcacccc

SEQ ID NO: 1079524 - RNA, 22 nt, Human
caggccuggggcuggcuuccag

SEQ ID NO: 1079525 - RNA, 22 nt, Human
uuagccaugcccuagaagagga

SEQ ID NO: 1079526 - RNA, 22 nt, Human
ccugagagagugagcccugaca

SEQ ID NO: 1079527 - RNA, 22 nt, Human
ugcuuuuauuuaauaucuugca

SEQ ID NO: 1079528 - RNA, 22 nt, Human
ucuucauacaauuucagacauc

SEQ ID NO: 1079529 - RNA, 22 nt, Human
ugcugaaauuagaacauugagg

SEQ ID NO: 1079530 - RNA, 22 nt, Human
uggggguguccuggugcacaca

SEQ ID NO: 1079531 - RNA, 22 nt, Human
agucugucucugcuaaucacua

SEQ ID NO: 1079532 - RNA, 22 nt, Human
cagagcaguccuugucaaucag

SEQ ID NO: 1079533 - RNA, 22 nt, Human
ugucccagcagcuggguucucu

SEQ ID NO: 1079534 - RNA, 19 nt, Human
aaccaggaacuaaagcaga

SEQ ID NO: 1079535 - RNA, 22 nt, Human
cacugccuggaaggagagacau

SEQ ID NO: 1079536 - RNA, 22 nt, Human
caaaguuuuaguaaacauauau

SEQ ID NO: 1079537 - RNA, 22 nt, Human
uuccuaauggcaaaacauguuu

SEQ ID NO: 1079538 - RNA, 22 nt, Human
aaaccuguuaauagagcgaugc

SEQ ID NO: 1079539 - RNA, 22 nt, Human
augccuguaaucccagugcuuu

SEQ ID NO: 1079540 - RNA, 22 nt, Human
cugcagcuccccugagaucaag

SEQ ID NO: 1079541 - RNA, 22 nt, Human
ccucuucagcaaaguucggccc

SEQ ID NO: 1079542 - RNA, 20 nt, Human
gcaggcuccgggcuugggag

SEQ ID NO: 1079543 - RNA, 22 nt, Human
uccuuggcuuucuggagcuucu

SEQ ID NO: 1079544 - RNA, 22 nt, Human
gcagagugaagggagaggugug

SEQ ID NO: 1079545 - RNA, 22 nt, Human
gagaaugggaaugaaaguagca

SEQ ID NO: 1079546 - RNA, 17 nt, Human
auuucacuuagcaugag

SEQ ID NO: 1079547 - RNA, 22 nt, Human
cuggcagcauuaacagagagca

SEQ ID NO: 1079548 - RNA, 22 nt, Human
gccuccugguugcuucuccaac

SEQ ID NO: 1079549 - RNA, 22 nt, Human
ucagagcuaaggggagagcaaa

SEQ ID NO: 1079550 - RNA, 22 nt, Human
guguuccauguuugagguaguu

SEQ ID NO: 1079551 - RNA, 22 nt, Human
aagggcuggccacauucugggu

SEQ ID NO: 1079552 - RNA, 22 nt, Human
ggacaggaugcugaagaugaag

SEQ ID NO: 1079553 - RNA, 22 nt, Human
ggccugagcagacagcaugaug

SEQ ID NO: 1079554 - RNA, 22 nt, Human
gcugggagccccgagccagcgc

SEQ ID NO: 1079555 - RNA, 22 nt, Human
cuuacagugacccugcagauuu

SEQ ID NO: 1079556 - RNA, 22 nt, Human
gcaguggcaccgcuggcucugg

SEQ ID NO: 1079557 - RNA, 22 nt, Human
aucaacaugucauaaagugaaa

SEQ ID NO: 1079558 - RNA, 22 nt, Human
uggaggaugccauccaggauac

SEQ ID NO: 1079559 - RNA, 22 nt, Human
cacuucaauuaacuucagcauu

SEQ ID NO: 1079560 - RNA, 22 nt, Human
uaucaacauuaauauuuucugg

SEQ ID NO: 1079561 - RNA, 22 nt, Human
uugcaaggagccacucugccug

SEQ ID NO: 1079562 - RNA, 22 nt, Human
auggggugaccaugagcauuua

SEQ ID NO: 1079563 - RNA, 22 nt, Human
gggaguggguuuggccuaggcc

SEQ ID NO: 1079564 - RNA, 22 nt, Human
gcacacagaauugauucacugu

SEQ ID NO: 1079565 - RNA, 22 nt, Human
ucugugucugcagaaguucagc

SEQ ID NO: 1079566 - RNA, 22 nt, Human
cagacuuuugacauuaauacag

SEQ ID NO: 1079567 - RNA, 22 nt, Human
uccugugccuccaccugcuccg

SEQ ID NO: 1079568 - RNA, 22 nt, Human
acagugcuggcuacaacccugg

SEQ ID NO: 1079569 - RNA, 22 nt, Human
augagcugggccauccagugau

SEQ ID NO: 1079570 - RNA, 22 nt, Human
caggccuggagugcaauggcac

SEQ ID NO: 1079571 - RNA, 22 nt, Human
ccacagaccuuggcuuccaccu

SEQ ID NO: 1079572 - RNA, 18 nt, Human
ggagagugacagagucgu

SEQ ID NO: 1079573 - RNA, 22 nt, Human
acagagcacugcccugugccgc

SEQ ID NO: 1079574 - RNA, 22 nt, Human
acaaaguaagggcuaaugagca

SEQ ID NO: 1079575 - RNA, 21 nt, Human
ccugagggugguugugaagau

SEQ ID NO: 1079576 - RNA, 22 nt, Human
aucagcaaucucguguauuagg

SEQ ID NO: 1079577 - RNA, 22 nt, Human
gcccugcugcuggcagaggcgc

SEQ ID NO: 1079578 - RNA, 23 nt, Human
uuucacagcuuuuauucugcauc

SEQ ID NO: 1079579 - RNA, 22 nt, Human
uauuuggaaaguuuaucuaucu

SEQ ID NO: 1079580 - RNA, 22 nt, Human
uucuaaauguaaauaguaugau

SEQ ID NO: 1079581 - RNA, 22 nt, Human
uaaagucaucuuuaaacaugcc

SEQ ID NO: 1079582 - RNA, 22 nt, Human
gcucugcccagugcccugagac

SEQ ID NO: 1079583 - RNA, 22 nt, Human
uuagugauaggacuuuaaagcc

SEQ ID NO: 1079584 - RNA, 22 nt, Human
ucuccuggauggaccuucucuu

SEQ ID NO: 1079585 - RNA, 22 nt, Human
cacagugaagcaugcagacauc

SEQ ID NO: 1079586 - RNA, 22 nt, Human
caaggcugugcaggguccauau

SEQ ID NO: 1079587 - RNA, 22 nt, Human
cacucaggcugugucaggagga

SEQ ID NO: 1079588 - RNA, 22 nt, Human
uguaaacagccccauggagagc

SEQ ID NO: 1079589 - RNA, 19 nt, Human
agagaaggauccuaugguu

SEQ ID NO: 1079590 - RNA, 19 nt, Human
gggcuccuugggccucucu

SEQ ID NO: 1079591 - RNA, 22 nt, Human
ucacaguaaauccagaagaaau

SEQ ID NO: 1079592 - RNA, 23 nt, Human
ucacacagcuggucagguacaga

SEQ ID NO: 1079593 - RNA, 22 nt, Human
cagugaguucaucaagacauga

SEQ ID NO: 1079594 - RNA, 22 nt, Human
uuacuuuugcaccaaacuaaua

SEQ ID NO: 1079595 - RNA, 22 nt, Human
uccaggaaacagcaucucagca

SEQ ID NO: 1079596 - RNA, 19 nt, Human
uuucuaagcuaaaugcuuc

SEQ ID NO: 1079597 - RNA, 22 nt, Human
ccacagagacaggguccuugcu

SEQ ID NO: 1079598 - RNA, 22 nt, Human
aagacaauguuucugauagaua

SEQ ID NO: 1079599 - RNA, 22 nt, Human
guucacaguuaggacaacugcu

SEQ ID NO: 1079600 - RNA, 22 nt, Human
caugggcaguuggcagggcuca

SEQ ID NO: 1079601 - RNA, 22 nt, Human
auguuuucuagaguuuaaaauc

SEQ ID NO: 1079602 - RNA, 22 nt, Human
ccugugcauccgguggucauug

SEQ ID NO: 1079603 - RNA, 22 nt, Human
aagcagaugcguuggagcaguu

SEQ ID NO: 1079604 - RNA, 22 nt, Human
aaagacagauggcaaggaugau

SEQ ID NO: 1079605 - RNA, 22 nt, Human
uuuuugagauggauuuagcucu

SEQ ID NO: 1079606 - RNA, 23 nt, Human
agaugaaagcuucccaucacagu

SEQ ID NO: 1079607 - RNA, 22 nt, Human
aaaguuacacaucuaguaagug

SEQ ID NO: 1079608 - RNA, 22 nt, Human
ucugccuguucccgauuccaug

SEQ ID NO: 1079609 - RNA, 22 nt, Human
guuauuaaaguauuugauguua

SEQ ID NO: 1079610 - RNA, 22 nt, Human
cuucuuggaagucguccuucca

SEQ ID NO: 1079611 - RNA, 23 nt, Human
gcugucugucaucucugcgggag

SEQ ID NO: 1079612 - RNA, 23 nt, Human
uguggcugagaaauugacaacuu

SEQ ID NO: 1079613 - RNA, 23 nt, Human
ucuccuccuagauacagucaugg

SEQ ID NO: 1079614 - RNA, 22 nt, Human
aauaaugaacauuuaaaaccug

SEQ ID NO: 1079615 - RNA, 22 nt, Human
cacaggagggagcgggcagcca

SEQ ID NO: 1079616 - RNA, 22 nt, Human
acacauuaaaacgucuacaaug

SEQ ID NO: 1079617 - RNA, 22 nt, Human
uggggugggcaugcgcuguccu

SEQ ID NO: 1079618 - RNA, 22 nt, Human
cugggccucaaucucagaguuu

SEQ ID NO: 1079619 - RNA, 22 nt, Human
ugugaaauauuuauauacucaa

SEQ ID NO: 1079620 - RNA, 22 nt, Human
cccagccuuugcuuccugguuc

SEQ ID NO: 1079621 - RNA, 22 nt, Human
gcucucuggguggugggcaaca

SEQ ID NO: 1079622 - RNA, 22 nt, Human
ccagagccucuuaugaagaucg

SEQ ID NO: 1079623 - RNA, 22 nt, Human
gcugcucuuuucagagaugaga

SEQ ID NO: 1079624 - RNA, 20 nt, Human
ccugccuguguuugugauga

SEQ ID NO: 1079625 - RNA, 22 nt, Human
aacaucuuuuuguuugcugaaa

SEQ ID NO: 1079626 - RNA, 22 nt, Human
acuagacaucgagcuacagagu

SEQ ID NO: 1079627 - RNA, 22 nt, Human
agcugccacaugcccaagggca

SEQ ID NO: 1079628 - RNA, 22 nt, Human
guauuugauacaugaaauggug

SEQ ID NO: 1079629 - RNA, 22 nt, Human
cugggccuugcaucccagagcc

SEQ ID NO: 1079630 - RNA, 20 nt, Human
cacaggaaagcuacucaguu

SEQ ID NO: 1079631 - RNA, 22 nt, Human
agggcagcacaaggcauggacu

SEQ ID NO: 1079632 - RNA, 22 nt, Human
cugaagcaaaggaucgagcuaa

SEQ ID NO: 1079633 - RNA, 22 nt, Human
caggcagcaucagucugcugua

SEQ ID NO: 1079634 - RNA, 22 nt, Human
gucuuuauauuuacuaaagaau

SEQ ID NO: 1079635 - RNA, 22 nt, Human
uaacaacuggacaauguugcuc

SEQ ID NO: 1079636 - RNA, 21 nt, Human
gcagggacaaagcuucaggag

SEQ ID NO: 1079637 - RNA, 22 nt, Human
auggauaauggugauaguugca

SEQ ID NO: 1079638 - RNA, 22 nt, Human
accacugcccauggugaaaacu

SEQ ID NO: 1079639 - RNA, 22 nt, Human
accugagaaugggggcaugugu

SEQ ID NO: 1079640 - RNA, 22 nt, Human
cccuggaggucagaggccuggg

SEQ ID NO: 1079641 - RNA, 22 nt, Human
uuugcauaggauggacauuuua

SEQ ID NO: 1079642 - RNA, 22 nt, Human
augaaauuugcugcuaaguucc

SEQ ID NO: 1079643 - RNA, 18 nt, Human
cccucuugcacaaagcaa

SEQ ID NO: 1079644 - RNA, 23 nt, Human
ucuggcugcuccuuucaaugcuc

SEQ ID NO: 1079645 - RNA, 21 nt, Human
auacagugguaugaauguagg

SEQ ID NO: 1079646 - RNA, 22 nt, Human
gagguggcauuaagauucuggu

SEQ ID NO: 1079647 - RNA, 22 nt, Human
aagcacaguucuuagaguuaca

SEQ ID NO: 1079648 - RNA, 22 nt, Human
uuacacaaaaauaagauauggc

SEQ ID NO: 1079649 - RNA, 22 nt, Human
uuguauuugauugucauaucgu

SEQ ID NO: 1079650 - RNA, 19 nt, Human
ugccuggcaccagcuccac

SEQ ID NO: 1079651 - RNA, 22 nt, Human
cuaucaaacagccauuaauaua

SEQ ID NO: 1079652 - RNA, 22 nt, Human
uaguuuuuaaguguacaauuuc

SEQ ID NO: 1079653 - RNA, 22 nt, Human
uuuucacacaaggugauaaguu

SEQ ID NO: 1079654 - RNA, 22 nt, Human
aagagcugauuaagucaugagg

SEQ ID NO: 1079655 - RNA, 22 nt, Human
ucaaaguuacuugugguuuucu

SEQ ID NO: 1079656 - RNA, 22 nt, Human
aaaauccucuaauucuagaaua

SEQ ID NO: 1079657 - RNA, 19 nt, Human
aaaaagaggcuauaauauu

SEQ ID NO: 1079658 - RNA, 22 nt, Human
agcugcagagguuugugcaaca

SEQ ID NO: 1079659 - RNA, 23 nt, Human
aguguuaaauuucgcaccuaaau

SEQ ID NO: 1079660 - RNA, 22 nt, Human
uacaaaguuugagaaugcuuuc

SEQ ID NO: 1079661 - RNA, 22 nt, Human
ucucagagauuuuguuucccuu

SEQ ID NO: 1079662 - RNA, 22 nt, Human
cuacaucaaguaaucuucaaaa

SEQ ID NO: 1079663 - RNA, 22 nt, Human
aucuggcuuggguguggguagc

SEQ ID NO: 1079664 - RNA, 22 nt, Human
auucauuagccacuaacuagca

SEQ ID NO: 1079665 - RNA, 22 nt, Human
acaguguaauucauggcugaaa

SEQ ID NO: 1079666 - RNA, 22 nt, Human
ugaggccaggaucccaggcucu

SEQ ID NO: 1079667 - RNA, 22 nt, Human
acugcagccuagggaccacagu

SEQ ID NO: 1079668 - RNA, 22 nt, Human
ucucuaaacuuauaugaacuau

SEQ ID NO: 1079669 - RNA, 22 nt, Human
gaaaacuaacggaaaaguuagg

SEQ ID NO: 1079670 - RNA, 22 nt, Human
uggccugucuuguugugcuaga

SEQ ID NO: 1079671 - RNA, 22 nt, Human
uaaaaaguagugagaauggcgc

SEQ ID NO: 1079672 - RNA, 22 nt, Human
ugugcuucuugcagcuccugua

SEQ ID NO: 1079673 - RNA, 22 nt, Human
gggcugcuuuuuucuuagcaga

SEQ ID NO: 1079674 - RNA, 21 nt, Human
auccauccaucuuggccuaac

SEQ ID NO: 1079675 - RNA, 22 nt, Human
guuugaaaguucaacaggaaaa

SEQ ID NO: 1079676 - RNA, 22 nt, Human
aaacaucuacuguaggcuggag

SEQ ID NO: 1079677 - RNA, 22 nt, Human
uaaggcuucagcauucaaaaca

SEQ ID NO: 1079678 - RNA, 22 nt, Human
uuuccucuuccgagggggaggc

SEQ ID NO: 1079679 - RNA, 23 nt, Human
auuuuuugucuuuguaacuagau

SEQ ID NO: 1079680 - RNA, 22 nt, Human
ugaaagacaagguuuuuucaga

SEQ ID NO: 1079681 - RNA, 22 nt, Human
gcagauggagauaaauggaacu

SEQ ID NO: 1079682 - RNA, 22 nt, Human
caucagaaugaauguucuggag

SEQ ID NO: 1079683 - RNA, 22 nt, Human
aagagcagccuccaggggugga

SEQ ID NO: 1079684 - RNA, 22 nt, Human
uucucagagcucacuguaguaa

SEQ ID NO: 1079685 - RNA, 22 nt, Human
guaauuuuuaguucauucuauc

SEQ ID NO: 1079686 - RNA, 22 nt, Human
cagaaauggucuguucagcuua

SEQ ID NO: 1079687 - RNA, 22 nt, Human
uuucuucucuaaucucaaugau

SEQ ID NO: 1079688 - RNA, 22 nt, Human
gcacacauauauaugagcaugu

SEQ ID NO: 1079689 - RNA, 22 nt, Human
gcacugaaugccaaaguguagg

SEQ ID NO: 1079690 - RNA, 22 nt, Human
auugaggcagcauaguucaggg

SEQ ID NO: 1079691 - RNA, 22 nt, Human
gcugggcugcgucggggaagcc

SEQ ID NO: 1079692 - RNA, 22 nt, Human
auuagaauuaugcuugcuaaug

SEQ ID NO: 1079693 - RNA, 22 nt, Human
caccaggcuggagugcagaggu

SEQ ID NO: 1079694 - RNA, 22 nt, Human
uuuguguguauauccuuccaga

SEQ ID NO: 1079695 - RNA, 22 nt, Human
ucagacaggccucuccagccuc

SEQ ID NO: 1079696 - RNA, 22 nt, Human
uggcagagucugggcuugggca

SEQ ID NO: 1079697 - RNA, 22 nt, Human
gccuucugaucgcuggacugac

SEQ ID NO: 1079698 - RNA, 22 nt, Human
uggccuggccacauccagcagg

SEQ ID NO: 1079699 - RNA, 22 nt, Human
uucaacauguucuacauaaggg

SEQ ID NO: 1079700 - RNA, 22 nt, Human
aaugucuucaguucuguauugu

SEQ ID NO: 1079701 - RNA, 22 nt, Human
ucuuuccuguaacugcuguuca

SEQ ID NO: 1079702 - RNA, 22 nt, Human
uaaacaucaccuucugcaguug

SEQ ID NO: 1079703 - RNA, 22 nt, Human
aggugcagcaugaguccaacgg

SEQ ID NO: 1079704 - RNA, 22 nt, Human
uagccggguguugugucaugca

SEQ ID NO: 1079705 - RNA, 22 nt, Human
gaaucacgguauucugcacggg

SEQ ID NO: 1079706 - RNA, 22 nt, Human
cccuggaggagcuuagagcuug

SEQ ID NO: 1079707 - RNA, 18 nt, Human
aggccagcccugcuacug

SEQ ID NO: 1079708 - RNA, 22 nt, Human
agcucccagcuccuuugagaga

SEQ ID NO: 1079709 - RNA, 22 nt, Human
cacagcagaaauaugaaggcag

SEQ ID NO: 1079710 - RNA, 22 nt, Human
aaacugcuuuccacaguggcua

SEQ ID NO: 1079711 - RNA, 22 nt, Human
aguuucaauucuuuucacaaag

SEQ ID NO: 1079712 - RNA, 22 nt, Human
auguuggagucguaaggcaugg

SEQ ID NO: 1079713 - RNA, 22 nt, Human
ggcugggccagggccuguggac

SEQ ID NO: 1079714 - RNA, 20 nt, Human
gcugaggucauuaugccuca

SEQ ID NO: 1079715 - RNA, 22 nt, Human
ucaucucaaaacccaaggggca

SEQ ID NO: 1079716 - RNA, 21 nt, Human
acuuuacaauuuacauaguga

SEQ ID NO: 1079717 - RNA, 22 nt, Human
gcuuccgcgauguccuaggugg

SEQ ID NO: 1079718 - RNA, 22 nt, Human
uagcagagcgggugcgaggcgg

SEQ ID NO: 1079719 - RNA, 22 nt, Human
cccuucucuuucacucacuauu

SEQ ID NO: 1079720 - RNA, 18 nt, Human
ugaguggaaugagggggc

SEQ ID NO: 1079721 - RNA, 22 nt, Human
cagcuguuaugagguguacaug

SEQ ID NO: 1079722 - RNA, 22 nt, Human
ucucuggagcugcagauccagg

SEQ ID NO: 1079723 - RNA, 22 nt, Human
gagaagcagguuuagcagacaa

SEQ ID NO: 1079724 - RNA, 22 nt, Human
gaaggaagauucuguuggaauc

SEQ ID NO: 1079725 - RNA, 22 nt, Human
acaacauucuuaaauacacuga

SEQ ID NO: 1079726 - RNA, 22 nt, Human
agccagccgggggaccacagug

SEQ ID NO: 1079727 - RNA, 22 nt, Human
cauauacuuuucuauagcuuuc

SEQ ID NO: 1079728 - RNA, 19 nt, Human
uggcugagcuggacugagg

SEQ ID NO: 1079729 - RNA, 22 nt, Human
acugcaucugaaacauggguca

SEQ ID NO: 1079730 - RNA, 22 nt, Human
acucagaguuuuacccagagac

SEQ ID NO: 1079731 - RNA, 22 nt, Human
uuucacagcugggaagagauau

SEQ ID NO: 1079732 - RNA, 22 nt, Human
auuuaauaccacuuggugcuuu

SEQ ID NO: 1079733 - RNA, 22 nt, Human
caggcugccaaggcuggggagg

SEQ ID NO: 1079734 - RNA, 22 nt, Human
cuuuuucaagucaaagagggua

SEQ ID NO: 1079735 - RNA, 22 nt, Human
ggcucugcagugacuugagggg

SEQ ID NO: 1079736 - RNA, 22 nt, Human
uggcauuucaguauuuucauaa

SEQ ID NO: 1079737 - RNA, 22 nt, Human
ggaggcucugcuccguguguuc

SEQ ID NO: 1079738 - RNA, 22 nt, Human
ggcaucuguccaucucuccagc

SEQ ID NO: 1079739 - RNA, 22 nt, Human
augggggccugaacaggcaaaa

SEQ ID NO: 1079740 - RNA, 22 nt, Human
aggcagccaguucagguuucuu

SEQ ID NO: 1079741 - RNA, 22 nt, Human
gcagagguggcaucugggcucu

SEQ ID NO: 1079742 - RNA, 23 nt, Human
cuggggcucauugcaguagccau

SEQ ID NO: 1079743 - RNA, 22 nt, Human
aggcagggcugggauuagacuc

SEQ ID NO: 1079744 - RNA, 22 nt, Human
aagcugcccucauucccagugc

SEQ ID NO: 1079745 - RNA, 22 nt, Human
cagugaggaagcugucuggacc

SEQ ID NO: 1079746 - RNA, 19 nt, Human
gcaucaaagcugacuccug

SEQ ID NO: 1079747 - RNA, 22 nt, Human
uguuacauuucucuuucuugga

SEQ ID NO: 1079748 - RNA, 23 nt, Human
uugcauccugacgucuauuuucu

SEQ ID NO: 1079749 - RNA, 22 nt, Human
gagaggcuaugagguucugugu

SEQ ID NO: 1079750 - RNA, 22 nt, Human
uauuuaauaaaacuauggcaug

SEQ ID NO: 1079751 - RNA, 22 nt, Human
uuccaagugucagaucagauuu

SEQ ID NO: 1079752 - RNA, 22 nt, Human
acaagauacucagcuacaagac

SEQ ID NO: 1079753 - RNA, 20 nt, Human
ugcugcaguuucaugggacu

SEQ ID NO: 1079754 - RNA, 22 nt, Human
aaaaacuguaauuacuuuugca

SEQ ID NO: 1079755 - RNA, 18 nt, Human
gucuggaggucaggagcu

SEQ ID NO: 1079756 - RNA, 22 nt, Human
gucaggauuauaauccccaugg

SEQ ID NO: 1079757 - RNA, 22 nt, Human
gagaaagggaacuuacagagug

SEQ ID NO: 1079758 - RNA, 22 nt, Human
gccaagcuuauaugaugcuuga

SEQ ID NO: 1079759 - RNA, 22 nt, Human
cuggcuggcagaugcucuugcu

SEQ ID NO: 1079760 - RNA, 22 nt, Human
uauuagguuggugcaacaguaa

SEQ ID NO: 1079761 - RNA, 22 nt, Human
acaguucuuuguuuauagcuug

SEQ ID NO: 1079762 - RNA, 22 nt, Human
acugggaaaagcuauggcaaau

SEQ ID NO: 1079763 - RNA, 22 nt, Human
ucugccuucgcugcucccugaa

SEQ ID NO: 1079764 - RNA, 19 nt, Human
uuaugaaggcuggggggag

SEQ ID NO: 1079765 - RNA, 22 nt, Human
gcucccugcagcugagaguucc

SEQ ID NO: 1079766 - RNA, 22 nt, Human
ugugggaggaauuagaauggga

SEQ ID NO: 1079767 - RNA, 22 nt, Human
ccugugcuggcuuuauucucag

SEQ ID NO: 1079768 - RNA, 22 nt, Human
gucccaggcuuauguggagcuu

SEQ ID NO: 1079769 - RNA, 22 nt, Human
aggagucaggaccaaauggaaa

SEQ ID NO: 1079770 - RNA, 22 nt, Human
ugaaaaggagccuuagguaggu

SEQ ID NO: 1079771 - RNA, 22 nt, Human
gaagcagagccuaaggcagaca

SEQ ID NO: 1079772 - RNA, 22 nt, Human
uaucuguuaggaucagagcugg

SEQ ID NO: 1079773 - RNA, 22 nt, Human
ccugugcuuuaggccucaaacu

SEQ ID NO: 1079774 - RNA, 22 nt, Human
gcugugcagguccccacugccu

SEQ ID NO: 1079775 - RNA, 22 nt, Human
ugccucugggugaccaaggagc

SEQ ID NO: 1079776 - RNA, 22 nt, Human
uagaggcagaagaaauugacaa

SEQ ID NO: 1079777 - RNA, 22 nt, Human
acucugcuuauugcugcaggca

SEQ ID NO: 1079778 - RNA, 22 nt, Human
ucaacugcaaguuugcuuaguu

SEQ ID NO: 1079779 - RNA, 22 nt, Human
uauuugugagacugacugaagu

SEQ ID NO: 1079780 - RNA, 22 nt, Human
ucagggagaggugagagccugu

SEQ ID NO: 1079781 - RNA, 16 nt, Human
ggggaaggcaagaggg

SEQ ID NO: 1079782 - RNA, 22 nt, Human
agucccagccuaggcugugcug

SEQ ID NO: 1079783 - RNA, 22 nt, Human
caagagcugcaaauagcgugac

SEQ ID NO: 1079784 - RNA, 22 nt, Human
auuucacucucccugccacuua

SEQ ID NO: 1079785 - RNA, 22 nt, Human
aaugagaauguaagugaagaga

SEQ ID NO: 1079786 - RNA, 17 nt, Human
gcaaucucagucuccuu

SEQ ID NO: 1079787 - RNA, 22 nt, Human
acaauguaggauauguacuugu

SEQ ID NO: 1079788 - RNA, 22 nt, Human
cucucugaggaaggagcaucug

SEQ ID NO: 1079789 - RNA, 22 nt, Human
guuccuuuguuuagcagagaca

SEQ ID NO: 1079790 - RNA, 22 nt, Human
gaggcacaucacuuggugcauu

SEQ ID NO: 1079791 - RNA, 22 nt, Human
caagauggacauaaggagagaa

SEQ ID NO: 1079792 - RNA, 22 nt, Human
gcugugcccauauucugcugac

SEQ ID NO: 1079793 - RNA, 22 nt, Human
ggaccugaacauaaaacgaggc

SEQ ID NO: 1079794 - RNA, 22 nt, Human
cgccaggcuugguagcucaugc

SEQ ID NO: 1079795 - RNA, 22 nt, Human
aaauacugcugcuauuccuuuu

SEQ ID NO: 1079796 - RNA, 18 nt, Human
ccucccucauuuucccag

SEQ ID NO: 1079797 - RNA, 22 nt, Human
ugaaagaagugucacauugcca

SEQ ID NO: 1079798 - RNA, 22 nt, Human
uuauggaaaacuccagagagua

SEQ ID NO: 1079799 - RNA, 22 nt, Human
gcacauuucucaaagaauuguc

SEQ ID NO: 1079800 - RNA, 22 nt, Human
ggcuucccaaggagccaggaug

SEQ ID NO: 1079801 - RNA, 22 nt, Human
cugggcuuagcagcuccugguc

SEQ ID NO: 1079802 - RNA, 22 nt, Human
ccaagauaagagacaagauuua

SEQ ID NO: 1079803 - RNA, 22 nt, Human
ugggcagauguccucugaagug

SEQ ID NO: 1079804 - RNA, 22 nt, Human
cagaaacauguauaaaguugua

SEQ ID NO: 1079805 - RNA, 22 nt, Human
uacacagauuucaguaucauca

SEQ ID NO: 1079806 - RNA, 22 nt, Human
ucacagaagagcauuaagauga

SEQ ID NO: 1079807 - RNA, 22 nt, Human
ggguggcacaggugcagagggu

SEQ ID NO: 1079808 - RNA, 22 nt, Human
agaauucuggaguugggaggaa

SEQ ID NO: 1079809 - RNA, 22 nt, Human
uaaacaucugaauccugcuucc

SEQ ID NO: 1079810 - RNA, 22 nt, Human
uuagcuuucuuggagaauuaca

SEQ ID NO: 1079811 - RNA, 22 nt, Human
ugaagaugucagcagggguggu

SEQ ID NO: 1079812 - RNA, 22 nt, Human
auaaauagugugucauaaaguc

SEQ ID NO: 1079813 - RNA, 22 nt, Human
acugaaggaagcgggcaggggu

SEQ ID NO: 1079814 - RNA, 22 nt, Human
agagucccagggacacuccaga

SEQ ID NO: 1079815 - RNA, 22 nt, Human
ggcagcugauuagcaucaagga

SEQ ID NO: 1079816 - RNA, 22 nt, Human
gaggggaugcagagaggcuuau

SEQ ID NO: 1079817 - RNA, 22 nt, Human
acaggcugcugagccauuugcu

SEQ ID NO: 1079818 - RNA, 22 nt, Human
cagggcaguuuuacuucucucu

SEQ ID NO: 1079819 - RNA, 22 nt, Human
ucccauauaugcaaaaauguaa

SEQ ID NO: 1079820 - RNA, 22 nt, Human
ccugcuggcagaggggguuacu

SEQ ID NO: 1079821 - RNA, 22 nt, Human
ugcuggggagugauugaccauc

SEQ ID NO: 1079822 - RNA, 22 nt, Human
uguggcugacuccuggucccca

SEQ ID NO: 1079823 - RNA, 22 nt, Human
uccugggguuuuggccgcagcu

SEQ ID NO: 1079824 - RNA, 22 nt, Human
aucacaauguacguuaaaaugu

SEQ ID NO: 1079825 - RNA, 22 nt, Human
uucaacauaugaauuuugggug

SEQ ID NO: 1079826 - RNA, 22 nt, Human
uggagccauaacccuuucguac

SEQ ID NO: 1079827 - RNA, 22 nt, Human
ugcaggccggcccuaggccuca

SEQ ID NO: 1079828 - RNA, 23 nt, Human
gcccugcccuuagcacacucaca

SEQ ID NO: 1079829 - RNA, 22 nt, Human
aggguggggugcuacaucuuua

SEQ ID NO: 1079830 - RNA, 21 nt, Human
ucagaguggaagacaguuuga

SEQ ID NO: 1079831 - RNA, 22 nt, Human
aaccaggacaauuuugaaagua

SEQ ID NO: 1079832 - RNA, 22 nt, Human
ggccuugggcuggcugcaguau

SEQ ID NO: 1079833 - RNA, 22 nt, Human
acauuuguugccauucauggag

SEQ ID NO: 1079834 - RNA, 22 nt, Human
uaggcgaaggucugggugggca

SEQ ID NO: 1079835 - RNA, 22 nt, Human
gugggguguccagcagcgagcu

SEQ ID NO: 1079836 - RNA, 22 nt, Human
accaggagccacaggaggagcc

SEQ ID NO: 1079837 - RNA, 22 nt, Human
gcucccugacucaguuccugag

SEQ ID NO: 1079838 - RNA, 22 nt, Human
ucagggaaaccuaaggaagcca

SEQ ID NO: 1079839 - RNA, 22 nt, Human
acucccagguugccuggcaggc

SEQ ID NO: 1079840 - RNA, 22 nt, Human
uugugugguagcuucauugaac

SEQ ID NO: 1079841 - RNA, 22 nt, Human
uuguaauuugcaaauguauugu

SEQ ID NO: 1079842 - RNA, 22 nt, Human
aaguuacauaaauguccucuag

SEQ ID NO: 1079843 - RNA, 22 nt, Human
cugggcugucaguuuuguuuua

SEQ ID NO: 1079844 - RNA, 22 nt, Human
aaaaagauguccugaaguuuag

SEQ ID NO: 1079845 - RNA, 22 nt, Human
cuguuuuugugcugugucuccc

SEQ ID NO: 1079846 - RNA, 22 nt, Human
auacauaguucugugaaaagua

SEQ ID NO: 1079847 - RNA, 22 nt, Human
gagagugagauccuccugggga

SEQ ID NO: 1079848 - RNA, 22 nt, Human
ucugcccaguuugugcucaggu

SEQ ID NO: 1079849 - RNA, 19 nt, Human
cacagggcaggucucaugu

SEQ ID NO: 1079850 - RNA, 22 nt, Human
augcucugggcaggagcccugg

SEQ ID NO: 1079851 - RNA, 22 nt, Human
ugugcucugcaaucaguucuuu

SEQ ID NO: 1079852 - RNA, 22 nt, Human
cagcagcuggugagacacagcc

SEQ ID NO: 1079853 - RNA, 22 nt, Human
agaagccauagucugggaggca

SEQ ID NO: 1079854 - RNA, 21 nt, Human
uuugggcuuuuacuggacgug

SEQ ID NO: 1079855 - RNA, 22 nt, Human
uauacuuuccugcaacuuugau

SEQ ID NO: 1079856 - RNA, 22 nt, Human
uucuaaacacuacgggauuugg

SEQ ID NO: 1079857 - RNA, 22 nt, Human
aacaugaaacccaaacagaaua

SEQ ID NO: 1079858 - RNA, 22 nt, Human
ucugagugagggugugagauau

SEQ ID NO: 1079859 - RNA, 22 nt, Human
uccuuaaagugcaccuccucau

SEQ ID NO: 1079860 - RNA, 22 nt, Human
gcugccuggcuuuaguccacuu

SEQ ID NO: 1079861 - RNA, 18 nt, Human
agucucagcggaggagua

SEQ ID NO: 1079862 - RNA, 22 nt, Human
ucaaagaacaucaucugaaaug

SEQ ID NO: 1079863 - RNA, 22 nt, Human
aagaggaaaugauugacuauau

SEQ ID NO: 1079864 - RNA, 22 nt, Human
cagugccaugucugagccccua

SEQ ID NO: 1079865 - RNA, 21 nt, Human
ggacucuacacaggccaucuu

SEQ ID NO: 1079866 - RNA, 22 nt, Human
uccauuuucuugcucuagguaa

SEQ ID NO: 1079867 - RNA, 22 nt, Human
caguuaaaaugugcuauaagaa

SEQ ID NO: 1079868 - RNA, 22 nt, Human
uccaggaaaucauaaauugcuu

SEQ ID NO: 1079869 - RNA, 22 nt, Human
accucaggauguggacacagaa

SEQ ID NO: 1079870 - RNA, 19 nt, Human
aucugagauuauaaacaga

SEQ ID NO: 1079871 - RNA, 22 nt, Human
aagaagugguuggaagaagcau

SEQ ID NO: 1079872 - RNA, 22 nt, Human
ucagauuuccuugcaguuugga

SEQ ID NO: 1079873 - RNA, 22 nt, Human
cuggaacagaagcacuggagag

SEQ ID NO: 1079874 - RNA, 22 nt, Human
aaaccacaugccuucaaaugcu

SEQ ID NO: 1079875 - RNA, 22 nt, Human
guauuccuucagaagacguuua

SEQ ID NO: 1079876 - RNA, 22 nt, Human
ggcuuuggggugugcagagaug

SEQ ID NO: 1079877 - RNA, 22 nt, Human
uggagccaugccuggccuuucc

SEQ ID NO: 1079878 - RNA, 22 nt, Human
ucugagcugggcacagaaggcg

SEQ ID NO: 1079879 - RNA, 22 nt, Human
cugucugcuagaacaucuauac

SEQ ID NO: 1079880 - RNA, 22 nt, Human
cugcacaaauuaaucaguuaau

SEQ ID NO: 1079881 - RNA, 22 nt, Human
gcacagggccuggcacauaaga

SEQ ID NO: 1079882 - RNA, 22 nt, Human
aggagccaaauuacuagcucug

SEQ ID NO: 1079883 - RNA, 22 nt, Human
ggggugugaguagagcugggga

SEQ ID NO: 1079884 - RNA, 22 nt, Human
aauaugugggugcuaaucaaaa

SEQ ID NO: 1079885 - RNA, 22 nt, Human
cugugaccuccaggaaggggug

SEQ ID NO: 1079886 - RNA, 22 nt, Human
uggacucagugcugccauuccc

SEQ ID NO: 1079887 - RNA, 22 nt, Human
gcaggagucacugacuuggucc

SEQ ID NO: 1079888 - RNA, 22 nt, Human
ggagucaggagcaggcugggcu

SEQ ID NO: 1079889 - RNA, 22 nt, Human
ugcuucaggaagaaacgccagg

SEQ ID NO: 1079890 - RNA, 22 nt, Human
gacacagacaguuagagguaau

SEQ ID NO: 1079891 - RNA, 22 nt, Human
ccagcagcgauagggugagugc

SEQ ID NO: 1079892 - RNA, 22 nt, Human
uucucuucuguucagugcccaa

SEQ ID NO: 1079893 - RNA, 22 nt, Human
agcccuuaguacauuucucaag

SEQ ID NO: 1079894 - RNA, 22 nt, Human
gaauucuuugaucuuaaucuug

SEQ ID NO: 1079895 - RNA, 22 nt, Human
acauuaaagaguaagguuaguu

SEQ ID NO: 1079896 - RNA, 22 nt, Human
gagcugggaggacugggaacuu

SEQ ID NO: 1079897 - RNA, 22 nt, Human
ggccucagagaaggcugugcgg

SEQ ID NO: 1079898 - RNA, 22 nt, Human
uuucacagaacucacuaaggag

SEQ ID NO: 1079899 - RNA, 22 nt, Human
ugaaggcccuaucuccauauac

SEQ ID NO: 1079900 - RNA, 22 nt, Human
ucagggacuuacaaaccagaag

SEQ ID NO: 1079901 - RNA, 22 nt, Human
ucaaaaguuucacauagagaua

SEQ ID NO: 1079902 - RNA, 22 nt, Human
aaagggagcauggcugcaggga

SEQ ID NO: 1079903 - RNA, 22 nt, Human
cugagaggugcugguggcugca

SEQ ID NO: 1079904 - RNA, 22 nt, Human
ugccuggcugaggugacagguu

SEQ ID NO: 1079905 - RNA, 22 nt, Human
aguuacaucuguuauguguguu

SEQ ID NO: 1079906 - RNA, 21 nt, Human
ucugaacaacauacgaaucuu

SEQ ID NO: 1079907 - RNA, 22 nt, Human
gccuccuggauuuuagugccau

SEQ ID NO: 1079908 - RNA, 22 nt, Human
agcugagcacauucaaacaggu

SEQ ID NO: 1079909 - RNA, 22 nt, Human
uacugacacaaagccaaucccu

SEQ ID NO: 1079910 - RNA, 22 nt, Human
uccaguggugguuugaagggca

SEQ ID NO: 1079911 - RNA, 19 nt, Human
uaucuuuaugcaguggugg

SEQ ID NO: 1079912 - RNA, 22 nt, Human
gaauuuuucuggaagcaauuau

SEQ ID NO: 1079913 - RNA, 20 nt, Human
auugugaauacugcauaugu

SEQ ID NO: 1079914 - RNA, 22 nt, Human
ggcugugcgggcagccguggga

SEQ ID NO: 1079915 - RNA, 22 nt, Human
agaagcuugaaggagcagugac

SEQ ID NO: 1079916 - RNA, 22 nt, Human
aggguccaucaaggacugcaca

SEQ ID NO: 1079917 - RNA, 22 nt, Human
uggcagggaauacagauguuua

SEQ ID NO: 1079918 - RNA, 22 nt, Human
gcaacaaguguaaacaugcauu

SEQ ID NO: 1079919 - RNA, 22 nt, Human
uccaugucuucaugugucuaac

SEQ ID NO: 1079920 - RNA, 22 nt, Human
agacucugcuaagaauauaauu

SEQ ID NO: 1079921 - RNA, 22 nt, Human
caggagugaaaugaggcccagg

SEQ ID NO: 1079922 - RNA, 22 nt, Human
uuuguucacaugucauguacaa

SEQ ID NO: 1079923 - RNA, 22 nt, Human
gacaugcaugaaugcaggucuc

SEQ ID NO: 1079924 - RNA, 22 nt, Human
ugaugggacugccagcugcuga

SEQ ID NO: 1079925 - RNA, 22 nt, Human
ucccagaaucuuuggaagagca

SEQ ID NO: 1079926 - RNA, 22 nt, Human
caggccucuuccaugcagcagc

SEQ ID NO: 1079927 - RNA, 22 nt, Human
gcuggcuuugcacugggugcau

SEQ ID NO: 1079928 - RNA, 22 nt, Human
aauguauucucuuuauaagaua

SEQ ID NO: 1079929 - RNA, 22 nt, Human
cagucuuugacaagcccuuuca

SEQ ID NO: 1079930 - RNA, 22 nt, Human
cccuggcaaaacacucucuuga

SEQ ID NO: 1079931 - RNA, 21 nt, Human
cuugggcuuguagauggugga

SEQ ID NO: 1079932 - RNA, 22 nt, Human
gaauucuaggguaaauauccua

SEQ ID NO: 1079933 - RNA, 22 nt, Human
uggcucugucacugugagcuau

SEQ ID NO: 1079934 - RNA, 22 nt, Human
gcagguggaagcagcagacuca

SEQ ID NO: 1079935 - RNA, 19 nt, Human
agcuguggggccuagcacc

SEQ ID NO: 1079936 - RNA, 22 nt, Human
cacugcuucuggaggaauuugg

SEQ ID NO: 1079937 - RNA, 22 nt, Human
ugaaaugcuguagagacuguau

SEQ ID NO: 1079938 - RNA, 22 nt, Human
uuaugcaacaggugagcagaca

SEQ ID NO: 1079939 - RNA, 22 nt, Human
aacaaauuaguugcaagacugg

SEQ ID NO: 1079940 - RNA, 22 nt, Human
aaucacaaauuuagacagagcu

SEQ ID NO: 1079941 - RNA, 22 nt, Human
caggacccaaccucccugcucu

SEQ ID NO: 1079942 - RNA, 22 nt, Human
ucaguuuucucaucuguaauuu

SEQ ID NO: 1079943 - RNA, 22 nt, Human
uugacaaaaaccucauuucacc

SEQ ID NO: 1079944 - RNA, 22 nt, Human
ucccucagauuggcaauuagau

SEQ ID NO: 1079945 - RNA, 22 nt, Human
gggagcuguaguccagauaccg

SEQ ID NO: 1079946 - RNA, 22 nt, Human
caggauggucucgaucuccuga

SEQ ID NO: 1079947 - RNA, 22 nt, Human
agaggcagccguauuucaaagg

SEQ ID NO: 1079948 - RNA, 22 nt, Human
cugauauuaacaggcaagugag

SEQ ID NO: 1079949 - RNA, 22 nt, Human
uauauguagauuguaccaaugu

SEQ ID NO: 1079950 - RNA, 22 nt, Human
uucugaugcaugggucucuguu

SEQ ID NO: 1079951 - RNA, 22 nt, Human
gccugcuggcuguccauugcag

SEQ ID NO: 1079952 - RNA, 22 nt, Human
auauuugucaauucacuguuca

SEQ ID NO: 1079953 - RNA, 23 nt, Human
ugaaacagaugccaaugaucaag

SEQ ID NO: 1079954 - RNA, 22 nt, Human
ugaccaaaaaauucccugugag

SEQ ID NO: 1079955 - RNA, 22 nt, Human
accugccuaguugguucugccc

SEQ ID NO: 1079956 - RNA, 18 nt, Human
aguuccuuaaauuggugu

SEQ ID NO: 1079957 - RNA, 22 nt, Human
uguggccucaaggcugcccuca

SEQ ID NO: 1079958 - RNA, 22 nt, Human
acauauuuccaugcagcauguc

SEQ ID NO: 1079959 - RNA, 22 nt, Human
cagcugccugcaacacaagcuu

SEQ ID NO: 1079960 - RNA, 22 nt, Human
agugaaauggaugcugcuacug

SEQ ID NO: 1079961 - RNA, 21 nt, Human
ggucagggggugccuccaggu

SEQ ID NO: 1079962 - RNA, 22 nt, Human
agccaggacguugcucagcucc

SEQ ID NO: 1079963 - RNA, 22 nt, Human
agcuuacaccccccaagauucu

SEQ ID NO: 1079964 - RNA, 23 nt, Human
gcucugagggcuuaucccuccca

SEQ ID NO: 1079965 - RNA, 22 nt, Human
ggaacacagugccuuacaaacu

SEQ ID NO: 1079966 - RNA, 23 nt, Human
uccagcagccaagaaggguagaa

SEQ ID NO: 1079967 - RNA, 22 nt, Human
uccaggcccugggaugggagca

SEQ ID NO: 1079968 - RNA, 22 nt, Human
aggagcucauguggcugccugu

SEQ ID NO: 1079969 - RNA, 22 nt, Human
ggagacacuggaaaguauuaca

SEQ ID NO: 1079970 - RNA, 22 nt, Human
uuuaagguacagcuagcagcau

SEQ ID NO: 1079971 - RNA, 22 nt, Human
guaauucugugugaaucuauua

SEQ ID NO: 1079972 - RNA, 22 nt, Human
cuggcuuugcgucuuugccaca

SEQ ID NO: 1079973 - RNA, 22 nt, Human
uuugcauuuguucaaguauuga

SEQ ID NO: 1079974 - RNA, 22 nt, Human
uggugucaggcacuagcaugca

SEQ ID NO: 1079975 - RNA, 22 nt, Human
uucaauaucucuaagaaugagg

SEQ ID NO: 1079976 - RNA, 22 nt, Human
acucagcuugcacacaucaaug

SEQ ID NO: 1079977 - RNA, 22 nt, Human
gaaggcaaggagggaagccacc

SEQ ID NO: 1079978 - RNA, 23 nt, Human
caggcucccggaccaggauccgc

SEQ ID NO: 1079979 - RNA, 20 nt, Human
cagcaaaaugaaaauggauu

SEQ ID NO: 1079980 - RNA, 22 nt, Human
ccacaggggucucuguagcuga

SEQ ID NO: 1079981 - RNA, 22 nt, Human
cagcuccugcagcugcugccgu

SEQ ID NO: 1079982 - RNA, 22 nt, Human
auugcuuuuccuuaacacaugc

SEQ ID NO: 1079983 - RNA, 22 nt, Human
uuuuauuaucuuugaaugggac

SEQ ID NO: 1079984 - RNA, 22 nt, Human
uacaggcaugaaugaaaucugu

SEQ ID NO: 1079985 - RNA, 23 nt, Human
uucuuucaagaaguucacagugc

SEQ ID NO: 1079986 - RNA, 22 nt, Human
uuucuagggcucuugucuucug

SEQ ID NO: 1079987 - RNA, 22 nt, Human
ccagccaggcuggcuguggagg

SEQ ID NO: 1079988 - RNA, 22 nt, Human
caucaaacaaaugcuuuuagau

SEQ ID NO: 1079989 - RNA, 22 nt, Human
cacuggaauggauagagcagag

SEQ ID NO: 1079990 - RNA, 21 nt, Human
ucugggcccaugcugccucac

SEQ ID NO: 1079991 - RNA, 22 nt, Human
gcugagggcagccuccuagguc

SEQ ID NO: 1079992 - RNA, 22 nt, Human
aagcucugcucagcagacuagg

SEQ ID NO: 1079993 - RNA, 18 nt, Human
aagaggaggaaacccagg

SEQ ID NO: 1079994 - RNA, 22 nt, Human
auacaucuaugccuuucugaca

SEQ ID NO: 1079995 - RNA, 22 nt, Human
ucuauaaaacucaagagcaauu

SEQ ID NO: 1079996 - RNA, 21 nt, Human
aggggacagaguagcuccagg

SEQ ID NO: 1079997 - RNA, 22 nt, Human
aggcuccauaccaucuccggag

SEQ ID NO: 1079998 - RNA, 22 nt, Human
augggccuugacacauggagug

SEQ ID NO: 1079999 - RNA, 20 nt, Human
uuucacaaugaacaugucuc

SEQ ID NO: 1080000 - RNA, 21 nt, Human
gagugucuaauccaggcuguc

SEQ ID NO: 1080001 - RNA, 22 nt, Human
agaagauuuagguugacgcuau

SEQ ID NO: 1080002 - RNA, 22 nt, Human
augcagcagcuacuugggaagg

SEQ ID NO: 1080003 - RNA, 22 nt, Human
ggagagcugguagcuggcucca

SEQ ID NO: 1080004 - RNA, 22 nt, Human
ugccuguguggucugcgcauua

SEQ ID NO: 1080005 - RNA, 22 nt, Human
acagcugaaaccagggaucugg

SEQ ID NO: 1080006 - RNA, 22 nt, Human
cauuuuaaaugauuuaagccaa

SEQ ID NO: 1080007 - RNA, 21 nt, Human
ccacuguagacucauucugag

SEQ ID NO: 1080008 - RNA, 22 nt, Human
ucccugaaucucgaacuagccu

SEQ ID NO: 1080009 - RNA, 22 nt, Human
auuauucauugguaggcaagcu

SEQ ID NO: 1080010 - RNA, 22 nt, Human
gcucuggaagcaucugagagga

SEQ ID NO: 1080011 - RNA, 22 nt, Human
aaucugauguuaaauguaaggu

SEQ ID NO: 1080012 - RNA, 22 nt, Human
agucuggggucugguagaacga

SEQ ID NO: 1080013 - RNA, 19 nt, Human
uuacaucugcaacacuggu

SEQ ID NO: 1080014 - RNA, 22 nt, Human
aagcacugagcacaguggcuga

SEQ ID NO: 1080015 - RNA, 22 nt, Human
ucuguggcacgauugcacugca

SEQ ID NO: 1080016 - RNA, 22 nt, Human
agggcucacuacaacccuggga

SEQ ID NO: 1080017 - RNA, 22 nt, Human
uucuagcuuuuugcaccaaggu

SEQ ID NO: 1080018 - RNA, 18 nt, Human
gcagcuagccaggggggc

SEQ ID NO: 1080019 - RNA, 22 nt, Human
cagagccauuauggagacuugc

SEQ ID NO: 1080020 - RNA, 22 nt, Human
uguaacagagcuuuuuuauagc

SEQ ID NO: 1080021 - RNA, 22 nt, Human
cuuugaaaacuuaaauaacagc

SEQ ID NO: 1080022 - RNA, 22 nt, Human
ccagaggagggcucugaugagg

SEQ ID NO: 1080023 - RNA, 21 nt, Human
aaacaucucugcuuuuguguc

SEQ ID NO: 1080024 - RNA, 22 nt, Human
ucccugccaguccuggucugaa

SEQ ID NO: 1080025 - RNA, 22 nt, Human
cugggcaggagggcucuaugga

SEQ ID NO: 1080026 - RNA, 22 nt, Human
gacagccaugcacuucugcugu

SEQ ID NO: 1080027 - RNA, 22 nt, Human
agcugccacauggugucacugu

SEQ ID NO: 1080028 - RNA, 22 nt, Human
uggcauuuagagaaaugaagga

SEQ ID NO: 1080029 - RNA, 22 nt, Human
guuuccaacuaguaugaucagg

SEQ ID NO: 1080030 - RNA, 22 nt, Human
agccaaagaucagugugcaagu

SEQ ID NO: 1080031 - RNA, 22 nt, Human
uuuccucuucuggcaggcaggg

SEQ ID NO: 1080032 - RNA, 22 nt, Human
uagcagaggcaaggaugugaau

SEQ ID NO: 1080033 - RNA, 22 nt, Human
ggccuuggugccauggccaguu

SEQ ID NO: 1080034 - RNA, 19 nt, Human
ucccuuccugucgggcucc

SEQ ID NO: 1080035 - RNA, 22 nt, Human
gagacugaggucaccaggcugu

SEQ ID NO: 1080036 - RNA, 22 nt, Human
uaaaacuagaccgugagucuaa

SEQ ID NO: 1080037 - RNA, 23 nt, Human
agccucagccgguggcagaagug

SEQ ID NO: 1080038 - RNA, 22 nt, Human
aggggagcaucugugaugguua

SEQ ID NO: 1080039 - RNA, 22 nt, Human
gaaggagagaaaggcaauucug

SEQ ID NO: 1080040 - RNA, 22 nt, Human
gaugaaauagaauuaauuuagg

SEQ ID NO: 1080041 - RNA, 17 nt, Human
auuucccagcagugcua

SEQ ID NO: 1080042 - RNA, 22 nt, Human
ggccaggagcaagccaggcucu

SEQ ID NO: 1080043 - RNA, 22 nt, Human
uauguuucuuccuuuucauaca

SEQ ID NO: 1080044 - RNA, 22 nt, Human
gcagggcuugcagcagcuagac

SEQ ID NO: 1080045 - RNA, 22 nt, Human
ugggccacuugaaaguggaugu

SEQ ID NO: 1080046 - RNA, 22 nt, Human
gagagugucuggaggaagcuaa

SEQ ID NO: 1080047 - RNA, 22 nt, Human
ccuggggagccgccugagcccc

SEQ ID NO: 1080048 - RNA, 22 nt, Human
gccaccuguuucgcuugcccag

SEQ ID NO: 1080049 - RNA, 22 nt, Human
cuuuacaaacuauaaagugcgg

SEQ ID NO: 1080050 - RNA, 21 nt, Human
cauuuacaugacagauugguu

SEQ ID NO: 1080051 - RNA, 22 nt, Human
aggagcaaaugaugagacagca

SEQ ID NO: 1080052 - RNA, 22 nt, Human
aagagccagcuagugaagaggc

SEQ ID NO: 1080053 - RNA, 21 nt, Human
uuucugaaggcaacaucuauc

SEQ ID NO: 1080054 - RNA, 22 nt, Human
agugaggggcagcugagugggc

SEQ ID NO: 1080055 - RNA, 21 nt, Human
gagugcagcaagguagagucu

SEQ ID NO: 1080056 - RNA, 22 nt, Human
aggggaaggccagccuguagag

SEQ ID NO: 1080057 - RNA, 22 nt, Human
aagaugauguuguguuuucacu

SEQ ID NO: 1080058 - RNA, 19 nt, Human
ucucuggaugacagacacu

SEQ ID NO: 1080059 - RNA, 22 nt, Human
cagacaggcuagccagacucac

SEQ ID NO: 1080060 - RNA, 22 nt, Human
gcuuccaggcuuccuaccuuug

SEQ ID NO: 1080061 - RNA, 22 nt, Human
uaaguucaccaguuguaauaag

SEQ ID NO: 1080062 - RNA, 22 nt, Human
ugucauuuaguccucugugugu

SEQ ID NO: 1080063 - RNA, 22 nt, Human
uccuugagagccacugucuugg

SEQ ID NO: 1080064 - RNA, 22 nt, Human
cugaggcuggggaagggaagug

SEQ ID NO: 1080065 - RNA, 22 nt, Human
gaauucugucgcuuacuagaug

SEQ ID NO: 1080066 - RNA, 22 nt, Human
acaacaggguaaggcaggccau

SEQ ID NO: 1080067 - RNA, 22 nt, Human
aguaauuuguuauaaagcaaua

SEQ ID NO: 1080068 - RNA, 19 nt, Human
gggagcaggaaagcugugg

SEQ ID NO: 1080069 - RNA, 22 nt, Human
gcuggcuggaggugaggaagaa

SEQ ID NO: 1080070 - RNA, 22 nt, Human
agucucuuuguauaaauaggca

SEQ ID NO: 1080071 - RNA, 22 nt, Human
uaaaggaggaguuaaugagacu

SEQ ID NO: 1080072 - RNA, 22 nt, Human
uguucuugagccuuuagaccua

SEQ ID NO: 1080073 - RNA, 22 nt, Human
ugaugcuucacgcugaauaugc

SEQ ID NO: 1080074 - RNA, 22 nt, Human
gcagcugccccgacugugaguc

SEQ ID NO: 1080075 - RNA, 22 nt, Human
ggcccagcgaggccaccuacag

SEQ ID NO: 1080076 - RNA, 23 nt, Human
ugguccugccaacggugccccuc

SEQ ID NO: 1080077 - RNA, 22 nt, Human
aggcagacuuaccuucugggga

SEQ ID NO: 1080078 - RNA, 22 nt, Human
ugguacauaaauggauguuuuc

SEQ ID NO: 1080079 - RNA, 22 nt, Human
aaguaaaagcuuuaccaugcgc

SEQ ID NO: 1080080 - RNA, 22 nt, Human
uccaggaauagucauguuuuag

SEQ ID NO: 1080081 - RNA, 22 nt, Human
ggcugcagagcugggugggccu

SEQ ID NO: 1080082 - RNA, 22 nt, Human
uggcauuuuguucaguauaugg

SEQ ID NO: 1080083 - RNA, 22 nt, Human
uagacaauauuugaaaguagug

SEQ ID NO: 1080084 - RNA, 22 nt, Human
cuggugccuccucccugugcuu

SEQ ID NO: 1080085 - RNA, 22 nt, Human
auucauaaguaaaugauuaccu

SEQ ID NO: 1080086 - RNA, 22 nt, Human
gccaggagacuccauucauuug

SEQ ID NO: 1080087 - RNA, 22 nt, Human
ugggcugcacccucagccucug

SEQ ID NO: 1080088 - RNA, 22 nt, Human
gaaagccauagcccagcuuuac

SEQ ID NO: 1080089 - RNA, 22 nt, Human
gcucccagcaauugaggcagcc

SEQ ID NO: 1080090 - RNA, 22 nt, Human
ucaaagucacaacucucuaauu

SEQ ID NO: 1080091 - RNA, 22 nt, Human
aacuuuaaaaaauaugucuguu

SEQ ID NO: 1080092 - RNA, 22 nt, Human
gccucccugagucacccaagca

SEQ ID NO: 1080093 - RNA, 22 nt, Human
ccuggcucuucagagguuccua

SEQ ID NO: 1080094 - RNA, 22 nt, Human
accagagcgcucaagccuuccc

SEQ ID NO: 1080095 - RNA, 22 nt, Human
gggccuguguguucaggagccu

SEQ ID NO: 1080096 - RNA, 22 nt, Human
aguacagaccugucucuuccug

SEQ ID NO: 1080097 - RNA, 22 nt, Human
ucugagaguacgggcugcgcgc

SEQ ID NO: 1080098 - RNA, 17 nt, Human
gggcugacaguggccuc

SEQ ID NO: 1080099 - RNA, 22 nt, Human
cuggagccccaggcugugcaga

SEQ ID NO: 1080100 - RNA, 22 nt, Human
gaagauauucucuaaauacuuu

SEQ ID NO: 1080101 - RNA, 23 nt, Human
uucaaagaucuucugaaaucugu

SEQ ID NO: 1080102 - RNA, 22 nt, Human
agagcagccugugaugaugcac

SEQ ID NO: 1080103 - RNA, 22 nt, Human
caucaucaaaacaaauggaguc

SEQ ID NO: 1080104 - RNA, 22 nt, Human
gcaaagaaagccaaggucuaac

SEQ ID NO: 1080105 - RNA, 18 nt, Human
gagacacaagggccugga

SEQ ID NO: 1080106 - RNA, 22 nt, Human
ugacucuguaccugucugccuu

SEQ ID NO: 1080107 - RNA, 23 nt, Human
gugagcagcccacuaggaaugcc

SEQ ID NO: 1080108 - RNA, 22 nt, Human
caucagcagucacaugaugcug

SEQ ID NO: 1080109 - RNA, 22 nt, Human
uugauuucaaaauauaugcuug

SEQ ID NO: 1080110 - RNA, 22 nt, Human
gugcucagggccuggcugggga

SEQ ID NO: 1080111 - RNA, 22 nt, Human
gaguccaguaguuaggacagag

SEQ ID NO: 1080112 - RNA, 22 nt, Human
agcucacagaaauccugcagga

SEQ ID NO: 1080113 - RNA, 22 nt, Human
uuugugugcgucuggccugggg

SEQ ID NO: 1080114 - RNA, 22 nt, Human
aagggcugggucugguuaaccc

SEQ ID NO: 1080115 - RNA, 22 nt, Human
cuuccaaagcacuuuauggacc

SEQ ID NO: 1080116 - RNA, 22 nt, Human
caugagaaguggccuucaaaaa

SEQ ID NO: 1080117 - RNA, 22 nt, Human
ucaggaaagaagaugcucagug

SEQ ID NO: 1080118 - RNA, 22 nt, Human
aagcuagauuggcauucauuuc

SEQ ID NO: 1080119 - RNA, 22 nt, Human
cccaguggagauaggagugugg

SEQ ID NO: 1080120 - RNA, 21 nt, Human
aucagaaguuuuggucaguag

SEQ ID NO: 1080121 - RNA, 22 nt, Human
uuuucuaauuuaguuacccucc

SEQ ID NO: 1080122 - RNA, 22 nt, Human
agccaggcuacuccuugcugac

SEQ ID NO: 1080123 - RNA, 22 nt, Human
ucagaaaagagaaaaucuuaua

SEQ ID NO: 1080124 - RNA, 22 nt, Human
ccaggcagcaaauuuucugaau

SEQ ID NO: 1080125 - RNA, 22 nt, Human
gagacaucauaaugaaguuucc

SEQ ID NO: 1080126 - RNA, 21 nt, Human
acauuauaauucauauuccac

SEQ ID NO: 1080127 - RNA, 22 nt, Human
aucaagaauugggagcuauuga

SEQ ID NO: 1080128 - RNA, 22 nt, Human
ggcagcaguuacaaaugugcag

SEQ ID NO: 1080129 - RNA, 22 nt, Human
cccaggaaaggaaaugaauggg

SEQ ID NO: 1080130 - RNA, 22 nt, Human
cucugagaauaugagcucuuug

SEQ ID NO: 1080131 - RNA, 22 nt, Human
gaagcagcuuucuggugaggag

SEQ ID NO: 1080132 - RNA, 22 nt, Human
ugaauucauccauuuaugcaag

SEQ ID NO: 1080133 - RNA, 22 nt, Human
ggcucaggagaggggcuaaaag

SEQ ID NO: 1080134 - RNA, 22 nt, Human
aggaacacaacuuccugagagc

SEQ ID NO: 1080135 - RNA, 22 nt, Human
uucuccagcucaucagggaggg

SEQ ID NO: 1080136 - RNA, 22 nt, Human
caucaguucaugucuagcugcu

SEQ ID NO: 1080137 - RNA, 22 nt, Human
ugccugggagugaccaagacuc

SEQ ID NO: 1080138 - RNA, 22 nt, Human
auccaaagcccuaaguuaacug

SEQ ID NO: 1080139 - RNA, 22 nt, Human
aauucacuguuccuucugcuuu

SEQ ID NO: 1080140 - RNA, 22 nt, Human
cugggcuccuaaccauccaggu

SEQ ID NO: 1080141 - RNA, 22 nt, Human
gaaaccucuuagccucucuuug

SEQ ID NO: 1080142 - RNA, 22 nt, Human
agggagaacaguugcagcagac

SEQ ID NO: 1080143 - RNA, 22 nt, Human
ccagcugcgggcaucgagaguu

SEQ ID NO: 1080144 - RNA, 22 nt, Human
ggcugcagguugguuggcagcu

SEQ ID NO: 1080145 - RNA, 22 nt, Human
ucagaguguuuuacuaaacaag

SEQ ID NO: 1080146 - RNA, 22 nt, Human
ggcucuggguucugcaaugcgu

SEQ ID NO: 1080147 - RNA, 22 nt, Human
gcagacagccagacugcacugg

SEQ ID NO: 1080148 - RNA, 22 nt, Human
ugaauaguccuuggaauaacug

SEQ ID NO: 1080149 - RNA, 22 nt, Human
ggcaccaggcugggcauaggcc

SEQ ID NO: 1080150 - RNA, 22 nt, Human
ggucugagcuugagcccaugcu

SEQ ID NO: 1080151 - RNA, 22 nt, Human
auuuuguuuccuuuggaguaga

SEQ ID NO: 1080152 - RNA, 22 nt, Human
ucagaaaugaucguuauucauu

SEQ ID NO: 1080153 - RNA, 17 nt, Human
ugccugugauaagcaca

SEQ ID NO: 1080154 - RNA, 22 nt, Human
agaaacaucgcuuaguccucau

SEQ ID NO: 1080155 - RNA, 22 nt, Human
agccccaguccgcugcgggcgg

SEQ ID NO: 1080156 - RNA, 22 nt, Human
gucuuuuugucuggcagagguc

SEQ ID NO: 1080157 - RNA, 22 nt, Human
agugucugccugggaggagcau

SEQ ID NO: 1080158 - RNA, 20 nt, Human
auacacauauucuugcaacu

SEQ ID NO: 1080159 - RNA, 22 nt, Human
cacaaucauaauguauguacau

SEQ ID NO: 1080160 - RNA, 22 nt, Human
aaacuguaagagaauaaacuac

SEQ ID NO: 1080161 - RNA, 22 nt, Human
uuuucuuacugucugugauccu

SEQ ID NO: 1080162 - RNA, 22 nt, Human
uuuuuccacauacccuaggcca

SEQ ID NO: 1080163 - RNA, 22 nt, Human
ucaggccacuucacaggugauu

SEQ ID NO: 1080164 - RNA, 22 nt, Human
uucuggauguuguagucugaga

SEQ ID NO: 1080165 - RNA, 22 nt, Human
gccaggcuggaaagaacagaca

SEQ ID NO: 1080166 - RNA, 22 nt, Human
cucacagcagcucugcgagaua

SEQ ID NO: 1080167 - RNA, 22 nt, Human
gggcuacauugugagagaaguu

SEQ ID NO: 1080168 - RNA, 22 nt, Human
caugggagcuaucuccaucacu

SEQ ID NO: 1080169 - RNA, 22 nt, Human
caggccuggcugcagcucgccu

SEQ ID NO: 1080170 - RNA, 22 nt, Human
auuucugugcaguaaaugguga

SEQ ID NO: 1080171 - RNA, 22 nt, Human
ucuguuucuccaacauugugag

SEQ ID NO: 1080172 - RNA, 22 nt, Human
aaggaggcacucgcucucaggg

SEQ ID NO: 1080173 - RNA, 22 nt, Human
cucaaguaagaaacagaauugg

SEQ ID NO: 1080174 - RNA, 22 nt, Human
auguuuuaaauauguguguaaa

SEQ ID NO: 1080175 - RNA, 22 nt, Human
uauuucaugugcaccauaauuc

SEQ ID NO: 1080176 - RNA, 22 nt, Human
cugaagcacagcauauaaauaa

SEQ ID NO: 1080177 - RNA, 22 nt, Human
agggcagcaaugcagcugcugc

SEQ ID NO: 1080178 - RNA, 22 nt, Human
uuaugcuaaaugaaucaaguca

SEQ ID NO: 1080179 - RNA, 22 nt, Human
gguucaguuuacauuaaaaucu

SEQ ID NO: 1080180 - RNA, 22 nt, Human
augguuuguaacccaauacucc

SEQ ID NO: 1080181 - RNA, 22 nt, Human
ccugcucugccaaguccucuuu

SEQ ID NO: 1080182 - RNA, 22 nt, Human
uuaauaauaaugagcccauuuu

SEQ ID NO: 1080183 - RNA, 19 nt, Human
ucaaaugccaaugucacag

SEQ ID NO: 1080184 - RNA, 22 nt, Human
gcaggcucagagcagauuagca

SEQ ID NO: 1080185 - RNA, 22 nt, Human
cuggcaguguccagcucgugau

SEQ ID NO: 1080186 - RNA, 22 nt, Human
ugcuucaaggacacugacuuuu

SEQ ID NO: 1080187 - RNA, 22 nt, Human
acccaggagccgugagagguua

SEQ ID NO: 1080188 - RNA, 22 nt, Human
aucacuaugggcauuauauuua

SEQ ID NO: 1080189 - RNA, 22 nt, Human
gucagaucuuuggggaugcugu

SEQ ID NO: 1080190 - RNA, 22 nt, Human
aggcuuaacuuaacuuuagagc

SEQ ID NO: 1080191 - RNA, 22 nt, Human
ucauaaaguuacccaaauuuua

SEQ ID NO: 1080192 - RNA, 22 nt, Human
gcugggcugagaaguuaagcaa

SEQ ID NO: 1080193 - RNA, 22 nt, Human
cagugauaggacagcuagaacu

SEQ ID NO: 1080194 - RNA, 22 nt, Human
acuucucucauucagacauagc

SEQ ID NO: 1080195 - RNA, 22 nt, Human
agcucccagggcugggcaaguu

SEQ ID NO: 1080196 - RNA, 20 nt, Human
agugggagagggcagacugc

SEQ ID NO: 1080197 - RNA, 22 nt, Human
ugaacaugcuguugauggccug

SEQ ID NO: 1080198 - RNA, 19 nt, Human
ggccuugaugaguggggag

SEQ ID NO: 1080199 - RNA, 22 nt, Human
cucuggacagcaggugcugugg

SEQ ID NO: 1080200 - RNA, 22 nt, Human
caggaaaaaugccaggagucag

SEQ ID NO: 1080201 - RNA, 22 nt, Human
uuuguuuacaaaaauaagcagu

SEQ ID NO: 1080202 - RNA, 22 nt, Human
agcaggugggaucaagcuggca

SEQ ID NO: 1080203 - RNA, 22 nt, Human
uucugaugaggaggucucuaag

SEQ ID NO: 1080204 - RNA, 22 nt, Human
ccuguaacuccuuggcucaagu

SEQ ID NO: 1080205 - RNA, 22 nt, Human
gccucugcaccaguacugugcc

SEQ ID NO: 1080206 - RNA, 22 nt, Human
aguaacaguaacaucuuccuag

SEQ ID NO: 1080207 - RNA, 23 nt, Human
ggaaagagaggaguugugcauag

SEQ ID NO: 1080208 - RNA, 22 nt, Human
uuucaaagguuuugucaugucu

SEQ ID NO: 1080209 - RNA, 22 nt, Human
ugggccaggugcagugcuuuag

SEQ ID NO: 1080210 - RNA, 22 nt, Human
gcaccaggcagcugagcaggcc

SEQ ID NO: 1080211 - RNA, 22 nt, Human
gaggcugguaggaaaggaaaca

SEQ ID NO: 1080212 - RNA, 22 nt, Human
cacuacuugaaagaauuacaga

SEQ ID NO: 1080213 - RNA, 22 nt, Human
ucugagugauguugagucagaa

SEQ ID NO: 1080214 - RNA, 22 nt, Human
augccuuuuuaucauggaugau

SEQ ID NO: 1080215 - RNA, 20 nt, Human
aggcucagagcaguaguaca

SEQ ID NO: 1080216 - RNA, 22 nt, Human
ccucccacuucuugcugagguc

SEQ ID NO: 1080217 - RNA, 22 nt, Human
ucaucuaagagucuuacauuua

SEQ ID NO: 1080218 - RNA, 22 nt, Human
cugcuuuggcagaagucagcua

SEQ ID NO: 1080219 - RNA, 22 nt, Human
aggugcuggagucugggcagga

SEQ ID NO: 1080220 - RNA, 22 nt, Human
aggaaccagacagaacugaaug

SEQ ID NO: 1080221 - RNA, 22 nt, Human
caggaauaguggagcaacaaga

SEQ ID NO: 1080222 - RNA, 22 nt, Human
ggcacugacacuagcauggcac

SEQ ID NO: 1080223 - RNA, 22 nt, Human
uguggggcugugguguucuucu

SEQ ID NO: 1080224 - RNA, 22 nt, Human
cagcacacagugacucgcaccu

SEQ ID NO: 1080225 - RNA, 22 nt, Human
ccccuuccuuccucagacagcc

SEQ ID NO: 1080226 - RNA, 22 nt, Human
ucugucaauuauucacauaggc

SEQ ID NO: 1080227 - RNA, 22 nt, Human
ugccuuuuguuagggcugccag

SEQ ID NO: 1080228 - RNA, 22 nt, Human
aaacagugcaggaaguuaagca

SEQ ID NO: 1080229 - RNA, 22 nt, Human
acugugcuuucucuggaggcau

SEQ ID NO: 1080230 - RNA, 22 nt, Human
uuucauggcuaggacuagagug

SEQ ID NO: 1080231 - RNA, 22 nt, Human
uauugcaagcaauuccaaaagg

SEQ ID NO: 1080232 - RNA, 22 nt, Human
agcugcugagccauguccugcu

SEQ ID NO: 1080233 - RNA, 23 nt, Human
auuugagaaaguauuuuuaagac

SEQ ID NO: 1080234 - RNA, 22 nt, Human
uccauuuucaucucauguauaa

SEQ ID NO: 1080235 - RNA, 22 nt, Human
ggcacuuuucuccccggucaug

SEQ ID NO: 1080236 - RNA, 21 nt, Human
guuuguaaggcacuguguucu

SEQ ID NO: 1080237 - RNA, 22 nt, Human
ugcacacagccagugaguggca

SEQ ID NO: 1080238 - RNA, 22 nt, Human
acaguauauaugguuaucugau

SEQ ID NO: 1080239 - RNA, 21 nt, Human
cuacagaaucgagcauucugg

SEQ ID NO: 1080240 - RNA, 22 nt, Human
ggguaauuggggccuugcagug

SEQ ID NO: 1080241 - RNA, 22 nt, Human
ucucagagggaaacaugaguga

SEQ ID NO: 1080242 - RNA, 22 nt, Human
ucagccauggugagagugagag

SEQ ID NO: 1080243 - RNA, 22 nt, Human
agacacagcuaccauaauacca

SEQ ID NO: 1080244 - RNA, 22 nt, Human
gcuaacauugauucagugccug

SEQ ID NO: 1080245 - RNA, 22 nt, Human
ucaaaggcccauugucccguug

SEQ ID NO: 1080246 - RNA, 22 nt, Human
agugcaugccuuccuguggaug

SEQ ID NO: 1080247 - RNA, 22 nt, Human
agguggguaucaugagagauua

SEQ ID NO: 1080248 - RNA, 22 nt, Human
gaagccaguacugugcucugca

SEQ ID NO: 1080249 - RNA, 20 nt, Human
gcugaagauucccaugcaag

SEQ ID NO: 1080250 - RNA, 22 nt, Human
cugggccugucccugauugagg

SEQ ID NO: 1080251 - RNA, 22 nt, Human
caauuucauuaauagauauaga

SEQ ID NO: 1080252 - RNA, 22 nt, Human
agccaggggauucaucagggac

SEQ ID NO: 1080253 - RNA, 19 nt, Human
ccaggccuccugggagguc

SEQ ID NO: 1080254 - RNA, 22 nt, Human
ugcagauucaaaugaaaugcaa

SEQ ID NO: 1080255 - RNA, 22 nt, Human
cacaugggugugccuggaggaa

SEQ ID NO: 1080256 - RNA, 22 nt, Human
ucacccuugauaauguucuucu

SEQ ID NO: 1080257 - RNA, 22 nt, Human
uggcugcuagccagagcuucag

SEQ ID NO: 1080258 - RNA, 20 nt, Human
cucuccucacccgugucagg

SEQ ID NO: 1080259 - RNA, 22 nt, Human
uaaaugauuuauguaugugaaa

SEQ ID NO: 1080260 - RNA, 22 nt, Human
uugaauucauuucucauugagu

SEQ ID NO: 1080261 - RNA, 22 nt, Human
aaggccugcucagcugucugug

SEQ ID NO: 1080262 - RNA, 22 nt, Human
caaagcagagccagagcuuguc

SEQ ID NO: 1080263 - RNA, 21 nt, Human
aaagaaaucucccauugguag

SEQ ID NO: 1080264 - RNA, 22 nt, Human
caggcuccucacucaugcuccc

SEQ ID NO: 1080265 - RNA, 22 nt, Human
cugccacuagcuuucacaucuu

SEQ ID NO: 1080266 - RNA, 17 nt, Human
gccaguugucuuggcau

SEQ ID NO: 1080267 - RNA, 22 nt, Human
uguggcagaaccagaauucaaa

SEQ ID NO: 1080268 - RNA, 22 nt, Human
uuucaaguggggacauuugaga

SEQ ID NO: 1080269 - RNA, 22 nt, Human
aggagcccugcgggaggcagag

SEQ ID NO: 1080270 - RNA, 22 nt, Human
uccuggcccgaucccugugaag

SEQ ID NO: 1080271 - RNA, 22 nt, Human
ccugccaggccagugagcuucc

SEQ ID NO: 1080272 - RNA, 23 nt, Human
aauuacaaccaagaacuggaagg

SEQ ID NO: 1080273 - RNA, 22 nt, Human
cugcucuggucucuucauguuu

SEQ ID NO: 1080274 - RNA, 22 nt, Human
uguuucuaggucaauaauuuuu

SEQ ID NO: 1080275 - RNA, 23 nt, Human
agugcugaauugaaagcuccagg

SEQ ID NO: 1080276 - RNA, 22 nt, Human
ggcuggaaguccaagaucaaga

SEQ ID NO: 1080277 - RNA, 22 nt, Human
cugggccacaagccugugugau

SEQ ID NO: 1080278 - RNA, 22 nt, Human
gcuggcagguccaagauagagc

SEQ ID NO: 1080279 - RNA, 22 nt, Human
uaaauguuuagucuuauuuggg

SEQ ID NO: 1080280 - RNA, 19 nt, Human
gggucgggaaguugagaau

SEQ ID NO: 1080281 - RNA, 20 nt, Human
cagcucugggaaagaggcca

SEQ ID NO: 1080282 - RNA, 22 nt, Human
uaugaagaaguucugugaaaug

SEQ ID NO: 1080283 - RNA, 19 nt, Human
aauacaguguuauagaauu

SEQ ID NO: 1080284 - RNA, 22 nt, Human
cauuucaaguaacagauugcuu

SEQ ID NO: 1080285 - RNA, 23 nt, Human
uggagcugggcucagacccuggg

SEQ ID NO: 1080286 - RNA, 22 nt, Human
uaauacauuaccuaaccucucu

SEQ ID NO: 1080287 - RNA, 22 nt, Human
uacuugccaucagaguuuauua

SEQ ID NO: 1080288 - RNA, 22 nt, Human
agcugcucugggaaacagaagu

SEQ ID NO: 1080289 - RNA, 22 nt, Human
ccuggcaguggugaagaagagg

SEQ ID NO: 1080290 - RNA, 22 nt, Human
agaagcuggaggaagacuaagc

SEQ ID NO: 1080291 - RNA, 22 nt, Human
cgucuuccucuuacgaugcgcu

SEQ ID NO: 1080292 - RNA, 22 nt, Human
uagacagauuuaaaggaaugga

SEQ ID NO: 1080293 - RNA, 22 nt, Human
cugcccaggaaggagaggaugg

SEQ ID NO: 1080294 - RNA, 22 nt, Human
agcauuuaauccuacauagauc

SEQ ID NO: 1080295 - RNA, 18 nt, Human
ccaaggccccugcugggg

SEQ ID NO: 1080296 - RNA, 22 nt, Human
agcccagaggcugggcgugcau

SEQ ID NO: 1080297 - RNA, 22 nt, Human
ucuuuuggguucuuaugauuua

SEQ ID NO: 1080298 - RNA, 22 nt, Human
gagaggcuuaagggcugugaag

SEQ ID NO: 1080299 - RNA, 22 nt, Human
gcagggucgcucuaggagauca

SEQ ID NO: 1080300 - RNA, 22 nt, Human
acauuuaaccuuugaggaacug

SEQ ID NO: 1080301 - RNA, 22 nt, Human
uggccuggggaccugugagacc

SEQ ID NO: 1080302 - RNA, 22 nt, Human
gcaugggcuuucucagaguucu

SEQ ID NO: 1080303 - RNA, 20 nt, Human
ugaaggccagcagcauaggg

SEQ ID NO: 1080304 - RNA, 22 nt, Human
ggcacugauaauguccucucuc

SEQ ID NO: 1080305 - RNA, 22 nt, Human
uggggcagcagaccuuucuugg

SEQ ID NO: 1080306 - RNA, 22 nt, Human
ggcaggguccacaccugggaaa

SEQ ID NO: 1080307 - RNA, 22 nt, Human
cccucagcucaagccccugugc

SEQ ID NO: 1080308 - RNA, 21 nt, Human
agaauucuuaaguauucuaau

SEQ ID NO: 1080309 - RNA, 22 nt, Human
augagguuugagccucuugacc

SEQ ID NO: 1080310 - RNA, 22 nt, Human
caaaggcaguuacugaaugaag

SEQ ID NO: 1080311 - RNA, 22 nt, Human
agaugcugugucuguucccuug

SEQ ID NO: 1080312 - RNA, 22 nt, Human
cccagccucugggcucacccaa

SEQ ID NO: 1080313 - RNA, 22 nt, Human
caggagcccugguggguggaca

SEQ ID NO: 1080314 - RNA, 22 nt, Human
uugcaugcaccuaacaaauuau

SEQ ID NO: 1080315 - RNA, 22 nt, Human
guauuuucaugauuucagacca

SEQ ID NO: 1080316 - RNA, 22 nt, Human
acccuguaugcuauaucccuaa

SEQ ID NO: 1080317 - RNA, 22 nt, Human
uuaacauuguccuuagcagauu

SEQ ID NO: 1080318 - RNA, 22 nt, Human
aucaagaaaagugcuuucggcu

SEQ ID NO: 1080319 - RNA, 22 nt, Human
acaaaguaggcagugggcugga

SEQ ID NO: 1080320 - RNA, 22 nt, Human
uauuuguccagguaaauuucag

SEQ ID NO: 1080321 - RNA, 22 nt, Human
acccucaguaaucgugcaguuu

SEQ ID NO: 1080322 - RNA, 22 nt, Human
auguuucaugacugagcaaaau

SEQ ID NO: 1080323 - RNA, 22 nt, Human
guggagaccuccuaggaugugu

SEQ ID NO: 1080324 - RNA, 22 nt, Human
gcugucacaagcaucuggggca

SEQ ID NO: 1080325 - RNA, 22 nt, Human
cauggaacugugcugaaaagug

SEQ ID NO: 1080326 - RNA, 22 nt, Human
caguggguccuaaguacaguuc

SEQ ID NO: 1080327 - RNA, 22 nt, Human
uuuaccuaguauaaugcaaccu

SEQ ID NO: 1080328 - RNA, 21 nt, Human
caccugugagacucucagacc

SEQ ID NO: 1080329 - RNA, 22 nt, Human
ggccucgcggcuucugguggcu

SEQ ID NO: 1080330 - RNA, 22 nt, Human
gggcuucucuuuagugagcuga

SEQ ID NO: 1080331 - RNA, 22 nt, Human
uuucauaaccucaagcuacagu

SEQ ID NO: 1080332 - RNA, 22 nt, Human
uuggcauuggagaugcaagaac

SEQ ID NO: 1080333 - RNA, 21 nt, Human
ccagucuguaaaauggggaca

SEQ ID NO: 1080334 - RNA, 22 nt, Human
aguacuuuacuucuuacaguuu

SEQ ID NO: 1080335 - RNA, 22 nt, Human
agacuucucaguuuuauuagua

SEQ ID NO: 1080336 - RNA, 22 nt, Human
uggugugggcguggcaggcaag

SEQ ID NO: 1080337 - RNA, 21 nt, Human
agacagaacaacugcucucca

SEQ ID NO: 1080338 - RNA, 22 nt, Human
ccauuuaguaaggaagaacagc

SEQ ID NO: 1080339 - RNA, 22 nt, Human
cugcuuccauaaauaaugugcu

SEQ ID NO: 1080340 - RNA, 19 nt, Human
uguugccagguaucauguu

SEQ ID NO: 1080341 - RNA, 19 nt, Human
agcaccugugagagccugg

SEQ ID NO: 1080342 - RNA, 23 nt, Human
aaguaccuacacauuauuucaga

SEQ ID NO: 1080343 - RNA, 22 nt, Human
gaaggcugcugggaaguguggu

SEQ ID NO: 1080344 - RNA, 22 nt, Human
gcuccuucaggugguagcuguu

SEQ ID NO: 1080345 - RNA, 22 nt, Human
auauuucagguuuugcaggccg

SEQ ID NO: 1080346 - RNA, 22 nt, Human
uggcuaggacucauccuguuuc

SEQ ID NO: 1080347 - RNA, 22 nt, Human
aggcacugacaauucuggacug

SEQ ID NO: 1080348 - RNA, 22 nt, Human
acuuccaggaacugccgcuaac

SEQ ID NO: 1080349 - RNA, 22 nt, Human
uucuguaugccaauggguuuuu

SEQ ID NO: 1080350 - RNA, 22 nt, Human
aguauuucugcucaugaaagag

SEQ ID NO: 1080351 - RNA, 22 nt, Human
ccuggcaggccccuccuggauu

SEQ ID NO: 1080352 - RNA, 22 nt, Human
uaggggugaggccaggcaucag

SEQ ID NO: 1080353 - RNA, 22 nt, Human
aggcugagcuggcccuugaaau

SEQ ID NO: 1080354 - RNA, 22 nt, Human
ggggagugacgcagggccauag

SEQ ID NO: 1080355 - RNA, 22 nt, Human
ucuuuacaagucacauuuucug

SEQ ID NO: 1080356 - RNA, 22 nt, Human
ucugccuuggcaaccacagcuu

SEQ ID NO: 1080357 - RNA, 22 nt, Human
uacugugacagaguacuuaaac

SEQ ID NO: 1080358 - RNA, 22 nt, Human
aagacccacaaggcugaauguu

SEQ ID NO: 1080359 - RNA, 22 nt, Human
agggcagaaauauugauacugu

SEQ ID NO: 1080360 - RNA, 22 nt, Human
aaaugcagccuagcucaguuuu

SEQ ID NO: 1080361 - RNA, 22 nt, Human
gcuggccugcaaagcccggcug

SEQ ID NO: 1080362 - RNA, 22 nt, Human
gcucugggaauucagaaagccu

SEQ ID NO: 1080363 - RNA, 22 nt, Human
cugggagcccugacuagccugg

SEQ ID NO: 1080364 - RNA, 22 nt, Human
gagagcuggguucaaguagcug

SEQ ID NO: 1080365 - RNA, 20 nt, Human
cugagcccuuccugugaacc

SEQ ID NO: 1080366 - RNA, 22 nt, Human
cugcugugaguuuggaggucua

SEQ ID NO: 1080367 - RNA, 18 nt, Human
aggggcagcuugugugga

SEQ ID NO: 1080368 - RNA, 22 nt, Human
ggcaggcacauuugggggccgu

SEQ ID NO: 1080369 - RNA, 22 nt, Human
uacacuuuuuacuacagauucu

SEQ ID NO: 1080370 - RNA, 22 nt, Human
cugcugugcagacagacucucu

SEQ ID NO: 1080371 - RNA, 22 nt, Human
gcugggcuucaccuccagaguu

SEQ ID NO: 1080372 - RNA, 22 nt, Human
ggcugaguugagaggauuacuu

SEQ ID NO: 1080373 - RNA, 22 nt, Human
aagaagcuaagacuaucugggu

SEQ ID NO: 1080374 - RNA, 22 nt, Human
ucaggaagaaagaagggagugu

SEQ ID NO: 1080375 - RNA, 22 nt, Human
acagcuggaggccccauugucc

SEQ ID NO: 1080376 - RNA, 22 nt, Human
gcuggacaggccacauggagga

SEQ ID NO: 1080377 - RNA, 22 nt, Human
gggaggugaaagguugcugcag

SEQ ID NO: 1080378 - RNA, 20 nt, Human
guccugggagccacagcaca

SEQ ID NO: 1080379 - RNA, 18 nt, Human
aguguuuauuuaggugaa

SEQ ID NO: 1080380 - RNA, 22 nt, Human
ggugaggguaaauauaggcaaa

SEQ ID NO: 1080381 - RNA, 22 nt, Human
cuggagcuaggaaguccaagau

SEQ ID NO: 1080382 - RNA, 22 nt, Human
uuguguaacuugagcaaacaca

SEQ ID NO: 1080383 - RNA, 22 nt, Human
uggcugccuuucaccucaucuc

SEQ ID NO: 1080384 - RNA, 22 nt, Human
gcccccucuuuggagccagcca

SEQ ID NO: 1080385 - RNA, 22 nt, Human
uauuuggagcugugugagcuca

SEQ ID NO: 1080386 - RNA, 22 nt, Human
uuugcagcaaggagagagcauu

SEQ ID NO: 1080387 - RNA, 22 nt, Human
ggccucugaggacagccuuggc

SEQ ID NO: 1080388 - RNA, 22 nt, Human
cauuguuaauugguaucuuaca

SEQ ID NO: 1080389 - RNA, 22 nt, Human
ucccaagauacgcuguaagaag

SEQ ID NO: 1080390 - RNA, 22 nt, Human
ggucccaggcugcgggcuggug

SEQ ID NO: 1080391 - RNA, 22 nt, Human
uuacugauggaacagagauaga

SEQ ID NO: 1080392 - RNA, 22 nt, Human
agcugaaggcuagaacagcugg

SEQ ID NO: 1080393 - RNA, 22 nt, Human
gagggaggcaucaugaauccag

SEQ ID NO: 1080394 - RNA, 22 nt, Human
uucuuacauauuuucauauggu

SEQ ID NO: 1080395 - RNA, 22 nt, Human
ccaggaagcggugagggcugcc

SEQ ID NO: 1080396 - RNA, 22 nt, Human
ccagcugggauuaagggaaaau

SEQ ID NO: 1080397 - RNA, 22 nt, Human
ugggcucauggcccagcacugg

SEQ ID NO: 1080398 - RNA, 22 nt, Human
gccaguggcaugcggcagggac

SEQ ID NO: 1080399 - RNA, 22 nt, Human
uucaacaaaauauauuuuucca

SEQ ID NO: 1080400 - RNA, 22 nt, Human
cugguggguagagggcaucagg

SEQ ID NO: 1080401 - RNA, 22 nt, Human
caagucaaagacuagaacuagu

SEQ ID NO: 1080402 - RNA, 22 nt, Human
uggcauuugagcuggaaggaug

SEQ ID NO: 1080403 - RNA, 22 nt, Human
aaucagaaucaguugacacagc

SEQ ID NO: 1080404 - RNA, 22 nt, Human
caggguggcacaucacagcauu

SEQ ID NO: 1080405 - RNA, 22 nt, Human
ugugaaaucugaugaauugacc

SEQ ID NO: 1080406 - RNA, 22 nt, Human
acuugguguauuagcucucacu

SEQ ID NO: 1080407 - RNA, 22 nt, Human
aaaggccagguuggcugguauu

SEQ ID NO: 1080408 - RNA, 22 nt, Human
ccacugucuuuuccaggcugaa

SEQ ID NO: 1080409 - RNA, 22 nt, Human
agcagggguaacagaaggaaag

SEQ ID NO: 1080410 - RNA, 22 nt, Human
uguauagaguuggaagaugacu

SEQ ID NO: 1080411 - RNA, 22 nt, Human
uuuuuuccagcuucuagaggcc

SEQ ID NO: 1080412 - RNA, 22 nt, Human
uacaguauuaugagugauugaa

SEQ ID NO: 1080413 - RNA, 21 nt, Human
uccucagggccccagagcacu

SEQ ID NO: 1080414 - RNA, 22 nt, Human
ucagaggauagaaauacuuauu

SEQ ID NO: 1080415 - RNA, 23 nt, Human
cuugcagggcuggaggcuuagaa

SEQ ID NO: 1080416 - RNA, 22 nt, Human
gggcccacuggcugucugaccc

SEQ ID NO: 1080417 - RNA, 22 nt, Human
agcccugcuucaccauuuacuu

SEQ ID NO: 1080418 - RNA, 22 nt, Human
uuacagcacagugcuuuuacug

SEQ ID NO: 1080419 - RNA, 22 nt, Human
ugcagaugccugggcugcacca

SEQ ID NO: 1080420 - RNA, 22 nt, Human
gggcagcacagacagugaaggc

SEQ ID NO: 1080421 - RNA, 22 nt, Human
ugcagcaauuugcaguaauuua

SEQ ID NO: 1080422 - RNA, 20 nt, Human
acauuugaguaucaucuacu

SEQ ID NO: 1080423 - RNA, 22 nt, Human
cucccacuccuggcucaccaca

SEQ ID NO: 1080424 - RNA, 23 nt, Human
cagaagcaccuguugacugcugc

SEQ ID NO: 1080425 - RNA, 20 nt, Human
gggagaagggcugaugagag

SEQ ID NO: 1080426 - RNA, 22 nt, Human
gggugcagggucuccagcagcu

SEQ ID NO: 1080427 - RNA, 22 nt, Human
cugcugagagcugaaggcugua

SEQ ID NO: 1080428 - RNA, 22 nt, Human
ugagccagccuugcagcugugc

SEQ ID NO: 1080429 - RNA, 23 nt, Human
aggauccugguacaggagcagag

SEQ ID NO: 1080430 - RNA, 22 nt, Human
gacauaaaauggaauucuguug

SEQ ID NO: 1080431 - RNA, 22 nt, Human
aagccaggcugcacuugcuggg

SEQ ID NO: 1080432 - RNA, 22 nt, Human
cuauuuuucuguacccuaauuu

SEQ ID NO: 1080433 - RNA, 21 nt, Human
aaugaugaaagaugacagagu

SEQ ID NO: 1080434 - RNA, 22 nt, Human
cauuucacgcacacucauuacu

SEQ ID NO: 1080435 - RNA, 22 nt, Human
caggaaacggcuauucuuuugu

SEQ ID NO: 1080436 - RNA, 22 nt, Human
aggaacacaaugcuucugugug

SEQ ID NO: 1080437 - RNA, 22 nt, Human
ggagagaacugaccugaaagga

SEQ ID NO: 1080438 - RNA, 22 nt, Human
cauuugaacuaauaacugugcu

SEQ ID NO: 1080439 - RNA, 22 nt, Human
cccuucagcugagugggacagc

SEQ ID NO: 1080440 - RNA, 22 nt, Human
gggcugagccacagcuuuuguu

SEQ ID NO: 1080441 - RNA, 22 nt, Human
ggcaggugacggggaugaguau

SEQ ID NO: 1080442 - RNA, 22 nt, Human
cauucuuauauuuacucauuca

SEQ ID NO: 1080443 - RNA, 22 nt, Human
uccaggccccacugaagccccu

SEQ ID NO: 1080444 - RNA, 22 nt, Human
ucagggcacaggccuguggguu

SEQ ID NO: 1080445 - RNA, 22 nt, Human
cucuccagccacagaagcugcu

SEQ ID NO: 1080446 - RNA, 22 nt, Human
cacauguaguaagcaggcaaug

SEQ ID NO: 1080447 - RNA, 22 nt, Human
auugcuggcugccaucuugccc

SEQ ID NO: 1080448 - RNA, 22 nt, Human
ugccugggugcuggcuggucac

SEQ ID NO: 1080449 - RNA, 22 nt, Human
uuccacauuccuuacauucaua

SEQ ID NO: 1080450 - RNA, 22 nt, Human
ccaggcauccauugcuuccucu

SEQ ID NO: 1080451 - RNA, 22 nt, Human
uccugaccugaacuggggucuu

SEQ ID NO: 1080452 - RNA, 20 nt, Human
ggaagccagcauccuugagg

SEQ ID NO: 1080453 - RNA, 22 nt, Human
agacagggucuugaucagagcu

SEQ ID NO: 1080454 - RNA, 20 nt, Human
acugggccuaggggaggcau

SEQ ID NO: 1080455 - RNA, 22 nt, Human
cccagcucaagcagagagcuaa

SEQ ID NO: 1080456 - RNA, 18 nt, Human
gugcaaugaauagcagag

SEQ ID NO: 1080457 - RNA, 22 nt, Human
gcugccaauccagcugugggag

SEQ ID NO: 1080458 - RNA, 22 nt, Human
cugcugagccuggugcgggaug

SEQ ID NO: 1080459 - RNA, 22 nt, Human
uuugcauuuugauaagaucacu

SEQ ID NO: 1080460 - RNA, 22 nt, Human
guucacagauccuugaagccag

SEQ ID NO: 1080461 - RNA, 22 nt, Human
ucuuuccagaggaauuuuuaga

SEQ ID NO: 1080462 - RNA, 20 nt, Human
ggcugcaggacucauuggcu

SEQ ID NO: 1080463 - RNA, 22 nt, Human
gagcagcuccagccgcaugacu

SEQ ID NO: 1080464 - RNA, 18 nt, Human
uggcagggaggaaauaua

SEQ ID NO: 1080465 - RNA, 22 nt, Human
gagcugggcacacgccacuuga

SEQ ID NO: 1080466 - RNA, 21 nt, Human
guucaaauggguagauucaca

SEQ ID NO: 1080467 - RNA, 22 nt, Human
aggaagacaaucugugugcugu

SEQ ID NO: 1080468 - RNA, 19 nt, Human
gcgaggaagucacuguggc

SEQ ID NO: 1080469 - RNA, 22 nt, Human
caaaugaagggagcugaagucu

SEQ ID NO: 1080470 - RNA, 22 nt, Human
ugguccuggggaucugcaguga

SEQ ID NO: 1080471 - RNA, 22 nt, Human
aaucaguuaaauauugaguaca

SEQ ID NO: 1080472 - RNA, 23 nt, Human
agcagugaguaaacagauaggau

SEQ ID NO: 1080473 - RNA, 22 nt, Human
guguucuuuauuuagugaugcu

SEQ ID NO: 1080474 - RNA, 22 nt, Human
uaggaacaaaagguuuuccuga

SEQ ID NO: 1080475 - RNA, 22 nt, Human
ugaggcaggacuugcauaaagu

SEQ ID NO: 1080476 - RNA, 22 nt, Human
auagauguucaaucagauauuu

SEQ ID NO: 1080477 - RNA, 22 nt, Human
gaggguccccaugcagagcuca

SEQ ID NO: 1080478 - RNA, 22 nt, Human
caggggcaggugugagaucauc

SEQ ID NO: 1080479 - RNA, 22 nt, Human
acagguggcuuauuggcugauu

SEQ ID NO: 1080480 - RNA, 18 nt, Human
agcagggcauuuugccau

SEQ ID NO: 1080481 - RNA, 22 nt, Human
uuucuaaaauagauuuuauggu

SEQ ID NO: 1080482 - RNA, 22 nt, Human
acguguucaauuuccaucugac

SEQ ID NO: 1080483 - RNA, 22 nt, Human
aagacauuuauuugaaucaauu

SEQ ID NO: 1080484 - RNA, 22 nt, Human
auucuguauggaaaagcacuau

SEQ ID NO: 1080485 - RNA, 22 nt, Human
aggcugaggagggauguugcuu

SEQ ID NO: 1080486 - RNA, 22 nt, Human
aaaugucuuuaucucauguaac

SEQ ID NO: 1080487 - RNA, 22 nt, Human
guuauuagaagugaaggauugu

SEQ ID NO: 1080488 - RNA, 22 nt, Human
cuagaaauauuuuacagucaag

SEQ ID NO: 1080489 - RNA, 22 nt, Human
gggcucagagcauuuggguugg

SEQ ID NO: 1080490 - RNA, 22 nt, Human
agaauaguggcaaugacugcac

SEQ ID NO: 1080491 - RNA, 22 nt, Human
gcagggcaucccugagcgggug

SEQ ID NO: 1080492 - RNA, 21 nt, Human
agaguaauuccugcuggaaag

SEQ ID NO: 1080493 - RNA, 22 nt, Human
gagauggcaggugugugggaca

SEQ ID NO: 1080494 - RNA, 22 nt, Human
uggcccugcuaugauccugcaa

SEQ ID NO: 1080495 - RNA, 22 nt, Human
uuccaaguuaggcgagcuggug

SEQ ID NO: 1080496 - RNA, 22 nt, Human
caugcugugugguuagaacugu

SEQ ID NO: 1080497 - RNA, 22 nt, Human
cuguccugauggugccacuggu

SEQ ID NO: 1080498 - RNA, 22 nt, Human
gaagaaagaucaaauaguuucc

SEQ ID NO: 1080499 - RNA, 22 nt, Human
uggaaauuacuaacacuuagag

SEQ ID NO: 1080500 - RNA, 22 nt, Human
cuucuuaaugcauaaacugugu

SEQ ID NO: 1080501 - RNA, 22 nt, Human
ccucugcaaagaauuugucucc

SEQ ID NO: 1080502 - RNA, 22 nt, Human
uuugaaauguaucaguauaggu

SEQ ID NO: 1080503 - RNA, 22 nt, Human
uucaaucauuccaacacuuuaa

SEQ ID NO: 1080504 - RNA, 22 nt, Human
caggaugguggcaugaucagaa

SEQ ID NO: 1080505 - RNA, 22 nt, Human
aguggucuagucugaggauuau

SEQ ID NO: 1080506 - RNA, 22 nt, Human
agcaguuaugugucucuugacu

SEQ ID NO: 1080507 - RNA, 22 nt, Human
agcuucucaggagucugaggca

SEQ ID NO: 1080508 - RNA, 22 nt, Human
aauugagaugacagaggaauag

SEQ ID NO: 1080509 - RNA, 22 nt, Human
ugcuaagucacucaagaccucu

SEQ ID NO: 1080510 - RNA, 22 nt, Human
acaggaacgaauguacauuguu

SEQ ID NO: 1080511 - RNA, 22 nt, Human
caucacaaauguaauaaugucu

SEQ ID NO: 1080512 - RNA, 22 nt, Human
gagguauguaugcuacauucuu

SEQ ID NO: 1080513 - RNA, 22 nt, Human
caugugucaaaugauguagcug

SEQ ID NO: 1080514 - RNA, 22 nt, Human
caugcuccaaaaacaagagaau

SEQ ID NO: 1080515 - RNA, 22 nt, Human
auaucaaaauaaacagcaugca

SEQ ID NO: 1080516 - RNA, 22 nt, Human
ugcauuguugaauauuucauag

SEQ ID NO: 1080517 - RNA, 22 nt, Human
acaauacaggcuucuggacuua

SEQ ID NO: 1080518 - RNA, 21 nt, Human
agaaaauggcguuuuagauuu

SEQ ID NO: 1080519 - RNA, 20 nt, Human
ccuggcugcauucaggacgg

SEQ ID NO: 1080520 - RNA, 20 nt, Human
ucacuaguaaccaucugcuu

SEQ ID NO: 1080521 - RNA, 22 nt, Human
aagcagggugucuugacccaug

SEQ ID NO: 1080522 - RNA, 22 nt, Human
uuucaaagguggaagagugaau

SEQ ID NO: 1080523 - RNA, 22 nt, Human
acuuaaaaagaaucuuuucacg

SEQ ID NO: 1080524 - RNA, 22 nt, Human
uuuagcagagcauaugauaucc

SEQ ID NO: 1080525 - RNA, 22 nt, Human
ucugggcuuuaguuuguuaucu

SEQ ID NO: 1080526 - RNA, 22 nt, Human
uggcucagugaagagauaacuu

SEQ ID NO: 1080527 - RNA, 22 nt, Human
uuuguuaaaaugcagauucugu

SEQ ID NO: 1080528 - RNA, 22 nt, Human
ugggccaguccagccccaggga

SEQ ID NO: 1080529 - RNA, 22 nt, Human
cagcaugcaaguccagaugugg

SEQ ID NO: 1080530 - RNA, 22 nt, Human
ugagaaccaugaaaagcuguca

SEQ ID NO: 1080531 - RNA, 22 nt, Human
uuaaagcauccugucagucugu

SEQ ID NO: 1080532 - RNA, 22 nt, Human
gcugggccagacuuucaauguc

SEQ ID NO: 1080533 - RNA, 22 nt, Human
gcaggcucccuugcagagcagg

SEQ ID NO: 1080534 - RNA, 21 nt, Human
guggcccugccgcagugucca

SEQ ID NO: 1080535 - RNA, 22 nt, Human
ccugggcucaagugauccuccu

SEQ ID NO: 1080536 - RNA, 22 nt, Human
ggccugagucacaucaggagag

SEQ ID NO: 1080537 - RNA, 22 nt, Human
agcaaggggcagugaaagugug

SEQ ID NO: 1080538 - RNA, 22 nt, Human
caggugggcguggcgagaaggc

SEQ ID NO: 1080539 - RNA, 22 nt, Human
aaggccugggaggccucucuuc

SEQ ID NO: 1080540 - RNA, 22 nt, Human
aagcaucaacacuauauugaug

SEQ ID NO: 1080541 - RNA, 22 nt, Human
gcugaaaugucuuuagcagugu

SEQ ID NO: 1080542 - RNA, 20 nt, Human
accccacagaguccauugca

SEQ ID NO: 1080543 - RNA, 22 nt, Human
gugucaggcagucagcauggag

SEQ ID NO: 1080544 - RNA, 18 nt, Human
uagauggcagucugcaga

SEQ ID NO: 1080545 - RNA, 22 nt, Human
ucugagagucucugaggcagau

SEQ ID NO: 1080546 - RNA, 22 nt, Human
gaggagaaauuuggggaccuga

SEQ ID NO: 1080547 - RNA, 22 nt, Human
augcccugcugccaucuggccg

SEQ ID NO: 1080548 - RNA, 22 nt, Human
uugcuucaguagcucuuuaaag

SEQ ID NO: 1080549 - RNA, 19 nt, Human
ugcuaaguccuuuagaggc

SEQ ID NO: 1080550 - RNA, 22 nt, Human
gcagggaccugccacugcuguc

SEQ ID NO: 1080551 - RNA, 22 nt, Human
gucagcaggguccccuugagug

SEQ ID NO: 1080552 - RNA, 22 nt, Human
auagaaacagggaagcaaagca

SEQ ID NO: 1080553 - RNA, 22 nt, Human
cugucucucuaggacacugggg

SEQ ID NO: 1080554 - RNA, 22 nt, Human
gcucagagggaacaaggggcug

SEQ ID NO: 1080555 - RNA, 21 nt, Human
gaucuuuacuuuccuacuuac

SEQ ID NO: 1080556 - RNA, 22 nt, Human
cagccagcuucagauccaagcc

SEQ ID NO: 1080557 - RNA, 22 nt, Human
gaagaaagauuggcaugcuuca

SEQ ID NO: 1080558 - RNA, 22 nt, Human
cuuaaagaaauugaggagagga

SEQ ID NO: 1080559 - RNA, 22 nt, Human
gcacacaguauaugcucauuaa

SEQ ID NO: 1080560 - RNA, 22 nt, Human
auucuugcaguauacaacuacu

SEQ ID NO: 1080561 - RNA, 22 nt, Human
cuggagcagcagguggccaggg

SEQ ID NO: 1080562 - RNA, 22 nt, Human
caaggcuguguuagcugcccuc

SEQ ID NO: 1080563 - RNA, 22 nt, Human
ccaaggcuucccagagaugcuc

SEQ ID NO: 1080564 - RNA, 22 nt, Human
ucagcuccucaugcaggggaua

SEQ ID NO: 1080565 - RNA, 22 nt, Human
uccuguggagaggacuggaggu

SEQ ID NO: 1080566 - RNA, 22 nt, Human
augaaaauucuaugcaggccag

SEQ ID NO: 1080567 - RNA, 22 nt, Human
cugaggcugggcugaggguaua

SEQ ID NO: 1080568 - RNA, 22 nt, Human
guaaucucagcuacuugggagg

SEQ ID NO: 1080569 - RNA, 22 nt, Human
guauauaucggcacuauuuuaa

SEQ ID NO: 1080570 - RNA, 22 nt, Human
aggacuucuccgauaagucaga

SEQ ID NO: 1080571 - RNA, 22 nt, Human
uggcacugggacagaugcucuc

SEQ ID NO: 1080572 - RNA, 18 nt, Human
gcccaugguaaaugcugu

SEQ ID NO: 1080573 - RNA, 22 nt, Human
gaguaauuagagcaaugacuuu

SEQ ID NO: 1080574 - RNA, 22 nt, Human
gcugucuguggugucagcugac

SEQ ID NO: 1080575 - RNA, 22 nt, Human
uuagauaaauuaagacuuuaca

SEQ ID NO: 1080576 - RNA, 22 nt, Human
uuuuuauaacucuuuugugaca

SEQ ID NO: 1080577 - RNA, 23 nt, Human
cugguaaaucacuaaaauuacaa

SEQ ID NO: 1080578 - RNA, 22 nt, Human
aggcacugaagugguaaaugua

SEQ ID NO: 1080579 - RNA, 22 nt, Human
uaaauacagucauuugagccau

SEQ ID NO: 1080580 - RNA, 22 nt, Human
cucucugucuuggcauuugguc

SEQ ID NO: 1080581 - RNA, 22 nt, Human
ugcacacauguauguauaugug

SEQ ID NO: 1080582 - RNA, 22 nt, Human
cucagggcaguauggcugagag

SEQ ID NO: 1080583 - RNA, 22 nt, Human
ugcugcucuucaccauggccuc

SEQ ID NO: 1080584 - RNA, 18 nt, Human
gcagagugcgucucugug

SEQ ID NO: 1080585 - RNA, 22 nt, Human
uugucccaggacuugcauagau

SEQ ID NO: 1080586 - RNA, 22 nt, Human
gaagaagccucuguggaucuga

SEQ ID NO: 1080587 - RNA, 22 nt, Human
uuuauucacucauucagccagu

SEQ ID NO: 1080588 - RNA, 22 nt, Human
gagcccaggcagagguugcagu

SEQ ID NO: 1080589 - RNA, 19 nt, Human
gcuggggaauggauauuga

SEQ ID NO: 1080590 - RNA, 22 nt, Human
acaucccacagaaacauacaua

SEQ ID NO: 1080591 - RNA, 22 nt, Human
ucaguuuuuaaaugauauaauu

SEQ ID NO: 1080592 - RNA, 22 nt, Human
ugcuauugugaacagugccaca

SEQ ID NO: 1080593 - RNA, 22 nt, Human
ggcacacaggcagauggagugu

SEQ ID NO: 1080594 - RNA, 22 nt, Human
aacacuuuuuccuccugucugg

SEQ ID NO: 1080595 - RNA, 22 nt, Human
cuuucaaucaaaguuucuagug

SEQ ID NO: 1080596 - RNA, 22 nt, Human
gauuucaaguaucuugggcgag

SEQ ID NO: 1080597 - RNA, 22 nt, Human
ucuucaugaaauugauugcuua

SEQ ID NO: 1080598 - RNA, 22 nt, Human
gagguggguguaucacagguca

SEQ ID NO: 1080599 - RNA, 22 nt, Human
augcacacacauuaugucugug

SEQ ID NO: 1080600 - RNA, 18 nt, Human
aggaaagacgaagagggc

SEQ ID NO: 1080601 - RNA, 22 nt, Human
cucuuccuacagucugcuaugc

SEQ ID NO: 1080602 - RNA, 22 nt, Human
acaaaggcaggauugacuuagu

SEQ ID NO: 1080603 - RNA, 22 nt, Human
uuuccuuuuauaaggcuugagg

SEQ ID NO: 1080604 - RNA, 21 nt, Human
uucagcuauucagaaggggag

SEQ ID NO: 1080605 - RNA, 22 nt, Human
cagucccacuagugccaauacc

SEQ ID NO: 1080606 - RNA, 22 nt, Human
agccugguuuaagcauuuuaua

SEQ ID NO: 1080607 - RNA, 22 nt, Human
gugugguggcccuccuucaggc

SEQ ID NO: 1080608 - RNA, 22 nt, Human
uuuguagacgucagaaguuacu

SEQ ID NO: 1080609 - RNA, 22 nt, Human
ugaguguauaucaggagagagc

SEQ ID NO: 1080610 - RNA, 22 nt, Human
uaagauaauccauuauaauguu

SEQ ID NO: 1080611 - RNA, 22 nt, Human
ggcugagcaauuuugaugacau

SEQ ID NO: 1080612 - RNA, 22 nt, Human
ugcaaagucgcaaaauucuucu

SEQ ID NO: 1080613 - RNA, 22 nt, Human
gggagggaaggaccuuaugaau

SEQ ID NO: 1080614 - RNA, 22 nt, Human
aggaggcccuagagcucuagag

SEQ ID NO: 1080615 - RNA, 22 nt, Human
cuggagcccugaaugggcagga

SEQ ID NO: 1080616 - RNA, 22 nt, Human
caccuagggcaucccugcccca

SEQ ID NO: 1080617 - RNA, 22 nt, Human
cuggcagcaguuaugaaacaau

SEQ ID NO: 1080618 - RNA, 18 nt, Human
ugcaggcuguugaaacug

SEQ ID NO: 1080619 - RNA, 21 nt, Human
ugcugccauagaccugaggga

SEQ ID NO: 1080620 - RNA, 22 nt, Human
auguggcugguaguugacaacu

SEQ ID NO: 1080621 - RNA, 22 nt, Human
uguucuuuagcagaccauguug

SEQ ID NO: 1080622 - RNA, 22 nt, Human
cagaaaaggguguuuguucagg

SEQ ID NO: 1080623 - RNA, 22 nt, Human
aagagaauucugguuuuccuau

SEQ ID NO: 1080624 - RNA, 22 nt, Human
uggcagcagggccccuggagga

SEQ ID NO: 1080625 - RNA, 22 nt, Human
guaaacaagucuaccauuagaa

SEQ ID NO: 1080626 - RNA, 22 nt, Human
aggcagguccccuggaaggcac

SEQ ID NO: 1080627 - RNA, 22 nt, Human
uauguacaguccuuaacuuaaa

SEQ ID NO: 1080628 - RNA, 22 nt, Human
uucuuuucaagaggggcaagga

SEQ ID NO: 1080629 - RNA, 22 nt, Human
uggcucagcugucacagccugg

SEQ ID NO: 1080630 - RNA, 22 nt, Human
guguggggcucagugggaaugu

SEQ ID NO: 1080631 - RNA, 19 nt, Human
agggcugcucuggccuggg

SEQ ID NO: 1080632 - RNA, 22 nt, Human
aguauuucuaguugguucuacu

SEQ ID NO: 1080633 - RNA, 22 nt, Human
gccagccugugggggcucugug

SEQ ID NO: 1080634 - RNA, 22 nt, Human
ggggcugacgggcauguggcuu

SEQ ID NO: 1080635 - RNA, 22 nt, Human
cacacagacagcucucugaaga

SEQ ID NO: 1080636 - RNA, 23 nt, Human
acuuaaaugguucuuuaucucag

SEQ ID NO: 1080637 - RNA, 22 nt, Human
uccuccagugucuggggccuug

SEQ ID NO: 1080638 - RNA, 22 nt, Human
cacugaaaucgaaaaauguagg

SEQ ID NO: 1080639 - RNA, 22 nt, Human
ugucuccucauacugucauauu

SEQ ID NO: 1080640 - RNA, 22 nt, Human
cugccuggcccagggaugggcc

SEQ ID NO: 1080641 - RNA, 22 nt, Human
gauuuauuggucuuucauuggu

SEQ ID NO: 1080642 - RNA, 17 nt, Human
ucaaagaaugcaugcag

SEQ ID NO: 1080643 - RNA, 22 nt, Human
uugauacauagcacaguuuagg

SEQ ID NO: 1080644 - RNA, 22 nt, Human
ugacauuuaaucccuaaauauu

SEQ ID NO: 1080645 - RNA, 21 nt, Human
uucaagauauuuaaaaggugg

SEQ ID NO: 1080646 - RNA, 22 nt, Human
ugauuuccuagcugacaugaaa

SEQ ID NO: 1080647 - RNA, 22 nt, Human
gaggcccuccagcugucagcug

SEQ ID NO: 1080648 - RNA, 19 nt, Human
auuccucaaggacagaaau

SEQ ID NO: 1080649 - RNA, 17 nt, Human
aggaauacagaucuuca

SEQ ID NO: 1080650 - RNA, 20 nt, Human
ggcagccaaucagcgugccg

SEQ ID NO: 1080651 - RNA, 22 nt, Human
uacauuccacuagugacuggcg

SEQ ID NO: 1080652 - RNA, 22 nt, Human
uacacuuucguuuguggauuag

SEQ ID NO: 1080653 - RNA, 22 nt, Human
uggcugucagcugccuggugcg

SEQ ID NO: 1080654 - RNA, 17 nt, Human
gcucugccccagccucu

SEQ ID NO: 1080655 - RNA, 22 nt, Human
aaauuagaucaguggauuuucu

SEQ ID NO: 1080656 - RNA, 22 nt, Human
ggcuguggucauuaggagguug

SEQ ID NO: 1080657 - RNA, 22 nt, Human
ucaguuuucucaucugugaaau

SEQ ID NO: 1080658 - RNA, 22 nt, Human
uucuugauguaccaacuuggga

SEQ ID NO: 1080659 - RNA, 22 nt, Human
ugcaagagacauggguugugug

SEQ ID NO: 1080660 - RNA, 22 nt, Human
aagggcaggugggcauuucugg

SEQ ID NO: 1080661 - RNA, 22 nt, Human
aagcagagguagggugugcagu

SEQ ID NO: 1080662 - RNA, 22 nt, Human
cuuggaggagguggugcuugau

SEQ ID NO: 1080663 - RNA, 22 nt, Human
gcuggaccaggugugcacaggc

SEQ ID NO: 1080664 - RNA, 22 nt, Human
cauuuauauaaaauguccagaa

SEQ ID NO: 1080665 - RNA, 22 nt, Human
aagggcaggaaaagauggaugu

SEQ ID NO: 1080666 - RNA, 23 nt, Human
uaaagucacauauuagagugagc

SEQ ID NO: 1080667 - RNA, 22 nt, Human
ugaacacaguucugaugagcuu

SEQ ID NO: 1080668 - RNA, 22 nt, Human
ccagcuggucugugcucauguu

SEQ ID NO: 1080669 - RNA, 22 nt, Human
cagaggcaaaagagguggaggu

SEQ ID NO: 1080670 - RNA, 22 nt, Human
cuauuuguacagcauuaguaau

SEQ ID NO: 1080671 - RNA, 22 nt, Human
ucagaggaucaugucccuacuc

SEQ ID NO: 1080672 - RNA, 21 nt, Human
ucauuucagggccuuggcuuc

SEQ ID NO: 1080673 - RNA, 22 nt, Human
gagggggagaugugcacacacu

SEQ ID NO: 1080674 - RNA, 22 nt, Human
cuauuugucaguuuggcuuuaa

SEQ ID NO: 1080675 - RNA, 22 nt, Human
ucucagggcagcaaggaagcau

SEQ ID NO: 1080676 - RNA, 22 nt, Human
gucccuggaucugggacagcug

SEQ ID NO: 1080677 - RNA, 17 nt, Human
uuuaaacuacuacaagg

SEQ ID NO: 1080678 - RNA, 22 nt, Human
caguucugguuugcagauauau

SEQ ID NO: 1080679 - RNA, 22 nt, Human
cagcaaauacuacuaguuuuua

SEQ ID NO: 1080680 - RNA, 22 nt, Human
agggcagagaaauguaguugag

SEQ ID NO: 1080681 - RNA, 22 nt, Human
ggcacagcgacuaccaucgaaa

SEQ ID NO: 1080682 - RNA, 22 nt, Human
acagucuuucaguaauaauacu

SEQ ID NO: 1080683 - RNA, 22 nt, Human
caggaaccaggagagucccuga

SEQ ID NO: 1080684 - RNA, 19 nt, Human
uccaaaggacccaccucca

SEQ ID NO: 1080685 - RNA, 22 nt, Human
cuccugggagcuguggcagagc

SEQ ID NO: 1080686 - RNA, 21 nt, Human
ugcucacagaugugcucagug

SEQ ID NO: 1080687 - RNA, 22 nt, Human
caggguugcaugcaucuguggg

SEQ ID NO: 1080688 - RNA, 22 nt, Human
uuuaugaacuacagauauaacu

SEQ ID NO: 1080689 - RNA, 23 nt, Human
agaaaaguucauaccuuuuuaac

SEQ ID NO: 1080690 - RNA, 22 nt, Human
gaggcagagguuguugcaguga

SEQ ID NO: 1080691 - RNA, 22 nt, Human
aucagagauggcuccagugcuc

SEQ ID NO: 1080692 - RNA, 22 nt, Human
ucccagaggaaauggcagcuga

SEQ ID NO: 1080693 - RNA, 22 nt, Human
cacugaagguaggaccaaggcu

SEQ ID NO: 1080694 - RNA, 22 nt, Human
acacauuuauggaucgcagaaa

SEQ ID NO: 1080695 - RNA, 22 nt, Human
cagcugaagaaagagugguuag

SEQ ID NO: 1080696 - RNA, 22 nt, Human
ucccaagagcuacucaauggaa

SEQ ID NO: 1080697 - RNA, 22 nt, Human
gcagagaacccagcagauuggc

SEQ ID NO: 1080698 - RNA, 22 nt, Human
gggcugacucugcacugagcca

SEQ ID NO: 1080699 - RNA, 22 nt, Human
uaucaaauugaggcagcugggg

SEQ ID NO: 1080700 - RNA, 23 nt, Human
gggagaauaugaggaugauggug

SEQ ID NO: 1080701 - RNA, 22 nt, Human
acagagucucagggaugaaagc

SEQ ID NO: 1080702 - RNA, 22 nt, Human
cugugucccaguaccuugggua

SEQ ID NO: 1080703 - RNA, 22 nt, Human
gguaacacauggaacauuuaca

SEQ ID NO: 1080704 - RNA, 22 nt, Human
cauugcuguuaauugucucuag

SEQ ID NO: 1080705 - RNA, 22 nt, Human
acauuugaaaugccaugugagg

SEQ ID NO: 1080706 - RNA, 21 nt, Human
uuuacugagcacuuacuaugu

SEQ ID NO: 1080707 - RNA, 22 nt, Human
ggaggaggggugacugaaugcu

SEQ ID NO: 1080708 - RNA, 22 nt, Human
uccaguucuaggucacucucug

SEQ ID NO: 1080709 - RNA, 22 nt, Human
cugaaggaagcagaagcgaggu

SEQ ID NO: 1080710 - RNA, 22 nt, Human
ucagagugaggcccagcaaucu

SEQ ID NO: 1080711 - RNA, 21 nt, Human
uaaacauaaccuuguauggcu

SEQ ID NO: 1080712 - RNA, 22 nt, Human
gagucugagaacugggcucagu

SEQ ID NO: 1080713 - RNA, 22 nt, Human
gacagaggcaagaccagaagcc

SEQ ID NO: 1080714 - RNA, 22 nt, Human
gggcugaggcuaccacuggucu

SEQ ID NO: 1080715 - RNA, 22 nt, Human
ccagaccacccuggccaugcac

SEQ ID NO: 1080716 - RNA, 22 nt, Human
gcuuuaaaccucuacucugucc

SEQ ID NO: 1080717 - RNA, 22 nt, Human
caggaccaagcaaaguuucuuu

SEQ ID NO: 1080718 - RNA, 22 nt, Human
cuuauucagcaaguuuggguac

SEQ ID NO: 1080719 - RNA, 22 nt, Human
acucacagcagacuaugaggga

SEQ ID NO: 1080720 - RNA, 22 nt, Human
uuaagucacuggacuugccuag

SEQ ID NO: 1080721 - RNA, 22 nt, Human
cugggcagugcagcuauagaac

SEQ ID NO: 1080722 - RNA, 22 nt, Human
uagcagaguuugguaccugggg

SEQ ID NO: 1080723 - RNA, 22 nt, Human
uuagcaagauaacaguaauuuu

SEQ ID NO: 1080724 - RNA, 22 nt, Human
aaagcagaacugagagagcugg

SEQ ID NO: 1080725 - RNA, 22 nt, Human
aaguaacacauguuacuucugc

SEQ ID NO: 1080726 - RNA, 22 nt, Human
gcugugcucaacgugccuuccu

SEQ ID NO: 1080727 - RNA, 22 nt, Human
uuuaaggcuucacuggaguggg

SEQ ID NO: 1080728 - RNA, 22 nt, Human
ugggccuccuuuccauucagag

SEQ ID NO: 1080729 - RNA, 22 nt, Human
guuuucuuccugcaauuggcau

SEQ ID NO: 1080730 - RNA, 22 nt, Human
auaaaguuuaaaagucaauagu

SEQ ID NO: 1080731 - RNA, 22 nt, Human
ucagaggagggacucagaccca

SEQ ID NO: 1080732 - RNA, 22 nt, Human
uuuuuagaauuggcugagaauu

SEQ ID NO: 1080733 - RNA, 21 nt, Human
ucacacacguuuccaagggca

SEQ ID NO: 1080734 - RNA, 22 nt, Human
ucaaaguaagaauuuauuacaa

SEQ ID NO: 1080735 - RNA, 22 nt, Human
cauuuauucaugaucuguagcu

SEQ ID NO: 1080736 - RNA, 22 nt, Human
aaauauacggucccuaacaguc

SEQ ID NO: 1080737 - RNA, 22 nt, Human
cggccuugacaagcuuagcagc

SEQ ID NO: 1080738 - RNA, 22 nt, Human
cuggguggcagagccugcagug

SEQ ID NO: 1080739 - RNA, 22 nt, Human
ucucagugauggcccauuugga

SEQ ID NO: 1080740 - RNA, 22 nt, Human
cuaggaggcgggggcugcagua

SEQ ID NO: 1080741 - RNA, 22 nt, Human
uuuccuaaucccaaugacauuu

SEQ ID NO: 1080742 - RNA, 22 nt, Human
cugccaaguaaugccugggcuc

SEQ ID NO: 1080743 - RNA, 22 nt, Human
uucuugauucuuccuugaagga

SEQ ID NO: 1080744 - RNA, 22 nt, Human
uuuuuucagccugucugugcca

SEQ ID NO: 1080745 - RNA, 22 nt, Human
aagggacuuugucagcuuucca

SEQ ID NO: 1080746 - RNA, 22 nt, Human
cuucugggauuaauuuuuccug

SEQ ID NO: 1080747 - RNA, 22 nt, Human
caagucaucauagaaguucccc

SEQ ID NO: 1080748 - RNA, 22 nt, Human
gggauggggucaacauguaccu

SEQ ID NO: 1080749 - RNA, 20 nt, Human
agcaggaaaagugccagucu

SEQ ID NO: 1080750 - RNA, 22 nt, Human
aguacuucagaggcugcccagg

SEQ ID NO: 1080751 - RNA, 22 nt, Human
gaaaauguuuccuguuauuugc

SEQ ID NO: 1080752 - RNA, 22 nt, Human
agccagagagccccagguucua

SEQ ID NO: 1080753 - RNA, 21 nt, Human
agcucagccgggcacaguggc

SEQ ID NO: 1080754 - RNA, 22 nt, Human
cagcagcaguguucuagaaucu

SEQ ID NO: 1080755 - RNA, 22 nt, Human
caggggcuuuuccucuauaagg

SEQ ID NO: 1080756 - RNA, 22 nt, Human
uuggugggagaagacucugguu

SEQ ID NO: 1080757 - RNA, 22 nt, Human
uguaucaaggguuuauguaagc

SEQ ID NO: 1080758 - RNA, 22 nt, Human
ugggacuuguguggcaguauuu

SEQ ID NO: 1080759 - RNA, 22 nt, Human
agaaaagguugaaaguaggauu

SEQ ID NO: 1080760 - RNA, 22 nt, Human
cuggcgagcaggaggcgacggc

SEQ ID NO: 1080761 - RNA, 22 nt, Human
agcugcuguggggcucggccug

SEQ ID NO: 1080762 - RNA, 22 nt, Human
gugggguagaucuuucucagga

SEQ ID NO: 1080763 - RNA, 22 nt, Human
gucuccagaauucuugggaggg

SEQ ID NO: 1080764 - RNA, 22 nt, Human
uagcacauacauaauagauaga

SEQ ID NO: 1080765 - RNA, 21 nt, Human
uaucuacuggugucuuucaga

SEQ ID NO: 1080766 - RNA, 22 nt, Human
guccugaaugccuucauagucc

SEQ ID NO: 1080767 - RNA, 20 nt, Human
caaauucuguugaauacacc

SEQ ID NO: 1080768 - RNA, 18 nt, Human
gggcauggaugcagcauc

SEQ ID NO: 1080769 - RNA, 22 nt, Human
gugagcagaacagguggcuucu

SEQ ID NO: 1080770 - RNA, 22 nt, Human
cccucugccugcgcccuggugu

SEQ ID NO: 1080771 - RNA, 22 nt, Human
cuaaaucaggccuuacagcuuc

SEQ ID NO: 1080772 - RNA, 22 nt, Human
uaagacaugguugaucuagugu

SEQ ID NO: 1080773 - RNA, 22 nt, Human
ggucucugacuuagagauggau

SEQ ID NO: 1080774 - RNA, 22 nt, Human
gaaaggccagcucacagaugag

SEQ ID NO: 1080775 - RNA, 22 nt, Human
ccagcugcccaagaggcauccu

SEQ ID NO: 1080776 - RNA, 22 nt, Human
uacagaggguaauugaucaagg

SEQ ID NO: 1080777 - RNA, 22 nt, Human
uuacagaguagugcagaacuca

SEQ ID NO: 1080778 - RNA, 22 nt, Human
ugagaauuuuuugucaugcauu

SEQ ID NO: 1080779 - RNA, 22 nt, Human
ggcagcaacucggagagaagag

SEQ ID NO: 1080780 - RNA, 22 nt, Human
ucccagcccagauuugugugac

SEQ ID NO: 1080781 - RNA, 22 nt, Human
ggcuggcuugccaagcucaggg

SEQ ID NO: 1080782 - RNA, 22 nt, Human
aaaccauggcucauuggagaug

SEQ ID NO: 1080783 - RNA, 18 nt, Human
ucuggaacaacuucaugu

SEQ ID NO: 1080784 - RNA, 19 nt, Human
gagcugccuuuugaagacc

SEQ ID NO: 1080785 - RNA, 22 nt, Human
cagcccaaagccccaggcuaga

SEQ ID NO: 1080786 - RNA, 22 nt, Human
ugcagaagugagucaugaggaa

SEQ ID NO: 1080787 - RNA, 22 nt, Human
agugucugccagcugccaggug

SEQ ID NO: 1080788 - RNA, 22 nt, Human
cugagccccucugaccucagag

SEQ ID NO: 1080789 - RNA, 22 nt, Human
caggaaaggugugucaugaugg

SEQ ID NO: 1080790 - RNA, 18 nt, Human
auuuugaacugggaauau

SEQ ID NO: 1080791 - RNA, 22 nt, Human
uggugcagucauuggcccaggg

SEQ ID NO: 1080792 - RNA, 22 nt, Human
ucucagaguuugaaucuggagu

SEQ ID NO: 1080793 - RNA, 22 nt, Human
uccuuggagaaucuuguuuuac

SEQ ID NO: 1080794 - RNA, 22 nt, Human
cucuggagaacuccuugugucu

SEQ ID NO: 1080795 - RNA, 22 nt, Human
uggagacucugcaucugugaca

SEQ ID NO: 1080796 - RNA, 22 nt, Human
gaauucuuuaggugaauuucua

SEQ ID NO: 1080797 - RNA, 22 nt, Human
cuuauuagugucugucugaguu

SEQ ID NO: 1080798 - RNA, 20 nt, Human
aaagucuguuuaucucugga

SEQ ID NO: 1080799 - RNA, 22 nt, Human
aauagaauuuguacuguguuuu

SEQ ID NO: 1080800 - RNA, 22 nt, Human
ggaggcagaacuucccgucagu

SEQ ID NO: 1080801 - RNA, 22 nt, Human
ccucugaguagacuggacauga

SEQ ID NO: 1080802 - RNA, 22 nt, Human
cuuucccuuagccccauucuau

SEQ ID NO: 1080803 - RNA, 22 nt, Human
aauucauccaugaacaauucca

SEQ ID NO: 1080804 - RNA, 22 nt, Human
uguggcagcuggagguggagaa

SEQ ID NO: 1080805 - RNA, 22 nt, Human
gaggagaaauuauccuuggugu

SEQ ID NO: 1080806 - RNA, 22 nt, Human
auuugcuuuaagguauaaaagg

SEQ ID NO: 1080807 - RNA, 22 nt, Human
ccuggcagcagcacaugccuuc

SEQ ID NO: 1080808 - RNA, 22 nt, Human
uagaagagacauagccuguggu

SEQ ID NO: 1080809 - RNA, 22 nt, Human
cugugaaucuugauguuauuuc

SEQ ID NO: 1080810 - RNA, 22 nt, Human
ucugcucuaguugcuuccugcc

SEQ ID NO: 1080811 - RNA, 22 nt, Human
aauauguugagucuaucuuuau

SEQ ID NO: 1080812 - RNA, 19 nt, Human
agacuuuuguaaguugaga

SEQ ID NO: 1080813 - RNA, 22 nt, Human
cccaggagauggagguugcagu

SEQ ID NO: 1080814 - RNA, 22 nt, Human
cccuggguucuggcugggcugc

SEQ ID NO: 1080815 - RNA, 22 nt, Human
acagaauuuacacaucucuaaa

SEQ ID NO: 1080816 - RNA, 22 nt, Human
cagugaaguucuacugaauggu

SEQ ID NO: 1080817 - RNA, 18 nt, Human
gcuccuggaccaggucac

SEQ ID NO: 1080818 - RNA, 22 nt, Human
agugggaggcggcugacgggcg

SEQ ID NO: 1080819 - RNA, 22 nt, Human
cagagacccuucucaguggcca

SEQ ID NO: 1080820 - RNA, 22 nt, Human
cagagcugcaaaugccccuccg

SEQ ID NO: 1080821 - RNA, 22 nt, Human
acagacauuuaauaaaugcuga

SEQ ID NO: 1080822 - RNA, 22 nt, Human
ggaaaagaaagggacugauugg

SEQ ID NO: 1080823 - RNA, 22 nt, Human
ugucugugcccaaggcucccgg

SEQ ID NO: 1080824 - RNA, 22 nt, Human
acuccuggggcugccaucacag

SEQ ID NO: 1080825 - RNA, 22 nt, Human
uuguuuuggaagaacuuacucu

SEQ ID NO: 1080826 - RNA, 22 nt, Human
ugugaaauguguguauaauuaa

SEQ ID NO: 1080827 - RNA, 19 nt, Human
gcucagagggcccugugcu

SEQ ID NO: 1080828 - RNA, 22 nt, Human
ucucagagugacaaugagaauu

SEQ ID NO: 1080829 - RNA, 22 nt, Human
uaugagaaaauaaauaucuguu

SEQ ID NO: 1080830 - RNA, 22 nt, Human
gcaggcugagaguccaagaagg

SEQ ID NO: 1080831 - RNA, 22 nt, Human
gccugcugagggaaguugggca

SEQ ID NO: 1080832 - RNA, 22 nt, Human
uagaugaagcaacauguguaau

SEQ ID NO: 1080833 - RNA, 22 nt, Human
guccuggcccacuggcaggcug

SEQ ID NO: 1080834 - RNA, 22 nt, Human
gguguccaucaggcugugcuuc

SEQ ID NO: 1080835 - RNA, 22 nt, Human
gcuggggacuccccaccauagc

SEQ ID NO: 1080836 - RNA, 22 nt, Human
aggagcucauugaaguggauga

SEQ ID NO: 1080837 - RNA, 17 nt, Human
ggcaccagacggagagu

SEQ ID NO: 1080838 - RNA, 22 nt, Human
ucaaauaccagcaauuucaugu

SEQ ID NO: 1080839 - RNA, 22 nt, Human
cagaguccuggacacagagaca

SEQ ID NO: 1080840 - RNA, 22 nt, Human
cagcaucuaaucuucaugccgg

SEQ ID NO: 1080841 - RNA, 22 nt, Human
gacacuauaugacacuucaguu

SEQ ID NO: 1080842 - RNA, 22 nt, Human
uagggcagccuuauagcuccca

SEQ ID NO: 1080843 - RNA, 22 nt, Human
acaguaaaacauuuuuauuagg

SEQ ID NO: 1080844 - RNA, 18 nt, Human
cugccccuucucugagau

SEQ ID NO: 1080845 - RNA, 22 nt, Human
aacagcugcuucuaucuuuuca

SEQ ID NO: 1080846 - RNA, 22 nt, Human
caggaagaaggguggugagucc

SEQ ID NO: 1080847 - RNA, 22 nt, Human
caggaugagguagaggcagaua

SEQ ID NO: 1080848 - RNA, 22 nt, Human
aggaauauggauuugcucagcu

SEQ ID NO: 1080849 - RNA, 22 nt, Human
ucacaucauuaagacuucuccu

SEQ ID NO: 1080850 - RNA, 19 nt, Human
cagaguccuugaccagucc

SEQ ID NO: 1080851 - RNA, 22 nt, Human
auugaaagaguuuucugcugca

SEQ ID NO: 1080852 - RNA, 22 nt, Human
acagcagcaauagcagugacau

SEQ ID NO: 1080853 - RNA, 22 nt, Human
acuuugugcccaacagaaagaa

SEQ ID NO: 1080854 - RNA, 23 nt, Human
caggcaggaugaggacuacacuc

SEQ ID NO: 1080855 - RNA, 22 nt, Human
cauuuacacuucuaaccacaag

SEQ ID NO: 1080856 - RNA, 22 nt, Human
aggcucagugcaaaucauucug

SEQ ID NO: 1080857 - RNA, 22 nt, Human
aagcauuucuguuuaucuaucg

SEQ ID NO: 1080858 - RNA, 22 nt, Human
acucacagacugcagguuuauu

SEQ ID NO: 1080859 - RNA, 22 nt, Human
cacagaacaccaaagaaccuuc

SEQ ID NO: 1080860 - RNA, 22 nt, Human
aaaugcagguucuugagccaag

SEQ ID NO: 1080861 - RNA, 22 nt, Human
aaucauaauuguauacauucau

SEQ ID NO: 1080862 - RNA, 20 nt, Human
gaaggaagggggcaagguga

SEQ ID NO: 1080863 - RNA, 22 nt, Human
guuucuaaauguucugaguuuu

SEQ ID NO: 1080864 - RNA, 22 nt, Human
aggcuauuuccacucuucucau

SEQ ID NO: 1080865 - RNA, 22 nt, Human
cugggcagcuaccaccacugcu

SEQ ID NO: 1080866 - RNA, 22 nt, Human
acccucaagauggaagcaguuu

SEQ ID NO: 1080867 - RNA, 22 nt, Human
agccagggagguggagguugca

SEQ ID NO: 1080868 - RNA, 20 nt, Human
accuccuggaagcaggugcc

SEQ ID NO: 1080869 - RNA, 22 nt, Human
uaagauaaguggguugagaugg

SEQ ID NO: 1080870 - RNA, 22 nt, Human
uuuuguuuguguccacugcagu

SEQ ID NO: 1080871 - RNA, 22 nt, Human
ucaaaggcgguccaggaauaaa

SEQ ID NO: 1080872 - RNA, 22 nt, Human
aagcaucucuauguggagagug

SEQ ID NO: 1080873 - RNA, 22 nt, Human
uuuauucacuggggucugcccg

SEQ ID NO: 1080874 - RNA, 22 nt, Human
aguccugaugcucuggcaggag

SEQ ID NO: 1080875 - RNA, 22 nt, Human
gugccugcugcagcugagcagu

SEQ ID NO: 1080876 - RNA, 23 nt, Human
aggaggccugaaacugaggcuga

SEQ ID NO: 1080877 - RNA, 22 nt, Human
acuuuguuuuauagcacauaag

SEQ ID NO: 1080878 - RNA, 22 nt, Human
uacagaaugauguguuuaaaua

SEQ ID NO: 1080879 - RNA, 22 nt, Human
gcaaagcacacuggagaugucg

SEQ ID NO: 1080880 - RNA, 22 nt, Human
aguugaagguuggcugauccau

SEQ ID NO: 1080881 - RNA, 22 nt, Human
uucccaugccuggccccuaucc

SEQ ID NO: 1080882 - RNA, 22 nt, Human
uuagugguaaggaugaaauuuc

SEQ ID NO: 1080883 - RNA, 22 nt, Human
cacagcauuaacugggacagcu

SEQ ID NO: 1080884 - RNA, 23 nt, Human
uucuucucaauuaguugauucag

SEQ ID NO: 1080885 - RNA, 22 nt, Human
agggugcagguguggagucuag

SEQ ID NO: 1080886 - RNA, 20 nt, Human
ucacagaaugccugaagaag

SEQ ID NO: 1080887 - RNA, 22 nt, Human
aggcaacaugggccaggcagaa

SEQ ID NO: 1080888 - RNA, 22 nt, Human
acagaaugggauuugaauauuu

SEQ ID NO: 1080889 - RNA, 22 nt, Human
uuuuaaacuccccuaguuggug

SEQ ID NO: 1080890 - RNA, 22 nt, Human
gcugggaaugauuuuggagagg

SEQ ID NO: 1080891 - RNA, 22 nt, Human
uguggaaaagaauaagggagau

SEQ ID NO: 1080892 - RNA, 22 nt, Human
augauggugggagaugacccag

SEQ ID NO: 1080893 - RNA, 22 nt, Human
uuggaaggugagucccuggguu

SEQ ID NO: 1080894 - RNA, 22 nt, Human
uagcagagauaugggcauagau

SEQ ID NO: 1080895 - RNA, 22 nt, Human
gaguuaauacugaguuuauuaa

SEQ ID NO: 1080896 - RNA, 22 nt, Human
ccaggugucuguggccagcccu

SEQ ID NO: 1080897 - RNA, 22 nt, Human
auagaaauggcagcuggugcua

SEQ ID NO: 1080898 - RNA, 22 nt, Human
cagcuggguggcucuucugcuc

SEQ ID NO: 1080899 - RNA, 22 nt, Human
ucacuuagauggggaucaucac

SEQ ID NO: 1080900 - RNA, 22 nt, Human
aaacauugcuaaauaaugcugc

SEQ ID NO: 1080901 - RNA, 22 nt, Human
gguggccucgguggugcacagg

SEQ ID NO: 1080902 - RNA, 23 nt, Human
agcagcaggagguauugauaagg

SEQ ID NO: 1080903 - RNA, 22 nt, Human
gcaggggaguggcaggcccgga

SEQ ID NO: 1080904 - RNA, 22 nt, Human
cagagcaggcccacugcccucc

SEQ ID NO: 1080905 - RNA, 22 nt, Human
ccagaaaaggagcugcaggaug

SEQ ID NO: 1080906 - RNA, 22 nt, Human
gcugugugcucuggucuuucuu

SEQ ID NO: 1080907 - RNA, 22 nt, Human
uuucucauggacccuucaugau

SEQ ID NO: 1080908 - RNA, 22 nt, Human
aggacacacagaauacaaaucc

SEQ ID NO: 1080909 - RNA, 22 nt, Human
aagccacugagauuucacugca

SEQ ID NO: 1080910 - RNA, 22 nt, Human
uuauaaagauuguuauguaucu

SEQ ID NO: 1080911 - RNA, 22 nt, Human
aguggcagagaccccagccagc

SEQ ID NO: 1080912 - RNA, 22 nt, Human
caggauggugugagugugagga

SEQ ID NO: 1080913 - RNA, 22 nt, Human
aaauccaguguucaaaguuuga

SEQ ID NO: 1080914 - RNA, 22 nt, Human
uauacagaacauuaagaacugu

SEQ ID NO: 1080915 - RNA, 22 nt, Human
uugguucaaagggauucaauuu

SEQ ID NO: 1080916 - RNA, 22 nt, Human
uacauuuauaaggcuucucugu

SEQ ID NO: 1080917 - RNA, 22 nt, Human
gccuggcaggccugggccagca

SEQ ID NO: 1080918 - RNA, 22 nt, Human
uaggaguaggaguggccauccc

SEQ ID NO: 1080919 - RNA, 22 nt, Human
guccucugggcuuugagcaguc

SEQ ID NO: 1080920 - RNA, 22 nt, Human
ggccagaggugguacauagcuu

SEQ ID NO: 1080921 - RNA, 22 nt, Human
aucaguuucacuugcuugcaaa

SEQ ID NO: 1080922 - RNA, 22 nt, Human
ggggcugguggugguuucucca

SEQ ID NO: 1080923 - RNA, 22 nt, Human
ucccuggcugggggcugccuug

SEQ ID NO: 1080924 - RNA, 22 nt, Human
aauguguauacuggcaauuaag

SEQ ID NO: 1080925 - RNA, 22 nt, Human
agcaucuggugagggccuaguu

SEQ ID NO: 1080926 - RNA, 22 nt, Human
uguuugaauuuugcuaacgugu

SEQ ID NO: 1080927 - RNA, 22 nt, Human
cucucugcuguauccuuaggcu

SEQ ID NO: 1080928 - RNA, 22 nt, Human
cucagggacguuagaggacagg

SEQ ID NO: 1080929 - RNA, 22 nt, Human
ccaggaaaaagagaaacauggu

SEQ ID NO: 1080930 - RNA, 22 nt, Human
auaaggcagaaaugauucuagu

SEQ ID NO: 1080931 - RNA, 16 nt, Human
cuuccucuucacuggc

SEQ ID NO: 1080932 - RNA, 22 nt, Human
ggcugaaggaugaaagcugcag

SEQ ID NO: 1080933 - RNA, 22 nt, Human
cagcacagugaccagacccacu

SEQ ID NO: 1080934 - RNA, 22 nt, Human
aucaaaguaggcauauguuuuu

SEQ ID NO: 1080935 - RNA, 22 nt, Human
caagccugucucaccagugcua

SEQ ID NO: 1080936 - RNA, 22 nt, Human
aggcagcauuucugcuuaucca

SEQ ID NO: 1080937 - RNA, 22 nt, Human
gugaaguucaagcuugccaucu

SEQ ID NO: 1080938 - RNA, 22 nt, Human
gcaaggagacuguagggccaag

SEQ ID NO: 1080939 - RNA, 22 nt, Human
ggggaaggauugaguugaccca

SEQ ID NO: 1080940 - RNA, 22 nt, Human
uuagaaaggggugaaucaaugg

SEQ ID NO: 1080941 - RNA, 22 nt, Human
aaaagucagucucuccuagcuc

SEQ ID NO: 1080942 - RNA, 22 nt, Human
acuggaaaacacuacuacaugc

SEQ ID NO: 1080943 - RNA, 22 nt, Human
gagaaagaugaagaguggcguu

SEQ ID NO: 1080944 - RNA, 22 nt, Human
auuugucucugcacuuuacuca

SEQ ID NO: 1080945 - RNA, 22 nt, Human
ucuuuaaaguuggagcuugcaa

SEQ ID NO: 1080946 - RNA, 22 nt, Human
ucagaggacaagcucccuggug

SEQ ID NO: 1080947 - RNA, 22 nt, Human
ucucagggcgcagugaggcagu

SEQ ID NO: 1080948 - RNA, 22 nt, Human
gagaaggcugauccuuggaguu

SEQ ID NO: 1080949 - RNA, 22 nt, Human
agccuggcuguaaccucauggu

SEQ ID NO: 1080950 - RNA, 22 nt, Human
gcagggccagugcagagaggaa

SEQ ID NO: 1080951 - RNA, 22 nt, Human
ggucuggaccauggacgccggg

SEQ ID NO: 1080952 - RNA, 22 nt, Human
caugcucuccauuggacacaga

SEQ ID NO: 1080953 - RNA, 22 nt, Human
aauucaacagucaguuaucuca

SEQ ID NO: 1080954 - RNA, 22 nt, Human
acaggaagaaagugcaguagau

SEQ ID NO: 1080955 - RNA, 22 nt, Human
cugggccagcaacugcaaugga

SEQ ID NO: 1080956 - RNA, 22 nt, Human
ccaggcagccaagugugugugu

SEQ ID NO: 1080957 - RNA, 23 nt, Human
ccucagcauggcaggagcccagc

SEQ ID NO: 1080958 - RNA, 22 nt, Human
auugauuugaacaaagauauua

SEQ ID NO: 1080959 - RNA, 22 nt, Human
acugucuuguguuaaagaacca

SEQ ID NO: 1080960 - RNA, 22 nt, Human
ggaacacugccuuuuauuuucc

SEQ ID NO: 1080961 - RNA, 22 nt, Human
acuuucaauucacugagauaua

SEQ ID NO: 1080962 - RNA, 22 nt, Human
gcugccugugcacuuucucgua

SEQ ID NO: 1080963 - RNA, 22 nt, Human
acaaaauuuuuagacaaggcuu

SEQ ID NO: 1080964 - RNA, 22 nt, Human
cuggacagaaagggcugcugug

SEQ ID NO: 1080965 - RNA, 22 nt, Human
cuggaagguuccucccagcucc

SEQ ID NO: 1080966 - RNA, 22 nt, Human
aaauuuaaaaagcagcauugca

SEQ ID NO: 1080967 - RNA, 22 nt, Human
ggagcuggcuacagagaacucc

SEQ ID NO: 1080968 - RNA, 23 nt, Human
ugguugcagugccaaguaucacg

SEQ ID NO: 1080969 - RNA, 22 nt, Human
augccugagacuguuaauuggc

SEQ ID NO: 1080970 - RNA, 22 nt, Human
guggccuggaguuugauguagg

SEQ ID NO: 1080971 - RNA, 22 nt, Human
ucuucacaccgggcagcaggaa

SEQ ID NO: 1080972 - RNA, 22 nt, Human
agaaucugcauuucuaauaagc

SEQ ID NO: 1080973 - RNA, 21 nt, Human
agaagagaagcaggacccucu

SEQ ID NO: 1080974 - RNA, 22 nt, Human
ugcccugggaggcuuuccuguu

SEQ ID NO: 1080975 - RNA, 21 nt, Human
gcuccuggugcugcguggcgc

SEQ ID NO: 1080976 - RNA, 22 nt, Human
uuggccuucugguguucauuuu

SEQ ID NO: 1080977 - RNA, 23 nt, Human
gggaagugaggagccccucugcc

SEQ ID NO: 1080978 - RNA, 22 nt, Human
acuggagcugagagcaugggua

SEQ ID NO: 1080979 - RNA, 22 nt, Human
agccuggccugggcaggcacau

SEQ ID NO: 1080980 - RNA, 16 nt, Human
gcaggaguaccacuug

SEQ ID NO: 1080981 - RNA, 22 nt, Human
aguuacauucugagcugaguag

SEQ ID NO: 1080982 - RNA, 22 nt, Human
ugccucugguuaucugguaccu

SEQ ID NO: 1080983 - RNA, 22 nt, Human
ucaggauccauagacucccaaa

SEQ ID NO: 1080984 - RNA, 22 nt, Human
ggcugcaggcagaggcugucug

SEQ ID NO: 1080985 - RNA, 22 nt, Human
cacagaggaaaggcaguuggua

SEQ ID NO: 1080986 - RNA, 22 nt, Human
ccaggcucacugacuaccacau

SEQ ID NO: 1080987 - RNA, 22 nt, Human
agauuugucagcucagucuuua

SEQ ID NO: 1080988 - RNA, 22 nt, Human
aaaggccacacagagcagggag

SEQ ID NO: 1080989 - RNA, 22 nt, Human
augaauauguacacaucuguca

SEQ ID NO: 1080990 - RNA, 22 nt, Human
auucaguuaaaaacuguacuuc

SEQ ID NO: 1080991 - RNA, 20 nt, Human
gauuucaaagcagaguggcc

SEQ ID NO: 1080992 - RNA, 22 nt, Human
ucuucuuccucauuuauacaua

SEQ ID NO: 1080993 - RNA, 22 nt, Human
cuuggccagacagggagcucca

SEQ ID NO: 1080994 - RNA, 22 nt, Human
ugagaauucuacaauagaucaa

SEQ ID NO: 1080995 - RNA, 22 nt, Human
aaagacauugaagaaggacuua

SEQ ID NO: 1080996 - RNA, 18 nt, Human
guucaagccaacaucaag

SEQ ID NO: 1080997 - RNA, 22 nt, Human
ugaaaaaacaaguuggcccauu

SEQ ID NO: 1080998 - RNA, 22 nt, Human
ugggcuccguugccuggggcag

SEQ ID NO: 1080999 - RNA, 22 nt, Human
uccuggguccauggcagccgaa

SEQ ID NO: 1081000 - RNA, 22 nt, Human
uuugcuaaauaagugauuaagu

SEQ ID NO: 1081001 - RNA, 22 nt, Human
uugcauuuuuagaugcuucugu

SEQ ID NO: 1081002 - RNA, 20 nt, Human
uccucccccaccuuugcagc

SEQ ID NO: 1081003 - RNA, 22 nt, Human
gagcagggccacuucuguaccu

SEQ ID NO: 1081004 - RNA, 22 nt, Human
cagaacuguuauaacagcuguu

SEQ ID NO: 1081005 - RNA, 22 nt, Human
uaaacagagagugcaguuauag

SEQ ID NO: 1081006 - RNA, 20 nt, Human
ggcaccaggcuaggauugga

SEQ ID NO: 1081007 - RNA, 22 nt, Human
cuguccuggagggcauaggacg

SEQ ID NO: 1081008 - RNA, 22 nt, Human
gacagggcgagacucagucuca

SEQ ID NO: 1081009 - RNA, 22 nt, Human
ccucccaccauuuagagagagc

SEQ ID NO: 1081010 - RNA, 22 nt, Human
ugagccugggcuuucucuggag

SEQ ID NO: 1081011 - RNA, 22 nt, Human
agcagcuguggaaaaguaacua

SEQ ID NO: 1081012 - RNA, 22 nt, Human
aaguguguugacugaauugggg

SEQ ID NO: 1081013 - RNA, 22 nt, Human
agggacuuguguccuauguaug

SEQ ID NO: 1081014 - RNA, 22 nt, Human
aagggcuggcccugggaagagu

SEQ ID NO: 1081015 - RNA, 22 nt, Human
uccagccuccuauuuacccuaa

SEQ ID NO: 1081016 - RNA, 22 nt, Human
aaaacugaaccuugagaucuuu

SEQ ID NO: 1081017 - RNA, 22 nt, Human
aagcagcugauuucacagcuca

SEQ ID NO: 1081018 - RNA, 22 nt, Human
acaguggaggccauaugguccu

SEQ ID NO: 1081019 - RNA, 22 nt, Human
aagauggcugcagcaauuccaa

SEQ ID NO: 1081020 - RNA, 22 nt, Human
agcagguggacagaggaagaaa

SEQ ID NO: 1081021 - RNA, 22 nt, Human
gaagcagcuaggaucuucauuu

SEQ ID NO: 1081022 - RNA, 22 nt, Human
auugcaaaggucccauucaaga

SEQ ID NO: 1081023 - RNA, 22 nt, Human
ugcccugguagacacagacugu

SEQ ID NO: 1081024 - RNA, 22 nt, Human
ugggcuggcugaacuucaaccu

SEQ ID NO: 1081025 - RNA, 22 nt, Human
gagagaagaaagccaugguccu

SEQ ID NO: 1081026 - RNA, 22 nt, Human
gaggagaaugcgcaccacauau

SEQ ID NO: 1081027 - RNA, 22 nt, Human
gucucuaucauagcugaacccu

SEQ ID NO: 1081028 - RNA, 22 nt, Human
gacaaaacugagaucacacugu

SEQ ID NO: 1081029 - RNA, 23 nt, Human
ugugggaauguuggagaggaaac

SEQ ID NO: 1081030 - RNA, 22 nt, Human
gagagggcugccuggugugagg

SEQ ID NO: 1081031 - RNA, 22 nt, Human
cugcccugucuuuuucugauga

SEQ ID NO: 1081032 - RNA, 22 nt, Human
caauguuucuuguaaccaguga

SEQ ID NO: 1081033 - RNA, 22 nt, Human
augagcaguagguucauggcug

SEQ ID NO: 1081034 - RNA, 22 nt, Human
ucacagaaaucuguuuuuucua

SEQ ID NO: 1081035 - RNA, 22 nt, Human
aaaaaccuuucauugcaaaugu

SEQ ID NO: 1081036 - RNA, 22 nt, Human
uccaaucuaguaugauaaauga

SEQ ID NO: 1081037 - RNA, 22 nt, Human
acuuccaggguagaggggaaga

SEQ ID NO: 1081038 - RNA, 22 nt, Human
aagguuucuccgaggcuauuuu

SEQ ID NO: 1081039 - RNA, 22 nt, Human
ggccugcacagagguggcucua

SEQ ID NO: 1081040 - RNA, 22 nt, Human
aaucccuuuuucauuuaauaga

SEQ ID NO: 1081041 - RNA, 22 nt, Human
ggcagugaaaaaguauguuucc

SEQ ID NO: 1081042 - RNA, 22 nt, Human
acacacaaaucuauuagugaau

SEQ ID NO: 1081043 - RNA, 22 nt, Human
uauguagaaaacaaaaguugaa

SEQ ID NO: 1081044 - RNA, 22 nt, Human
ugugccaagacuauauugugcu

SEQ ID NO: 1081045 - RNA, 22 nt, Human
gguggccuuucaguggaucagg

SEQ ID NO: 1081046 - RNA, 22 nt, Human
cuuggauuccgugaacuuaacc

SEQ ID NO: 1081047 - RNA, 23 nt, Human
uggacgccgacuuuggaggcgcu

SEQ ID NO: 1081048 - RNA, 21 nt, Human
uucucagagucuauuacaguu

SEQ ID NO: 1081049 - RNA, 17 nt, Human
gcugagaggcagcacag

SEQ ID NO: 1081050 - RNA, 22 nt, Human
gcuucuccucccgcucccaggc

SEQ ID NO: 1081051 - RNA, 22 nt, Human
gggcugggauggcuugaagauu

SEQ ID NO: 1081052 - RNA, 22 nt, Human
ugauacagucagcucacaauug

SEQ ID NO: 1081053 - RNA, 19 nt, Human
gccugagccagccaugcaa

SEQ ID NO: 1081054 - RNA, 22 nt, Human
gacauuuauuagaaaacuauca

SEQ ID NO: 1081055 - RNA, 22 nt, Human
aggcucaguucuguggugagcc

SEQ ID NO: 1081056 - RNA, 22 nt, Human
gcugcugguccucagagcucau

SEQ ID NO: 1081057 - RNA, 22 nt, Human
gucaggauuuuaaaaucccagu

SEQ ID NO: 1081058 - RNA, 22 nt, Human
uacuuugucauucuaaccuucc

SEQ ID NO: 1081059 - RNA, 19 nt, Human
ggcugagcgccuuggcugc

SEQ ID NO: 1081060 - RNA, 22 nt, Human
uuuggaauuggcauucuauucu

SEQ ID NO: 1081061 - RNA, 22 nt, Human
aucuuacaauuacaagacacuc

SEQ ID NO: 1081062 - RNA, 22 nt, Human
ucagcagggccuccuugugcag

SEQ ID NO: 1081063 - RNA, 22 nt, Human
uccuggccgccgcguggggccg

SEQ ID NO: 1081064 - RNA, 22 nt, Human
gaugcugggaccacagaguguu

SEQ ID NO: 1081065 - RNA, 22 nt, Human
auucacaguucauuagcuguaa

SEQ ID NO: 1081066 - RNA, 22 nt, Human
uguucccaagauaagauuauga

SEQ ID NO: 1081067 - RNA, 22 nt, Human
ucaagcaucuuggucuacgauc

SEQ ID NO: 1081068 - RNA, 22 nt, Human
cccugaggggaguggugaggug

SEQ ID NO: 1081069 - RNA, 22 nt, Human
ccagcgcuucccaucagggagg

SEQ ID NO: 1081070 - RNA, 22 nt, Human
gcacauacugcaaagauuacua

SEQ ID NO: 1081071 - RNA, 19 nt, Human
aggaaggaaccugagucug

SEQ ID NO: 1081072 - RNA, 22 nt, Human
cggggccucaguuuccccaccu

SEQ ID NO: 1081073 - RNA, 22 nt, Human
uaccugagcccagugcagcaua

SEQ ID NO: 1081074 - RNA, 22 nt, Human
gagauggccagugccaggacaa

SEQ ID NO: 1081075 - RNA, 22 nt, Human
guggggaaaggaguggggcuca

SEQ ID NO: 1081076 - RNA, 22 nt, Human
uccagucaggcugaauucaagg

SEQ ID NO: 1081077 - RNA, 17 nt, Human
uggagcugcguguguuc

SEQ ID NO: 1081078 - RNA, 23 nt, Human
cuggcucauccugguugcagugg

SEQ ID NO: 1081079 - RNA, 22 nt, Human
aagucacacuagacaacugagg

SEQ ID NO: 1081080 - RNA, 22 nt, Human
caggcccugccuugagggaccu

SEQ ID NO: 1081081 - RNA, 22 nt, Human
acccaggaggcagagguugcag

SEQ ID NO: 1081082 - RNA, 22 nt, Human
acagugaugccgggcgagaaug

SEQ ID NO: 1081083 - RNA, 22 nt, Human
auccuuaauuuacuugcaucuu

SEQ ID NO: 1081084 - RNA, 22 nt, Human
ucuuuucuccagaccugggauc

SEQ ID NO: 1081085 - RNA, 22 nt, Human
guagaaauagugguugacagga

SEQ ID NO: 1081086 - RNA, 22 nt, Human
ucacauuuggagaaagccugcc

SEQ ID NO: 1081087 - RNA, 22 nt, Human
agcaaagaagacacaggcuuca

SEQ ID NO: 1081088 - RNA, 22 nt, Human
cucagacuggggcucccugagu

SEQ ID NO: 1081089 - RNA, 22 nt, Human
ugcagggccagacuggguugga

SEQ ID NO: 1081090 - RNA, 22 nt, Human
cccucaugucagucccugccca

SEQ ID NO: 1081091 - RNA, 22 nt, Human
agggccugggauguccuccuag

SEQ ID NO: 1081092 - RNA, 22 nt, Human
uaagagaaggaucuguuccagg

SEQ ID NO: 1081093 - RNA, 22 nt, Human
guuugcauaucugugaaaugga

SEQ ID NO: 1081094 - RNA, 20 nt, Human
augaaauuccuguuuucuga

SEQ ID NO: 1081095 - RNA, 22 nt, Human
auguuuccagguucuuccuaug

SEQ ID NO: 1081096 - RNA, 22 nt, Human
auuccaaaaggauguuagaaug

SEQ ID NO: 1081097 - RNA, 22 nt, Human
gccagagagauggaaaagcuua

SEQ ID NO: 1081098 - RNA, 22 nt, Human
cagcuccagcccaggcagcucc

SEQ ID NO: 1081099 - RNA, 22 nt, Human
gcugguggcagagacaucaggu

SEQ ID NO: 1081100 - RNA, 22 nt, Human
ccggggacuuaaagugaaggaa

SEQ ID NO: 1081101 - RNA, 22 nt, Human
ccugggcugaagucaagugugg

SEQ ID NO: 1081102 - RNA, 22 nt, Human
cugagguggaacagaggugaag

SEQ ID NO: 1081103 - RNA, 22 nt, Human
aggccuggccugggcggcauug

SEQ ID NO: 1081104 - RNA, 22 nt, Human
auacauguaacugcauuguaau

SEQ ID NO: 1081105 - RNA, 22 nt, Human
uucaacaaacuguucacgaaug

SEQ ID NO: 1081106 - RNA, 22 nt, Human
ugagaagagcaaggaacugguu

SEQ ID NO: 1081107 - RNA, 22 nt, Human
gcugagaggcacuaucuccgga

SEQ ID NO: 1081108 - RNA, 22 nt, Human
aggcuccaugcaaaggcuguuu

SEQ ID NO: 1081109 - RNA, 22 nt, Human
cuuccucccccacacacucacu

SEQ ID NO: 1081110 - RNA, 22 nt, Human
acaaagucugaaaccugaggca

SEQ ID NO: 1081111 - RNA, 22 nt, Human
ugccugugcccuuugcugggag

SEQ ID NO: 1081112 - RNA, 22 nt, Human
aauauaugagggagcuauuuga

SEQ ID NO: 1081113 - RNA, 23 nt, Human
ugagaagccaggggagcgugagg

SEQ ID NO: 1081114 - RNA, 22 nt, Human
aaagucaucagaaccuuccaga

SEQ ID NO: 1081115 - RNA, 22 nt, Human
gagcagagcuucucaaaguaaa

SEQ ID NO: 1081116 - RNA, 22 nt, Human
uccuuugguucucuaagaugcu

SEQ ID NO: 1081117 - RNA, 22 nt, Human
uugacaagaaucguugccuugg

SEQ ID NO: 1081118 - RNA, 22 nt, Human
aauuauacauugaacaaucuag

SEQ ID NO: 1081119 - RNA, 22 nt, Human
ugucagcucauugaaggcacaa

SEQ ID NO: 1081120 - RNA, 22 nt, Human
ucuuuacaucacaauuguaugg

SEQ ID NO: 1081121 - RNA, 22 nt, Human
gugcccugcaugccccggguau

SEQ ID NO: 1081122 - RNA, 22 nt, Human
gaauuaaaauaguuuuggucga

SEQ ID NO: 1081123 - RNA, 22 nt, Human
acugggaagauggaggcaagca

SEQ ID NO: 1081124 - RNA, 22 nt, Human
ccccagccagcaggaccucuga

SEQ ID NO: 1081125 - RNA, 20 nt, Human
aggaaaaggguggugguaga

SEQ ID NO: 1081126 - RNA, 22 nt, Human
ggaaagggcagaggccuuggag

SEQ ID NO: 1081127 - RNA, 22 nt, Human
uuucuccaauguaucagcacac

SEQ ID NO: 1081128 - RNA, 22 nt, Human
ugauucaagcuacuguuacugg

SEQ ID NO: 1081129 - RNA, 22 nt, Human
ugaugcaauguuuacaucuuga

SEQ ID NO: 1081130 - RNA, 22 nt, Human
caggcagcucaaccuugggagc

SEQ ID NO: 1081131 - RNA, 22 nt, Human
ugucacaauaucccaaucugcc

SEQ ID NO: 1081132 - RNA, 22 nt, Human
ugagaagcaguuucaguaagaa

SEQ ID NO: 1081133 - RNA, 22 nt, Human
gcaccuggacagugacccuagc

SEQ ID NO: 1081134 - RNA, 22 nt, Human
gcaaaaauuccagggacgacuc

SEQ ID NO: 1081135 - RNA, 19 nt, Human
cuccaaguuaagagggagg

SEQ ID NO: 1081136 - RNA, 22 nt, Human
cagagagcuuagugugcugcau

SEQ ID NO: 1081137 - RNA, 22 nt, Human
ucugggcucuuaguguacccuc

SEQ ID NO: 1081138 - RNA, 22 nt, Human
ucucucugccaacucacagcca

SEQ ID NO: 1081139 - RNA, 22 nt, Human
aggcccaguccucugccgucug

SEQ ID NO: 1081140 - RNA, 22 nt, Human
ugaacacugccauauuuaagaa

SEQ ID NO: 1081141 - RNA, 22 nt, Human
auuaauuuuaccuuuguaaaca

SEQ ID NO: 1081142 - RNA, 22 nt, Human
ugaggcaggagaaucaccggaa

SEQ ID NO: 1081143 - RNA, 22 nt, Human
ugcucuggaauaguccuaggca

SEQ ID NO: 1081144 - RNA, 22 nt, Human
acagauggcaccuuuuugcugu

SEQ ID NO: 1081145 - RNA, 22 nt, Human
agcagccaaccuuacauucauc

SEQ ID NO: 1081146 - RNA, 16 nt, Human
uacauucugaucacug

SEQ ID NO: 1081147 - RNA, 22 nt, Human
ccugcccuaugaccagcuucac

SEQ ID NO: 1081148 - RNA, 22 nt, Human
ugcuggcuuccugugcacagca

SEQ ID NO: 1081149 - RNA, 22 nt, Human
uuuggaacaagacaaaacauua

SEQ ID NO: 1081150 - RNA, 22 nt, Human
agaagccaaucagcucucugcu

SEQ ID NO: 1081151 - RNA, 22 nt, Human
gucacuguuuccuauuauauuu

SEQ ID NO: 1081152 - RNA, 22 nt, Human
aauguugccccaggacaaagga

SEQ ID NO: 1081153 - RNA, 22 nt, Human
cacacaguggaguauuacucag

SEQ ID NO: 1081154 - RNA, 22 nt, Human
ucauugcaguugaguuguguua

SEQ ID NO: 1081155 - RNA, 22 nt, Human
guauuauugucaugaaauaaua

SEQ ID NO: 1081156 - RNA, 22 nt, Human
augggaugcauggcuguggcca

SEQ ID NO: 1081157 - RNA, 22 nt, Human
gucugagacccacucccagaga

SEQ ID NO: 1081158 - RNA, 22 nt, Human
ggaggcugcugccucacguggg

SEQ ID NO: 1081159 - RNA, 22 nt, Human
ugagagugauugguucgaaugu

SEQ ID NO: 1081160 - RNA, 22 nt, Human
uggcagugggaagcuggaaguc

SEQ ID NO: 1081161 - RNA, 22 nt, Human
gaagggugcauggagggaaguc

SEQ ID NO: 1081162 - RNA, 20 nt, Human
cacugggcuggagucagggc

SEQ ID NO: 1081163 - RNA, 22 nt, Human
uuaccaccuguaucacauuuuu

SEQ ID NO: 1081164 - RNA, 22 nt, Human
ggucccagguugacagggagac

SEQ ID NO: 1081165 - RNA, 18 nt, Human
cacaggaaggggaauauc

SEQ ID NO: 1081166 - RNA, 22 nt, Human
auaaagcuaagacuuacaugaa

SEQ ID NO: 1081167 - RNA, 22 nt, Human
gagggcugauguugccaccuca

SEQ ID NO: 1081168 - RNA, 22 nt, Human
caggaacaggggagugaaccug

SEQ ID NO: 1081169 - RNA, 22 nt, Human
gucaaauauuaugcagcuugga

SEQ ID NO: 1081170 - RNA, 22 nt, Human
gcugaaauuagacugcagaagu

SEQ ID NO: 1081171 - RNA, 22 nt, Human
cugggccaagaaguuguguaug

SEQ ID NO: 1081172 - RNA, 22 nt, Human
gcugggcaaggcugaagcuacc

SEQ ID NO: 1081173 - RNA, 22 nt, Human
ggucauugucagagccuguacu

SEQ ID NO: 1081174 - RNA, 22 nt, Human
uaacaugucccugauucuuugu

SEQ ID NO: 1081175 - RNA, 22 nt, Human
acuugguucuaacuaguguaua

SEQ ID NO: 1081176 - RNA, 22 nt, Human
uuauucacucauuaaagcagga

SEQ ID NO: 1081177 - RNA, 22 nt, Human
uucuuaagcaccuaaaaagugg

SEQ ID NO: 1081178 - RNA, 22 nt, Human
cuccugggagcagggauggaug

SEQ ID NO: 1081179 - RNA, 22 nt, Human
gcacaugagcugcugggauggg

SEQ ID NO: 1081180 - RNA, 22 nt, Human
agcugaagcaacaacaggaugg

SEQ ID NO: 1081181 - RNA, 22 nt, Human
ucucccuggagcccugaagcau

SEQ ID NO: 1081182 - RNA, 22 nt, Human
agucugggagaaggugagauua

SEQ ID NO: 1081183 - RNA, 22 nt, Human
gcaggagagucugugccagguu

SEQ ID NO: 1081184 - RNA, 22 nt, Human
agaggaugguugaggaagaccu

SEQ ID NO: 1081185 - RNA, 21 nt, Human
ggccagcucggaaggucccau

SEQ ID NO: 1081186 - RNA, 22 nt, Human
ccaggcuagaaacugaggcaca

SEQ ID NO: 1081187 - RNA, 19 nt, Human
auaaggcaauuggauuugg

SEQ ID NO: 1081188 - RNA, 22 nt, Human
uacauacacaaauauacuguuu

SEQ ID NO: 1081189 - RNA, 22 nt, Human
cacagcuugggcucugacaaua

SEQ ID NO: 1081190 - RNA, 22 nt, Human
gcagcugccgugagcucacgcc

SEQ ID NO: 1081191 - RNA, 22 nt, Human
uuccagaauuuuguucugcuug

SEQ ID NO: 1081192 - RNA, 22 nt, Human
auauuaguguagguagcuaaua

SEQ ID NO: 1081193 - RNA, 22 nt, Human
uguguucaaugacuucaucuuu

SEQ ID NO: 1081194 - RNA, 22 nt, Human
caaagcagcggauugggauagu

SEQ ID NO: 1081195 - RNA, 22 nt, Human
gcagagugaagcaguauggaaa

SEQ ID NO: 1081196 - RNA, 22 nt, Human
gggaccugaggagggguuucag

SEQ ID NO: 1081197 - RNA, 22 nt, Human
ugccaggcacgugagaguggcc

SEQ ID NO: 1081198 - RNA, 22 nt, Human
uuacacaaaagcaagugugugu

SEQ ID NO: 1081199 - RNA, 22 nt, Human
caggaaccuaaugaaggcucac

SEQ ID NO: 1081200 - RNA, 22 nt, Human
accauuaagaaucugguuuccu

SEQ ID NO: 1081201 - RNA, 22 nt, Human
gcagugauggggaucucacugg

SEQ ID NO: 1081202 - RNA, 22 nt, Human
caagaauuaagaauuuugaugu

SEQ ID NO: 1081203 - RNA, 22 nt, Human
agcaaagcacuuugcauacaua

SEQ ID NO: 1081204 - RNA, 22 nt, Human
uaauguuuagaagcagacagcu

SEQ ID NO: 1081205 - RNA, 21 nt, Human
ugaggccucuccugggcuggc

SEQ ID NO: 1081206 - RNA, 22 nt, Human
cuaguucuagaucccugaggaa

SEQ ID NO: 1081207 - RNA, 20 nt, Human
aguggggagucaggagugcc

SEQ ID NO: 1081208 - RNA, 22 nt, Human
uccuucagccaugggcucucca

SEQ ID NO: 1081209 - RNA, 22 nt, Human
uccaggccccugccugggccug

SEQ ID NO: 1081210 - RNA, 22 nt, Human
gcagccacugggagugcuuaua

SEQ ID NO: 1081211 - RNA, 22 nt, Human
cugagcccguugugaauauucc

SEQ ID NO: 1081212 - RNA, 22 nt, Human
ggaggagacccugugucaguuu

SEQ ID NO: 1081213 - RNA, 22 nt, Human
cucagugaauuggaggauggcc

SEQ ID NO: 1081214 - RNA, 22 nt, Human
uguuagcugugcuuuagccuuc

SEQ ID NO: 1081215 - RNA, 22 nt, Human
ccuggccagaggcgugccugug

SEQ ID NO: 1081216 - RNA, 21 nt, Human
guucuggaggcugcaagucca

SEQ ID NO: 1081217 - RNA, 21 nt, Human
cccuguguuccacagcagaca

SEQ ID NO: 1081218 - RNA, 22 nt, Human
agcuccugcacccagccuugag

SEQ ID NO: 1081219 - RNA, 22 nt, Human
caagcagauauuuuagucaaga

SEQ ID NO: 1081220 - RNA, 22 nt, Human
gucugaggaagaugcaggggga

SEQ ID NO: 1081221 - RNA, 22 nt, Human
uuucacaacugcuuauuugaga

SEQ ID NO: 1081222 - RNA, 22 nt, Human
accuuaaaugugacauagucua

SEQ ID NO: 1081223 - RNA, 22 nt, Human
ggcaugggccgaggugccuccu

SEQ ID NO: 1081224 - RNA, 22 nt, Human
agggcacagccuaaagccuaug

SEQ ID NO: 1081225 - RNA, 22 nt, Human
cagagcugacccaaggauugaa

SEQ ID NO: 1081226 - RNA, 22 nt, Human
guaacaguuuggguuccaauug

SEQ ID NO: 1081227 - RNA, 22 nt, Human
gggcagcucuggcugugggaag

SEQ ID NO: 1081228 - RNA, 22 nt, Human
agacagagauacuauguuguca

SEQ ID NO: 1081229 - RNA, 22 nt, Human
gaauauuuguaauuacuguuga

SEQ ID NO: 1081230 - RNA, 22 nt, Human
gcagagucugguaggugcuggu

SEQ ID NO: 1081231 - RNA, 18 nt, Human
ugcaaaggacacugagau

SEQ ID NO: 1081232 - RNA, 20 nt, Human
gcagagcuguucugugggga

SEQ ID NO: 1081233 - RNA, 22 nt, Human
ucacaucacaugagugcaagga

SEQ ID NO: 1081234 - RNA, 22 nt, Human
aggcagcagggccacuggcuga

SEQ ID NO: 1081235 - RNA, 22 nt, Human
aaauccuggccucaaguggucc

SEQ ID NO: 1081236 - RNA, 22 nt, Human
acucaggaagaaagcagcuggu

SEQ ID NO: 1081237 - RNA, 22 nt, Human
guucacaguuucuaaucccagc

SEQ ID NO: 1081238 - RNA, 22 nt, Human
ugggcuuaggucggaggcggcc

SEQ ID NO: 1081239 - RNA, 22 nt, Human
guuauucugcacaccuuuaaaa

SEQ ID NO: 1081240 - RNA, 22 nt, Human
agagacaagaaauaccugggac

SEQ ID NO: 1081241 - RNA, 22 nt, Human
cucccucccuacgugagcucac

SEQ ID NO: 1081242 - RNA, 22 nt, Human
cagguggcuuagucccauuuua

SEQ ID NO: 1081243 - RNA, 22 nt, Human
aaggugguuguaggcuggucug

SEQ ID NO: 1081244 - RNA, 22 nt, Human
uuuuaucuaccuaugcucauuu

SEQ ID NO: 1081245 - RNA, 22 nt, Human
acagugauaaaauuucacaugu

SEQ ID NO: 1081246 - RNA, 22 nt, Human
aaaaguauaggguuuggaguca

SEQ ID NO: 1081247 - RNA, 21 nt, Human
uuugugugucacgugcacagg

SEQ ID NO: 1081248 - RNA, 22 nt, Human
ggcaggcuccagagcccucucc

SEQ ID NO: 1081249 - RNA, 22 nt, Human
ugggcacuguagcuggugcugg

SEQ ID NO: 1081250 - RNA, 22 nt, Human
aaaucagagaauauauuuagaa

SEQ ID NO: 1081251 - RNA, 22 nt, Human
agaccaaagaaaacacaucugg

SEQ ID NO: 1081252 - RNA, 22 nt, Human
ugagagagcgccugggaucauu

SEQ ID NO: 1081253 - RNA, 22 nt, Human
ggcagguggacgugcuaaagcu

SEQ ID NO: 1081254 - RNA, 22 nt, Human
aauguuaauguguuugcuuaug

SEQ ID NO: 1081255 - RNA, 20 nt, Human
ccuuuagaaacucauaugua

SEQ ID NO: 1081256 - RNA, 22 nt, Human
ugccuguggaaaggcuggugcu

SEQ ID NO: 1081257 - RNA, 22 nt, Human
gccacccccaaguagguggucu

SEQ ID NO: 1081258 - RNA, 21 nt, Human
uccuccuucaaguccuggccu

SEQ ID NO: 1081259 - RNA, 22 nt, Human
gaacuacagugcauuuucuuaa

SEQ ID NO: 1081260 - RNA, 22 nt, Human
ucucaggaagauuagggcuaag

SEQ ID NO: 1081261 - RNA, 22 nt, Human
ucaggcagaaaaaucacuaauu

SEQ ID NO: 1081262 - RNA, 22 nt, Human
agucccuguacuuuccacugcc

SEQ ID NO: 1081263 - RNA, 22 nt, Human
cauccugguuaccccauaguca

SEQ ID NO: 1081264 - RNA, 22 nt, Human
cagcugagaaauggggaaaggg

SEQ ID NO: 1081265 - RNA, 22 nt, Human
ggcugccugaacuuuggggaaa

SEQ ID NO: 1081266 - RNA, 22 nt, Human
gauucacagaacuuagucaagc

SEQ ID NO: 1081267 - RNA, 22 nt, Human
cccagccugucuuucccaauga

SEQ ID NO: 1081268 - RNA, 22 nt, Human
uuaaggaauuacgaaaauauuu

SEQ ID NO: 1081269 - RNA, 22 nt, Human
ugcuugucagugugcuagaaac

SEQ ID NO: 1081270 - RNA, 22 nt, Human
ucaggagguugaccacggggca

SEQ ID NO: 1081271 - RNA, 22 nt, Human
auucuacaaucauguagauccu

SEQ ID NO: 1081272 - RNA, 22 nt, Human
aaaguuaguuucuuauaugucu

SEQ ID NO: 1081273 - RNA, 18 nt, Human
uuauuuguuacagcacau

SEQ ID NO: 1081274 - RNA, 22 nt, Human
agaagugcuccagugaguuggg

SEQ ID NO: 1081275 - RNA, 22 nt, Human
aaacaccagcacuguuuacaaa

SEQ ID NO: 1081276 - RNA, 19 nt, Human
acuaaaaaugauguuugag

SEQ ID NO: 1081277 - RNA, 22 nt, Human
ugcuggccgugagcucucggga

SEQ ID NO: 1081278 - RNA, 22 nt, Human
acagggcagagggcaguuggua

SEQ ID NO: 1081279 - RNA, 22 nt, Human
cccucacucugccuccuggggu

SEQ ID NO: 1081280 - RNA, 22 nt, Human
gcuucucuggccugcagggcau

SEQ ID NO: 1081281 - RNA, 22 nt, Human
gcauacaaagguuuacaacuga

SEQ ID NO: 1081282 - RNA, 22 nt, Human
gcuggcugggucccugagaggc

SEQ ID NO: 1081283 - RNA, 17 nt, Human
aagacagaagccaugag

SEQ ID NO: 1081284 - RNA, 20 nt, Human
uagauuucauacuucucuuu

SEQ ID NO: 1081285 - RNA, 22 nt, Human
acuugcauuauauuuaucacaa

SEQ ID NO: 1081286 - RNA, 22 nt, Human
cagugcaguugguggcaggggu

SEQ ID NO: 1081287 - RNA, 22 nt, Human
ggcagagcuugcagugagccga

SEQ ID NO: 1081288 - RNA, 22 nt, Human
ugagccugggagauggaggcug

SEQ ID NO: 1081289 - RNA, 22 nt, Human
cugggcacaggggagcagaguc

SEQ ID NO: 1081290 - RNA, 22 nt, Human
augaggcacaucacagccaaug

SEQ ID NO: 1081291 - RNA, 19 nt, Human
uuucaaagggcauaagccu

SEQ ID NO: 1081292 - RNA, 22 nt, Human
ggcgugggaaguggggcuucug

SEQ ID NO: 1081293 - RNA, 22 nt, Human
augucaaaugcugcaaacucau

SEQ ID NO: 1081294 - RNA, 23 nt, Human
acaacuuuacagauacauuuugu

SEQ ID NO: 1081295 - RNA, 22 nt, Human
cugcaggguuucgccaguugug

SEQ ID NO: 1081296 - RNA, 22 nt, Human
acacuucaaagggugacuugau

SEQ ID NO: 1081297 - RNA, 22 nt, Human
agacaaagaaaccguagaagca

SEQ ID NO: 1081298 - RNA, 22 nt, Human
caaaaccaagaacauucauuuc

SEQ ID NO: 1081299 - RNA, 22 nt, Human
gagcagcuagauaaagcccuuc

SEQ ID NO: 1081300 - RNA, 20 nt, Human
caccuucaaauuuccuggca

SEQ ID NO: 1081301 - RNA, 22 nt, Human
acaugcugggcaauguuguuuu

SEQ ID NO: 1081302 - RNA, 22 nt, Human
ucuuaacaagcuccucagugcu

SEQ ID NO: 1081303 - RNA, 22 nt, Human
ugccaggcucaggaugucccug

SEQ ID NO: 1081304 - RNA, 22 nt, Human
uaguuauuauuguuacuaucag

SEQ ID NO: 1081305 - RNA, 22 nt, Human
uuugugaacaaacaugaagaug

SEQ ID NO: 1081306 - RNA, 22 nt, Human
ugaggugaagaguggagcucag

SEQ ID NO: 1081307 - RNA, 22 nt, Human
caggcacuggccagucagcaca

SEQ ID NO: 1081308 - RNA, 22 nt, Human
auguaacaaaugguauacaugu

SEQ ID NO: 1081309 - RNA, 22 nt, Human
auuagaacuaggcuaaguaaaa

SEQ ID NO: 1081310 - RNA, 22 nt, Human
uuugggcugagaugugggccga

SEQ ID NO: 1081311 - RNA, 22 nt, Human
gccuggaggggacagucucugg

SEQ ID NO: 1081312 - RNA, 22 nt, Human
agauuucccucuuguauuugca

SEQ ID NO: 1081313 - RNA, 22 nt, Human
uacuuucuaagacauacaacuu

SEQ ID NO: 1081314 - RNA, 22 nt, Human
uacagaaagaccucucgggaaa

SEQ ID NO: 1081315 - RNA, 22 nt, Human
uuagauaacaguagaauaucaa

SEQ ID NO: 1081316 - RNA, 22 nt, Human
agggggcaggagagaccugcug

SEQ ID NO: 1081317 - RNA, 22 nt, Human
ggucccagaauugguuagcaca

SEQ ID NO: 1081318 - RNA, 22 nt, Human
ugcuuggcuuucugagcuucug

SEQ ID NO: 1081319 - RNA, 22 nt, Human
ugggcagaguugugaugaacug

SEQ ID NO: 1081320 - RNA, 22 nt, Human
agaggccagggacacugcucaa

SEQ ID NO: 1081321 - RNA, 22 nt, Human
aguuauuacucuuuaacauauu

SEQ ID NO: 1081322 - RNA, 22 nt, Human
agcaguggugugaggagggcuc

SEQ ID NO: 1081323 - RNA, 22 nt, Human
ccaaggagcaaggcucaacaag

SEQ ID NO: 1081324 - RNA, 22 nt, Human
gcaggggaguccacucuaugca

SEQ ID NO: 1081325 - RNA, 22 nt, Human
ugcugccagggcucugcccaca

SEQ ID NO: 1081326 - RNA, 22 nt, Human
uucccuccgaaccucagugcug

SEQ ID NO: 1081327 - RNA, 19 nt, Human
cagauguuuucaguucauu

SEQ ID NO: 1081328 - RNA, 22 nt, Human
caucauuuuauuaaccaagaaa

SEQ ID NO: 1081329 - RNA, 22 nt, Human
guucauuuuuagaaugcuagua

SEQ ID NO: 1081330 - RNA, 20 nt, Human
agccaggguucuggaugcac

SEQ ID NO: 1081331 - RNA, 22 nt, Human
ccagagccuaagaucugauccu

SEQ ID NO: 1081332 - RNA, 22 nt, Human
aggcagcagucaugaggaaaga

SEQ ID NO: 1081333 - RNA, 17 nt, Human
cuauuuuggagauuaaa

SEQ ID NO: 1081334 - RNA, 22 nt, Human
cugaggugcuauggaggauacg

SEQ ID NO: 1081335 - RNA, 22 nt, Human
gcaaagcaagauucagauguag

SEQ ID NO: 1081336 - RNA, 21 nt, Human
ccucaucaaacuuucacuugc

SEQ ID NO: 1081337 - RNA, 22 nt, Human
uauuaacaugaacugacuuuuc

SEQ ID NO: 1081338 - RNA, 22 nt, Human
uaauguagggguguaacacaca

SEQ ID NO: 1081339 - RNA, 22 nt, Human
gcccaggcuggagugcaguagc

SEQ ID NO: 1081340 - RNA, 18 nt, Human
ggcaggcucucuggguca

SEQ ID NO: 1081341 - RNA, 22 nt, Human
gcuggcugcgucaucacagggc

SEQ ID NO: 1081342 - RNA, 22 nt, Human
uuguuaaagaugcagauuccau

SEQ ID NO: 1081343 - RNA, 22 nt, Human
agggggcaucagguccuggcuc

SEQ ID NO: 1081344 - RNA, 22 nt, Human
ucagagccaaucauggugcauu

SEQ ID NO: 1081345 - RNA, 22 nt, Human
uucucugagauagacuaagugg

SEQ ID NO: 1081346 - RNA, 22 nt, Human
caagcccaggauuccccaguua

SEQ ID NO: 1081347 - RNA, 22 nt, Human
uucuggaggccccuuccuucuc

SEQ ID NO: 1081348 - RNA, 22 nt, Human
uagggcuauucugaguaauaau

SEQ ID NO: 1081349 - RNA, 18 nt, Human
gaguguggcacugggccc

SEQ ID NO: 1081350 - RNA, 22 nt, Human
uccaggcauaaugcccaguggu

SEQ ID NO: 1081351 - RNA, 22 nt, Human
acauuugagucauauuugcuua

SEQ ID NO: 1081352 - RNA, 22 nt, Human
ccugccuggaucagccauccug

SEQ ID NO: 1081353 - RNA, 22 nt, Human
gggaagugaggagccccucugc

SEQ ID NO: 1081354 - RNA, 22 nt, Human
uuuaucacagaauaagaaguca

SEQ ID NO: 1081355 - RNA, 22 nt, Human
cagcuucucagaaagcugaggu

SEQ ID NO: 1081356 - RNA, 22 nt, Human
ccucugcagcagagagccagag

SEQ ID NO: 1081357 - RNA, 22 nt, Human
ugggagcaagcuggugcuggag

SEQ ID NO: 1081358 - RNA, 22 nt, Human
aauucacaaaaccagauugcuu

SEQ ID NO: 1081359 - RNA, 22 nt, Human
aguucuggaacucuacagcaac

SEQ ID NO: 1081360 - RNA, 22 nt, Human
auuaaagaaacccagcauguga

SEQ ID NO: 1081361 - RNA, 22 nt, Human
cguagguggcucagcaccuggg

SEQ ID NO: 1081362 - RNA, 22 nt, Human
aucagaaaguucaucauguuug

SEQ ID NO: 1081363 - RNA, 22 nt, Human
cagagcagagugauuguucugg

SEQ ID NO: 1081364 - RNA, 23 nt, Human
gguccaggaaaggcagcagcacc

SEQ ID NO: 1081365 - RNA, 22 nt, Human
ucuggauggucagcucuuccug

SEQ ID NO: 1081366 - RNA, 22 nt, Human
cacauuuaauugguuuagggug

SEQ ID NO: 1081367 - RNA, 22 nt, Human
ugcuuccugaggccgucuucuc

SEQ ID NO: 1081368 - RNA, 22 nt, Human
caggaacaauaccucuugccag

SEQ ID NO: 1081369 - RNA, 22 nt, Human
ccuggaggagcgcugaccagcu

SEQ ID NO: 1081370 - RNA, 22 nt, Human
ugaggcucagaaauguaaguuu

SEQ ID NO: 1081371 - RNA, 23 nt, Human
ugggcagcuucugcaugcccacc

SEQ ID NO: 1081372 - RNA, 22 nt, Human
uuugaaguggaaaaggauuuaa

SEQ ID NO: 1081373 - RNA, 22 nt, Human
gaagaaagggaauuaacuugag

SEQ ID NO: 1081374 - RNA, 22 nt, Human
aagaauggugguggggccagca

SEQ ID NO: 1081375 - RNA, 22 nt, Human
gagaaagauguaggcugggagg

SEQ ID NO: 1081376 - RNA, 22 nt, Human
ggcagcucugaugaugcucugg

SEQ ID NO: 1081377 - RNA, 22 nt, Human
cugccagcucucuggaggcucu

SEQ ID NO: 1081378 - RNA, 22 nt, Human
ccagaaacaccuggauucuguu

SEQ ID NO: 1081379 - RNA, 22 nt, Human
ucugaaauggggcugaagcacu

SEQ ID NO: 1081380 - RNA, 21 nt, Human
uagagccagugguguucugac

SEQ ID NO: 1081381 - RNA, 22 nt, Human
acucugggccccagguggagcu

SEQ ID NO: 1081382 - RNA, 22 nt, Human
ggcucuggcaaggggaggcuac

SEQ ID NO: 1081383 - RNA, 23 nt, Human
ugagggacaugguggcuucugag

SEQ ID NO: 1081384 - RNA, 22 nt, Human
gaaagauaaucaauuacuccuu

SEQ ID NO: 1081385 - RNA, 22 nt, Human
acauucuauuucaucaugucua

SEQ ID NO: 1081386 - RNA, 22 nt, Human
uugcccugaagaacgucccaga

SEQ ID NO: 1081387 - RNA, 22 nt, Human
uccuucaguuaaagaucucaca

SEQ ID NO: 1081388 - RNA, 22 nt, Human
cuggccuuggugcuugcagaca

SEQ ID NO: 1081389 - RNA, 22 nt, Human
gccucugcaauuacauugugcc

SEQ ID NO: 1081390 - RNA, 22 nt, Human
cagccugcccuggaagcccagc

SEQ ID NO: 1081391 - RNA, 22 nt, Human
agcaggagauggggcgugaugu

SEQ ID NO: 1081392 - RNA, 22 nt, Human
caaggauagguacuauguaaua

SEQ ID NO: 1081393 - RNA, 22 nt, Human
ugggcagaucuuugguggcuag

SEQ ID NO: 1081394 - RNA, 22 nt, Human
caguggccugagccaggcuucc

SEQ ID NO: 1081395 - RNA, 22 nt, Human
agauguuuuguguauuucauca

SEQ ID NO: 1081396 - RNA, 22 nt, Human
gcccucagaugggaaaggaggg

SEQ ID NO: 1081397 - RNA, 22 nt, Human
auguagcaucuauccugauaaa

SEQ ID NO: 1081398 - RNA, 22 nt, Human
aacaauaggagugaugcaguau

SEQ ID NO: 1081399 - RNA, 22 nt, Human
cuguugucccugggagcucagc

SEQ ID NO: 1081400 - RNA, 22 nt, Human
auauuucuugagcaccugguau

SEQ ID NO: 1081401 - RNA, 22 nt, Human
uuugucaaaucaaaccacauuc

SEQ ID NO: 1081402 - RNA, 22 nt, Human
ucccagccuuccuuguggugaa

SEQ ID NO: 1081403 - RNA, 22 nt, Human
caugggcaccuuaaaaugaggc

SEQ ID NO: 1081404 - RNA, 22 nt, Human
augauacucuaggugauuuaca

SEQ ID NO: 1081405 - RNA, 22 nt, Human
cuuuagauguugcuuuaacuau

SEQ ID NO: 1081406 - RNA, 22 nt, Human
caggguggcccuguggucucau

SEQ ID NO: 1081407 - RNA, 22 nt, Human
ccugccuggcuuccagaagaga

SEQ ID NO: 1081408 - RNA, 22 nt, Human
ucugggagcacacgcagugauc

SEQ ID NO: 1081409 - RNA, 22 nt, Human
cagcauuuuccauagaaagaag

SEQ ID NO: 1081410 - RNA, 22 nt, Human
guguuuccuaguuuaaugaaug

SEQ ID NO: 1081411 - RNA, 22 nt, Human
augcaaaaguaguugcaguuuu

SEQ ID NO: 1081412 - RNA, 22 nt, Human
ucccagagcugauaagccuuua

SEQ ID NO: 1081413 - RNA, 22 nt, Human
ucccagggugcgccugcccucg

SEQ ID NO: 1081414 - RNA, 22 nt, Human
gaagcagcucagauugacugaa

SEQ ID NO: 1081415 - RNA, 22 nt, Human
uguccuguccuuccuggaaguc

SEQ ID NO: 1081416 - RNA, 22 nt, Human
agaagcugacagaugcagcagg

SEQ ID NO: 1081417 - RNA, 22 nt, Human
cugagccccaucugaggugccc

SEQ ID NO: 1081418 - RNA, 19 nt, Human
ugcaagugucuuggacaag

SEQ ID NO: 1081419 - RNA, 22 nt, Human
cccaugccuucugacucacagg

SEQ ID NO: 1081420 - RNA, 18 nt, Human
gccaggaagaggaaugug

SEQ ID NO: 1081421 - RNA, 22 nt, Human
agagagcccgggccagggcaca

SEQ ID NO: 1081422 - RNA, 22 nt, Human
auguuaaaugguuuauuauuaa

SEQ ID NO: 1081423 - RNA, 22 nt, Human
agauuauuuccagacuaaugaa

SEQ ID NO: 1081424 - RNA, 22 nt, Human
ggaggaugagcuacgaggagcu

SEQ ID NO: 1081425 - RNA, 22 nt, Human
uggcucagagccuugagagcug

SEQ ID NO: 1081426 - RNA, 22 nt, Human
aauacuugggcugagauuuuug

SEQ ID NO: 1081427 - RNA, 23 nt, Human
gcccauggagucuggaucuggcc

SEQ ID NO: 1081428 - RNA, 19 nt, Human
aucagcaagguaggaugug

SEQ ID NO: 1081429 - RNA, 22 nt, Human
ucaguaaaugaaugaauauaug

SEQ ID NO: 1081430 - RNA, 22 nt, Human
aacaguaagagauguuuuaucu

SEQ ID NO: 1081431 - RNA, 22 nt, Human
uuucucaaguucagauauuuga

SEQ ID NO: 1081432 - RNA, 22 nt, Human
gacuuuaaagguucugcugcuu

SEQ ID NO: 1081433 - RNA, 22 nt, Human
uucaggcaucccuacaguuagg

SEQ ID NO: 1081434 - RNA, 20 nt, Human
uuugucuguuaaguguuucu

SEQ ID NO: 1081435 - RNA, 22 nt, Human
ugggcccaagagagucuccaac

SEQ ID NO: 1081436 - RNA, 22 nt, Human
auuccaaagacagaagcagcug

SEQ ID NO: 1081437 - RNA, 22 nt, Human
aagcaccucuaugauugcuuuu

SEQ ID NO: 1081438 - RNA, 22 nt, Human
cccaaggcugcagugagcauga

SEQ ID NO: 1081439 - RNA, 22 nt, Human
gccggggcuggggagagacaug

SEQ ID NO: 1081440 - RNA, 22 nt, Human
aacacuuaaggagagaucaaau

SEQ ID NO: 1081441 - RNA, 22 nt, Human
uggaagggagugacagucagag

SEQ ID NO: 1081442 - RNA, 22 nt, Human
gugcccuguugcacacuugagg

SEQ ID NO: 1081443 - RNA, 22 nt, Human
gggaccugccauugcucacagg

SEQ ID NO: 1081444 - RNA, 22 nt, Human
ugggcuuuaucaugggucuggu

SEQ ID NO: 1081445 - RNA, 22 nt, Human
ucaacacaacagagaaaugcug

SEQ ID NO: 1081446 - RNA, 22 nt, Human
ccugagguggcugcagcacugc

SEQ ID NO: 1081447 - RNA, 22 nt, Human
ugaaucaaugaauugcacuuca

SEQ ID NO: 1081448 - RNA, 21 nt, Human
uuauaggcugggguuugcuuu

SEQ ID NO: 1081449 - RNA, 22 nt, Human
gugggggcaggcagugcuagga

SEQ ID NO: 1081450 - RNA, 17 nt, Human
caaggccagcaucuuca

SEQ ID NO: 1081451 - RNA, 22 nt, Human
uugcaggggaaggagcagagcu

SEQ ID NO: 1081452 - RNA, 22 nt, Human
uagcugccuaugugauaagaga

SEQ ID NO: 1081453 - RNA, 22 nt, Human
agcagcagaaaguugauggcag

SEQ ID NO: 1081454 - RNA, 22 nt, Human
ucaggccacggcucacugagac

SEQ ID NO: 1081455 - RNA, 22 nt, Human
uugcaacaucugaacauuuauc

SEQ ID NO: 1081456 - RNA, 22 nt, Human
acuauacaccaaaauauuaagg

SEQ ID NO: 1081457 - RNA, 22 nt, Human
uguaauauuguagugacaguac

SEQ ID NO: 1081458 - RNA, 22 nt, Human
aaauuauuaaacagugggaugc

SEQ ID NO: 1081459 - RNA, 22 nt, Human
cauuuaauagaugcuguuucag

SEQ ID NO: 1081460 - RNA, 22 nt, Human
gugcaugugucuuuauaguagc

SEQ ID NO: 1081461 - RNA, 22 nt, Human
gcuucuggaggagcugggcuga

SEQ ID NO: 1081462 - RNA, 22 nt, Human
uaacagaauccuguuauugcca

SEQ ID NO: 1081463 - RNA, 22 nt, Human
guaacaaacgguuccaagaugc

SEQ ID NO: 1081464 - RNA, 22 nt, Human
ugaaaagucuuauauugucuga

SEQ ID NO: 1081465 - RNA, 22 nt, Human
ggccauggaccccgagcugacc

SEQ ID NO: 1081466 - RNA, 22 nt, Human
acacauuuuguuaaacccugug

SEQ ID NO: 1081467 - RNA, 22 nt, Human
gcugccacucugagcuugcuuc

SEQ ID NO: 1081468 - RNA, 22 nt, Human
uuuuggaauuuauacaguaaug

SEQ ID NO: 1081469 - RNA, 22 nt, Human
uccucugccaaagggaguugcc

SEQ ID NO: 1081470 - RNA, 22 nt, Human
aggcccagcccguccucgugcu

SEQ ID NO: 1081471 - RNA, 22 nt, Human
ucugaggcauaaccuguucugc

SEQ ID NO: 1081472 - RNA, 22 nt, Human
ugaagcuggaagcaugcagacu

SEQ ID NO: 1081473 - RNA, 18 nt, Human
ccagcaugccagaggcug

SEQ ID NO: 1081474 - RNA, 21 nt, Human
uggcugcuggcccucucucca

SEQ ID NO: 1081475 - RNA, 22 nt, Human
cucagaguccccacaucugggu

SEQ ID NO: 1081476 - RNA, 22 nt, Human
agggcugacaaauggcagugac

SEQ ID NO: 1081477 - RNA, 22 nt, Human
aaugacaauaaucauuaacuuu

SEQ ID NO: 1081478 - RNA, 22 nt, Human
gaggucagucagaccaggguuu

SEQ ID NO: 1081479 - RNA, 22 nt, Human
uuguguccugauuugacacaau

SEQ ID NO: 1081480 - RNA, 20 nt, Human
accuugaacccgccagccau

SEQ ID NO: 1081481 - RNA, 22 nt, Human
acagucuugcuguauggucagg

SEQ ID NO: 1081482 - RNA, 21 nt, Human
auugaaagucaacaaucaguu

SEQ ID NO: 1081483 - RNA, 22 nt, Human
agagaaggucacuaaggaccca

SEQ ID NO: 1081484 - RNA, 22 nt, Human
ugucagugaguuaguugcaagu

SEQ ID NO: 1081485 - RNA, 22 nt, Human
acagaagauaacugggaccaga

SEQ ID NO: 1081486 - RNA, 22 nt, Human
uauugaguuacagaaaauacuu

SEQ ID NO: 1081487 - RNA, 22 nt, Human
uuaggcauauggcacaugauag

SEQ ID NO: 1081488 - RNA, 22 nt, Human
ucugagagcuguagaagccuau

SEQ ID NO: 1081489 - RNA, 22 nt, Human
gagccaggcccguacuugcugu

SEQ ID NO: 1081490 - RNA, 22 nt, Human
uucaaacacugcuuugagaggg

SEQ ID NO: 1081491 - RNA, 23 nt, Human
uccagcagagccuuccaggaggg

SEQ ID NO: 1081492 - RNA, 22 nt, Human
gcauuucagaaagguuaccaac

SEQ ID NO: 1081493 - RNA, 22 nt, Human
uucuuacaaguaugacguagca

SEQ ID NO: 1081494 - RNA, 23 nt, Human
uccuggugacaugccugagcauc

SEQ ID NO: 1081495 - RNA, 22 nt, Human
ccuuaaauucuccauuugaaag

SEQ ID NO: 1081496 - RNA, 22 nt, Human
cucugugcccuacugcucagcu

SEQ ID NO: 1081497 - RNA, 22 nt, Human
gaggccugaaaggggaccuaug

SEQ ID NO: 1081498 - RNA, 22 nt, Human
agugucauuuuguccaucuucu

SEQ ID NO: 1081499 - RNA, 22 nt, Human
aagaaauauugggccuuauaaa

SEQ ID NO: 1081500 - RNA, 18 nt, Human
ccucacagacuuccaugu

SEQ ID NO: 1081501 - RNA, 22 nt, Human
uauguauaugguagaaguaugu

SEQ ID NO: 1081502 - RNA, 21 nt, Human
gggcagaggggccuccugggu

SEQ ID NO: 1081503 - RNA, 22 nt, Human
aaacuacugauuugugaauuga

SEQ ID NO: 1081504 - RNA, 22 nt, Human
ugagcuggucuugaguguagcu

SEQ ID NO: 1081505 - RNA, 22 nt, Human
acagccauagaugcuuauguaa

SEQ ID NO: 1081506 - RNA, 22 nt, Human
ucaggcaggaagggaggacuug

SEQ ID NO: 1081507 - RNA, 22 nt, Human
ugugugcagacagauauuacuu

SEQ ID NO: 1081508 - RNA, 22 nt, Human
agugagggaugaagaacugcgg

SEQ ID NO: 1081509 - RNA, 22 nt, Human
caaaaagcuuagguaacaagcc

SEQ ID NO: 1081510 - RNA, 22 nt, Human
gaggguggcuccucccugggcc

SEQ ID NO: 1081511 - RNA, 23 nt, Human
ucuuuacauacugaugaguucuc

SEQ ID NO: 1081512 - RNA, 22 nt, Human
ucuggccuacuggaguccauga

SEQ ID NO: 1081513 - RNA, 21 nt, Human
ggacuuacauagguaaggggu

SEQ ID NO: 1081514 - RNA, 22 nt, Human
gugaagcagggaaggaaaggau

SEQ ID NO: 1081515 - RNA, 22 nt, Human
ucuggggacggggcccagcaau

SEQ ID NO: 1081516 - RNA, 22 nt, Human
uagugcuuaauaaauuucagaa

SEQ ID NO: 1081517 - RNA, 22 nt, Human
gggcugugggacccggcacuuu

SEQ ID NO: 1081518 - RNA, 22 nt, Human
agaaacuucagcuauucuuuug

SEQ ID NO: 1081519 - RNA, 22 nt, Human
auguuaacugaagccauucucg

SEQ ID NO: 1081520 - RNA, 22 nt, Human
gccugugguuugauuaagcauu

SEQ ID NO: 1081521 - RNA, 22 nt, Human
aaggagagagcuuugcuggaac

SEQ ID NO: 1081522 - RNA, 22 nt, Human
agcugaggcucugagagggaag

SEQ ID NO: 1081523 - RNA, 21 nt, Human
acagucuccccagaucucucc

SEQ ID NO: 1081524 - RNA, 22 nt, Human
aaaagcagaccacgcuuugugg

SEQ ID NO: 1081525 - RNA, 22 nt, Human
ucucaaguuauguaacagcugu

SEQ ID NO: 1081526 - RNA, 22 nt, Human
cuaugagaagaaaacaagauua

SEQ ID NO: 1081527 - RNA, 22 nt, Human
uggggcuguggauucucacgaa

SEQ ID NO: 1081528 - RNA, 22 nt, Human
agcucaggcaacucugggcccc

SEQ ID NO: 1081529 - RNA, 22 nt, Human
uucaguuuuauuguacugcuau

SEQ ID NO: 1081530 - RNA, 22 nt, Human
cagggcccagucccugcuguca

SEQ ID NO: 1081531 - RNA, 22 nt, Human
ugcugaaauauuuaugggucaa

SEQ ID NO: 1081532 - RNA, 22 nt, Human
augugggccgugcggguguccu

SEQ ID NO: 1081533 - RNA, 22 nt, Human
ugaagccagcuuuggaagacac

SEQ ID NO: 1081534 - RNA, 22 nt, Human
ccaaggagcaaguuuacaccug

SEQ ID NO: 1081535 - RNA, 19 nt, Human
guuuuucccagacgaggca

SEQ ID NO: 1081536 - RNA, 22 nt, Human
gaggaagcagggcuuggcugag

SEQ ID NO: 1081537 - RNA, 22 nt, Human
guacacacuauguauuguacac

SEQ ID NO: 1081538 - RNA, 22 nt, Human
acagagucugacagguaggcgc

SEQ ID NO: 1081539 - RNA, 22 nt, Human
cuccagggaggucugcaggacu

SEQ ID NO: 1081540 - RNA, 21 nt, Human
cugauugugaaagucaucauu

SEQ ID NO: 1081541 - RNA, 22 nt, Human
ucaggggacagccagcuggagg

SEQ ID NO: 1081542 - RNA, 22 nt, Human
ucaggcagaccaccgugggcag

SEQ ID NO: 1081543 - RNA, 22 nt, Human
gcagagccaugggagguuuuug

SEQ ID NO: 1081544 - RNA, 22 nt, Human
gagcagugaugggaggacguca

SEQ ID NO: 1081545 - RNA, 16 nt, Human
cagaguguaaacagga

SEQ ID NO: 1081546 - RNA, 22 nt, Human
auaucuuuguuuuugccaagau

SEQ ID NO: 1081547 - RNA, 19 nt, Human
ucuaauaucuacuucccug

SEQ ID NO: 1081548 - RNA, 22 nt, Human
aaguggagcuauaggcucagau

SEQ ID NO: 1081549 - RNA, 22 nt, Human
ccaaggaguagagcaggaagcu

SEQ ID NO: 1081550 - RNA, 22 nt, Human
aaggcacacaguuagauagagc

SEQ ID NO: 1081551 - RNA, 19 nt, Human
aggagaagacucucucccc

SEQ ID NO: 1081552 - RNA, 22 nt, Human
uaaggcacccuucugaguagag

SEQ ID NO: 1081553 - RNA, 22 nt, Human
aaaaguaauugaugcaaucgua

SEQ ID NO: 1081554 - RNA, 18 nt, Human
ugugguggagcugccuuc

SEQ ID NO: 1081555 - RNA, 22 nt, Human
cccuugcaucccauguguggcc

SEQ ID NO: 1081556 - RNA, 20 nt, Human
uuucagauuuacagaaaugu

SEQ ID NO: 1081557 - RNA, 22 nt, Human
uuacaaagagaaguuguagaau

SEQ ID NO: 1081558 - RNA, 22 nt, Human
acugggccuggauuggcguguc

SEQ ID NO: 1081559 - RNA, 22 nt, Human
gagaggugaaggcugcccuggg

SEQ ID NO: 1081560 - RNA, 22 nt, Human
caagagcugaggcuggagaggu

SEQ ID NO: 1081561 - RNA, 18 nt, Human
aaagaaggauuggagagc

SEQ ID NO: 1081562 - RNA, 22 nt, Human
cagacccucgggugaguuggcc

SEQ ID NO: 1081563 - RNA, 22 nt, Human
cauuugcagagggugacacucu

SEQ ID NO: 1081564 - RNA, 22 nt, Human
ucaggaggacagauaaggauag

SEQ ID NO: 1081565 - RNA, 22 nt, Human
uugguccugggcacugauuaac

SEQ ID NO: 1081566 - RNA, 22 nt, Human
uggggcuccuccuggcaggagg

SEQ ID NO: 1081567 - RNA, 22 nt, Human
uggcagcagccauggaaggccc

SEQ ID NO: 1081568 - RNA, 22 nt, Human
uuccucagccaaggcugggauc

SEQ ID NO: 1081569 - RNA, 22 nt, Human
uccaaagaauagaggugacauu

SEQ ID NO: 1081570 - RNA, 22 nt, Human
uccaacuuucuccuccggcuug

SEQ ID NO: 1081571 - RNA, 22 nt, Human
aauuuuaugccuugcacguugg

SEQ ID NO: 1081572 - RNA, 22 nt, Human
agggaguguaaauggugcucag

SEQ ID NO: 1081573 - RNA, 17 nt, Human
guccuacccauggucua

SEQ ID NO: 1081574 - RNA, 22 nt, Human
cugagccauaagggaggcuggg

SEQ ID NO: 1081575 - RNA, 22 nt, Human
agucaccaacaugguucccagg

SEQ ID NO: 1081576 - RNA, 22 nt, Human
agagcagauggagcuggaagag

SEQ ID NO: 1081577 - RNA, 22 nt, Human
cuggcagauauuugcagacaug

SEQ ID NO: 1081578 - RNA, 22 nt, Human
cgccucagccguggucaucuuc

SEQ ID NO: 1081579 - RNA, 22 nt, Human
acagauauaaacuauaguagug

SEQ ID NO: 1081580 - RNA, 22 nt, Human
aacugcauuugcauaaguccau

SEQ ID NO: 1081581 - RNA, 22 nt, Human
agccucagugucaccaucuacc

SEQ ID NO: 1081582 - RNA, 22 nt, Human
aucaaagugguuuucugugcuu

SEQ ID NO: 1081583 - RNA, 22 nt, Human
cuggccagcugacagcagggcu

SEQ ID NO: 1081584 - RNA, 22 nt, Human
uucaacauuugaaaugaaugaa

SEQ ID NO: 1081585 - RNA, 22 nt, Human
ucaauuucucagaaauggucuu

SEQ ID NO: 1081586 - RNA, 22 nt, Human
ggagugaaucacuagaugcaga

SEQ ID NO: 1081587 - RNA, 22 nt, Human
cacagccuugagcgaggacaag

SEQ ID NO: 1081588 - RNA, 22 nt, Human
uguaucuuucuguacuuuuaug

SEQ ID NO: 1081589 - RNA, 22 nt, Human
caggaguggugugagggacucc

SEQ ID NO: 1081590 - RNA, 22 nt, Human
ugucccaguucccaggguugcu

SEQ ID NO: 1081591 - RNA, 21 nt, Human
ggccucagccaccuggcucug

SEQ ID NO: 1081592 - RNA, 22 nt, Human
cugugccaggcccagcugacuu

SEQ ID NO: 1081593 - RNA, 22 nt, Human
auucuaaagcuuguggagcuua

SEQ ID NO: 1081594 - RNA, 22 nt, Human
gcuguagguuuuuccaggaguu

SEQ ID NO: 1081595 - RNA, 22 nt, Human
aaaggugacugcagcagcuauu

SEQ ID NO: 1081596 - RNA, 22 nt, Human
cugggcucagaaccuuguuaag

SEQ ID NO: 1081597 - RNA, 22 nt, Human
cuuuuuaucucuuaaugauguu

SEQ ID NO: 1081598 - RNA, 22 nt, Human
guccucagggaauguggcgggu

SEQ ID NO: 1081599 - RNA, 22 nt, Human
aaacagugauguugaguguaaa

SEQ ID NO: 1081600 - RNA, 21 nt, Human
caggaaaagcggaagucuagc

SEQ ID NO: 1081601 - RNA, 22 nt, Human
acuuucaagaacuucuuuaaug

SEQ ID NO: 1081602 - RNA, 22 nt, Human
auggcagagggauugaacagcu

SEQ ID NO: 1081603 - RNA, 18 nt, Human
acuggcuuuagcaucaga

SEQ ID NO: 1081604 - RNA, 22 nt, Human
uauaaagaauccagaagagaca

SEQ ID NO: 1081605 - RNA, 22 nt, Human
ucccaguguggcaggccaugga

SEQ ID NO: 1081606 - RNA, 22 nt, Human
aaggcagguauugaugccacag

SEQ ID NO: 1081607 - RNA, 22 nt, Human
ccugggucacucaggcaggcgg

SEQ ID NO: 1081608 - RNA, 22 nt, Human
ccaaggcaacguuggugucagg

SEQ ID NO: 1081609 - RNA, 22 nt, Human
aaaucauguuggcacaauaaaa

SEQ ID NO: 1081610 - RNA, 22 nt, Human
ucugaaggucugagaaccagga

SEQ ID NO: 1081611 - RNA, 21 nt, Human
uucaaagagugggcauuguca

SEQ ID NO: 1081612 - RNA, 22 nt, Human
ggccuugagagccagugcaggc

SEQ ID NO: 1081613 - RNA, 22 nt, Human
gugaaaugaaucuggaaauauu

SEQ ID NO: 1081614 - RNA, 22 nt, Human
ugguuccucaagcgcuggcggc

SEQ ID NO: 1081615 - RNA, 23 nt, Human
uguugaaguaacuguuacauaga

SEQ ID NO: 1081616 - RNA, 22 nt, Human
caggccaaaauucaggcauucu

SEQ ID NO: 1081617 - RNA, 22 nt, Human
cagccagugguugaagaugcag

SEQ ID NO: 1081618 - RNA, 22 nt, Human
ccugccugcguccucugagggc

SEQ ID NO: 1081619 - RNA, 22 nt, Human
cugcccuggcagccuaccaugg

SEQ ID NO: 1081620 - RNA, 22 nt, Human
ucaaagcuuagauaauuucuuu

SEQ ID NO: 1081621 - RNA, 22 nt, Human
acuccuggggauccauuccuuu

SEQ ID NO: 1081622 - RNA, 22 nt, Human
cugggccucaugcacagagaug

SEQ ID NO: 1081623 - RNA, 22 nt, Human
agcauugccugccuauugcuaa

SEQ ID NO: 1081624 - RNA, 22 nt, Human
uggcagaauuucuagcagauuc

SEQ ID NO: 1081625 - RNA, 22 nt, Human
gaugugggguugagggaccagc

SEQ ID NO: 1081626 - RNA, 22 nt, Human
uguguucaguaugacauucaca

SEQ ID NO: 1081627 - RNA, 20 nt, Human
cuuccacacaagaagcacag

SEQ ID NO: 1081628 - RNA, 21 nt, Human
acccuggguucuccauacccu

SEQ ID NO: 1081629 - RNA, 22 nt, Human
uucauuuuuaccgcgugucaaa

SEQ ID NO: 1081630 - RNA, 22 nt, Human
gcagguggucacucauccccag

SEQ ID NO: 1081631 - RNA, 22 nt, Human
uugcuugaacccaggaagugga

SEQ ID NO: 1081632 - RNA, 22 nt, Human
ucauggaagaaagguuuguuuc

SEQ ID NO: 1081633 - RNA, 22 nt, Human
ugggccugggagggcagacgcu

SEQ ID NO: 1081634 - RNA, 22 nt, Human
ggcagcagggucuagauugaug

SEQ ID NO: 1081635 - RNA, 22 nt, Human
uccaacuaggcacacagcuggu

SEQ ID NO: 1081636 - RNA, 22 nt, Human
agaauaucguagcauauuaucu

SEQ ID NO: 1081637 - RNA, 21 nt, Human
uuaccaauggcuucucuuucc

SEQ ID NO: 1081638 - RNA, 22 nt, Human
cccuggagggacagcugcucua

SEQ ID NO: 1081639 - RNA, 22 nt, Human
ucuaggaguaaugagcuagcac

SEQ ID NO: 1081640 - RNA, 22 nt, Human
ugugccagccucuggcuguguc

SEQ ID NO: 1081641 - RNA, 22 nt, Human
auaaauucucugauguauagua

SEQ ID NO: 1081642 - RNA, 22 nt, Human
agggcucauugacauggaaaag

SEQ ID NO: 1081643 - RNA, 22 nt, Human
uuguacagaaacugcauuugga

SEQ ID NO: 1081644 - RNA, 22 nt, Human
gggugcccuggguaggucaguu

SEQ ID NO: 1081645 - RNA, 22 nt, Human
uuacugaugaucuggaggggcu

SEQ ID NO: 1081646 - RNA, 20 nt, Human
uacauucaaaacaaacucug

SEQ ID NO: 1081647 - RNA, 22 nt, Human
ugcagugugaccuguagcgagc

SEQ ID NO: 1081648 - RNA, 22 nt, Human
cagaaggcaaacaaaaggauuu

SEQ ID NO: 1081649 - RNA, 22 nt, Human
gauuucuuuaugaaguacagaa

SEQ ID NO: 1081650 - RNA, 22 nt, Human
ucugccuggauuuuggaaagcu

SEQ ID NO: 1081651 - RNA, 22 nt, Human
ugggaguguucuuggcuugcuu

SEQ ID NO: 1081652 - RNA, 21 nt, Human
uccagggaacuucucaggaau

SEQ ID NO: 1081653 - RNA, 22 nt, Human
ucugggcuuuuccaugccugug

SEQ ID NO: 1081654 - RNA, 22 nt, Human
guuauuaguaagacucgcacau

SEQ ID NO: 1081655 - RNA, 22 nt, Human
uucucugaguacguuucagugu

SEQ ID NO: 1081656 - RNA, 16 nt, Human
ggagagugucugcaaa

SEQ ID NO: 1081657 - RNA, 22 nt, Human
uugggggcagagggagcaucug

SEQ ID NO: 1081658 - RNA, 22 nt, Human
agcuuccuguugagagagggag

SEQ ID NO: 1081659 - RNA, 22 nt, Human
gagaagaaauagaaucacauuu

SEQ ID NO: 1081660 - RNA, 22 nt, Human
ccuccuucuggggccuucugcu

SEQ ID NO: 1081661 - RNA, 22 nt, Human
caguagcauguaauaaagacag

SEQ ID NO: 1081662 - RNA, 22 nt, Human
ggaggaaauccuuaguaaggca

SEQ ID NO: 1081663 - RNA, 22 nt, Human
uugagaaaaccaucguaagaau

SEQ ID NO: 1081664 - RNA, 22 nt, Human
ugaaaucauugggguugaauaa

SEQ ID NO: 1081665 - RNA, 22 nt, Human
ucucccaacauguggaggucag

SEQ ID NO: 1081666 - RNA, 22 nt, Human
uuugacaucuaagaauucuuac

SEQ ID NO: 1081667 - RNA, 22 nt, Human
cuggcccagagagcagagcuua

SEQ ID NO: 1081668 - RNA, 22 nt, Human
ugcuaagcucacauggcucuag

SEQ ID NO: 1081669 - RNA, 22 nt, Human
gagcagagacaguacaacuggc

SEQ ID NO: 1081670 - RNA, 22 nt, Human
gcucagggaaggccacgugaga

SEQ ID NO: 1081671 - RNA, 18 nt, Human
aauuuccauaugaauugc

SEQ ID NO: 1081672 - RNA, 22 nt, Human
aaugucuuuugauacaaguuac

SEQ ID NO: 1081673 - RNA, 22 nt, Human
ugcagagagauccucaggguuu

SEQ ID NO: 1081674 - RNA, 22 nt, Human
uuugaauaugugcuuguuaaau

SEQ ID NO: 1081675 - RNA, 22 nt, Human
acagugauauuuuuacucaaau

SEQ ID NO: 1081676 - RNA, 22 nt, Human
ccucugggagacugcuacugag

SEQ ID NO: 1081677 - RNA, 22 nt, Human
gggcucaguucugcuucaugcu

SEQ ID NO: 1081678 - RNA, 22 nt, Human
gaaaggcaguacagcugagccu

SEQ ID NO: 1081679 - RNA, 21 nt, Human
gcucuuggaaggggcucagcu

SEQ ID NO: 1081680 - RNA, 22 nt, Human
aaggcagcccuggcucagccug

SEQ ID NO: 1081681 - RNA, 22 nt, Human
agcugcugagccaggcugaugu

SEQ ID NO: 1081682 - RNA, 22 nt, Human
aucaaaauggaagaauuuggcu

SEQ ID NO: 1081683 - RNA, 22 nt, Human
ugcugaaugguaaagaaguaua

SEQ ID NO: 1081684 - RNA, 22 nt, Human
cugggcucagcaggccaaggcc

SEQ ID NO: 1081685 - RNA, 22 nt, Human
cacuguuuuauuccaacauagg

SEQ ID NO: 1081686 - RNA, 23 nt, Human
aacagcaggaugauagaggaggu

SEQ ID NO: 1081687 - RNA, 22 nt, Human
uauuuuaaagacugccagccua

SEQ ID NO: 1081688 - RNA, 18 nt, Human
ggaaaaggagugucuagc

SEQ ID NO: 1081689 - RNA, 22 nt, Human
agagguggagcucuuggcauca

SEQ ID NO: 1081690 - RNA, 22 nt, Human
ugggaggcagguaggugaugau

SEQ ID NO: 1081691 - RNA, 22 nt, Human
ugcuggcccuggcucagggaac

SEQ ID NO: 1081692 - RNA, 21 nt, Human
ugacugaggcuucuucacaca

SEQ ID NO: 1081693 - RNA, 22 nt, Human
ggggccagcaauguugaggaau

SEQ ID NO: 1081694 - RNA, 22 nt, Human
cucaggggaccuggcuccgagu

SEQ ID NO: 1081695 - RNA, 22 nt, Human
gcagcguggggacaggagcuca

SEQ ID NO: 1081696 - RNA, 22 nt, Human
aggcccagagagccaguuagug

SEQ ID NO: 1081697 - RNA, 22 nt, Human
uugguucaauacuaacuugaac

SEQ ID NO: 1081698 - RNA, 22 nt, Human
auugaaaguccuaucuaaggga

SEQ ID NO: 1081699 - RNA, 22 nt, Human
uggcugaggcacagcugccgcc

SEQ ID NO: 1081700 - RNA, 22 nt, Human
acacauauaccacuguaaauga

SEQ ID NO: 1081701 - RNA, 22 nt, Human
ccuguguggaaaccgcaugacg

SEQ ID NO: 1081702 - RNA, 22 nt, Human
gagucacaaagccuuucuuauu

SEQ ID NO: 1081703 - RNA, 21 nt, Human
ucucugggaggacuugugaga

SEQ ID NO: 1081704 - RNA, 23 nt, Human
ugcucugugaauaguuggugacu

SEQ ID NO: 1081705 - RNA, 22 nt, Human
aggcacugaaagguggccagag

SEQ ID NO: 1081706 - RNA, 19 nt, Human
gaaaacaugggugaggguc

SEQ ID NO: 1081707 - RNA, 22 nt, Human
ucagguggagaccuccuuggcc

SEQ ID NO: 1081708 - RNA, 22 nt, Human
cucagcagugacaagagaguau

SEQ ID NO: 1081709 - RNA, 23 nt, Human
ucugcagacgcuguucuauuguc

SEQ ID NO: 1081710 - RNA, 22 nt, Human
uuuauuaugauggacaccuucg

SEQ ID NO: 1081711 - RNA, 22 nt, Human
ccaggccuuccaguacgcagaa

SEQ ID NO: 1081712 - RNA, 22 nt, Human
aaggcaguaaaaucuaccuugc

SEQ ID NO: 1081713 - RNA, 22 nt, Human
uugccuugauucuucucaugug

SEQ ID NO: 1081714 - RNA, 22 nt, Human
uuggaaaacuuacacagagcug

SEQ ID NO: 1081715 - RNA, 22 nt, Human
gggcucagccccauugaaccag

SEQ ID NO: 1081716 - RNA, 22 nt, Human
ggugaagcucuaccauucccag

SEQ ID NO: 1081717 - RNA, 20 nt, Human
uggcuccugcgguggaacca

SEQ ID NO: 1081718 - RNA, 17 nt, Human
uuacagcagcaauagag

SEQ ID NO: 1081719 - RNA, 22 nt, Human
cugagcugggaguagagacucu

SEQ ID NO: 1081720 - RNA, 22 nt, Human
guauaucagacacucauaugua

SEQ ID NO: 1081721 - RNA, 22 nt, Human
ugccaggcccagcagggcggcc

SEQ ID NO: 1081722 - RNA, 22 nt, Human
gugucccagcagcacauuggcu

SEQ ID NO: 1081723 - RNA, 22 nt, Human
uuaagcuagugaagucccucaa

SEQ ID NO: 1081724 - RNA, 22 nt, Human
ucuacaaagaagaauuaauguc

SEQ ID NO: 1081725 - RNA, 22 nt, Human
uuugcaaaugcucugcagagcu

SEQ ID NO: 1081726 - RNA, 22 nt, Human
aggcuuguggauuggagcgagu

SEQ ID NO: 1081727 - RNA, 22 nt, Human
agacccagaaagcagcugcauu

SEQ ID NO: 1081728 - RNA, 20 nt, Human
uggcaucucucaauuguagg

SEQ ID NO: 1081729 - RNA, 22 nt, Human
gaaggacccacgaagucacugg

SEQ ID NO: 1081730 - RNA, 22 nt, Human
aagcugcccaagacugaagcau

SEQ ID NO: 1081731 - RNA, 22 nt, Human
cuucugggagagcuuuugcuuc

SEQ ID NO: 1081732 - RNA, 22 nt, Human
ucccaggaucugagggcagaga

SEQ ID NO: 1081733 - RNA, 22 nt, Human
ccucagaguaggucucagcugu

SEQ ID NO: 1081734 - RNA, 22 nt, Human
uuucacaacacaaucucguuaa

SEQ ID NO: 1081735 - RNA, 22 nt, Human
ccugggcucacagccaaggcuc

SEQ ID NO: 1081736 - RNA, 22 nt, Human
gcagagugagccgaggcugcuc

SEQ ID NO: 1081737 - RNA, 17 nt, Human
uccuggcucugccacug

SEQ ID NO: 1081738 - RNA, 22 nt, Human
cugacuuuagaacccaaaaagu

SEQ ID NO: 1081739 - RNA, 22 nt, Human
aacagugaguugaugacugaau

SEQ ID NO: 1081740 - RNA, 22 nt, Human
aucuggguucaccaugcuccug

SEQ ID NO: 1081741 - RNA, 19 nt, Human
aagcagcccuggcaagagc

SEQ ID NO: 1081742 - RNA, 22 nt, Human
ugaggcaggagguugagaacug

SEQ ID NO: 1081743 - RNA, 22 nt, Human
uuccaacuucccaucccugcug

SEQ ID NO: 1081744 - RNA, 22 nt, Human
auuaaagcuauccagucaugaa

SEQ ID NO: 1081745 - RNA, 22 nt, Human
ccagcucccugaagccuggucu

SEQ ID NO: 1081746 - RNA, 17 nt, Human
caacuucacaaacuguc

SEQ ID NO: 1081747 - RNA, 18 nt, Human
acccauuauauuuguagc

SEQ ID NO: 1081748 - RNA, 21 nt, Human
uggcauuuguacagggacuuu

SEQ ID NO: 1081749 - RNA, 22 nt, Human
cugggcaggagaggugguugga

SEQ ID NO: 1081750 - RNA, 22 nt, Human
ucuugacauuguuguuagcagg

SEQ ID NO: 1081751 - RNA, 22 nt, Human
agaaacaagguguagguugacc

SEQ ID NO: 1081752 - RNA, 22 nt, Human
gauggguggucucagacuugcc

SEQ ID NO: 1081753 - RNA, 22 nt, Human
uuucacauacaguguauaguag

SEQ ID NO: 1081754 - RNA, 22 nt, Human
aaagacauuagauuaacguaca

SEQ ID NO: 1081755 - RNA, 19 nt, Human
ucucucaauugcuucaauu

SEQ ID NO: 1081756 - RNA, 22 nt, Human
gaggugggguuuuguucuugaa

SEQ ID NO: 1081757 - RNA, 22 nt, Human
aacacaguuucucuaugagagu

SEQ ID NO: 1081758 - RNA, 22 nt, Human
accacugggcgggcagccugcu

SEQ ID NO: 1081759 - RNA, 22 nt, Human
uuccaguuaaggaagcuauucu

SEQ ID NO: 1081760 - RNA, 22 nt, Human
acccaggagguggaggcugcag

SEQ ID NO: 1081761 - RNA, 22 nt, Human
ugucaaauuuuuauugcaguau

SEQ ID NO: 1081762 - RNA, 22 nt, Human
ugcccugcuucucuugggacag

SEQ ID NO: 1081763 - RNA, 22 nt, Human
gccaggaaaaaggguggccaau

SEQ ID NO: 1081764 - RNA, 22 nt, Human
uucuugaaggggauauaaauag

SEQ ID NO: 1081765 - RNA, 22 nt, Human
ugggaaggauacguuacaagau

SEQ ID NO: 1081766 - RNA, 22 nt, Human
uguguggauucaucucaaagag

SEQ ID NO: 1081767 - RNA, 22 nt, Human
gagcucagccugaggccuggcu

SEQ ID NO: 1081768 - RNA, 22 nt, Human
uguaaaagguuguucuuucguu

SEQ ID NO: 1081769 - RNA, 22 nt, Human
ccucagaguuggccacgagagc

SEQ ID NO: 1081770 - RNA, 22 nt, Human
aagauuuucagcuaauggugca

SEQ ID NO: 1081771 - RNA, 22 nt, Human
ccagggcauguccaagacuuag

SEQ ID NO: 1081772 - RNA, 22 nt, Human
ucacauaaauuauacaauuuca

SEQ ID NO: 1081773 - RNA, 22 nt, Human
cagcuguugugauccauuuacg

SEQ ID NO: 1081774 - RNA, 20 nt, Human
acaaaauagguacuggguag

SEQ ID NO: 1081775 - RNA, 22 nt, Human
ggcaggcaguguggugugaaac

SEQ ID NO: 1081776 - RNA, 22 nt, Human
ccaggugggcgugucuucaccu

SEQ ID NO: 1081777 - RNA, 21 nt, Human
uucaaaguuugccuaaagauu

SEQ ID NO: 1081778 - RNA, 19 nt, Human
accaggcuuauggucagug

SEQ ID NO: 1081779 - RNA, 22 nt, Human
uaacagaaguuguucauugugg

SEQ ID NO: 1081780 - RNA, 22 nt, Human
acacucugcucugagcuucagg

SEQ ID NO: 1081781 - RNA, 22 nt, Human
agcuucuguucaucuuccaggc

SEQ ID NO: 1081782 - RNA, 22 nt, Human
ucccaaggcacagggcagggac

SEQ ID NO: 1081783 - RNA, 22 nt, Human
uauugcaaguggcauaaaauuu

SEQ ID NO: 1081784 - RNA, 21 nt, Human
gggcaggucucugaugucaac

SEQ ID NO: 1081785 - RNA, 22 nt, Human
ugggccuccugcccuggccuag

SEQ ID NO: 1081786 - RNA, 23 nt, Human
gugaagguuucugcauuuauugg

SEQ ID NO: 1081787 - RNA, 22 nt, Human
aagugucuuaacuccuuuuggg

SEQ ID NO: 1081788 - RNA, 22 nt, Human
agaaaacuugucacagcucuca

SEQ ID NO: 1081789 - RNA, 19 nt, Human
uuuguaaguccuuacugau

SEQ ID NO: 1081790 - RNA, 22 nt, Human
aaagguuugcauggaauuuacc

SEQ ID NO: 1081791 - RNA, 22 nt, Human
gcagcugccuauucagggcuug

SEQ ID NO: 1081792 - RNA, 21 nt, Human
gcaggggauagaaauggucug

SEQ ID NO: 1081793 - RNA, 22 nt, Human
uccaugccaggcagucgaugca

SEQ ID NO: 1081794 - RNA, 22 nt, Human
ugggccugaaggagcugcgccc

SEQ ID NO: 1081795 - RNA, 22 nt, Human
gccucucucuacccaguaugau

SEQ ID NO: 1081796 - RNA, 22 nt, Human
ucuguugcaaugugcaugguga

SEQ ID NO: 1081797 - RNA, 22 nt, Human
ccaggagcaacuugaaggcaag

SEQ ID NO: 1081798 - RNA, 22 nt, Human
uggagcauauucuggagcuugg

SEQ ID NO: 1081799 - RNA, 22 nt, Human
augauacaucuucaugucagug

SEQ ID NO: 1081800 - RNA, 20 nt, Human
ggcucugcuugugagcagcc

SEQ ID NO: 1081801 - RNA, 22 nt, Human
auggcaagcaagcugaagagau

SEQ ID NO: 1081802 - RNA, 22 nt, Human
cugcugugcaacauugcaccua

SEQ ID NO: 1081803 - RNA, 22 nt, Human
auuuccaccggcucaggaaguu

SEQ ID NO: 1081804 - RNA, 22 nt, Human
augcuguguggucaaguuaauu

SEQ ID NO: 1081805 - RNA, 22 nt, Human
acauauuaacugcacuacacua

SEQ ID NO: 1081806 - RNA, 22 nt, Human
gccuucugugcuccuggccuuu

SEQ ID NO: 1081807 - RNA, 22 nt, Human
cugagaggcacaaggcauuucg

SEQ ID NO: 1081808 - RNA, 22 nt, Human
uaggcagaaaggaaggcaaguu

SEQ ID NO: 1081809 - RNA, 22 nt, Human
uauauuaacuugugauccugga

SEQ ID NO: 1081810 - RNA, 22 nt, Human
agguaaggcuguaagcuaagcc

SEQ ID NO: 1081811 - RNA, 22 nt, Human
cccuggaagguucucuggcuca

SEQ ID NO: 1081812 - RNA, 22 nt, Human
ucagggcagaauccaaagaauu

SEQ ID NO: 1081813 - RNA, 22 nt, Human
gcucugcuggagggaaagagaa

SEQ ID NO: 1081814 - RNA, 22 nt, Human
gccuggaguuguggugaagcca

SEQ ID NO: 1081815 - RNA, 22 nt, Human
ccagguguggggaggacucaca

SEQ ID NO: 1081816 - RNA, 22 nt, Human
ccucagagguguggcaucucug

SEQ ID NO: 1081817 - RNA, 22 nt, Human
gcagcguggggcugagucagcu

SEQ ID NO: 1081818 - RNA, 22 nt, Human
ggcagcuggggcagugcccugu

SEQ ID NO: 1081819 - RNA, 22 nt, Human
cccauggggacaccaugaagga

SEQ ID NO: 1081820 - RNA, 22 nt, Human
aauuuuauuaacuggauguagc

SEQ ID NO: 1081821 - RNA, 22 nt, Human
uucauauaaauggaaucagaau

SEQ ID NO: 1081822 - RNA, 22 nt, Human
aagacaauccuggacagucagc

SEQ ID NO: 1081823 - RNA, 22 nt, Human
acaguacaccacuguguacagu

SEQ ID NO: 1081824 - RNA, 22 nt, Human
ugcauugcaguuaacucaguau

SEQ ID NO: 1081825 - RNA, 19 nt, Human
ggcugucucggcccagcca

SEQ ID NO: 1081826 - RNA, 22 nt, Human
ugggcagacugagcccuguccc

SEQ ID NO: 1081827 - RNA, 22 nt, Human
uccuucagauuccugcuucugg

SEQ ID NO: 1081828 - RNA, 22 nt, Human
cuuucauccgcagaugagccuc

SEQ ID NO: 1081829 - RNA, 22 nt, Human
ccugcuguaaugugucuuuauu

SEQ ID NO: 1081830 - RNA, 22 nt, Human
guucacagcuuguguuuucucu

SEQ ID NO: 1081831 - RNA, 22 nt, Human
ugggcuguccagcaccugggcu

SEQ ID NO: 1081832 - RNA, 22 nt, Human
auuuccugcaaggaguggguuu

SEQ ID NO: 1081833 - RNA, 22 nt, Human
uuccauaaaggugauaguauac

SEQ ID NO: 1081834 - RNA, 22 nt, Human
cagucccaggguugguucagcu

SEQ ID NO: 1081835 - RNA, 22 nt, Human
uagaaagaucuguaggcaagag

SEQ ID NO: 1081836 - RNA, 22 nt, Human
uggcuggcuuguucacugacug

SEQ ID NO: 1081837 - RNA, 22 nt, Human
uuucuuuugcugagaggggcac

SEQ ID NO: 1081838 - RNA, 22 nt, Human
ucugggcacugcugagccugua

SEQ ID NO: 1081839 - RNA, 22 nt, Human
ccugccugcagaaaguaucucc

SEQ ID NO: 1081840 - RNA, 22 nt, Human
uugcauuguaggauguuagaag

SEQ ID NO: 1081841 - RNA, 22 nt, Human
guggccugucagaagccguggg

SEQ ID NO: 1081842 - RNA, 22 nt, Human
aguaggaggcgggagcaugaag

SEQ ID NO: 1081843 - RNA, 22 nt, Human
ucagugaaccuucuguggcagg

SEQ ID NO: 1081844 - RNA, 22 nt, Human
uaaaaugccagaccaguucacg

SEQ ID NO: 1081845 - RNA, 22 nt, Human
gacauuuauuggauuuuacgag

SEQ ID NO: 1081846 - RNA, 22 nt, Human
auuucuuccauugccucuucaa

SEQ ID NO: 1081847 - RNA, 22 nt, Human
acucuucacuuccccugccagc

SEQ ID NO: 1081848 - RNA, 22 nt, Human
aaaugauugucaaaguucuguu

SEQ ID NO: 1081849 - RNA, 22 nt, Human
uuucacagcagugugcugcuuu

SEQ ID NO: 1081850 - RNA, 22 nt, Human
agugauuaauuguaaaaauucu

SEQ ID NO: 1081851 - RNA, 22 nt, Human
gaaguuaguguaaugcagggug

SEQ ID NO: 1081852 - RNA, 22 nt, Human
gucaggaugggcagccaaacua

SEQ ID NO: 1081853 - RNA, 22 nt, Human
ugaagauuuucggguacuugau

SEQ ID NO: 1081854 - RNA, 22 nt, Human
aucuuucaggccuaguguuuaa

SEQ ID NO: 1081855 - RNA, 22 nt, Human
guuccauaucacagcagacgaa

SEQ ID NO: 1081856 - RNA, 19 nt, Human
aggcugugagggaggacuc

SEQ ID NO: 1081857 - RNA, 20 nt, Human
ucuuacaaucguuacaucca

SEQ ID NO: 1081858 - RNA, 22 nt, Human
uagagcuguaucaaagagccuu

SEQ ID NO: 1081859 - RNA, 22 nt, Human
agcacacaggacuugauucaug

SEQ ID NO: 1081860 - RNA, 22 nt, Human
ugaggcaggaaguuauauaaug

SEQ ID NO: 1081861 - RNA, 22 nt, Human
cuucuggaaacuuuuccaauuu

SEQ ID NO: 1081862 - RNA, 22 nt, Human
gagguuagaggucagugcaguc

SEQ ID NO: 1081863 - RNA, 23 nt, Human
uggccugcagaguuucugcuggg

SEQ ID NO: 1081864 - RNA, 22 nt, Human
uuucuacaguacugauuucaua

SEQ ID NO: 1081865 - RNA, 22 nt, Human
ccagagcuucggggcggcugua

SEQ ID NO: 1081866 - RNA, 22 nt, Human
agaggccuaauugcuacccuuu

SEQ ID NO: 1081867 - RNA, 22 nt, Human
gugcaugugcauccauguguac

SEQ ID NO: 1081868 - RNA, 22 nt, Human
agggagccagaguugggagcuc

SEQ ID NO: 1081869 - RNA, 22 nt, Human
ccaggagcaggagcugcagcug

SEQ ID NO: 1081870 - RNA, 22 nt, Human
cucaggaaccgcggcagcagcc

SEQ ID NO: 1081871 - RNA, 20 nt, Human
uauuucacucuccagauggc

SEQ ID NO: 1081872 - RNA, 21 nt, Human
uaggugggagccccaguaugc

SEQ ID NO: 1081873 - RNA, 22 nt, Human
augcaguacagauaauucuaca

SEQ ID NO: 1081874 - RNA, 22 nt, Human
gcuucaugggugugcaaccugu

SEQ ID NO: 1081875 - RNA, 22 nt, Human
ggaggggagauguuugggcuca

SEQ ID NO: 1081876 - RNA, 22 nt, Human
gccugaagaacagcugugagga

SEQ ID NO: 1081877 - RNA, 22 nt, Human
gcuggccugcugggcaccaccg

SEQ ID NO: 1081878 - RNA, 22 nt, Human
gccagggcugugcagguuuguu

SEQ ID NO: 1081879 - RNA, 22 nt, Human
ggagugucagaaacaguguccu

SEQ ID NO: 1081880 - RNA, 22 nt, Human
ccagagucauuuugagucauaa

SEQ ID NO: 1081881 - RNA, 22 nt, Human
ccucucagcgauuccucuugga

SEQ ID NO: 1081882 - RNA, 22 nt, Human
uuucacauucagauauagacuu

SEQ ID NO: 1081883 - RNA, 20 nt, Human
uuugagaccagucugcccaa

SEQ ID NO: 1081884 - RNA, 19 nt, Human
auagucuuuccaauuauac

SEQ ID NO: 1081885 - RNA, 22 nt, Human
acacuguuccacacuaagaagg

SEQ ID NO: 1081886 - RNA, 21 nt, Human
acagcagggcuggcaugacag

SEQ ID NO: 1081887 - RNA, 22 nt, Human
cagugccacaggaauggccaau

SEQ ID NO: 1081888 - RNA, 18 nt, Human
gaaguuaguggugugcua

SEQ ID NO: 1081889 - RNA, 22 nt, Human
ugaguagcggcuauguguaacu

SEQ ID NO: 1081890 - RNA, 22 nt, Human
ccugcuggccaguggagggcug

SEQ ID NO: 1081891 - RNA, 22 nt, Human
uucaaagcaauagaaagaguga

SEQ ID NO: 1081892 - RNA, 22 nt, Human
ggcucaccauggccucccugcu

SEQ ID NO: 1081893 - RNA, 22 nt, Human
cucagggcuugaguguccagga

SEQ ID NO: 1081894 - RNA, 22 nt, Human
aaaucagagucugauuuuaagg

SEQ ID NO: 1081895 - RNA, 22 nt, Human
uguuccaauaaggaguugaaau

SEQ ID NO: 1081896 - RNA, 22 nt, Human
agugcaaagccgagguuucuug

SEQ ID NO: 1081897 - RNA, 22 nt, Human
gccagggagucugggccacaga

SEQ ID NO: 1081898 - RNA, 22 nt, Human
ccagcuggugacauccccaacc

SEQ ID NO: 1081899 - RNA, 23 nt, Human
gugcucugcggucugcuagucug

SEQ ID NO: 1081900 - RNA, 22 nt, Human
acagcagcuugcgugucugguc

SEQ ID NO: 1081901 - RNA, 22 nt, Human
acaaggauuuguuccuaauguu

SEQ ID NO: 1081902 - RNA, 22 nt, Human
ugugucccuuggaaccucagcu

SEQ ID NO: 1081903 - RNA, 22 nt, Human
ucuuacaccauucaaauauuuu

SEQ ID NO: 1081904 - RNA, 22 nt, Human
agcugucagugcugugccugua

SEQ ID NO: 1081905 - RNA, 21 nt, Human
cccucaggaaacagaaugcac

SEQ ID NO: 1081906 - RNA, 22 nt, Human
ugaagcagagugaaggugaauu

SEQ ID NO: 1081907 - RNA, 19 nt, Human
agccuggagggcuggucac

SEQ ID NO: 1081908 - RNA, 22 nt, Human
uucuguguggguagcuccuguu

SEQ ID NO: 1081909 - RNA, 22 nt, Human
ugccugaguuuaacccucagag

SEQ ID NO: 1081910 - RNA, 22 nt, Human
ccagggcagugggagaaggugc

SEQ ID NO: 1081911 - RNA, 23 nt, Human
uguaugaauaugccacaguuuaa

SEQ ID NO: 1081912 - RNA, 22 nt, Human
uuacuuuggauggucaagaaag

SEQ ID NO: 1081913 - RNA, 22 nt, Human
auuguacuuuuauuacauguag

SEQ ID NO: 1081914 - RNA, 22 nt, Human
ucacagaagcaucauacccgga

SEQ ID NO: 1081915 - RNA, 22 nt, Human
gcucugcuguguuuguucagca

SEQ ID NO: 1081916 - RNA, 22 nt, Human
uaucuguuaugggcugaauugc

SEQ ID NO: 1081917 - RNA, 22 nt, Human
uccuccaggucuaggguggcuu

SEQ ID NO: 1081918 - RNA, 22 nt, Human
aggcacugugcugaugucuuau

SEQ ID NO: 1081919 - RNA, 19 nt, Human
acauuuaaauucagaucuc

SEQ ID NO: 1081920 - RNA, 22 nt, Human
aucuccaggauuuucacacuca

SEQ ID NO: 1081921 - RNA, 22 nt, Human
uggcucaggccacuucuuuuau

SEQ ID NO: 1081922 - RNA, 22 nt, Human
uugggcugaacccugcagcuga

SEQ ID NO: 1081923 - RNA, 22 nt, Human
uacugauaagaguuguaggagu

SEQ ID NO: 1081924 - RNA, 22 nt, Human
ucaucaguccuuuucauuauga

SEQ ID NO: 1081925 - RNA, 22 nt, Human
caguguuuagcacagugcuugg

SEQ ID NO: 1081926 - RNA, 22 nt, Human
uucuuaaguauuucagagacug

SEQ ID NO: 1081927 - RNA, 22 nt, Human
uaauguuugggaaggugcuuug

SEQ ID NO: 1081928 - RNA, 22 nt, Human
cuuugaagagauuacugugcuc

SEQ ID NO: 1081929 - RNA, 22 nt, Human
uuucacagguauccacgggucu

SEQ ID NO: 1081930 - RNA, 23 nt, Human
uggcuggcagaaacugaagcaug

SEQ ID NO: 1081931 - RNA, 22 nt, Human
aagcagcuuuugaagagugagg

SEQ ID NO: 1081932 - RNA, 22 nt, Human
acccaggggcagccuugcugug

SEQ ID NO: 1081933 - RNA, 18 nt, Human
gggcacuggggacuggag

SEQ ID NO: 1081934 - RNA, 22 nt, Human
cagguaggauggaagggcucaa

SEQ ID NO: 1081935 - RNA, 22 nt, Human
uggaacacuuuguugaaaugca

SEQ ID NO: 1081936 - RNA, 22 nt, Human
gcauuucauguagauugagaac

SEQ ID NO: 1081937 - RNA, 22 nt, Human
gccuccuguuaugccaugugcc

SEQ ID NO: 1081938 - RNA, 22 nt, Human
uuagauacauucucauuuguuu

SEQ ID NO: 1081939 - RNA, 22 nt, Human
gcugccugccuaguuccacagu

SEQ ID NO: 1081940 - RNA, 22 nt, Human
ggaacacuggcucaauuauauc

SEQ ID NO: 1081941 - RNA, 22 nt, Human
uggaggaaaauuacuggggucu

SEQ ID NO: 1081942 - RNA, 22 nt, Human
uccuccuucgggacugcuugac

SEQ ID NO: 1081943 - RNA, 22 nt, Human
agggcuggccacaugauuuggu

SEQ ID NO: 1081944 - RNA, 17 nt, Human
aggaagggcaaguuucu

SEQ ID NO: 1081945 - RNA, 22 nt, Human
uggugagaccuuguuccuuaug

SEQ ID NO: 1081946 - RNA, 22 nt, Human
ucacagggcauuauggcuccag

SEQ ID NO: 1081947 - RNA, 22 nt, Human
gccauccucugagcacuaggca

SEQ ID NO: 1081948 - RNA, 22 nt, Human
ucuccuggaagaauaccacacu

SEQ ID NO: 1081949 - RNA, 21 nt, Human
gcagccacugccuucaacaau

SEQ ID NO: 1081950 - RNA, 18 nt, Human
cggcagagugcuucuagc

SEQ ID NO: 1081951 - RNA, 22 nt, Human
gacuuucucuccucccaggugu

SEQ ID NO: 1081952 - RNA, 18 nt, Human
cuguucuagaacuccugu

SEQ ID NO: 1081953 - RNA, 22 nt, Human
ccagcucuuuuggcugagugag

SEQ ID NO: 1081954 - RNA, 22 nt, Human
cugccugugccaaugcuccuuu

SEQ ID NO: 1081955 - RNA, 22 nt, Human
guucuucaucauuaacacucug

SEQ ID NO: 1081956 - RNA, 22 nt, Human
ccuguggcacaugcagggauuc

SEQ ID NO: 1081957 - RNA, 22 nt, Human
uuuucuaacaucuaguaauuug

SEQ ID NO: 1081958 - RNA, 22 nt, Human
aaaguuagaaugauaucaacga

SEQ ID NO: 1081959 - RNA, 21 nt, Human
agucuguuaggaugacucuga

SEQ ID NO: 1081960 - RNA, 20 nt, Human
uguaaauaggcauuguaguu

SEQ ID NO: 1081961 - RNA, 21 nt, Human
uuaagagcuuagcaguaggcc

SEQ ID NO: 1081962 - RNA, 22 nt, Human
aagcagaauuuaauagaaaggu

SEQ ID NO: 1081963 - RNA, 22 nt, Human
ccugcucagccccagcucaccc

SEQ ID NO: 1081964 - RNA, 19 nt, Human
agggaaggauucugucauu

SEQ ID NO: 1081965 - RNA, 22 nt, Human
ucacacagauugguagagcuga

SEQ ID NO: 1081966 - RNA, 22 nt, Human
agccaacuuggaaagucagauu

SEQ ID NO: 1081967 - RNA, 22 nt, Human
uaccaaguguauuaugcuuugu

SEQ ID NO: 1081968 - RNA, 22 nt, Human
aucaaauacaaagggcauaagg

SEQ ID NO: 1081969 - RNA, 22 nt, Human
auuccaaacagugcugcagacu

SEQ ID NO: 1081970 - RNA, 22 nt, Human
aggccugaggaccuucuggagg

SEQ ID NO: 1081971 - RNA, 22 nt, Human
acaaaggcagagaauucaacau

SEQ ID NO: 1081972 - RNA, 19 nt, Human
ggaaggagagaaaugcaug

SEQ ID NO: 1081973 - RNA, 22 nt, Human
ggcuucaccgcgggguugcagg

SEQ ID NO: 1081974 - RNA, 21 nt, Human
aagacagaaaagccuauuuuc

SEQ ID NO: 1081975 - RNA, 22 nt, Human
uaguccagccuuggguguagcc

SEQ ID NO: 1081976 - RNA, 18 nt, Human
cucucuggucuggauccc

SEQ ID NO: 1081977 - RNA, 22 nt, Human
ucauuuuuugcauaccuguguc

SEQ ID NO: 1081978 - RNA, 20 nt, Human
aguagcagugugacauugac

SEQ ID NO: 1081979 - RNA, 22 nt, Human
uaugagaucccuuuuccuagag

SEQ ID NO: 1081980 - RNA, 22 nt, Human
aaauaacuugguuucaucagag

SEQ ID NO: 1081981 - RNA, 22 nt, Human
ugcaaagaagccacagucccag

SEQ ID NO: 1081982 - RNA, 22 nt, Human
ucugggcagccaugugccuggc

SEQ ID NO: 1081983 - RNA, 21 nt, Human
ugcccuggggcucuucccuca

SEQ ID NO: 1081984 - RNA, 22 nt, Human
ccaaaguuuuuauaguuagcau

SEQ ID NO: 1081985 - RNA, 22 nt, Human
cccagcacuuugaauaugucac

SEQ ID NO: 1081986 - RNA, 22 nt, Human
ugaggcucaagaaagauuuguu

SEQ ID NO: 1081987 - RNA, 22 nt, Human
gcagagugauggaaugugggug

SEQ ID NO: 1081988 - RNA, 22 nt, Human
uccuugaagagugggcggucga

SEQ ID NO: 1081989 - RNA, 18 nt, Human
uggugaaggguggaggag

SEQ ID NO: 1081990 - RNA, 22 nt, Human
ucagggcauucaagaggccugg

SEQ ID NO: 1081991 - RNA, 22 nt, Human
gcucccaggaugaggagccagg

SEQ ID NO: 1081992 - RNA, 22 nt, Human
gaggcuguuagggccugaggua

SEQ ID NO: 1081993 - RNA, 21 nt, Human
ugggcgcuugaccucugcacu

SEQ ID NO: 1081994 - RNA, 22 nt, Human
cugcccugugaggguccuuggg

SEQ ID NO: 1081995 - RNA, 22 nt, Human
cccccaaaguuugcacggauaa

SEQ ID NO: 1081996 - RNA, 22 nt, Human
uagagcagauagugaaacagaa

SEQ ID NO: 1081997 - RNA, 17 nt, Human
ucugcagaggcaaaccu

SEQ ID NO: 1081998 - RNA, 22 nt, Human
uuaaggcugauaagucagauau

SEQ ID NO: 1081999 - RNA, 22 nt, Human
uuauauaucuugauuuguucca

SEQ ID NO: 1082000 - RNA, 22 nt, Human
ucacauuuguuccucugcacuu

SEQ ID NO: 1082001 - RNA, 22 nt, Human
uacaagcucacaaauuuuuaag

SEQ ID NO: 1082002 - RNA, 22 nt, Human
aaggguggauuucugagcucua

SEQ ID NO: 1082003 - RNA, 22 nt, Human
cagagccagcccacuguucccg

SEQ ID NO: 1082004 - RNA, 22 nt, Human
ucucacuggguauaaaugagua

SEQ ID NO: 1082005 - RNA, 20 nt, Human
gccuggaggcaaugggaaga

SEQ ID NO: 1082006 - RNA, 19 nt, Human
ugggcagcucccucugucc

SEQ ID NO: 1082007 - RNA, 22 nt, Human
gguuggaggugggaauagcuag

SEQ ID NO: 1082008 - RNA, 22 nt, Human
cucaagaaucuagggaggauuc

SEQ ID NO: 1082009 - RNA, 19 nt, Human
uucaggauugacccuacug

SEQ ID NO: 1082010 - RNA, 22 nt, Human
cuggaguuagaguagacacuga

SEQ ID NO: 1082011 - RNA, 22 nt, Human
auuacagagggucggucguuuu

SEQ ID NO: 1082012 - RNA, 22 nt, Human
uuagaaaaaacgucuucuagug

SEQ ID NO: 1082013 - RNA, 23 nt, Human
ucaggauauugugugccaaggug

SEQ ID NO: 1082014 - RNA, 22 nt, Human
uggcagagcaaaaagauagaau

SEQ ID NO: 1082015 - RNA, 22 nt, Human
uuccucuuucucugugcuaugu

SEQ ID NO: 1082016 - RNA, 22 nt, Human
auuuguucagcauugaauuugg

SEQ ID NO: 1082017 - RNA, 22 nt, Human
acaugcuagguacagaucuaaa

SEQ ID NO: 1082018 - RNA, 18 nt, Human
uccucucuuuccccaggg

SEQ ID NO: 1082019 - RNA, 18 nt, Human
agguacacauacuucuca

SEQ ID NO: 1082020 - RNA, 22 nt, Human
aucuggagaucagcugguggca

SEQ ID NO: 1082021 - RNA, 22 nt, Human
uguaaagauuagauuacaugaa

SEQ ID NO: 1082022 - RNA, 22 nt, Human
aggcuuaaaugcucauaucagu

SEQ ID NO: 1082023 - RNA, 22 nt, Human
caggaaccauuuucucuuuaua

SEQ ID NO: 1082024 - RNA, 22 nt, Human
auuccaaacgccucgcggacuu

SEQ ID NO: 1082025 - RNA, 22 nt, Human
agggccagcccauaaugccaaa

SEQ ID NO: 1082026 - RNA, 22 nt, Human
gccaggcuggcaaaaggaaacc

SEQ ID NO: 1082027 - RNA, 22 nt, Human
cacaaaaucuuucucgauuauu

SEQ ID NO: 1082028 - RNA, 22 nt, Human
cuugcugucuugcauuuagagc

SEQ ID NO: 1082029 - RNA, 22 nt, Human
aguaaaauuucugcugaggaga

SEQ ID NO: 1082030 - RNA, 22 nt, Human
ugcaggugugggcaggggagca

SEQ ID NO: 1082031 - RNA, 22 nt, Human
aggcugucaucuuugcaggcag

SEQ ID NO: 1082032 - RNA, 22 nt, Human
gggccccaaaaugccaggcucu

SEQ ID NO: 1082033 - RNA, 22 nt, Human
ucauacaacuaagaguuucaga

SEQ ID NO: 1082034 - RNA, 22 nt, Human
aacauuucagcaaauaagaaca

SEQ ID NO: 1082035 - RNA, 22 nt, Human
aaauucagauggcuuucuuuuc

SEQ ID NO: 1082036 - RNA, 22 nt, Human
ugcugugguucccagaguggau

SEQ ID NO: 1082037 - RNA, 23 nt, Human
uugaggcaaacauguaaguagga

SEQ ID NO: 1082038 - RNA, 22 nt, Human
ggugcccugccaggaugugcca

SEQ ID NO: 1082039 - RNA, 23 nt, Human
agaaaagcuuggacacauggccu

SEQ ID NO: 1082040 - RNA, 22 nt, Human
gaggccugucgcuaggccucug

SEQ ID NO: 1082041 - RNA, 22 nt, Human
caggaacacaaugagucucaaa

SEQ ID NO: 1082042 - RNA, 22 nt, Human
cuggcucccagcuuucagggag

SEQ ID NO: 1082043 - RNA, 22 nt, Human
gagcccaggaaguggaggcuga

SEQ ID NO: 1082044 - RNA, 22 nt, Human
gagagcugcaagguagggcggg

SEQ ID NO: 1082045 - RNA, 22 nt, Human
aguuuuguaauucucaaaaaua

SEQ ID NO: 1082046 - RNA, 21 nt, Human
ccugggagaucagcugccuuc

SEQ ID NO: 1082047 - RNA, 21 nt, Human
uuucuaagugcuugguuuggg

SEQ ID NO: 1082048 - RNA, 22 nt, Human
aggcacuguacuagguacaggg

SEQ ID NO: 1082049 - RNA, 22 nt, Human
caguauucaucuaaggagcuug

SEQ ID NO: 1082050 - RNA, 19 nt, Human
aacaucuuuccaguagagg

SEQ ID NO: 1082051 - RNA, 23 nt, Human
ucucaggacacacaugucuauca

SEQ ID NO: 1082052 - RNA, 22 nt, Human
uugagaagaauguguugaguuu

SEQ ID NO: 1082053 - RNA, 22 nt, Human
cccagcuccuuggaugggcagg

SEQ ID NO: 1082054 - RNA, 22 nt, Human
gcuggcagugugaaugacaagc

SEQ ID NO: 1082055 - RNA, 22 nt, Human
uguacagucaugcuuucuguuc

SEQ ID NO: 1082056 - RNA, 22 nt, Human
caggcccaugagggcagccaca

SEQ ID NO: 1082057 - RNA, 22 nt, Human
cccuggugguacggcacuggca

SEQ ID NO: 1082058 - RNA, 22 nt, Human
ccaaagugcugggguuacaggc

SEQ ID NO: 1082059 - RNA, 22 nt, Human
auuaaaauuccaagguaugcca

SEQ ID NO: 1082060 - RNA, 22 nt, Human
ugacuuuagacuuagucaaguu

SEQ ID NO: 1082061 - RNA, 22 nt, Human
gugcauuugugcaugcacaugu

SEQ ID NO: 1082062 - RNA, 22 nt, Human
gcacugcagccucagauggugg

SEQ ID NO: 1082063 - RNA, 22 nt, Human
gauugaaaggucuuuaaauugg

SEQ ID NO: 1082064 - RNA, 22 nt, Human
gacccucaaacaauuacacugc

SEQ ID NO: 1082065 - RNA, 17 nt, Human
cccugccaccaggaagc

SEQ ID NO: 1082066 - RNA, 22 nt, Human
gcugggagcaaguacucaucuu

SEQ ID NO: 1082067 - RNA, 22 nt, Human
gcuuugcauuguuuaaucagga

SEQ ID NO: 1082068 - RNA, 22 nt, Human
agggaggaucugcuccuugucu

SEQ ID NO: 1082069 - RNA, 22 nt, Human
gccuucagcggccgcucgcugc

SEQ ID NO: 1082070 - RNA, 22 nt, Human
ucugucugcaccuaagcacagu

SEQ ID NO: 1082071 - RNA, 22 nt, Human
ugcacacaaaugugaacgugcc

SEQ ID NO: 1082072 - RNA, 22 nt, Human
aaugcuuucuuauaaccacugc

SEQ ID NO: 1082073 - RNA, 22 nt, Human
uaaggcaccuguccaggcuggg

SEQ ID NO: 1082074 - RNA, 19 nt, Human
ugaguggagugcaaugaag

SEQ ID NO: 1082075 - RNA, 22 nt, Human
cagagcagugaggaguugugua

SEQ ID NO: 1082076 - RNA, 22 nt, Human
cucaccaggaacagcugcggag

SEQ ID NO: 1082077 - RNA, 22 nt, Human
gcagcaaucuucacagugucau

SEQ ID NO: 1082078 - RNA, 22 nt, Human
auuuucaugacuaccuuaaaua

SEQ ID NO: 1082079 - RNA, 22 nt, Human
gcagcccagagcgcaggacccc

SEQ ID NO: 1082080 - RNA, 22 nt, Human
acaaugcaccagcaucuucacc

SEQ ID NO: 1082081 - RNA, 22 nt, Human
aauacuugugaauucaaagucu

SEQ ID NO: 1082082 - RNA, 22 nt, Human
agaauuuuaucuaaagggagua

SEQ ID NO: 1082083 - RNA, 22 nt, Human
aacagugauaucaagacagaca

SEQ ID NO: 1082084 - RNA, 23 nt, Human
aggaagagagagugccucuuucu

SEQ ID NO: 1082085 - RNA, 22 nt, Human
cuggagccuagguugaccuggg

SEQ ID NO: 1082086 - RNA, 22 nt, Human
gagagggccagggugagaacua

SEQ ID NO: 1082087 - RNA, 22 nt, Human
ucaauaauggcaggauaaauuu

SEQ ID NO: 1082088 - RNA, 21 nt, Human
cccuugccugcacuccucggc

SEQ ID NO: 1082089 - RNA, 21 nt, Human
gcuugguuuugguuacuugcc

SEQ ID NO: 1082090 - RNA, 22 nt, Human
cucagaagaacaaaggcucuac

SEQ ID NO: 1082091 - RNA, 22 nt, Human
cugaagaauagcaggugggcac

SEQ ID NO: 1082092 - RNA, 22 nt, Human
ggucccugcccaccugggagcu

SEQ ID NO: 1082093 - RNA, 22 nt, Human
augcaaaaguaauugcaauuuu

SEQ ID NO: 1082094 - RNA, 22 nt, Human
uagcugaugaauaauuauucuu

SEQ ID NO: 1082095 - RNA, 22 nt, Human
ucuuuacauaguguggacuacu

SEQ ID NO: 1082096 - RNA, 22 nt, Human
agcuguguagggaaucagagaa

SEQ ID NO: 1082097 - RNA, 22 nt, Human
gcuuuccuggcccugucccugc

SEQ ID NO: 1082098 - RNA, 22 nt, Human
guucacagucuacauaguaaag

SEQ ID NO: 1082099 - RNA, 22 nt, Human
ucuuugucugaacagggacauu

SEQ ID NO: 1082100 - RNA, 22 nt, Human
cucaguagaaaauacauggacu

SEQ ID NO: 1082101 - RNA, 22 nt, Human
uuguaugagcuccaggaacuca

SEQ ID NO: 1082102 - RNA, 21 nt, Human
uucaggguuucacaauacuaa

SEQ ID NO: 1082103 - RNA, 22 nt, Human
aaugaacaggugaaugucagau

SEQ ID NO: 1082104 - RNA, 22 nt, Human
agagcagaggcauggccguggg

SEQ ID NO: 1082105 - RNA, 22 nt, Human
gguaacacaggugcaguuuuaa

SEQ ID NO: 1082106 - RNA, 22 nt, Human
agggccucugacgcccccagcc

SEQ ID NO: 1082107 - RNA, 18 nt, Human
ugucucaggcugaaacag

SEQ ID NO: 1082108 - RNA, 22 nt, Human
ggaaggaauuccaagacuaaag

SEQ ID NO: 1082109 - RNA, 22 nt, Human
aguaaaaucuuaagcacagugg

SEQ ID NO: 1082110 - RNA, 22 nt, Human
aguggcaguggcugggcagagc

SEQ ID NO: 1082111 - RNA, 22 nt, Human
guguuuccaguucagaaagcaa

SEQ ID NO: 1082112 - RNA, 22 nt, Human
ucuggcucggauuugucuagca

SEQ ID NO: 1082113 - RNA, 22 nt, Human
gcacugugcuagaagccagggg

SEQ ID NO: 1082114 - RNA, 22 nt, Human
gccucagccggcggacgccagg

SEQ ID NO: 1082115 - RNA, 22 nt, Human
uauacagauaucuaagauguaa

SEQ ID NO: 1082116 - RNA, 22 nt, Human
uggcugaguucuccaggaguag

SEQ ID NO: 1082117 - RNA, 22 nt, Human
aacauacauauuucagugucca

SEQ ID NO: 1082118 - RNA, 22 nt, Human
agucucagcaagcauggcuagu

SEQ ID NO: 1082119 - RNA, 19 nt, Human
ggcggguggacuggagccc

SEQ ID NO: 1082120 - RNA, 22 nt, Human
gaggcagugaacaauuccugug

SEQ ID NO: 1082121 - RNA, 22 nt, Human
aggugucuucagggugagacag

SEQ ID NO: 1082122 - RNA, 22 nt, Human
agugcugucaguuuuauagaua

SEQ ID NO: 1082123 - RNA, 22 nt, Human
acaguucugcaagauauuuuuu

SEQ ID NO: 1082124 - RNA, 22 nt, Human
agagaagcugacaggggcgugc

SEQ ID NO: 1082125 - RNA, 22 nt, Human
uucacagucacccuucuccaug

SEQ ID NO: 1082126 - RNA, 22 nt, Human
cagaacuggccuuucaucaguc

SEQ ID NO: 1082127 - RNA, 22 nt, Human
gaauuuuaauaaagguuuauca

SEQ ID NO: 1082128 - RNA, 22 nt, Human
auaauuuacaacugcuuuuaau

SEQ ID NO: 1082129 - RNA, 22 nt, Human
caaacuauuuacaauggaauca

SEQ ID NO: 1082130 - RNA, 22 nt, Human
ugcuccagugagcuggccaucc

SEQ ID NO: 1082131 - RNA, 22 nt, Human
cuccaggguuccccgauccacu

SEQ ID NO: 1082132 - RNA, 22 nt, Human
cagcaauaagccagguuagaca

SEQ ID NO: 1082133 - RNA, 22 nt, Human
ucauccaguaugacuggugucu

SEQ ID NO: 1082134 - RNA, 22 nt, Human
ucugaaauucacaguugaguca

SEQ ID NO: 1082135 - RNA, 22 nt, Human
agggcugaugcaccauguagcc

SEQ ID NO: 1082136 - RNA, 22 nt, Human
ugagccaguggaagauggcagu

SEQ ID NO: 1082137 - RNA, 20 nt, Human
ccagucccugagcaccaggg

SEQ ID NO: 1082138 - RNA, 22 nt, Human
cuggagcagguuuaggaguccc

SEQ ID NO: 1082139 - RNA, 18 nt, Human
gaagggagcuggaaugca

SEQ ID NO: 1082140 - RNA, 22 nt, Human
auucaguguaguuauuaucuuu

SEQ ID NO: 1082141 - RNA, 22 nt, Human
ugcaagaaaugugaagcuacaa

SEQ ID NO: 1082142 - RNA, 22 nt, Human
aaggcagugguugugauacugu

SEQ ID NO: 1082143 - RNA, 19 nt, Human
agcagccauagacaauaug

SEQ ID NO: 1082144 - RNA, 22 nt, Human
ggcugccugccgcccacuuggc

SEQ ID NO: 1082145 - RNA, 22 nt, Human
gagcaacaguuuaugguuuuuc

SEQ ID NO: 1082146 - RNA, 22 nt, Human
cagucccacaagaucuccacaa

SEQ ID NO: 1082147 - RNA, 22 nt, Human
uucagaggcuguaugacuagau

SEQ ID NO: 1082148 - RNA, 22 nt, Human
guuuccuuuuggaauuagagcu

SEQ ID NO: 1082149 - RNA, 22 nt, Human
auuuggggcucaccagggcuga

SEQ ID NO: 1082150 - RNA, 21 nt, Human
auuuuguacauagaauuuguc

SEQ ID NO: 1082151 - RNA, 22 nt, Human
uugucuuucccagcuucuagag

SEQ ID NO: 1082152 - RNA, 22 nt, Human
cacaggguuguucugaggauuc

SEQ ID NO: 1082153 - RNA, 22 nt, Human
caggccugugaguugaggcccc

SEQ ID NO: 1082154 - RNA, 22 nt, Human
cuucuggggauggagcccagaa

SEQ ID NO: 1082155 - RNA, 22 nt, Human
uguguuuauaguguaucuucca

SEQ ID NO: 1082156 - RNA, 22 nt, Human
ucuucacagaugcauauacuuc

SEQ ID NO: 1082157 - RNA, 22 nt, Human
gcucucuggaggccauggacag

SEQ ID NO: 1082158 - RNA, 22 nt, Human
aucuacaggauuuuacagaguu

SEQ ID NO: 1082159 - RNA, 22 nt, Human
ucagggaauaaguagaugagug

SEQ ID NO: 1082160 - RNA, 22 nt, Human
cugauucuguaauuuuuccuaa

SEQ ID NO: 1082161 - RNA, 22 nt, Human
caaugaaaauuuaaguugcagc

SEQ ID NO: 1082162 - RNA, 22 nt, Human
uuacaugguuguuggaaaugcu

SEQ ID NO: 1082163 - RNA, 22 nt, Human
ugaguuaaaugagaacaugaaa

SEQ ID NO: 1082164 - RNA, 19 nt, Human
ugggccugcaucugggucu

SEQ ID NO: 1082165 - RNA, 20 nt, Human
cacaacuguccacaugcucc

SEQ ID NO: 1082166 - RNA, 22 nt, Human
uggcagcaguggagguagaaag

SEQ ID NO: 1082167 - RNA, 22 nt, Human
cacugaagaugcgacuagugcu

SEQ ID NO: 1082168 - RNA, 22 nt, Human
cugggccucaagcucagauuuc

SEQ ID NO: 1082169 - RNA, 22 nt, Human
gaaagcacccaagauuuccuuc

SEQ ID NO: 1082170 - RNA, 22 nt, Human
uucaaacuaguuaaaagucaga

SEQ ID NO: 1082171 - RNA, 22 nt, Human
ugacauuuuaucaauaucacag

SEQ ID NO: 1082172 - RNA, 22 nt, Human
gucucaguuuuccaaacuguca

SEQ ID NO: 1082173 - RNA, 22 nt, Human
uuugggcaauucagugggaccu

SEQ ID NO: 1082174 - RNA, 22 nt, Human
agagucauaguuuaacuuuugu

SEQ ID NO: 1082175 - RNA, 22 nt, Human
cuggagagauccuccugaaaaa

SEQ ID NO: 1082176 - RNA, 22 nt, Human
uauaacacucagaaagaaucau

SEQ ID NO: 1082177 - RNA, 22 nt, Human
aauguuucguaaauugucuaug

SEQ ID NO: 1082178 - RNA, 22 nt, Human
ugacccugcuucuuggugcagg

SEQ ID NO: 1082179 - RNA, 22 nt, Human
gccagcaaguaucaccaaagcc

SEQ ID NO: 1082180 - RNA, 22 nt, Human
aagugguagacaaagauaauug

SEQ ID NO: 1082181 - RNA, 22 nt, Human
caaacauuugacuucucucagg

SEQ ID NO: 1082182 - RNA, 22 nt, Human
auauucuuauccuuuucucugu

SEQ ID NO: 1082183 - RNA, 17 nt, Human
uuucaucugggaccacc

SEQ ID NO: 1082184 - RNA, 22 nt, Human
cuggcuccaucacugggugaug

SEQ ID NO: 1082185 - RNA, 22 nt, Human
aaggaagagucuagaacaggca

SEQ ID NO: 1082186 - RNA, 19 nt, Human
ucucuggggacacuuucac

SEQ ID NO: 1082187 - RNA, 22 nt, Human
uacugcuugguguuguuguauc

SEQ ID NO: 1082188 - RNA, 22 nt, Human
gagcucuggcagggcaggucug

SEQ ID NO: 1082189 - RNA, 22 nt, Human
cugauuccaaagccaaagcuau

SEQ ID NO: 1082190 - RNA, 22 nt, Human
cccugcagcuuuugcauaguca

SEQ ID NO: 1082191 - RNA, 20 nt, Human
uccucagaagacauuugggg

SEQ ID NO: 1082192 - RNA, 16 nt, Human
cucagcuaaggagagg

SEQ ID NO: 1082193 - RNA, 22 nt, Human
uucacaauuucccuucaucagg

SEQ ID NO: 1082194 - RNA, 22 nt, Human
ucugucacccgagcaggcgaga

SEQ ID NO: 1082195 - RNA, 22 nt, Human
ggcaguagccagggacuggcag

SEQ ID NO: 1082196 - RNA, 22 nt, Human
cuccaggggccagaagccuggc

SEQ ID NO: 1082197 - RNA, 22 nt, Human
gcugccugcacagagcugcuuu

SEQ ID NO: 1082198 - RNA, 22 nt, Human
uuccauaaugagauucccagcc

SEQ ID NO: 1082199 - RNA, 22 nt, Human
auguuuauguugggcuauauuu

SEQ ID NO: 1082200 - RNA, 22 nt, Human
guccugcuggcuucaggagauu

SEQ ID NO: 1082201 - RNA, 22 nt, Human
cucaguuucugacauuaaaauc

SEQ ID NO: 1082202 - RNA, 22 nt, Human
aaagcacugcacauauauuugc

SEQ ID NO: 1082203 - RNA, 22 nt, Human
cagaggcauauaauugcugggg

SEQ ID NO: 1082204 - RNA, 22 nt, Human
uuuuacaguuccaugcaaagcg

SEQ ID NO: 1082205 - RNA, 16 nt, Human
agcccugccguguacu

SEQ ID NO: 1082206 - RNA, 22 nt, Human
cacaggcucuucucacuugauu

SEQ ID NO: 1082207 - RNA, 22 nt, Human
acuagcagggauauuauauaag

SEQ ID NO: 1082208 - RNA, 22 nt, Human
guggcagguggagccuccugca

SEQ ID NO: 1082209 - RNA, 22 nt, Human
gccacuggcaucuaguugguag

SEQ ID NO: 1082210 - RNA, 22 nt, Human
agagcagaguggcuguagcuug

SEQ ID NO: 1082211 - RNA, 22 nt, Human
cggcagagacggcgcuuugaac

SEQ ID NO: 1082212 - RNA, 22 nt, Human
ugcuggcuccaaccuggcaucu

SEQ ID NO: 1082213 - RNA, 22 nt, Human
uucauucauuacgugccaggca

SEQ ID NO: 1082214 - RNA, 22 nt, Human
cuccuggacauggagcggagga

SEQ ID NO: 1082215 - RNA, 21 nt, Human
ugcaggaaagugcugcgaccc

SEQ ID NO: 1082216 - RNA, 22 nt, Human
cccaggagguggagguugcagc

SEQ ID NO: 1082217 - RNA, 22 nt, Human
cccagcucucucaguucugcuu

SEQ ID NO: 1082218 - RNA, 22 nt, Human
uuucaagcaugucaaguuaguc

SEQ ID NO: 1082219 - RNA, 22 nt, Human
agcacauucugccuugcuuugc

SEQ ID NO: 1082220 - RNA, 22 nt, Human
aaauuucuaagcagccacuucc

SEQ ID NO: 1082221 - RNA, 22 nt, Human
ccucugagccugugugcggcac

SEQ ID NO: 1082222 - RNA, 22 nt, Human
ugacagggugauuaugagagcu

SEQ ID NO: 1082223 - RNA, 22 nt, Human
aggggcugccuggcuuggcacu

SEQ ID NO: 1082224 - RNA, 22 nt, Human
uucaugugaauauauuugucuu

SEQ ID NO: 1082225 - RNA, 22 nt, Human
aagauacugaugauguaggcua

SEQ ID NO: 1082226 - RNA, 22 nt, Human
aaagaaggaccuggaggaggau

SEQ ID NO: 1082227 - RNA, 22 nt, Human
guggcaggaucacggcucacug

SEQ ID NO: 1082228 - RNA, 22 nt, Human
agcagggcuuugcagacuuggg

SEQ ID NO: 1082229 - RNA, 22 nt, Human
ugaaggugucuuugugaacauc

SEQ ID NO: 1082230 - RNA, 22 nt, Human
uaccuugaaccccaagcuuugc

SEQ ID NO: 1082231 - RNA, 22 nt, Human
agagaggcgaguuaccugugcu

SEQ ID NO: 1082232 - RNA, 22 nt, Human
acagaccaaguuuccagcaggu

SEQ ID NO: 1082233 - RNA, 23 nt, Human
gcagagucaaguagucaugagug

SEQ ID NO: 1082234 - RNA, 22 nt, Human
gccaggcugcuccagggaggcc

SEQ ID NO: 1082235 - RNA, 22 nt, Human
cuggcucuaagugucagcuccc

SEQ ID NO: 1082236 - RNA, 22 nt, Human
uaaagcagcguggguggggcag

SEQ ID NO: 1082237 - RNA, 22 nt, Human
gagacacacacaggagguggca

SEQ ID NO: 1082238 - RNA, 22 nt, Human
caugccuguauuucugaucuau

SEQ ID NO: 1082239 - RNA, 22 nt, Human
aguaauagugaaucgacuauga

SEQ ID NO: 1082240 - RNA, 22 nt, Human
uugguucaaaacauggaagggu

SEQ ID NO: 1082241 - RNA, 22 nt, Human
gcuggccauucucuuugagaug

SEQ ID NO: 1082242 - RNA, 22 nt, Human
cagcacaggucaguuuuuuaag

SEQ ID NO: 1082243 - RNA, 22 nt, Human
acaucagagggcucacaugauc

SEQ ID NO: 1082244 - RNA, 22 nt, Human
gagccaggucgggccgcggcga

SEQ ID NO: 1082245 - RNA, 22 nt, Human
gaagacauuaagucuaugucac

SEQ ID NO: 1082246 - RNA, 22 nt, Human
agcugccucccugugcuugucc

SEQ ID NO: 1082247 - RNA, 22 nt, Human
cucacagcacuugugucauugg

SEQ ID NO: 1082248 - RNA, 22 nt, Human
auaaagcaagcauaccauuaag

SEQ ID NO: 1082249 - RNA, 22 nt, Human
uguguucauguugauucauagc

SEQ ID NO: 1082250 - RNA, 22 nt, Human
augggaugaacuugaucugcuu

SEQ ID NO: 1082251 - RNA, 22 nt, Human
ucaggauggcuucugcaucaaa

SEQ ID NO: 1082252 - RNA, 22 nt, Human
auaaggcacacauagauagggu

SEQ ID NO: 1082253 - RNA, 22 nt, Human
acauuuugcccuuauuugcuga

SEQ ID NO: 1082254 - RNA, 22 nt, Human
ccaaggagaaugacaccaugga

SEQ ID NO: 1082255 - RNA, 22 nt, Human
cuuucuuugcagugagccagag

SEQ ID NO: 1082256 - RNA, 18 nt, Human
gcucaggcccuagucagu

SEQ ID NO: 1082257 - RNA, 22 nt, Human
gugcuugggggaaguaacagac

SEQ ID NO: 1082258 - RNA, 23 nt, Human
acuuuucaauuagcuaugcuuaa

SEQ ID NO: 1082259 - RNA, 22 nt, Human
cagaggcugccagccaugugca

SEQ ID NO: 1082260 - RNA, 22 nt, Human
agggccagggaagcuguauuuu

SEQ ID NO: 1082261 - RNA, 21 nt, Human
gauuuaguggcuguucuaccu

SEQ ID NO: 1082262 - RNA, 22 nt, Human
uugugaauagugccgcuauaaa

SEQ ID NO: 1082263 - RNA, 22 nt, Human
cacagcagaaaguguaggagga

SEQ ID NO: 1082264 - RNA, 22 nt, Human
cugggcuucucccccuggcaga

SEQ ID NO: 1082265 - RNA, 22 nt, Human
caagggaccugagauggucucu

SEQ ID NO: 1082266 - RNA, 22 nt, Human
ggcacugagaggcucuuccuaa

SEQ ID NO: 1082267 - RNA, 22 nt, Human
aauaagauccugaagauauguu

SEQ ID NO: 1082268 - RNA, 20 nt, Human
cugagcccccagccugcagg

SEQ ID NO: 1082269 - RNA, 22 nt, Human
uguguuuuaucuauuguaucuu

SEQ ID NO: 1082270 - RNA, 22 nt, Human
cuuccugguuugaagcucgccg

SEQ ID NO: 1082271 - RNA, 22 nt, Human
ccucccucuguuagagcugucu

SEQ ID NO: 1082272 - RNA, 22 nt, Human
ucagggaacaauguuauggcuu

SEQ ID NO: 1082273 - RNA, 22 nt, Human
ggcugccugcuccuccugcacg

SEQ ID NO: 1082274 - RNA, 22 nt, Human
cucugggcaaguuucuucauga

SEQ ID NO: 1082275 - RNA, 22 nt, Human
uauuacuguuacuucacacugu

SEQ ID NO: 1082276 - RNA, 22 nt, Human
cacccugggcugggccuguuaa

SEQ ID NO: 1082277 - RNA, 22 nt, Human
guggcaggggcgggcuguuccg

SEQ ID NO: 1082278 - RNA, 22 nt, Human
guuaauauuuaccugucaagaa

SEQ ID NO: 1082279 - RNA, 22 nt, Human
ggaguugauuuuggauauauua

SEQ ID NO: 1082280 - RNA, 22 nt, Human
ccucacagcuuuucaaagugga

SEQ ID NO: 1082281 - RNA, 22 nt, Human
uagaagaaagugaagcugggga

SEQ ID NO: 1082282 - RNA, 22 nt, Human
ugccaggcgugguggugcgcac

SEQ ID NO: 1082283 - RNA, 22 nt, Human
aggagucauugagagggguccu

SEQ ID NO: 1082284 - RNA, 22 nt, Human
ccugucucuuucaaucugagag

SEQ ID NO: 1082285 - RNA, 22 nt, Human
agagggaaugugauugcaccau

SEQ ID NO: 1082286 - RNA, 22 nt, Human
gaagaagguggcccagggguag

SEQ ID NO: 1082287 - RNA, 22 nt, Human
agcagcaacuuauuuuucuuau

SEQ ID NO: 1082288 - RNA, 22 nt, Human
cuucagggaggagcauggguuc

SEQ ID NO: 1082289 - RNA, 20 nt, Human
uccaggcccacucagcugaa

SEQ ID NO: 1082290 - RNA, 22 nt, Human
guucucucugcuuccaagaugg

SEQ ID NO: 1082291 - RNA, 22 nt, Human
guucagggagggacagaugaag

SEQ ID NO: 1082292 - RNA, 22 nt, Human
aagggaggaggauuuauuguac

SEQ ID NO: 1082293 - RNA, 22 nt, Human
ggcugcucugccuuccagcugg

SEQ ID NO: 1082294 - RNA, 22 nt, Human
cuuucaaagaccuuggcauggg

SEQ ID NO: 1082295 - RNA, 23 nt, Human
aggaaagcauucauuuuuaccau

SEQ ID NO: 1082296 - RNA, 22 nt, Human
uucaacauagcugaggcauaua

SEQ ID NO: 1082297 - RNA, 22 nt, Human
uuuuuaagagauucuccagucu

SEQ ID NO: 1082298 - RNA, 20 nt, Human
cucugcccccagacugacag

SEQ ID NO: 1082299 - RNA, 22 nt, Human
cuguccucuguccucagcagga

SEQ ID NO: 1082300 - RNA, 23 nt, Human
cuuuuaacuagaguaucagcugc

SEQ ID NO: 1082301 - RNA, 22 nt, Human
auccagggauaaaaguaagguu

SEQ ID NO: 1082302 - RNA, 21 nt, Human
acucaagugggcaugcgcaga

SEQ ID NO: 1082303 - RNA, 23 nt, Human
cucugcaggagagugggcagggc

SEQ ID NO: 1082304 - RNA, 22 nt, Human
acaggcacaacugaguagacuc

SEQ ID NO: 1082305 - RNA, 22 nt, Human
acccuuucuuacucacacgcuc

SEQ ID NO: 1082306 - RNA, 22 nt, Human
gggcaugagagggcagcuggca

SEQ ID NO: 1082307 - RNA, 22 nt, Human
ucuuacauauagcaugaguaca

SEQ ID NO: 1082308 - RNA, 22 nt, Human
gcagagucaggauuccauccca

SEQ ID NO: 1082309 - RNA, 22 nt, Human
ucaauguuuguucaugaaaaua

SEQ ID NO: 1082310 - RNA, 22 nt, Human
ggaagccaguugcuuggugugg

SEQ ID NO: 1082311 - RNA, 22 nt, Human
uccaggcuggacaugaggcggg

SEQ ID NO: 1082312 - RNA, 22 nt, Human
ccaaaguauuaaaucuuagcaa

SEQ ID NO: 1082313 - RNA, 22 nt, Human
ucucuccuuaucauuguguuua

SEQ ID NO: 1082314 - RNA, 22 nt, Human
auagaauuacaguguguuugga

SEQ ID NO: 1082315 - RNA, 22 nt, Human
aauuuuaaucaguggugcugag

SEQ ID NO: 1082316 - RNA, 22 nt, Human
ugagcaggcgcagcaggagguc

SEQ ID NO: 1082317 - RNA, 22 nt, Human
acacagugugugcagucggacg

SEQ ID NO: 1082318 - RNA, 22 nt, Human
cuucccacagaauucaaucagu

SEQ ID NO: 1082319 - RNA, 22 nt, Human
ucccugggcaucacguugcuuc

SEQ ID NO: 1082320 - RNA, 19 nt, Human
ccaaaagcaauuccaagua

SEQ ID NO: 1082321 - RNA, 20 nt, Human
ucccagucagccagagugag

SEQ ID NO: 1082322 - RNA, 17 nt, Human
aggcuggcucacaggga

SEQ ID NO: 1082323 - RNA, 20 nt, Human
aacuuuagacauaaucucuu

SEQ ID NO: 1082324 - RNA, 22 nt, Human
auccuugagaaaauaaaugacc

SEQ ID NO: 1082325 - RNA, 22 nt, Human
ccugggugaugugcugcccucg

SEQ ID NO: 1082326 - RNA, 22 nt, Human
cacuaagucaacagccucucuu

SEQ ID NO: 1082327 - RNA, 22 nt, Human
aaggggauagagcagacacucc

SEQ ID NO: 1082328 - RNA, 22 nt, Human
ggugggguuuuaggcugcugca

SEQ ID NO: 1082329 - RNA, 22 nt, Human
cauacuuuuuagaucugccuuc

SEQ ID NO: 1082330 - RNA, 22 nt, Human
cccagaguggagggugcagaau

SEQ ID NO: 1082331 - RNA, 22 nt, Human
ggaaaucagcagaugcugguga

SEQ ID NO: 1082332 - RNA, 22 nt, Human
ucugaaaucuguaagcacuagc

SEQ ID NO: 1082333 - RNA, 22 nt, Human
cugcuggagguuggagcaugca

SEQ ID NO: 1082334 - RNA, 22 nt, Human
aacaucuuugccaaauugcuau

SEQ ID NO: 1082335 - RNA, 22 nt, Human
cuuugaucuacucacuaaacaa

SEQ ID NO: 1082336 - RNA, 22 nt, Human
cacaauuuuccuuuaaguguau

SEQ ID NO: 1082337 - RNA, 22 nt, Human
ucaggaugguguggaggaaaua

SEQ ID NO: 1082338 - RNA, 22 nt, Human
ucucccaagccuggcaggggca

SEQ ID NO: 1082339 - RNA, 20 nt, Human
gcuucaguuuccucacuggu

SEQ ID NO: 1082340 - RNA, 22 nt, Human
uuuugcuuaaucuagauuuugc

SEQ ID NO: 1082341 - RNA, 22 nt, Human
uugguucauuuucucaucuaga

SEQ ID NO: 1082342 - RNA, 22 nt, Human
guccagggaaauagcgacaggg

SEQ ID NO: 1082343 - RNA, 22 nt, Human
aauauuucuguagcuauguucu

SEQ ID NO: 1082344 - RNA, 22 nt, Human
guuccacaaaauguacccaguu

SEQ ID NO: 1082345 - RNA, 22 nt, Human
uggcagggugccaguugcgagu

SEQ ID NO: 1082346 - RNA, 22 nt, Human
ggccucugcccucacuccuguc

SEQ ID NO: 1082347 - RNA, 22 nt, Human
cagcagaggaaagcaaaucuaa

SEQ ID NO: 1082348 - RNA, 22 nt, Human
cagauccacccuuguagugaca

SEQ ID NO: 1082349 - RNA, 22 nt, Human
ucccagggcagcuguccagaag

SEQ ID NO: 1082350 - RNA, 22 nt, Human
aguaugaaucucuuuauucugc

SEQ ID NO: 1082351 - RNA, 22 nt, Human
aggugagggugccagugcaugg

SEQ ID NO: 1082352 - RNA, 22 nt, Human
aagaaaucagaaaagcauucgu

SEQ ID NO: 1082353 - RNA, 22 nt, Human
aaugaugguuaaacacuggagg

SEQ ID NO: 1082354 - RNA, 22 nt, Human
acagcaaaugguuuucugucug

SEQ ID NO: 1082355 - RNA, 23 nt, Human
gaagcagaugucugaguaggcag

SEQ ID NO: 1082356 - RNA, 19 nt, Human
cuggugcuugagugaguca

SEQ ID NO: 1082357 - RNA, 22 nt, Human
cacaugacucuggcuacccaga

SEQ ID NO: 1082358 - RNA, 22 nt, Human
acccucaggcagaauguauucu

SEQ ID NO: 1082359 - RNA, 22 nt, Human
guccucuggaagaugaguucuu

SEQ ID NO: 1082360 - RNA, 22 nt, Human
auugaaagauauacuguucuca

SEQ ID NO: 1082361 - RNA, 22 nt, Human
cagccucucuguaucucaggau

SEQ ID NO: 1082362 - RNA, 22 nt, Human
gcagggaagaucuuggagcugc

SEQ ID NO: 1082363 - RNA, 22 nt, Human
cagcaggcugcgauugcucauu

SEQ ID NO: 1082364 - RNA, 21 nt, Human
cagugguuuauaaacaacaga

SEQ ID NO: 1082365 - RNA, 22 nt, Human
aggcaacauaacacgaaagucu

SEQ ID NO: 1082366 - RNA, 22 nt, Human
ucuugcccucaacaagagcaug

SEQ ID NO: 1082367 - RNA, 22 nt, Human
ugauguuauuagauacaaacca

SEQ ID NO: 1082368 - RNA, 22 nt, Human
gcaaaggccacuggggcgaugg

SEQ ID NO: 1082369 - RNA, 22 nt, Human
aagguaaugaaacagcagcuaa

SEQ ID NO: 1082370 - RNA, 22 nt, Human
uaaaaaguugaaaggacuuauc

SEQ ID NO: 1082371 - RNA, 21 nt, Human
uaauaauuccacuacagagua

SEQ ID NO: 1082372 - RNA, 22 nt, Human
uaacuucuggaaaugcaucugc

SEQ ID NO: 1082373 - RNA, 22 nt, Human
ugcacacacaugaaguagcaug

SEQ ID NO: 1082374 - RNA, 22 nt, Human
aggcaggcuagucgcuugagcc

SEQ ID NO: 1082375 - RNA, 18 nt, Human
ggccugaggauuucagca

SEQ ID NO: 1082376 - RNA, 19 nt, Human
agcaacaccguuuauuucc

SEQ ID NO: 1082377 - RNA, 22 nt, Human
ugggcagagucguggggaauag

SEQ ID NO: 1082378 - RNA, 22 nt, Human
uauuauuauaguuauugggaag

SEQ ID NO: 1082379 - RNA, 19 nt, Human
uuccugugcugcugugucc

SEQ ID NO: 1082380 - RNA, 22 nt, Human
ucagcugccuuucccaugcuag

SEQ ID NO: 1082381 - RNA, 22 nt, Human
uacagaauaaagcgugaagcuu

SEQ ID NO: 1082382 - RNA, 22 nt, Human
acacaggaagucagcacugaug

SEQ ID NO: 1082383 - RNA, 22 nt, Human
uauauuaccugccugaucuaua

SEQ ID NO: 1082384 - RNA, 22 nt, Human
ucacaguuaauuguuggaaugu

SEQ ID NO: 1082385 - RNA, 22 nt, Human
aaggaagaugcuggccugggga

SEQ ID NO: 1082386 - RNA, 22 nt, Human
acagagcaguucuggagcuggc

SEQ ID NO: 1082387 - RNA, 22 nt, Human
agucugucugucacuucugcag

SEQ ID NO: 1082388 - RNA, 21 nt, Human
uggcacugcuuagcagguucc

SEQ ID NO: 1082389 - RNA, 18 nt, Human
aggagaaagggaccaggg

SEQ ID NO: 1082390 - RNA, 22 nt, Human
caaagcagaccuuuacccuuua

SEQ ID NO: 1082391 - RNA, 22 nt, Human
uuuugauaucaugaugaacaga

SEQ ID NO: 1082392 - RNA, 22 nt, Human
guguguuucagaagccaggugu

SEQ ID NO: 1082393 - RNA, 22 nt, Human
uccuccuguuucucaggccugg

SEQ ID NO: 1082394 - RNA, 17 nt, Human
uccuucagugccucugc

SEQ ID NO: 1082395 - RNA, 19 nt, Human
gggcuucugggaucaagag

SEQ ID NO: 1082396 - RNA, 20 nt, Human
ucucagcauaagaacccuuc

SEQ ID NO: 1082397 - RNA, 22 nt, Human
uuucacagcgucuuucucuugc

SEQ ID NO: 1082398 - RNA, 21 nt, Human
ugaaaucugaugggacaaaug

SEQ ID NO: 1082399 - RNA, 19 nt, Human
cugucaggggcuggauguu

SEQ ID NO: 1082400 - RNA, 22 nt, Human
uuacaaagaaaauuaggcauuu

SEQ ID NO: 1082401 - RNA, 22 nt, Human
uggcagugccccuugaccagug

SEQ ID NO: 1082402 - RNA, 22 nt, Human
cuuucuuauaccugucagggcc

SEQ ID NO: 1082403 - RNA, 22 nt, Human
ggcugccugaggcugaggcccg

SEQ ID NO: 1082404 - RNA, 16 nt, Human
gaagcagaggguguug

SEQ ID NO: 1082405 - RNA, 22 nt, Human
ugggacagugaccccagagguc

SEQ ID NO: 1082406 - RNA, 22 nt, Human
gacagcagaugaagccugcaga

SEQ ID NO: 1082407 - RNA, 22 nt, Human
aauaagaacuugucucuggcag

SEQ ID NO: 1082408 - RNA, 22 nt, Human
agagccugaggccaggaaaaug

SEQ ID NO: 1082409 - RNA, 22 nt, Human
aaagauuagauaagauagauuu

SEQ ID NO: 1082410 - RNA, 20 nt, Human
ucaaagcacugccugucauc

SEQ ID NO: 1082411 - RNA, 22 nt, Human
auucacaugugcuucuuaucac

SEQ ID NO: 1082412 - RNA, 22 nt, Human
cuacacagagccuacuucugca

SEQ ID NO: 1082413 - RNA, 22 nt, Human
uuacugcuguuaggauauuuuu

SEQ ID NO: 1082414 - RNA, 22 nt, Human
caaauacucuggauguguuugu

SEQ ID NO: 1082415 - RNA, 22 nt, Human
ccuaugccugucacucugcgcu

SEQ ID NO: 1082416 - RNA, 22 nt, Human
aaguaugcuaauuaacuagcac

SEQ ID NO: 1082417 - RNA, 22 nt, Human
ugaggcagucacccccuccugc

SEQ ID NO: 1082418 - RNA, 23 nt, Human
cuucagugugggacugcagcgug

SEQ ID NO: 1082419 - RNA, 22 nt, Human
uuauuauugugguugcauuauc

SEQ ID NO: 1082420 - RNA, 16 nt, Human
gagaagagcccggcag

SEQ ID NO: 1082421 - RNA, 22 nt, Human
augcuguguuuuaaauggaaau

SEQ ID NO: 1082422 - RNA, 22 nt, Human
acagggcccuugccagcacaag

SEQ ID NO: 1082423 - RNA, 22 nt, Human
uuucuagaaugacucaucugag

SEQ ID NO: 1082424 - RNA, 22 nt, Human
aaaaucacacaaguagaugggg

SEQ ID NO: 1082425 - RNA, 22 nt, Human
cucugagaggauccugcccggg

SEQ ID NO: 1082426 - RNA, 22 nt, Human
ggacucagcagccaggaguggc

SEQ ID NO: 1082427 - RNA, 22 nt, Human
cagcucuuuuucacacaacaug

SEQ ID NO: 1082428 - RNA, 22 nt, Human
ugguccagacuuugaccucuca

SEQ ID NO: 1082429 - RNA, 22 nt, Human
augcaguggcagcuccuggugu

SEQ ID NO: 1082430 - RNA, 22 nt, Human
gacugggcuccaagagggagag

SEQ ID NO: 1082431 - RNA, 22 nt, Human
ccucccauggagcucuguccau

SEQ ID NO: 1082432 - RNA, 22 nt, Human
uggcauuuuguagcuguguauc

SEQ ID NO: 1082433 - RNA, 22 nt, Human
cucucugguacauagaguuugg

SEQ ID NO: 1082434 - RNA, 22 nt, Human
caagagcucagaaacccuugcu

SEQ ID NO: 1082435 - RNA, 22 nt, Human
acaguuacaugauucuugugag

SEQ ID NO: 1082436 - RNA, 22 nt, Human
gcacugugcuagguaucaggga

SEQ ID NO: 1082437 - RNA, 22 nt, Human
ucugacuuggugcuaccagcca

SEQ ID NO: 1082438 - RNA, 22 nt, Human
cugcugggaaggucugcucagu

SEQ ID NO: 1082439 - RNA, 22 nt, Human
uuuccugugacuaaucuggaca

SEQ ID NO: 1082440 - RNA, 22 nt, Human
cacagguggcuccaaguuagag

SEQ ID NO: 1082441 - RNA, 22 nt, Human
gcucacuggccugaagaggacg

SEQ ID NO: 1082442 - RNA, 22 nt, Human
uuucaauguaugucuuucugag

SEQ ID NO: 1082443 - RNA, 22 nt, Human
ugggcaggagagaagcuaaaga

SEQ ID NO: 1082444 - RNA, 20 nt, Human
ccucaagcagacugacagcu

SEQ ID NO: 1082445 - RNA, 22 nt, Human
caggcugcagcagcaguggccc

SEQ ID NO: 1082446 - RNA, 22 nt, Human
aguaaacauguaauuguucauu

SEQ ID NO: 1082447 - RNA, 20 nt, Human
ccugggcucaaagcauccuc

SEQ ID NO: 1082448 - RNA, 22 nt, Human
agccccucuccgcccugagucg

SEQ ID NO: 1082449 - RNA, 22 nt, Human
ccaggcugggcuacaaguugag

SEQ ID NO: 1082450 - RNA, 19 nt, Human
cuugccuguuccuacagcu

SEQ ID NO: 1082451 - RNA, 22 nt, Human
gucagaggaggcugaguaggaa

SEQ ID NO: 1082452 - RNA, 22 nt, Human
cuggcugcgucugcucugacag

SEQ ID NO: 1082453 - RNA, 22 nt, Human
uccagcccgacugggccugccg

SEQ ID NO: 1082454 - RNA, 22 nt, Human
aaggguugaagauaaauaaggu

SEQ ID NO: 1082455 - RNA, 22 nt, Human
ggcagcaggagccaucugguag

SEQ ID NO: 1082456 - RNA, 22 nt, Human
guuucuuucuauugacugaaca

SEQ ID NO: 1082457 - RNA, 23 nt, Human
guugccuuugcaucuucauccau

SEQ ID NO: 1082458 - RNA, 22 nt, Human
ucucucagcuuugagaccugcu

SEQ ID NO: 1082459 - RNA, 21 nt, Human
uucaaugaaaacaaagugagg

SEQ ID NO: 1082460 - RNA, 22 nt, Human
auuucacucuuaauugcuuccu

SEQ ID NO: 1082461 - RNA, 22 nt, Human
uccagaguuugagucuccuucc

SEQ ID NO: 1082462 - RNA, 22 nt, Human
gcacagggagacagccguggcc

SEQ ID NO: 1082463 - RNA, 22 nt, Human
ucaggcagguggcuggcuaugg

SEQ ID NO: 1082464 - RNA, 16 nt, Human
acaaauacaacugcug

SEQ ID NO: 1082465 - RNA, 22 nt, Human
cuucugggcauggcagagccug

SEQ ID NO: 1082466 - RNA, 22 nt, Human
ugagaaauauugcacagugagg

SEQ ID NO: 1082467 - RNA, 22 nt, Human
aauaucaucucucuuuucugca

SEQ ID NO: 1082468 - RNA, 22 nt, Human
cccaggaaugggaaggaggaau

SEQ ID NO: 1082469 - RNA, 22 nt, Human
aaggggaaaaaguguuaggagu

SEQ ID NO: 1082470 - RNA, 22 nt, Human
ucucccaagggcacauucaagg

SEQ ID NO: 1082471 - RNA, 22 nt, Human
agaaggcagaugggacggagca

SEQ ID NO: 1082472 - RNA, 22 nt, Human
gggaggaaggcuugggugagua

SEQ ID NO: 1082473 - RNA, 21 nt, Human
acagaacuguauagugauaaa

SEQ ID NO: 1082474 - RNA, 22 nt, Human
aaaguagaacauuuucuuaucu

SEQ ID NO: 1082475 - RNA, 22 nt, Human
gaaaacauccagagauagaccu

SEQ ID NO: 1082476 - RNA, 22 nt, Human
ugucauugaggaaaacuaggug

SEQ ID NO: 1082477 - RNA, 22 nt, Human
agcuggagaucaugcugauacu

SEQ ID NO: 1082478 - RNA, 22 nt, Human
agccaaggcagcuagagcucug

SEQ ID NO: 1082479 - RNA, 22 nt, Human
uucuuaagaggaacauuuuugu

SEQ ID NO: 1082480 - RNA, 22 nt, Human
ugggccuguggcuuggcucuag

SEQ ID NO: 1082481 - RNA, 22 nt, Human
auuccacacaguaauacucaau

SEQ ID NO: 1082482 - RNA, 22 nt, Human
agcuuagucacucuuaaauuua

SEQ ID NO: 1082483 - RNA, 22 nt, Human
aaggcauauauucuaaacagga

SEQ ID NO: 1082484 - RNA, 22 nt, Human
ggugacaguuccggagguacag

SEQ ID NO: 1082485 - RNA, 22 nt, Human
cauugaaaccuaacauaggcug

SEQ ID NO: 1082486 - RNA, 22 nt, Human
auguuuaaucggcugccuuucc

SEQ ID NO: 1082487 - RNA, 22 nt, Human
uggcccugcacccagagcaguu

SEQ ID NO: 1082488 - RNA, 22 nt, Human
uuucccuacuuguaacuggaaa

SEQ ID NO: 1082489 - RNA, 22 nt, Human
aucuccagguugugccugcguc

SEQ ID NO: 1082490 - RNA, 22 nt, Human
uauuuguccuuauuaagaucug

SEQ ID NO: 1082491 - RNA, 22 nt, Human
gggagccuugggagugccagcc

SEQ ID NO: 1082492 - RNA, 22 nt, Human
uccucccugaguggggacagcu

SEQ ID NO: 1082493 - RNA, 22 nt, Human
ugaggugguucaagagccuugu

SEQ ID NO: 1082494 - RNA, 22 nt, Human
ugggugggagcgcccugucugg

SEQ ID NO: 1082495 - RNA, 22 nt, Human
uuccagauguuuaaguucugcu

SEQ ID NO: 1082496 - RNA, 22 nt, Human
uaacagaaaggcucaggugcuc

SEQ ID NO: 1082497 - RNA, 22 nt, Human
acauguuuacauuaggugauau

SEQ ID NO: 1082498 - RNA, 22 nt, Human
ugcaggcuguuugguggaucuc

SEQ ID NO: 1082499 - RNA, 22 nt, Human
uguggcagaguaaggacccagu

SEQ ID NO: 1082500 - RNA, 22 nt, Human
uggcucuggcgugaagcccaga

SEQ ID NO: 1082501 - RNA, 22 nt, Human
aguggggcggacaggaccagga

SEQ ID NO: 1082502 - RNA, 22 nt, Human
gcuggagugcugaggugcagug

SEQ ID NO: 1082503 - RNA, 22 nt, Human
uaagauaauaaguaugucuaug

SEQ ID NO: 1082504 - RNA, 20 nt, Human
agaaaucagaccacacacua

SEQ ID NO: 1082505 - RNA, 22 nt, Human
augcugaagagugcacaggcua

SEQ ID NO: 1082506 - RNA, 22 nt, Human
ucagguggcugguugcuggcua

SEQ ID NO: 1082507 - RNA, 22 nt, Human
caggcagcugcgacaagagagc

SEQ ID NO: 1082508 - RNA, 22 nt, Human
cacacagaaccgcucgccacuu

SEQ ID NO: 1082509 - RNA, 22 nt, Human
auuucuacugugagaaacauga

SEQ ID NO: 1082510 - RNA, 22 nt, Human
agcugccagcaucccggaaggg

SEQ ID NO: 1082511 - RNA, 22 nt, Human
ucccagggacucucugccuucc

SEQ ID NO: 1082512 - RNA, 22 nt, Human
aucuucuauagauauucugaag

SEQ ID NO: 1082513 - RNA, 22 nt, Human
gaagagcuuagacagaaucaaa

SEQ ID NO: 1082514 - RNA, 22 nt, Human
uuucacuguuaggaguaugcua

SEQ ID NO: 1082515 - RNA, 22 nt, Human
uucaggauuauacucucuuccc

SEQ ID NO: 1082516 - RNA, 21 nt, Human
augauaugcuuguauuuccaa

SEQ ID NO: 1082517 - RNA, 22 nt, Human
uuguaaagcugauuagaaagcc

SEQ ID NO: 1082518 - RNA, 22 nt, Human
ccuuucucuuggauaccgauug

SEQ ID NO: 1082519 - RNA, 22 nt, Human
gcuggccucaucacugacuucu

SEQ ID NO: 1082520 - RNA, 19 nt, Human
ggccuggauuuagggcucc

SEQ ID NO: 1082521 - RNA, 22 nt, Human
cagggggugcaggcccugugac

SEQ ID NO: 1082522 - RNA, 22 nt, Human
ggacagaaaccauaugagugua

SEQ ID NO: 1082523 - RNA, 22 nt, Human
auuucacaaaccauccugauuu

SEQ ID NO: 1082524 - RNA, 22 nt, Human
ccacugucugcaggccucagca

SEQ ID NO: 1082525 - RNA, 22 nt, Human
uauggaaaguguuuucuucugu

SEQ ID NO: 1082526 - RNA, 22 nt, Human
uugucuuagagugaaaacuuua

SEQ ID NO: 1082527 - RNA, 22 nt, Human
cugggugguucuaacuguugau

SEQ ID NO: 1082528 - RNA, 22 nt, Human
agccuggagaagauguguauug

SEQ ID NO: 1082529 - RNA, 22 nt, Human
ggcacucagagauucaggcugu

SEQ ID NO: 1082530 - RNA, 22 nt, Human
gcagguggaucaccacgucagg

SEQ ID NO: 1082531 - RNA, 22 nt, Human
aaaacugaaauacgauccaaug

SEQ ID NO: 1082532 - RNA, 22 nt, Human
auaguuuucuaugcacuguuau

SEQ ID NO: 1082533 - RNA, 22 nt, Human
aggagaaggaagugcaucacua

SEQ ID NO: 1082534 - RNA, 22 nt, Human
caugcaguguguaucuacuuaa

SEQ ID NO: 1082535 - RNA, 22 nt, Human
uccuuuguuaaggagguuuguu

SEQ ID NO: 1082536 - RNA, 22 nt, Human
caggcacugugcuagauccuug

SEQ ID NO: 1082537 - RNA, 22 nt, Human
auuagcuucaaagccaucaacc

SEQ ID NO: 1082538 - RNA, 22 nt, Human
uuucugaaaacugaaguagugc

SEQ ID NO: 1082539 - RNA, 22 nt, Human
ucacaucaaggacugucuggcu

SEQ ID NO: 1082540 - RNA, 22 nt, Human
uuaacaaucauaggaccauuua

SEQ ID NO: 1082541 - RNA, 22 nt, Human
cacagggcuucucauggggugc

SEQ ID NO: 1082542 - RNA, 22 nt, Human
acacaggaaaugguuuaguuuu

SEQ ID NO: 1082543 - RNA, 22 nt, Human
ugccuggcacuccuggagcuca

SEQ ID NO: 1082544 - RNA, 22 nt, Human
ugcaaagauuuaucuuucucca

SEQ ID NO: 1082545 - RNA, 22 nt, Human
caagcuuguuucuccugggggu

SEQ ID NO: 1082546 - RNA, 22 nt, Human
uuuguguuggaagaaaugcuac

SEQ ID NO: 1082547 - RNA, 22 nt, Human
uggagccuccucacacuguggc

SEQ ID NO: 1082548 - RNA, 22 nt, Human
gauuuccuagacauggggcaga

SEQ ID NO: 1082549 - RNA, 22 nt, Human
ucuggcagguucccauguuaug

SEQ ID NO: 1082550 - RNA, 22 nt, Human
gugcauccacuagggcucuccc

SEQ ID NO: 1082551 - RNA, 22 nt, Human
caacagcuggaggcuuggcccg

SEQ ID NO: 1082552 - RNA, 21 nt, Human
cucuggagucaagagcuucca

SEQ ID NO: 1082553 - RNA, 22 nt, Human
acagaaauugggcaaauggaag

SEQ ID NO: 1082554 - RNA, 22 nt, Human
ggcuggaaaagacaaagcuauu

SEQ ID NO: 1082555 - RNA, 22 nt, Human
agagacaggguuuugccauguu

SEQ ID NO: 1082556 - RNA, 22 nt, Human
aaucuugaguaucagaccaaga

SEQ ID NO: 1082557 - RNA, 22 nt, Human
ucuuuacaguccucugucaauc

SEQ ID NO: 1082558 - RNA, 22 nt, Human
aaauucauuuuucuuagugugc

SEQ ID NO: 1082559 - RNA, 22 nt, Human
uaugucaugggucaaaaugaag

SEQ ID NO: 1082560 - RNA, 22 nt, Human
agaggcagcagucauacuacag

SEQ ID NO: 1082561 - RNA, 22 nt, Human
guggucaggggcugaggugccc

SEQ ID NO: 1082562 - RNA, 22 nt, Human
cagacagagcucacaagucuuu

SEQ ID NO: 1082563 - RNA, 21 nt, Human
cacugcagccuugaccugggc

SEQ ID NO: 1082564 - RNA, 22 nt, Human
auuucugccaaaguggggaccu

SEQ ID NO: 1082565 - RNA, 22 nt, Human
ggcuagggacuccuccucaggg

SEQ ID NO: 1082566 - RNA, 22 nt, Human
uguaaaagacauuucuaagcaa

SEQ ID NO: 1082567 - RNA, 22 nt, Human
aagaucaagaucagagaacagc

SEQ ID NO: 1082568 - RNA, 22 nt, Human
ccaggagccacucaggcccaca

SEQ ID NO: 1082569 - RNA, 22 nt, Human
cacugagaggucucauuuccaa

SEQ ID NO: 1082570 - RNA, 22 nt, Human
gccaggaagagagagcccucca

SEQ ID NO: 1082571 - RNA, 22 nt, Human
gggacccagguaauccugugcu

SEQ ID NO: 1082572 - RNA, 22 nt, Human
cuccugggcucaagugauccuc

SEQ ID NO: 1082573 - RNA, 22 nt, Human
ucacaaauauuuuaacaguagg

SEQ ID NO: 1082574 - RNA, 22 nt, Human
acaucaguaacuguaaaacagg

SEQ ID NO: 1082575 - RNA, 22 nt, Human
gcggggacagaaggcgguucuc

SEQ ID NO: 1082576 - RNA, 22 nt, Human
ugcacuacugugauacacagcc

SEQ ID NO: 1082577 - RNA, 22 nt, Human
gacauuuaaauugcaggcagcc

SEQ ID NO: 1082578 - RNA, 20 nt, Human
agaagucagcucagaaguga

SEQ ID NO: 1082579 - RNA, 22 nt, Human
ggaggccaaggagggcggauca

SEQ ID NO: 1082580 - RNA, 22 nt, Human
uaaugguauuuguugaaaaacu

SEQ ID NO: 1082581 - RNA, 22 nt, Human
ugucucugagaugacucccacc

SEQ ID NO: 1082582 - RNA, 22 nt, Human
ugacagaacagguugggagcaa

SEQ ID NO: 1082583 - RNA, 22 nt, Human
acagaacugggaaaugcacaua

SEQ ID NO: 1082584 - RNA, 22 nt, Human
acuucaugcagaagagagcugu

SEQ ID NO: 1082585 - RNA, 22 nt, Human
guuccaaaguuagaguguauug

SEQ ID NO: 1082586 - RNA, 22 nt, Human
gcuccucuauuccccacauuuu

SEQ ID NO: 1082587 - RNA, 22 nt, Human
agggugcaaaagcaaggacagu

SEQ ID NO: 1082588 - RNA, 22 nt, Human
uuugaaagggaaauaaacuccu

SEQ ID NO: 1082589 - RNA, 22 nt, Human
auagauacauuagguaacuugu

SEQ ID NO: 1082590 - RNA, 22 nt, Human
uacacauuagugagguauuuug

SEQ ID NO: 1082591 - RNA, 22 nt, Human
gcugccugguuucucagcugca

SEQ ID NO: 1082592 - RNA, 22 nt, Human
gcaugcaaauagucaugcuucc

SEQ ID NO: 1082593 - RNA, 22 nt, Human
ugcagaugaaugcugagacacu

SEQ ID NO: 1082594 - RNA, 22 nt, Human
ugcugugacgccucaggaaucc

SEQ ID NO: 1082595 - RNA, 22 nt, Human
uuauaaagguuugugcauauuu

SEQ ID NO: 1082596 - RNA, 22 nt, Human
uuucucaacuguauuaugcaga

SEQ ID NO: 1082597 - RNA, 22 nt, Human
uacacauucuagggcacaguua

SEQ ID NO: 1082598 - RNA, 22 nt, Human
ugaggcaggacauggacaacug

SEQ ID NO: 1082599 - RNA, 22 nt, Human
ugaaaugaaugugauucgauag

SEQ ID NO: 1082600 - RNA, 20 nt, Human
ugcagcuucaccugugucau

SEQ ID NO: 1082601 - RNA, 22 nt, Human
cuuauuuugcugaugacccagg

SEQ ID NO: 1082602 - RNA, 22 nt, Human
uucaggaugcucagaguagucu

SEQ ID NO: 1082603 - RNA, 22 nt, Human
gugggcugcccuugaggucagc

SEQ ID NO: 1082604 - RNA, 22 nt, Human
agaaaucuuugaaguguaaugu

SEQ ID NO: 1082605 - RNA, 22 nt, Human
ccugggugucaugggcagcugg

SEQ ID NO: 1082606 - RNA, 22 nt, Human
ggcccacacugacagcugagcu

SEQ ID NO: 1082607 - RNA, 22 nt, Human
uagcagggaaggugugcugagc

SEQ ID NO: 1082608 - RNA, 22 nt, Human
cuguccucaacccauccuucuc

SEQ ID NO: 1082609 - RNA, 22 nt, Human
ucuguaaagucuguguaaaguc

SEQ ID NO: 1082610 - RNA, 22 nt, Human
uauuuguauuucaugcaguaaa

SEQ ID NO: 1082611 - RNA, 22 nt, Human
uuuguaagcaguguuuuuacag

SEQ ID NO: 1082612 - RNA, 20 nt, Human
ucccucaguccuggcuuugu

SEQ ID NO: 1082613 - RNA, 22 nt, Human
agugaguauuuguugagugcua

SEQ ID NO: 1082614 - RNA, 22 nt, Human
ugccuguccugaggaugagggu

SEQ ID NO: 1082615 - RNA, 19 nt, Human
cagcugcaccgugaccauc

SEQ ID NO: 1082616 - RNA, 22 nt, Human
accucugcaaugcaaugucaug

SEQ ID NO: 1082617 - RNA, 22 nt, Human
ucaugcugaguccuggcuuugu

SEQ ID NO: 1082618 - RNA, 22 nt, Human
ugugugccugagccgugccugg

SEQ ID NO: 1082619 - RNA, 22 nt, Human
aaacagauaaugcuauaaaugg

SEQ ID NO: 1082620 - RNA, 22 nt, Human
caguauuuggaauauagcuaag

SEQ ID NO: 1082621 - RNA, 22 nt, Human
ggcugguguugagugccuguag

SEQ ID NO: 1082622 - RNA, 22 nt, Human
gaagauuuucuccuuuaaauga

SEQ ID NO: 1082623 - RNA, 22 nt, Human
ccuggcugaacaaagucccucc

SEQ ID NO: 1082624 - RNA, 22 nt, Human
acccucgauaugaucugaugaa

SEQ ID NO: 1082625 - RNA, 22 nt, Human
uacaaagagguaauugcauaua

SEQ ID NO: 1082626 - RNA, 22 nt, Human
acacagauuuuacauguuaugc

SEQ ID NO: 1082627 - RNA, 22 nt, Human
gucauuuuuuucguaauagugg

SEQ ID NO: 1082628 - RNA, 22 nt, Human
ggagaagcagcuucuugaugaa

SEQ ID NO: 1082629 - RNA, 22 nt, Human
aagagggcugcaaucuuauugc

SEQ ID NO: 1082630 - RNA, 22 nt, Human
gcuuuucauagauaaaauucua

SEQ ID NO: 1082631 - RNA, 22 nt, Human
ggagccagagucugcaguguaa

SEQ ID NO: 1082632 - RNA, 22 nt, Human
uugcauugaaaauauauuuuaa

SEQ ID NO: 1082633 - RNA, 22 nt, Human
gucacacaauaguaaguggucc

SEQ ID NO: 1082634 - RNA, 22 nt, Human
cagccucugagccuuggcagau

SEQ ID NO: 1082635 - RNA, 20 nt, Human
agcccaggccugugugaguc

SEQ ID NO: 1082636 - RNA, 22 nt, Human
cagucccagaagagccugggag

SEQ ID NO: 1082637 - RNA, 22 nt, Human
uggcagagcccagacuccaguc

SEQ ID NO: 1082638 - RNA, 20 nt, Human
guuaggagguuggacaugga

SEQ ID NO: 1082639 - RNA, 21 nt, Human
ggagaaggacaauguugagua

SEQ ID NO: 1082640 - RNA, 22 nt, Human
agaauuacauaaauacaugaau

SEQ ID NO: 1082641 - RNA, 18 nt, Human
gagcugccauauuuaguu

SEQ ID NO: 1082642 - RNA, 22 nt, Human
cagcauggugccagugagucca

SEQ ID NO: 1082643 - RNA, 22 nt, Human
uguugauuaguguuuagacuua

SEQ ID NO: 1082644 - RNA, 22 nt, Human
uggguaggccaggaagcagugu

SEQ ID NO: 1082645 - RNA, 22 nt, Human
acagacagauuuugucugaugu

SEQ ID NO: 1082646 - RNA, 22 nt, Human
agauauaauaauuuacaagugu

SEQ ID NO: 1082647 - RNA, 22 nt, Human
aggucagaagugccagggaauu

SEQ ID NO: 1082648 - RNA, 22 nt, Human
uguauuaucaaguaaauacaug

SEQ ID NO: 1082649 - RNA, 22 nt, Human
uggcccugcuggccaaaggcua

SEQ ID NO: 1082650 - RNA, 22 nt, Human
aggcagcaauugaaaucauugu

SEQ ID NO: 1082651 - RNA, 22 nt, Human
aaaaaugaauucuucaguggca

SEQ ID NO: 1082652 - RNA, 22 nt, Human
aagcugauuccacuuuuuccac

SEQ ID NO: 1082653 - RNA, 22 nt, Human
cugcucucuguuccccuggauc

SEQ ID NO: 1082654 - RNA, 22 nt, Human
aaagcaugcuacuuuauauagg

SEQ ID NO: 1082655 - RNA, 22 nt, Human
uauuuggaggccacuguugagu

SEQ ID NO: 1082656 - RNA, 22 nt, Human
aacauucaaaacccaguucagu

SEQ ID NO: 1082657 - RNA, 22 nt, Human
ccaaaguccauaguuuacuuua

SEQ ID NO: 1082658 - RNA, 22 nt, Human
uugggacagaaaaggagaagau

SEQ ID NO: 1082659 - RNA, 22 nt, Human
ggcucagguuuccuucccagcu

SEQ ID NO: 1082660 - RNA, 22 nt, Human
auucacacuguauacacaggau

SEQ ID NO: 1082661 - RNA, 22 nt, Human
ugcucccagggacucuggcugg

SEQ ID NO: 1082662 - RNA, 21 nt, Human
aggagccagccugucagucua

SEQ ID NO: 1082663 - RNA, 22 nt, Human
ucacacagguuugcaaugauuu

SEQ ID NO: 1082664 - RNA, 22 nt, Human
aguuuucauuaccaugcugcaa

SEQ ID NO: 1082665 - RNA, 22 nt, Human
ugcccaggguggagugcagcgg

SEQ ID NO: 1082666 - RNA, 22 nt, Human
uacauguauugauuucucuucu

SEQ ID NO: 1082667 - RNA, 22 nt, Human
ccugcugggccugagcaaugag

SEQ ID NO: 1082668 - RNA, 22 nt, Human
aggguccugggugcaguugcuu

SEQ ID NO: 1082669 - RNA, 22 nt, Human
agaauucugacaauagaauugg

SEQ ID NO: 1082670 - RNA, 22 nt, Human
uuccauauguauauagcuguua

SEQ ID NO: 1082671 - RNA, 22 nt, Human
ucagcagggcugugguguggcu

SEQ ID NO: 1082672 - RNA, 22 nt, Human
ucauuucaguuguucccugguu

SEQ ID NO: 1082673 - RNA, 22 nt, Human
cacaugcuccauacagaauggg

SEQ ID NO: 1082674 - RNA, 22 nt, Human
acauguaaaagauaaauuaaca

SEQ ID NO: 1082675 - RNA, 22 nt, Human
uagcagagcacaucuucauucu

SEQ ID NO: 1082676 - RNA, 22 nt, Human
aggagcugaagucucugcacuc

SEQ ID NO: 1082677 - RNA, 22 nt, Human
ucucagggaugggaggccccag

SEQ ID NO: 1082678 - RNA, 22 nt, Human
aaaguuagucagaaccagccau

SEQ ID NO: 1082679 - RNA, 22 nt, Human
caggaagcaagugauuuucuug

SEQ ID NO: 1082680 - RNA, 22 nt, Human
cucugagacucaagugaguggg

SEQ ID NO: 1082681 - RNA, 22 nt, Human
ccagcccucacugaggccucuc

SEQ ID NO: 1082682 - RNA, 22 nt, Human
agagcugcgucuauucacaauc

SEQ ID NO: 1082683 - RNA, 22 nt, Human
gcuggccuucugcagaguucug

SEQ ID NO: 1082684 - RNA, 22 nt, Human
ugggguggauagaaagugaugu

SEQ ID NO: 1082685 - RNA, 17 nt, Human
aggaaacauuuucuuuc

SEQ ID NO: 1082686 - RNA, 22 nt, Human
aacuuacaauguuagagucuca

SEQ ID NO: 1082687 - RNA, 23 nt, Human
ccugcagcugcuggggcuccacc

SEQ ID NO: 1082688 - RNA, 22 nt, Human
aaacaucugguuaccuaggguc

SEQ ID NO: 1082689 - RNA, 22 nt, Human
acagaacaggcugagaaaaaca

SEQ ID NO: 1082690 - RNA, 22 nt, Human
uaugaagaaaccuauccucuag

SEQ ID NO: 1082691 - RNA, 21 nt, Human
ugaggccugccagucucagaa

SEQ ID NO: 1082692 - RNA, 22 nt, Human
caugaaaucacaagcugaggac

SEQ ID NO: 1082693 - RNA, 22 nt, Human
agcccccaaaagugcuuaugau

SEQ ID NO: 1082694 - RNA, 22 nt, Human
aggccuccuggcuccaggccuu

SEQ ID NO: 1082695 - RNA, 22 nt, Human
ucuccuccuuuuuucaacauag

SEQ ID NO: 1082696 - RNA, 22 nt, Human
agugucaaaucagcaucugggu

SEQ ID NO: 1082697 - RNA, 22 nt, Human
gaaugaguauucuuuauaggau

SEQ ID NO: 1082698 - RNA, 22 nt, Human
ugaggggagacagaguggacuc

SEQ ID NO: 1082699 - RNA, 22 nt, Human
aacuacucaacucugccauugu

SEQ ID NO: 1082700 - RNA, 22 nt, Human
uaaugagucauuccugaaugcu

SEQ ID NO: 1082701 - RNA, 22 nt, Human
ucuggaguguguguauucagcu

SEQ ID NO: 1082702 - RNA, 22 nt, Human
agcagccagagaaugaugcagu

SEQ ID NO: 1082703 - RNA, 22 nt, Human
ugggaagccuagcagacagcug

SEQ ID NO: 1082704 - RNA, 22 nt, Human
augcaguaaaauaggagguaau

SEQ ID NO: 1082705 - RNA, 22 nt, Human
cccacacaaaucauggggagaa

SEQ ID NO: 1082706 - RNA, 22 nt, Human
cagauaaaggcuuacuaguagu

SEQ ID NO: 1082707 - RNA, 22 nt, Human
ccugucugcagauaucucaggu

SEQ ID NO: 1082708 - RNA, 22 nt, Human
uguggcaguauaagagcuagaa

SEQ ID NO: 1082709 - RNA, 22 nt, Human
acccagagcugggcuuggcaaa

SEQ ID NO: 1082710 - RNA, 22 nt, Human
gugucaugggguuuguuauaca

SEQ ID NO: 1082711 - RNA, 22 nt, Human
ugggcagaauugugguaguuaa

SEQ ID NO: 1082712 - RNA, 22 nt, Human
acagcugggaacucacacagca

SEQ ID NO: 1082713 - RNA, 22 nt, Human
uuguggcagaccaugagucuaa

SEQ ID NO: 1082714 - RNA, 22 nt, Human
aaguggagagcccuggaggucu

SEQ ID NO: 1082715 - RNA, 22 nt, Human
ugaccaaaggugguuuauuugg

SEQ ID NO: 1082716 - RNA, 22 nt, Human
ccagggcaggggcuggaguuca

SEQ ID NO: 1082717 - RNA, 22 nt, Human
ccauggaacucaguaaauuaua

SEQ ID NO: 1082718 - RNA, 22 nt, Human
ucugccuguucaagucuucuag

SEQ ID NO: 1082719 - RNA, 22 nt, Human
cucugagagugcucagagggua

SEQ ID NO: 1082720 - RNA, 22 nt, Human
uggcugagagucauccugugug

SEQ ID NO: 1082721 - RNA, 22 nt, Human
ugcucugggcucaauggcagcu

SEQ ID NO: 1082722 - RNA, 22 nt, Human
ugaggcagggagaguggauaug

SEQ ID NO: 1082723 - RNA, 19 nt, Human
ugucuuaauuaacucagag

SEQ ID NO: 1082724 - RNA, 22 nt, Human
guuaaaagaacaacucggaggu

SEQ ID NO: 1082725 - RNA, 22 nt, Human
cugguucacaucuguuuaucug

SEQ ID NO: 1082726 - RNA, 22 nt, Human
aauaucagaauguaaugguccu

SEQ ID NO: 1082727 - RNA, 22 nt, Human
ugaauaaacuaugaggaggaau

SEQ ID NO: 1082728 - RNA, 22 nt, Human
uuuaauauuucuuuccugaagc

SEQ ID NO: 1082729 - RNA, 22 nt, Human
aagaucaaguguacuuuaugua

SEQ ID NO: 1082730 - RNA, 22 nt, Human
aggagagucuugagucacuggu

SEQ ID NO: 1082731 - RNA, 22 nt, Human
ugggacugagaauaugaugggg

SEQ ID NO: 1082732 - RNA, 22 nt, Human
uguucuggagauaagagguaga

SEQ ID NO: 1082733 - RNA, 22 nt, Human
aauguaaaguugggcacaaaug

SEQ ID NO: 1082734 - RNA, 22 nt, Human
cagcuggaucccugcagaacuu

SEQ ID NO: 1082735 - RNA, 22 nt, Human
acagugucuccugguacccagu

SEQ ID NO: 1082736 - RNA, 22 nt, Human
agagucugaggcagcugcagcc

SEQ ID NO: 1082737 - RNA, 22 nt, Human
aaagaagguagggcuggugacu

SEQ ID NO: 1082738 - RNA, 22 nt, Human
agaggaggccaggcccacaccu

SEQ ID NO: 1082739 - RNA, 22 nt, Human
gggcugccuuucuucugggagc

SEQ ID NO: 1082740 - RNA, 22 nt, Human
gauuucaaggauguuagaggug

SEQ ID NO: 1082741 - RNA, 19 nt, Human
ucccucccuguaaucucac

SEQ ID NO: 1082742 - RNA, 22 nt, Human
gugauugcccagcaccauuguu

SEQ ID NO: 1082743 - RNA, 22 nt, Human
acacccagcuuuugaaugcccu

SEQ ID NO: 1082744 - RNA, 22 nt, Human
uagggcugugucuccaggacca

SEQ ID NO: 1082745 - RNA, 22 nt, Human
uaauuuaauuccauggauucua

SEQ ID NO: 1082746 - RNA, 22 nt, Human
uucuucaaugugcccuguuuuc

SEQ ID NO: 1082747 - RNA, 22 nt, Human
uuggcagugucacuagggagcc

SEQ ID NO: 1082748 - RNA, 22 nt, Human
gugucauguagaaauugaugaa

SEQ ID NO: 1082749 - RNA, 22 nt, Human
aauaacagugccaugaaauuga

SEQ ID NO: 1082750 - RNA, 22 nt, Human
cugguccuccuugccuucagau

SEQ ID NO: 1082751 - RNA, 22 nt, Human
acagguggacacagcagcaguc

SEQ ID NO: 1082752 - RNA, 21 nt, Human
gaggccucagccucagcuccu

SEQ ID NO: 1082753 - RNA, 22 nt, Human
auccuugagccaaugacugauu

SEQ ID NO: 1082754 - RNA, 22 nt, Human
uuuccaaagcugaguugagcaa

SEQ ID NO: 1082755 - RNA, 22 nt, Human
ggagcagccgcgucucagggca

SEQ ID NO: 1082756 - RNA, 22 nt, Human
aggggccugguuggccucuguu

SEQ ID NO: 1082757 - RNA, 22 nt, Human
augugcaauuauuaagaagaga

SEQ ID NO: 1082758 - RNA, 22 nt, Human
uugauuuuuccagcuucuagag

SEQ ID NO: 1082759 - RNA, 22 nt, Human
augcugaagaguucaugauuau

SEQ ID NO: 1082760 - RNA, 22 nt, Human
cuggauuuuaucauuguaguuu

SEQ ID NO: 1082761 - RNA, 22 nt, Human
caaagcaagggcugaagacucc

SEQ ID NO: 1082762 - RNA, 22 nt, Human
aagcauuuuguuuuaagaauga

SEQ ID NO: 1082763 - RNA, 22 nt, Human
agcagaagaaagccacaugacu

SEQ ID NO: 1082764 - RNA, 22 nt, Human
aagagcugcccaaggugaacag

SEQ ID NO: 1082765 - RNA, 22 nt, Human
aacaugcugccuuucuacgagu

SEQ ID NO: 1082766 - RNA, 22 nt, Human
gagcagcugcagugcagacccu

SEQ ID NO: 1082767 - RNA, 22 nt, Human
ugagguggugcuaaucucugcu

SEQ ID NO: 1082768 - RNA, 22 nt, Human
cuuauaguaugauguugagaau

SEQ ID NO: 1082769 - RNA, 22 nt, Human
ugggaaagccagcagugucacc

SEQ ID NO: 1082770 - RNA, 22 nt, Human
uuacaacagacacauauucuaa

SEQ ID NO: 1082771 - RNA, 22 nt, Human
ugccaggcuaaguggaggacuu

SEQ ID NO: 1082772 - RNA, 20 nt, Human
acauguacuaaugaauacag

SEQ ID NO: 1082773 - RNA, 22 nt, Human
ucauauaaguuuaaaacuaucu

SEQ ID NO: 1082774 - RNA, 22 nt, Human
gggagccaugcuggucuucuuu

SEQ ID NO: 1082775 - RNA, 23 nt, Human
ugggccuggaaagccuuagagag

SEQ ID NO: 1082776 - RNA, 22 nt, Human
uguaggaagauauaaaauaucu

SEQ ID NO: 1082777 - RNA, 22 nt, Human
uagcuuguacugcaguagagaa

SEQ ID NO: 1082778 - RNA, 22 nt, Human
cauacauugaaggagaaaggaa

SEQ ID NO: 1082779 - RNA, 22 nt, Human
aggcagcauucaggggugauga

SEQ ID NO: 1082780 - RNA, 22 nt, Human
caaggccaagucucugugaaga

SEQ ID NO: 1082781 - RNA, 22 nt, Human
uuaaggagcacaguguauuaau

SEQ ID NO: 1082782 - RNA, 22 nt, Human
ccuggcagcuccguggccuucc

SEQ ID NO: 1082783 - RNA, 22 nt, Human
aggugcugaacuggugaggucu

SEQ ID NO: 1082784 - RNA, 22 nt, Human
aguaugaaccuggguucuggau

SEQ ID NO: 1082785 - RNA, 22 nt, Human
uugaggagucaggggcacggaa

SEQ ID NO: 1082786 - RNA, 22 nt, Human
cacaggcuuccaguccccagcu

SEQ ID NO: 1082787 - RNA, 22 nt, Human
cauugacaguucuuuaaguugc

SEQ ID NO: 1082788 - RNA, 22 nt, Human
ccugcagguuucccccggacgg

SEQ ID NO: 1082789 - RNA, 22 nt, Human
ucaaucauucuugccauuuauu

SEQ ID NO: 1082790 - RNA, 22 nt, Human
cauuuuaagaugaccugguuuc

SEQ ID NO: 1082791 - RNA, 22 nt, Human
uauucuugucuuuuccagaaau

SEQ ID NO: 1082792 - RNA, 22 nt, Human
ucacauaaauuuaccagaugau

SEQ ID NO: 1082793 - RNA, 22 nt, Human
aauagcacuuccugaacacauu

SEQ ID NO: 1082794 - RNA, 22 nt, Human
cauucacauucuucuuacuguu

SEQ ID NO: 1082795 - RNA, 21 nt, Human
ucacuagugccuucugucauu

SEQ ID NO: 1082796 - RNA, 22 nt, Human
agaggaugauuuuaaggacacu

SEQ ID NO: 1082797 - RNA, 22 nt, Human
ugaaagagugcaagucaaggag

SEQ ID NO: 1082798 - RNA, 22 nt, Human
cagugaguaaguagacagcuua

SEQ ID NO: 1082799 - RNA, 22 nt, Human
uuuaagugaugaaaugcagaua

SEQ ID NO: 1082800 - RNA, 22 nt, Human
guaacacagaaaugaaauucca

SEQ ID NO: 1082801 - RNA, 22 nt, Human
cagagccugccaccuuucuccc

SEQ ID NO: 1082802 - RNA, 23 nt, Human
acuuccaguugcuucagcauaug

SEQ ID NO: 1082803 - RNA, 22 nt, Human
uucugagaguuguaguguaucc

SEQ ID NO: 1082804 - RNA, 22 nt, Human
gaggugggagggcagucccuaa

SEQ ID NO: 1082805 - RNA, 22 nt, Human
aaaacagacagccaguguagag

SEQ ID NO: 1082806 - RNA, 22 nt, Human
cucugggcaaguaugauagaaa

SEQ ID NO: 1082807 - RNA, 22 nt, Human
gcagagaagaugcccaggcuuc

SEQ ID NO: 1082808 - RNA, 22 nt, Human
ggcaagagggcagauggagugc

SEQ ID NO: 1082809 - RNA, 22 nt, Human
ugaaaugauaucugauaacaaa

SEQ ID NO: 1082810 - RNA, 22 nt, Human
ugggaagggccgauggagccuc

SEQ ID NO: 1082811 - RNA, 22 nt, Human
auuauucaacacuugagaaauu

SEQ ID NO: 1082812 - RNA, 22 nt, Human
cuuucucugugugguaaagggc

SEQ ID NO: 1082813 - RNA, 22 nt, Human
auacuacaagguaugugcuaaa

SEQ ID NO: 1082814 - RNA, 22 nt, Human
ugccucuguggaaauggugguc

SEQ ID NO: 1082815 - RNA, 22 nt, Human
uauugacaauaggcaacugagg

SEQ ID NO: 1082816 - RNA, 22 nt, Human
cuguauaugugcauacacacac

SEQ ID NO: 1082817 - RNA, 22 nt, Human
aacagaaaagguagguggcuuu

SEQ ID NO: 1082818 - RNA, 22 nt, Human
aguucagcuucccaggucacug

SEQ ID NO: 1082819 - RNA, 22 nt, Human
cuuauucagauacagacucuug

SEQ ID NO: 1082820 - RNA, 22 nt, Human
uaggugucugcucuuauuuaac

SEQ ID NO: 1082821 - RNA, 22 nt, Human
gcucucugcagccuccuuggag

SEQ ID NO: 1082822 - RNA, 22 nt, Human
cuugaaagucagcagaguggau

SEQ ID NO: 1082823 - RNA, 22 nt, Human
ucaggcugaaaggacuccaguu

SEQ ID NO: 1082824 - RNA, 22 nt, Human
uggagcugaacuuugaggccag

SEQ ID NO: 1082825 - RNA, 22 nt, Human
guguaugagccuccagcugggc

SEQ ID NO: 1082826 - RNA, 22 nt, Human
ugucaccaguuccaggaaauaa

SEQ ID NO: 1082827 - RNA, 22 nt, Human
cugcggcucugcgggcagcugg

SEQ ID NO: 1082828 - RNA, 22 nt, Human
agaguggcuugcucagcuagca

SEQ ID NO: 1082829 - RNA, 22 nt, Human
cccagggcccuggacagcuaca

SEQ ID NO: 1082830 - RNA, 22 nt, Human
ugguugugcacggagcugcagg

SEQ ID NO: 1082831 - RNA, 22 nt, Human
aaaucaguucacguucugaggu

SEQ ID NO: 1082832 - RNA, 22 nt, Human
uucaaagauuuucccaaagcuc

SEQ ID NO: 1082833 - RNA, 22 nt, Human
cauaugaaauaugaguugaaca

SEQ ID NO: 1082834 - RNA, 22 nt, Human
cuucagugauugcagaaagccu

SEQ ID NO: 1082835 - RNA, 22 nt, Human
gguggggcccaggcaucugaug

SEQ ID NO: 1082836 - RNA, 22 nt, Human
uauuacugagguuuuauggagu

SEQ ID NO: 1082837 - RNA, 21 nt, Human
cucuggaggcaagggagagug

SEQ ID NO: 1082838 - RNA, 22 nt, Human
cggcagagcccugagucagccu

SEQ ID NO: 1082839 - RNA, 20 nt, Human
uucacagaggacucagguca

SEQ ID NO: 1082840 - RNA, 19 nt, Human
aaauucugacagucuuuua

SEQ ID NO: 1082841 - RNA, 22 nt, Human
uacaaaguagaaauucaguaaa

SEQ ID NO: 1082842 - RNA, 22 nt, Human
uuuuggcucuugguaggucaga

SEQ ID NO: 1082843 - RNA, 22 nt, Human
ggagugggaacaaugacauggu

SEQ ID NO: 1082844 - RNA, 22 nt, Human
gcagaggagcaagcuggacacc

SEQ ID NO: 1082845 - RNA, 23 nt, Human
cccagcagagaugaggagggguc

SEQ ID NO: 1082846 - RNA, 22 nt, Human
cagagccucagaauccugugga

SEQ ID NO: 1082847 - RNA, 18 nt, Human
gacacauccccaggccuc

SEQ ID NO: 1082848 - RNA, 22 nt, Human
ucaggaagugguaaaggauguu

SEQ ID NO: 1082849 - RNA, 22 nt, Human
gucaaauaauuuucucaauagu

SEQ ID NO: 1082850 - RNA, 22 nt, Human
aacaaucaaguuucuaaaugac

SEQ ID NO: 1082851 - RNA, 22 nt, Human
uguaucaaaccaaauuaauucu

SEQ ID NO: 1082852 - RNA, 22 nt, Human
acauauguauauguacacaguc

SEQ ID NO: 1082853 - RNA, 22 nt, Human
agcugcaguaaagcucuccagg

SEQ ID NO: 1082854 - RNA, 22 nt, Human
ccugucuguaucgguucagagu

SEQ ID NO: 1082855 - RNA, 22 nt, Human
ugccaggcugucaauucaccca

SEQ ID NO: 1082856 - RNA, 22 nt, Human
gcuccuggcaggcagugugugu

SEQ ID NO: 1082857 - RNA, 22 nt, Human
agucuuuccugcuugacuguuc

SEQ ID NO: 1082858 - RNA, 22 nt, Human
ucugcuguaaagaauuucugcc

SEQ ID NO: 1082859 - RNA, 22 nt, Human
uguuuucuguguagagaucaca

SEQ ID NO: 1082860 - RNA, 22 nt, Human
cccaggaggccaagguugcagu

SEQ ID NO: 1082861 - RNA, 22 nt, Human
agcagggcucuguggagggugg

SEQ ID NO: 1082862 - RNA, 22 nt, Human
cacugcucgcugcagcauggcc

SEQ ID NO: 1082863 - RNA, 22 nt, Human
caguagcaggcacucagcacgu

SEQ ID NO: 1082864 - RNA, 22 nt, Human
uccugggcuugcuccuccagcu

SEQ ID NO: 1082865 - RNA, 22 nt, Human
aguguaucaugguuggcagaca

SEQ ID NO: 1082866 - RNA, 22 nt, Human
gaaagacuaacuagaaagugca

SEQ ID NO: 1082867 - RNA, 22 nt, Human
gagcuggaagucuguggucaga

SEQ ID NO: 1082868 - RNA, 22 nt, Human
gggcugcugcccaggaggcacc

SEQ ID NO: 1082869 - RNA, 22 nt, Human
ccugcaggggagagacuucuag

SEQ ID NO: 1082870 - RNA, 22 nt, Human
ccagcugguuaaaauagagaaa

SEQ ID NO: 1082871 - RNA, 22 nt, Human
agagccuggucugagauaggac

SEQ ID NO: 1082872 - RNA, 22 nt, Human
uuugacagauccuuaacucagc

SEQ ID NO: 1082873 - RNA, 22 nt, Human
ggcugggcugcugggucagagc

SEQ ID NO: 1082874 - RNA, 22 nt, Human
uucaggaaauuugugucacagg

SEQ ID NO: 1082875 - RNA, 22 nt, Human
ucccacaugugaauccucaggu

SEQ ID NO: 1082876 - RNA, 22 nt, Human
guccucuguguaggcugcagac

SEQ ID NO: 1082877 - RNA, 22 nt, Human
ggcagucuuaucagcauuggac

SEQ ID NO: 1082878 - RNA, 22 nt, Human
aguguguguuugggcgguuuau

SEQ ID NO: 1082879 - RNA, 22 nt, Human
uggagcaggccggaaguggcuu

SEQ ID NO: 1082880 - RNA, 22 nt, Human
acagaugguacuaaacccauau

SEQ ID NO: 1082881 - RNA, 22 nt, Human
cccuggaguagcacugggucgc

SEQ ID NO: 1082882 - RNA, 22 nt, Human
cuggagcucuguguguuccuga

SEQ ID NO: 1082883 - RNA, 22 nt, Human
guuugaaaaaagcaguauguaa

SEQ ID NO: 1082884 - RNA, 22 nt, Human
uucuucucucauagauuaaggu

SEQ ID NO: 1082885 - RNA, 22 nt, Human
agaggcaggagguugacuugag

SEQ ID NO: 1082886 - RNA, 22 nt, Human
auaguacacauccuacaauguu

SEQ ID NO: 1082887 - RNA, 22 nt, Human
gagcuuugcuggaagccugggg

SEQ ID NO: 1082888 - RNA, 22 nt, Human
cacagagagcuacgugcagcgu

SEQ ID NO: 1082889 - RNA, 22 nt, Human
acaaauuauagaaaauugagcu

SEQ ID NO: 1082890 - RNA, 22 nt, Human
uggugagagcagaccuucuuuu

SEQ ID NO: 1082891 - RNA, 22 nt, Human
gaaaucauuauaugguauugcu

SEQ ID NO: 1082892 - RNA, 19 nt, Human
ggcucucccuugagagagc

SEQ ID NO: 1082893 - RNA, 23 nt, Human
ucacagggcacuggcugggguug

SEQ ID NO: 1082894 - RNA, 22 nt, Human
uggagcuggaauuugagcugga

SEQ ID NO: 1082895 - RNA, 22 nt, Human
agggucugacuccucuggcaag

SEQ ID NO: 1082896 - RNA, 22 nt, Human
agaucuuuugguuauuauaaga

SEQ ID NO: 1082897 - RNA, 22 nt, Human
uugguuuagagagugugguuac

SEQ ID NO: 1082898 - RNA, 22 nt, Human
aaauauaauuucugccucaaua

SEQ ID NO: 1082899 - RNA, 22 nt, Human
uggcucaggauaauuuucccaa

SEQ ID NO: 1082900 - RNA, 22 nt, Human
uggcugagcugcagcguggcuu

SEQ ID NO: 1082901 - RNA, 21 nt, Human
cucugcugucuaccagcuguu

SEQ ID NO: 1082902 - RNA, 23 nt, Human
agcagccagagauccucggcccu

SEQ ID NO: 1082903 - RNA, 22 nt, Human
agccaggaagagaggccucacc

SEQ ID NO: 1082904 - RNA, 22 nt, Human
agugccuugugugugggcagcc

SEQ ID NO: 1082905 - RNA, 22 nt, Human
agaggggacagccaccugcccg

SEQ ID NO: 1082906 - RNA, 22 nt, Human
ggaccaggggcgcacucccugc

SEQ ID NO: 1082907 - RNA, 22 nt, Human
acuugaaaccuuggcaaacaau

SEQ ID NO: 1082908 - RNA, 19 nt, Human
uggagcagggcccuuguuu

SEQ ID NO: 1082909 - RNA, 22 nt, Human
agaggccggccgagcccauggg

SEQ ID NO: 1082910 - RNA, 22 nt, Human
aaacaucuaucagcauuuuuua

SEQ ID NO: 1082911 - RNA, 22 nt, Human
agcagggccuggcacuccuggg

SEQ ID NO: 1082912 - RNA, 22 nt, Human
ugaugaaaguucaguagugaau

SEQ ID NO: 1082913 - RNA, 21 nt, Human
uggcucuguucaauauaugga

SEQ ID NO: 1082914 - RNA, 22 nt, Human
ugaagcaggguggccagauugu

SEQ ID NO: 1082915 - RNA, 22 nt, Human
gaaaucugaacucuguauccuu

SEQ ID NO: 1082916 - RNA, 22 nt, Human
gaagccacccuccuuccagccc

SEQ ID NO: 1082917 - RNA, 22 nt, Human
cauguuuucuaggcuuucacaa

SEQ ID NO: 1082918 - RNA, 22 nt, Human
acagcuaggaaauggaagaacu

SEQ ID NO: 1082919 - RNA, 22 nt, Human
gaaauguguuguucauuucuaa

SEQ ID NO: 1082920 - RNA, 22 nt, Human
gaggcucagagggagcaugguc

SEQ ID NO: 1082921 - RNA, 22 nt, Human
gaacuuuaaucccuugggcuua

SEQ ID NO: 1082922 - RNA, 22 nt, Human
gcugaggaggugugguuaggug

SEQ ID NO: 1082923 - RNA, 22 nt, Human
agcgagguuuguucuauucagu

SEQ ID NO: 1082924 - RNA, 22 nt, Human
uaaaacuucucauuuuuauggu

SEQ ID NO: 1082925 - RNA, 22 nt, Human
gauuaguauccuuauuaagaga

SEQ ID NO: 1082926 - RNA, 22 nt, Human
auguacaguggaaacuaacaaa

SEQ ID NO: 1082927 - RNA, 22 nt, Human
ccagcugaggcagccacacagg

SEQ ID NO: 1082928 - RNA, 22 nt, Human
uccuguguuacugccuggagcg

SEQ ID NO: 1082929 - RNA, 22 nt, Human
uuuguucacugauguaucccaa

SEQ ID NO: 1082930 - RNA, 22 nt, Human
auuugcuuucagguauaaaagg

SEQ ID NO: 1082931 - RNA, 22 nt, Human
ccagcucuuggugcacuuacau

SEQ ID NO: 1082932 - RNA, 22 nt, Human
uugcccugccucccugagguga

SEQ ID NO: 1082933 - RNA, 22 nt, Human
ucuucagcucugaggcucuggc

SEQ ID NO: 1082934 - RNA, 22 nt, Human
aaaaucugcuuccuuuuacaga

SEQ ID NO: 1082935 - RNA, 22 nt, Human
gcagaaagcuuagaggguuugc

SEQ ID NO: 1082936 - RNA, 22 nt, Human
aggcugcucugcgaagucagcu

SEQ ID NO: 1082937 - RNA, 22 nt, Human
uaaagucagagauccuuggcuu

SEQ ID NO: 1082938 - RNA, 22 nt, Human
gcugcuggagcuuugcagaagg

SEQ ID NO: 1082939 - RNA, 22 nt, Human
cagcaggucccacugagggccc

SEQ ID NO: 1082940 - RNA, 22 nt, Human
gcucccagggcagcgcagaaga

SEQ ID NO: 1082941 - RNA, 22 nt, Human
cuugcucacaguaccuggcuug

SEQ ID NO: 1082942 - RNA, 22 nt, Human
cugggagggguagccaauccua

SEQ ID NO: 1082943 - RNA, 19 nt, Human
agcuccaggccuggaugcu

SEQ ID NO: 1082944 - RNA, 22 nt, Human
auagauguuuuaguaauacugu

SEQ ID NO: 1082945 - RNA, 22 nt, Human
cagagccagcuguccuuggcau

SEQ ID NO: 1082946 - RNA, 22 nt, Human
aaagagcauggaaaguucagga

SEQ ID NO: 1082947 - RNA, 22 nt, Human
gcucugucauuuugcagacacu

SEQ ID NO: 1082948 - RNA, 22 nt, Human
aaggaguuuggguagucauaca

SEQ ID NO: 1082949 - RNA, 22 nt, Human
gcccaugguuacuuuucuggcu

SEQ ID NO: 1082950 - RNA, 22 nt, Human
auuuugaugcuaucuaaugaau

SEQ ID NO: 1082951 - RNA, 22 nt, Human
aggcugaggcuuuccuuggaga

SEQ ID NO: 1082952 - RNA, 22 nt, Human
gggcuggcaucgguugcugaga

SEQ ID NO: 1082953 - RNA, 22 nt, Human
ccuugaaauguucucacugggg

SEQ ID NO: 1082954 - RNA, 22 nt, Human
cuggggaccagugucuguuugu

SEQ ID NO: 1082955 - RNA, 22 nt, Human
auauguuuuuggaaagaacaca

SEQ ID NO: 1082956 - RNA, 22 nt, Human
caacuuuagaccccaaguagcu

SEQ ID NO: 1082957 - RNA, 22 nt, Human
aucacauucuuucaaagcaguc

SEQ ID NO: 1082958 - RNA, 22 nt, Human
cuucagugacagccacccaggc

SEQ ID NO: 1082959 - RNA, 22 nt, Human
ucccaagauuagguuggaaagg

SEQ ID NO: 1082960 - RNA, 22 nt, Human
uuccucuuuagggcuggccagg

SEQ ID NO: 1082961 - RNA, 22 nt, Human
gucacuuuggccucuacagcca

SEQ ID NO: 1082962 - RNA, 22 nt, Human
agcagcaauuuucacugucaau

SEQ ID NO: 1082963 - RNA, 22 nt, Human
gaaugcuaagcaugugggaguu

SEQ ID NO: 1082964 - RNA, 22 nt, Human
cagaggccccagaacuagcucu

SEQ ID NO: 1082965 - RNA, 22 nt, Human
uucaacaacuugguucaaaugg

SEQ ID NO: 1082966 - RNA, 23 nt, Human
uggggcucuggcaggccugaggu

SEQ ID NO: 1082967 - RNA, 22 nt, Human
uuucacaauuuuaaggagcaaa

SEQ ID NO: 1082968 - RNA, 22 nt, Human
uggcaaauauuuuguuuuguaa

SEQ ID NO: 1082969 - RNA, 22 nt, Human
gcauuuuaauaagauucauagg

SEQ ID NO: 1082970 - RNA, 22 nt, Human
uguccugggaaugggaugcagu

SEQ ID NO: 1082971 - RNA, 22 nt, Human
gcacacagauuaggaaacagaa

SEQ ID NO: 1082972 - RNA, 22 nt, Human
aggcugugacagggucauggag

SEQ ID NO: 1082973 - RNA, 22 nt, Human
uccuugaaugaauguucucucc

SEQ ID NO: 1082974 - RNA, 22 nt, Human
cugcaguguucuggaaugcauu

SEQ ID NO: 1082975 - RNA, 22 nt, Human
ucucacugauuugagaccaagg

SEQ ID NO: 1082976 - RNA, 22 nt, Human
uauccaaaguggcauauuauag

SEQ ID NO: 1082977 - RNA, 22 nt, Human
ggaagggccucgggcgugggac

SEQ ID NO: 1082978 - RNA, 22 nt, Human
uacagagauuuauugcuaaggc

SEQ ID NO: 1082979 - RNA, 22 nt, Human
agcagaugagccucaugacugg

SEQ ID NO: 1082980 - RNA, 22 nt, Human
ggaagccaggcugggggaucug

SEQ ID NO: 1082981 - RNA, 21 nt, Human
gccagggaagagaguuggcug

SEQ ID NO: 1082982 - RNA, 20 nt, Human
ucugggcagggcacauggaa

SEQ ID NO: 1082983 - RNA, 22 nt, Human
ccuggauucaagucuuucuuuc

SEQ ID NO: 1082984 - RNA, 22 nt, Human
aaacagaaauuuccucaugcuc

SEQ ID NO: 1082985 - RNA, 22 nt, Human
uaggagcuaaaauauuuuauau

SEQ ID NO: 1082986 - RNA, 22 nt, Human
gcucacagccggcuggcagggg

SEQ ID NO: 1082987 - RNA, 22 nt, Human
gagggcagagacagugauucac

SEQ ID NO: 1082988 - RNA, 19 nt, Human
aggcugcaagguggugggc

SEQ ID NO: 1082989 - RNA, 22 nt, Human
cacagcuucuccuugauaucgc

SEQ ID NO: 1082990 - RNA, 22 nt, Human
ggccuucacgugaccuggcgug

SEQ ID NO: 1082991 - RNA, 22 nt, Human
ugaggaagggugugacggcacc

SEQ ID NO: 1082992 - RNA, 22 nt, Human
aaauagagcuggguuaaacuuu

SEQ ID NO: 1082993 - RNA, 22 nt, Human
gagauggagucuuuuucuguca

SEQ ID NO: 1082994 - RNA, 22 nt, Human
uugaagcagagaaauacuugaa

SEQ ID NO: 1082995 - RNA, 22 nt, Human
acuguucugccaagaucaacgu

SEQ ID NO: 1082996 - RNA, 22 nt, Human
ggaggccaguccuggccgggcu

SEQ ID NO: 1082997 - RNA, 22 nt, Human
auguuugaaauuguaaguauau

SEQ ID NO: 1082998 - RNA, 22 nt, Human
ucucagaguuuuuuuccaggac

SEQ ID NO: 1082999 - RNA, 22 nt, Human
ugaucugguccuacugugggca

SEQ ID NO: 1083000 - RNA, 22 nt, Human
gauauuuucgcagggagaauuc

SEQ ID NO: 1083001 - RNA, 22 nt, Human
agcaaggaaaguaggcacggaa

SEQ ID NO: 1083002 - RNA, 22 nt, Human
gaggagcucugcuccauccuuc

SEQ ID NO: 1083003 - RNA, 22 nt, Human
gcuggcauuacaggagagaacc

SEQ ID NO: 1083004 - RNA, 23 nt, Human
ugcaggcuaggaagagagccuuc

SEQ ID NO: 1083005 - RNA, 22 nt, Human
acaguguauaaaaucuuaaaga

SEQ ID NO: 1083006 - RNA, 22 nt, Human
uuuuauaagcaagaaagggaaa

SEQ ID NO: 1083007 - RNA, 22 nt, Human
uggccaggccucuuggugccca

SEQ ID NO: 1083008 - RNA, 22 nt, Human
ugggaggaucucuugaggccag

SEQ ID NO: 1083009 - RNA, 22 nt, Human
ggaggaggggcgcuuugucuau

SEQ ID NO: 1083010 - RNA, 22 nt, Human
gcccaugcacuuucugugaugg

SEQ ID NO: 1083011 - RNA, 22 nt, Human
ggaaaacagcgauugguaucau

SEQ ID NO: 1083012 - RNA, 22 nt, Human
uugauuuauagaauguucaagc

SEQ ID NO: 1083013 - RNA, 22 nt, Human
gguuugcauucugaaaggcuca

SEQ ID NO: 1083014 - RNA, 22 nt, Human
gauauuuuuaguauuucugccu

SEQ ID NO: 1083015 - RNA, 22 nt, Human
ccagggaguuuccaaucugaga

SEQ ID NO: 1083016 - RNA, 22 nt, Human
cacacacuguuaauguaggagu

SEQ ID NO: 1083017 - RNA, 22 nt, Human
gucggccacgcaggugcgguag

SEQ ID NO: 1083018 - RNA, 22 nt, Human
uugcaaaagccgaggcacucca

SEQ ID NO: 1083019 - RNA, 20 nt, Human
uuguuagaggaaugccauag

SEQ ID NO: 1083020 - RNA, 22 nt, Human
gaggcucaccuagggagcacug

SEQ ID NO: 1083021 - RNA, 23 nt, Human
ccugugugcccuuaauucacagc

SEQ ID NO: 1083022 - RNA, 22 nt, Human
uccucuggauauaagccucacc

SEQ ID NO: 1083023 - RNA, 22 nt, Human
agaauuuuugcaguuuagccau

SEQ ID NO: 1083024 - RNA, 22 nt, Human
gaugauuuucuguguuagaaga

SEQ ID NO: 1083025 - RNA, 22 nt, Human
gcagcuuuguggagaggcccau

SEQ ID NO: 1083026 - RNA, 22 nt, Human
gaaguuaguguggaugcaggga

SEQ ID NO: 1083027 - RNA, 22 nt, Human
ggcagguguuuuuauauuaaag

SEQ ID NO: 1083028 - RNA, 22 nt, Human
uaguauuuccuguaagcuauag

SEQ ID NO: 1083029 - RNA, 22 nt, Human
gccaggcaaauuaaggaaugca

SEQ ID NO: 1083030 - RNA, 22 nt, Human
aaaggucaaaaucgugacauug

SEQ ID NO: 1083031 - RNA, 22 nt, Human
ugagaguauuuuggcauuauca

SEQ ID NO: 1083032 - RNA, 22 nt, Human
ccucuugccaaucagcuacaga

SEQ ID NO: 1083033 - RNA, 22 nt, Human
uagcuagaaagugaagaucaca

SEQ ID NO: 1083034 - RNA, 22 nt, Human
ccuucccuaaagcgucgcuuag

SEQ ID NO: 1083035 - RNA, 22 nt, Human
gagggccaacuagcaccacuuu

SEQ ID NO: 1083036 - RNA, 22 nt, Human
agcucagcgggcuucugguaag

SEQ ID NO: 1083037 - RNA, 22 nt, Human
cagggagaggcaucauagggaa

SEQ ID NO: 1083038 - RNA, 22 nt, Human
caucugcugacuugacaaguac

SEQ ID NO: 1083039 - RNA, 22 nt, Human
cuggugguucaggagaauggcu

SEQ ID NO: 1083040 - RNA, 23 nt, Human
uguggccugcagcucugguuugg

SEQ ID NO: 1083041 - RNA, 22 nt, Human
ugcagcagcagggaggaggcuc

SEQ ID NO: 1083042 - RNA, 22 nt, Human
agcccuggcccggcugugcuuu

SEQ ID NO: 1083043 - RNA, 22 nt, Human
guuaauaaagguauagaaucag

SEQ ID NO: 1083044 - RNA, 21 nt, Human
ggugggcacaggagagcagag

SEQ ID NO: 1083045 - RNA, 19 nt, Human
ggcaggcuggauagagagg

SEQ ID NO: 1083046 - RNA, 22 nt, Human
gagcugccaagauuacaaucag

SEQ ID NO: 1083047 - RNA, 22 nt, Human
ucuucaauauguguuuaauauu

SEQ ID NO: 1083048 - RNA, 17 nt, Human
ucuucucuuccagucuu

SEQ ID NO: 1083049 - RNA, 22 nt, Human
uccucuucugcccaucagaggc

SEQ ID NO: 1083050 - RNA, 22 nt, Human
ucagccagguaauguggagaug

SEQ ID NO: 1083051 - RNA, 22 nt, Human
uuggcagugaugcagcuuguuc

SEQ ID NO: 1083052 - RNA, 22 nt, Human
guggcccaggcuuggcgcuggc

SEQ ID NO: 1083053 - RNA, 22 nt, Human
aagguuucgggagcgggucugg

SEQ ID NO: 1083054 - RNA, 22 nt, Human
ccacuuucugagggaacagcag

SEQ ID NO: 1083055 - RNA, 22 nt, Human
augcaguaaauguucuaguuug

SEQ ID NO: 1083056 - RNA, 22 nt, Human
cugccugugccaccgccucauu

SEQ ID NO: 1083057 - RNA, 22 nt, Human
uaacugaacagccuaauucuuu

SEQ ID NO: 1083058 - RNA, 22 nt, Human
gcaccaggaggcccuucucauc

SEQ ID NO: 1083059 - RNA, 22 nt, Human
ccuccuggugggcgcuucuggc

SEQ ID NO: 1083060 - RNA, 22 nt, Human
aaacaucuucucuugauucuuu

SEQ ID NO: 1083061 - RNA, 22 nt, Human
cacuggggaaaacaggcuucuu

SEQ ID NO: 1083062 - RNA, 22 nt, Human
uggcuaacaguuaagauuucau

SEQ ID NO: 1083063 - RNA, 22 nt, Human
uagauuaucccugauuugucca

SEQ ID NO: 1083064 - RNA, 22 nt, Human
cuggcagcccaaccuagagucu

SEQ ID NO: 1083065 - RNA, 22 nt, Human
augggcagagcuggugggaggc

SEQ ID NO: 1083066 - RNA, 22 nt, Human
ucucuuguaauuuaaaaaaucu

SEQ ID NO: 1083067 - RNA, 22 nt, Human
auacauacauguacacauaaau

SEQ ID NO: 1083068 - RNA, 22 nt, Human
uccaggcccgagaugggcugga

SEQ ID NO: 1083069 - RNA, 22 nt, Human
cagcuguugugauuuccaggag

SEQ ID NO: 1083070 - RNA, 22 nt, Human
guccagugucuucuacauaaca

SEQ ID NO: 1083071 - RNA, 22 nt, Human
uccuggagccacggagcuuuca

SEQ ID NO: 1083072 - RNA, 22 nt, Human
cagggacaauggcagagccuga

SEQ ID NO: 1083073 - RNA, 21 nt, Human
ucuuuucucagcuuugugguu

SEQ ID NO: 1083074 - RNA, 22 nt, Human
gcuccagcucguggcucccagc

SEQ ID NO: 1083075 - RNA, 22 nt, Human
uaugacaagaaauacagaggua

SEQ ID NO: 1083076 - RNA, 22 nt, Human
uuugugaauaagagaaugacag

SEQ ID NO: 1083077 - RNA, 22 nt, Human
agcugccaggccccugagaacc

SEQ ID NO: 1083078 - RNA, 22 nt, Human
aaacauuguaauuuuagcaugg

SEQ ID NO: 1083079 - RNA, 22 nt, Human
auaaaacuuauuagaauugugu

SEQ ID NO: 1083080 - RNA, 22 nt, Human
aagaaagcauuagacaggcauu

SEQ ID NO: 1083081 - RNA, 22 nt, Human
aucagcugaaaaacaggcagca

SEQ ID NO: 1083082 - RNA, 22 nt, Human
ugugcaggugcaggaagggggc

SEQ ID NO: 1083083 - RNA, 22 nt, Human
ucagaauugucuggggaauguu

SEQ ID NO: 1083084 - RNA, 22 nt, Human
uggccucuuacgacauagccuu

SEQ ID NO: 1083085 - RNA, 22 nt, Human
agaacuuuuggagacuuuuagu

SEQ ID NO: 1083086 - RNA, 22 nt, Human
aagccaggcaugcuuggacagu

SEQ ID NO: 1083087 - RNA, 22 nt, Human
gaggaacaagcugcuuuaucuu

SEQ ID NO: 1083088 - RNA, 22 nt, Human
gaggccacagcuaucagggaca

SEQ ID NO: 1083089 - RNA, 17 nt, Human
gggcagggacuccuggg

SEQ ID NO: 1083090 - RNA, 22 nt, Human
uaacaagucauuuuaucagcag

SEQ ID NO: 1083091 - RNA, 22 nt, Human
uauggaaauaauuagacaagug

SEQ ID NO: 1083092 - RNA, 22 nt, Human
uggagcuggaagacagugauau

SEQ ID NO: 1083093 - RNA, 22 nt, Human
aagugaaauugccauucuuaua

SEQ ID NO: 1083094 - RNA, 22 nt, Human
agaaaucauucccaaacccaua

SEQ ID NO: 1083095 - RNA, 22 nt, Human
aucugcuuagaauucauugucc

SEQ ID NO: 1083096 - RNA, 22 nt, Human
aggcaguguguagcuggaagag

SEQ ID NO: 1083097 - RNA, 19 nt, Human
uggaccugugcccauggcu

SEQ ID NO: 1083098 - RNA, 22 nt, Human
aaagugacaaccauuuauuaag

SEQ ID NO: 1083099 - RNA, 22 nt, Human
gcuguucuguccccauggguaa

SEQ ID NO: 1083100 - RNA, 22 nt, Human
aaggaagacuugagaagguucc

SEQ ID NO: 1083101 - RNA, 23 nt, Human
ucuccuggcugcacuguggccac

SEQ ID NO: 1083102 - RNA, 22 nt, Human
cagagcugucauuugccaguga

SEQ ID NO: 1083103 - RNA, 22 nt, Human
aucauaaaccacuuuguaaucu

SEQ ID NO: 1083104 - RNA, 22 nt, Human
ucauauuuugcaaggucagcua

SEQ ID NO: 1083105 - RNA, 22 nt, Human
uagggcaggugaagaaaagcua

SEQ ID NO: 1083106 - RNA, 22 nt, Human
aguggugccggguggguuuugc

SEQ ID NO: 1083107 - RNA, 22 nt, Human
ugcagggcaucuuugaagugug

SEQ ID NO: 1083108 - RNA, 22 nt, Human
ccagggggcuuggugaggccau

SEQ ID NO: 1083109 - RNA, 22 nt, Human
uagagcauuuagaggggcagga

SEQ ID NO: 1083110 - RNA, 22 nt, Human
gcagguggugggggagccguuc

SEQ ID NO: 1083111 - RNA, 22 nt, Human
ccaguuuugccaugguaacacu

SEQ ID NO: 1083112 - RNA, 22 nt, Human
uacagugucccuuuuucagaca

SEQ ID NO: 1083113 - RNA, 22 nt, Human
gcugagagcggccagcugggaa

SEQ ID NO: 1083114 - RNA, 19 nt, Human
cagauggccaccuacuugc

SEQ ID NO: 1083115 - RNA, 22 nt, Human
gaggaaaaugcaacaggaaugc

SEQ ID NO: 1083116 - RNA, 22 nt, Human
uucuucuccgaggagggcuggu

SEQ ID NO: 1083117 - RNA, 22 nt, Human
guucuggaggagagccuggugu

SEQ ID NO: 1083118 - RNA, 22 nt, Human
gcccucagcuccuggacacaug

SEQ ID NO: 1083119 - RNA, 22 nt, Human
uacauagcaaggaaaugacaga

SEQ ID NO: 1083120 - RNA, 22 nt, Human
aggaugugaguggacacagucc

SEQ ID NO: 1083121 - RNA, 22 nt, Human
caggggcuuaagugacagaagg

SEQ ID NO: 1083122 - RNA, 22 nt, Human
acccugagucagacagccugac

SEQ ID NO: 1083123 - RNA, 22 nt, Human
uccaaauucuauguucuuucca

SEQ ID NO: 1083124 - RNA, 23 nt, Human
ccagccucugggucuucauccag

SEQ ID NO: 1083125 - RNA, 22 nt, Human
cacagcauaaugaaauauacuu

SEQ ID NO: 1083126 - RNA, 22 nt, Human
uggcucuggauuaaucuaggaa

SEQ ID NO: 1083127 - RNA, 22 nt, Human
ucaauucuaguggagagaguuu

SEQ ID NO: 1083128 - RNA, 19 nt, Human
ugucucugaaagaugagcu

SEQ ID NO: 1083129 - RNA, 22 nt, Human
uuuacugagugaccuagaauaa

SEQ ID NO: 1083130 - RNA, 22 nt, Human
aaucaggaugacugucauuuca

SEQ ID NO: 1083131 - RNA, 22 nt, Human
uuugcaaugugaaauuaaagaa

SEQ ID NO: 1083132 - RNA, 22 nt, Human
ggauggcagucugcaugagaaa

SEQ ID NO: 1083133 - RNA, 22 nt, Human
cagcauugaucccaggcugugg

SEQ ID NO: 1083134 - RNA, 22 nt, Human
auuacauauguuggcaacauuu

SEQ ID NO: 1083135 - RNA, 21 nt, Human
caugaagccgguucccuguuu

SEQ ID NO: 1083136 - RNA, 22 nt, Human
ucucuucuauuugagacuauuu

SEQ ID NO: 1083137 - RNA, 22 nt, Human
uugcccuagggucuuauccucc

SEQ ID NO: 1083138 - RNA, 22 nt, Human
ugaggcaguugagcuuccugag

SEQ ID NO: 1083139 - RNA, 22 nt, Human
ugccucauuaacuguccuuaau

SEQ ID NO: 1083140 - RNA, 22 nt, Human
gcugggagccguaccugucacg

SEQ ID NO: 1083141 - RNA, 22 nt, Human
uucuuuuacauuaagauuucag

SEQ ID NO: 1083142 - RNA, 22 nt, Human
caguaggaaggaugcagaaaaa

SEQ ID NO: 1083143 - RNA, 22 nt, Human
ccuuuaggagugaggaccgagc

SEQ ID NO: 1083144 - RNA, 22 nt, Human
ucuucucucauguaggagggaa

SEQ ID NO: 1083145 - RNA, 22 nt, Human
ggguacuuaauauuuacggggu

SEQ ID NO: 1083146 - RNA, 22 nt, Human
aaaagcagaucuccaaagucua

SEQ ID NO: 1083147 - RNA, 19 nt, Human
uauuauuuguagcaaggcc

SEQ ID NO: 1083148 - RNA, 22 nt, Human
aaugauguauuaguacaacaca

SEQ ID NO: 1083149 - RNA, 22 nt, Human
ugccuuuuguaugcaggccaug

SEQ ID NO: 1083150 - RNA, 22 nt, Human
gcugccuguugaagggucugug

SEQ ID NO: 1083151 - RNA, 22 nt, Human
uuucucacccaagaguuauuuu

SEQ ID NO: 1083152 - RNA, 22 nt, Human
uucugaaaccuucaguaugaag

SEQ ID NO: 1083153 - RNA, 22 nt, Human
augaaagaugauuuaaaguacu

SEQ ID NO: 1083154 - RNA, 22 nt, Human
aguaaaauuguauuggaaaaca

SEQ ID NO: 1083155 - RNA, 22 nt, Human
agggccagcugcagaauuagca

SEQ ID NO: 1083156 - RNA, 22 nt, Human
aggcuggcuuugguagcauggu

SEQ ID NO: 1083157 - RNA, 20 nt, Human
aggagaugauccagagucag

SEQ ID NO: 1083158 - RNA, 22 nt, Human
ucaggugggaguagaaugcuag

SEQ ID NO: 1083159 - RNA, 22 nt, Human
ggugaggaaagauggugacagu

SEQ ID NO: 1083160 - RNA, 22 nt, Human
cauuuggauuuugaagagagua

SEQ ID NO: 1083161 - RNA, 22 nt, Human
uuuuuugucuugaagaaauggu

SEQ ID NO: 1083162 - RNA, 22 nt, Human
augggaggcagcagagcccagc

SEQ ID NO: 1083163 - RNA, 22 nt, Human
cuuuuccuauugauucuguuac

SEQ ID NO: 1083164 - RNA, 22 nt, Human
ucuuuccauggccacacagucu

SEQ ID NO: 1083165 - RNA, 22 nt, Human
ucuuuucauugagaacacacug

SEQ ID NO: 1083166 - RNA, 22 nt, Human
gcccucgcuucuuccuaggggu

SEQ ID NO: 1083167 - RNA, 19 nt, Human
ucacaagagagauaaagug

SEQ ID NO: 1083168 - RNA, 22 nt, Human
agcuucuggaaggcaaggcuug

SEQ ID NO: 1083169 - RNA, 22 nt, Human
uuccagauuucuacacaagacc

SEQ ID NO: 1083170 - RNA, 22 nt, Human
uuucacagaggaggaagcugag

SEQ ID NO: 1083171 - RNA, 22 nt, Human
gagauucuguagucaggcaucu

SEQ ID NO: 1083172 - RNA, 22 nt, Human
cagcaucuguauccuaggcuga

SEQ ID NO: 1083173 - RNA, 22 nt, Human
aggcacugaagaacucuuuuug

SEQ ID NO: 1083174 - RNA, 21 nt, Human
uacagcaacggagguuuucua

SEQ ID NO: 1083175 - RNA, 22 nt, Human
acccaggacucucuuccaguag

SEQ ID NO: 1083176 - RNA, 20 nt, Human
cuuguacaugauaaagauuu

SEQ ID NO: 1083177 - RNA, 22 nt, Human
aauguguuaguauugauuuguc

SEQ ID NO: 1083178 - RNA, 22 nt, Human
auggaaagcuaagccauuuacc

SEQ ID NO: 1083179 - RNA, 22 nt, Human
uugcccagaguccacagcguac

SEQ ID NO: 1083180 - RNA, 22 nt, Human
gucccugggucuaaggcaguaa

SEQ ID NO: 1083181 - RNA, 19 nt, Human
gguggcucucccucaggga

SEQ ID NO: 1083182 - RNA, 22 nt, Human
cagugcagaggugcaagcaugu

SEQ ID NO: 1083183 - RNA, 22 nt, Human
uacaucuaucuagaugcucaga

SEQ ID NO: 1083184 - RNA, 22 nt, Human
ugccaggcugaacagggucuua

SEQ ID NO: 1083185 - RNA, 20 nt, Human
uuauuucaguugcuagauug

SEQ ID NO: 1083186 - RNA, 22 nt, Human
uacaaaaguaauuacgguuuuu

SEQ ID NO: 1083187 - RNA, 22 nt, Human
auauguguauuugguuagccua

SEQ ID NO: 1083188 - RNA, 22 nt, Human
uaagaauuaucucauggauaau

SEQ ID NO: 1083189 - RNA, 22 nt, Human
ccaccaggacagcccugagggg

SEQ ID NO: 1083190 - RNA, 17 nt, Human
auuuacauugucaccga

SEQ ID NO: 1083191 - RNA, 22 nt, Human
gccaaagcagucuugccucugc

SEQ ID NO: 1083192 - RNA, 18 nt, Human
gagcugggagaaggaagg

SEQ ID NO: 1083193 - RNA, 22 nt, Human
augggcaguaacaguggcaguc

SEQ ID NO: 1083194 - RNA, 19 nt, Human
uaaaucuguauucuucaaa

SEQ ID NO: 1083195 - RNA, 22 nt, Human
aguggcaggaaaguggaagaga

SEQ ID NO: 1083196 - RNA, 22 nt, Human
ucacacgugagguucuauccug

SEQ ID NO: 1083197 - RNA, 22 nt, Human
uaacagaaauuuuaguuagggg

SEQ ID NO: 1083198 - RNA, 20 nt, Human
uucuuuugauaagcuugaca

SEQ ID NO: 1083199 - RNA, 22 nt, Human
aggaagaaacugagcucugaca

SEQ ID NO: 1083200 - RNA, 21 nt, Human
ucccagcugggucagugcugc

SEQ ID NO: 1083201 - RNA, 22 nt, Human
agaggccuccgaaaggugggcu

SEQ ID NO: 1083202 - RNA, 22 nt, Human
uuagauaaaaguguucaauaaa

SEQ ID NO: 1083203 - RNA, 22 nt, Human
gccuggagaauuaaaaggaagg

SEQ ID NO: 1083204 - RNA, 22 nt, Human
ucaauucugcauacauuucacu

SEQ ID NO: 1083205 - RNA, 22 nt, Human
ggcugagggccagggcuagucu

SEQ ID NO: 1083206 - RNA, 22 nt, Human
uuuguacauguaagauugcauc

SEQ ID NO: 1083207 - RNA, 22 nt, Human
gccuguguguuuagcucugggg

SEQ ID NO: 1083208 - RNA, 22 nt, Human
uuucugaaaucucuuuugagga

SEQ ID NO: 1083209 - RNA, 22 nt, Human
cacaggcugcccgcagcuggga

SEQ ID NO: 1083210 - RNA, 18 nt, Human
gguggcaggucagaugcc

SEQ ID NO: 1083211 - RNA, 22 nt, Human
guccacauaggaacccagcuuc

SEQ ID NO: 1083212 - RNA, 22 nt, Human
auaugcaagcacauagaauacu

SEQ ID NO: 1083213 - RNA, 22 nt, Human
gguguagcucugugucccacug

SEQ ID NO: 1083214 - RNA, 22 nt, Human
aaagcagugcugugagaacacu

SEQ ID NO: 1083215 - RNA, 22 nt, Human
agcugcccuggcggagcugcuc

SEQ ID NO: 1083216 - RNA, 22 nt, Human
ucucagucagccuugauguccc

SEQ ID NO: 1083217 - RNA, 22 nt, Human
ugcuggcugcagugcugucaaa

SEQ ID NO: 1083218 - RNA, 22 nt, Human
gucuaaacuuagggaucgaaca

SEQ ID NO: 1083219 - RNA, 22 nt, Human
agaucacagucaauugcaaguu

SEQ ID NO: 1083220 - RNA, 22 nt, Human
ugaggcagcaauugauuauuca

SEQ ID NO: 1083221 - RNA, 22 nt, Human
agggcucaucugagacugacau

SEQ ID NO: 1083222 - RNA, 18 nt, Human
uccagcgugcuccagggc

SEQ ID NO: 1083223 - RNA, 22 nt, Human
ugcagggaacuuggacagcuag

SEQ ID NO: 1083224 - RNA, 22 nt, Human
caggagcugggucuggaagcag

SEQ ID NO: 1083225 - RNA, 22 nt, Human
gggcccugugauuucuugagga

SEQ ID NO: 1083226 - RNA, 22 nt, Human
gcugucacacaugggaucucag

SEQ ID NO: 1083227 - RNA, 22 nt, Human
aaggcacuuuucuaaagaccuu

SEQ ID NO: 1083228 - RNA, 22 nt, Human
gcagcuggcccugacacgcaga

SEQ ID NO: 1083229 - RNA, 18 nt, Human
gcugagguggugucagag

SEQ ID NO: 1083230 - RNA, 22 nt, Human
ggcaggugguaaggauuucaua

SEQ ID NO: 1083231 - RNA, 22 nt, Human
caucaaagcuuuuuucuguguu

SEQ ID NO: 1083232 - RNA, 22 nt, Human
ucuuccaggcuagaguuguugc

SEQ ID NO: 1083233 - RNA, 22 nt, Human
caaguuaguuauucuugugagc

SEQ ID NO: 1083234 - RNA, 22 nt, Human
acagaagugacaauuucuuggg

SEQ ID NO: 1083235 - RNA, 22 nt, Human
cugcagcuguagaggacagugg

SEQ ID NO: 1083236 - RNA, 22 nt, Human
uccugcuuccuugucuuuagac

SEQ ID NO: 1083237 - RNA, 22 nt, Human
ugcauuguaggauguuuagcag

SEQ ID NO: 1083238 - RNA, 22 nt, Human
agagccugucugccuuucuacc

SEQ ID NO: 1083239 - RNA, 21 nt, Human
gaaggagaaagcaagugcugc

SEQ ID NO: 1083240 - RNA, 22 nt, Human
uucaggagcuggcugcgaagga

SEQ ID NO: 1083241 - RNA, 22 nt, Human
ccagguacauggagaagaacag

SEQ ID NO: 1083242 - RNA, 22 nt, Human
agaaugcuuguaccuuuguuuu

SEQ ID NO: 1083243 - RNA, 22 nt, Human
gugcauguuaaugguguacaaa

SEQ ID NO: 1083244 - RNA, 22 nt, Human
gcccaugggcuccagaccuggg

SEQ ID NO: 1083245 - RNA, 22 nt, Human
cagaauaaacagaaacguagcu

SEQ ID NO: 1083246 - RNA, 22 nt, Human
ccaggagucuggaugagguguc

SEQ ID NO: 1083247 - RNA, 22 nt, Human
cagcugccuaugaccuagccuc

SEQ ID NO: 1083248 - RNA, 22 nt, Human
cccuggcauaaaacuucuccag

SEQ ID NO: 1083249 - RNA, 22 nt, Human
cagaggcugcucuggguggcau

SEQ ID NO: 1083250 - RNA, 22 nt, Human
caggccugagacaucugagaua

SEQ ID NO: 1083251 - RNA, 22 nt, Human
ucccagagacagagccuccucc

SEQ ID NO: 1083252 - RNA, 22 nt, Human
caagagcucccagaccugggca

SEQ ID NO: 1083253 - RNA, 22 nt, Human
cacucacuuauuucuaacagaa

SEQ ID NO: 1083254 - RNA, 22 nt, Human
caggccaggcugcauuugcccc

SEQ ID NO: 1083255 - RNA, 22 nt, Human
ccagcuccccucagcagguaau

SEQ ID NO: 1083256 - RNA, 21 nt, Human
ugcucaugcaaugcaugucca

SEQ ID NO: 1083257 - RNA, 22 nt, Human
gucaggaucucccaguacauau

SEQ ID NO: 1083258 - RNA, 22 nt, Human
aguuuuaugcaguguucugaua

SEQ ID NO: 1083259 - RNA, 22 nt, Human
agcucccugagaugccacagca

SEQ ID NO: 1083260 - RNA, 22 nt, Human
ucauucauacucuuuucuauua

SEQ ID NO: 1083261 - RNA, 22 nt, Human
caguuuuuagauuaguuggugg

SEQ ID NO: 1083262 - RNA, 20 nt, Human
gagccuuccccucaccacug

SEQ ID NO: 1083263 - RNA, 22 nt, Human
ugccaggcauguaguagacuug

SEQ ID NO: 1083264 - RNA, 22 nt, Human
uuuguuuagaugguaaaucagu

SEQ ID NO: 1083265 - RNA, 22 nt, Human
uagcauuucacugaucuucacu

SEQ ID NO: 1083266 - RNA, 22 nt, Human
cugcuccacaccuccauuuccu

SEQ ID NO: 1083267 - RNA, 22 nt, Human
uuacauuuggcuauguccucua

SEQ ID NO: 1083268 - RNA, 22 nt, Human
agcagcagggacaaaggaacag

SEQ ID NO: 1083269 - RNA, 22 nt, Human
cuguccuccggccaccuacagu

SEQ ID NO: 1083270 - RNA, 22 nt, Human
agaccaggaaggccuacagaua

SEQ ID NO: 1083271 - RNA, 22 nt, Human
ggcugcaguuugucuuuugcuu

SEQ ID NO: 1083272 - RNA, 22 nt, Human
gagaaaugcuagcuuaggaauc

SEQ ID NO: 1083273 - RNA, 22 nt, Human
cacaauuuuaauacacagucaa

SEQ ID NO: 1083274 - RNA, 22 nt, Human
uuaauuuugaugagguucaguu

SEQ ID NO: 1083275 - RNA, 22 nt, Human
acaagaauguagauuaguuaag

SEQ ID NO: 1083276 - RNA, 22 nt, Human
gaaggcuguggcuggucucagu

SEQ ID NO: 1083277 - RNA, 22 nt, Human
aggcacugacagauucuguguc

SEQ ID NO: 1083278 - RNA, 22 nt, Human
caaaguccuagaacagugcuug

SEQ ID NO: 1083279 - RNA, 22 nt, Human
gccuggccugaacuaggaggug

SEQ ID NO: 1083280 - RNA, 21 nt, Human
gcugcucgagauccagugcuu

SEQ ID NO: 1083281 - RNA, 22 nt, Human
gagccuggccuccugccucagc

SEQ ID NO: 1083282 - RNA, 22 nt, Human
uucuuucuguccauaaugagac

SEQ ID NO: 1083283 - RNA, 22 nt, Human
uuaaaauagccagugccccucu

SEQ ID NO: 1083284 - RNA, 22 nt, Human
uggcucugucaaacugcacaca

SEQ ID NO: 1083285 - RNA, 22 nt, Human
ggccacuccgcugcuacuggaa

SEQ ID NO: 1083286 - RNA, 19 nt, Human
ggaggccuggguauuugcc

SEQ ID NO: 1083287 - RNA, 22 nt, Human
guggaggagaggcgccuugcgg

SEQ ID NO: 1083288 - RNA, 22 nt, Human
cuguggcuuucucugccuccuu

SEQ ID NO: 1083289 - RNA, 22 nt, Human
acaguggaagaagcacugaacu

SEQ ID NO: 1083290 - RNA, 20 nt, Human
acacaguagcaauuagugca

SEQ ID NO: 1083291 - RNA, 22 nt, Human
guguaaaucagcuuguguaaua

SEQ ID NO: 1083292 - RNA, 18 nt, Human
uuaagagcugaaagggga

SEQ ID NO: 1083293 - RNA, 22 nt, Human
uucuuuucuuuaggcauugugu

SEQ ID NO: 1083294 - RNA, 22 nt, Human
acagaauaguagcuuaaaguca

SEQ ID NO: 1083295 - RNA, 22 nt, Human
uacaugcucaguaacuuucagu

SEQ ID NO: 1083296 - RNA, 22 nt, Human
uuuuccucugcagagcaguuag

SEQ ID NO: 1083297 - RNA, 22 nt, Human
cuuucugauuuuaagcucuaau

SEQ ID NO: 1083298 - RNA, 22 nt, Human
uuucuuuuccaauaucccuacu

SEQ ID NO: 1083299 - RNA, 22 nt, Human
gcaguccucucauuggccuccu

SEQ ID NO: 1083300 - RNA, 22 nt, Human
uaaagcagugguucucaaacuu

SEQ ID NO: 1083301 - RNA, 16 nt, Human
ccuuuucucaucucua

SEQ ID NO: 1083302 - RNA, 22 nt, Human
ucuggaguuacugcuggcuuug

SEQ ID NO: 1083303 - RNA, 22 nt, Human
uuaguaucuggaaaucacauua

SEQ ID NO: 1083304 - RNA, 22 nt, Human
ggggcagaaagcccacagagug

SEQ ID NO: 1083305 - RNA, 23 nt, Human
agacaaaagccucagucuuaggc

SEQ ID NO: 1083306 - RNA, 22 nt, Human
auaaaaacugacccauccuuug

SEQ ID NO: 1083307 - RNA, 20 nt, Human
uauauuuucucuuuggccuu

SEQ ID NO: 1083308 - RNA, 22 nt, Human
ccagaggaguugaggcuuuggg

SEQ ID NO: 1083309 - RNA, 22 nt, Human
auuagcuuccuauaguaagggg

SEQ ID NO: 1083310 - RNA, 17 nt, Human
agggacagcaguuuagg

SEQ ID NO: 1083311 - RNA, 22 nt, Human
cucuccuccaacagcccugccg

SEQ ID NO: 1083312 - RNA, 22 nt, Human
gccacuguuccaccaucuugau

SEQ ID NO: 1083313 - RNA, 22 nt, Human
uguaaauugaaggaaauuugug

SEQ ID NO: 1083314 - RNA, 21 nt, Human
cugaggcagcacagcuaguca

SEQ ID NO: 1083315 - RNA, 21 nt, Human
ugcuccuuagcugccccugcc

SEQ ID NO: 1083316 - RNA, 22 nt, Human
cugacuuuuuucagccacagug

SEQ ID NO: 1083317 - RNA, 22 nt, Human
guggcgcagaggguggcagaga

SEQ ID NO: 1083318 - RNA, 22 nt, Human
aucccacaccccuacaacauau

SEQ ID NO: 1083319 - RNA, 19 nt, Human
uggcagggagaguuugaag

SEQ ID NO: 1083320 - RNA, 22 nt, Human
ucugugcucaaguucugccucu

SEQ ID NO: 1083321 - RNA, 22 nt, Human
ucuuuauaaaagucauuauguc

SEQ ID NO: 1083322 - RNA, 22 nt, Human
cagcugagcugccagacuacug

SEQ ID NO: 1083323 - RNA, 22 nt, Human
cacaggaggaggccagagcgua

SEQ ID NO: 1083324 - RNA, 22 nt, Human
gacauucacaguuuccgauggu

SEQ ID NO: 1083325 - RNA, 22 nt, Human
ggcacacauagaucugcacugg

SEQ ID NO: 1083326 - RNA, 22 nt, Human
agggucaggagacacuggcaac

SEQ ID NO: 1083327 - RNA, 22 nt, Human
ugcucucucaggccuggcccac

SEQ ID NO: 1083328 - RNA, 22 nt, Human
cacugcuuuaaggcugaguaac

SEQ ID NO: 1083329 - RNA, 22 nt, Human
auagacaaugguuugccaagaa

SEQ ID NO: 1083330 - RNA, 22 nt, Human
cauuuguaucugggcugcugug

SEQ ID NO: 1083331 - RNA, 22 nt, Human
cacagacccagaagggaugaag

SEQ ID NO: 1083332 - RNA, 22 nt, Human
cuuuguagcugcuucugauuua

SEQ ID NO: 1083333 - RNA, 22 nt, Human
gcucucugccauaugaggauac

SEQ ID NO: 1083334 - RNA, 22 nt, Human
acugagcugcuugaagugaacu

SEQ ID NO: 1083335 - RNA, 22 nt, Human
uaaagcaaggaauagaguaguc

SEQ ID NO: 1083336 - RNA, 22 nt, Human
uuuguguuuuagcuggugaggc

SEQ ID NO: 1083337 - RNA, 22 nt, Human
caaugauguuuagauaaaaucc

SEQ ID NO: 1083338 - RNA, 22 nt, Human
uucauuccuucuguaccuugcc

SEQ ID NO: 1083339 - RNA, 22 nt, Human
gcugcaggcgccugcggucucu

SEQ ID NO: 1083340 - RNA, 20 nt, Human
ucuguaaagacuccagaagc

SEQ ID NO: 1083341 - RNA, 22 nt, Human
cauucugcauuuggaaggggca

SEQ ID NO: 1083342 - RNA, 22 nt, Human
aucugcccaucuguccugcuuc

SEQ ID NO: 1083343 - RNA, 22 nt, Human
uguacuuccccaaugacagcac

SEQ ID NO: 1083344 - RNA, 20 nt, Human
cagcagaaauggggugggaa

SEQ ID NO: 1083345 - RNA, 22 nt, Human
caucacagaaauaaacauaccu

SEQ ID NO: 1083346 - RNA, 22 nt, Human
gucugucucucuccagagugca

SEQ ID NO: 1083347 - RNA, 18 nt, Human
aucuuuccauagcauguu

SEQ ID NO: 1083348 - RNA, 20 nt, Human
augcaugcaugcacaugcac

SEQ ID NO: 1083349 - RNA, 22 nt, Human
uagagcugauaaugaggccaag

SEQ ID NO: 1083350 - RNA, 22 nt, Human
uucuuaagugagaaagcaggag

SEQ ID NO: 1083351 - RNA, 22 nt, Human
caggaagcuggucagauccugu

SEQ ID NO: 1083352 - RNA, 22 nt, Human
uagcagggaagaugaucagaau

SEQ ID NO: 1083353 - RNA, 22 nt, Human
gaccaccagagguccgugggua

SEQ ID NO: 1083354 - RNA, 22 nt, Human
ccagagccggauugugaagugc

SEQ ID NO: 1083355 - RNA, 22 nt, Human
gcccauggacacccaagugcca

SEQ ID NO: 1083356 - RNA, 22 nt, Human
uccuagucacaggaaaauuuca

SEQ ID NO: 1083357 - RNA, 22 nt, Human
aauuucacuggaaaagauaauu

SEQ ID NO: 1083358 - RNA, 22 nt, Human
uacauggguagguuaagucaua

SEQ ID NO: 1083359 - RNA, 22 nt, Human
agcucccagaaggcccugcgcc

SEQ ID NO: 1083360 - RNA, 22 nt, Human
uggaaugaauauguuuuaagga

SEQ ID NO: 1083361 - RNA, 22 nt, Human
agaagcauuauaacaugcaagg

SEQ ID NO: 1083362 - RNA, 22 nt, Human
gaggaggucgcugcugagcccc

SEQ ID NO: 1083363 - RNA, 22 nt, Human
gucaggauuugaacucaggucu

SEQ ID NO: 1083364 - RNA, 22 nt, Human
cuccagucuaguagagccugcu

SEQ ID NO: 1083365 - RNA, 22 nt, Human
aggccugagccccagguuuguu

SEQ ID NO: 1083366 - RNA, 22 nt, Human
uucaagauggcaccagugagug

SEQ ID NO: 1083367 - RNA, 22 nt, Human
cagcccugggaguuggggccga

SEQ ID NO: 1083368 - RNA, 22 nt, Human
uagcagcucacagccucccauu

SEQ ID NO: 1083369 - RNA, 20 nt, Human
gcccucagucuugucuuuau

SEQ ID NO: 1083370 - RNA, 22 nt, Human
uggacaggugagugacucaggg

SEQ ID NO: 1083371 - RNA, 22 nt, Human
gcugagccccccugcguggguc

SEQ ID NO: 1083372 - RNA, 22 nt, Human
uaggaaaacgugauuuucucac

SEQ ID NO: 1083373 - RNA, 21 nt, Human
aagcuucccugcucuccaggg

SEQ ID NO: 1083374 - RNA, 22 nt, Human
uaaugaauaaacuugagaguca

SEQ ID NO: 1083375 - RNA, 22 nt, Human
auuuguagugaagugaaaauaa

SEQ ID NO: 1083376 - RNA, 17 nt, Human
ccuuccucaucuccuuc

SEQ ID NO: 1083377 - RNA, 22 nt, Human
gagguggauguugcagugagcu

SEQ ID NO: 1083378 - RNA, 23 nt, Human
ccagcucccaggucugaggacug

SEQ ID NO: 1083379 - RNA, 23 nt, Human
gucagggcuggggucagagugac

SEQ ID NO: 1083380 - RNA, 22 nt, Human
ccuuuucuaggaugcuuuauag

SEQ ID NO: 1083381 - RNA, 22 nt, Human
uuuccucugggcccugccaccc

SEQ ID NO: 1083382 - RNA, 21 nt, Human
ucccucagacagggugccuau

SEQ ID NO: 1083383 - RNA, 22 nt, Human
aggaaccuaagagccugcaguc

SEQ ID NO: 1083384 - RNA, 22 nt, Human
gcaugcugcugaggcuggaaua

SEQ ID NO: 1083385 - RNA, 22 nt, Human
acacuucucccaucuccuguug

SEQ ID NO: 1083386 - RNA, 22 nt, Human
ucugccuguagucccacaccuc

SEQ ID NO: 1083387 - RNA, 22 nt, Human
guggccagcaagugcugccucu

SEQ ID NO: 1083388 - RNA, 22 nt, Human
gcuguuccugcuuagaggucgg

SEQ ID NO: 1083389 - RNA, 22 nt, Human
uagaaacauauaggauggcagg

SEQ ID NO: 1083390 - RNA, 22 nt, Human
aauuagagaagcuucuuccauu

SEQ ID NO: 1083391 - RNA, 19 nt, Human
cucuggagcagacacugga

SEQ ID NO: 1083392 - RNA, 22 nt, Human
cagccuguagaauacaguaaau

SEQ ID NO: 1083393 - RNA, 18 nt, Human
uggaggcagaguucuggc

SEQ ID NO: 1083394 - RNA, 22 nt, Human
ucugccuguggauacaugcucu

SEQ ID NO: 1083395 - RNA, 20 nt, Human
cucucuggaaggugggagcc

SEQ ID NO: 1083396 - RNA, 22 nt, Human
aaacaaguuuguagacuagcca

SEQ ID NO: 1083397 - RNA, 22 nt, Human
ccauacacacaccaaauuugua

SEQ ID NO: 1083398 - RNA, 22 nt, Human
agccaggcuaaaugagccauga

SEQ ID NO: 1083399 - RNA, 22 nt, Human
ugagccugcugucgcuggaccc

SEQ ID NO: 1083400 - RNA, 22 nt, Human
cuuucuuuguccaccaacaaug

SEQ ID NO: 1083401 - RNA, 22 nt, Human
ugucucagauacgccaucaagg

SEQ ID NO: 1083402 - RNA, 22 nt, Human
aaaacucaaacauuuuggcaua

SEQ ID NO: 1083403 - RNA, 22 nt, Human
gcaggguaggugacagguaguc

SEQ ID NO: 1083404 - RNA, 22 nt, Human
guuauaaauaccuaauaggauu

SEQ ID NO: 1083405 - RNA, 23 nt, Human
auguauuuaaauuucagugauga

SEQ ID NO: 1083406 - RNA, 22 nt, Human
cuugcuggugguguuuucuaug

SEQ ID NO: 1083407 - RNA, 22 nt, Human
gagcugguuuuaggcuaugucu

SEQ ID NO: 1083408 - RNA, 22 nt, Human
aguucuggcgcccaugagcaga

SEQ ID NO: 1083409 - RNA, 22 nt, Human
cagcugcaguucaaugcuugcu

SEQ ID NO: 1083410 - RNA, 22 nt, Human
cccaaguuaauuuguagcugaa

SEQ ID NO: 1083411 - RNA, 22 nt, Human
acacaugauaagaaaguuuaaa

SEQ ID NO: 1083412 - RNA, 22 nt, Human
caggccuggcccccggcacacc

SEQ ID NO: 1083413 - RNA, 22 nt, Human
ccagggucuuggagaggagugc

SEQ ID NO: 1083414 - RNA, 16 nt, Human
cacauauauuuauaug

SEQ ID NO: 1083415 - RNA, 22 nt, Human
cagggguguuuuuggccaggag

SEQ ID NO: 1083416 - RNA, 22 nt, Human
acagagcauuugggacagagag

SEQ ID NO: 1083417 - RNA, 22 nt, Human
uggcccugcuggacacgccugc

SEQ ID NO: 1083418 - RNA, 22 nt, Human
ggucccaggcucccucuugucc

SEQ ID NO: 1083419 - RNA, 22 nt, Human
uuaucuugguguuuuaguaauu

SEQ ID NO: 1083420 - RNA, 22 nt, Human
agcuucuugaccaagccuguaa

SEQ ID NO: 1083421 - RNA, 22 nt, Human
ccagggcagcgccccuccacgc

SEQ ID NO: 1083422 - RNA, 22 nt, Human
agccuccuggaguuucugggau

SEQ ID NO: 1083423 - RNA, 22 nt, Human
cuagagggauguuaggauagca

SEQ ID NO: 1083424 - RNA, 22 nt, Human
acuuucuauuguuuagauucug

SEQ ID NO: 1083425 - RNA, 22 nt, Human
uuucagugcacguaguuuauuu

SEQ ID NO: 1083426 - RNA, 22 nt, Human
ugucaguucagugauuacaaaa

SEQ ID NO: 1083427 - RNA, 22 nt, Human
uucacaaaaaugcugaacaguu

SEQ ID NO: 1083428 - RNA, 22 nt, Human
uagcugucagcaaucaaguggu

SEQ ID NO: 1083429 - RNA, 22 nt, Human
auuugucuagugguauucacgu

SEQ ID NO: 1083430 - RNA, 22 nt, Human
agcaaagcugauuaagagcaca

SEQ ID NO: 1083431 - RNA, 22 nt, Human
aagcuguguaaguugcuugguu

SEQ ID NO: 1083432 - RNA, 19 nt, Human
aguuuauuauaggugauuc

SEQ ID NO: 1083433 - RNA, 22 nt, Human
cagagugaacagugggaugugc

SEQ ID NO: 1083434 - RNA, 22 nt, Human
aauauaauuuuauuccuagagu

SEQ ID NO: 1083435 - RNA, 22 nt, Human
gauuaaguaacugaacacuuug

SEQ ID NO: 1083436 - RNA, 22 nt, Human
aaguccaucucugccccacaca

SEQ ID NO: 1083437 - RNA, 22 nt, Human
uaaagcaaggcaaauuguuggu

SEQ ID NO: 1083438 - RNA, 22 nt, Human
cucagcaagauuaagcagcuug

SEQ ID NO: 1083439 - RNA, 22 nt, Human
cagcuguugaucucuuaagccu

SEQ ID NO: 1083440 - RNA, 22 nt, Human
gaauguuuuuauaaguguuaca

SEQ ID NO: 1083441 - RNA, 20 nt, Human
ugcccagcaagagugcaguu

SEQ ID NO: 1083442 - RNA, 22 nt, Human
uuuuucugccauucaaagagga

SEQ ID NO: 1083443 - RNA, 22 nt, Human
ccacccugagccgcaagagcag

SEQ ID NO: 1083444 - RNA, 22 nt, Human
gggccuucagccuuggacugag

SEQ ID NO: 1083445 - RNA, 22 nt, Human
gcgagggcacgcgguugaaggc

SEQ ID NO: 1083446 - RNA, 22 nt, Human
aaagcagcuuucggcccucggg

SEQ ID NO: 1083447 - RNA, 22 nt, Human
agcugccaccucugccuuuggg

SEQ ID NO: 1083448 - RNA, 22 nt, Human
gcuguggccaacaaaccacuuu

SEQ ID NO: 1083449 - RNA, 22 nt, Human
aguuacagaauguacagagguu

SEQ ID NO: 1083450 - RNA, 22 nt, Human
ccagucccaucucugucgcuua

SEQ ID NO: 1083451 - RNA, 22 nt, Human
ucucucagggggaaggcugaag

SEQ ID NO: 1083452 - RNA, 22 nt, Human
gugggcagagcaagggaacuca

SEQ ID NO: 1083453 - RNA, 22 nt, Human
accuccuggcuuaucauggaca

SEQ ID NO: 1083454 - RNA, 22 nt, Human
aggagguggccugagcgugccc

SEQ ID NO: 1083455 - RNA, 22 nt, Human
cuuucauucuuagauauuagug

SEQ ID NO: 1083456 - RNA, 22 nt, Human
gugugccagacaugaugcuaug

SEQ ID NO: 1083457 - RNA, 22 nt, Human
gaggcucauugcauugugcauu

SEQ ID NO: 1083458 - RNA, 22 nt, Human
agcuggcaguaugacuggugac

SEQ ID NO: 1083459 - RNA, 23 nt, Human
uggccaggguacuacacccaccc

SEQ ID NO: 1083460 - RNA, 22 nt, Human
uuaagucaauaucaaucucagc

SEQ ID NO: 1083461 - RNA, 22 nt, Human
ccucugccaccucccacgaggc

SEQ ID NO: 1083462 - RNA, 22 nt, Human
gagcagugacuggagcaugaga

SEQ ID NO: 1083463 - RNA, 22 nt, Human
uugauuuucaauucauugacaa

SEQ ID NO: 1083464 - RNA, 22 nt, Human
augaaacaaaccucuauggagu

SEQ ID NO: 1083465 - RNA, 22 nt, Human
cugguucaaguccuggcucugu

SEQ ID NO: 1083466 - RNA, 22 nt, Human
ccagggccucguguucugagug

SEQ ID NO: 1083467 - RNA, 22 nt, Human
cauauaaauacaacauguguua

SEQ ID NO: 1083468 - RNA, 22 nt, Human
cugguggggaguccuggucucc

SEQ ID NO: 1083469 - RNA, 22 nt, Human
aaaugcaugagaaaguauucug

SEQ ID NO: 1083470 - RNA, 22 nt, Human
agcugcagucaagcugggccac

SEQ ID NO: 1083471 - RNA, 22 nt, Human
uauuugcugaaucugauucaga

SEQ ID NO: 1083472 - RNA, 18 nt, Human
uugcuuuguaagcuugca

SEQ ID NO: 1083473 - RNA, 22 nt, Human
acagugauuucugcaagggcuc

SEQ ID NO: 1083474 - RNA, 22 nt, Human
cagggagccuccaaagcuuuca

SEQ ID NO: 1083475 - RNA, 22 nt, Human
uucccucuccuacucaggaaag

SEQ ID NO: 1083476 - RNA, 22 nt, Human
gccuggagacagcagaggcggc

SEQ ID NO: 1083477 - RNA, 22 nt, Human
ugcaggcugugucauuuaguga

SEQ ID NO: 1083478 - RNA, 22 nt, Human
uccugaggcucacuuugaaugu

SEQ ID NO: 1083479 - RNA, 22 nt, Human
ccugccugcuuucugcuuugca

SEQ ID NO: 1083480 - RNA, 22 nt, Human
gggcagcagaauuggacagaaa

SEQ ID NO: 1083481 - RNA, 22 nt, Human
cccuggcuuggcacucuccacu

SEQ ID NO: 1083482 - RNA, 22 nt, Human
cagggcaguuugugccuaugag

SEQ ID NO: 1083483 - RNA, 22 nt, Human
aagccuuccugagugcaaggcc

SEQ ID NO: 1083484 - RNA, 22 nt, Human
auaauauuuggauaggacagua

SEQ ID NO: 1083485 - RNA, 22 nt, Human
ugaggcaggaguuaaugugcuc

SEQ ID NO: 1083486 - RNA, 22 nt, Human
ucuauuuuauacucaaaucuuc

SEQ ID NO: 1083487 - RNA, 22 nt, Human
aaaugguaagacaacacauuau

SEQ ID NO: 1083488 - RNA, 22 nt, Human
aaagcauguucugggaauagua

SEQ ID NO: 1083489 - RNA, 22 nt, Human
gggcugacaccacccaggcgca

SEQ ID NO: 1083490 - RNA, 22 nt, Human
gccugcuguuaacugcaggaau

SEQ ID NO: 1083491 - RNA, 22 nt, Human
agugucugaaccaccggggcau

SEQ ID NO: 1083492 - RNA, 22 nt, Human
uagaaaugugauaauagcuuaa

SEQ ID NO: 1083493 - RNA, 18 nt, Human
gugggguguugugaggau

SEQ ID NO: 1083494 - RNA, 22 nt, Human
acuggcaguagagggagcgcau

SEQ ID NO: 1083495 - RNA, 22 nt, Human
acuggagcccguggaggcgcag

SEQ ID NO: 1083496 - RNA, 22 nt, Human
aaaugcauguagaauaauagag

SEQ ID NO: 1083497 - RNA, 22 nt, Human
uaguucuguguagcucaagagu

SEQ ID NO: 1083498 - RNA, 22 nt, Human
uuugacagacauuuacuacauu

SEQ ID NO: 1083499 - RNA, 22 nt, Human
uacaaagucccauugccaugga

SEQ ID NO: 1083500 - RNA, 22 nt, Human
guuuuucucugaaauaguugac

SEQ ID NO: 1083501 - RNA, 22 nt, Human
ucaaagcacuggggaaagccug

SEQ ID NO: 1083502 - RNA, 22 nt, Human
uauaaaguuucgaaagauguau

SEQ ID NO: 1083503 - RNA, 22 nt, Human
ugugaaaucugaacucaaagau

SEQ ID NO: 1083504 - RNA, 22 nt, Human
uuugaguugcuuauuuaauagg

SEQ ID NO: 1083505 - RNA, 22 nt, Human
aggcaguccccagggguguugc

SEQ ID NO: 1083506 - RNA, 22 nt, Human
agccucugacugucagcaaggu

SEQ ID NO: 1083507 - RNA, 22 nt, Human
cuguggaacuuagugggagaca

SEQ ID NO: 1083508 - RNA, 20 nt, Human
agggucaguagcacagagcu

SEQ ID NO: 1083509 - RNA, 22 nt, Human
cagcccuuuccuucucagcuuu

SEQ ID NO: 1083510 - RNA, 22 nt, Human
aaacaaguguaaacuagucugu

SEQ ID NO: 1083511 - RNA, 22 nt, Human
ugcugugggcaguacauaagcu

SEQ ID NO: 1083512 - RNA, 22 nt, Human
uucuacaaauauuuacuguucc

SEQ ID NO: 1083513 - RNA, 22 nt, Human
ugauuucucauauuguucaaaa

SEQ ID NO: 1083514 - RNA, 20 nt, Human
aggcugagggugauuguguc

SEQ ID NO: 1083515 - RNA, 22 nt, Human
gaggccuggcucugcccuccug

SEQ ID NO: 1083516 - RNA, 22 nt, Human
aguguccaacucagcuugucaa

SEQ ID NO: 1083517 - RNA, 22 nt, Human
aggaaaggugagagcggccgcg

SEQ ID NO: 1083518 - RNA, 22 nt, Human
aggacugacuuuugccaugaaa

SEQ ID NO: 1083519 - RNA, 22 nt, Human
augcagaaagcggcaaacaggu

SEQ ID NO: 1083520 - RNA, 22 nt, Human
aucuccagauugugaucaucag

SEQ ID NO: 1083521 - RNA, 22 nt, Human
caguuuuaugucgaauguauac

SEQ ID NO: 1083522 - RNA, 22 nt, Human
ugagccugcaauaagcacagcc

SEQ ID NO: 1083523 - RNA, 22 nt, Human
cucacagcugcuucaggaucca

SEQ ID NO: 1083524 - RNA, 22 nt, Human
uuacaagauaugugagaacuag

SEQ ID NO: 1083525 - RNA, 19 nt, Human
ggcugucuggcguguggau

SEQ ID NO: 1083526 - RNA, 22 nt, Human
uuucuuuuacaguguggcuauu

SEQ ID NO: 1083527 - RNA, 22 nt, Human
uaaagcauaaugaauaucuaga

SEQ ID NO: 1083528 - RNA, 22 nt, Human
ucagauggguuuugaaggaugu

SEQ ID NO: 1083529 - RNA, 22 nt, Human
uacaagaaggauggagcccacu

SEQ ID NO: 1083530 - RNA, 22 nt, Human
uuuccucuccaccaggaggucu

SEQ ID NO: 1083531 - RNA, 22 nt, Human
uaaagcacauaucuuacaauaa

SEQ ID NO: 1083532 - RNA, 22 nt, Human
ugcagcugcuugauucaucuug

SEQ ID NO: 1083533 - RNA, 22 nt, Human
uauuucacaucuaugaagugag

SEQ ID NO: 1083534 - RNA, 22 nt, Human
agacuuugagcucuuagagaag

SEQ ID NO: 1083535 - RNA, 21 nt, Human
gcugagagguugggaaguuca

SEQ ID NO: 1083536 - RNA, 22 nt, Human
cggggccuagcugcacacccuc

SEQ ID NO: 1083537 - RNA, 22 nt, Human
uuuauaugugaagguuugcaga

SEQ ID NO: 1083538 - RNA, 21 nt, Human
caaauacuuagaaacuuaaga

SEQ ID NO: 1083539 - RNA, 22 nt, Human
ugggcuucauaauugguccuag

SEQ ID NO: 1083540 - RNA, 22 nt, Human
uugaaaacauuuauauuagaau

SEQ ID NO: 1083541 - RNA, 22 nt, Human
uagaaacagagagauaugcccc

SEQ ID NO: 1083542 - RNA, 22 nt, Human
uuuccaaaaugaaucuaaugca

SEQ ID NO: 1083543 - RNA, 22 nt, Human
cuggcagcuuagcacucugguu

SEQ ID NO: 1083544 - RNA, 22 nt, Human
ugugagacacacugcugcuuca

SEQ ID NO: 1083545 - RNA, 21 nt, Human
gggcuggacaugguggcucau

SEQ ID NO: 1083546 - RNA, 23 nt, Human
uaggggaaaaaucuucugcaauu

SEQ ID NO: 1083547 - RNA, 22 nt, Human
aguuguaauaacaauaccaaaa

SEQ ID NO: 1083548 - RNA, 22 nt, Human
auuacagaagauaugcucaaca

SEQ ID NO: 1083549 - RNA, 22 nt, Human
uuuauugucuaugaacugcuug

SEQ ID NO: 1083550 - RNA, 22 nt, Human
acacaguauugugacuauaacu

SEQ ID NO: 1083551 - RNA, 22 nt, Human
gccaucacauccaggcuaccuc

SEQ ID NO: 1083552 - RNA, 22 nt, Human
auuuuuccauucucuguuagua

SEQ ID NO: 1083553 - RNA, 22 nt, Human
ugaaagaugcucaaugaauggu

SEQ ID NO: 1083554 - RNA, 22 nt, Human
accaucagucacauguagagaa

SEQ ID NO: 1083555 - RNA, 22 nt, Human
uauaagaaauugccaaccuguu

SEQ ID NO: 1083556 - RNA, 22 nt, Human
ggauggagaugaccauggugac

SEQ ID NO: 1083557 - RNA, 22 nt, Human
ucaguguccggagccugagugc

SEQ ID NO: 1083558 - RNA, 22 nt, Human
cuccuuaaguaugggcugugca

SEQ ID NO: 1083559 - RNA, 22 nt, Human
cugccuguuccugaucauucua

SEQ ID NO: 1083560 - RNA, 22 nt, Human
gggacuggaacuacuggugcag

SEQ ID NO: 1083561 - RNA, 22 nt, Human
ucugggcuggcuuuaugcugac

SEQ ID NO: 1083562 - RNA, 22 nt, Human
caguggcgugaucucugcucac

SEQ ID NO: 1083563 - RNA, 22 nt, Human
gugcccagcuccaccucacaga

SEQ ID NO: 1083564 - RNA, 22 nt, Human
aggggcuccuggccuggagagc

SEQ ID NO: 1083565 - RNA, 22 nt, Human
aaaggcaaaauucuuagcagga

SEQ ID NO: 1083566 - RNA, 22 nt, Human
uuauguuuuauggcuauaucau

SEQ ID NO: 1083567 - RNA, 22 nt, Human
guuuucaauuauaagauggcuu

SEQ ID NO: 1083568 - RNA, 22 nt, Human
cagcaggcccagaguuucaugg

SEQ ID NO: 1083569 - RNA, 21 nt, Human
acacauuaugagcauagacuc

SEQ ID NO: 1083570 - RNA, 22 nt, Human
uuucacaguagaaaucauuaug

SEQ ID NO: 1083571 - RNA, 22 nt, Human
agccuucaaccuagcuagagca

SEQ ID NO: 1083572 - RNA, 22 nt, Human
caguucugacuuucauaauguc

SEQ ID NO: 1083573 - RNA, 22 nt, Human
uuuacugaauuugguauauucc

SEQ ID NO: 1083574 - RNA, 23 nt, Human
ugagccuguuaauacuggcucug

SEQ ID NO: 1083575 - RNA, 22 nt, Human
aagcaguaugguauuuaaguca

SEQ ID NO: 1083576 - RNA, 22 nt, Human
ugcagcuucuuguccugugauu

SEQ ID NO: 1083577 - RNA, 22 nt, Human
ccucucauagucuguauccuuu

SEQ ID NO: 1083578 - RNA, 22 nt, Human
caagcaacgacuuucaagcugu

SEQ ID NO: 1083579 - RNA, 22 nt, Human
ucugucacucuagagauggcag

SEQ ID NO: 1083580 - RNA, 22 nt, Human
uagcugccaaaagggugggcua

SEQ ID NO: 1083581 - RNA, 22 nt, Human
gggcugggcaugguguucccuc

SEQ ID NO: 1083582 - RNA, 22 nt, Human
uagcaaggcguggcacucaaau

SEQ ID NO: 1083583 - RNA, 22 nt, Human
aguuucacagucugucauuguu

SEQ ID NO: 1083584 - RNA, 18 nt, Human
aacaugcauuagaacugc

SEQ ID NO: 1083585 - RNA, 22 nt, Human
agaaaugaaaccaaagccuaga

SEQ ID NO: 1083586 - RNA, 22 nt, Human
ucaggaauccagacagggcaca

SEQ ID NO: 1083587 - RNA, 22 nt, Human
caggaagaaagaggugaggugu

SEQ ID NO: 1083588 - RNA, 22 nt, Human
gggaaauugugugagaucuuug

SEQ ID NO: 1083589 - RNA, 22 nt, Human
gacugucauucuagugcccaug

SEQ ID NO: 1083590 - RNA, 22 nt, Human
agggguggccugccuuacuccc

SEQ ID NO: 1083591 - RNA, 22 nt, Human
aagauuuacuagcauaauagcu

SEQ ID NO: 1083592 - RNA, 22 nt, Human
gcuuagucaauuauaaauaggc

SEQ ID NO: 1083593 - RNA, 22 nt, Human
uugaucuugugauaguucaacu

SEQ ID NO: 1083594 - RNA, 22 nt, Human
ugggcucagccucagucugugg

SEQ ID NO: 1083595 - RNA, 22 nt, Human
aggccaaguagcuagcauugaa

SEQ ID NO: 1083596 - RNA, 22 nt, Human
uguucuaaauuugcauggucca

SEQ ID NO: 1083597 - RNA, 21 nt, Human
ccaccaggucuucugcucggg

SEQ ID NO: 1083598 - RNA, 22 nt, Human
cagcuguguaaacacaugugua

SEQ ID NO: 1083599 - RNA, 22 nt, Human
auaucaaacgaaguuauuuuaa

SEQ ID NO: 1083600 - RNA, 22 nt, Human
gcaggaugaaggcagaggcuga

SEQ ID NO: 1083601 - RNA, 22 nt, Human
ugcuguguucuccugacucacc

SEQ ID NO: 1083602 - RNA, 22 nt, Human
gaacagcccuguuaagucuguu

SEQ ID NO: 1083603 - RNA, 22 nt, Human
cagacaugagauacagcugcua

SEQ ID NO: 1083604 - RNA, 20 nt, Human
aggcugggguguuuugccca

SEQ ID NO: 1083605 - RNA, 22 nt, Human
gggcacuggaggccaaggagcu

SEQ ID NO: 1083606 - RNA, 22 nt, Human
gaggaggcuggcgccgccugcc

SEQ ID NO: 1083607 - RNA, 22 nt, Human
ucugcccacaguccaauaguug

SEQ ID NO: 1083608 - RNA, 22 nt, Human
ugggagaugguucugagacuuu

SEQ ID NO: 1083609 - RNA, 22 nt, Human
acauugaugaaaagguaucauu

SEQ ID NO: 1083610 - RNA, 22 nt, Human
uuuguagaggguaauugacaga

SEQ ID NO: 1083611 - RNA, 22 nt, Human
auuaaaagcuucccaagaguua

SEQ ID NO: 1083612 - RNA, 22 nt, Human
auucuuauuauaguaaaacagu

SEQ ID NO: 1083613 - RNA, 22 nt, Human
auacuucaacauaucagucaga

SEQ ID NO: 1083614 - RNA, 22 nt, Human
aaugcaaagaguugcuuaucaa

SEQ ID NO: 1083615 - RNA, 22 nt, Human
uuucugaagguuaaggaauuag

SEQ ID NO: 1083616 - RNA, 22 nt, Human
uuguaaagcuuugagacuacau

SEQ ID NO: 1083617 - RNA, 22 nt, Human
aguguacauguacacauuagua

SEQ ID NO: 1083618 - RNA, 22 nt, Human
uugaccuauguuucuucaucug

SEQ ID NO: 1083619 - RNA, 22 nt, Human
augaagucuagcaagcauugaa

SEQ ID NO: 1083620 - RNA, 22 nt, Human
aauaaagccuuauugauuuuac

SEQ ID NO: 1083621 - RNA, 22 nt, Human
gaggagcaugggaaggcucugg

SEQ ID NO: 1083622 - RNA, 22 nt, Human
caaagucauggggaugcagguc

SEQ ID NO: 1083623 - RNA, 22 nt, Human
aagaacauucgaacuauuuucu

SEQ ID NO: 1083624 - RNA, 22 nt, Human
agaagggccagcuggacaccug

SEQ ID NO: 1083625 - RNA, 18 nt, Human
gcugggguugagcucucc

SEQ ID NO: 1083626 - RNA, 22 nt, Human
auuuguaucuucuaauauuauc

SEQ ID NO: 1083627 - RNA, 17 nt, Human
gcugccugcaacugacu

SEQ ID NO: 1083628 - RNA, 22 nt, Human
uucaacuauuaugaauaaaauu

SEQ ID NO: 1083629 - RNA, 22 nt, Human
ggcuagggaaaaugauuggaua

SEQ ID NO: 1083630 - RNA, 20 nt, Human
acauuugaagucgcauuucu

SEQ ID NO: 1083631 - RNA, 22 nt, Human
ugggcagaaugugggauccaga

SEQ ID NO: 1083632 - RNA, 22 nt, Human
gcuccuggcuccaggcagccaa

SEQ ID NO: 1083633 - RNA, 21 nt, Human
gcuuucuguggacucugcacc

SEQ ID NO: 1083634 - RNA, 22 nt, Human
agcagggcagcuuuuuucagaa

SEQ ID NO: 1083635 - RNA, 23 nt, Human
ugcuggguaucagaaucacugag

SEQ ID NO: 1083636 - RNA, 22 nt, Human
acuuccugcuaugagcuucugu

SEQ ID NO: 1083637 - RNA, 22 nt, Human
aaggcacaacacaagaggguga

SEQ ID NO: 1083638 - RNA, 22 nt, Human
uaaguucauuagacuacagaua

SEQ ID NO: 1083639 - RNA, 23 nt, Human
ucagagagcuguugagagcugcc

SEQ ID NO: 1083640 - RNA, 22 nt, Human
agauuucagaugcucggcaguu

SEQ ID NO: 1083641 - RNA, 22 nt, Human
auacauuagcucauaugauuaa

SEQ ID NO: 1083642 - RNA, 22 nt, Human
uggggcuggcacagucucuauu

SEQ ID NO: 1083643 - RNA, 22 nt, Human
uuuuaucuucauuccuaucuac

SEQ ID NO: 1083644 - RNA, 22 nt, Human
uguaagaaaaguaaauagugac

SEQ ID NO: 1083645 - RNA, 22 nt, Human
caucaguguggcaguucacugu

SEQ ID NO: 1083646 - RNA, 22 nt, Human
aaggugguuugcagacagaaua

SEQ ID NO: 1083647 - RNA, 22 nt, Human
uuuauuguuaucaugggugagu

SEQ ID NO: 1083648 - RNA, 19 nt, Human
gauuuaaacguggcucuau

SEQ ID NO: 1083649 - RNA, 22 nt, Human
caggcccacugcuugucuaguc

SEQ ID NO: 1083650 - RNA, 22 nt, Human
cuguaauucacuagggucagcg

SEQ ID NO: 1083651 - RNA, 22 nt, Human
uacagagacuuuauggcacaaa

SEQ ID NO: 1083652 - RNA, 22 nt, Human
aaacuaagacuaaugaagaacu

SEQ ID NO: 1083653 - RNA, 22 nt, Human
ccuggccucagccuagggcuga

SEQ ID NO: 1083654 - RNA, 22 nt, Human
auaagguaugaaaaguaaaugg

SEQ ID NO: 1083655 - RNA, 22 nt, Human
cagcccugcacgcugccuccgc

SEQ ID NO: 1083656 - RNA, 21 nt, Human
agcucuggagcagcaaucaag

SEQ ID NO: 1083657 - RNA, 22 nt, Human
auguacacaugcaugcaugugc

SEQ ID NO: 1083658 - RNA, 22 nt, Human
uaacaagauuuguaaaauugua

SEQ ID NO: 1083659 - RNA, 19 nt, Human
gcaggguggcagagcucuu

SEQ ID NO: 1083660 - RNA, 22 nt, Human
guggcugcagagggcacagcau

SEQ ID NO: 1083661 - RNA, 22 nt, Human
gggcugcugcugccagcgacac

SEQ ID NO: 1083662 - RNA, 22 nt, Human
ucacacagcuuggaguuauggu

SEQ ID NO: 1083663 - RNA, 22 nt, Human
uuguuugcccacaacuauuaag

SEQ ID NO: 1083664 - RNA, 18 nt, Human
aggcaggugcuggaaguc

SEQ ID NO: 1083665 - RNA, 23 nt, Human
ccuggaguacuaaggggauggaa

SEQ ID NO: 1083666 - RNA, 22 nt, Human
ggggaccuaggcucugucucuu

SEQ ID NO: 1083667 - RNA, 22 nt, Human
uucagaguaggauacuagcuua

SEQ ID NO: 1083668 - RNA, 20 nt, Human
uuucuggguacucucccucu

SEQ ID NO: 1083669 - RNA, 22 nt, Human
aggaacacccccuuccuaccag

SEQ ID NO: 1083670 - RNA, 20 nt, Human
ucugugugccaucaccuaac

SEQ ID NO: 1083671 - RNA, 22 nt, Human
cugggaaguggugagggccuga

SEQ ID NO: 1083672 - RNA, 22 nt, Human
cagguggggggcuuccgagccu

SEQ ID NO: 1083673 - RNA, 22 nt, Human
uuucucaaccucaacacuauuu

SEQ ID NO: 1083674 - RNA, 20 nt, Human
acuugcugggcuuuguuacc

SEQ ID NO: 1083675 - RNA, 22 nt, Human
uucucaaggacaaaaugacaug

SEQ ID NO: 1083676 - RNA, 21 nt, Human
aguguccuugaucuugccuug

SEQ ID NO: 1083677 - RNA, 22 nt, Human
uggaagaaaauucaaucgaguu

SEQ ID NO: 1083678 - RNA, 22 nt, Human
aggcaggcuggucugaagagug

SEQ ID NO: 1083679 - RNA, 22 nt, Human
uggccaggcagguagaacggcc

SEQ ID NO: 1083680 - RNA, 22 nt, Human
aaagccacguggccuggggagc

SEQ ID NO: 1083681 - RNA, 22 nt, Human
cugcucugacccuuucaccuuc

SEQ ID NO: 1083682 - RNA, 22 nt, Human
gccaggaaagccacuggcauac

SEQ ID NO: 1083683 - RNA, 22 nt, Human
gggaaggacacagccaugacug

SEQ ID NO: 1083684 - RNA, 22 nt, Human
gaaggcaacaccaggaugcacu

SEQ ID NO: 1083685 - RNA, 21 nt, Human
acagggcaugcagcuggcugu

SEQ ID NO: 1083686 - RNA, 22 nt, Human
cccaggaaauagccaggaggug

SEQ ID NO: 1083687 - RNA, 21 nt, Human
uucuucaggccaaugcucauu

SEQ ID NO: 1083688 - RNA, 22 nt, Human
ucuggagcuuguuucagauggu

SEQ ID NO: 1083689 - RNA, 21 nt, Human
uuuucccacugaaagcuccca

SEQ ID NO: 1083690 - RNA, 22 nt, Human
cccucccaggaguggccagaga

SEQ ID NO: 1083691 - RNA, 22 nt, Human
ggaccagagaagugagcaccug

SEQ ID NO: 1083692 - RNA, 22 nt, Human
ugcuuaauauugugauguaaua

SEQ ID NO: 1083693 - RNA, 22 nt, Human
augaugguaaauucaguauccg

SEQ ID NO: 1083694 - RNA, 22 nt, Human
uguaaacauaccagagccaagu

SEQ ID NO: 1083695 - RNA, 22 nt, Human
uauuuggagugauggaaauguu

SEQ ID NO: 1083696 - RNA, 22 nt, Human
ugcuucuggguaggccucagga

SEQ ID NO: 1083697 - RNA, 22 nt, Human
uggccuggggaagaccaugggc

SEQ ID NO: 1083698 - RNA, 22 nt, Human
gcucagagaugucugcugccuu

SEQ ID NO: 1083699 - RNA, 22 nt, Human
caguacuuguccucagguguua

SEQ ID NO: 1083700 - RNA, 22 nt, Human
cagggccucgaagccucugggc

SEQ ID NO: 1083701 - RNA, 22 nt, Human
gcuguggcuugcagcuggggcu

SEQ ID NO: 1083702 - RNA, 22 nt, Human
gcugaggaagucagguggccca

SEQ ID NO: 1083703 - RNA, 22 nt, Human
acagccagguaaaggcauggca

SEQ ID NO: 1083704 - RNA, 22 nt, Human
aaagguuuuucagcagggagau

SEQ ID NO: 1083705 - RNA, 22 nt, Human
aagcugccugggaggaagggcu

SEQ ID NO: 1083706 - RNA, 22 nt, Human
ugcuucugcauucaauguugga

SEQ ID NO: 1083707 - RNA, 22 nt, Human
aguacauacuucaaauguacuu

SEQ ID NO: 1083708 - RNA, 22 nt, Human
uggcagucuucaucaguucugg

SEQ ID NO: 1083709 - RNA, 22 nt, Human
accugggagucacaccugagaa

SEQ ID NO: 1083710 - RNA, 22 nt, Human
ccuacucugagcgccuccgcau

SEQ ID NO: 1083711 - RNA, 22 nt, Human
aggcagcagugauaagauagga

SEQ ID NO: 1083712 - RNA, 22 nt, Human
acagauaaaaguuguuuaaaau

SEQ ID NO: 1083713 - RNA, 22 nt, Human
ccagccuggacugggucuugug

SEQ ID NO: 1083714 - RNA, 22 nt, Human
ggacacuguauaaguuagagua

SEQ ID NO: 1083715 - RNA, 22 nt, Human
gugcagugacccuggagagcug

SEQ ID NO: 1083716 - RNA, 22 nt, Human
uauguauaaaugcaugugugga

SEQ ID NO: 1083717 - RNA, 22 nt, Human
agaggcuguuacacucccagau

SEQ ID NO: 1083718 - RNA, 22 nt, Human
uuuugaauaauucagaaacagc

SEQ ID NO: 1083719 - RNA, 22 nt, Human
auugguauguauucugaaaacu

SEQ ID NO: 1083720 - RNA, 20 nt, Human
cugggcucaagugauccucc

SEQ ID NO: 1083721 - RNA, 22 nt, Human
ggcugccaggagaagcucagug

SEQ ID NO: 1083722 - RNA, 22 nt, Human
acauuucauuugcaguauggau

SEQ ID NO: 1083723 - RNA, 22 nt, Human
cucccuggcuuuguccugaggc

SEQ ID NO: 1083724 - RNA, 22 nt, Human
gacagcagacagccuggccccu

SEQ ID NO: 1083725 - RNA, 22 nt, Human
acuaucaacaucauugcucuag

SEQ ID NO: 1083726 - RNA, 22 nt, Human
ucagaggagccaaaguucugag

SEQ ID NO: 1083727 - RNA, 22 nt, Human
auugaaaaugacauuugugccc

SEQ ID NO: 1083728 - RNA, 22 nt, Human
agaggccuuucuguugagugaa

SEQ ID NO: 1083729 - RNA, 22 nt, Human
accagccagccacaguggcucc

SEQ ID NO: 1083730 - RNA, 22 nt, Human
cuggugugauugagcccaggug

SEQ ID NO: 1083731 - RNA, 22 nt, Human
aaagaacaaaugauauaugguu

SEQ ID NO: 1083732 - RNA, 22 nt, Human
agcuggguucagaggcacaugg

SEQ ID NO: 1083733 - RNA, 22 nt, Human
ucucaggagccacagcgggagu

SEQ ID NO: 1083734 - RNA, 22 nt, Human
uuccuccacgugacaggagcca

SEQ ID NO: 1083735 - RNA, 22 nt, Human
ggggccuguagagcuucaggga

SEQ ID NO: 1083736 - RNA, 22 nt, Human
guuauuuuaucucugagagguu

SEQ ID NO: 1083737 - RNA, 22 nt, Human
ucauugcagacuaacaaucuca

SEQ ID NO: 1083738 - RNA, 22 nt, Human
gucaauaucuugguuguacuau

SEQ ID NO: 1083739 - RNA, 22 nt, Human
ccaguuuuuccagugcuuucug

SEQ ID NO: 1083740 - RNA, 22 nt, Human
accgggaaguccugcacugggc

SEQ ID NO: 1083741 - RNA, 22 nt, Human
ccucccacauccuagcucugcu

SEQ ID NO: 1083742 - RNA, 22 nt, Human
gucaacaucggaaagcguguaa

SEQ ID NO: 1083743 - RNA, 22 nt, Human
cugccuagcgccaucugccucu

SEQ ID NO: 1083744 - RNA, 22 nt, Human
ugcagggcaguggagguugagu

SEQ ID NO: 1083745 - RNA, 18 nt, Human
ggguccuguucuuggaag

SEQ ID NO: 1083746 - RNA, 22 nt, Human
uuuaaagugcugcuccuauccu

SEQ ID NO: 1083747 - RNA, 22 nt, Human
ccaggcucagggcagacuuuca

SEQ ID NO: 1083748 - RNA, 22 nt, Human
caguacuuaguucucaugguuu

SEQ ID NO: 1083749 - RNA, 22 nt, Human
gggccagguggaccccagccuc

SEQ ID NO: 1083750 - RNA, 22 nt, Human
caucucaugggcaugccaagcu

SEQ ID NO: 1083751 - RNA, 20 nt, Human
uucuugagccaaaaggcaua

SEQ ID NO: 1083752 - RNA, 22 nt, Human
cagcuggcguggagugauugca

SEQ ID NO: 1083753 - RNA, 18 nt, Human
uauaaccuguuuugaugg

SEQ ID NO: 1083754 - RNA, 22 nt, Human
ugaugcaauagagagauagaua

SEQ ID NO: 1083755 - RNA, 22 nt, Human
aauacugcugccugcaaauuau

SEQ ID NO: 1083756 - RNA, 22 nt, Human
gcagagcuguuaauggagcuga

SEQ ID NO: 1083757 - RNA, 22 nt, Human
uugccugugaacgcugaguccu

SEQ ID NO: 1083758 - RNA, 22 nt, Human
augagcuguaagguggcuuccu

SEQ ID NO: 1083759 - RNA, 22 nt, Human
uugcugaggacgcagugcagug

SEQ ID NO: 1083760 - RNA, 22 nt, Human
accugccuaucagcugccugcu

SEQ ID NO: 1083761 - RNA, 22 nt, Human
ucuguccuguuuccuccugaca

SEQ ID NO: 1083762 - RNA, 22 nt, Human
gcccagcaggacagagugguuu

SEQ ID NO: 1083763 - RNA, 17 nt, Human
ccugggaggaguuauga

SEQ ID NO: 1083764 - RNA, 22 nt, Human
caugcugagcacauucuguauu

SEQ ID NO: 1083765 - RNA, 22 nt, Human
ugggaaggaacugccuuuagcu

SEQ ID NO: 1083766 - RNA, 22 nt, Human
uuucaaguuguugcauuaaaug

SEQ ID NO: 1083767 - RNA, 22 nt, Human
aaaaucuggcaacacuaaguuu

SEQ ID NO: 1083768 - RNA, 22 nt, Human
uauauuuuagacacccucacgc

SEQ ID NO: 1083769 - RNA, 22 nt, Human
aggugggcaccaggcuuguggu

SEQ ID NO: 1083770 - RNA, 17 nt, Human
acccucaaucuccugca

SEQ ID NO: 1083771 - RNA, 22 nt, Human
auguucuuccuucaauuuggaa

SEQ ID NO: 1083772 - RNA, 22 nt, Human
gggguuaacaguauugcucaug

SEQ ID NO: 1083773 - RNA, 22 nt, Human
acaguuauuuucccagcauuua

SEQ ID NO: 1083774 - RNA, 22 nt, Human
acagcagcuuccugacuguacu

SEQ ID NO: 1083775 - RNA, 22 nt, Human
augggaggcagacacuaaguuc

SEQ ID NO: 1083776 - RNA, 22 nt, Human
aucuuagaaguuugauaaaauc

SEQ ID NO: 1083777 - RNA, 21 nt, Human
uuacuuuagaaauugccuuuu

SEQ ID NO: 1083778 - RNA, 22 nt, Human
ggcucagggaaugaggaagaau

SEQ ID NO: 1083779 - RNA, 22 nt, Human
ugucucaggcccaagccaguaa

SEQ ID NO: 1083780 - RNA, 22 nt, Human
auuacacaggcuggcucuuuga

SEQ ID NO: 1083781 - RNA, 22 nt, Human
acuaguuuauuacaguuccacu

SEQ ID NO: 1083782 - RNA, 22 nt, Human
aaguuagugccuccuuaaauuu

SEQ ID NO: 1083783 - RNA, 22 nt, Human
ggggccuuuucugaauguggaa

SEQ ID NO: 1083784 - RNA, 22 nt, Human
aucacccaagcuggagugcagu

SEQ ID NO: 1083785 - RNA, 22 nt, Human
gagcucugacugcugggugaca

SEQ ID NO: 1083786 - RNA, 22 nt, Human
ucugccuguaauauuuggagaa

SEQ ID NO: 1083787 - RNA, 22 nt, Human
cugagcaggacagugggagacc

SEQ ID NO: 1083788 - RNA, 22 nt, Human
cacacacucuuccuggcaccua

SEQ ID NO: 1083789 - RNA, 22 nt, Human
uuuuggaaugaggaacauccag

SEQ ID NO: 1083790 - RNA, 22 nt, Human
ccuggcuccugccucugcaggg

SEQ ID NO: 1083791 - RNA, 22 nt, Human
cagggcugucuccaaaggcccc

SEQ ID NO: 1083792 - RNA, 22 nt, Human
uccaguggagugugggggugaa

SEQ ID NO: 1083793 - RNA, 20 nt, Human
agcaggugacggggccugcu

SEQ ID NO: 1083794 - RNA, 22 nt, Human
caguguggagggagagagccug

SEQ ID NO: 1083795 - RNA, 22 nt, Human
ucccuucacagaugcgauguuu

SEQ ID NO: 1083796 - RNA, 22 nt, Human
ggucccaaucuaaucacaugag

SEQ ID NO: 1083797 - RNA, 19 nt, Human
uugguggugguuuugguuc

SEQ ID NO: 1083798 - RNA, 22 nt, Human
gggccugacugagagcuccuca

SEQ ID NO: 1083799 - RNA, 22 nt, Human
uagcagagaggggacaguggca

SEQ ID NO: 1083800 - RNA, 22 nt, Human
ucugggagggagccucagaauc

SEQ ID NO: 1083801 - RNA, 22 nt, Human
ccugugaugguguuacacuguu

SEQ ID NO: 1083802 - RNA, 22 nt, Human
aguuaaaucauuacugacagag

SEQ ID NO: 1083803 - RNA, 22 nt, Human
ucagcucggccuaggcccacgg

SEQ ID NO: 1083804 - RNA, 22 nt, Human
uuucacagcugauaccucuucc

SEQ ID NO: 1083805 - RNA, 22 nt, Human
uuccacagguuucagacuguuc

SEQ ID NO: 1083806 - RNA, 22 nt, Human
ugugggcaggcccgggucugag

SEQ ID NO: 1083807 - RNA, 22 nt, Human
gccucagcucccagcccaggcu

SEQ ID NO: 1083808 - RNA, 22 nt, Human
auuuccagugcacugaauagaa

SEQ ID NO: 1083809 - RNA, 22 nt, Human
accagugggaaguggaaaauga

SEQ ID NO: 1083810 - RNA, 22 nt, Human
acaauagaguucucauaggaca

SEQ ID NO: 1083811 - RNA, 22 nt, Human
cauaauaucuccgauuacuugc

SEQ ID NO: 1083812 - RNA, 22 nt, Human
aagcacagagagguaaaguaac

SEQ ID NO: 1083813 - RNA, 17 nt, Human
agccaggcauaugaagu

SEQ ID NO: 1083814 - RNA, 22 nt, Human
ugcagagagaccccugggccag

SEQ ID NO: 1083815 - RNA, 22 nt, Human
uguacuguauucaucuuuaacu

SEQ ID NO: 1083816 - RNA, 22 nt, Human
aggcugggaaauguauuccagc

SEQ ID NO: 1083817 - RNA, 22 nt, Human
gggcugagucaucuggggccuc

SEQ ID NO: 1083818 - RNA, 22 nt, Human
auuucaguagaaaaucuugauu

SEQ ID NO: 1083819 - RNA, 22 nt, Human
cacacaugacccacuuuuaccg

SEQ ID NO: 1083820 - RNA, 22 nt, Human
gcuuugcagacaaaauuccagc

SEQ ID NO: 1083821 - RNA, 22 nt, Human
acuacauucaugcucguguugg

SEQ ID NO: 1083822 - RNA, 22 nt, Human
guugugcagggcgaggaccuga

SEQ ID NO: 1083823 - RNA, 22 nt, Human
uaauuacuggaaauuucaaaua

SEQ ID NO: 1083824 - RNA, 22 nt, Human
aauaaauguuuguuggauguuu

SEQ ID NO: 1083825 - RNA, 22 nt, Human
uuagagucaaaauggcauguua

SEQ ID NO: 1083826 - RNA, 22 nt, Human
agcucugggcugacaugcuccc

SEQ ID NO: 1083827 - RNA, 20 nt, Human
gucaggauuaguaaacucug

SEQ ID NO: 1083828 - RNA, 22 nt, Human
ugagaagauugggcagagugga

SEQ ID NO: 1083829 - RNA, 22 nt, Human
uaacaaaguaccauagauuggg

SEQ ID NO: 1083830 - RNA, 22 nt, Human
aaugguacccuggugacuuaga

SEQ ID NO: 1083831 - RNA, 22 nt, Human
accaaugugaugauauuaggag

SEQ ID NO: 1083832 - RNA, 21 nt, Human
gaguaacauuuccucuccaca

SEQ ID NO: 1083833 - RNA, 22 nt, Human
ggcugccugugcccaggcacac

SEQ ID NO: 1083834 - RNA, 22 nt, Human
ucaugacaucuguuuaucucaa

SEQ ID NO: 1083835 - RNA, 22 nt, Human
aggaagcaaaaggcagggucua

SEQ ID NO: 1083836 - RNA, 19 nt, Human
uccugggcugggccagguc

SEQ ID NO: 1083837 - RNA, 22 nt, Human
cuggggcuguaggaggacuuau

SEQ ID NO: 1083838 - RNA, 22 nt, Human
uucuuaaguaugaucuuaacgg

SEQ ID NO: 1083839 - RNA, 22 nt, Human
cccagggacagcuagguggggc

SEQ ID NO: 1083840 - RNA, 22 nt, Human
auucacauuuacaaagcacuca

SEQ ID NO: 1083841 - RNA, 22 nt, Human
auauaauaguuucauaaaggcu

SEQ ID NO: 1083842 - RNA, 22 nt, Human
caaacugaacacgaaagucuuu

SEQ ID NO: 1083843 - RNA, 22 nt, Human
uccacauccauugcuugacuuu

SEQ ID NO: 1083844 - RNA, 22 nt, Human
ucugggugcccuuugcucuguu

SEQ ID NO: 1083845 - RNA, 22 nt, Human
ucugugcucuucucaguaucac

SEQ ID NO: 1083846 - RNA, 22 nt, Human
ccauuaaguauuauuaaugauu

SEQ ID NO: 1083847 - RNA, 22 nt, Human
ggcuggcuuucucuccgcaccu

SEQ ID NO: 1083848 - RNA, 22 nt, Human
uccagcagguuggucaggugca

SEQ ID NO: 1083849 - RNA, 22 nt, Human
augcucuggaguacgugaaauu

SEQ ID NO: 1083850 - RNA, 22 nt, Human
cuggagccugcaguuuucacuu

SEQ ID NO: 1083851 - RNA, 22 nt, Human
uaugacuuuggaaaaauuacuu

SEQ ID NO: 1083852 - RNA, 19 nt, Human
cuguccuuggcugcacugu

SEQ ID NO: 1083853 - RNA, 22 nt, Human
agcccugcauaaaucaguuggu

SEQ ID NO: 1083854 - RNA, 22 nt, Human
ugagauuuucagcaucacuuca

SEQ ID NO: 1083855 - RNA, 22 nt, Human
acagaguauuggaaaggcagug

SEQ ID NO: 1083856 - RNA, 22 nt, Human
uuuucuuauagagcuuaaaguu

SEQ ID NO: 1083857 - RNA, 22 nt, Human
aagcccagaugggagcauuuca

SEQ ID NO: 1083858 - RNA, 22 nt, Human
caagauaauuuauucugaguuu

SEQ ID NO: 1083859 - RNA, 22 nt, Human
acugggcuguuuuuugagugga

SEQ ID NO: 1083860 - RNA, 22 nt, Human
aguacaaacuguuucaaaguag

SEQ ID NO: 1083861 - RNA, 22 nt, Human
ucucuucuuguguuuuccugcc

SEQ ID NO: 1083862 - RNA, 22 nt, Human
ucauguuuuaguaaagugaagg

SEQ ID NO: 1083863 - RNA, 22 nt, Human
ccugggcuucugucuagauguu

SEQ ID NO: 1083864 - RNA, 22 nt, Human
gacagggaaacauugaaguguc

SEQ ID NO: 1083865 - RNA, 22 nt, Human
aaguacaaucuuucuguaaagg

SEQ ID NO: 1083866 - RNA, 22 nt, Human
aagauauagauaaaacuaugca

SEQ ID NO: 1083867 - RNA, 22 nt, Human
aaacuuuaggaaggaauuuaca

SEQ ID NO: 1083868 - RNA, 22 nt, Human
cccagcccccgagugucuggaa

SEQ ID NO: 1083869 - RNA, 22 nt, Human
uuuauucaucaucuguucauau

SEQ ID NO: 1083870 - RNA, 22 nt, Human
auacaucauuuauggaauaagg

SEQ ID NO: 1083871 - RNA, 22 nt, Human
ucaucaguguccuuaucacuua

SEQ ID NO: 1083872 - RNA, 22 nt, Human
uugugugucuucuucacugccc

SEQ ID NO: 1083873 - RNA, 22 nt, Human
uguuaaaaauucagcucuagau

SEQ ID NO: 1083874 - RNA, 22 nt, Human
uaacaacuugcuuuuaucuuag

SEQ ID NO: 1083875 - RNA, 22 nt, Human
uuucaaacuuaaauaccuuucc

SEQ ID NO: 1083876 - RNA, 22 nt, Human
agugaaaugauucugagcaaga

SEQ ID NO: 1083877 - RNA, 22 nt, Human
cagcaggguuaagugacucacc

SEQ ID NO: 1083878 - RNA, 22 nt, Human
ccucugaggucauggacuuggc

SEQ ID NO: 1083879 - RNA, 19 nt, Human
gucagcaccauggacaggg

SEQ ID NO: 1083880 - RNA, 22 nt, Human
aaagcaauuacaaaagggauaa

SEQ ID NO: 1083881 - RNA, 21 nt, Human
uggagcugaauuuuuggcauc

SEQ ID NO: 1083882 - RNA, 22 nt, Human
uagauuuuuuggagacucucug

SEQ ID NO: 1083883 - RNA, 22 nt, Human
cugcccugcucuccgggaucuu

SEQ ID NO: 1083884 - RNA, 22 nt, Human
auauguuucaguauucaaguca

SEQ ID NO: 1083885 - RNA, 20 nt, Human
aacagggggcugcagagggc

SEQ ID NO: 1083886 - RNA, 22 nt, Human
uggcugagcucccuguguguug

SEQ ID NO: 1083887 - RNA, 22 nt, Human
gaugccuccaaaugagggcaga

SEQ ID NO: 1083888 - RNA, 22 nt, Human
cggcccugcugagcuugucugg

SEQ ID NO: 1083889 - RNA, 22 nt, Human
ugugguggggucugguauucca

SEQ ID NO: 1083890 - RNA, 22 nt, Human
ugaagccaaucugccaggcaga

SEQ ID NO: 1083891 - RNA, 22 nt, Human
ggggaaagugaauuguguagug

SEQ ID NO: 1083892 - RNA, 22 nt, Human
aagucuuucauaagucucuuau

SEQ ID NO: 1083893 - RNA, 22 nt, Human
cugguucauccccuuccaggaa

SEQ ID NO: 1083894 - RNA, 22 nt, Human
gugugcaggugucagugcagcu

SEQ ID NO: 1083895 - RNA, 18 nt, Human
cugcugcaggcacucagg

SEQ ID NO: 1083896 - RNA, 22 nt, Human
cugggaagcuucgagcaggaaa

SEQ ID NO: 1083897 - RNA, 22 nt, Human
gauaauaucugguuuauucacc

SEQ ID NO: 1083898 - RNA, 20 nt, Human
aggagaaauucgggacaccu

SEQ ID NO: 1083899 - RNA, 22 nt, Human
cccuuuaaaguuuuaccagcag

SEQ ID NO: 1083900 - RNA, 22 nt, Human
aagauggcaucuccuauagaug

SEQ ID NO: 1083901 - RNA, 22 nt, Human
aauagcaaacagacaugcacaa

SEQ ID NO: 1083902 - RNA, 22 nt, Human
ucuacacaagugaguggcacaa

SEQ ID NO: 1083903 - RNA, 22 nt, Human
uaagaccaaaguucuguaggga

SEQ ID NO: 1083904 - RNA, 22 nt, Human
ugcagguggccaucuucguucu

SEQ ID NO: 1083905 - RNA, 22 nt, Human
caggagccgccaggcacguugg

SEQ ID NO: 1083906 - RNA, 21 nt, Human
ucuggcccuagguugggccuc

SEQ ID NO: 1083907 - RNA, 22 nt, Human
uucaaugauuuuuagggaucau

SEQ ID NO: 1083908 - RNA, 22 nt, Human
ucucaggaaauaggauuugagu

SEQ ID NO: 1083909 - RNA, 18 nt, Human
caagaaucucuaaagaag

SEQ ID NO: 1083910 - RNA, 22 nt, Human
aagacuaaauguguucuaaagu

SEQ ID NO: 1083911 - RNA, 22 nt, Human
ggcucugcuggauugaggccag

SEQ ID NO: 1083912 - RNA, 21 nt, Human
uagggcaggcauuggaagaga

SEQ ID NO: 1083913 - RNA, 22 nt, Human
uuauccaaacuggugaaucauu

SEQ ID NO: 1083914 - RNA, 22 nt, Human
gcagggcagccacaggcccccu

SEQ ID NO: 1083915 - RNA, 22 nt, Human
uggccagguguggguucucaga

SEQ ID NO: 1083916 - RNA, 22 nt, Human
uuacaacauauuuagcuugauu

SEQ ID NO: 1083917 - RNA, 22 nt, Human
gucagugucuuaacagagauua

SEQ ID NO: 1083918 - RNA, 22 nt, Human
cuucaugcugauauccucgaug

SEQ ID NO: 1083919 - RNA, 22 nt, Human
gacauguauuaguacauauggu

SEQ ID NO: 1083920 - RNA, 22 nt, Human
acaugauucuugauaggcauug

SEQ ID NO: 1083921 - RNA, 22 nt, Human
caaggcaggaagccugucuuau

SEQ ID NO: 1083922 - RNA, 22 nt, Human
cugaggcugggcuugccuucuu

SEQ ID NO: 1083923 - RNA, 22 nt, Human
ugaaggccuaacuuccagugcu

SEQ ID NO: 1083924 - RNA, 22 nt, Human
uuauuucauauaauguuaucaa

SEQ ID NO: 1083925 - RNA, 22 nt, Human
ucaucugucauccacaaagcug

SEQ ID NO: 1083926 - RNA, 22 nt, Human
auauuuaacuggucccaauaua

SEQ ID NO: 1083927 - RNA, 22 nt, Human
cagcugcccugccuugcccuua

SEQ ID NO: 1083928 - RNA, 22 nt, Human
cccuggaguccggagcucaccu

SEQ ID NO: 1083929 - RNA, 22 nt, Human
aagcgccacgagaagcuggacc

SEQ ID NO: 1083930 - RNA, 22 nt, Human
uuuauccagaaucaggauuuuu

SEQ ID NO: 1083931 - RNA, 22 nt, Human
aggaaggguucuuucuguuuau

SEQ ID NO: 1083932 - RNA, 22 nt, Human
gcaacagcauucucauugacau

SEQ ID NO: 1083933 - RNA, 22 nt, Human
gacaaagcagacaagauaauuc

SEQ ID NO: 1083934 - RNA, 22 nt, Human
gcccuggauguacaggcauguu

SEQ ID NO: 1083935 - RNA, 22 nt, Human
ccagcccugccucucagggccc

SEQ ID NO: 1083936 - RNA, 22 nt, Human
cuggaagaguccuaaacagaua

SEQ ID NO: 1083937 - RNA, 22 nt, Human
uuuagacacacuuuguauauuu

SEQ ID NO: 1083938 - RNA, 22 nt, Human
gccuggcacauugcaguggauu

SEQ ID NO: 1083939 - RNA, 22 nt, Human
ugggaagcacgcucagcagaaa

SEQ ID NO: 1083940 - RNA, 22 nt, Human
gcagagucccagcagguggugg

SEQ ID NO: 1083941 - RNA, 22 nt, Human
cagcuggguuuaguggggugug

SEQ ID NO: 1083942 - RNA, 22 nt, Human
gguguccucaugauuuucuaga

SEQ ID NO: 1083943 - RNA, 22 nt, Human
agcagcuggugagcaagcucag

SEQ ID NO: 1083944 - RNA, 22 nt, Human
ggcauuugagccauuggccugu

SEQ ID NO: 1083945 - RNA, 22 nt, Human
ucaagagacaggacguguuuca

SEQ ID NO: 1083946 - RNA, 22 nt, Human
uucucugaucuugcuagacuga

SEQ ID NO: 1083947 - RNA, 22 nt, Human
gaauucuuuucuuucugaaagu

SEQ ID NO: 1083948 - RNA, 22 nt, Human
ucucacuuuccagacuuuucaa

SEQ ID NO: 1083949 - RNA, 22 nt, Human
aagaccauugcuguauuuguag

SEQ ID NO: 1083950 - RNA, 22 nt, Human
gagacacaaacacauuuagagg

SEQ ID NO: 1083951 - RNA, 22 nt, Human
uguuucaaaacagugauaauuu

SEQ ID NO: 1083952 - RNA, 22 nt, Human
cuggagcuccagggucuccucu

SEQ ID NO: 1083953 - RNA, 22 nt, Human
gaugucuuuuuccaggcucuuu

SEQ ID NO: 1083954 - RNA, 22 nt, Human
cugagaguagcuggagaacauu

SEQ ID NO: 1083955 - RNA, 22 nt, Human
cuauuacauuucuggacauuca

SEQ ID NO: 1083956 - RNA, 22 nt, Human
uggcuucaaagguagcauacaa

SEQ ID NO: 1083957 - RNA, 22 nt, Human
uuugaacuguucuaggauuuaa

SEQ ID NO: 1083958 - RNA, 22 nt, Human
auaucauuauguuaugagcaca

SEQ ID NO: 1083959 - RNA, 22 nt, Human
guucagcuuacaaaauacaccu

SEQ ID NO: 1083960 - RNA, 22 nt, Human
aagauugucaggcuugcuguau

SEQ ID NO: 1083961 - RNA, 22 nt, Human
auuucucuuagcaagacauuac

SEQ ID NO: 1083962 - RNA, 22 nt, Human
gccccucccagucaggagcacu

SEQ ID NO: 1083963 - RNA, 22 nt, Human
aacacugagaggggaguggcac

SEQ ID NO: 1083964 - RNA, 18 nt, Human
cccagugcucacugccuc

SEQ ID NO: 1083965 - RNA, 22 nt, Human
ugcagagggacagccacagcuc

SEQ ID NO: 1083966 - RNA, 22 nt, Human
uccucagggaagaugagccuca

SEQ ID NO: 1083967 - RNA, 22 nt, Human
gagcugggucuccaccuuggca

SEQ ID NO: 1083968 - RNA, 22 nt, Human
gaggaaaauauucagggagguu

SEQ ID NO: 1083969 - RNA, 22 nt, Human
gcccaagcuggacugcaguggc

SEQ ID NO: 1083970 - RNA, 22 nt, Human
ucaguggaacugucugggugag

SEQ ID NO: 1083971 - RNA, 22 nt, Human
uacagcaugaucacaauggaaa

SEQ ID NO: 1083972 - RNA, 22 nt, Human
ucauugcaccccagucccagcu

SEQ ID NO: 1083973 - RNA, 22 nt, Human
caagcugguaucagcuagagcg

SEQ ID NO: 1083974 - RNA, 22 nt, Human
caagggcuucaaguggccaaga

SEQ ID NO: 1083975 - RNA, 22 nt, Human
acugccugccucugauucugca

SEQ ID NO: 1083976 - RNA, 22 nt, Human
guuucuuaccacuuggaccucu

SEQ ID NO: 1083977 - RNA, 22 nt, Human
ccagcagagcauggggaggaag

SEQ ID NO: 1083978 - RNA, 22 nt, Human
gucucagagagcuacucucuua

SEQ ID NO: 1083979 - RNA, 22 nt, Human
caagggcauugcuugggaccuu

SEQ ID NO: 1083980 - RNA, 22 nt, Human
agcuguguguuuccacugagcu

SEQ ID NO: 1083981 - RNA, 22 nt, Human
ugccuuuucuguagcucuggaa

SEQ ID NO: 1083982 - RNA, 22 nt, Human
uguaacacucaaucuguuuaac

SEQ ID NO: 1083983 - RNA, 22 nt, Human
cagcccuggugccaagguuccc

SEQ ID NO: 1083984 - RNA, 22 nt, Human
gugucacaugguuuacugcagc

SEQ ID NO: 1083985 - RNA, 22 nt, Human
ggcuggaaguccaagaucaagg

SEQ ID NO: 1083986 - RNA, 18 nt, Human
agcagcugugccacacug

SEQ ID NO: 1083987 - RNA, 22 nt, Human
cagggccugucacgacgcucau

SEQ ID NO: 1083988 - RNA, 22 nt, Human
uggcucaguuuagcagcucagu

SEQ ID NO: 1083989 - RNA, 22 nt, Human
ucugacuuccuuuucugaucca

SEQ ID NO: 1083990 - RNA, 22 nt, Human
auuauuacuccugauuguacug

SEQ ID NO: 1083991 - RNA, 22 nt, Human
aggaagggauacauaggauagu

SEQ ID NO: 1083992 - RNA, 22 nt, Human
caguacuuugcaucauuccacu

SEQ ID NO: 1083993 - RNA, 22 nt, Human
ggccacugccuccgccauggcu

SEQ ID NO: 1083994 - RNA, 22 nt, Human
aucauacacucacauaaacaga

SEQ ID NO: 1083995 - RNA, 22 nt, Human
auguucuguuuuguaauucaua

SEQ ID NO: 1083996 - RNA, 22 nt, Human
uugguucaacuuuucuaaguag

SEQ ID NO: 1083997 - RNA, 22 nt, Human
uagaugaccuuguguuaggcaa

SEQ ID NO: 1083998 - RNA, 22 nt, Human
ucagaggagaccaaggggaaua

SEQ ID NO: 1083999 - RNA, 22 nt, Human
cacugggcuuuguaguuagcau

SEQ ID NO: 1084000 - RNA, 22 nt, Human
ccaggcugcuuagccuuaucuu

SEQ ID NO: 1084001 - RNA, 22 nt, Human
cugggccuaacccacagcguuu

SEQ ID NO: 1084002 - RNA, 22 nt, Human
agauuucaaugugagcauuagu

SEQ ID NO: 1084003 - RNA, 22 nt, Human
uggcucagauuuuuguaggcuu

SEQ ID NO: 1084004 - RNA, 22 nt, Human
aaagcagagcagggcacuuaug

SEQ ID NO: 1084005 - RNA, 22 nt, Human
ccagucacagguguguuuauau

SEQ ID NO: 1084006 - RNA, 22 nt, Human
agagcugggaccgucuggaagu

SEQ ID NO: 1084007 - RNA, 22 nt, Human
gaggaaaagagacagguuauug

SEQ ID NO: 1084008 - RNA, 22 nt, Human
acaaacagaguugaaaaauagg

SEQ ID NO: 1084009 - RNA, 22 nt, Human
gaggagaagcuauuggaaggac

SEQ ID NO: 1084010 - RNA, 22 nt, Human
cugagccaaggggacagugaca

SEQ ID NO: 1084011 - RNA, 22 nt, Human
aagcgcagacacagagagugga

SEQ ID NO: 1084012 - RNA, 22 nt, Human
ugcacacaaguuggagaaugaa

SEQ ID NO: 1084013 - RNA, 22 nt, Human
uaauuucacaguucaacgcaca

SEQ ID NO: 1084014 - RNA, 21 nt, Human
ggagauggguaucgccugggc

SEQ ID NO: 1084015 - RNA, 22 nt, Human
acauuucaguaaguguuaauuu

SEQ ID NO: 1084016 - RNA, 22 nt, Human
ccagagucccuguucucggccu

SEQ ID NO: 1084017 - RNA, 22 nt, Human
cagcagguauguuuguucagca

SEQ ID NO: 1084018 - RNA, 22 nt, Human
auacaagacucagcacagacgg

SEQ ID NO: 1084019 - RNA, 22 nt, Human
auuuugaagggaauugaaguuc

SEQ ID NO: 1084020 - RNA, 22 nt, Human
uuuucauuguaaaucaggaaac

SEQ ID NO: 1084021 - RNA, 22 nt, Human
auugacuuccauagcuaccugg

SEQ ID NO: 1084022 - RNA, 22 nt, Human
agagucaaaauuuaccagaaug

SEQ ID NO: 1084023 - RNA, 22 nt, Human
cagaggccaccuguggccacug

SEQ ID NO: 1084024 - RNA, 22 nt, Human
acuauacauugaauguuaaggu

SEQ ID NO: 1084025 - RNA, 22 nt, Human
guucagauuugacugguuucuc

SEQ ID NO: 1084026 - RNA, 22 nt, Human
gaaauacaaagccagccauuuu

SEQ ID NO: 1084027 - RNA, 22 nt, Human
ggaaaucaagaagcagaugagu

SEQ ID NO: 1084028 - RNA, 22 nt, Human
ugaggcucagugagcccugcag

SEQ ID NO: 1084029 - RNA, 22 nt, Human
cgguccuggcacuugcggcucc

SEQ ID NO: 1084030 - RNA, 22 nt, Human
gcugccugggcaggaggcgcug

SEQ ID NO: 1084031 - RNA, 22 nt, Human
cagcugaagagaggugcugagu

SEQ ID NO: 1084032 - RNA, 21 nt, Human
cugggcuuucucucaaagaca

SEQ ID NO: 1084033 - RNA, 22 nt, Human
ucuggcaguuccuuguugauau

SEQ ID NO: 1084034 - RNA, 22 nt, Human
ucauauuaggguaaugauaaga

SEQ ID NO: 1084035 - RNA, 22 nt, Human
gagauggcccuggcauguagcu

SEQ ID NO: 1084036 - RNA, 22 nt, Human
gaaaucugcuucuugcauagua

SEQ ID NO: 1084037 - RNA, 22 nt, Human
cuuacauuaaguaagagauuga

SEQ ID NO: 1084038 - RNA, 22 nt, Human
cagccagagaaagggcacugcc

SEQ ID NO: 1084039 - RNA, 22 nt, Human
cugccuggccacaacccagggu

SEQ ID NO: 1084040 - RNA, 22 nt, Human
ggaggccaaagugugggcggcu

SEQ ID NO: 1084041 - RNA, 21 nt, Human
caguuacagccaggacaaggc

SEQ ID NO: 1084042 - RNA, 22 nt, Human
ucacacguccuugcuacuccuc

SEQ ID NO: 1084043 - RNA, 22 nt, Human
ugccucugugggccuuccuggc

SEQ ID NO: 1084044 - RNA, 22 nt, Human
uacagaguggugagaucuuuug

SEQ ID NO: 1084045 - RNA, 22 nt, Human
gucaacauguucugggugaaug

SEQ ID NO: 1084046 - RNA, 22 nt, Human
ccugggcuuugcuggcaaggcc

SEQ ID NO: 1084047 - RNA, 22 nt, Human
cggggacacacuggcagcuccu

SEQ ID NO: 1084048 - RNA, 22 nt, Human
gccaggaagugcagcccugcca

SEQ ID NO: 1084049 - RNA, 22 nt, Human
ucucuucuagcuucuugugguu

SEQ ID NO: 1084050 - RNA, 22 nt, Human
caggacagagcccagacugugu

SEQ ID NO: 1084051 - RNA, 22 nt, Human
uauuuucuggacagucuugcuu

SEQ ID NO: 1084052 - RNA, 22 nt, Human
gggacagcuguagugcuuggcu

SEQ ID NO: 1084053 - RNA, 17 nt, Human
ggaaaagaagaguagga

SEQ ID NO: 1084054 - RNA, 22 nt, Human
aggacccugcucaagcaucucc

SEQ ID NO: 1084055 - RNA, 22 nt, Human
uguaaggagugugaguuugagu

SEQ ID NO: 1084056 - RNA, 22 nt, Human
ggcugagugcugcuguucacga

SEQ ID NO: 1084057 - RNA, 22 nt, Human
gccaagcucaccuucugaugga

SEQ ID NO: 1084058 - RNA, 22 nt, Human
gcuggggagcuagaccucagca

SEQ ID NO: 1084059 - RNA, 22 nt, Human
ugaaugcaagucacacauuucu

SEQ ID NO: 1084060 - RNA, 22 nt, Human
guuuauuauucaacuucauguu

SEQ ID NO: 1084061 - RNA, 22 nt, Human
agggccugaggcugacggggag

SEQ ID NO: 1084062 - RNA, 22 nt, Human
aggcucagccugggccuagagc

SEQ ID NO: 1084063 - RNA, 22 nt, Human
aaauaugagauguucucuuucg

SEQ ID NO: 1084064 - RNA, 22 nt, Human
accacuguaucuccagcacauu

SEQ ID NO: 1084065 - RNA, 22 nt, Human
agagaaaugggguaaucuuuca

SEQ ID NO: 1084066 - RNA, 22 nt, Human
uggcucuguucgccaucaggag

SEQ ID NO: 1084067 - RNA, 22 nt, Human
ugucucuuggcucuaucacuua

SEQ ID NO: 1084068 - RNA, 22 nt, Human
uuuagcauguuccuuucauaga

SEQ ID NO: 1084069 - RNA, 22 nt, Human
gaagcagcuagcccacuaguca

SEQ ID NO: 1084070 - RNA, 22 nt, Human
uuggagagcaguaaaccacacu

SEQ ID NO: 1084071 - RNA, 22 nt, Human
gggcugagggccaauuccuacu

SEQ ID NO: 1084072 - RNA, 22 nt, Human
ugggcucucucaccuggaggcu

SEQ ID NO: 1084073 - RNA, 22 nt, Human
aucaacaugugagagcaccagu

SEQ ID NO: 1084074 - RNA, 22 nt, Human
augaggcucucaggggagcugu

SEQ ID NO: 1084075 - RNA, 22 nt, Human
aagaagcaugagaagauuuuau

SEQ ID NO: 1084076 - RNA, 22 nt, Human
gucugagaacuacugaggauaa

SEQ ID NO: 1084077 - RNA, 22 nt, Human
aaagucacauauaacaagggca

SEQ ID NO: 1084078 - RNA, 22 nt, Human
cugagggcaugaacauuccaua

SEQ ID NO: 1084079 - RNA, 22 nt, Human
cccaggaaguggagguugcagu

SEQ ID NO: 1084080 - RNA, 22 nt, Human
cugacaggguagacagagggca

SEQ ID NO: 1084081 - RNA, 22 nt, Human
cuaccggguucucagccaggca

SEQ ID NO: 1084082 - RNA, 22 nt, Human
uuacacagacauggcaucauga

SEQ ID NO: 1084083 - RNA, 21 nt, Human
ucagcagcuuuugcagucccu

SEQ ID NO: 1084084 - RNA, 22 nt, Human
ggccugugcugucagcccuagu

SEQ ID NO: 1084085 - RNA, 22 nt, Human
cugugccuaagaugcaugucuc

SEQ ID NO: 1084086 - RNA, 22 nt, Human
gcucuccaaacccuguggcuuu

SEQ ID NO: 1084087 - RNA, 22 nt, Human
uccacuugcccucuucugugcu

SEQ ID NO: 1084088 - RNA, 22 nt, Human
agggcucugggguggcagagau

SEQ ID NO: 1084089 - RNA, 19 nt, Human
acccagagcccuuugcagg

SEQ ID NO: 1084090 - RNA, 22 nt, Human
uagcuaucuguguccagaucca

SEQ ID NO: 1084091 - RNA, 22 nt, Human
gaaggcuugcagcucuguggca

SEQ ID NO: 1084092 - RNA, 22 nt, Human
aaagcaauugugguuuuuguca

SEQ ID NO: 1084093 - RNA, 21 nt, Human
uggcugccuacaugcugcagg

SEQ ID NO: 1084094 - RNA, 22 nt, Human
guuuacauaugucugucugcac

SEQ ID NO: 1084095 - RNA, 22 nt, Human
cucagacugguggguaaaaccu

SEQ ID NO: 1084096 - RNA, 22 nt, Human
auguaugagagauucuuuuauu

SEQ ID NO: 1084097 - RNA, 19 nt, Human
ccaggaaccccuagcuacc

SEQ ID NO: 1084098 - RNA, 22 nt, Human
cagugucuuauuuguagcucag

SEQ ID NO: 1084099 - RNA, 22 nt, Human
ccaggacuuauuacaguauaac

SEQ ID NO: 1084100 - RNA, 22 nt, Human
uaagaacaguagaacaguaggu

SEQ ID NO: 1084101 - RNA, 22 nt, Human
cugcagccuccuccagcuacgu

SEQ ID NO: 1084102 - RNA, 22 nt, Human
aaagccuuggucaucugguucc

SEQ ID NO: 1084103 - RNA, 22 nt, Human
uggcugaguuccuggcacacgg

SEQ ID NO: 1084104 - RNA, 22 nt, Human
gcuuccugauauucauacuguu

SEQ ID NO: 1084105 - RNA, 22 nt, Human
ggcuccagggaguggagagaag

SEQ ID NO: 1084106 - RNA, 22 nt, Human
acaucaguccaccacugcaguu

SEQ ID NO: 1084107 - RNA, 20 nt, Human
uggcaggaggcagcagugga

SEQ ID NO: 1084108 - RNA, 22 nt, Human
gcugcccaggguggagccggcu

SEQ ID NO: 1084109 - RNA, 22 nt, Human
augaauacgcggucauacacau

SEQ ID NO: 1084110 - RNA, 22 nt, Human
ccacuguuuuucaguuaacuuu

SEQ ID NO: 1084111 - RNA, 22 nt, Human
acugugaugaugaagcaugguu

SEQ ID NO: 1084112 - RNA, 22 nt, Human
aggaggaacucagaaagaaggu

SEQ ID NO: 1084113 - RNA, 22 nt, Human
uuugucagucaugucugcuuuu

SEQ ID NO: 1084114 - RNA, 22 nt, Human
uggcagguuuccuccucauagu

SEQ ID NO: 1084115 - RNA, 22 nt, Human
ugcugccaaaugcgagcucugu

SEQ ID NO: 1084116 - RNA, 22 nt, Human
aggcuccuuguucaucauccau

SEQ ID NO: 1084117 - RNA, 22 nt, Human
gaauuuaaauuuaaaucuacca

SEQ ID NO: 1084118 - RNA, 22 nt, Human
cugccagcaaugugaccaugcu

SEQ ID NO: 1084119 - RNA, 22 nt, Human
ccacuguaaguuugaaaauaac

SEQ ID NO: 1084120 - RNA, 22 nt, Human
aaggaggagcggaggcuuguug

SEQ ID NO: 1084121 - RNA, 22 nt, Human
cuucaagauccauagauauugc

SEQ ID NO: 1084122 - RNA, 22 nt, Human
cugcugggucuaugcaagugga

SEQ ID NO: 1084123 - RNA, 22 nt, Human
aaggagucucagcugggccuga

SEQ ID NO: 1084124 - RNA, 22 nt, Human
cucuuucugauucgcugggacc

SEQ ID NO: 1084125 - RNA, 22 nt, Human
cugggagcaccauacuuguuuc

SEQ ID NO: 1084126 - RNA, 22 nt, Human
uucauucuuauuugugaucugg

SEQ ID NO: 1084127 - RNA, 22 nt, Human
cuggugcuggagccuagucccu

SEQ ID NO: 1084128 - RNA, 22 nt, Human
caggaaauguauaauuuuauaa

SEQ ID NO: 1084129 - RNA, 22 nt, Human
acacaguaucaaauuucaucuu

SEQ ID NO: 1084130 - RNA, 22 nt, Human
uguaagaauaaugauuucuaag

SEQ ID NO: 1084131 - RNA, 22 nt, Human
gucacacagguugaaaugcagu

SEQ ID NO: 1084132 - RNA, 22 nt, Human
uugaaauggaagugaaaauucu

SEQ ID NO: 1084133 - RNA, 22 nt, Human
uccuuugguuguagacaggaau

SEQ ID NO: 1084134 - RNA, 23 nt, Human
agcugcugggccugccguggccu

SEQ ID NO: 1084135 - RNA, 22 nt, Human
uguuugacaacaggcucacaga

SEQ ID NO: 1084136 - RNA, 22 nt, Human
ugauuuccccagucuugcugcu

SEQ ID NO: 1084137 - RNA, 22 nt, Human
gagguggccaagcgaggaaggg

SEQ ID NO: 1084138 - RNA, 22 nt, Human
ucugucuccucugaggugccag

SEQ ID NO: 1084139 - RNA, 22 nt, Human
cagagccacugucugccaggca

SEQ ID NO: 1084140 - RNA, 21 nt, Human
ggugggguaccuaagguagcu

SEQ ID NO: 1084141 - RNA, 22 nt, Human
ugcuucugaacucagcaugugg

SEQ ID NO: 1084142 - RNA, 22 nt, Human
ggguguccugugccaagcuggg

SEQ ID NO: 1084143 - RNA, 22 nt, Human
gccuggggaacuugauccuguc

SEQ ID NO: 1084144 - RNA, 22 nt, Human
acagaaagauaggcacaagguc

SEQ ID NO: 1084145 - RNA, 22 nt, Human
auuuacagaagcauguaauagc

SEQ ID NO: 1084146 - RNA, 22 nt, Human
ugugucagagguagagauggca

SEQ ID NO: 1084147 - RNA, 22 nt, Human
acagaauuaacauuugaugaau

SEQ ID NO: 1084148 - RNA, 22 nt, Human
guguuuuaagaaagaagcucag

SEQ ID NO: 1084149 - RNA, 22 nt, Human
gggcacagucuaaaguugggcc

SEQ ID NO: 1084150 - RNA, 22 nt, Human
gcucagccgaacuucagagcag

SEQ ID NO: 1084151 - RNA, 22 nt, Human
ggaagccaugagggacaguucu

SEQ ID NO: 1084152 - RNA, 22 nt, Human
ggcauggcuggguucuggugag

SEQ ID NO: 1084153 - RNA, 17 nt, Human
agaugcuggccacaugu

SEQ ID NO: 1084154 - RNA, 22 nt, Human
ggcaaggggucaggcugagaca

SEQ ID NO: 1084155 - RNA, 22 nt, Human
agcucccugcacgacccugccc

SEQ ID NO: 1084156 - RNA, 22 nt, Human
uaacaaagguugccaaacuaag

SEQ ID NO: 1084157 - RNA, 19 nt, Human
cagguaacauaugcacaaa

SEQ ID NO: 1084158 - RNA, 22 nt, Human
ucugccuggagaguucuucucu

SEQ ID NO: 1084159 - RNA, 19 nt, Human
augucuggguaacagcugc

SEQ ID NO: 1084160 - RNA, 22 nt, Human
uucugagauuguuaggcacuaa

SEQ ID NO: 1084161 - RNA, 22 nt, Human
gacagcaggagaucaugauaga

SEQ ID NO: 1084162 - RNA, 19 nt, Human
guugaaaguaggugagggu

SEQ ID NO: 1084163 - RNA, 22 nt, Human
aauguuucaauuaagucuuuua

SEQ ID NO: 1084164 - RNA, 22 nt, Human
cauuuguuggucagauuguagu

SEQ ID NO: 1084165 - RNA, 22 nt, Human
uuguuuuugugaggcagcccau

SEQ ID NO: 1084166 - RNA, 22 nt, Human
gaggaggaggaaguggaaccca

SEQ ID NO: 1084167 - RNA, 22 nt, Human
uucagaaagugaaucuuguuau

SEQ ID NO: 1084168 - RNA, 22 nt, Human
uuccaggacaagauguuucagg

SEQ ID NO: 1084169 - RNA, 22 nt, Human
auccagcuuugucuggucuucg

SEQ ID NO: 1084170 - RNA, 22 nt, Human
uggcugaggagagggcggaagu

SEQ ID NO: 1084171 - RNA, 22 nt, Human
gggccacacagaaccuccuggu

SEQ ID NO: 1084172 - RNA, 22 nt, Human
caagaauccuguucuugaagau

SEQ ID NO: 1084173 - RNA, 22 nt, Human
acccucagcuggagauugaauu

SEQ ID NO: 1084174 - RNA, 22 nt, Human
ugaguuuuggaagacaacacaa

SEQ ID NO: 1084175 - RNA, 22 nt, Human
cagggacaaagugagaaaggaa

SEQ ID NO: 1084176 - RNA, 19 nt, Human
ucugccucuggucaggcuc

SEQ ID NO: 1084177 - RNA, 22 nt, Human
agguggaacguucaggugcuag

SEQ ID NO: 1084178 - RNA, 22 nt, Human
cagagaaagaagcccauucauu

SEQ ID NO: 1084179 - RNA, 22 nt, Human
uucuccucuguuggccuucccu

SEQ ID NO: 1084180 - RNA, 22 nt, Human
uuccaugugaguacacugugau

SEQ ID NO: 1084181 - RNA, 22 nt, Human
gggguggaucaggcaggcccag

SEQ ID NO: 1084182 - RNA, 22 nt, Human
acauacauugccucauugguaa

SEQ ID NO: 1084183 - RNA, 22 nt, Human
cugaggugcuagggucccugcu

SEQ ID NO: 1084184 - RNA, 22 nt, Human
gccugccacgcaugcagaguca

SEQ ID NO: 1084185 - RNA, 22 nt, Human
acuucaaauuuucagaagaaau

SEQ ID NO: 1084186 - RNA, 22 nt, Human
agccaggccuuuucucaagguu

SEQ ID NO: 1084187 - RNA, 22 nt, Human
cugugagcuggguggccaggac

SEQ ID NO: 1084188 - RNA, 22 nt, Human
guauuugauagauuucaaagga

SEQ ID NO: 1084189 - RNA, 22 nt, Human
agcagggcuguguagguaauga

SEQ ID NO: 1084190 - RNA, 22 nt, Human
uggccuuggacagagcgcuccu

SEQ ID NO: 1084191 - RNA, 22 nt, Human
ccugcugucaguggggcaggca

SEQ ID NO: 1084192 - RNA, 22 nt, Human
ggagacagugguagggccuaag

SEQ ID NO: 1084193 - RNA, 22 nt, Human
auauuugugguuuuuggcuccu

SEQ ID NO: 1084194 - RNA, 22 nt, Human
gguggguauugaauacaggugu

SEQ ID NO: 1084195 - RNA, 22 nt, Human
auuucauccauuaagaguacuc

SEQ ID NO: 1084196 - RNA, 22 nt, Human
ccaggccugcaucugcugcgca

SEQ ID NO: 1084197 - RNA, 22 nt, Human
aguaugaacggaaggccuggga

SEQ ID NO: 1084198 - RNA, 22 nt, Human
cacaaauaccaguuuccuaaca

SEQ ID NO: 1084199 - RNA, 22 nt, Human
uguauuuucugaggagcauuag

SEQ ID NO: 1084200 - RNA, 22 nt, Human
uucccacauucuuuacauucau

SEQ ID NO: 1084201 - RNA, 22 nt, Human
gggcagcaaaucugagucuggu

SEQ ID NO: 1084202 - RNA, 22 nt, Human
cgcaggcuuuagaaucugcuac

SEQ ID NO: 1084203 - RNA, 22 nt, Human
ucugaaauacugcagguucucu

SEQ ID NO: 1084204 - RNA, 22 nt, Human
auuuaaaugcuuaagaggguuu

SEQ ID NO: 1084205 - RNA, 19 nt, Human
ggcuccuguggcugcagcc

SEQ ID NO: 1084206 - RNA, 22 nt, Human
ugagaaaaguguggaggucaau

SEQ ID NO: 1084207 - RNA, 22 nt, Human
acaaagugaauugcaucgaguu

SEQ ID NO: 1084208 - RNA, 22 nt, Human
acagcugugaagcaagcacucu

SEQ ID NO: 1084209 - RNA, 17 nt, Human
ccugccugagccauagc

SEQ ID NO: 1084210 - RNA, 22 nt, Human
agcacuuugggagauaaagcug

SEQ ID NO: 1084211 - RNA, 23 nt, Human
aaggucacagaacuuagcaagcc

SEQ ID NO: 1084212 - RNA, 22 nt, Human
uucacagggccacuggcaggag

SEQ ID NO: 1084213 - RNA, 22 nt, Human
ugagaacauacaaacagagaaa

SEQ ID NO: 1084214 - RNA, 19 nt, Human
uucuggggccuggccuugg

SEQ ID NO: 1084215 - RNA, 19 nt, Human
uggucucugucucuuugca

SEQ ID NO: 1084216 - RNA, 22 nt, Human
auaaggcuuaaaccuuguugcc

SEQ ID NO: 1084217 - RNA, 22 nt, Human
uccaggaauagaucagagauuu

SEQ ID NO: 1084218 - RNA, 22 nt, Human
gagagcugggaaagccguggag

SEQ ID NO: 1084219 - RNA, 22 nt, Human
aaguaaauguuggagcucaaau

SEQ ID NO: 1084220 - RNA, 17 nt, Human
ucaggauguagcaguag

SEQ ID NO: 1084221 - RNA, 22 nt, Human
uuucugaauuccuaggauguug

SEQ ID NO: 1084222 - RNA, 22 nt, Human
ugagagucucagaccuccuggu

SEQ ID NO: 1084223 - RNA, 22 nt, Human
auuuauuaugggauuuggcaca

SEQ ID NO: 1084224 - RNA, 22 nt, Human
agcaggaggagagccuggcggu

SEQ ID NO: 1084225 - RNA, 22 nt, Human
uagaaacaaagaccugggugcu

SEQ ID NO: 1084226 - RNA, 22 nt, Human
gaguuaauaggguucuuuguga

SEQ ID NO: 1084227 - RNA, 22 nt, Human
uuuugguagaaucaacaaugua

SEQ ID NO: 1084228 - RNA, 22 nt, Human
aggggccucgcaggaccgcucc

SEQ ID NO: 1084229 - RNA, 20 nt, Human
cuggggaggaggauguguuc

SEQ ID NO: 1084230 - RNA, 20 nt, Human
ugaagcagccuugauucugu

SEQ ID NO: 1084231 - RNA, 22 nt, Human
guggccugagcuucagaguugg

SEQ ID NO: 1084232 - RNA, 22 nt, Human
cccuggagaaggggacgcggag

SEQ ID NO: 1084233 - RNA, 16 nt, Human
ccugggcucuguugga

SEQ ID NO: 1084234 - RNA, 22 nt, Human
cuguuguuccgggagcugcagc

SEQ ID NO: 1084235 - RNA, 22 nt, Human
caggccugguugagcccugaga

SEQ ID NO: 1084236 - RNA, 22 nt, Human
agucccagccuguaggauuggg

SEQ ID NO: 1084237 - RNA, 21 nt, Human
gauuucacuuaccuucauuua

SEQ ID NO: 1084238 - RNA, 22 nt, Human
aaugauggucauggcaacuuuu

SEQ ID NO: 1084239 - RNA, 22 nt, Human
aaggcacugaaaaauugugugu

SEQ ID NO: 1084240 - RNA, 22 nt, Human
ugcaggaggcuuuauucaggau

SEQ ID NO: 1084241 - RNA, 22 nt, Human
cccaggaaguugagacugcagu

SEQ ID NO: 1084242 - RNA, 22 nt, Human
aagcauuugguucugaagacuc

SEQ ID NO: 1084243 - RNA, 22 nt, Human
gagaaguuucugguuugcauag

SEQ ID NO: 1084244 - RNA, 22 nt, Human
auuauuaggacuacugggguug

SEQ ID NO: 1084245 - RNA, 19 nt, Human
aagaacuaugugauuacag

SEQ ID NO: 1084246 - RNA, 22 nt, Human
aagcagaaguugaucuaccaua

SEQ ID NO: 1084247 - RNA, 22 nt, Human
gucaccaggucugaugcagcca

SEQ ID NO: 1084248 - RNA, 22 nt, Human
ucugaaauaaaugcacuguuag

SEQ ID NO: 1084249 - RNA, 22 nt, Human
ggaggggagucucccaaagccg

SEQ ID NO: 1084250 - RNA, 22 nt, Human
gaggaacagcagccacaugucc

SEQ ID NO: 1084251 - RNA, 22 nt, Human
gggugaagcuccugcaggggcc

SEQ ID NO: 1084252 - RNA, 19 nt, Human
uggcuuccaucucucucau

SEQ ID NO: 1084253 - RNA, 22 nt, Human
cacaguuagcuccagucuuagc

SEQ ID NO: 1084254 - RNA, 21 nt, Human
aucuuuauuacgcagagaaga

SEQ ID NO: 1084255 - RNA, 22 nt, Human
ccugagcugaacuaagcaguuu

SEQ ID NO: 1084256 - RNA, 22 nt, Human
uggaggcauaggccugggcccu

SEQ ID NO: 1084257 - RNA, 22 nt, Human
cucaggaugcaggucacaggac

SEQ ID NO: 1084258 - RNA, 22 nt, Human
acagugauuucauccuucuggg

SEQ ID NO: 1084259 - RNA, 22 nt, Human
auuguucauguaugaauaaaua

SEQ ID NO: 1084260 - RNA, 19 nt, Human
uggagacugagagugagca

SEQ ID NO: 1084261 - RNA, 22 nt, Human
uggcucuguugagguauggauu

SEQ ID NO: 1084262 - RNA, 22 nt, Human
uaucuguuccaggcacucagcu

SEQ ID NO: 1084263 - RNA, 18 nt, Human
aagcugcccucaggcagg

SEQ ID NO: 1084264 - RNA, 22 nt, Human
uauagcauggcuauauuguugc

SEQ ID NO: 1084265 - RNA, 22 nt, Human
aagccagccagugccagucuua

SEQ ID NO: 1084266 - RNA, 22 nt, Human
agccaggccagacucacacccu

SEQ ID NO: 1084267 - RNA, 22 nt, Human
uggaaagaauuccuaugguuca

SEQ ID NO: 1084268 - RNA, 22 nt, Human
uugcugaagugaagguauguuu

SEQ ID NO: 1084269 - RNA, 22 nt, Human
cagacacagauaugcauauggc

SEQ ID NO: 1084270 - RNA, 22 nt, Human
auuuuaauaagauucccaagua

SEQ ID NO: 1084271 - RNA, 22 nt, Human
gaagcagcaaaucugcaguauc

SEQ ID NO: 1084272 - RNA, 22 nt, Human
uuggaauuuaguaaaauaaugc

SEQ ID NO: 1084273 - RNA, 22 nt, Human
aggcuucuugauaaaaugcaga

SEQ ID NO: 1084274 - RNA, 22 nt, Human
uuucauuauacagcuucauaaa

SEQ ID NO: 1084275 - RNA, 22 nt, Human
uacaguuuuuauucaugacaag

SEQ ID NO: 1084276 - RNA, 23 nt, Human
agcaaauaaucugcuugcuuuuu

SEQ ID NO: 1084277 - RNA, 22 nt, Human
ucagggaaaacaucccgccuaa

SEQ ID NO: 1084278 - RNA, 22 nt, Human
uaggaagaaacuuucccugcag

SEQ ID NO: 1084279 - RNA, 21 nt, Human
ccagguacauggagaaugugg

SEQ ID NO: 1084280 - RNA, 22 nt, Human
acauucaugucccacuucuagc

SEQ ID NO: 1084281 - RNA, 18 nt, Human
cucucugggugaggacaa

SEQ ID NO: 1084282 - RNA, 22 nt, Human
uauuaagauacguaguuguaaa

SEQ ID NO: 1084283 - RNA, 21 nt, Human
uagcuucuugaggcuuggccg

SEQ ID NO: 1084284 - RNA, 22 nt, Human
uagaaagcuugggguguuuaaa

SEQ ID NO: 1084285 - RNA, 22 nt, Human
cugaggcaugggaaguugggug

SEQ ID NO: 1084286 - RNA, 20 nt, Human
auuccauaguuggcacuuuu

SEQ ID NO: 1084287 - RNA, 22 nt, Human
gcacacaugcaugcacaggagu

SEQ ID NO: 1084288 - RNA, 20 nt, Human
cugagcgucuaagaggugag

SEQ ID NO: 1084289 - RNA, 22 nt, Human
cauuuuauguuuauggagugcu

SEQ ID NO: 1084290 - RNA, 22 nt, Human
ccauuuuauuagugacauuuag

SEQ ID NO: 1084291 - RNA, 22 nt, Human
uggaacacuguggaugagaaga

SEQ ID NO: 1084292 - RNA, 22 nt, Human
aggaaaaucgagucuggaggca

SEQ ID NO: 1084293 - RNA, 21 nt, Human
ugaggcaggggugcuuuuguc

SEQ ID NO: 1084294 - RNA, 22 nt, Human
gcaguggauccaaugguaucuu

SEQ ID NO: 1084295 - RNA, 22 nt, Human
auuucacagcugcuguucaggu

SEQ ID NO: 1084296 - RNA, 22 nt, Human
aggccaggcaacauucugaagu

SEQ ID NO: 1084297 - RNA, 22 nt, Human
aaagauuucagaagccugugcc

SEQ ID NO: 1084298 - RNA, 22 nt, Human
uuguuuuuaaacaugugacuga

SEQ ID NO: 1084299 - RNA, 22 nt, Human
agucaggguuguaggcucaccc

SEQ ID NO: 1084300 - RNA, 22 nt, Human
aaacaaugaaauucauucuuca

SEQ ID NO: 1084301 - RNA, 22 nt, Human
auuaauaaaauaccacuuuguu

SEQ ID NO: 1084302 - RNA, 22 nt, Human
uuuguguguguauaggaaagga

SEQ ID NO: 1084303 - RNA, 22 nt, Human
acacagaguuugacacauggga

SEQ ID NO: 1084304 - RNA, 22 nt, Human
uuagcugucaagguggcugcag

SEQ ID NO: 1084305 - RNA, 22 nt, Human
acagaauaagguuuaucucucc

SEQ ID NO: 1084306 - RNA, 22 nt, Human
uugggugcugucauggggcacg

SEQ ID NO: 1084307 - RNA, 22 nt, Human
ucgagucauguucucccauuaa

SEQ ID NO: 1084308 - RNA, 22 nt, Human
cugagcagcacagggcgccagg

SEQ ID NO: 1084309 - RNA, 18 nt, Human
gcugucugaggucugagg

SEQ ID NO: 1084310 - RNA, 21 nt, Human
caaagccaggcaacucucucc

SEQ ID NO: 1084311 - RNA, 23 nt, Human
acuuuauugaccccaggucaguu

SEQ ID NO: 1084312 - RNA, 20 nt, Human
agcuggagaagggcccuucc

SEQ ID NO: 1084313 - RNA, 22 nt, Human
gccuccugcccagaugagugau

SEQ ID NO: 1084314 - RNA, 22 nt, Human
gucacuguauccagguuccagc

SEQ ID NO: 1084315 - RNA, 22 nt, Human
uaguucuagccagugaaaugua

SEQ ID NO: 1084316 - RNA, 22 nt, Human
ucaggaagcuacugccagcagc

SEQ ID NO: 1084317 - RNA, 22 nt, Human
uguggccuccccacuucugggg

SEQ ID NO: 1084318 - RNA, 22 nt, Human
aguguuaacaugaaugguuucc

SEQ ID NO: 1084319 - RNA, 22 nt, Human
ugggaccaagucauuucuuuag

SEQ ID NO: 1084320 - RNA, 22 nt, Human
ugagccagauaagggcucacgc

SEQ ID NO: 1084321 - RNA, 22 nt, Human
cagcugagcaucacuagucugg

SEQ ID NO: 1084322 - RNA, 19 nt, Human
agggaauccggcugaggga

SEQ ID NO: 1084323 - RNA, 22 nt, Human
caugcagugaugcacugcauca

SEQ ID NO: 1084324 - RNA, 22 nt, Human
augauuucuauauaaacuuaaa

SEQ ID NO: 1084325 - RNA, 22 nt, Human
gacaggaaacaagaaggcagga

SEQ ID NO: 1084326 - RNA, 22 nt, Human
cacagcugccauggcugcacuu

SEQ ID NO: 1084327 - RNA, 22 nt, Human
gcugggaagagaugcacaugau

SEQ ID NO: 1084328 - RNA, 22 nt, Human
ggcugcagggcagcuggugugg

SEQ ID NO: 1084329 - RNA, 22 nt, Human
uuaugaaguuccuguuacagug

SEQ ID NO: 1084330 - RNA, 19 nt, Human
aguuauuucuaaauuuacc

SEQ ID NO: 1084331 - RNA, 22 nt, Human
uuagccauauagaaaaagagcu

SEQ ID NO: 1084332 - RNA, 22 nt, Human
cucacuguuuaauagcuggauc

SEQ ID NO: 1084333 - RNA, 22 nt, Human
guuacauuaaaaacauucacug

SEQ ID NO: 1084334 - RNA, 22 nt, Human
agaaaaacacaaucgggccucc

SEQ ID NO: 1084335 - RNA, 22 nt, Human
agccuggaagaaccugaagucu

SEQ ID NO: 1084336 - RNA, 22 nt, Human
auauccuuuucggaagagcagc

SEQ ID NO: 1084337 - RNA, 20 nt, Human
agacccuguguccuguggcc

SEQ ID NO: 1084338 - RNA, 22 nt, Human
cgcagcagccccgugguaggug

SEQ ID NO: 1084339 - RNA, 22 nt, Human
cugaggcugaagagggccuacg

SEQ ID NO: 1084340 - RNA, 22 nt, Human
ccagagaaauaaggggaaaaug

SEQ ID NO: 1084341 - RNA, 19 nt, Human
gcugugccucucuccugcu

SEQ ID NO: 1084342 - RNA, 22 nt, Human
ucuucagagacucugagccccu

SEQ ID NO: 1084343 - RNA, 22 nt, Human
uccagccaccaccuugauugcc

SEQ ID NO: 1084344 - RNA, 22 nt, Human
auauuucaugggguuccauacu

SEQ ID NO: 1084345 - RNA, 21 nt, Human
ggcugcugggagagcugcgug

SEQ ID NO: 1084346 - RNA, 22 nt, Human
ggguggaguagaaagaugaauu

SEQ ID NO: 1084347 - RNA, 22 nt, Human
ucaccugggagggcugugguag

SEQ ID NO: 1084348 - RNA, 22 nt, Human
uaacaaaguauuguuuguguau

SEQ ID NO: 1084349 - RNA, 22 nt, Human
aacaucaggaucuuguuacagu

SEQ ID NO: 1084350 - RNA, 22 nt, Human
uggcucugcaccucaguguacc

SEQ ID NO: 1084351 - RNA, 22 nt, Human
aaagguuugaggugggaagagg

SEQ ID NO: 1084352 - RNA, 22 nt, Human
cacauggaagagauacagugag

SEQ ID NO: 1084353 - RNA, 22 nt, Human
gugcucacugugagacguccug

SEQ ID NO: 1084354 - RNA, 22 nt, Human
cagggagcuggcuggcgugagu

SEQ ID NO: 1084355 - RNA, 22 nt, Human
uuaaacauuuuugaugaucgau

SEQ ID NO: 1084356 - RNA, 22 nt, Human
acacauguauggcacuuacauu

SEQ ID NO: 1084357 - RNA, 22 nt, Human
uuguaacaaagacacuccaaaa

SEQ ID NO: 1084358 - RNA, 23 nt, Human
cauaaaauauuaguaugguagca

SEQ ID NO: 1084359 - RNA, 22 nt, Human
aggcagucagcccugcuagggu

SEQ ID NO: 1084360 - RNA, 22 nt, Human
uaucacauaguguuuaguaaau

SEQ ID NO: 1084361 - RNA, 22 nt, Human
gccugaaguuucaugccucuau

SEQ ID NO: 1084362 - RNA, 22 nt, Human
acugcacuucacccugggugac

SEQ ID NO: 1084363 - RNA, 19 nt, Human
cuggaaggagggacuguuc

SEQ ID NO: 1084364 - RNA, 22 nt, Human
aggaaggacugcagcauuuggu

SEQ ID NO: 1084365 - RNA, 22 nt, Human
ugugaagauuuggcaugcagaa

SEQ ID NO: 1084366 - RNA, 22 nt, Human
uaaggccaauuacauauguuca

SEQ ID NO: 1084367 - RNA, 22 nt, Human
ucagggcaaagggcagaguuug

SEQ ID NO: 1084368 - RNA, 22 nt, Human
cuuucaaaacgcucuguaugca

SEQ ID NO: 1084369 - RNA, 22 nt, Human
ucagggaaacagguuuucccuu

SEQ ID NO: 1084370 - RNA, 22 nt, Human
gaaacacucaauuuaguaauuc

SEQ ID NO: 1084371 - RNA, 22 nt, Human
aguacaaaugcagccagaguag

SEQ ID NO: 1084372 - RNA, 22 nt, Human
gguccugcauugccagcaagcu

SEQ ID NO: 1084373 - RNA, 22 nt, Human
aguuaguagacuuuuccauuua

SEQ ID NO: 1084374 - RNA, 22 nt, Human
cucaugauguagcgaaugagaa

SEQ ID NO: 1084375 - RNA, 22 nt, Human
cccagggguaaggcgcagcgug

SEQ ID NO: 1084376 - RNA, 22 nt, Human
cuccuccagcucucccuggggg

SEQ ID NO: 1084377 - RNA, 22 nt, Human
gucccuggagcugagcagugcu

SEQ ID NO: 1084378 - RNA, 22 nt, Human
uugauacagcagccugugaucc

SEQ ID NO: 1084379 - RNA, 22 nt, Human
guggcucucgccagccugcggg

SEQ ID NO: 1084380 - RNA, 22 nt, Human
uuuguguggauggaaggcagua

SEQ ID NO: 1084381 - RNA, 22 nt, Human
uaaugcaguacugauauaaaca

SEQ ID NO: 1084382 - RNA, 22 nt, Human
cagugggauaugggggcagcau

SEQ ID NO: 1084383 - RNA, 22 nt, Human
ucugcucuccauacuuccgcac

SEQ ID NO: 1084384 - RNA, 22 nt, Human
acacaugcugauaagaauauaa

SEQ ID NO: 1084385 - RNA, 22 nt, Human
acugucaaaagagauuauauua

SEQ ID NO: 1084386 - RNA, 22 nt, Human
acacauauguggcaacuguaga

SEQ ID NO: 1084387 - RNA, 22 nt, Human
auaguacaagggaagagugaag

SEQ ID NO: 1084388 - RNA, 22 nt, Human
agcaggugaugugagucuggaa

SEQ ID NO: 1084389 - RNA, 22 nt, Human
agcagguguuuguaucauaagg

SEQ ID NO: 1084390 - RNA, 18 nt, Human
uggcaggggcaguacgcc

SEQ ID NO: 1084391 - RNA, 22 nt, Human
uucuagaacaggcaaaaccaau

SEQ ID NO: 1084392 - RNA, 22 nt, Human
ucugcagcuugcacaggcaggc

SEQ ID NO: 1084393 - RNA, 22 nt, Human
uuugaaagggacaaagucacug

SEQ ID NO: 1084394 - RNA, 22 nt, Human
cagcuggaggagcagcuuccag

SEQ ID NO: 1084395 - RNA, 22 nt, Human
agcagaaagcuuauuuugacug

SEQ ID NO: 1084396 - RNA, 22 nt, Human
ccugggcuguaccugugcgcgg

SEQ ID NO: 1084397 - RNA, 22 nt, Human
cauaacuugguguuggaaacug

SEQ ID NO: 1084398 - RNA, 22 nt, Human
uuuugaaagaguccugcuacag

SEQ ID NO: 1084399 - RNA, 22 nt, Human
ccagcagacacacaggcguggg

SEQ ID NO: 1084400 - RNA, 22 nt, Human
cucucugggggccaugccaaga

SEQ ID NO: 1084401 - RNA, 22 nt, Human
ugaagaagccaauugguaggcu

SEQ ID NO: 1084402 - RNA, 18 nt, Human
uuucacagauucaugacu

SEQ ID NO: 1084403 - RNA, 22 nt, Human
ugugaaagcaagucuaguucuc

SEQ ID NO: 1084404 - RNA, 22 nt, Human
cacaggagauugaucuauuggu

SEQ ID NO: 1084405 - RNA, 22 nt, Human
guccaggcuaagucccuucugc

SEQ ID NO: 1084406 - RNA, 22 nt, Human
gagccccaggacagcucuaguu

SEQ ID NO: 1084407 - RNA, 22 nt, Human
aaggagcuuguucgccuuccuc

SEQ ID NO: 1084408 - RNA, 22 nt, Human
aaauaguuagcccugcauauau

SEQ ID NO: 1084409 - RNA, 23 nt, Human
ugcuccagccucuuugauagugu

SEQ ID NO: 1084410 - RNA, 22 nt, Human
ugcugcugaucauuuauagucu

SEQ ID NO: 1084411 - RNA, 22 nt, Human
cauuucucauaauauuagcacu

SEQ ID NO: 1084412 - RNA, 22 nt, Human
guaaacaacacaaaucauuuga

SEQ ID NO: 1084413 - RNA, 22 nt, Human
uugcauuucccauugaguaaug

SEQ ID NO: 1084414 - RNA, 22 nt, Human
agagccugugauugucaucacc

SEQ ID NO: 1084415 - RNA, 22 nt, Human
agagucugaaugcucagaguug

SEQ ID NO: 1084416 - RNA, 22 nt, Human
uucaaaacagcuagauauugga

SEQ ID NO: 1084417 - RNA, 17 nt, Human
ggccuugggcugcucuu

SEQ ID NO: 1084418 - RNA, 22 nt, Human
cuugucugugucggauaaaacu

SEQ ID NO: 1084419 - RNA, 22 nt, Human
ugucuacagaauguuaauauuu

SEQ ID NO: 1084420 - RNA, 18 nt, Human
ucacaucaucccaugcuu

SEQ ID NO: 1084421 - RNA, 23 nt, Human
caucagugagggggaaucacuaa

SEQ ID NO: 1084422 - RNA, 22 nt, Human
uuugaaauuggcucauugguuu

SEQ ID NO: 1084423 - RNA, 22 nt, Human
uguauacaagucguguaaacuu

SEQ ID NO: 1084424 - RNA, 23 nt, Human
aaaugcagggucgcagguuacag

SEQ ID NO: 1084425 - RNA, 22 nt, Human
aauuuauauguaauuaggcaca

SEQ ID NO: 1084426 - RNA, 19 nt, Human
ugcauacauguuaacaugu

SEQ ID NO: 1084427 - RNA, 22 nt, Human
ucugccucgcuaacagcagcca

SEQ ID NO: 1084428 - RNA, 22 nt, Human
uccaggaaagcacugggcuggg

SEQ ID NO: 1084429 - RNA, 22 nt, Human
ucaggaacagcagggaggaaag

SEQ ID NO: 1084430 - RNA, 22 nt, Human
aucaggauucaguaucuccagc

SEQ ID NO: 1084431 - RNA, 18 nt, Human
ucugggcuucccgaggcu

SEQ ID NO: 1084432 - RNA, 22 nt, Human
cccaggaauuggaggcugcagu

SEQ ID NO: 1084433 - RNA, 22 nt, Human
uauguuauuuucauacaacaga

SEQ ID NO: 1084434 - RNA, 22 nt, Human
uauuuaaaauaagccccagugg

SEQ ID NO: 1084435 - RNA, 22 nt, Human
agaacuuacauuauagagcugu

SEQ ID NO: 1084436 - RNA, 22 nt, Human
uggcucugccacuaacuuggua

SEQ ID NO: 1084437 - RNA, 22 nt, Human
aaagguuuauugcuaugguugu

SEQ ID NO: 1084438 - RNA, 22 nt, Human
uuuccucuucgauuaaguuugg

SEQ ID NO: 1084439 - RNA, 22 nt, Human
ucugccugaggacugacaccag

SEQ ID NO: 1084440 - RNA, 22 nt, Human
ucucagaggcccgacguucucc

SEQ ID NO: 1084441 - RNA, 22 nt, Human
cuguggagcuuguggcaguggg

SEQ ID NO: 1084442 - RNA, 22 nt, Human
aagggcugccagggggugccag

SEQ ID NO: 1084443 - RNA, 21 nt, Human
ucucacaauaugaugccagau

SEQ ID NO: 1084444 - RNA, 22 nt, Human
ugcuuuaacauaagauaucuuu

SEQ ID NO: 1084445 - RNA, 22 nt, Human
augcaguagauaggcacuuuua

SEQ ID NO: 1084446 - RNA, 22 nt, Human
gccccagguugccugucccagg

SEQ ID NO: 1084447 - RNA, 22 nt, Human
uggcuggcuagugggcaggauu

SEQ ID NO: 1084448 - RNA, 22 nt, Human
ucagggcauguauguuucuuua

SEQ ID NO: 1084449 - RNA, 22 nt, Human
agaauuagguaaguucaucuga

SEQ ID NO: 1084450 - RNA, 22 nt, Human
ucagagucuuggcaauagguua

SEQ ID NO: 1084451 - RNA, 22 nt, Human
ggccaggcugcugggaccccgc

SEQ ID NO: 1084452 - RNA, 22 nt, Human
augguggaagagcaucagaaag

SEQ ID NO: 1084453 - RNA, 22 nt, Human
uggcuaggaccucugcggagca

SEQ ID NO: 1084454 - RNA, 22 nt, Human
auuucaugugaagaagagauaa

SEQ ID NO: 1084455 - RNA, 22 nt, Human
gcauccaaauguuucauuucuu

SEQ ID NO: 1084456 - RNA, 22 nt, Human
uggaugcuguaggacacgcucu

SEQ ID NO: 1084457 - RNA, 22 nt, Human
gacacagaaugggugcucagua

SEQ ID NO: 1084458 - RNA, 22 nt, Human
caaagauaugacauggaaaaug

SEQ ID NO: 1084459 - RNA, 22 nt, Human
ccaguggaguuuuuauacccag

SEQ ID NO: 1084460 - RNA, 22 nt, Human
uuauagaauguuuccaaugccu

SEQ ID NO: 1084461 - RNA, 22 nt, Human
uagccucuggaauccuuucucu

SEQ ID NO: 1084462 - RNA, 22 nt, Human
ugucacauauauaauguucaau

SEQ ID NO: 1084463 - RNA, 22 nt, Human
ugcaaacauccgacugaaagcc

SEQ ID NO: 1084464 - RNA, 22 nt, Human
ucuggaguccagauccauuugg

SEQ ID NO: 1084465 - RNA, 22 nt, Human
cuggcucuaucuccaaggcugg

SEQ ID NO: 1084466 - RNA, 22 nt, Human
gaauuaguguugaaaucagggc

SEQ ID NO: 1084467 - RNA, 22 nt, Human
cacacacaguuuuguauucugu

SEQ ID NO: 1084468 - RNA, 22 nt, Human
acagagcuguacaugugccaug

SEQ ID NO: 1084469 - RNA, 22 nt, Human
gauuucaaccuaacaguaugac

SEQ ID NO: 1084470 - RNA, 17 nt, Human
gcugagugcagggaguc

SEQ ID NO: 1084471 - RNA, 20 nt, Human
ggccuuggguuucgccuguu

SEQ ID NO: 1084472 - RNA, 22 nt, Human
ucccaagaccuggcauccaagu

SEQ ID NO: 1084473 - RNA, 22 nt, Human
cugggagcuggaugcccugccc

SEQ ID NO: 1084474 - RNA, 19 nt, Human
accuuacagaaacaggcau

SEQ ID NO: 1084475 - RNA, 22 nt, Human
uggcaggcaaguucagcuccac

SEQ ID NO: 1084476 - RNA, 22 nt, Human
uuccucuuugcauccucaacuc

SEQ ID NO: 1084477 - RNA, 22 nt, Human
uuuauacauggagaauuuuugc

SEQ ID NO: 1084478 - RNA, 22 nt, Human
uaauccaggguauucuaguuuc

SEQ ID NO: 1084479 - RNA, 22 nt, Human
uggcccugaggggcugugcccc

SEQ ID NO: 1084480 - RNA, 21 nt, Human
ggcacugagccagauggacuc

SEQ ID NO: 1084481 - RNA, 22 nt, Human
ucuugccucuuccccuuuccau

SEQ ID NO: 1084482 - RNA, 22 nt, Human
ucugcccugccauucacuggaa

SEQ ID NO: 1084483 - RNA, 22 nt, Human
uaauagaauaguggaaacauug

SEQ ID NO: 1084484 - RNA, 22 nt, Human
guggauggacaugggcaagagg

SEQ ID NO: 1084485 - RNA, 22 nt, Human
gaggaaggcuaaggggcuuaga

SEQ ID NO: 1084486 - RNA, 20 nt, Human
acucuaccagggcagcagca

SEQ ID NO: 1084487 - RNA, 22 nt, Human
gaaggcugcgaggggagugccg

SEQ ID NO: 1084488 - RNA, 23 nt, Human
ucacaggggccagcgcucugugg

SEQ ID NO: 1084489 - RNA, 22 nt, Human
aagggcagaaagggacgcuuug

SEQ ID NO: 1084490 - RNA, 22 nt, Human
ucuggccauggcaagccgagug

SEQ ID NO: 1084491 - RNA, 22 nt, Human
augcugaugcugcuuuugcccu

SEQ ID NO: 1084492 - RNA, 22 nt, Human
ugccucugcugcuguggcauca

SEQ ID NO: 1084493 - RNA, 22 nt, Human
guuucucuguaccucuguccca

SEQ ID NO: 1084494 - RNA, 22 nt, Human
cugaauuaagcauuacauacau

SEQ ID NO: 1084495 - RNA, 22 nt, Human
ugaggcagcaauuguauuguau

SEQ ID NO: 1084496 - RNA, 22 nt, Human
ugaggcagaguaagauacauga

SEQ ID NO: 1084497 - RNA, 22 nt, Human
acucuucaguacaauaauaucu

SEQ ID NO: 1084498 - RNA, 20 nt, Human
cccaggagugagcagcuuua

SEQ ID NO: 1084499 - RNA, 22 nt, Human
ccagucccagcucugccaugcu

SEQ ID NO: 1084500 - RNA, 20 nt, Human
uucuauacauaucacugaaa

SEQ ID NO: 1084501 - RNA, 22 nt, Human
acaaugcaccuauuuuaaaacu

SEQ ID NO: 1084502 - RNA, 22 nt, Human
ucuaaagcuccuuccacuaaaa

SEQ ID NO: 1084503 - RNA, 22 nt, Human
gaggccagcgcgcagcacuuuu

SEQ ID NO: 1084504 - RNA, 23 nt, Human
auuugaaacuuucuuguuuccag

SEQ ID NO: 1084505 - RNA, 22 nt, Human
aaagucauuuagccuuaucucc

SEQ ID NO: 1084506 - RNA, 22 nt, Human
uuugcugaauagauuguaaacu

SEQ ID NO: 1084507 - RNA, 22 nt, Human
cuguggcugcguaggucuggca

SEQ ID NO: 1084508 - RNA, 22 nt, Human
agcagggaggcccagggcacug

SEQ ID NO: 1084509 - RNA, 22 nt, Human
cuuugcaagggauuucaugucu

SEQ ID NO: 1084510 - RNA, 22 nt, Human
gugugagagacugaagaaagcc

SEQ ID NO: 1084511 - RNA, 22 nt, Human
gcagcuggauuucaagagggag

SEQ ID NO: 1084512 - RNA, 22 nt, Human
aagcagcauucagugaaaugug

SEQ ID NO: 1084513 - RNA, 22 nt, Human
acuguggcgucaggaagaaauu

SEQ ID NO: 1084514 - RNA, 22 nt, Human
caggcucuuuugguggcaagga

SEQ ID NO: 1084515 - RNA, 23 nt, Human
uagcagcauuuuuagccucuguc

SEQ ID NO: 1084516 - RNA, 22 nt, Human
uuuccaauguagaugucucugg

SEQ ID NO: 1084517 - RNA, 22 nt, Human
ugcugcugauggcaccuaggca

SEQ ID NO: 1084518 - RNA, 22 nt, Human
gauauuuucagucuccuuucaa

SEQ ID NO: 1084519 - RNA, 22 nt, Human
ugucucagaggcaggaagagcc

SEQ ID NO: 1084520 - RNA, 22 nt, Human
guggcucuaggugagcauggag

SEQ ID NO: 1084521 - RNA, 22 nt, Human
cuggcccucggaguccagcugc

SEQ ID NO: 1084522 - RNA, 22 nt, Human
gccugggagggcagcagugugg

SEQ ID NO: 1084523 - RNA, 22 nt, Human
gcagagccugacgggauuuuuc

SEQ ID NO: 1084524 - RNA, 22 nt, Human
ugggcuucuggaguggggcaga

SEQ ID NO: 1084525 - RNA, 22 nt, Human
aagcagcaugcuaugcuggugg

SEQ ID NO: 1084526 - RNA, 22 nt, Human
gguggggccagggcuccaaccu

SEQ ID NO: 1084527 - RNA, 22 nt, Human
aaaggaagaugccaggacucug

SEQ ID NO: 1084528 - RNA, 22 nt, Human
gcuguccagagcaugggagcaa

SEQ ID NO: 1084529 - RNA, 22 nt, Human
ucagagucuuaacuauucagag

SEQ ID NO: 1084530 - RNA, 22 nt, Human
guuauacaguuuugggucugcu

SEQ ID NO: 1084531 - RNA, 22 nt, Human
uuuacaaggcagaacugauuaa

SEQ ID NO: 1084532 - RNA, 22 nt, Human
agaauauaugacugcaagacua

SEQ ID NO: 1084533 - RNA, 22 nt, Human
gggcuggaucuccugcaggcag

SEQ ID NO: 1084534 - RNA, 22 nt, Human
cacugccugugagcugugugcc

SEQ ID NO: 1084535 - RNA, 22 nt, Human
gaggcacaauacaugucucaag

SEQ ID NO: 1084536 - RNA, 22 nt, Human
auggaagacagauaaggcagaa

SEQ ID NO: 1084537 - RNA, 16 nt, Human
gcagguggggcgcgca

SEQ ID NO: 1084538 - RNA, 19 nt, Human
uggcuaauuuuauagaggc

SEQ ID NO: 1084539 - RNA, 20 nt, Human
gccagcacagggagcaguuc

SEQ ID NO: 1084540 - RNA, 22 nt, Human
ugcauguuuuauaccaaagcuu

SEQ ID NO: 1084541 - RNA, 22 nt, Human
acugccuguagcccugagaugu

SEQ ID NO: 1084542 - RNA, 21 nt, Human
ugcaggcuguuuaagaggcaa

SEQ ID NO: 1084543 - RNA, 22 nt, Human
aaucucaugagcuucuuguccc

SEQ ID NO: 1084544 - RNA, 22 nt, Human
cagagugaaauaggggaucaag

SEQ ID NO: 1084545 - RNA, 19 nt, Human
ccagcccugucacuucuug

SEQ ID NO: 1084546 - RNA, 18 nt, Human
ugcugggcauuaggcuua

SEQ ID NO: 1084547 - RNA, 22 nt, Human
ccacuggcauccagcugccauc

SEQ ID NO: 1084548 - RNA, 22 nt, Human
uauauuguagcugaugacaaau

SEQ ID NO: 1084549 - RNA, 18 nt, Human
gggcagcacagcagccuc

SEQ ID NO: 1084550 - RNA, 22 nt, Human
uuugaagacuacugggagugaa

SEQ ID NO: 1084551 - RNA, 22 nt, Human
ugaugggaaaaugaggccuggg

SEQ ID NO: 1084552 - RNA, 22 nt, Human
ccagggaagcuggucacgcagg

SEQ ID NO: 1084553 - RNA, 23 nt, Human
cugaaauucagaugcuaaagaua

SEQ ID NO: 1084554 - RNA, 22 nt, Human
ggaagcacagcauaaaguuacu

SEQ ID NO: 1084555 - RNA, 22 nt, Human
ugccugagugauguggcagcca

SEQ ID NO: 1084556 - RNA, 22 nt, Human
cuggccuucagacucggacuga

SEQ ID NO: 1084557 - RNA, 22 nt, Human
cagucacuggaauagcugagga

SEQ ID NO: 1084558 - RNA, 22 nt, Human
ucuucaugaccucuguguuuua

SEQ ID NO: 1084559 - RNA, 22 nt, Human
ucuaaacauuaugauaguagag

SEQ ID NO: 1084560 - RNA, 22 nt, Human
aauacugccugugagguaacuc

SEQ ID NO: 1084561 - RNA, 22 nt, Human
aauaaggugugggugcuaauau

SEQ ID NO: 1084562 - RNA, 21 nt, Human
aggucccagguuugggcagca

SEQ ID NO: 1084563 - RNA, 22 nt, Human
guuuuccauggaggucugaccu

SEQ ID NO: 1084564 - RNA, 22 nt, Human
ugcuucaggagaugucaccaug

SEQ ID NO: 1084565 - RNA, 22 nt, Human
ucaaaguagaguucagugcagc

SEQ ID NO: 1084566 - RNA, 20 nt, Human
aaacuugauggcauagaaua

SEQ ID NO: 1084567 - RNA, 20 nt, Human
gccugcagagaaggucagag

SEQ ID NO: 1084568 - RNA, 22 nt, Human
agccuucacugggaccuuggau

SEQ ID NO: 1084569 - RNA, 22 nt, Human
cuaauuauguuguuauaaucaa

SEQ ID NO: 1084570 - RNA, 22 nt, Human
aagcaaaggaaagcugacuuuu

SEQ ID NO: 1084571 - RNA, 23 nt, Human
gagugcagaauagacaugcagug

SEQ ID NO: 1084572 - RNA, 23 nt, Human
aauuaccaugcaacuugugaaac

SEQ ID NO: 1084573 - RNA, 22 nt, Human
ggaagauuucccguagcugugc

SEQ ID NO: 1084574 - RNA, 22 nt, Human
gaauccaucaugcagaacaaug

SEQ ID NO: 1084575 - RNA, 22 nt, Human
aagagccauauaugcagcuaga

SEQ ID NO: 1084576 - RNA, 22 nt, Human
ugagaauuacaaaugagucaca

SEQ ID NO: 1084577 - RNA, 22 nt, Human
aaaggcaggcuuucacaucuca

SEQ ID NO: 1084578 - RNA, 22 nt, Human
acagaacaagaccugcuuauug

SEQ ID NO: 1084579 - RNA, 22 nt, Human
uccugccucuccaugcuaacua

SEQ ID NO: 1084580 - RNA, 22 nt, Human
ucagugcagaauagugaugcau

SEQ ID NO: 1084581 - RNA, 22 nt, Human
ucuuauaaucucuauuuuaaug

SEQ ID NO: 1084582 - RNA, 23 nt, Human
cucccuggcccuugggagaccug

SEQ ID NO: 1084583 - RNA, 20 nt, Human
ucauuucuugggguuccaag

SEQ ID NO: 1084584 - RNA, 22 nt, Human
cugguggagggacaggcuuagc

SEQ ID NO: 1084585 - RNA, 22 nt, Human
acaugggaucaaugaggcaggc

SEQ ID NO: 1084586 - RNA, 22 nt, Human
ucuuuuaaaagcccugcugucu

SEQ ID NO: 1084587 - RNA, 22 nt, Human
acaaggcugugggagaaccucu

SEQ ID NO: 1084588 - RNA, 22 nt, Human
aaauuauuauaggcagagcuga

SEQ ID NO: 1084589 - RNA, 22 nt, Human
ggcaggugaccuggccucccag

SEQ ID NO: 1084590 - RNA, 22 nt, Human
uggcucagucuggguugacuga

SEQ ID NO: 1084591 - RNA, 22 nt, Human
gcaugcugcaccagagccucuc

SEQ ID NO: 1084592 - RNA, 22 nt, Human
cugauacaaugcuaauaaauuu

SEQ ID NO: 1084593 - RNA, 22 nt, Human
uagcagagcugcaauauagacc

SEQ ID NO: 1084594 - RNA, 22 nt, Human
ucacauuuuaucugagauugac

SEQ ID NO: 1084595 - RNA, 23 nt, Human
auguuuuaugucucuagcugcca

SEQ ID NO: 1084596 - RNA, 22 nt, Human
acagcagcauccuauuucacuc

SEQ ID NO: 1084597 - RNA, 22 nt, Human
cagucaacagagagcccgucag

SEQ ID NO: 1084598 - RNA, 22 nt, Human
gucccagggagguucagggcuu

SEQ ID NO: 1084599 - RNA, 22 nt, Human
aaaaugaauaaguuaacccagg

SEQ ID NO: 1084600 - RNA, 22 nt, Human
gcccacaccauuuauucuuugu

SEQ ID NO: 1084601 - RNA, 22 nt, Human
ccugacuagcugggacuacaga

SEQ ID NO: 1084602 - RNA, 22 nt, Human
ggacuggguaggagcccagggc

SEQ ID NO: 1084603 - RNA, 22 nt, Human
cacagcagccagaacauuuuug

SEQ ID NO: 1084604 - RNA, 22 nt, Human
cccaguggaaggaguagaagac

SEQ ID NO: 1084605 - RNA, 22 nt, Human
uaucacacauaacuaagcugca

SEQ ID NO: 1084606 - RNA, 21 nt, Human
uccaaaaaggagcguccuucu

SEQ ID NO: 1084607 - RNA, 22 nt, Human
gugaagagcuguugcagagauu

SEQ ID NO: 1084608 - RNA, 22 nt, Human
gcagagccuugcgucaugugcc

SEQ ID NO: 1084609 - RNA, 22 nt, Human
aaugaagcaguccaucugcucu

SEQ ID NO: 1084610 - RNA, 22 nt, Human
acagauauccucagucuccaac

SEQ ID NO: 1084611 - RNA, 22 nt, Human
cccuggagcugcuugcauguug

SEQ ID NO: 1084612 - RNA, 22 nt, Human
cagccucuguggcugccacacc

SEQ ID NO: 1084613 - RNA, 22 nt, Human
aaagcagcagcacguggaagag

SEQ ID NO: 1084614 - RNA, 22 nt, Human
cuuuaguuugugauacgaagau

SEQ ID NO: 1084615 - RNA, 22 nt, Human
ucaaaguauuuuaacuguaucc

SEQ ID NO: 1084616 - RNA, 22 nt, Human
cuaagcacaaugcuuugaguau

SEQ ID NO: 1084617 - RNA, 22 nt, Human
uuuacagucucuauagucaaaa

SEQ ID NO: 1084618 - RNA, 22 nt, Human
auacauguucguguacauguuc

SEQ ID NO: 1084619 - RNA, 22 nt, Human
aaggcugagggcuguaccuggc

SEQ ID NO: 1084620 - RNA, 19 nt, Human
cugccuguuauggagagaa

SEQ ID NO: 1084621 - RNA, 22 nt, Human
cagggacauugguggccagguu

SEQ ID NO: 1084622 - RNA, 22 nt, Human
gauuauauaauggaagcucuug

SEQ ID NO: 1084623 - RNA, 22 nt, Human
aucagcaagacuaggggaauac

SEQ ID NO: 1084624 - RNA, 22 nt, Human
gaacuacaggugcagcaaguga

SEQ ID NO: 1084625 - RNA, 19 nt, Human
auuuccaagaauuggagag

SEQ ID NO: 1084626 - RNA, 22 nt, Human
cuguccagcugaccagagcagc

SEQ ID NO: 1084627 - RNA, 18 nt, Human
cuucagugacagucuggc

SEQ ID NO: 1084628 - RNA, 22 nt, Human
aacagucugggaguuccuuaua

SEQ ID NO: 1084629 - RNA, 22 nt, Human
gauaauaagcacagcaggaugu

SEQ ID NO: 1084630 - RNA, 20 nt, Human
aaaagcagccagagauggua

SEQ ID NO: 1084631 - RNA, 20 nt, Human
gacaacacagcuucaggucc

SEQ ID NO: 1084632 - RNA, 22 nt, Human
agaacuauacauuacucauuga

SEQ ID NO: 1084633 - RNA, 22 nt, Human
agaggaaguaaucaggaccugc

SEQ ID NO: 1084634 - RNA, 23 nt, Human
aaaugacauaugguuucugaagg

SEQ ID NO: 1084635 - RNA, 22 nt, Human
ccucacuggccagccaggggug

SEQ ID NO: 1084636 - RNA, 22 nt, Human
ucucugggaaugggccugggua

SEQ ID NO: 1084637 - RNA, 22 nt, Human
acaguuuacagggauuugagcu

SEQ ID NO: 1084638 - RNA, 22 nt, Human
guuucaaagcacagcucacauu

SEQ ID NO: 1084639 - RNA, 19 nt, Human
aggcagcaggccagggaug

SEQ ID NO: 1084640 - RNA, 22 nt, Human
acauucugugagucauguuuua

SEQ ID NO: 1084641 - RNA, 22 nt, Human
guagaaaauuaggaugaggcuu

SEQ ID NO: 1084642 - RNA, 22 nt, Human
uuuauuggauauuuacaagaua

SEQ ID NO: 1084643 - RNA, 17 nt, Human
ugaaggaaggaugaugu

SEQ ID NO: 1084644 - RNA, 22 nt, Human
cuuucucuguguuucacaugcu

SEQ ID NO: 1084645 - RNA, 17 nt, Human
gcaguggagggguaguu

SEQ ID NO: 1084646 - RNA, 22 nt, Human
gccaggcauucuagaaguagug

SEQ ID NO: 1084647 - RNA, 22 nt, Human
caccagggcucugagcucugaa

SEQ ID NO: 1084648 - RNA, 22 nt, Human
uccagcagaccaucaaggcuca

SEQ ID NO: 1084649 - RNA, 22 nt, Human
aaugcaaugcagcaccuccuug

SEQ ID NO: 1084650 - RNA, 22 nt, Human
uggguaaacugggucuggagag

SEQ ID NO: 1084651 - RNA, 22 nt, Human
auauuaaauggauuuugggagc

SEQ ID NO: 1084652 - RNA, 22 nt, Human
agacaggagagggaacugccgg

SEQ ID NO: 1084653 - RNA, 22 nt, Human
gcaggggcuaaggacacagaga

SEQ ID NO: 1084654 - RNA, 22 nt, Human
ggcugccugccuccaagccggg

SEQ ID NO: 1084655 - RNA, 22 nt, Human
aucaagcuacuugucuucguuu

SEQ ID NO: 1084656 - RNA, 22 nt, Human
cuucaaaugugauuuuaauaac

SEQ ID NO: 1084657 - RNA, 22 nt, Human
gacauguaaauggcaauuaugg

SEQ ID NO: 1084658 - RNA, 22 nt, Human
cugggagcaagaggcugcaaau

SEQ ID NO: 1084659 - RNA, 22 nt, Human
ugcccagcagggagcuaccugg

SEQ ID NO: 1084660 - RNA, 22 nt, Human
aggccagggucccacacucgca

SEQ ID NO: 1084661 - RNA, 22 nt, Human
gcugcagcaagcccuccagggg

SEQ ID NO: 1084662 - RNA, 22 nt, Human
gcugaguguaaugauggcagag

SEQ ID NO: 1084663 - RNA, 22 nt, Human
uugugcagagaaaucuuucuug

SEQ ID NO: 1084664 - RNA, 22 nt, Human
caggccucaggggcucaggcug

SEQ ID NO: 1084665 - RNA, 22 nt, Human
cuacaaagaaaguauacuggac

SEQ ID NO: 1084666 - RNA, 22 nt, Human
acuaaacugaagcaugaaaagg

SEQ ID NO: 1084667 - RNA, 19 nt, Human
cuggggcuuugguacugcc

SEQ ID NO: 1084668 - RNA, 22 nt, Human
ucagacagugugaucagucucu

SEQ ID NO: 1084669 - RNA, 22 nt, Human
cugccugugauuuuucucuagu

SEQ ID NO: 1084670 - RNA, 22 nt, Human
gagaaagauggaaucuuacagg

SEQ ID NO: 1084671 - RNA, 22 nt, Human
aucccucagccaccuuugagga

SEQ ID NO: 1084672 - RNA, 22 nt, Human
uugcauugggagugaggagacc

SEQ ID NO: 1084673 - RNA, 23 nt, Human
cccagagucaucuguagcugugg

SEQ ID NO: 1084674 - RNA, 22 nt, Human
gaagccccaaacccucgccauc

SEQ ID NO: 1084675 - RNA, 22 nt, Human
ucacuuauaaaaugcaagaucu

SEQ ID NO: 1084676 - RNA, 22 nt, Human
cauugcuuccuaugucccuucu

SEQ ID NO: 1084677 - RNA, 22 nt, Human
gaaggcugaugacagauucugc

SEQ ID NO: 1084678 - RNA, 22 nt, Human
ggcccuguuagagcucccacaa

SEQ ID NO: 1084679 - RNA, 22 nt, Human
uccaaguuucuucugcacaaca

SEQ ID NO: 1084680 - RNA, 22 nt, Human
ugcucacugaacucuugcuguc

SEQ ID NO: 1084681 - RNA, 17 nt, Human
uuauuuuuugggcugag

SEQ ID NO: 1084682 - RNA, 22 nt, Human
agguggggcugggaaagauucc

SEQ ID NO: 1084683 - RNA, 22 nt, Human
aucaggaucacagaaacuuuua

SEQ ID NO: 1084684 - RNA, 22 nt, Human
augugcauaaacauauuguugg

SEQ ID NO: 1084685 - RNA, 22 nt, Human
gagacacaaucucauuuacauu

SEQ ID NO: 1084686 - RNA, 22 nt, Human
ucccugcugggagaugaccuua

SEQ ID NO: 1084687 - RNA, 22 nt, Human
cugcuuugauuagaagaguaca

SEQ ID NO: 1084688 - RNA, 22 nt, Human
ccuuaccugauugcuggcaucc

SEQ ID NO: 1084689 - RNA, 22 nt, Human
uaguuuuacaucagccauuguu

SEQ ID NO: 1084690 - RNA, 22 nt, Human
ugggcagaaaucaguaucagau

SEQ ID NO: 1084691 - RNA, 22 nt, Human
cagcuguggagauggggugcau

SEQ ID NO: 1084692 - RNA, 22 nt, Human
aagugaagaaauacaugagaau

SEQ ID NO: 1084693 - RNA, 22 nt, Human
aggcaagaacagacaugggagu

SEQ ID NO: 1084694 - RNA, 23 nt, Human
gacagagugagaccuugucuuac

SEQ ID NO: 1084695 - RNA, 22 nt, Human
agcccaugguguacucuguggc

SEQ ID NO: 1084696 - RNA, 22 nt, Human
aaggugggcagaucacaagguc

SEQ ID NO: 1084697 - RNA, 22 nt, Human
uccaggagguuuggaggaagca

SEQ ID NO: 1084698 - RNA, 22 nt, Human
aaagguuuuauucugagcucug

SEQ ID NO: 1084699 - RNA, 22 nt, Human
acauuugauaauuauaaagaca

SEQ ID NO: 1084700 - RNA, 22 nt, Human
augaggcaaggaucagguaagg

SEQ ID NO: 1084701 - RNA, 23 nt, Human
aaagugcaguugaggaaucauag

SEQ ID NO: 1084702 - RNA, 22 nt, Human
uaaacuaucuguguuugaaguu

SEQ ID NO: 1084703 - RNA, 22 nt, Human
cugccugacugauaaucucuga

SEQ ID NO: 1084704 - RNA, 22 nt, Human
ucuggcucuauaacuccuagcu

SEQ ID NO: 1084705 - RNA, 22 nt, Human
aggagccaccuaggagcuguuu

SEQ ID NO: 1084706 - RNA, 22 nt, Human
uaaauguauaggcacuaaaccu

SEQ ID NO: 1084707 - RNA, 19 nt, Human
ugcugcuguccuugcaggg

SEQ ID NO: 1084708 - RNA, 23 nt, Human
acacauuuuucccguucugaggu

SEQ ID NO: 1084709 - RNA, 22 nt, Human
caauguacuacaaagauuguca

SEQ ID NO: 1084710 - RNA, 19 nt, Human
gcugccugucuuagccagu

SEQ ID NO: 1084711 - RNA, 22 nt, Human
gcacagaaaugucuacacaugu

SEQ ID NO: 1084712 - RNA, 22 nt, Human
uuuaugagccucaaaucugagu

SEQ ID NO: 1084713 - RNA, 22 nt, Human
aucugcuuuugagaauuuacuu

SEQ ID NO: 1084714 - RNA, 22 nt, Human
uagugucugaaugcaccuguuu

SEQ ID NO: 1084715 - RNA, 22 nt, Human
uguaaggaggaaaauuaguggu

SEQ ID NO: 1084716 - RNA, 22 nt, Human
uuuaaugugagucccuuucaag

SEQ ID NO: 1084717 - RNA, 22 nt, Human
ucuucaaugcauucucuuguuu

SEQ ID NO: 1084718 - RNA, 22 nt, Human
caagaugaaacuacagggagga

SEQ ID NO: 1084719 - RNA, 23 nt, Human
gcaguuaguccacuuugcagaga

SEQ ID NO: 1084720 - RNA, 20 nt, Human
cugcaucaugguuaagaaca

SEQ ID NO: 1084721 - RNA, 22 nt, Human
cagcugccccgcuggcugacca

SEQ ID NO: 1084722 - RNA, 22 nt, Human
gaagagcugcaguuuccugggc

SEQ ID NO: 1084723 - RNA, 22 nt, Human
ucacauuuauacuccauuugca

SEQ ID NO: 1084724 - RNA, 22 nt, Human
gagccucguggcggccacugcg

SEQ ID NO: 1084725 - RNA, 22 nt, Human
aaccaggacaauuugaauagaa

SEQ ID NO: 1084726 - RNA, 22 nt, Human
guacaaguugccuaccuuaagu

SEQ ID NO: 1084727 - RNA, 22 nt, Human
gaagcagcaaguauaggacagg

SEQ ID NO: 1084728 - RNA, 22 nt, Human
aggcugaggcagguggaucacc

SEQ ID NO: 1084729 - RNA, 22 nt, Human
cucuguccuccaccugcuuuca

SEQ ID NO: 1084730 - RNA, 22 nt, Human
uccuggcccggccgggccugcu

SEQ ID NO: 1084731 - RNA, 22 nt, Human
uugcccuguggggccuccagcc

SEQ ID NO: 1084732 - RNA, 22 nt, Human
agaccauagggaccucagguug

SEQ ID NO: 1084733 - RNA, 22 nt, Human
ggaggaagggcccaggcuuuau

SEQ ID NO: 1084734 - RNA, 22 nt, Human
cagcugagaccagaaugcaggu

SEQ ID NO: 1084735 - RNA, 22 nt, Human
aacuuuuagacuuggguauaaa

SEQ ID NO: 1084736 - RNA, 17 nt, Human
ugcugccaagucccaac

SEQ ID NO: 1084737 - RNA, 22 nt, Human
ccuagagcucugcuuuaucuaa

SEQ ID NO: 1084738 - RNA, 22 nt, Human
gcacacacaugugaguacaugc

SEQ ID NO: 1084739 - RNA, 20 nt, Human
ucagggcaugggacagcccc

SEQ ID NO: 1084740 - RNA, 22 nt, Human
cagagcugcuucccaguuugug

SEQ ID NO: 1084741 - RNA, 22 nt, Human
uggcccgaccucugcucaugca

SEQ ID NO: 1084742 - RNA, 19 nt, Human
agggagaauuccaagagga

SEQ ID NO: 1084743 - RNA, 22 nt, Human
auuuccuguaccuaucaaggca

SEQ ID NO: 1084744 - RNA, 22 nt, Human
cucuugaagcaggggccaguuc

SEQ ID NO: 1084745 - RNA, 22 nt, Human
ucuuuccuaggugauaugcaau

SEQ ID NO: 1084746 - RNA, 22 nt, Human
gagggucccugcucagggccag

SEQ ID NO: 1084747 - RNA, 22 nt, Human
uucugaaaauugggucauacuu

SEQ ID NO: 1084748 - RNA, 22 nt, Human
ggugaggcagguggcugcugag

SEQ ID NO: 1084749 - RNA, 23 nt, Human
cguuuuuuccucagauguucugg

SEQ ID NO: 1084750 - RNA, 22 nt, Human
uagucuuuuuaauaaauaaugc

SEQ ID NO: 1084751 - RNA, 22 nt, Human
uguggggcugucaggcaacugg

SEQ ID NO: 1084752 - RNA, 22 nt, Human
uuccaaaggaauggggagcuau

SEQ ID NO: 1084753 - RNA, 22 nt, Human
gucccauuuucuacuauggaau

SEQ ID NO: 1084754 - RNA, 22 nt, Human
acacauuuauuacaugcaugug

SEQ ID NO: 1084755 - RNA, 22 nt, Human
cugagaggggaccaggguguuu

SEQ ID NO: 1084756 - RNA, 22 nt, Human
cuuaauaauaggugaggcuaug

SEQ ID NO: 1084757 - RNA, 22 nt, Human
cuucaguguugguucauuacga

SEQ ID NO: 1084758 - RNA, 22 nt, Human
cagcagaacaguuaaagaaacc

SEQ ID NO: 1084759 - RNA, 22 nt, Human
cuugaaagauuuggccucugug

SEQ ID NO: 1084760 - RNA, 22 nt, Human
uacuuucuguccuucuguuaaa

SEQ ID NO: 1084761 - RNA, 22 nt, Human
acacuuuaugucuagaucuggg

SEQ ID NO: 1084762 - RNA, 22 nt, Human
uuacagagcucauuucuaaggg

SEQ ID NO: 1084763 - RNA, 22 nt, Human
aaugagcugcugcuguuccacc

SEQ ID NO: 1084764 - RNA, 19 nt, Human
acugggaaaaaggcacugg

SEQ ID NO: 1084765 - RNA, 22 nt, Human
gcccuccuuugcuucuccuagu

SEQ ID NO: 1084766 - RNA, 21 nt, Human
agcagguguaaaggaggaaau

SEQ ID NO: 1084767 - RNA, 22 nt, Human
cuggccagguuuugaacaguug

SEQ ID NO: 1084768 - RNA, 23 nt, Human
uuuaacuuuccaauaauucauug

SEQ ID NO: 1084769 - RNA, 22 nt, Human
acaagagucugcauuucuaaca

SEQ ID NO: 1084770 - RNA, 22 nt, Human
acagaguccuagcugcaaagaa

SEQ ID NO: 1084771 - RNA, 21 nt, Human
aggcacuuaaccaauguuagc

SEQ ID NO: 1084772 - RNA, 23 nt, Human
aggaaggagguccuaacaguauc

SEQ ID NO: 1084773 - RNA, 22 nt, Human
uaauuucaauagcuugcauaau

SEQ ID NO: 1084774 - RNA, 22 nt, Human
gagccagcugagcugcacuguc

SEQ ID NO: 1084775 - RNA, 22 nt, Human
aaucuggcauguaagcuuagag

SEQ ID NO: 1084776 - RNA, 22 nt, Human
auguauuugaaauuugagacau

SEQ ID NO: 1084777 - RNA, 20 nt, Human
agaaaucagcauguccucug

SEQ ID NO: 1084778 - RNA, 17 nt, Human
ugcccugugccuggugu

SEQ ID NO: 1084779 - RNA, 22 nt, Human
gccaggaaggcugaagccagaa

SEQ ID NO: 1084780 - RNA, 22 nt, Human
gcucugagacaguagagauggc

SEQ ID NO: 1084781 - RNA, 22 nt, Human
agcaagcuaccuagauagucua

SEQ ID NO: 1084782 - RNA, 22 nt, Human
aaaucugguucaguaaguccuc

SEQ ID NO: 1084783 - RNA, 22 nt, Human
gcuggccauggccugcgccauc

SEQ ID NO: 1084784 - RNA, 22 nt, Human
uggcaccugaacuuagaggugu

SEQ ID NO: 1084785 - RNA, 22 nt, Human
uccaggcugauccaugaagaau

SEQ ID NO: 1084786 - RNA, 22 nt, Human
acagcagcuaaaggugucuccu

SEQ ID NO: 1084787 - RNA, 22 nt, Human
augcugagaaaccugucuggca

SEQ ID NO: 1084788 - RNA, 22 nt, Human
ucagauuuggacacaggaacuu

SEQ ID NO: 1084789 - RNA, 19 nt, Human
cuucuucuuggcagccaag

SEQ ID NO: 1084790 - RNA, 22 nt, Human
uugacacagaucaauauucaac

SEQ ID NO: 1084791 - RNA, 22 nt, Human
ugguuucccauuaucugcagga

SEQ ID NO: 1084792 - RNA, 22 nt, Human
ucccuccuggugagcaggggcu

SEQ ID NO: 1084793 - RNA, 22 nt, Human
cgggaacaugcuuucauuucag

SEQ ID NO: 1084794 - RNA, 22 nt, Human
uuuguaaggcuaaauaauauuc

SEQ ID NO: 1084795 - RNA, 22 nt, Human
agcugaagggaggauauguaca

SEQ ID NO: 1084796 - RNA, 22 nt, Human
auaaggcagucccuuaacaagg

SEQ ID NO: 1084797 - RNA, 22 nt, Human
caucacaaaaugauuauucccu

SEQ ID NO: 1084798 - RNA, 22 nt, Human
acuucacagauauuuauuuggu

SEQ ID NO: 1084799 - RNA, 22 nt, Human
aggccagacagcuagaaacagg

SEQ ID NO: 1084800 - RNA, 22 nt, Human
ucauugaauuucacagcuuuau

SEQ ID NO: 1084801 - RNA, 22 nt, Human
cagcucagucuggagagaugca

SEQ ID NO: 1084802 - RNA, 17 nt, Human
gcuggcugacccaugcc

SEQ ID NO: 1084803 - RNA, 22 nt, Human
cugggcacuuuggggagccuac

SEQ ID NO: 1084804 - RNA, 22 nt, Human
ggcugcuggaagacugaacaag

SEQ ID NO: 1084805 - RNA, 22 nt, Human
gaugauggacaaagcauuggug

SEQ ID NO: 1084806 - RNA, 21 nt, Human
acacagaggcaucaucacuuu

SEQ ID NO: 1084807 - RNA, 20 nt, Human
guuuccaaauugugcauuuu

SEQ ID NO: 1084808 - RNA, 22 nt, Human
aggcacuuaaccuacuaacuga

SEQ ID NO: 1084809 - RNA, 22 nt, Human
aauaauuuccagccaacuggaa

SEQ ID NO: 1084810 - RNA, 22 nt, Human
ugcagcuguuacggacccuguc

SEQ ID NO: 1084811 - RNA, 22 nt, Human
gcagugggagcuuaggcagugc

SEQ ID NO: 1084812 - RNA, 22 nt, Human
cucgcaggacagugcuaggacu

SEQ ID NO: 1084813 - RNA, 18 nt, Human
gguggcucagucaugggg

SEQ ID NO: 1084814 - RNA, 22 nt, Human
cacagaaaaaggcuugaaaauc

SEQ ID NO: 1084815 - RNA, 22 nt, Human
uccagagugcugacgcagaccc

SEQ ID NO: 1084816 - RNA, 21 nt, Human
ucugugcuuuuuuggcuccua

SEQ ID NO: 1084817 - RNA, 22 nt, Human
ucaguggauuggaugagaucug

SEQ ID NO: 1084818 - RNA, 19 nt, Human
ucuuucauuucuagcucug

SEQ ID NO: 1084819 - RNA, 22 nt, Human
gaagucugacucuuuguaagcu

SEQ ID NO: 1084820 - RNA, 22 nt, Human
ucucaggacuuugggaagcuca

SEQ ID NO: 1084821 - RNA, 22 nt, Human
ggaagcugccaguccaccagcu

SEQ ID NO: 1084822 - RNA, 17 nt, Human
aaggugagagcuguucu

SEQ ID NO: 1084823 - RNA, 22 nt, Human
ugcugccuccaacuccugggcu

SEQ ID NO: 1084824 - RNA, 22 nt, Human
cagggcaguaacgggaacaucu

SEQ ID NO: 1084825 - RNA, 22 nt, Human
uccaguggcacuggagacuaga

SEQ ID NO: 1084826 - RNA, 22 nt, Human
auacauucaaaggaaggauaga

SEQ ID NO: 1084827 - RNA, 22 nt, Human
ucucuucugaaaccugucuuua

SEQ ID NO: 1084828 - RNA, 22 nt, Human
cugccguccaucuacgucucag

SEQ ID NO: 1084829 - RNA, 22 nt, Human
gcuucuggcagugcagccacca

SEQ ID NO: 1084830 - RNA, 22 nt, Human
ugugcuucagguugucgccacg

SEQ ID NO: 1084831 - RNA, 22 nt, Human
uuucuggauucauacagaugua

SEQ ID NO: 1084832 - RNA, 22 nt, Human
uaguaaauuaaaauauugacuu

SEQ ID NO: 1084833 - RNA, 22 nt, Human
uggcucuguuuguuaacuagac

SEQ ID NO: 1084834 - RNA, 22 nt, Human
acagaaguguugaaguuuucau

SEQ ID NO: 1084835 - RNA, 20 nt, Human
cugcugugugugccucagcc

SEQ ID NO: 1084836 - RNA, 22 nt, Human
cugggcugucaauggcccucug

SEQ ID NO: 1084837 - RNA, 22 nt, Human
gaaaucacuuuuuucauaguug

SEQ ID NO: 1084838 - RNA, 22 nt, Human
uuuauucauuguuucgucgcag

SEQ ID NO: 1084839 - RNA, 22 nt, Human
gagcugccggcccacaguacua

SEQ ID NO: 1084840 - RNA, 22 nt, Human
ggcuucucgugccgaagcaaga

SEQ ID NO: 1084841 - RNA, 22 nt, Human
aaagucaucuaggagcagauuu

SEQ ID NO: 1084842 - RNA, 22 nt, Human
acugaaggcuuaacucuuucau

SEQ ID NO: 1084843 - RNA, 22 nt, Human
cagcugaguuacucugaggucu

SEQ ID NO: 1084844 - RNA, 20 nt, Human
ggcagagcuaugucuguugc

SEQ ID NO: 1084845 - RNA, 22 nt, Human
cucugagacuuuucaccuccca

SEQ ID NO: 1084846 - RNA, 22 nt, Human
caucaucaaaagugacagagaa

SEQ ID NO: 1084847 - RNA, 23 nt, Human
cuggggcuuucaaaucugggcag

SEQ ID NO: 1084848 - RNA, 20 nt, Human
ugugccuggcuuuguccuga

SEQ ID NO: 1084849 - RNA, 22 nt, Human
ccacaggaccagaggagaucac

SEQ ID NO: 1084850 - RNA, 22 nt, Human
uggcuuccacugugugcccccu

SEQ ID NO: 1084851 - RNA, 22 nt, Human
ggaaagaaagugugaacaacuu

SEQ ID NO: 1084852 - RNA, 22 nt, Human
cacggaaacacagguuauaaga

SEQ ID NO: 1084853 - RNA, 22 nt, Human
ggaaaggagauauuggagagug

SEQ ID NO: 1084854 - RNA, 22 nt, Human
cacauacaugcacaccuaaaua

SEQ ID NO: 1084855 - RNA, 22 nt, Human
ggcuucagaggagaagagggug

SEQ ID NO: 1084856 - RNA, 22 nt, Human
acacagagauguaaaguuaggc

SEQ ID NO: 1084857 - RNA, 22 nt, Human
ucuggcuccacuuucuucauuu

SEQ ID NO: 1084858 - RNA, 22 nt, Human
ugcagaagauggucugagcacc

SEQ ID NO: 1084859 - RNA, 20 nt, Human
uuucacagucccuguuuccu

SEQ ID NO: 1084860 - RNA, 22 nt, Human
aaauauagugacacuuauaguc

SEQ ID NO: 1084861 - RNA, 22 nt, Human
aggcacugaccugcuuccuuga

SEQ ID NO: 1084862 - RNA, 22 nt, Human
agucucuuucuaaauaagguca

SEQ ID NO: 1084863 - RNA, 22 nt, Human
gguuccccaggcggcccuugga

SEQ ID NO: 1084864 - RNA, 22 nt, Human
cucugcuuggaacuggacagaa

SEQ ID NO: 1084865 - RNA, 22 nt, Human
augaaaugauugaaaucuuuac

SEQ ID NO: 1084866 - RNA, 22 nt, Human
gcugggccuuccgauucucaag

SEQ ID NO: 1084867 - RNA, 22 nt, Human
uggggacacagagguucguugg

SEQ ID NO: 1084868 - RNA, 22 nt, Human
agagugaaguuuuugaaaguga

SEQ ID NO: 1084869 - RNA, 22 nt, Human
cugggaggacaacuuggagcuc

SEQ ID NO: 1084870 - RNA, 22 nt, Human
acagaguagcucaagaagauug

SEQ ID NO: 1084871 - RNA, 22 nt, Human
guggccucugugcuccugccua

SEQ ID NO: 1084872 - RNA, 22 nt, Human
aaugagauggaauucccgccua

SEQ ID NO: 1084873 - RNA, 22 nt, Human
gaggcugggaaguccaagauca

SEQ ID NO: 1084874 - RNA, 22 nt, Human
uauuucugggaguucagaaauu

SEQ ID NO: 1084875 - RNA, 22 nt, Human
acacagggauauuucagguggu

SEQ ID NO: 1084876 - RNA, 22 nt, Human
acacagggcaaugcuuugaccu

SEQ ID NO: 1084877 - RNA, 22 nt, Human
uguaaggacaacaggagaaaaa

SEQ ID NO: 1084878 - RNA, 23 nt, Human
uacaugcuauaauuucacccuca

SEQ ID NO: 1084879 - RNA, 22 nt, Human
caguuacagagccaguuagaga

SEQ ID NO: 1084880 - RNA, 22 nt, Human
ggucccaggagaauaggugcaa

SEQ ID NO: 1084881 - RNA, 22 nt, Human
uucuuuucuuggcaggaguaga

SEQ ID NO: 1084882 - RNA, 22 nt, Human
uucauuugaguuuauaguugcu

SEQ ID NO: 1084883 - RNA, 22 nt, Human
uuuauguuauggguaggaucaa

SEQ ID NO: 1084884 - RNA, 22 nt, Human
gugagagggcugggcucaugau

SEQ ID NO: 1084885 - RNA, 22 nt, Human
uagggcagcugcaucaggcacu

SEQ ID NO: 1084886 - RNA, 22 nt, Human
auaugucgcuacaucauuagau

SEQ ID NO: 1084887 - RNA, 22 nt, Human
uacuuucuagcucuccccaguu

SEQ ID NO: 1084888 - RNA, 22 nt, Human
gugcucuggcuggucucccggu

SEQ ID NO: 1084889 - RNA, 22 nt, Human
ccagaggacuugggggcugaau

SEQ ID NO: 1084890 - RNA, 22 nt, Human
gugggcagacagugcuuugcag

SEQ ID NO: 1084891 - RNA, 22 nt, Human
uguauuaugauuguuguucaug

SEQ ID NO: 1084892 - RNA, 17 nt, Human
accagaguuuuccaugc

SEQ ID NO: 1084893 - RNA, 22 nt, Human
aucuuuaggaaccuaaccuauu

SEQ ID NO: 1084894 - RNA, 22 nt, Human
ucugccugcgcucacggggccg

SEQ ID NO: 1084895 - RNA, 22 nt, Human
uggagcaggcaucuuucucucu

SEQ ID NO: 1084896 - RNA, 18 nt, Human
caggaaccucuccuuuuu

SEQ ID NO: 1084897 - RNA, 22 nt, Human
acaugaaaagacuaucugauua

SEQ ID NO: 1084898 - RNA, 20 nt, Human
uuccuguauacaaagaguuc

SEQ ID NO: 1084899 - RNA, 22 nt, Human
acauguaaaaggaacaugcaug

SEQ ID NO: 1084900 - RNA, 22 nt, Human
ccaggcuggagugcaauggugc

SEQ ID NO: 1084901 - RNA, 22 nt, Human
guguggcuaccucagaggagca

SEQ ID NO: 1084902 - RNA, 22 nt, Human
cagcuguucacauuuccaaaac

SEQ ID NO: 1084903 - RNA, 22 nt, Human
agaagccagaggcaguggguac

SEQ ID NO: 1084904 - RNA, 22 nt, Human
gaggcuggugguuaguuccauu

SEQ ID NO: 1084905 - RNA, 22 nt, Human
ggccccaggaccuccacggucc

SEQ ID NO: 1084906 - RNA, 22 nt, Human
uauaguacauggaaucuucaua

SEQ ID NO: 1084907 - RNA, 22 nt, Human
ccucugcucugguccaugugcu

SEQ ID NO: 1084908 - RNA, 22 nt, Human
ugucaguggaccuggagaggcc

SEQ ID NO: 1084909 - RNA, 22 nt, Human
accuccccugacucgaaaccca

SEQ ID NO: 1084910 - RNA, 18 nt, Human
caaagcaggugacagugu

SEQ ID NO: 1084911 - RNA, 22 nt, Human
aggccagguuccucaaucuuga

SEQ ID NO: 1084912 - RNA, 22 nt, Human
aauacuugucagaugaauaaga

SEQ ID NO: 1084913 - RNA, 22 nt, Human
uggaggcaguuuaagucugaga

SEQ ID NO: 1084914 - RNA, 22 nt, Human
cagggccugagggcugcucugc

SEQ ID NO: 1084915 - RNA, 22 nt, Human
gcuguccucuuggacucagggc

SEQ ID NO: 1084916 - RNA, 22 nt, Human
ugcagcucugaacagucaugaa

SEQ ID NO: 1084917 - RNA, 22 nt, Human
gggccuccggggugagcugugg

SEQ ID NO: 1084918 - RNA, 22 nt, Human
cugguucauauaggcaaguuua

SEQ ID NO: 1084919 - RNA, 22 nt, Human
accaggaacaagccauggagga

SEQ ID NO: 1084920 - RNA, 22 nt, Human
aggcacugauucuguuuuccau

SEQ ID NO: 1084921 - RNA, 22 nt, Human
cagagccaggguugcaccccug

SEQ ID NO: 1084922 - RNA, 22 nt, Human
ccagggugagaaaaggcuggau

SEQ ID NO: 1084923 - RNA, 22 nt, Human
cauguccacaguucugagaggc

SEQ ID NO: 1084924 - RNA, 22 nt, Human
cuuucucuucacugucaugauc

SEQ ID NO: 1084925 - RNA, 22 nt, Human
agggcagcagcccauggcucug

SEQ ID NO: 1084926 - RNA, 22 nt, Human
gagauuuuucaacaagaauagg

SEQ ID NO: 1084927 - RNA, 22 nt, Human
ggccagaggccacagcuguguc

SEQ ID NO: 1084928 - RNA, 22 nt, Human
uucagcuaaugggaauaagagu

SEQ ID NO: 1084929 - RNA, 22 nt, Human
uuuaucuuuggaucuucagaaa

SEQ ID NO: 1084930 - RNA, 20 nt, Human
ggcuuaaggaauucuuuucu

SEQ ID NO: 1084931 - RNA, 22 nt, Human
gauggcacacagacauccccgc

SEQ ID NO: 1084932 - RNA, 22 nt, Human
gcagggaagacccggagcagcg

SEQ ID NO: 1084933 - RNA, 22 nt, Human
caccugggcuaaacuaugcagg

SEQ ID NO: 1084934 - RNA, 22 nt, Human
uuuucugaaguuuaagacauuu

SEQ ID NO: 1084935 - RNA, 22 nt, Human
auguuuaaaggguugagaaaua

SEQ ID NO: 1084936 - RNA, 18 nt, Human
ucacuggguguauguggc

SEQ ID NO: 1084937 - RNA, 22 nt, Human
aacacuuugggcauggccuucc

SEQ ID NO: 1084938 - RNA, 22 nt, Human
uccugcuugaaacucugccuuc

SEQ ID NO: 1084939 - RNA, 22 nt, Human
uggaggcagucaccugaaguca

SEQ ID NO: 1084940 - RNA, 22 nt, Human
cccucagggaccacugacuuca

SEQ ID NO: 1084941 - RNA, 22 nt, Human
ccagggcaauaggaacacuuuu

SEQ ID NO: 1084942 - RNA, 22 nt, Human
agugcuuuagcauccaacuguc

SEQ ID NO: 1084943 - RNA, 17 nt, Human
aaucuguuuacagucag

SEQ ID NO: 1084944 - RNA, 22 nt, Human
caacuauauagaaauugauugu

SEQ ID NO: 1084945 - RNA, 22 nt, Human
ugaaagcuguccacuaggcugu

SEQ ID NO: 1084946 - RNA, 22 nt, Human
ggucccuggggaacuaggcugu

SEQ ID NO: 1084947 - RNA, 22 nt, Human
gucauauugaagaagacuggca

SEQ ID NO: 1084948 - RNA, 22 nt, Human
uaguguuuucuagaaugguuuu

SEQ ID NO: 1084949 - RNA, 22 nt, Human
ugguccagacauuucugaggua

SEQ ID NO: 1084950 - RNA, 22 nt, Human
aaagagcuaacauugccgagau

SEQ ID NO: 1084951 - RNA, 22 nt, Human
gcugucagugaggugagacaug

SEQ ID NO: 1084952 - RNA, 22 nt, Human
ucucugaguaagugacaguuca

SEQ ID NO: 1084953 - RNA, 22 nt, Human
aagcucuuugaccugggccugg

SEQ ID NO: 1084954 - RNA, 21 nt, Human
agacagagugcagucuacaua

SEQ ID NO: 1084955 - RNA, 22 nt, Human
gggacuggcacagggcugggag

SEQ ID NO: 1084956 - RNA, 22 nt, Human
ccuggcuggauggagccccugg

SEQ ID NO: 1084957 - RNA, 22 nt, Human
auuucuguugcuuauaaauuac

SEQ ID NO: 1084958 - RNA, 22 nt, Human
cugcucugcaaggcacagugau

SEQ ID NO: 1084959 - RNA, 20 nt, Human
aaaggaauauaugaaguaua

SEQ ID NO: 1084960 - RNA, 22 nt, Human
auguuuguugaacaucuacugc

SEQ ID NO: 1084961 - RNA, 22 nt, Human
agggucugacaaugugacuuag

SEQ ID NO: 1084962 - RNA, 22 nt, Human
caugcugugcaucuugaugacc

SEQ ID NO: 1084963 - RNA, 22 nt, Human
ugugcagggaagggcaugcuau

SEQ ID NO: 1084964 - RNA, 22 nt, Human
acacagcugugcaguuuuuuca

SEQ ID NO: 1084965 - RNA, 22 nt, Human
agcccaugcaacaggccuagcg

SEQ ID NO: 1084966 - RNA, 22 nt, Human
ugagacaguuuuucuauuucca

SEQ ID NO: 1084967 - RNA, 22 nt, Human
ucccagagugagccaggggcag

SEQ ID NO: 1084968 - RNA, 21 nt, Human
uaacaaagacuucuggucagg

SEQ ID NO: 1084969 - RNA, 22 nt, Human
ccagaagaccccguccaccucc

SEQ ID NO: 1084970 - RNA, 22 nt, Human
aucacaaaggcugcuucaugau

SEQ ID NO: 1084971 - RNA, 22 nt, Human
uuuugguagccaacaaaauguu

SEQ ID NO: 1084972 - RNA, 22 nt, Human
aaagucauugcuguuaucaaug

SEQ ID NO: 1084973 - RNA, 22 nt, Human
agggaagaaaauccaucgcugc

SEQ ID NO: 1084974 - RNA, 22 nt, Human
cauggcaggugcagauucugug

SEQ ID NO: 1084975 - RNA, 22 nt, Human
guguccuuauuucugucucuca

SEQ ID NO: 1084976 - RNA, 22 nt, Human
acagacagacagagaacuauuc

SEQ ID NO: 1084977 - RNA, 22 nt, Human
gaugaagccccaguguaaguaa

SEQ ID NO: 1084978 - RNA, 22 nt, Human
cuggagccgcauggagcaggga

SEQ ID NO: 1084979 - RNA, 22 nt, Human
ucacauuuuaguaccaugauuu

SEQ ID NO: 1084980 - RNA, 22 nt, Human
gaauauuuuuaaagggacuaau

SEQ ID NO: 1084981 - RNA, 22 nt, Human
ucuguuccaguagaaaggugca

SEQ ID NO: 1084982 - RNA, 22 nt, Human
gcugucuugcucacucuugcag

SEQ ID NO: 1084983 - RNA, 21 nt, Human
uugcacagaaaaccauagaga

SEQ ID NO: 1084984 - RNA, 22 nt, Human
agccacaggaaacagagacagc

SEQ ID NO: 1084985 - RNA, 20 nt, Human
agugccagggcaggugagag

SEQ ID NO: 1084986 - RNA, 20 nt, Human
cuggguggcaagcaaggggg

SEQ ID NO: 1084987 - RNA, 22 nt, Human
cugaggcugggcauggggucca

SEQ ID NO: 1084988 - RNA, 22 nt, Human
acuguucuucauuuagcaaaga

SEQ ID NO: 1084989 - RNA, 22 nt, Human
aguggcaaagucuucagaaguu

SEQ ID NO: 1084990 - RNA, 22 nt, Human
caguaacacaaccacuccguga

SEQ ID NO: 1084991 - RNA, 22 nt, Human
uuucuaggcacagugucuuccc

SEQ ID NO: 1084992 - RNA, 22 nt, Human
ucauucuugaucacuaguuagu

SEQ ID NO: 1084993 - RNA, 22 nt, Human
caucacugacgcugagauucca

SEQ ID NO: 1084994 - RNA, 20 nt, Human
ucuaaacaguuggcaugggg

SEQ ID NO: 1084995 - RNA, 22 nt, Human
aggcugggcaccguuuugaucc

SEQ ID NO: 1084996 - RNA, 22 nt, Human
ugaagguggcauaggagagaug

SEQ ID NO: 1084997 - RNA, 20 nt, Human
auuugcugagcuuuuucucc

SEQ ID NO: 1084998 - RNA, 22 nt, Human
cugggagagaagcgaagcuggg

SEQ ID NO: 1084999 - RNA, 23 nt, Human
agucaguguaaguuuggaaugca

SEQ ID NO: 1085000 - RNA, 22 nt, Human
ggaaucagaauuaggauuugaa

SEQ ID NO: 1085001 - RNA, 22 nt, Human
agcagcuuuaagucacugguua

SEQ ID NO: 1085002 - RNA, 22 nt, Human
ggaggguuagcaaaggcacaga

SEQ ID NO: 1085003 - RNA, 22 nt, Human
aacuuaaacccacucauguaga

SEQ ID NO: 1085004 - RNA, 22 nt, Human
agucccagcucugccacuuacu

SEQ ID NO: 1085005 - RNA, 22 nt, Human
cagcacaauuuucaggagucca

SEQ ID NO: 1085006 - RNA, 18 nt, Human
uggcaggaaaugcacuuu

SEQ ID NO: 1085007 - RNA, 22 nt, Human
aagacuguacauuuuccagucu

SEQ ID NO: 1085008 - RNA, 21 nt, Human
aucucacagcccagagaagcc

SEQ ID NO: 1085009 - RNA, 20 nt, Human
agugugcauuuagagucugc

SEQ ID NO: 1085010 - RNA, 22 nt, Human
augcuuuuccaggagaaauaua

SEQ ID NO: 1085011 - RNA, 22 nt, Human
acagccugcugccugcuucuug

SEQ ID NO: 1085012 - RNA, 22 nt, Human
cagcugccacuugcucucggcu

SEQ ID NO: 1085013 - RNA, 22 nt, Human
cagagcacacaugcauagagug

SEQ ID NO: 1085014 - RNA, 22 nt, Human
agucucuuaauuuuuucuaagu

SEQ ID NO: 1085015 - RNA, 20 nt, Human
ucuggcaggugaacgagcug

SEQ ID NO: 1085016 - RNA, 22 nt, Human
uggagaaggacagccugagaaa

SEQ ID NO: 1085017 - RNA, 22 nt, Human
uagaaagacaugggccagcagc

SEQ ID NO: 1085018 - RNA, 22 nt, Human
ggaaguauuuguuuuugcaucc

SEQ ID NO: 1085019 - RNA, 22 nt, Human
auacuuaugauaaauaauugcu

SEQ ID NO: 1085020 - RNA, 22 nt, Human
aaccuuuauuugguacuauucu

SEQ ID NO: 1085021 - RNA, 23 nt, Human
ccucccaccuauuucacuuucuu

SEQ ID NO: 1085022 - RNA, 22 nt, Human
uagggcugcugcagaugacagg

SEQ ID NO: 1085023 - RNA, 22 nt, Human
cuggaagugggguuggcuugaa

SEQ ID NO: 1085024 - RNA, 22 nt, Human
uuucagugucaguaaugcagca

SEQ ID NO: 1085025 - RNA, 22 nt, Human
gggcugcacagaucuucaaggg

SEQ ID NO: 1085026 - RNA, 22 nt, Human
uguguuggcugccggcacagga

SEQ ID NO: 1085027 - RNA, 22 nt, Human
gccugucaauuuuguguacaau

SEQ ID NO: 1085028 - RNA, 22 nt, Human
gaccugguccuuguacuuugaa

SEQ ID NO: 1085029 - RNA, 22 nt, Human
caguacuuauuucuauuuaggg

SEQ ID NO: 1085030 - RNA, 22 nt, Human
cauggaacaaggaagauguuug

SEQ ID NO: 1085031 - RNA, 22 nt, Human
ggcuccaaagggcagugugagg

SEQ ID NO: 1085032 - RNA, 22 nt, Human
ggccagaggccauccuccugcu

SEQ ID NO: 1085033 - RNA, 22 nt, Human
uuccaaaugaguuccaucgaau

SEQ ID NO: 1085034 - RNA, 22 nt, Human
ugaaauuccaggagaguuaaaa

SEQ ID NO: 1085035 - RNA, 22 nt, Human
ucauaaauugauuaugugcuuu

SEQ ID NO: 1085036 - RNA, 22 nt, Human
agggcagcccuucugggagggc

SEQ ID NO: 1085037 - RNA, 22 nt, Human
aagccacuuggggaaagaugga

SEQ ID NO: 1085038 - RNA, 22 nt, Human
gagaaggacuacacaucuggcc

SEQ ID NO: 1085039 - RNA, 17 nt, Human
agcuuguuuuugaaagc

SEQ ID NO: 1085040 - RNA, 22 nt, Human
cagcccagcacuaaguagauuu

SEQ ID NO: 1085041 - RNA, 22 nt, Human
agcccagcaaagggagguucag

SEQ ID NO: 1085042 - RNA, 22 nt, Human
cuugcugggguaagucugugcu

SEQ ID NO: 1085043 - RNA, 22 nt, Human
acagaagaaagggagguuuugc

SEQ ID NO: 1085044 - RNA, 22 nt, Human
cagagcuguccaaacccugaca

SEQ ID NO: 1085045 - RNA, 22 nt, Human
gcuggcagacugggggcagaac

SEQ ID NO: 1085046 - RNA, 22 nt, Human
accagccugucugagucguggg

SEQ ID NO: 1085047 - RNA, 22 nt, Human
augucuuucaaauucugccuag

SEQ ID NO: 1085048 - RNA, 22 nt, Human
guauucuugaguggcaacuagg

SEQ ID NO: 1085049 - RNA, 21 nt, Human
gucuuuuuaauugcgauuucc

SEQ ID NO: 1085050 - RNA, 22 nt, Human
uauuacagggcuaguuaugagu

SEQ ID NO: 1085051 - RNA, 22 nt, Human
cugacuuuuccaaauaauacuu

SEQ ID NO: 1085052 - RNA, 22 nt, Human
auuucucaaccaggucaaaaag

SEQ ID NO: 1085053 - RNA, 22 nt, Human
aagguacaaaguauuauuuaaa

SEQ ID NO: 1085054 - RNA, 22 nt, Human
agagugcagaggucaaagaaca

SEQ ID NO: 1085055 - RNA, 22 nt, Human
caagugaucagacacugaaguc

SEQ ID NO: 1085056 - RNA, 22 nt, Human
cugaaggacuuggugauaguug

SEQ ID NO: 1085057 - RNA, 22 nt, Human
uguacagacuuugcagugugca

SEQ ID NO: 1085058 - RNA, 22 nt, Human
aaguguuuaugguuauuguuaa

SEQ ID NO: 1085059 - RNA, 22 nt, Human
ucucuuaauucagaggcaguua

SEQ ID NO: 1085060 - RNA, 22 nt, Human
uuuaccaaaguacucugaggca

SEQ ID NO: 1085061 - RNA, 22 nt, Human
auaaggcagugacuucaucuau

SEQ ID NO: 1085062 - RNA, 22 nt, Human
agaaggaaggcugagugcugau

SEQ ID NO: 1085063 - RNA, 22 nt, Human
ucucagagcuucagaaagcacc

SEQ ID NO: 1085064 - RNA, 20 nt, Human
uucauuugggaaaaucugcg

SEQ ID NO: 1085065 - RNA, 22 nt, Human
aggaaaaucaaugucuuuuuaa

SEQ ID NO: 1085066 - RNA, 22 nt, Human
auggaauugaagacagcauagg

SEQ ID NO: 1085067 - RNA, 21 nt, Human
auuuccaaggguaccuaagau

SEQ ID NO: 1085068 - RNA, 22 nt, Human
aauguacaggcuggcuaugggg

SEQ ID NO: 1085069 - RNA, 22 nt, Human
aacugaaacggugaucuuuuaa

SEQ ID NO: 1085070 - RNA, 22 nt, Human
gauaaugaugacaaugacaacc

SEQ ID NO: 1085071 - RNA, 22 nt, Human
aaauauuauugcuuaaggggag

SEQ ID NO: 1085072 - RNA, 19 nt, Human
ggcugccuggagcgagggc

SEQ ID NO: 1085073 - RNA, 22 nt, Human
ucagucuucuagcaaauccagg

SEQ ID NO: 1085074 - RNA, 22 nt, Human
agugcuuugguauagaacuauu

SEQ ID NO: 1085075 - RNA, 22 nt, Human
cccagggagguagcaggagaaa

SEQ ID NO: 1085076 - RNA, 22 nt, Human
agagugaaguucaucgugcagc

SEQ ID NO: 1085077 - RNA, 21 nt, Human
cuugaaagguagagucuacag

SEQ ID NO: 1085078 - RNA, 22 nt, Human
ucaaaugcucuuugcagagagg

SEQ ID NO: 1085079 - RNA, 22 nt, Human
accagagcuggcucugagcacc

SEQ ID NO: 1085080 - RNA, 22 nt, Human
ucacaggcuccagggccuggau

SEQ ID NO: 1085081 - RNA, 22 nt, Human
cccagcuccgagcuccgagccg

SEQ ID NO: 1085082 - RNA, 22 nt, Human
gcuggcagucccaucagcuggg

SEQ ID NO: 1085083 - RNA, 22 nt, Human
auuaaggagggcugggcaugau

SEQ ID NO: 1085084 - RNA, 22 nt, Human
agcucaggucucaggagguguc

SEQ ID NO: 1085085 - RNA, 22 nt, Human
gacagaguuguugauguaugcu

SEQ ID NO: 1085086 - RNA, 22 nt, Human
auaugcacgcauacacacauaa

SEQ ID NO: 1085087 - RNA, 23 nt, Human
ugucccagagggagggauaggcu

SEQ ID NO: 1085088 - RNA, 22 nt, Human
auauuuugguagcucucaauga

SEQ ID NO: 1085089 - RNA, 22 nt, Human
gacucagugauuugacaugccu

SEQ ID NO: 1085090 - RNA, 22 nt, Human
uuuucauguuccuuguuaagug

SEQ ID NO: 1085091 - RNA, 22 nt, Human
guauuucuagaaccaaaagcca

SEQ ID NO: 1085092 - RNA, 20 nt, Human
uucaugggagcaaagaggcc

SEQ ID NO: 1085093 - RNA, 22 nt, Human
guucacagcuucuuaggucaua

SEQ ID NO: 1085094 - RNA, 22 nt, Human
gggcagcugccaagugcaucgc

SEQ ID NO: 1085095 - RNA, 22 nt, Human
caagauuuauauuuucacacaa

SEQ ID NO: 1085096 - RNA, 22 nt, Human
agccuggauccuaggcucagcu

SEQ ID NO: 1085097 - RNA, 22 nt, Human
cauggcugcgagaagagugggu

SEQ ID NO: 1085098 - RNA, 22 nt, Human
uacaugaauguuucaauauugu

SEQ ID NO: 1085099 - RNA, 22 nt, Human
cuguaguugaugauuucugaua

SEQ ID NO: 1085100 - RNA, 22 nt, Human
uuacaguaugaucaacuuuuca

SEQ ID NO: 1085101 - RNA, 22 nt, Human
agucugucuaauauuauucagg

SEQ ID NO: 1085102 - RNA, 22 nt, Human
guccucaguaagagggccucug

SEQ ID NO: 1085103 - RNA, 22 nt, Human
gucaccugaggggaggugacag

SEQ ID NO: 1085104 - RNA, 22 nt, Human
uagaaaucuuguuacuaugugu

SEQ ID NO: 1085105 - RNA, 19 nt, Human
caaggccaccauuucuccg

SEQ ID NO: 1085106 - RNA, 22 nt, Human
ucugggagacguguguugucag

SEQ ID NO: 1085107 - RNA, 23 nt, Human
uuacuacacaaguaacgauuccc

SEQ ID NO: 1085108 - RNA, 22 nt, Human
agcugugggauuugggugugcc

SEQ ID NO: 1085109 - RNA, 20 nt, Human
ucaggcaguggggaaaggca

SEQ ID NO: 1085110 - RNA, 22 nt, Human
uaucacacuguuuuaauuacuu

SEQ ID NO: 1085111 - RNA, 22 nt, Human
cacagcuggugacagagcccag

SEQ ID NO: 1085112 - RNA, 22 nt, Human
augggaagugaagucagggagg

SEQ ID NO: 1085113 - RNA, 22 nt, Human
cuguuuuaauggagacugaugu

SEQ ID NO: 1085114 - RNA, 22 nt, Human
uuugaaaucuaaucaaggaaca

SEQ ID NO: 1085115 - RNA, 22 nt, Human
agaagccauucccuguaggcuc

SEQ ID NO: 1085116 - RNA, 22 nt, Human
uacaguauuacuguguuguuuu

SEQ ID NO: 1085117 - RNA, 19 nt, Human
auuucaagagguuuauugg

SEQ ID NO: 1085118 - RNA, 23 nt, Human
gaaagucaauaugguagcuuuga

SEQ ID NO: 1085119 - RNA, 20 nt, Human
augggcugguuaggaagugu

SEQ ID NO: 1085120 - RNA, 22 nt, Human
uguggcaaagaccauuucuuuc

SEQ ID NO: 1085121 - RNA, 20 nt, Human
uccugagauuuaagggguuc

SEQ ID NO: 1085122 - RNA, 21 nt, Human
agagccugagaucuuccagca

SEQ ID NO: 1085123 - RNA, 22 nt, Human
acuuugaaauguguaagagaga

SEQ ID NO: 1085124 - RNA, 22 nt, Human
cuucagugcauguuuauaauca

SEQ ID NO: 1085125 - RNA, 19 nt, Human
cuggaaugagaacaugccc

SEQ ID NO: 1085126 - RNA, 22 nt, Human
gggagaaggaggacugugcugu

SEQ ID NO: 1085127 - RNA, 22 nt, Human
ugggcuggugagggaucauuua

SEQ ID NO: 1085128 - RNA, 16 nt, Human
cuucacagaggagagu

SEQ ID NO: 1085129 - RNA, 22 nt, Human
gggaggcacgaggcgcgcagug

SEQ ID NO: 1085130 - RNA, 22 nt, Human
acuuccagaacagguacauuuu

SEQ ID NO: 1085131 - RNA, 22 nt, Human
cccagcucuuccugggagcuaa

SEQ ID NO: 1085132 - RNA, 22 nt, Human
cuccagcucgcgagcucugcuc

SEQ ID NO: 1085133 - RNA, 22 nt, Human
ugucccuuuguguucugaaacu

SEQ ID NO: 1085134 - RNA, 22 nt, Human
ggcagcagcaagguuggagcug

SEQ ID NO: 1085135 - RNA, 22 nt, Human
ggcaggcauggggucugccauu

SEQ ID NO: 1085136 - RNA, 20 nt, Human
guggcaggcagugaaggagc

SEQ ID NO: 1085137 - RNA, 22 nt, Human
cugaggcacagugaacuucucc

SEQ ID NO: 1085138 - RNA, 22 nt, Human
gugggaugguagguagguaaua

SEQ ID NO: 1085139 - RNA, 22 nt, Human
cccaggaaauauguuucuuaac

SEQ ID NO: 1085140 - RNA, 22 nt, Human
guuaaugugucugacacaaugg

SEQ ID NO: 1085141 - RNA, 23 nt, Human
uugauacagaagaaucaguuugu

SEQ ID NO: 1085142 - RNA, 22 nt, Human
auguuuguguuacacucugcag

SEQ ID NO: 1085143 - RNA, 20 nt, Human
cucugagguaucuguaaagu

SEQ ID NO: 1085144 - RNA, 19 nt, Human
aggccugggguuuugcacu

SEQ ID NO: 1085145 - RNA, 21 nt, Human
guguuuccuguuuauggcuug

SEQ ID NO: 1085146 - RNA, 22 nt, Human
acuugcauguguaaaucuuccu

SEQ ID NO: 1085147 - RNA, 22 nt, Human
cccugccuugggguccacaccg

SEQ ID NO: 1085148 - RNA, 22 nt, Human
uuccaaguagaagcauuugcau

SEQ ID NO: 1085149 - RNA, 22 nt, Human
agggaagaagcugguaguaggu

SEQ ID NO: 1085150 - RNA, 22 nt, Human
gcugcggugaacuuggauggug

SEQ ID NO: 1085151 - RNA, 16 nt, Human
gaggcuggcagauguc

SEQ ID NO: 1085152 - RNA, 22 nt, Human
uggcauuuggcuuacuuauguu

SEQ ID NO: 1085153 - RNA, 22 nt, Human
auccugggaagcugacauugaa

SEQ ID NO: 1085154 - RNA, 21 nt, Human
uucuucaaagaagaaggcaca

SEQ ID NO: 1085155 - RNA, 22 nt, Human
gaaaugugugacaaguuucaau

SEQ ID NO: 1085156 - RNA, 22 nt, Human
aacauuucugagaauaucaguu

SEQ ID NO: 1085157 - RNA, 22 nt, Human
aagaaguuaauaauggugagaa

SEQ ID NO: 1085158 - RNA, 21 nt, Human
uaacuuuugugccuaucuugu

SEQ ID NO: 1085159 - RNA, 22 nt, Human
ucagccuggugauuccucuguc

SEQ ID NO: 1085160 - RNA, 22 nt, Human
aggccuggugugccggaugcag

SEQ ID NO: 1085161 - RNA, 22 nt, Human
aaaugcauuaagucagaacaau

SEQ ID NO: 1085162 - RNA, 22 nt, Human
uugcaaggucaucaugcauugg

SEQ ID NO: 1085163 - RNA, 22 nt, Human
ccugguggcuucuggguggacg

SEQ ID NO: 1085164 - RNA, 22 nt, Human
uuauuguuuacuaguuugcaga

SEQ ID NO: 1085165 - RNA, 22 nt, Human
ugagcuuacuucuguacacaga

SEQ ID NO: 1085166 - RNA, 22 nt, Human
cagggcugagaauuuagagaca

SEQ ID NO: 1085167 - RNA, 19 nt, Human
ucagggcaguccggucccc

SEQ ID NO: 1085168 - RNA, 22 nt, Human
ugucccaggccucauguugcca

SEQ ID NO: 1085169 - RNA, 22 nt, Human
aagcacuugcuuagaugugguu

SEQ ID NO: 1085170 - RNA, 22 nt, Human
agagcuggccagggaucacucu

SEQ ID NO: 1085171 - RNA, 22 nt, Human
uucauugaaauacagucuugac

SEQ ID NO: 1085172 - RNA, 22 nt, Human
ucauuucaguucagaggccuuu

SEQ ID NO: 1085173 - RNA, 19 nt, Human
ugcucagcuccugugaguc

SEQ ID NO: 1085174 - RNA, 20 nt, Human
cuggggacagcaauggcugu

SEQ ID NO: 1085175 - RNA, 22 nt, Human
uacagcauguccuuagcaaggc

SEQ ID NO: 1085176 - RNA, 22 nt, Human
gaagaaggaagaucaugcuuga

SEQ ID NO: 1085177 - RNA, 22 nt, Human
agugcaggcucgcuugugaggc

SEQ ID NO: 1085178 - RNA, 22 nt, Human
ugaggaagcaaaggcuugugug

SEQ ID NO: 1085179 - RNA, 22 nt, Human
agagccaggcggcugggcaccu

SEQ ID NO: 1085180 - RNA, 22 nt, Human
gucccugcaucaccacgggacu

SEQ ID NO: 1085181 - RNA, 22 nt, Human
acacaaacagucuauagcacca

SEQ ID NO: 1085182 - RNA, 20 nt, Human
ucccucaguuuccagcccug

SEQ ID NO: 1085183 - RNA, 22 nt, Human
ugggccucaguuuccuuaggau

SEQ ID NO: 1085184 - RNA, 23 nt, Human
cuggcuccgaagacuccaggauc

SEQ ID NO: 1085185 - RNA, 22 nt, Human
accagaguaauguguggaaauu

SEQ ID NO: 1085186 - RNA, 22 nt, Human
auacauacguacauacguaugu

SEQ ID NO: 1085187 - RNA, 20 nt, Human
aggcacuggggauagguaag

SEQ ID NO: 1085188 - RNA, 22 nt, Human
caaggaaguuuuaggagaggaa

SEQ ID NO: 1085189 - RNA, 22 nt, Human
caaucugaguugggaauguauu

SEQ ID NO: 1085190 - RNA, 22 nt, Human
gauguuucugggaaggaaaagu

SEQ ID NO: 1085191 - RNA, 22 nt, Human
gaggccuggcugggaggaggug

SEQ ID NO: 1085192 - RNA, 22 nt, Human
uaaacaucuguagccuucaguc

SEQ ID NO: 1085193 - RNA, 18 nt, Human
agaauuaccaaagugcuu

SEQ ID NO: 1085194 - RNA, 22 nt, Human
gcucuuccauuucucuugaacu

SEQ ID NO: 1085195 - RNA, 22 nt, Human
agcccugcugccugaauuagcu

SEQ ID NO: 1085196 - RNA, 19 nt, Human
aaaaggaauauucuuuggg

SEQ ID NO: 1085197 - RNA, 22 nt, Human
gccagguggagguugcagugag

SEQ ID NO: 1085198 - RNA, 22 nt, Human
uccaggcaguuuuccagguugu

SEQ ID NO: 1085199 - RNA, 22 nt, Human
gcagcuguaaagcagaaauagu

SEQ ID NO: 1085200 - RNA, 22 nt, Human
cucagcuaguaacguacauguc

SEQ ID NO: 1085201 - RNA, 22 nt, Human
aaaacuuucagggauacagaaa

SEQ ID NO: 1085202 - RNA, 20 nt, Human
gggcccugggauucagagca

SEQ ID NO: 1085203 - RNA, 22 nt, Human
caagggaguuacugagggcggg

SEQ ID NO: 1085204 - RNA, 22 nt, Human
acuuccugcagcuucucagccc

SEQ ID NO: 1085205 - RNA, 22 nt, Human
ucacagaauaaauugagaagac

SEQ ID NO: 1085206 - RNA, 22 nt, Human
aguuuuuccugauuuuacagaa

SEQ ID NO: 1085207 - RNA, 22 nt, Human
acauacuugaagcaagugauca

SEQ ID NO: 1085208 - RNA, 22 nt, Human
uuguaugaggauagcaagaagc

SEQ ID NO: 1085209 - RNA, 22 nt, Human
aagcugauucuaaaauuuauua

SEQ ID NO: 1085210 - RNA, 22 nt, Human
gaagagcuccaaaaacagugag

SEQ ID NO: 1085211 - RNA, 22 nt, Human
ucugcccugcagggagcaguaa

SEQ ID NO: 1085212 - RNA, 22 nt, Human
caaaacuaucaggcucaaagcu

SEQ ID NO: 1085213 - RNA, 22 nt, Human
cuuccucugcggcgccgggcgc

SEQ ID NO: 1085214 - RNA, 20 nt, Human
aggaacuggaagggaggaaa

SEQ ID NO: 1085215 - RNA, 22 nt, Human
auuguuaugaaaauaagauguu

SEQ ID NO: 1085216 - RNA, 22 nt, Human
acagaaguguguguguaggaau

SEQ ID NO: 1085217 - RNA, 22 nt, Human
uguggcagucucacuggagggc

SEQ ID NO: 1085218 - RNA, 22 nt, Human
guacacacaaucucuggucagu

SEQ ID NO: 1085219 - RNA, 21 nt, Human
ugucagcaacaauacuuucuc

SEQ ID NO: 1085220 - RNA, 22 nt, Human
cagaggccuauccaguguccau

SEQ ID NO: 1085221 - RNA, 22 nt, Human
uuuacaguuaagaaauguuacc

SEQ ID NO: 1085222 - RNA, 22 nt, Human
uauuucucuucaaaauugaugu

SEQ ID NO: 1085223 - RNA, 22 nt, Human
uugaggagcacuagucagguau

SEQ ID NO: 1085224 - RNA, 22 nt, Human
uaaguuaacccuguuaauagau

SEQ ID NO: 1085225 - RNA, 22 nt, Human
ggacuucuaagugccagacacu

SEQ ID NO: 1085226 - RNA, 22 nt, Human
agccucucuuuauucccagcua

SEQ ID NO: 1085227 - RNA, 20 nt, Human
uaaaugcaugaauguaaggc

SEQ ID NO: 1085228 - RNA, 22 nt, Human
cugagccaguagucagggacaa

SEQ ID NO: 1085229 - RNA, 22 nt, Human
uuguuaaaaauagauuuccagg

SEQ ID NO: 1085230 - RNA, 22 nt, Human
accaugccaguggcagccagac

SEQ ID NO: 1085231 - RNA, 22 nt, Human
uuuguaaaauuagggaauucaa

SEQ ID NO: 1085232 - RNA, 22 nt, Human
ucugcugugauuugcuaccugu

SEQ ID NO: 1085233 - RNA, 22 nt, Human
cagguacacaggacaaaguacu

SEQ ID NO: 1085234 - RNA, 22 nt, Human
aacaacugcuaagguguguccu

SEQ ID NO: 1085235 - RNA, 22 nt, Human
agcagugaguaacacagaccag

SEQ ID NO: 1085236 - RNA, 21 nt, Human
cucugcccagggccuccugcc

SEQ ID NO: 1085237 - RNA, 22 nt, Human
cuggccaacuugcuuguuggca

SEQ ID NO: 1085238 - RNA, 22 nt, Human
gagagugaggcaucaggggcag

SEQ ID NO: 1085239 - RNA, 22 nt, Human
ucuuuucuugcauuauugcacu

SEQ ID NO: 1085240 - RNA, 22 nt, Human
ugagcccagucugucugacaug

SEQ ID NO: 1085241 - RNA, 22 nt, Human
ucccacacagcccgcucaccgg

SEQ ID NO: 1085242 - RNA, 22 nt, Human
uugaaauccaauuaucauaugu

SEQ ID NO: 1085243 - RNA, 22 nt, Human
gggcacugugcuaggugcugag

SEQ ID NO: 1085244 - RNA, 22 nt, Human
ucauuucuaucuaugcagcuuc

SEQ ID NO: 1085245 - RNA, 22 nt, Human
agcucuuuugugagcauuuggc

SEQ ID NO: 1085246 - RNA, 22 nt, Human
uugaaacauucuccuauugauu

SEQ ID NO: 1085247 - RNA, 22 nt, Human
ugucauuaugaggauuacaaua

SEQ ID NO: 1085248 - RNA, 22 nt, Human
uuuacaaccucauauucugaug

SEQ ID NO: 1085249 - RNA, 22 nt, Human
cacaugaagagagucuaguaau

SEQ ID NO: 1085250 - RNA, 22 nt, Human
gugggggagaugcuuagguccg

SEQ ID NO: 1085251 - RNA, 22 nt, Human
uuucuucuugauuuaaacaggg

SEQ ID NO: 1085252 - RNA, 22 nt, Human
guauuucaucuugaaaaccagu

SEQ ID NO: 1085253 - RNA, 22 nt, Human
augcugugucaccuuaggauuu

SEQ ID NO: 1085254 - RNA, 22 nt, Human
ccuccugggacucauuagcacc

SEQ ID NO: 1085255 - RNA, 22 nt, Human
ggggaugguggcauuuguaaaa

SEQ ID NO: 1085256 - RNA, 22 nt, Human
ccugggcucugaggagggaguc

SEQ ID NO: 1085257 - RNA, 22 nt, Human
cugggccuggggcuguugagag

SEQ ID NO: 1085258 - RNA, 22 nt, Human
gcugccagccaacuugcugugc

SEQ ID NO: 1085259 - RNA, 22 nt, Human
agcuaguucacugaagccuaug

SEQ ID NO: 1085260 - RNA, 22 nt, Human
acuuucucaggaauucacagac

SEQ ID NO: 1085261 - RNA, 22 nt, Human
ggaugcugggagacagcaggca

SEQ ID NO: 1085262 - RNA, 22 nt, Human
gccaggcuguggggaacuugaa

SEQ ID NO: 1085263 - RNA, 23 nt, Human
ucucagugaaucucagaauucgc

SEQ ID NO: 1085264 - RNA, 22 nt, Human
ugcugccaccccucaccagagc

SEQ ID NO: 1085265 - RNA, 22 nt, Human
uuacagauucaagcucuuugaa

SEQ ID NO: 1085266 - RNA, 22 nt, Human
guuccugggccugcauucacca

SEQ ID NO: 1085267 - RNA, 22 nt, Human
agagcaaagggacauggaagag

SEQ ID NO: 1085268 - RNA, 21 nt, Human
aguuuuuacucuuaacugugg

SEQ ID NO: 1085269 - RNA, 22 nt, Human
ccagcuaguaagcaccugcauc

SEQ ID NO: 1085270 - RNA, 18 nt, Human
uguaaacacuuucauucu

SEQ ID NO: 1085271 - RNA, 22 nt, Human
gccaccagugggggccugggca

SEQ ID NO: 1085272 - RNA, 22 nt, Human
aggaggccgauuucagaggucg

SEQ ID NO: 1085273 - RNA, 22 nt, Human
uuucagaaauggcacugaaauc

SEQ ID NO: 1085274 - RNA, 23 nt, Human
ccagcugugccuggcccaggagc

SEQ ID NO: 1085275 - RNA, 22 nt, Human
acaggccugacacacagagggc

SEQ ID NO: 1085276 - RNA, 22 nt, Human
cccagagucacaugggguguuc

SEQ ID NO: 1085277 - RNA, 22 nt, Human
auuguugggucucacuccuaga

SEQ ID NO: 1085278 - RNA, 22 nt, Human
ggagccagugcccucuggugga

SEQ ID NO: 1085279 - RNA, 22 nt, Human
gccugagcuacuagggagucug

SEQ ID NO: 1085280 - RNA, 22 nt, Human
cagccuggauugcagaaugcua

SEQ ID NO: 1085281 - RNA, 22 nt, Human
aagauuuucucaacuguauuug

SEQ ID NO: 1085282 - RNA, 22 nt, Human
caugacacccaggcauagcacc

SEQ ID NO: 1085283 - RNA, 22 nt, Human
aggagcuguuuuguucagcaaa

SEQ ID NO: 1085284 - RNA, 20 nt, Human
ugcagcugguuucacaggga

SEQ ID NO: 1085285 - RNA, 22 nt, Human
auuaacagaauuuuacaugcuu

SEQ ID NO: 1085286 - RNA, 21 nt, Human
ugauuucugccaaguucacua

SEQ ID NO: 1085287 - RNA, 22 nt, Human
acuucaugaacuaagggaucgg

SEQ ID NO: 1085288 - RNA, 22 nt, Human
cuucagcuaggaucccugcagc

SEQ ID NO: 1085289 - RNA, 22 nt, Human
agccuccuguagcccucaccca

SEQ ID NO: 1085290 - RNA, 22 nt, Human
ccacagaaccucagcuuugagc

SEQ ID NO: 1085291 - RNA, 22 nt, Human
cauguggcuuuggcaugugccc

SEQ ID NO: 1085292 - RNA, 22 nt, Human
gcagauggagacgagguuccgc

SEQ ID NO: 1085293 - RNA, 22 nt, Human
gccagcccagcuccaggggaaa

SEQ ID NO: 1085294 - RNA, 22 nt, Human
ggguguguuccuaaggaaacca

SEQ ID NO: 1085295 - RNA, 22 nt, Human
cuucugcaauaaguuuuggucc

SEQ ID NO: 1085296 - RNA, 22 nt, Human
gugcugcgaugauuuuacagag

SEQ ID NO: 1085297 - RNA, 22 nt, Human
cagcaauaaugucuacaaaucu

SEQ ID NO: 1085298 - RNA, 22 nt, Human
uaagaaguguugccuaaugcaa

SEQ ID NO: 1085299 - RNA, 22 nt, Human
agguggggccaaaugcuacagu

SEQ ID NO: 1085300 - RNA, 22 nt, Human
guuucuuauuucaacuggaaca

SEQ ID NO: 1085301 - RNA, 22 nt, Human
agggcagccucucagccuaggu

SEQ ID NO: 1085302 - RNA, 22 nt, Human
agaaguuuguuauguaaacaaa

SEQ ID NO: 1085303 - RNA, 22 nt, Human
gcugugcagauguagggagugg

SEQ ID NO: 1085304 - RNA, 22 nt, Human
uacagaguuuuccugccaagaa

SEQ ID NO: 1085305 - RNA, 21 nt, Human
ucucccaaggagguccugagg

SEQ ID NO: 1085306 - RNA, 22 nt, Human
gcuuuacagagaaaguuugccu

SEQ ID NO: 1085307 - RNA, 22 nt, Human
agcucugguuauugaagcaggg

SEQ ID NO: 1085308 - RNA, 22 nt, Human
uggagccaaggccaguucucag

SEQ ID NO: 1085309 - RNA, 22 nt, Human
ccugccugguguaagucuaagg

SEQ ID NO: 1085310 - RNA, 22 nt, Human
cugaaggauuagagagcacuua

SEQ ID NO: 1085311 - RNA, 22 nt, Human
uuacaugaugauuucauaaaca

SEQ ID NO: 1085312 - RNA, 20 nt, Human
agagccuugaggaagaugau

SEQ ID NO: 1085313 - RNA, 22 nt, Human
gagaauuagggcguaauucaga

SEQ ID NO: 1085314 - RNA, 22 nt, Human
gucacaggccuggaugaggggc

SEQ ID NO: 1085315 - RNA, 22 nt, Human
caggagguuguaagagcaggcc

SEQ ID NO: 1085316 - RNA, 22 nt, Human
cuguguccugcgucaagccaau

SEQ ID NO: 1085317 - RNA, 22 nt, Human
caugauaacacuucuguuuaau

SEQ ID NO: 1085318 - RNA, 22 nt, Human
cagcuuugauucuuucugccau

SEQ ID NO: 1085319 - RNA, 22 nt, Human
uaagaccaguaugcauuuucac

SEQ ID NO: 1085320 - RNA, 22 nt, Human
uugaaaggccuguuuauccagc

SEQ ID NO: 1085321 - RNA, 22 nt, Human
uaauguuuuucucaacauugcu

SEQ ID NO: 1085322 - RNA, 22 nt, Human
gccucuagggcuguugggaauu

SEQ ID NO: 1085323 - RNA, 22 nt, Human
gauuaaaaauaacccaugcuga

SEQ ID NO: 1085324 - RNA, 22 nt, Human
guuuuccacuggauuguuugga

SEQ ID NO: 1085325 - RNA, 22 nt, Human
ggcacacaaaggcagcauuuga

SEQ ID NO: 1085326 - RNA, 22 nt, Human
ggcagccaugcacgcugccugg

SEQ ID NO: 1085327 - RNA, 22 nt, Human
uucuuaggagcauuaguaauuu

SEQ ID NO: 1085328 - RNA, 22 nt, Human
gugcuuccccaagccacagccu

SEQ ID NO: 1085329 - RNA, 22 nt, Human
aaggcagcaugaaucccuguac

SEQ ID NO: 1085330 - RNA, 22 nt, Human
acugaacauaugcaagaccauu

SEQ ID NO: 1085331 - RNA, 22 nt, Human
uucuuuuuggauagcugaugaa

SEQ ID NO: 1085332 - RNA, 22 nt, Human
agacccucuccucauggacaug

SEQ ID NO: 1085333 - RNA, 18 nt, Human
caugggugacagguggau

SEQ ID NO: 1085334 - RNA, 22 nt, Human
caggccacaaguuggguucaag

SEQ ID NO: 1085335 - RNA, 22 nt, Human
agcuaugguaaucauccaccaa

SEQ ID NO: 1085336 - RNA, 22 nt, Human
gaaacaacuacuauugauuucu

SEQ ID NO: 1085337 - RNA, 22 nt, Human
uacagaaaaacuuggaggcuuu

SEQ ID NO: 1085338 - RNA, 22 nt, Human
ucuucauguugcuguagggaga

SEQ ID NO: 1085339 - RNA, 22 nt, Human
gcguggugcugcccugcacaca

SEQ ID NO: 1085340 - RNA, 18 nt, Human
ugagagugugugcucuug

SEQ ID NO: 1085341 - RNA, 19 nt, Human
ugagaaggcaguggggagc

SEQ ID NO: 1085342 - RNA, 22 nt, Human
gcugggcuucucaaugcugccu

SEQ ID NO: 1085343 - RNA, 22 nt, Human
gucuccaguguucaggugacug

SEQ ID NO: 1085344 - RNA, 22 nt, Human
uagacacauccguggaagcuuc

SEQ ID NO: 1085345 - RNA, 20 nt, Human
uccaguggccugaaucugga

SEQ ID NO: 1085346 - RNA, 22 nt, Human
agagugguacuucuuuuucuuc

SEQ ID NO: 1085347 - RNA, 22 nt, Human
aaauuuguauuccuuuuccgua

SEQ ID NO: 1085348 - RNA, 22 nt, Human
cggcagagcggcgagccccucc

SEQ ID NO: 1085349 - RNA, 22 nt, Human
gugucauuaaccaccaugcaaa

SEQ ID NO: 1085350 - RNA, 21 nt, Human
agagcugggacuugccugaga

SEQ ID NO: 1085351 - RNA, 21 nt, Human
agcagagugcuuugacuuugu

SEQ ID NO: 1085352 - RNA, 22 nt, Human
acacaugcucauaaauaaauag

SEQ ID NO: 1085353 - RNA, 22 nt, Human
ucaaagacuauauauuuuauuu

SEQ ID NO: 1085354 - RNA, 22 nt, Human
ucacuuauugcucaucucaugc

SEQ ID NO: 1085355 - RNA, 22 nt, Human
uaaaggcaaauguguguuugug

SEQ ID NO: 1085356 - RNA, 23 nt, Human
gcaguggaaugucucuguuugga

SEQ ID NO: 1085357 - RNA, 21 nt, Human
uaaagaagaugaaugugauca

SEQ ID NO: 1085358 - RNA, 22 nt, Human
augcucucuguccugcucagag

SEQ ID NO: 1085359 - RNA, 22 nt, Human
agggcugacacaccuuauccuc

SEQ ID NO: 1085360 - RNA, 22 nt, Human
uaaacagaaugcguaagaagug

SEQ ID NO: 1085361 - RNA, 22 nt, Human
gcuguggccgucagggaaaugg

SEQ ID NO: 1085362 - RNA, 22 nt, Human
ggagggagcauccccuugcuga

SEQ ID NO: 1085363 - RNA, 22 nt, Human
caauguaucaaccagaaaguuc

SEQ ID NO: 1085364 - RNA, 22 nt, Human
uuacauuuuaguuaaccuguga

SEQ ID NO: 1085365 - RNA, 22 nt, Human
caaauucucuuacuguuugaca

SEQ ID NO: 1085366 - RNA, 22 nt, Human
aagugauuuuccuacuugcuaa

SEQ ID NO: 1085367 - RNA, 22 nt, Human
uuauagaucuaaaugugaaggg

SEQ ID NO: 1085368 - RNA, 22 nt, Human
cugaaggacacgugaggagcca

SEQ ID NO: 1085369 - RNA, 22 nt, Human
uaucagaaagauauuacugggg

SEQ ID NO: 1085370 - RNA, 22 nt, Human
agaaaugaauauguagugguua

SEQ ID NO: 1085371 - RNA, 22 nt, Human
aaauacagaguuauggaccuca

SEQ ID NO: 1085372 - RNA, 22 nt, Human
ugagagagccugaaucucuuac

SEQ ID NO: 1085373 - RNA, 22 nt, Human
aacucacagcuguuuggauuag

SEQ ID NO: 1085374 - RNA, 19 nt, Human
cuggcagccugucuguguc

SEQ ID NO: 1085375 - RNA, 22 nt, Human
ggcuguggggccggguacagug

SEQ ID NO: 1085376 - RNA, 22 nt, Human
uauuuggagaugggaucuucaa

SEQ ID NO: 1085377 - RNA, 22 nt, Human
agugaaaugauaguguaaauac

SEQ ID NO: 1085378 - RNA, 22 nt, Human
auccucagcaucuagcaugaag

SEQ ID NO: 1085379 - RNA, 22 nt, Human
gaagaccaauuugggccauggc

SEQ ID NO: 1085380 - RNA, 22 nt, Human
aaguaaaauguuuccuuuauua

SEQ ID NO: 1085381 - RNA, 22 nt, Human
ucaucagucagaacuuaagcuu

SEQ ID NO: 1085382 - RNA, 22 nt, Human
gaggucuuagaagaaaaaucau

SEQ ID NO: 1085383 - RNA, 22 nt, Human
cuggccugaggccgccuucaga

SEQ ID NO: 1085384 - RNA, 22 nt, Human
uccugcacauuaguauuuuuua

SEQ ID NO: 1085385 - RNA, 22 nt, Human
cuucccuuuagcauauaguagu

SEQ ID NO: 1085386 - RNA, 22 nt, Human
uucuuauguucacauaauucca

SEQ ID NO: 1085387 - RNA, 22 nt, Human
ccucuuccacugggccccaucc

SEQ ID NO: 1085388 - RNA, 22 nt, Human
auuugucugcuugcugccuucc

SEQ ID NO: 1085389 - RNA, 22 nt, Human
gcucucugucguuaugcuucau

SEQ ID NO: 1085390 - RNA, 22 nt, Human
ggccaccuuccaguugccugca

SEQ ID NO: 1085391 - RNA, 22 nt, Human
gugaagaugccucaggugaccc

SEQ ID NO: 1085392 - RNA, 22 nt, Human
cucuuucaguucugauagucuc

SEQ ID NO: 1085393 - RNA, 22 nt, Human
ccagaaggcggagauugcagug

SEQ ID NO: 1085394 - RNA, 22 nt, Human
auuuugaaaagcauuugaguaa

SEQ ID NO: 1085395 - RNA, 22 nt, Human
uggcuuccgccgcgggccucgg

SEQ ID NO: 1085396 - RNA, 22 nt, Human
ugcugggggcuuucuggauacc

SEQ ID NO: 1085397 - RNA, 17 nt, Human
uuugaaaggaugucagu

SEQ ID NO: 1085398 - RNA, 22 nt, Human
ucauugcaagcucauuuaucug

SEQ ID NO: 1085399 - RNA, 22 nt, Human
ugccaggcuguccugggccugg

SEQ ID NO: 1085400 - RNA, 22 nt, Human
gcugaggacaucauggaaggaa

SEQ ID NO: 1085401 - RNA, 22 nt, Human
cuucuugcugggggccucagug

SEQ ID NO: 1085402 - RNA, 22 nt, Human
guucuugccagcauccucaggu

SEQ ID NO: 1085403 - RNA, 22 nt, Human
caaaugaagaaccuucucaccu

SEQ ID NO: 1085404 - RNA, 22 nt, Human
caaugauuuuuccauugcagga

SEQ ID NO: 1085405 - RNA, 22 nt, Human
ucuuuuaagccucuggcauagg

SEQ ID NO: 1085406 - RNA, 21 nt, Human
gcagagccugagguucuugag

SEQ ID NO: 1085407 - RNA, 22 nt, Human
caugaacuccaagcuuccuucc

SEQ ID NO: 1085408 - RNA, 22 nt, Human
auacuuuagagcuagauugccu

SEQ ID NO: 1085409 - RNA, 22 nt, Human
cacauauaugaaaugaggaauu

SEQ ID NO: 1085410 - RNA, 15 nt, Human
ugggcagaucacuug

SEQ ID NO: 1085411 - RNA, 22 nt, Human
uuacuacauuguaacacaguac

SEQ ID NO: 1085412 - RNA, 22 nt, Human
accaaggaguuugguauuuuag

SEQ ID NO: 1085413 - RNA, 22 nt, Human
ugcagggccaugguggcggcug

SEQ ID NO: 1085414 - RNA, 22 nt, Human
cagggcacaguuauggaggugg

SEQ ID NO: 1085415 - RNA, 22 nt, Human
cagcacaguagaguaguuguaa

SEQ ID NO: 1085416 - RNA, 22 nt, Human
ugcauauacccgcauuuacaua

SEQ ID NO: 1085417 - RNA, 22 nt, Human
agcagccacacgccuccuucuc

SEQ ID NO: 1085418 - RNA, 20 nt, Human
cucugcagcaaggccugggu

SEQ ID NO: 1085419 - RNA, 22 nt, Human
ccugcagggugcugccacagau

SEQ ID NO: 1085420 - RNA, 22 nt, Human
uccagucaucucccuucacauu

SEQ ID NO: 1085421 - RNA, 18 nt, Human
ccuggcagccaugcgcgc

SEQ ID NO: 1085422 - RNA, 22 nt, Human
uugggccucucaaagugcuggg

SEQ ID NO: 1085423 - RNA, 22 nt, Human
uaaggcacccauguucauacag

SEQ ID NO: 1085424 - RNA, 22 nt, Human
uucaacaucauuguaagccucu

SEQ ID NO: 1085425 - RNA, 22 nt, Human
aagagguugucugugaugaguu

SEQ ID NO: 1085426 - RNA, 22 nt, Human
acaauauacacauccuaauggg

SEQ ID NO: 1085427 - RNA, 22 nt, Human
uccauuaacaccuguacguggc

SEQ ID NO: 1085428 - RNA, 22 nt, Human
gagggcugcugccagauaugcc

SEQ ID NO: 1085429 - RNA, 22 nt, Human
aucuagaacuuaaagucaguca

SEQ ID NO: 1085430 - RNA, 22 nt, Human
aauguuucauucuugcccauug

SEQ ID NO: 1085431 - RNA, 22 nt, Human
uuugaaaguccuaggagagucc

SEQ ID NO: 1085432 - RNA, 22 nt, Human
gccagguggcugagugacugag

SEQ ID NO: 1085433 - RNA, 22 nt, Human
ucaggaacuucuaggaaagcug

SEQ ID NO: 1085434 - RNA, 22 nt, Human
uuucaagcauaacugggaagag

SEQ ID NO: 1085435 - RNA, 22 nt, Human
ugcccaagauucuuacaucaug

SEQ ID NO: 1085436 - RNA, 22 nt, Human
uggcagggaguugcaggauuuc

SEQ ID NO: 1085437 - RNA, 22 nt, Human
cucuggagugcagccugguggc

SEQ ID NO: 1085438 - RNA, 22 nt, Human
acugcuggaaacccagaauggu

SEQ ID NO: 1085439 - RNA, 19 nt, Human
aaacuaaggggaaauguuu

SEQ ID NO: 1085440 - RNA, 22 nt, Human
ucauuucaaguucugacagcua

SEQ ID NO: 1085441 - RNA, 22 nt, Human
acacacaugguauuguucagaa

SEQ ID NO: 1085442 - RNA, 22 nt, Human
aaaccuauauagucuuagaagc

SEQ ID NO: 1085443 - RNA, 22 nt, Human
agcuuccauacuaagacaaaag

SEQ ID NO: 1085444 - RNA, 20 nt, Human
gagauggcuaagugcugaac

SEQ ID NO: 1085445 - RNA, 22 nt, Human
uacauucuggaaaggcacagac

SEQ ID NO: 1085446 - RNA, 18 nt, Human
acaaauguagugucuuaa

SEQ ID NO: 1085447 - RNA, 22 nt, Human
ccugugucagccccugccucca

SEQ ID NO: 1085448 - RNA, 22 nt, Human
uuucacacuagucagaauacca

SEQ ID NO: 1085449 - RNA, 22 nt, Human
uuuucuuuaaucugguggggug

SEQ ID NO: 1085450 - RNA, 22 nt, Human
ugauuuccaguugcugggugcu

SEQ ID NO: 1085451 - RNA, 22 nt, Human
aucugaaauagucuuaucugag

SEQ ID NO: 1085452 - RNA, 22 nt, Human
ccacauuuacugauguauguau

SEQ ID NO: 1085453 - RNA, 22 nt, Human
cucuaaauccaaauaagugucc

SEQ ID NO: 1085454 - RNA, 22 nt, Human
agggcagagcacugaauuggga

SEQ ID NO: 1085455 - RNA, 22 nt, Human
gagcgggaggaacggcucgggc

SEQ ID NO: 1085456 - RNA, 22 nt, Human
aauuccagucucugcucuauuu

SEQ ID NO: 1085457 - RNA, 22 nt, Human
augagcagaugcuccugccucu

SEQ ID NO: 1085458 - RNA, 22 nt, Human
cagauauuaggagcucaauaau

SEQ ID NO: 1085459 - RNA, 22 nt, Human
acagccuggccugaguuaaggc

SEQ ID NO: 1085460 - RNA, 22 nt, Human
ugaacaaauggaaauaaccagu

SEQ ID NO: 1085461 - RNA, 22 nt, Human
uguuucuucucacacaaacuca

SEQ ID NO: 1085462 - RNA, 22 nt, Human
uggcagagagagugcagucgac

SEQ ID NO: 1085463 - RNA, 22 nt, Human
cuagaaaaauacuuuauuguga

SEQ ID NO: 1085464 - RNA, 22 nt, Human
cuugaaagucacaugcagcccu

SEQ ID NO: 1085465 - RNA, 22 nt, Human
cuuguagaauugaaauggucuc

SEQ ID NO: 1085466 - RNA, 22 nt, Human
uuuccuaagggaugcggcucaa

SEQ ID NO: 1085467 - RNA, 23 nt, Human
uccagagugugagcuugccgugc

SEQ ID NO: 1085468 - RNA, 22 nt, Human
uauaauccugcuucacauugaa

SEQ ID NO: 1085469 - RNA, 22 nt, Human
gggcuggagccagcuguggcug

SEQ ID NO: 1085470 - RNA, 22 nt, Human
uggcagcugucuguggggucuc

SEQ ID NO: 1085471 - RNA, 22 nt, Human
cuguguuggcuuuucucuugua

SEQ ID NO: 1085472 - RNA, 20 nt, Human
ugggccuguggcagaagucu

SEQ ID NO: 1085473 - RNA, 22 nt, Human
acaaauguggacauggauaaug

SEQ ID NO: 1085474 - RNA, 22 nt, Human
cuguccuggccgcccuugugag

SEQ ID NO: 1085475 - RNA, 22 nt, Human
uuugugugcuugguauugaaga

SEQ ID NO: 1085476 - RNA, 22 nt, Human
aacacagcuaauuucugucaau

SEQ ID NO: 1085477 - RNA, 22 nt, Human
aacaugcucuggauugcuguga

SEQ ID NO: 1085478 - RNA, 22 nt, Human
ugcaagggcuuagggggcugug

SEQ ID NO: 1085479 - RNA, 22 nt, Human
agggcugaguggugcagucaaa

SEQ ID NO: 1085480 - RNA, 22 nt, Human
uuugucuuguguccuuaggacc

SEQ ID NO: 1085481 - RNA, 22 nt, Human
ucucuucuaauuuucccgagua

SEQ ID NO: 1085482 - RNA, 22 nt, Human
acagugaaugcccaagaaaagu

SEQ ID NO: 1085483 - RNA, 19 nt, Human
aaccaggacaaggggcugg

SEQ ID NO: 1085484 - RNA, 22 nt, Human
ccuuuucuauguaccagcagug

SEQ ID NO: 1085485 - RNA, 22 nt, Human
cuuugaaagcucccaggacuua

SEQ ID NO: 1085486 - RNA, 22 nt, Human
ugauuuccacgugcacccaggu

SEQ ID NO: 1085487 - RNA, 22 nt, Human
agcaugcaggaaccacauggca

SEQ ID NO: 1085488 - RNA, 22 nt, Human
ucucacucauuuccuaggucuu

SEQ ID NO: 1085489 - RNA, 22 nt, Human
cuuggcagagggcugggcucag

SEQ ID NO: 1085490 - RNA, 22 nt, Human
cauuugcaagagauaaauguuu

SEQ ID NO: 1085491 - RNA, 22 nt, Human
gcuuuucuagcuagaacauccg

SEQ ID NO: 1085492 - RNA, 22 nt, Human
caagggcucacggucugcuggg

SEQ ID NO: 1085493 - RNA, 22 nt, Human
ggcacagcacagagcacaugua

SEQ ID NO: 1085494 - RNA, 22 nt, Human
uggcuaggaauccaugacucuc

SEQ ID NO: 1085495 - RNA, 22 nt, Human
aaugguaauauuucauaguugu

SEQ ID NO: 1085496 - RNA, 22 nt, Human
auccaaauauauuuuauucacu

SEQ ID NO: 1085497 - RNA, 22 nt, Human
ucacugcucagucuguacuaca

SEQ ID NO: 1085498 - RNA, 22 nt, Human
cugagacacaguggcugaaaag

SEQ ID NO: 1085499 - RNA, 22 nt, Human
ggggcagcucccgagggcagga

SEQ ID NO: 1085500 - RNA, 22 nt, Human
ugcugggcacugucuagguacu

SEQ ID NO: 1085501 - RNA, 22 nt, Human
gggaccaggucagggcucugac

SEQ ID NO: 1085502 - RNA, 22 nt, Human
uuugacaucaauacccuagaau

SEQ ID NO: 1085503 - RNA, 23 nt, Human
ucucagaggauuccugggccuug

SEQ ID NO: 1085504 - RNA, 19 nt, Human
ucuggagcugaugcaggug

SEQ ID NO: 1085505 - RNA, 22 nt, Human
ccucucucuccugcacacacac

SEQ ID NO: 1085506 - RNA, 22 nt, Human
auauauuugagaauauucauga

SEQ ID NO: 1085507 - RNA, 22 nt, Human
agccaagcaccacuggcacucg

SEQ ID NO: 1085508 - RNA, 22 nt, Human
cagggcagggauguugcggcag

SEQ ID NO: 1085509 - RNA, 22 nt, Human
aaacauuccauuucuauguaag

SEQ ID NO: 1085510 - RNA, 22 nt, Human
ucuggcuccaggaccgggcaca

SEQ ID NO: 1085511 - RNA, 22 nt, Human
ugacacagauuagagacauacc

SEQ ID NO: 1085512 - RNA, 22 nt, Human
ucugggagauccaagcagaacu

SEQ ID NO: 1085513 - RNA, 22 nt, Human
augggguggaguccgggcagcg

SEQ ID NO: 1085514 - RNA, 22 nt, Human
uuucucugaggcuggccucccu

SEQ ID NO: 1085515 - RNA, 22 nt, Human
uggaauuuaguuaauuccauuu

SEQ ID NO: 1085516 - RNA, 22 nt, Human
uuuaaauguuuauagagaguac

SEQ ID NO: 1085517 - RNA, 22 nt, Human
ugaaagggaaccugcuggacug

SEQ ID NO: 1085518 - RNA, 22 nt, Human
uuggucuuguggcaucuuucca

SEQ ID NO: 1085519 - RNA, 22 nt, Human
ucuucaaaauugauuggagaag

SEQ ID NO: 1085520 - RNA, 22 nt, Human
uaagaaauuuaguuauagaaug

SEQ ID NO: 1085521 - RNA, 22 nt, Human
ucaggugggcguuccggugcgg

SEQ ID NO: 1085522 - RNA, 22 nt, Human
gcuggccacauugugccguccu

SEQ ID NO: 1085523 - RNA, 22 nt, Human
agaauauaaagauaauucuguu

SEQ ID NO: 1085524 - RNA, 22 nt, Human
cagagccaaaaccguaacagcc

SEQ ID NO: 1085525 - RNA, 20 nt, Human
ggggcugcaugcagagaaga

SEQ ID NO: 1085526 - RNA, 22 nt, Human
agagggaucacccuguuucugg

SEQ ID NO: 1085527 - RNA, 22 nt, Human
gcuggggaggcagcagagaaca

SEQ ID NO: 1085528 - RNA, 22 nt, Human
cacauuuaagcagauguggacc

SEQ ID NO: 1085529 - RNA, 22 nt, Human
acuggcaguggcagcagaaaga

SEQ ID NO: 1085530 - RNA, 22 nt, Human
aacuauuuuuggagcuaacucu

SEQ ID NO: 1085531 - RNA, 22 nt, Human
uagcucuucauuucaucugauu

SEQ ID NO: 1085532 - RNA, 22 nt, Human
ggacacacaaguuaucuaauga

SEQ ID NO: 1085533 - RNA, 22 nt, Human
uugauaaaaugauaucuucuuu

SEQ ID NO: 1085534 - RNA, 22 nt, Human
cauucaaauuaagauuuuguua

SEQ ID NO: 1085535 - RNA, 22 nt, Human
aaagaugaucuacaaguucauu

SEQ ID NO: 1085536 - RNA, 22 nt, Human
ugcagcaaggggcccugauagg

SEQ ID NO: 1085537 - RNA, 22 nt, Human
ccaggccaaauucagucagcag

SEQ ID NO: 1085538 - RNA, 22 nt, Human
uccaagggcagccauagaacuu

SEQ ID NO: 1085539 - RNA, 22 nt, Human
gcuggccauagaagccaaagag

SEQ ID NO: 1085540 - RNA, 22 nt, Human
ucuucaaagaauuuuaguaauu

SEQ ID NO: 1085541 - RNA, 22 nt, Human
uuuauuccaugugucuaugacc

SEQ ID NO: 1085542 - RNA, 22 nt, Human
ccaguggacuucucccuguggu

SEQ ID NO: 1085543 - RNA, 22 nt, Human
uuuauuauccaguguugucaug

SEQ ID NO: 1085544 - RNA, 22 nt, Human
auggccuggccagagcucugcu

SEQ ID NO: 1085545 - RNA, 22 nt, Human
uauucacagguucuggggauca

SEQ ID NO: 1085546 - RNA, 22 nt, Human
acugccucuuggugcugagaga

SEQ ID NO: 1085547 - RNA, 22 nt, Human
gagcucugccauggcucccacc

SEQ ID NO: 1085548 - RNA, 22 nt, Human
gacacauagaucuaucucacuc

SEQ ID NO: 1085549 - RNA, 22 nt, Human
aaauauguaagauuagcacuag

SEQ ID NO: 1085550 - RNA, 22 nt, Human
gcccagcagaucucagugucuc

SEQ ID NO: 1085551 - RNA, 22 nt, Human
aaaguuagguguggauuucuca

SEQ ID NO: 1085552 - RNA, 22 nt, Human
gagcuagacagcaagggccugc

SEQ ID NO: 1085553 - RNA, 22 nt, Human
cacacacuggagcaaggagaug

SEQ ID NO: 1085554 - RNA, 22 nt, Human
gaucuguuucauucacagucug

SEQ ID NO: 1085555 - RNA, 23 nt, Human
uuggggacaaacaugcuacuuuc

SEQ ID NO: 1085556 - RNA, 22 nt, Human
ucacaagaauuuguagaugaaa

SEQ ID NO: 1085557 - RNA, 22 nt, Human
agcucccaauugacuugaacua

SEQ ID NO: 1085558 - RNA, 22 nt, Human
aggaagagcauucacaugguag

SEQ ID NO: 1085559 - RNA, 22 nt, Human
gaacagcauguaagaagcuacu

SEQ ID NO: 1085560 - RNA, 22 nt, Human
uuguaaacugcugcaggagugc

SEQ ID NO: 1085561 - RNA, 22 nt, Human
cugccucuccccagaguggccc

SEQ ID NO: 1085562 - RNA, 22 nt, Human
aauuuuaucucuaagcaggcuu

SEQ ID NO: 1085563 - RNA, 22 nt, Human
aucugauuuguaauuuuagaaa

SEQ ID NO: 1085564 - RNA, 22 nt, Human
auucuucaccauggauaauuug

SEQ ID NO: 1085565 - RNA, 22 nt, Human
ugguuccaguuuucaauagagc

SEQ ID NO: 1085566 - RNA, 18 nt, Human
uaacauguuuucauuaag

SEQ ID NO: 1085567 - RNA, 22 nt, Human
ugagugugcagggaaguggcgg

SEQ ID NO: 1085568 - RNA, 22 nt, Human
uucuggagggcaugcugcugcc

SEQ ID NO: 1085569 - RNA, 22 nt, Human
uuaugcaaagaaauagacuaau

SEQ ID NO: 1085570 - RNA, 22 nt, Human
acaauuuauccauuguauaguu

SEQ ID NO: 1085571 - RNA, 22 nt, Human
uagggcagccacccaggcugcu

SEQ ID NO: 1085572 - RNA, 22 nt, Human
gccuggcaggccuguuggggcu

SEQ ID NO: 1085573 - RNA, 22 nt, Human
aggccuggccccaguugcuagg

SEQ ID NO: 1085574 - RNA, 22 nt, Human
gccauuuucugucuuguuuauu

SEQ ID NO: 1085575 - RNA, 20 nt, Human
gacaggagaguuagguaggu

SEQ ID NO: 1085576 - RNA, 22 nt, Human
uccaaagaacauugcugagacc

SEQ ID NO: 1085577 - RNA, 22 nt, Human
gaggcucacuuucauccucuuc

SEQ ID NO: 1085578 - RNA, 22 nt, Human
uucaggauaguggugaguggca

SEQ ID NO: 1085579 - RNA, 22 nt, Human
uuuauuuggcaucucugccaag

SEQ ID NO: 1085580 - RNA, 22 nt, Human
ccagccuggggaggcagcuucu

SEQ ID NO: 1085581 - RNA, 22 nt, Human
aaucaguuaggguguuaaugag

SEQ ID NO: 1085582 - RNA, 22 nt, Human
gccugcagauauauaggauggu

SEQ ID NO: 1085583 - RNA, 22 nt, Human
aaagcagucacuccagugugau

SEQ ID NO: 1085584 - RNA, 22 nt, Human
gagggcuguggggcaugaccag

SEQ ID NO: 1085585 - RNA, 22 nt, Human
cagugggugaugaguccugggg

SEQ ID NO: 1085586 - RNA, 19 nt, Human
gaauguuuguauucagcgc

SEQ ID NO: 1085587 - RNA, 22 nt, Human
uguggggcagcuagccggccug

SEQ ID NO: 1085588 - RNA, 22 nt, Human
agcugcugcggaaagaugccac

SEQ ID NO: 1085589 - RNA, 22 nt, Human
ccacauuuacuggaugcucagg

SEQ ID NO: 1085590 - RNA, 22 nt, Human
ugcuucaugcuucugacaauag

SEQ ID NO: 1085591 - RNA, 22 nt, Human
uaggaacacagggacuugauga

SEQ ID NO: 1085592 - RNA, 22 nt, Human
cauucauuuaugaaauaucuau

SEQ ID NO: 1085593 - RNA, 22 nt, Human
aggcagccagauggcagccugc

SEQ ID NO: 1085594 - RNA, 22 nt, Human
agucauauguggcauuuucuaa

SEQ ID NO: 1085595 - RNA, 22 nt, Human
uagcuagagguagauggguuag

SEQ ID NO: 1085596 - RNA, 22 nt, Human
uaguauuuaaucacuuuugucu

SEQ ID NO: 1085597 - RNA, 22 nt, Human
accucagagaccucucaggugc

SEQ ID NO: 1085598 - RNA, 22 nt, Human
ccugagaccaaguugcagccau

SEQ ID NO: 1085599 - RNA, 22 nt, Human
gggcugcuuauacugaugauaa

SEQ ID NO: 1085600 - RNA, 22 nt, Human
cugaggagugggugggcaguga

SEQ ID NO: 1085601 - RNA, 22 nt, Human
acagauguacacucauauauaa

SEQ ID NO: 1085602 - RNA, 22 nt, Human
uuaucauugucgcagucuaauu

SEQ ID NO: 1085603 - RNA, 22 nt, Human
aaggcugugucagaagcucccu

SEQ ID NO: 1085604 - RNA, 22 nt, Human
gguggccugaauuagcucaggg

SEQ ID NO: 1085605 - RNA, 22 nt, Human
uggaggaaaaaaccaggcagag

SEQ ID NO: 1085606 - RNA, 22 nt, Human
ccacagagagugucagccuuug

SEQ ID NO: 1085607 - RNA, 22 nt, Human
acaaguauuggugaggauguag

SEQ ID NO: 1085608 - RNA, 22 nt, Human
ggccucuggucaagacaagcau

SEQ ID NO: 1085609 - RNA, 22 nt, Human
ucucagagaugucaagagucua

SEQ ID NO: 1085610 - RNA, 22 nt, Human
ugcauguuugugucugagaacu

SEQ ID NO: 1085611 - RNA, 22 nt, Human
cuuccucccggcccaugcucug

SEQ ID NO: 1085612 - RNA, 23 nt, Human
ggggccugcaccggucugcgcgg

SEQ ID NO: 1085613 - RNA, 22 nt, Human
ccagguggacggcgaguacagg

SEQ ID NO: 1085614 - RNA, 22 nt, Human
auacagaagccuguauuucugg

SEQ ID NO: 1085615 - RNA, 22 nt, Human
agcaggcuccuuccuucucugg

SEQ ID NO: 1085616 - RNA, 22 nt, Human
agccagcaugaagacagaggcc

SEQ ID NO: 1085617 - RNA, 22 nt, Human
uaucuuuugaguucucaagaug

SEQ ID NO: 1085618 - RNA, 22 nt, Human
cucuggagaugguucucaauug

SEQ ID NO: 1085619 - RNA, 22 nt, Human
ccuggacuguguccugugguca

SEQ ID NO: 1085620 - RNA, 22 nt, Human
cuccugaguaguagcauuguca

SEQ ID NO: 1085621 - RNA, 22 nt, Human
gagcuccaccaccuucaggcag

SEQ ID NO: 1085622 - RNA, 22 nt, Human
aaagccagggacagugugcaug

SEQ ID NO: 1085623 - RNA, 22 nt, Human
ugcaggugccaucgcugcucau

SEQ ID NO: 1085624 - RNA, 22 nt, Human
cucuucaacugccaggcagucu

SEQ ID NO: 1085625 - RNA, 22 nt, Human
gacacagcacuguacaaggaau

SEQ ID NO: 1085626 - RNA, 22 nt, Human
agaaacagaagggaaagcuuuu

SEQ ID NO: 1085627 - RNA, 22 nt, Human
ucccugccugacagcacccacc

SEQ ID NO: 1085628 - RNA, 22 nt, Human
aagaugcacaauguggcaauua

SEQ ID NO: 1085629 - RNA, 22 nt, Human
gagccagagcuacaagugucug

SEQ ID NO: 1085630 - RNA, 22 nt, Human
gggcaugguggcaggcaccugu

SEQ ID NO: 1085631 - RNA, 23 nt, Human
auuuacagguuaaaugaaaucag

SEQ ID NO: 1085632 - RNA, 22 nt, Human
ccagugcuucuuugcuagcugg

SEQ ID NO: 1085633 - RNA, 22 nt, Human
caucccugcccucaugccuaua

SEQ ID NO: 1085634 - RNA, 22 nt, Human
acuaccuuauacaaaauguagg

SEQ ID NO: 1085635 - RNA, 22 nt, Human
aauaagaauugccagauuugaa

SEQ ID NO: 1085636 - RNA, 22 nt, Human
auggaacaggcucagagaugcu

SEQ ID NO: 1085637 - RNA, 22 nt, Human
cagcuggcuggucagugcacaa

SEQ ID NO: 1085638 - RNA, 21 nt, Human
ucuuuucucugcaggauuccu

SEQ ID NO: 1085639 - RNA, 22 nt, Human
caacacagccauuccccuagaa

SEQ ID NO: 1085640 - RNA, 22 nt, Human
guuaaccaaggcaccaagugua

SEQ ID NO: 1085641 - RNA, 22 nt, Human
ugcuggggguucagaugaguaa

SEQ ID NO: 1085642 - RNA, 22 nt, Human
agccucugcuggcccuggcacu

SEQ ID NO: 1085643 - RNA, 22 nt, Human
cugggccugagcucugaagagu

SEQ ID NO: 1085644 - RNA, 22 nt, Human
aggagcugagucagcccgacag

SEQ ID NO: 1085645 - RNA, 23 nt, Human
ugaaaucagaacccuuaccucuc

SEQ ID NO: 1085646 - RNA, 22 nt, Human
caguccaggccuggaggagcca

SEQ ID NO: 1085647 - RNA, 22 nt, Human
cagccagaaccuaggaugagcu

SEQ ID NO: 1085648 - RNA, 22 nt, Human
aagacauuacuggaaucugacu

SEQ ID NO: 1085649 - RNA, 22 nt, Human
uaguggagguggucugugaacu

SEQ ID NO: 1085650 - RNA, 22 nt, Human
uauuuguguggguaucuauaua

SEQ ID NO: 1085651 - RNA, 22 nt, Human
uccugcugugcuuauuauccug

SEQ ID NO: 1085652 - RNA, 20 nt, Human
uaggacaggcagccgagggg

SEQ ID NO: 1085653 - RNA, 20 nt, Human
auacaagaugaguaauuucu

SEQ ID NO: 1085654 - RNA, 22 nt, Human
cauacaagcgugcaugugcuug

SEQ ID NO: 1085655 - RNA, 22 nt, Human
uuugaauagaggccccucagaa

SEQ ID NO: 1085656 - RNA, 22 nt, Human
agccaagcugaucuccugcuga

SEQ ID NO: 1085657 - RNA, 22 nt, Human
gcacacaggggaguucucagaa

SEQ ID NO: 1085658 - RNA, 23 nt, Human
uggcagcagaucuuaaagugacc

SEQ ID NO: 1085659 - RNA, 22 nt, Human
agcugccccaugagaggcaggu

SEQ ID NO: 1085660 - RNA, 22 nt, Human
ugcaccaagucuggcacugaau

SEQ ID NO: 1085661 - RNA, 22 nt, Human
ugggcccugacuucaagcaucc

SEQ ID NO: 1085662 - RNA, 22 nt, Human
uccucagggggccaacccagcc

SEQ ID NO: 1085663 - RNA, 22 nt, Human
ucccacauaugcaauccugaau

SEQ ID NO: 1085664 - RNA, 22 nt, Human
aaauggcaacagaagggaguuc

SEQ ID NO: 1085665 - RNA, 22 nt, Human
ucugggcuuggauuggcucugc

SEQ ID NO: 1085666 - RNA, 22 nt, Human
aaacugaauucccaagggcaug

SEQ ID NO: 1085667 - RNA, 22 nt, Human
uccaucaccacagaggacagag

SEQ ID NO: 1085668 - RNA, 22 nt, Human
ucucagagggaggauuacugcc

SEQ ID NO: 1085669 - RNA, 22 nt, Human
cagccugcauuuguaucuguau

SEQ ID NO: 1085670 - RNA, 22 nt, Human
guucacagggauccuuguugaa

SEQ ID NO: 1085671 - RNA, 22 nt, Human
gcuuacacuaaacaaguuuccu

SEQ ID NO: 1085672 - RNA, 22 nt, Human
cuguggugagcaacugacugaa

SEQ ID NO: 1085673 - RNA, 22 nt, Human
agcaaauaaagacaauuauguc

SEQ ID NO: 1085674 - RNA, 22 nt, Human
gguggcucucugucagugacag

SEQ ID NO: 1085675 - RNA, 22 nt, Human
cugagggucaacuugauuguau

SEQ ID NO: 1085676 - RNA, 22 nt, Human
cacacaugugugcagcuuagaa

SEQ ID NO: 1085677 - RNA, 23 nt, Human
uggcccugugcaugcugcuuccc

SEQ ID NO: 1085678 - RNA, 22 nt, Human
ccaggaaggaagcagggguuuc

SEQ ID NO: 1085679 - RNA, 22 nt, Human
ucuuccuaugccaacauucugu

SEQ ID NO: 1085680 - RNA, 22 nt, Human
uacagaaauugccaccagcucu

SEQ ID NO: 1085681 - RNA, 22 nt, Human
ugcagucuggauguccucagau

SEQ ID NO: 1085682 - RNA, 22 nt, Human
aauuuuaagcauaugacugguu

SEQ ID NO: 1085683 - RNA, 22 nt, Human
gugcucuguguauuaggauguc

SEQ ID NO: 1085684 - RNA, 22 nt, Human
uuguaaggguuacaagaaaaca

SEQ ID NO: 1085685 - RNA, 22 nt, Human
cucugcauuuuaacagaugauu

SEQ ID NO: 1085686 - RNA, 22 nt, Human
aggcaguggagcuggaauaggc

SEQ ID NO: 1085687 - RNA, 20 nt, Human
ucuguuauugcauguacaua

SEQ ID NO: 1085688 - RNA, 22 nt, Human
gugaagcauaacugaaggauuu

SEQ ID NO: 1085689 - RNA, 22 nt, Human
cagugguugguagauacuugag

SEQ ID NO: 1085690 - RNA, 23 nt, Human
uccuccugacacagccugaguga

SEQ ID NO: 1085691 - RNA, 22 nt, Human
aggugggguguuggauguuuau

SEQ ID NO: 1085692 - RNA, 22 nt, Human
uucuggggcuaauacagagguc

SEQ ID NO: 1085693 - RNA, 22 nt, Human
ugcugggccucuucccuggaua

SEQ ID NO: 1085694 - RNA, 22 nt, Human
uuuggaaaguguacaaauuuga

SEQ ID NO: 1085695 - RNA, 22 nt, Human
gagcugcugguugcuggugccu

SEQ ID NO: 1085696 - RNA, 22 nt, Human
cucacugcccugaaguuggguu

SEQ ID NO: 1085697 - RNA, 20 nt, Human
agugacagagacuguguggc

SEQ ID NO: 1085698 - RNA, 22 nt, Human
ccacugcccccugaagaccagg

SEQ ID NO: 1085699 - RNA, 22 nt, Human
gugugccaacaaaagacagugc

SEQ ID NO: 1085700 - RNA, 22 nt, Human
ugccagcuccgaggagcugcag

SEQ ID NO: 1085701 - RNA, 22 nt, Human
ugaguggagaacagaggcucuc

SEQ ID NO: 1085702 - RNA, 22 nt, Human
ggaagacaagcaguggcugagc

SEQ ID NO: 1085703 - RNA, 22 nt, Human
caagcagagaagucucuaggcu

SEQ ID NO: 1085704 - RNA, 20 nt, Human
ggcugccuccuuccuuuccu

SEQ ID NO: 1085705 - RNA, 22 nt, Human
uaaauuaaagauuggagaagga

SEQ ID NO: 1085706 - RNA, 22 nt, Human
aagauuaaaggggagacaagcu

SEQ ID NO: 1085707 - RNA, 22 nt, Human
acuuccagaggguguggaaaua

SEQ ID NO: 1085708 - RNA, 22 nt, Human
uggcagcuccuggggccagcac

SEQ ID NO: 1085709 - RNA, 22 nt, Human
auggaaaggcuguggaaacuua

SEQ ID NO: 1085710 - RNA, 22 nt, Human
gaaucacagaggcaaauucuga

SEQ ID NO: 1085711 - RNA, 22 nt, Human
cucagaauuuagggcucugagg

SEQ ID NO: 1085712 - RNA, 22 nt, Human
uggagcagggcaucacugugcg

SEQ ID NO: 1085713 - RNA, 22 nt, Human
cuauuucagcugccuuugacug

SEQ ID NO: 1085714 - RNA, 22 nt, Human
ucuggccugggccugccggugc

SEQ ID NO: 1085715 - RNA, 22 nt, Human
uuucaagagggaacugaacaca

SEQ ID NO: 1085716 - RNA, 22 nt, Human
ucucugagcccagugucccccu

SEQ ID NO: 1085717 - RNA, 22 nt, Human
uuuaauuuucugggcccagcag

SEQ ID NO: 1085718 - RNA, 18 nt, Human
gcagcugacacuggaguu

SEQ ID NO: 1085719 - RNA, 23 nt, Human
uccccucaggcagccagugcccu

SEQ ID NO: 1085720 - RNA, 22 nt, Human
auggcagaccuccuggccacaa

SEQ ID NO: 1085721 - RNA, 22 nt, Human
ccaggcuccccaggaggcccuu

SEQ ID NO: 1085722 - RNA, 22 nt, Human
cagugaaguguggacgucacca

SEQ ID NO: 1085723 - RNA, 22 nt, Human
gccagagccacuuuugggugau

SEQ ID NO: 1085724 - RNA, 22 nt, Human
ggcacugagcgggcucugagcg

SEQ ID NO: 1085725 - RNA, 22 nt, Human
uuugcauuugcaaauaaugaaa

SEQ ID NO: 1085726 - RNA, 22 nt, Human
aaucagaacuccuaccacagag

SEQ ID NO: 1085727 - RNA, 22 nt, Human
ucugggcugucuacagguuggc

SEQ ID NO: 1085728 - RNA, 20 nt, Human
ucugaggcugagcucuacuu

SEQ ID NO: 1085729 - RNA, 22 nt, Human
uacagcuugacccauaaugucu

SEQ ID NO: 1085730 - RNA, 22 nt, Human
gcaaguuauuuccauuuaaagc

SEQ ID NO: 1085731 - RNA, 22 nt, Human
gaaaucugaaucuucuguuggu

SEQ ID NO: 1085732 - RNA, 22 nt, Human
aucagaaaucuaggauucagaa

SEQ ID NO: 1085733 - RNA, 22 nt, Human
cuucaagauauuucuagaauca

SEQ ID NO: 1085734 - RNA, 17 nt, Human
aagauuucauuagcuga

SEQ ID NO: 1085735 - RNA, 22 nt, Human
aacuucagggacagaaaagagc

SEQ ID NO: 1085736 - RNA, 21 nt, Human
ugaggcucaucuuauguggcu

SEQ ID NO: 1085737 - RNA, 19 nt, Human
agucucaguguacagaggc

SEQ ID NO: 1085738 - RNA, 22 nt, Human
aagagcaggcugcuguggagua

SEQ ID NO: 1085739 - RNA, 19 nt, Human
caucuggaugauucuccug

SEQ ID NO: 1085740 - RNA, 22 nt, Human
uauuuggaaauagggcuuugua

SEQ ID NO: 1085741 - RNA, 22 nt, Human
aggaagccuggggcugcccucg

SEQ ID NO: 1085742 - RNA, 22 nt, Human
uaagacauuugaaaugugaucc

SEQ ID NO: 1085743 - RNA, 22 nt, Human
ucugucugagggagugacauuu

SEQ ID NO: 1085744 - RNA, 22 nt, Human
gcugccacauuuucaggacuaa

SEQ ID NO: 1085745 - RNA, 22 nt, Human
aaagagcuucauuuccauuuau

SEQ ID NO: 1085746 - RNA, 22 nt, Human
ucuuugaaguaucuuaaauggu

SEQ ID NO: 1085747 - RNA, 22 nt, Human
gcagggcugcugaaacuuguuu

SEQ ID NO: 1085748 - RNA, 20 nt, Human
cccucugcacauggcugugg

SEQ ID NO: 1085749 - RNA, 20 nt, Human
aaucagaaagugugagcucu

SEQ ID NO: 1085750 - RNA, 22 nt, Human
aacuguaaggcuuagaacagca

SEQ ID NO: 1085751 - RNA, 22 nt, Human
gccuggcccagggcuccgcagg

SEQ ID NO: 1085752 - RNA, 22 nt, Human
acagagaaagugggcugaagau

SEQ ID NO: 1085753 - RNA, 22 nt, Human
ggggaaaggccauggcaagaac

SEQ ID NO: 1085754 - RNA, 22 nt, Human
uuauguaccugaauuaguaaag

SEQ ID NO: 1085755 - RNA, 22 nt, Human
ugaaaucagugguauaaucggg

SEQ ID NO: 1085756 - RNA, 22 nt, Human
uuugaaagccuggcuuuucucu

SEQ ID NO: 1085757 - RNA, 22 nt, Human
uucagaaugacuuauguaaggc

SEQ ID NO: 1085758 - RNA, 22 nt, Human
uucucugaaggccaugcucacu

SEQ ID NO: 1085759 - RNA, 22 nt, Human
ccaggggaaacagggagcacuc

SEQ ID NO: 1085760 - RNA, 22 nt, Human
aggaaugacuuguagcucugag

SEQ ID NO: 1085761 - RNA, 22 nt, Human
gucuuuaugguaugaaaacuga

SEQ ID NO: 1085762 - RNA, 22 nt, Human
ggacacagauaaucacacagau

SEQ ID NO: 1085763 - RNA, 22 nt, Human
ggcagaggagcuggaaacaugg

SEQ ID NO: 1085764 - RNA, 22 nt, Human
aggcccuguuaugagccacugu

SEQ ID NO: 1085765 - RNA, 21 nt, Human
ccuggcugcacaguugcuggu

SEQ ID NO: 1085766 - RNA, 22 nt, Human
aacaucuucagagaagcuaagu

SEQ ID NO: 1085767 - RNA, 22 nt, Human
aaaugacaauaaaaguccaugc

SEQ ID NO: 1085768 - RNA, 22 nt, Human
ugggcuacucugggagccuaac

SEQ ID NO: 1085769 - RNA, 22 nt, Human
agcaugaaaggcgugccaacuu

SEQ ID NO: 1085770 - RNA, 22 nt, Human
guuuccuacacuguaguauuau

SEQ ID NO: 1085771 - RNA, 22 nt, Human
cucugcccucacuuggggccug

SEQ ID NO: 1085772 - RNA, 20 nt, Human
ugugggccuucggcgugcuc

SEQ ID NO: 1085773 - RNA, 22 nt, Human
aggugucuuugcggcccgccgc

SEQ ID NO: 1085774 - RNA, 23 nt, Human
auuuuuagccucucugagcugag

SEQ ID NO: 1085775 - RNA, 22 nt, Human
caguuauuaugaggucauuagg

SEQ ID NO: 1085776 - RNA, 20 nt, Human
aggcugccaggucucacauc

SEQ ID NO: 1085777 - RNA, 22 nt, Human
aaaacaguuuuugcuaacugcu

SEQ ID NO: 1085778 - RNA, 22 nt, Human
aauuuguuaaaagugagugaca

SEQ ID NO: 1085779 - RNA, 22 nt, Human
uccugagaggugugaggugcag

SEQ ID NO: 1085780 - RNA, 22 nt, Human
uuucuuuugcccuguggguuag

SEQ ID NO: 1085781 - RNA, 22 nt, Human
uuccugugccucaggucucagc

SEQ ID NO: 1085782 - RNA, 22 nt, Human
ugaggcucaagaaucugcauuu

SEQ ID NO: 1085783 - RNA, 22 nt, Human
caaggaaucccauuucuaacuc

SEQ ID NO: 1085784 - RNA, 21 nt, Human
gagcugcaccuugaccuguuu

SEQ ID NO: 1085785 - RNA, 20 nt, Human
cagaaugcuguaaucaagaa

SEQ ID NO: 1085786 - RNA, 22 nt, Human
ucacacagcagccccggguguu

SEQ ID NO: 1085787 - RNA, 22 nt, Human
aggcugcuucagcugcagggag

SEQ ID NO: 1085788 - RNA, 22 nt, Human
ccuggcucugccguaaccacca

SEQ ID NO: 1085789 - RNA, 22 nt, Human
augaguaagugaaucuccaaag

SEQ ID NO: 1085790 - RNA, 22 nt, Human
uugguucauugcaggcgccggg

SEQ ID NO: 1085791 - RNA, 22 nt, Human
aucuucaucaaguucacagugg

SEQ ID NO: 1085792 - RNA, 22 nt, Human
ugacuggauugucauuacgacg

SEQ ID NO: 1085793 - RNA, 22 nt, Human
uaaaaucaccaaaagcaggugg

SEQ ID NO: 1085794 - RNA, 22 nt, Human
ccugucugaaggcagggggaug

SEQ ID NO: 1085795 - RNA, 22 nt, Human
aagcacauuaaggaacauugaa

SEQ ID NO: 1085796 - RNA, 22 nt, Human
ugaguagggguagaaaguuuag

SEQ ID NO: 1085797 - RNA, 22 nt, Human
caagaauaaccagacaauagca

SEQ ID NO: 1085798 - RNA, 22 nt, Human
gagacugcauuguccaaggguu

SEQ ID NO: 1085799 - RNA, 22 nt, Human
uuucauaaacaguagaagacua

SEQ ID NO: 1085800 - RNA, 22 nt, Human
aaguguuucuuggaauguugcg

SEQ ID NO: 1085801 - RNA, 22 nt, Human
accccagcucugagccacacca

SEQ ID NO: 1085802 - RNA, 22 nt, Human
cuggggugucucgucugccauu

SEQ ID NO: 1085803 - RNA, 22 nt, Human
ucagauggaaagguuacugucc

SEQ ID NO: 1085804 - RNA, 22 nt, Human
caggaaaugggucguuuuauaa

SEQ ID NO: 1085805 - RNA, 21 nt, Human
cagagcuguccaaacccugac

SEQ ID NO: 1085806 - RNA, 20 nt, Human
accaauguuagcuuaguacu

SEQ ID NO: 1085807 - RNA, 22 nt, Human
cucagaagccuucagucuuggc

SEQ ID NO: 1085808 - RNA, 22 nt, Human
agugucugccaacugcaugguc

SEQ ID NO: 1085809 - RNA, 22 nt, Human
ugcuuuauuaagagagaaauuu

SEQ ID NO: 1085810 - RNA, 22 nt, Human
aaagucugaaagauaagaguga

SEQ ID NO: 1085811 - RNA, 22 nt, Human
ucacugcugcugccaugaugga

SEQ ID NO: 1085812 - RNA, 22 nt, Human
aaucuucacagagaaaauuagg

SEQ ID NO: 1085813 - RNA, 22 nt, Human
gcugucagcgcccaaggagcuc

SEQ ID NO: 1085814 - RNA, 22 nt, Human
ucccagagaaagucaaggucuu

SEQ ID NO: 1085815 - RNA, 22 nt, Human
uggcucagcauucacuggucuu

SEQ ID NO: 1085816 - RNA, 22 nt, Human
ugcuccauucucuagccagugc

SEQ ID NO: 1085817 - RNA, 22 nt, Human
guaauaaugguccccaaacacu

SEQ ID NO: 1085818 - RNA, 17 nt, Human
gcaguuaaauuaagaug

SEQ ID NO: 1085819 - RNA, 22 nt, Human
guuuuauaggcuguugcuauau

SEQ ID NO: 1085820 - RNA, 22 nt, Human
cacagaagaaucaugcuguguu

SEQ ID NO: 1085821 - RNA, 22 nt, Human
gcugugaguggaguucugugcu

SEQ ID NO: 1085822 - RNA, 22 nt, Human
ucucaggaucuaauacauggua

SEQ ID NO: 1085823 - RNA, 22 nt, Human
ccucagggucugaggagaccgu

SEQ ID NO: 1085824 - RNA, 22 nt, Human
auuuugauaaucauguuagaga

SEQ ID NO: 1085825 - RNA, 22 nt, Human
uugaagcaugguacuuguucaa

SEQ ID NO: 1085826 - RNA, 22 nt, Human
uggcucugcugaaccuagugca

SEQ ID NO: 1085827 - RNA, 22 nt, Human
auguccuuccauuuugaucugu

SEQ ID NO: 1085828 - RNA, 22 nt, Human
cccaggaaguugaugcagagga

SEQ ID NO: 1085829 - RNA, 22 nt, Human
ucccugggccacagcugugagc

SEQ ID NO: 1085830 - RNA, 22 nt, Human
ggccugugucugugccuguccu

SEQ ID NO: 1085831 - RNA, 22 nt, Human
ggaaagagcuaaaagggugaga

SEQ ID NO: 1085832 - RNA, 20 nt, Human
auacaaagagauugauguau

SEQ ID NO: 1085833 - RNA, 22 nt, Human
ggcaggaagcauuaaaacgauu

SEQ ID NO: 1085834 - RNA, 22 nt, Human
gguggccuccagggcauaggug

SEQ ID NO: 1085835 - RNA, 22 nt, Human
auaaacacuucuagggcacaca

SEQ ID NO: 1085836 - RNA, 22 nt, Human
ucucaauauuauaugucauaaa

SEQ ID NO: 1085837 - RNA, 22 nt, Human
aaguuuauguucuuugaaggca

SEQ ID NO: 1085838 - RNA, 22 nt, Human
agcuccagccucuucuggaggu

SEQ ID NO: 1085839 - RNA, 22 nt, Human
ugaggaugacgauggcaauggc

SEQ ID NO: 1085840 - RNA, 22 nt, Human
acacagagggcagaagauacau

SEQ ID NO: 1085841 - RNA, 22 nt, Human
gaaauauuucucuugagccccu

SEQ ID NO: 1085842 - RNA, 22 nt, Human
aucauacauacaugguccucag

SEQ ID NO: 1085843 - RNA, 22 nt, Human
cacaauuuguauuuugcaucca

SEQ ID NO: 1085844 - RNA, 22 nt, Human
guguguccaggcgggagucaag

SEQ ID NO: 1085845 - RNA, 22 nt, Human
cagggagggacaauugucaccu

SEQ ID NO: 1085846 - RNA, 22 nt, Human
uuuaaauuauaguuaaugucug

SEQ ID NO: 1085847 - RNA, 22 nt, Human
uccagggacagcgcuggagcua

SEQ ID NO: 1085848 - RNA, 22 nt, Human
gaaaucaugagaucucuuggac

SEQ ID NO: 1085849 - RNA, 19 nt, Human
aucccaucugguuuuuccc

SEQ ID NO: 1085850 - RNA, 22 nt, Human
uuuaauguauucuuuggaacca

SEQ ID NO: 1085851 - RNA, 22 nt, Human
cacagugacuggcacauaguaa

SEQ ID NO: 1085852 - RNA, 22 nt, Human
ucaaauaaugccauucaucauc

SEQ ID NO: 1085853 - RNA, 22 nt, Human
ucacaggacccugaggguggcg

SEQ ID NO: 1085854 - RNA, 22 nt, Human
uugugcaagaagccagcaccaa

SEQ ID NO: 1085855 - RNA, 22 nt, Human
agaauacuaggcuucagaaagg

SEQ ID NO: 1085856 - RNA, 22 nt, Human
uacccucacgagacuucaaguc

SEQ ID NO: 1085857 - RNA, 22 nt, Human
gcccaugcucucaggcgggccu

SEQ ID NO: 1085858 - RNA, 22 nt, Human
uauucacagcugccgcacucag

SEQ ID NO: 1085859 - RNA, 22 nt, Human
uagaaaucagcaggcauaugua

SEQ ID NO: 1085860 - RNA, 22 nt, Human
auaugauuccacuauuguaugg

SEQ ID NO: 1085861 - RNA, 15 nt, Human
gcuucuccagaugac

SEQ ID NO: 1085862 - RNA, 22 nt, Human
uaacagaagaugaaacuucuuu

SEQ ID NO: 1085863 - RNA, 22 nt, Human
auucuuuuguccuagcuugaua

SEQ ID NO: 1085864 - RNA, 19 nt, Human
uuuacaaguucuuuguaug

SEQ ID NO: 1085865 - RNA, 21 nt, Human
cagcagaguaaugcauucgua

SEQ ID NO: 1085866 - RNA, 22 nt, Human
auacacauauguguguauaugu

SEQ ID NO: 1085867 - RNA, 23 nt, Human
uugcuuucaucaugagaugcucc

SEQ ID NO: 1085868 - RNA, 22 nt, Human
caacauauugugggaugagaga

SEQ ID NO: 1085869 - RNA, 22 nt, Human
cagcuggcgggcagagccgcca

SEQ ID NO: 1085870 - RNA, 22 nt, Human
gcagggcuccccaggcccgagg

SEQ ID NO: 1085871 - RNA, 22 nt, Human
agaggggaaggaugugauguga

SEQ ID NO: 1085872 - RNA, 16 nt, Human
ggugggguaguuagaa

SEQ ID NO: 1085873 - RNA, 22 nt, Human
agcaauauuucagcuagcaggu

SEQ ID NO: 1085874 - RNA, 18 nt, Human
ucugucuguacaaguauc

SEQ ID NO: 1085875 - RNA, 22 nt, Human
gccugugccucagccugcagcc

SEQ ID NO: 1085876 - RNA, 22 nt, Human
cuuacagagaagaaaauguagu

SEQ ID NO: 1085877 - RNA, 22 nt, Human
uaaaaccauaaggcuggaagga

SEQ ID NO: 1085878 - RNA, 23 nt, Human
uuguuuaccguaggacuuuuaac

SEQ ID NO: 1085879 - RNA, 22 nt, Human
ucuccugugcacccucccugug

SEQ ID NO: 1085880 - RNA, 17 nt, Human
ggcaggugcggggccgc

SEQ ID NO: 1085881 - RNA, 17 nt, Human
auacaguuuauuuuaca

SEQ ID NO: 1085882 - RNA, 22 nt, Human
ugcugcucaaugagaugccauc

SEQ ID NO: 1085883 - RNA, 22 nt, Human
gcagggcaggauuugaacccag

SEQ ID NO: 1085884 - RNA, 22 nt, Human
ucauugcauuuauucacuggca

SEQ ID NO: 1085885 - RNA, 22 nt, Human
ugaagccacuuuccagaaucac

SEQ ID NO: 1085886 - RNA, 22 nt, Human
uucaaaaguaaucaguauuaga

SEQ ID NO: 1085887 - RNA, 22 nt, Human
gccuaggagacaagcgugaaag

SEQ ID NO: 1085888 - RNA, 22 nt, Human
uggcagggccuaccccaauauc

SEQ ID NO: 1085889 - RNA, 22 nt, Human
auuagaaugcaggguucauugu

SEQ ID NO: 1085890 - RNA, 22 nt, Human
auggacagauuaacacaguaga

SEQ ID NO: 1085891 - RNA, 22 nt, Human
ugggcucauguuucuuugagga

SEQ ID NO: 1085892 - RNA, 22 nt, Human
gggaaggacauucugggcucag

SEQ ID NO: 1085893 - RNA, 22 nt, Human
augaaacucuaacuuaacaagu

SEQ ID NO: 1085894 - RNA, 22 nt, Human
aagacauugcugcuuuuaauug

SEQ ID NO: 1085895 - RNA, 22 nt, Human
aacacugauggaaaguauguuu

SEQ ID NO: 1085896 - RNA, 22 nt, Human
uuuacaaggcaguuauuuuccu

SEQ ID NO: 1085897 - RNA, 22 nt, Human
cagaaauucccauuucagauuc

SEQ ID NO: 1085898 - RNA, 22 nt, Human
uugaucaucuaagaguaauagu

SEQ ID NO: 1085899 - RNA, 22 nt, Human
acacagauauuguacuugaucc

SEQ ID NO: 1085900 - RNA, 22 nt, Human
gcucccaacucaggccuccucc

SEQ ID NO: 1085901 - RNA, 19 nt, Human
ugcagagagaggcaaagaa

SEQ ID NO: 1085902 - RNA, 22 nt, Human
uuucacauauaggggaagcuac

SEQ ID NO: 1085903 - RNA, 22 nt, Human
agccuggcacugaggcagggcg

SEQ ID NO: 1085904 - RNA, 22 nt, Human
auauaaguguguggcuguuagu

SEQ ID NO: 1085905 - RNA, 22 nt, Human
acacuacaaucucagaacuaua

SEQ ID NO: 1085906 - RNA, 22 nt, Human
aaugguaauggagagaacuacu

SEQ ID NO: 1085907 - RNA, 22 nt, Human
gcugcucuacccaugcaucugu

SEQ ID NO: 1085908 - RNA, 22 nt, Human
auguauaugugaaagauguuua

SEQ ID NO: 1085909 - RNA, 22 nt, Human
ggucucagcuggaguccuuggu

SEQ ID NO: 1085910 - RNA, 22 nt, Human
uacagugucugcaacugcacac

SEQ ID NO: 1085911 - RNA, 22 nt, Human
gcagcaggcacggucucgacau

SEQ ID NO: 1085912 - RNA, 21 nt, Human
caguagugcgucgcagaggac

SEQ ID NO: 1085913 - RNA, 22 nt, Human
uagggaggcuacuucuuguagg

SEQ ID NO: 1085914 - RNA, 22 nt, Human
aauaagaucuuaaagguuauau

SEQ ID NO: 1085915 - RNA, 20 nt, Human
ugcguguguauuuauuuucu

SEQ ID NO: 1085916 - RNA, 22 nt, Human
gagggcugcaaugagacagaga

SEQ ID NO: 1085917 - RNA, 22 nt, Human
uccagccaagccuugguagcug

SEQ ID NO: 1085918 - RNA, 23 nt, Human
agaaggugggccugcugaguuau

SEQ ID NO: 1085919 - RNA, 23 nt, Human
ugaaggccuggaggacgcguugu

SEQ ID NO: 1085920 - RNA, 22 nt, Human
uggggugguaauacaccguucu

SEQ ID NO: 1085921 - RNA, 22 nt, Human
ucucugagguuguuuccagcac

SEQ ID NO: 1085922 - RNA, 22 nt, Human
ccaggagcagauauggacauaa

SEQ ID NO: 1085923 - RNA, 22 nt, Human
uccaguggguugcugagggagg

SEQ ID NO: 1085924 - RNA, 22 nt, Human
gggacaauggaggccucucucc

SEQ ID NO: 1085925 - RNA, 22 nt, Human
aaugccucuuggaagaagacuu

SEQ ID NO: 1085926 - RNA, 22 nt, Human
auacuuugcuacauuguacauu

SEQ ID NO: 1085927 - RNA, 22 nt, Human
gucaaacagccuccuguucuaa

SEQ ID NO: 1085928 - RNA, 22 nt, Human
aaagcagccacagagagagcgu

SEQ ID NO: 1085929 - RNA, 22 nt, Human
gauuuccuaauguggaucucug

SEQ ID NO: 1085930 - RNA, 22 nt, Human
uuacacaugaagguccaauguu

SEQ ID NO: 1085931 - RNA, 22 nt, Human
agaguguaauaagggcaagggc

SEQ ID NO: 1085932 - RNA, 22 nt, Human
uagacacaucaaguauaguuaa

SEQ ID NO: 1085933 - RNA, 22 nt, Human
gcuuuauggauuguaaacugca

SEQ ID NO: 1085934 - RNA, 19 nt, Human
aaaccuguuaguagagcac

SEQ ID NO: 1085935 - RNA, 22 nt, Human
aguggcaggcagaagcuucuca

SEQ ID NO: 1085936 - RNA, 22 nt, Human
cuggcagcauggagccugugcu

SEQ ID NO: 1085937 - RNA, 22 nt, Human
aggcacaggccucagcacccag

SEQ ID NO: 1085938 - RNA, 22 nt, Human
uucaacauuuaucaguuuauca

SEQ ID NO: 1085939 - RNA, 22 nt, Human
aagacgggagucaggugagcuc

SEQ ID NO: 1085940 - RNA, 22 nt, Human
cacauugaaccauauauuagug

SEQ ID NO: 1085941 - RNA, 22 nt, Human
auccuugaaugacucugcccuc

SEQ ID NO: 1085942 - RNA, 22 nt, Human
ggauccuuaacuaucacaguga

SEQ ID NO: 1085943 - RNA, 22 nt, Human
uugaaaucaccacuagcauuug

SEQ ID NO: 1085944 - RNA, 22 nt, Human
ccagggcaugggaagaacugaa

SEQ ID NO: 1085945 - RNA, 22 nt, Human
ugggacugcucuugcugggguc

SEQ ID NO: 1085946 - RNA, 22 nt, Human
ucaaaugcaggucuggucuugg

SEQ ID NO: 1085947 - RNA, 22 nt, Human
cuaggaauccuuuuagaguugg

SEQ ID NO: 1085948 - RNA, 22 nt, Human
aaagcacucuauccuuuguaga

SEQ ID NO: 1085949 - RNA, 22 nt, Human
agggccagaguacaucagggcu

SEQ ID NO: 1085950 - RNA, 22 nt, Human
gagagguccauuccccugucag

SEQ ID NO: 1085951 - RNA, 22 nt, Human
gcuggggucugugaggagggcu

SEQ ID NO: 1085952 - RNA, 22 nt, Human
ucugaacauccagcaaugcaca

SEQ ID NO: 1085953 - RNA, 22 nt, Human
uggagcagcaucacuuugagcu

SEQ ID NO: 1085954 - RNA, 22 nt, Human
agaggcacccaguuaagcugca

SEQ ID NO: 1085955 - RNA, 22 nt, Human
ccagccucacuggcaucaccua

SEQ ID NO: 1085956 - RNA, 22 nt, Human
gaggugggaugugugugcuacu

SEQ ID NO: 1085957 - RNA, 18 nt, Human
aaacuggcuuggccugug

SEQ ID NO: 1085958 - RNA, 18 nt, Human
uggcuucugcuagcugga

SEQ ID NO: 1085959 - RNA, 22 nt, Human
acuucauguaguccaucagguu

SEQ ID NO: 1085960 - RNA, 22 nt, Human
uggcucaguggcagccgcagcu

SEQ ID NO: 1085961 - RNA, 17 nt, Human
gugcagggaugaaggau

SEQ ID NO: 1085962 - RNA, 22 nt, Human
ccucuggggguccucagagucu

SEQ ID NO: 1085963 - RNA, 20 nt, Human
auguaaaauuauaaggcuga

SEQ ID NO: 1085964 - RNA, 22 nt, Human
auguuuuacccuuugcacaaac

SEQ ID NO: 1085965 - RNA, 18 nt, Human
uccccugcucuggugcuc

SEQ ID NO: 1085966 - RNA, 22 nt, Human
ccacagaguuacaaaacaguca

SEQ ID NO: 1085967 - RNA, 22 nt, Human
ccucccucccugcagaagccac

SEQ ID NO: 1085968 - RNA, 22 nt, Human
aucagaaucauuucaucccuau

SEQ ID NO: 1085969 - RNA, 22 nt, Human
ugccaggcccucccacagauua

SEQ ID NO: 1085970 - RNA, 22 nt, Human
aguuuuauguucacagaaggau

SEQ ID NO: 1085971 - RNA, 22 nt, Human
gccaguggcccucuggagaagg

SEQ ID NO: 1085972 - RNA, 22 nt, Human
uuuuucuacugcccacauugua

SEQ ID NO: 1085973 - RNA, 22 nt, Human
acaaacuucccagacaagcucc

SEQ ID NO: 1085974 - RNA, 22 nt, Human
gaggaaaaugggacaggcugua

SEQ ID NO: 1085975 - RNA, 22 nt, Human
acucuucacacaugcugcccuc

SEQ ID NO: 1085976 - RNA, 22 nt, Human
gucaggauuaaugggaguaugc

SEQ ID NO: 1085977 - RNA, 22 nt, Human
cugggccuucauugcucuccca

SEQ ID NO: 1085978 - RNA, 22 nt, Human
gggaauuauagcugucacaggc

SEQ ID NO: 1085979 - RNA, 22 nt, Human
gccauuaaagugcauguuuugc

SEQ ID NO: 1085980 - RNA, 22 nt, Human
aguggggacaaugagagcaggu

SEQ ID NO: 1085981 - RNA, 22 nt, Human
uuuacagaugaggaaacugaga

SEQ ID NO: 1085982 - RNA, 22 nt, Human
agagaacacgugcaucugcaau

SEQ ID NO: 1085983 - RNA, 22 nt, Human
gggaggugaaaggucaugugug

SEQ ID NO: 1085984 - RNA, 22 nt, Human
aaaucagagugguuggucaucc

SEQ ID NO: 1085985 - RNA, 22 nt, Human
guuuuuccuugcugaggacccg

SEQ ID NO: 1085986 - RNA, 22 nt, Human
uucucagggucuggauggccug

SEQ ID NO: 1085987 - RNA, 22 nt, Human
caggcacuggggaugcugggau

SEQ ID NO: 1085988 - RNA, 22 nt, Human
ggggaagaaauagaacauuuug

SEQ ID NO: 1085989 - RNA, 22 nt, Human
gugcuguauaugcaagaggaag

SEQ ID NO: 1085990 - RNA, 22 nt, Human
augaggcaugugaggagaaggg

SEQ ID NO: 1085991 - RNA, 22 nt, Human
ugucccaacccugagaagauuc

SEQ ID NO: 1085992 - RNA, 23 nt, Human
gcuucugccauuugcuagcugug

SEQ ID NO: 1085993 - RNA, 22 nt, Human
aguuaauaauggaaagacacau

SEQ ID NO: 1085994 - RNA, 22 nt, Human
aaggcagccgugugacugcaug

SEQ ID NO: 1085995 - RNA, 20 nt, Human
gaagcagcuucauguagaca

SEQ ID NO: 1085996 - RNA, 22 nt, Human
cccaggucgucagcaguguggu

SEQ ID NO: 1085997 - RNA, 22 nt, Human
uccuugaacagagggccugggu

SEQ ID NO: 1085998 - RNA, 21 nt, Human
guauucuuuaugaagugaaaa

SEQ ID NO: 1085999 - RNA, 22 nt, Human
ucauccaguucacauggugagu

SEQ ID NO: 1086000 - RNA, 22 nt, Human
cagcagcuccucugcggcuaug

SEQ ID NO: 1086001 - RNA, 22 nt, Human
gaugaggggucauuggcuggga

SEQ ID NO: 1086002 - RNA, 23 nt, Human
aggcgagcucuucuccagcacgu

SEQ ID NO: 1086003 - RNA, 22 nt, Human
augaaaugucuggaucuuuuuc

SEQ ID NO: 1086004 - RNA, 22 nt, Human
uugucucucauuccugcaacuc

SEQ ID NO: 1086005 - RNA, 22 nt, Human
uccagggaugccagccauguug

SEQ ID NO: 1086006 - RNA, 22 nt, Human
gaaacugugaggaucuuaacuu

SEQ ID NO: 1086007 - RNA, 22 nt, Human
ucaaauaugugauagaagcuaa

SEQ ID NO: 1086008 - RNA, 22 nt, Human
aaacacugcgugguggcaacuc

SEQ ID NO: 1086009 - RNA, 22 nt, Human
accugagggcccaaacuuggua

SEQ ID NO: 1086010 - RNA, 22 nt, Human
gagaggagguggcuaugacagc

SEQ ID NO: 1086011 - RNA, 22 nt, Human
ggggcagagaauaaaaaccuaa

SEQ ID NO: 1086012 - RNA, 22 nt, Human
ugcagccaggaaauauuugcug

SEQ ID NO: 1086013 - RNA, 22 nt, Human
gacuuugagggauacaaacauu

SEQ ID NO: 1086014 - RNA, 19 nt, Human
ugccagcauuaggcugaag

SEQ ID NO: 1086015 - RNA, 22 nt, Human
ccuugcaggggaacaggcagug

SEQ ID NO: 1086016 - RNA, 22 nt, Human
uagcagcuuccagagagggcag

SEQ ID NO: 1086017 - RNA, 22 nt, Human
uaagaagcuucugcuaaugccu

SEQ ID NO: 1086018 - RNA, 22 nt, Human
ugagauuuguuuuauaaaauag

SEQ ID NO: 1086019 - RNA, 22 nt, Human
uauguagaugucauauaaauug

SEQ ID NO: 1086020 - RNA, 22 nt, Human
uauuguacugaggaauaaagcu

SEQ ID NO: 1086021 - RNA, 22 nt, Human
ugcccacauucaaaaggugaug

SEQ ID NO: 1086022 - RNA, 22 nt, Human
auuccugacuguuagaguuugc

SEQ ID NO: 1086023 - RNA, 22 nt, Human
ucaaauuuuaacaugcauuaga

SEQ ID NO: 1086024 - RNA, 21 nt, Human
uaauauagguucacaacuagu

SEQ ID NO: 1086025 - RNA, 20 nt, Human
agagaauucccuuuggagau

SEQ ID NO: 1086026 - RNA, 22 nt, Human
uggcugaggcuggagugcagug

SEQ ID NO: 1086027 - RNA, 22 nt, Human
auacauguuguaccauauguuu

SEQ ID NO: 1086028 - RNA, 22 nt, Human
cccugcugucaggugcugggag

SEQ ID NO: 1086029 - RNA, 22 nt, Human
agauggagaccuuggaugaacu

SEQ ID NO: 1086030 - RNA, 22 nt, Human
ugaggggauacgguacacauug

SEQ ID NO: 1086031 - RNA, 22 nt, Human
agcagggcagugaucagaaagg

SEQ ID NO: 1086032 - RNA, 22 nt, Human
gugccuggcacacagaaggcaa

SEQ ID NO: 1086033 - RNA, 22 nt, Human
ggcuguggccagcggggcugag

SEQ ID NO: 1086034 - RNA, 22 nt, Human
auaaucaaaguccuaugacauc

SEQ ID NO: 1086035 - RNA, 22 nt, Human
aggcucagcaucugauucauau

SEQ ID NO: 1086036 - RNA, 22 nt, Human
uauauauucuuaaguaguguag

SEQ ID NO: 1086037 - RNA, 20 nt, Human
ucagaaggcuccagagcaga

SEQ ID NO: 1086038 - RNA, 22 nt, Human
ccuaggaacccccaggcuucug

SEQ ID NO: 1086039 - RNA, 22 nt, Human
aacucagcauccugcacagaga

SEQ ID NO: 1086040 - RNA, 17 nt, Human
ucaaauguacagaacua

SEQ ID NO: 1086041 - RNA, 22 nt, Human
uuucucaucuggaaacagugcu

SEQ ID NO: 1086042 - RNA, 22 nt, Human
aggaagagcuggaccagaggac

SEQ ID NO: 1086043 - RNA, 22 nt, Human
cugcuuuguguggucccuccag

SEQ ID NO: 1086044 - RNA, 22 nt, Human
cuggcaggcggcagagcccagg

SEQ ID NO: 1086045 - RNA, 22 nt, Human
accagggcugacaaucugaugg

SEQ ID NO: 1086046 - RNA, 22 nt, Human
cucacauuccacuugugccaac

SEQ ID NO: 1086047 - RNA, 22 nt, Human
auuuucuucucucccuggcugc

SEQ ID NO: 1086048 - RNA, 22 nt, Human
ugcaaagaagcaacauccuugu

SEQ ID NO: 1086049 - RNA, 22 nt, Human
aguacaaaggcccuugauuacu

SEQ ID NO: 1086050 - RNA, 21 nt, Human
aggaaaggccagcacguaggg

SEQ ID NO: 1086051 - RNA, 22 nt, Human
auguuuuaugcuucagaugagg

SEQ ID NO: 1086052 - RNA, 22 nt, Human
uauauaauuuguaaaagcaccu

SEQ ID NO: 1086053 - RNA, 22 nt, Human
agugaucuuuuaaaaagaagug

SEQ ID NO: 1086054 - RNA, 22 nt, Human
ugucucugccagcuagcagaau

SEQ ID NO: 1086055 - RNA, 22 nt, Human
uagcuuuccuuguugccugugc

SEQ ID NO: 1086056 - RNA, 22 nt, Human
caguuaucaaauacuaugaagg

SEQ ID NO: 1086057 - RNA, 22 nt, Human
aggcugggaaauguagucuucc

SEQ ID NO: 1086058 - RNA, 22 nt, Human
cagccagggagcaaagaguuga

SEQ ID NO: 1086059 - RNA, 22 nt, Human
uuuuauauugagugagaguucc

SEQ ID NO: 1086060 - RNA, 22 nt, Human
cagcaacugugccugacacaca

SEQ ID NO: 1086061 - RNA, 22 nt, Human
gcccugucccuuggcuucuagg

SEQ ID NO: 1086062 - RNA, 22 nt, Human
ucaaaguccuugcuuuuucugu

SEQ ID NO: 1086063 - RNA, 22 nt, Human
agauuucccacuccauguauug

SEQ ID NO: 1086064 - RNA, 22 nt, Human
ucacugcaaggaggcuucucaa

SEQ ID NO: 1086065 - RNA, 22 nt, Human
aagagcuggaagugaagauaac

SEQ ID NO: 1086066 - RNA, 22 nt, Human
ggggcugagucagugggaagag

SEQ ID NO: 1086067 - RNA, 22 nt, Human
cugcagaggguuugagcauccu

SEQ ID NO: 1086068 - RNA, 22 nt, Human
uuuucuguauuauugugcuuca

SEQ ID NO: 1086069 - RNA, 22 nt, Human
uugaaauauggauugaccuuga

SEQ ID NO: 1086070 - RNA, 22 nt, Human
auuuccaguacccagaacagag

SEQ ID NO: 1086071 - RNA, 22 nt, Human
aauucacaggagguauuugucc

SEQ ID NO: 1086072 - RNA, 22 nt, Human
uacaaaggaaacuucuuuuccc

SEQ ID NO: 1086073 - RNA, 22 nt, Human
cacagcugaaguagccaugugg

SEQ ID NO: 1086074 - RNA, 22 nt, Human
uucaaguagaaaguauugauga

SEQ ID NO: 1086075 - RNA, 22 nt, Human
gggagcugaauggcaauggaga

SEQ ID NO: 1086076 - RNA, 22 nt, Human
agagucaacaucgagccacugg

SEQ ID NO: 1086077 - RNA, 22 nt, Human
uguuuauagggucugucacuug

SEQ ID NO: 1086078 - RNA, 22 nt, Human
acacauaagaaacuacaaagag

SEQ ID NO: 1086079 - RNA, 22 nt, Human
aguguuaauaucuggcccuagg

SEQ ID NO: 1086080 - RNA, 22 nt, Human
uuauuuugagagaaugugugcu

SEQ ID NO: 1086081 - RNA, 22 nt, Human
augugcaacuucagcagaaagg

SEQ ID NO: 1086082 - RNA, 22 nt, Human
caggguggcacucagcgcaucu

SEQ ID NO: 1086083 - RNA, 22 nt, Human
ugcagccaauucauucauucuu

SEQ ID NO: 1086084 - RNA, 22 nt, Human
guuuacaacaucuuguccuuca

SEQ ID NO: 1086085 - RNA, 22 nt, Human
cucuugggagugcucuggagaa

SEQ ID NO: 1086086 - RNA, 22 nt, Human
uuugcauucuagaaaaauuucu

SEQ ID NO: 1086087 - RNA, 22 nt, Human
ccccacaacucauguugaaacu

SEQ ID NO: 1086088 - RNA, 22 nt, Human
uggagcagcauucauccagcag

SEQ ID NO: 1086089 - RNA, 22 nt, Human
ucuucacaggagccugccugcc

SEQ ID NO: 1086090 - RNA, 20 nt, Human
uucuuaaagaccucacuuug

SEQ ID NO: 1086091 - RNA, 22 nt, Human
ucagcucuaaguuuuaugcaaa

SEQ ID NO: 1086092 - RNA, 22 nt, Human
caggcagggagcuggaaaggau

SEQ ID NO: 1086093 - RNA, 22 nt, Human
cuggcagguuuggugucuggug

SEQ ID NO: 1086094 - RNA, 22 nt, Human
agcugcuaugacaacaccagcc

SEQ ID NO: 1086095 - RNA, 22 nt, Human
uggcauuuaguugcguauugca

SEQ ID NO: 1086096 - RNA, 22 nt, Human
ggagccaguauuuaguggucuu

SEQ ID NO: 1086097 - RNA, 23 nt, Human
aggcagagccaaggucaaaaccc

SEQ ID NO: 1086098 - RNA, 22 nt, Human
gaagcugggucgcugggauccu

SEQ ID NO: 1086099 - RNA, 21 nt, Human
uggagcugccacuugagcugc

SEQ ID NO: 1086100 - RNA, 22 nt, Human
cuguaaacuaggucauuuuuaa

SEQ ID NO: 1086101 - RNA, 22 nt, Human
acaaaugucuccucuuuuguua

SEQ ID NO: 1086102 - RNA, 22 nt, Human
cuuguuaaaaugcagauuccaa

SEQ ID NO: 1086103 - RNA, 22 nt, Human
gugauuucaaauauagagugag

SEQ ID NO: 1086104 - RNA, 22 nt, Human
acaugcuuucuagguccuucug

SEQ ID NO: 1086105 - RNA, 22 nt, Human
acauuugacuacauuuauauau

SEQ ID NO: 1086106 - RNA, 22 nt, Human
aaguucuugaagacuuuaaaua

SEQ ID NO: 1086107 - RNA, 19 nt, Human
cccucuugcacaaagcaaa

SEQ ID NO: 1086108 - RNA, 22 nt, Human
gaugcuuuggccccaucaugag

SEQ ID NO: 1086109 - RNA, 22 nt, Human
gggagagguuacccgagcaacu

SEQ ID NO: 1086110 - RNA, 22 nt, Human
cuggcagcuggaggcuagaggc

SEQ ID NO: 1086111 - RNA, 22 nt, Human
aagucauuaucucuucuaaucu

SEQ ID NO: 1086112 - RNA, 22 nt, Human
acugcacagaagaaacuaucaa

SEQ ID NO: 1086113 - RNA, 22 nt, Human
ucacacacauggauaguauuuu

SEQ ID NO: 1086114 - RNA, 19 nt, Human
gccugggaugggcagaacu

SEQ ID NO: 1086115 - RNA, 22 nt, Human
ugaaauguguucuaguguuuug

SEQ ID NO: 1086116 - RNA, 22 nt, Human
aaggaagacucgcaggucuaug

SEQ ID NO: 1086117 - RNA, 21 nt, Human
ugacuuuauauugugucagga

SEQ ID NO: 1086118 - RNA, 22 nt, Human
ugacaugcuuguuuuccuugaa

SEQ ID NO: 1086119 - RNA, 22 nt, Human
gcgcaggugaugcgucugccuu

SEQ ID NO: 1086120 - RNA, 22 nt, Human
aacuagaacgagaaagcugaac

SEQ ID NO: 1086121 - RNA, 19 nt, Human
ucugucacuggggguauuc

SEQ ID NO: 1086122 - RNA, 22 nt, Human
cauucuuacacaauauuuuaau

SEQ ID NO: 1086123 - RNA, 22 nt, Human
uguuugugcugccuggugggca

SEQ ID NO: 1086124 - RNA, 22 nt, Human
ggcagguggaaguuggcagagc

SEQ ID NO: 1086125 - RNA, 22 nt, Human
ggccucucuccuuggcuugcag

SEQ ID NO: 1086126 - RNA, 22 nt, Human
uuuguauuccauaucaugccau

SEQ ID NO: 1086127 - RNA, 22 nt, Human
ucuuccaaaauuagucucaguu

SEQ ID NO: 1086128 - RNA, 22 nt, Human
aauuucaaugcacucaugguug

SEQ ID NO: 1086129 - RNA, 22 nt, Human
caucagagugguggccuggugu

SEQ ID NO: 1086130 - RNA, 22 nt, Human
gaaaauuucugccacaugugug

SEQ ID NO: 1086131 - RNA, 22 nt, Human
uccuucaagaugccacagcuuu

SEQ ID NO: 1086132 - RNA, 22 nt, Human
agaguggggacagggccugucc

SEQ ID NO: 1086133 - RNA, 22 nt, Human
gcuggcuuccuucugcagcuag

SEQ ID NO: 1086134 - RNA, 22 nt, Human
ccaggauggggagcagauagaa

SEQ ID NO: 1086135 - RNA, 23 nt, Human
gccuggccaccccagggcugcuu

SEQ ID NO: 1086136 - RNA, 22 nt, Human
gucaaauauaugcaaaacuauu

SEQ ID NO: 1086137 - RNA, 22 nt, Human
agagcugaaaaagcugacccgg

SEQ ID NO: 1086138 - RNA, 22 nt, Human
ucagggcaggcgagcagcugcu

SEQ ID NO: 1086139 - RNA, 22 nt, Human
accugugcaaagacuggucagg

SEQ ID NO: 1086140 - RNA, 17 nt, Human
ugcuucuguauugcugg

SEQ ID NO: 1086141 - RNA, 22 nt, Human
uuuccuacccuuccaggcagag

SEQ ID NO: 1086142 - RNA, 22 nt, Human
uuuggaaauuucaucaauagcc

SEQ ID NO: 1086143 - RNA, 22 nt, Human
gagaaauagauucaugguagau

SEQ ID NO: 1086144 - RNA, 23 nt, Human
cacauauagcagccacuaagguc

SEQ ID NO: 1086145 - RNA, 22 nt, Human
aacaaaugauaccaguucucaa

SEQ ID NO: 1086146 - RNA, 22 nt, Human
agacacagguguaauuucugcu

SEQ ID NO: 1086147 - RNA, 22 nt, Human
aaucaagucaaccaucaugugc

SEQ ID NO: 1086148 - RNA, 22 nt, Human
cugccugugucuauuccuuuuu

SEQ ID NO: 1086149 - RNA, 22 nt, Human
ccacacuaaacugcucaaacca

SEQ ID NO: 1086150 - RNA, 22 nt, Human
caggccugaguguggaagucuu

SEQ ID NO: 1086151 - RNA, 22 nt, Human
aggcuguccucucuugcucagu

SEQ ID NO: 1086152 - RNA, 22 nt, Human
aggcagagcuggguuuugaaau

SEQ ID NO: 1086153 - RNA, 23 nt, Human
caguggagacucaugcuuccuua

SEQ ID NO: 1086154 - RNA, 22 nt, Human
agaggucauaucucagaagaga

SEQ ID NO: 1086155 - RNA, 22 nt, Human
uuucugaagucuucuaacagau

SEQ ID NO: 1086156 - RNA, 22 nt, Human
aaggaggaauucugaguucaug

SEQ ID NO: 1086157 - RNA, 22 nt, Human
aauaucugucucuaaugcauau

SEQ ID NO: 1086158 - RNA, 22 nt, Human
cuggugccauucuguggccuag

SEQ ID NO: 1086159 - RNA, 23 nt, Human
cagugccauuugucuugccuaug

SEQ ID NO: 1086160 - RNA, 22 nt, Human
auaugcauaugucaaaacuuau

SEQ ID NO: 1086161 - RNA, 22 nt, Human
uugcaaauauuguuuaccuuuc

SEQ ID NO: 1086162 - RNA, 22 nt, Human
cagggaggaugggcuguuuugc

SEQ ID NO: 1086163 - RNA, 22 nt, Human
acacuaaucuuuuauuugguuu

SEQ ID NO: 1086164 - RNA, 22 nt, Human
caaagcucaugcucuuagccau

SEQ ID NO: 1086165 - RNA, 21 nt, Human
cuuggaguugguugaggaugc

SEQ ID NO: 1086166 - RNA, 22 nt, Human
cugggaggcaccgcgucgugcu

SEQ ID NO: 1086167 - RNA, 22 nt, Human
gcugucaccaaagcaggcacug

SEQ ID NO: 1086168 - RNA, 22 nt, Human
ccuggagcaaaaaucuaaggag

SEQ ID NO: 1086169 - RNA, 22 nt, Human
ugaggccugggcacauaaccuc

SEQ ID NO: 1086170 - RNA, 22 nt, Human
ggacaggguaaguacuagugug

SEQ ID NO: 1086171 - RNA, 22 nt, Human
gcccucucuucugcagccucca

SEQ ID NO: 1086172 - RNA, 22 nt, Human
gucaccauugcccacuccaugg

SEQ ID NO: 1086173 - RNA, 22 nt, Human
ggcugcugguggaaugguaggc

SEQ ID NO: 1086174 - RNA, 22 nt, Human
guggccaauuuccaucuguaag

SEQ ID NO: 1086175 - RNA, 22 nt, Human
gcaaagcagaacccucucuauc

SEQ ID NO: 1086176 - RNA, 22 nt, Human
caguggguaggaaaggcucuuc

SEQ ID NO: 1086177 - RNA, 20 nt, Human
acaauacagguugugucuga

SEQ ID NO: 1086178 - RNA, 22 nt, Human
accaaggagacaaagguguauu

SEQ ID NO: 1086179 - RNA, 22 nt, Human
ugguggcuucugaggauggcga

SEQ ID NO: 1086180 - RNA, 20 nt, Human
aauuuacucacagaaugaau

SEQ ID NO: 1086181 - RNA, 22 nt, Human
uuucacaaguuucaggauucug

SEQ ID NO: 1086182 - RNA, 22 nt, Human
augaaacucuagcuuucagcac

SEQ ID NO: 1086183 - RNA, 20 nt, Human
ugccagggccagcagaggcu

SEQ ID NO: 1086184 - RNA, 18 nt, Human
agcaaauauuaagugcau

SEQ ID NO: 1086185 - RNA, 22 nt, Human
ucugagcuacgaugccugucac

SEQ ID NO: 1086186 - RNA, 22 nt, Human
uguggcuuaagaaugccuuuaa

SEQ ID NO: 1086187 - RNA, 22 nt, Human
caguaugagaguugaaucaagg

SEQ ID NO: 1086188 - RNA, 22 nt, Human
ucagacagauuuugacacuugc

SEQ ID NO: 1086189 - RNA, 22 nt, Human
ugacagaaugugacucucagau

SEQ ID NO: 1086190 - RNA, 22 nt, Human
caauguuuucaacugacaagua

SEQ ID NO: 1086191 - RNA, 22 nt, Human
uggcuccuaucaaggagugggu

SEQ ID NO: 1086192 - RNA, 22 nt, Human
agagcccuggagggcagucccg

SEQ ID NO: 1086193 - RNA, 22 nt, Human
gugaggcuacucagcuguccga

SEQ ID NO: 1086194 - RNA, 19 nt, Human
aggcuuggcuagauuuacu

SEQ ID NO: 1086195 - RNA, 22 nt, Human
gccaugccugugucuccaggcc

SEQ ID NO: 1086196 - RNA, 22 nt, Human
aggcaaggugcuacagacagug

SEQ ID NO: 1086197 - RNA, 22 nt, Human
uucaaaaagguauguucaaguc

SEQ ID NO: 1086198 - RNA, 22 nt, Human
ucugccuuccccauaaucugau

SEQ ID NO: 1086199 - RNA, 22 nt, Human
uccuucaacuuuuuacuugccc

SEQ ID NO: 1086200 - RNA, 22 nt, Human
cugcccugucugcagccuggcu

SEQ ID NO: 1086201 - RNA, 22 nt, Human
agggcuggcaagggauugaaau

SEQ ID NO: 1086202 - RNA, 22 nt, Human
uuucuuccuaaauaugauuucc

SEQ ID NO: 1086203 - RNA, 22 nt, Human
gaaacccaaacuaagacaguag

SEQ ID NO: 1086204 - RNA, 22 nt, Human
aauacaaucaaauucacuagca

SEQ ID NO: 1086205 - RNA, 22 nt, Human
acuguucacccagcacuagcag

SEQ ID NO: 1086206 - RNA, 22 nt, Human
ucuugauuuugugaauaaguug

SEQ ID NO: 1086207 - RNA, 22 nt, Human
aagggcuccaagagguagcugg

SEQ ID NO: 1086208 - RNA, 22 nt, Human
gaaagcagcuaagucuuaugau

SEQ ID NO: 1086209 - RNA, 21 nt, Human
uucaagucucuaggacuucuc

SEQ ID NO: 1086210 - RNA, 22 nt, Human
ugcaggugcugauaccuacucc

SEQ ID NO: 1086211 - RNA, 21 nt, Human
ccagacuggccuaugugguag

SEQ ID NO: 1086212 - RNA, 22 nt, Human
uuucaguggguuuauuucaugu

SEQ ID NO: 1086213 - RNA, 22 nt, Human
agugggagagaagcaaguagua

SEQ ID NO: 1086214 - RNA, 22 nt, Human
cccuggaggcaaagguugcagu

SEQ ID NO: 1086215 - RNA, 22 nt, Human
gccaggcacaguucuaggugcu

SEQ ID NO: 1086216 - RNA, 22 nt, Human
accagagcagacuacuggaggu

SEQ ID NO: 1086217 - RNA, 22 nt, Human
cagagcucagagcagggcacuc

SEQ ID NO: 1086218 - RNA, 22 nt, Human
aaaggcaguggguauguggauc

SEQ ID NO: 1086219 - RNA, 22 nt, Human
uguacauuuagagcucaauaga

SEQ ID NO: 1086220 - RNA, 22 nt, Human
acuguguccucauguggcagaa

SEQ ID NO: 1086221 - RNA, 22 nt, Human
gucaggauguuuauucuccagu

SEQ ID NO: 1086222 - RNA, 22 nt, Human
cuggagugcaguggcaugauca

SEQ ID NO: 1086223 - RNA, 22 nt, Human
caugacaauauguucuuucauu

SEQ ID NO: 1086224 - RNA, 22 nt, Human
ucucaaauuuguuagauaaaau

SEQ ID NO: 1086225 - RNA, 22 nt, Human
auucugaggacagagucuagca

SEQ ID NO: 1086226 - RNA, 23 nt, Human
ugaaauauucuuuugcaugagcu

SEQ ID NO: 1086227 - RNA, 22 nt, Human
uuuccaauaaagugucauuguu

SEQ ID NO: 1086228 - RNA, 22 nt, Human
cucaggaucgcuugcccuaggg

SEQ ID NO: 1086229 - RNA, 22 nt, Human
acccugccucugcuuccuguag

SEQ ID NO: 1086230 - RNA, 22 nt, Human
uuacuuugaugaucaaugagcg

SEQ ID NO: 1086231 - RNA, 22 nt, Human
acaaaugcagcauaaagugaac

SEQ ID NO: 1086232 - RNA, 22 nt, Human
uggcagaaguacacaagcaugc

SEQ ID NO: 1086233 - RNA, 22 nt, Human
cuggugcuuugcucauuugaua

SEQ ID NO: 1086234 - RNA, 22 nt, Human
uuuaacuugaucaguagagcau

SEQ ID NO: 1086235 - RNA, 22 nt, Human
agaaaaacuaagaguggguggu

SEQ ID NO: 1086236 - RNA, 17 nt, Human
ggaaaaggaugauacag

SEQ ID NO: 1086237 - RNA, 22 nt, Human
ccgcagggaaagccccaggaag

SEQ ID NO: 1086238 - RNA, 22 nt, Human
gccacugcacuccagcccaggc

SEQ ID NO: 1086239 - RNA, 22 nt, Human
agcagguguagggcucuuugua

SEQ ID NO: 1086240 - RNA, 22 nt, Human
ugggcucucaaagugcggcuug

SEQ ID NO: 1086241 - RNA, 22 nt, Human
gcugagcuagcuaucucagucu

SEQ ID NO: 1086242 - RNA, 21 nt, Human
uaugguaaccagacaagaaug

SEQ ID NO: 1086243 - RNA, 22 nt, Human
gucagcuaauaggguguguguc

SEQ ID NO: 1086244 - RNA, 22 nt, Human
gaaaucugcccagugcacuggu

SEQ ID NO: 1086245 - RNA, 22 nt, Human
auuuaaauuuucugauggagag

SEQ ID NO: 1086246 - RNA, 22 nt, Human
gaguccaguguuuaccaggggu

SEQ ID NO: 1086247 - RNA, 20 nt, Human
uggcccuguuuucuccaggc

SEQ ID NO: 1086248 - RNA, 22 nt, Human
aaagguuuauugauucugcucu

SEQ ID NO: 1086249 - RNA, 22 nt, Human
cuuucuucaagcuggucucaau

SEQ ID NO: 1086250 - RNA, 22 nt, Human
agcaggagcugugggaagaugg

SEQ ID NO: 1086251 - RNA, 22 nt, Human
gacagaggagaagaugcugugg

SEQ ID NO: 1086252 - RNA, 22 nt, Human
uuggaaaaauugccugaugucu

SEQ ID NO: 1086253 - RNA, 22 nt, Human
aaguacuuuaggauauguaacu

SEQ ID NO: 1086254 - RNA, 18 nt, Human
uucaccagugugaugggu

SEQ ID NO: 1086255 - RNA, 22 nt, Human
cucauggauauaagaacuguuu

SEQ ID NO: 1086256 - RNA, 22 nt, Human
uagcuggggcuuucauucuugc

SEQ ID NO: 1086257 - RNA, 22 nt, Human
uuccugggugguccugguagag

SEQ ID NO: 1086258 - RNA, 22 nt, Human
uaagaaacccaggaauuucuua

SEQ ID NO: 1086259 - RNA, 22 nt, Human
acaguuacauuccagcaacauc

SEQ ID NO: 1086260 - RNA, 22 nt, Human
cagcagagcuuauuaacuaaaa

SEQ ID NO: 1086261 - RNA, 22 nt, Human
cugauuucaugcuaucaauguu

SEQ ID NO: 1086262 - RNA, 22 nt, Human
ucugccugcuaacuccugcacc

SEQ ID NO: 1086263 - RNA, 22 nt, Human
cagcagugugcaggugugcugg

SEQ ID NO: 1086264 - RNA, 22 nt, Human
uuuacaaguacaccuaacagcu

SEQ ID NO: 1086265 - RNA, 22 nt, Human
guggggcugaguggagccagaa

SEQ ID NO: 1086266 - RNA, 21 nt, Human
acaguucaugauaacuccauc

SEQ ID NO: 1086267 - RNA, 22 nt, Human
cuuucaaagaguaggagguuuu

SEQ ID NO: 1086268 - RNA, 19 nt, Human
gguagaagggaaguguuuu

SEQ ID NO: 1086269 - RNA, 22 nt, Human
aggcuggagggcaauggcaaga

SEQ ID NO: 1086270 - RNA, 22 nt, Human
uauuuccaccuauuauuuucug

SEQ ID NO: 1086271 - RNA, 19 nt, Human
caagugaagccugggaugg

SEQ ID NO: 1086272 - RNA, 22 nt, Human
agucuauuucagucuuacuagu

SEQ ID NO: 1086273 - RNA, 22 nt, Human
gcagcugcaggcaggcuugcug

SEQ ID NO: 1086274 - RNA, 22 nt, Human
cacagacuugagaagcaccuua

SEQ ID NO: 1086275 - RNA, 19 nt, Human
agcagcguuuaaaaaaugc

SEQ ID NO: 1086276 - RNA, 20 nt, Human
aacauugcuucaauguaacc

SEQ ID NO: 1086277 - RNA, 22 nt, Human
agaggaacccagacagggcuuu

SEQ ID NO: 1086278 - RNA, 22 nt, Human
cacugcaggucugagauggggg

SEQ ID NO: 1086279 - RNA, 22 nt, Human
uuaacagacauauauauuugua

SEQ ID NO: 1086280 - RNA, 22 nt, Human
aauguacaccguggguuuuuua

SEQ ID NO: 1086281 - RNA, 22 nt, Human
ccuggcaggcuggggacagugc

SEQ ID NO: 1086282 - RNA, 22 nt, Human
ugcuggccaacaaggcuccaag

SEQ ID NO: 1086283 - RNA, 22 nt, Human
aauuucaaguggcaucuuugau

SEQ ID NO: 1086284 - RNA, 22 nt, Human
aucacauuguuagcauagacug

SEQ ID NO: 1086285 - RNA, 22 nt, Human
caguggccaugguggcaggggu

SEQ ID NO: 1086286 - RNA, 22 nt, Human
gugaaauuguauuuggcauuga

SEQ ID NO: 1086287 - RNA, 22 nt, Human
ccugggcugcucauggggauga

SEQ ID NO: 1086288 - RNA, 22 nt, Human
aauaggaaaauauuuaacaaga

SEQ ID NO: 1086289 - RNA, 22 nt, Human
agaagcugccuacaugaccagc

SEQ ID NO: 1086290 - RNA, 22 nt, Human
ggcugccugaggcagugagaga

SEQ ID NO: 1086291 - RNA, 22 nt, Human
caacuacaggaaaagucauuca

SEQ ID NO: 1086292 - RNA, 22 nt, Human
caugggcuugcucucugagcuc

SEQ ID NO: 1086293 - RNA, 22 nt, Human
gugcuuccugccuggugccuuu

SEQ ID NO: 1086294 - RNA, 20 nt, Human
guggccucucacauucugag

SEQ ID NO: 1086295 - RNA, 22 nt, Human
ugaaacauuaggaaaucauuau

SEQ ID NO: 1086296 - RNA, 22 nt, Human
cccaggaggcagagguugcagu

SEQ ID NO: 1086297 - RNA, 22 nt, Human
uccauuauacuucugauucaaa

SEQ ID NO: 1086298 - RNA, 22 nt, Human
ucugcuggugaugaccucauaa

SEQ ID NO: 1086299 - RNA, 22 nt, Human
aauucaaagacuagaauuuugc

SEQ ID NO: 1086300 - RNA, 21 nt, Human
cagaaauaugaaugaugguga

SEQ ID NO: 1086301 - RNA, 22 nt, Human
ggcaguggguggaucucaggga

SEQ ID NO: 1086302 - RNA, 22 nt, Human
guggagacgggacagaagcuaa

SEQ ID NO: 1086303 - RNA, 22 nt, Human
gcaaggcagcgcggaguagcua

SEQ ID NO: 1086304 - RNA, 22 nt, Human
gagguggcuuagucucuggaca

SEQ ID NO: 1086305 - RNA, 21 nt, Human
uccaauuuuuaagacuauggc

SEQ ID NO: 1086306 - RNA, 19 nt, Human
ugcuucuggaaccaugauc

SEQ ID NO: 1086307 - RNA, 22 nt, Human
caggcacaagaagcaaauguua

SEQ ID NO: 1086308 - RNA, 23 nt, Human
auugaugacuugauuacacuuuu

SEQ ID NO: 1086309 - RNA, 22 nt, Human
guccucugaaguugugcaaugc

SEQ ID NO: 1086310 - RNA, 22 nt, Human
ugcauguuaagaaaauauugag

SEQ ID NO: 1086311 - RNA, 22 nt, Human
acugaaggaaagccuuugcaug

SEQ ID NO: 1086312 - RNA, 22 nt, Human
ucacauuucugauuauaccaaa

SEQ ID NO: 1086313 - RNA, 22 nt, Human
uggcacagacagaucaggaguc

SEQ ID NO: 1086314 - RNA, 22 nt, Human
ccugggcucgcgcacuucaccc

SEQ ID NO: 1086315 - RNA, 22 nt, Human
ucaaaucuuuaacaugugcaaa

SEQ ID NO: 1086316 - RNA, 22 nt, Human
guuguacaaaauaucagugagg

SEQ ID NO: 1086317 - RNA, 22 nt, Human
cuuauucauaagucagacacac

SEQ ID NO: 1086318 - RNA, 22 nt, Human
ugcagggaaaguguuggcagca

SEQ ID NO: 1086319 - RNA, 22 nt, Human
aggucccagucugugaugacuc

SEQ ID NO: 1086320 - RNA, 19 nt, Human
ucccagagucuagagguug

SEQ ID NO: 1086321 - RNA, 19 nt, Human
uucuaugauuaacaugaga

SEQ ID NO: 1086322 - RNA, 22 nt, Human
auauauacuuugacacauucug

SEQ ID NO: 1086323 - RNA, 22 nt, Human
uuacaaguacugaauaugauuu

SEQ ID NO: 1086324 - RNA, 22 nt, Human
cugucaacacgggugugcgugc

SEQ ID NO: 1086325 - RNA, 21 nt, Human
uacugagaccucacagugugc

SEQ ID NO: 1086326 - RNA, 22 nt, Human
gcucugaggcugggagcacucu

SEQ ID NO: 1086327 - RNA, 22 nt, Human
acuuucaagcccucuagagaca

SEQ ID NO: 1086328 - RNA, 22 nt, Human
ugcaccauuuugucaggcuacu

SEQ ID NO: 1086329 - RNA, 22 nt, Human
cauucacaucuuguuccaucac

SEQ ID NO: 1086330 - RNA, 22 nt, Human
aaaaguugcaaaauugcucuuc

SEQ ID NO: 1086331 - RNA, 22 nt, Human
cacauuuaucucucuccgguga

SEQ ID NO: 1086332 - RNA, 22 nt, Human
accaguuuguaaccuguuuuca

SEQ ID NO: 1086333 - RNA, 18 nt, Human
cagucccaaaccuuagga

SEQ ID NO: 1086334 - RNA, 20 nt, Human
gcugcugagcuucccugggg

SEQ ID NO: 1086335 - RNA, 22 nt, Human
cagcugggagcuccauuagaua

SEQ ID NO: 1086336 - RNA, 22 nt, Human
uauauuaacacccacuugccuc

SEQ ID NO: 1086337 - RNA, 22 nt, Human
acacaguaugaaaagucuaguu

SEQ ID NO: 1086338 - RNA, 22 nt, Human
cugaggccucucuccugggcuu

SEQ ID NO: 1086339 - RNA, 22 nt, Human
caggguacagaguuuucuaaac

SEQ ID NO: 1086340 - RNA, 22 nt, Human
ccagaagacaagaauguucuua

SEQ ID NO: 1086341 - RNA, 22 nt, Human
acccugccgugggcugcuugug

SEQ ID NO: 1086342 - RNA, 22 nt, Human
ucacaguaguuguucucuguuu

SEQ ID NO: 1086343 - RNA, 22 nt, Human
ggccaggccaagaggguuggaa

SEQ ID NO: 1086344 - RNA, 22 nt, Human
cccucagucuggcugggaagac

SEQ ID NO: 1086345 - RNA, 22 nt, Human
ccugggcauaaaucacuccaag

SEQ ID NO: 1086346 - RNA, 22 nt, Human
gugaggacuaguggguuugugc

SEQ ID NO: 1086347 - RNA, 21 nt, Human
accagcaggagaucagaagga

SEQ ID NO: 1086348 - RNA, 16 nt, Human
gcagaggaaaggggag

SEQ ID NO: 1086349 - RNA, 22 nt, Human
gggggaagaaagaacauggcau

SEQ ID NO: 1086350 - RNA, 22 nt, Human
aaauuguaggaucacaugaccu

SEQ ID NO: 1086351 - RNA, 22 nt, Human
gggcacugcuggaggcucccug

SEQ ID NO: 1086352 - RNA, 22 nt, Human
caguaaaugugauuuuucuugu

SEQ ID NO: 1086353 - RNA, 22 nt, Human
ugaaacagucuccagacuugga

SEQ ID NO: 1086354 - RNA, 22 nt, Human
caucaaauaaagaaauuccuug

SEQ ID NO: 1086355 - RNA, 22 nt, Human
gugcauuugacgaauacucacu

SEQ ID NO: 1086356 - RNA, 22 nt, Human
ccaggaggaaauucuaaaggua

SEQ ID NO: 1086357 - RNA, 22 nt, Human
ggccuggcucuugcccagccug

SEQ ID NO: 1086358 - RNA, 22 nt, Human
gcaaugauauugaagugaugaa

SEQ ID NO: 1086359 - RNA, 22 nt, Human
auuaaaagagauaauguguguu

SEQ ID NO: 1086360 - RNA, 22 nt, Human
cucauuccauguguauuuugag

SEQ ID NO: 1086361 - RNA, 22 nt, Human
cuuaaaagagaugacggcaggg

SEQ ID NO: 1086362 - RNA, 22 nt, Human
augaaugcugggacaaauauau

SEQ ID NO: 1086363 - RNA, 22 nt, Human
agccucugugacucacagguca

SEQ ID NO: 1086364 - RNA, 22 nt, Human
caggguagacaguaggugucug

SEQ ID NO: 1086365 - RNA, 17 nt, Human
uagcuguguuucagcua

SEQ ID NO: 1086366 - RNA, 22 nt, Human
aacagcuuugcuucuggagaca

SEQ ID NO: 1086367 - RNA, 22 nt, Human
ucauuuaugucuuugccaucca

SEQ ID NO: 1086368 - RNA, 22 nt, Human
uacacauuucucuuagagacac

SEQ ID NO: 1086369 - RNA, 22 nt, Human
aggagggagcuuaagccaggca

SEQ ID NO: 1086370 - RNA, 20 nt, Human
cagaccugcacccacuucga

SEQ ID NO: 1086371 - RNA, 22 nt, Human
gcagcugggccccagccucucc

SEQ ID NO: 1086372 - RNA, 22 nt, Human
agcagccuuugaucaucuggga

SEQ ID NO: 1086373 - RNA, 22 nt, Human
aaagauuauggcauugaaauac

SEQ ID NO: 1086374 - RNA, 22 nt, Human
aagcugaugucccaguuugaag

SEQ ID NO: 1086375 - RNA, 22 nt, Human
uacacagaagccagaaggccug

SEQ ID NO: 1086376 - RNA, 23 nt, Human
cuccaaauacucccaauuguuuu

SEQ ID NO: 1086377 - RNA, 22 nt, Human
ugaguagagaauucagcuaagg

SEQ ID NO: 1086378 - RNA, 15 nt, Human
agcccccucagagga

SEQ ID NO: 1086379 - RNA, 22 nt, Human
gccaaucuuugacuauaugugu

SEQ ID NO: 1086380 - RNA, 22 nt, Human
ccucccugucuaccuguugugg

SEQ ID NO: 1086381 - RNA, 23 nt, Human
ugaagguauuaccugagaugcuc

SEQ ID NO: 1086382 - RNA, 22 nt, Human
gcccugugccagucacgcugug

SEQ ID NO: 1086383 - RNA, 22 nt, Human
auucacagggacaaugggagag

SEQ ID NO: 1086384 - RNA, 22 nt, Human
gggagggaaagcuugaucuguc

SEQ ID NO: 1086385 - RNA, 22 nt, Human
uucaggauccccuugaugggcu

SEQ ID NO: 1086386 - RNA, 22 nt, Human
acuucuuuucaaaucaugcaaa

SEQ ID NO: 1086387 - RNA, 22 nt, Human
gccuggugguauccuggcaaga

SEQ ID NO: 1086388 - RNA, 22 nt, Human
uucuuuuccuguggcucaucca

SEQ ID NO: 1086389 - RNA, 22 nt, Human
gggcagcagagcccugccgagu

SEQ ID NO: 1086390 - RNA, 16 nt, Human
aggcagagauuuaccc

SEQ ID NO: 1086391 - RNA, 22 nt, Human
ucugcccuggggucagccucca

SEQ ID NO: 1086392 - RNA, 22 nt, Human
uaaacgugcuucauauuuuuag

SEQ ID NO: 1086393 - RNA, 22 nt, Human
uuugcaguuucauugcugaaau

SEQ ID NO: 1086394 - RNA, 22 nt, Human
uaaagcaaugaaaguuuugcag

SEQ ID NO: 1086395 - RNA, 22 nt, Human
ucuggcaggcaaucggcucugg

SEQ ID NO: 1086396 - RNA, 22 nt, Human
ggcuucccagcagagggcgcac

SEQ ID NO: 1086397 - RNA, 22 nt, Human
uccuggugucgccuggucaguu

SEQ ID NO: 1086398 - RNA, 22 nt, Human
cuucagaaugggacuguguuug

SEQ ID NO: 1086399 - RNA, 22 nt, Human
gggagguucuguucgcacuuga

SEQ ID NO: 1086400 - RNA, 22 nt, Human
uggaguucucaggugagggcuu

SEQ ID NO: 1086401 - RNA, 22 nt, Human
ugggccuuguccccucagcugu

SEQ ID NO: 1086402 - RNA, 22 nt, Human
ugcucugguccucccucggcgc

SEQ ID NO: 1086403 - RNA, 22 nt, Human
agggcugacaguggcguggcgu

SEQ ID NO: 1086404 - RNA, 22 nt, Human
aagcaaaagguuacacuucugg

SEQ ID NO: 1086405 - RNA, 22 nt, Human
ugaaaugacaaagguuuuucuu

SEQ ID NO: 1086406 - RNA, 22 nt, Human
gugggccaggacccgcuguccg

SEQ ID NO: 1086407 - RNA, 22 nt, Human
cccagcuccagagccagaaaca

SEQ ID NO: 1086408 - RNA, 22 nt, Human
acauaauaaaaauaacagcuca

SEQ ID NO: 1086409 - RNA, 22 nt, Human
cuguucuuaucgucuuaauauc

SEQ ID NO: 1086410 - RNA, 22 nt, Human
cucagcuagggaagguuagcuu

SEQ ID NO: 1086411 - RNA, 20 nt, Human
augcaaacucacaaaauacc

SEQ ID NO: 1086412 - RNA, 21 nt, Human
uguuuaauacauauuugugga

SEQ ID NO: 1086413 - RNA, 22 nt, Human
ucagagaguuacacaaauuguu

SEQ ID NO: 1086414 - RNA, 22 nt, Human
ucugucaacaugucaaagggcu

SEQ ID NO: 1086415 - RNA, 22 nt, Human
uagauacauacauuuuaaaaug

SEQ ID NO: 1086416 - RNA, 22 nt, Human
cuuuucaaacgcugaugucagu

SEQ ID NO: 1086417 - RNA, 22 nt, Human
auucacagggcuuuccgcaugg

SEQ ID NO: 1086418 - RNA, 22 nt, Human
guuuguaauuacugcagcaugg

SEQ ID NO: 1086419 - RNA, 22 nt, Human
cugaagagcucuccuguccccu

SEQ ID NO: 1086420 - RNA, 22 nt, Human
cacugaaggcugcagcucagcc

SEQ ID NO: 1086421 - RNA, 22 nt, Human
cagaauuugaaguaauauucca

SEQ ID NO: 1086422 - RNA, 22 nt, Human
uuaaagcaaguagaagccugag

SEQ ID NO: 1086423 - RNA, 22 nt, Human
uacugcuuguuagcuguauuug

SEQ ID NO: 1086424 - RNA, 22 nt, Human
gagugugucggucagcguggcg

SEQ ID NO: 1086425 - RNA, 22 nt, Human
guacuuccagccaagugagaca

SEQ ID NO: 1086426 - RNA, 22 nt, Human
acagcucugcauggcaguuauu

SEQ ID NO: 1086427 - RNA, 22 nt, Human
uggaaagaaaaacaggccauga

SEQ ID NO: 1086428 - RNA, 22 nt, Human
ccaaggcacacucugcaagguu

SEQ ID NO: 1086429 - RNA, 22 nt, Human
uaccaaauguaaucauucuaau

SEQ ID NO: 1086430 - RNA, 22 nt, Human
uuccaacaauguguuauuguuc

SEQ ID NO: 1086431 - RNA, 22 nt, Human
gaggcuggaauauuagaaaugu

SEQ ID NO: 1086432 - RNA, 22 nt, Human
cacaguacgcacccgauacaug

SEQ ID NO: 1086433 - RNA, 22 nt, Human
ugccuggguccaggccaagccu

SEQ ID NO: 1086434 - RNA, 20 nt, Human
uucauuuguugagcaccuuc

SEQ ID NO: 1086435 - RNA, 21 nt, Human
agccuguugguuuacugcuca

SEQ ID NO: 1086436 - RNA, 22 nt, Human
guuugugucaaugacuucugca

SEQ ID NO: 1086437 - RNA, 22 nt, Human
aguggcaguagaugagcugguu

SEQ ID NO: 1086438 - RNA, 22 nt, Human
ggcagcaguggcugcuauuguc

SEQ ID NO: 1086439 - RNA, 22 nt, Human
gaguucaguaguuauagucuag

SEQ ID NO: 1086440 - RNA, 22 nt, Human
uccugcagagacagaggccuca

SEQ ID NO: 1086441 - RNA, 22 nt, Human
agucacuucuauucuauuaagu

SEQ ID NO: 1086442 - RNA, 22 nt, Human
ccugccucaucaacuugucgug

SEQ ID NO: 1086443 - RNA, 23 nt, Human
acacaaggguaacugccagccau

SEQ ID NO: 1086444 - RNA, 22 nt, Human
auaugguaagaguauauuuacu

SEQ ID NO: 1086445 - RNA, 22 nt, Human
caaagucuuggugaucaacuuu

SEQ ID NO: 1086446 - RNA, 22 nt, Human
aaagcaugguuaaagacagugg

SEQ ID NO: 1086447 - RNA, 22 nt, Human
ugcaaaugaugaaacuaacuuu

SEQ ID NO: 1086448 - RNA, 22 nt, Human
caggcugagcucuggccugggc

SEQ ID NO: 1086449 - RNA, 20 nt, Human
gccucagccaacccaugggg

SEQ ID NO: 1086450 - RNA, 22 nt, Human
agagcccucugcaaugccucag

SEQ ID NO: 1086451 - RNA, 22 nt, Human
cucugagcccgcugcagcccca

SEQ ID NO: 1086452 - RNA, 22 nt, Human
gagagugaugaaugguuaaaca

SEQ ID NO: 1086453 - RNA, 22 nt, Human
uugauuacuauguguugaaagc

SEQ ID NO: 1086454 - RNA, 22 nt, Human
uccaagcuuuccaugcccucac

SEQ ID NO: 1086455 - RNA, 22 nt, Human
acugggcuguaaagagaggcaa

SEQ ID NO: 1086456 - RNA, 22 nt, Human
gcagggacaucuuugucuagua

SEQ ID NO: 1086457 - RNA, 22 nt, Human
aaacuacacuuugggaccagca

SEQ ID NO: 1086458 - RNA, 22 nt, Human
agcugcaggcccaugcucaguc

SEQ ID NO: 1086459 - RNA, 22 nt, Human
caauguuuuguugaaugaauag

SEQ ID NO: 1086460 - RNA, 22 nt, Human
ccucuucauccuggaagcugcu

SEQ ID NO: 1086461 - RNA, 22 nt, Human
ggugcaaaaguaaucacaguuu

SEQ ID NO: 1086462 - RNA, 22 nt, Human
agaggggaaguaaugaaugaua

SEQ ID NO: 1086463 - RNA, 22 nt, Human
agggucaagucacugguucacg

SEQ ID NO: 1086464 - RNA, 22 nt, Human
ggagcagacauaaccuuacaga

SEQ ID NO: 1086465 - RNA, 22 nt, Human
agcucccagaagccagagucgg

SEQ ID NO: 1086466 - RNA, 22 nt, Human
ucccugcccugccuucaugguu

SEQ ID NO: 1086467 - RNA, 22 nt, Human
cuuuacauccuguuucccguuu

SEQ ID NO: 1086468 - RNA, 19 nt, Human
ugcccugcacgcuguccug

SEQ ID NO: 1086469 - RNA, 22 nt, Human
cagaguaaggagcugucaaacg

SEQ ID NO: 1086470 - RNA, 16 nt, Human
ggagguggguaaggug

SEQ ID NO: 1086471 - RNA, 22 nt, Human
uggcagcauguuauguaaggaa

SEQ ID NO: 1086472 - RNA, 22 nt, Human
cuucgauuuaauucuuaaccuu

SEQ ID NO: 1086473 - RNA, 22 nt, Human
gucagcuaugucuguuguugag

SEQ ID NO: 1086474 - RNA, 22 nt, Human
auucauuuagagggauuaagca

SEQ ID NO: 1086475 - RNA, 22 nt, Human
caaagcagaagguucuguggua

SEQ ID NO: 1086476 - RNA, 22 nt, Human
ugaacaaacugcauucuucacu

SEQ ID NO: 1086477 - RNA, 22 nt, Human
uaagaaacuauggagaagaacu

SEQ ID NO: 1086478 - RNA, 22 nt, Human
uucuaagauucaugaggacagg

SEQ ID NO: 1086479 - RNA, 22 nt, Human
ggugggcagcucuuggcaggca

SEQ ID NO: 1086480 - RNA, 18 nt, Human
ugaacacaguacaauucc

SEQ ID NO: 1086481 - RNA, 22 nt, Human
cugugcccaccuggcucugagg

SEQ ID NO: 1086482 - RNA, 22 nt, Human
aucugcuugaaacuucuuauac

SEQ ID NO: 1086483 - RNA, 22 nt, Human
aguggggccgcgguccugcccu

SEQ ID NO: 1086484 - RNA, 22 nt, Human
uggcugaguuacgaacagagca

SEQ ID NO: 1086485 - RNA, 20 nt, Human
ugaaggugacuccuuucuug

SEQ ID NO: 1086486 - RNA, 22 nt, Human
gcuggagccauuggcuuggccu

SEQ ID NO: 1086487 - RNA, 22 nt, Human
aggagcugagggagcgcccuug

SEQ ID NO: 1086488 - RNA, 22 nt, Human
ucccugcagacguccugcgggu

SEQ ID NO: 1086489 - RNA, 22 nt, Human
uaguggagaguuguuuugugca

SEQ ID NO: 1086490 - RNA, 22 nt, Human
gucucagauucagacaucuaca

SEQ ID NO: 1086491 - RNA, 22 nt, Human
cagcuggcauaccugggcccgg

SEQ ID NO: 1086492 - RNA, 22 nt, Human
gacauucacagguaaacauucc

SEQ ID NO: 1086493 - RNA, 22 nt, Human
cauuucacaguauauucaaaau

SEQ ID NO: 1086494 - RNA, 22 nt, Human
agaaaauuacuccagagacaag

SEQ ID NO: 1086495 - RNA, 22 nt, Human
ucaaguauaucuagucauuagg

SEQ ID NO: 1086496 - RNA, 19 nt, Human
gguguccuagagauaagag

SEQ ID NO: 1086497 - RNA, 22 nt, Human
cagaggguugucaggcgccuug

SEQ ID NO: 1086498 - RNA, 22 nt, Human
agaggcugcacuugcucaugau

SEQ ID NO: 1086499 - RNA, 22 nt, Human
auauacuguguuccauggacca

SEQ ID NO: 1086500 - RNA, 22 nt, Human
uuuguacauauauaaaaucugu

SEQ ID NO: 1086501 - RNA, 22 nt, Human
aacugugaggaugugcaaauuc

SEQ ID NO: 1086502 - RNA, 22 nt, Human
uaugaagugucuguuguaucug

SEQ ID NO: 1086503 - RNA, 22 nt, Human
ggggcugaaccuggaggugguc

SEQ ID NO: 1086504 - RNA, 22 nt, Human
cauguggagaauuaaaaaauac

SEQ ID NO: 1086505 - RNA, 22 nt, Human
gaacauuacugcuugggagagg

SEQ ID NO: 1086506 - RNA, 22 nt, Human
aacauuucauuggaagcuaugu

SEQ ID NO: 1086507 - RNA, 22 nt, Human
uggaaaaacugagacuuagaca

SEQ ID NO: 1086508 - RNA, 22 nt, Human
ugcuaaauaaguggaauagaca

SEQ ID NO: 1086509 - RNA, 22 nt, Human
cuggacagaaaaggccacugga

SEQ ID NO: 1086510 - RNA, 22 nt, Human
uucuuacagcccuauuacuaaa

SEQ ID NO: 1086511 - RNA, 22 nt, Human
gcucaggcuggauugcaguggc

SEQ ID NO: 1086512 - RNA, 20 nt, Human
uucugagaguucacagcccc

SEQ ID NO: 1086513 - RNA, 23 nt, Human
ucucugaguuguacuuucccuug

SEQ ID NO: 1086514 - RNA, 22 nt, Human
ucacagacaccuuggccacagu

SEQ ID NO: 1086515 - RNA, 22 nt, Human
cuuugcuagugauuuguuuagg

SEQ ID NO: 1086516 - RNA, 22 nt, Human
ucugucaaaugggcauaaggau

SEQ ID NO: 1086517 - RNA, 22 nt, Human
uuucaacaggaugauaauaggc

SEQ ID NO: 1086518 - RNA, 17 nt, Human
ccucacagggaccagac

SEQ ID NO: 1086519 - RNA, 22 nt, Human
aaaggucagacuuaggcugggc

SEQ ID NO: 1086520 - RNA, 22 nt, Human
cauggggagacaccuagggaaa

SEQ ID NO: 1086521 - RNA, 19 nt, Human
aggcucugagcuccuggag

SEQ ID NO: 1086522 - RNA, 22 nt, Human
agcagggccucuggcacugguc

SEQ ID NO: 1086523 - RNA, 22 nt, Human
agauacaugucaagagacuuau

SEQ ID NO: 1086524 - RNA, 21 nt, Human
aaaugcuuuguauauaucugu

SEQ ID NO: 1086525 - RNA, 22 nt, Human
cccuuuaaguagaauauauuau

SEQ ID NO: 1086526 - RNA, 22 nt, Human
aggcuggccagugcugcagugg

SEQ ID NO: 1086527 - RNA, 22 nt, Human
cuggaaagugucuccauccugg

SEQ ID NO: 1086528 - RNA, 22 nt, Human
ccaggcccugcuccucacacca

SEQ ID NO: 1086529 - RNA, 22 nt, Human
aggcaggaaaaucgcuugaacc

SEQ ID NO: 1086530 - RNA, 22 nt, Human
cugugcuuccaggauggcagcu

SEQ ID NO: 1086531 - RNA, 22 nt, Human
ucccacucccaggcaggccucu

SEQ ID NO: 1086532 - RNA, 22 nt, Human
gaggcucagggaguauaugaau

SEQ ID NO: 1086533 - RNA, 22 nt, Human
caguggcuguuucuggaaggca

SEQ ID NO: 1086534 - RNA, 23 nt, Human
aggagccaggugcagcccuugug

SEQ ID NO: 1086535 - RNA, 22 nt, Human
caagagcauuuaguuagcuggu

SEQ ID NO: 1086536 - RNA, 20 nt, Human
aagauucauuguaauuaggg

SEQ ID NO: 1086537 - RNA, 22 nt, Human
ggcagggcccugauuccugggg

SEQ ID NO: 1086538 - RNA, 22 nt, Human
gcucugggcugcccucuggaca

SEQ ID NO: 1086539 - RNA, 22 nt, Human
aagauucuacaguagguacauu

SEQ ID NO: 1086540 - RNA, 22 nt, Human
acugucugcuggccccugguua

SEQ ID NO: 1086541 - RNA, 22 nt, Human
cugcagggagaggggacagccu

SEQ ID NO: 1086542 - RNA, 21 nt, Human
gcacagcaugaguguuggcau

SEQ ID NO: 1086543 - RNA, 22 nt, Human
cugcagccuaggugcagcuggg

SEQ ID NO: 1086544 - RNA, 22 nt, Human
uggaacacuuucaguagcuauu

SEQ ID NO: 1086545 - RNA, 21 nt, Human
ucuuuccugcccaguugcccu

SEQ ID NO: 1086546 - RNA, 21 nt, Human
acaugcauagagagauuucug

SEQ ID NO: 1086547 - RNA, 19 nt, Human
caggaaugagguaauggcu

SEQ ID NO: 1086548 - RNA, 22 nt, Human
augggcaguuaggaggccagga

SEQ ID NO: 1086549 - RNA, 22 nt, Human
aggagggcaggcuggcugccua

SEQ ID NO: 1086550 - RNA, 20 nt, Human
ucccaggcugggcuccagcu

SEQ ID NO: 1086551 - RNA, 22 nt, Human
ucugggguuggugcuuacacca

SEQ ID NO: 1086552 - RNA, 22 nt, Human
ucccuggcagcuaagggugguc

SEQ ID NO: 1086553 - RNA, 22 nt, Human
gccuucccacccugcgaggcug

SEQ ID NO: 1086554 - RNA, 18 nt, Human
accugccuguucuucucu

SEQ ID NO: 1086555 - RNA, 19 nt, Human
ccugucugucuucagcuag

SEQ ID NO: 1086556 - RNA, 22 nt, Human
ucuuuuccuucccuacagaucu

SEQ ID NO: 1086557 - RNA, 22 nt, Human
agugcugaagacuggcuaggga

SEQ ID NO: 1086558 - RNA, 22 nt, Human
aggccucagugaucaucaucag

SEQ ID NO: 1086559 - RNA, 22 nt, Human
aagauggcuuagaguccuggug

SEQ ID NO: 1086560 - RNA, 22 nt, Human
gaugaaaaaagacgagcauaua

SEQ ID NO: 1086561 - RNA, 22 nt, Human
cuuucuucaucaagugccacgu

SEQ ID NO: 1086562 - RNA, 22 nt, Human
uggugggaguccgcugugcugc

SEQ ID NO: 1086563 - RNA, 22 nt, Human
agaacagcagcacgucaagcug

SEQ ID NO: 1086564 - RNA, 22 nt, Human
uuguaacaaucugucauaaaug

SEQ ID NO: 1086565 - RNA, 22 nt, Human
uguccugcaacugaaggagaag

SEQ ID NO: 1086566 - RNA, 22 nt, Human
gcagauggcgcaguggaaguuc

SEQ ID NO: 1086567 - RNA, 22 nt, Human
gccuggcauuggagccggggca

SEQ ID NO: 1086568 - RNA, 22 nt, Human
uuaccaaugugcuuuugcuaca

SEQ ID NO: 1086569 - RNA, 22 nt, Human
gccugaugagcuuccagcugag

SEQ ID NO: 1086570 - RNA, 22 nt, Human
ccugaauaauuugugaaaagau

SEQ ID NO: 1086571 - RNA, 22 nt, Human
ucacuucuucccuugcacauau

SEQ ID NO: 1086572 - RNA, 22 nt, Human
uaagaaucggucgcaacagagg

SEQ ID NO: 1086573 - RNA, 22 nt, Human
ccugggcuccacuccaagagca

SEQ ID NO: 1086574 - RNA, 19 nt, Human
aaacucauagacucauauu

SEQ ID NO: 1086575 - RNA, 21 nt, Human
agcaggugaaccuccaguaca

SEQ ID NO: 1086576 - RNA, 22 nt, Human
guguaaggccccagguucuuua

SEQ ID NO: 1086577 - RNA, 22 nt, Human
gagcuuaggccagggacaggga

SEQ ID NO: 1086578 - RNA, 23 nt, Human
gagcugggauacaggcuuacugc

SEQ ID NO: 1086579 - RNA, 19 nt, Human
cagaaauagcgaaguguaa

SEQ ID NO: 1086580 - RNA, 22 nt, Human
caguuacauauuuaguagguua

SEQ ID NO: 1086581 - RNA, 22 nt, Human
ugcucuggaguggcuugugcac

SEQ ID NO: 1086582 - RNA, 22 nt, Human
ggagcugggaauuggaucaucu

SEQ ID NO: 1086583 - RNA, 22 nt, Human
gccuggagagcacugugcgcuu

SEQ ID NO: 1086584 - RNA, 22 nt, Human
uucacagaugccugaugugugg

SEQ ID NO: 1086585 - RNA, 23 nt, Human
augcucugggcugugggaccugc

SEQ ID NO: 1086586 - RNA, 17 nt, Human
cgagggcuugcuggcuc

SEQ ID NO: 1086587 - RNA, 22 nt, Human
gcugcagcucgccuuccggccu

SEQ ID NO: 1086588 - RNA, 22 nt, Human
gcaggguauaauacuuagguga

SEQ ID NO: 1086589 - RNA, 22 nt, Human
ccugggcaggccggacgcuggg

SEQ ID NO: 1086590 - RNA, 22 nt, Human
gucucccaucguuugugaggaa

SEQ ID NO: 1086591 - RNA, 22 nt, Human
uucuuuccaaccagauauuggu

SEQ ID NO: 1086592 - RNA, 17 nt, Human
gucauucucagaaaaug

SEQ ID NO: 1086593 - RNA, 22 nt, Human
uagaaacaaaaucugaugacuc

SEQ ID NO: 1086594 - RNA, 22 nt, Human
uccuucagaaaaccucagucuu

SEQ ID NO: 1086595 - RNA, 22 nt, Human
cagagcugguaagugguagagg

SEQ ID NO: 1086596 - RNA, 22 nt, Human
caggauuucauacaucuuuacu

SEQ ID NO: 1086597 - RNA, 22 nt, Human
ucagaagaaagauguuauuacu

SEQ ID NO: 1086598 - RNA, 18 nt, Human
auccuugaugagaggucu

SEQ ID NO: 1086599 - RNA, 22 nt, Human
uuccauauuuguguggcaaaag

SEQ ID NO: 1086600 - RNA, 22 nt, Human
gagcaggcauucuaguggcuga

SEQ ID NO: 1086601 - RNA, 22 nt, Human
cagcucugggugacaggagggc

SEQ ID NO: 1086602 - RNA, 22 nt, Human
aucaacauaaagaaguccucag

SEQ ID NO: 1086603 - RNA, 22 nt, Human
aaaguucuuugcaucuuugcuc

SEQ ID NO: 1086604 - RNA, 22 nt, Human
ucucuggccgagagucccuggg

SEQ ID NO: 1086605 - RNA, 23 nt, Human
auuucccauugugucagcagagc

SEQ ID NO: 1086606 - RNA, 22 nt, Human
uccucacaagcaagcacaggua

SEQ ID NO: 1086607 - RNA, 22 nt, Human
agacaguguguguauauauggu

SEQ ID NO: 1086608 - RNA, 22 nt, Human
cagggcuccccgcaccgcagcc

SEQ ID NO: 1086609 - RNA, 22 nt, Human
aauuaccaggauuuuucaguau

SEQ ID NO: 1086610 - RNA, 22 nt, Human
ucacagaaugucuagcauaauu

SEQ ID NO: 1086611 - RNA, 22 nt, Human
acauacuuauguguauaugugu

SEQ ID NO: 1086612 - RNA, 22 nt, Human
ugaaggaaugagggaguggguc

SEQ ID NO: 1086613 - RNA, 22 nt, Human
ucacauuuucuacuacuguacg

SEQ ID NO: 1086614 - RNA, 22 nt, Human
augaaaugugaaugcuuuucau

SEQ ID NO: 1086615 - RNA, 22 nt, Human
gaucuuuucagaauuuaucagu

SEQ ID NO: 1086616 - RNA, 22 nt, Human
agacuuuaaugugcaaaugaaa

SEQ ID NO: 1086617 - RNA, 20 nt, Human
ugguccugucccacccacuc

SEQ ID NO: 1086618 - RNA, 22 nt, Human
agaggcugaaugaugucaucau

SEQ ID NO: 1086619 - RNA, 22 nt, Human
ccaggcugcagucaaggggcau

SEQ ID NO: 1086620 - RNA, 22 nt, Human
uccccacacuuucacuccuggc

SEQ ID NO: 1086621 - RNA, 17 nt, Human
ccaggugggaggugggg

SEQ ID NO: 1086622 - RNA, 22 nt, Human
aaaugcacugaauauuccaaau

SEQ ID NO: 1086623 - RNA, 22 nt, Human
acacauauucauauguacuuac

SEQ ID NO: 1086624 - RNA, 22 nt, Human
ugggaaggggagcuggaaagga

SEQ ID NO: 1086625 - RNA, 22 nt, Human
uucagagcaucucuaaagccag

SEQ ID NO: 1086626 - RNA, 22 nt, Human
uuucaucuaacacuacauaggg

SEQ ID NO: 1086627 - RNA, 22 nt, Human
augcugugauuguagaaauauu

SEQ ID NO: 1086628 - RNA, 22 nt, Human
cuacauuuguucuauagcuuuu

SEQ ID NO: 1086629 - RNA, 22 nt, Human
gccaccagccccaugcgcugug

SEQ ID NO: 1086630 - RNA, 22 nt, Human
ccacagaaagccugggaagugg

SEQ ID NO: 1086631 - RNA, 22 nt, Human
uggcucaguuucaguccugguu

SEQ ID NO: 1086632 - RNA, 19 nt, Human
cagcaauaaugccagaugg

SEQ ID NO: 1086633 - RNA, 22 nt, Human
gggugagagucaggcagagauu

SEQ ID NO: 1086634 - RNA, 22 nt, Human
ucaguuuugaaaacauugaaug

SEQ ID NO: 1086635 - RNA, 20 nt, Human
auugugcagcccuuggcaga

SEQ ID NO: 1086636 - RNA, 22 nt, Human
aaggcugaggagggccugcagg

SEQ ID NO: 1086637 - RNA, 22 nt, Human
cuuuuuauagcuauguccuaug

SEQ ID NO: 1086638 - RNA, 22 nt, Human
caauauauaaugaguacuuucc

SEQ ID NO: 1086639 - RNA, 23 nt, Human
gggcugcuccaggccaaggcugg

SEQ ID NO: 1086640 - RNA, 22 nt, Human
ugcaggugugugcaagggaggg

SEQ ID NO: 1086641 - RNA, 22 nt, Human
aggaaagguagcgugccagcag

SEQ ID NO: 1086642 - RNA, 22 nt, Human
guacauucagcuuagcacuucu

SEQ ID NO: 1086643 - RNA, 18 nt, Human
agggucagugucacuggc

SEQ ID NO: 1086644 - RNA, 22 nt, Human
ccaaaguccauaguuuacauua

SEQ ID NO: 1086645 - RNA, 22 nt, Human
gggcacuguacacugugcaugg

SEQ ID NO: 1086646 - RNA, 23 nt, Human
uuugaacauuucuagauuacaua

SEQ ID NO: 1086647 - RNA, 20 nt, Human
ccagauggucccugugaaaa

SEQ ID NO: 1086648 - RNA, 22 nt, Human
auauuauaaguuauuucaaguu

SEQ ID NO: 1086649 - RNA, 22 nt, Human
ggugcaugguggaggugacccu

SEQ ID NO: 1086650 - RNA, 22 nt, Human
gggcagggguagcauuccaagu

SEQ ID NO: 1086651 - RNA, 19 nt, Human
guuuuuaguuucugaacug

SEQ ID NO: 1086652 - RNA, 20 nt, Human
ggccauggguugccugaggu

SEQ ID NO: 1086653 - RNA, 22 nt, Human
aggagcuggguuccuuuggugg

SEQ ID NO: 1086654 - RNA, 22 nt, Human
ucagaggugguaaaggacagca

SEQ ID NO: 1086655 - RNA, 22 nt, Human
aguguugucaaacggcucagca

SEQ ID NO: 1086656 - RNA, 22 nt, Human
ccacucugcugugcuccaugau

SEQ ID NO: 1086657 - RNA, 22 nt, Human
gacauuuaugaaggagauaugc

SEQ ID NO: 1086658 - RNA, 22 nt, Human
accaggcuggagugcaguggcg

SEQ ID NO: 1086659 - RNA, 22 nt, Human
caggaacaugucuccaauuaga

SEQ ID NO: 1086660 - RNA, 22 nt, Human
auuguauuuccagcuugaaugu

SEQ ID NO: 1086661 - RNA, 22 nt, Human
aauaauacaugagauuaauguu

SEQ ID NO: 1086662 - RNA, 22 nt, Human
cagugcagguuuagggcugggg

SEQ ID NO: 1086663 - RNA, 22 nt, Human
cagggccagcgcccaggcccag

SEQ ID NO: 1086664 - RNA, 19 nt, Human
uggggucaagagaggcuuc

SEQ ID NO: 1086665 - RNA, 22 nt, Human
ggagagaaauugagguagcaag

SEQ ID NO: 1086666 - RNA, 22 nt, Human
uucacagcuuaauaaggcucag

SEQ ID NO: 1086667 - RNA, 22 nt, Human
acacauaucuaagauagaugac

SEQ ID NO: 1086668 - RNA, 20 nt, Human
caguccaaucagaggccacc

SEQ ID NO: 1086669 - RNA, 22 nt, Human
caucaaauggcaagugaaagcu

SEQ ID NO: 1086670 - RNA, 22 nt, Human
ggcugugcuugguguccuugga

SEQ ID NO: 1086671 - RNA, 22 nt, Human
gacagggccgcagauggagacu

SEQ ID NO: 1086672 - RNA, 22 nt, Human
acaagaguaucuuugacuuuag

SEQ ID NO: 1086673 - RNA, 18 nt, Human
acucaggaaaugaugaca

SEQ ID NO: 1086674 - RNA, 22 nt, Human
auaaggcaagcugucaguuugu

SEQ ID NO: 1086675 - RNA, 22 nt, Human
cuugccuucuuuuccuauagaa

SEQ ID NO: 1086676 - RNA, 22 nt, Human
gagcucuguguagccugagggu

SEQ ID NO: 1086677 - RNA, 22 nt, Human
ugugcccauuccacuugaguac

SEQ ID NO: 1086678 - RNA, 22 nt, Human
guggcuucugcggugugcgcag

SEQ ID NO: 1086679 - RNA, 22 nt, Human
uacacuaauguuuuugcaaagc

SEQ ID NO: 1086680 - RNA, 22 nt, Human
uguuuuuaaaauguccugguua

SEQ ID NO: 1086681 - RNA, 22 nt, Human
aguaacagagcauggguucaga

SEQ ID NO: 1086682 - RNA, 22 nt, Human
aaugagacacgugaagcagaug

SEQ ID NO: 1086683 - RNA, 22 nt, Human
aauucacaauguguagucaugc

SEQ ID NO: 1086684 - RNA, 22 nt, Human
uugccuuugacggugcagcagu

SEQ ID NO: 1086685 - RNA, 22 nt, Human
aguuaacaaguuggcaaucaac

SEQ ID NO: 1086686 - RNA, 22 nt, Human
uggaggaugagugugggcucug

SEQ ID NO: 1086687 - RNA, 22 nt, Human
gaaggccauuagagccugugcc

SEQ ID NO: 1086688 - RNA, 22 nt, Human
cugcccuggguuuuaugggagu

SEQ ID NO: 1086689 - RNA, 22 nt, Human
ggagaagggacagacucagcuu

SEQ ID NO: 1086690 - RNA, 21 nt, Human
acaguauauuagauauuugaa

SEQ ID NO: 1086691 - RNA, 22 nt, Human
ucaucaaaggauugcaugauuu

SEQ ID NO: 1086692 - RNA, 22 nt, Human
ccugggcaauauagugaggccc

SEQ ID NO: 1086693 - RNA, 22 nt, Human
ggccucugccccagccacaccu

SEQ ID NO: 1086694 - RNA, 23 nt, Human
aagcugccuucgcaguuggucug

SEQ ID NO: 1086695 - RNA, 18 nt, Human
gguccugaaugccugcua

SEQ ID NO: 1086696 - RNA, 22 nt, Human
agcucauggugcuaucucaggg

SEQ ID NO: 1086697 - RNA, 22 nt, Human
agaaacuaagucauaacucuuu

SEQ ID NO: 1086698 - RNA, 22 nt, Human
uucucacaggaaguaggacuuu

SEQ ID NO: 1086699 - RNA, 22 nt, Human
ugucuuccucuuggcuugagcu

SEQ ID NO: 1086700 - RNA, 21 nt, Human
aucugaaagguuaguguugag

SEQ ID NO: 1086701 - RNA, 23 nt, Human
auacauacagucuuacugacuuu

SEQ ID NO: 1086702 - RNA, 20 nt, Human
acacauauagcagcauaaac

SEQ ID NO: 1086703 - RNA, 22 nt, Human
cucuucaaaugauuuccuuagg

SEQ ID NO: 1086704 - RNA, 22 nt, Human
uguuaucugagcaacgucgacg

SEQ ID NO: 1086705 - RNA, 22 nt, Human
gggacuguccucugugucugug

SEQ ID NO: 1086706 - RNA, 22 nt, Human
acacauuugggcuccuacauaa

SEQ ID NO: 1086707 - RNA, 19 nt, Human
cgcagguggaaggagccgc

SEQ ID NO: 1086708 - RNA, 22 nt, Human
uuuaaaagggguauuaagucca

SEQ ID NO: 1086709 - RNA, 22 nt, Human
ucacugcagacaaccucaguca

SEQ ID NO: 1086710 - RNA, 22 nt, Human
accaucaguacuggaugcugac

SEQ ID NO: 1086711 - RNA, 22 nt, Human
uggcaauaaagaccaacagguu

SEQ ID NO: 1086712 - RNA, 22 nt, Human
gcuuccagaucccaugcucuua

SEQ ID NO: 1086713 - RNA, 18 nt, Human
auuuugaacaaugcugua

SEQ ID NO: 1086714 - RNA, 22 nt, Human
auacagaaguuuuccacuuauu

SEQ ID NO: 1086715 - RNA, 22 nt, Human
agccaacuuagaagaaauuuga

SEQ ID NO: 1086716 - RNA, 22 nt, Human
gaacagcuucuugggagcuggg

SEQ ID NO: 1086717 - RNA, 22 nt, Human
uaaaucacaaauuuucucauuu

SEQ ID NO: 1086718 - RNA, 22 nt, Human
aacaguaugugagauuuacaca

SEQ ID NO: 1086719 - RNA, 22 nt, Human
cacauccuucagcugagcccag

SEQ ID NO: 1086720 - RNA, 22 nt, Human
ucuuucaagggcccuaguuugg

SEQ ID NO: 1086721 - RNA, 22 nt, Human
auuuguuucagggccuugguau

SEQ ID NO: 1086722 - RNA, 22 nt, Human
uuuuucaugagacuagaaguca

SEQ ID NO: 1086723 - RNA, 22 nt, Human
ccagcuggagcucgcagauagg

SEQ ID NO: 1086724 - RNA, 22 nt, Human
gcuuuucuccuuagugucccug

SEQ ID NO: 1086725 - RNA, 22 nt, Human
agccaacuaauuaaacaacuuu

SEQ ID NO: 1086726 - RNA, 17 nt, Human
agggggaaccugggagg

SEQ ID NO: 1086727 - RNA, 18 nt, Human
agccagguggaauggaac

SEQ ID NO: 1086728 - RNA, 23 nt, Human
gggagccaggaccucgcgcccca

SEQ ID NO: 1086729 - RNA, 22 nt, Human
acauauauguaaaguacuuugu

SEQ ID NO: 1086730 - RNA, 20 nt, Human
aagaaacuugaaaguacaag

SEQ ID NO: 1086731 - RNA, 22 nt, Human
acauauaagggaucagugacag

SEQ ID NO: 1086732 - RNA, 22 nt, Human
gcugucugggaggccuccacuu

SEQ ID NO: 1086733 - RNA, 22 nt, Human
ugcagggcccucauuccugucc

SEQ ID NO: 1086734 - RNA, 22 nt, Human
auuagaaugaaguauaggauuu

SEQ ID NO: 1086735 - RNA, 23 nt, Human
acauacauggagauaaagugaug

SEQ ID NO: 1086736 - RNA, 22 nt, Human
gcuggcuggaggagggagguug

SEQ ID NO: 1086737 - RNA, 22 nt, Human
gaggguggggaauagacugcua

SEQ ID NO: 1086738 - RNA, 22 nt, Human
uuucccaagaccauagauggaa

SEQ ID NO: 1086739 - RNA, 22 nt, Human
uuuuccuucuagagcagauuuc

SEQ ID NO: 1086740 - RNA, 22 nt, Human
aaggugucaccagauuggcagg

SEQ ID NO: 1086741 - RNA, 22 nt, Human
guccaggcugaccccuagagga

SEQ ID NO: 1086742 - RNA, 22 nt, Human
uccagggcugacuugggagagg

SEQ ID NO: 1086743 - RNA, 22 nt, Human
agauggagaaugacaauuaagg

SEQ ID NO: 1086744 - RNA, 22 nt, Human
cagccagcugaauguaccauga

SEQ ID NO: 1086745 - RNA, 22 nt, Human
uaagcaaaguuuauaaggcucu

SEQ ID NO: 1086746 - RNA, 22 nt, Human
ugggccugagcucaccaggggc

SEQ ID NO: 1086747 - RNA, 22 nt, Human
ggagcuguaacgagccauugcu

SEQ ID NO: 1086748 - RNA, 22 nt, Human
gggcgccgugggaaacagccgg

SEQ ID NO: 1086749 - RNA, 22 nt, Human
aauagcaccugagguaguuugu

SEQ ID NO: 1086750 - RNA, 22 nt, Human
cagcaagauuaagggcagaaaa

SEQ ID NO: 1086751 - RNA, 22 nt, Human
ugugaaaucacaggcuauuuag

SEQ ID NO: 1086752 - RNA, 17 nt, Human
uucucugagcuguauug

SEQ ID NO: 1086753 - RNA, 22 nt, Human
ugaucuuugggccauuaauaaa

SEQ ID NO: 1086754 - RNA, 22 nt, Human
aggggugaaggcccgauaggag

SEQ ID NO: 1086755 - RNA, 20 nt, Human
ugaggcaggagaauggcaug

SEQ ID NO: 1086756 - RNA, 23 nt, Human
aacagccaacuuuagcggguggc

SEQ ID NO: 1086757 - RNA, 22 nt, Human
uccuggcccacuaugccagcau

SEQ ID NO: 1086758 - RNA, 22 nt, Human
gcuguucuuucagcccagggcu

SEQ ID NO: 1086759 - RNA, 22 nt, Human
gcucccucugcucaggcacuug

SEQ ID NO: 1086760 - RNA, 22 nt, Human
aucaaaguaucucaauauggua

SEQ ID NO: 1086761 - RNA, 22 nt, Human
cagccccucccucaggcaggug

SEQ ID NO: 1086762 - RNA, 22 nt, Human
aaggcagaaagggaugugagug

SEQ ID NO: 1086763 - RNA, 21 nt, Human
agaaauguaucauucuuuucc

SEQ ID NO: 1086764 - RNA, 19 nt, Human
aggguccagggagcggcuc

SEQ ID NO: 1086765 - RNA, 22 nt, Human
cuucuuaaugacagauuaaaau

SEQ ID NO: 1086766 - RNA, 22 nt, Human
aggcucagauccuuguguccug

SEQ ID NO: 1086767 - RNA, 22 nt, Human
uauuugucagcuguugaguuca

SEQ ID NO: 1086768 - RNA, 22 nt, Human
gccaugcuugguaugcugugag

SEQ ID NO: 1086769 - RNA, 21 nt, Human
agaggccuuacaggauagacc

SEQ ID NO: 1086770 - RNA, 22 nt, Human
uggucaaugaagauacacuauu

SEQ ID NO: 1086771 - RNA, 22 nt, Human
uucaaacaguugcacaacuuau

SEQ ID NO: 1086772 - RNA, 22 nt, Human
cugugucucuccuuacaagacu

SEQ ID NO: 1086773 - RNA, 19 nt, Human
cagugcccgacgcaggucu

SEQ ID NO: 1086774 - RNA, 23 nt, Human
agcugaggcagaggggcauucuc

SEQ ID NO: 1086775 - RNA, 22 nt, Human
cagaaacagacaugacgcagua

SEQ ID NO: 1086776 - RNA, 22 nt, Human
ugcaaagaugaaauauuaaagg

SEQ ID NO: 1086777 - RNA, 22 nt, Human
gcagguggauauugcuacuuga

SEQ ID NO: 1086778 - RNA, 22 nt, Human
ccaaagucuggagcagcagagc

SEQ ID NO: 1086779 - RNA, 22 nt, Human
cugccuuccaaccccagacucc

SEQ ID NO: 1086780 - RNA, 22 nt, Human
agggaguuagaaauccaggaua

SEQ ID NO: 1086781 - RNA, 22 nt, Human
ugaaaucauugccaaguauuga

SEQ ID NO: 1086782 - RNA, 22 nt, Human
aggucauuccuugucuucuugc

SEQ ID NO: 1086783 - RNA, 22 nt, Human
uggcccugccgccacgacgucu

SEQ ID NO: 1086784 - RNA, 22 nt, Human
uuuuuccuagugcuuucuggua

SEQ ID NO: 1086785 - RNA, 22 nt, Human
ugggccugggucuuugcugcca

SEQ ID NO: 1086786 - RNA, 22 nt, Human
auaaaucuauuggacaugugug

SEQ ID NO: 1086787 - RNA, 22 nt, Human
uagcagaguaucuugcaaauua

SEQ ID NO: 1086788 - RNA, 22 nt, Human
ggguacaguucuuccaguguca

SEQ ID NO: 1086789 - RNA, 22 nt, Human
gaggcucagagggacuuucaag

SEQ ID NO: 1086790 - RNA, 22 nt, Human
uugcaccauuucacuuccauua

SEQ ID NO: 1086791 - RNA, 22 nt, Human
uggcauuucaccuuucauuucc

SEQ ID NO: 1086792 - RNA, 22 nt, Human
cucuggaggccuaaggaagugg

SEQ ID NO: 1086793 - RNA, 22 nt, Human
gcucagggccuggcugcggacu

SEQ ID NO: 1086794 - RNA, 22 nt, Human
gcuaugcaggagccuaaugaca

SEQ ID NO: 1086795 - RNA, 22 nt, Human
ucauccagccucaucaggagcu

SEQ ID NO: 1086796 - RNA, 22 nt, Human
uuauuacacugaaagaauugcg

SEQ ID NO: 1086797 - RNA, 22 nt, Human
aggaaucccgcaccagcugcug

SEQ ID NO: 1086798 - RNA, 23 nt, Human
acagaaaguucugcuggacagag

SEQ ID NO: 1086799 - RNA, 22 nt, Human
ucaaugauaucagcaggaugug

SEQ ID NO: 1086800 - RNA, 22 nt, Human
ccaagcagucugcuaggaguuu

SEQ ID NO: 1086801 - RNA, 22 nt, Human
aaaaggcuagcuaguaacagaa

SEQ ID NO: 1086802 - RNA, 22 nt, Human
gcucugggguuggaaagugauc

SEQ ID NO: 1086803 - RNA, 22 nt, Human
aaaagucugcucucauuucaga

SEQ ID NO: 1086804 - RNA, 22 nt, Human
accuucaagauugugggucaau

SEQ ID NO: 1086805 - RNA, 22 nt, Human
ugccaggcuuuggucaaaggcu

SEQ ID NO: 1086806 - RNA, 23 nt, Human
gcugccucuguuggucuucaguu

SEQ ID NO: 1086807 - RNA, 22 nt, Human
caggaaagagcugccaggcagg

SEQ ID NO: 1086808 - RNA, 22 nt, Human
cagaggcucaccagccuuucac

SEQ ID NO: 1086809 - RNA, 22 nt, Human
ucuucagacuguuguucuuuug

SEQ ID NO: 1086810 - RNA, 22 nt, Human
guggucagcagcagugggagug

SEQ ID NO: 1086811 - RNA, 22 nt, Human
caggcuggagugaguguagugg

SEQ ID NO: 1086812 - RNA, 22 nt, Human
ugucucugauaaguaguucagu

SEQ ID NO: 1086813 - RNA, 22 nt, Human
cuugggcucagacuugaggaca

SEQ ID NO: 1086814 - RNA, 22 nt, Human
auaacagacuuagaguuacaag

SEQ ID NO: 1086815 - RNA, 22 nt, Human
cagggccaccguguuugcugcu

SEQ ID NO: 1086816 - RNA, 22 nt, Human
ucugucucuuuguucugugagu

SEQ ID NO: 1086817 - RNA, 20 nt, Human
aggcucugccugcaggccca

SEQ ID NO: 1086818 - RNA, 22 nt, Human
aggguauaaagagcaagcagaa

SEQ ID NO: 1086819 - RNA, 22 nt, Human
cauuuugugcuagacacuaugg

SEQ ID NO: 1086820 - RNA, 22 nt, Human
ugagccagaguggagugugccu

SEQ ID NO: 1086821 - RNA, 22 nt, Human
uauuuguuccagagauaaaaau

SEQ ID NO: 1086822 - RNA, 22 nt, Human
cccagcuccuuacagggccgaa

SEQ ID NO: 1086823 - RNA, 22 nt, Human
cugcugagagccccagcugaga

SEQ ID NO: 1086824 - RNA, 22 nt, Human
ccagggugugagaaggaaguag

SEQ ID NO: 1086825 - RNA, 22 nt, Human
acuacagaagucuuauuagaga

SEQ ID NO: 1086826 - RNA, 22 nt, Human
ccugccugucuuuauccccugu

SEQ ID NO: 1086827 - RNA, 22 nt, Human
agugggcugguggcagggagaa

SEQ ID NO: 1086828 - RNA, 22 nt, Human
gcaagaugguuauaaaaaaugu

SEQ ID NO: 1086829 - RNA, 22 nt, Human
aacaaauguguggcaguguggg

SEQ ID NO: 1086830 - RNA, 23 nt, Human
ugcaggugauuaauccaguuuca

SEQ ID NO: 1086831 - RNA, 22 nt, Human
cagccucuaagcacagccucuc

SEQ ID NO: 1086832 - RNA, 22 nt, Human
guacuucccugggaggcaagca

SEQ ID NO: 1086833 - RNA, 19 nt, Human
uuucuuccaaagacuaugg

SEQ ID NO: 1086834 - RNA, 22 nt, Human
gccagcaguccugcugugugcc

SEQ ID NO: 1086835 - RNA, 22 nt, Human
agagacugcgugucagcgcugg

SEQ ID NO: 1086836 - RNA, 22 nt, Human
aauuucagauauuaaagaauga

SEQ ID NO: 1086837 - RNA, 19 nt, Human
gcuggcuggaggagggaca

SEQ ID NO: 1086838 - RNA, 18 nt, Human
agagcagcggcaucacac

SEQ ID NO: 1086839 - RNA, 22 nt, Human
uacaguuacugcauuucuaaua

SEQ ID NO: 1086840 - RNA, 22 nt, Human
augcaagacauaaauaaucuuu

SEQ ID NO: 1086841 - RNA, 22 nt, Human
ccuccuggcccugggccuggaa

SEQ ID NO: 1086842 - RNA, 18 nt, Human
ccuggaccugucuccuuu

SEQ ID NO: 1086843 - RNA, 22 nt, Human
gauaauauuagaagauacaaau

SEQ ID NO: 1086844 - RNA, 22 nt, Human
cgagcagaauggagggugccga

SEQ ID NO: 1086845 - RNA, 22 nt, Human
cugauucucugacucuuggcuu

SEQ ID NO: 1086846 - RNA, 22 nt, Human
agcuccugaaaagcgcuugcuu

SEQ ID NO: 1086847 - RNA, 22 nt, Human
ucaaauucagugugacaacauu

SEQ ID NO: 1086848 - RNA, 22 nt, Human
aggcucugcagugcuggaggac

SEQ ID NO: 1086849 - RNA, 22 nt, Human
agcugcugagagucugccgggc

SEQ ID NO: 1086850 - RNA, 22 nt, Human
agcacagggcccagccuaggcc

SEQ ID NO: 1086851 - RNA, 22 nt, Human
uggcucagccuggcccuuucau

SEQ ID NO: 1086852 - RNA, 22 nt, Human
cuacugaugcuauacuucucag

SEQ ID NO: 1086853 - RNA, 22 nt, Human
uugggaguuccuacugcgguuu

SEQ ID NO: 1086854 - RNA, 23 nt, Human
cagcccuuccugcauguuuuugu

SEQ ID NO: 1086855 - RNA, 22 nt, Human
ucuuccucccuacagagcucag

SEQ ID NO: 1086856 - RNA, 22 nt, Human
uuccucaugggguuccuucaga

SEQ ID NO: 1086857 - RNA, 21 nt, Human
gcucccugcucagcuccuggg

SEQ ID NO: 1086858 - RNA, 22 nt, Human
uggguggaauaaaucaguucug

SEQ ID NO: 1086859 - RNA, 22 nt, Human
uuucacagcaacacugucugca

SEQ ID NO: 1086860 - RNA, 22 nt, Human
cagcugugcuguauuaagcucu

SEQ ID NO: 1086861 - RNA, 22 nt, Human
aacaguuuguggauagcuugua

SEQ ID NO: 1086862 - RNA, 22 nt, Human
ucucacugcaaauauuauguau

SEQ ID NO: 1086863 - RNA, 22 nt, Human
cuccaggccagggaaguggaca

SEQ ID NO: 1086864 - RNA, 22 nt, Human
ugcccugccugagagacaguaa

SEQ ID NO: 1086865 - RNA, 22 nt, Human
ugucaaagccugaaucacauag

SEQ ID NO: 1086866 - RNA, 22 nt, Human
uguccucuuccagugcuccuuc

SEQ ID NO: 1086867 - RNA, 22 nt, Human
agggaauguagcaagaugccaa

SEQ ID NO: 1086868 - RNA, 22 nt, Human
cagccaucaguaaagacagcuu

SEQ ID NO: 1086869 - RNA, 22 nt, Human
cauagcaacagcaucaagucaa

SEQ ID NO: 1086870 - RNA, 20 nt, Human
gagggcaggcacccauuuca

SEQ ID NO: 1086871 - RNA, 20 nt, Human
uaaggcuguuuuguauuccu

SEQ ID NO: 1086872 - RNA, 22 nt, Human
gcagccugaggcccuuucuggc

SEQ ID NO: 1086873 - RNA, 22 nt, Human
agucauaauuauaaacaucagu

SEQ ID NO: 1086874 - RNA, 22 nt, Human
aaugggaggauuuucucucuug

SEQ ID NO: 1086875 - RNA, 21 nt, Human
aguuucacagaggggccgucc

SEQ ID NO: 1086876 - RNA, 22 nt, Human
cacuuaaaucuguugagaaaaa

SEQ ID NO: 1086877 - RNA, 22 nt, Human
ugaaugaauccuaacaaagaca

SEQ ID NO: 1086878 - RNA, 20 nt, Human
gagauuuccaaucaugccca

SEQ ID NO: 1086879 - RNA, 22 nt, Human
auuccaaagccugaauaaugga

SEQ ID NO: 1086880 - RNA, 22 nt, Human
uaccagggaacagggauauuaa

SEQ ID NO: 1086881 - RNA, 22 nt, Human
cugggcucaagaagucuucccu

SEQ ID NO: 1086882 - RNA, 22 nt, Human
ucccucagcucauauuuaugcc

SEQ ID NO: 1086883 - RNA, 22 nt, Human
gcagccaggaaagcuggacccu

SEQ ID NO: 1086884 - RNA, 22 nt, Human
agcaggcacaagaaagggaggu

SEQ ID NO: 1086885 - RNA, 22 nt, Human
ucaggcaggcagagggcaaaug

SEQ ID NO: 1086886 - RNA, 22 nt, Human
cucugagaugauaccuucugga

SEQ ID NO: 1086887 - RNA, 22 nt, Human
agugcaaauuauuuaccugauu

SEQ ID NO: 1086888 - RNA, 22 nt, Human
gcuggccaguguggugaccacc

SEQ ID NO: 1086889 - RNA, 21 nt, Human
aagagcuggaucaaggauaag

SEQ ID NO: 1086890 - RNA, 22 nt, Human
aauaagugaguuuagcaaguuu

SEQ ID NO: 1086891 - RNA, 22 nt, Human
gugucccagccccacaggccug

SEQ ID NO: 1086892 - RNA, 22 nt, Human
ucaucuugcugccauugcuuua

SEQ ID NO: 1086893 - RNA, 22 nt, Human
accuuuuauguaaauauauguu

SEQ ID NO: 1086894 - RNA, 22 nt, Human
agggaacaaaacucuaaaauuc

SEQ ID NO: 1086895 - RNA, 22 nt, Human
ugagcuuacgugggaacagacu

SEQ ID NO: 1086896 - RNA, 22 nt, Human
caggccuggguucaaaucccuu

SEQ ID NO: 1086897 - RNA, 22 nt, Human
ucaauacuuaagcuuaauucua

SEQ ID NO: 1086898 - RNA, 18 nt, Human
acagggagggcgcugggg

SEQ ID NO: 1086899 - RNA, 22 nt, Human
acauguacauacacauauguaa

SEQ ID NO: 1086900 - RNA, 22 nt, Human
agugcaaagaaaucagcuuugu

SEQ ID NO: 1086901 - RNA, 22 nt, Human
cuuuacaaccuaaguugaagcu

SEQ ID NO: 1086902 - RNA, 22 nt, Human
gcuucucaauucucacccucca

SEQ ID NO: 1086903 - RNA, 22 nt, Human
ugggcuggagcuuguugcuucc

SEQ ID NO: 1086904 - RNA, 22 nt, Human
aaagucacuuacagcucuuuug

SEQ ID NO: 1086905 - RNA, 21 nt, Human
cgacaggagaggcagccagcc

SEQ ID NO: 1086906 - RNA, 22 nt, Human
uauuauuaugcauagcaugaaa

SEQ ID NO: 1086907 - RNA, 22 nt, Human
ggcucagcacagggcuggcauc

SEQ ID NO: 1086908 - RNA, 22 nt, Human
acucaggaaaugaagacugguu

SEQ ID NO: 1086909 - RNA, 22 nt, Human
acagcugugauuucuaucauga

SEQ ID NO: 1086910 - RNA, 22 nt, Human
auauucuugaagggagauuaua

SEQ ID NO: 1086911 - RNA, 22 nt, Human
ucaggaacagaauuuucuaaaa

SEQ ID NO: 1086912 - RNA, 20 nt, Human
auucuaaagcucugcucuuu

SEQ ID NO: 1086913 - RNA, 22 nt, Human
uucuaacucuguuauguguuuc

SEQ ID NO: 1086914 - RNA, 22 nt, Human
uugugaguagugccgcaauaaa

SEQ ID NO: 1086915 - RNA, 22 nt, Human
uguggccuugcagccuggaggu

SEQ ID NO: 1086916 - RNA, 22 nt, Human
gccugcuggacauuggccggcc

SEQ ID NO: 1086917 - RNA, 22 nt, Human
gagcugcacgcagcauccaaga

SEQ ID NO: 1086918 - RNA, 18 nt, Human
cucaccauucugcccaau

SEQ ID NO: 1086919 - RNA, 22 nt, Human
guccugucccccaaggcugugg

SEQ ID NO: 1086920 - RNA, 22 nt, Human
uucuucaaaguccuuauuccuu

SEQ ID NO: 1086921 - RNA, 22 nt, Human
acagaugaggaauuuauuuggu

SEQ ID NO: 1086922 - RNA, 22 nt, Human
ggcugccacgucgaggguccaa

SEQ ID NO: 1086923 - RNA, 22 nt, Human
uggaggagaauuuauggucgaa

SEQ ID NO: 1086924 - RNA, 22 nt, Human
ccugggcaucucaugcaccugc

SEQ ID NO: 1086925 - RNA, 22 nt, Human
ccagcuccaggacugggagcug

SEQ ID NO: 1086926 - RNA, 22 nt, Human
aguauuucaguuacuuuaaaau

SEQ ID NO: 1086927 - RNA, 22 nt, Human
gagcugaaauaugaagccaauu

SEQ ID NO: 1086928 - RNA, 22 nt, Human
aggugcugccccgagaaggaug

SEQ ID NO: 1086929 - RNA, 22 nt, Human
ggugaagguggaacgcagagca

SEQ ID NO: 1086930 - RNA, 21 nt, Human
acaggcuuuagaaaaugacuc

SEQ ID NO: 1086931 - RNA, 22 nt, Human
uggcaggaggaugaggcggcua

SEQ ID NO: 1086932 - RNA, 22 nt, Human
ugcugccagagagacagggacu

SEQ ID NO: 1086933 - RNA, 22 nt, Human
agcaggguuuggggauuggcac

SEQ ID NO: 1086934 - RNA, 22 nt, Human
aagggcagggaguuugugucua

SEQ ID NO: 1086935 - RNA, 22 nt, Human
ugaggaagccaaacagcuacac

SEQ ID NO: 1086936 - RNA, 22 nt, Human
aaugugaggccuugguaguuau

SEQ ID NO: 1086937 - RNA, 22 nt, Human
cuuuuuuaagguagcuccuccu

SEQ ID NO: 1086938 - RNA, 22 nt, Human
gaugcacugcaguauauacugu

SEQ ID NO: 1086939 - RNA, 22 nt, Human
uauugaugcuuggauugggcca

SEQ ID NO: 1086940 - RNA, 22 nt, Human
acagcuguauccccagagcuca

SEQ ID NO: 1086941 - RNA, 22 nt, Human
acagucuugagcaucagccaga

SEQ ID NO: 1086942 - RNA, 22 nt, Human
ggcaggugugagaucgaggcca

SEQ ID NO: 1086943 - RNA, 22 nt, Human
ccaggcucuaucccuccuucuu

SEQ ID NO: 1086944 - RNA, 22 nt, Human
uccugccuuagagcaaggaaaa

SEQ ID NO: 1086945 - RNA, 22 nt, Human
aggggacacggcuucuccaggg

SEQ ID NO: 1086946 - RNA, 22 nt, Human
gccugccuagaauugcagcuuu

SEQ ID NO: 1086947 - RNA, 22 nt, Human
agugggcaggcagggugcgcag

SEQ ID NO: 1086948 - RNA, 22 nt, Human
acagugaaaagaauauuagaau

SEQ ID NO: 1086949 - RNA, 22 nt, Human
ucagcccugggacccagggaug

SEQ ID NO: 1086950 - RNA, 22 nt, Human
cugacucccaaagaggacgcgu

SEQ ID NO: 1086951 - RNA, 22 nt, Human
cacauuugaaggaauuagcauu

SEQ ID NO: 1086952 - RNA, 21 nt, Human
aggacaggaacuggcugaaua

SEQ ID NO: 1086953 - RNA, 22 nt, Human
caucagaaucugagucucugcc

SEQ ID NO: 1086954 - RNA, 22 nt, Human
ucagucucaucaacucuauucc

SEQ ID NO: 1086955 - RNA, 22 nt, Human
uuccaaauuaaaauguacaaug

SEQ ID NO: 1086956 - RNA, 22 nt, Human
uaaagucauaagaguggauccg

SEQ ID NO: 1086957 - RNA, 22 nt, Human
uugguuuacuaggauucaaauu

SEQ ID NO: 1086958 - RNA, 22 nt, Human
ugcagugggccggaggccaggg

SEQ ID NO: 1086959 - RNA, 22 nt, Human
ugcagaugagagggaguuuuua

SEQ ID NO: 1086960 - RNA, 19 nt, Human
aaccuuuagaucauucucc

SEQ ID NO: 1086961 - RNA, 22 nt, Human
aagccaggguuuguggaucuau

SEQ ID NO: 1086962 - RNA, 22 nt, Human
guuucacagauggggagacacg

SEQ ID NO: 1086963 - RNA, 21 nt, Human
ugcaggcaggcagagaugcug

SEQ ID NO: 1086964 - RNA, 21 nt, Human
uccuccuggccaggcggcccc

SEQ ID NO: 1086965 - RNA, 22 nt, Human
aaaguuggauuucauccucaug

SEQ ID NO: 1086966 - RNA, 22 nt, Human
cuguucaugcugauucuguaug

SEQ ID NO: 1086967 - RNA, 22 nt, Human
aauguuuuaaaagagauugaga

SEQ ID NO: 1086968 - RNA, 22 nt, Human
uaugaucuuuauaaccuaucuu

SEQ ID NO: 1086969 - RNA, 22 nt, Human
ugcagucuuccagcugcacaaa

SEQ ID NO: 1086970 - RNA, 22 nt, Human
ucaguguuuuuaaagcaauaua

SEQ ID NO: 1086971 - RNA, 22 nt, Human
aaacauuccauauauaccuugu

SEQ ID NO: 1086972 - RNA, 22 nt, Human
uugcaaaggggaauaaagcaau

SEQ ID NO: 1086973 - RNA, 22 nt, Human
ccuuccaggugcaggcaagccu

SEQ ID NO: 1086974 - RNA, 22 nt, Human
guuguauagagggcaugaaucu

SEQ ID NO: 1086975 - RNA, 22 nt, Human
ccaagcugacugugcuguugug

SEQ ID NO: 1086976 - RNA, 22 nt, Human
aggaacacaucuuuguagcagg

SEQ ID NO: 1086977 - RNA, 22 nt, Human
aggaggugcguggugauccccu

SEQ ID NO: 1086978 - RNA, 22 nt, Human
uccugggcugugugccacucug

SEQ ID NO: 1086979 - RNA, 22 nt, Human
augaaacaaggguauuuucucu

SEQ ID NO: 1086980 - RNA, 22 nt, Human
ucacguuuuacugagugagaua

SEQ ID NO: 1086981 - RNA, 22 nt, Human
gcuuuacagggcacaaagggag

SEQ ID NO: 1086982 - RNA, 22 nt, Human
uucacaggcuuggagguggggg

SEQ ID NO: 1086983 - RNA, 22 nt, Human
aaaauacuacugucuucuuccc

SEQ ID NO: 1086984 - RNA, 22 nt, Human
agccagugcaacagcagugaag

SEQ ID NO: 1086985 - RNA, 23 nt, Human
agugaucuguguuugaagaaugc

SEQ ID NO: 1086986 - RNA, 22 nt, Human
gaagagcugugauucaggcuua

SEQ ID NO: 1086987 - RNA, 22 nt, Human
cuggcaggucucgcugacgugu

SEQ ID NO: 1086988 - RNA, 22 nt, Human
guggcugcaucggggugaccag

SEQ ID NO: 1086989 - RNA, 22 nt, Human
caggccugucugcacaugaggc

SEQ ID NO: 1086990 - RNA, 22 nt, Human
cuggccaggcucucacgugguc

SEQ ID NO: 1086991 - RNA, 22 nt, Human
aaaggccaugguuggaguguuu

SEQ ID NO: 1086992 - RNA, 17 nt, Human
gcugcagcgguaggcag

SEQ ID NO: 1086993 - RNA, 22 nt, Human
uuuuaguuuggauuucuaaagc

SEQ ID NO: 1086994 - RNA, 22 nt, Human
agaugaaaauacgugacuuuaa

SEQ ID NO: 1086995 - RNA, 22 nt, Human
agcucugcuucuugggaagaug

SEQ ID NO: 1086996 - RNA, 22 nt, Human
ccagaugggcuuuagcaaauga

SEQ ID NO: 1086997 - RNA, 22 nt, Human
aggcagaggagaaugaucuucc

SEQ ID NO: 1086998 - RNA, 22 nt, Human
gagagaagaauguuccgaggcc

SEQ ID NO: 1086999 - RNA, 22 nt, Human
acccugagggguauagcagaag

SEQ ID NO: 1087000 - RNA, 22 nt, Human
uaggauuucucuuuuugcaacu

SEQ ID NO: 1087001 - RNA, 16 nt, Human
ccaggaacacacagcu

SEQ ID NO: 1087002 - RNA, 22 nt, Human
uucaaauuaccacauuugcuua

SEQ ID NO: 1087003 - RNA, 22 nt, Human
aaugacuuugaaauauuugagu

SEQ ID NO: 1087004 - RNA, 21 nt, Human
gcagcaguguucuagaauacu

SEQ ID NO: 1087005 - RNA, 22 nt, Human
aaacagugacugguacauaaua

SEQ ID NO: 1087006 - RNA, 22 nt, Human
ccugagggcgccgagcucccag

SEQ ID NO: 1087007 - RNA, 22 nt, Human
ucagggaaauagcagggcugaa

SEQ ID NO: 1087008 - RNA, 22 nt, Human
ucaaaaauggucuuugagcugc

SEQ ID NO: 1087009 - RNA, 17 nt, Human
aaaauucuguaaagagg

SEQ ID NO: 1087010 - RNA, 22 nt, Human
uggcagucuuguaggcaucucc

SEQ ID NO: 1087011 - RNA, 22 nt, Human
ggccugugucggccccggguuc

SEQ ID NO: 1087012 - RNA, 22 nt, Human
uaaacauggauucugaucacag

SEQ ID NO: 1087013 - RNA, 22 nt, Human
uugcuaaaaauggaauuauagg

SEQ ID NO: 1087014 - RNA, 22 nt, Human
uccucuugggaauaccuuucua

SEQ ID NO: 1087015 - RNA, 22 nt, Human
gcuccaggagagggaagcagau

SEQ ID NO: 1087016 - RNA, 22 nt, Human
cucugcugucucagaugggcca

SEQ ID NO: 1087017 - RNA, 22 nt, Human
cugggcucuguguuucaguuuc

SEQ ID NO: 1087018 - RNA, 22 nt, Human
aaugggaagccagaagacaagg

SEQ ID NO: 1087019 - RNA, 21 nt, Human
gcagcagaggcuugacagaca

SEQ ID NO: 1087020 - RNA, 22 nt, Human
uuucugacugguguauaauagg

SEQ ID NO: 1087021 - RNA, 22 nt, Human
uaaaguguuguacaaauguaug

SEQ ID NO: 1087022 - RNA, 22 nt, Human
uuucuuucucguaaacuuaguu

SEQ ID NO: 1087023 - RNA, 22 nt, Human
uuuaauagggcccaaugagacu

SEQ ID NO: 1087024 - RNA, 22 nt, Human
cuucacagucuuuauuuccucc

SEQ ID NO: 1087025 - RNA, 22 nt, Human
aauaauaagauacuaagggagu

SEQ ID NO: 1087026 - RNA, 22 nt, Human
agcuggagcuucaagcagguaa

SEQ ID NO: 1087027 - RNA, 20 nt, Human
uacaaauuuuccauguuucc

SEQ ID NO: 1087028 - RNA, 22 nt, Human
acccucagacagcuguggccag

SEQ ID NO: 1087029 - RNA, 22 nt, Human
aggagguguugauagaagguuu

SEQ ID NO: 1087030 - RNA, 22 nt, Human
aucagcuggaacaagugucuga

SEQ ID NO: 1087031 - RNA, 18 nt, Human
uaggaaccacuugcagag

SEQ ID NO: 1087032 - RNA, 22 nt, Human
agacaucuugcacacauauacu

SEQ ID NO: 1087033 - RNA, 22 nt, Human
ugcuuugggucucucuaguuuc

SEQ ID NO: 1087034 - RNA, 22 nt, Human
aucaaaaugcuccagugauggu

SEQ ID NO: 1087035 - RNA, 22 nt, Human
ucuucucaaaaaauguaggugg

SEQ ID NO: 1087036 - RNA, 22 nt, Human
ugaaggccagcagagugaaggc

SEQ ID NO: 1087037 - RNA, 22 nt, Human
cagcuguuacucugaguaaaug

SEQ ID NO: 1087038 - RNA, 22 nt, Human
cagggcagaaggcacucuacuc

SEQ ID NO: 1087039 - RNA, 22 nt, Human
uauuuuacaugauccagaguug

SEQ ID NO: 1087040 - RNA, 22 nt, Human
gaagaaucugaggacagucauu

SEQ ID NO: 1087041 - RNA, 22 nt, Human
gaggcgagaagcuggagauggu

SEQ ID NO: 1087042 - RNA, 22 nt, Human
cuuucaaugugccugccuuggg

SEQ ID NO: 1087043 - RNA, 22 nt, Human
ggcaggugcaccugagccaucu

SEQ ID NO: 1087044 - RNA, 22 nt, Human
ugcaggugaaaauuaugaggau

SEQ ID NO: 1087045 - RNA, 22 nt, Human
guggcagcaaaauccugcauuc

SEQ ID NO: 1087046 - RNA, 22 nt, Human
gaggcagagacuccaccuucag

SEQ ID NO: 1087047 - RNA, 22 nt, Human
gagcuggcaggaggcuccccga

SEQ ID NO: 1087048 - RNA, 23 nt, Human
cccuggccuuggggcacaggcug

SEQ ID NO: 1087049 - RNA, 20 nt, Human
cagcugccuggcucugggau

SEQ ID NO: 1087050 - RNA, 22 nt, Human
cugaggagagaucacguggugu

SEQ ID NO: 1087051 - RNA, 22 nt, Human
uagcagagguaaguguggcaau

SEQ ID NO: 1087052 - RNA, 22 nt, Human
uacuuuucuuugucaugcaucu

SEQ ID NO: 1087053 - RNA, 22 nt, Human
agagcugggugguggugacuca

SEQ ID NO: 1087054 - RNA, 22 nt, Human
caggagacaaguuagcagcuga

SEQ ID NO: 1087055 - RNA, 23 nt, Human
uuucaacuccugccauuauuucu

SEQ ID NO: 1087056 - RNA, 22 nt, Human
ugagccuggccugcagagacca

SEQ ID NO: 1087057 - RNA, 22 nt, Human
aggcugagcaaagggccuuacc

SEQ ID NO: 1087058 - RNA, 22 nt, Human
agguaaugcauauaaagugcuu

SEQ ID NO: 1087059 - RNA, 22 nt, Human
agaggcugucccuugcuauucc

SEQ ID NO: 1087060 - RNA, 20 nt, Human
agaagaggauacaaccaggc

SEQ ID NO: 1087061 - RNA, 22 nt, Human
acaggugggcuuaagagucggc

SEQ ID NO: 1087062 - RNA, 22 nt, Human
ugguuccuucugcauuuucagc

SEQ ID NO: 1087063 - RNA, 22 nt, Human
aucuuguuauaagagauaaugg

SEQ ID NO: 1087064 - RNA, 22 nt, Human
uuaguagagagucauguuuuua

SEQ ID NO: 1087065 - RNA, 22 nt, Human
cuccaaauauaaucacauugga

SEQ ID NO: 1087066 - RNA, 22 nt, Human
uauuuaauuugcucauugugau

SEQ ID NO: 1087067 - RNA, 22 nt, Human
uugauuuuaaaauagugacacu

SEQ ID NO: 1087068 - RNA, 16 nt, Human
uaacauuuuuaaaagg

SEQ ID NO: 1087069 - RNA, 22 nt, Human
auucaacuguaaacuuguucac

SEQ ID NO: 1087070 - RNA, 22 nt, Human
auaucuuuuagagcaagcuugu

SEQ ID NO: 1087071 - RNA, 22 nt, Human
cucugagcuccuggaagcgugc

SEQ ID NO: 1087072 - RNA, 20 nt, Human
uuucaagucagcaauucuca

SEQ ID NO: 1087073 - RNA, 22 nt, Human
ugaggccuggacucugcaugga

SEQ ID NO: 1087074 - RNA, 22 nt, Human
ggcucugcugguaagaugccuc

SEQ ID NO: 1087075 - RNA, 22 nt, Human
ugccugucuucaggagugucac

SEQ ID NO: 1087076 - RNA, 22 nt, Human
uguuuuaagggucaacugucac

SEQ ID NO: 1087077 - RNA, 23 nt, Human
gccuucagcucgggaaggcuccc

SEQ ID NO: 1087078 - RNA, 22 nt, Human
acugucuugcuaugagcuccca

SEQ ID NO: 1087079 - RNA, 22 nt, Human
uuuacuuuugguaaggucauuu

SEQ ID NO: 1087080 - RNA, 19 nt, Human
aaaagucuauucaauuaca

SEQ ID NO: 1087081 - RNA, 22 nt, Human
caggaaaaugucaauggaaagc

SEQ ID NO: 1087082 - RNA, 22 nt, Human
agccaggggagucagcugcugg

SEQ ID NO: 1087083 - RNA, 22 nt, Human
uucuuucagaacacaagugauu

SEQ ID NO: 1087084 - RNA, 22 nt, Human
ccuugaggaguccauaguauca

SEQ ID NO: 1087085 - RNA, 22 nt, Human
aggcugggaaaccugaaguugu

SEQ ID NO: 1087086 - RNA, 22 nt, Human
aggcugugcacagggcaccugc

SEQ ID NO: 1087087 - RNA, 22 nt, Human
ccugggagcuguggaaaggcug

SEQ ID NO: 1087088 - RNA, 22 nt, Human
ggaagccaagguggccucuauu

SEQ ID NO: 1087089 - RNA, 23 nt, Human
acagaauaccauugacuaggugu

SEQ ID NO: 1087090 - RNA, 22 nt, Human
agccaacuaggagauuaaggua

SEQ ID NO: 1087091 - RNA, 22 nt, Human
cuacacaguucugccuaauggc

SEQ ID NO: 1087092 - RNA, 22 nt, Human
cauuaaaauaucucaugguguu

SEQ ID NO: 1087093 - RNA, 22 nt, Human
uccugaaaauaauuucacaaga

SEQ ID NO: 1087094 - RNA, 22 nt, Human
augggaggaugcucgggugcuc

SEQ ID NO: 1087095 - RNA, 22 nt, Human
agaaucaaagagaaauacuuug

SEQ ID NO: 1087096 - RNA, 22 nt, Human
aacaaagcaccacugagucagu

SEQ ID NO: 1087097 - RNA, 23 nt, Human
uucaaaacuggaaaaucagaugc

SEQ ID NO: 1087098 - RNA, 22 nt, Human
caggggaguuuuaugcaacaga

SEQ ID NO: 1087099 - RNA, 22 nt, Human
ccagagccccugagcuucccug

SEQ ID NO: 1087100 - RNA, 22 nt, Human
cccaggaacagcacagaacagc

SEQ ID NO: 1087101 - RNA, 22 nt, Human
gaggcacagagcccuaggagcu

SEQ ID NO: 1087102 - RNA, 22 nt, Human
gccugcugaaccucaugcaguc

SEQ ID NO: 1087103 - RNA, 22 nt, Human
ccccuuccgucucuugaguguc

SEQ ID NO: 1087104 - RNA, 22 nt, Human
ggcuucugaaaucucugugcgu

SEQ ID NO: 1087105 - RNA, 17 nt, Human
ucagcaggggccaagcu

SEQ ID NO: 1087106 - RNA, 20 nt, Human
ggcaggcaggagguuuccag

SEQ ID NO: 1087107 - RNA, 22 nt, Human
auucucagaucuuagaggaaua

SEQ ID NO: 1087108 - RNA, 19 nt, Human
cucugcuugguccauaugc

SEQ ID NO: 1087109 - RNA, 18 nt, Human
cccacggugcuguagggc

SEQ ID NO: 1087110 - RNA, 20 nt, Human
auucacaggcacaaaacccu

SEQ ID NO: 1087111 - RNA, 22 nt, Human
ucuuccucaugaauucucguau

SEQ ID NO: 1087112 - RNA, 22 nt, Human
aagauuguuuuggaugcuaacu

SEQ ID NO: 1087113 - RNA, 22 nt, Human
ucucuucuaacacuagaaauuc

SEQ ID NO: 1087114 - RNA, 22 nt, Human
uaacauguuaagaaauuagaua

SEQ ID NO: 1087115 - RNA, 21 nt, Human
cuuugcaucuauauguucuca

SEQ ID NO: 1087116 - RNA, 22 nt, Human
ggagcagccacgucucagggca

SEQ ID NO: 1087117 - RNA, 22 nt, Human
agaguguuauuugcucuguauu

SEQ ID NO: 1087118 - RNA, 22 nt, Human
aaugcaauaccuuuuuaugcug

SEQ ID NO: 1087119 - RNA, 22 nt, Human
acauacaaauagagcuguagua

SEQ ID NO: 1087120 - RNA, 22 nt, Human
ggcccagaauacuuuguaaaau

SEQ ID NO: 1087121 - RNA, 22 nt, Human
gggcuaggcuuggccagcacug

SEQ ID NO: 1087122 - RNA, 18 nt, Human
cgaggcaggcggaucacg

SEQ ID NO: 1087123 - RNA, 22 nt, Human
gcugccucccccauggcuggaa

SEQ ID NO: 1087124 - RNA, 22 nt, Human
uaccaaaaagugagccccagag

SEQ ID NO: 1087125 - RNA, 22 nt, Human
aauucagcaaaaagauacagga

SEQ ID NO: 1087126 - RNA, 22 nt, Human
ccuuuuauacucuguccucugg

SEQ ID NO: 1087127 - RNA, 22 nt, Human
ccugggcaaauuauguuacuca

SEQ ID NO: 1087128 - RNA, 22 nt, Human
aggugcuugguaaauauuuuag

SEQ ID NO: 1087129 - RNA, 22 nt, Human
cccagcacaggcaauuccauac

SEQ ID NO: 1087130 - RNA, 22 nt, Human
agccaccuucuccaaggccuag

SEQ ID NO: 1087131 - RNA, 22 nt, Human
caagauauguccuguuacuaag

SEQ ID NO: 1087132 - RNA, 22 nt, Human
gaaacugugaucguguucuggg

SEQ ID NO: 1087133 - RNA, 22 nt, Human
cuucucagcaugguuacuguga

SEQ ID NO: 1087134 - RNA, 22 nt, Human
uacauguaggugacauuuuaau

SEQ ID NO: 1087135 - RNA, 22 nt, Human
ucuucagcagggccucucugag

SEQ ID NO: 1087136 - RNA, 22 nt, Human
ucaggcugccuaucagacugug

SEQ ID NO: 1087137 - RNA, 22 nt, Human
acugggcugccugguucuucua

SEQ ID NO: 1087138 - RNA, 22 nt, Human
gcugccugucugcugacccagg

SEQ ID NO: 1087139 - RNA, 22 nt, Human
acugagccucucuucccaccuc

SEQ ID NO: 1087140 - RNA, 23 nt, Human
caugauauuuaucuucccugggu

SEQ ID NO: 1087141 - RNA, 22 nt, Human
cugagcccaggcgggagcugag

SEQ ID NO: 1087142 - RNA, 22 nt, Human
aauaaaguguauucuuugucau

SEQ ID NO: 1087143 - RNA, 22 nt, Human
ucccaggguuacagccagggca

SEQ ID NO: 1087144 - RNA, 20 nt, Human
gcacugaagguuccagggga

SEQ ID NO: 1087145 - RNA, 22 nt, Human
gccucugcugcaagccugguug

SEQ ID NO: 1087146 - RNA, 22 nt, Human
cagcugugcuagaagccacgaa

SEQ ID NO: 1087147 - RNA, 22 nt, Human
gcaggaugggagcuucacucug

SEQ ID NO: 1087148 - RNA, 22 nt, Human
cagcugugagcagccaguugcc

SEQ ID NO: 1087149 - RNA, 22 nt, Human
cuucauuuggagaacugugcuu

SEQ ID NO: 1087150 - RNA, 22 nt, Human
aauguauuugauguauuagccu

SEQ ID NO: 1087151 - RNA, 22 nt, Human
cuuucacacacauacauuugga

SEQ ID NO: 1087152 - RNA, 22 nt, Human
cuucuucagaggccagccucug

SEQ ID NO: 1087153 - RNA, 20 nt, Human
accaggaaucuuuucugagc

SEQ ID NO: 1087154 - RNA, 22 nt, Human
uggagcugguaaacagugacau

SEQ ID NO: 1087155 - RNA, 22 nt, Human
ugaggccugucauugucuuguu

SEQ ID NO: 1087156 - RNA, 22 nt, Human
cauacauugcucauucaguauc

SEQ ID NO: 1087157 - RNA, 22 nt, Human
gauuuuaucgucauccuucugg

SEQ ID NO: 1087158 - RNA, 22 nt, Human
agaaaugcauuagcacauauag

SEQ ID NO: 1087159 - RNA, 22 nt, Human
ggcuccagaggccuuaccugca

SEQ ID NO: 1087160 - RNA, 22 nt, Human
gcaaacaagcugccugaagauu

SEQ ID NO: 1087161 - RNA, 22 nt, Human
caagacaagaucuaagcaugcu

SEQ ID NO: 1087162 - RNA, 18 nt, Human
aggaaagaaaggcaggug

SEQ ID NO: 1087163 - RNA, 22 nt, Human
cugaagcaggaacagcgagauu

SEQ ID NO: 1087164 - RNA, 22 nt, Human
acacaggagauauguaauggcu

SEQ ID NO: 1087165 - RNA, 22 nt, Human
ugcuucuguuacauaccagaac

SEQ ID NO: 1087166 - RNA, 22 nt, Human
aggcagcagacuguuaaucaga

SEQ ID NO: 1087167 - RNA, 22 nt, Human
gggcugaggaacauauuuuguu

SEQ ID NO: 1087168 - RNA, 22 nt, Human
ccuggcugcuuccucugccaug

SEQ ID NO: 1087169 - RNA, 22 nt, Human
agugguucaguuuuggucuggc

SEQ ID NO: 1087170 - RNA, 21 nt, Human
ccauaauuuuguuucagaagu

SEQ ID NO: 1087171 - RNA, 22 nt, Human
agaaaucaauaucuauauguug

SEQ ID NO: 1087172 - RNA, 22 nt, Human
acaggaaccaggcaggucgauu

SEQ ID NO: 1087173 - RNA, 22 nt, Human
uuccuguauuuugcgaauuuuc

SEQ ID NO: 1087174 - RNA, 22 nt, Human
gcugggccgaccugggcugcag

SEQ ID NO: 1087175 - RNA, 22 nt, Human
aaauuuuguauucuaguucuag

SEQ ID NO: 1087176 - RNA, 22 nt, Human
cagugaggcucugcugagcggu

SEQ ID NO: 1087177 - RNA, 22 nt, Human
gugcuuuuaaaggcaauuagua

SEQ ID NO: 1087178 - RNA, 22 nt, Human
aaagcacagggugcuagagagu

SEQ ID NO: 1087179 - RNA, 22 nt, Human
cucugagagagcuggugagcac

SEQ ID NO: 1087180 - RNA, 22 nt, Human
auuuaauuuucucaacagugcu

SEQ ID NO: 1087181 - RNA, 22 nt, Human
cccucuggcucuucucaggccg

SEQ ID NO: 1087182 - RNA, 22 nt, Human
cuucccacuaguaucacagagc

SEQ ID NO: 1087183 - RNA, 22 nt, Human
aaaugcagaaugauuucaucua

SEQ ID NO: 1087184 - RNA, 22 nt, Human
augcaacaaaugcuacgaaucg

SEQ ID NO: 1087185 - RNA, 22 nt, Human
ugcugccacaaauucagcugcc

SEQ ID NO: 1087186 - RNA, 22 nt, Human
gcaaagucucaagacccaagug

SEQ ID NO: 1087187 - RNA, 22 nt, Human
ugaggcaaggcugaaugaaggc

SEQ ID NO: 1087188 - RNA, 22 nt, Human
aaaucucuggcagaaauaaacu

SEQ ID NO: 1087189 - RNA, 19 nt, Human
aggugagugugggaaaggg

SEQ ID NO: 1087190 - RNA, 22 nt, Human
ucagggcacauucugcaguggc

SEQ ID NO: 1087191 - RNA, 22 nt, Human
ugggcagggagcuggaaccaca

SEQ ID NO: 1087192 - RNA, 22 nt, Human
aacagacagaaaaaugugaucu

SEQ ID NO: 1087193 - RNA, 22 nt, Human
aggugaguccugggcacaggua

SEQ ID NO: 1087194 - RNA, 22 nt, Human
acucugagcaucccaagucuua

SEQ ID NO: 1087195 - RNA, 22 nt, Human
uucaaagaguugggugucuggg

SEQ ID NO: 1087196 - RNA, 22 nt, Human
aaaggccaauaaagacaagcug

SEQ ID NO: 1087197 - RNA, 22 nt, Human
agaaagcuuaugaaugggcaag

SEQ ID NO: 1087198 - RNA, 22 nt, Human
uaacauugaguccacuaaacag

SEQ ID NO: 1087199 - RNA, 22 nt, Human
agaucacaguggcaacucccuu

SEQ ID NO: 1087200 - RNA, 22 nt, Human
uggugagauguauggaggguug

SEQ ID NO: 1087201 - RNA, 22 nt, Human
uggcaugggcaaaccagggaaa

SEQ ID NO: 1087202 - RNA, 22 nt, Human
aaaccuuugugugucugugccu

SEQ ID NO: 1087203 - RNA, 22 nt, Human
ucaagucauuugacuguguguu

SEQ ID NO: 1087204 - RNA, 22 nt, Human
ggccucugguucacagggagga

SEQ ID NO: 1087205 - RNA, 22 nt, Human
ucucaagcuuguugguauguuu

SEQ ID NO: 1087206 - RNA, 22 nt, Human
uggagcagaggaagaaggcuuu

SEQ ID NO: 1087207 - RNA, 17 nt, Human
gcucccugaggacagcu

SEQ ID NO: 1087208 - RNA, 22 nt, Human
ugaggccagucucaucacaggc

SEQ ID NO: 1087209 - RNA, 22 nt, Human
cugggacuuuacccuguggccc

SEQ ID NO: 1087210 - RNA, 22 nt, Human
uacaagauaagaauuggcaagg

SEQ ID NO: 1087211 - RNA, 22 nt, Human
ccagggcuccauugcucauccu

SEQ ID NO: 1087212 - RNA, 22 nt, Human
agccuccaguagcugaagagac

SEQ ID NO: 1087213 - RNA, 21 nt, Human
gggcucaguggaaaagagugu

SEQ ID NO: 1087214 - RNA, 20 nt, Human
gcccaagguccagaaggggg

SEQ ID NO: 1087215 - RNA, 22 nt, Human
cugagcccauugggugcuguua

SEQ ID NO: 1087216 - RNA, 22 nt, Human
gugaauuucugacuaaaagugc

SEQ ID NO: 1087217 - RNA, 22 nt, Human
cagggacugagauccagacugu

SEQ ID NO: 1087218 - RNA, 22 nt, Human
acuggggaauggaacugggaau

SEQ ID NO: 1087219 - RNA, 22 nt, Human
cagccagggagggcaaaugaga

SEQ ID NO: 1087220 - RNA, 22 nt, Human
ccagaaagaaugaacugaaccc

SEQ ID NO: 1087221 - RNA, 22 nt, Human
ugcuggggauccguaccaaccc

SEQ ID NO: 1087222 - RNA, 22 nt, Human
aagauacauuuucuucagagaa

SEQ ID NO: 1087223 - RNA, 22 nt, Human
ugaggcaggaggauugcaggau

SEQ ID NO: 1087224 - RNA, 22 nt, Human
uaauaauuggcaauguugagca

SEQ ID NO: 1087225 - RNA, 22 nt, Human
gagggcugaagauuguggcccc

SEQ ID NO: 1087226 - RNA, 22 nt, Human
guuuacaugcaugcaagaauga

SEQ ID NO: 1087227 - RNA, 22 nt, Human
cuuauggccugcccacaguagu

SEQ ID NO: 1087228 - RNA, 22 nt, Human
cccagagccucauucuguuggg

SEQ ID NO: 1087229 - RNA, 22 nt, Human
gagggacagcuaaagagaaauu

SEQ ID NO: 1087230 - RNA, 22 nt, Human
uuggagcccugaggaucuggau

SEQ ID NO: 1087231 - RNA, 19 nt, Human
uaaagcacauagcaaaagu

SEQ ID NO: 1087232 - RNA, 22 nt, Human
ugcucccaaacgaccuacugug

SEQ ID NO: 1087233 - RNA, 20 nt, Human
caguuaaugacuaggcauca

SEQ ID NO: 1087234 - RNA, 22 nt, Human
uauagaagagacaugugcauag

SEQ ID NO: 1087235 - RNA, 22 nt, Human
augagacacaugugacuucuuu

SEQ ID NO: 1087236 - RNA, 22 nt, Human
cugggccugguagggcuugaaa

SEQ ID NO: 1087237 - RNA, 22 nt, Human
gccucugcaugcucagcaccca

SEQ ID NO: 1087238 - RNA, 23 nt, Human
aggcacugaaugugucagugagu

SEQ ID NO: 1087239 - RNA, 22 nt, Human
agucucugagguucagaugccu

SEQ ID NO: 1087240 - RNA, 22 nt, Human
aaugaaaugaagauaugaucag

SEQ ID NO: 1087241 - RNA, 22 nt, Human
ggcuucuggugggagcaugacu

SEQ ID NO: 1087242 - RNA, 22 nt, Human
uccaggaacugaagccaggugu

SEQ ID NO: 1087243 - RNA, 20 nt, Human
agauguuuugaagucuugga

SEQ ID NO: 1087244 - RNA, 22 nt, Human
gccucccuguagaggccagccu

SEQ ID NO: 1087245 - RNA, 22 nt, Human
ucucugagaagcugaggcuggg

SEQ ID NO: 1087246 - RNA, 22 nt, Human
uaacauucccuuugugccaagg

SEQ ID NO: 1087247 - RNA, 22 nt, Human
uucacugaauuaaaaagaguau

SEQ ID NO: 1087248 - RNA, 22 nt, Human
ggcagaggugaaguucacaagg

SEQ ID NO: 1087249 - RNA, 22 nt, Human
aaggagaagucuguugagauug

SEQ ID NO: 1087250 - RNA, 22 nt, Human
gcaggccugacuguagggggca

SEQ ID NO: 1087251 - RNA, 22 nt, Human
aagccagggucaggggccuccu

SEQ ID NO: 1087252 - RNA, 22 nt, Human
ucaggaagucucaauuagcuac

SEQ ID NO: 1087253 - RNA, 22 nt, Human
uuuauaaacaguaccacggugc

SEQ ID NO: 1087254 - RNA, 22 nt, Human
cugugccuuggcgcugugccac

SEQ ID NO: 1087255 - RNA, 22 nt, Human
auuuucauuuugcagggugaga

SEQ ID NO: 1087256 - RNA, 22 nt, Human
agguccaguugccagaauggcc

SEQ ID NO: 1087257 - RNA, 22 nt, Human
agcugugguucugggcagcgac

SEQ ID NO: 1087258 - RNA, 22 nt, Human
cccaccccuggacaggugagug

SEQ ID NO: 1087259 - RNA, 22 nt, Human
uaacaucuugcaguagcagaac

SEQ ID NO: 1087260 - RNA, 22 nt, Human
gagaagaacuugggcaaaguca

SEQ ID NO: 1087261 - RNA, 22 nt, Human
cugggcucuucucacccuguuu

SEQ ID NO: 1087262 - RNA, 22 nt, Human
ucuguaaaacaauauuguauuc

SEQ ID NO: 1087263 - RNA, 22 nt, Human
gugucaugcacacucaguguug

SEQ ID NO: 1087264 - RNA, 22 nt, Human
cagaaagugauuugcuauucca

SEQ ID NO: 1087265 - RNA, 22 nt, Human
gccucacugcagccccaggaag

SEQ ID NO: 1087266 - RNA, 22 nt, Human
uggcccugccacucacugcuga

SEQ ID NO: 1087267 - RNA, 22 nt, Human
gggcugagacgauggggucuuc

SEQ ID NO: 1087268 - RNA, 22 nt, Human
gcugccugaucauacaccaggg

SEQ ID NO: 1087269 - RNA, 22 nt, Human
agggccaguaccaggugggugg

SEQ ID NO: 1087270 - RNA, 18 nt, Human
cuuguucuucucuuggcg

SEQ ID NO: 1087271 - RNA, 22 nt, Human
uuacuuuucuauucgauaugug

SEQ ID NO: 1087272 - RNA, 22 nt, Human
acagugucugacacauuguagc

SEQ ID NO: 1087273 - RNA, 22 nt, Human
ucacagaaauaagauaguuauu

SEQ ID NO: 1087274 - RNA, 22 nt, Human
uuucacagaaagaagcuaguuu

SEQ ID NO: 1087275 - RNA, 22 nt, Human
agccauugaguuuuaugugcua

SEQ ID NO: 1087276 - RNA, 22 nt, Human
aggggugugcauccuggaggau

SEQ ID NO: 1087277 - RNA, 22 nt, Human
auuuccauguccaaaaauuagu

SEQ ID NO: 1087278 - RNA, 22 nt, Human
gacuuuaaagccugacauuuua

SEQ ID NO: 1087279 - RNA, 22 nt, Human
uuuccaaaggaggaaccaguuu

SEQ ID NO: 1087280 - RNA, 22 nt, Human
ugauuuccaugaagcugaaggc

SEQ ID NO: 1087281 - RNA, 22 nt, Human
agggcuggcuccguuaccuuga

SEQ ID NO: 1087282 - RNA, 22 nt, Human
aagcuggaacaucuugaggaag

SEQ ID NO: 1087283 - RNA, 22 nt, Human
gcuguggccuggcgcagagcug

SEQ ID NO: 1087284 - RNA, 23 nt, Human
uuugaaguugacugccuuccaga

SEQ ID NO: 1087285 - RNA, 22 nt, Human
ccaggcuuucccagccucucca

SEQ ID NO: 1087286 - RNA, 22 nt, Human
cagccaggacagggaaacuagu

SEQ ID NO: 1087287 - RNA, 22 nt, Human
uuauaugauugaagugcauaag

SEQ ID NO: 1087288 - RNA, 22 nt, Human
gggugggaucuguggagccuca

SEQ ID NO: 1087289 - RNA, 22 nt, Human
uaaggaaaauggacaucaaaca

SEQ ID NO: 1087290 - RNA, 22 nt, Human
ccgcccacacuaaauaugagcg

SEQ ID NO: 1087291 - RNA, 22 nt, Human
gaacauuuccagaaaggaacua

SEQ ID NO: 1087292 - RNA, 22 nt, Human
aaucuauucccuuucuguaaaa

SEQ ID NO: 1087293 - RNA, 22 nt, Human
uccaggaagcagcuacagaucc

SEQ ID NO: 1087294 - RNA, 22 nt, Human
cuggcccauggugagcucuggg

SEQ ID NO: 1087295 - RNA, 21 nt, Human
cuggaacaaauacuagcaaac

SEQ ID NO: 1087296 - RNA, 22 nt, Human
ugcacauucacuuagguauugu

SEQ ID NO: 1087297 - RNA, 23 nt, Human
ugaguguguucccugugagauuu

SEQ ID NO: 1087298 - RNA, 22 nt, Human
gauuucuugauaaguaguguga

SEQ ID NO: 1087299 - RNA, 22 nt, Human
gggagggaaggaggcgccgugu

SEQ ID NO: 1087300 - RNA, 22 nt, Human
cccuggagguggagguugcagg

SEQ ID NO: 1087301 - RNA, 22 nt, Human
caaagaugcugauguuggauca

SEQ ID NO: 1087302 - RNA, 22 nt, Human
cugcagggcccgccugagcccu

SEQ ID NO: 1087303 - RNA, 22 nt, Human
uaaagcacaguaugagcauugg

SEQ ID NO: 1087304 - RNA, 22 nt, Human
auauuucucucagacauggaag

SEQ ID NO: 1087305 - RNA, 22 nt, Human
ggugucuguugccuccugguua

SEQ ID NO: 1087306 - RNA, 22 nt, Human
ugacagcauuacuaauacaugu

SEQ ID NO: 1087307 - RNA, 18 nt, Human
acaucaguuaccaggcca

SEQ ID NO: 1087308 - RNA, 22 nt, Human
agggcaugugggagaggagccu

SEQ ID NO: 1087309 - RNA, 22 nt, Human
uccugccucaggcucuggagua

SEQ ID NO: 1087310 - RNA, 22 nt, Human
gggugggguucaggaaucuuca

SEQ ID NO: 1087311 - RNA, 22 nt, Human
ucucugaguucuccuccagccc

SEQ ID NO: 1087312 - RNA, 22 nt, Human
aaauucauauguugaaaugcua

SEQ ID NO: 1087313 - RNA, 19 nt, Human
caguggagauuggaggagg

SEQ ID NO: 1087314 - RNA, 19 nt, Human
gcauuucaggcauguuugc

SEQ ID NO: 1087315 - RNA, 22 nt, Human
guccuggggaauacagaagccg

SEQ ID NO: 1087316 - RNA, 21 nt, Human
gcugccugccccucgggggcu

SEQ ID NO: 1087317 - RNA, 22 nt, Human
ccuggcugcaguuuuugcagaa

SEQ ID NO: 1087318 - RNA, 22 nt, Human
gcuccugcagagauguuccaug

SEQ ID NO: 1087319 - RNA, 22 nt, Human
auguucuguuucuuaaucuuga

SEQ ID NO: 1087320 - RNA, 22 nt, Human
uuccuaaucacgaacauuauuu

SEQ ID NO: 1087321 - RNA, 22 nt, Human
cgcccagggcaggaggccgcuc

SEQ ID NO: 1087322 - RNA, 22 nt, Human
agggcucaggggccccaagcug

SEQ ID NO: 1087323 - RNA, 22 nt, Human
gaaccaaguaggauacaaggag

SEQ ID NO: 1087324 - RNA, 22 nt, Human
agggcugacaguaaaaguauga

SEQ ID NO: 1087325 - RNA, 22 nt, Human
ucugccugccagucugguccuc

SEQ ID NO: 1087326 - RNA, 22 nt, Human
cauuucaccuuagagaauuauu

SEQ ID NO: 1087327 - RNA, 22 nt, Human
ucuguccucuuugaagcugcuc

SEQ ID NO: 1087328 - RNA, 22 nt, Human
ugcaggugucuccagggcaggu

SEQ ID NO: 1087329 - RNA, 22 nt, Human
cagcccucagguccucagcagc

SEQ ID NO: 1087330 - RNA, 22 nt, Human
agccuggaauuaaggaaaugca

SEQ ID NO: 1087331 - RNA, 22 nt, Human
cccaggcagucuggcucuaaag

SEQ ID NO: 1087332 - RNA, 22 nt, Human
uuuguuaaauauuuauugagug

SEQ ID NO: 1087333 - RNA, 22 nt, Human
aaauuccauuuugugacuauuc

SEQ ID NO: 1087334 - RNA, 22 nt, Human
uggcccugucugcacacaggau

SEQ ID NO: 1087335 - RNA, 22 nt, Human
ccugcaccaggcccagcauggu

SEQ ID NO: 1087336 - RNA, 22 nt, Human
aaggugguugcaauuaccauaa

SEQ ID NO: 1087337 - RNA, 22 nt, Human
acaguucuuaaaacuugaauua

SEQ ID NO: 1087338 - RNA, 22 nt, Human
uuuccucugaugcugacuugga

SEQ ID NO: 1087339 - RNA, 22 nt, Human
uugucuguaaagacggccacca

SEQ ID NO: 1087340 - RNA, 22 nt, Human
acagggucaagggugcuacaag

SEQ ID NO: 1087341 - RNA, 22 nt, Human
aucucaacuaagccuaacuuuu

SEQ ID NO: 1087342 - RNA, 22 nt, Human
aagcugaggcccauggcaaggu

SEQ ID NO: 1087343 - RNA, 22 nt, Human
cggggagaacacuguguccuuc

SEQ ID NO: 1087344 - RNA, 22 nt, Human
uacugaaaaagaauccagaccu

SEQ ID NO: 1087345 - RNA, 22 nt, Human
uugcauugaugucuauacgcug

SEQ ID NO: 1087346 - RNA, 22 nt, Human
cuuaagauuugagauaccuaau

SEQ ID NO: 1087347 - RNA, 22 nt, Human
ggucccaggaagugcggcggcg

SEQ ID NO: 1087348 - RNA, 22 nt, Human
cuguggcuaggaagcuguggga

SEQ ID NO: 1087349 - RNA, 22 nt, Human
gcagcuaguccaguuauguggc

SEQ ID NO: 1087350 - RNA, 20 nt, Human
acugcuucuuucucugaccu

SEQ ID NO: 1087351 - RNA, 22 nt, Human
gccugugaccccuccaucugcu

SEQ ID NO: 1087352 - RNA, 22 nt, Human
gacaggugcuaagggaccuggc

SEQ ID NO: 1087353 - RNA, 22 nt, Human
cuggggggagcugcguccagca

SEQ ID NO: 1087354 - RNA, 22 nt, Human
uacugaaacucuuguaaauauc

SEQ ID NO: 1087355 - RNA, 22 nt, Human
uggaguuccuuugaaaggcucu

SEQ ID NO: 1087356 - RNA, 22 nt, Human
ccugggucuugguucaugcucu

SEQ ID NO: 1087357 - RNA, 22 nt, Human
cacagcuggugcacuagcucug

SEQ ID NO: 1087358 - RNA, 22 nt, Human
gggccucagcucugcucugcaa

SEQ ID NO: 1087359 - RNA, 22 nt, Human
cuguuauucaagacaaaggcag

SEQ ID NO: 1087360 - RNA, 22 nt, Human
cugggcucagaugagaggaagg

SEQ ID NO: 1087361 - RNA, 22 nt, Human
aguucuuugucaucucuggagu

SEQ ID NO: 1087362 - RNA, 22 nt, Human
aaggcucucugauggcagcagu

SEQ ID NO: 1087363 - RNA, 22 nt, Human
cuuccuggccauugccauggca

SEQ ID NO: 1087364 - RNA, 22 nt, Human
gguguccuugcagaaggcggcg

SEQ ID NO: 1087365 - RNA, 22 nt, Human
ucaggaaggcacuugguguguu

SEQ ID NO: 1087366 - RNA, 22 nt, Human
uccccacacagauacagaguag

SEQ ID NO: 1087367 - RNA, 22 nt, Human
auauaacucuuguucuuauagu

SEQ ID NO: 1087368 - RNA, 22 nt, Human
cagcugagcucccaggccauca

SEQ ID NO: 1087369 - RNA, 22 nt, Human
augcuguggccagaguucaacu

SEQ ID NO: 1087370 - RNA, 22 nt, Human
uucucucauucaaauuaaagug

SEQ ID NO: 1087371 - RNA, 22 nt, Human
aggcagucuaucucuggagccu

SEQ ID NO: 1087372 - RNA, 22 nt, Human
gaggggaaagugugaggcugcg

SEQ ID NO: 1087373 - RNA, 22 nt, Human
agcagcuaaguagcgcaguuaa

SEQ ID NO: 1087374 - RNA, 21 nt, Human
ccaggcuccugaggcugguca

SEQ ID NO: 1087375 - RNA, 21 nt, Human
auauuucucauaagguuaugg

SEQ ID NO: 1087376 - RNA, 22 nt, Human
gaagcagccacggggagacaga

SEQ ID NO: 1087377 - RNA, 22 nt, Human
auuuucuagauagaugaugcau

SEQ ID NO: 1087378 - RNA, 22 nt, Human
aauagacuuuguauaauuuccc

SEQ ID NO: 1087379 - RNA, 17 nt, Human
cugaggcccagggccca

SEQ ID NO: 1087380 - RNA, 22 nt, Human
agacaacaccaaaugcuagugu

SEQ ID NO: 1087381 - RNA, 22 nt, Human
ugaguccaauaggggccuggaa

SEQ ID NO: 1087382 - RNA, 22 nt, Human
uagaaacaagggagaggauucu

SEQ ID NO: 1087383 - RNA, 22 nt, Human
cagggaguuuuuguuccucuag

SEQ ID NO: 1087384 - RNA, 22 nt, Human
uagugaaauuuaugcacagcua

SEQ ID NO: 1087385 - RNA, 22 nt, Human
uaguauuuauaaucaugcuuaa

SEQ ID NO: 1087386 - RNA, 23 nt, Human
gacacaggagcacccagcugagc

SEQ ID NO: 1087387 - RNA, 23 nt, Human
uguaaaccauuuugcaucccaug

SEQ ID NO: 1087388 - RNA, 22 nt, Human
uggaggcaccacuggcugcccg

SEQ ID NO: 1087389 - RNA, 22 nt, Human
agcuugccucuuaaucaccuca

SEQ ID NO: 1087390 - RNA, 22 nt, Human
ugucacauguguggcauuuuuc

SEQ ID NO: 1087391 - RNA, 22 nt, Human
caccugccucauuugucccugc

SEQ ID NO: 1087392 - RNA, 22 nt, Human
agaagugccauacuguggucca

SEQ ID NO: 1087393 - RNA, 22 nt, Human
aaugaauggguuuaauauuuua

SEQ ID NO: 1087394 - RNA, 22 nt, Human
uaaagcaguguugggucggacg

SEQ ID NO: 1087395 - RNA, 23 nt, Human
uugcaaauuucaguuaguucaug

SEQ ID NO: 1087396 - RNA, 22 nt, Human
ggccucgagcaauacucccauc

SEQ ID NO: 1087397 - RNA, 22 nt, Human
gcagggcagcugaagcuaggug

SEQ ID NO: 1087398 - RNA, 22 nt, Human
guccuuugaaggcaaaaggaga

SEQ ID NO: 1087399 - RNA, 18 nt, Human
ggagagugagaucaaaca

SEQ ID NO: 1087400 - RNA, 22 nt, Human
ggacagacagugugagugaggc

SEQ ID NO: 1087401 - RNA, 22 nt, Human
cuuagcaugugguguccuugua

SEQ ID NO: 1087402 - RNA, 22 nt, Human
aauguguuuucacugaagauuc

SEQ ID NO: 1087403 - RNA, 22 nt, Human
gugggcaaggucccugccagcu

SEQ ID NO: 1087404 - RNA, 22 nt, Human
uucagcuaaggaguuucacugu

SEQ ID NO: 1087405 - RNA, 22 nt, Human
gcucccagguucuugggccuug

SEQ ID NO: 1087406 - RNA, 18 nt, Human
gugcugugggcaguggcc

SEQ ID NO: 1087407 - RNA, 22 nt, Human
aggaacugauuuauaacuuuag

SEQ ID NO: 1087408 - RNA, 22 nt, Human
caguggcacccacgggcugggc

SEQ ID NO: 1087409 - RNA, 22 nt, Human
auggaaaaggcugauuucauua

SEQ ID NO: 1087410 - RNA, 21 nt, Human
ugaggcucuguugugccugca

SEQ ID NO: 1087411 - RNA, 22 nt, Human
gaggugucccgcaguccccaag

SEQ ID NO: 1087412 - RNA, 22 nt, Human
auaauuuacuaagcucuaccuu

SEQ ID NO: 1087413 - RNA, 22 nt, Human
agcagggcuugccgcuuguccu

SEQ ID NO: 1087414 - RNA, 22 nt, Human
ugcucugguaacucacuuccau

SEQ ID NO: 1087415 - RNA, 22 nt, Human
cuggcaggcaaauuggugggag

SEQ ID NO: 1087416 - RNA, 22 nt, Human
auuuucucucaaaccuuaaaau

SEQ ID NO: 1087417 - RNA, 22 nt, Human
aguggacucuucccagugcuug

SEQ ID NO: 1087418 - RNA, 22 nt, Human
cuggagccggaccagggacggu

SEQ ID NO: 1087419 - RNA, 22 nt, Human
aaguaacaggugcuuaguuuau

SEQ ID NO: 1087420 - RNA, 22 nt, Human
gagcucauccccaugguccguc

SEQ ID NO: 1087421 - RNA, 21 nt, Human
gggccacaccuucugcagacc

SEQ ID NO: 1087422 - RNA, 19 nt, Human
agcagagcccugaagaucc

SEQ ID NO: 1087423 - RNA, 22 nt, Human
cuguugucuucauugucauauc

SEQ ID NO: 1087424 - RNA, 22 nt, Human
cuggcuccauccuugagcucug

SEQ ID NO: 1087425 - RNA, 22 nt, Human
uauacugagagcaaauacauuc

SEQ ID NO: 1087426 - RNA, 22 nt, Human
caagucauuacugaaaugucac

SEQ ID NO: 1087427 - RNA, 22 nt, Human
ggaagagagaucccauagaugu

SEQ ID NO: 1087428 - RNA, 22 nt, Human
gcagaugcuuggcacugacagu

SEQ ID NO: 1087429 - RNA, 22 nt, Human
auuuguugaauaaauuaguauu

SEQ ID NO: 1087430 - RNA, 22 nt, Human
gcaggcagagucaauuugaucc

SEQ ID NO: 1087431 - RNA, 18 nt, Human
cucugcuaaugggcagcu

SEQ ID NO: 1087432 - RNA, 22 nt, Human
ggcucugcaugugagugggugg

SEQ ID NO: 1087433 - RNA, 22 nt, Human
ugaauccagagcuauuucgucc

SEQ ID NO: 1087434 - RNA, 22 nt, Human
aauaagaacuccauuuacucgu

SEQ ID NO: 1087435 - RNA, 22 nt, Human
aaagccagcaaggugaguuuca

SEQ ID NO: 1087436 - RNA, 22 nt, Human
cugucuccuccacugcauggga

SEQ ID NO: 1087437 - RNA, 22 nt, Human
uugaucucuuguguaugguaga

SEQ ID NO: 1087438 - RNA, 17 nt, Human
ucaaaguauucugaugc

SEQ ID NO: 1087439 - RNA, 20 nt, Human
ccucaguguccuggacuggg

SEQ ID NO: 1087440 - RNA, 22 nt, Human
acugggaagacaagaaagauag

SEQ ID NO: 1087441 - RNA, 22 nt, Human
auuaaugacgcagauaauaauu

SEQ ID NO: 1087442 - RNA, 22 nt, Human
acaacacagcaaaaccccaucu

SEQ ID NO: 1087443 - RNA, 21 nt, Human
auaugaguuucagauguugcu

SEQ ID NO: 1087444 - RNA, 20 nt, Human
aggggccuggaacaggccuu

SEQ ID NO: 1087445 - RNA, 22 nt, Human
auuauaaauauuuucuaggggu

SEQ ID NO: 1087446 - RNA, 22 nt, Human
uggagaagucaaagugaacagg

SEQ ID NO: 1087447 - RNA, 22 nt, Human
gaacaguacuaagagcuuuaca

SEQ ID NO: 1087448 - RNA, 22 nt, Human
ugggccuuacuuggggcugacu

SEQ ID NO: 1087449 - RNA, 23 nt, Human
ccagggccccuacaccacugucc

SEQ ID NO: 1087450 - RNA, 22 nt, Human
accagagcucuucagcacagga

SEQ ID NO: 1087451 - RNA, 22 nt, Human
ucucagagaacaguuggugcuu

SEQ ID NO: 1087452 - RNA, 22 nt, Human
ugugugacccccagugaagccu

SEQ ID NO: 1087453 - RNA, 22 nt, Human
uuaaugcuugucuagaucuucu

SEQ ID NO: 1087454 - RNA, 22 nt, Human
caucugaauuugccuuaguuuc

SEQ ID NO: 1087455 - RNA, 22 nt, Human
aacaucuacagugagauguuag

SEQ ID NO: 1087456 - RNA, 22 nt, Human
gcugugaguggaggaggcugag

SEQ ID NO: 1087457 - RNA, 22 nt, Human
ucaaauaguugacauuaacuug

SEQ ID NO: 1087458 - RNA, 20 nt, Human
cugggcucaagugagccucc

SEQ ID NO: 1087459 - RNA, 22 nt, Human
acauacacaagcguacaugaac

SEQ ID NO: 1087460 - RNA, 22 nt, Human
cccugcagacgucuugaugccu

SEQ ID NO: 1087461 - RNA, 22 nt, Human
cacauuuaaaaaauccacgauc

SEQ ID NO: 1087462 - RNA, 22 nt, Human
uggcaggguuggccaccuuacc

SEQ ID NO: 1087463 - RNA, 22 nt, Human
aagaagcugcgugguaugugaa

SEQ ID NO: 1087464 - RNA, 22 nt, Human
cugccucucagccugaccgcca

SEQ ID NO: 1087465 - RNA, 22 nt, Human
gcccaugguggcguucggugca

SEQ ID NO: 1087466 - RNA, 22 nt, Human
aauuccugucuuaacaguucug

SEQ ID NO: 1087467 - RNA, 22 nt, Human
uauccaauucaccauugauggg

SEQ ID NO: 1087468 - RNA, 22 nt, Human
cucccucaggccuuagcccugc

SEQ ID NO: 1087469 - RNA, 22 nt, Human
ccugucugagccagggugggca

SEQ ID NO: 1087470 - RNA, 22 nt, Human
aagcagagcaagcguauuuauu

SEQ ID NO: 1087471 - RNA, 19 nt, Human
ggggccugugauggucaca

SEQ ID NO: 1087472 - RNA, 22 nt, Human
cuuggcagcuuuuggaggagcc

SEQ ID NO: 1087473 - RNA, 22 nt, Human
aauuaugagguagauaucacau

SEQ ID NO: 1087474 - RNA, 23 nt, Human
guggagccacaucacaggcuccu

SEQ ID NO: 1087475 - RNA, 22 nt, Human
uuuagcauauccuauaaaacua

SEQ ID NO: 1087476 - RNA, 22 nt, Human
ccugggcagugcuggaguugaa

SEQ ID NO: 1087477 - RNA, 22 nt, Human
ugcuuuuaagaacaaugcugcu

SEQ ID NO: 1087478 - RNA, 22 nt, Human
acagaagauaaugcugccuugg

SEQ ID NO: 1087479 - RNA, 22 nt, Human
acauuaaauuucauagugauua

SEQ ID NO: 1087480 - RNA, 22 nt, Human
cugcauguuuacauuuuugaga

SEQ ID NO: 1087481 - RNA, 19 nt, Human
ccagcuggccugggaccuc

SEQ ID NO: 1087482 - RNA, 22 nt, Human
ucugcaucauuuuucagagccg

SEQ ID NO: 1087483 - RNA, 22 nt, Human
aguauacuccccauccuagaaa

SEQ ID NO: 1087484 - RNA, 22 nt, Human
aagagcauauuaauaguggaga

SEQ ID NO: 1087485 - RNA, 22 nt, Human
aaucaacaggaugugcauugua

SEQ ID NO: 1087486 - RNA, 22 nt, Human
aagcaccugcaguugacaaaaa

SEQ ID NO: 1087487 - RNA, 22 nt, Human
uggggcugaggagccucacucu

SEQ ID NO: 1087488 - RNA, 22 nt, Human
cacagugugacugaccuucagc

SEQ ID NO: 1087489 - RNA, 22 nt, Human
ugcagcagucagucaggccugg

SEQ ID NO: 1087490 - RNA, 22 nt, Human
aaagcucucccacuguaugaag

SEQ ID NO: 1087491 - RNA, 22 nt, Human
guggaggacaaaagaagccuuu

SEQ ID NO: 1087492 - RNA, 21 nt, Human
agcugagcccagaagacuggu

SEQ ID NO: 1087493 - RNA, 22 nt, Human
uguaaguacauugaaacaucuu

SEQ ID NO: 1087494 - RNA, 22 nt, Human
ugagaaaauccagaggcuaguu

SEQ ID NO: 1087495 - RNA, 22 nt, Human
ggugggguauuugguacuugua

SEQ ID NO: 1087496 - RNA, 22 nt, Human
gcuccacuugcagcuaggcuug

SEQ ID NO: 1087497 - RNA, 22 nt, Human
guaguucugcagugucaccuga

SEQ ID NO: 1087498 - RNA, 22 nt, Human
aagagcaaguggguagugaagc

SEQ ID NO: 1087499 - RNA, 22 nt, Human
gucucagauaacauguauucua

SEQ ID NO: 1087500 - RNA, 22 nt, Human
agugaaauagcauuuaugaagc

SEQ ID NO: 1087501 - RNA, 22 nt, Human
ccucccuccauugccaucgucu

SEQ ID NO: 1087502 - RNA, 21 nt, Human
cccaagggaggcaggauaagg

SEQ ID NO: 1087503 - RNA, 22 nt, Human
gcagagccccucaagccagccu

SEQ ID NO: 1087504 - RNA, 20 nt, Human
uuuauuggccuuucaggaac

SEQ ID NO: 1087505 - RNA, 22 nt, Human
cgccugggaguccacaccugcu

SEQ ID NO: 1087506 - RNA, 22 nt, Human
ugaggcucuccaagcagaugag

SEQ ID NO: 1087507 - RNA, 22 nt, Human
uggcagagacuccuccugggag

SEQ ID NO: 1087508 - RNA, 22 nt, Human
cuggacagaaaccaguccuggg

SEQ ID NO: 1087509 - RNA, 22 nt, Human
gcucuguguccacagcuggaaa

SEQ ID NO: 1087510 - RNA, 22 nt, Human
caggggccaggcugucugcugu

SEQ ID NO: 1087511 - RNA, 22 nt, Human
ccaggcucugcaaaaucaggcu

SEQ ID NO: 1087512 - RNA, 22 nt, Human
uggcucagcagguuagaaacua

SEQ ID NO: 1087513 - RNA, 23 nt, Human
agggcacugaagcuggaauuggg

SEQ ID NO: 1087514 - RNA, 20 nt, Human
aggagcugaauuagaggguu

SEQ ID NO: 1087515 - RNA, 22 nt, Human
uauuaaagggaaguuaugcaug

SEQ ID NO: 1087516 - RNA, 22 nt, Human
uguucuuuggcuuccuuuccgu

SEQ ID NO: 1087517 - RNA, 22 nt, Human
gaggcuguucaguguccagcuu

SEQ ID NO: 1087518 - RNA, 22 nt, Human
acagcagccagccacugugagc

SEQ ID NO: 1087519 - RNA, 22 nt, Human
uaugaaauugccauuuuuaugg

SEQ ID NO: 1087520 - RNA, 22 nt, Human
gcacccaggcuugggcagcaac

SEQ ID NO: 1087521 - RNA, 22 nt, Human
aggccagggcacugcucuuuag

SEQ ID NO: 1087522 - RNA, 22 nt, Human
aauauuuuugaggcccuguuau

SEQ ID NO: 1087523 - RNA, 22 nt, Human
agagcugcaauuucauguggug

SEQ ID NO: 1087524 - RNA, 22 nt, Human
aaaugucuuugaguauuucugc

SEQ ID NO: 1087525 - RNA, 22 nt, Human
aaugaaacuaguagaaucuuug

SEQ ID NO: 1087526 - RNA, 22 nt, Human
gacagcugcauccucagacaca

SEQ ID NO: 1087527 - RNA, 22 nt, Human
aaagccagcucugagcugcacc

SEQ ID NO: 1087528 - RNA, 22 nt, Human
ugcauuuuugagguuaacucaa

SEQ ID NO: 1087529 - RNA, 22 nt, Human
uuacagaaggaacacuacucag

SEQ ID NO: 1087530 - RNA, 22 nt, Human
ccagggugggguccaggaacca

SEQ ID NO: 1087531 - RNA, 21 nt, Human
gcaguuaauagcagagcacac

SEQ ID NO: 1087532 - RNA, 20 nt, Human
ucuggggaugaggucuagga

SEQ ID NO: 1087533 - RNA, 22 nt, Human
cugggccuuaugaguaccugga

SEQ ID NO: 1087534 - RNA, 22 nt, Human
uucaaagauggagggauagauu

SEQ ID NO: 1087535 - RNA, 22 nt, Human
ccaaagucagugcucagucguc

SEQ ID NO: 1087536 - RNA, 22 nt, Human
auucugaucauucaagauguca

SEQ ID NO: 1087537 - RNA, 22 nt, Human
aguucaauagaaaaauauauua

SEQ ID NO: 1087538 - RNA, 22 nt, Human
acuuucaaaagagaagucauga

SEQ ID NO: 1087539 - RNA, 22 nt, Human
ugcauacacuucaaaugagcau

SEQ ID NO: 1087540 - RNA, 22 nt, Human
uuugugcacauugcuuuucuau

SEQ ID NO: 1087541 - RNA, 22 nt, Human
ggucccugaagaugccugagga

SEQ ID NO: 1087542 - RNA, 22 nt, Human
ugggcugccggcaggcucugcc

SEQ ID NO: 1087543 - RNA, 22 nt, Human
gggaggagugaagauucaccug

SEQ ID NO: 1087544 - RNA, 22 nt, Human
cuggcucaccuccgcuccagca

SEQ ID NO: 1087545 - RNA, 22 nt, Human
ucacauuuguguuuuauuagag

SEQ ID NO: 1087546 - RNA, 22 nt, Human
agugugagccuacaggccaaag

SEQ ID NO: 1087547 - RNA, 22 nt, Human
agcagagcuauucuugugcaau

SEQ ID NO: 1087548 - RNA, 23 nt, Human
acugagcauuaguauuuuuauaa

SEQ ID NO: 1087549 - RNA, 22 nt, Human
uguacaguuaaucuuaagccau

SEQ ID NO: 1087550 - RNA, 22 nt, Human
aucuggcuauugacauguuaua

SEQ ID NO: 1087551 - RNA, 22 nt, Human
uugcccagagucacccagcuca

SEQ ID NO: 1087552 - RNA, 22 nt, Human
aguuuucugcuaaaccagcuaa

SEQ ID NO: 1087553 - RNA, 22 nt, Human
gguuugcacgauauuuccaugg

SEQ ID NO: 1087554 - RNA, 22 nt, Human
ucaagucuugaugagacaaacc

SEQ ID NO: 1087555 - RNA, 22 nt, Human
cauacauuuauacacaucuaug

SEQ ID NO: 1087556 - RNA, 22 nt, Human
aaaaguaauugcaauuuuguag

SEQ ID NO: 1087557 - RNA, 22 nt, Human
aaugauuuccccuacacagaag

SEQ ID NO: 1087558 - RNA, 22 nt, Human
gaggaaaauaacaacuaagggc

SEQ ID NO: 1087559 - RNA, 22 nt, Human
agucaauucuuuucaacucaag

SEQ ID NO: 1087560 - RNA, 22 nt, Human
ucugucacuuuuauuuacugaa

SEQ ID NO: 1087561 - RNA, 22 nt, Human
uggagcugacucacaccagcua

SEQ ID NO: 1087562 - RNA, 22 nt, Human
gucaauaucgccaagugucucu

SEQ ID NO: 1087563 - RNA, 22 nt, Human
gucagagcccccagcggcgcgg

SEQ ID NO: 1087564 - RNA, 22 nt, Human
ugagcccaggaguaugaggcug

SEQ ID NO: 1087565 - RNA, 22 nt, Human
cugagauggaguuuugcucuug

SEQ ID NO: 1087566 - RNA, 22 nt, Human
ccugggagagccaucuguggcc

SEQ ID NO: 1087567 - RNA, 22 nt, Human
caagaacauugugaucacuuca

SEQ ID NO: 1087568 - RNA, 22 nt, Human
ucagcaguguaguuuaucauuc

SEQ ID NO: 1087569 - RNA, 22 nt, Human
uuggaauugcucauaagagaga

SEQ ID NO: 1087570 - RNA, 22 nt, Human
aaggcaggagcuguaucuuauu

SEQ ID NO: 1087571 - RNA, 22 nt, Human
uuucuucuaggacuaauaagag

SEQ ID NO: 1087572 - RNA, 21 nt, Human
ccagcagcucaaggaucucuu

SEQ ID NO: 1087573 - RNA, 22 nt, Human
gcagggucugaggccacagagg

SEQ ID NO: 1087574 - RNA, 22 nt, Human
gacaucaauucagcauuuuaag

SEQ ID NO: 1087575 - RNA, 22 nt, Human
aacaggagaguaaauauaugau

SEQ ID NO: 1087576 - RNA, 22 nt, Human
ugggcuccucgucacucgcugu

SEQ ID NO: 1087577 - RNA, 22 nt, Human
gccuacuuaguagcugggauua

SEQ ID NO: 1087578 - RNA, 22 nt, Human
uucaaagugcuuuuaaccuuua

SEQ ID NO: 1087579 - RNA, 22 nt, Human
ucaguguuuccugugguacagc

SEQ ID NO: 1087580 - RNA, 22 nt, Human
uuuggcucucacuugcacucag

SEQ ID NO: 1087581 - RNA, 22 nt, Human
cuaagucauggaaagugugugu

SEQ ID NO: 1087582 - RNA, 22 nt, Human
cucugguguccuuuagaauuua

SEQ ID NO: 1087583 - RNA, 22 nt, Human
cagaaacacuuguagagaaguu

SEQ ID NO: 1087584 - RNA, 20 nt, Human
cagcccuccaguggaggcag

SEQ ID NO: 1087585 - RNA, 22 nt, Human
cugaggccucuguucaccagaa

SEQ ID NO: 1087586 - RNA, 22 nt, Human
ccuggagggcgccgcacagucc

SEQ ID NO: 1087587 - RNA, 22 nt, Human
agaaaugacaagacugaucagg

SEQ ID NO: 1087588 - RNA, 22 nt, Human
gucuuuauuugagauugucauu

SEQ ID NO: 1087589 - RNA, 22 nt, Human
agcagggaauagcggaaagaau

SEQ ID NO: 1087590 - RNA, 22 nt, Human
gaugcacuugccccuccucaga

SEQ ID NO: 1087591 - RNA, 20 nt, Human
cucugcuuuaggagagucag

SEQ ID NO: 1087592 - RNA, 22 nt, Human
aucaacauaugcaugggaaagu

SEQ ID NO: 1087593 - RNA, 22 nt, Human
cucuggaguucucaugaggaac

SEQ ID NO: 1087594 - RNA, 22 nt, Human
uguuagcauagcucagaaggag

SEQ ID NO: 1087595 - RNA, 22 nt, Human
aaucagaauuuauugaaucuuu

SEQ ID NO: 1087596 - RNA, 22 nt, Human
gaaggagggugcggaucugagc

SEQ ID NO: 1087597 - RNA, 22 nt, Human
aggggcaggugcugcacuuaga

SEQ ID NO: 1087598 - RNA, 22 nt, Human
ucaaaugcacguagagaaaaua

SEQ ID NO: 1087599 - RNA, 20 nt, Human
uuucuugucggcuguugcug

SEQ ID NO: 1087600 - RNA, 22 nt, Human
uuucauaauacuguacaugaaa

SEQ ID NO: 1087601 - RNA, 21 nt, Human
ugcagugaggggagcugucag

SEQ ID NO: 1087602 - RNA, 22 nt, Human
ccugccugccugcuggccggga

SEQ ID NO: 1087603 - RNA, 21 nt, Human
ugccaggccugagcugggguc

SEQ ID NO: 1087604 - RNA, 22 nt, Human
acagaagugucuuuuucauuca

SEQ ID NO: 1087605 - RNA, 22 nt, Human
uugucuuuggaaauuuaauguu

SEQ ID NO: 1087606 - RNA, 22 nt, Human
ucccuggccauuccucuaggcc

SEQ ID NO: 1087607 - RNA, 22 nt, Human
ccuggcugguggcagcgacaag

SEQ ID NO: 1087608 - RNA, 22 nt, Human
aauauauagaaguacccguugu

SEQ ID NO: 1087609 - RNA, 22 nt, Human
ucccaggugaugcugaggccac

SEQ ID NO: 1087610 - RNA, 22 nt, Human
ucaaaugcuucuacuccuaaga

SEQ ID NO: 1087611 - RNA, 22 nt, Human
ccucacucuuguccuggcaggu

SEQ ID NO: 1087612 - RNA, 22 nt, Human
gucuccugagccuugacugcaa

SEQ ID NO: 1087613 - RNA, 22 nt, Human
cagagccagaacuagaccuugu

SEQ ID NO: 1087614 - RNA, 22 nt, Human
cuauuucaaggcccagauauga

SEQ ID NO: 1087615 - RNA, 22 nt, Human
gccuggagcucggcugagggcg

SEQ ID NO: 1087616 - RNA, 22 nt, Human
ucacauuuuccuugguaucugu

SEQ ID NO: 1087617 - RNA, 22 nt, Human
aaauguauugcauaggauauuu

SEQ ID NO: 1087618 - RNA, 22 nt, Human
gauuucuuugcaagcuguguuc

SEQ ID NO: 1087619 - RNA, 22 nt, Human
gcagaggggaagcugaggaauu

SEQ ID NO: 1087620 - RNA, 22 nt, Human
uuucugaacuugguacuggagc

SEQ ID NO: 1087621 - RNA, 22 nt, Human
aauaauuuugagagccuggaaa

SEQ ID NO: 1087622 - RNA, 22 nt, Human
agcaggugucggcgagggucuu

SEQ ID NO: 1087623 - RNA, 22 nt, Human
gugguaauagagcuccaaacua

SEQ ID NO: 1087624 - RNA, 22 nt, Human
uuucacaacguuguggugagag

SEQ ID NO: 1087625 - RNA, 22 nt, Human
ucacagaacaagccugguggag

SEQ ID NO: 1087626 - RNA, 22 nt, Human
guuugcauuucuugaacuauau

SEQ ID NO: 1087627 - RNA, 22 nt, Human
gauuucuucauucauuagaugg

SEQ ID NO: 1087628 - RNA, 22 nt, Human
cagagcuggguuugggaaaccu

SEQ ID NO: 1087629 - RNA, 22 nt, Human
gagaaacuaacaucugaaggug

SEQ ID NO: 1087630 - RNA, 22 nt, Human
uaccaaaagcuuguuucauaca

SEQ ID NO: 1087631 - RNA, 22 nt, Human
uacauacauguauguguguauu

SEQ ID NO: 1087632 - RNA, 22 nt, Human
cuaggaccacuguaacaaagua

SEQ ID NO: 1087633 - RNA, 22 nt, Human
ccugggcaggaugggcccggug

SEQ ID NO: 1087634 - RNA, 23 nt, Human
ugcuuauucaaaaggugcuuuca

SEQ ID NO: 1087635 - RNA, 22 nt, Human
guggcccucugauagggucagg

SEQ ID NO: 1087636 - RNA, 22 nt, Human
gagcacacacuuugaaauuagg

SEQ ID NO: 1087637 - RNA, 22 nt, Human
uuugaucagcaagauaaauaga

SEQ ID NO: 1087638 - RNA, 22 nt, Human
cuguggggagcugaucagauca

SEQ ID NO: 1087639 - RNA, 22 nt, Human
ugcuucugaguugcaggacuug

SEQ ID NO: 1087640 - RNA, 22 nt, Human
cugauucuccucaagacuuucg

SEQ ID NO: 1087641 - RNA, 22 nt, Human
uaaaaugaucucucauguucuu

SEQ ID NO: 1087642 - RNA, 22 nt, Human
caucagcacuaugauuaaagua

SEQ ID NO: 1087643 - RNA, 22 nt, Human
ccugaggacacacgcugcagga

SEQ ID NO: 1087644 - RNA, 22 nt, Human
cugagagccuccuguuggcuag

SEQ ID NO: 1087645 - RNA, 22 nt, Human
augugaggcagcacggagauua

SEQ ID NO: 1087646 - RNA, 22 nt, Human
uaguggaggccuguugugugca

SEQ ID NO: 1087647 - RNA, 22 nt, Human
ugggcagagucauacaggagac

SEQ ID NO: 1087648 - RNA, 22 nt, Human
cacaaaugacugaaacgacugu

SEQ ID NO: 1087649 - RNA, 22 nt, Human
cagccaggggcuggcguguuga

SEQ ID NO: 1087650 - RNA, 22 nt, Human
cugucaggggcggguggagcgg

SEQ ID NO: 1087651 - RNA, 22 nt, Human
gcaccugcaggaugagccaggg

SEQ ID NO: 1087652 - RNA, 21 nt, Human
aggugggagaccauguagguc

SEQ ID NO: 1087653 - RNA, 21 nt, Human
agaaaaacacgauauaagccc

SEQ ID NO: 1087654 - RNA, 22 nt, Human
aaauucuucagguaauuuugau

SEQ ID NO: 1087655 - RNA, 22 nt, Human
ggagcuggccgccuaugugcag

SEQ ID NO: 1087656 - RNA, 22 nt, Human
gcuguauuuaacaacuggcuca

SEQ ID NO: 1087657 - RNA, 22 nt, Human
gggcaggaugcaguuucagaga

SEQ ID NO: 1087658 - RNA, 22 nt, Human
acaaaugacucaaacaccacuu

SEQ ID NO: 1087659 - RNA, 22 nt, Human
uaauuguaaaguaguaguacag

SEQ ID NO: 1087660 - RNA, 22 nt, Human
caacaucuguaucauuaguaca

SEQ ID NO: 1087661 - RNA, 21 nt, Human
uggcucugcucagagcagucc

SEQ ID NO: 1087662 - RNA, 22 nt, Human
cugagcugggacucaguagcaa

SEQ ID NO: 1087663 - RNA, 22 nt, Human
ugaggcaggagaauggcgggaa

SEQ ID NO: 1087664 - RNA, 22 nt, Human
agauguuucaguaauuuaucuu

SEQ ID NO: 1087665 - RNA, 22 nt, Human
aaauauaccaguugccugcauc

SEQ ID NO: 1087666 - RNA, 22 nt, Human
gcugauguaagacuuuugguuu

SEQ ID NO: 1087667 - RNA, 22 nt, Human
uggcaaaggcgcucacaugccu

SEQ ID NO: 1087668 - RNA, 22 nt, Human
uugucacauucaaguuuuauau

SEQ ID NO: 1087669 - RNA, 22 nt, Human
caaaaacugcaauuacuuuuac

SEQ ID NO: 1087670 - RNA, 22 nt, Human
agggucuguggaugcaucuggg

SEQ ID NO: 1087671 - RNA, 22 nt, Human
ucccugcccucagugcacccgg

SEQ ID NO: 1087672 - RNA, 22 nt, Human
ggucaucuugaauuuccauucu

SEQ ID NO: 1087673 - RNA, 22 nt, Human
aguauaauuuacauuugguauu

SEQ ID NO: 1087674 - RNA, 22 nt, Human
aguuugaaggaguugaaucacc

SEQ ID NO: 1087675 - RNA, 18 nt, Human
ugcagcaagugcuaaaua

SEQ ID NO: 1087676 - RNA, 22 nt, Human
cugugauuguuaguuccuauac

SEQ ID NO: 1087677 - RNA, 22 nt, Human
cuucacaaauggccuagaguuc

SEQ ID NO: 1087678 - RNA, 22 nt, Human
ugccauuucucaaauaugacua

SEQ ID NO: 1087679 - RNA, 22 nt, Human
auuucacucauucauguuacuu

SEQ ID NO: 1087680 - RNA, 22 nt, Human
agugcagccgagaucaggugcu

SEQ ID NO: 1087681 - RNA, 22 nt, Human
cacaaauggccguguucaaaga

SEQ ID NO: 1087682 - RNA, 22 nt, Human
aauguguagcauuuaaugcagu

SEQ ID NO: 1087683 - RNA, 22 nt, Human
gcaagcugugauuuaugugaau

SEQ ID NO: 1087684 - RNA, 21 nt, Human
ugggccugauucccaggguca

SEQ ID NO: 1087685 - RNA, 22 nt, Human
gugcugugucuaucaggaauaa

SEQ ID NO: 1087686 - RNA, 22 nt, Human
uauguguuugacacccugcaag

SEQ ID NO: 1087687 - RNA, 22 nt, Human
agcaguggcugaagauguuccu

SEQ ID NO: 1087688 - RNA, 20 nt, Human
ucucaggccccaguuuucuu

SEQ ID NO: 1087689 - RNA, 22 nt, Human
gaagggagaagguugggugacg

SEQ ID NO: 1087690 - RNA, 22 nt, Human
auacaugucaucauauguuugu

SEQ ID NO: 1087691 - RNA, 22 nt, Human
agaagcagacucugaggcaagg

SEQ ID NO: 1087692 - RNA, 22 nt, Human
uccuccaguggcccaguccuuc

SEQ ID NO: 1087693 - RNA, 22 nt, Human
uauuagguuggugcaaaaguca

SEQ ID NO: 1087694 - RNA, 22 nt, Human
auggacaggcugagcuuccuca

SEQ ID NO: 1087695 - RNA, 22 nt, Human
uugugaauagugccgcaauaaa

SEQ ID NO: 1087696 - RNA, 22 nt, Human
uaaggcacgcauaagagggggc

SEQ ID NO: 1087697 - RNA, 22 nt, Human
aggggccuggcacugagcuggc

SEQ ID NO: 1087698 - RNA, 22 nt, Human
gagagugaaggcuucccagcaa

SEQ ID NO: 1087699 - RNA, 22 nt, Human
gcuucaugcuugcuccaaagcu

SEQ ID NO: 1087700 - RNA, 22 nt, Human
agccaggccuuagggagaggca

SEQ ID NO: 1087701 - RNA, 22 nt, Human
ugaguggagacuguguguagag

SEQ ID NO: 1087702 - RNA, 23 nt, Human
uuagagaugauuaaaaaaucuug

SEQ ID NO: 1087703 - RNA, 22 nt, Human
uggcaggaaaaacauuggagau

SEQ ID NO: 1087704 - RNA, 22 nt, Human
cugaggcucugggugucacugu

SEQ ID NO: 1087705 - RNA, 22 nt, Human
uuuuauacacaugaacaugcag

SEQ ID NO: 1087706 - RNA, 22 nt, Human
uugaaauacugcauuguucagu

SEQ ID NO: 1087707 - RNA, 22 nt, Human
accucugcuucccggguucaag

SEQ ID NO: 1087708 - RNA, 19 nt, Human
cugggccagagcuguccuc

SEQ ID NO: 1087709 - RNA, 20 nt, Human
ugagaaaguagagacucagg

SEQ ID NO: 1087710 - RNA, 17 nt, Human
gccagggagaggaagcc

SEQ ID NO: 1087711 - RNA, 19 nt, Human
uuuaaugugugcugcaauc

SEQ ID NO: 1087712 - RNA, 22 nt, Human
cuucucuuccuuugucaacuga

SEQ ID NO: 1087713 - RNA, 22 nt, Human
agggaagagcuugcaagaaacc

SEQ ID NO: 1087714 - RNA, 22 nt, Human
ucugucacugagcucaggauuc

SEQ ID NO: 1087715 - RNA, 22 nt, Human
gcaauauaaccaguugucaugc

SEQ ID NO: 1087716 - RNA, 22 nt, Human
cauugcacuucugcuuuuccuc

SEQ ID NO: 1087717 - RNA, 22 nt, Human
agauaacuuuuggguauucaug

SEQ ID NO: 1087718 - RNA, 22 nt, Human
aaguucaagagugacauauuag

SEQ ID NO: 1087719 - RNA, 22 nt, Human
aaacucuaagacacuguacaau

SEQ ID NO: 1087720 - RNA, 17 nt, Human
uucucuuccuggauagu

SEQ ID NO: 1087721 - RNA, 22 nt, Human
auguacauuuguaguaauauca

SEQ ID NO: 1087722 - RNA, 22 nt, Human
ucaaagcaugguuuugaaagac

SEQ ID NO: 1087723 - RNA, 22 nt, Human
gcugggcucauuugugugucug

SEQ ID NO: 1087724 - RNA, 22 nt, Human
cccucagcuucucccugcagcu

SEQ ID NO: 1087725 - RNA, 17 nt, Human
caggcagacauguaagc

SEQ ID NO: 1087726 - RNA, 23 nt, Human
acugggcuuaugaggaggcuugu

SEQ ID NO: 1087727 - RNA, 22 nt, Human
ugucaugcuuauguuacauacu

SEQ ID NO: 1087728 - RNA, 22 nt, Human
auacaugaggcucauuuauguc

SEQ ID NO: 1087729 - RNA, 22 nt, Human
uggcccugcuguaucaucugcu

SEQ ID NO: 1087730 - RNA, 22 nt, Human
gcacacaggcaguuuccagcca

SEQ ID NO: 1087731 - RNA, 22 nt, Human
ccucugcugcuguugagcaccg

SEQ ID NO: 1087732 - RNA, 22 nt, Human
cccuugcacauuugucuuuaau

SEQ ID NO: 1087733 - RNA, 22 nt, Human
uccugggagagugggacuguau

SEQ ID NO: 1087734 - RNA, 22 nt, Human
gcuccucucccagagcugcagg

SEQ ID NO: 1087735 - RNA, 22 nt, Human
auuucucucauuguuagcuagg

SEQ ID NO: 1087736 - RNA, 22 nt, Human
aagaaauaagacuucucugucc

SEQ ID NO: 1087737 - RNA, 22 nt, Human
gacgccucuucccugcugcacu

SEQ ID NO: 1087738 - RNA, 23 nt, Human
uacauuguggauggaguccuggg

SEQ ID NO: 1087739 - RNA, 22 nt, Human
gcauucuugguggagugcuaaa

SEQ ID NO: 1087740 - RNA, 22 nt, Human
uauaucaccaaaaacaguucug

SEQ ID NO: 1087741 - RNA, 22 nt, Human
aggcagcagccacaaggccuga

SEQ ID NO: 1087742 - RNA, 22 nt, Human
ccugggcagguguggcuucccc

SEQ ID NO: 1087743 - RNA, 22 nt, Human
uguucauucugugaccugguuc

SEQ ID NO: 1087744 - RNA, 22 nt, Human
uacauuuacagagccuucucug

SEQ ID NO: 1087745 - RNA, 22 nt, Human
gcuccucuucucccacugaaug

SEQ ID NO: 1087746 - RNA, 22 nt, Human
uaaagcauguacugugugcuag

SEQ ID NO: 1087747 - RNA, 22 nt, Human
uuuucuggucacauguuauuaa

SEQ ID NO: 1087748 - RNA, 22 nt, Human
ugugugccagccuacgaggagc

SEQ ID NO: 1087749 - RNA, 22 nt, Human
cagggugacaaguggcaaggag

SEQ ID NO: 1087750 - RNA, 22 nt, Human
uuacauucaaggaacucauucu

SEQ ID NO: 1087751 - RNA, 22 nt, Human
gggugagacagaaagagcaaaa

SEQ ID NO: 1087752 - RNA, 22 nt, Human
uucaagauggccccagugagcc

SEQ ID NO: 1087753 - RNA, 22 nt, Human
cagugcagaacacauggaaaau

SEQ ID NO: 1087754 - RNA, 22 nt, Human
cagggugccaaagaacaaauau

SEQ ID NO: 1087755 - RNA, 22 nt, Human
uggagcaggaaacaucuagagg

SEQ ID NO: 1087756 - RNA, 22 nt, Human
ucaggaaggcgccccaucagga

SEQ ID NO: 1087757 - RNA, 22 nt, Human
gugugaaaugguucucuuuguu

SEQ ID NO: 1087758 - RNA, 22 nt, Human
uuuuuuaguuaggucagaaugu

SEQ ID NO: 1087759 - RNA, 22 nt, Human
ggcuggagugggcuccagaguu

SEQ ID NO: 1087760 - RNA, 22 nt, Human
ugcagguggauaucucaucaga

SEQ ID NO: 1087761 - RNA, 22 nt, Human
uuucaaauagaaucuuuccaaa

SEQ ID NO: 1087762 - RNA, 22 nt, Human
uuccaagagccuuucuucuaga

SEQ ID NO: 1087763 - RNA, 22 nt, Human
uuaaaucaggcaucauuucagu

SEQ ID NO: 1087764 - RNA, 22 nt, Human
uucaucaauguguuuaauaaug

SEQ ID NO: 1087765 - RNA, 22 nt, Human
uaucuuuauuaugucuaucugc

SEQ ID NO: 1087766 - RNA, 22 nt, Human
ucuauuuuguuuccagcucuac

SEQ ID NO: 1087767 - RNA, 23 nt, Human
cagugcagggcaacucagacucc

SEQ ID NO: 1087768 - RNA, 22 nt, Human
cuggugggagcagcaggcagcu

SEQ ID NO: 1087769 - RNA, 22 nt, Human
gaggcagcagggcugguuccuu

SEQ ID NO: 1087770 - RNA, 22 nt, Human
caauuauucagugacuuaagag

SEQ ID NO: 1087771 - RNA, 22 nt, Human
acuccagggcugaacgaggccc

SEQ ID NO: 1087772 - RNA, 22 nt, Human
uggggacagggcucagcaauuu

SEQ ID NO: 1087773 - RNA, 22 nt, Human
cccugggagaaguugagggcug

SEQ ID NO: 1087774 - RNA, 22 nt, Human
ggggcacuuccaggcugaggcu

SEQ ID NO: 1087775 - RNA, 22 nt, Human
accagcucagaagccagaaaga

SEQ ID NO: 1087776 - RNA, 17 nt, Human
ugggguguugaaggguu

SEQ ID NO: 1087777 - RNA, 22 nt, Human
aggccuggcaugagaccugaga

SEQ ID NO: 1087778 - RNA, 22 nt, Human
uuauuugugaaucauuuaucua

SEQ ID NO: 1087779 - RNA, 22 nt, Human
cagcaggcucugaguggcugcc

SEQ ID NO: 1087780 - RNA, 22 nt, Human
gucugagaaucuugcauaucau

SEQ ID NO: 1087781 - RNA, 22 nt, Human
agcagguggaaaauucuuauca

SEQ ID NO: 1087782 - RNA, 22 nt, Human
uggccucaagucugagggccuu

SEQ ID NO: 1087783 - RNA, 21 nt, Human
gaugaagcaaucuuucuguug

SEQ ID NO: 1087784 - RNA, 22 nt, Human
uucuuaagacugcaaaucaacc

SEQ ID NO: 1087785 - RNA, 22 nt, Human
ggcaggagaaaggucucuucuu

SEQ ID NO: 1087786 - RNA, 22 nt, Human
acugagagucaagauagcaugg

SEQ ID NO: 1087787 - RNA, 22 nt, Human
cuacaccuugaucuaacauuuu

SEQ ID NO: 1087788 - RNA, 22 nt, Human
gggugacauuucccaaugagcc

SEQ ID NO: 1087789 - RNA, 22 nt, Human
agguuuucagcuguauccugag

SEQ ID NO: 1087790 - RNA, 22 nt, Human
agcuggguggagggcccacggu

SEQ ID NO: 1087791 - RNA, 22 nt, Human
cagcagcugcgugcccaggccg

SEQ ID NO: 1087792 - RNA, 22 nt, Human
agggagagguugaaaccucagu

SEQ ID NO: 1087793 - RNA, 22 nt, Human
ucaggcaggacaauuauuuagg

SEQ ID NO: 1087794 - RNA, 22 nt, Human
agcugagccagcagcaacagga

SEQ ID NO: 1087795 - RNA, 22 nt, Human
guacauguugguuguuuccagu

SEQ ID NO: 1087796 - RNA, 22 nt, Human
caaauacugagcacgcaaucaa

SEQ ID NO: 1087797 - RNA, 22 nt, Human
cagggccagccgcagcauccac

SEQ ID NO: 1087798 - RNA, 22 nt, Human
auacaacagaaaaugauuauuc

SEQ ID NO: 1087799 - RNA, 22 nt, Human
uuaauuuucucaucugugaaau

SEQ ID NO: 1087800 - RNA, 22 nt, Human
ccccagggucaguguguggagg

SEQ ID NO: 1087801 - RNA, 22 nt, Human
ucugguaaccuuuaucccuccu

SEQ ID NO: 1087802 - RNA, 22 nt, Human
uucuucaaacaaaaguggcaug

SEQ ID NO: 1087803 - RNA, 22 nt, Human
ccagggcucaggcucccagugg

SEQ ID NO: 1087804 - RNA, 22 nt, Human
acauuuauauaacucacuagga

SEQ ID NO: 1087805 - RNA, 22 nt, Human
gcacccagccagcaucucagag

SEQ ID NO: 1087806 - RNA, 22 nt, Human
ccagagccagagaggugccugc

SEQ ID NO: 1087807 - RNA, 22 nt, Human
uaaagucaagguacuguuucac

SEQ ID NO: 1087808 - RNA, 22 nt, Human
aaagagcccuuccaugacucuu

SEQ ID NO: 1087809 - RNA, 22 nt, Human
ucagacaggcuucuuucucccu

SEQ ID NO: 1087810 - RNA, 22 nt, Human
cuucuguguagaaagguagccc

SEQ ID NO: 1087811 - RNA, 22 nt, Human
ucaaaaauguuuuauauuggua

SEQ ID NO: 1087812 - RNA, 22 nt, Human
uuggcuucuugugaaaucugag

SEQ ID NO: 1087813 - RNA, 22 nt, Human
aaaugcagcagcuaauugaaaa

SEQ ID NO: 1087814 - RNA, 22 nt, Human
uaaugcuucaauuuccuugauu

SEQ ID NO: 1087815 - RNA, 22 nt, Human
uuaacacagggggagacaaagu

SEQ ID NO: 1087816 - RNA, 22 nt, Human
acagcuguggucuccuuagugu

SEQ ID NO: 1087817 - RNA, 22 nt, Human
agcaaauauuuuguugaagugc

SEQ ID NO: 1087818 - RNA, 22 nt, Human
auuugaaaucccuucuacugua

SEQ ID NO: 1087819 - RNA, 22 nt, Human
cuccucuggaaauuccucugcc

SEQ ID NO: 1087820 - RNA, 22 nt, Human
gggagguguuccaguguuggua

SEQ ID NO: 1087821 - RNA, 22 nt, Human
gggcugggauugcuugcuguga

SEQ ID NO: 1087822 - RNA, 22 nt, Human
uaauucuagauugacauuuuga

SEQ ID NO: 1087823 - RNA, 22 nt, Human
uccugagagguuuauaacgcag

SEQ ID NO: 1087824 - RNA, 22 nt, Human
gaaacuuacuuacucacauuuc

SEQ ID NO: 1087825 - RNA, 22 nt, Human
gcagagugguuucagaguugag

SEQ ID NO: 1087826 - RNA, 22 nt, Human
guuucuggagugacuauaacug

SEQ ID NO: 1087827 - RNA, 22 nt, Human
acaaugaauuuaauaccuuauu

SEQ ID NO: 1087828 - RNA, 22 nt, Human
cugcagcuauauuuucccacag

SEQ ID NO: 1087829 - RNA, 22 nt, Human
gacccuguuucuacaaauaauu

SEQ ID NO: 1087830 - RNA, 22 nt, Human
gcagauggacuguaugaccuga

SEQ ID NO: 1087831 - RNA, 22 nt, Human
ggcacacagcggaauuugcucu

SEQ ID NO: 1087832 - RNA, 22 nt, Human
agaaguuaauuccugaaauucu

SEQ ID NO: 1087833 - RNA, 22 nt, Human
uugaaagucacaauggcauuaa

SEQ ID NO: 1087834 - RNA, 22 nt, Human
cuuucuaauucucccauagucu

SEQ ID NO: 1087835 - RNA, 22 nt, Human
uucaguuucagucuugcaaaaa

SEQ ID NO: 1087836 - RNA, 22 nt, Human
cugccuggccugaucuccacgc

SEQ ID NO: 1087837 - RNA, 17 nt, Human
cucuccuuccucugagg

SEQ ID NO: 1087838 - RNA, 22 nt, Human
ugcagggcuauaacuccauucu

SEQ ID NO: 1087839 - RNA, 22 nt, Human
ccaggguuuaaauucugacuau

SEQ ID NO: 1087840 - RNA, 22 nt, Human
ccucccuggccagagcagcagc

SEQ ID NO: 1087841 - RNA, 22 nt, Human
cauuugcucugugucaguggca

SEQ ID NO: 1087842 - RNA, 22 nt, Human
acaaaugacuauuugguacagg

SEQ ID NO: 1087843 - RNA, 22 nt, Human
acacaucagaaauaugaaugag

SEQ ID NO: 1087844 - RNA, 22 nt, Human
aagggaaaucauauggugcagu

SEQ ID NO: 1087845 - RNA, 22 nt, Human
aaagcauauuaggacugaauua

SEQ ID NO: 1087846 - RNA, 22 nt, Human
gggcagguuggcaucccgggca

SEQ ID NO: 1087847 - RNA, 22 nt, Human
ugcaggugauucugaugcaguu

SEQ ID NO: 1087848 - RNA, 20 nt, Human
caccacagaauuggggacag

SEQ ID NO: 1087849 - RNA, 18 nt, Human
cucaggccuuucccugug

SEQ ID NO: 1087850 - RNA, 22 nt, Human
gcagugcuuuagucuguccuuu

SEQ ID NO: 1087851 - RNA, 22 nt, Human
gucaccagugcuaagaggugga

SEQ ID NO: 1087852 - RNA, 22 nt, Human
acaguguccuuguggucccugu

SEQ ID NO: 1087853 - RNA, 22 nt, Human
ucagcuggcaguucagaggcug

SEQ ID NO: 1087854 - RNA, 22 nt, Human
uauauugcuagugguacuguaa

SEQ ID NO: 1087855 - RNA, 22 nt, Human
cagaguggcagucccaggccca

SEQ ID NO: 1087856 - RNA, 22 nt, Human
ggugaaggaggaagcugaugga

SEQ ID NO: 1087857 - RNA, 22 nt, Human
agggacagaugaaugacugagu

SEQ ID NO: 1087858 - RNA, 22 nt, Human
caggaggaggugagguagaacu

SEQ ID NO: 1087859 - RNA, 23 nt, Human
cuggaagugcuuuuauagcuuug

SEQ ID NO: 1087860 - RNA, 22 nt, Human
gagcugagaucgugccauugca

SEQ ID NO: 1087861 - RNA, 22 nt, Human
cccacucuggcucccuucuagu

SEQ ID NO: 1087862 - RNA, 22 nt, Human
aguuucacagaggguuagacgc

SEQ ID NO: 1087863 - RNA, 22 nt, Human
cccagggucccugcucucugug

SEQ ID NO: 1087864 - RNA, 17 nt, Human
gcacugaacaauccugu

SEQ ID NO: 1087865 - RNA, 22 nt, Human
uggaccacucuggugcccaugu

SEQ ID NO: 1087866 - RNA, 22 nt, Human
ugggggagauugugcaucucua

SEQ ID NO: 1087867 - RNA, 22 nt, Human
cagaggcaggauaagaacugcg

SEQ ID NO: 1087868 - RNA, 22 nt, Human
uaauuuaauuucaugccagccu

SEQ ID NO: 1087869 - RNA, 22 nt, Human
cagcccuguccagcagagggug

SEQ ID NO: 1087870 - RNA, 22 nt, Human
uugaggcauuacuguaaugaga

SEQ ID NO: 1087871 - RNA, 22 nt, Human
cagaguguaucuguguaagcau

SEQ ID NO: 1087872 - RNA, 22 nt, Human
cuggguggaucgcagccccagg

SEQ ID NO: 1087873 - RNA, 22 nt, Human
guuugaaaugucugcaagggaa

SEQ ID NO: 1087874 - RNA, 22 nt, Human
acaguauauauagucuaaaagc

SEQ ID NO: 1087875 - RNA, 22 nt, Human
aaaauagccucacauaauugcu

SEQ ID NO: 1087876 - RNA, 22 nt, Human
aguucuuuugugaacauaugcu

SEQ ID NO: 1087877 - RNA, 22 nt, Human
ucuuggagacucuuguauauuu

SEQ ID NO: 1087878 - RNA, 22 nt, Human
ugaacucuccaggcaaaugauc

SEQ ID NO: 1087879 - RNA, 22 nt, Human
gccacagcggggccgcuagagc

SEQ ID NO: 1087880 - RNA, 22 nt, Human
uaauuauagccgcuauuuugcu

SEQ ID NO: 1087881 - RNA, 22 nt, Human
ucuggaaguuagaggaggaaag

SEQ ID NO: 1087882 - RNA, 22 nt, Human
aagaucaagugcuggcaguguu

SEQ ID NO: 1087883 - RNA, 22 nt, Human
agggagcucaguuggaagcggu

SEQ ID NO: 1087884 - RNA, 22 nt, Human
gggacagaaggaagugagcaca

SEQ ID NO: 1087885 - RNA, 22 nt, Human
augaaauaucuugaagaaauuc

SEQ ID NO: 1087886 - RNA, 22 nt, Human
gugagcaggauaggggcucccu

SEQ ID NO: 1087887 - RNA, 20 nt, Human
ucagugauuuugaagaggaa

SEQ ID NO: 1087888 - RNA, 22 nt, Human
uccagggagagccgcugcucca

SEQ ID NO: 1087889 - RNA, 22 nt, Human
ccuggacucaggcugugggcac

SEQ ID NO: 1087890 - RNA, 22 nt, Human
cagucuuugaugcauccuagcc

SEQ ID NO: 1087891 - RNA, 22 nt, Human
gagcacugauuuauuuuugucu

SEQ ID NO: 1087892 - RNA, 22 nt, Human
ugagcagaggccagcaccuggg

SEQ ID NO: 1087893 - RNA, 22 nt, Human
ucagaguccuuuggccugacag

SEQ ID NO: 1087894 - RNA, 22 nt, Human
uugaaaggguuaaagugguaaa

SEQ ID NO: 1087895 - RNA, 22 nt, Human
auacuuacuuuucuucagacua

SEQ ID NO: 1087896 - RNA, 22 nt, Human
cugaaccaucucuguucuguau

SEQ ID NO: 1087897 - RNA, 22 nt, Human
gcugcuggagagcgagacuguu

SEQ ID NO: 1087898 - RNA, 22 nt, Human
acaagcuuccaggugaugcuga

SEQ ID NO: 1087899 - RNA, 17 nt, Human
agcuccugcccauggcu

SEQ ID NO: 1087900 - RNA, 22 nt, Human
uucuguauuucaaugucuuuau

SEQ ID NO: 1087901 - RNA, 22 nt, Human
gcccucaggcagggagucuuuc

SEQ ID NO: 1087902 - RNA, 22 nt, Human
agcuccugucucaagggagccu

SEQ ID NO: 1087903 - RNA, 21 nt, Human
ugaggcuguuguaccagggag

SEQ ID NO: 1087904 - RNA, 22 nt, Human
agguggggugagcugcagacua

SEQ ID NO: 1087905 - RNA, 22 nt, Human
gccugcugaagccagagugugu

SEQ ID NO: 1087906 - RNA, 22 nt, Human
agucucugugagcucccaaugg

SEQ ID NO: 1087907 - RNA, 22 nt, Human
gagugguaguuucuagaggugu

SEQ ID NO: 1087908 - RNA, 22 nt, Human
cucacugcaaguuccaccuacc

SEQ ID NO: 1087909 - RNA, 22 nt, Human
uauaagaaacaaggcaaauuuu

SEQ ID NO: 1087910 - RNA, 22 nt, Human
ucuccucaccaccagcagcaga

SEQ ID NO: 1087911 - RNA, 22 nt, Human
cagcugugaauugucuuaucua

SEQ ID NO: 1087912 - RNA, 22 nt, Human
acaauacuauuuucaguauccu

SEQ ID NO: 1087913 - RNA, 22 nt, Human
cauucaaacauuaauuuauuca

SEQ ID NO: 1087914 - RNA, 22 nt, Human
uacuacauacagaauuuagaga

SEQ ID NO: 1087915 - RNA, 22 nt, Human
ggugagaggcagaggacagcuu

SEQ ID NO: 1087916 - RNA, 22 nt, Human
uuaaauauuuucagcaggguca

SEQ ID NO: 1087917 - RNA, 22 nt, Human
gucuggaggaggaagaaggcac

SEQ ID NO: 1087918 - RNA, 22 nt, Human
agcucccagucuccucuccaug

SEQ ID NO: 1087919 - RNA, 22 nt, Human
gacauuuguuccucuaagugac

SEQ ID NO: 1087920 - RNA, 22 nt, Human
ccagagccucaacacagguccu

SEQ ID NO: 1087921 - RNA, 22 nt, Human
ucaccccuacauuucccuugcu

SEQ ID NO: 1087922 - RNA, 22 nt, Human
cuagaacagaaaguacaggaaa

SEQ ID NO: 1087923 - RNA, 22 nt, Human
gggagagagaaaacguggcgca

SEQ ID NO: 1087924 - RNA, 22 nt, Human
ugaacacauauuaggugcucau

SEQ ID NO: 1087925 - RNA, 22 nt, Human
cuuuuaaugggagcaguauuug

SEQ ID NO: 1087926 - RNA, 22 nt, Human
uagugaaacaguuaucaaucug

SEQ ID NO: 1087927 - RNA, 22 nt, Human
uuuuuauaccaccucucacuua

SEQ ID NO: 1087928 - RNA, 22 nt, Human
auacaaguggccacuugaauuc

SEQ ID NO: 1087929 - RNA, 22 nt, Human
auuugauuagcuguguaauuuu

SEQ ID NO: 1087930 - RNA, 22 nt, Human
ucuggggagcagcccuggugag

SEQ ID NO: 1087931 - RNA, 22 nt, Human
cugaaugucgaucagcuugggu

SEQ ID NO: 1087932 - RNA, 20 nt, Human
cuaggaacuauggucuggcu

SEQ ID NO: 1087933 - RNA, 19 nt, Human
uccauaaugaagauagagg

SEQ ID NO: 1087934 - RNA, 22 nt, Human
ugggaaagcugcagaaauucuc

SEQ ID NO: 1087935 - RNA, 22 nt, Human
uccugcagaccucagucagguc

SEQ ID NO: 1087936 - RNA, 19 nt, Human
uaugucccuuucccccauu

SEQ ID NO: 1087937 - RNA, 17 nt, Human
gucaauauuguugacag

SEQ ID NO: 1087938 - RNA, 22 nt, Human
ugauacuuuggagacuugagua

SEQ ID NO: 1087939 - RNA, 22 nt, Human
agacaucaaugaucagagguag

SEQ ID NO: 1087940 - RNA, 22 nt, Human
aggaaaacagaccaaggagcuc

SEQ ID NO: 1087941 - RNA, 22 nt, Human
acaggggaccuaggacccucgg

SEQ ID NO: 1087942 - RNA, 22 nt, Human
agcucagggcgaucugucucgg

SEQ ID NO: 1087943 - RNA, 22 nt, Human
ugcugugcuggcggcagaggcc

SEQ ID NO: 1087944 - RNA, 22 nt, Human
gcgucucaaggcccccaggcca

SEQ ID NO: 1087945 - RNA, 22 nt, Human
uaucacaggugugauuuacauu

SEQ ID NO: 1087946 - RNA, 22 nt, Human
cagagcuggagaaguggauuua

SEQ ID NO: 1087947 - RNA, 22 nt, Human
agucuccuuggccucaaugccu

SEQ ID NO: 1087948 - RNA, 22 nt, Human
ggcuuaaguccugaauuuaugc

SEQ ID NO: 1087949 - RNA, 22 nt, Human
gggccccuuguaucucuggcuc

SEQ ID NO: 1087950 - RNA, 22 nt, Human
agcuaagacuuagugacuuagu

SEQ ID NO: 1087951 - RNA, 22 nt, Human
ggauaagaaaauuguaauaacu

SEQ ID NO: 1087952 - RNA, 20 nt, Human
guuuuucucucuugccacua

SEQ ID NO: 1087953 - RNA, 22 nt, Human
gggcugagucugcugccuguca

SEQ ID NO: 1087954 - RNA, 22 nt, Human
ucuggagcuggagggcaaggca

SEQ ID NO: 1087955 - RNA, 18 nt, Human
uuugggcugauguugggc

SEQ ID NO: 1087956 - RNA, 22 nt, Human
aggcuucuacguggucccaggg

SEQ ID NO: 1087957 - RNA, 22 nt, Human
cugagcugaaacuugagaggcu

SEQ ID NO: 1087958 - RNA, 22 nt, Human
ucagaugguacuaauuuaagga

SEQ ID NO: 1087959 - RNA, 22 nt, Human
gcagacaggcccaguggaggga

SEQ ID NO: 1087960 - RNA, 22 nt, Human
cuggaggaccacagaagcuggu

SEQ ID NO: 1087961 - RNA, 22 nt, Human
augcugugagugugccgcagag

SEQ ID NO: 1087962 - RNA, 22 nt, Human
ccgggcgggggcucucgucacc

SEQ ID NO: 1087963 - RNA, 22 nt, Human
agaggaggcucugggaucgucc

SEQ ID NO: 1087964 - RNA, 22 nt, Human
caguacuuggucaaggaagcag

SEQ ID NO: 1087965 - RNA, 22 nt, Human
uucauuagcaaggucuucaagu

SEQ ID NO: 1087966 - RNA, 22 nt, Human
gcaagcaagcagguagagcuga

SEQ ID NO: 1087967 - RNA, 22 nt, Human
augggaggaagagaagaugucu

SEQ ID NO: 1087968 - RNA, 22 nt, Human
gcaggugggagccgcugccuga

SEQ ID NO: 1087969 - RNA, 22 nt, Human
guguuuccucuagaagccaugg

SEQ ID NO: 1087970 - RNA, 22 nt, Human
ucagggaagagagaucuccuag

SEQ ID NO: 1087971 - RNA, 21 nt, Human
agaagggauugugguaaagau

SEQ ID NO: 1087972 - RNA, 22 nt, Human
gggcagugaauauuggugggaa

SEQ ID NO: 1087973 - RNA, 22 nt, Human
agcagagguuuguuggaaaccu

SEQ ID NO: 1087974 - RNA, 22 nt, Human
cacagaacauuuuuagaugcag

SEQ ID NO: 1087975 - RNA, 22 nt, Human
acugcuuuuagaaaucuauaga

SEQ ID NO: 1087976 - RNA, 22 nt, Human
ggcgaggccgggacaggcugga

SEQ ID NO: 1087977 - RNA, 21 nt, Human
gccacguuucagucuucucag

SEQ ID NO: 1087978 - RNA, 22 nt, Human
gcauccagucuuggcuccugga

SEQ ID NO: 1087979 - RNA, 22 nt, Human
uuuccuuuccaaaauucugccu

SEQ ID NO: 1087980 - RNA, 22 nt, Human
uuaguuguaaaauggaauuugu

SEQ ID NO: 1087981 - RNA, 22 nt, Human
gugcaguugauaguuuuaguga

SEQ ID NO: 1087982 - RNA, 22 nt, Human
ucucaguguuguucugcagaug

SEQ ID NO: 1087983 - RNA, 21 nt, Human
aagggagauaggaaucaggcc

SEQ ID NO: 1087984 - RNA, 20 nt, Human
acacacagagacaugcgcau

SEQ ID NO: 1087985 - RNA, 22 nt, Human
aucuggcuuucuuaaugacuua

SEQ ID NO: 1087986 - RNA, 22 nt, Human
ugucugguggguugacaggcag

SEQ ID NO: 1087987 - RNA, 22 nt, Human
cugccucacauuggcuguguga

SEQ ID NO: 1087988 - RNA, 22 nt, Human
cccaggacucggcacucuccuu

SEQ ID NO: 1087989 - RNA, 22 nt, Human
gcagagccagaauggccaggac

SEQ ID NO: 1087990 - RNA, 22 nt, Human
acagccuggacuggcucucugc

SEQ ID NO: 1087991 - RNA, 22 nt, Human
gagcucaggagcaucagaagaa

SEQ ID NO: 1087992 - RNA, 22 nt, Human
uccaugugccaaggggcagagg

SEQ ID NO: 1087993 - RNA, 22 nt, Human
agagcugggugaagugccauca

SEQ ID NO: 1087994 - RNA, 22 nt, Human
uggcaguggcucagagugcaga

SEQ ID NO: 1087995 - RNA, 20 nt, Human
gcaaggcacagugaggaggg

SEQ ID NO: 1087996 - RNA, 22 nt, Human
uagcauuuggacauugucaccu

SEQ ID NO: 1087997 - RNA, 22 nt, Human
gaagaaggugcuacacagggca

SEQ ID NO: 1087998 - RNA, 22 nt, Human
cuaguauuuaaaggcuaugauu

SEQ ID NO: 1087999 - RNA, 22 nt, Human
cuggcagcguguuuaugaacau

SEQ ID NO: 1088000 - RNA, 22 nt, Human
cagcaggguauacagggaauuu

SEQ ID NO: 1088001 - RNA, 22 nt, Human
aagggcuggaucucucugagca

SEQ ID NO: 1088002 - RNA, 22 nt, Human
cugcugaucagggcaaagcaaa

SEQ ID NO: 1088003 - RNA, 22 nt, Human
cuguugcaucauggcucuuaau

SEQ ID NO: 1088004 - RNA, 22 nt, Human
uuuccuuuuggcuaggugugaa

SEQ ID NO: 1088005 - RNA, 22 nt, Human
ugaggggagcuagcaugccuug

SEQ ID NO: 1088006 - RNA, 22 nt, Human
cuacaaaaguaauugugguuuu

SEQ ID NO: 1088007 - RNA, 22 nt, Human
aucugcuucagugauaugugaa

SEQ ID NO: 1088008 - RNA, 18 nt, Human
gggaagccgggaagccgg

SEQ ID NO: 1088009 - RNA, 22 nt, Human
gagggcaguagccucguacccu

SEQ ID NO: 1088010 - RNA, 19 nt, Human
uucuccagccugaccugag

SEQ ID NO: 1088011 - RNA, 22 nt, Human
acaguggaauuuguagaugugu

SEQ ID NO: 1088012 - RNA, 21 nt, Human
agagaagaggacuuucucaca

SEQ ID NO: 1088013 - RNA, 22 nt, Human
aaacacagauuucuuuguccca

SEQ ID NO: 1088014 - RNA, 22 nt, Human
aggcuucuuagauuggcuggag

SEQ ID NO: 1088015 - RNA, 20 nt, Human
accaggagauggaggcaggg

SEQ ID NO: 1088016 - RNA, 22 nt, Human
aagcugccacacggugaguacu

SEQ ID NO: 1088017 - RNA, 22 nt, Human
ugcuauaagaauuauauuacuc

SEQ ID NO: 1088018 - RNA, 22 nt, Human
ugucucaguacacuccgauguu

SEQ ID NO: 1088019 - RNA, 22 nt, Human
ccaguccagugccaugcauggc

SEQ ID NO: 1088020 - RNA, 22 nt, Human
auauucguggucaaguaaggcc

SEQ ID NO: 1088021 - RNA, 22 nt, Human
ugggcagggaucucuuuugcaa

SEQ ID NO: 1088022 - RNA, 22 nt, Human
uagugcuugagucucuccguac

SEQ ID NO: 1088023 - RNA, 22 nt, Human
ggcugccuucagacuccagcuu

SEQ ID NO: 1088024 - RNA, 22 nt, Human
guccaggaagcaauaaauagaa

SEQ ID NO: 1088025 - RNA, 19 nt, Human
augagcaauaguuuuaauc

SEQ ID NO: 1088026 - RNA, 22 nt, Human
ccaggcaacggagcccacugcc
